United States Patent Application Publication US 2007/0042381 A1 - sequence listing, part 33

SEQ ID NO: 1464693 - RNA, 13 nt, Human
aaaggacuguaau

SEQ ID NO: 1464694 - RNA, 17 nt, Human
guagcugggacuacagg

SEQ ID NO: 1464695 - RNA, 14 nt, Human
aaauccuugaagau

SEQ ID NO: 1464696 - RNA, 19 nt, Human
aaauccuuagaucuggcau

SEQ ID NO: 1464697 - RNA, 13 nt, Human
aaaucgaaugaaa

SEQ ID NO: 1464698 - RNA, 20 nt, Human
aaaucgaaugaaauuaacug

SEQ ID NO: 1464699 - RNA, 21 nt, Human
aaauccuuagaucuggcaugu

SEQ ID NO: 1464700 - RNA, 13 nt, Human
aaaucuaccacug

SEQ ID NO: 1464701 - RNA, 17 nt, Human
aaaucuaccacuguaug

SEQ ID NO: 1464702 - RNA, 11 nt, Human
aaaugagaaau

SEQ ID NO: 1464703 - RNA, 11 nt, Human
aaaugaagaaa

SEQ ID NO: 1464704 - RNA, 16 nt, Human
aaaugagaaaucuaaa

SEQ ID NO: 1464705 - RNA, 14 nt, Human
aaaugagaaaucua

SEQ ID NO: 1464706 - RNA, 13 nt, Human
aaaugagaaaucu

SEQ ID NO: 1464707 - RNA, 13 nt, Human
aaaugcauguugc

SEQ ID NO: 1464708 - RNA, 20 nt, Human
aaaugcauuauaggaucauu

SEQ ID NO: 1464709 - RNA, 15 nt, Human
aaaugcauaaaugca

SEQ ID NO: 1464710 - RNA, 13 nt, Human
aaaugaucuaaac

SEQ ID NO: 1464711 - RNA, 17 nt, Human
aaaugauuacuaaggaa

SEQ ID NO: 1464712 - RNA, 14 nt, Human
aaaugauuguagua

SEQ ID NO: 1464713 - RNA, 19 nt, Human
aaauggcuuccuggcaaua

SEQ ID NO: 1464714 - RNA, 22 nt, Human
aaaugccaugaugccucugucu

SEQ ID NO: 1464715 - RNA, 14 nt, Human
aaaugcauuucuaa

SEQ ID NO: 1464716 - RNA, 21 nt, Human
guauggguuagggaaaacauu

SEQ ID NO: 1464717 - RNA, 19 nt, Human
guauguguaucucacacuc

SEQ ID NO: 1464718 - RNA, 14 nt, Human
guaugauucccagc

SEQ ID NO: 1464719 - RNA, 13 nt, Human
guauggaaauaaa

SEQ ID NO: 1464720 - RNA, 22 nt, Human
guauauugauccagaaagaaaa

SEQ ID NO: 1464721 - RNA, 18 nt, Human
guauauuacaaugaucac

SEQ ID NO: 1464722 - RNA, 15 nt, Human
guauauuacaaugau

SEQ ID NO: 1464723 - RNA, 17 nt, Human
guauauuacaaugauca

SEQ ID NO: 1464724 - RNA, 18 nt, Human
guauaaaagggacugaga

SEQ ID NO: 1464725 - RNA, 21 nt, Human
guauaaaagccuguuuaagag

SEQ ID NO: 1464726 - RNA, 18 nt, Human
guauaaaagccuguuuaa

SEQ ID NO: 1464727 - RNA, 17 nt, Human
guauaaaagccuguuua

SEQ ID NO: 1464728 - RNA, 16 nt, Human
guauuuaauucauguu

SEQ ID NO: 1464729 - RNA, 20 nt, Human
guauuuaauagguuuggaca

SEQ ID NO: 1464730 - RNA, 22 nt, Human
aaauguuaugacuauguaaacu

SEQ ID NO: 1464731 - RNA, 19 nt, Human
aaauucccuucaucuggaa

SEQ ID NO: 1464732 - RNA, 16 nt, Human
aaauucccuucaucug

SEQ ID NO: 1464733 - RNA, 15 nt, Human
aaauuauaucaauuu

SEQ ID NO: 1464734 - RNA, 18 nt, Human
aaauuucagcagcugcag

SEQ ID NO: 1464735 - RNA, 17 nt, Human
aaauuucagcagcugca

SEQ ID NO: 1464736 - RNA, 18 nt, Human
aaauucccuucaucugga

SEQ ID NO: 1464737 - RNA, 20 nt, Human
aaauuuaguauuuuguuuca

SEQ ID NO: 1464738 - RNA, 17 nt, Human
aaauuuacaucauuucu

SEQ ID NO: 1464739 - RNA, 22 nt, Human
aaauuuccugggagcuuuugua

SEQ ID NO: 1464740 - RNA, 16 nt, Human
aaauuuauauuguaaa

SEQ ID NO: 1464741 - RNA, 12 nt, Human
aaauuucagauu

SEQ ID NO: 1464742 - RNA, 16 nt, Human
gucaaauugugugaaa

SEQ ID NO: 1464743 - RNA, 14 nt, Human
gucaacaguuuucc

SEQ ID NO: 1464744 - RNA, 21 nt, Human
gucaacaguuuuccuaugcuu

SEQ ID NO: 1464745 - RNA, 22 nt, Human
gucaacaguuuuccuaugcuuu

SEQ ID NO: 1464746 - RNA, 19 nt, Human
gucaacucauauuuucaug

SEQ ID NO: 1464747 - RNA, 23 nt, Human
gucaaaaauuaaaccggaccauc

SEQ ID NO: 1464748 - RNA, 13 nt, Human
gucaaaaauuaaa

SEQ ID NO: 1464749 - RNA, 14 nt, Human
gucaaaaauuaaac

SEQ ID NO: 1464750 - RNA, 20 nt, Human
gucuccuaagcuggagugca

SEQ ID NO: 1464751 - RNA, 12 nt, Human
gucucccuccuc

SEQ ID NO: 1464752 - RNA, 16 nt, Human
gucucccuccucugcc

SEQ ID NO: 1464753 - RNA, 10 nt, Human
aaccaaguuc

SEQ ID NO: 1464754 - RNA, 16 nt, Human
aaccaaagaagaaagu

SEQ ID NO: 1464755 - RNA, 17 nt, Human
aaccacacccacacuca

SEQ ID NO: 1464756 - RNA, 20 nt, Human
aaccacauuggagauguuua

SEQ ID NO: 1464757 - RNA, 20 nt, Human
aaccuagggugauauuaacc

SEQ ID NO: 1464758 - RNA, 22 nt, Human
aaccuaugauauuuucugugcc

SEQ ID NO: 1464759 - RNA, 22 nt, Human
aaccuauuucuuaaacacuugc

SEQ ID NO: 1464760 - RNA, 15 nt, Human
aaccccagacacugg

SEQ ID NO: 1464761 - RNA, 16 nt, Human
aaccucaacugccuac

SEQ ID NO: 1464762 - RNA, 17 nt, Human
aaccucaacugccuacu

SEQ ID NO: 1464763 - RNA, 18 nt, Human
aaccucaacugccuacuc

SEQ ID NO: 1464764 - RNA, 20 nt, Human
aaccauguaaagaacauaaa

SEQ ID NO: 1464765 - RNA, 17 nt, Human
aacccauauuguaaaac

SEQ ID NO: 1464766 - RNA, 21 nt, Human
aacccauauuguaaaacaggu

SEQ ID NO: 1464767 - RNA, 14 nt, Human
aacuccagaaagug

SEQ ID NO: 1464768 - RNA, 18 nt, Human
aacuagccaaaccaggac

SEQ ID NO: 1464769 - RNA, 21 nt, Human
aacuagccaaaccaggacccu

SEQ ID NO: 1464770 - RNA, 21 nt, Human
aacuccagaaagugacaagcu

SEQ ID NO: 1464771 - RNA, 18 nt, Human
aacucguuaauuuguagu

SEQ ID NO: 1464772 - RNA, 19 nt, Human
aacucgugucuggcacagc

SEQ ID NO: 1464773 - RNA, 15 nt, Human
aacucguuuuuuaca

SEQ ID NO: 1464774 - RNA, 17 nt, Human
aaccuggagauggugga

SEQ ID NO: 1464775 - RNA, 15 nt, Human
aaccuggagauggug

SEQ ID NO: 1464776 - RNA, 12 nt, Human
aacuaaugccuu

SEQ ID NO: 1464777 - RNA, 15 nt, Human
aacuaaugccuuacu

SEQ ID NO: 1464778 - RNA, 23 nt, Human
aacuaauuuuuauuuuugcugag

SEQ ID NO: 1464779 - RNA, 20 nt, Human
aacuacaaccaauggaaugu

SEQ ID NO: 1464780 - RNA, 14 nt, Human
aacuacagucuaaa

SEQ ID NO: 1464781 - RNA, 23 nt, Human
gucugcucagacagaaccccuac

SEQ ID NO: 1464782 - RNA, 14 nt, Human
gucuuccucugucu

SEQ ID NO: 1464783 - RNA, 14 nt, Human
gucuuccugacacu

SEQ ID NO: 1464784 - RNA, 18 nt, Human
gucuuccugacacuuuaa

SEQ ID NO: 1464785 - RNA, 19 nt, Human
gucuuccugacacuuuaau

SEQ ID NO: 1464786 - RNA, 19 nt, Human
gucuuauauauuguagaua

SEQ ID NO: 1464787 - RNA, 21 nt, Human
guccaagcauuuagauguaua

SEQ ID NO: 1464788 - RNA, 12 nt, Human
aacacugccagc

SEQ ID NO: 1464789 - RNA, 22 nt, Human
aacacugccagcauuucccuuc

SEQ ID NO: 1464790 - RNA, 14 nt, Human
aacaaugcuguauu

SEQ ID NO: 1464791 - RNA, 13 nt, Human
aacaauuuaugaa

SEQ ID NO: 1464792 - RNA, 16 nt, Human
aacaauuuaugaauug

SEQ ID NO: 1464793 - RNA, 15 nt, Human
aacaagucagucauu

SEQ ID NO: 1464794 - RNA, 12 nt, Human
aacaaguauuug

SEQ ID NO: 1464795 - RNA, 20 nt, Human
aacaaguauuuguuaauuua

SEQ ID NO: 1464796 - RNA, 23 nt, Human
aacaaguauuuguuaauuuagaa

SEQ ID NO: 1464797 - RNA, 18 nt, Human
aacaagucagucauucag

SEQ ID NO: 1464798 - RNA, 15 nt, Human
aacaaggaugaauua

SEQ ID NO: 1464799 - RNA, 21 nt, Human
aacaagccuccuuuuaaagua

SEQ ID NO: 1464800 - RNA, 17 nt, Human
aaauuuuuguaguagcg

SEQ ID NO: 1464801 - RNA, 23 nt, Human
aaauuuuuaaucuuuaauuuuac

SEQ ID NO: 1464802 - RNA, 19 nt, Human
aacaguuguguuugaagca

SEQ ID NO: 1464803 - RNA, 23 nt, Human
aacagaaaaauauguaccaagaa

SEQ ID NO: 1464804 - RNA, 13 nt, Human
aacagaaacaaaa

SEQ ID NO: 1464805 - RNA, 16 nt, Human
aacagaaacaaaaaca

SEQ ID NO: 1464806 - RNA, 18 nt, Human
aacagaacauagacagaa

SEQ ID NO: 1464807 - RNA, 22 nt, Human
aacauuuguucuauagcuuuuc

SEQ ID NO: 1464808 - RNA, 17 nt, Human
guccuuaggccucugag

SEQ ID NO: 1464809 - RNA, 18 nt, Human
guccuuaggccucugaga

SEQ ID NO: 1464810 - RNA, 13 nt, Human
guccuucaaaggc

SEQ ID NO: 1464811 - RNA, 20 nt, Human
aacauuuguucuauagcuuu

SEQ ID NO: 1464812 - RNA, 18 nt, Human
aacauuugguaaggggaa

SEQ ID NO: 1464813 - RNA, 19 nt, Human
aacauuuauuuugacauaa

SEQ ID NO: 1464814 - RNA, 22 nt, Human
aacauuucuauagccaaaaaua

SEQ ID NO: 1464815 - RNA, 13 nt, Human
aacauuguguucc

SEQ ID NO: 1464816 - RNA, 23 nt, Human
aacauuguguucccauuucagcu

SEQ ID NO: 1464817 - RNA, 15 nt, Human
aacauuuauuuugac

SEQ ID NO: 1464818 - RNA, 17 nt, Human
aacauuuauuuugacau

SEQ ID NO: 1464819 - RNA, 17 nt, Human
aacauaccuaagaagua

SEQ ID NO: 1464820 - RNA, 16 nt, Human
caagaccgaucggcgg

SEQ ID NO: 1464821 - RNA, 18 nt, Human
caagaaauaaguuuuugu

SEQ ID NO: 1464822 - RNA, 17 nt, Human
caagaccucagugccuu

SEQ ID NO: 1464823 - RNA, 12 nt, Human
caagacugcugu

SEQ ID NO: 1464824 - RNA, 19 nt, Human
caagacugcuguggccagg

SEQ ID NO: 1464825 - RNA, 20 nt, Human
caagacugcuguggccagga

SEQ ID NO: 1464826 - RNA, 21 nt, Human
caagacugcuguggccaggag

SEQ ID NO: 1464827 - RNA, 22 nt, Human
caagacugcuguggccaggagg

SEQ ID NO: 1464828 - RNA, 23 nt, Human
caagacugcuguggccaggaggu

SEQ ID NO: 1464829 - RNA, 16 nt, Human
caagcauuuagaugua

SEQ ID NO: 1464830 - RNA, 19 nt, Human
caagcauuuagauguauag

SEQ ID NO: 1464831 - RNA, 14 nt, Human
caagcauucugucu

SEQ ID NO: 1464832 - RNA, 21 nt, Human
caagccauggguagccugggu

SEQ ID NO: 1464833 - RNA, 22 nt, Human
caagcaguugggacuacaggcg

SEQ ID NO: 1464834 - RNA, 18 nt, Human
caagcauggcuauuuuau

SEQ ID NO: 1464835 - RNA, 21 nt, Human
caagcauggcuauuuuauauu

SEQ ID NO: 1464836 - RNA, 16 nt, Human
caagcauucagaagaa

SEQ ID NO: 1464837 - RNA, 22 nt, Human
caagcauucagaagaaaaagaa

SEQ ID NO: 1464838 - RNA, 17 nt, Human
caagcauucagaagaaa

SEQ ID NO: 1464839 - RNA, 14 nt, Human
caagcuguuuucuu

SEQ ID NO: 1464840 - RNA, 16 nt, Human
caagcuguuuucuucu

SEQ ID NO: 1464841 - RNA, 20 nt, Human
caagcuuaauggcugauaau

SEQ ID NO: 1464842 - RNA, 18 nt, Human
caagggcauaaauuauug

SEQ ID NO: 1464843 - RNA, 23 nt, Human
caagggcagggggccccuuugcu

SEQ ID NO: 1464844 - RNA, 22 nt, Human
caagggcagggggccccuuugc

SEQ ID NO: 1464845 - RNA, 14 nt, Human
caagggccugaugg

SEQ ID NO: 1464846 - RNA, 18 nt, Human
caagguucaacuuauuaa

SEQ ID NO: 1464847 - RNA, 20 nt, Human
caaccuccgcauccgggguu

SEQ ID NO: 1464848 - RNA, 20 nt, Human
caaccuccaccuccuggguu

SEQ ID NO: 1464849 - RNA, 14 nt, Human
caaccuccaccucc

SEQ ID NO: 1464850 - RNA, 18 nt, Human
caacugaaugaggucagc

SEQ ID NO: 1464851 - RNA, 12 nt, Human
caacuggcaggc

SEQ ID NO: 1464852 - RNA, 14 nt, Human
caacuggcaggcag

SEQ ID NO: 1464853 - RNA, 15 nt, Human
caaccucauccucuc

SEQ ID NO: 1464854 - RNA, 15 nt, Human
caaccucaguaauuu

SEQ ID NO: 1464855 - RNA, 18 nt, Human
caaccucaguaauuuaga

SEQ ID NO: 1464856 - RNA, 18 nt, Human
caaccucaacugccuacu

SEQ ID NO: 1464857 - RNA, 16 nt, Human
caacaguuacauaauu

SEQ ID NO: 1464858 - RNA, 12 nt, Human
caacaguuuucc

SEQ ID NO: 1464859 - RNA, 13 nt, Human
caacaguuuuccu

SEQ ID NO: 1464860 - RNA, 20 nt, Human
caacaguuuuccuaugcuuu

SEQ ID NO: 1464861 - RNA, 22 nt, Human
caacaguuuuccuaugcuuuga

SEQ ID NO: 1464862 - RNA, 17 nt, Human
caaauuguaagcaugca

SEQ ID NO: 1464863 - RNA, 14 nt, Human
caaauucuucugaa

SEQ ID NO: 1464864 - RNA, 15 nt, Human
caaauucuucugaac

SEQ ID NO: 1464865 - RNA, 15 nt, Human
caaauauuuauuuuc

SEQ ID NO: 1464866 - RNA, 16 nt, Human
caaauauuuauuuucu

SEQ ID NO: 1464867 - RNA, 12 nt, Human
caaauauuuauu

SEQ ID NO: 1464868 - RNA, 14 nt, Human
caaauauuuauuuu

SEQ ID NO: 1464869 - RNA, 21 nt, Human
caaaggcuuugcccugcugcc

SEQ ID NO: 1464870 - RNA, 23 nt, Human
caaaggcuuugcccugcugcccu

SEQ ID NO: 1464871 - RNA, 15 nt, Human
caaaggcuuugcccu

SEQ ID NO: 1464872 - RNA, 22 nt, Human
caaaggggaggcaucagugucc

SEQ ID NO: 1464873 - RNA, 17 nt, Human
auuuguacuauuuaacu

SEQ ID NO: 1464874 - RNA, 18 nt, Human
auuuguacuauuuaacug

SEQ ID NO: 1464875 - RNA, 18 nt, Human
auuuuaauaauguuucaa

SEQ ID NO: 1464876 - RNA, 19 nt, Human
auuuuaauaauguuucaaa

SEQ ID NO: 1464877 - RNA, 22 nt, Human
caaacugaggaauuucaccugu

SEQ ID NO: 1464878 - RNA, 15 nt, Human
caaagaaauuaugug

SEQ ID NO: 1464879 - RNA, 13 nt, Human
caaagaaauuaug

SEQ ID NO: 1464880 - RNA, 12 nt, Human
caaagaaauuau

SEQ ID NO: 1464881 - RNA, 14 nt, Human
caaacugccuucuu

SEQ ID NO: 1464882 - RNA, 15 nt, Human
caaagaguucaagaa

SEQ ID NO: 1464883 - RNA, 16 nt, Human
caaagaguucaagaaa

SEQ ID NO: 1464884 - RNA, 16 nt, Human
caaagagguauuuauc

SEQ ID NO: 1464885 - RNA, 22 nt, Human
cacaccuacuagucaccagaga

SEQ ID NO: 1464886 - RNA, 14 nt, Human
cacaccaggauaga

SEQ ID NO: 1464887 - RNA, 19 nt, Human
cacacacaaaagggaaccc

SEQ ID NO: 1464888 - RNA, 21 nt, Human
cacacaaauuaucuuaaaacu

SEQ ID NO: 1464889 - RNA, 18 nt, Human
cacacaaugugucugaga

SEQ ID NO: 1464890 - RNA, 12 nt, Human
caauuuuguaac

SEQ ID NO: 1464891 - RNA, 11 nt, Human
caauuuuguaa

SEQ ID NO: 1464892 - RNA, 12 nt, Human
caauucaaaaca

SEQ ID NO: 1464893 - RNA, 20 nt, Human
caauuuucuggaauacauga

SEQ ID NO: 1464894 - RNA, 15 nt, Human
cacaaaccaugcaaa

SEQ ID NO: 1464895 - RNA, 17 nt, Human
caaugcaccuaaagaaa

SEQ ID NO: 1464896 - RNA, 18 nt, Human
caaugcaccuaaagaaaa

SEQ ID NO: 1464897 - RNA, 23 nt, Human
caaugcaccuaaagaaaaacaaa

SEQ ID NO: 1464898 - RNA, 14 nt, Human
caauguaaauauuu

SEQ ID NO: 1464899 - RNA, 16 nt, Human
caauuagggccuagcc

SEQ ID NO: 1464900 - RNA, 17 nt, Human
caauguaaauauuuuaa

SEQ ID NO: 1464901 - RNA, 21 nt, Human
caauuauaagaggauaugaac

SEQ ID NO: 1464902 - RNA, 23 nt, Human
caauuaggcagacucuuuaugcu

SEQ ID NO: 1464903 - RNA, 13 nt, Human
cacaaauauuuau

SEQ ID NO: 1464904 - RNA, 21 nt, Human
cacaaauauuuauuuucuuuc

SEQ ID NO: 1464905 - RNA, 23 nt, Human
cacaaauauuuauuuucuuucug

SEQ ID NO: 1464906 - RNA, 17 nt, Human
caauauucaauaaagcu

SEQ ID NO: 1464907 - RNA, 16 nt, Human
caauauucaauaaagc

SEQ ID NO: 1464908 - RNA, 15 nt, Human
caauauucaauaaag

SEQ ID NO: 1464909 - RNA, 14 nt, Human
caauauucaauaaa

SEQ ID NO: 1464910 - RNA, 11 nt, Human
caaugaaauga

SEQ ID NO: 1464911 - RNA, 13 nt, Human
caaugaaaugaau

SEQ ID NO: 1464912 - RNA, 24 nt, Human
caaugauggcaauuuuguaacgaa

SEQ ID NO: 1464913 - RNA, 14 nt, Human
caagugcugugcaa

SEQ ID NO: 1464914 - RNA, 19 nt, Human
caauguaaauauuuuaaag

SEQ ID NO: 1464915 - RNA, 17 nt, Human
cacaugaaguccaagca

SEQ ID NO: 1464916 - RNA, 20 nt, Human
cacaugaaguccaagcauuu

SEQ ID NO: 1464917 - RNA, 21 nt, Human
cacaugucagcaaguccuaag

SEQ ID NO: 1464918 - RNA, 16 nt, Human
cacaugauuccagcca

SEQ ID NO: 1464919 - RNA, 16 nt, Human
cacaggcaaaauccuu

SEQ ID NO: 1464920 - RNA, 20 nt, Human
cacaggcaaaauccuugcuu

SEQ ID NO: 1464921 - RNA, 16 nt, Human
cacagcaauuccucag

SEQ ID NO: 1464922 - RNA, 18 nt, Human
cacagcaauuccucaggc

SEQ ID NO: 1464923 - RNA, 21 nt, Human
caccauauuggccagucuggu

SEQ ID NO: 1464924 - RNA, 17 nt, Human
caccauagguagaaugu

SEQ ID NO: 1464925 - RNA, 21 nt, Human
caccaguguguggcuuucaga

SEQ ID NO: 1464926 - RNA, 23 nt, Human
caccaguguguggcuuucagagc

SEQ ID NO: 1464927 - RNA, 17 nt, Human
caccaugcugcugggga

SEQ ID NO: 1464928 - RNA, 19 nt, Human
caccaugcugcuggggaag

SEQ ID NO: 1464929 - RNA, 22 nt, Human
caccaugcugcuggggaagaca

SEQ ID NO: 1464930 - RNA, 13 nt, Human
caccaagcugcug

SEQ ID NO: 1464931 - RNA, 22 nt, Human
caccaaguuggaacauccuugg

SEQ ID NO: 1464932 - RNA, 23 nt, Human
caccaaguuggaacauccuugga

SEQ ID NO: 1464933 - RNA, 20 nt, Human
caccauguuggccaggcuug

SEQ ID NO: 1464934 - RNA, 13 nt, Human
caccauugaaggc

SEQ ID NO: 1464935 - RNA, 14 nt, Human
caccauugaaggcu

SEQ ID NO: 1464936 - RNA, 15 nt, Human
caccauugaaggcuu

SEQ ID NO: 1464937 - RNA, 16 nt, Human
caccauugaaggcuua

SEQ ID NO: 1464938 - RNA, 17 nt, Human
caccauuuggauccugu

SEQ ID NO: 1464939 - RNA, 18 nt, Human
caccauuuggcaucccug

SEQ ID NO: 1464940 - RNA, 19 nt, Human
caccauuuggcaucccugg

SEQ ID NO: 1464941 - RNA, 20 nt, Human
caccauuuggcaucccuggg

SEQ ID NO: 1464942 - RNA, 21 nt, Human
caccauuuggcaucccugggc

SEQ ID NO: 1464943 - RNA, 22 nt, Human
caccauuuggcaucccugggcc

SEQ ID NO: 1464944 - RNA, 23 nt, Human
caccauuuggcaucccugggccu

SEQ ID NO: 1464945 - RNA, 24 nt, Human
caccauuuggcaucccugggccuu

SEQ ID NO: 1464946 - RNA, 22 nt, Human
cacccaaagagguauuuaucuu

SEQ ID NO: 1464947 - RNA, 13 nt, Human
uuuuuucuuacug

SEQ ID NO: 1464948 - RNA, 20 nt, Human
uuuugaaaagcagacauuuu

SEQ ID NO: 1464949 - RNA, 21 nt, Human
uuuugaaaccaugaagagauu

SEQ ID NO: 1464950 - RNA, 20 nt, Human
uuuuuuauacaggaugauga

SEQ ID NO: 1464951 - RNA, 12 nt, Human
uuuuuucugaaa

SEQ ID NO: 1464952 - RNA, 13 nt, Human
uuuuuuaguugaa

SEQ ID NO: 1464953 - RNA, 17 nt, Human
uuuagaauaugccuugu

SEQ ID NO: 1464954 - RNA, 15 nt, Human
uuuagacuucaagca

SEQ ID NO: 1464955 - RNA, 20 nt, Human
uuuagaaacacaacuauauu

SEQ ID NO: 1464956 - RNA, 12 nt, Human
uuuagaaaacuu

SEQ ID NO: 1464957 - RNA, 13 nt, Human
uuuagaaaacuuu

SEQ ID NO: 1464958 - RNA, 14 nt, Human
uuuagaaaacuuua

SEQ ID NO: 1464959 - RNA, 15 nt, Human
uuuagaaaacuuuaa

SEQ ID NO: 1464960 - RNA, 16 nt, Human
uuuagaaaacuuuaaa

SEQ ID NO: 1464961 - RNA, 18 nt, Human
uuuagaaaucauuuugca

SEQ ID NO: 1464962 - RNA, 12 nt, Human
uuuagaaacaca

SEQ ID NO: 1464963 - RNA, 14 nt, Human
uuuacuuuucuucu

SEQ ID NO: 1464964 - RNA, 15 nt, Human
uuuacuuuuaaacag

SEQ ID NO: 1464965 - RNA, 18 nt, Human
uuuacuuuuaaacaguga

SEQ ID NO: 1464966 - RNA, 15 nt, Human
uuuacuuuuaaacug

SEQ ID NO: 1464967 - RNA, 16 nt, Human
uuuacuuuuaaacugu

SEQ ID NO: 1464968 - RNA, 22 nt, Human
uuuacauggcuggagcuagaau

SEQ ID NO: 1464969 - RNA, 17 nt, Human
uuuacaauaguucugug

SEQ ID NO: 1464970 - RNA, 16 nt, Human
uuuacaaguaacaaaa

SEQ ID NO: 1464971 - RNA, 17 nt, Human
uuuacauggcuggagcu

SEQ ID NO: 1464972 - RNA, 19 nt, Human
uuuacaauuuuuuaucaug

SEQ ID NO: 1464973 - RNA, 19 nt, Human
uuguauuguauauuacaau

SEQ ID NO: 1464974 - RNA, 18 nt, Human
uuguauuguauauuacaa

SEQ ID NO: 1464975 - RNA, 18 nt, Human
uuuaucuuuauaugaaga

SEQ ID NO: 1464976 - RNA, 19 nt, Human
uuuaugaaaaagaagaauc

SEQ ID NO: 1464977 - RNA, 14 nt, Human
uuuaugcauauuau

SEQ ID NO: 1464978 - RNA, 16 nt, Human
uuuauuggcugagaua

SEQ ID NO: 1464979 - RNA, 22 nt, Human
uuucucccuggauuuuuaccag

SEQ ID NO: 1464980 - RNA, 16 nt, Human
uuucuaggacugaauu

SEQ ID NO: 1464981 - RNA, 15 nt, Human
uuucuccucccagga

SEQ ID NO: 1464982 - RNA, 23 nt, Human
uuucucccuggauuuuuaccagu

SEQ ID NO: 1464983 - RNA, 21 nt, Human
uuucucccuggauuuuuacca

SEQ ID NO: 1464984 - RNA, 20 nt, Human
uuucucccuggauuuuuacc

SEQ ID NO: 1464985 - RNA, 14 nt, Human
uuucucccuggauu

SEQ ID NO: 1464986 - RNA, 12 nt, Human
uuucucccugga

SEQ ID NO: 1464987 - RNA, 14 nt, Human
uuucuaaugagaua

SEQ ID NO: 1464988 - RNA, 16 nt, Human
uuucuagauuaagaua

SEQ ID NO: 1464989 - RNA, 21 nt, Human
uuuccucuucuauuuuguaaa

SEQ ID NO: 1464990 - RNA, 22 nt, Human
uuuccucuucuauuuuguaaac

SEQ ID NO: 1464991 - RNA, 15 nt, Human
uuuccuaugcuuuga

SEQ ID NO: 1464992 - RNA, 17 nt, Human
uuuccuagcccucucac

SEQ ID NO: 1464993 - RNA, 23 nt, Human
uuuccuagcccucucacauuuau

SEQ ID NO: 1464994 - RNA, 17 nt, Human
uuucuaagaaacauuua

SEQ ID NO: 1464995 - RNA, 14 nt, Human
uuucuaagaaacau

SEQ ID NO: 1464996 - RNA, 15 nt, Human
uuucagauaaucaca

SEQ ID NO: 1464997 - RNA, 13 nt, Human
uuucagagccucc

SEQ ID NO: 1464998 - RNA, 13 nt, Human
uuuauuuguugag

SEQ ID NO: 1464999 - RNA, 14 nt, Human
uuuauuuguugaga

SEQ ID NO: 1465000 - RNA, 15 nt, Human
uuucagcagcugcag

SEQ ID NO: 1465001 - RNA, 21 nt, Human
uuucagauaaucacaauacau

SEQ ID NO: 1465002 - RNA, 12 nt, Human
uuuauuuguuga

SEQ ID NO: 1465003 - RNA, 18 nt, Human
uuuauuuguugagagugu

SEQ ID NO: 1465004 - RNA, 22 nt, Human
uuucaggagagaguugaaccua

SEQ ID NO: 1465005 - RNA, 19 nt, Human
uuuccagaggcuauuauuu

SEQ ID NO: 1465006 - RNA, 22 nt, Human
uuucuuacugucuuuuuucuaa

SEQ ID NO: 1465007 - RNA, 20 nt, Human
uuucuuacugauuuuuaagu

SEQ ID NO: 1465008 - RNA, 16 nt, Human
uuucugaguuccugca

SEQ ID NO: 1465009 - RNA, 16 nt, Human
uuucugaguuuuacca

SEQ ID NO: 1465010 - RNA, 15 nt, Human
uuucugaguuuuacc

SEQ ID NO: 1465011 - RNA, 16 nt, Human
uuugauacuaagcauu

SEQ ID NO: 1465012 - RNA, 17 nt, Human
uuugauacuaagcauug

SEQ ID NO: 1465013 - RNA, 18 nt, Human
uuugauacuaagcauuga

SEQ ID NO: 1465014 - RNA, 23 nt, Human
uuugcauaacguauaaaagccug

SEQ ID NO: 1465015 - RNA, 19 nt, Human
uuugcauaacguauaaaag

SEQ ID NO: 1465016 - RNA, 11 nt, Human
uuugcagcuuu

SEQ ID NO: 1465017 - RNA, 21 nt, Human
uuugcagcugagagaaaauaa

SEQ ID NO: 1465018 - RNA, 21 nt, Human
uuugauacuaagcauugaaug

SEQ ID NO: 1465019 - RNA, 21 nt, Human
uuugauagauuuucugcuacu

SEQ ID NO: 1465020 - RNA, 18 nt, Human
uuuggaacccuaaauaau

SEQ ID NO: 1465021 - RNA, 21 nt, Human
uuuguauaaaauaauuuuuau

SEQ ID NO: 1465022 - RNA, 12 nt, Human
uuuguuaauuua

SEQ ID NO: 1465023 - RNA, 12 nt, Human
uuugucccaggu

SEQ ID NO: 1465024 - RNA, 22 nt, Human
uuuguguuucagccauguauuu

SEQ ID NO: 1465025 - RNA, 22 nt, Human
uuuuaaaaugagaaaucuaaaa

SEQ ID NO: 1465026 - RNA, 15 nt, Human
uuuuaaaaugagaaa

SEQ ID NO: 1465027 - RNA, 20 nt, Human
uuuguuuaaaaaguaauaaa

SEQ ID NO: 1465028 - RNA, 14 nt, Human
uuuguuuaaaaagu

SEQ ID NO: 1465029 - RNA, 13 nt, Human
uuuuacauuaaau

SEQ ID NO: 1465030 - RNA, 15 nt, Human
uuuuacauucugaau

SEQ ID NO: 1465031 - RNA, 13 nt, Human
uuuuaccaaguuu

SEQ ID NO: 1465032 - RNA, 22 nt, Human
uuuuacauaaauuuaguauuuu

SEQ ID NO: 1465033 - RNA, 17 nt, Human
uuuuaauuugguuuuca

SEQ ID NO: 1465034 - RNA, 21 nt, Human
uuuuaauuugguuuucacauu

SEQ ID NO: 1465035 - RNA, 14 nt, Human
uuuuacuguacaga

SEQ ID NO: 1465036 - RNA, 15 nt, Human
uuuuauaugcuucug

SEQ ID NO: 1465037 - RNA, 20 nt, Human
uuuuauaugcuucuguuuua

SEQ ID NO: 1465038 - RNA, 10 nt, Human
uuuuauauuu

SEQ ID NO: 1465039 - RNA, 16 nt, Human
uuuuaucaugcauguc

SEQ ID NO: 1465040 - RNA, 20 nt, Human
uuuuaugauacuugaaaauu

SEQ ID NO: 1465041 - RNA, 16 nt, Human
uuuuaugauacuugaa

SEQ ID NO: 1465042 - RNA, 13 nt, Human
uuuuccugaaaac

SEQ ID NO: 1465043 - RNA, 18 nt, Human
uuuucccaaaauguugaa

SEQ ID NO: 1465044 - RNA, 13 nt, Human
uuuuccucccuca

SEQ ID NO: 1465045 - RNA, 20 nt, Human
uuuuccaugcguguuucuga

SEQ ID NO: 1465046 - RNA, 22 nt, Human
uuuuccauggcaggaaggcuug

SEQ ID NO: 1465047 - RNA, 21 nt, Human
uuuuccauggcaggaaggcuu

SEQ ID NO: 1465048 - RNA, 18 nt, Human
uuuuccucuucuauuuug

SEQ ID NO: 1465049 - RNA, 17 nt, Human
uuuuccuuugaauccuc

SEQ ID NO: 1465050 - RNA, 14 nt, Human
uuuucaagaaacug

SEQ ID NO: 1465051 - RNA, 15 nt, Human
uuuucaagaaacuga

SEQ ID NO: 1465052 - RNA, 16 nt, Human
uuuucaagaauaauca

SEQ ID NO: 1465053 - RNA, 16 nt, Human
uuuucacuguagaaug

SEQ ID NO: 1465054 - RNA, 19 nt, Human
uucaaugccccugaauuua

SEQ ID NO: 1465055 - RNA, 16 nt, Human
uucaaucuguaaacug

SEQ ID NO: 1465056 - RNA, 17 nt, Human
uucaaucuguaaacugu

SEQ ID NO: 1465057 - RNA, 18 nt, Human
uucaaucuguaaacugug

SEQ ID NO: 1465058 - RNA, 20 nt, Human
uucaaucuguaaacugugua

SEQ ID NO: 1465059 - RNA, 15 nt, Human
uucaauguuagccuc

SEQ ID NO: 1465060 - RNA, 15 nt, Human
uucaauucaaagcug

SEQ ID NO: 1465061 - RNA, 18 nt, Human
uucaacaauucuaaaaug

SEQ ID NO: 1465062 - RNA, 14 nt, Human
uucaacaauucuaa

SEQ ID NO: 1465063 - RNA, 15 nt, Human
uucaacaauucuaaa

SEQ ID NO: 1465064 - RNA, 19 nt, Human
uucaacaauucuaaaauga

SEQ ID NO: 1465065 - RNA, 14 nt, Human
uucaaucuguaaac

SEQ ID NO: 1465066 - RNA, 15 nt, Human
uucaaucuguaaacu

SEQ ID NO: 1465067 - RNA, 12 nt, Human
uuauuuucacug

SEQ ID NO: 1465068 - RNA, 15 nt, Human
uuacgugcucugugg

SEQ ID NO: 1465069 - RNA, 15 nt, Human
uuauuuugacauaaa

SEQ ID NO: 1465070 - RNA, 17 nt, Human
uuauuuugacauaaagu

SEQ ID NO: 1465071 - RNA, 12 nt, Human
uucaacaaacau

SEQ ID NO: 1465072 - RNA, 20 nt, Human
uucaacaaacauuugcugaa

SEQ ID NO: 1465073 - RNA, 16 nt, Human
uucaaagcaugaaaug

SEQ ID NO: 1465074 - RNA, 20 nt, Human
uucacucuucaaaugccuga

SEQ ID NO: 1465075 - RNA, 18 nt, Human
uucaggacacucacuaca

SEQ ID NO: 1465076 - RNA, 20 nt, Human
uucaggagagaguugaaccu

SEQ ID NO: 1465077 - RNA, 21 nt, Human
uucaggagagaguugaaccua

SEQ ID NO: 1465078 - RNA, 15 nt, Human
uucagcucugaaaga

SEQ ID NO: 1465079 - RNA, 21 nt, Human
uucccaaaagcccauucauuc

SEQ ID NO: 1465080 - RNA, 11 nt, Human
uucccaaaagc

SEQ ID NO: 1465081 - RNA, 22 nt, Human
uucccaaaauguugaaauauga

SEQ ID NO: 1465082 - RNA, 19 nt, Human
uucccaaaauguugaaaua

SEQ ID NO: 1465083 - RNA, 12 nt, Human
uuccaucugauu

SEQ ID NO: 1465084 - RNA, 12 nt, Human
uuccagccauca

SEQ ID NO: 1465085 - RNA, 13 nt, Human
uucauuuucucua

SEQ ID NO: 1465086 - RNA, 16 nt, Human
uucaugaccaguaaag

SEQ ID NO: 1465087 - RNA, 12 nt, Human
uucaugauaaug

SEQ ID NO: 1465088 - RNA, 15 nt, Human
uucaugauaaugaac

SEQ ID NO: 1465089 - RNA, 18 nt, Human
uucaugauaaugaacaga

SEQ ID NO: 1465090 - RNA, 13 nt, Human
uucauuuccucaa

SEQ ID NO: 1465091 - RNA, 16 nt, Human
uucauuuccucaaaaa

SEQ ID NO: 1465092 - RNA, 16 nt, Human
uucauuuccuccguca

SEQ ID NO: 1465093 - RNA, 18 nt, Human
uucauuuuaacaucugag

SEQ ID NO: 1465094 - RNA, 21 nt, Human
uucauuuuaacaucugagaaa

SEQ ID NO: 1465095 - RNA, 18 nt, Human
uucaugaaagauucaaug

SEQ ID NO: 1465096 - RNA, 22 nt, Human
uucaguuuauuugaaccaauaa

SEQ ID NO: 1465097 - RNA, 12 nt, Human
uucauaaguauu

SEQ ID NO: 1465098 - RNA, 19 nt, Human
uucauaaguauuaugucuc

SEQ ID NO: 1465099 - RNA, 20 nt, Human
uucauaaguauuaugucucu

SEQ ID NO: 1465100 - RNA, 15 nt, Human
uucaucuaggauuuu

SEQ ID NO: 1465101 - RNA, 23 nt, Human
uucaucuauuuuuggcagucuga

SEQ ID NO: 1465102 - RNA, 16 nt, Human
uucccuucaucuggaa

SEQ ID NO: 1465103 - RNA, 15 nt, Human
uucccuucaucugga

SEQ ID NO: 1465104 - RNA, 14 nt, Human
uucccuucaucugg

SEQ ID NO: 1465105 - RNA, 13 nt, Human
uucccuuuccuga

SEQ ID NO: 1465106 - RNA, 20 nt, Human
uuccuagguauaauucacau

SEQ ID NO: 1465107 - RNA, 14 nt, Human
uuccuagcccucuc

SEQ ID NO: 1465108 - RNA, 18 nt, Human
uuccuagcccucucacau

SEQ ID NO: 1465109 - RNA, 23 nt, Human
uuccucaguucauccauucuauu

SEQ ID NO: 1465110 - RNA, 15 nt, Human
uuccuaguuuucucc

SEQ ID NO: 1465111 - RNA, 18 nt, Human
uuccuaguuuucuccucc

SEQ ID NO: 1465112 - RNA, 14 nt, Human
uuccucaugaaugu

SEQ ID NO: 1465113 - RNA, 15 nt, Human
uuccucaugaaugua

SEQ ID NO: 1465114 - RNA, 16 nt, Human
uuccucaugaauguaa

SEQ ID NO: 1465115 - RNA, 17 nt, Human
uuccucaugaauguaaa

SEQ ID NO: 1465116 - RNA, 18 nt, Human
uuccucaugaauguaaau

SEQ ID NO: 1465117 - RNA, 21 nt, Human
uuccucaugaauguaaauuug

SEQ ID NO: 1465118 - RNA, 21 nt, Human
uuccuucccugcugugaaaga

SEQ ID NO: 1465119 - RNA, 19 nt, Human
uuccuucccugcugugaaa

SEQ ID NO: 1465120 - RNA, 15 nt, Human
uuccuucccugcugu

SEQ ID NO: 1465121 - RNA, 17 nt, Human
uuccuucauuuccuccg

SEQ ID NO: 1465122 - RNA, 13 nt, Human
uuccuccugcuca

SEQ ID NO: 1465123 - RNA, 15 nt, Human
uuccuccugcucaua

SEQ ID NO: 1465124 - RNA, 15 nt, Human
uucuaaaaugauugu

SEQ ID NO: 1465125 - RNA, 14 nt, Human
uucuaaaaugccuu

SEQ ID NO: 1465126 - RNA, 22 nt, Human
uuccuuugaauccucucucugu

SEQ ID NO: 1465127 - RNA, 14 nt, Human
uucucugauacaga

SEQ ID NO: 1465128 - RNA, 15 nt, Human
uucucugauacagaa

SEQ ID NO: 1465129 - RNA, 16 nt, Human
uucucugauacagaaa

SEQ ID NO: 1465130 - RNA, 17 nt, Human
uucucugauacagaaaa

SEQ ID NO: 1465131 - RNA, 15 nt, Human
uucugacucugagcu

SEQ ID NO: 1465132 - RNA, 16 nt, Human
uucugacucugagcua

SEQ ID NO: 1465133 - RNA, 23 nt, Human
uucucuccucuccccaugauguu

SEQ ID NO: 1465134 - RNA, 16 nt, Human
uucuccccugcacugu

SEQ ID NO: 1465135 - RNA, 15 nt, Human
uucuccccugcacug

SEQ ID NO: 1465136 - RNA, 18 nt, Human
uucuccauggcccugcca

SEQ ID NO: 1465137 - RNA, 23 nt, Human
uucucccaauucauccucacuca

SEQ ID NO: 1465138 - RNA, 15 nt, Human
uucuccauccuacca

SEQ ID NO: 1465139 - RNA, 17 nt, Human
uucuauugccucugaga

SEQ ID NO: 1465140 - RNA, 15 nt, Human
uucuauugccucuga

SEQ ID NO: 1465141 - RNA, 14 nt, Human
uucuauugccucug

SEQ ID NO: 1465142 - RNA, 13 nt, Human
uucuauugccucu

SEQ ID NO: 1465143 - RNA, 14 nt, Human
uucuaauaguuuua

SEQ ID NO: 1465144 - RNA, 15 nt, Human
uucuauuguuguaca

SEQ ID NO: 1465145 - RNA, 13 nt, Human
uucuauuuuguaa

SEQ ID NO: 1465146 - RNA, 16 nt, Human
uucuauuuuguaaacu

SEQ ID NO: 1465147 - RNA, 16 nt, Human
uucuauuuuuaucuga

SEQ ID NO: 1465148 - RNA, 14 nt, Human
uucucaugauccaa

SEQ ID NO: 1465149 - RNA, 16 nt, Human
uucuccaagagcuaca

SEQ ID NO: 1465150 - RNA, 15 nt, Human
uucucauccugcagg

SEQ ID NO: 1465151 - RNA, 23 nt, Human
uugaagaauguuaagacuugaca

SEQ ID NO: 1465152 - RNA, 21 nt, Human
uugaagaauguuaagacuuga

SEQ ID NO: 1465153 - RNA, 15 nt, Human
uugaagaauguuaag

SEQ ID NO: 1465154 - RNA, 19 nt, Human
uugaagaauguuaagacuu

SEQ ID NO: 1465155 - RNA, 20 nt, Human
uugaacucuucacucuucaa

SEQ ID NO: 1465156 - RNA, 14 nt, Human
uucugagcauuuaa

SEQ ID NO: 1465157 - RNA, 19 nt, Human
uucugagcccgguaagagc

SEQ ID NO: 1465158 - RNA, 16 nt, Human
uucugagcuauuucau

SEQ ID NO: 1465159 - RNA, 23 nt, Human
uucugagcuauuucaucuauuuu

SEQ ID NO: 1465160 - RNA, 22 nt, Human
uucugagcccgguaagagcaaa

SEQ ID NO: 1465161 - RNA, 16 nt, Human
uucuuauuucaugaaa

SEQ ID NO: 1465162 - RNA, 14 nt, Human
uucuuauuucauga

SEQ ID NO: 1465163 - RNA, 16 nt, Human
uucuucaccaaaucuu

SEQ ID NO: 1465164 - RNA, 22 nt, Human
uugaccugccucccuucaugca

SEQ ID NO: 1465165 - RNA, 23 nt, Human
uugaccugccucccuucaugcau

SEQ ID NO: 1465166 - RNA, 21 nt, Human
uugaccugccucccuucaugc

SEQ ID NO: 1465167 - RNA, 20 nt, Human
uugaauggcuauguuuuuaa

SEQ ID NO: 1465168 - RNA, 16 nt, Human
uugaauggcuauguuu

SEQ ID NO: 1465169 - RNA, 15 nt, Human
uugaaugcaaaccau

SEQ ID NO: 1465170 - RNA, 16 nt, Human
uugaaugcaaaccaua

SEQ ID NO: 1465171 - RNA, 11 nt, Human
uugaggacaca

SEQ ID NO: 1465172 - RNA, 22 nt, Human
uugacuagaaaauuuaaaacau

SEQ ID NO: 1465173 - RNA, 16 nt, Human
uugaggacacaugucc

SEQ ID NO: 1465174 - RNA, 15 nt, Human
uugaggacacauguc

SEQ ID NO: 1465175 - RNA, 14 nt, Human
uugaggacacaugu

SEQ ID NO: 1465176 - RNA, 13 nt, Human
uugaggacacaug

SEQ ID NO: 1465177 - RNA, 14 nt, Human
uugaggacacugau

SEQ ID NO: 1465178 - RNA, 15 nt, Human
uugaggacacugaua

SEQ ID NO: 1465179 - RNA, 14 nt, Human
uugaggggaccagg

SEQ ID NO: 1465180 - RNA, 17 nt, Human
uugaggggaccaggagu

SEQ ID NO: 1465181 - RNA, 15 nt, Human
uugaggggaccagga

SEQ ID NO: 1465182 - RNA, 21 nt, Human
uugauuggugauuagguggug

SEQ ID NO: 1465183 - RNA, 12 nt, Human
uugaugaagaag

SEQ ID NO: 1465184 - RNA, 13 nt, Human
uugaugaagaagu

SEQ ID NO: 1465185 - RNA, 14 nt, Human
uugauuuucuggau

SEQ ID NO: 1465186 - RNA, 20 nt, Human
uugauuuuugccucuuccag

SEQ ID NO: 1465187 - RNA, 15 nt, Human
uugcaaaaacuacaa

SEQ ID NO: 1465188 - RNA, 20 nt, Human
uugcaaaaacuacaaccaau

SEQ ID NO: 1465189 - RNA, 19 nt, Human
uugcaaaaacuacaaccaa

SEQ ID NO: 1465190 - RNA, 14 nt, Human
uugcauagaauaaa

SEQ ID NO: 1465191 - RNA, 13 nt, Human
uugccacccucau

SEQ ID NO: 1465192 - RNA, 16 nt, Human
uugccacccucaugcu

SEQ ID NO: 1465193 - RNA, 18 nt, Human
uugcagacaggaaucuua

SEQ ID NO: 1465194 - RNA, 11 nt, Human
uugcagacagg

SEQ ID NO: 1465195 - RNA, 15 nt, Human
uugcagacaggaauc

SEQ ID NO: 1465196 - RNA, 16 nt, Human
uugcagacaggaaucu

SEQ ID NO: 1465197 - RNA, 14 nt, Human
uugcaaccgucugu

SEQ ID NO: 1465198 - RNA, 16 nt, Human
uuggaacucugcuuga

SEQ ID NO: 1465199 - RNA, 16 nt, Human
uugcuguaauguuaau

SEQ ID NO: 1465200 - RNA, 13 nt, Human
uugcuguuuugau

SEQ ID NO: 1465201 - RNA, 20 nt, Human
uugccaguuguccuccuucc

SEQ ID NO: 1465202 - RNA, 19 nt, Human
uugccaguuguccuccuuc

SEQ ID NO: 1465203 - RNA, 17 nt, Human
uugccaguuguccuccu

SEQ ID NO: 1465204 - RNA, 15 nt, Human
uugccaguuguccuc

SEQ ID NO: 1465205 - RNA, 18 nt, Human
uugccucugagagcauca

SEQ ID NO: 1465206 - RNA, 13 nt, Human
uugcugcaaaccu

SEQ ID NO: 1465207 - RNA, 15 nt, Human
uugcugcaaaccuga

SEQ ID NO: 1465208 - RNA, 18 nt, Human
uugcugcaguaugaaaau

SEQ ID NO: 1465209 - RNA, 17 nt, Human
uugccucuuccagucuu

SEQ ID NO: 1465210 - RNA, 19 nt, Human
uugccucuuccagucuucc

SEQ ID NO: 1465211 - RNA, 19 nt, Human
uugccucugagagcaucag

SEQ ID NO: 1465212 - RNA, 12 nt, Human
uugccugcaggc

SEQ ID NO: 1465213 - RNA, 14 nt, Human
uugcggcuccucag

SEQ ID NO: 1465214 - RNA, 14 nt, Human
uugcgguucaggaa

SEQ ID NO: 1465215 - RNA, 14 nt, Human
uugguaaaccuuuu

SEQ ID NO: 1465216 - RNA, 12 nt, Human
uugguaaaccuu

SEQ ID NO: 1465217 - RNA, 22 nt, Human
uuggccaaugcaccuaaagaaa

SEQ ID NO: 1465218 - RNA, 23 nt, Human
uuggccaaugcaccuaaagaaaa

SEQ ID NO: 1465219 - RNA, 15 nt, Human
uuggcaucccugggc

SEQ ID NO: 1465220 - RNA, 13 nt, Human
uuggcaucccugg

SEQ ID NO: 1465221 - RNA, 17 nt, Human
uuggcaucccugggccu

SEQ ID NO: 1465222 - RNA, 16 nt, Human
uuguaaaggaauuuaa

SEQ ID NO: 1465223 - RNA, 13 nt, Human
uuguaaauauugu

SEQ ID NO: 1465224 - RNA, 14 nt, Human
uuguaaauauugug

SEQ ID NO: 1465225 - RNA, 21 nt, Human
uuguauucagaguugaugguu

SEQ ID NO: 1465226 - RNA, 14 nt, Human
uuguauucagaguu

SEQ ID NO: 1465227 - RNA, 22 nt, Human
uuguauucaaaaauuaucuaua

SEQ ID NO: 1465228 - RNA, 17 nt, Human
uguagauaauacaguuc

SEQ ID NO: 1465229 - RNA, 20 nt, Human
uguacugaaaaaugguaauu

SEQ ID NO: 1465230 - RNA, 12 nt, Human
uguacugaaaaa

SEQ ID NO: 1465231 - RNA, 15 nt, Human
uguacuauuuaacug

SEQ ID NO: 1465232 - RNA, 18 nt, Human
uguacuauuuaacugacu

SEQ ID NO: 1465233 - RNA, 14 nt, Human
uguacuauuuaacu

SEQ ID NO: 1465234 - RNA, 15 nt, Human
uguacuaaagccaaa

SEQ ID NO: 1465235 - RNA, 16 nt, Human
uguacuaaagccaaac

SEQ ID NO: 1465236 - RNA, 18 nt, Human
uguacuaaagccaaacau

SEQ ID NO: 1465237 - RNA, 20 nt, Human
uguacuaaagccaaacauau

SEQ ID NO: 1465238 - RNA, 11 nt, Human
uguaaacacag

SEQ ID NO: 1465239 - RNA, 21 nt, Human
uguaacuauaguccagcuuug

SEQ ID NO: 1465240 - RNA, 19 nt, Human
uguaacuauaguccagcuu

SEQ ID NO: 1465241 - RNA, 18 nt, Human
uguauuguauauuacaau

SEQ ID NO: 1465242 - RNA, 16 nt, Human
uguauuguauauuaca

SEQ ID NO: 1465243 - RNA, 16 nt, Human
uguaugcacaguaaaa

SEQ ID NO: 1465244 - RNA, 18 nt, Human
uguaucuaugcauuuucu

SEQ ID NO: 1465245 - RNA, 14 nt, Human
uguauacuauagua

SEQ ID NO: 1465246 - RNA, 17 nt, Human
uguauacuauaguacca

SEQ ID NO: 1465247 - RNA, 15 nt, Human
uguauacuauaguac

SEQ ID NO: 1465248 - RNA, 19 nt, Human
uguauacuauaguaccagu

SEQ ID NO: 1465249 - RNA, 20 nt, Human
uguagcaacuacagucuaaa

SEQ ID NO: 1465250 - RNA, 14 nt, Human
ugucacgccagacu

SEQ ID NO: 1465251 - RNA, 14 nt, Human
ugucacucaaggcg

SEQ ID NO: 1465252 - RNA, 17 nt, Human
ugucacucaaggcggug

SEQ ID NO: 1465253 - RNA, 20 nt, Human
ugucacucaaggcggugcuu

SEQ ID NO: 1465254 - RNA, 22 nt, Human
ugucacucaaggcggugcuuga

SEQ ID NO: 1465255 - RNA, 17 nt, Human
ugucacugacacacacg

SEQ ID NO: 1465256 - RNA, 14 nt, Human
ugucccagguccuc

SEQ ID NO: 1465257 - RNA, 16 nt, Human
ugucccagguccucac

SEQ ID NO: 1465258 - RNA, 17 nt, Human
ugucccagguccucacu

SEQ ID NO: 1465259 - RNA, 15 nt, Human
ugucauagaaauuac

SEQ ID NO: 1465260 - RNA, 16 nt, Human
ugucauagaaauuaca

SEQ ID NO: 1465261 - RNA, 14 nt, Human
ugucaucaauuaaa

SEQ ID NO: 1465262 - RNA, 15 nt, Human
ugucaucaauuaaag

SEQ ID NO: 1465263 - RNA, 23 nt, Human
ugucauuaaauggggcucacaaa

SEQ ID NO: 1465264 - RNA, 12 nt, Human
ugucauuguuau

SEQ ID NO: 1465265 - RNA, 14 nt, Human
ugucauuguuauau

SEQ ID NO: 1465266 - RNA, 20 nt, Human
ugucauuguuauauaaucau

SEQ ID NO: 1465267 - RNA, 13 nt, Human
ugugauauaagug

SEQ ID NO: 1465268 - RNA, 18 nt, Human
ugugcaagguauuacacu

SEQ ID NO: 1465269 - RNA, 17 nt, Human
ugugcaauguaaauauu

SEQ ID NO: 1465270 - RNA, 18 nt, Human
ugugcaauguaaauauuu

SEQ ID NO: 1465271 - RNA, 13 nt, Human
ugugauaaggaaa

SEQ ID NO: 1465272 - RNA, 15 nt, Human
ugugagggugcugac

SEQ ID NO: 1465273 - RNA, 16 nt, Human
ugugaaucauuuuacc

SEQ ID NO: 1465274 - RNA, 16 nt, Human
ugugaaucaaggguca

SEQ ID NO: 1465275 - RNA, 17 nt, Human
ugugaaucaagggucag

SEQ ID NO: 1465276 - RNA, 21 nt, Human
ugugaaucaagggucaggccu

SEQ ID NO: 1465277 - RNA, 22 nt, Human
ugugaaucaagggucaggccuu

SEQ ID NO: 1465278 - RNA, 12 nt, Human
ugugacaaaaaa

SEQ ID NO: 1465279 - RNA, 15 nt, Human
ugugacaaaaaauua

SEQ ID NO: 1465280 - RNA, 16 nt, Human
ugugacaaaaaauuaa

SEQ ID NO: 1465281 - RNA, 21 nt, Human
ugugacaaaaaauuaaagcau

SEQ ID NO: 1465282 - RNA, 12 nt, Human
ugugacagggcg

SEQ ID NO: 1465283 - RNA, 13 nt, Human
ugugaaacauguu

SEQ ID NO: 1465284 - RNA, 21 nt, Human
ugucuggugguggcaccaucu

SEQ ID NO: 1465285 - RNA, 14 nt, Human
ugucuuuuuucuaa

SEQ ID NO: 1465286 - RNA, 15 nt, Human
ugugccugacccuac

SEQ ID NO: 1465287 - RNA, 19 nt, Human
ugugcuuaugguaccagau

SEQ ID NO: 1465288 - RNA, 16 nt, Human
ugugcuuuuaaaugca

SEQ ID NO: 1465289 - RNA, 16 nt, Human
ugugcguggugguccc

SEQ ID NO: 1465290 - RNA, 19 nt, Human
ugugcgugguggucccugg

SEQ ID NO: 1465291 - RNA, 21 nt, Human
ugugcgugguggucccugggu

SEQ ID NO: 1465292 - RNA, 22 nt, Human
ugugcgugguggucccugggua

SEQ ID NO: 1465293 - RNA, 13 nt, Human
ugugcaucaggcu

SEQ ID NO: 1465294 - RNA, 19 nt, Human
ugugcaguacuuugugcau

SEQ ID NO: 1465295 - RNA, 17 nt, Human
uguggcuuucagagccu

SEQ ID NO: 1465296 - RNA, 19 nt, Human
uguggguaguggggaagag

SEQ ID NO: 1465297 - RNA, 12 nt, Human
uguuuaaaacau

SEQ ID NO: 1465298 - RNA, 15 nt, Human
uguuuaaaacaucau

SEQ ID NO: 1465299 - RNA, 16 nt, Human
uguuuaaaacaucauu

SEQ ID NO: 1465300 - RNA, 15 nt, Human
uguuguuucuuaaau

SEQ ID NO: 1465301 - RNA, 16 nt, Human
uguuguuucuuaaaua

SEQ ID NO: 1465302 - RNA, 21 nt, Human
uguuguuucuuaaauaagaaa

SEQ ID NO: 1465303 - RNA, 17 nt, Human
uguuguuucuuaaauaa

SEQ ID NO: 1465304 - RNA, 19 nt, Human
uguugaagagguuuuaaag

SEQ ID NO: 1465305 - RNA, 13 nt, Human
uguugagacagag

SEQ ID NO: 1465306 - RNA, 15 nt, Human
uguugagagugugac

SEQ ID NO: 1465307 - RNA, 16 nt, Human
uguugagcaucacaga

SEQ ID NO: 1465308 - RNA, 17 nt, Human
uguugagcaucacagaa

SEQ ID NO: 1465309 - RNA, 20 nt, Human
uguugagcaucacagaaugu

SEQ ID NO: 1465310 - RNA, 21 nt, Human
uguuggagaagaacugaaauc

SEQ ID NO: 1465311 - RNA, 16 nt, Human
uguucauuccuccagg

SEQ ID NO: 1465312 - RNA, 15 nt, Human
uguucauuccuccag

SEQ ID NO: 1465313 - RNA, 14 nt, Human
uguucauuccucca

SEQ ID NO: 1465314 - RNA, 11 nt, Human
uguucauuucc

SEQ ID NO: 1465315 - RNA, 13 nt, Human
uguucauuuccuc

SEQ ID NO: 1465316 - RNA, 13 nt, Human
uguucauaaauaa

SEQ ID NO: 1465317 - RNA, 12 nt, Human
uguucuauagcu

SEQ ID NO: 1465318 - RNA, 24 nt, Human
uguugaaagguaauuugagagaaa

SEQ ID NO: 1465319 - RNA, 14 nt, Human
uguugaaaauguuc

SEQ ID NO: 1465320 - RNA, 17 nt, Human
uguugaaaauguucaga

SEQ ID NO: 1465321 - RNA, 15 nt, Human
uguucugauaaugaa

SEQ ID NO: 1465322 - RNA, 22 nt, Human
uguguuuaggaacuacugagga

SEQ ID NO: 1465323 - RNA, 20 nt, Human
uguguuuacuuuauguuacu

SEQ ID NO: 1465324 - RNA, 15 nt, Human
ugugugcaucaggcu

SEQ ID NO: 1465325 - RNA, 22 nt, Human
ugugugcaucaggcuuucuuuu

SEQ ID NO: 1465326 - RNA, 17 nt, Human
ugugugcaucaggcuuu

SEQ ID NO: 1465327 - RNA, 14 nt, Human
uguguauuccaaga

SEQ ID NO: 1465328 - RNA, 16 nt, Human
uguguaugugugugug

SEQ ID NO: 1465329 - RNA, 21 nt, Human
uguguauaaaaauaaaaaaga

SEQ ID NO: 1465330 - RNA, 21 nt, Human
uguguauauauauauauaugu

SEQ ID NO: 1465331 - RNA, 12 nt, Human
uguuauaaucuu

SEQ ID NO: 1465332 - RNA, 23 nt, Human
uguuaguuucugaguuuuaccaa

SEQ ID NO: 1465333 - RNA, 16 nt, Human
uguucacaauauauuu

SEQ ID NO: 1465334 - RNA, 21 nt, Human
uguucaagcgauucuccugcc

SEQ ID NO: 1465335 - RNA, 14 nt, Human
uguguuugcuuucu

SEQ ID NO: 1465336 - RNA, 15 nt, Human
uguguuugcuuucug

SEQ ID NO: 1465337 - RNA, 17 nt, Human
uguguuuggaagacuau

SEQ ID NO: 1465338 - RNA, 15 nt, Human
uguguuuggcuuuca

SEQ ID NO: 1465339 - RNA, 16 nt, Human
uguguuuggcuuucag

SEQ ID NO: 1465340 - RNA, 17 nt, Human
uguguuuggcuuucagg

SEQ ID NO: 1465341 - RNA, 14 nt, Human
uuacauuuguauaa

SEQ ID NO: 1465342 - RNA, 15 nt, Human
uuacauuuguauaaa

SEQ ID NO: 1465343 - RNA, 14 nt, Human
uuacauuuccuaaa

SEQ ID NO: 1465344 - RNA, 14 nt, Human
uuacauguuugcac

SEQ ID NO: 1465345 - RNA, 22 nt, Human
uuacauggcuggagcuagaauu

SEQ ID NO: 1465346 - RNA, 23 nt, Human
uuacauggcuggagcuagaauuu

SEQ ID NO: 1465347 - RNA, 12 nt, Human
uuacauguuugc

SEQ ID NO: 1465348 - RNA, 13 nt, Human
uuacauguuugca

SEQ ID NO: 1465349 - RNA, 17 nt, Human
uuacaauaguucugugg

SEQ ID NO: 1465350 - RNA, 15 nt, Human
uuacaauaguucugu

SEQ ID NO: 1465351 - RNA, 14 nt, Human
uuaauuauuguaca

SEQ ID NO: 1465352 - RNA, 16 nt, Human
uuacggaacucaaaua

SEQ ID NO: 1465353 - RNA, 20 nt, Human
uuaccuuuuuauuugcaugu

SEQ ID NO: 1465354 - RNA, 21 nt, Human
uuaccacuuguguuuugcaag

SEQ ID NO: 1465355 - RNA, 15 nt, Human
uuaccuuuuuauuug

SEQ ID NO: 1465356 - RNA, 18 nt, Human
uuaccuuuuuauuugcau

SEQ ID NO: 1465357 - RNA, 21 nt, Human
uuaccagauuuuuacacaugu

SEQ ID NO: 1465358 - RNA, 24 nt, Human
uuaccagauuuuuacacauguauc

SEQ ID NO: 1465359 - RNA, 20 nt, Human
uuacauuuguauaaaauaau

SEQ ID NO: 1465360 - RNA, 21 nt, Human
uuaauagguuuggacaaaaug

SEQ ID NO: 1465361 - RNA, 14 nt, Human
uuaauauccuaaac

SEQ ID NO: 1465362 - RNA, 17 nt, Human
uuaauauccuaaacauc

SEQ ID NO: 1465363 - RNA, 19 nt, Human
uuaauauccuaaacaucau

SEQ ID NO: 1465364 - RNA, 16 nt, Human
uuaauggcugauaauu

SEQ ID NO: 1465365 - RNA, 18 nt, Human
uuaagggaagaauuccag

SEQ ID NO: 1465366 - RNA, 18 nt, Human
uuaauaauguuucaaaca

SEQ ID NO: 1465367 - RNA, 16 nt, Human
uuaauagguuuggaca

SEQ ID NO: 1465368 - RNA, 19 nt, Human
uuaauaauuuagacuucaa

SEQ ID NO: 1465369 - RNA, 23 nt, Human
uuaacauuccucaugaauguaaa

SEQ ID NO: 1465370 - RNA, 15 nt, Human
uuaaagcuuccauug

SEQ ID NO: 1465371 - RNA, 20 nt, Human
uuaaagcuuccauuguuguc

SEQ ID NO: 1465372 - RNA, 19 nt, Human
uuaaauagcuuuuuucucu

SEQ ID NO: 1465373 - RNA, 14 nt, Human
uuaaagcuguuauu

SEQ ID NO: 1465374 - RNA, 11 nt, Human
uuaacauuccu

SEQ ID NO: 1465375 - RNA, 13 nt, Human
uuaaauguaaaga

SEQ ID NO: 1465376 - RNA, 17 nt, Human
uuaaauguaaagauauu

SEQ ID NO: 1465377 - RNA, 19 nt, Human
uuaaaagaaugauuaugaa

SEQ ID NO: 1465378 - RNA, 21 nt, Human
uuaaaacagacacuggcaugg

SEQ ID NO: 1465379 - RNA, 14 nt, Human
uuaaaacagacacu

SEQ ID NO: 1465380 - RNA, 23 nt, Human
uguuuuaaaaugagaaaucuaaa

SEQ ID NO: 1465381 - RNA, 13 nt, Human
uguuuuucacauu

SEQ ID NO: 1465382 - RNA, 12 nt, Human
uguuuuuucuaa

SEQ ID NO: 1465383 - RNA, 22 nt, Human
uguuucuauuuuuugaaaagca

SEQ ID NO: 1465384 - RNA, 16 nt, Human
uguuucuauuuuuuga

SEQ ID NO: 1465385 - RNA, 18 nt, Human
uguuuuaaaaugagaaau

SEQ ID NO: 1465386 - RNA, 17 nt, Human
uguuuguuuccuuuguu

SEQ ID NO: 1465387 - RNA, 23 nt, Human
uggguaggaaagaggaagcaaau

SEQ ID NO: 1465388 - RNA, 17 nt, Human
uggguaguggggaagag

SEQ ID NO: 1465389 - RNA, 16 nt, Human
uggguagccugggugu

SEQ ID NO: 1465390 - RNA, 12 nt, Human
uggguccaggag

SEQ ID NO: 1465391 - RNA, 14 nt, Human
uggguccaggagga

SEQ ID NO: 1465392 - RNA, 22 nt, Human
ugggguggggggggugcugggc

SEQ ID NO: 1465393 - RNA, 21 nt, Human
ugggguggggggggugcuggg

SEQ ID NO: 1465394 - RNA, 17 nt, Human
uggguagacacacauga

SEQ ID NO: 1465395 - RNA, 16 nt, Human
uggguagacacacaug

SEQ ID NO: 1465396 - RNA, 19 nt, Human
ugggguggggggggugcug

SEQ ID NO: 1465397 - RNA, 16 nt, Human
uggggcaggggccggg

SEQ ID NO: 1465398 - RNA, 18 nt, Human
uggggcaggggccggggg

SEQ ID NO: 1465399 - RNA, 16 nt, Human
uggguugcagacagga

SEQ ID NO: 1465400 - RNA, 21 nt, Human
uggguugcagacaggaaucuu

SEQ ID NO: 1465401 - RNA, 13 nt, Human
uggguccaggagg

SEQ ID NO: 1465402 - RNA, 13 nt, Human
ugggcauucaaau

SEQ ID NO: 1465403 - RNA, 16 nt, Human
ugggagcuuuuguaga

SEQ ID NO: 1465404 - RNA, 19 nt, Human
ugggagcugguuagaaaug

SEQ ID NO: 1465405 - RNA, 16 nt, Human
ugggagcuugggaaug

SEQ ID NO: 1465406 - RNA, 18 nt, Human
ugggagcugguuagaaau

SEQ ID NO: 1465407 - RNA, 20 nt, Human
ugggagcugguuagaaaugc

SEQ ID NO: 1465408 - RNA, 14 nt, Human
ugggccuugggcuc

SEQ ID NO: 1465409 - RNA, 15 nt, Human
ugggccuugggcucc

SEQ ID NO: 1465410 - RNA, 16 nt, Human
ugggccuugggcuccg

SEQ ID NO: 1465411 - RNA, 19 nt, Human
ugggacauuugcucaugga

SEQ ID NO: 1465412 - RNA, 20 nt, Human
ugggacauuugcucauggaa

SEQ ID NO: 1465413 - RNA, 17 nt, Human
ugggaccacaacuauuu

SEQ ID NO: 1465414 - RNA, 20 nt, Human
uggcuuugugauucaaucug

SEQ ID NO: 1465415 - RNA, 23 nt, Human
ugggaauggaggggcagagccag

SEQ ID NO: 1465416 - RNA, 18 nt, Human
ugggacagucaccucaug

SEQ ID NO: 1465417 - RNA, 20 nt, Human
ugggacagucaccucaugga

SEQ ID NO: 1465418 - RNA, 21 nt, Human
ugggacagucaccucauggaa

SEQ ID NO: 1465419 - RNA, 19 nt, Human
ugggaauggaggggcagag

SEQ ID NO: 1465420 - RNA, 17 nt, Human
ugggaauggaggggcag

SEQ ID NO: 1465421 - RNA, 18 nt, Human
uggcgcgaucucagcuca

SEQ ID NO: 1465422 - RNA, 21 nt, Human
uggcgcgaucucggcucacug

SEQ ID NO: 1465423 - RNA, 15 nt, Human
uggcgcaggaacuca

SEQ ID NO: 1465424 - RNA, 18 nt, Human
uggccuuguaagacccuu

SEQ ID NO: 1465425 - RNA, 22 nt, Human
uggccuuuauuaaaaacugagu

SEQ ID NO: 1465426 - RNA, 12 nt, Human
uggccuuuauua

SEQ ID NO: 1465427 - RNA, 23 nt, Human
uggccuuguaagacccuuauugc

SEQ ID NO: 1465428 - RNA, 20 nt, Human
uggcuggggcauggaaggca

SEQ ID NO: 1465429 - RNA, 14 nt, Human
uggcuggggcaugg

SEQ ID NO: 1465430 - RNA, 16 nt, Human
uggaauacucuuauau

SEQ ID NO: 1465431 - RNA, 14 nt, Human
uggaauacaugaaa

SEQ ID NO: 1465432 - RNA, 15 nt, Human
uggaauacaugaaau

SEQ ID NO: 1465433 - RNA, 23 nt, Human
uggaauguggccccugaacaaga

SEQ ID NO: 1465434 - RNA, 21 nt, Human
uggaauguggccccugaacaa

SEQ ID NO: 1465435 - RNA, 22 nt, Human
uggaaucacuguuuagaacaca

SEQ ID NO: 1465436 - RNA, 16 nt, Human
uggaaucagcucagga

SEQ ID NO: 1465437 - RNA, 19 nt, Human
uggaacccuaaauaauaaa

SEQ ID NO: 1465438 - RNA, 23 nt, Human
uggaacugucucucaugaaccuc

SEQ ID NO: 1465439 - RNA, 13 nt, Human
uggaacucugcuu

SEQ ID NO: 1465440 - RNA, 14 nt, Human
ugcuucuguuuuau

SEQ ID NO: 1465441 - RNA, 20 nt, Human
ugcuucuaguucugccagga

SEQ ID NO: 1465442 - RNA, 18 nt, Human
ugcuucuaguucugccag

SEQ ID NO: 1465443 - RNA, 19 nt, Human
ugcuucuaguucugccagg

SEQ ID NO: 1465444 - RNA, 13 nt, Human
uggagauguuuag

SEQ ID NO: 1465445 - RNA, 24 nt, Human
uggagaugaggccagaccauggac

SEQ ID NO: 1465446 - RNA, 14 nt, Human
uggagaugguggau

SEQ ID NO: 1465447 - RNA, 18 nt, Human
uggagaugaggccagacc

SEQ ID NO: 1465448 - RNA, 22 nt, Human
uggagaugaggccagaccaugg

SEQ ID NO: 1465449 - RNA, 19 nt, Human
uggagaugaggccagacca

SEQ ID NO: 1465450 - RNA, 15 nt, Human
uggagagggaaugug

SEQ ID NO: 1465451 - RNA, 16 nt, Human
uggagagggaauguga

SEQ ID NO: 1465452 - RNA, 17 nt, Human
uggagagggaaugugaa

SEQ ID NO: 1465453 - RNA, 19 nt, Human
uggagagggaaugugaaau

SEQ ID NO: 1465454 - RNA, 18 nt, Human
uggagagggaaugugaaa

SEQ ID NO: 1465455 - RNA, 18 nt, Human
uggacaggauguguuugc

SEQ ID NO: 1465456 - RNA, 12 nt, Human
uggacagcuugu

SEQ ID NO: 1465457 - RNA, 13 nt, Human
uggacagcuugug

SEQ ID NO: 1465458 - RNA, 13 nt, Human
uggacaggaugug

SEQ ID NO: 1465459 - RNA, 22 nt, Human
uggaggccauugugugagccua

SEQ ID NO: 1465460 - RNA, 16 nt, Human
uggauauaguuuuacu

SEQ ID NO: 1465461 - RNA, 14 nt, Human
uggaugacauuaaa

SEQ ID NO: 1465462 - RNA, 22 nt, Human
uggaugauccccacgccacagc

SEQ ID NO: 1465463 - RNA, 20 nt, Human
uggcaguuuauauuuaacuc

SEQ ID NO: 1465464 - RNA, 16 nt, Human
uggcaguuuauauuua

SEQ ID NO: 1465465 - RNA, 20 nt, Human
uggcaggcaggcucccaggg

SEQ ID NO: 1465466 - RNA, 12 nt, Human
uggcagaaaagu

SEQ ID NO: 1465467 - RNA, 16 nt, Human
ugcacuuggcugcaua

SEQ ID NO: 1465468 - RNA, 15 nt, Human
ugcacaucaaaauau

SEQ ID NO: 1465469 - RNA, 12 nt, Human
ugcacaucccug

SEQ ID NO: 1465470 - RNA, 13 nt, Human
ugcaccuaaagaa

SEQ ID NO: 1465471 - RNA, 14 nt, Human
ugcaccuaaagaaa

SEQ ID NO: 1465472 - RNA, 15 nt, Human
ugcaccuaaagaaaa

SEQ ID NO: 1465473 - RNA, 16 nt, Human
ugcaccuaaagaaaaa

SEQ ID NO: 1465474 - RNA, 19 nt, Human
ugcaccuaaagaaaaacaa

SEQ ID NO: 1465475 - RNA, 21 nt, Human
ugcaccuaaagaaaaacaaac

SEQ ID NO: 1465476 - RNA, 20 nt, Human
ugccaggcuggagugcagug

SEQ ID NO: 1465477 - RNA, 17 nt, Human
ugccaagagugaaggga

SEQ ID NO: 1465478 - RNA, 21 nt, Human
ugccaugaugccucugucuuc

SEQ ID NO: 1465479 - RNA, 20 nt, Human
ugccaugaugccucugucuu

SEQ ID NO: 1465480 - RNA, 15 nt, Human
ugcauuauauuuauu

SEQ ID NO: 1465481 - RNA, 20 nt, Human
ugcauuauauuuauuacugu

SEQ ID NO: 1465482 - RNA, 21 nt, Human
ugcauuauauuuauuacugua

SEQ ID NO: 1465483 - RNA, 16 nt, Human
ugccaaaaaaaaauac

SEQ ID NO: 1465484 - RNA, 14 nt, Human
ugccaagacugcug

SEQ ID NO: 1465485 - RNA, 17 nt, Human
ugccaagacugcugugg

SEQ ID NO: 1465486 - RNA, 21 nt, Human
ugccaagacugcuguggccag

SEQ ID NO: 1465487 - RNA, 22 nt, Human
ugccaagacugcuguggccagg

SEQ ID NO: 1465488 - RNA, 23 nt, Human
ugccaagacugcuguggccagga

SEQ ID NO: 1465489 - RNA, 21 nt, Human
ugcauccagccuggggcugag

SEQ ID NO: 1465490 - RNA, 16 nt, Human
ugcauguccuguaaag

SEQ ID NO: 1465491 - RNA, 19 nt, Human
ugcaggaaucuuuaaaaga

SEQ ID NO: 1465492 - RNA, 17 nt, Human
ugcaggaucucaccagg

SEQ ID NO: 1465493 - RNA, 19 nt, Human
ugcaggaucucaccaggca

SEQ ID NO: 1465494 - RNA, 20 nt, Human
ugcaggaucucaccaggcag

SEQ ID NO: 1465495 - RNA, 21 nt, Human
ugcaggaucucaccaggcagc

SEQ ID NO: 1465496 - RNA, 22 nt, Human
ugcaggaucucaccaggcagcc

SEQ ID NO: 1465497 - RNA, 15 nt, Human
ugcugauauuuucuc

SEQ ID NO: 1465498 - RNA, 21 nt, Human
ugcugauauuuucucuaggaa

SEQ ID NO: 1465499 - RNA, 18 nt, Human
ugcugauauuuucucuag

SEQ ID NO: 1465500 - RNA, 15 nt, Human
ugcugauggagccuu

SEQ ID NO: 1465501 - RNA, 16 nt, Human
ugcugauggagccuuc

SEQ ID NO: 1465502 - RNA, 15 nt, Human
ugcucaggagcccug

SEQ ID NO: 1465503 - RNA, 11 nt, Human
ugcucauggaa

SEQ ID NO: 1465504 - RNA, 14 nt, Human
ugcucaggagcccu

SEQ ID NO: 1465505 - RNA, 17 nt, Human
ugcucagcuucuccaac

SEQ ID NO: 1465506 - RNA, 20 nt, Human
ugcucagcuucuccaacaau

SEQ ID NO: 1465507 - RNA, 21 nt, Human
ugcuaggguuaggagguccuu

SEQ ID NO: 1465508 - RNA, 20 nt, Human
ugcuaggguuaggagguccu

SEQ ID NO: 1465509 - RNA, 18 nt, Human
ugcgugguggucccuggg

SEQ ID NO: 1465510 - RNA, 19 nt, Human
ugcgugguggucccugggu

SEQ ID NO: 1465511 - RNA, 21 nt, Human
ugcgugguggucccuggguag

SEQ ID NO: 1465512 - RNA, 23 nt, Human
ugcgguucaggaaaauugaaugc

SEQ ID NO: 1465513 - RNA, 22 nt, Human
ugccuucucaacuccaaacuga

SEQ ID NO: 1465514 - RNA, 15 nt, Human
ugccuuccuguuuuu

SEQ ID NO: 1465515 - RNA, 19 nt, Human
ugccuuccuguuuuucaca

SEQ ID NO: 1465516 - RNA, 21 nt, Human
ugcgcccuuaacugcauccag

SEQ ID NO: 1465517 - RNA, 15 nt, Human
ugccuggcggggugg

SEQ ID NO: 1465518 - RNA, 12 nt, Human
ugccuucauuug

SEQ ID NO: 1465519 - RNA, 15 nt, Human
ugccuuccagaaaac

SEQ ID NO: 1465520 - RNA, 18 nt, Human
ugccuuccagaaaacaaa

SEQ ID NO: 1465521 - RNA, 22 nt, Human
ugccuaaguccaguguuucuuu

SEQ ID NO: 1465522 - RNA, 16 nt, Human
ugccucugucuucugg

SEQ ID NO: 1465523 - RNA, 15 nt, Human
ugccugaauauuugu

SEQ ID NO: 1465524 - RNA, 18 nt, Human
ugccucugucuucuggac

SEQ ID NO: 1465525 - RNA, 22 nt, Human
ucuguuuuauaauuuugugaag

SEQ ID NO: 1465526 - RNA, 17 nt, Human
ucuguuaugcugugaca

SEQ ID NO: 1465527 - RNA, 19 nt, Human
ucuguucacuuuuccuccc

SEQ ID NO: 1465528 - RNA, 21 nt, Human
ucuguucacuuuuccucccuc

SEQ ID NO: 1465529 - RNA, 22 nt, Human
ucuguucacuuuuccucccuca

SEQ ID NO: 1465530 - RNA, 20 nt, Human
ucuguccguucacaugugug

SEQ ID NO: 1465531 - RNA, 21 nt, Human
ucuguaaaacuaagaaacuua

SEQ ID NO: 1465532 - RNA, 14 nt, Human
ucuguaaaacuaag

SEQ ID NO: 1465533 - RNA, 18 nt, Human
ucuguaagcauaagcuua

SEQ ID NO: 1465534 - RNA, 13 nt, Human
ucuggcucugucu

SEQ ID NO: 1465535 - RNA, 23 nt, Human
ucuggagcccacuguacuugcuc

SEQ ID NO: 1465536 - RNA, 21 nt, Human
ucuuguccccaacaccccaca

SEQ ID NO: 1465537 - RNA, 18 nt, Human
ucuuuaaaaggaaagaaa

SEQ ID NO: 1465538 - RNA, 16 nt, Human
ucuuuaaaaggaaaga

SEQ ID NO: 1465539 - RNA, 11 nt, Human
ucuugucaugu

SEQ ID NO: 1465540 - RNA, 13 nt, Human
ucuugucaugugu

SEQ ID NO: 1465541 - RNA, 15 nt, Human
ucuugucauguguau

SEQ ID NO: 1465542 - RNA, 17 nt, Human
ucuugucauguguauaa

SEQ ID NO: 1465543 - RNA, 16 nt, Human
ucuugccucaaccucc

SEQ ID NO: 1465544 - RNA, 16 nt, Human
ucuucuauugccucug

SEQ ID NO: 1465545 - RNA, 13 nt, Human
ucuucuauuuugu

SEQ ID NO: 1465546 - RNA, 15 nt, Human
ucuucuauugccucu

SEQ ID NO: 1465547 - RNA, 14 nt, Human
ucuucuauugccuc

SEQ ID NO: 1465548 - RNA, 14 nt, Human
ucuucuaccaccca

SEQ ID NO: 1465549 - RNA, 12 nt, Human
ucuuaaaacucc

SEQ ID NO: 1465550 - RNA, 13 nt, Human
ucuuaaaacuccu

SEQ ID NO: 1465551 - RNA, 17 nt, Human
ucuuucacauuuaaaua

SEQ ID NO: 1465552 - RNA, 19 nt, Human
ucuuuaaaagaugcuuuua

SEQ ID NO: 1465553 - RNA, 19 nt, Human
ucuuuuguaagguuuuugu

SEQ ID NO: 1465554 - RNA, 19 nt, Human
ucuuuuugggagagacuug

SEQ ID NO: 1465555 - RNA, 19 nt, Human
ucuuuuuuaaaugaagaaa

SEQ ID NO: 1465556 - RNA, 22 nt, Human
ucuuuuugggagagacuuguuu

SEQ ID NO: 1465557 - RNA, 13 nt, Human
ugaaagauucaau

SEQ ID NO: 1465558 - RNA, 16 nt, Human
ugaaaagauaaauuau

SEQ ID NO: 1465559 - RNA, 14 nt, Human
ugaaauccugcuuc

SEQ ID NO: 1465560 - RNA, 19 nt, Human
ugaaaugcagagucaauga

SEQ ID NO: 1465561 - RNA, 19 nt, Human
ugaaauggacuuuuguaca

SEQ ID NO: 1465562 - RNA, 17 nt, Human
ugaacaccauugaaggc

SEQ ID NO: 1465563 - RNA, 20 nt, Human
ugaacaccauugaaggcuua

SEQ ID NO: 1465564 - RNA, 13 nt, Human
ugaacagaacaua

SEQ ID NO: 1465565 - RNA, 17 nt, Human
ugaacauauuguugaaa

SEQ ID NO: 1465566 - RNA, 15 nt, Human
ugaacucuucacucu

SEQ ID NO: 1465567 - RNA, 13 nt, Human
ugaacugaacacc

SEQ ID NO: 1465568 - RNA, 14 nt, Human
ugaacugaacacca

SEQ ID NO: 1465569 - RNA, 12 nt, Human
ugaacugaacac

SEQ ID NO: 1465570 - RNA, 12 nt, Human
ugaacugauuca

SEQ ID NO: 1465571 - RNA, 17 nt, Human
ugaacugauucacaucu

SEQ ID NO: 1465572 - RNA, 20 nt, Human
ugaacugauucacaucucau

SEQ ID NO: 1465573 - RNA, 21 nt, Human
ugaacugauucacaucucauu

SEQ ID NO: 1465574 - RNA, 22 nt, Human
ugaacugaacaccauugaaggc

SEQ ID NO: 1465575 - RNA, 19 nt, Human
ugaagagguuuuaaagcuu

SEQ ID NO: 1465576 - RNA, 15 nt, Human
ugaagauauuuuucc

SEQ ID NO: 1465577 - RNA, 21 nt, Human
ugaaguccaagcauuuagaug

SEQ ID NO: 1465578 - RNA, 22 nt, Human
ugaaguccaagcauuuagaugu

SEQ ID NO: 1465579 - RNA, 22 nt, Human
ugaacuuguaaaggaauuuaaa

SEQ ID NO: 1465580 - RNA, 10 nt, Human
ucggaccagc

SEQ ID NO: 1465581 - RNA, 16 nt, Human
ucgcuucauguaacua

SEQ ID NO: 1465582 - RNA, 21 nt, Human
ucgcccagcggcaucaggcuu

SEQ ID NO: 1465583 - RNA, 17 nt, Human
uccuuuuuccaacaaga

SEQ ID NO: 1465584 - RNA, 15 nt, Human
uccuuuuuccaacaa

SEQ ID NO: 1465585 - RNA, 17 nt, Human
uccuuggccaugcagaa

SEQ ID NO: 1465586 - RNA, 16 nt, Human
uccuguauucagacag

SEQ ID NO: 1465587 - RNA, 17 nt, Human
uccuguauucagacaga

SEQ ID NO: 1465588 - RNA, 20 nt, Human
uccuguauucagacagauga

SEQ ID NO: 1465589 - RNA, 19 nt, Human
uccuguaaagguuacaagc

SEQ ID NO: 1465590 - RNA, 20 nt, Human
uccuggugccaauuucaagu

SEQ ID NO: 1465591 - RNA, 21 nt, Human
uccuggugccaauuucaaguu

SEQ ID NO: 1465592 - RNA, 22 nt, Human
uccuugauuuuagccuucucug

SEQ ID NO: 1465593 - RNA, 23 nt, Human
uccuugauuuuagccuucucugu

SEQ ID NO: 1465594 - RNA, 21 nt, Human
uccuuacaaguuagaaaacau

SEQ ID NO: 1465595 - RNA, 22 nt, Human
uccuuacaaguuagaaaacaua

SEQ ID NO: 1465596 - RNA, 21 nt, Human
uccuucaaaguuuaauaaauu

SEQ ID NO: 1465597 - RNA, 18 nt, Human
uccuucaacaauucuaaa

SEQ ID NO: 1465598 - RNA, 20 nt, Human
uccuucaacaauucuaaaau

SEQ ID NO: 1465599 - RNA, 16 nt, Human
uccuuaaggcucuuuu

SEQ ID NO: 1465600 - RNA, 21 nt, Human
uccuguauucagacagaugag

SEQ ID NO: 1465601 - RNA, 19 nt, Human
uccuuaaggcucuuuugua

SEQ ID NO: 1465602 - RNA, 17 nt, Human
uccuuaagucagaacag

SEQ ID NO: 1465603 - RNA, 16 nt, Human
ucuaaauucuuucauu

SEQ ID NO: 1465604 - RNA, 21 nt, Human
ucuacacuaagagagaaugag

SEQ ID NO: 1465605 - RNA, 13 nt, Human
ucuaacucagcaa

SEQ ID NO: 1465606 - RNA, 17 nt, Human
ucuagaacacaggcaaa

SEQ ID NO: 1465607 - RNA, 19 nt, Human
ucuacacucuuguaauaaa

SEQ ID NO: 1465608 - RNA, 15 nt, Human
ucucaacuccaaacu

SEQ ID NO: 1465609 - RNA, 16 nt, Human
ucucaaacuccugacc

SEQ ID NO: 1465610 - RNA, 21 nt, Human
ucucaaacuccugaccucagg

SEQ ID NO: 1465611 - RNA, 23 nt, Human
ucucaaacuccugaccucaggca

SEQ ID NO: 1465612 - RNA, 24 nt, Human
ucuaguauuccagaccugaagaau

SEQ ID NO: 1465613 - RNA, 14 nt, Human
ucucaguugcagcc

SEQ ID NO: 1465614 - RNA, 15 nt, Human
ucucucgugaguaua

SEQ ID NO: 1465615 - RNA, 19 nt, Human
ucucugauuuucaaagcuu

SEQ ID NO: 1465616 - RNA, 20 nt, Human
ucucugauuuucaaagcuuu

SEQ ID NO: 1465617 - RNA, 12 nt, Human
ucucugaacaca

SEQ ID NO: 1465618 - RNA, 19 nt, Human
ucucuauaccaauaaagug

SEQ ID NO: 1465619 - RNA, 17 nt, Human
ucucuauaccaauaaag

SEQ ID NO: 1465620 - RNA, 16 nt, Human
ucucuauaccaauaaa

SEQ ID NO: 1465621 - RNA, 14 nt, Human
ucucuauaccaaua

SEQ ID NO: 1465622 - RNA, 13 nt, Human
ucucuaggaaaua

SEQ ID NO: 1465623 - RNA, 19 nt, Human
ucucuaggaaauauuuauu

SEQ ID NO: 1465624 - RNA, 20 nt, Human
ucucuaccacugcugauauu

SEQ ID NO: 1465625 - RNA, 20 nt, Human
ucucuucugaauaaagcaau

SEQ ID NO: 1465626 - RNA, 19 nt, Human
ucucuucugaauaaagcaa

SEQ ID NO: 1465627 - RNA, 11 nt, Human
ucucugcaggu

SEQ ID NO: 1465628 - RNA, 15 nt, Human
ucucuuauugccuca

SEQ ID NO: 1465629 - RNA, 16 nt, Human
ucucuuauugccucac

SEQ ID NO: 1465630 - RNA, 17 nt, Human
ucucugcaaacugccuu

SEQ ID NO: 1465631 - RNA, 19 nt, Human
ucucugcaaacugccuucu

SEQ ID NO: 1465632 - RNA, 17 nt, Human
ucucuucagucucuaua

SEQ ID NO: 1465633 - RNA, 13 nt, Human
ucucuucagucuc

SEQ ID NO: 1465634 - RNA, 22 nt, Human
ucucuuauugccucacuucagg

SEQ ID NO: 1465635 - RNA, 14 nt, Human
ucugaaauuuccug

SEQ ID NO: 1465636 - RNA, 12 nt, Human
ucugaacucaaa

SEQ ID NO: 1465637 - RNA, 14 nt, Human
ucugaacucaaacu

SEQ ID NO: 1465638 - RNA, 16 nt, Human
ucugaacucaaacuga

SEQ ID NO: 1465639 - RNA, 17 nt, Human
ucugaacucaaacugag

SEQ ID NO: 1465640 - RNA, 21 nt, Human
ucugaacucaaacugaggaau

SEQ ID NO: 1465641 - RNA, 19 nt, Human
ucugauucgaaugacacug

SEQ ID NO: 1465642 - RNA, 22 nt, Human
ucugauucgaaugacacuguuc

SEQ ID NO: 1465643 - RNA, 20 nt, Human
ucugauucgaaugacacugu

SEQ ID NO: 1465644 - RNA, 17 nt, Human
ucugacauucugauucg

SEQ ID NO: 1465645 - RNA, 21 nt, Human
ucagcacuuuagaauaugccu

SEQ ID NO: 1465646 - RNA, 17 nt, Human
ucagcagccucccugaa

SEQ ID NO: 1465647 - RNA, 12 nt, Human
ucaguugcagcc

SEQ ID NO: 1465648 - RNA, 17 nt, Human
ucaguugauuuucugga

SEQ ID NO: 1465649 - RNA, 18 nt, Human
ucaguugauuuucuggau

SEQ ID NO: 1465650 - RNA, 15 nt, Human
ucauaauuauuauuu

SEQ ID NO: 1465651 - RNA, 14 nt, Human
ucauacauuuucua

SEQ ID NO: 1465652 - RNA, 13 nt, Human
ucauacacagaaa

SEQ ID NO: 1465653 - RNA, 19 nt, Human
ucauguaagcugaaaauau

SEQ ID NO: 1465654 - RNA, 18 nt, Human
ucauguaagcugaaaaua

SEQ ID NO: 1465655 - RNA, 20 nt, Human
ucauguaacuucccugaaaa

SEQ ID NO: 1465656 - RNA, 15 nt, Human
ucaugcuaucucugu

SEQ ID NO: 1465657 - RNA, 22 nt, Human
ucaugcuaauuauauaauauuu

SEQ ID NO: 1465658 - RNA, 21 nt, Human
ucauacauuuucuaagaaaca

SEQ ID NO: 1465659 - RNA, 14 nt, Human
ucaucucuucuuuu

SEQ ID NO: 1465660 - RNA, 22 nt, Human
ucauucagauaugauucaaaug

SEQ ID NO: 1465661 - RNA, 16 nt, Human
uccaaaagauugcuga

SEQ ID NO: 1465662 - RNA, 23 nt, Human
ucauuucuuuuugggagagacuu

SEQ ID NO: 1465663 - RNA, 23 nt, Human
uccaaacugacucuuaagaagac

SEQ ID NO: 1465664 - RNA, 19 nt, Human
uccaaaagauugcugaaau

SEQ ID NO: 1465665 - RNA, 20 nt, Human
uccaaaagauugcugaaauu

SEQ ID NO: 1465666 - RNA, 22 nt, Human
uccaaaagauugcugaaauuuu

SEQ ID NO: 1465667 - RNA, 13 nt, Human
uccaaaagcuuuu

SEQ ID NO: 1465668 - RNA, 16 nt, Human
uccaaaagcuuuuuau

SEQ ID NO: 1465669 - RNA, 22 nt, Human
ucauuucuuuuugggagagacu

SEQ ID NO: 1465670 - RNA, 14 nt, Human
uccaagaauuucua

SEQ ID NO: 1465671 - RNA, 22 nt, Human
uccaaaggaggauggcauauaa

SEQ ID NO: 1465672 - RNA, 16 nt, Human
uccaaagcuucccacg

SEQ ID NO: 1465673 - RNA, 13 nt, Human
uccaagcaaaugu

SEQ ID NO: 1465674 - RNA, 17 nt, Human
uccaagcauuuagaugu

SEQ ID NO: 1465675 - RNA, 17 nt, Human
uccaagacaugucuguu

SEQ ID NO: 1465676 - RNA, 20 nt, Human
uccaagacaugucuguucua

SEQ ID NO: 1465677 - RNA, 22 nt, Human
uccaagacaugucuguucuaca

SEQ ID NO: 1465678 - RNA, 16 nt, Human
uccagauccuggaaau

SEQ ID NO: 1465679 - RNA, 17 nt, Human
uccagauccuggaaauc

SEQ ID NO: 1465680 - RNA, 14 nt, Human
uccagauccuggaa

SEQ ID NO: 1465681 - RNA, 22 nt, Human
uccagcagauuuccagccuucu

SEQ ID NO: 1465682 - RNA, 19 nt, Human
uccagaaauacaauuuuag

SEQ ID NO: 1465683 - RNA, 18 nt, Human
uccaccgcagaaggaagg

SEQ ID NO: 1465684 - RNA, 17 nt, Human
uccaccgcagaaggaag

SEQ ID NO: 1465685 - RNA, 16 nt, Human
uccaccgcagaaggaa

SEQ ID NO: 1465686 - RNA, 15 nt, Human
uccaccgcagaagga

SEQ ID NO: 1465687 - RNA, 14 nt, Human
uccaccucaacucc

SEQ ID NO: 1465688 - RNA, 15 nt, Human
uccaagcaaauguga

SEQ ID NO: 1465689 - RNA, 20 nt, Human
uccaagcauuuagauguaua

SEQ ID NO: 1465690 - RNA, 22 nt, Human
uccaauuuucuggaauacauga

SEQ ID NO: 1465691 - RNA, 21 nt, Human
ucccaaguaacugggauuaca

SEQ ID NO: 1465692 - RNA, 20 nt, Human
ucccaaguaacugggauuac

SEQ ID NO: 1465693 - RNA, 15 nt, Human
ucccaggagacaguu

SEQ ID NO: 1465694 - RNA, 16 nt, Human
ucccaggagacaguuc

SEQ ID NO: 1465695 - RNA, 22 nt, Human
ucccaggagacaguucaagaaa

SEQ ID NO: 1465696 - RNA, 13 nt, Human
ucccauuccccca

SEQ ID NO: 1465697 - RNA, 19 nt, Human
ucccauucccccagugcgg

SEQ ID NO: 1465698 - RNA, 14 nt, Human
uccauggcccugcc

SEQ ID NO: 1465699 - RNA, 18 nt, Human
uccauggcaggaaggcuu

SEQ ID NO: 1465700 - RNA, 14 nt, Human
ucccuaauaaagcu

SEQ ID NO: 1465701 - RNA, 13 nt, Human
ucccuaauaaagc

SEQ ID NO: 1465702 - RNA, 15 nt, Human
ucccuacugaagccc

SEQ ID NO: 1465703 - RNA, 18 nt, Human
ucccuacugaagcccuug

SEQ ID NO: 1465704 - RNA, 21 nt, Human
ucccuacugaagcccuuguga

SEQ ID NO: 1465705 - RNA, 12 nt, Human
ucccuaauaaag

SEQ ID NO: 1465706 - RNA, 11 nt, Human
ucccuaauaaa

SEQ ID NO: 1465707 - RNA, 14 nt, Human
ucccuaagccagcu

SEQ ID NO: 1465708 - RNA, 13 nt, Human
ucccuaagccagc

SEQ ID NO: 1465709 - RNA, 11 nt, Human
ucccuaagcca

SEQ ID NO: 1465710 - RNA, 18 nt, Human
uccccuggaacugucucu

SEQ ID NO: 1465711 - RNA, 20 nt, Human
uccccuggaacugucucuca

SEQ ID NO: 1465712 - RNA, 14 nt, Human
uccccgcacccccc

SEQ ID NO: 1465713 - RNA, 21 nt, Human
uccccgcaccccccaagcugu

SEQ ID NO: 1465714 - RNA, 13 nt, Human
uccccugcacugu

SEQ ID NO: 1465715 - RNA, 14 nt, Human
uccccugcacugua

SEQ ID NO: 1465716 - RNA, 15 nt, Human
uccccugcacuguaa

SEQ ID NO: 1465717 - RNA, 16 nt, Human
uccccugcacuguaaa

SEQ ID NO: 1465718 - RNA, 17 nt, Human
uccccugcacuguaaaa

SEQ ID NO: 1465719 - RNA, 18 nt, Human
uccccugcacuguaaaau

SEQ ID NO: 1465720 - RNA, 19 nt, Human
uccccugcacuguaaaaug

SEQ ID NO: 1465721 - RNA, 22 nt, Human
uccccugcacuguaaaaugugg

SEQ ID NO: 1465722 - RNA, 12 nt, Human
ucccccagugcg

SEQ ID NO: 1465723 - RNA, 18 nt, Human
ucccccuccucuccacca

SEQ ID NO: 1465724 - RNA, 15 nt, Human
ucacucugaguguuu

SEQ ID NO: 1465725 - RNA, 20 nt, Human
ucacucugaguguuuuauga

SEQ ID NO: 1465726 - RNA, 14 nt, Human
ucacgcuuuccuga

SEQ ID NO: 1465727 - RNA, 15 nt, Human
ucacgcuuuccugaa

SEQ ID NO: 1465728 - RNA, 16 nt, Human
ucacgcuuuccugaau

SEQ ID NO: 1465729 - RNA, 17 nt, Human
ucacgcuuuccugaauc

SEQ ID NO: 1465730 - RNA, 22 nt, Human
ucacgcuuuccugaauccaaac

SEQ ID NO: 1465731 - RNA, 16 nt, Human
ucacgcuuuuugaaaa

SEQ ID NO: 1465732 - RNA, 18 nt, Human
ucacgccagacuucccac

SEQ ID NO: 1465733 - RNA, 21 nt, Human
ucagcaaacaggaucaguuaa

SEQ ID NO: 1465734 - RNA, 15 nt, Human
ucagcaaacucuuuu

SEQ ID NO: 1465735 - RNA, 21 nt, Human
ucagaguugcugcaaaccuga

SEQ ID NO: 1465736 - RNA, 15 nt, Human
ucagcaaacaggauc

SEQ ID NO: 1465737 - RNA, 22 nt, Human
ucagaguugaugguuguacaua

SEQ ID NO: 1465738 - RNA, 19 nt, Human
ucagcaaguuagaacuagc

SEQ ID NO: 1465739 - RNA, 16 nt, Human
ucagcaacucgcuuua

SEQ ID NO: 1465740 - RNA, 21 nt, Human
ucagcaaguuagaacuagcca

SEQ ID NO: 1465741 - RNA, 19 nt, Human
ucagacucuaagaaagaac

SEQ ID NO: 1465742 - RNA, 17 nt, Human
ucagacucuaagaaaga

SEQ ID NO: 1465743 - RNA, 18 nt, Human
ucagacucuaagaaagaa

SEQ ID NO: 1465744 - RNA, 17 nt, Human
ucacuugucaauaaaau

SEQ ID NO: 1465745 - RNA, 16 nt, Human
ucacuuguacaaaaua

SEQ ID NO: 1465746 - RNA, 17 nt, Human
ucacuuguacaaaauaa

SEQ ID NO: 1465747 - RNA, 13 nt, Human
ucacuuguacaaa

SEQ ID NO: 1465748 - RNA, 14 nt, Human
ucacuuguacaaaa

SEQ ID NO: 1465749 - RNA, 15 nt, Human
ucacuuguacaaaau

SEQ ID NO: 1465750 - RNA, 17 nt, Human
ucacucugaguguuuua

SEQ ID NO: 1465751 - RNA, 12 nt, Human
ucacuuuuccuc

SEQ ID NO: 1465752 - RNA, 14 nt, Human
ucacuuucuagauu

SEQ ID NO: 1465753 - RNA, 14 nt, Human
ucacuuucucaguu

SEQ ID NO: 1465754 - RNA, 19 nt, Human
ucacuuuuaaugaacaaau

SEQ ID NO: 1465755 - RNA, 21 nt, Human
ucacuuuuaaugaacaaaugg

SEQ ID NO: 1465756 - RNA, 13 nt, Human
ucacuuuuccucc

SEQ ID NO: 1465757 - RNA, 18 nt, Human
ucacuuuuccucccucag

SEQ ID NO: 1465758 - RNA, 20 nt, Human
ucagaaaauaucccuccugu

SEQ ID NO: 1465759 - RNA, 16 nt, Human
uauuuuauguugcaua

SEQ ID NO: 1465760 - RNA, 15 nt, Human
uauuuuauguugcau

SEQ ID NO: 1465761 - RNA, 13 nt, Human
uauuuucaagaaa

SEQ ID NO: 1465762 - RNA, 16 nt, Human
uauuuucaagaaacug

SEQ ID NO: 1465763 - RNA, 14 nt, Human
uauuuucagaugug

SEQ ID NO: 1465764 - RNA, 13 nt, Human
uauuuucuuggau

SEQ ID NO: 1465765 - RNA, 18 nt, Human
uauuuugacauaaaguug

SEQ ID NO: 1465766 - RNA, 17 nt, Human
uauuuugacauaaaguu

SEQ ID NO: 1465767 - RNA, 22 nt, Human
uauuuuuuucugaauuauuuuc

SEQ ID NO: 1465768 - RNA, 16 nt, Human
uauuuuuuucugaaau

SEQ ID NO: 1465769 - RNA, 17 nt, Human
uauuuuuuucugaaauu

SEQ ID NO: 1465770 - RNA, 13 nt, Human
ucaaaaaauugca

SEQ ID NO: 1465771 - RNA, 12 nt, Human
ucaaaacauugu

SEQ ID NO: 1465772 - RNA, 22 nt, Human
ucaaaacauugugccaugucaa

SEQ ID NO: 1465773 - RNA, 18 nt, Human
ucaaacuacauauuguaa

SEQ ID NO: 1465774 - RNA, 13 nt, Human
uauuuauuacugu

SEQ ID NO: 1465775 - RNA, 22 nt, Human
uauuucuaugaaauauuauguu

SEQ ID NO: 1465776 - RNA, 21 nt, Human
uauuucuaugaaauauuaugu

SEQ ID NO: 1465777 - RNA, 20 nt, Human
uaucugaauuuuuaaacaag

SEQ ID NO: 1465778 - RNA, 19 nt, Human
uaucugaauuuuuaaacaa

SEQ ID NO: 1465779 - RNA, 13 nt, Human
uauuucuuaaaca

SEQ ID NO: 1465780 - RNA, 16 nt, Human
uauuucuuaaacacuu

SEQ ID NO: 1465781 - RNA, 19 nt, Human
uauuucuuaaaucuaguaa

SEQ ID NO: 1465782 - RNA, 21 nt, Human
uauuuuagugaacuugaaaua

SEQ ID NO: 1465783 - RNA, 19 nt, Human
ucaacuccaaacugacucu

SEQ ID NO: 1465784 - RNA, 19 nt, Human
ucaaaacagauuguuugca

SEQ ID NO: 1465785 - RNA, 11 nt, Human
ucaaccucauc

SEQ ID NO: 1465786 - RNA, 12 nt, Human
ucaaccucccaa

SEQ ID NO: 1465787 - RNA, 18 nt, Human
ucaaacuccugaccucag

SEQ ID NO: 1465788 - RNA, 20 nt, Human
ucaaacuccugaccucaggc

SEQ ID NO: 1465789 - RNA, 21 nt, Human
ucaaacuccugaccucaggca

SEQ ID NO: 1465790 - RNA, 15 nt, Human
ucaaacugaggaauu

SEQ ID NO: 1465791 - RNA, 16 nt, Human
ucaagccccggacuca

SEQ ID NO: 1465792 - RNA, 23 nt, Human
ucacaggacagcccuucuuucca

SEQ ID NO: 1465793 - RNA, 16 nt, Human
ucacaauaauuuucua

SEQ ID NO: 1465794 - RNA, 15 nt, Human
ucacaauaauuuucu

SEQ ID NO: 1465795 - RNA, 16 nt, Human
guuuaguaaucauauu

SEQ ID NO: 1465796 - RNA, 14 nt, Human
gguugcagacagga

SEQ ID NO: 1465797 - RNA, 16 nt, Human
guuuacuuguuucaga

SEQ ID NO: 1465798 - RNA, 16 nt, Human
guuuccuuauauuaug

SEQ ID NO: 1465799 - RNA, 16 nt, Human
guuucccaagagcuac

SEQ ID NO: 1465800 - RNA, 22 nt, Human
guuucaggagagaguugaaccu

SEQ ID NO: 1465801 - RNA, 23 nt, Human
guuucaggagagaguugaaccua

SEQ ID NO: 1465802 - RNA, 18 nt, Human
guuucuuuguaaugaaaa

SEQ ID NO: 1465803 - RNA, 17 nt, Human
guuucuuuguaaugaaa

SEQ ID NO: 1465804 - RNA, 14 nt, Human
guuucuuuguaaug

SEQ ID NO: 1465805 - RNA, 12 nt, Human
guuucuuucuuu

SEQ ID NO: 1465806 - RNA, 23 nt, Human
guuucuuucuuucuuuauuuuga

SEQ ID NO: 1465807 - RNA, 16 nt, Human
guuugugacagggcgg

SEQ ID NO: 1465808 - RNA, 17 nt, Human
guuugugacagggcggg

SEQ ID NO: 1465809 - RNA, 16 nt, Human
guuugauagauuuucu

SEQ ID NO: 1465810 - RNA, 11 nt, Human
uaaaaaacacu

SEQ ID NO: 1465811 - RNA, 22 nt, Human
uaaaaaaauaagaagaaugcuu

SEQ ID NO: 1465812 - RNA, 15 nt, Human
uaaaaaaauaagaag

SEQ ID NO: 1465813 - RNA, 20 nt, Human
uaaaaaaauaagaagaaugc

SEQ ID NO: 1465814 - RNA, 16 nt, Human
guuuuucacauuuucc

SEQ ID NO: 1465815 - RNA, 12 nt, Human
guuuuucacauu

SEQ ID NO: 1465816 - RNA, 14 nt, Human
guuuuucacauuuu

SEQ ID NO: 1465817 - RNA, 21 nt, Human
guuuuuaucugaaaucaauua

SEQ ID NO: 1465818 - RNA, 17 nt, Human
uaaaaacaaagaaauua

SEQ ID NO: 1465819 - RNA, 14 nt, Human
uaaaaaauggucac

SEQ ID NO: 1465820 - RNA, 19 nt, Human
uaaaaaagcuuaaaacuuu

SEQ ID NO: 1465821 - RNA, 17 nt, Human
uaaaaaagaucccaaau

SEQ ID NO: 1465822 - RNA, 17 nt, Human
uaaaaaagcuuaaaacu

SEQ ID NO: 1465823 - RNA, 18 nt, Human
uaaaaaagcuuaaaacuu

SEQ ID NO: 1465824 - RNA, 20 nt, Human
uaaaaacuagaggugagaaa

SEQ ID NO: 1465825 - RNA, 21 nt, Human
uaaaaacugagugacucuaua

SEQ ID NO: 1465826 - RNA, 16 nt, Human
uaaaaacugagugacu

SEQ ID NO: 1465827 - RNA, 19 nt, Human
uaaaaaugauuucaguagc

SEQ ID NO: 1465828 - RNA, 16 nt, Human
uaaaaaagaaacauuu

SEQ ID NO: 1465829 - RNA, 17 nt, Human
uaaaaaacuaaaaacua

SEQ ID NO: 1465830 - RNA, 19 nt, Human
uaaaaaacuaaaaacuaga

SEQ ID NO: 1465831 - RNA, 20 nt, Human
uaaaaaagcuuaaaacuuug

SEQ ID NO: 1465832 - RNA, 12 nt, Human
uaaaaaacacug

SEQ ID NO: 1465833 - RNA, 18 nt, Human
guuuucaggcuagaugua

SEQ ID NO: 1465834 - RNA, 23 nt, Human
guuugugccuuuuuauuuuuguu

SEQ ID NO: 1465835 - RNA, 13 nt, Human
guuuucuccuccc

SEQ ID NO: 1465836 - RNA, 16 nt, Human
guuuucuccucccagg

SEQ ID NO: 1465837 - RNA, 18 nt, Human
guuuucuccucccaggaa

SEQ ID NO: 1465838 - RNA, 21 nt, Human
guuuucuccucccaggaacug

SEQ ID NO: 1465839 - RNA, 18 nt, Human
guuuucuccaagagcuac

SEQ ID NO: 1465840 - RNA, 14 nt, Human
guuuucucugaaca

SEQ ID NO: 1465841 - RNA, 16 nt, Human
uaaaaugagaaaucua

SEQ ID NO: 1465842 - RNA, 15 nt, Human
uaaaaugagaaaucu

SEQ ID NO: 1465843 - RNA, 13 nt, Human
uaaaaugagaaau

SEQ ID NO: 1465844 - RNA, 23 nt, Human
uaaaaucuugucauguguauaaa

SEQ ID NO: 1465845 - RNA, 20 nt, Human
uaaaaucuugucauguguau

SEQ ID NO: 1465846 - RNA, 19 nt, Human
uaaaaucuugucaugugua

SEQ ID NO: 1465847 - RNA, 21 nt, Human
uaaaaucuugucauguguaua

SEQ ID NO: 1465848 - RNA, 22 nt, Human
uaaaaucuugucauguguauaa

SEQ ID NO: 1465849 - RNA, 13 nt, Human
uaaaauauuuauu

SEQ ID NO: 1465850 - RNA, 19 nt, Human
uaaaauccauacauuugug

SEQ ID NO: 1465851 - RNA, 21 nt, Human
uaaaagggacugagaaauuua

SEQ ID NO: 1465852 - RNA, 20 nt, Human
uaaaagggacugagaaauuu

SEQ ID NO: 1465853 - RNA, 19 nt, Human
uaaaagggacugagaaauu

SEQ ID NO: 1465854 - RNA, 17 nt, Human
uaaaagggacugagaaa

SEQ ID NO: 1465855 - RNA, 22 nt, Human
uaaaaauggaaacuauauugac

SEQ ID NO: 1465856 - RNA, 15 nt, Human
uaaaaaugaucuaaa

SEQ ID NO: 1465857 - RNA, 16 nt, Human
uaaaaaugauuucagu

SEQ ID NO: 1465858 - RNA, 12 nt, Human
uaaaagaugcuu

SEQ ID NO: 1465859 - RNA, 14 nt, Human
uaaaagaugcuuuu

SEQ ID NO: 1465860 - RNA, 15 nt, Human
uaaaagaugcuuuua

SEQ ID NO: 1465861 - RNA, 21 nt, Human
uaaacacucuugaaaaaugca

SEQ ID NO: 1465862 - RNA, 22 nt, Human
uaaacaaguauuuguuaauuua

SEQ ID NO: 1465863 - RNA, 14 nt, Human
uaaacacagacagg

SEQ ID NO: 1465864 - RNA, 16 nt, Human
uaaacacuugcaaccu

SEQ ID NO: 1465865 - RNA, 13 nt, Human
uaaacaaguauuu

SEQ ID NO: 1465866 - RNA, 18 nt, Human
uaaacaaguauuuguuaa

SEQ ID NO: 1465867 - RNA, 23 nt, Human
uaaacaaguauuuguuaauuuag

SEQ ID NO: 1465868 - RNA, 16 nt, Human
uaaaaugauuguagua

SEQ ID NO: 1465869 - RNA, 20 nt, Human
uaaacagugagccugaauuu

SEQ ID NO: 1465870 - RNA, 23 nt, Human
uaaacagugagccugaauuuugu

SEQ ID NO: 1465871 - RNA, 22 nt, Human
uaaauauauuuuaagacgaaac

SEQ ID NO: 1465872 - RNA, 16 nt, Human
uaaauauauuuuaaga

SEQ ID NO: 1465873 - RNA, 18 nt, Human
uaaauauaugcuaagucu

SEQ ID NO: 1465874 - RNA, 13 nt, Human
uaaauaaacccuu

SEQ ID NO: 1465875 - RNA, 19 nt, Human
uaaaucacgcuuuuugaaa

SEQ ID NO: 1465876 - RNA, 21 nt, Human
uaaaucacgcuuuuugaaaaa

SEQ ID NO: 1465877 - RNA, 22 nt, Human
uaaaucacgcuuuuugaaaaag

SEQ ID NO: 1465878 - RNA, 20 nt, Human
uaaaucagacuaugaaguuu

SEQ ID NO: 1465879 - RNA, 17 nt, Human
uaaauauuuuaaagaau

SEQ ID NO: 1465880 - RNA, 16 nt, Human
uaaaucacgcuuuuug

SEQ ID NO: 1465881 - RNA, 18 nt, Human
uaaaucacgcuuuuugaa

SEQ ID NO: 1465882 - RNA, 22 nt, Human
uaaauauuuuuucuuuucuauu

SEQ ID NO: 1465883 - RNA, 18 nt, Human
uaaauauuuuaaagaauu

SEQ ID NO: 1465884 - RNA, 14 nt, Human
uaaauauuuuaaag

SEQ ID NO: 1465885 - RNA, 15 nt, Human
uaaauauuuuaaaga

SEQ ID NO: 1465886 - RNA, 20 nt, Human
uaaacuuuuuucuuacuguc

SEQ ID NO: 1465887 - RNA, 14 nt, Human
uaaaggacuguaau

SEQ ID NO: 1465888 - RNA, 12 nt, Human
uaaaggacugua

SEQ ID NO: 1465889 - RNA, 19 nt, Human
uaaagcauuuagaaaacuu

SEQ ID NO: 1465890 - RNA, 13 nt, Human
uaaagcauuuaga

SEQ ID NO: 1465891 - RNA, 15 nt, Human
uaaagcguuugcaca

SEQ ID NO: 1465892 - RNA, 21 nt, Human
uaaagcguuugcacagaucaa

SEQ ID NO: 1465893 - RNA, 15 nt, Human
uaaagcuaaaauaaa

SEQ ID NO: 1465894 - RNA, 22 nt, Human
uaaagcuaaaauaaagaaauag

SEQ ID NO: 1465895 - RNA, 23 nt, Human
uaaagcuaaaauaaagaaauaga

SEQ ID NO: 1465896 - RNA, 16 nt, Human
uaaaggcaaaggcaau

SEQ ID NO: 1465897 - RNA, 17 nt, Human
uaaauaaaaauaauccu

SEQ ID NO: 1465898 - RNA, 14 nt, Human
uaaaguuuguugaa

SEQ ID NO: 1465899 - RNA, 14 nt, Human
uaauguuucaaaca

SEQ ID NO: 1465900 - RNA, 15 nt, Human
uaauguuuaaaacau

SEQ ID NO: 1465901 - RNA, 15 nt, Human
uaauguuucaaacau

SEQ ID NO: 1465902 - RNA, 15 nt, Human
uaaugccuuacucuu

SEQ ID NO: 1465903 - RNA, 21 nt, Human
uaaugccuuacucuucuugaa

SEQ ID NO: 1465904 - RNA, 16 nt, Human
uaauuaccaaccuguu

SEQ ID NO: 1465905 - RNA, 17 nt, Human
uaauuaccaaccuguua

SEQ ID NO: 1465906 - RNA, 21 nt, Human
uaauuaccaaccuguuaccua

SEQ ID NO: 1465907 - RNA, 22 nt, Human
uaauuggaaaggcagcucuaaa

SEQ ID NO: 1465908 - RNA, 16 nt, Human
uaauuguugcuaaucu

SEQ ID NO: 1465909 - RNA, 18 nt, Human
uaauuguacuaaagccaa

SEQ ID NO: 1465910 - RNA, 22 nt, Human
uaauuguacuaaagccaaacau

SEQ ID NO: 1465911 - RNA, 23 nt, Human
uaauuguacuaaagccaaacaua

SEQ ID NO: 1465912 - RNA, 20 nt, Human
uaauuuguaguguuggagaa

SEQ ID NO: 1465913 - RNA, 18 nt, Human
uaauuugguuuucacauu

SEQ ID NO: 1465914 - RNA, 15 nt, Human
uaauuugguuuucac

SEQ ID NO: 1465915 - RNA, 17 nt, Human
uaauuugguuuucacau

SEQ ID NO: 1465916 - RNA, 23 nt, Human
uaauuuguaguguuggagaagaa

SEQ ID NO: 1465917 - RNA, 14 nt, Human
uaauuuuaaacaaa

SEQ ID NO: 1465918 - RNA, 13 nt, Human
uaauuuuaaauuc

SEQ ID NO: 1465919 - RNA, 22 nt, Human
uaauaauuuagacuucaagcau

SEQ ID NO: 1465920 - RNA, 15 nt, Human
uaauaauguuucaaa

SEQ ID NO: 1465921 - RNA, 20 nt, Human
uaauaauuuuuaagaaauaa

SEQ ID NO: 1465922 - RNA, 16 nt, Human
uaauaauuuuuuaauu

SEQ ID NO: 1465923 - RNA, 14 nt, Human
uaauacaaaggcuu

SEQ ID NO: 1465924 - RNA, 15 nt, Human
uaauacacacaguua

SEQ ID NO: 1465925 - RNA, 11 nt, Human
uaauaaagcug

SEQ ID NO: 1465926 - RNA, 15 nt, Human
uaauaagguugaaca

SEQ ID NO: 1465927 - RNA, 20 nt, Human
uaauauguucuuuuaaauga

SEQ ID NO: 1465928 - RNA, 16 nt, Human
uaauauauauuaucuu

SEQ ID NO: 1465929 - RNA, 18 nt, Human
uaauauauauuaucuuuu

SEQ ID NO: 1465930 - RNA, 19 nt, Human
uaauauauauuaucuuuuc

SEQ ID NO: 1465931 - RNA, 15 nt, Human
uaaucuucaauaguu

SEQ ID NO: 1465932 - RNA, 15 nt, Human
uaaucuuauuuagga

SEQ ID NO: 1465933 - RNA, 21 nt, Human
uaaucuuauucauuuucucua

SEQ ID NO: 1465934 - RNA, 22 nt, Human
uaaucuuauucauuuucucuaa

SEQ ID NO: 1465935 - RNA, 18 nt, Human
uaaucucuguaaagcuaa

SEQ ID NO: 1465936 - RNA, 17 nt, Human
uaaucucuguaaagcua

SEQ ID NO: 1465937 - RNA, 16 nt, Human
uaaauugauguugcug

SEQ ID NO: 1465938 - RNA, 14 nt, Human
uaaauuuaguauuu

SEQ ID NO: 1465939 - RNA, 22 nt, Human
uaaauuuaguauuuuguuucag

SEQ ID NO: 1465940 - RNA, 16 nt, Human
uaacaauuaggcagac

SEQ ID NO: 1465941 - RNA, 20 nt, Human
uaacaauuaggcagacucuu

SEQ ID NO: 1465942 - RNA, 17 nt, Human
uaaccaggggccaugaa

SEQ ID NO: 1465943 - RNA, 22 nt, Human
uaaccagaucuagucaaucaag

SEQ ID NO: 1465944 - RNA, 12 nt, Human
uaaccaaguucc

SEQ ID NO: 1465945 - RNA, 11 nt, Human
uaaccaaguuc

SEQ ID NO: 1465946 - RNA, 10 nt, Human
uaacauuccu

SEQ ID NO: 1465947 - RNA, 17 nt, Human
uaacuggguaaugaaac

SEQ ID NO: 1465948 - RNA, 19 nt, Human
uaacuggguaaugaaacaa

SEQ ID NO: 1465949 - RNA, 20 nt, Human
uaacuggguaaugaaacaaa

SEQ ID NO: 1465950 - RNA, 17 nt, Human
uaacugggggaaaagau

SEQ ID NO: 1465951 - RNA, 15 nt, Human
uaacucaucugucac

SEQ ID NO: 1465952 - RNA, 12 nt, Human
uaacucauuaga

SEQ ID NO: 1465953 - RNA, 16 nt, Human
uaacucauuagacugg

SEQ ID NO: 1465954 - RNA, 14 nt, Human
uaacucaucuguca

SEQ ID NO: 1465955 - RNA, 20 nt, Human
uaaccuaugauauuuucugu

SEQ ID NO: 1465956 - RNA, 16 nt, Human
uaagcauuccaacuau

SEQ ID NO: 1465957 - RNA, 18 nt, Human
uaagcauuccaacuaucu

SEQ ID NO: 1465958 - RNA, 20 nt, Human
uaagcauuccaacuaucuca

SEQ ID NO: 1465959 - RNA, 22 nt, Human
uaagcauugaauggcuauguuu

SEQ ID NO: 1465960 - RNA, 16 nt, Human
uaagccaaaacaaugu

SEQ ID NO: 1465961 - RNA, 15 nt, Human
uaagcaugcacaaau

SEQ ID NO: 1465962 - RNA, 18 nt, Human
uaagaucuuuuauuuugc

SEQ ID NO: 1465963 - RNA, 17 nt, Human
uaagaucuauagccucu

SEQ ID NO: 1465964 - RNA, 15 nt, Human
uaaggcaaucauggu

SEQ ID NO: 1465965 - RNA, 15 nt, Human
uaagccagcugcccc

SEQ ID NO: 1465966 - RNA, 22 nt, Human
uaagccagcugcccccagagcc

SEQ ID NO: 1465967 - RNA, 17 nt, Human
uaagagagucuauuuac

SEQ ID NO: 1465968 - RNA, 21 nt, Human
uaagaagaaugcuuaaucaga

SEQ ID NO: 1465969 - RNA, 23 nt, Human
uaagaagcacgugguaaaacacu

SEQ ID NO: 1465970 - RNA, 22 nt, Human
uaagagcaaaagaauggcagaa

SEQ ID NO: 1465971 - RNA, 20 nt, Human
uaagagcaaaagaauggcag

SEQ ID NO: 1465972 - RNA, 12 nt, Human
uaagagcucagg

SEQ ID NO: 1465973 - RNA, 14 nt, Human
uaagagcucaggau

SEQ ID NO: 1465974 - RNA, 15 nt, Human
uaagagcucaggaug

SEQ ID NO: 1465975 - RNA, 22 nt, Human
uaagagcucaggaugagggaaa

SEQ ID NO: 1465976 - RNA, 19 nt, Human
uaagauauuuuucaugauu

SEQ ID NO: 1465977 - RNA, 18 nt, Human
uaagauauuuuucaugau

SEQ ID NO: 1465978 - RNA, 17 nt, Human
uaagauauuuuucauga

SEQ ID NO: 1465979 - RNA, 15 nt, Human
uaagauauuuuucau

SEQ ID NO: 1465980 - RNA, 14 nt, Human
uaagauauuuuuca

SEQ ID NO: 1465981 - RNA, 21 nt, Human
uaagauaugggacauuuuuga

SEQ ID NO: 1465982 - RNA, 19 nt, Human
uaagauaugggacauuuuu

SEQ ID NO: 1465983 - RNA, 16 nt, Human
uagauguauguacuuc

SEQ ID NO: 1465984 - RNA, 20 nt, Human
uagauguauguacuucaugc

SEQ ID NO: 1465985 - RNA, 23 nt, Human
uagauaacaagaccucagugccu

SEQ ID NO: 1465986 - RNA, 18 nt, Human
uagauacaugcuuuuuaa

SEQ ID NO: 1465987 - RNA, 19 nt, Human
uagacuggaacuugaacug

SEQ ID NO: 1465988 - RNA, 14 nt, Human
uagacuggacagcu

SEQ ID NO: 1465989 - RNA, 18 nt, Human
uagacuggacagcuugug

SEQ ID NO: 1465990 - RNA, 16 nt, Human
uagacuggacagcuug

SEQ ID NO: 1465991 - RNA, 15 nt, Human
uagaaccuaauucaa

SEQ ID NO: 1465992 - RNA, 23 nt, Human
uagaaccuaauucaauucaaagc

SEQ ID NO: 1465993 - RNA, 17 nt, Human
uagaguuuagcuggaaa

SEQ ID NO: 1465994 - RNA, 18 nt, Human
uagaguuuagcuggaaaa

SEQ ID NO: 1465995 - RNA, 14 nt, Human
uagagacuggaaca

SEQ ID NO: 1465996 - RNA, 18 nt, Human
uagagacuggaacacuag

SEQ ID NO: 1465997 - RNA, 16 nt, Human
uaggaauuguguuuau

SEQ ID NO: 1465998 - RNA, 22 nt, Human
uaggaaguugacuuauaguaca

SEQ ID NO: 1465999 - RNA, 14 nt, Human
uaggaauuguguuu

SEQ ID NO: 1466000 - RNA, 17 nt, Human
uaggaaguugacuuaua

SEQ ID NO: 1466001 - RNA, 21 nt, Human
uaggccuugcggcuccucagg

SEQ ID NO: 1466002 - RNA, 22 nt, Human
uagcuggcucugugagggugcu

SEQ ID NO: 1466003 - RNA, 22 nt, Human
uaggaaauggcuuugugauuca

SEQ ID NO: 1466004 - RNA, 23 nt, Human
uaggaaauggcuuugugauucaa

SEQ ID NO: 1466005 - RNA, 18 nt, Human
uagcccaaugaaaugaau

SEQ ID NO: 1466006 - RNA, 13 nt, Human
uagccccagugac

SEQ ID NO: 1466007 - RNA, 17 nt, Human
uagccccagugacagcu

SEQ ID NO: 1466008 - RNA, 18 nt, Human
uagcccuccuuuuuccaa

SEQ ID NO: 1466009 - RNA, 20 nt, Human
uagcccuccuuuuuccaaca

SEQ ID NO: 1466010 - RNA, 19 nt, Human
uagccucaauuucugaaca

SEQ ID NO: 1466011 - RNA, 23 nt, Human
uagccucacuuuuaaugaacaaa

SEQ ID NO: 1466012 - RNA, 18 nt, Human
uagccucacuuuuaauga

SEQ ID NO: 1466013 - RNA, 18 nt, Human
uagucaaauugugugaaa

SEQ ID NO: 1466014 - RNA, 15 nt, Human
uagucaaucaagucu

SEQ ID NO: 1466015 - RNA, 18 nt, Human
uagucaaucaagucuguu

SEQ ID NO: 1466016 - RNA, 19 nt, Human
uagucaaucaagucuguuu

SEQ ID NO: 1466017 - RNA, 21 nt, Human
uagucaaucaagucuguuuac

SEQ ID NO: 1466018 - RNA, 13 nt, Human
uaggcuagggugg

SEQ ID NO: 1466019 - RNA, 24 nt, Human
uaggccuugcggcuccucagggac

SEQ ID NO: 1466020 - RNA, 23 nt, Human
uaggccuugcggcuccucaggga

SEQ ID NO: 1466021 - RNA, 20 nt, Human
uagugauuuuuaugccaccu

SEQ ID NO: 1466022 - RNA, 21 nt, Human
uagugauuuuuaugccaccug

SEQ ID NO: 1466023 - RNA, 22 nt, Human
uagugauuuuuaugccaccuga

SEQ ID NO: 1466024 - RNA, 18 nt, Human
uaguuguaaaccaaguga

SEQ ID NO: 1466025 - RNA, 17 nt, Human
uaguggauuacugccau

SEQ ID NO: 1466026 - RNA, 12 nt, Human
uaguuucugagu

SEQ ID NO: 1466027 - RNA, 20 nt, Human
uaguuucugaguuuuaccaa

SEQ ID NO: 1466028 - RNA, 12 nt, Human
uaguugugucug

SEQ ID NO: 1466029 - RNA, 19 nt, Human
uaguuucauauaaaguauc

SEQ ID NO: 1466030 - RNA, 20 nt, Human
uaguuucauauaaaguauca

SEQ ID NO: 1466031 - RNA, 15 nt, Human
uaguuuuauaugcuu

SEQ ID NO: 1466032 - RNA, 20 nt, Human
uaguuuuacuuuuaaacugu

SEQ ID NO: 1466033 - RNA, 22 nt, Human
uaguuuuacuuuuaaacugugu

SEQ ID NO: 1466034 - RNA, 11 nt, Human
uaguuuggaua

SEQ ID NO: 1466035 - RNA, 14 nt, Human
uaguuuuacuuuua

SEQ ID NO: 1466036 - RNA, 18 nt, Human
uauaacaaugcuguauuu

SEQ ID NO: 1466037 - RNA, 20 nt, Human
uauacuauaguaccaguagg

SEQ ID NO: 1466038 - RNA, 19 nt, Human
uauacuauuaaaaagguuu

SEQ ID NO: 1466039 - RNA, 17 nt, Human
uauacucacuuucuaga

SEQ ID NO: 1466040 - RNA, 17 nt, Human
uauacuauaguaccagu

SEQ ID NO: 1466041 - RNA, 20 nt, Human
uauaccugauuuuuuuuccu

SEQ ID NO: 1466042 - RNA, 21 nt, Human
uauacuauuaaaaagguuuac

SEQ ID NO: 1466043 - RNA, 22 nt, Human
uauacccacccagaaugagaca

SEQ ID NO: 1466044 - RNA, 14 nt, Human
uauacccacccaga

SEQ ID NO: 1466045 - RNA, 15 nt, Human
uauacccacccagaa

SEQ ID NO: 1466046 - RNA, 12 nt, Human
uauaccucacuu

SEQ ID NO: 1466047 - RNA, 12 nt, Human
uauaccugauuu

SEQ ID NO: 1466048 - RNA, 15 nt, Human
uauaauucaccuucu

SEQ ID NO: 1466049 - RNA, 14 nt, Human
uauauuuuaagacg

SEQ ID NO: 1466050 - RNA, 16 nt, Human
uauauuuuacaauuuu

SEQ ID NO: 1466051 - RNA, 13 nt, Human
uauauuuuaagac

SEQ ID NO: 1466052 - RNA, 13 nt, Human
uauauuugaaaua

SEQ ID NO: 1466053 - RNA, 14 nt, Human
uauauuugaaauau

SEQ ID NO: 1466054 - RNA, 20 nt, Human
uauauuugaaauauugacuu

SEQ ID NO: 1466055 - RNA, 19 nt, Human
uauauguaccguaggcuuu

SEQ ID NO: 1466056 - RNA, 12 nt, Human
uauauguacagu

SEQ ID NO: 1466057 - RNA, 23 nt, Human
uauauuuauuacuguaagaaaau

SEQ ID NO: 1466058 - RNA, 19 nt, Human
uauaugaggacuugugucu

SEQ ID NO: 1466059 - RNA, 16 nt, Human
uauauaccaaagcaca

SEQ ID NO: 1466060 - RNA, 21 nt, Human
uauauaccaaagcacauuuua

SEQ ID NO: 1466061 - RNA, 21 nt, Human
uauacucucaccauuuggauc

SEQ ID NO: 1466062 - RNA, 22 nt, Human
uaucaugugaaaucauucauuu

SEQ ID NO: 1466063 - RNA, 17 nt, Human
uaucaugugaaaucauu

SEQ ID NO: 1466064 - RNA, 16 nt, Human
uaucucuucagucucu

SEQ ID NO: 1466065 - RNA, 14 nt, Human
uaucucuucagucu

SEQ ID NO: 1466066 - RNA, 13 nt, Human
uaucucuucaguc

SEQ ID NO: 1466067 - RNA, 12 nt, Human
uaucucuucagu

SEQ ID NO: 1466068 - RNA, 23 nt, Human
uaucuaaacuggauucacagcuc

SEQ ID NO: 1466069 - RNA, 18 nt, Human
uaucgcuucauguaacua

SEQ ID NO: 1466070 - RNA, 23 nt, Human
uaucaucaguguagaaccuaauu

SEQ ID NO: 1466071 - RNA, 14 nt, Human
uacagaagaaacug

SEQ ID NO: 1466072 - RNA, 11 nt, Human
uacagaacuac

SEQ ID NO: 1466073 - RNA, 14 nt, Human
uacagaaagcugcc

SEQ ID NO: 1466074 - RNA, 13 nt, Human
uacagaauuuuau

SEQ ID NO: 1466075 - RNA, 23 nt, Human
uacagaauuacuguaacugauua

SEQ ID NO: 1466076 - RNA, 15 nt, Human
uacagaauuacugua

SEQ ID NO: 1466077 - RNA, 18 nt, Human
uacagaaaaguugaauuu

SEQ ID NO: 1466078 - RNA, 22 nt, Human
uacagaaaaguugaauuuuaca

SEQ ID NO: 1466079 - RNA, 13 nt, Human
uacagaaagcugc

SEQ ID NO: 1466080 - RNA, 17 nt, Human
uacaauuuuuuaucaug

SEQ ID NO: 1466081 - RNA, 23 nt, Human
uacaauuuuuuaucaugcauguc

SEQ ID NO: 1466082 - RNA, 21 nt, Human
uacaagaagcauuuuguaagu

SEQ ID NO: 1466083 - RNA, 19 nt, Human
uacaagaagcauuuuguaa

SEQ ID NO: 1466084 - RNA, 17 nt, Human
uaauuuugaaaaacugc

SEQ ID NO: 1466085 - RNA, 13 nt, Human
uaauuuugaaaaa

SEQ ID NO: 1466086 - RNA, 12 nt, Human
uaauuuucuacc

SEQ ID NO: 1466087 - RNA, 13 nt, Human
uaauuuugugaag

SEQ ID NO: 1466088 - RNA, 15 nt, Human
uacacaauaagcaaa

SEQ ID NO: 1466089 - RNA, 16 nt, Human
uacacaauagaauuau

SEQ ID NO: 1466090 - RNA, 18 nt, Human
uacacaauagaauuauaa

SEQ ID NO: 1466091 - RNA, 14 nt, Human
uacacaauaagcaa

SEQ ID NO: 1466092 - RNA, 18 nt, Human
uacacagaaauacaguua

SEQ ID NO: 1466093 - RNA, 17 nt, Human
uacacagcaccagaaug

SEQ ID NO: 1466094 - RNA, 15 nt, Human
uacacagcucuagac

SEQ ID NO: 1466095 - RNA, 20 nt, Human
uacacugucagcagggacug

SEQ ID NO: 1466096 - RNA, 15 nt, Human
uacccaaauuaagag

SEQ ID NO: 1466097 - RNA, 12 nt, Human
uacccacccaga

SEQ ID NO: 1466098 - RNA, 14 nt, Human
uaccaauaaaguga

SEQ ID NO: 1466099 - RNA, 17 nt, Human
uaccaauaaagugaccc

SEQ ID NO: 1466100 - RNA, 13 nt, Human
uaccaauaaagug

SEQ ID NO: 1466101 - RNA, 12 nt, Human
uaccaauaaagu

SEQ ID NO: 1466102 - RNA, 18 nt, Human
uaccaaggucuucuuaau

SEQ ID NO: 1466103 - RNA, 21 nt, Human
uaccaaguuucagguauuaag

SEQ ID NO: 1466104 - RNA, 16 nt, Human
uaccaaguuucaggua

SEQ ID NO: 1466105 - RNA, 18 nt, Human
uaccacaaugcagugccu

SEQ ID NO: 1466106 - RNA, 23 nt, Human
uaccacaggaaccacaagacugc

SEQ ID NO: 1466107 - RNA, 18 nt, Human
uaccaccagucugacugu

SEQ ID NO: 1466108 - RNA, 12 nt, Human
uaccauuucaga

SEQ ID NO: 1466109 - RNA, 15 nt, Human
uaccauuucagagag

SEQ ID NO: 1466110 - RNA, 16 nt, Human
uaccauuucagagagg

SEQ ID NO: 1466111 - RNA, 16 nt, Human
uacauuuguauaaaau

SEQ ID NO: 1466112 - RNA, 17 nt, Human
uacauuuguauaaaaua

SEQ ID NO: 1466113 - RNA, 11 nt, Human
uacauuugugu

SEQ ID NO: 1466114 - RNA, 15 nt, Human
uacaugauucauuuu

SEQ ID NO: 1466115 - RNA, 14 nt, Human
uacaugauucauuu

SEQ ID NO: 1466116 - RNA, 19 nt, Human
uacauuuucuaagaaacau

SEQ ID NO: 1466117 - RNA, 20 nt, Human
uacauuuucuaagaaacauu

SEQ ID NO: 1466118 - RNA, 15 nt, Human
uacauuuucuaagaa

SEQ ID NO: 1466119 - RNA, 12 nt, Human
uaccaaagcaca

SEQ ID NO: 1466120 - RNA, 12 nt, Human
uaccaaccuguu

SEQ ID NO: 1466121 - RNA, 18 nt, Human
uacaguuccuagguauaa

SEQ ID NO: 1466122 - RNA, 21 nt, Human
uacaguuagggcuccuauuca

SEQ ID NO: 1466123 - RNA, 19 nt, Human
uacaguuaucuaaguuaau

SEQ ID NO: 1466124 - RNA, 13 nt, Human
uacaguuaaguuu

SEQ ID NO: 1466125 - RNA, 19 nt, Human
uaccuuugacaaagguaaa

SEQ ID NO: 1466126 - RNA, 19 nt, Human
uacccaguaacucaucugu

SEQ ID NO: 1466127 - RNA, 22 nt, Human
uacccaguaacucaucugucac

SEQ ID NO: 1466128 - RNA, 19 nt, Human
uacccaugucuacacagau

SEQ ID NO: 1466129 - RNA, 17 nt, Human
uaccuugcaucucacag

SEQ ID NO: 1466130 - RNA, 23 nt, Human
uacgacaguacacugucagcagg

SEQ ID NO: 1466131 - RNA, 15 nt, Human
uacuccccuccuuga

SEQ ID NO: 1466132 - RNA, 14 nt, Human
uacugauauauuuu

SEQ ID NO: 1466133 - RNA, 16 nt, Human
uacugauauauuuuac

SEQ ID NO: 1466134 - RNA, 13 nt, Human
uacuacaugcacu

SEQ ID NO: 1466135 - RNA, 20 nt, Human
uacucacuuucuagauuaag

SEQ ID NO: 1466136 - RNA, 14 nt, Human
uacucagaauuaag

SEQ ID NO: 1466137 - RNA, 16 nt, Human
uacucagauaagguaa

SEQ ID NO: 1466138 - RNA, 23 nt, Human
uacucagauaagguaaaaugcca

SEQ ID NO: 1466139 - RNA, 11 nt, Human
uagaaagcuau

SEQ ID NO: 1466140 - RNA, 17 nt, Human
uacuuuauguuacuaca

SEQ ID NO: 1466141 - RNA, 20 nt, Human
uacuuuauguuacuacaugc

SEQ ID NO: 1466142 - RNA, 17 nt, Human
uagaaagagauacagag

SEQ ID NO: 1466143 - RNA, 18 nt, Human
uagaaagagauacagagg

SEQ ID NO: 1466144 - RNA, 11 nt, Human
uagaaaucaua

SEQ ID NO: 1466145 - RNA, 13 nt, Human
uagaaaucauuuu

SEQ ID NO: 1466146 - RNA, 17 nt, Human
uagaaaucauuuugcaa

SEQ ID NO: 1466147 - RNA, 19 nt, Human
uagaaauguaacuuuugua

SEQ ID NO: 1466148 - RNA, 16 nt, Human
uagaaaucauuuugca

SEQ ID NO: 1466149 - RNA, 19 nt, Human
uagaaauuacacccaaaga

SEQ ID NO: 1466150 - RNA, 13 nt, Human
uagaacaaggcug

SEQ ID NO: 1466151 - RNA, 12 nt, Human
uagaacacacac

SEQ ID NO: 1466152 - RNA, 17 nt, Human
uagaacacacacacuua

SEQ ID NO: 1466153 - RNA, 15 nt, Human
uagaacacaggcaaa

SEQ ID NO: 1466154 - RNA, 21 nt, Human
uacuugcucuugaugccuggc

SEQ ID NO: 1466155 - RNA, 16 nt, Human
uacuugcucagguacu

SEQ ID NO: 1466156 - RNA, 17 nt, Human
uacuugcucagguacuu

SEQ ID NO: 1466157 - RNA, 23 nt, Human
uacuuacaugcauuacugcaugc

SEQ ID NO: 1466158 - RNA, 19 nt, Human
uacuuacaugcauuacugc

SEQ ID NO: 1466159 - RNA, 17 nt, Human
uacugcauacuuuuuaa

SEQ ID NO: 1466160 - RNA, 18 nt, Human
uacugcauacuuuuuaaa

SEQ ID NO: 1466161 - RNA, 21 nt, Human
uacugcauacuuuuuaaaugu

SEQ ID NO: 1466162 - RNA, 22 nt, Human
uacugcauacuuuuuaaaugua

SEQ ID NO: 1466163 - RNA, 13 nt, Human
uacugcauacuuu

SEQ ID NO: 1466164 - RNA, 15 nt, Human
uacugcauacuuuuu

SEQ ID NO: 1466165 - RNA, 14 nt, Human
gguggucccugggu

SEQ ID NO: 1466166 - RNA, 15 nt, Human
ggugguggcucggga

SEQ ID NO: 1466167 - RNA, 16 nt, Human
gguuagggaaaacauu

SEQ ID NO: 1466168 - RNA, 22 nt, Human
gguuaggaggguuucauugucu

SEQ ID NO: 1466169 - RNA, 21 nt, Human
gguguccugcaccggggccug

SEQ ID NO: 1466170 - RNA, 19 nt, Human
gguucuugaggggaccagg

SEQ ID NO: 1466171 - RNA, 20 nt, Human
gguucuugaggggaccagga

SEQ ID NO: 1466172 - RNA, 22 nt, Human
gguucuugaggggaccaggagu

SEQ ID NO: 1466173 - RNA, 21 nt, Human
gguucuugaggggaccaggag

SEQ ID NO: 1466174 - RNA, 13 nt, Human
ggugagaaauuua

SEQ ID NO: 1466175 - RNA, 21 nt, Human
ggugagaaccuggguugcaga

SEQ ID NO: 1466176 - RNA, 22 nt, Human
ggucucuucugaauaaagcaau

SEQ ID NO: 1466177 - RNA, 21 nt, Human
ggucucuucugaauaaagcaa

SEQ ID NO: 1466178 - RNA, 20 nt, Human
ggucucuucugaauaaagca

SEQ ID NO: 1466179 - RNA, 19 nt, Human
ggucucucucucucuacaa

SEQ ID NO: 1466180 - RNA, 17 nt, Human
ggucucaaacuccugac

SEQ ID NO: 1466181 - RNA, 15 nt, Human
ggugagaccaccucu

SEQ ID NO: 1466182 - RNA, 15 nt, Human
ggugagaaauuuaaa

SEQ ID NO: 1466183 - RNA, 14 nt, Human
ggugagaccaccuc

SEQ ID NO: 1466184 - RNA, 18 nt, Human
ggugcgagugcgugaaua

SEQ ID NO: 1466185 - RNA, 11 nt, Human
gguggccaggc

SEQ ID NO: 1466186 - RNA, 12 nt, Human
gguggccaggcc

SEQ ID NO: 1466187 - RNA, 16 nt, Human
gguggccaggccggga

SEQ ID NO: 1466188 - RNA, 13 nt, Human
gguggccaggccg

SEQ ID NO: 1466189 - RNA, 12 nt, Human
ggugcucugucu

SEQ ID NO: 1466190 - RNA, 19 nt, Human
ggugcugacuggcuucagc

SEQ ID NO: 1466191 - RNA, 20 nt, Human
gggguggggggggugcuggg

SEQ ID NO: 1466192 - RNA, 13 nt, Human
gggguggccaggc

SEQ ID NO: 1466193 - RNA, 18 nt, Human
ggggugcugggccccugc

SEQ ID NO: 1466194 - RNA, 15 nt, Human
gggggagagggcugc

SEQ ID NO: 1466195 - RNA, 21 nt, Human
gggggacuuacaugauucauu

SEQ ID NO: 1466196 - RNA, 14 nt, Human
ggggcuaccaggaa

SEQ ID NO: 1466197 - RNA, 18 nt, Human
ggggcagucugagagagg

SEQ ID NO: 1466198 - RNA, 15 nt, Human
ggggcagucugagag

SEQ ID NO: 1466199 - RNA, 19 nt, Human
ggggcagucugagagaggc

SEQ ID NO: 1466200 - RNA, 15 nt, Human
ggggcgcggcuggga

SEQ ID NO: 1466201 - RNA, 16 nt, Human
ggggcgcggcugggag

SEQ ID NO: 1466202 - RNA, 17 nt, Human
ggggaggguaggcagga

SEQ ID NO: 1466203 - RNA, 20 nt, Human
ggggauucuuccaucugauu

SEQ ID NO: 1466204 - RNA, 13 nt, Human
ggggaggguaggc

SEQ ID NO: 1466205 - RNA, 16 nt, Human
gggccugggcaggagg

SEQ ID NO: 1466206 - RNA, 17 nt, Human
gggccugggcaggaggg

SEQ ID NO: 1466207 - RNA, 18 nt, Human
gggugcugggccccugcc

SEQ ID NO: 1466208 - RNA, 17 nt, Human
gggugcugggccccugc

SEQ ID NO: 1466209 - RNA, 20 nt, Human
ggguucaccugggcugaggc

SEQ ID NO: 1466210 - RNA, 22 nt, Human
gguaccagaugcagcucaagag

SEQ ID NO: 1466211 - RNA, 18 nt, Human
gguagcauuuguguugaa

SEQ ID NO: 1466212 - RNA, 17 nt, Human
gguagaggaugaggaaa

SEQ ID NO: 1466213 - RNA, 21 nt, Human
gguaccagcagaaagguuagu

SEQ ID NO: 1466214 - RNA, 20 nt, Human
ggucacguuuggugcuucuc

SEQ ID NO: 1466215 - RNA, 22 nt, Human
ggucaacaguuuuccuaugcuu

SEQ ID NO: 1466216 - RNA, 16 nt, Human
ggucaacaguuuuccu

SEQ ID NO: 1466217 - RNA, 11 nt, Human
ggucaggccuu

SEQ ID NO: 1466218 - RNA, 12 nt, Human
ggucaggccuuu

SEQ ID NO: 1466219 - RNA, 20 nt, Human
ggucaggccuuugagcucag

SEQ ID NO: 1466220 - RNA, 13 nt, Human
ggucaggccuuug

SEQ ID NO: 1466221 - RNA, 21 nt, Human
gggccccugccucucugcagg

SEQ ID NO: 1466222 - RNA, 19 nt, Human
gggccccugccucucugca

SEQ ID NO: 1466223 - RNA, 18 nt, Human
gggccccugccucucugc

SEQ ID NO: 1466224 - RNA, 17 nt, Human
gggccccugccucucug

SEQ ID NO: 1466225 - RNA, 15 nt, Human
gggccccugccucuc

SEQ ID NO: 1466226 - RNA, 13 nt, Human
gggccccugccuc

SEQ ID NO: 1466227 - RNA, 22 nt, Human
gggccccugccucucugcaggu

SEQ ID NO: 1466228 - RNA, 18 nt, Human
gggccccuuugcugaccc

SEQ ID NO: 1466229 - RNA, 12 nt, Human
gggccugggcag

SEQ ID NO: 1466230 - RNA, 13 nt, Human
gggccugggcagg

SEQ ID NO: 1466231 - RNA, 15 nt, Human
gggccugggcaggag

SEQ ID NO: 1466232 - RNA, 19 nt, Human
gggccacauagaugcugau

SEQ ID NO: 1466233 - RNA, 20 nt, Human
gggcagucugagagaggcca

SEQ ID NO: 1466234 - RNA, 21 nt, Human
gggcagucugagagaggccau

SEQ ID NO: 1466235 - RNA, 14 nt, Human
gggcauaaauuauu

SEQ ID NO: 1466236 - RNA, 21 nt, Human
gggcaauuaauuccuucagca

SEQ ID NO: 1466237 - RNA, 20 nt, Human
gggcaauuaauuccuucagc

SEQ ID NO: 1466238 - RNA, 13 nt, Human
gggcaagaggaau

SEQ ID NO: 1466239 - RNA, 21 nt, Human
gggcaagccuaagggauccug

SEQ ID NO: 1466240 - RNA, 14 nt, Human
gggauccugccugc

SEQ ID NO: 1466241 - RNA, 13 nt, Human
gggacugagaaau

SEQ ID NO: 1466242 - RNA, 19 nt, Human
gggacucaucuuucccucc

SEQ ID NO: 1466243 - RNA, 12 nt, Human
gggacucagccc

SEQ ID NO: 1466244 - RNA, 19 nt, Human
gggacuacaggcgugagcc

SEQ ID NO: 1466245 - RNA, 20 nt, Human
gggacuacaggcgugagcca

SEQ ID NO: 1466246 - RNA, 18 nt, Human
gggaggugagaccaccuc

SEQ ID NO: 1466247 - RNA, 23 nt, Human
gggaggugcuucuaguucugcca

SEQ ID NO: 1466248 - RNA, 16 nt, Human
gggaguuuaggguggg

SEQ ID NO: 1466249 - RNA, 17 nt, Human
gggcagucugagagagg

SEQ ID NO: 1466250 - RNA, 18 nt, Human
gggcagucugagagaggc

SEQ ID NO: 1466251 - RNA, 19 nt, Human
gggcagucugagagaggcc

SEQ ID NO: 1466252 - RNA, 15 nt, Human
gggaaggaucccaug

SEQ ID NO: 1466253 - RNA, 13 nt, Human
gggaaugaagaua

SEQ ID NO: 1466254 - RNA, 22 nt, Human
gggacguucgugguccugcgcu

SEQ ID NO: 1466255 - RNA, 20 nt, Human
gggaccggcggaccccagcc

SEQ ID NO: 1466256 - RNA, 22 nt, Human
ggcuugaguuuaaauuguaaua

SEQ ID NO: 1466257 - RNA, 13 nt, Human
ggcuuacacccac

SEQ ID NO: 1466258 - RNA, 23 nt, Human
ggcuuaaacccauauuguaaaac

SEQ ID NO: 1466259 - RNA, 15 nt, Human
ggcugcugcuacaau

SEQ ID NO: 1466260 - RNA, 14 nt, Human
ggcucuggagccca

SEQ ID NO: 1466261 - RNA, 13 nt, Human
ggcucuggagccc

SEQ ID NO: 1466262 - RNA, 20 nt, Human
ggccccugccaccuccugcc

SEQ ID NO: 1466263 - RNA, 13 nt, Human
ggccccugccucu

SEQ ID NO: 1466264 - RNA, 15 nt, Human
ggcugagauaugaac

SEQ ID NO: 1466265 - RNA, 15 nt, Human
ggcugagcucucugu

SEQ ID NO: 1466266 - RNA, 20 nt, Human
ggcugagcucucugugggcu

SEQ ID NO: 1466267 - RNA, 15 nt, Human
ggcugauaauuuuaa

SEQ ID NO: 1466268 - RNA, 15 nt, Human
ggcugauggaguaaa

SEQ ID NO: 1466269 - RNA, 14 nt, Human
ggcugauuucuagg

SEQ ID NO: 1466270 - RNA, 20 nt, Human
ggccaggcaggagcccuucu

SEQ ID NO: 1466271 - RNA, 13 nt, Human
ggccaggaggugc

SEQ ID NO: 1466272 - RNA, 22 nt, Human
ggccaggcugggucgcccugga

SEQ ID NO: 1466273 - RNA, 18 nt, Human
ggccaggcugggucgccc

SEQ ID NO: 1466274 - RNA, 14 nt, Human
ggccaggaggugcc

SEQ ID NO: 1466275 - RNA, 22 nt, Human
ggccaaugcaccuaaagaaaaa

SEQ ID NO: 1466276 - RNA, 19 nt, Human
ggcagucugaauuuuuaaa

SEQ ID NO: 1466277 - RNA, 20 nt, Human
ggcagucugagagaggccau

SEQ ID NO: 1466278 - RNA, 15 nt, Human
ggccaugggaggccu

SEQ ID NO: 1466279 - RNA, 13 nt, Human
ggccaugggaggc

SEQ ID NO: 1466280 - RNA, 22 nt, Human
ggccaugggaggccuuucccua

SEQ ID NO: 1466281 - RNA, 21 nt, Human
ggccaugggaggccuuucccu

SEQ ID NO: 1466282 - RNA, 16 nt, Human
ggcccccaccuggcuc

SEQ ID NO: 1466283 - RNA, 17 nt, Human
ggcccccaccuggcuca

SEQ ID NO: 1466284 - RNA, 14 nt, Human
ggcccccccagcug

SEQ ID NO: 1466285 - RNA, 13 nt, Human
ggcccccucccug

SEQ ID NO: 1466286 - RNA, 16 nt, Human
ggcccccucccuggau

SEQ ID NO: 1466287 - RNA, 17 nt, Human
ggcccccucccuggaug

SEQ ID NO: 1466288 - RNA, 21 nt, Human
ggaucaguuaacuauugcauu

SEQ ID NO: 1466289 - RNA, 19 nt, Human
ggaucagagcgcacaggga

SEQ ID NO: 1466290 - RNA, 17 nt, Human
ggaucccaugagcuccu

SEQ ID NO: 1466291 - RNA, 20 nt, Human
ggaucccaugagcuccuuaa

SEQ ID NO: 1466292 - RNA, 16 nt, Human
ggcaacgcacaaaaca

SEQ ID NO: 1466293 - RNA, 15 nt, Human
ggcagcaacaauaaa

SEQ ID NO: 1466294 - RNA, 15 nt, Human
ggcagcaauuuaaau

SEQ ID NO: 1466295 - RNA, 22 nt, Human
ggcagcaacaauaaauagacac

SEQ ID NO: 1466296 - RNA, 17 nt, Human
ggcagcaacaauaaaua

SEQ ID NO: 1466297 - RNA, 16 nt, Human
ggcagcaauuuaaaug

SEQ ID NO: 1466298 - RNA, 15 nt, Human
ggcaggaacaaacag

SEQ ID NO: 1466299 - RNA, 18 nt, Human
ggaggaggcagagaagaa

SEQ ID NO: 1466300 - RNA, 17 nt, Human
ggaggaggcagagaaga

SEQ ID NO: 1466301 - RNA, 14 nt, Human
ggaggagggcaggc

SEQ ID NO: 1466302 - RNA, 15 nt, Human
ggaggagggcaggca

SEQ ID NO: 1466303 - RNA, 20 nt, Human
ggaggagggcaggcaucggg

SEQ ID NO: 1466304 - RNA, 16 nt, Human
ggagccgggagccuga

SEQ ID NO: 1466305 - RNA, 13 nt, Human
ggaggagaaugag

SEQ ID NO: 1466306 - RNA, 13 nt, Human
ggaggaugugaau

SEQ ID NO: 1466307 - RNA, 13 nt, Human
ggagggcaggcau

SEQ ID NO: 1466308 - RNA, 14 nt, Human
ggagggcaggcauc

SEQ ID NO: 1466309 - RNA, 12 nt, Human
ggagucuugcuc

SEQ ID NO: 1466310 - RNA, 13 nt, Human
ggacccaggacag

SEQ ID NO: 1466311 - RNA, 10 nt, Human
ggacccagga

SEQ ID NO: 1466312 - RNA, 11 nt, Human
ggaccaggagu

SEQ ID NO: 1466313 - RNA, 20 nt, Human
ggaccaggagugggugggga

SEQ ID NO: 1466314 - RNA, 21 nt, Human
ggaccaggaguggguggggag

SEQ ID NO: 1466315 - RNA, 13 nt, Human
ggacccagggcuc

SEQ ID NO: 1466316 - RNA, 22 nt, Human
ggaccagcuuuucccaaaagcc

SEQ ID NO: 1466317 - RNA, 17 nt, Human
ggaccagcuuuucccaa

SEQ ID NO: 1466318 - RNA, 15 nt, Human
ggaccagcuuuuccc

SEQ ID NO: 1466319 - RNA, 17 nt, Human
ggaaggaucccaugagc

SEQ ID NO: 1466320 - RNA, 19 nt, Human
ggaaggaggacccaggaca

SEQ ID NO: 1466321 - RNA, 16 nt, Human
ggaaggaggacccagg

SEQ ID NO: 1466322 - RNA, 13 nt, Human
ggagcccugggag

SEQ ID NO: 1466323 - RNA, 12 nt, Human
ggagcccuggga

SEQ ID NO: 1466324 - RNA, 13 nt, Human
ggagagggcgcag

SEQ ID NO: 1466325 - RNA, 22 nt, Human
ggagauucucauaacuugagac

SEQ ID NO: 1466326 - RNA, 23 nt, Human
ggagauucucauaacuugagacc

SEQ ID NO: 1466327 - RNA, 16 nt, Human
ggacugcggaggaagg

SEQ ID NO: 1466328 - RNA, 15 nt, Human
ggacugcggaggaag

SEQ ID NO: 1466329 - RNA, 15 nt, Human
ggacugucauagaaa

SEQ ID NO: 1466330 - RNA, 17 nt, Human
ggagaccggccugccag

SEQ ID NO: 1466331 - RNA, 22 nt, Human
ggagaccggccugccaggagga

SEQ ID NO: 1466332 - RNA, 19 nt, Human
ggagaccggccugccagga

SEQ ID NO: 1466333 - RNA, 20 nt, Human
ggagaccggccugccaggag

SEQ ID NO: 1466334 - RNA, 21 nt, Human
ggagaccggccugccaggagg

SEQ ID NO: 1466335 - RNA, 19 nt, Human
ggagagggaaugugaaauu

SEQ ID NO: 1466336 - RNA, 14 nt, Human
ggagagggaaugug

SEQ ID NO: 1466337 - RNA, 14 nt, Human
ggaagaucccccag

SEQ ID NO: 1466338 - RNA, 17 nt, Human
ggaacucgugucuggca

SEQ ID NO: 1466339 - RNA, 22 nt, Human
ggaagaucccccagaaaagaaa

SEQ ID NO: 1466340 - RNA, 18 nt, Human
ggaagaucccccagaaaa

SEQ ID NO: 1466341 - RNA, 19 nt, Human
ggaagcauuuguuucuacu

SEQ ID NO: 1466342 - RNA, 15 nt, Human
ggaaccgaggcaggg

SEQ ID NO: 1466343 - RNA, 16 nt, Human
ggaaccgaggcaggga

SEQ ID NO: 1466344 - RNA, 20 nt, Human
ggaaccgaggcagggaagga

SEQ ID NO: 1466345 - RNA, 12 nt, Human
ggaaauauuuau

SEQ ID NO: 1466346 - RNA, 13 nt, Human
ggaaauauuuauu

SEQ ID NO: 1466347 - RNA, 15 nt, Human
ggaaauauuuauuuu

SEQ ID NO: 1466348 - RNA, 17 nt, Human
ggaaauauuuauuuuaa

SEQ ID NO: 1466349 - RNA, 18 nt, Human
ggaaauauuuauuuuaau

SEQ ID NO: 1466350 - RNA, 22 nt, Human
ggaaaucaaaagggccaaagaa

SEQ ID NO: 1466351 - RNA, 16 nt, Human
ggaaaauaauacugcu

SEQ ID NO: 1466352 - RNA, 16 nt, Human
ggaaaggugguguuuc

SEQ ID NO: 1466353 - RNA, 20 nt, Human
ggaaaaaauaacaaugaaag

SEQ ID NO: 1466354 - RNA, 19 nt, Human
gcuuuuaacagagucugaa

SEQ ID NO: 1466355 - RNA, 12 nt, Human
ggaaaaccagac

SEQ ID NO: 1466356 - RNA, 22 nt, Human
ggaaaaccagacuacuugggag

SEQ ID NO: 1466357 - RNA, 19 nt, Human
ggaaaaaguggguuuuuua

SEQ ID NO: 1466358 - RNA, 17 nt, Human
gcuuuggaccuaaucca

SEQ ID NO: 1466359 - RNA, 14 nt, Human
gcuuggagcugagc

SEQ ID NO: 1466360 - RNA, 15 nt, Human
gcuuggagcugagca

SEQ ID NO: 1466361 - RNA, 18 nt, Human
gcuuuaacuuaaauagua

SEQ ID NO: 1466362 - RNA, 20 nt, Human
gcuugauagaaaugccaagc

SEQ ID NO: 1466363 - RNA, 14 nt, Human
gcuugauuuuugcc

SEQ ID NO: 1466364 - RNA, 19 nt, Human
gcuugaugggauucuggac

SEQ ID NO: 1466365 - RNA, 20 nt, Human
gcuugaugggauucuggaca

SEQ ID NO: 1466366 - RNA, 22 nt, Human
gcuugaugggauucuggacagg

SEQ ID NO: 1466367 - RNA, 18 nt, Human
gcuucuaguucugccagg

SEQ ID NO: 1466368 - RNA, 21 nt, Human
gcuucuaguucugccaggaga

SEQ ID NO: 1466369 - RNA, 19 nt, Human
gcuucuaguucugccagga

SEQ ID NO: 1466370 - RNA, 20 nt, Human
gcuucuaguucugccaggag

SEQ ID NO: 1466371 - RNA, 15 nt, Human
gcuucuggccaggaa

SEQ ID NO: 1466372 - RNA, 14 nt, Human
gcuucuggccagga

SEQ ID NO: 1466373 - RNA, 18 nt, Human
gcuucuggccaggaagcu

SEQ ID NO: 1466374 - RNA, 16 nt, Human
gcuucuggccaggaag

SEQ ID NO: 1466375 - RNA, 17 nt, Human
gcuucuggccaggaagc

SEQ ID NO: 1466376 - RNA, 19 nt, Human
gcuggggccaggcuggguc

SEQ ID NO: 1466377 - RNA, 16 nt, Human
gcuggggccaggcugg

SEQ ID NO: 1466378 - RNA, 21 nt, Human
gcuggggcauggaaggcaaga

SEQ ID NO: 1466379 - RNA, 17 nt, Human
gcugggaggagggcagg

SEQ ID NO: 1466380 - RNA, 19 nt, Human
gcugggaggagggcaggca

SEQ ID NO: 1466381 - RNA, 22 nt, Human
gcuguauuuuaaaagaaugauu

SEQ ID NO: 1466382 - RNA, 14 nt, Human
gcugguuagaaaug

SEQ ID NO: 1466383 - RNA, 18 nt, Human
gcugucugaggcuaggug

SEQ ID NO: 1466384 - RNA, 16 nt, Human
gcuagcaaauaguaau

SEQ ID NO: 1466385 - RNA, 12 nt, Human
gcuagcaaauag

SEQ ID NO: 1466386 - RNA, 18 nt, Human
gcuagauguauguacuuc

SEQ ID NO: 1466387 - RNA, 18 nt, Human
gcuagaggaagcagccaa

SEQ ID NO: 1466388 - RNA, 18 nt, Human
gcugcccuguaccccagc

SEQ ID NO: 1466389 - RNA, 15 nt, Human
gcugccuuuggacuu

SEQ ID NO: 1466390 - RNA, 20 nt, Human
gcugccuuuggacuuguccc

SEQ ID NO: 1466391 - RNA, 13 nt, Human
gcugcuagaguga

SEQ ID NO: 1466392 - RNA, 20 nt, Human
gcugcuagagugacucacua

SEQ ID NO: 1466393 - RNA, 20 nt, Human
gcugcuguggccaucaaccu

SEQ ID NO: 1466394 - RNA, 19 nt, Human
gcugcuagagugacucacu

SEQ ID NO: 1466395 - RNA, 14 nt, Human
gcugggacuacagg

SEQ ID NO: 1466396 - RNA, 23 nt, Human
gcugggacaccccgacuuuuguu

SEQ ID NO: 1466397 - RNA, 22 nt, Human
gcccuucuauacccacccagaa

SEQ ID NO: 1466398 - RNA, 21 nt, Human
gcccuucuauacccacccaga

SEQ ID NO: 1466399 - RNA, 19 nt, Human
gcccuucuuuccacagaag

SEQ ID NO: 1466400 - RNA, 20 nt, Human
gcccuucuauacccacccag

SEQ ID NO: 1466401 - RNA, 21 nt, Human
gccgagaguccaucagccucc

SEQ ID NO: 1466402 - RNA, 13 nt, Human
gccgggagccuga

SEQ ID NO: 1466403 - RNA, 14 nt, Human
gccgggagccugac

SEQ ID NO: 1466404 - RNA, 19 nt, Human
gccgggagccugacccuca

SEQ ID NO: 1466405 - RNA, 17 nt, Human
gccuauuuuaauaaaca

SEQ ID NO: 1466406 - RNA, 22 nt, Human
gccucaaagcaagcauucagaa

SEQ ID NO: 1466407 - RNA, 22 nt, Human
gccucaauuucugaacaccaua

SEQ ID NO: 1466408 - RNA, 14 nt, Human
gccgugacgucugg

SEQ ID NO: 1466409 - RNA, 18 nt, Human
gccgugacgucugggugg

SEQ ID NO: 1466410 - RNA, 22 nt, Human
gccgugacgucuggguggcccu

SEQ ID NO: 1466411 - RNA, 18 nt, Human
gccucucugcaggucccu

SEQ ID NO: 1466412 - RNA, 17 nt, Human
gccucucugcagguccc

SEQ ID NO: 1466413 - RNA, 16 nt, Human
gccucucugcaggucc

SEQ ID NO: 1466414 - RNA, 14 nt, Human
gccucucugcaggu

SEQ ID NO: 1466415 - RNA, 10 nt, Human
gccucucugc

SEQ ID NO: 1466416 - RNA, 14 nt, Human
gccucccauguuca

SEQ ID NO: 1466417 - RNA, 16 nt, Human
gcuacagaagaaacug

SEQ ID NO: 1466418 - RNA, 13 nt, Human
gcuaccaggaaag

SEQ ID NO: 1466419 - RNA, 13 nt, Human
gcuacauaauuua

SEQ ID NO: 1466420 - RNA, 20 nt, Human
gcuaccaaagcaccuuagcu

SEQ ID NO: 1466421 - RNA, 18 nt, Human
gcgccuccaacccuagca

SEQ ID NO: 1466422 - RNA, 14 nt, Human
gcgccaggauggcg

SEQ ID NO: 1466423 - RNA, 23 nt, Human
gcggggaucagagcgcacaggga

SEQ ID NO: 1466424 - RNA, 21 nt, Human
gccuuuauuaaaaacugagug

SEQ ID NO: 1466425 - RNA, 18 nt, Human
gccuuggggcugaugcag

SEQ ID NO: 1466426 - RNA, 20 nt, Human
gccuuggcugacaugaagcu

SEQ ID NO: 1466427 - RNA, 17 nt, Human
gccuugggcuccgugug

SEQ ID NO: 1466428 - RNA, 18 nt, Human
gccuugggcuccgugugg

SEQ ID NO: 1466429 - RNA, 20 nt, Human
gccuugggcuccguguggga

SEQ ID NO: 1466430 - RNA, 22 nt, Human
gccuugggcuccgugugggaga

SEQ ID NO: 1466431 - RNA, 21 nt, Human
gccuugggcuccgugugggag

SEQ ID NO: 1466432 - RNA, 21 nt, Human
gccuucccaaguugugcuuga

SEQ ID NO: 1466433 - RNA, 20 nt, Human
gccuucccaaguugugcuug

SEQ ID NO: 1466434 - RNA, 19 nt, Human
gccuucccaaguugugcuu

SEQ ID NO: 1466435 - RNA, 13 nt, Human
gccuucaaaucaa

SEQ ID NO: 1466436 - RNA, 22 nt, Human
gccuuauuggaaagcagucccc

SEQ ID NO: 1466437 - RNA, 14 nt, Human
gccugguuagaggc

SEQ ID NO: 1466438 - RNA, 19 nt, Human
gccuguaacaagccagauu

SEQ ID NO: 1466439 - RNA, 22 nt, Human
gcccaucugggggccucuucug

SEQ ID NO: 1466440 - RNA, 22 nt, Human
gcccaguaccuagcuggcucug

SEQ ID NO: 1466441 - RNA, 22 nt, Human
gcccagugcacuugcuggaaga

SEQ ID NO: 1466442 - RNA, 19 nt, Human
gcccagugcacuugcugga

SEQ ID NO: 1466443 - RNA, 21 nt, Human
gcccggacgcccaggacccca

SEQ ID NO: 1466444 - RNA, 19 nt, Human
gcccggacgcccaggaccc

SEQ ID NO: 1466445 - RNA, 14 nt, Human
gcccucccccuccu

SEQ ID NO: 1466446 - RNA, 21 nt, Human
gccccuagcgcuaucucccug

SEQ ID NO: 1466447 - RNA, 18 nt, Human
gccccuacccuggacuug

SEQ ID NO: 1466448 - RNA, 13 nt, Human
gccccgcguggaa

SEQ ID NO: 1466449 - RNA, 16 nt, Human
gcccacagcuguauga

SEQ ID NO: 1466450 - RNA, 15 nt, Human
gccauuugcuuuuuc

SEQ ID NO: 1466451 - RNA, 19 nt, Human
gccaggaagaucccccaga

SEQ ID NO: 1466452 - RNA, 15 nt, Human
gccagcuuucccugc

SEQ ID NO: 1466453 - RNA, 22 nt, Human
gccagagccaaggggcuucagg

SEQ ID NO: 1466454 - RNA, 21 nt, Human
gcaggaguuucguuuucaaaa

SEQ ID NO: 1466455 - RNA, 20 nt, Human
gcaggaguuucguuuucaaa

SEQ ID NO: 1466456 - RNA, 15 nt, Human
gcaggagggaggugc

SEQ ID NO: 1466457 - RNA, 16 nt, Human
gcagcaacaauaaaua

SEQ ID NO: 1466458 - RNA, 11 nt, Human
gcagcaacaau

SEQ ID NO: 1466459 - RNA, 20 nt, Human
gcacagccucuuagaugcag

SEQ ID NO: 1466460 - RNA, 12 nt, Human
gcacagccuggc

SEQ ID NO: 1466461 - RNA, 19 nt, Human
gcacagccuggcuguggcc

SEQ ID NO: 1466462 - RNA, 13 nt, Human
gcacagcuaugaa

SEQ ID NO: 1466463 - RNA, 16 nt, Human
gcacagcuaugaaggc

SEQ ID NO: 1466464 - RNA, 16 nt, Human
gcacaggcuaauuuuu

SEQ ID NO: 1466465 - RNA, 15 nt, Human
gcacaggcuaauuuu

SEQ ID NO: 1466466 - RNA, 19 nt, Human
gcaccaccaugccaggcua

SEQ ID NO: 1466467 - RNA, 17 nt, Human
gcacugauguuguguuu

SEQ ID NO: 1466468 - RNA, 20 nt, Human
gcacugauguuguguuuuua

SEQ ID NO: 1466469 - RNA, 18 nt, Human
gcacugauguuguguuuu

SEQ ID NO: 1466470 - RNA, 11 nt, Human
gcaggucccua

SEQ ID NO: 1466471 - RNA, 10 nt, Human
gcaggucccu

SEQ ID NO: 1466472 - RNA, 13 nt, Human
gcaggucccuaau

SEQ ID NO: 1466473 - RNA, 12 nt, Human
gcaggucccuaa

SEQ ID NO: 1466474 - RNA, 17 nt, Human
gcaggaucucaccaggc

SEQ ID NO: 1466475 - RNA, 18 nt, Human
gcaggaucucaccaggca

SEQ ID NO: 1466476 - RNA, 19 nt, Human
gcaggaucucaccaggcag

SEQ ID NO: 1466477 - RNA, 20 nt, Human
gcaggaucucaccaggcagc

SEQ ID NO: 1466478 - RNA, 22 nt, Human
gcaggaucucaccaggcagccu

SEQ ID NO: 1466479 - RNA, 21 nt, Human
gcaggaucucaccaggcagcc

SEQ ID NO: 1466480 - RNA, 20 nt, Human
gcaggauuggggaagagagc

SEQ ID NO: 1466481 - RNA, 21 nt, Human
gcaggauuggggaagagagcc

SEQ ID NO: 1466482 - RNA, 14 nt, Human
gcaggcucccaggg

SEQ ID NO: 1466483 - RNA, 22 nt, Human
gcaggcucccagggacaccugg

SEQ ID NO: 1466484 - RNA, 13 nt, Human
gcaguucugaaga

SEQ ID NO: 1466485 - RNA, 14 nt, Human
gcaguucugaagaa

SEQ ID NO: 1466486 - RNA, 18 nt, Human
gcagugggaggguaccag

SEQ ID NO: 1466487 - RNA, 19 nt, Human
gcauauuuauaaaaauaaa

SEQ ID NO: 1466488 - RNA, 18 nt, Human
gcauauuauuuuauguug

SEQ ID NO: 1466489 - RNA, 23 nt, Human
gcauauuauuuuauguugcauag

SEQ ID NO: 1466490 - RNA, 15 nt, Human
gcauuauaaaaagaa

SEQ ID NO: 1466491 - RNA, 14 nt, Human
gcauuacugcaugc

SEQ ID NO: 1466492 - RNA, 17 nt, Human
gcauuacugcaugcacu

SEQ ID NO: 1466493 - RNA, 23 nt, Human
gcauggaaauucccuucaucugg

SEQ ID NO: 1466494 - RNA, 21 nt, Human
gcauggaaggcaagauugugu

SEQ ID NO: 1466495 - RNA, 15 nt, Human
gcaugccuucaaauc

SEQ ID NO: 1466496 - RNA, 17 nt, Human
gcaugcuggugagccaa

SEQ ID NO: 1466497 - RNA, 17 nt, Human
gcaugaauuugugaagg

SEQ ID NO: 1466498 - RNA, 15 nt, Human
gcaugaauuugugaa

SEQ ID NO: 1466499 - RNA, 17 nt, Human
gcauuuuacuguacaga

SEQ ID NO: 1466500 - RNA, 16 nt, Human
gcauuuuacuguacag

SEQ ID NO: 1466501 - RNA, 15 nt, Human
gcauuuggguccagg

SEQ ID NO: 1466502 - RNA, 16 nt, Human
gcauuuggguccagga

SEQ ID NO: 1466503 - RNA, 17 nt, Human
gcauuuggguccaggag

SEQ ID NO: 1466504 - RNA, 18 nt, Human
gcauuuggguccaggagg

SEQ ID NO: 1466505 - RNA, 22 nt, Human
gcauuuuguaaguugaagcaaa

SEQ ID NO: 1466506 - RNA, 23 nt, Human
gccaaaacaauguuuaaaccuuu

SEQ ID NO: 1466507 - RNA, 13 nt, Human
gccaaaaauagcu

SEQ ID NO: 1466508 - RNA, 21 nt, Human
gccaaagaaccaaagaagaaa

SEQ ID NO: 1466509 - RNA, 21 nt, Human
gccaaaccaggacccugucca

SEQ ID NO: 1466510 - RNA, 18 nt, Human
gccaaaccaggacccugu

SEQ ID NO: 1466511 - RNA, 18 nt, Human
gacuucccacggcuccuc

SEQ ID NO: 1466512 - RNA, 23 nt, Human
gaucaccgacugaaaauauuguu

SEQ ID NO: 1466513 - RNA, 16 nt, Human
gauaucaugcaaauuu

SEQ ID NO: 1466514 - RNA, 13 nt, Human
gauaucucaucuc

SEQ ID NO: 1466515 - RNA, 14 nt, Human
gauaucucaucucu

SEQ ID NO: 1466516 - RNA, 17 nt, Human
gaucaggaagagaagga

SEQ ID NO: 1466517 - RNA, 18 nt, Human
gaucaggaagagaaggag

SEQ ID NO: 1466518 - RNA, 16 nt, Human
gaucaggaagagaagg

SEQ ID NO: 1466519 - RNA, 15 nt, Human
gaucaggaagagaag

SEQ ID NO: 1466520 - RNA, 12 nt, Human
gaucaggaagag

SEQ ID NO: 1466521 - RNA, 23 nt, Human
gaucagcuuauugucuagugaaa

SEQ ID NO: 1466522 - RNA, 17 nt, Human
gauaggucagugcaaau

SEQ ID NO: 1466523 - RNA, 18 nt, Human
gauaauuuuaaauucucu

SEQ ID NO: 1466524 - RNA, 12 nt, Human
gauaauuuuaaa

SEQ ID NO: 1466525 - RNA, 19 nt, Human
gauauaguuuuacuuuuaa

SEQ ID NO: 1466526 - RNA, 21 nt, Human
gauauaguuuuacuuuuaaac

SEQ ID NO: 1466527 - RNA, 24 nt, Human
gauauaguuuuacuuuuaaacugu

SEQ ID NO: 1466528 - RNA, 14 nt, Human
gaugcagcucaaga

SEQ ID NO: 1466529 - RNA, 14 nt, Human
gauccuggaaauca

SEQ ID NO: 1466530 - RNA, 20 nt, Human
gauccuguauucagacagau

SEQ ID NO: 1466531 - RNA, 12 nt, Human
gauccuccucau

SEQ ID NO: 1466532 - RNA, 16 nt, Human
gauugggaauccgccc

SEQ ID NO: 1466533 - RNA, 15 nt, Human
gauuguuccugcuuu

SEQ ID NO: 1466534 - RNA, 11 nt, Human
gauuguuugca

SEQ ID NO: 1466535 - RNA, 16 nt, Human
gauuucaugcuaucuc

SEQ ID NO: 1466536 - RNA, 18 nt, Human
gauuucaugcuaucucug

SEQ ID NO: 1466537 - RNA, 20 nt, Human
gauuucaugcuaucucugug

SEQ ID NO: 1466538 - RNA, 22 nt, Human
gauuaaguaaugauaacuggaa

SEQ ID NO: 1466539 - RNA, 14 nt, Human
gauuaaguaaugau

SEQ ID NO: 1466540 - RNA, 21 nt, Human
gauucaugccaauuagcaauu

SEQ ID NO: 1466541 - RNA, 19 nt, Human
gauucauuuuaacaucuga

SEQ ID NO: 1466542 - RNA, 23 nt, Human
gcaauccucccacuucagccucc

SEQ ID NO: 1466543 - RNA, 20 nt, Human
gcaauccucccacuucagcc

SEQ ID NO: 1466544 - RNA, 22 nt, Human
gcaaucugacccuaugggucua

SEQ ID NO: 1466545 - RNA, 17 nt, Human
gcaagcauucagaagaa

SEQ ID NO: 1466546 - RNA, 23 nt, Human
gcaagcuuaauggcugauaauuu

SEQ ID NO: 1466547 - RNA, 23 nt, Human
gcaagauggggagugagaggcug

SEQ ID NO: 1466548 - RNA, 14 nt, Human
gcaagauugugucc

SEQ ID NO: 1466549 - RNA, 22 nt, Human
gcaacuuuguauaaaagggacu

SEQ ID NO: 1466550 - RNA, 18 nt, Human
gcaaacuuuauuuugugu

SEQ ID NO: 1466551 - RNA, 19 nt, Human
gcaaaccugaccccugcuc

SEQ ID NO: 1466552 - RNA, 21 nt, Human
gcaaaccugaccccugcucag

SEQ ID NO: 1466553 - RNA, 20 nt, Human
gcaaacuuuauuuuguguuu

SEQ ID NO: 1466554 - RNA, 14 nt, Human
gcaaagaauugacu

SEQ ID NO: 1466555 - RNA, 21 nt, Human
gcaaagacuauucccuucuaa

SEQ ID NO: 1466556 - RNA, 22 nt, Human
gcaaagacuauucccuucuaac

SEQ ID NO: 1466557 - RNA, 23 nt, Human
gcaaaugugaaucauuuuaccuu

SEQ ID NO: 1466558 - RNA, 12 nt, Human
gcaaaugugaau

SEQ ID NO: 1466559 - RNA, 16 nt, Human
gaagagaucaggaaga

SEQ ID NO: 1466560 - RNA, 17 nt, Human
gaagagaucaggaagag

SEQ ID NO: 1466561 - RNA, 15 nt, Human
gaagagauuuuucau

SEQ ID NO: 1466562 - RNA, 18 nt, Human
gaagagauuuuucaugau

SEQ ID NO: 1466563 - RNA, 20 nt, Human
gaagagagccugcaggaucu

SEQ ID NO: 1466564 - RNA, 12 nt, Human
gaagagcagccc

SEQ ID NO: 1466565 - RNA, 15 nt, Human
gaagagaaggagcag

SEQ ID NO: 1466566 - RNA, 15 nt, Human
gaagagacagcccag

SEQ ID NO: 1466567 - RNA, 14 nt, Human
gaagagaaggagca

SEQ ID NO: 1466568 - RNA, 13 nt, Human
gaagagaaggagc

SEQ ID NO: 1466569 - RNA, 12 nt, Human
gaagagaaggag

SEQ ID NO: 1466570 - RNA, 12 nt, Human
gaagaacugaaa

SEQ ID NO: 1466571 - RNA, 19 nt, Human
gaagacugcauuauauuua

SEQ ID NO: 1466572 - RNA, 19 nt, Human
gaacuuugcugagccugua

SEQ ID NO: 1466573 - RNA, 22 nt, Human
gaacucaucuagguaaauuaca

SEQ ID NO: 1466574 - RNA, 16 nt, Human
gaacuuuuuauugauu

SEQ ID NO: 1466575 - RNA, 20 nt, Human
gaacucaucuagguaaauua

SEQ ID NO: 1466576 - RNA, 21 nt, Human
gaacucaucuagguaaauuac

SEQ ID NO: 1466577 - RNA, 15 nt, Human
gaagauacugaaaua

SEQ ID NO: 1466578 - RNA, 20 nt, Human
gaagagguuuuaaagcuucc

SEQ ID NO: 1466579 - RNA, 14 nt, Human
gaagccccugggcc

SEQ ID NO: 1466580 - RNA, 18 nt, Human
gaagccccugggcccagu

SEQ ID NO: 1466581 - RNA, 22 nt, Human
gaacauaaaaaggacaucagca

SEQ ID NO: 1466582 - RNA, 18 nt, Human
gaacauaaaaaggacauc

SEQ ID NO: 1466583 - RNA, 16 nt, Human
gaacauaaaaaggaca

SEQ ID NO: 1466584 - RNA, 14 nt, Human
gaacauaaaaagga

SEQ ID NO: 1466585 - RNA, 16 nt, Human
gaacauagacagaaga

SEQ ID NO: 1466586 - RNA, 12 nt, Human
gaacauauuguu

SEQ ID NO: 1466587 - RNA, 18 nt, Human
gaacauauuguugaaagg

SEQ ID NO: 1466588 - RNA, 17 nt, Human
gaacaucacauuccucu

SEQ ID NO: 1466589 - RNA, 21 nt, Human
gaaauuucagauucccagagc

SEQ ID NO: 1466590 - RNA, 23 nt, Human
gaaauuucagauucccagagcaa

SEQ ID NO: 1466591 - RNA, 17 nt, Human
gaacagauaaucccugu

SEQ ID NO: 1466592 - RNA, 18 nt, Human
gaacagauaaucccugua

SEQ ID NO: 1466593 - RNA, 21 nt, Human
gaacagcagacucagcucuga

SEQ ID NO: 1466594 - RNA, 20 nt, Human
gaacagcagacucagcucug

SEQ ID NO: 1466595 - RNA, 16 nt, Human
gaaauuguauuacaaa

SEQ ID NO: 1466596 - RNA, 12 nt, Human
gaaaauaaagaa

SEQ ID NO: 1466597 - RNA, 13 nt, Human
gaaaauaaagaau

SEQ ID NO: 1466598 - RNA, 16 nt, Human
gaaaauaaagaaugga

SEQ ID NO: 1466599 - RNA, 15 nt, Human
gaaaauaaagaaugg

SEQ ID NO: 1466600 - RNA, 17 nt, Human
gaaauuuauaaacuuuu

SEQ ID NO: 1466601 - RNA, 16 nt, Human
gaaauuuauaaacuuu

SEQ ID NO: 1466602 - RNA, 18 nt, Human
gaaauuguauuacaaauc

SEQ ID NO: 1466603 - RNA, 11 nt, Human
gaaauuucaga

SEQ ID NO: 1466604 - RNA, 14 nt, Human
gaacaucccuccug

SEQ ID NO: 1466605 - RNA, 14 nt, Human
gaacuacugaggau

SEQ ID NO: 1466606 - RNA, 21 nt, Human
gaacuagaguuuagcuggaaa

SEQ ID NO: 1466607 - RNA, 12 nt, Human
gaaguccaagca

SEQ ID NO: 1466608 - RNA, 22 nt, Human
gaaguccaagcauuuagaugua

SEQ ID NO: 1466609 - RNA, 14 nt, Human
gaaguauaccugau

SEQ ID NO: 1466610 - RNA, 14 nt, Human
gaaggugggaggau

SEQ ID NO: 1466611 - RNA, 21 nt, Human
gaaguacccguucacauuuuu

SEQ ID NO: 1466612 - RNA, 13 nt, Human
gaagcguuguccu

SEQ ID NO: 1466613 - RNA, 19 nt, Human
gaagcguuguccucagccc

SEQ ID NO: 1466614 - RNA, 20 nt, Human
gaagcguuguccucagcccc

SEQ ID NO: 1466615 - RNA, 20 nt, Human
gaauacucuuauaucuauau

SEQ ID NO: 1466616 - RNA, 22 nt, Human
gaauauuuguuauguagauaac

SEQ ID NO: 1466617 - RNA, 23 nt, Human
gaauauuuuguuuugugcagaga

SEQ ID NO: 1466618 - RNA, 20 nt, Human
gaauaauccuaaacauauga

SEQ ID NO: 1466619 - RNA, 18 nt, Human
gaauaaucacgcuuuccu

SEQ ID NO: 1466620 - RNA, 19 nt, Human
gaauaaucacgcuuuccug

SEQ ID NO: 1466621 - RNA, 20 nt, Human
gaauaaucacgcuuuccuga

SEQ ID NO: 1466622 - RNA, 21 nt, Human
gaauaaucacgcuuuccugaa

SEQ ID NO: 1466623 - RNA, 17 nt, Human
gaaugaagauacugaaa

SEQ ID NO: 1466624 - RNA, 18 nt, Human
gaaugaagauacugaaau

SEQ ID NO: 1466625 - RNA, 21 nt, Human
gaaugaagauacugaaauaaa

SEQ ID NO: 1466626 - RNA, 19 nt, Human
gaaugaagauacugaaaua

SEQ ID NO: 1466627 - RNA, 16 nt, Human
gaaucaagggucaggc

SEQ ID NO: 1466628 - RNA, 17 nt, Human
gaaucaagggucaggcc

SEQ ID NO: 1466629 - RNA, 19 nt, Human
gaaucuuuaaaagaugcuu

SEQ ID NO: 1466630 - RNA, 19 nt, Human
gaaucaagggucaggccuu

SEQ ID NO: 1466631 - RNA, 22 nt, Human
gaauggaggggcagagccagga

SEQ ID NO: 1466632 - RNA, 21 nt, Human
gaauggaggggcagagccagg

SEQ ID NO: 1466633 - RNA, 20 nt, Human
gaauggaggggcagagccag

SEQ ID NO: 1466634 - RNA, 16 nt, Human
gaauggaggggcagag

SEQ ID NO: 1466635 - RNA, 15 nt, Human
gaauggaggggcaga

SEQ ID NO: 1466636 - RNA, 15 nt, Human
gaauggaaagcuuca

SEQ ID NO: 1466637 - RNA, 20 nt, Human
gaauguaaagcuugucugau

SEQ ID NO: 1466638 - RNA, 15 nt, Human
gaauguaaagcuugu

SEQ ID NO: 1466639 - RNA, 17 nt, Human
gaauguaaauuuguacu

SEQ ID NO: 1466640 - RNA, 14 nt, Human
gaauguaaauuugu

SEQ ID NO: 1466641 - RNA, 23 nt, Human
gaauuguguuuauaauuuuaaau

SEQ ID NO: 1466642 - RNA, 15 nt, Human
gaauuguguuuauaa

SEQ ID NO: 1466643 - RNA, 22 nt, Human
gaauuuaaauagcuuuuuucuc

SEQ ID NO: 1466644 - RNA, 15 nt, Human
gaauuguuaguuucu

SEQ ID NO: 1466645 - RNA, 15 nt, Human
gaauugaguguuuaa

SEQ ID NO: 1466646 - RNA, 19 nt, Human
gaauucuuuaaaauuacaa

SEQ ID NO: 1466647 - RNA, 19 nt, Human
gaauugaguguuuaaaguu

SEQ ID NO: 1466648 - RNA, 15 nt, Human
gaccccagccaucca

SEQ ID NO: 1466649 - RNA, 17 nt, Human
gaccagcaggcuggccu

SEQ ID NO: 1466650 - RNA, 18 nt, Human
gaccagccgugagcaugu

SEQ ID NO: 1466651 - RNA, 22 nt, Human
gacauccagcagauuuccagcc

SEQ ID NO: 1466652 - RNA, 13 nt, Human
gacauccagcaga

SEQ ID NO: 1466653 - RNA, 14 nt, Human
gacaucagcaaaca

SEQ ID NO: 1466654 - RNA, 16 nt, Human
gacaucacuuguacaa

SEQ ID NO: 1466655 - RNA, 22 nt, Human
gacaucacuuguacaaaauaaa

SEQ ID NO: 1466656 - RNA, 23 nt, Human
gacauccauguuccgagaagaac

SEQ ID NO: 1466657 - RNA, 15 nt, Human
gaccaccaagccuug

SEQ ID NO: 1466658 - RNA, 14 nt, Human
gaccaccaagccuu

SEQ ID NO: 1466659 - RNA, 13 nt, Human
gaccaccaagccu

SEQ ID NO: 1466660 - RNA, 12 nt, Human
gaccaccaagcc

SEQ ID NO: 1466661 - RNA, 22 nt, Human
gaccaccaagccuugauuggug

SEQ ID NO: 1466662 - RNA, 20 nt, Human
gacacuacacccagcaauag

SEQ ID NO: 1466663 - RNA, 19 nt, Human
gacacuacacccagcaaua

SEQ ID NO: 1466664 - RNA, 18 nt, Human
gacacuacacccagcaau

SEQ ID NO: 1466665 - RNA, 17 nt, Human
gacacuacacccagcaa

SEQ ID NO: 1466666 - RNA, 16 nt, Human
gacacuacacccagca

SEQ ID NO: 1466667 - RNA, 15 nt, Human
gacacuacacccagc

SEQ ID NO: 1466668 - RNA, 14 nt, Human
gacacuacacccag

SEQ ID NO: 1466669 - RNA, 22 nt, Human
gacacgcacggcagccacagcu

SEQ ID NO: 1466670 - RNA, 21 nt, Human
gacacgcacggcagccacagc

SEQ ID NO: 1466671 - RNA, 20 nt, Human
gacacgcacggcagccacag

SEQ ID NO: 1466672 - RNA, 19 nt, Human
gacacgcacggcagccaca

SEQ ID NO: 1466673 - RNA, 14 nt, Human
gacacgcacggcag

SEQ ID NO: 1466674 - RNA, 12 nt, Human
gaauuucaccug

SEQ ID NO: 1466675 - RNA, 17 nt, Human
gaauuucaccuguaaac

SEQ ID NO: 1466676 - RNA, 21 nt, Human
gaauuucaccuguaaaccuga

SEQ ID NO: 1466677 - RNA, 17 nt, Human
gaauuucccacauaccc

SEQ ID NO: 1466678 - RNA, 18 nt, Human
gacacuagcccaaugaaa

SEQ ID NO: 1466679 - RNA, 16 nt, Human
gacagggcgggggugg

SEQ ID NO: 1466680 - RNA, 17 nt, Human
gacagggcggggguggc

SEQ ID NO: 1466681 - RNA, 14 nt, Human
gacaguucaagaaa

SEQ ID NO: 1466682 - RNA, 22 nt, Human
gacauaaaguugauaaagauuu

SEQ ID NO: 1466683 - RNA, 15 nt, Human
gacaucacuuguaca

SEQ ID NO: 1466684 - RNA, 16 nt, Human
gacaguuuauuuguug

SEQ ID NO: 1466685 - RNA, 17 nt, Human
gacauaaaguugauaaa

SEQ ID NO: 1466686 - RNA, 19 nt, Human
gacauaaaguugauaaaga

SEQ ID NO: 1466687 - RNA, 20 nt, Human
gacauaaaguugauaaagau

SEQ ID NO: 1466688 - RNA, 14 nt, Human
gacaggauguguuu

SEQ ID NO: 1466689 - RNA, 18 nt, Human
gacaggauguguuugcuu

SEQ ID NO: 1466690 - RNA, 23 nt, Human
gacaggaugguucccuugaugaa

SEQ ID NO: 1466691 - RNA, 19 nt, Human
gacaggauguguuugcuuu

SEQ ID NO: 1466692 - RNA, 20 nt, Human
gacaggauguguuugcuuuc

SEQ ID NO: 1466693 - RNA, 18 nt, Human
gacaggauguuugcucag

SEQ ID NO: 1466694 - RNA, 23 nt, Human
gacugcggaggaaggaggaccca

SEQ ID NO: 1466695 - RNA, 15 nt, Human
gacugcggaggaagg

SEQ ID NO: 1466696 - RNA, 18 nt, Human
gacuuauaguacaugaua

SEQ ID NO: 1466697 - RNA, 17 nt, Human
gacuuauaguacaugau

SEQ ID NO: 1466698 - RNA, 16 nt, Human
gacuuauaguacauga

SEQ ID NO: 1466699 - RNA, 21 nt, Human
gacuucaagcauggcuauuuu

SEQ ID NO: 1466700 - RNA, 14 nt, Human
gacuuacaugauuc

SEQ ID NO: 1466701 - RNA, 15 nt, Human
gacuuacaugauuca

SEQ ID NO: 1466702 - RNA, 16 nt, Human
gacuuacaugauucau

SEQ ID NO: 1466703 - RNA, 18 nt, Human
gacuuacaugauucauuu

SEQ ID NO: 1466704 - RNA, 19 nt, Human
gacuuacaugauucauuuu

SEQ ID NO: 1466705 - RNA, 11 nt, Human
gacugagaaau

SEQ ID NO: 1466706 - RNA, 14 nt, Human
gacucuaagaaaga

SEQ ID NO: 1466707 - RNA, 15 nt, Human
gacucuaagaaagaa

SEQ ID NO: 1466708 - RNA, 16 nt, Human
gacucuaagaaagaac

SEQ ID NO: 1466709 - RNA, 20 nt, Human
gacuaauggcaugagaaaua

SEQ ID NO: 1466710 - RNA, 14 nt, Human
gacuaauggcauga

SEQ ID NO: 1466711 - RNA, 16 nt, Human
gacuaauggcaugaga

SEQ ID NO: 1466712 - RNA, 14 nt, Human
gacuacaggcguga

SEQ ID NO: 1466713 - RNA, 19 nt, Human
gacugccaagacugcugug

SEQ ID NO: 1466714 - RNA, 20 nt, Human
gacugccaagacugcugugg

SEQ ID NO: 1466715 - RNA, 12 nt, Human
gacugccaagcc

SEQ ID NO: 1466716 - RNA, 16 nt, Human
gacugccaagccaugg

SEQ ID NO: 1466717 - RNA, 14 nt, Human
gacugccaagccau

SEQ ID NO: 1466718 - RNA, 13 nt, Human
gacugccaagcca

SEQ ID NO: 1466719 - RNA, 15 nt, Human
gacugccaagccaug

SEQ ID NO: 1466720 - RNA, 13 nt, Human
gacugagaaauuu

SEQ ID NO: 1466721 - RNA, 17 nt, Human
gacgucuggguggcccu

SEQ ID NO: 1466722 - RNA, 15 nt, Human
gacuaaucuuauuca

SEQ ID NO: 1466723 - RNA, 22 nt, Human
gacuaaucuuauucauuuucuc

SEQ ID NO: 1466724 - RNA, 16 nt, Human
cuuccuucccugcugu

SEQ ID NO: 1466725 - RNA, 15 nt, Human
cuuccuucccugcug

SEQ ID NO: 1466726 - RNA, 14 nt, Human
cuuccuuccucucc

SEQ ID NO: 1466727 - RNA, 22 nt, Human
cuucucagauuucugaggaaau

SEQ ID NO: 1466728 - RNA, 19 nt, Human
cuucucagauuucugagga

SEQ ID NO: 1466729 - RNA, 14 nt, Human
cuucucagauuucu

SEQ ID NO: 1466730 - RNA, 15 nt, Human
cuucguuuauuuuca

SEQ ID NO: 1466731 - RNA, 16 nt, Human
cuucguuuauuuucaa

SEQ ID NO: 1466732 - RNA, 18 nt, Human
cuucguuuauuuucaaga

SEQ ID NO: 1466733 - RNA, 19 nt, Human
cuucuccauggcccugcca

SEQ ID NO: 1466734 - RNA, 15 nt, Human
cuucucccaauucau

SEQ ID NO: 1466735 - RNA, 17 nt, Human
cuucuccauggcccugc

SEQ ID NO: 1466736 - RNA, 20 nt, Human
cuucucauuuuuuaaaaaag

SEQ ID NO: 1466737 - RNA, 14 nt, Human
cuucugccuucuca

SEQ ID NO: 1466738 - RNA, 16 nt, Human
cuucugccuucucaug

SEQ ID NO: 1466739 - RNA, 15 nt, Human
cuucuggacugguuu

SEQ ID NO: 1466740 - RNA, 18 nt, Human
cuucagcgguuuauauaa

SEQ ID NO: 1466741 - RNA, 17 nt, Human
cuuauuuuugacagugu

SEQ ID NO: 1466742 - RNA, 13 nt, Human
cuucagcucugaa

SEQ ID NO: 1466743 - RNA, 14 nt, Human
cuucagcucugaaa

SEQ ID NO: 1466744 - RNA, 14 nt, Human
cuucauuuccuccg

SEQ ID NO: 1466745 - RNA, 18 nt, Human
cuucauuugggaugcuac

SEQ ID NO: 1466746 - RNA, 22 nt, Human
cuuccggggaaggauuuugcag

SEQ ID NO: 1466747 - RNA, 23 nt, Human
cuuccaccaaguuggaacauccu

SEQ ID NO: 1466748 - RNA, 20 nt, Human
cuuccagucuuccugacacu

SEQ ID NO: 1466749 - RNA, 21 nt, Human
cuuccagucuuccugacacuu

SEQ ID NO: 1466750 - RNA, 22 nt, Human
cuuccagucuuccugacacuuu

SEQ ID NO: 1466751 - RNA, 19 nt, Human
cuguuuuauaauuuuguga

SEQ ID NO: 1466752 - RNA, 12 nt, Human
cuguuuucuucu

SEQ ID NO: 1466753 - RNA, 18 nt, Human
cuguuuucuucuauucca

SEQ ID NO: 1466754 - RNA, 15 nt, Human
cuguuuuucggacag

SEQ ID NO: 1466755 - RNA, 17 nt, Human
cuguuuuucggacaguu

SEQ ID NO: 1466756 - RNA, 20 nt, Human
cuguuuuucggacaguuuau

SEQ ID NO: 1466757 - RNA, 17 nt, Human
cuguuuuucuaacuggg

SEQ ID NO: 1466758 - RNA, 22 nt, Human
cuguuuuucggacaguuuauuu

SEQ ID NO: 1466759 - RNA, 15 nt, Human
cuguuuacugcaagg

SEQ ID NO: 1466760 - RNA, 17 nt, Human
cuguuuacugcaagguu

SEQ ID NO: 1466761 - RNA, 13 nt, Human
cuguuuagaacac

SEQ ID NO: 1466762 - RNA, 14 nt, Human
cuguuuagaacaca

SEQ ID NO: 1466763 - RNA, 20 nt, Human
cuguuuaguagcagugauug

SEQ ID NO: 1466764 - RNA, 13 nt, Human
cugguugggcagc

SEQ ID NO: 1466765 - RNA, 17 nt, Human
cugguugggcagccaga

SEQ ID NO: 1466766 - RNA, 14 nt, Human
cuguuuuuuuguua

SEQ ID NO: 1466767 - RNA, 21 nt, Human
cuuaagaagacugcauuauau

SEQ ID NO: 1466768 - RNA, 18 nt, Human
cuuaagucagaacagcag

SEQ ID NO: 1466769 - RNA, 17 nt, Human
cuuaagucagaacagca

SEQ ID NO: 1466770 - RNA, 16 nt, Human
cuuaagugcugcaauu

SEQ ID NO: 1466771 - RNA, 21 nt, Human
cuuaaucagauagauauuccu

SEQ ID NO: 1466772 - RNA, 20 nt, Human
cuuaaucagguccucagaga

SEQ ID NO: 1466773 - RNA, 22 nt, Human
cuuaaucagguccucagagaau

SEQ ID NO: 1466774 - RNA, 19 nt, Human
cuuauaguacaugauaaau

SEQ ID NO: 1466775 - RNA, 17 nt, Human
cuuauaguacaugauaa

SEQ ID NO: 1466776 - RNA, 13 nt, Human
cuuauaguacaug

SEQ ID NO: 1466777 - RNA, 14 nt, Human
cuuauaauuuaaaa

SEQ ID NO: 1466778 - RNA, 17 nt, Human
cuuauaauaaaggacug

SEQ ID NO: 1466779 - RNA, 20 nt, Human
cuuauaauaaaggacuguaa

SEQ ID NO: 1466780 - RNA, 16 nt, Human
cuuauaauaaaggacu

SEQ ID NO: 1466781 - RNA, 14 nt, Human
cuuauaauaaagga

SEQ ID NO: 1466782 - RNA, 13 nt, Human
cuuauaauuuaaa

SEQ ID NO: 1466783 - RNA, 21 nt, Human
cuuaggguuaugauuaaguaa

SEQ ID NO: 1466784 - RNA, 21 nt, Human
cuuagaucuggcauguuagcc

SEQ ID NO: 1466785 - RNA, 12 nt, Human
cuuauuuucaag

SEQ ID NO: 1466786 - RNA, 14 nt, Human
cuuauuuucaagaa

SEQ ID NO: 1466787 - RNA, 15 nt, Human
cuuauuuucaagaaa

SEQ ID NO: 1466788 - RNA, 18 nt, Human
cuuauuuucaagaaacug

SEQ ID NO: 1466789 - RNA, 19 nt, Human
cuuauuuucaagaaacuga

SEQ ID NO: 1466790 - RNA, 21 nt, Human
cuuaugacaucacuuguacaa

SEQ ID NO: 1466791 - RNA, 22 nt, Human
cuuaugacaucacuuguacaaa

SEQ ID NO: 1466792 - RNA, 19 nt, Human
cuuagaugcaguucugaag

SEQ ID NO: 1466793 - RNA, 20 nt, Human
cuuagaugcaguucugaaga

SEQ ID NO: 1466794 - RNA, 15 nt, Human
cuuagaucuggcaug

SEQ ID NO: 1466795 - RNA, 16 nt, Human
cuuagaucuggcaugu

SEQ ID NO: 1466796 - RNA, 20 nt, Human
cuuagaccaccaagccuuga

SEQ ID NO: 1466797 - RNA, 19 nt, Human
cuuagaccaccaagccuug

SEQ ID NO: 1466798 - RNA, 17 nt, Human
cuuagaccaccaagccu

SEQ ID NO: 1466799 - RNA, 15 nt, Human
cuuagaccaccaagc

SEQ ID NO: 1466800 - RNA, 16 nt, Human
cuuaauggcugauaau

SEQ ID NO: 1466801 - RNA, 20 nt, Human
cuuaauggcugauaauuuua

SEQ ID NO: 1466802 - RNA, 22 nt, Human
cuuaauggcugauaauuuuaaa

SEQ ID NO: 1466803 - RNA, 19 nt, Human
cuuaccuuuuuauuugcau

SEQ ID NO: 1466804 - RNA, 20 nt, Human
cuuaccuuuuuauuugcaug

SEQ ID NO: 1466805 - RNA, 18 nt, Human
cuuacuuauuaucuucag

SEQ ID NO: 1466806 - RNA, 20 nt, Human
cuugcuugauuguauggugg

SEQ ID NO: 1466807 - RNA, 21 nt, Human
cuugcugcaguaugaaaauaa

SEQ ID NO: 1466808 - RNA, 19 nt, Human
cuugcucuugaugccuggc

SEQ ID NO: 1466809 - RNA, 18 nt, Human
cuugcucuugaugccugg

SEQ ID NO: 1466810 - RNA, 17 nt, Human
cuugcucuugaugccug

SEQ ID NO: 1466811 - RNA, 23 nt, Human
cuugccacaccccccaccccuag

SEQ ID NO: 1466812 - RNA, 19 nt, Human
cuugccacaccccccaccc

SEQ ID NO: 1466813 - RNA, 13 nt, Human
cuugccacacccc

SEQ ID NO: 1466814 - RNA, 13 nt, Human
cuugccaaauuua

SEQ ID NO: 1466815 - RNA, 15 nt, Human
cuugaggggaccagg

SEQ ID NO: 1466816 - RNA, 16 nt, Human
cuugaggggaccagga

SEQ ID NO: 1466817 - RNA, 17 nt, Human
cuugaggggaccaggag

SEQ ID NO: 1466818 - RNA, 18 nt, Human
cuugaggggaccaggagu

SEQ ID NO: 1466819 - RNA, 21 nt, Human
cuugaggggaccaggaguggg

SEQ ID NO: 1466820 - RNA, 12 nt, Human
cuucuggccagg

SEQ ID NO: 1466821 - RNA, 22 nt, Human
cuucuggccaggaagcuuuggu

SEQ ID NO: 1466822 - RNA, 13 nt, Human
cuucuggccagga

SEQ ID NO: 1466823 - RNA, 15 nt, Human
cuucuggccaggaag

SEQ ID NO: 1466824 - RNA, 13 nt, Human
cuucuggccuugu

SEQ ID NO: 1466825 - RNA, 17 nt, Human
cuucuggccaggaagcu

SEQ ID NO: 1466826 - RNA, 19 nt, Human
cuugaggggaccaggagug

SEQ ID NO: 1466827 - RNA, 16 nt, Human
cuuggggcugaugcag

SEQ ID NO: 1466828 - RNA, 21 nt, Human
cuugggcuccgugugggagac

SEQ ID NO: 1466829 - RNA, 18 nt, Human
cuuggggcugaugcaguu

SEQ ID NO: 1466830 - RNA, 15 nt, Human
cuugguuugccuucc

SEQ ID NO: 1466831 - RNA, 12 nt, Human
cuuguacaaaau

SEQ ID NO: 1466832 - RNA, 13 nt, Human
cuuguacaaaaua

SEQ ID NO: 1466833 - RNA, 13 nt, Human
cuuguuucauauu

SEQ ID NO: 1466834 - RNA, 17 nt, Human
cuuugacaaagguaaau

SEQ ID NO: 1466835 - RNA, 13 nt, Human
cuuugaaacagaa

SEQ ID NO: 1466836 - RNA, 20 nt, Human
cuuucugaucaaggccuuau

SEQ ID NO: 1466837 - RNA, 20 nt, Human
cuuucucuuuuccucuacca

SEQ ID NO: 1466838 - RNA, 15 nt, Human
cuuucugaucaaggc

SEQ ID NO: 1466839 - RNA, 16 nt, Human
cuuucugaucaaggcc

SEQ ID NO: 1466840 - RNA, 17 nt, Human
cuuucugaucaaggccu

SEQ ID NO: 1466841 - RNA, 18 nt, Human
cuuucugaucaaggccuu

SEQ ID NO: 1466842 - RNA, 15 nt, Human
cuuuaggagcagugg

SEQ ID NO: 1466843 - RNA, 23 nt, Human
cuuuaggcauuaaauuuuagcaa

SEQ ID NO: 1466844 - RNA, 15 nt, Human
cuuuaggcauuaaau

SEQ ID NO: 1466845 - RNA, 24 nt, Human
cuuuggcaggugcagcccccacug

SEQ ID NO: 1466846 - RNA, 13 nt, Human
cuuuggcaggugc

SEQ ID NO: 1466847 - RNA, 22 nt, Human
cuuugugauucaaucuguaaac

SEQ ID NO: 1466848 - RNA, 23 nt, Human
cuuugugauucaaucuguaaacu

SEQ ID NO: 1466849 - RNA, 16 nt, Human
cuuuguguagcuuugc

SEQ ID NO: 1466850 - RNA, 18 nt, Human
cuuuguguagcuuugcuc

SEQ ID NO: 1466851 - RNA, 23 nt, Human
cuuugcuucauucaagucagcuc

SEQ ID NO: 1466852 - RNA, 18 nt, Human
cuuugccacccucaugcu

SEQ ID NO: 1466853 - RNA, 12 nt, Human
cuuugcuucauu

SEQ ID NO: 1466854 - RNA, 17 nt, Human
cuuugccacccucaugc

SEQ ID NO: 1466855 - RNA, 16 nt, Human
cuuugccacccucaug

SEQ ID NO: 1466856 - RNA, 19 nt, Human
cuuugacaaagguaaauca

SEQ ID NO: 1466857 - RNA, 22 nt, Human
cuuugacaauugggagcugcca

SEQ ID NO: 1466858 - RNA, 23 nt, Human
cuuugacaauugggagcugccaa

SEQ ID NO: 1466859 - RNA, 21 nt, Human
cuuugacaauugggagcugcc

SEQ ID NO: 1466860 - RNA, 18 nt, Human
cuuugacaauugggagcu

SEQ ID NO: 1466861 - RNA, 14 nt, Human
gaaaacaaggauga

SEQ ID NO: 1466862 - RNA, 13 nt, Human
gaaaacaaaacug

SEQ ID NO: 1466863 - RNA, 19 nt, Human
gaaaaauauauacuaaaca

SEQ ID NO: 1466864 - RNA, 16 nt, Human
gaaaaauauguaccaa

SEQ ID NO: 1466865 - RNA, 19 nt, Human
gaaaauaacaauaaaagac

SEQ ID NO: 1466866 - RNA, 14 nt, Human
gaaaaguauguuag

SEQ ID NO: 1466867 - RNA, 17 nt, Human
gaaaagguuuaugaaaa

SEQ ID NO: 1466868 - RNA, 22 nt, Human
gaaaagguuuaugaaaaagaag

SEQ ID NO: 1466869 - RNA, 23 nt, Human
gaaaagguuuaugaaaaagaaga

SEQ ID NO: 1466870 - RNA, 20 nt, Human
gaaaaguauguuagugcaaa

SEQ ID NO: 1466871 - RNA, 17 nt, Human
gaaaacauuccauccuu

SEQ ID NO: 1466872 - RNA, 13 nt, Human
gaaaacauuccau

SEQ ID NO: 1466873 - RNA, 11 nt, Human
gaaaaccuuuc

SEQ ID NO: 1466874 - RNA, 15 nt, Human
gaaaaccuuucuuca

SEQ ID NO: 1466875 - RNA, 18 nt, Human
cuuuuuuaaaugaagaaa

SEQ ID NO: 1466876 - RNA, 14 nt, Human
cuuuuugcagcuuu

SEQ ID NO: 1466877 - RNA, 13 nt, Human
cuuuuugcagcuu

SEQ ID NO: 1466878 - RNA, 12 nt, Human
cuuuuugcagcu

SEQ ID NO: 1466879 - RNA, 13 nt, Human
cuuuuuauuugca

SEQ ID NO: 1466880 - RNA, 14 nt, Human
cuuuuuauuugcau

SEQ ID NO: 1466881 - RNA, 15 nt, Human
cuuuuuauuugcaug

SEQ ID NO: 1466882 - RNA, 15 nt, Human
cuuuucuuaaaccuu

SEQ ID NO: 1466883 - RNA, 16 nt, Human
cuuuucuuaaaccuuc

SEQ ID NO: 1466884 - RNA, 23 nt, Human
cuuuucuucuauugccucugaga

SEQ ID NO: 1466885 - RNA, 19 nt, Human
cuuuucuucuauugccucu

SEQ ID NO: 1466886 - RNA, 18 nt, Human
cuuuucuucuauugccuc

SEQ ID NO: 1466887 - RNA, 17 nt, Human
cuuuguguagcuuugcu

SEQ ID NO: 1466888 - RNA, 21 nt, Human
cuggauuccccaucucaggcc

SEQ ID NO: 1466889 - RNA, 15 nt, Human
cuggauuuuuaccag

SEQ ID NO: 1466890 - RNA, 14 nt, Human
cuggauuuuuacca

SEQ ID NO: 1466891 - RNA, 13 nt, Human
cuggcacagaggu

SEQ ID NO: 1466892 - RNA, 12 nt, Human
cuggcacagagg

SEQ ID NO: 1466893 - RNA, 14 nt, Human
cuggcacagccugg

SEQ ID NO: 1466894 - RNA, 13 nt, Human
cuggauuccagag

SEQ ID NO: 1466895 - RNA, 20 nt, Human
cuggauuccccaucucaggc

SEQ ID NO: 1466896 - RNA, 21 nt, Human
cuggauuccagagcacugcuc

SEQ ID NO: 1466897 - RNA, 17 nt, Human
cuggauuauauuaugaa

SEQ ID NO: 1466898 - RNA, 16 nt, Human
cuggccucaaagcaag

SEQ ID NO: 1466899 - RNA, 21 nt, Human
cuggccucaaagcaagcauuc

SEQ ID NO: 1466900 - RNA, 20 nt, Human
cuggagcccacuguacuugc

SEQ ID NO: 1466901 - RNA, 17 nt, Human
cuggagcccacuguacu

SEQ ID NO: 1466902 - RNA, 16 nt, Human
cuggagcccacuguac

SEQ ID NO: 1466903 - RNA, 15 nt, Human
cuggagcccacugua

SEQ ID NO: 1466904 - RNA, 13 nt, Human
cuggagcccacug

SEQ ID NO: 1466905 - RNA, 21 nt, Human
cuggagcccacuguacuugcu

SEQ ID NO: 1466906 - RNA, 16 nt, Human
cuggagcuagaauuug

SEQ ID NO: 1466907 - RNA, 17 nt, Human
cuggagcuagaauuuga

SEQ ID NO: 1466908 - RNA, 22 nt, Human
cuggagcuagaauuugauaugu

SEQ ID NO: 1466909 - RNA, 12 nt, Human
cuggacagcuug

SEQ ID NO: 1466910 - RNA, 14 nt, Human
cuggacagcuugug

SEQ ID NO: 1466911 - RNA, 14 nt, Human
cuggaccacugggc

SEQ ID NO: 1466912 - RNA, 15 nt, Human
cuggaccacugggca

SEQ ID NO: 1466913 - RNA, 12 nt, Human
cuggaccagccu

SEQ ID NO: 1466914 - RNA, 23 nt, Human
cuggaauaauccuaaacauauga

SEQ ID NO: 1466915 - RNA, 21 nt, Human
cuggaagugcuaauuuugaaa

SEQ ID NO: 1466916 - RNA, 14 nt, Human
cuggaauaaguuca

SEQ ID NO: 1466917 - RNA, 15 nt, Human
cuggaauacaugaaa

SEQ ID NO: 1466918 - RNA, 16 nt, Human
cugggagcuuuuguag

SEQ ID NO: 1466919 - RNA, 23 nt, Human
cugggaacaucacauuccucugc

SEQ ID NO: 1466920 - RNA, 16 nt, Human
cugggaggcucuggag

SEQ ID NO: 1466921 - RNA, 15 nt, Human
cugggaggcucugga

SEQ ID NO: 1466922 - RNA, 17 nt, Human
cugggccccugccucuc

SEQ ID NO: 1466923 - RNA, 16 nt, Human
cugggccccugccucu

SEQ ID NO: 1466924 - RNA, 12 nt, Human
cugggccccugc

SEQ ID NO: 1466925 - RNA, 21 nt, Human
cugggauuacaggcgugagcc

SEQ ID NO: 1466926 - RNA, 19 nt, Human
cugggcaaugauggcaauu

SEQ ID NO: 1466927 - RNA, 12 nt, Human
cuggcuucuggc

SEQ ID NO: 1466928 - RNA, 13 nt, Human
cuggcuucuggcc

SEQ ID NO: 1466929 - RNA, 17 nt, Human
cuggcuucuggccagga

SEQ ID NO: 1466930 - RNA, 19 nt, Human
cuggcuucuggccaggaag

SEQ ID NO: 1466931 - RNA, 17 nt, Human
cuggguaggaaagagga

SEQ ID NO: 1466932 - RNA, 15 nt, Human
cuggguaggaaagag

SEQ ID NO: 1466933 - RNA, 14 nt, Human
cuggguaggaaaga

SEQ ID NO: 1466934 - RNA, 17 nt, Human
cuggguagcgggggagg

SEQ ID NO: 1466935 - RNA, 19 nt, Human
cugggccccugccucucug

SEQ ID NO: 1466936 - RNA, 11 nt, Human
cugggccuugg

SEQ ID NO: 1466937 - RNA, 14 nt, Human
cugggccuugggcu

SEQ ID NO: 1466938 - RNA, 15 nt, Human
cugggccuugggcuc

SEQ ID NO: 1466939 - RNA, 17 nt, Human
cugggccuugggcuccg

SEQ ID NO: 1466940 - RNA, 19 nt, Human
cuggguaggaaagaggaag

SEQ ID NO: 1466941 - RNA, 15 nt, Human
cuggguugcagacag

SEQ ID NO: 1466942 - RNA, 18 nt, Human
cuggguugcagacaggaa

SEQ ID NO: 1466943 - RNA, 11 nt, Human
cugcccugccc

SEQ ID NO: 1466944 - RNA, 21 nt, Human
cugcccugccaccugucuguc

SEQ ID NO: 1466945 - RNA, 20 nt, Human
cugcccugccaccugucugu

SEQ ID NO: 1466946 - RNA, 18 nt, Human
cugcccugccaccugucu

SEQ ID NO: 1466947 - RNA, 17 nt, Human
cugcccugccaccuguc

SEQ ID NO: 1466948 - RNA, 16 nt, Human
cugcccugccaccugu

SEQ ID NO: 1466949 - RNA, 15 nt, Human
cugcccugccaccug

SEQ ID NO: 1466950 - RNA, 14 nt, Human
cugcccugccaccu

SEQ ID NO: 1466951 - RNA, 13 nt, Human
cugcccugccacc

SEQ ID NO: 1466952 - RNA, 11 nt, Human
cugcccugcca

SEQ ID NO: 1466953 - RNA, 18 nt, Human
cugcccgggagcucagga

SEQ ID NO: 1466954 - RNA, 14 nt, Human
cugcccaggcacug

SEQ ID NO: 1466955 - RNA, 15 nt, Human
cugcccaggcacugc

SEQ ID NO: 1466956 - RNA, 16 nt, Human
cugcccaggcacugca

SEQ ID NO: 1466957 - RNA, 16 nt, Human
cugcccagugcacuug

SEQ ID NO: 1466958 - RNA, 19 nt, Human
cugcccagugcacuugcug

SEQ ID NO: 1466959 - RNA, 20 nt, Human
cugccagcauuucccuuccu

SEQ ID NO: 1466960 - RNA, 16 nt, Human
cugccaggagacaggu

SEQ ID NO: 1466961 - RNA, 15 nt, Human
cugccaggagcuuug

SEQ ID NO: 1466962 - RNA, 11 nt, Human
cugccaggagg

SEQ ID NO: 1466963 - RNA, 16 nt, Human
cugccaggaggaccca

SEQ ID NO: 1466964 - RNA, 18 nt, Human
cugccaggaggacccagg

SEQ ID NO: 1466965 - RNA, 19 nt, Human
cugccaggaggacccaggg

SEQ ID NO: 1466966 - RNA, 21 nt, Human
cugccaggaggacccagggcu

SEQ ID NO: 1466967 - RNA, 22 nt, Human
cugccaggaggacccagggcuc

SEQ ID NO: 1466968 - RNA, 23 nt, Human
cugccaggaggacccagggcucu

SEQ ID NO: 1466969 - RNA, 14 nt, Human
cugccucucugcag

SEQ ID NO: 1466970 - RNA, 21 nt, Human
cugccucucgcuccucaaccc

SEQ ID NO: 1466971 - RNA, 13 nt, Human
cugccucucugca

SEQ ID NO: 1466972 - RNA, 12 nt, Human
cugccucucugc

SEQ ID NO: 1466973 - RNA, 19 nt, Human
cugccucuucccucuuccu

SEQ ID NO: 1466974 - RNA, 18 nt, Human
cugccucuucccucuucc

SEQ ID NO: 1466975 - RNA, 19 nt, Human
cugccucuuaaauaaaccu

SEQ ID NO: 1466976 - RNA, 22 nt, Human
cugaucagugggccuccaagga

SEQ ID NO: 1466977 - RNA, 19 nt, Human
cugauaggguuugugacag

SEQ ID NO: 1466978 - RNA, 20 nt, Human
cugauaggguuugugacagg

SEQ ID NO: 1466979 - RNA, 23 nt, Human
cugauaggguuugugacagggcg

SEQ ID NO: 1466980 - RNA, 16 nt, Human
cugaguuuuccauggc

SEQ ID NO: 1466981 - RNA, 17 nt, Human
cugauucacaucucauu

SEQ ID NO: 1466982 - RNA, 21 nt, Human
cugauucacaucucauuuuuc

SEQ ID NO: 1466983 - RNA, 17 nt, Human
cugauucgaaugacacu

SEQ ID NO: 1466984 - RNA, 19 nt, Human
cugauucgaaugacacugu

SEQ ID NO: 1466985 - RNA, 12 nt, Human
cugauguugugu

SEQ ID NO: 1466986 - RNA, 13 nt, Human
cugagucccaucc

SEQ ID NO: 1466987 - RNA, 17 nt, Human
cugagucguacagaaag

SEQ ID NO: 1466988 - RNA, 18 nt, Human
cugagucguacagaaagc

SEQ ID NO: 1466989 - RNA, 19 nt, Human
cugagucguacagaaagcu

SEQ ID NO: 1466990 - RNA, 20 nt, Human
cugagucguacagaaagcug

SEQ ID NO: 1466991 - RNA, 21 nt, Human
cugagucguacagaaagcugc

SEQ ID NO: 1466992 - RNA, 23 nt, Human
cugagucguacagaaagcugccu

SEQ ID NO: 1466993 - RNA, 11 nt, Human
cugagugacuc

SEQ ID NO: 1466994 - RNA, 21 nt, Human
cugagugacucuauauagcug

SEQ ID NO: 1466995 - RNA, 18 nt, Human
cugaguuuuccauggcag

SEQ ID NO: 1466996 - RNA, 19 nt, Human
cugaguuuuccauggcagg

SEQ ID NO: 1466997 - RNA, 20 nt, Human
cugaguuuuccauggcagga

SEQ ID NO: 1466998 - RNA, 22 nt, Human
cugaguuuuccauggcaggaag

SEQ ID NO: 1466999 - RNA, 18 nt, Human
cugcaaaccugaccccug

SEQ ID NO: 1467000 - RNA, 20 nt, Human
cugcaaaccugaccccugcu

SEQ ID NO: 1467001 - RNA, 19 nt, Human
cugcaccaugcugcugggg

SEQ ID NO: 1467002 - RNA, 20 nt, Human
cugcaccaugcugcugggga

SEQ ID NO: 1467003 - RNA, 23 nt, Human
cugcaccaugcugcuggggaaga

SEQ ID NO: 1467004 - RNA, 21 nt, Human
cugcaccaugcugcuggggaa

SEQ ID NO: 1467005 - RNA, 22 nt, Human
cugaaggugaaacauuuucucc

SEQ ID NO: 1467006 - RNA, 23 nt, Human
cugaaccuauuucuuaaacacuu

SEQ ID NO: 1467007 - RNA, 14 nt, Human
cugaauuuaaauag

SEQ ID NO: 1467008 - RNA, 18 nt, Human
cugaauuuaaauagcuuu

SEQ ID NO: 1467009 - RNA, 23 nt, Human
cugaauuuaaauagcuuuuuucu

SEQ ID NO: 1467010 - RNA, 19 nt, Human
cugaauccaaacuaaucca

SEQ ID NO: 1467011 - RNA, 20 nt, Human
cugaauccaaacuaauccau

SEQ ID NO: 1467012 - RNA, 15 nt, Human
cugacauucugauuc

SEQ ID NO: 1467013 - RNA, 13 nt, Human
cucuucagucucu

SEQ ID NO: 1467014 - RNA, 19 nt, Human
cucuuccagucuuccugac

SEQ ID NO: 1467015 - RNA, 22 nt, Human
cucuuccagucuuccugacacu

SEQ ID NO: 1467016 - RNA, 23 nt, Human
cucuuccagucuuccugacacuu

SEQ ID NO: 1467017 - RNA, 13 nt, Human
cucuuaagaagac

SEQ ID NO: 1467018 - RNA, 19 nt, Human
cucuggagcccacuguacu

SEQ ID NO: 1467019 - RNA, 15 nt, Human
cucuggagcccacug

SEQ ID NO: 1467020 - RNA, 21 nt, Human
cucuuggggaguuuagggugg

SEQ ID NO: 1467021 - RNA, 15 nt, Human
cucucauacccuccc

SEQ ID NO: 1467022 - RNA, 16 nt, Human
cucucaucaacugaau

SEQ ID NO: 1467023 - RNA, 22 nt, Human
cucucaguugcagcccugcugc

SEQ ID NO: 1467024 - RNA, 19 nt, Human
cucucaguugcagcccugc

SEQ ID NO: 1467025 - RNA, 15 nt, Human
cucucaguugcagcc

SEQ ID NO: 1467026 - RNA, 17 nt, Human
cucucaucaacugaaug

SEQ ID NO: 1467027 - RNA, 18 nt, Human
cucucaucaacugaauga

SEQ ID NO: 1467028 - RNA, 13 nt, Human
cucucaugaaccu

SEQ ID NO: 1467029 - RNA, 14 nt, Human
cucucaugaaccuc

SEQ ID NO: 1467030 - RNA, 17 nt, Human
cucuccacagcugccuc

SEQ ID NO: 1467031 - RNA, 19 nt, Human
cucuccacucaugugacuc

SEQ ID NO: 1467032 - RNA, 15 nt, Human
cucuaauacauucca

SEQ ID NO: 1467033 - RNA, 19 nt, Human
cucuaauauggcaaccauu

SEQ ID NO: 1467034 - RNA, 13 nt, Human
cucucccaaaaaa

SEQ ID NO: 1467035 - RNA, 23 nt, Human
cucuccaggcaggucugaagcuc

SEQ ID NO: 1467036 - RNA, 22 nt, Human
cucucugcaggucccuaauaaa

SEQ ID NO: 1467037 - RNA, 19 nt, Human
cucucugcaggucccuaau

SEQ ID NO: 1467038 - RNA, 17 nt, Human
cucucugcaggucccua

SEQ ID NO: 1467039 - RNA, 16 nt, Human
cucucugcaggucccu

SEQ ID NO: 1467040 - RNA, 14 nt, Human
cucucugcaggucc

SEQ ID NO: 1467041 - RNA, 13 nt, Human
cucucugcagguc

SEQ ID NO: 1467042 - RNA, 12 nt, Human
cucucugcaggu

SEQ ID NO: 1467043 - RNA, 19 nt, Human
cucucggguugugugucug

SEQ ID NO: 1467044 - RNA, 19 nt, Human
cucucuacaaacucccacu

SEQ ID NO: 1467045 - RNA, 12 nt, Human
cucuggagccca

SEQ ID NO: 1467046 - RNA, 14 nt, Human
cucuggaauuugaa

SEQ ID NO: 1467047 - RNA, 14 nt, Human
cucugcagucucua

SEQ ID NO: 1467048 - RNA, 23 nt, Human
cucugcaggucccuaauaaagcu

SEQ ID NO: 1467049 - RNA, 22 nt, Human
cucugcagucucuauaccaaua

SEQ ID NO: 1467050 - RNA, 16 nt, Human
cucugcaaacugccuu

SEQ ID NO: 1467051 - RNA, 20 nt, Human
cucugcaaacugccuucuuc

SEQ ID NO: 1467052 - RNA, 21 nt, Human
cucugaggggcuaccaggaaa

SEQ ID NO: 1467053 - RNA, 20 nt, Human
cucugaggggcuaccaggaa

SEQ ID NO: 1467054 - RNA, 22 nt, Human
cucugauuuucaaagcuuuuuc

SEQ ID NO: 1467055 - RNA, 20 nt, Human
cucugauuuucaaagcuuuu

SEQ ID NO: 1467056 - RNA, 15 nt, Human
cucugcaaacugccu

SEQ ID NO: 1467057 - RNA, 15 nt, Human
cucugauuuucaaag

SEQ ID NO: 1467058 - RNA, 18 nt, Human
cucugauuuucaaagcuu

SEQ ID NO: 1467059 - RNA, 19 nt, Human
cucugauuuucaaagcuuu

SEQ ID NO: 1467060 - RNA, 16 nt, Human
cucugagaagcucuga

SEQ ID NO: 1467061 - RNA, 14 nt, Human
cucauauuuucaug

SEQ ID NO: 1467062 - RNA, 13 nt, Human
cucaucaacugaa

SEQ ID NO: 1467063 - RNA, 19 nt, Human
cucauauugugauucugcc

SEQ ID NO: 1467064 - RNA, 21 nt, Human
cucauauugugauucugccuu

SEQ ID NO: 1467065 - RNA, 13 nt, Human
cucauauugugau

SEQ ID NO: 1467066 - RNA, 13 nt, Human
cucauccugcagg

SEQ ID NO: 1467067 - RNA, 21 nt, Human
cucaucuagguaaauuacagu

SEQ ID NO: 1467068 - RNA, 14 nt, Human
cucauccugcaggc

SEQ ID NO: 1467069 - RNA, 17 nt, Human
cucaucuccccaucauu

SEQ ID NO: 1467070 - RNA, 11 nt, Human
cucaucucagu

SEQ ID NO: 1467071 - RNA, 18 nt, Human
cucaucucagugaagaau

SEQ ID NO: 1467072 - RNA, 14 nt, Human
cucauuagacugga

SEQ ID NO: 1467073 - RNA, 17 nt, Human
cguuuuuuaaauguaua

SEQ ID NO: 1467074 - RNA, 17 nt, Human
cucaggggccugcccag

SEQ ID NO: 1467075 - RNA, 15 nt, Human
cucagguacuuguaa

SEQ ID NO: 1467076 - RNA, 14 nt, Human
cucauaacuugaga

SEQ ID NO: 1467077 - RNA, 17 nt, Human
cucauaacuugagaccu

SEQ ID NO: 1467078 - RNA, 20 nt, Human
cucauaacuugagaccuaau

SEQ ID NO: 1467079 - RNA, 20 nt, Human
cucaguucauccauucuauu

SEQ ID NO: 1467080 - RNA, 18 nt, Human
cucaguucauccauucua

SEQ ID NO: 1467081 - RNA, 15 nt, Human
cuccacagcugccuc

SEQ ID NO: 1467082 - RNA, 14 nt, Human
cuccacucuuucuu

SEQ ID NO: 1467083 - RNA, 14 nt, Human
cuccagccucagcu

SEQ ID NO: 1467084 - RNA, 17 nt, Human
cuccagccucagccucc

SEQ ID NO: 1467085 - RNA, 15 nt, Human
cuccagccucagccu

SEQ ID NO: 1467086 - RNA, 12 nt, Human
cuccagccucag

SEQ ID NO: 1467087 - RNA, 20 nt, Human
cuccagccaucaagagacug

SEQ ID NO: 1467088 - RNA, 21 nt, Human
cuccagccaucaagagacuga

SEQ ID NO: 1467089 - RNA, 13 nt, Human
cuccuuagaaaaa

SEQ ID NO: 1467090 - RNA, 22 nt, Human
cuccuuaaggcucuuuuguaag

SEQ ID NO: 1467091 - RNA, 13 nt, Human
cuccuuaaggcuc

SEQ ID NO: 1467092 - RNA, 24 nt, Human
cuccuguugggagagggcgcaggc

SEQ ID NO: 1467093 - RNA, 22 nt, Human
cuccuguugggagagggcgcag

SEQ ID NO: 1467094 - RNA, 13 nt, Human
cuccuguugggag

SEQ ID NO: 1467095 - RNA, 14 nt, Human
cuccuguugggaga

SEQ ID NO: 1467096 - RNA, 16 nt, Human
cuccuguugggagagg

SEQ ID NO: 1467097 - RNA, 19 nt, Human
cuccugaggauguguccca

SEQ ID NO: 1467098 - RNA, 14 nt, Human
cuccuuagaaaaaa

SEQ ID NO: 1467099 - RNA, 22 nt, Human
cuccuugagggcaagagccaca

SEQ ID NO: 1467100 - RNA, 21 nt, Human
cuccuugauuuuagccuucuc

SEQ ID NO: 1467101 - RNA, 13 nt, Human
cucuaaauucuuu

SEQ ID NO: 1467102 - RNA, 17 nt, Human
cucuaaauucuuucauu

SEQ ID NO: 1467103 - RNA, 14 nt, Human
cucggaucucuccu

SEQ ID NO: 1467104 - RNA, 14 nt, Human
cuccucuccaccau

SEQ ID NO: 1467105 - RNA, 13 nt, Human
cuccucuccacca

SEQ ID NO: 1467106 - RNA, 15 nt, Human
cuccucuccaccauc

SEQ ID NO: 1467107 - RNA, 14 nt, Human
cuccugaccucagg

SEQ ID NO: 1467108 - RNA, 16 nt, Human
cuccugaccucaggca

SEQ ID NO: 1467109 - RNA, 15 nt, Human
cuccugaccucaggc

SEQ ID NO: 1467110 - RNA, 22 nt, Human
cuccugaaaagguuuaugaaaa

SEQ ID NO: 1467111 - RNA, 21 nt, Human
cucccuucucuacacucuugu

SEQ ID NO: 1467112 - RNA, 22 nt, Human
cuccuaguacuaacuccuagga

SEQ ID NO: 1467113 - RNA, 16 nt, Human
cgucaacucauauuuu

SEQ ID NO: 1467114 - RNA, 22 nt, Human
cgucaaaacagauuguuugcaa

SEQ ID NO: 1467115 - RNA, 20 nt, Human
cgucaacucauauuuucaug

SEQ ID NO: 1467116 - RNA, 21 nt, Human
cgucaaaacagauuguuugca

SEQ ID NO: 1467117 - RNA, 12 nt, Human
cgucaccucaga

SEQ ID NO: 1467118 - RNA, 21 nt, Human
cgucaccccuguuucuggcac

SEQ ID NO: 1467119 - RNA, 15 nt, Human
cguauuuaauagcaa

SEQ ID NO: 1467120 - RNA, 21 nt, Human
cguauuuaauagcaaagaauu

SEQ ID NO: 1467121 - RNA, 23 nt, Human
cguauuuaauagcaaagaauuga

SEQ ID NO: 1467122 - RNA, 19 nt, Human
cgucagcugggacaccccg

SEQ ID NO: 1467123 - RNA, 14 nt, Human
cgucagugcugugc

SEQ ID NO: 1467124 - RNA, 19 nt, Human
cguccaggagccugugccu

SEQ ID NO: 1467125 - RNA, 22 nt, Human
cguauaaaagccuguuuaagag

SEQ ID NO: 1467126 - RNA, 21 nt, Human
cguauaaaagccuguuuaaga

SEQ ID NO: 1467127 - RNA, 17 nt, Human
cguauaaaagccuguuu

SEQ ID NO: 1467128 - RNA, 16 nt, Human
cguauaaaagccuguu

SEQ ID NO: 1467129 - RNA, 23 nt, Human
cguagauauuggacaaagaaccu

SEQ ID NO: 1467130 - RNA, 22 nt, Human
cguagauauuggacaaagaacc

SEQ ID NO: 1467131 - RNA, 12 nt, Human
cgucuggguggc

SEQ ID NO: 1467132 - RNA, 17 nt, Human
cgucuguuuauaaacau

SEQ ID NO: 1467133 - RNA, 15 nt, Human
cguuuauuuucaaga

SEQ ID NO: 1467134 - RNA, 14 nt, Human
cguuuauuuucaag

SEQ ID NO: 1467135 - RNA, 13 nt, Human
cgaucucagcuca

SEQ ID NO: 1467136 - RNA, 20 nt, Human
cgaucuugguucacugcaac

SEQ ID NO: 1467137 - RNA, 16 nt, Human
cgauucucuugccuca

SEQ ID NO: 1467138 - RNA, 12 nt, Human
cgcagaaggaag

SEQ ID NO: 1467139 - RNA, 14 nt, Human
cgcaagggccugau

SEQ ID NO: 1467140 - RNA, 14 nt, Human
ccuuguuuuuuucu

SEQ ID NO: 1467141 - RNA, 17 nt, Human
ccuuggccaugcagaaa

SEQ ID NO: 1467142 - RNA, 15 nt, Human
ccuuggccaugcaga

SEQ ID NO: 1467143 - RNA, 20 nt, Human
ccuuggcugacaugaagcug

SEQ ID NO: 1467144 - RNA, 14 nt, Human
ccuuugacaaaggu

SEQ ID NO: 1467145 - RNA, 20 nt, Human
ccuuugaauccucucucugu

SEQ ID NO: 1467146 - RNA, 14 nt, Human
ccuuugaauccucu

SEQ ID NO: 1467147 - RNA, 16 nt, Human
ccuuugaauccucucu

SEQ ID NO: 1467148 - RNA, 20 nt, Human
ccuuuggcaggugcagcccc

SEQ ID NO: 1467149 - RNA, 19 nt, Human
ccuuuggcaggugcagccc

SEQ ID NO: 1467150 - RNA, 18 nt, Human
ccuuuggcaggugcagcc

SEQ ID NO: 1467151 - RNA, 16 nt, Human
ccuuugcccagaaaga

SEQ ID NO: 1467152 - RNA, 18 nt, Human
ccuuugcugacccucccc

SEQ ID NO: 1467153 - RNA, 21 nt, Human
ccuuugcugacccuccccaaa

SEQ ID NO: 1467154 - RNA, 17 nt, Human
ccuuugcugacccuccc

SEQ ID NO: 1467155 - RNA, 14 nt, Human
ccuuugcugacccu

SEQ ID NO: 1467156 - RNA, 18 nt, Human
cgcuagaggaagcagcca

SEQ ID NO: 1467157 - RNA, 15 nt, Human
cgcgaucucagcuca

SEQ ID NO: 1467158 - RNA, 14 nt, Human
cgcgaucucagcuc

SEQ ID NO: 1467159 - RNA, 13 nt, Human
cgcagaaggaagg

SEQ ID NO: 1467160 - RNA, 14 nt, Human
cgcccaggacccca

SEQ ID NO: 1467161 - RNA, 22 nt, Human
cggaagaagagaucaggaagag

SEQ ID NO: 1467162 - RNA, 21 nt, Human
cggaagaagagaucaggaaga

SEQ ID NO: 1467163 - RNA, 21 nt, Human
cggaauccugucgauuagacu

SEQ ID NO: 1467164 - RNA, 22 nt, Human
cggaauccugucgauuagacug

SEQ ID NO: 1467165 - RNA, 21 nt, Human
cgcuaucucccugccuccugc

SEQ ID NO: 1467166 - RNA, 18 nt, Human
cgcuaucugggaagcuau

SEQ ID NO: 1467167 - RNA, 14 nt, Human
cgcucucuccaggc

SEQ ID NO: 1467168 - RNA, 16 nt, Human
cggaaagaagaaggug

SEQ ID NO: 1467169 - RNA, 15 nt, Human
cggaccccagccauc

SEQ ID NO: 1467170 - RNA, 16 nt, Human
cggacgcccaggaccc

SEQ ID NO: 1467171 - RNA, 16 nt, Human
cggauuuauuuuucca

SEQ ID NO: 1467172 - RNA, 13 nt, Human
cggccugccagga

SEQ ID NO: 1467173 - RNA, 14 nt, Human
cggccugccaggag

SEQ ID NO: 1467174 - RNA, 15 nt, Human
cggccugccaggagg

SEQ ID NO: 1467175 - RNA, 22 nt, Human
cggccugccaggaggacccagg

SEQ ID NO: 1467176 - RNA, 16 nt, Human
cgggagcucaggaacc

SEQ ID NO: 1467177 - RNA, 22 nt, Human
cggcugggaggagggcaggcau

SEQ ID NO: 1467178 - RNA, 18 nt, Human
cggcugggaggagggcag

SEQ ID NO: 1467179 - RNA, 23 nt, Human
cggcugggaggagggcaggcauc

SEQ ID NO: 1467180 - RNA, 15 nt, Human
cggccuuucuagccu

SEQ ID NO: 1467181 - RNA, 20 nt, Human
ccuggaaaccuuccacccag

SEQ ID NO: 1467182 - RNA, 18 nt, Human
ccuggaaaccuuccaccc

SEQ ID NO: 1467183 - RNA, 17 nt, Human
ccuggaaaccuuccacc

SEQ ID NO: 1467184 - RNA, 14 nt, Human
ccuggaccagccuc

SEQ ID NO: 1467185 - RNA, 15 nt, Human
ccuggaccagccucu

SEQ ID NO: 1467186 - RNA, 16 nt, Human
ccuggaccagccucuc

SEQ ID NO: 1467187 - RNA, 20 nt, Human
ccuggacugugugcucagga

SEQ ID NO: 1467188 - RNA, 17 nt, Human
ccuggacugugugcuca

SEQ ID NO: 1467189 - RNA, 13 nt, Human
ccuggacuugccu

SEQ ID NO: 1467190 - RNA, 16 nt, Human
ccuggacuugccucug

SEQ ID NO: 1467191 - RNA, 12 nt, Human
ccuggcggggug

SEQ ID NO: 1467192 - RNA, 13 nt, Human
ccuggcccccucc

SEQ ID NO: 1467193 - RNA, 17 nt, Human
ccuggcucaccuugugc

SEQ ID NO: 1467194 - RNA, 16 nt, Human
ccuggcuauguccuaa

SEQ ID NO: 1467195 - RNA, 20 nt, Human
ccuggcccccucccuggaug

SEQ ID NO: 1467196 - RNA, 13 nt, Human
ccugggauuacag

SEQ ID NO: 1467197 - RNA, 21 nt, Human
ccugggaggcucuggagccca

SEQ ID NO: 1467198 - RNA, 13 nt, Human
ccugggaggcucu

SEQ ID NO: 1467199 - RNA, 21 nt, Human
ccugcuugaugggauucugga

SEQ ID NO: 1467200 - RNA, 22 nt, Human
ccugcuugaugggauucuggac

SEQ ID NO: 1467201 - RNA, 14 nt, Human
ccuggaaaccuucc

SEQ ID NO: 1467202 - RNA, 20 nt, Human
ccugcuuuuuauggccugug

SEQ ID NO: 1467203 - RNA, 16 nt, Human
ccugauuuuuuuuccu

SEQ ID NO: 1467204 - RNA, 22 nt, Human
ccugugagcuaggaauuguguu

SEQ ID NO: 1467205 - RNA, 16 nt, Human
ccuguccaaucuuuga

SEQ ID NO: 1467206 - RNA, 20 nt, Human
ccugugccuccucaccccca

SEQ ID NO: 1467207 - RNA, 21 nt, Human
ccugugccuccucacccccag

SEQ ID NO: 1467208 - RNA, 15 nt, Human
ccugugccuccucac

SEQ ID NO: 1467209 - RNA, 17 nt, Human
ccuguaugucuccagua

SEQ ID NO: 1467210 - RNA, 15 nt, Human
ccuguauucagacag

SEQ ID NO: 1467211 - RNA, 16 nt, Human
ccuguauucagacaga

SEQ ID NO: 1467212 - RNA, 14 nt, Human
ccuugaugaagaag

SEQ ID NO: 1467213 - RNA, 16 nt, Human
ccuugacaacuggcag

SEQ ID NO: 1467214 - RNA, 21 nt, Human
ccuugacaacuggcaggcagg

SEQ ID NO: 1467215 - RNA, 15 nt, Human
ccuugacaacuggca

SEQ ID NO: 1467216 - RNA, 13 nt, Human
ccuuccacccagu

SEQ ID NO: 1467217 - RNA, 14 nt, Human
ccuucaucuggaac

SEQ ID NO: 1467218 - RNA, 20 nt, Human
ccuucaucuggauuccagag

SEQ ID NO: 1467219 - RNA, 13 nt, Human
ccuucaucuggaa

SEQ ID NO: 1467220 - RNA, 18 nt, Human
ccuucaguuaugauuuuu

SEQ ID NO: 1467221 - RNA, 14 nt, Human
ccuuccagaaaaca

SEQ ID NO: 1467222 - RNA, 24 nt, Human
ccuguggaacauaaaaaggacauc

SEQ ID NO: 1467223 - RNA, 23 nt, Human
ccuguggaacauaaaaaggacau

SEQ ID NO: 1467224 - RNA, 19 nt, Human
ccuguggaacauaaaaagg

SEQ ID NO: 1467225 - RNA, 21 nt, Human
ccuuacccugccccagcuggg

SEQ ID NO: 1467226 - RNA, 16 nt, Human
ccuuagaccaccaagc

SEQ ID NO: 1467227 - RNA, 15 nt, Human
ccuuagaccaccaag

SEQ ID NO: 1467228 - RNA, 14 nt, Human
ccuuauuuucaaga

SEQ ID NO: 1467229 - RNA, 18 nt, Human
ccuuauuuucaagaaacu

SEQ ID NO: 1467230 - RNA, 19 nt, Human
ccuuauugcuguccuggag

SEQ ID NO: 1467231 - RNA, 18 nt, Human
ccuuagaccaccaagccu

SEQ ID NO: 1467232 - RNA, 21 nt, Human
ccuuagaccaccaagccuuga

SEQ ID NO: 1467233 - RNA, 14 nt, Human
ccuuagaucuggca

SEQ ID NO: 1467234 - RNA, 22 nt, Human
ccuucaacaauucuaaaaugau

SEQ ID NO: 1467235 - RNA, 23 nt, Human
ccucugcagucucuauaccaaua

SEQ ID NO: 1467236 - RNA, 17 nt, Human
ccucugcagucucuaua

SEQ ID NO: 1467237 - RNA, 16 nt, Human
ccucugcagucucuau

SEQ ID NO: 1467238 - RNA, 19 nt, Human
ccucugcacacccuccaga

SEQ ID NO: 1467239 - RNA, 20 nt, Human
ccucugcacacccuccagag

SEQ ID NO: 1467240 - RNA, 15 nt, Human
ccucugggggguggc

SEQ ID NO: 1467241 - RNA, 19 nt, Human
ccucugggggguggccagg

SEQ ID NO: 1467242 - RNA, 20 nt, Human
ccucugggggguggccaggc

SEQ ID NO: 1467243 - RNA, 19 nt, Human
ccucugguaaccucuuacu

SEQ ID NO: 1467244 - RNA, 23 nt, Human
ccuccuguugggagagggcgcag

SEQ ID NO: 1467245 - RNA, 23 nt, Human
ccucuccacucaugugacucuuu

SEQ ID NO: 1467246 - RNA, 17 nt, Human
ccuccugggaaugaagc

SEQ ID NO: 1467247 - RNA, 19 nt, Human
ccuccugccggcuccuugg

SEQ ID NO: 1467248 - RNA, 14 nt, Human
ccuccucugcccgg

SEQ ID NO: 1467249 - RNA, 15 nt, Human
ccuccucugcccggg

SEQ ID NO: 1467250 - RNA, 21 nt, Human
ccucccucaaccucauccucu

SEQ ID NO: 1467251 - RNA, 17 nt, Human
ccucccucaaccucauc

SEQ ID NO: 1467252 - RNA, 22 nt, Human
ccucccuacccuaaccaaguuc

SEQ ID NO: 1467253 - RNA, 20 nt, Human
ccucagaaaacaaggaugaa

SEQ ID NO: 1467254 - RNA, 18 nt, Human
ccucacuuuuaaugaaca

SEQ ID NO: 1467255 - RNA, 22 nt, Human
ccucacuuuuaaugaacaaaug

SEQ ID NO: 1467256 - RNA, 15 nt, Human
ccucagacucuaaga

SEQ ID NO: 1467257 - RNA, 19 nt, Human
ccucagacucuaagaaaga

SEQ ID NO: 1467258 - RNA, 20 nt, Human
ccucagacucuaagaaagaa

SEQ ID NO: 1467259 - RNA, 21 nt, Human
ccucagacucuaagaaagaac

SEQ ID NO: 1467260 - RNA, 20 nt, Human
ccugaacaggauauucucac

SEQ ID NO: 1467261 - RNA, 21 nt, Human
ccugaacaagaauuggaagcu

SEQ ID NO: 1467262 - RNA, 17 nt, Human
ccugaacugaacaccau

SEQ ID NO: 1467263 - RNA, 23 nt, Human
ccugaagcuaucguaaaauuaag

SEQ ID NO: 1467264 - RNA, 22 nt, Human
ccugaagcuaucguaaaauuaa

SEQ ID NO: 1467265 - RNA, 17 nt, Human
ccugaauccaaacuaau

SEQ ID NO: 1467266 - RNA, 20 nt, Human
ccugaauccaaacuaaucca

SEQ ID NO: 1467267 - RNA, 21 nt, Human
ccugaauccaaacuaauccau

SEQ ID NO: 1467268 - RNA, 18 nt, Human
ccucuuccgugacgucac

SEQ ID NO: 1467269 - RNA, 14 nt, Human
ccugaaauuucaga

SEQ ID NO: 1467270 - RNA, 15 nt, Human
ccugaaauuucagau

SEQ ID NO: 1467271 - RNA, 13 nt, Human
ccugaacaagaau

SEQ ID NO: 1467272 - RNA, 15 nt, Human
ccugaacaagaauug

SEQ ID NO: 1467273 - RNA, 16 nt, Human
ccugaacaagaauugg

SEQ ID NO: 1467274 - RNA, 17 nt, Human
ccugaacaagaauugga

SEQ ID NO: 1467275 - RNA, 23 nt, Human
ccucuuuuuccaacuuggcugca

SEQ ID NO: 1467276 - RNA, 23 nt, Human
ccucuuagaugcaguucugaaga

SEQ ID NO: 1467277 - RNA, 17 nt, Human
ccucuuaaauaaaccuu

SEQ ID NO: 1467278 - RNA, 18 nt, Human
ccucuuaaauaaaccuuu

SEQ ID NO: 1467279 - RNA, 15 nt, Human
ccucugucuucugga

SEQ ID NO: 1467280 - RNA, 16 nt, Human
ccucugucuucuggac

SEQ ID NO: 1467281 - RNA, 23 nt, Human
ccucuguauuugaaucagccuac

SEQ ID NO: 1467282 - RNA, 21 nt, Human
ccugaugggguggaaggcaug

SEQ ID NO: 1467283 - RNA, 15 nt, Human
ccugaugaaaauaaa

SEQ ID NO: 1467284 - RNA, 17 nt, Human
ccugaugaaaauaaaga

SEQ ID NO: 1467285 - RNA, 18 nt, Human
ccugaugaaaauaaagaa

SEQ ID NO: 1467286 - RNA, 19 nt, Human
ccugaugaaaauaaagaau

SEQ ID NO: 1467287 - RNA, 21 nt, Human
ccugaugaaaauaaagaaugg

SEQ ID NO: 1467288 - RNA, 13 nt, Human
ccugaugaaaaua

SEQ ID NO: 1467289 - RNA, 14 nt, Human
ccugaugaaaauaa

SEQ ID NO: 1467290 - RNA, 13 nt, Human
ccugaggccuaga

SEQ ID NO: 1467291 - RNA, 21 nt, Human
ccugaauuuuguugcuguuuu

SEQ ID NO: 1467292 - RNA, 16 nt, Human
cccuuuccugaguccc

SEQ ID NO: 1467293 - RNA, 17 nt, Human
cccuuugcccagaaaga

SEQ ID NO: 1467294 - RNA, 15 nt, Human
cccuuugcugacccu

SEQ ID NO: 1467295 - RNA, 16 nt, Human
cccuugaugaagaagu

SEQ ID NO: 1467296 - RNA, 13 nt, Human
cccuuuugucucu

SEQ ID NO: 1467297 - RNA, 22 nt, Human
ccgacuuuuguuuaccagagaa

SEQ ID NO: 1467298 - RNA, 13 nt, Human
ccgagaagaacag

SEQ ID NO: 1467299 - RNA, 20 nt, Human
ccccuaaaagaaacccugca

SEQ ID NO: 1467300 - RNA, 23 nt, Human
ccccuaaugacaucaccacaguu

SEQ ID NO: 1467301 - RNA, 13 nt, Human
ccccuccccucca

SEQ ID NO: 1467302 - RNA, 18 nt, Human
cccccaguaucucuucag

SEQ ID NO: 1467303 - RNA, 23 nt, Human
cccccagcuuugcuaccaaagca

SEQ ID NO: 1467304 - RNA, 20 nt, Human
cccccaaccauuuccucaga

SEQ ID NO: 1467305 - RNA, 19 nt, Human
cccccaagcuguuuucuuc

SEQ ID NO: 1467306 - RNA, 22 nt, Human
ccccagcugucaucaauuaaag

SEQ ID NO: 1467307 - RNA, 23 nt, Human
ccccagcugucaucaauuaaagg

SEQ ID NO: 1467308 - RNA, 17 nt, Human
ccucacccccagcuuug

SEQ ID NO: 1467309 - RNA, 19 nt, Human
ccucacccccagcuuugcu

SEQ ID NO: 1467310 - RNA, 23 nt, Human
ccucacacacaaugugucugaga

SEQ ID NO: 1467311 - RNA, 16 nt, Human
ccucaauuucugaaca

SEQ ID NO: 1467312 - RNA, 18 nt, Human
ccuaugucauuucauuuc

SEQ ID NO: 1467313 - RNA, 20 nt, Human
ccuaucagaguugcugcaaa

SEQ ID NO: 1467314 - RNA, 12 nt, Human
ccuagaggccug

SEQ ID NO: 1467315 - RNA, 18 nt, Human
ccuacccuaaccaaguuc

SEQ ID NO: 1467316 - RNA, 16 nt, Human
ccuacccuaaccaagu

SEQ ID NO: 1467317 - RNA, 15 nt, Human
ccuacccuaaccaag

SEQ ID NO: 1467318 - RNA, 13 nt, Human
ccuaccuccaaag

SEQ ID NO: 1467319 - RNA, 14 nt, Human
ccuaccugugccug

SEQ ID NO: 1467320 - RNA, 15 nt, Human
ccuaccugugccuga

SEQ ID NO: 1467321 - RNA, 16 nt, Human
ccuaccugugccugac

SEQ ID NO: 1467322 - RNA, 16 nt, Human
ccuaaagaaaaacaaa

SEQ ID NO: 1467323 - RNA, 15 nt, Human
cccaauugagaaaaa

SEQ ID NO: 1467324 - RNA, 13 nt, Human
cccaacaccucuu

SEQ ID NO: 1467325 - RNA, 12 nt, Human
cccacacucaga

SEQ ID NO: 1467326 - RNA, 16 nt, Human
cccagcggcaucaggc

SEQ ID NO: 1467327 - RNA, 16 nt, Human
cccaguaucucuucag

SEQ ID NO: 1467328 - RNA, 15 nt, Human
cccaguaucucuuca

SEQ ID NO: 1467329 - RNA, 15 nt, Human
cccagugacagcuag

SEQ ID NO: 1467330 - RNA, 14 nt, Human
cccagugacagcua

SEQ ID NO: 1467331 - RNA, 19 nt, Human
cccagguuggagugcagug

SEQ ID NO: 1467332 - RNA, 18 nt, Human
cccagguuggagugcagu

SEQ ID NO: 1467333 - RNA, 13 nt, Human
cccagguccucac

SEQ ID NO: 1467334 - RNA, 17 nt, Human
cccaggauacuggcaca

SEQ ID NO: 1467335 - RNA, 19 nt, Human
cccaggauacuggcacaga

SEQ ID NO: 1467336 - RNA, 13 nt, Human
cccaggcacugca

SEQ ID NO: 1467337 - RNA, 14 nt, Human
ccccaagcuguuuu

SEQ ID NO: 1467338 - RNA, 16 nt, Human
ccccaagcuguuuucu

SEQ ID NO: 1467339 - RNA, 17 nt, Human
ccccaagcuguuuucuu

SEQ ID NO: 1467340 - RNA, 16 nt, Human
ccccaacaugcacuga

SEQ ID NO: 1467341 - RNA, 23 nt, Human
ccccaaccauuuccucagacucu

SEQ ID NO: 1467342 - RNA, 16 nt, Human
cccagugcacuugcug

SEQ ID NO: 1467343 - RNA, 22 nt, Human
cccauggcagugggaaaaaugu

SEQ ID NO: 1467344 - RNA, 23 nt, Human
ccaucagaaacacccucacacug

SEQ ID NO: 1467345 - RNA, 13 nt, Human
ccaucagccucca

SEQ ID NO: 1467346 - RNA, 22 nt, Human
ccaucagaaacacccucacacu

SEQ ID NO: 1467347 - RNA, 18 nt, Human
ccaucaaggguacacugc

SEQ ID NO: 1467348 - RNA, 14 nt, Human
ccaugcagaaagca

SEQ ID NO: 1467349 - RNA, 15 nt, Human
ccaugcagaaagcau

SEQ ID NO: 1467350 - RNA, 11 nt, Human
ccaugcagaaa

SEQ ID NO: 1467351 - RNA, 21 nt, Human
ccaugcccggcuaauuuuugu

SEQ ID NO: 1467352 - RNA, 20 nt, Human
ccaugcguguuucugacucu

SEQ ID NO: 1467353 - RNA, 22 nt, Human
ccaugcugcuggggaagacagu

SEQ ID NO: 1467354 - RNA, 23 nt, Human
ccaugcugcuggggaagacagug

SEQ ID NO: 1467355 - RNA, 16 nt, Human
ccaugauguuuagaaa

SEQ ID NO: 1467356 - RNA, 21 nt, Human
ccaugcacccucauacacaga

SEQ ID NO: 1467357 - RNA, 22 nt, Human
ccaugaagagauuuuucaugau

SEQ ID NO: 1467358 - RNA, 18 nt, Human
ccaugaagagauuuuuca

SEQ ID NO: 1467359 - RNA, 15 nt, Human
ccauucuggaaguga

SEQ ID NO: 1467360 - RNA, 12 nt, Human
ccauucuggaag

SEQ ID NO: 1467361 - RNA, 21 nt, Human
ccaugcugcuggggaagacag

SEQ ID NO: 1467362 - RNA, 13 nt, Human
ccaggacaggauc

SEQ ID NO: 1467363 - RNA, 19 nt, Human
ccaggacaggauccaggcc

SEQ ID NO: 1467364 - RNA, 17 nt, Human
ccaggacaggauccagg

SEQ ID NO: 1467365 - RNA, 15 nt, Human
ccaggacaggaucca

SEQ ID NO: 1467366 - RNA, 23 nt, Human
ccagcuggggccaggcugggucg

SEQ ID NO: 1467367 - RNA, 22 nt, Human
ccagcuggggccaggcuggguc

SEQ ID NO: 1467368 - RNA, 21 nt, Human
ccagcuggggccaggcugggu

SEQ ID NO: 1467369 - RNA, 20 nt, Human
ccagcuggggccaggcuggg

SEQ ID NO: 1467370 - RNA, 19 nt, Human
ccagcuggggccaggcugg

SEQ ID NO: 1467371 - RNA, 18 nt, Human
ccagcuggggccaggcug

SEQ ID NO: 1467372 - RNA, 17 nt, Human
ccagcuggggccaggcu

SEQ ID NO: 1467373 - RNA, 15 nt, Human
ccaggaagcuuuggu

SEQ ID NO: 1467374 - RNA, 22 nt, Human
ccagcugcccccagagccacag

SEQ ID NO: 1467375 - RNA, 21 nt, Human
ccagcugcccccagagccaca

SEQ ID NO: 1467376 - RNA, 19 nt, Human
ccagcugcccccagagcca

SEQ ID NO: 1467377 - RNA, 17 nt, Human
ccagcugcccccagagc

SEQ ID NO: 1467378 - RNA, 23 nt, Human
ccagcugcccccagagccacagu

SEQ ID NO: 1467379 - RNA, 16 nt, Human
ccaguaucucuucagu

SEQ ID NO: 1467380 - RNA, 15 nt, Human
ccaguaucucuucag

SEQ ID NO: 1467381 - RNA, 20 nt, Human
ccaguaggggcuuauaauaa

SEQ ID NO: 1467382 - RNA, 18 nt, Human
ccaguaccuagcuggcuc

SEQ ID NO: 1467383 - RNA, 20 nt, Human
ccaguaucucuucagucucu

SEQ ID NO: 1467384 - RNA, 18 nt, Human
ccaguaucucuucagucu

SEQ ID NO: 1467385 - RNA, 17 nt, Human
ccagucuuccugacacu

SEQ ID NO: 1467386 - RNA, 22 nt, Human
ccagucuuccugacacuuuaau

SEQ ID NO: 1467387 - RNA, 15 nt, Human
ccaguaacucaucug

SEQ ID NO: 1467388 - RNA, 16 nt, Human
ccaguaacucaucugu

SEQ ID NO: 1467389 - RNA, 23 nt, Human
ccaggugaacaaaguuuaccaga

SEQ ID NO: 1467390 - RNA, 19 nt, Human
ccaggcuuuuuuaucaugu

SEQ ID NO: 1467391 - RNA, 18 nt, Human
ccaggcuugccugcaggc

SEQ ID NO: 1467392 - RNA, 17 nt, Human
ccaggcuugccugcagg

SEQ ID NO: 1467393 - RNA, 14 nt, Human
ccaggaggacccag

SEQ ID NO: 1467394 - RNA, 15 nt, Human
ccaggaggacccagg

SEQ ID NO: 1467395 - RNA, 18 nt, Human
ccaggaggacccagggcu

SEQ ID NO: 1467396 - RNA, 19 nt, Human
ccaggaggacccagggcuc

SEQ ID NO: 1467397 - RNA, 21 nt, Human
ccaggaggacccagggcucug

SEQ ID NO: 1467398 - RNA, 20 nt, Human
ccaggaggacccagggcucu

SEQ ID NO: 1467399 - RNA, 20 nt, Human
ccacaggaaccacaagacug

SEQ ID NO: 1467400 - RNA, 22 nt, Human
ccacagcuuuuuaccaaguuuc

SEQ ID NO: 1467401 - RNA, 21 nt, Human
ccacacucagauccuccucau

SEQ ID NO: 1467402 - RNA, 11 nt, Human
ccacacucaga

SEQ ID NO: 1467403 - RNA, 18 nt, Human
ccacacucagauccuccu

SEQ ID NO: 1467404 - RNA, 19 nt, Human
ccacacucagauccuccuc

SEQ ID NO: 1467405 - RNA, 16 nt, Human
ccacaggcccacagua

SEQ ID NO: 1467406 - RNA, 22 nt, Human
ccaauagggcugagcucucugu

SEQ ID NO: 1467407 - RNA, 20 nt, Human
ccacagugccuaauaauacu

SEQ ID NO: 1467408 - RNA, 22 nt, Human
ccacaucccacucacaacagcu

SEQ ID NO: 1467409 - RNA, 16 nt, Human
ccaccauggccagcua

SEQ ID NO: 1467410 - RNA, 16 nt, Human
ccaccauuuggcaucc

SEQ ID NO: 1467411 - RNA, 17 nt, Human
ccaccauuuggcauccc

SEQ ID NO: 1467412 - RNA, 18 nt, Human
ccaccauuuggcaucccu

SEQ ID NO: 1467413 - RNA, 22 nt, Human
ccaccauuuggcaucccugggc

SEQ ID NO: 1467414 - RNA, 21 nt, Human
ccaccauuuggcaucccuggg

SEQ ID NO: 1467415 - RNA, 14 nt, Human
ccacgguguucugu

SEQ ID NO: 1467416 - RNA, 17 nt, Human
ccacggggacucagccc

SEQ ID NO: 1467417 - RNA, 16 nt, Human
ccaccugucugucugu

SEQ ID NO: 1467418 - RNA, 14 nt, Human
ccaccugucugucu

SEQ ID NO: 1467419 - RNA, 12 nt, Human
ccaccugucugu

SEQ ID NO: 1467420 - RNA, 11 nt, Human
ccaccugucug

SEQ ID NO: 1467421 - RNA, 22 nt, Human
ccaccugucugucugucugucc

SEQ ID NO: 1467422 - RNA, 18 nt, Human
ccaccccauccaguucau

SEQ ID NO: 1467423 - RNA, 21 nt, Human
ccacgucagcugggacacccc

SEQ ID NO: 1467424 - RNA, 13 nt, Human
ccacguacugcag

SEQ ID NO: 1467425 - RNA, 16 nt, Human
ccacguacugcagccu

SEQ ID NO: 1467426 - RNA, 17 nt, Human
ccacguacugcagccuc

SEQ ID NO: 1467427 - RNA, 14 nt, Human
ccacuucagccucc

SEQ ID NO: 1467428 - RNA, 21 nt, Human
ccagaaagcaguugagacaag

SEQ ID NO: 1467429 - RNA, 22 nt, Human
ccacuuauuccccauucuuccu

SEQ ID NO: 1467430 - RNA, 16 nt, Human
ccagaauuuaaaccua

SEQ ID NO: 1467431 - RNA, 12 nt, Human
ccagacacuggu

SEQ ID NO: 1467432 - RNA, 11 nt, Human
ccagacacugg

SEQ ID NO: 1467433 - RNA, 13 nt, Human
ccagacacugguu

SEQ ID NO: 1467434 - RNA, 20 nt, Human
ccaagcaccugggauuacaa

SEQ ID NO: 1467435 - RNA, 18 nt, Human
ccaagcacuucuuuuucu

SEQ ID NO: 1467436 - RNA, 14 nt, Human
ccaagcaaguauua

SEQ ID NO: 1467437 - RNA, 17 nt, Human
ccaagcauuuagaugua

SEQ ID NO: 1467438 - RNA, 22 nt, Human
ccaagcaguugggacuacaggc

SEQ ID NO: 1467439 - RNA, 20 nt, Human
ccaagcaguugggacuacag

SEQ ID NO: 1467440 - RNA, 21 nt, Human
ccaagcaguugggacuacagg

SEQ ID NO: 1467441 - RNA, 17 nt, Human
ccaagcuauucaauucu

SEQ ID NO: 1467442 - RNA, 22 nt, Human
ccaagccuuggggauucuucca

SEQ ID NO: 1467443 - RNA, 22 nt, Human
ccaagccuugauugguguugcc

SEQ ID NO: 1467444 - RNA, 20 nt, Human
ccaagccauggguagccugg

SEQ ID NO: 1467445 - RNA, 21 nt, Human
ccaagccauggguagccuggg

SEQ ID NO: 1467446 - RNA, 20 nt, Human
ccaaguagcugagacuacag

SEQ ID NO: 1467447 - RNA, 20 nt, Human
ccaaguaacugggauuacag

SEQ ID NO: 1467448 - RNA, 22 nt, Human
ccaaguagaaucucaguugauu

SEQ ID NO: 1467449 - RNA, 16 nt, Human
ccaaggucuucuuaau

SEQ ID NO: 1467450 - RNA, 18 nt, Human
ccaauagggcugagcucu

SEQ ID NO: 1467451 - RNA, 20 nt, Human
ccaaguugugcuugagccag

SEQ ID NO: 1467452 - RNA, 17 nt, Human
ccaaguugugcuugagc

SEQ ID NO: 1467453 - RNA, 22 nt, Human
ccaaguugugcuugagccagga

SEQ ID NO: 1467454 - RNA, 16 nt, Human
ccaaggcuuucucuac

SEQ ID NO: 1467455 - RNA, 19 nt, Human
ccaagggcauaaauuauug

SEQ ID NO: 1467456 - RNA, 16 nt, Human
ccaaggggcuucaggu

SEQ ID NO: 1467457 - RNA, 21 nt, Human
ccaacaagauugcuuaauaaa

SEQ ID NO: 1467458 - RNA, 21 nt, Human
ccaacaagaagggacugagag

SEQ ID NO: 1467459 - RNA, 13 nt, Human
ccaacacugccag

SEQ ID NO: 1467460 - RNA, 14 nt, Human
ccaacacugccagc

SEQ ID NO: 1467461 - RNA, 15 nt, Human
ccaacacugccagca

SEQ ID NO: 1467462 - RNA, 16 nt, Human
ccaacacugccagcau

SEQ ID NO: 1467463 - RNA, 13 nt, Human
ccaaccauuuccu

SEQ ID NO: 1467464 - RNA, 14 nt, Human
ccaaccauuuccuc

SEQ ID NO: 1467465 - RNA, 17 nt, Human
ccaaccauuuccucaga

SEQ ID NO: 1467466 - RNA, 22 nt, Human
ccaaacugacucuuaagaagac

SEQ ID NO: 1467467 - RNA, 14 nt, Human
ccaaaggaggaugg

SEQ ID NO: 1467468 - RNA, 17 nt, Human
ccaaagcuucccacggc

SEQ ID NO: 1467469 - RNA, 12 nt, Human
ccaacccuagca

SEQ ID NO: 1467470 - RNA, 11 nt, Human
ccaagaaucuu

SEQ ID NO: 1467471 - RNA, 18 nt, Human
ccaagauacuuaagugcu

SEQ ID NO: 1467472 - RNA, 17 nt, Human
ccaagacugcuguggcc

SEQ ID NO: 1467473 - RNA, 18 nt, Human
ccaagacugcuguggcca

SEQ ID NO: 1467474 - RNA, 21 nt, Human
ccaagacugcuguggccagga

SEQ ID NO: 1467475 - RNA, 23 nt, Human
ccaagacugcuguggccaggagg

SEQ ID NO: 1467476 - RNA, 22 nt, Human
ccaagacugcuguggccaggag

SEQ ID NO: 1467477 - RNA, 23 nt, Human
cauuguauucagaguugaugguu

SEQ ID NO: 1467478 - RNA, 14 nt, Human
cauugucucagagc

SEQ ID NO: 1467479 - RNA, 20 nt, Human
cauugucuuuuuagaugccc

SEQ ID NO: 1467480 - RNA, 14 nt, Human
cauugucuuuuuag

SEQ ID NO: 1467481 - RNA, 13 nt, Human
cauuguccucuuu

SEQ ID NO: 1467482 - RNA, 22 nt, Human
cauugugccaugucaaacaaau

SEQ ID NO: 1467483 - RNA, 14 nt, Human
cauuguagaaaagc

SEQ ID NO: 1467484 - RNA, 22 nt, Human
cauuguauaguuggaaucauau

SEQ ID NO: 1467485 - RNA, 14 nt, Human
cauuuccucagacu

SEQ ID NO: 1467486 - RNA, 22 nt, Human
cauuuccucagacucuaagaaa

SEQ ID NO: 1467487 - RNA, 20 nt, Human
cauuucuagcgcauggccug

SEQ ID NO: 1467488 - RNA, 19 nt, Human
cauuuuagggguagcauuu

SEQ ID NO: 1467489 - RNA, 11 nt, Human
cauuugcugaa

SEQ ID NO: 1467490 - RNA, 16 nt, Human
cauuuuucaugauaau

SEQ ID NO: 1467491 - RNA, 16 nt, Human
cauuuuuccguaaaaa

SEQ ID NO: 1467492 - RNA, 16 nt, Human
ccaaacaggcucagag

SEQ ID NO: 1467493 - RNA, 13 nt, Human
cauuugcucaugg

SEQ ID NO: 1467494 - RNA, 14 nt, Human
cauuugcucaugga

SEQ ID NO: 1467495 - RNA, 23 nt, Human
cauuucuauagccaaaaauagcu

SEQ ID NO: 1467496 - RNA, 13 nt, Human
ggccuuugagcuc

SEQ ID NO: 1467497 - RNA, 17 nt, Human
ggccuuucccuaagcca

SEQ ID NO: 1467498 - RNA, 15 nt, Human
ggccuuucccuaagc

SEQ ID NO: 1467499 - RNA, 13 nt, Human
ggccuugggcucc

SEQ ID NO: 1467500 - RNA, 12 nt, Human
ggccuugggcuc

SEQ ID NO: 1467501 - RNA, 17 nt, Human
ggccuugcggcuccuca

SEQ ID NO: 1467502 - RNA, 18 nt, Human
ggccuugcggcuccucag

SEQ ID NO: 1467503 - RNA, 19 nt, Human
ggccuugcggcuccucagg

SEQ ID NO: 1467504 - RNA, 16 nt, Human
ggccuuugagcucaga

SEQ ID NO: 1467505 - RNA, 22 nt, Human
ggcgaagcguuguccucagccc

SEQ ID NO: 1467506 - RNA, 23 nt, Human
ggccccacccucguggacaccug

SEQ ID NO: 1467507 - RNA, 22 nt, Human
ggcccaguaccuagcuggcucu

SEQ ID NO: 1467508 - RNA, 20 nt, Human
ggcccuuaugacugccaaga

SEQ ID NO: 1467509 - RNA, 18 nt, Human
ggccccuuugcugacccu

SEQ ID NO: 1467510 - RNA, 16 nt, Human
ggcacuggcgaggaga

SEQ ID NO: 1467511 - RNA, 15 nt, Human
ggcacuggggcaggg

SEQ ID NO: 1467512 - RNA, 22 nt, Human
ggcauccagagucccugccugg

SEQ ID NO: 1467513 - RNA, 12 nt, Human
ggcaucccuggg

SEQ ID NO: 1467514 - RNA, 14 nt, Human
ggcaucccugggcc

SEQ ID NO: 1467515 - RNA, 13 nt, Human
ggcaucccugggc

SEQ ID NO: 1467516 - RNA, 17 nt, Human
ggcauccucuuuuucca

SEQ ID NO: 1467517 - RNA, 20 nt, Human
ggcauccuuccucacaccag

SEQ ID NO: 1467518 - RNA, 18 nt, Human
ggccaggcuugucucgaa

SEQ ID NO: 1467519 - RNA, 21 nt, Human
ggcauuuuuaccaucacugag

SEQ ID NO: 1467520 - RNA, 14 nt, Human
ggccagagccaagg

SEQ ID NO: 1467521 - RNA, 17 nt, Human
ggaggugagaccaccuc

SEQ ID NO: 1467522 - RNA, 16 nt, Human
ggaggugccacuggag

SEQ ID NO: 1467523 - RNA, 20 nt, Human
ggagguccuuaggccucuga

SEQ ID NO: 1467524 - RNA, 15 nt, Human
ggaggcccugugccc

SEQ ID NO: 1467525 - RNA, 23 nt, Human
ggaggcccugugccccuugacaa

SEQ ID NO: 1467526 - RNA, 23 nt, Human
ggaggccuuucccuaagccagcu

SEQ ID NO: 1467527 - RNA, 13 nt, Human
ggaggguaggcag

SEQ ID NO: 1467528 - RNA, 13 nt, Human
ggaggacccagga

SEQ ID NO: 1467529 - RNA, 12 nt, Human
ggaggacccagg

SEQ ID NO: 1467530 - RNA, 18 nt, Human
ggaggaaggaggacccag

SEQ ID NO: 1467531 - RNA, 21 nt, Human
ggaggaaggcuuacacccaca

SEQ ID NO: 1467532 - RNA, 18 nt, Human
ggagcugguuagaaaugc

SEQ ID NO: 1467533 - RNA, 23 nt, Human
ggagcugguuagaaaugcagaau

SEQ ID NO: 1467534 - RNA, 19 nt, Human
ggcaauuaauuccuucagc

SEQ ID NO: 1467535 - RNA, 20 nt, Human
ggcaauuaauuccuucagca

SEQ ID NO: 1467536 - RNA, 17 nt, Human
ggcaauuaauuccuuca

SEQ ID NO: 1467537 - RNA, 14 nt, Human
ggcacacaccacca

SEQ ID NO: 1467538 - RNA, 14 nt, Human
ggcaauuuuguaac

SEQ ID NO: 1467539 - RNA, 12 nt, Human
ggcacagccugg

SEQ ID NO: 1467540 - RNA, 13 nt, Human
ggcacagccuggc

SEQ ID NO: 1467541 - RNA, 15 nt, Human
ggaguuuugcaaagu

SEQ ID NO: 1467542 - RNA, 16 nt, Human
ggaguuuuuuguacca

SEQ ID NO: 1467543 - RNA, 13 nt, Human
ggaguugugggua

SEQ ID NO: 1467544 - RNA, 12 nt, Human
ggagugcagugg

SEQ ID NO: 1467545 - RNA, 12 nt, Human
guaaaaucuugu

SEQ ID NO: 1467546 - RNA, 15 nt, Human
guaaaaucuugucau

SEQ ID NO: 1467547 - RNA, 16 nt, Human
guaaaaucuugucaug

SEQ ID NO: 1467548 - RNA, 18 nt, Human
guaaaaucuugucaugug

SEQ ID NO: 1467549 - RNA, 19 nt, Human
guaaaaucuugucaugugu

SEQ ID NO: 1467550 - RNA, 20 nt, Human
guaaaaucuugucaugugua

SEQ ID NO: 1467551 - RNA, 21 nt, Human
guaaaaucuugucauguguau

SEQ ID NO: 1467552 - RNA, 22 nt, Human
guaaaaucuugucauguguaua

SEQ ID NO: 1467553 - RNA, 23 nt, Human
guaaaaucuugucauguguauaa

SEQ ID NO: 1467554 - RNA, 22 nt, Human
guaaauuauuaauuuaugcaga

SEQ ID NO: 1467555 - RNA, 18 nt, Human
guaaaaugugggauuaug

SEQ ID NO: 1467556 - RNA, 13 nt, Human
guaaagaauuauu

SEQ ID NO: 1467557 - RNA, 14 nt, Human
guaaagaauuauuu

SEQ ID NO: 1467558 - RNA, 15 nt, Human
guaaagaauuauuuu

SEQ ID NO: 1467559 - RNA, 19 nt, Human
guaaagauauuuuuaucuu

SEQ ID NO: 1467560 - RNA, 22 nt, Human
guaaagauauuuuuaucuuuau

SEQ ID NO: 1467561 - RNA, 15 nt, Human
aaauaauuuuuauau

SEQ ID NO: 1467562 - RNA, 18 nt, Human
aaauaauuuuuauauuug

SEQ ID NO: 1467563 - RNA, 20 nt, Human
aaauaauuuuuauauuugaa

SEQ ID NO: 1467564 - RNA, 19 nt, Human
aaauaaugaauacauuucc

SEQ ID NO: 1467565 - RNA, 11 nt, Human
aaaguuuuuua

SEQ ID NO: 1467566 - RNA, 22 nt, Human
aaaguuuuuuauuaugcauuau

SEQ ID NO: 1467567 - RNA, 16 nt, Human
aaauaaaaaagauccc

SEQ ID NO: 1467568 - RNA, 15 nt, Human
aaauaaaaaagaucc

SEQ ID NO: 1467569 - RNA, 20 nt, Human
gguuuggacaaaauggaaua

SEQ ID NO: 1467570 - RNA, 18 nt, Human
aaaguucaacauguuauu

SEQ ID NO: 1467571 - RNA, 20 nt, Human
aaaguugauaaagauuuuuu

SEQ ID NO: 1467572 - RNA, 16 nt, Human
aaaguugaauuuuaca

SEQ ID NO: 1467573 - RNA, 17 nt, Human
aaaguugauaaagauuu

SEQ ID NO: 1467574 - RNA, 18 nt, Human
aaaguugauaaagauuuu

SEQ ID NO: 1467575 - RNA, 23 nt, Human
aaaguugauaaagauuuuuuaau

SEQ ID NO: 1467576 - RNA, 16 nt, Human
aaaguuuguugaaaca

SEQ ID NO: 1467577 - RNA, 19 nt, Human
aaaguuuagccccugaaag

SEQ ID NO: 1467578 - RNA, 19 nt, Human
gguuucaccauguuggcca

SEQ ID NO: 1467579 - RNA, 20 nt, Human
gguuucaccauguuggccag

SEQ ID NO: 1467580 - RNA, 17 nt, Human
gguuucugaguuccugc

SEQ ID NO: 1467581 - RNA, 18 nt, Human
aaagccuguuuaagagac

SEQ ID NO: 1467582 - RNA, 16 nt, Human
aaagccuguuuaagag

SEQ ID NO: 1467583 - RNA, 18 nt, Human
aaagccuucuuuuggggg

SEQ ID NO: 1467584 - RNA, 11 nt, Human
aaagccuucuu

SEQ ID NO: 1467585 - RNA, 12 nt, Human
aaagcgaaaaaa

SEQ ID NO: 1467586 - RNA, 16 nt, Human
aaagcgaaaaaaucag

SEQ ID NO: 1467587 - RNA, 17 nt, Human
ggugggaggaugugaau

SEQ ID NO: 1467588 - RNA, 17 nt, Human
gguggggggggugcugg

SEQ ID NO: 1467589 - RNA, 23 nt, Human
gguggggguaggguuucccuacu

SEQ ID NO: 1467590 - RNA, 14 nt, Human
ggucggaccagcuu

SEQ ID NO: 1467591 - RNA, 13 nt, Human
ggucggaccagcu

SEQ ID NO: 1467592 - RNA, 14 nt, Human
ggucuaggacacag

SEQ ID NO: 1467593 - RNA, 20 nt, Human
aaagcaagcauucagaagaa

SEQ ID NO: 1467594 - RNA, 21 nt, Human
gguccucagagaauuucuacc

SEQ ID NO: 1467595 - RNA, 14 nt, Human
gguccucagagaau

SEQ ID NO: 1467596 - RNA, 23 nt, Human
aaagauugaaguauuuugcugga

SEQ ID NO: 1467597 - RNA, 15 nt, Human
aaagauugagagaau

SEQ ID NO: 1467598 - RNA, 19 nt, Human
aaagauugcugaaauuuua

SEQ ID NO: 1467599 - RNA, 21 nt, Human
aaagauugcugaaauuuuaua

SEQ ID NO: 1467600 - RNA, 20 nt, Human
ggugcugggccccugccucu

SEQ ID NO: 1467601 - RNA, 23 nt, Human
ggugccaauuucaaguuccaagu

SEQ ID NO: 1467602 - RNA, 24 nt, Human
aaagcaucccucacccauccuaga

SEQ ID NO: 1467603 - RNA, 17 nt, Human
aaagcaucccucaccca

SEQ ID NO: 1467604 - RNA, 15 nt, Human
aaagcaucccucacc

SEQ ID NO: 1467605 - RNA, 12 nt, Human
aaagcaucccuc

SEQ ID NO: 1467606 - RNA, 20 nt, Human
aaagcaucauggcuaucugu

SEQ ID NO: 1467607 - RNA, 17 nt, Human
aaagcaggcagaacuca

SEQ ID NO: 1467608 - RNA, 19 nt, Human
aaagcaggcagaacucauc

SEQ ID NO: 1467609 - RNA, 21 nt, Human
ggugcuucuaguucugccagg

SEQ ID NO: 1467610 - RNA, 22 nt, Human
gguaugaacuugaggacacaug

SEQ ID NO: 1467611 - RNA, 21 nt, Human
gguaugaacuugaggacacau

SEQ ID NO: 1467612 - RNA, 12 nt, Human
gguaggaaaugu

SEQ ID NO: 1467613 - RNA, 23 nt, Human
gguaugaacuugaggacacaugu

SEQ ID NO: 1467614 - RNA, 13 nt, Human
gguccaggcugug

SEQ ID NO: 1467615 - RNA, 18 nt, Human
ggguggggggggugcugg

SEQ ID NO: 1467616 - RNA, 23 nt, Human
ggguguccugcaccggggccugg

SEQ ID NO: 1467617 - RNA, 17 nt, Human
ggguuugugacagggcg

SEQ ID NO: 1467618 - RNA, 22 nt, Human
gguaauuguugcuaaucuucuu

SEQ ID NO: 1467619 - RNA, 18 nt, Human
gguacaugguguuugugg

SEQ ID NO: 1467620 - RNA, 14 nt, Human
gguaccagaugcag

SEQ ID NO: 1467621 - RNA, 22 nt, Human
gguagcgggggaggguaggcag

SEQ ID NO: 1467622 - RNA, 15 nt, Human
aaacacccucacacu

SEQ ID NO: 1467623 - RNA, 15 nt, Human
aaacaccaacauaaa

SEQ ID NO: 1467624 - RNA, 19 nt, Human
aaacaccaacauaaaaaug

SEQ ID NO: 1467625 - RNA, 14 nt, Human
aaacagugagccug

SEQ ID NO: 1467626 - RNA, 20 nt, Human
aaacaagcacuaaacaaaga

SEQ ID NO: 1467627 - RNA, 13 nt, Human
aaacaaaaacacu

SEQ ID NO: 1467628 - RNA, 23 nt, Human
ggggccugcccagugcacuugcu

SEQ ID NO: 1467629 - RNA, 19 nt, Human
aaacaucauucauuuuugu

SEQ ID NO: 1467630 - RNA, 19 nt, Human
aaaaugugcuauacugcau

SEQ ID NO: 1467631 - RNA, 20 nt, Human
aaaaugugcuauacugcaua

SEQ ID NO: 1467632 - RNA, 22 nt, Human
aaaaugugggauuaugggucac

SEQ ID NO: 1467633 - RNA, 21 nt, Human
aaaaugugggauuauggguca

SEQ ID NO: 1467634 - RNA, 15 nt, Human
gggcuaccaggaaag

SEQ ID NO: 1467635 - RNA, 12 nt, Human
gggcuaccagga

SEQ ID NO: 1467636 - RNA, 14 nt, Human
gggcggggguggcg

SEQ ID NO: 1467637 - RNA, 22 nt, Human
gggcccuggugguggcucggga

SEQ ID NO: 1467638 - RNA, 15 nt, Human
gggccaggcuggguc

SEQ ID NO: 1467639 - RNA, 14 nt, Human
gggccaggcugggu

SEQ ID NO: 1467640 - RNA, 21 nt, Human
gggccaggcugggucgcccug

SEQ ID NO: 1467641 - RNA, 19 nt, Human
aaaaguauguuagugcaaa

SEQ ID NO: 1467642 - RNA, 11 nt, Human
aaaaucuuguc

SEQ ID NO: 1467643 - RNA, 12 nt, Human
aaaaucuuguca

SEQ ID NO: 1467644 - RNA, 13 nt, Human
aaaaucuugucau

SEQ ID NO: 1467645 - RNA, 19 nt, Human
aaaaucuugucauguguau

SEQ ID NO: 1467646 - RNA, 13 nt, Human
aaaagcagacauu

SEQ ID NO: 1467647 - RNA, 13 nt, Human
aaaagaugcuuuu

SEQ ID NO: 1467648 - RNA, 19 nt, Human
aaaagaugcuuuuaacaga

SEQ ID NO: 1467649 - RNA, 14 nt, Human
aaaagcagacauuu

SEQ ID NO: 1467650 - RNA, 17 nt, Human
gggagaccggccugcca

SEQ ID NO: 1467651 - RNA, 20 nt, Human
gggagaccggccugccagga

SEQ ID NO: 1467652 - RNA, 21 nt, Human
gggagaccggccugccaggag

SEQ ID NO: 1467653 - RNA, 22 nt, Human
gggagaccggccugccaggagg

SEQ ID NO: 1467654 - RNA, 17 nt, Human
gggagaggggccucaaa

SEQ ID NO: 1467655 - RNA, 20 nt, Human
gggagagggcgcaggccgug

SEQ ID NO: 1467656 - RNA, 14 nt, Human
gggagagggcgcag

SEQ ID NO: 1467657 - RNA, 22 nt, Human
gggaggcucuggagcccacugu

SEQ ID NO: 1467658 - RNA, 20 nt, Human
gggauuacaggcgugagcca

SEQ ID NO: 1467659 - RNA, 17 nt, Human
gggauuaugggucacag

SEQ ID NO: 1467660 - RNA, 22 nt, Human
aaaagggccaaagaaccaaaga

SEQ ID NO: 1467661 - RNA, 14 nt, Human
aaaagggaggggga

SEQ ID NO: 1467662 - RNA, 16 nt, Human
gggcagauuuucagca

SEQ ID NO: 1467663 - RNA, 15 nt, Human
aaaaauauauacuaa

SEQ ID NO: 1467664 - RNA, 20 nt, Human
gggacauuugcucauggaau

SEQ ID NO: 1467665 - RNA, 21 nt, Human
gggacauuugcucauggaauu

SEQ ID NO: 1467666 - RNA, 21 nt, Human
aaaaauagcuaaauaccucaa

SEQ ID NO: 1467667 - RNA, 23 nt, Human
aaaaauaguuuggauauguaaaa

SEQ ID NO: 1467668 - RNA, 14 nt, Human
aaaaauaguuugga

SEQ ID NO: 1467669 - RNA, 22 nt, Human
gggaagagagccugcaggaucu

SEQ ID NO: 1467670 - RNA, 19 nt, Human
gggaagaggguuaggaggg

SEQ ID NO: 1467671 - RNA, 23 nt, Human
gggaagaggguuaggaggguuuc

SEQ ID NO: 1467672 - RNA, 15 nt, Human
aaaacccagauaaag

SEQ ID NO: 1467673 - RNA, 13 nt, Human
aaaacauuuauuu

SEQ ID NO: 1467674 - RNA, 16 nt, Human
aaaacauuuauuuuga

SEQ ID NO: 1467675 - RNA, 22 nt, Human
aaaacuagaggugagaaauuua

SEQ ID NO: 1467676 - RNA, 16 nt, Human
aaaacauuccauccuu

SEQ ID NO: 1467677 - RNA, 12 nt, Human
aaaacauuuauu

SEQ ID NO: 1467678 - RNA, 17 nt, Human
aaaacauaaucuucugc

SEQ ID NO: 1467679 - RNA, 18 nt, Human
aaaacauaaucuucugcc

SEQ ID NO: 1467680 - RNA, 20 nt, Human
aaaacauaaucuucugccuu

SEQ ID NO: 1467681 - RNA, 24 nt, Human
aaaacauaaucuucugccuucuca

SEQ ID NO: 1467682 - RNA, 22 nt, Human
aaaacagguagaauuaucuaau

SEQ ID NO: 1467683 - RNA, 21 nt, Human
gcuggagaugaggccagacca

SEQ ID NO: 1467684 - RNA, 20 nt, Human
gcuggagaugaggccagacc

SEQ ID NO: 1467685 - RNA, 18 nt, Human
gcuggagaugaggccaga

SEQ ID NO: 1467686 - RNA, 18 nt, Human
gcugcuggggaagacagu

SEQ ID NO: 1467687 - RNA, 19 nt, Human
gcugcuggggaagacagug

SEQ ID NO: 1467688 - RNA, 20 nt, Human
gcugcuggggaagacagugg

SEQ ID NO: 1467689 - RNA, 21 nt, Human
gcugcuggggaagacaguggc

SEQ ID NO: 1467690 - RNA, 13 nt, Human
gcugcuccccacg

SEQ ID NO: 1467691 - RNA, 22 nt, Human
gcugcuccccacgucagcuggg

SEQ ID NO: 1467692 - RNA, 22 nt, Human
gcugcaggaaucuuuaaaagau

SEQ ID NO: 1467693 - RNA, 17 nt, Human
gcugcaggaaucuuuaa

SEQ ID NO: 1467694 - RNA, 16 nt, Human
gcucuggagcccacug

SEQ ID NO: 1467695 - RNA, 15 nt, Human
gcucuggagcccacu

SEQ ID NO: 1467696 - RNA, 19 nt, Human
gcucucugugggcuggcag

SEQ ID NO: 1467697 - RNA, 17 nt, Human
gcucugaaagagaaaca

SEQ ID NO: 1467698 - RNA, 20 nt, Human
gcucucugugggcuggcagu

SEQ ID NO: 1467699 - RNA, 24 nt, Human
gcugaauuucccucucucauaccc

SEQ ID NO: 1467700 - RNA, 17 nt, Human
gcugaauuucccucucu

SEQ ID NO: 1467701 - RNA, 17 nt, Human
gcucuggagcccacugu

SEQ ID NO: 1467702 - RNA, 23 nt, Human
gcucuguaaguagaugcauuugg

SEQ ID NO: 1467703 - RNA, 21 nt, Human
gcucugucuacuugcucaggu

SEQ ID NO: 1467704 - RNA, 22 nt, Human
gcucugugagggugcugacugg

SEQ ID NO: 1467705 - RNA, 13 nt, Human
gcucugucuacuu

SEQ ID NO: 1467706 - RNA, 19 nt, Human
gcucugucuacuugcucag

SEQ ID NO: 1467707 - RNA, 11 nt, Human
gcugaaaauau

SEQ ID NO: 1467708 - RNA, 21 nt, Human
gcucuacuggucuuguggaau

SEQ ID NO: 1467709 - RNA, 23 nt, Human
gcucuagauugagagaagagaca

SEQ ID NO: 1467710 - RNA, 22 nt, Human
gcucccagggacaccugggaga

SEQ ID NO: 1467711 - RNA, 18 nt, Human
gcuccucgagaucccaac

SEQ ID NO: 1467712 - RNA, 16 nt, Human
gcuucaaauuguaagc

SEQ ID NO: 1467713 - RNA, 21 nt, Human
gcuucagguccaggcuguguu

SEQ ID NO: 1467714 - RNA, 15 nt, Human
gcuucagguccaggc

SEQ ID NO: 1467715 - RNA, 15 nt, Human
gcuuaauucaaauaa

SEQ ID NO: 1467716 - RNA, 14 nt, Human
gcuuaauucaaaua

SEQ ID NO: 1467717 - RNA, 20 nt, Human
gcuuaauggcugauaauuuu

SEQ ID NO: 1467718 - RNA, 13 nt, Human
gcuguuuuuuugu

SEQ ID NO: 1467719 - RNA, 12 nt, Human
gcuguauuuuaa

SEQ ID NO: 1467720 - RNA, 13 nt, Human
gcuguauuuuaaa

SEQ ID NO: 1467721 - RNA, 15 nt, Human
gcugguuuaauguuu

SEQ ID NO: 1467722 - RNA, 20 nt, Human
gcuggagugcaguggcgcga

SEQ ID NO: 1467723 - RNA, 19 nt, Human
gcuuccuggcaauagucaa

SEQ ID NO: 1467724 - RNA, 19 nt, Human
gcuugaacuaggcugagca

SEQ ID NO: 1467725 - RNA, 20 nt, Human
gcuugaacuaggcugagcaa

SEQ ID NO: 1467726 - RNA, 15 nt, Human
gcuuucccugccucu

SEQ ID NO: 1467727 - RNA, 17 nt, Human
gcuuucugaucaaggcc

SEQ ID NO: 1467728 - RNA, 18 nt, Human
ggaagacgcaagggccug

SEQ ID NO: 1467729 - RNA, 22 nt, Human
ggaagaagagaucaggaagaga

SEQ ID NO: 1467730 - RNA, 21 nt, Human
ggaagaagagaucaggaagag

SEQ ID NO: 1467731 - RNA, 20 nt, Human
ggaagaagagaucaggaaga

SEQ ID NO: 1467732 - RNA, 20 nt, Human
ggaacacuagacaagccaga

SEQ ID NO: 1467733 - RNA, 21 nt, Human
ggaacacuagacaagccagaa

SEQ ID NO: 1467734 - RNA, 21 nt, Human
ggaaacuaggugcauauuuau

SEQ ID NO: 1467735 - RNA, 18 nt, Human
ggaaaccuuccacccagu

SEQ ID NO: 1467736 - RNA, 20 nt, Human
ggaaauucccuucaucugga

SEQ ID NO: 1467737 - RNA, 16 nt, Human
ggaaauucugcucaga

SEQ ID NO: 1467738 - RNA, 22 nt, Human
ggaaauucccuucaucuggaac

SEQ ID NO: 1467739 - RNA, 16 nt, Human
ggaaauugauuuugaa

SEQ ID NO: 1467740 - RNA, 17 nt, Human
ggaaauuggaagagcac

SEQ ID NO: 1467741 - RNA, 19 nt, Human
ggaaauucccuucaucugg

SEQ ID NO: 1467742 - RNA, 14 nt, Human
ggaacaaacagggc

SEQ ID NO: 1467743 - RNA, 15 nt, Human
ggaacaaacagggcu

SEQ ID NO: 1467744 - RNA, 22 nt, Human
gcuuuuuucucugauacagaaa

SEQ ID NO: 1467745 - RNA, 18 nt, Human
ggaaaauucuaacccagg

SEQ ID NO: 1467746 - RNA, 17 nt, Human
ggaaaccuuccacccag

SEQ ID NO: 1467747 - RNA, 20 nt, Human
gcuuuuuuaucaugugaaau

SEQ ID NO: 1467748 - RNA, 18 nt, Human
gcuuuuuuaucaugugaa

SEQ ID NO: 1467749 - RNA, 15 nt, Human
gcuuuuuuaucaugu

SEQ ID NO: 1467750 - RNA, 19 nt, Human
gcuuuuuauuccuccugcu

SEQ ID NO: 1467751 - RNA, 13 nt, Human
gcuuuuuccagag

SEQ ID NO: 1467752 - RNA, 18 nt, Human
gcgauucucuugccucaa

SEQ ID NO: 1467753 - RNA, 23 nt, Human
gcgauucuccugccucagccucc

SEQ ID NO: 1467754 - RNA, 19 nt, Human
gcgagauaccccaccuccc

SEQ ID NO: 1467755 - RNA, 23 nt, Human
gcuacuuugcugcuaugguuuuc

SEQ ID NO: 1467756 - RNA, 16 nt, Human
gcuacuuugcugcuau

SEQ ID NO: 1467757 - RNA, 19 nt, Human
gcuacuguaaggcaaucau

SEQ ID NO: 1467758 - RNA, 18 nt, Human
gcuacuguaaggcaauca

SEQ ID NO: 1467759 - RNA, 18 nt, Human
gcuaauuuugaaaaacug

SEQ ID NO: 1467760 - RNA, 20 nt, Human
gcuaauuuauccugaaauuu

SEQ ID NO: 1467761 - RNA, 13 nt, Human
gcguggugcgagu

SEQ ID NO: 1467762 - RNA, 21 nt, Human
gcuaauuuuuuuguauuuuag

SEQ ID NO: 1467763 - RNA, 20 nt, Human
gcuaauuuuuguauuuuuag

SEQ ID NO: 1467764 - RNA, 20 nt, Human
gcuaauuuuuuguuguuucu

SEQ ID NO: 1467765 - RNA, 19 nt, Human
gcuaauuuuuuuguauuuu

SEQ ID NO: 1467766 - RNA, 18 nt, Human
gcuacugccgucagugcu

SEQ ID NO: 1467767 - RNA, 22 nt, Human
gcuacugccgucagugcugugc

SEQ ID NO: 1467768 - RNA, 23 nt, Human
gcggaggaaggaggacccaggac

SEQ ID NO: 1467769 - RNA, 16 nt, Human
gcgugaucucagcuca

SEQ ID NO: 1467770 - RNA, 15 nt, Human
gcgugaucucagcuc

SEQ ID NO: 1467771 - RNA, 12 nt, Human
gcgugaucucag

SEQ ID NO: 1467772 - RNA, 16 nt, Human
gcgugguggucccugg

SEQ ID NO: 1467773 - RNA, 13 nt, Human
gcggcugggagga

SEQ ID NO: 1467774 - RNA, 14 nt, Human
gcggcugggaggag

SEQ ID NO: 1467775 - RNA, 17 nt, Human
gcggcugggaggagggc

SEQ ID NO: 1467776 - RNA, 18 nt, Human
gcggcugggaggagggca

SEQ ID NO: 1467777 - RNA, 19 nt, Human
gcggcugggaggagggcag

SEQ ID NO: 1467778 - RNA, 22 nt, Human
gcggcugggaggagggcaggca

SEQ ID NO: 1467779 - RNA, 20 nt, Human
gccuccaacccuagcaaaag

SEQ ID NO: 1467780 - RNA, 22 nt, Human
gccuccaaggaggggcuguaaa

SEQ ID NO: 1467781 - RNA, 23 nt, Human
gccuccaaggaggggcuguaaaa

SEQ ID NO: 1467782 - RNA, 16 nt, Human
gccuccaacccuagca

SEQ ID NO: 1467783 - RNA, 20 nt, Human
gccugcuauuugaaguguaa

SEQ ID NO: 1467784 - RNA, 16 nt, Human
gccauaugaaaaggcu

SEQ ID NO: 1467785 - RNA, 16 nt, Human
gccaguuguccuccuu

SEQ ID NO: 1467786 - RNA, 14 nt, Human
gccaguuguccucc

SEQ ID NO: 1467787 - RNA, 13 nt, Human
gccaguuguccuc

SEQ ID NO: 1467788 - RNA, 14 nt, Human
gccaggauggcgca

SEQ ID NO: 1467789 - RNA, 16 nt, Human
gccaggauggcgcagg

SEQ ID NO: 1467790 - RNA, 23 nt, Human
gcccauucauuccauucuggaag

SEQ ID NO: 1467791 - RNA, 19 nt, Human
gcccauucauuccauucug

SEQ ID NO: 1467792 - RNA, 16 nt, Human
gcccauucauuccauu

SEQ ID NO: 1467793 - RNA, 23 nt, Human
gccccacccucguggacaccugc

SEQ ID NO: 1467794 - RNA, 22 nt, Human
gccccacccucguggacaccug

SEQ ID NO: 1467795 - RNA, 21 nt, Human
gccccacccucguggacaccu

SEQ ID NO: 1467796 - RNA, 20 nt, Human
gccccacccucguggacacc

SEQ ID NO: 1467797 - RNA, 16 nt, Human
gccccugccucucugc

SEQ ID NO: 1467798 - RNA, 15 nt, Human
gccccugccucucug

SEQ ID NO: 1467799 - RNA, 14 nt, Human
gcccccucccugga

SEQ ID NO: 1467800 - RNA, 18 nt, Human
gccccugccucucugcag

SEQ ID NO: 1467801 - RNA, 17 nt, Human
gccccugccucucugca

SEQ ID NO: 1467802 - RNA, 15 nt, Human
gcccccucccuggau

SEQ ID NO: 1467803 - RNA, 16 nt, Human
gcccccucccuggaug

SEQ ID NO: 1467804 - RNA, 17 nt, Human
gccauguguuuauccua

SEQ ID NO: 1467805 - RNA, 22 nt, Human
gccaugugcuaguaauuggaaa

SEQ ID NO: 1467806 - RNA, 15 nt, Human
gccaucaagagacug

SEQ ID NO: 1467807 - RNA, 16 nt, Human
gccaucaagagacuga

SEQ ID NO: 1467808 - RNA, 14 nt, Human
gagauguagccccu

SEQ ID NO: 1467809 - RNA, 16 nt, Human
gagauguaaaagguau

SEQ ID NO: 1467810 - RNA, 17 nt, Human
gagauguaaaagguauu

SEQ ID NO: 1467811 - RNA, 20 nt, Human
gagauucucauaacuugaga

SEQ ID NO: 1467812 - RNA, 23 nt, Human
gagauucucauaacuugagaccu

SEQ ID NO: 1467813 - RNA, 12 nt, Human
gagauuuuucau

SEQ ID NO: 1467814 - RNA, 19 nt, Human
gagaugcuggcuugggcag

SEQ ID NO: 1467815 - RNA, 12 nt, Human
gagaugcuggcu

SEQ ID NO: 1467816 - RNA, 18 nt, Human
gagauggagucuugcucu

SEQ ID NO: 1467817 - RNA, 12 nt, Human
gagcaucacaga

SEQ ID NO: 1467818 - RNA, 13 nt, Human
gagcaucacagaa

SEQ ID NO: 1467819 - RNA, 14 nt, Human
gagcaucacagaau

SEQ ID NO: 1467820 - RNA, 18 nt, Human
gagaaggaaaauuuuagc

SEQ ID NO: 1467821 - RNA, 21 nt, Human
gacuggguaggaaagaggaag

SEQ ID NO: 1467822 - RNA, 15 nt, Human
gacugaaaauauugu

SEQ ID NO: 1467823 - RNA, 17 nt, Human
gacucuuaagaagacug

SEQ ID NO: 1467824 - RNA, 18 nt, Human
gacucuuaagaagacugc

SEQ ID NO: 1467825 - RNA, 16 nt, Human
gacucuuaagaagacu

SEQ ID NO: 1467826 - RNA, 19 nt, Human
gacucugucuaccuggucu

SEQ ID NO: 1467827 - RNA, 16 nt, Human
gacucuuuaugcuugc

SEQ ID NO: 1467828 - RNA, 14 nt, Human
gacucaaaccaaau

SEQ ID NO: 1467829 - RNA, 17 nt, Human
gacuaucuuacuauuuc

SEQ ID NO: 1467830 - RNA, 19 nt, Human
gacuaucuuacuauuucac

SEQ ID NO: 1467831 - RNA, 15 nt, Human
gacuaugaaaagcua

SEQ ID NO: 1467832 - RNA, 21 nt, Human
gacuauucuugauguaaaauc

SEQ ID NO: 1467833 - RNA, 22 nt, Human
gacuauucuugauguaaaaucu

SEQ ID NO: 1467834 - RNA, 23 nt, Human
gacuaggccuugcggcuccucag

SEQ ID NO: 1467835 - RNA, 16 nt, Human
gacuagggagccaugu

SEQ ID NO: 1467836 - RNA, 20 nt, Human
gaaugagagacacacugaag

SEQ ID NO: 1467837 - RNA, 14 nt, Human
gaaugaauuaaaua

SEQ ID NO: 1467838 - RNA, 16 nt, Human
gaaugaauuaaauaaa

SEQ ID NO: 1467839 - RNA, 12 nt, Human
gaaugacacugu

SEQ ID NO: 1467840 - RNA, 15 nt, Human
gaaugagacauccag

SEQ ID NO: 1467841 - RNA, 13 nt, Human
gaaugagacaucc

SEQ ID NO: 1467842 - RNA, 11 nt, Human
gaaugagccuc

SEQ ID NO: 1467843 - RNA, 13 nt, Human
gaaugagccucgg

SEQ ID NO: 1467844 - RNA, 22 nt, Human
gaaugagagacacacugaagaa

SEQ ID NO: 1467845 - RNA, 23 nt, Human
gaaugagagacacacugaagaag

SEQ ID NO: 1467846 - RNA, 21 nt, Human
gaagugacuuuggcugcaugc

SEQ ID NO: 1467847 - RNA, 12 nt, Human
gaagugagaccu

SEQ ID NO: 1467848 - RNA, 20 nt, Human
gaagugacuuuggcugcaug

SEQ ID NO: 1467849 - RNA, 15 nt, Human
gaagugacuuuggcu

SEQ ID NO: 1467850 - RNA, 13 nt, Human
gaagugacuuugg

SEQ ID NO: 1467851 - RNA, 13 nt, Human
gaagggcaaguuu

SEQ ID NO: 1467852 - RNA, 20 nt, Human
gaaggcuuguugugcuuuua

SEQ ID NO: 1467853 - RNA, 17 nt, Human
gaaggcuuguugugcuu

SEQ ID NO: 1467854 - RNA, 19 nt, Human
gaaggcuuguugugcuuuu

SEQ ID NO: 1467855 - RNA, 15 nt, Human
gaagggaagagacag

SEQ ID NO: 1467856 - RNA, 22 nt, Human
gaagggaauaagguacaagaag

SEQ ID NO: 1467857 - RNA, 17 nt, Human
gaagggaauaagguaca

SEQ ID NO: 1467858 - RNA, 14 nt, Human
gaagggacugagag

SEQ ID NO: 1467859 - RNA, 16 nt, Human
gaagcugcccugccca

SEQ ID NO: 1467860 - RNA, 19 nt, Human
gaagcugugcgugugugug

SEQ ID NO: 1467861 - RNA, 14 nt, Human
gacacacugaagaa

SEQ ID NO: 1467862 - RNA, 13 nt, Human
gacacacugaaga

SEQ ID NO: 1467863 - RNA, 16 nt, Human
gacaaacaccucccag

SEQ ID NO: 1467864 - RNA, 12 nt, Human
gacacacaugaa

SEQ ID NO: 1467865 - RNA, 11 nt, Human
gaauuaguuuu

SEQ ID NO: 1467866 - RNA, 12 nt, Human
gaauuaugaaac

SEQ ID NO: 1467867 - RNA, 14 nt, Human
gaauuaucuaauuu

SEQ ID NO: 1467868 - RNA, 20 nt, Human
gaauuaucuugguugaaaau

SEQ ID NO: 1467869 - RNA, 19 nt, Human
gaauuauaacuggaaagaa

SEQ ID NO: 1467870 - RNA, 20 nt, Human
gaauuauaacuggaaagaag

SEQ ID NO: 1467871 - RNA, 21 nt, Human
gaauuuucuuuguguagcuuu

SEQ ID NO: 1467872 - RNA, 23 nt, Human
gaauuuucuuuguguagcuuugc

SEQ ID NO: 1467873 - RNA, 15 nt, Human
gacaaaauggaauac

SEQ ID NO: 1467874 - RNA, 15 nt, Human
gacaaaacuagagac

SEQ ID NO: 1467875 - RNA, 15 nt, Human
gaauuuuguugcugu

SEQ ID NO: 1467876 - RNA, 17 nt, Human
gaauuuuuaaacaagua

SEQ ID NO: 1467877 - RNA, 18 nt, Human
gaauuuuuaaacaaguau

SEQ ID NO: 1467878 - RNA, 14 nt, Human
gacagugaaagaaa

SEQ ID NO: 1467879 - RNA, 17 nt, Human
gacagucaccucaugga

SEQ ID NO: 1467880 - RNA, 16 nt, Human
gacagguuagcugcuc

SEQ ID NO: 1467881 - RNA, 16 nt, Human
gacacugccacacagg

SEQ ID NO: 1467882 - RNA, 16 nt, Human
gacacugguuugaaga

SEQ ID NO: 1467883 - RNA, 15 nt, Human
gacagaaguuugcac

SEQ ID NO: 1467884 - RNA, 20 nt, Human
gacagaaguuugcacuaucu

SEQ ID NO: 1467885 - RNA, 22 nt, Human
gacagaaguuugcacuaucuuu

SEQ ID NO: 1467886 - RNA, 14 nt, Human
gacauuaacucauu

SEQ ID NO: 1467887 - RNA, 21 nt, Human
gacauuaacucauuagacugg

SEQ ID NO: 1467888 - RNA, 22 nt, Human
gacauuaacucauuagacugga

SEQ ID NO: 1467889 - RNA, 16 nt, Human
gauacgacaguacacu

SEQ ID NO: 1467890 - RNA, 17 nt, Human
gauacgacaguacacug

SEQ ID NO: 1467891 - RNA, 17 nt, Human
gauacuugaaaauuaac

SEQ ID NO: 1467892 - RNA, 16 nt, Human
gauacuugaaaauuaa

SEQ ID NO: 1467893 - RNA, 20 nt, Human
gauacuuaagugcugcaauu

SEQ ID NO: 1467894 - RNA, 13 nt, Human
gauaugugaacag

SEQ ID NO: 1467895 - RNA, 14 nt, Human
gauaugugaacagu

SEQ ID NO: 1467896 - RNA, 16 nt, Human
gauauguaaaacauuu

SEQ ID NO: 1467897 - RNA, 17 nt, Human
gauauguaaaacauuua

SEQ ID NO: 1467898 - RNA, 19 nt, Human
gauauguaaaacauuuauu

SEQ ID NO: 1467899 - RNA, 18 nt, Human
gauauguaaaacauuuau

SEQ ID NO: 1467900 - RNA, 16 nt, Human
gauaugggacauuuuu

SEQ ID NO: 1467901 - RNA, 17 nt, Human
gauaugggacauuuuug

SEQ ID NO: 1467902 - RNA, 22 nt, Human
gauauuccuauugugcaaugua

SEQ ID NO: 1467903 - RNA, 16 nt, Human
gaguuuagcuggaaaa

SEQ ID NO: 1467904 - RNA, 14 nt, Human
gaguuuaggguggg

SEQ ID NO: 1467905 - RNA, 15 nt, Human
gaguuuagggugggg

SEQ ID NO: 1467906 - RNA, 15 nt, Human
gaguuguggguagug

SEQ ID NO: 1467907 - RNA, 19 nt, Human
gagugcugaaggaauggaa

SEQ ID NO: 1467908 - RNA, 15 nt, Human
gagugcguggugcga

SEQ ID NO: 1467909 - RNA, 14 nt, Human
gaggugccacugga

SEQ ID NO: 1467910 - RNA, 13 nt, Human
gaggugccacugg

SEQ ID NO: 1467911 - RNA, 14 nt, Human
gagucaaguuguuc

SEQ ID NO: 1467912 - RNA, 13 nt, Human
gaguccaucagcc

SEQ ID NO: 1467913 - RNA, 14 nt, Human
gaguccaucagccu

SEQ ID NO: 1467914 - RNA, 15 nt, Human
gaguccaucagccuc

SEQ ID NO: 1467915 - RNA, 16 nt, Human
gaguccaucagccucc

SEQ ID NO: 1467916 - RNA, 14 nt, Human
gauuaugggucaca

SEQ ID NO: 1467917 - RNA, 16 nt, Human
gauuaugggucacagg

SEQ ID NO: 1467918 - RNA, 17 nt, Human
gauuaugggucacagga

SEQ ID NO: 1467919 - RNA, 18 nt, Human
gauuaugggucacaggaa

SEQ ID NO: 1467920 - RNA, 22 nt, Human
gauuacaggugugagccaccac

SEQ ID NO: 1467921 - RNA, 18 nt, Human
gauuagacuggacagcuu

SEQ ID NO: 1467922 - RNA, 19 nt, Human
gauuagacuggacagcuug

SEQ ID NO: 1467923 - RNA, 20 nt, Human
gauuagacuggacagcuugu

SEQ ID NO: 1467924 - RNA, 18 nt, Human
gauuacugccuauuuuaa

SEQ ID NO: 1467925 - RNA, 14 nt, Human
gauuacauuuuaaa

SEQ ID NO: 1467926 - RNA, 14 nt, Human
gauucucuugccuc

SEQ ID NO: 1467927 - RNA, 16 nt, Human
gauucucuugccucaa

SEQ ID NO: 1467928 - RNA, 15 nt, Human
gauucucuugccuca

SEQ ID NO: 1467929 - RNA, 12 nt, Human
gaucccaacacu

SEQ ID NO: 1467930 - RNA, 16 nt, Human
gaucccaacacugcca

SEQ ID NO: 1467931 - RNA, 23 nt, Human
gauccaggccggcuugccacacc

SEQ ID NO: 1467932 - RNA, 17 nt, Human
gauauuuuuaucuuuau

SEQ ID NO: 1467933 - RNA, 18 nt, Human
gauauuuuuccauuuuuu

SEQ ID NO: 1467934 - RNA, 16 nt, Human
gcagagccaggaagau

SEQ ID NO: 1467935 - RNA, 18 nt, Human
gcagagcugauggagaag

SEQ ID NO: 1467936 - RNA, 19 nt, Human
gcagccagaccagcaggcu

SEQ ID NO: 1467937 - RNA, 22 nt, Human
gcauaacguauaaaagccuguu

SEQ ID NO: 1467938 - RNA, 18 nt, Human
gcaguccuggaagccagc

SEQ ID NO: 1467939 - RNA, 20 nt, Human
gcaguccuggaagccagcuu

SEQ ID NO: 1467940 - RNA, 17 nt, Human
gcaggcuggccuaugug

SEQ ID NO: 1467941 - RNA, 15 nt, Human
gcaguaugaaaauaa

SEQ ID NO: 1467942 - RNA, 13 nt, Human
gcaguaauaaaaa

SEQ ID NO: 1467943 - RNA, 20 nt, Human
gcagaaagcaucccucaccc

SEQ ID NO: 1467944 - RNA, 19 nt, Human
gcagaaagcaucccucacc

SEQ ID NO: 1467945 - RNA, 20 nt, Human
gcacuuuagaauaugccuug

SEQ ID NO: 1467946 - RNA, 19 nt, Human
gcacuuuagaauaugccuu

SEQ ID NO: 1467947 - RNA, 18 nt, Human
gcacuuuagaauaugccu

SEQ ID NO: 1467948 - RNA, 15 nt, Human
gcagagccaggaaga

SEQ ID NO: 1467949 - RNA, 14 nt, Human
gcagagccaggaag

SEQ ID NO: 1467950 - RNA, 17 nt, Human
gcaccuaaagaaaaaca

SEQ ID NO: 1467951 - RNA, 14 nt, Human
gcaccuaaagaaaa

SEQ ID NO: 1467952 - RNA, 21 nt, Human
gcaaguccuaagccuguuagc

SEQ ID NO: 1467953 - RNA, 13 nt, Human
gcaagugaauuug

SEQ ID NO: 1467954 - RNA, 21 nt, Human
gcaauaacguuuaagccaaaa

SEQ ID NO: 1467955 - RNA, 20 nt, Human
gcaccggggccugggcagga

SEQ ID NO: 1467956 - RNA, 19 nt, Human
gcaccggggccugggcagg

SEQ ID NO: 1467957 - RNA, 12 nt, Human
gaaaagaaaaag

SEQ ID NO: 1467958 - RNA, 11 nt, Human
gaaaaugcuga

SEQ ID NO: 1467959 - RNA, 22 nt, Human
gaaaauucuaacccagguaucc

SEQ ID NO: 1467960 - RNA, 18 nt, Human
cuuuuggaagguauuuaa

SEQ ID NO: 1467961 - RNA, 15 nt, Human
cuuuuggcauuuuac

SEQ ID NO: 1467962 - RNA, 19 nt, Human
cuuuuguagaagucacauu

SEQ ID NO: 1467963 - RNA, 10 nt, Human
cuuuuguaag

SEQ ID NO: 1467964 - RNA, 13 nt, Human
cuuuuguaagaca

SEQ ID NO: 1467965 - RNA, 20 nt, Human
cuuuuguaagacaaagguuu

SEQ ID NO: 1467966 - RNA, 15 nt, Human
cuuuugucucugcaa

SEQ ID NO: 1467967 - RNA, 13 nt, Human
gaaaaaaaauuau

SEQ ID NO: 1467968 - RNA, 21 nt, Human
gaaaaacaaacucguuuuuua

SEQ ID NO: 1467969 - RNA, 23 nt, Human
gaaaaacaaacucguuuuuuaca

SEQ ID NO: 1467970 - RNA, 16 nt, Human
cuuuuuuuagagaagu

SEQ ID NO: 1467971 - RNA, 18 nt, Human
gaaauauuuauuuuaaua

SEQ ID NO: 1467972 - RNA, 22 nt, Human
gaaauauuuauuuuaauaaugu

SEQ ID NO: 1467973 - RNA, 17 nt, Human
gaaaggugguguuucug

SEQ ID NO: 1467974 - RNA, 22 nt, Human
gaaaggugguguuucuguaaga

SEQ ID NO: 1467975 - RNA, 17 nt, Human
gaaauauuuauuuuaau

SEQ ID NO: 1467976 - RNA, 14 nt, Human
gaaaggugguguuu

SEQ ID NO: 1467977 - RNA, 16 nt, Human
gaaaggugguguuucu

SEQ ID NO: 1467978 - RNA, 17 nt, Human
gaaacuuuuuuauuuaa

SEQ ID NO: 1467979 - RNA, 18 nt, Human
gaaacuuuuuuauuuaaa

SEQ ID NO: 1467980 - RNA, 13 nt, Human
gaaacuuuuggaa

SEQ ID NO: 1467981 - RNA, 15 nt, Human
gaaacuuuuggaagg

SEQ ID NO: 1467982 - RNA, 16 nt, Human
gaaacuuucuuucuca

SEQ ID NO: 1467983 - RNA, 18 nt, Human
cuuuuaugugaaacaugu

SEQ ID NO: 1467984 - RNA, 14 nt, Human
cuuuuaugugaaac

SEQ ID NO: 1467985 - RNA, 21 nt, Human
cuuuuauaggauuuauuuaaa

SEQ ID NO: 1467986 - RNA, 13 nt, Human
cuuuguaaugaaa

SEQ ID NO: 1467987 - RNA, 16 nt, Human
cuuucuagccuggcua

SEQ ID NO: 1467988 - RNA, 15 nt, Human
cuuugauauuucaau

SEQ ID NO: 1467989 - RNA, 17 nt, Human
cuuuccuugaguaguuu

SEQ ID NO: 1467990 - RNA, 22 nt, Human
cuuuccugagucccaucccugc

SEQ ID NO: 1467991 - RNA, 20 nt, Human
cuuuccugagucccaucccu

SEQ ID NO: 1467992 - RNA, 18 nt, Human
cuuuccugagucccaucc

SEQ ID NO: 1467993 - RNA, 15 nt, Human
cuugcggcuccucag

SEQ ID NO: 1467994 - RNA, 13 nt, Human
cuugaugccuggc

SEQ ID NO: 1467995 - RNA, 13 nt, Human
cuugccugcaggc

SEQ ID NO: 1467996 - RNA, 12 nt, Human
cuugaugccugg

SEQ ID NO: 1467997 - RNA, 13 nt, Human
cuugaugaagaag

SEQ ID NO: 1467998 - RNA, 12 nt, Human
cuugaugaagaa

SEQ ID NO: 1467999 - RNA, 17 nt, Human
cuugauagaaaugccaa

SEQ ID NO: 1468000 - RNA, 22 nt, Human
cuugauagaaaugccaagcacu

SEQ ID NO: 1468001 - RNA, 12 nt, Human
cuugauagaaau

SEQ ID NO: 1468002 - RNA, 14 nt, Human
cuugauagaaaugc

SEQ ID NO: 1468003 - RNA, 21 nt, Human
cuuccugcaggcaggaacaaa

SEQ ID NO: 1468004 - RNA, 20 nt, Human
cuuccugcaggcaggaacaa

SEQ ID NO: 1468005 - RNA, 14 nt, Human
cuucuauuuuguaa

SEQ ID NO: 1468006 - RNA, 15 nt, Human
cuucuauuuuguaaa

SEQ ID NO: 1468007 - RNA, 16 nt, Human
cuucuauuuuguaaac

SEQ ID NO: 1468008 - RNA, 17 nt, Human
cuucuauuuuguaaacu

SEQ ID NO: 1468009 - RNA, 23 nt, Human
cuuauuguagcauccuggaauau

SEQ ID NO: 1468010 - RNA, 15 nt, Human
cuuauuggaacucug

SEQ ID NO: 1468011 - RNA, 17 nt, Human
cuuauuggaacucugcu

SEQ ID NO: 1468012 - RNA, 18 nt, Human
cuuauuggaacucugcuu

SEQ ID NO: 1468013 - RNA, 20 nt, Human
cuuauuguagcauccuggaa

SEQ ID NO: 1468014 - RNA, 16 nt, Human
cuuauuauuuuugaga

SEQ ID NO: 1468015 - RNA, 14 nt, Human
cuuauucauuuucu

SEQ ID NO: 1468016 - RNA, 16 nt, Human
cuuauucauuuucucu

SEQ ID NO: 1468017 - RNA, 17 nt, Human
cuuauucauuuucucua

SEQ ID NO: 1468018 - RNA, 18 nt, Human
cuuauucauuuucucuaa

SEQ ID NO: 1468019 - RNA, 14 nt, Human
cuuauuauuuuuga

SEQ ID NO: 1468020 - RNA, 19 nt, Human
cuuauucauuuucucuaau

SEQ ID NO: 1468021 - RNA, 14 nt, Human
cuuaugcuuaaauu

SEQ ID NO: 1468022 - RNA, 15 nt, Human
cuucacuguaaaaua

SEQ ID NO: 1468023 - RNA, 19 nt, Human
cuucacucuucaaaugccu

SEQ ID NO: 1468024 - RNA, 19 nt, Human
cuucaucuggauuccagag

SEQ ID NO: 1468025 - RNA, 13 nt, Human
cuucaucuggcaa

SEQ ID NO: 1468026 - RNA, 14 nt, Human
cuucaucuggcaac

SEQ ID NO: 1468027 - RNA, 19 nt, Human
cuucaucuggcaacaucuu

SEQ ID NO: 1468028 - RNA, 23 nt, Human
cuucaucuggcaacaucuuuauc

SEQ ID NO: 1468029 - RNA, 15 nt, Human
cuucaucuggaacca

SEQ ID NO: 1468030 - RNA, 13 nt, Human
cuucaucuggaac

SEQ ID NO: 1468031 - RNA, 12 nt, Human
cuucaucuggaa

SEQ ID NO: 1468032 - RNA, 11 nt, Human
cuucaucugga

SEQ ID NO: 1468033 - RNA, 12 nt, Human
cuucauaaucca

SEQ ID NO: 1468034 - RNA, 19 nt, Human
cuucauagagacuugggaa

SEQ ID NO: 1468035 - RNA, 15 nt, Human
cuucaugcauggaaa

SEQ ID NO: 1468036 - RNA, 13 nt, Human
cuucaugcaugga

SEQ ID NO: 1468037 - RNA, 10 nt, Human
cugggacagg

SEQ ID NO: 1468038 - RNA, 19 nt, Human
cuggacugucauagaaauu

SEQ ID NO: 1468039 - RNA, 20 nt, Human
cuggacugucauagaaauua

SEQ ID NO: 1468040 - RNA, 16 nt, Human
cuggacugugugcuca

SEQ ID NO: 1468041 - RNA, 24 nt, Human
cuggcaggcaggcucccagggaca

SEQ ID NO: 1468042 - RNA, 20 nt, Human
cuggcccccucccuggauga

SEQ ID NO: 1468043 - RNA, 18 nt, Human
cuggcaggcaggcuccca

SEQ ID NO: 1468044 - RNA, 18 nt, Human
cuggggccaggcuggguc

SEQ ID NO: 1468045 - RNA, 14 nt, Human
cuggggaagacagu

SEQ ID NO: 1468046 - RNA, 15 nt, Human
cuggggaagacagug

SEQ ID NO: 1468047 - RNA, 16 nt, Human
cuggggaagacagugg

SEQ ID NO: 1468048 - RNA, 17 nt, Human
cuggggaagacaguggc

SEQ ID NO: 1468049 - RNA, 18 nt, Human
cuggggaagacaguggcc

SEQ ID NO: 1468050 - RNA, 13 nt, Human
cugggcagaccuu

SEQ ID NO: 1468051 - RNA, 19 nt, Human
cuggugcacuggccccacc

SEQ ID NO: 1468052 - RNA, 16 nt, Human
cuggugcacuggcccc

SEQ ID NO: 1468053 - RNA, 14 nt, Human
cuggugagccaagc

SEQ ID NO: 1468054 - RNA, 17 nt, Human
cugguuugaagaauguu

SEQ ID NO: 1468055 - RNA, 23 nt, Human
cuguacuugcucuugaugccugg

SEQ ID NO: 1468056 - RNA, 22 nt, Human
cuguacuugcucuugaugccug

SEQ ID NO: 1468057 - RNA, 21 nt, Human
cuguaaaaugugggauuaugg

SEQ ID NO: 1468058 - RNA, 17 nt, Human
cuguaaaauaaaagguc

SEQ ID NO: 1468059 - RNA, 13 nt, Human
cuguaaaacuaag

SEQ ID NO: 1468060 - RNA, 15 nt, Human
cuguaaaauguggga

SEQ ID NO: 1468061 - RNA, 15 nt, Human
cuguaaacacagaca

SEQ ID NO: 1468062 - RNA, 22 nt, Human
cugucacccagguuggagugca

SEQ ID NO: 1468063 - RNA, 15 nt, Human
cugucgauuagacug

SEQ ID NO: 1468064 - RNA, 17 nt, Human
cugucgauuagacugga

SEQ ID NO: 1468065 - RNA, 19 nt, Human
cugucgauuagacuggaca

SEQ ID NO: 1468066 - RNA, 20 nt, Human
cugucgauuagacuggacag

SEQ ID NO: 1468067 - RNA, 23 nt, Human
cugucgauuagacuggacagcuu

SEQ ID NO: 1468068 - RNA, 22 nt, Human
cugugaagugagaccuuccuuu

SEQ ID NO: 1468069 - RNA, 17 nt, Human
cugugaagugagaccuu

SEQ ID NO: 1468070 - RNA, 13 nt, Human
cuggacugugugc

SEQ ID NO: 1468071 - RNA, 18 nt, Human
cuggacugucauagaaau

SEQ ID NO: 1468072 - RNA, 16 nt, Human
cuggaacugucucuca

SEQ ID NO: 1468073 - RNA, 18 nt, Human
cuggaacugucucucaug

SEQ ID NO: 1468074 - RNA, 19 nt, Human
cuggaacugucucucauga

SEQ ID NO: 1468075 - RNA, 16 nt, Human
cuggaacuugaacuga

SEQ ID NO: 1468076 - RNA, 19 nt, Human
cuggaacuugaacugauuc

SEQ ID NO: 1468077 - RNA, 16 nt, Human
cuggaaccaucagaaa

SEQ ID NO: 1468078 - RNA, 15 nt, Human
cuggaaccaucagaa

SEQ ID NO: 1468079 - RNA, 21 nt, Human
cuggaacacuagacaagccag

SEQ ID NO: 1468080 - RNA, 22 nt, Human
cuggaacacuagacaagccaga

SEQ ID NO: 1468081 - RNA, 23 nt, Human
cuggaacacuagacaagccagaa

SEQ ID NO: 1468082 - RNA, 20 nt, Human
cuggaacacuagacaagcca

SEQ ID NO: 1468083 - RNA, 21 nt, Human
cuggaaaucaggguuaguauu

SEQ ID NO: 1468084 - RNA, 18 nt, Human
cugcuuuuuauggccugu

SEQ ID NO: 1468085 - RNA, 17 nt, Human
cugcuuuuuauggccug

SEQ ID NO: 1468086 - RNA, 15 nt, Human
cugcuacaauguccu

SEQ ID NO: 1468087 - RNA, 13 nt, Human
cugcucagacaga

SEQ ID NO: 1468088 - RNA, 14 nt, Human
cugcucagcccugc

SEQ ID NO: 1468089 - RNA, 15 nt, Human
cugcucagcccugca

SEQ ID NO: 1468090 - RNA, 18 nt, Human
cugcucagcccugcacca

SEQ ID NO: 1468091 - RNA, 21 nt, Human
cugcucagcccugcaccaugc

SEQ ID NO: 1468092 - RNA, 20 nt, Human
cugccugguauauccaaaag

SEQ ID NO: 1468093 - RNA, 13 nt, Human
cugcccuguaccc

SEQ ID NO: 1468094 - RNA, 21 nt, Human
cugcccuguaccccagcacuu

SEQ ID NO: 1468095 - RNA, 21 nt, Human
cugccccuacccuggacuugc

SEQ ID NO: 1468096 - RNA, 17 nt, Human
cugccaagacugcugug

SEQ ID NO: 1468097 - RNA, 21 nt, Human
cugccaagacugcuguggcca

SEQ ID NO: 1468098 - RNA, 13 nt, Human
cugccaagccaug

SEQ ID NO: 1468099 - RNA, 20 nt, Human
cugccaagacugcuguggcc

SEQ ID NO: 1468100 - RNA, 12 nt, Human
cugccaagccau

SEQ ID NO: 1468101 - RNA, 23 nt, Human
cugcauugagcuugcaugcuugc

SEQ ID NO: 1468102 - RNA, 17 nt, Human
cugcauugagcuugcau

SEQ ID NO: 1468103 - RNA, 23 nt, Human
cugcauuauuggaauauaauugu

SEQ ID NO: 1468104 - RNA, 20 nt, Human
cucuuagaugcaguucugaa

SEQ ID NO: 1468105 - RNA, 21 nt, Human
cucuuagaugcaguucugaag

SEQ ID NO: 1468106 - RNA, 17 nt, Human
cugaaaauuauuuaaac

SEQ ID NO: 1468107 - RNA, 12 nt, Human
cugaaaaugugc

SEQ ID NO: 1468108 - RNA, 13 nt, Human
cugaaaaugugcu

SEQ ID NO: 1468109 - RNA, 21 nt, Human
cucucacuuguuuuauuuaac

SEQ ID NO: 1468110 - RNA, 19 nt, Human
cucucaauauucaauaaag

SEQ ID NO: 1468111 - RNA, 10 nt, Human
cucucaauau

SEQ ID NO: 1468112 - RNA, 18 nt, Human
cucucaauauucaauaaa

SEQ ID NO: 1468113 - RNA, 17 nt, Human
cucucaaagcaaauaau

SEQ ID NO: 1468114 - RNA, 15 nt, Human
cucuccccaugaugu

SEQ ID NO: 1468115 - RNA, 15 nt, Human
cucuccggucucucu

SEQ ID NO: 1468116 - RNA, 20 nt, Human
cucucuggaagccccugggc

SEQ ID NO: 1468117 - RNA, 19 nt, Human
cucugaagaacucucugga

SEQ ID NO: 1468118 - RNA, 18 nt, Human
cuccguccaggagccugg

SEQ ID NO: 1468119 - RNA, 19 nt, Human
cuccguccaggagccuggc

SEQ ID NO: 1468120 - RNA, 20 nt, Human
cuccguccaggagccugugc

SEQ ID NO: 1468121 - RNA, 22 nt, Human
cuccguccaggagccugugccu

SEQ ID NO: 1468122 - RNA, 12 nt, Human
cuccguguggga

SEQ ID NO: 1468123 - RNA, 14 nt, Human
cuccgugugggaga

SEQ ID NO: 1468124 - RNA, 18 nt, Human
cuccgugugggagaccgg

SEQ ID NO: 1468125 - RNA, 15 nt, Human
cucuuagaugcaguu

SEQ ID NO: 1468126 - RNA, 22 nt, Human
cucuguauuugaaucagccuac

SEQ ID NO: 1468127 - RNA, 18 nt, Human
cucuguaauugaauauua

SEQ ID NO: 1468128 - RNA, 19 nt, Human
cucuguaauugaauauuau

SEQ ID NO: 1468129 - RNA, 15 nt, Human
cucuguaaagcuaaa

SEQ ID NO: 1468130 - RNA, 21 nt, Human
cucuguaaagcuaaaauaaag

SEQ ID NO: 1468131 - RNA, 23 nt, Human
cucuguaaguagaugcauuuggg

SEQ ID NO: 1468132 - RNA, 18 nt, Human
cuccaacccuagcaaaag

SEQ ID NO: 1468133 - RNA, 16 nt, Human
cuccaaagucucugga

SEQ ID NO: 1468134 - RNA, 12 nt, Human
cuccaacaauaa

SEQ ID NO: 1468135 - RNA, 13 nt, Human
cucaugaauguaa

SEQ ID NO: 1468136 - RNA, 16 nt, Human
cucaucuuucuuccaa

SEQ ID NO: 1468137 - RNA, 14 nt, Human
cucaucuuuuuacu

SEQ ID NO: 1468138 - RNA, 12 nt, Human
cucaugaaccuc

SEQ ID NO: 1468139 - RNA, 21 nt, Human
cucaugaaccucaagcugcau

SEQ ID NO: 1468140 - RNA, 12 nt, Human
cucaugaaugua

SEQ ID NO: 1468141 - RNA, 20 nt, Human
cucaguguccucaggggccu

SEQ ID NO: 1468142 - RNA, 20 nt, Human
cucaucuuucccuccuuggu

SEQ ID NO: 1468143 - RNA, 19 nt, Human
cucaucuuucccuccuugg

SEQ ID NO: 1468144 - RNA, 18 nt, Human
cucaucuuucccuccuug

SEQ ID NO: 1468145 - RNA, 17 nt, Human
cucaucuuucccuccuu

SEQ ID NO: 1468146 - RNA, 16 nt, Human
cucaucuuucccuccu

SEQ ID NO: 1468147 - RNA, 15 nt, Human
cucaucuuucccucc

SEQ ID NO: 1468148 - RNA, 14 nt, Human
cucaucuuucccuc

SEQ ID NO: 1468149 - RNA, 18 nt, Human
cucagccucccaaguaac

SEQ ID NO: 1468150 - RNA, 13 nt, Human
cucaggccagagc

SEQ ID NO: 1468151 - RNA, 16 nt, Human
cucaggccagagccaa

SEQ ID NO: 1468152 - RNA, 17 nt, Human
cucaggccagagccaag

SEQ ID NO: 1468153 - RNA, 18 nt, Human
cucaggccagagccaagg

SEQ ID NO: 1468154 - RNA, 20 nt, Human
cucaggcccccaccuggcuc

SEQ ID NO: 1468155 - RNA, 21 nt, Human
cucaggcccccaccuggcuca

SEQ ID NO: 1468156 - RNA, 23 nt, Human
cuccagguauucguuaucuaaua

SEQ ID NO: 1468157 - RNA, 19 nt, Human
cuccaggguggcagcaaca

SEQ ID NO: 1468158 - RNA, 14 nt, Human
cuccccuccauccc

SEQ ID NO: 1468159 - RNA, 15 nt, Human
cuccccuccaucccu

SEQ ID NO: 1468160 - RNA, 16 nt, Human
cuccccuccaucccug

SEQ ID NO: 1468161 - RNA, 19 nt, Human
cuccccuccaucccuggcc

SEQ ID NO: 1468162 - RNA, 23 nt, Human
cuccccuccaucccuggcccccu

SEQ ID NO: 1468163 - RNA, 13 nt, Human
cucccuccucugc

SEQ ID NO: 1468164 - RNA, 14 nt, Human
cucccuccucugcc

SEQ ID NO: 1468165 - RNA, 14 nt, Human
cgugucuggcacag

SEQ ID NO: 1468166 - RNA, 21 nt, Human
cgugucuggcacagccuggcu

SEQ ID NO: 1468167 - RNA, 20 nt, Human
cgugagcauguuuggaaggg

SEQ ID NO: 1468168 - RNA, 15 nt, Human
cgugacgucugggug

SEQ ID NO: 1468169 - RNA, 20 nt, Human
cgugacgucuggguggcccu

SEQ ID NO: 1468170 - RNA, 16 nt, Human
cuaagaaacuuaaauu

SEQ ID NO: 1468171 - RNA, 22 nt, Human
cuaagaaacauuuauauugaua

SEQ ID NO: 1468172 - RNA, 19 nt, Human
cuaagaaacauuuauauug

SEQ ID NO: 1468173 - RNA, 20 nt, Human
cuaagaaacauuuauauuga

SEQ ID NO: 1468174 - RNA, 21 nt, Human
cuaagaaacauuuauauugau

SEQ ID NO: 1468175 - RNA, 12 nt, Human
cuaagaaagaac

SEQ ID NO: 1468176 - RNA, 15 nt, Human
cuaagaaagaacacg

SEQ ID NO: 1468177 - RNA, 12 nt, Human
cuaaccugccga

SEQ ID NO: 1468178 - RNA, 19 nt, Human
cuaaccugccgagagucca

SEQ ID NO: 1468179 - RNA, 21 nt, Human
cuaaccugccgagaguccauc

SEQ ID NO: 1468180 - RNA, 18 nt, Human
cuaccucuccagccucag

SEQ ID NO: 1468181 - RNA, 15 nt, Human
cuacaugaaacagaa

SEQ ID NO: 1468182 - RNA, 16 nt, Human
cuacaugaaacagaaa

SEQ ID NO: 1468183 - RNA, 18 nt, Human
cuacaugaaacagaaaca

SEQ ID NO: 1468184 - RNA, 15 nt, Human
cuacauaauuuaguu

SEQ ID NO: 1468185 - RNA, 13 nt, Human
cuaauuuuuuugu

SEQ ID NO: 1468186 - RNA, 16 nt, Human
cuaauuuuuuuguauu

SEQ ID NO: 1468187 - RNA, 20 nt, Human
cuaauuuuuuuguauuuuag

SEQ ID NO: 1468188 - RNA, 21 nt, Human
cuaauuuuuuuguauuuuagc

SEQ ID NO: 1468189 - RNA, 20 nt, Human
cuaauuuuuguauuuuuagu

SEQ ID NO: 1468190 - RNA, 13 nt, Human
cuaauuuuuguau

SEQ ID NO: 1468191 - RNA, 23 nt, Human
cuaauuuuuguauuuuuaguaga

SEQ ID NO: 1468192 - RNA, 14 nt, Human
cuaauuuuuuguug

SEQ ID NO: 1468193 - RNA, 16 nt, Human
cuaauuuuuuguuguu

SEQ ID NO: 1468194 - RNA, 11 nt, Human
cuaauuuuugu

SEQ ID NO: 1468195 - RNA, 21 nt, Human
cuaauuuuuauuuuugcugag

SEQ ID NO: 1468196 - RNA, 12 nt, Human
cuaauuuauaaa

SEQ ID NO: 1468197 - RNA, 18 nt, Human
cuaauuuuuauuuuugcu

SEQ ID NO: 1468198 - RNA, 16 nt, Human
cuacaaccuccgccuc

SEQ ID NO: 1468199 - RNA, 15 nt, Human
cuacaaccaauggaa

SEQ ID NO: 1468200 - RNA, 22 nt, Human
cuaauuggcaugaaggugucau

SEQ ID NO: 1468201 - RNA, 23 nt, Human
cuaguugaucagcuuauugucua

SEQ ID NO: 1468202 - RNA, 16 nt, Human
cuauaaccagacacau

SEQ ID NO: 1468203 - RNA, 17 nt, Human
cuauaagaacuuugagc

SEQ ID NO: 1468204 - RNA, 19 nt, Human
cuagccugcauugagcuug

SEQ ID NO: 1468205 - RNA, 17 nt, Human
cuagcccuccuuuuucc

SEQ ID NO: 1468206 - RNA, 18 nt, Human
cuagcccuccuuuuucca

SEQ ID NO: 1468207 - RNA, 19 nt, Human
cuagcccuccuuuuuccaa

SEQ ID NO: 1468208 - RNA, 13 nt, Human
cuagcccucucac

SEQ ID NO: 1468209 - RNA, 18 nt, Human
cuagcccucucacauuua

SEQ ID NO: 1468210 - RNA, 19 nt, Human
cuagcccucucacauuuau

SEQ ID NO: 1468211 - RNA, 14 nt, Human
cuaccugagcuaaa

SEQ ID NO: 1468212 - RNA, 14 nt, Human
cuagaacacaggca

SEQ ID NO: 1468213 - RNA, 19 nt, Human
cuagaacacaggcaaaauc

SEQ ID NO: 1468214 - RNA, 21 nt, Human
cuagaacacaggcaaaauccu

SEQ ID NO: 1468215 - RNA, 22 nt, Human
cuagaacacaggcaaaauccuu

SEQ ID NO: 1468216 - RNA, 20 nt, Human
cuagccaaaccaggacccug

SEQ ID NO: 1468217 - RNA, 16 nt, Human
cuagccaaaccaggac

SEQ ID NO: 1468218 - RNA, 17 nt, Human
cggagucaaaaauuaaa

SEQ ID NO: 1468219 - RNA, 17 nt, Human
cggcggccccuagcgcu

SEQ ID NO: 1468220 - RNA, 23 nt, Human
cggcuccucgagaucccaacacu

SEQ ID NO: 1468221 - RNA, 13 nt, Human
cggcuccucaggg

SEQ ID NO: 1468222 - RNA, 14 nt, Human
cggcuccucaggga

SEQ ID NO: 1468223 - RNA, 20 nt, Human
cggcuccucagggacucagg

SEQ ID NO: 1468224 - RNA, 15 nt, Human
cgccggaucugaggg

SEQ ID NO: 1468225 - RNA, 15 nt, Human
cgagugcucauuuca

SEQ ID NO: 1468226 - RNA, 12 nt, Human
ccuuuugucucu

SEQ ID NO: 1468227 - RNA, 22 nt, Human
ccuuuuuuaggaagcaagcuua

SEQ ID NO: 1468228 - RNA, 10 nt, Human
ccuucuggcc

SEQ ID NO: 1468229 - RNA, 20 nt, Human
ccuucugggcagaccuugac

SEQ ID NO: 1468230 - RNA, 16 nt, Human
ccuucuggccuuguaa

SEQ ID NO: 1468231 - RNA, 18 nt, Human
ccagagugcugaaggaau

SEQ ID NO: 1468232 - RNA, 15 nt, Human
ccagauccuggaaau

SEQ ID NO: 1468233 - RNA, 16 nt, Human
ccagagucccugccug

SEQ ID NO: 1468234 - RNA, 17 nt, Human
ccagagucccugccugg

SEQ ID NO: 1468235 - RNA, 18 nt, Human
ccagagucccugccugga

SEQ ID NO: 1468236 - RNA, 19 nt, Human
ccagagucccugccuggac

SEQ ID NO: 1468237 - RNA, 22 nt, Human
ccagagucccugccuggaccag

SEQ ID NO: 1468238 - RNA, 20 nt, Human
ccaggaaagcgccuccaacc

SEQ ID NO: 1468239 - RNA, 19 nt, Human
ccaggaagaucccccagaa

SEQ ID NO: 1468240 - RNA, 18 nt, Human
ccaggaagaucccccaga

SEQ ID NO: 1468241 - RNA, 17 nt, Human
ccaggaagaucccccag

SEQ ID NO: 1468242 - RNA, 14 nt, Human
ccaggaacugggcc

SEQ ID NO: 1468243 - RNA, 18 nt, Human
ccagcagauuuccagccu

SEQ ID NO: 1468244 - RNA, 12 nt, Human
ccaggcacugca

SEQ ID NO: 1468245 - RNA, 13 nt, Human
ccaggcacugcaa

SEQ ID NO: 1468246 - RNA, 17 nt, Human
ccaggcaccaaaagaag

SEQ ID NO: 1468247 - RNA, 17 nt, Human
ccaggcaccaggacuag

SEQ ID NO: 1468248 - RNA, 15 nt, Human
ccaguuguccuccuu

SEQ ID NO: 1468249 - RNA, 14 nt, Human
ccaguuguccuccu

SEQ ID NO: 1468250 - RNA, 13 nt, Human
ccaguuguccucc

SEQ ID NO: 1468251 - RNA, 12 nt, Human
ccaguuguccuc

SEQ ID NO: 1468252 - RNA, 16 nt, Human
ccaguuguccuccuuc

SEQ ID NO: 1468253 - RNA, 12 nt, Human
ccaugagcuccu

SEQ ID NO: 1468254 - RNA, 16 nt, Human
ccaugucaaacaaaua

SEQ ID NO: 1468255 - RNA, 14 nt, Human
cccauccuagaggc

SEQ ID NO: 1468256 - RNA, 15 nt, Human
cccauauuguaaaac

SEQ ID NO: 1468257 - RNA, 18 nt, Human
cccauauuguaaaacagg

SEQ ID NO: 1468258 - RNA, 19 nt, Human
cccauauuguaaaacaggu

SEQ ID NO: 1468259 - RNA, 20 nt, Human
cccacccucguggacaccug

SEQ ID NO: 1468260 - RNA, 23 nt, Human
cccacccucguggacaccugccc

SEQ ID NO: 1468261 - RNA, 22 nt, Human
cccacccucguggacaccugcc

SEQ ID NO: 1468262 - RNA, 15 nt, Human
cccacuucagccucc

SEQ ID NO: 1468263 - RNA, 13 nt, Human
cccacuucagccu

SEQ ID NO: 1468264 - RNA, 14 nt, Human
cccacugccuuuga

SEQ ID NO: 1468265 - RNA, 18 nt, Human
ccccuuugcugacccucc

SEQ ID NO: 1468266 - RNA, 14 nt, Human
cccgggagcucagg

SEQ ID NO: 1468267 - RNA, 14 nt, Human
ccccagagccacag

SEQ ID NO: 1468268 - RNA, 13 nt, Human
ccccagagccaca

SEQ ID NO: 1468269 - RNA, 16 nt, Human
ccccagagccacaguu

SEQ ID NO: 1468270 - RNA, 15 nt, Human
ccccagagccacagu

SEQ ID NO: 1468271 - RNA, 18 nt, Human
ccccauuuagguuucuga

SEQ ID NO: 1468272 - RNA, 13 nt, Human
ccccaucucaggc

SEQ ID NO: 1468273 - RNA, 14 nt, Human
ccccaucucaggcc

SEQ ID NO: 1468274 - RNA, 17 nt, Human
ccccaucucaggccaga

SEQ ID NO: 1468275 - RNA, 20 nt, Human
cccauuuaaauuuuuuuccu

SEQ ID NO: 1468276 - RNA, 14 nt, Human
ccccgacuuuuguu

SEQ ID NO: 1468277 - RNA, 23 nt, Human
ccugacccuccaccgcagaagga

SEQ ID NO: 1468278 - RNA, 22 nt, Human
ccugacccucaucuuucuucca

SEQ ID NO: 1468279 - RNA, 13 nt, Human
ccugaccucaggc

SEQ ID NO: 1468280 - RNA, 18 nt, Human
ccugacugccaagccaug

SEQ ID NO: 1468281 - RNA, 16 nt, Human
ccugacugccaagcca

SEQ ID NO: 1468282 - RNA, 15 nt, Human
ccugacugccaagcc

SEQ ID NO: 1468283 - RNA, 14 nt, Human
ccugacugccaagc

SEQ ID NO: 1468284 - RNA, 13 nt, Human
ccugacugccaag

SEQ ID NO: 1468285 - RNA, 15 nt, Human
ccugcagacucacug

SEQ ID NO: 1468286 - RNA, 15 nt, Human
ccucucugcaggucc

SEQ ID NO: 1468287 - RNA, 13 nt, Human
ccucucugcaggu

SEQ ID NO: 1468288 - RNA, 22 nt, Human
ccucucugcaggucccuaauaa

SEQ ID NO: 1468289 - RNA, 21 nt, Human
ccucucugcaggucccuaaua

SEQ ID NO: 1468290 - RNA, 23 nt, Human
ccucucugcaggucccuaauaaa

SEQ ID NO: 1468291 - RNA, 16 nt, Human
ccuggaugacauuaaa

SEQ ID NO: 1468292 - RNA, 19 nt, Human
ccuggaggggcuggggacu

SEQ ID NO: 1468293 - RNA, 18 nt, Human
ccugcccagugcacuugc

SEQ ID NO: 1468294 - RNA, 22 nt, Human
ccugcccagugcacuugcugga

SEQ ID NO: 1468295 - RNA, 16 nt, Human
ccugcccaugggagcu

SEQ ID NO: 1468296 - RNA, 17 nt, Human
cccuucuuuccacagaa

SEQ ID NO: 1468297 - RNA, 15 nt, Human
cccugugccuuguca

SEQ ID NO: 1468298 - RNA, 20 nt, Human
cccugugccuugucacgcca

SEQ ID NO: 1468299 - RNA, 22 nt, Human
cccugugccuugucacgccaga

SEQ ID NO: 1468300 - RNA, 17 nt, Human
cccucacccauccuaga

SEQ ID NO: 1468301 - RNA, 13 nt, Human
cccucacccaucc

SEQ ID NO: 1468302 - RNA, 11 nt, Human
cccucacccau

SEQ ID NO: 1468303 - RNA, 9 nt, Human
cccuggccc

SEQ ID NO: 1468304 - RNA, 13 nt, Human
cccuggcccccuc

SEQ ID NO: 1468305 - RNA, 21 nt, Human
cccuggcccccucccuggaug

SEQ ID NO: 1468306 - RNA, 20 nt, Human
cccuggcccccucccuggau

SEQ ID NO: 1468307 - RNA, 23 nt, Human
ccuaauaaagcuguguggcaguc

SEQ ID NO: 1468308 - RNA, 20 nt, Human
ccuaauaauaucccacuggg

SEQ ID NO: 1468309 - RNA, 19 nt, Human
ccuaauaauaucccacugg

SEQ ID NO: 1468310 - RNA, 14 nt, Human
ccuaauaaagcugu

SEQ ID NO: 1468311 - RNA, 19 nt, Human
ccuaagcuggagugcagug

SEQ ID NO: 1468312 - RNA, 17 nt, Human
ccuaagccagcugcccc

SEQ ID NO: 1468313 - RNA, 18 nt, Human
ccuaagggauccugccug

SEQ ID NO: 1468314 - RNA, 18 nt, Human
ccuaagcuggagugcagu

SEQ ID NO: 1468315 - RNA, 18 nt, Human
ccuaagccagcugccccc

SEQ ID NO: 1468316 - RNA, 16 nt, Human
ccuaagccagcugccc

SEQ ID NO: 1468317 - RNA, 14 nt, Human
ccuaagccagcugc

SEQ ID NO: 1468318 - RNA, 16 nt, Human
ccguagguuauuuuca

SEQ ID NO: 1468319 - RNA, 19 nt, Human
ccggcuaauuuuuguauuu

SEQ ID NO: 1468320 - RNA, 15 nt, Human
ccggcuaauuuuugu

SEQ ID NO: 1468321 - RNA, 22 nt, Human
ccgucaaaacagauuguuugca

SEQ ID NO: 1468322 - RNA, 17 nt, Human
ccgucaccccuguuucu

SEQ ID NO: 1468323 - RNA, 12 nt, Human
ccgucagugcug

SEQ ID NO: 1468324 - RNA, 16 nt, Human
ccguccaggagccugg

SEQ ID NO: 1468325 - RNA, 18 nt, Human
ccguccaggagccugugc

SEQ ID NO: 1468326 - RNA, 15 nt, Human
ccuauuuuaauaaac

SEQ ID NO: 1468327 - RNA, 16 nt, Human
ccuauuuccagaaaua

SEQ ID NO: 1468328 - RNA, 19 nt, Human
ccuauugugcaauguaaau

SEQ ID NO: 1468329 - RNA, 15 nt, Human
ccucaagcugcaucu

SEQ ID NO: 1468330 - RNA, 20 nt, Human
ccuccaaggaggggcuguaa

SEQ ID NO: 1468331 - RNA, 21 nt, Human
ccuccaaggaggggcuguaaa

SEQ ID NO: 1468332 - RNA, 14 nt, Human
ccucccaagcaguu

SEQ ID NO: 1468333 - RNA, 12 nt, Human
auuguugcauua

SEQ ID NO: 1468334 - RNA, 21 nt, Human
auuguuguacacagaaauaca

SEQ ID NO: 1468335 - RNA, 15 nt, Human
auuguuaguuucuga

SEQ ID NO: 1468336 - RNA, 12 nt, Human
auugcugaaauu

SEQ ID NO: 1468337 - RNA, 13 nt, Human
auugcugaaauuu

SEQ ID NO: 1468338 - RNA, 16 nt, Human
auugcugaaauuuuau

SEQ ID NO: 1468339 - RNA, 13 nt, Human
auugaguuggaau

SEQ ID NO: 1468340 - RNA, 22 nt, Human
auugcuauguuuugacauuuuu

SEQ ID NO: 1468341 - RNA, 16 nt, Human
auucuugauguaaaau

SEQ ID NO: 1468342 - RNA, 17 nt, Human
auucuugauguaaaauc

SEQ ID NO: 1468343 - RNA, 13 nt, Human
auucuucugaacu

SEQ ID NO: 1468344 - RNA, 21 nt, Human
auucuucugaacucaaacuga

SEQ ID NO: 1468345 - RNA, 16 nt, Human
auucuuucccaacacc

SEQ ID NO: 1468346 - RNA, 19 nt, Human
auucuuucccaacaccucu

SEQ ID NO: 1468347 - RNA, 12 nt, Human
auucuugaugua

SEQ ID NO: 1468348 - RNA, 14 nt, Human
auucuugauguaaa

SEQ ID NO: 1468349 - RNA, 18 nt, Human
auuagcagucccuccaca

SEQ ID NO: 1468350 - RNA, 22 nt, Human
auuagcaauugacugucacugu

SEQ ID NO: 1468351 - RNA, 17 nt, Human
auuagccagugaaaaac

SEQ ID NO: 1468352 - RNA, 19 nt, Human
auuacaguggggaaugaag

SEQ ID NO: 1468353 - RNA, 17 nt, Human
auuacaggcgugagcca

SEQ ID NO: 1468354 - RNA, 15 nt, Human
auuacagcuggagaa

SEQ ID NO: 1468355 - RNA, 22 nt, Human
auuaauuccuucagcacuuuag

SEQ ID NO: 1468356 - RNA, 17 nt, Human
auuacaacggagucaaa

SEQ ID NO: 1468357 - RNA, 15 nt, Human
auuacaacggaguca

SEQ ID NO: 1468358 - RNA, 16 nt, Human
auucaaauguauuaca

SEQ ID NO: 1468359 - RNA, 18 nt, Human
auucaaauguauuacagu

SEQ ID NO: 1468360 - RNA, 18 nt, Human
auucaaugccccugaauu

SEQ ID NO: 1468361 - RNA, 20 nt, Human
auucaaugccccugaauuua

SEQ ID NO: 1468362 - RNA, 16 nt, Human
auucaauucaaagcug

SEQ ID NO: 1468363 - RNA, 18 nt, Human
auuaugaauuacauuugu

SEQ ID NO: 1468364 - RNA, 14 nt, Human
auuaugaauuacau

SEQ ID NO: 1468365 - RNA, 17 nt, Human
auuaugaauuacauuug

SEQ ID NO: 1468366 - RNA, 18 nt, Human
auuaugaaacuuuuggaa

SEQ ID NO: 1468367 - RNA, 22 nt, Human
auuaucuuuucauacauuuucu

SEQ ID NO: 1468368 - RNA, 23 nt, Human
auuaucuuuucauacauuuucua

SEQ ID NO: 1468369 - RNA, 21 nt, Human
auucauaauuauuauuuggcc

SEQ ID NO: 1468370 - RNA, 19 nt, Human
auuuuauagcuacuaauuu

SEQ ID NO: 1468371 - RNA, 13 nt, Human
auuuguuucuacu

SEQ ID NO: 1468372 - RNA, 15 nt, Human
auuuguuggaaugaa

SEQ ID NO: 1468373 - RNA, 17 nt, Human
auuuguuuaaaaaguaa

SEQ ID NO: 1468374 - RNA, 16 nt, Human
auuuguuuaaaaagua

SEQ ID NO: 1468375 - RNA, 13 nt, Human
auuuguugagagu

SEQ ID NO: 1468376 - RNA, 22 nt, Human
auuuguugagagugugaccaaa

SEQ ID NO: 1468377 - RNA, 13 nt, Human
auuuguuggaaug

SEQ ID NO: 1468378 - RNA, 14 nt, Human
auuuguuggaauga

SEQ ID NO: 1468379 - RNA, 19 nt, Human
auuugugcccccaaccauu

SEQ ID NO: 1468380 - RNA, 14 nt, Human
auuugcucauggaa

SEQ ID NO: 1468381 - RNA, 17 nt, Human
auuugcucauggaauug

SEQ ID NO: 1468382 - RNA, 18 nt, Human
auuugcuuuuucaccaga

SEQ ID NO: 1468383 - RNA, 16 nt, Human
auuugccuguaacaag

SEQ ID NO: 1468384 - RNA, 11 nt, Human
auuugccugua

SEQ ID NO: 1468385 - RNA, 13 nt, Human
auuugccuguaac

SEQ ID NO: 1468386 - RNA, 15 nt, Human
auuugccuguaacaa

SEQ ID NO: 1468387 - RNA, 22 nt, Human
auuugccuguaacaagccagau

SEQ ID NO: 1468388 - RNA, 22 nt, Human
auuugcagcugagagaaaauaa

SEQ ID NO: 1468389 - RNA, 20 nt, Human
caaacaggaucaguuaacua

SEQ ID NO: 1468390 - RNA, 15 nt, Human
caaacaggcucagag

SEQ ID NO: 1468391 - RNA, 14 nt, Human
caaacaggcucaga

SEQ ID NO: 1468392 - RNA, 19 nt, Human
caaaagggccaaagaacca

SEQ ID NO: 1468393 - RNA, 20 nt, Human
caaaagggccaaagaaccaa

SEQ ID NO: 1468394 - RNA, 16 nt, Human
caaaagauugcugaaa

SEQ ID NO: 1468395 - RNA, 19 nt, Human
caaaagauugcugaaauuu

SEQ ID NO: 1468396 - RNA, 20 nt, Human
caaaagauugcugaaauuuu

SEQ ID NO: 1468397 - RNA, 12 nt, Human
caacaauaaaua

SEQ ID NO: 1468398 - RNA, 13 nt, Human
caacaauucuaaa

SEQ ID NO: 1468399 - RNA, 15 nt, Human
caaauccuugaagau

SEQ ID NO: 1468400 - RNA, 17 nt, Human
caaauccuuagaucugg

SEQ ID NO: 1468401 - RNA, 21 nt, Human
caaauccuuagaucuggcaug

SEQ ID NO: 1468402 - RNA, 14 nt, Human
caacacuaacauga

SEQ ID NO: 1468403 - RNA, 21 nt, Human
caaagucucuggaauuugaaa

SEQ ID NO: 1468404 - RNA, 16 nt, Human
caaagugcaaggaccu

SEQ ID NO: 1468405 - RNA, 12 nt, Human
caaagugcaagg

SEQ ID NO: 1468406 - RNA, 15 nt, Human
caaagguugagaugu

SEQ ID NO: 1468407 - RNA, 11 nt, Human
caaagguuuuc

SEQ ID NO: 1468408 - RNA, 19 nt, Human
caaagguuuuccucuucua

SEQ ID NO: 1468409 - RNA, 22 nt, Human
caaagcaagcauucagaagaaa

SEQ ID NO: 1468410 - RNA, 23 nt, Human
caaagcaagcauucagaagaaaa

SEQ ID NO: 1468411 - RNA, 16 nt, Human
caaagcaauaauagua

SEQ ID NO: 1468412 - RNA, 14 nt, Human
caaagcaauaauag

SEQ ID NO: 1468413 - RNA, 19 nt, Human
cacuggggcaggggccggg

SEQ ID NO: 1468414 - RNA, 17 nt, Human
cacugggacuugcaaaa

SEQ ID NO: 1468415 - RNA, 18 nt, Human
cacugggagaaaugaaaa

SEQ ID NO: 1468416 - RNA, 18 nt, Human
cacugccagcauuucccu

SEQ ID NO: 1468417 - RNA, 22 nt, Human
cacugccagcauuucccuuccu

SEQ ID NO: 1468418 - RNA, 22 nt, Human
cacuuguguuuugcaagccaga

SEQ ID NO: 1468419 - RNA, 18 nt, Human
cacuugucauuguuauau

SEQ ID NO: 1468420 - RNA, 16 nt, Human
cacuugucaauaaaau

SEQ ID NO: 1468421 - RNA, 19 nt, Human
cacuuguguuuugcaagcc

SEQ ID NO: 1468422 - RNA, 20 nt, Human
cacuuauuccccauucuucc

SEQ ID NO: 1468423 - RNA, 21 nt, Human
cacuuauuggaacucugcuug

SEQ ID NO: 1468424 - RNA, 14 nt, Human
cacugguuugaaga

SEQ ID NO: 1468425 - RNA, 15 nt, Human
cacucuuucuuucaa

SEQ ID NO: 1468426 - RNA, 14 nt, Human
cacucuuucuuuca

SEQ ID NO: 1468427 - RNA, 14 nt, Human
cacuaguauuucua

SEQ ID NO: 1468428 - RNA, 23 nt, Human
caccugcccugcccugccaccug

SEQ ID NO: 1468429 - RNA, 22 nt, Human
caccugcccugcccugccaccu

SEQ ID NO: 1468430 - RNA, 21 nt, Human
caccugcccugcccugccacc

SEQ ID NO: 1468431 - RNA, 20 nt, Human
caccugcccugcccugccac

SEQ ID NO: 1468432 - RNA, 19 nt, Human
caccugcccugcccugcca

SEQ ID NO: 1468433 - RNA, 18 nt, Human
caccugcccugcccugcc

SEQ ID NO: 1468434 - RNA, 17 nt, Human
caccugcccugcccugc

SEQ ID NO: 1468435 - RNA, 23 nt, Human
cacccucguggacaccugcccug

SEQ ID NO: 1468436 - RNA, 21 nt, Human
cacccucguggacaccugccc

SEQ ID NO: 1468437 - RNA, 21 nt, Human
cacccucaugcugugugacuc

SEQ ID NO: 1468438 - RNA, 16 nt, Human
cacccucaugcugugu

SEQ ID NO: 1468439 - RNA, 14 nt, Human
cacccucaugcugu

SEQ ID NO: 1468440 - RNA, 13 nt, Human
cacccucaugcug

SEQ ID NO: 1468441 - RNA, 16 nt, Human
cacccuccagagacaa

SEQ ID NO: 1468442 - RNA, 17 nt, Human
cacacaugaaguccaag

SEQ ID NO: 1468443 - RNA, 22 nt, Human
cacacaugaaguccaagcauuu

SEQ ID NO: 1468444 - RNA, 23 nt, Human
cacacagggucugcaaggucuuu

SEQ ID NO: 1468445 - RNA, 21 nt, Human
cacaguaaaaauggaaacuau

SEQ ID NO: 1468446 - RNA, 17 nt, Human
cacagccucuuagaugc

SEQ ID NO: 1468447 - RNA, 21 nt, Human
cacagccucuuagaugcaguu

SEQ ID NO: 1468448 - RNA, 15 nt, Human
caaugcuguauuuua

SEQ ID NO: 1468449 - RNA, 16 nt, Human
caaugcuguauuuuaa

SEQ ID NO: 1468450 - RNA, 17 nt, Human
caaugcuguauuuuaaa

SEQ ID NO: 1468451 - RNA, 14 nt, Human
caauuuaaauguua

SEQ ID NO: 1468452 - RNA, 13 nt, Human
caauuuaaauguu

SEQ ID NO: 1468453 - RNA, 11 nt, Human
caauuuaaaug

SEQ ID NO: 1468454 - RNA, 19 nt, Human
caauucuuuuaacuguugu

SEQ ID NO: 1468455 - RNA, 22 nt, Human
caauucuucccuaucuuugcca

SEQ ID NO: 1468456 - RNA, 21 nt, Human
caauucuucccuaucuuugcc

SEQ ID NO: 1468457 - RNA, 15 nt, Human
caauucuugccaaau

SEQ ID NO: 1468458 - RNA, 14 nt, Human
caauuuaugaauug

SEQ ID NO: 1468459 - RNA, 22 nt, Human
caauaaagcugcugagaaucua

SEQ ID NO: 1468460 - RNA, 23 nt, Human
caauaaagcugcugagaaucuag

SEQ ID NO: 1468461 - RNA, 17 nt, Human
caauaaagcugcugaga

SEQ ID NO: 1468462 - RNA, 15 nt, Human
caauaaagcugcuga

SEQ ID NO: 1468463 - RNA, 15 nt, Human
caagcuauucaauuc

SEQ ID NO: 1468464 - RNA, 20 nt, Human
caaguauuuguuaauuuaga

SEQ ID NO: 1468465 - RNA, 22 nt, Human
caaguaugugggcagauuuuca

SEQ ID NO: 1468466 - RNA, 22 nt, Human
caaguauuuguuaauuuagaaa

SEQ ID NO: 1468467 - RNA, 12 nt, Human
caggguggcagc

SEQ ID NO: 1468468 - RNA, 15 nt, Human
cagggaggaggcaga

SEQ ID NO: 1468469 - RNA, 21 nt, Human
cagggaggaggcagagaagaa

SEQ ID NO: 1468470 - RNA, 23 nt, Human
caggacagcccuucuuuccacag

SEQ ID NO: 1468471 - RNA, 24 nt, Human
caggacagcccuucuuuccacaga

SEQ ID NO: 1468472 - RNA, 14 nt, Human
caggcacugcaaac

SEQ ID NO: 1468473 - RNA, 21 nt, Human
caggcacugcaaaccgccacc

SEQ ID NO: 1468474 - RNA, 17 nt, Human
caggaaaauugaaugca

SEQ ID NO: 1468475 - RNA, 13 nt, Human
caggaaaauugaa

SEQ ID NO: 1468476 - RNA, 21 nt, Human
cagcccccacugccuuugacc

SEQ ID NO: 1468477 - RNA, 24 nt, Human
cagccccgcguggaacucgugucu

SEQ ID NO: 1468478 - RNA, 18 nt, Human
cagccugcagacucacug

SEQ ID NO: 1468479 - RNA, 24 nt, Human
cagccucuccacucaugugacucu

SEQ ID NO: 1468480 - RNA, 20 nt, Human
cagauuugcuaauuuauccu

SEQ ID NO: 1468481 - RNA, 16 nt, Human
cagaucauugugaaau

SEQ ID NO: 1468482 - RNA, 22 nt, Human
cagaucauugugaaauuauuca

SEQ ID NO: 1468483 - RNA, 23 nt, Human
cagagcuggagaugaggccagac

SEQ ID NO: 1468484 - RNA, 22 nt, Human
cagagcuggagaugaggccaga

SEQ ID NO: 1468485 - RNA, 21 nt, Human
cagagcuggagaugaggccag

SEQ ID NO: 1468486 - RNA, 17 nt, Human
cagagcuggagaugagg

SEQ ID NO: 1468487 - RNA, 20 nt, Human
cagagaggccuuuuggaaug

SEQ ID NO: 1468488 - RNA, 13 nt, Human
cagagcgcacagg

SEQ ID NO: 1468489 - RNA, 15 nt, Human
cagagcgcacaggga

SEQ ID NO: 1468490 - RNA, 11 nt, Human
caucagcaaac

SEQ ID NO: 1468491 - RNA, 14 nt, Human
cauccuugagucaa

SEQ ID NO: 1468492 - RNA, 14 nt, Human
caugaccaguaaag

SEQ ID NO: 1468493 - RNA, 18 nt, Human
caugaccuaguuuuccau

SEQ ID NO: 1468494 - RNA, 16 nt, Human
caugauucaugccaau

SEQ ID NO: 1468495 - RNA, 21 nt, Human
caugauucaugccaauuagca

SEQ ID NO: 1468496 - RNA, 13 nt, Human
caugauucauuuu

SEQ ID NO: 1468497 - RNA, 14 nt, Human
caugauucauuuua

SEQ ID NO: 1468498 - RNA, 16 nt, Human
caugaauuaguuuuau

SEQ ID NO: 1468499 - RNA, 14 nt, Human
caugaauuugugaa

SEQ ID NO: 1468500 - RNA, 16 nt, Human
caugaauuugugaagg

SEQ ID NO: 1468501 - RNA, 21 nt, Human
caugauugguuucuaggcagu

SEQ ID NO: 1468502 - RNA, 18 nt, Human
caugauucauuuuaacau

SEQ ID NO: 1468503 - RNA, 14 nt, Human
caugauuccagcca

SEQ ID NO: 1468504 - RNA, 17 nt, Human
caugauuccagccauca

SEQ ID NO: 1468505 - RNA, 16 nt, Human
caugauuccagccauc

SEQ ID NO: 1468506 - RNA, 15 nt, Human
caugauuccagccau

SEQ ID NO: 1468507 - RNA, 14 nt, Human
caugcugcugggga

SEQ ID NO: 1468508 - RNA, 13 nt, Human
cauaaucuucugc

SEQ ID NO: 1468509 - RNA, 15 nt, Human
cauaaucuucugccu

SEQ ID NO: 1468510 - RNA, 21 nt, Human
cauaaucuucugccuucucau

SEQ ID NO: 1468511 - RNA, 22 nt, Human
cauaaucuucugccuucucaug

SEQ ID NO: 1468512 - RNA, 19 nt, Human
caguuuauauuuaacucuc

SEQ ID NO: 1468513 - RNA, 14 nt, Human
caguuuauauuuaa

SEQ ID NO: 1468514 - RNA, 17 nt, Human
caguuuauauuuaacuc

SEQ ID NO: 1468515 - RNA, 13 nt, Human
cauuuuuguauuu

SEQ ID NO: 1468516 - RNA, 20 nt, Human
cauuuuuguauuuuguuuaa

SEQ ID NO: 1468517 - RNA, 14 nt, Human
ccaaaacaauguuu

SEQ ID NO: 1468518 - RNA, 19 nt, Human
ccaaaaauguguaagaaca

SEQ ID NO: 1468519 - RNA, 12 nt, Human
ccaaaaauagcu

SEQ ID NO: 1468520 - RNA, 13 nt, Human
ccaaaaauagcua

SEQ ID NO: 1468521 - RNA, 12 nt, Human
cauuuccaagca

SEQ ID NO: 1468522 - RNA, 14 nt, Human
cauuucauuuccua

SEQ ID NO: 1468523 - RNA, 14 nt, Human
cauuuauuuugaca

SEQ ID NO: 1468524 - RNA, 22 nt, Human
cauggcuggagcuagaauuuga

SEQ ID NO: 1468525 - RNA, 14 nt, Human
cauggcuaacuggc

SEQ ID NO: 1468526 - RNA, 16 nt, Human
cauggcuaacuggcga

SEQ ID NO: 1468527 - RNA, 14 nt, Human
cauguuauuuguaa

SEQ ID NO: 1468528 - RNA, 23 nt, Human
cauguuauuuguaauagauguuu

SEQ ID NO: 1468529 - RNA, 19 nt, Human
cauuaggaaaaguugcuau

SEQ ID NO: 1468530 - RNA, 18 nt, Human
ccaaagugcugggauuaa

SEQ ID NO: 1468531 - RNA, 20 nt, Human
ccaaauccuuagaucuggca

SEQ ID NO: 1468532 - RNA, 21 nt, Human
ccaaauccuuagaucuggcau

SEQ ID NO: 1468533 - RNA, 12 nt, Human
ccaaauuaagag

SEQ ID NO: 1468534 - RNA, 17 nt, Human
ccaacuuggcugcagga

SEQ ID NO: 1468535 - RNA, 19 nt, Human
ccaacuaaugccuuacucu

SEQ ID NO: 1468536 - RNA, 20 nt, Human
ccaacuaaugccuuacucuu

SEQ ID NO: 1468537 - RNA, 14 nt, Human
ccaagcuguuuucu

SEQ ID NO: 1468538 - RNA, 17 nt, Human
ccaagcuguuuucuucu

SEQ ID NO: 1468539 - RNA, 18 nt, Human
ccaagcuguuuucuucua

SEQ ID NO: 1468540 - RNA, 22 nt, Human
augucuauaaaccgaacugaug

SEQ ID NO: 1468541 - RNA, 14 nt, Human
augucuauucagcu

SEQ ID NO: 1468542 - RNA, 15 nt, Human
augucuauucagcuu

SEQ ID NO: 1468543 - RNA, 16 nt, Human
augucuauucagcuuc

SEQ ID NO: 1468544 - RNA, 21 nt, Human
auguaguuuuuauauguugua

SEQ ID NO: 1468545 - RNA, 20 nt, Human
auguaguuuuuauauguugu

SEQ ID NO: 1468546 - RNA, 11 nt, Human
auguaucacua

SEQ ID NO: 1468547 - RNA, 16 nt, Human
auguaucauagaaaug

SEQ ID NO: 1468548 - RNA, 17 nt, Human
auguaucauagaaaugu

SEQ ID NO: 1468549 - RNA, 11 nt, Human
uuugcucaugg

SEQ ID NO: 1468550 - RNA, 12 nt, Human
uuugcucaugga

SEQ ID NO: 1468551 - RNA, 21 nt, Human
uuugcccugcugcccuccccc

SEQ ID NO: 1468552 - RNA, 17 nt, Human
uuugcccugcugcccuc

SEQ ID NO: 1468553 - RNA, 23 nt, Human
uuugcccugcugcccucccccuc

SEQ ID NO: 1468554 - RNA, 16 nt, Human
uuugcuaucugggcug

SEQ ID NO: 1468555 - RNA, 13 nt, Human
uuugcuaguuuuu

SEQ ID NO: 1468556 - RNA, 12 nt, Human
uuugcacagcuc

SEQ ID NO: 1468557 - RNA, 16 nt, Human
uuugcacagcucuccg

SEQ ID NO: 1468558 - RNA, 18 nt, Human
uuugcccagaaagaagau

SEQ ID NO: 1468559 - RNA, 13 nt, Human
uuugcucauggaa

SEQ ID NO: 1468560 - RNA, 18 nt, Human
uuugcucagcuucuccaa

SEQ ID NO: 1468561 - RNA, 23 nt, Human
uuuggccaaugcaccuaaagaaa

SEQ ID NO: 1468562 - RNA, 16 nt, Human
uuuggcuaguccuugu

SEQ ID NO: 1468563 - RNA, 13 nt, Human
uuuggcuuucagg

SEQ ID NO: 1468564 - RNA, 14 nt, Human
uuugggagagacuu

SEQ ID NO: 1468565 - RNA, 23 nt, Human
uuugggagagacuuguuuuggau

SEQ ID NO: 1468566 - RNA, 17 nt, Human
uuuguagaagucacauu

SEQ ID NO: 1468567 - RNA, 23 nt, Human
uuugucucugcaaacugccuucu

SEQ ID NO: 1468568 - RNA, 14 nt, Human
uuuguacugaaaaa

SEQ ID NO: 1468569 - RNA, 15 nt, Human
uuuguacugaaaaau

SEQ ID NO: 1468570 - RNA, 14 nt, Human
augucuguggauuu

SEQ ID NO: 1468571 - RNA, 14 nt, Human
augucuguucuaca

SEQ ID NO: 1468572 - RNA, 16 nt, Human
augucuguucuacaua

SEQ ID NO: 1468573 - RNA, 16 nt, Human
uuuuaaguaaggaauu

SEQ ID NO: 1468574 - RNA, 15 nt, Human
uuuuaaguauuuagg

SEQ ID NO: 1468575 - RNA, 14 nt, Human
uuuuaaaagaauga

SEQ ID NO: 1468576 - RNA, 15 nt, Human
uuuuaaaagaaugau

SEQ ID NO: 1468577 - RNA, 14 nt, Human
uuuuaacauuccuc

SEQ ID NO: 1468578 - RNA, 13 nt, Human
uuuuaacauuccu

SEQ ID NO: 1468579 - RNA, 22 nt, Human
uuuuaaaaauuaaaucaaccuu

SEQ ID NO: 1468580 - RNA, 17 nt, Human
uuuuaaaaaauggucac

SEQ ID NO: 1468581 - RNA, 16 nt, Human
uuuuaaaaaaugguca

SEQ ID NO: 1468582 - RNA, 14 nt, Human
uuuuaaaaaagcuu

SEQ ID NO: 1468583 - RNA, 15 nt, Human
uuuuaaaaaagcuua

SEQ ID NO: 1468584 - RNA, 17 nt, Human
uuuuaaaaaagcuuaaa

SEQ ID NO: 1468585 - RNA, 20 nt, Human
uuuuaaaaaagcuuaaaacu

SEQ ID NO: 1468586 - RNA, 21 nt, Human
uuuuaaaaaagcuuaaaacuu

SEQ ID NO: 1468587 - RNA, 22 nt, Human
uuuuaaaaaagcuuaaaacuuu

SEQ ID NO: 1468588 - RNA, 23 nt, Human
uuuuaaaaaagcuuaaaacuuug

SEQ ID NO: 1468589 - RNA, 13 nt, Human
uuuuaaaaaagaa

SEQ ID NO: 1468590 - RNA, 14 nt, Human
auguuuaguaaacu

SEQ ID NO: 1468591 - RNA, 18 nt, Human
auguuucaaacauauaua

SEQ ID NO: 1468592 - RNA, 21 nt, Human
auguuucaaacauauauaaca

SEQ ID NO: 1468593 - RNA, 14 nt, Human
auguuguaauauuu

SEQ ID NO: 1468594 - RNA, 17 nt, Human
auguuguaauauuucuu

SEQ ID NO: 1468595 - RNA, 19 nt, Human
auguuguaauauuucuuca

SEQ ID NO: 1468596 - RNA, 16 nt, Human
auguuuugacauuuuu

SEQ ID NO: 1468597 - RNA, 14 nt, Human
auguuuugacauuu

SEQ ID NO: 1468598 - RNA, 13 nt, Human
auuaaaaacugag

SEQ ID NO: 1468599 - RNA, 14 nt, Human
auuaaaaacugagu

SEQ ID NO: 1468600 - RNA, 20 nt, Human
auuaaaaacugagugacucu

SEQ ID NO: 1468601 - RNA, 19 nt, Human
auuaaaaagguuuacagaa

SEQ ID NO: 1468602 - RNA, 18 nt, Human
auuaaaaagguuuacaga

SEQ ID NO: 1468603 - RNA, 22 nt, Human
auuaacuggguaaugaaacaaa

SEQ ID NO: 1468604 - RNA, 19 nt, Human
auuaacuggguaaugaaac

SEQ ID NO: 1468605 - RNA, 12 nt, Human
auuaacucauua

SEQ ID NO: 1468606 - RNA, 17 nt, Human
auuaacucauuagacug

SEQ ID NO: 1468607 - RNA, 18 nt, Human
auuaacuggguaaugaaa

SEQ ID NO: 1468608 - RNA, 15 nt, Human
auuaagaaaaucuau

SEQ ID NO: 1468609 - RNA, 21 nt, Human
uuuuauucagcucauggacuu

SEQ ID NO: 1468610 - RNA, 11 nt, Human
uuuucagaugu

SEQ ID NO: 1468611 - RNA, 18 nt, Human
uuuucagaugugaaccau

SEQ ID NO: 1468612 - RNA, 17 nt, Human
uuuucagaugugaacca

SEQ ID NO: 1468613 - RNA, 18 nt, Human
uuuucagcaaacucuuuu

SEQ ID NO: 1468614 - RNA, 19 nt, Human
uuuucagcaaacucuuuuc

SEQ ID NO: 1468615 - RNA, 14 nt, Human
uuuuauuaugcauu

SEQ ID NO: 1468616 - RNA, 22 nt, Human
uuuuauguugcauagaauaaaa

SEQ ID NO: 1468617 - RNA, 19 nt, Human
uuuuaugugaaacauguuu

SEQ ID NO: 1468618 - RNA, 18 nt, Human
uuuuaugugaaacauguu

SEQ ID NO: 1468619 - RNA, 22 nt, Human
uuuuauggcacuaguauuucua

SEQ ID NO: 1468620 - RNA, 19 nt, Human
uuuuauggcacuaguauuu

SEQ ID NO: 1468621 - RNA, 14 nt, Human
uuuuauaauuuugu

SEQ ID NO: 1468622 - RNA, 15 nt, Human
auguugcauagaaua

SEQ ID NO: 1468623 - RNA, 18 nt, Human
auguugauuacagugcag

SEQ ID NO: 1468624 - RNA, 20 nt, Human
uuuuaguuuaaaaaccuugu

SEQ ID NO: 1468625 - RNA, 23 nt, Human
uuuuagcaaagauaucucaucuc

SEQ ID NO: 1468626 - RNA, 16 nt, Human
uuuuagccuucucugu

SEQ ID NO: 1468627 - RNA, 23 nt, Human
uuuuagccuucucuguucauuuc

SEQ ID NO: 1468628 - RNA, 15 nt, Human
auguugacaugggac

SEQ ID NO: 1468629 - RNA, 19 nt, Human
auuagagggaggagaauga

SEQ ID NO: 1468630 - RNA, 14 nt, Human
auuacuuuugcugu

SEQ ID NO: 1468631 - RNA, 21 nt, Human
auuagaagacaauugacaaca

SEQ ID NO: 1468632 - RNA, 16 nt, Human
auuauauuuacaaaug

SEQ ID NO: 1468633 - RNA, 17 nt, Human
auuauaggaucauuugu

SEQ ID NO: 1468634 - RNA, 22 nt, Human
auuaucuauagcuaaguacaca

SEQ ID NO: 1468635 - RNA, 19 nt, Human
auuaucuauagcuaaguac

SEQ ID NO: 1468636 - RNA, 12 nt, Human
auuaucuuaaaa

SEQ ID NO: 1468637 - RNA, 23 nt, Human
auuauuaacauaccuaagaagua

SEQ ID NO: 1468638 - RNA, 17 nt, Human
auuauauuuacaaaugg

SEQ ID NO: 1468639 - RNA, 19 nt, Human
auuaucaauuaccacacca

SEQ ID NO: 1468640 - RNA, 18 nt, Human
auuauuuuauguugcaua

SEQ ID NO: 1468641 - RNA, 16 nt, Human
auuauuuuauguugca

SEQ ID NO: 1468642 - RNA, 16 nt, Human
auuauuaauuuaugca

SEQ ID NO: 1468643 - RNA, 16 nt, Human
auuauuccucaaaaaa

SEQ ID NO: 1468644 - RNA, 13 nt, Human
auuaaguaaugau

SEQ ID NO: 1468645 - RNA, 15 nt, Human
auuaaguaaugauaa

SEQ ID NO: 1468646 - RNA, 21 nt, Human
auuaaguaaugauaacuggaa

SEQ ID NO: 1468647 - RNA, 17 nt, Human
auuaauauauauuaucu

SEQ ID NO: 1468648 - RNA, 16 nt, Human
auuaaucugccucccu

SEQ ID NO: 1468649 - RNA, 23 nt, Human
uuuuuuaaaaaagaaacauuugg

SEQ ID NO: 1468650 - RNA, 13 nt, Human
uuuuuuaaaaaag

SEQ ID NO: 1468651 - RNA, 20 nt, Human
auuaagagagucuauuuacg

SEQ ID NO: 1468652 - RNA, 21 nt, Human
auuaagauaugggacauuuuu

SEQ ID NO: 1468653 - RNA, 13 nt, Human
auuacauuuguau

SEQ ID NO: 1468654 - RNA, 15 nt, Human
auuacauuuguauaa

SEQ ID NO: 1468655 - RNA, 16 nt, Human
auuacauuuguauaaa

SEQ ID NO: 1468656 - RNA, 16 nt, Human
auuaccaaccuguuac

SEQ ID NO: 1468657 - RNA, 14 nt, Human
auuaccaaccuguu

SEQ ID NO: 1468658 - RNA, 19 nt, Human
auuaccuucuauuggucuc

SEQ ID NO: 1468659 - RNA, 15 nt, Human
auuacucugaaauug

SEQ ID NO: 1468660 - RNA, 14 nt, Human
auuacugcaugcac

SEQ ID NO: 1468661 - RNA, 17 nt, Human
auuacugcaugcacuuc

SEQ ID NO: 1468662 - RNA, 13 nt, Human
auuacugccauuc

SEQ ID NO: 1468663 - RNA, 20 nt, Human
auuacugccauucacuucau

SEQ ID NO: 1468664 - RNA, 21 nt, Human
auuccauucuggaagugacuu

SEQ ID NO: 1468665 - RNA, 19 nt, Human
auucccuucaucuggaacc

SEQ ID NO: 1468666 - RNA, 16 nt, Human
auucccuucaucugga

SEQ ID NO: 1468667 - RNA, 14 nt, Human
auucagcucaugga

SEQ ID NO: 1468668 - RNA, 22 nt, Human
auugaccuauuuccagaaauac

SEQ ID NO: 1468669 - RNA, 15 nt, Human
auugccucacuucag

SEQ ID NO: 1468670 - RNA, 14 nt, Human
auugccucugagag

SEQ ID NO: 1468671 - RNA, 19 nt, Human
auucucacagcuccaagaa

SEQ ID NO: 1468672 - RNA, 21 nt, Human
auucucacagcuccaagaauu

SEQ ID NO: 1468673 - RNA, 22 nt, Human
auucucacagcuccaagaauuu

SEQ ID NO: 1468674 - RNA, 16 nt, Human
auuuaaccucuaaauu

SEQ ID NO: 1468675 - RNA, 18 nt, Human
auuuaaccucuaaauucu

SEQ ID NO: 1468676 - RNA, 13 nt, Human
auuuaacucucuu

SEQ ID NO: 1468677 - RNA, 13 nt, Human
auuuaacugacua

SEQ ID NO: 1468678 - RNA, 16 nt, Human
auuuacaaaugggaaa

SEQ ID NO: 1468679 - RNA, 14 nt, Human
auuuaaaguuguuu

SEQ ID NO: 1468680 - RNA, 13 nt, Human
auuuaaaacauua

SEQ ID NO: 1468681 - RNA, 18 nt, Human
auugugccaugucaaaca

SEQ ID NO: 1468682 - RNA, 21 nt, Human
auugugccaugucaaacaaau

SEQ ID NO: 1468683 - RNA, 22 nt, Human
auugugccaugucaaacaaaua

SEQ ID NO: 1468684 - RNA, 15 nt, Human
auuuaaaacagacac

SEQ ID NO: 1468685 - RNA, 16 nt, Human
auuuaaaacagacacu

SEQ ID NO: 1468686 - RNA, 17 nt, Human
auuuaaaacagacacug

SEQ ID NO: 1468687 - RNA, 18 nt, Human
auuuaaaacagacacugg

SEQ ID NO: 1468688 - RNA, 23 nt, Human
auuuaaaacagacacuggcaugg

SEQ ID NO: 1468689 - RNA, 15 nt, Human
auuguauuacaaauc

SEQ ID NO: 1468690 - RNA, 14 nt, Human
auuguauuacaaau

SEQ ID NO: 1468691 - RNA, 15 nt, Human
auugugaaauuauuc

SEQ ID NO: 1468692 - RNA, 16 nt, Human
auugucuuaauauugu

SEQ ID NO: 1468693 - RNA, 15 nt, Human
auugucugugaagug

SEQ ID NO: 1468694 - RNA, 20 nt, Human
auuguauauuacaaugauca

SEQ ID NO: 1468695 - RNA, 19 nt, Human
auuguauauuacaaugauc

SEQ ID NO: 1468696 - RNA, 18 nt, Human
auuguauauuacaaugau

SEQ ID NO: 1468697 - RNA, 17 nt, Human
auuguauauuacaauga

SEQ ID NO: 1468698 - RNA, 15 nt, Human
auuguauauuacaau

SEQ ID NO: 1468699 - RNA, 13 nt, Human
auugccucugaga

SEQ ID NO: 1468700 - RNA, 23 nt, Human
auuuccugggagcuuuuguagaa

SEQ ID NO: 1468701 - RNA, 22 nt, Human
auuuccugggagcuuuuguaga

SEQ ID NO: 1468702 - RNA, 23 nt, Human
auuuaggaaguugacuuauagua

SEQ ID NO: 1468703 - RNA, 16 nt, Human
auuuaggaaguugacu

SEQ ID NO: 1468704 - RNA, 14 nt, Human
auuuagguuucuga

SEQ ID NO: 1468705 - RNA, 17 nt, Human
auuuagguuucugaguu

SEQ ID NO: 1468706 - RNA, 21 nt, Human
auuuagguuucugaguuccug

SEQ ID NO: 1468707 - RNA, 22 nt, Human
auuuauuacuguaagaaaauau

SEQ ID NO: 1468708 - RNA, 23 nt, Human
auuuagguuucugaguuccugca

SEQ ID NO: 1468709 - RNA, 23 nt, Human
auuuagguuuuuguuuguuuccu

SEQ ID NO: 1468710 - RNA, 22 nt, Human
auuugaggacaaccauuccaga

SEQ ID NO: 1468711 - RNA, 18 nt, Human
auuuguaguguuggagaa

SEQ ID NO: 1468712 - RNA, 19 nt, Human
auuuguacuauuuaacuga

SEQ ID NO: 1468713 - RNA, 20 nt, Human
auuuguacuauuuaacugac

SEQ ID NO: 1468714 - RNA, 22 nt, Human
auuuguacuauuuaacugacua

SEQ ID NO: 1468715 - RNA, 23 nt, Human
auuuguacugaaaaaugguaauu

SEQ ID NO: 1468716 - RNA, 21 nt, Human
auuugguuuucacauuggaaa

SEQ ID NO: 1468717 - RNA, 22 nt, Human
auuugguuuucacauuggaaac

SEQ ID NO: 1468718 - RNA, 15 nt, Human
auuugguuuucacau

SEQ ID NO: 1468719 - RNA, 17 nt, Human
auuugguuuucacauug

SEQ ID NO: 1468720 - RNA, 23 nt, Human
auuugguaaggggaauugaggac

SEQ ID NO: 1468721 - RNA, 14 nt, Human
auuuggguccagga

SEQ ID NO: 1468722 - RNA, 15 nt, Human
auuuggguccaggag

SEQ ID NO: 1468723 - RNA, 16 nt, Human
auuuggguccaggagg

SEQ ID NO: 1468724 - RNA, 17 nt, Human
auuuggguccaggagga

SEQ ID NO: 1468725 - RNA, 19 nt, Human
auuuguaguguuggagaag

SEQ ID NO: 1468726 - RNA, 14 nt, Human
auuuuaauaauguu

SEQ ID NO: 1468727 - RNA, 15 nt, Human
auuuuaauaauguuu

SEQ ID NO: 1468728 - RNA, 16 nt, Human
auuuuaauaauguuuc

SEQ ID NO: 1468729 - RNA, 22 nt, Human
auuuuacuguacagacagaaaa

SEQ ID NO: 1468730 - RNA, 20 nt, Human
auuuuacuguacagacagaa

SEQ ID NO: 1468731 - RNA, 13 nt, Human
auuuuacauaaau

SEQ ID NO: 1468732 - RNA, 12 nt, Human
auuuuacaauuu

SEQ ID NO: 1468733 - RNA, 21 nt, Human
auuuuauguugcauagaauaa

SEQ ID NO: 1468734 - RNA, 18 nt, Human
auuuuauguugcauagaa

SEQ ID NO: 1468735 - RNA, 13 nt, Human
aucuguaaacugu

SEQ ID NO: 1468736 - RNA, 14 nt, Human
aucuguaaacugug

SEQ ID NO: 1468737 - RNA, 17 nt, Human
aucuguaaacuguguau

SEQ ID NO: 1468738 - RNA, 22 nt, Human
aucuguaaacuguguauuccaa

SEQ ID NO: 1468739 - RNA, 16 nt, Human
aucuugacucacugca

SEQ ID NO: 1468740 - RNA, 16 nt, Human
aucuuacuauuucaca

SEQ ID NO: 1468741 - RNA, 12 nt, Human
aucugauagggu

SEQ ID NO: 1468742 - RNA, 22 nt, Human
aucugauaggguuugugacagg

SEQ ID NO: 1468743 - RNA, 17 nt, Human
aucugauugugauguga

SEQ ID NO: 1468744 - RNA, 20 nt, Human
aucugcagggggugugucug

SEQ ID NO: 1468745 - RNA, 16 nt, Human
uugcccugcugcccuc

SEQ ID NO: 1468746 - RNA, 18 nt, Human
uugcccugcugcccuccc

SEQ ID NO: 1468747 - RNA, 21 nt, Human
aucucauuuccaagcaaguau

SEQ ID NO: 1468748 - RNA, 20 nt, Human
aucucagugaagaauacuuc

SEQ ID NO: 1468749 - RNA, 14 nt, Human
aucucagugaagaa

SEQ ID NO: 1468750 - RNA, 15 nt, Human
aucucagugaagaau

SEQ ID NO: 1468751 - RNA, 17 nt, Human
aucucagugaagaauac

SEQ ID NO: 1468752 - RNA, 19 nt, Human
aucucaguugauuuucugg

SEQ ID NO: 1468753 - RNA, 21 nt, Human
aucucaguugauuuucuggau

SEQ ID NO: 1468754 - RNA, 23 nt, Human
aucucauuuccaagcaaguauua

SEQ ID NO: 1468755 - RNA, 20 nt, Human
aucucaucucagugaagaau

SEQ ID NO: 1468756 - RNA, 19 nt, Human
aucucaucucagugaagaa

SEQ ID NO: 1468757 - RNA, 21 nt, Human
aucucauuuuuccguaaaaau

SEQ ID NO: 1468758 - RNA, 23 nt, Human
aucucauuuuuccguaaaaauga

SEQ ID NO: 1468759 - RNA, 16 nt, Human
aucuccccaucauugg

SEQ ID NO: 1468760 - RNA, 22 nt, Human
aucuccauugugccuaagucca

SEQ ID NO: 1468761 - RNA, 16 nt, Human
aucucaauucuucccu

SEQ ID NO: 1468762 - RNA, 14 nt, Human
aucucaauucuucc

SEQ ID NO: 1468763 - RNA, 13 nt, Human
aucucaauauuuc

SEQ ID NO: 1468764 - RNA, 16 nt, Human
auccuaucucuccaac

SEQ ID NO: 1468765 - RNA, 21 nt, Human
auccuaucucuccaaccagau

SEQ ID NO: 1468766 - RNA, 15 nt, Human
aucucagcucacuac

SEQ ID NO: 1468767 - RNA, 13 nt, Human
aucucagcucacu

SEQ ID NO: 1468768 - RNA, 11 nt, Human
aucucagcuca

SEQ ID NO: 1468769 - RNA, 14 nt, Human
aucucagcucacug

SEQ ID NO: 1468770 - RNA, 18 nt, Human
aucucaggccagagccaa

SEQ ID NO: 1468771 - RNA, 14 nt, Human
aucucaggccagag

SEQ ID NO: 1468772 - RNA, 17 nt, Human
aucucaggccagagcca

SEQ ID NO: 1468773 - RNA, 14 nt, Human
uugcaucugaaaau

SEQ ID NO: 1468774 - RNA, 15 nt, Human
uugcauguggaucaa

SEQ ID NO: 1468775 - RNA, 16 nt, Human
uugcacagcuaugaag

SEQ ID NO: 1468776 - RNA, 21 nt, Human
aucucuucagucucuauacca

SEQ ID NO: 1468777 - RNA, 13 nt, Human
aucucuucagucu

SEQ ID NO: 1468778 - RNA, 12 nt, Human
aucucuucaguc

SEQ ID NO: 1468779 - RNA, 12 nt, Human
uugaugccuggc

SEQ ID NO: 1468780 - RNA, 15 nt, Human
uugaugggauuuggu

SEQ ID NO: 1468781 - RNA, 22 nt, Human
uugaugccaaaaaaaaauacau

SEQ ID NO: 1468782 - RNA, 14 nt, Human
uugaugccaaaaaa

SEQ ID NO: 1468783 - RNA, 18 nt, Human
uugauggugguauguuuu

SEQ ID NO: 1468784 - RNA, 17 nt, Human
uugaugggauucuggac

SEQ ID NO: 1468785 - RNA, 19 nt, Human
uugauggugguauguuuuc

SEQ ID NO: 1468786 - RNA, 13 nt, Human
uugauguaaaauc

SEQ ID NO: 1468787 - RNA, 15 nt, Human
uugauguaaaaucuu

SEQ ID NO: 1468788 - RNA, 16 nt, Human
uugauguaaaaucuug

SEQ ID NO: 1468789 - RNA, 18 nt, Human
uugauguaaaaucuuguc

SEQ ID NO: 1468790 - RNA, 21 nt, Human
uugauguaaaaucuugucaug

SEQ ID NO: 1468791 - RNA, 16 nt, Human
augaagauacugaaau

SEQ ID NO: 1468792 - RNA, 17 nt, Human
augaagauacugaaaua

SEQ ID NO: 1468793 - RNA, 22 nt, Human
augaagauauuuuuccauuuuu

SEQ ID NO: 1468794 - RNA, 17 nt, Human
augaaauauuauguuaa

SEQ ID NO: 1468795 - RNA, 18 nt, Human
augaaauauuauguuaaa

SEQ ID NO: 1468796 - RNA, 20 nt, Human
augaaauauuauguuaaaac

SEQ ID NO: 1468797 - RNA, 15 nt, Human
augaagauacugaaa

SEQ ID NO: 1468798 - RNA, 15 nt, Human
augaauuaaguuuuu

SEQ ID NO: 1468799 - RNA, 16 nt, Human
augaauuaaauaaacc

SEQ ID NO: 1468800 - RNA, 14 nt, Human
augaauuaaagugg

SEQ ID NO: 1468801 - RNA, 14 nt, Human
augaauuaaauaaa

SEQ ID NO: 1468802 - RNA, 23 nt, Human
uuggggggaguaaagaauuauuu

SEQ ID NO: 1468803 - RNA, 15 nt, Human
uuggagugcaguggc

SEQ ID NO: 1468804 - RNA, 20 nt, Human
uuggauauguaaaacauuua

SEQ ID NO: 1468805 - RNA, 13 nt, Human
uuggauccugugu

SEQ ID NO: 1468806 - RNA, 18 nt, Human
uuggauccuguguggaga

SEQ ID NO: 1468807 - RNA, 19 nt, Human
uuggauauguaaaacauuu

SEQ ID NO: 1468808 - RNA, 23 nt, Human
uuggcugagauaugaacauauug

SEQ ID NO: 1468809 - RNA, 13 nt, Human
aucuuuuuauuca

SEQ ID NO: 1468810 - RNA, 12 nt, Human
augaaagauuca

SEQ ID NO: 1468811 - RNA, 14 nt, Human
aucuuugccacccu

SEQ ID NO: 1468812 - RNA, 15 nt, Human
aucuuugccacccuc

SEQ ID NO: 1468813 - RNA, 16 nt, Human
aucuuugccacccuca

SEQ ID NO: 1468814 - RNA, 21 nt, Human
aucuuuaauuuuacauuuccu

SEQ ID NO: 1468815 - RNA, 16 nt, Human
aucuuuaauuuuacau

SEQ ID NO: 1468816 - RNA, 22 nt, Human
aucuuuaauuuuacauuuccua

SEQ ID NO: 1468817 - RNA, 15 nt, Human
uugguucuugagggg

SEQ ID NO: 1468818 - RNA, 23 nt, Human
uugguucuugaggggaccaggag

SEQ ID NO: 1468819 - RNA, 20 nt, Human
uugguugaaaauaaaaagau

SEQ ID NO: 1468820 - RNA, 22 nt, Human
uugguucuugaggggaccagga

SEQ ID NO: 1468821 - RNA, 23 nt, Human
uuguacaaaauaaacaaauaaca

SEQ ID NO: 1468822 - RNA, 23 nt, Human
uuguaguagcguuuuuuaaaugu

SEQ ID NO: 1468823 - RNA, 22 nt, Human
uuguaguagcguuuuuuaaaug

SEQ ID NO: 1468824 - RNA, 21 nt, Human
uuguaguagcguuuuuuaaau

SEQ ID NO: 1468825 - RNA, 16 nt, Human
uuguauaaaauaauuu

SEQ ID NO: 1468826 - RNA, 17 nt, Human
uuguauaaaauaauuuu

SEQ ID NO: 1468827 - RNA, 23 nt, Human
uuguaguguuggagaagaacuga

SEQ ID NO: 1468828 - RNA, 19 nt, Human
uuguauaaaauaauuuuua

SEQ ID NO: 1468829 - RNA, 20 nt, Human
uuguauaccuuguaauuuga

SEQ ID NO: 1468830 - RNA, 13 nt, Human
augagagacacac

SEQ ID NO: 1468831 - RNA, 14 nt, Human
augagagacacacu

SEQ ID NO: 1468832 - RNA, 17 nt, Human
augagagacacacugaa

SEQ ID NO: 1468833 - RNA, 19 nt, Human
augagagacacacugaaga

SEQ ID NO: 1468834 - RNA, 11 nt, Human
augagaaucua

SEQ ID NO: 1468835 - RNA, 23 nt, Human
augagaaaucuaaaaaacgaaaa

SEQ ID NO: 1468836 - RNA, 14 nt, Human
augagaaagccuuc

SEQ ID NO: 1468837 - RNA, 15 nt, Human
augagaaagccuucu

SEQ ID NO: 1468838 - RNA, 19 nt, Human
augagaaagccuucuuuug

SEQ ID NO: 1468839 - RNA, 15 nt, Human
augagaaauacaaaa

SEQ ID NO: 1468840 - RNA, 22 nt, Human
augagaaauacaaaaauacuca

SEQ ID NO: 1468841 - RNA, 14 nt, Human
augagaacucugag

SEQ ID NO: 1468842 - RNA, 18 nt, Human
augagaaaucuaaaaaac

SEQ ID NO: 1468843 - RNA, 15 nt, Human
augagaaaucuaaaa

SEQ ID NO: 1468844 - RNA, 21 nt, Human
uuuaguagcagugauugucuu

SEQ ID NO: 1468845 - RNA, 16 nt, Human
uuuaguaucuuuuuau

SEQ ID NO: 1468846 - RNA, 22 nt, Human
uuuaguagcagugauugucuua

SEQ ID NO: 1468847 - RNA, 23 nt, Human
uuuaguagauauuaccaguuuuc

SEQ ID NO: 1468848 - RNA, 21 nt, Human
uuuaguagauauuaccaguuu

SEQ ID NO: 1468849 - RNA, 22 nt, Human
uuuaggaaguugacuuauagua

SEQ ID NO: 1468850 - RNA, 18 nt, Human
uuuaggaagcaagcuuaa

SEQ ID NO: 1468851 - RNA, 22 nt, Human
uuuagcuggaaaaguauguuag

SEQ ID NO: 1468852 - RNA, 22 nt, Human
augcccccuaauccccuucucc

SEQ ID NO: 1468853 - RNA, 13 nt, Human
uuuauuaaaaacu

SEQ ID NO: 1468854 - RNA, 18 nt, Human
uuuauuaaaaacugagug

SEQ ID NO: 1468855 - RNA, 20 nt, Human
uuuauguuaagggaagaauu

SEQ ID NO: 1468856 - RNA, 20 nt, Human
uuuauguuacuacaugcacu

SEQ ID NO: 1468857 - RNA, 13 nt, Human
uuuauauaagcuu

SEQ ID NO: 1468858 - RNA, 23 nt, Human
augcugucuacacuaagagagaa

SEQ ID NO: 1468859 - RNA, 22 nt, Human
augcugucuacacuaagagaga

SEQ ID NO: 1468860 - RNA, 16 nt, Human
uuuauuacuguaagaa

SEQ ID NO: 1468861 - RNA, 19 nt, Human
augcucuccaaaccacuuu

SEQ ID NO: 1468862 - RNA, 17 nt, Human
auggaauacucuuauau

SEQ ID NO: 1468863 - RNA, 16 nt, Human
auggaauacucuuaua

SEQ ID NO: 1468864 - RNA, 24 nt, Human
uuucaugaccaguaaaggcugcug

SEQ ID NO: 1468865 - RNA, 17 nt, Human
uuucaugaccaguaaag

SEQ ID NO: 1468866 - RNA, 19 nt, Human
uuucaugauaaugaacaga

SEQ ID NO: 1468867 - RNA, 22 nt, Human
uuucaugauaaugaacagaaca

SEQ ID NO: 1468868 - RNA, 19 nt, Human
uuucaugcuaucucugugu

SEQ ID NO: 1468869 - RNA, 16 nt, Human
uuucaugauuuugaaa

SEQ ID NO: 1468870 - RNA, 16 nt, Human
uuucaugcuaucucug

SEQ ID NO: 1468871 - RNA, 23 nt, Human
uuuccccauuuagguuucugagu

SEQ ID NO: 1468872 - RNA, 13 nt, Human
auggcagaaaagu

SEQ ID NO: 1468873 - RNA, 18 nt, Human
auggcaaccauuauaacc

SEQ ID NO: 1468874 - RNA, 15 nt, Human
auggcaaccauuaua

SEQ ID NO: 1468875 - RNA, 16 nt, Human
auggcaaccauuauaa

SEQ ID NO: 1468876 - RNA, 15 nt, Human
auggcaauuuuguaa

SEQ ID NO: 1468877 - RNA, 16 nt, Human
auggcaauuuuguaac

SEQ ID NO: 1468878 - RNA, 19 nt, Human
auggcaugagaaauacaaa

SEQ ID NO: 1468879 - RNA, 18 nt, Human
auggcaugagaaauacaa

SEQ ID NO: 1468880 - RNA, 13 nt, Human
auggcgcaggaac

SEQ ID NO: 1468881 - RNA, 12 nt, Human
augauucccagc

SEQ ID NO: 1468882 - RNA, 21 nt, Human
augauucaaaugucuauaaac

SEQ ID NO: 1468883 - RNA, 13 nt, Human
augauucauuuua

SEQ ID NO: 1468884 - RNA, 13 nt, Human
augauuccagcca

SEQ ID NO: 1468885 - RNA, 15 nt, Human
uuguugucugcaacu

SEQ ID NO: 1468886 - RNA, 22 nt, Human
augauuaugaauuacauuugua

SEQ ID NO: 1468887 - RNA, 14 nt, Human
augauuucaguagc

SEQ ID NO: 1468888 - RNA, 20 nt, Human
augauuucaugcuaucucug

SEQ ID NO: 1468889 - RNA, 21 nt, Human
augauuucaugcuaucucugu

SEQ ID NO: 1468890 - RNA, 14 nt, Human
augcacaucccugg

SEQ ID NO: 1468891 - RNA, 18 nt, Human
augcaaaucaauuacugg

SEQ ID NO: 1468892 - RNA, 20 nt, Human
augagagacacacugaagaa

SEQ ID NO: 1468893 - RNA, 21 nt, Human
augagagacacacugaagaag

SEQ ID NO: 1468894 - RNA, 23 nt, Human
augagagacacacugaagaagca

SEQ ID NO: 1468895 - RNA, 17 nt, Human
uuguggggaugaugaaa

SEQ ID NO: 1468896 - RNA, 23 nt, Human
uugugugaaagguacuucaaauc

SEQ ID NO: 1468897 - RNA, 14 nt, Human
uuuaaauguuuuuu

SEQ ID NO: 1468898 - RNA, 15 nt, Human
uuuaaauguauacua

SEQ ID NO: 1468899 - RNA, 14 nt, Human
uuuaaauguauacu

SEQ ID NO: 1468900 - RNA, 12 nt, Human
uuuaauuuuaca

SEQ ID NO: 1468901 - RNA, 21 nt, Human
uuuaauguaauagggaaaauu

SEQ ID NO: 1468902 - RNA, 18 nt, Human
uuuaauguauaguaaauc

SEQ ID NO: 1468903 - RNA, 14 nt, Human
uuuaaugagauaau

SEQ ID NO: 1468904 - RNA, 15 nt, Human
uuuaaugaacaaaug

SEQ ID NO: 1468905 - RNA, 16 nt, Human
uuuaaugaacaaaugg

SEQ ID NO: 1468906 - RNA, 12 nt, Human
uuuaagccaaaa

SEQ ID NO: 1468907 - RNA, 20 nt, Human
uuuaagccaaaacaauguuu

SEQ ID NO: 1468908 - RNA, 18 nt, Human
uuuaagccaaaacaaugu

SEQ ID NO: 1468909 - RNA, 18 nt, Human
augcaguucugaagaaga

SEQ ID NO: 1468910 - RNA, 19 nt, Human
augcaguucugaagaagau

SEQ ID NO: 1468911 - RNA, 15 nt, Human
augcaguucugaaga

SEQ ID NO: 1468912 - RNA, 17 nt, Human
augcaguucugaagaag

SEQ ID NO: 1468913 - RNA, 17 nt, Human
augcagugccuuucuuc

SEQ ID NO: 1468914 - RNA, 15 nt, Human
uucuaguguagaauu

SEQ ID NO: 1468915 - RNA, 16 nt, Human
uucuagagcacugcca

SEQ ID NO: 1468916 - RNA, 14 nt, Human
uucuauaauuuaaa

SEQ ID NO: 1468917 - RNA, 13 nt, Human
uucuauaauuuaa

SEQ ID NO: 1468918 - RNA, 15 nt, Human
uucuaguucugccag

SEQ ID NO: 1468919 - RNA, 16 nt, Human
uucuaguucugccagg

SEQ ID NO: 1468920 - RNA, 19 nt, Human
aucagacuaugaaguuuuu

SEQ ID NO: 1468921 - RNA, 20 nt, Human
aucagaaacacccucacacu

SEQ ID NO: 1468922 - RNA, 16 nt, Human
aucagaaacacccuca

SEQ ID NO: 1468923 - RNA, 18 nt, Human
aucacuuucucaguuuuc

SEQ ID NO: 1468924 - RNA, 21 nt, Human
aucacuuucucaguuuucaua

SEQ ID NO: 1468925 - RNA, 20 nt, Human
aucacuuucucaguuuucau

SEQ ID NO: 1468926 - RNA, 16 nt, Human
uucucagauuucugag

SEQ ID NO: 1468927 - RNA, 20 nt, Human
uucucagauuucugaggaaa

SEQ ID NO: 1468928 - RNA, 15 nt, Human
uucucagauuucuga

SEQ ID NO: 1468929 - RNA, 15 nt, Human
uucuaaaguaaaaac

SEQ ID NO: 1468930 - RNA, 14 nt, Human
uucuaagaaacauu

SEQ ID NO: 1468931 - RNA, 16 nt, Human
uucuaagaaacauuua

SEQ ID NO: 1468932 - RNA, 23 nt, Human
uucuaagaaacauuuauauugau

SEQ ID NO: 1468933 - RNA, 20 nt, Human
uucuaagaaacauuuauauu

SEQ ID NO: 1468934 - RNA, 15 nt, Human
uucgaaugacacugu

SEQ ID NO: 1468935 - RNA, 15 nt, Human
auauuuuacauaaau

SEQ ID NO: 1468936 - RNA, 16 nt, Human
auauuuuacauaaauu

SEQ ID NO: 1468937 - RNA, 20 nt, Human
auauuuuacauaaauuuagu

SEQ ID NO: 1468938 - RNA, 23 nt, Human
uucccagagcaaaauaauuuuaa

SEQ ID NO: 1468939 - RNA, 20 nt, Human
uucccacggccuuucuagcc

SEQ ID NO: 1468940 - RNA, 15 nt, Human
uucccacuguuuaag

SEQ ID NO: 1468941 - RNA, 18 nt, Human
uucccagagcaaaauaau

SEQ ID NO: 1468942 - RNA, 16 nt, Human
uucccuaucuuugcca

SEQ ID NO: 1468943 - RNA, 12 nt, Human
auauuuucucua

SEQ ID NO: 1468944 - RNA, 19 nt, Human
auauuuucucuaggaaaua

SEQ ID NO: 1468945 - RNA, 13 nt, Human
auauuuucucuag

SEQ ID NO: 1468946 - RNA, 16 nt, Human
auauuuucucuaggaa

SEQ ID NO: 1468947 - RNA, 14 nt, Human
uuccuucagcacuu

SEQ ID NO: 1468948 - RNA, 20 nt, Human
aucaaaucuaccacuguaug

SEQ ID NO: 1468949 - RNA, 14 nt, Human
aucaaguuauuuuu

SEQ ID NO: 1468950 - RNA, 23 nt, Human
aucaagucuguuuacugcaaggu

SEQ ID NO: 1468951 - RNA, 15 nt, Human
aucaagucuguuuac

SEQ ID NO: 1468952 - RNA, 13 nt, Human
aucaagucuguuu

SEQ ID NO: 1468953 - RNA, 18 nt, Human
aucaaccccagacacugg

SEQ ID NO: 1468954 - RNA, 19 nt, Human
aucaaccccagacacuggu

SEQ ID NO: 1468955 - RNA, 21 nt, Human
uucucuaauauggcaaccauu

SEQ ID NO: 1468956 - RNA, 12 nt, Human
uucucuaauaug

SEQ ID NO: 1468957 - RNA, 15 nt, Human
uucucuuuuccuuug

SEQ ID NO: 1468958 - RNA, 21 nt, Human
uucuccugaggauguguccca

SEQ ID NO: 1468959 - RNA, 13 nt, Human
uucuccucccagg

SEQ ID NO: 1468960 - RNA, 13 nt, Human
auccaaaagcuuu

SEQ ID NO: 1468961 - RNA, 17 nt, Human
aucccaaguagaaucuc

SEQ ID NO: 1468962 - RNA, 20 nt, Human
aucccaaguagaaucucagu

SEQ ID NO: 1468963 - RNA, 14 nt, Human
auccauacauuugu

SEQ ID NO: 1468964 - RNA, 14 nt, Human
aucauuuuuuacuu

SEQ ID NO: 1468965 - RNA, 12 nt, Human
uugaaccaauaa

SEQ ID NO: 1468966 - RNA, 19 nt, Human
uugaaauauugacuuuuua

SEQ ID NO: 1468967 - RNA, 18 nt, Human
uugaaauauccugcuuga

SEQ ID NO: 1468968 - RNA, 16 nt, Human
uucuuaaacacuugca

SEQ ID NO: 1468969 - RNA, 17 nt, Human
uucuuaaacacuugcaa

SEQ ID NO: 1468970 - RNA, 17 nt, Human
uucuuaaagucaagauu

SEQ ID NO: 1468971 - RNA, 12 nt, Human
uucuuuguguag

SEQ ID NO: 1468972 - RNA, 19 nt, Human
uucuuuguguagcuuugcu

SEQ ID NO: 1468973 - RNA, 17 nt, Human
uucuuuguuucuuucuu

SEQ ID NO: 1468974 - RNA, 14 nt, Human
uucuugauguaaaa

SEQ ID NO: 1468975 - RNA, 15 nt, Human
uucuugauguaaaau

SEQ ID NO: 1468976 - RNA, 20 nt, Human
uucuugauguaaaaucuugu

SEQ ID NO: 1468977 - RNA, 19 nt, Human
uucuugauguaaaaucuug

SEQ ID NO: 1468978 - RNA, 20 nt, Human
uucuugaggggaccaggagu

SEQ ID NO: 1468979 - RNA, 19 nt, Human
uucuugaggggaccaggag

SEQ ID NO: 1468980 - RNA, 17 nt, Human
uucuuggccaugggagg

SEQ ID NO: 1468981 - RNA, 22 nt, Human
auagcuuuucccuuuuuuuaag

SEQ ID NO: 1468982 - RNA, 15 nt, Human
auagcuuuuuucucu

SEQ ID NO: 1468983 - RNA, 16 nt, Human
uucacauuagaagaca

SEQ ID NO: 1468984 - RNA, 15 nt, Human
uucacauuagaagac

SEQ ID NO: 1468985 - RNA, 17 nt, Human
auaggcguaacuaauuu

SEQ ID NO: 1468986 - RNA, 19 nt, Human
uucacagccuauaaccaga

SEQ ID NO: 1468987 - RNA, 21 nt, Human
uucacaucgcagauucucccu

SEQ ID NO: 1468988 - RNA, 13 nt, Human
uucacaucucauu

SEQ ID NO: 1468989 - RNA, 12 nt, Human
uucaaaagaaag

SEQ ID NO: 1468990 - RNA, 18 nt, Human
uucaaaacauugugccau

SEQ ID NO: 1468991 - RNA, 17 nt, Human
uuauuuuuuucugaauu

SEQ ID NO: 1468992 - RNA, 13 nt, Human
uuauuuuuuucug

SEQ ID NO: 1468993 - RNA, 23 nt, Human
uuauuuuugacaguguugaaaau

SEQ ID NO: 1468994 - RNA, 18 nt, Human
uuauuuuuacauucugaa

SEQ ID NO: 1468995 - RNA, 14 nt, Human
uucaaacauauaua

SEQ ID NO: 1468996 - RNA, 23 nt, Human
uucaagaauaaucacgcuuuccu

SEQ ID NO: 1468997 - RNA, 13 nt, Human
uucaaaagaaagu

SEQ ID NO: 1468998 - RNA, 21 nt, Human
uucaaaauuguuacaaauugu

SEQ ID NO: 1468999 - RNA, 16 nt, Human
uucaagcaauccuccc

SEQ ID NO: 1469000 - RNA, 14 nt, Human
uucaagcaauccuc

SEQ ID NO: 1469001 - RNA, 18 nt, Human
uucaagcgauucuccugc

SEQ ID NO: 1469002 - RNA, 17 nt, Human
uucaaggucugcuuuuc

SEQ ID NO: 1469003 - RNA, 21 nt, Human
uucaagcgauucuccugccuc

SEQ ID NO: 1469004 - RNA, 21 nt, Human
auauauauuuuuuucugaaau

SEQ ID NO: 1469005 - RNA, 20 nt, Human
auauauauuaucuuuucaua

SEQ ID NO: 1469006 - RNA, 15 nt, Human
auauauauguacagu

SEQ ID NO: 1469007 - RNA, 16 nt, Human
auauauauguacaguu

SEQ ID NO: 1469008 - RNA, 20 nt, Human
auauauauguacaguuaucu

SEQ ID NO: 1469009 - RNA, 16 nt, Human
auauauauuaucuuuu

SEQ ID NO: 1469010 - RNA, 16 nt, Human
auauauauauauaugu

SEQ ID NO: 1469011 - RNA, 14 nt, Human
auauauauauaugu

SEQ ID NO: 1469012 - RNA, 15 nt, Human
auauauauauguaca

SEQ ID NO: 1469013 - RNA, 13 nt, Human
auauaugaggacu

SEQ ID NO: 1469014 - RNA, 14 nt, Human
auauauaacaaugc

SEQ ID NO: 1469015 - RNA, 13 nt, Human
auauaacuaacaa

SEQ ID NO: 1469016 - RNA, 24 nt, Human
auauaaaguaucaucaguguagaa

SEQ ID NO: 1469017 - RNA, 21 nt, Human
auagucucuuuaaaaggaaag

SEQ ID NO: 1469018 - RNA, 14 nt, Human
auagucucuuuaaa

SEQ ID NO: 1469019 - RNA, 13 nt, Human
auaguuguaacua

SEQ ID NO: 1469020 - RNA, 14 nt, Human
uucauuccuccagg

SEQ ID NO: 1469021 - RNA, 13 nt, Human
uucauuccuccag

SEQ ID NO: 1469022 - RNA, 12 nt, Human
uucauuccucca

SEQ ID NO: 1469023 - RNA, 22 nt, Human
uucauucaugucauguguacaa

SEQ ID NO: 1469024 - RNA, 16 nt, Human
uucauuccauucugga

SEQ ID NO: 1469025 - RNA, 14 nt, Human
uucauugucuguga

SEQ ID NO: 1469026 - RNA, 23 nt, Human
uuccacccagugcugaauuuccc

SEQ ID NO: 1469027 - RNA, 16 nt, Human
uuccaaguugcuaaua

SEQ ID NO: 1469028 - RNA, 18 nt, Human
uucccaacuccagaaagu

SEQ ID NO: 1469029 - RNA, 13 nt, Human
uucccaauugcuu

SEQ ID NO: 1469030 - RNA, 21 nt, Human
uucccacccaauucaaaacau

SEQ ID NO: 1469031 - RNA, 23 nt, Human
uucccaaaggcauuauaaaaaga

SEQ ID NO: 1469032 - RNA, 15 nt, Human
auauauuuuaagacg

SEQ ID NO: 1469033 - RNA, 14 nt, Human
auauauuuuaagac

SEQ ID NO: 1469034 - RNA, 19 nt, Human
auaucuccgucaacucaua

SEQ ID NO: 1469035 - RNA, 20 nt, Human
auaucuccgucaacucauau

SEQ ID NO: 1469036 - RNA, 21 nt, Human
auaucuccgucaacucauauu

SEQ ID NO: 1469037 - RNA, 12 nt, Human
auaucucaucuc

SEQ ID NO: 1469038 - RNA, 13 nt, Human
auaucuccugaaa

SEQ ID NO: 1469039 - RNA, 15 nt, Human
auaucuccugaaaag

SEQ ID NO: 1469040 - RNA, 22 nt, Human
auaucuccugaaaagguuuaug

SEQ ID NO: 1469041 - RNA, 23 nt, Human
auaucuccugaaaagguuuauga

SEQ ID NO: 1469042 - RNA, 21 nt, Human
auaugauguuaaaaaaauaag

SEQ ID NO: 1469043 - RNA, 15 nt, Human
auaugauguuaaaaa

SEQ ID NO: 1469044 - RNA, 12 nt, Human
auauguaaaaca

SEQ ID NO: 1469045 - RNA, 13 nt, Human
auauguaaaacau

SEQ ID NO: 1469046 - RNA, 14 nt, Human
auauguaaaacauu

SEQ ID NO: 1469047 - RNA, 15 nt, Human
auauguaaaacauuu

SEQ ID NO: 1469048 - RNA, 16 nt, Human
auauguaaaacauuua

SEQ ID NO: 1469049 - RNA, 18 nt, Human
auauguaaaacauuuauu

SEQ ID NO: 1469050 - RNA, 24 nt, Human
auauguaaaacauuuauuuugaca

SEQ ID NO: 1469051 - RNA, 14 nt, Human
auauguacaguuau

SEQ ID NO: 1469052 - RNA, 16 nt, Human
auauguacaguuaucu

SEQ ID NO: 1469053 - RNA, 11 nt, Human
auauguaccaa

SEQ ID NO: 1469054 - RNA, 19 nt, Human
uucauaauuauuauuuggc

SEQ ID NO: 1469055 - RNA, 13 nt, Human
auauauuuuaaga

SEQ ID NO: 1469056 - RNA, 12 nt, Human
auauauuuuaag

SEQ ID NO: 1469057 - RNA, 14 nt, Human
auauauguacaguu

SEQ ID NO: 1469058 - RNA, 13 nt, Human
auauauguacagu

SEQ ID NO: 1469059 - RNA, 17 nt, Human
uuagggaaaacauucca

SEQ ID NO: 1469060 - RNA, 15 nt, Human
uuagggaaaacauuc

SEQ ID NO: 1469061 - RNA, 13 nt, Human
uuaguuucugagu

SEQ ID NO: 1469062 - RNA, 20 nt, Human
uuaguuucugaguuuuacca

SEQ ID NO: 1469063 - RNA, 22 nt, Human
uuagcaaagauaucucaucucu

SEQ ID NO: 1469064 - RNA, 21 nt, Human
auaauuguuuuaucugaauuu

SEQ ID NO: 1469065 - RNA, 21 nt, Human
uuagccuucucuguucauuuc

SEQ ID NO: 1469066 - RNA, 15 nt, Human
uuagccuucucuguu

SEQ ID NO: 1469067 - RNA, 17 nt, Human
uuagccuucucuguuca

SEQ ID NO: 1469068 - RNA, 12 nt, Human
uuagccuucucu

SEQ ID NO: 1469069 - RNA, 14 nt, Human
uuagccuucucugu

SEQ ID NO: 1469070 - RNA, 19 nt, Human
auaauacuugcuuuggaaa

SEQ ID NO: 1469071 - RNA, 22 nt, Human
auaauacugcugagauacauac

SEQ ID NO: 1469072 - RNA, 21 nt, Human
auaauacugcugagauacaua

SEQ ID NO: 1469073 - RNA, 18 nt, Human
auaauaaaggacuguaau

SEQ ID NO: 1469074 - RNA, 13 nt, Human
auaauaaaggacu

SEQ ID NO: 1469075 - RNA, 11 nt, Human
auaauaaagga

SEQ ID NO: 1469076 - RNA, 21 nt, Human
auaagacggauuuauuuuucc

SEQ ID NO: 1469077 - RNA, 17 nt, Human
auaagacggauuuauuu

SEQ ID NO: 1469078 - RNA, 18 nt, Human
auaauccuaaacauauga

SEQ ID NO: 1469079 - RNA, 12 nt, Human
auaaucuagaac

SEQ ID NO: 1469080 - RNA, 15 nt, Human
auaaucuagaacaca

SEQ ID NO: 1469081 - RNA, 14 nt, Human
auaaauaaaaauaa

SEQ ID NO: 1469082 - RNA, 15 nt, Human
auaaagguucaugca

SEQ ID NO: 1469083 - RNA, 17 nt, Human
auaaagguucaugcaaa

SEQ ID NO: 1469084 - RNA, 13 nt, Human
auaaauaaaaaua

SEQ ID NO: 1469085 - RNA, 14 nt, Human
auaacguauaaaag

SEQ ID NO: 1469086 - RNA, 14 nt, Human
auaaccuuaauuua

SEQ ID NO: 1469087 - RNA, 22 nt, Human
auaacgauaaaagacagugaaa

SEQ ID NO: 1469088 - RNA, 22 nt, Human
auaacguuuaagccaaaacaau

SEQ ID NO: 1469089 - RNA, 20 nt, Human
auaacguuuaagccaaaaca

SEQ ID NO: 1469090 - RNA, 17 nt, Human
auaacguuuaagccaaa

SEQ ID NO: 1469091 - RNA, 18 nt, Human
auaacguuuaagccaaaa

SEQ ID NO: 1469092 - RNA, 13 nt, Human
auaaauuauuguu

SEQ ID NO: 1469093 - RNA, 19 nt, Human
auaaauuauuguuuuucuu

SEQ ID NO: 1469094 - RNA, 20 nt, Human
uuaccuuugacaaagguaaa

SEQ ID NO: 1469095 - RNA, 13 nt, Human
uuaccuuugacaa

SEQ ID NO: 1469096 - RNA, 15 nt, Human
uuaccuuauugcacu

SEQ ID NO: 1469097 - RNA, 13 nt, Human
uuaccuacuuuga

SEQ ID NO: 1469098 - RNA, 23 nt, Human
uuaccuacuuugacuuuuugcau

SEQ ID NO: 1469099 - RNA, 17 nt, Human
uuagaacacacacacuu

SEQ ID NO: 1469100 - RNA, 20 nt, Human
uuagaacacacacacuuacu

SEQ ID NO: 1469101 - RNA, 16 nt, Human
uuagaaaugcagaauc

SEQ ID NO: 1469102 - RNA, 13 nt, Human
uuagaaaucauuu

SEQ ID NO: 1469103 - RNA, 13 nt, Human
uguuucaaacaua

SEQ ID NO: 1469104 - RNA, 19 nt, Human
uguuucaaacauauauaac

SEQ ID NO: 1469105 - RNA, 19 nt, Human
aguuggaguuuuuuguacc

SEQ ID NO: 1469106 - RNA, 20 nt, Human
aguuggaguuuuuuguacca

SEQ ID NO: 1469107 - RNA, 16 nt, Human
aguuggggacacaugu

SEQ ID NO: 1469108 - RNA, 14 nt, Human
aguuuaaauuguaa

SEQ ID NO: 1469109 - RNA, 12 nt, Human
uuaaaaaaauaa

SEQ ID NO: 1469110 - RNA, 21 nt, Human
uuaaagugacuaauggcauga

SEQ ID NO: 1469111 - RNA, 20 nt, Human
uuaaagugacuaauggcaug

SEQ ID NO: 1469112 - RNA, 18 nt, Human
uuaaacagugagccugaa

SEQ ID NO: 1469113 - RNA, 23 nt, Human
uuaaacagugagccugaauuuug

SEQ ID NO: 1469114 - RNA, 14 nt, Human
uuaaacaaagguug

SEQ ID NO: 1469115 - RNA, 18 nt, Human
uuaacaccuuuaaagugu

SEQ ID NO: 1469116 - RNA, 17 nt, Human
uuaacaauuaggcagac

SEQ ID NO: 1469117 - RNA, 13 nt, Human
uuaacagagucug

SEQ ID NO: 1469118 - RNA, 14 nt, Human
uuaacagagucuga

SEQ ID NO: 1469119 - RNA, 16 nt, Human
aguuucauauaaagua

SEQ ID NO: 1469120 - RNA, 13 nt, Human
auaaaagccuguu

SEQ ID NO: 1469121 - RNA, 17 nt, Human
aguuuuuauauguugua

SEQ ID NO: 1469122 - RNA, 19 nt, Human
auaaaagccuguuuaagag

SEQ ID NO: 1469123 - RNA, 18 nt, Human
auaaaagccuguuuaaga

SEQ ID NO: 1469124 - RNA, 12 nt, Human
auaaaauaauuu

SEQ ID NO: 1469125 - RNA, 22 nt, Human
auaaaauaauuuuaucucuuuc

SEQ ID NO: 1469126 - RNA, 15 nt, Human
auaaaauaauuuuua

SEQ ID NO: 1469127 - RNA, 18 nt, Human
aguuuugauauuucuagc

SEQ ID NO: 1469128 - RNA, 16 nt, Human
aguuuugcaaagugca

SEQ ID NO: 1469129 - RNA, 24 nt, Human
uuaaggggaggaaccagagugcug

SEQ ID NO: 1469130 - RNA, 14 nt, Human
uuaagguguagcca

SEQ ID NO: 1469131 - RNA, 17 nt, Human
uuaagguguagccacac

SEQ ID NO: 1469132 - RNA, 20 nt, Human
uuaagaagacugcauuauau

SEQ ID NO: 1469133 - RNA, 16 nt, Human
uuaauauugauuuauu

SEQ ID NO: 1469134 - RNA, 13 nt, Human
uuaauauugauuu

SEQ ID NO: 1469135 - RNA, 13 nt, Human
uuaagucagaaca

SEQ ID NO: 1469136 - RNA, 16 nt, Human
uuaaucuguauuuccc

SEQ ID NO: 1469137 - RNA, 23 nt, Human
aguguuggagaagaacugaaauc

SEQ ID NO: 1469138 - RNA, 17 nt, Human
aguguuggagaagaacu

SEQ ID NO: 1469139 - RNA, 18 nt, Human
aguguuggagaagaacug

SEQ ID NO: 1469140 - RNA, 14 nt, Human
aguguuggagaaga

SEQ ID NO: 1469141 - RNA, 16 nt, Human
aguguuggagaagaac

SEQ ID NO: 1469142 - RNA, 21 nt, Human
aguguucauaaauaaaguuug

SEQ ID NO: 1469143 - RNA, 22 nt, Human
uguuccccuuugcuucauucaa

SEQ ID NO: 1469144 - RNA, 22 nt, Human
aguggaaagacagcuucucauc

SEQ ID NO: 1469145 - RNA, 22 nt, Human
uguuaucaaacaccaacauaaa

SEQ ID NO: 1469146 - RNA, 22 nt, Human
uguuauuauuacuuauuuuuga

SEQ ID NO: 1469147 - RNA, 13 nt, Human
uguugucugcaac

SEQ ID NO: 1469148 - RNA, 16 nt, Human
uguugucugcaacucu

SEQ ID NO: 1469149 - RNA, 14 nt, Human
uguuggucauuuua

SEQ ID NO: 1469150 - RNA, 13 nt, Human
uguugugcuuuua

SEQ ID NO: 1469151 - RNA, 16 nt, Human
uguuuaguagcaguga

SEQ ID NO: 1469152 - RNA, 18 nt, Human
uguuuaguagcagugauu

SEQ ID NO: 1469153 - RNA, 17 nt, Human
uguuuaguaaucauauu

SEQ ID NO: 1469154 - RNA, 14 nt, Human
uguuuaguaaucau

SEQ ID NO: 1469155 - RNA, 13 nt, Human
uguuuaguaauca

SEQ ID NO: 1469156 - RNA, 19 nt, Human
uguuuaguaaacucaauaa

SEQ ID NO: 1469157 - RNA, 20 nt, Human
aguucggugagcuacaaaug

SEQ ID NO: 1469158 - RNA, 19 nt, Human
aguucggugagcuacaaau

SEQ ID NO: 1469159 - RNA, 14 nt, Human
aguuccccuaugug

SEQ ID NO: 1469160 - RNA, 18 nt, Human
aguuccccuauguggaag

SEQ ID NO: 1469161 - RNA, 20 nt, Human
agugcuggcauuacaggugu

SEQ ID NO: 1469162 - RNA, 20 nt, Human
agugcugggauuacaggugu

SEQ ID NO: 1469163 - RNA, 17 nt, Human
uguguucccauuucagc

SEQ ID NO: 1469164 - RNA, 16 nt, Human
uguguucccauuucag

SEQ ID NO: 1469165 - RNA, 14 nt, Human
agugcacuaaugug

SEQ ID NO: 1469166 - RNA, 16 nt, Human
agugcaccaaagagaa

SEQ ID NO: 1469167 - RNA, 18 nt, Human
agugcaccaaagagaaug

SEQ ID NO: 1469168 - RNA, 20 nt, Human
agugcaccaaagagaaugcc

SEQ ID NO: 1469169 - RNA, 22 nt, Human
agugcaaauugucacaggacag

SEQ ID NO: 1469170 - RNA, 13 nt, Human
agugcaccaaaga

SEQ ID NO: 1469171 - RNA, 18 nt, Human
agugcaaauugucacagg

SEQ ID NO: 1469172 - RNA, 21 nt, Human
agugcaaauugucacaggaca

SEQ ID NO: 1469173 - RNA, 15 nt, Human
agugauugucuuaau

SEQ ID NO: 1469174 - RNA, 17 nt, Human
agugauugucuuaauau

SEQ ID NO: 1469175 - RNA, 16 nt, Human
agugauuguaugaauu

SEQ ID NO: 1469176 - RNA, 17 nt, Human
uguggccccugaacaag

SEQ ID NO: 1469177 - RNA, 22 nt, Human
uguggccccugaacaagaauug

SEQ ID NO: 1469178 - RNA, 14 nt, Human
ugugccuccucacc

SEQ ID NO: 1469179 - RNA, 15 nt, Human
ugugccuccucaccc

SEQ ID NO: 1469180 - RNA, 16 nt, Human
ugugccuccucacccc

SEQ ID NO: 1469181 - RNA, 16 nt, Human
ugugccccuugacaac

SEQ ID NO: 1469182 - RNA, 23 nt, Human
ugugccccuugacaacuggcagg

SEQ ID NO: 1469183 - RNA, 18 nt, Human
agucucacugcuugaacu

SEQ ID NO: 1469184 - RNA, 19 nt, Human
uguggcacuggggcagggg

SEQ ID NO: 1469185 - RNA, 15 nt, Human
uguggcaagugaauu

SEQ ID NO: 1469186 - RNA, 14 nt, Human
uguggcaagugaau

SEQ ID NO: 1469187 - RNA, 17 nt, Human
uguggagagggaaugug

SEQ ID NO: 1469188 - RNA, 20 nt, Human
uguggagagggaaugugaaa

SEQ ID NO: 1469189 - RNA, 19 nt, Human
uguggagagggaaugugaa

SEQ ID NO: 1469190 - RNA, 22 nt, Human
uguggauuuuuuccuucaaagu

SEQ ID NO: 1469191 - RNA, 17 nt, Human
uguaagaaaauaucacu

SEQ ID NO: 1469192 - RNA, 20 nt, Human
uguaacuuuuguaagacaaa

SEQ ID NO: 1469193 - RNA, 15 nt, Human
uguaacuuuuguaag

SEQ ID NO: 1469194 - RNA, 16 nt, Human
uguaacuuuuguaaga

SEQ ID NO: 1469195 - RNA, 18 nt, Human
uguaacuuucucuaugaa

SEQ ID NO: 1469196 - RNA, 17 nt, Human
uguaacuuucucuauga

SEQ ID NO: 1469197 - RNA, 20 nt, Human
uguaagacaaagguuuuccu

SEQ ID NO: 1469198 - RNA, 21 nt, Human
uguaagacaaagguuuuccuc

SEQ ID NO: 1469199 - RNA, 22 nt, Human
uguaagacccuuauugcugucc

SEQ ID NO: 1469200 - RNA, 18 nt, Human
uguaagacccuuauugcu

SEQ ID NO: 1469201 - RNA, 19 nt, Human
agguguagccacaccagga

SEQ ID NO: 1469202 - RNA, 13 nt, Human
aggugguguuucu

SEQ ID NO: 1469203 - RNA, 15 nt, Human
uguaaguaaacgguc

SEQ ID NO: 1469204 - RNA, 21 nt, Human
uguaagggccagaaauaucuu

SEQ ID NO: 1469205 - RNA, 18 nt, Human
uguaagggccagaaauau

SEQ ID NO: 1469206 - RNA, 16 nt, Human
uguaaguugaagcaaa

SEQ ID NO: 1469207 - RNA, 18 nt, Human
aggucuuugguucagcua

SEQ ID NO: 1469208 - RNA, 10 nt, Human
aggucccuaa

SEQ ID NO: 1469209 - RNA, 21 nt, Human
agguggugguagagaagcaag

SEQ ID NO: 1469210 - RNA, 14 nt, Human
agguggcccuacug

SEQ ID NO: 1469211 - RNA, 20 nt, Human
aggugcauauuuauaaaaau

SEQ ID NO: 1469212 - RNA, 15 nt, Human
uguaccaagaaucuu

SEQ ID NO: 1469213 - RNA, 23 nt, Human
aguaaggaauuuuauuuuuuucu

SEQ ID NO: 1469214 - RNA, 22 nt, Human
aguaauaugccugcuauuugaa

SEQ ID NO: 1469215 - RNA, 10 nt, Human
agguuuucag

SEQ ID NO: 1469216 - RNA, 22 nt, Human
agguuuuccucuucuauuuugu

SEQ ID NO: 1469217 - RNA, 22 nt, Human
aguacacaauaagcaaaaacaa

SEQ ID NO: 1469218 - RNA, 21 nt, Human
aguacacaauaagcaaaaaca

SEQ ID NO: 1469219 - RNA, 18 nt, Human
aguacacaauaagcaaaa

SEQ ID NO: 1469220 - RNA, 17 nt, Human
aguacacaauaagcaaa

SEQ ID NO: 1469221 - RNA, 16 nt, Human
aguacacaauaagcaa

SEQ ID NO: 1469222 - RNA, 15 nt, Human
aguaauuugaggaca

SEQ ID NO: 1469223 - RNA, 21 nt, Human
aguaauuuguuuaaaaaguaa

SEQ ID NO: 1469224 - RNA, 15 nt, Human
aguaauuuguagauu

SEQ ID NO: 1469225 - RNA, 21 nt, Human
aguaauccaagcaaaugugaa

SEQ ID NO: 1469226 - RNA, 15 nt, Human
aguaauccaagcaaa

SEQ ID NO: 1469227 - RNA, 19 nt, Human
aguacuuuuggcauuuuac

SEQ ID NO: 1469228 - RNA, 13 nt, Human
aguacuuugugca

SEQ ID NO: 1469229 - RNA, 15 nt, Human
aguacuuugugcauu

SEQ ID NO: 1469230 - RNA, 16 nt, Human
aguacuuugugcauuc

SEQ ID NO: 1469231 - RNA, 20 nt, Human
aguacacagcaccagaaugu

SEQ ID NO: 1469232 - RNA, 22 nt, Human
aguagagacgagguuucacugu

SEQ ID NO: 1469233 - RNA, 13 nt, Human
aguagagacaggg

SEQ ID NO: 1469234 - RNA, 12 nt, Human
aguagaaaucau

SEQ ID NO: 1469235 - RNA, 19 nt, Human
aguagauaggccaugggca

SEQ ID NO: 1469236 - RNA, 21 nt, Human
aguagaugcauuuggguccag

SEQ ID NO: 1469237 - RNA, 23 nt, Human
aguagaugcauuuggguccagga

SEQ ID NO: 1469238 - RNA, 22 nt, Human
aguagaugcauuuggguccagg

SEQ ID NO: 1469239 - RNA, 20 nt, Human
uguaggagagguugucugug

SEQ ID NO: 1469240 - RNA, 13 nt, Human
aguauuucuauga

SEQ ID NO: 1469241 - RNA, 15 nt, Human
aguauuucuaugaaa

SEQ ID NO: 1469242 - RNA, 23 nt, Human
aguaugugggcagauuuucagca

SEQ ID NO: 1469243 - RNA, 16 nt, Human
aguauuucuaugaaau

SEQ ID NO: 1469244 - RNA, 19 nt, Human
agucacauuccugaacagg

SEQ ID NO: 1469245 - RNA, 20 nt, Human
agucacauuccugaacagga

SEQ ID NO: 1469246 - RNA, 23 nt, Human
agucacugagaccaaggcuuucu

SEQ ID NO: 1469247 - RNA, 13 nt, Human
agucacugagacc

SEQ ID NO: 1469248 - RNA, 17 nt, Human
uguauuuuuaguagaga

SEQ ID NO: 1469249 - RNA, 13 nt, Human
uguauuccaagac

SEQ ID NO: 1469250 - RNA, 15 nt, Human
uguauuccaagacau

SEQ ID NO: 1469251 - RNA, 20 nt, Human
uguauuccaagacaugucug

SEQ ID NO: 1469252 - RNA, 21 nt, Human
uguauuccaagacaugucugu

SEQ ID NO: 1469253 - RNA, 14 nt, Human
uguauucagacaga

SEQ ID NO: 1469254 - RNA, 18 nt, Human
uguauucagacagaugag

SEQ ID NO: 1469255 - RNA, 14 nt, Human
uguauucagcuuua

SEQ ID NO: 1469256 - RNA, 19 nt, Human
uguaguaaucugcauuauu

SEQ ID NO: 1469257 - RNA, 21 nt, Human
ugucaauaaaauccauacauu

SEQ ID NO: 1469258 - RNA, 20 nt, Human
ugucaaucagccuaguugau

SEQ ID NO: 1469259 - RNA, 15 nt, Human
ugucaaucuguccgu

SEQ ID NO: 1469260 - RNA, 17 nt, Human
aguaggcauuuuuacca

SEQ ID NO: 1469261 - RNA, 22 nt, Human
aguaggcauuuuuaccaucacu

SEQ ID NO: 1469262 - RNA, 22 nt, Human
aguccaggcuuuuuuaucaugu

SEQ ID NO: 1469263 - RNA, 14 nt, Human
agucccugccugga

SEQ ID NO: 1469264 - RNA, 15 nt, Human
agucccugccuggac

SEQ ID NO: 1469265 - RNA, 21 nt, Human
agucccugccuggaccagccu

SEQ ID NO: 1469266 - RNA, 22 nt, Human
agucccugccuggaccagccuc

SEQ ID NO: 1469267 - RNA, 23 nt, Human
agucccugccuggaccagccucu

SEQ ID NO: 1469268 - RNA, 15 nt, Human
aguccgucaaaacag

SEQ ID NO: 1469269 - RNA, 14 nt, Human
aguccgucaaaaca

SEQ ID NO: 1469270 - RNA, 24 nt, Human
agucucacaugauuccagccauca

SEQ ID NO: 1469271 - RNA, 23 nt, Human
agucucacaugauuccagccauc

SEQ ID NO: 1469272 - RNA, 22 nt, Human
agucucacaugauuccagccau

SEQ ID NO: 1469273 - RNA, 21 nt, Human
agucucacaugauuccagcca

SEQ ID NO: 1469274 - RNA, 16 nt, Human
agucaggaaagagaac

SEQ ID NO: 1469275 - RNA, 18 nt, Human
ugucgauuagacuggaca

SEQ ID NO: 1469276 - RNA, 20 nt, Human
ugucgauuagacuggacagc

SEQ ID NO: 1469277 - RNA, 23 nt, Human
ugucgauuagacuggacagcuug

SEQ ID NO: 1469278 - RNA, 22 nt, Human
uguccuaauaauaucccacugg

SEQ ID NO: 1469279 - RNA, 14 nt, Human
ugucgauuagacug

SEQ ID NO: 1469280 - RNA, 13 nt, Human
uguccuuucuaga

SEQ ID NO: 1469281 - RNA, 14 nt, Human
uguccuuucuagag

SEQ ID NO: 1469282 - RNA, 18 nt, Human
uguccuuucuagagcacu

SEQ ID NO: 1469283 - RNA, 19 nt, Human
uguccuuucuagagcacug

SEQ ID NO: 1469284 - RNA, 13 nt, Human
ugucauuuuggua

SEQ ID NO: 1469285 - RNA, 15 nt, Human
uguccgacucuucug

SEQ ID NO: 1469286 - RNA, 20 nt, Human
ugguaaggggaauugaggac

SEQ ID NO: 1469287 - RNA, 16 nt, Human
aggguggcagcaacaa

SEQ ID NO: 1469288 - RNA, 15 nt, Human
aggguggcagcaaca

SEQ ID NO: 1469289 - RNA, 13 nt, Human
aggguggcagcaa

SEQ ID NO: 1469290 - RNA, 11 nt, Human
aggguggcagc

SEQ ID NO: 1469291 - RNA, 21 nt, Human
ugggucuaggacacaguuccu

SEQ ID NO: 1469292 - RNA, 22 nt, Human
ugggucuaggacacaguuccug

SEQ ID NO: 1469293 - RNA, 21 nt, Human
ugggucgcccuggacugugug

SEQ ID NO: 1469294 - RNA, 15 nt, Human
aggggcuaccaggaa

SEQ ID NO: 1469295 - RNA, 14 nt, Human
aggggcuaccagga

SEQ ID NO: 1469296 - RNA, 17 nt, Human
aggggcuaccaggaaag

SEQ ID NO: 1469297 - RNA, 15 nt, Human
agggggagagggcug

SEQ ID NO: 1469298 - RNA, 16 nt, Human
agggggagagggcugc

SEQ ID NO: 1469299 - RNA, 19 nt, Human
ugggguauggauucuaaaa

SEQ ID NO: 1469300 - RNA, 20 nt, Human
ugggguauggauucuaaaau

SEQ ID NO: 1469301 - RNA, 23 nt, Human
agggggugauuagagggaggaga

SEQ ID NO: 1469302 - RNA, 17 nt, Human
aggguuaugauuaagua

SEQ ID NO: 1469303 - RNA, 16 nt, Human
uggucuuguggaauug

SEQ ID NO: 1469304 - RNA, 15 nt, Human
uggucucccuucucu

SEQ ID NO: 1469305 - RNA, 18 nt, Human
uggucucaaacuccugac

SEQ ID NO: 1469306 - RNA, 23 nt, Human
uggucucaaacuccugaccucag

SEQ ID NO: 1469307 - RNA, 20 nt, Human
agguauucguuaucuaauag

SEQ ID NO: 1469308 - RNA, 18 nt, Human
agguauucguuaucuaau

SEQ ID NO: 1469309 - RNA, 14 nt, Human
agguauuacacucu

SEQ ID NO: 1469310 - RNA, 13 nt, Human
agguauaccucac

SEQ ID NO: 1469311 - RNA, 23 nt, Human
agguacuucaaauccuugaagau

SEQ ID NO: 1469312 - RNA, 23 nt, Human
agguauaauucacauuguauuca

SEQ ID NO: 1469313 - RNA, 21 nt, Human
agguagaauguaaagcuuguc

SEQ ID NO: 1469314 - RNA, 14 nt, Human
agguagaauguaaa

SEQ ID NO: 1469315 - RNA, 19 nt, Human
agguagaauguaaagcuug

SEQ ID NO: 1469316 - RNA, 15 nt, Human
agguagucucacugc

SEQ ID NO: 1469317 - RNA, 14 nt, Human
uggggaaugaagau

SEQ ID NO: 1469318 - RNA, 15 nt, Human
uggggaaugaagaua

SEQ ID NO: 1469319 - RNA, 22 nt, Human
uggggaagagagccugcaggau

SEQ ID NO: 1469320 - RNA, 17 nt, Human
uggggaagagagccugc

SEQ ID NO: 1469321 - RNA, 18 nt, Human
uggggaagacaguggccc

SEQ ID NO: 1469322 - RNA, 15 nt, Human
uggggaagagagccu

SEQ ID NO: 1469323 - RNA, 19 nt, Human
ugggcuggcaguccuggaa

SEQ ID NO: 1469324 - RNA, 17 nt, Human
uggggaguggggguggg

SEQ ID NO: 1469325 - RNA, 16 nt, Human
uggggacuugugucug

SEQ ID NO: 1469326 - RNA, 18 nt, Human
uggggaguuuaggguggg

SEQ ID NO: 1469327 - RNA, 19 nt, Human
uggggaguuuagggugggg

SEQ ID NO: 1469328 - RNA, 16 nt, Human
ugggauuuggucaaca

SEQ ID NO: 1469329 - RNA, 21 nt, Human
ugggauucuggacaggaugug

SEQ ID NO: 1469330 - RNA, 19 nt, Human
ugggaggugagaccaccuc

SEQ ID NO: 1469331 - RNA, 14 nt, Human
ugggaguacaaaag

SEQ ID NO: 1469332 - RNA, 16 nt, Human
agggcaggugcuucag

SEQ ID NO: 1469333 - RNA, 16 nt, Human
agggcagggggccccu

SEQ ID NO: 1469334 - RNA, 23 nt, Human
aggacagcccuucuuuccacaga

SEQ ID NO: 1469335 - RNA, 18 nt, Human
ugcuugauagaaaugcca

SEQ ID NO: 1469336 - RNA, 13 nt, Human
ugcuugauagaaa

SEQ ID NO: 1469337 - RNA, 19 nt, Human
ugcuugaugggauucugga

SEQ ID NO: 1469338 - RNA, 20 nt, Human
ugcuugaugggauucuggac

SEQ ID NO: 1469339 - RNA, 22 nt, Human
ugcuugaugggauucuggacag

SEQ ID NO: 1469340 - RNA, 12 nt, Human
ugcuugauuuuu

SEQ ID NO: 1469341 - RNA, 17 nt, Human
ugcuugcauaagagcuu

SEQ ID NO: 1469342 - RNA, 16 nt, Human
ugcuugcauaagagcu

SEQ ID NO: 1469343 - RNA, 15 nt, Human
ugcuuggagcugagc

SEQ ID NO: 1469344 - RNA, 17 nt, Human
ugcuuggagcugagcaa

SEQ ID NO: 1469345 - RNA, 13 nt, Human
uggaagguauuua

SEQ ID NO: 1469346 - RNA, 17 nt, Human
uggaagguauuuaauag

SEQ ID NO: 1469347 - RNA, 11 nt, Human
uggaaggcaug

SEQ ID NO: 1469348 - RNA, 20 nt, Human
uggaaggcaagauugugucc

SEQ ID NO: 1469349 - RNA, 14 nt, Human
uggaaggcauggcg

SEQ ID NO: 1469350 - RNA, 19 nt, Human
aggaucccaugagcuccuu

SEQ ID NO: 1469351 - RNA, 15 nt, Human
aggauaccauauaca

SEQ ID NO: 1469352 - RNA, 22 nt, Human
aggauaccauauacagcucaga

SEQ ID NO: 1469353 - RNA, 18 nt, Human
aggauacgacaguacacu

SEQ ID NO: 1469354 - RNA, 20 nt, Human
aggauacgacaguacacugu

SEQ ID NO: 1469355 - RNA, 18 nt, Human
aggauacuauauuuuagg

SEQ ID NO: 1469356 - RNA, 23 nt, Human
aggauagaaguauaccugauuuu

SEQ ID NO: 1469357 - RNA, 14 nt, Human
aggauagagacugg

SEQ ID NO: 1469358 - RNA, 18 nt, Human
aggauacuggcacagagg

SEQ ID NO: 1469359 - RNA, 22 nt, Human
aggagcugacucacaccugaac

SEQ ID NO: 1469360 - RNA, 13 nt, Human
aggcaaucauggu

SEQ ID NO: 1469361 - RNA, 14 nt, Human
uggagcucguggaa

SEQ ID NO: 1469362 - RNA, 14 nt, Human
uggagaagaacuga

SEQ ID NO: 1469363 - RNA, 15 nt, Human
uggacugugugcuca

SEQ ID NO: 1469364 - RNA, 14 nt, Human
uggacuugccucug

SEQ ID NO: 1469365 - RNA, 13 nt, Human
uggagaagaacug

SEQ ID NO: 1469366 - RNA, 13 nt, Human
uggcaucccuggg

SEQ ID NO: 1469367 - RNA, 14 nt, Human
uggcaucccugggc

SEQ ID NO: 1469368 - RNA, 15 nt, Human
uggcaucccugggcc

SEQ ID NO: 1469369 - RNA, 16 nt, Human
uggcaucccugggccu

SEQ ID NO: 1469370 - RNA, 20 nt, Human
uggcaucccugggccuuggg

SEQ ID NO: 1469371 - RNA, 13 nt, Human
uggcaugagaaau

SEQ ID NO: 1469372 - RNA, 21 nt, Human
uggcaugagaaauacaaaaau

SEQ ID NO: 1469373 - RNA, 18 nt, Human
uggcaugagaaauacaaa

SEQ ID NO: 1469374 - RNA, 21 nt, Human
aggccugacugccaagccaug

SEQ ID NO: 1469375 - RNA, 22 nt, Human
aggccugacugccaagccaugg

SEQ ID NO: 1469376 - RNA, 19 nt, Human
aggccugacugccaagcca

SEQ ID NO: 1469377 - RNA, 18 nt, Human
aggccugacugccaagcc

SEQ ID NO: 1469378 - RNA, 17 nt, Human
aggccugacugccaagc

SEQ ID NO: 1469379 - RNA, 14 nt, Human
uggccauuugcuuu

SEQ ID NO: 1469380 - RNA, 15 nt, Human
uggccauuugcuuuu

SEQ ID NO: 1469381 - RNA, 23 nt, Human
uggccaugggaggccuuucccua

SEQ ID NO: 1469382 - RNA, 22 nt, Human
uggccaugggaggccuuucccu

SEQ ID NO: 1469383 - RNA, 16 nt, Human
uggccaugggaggccu

SEQ ID NO: 1469384 - RNA, 15 nt, Human
uggccaugggaggcc

SEQ ID NO: 1469385 - RNA, 14 nt, Human
uggccaugggaggc

SEQ ID NO: 1469386 - RNA, 16 nt, Human
uggccuaaccugccga

SEQ ID NO: 1469387 - RNA, 17 nt, Human
uggauuauauuaugaag

SEQ ID NO: 1469388 - RNA, 20 nt, Human
uggauuacugccauucacuu

SEQ ID NO: 1469389 - RNA, 13 nt, Human
uggcaauuuugua

SEQ ID NO: 1469390 - RNA, 14 nt, Human
uggcaauuuuguaa

SEQ ID NO: 1469391 - RNA, 15 nt, Human
uggcaauuuuguaac

SEQ ID NO: 1469392 - RNA, 14 nt, Human
ugcucauuucagga

SEQ ID NO: 1469393 - RNA, 14 nt, Human
ugcucauggaauug

SEQ ID NO: 1469394 - RNA, 18 nt, Human
agcuuuaacuuaaauagu

SEQ ID NO: 1469395 - RNA, 16 nt, Human
ugcuaucucugugugc

SEQ ID NO: 1469396 - RNA, 21 nt, Human
ugcuaucucugugugcacaaa

SEQ ID NO: 1469397 - RNA, 20 nt, Human
ugcuaucucugugugcacaa

SEQ ID NO: 1469398 - RNA, 15 nt, Human
ugcuauggugcucug

SEQ ID NO: 1469399 - RNA, 17 nt, Human
ugcuaugguuuucucca

SEQ ID NO: 1469400 - RNA, 14 nt, Human
ugcuaugguuuucu

SEQ ID NO: 1469401 - RNA, 20 nt, Human
ugcuauguuuugacauuuuu

SEQ ID NO: 1469402 - RNA, 21 nt, Human
aggaaaucaacuugcuuauca

SEQ ID NO: 1469403 - RNA, 15 nt, Human
aggaagcaagcuuaa

SEQ ID NO: 1469404 - RNA, 17 nt, Human
aggaagcaagcuuaaug

SEQ ID NO: 1469405 - RNA, 13 nt, Human
aggaaauauuuau

SEQ ID NO: 1469406 - RNA, 15 nt, Human
aggaaauauacuuuu

SEQ ID NO: 1469407 - RNA, 12 nt, Human
aggaaauauuua

SEQ ID NO: 1469408 - RNA, 21 nt, Human
ugcuguauuuuaaaagaauga

SEQ ID NO: 1469409 - RNA, 22 nt, Human
ugcuguauuuuaaaagaaugau

SEQ ID NO: 1469410 - RNA, 13 nt, Human
ugcuguauuuuaa

SEQ ID NO: 1469411 - RNA, 14 nt, Human
aggaauggaagucc

SEQ ID NO: 1469412 - RNA, 16 nt, Human
aggaaggacuaugaaa

SEQ ID NO: 1469413 - RNA, 13 nt, Human
aggacacaugucc

SEQ ID NO: 1469414 - RNA, 12 nt, Human
aggacacauguc

SEQ ID NO: 1469415 - RNA, 11 nt, Human
aggacacaugu

SEQ ID NO: 1469416 - RNA, 15 nt, Human
ugcuuccaauuuucu

SEQ ID NO: 1469417 - RNA, 23 nt, Human
ugcuguauuuuaaaagaaugauu

SEQ ID NO: 1469418 - RNA, 15 nt, Human
ugcugugcugugcua

SEQ ID NO: 1469419 - RNA, 18 nt, Human
ugcugugcugugcuaugg

SEQ ID NO: 1469420 - RNA, 13 nt, Human
ugcuguggccagg

SEQ ID NO: 1469421 - RNA, 14 nt, Human
ugcuguggccagga

SEQ ID NO: 1469422 - RNA, 15 nt, Human
ugcuguggccaggag

SEQ ID NO: 1469423 - RNA, 16 nt, Human
ugcuguggccaggagg

SEQ ID NO: 1469424 - RNA, 17 nt, Human
ugcuguggccaggaggu

SEQ ID NO: 1469425 - RNA, 14 nt, Human
ugcuuacugauaua

SEQ ID NO: 1469426 - RNA, 22 nt, Human
ugcuuacugauauauuuuacaa

SEQ ID NO: 1469427 - RNA, 16 nt, Human
agcuguguggcagucu

SEQ ID NO: 1469428 - RNA, 14 nt, Human
agcuguguggcagu

SEQ ID NO: 1469429 - RNA, 11 nt, Human
agcugucugcu

SEQ ID NO: 1469430 - RNA, 17 nt, Human
agcugucugcucagaca

SEQ ID NO: 1469431 - RNA, 21 nt, Human
agcugggacaccccgacuuuu

SEQ ID NO: 1469432 - RNA, 20 nt, Human
agcuggcucugugagggugc

SEQ ID NO: 1469433 - RNA, 18 nt, Human
agcuggcucugugagggu

SEQ ID NO: 1469434 - RNA, 21 nt, Human
agcuggcucugugagggugcu

SEQ ID NO: 1469435 - RNA, 19 nt, Human
agcugucaucaauuaaagg

SEQ ID NO: 1469436 - RNA, 14 nt, Human
agcuggcucuguga

SEQ ID NO: 1469437 - RNA, 22 nt, Human
agcuggcucugugagggugcug

SEQ ID NO: 1469438 - RNA, 22 nt, Human
agcuguguguuuggaagacuau

SEQ ID NO: 1469439 - RNA, 15 nt, Human
ugccugcccuauucu

SEQ ID NO: 1469440 - RNA, 21 nt, Human
ugccugccccuacccuggacu

SEQ ID NO: 1469441 - RNA, 22 nt, Human
ugccugccccuacccuggacuu

SEQ ID NO: 1469442 - RNA, 15 nt, Human
ugcccaggcacugca

SEQ ID NO: 1469443 - RNA, 15 nt, Human
agcuggcauuacagc

SEQ ID NO: 1469444 - RNA, 21 nt, Human
agcuggcauuacagcuggaga

SEQ ID NO: 1469445 - RNA, 12 nt, Human
ugcuacaauguc

SEQ ID NO: 1469446 - RNA, 23 nt, Human
ugccuuugaccugccucccuuca

SEQ ID NO: 1469447 - RNA, 17 nt, Human
ugccuuugaccugccuc

SEQ ID NO: 1469448 - RNA, 13 nt, Human
ugccuuugaccug

SEQ ID NO: 1469449 - RNA, 23 nt, Human
ugcggaggaaggaggacccagga

SEQ ID NO: 1469450 - RNA, 22 nt, Human
ugcggaggaaggaggacccagg

SEQ ID NO: 1469451 - RNA, 21 nt, Human
ugcggaggaaggaggacccag

SEQ ID NO: 1469452 - RNA, 17 nt, Human
ugccuuuucccaacucc

SEQ ID NO: 1469453 - RNA, 13 nt, Human
ugcggcuccucag

SEQ ID NO: 1469454 - RNA, 15 nt, Human
ugcggcuccucaggg

SEQ ID NO: 1469455 - RNA, 18 nt, Human
agcuaggaauuguguuua

SEQ ID NO: 1469456 - RNA, 12 nt, Human
agcuaggaauga

SEQ ID NO: 1469457 - RNA, 13 nt, Human
agcuaggaaugaa

SEQ ID NO: 1469458 - RNA, 20 nt, Human
agcucaggaaccgaggcagg

SEQ ID NO: 1469459 - RNA, 21 nt, Human
agcucaggaaccgaggcaggg

SEQ ID NO: 1469460 - RNA, 22 nt, Human
agcucaggaaccgaggcaggga

SEQ ID NO: 1469461 - RNA, 19 nt, Human
ugcccagcccuaaacauca

SEQ ID NO: 1469462 - RNA, 19 nt, Human
agcuacuaauuuuaaaaug

SEQ ID NO: 1469463 - RNA, 16 nt, Human
agcuacguauuuaaua

SEQ ID NO: 1469464 - RNA, 22 nt, Human
agcuaccugcucagcccugcac

SEQ ID NO: 1469465 - RNA, 12 nt, Human
agcgggggaggg

SEQ ID NO: 1469466 - RNA, 21 nt, Human
agcgggggaggguaggcagga

SEQ ID NO: 1469467 - RNA, 13 nt, Human
agcuagaauuuga

SEQ ID NO: 1469468 - RNA, 16 nt, Human
agcuagaauuugauau

SEQ ID NO: 1469469 - RNA, 14 nt, Human
agcuagaauugagu

SEQ ID NO: 1469470 - RNA, 20 nt, Human
agcuagaauugaguguuuaa

SEQ ID NO: 1469471 - RNA, 15 nt, Human
agccuguuuaagaga

SEQ ID NO: 1469472 - RNA, 13 nt, Human
agccuguuuaaga

SEQ ID NO: 1469473 - RNA, 21 nt, Human
agccuggguguaaaaccugga

SEQ ID NO: 1469474 - RNA, 22 nt, Human
agccuggguguaaaaccuggag

SEQ ID NO: 1469475 - RNA, 20 nt, Human
agccuggguguaaaaccugg

SEQ ID NO: 1469476 - RNA, 12 nt, Human
agccugggugua

SEQ ID NO: 1469477 - RNA, 23 nt, Human
agcgccuccaacccuagcaaaag

SEQ ID NO: 1469478 - RNA, 22 nt, Human
agcgccuccaacccuagcaaaa

SEQ ID NO: 1469479 - RNA, 19 nt, Human
agcgccuccaacccuagca

SEQ ID NO: 1469480 - RNA, 18 nt, Human
agcgccuccaacccuagc

SEQ ID NO: 1469481 - RNA, 20 nt, Human
agccuuggggcugaugcagu

SEQ ID NO: 1469482 - RNA, 17 nt, Human
ugccaagggcauaaauu

SEQ ID NO: 1469483 - RNA, 21 nt, Human
ugccaagggcauaaauuauug

SEQ ID NO: 1469484 - RNA, 13 nt, Human
ugccaauuucaag

SEQ ID NO: 1469485 - RNA, 15 nt, Human
ugccaauuagcaauu

SEQ ID NO: 1469486 - RNA, 23 nt, Human
ugcagcccccacugccuuugacc

SEQ ID NO: 1469487 - RNA, 17 nt, Human
ugcagcccccacugccu

SEQ ID NO: 1469488 - RNA, 18 nt, Human
agccugacccucaucuuu

SEQ ID NO: 1469489 - RNA, 20 nt, Human
agccugaauuuuguugcugu

SEQ ID NO: 1469490 - RNA, 21 nt, Human
agccugaauuuuguugcuguu

SEQ ID NO: 1469491 - RNA, 17 nt, Human
agccugacaacauuucu

SEQ ID NO: 1469492 - RNA, 14 nt, Human
ugcagcccugcugc

SEQ ID NO: 1469493 - RNA, 20 nt, Human
ugcagcucaagagaucccaa

SEQ ID NO: 1469494 - RNA, 16 nt, Human
ugcaggucccuaauaa

SEQ ID NO: 1469495 - RNA, 15 nt, Human
ugcaggucccuaaua

SEQ ID NO: 1469496 - RNA, 14 nt, Human
ugcaggucccuaau

SEQ ID NO: 1469497 - RNA, 12 nt, Human
ugcaggucccua

SEQ ID NO: 1469498 - RNA, 17 nt, Human
ugcaggucccuaauaaa

SEQ ID NO: 1469499 - RNA, 17 nt, Human
ugcaguacuuugugcau

SEQ ID NO: 1469500 - RNA, 18 nt, Human
ugcaguacuuugugcauu

SEQ ID NO: 1469501 - RNA, 22 nt, Human
ugcagucucuauaccaauaaag

SEQ ID NO: 1469502 - RNA, 23 nt, Human
ugcagucucuauaccaauaaagu

SEQ ID NO: 1469503 - RNA, 21 nt, Human
ugcagucucuauaccaauaaa

SEQ ID NO: 1469504 - RNA, 20 nt, Human
ugcagucucuauaccaauaa

SEQ ID NO: 1469505 - RNA, 19 nt, Human
ugcagucucuauaccaaua

SEQ ID NO: 1469506 - RNA, 18 nt, Human
ugcagucucuauaccaau

SEQ ID NO: 1469507 - RNA, 16 nt, Human
ugcagucucuauacca

SEQ ID NO: 1469508 - RNA, 23 nt, Human
ugcauaacguauaaaagccuguu

SEQ ID NO: 1469509 - RNA, 22 nt, Human
agcccuucuauacccacccaga

SEQ ID NO: 1469510 - RNA, 20 nt, Human
agcccuucuauacccaccca

SEQ ID NO: 1469511 - RNA, 19 nt, Human
agcccuucuauacccaccc

SEQ ID NO: 1469512 - RNA, 15 nt, Human
ugcacuaucuuucag

SEQ ID NO: 1469513 - RNA, 16 nt, Human
ugcacuaucuuucagc

SEQ ID NO: 1469514 - RNA, 23 nt, Human
agcccuucuccauggcccugcca

SEQ ID NO: 1469515 - RNA, 21 nt, Human
agccgacaccuuuuuucaaca

SEQ ID NO: 1469516 - RNA, 21 nt, Human
agcccuucuccauggcccugc

SEQ ID NO: 1469517 - RNA, 23 nt, Human
agcccuucuauacccacccagaa

SEQ ID NO: 1469518 - RNA, 17 nt, Human
agcccuucuuuccacag

SEQ ID NO: 1469519 - RNA, 22 nt, Human
ugcacaccuacuagucaccaga

SEQ ID NO: 1469520 - RNA, 20 nt, Human
ugcacaccuacuagucacca

SEQ ID NO: 1469521 - RNA, 20 nt, Human
ugcacacccuccagagacaa

SEQ ID NO: 1469522 - RNA, 19 nt, Human
ugcaccaugcugcugggga

SEQ ID NO: 1469523 - RNA, 23 nt, Human
ugcaccaugcugcuggggaagac

SEQ ID NO: 1469524 - RNA, 22 nt, Human
ugcaccaugcugcuggggaaga

SEQ ID NO: 1469525 - RNA, 18 nt, Human
ugauucgaaugacacugu

SEQ ID NO: 1469526 - RNA, 15 nt, Human
ugagucaaaaaaucu

SEQ ID NO: 1469527 - RNA, 18 nt, Human
ugagucaaguuguuccuu

SEQ ID NO: 1469528 - RNA, 12 nt, Human
ugauacagaaaa

SEQ ID NO: 1469529 - RNA, 21 nt, Human
ugauacagaaaaguugaauuu

SEQ ID NO: 1469530 - RNA, 14 nt, Human
ugauacuaagcauu

SEQ ID NO: 1469531 - RNA, 16 nt, Human
ugauacuaagcauuga

SEQ ID NO: 1469532 - RNA, 12 nt, Human
ugauaagaucuu

SEQ ID NO: 1469533 - RNA, 15 nt, Human
ugauaagaucuuuua

SEQ ID NO: 1469534 - RNA, 22 nt, Human
ugauaagaucuuuuauuuugcc

SEQ ID NO: 1469535 - RNA, 15 nt, Human
ugauaaugaacagaa

SEQ ID NO: 1469536 - RNA, 16 nt, Human
ugauaaugaacagaac

SEQ ID NO: 1469537 - RNA, 20 nt, Human
ugauaaugaacagaacauag

SEQ ID NO: 1469538 - RNA, 18 nt, Human
ugauaaugaacagaacau

SEQ ID NO: 1469539 - RNA, 23 nt, Human
agcauaaauguugacaugggaca

SEQ ID NO: 1469540 - RNA, 21 nt, Human
agcauaauacuugcuuuggaa

SEQ ID NO: 1469541 - RNA, 21 nt, Human
ugagacaagaaaauaagagcu

SEQ ID NO: 1469542 - RNA, 23 nt, Human
ugagacaagaaaauaagagcuca

SEQ ID NO: 1469543 - RNA, 16 nt, Human
ugagacaaugccuugu

SEQ ID NO: 1469544 - RNA, 15 nt, Human
ugagacaaugccuug

SEQ ID NO: 1469545 - RNA, 22 nt, Human
ugaguaacugauuuguaacaag

SEQ ID NO: 1469546 - RNA, 14 nt, Human
ugaguagaguugau

SEQ ID NO: 1469547 - RNA, 17 nt, Human
ugaguagaguugaucaa

SEQ ID NO: 1469548 - RNA, 18 nt, Human
ugauagacaauugaggua

SEQ ID NO: 1469549 - RNA, 17 nt, Human
ugauagacaauugaggu

SEQ ID NO: 1469550 - RNA, 19 nt, Human
ugauagaaaugccaagcac

SEQ ID NO: 1469551 - RNA, 12 nt, Human
ugauaugggucu

SEQ ID NO: 1469552 - RNA, 15 nt, Human
ugauaugugaacagu

SEQ ID NO: 1469553 - RNA, 16 nt, Human
ugauaugugaacaguu

SEQ ID NO: 1469554 - RNA, 17 nt, Human
ugauauuucuagcuuau

SEQ ID NO: 1469555 - RNA, 19 nt, Human
ugauauuuccccaugguuu

SEQ ID NO: 1469556 - RNA, 19 nt, Human
ugaucaaaaucaauuaaaa

SEQ ID NO: 1469557 - RNA, 15 nt, Human
ugauauuuucucuag

SEQ ID NO: 1469558 - RNA, 14 nt, Human
ugauauuuucucua

SEQ ID NO: 1469559 - RNA, 17 nt, Human
ugauauuuucugugccu

SEQ ID NO: 1469560 - RNA, 20 nt, Human
ugauauuuucugugccugaa

SEQ ID NO: 1469561 - RNA, 11 nt, Human
ugaucaaggcc

SEQ ID NO: 1469562 - RNA, 13 nt, Human
ugaucaaggccuu

SEQ ID NO: 1469563 - RNA, 12 nt, Human
ugaucaaggccu

SEQ ID NO: 1469564 - RNA, 20 nt, Human
agcaucacaugaacuuguaa

SEQ ID NO: 1469565 - RNA, 14 nt, Human
agcaucacagaaug

SEQ ID NO: 1469566 - RNA, 13 nt, Human
agcaucacagaau

SEQ ID NO: 1469567 - RNA, 20 nt, Human
agcaugucgucaaagcugaa

SEQ ID NO: 1469568 - RNA, 17 nt, Human
agcaugucgucaaagcu

SEQ ID NO: 1469569 - RNA, 15 nt, Human
agcauggcuauuuua

SEQ ID NO: 1469570 - RNA, 18 nt, Human
agcauggcuauuuuauau

SEQ ID NO: 1469571 - RNA, 17 nt, Human
agcauggcuauuuuaua

SEQ ID NO: 1469572 - RNA, 17 nt, Human
agcauuucccuuccuuc

SEQ ID NO: 1469573 - RNA, 17 nt, Human
agcaugucuauucagcu

SEQ ID NO: 1469574 - RNA, 19 nt, Human
agcaugucuauucagcuuc

SEQ ID NO: 1469575 - RNA, 15 nt, Human
agcauugaauggcua

SEQ ID NO: 1469576 - RNA, 17 nt, Human
ugaugaagaaguugaua

SEQ ID NO: 1469577 - RNA, 21 nt, Human
ugauccuguauucagacagau

SEQ ID NO: 1469578 - RNA, 20 nt, Human
ugauccuguauucagacaga

SEQ ID NO: 1469579 - RNA, 15 nt, Human
ugauccuuacaaguu

SEQ ID NO: 1469580 - RNA, 15 nt, Human
ugauggugguauguu

SEQ ID NO: 1469581 - RNA, 16 nt, Human
ugauuacagugcagug

SEQ ID NO: 1469582 - RNA, 14 nt, Human
ugauuacagugcag

SEQ ID NO: 1469583 - RNA, 22 nt, Human
agccaggaagaucccccagaaa

SEQ ID NO: 1469584 - RNA, 21 nt, Human
agccaggaagaucccccagaa

SEQ ID NO: 1469585 - RNA, 20 nt, Human
agccaggaagaucccccaga

SEQ ID NO: 1469586 - RNA, 22 nt, Human
agccagcuuucccugccucuca

SEQ ID NO: 1469587 - RNA, 16 nt, Human
agccagcuuucccugc

SEQ ID NO: 1469588 - RNA, 18 nt, Human
agccagcuuucccugccu

SEQ ID NO: 1469589 - RNA, 19 nt, Human
agccaggaggccugcuagg

SEQ ID NO: 1469590 - RNA, 16 nt, Human
agccaggaggccugcu

SEQ ID NO: 1469591 - RNA, 14 nt, Human
agccaggaggccug

SEQ ID NO: 1469592 - RNA, 22 nt, Human
agccagaacuugacccugagcu

SEQ ID NO: 1469593 - RNA, 15 nt, Human
agccagaccagcagg

SEQ ID NO: 1469594 - RNA, 13 nt, Human
agccagcugcccc

SEQ ID NO: 1469595 - RNA, 13 nt, Human
agccagcuuuccc

SEQ ID NO: 1469596 - RNA, 14 nt, Human
agccagcuuucccu

SEQ ID NO: 1469597 - RNA, 20 nt, Human
agccagcugcccccagagcc

SEQ ID NO: 1469598 - RNA, 19 nt, Human
agccagcugcccccagagc

SEQ ID NO: 1469599 - RNA, 14 nt, Human
agccagcugccccc

SEQ ID NO: 1469600 - RNA, 18 nt, Human
agccauggguagccuggg

SEQ ID NO: 1469601 - RNA, 20 nt, Human
ugauucauuuuaacaucuga

SEQ ID NO: 1469602 - RNA, 22 nt, Human
ugauucauuuuaacaucugaga

SEQ ID NO: 1469603 - RNA, 19 nt, Human
ugauuccagccaucaccuu

SEQ ID NO: 1469604 - RNA, 15 nt, Human
ugauuccagccauca

SEQ ID NO: 1469605 - RNA, 16 nt, Human
agaugcaguucugaag

SEQ ID NO: 1469606 - RNA, 17 nt, Human
agaugcaguucugaaga

SEQ ID NO: 1469607 - RNA, 15 nt, Human
agaugcccaaauccu

SEQ ID NO: 1469608 - RNA, 20 nt, Human
agaugcugauggagccuucc

SEQ ID NO: 1469609 - RNA, 17 nt, Human
agauguuugauagauuu

SEQ ID NO: 1469610 - RNA, 19 nt, Human
agauguuugauagauuuuc

SEQ ID NO: 1469611 - RNA, 14 nt, Human
ugacucacaccuga

SEQ ID NO: 1469612 - RNA, 19 nt, Human
ugacucacaccugaacuga

SEQ ID NO: 1469613 - RNA, 13 nt, Human
ugacuagggagcc

SEQ ID NO: 1469614 - RNA, 17 nt, Human
ugacuagggagccaugu

SEQ ID NO: 1469615 - RNA, 18 nt, Human
ugacuagggagccauguu

SEQ ID NO: 1469616 - RNA, 20 nt, Human
ugacuagggagccauguuuc

SEQ ID NO: 1469617 - RNA, 21 nt, Human
ugacuagggagccauguuuca

SEQ ID NO: 1469618 - RNA, 21 nt, Human
ugacccucaucuuucuuccaa

SEQ ID NO: 1469619 - RNA, 13 nt, Human
ugaccccugcuca

SEQ ID NO: 1469620 - RNA, 21 nt, Human
ugacccuaugggucuaggaca

SEQ ID NO: 1469621 - RNA, 17 nt, Human
agcaagaccccaucuca

SEQ ID NO: 1469622 - RNA, 13 nt, Human
agauuuuuuaaua

SEQ ID NO: 1469623 - RNA, 14 nt, Human
agauuuuuuaauaa

SEQ ID NO: 1469624 - RNA, 16 nt, Human
agauuuuuuaauaauu

SEQ ID NO: 1469625 - RNA, 12 nt, Human
agcaaaaaagaa

SEQ ID NO: 1469626 - RNA, 14 nt, Human
agcaaaaaagaaaa

SEQ ID NO: 1469627 - RNA, 21 nt, Human
agcaacuacagucuaaagcug

SEQ ID NO: 1469628 - RNA, 19 nt, Human
agcaagaaggcaaaaauag

SEQ ID NO: 1469629 - RNA, 19 nt, Human
agauuuucugcuacuuugc

SEQ ID NO: 1469630 - RNA, 17 nt, Human
agauuuuucaugauuuu

SEQ ID NO: 1469631 - RNA, 15 nt, Human
agauuucugaggaaa

SEQ ID NO: 1469632 - RNA, 14 nt, Human
agauuucugaggaa

SEQ ID NO: 1469633 - RNA, 21 nt, Human
agauuuccuucuuuuuuucuu

SEQ ID NO: 1469634 - RNA, 16 nt, Human
agauuuccuucuuuuu

SEQ ID NO: 1469635 - RNA, 18 nt, Human
agauuuccauauaaauau

SEQ ID NO: 1469636 - RNA, 22 nt, Human
agauugcugaaauuuuauaugc

SEQ ID NO: 1469637 - RNA, 20 nt, Human
ugaagcuaucguaaaauuaa

SEQ ID NO: 1469638 - RNA, 16 nt, Human
ugaagcucacuucugg

SEQ ID NO: 1469639 - RNA, 21 nt, Human
agagcugauggagaaggaagg

SEQ ID NO: 1469640 - RNA, 20 nt, Human
agagcugauggagaaggaag

SEQ ID NO: 1469641 - RNA, 19 nt, Human
agagcugauggagaaggaa

SEQ ID NO: 1469642 - RNA, 24 nt, Human
agagggaggagaaugagccucggc

SEQ ID NO: 1469643 - RNA, 20 nt, Human
agaggcuuccuucauuuccu

SEQ ID NO: 1469644 - RNA, 18 nt, Human
ugaauauuuaguguucau

SEQ ID NO: 1469645 - RNA, 13 nt, Human
ugaauauuauucc

SEQ ID NO: 1469646 - RNA, 15 nt, Human
ugaauauuauuccuc

SEQ ID NO: 1469647 - RNA, 22 nt, Human
ugaauguaaauuuguacuauuu

SEQ ID NO: 1469648 - RNA, 20 nt, Human
ugaauguaaauuuguacuau

SEQ ID NO: 1469649 - RNA, 21 nt, Human
ugaauguaaauuuguacuauu

SEQ ID NO: 1469650 - RNA, 15 nt, Human
ugaauacuuuauaaa

SEQ ID NO: 1469651 - RNA, 14 nt, Human
ugaauaaagcaauu

SEQ ID NO: 1469652 - RNA, 22 nt, Human
ugaaggguaauuauauaguuac

SEQ ID NO: 1469653 - RNA, 14 nt, Human
agauacauacagaa

SEQ ID NO: 1469654 - RNA, 15 nt, Human
agauacauacagaau

SEQ ID NO: 1469655 - RNA, 16 nt, Human
agauacauacagaauu

SEQ ID NO: 1469656 - RNA, 15 nt, Human
agauaacugaaaauu

SEQ ID NO: 1469657 - RNA, 18 nt, Human
agauaacugaaaauuauu

SEQ ID NO: 1469658 - RNA, 22 nt, Human
agauaacugaaaauuauuuaaa

SEQ ID NO: 1469659 - RNA, 20 nt, Human
ugacaaagguaaaucagacu

SEQ ID NO: 1469660 - RNA, 16 nt, Human
ugacacauggccccuc

SEQ ID NO: 1469661 - RNA, 22 nt, Human
ugacacauggccccucccccug

SEQ ID NO: 1469662 - RNA, 18 nt, Human
ugacacuagcccaaugaa

SEQ ID NO: 1469663 - RNA, 19 nt, Human
ugacacuagcccaaugaaa

SEQ ID NO: 1469664 - RNA, 21 nt, Human
ugacacuagcccaaugaaaug

SEQ ID NO: 1469665 - RNA, 22 nt, Human
ugacacuagcccaaugaaauga

SEQ ID NO: 1469666 - RNA, 23 nt, Human
ugacacuagcccaaugaaaugaa

SEQ ID NO: 1469667 - RNA, 14 nt, Human
ugaauuuuguugcu

SEQ ID NO: 1469668 - RNA, 23 nt, Human
ugaauuugugaagguggaaauaa

SEQ ID NO: 1469669 - RNA, 16 nt, Human
ugaauuuuguugcugu

SEQ ID NO: 1469670 - RNA, 22 nt, Human
ugaauuuuuaaaacccauuuaa

SEQ ID NO: 1469671 - RNA, 17 nt, Human
ugaauuuuuaaacaagu

SEQ ID NO: 1469672 - RNA, 19 nt, Human
ugaauuuuuaaacaaguau

SEQ ID NO: 1469673 - RNA, 23 nt, Human
ugaauuuuuaaacaaguauuugu

SEQ ID NO: 1469674 - RNA, 21 nt, Human
ugaauuuuuaaacaaguauuu

SEQ ID NO: 1469675 - RNA, 21 nt, Human
ugaauuugugaagguggaaau

SEQ ID NO: 1469676 - RNA, 13 nt, Human
ugaauuugugaag

SEQ ID NO: 1469677 - RNA, 12 nt, Human
ugaaacuuuugg

SEQ ID NO: 1469678 - RNA, 17 nt, Human
agagacgggcccuggug

SEQ ID NO: 1469679 - RNA, 16 nt, Human
agagaccuuccagaaa

SEQ ID NO: 1469680 - RNA, 20 nt, Human
agagaucaggaagagaagga

SEQ ID NO: 1469681 - RNA, 19 nt, Human
agagaucaggaagagaagg

SEQ ID NO: 1469682 - RNA, 15 nt, Human
agagaucaggaagag

SEQ ID NO: 1469683 - RNA, 14 nt, Human
agagaucaggaaga

SEQ ID NO: 1469684 - RNA, 18 nt, Human
agagcugauggagaagga

SEQ ID NO: 1469685 - RNA, 17 nt, Human
agagcugauggagaagg

SEQ ID NO: 1469686 - RNA, 16 nt, Human
agagcugauggagaag

SEQ ID NO: 1469687 - RNA, 10 nt, Human
agagcucagg

SEQ ID NO: 1469688 - RNA, 12 nt, Human
agagcucaggau

SEQ ID NO: 1469689 - RNA, 13 nt, Human
agagcucaggaug

SEQ ID NO: 1469690 - RNA, 11 nt, Human
agagcuacaua

SEQ ID NO: 1469691 - RNA, 14 nt, Human
agagcuacauaauu

SEQ ID NO: 1469692 - RNA, 16 nt, Human
agagcuacauaauuua

SEQ ID NO: 1469693 - RNA, 18 nt, Human
agagcuacauaauuuagu

SEQ ID NO: 1469694 - RNA, 14 nt, Human
agagcuacguauuu

SEQ ID NO: 1469695 - RNA, 16 nt, Human
agagcuacguauuuaa

SEQ ID NO: 1469696 - RNA, 17 nt, Human
agagcuacguauuuaau

SEQ ID NO: 1469697 - RNA, 18 nt, Human
agagcaagaccccaucuc

SEQ ID NO: 1469698 - RNA, 21 nt, Human
agagcacgccuguacuagagc

SEQ ID NO: 1469699 - RNA, 20 nt, Human
agagcacgccuguacuagag

SEQ ID NO: 1469700 - RNA, 12 nt, Human
agagcacugcca

SEQ ID NO: 1469701 - RNA, 13 nt, Human
agagcacugccac

SEQ ID NO: 1469702 - RNA, 15 nt, Human
agagcaucaggccua

SEQ ID NO: 1469703 - RNA, 19 nt, Human
agagcaucaggccuagagg

SEQ ID NO: 1469704 - RNA, 18 nt, Human
ugaaacucauagacacug

SEQ ID NO: 1469705 - RNA, 19 nt, Human
ugaaacucauagacacuga

SEQ ID NO: 1469706 - RNA, 19 nt, Human
ugaaacucguuaauuugua

SEQ ID NO: 1469707 - RNA, 20 nt, Human
ugaaaaucuuauaauuuaaa

SEQ ID NO: 1469708 - RNA, 23 nt, Human
ugaaaauauuguuuuacaauagu

SEQ ID NO: 1469709 - RNA, 20 nt, Human
ugaaaauauuguuuuacaau

SEQ ID NO: 1469710 - RNA, 16 nt, Human
ugaaaauauuguuuua

SEQ ID NO: 1469711 - RNA, 19 nt, Human
ugaaaagguuuaugaaaaa

SEQ ID NO: 1469712 - RNA, 21 nt, Human
ugaaaagguuuaugaaaaaga

SEQ ID NO: 1469713 - RNA, 22 nt, Human
ugaaaagguuuaugaaaaagaa

SEQ ID NO: 1469714 - RNA, 23 nt, Human
ugaaaaaauauauaucaaauaua

SEQ ID NO: 1469715 - RNA, 13 nt, Human
ugaaaaagcgaaa

SEQ ID NO: 1469716 - RNA, 13 nt, Human
ugaaaaagaagaa

SEQ ID NO: 1469717 - RNA, 15 nt, Human
ucuuuguuucuuucu

SEQ ID NO: 1469718 - RNA, 18 nt, Human
agagacauuaacucauua

SEQ ID NO: 1469719 - RNA, 22 nt, Human
agagacauuaacucauuagacu

SEQ ID NO: 1469720 - RNA, 23 nt, Human
agagacauuaacucauuagacug

SEQ ID NO: 1469721 - RNA, 13 nt, Human
ucuuuguguagcu

SEQ ID NO: 1469722 - RNA, 15 nt, Human
ucuuuguguagcuuu

SEQ ID NO: 1469723 - RNA, 18 nt, Human
ucuuuguguagcuuugcu

SEQ ID NO: 1469724 - RNA, 21 nt, Human
ucuugaugccuggcggggugg

SEQ ID NO: 1469725 - RNA, 14 nt, Human
ucuugauguaaaau

SEQ ID NO: 1469726 - RNA, 15 nt, Human
ucuugauguaaaauc

SEQ ID NO: 1469727 - RNA, 16 nt, Human
ucuugauguaaaaucu

SEQ ID NO: 1469728 - RNA, 19 nt, Human
ucuugauguaaaaucuugu

SEQ ID NO: 1469729 - RNA, 22 nt, Human
ucuugauguaaaaucuugucau

SEQ ID NO: 1469730 - RNA, 15 nt, Human
ucuugaggggaccag

SEQ ID NO: 1469731 - RNA, 17 nt, Human
ucuugaggggaccagga

SEQ ID NO: 1469732 - RNA, 18 nt, Human
ucuugaggggaccaggag

SEQ ID NO: 1469733 - RNA, 19 nt, Human
ucuugaggggaccaggagu

SEQ ID NO: 1469734 - RNA, 13 nt, Human
agacucagcucug

SEQ ID NO: 1469735 - RNA, 18 nt, Human
agacucagcucugacauu

SEQ ID NO: 1469736 - RNA, 20 nt, Human
agacucagcucugacauucu

SEQ ID NO: 1469737 - RNA, 17 nt, Human
agacuaucuuacuauuu

SEQ ID NO: 1469738 - RNA, 20 nt, Human
agacuaucuuacuauuucac

SEQ ID NO: 1469739 - RNA, 15 nt, Human
ucuuuaugcuugcaa

SEQ ID NO: 1469740 - RNA, 14 nt, Human
ucuuuaugcuugca

SEQ ID NO: 1469741 - RNA, 12 nt, Human
ucuuuauuuuga

SEQ ID NO: 1469742 - RNA, 11 nt, Human
ucuuuauauga

SEQ ID NO: 1469743 - RNA, 15 nt, Human
ucuuuauaugaagaa

SEQ ID NO: 1469744 - RNA, 20 nt, Human
ucuuuaacuuaauugcuaug

SEQ ID NO: 1469745 - RNA, 22 nt, Human
ucuuggccaugggaggccuuuc

SEQ ID NO: 1469746 - RNA, 16 nt, Human
ucuuggccaugggagg

SEQ ID NO: 1469747 - RNA, 22 nt, Human
ucuuggggaguuuagggugggg

SEQ ID NO: 1469748 - RNA, 23 nt, Human
ucuuggggaguuuaggguggggg

SEQ ID NO: 1469749 - RNA, 19 nt, Human
ucuucugaacucaaacuga

SEQ ID NO: 1469750 - RNA, 24 nt, Human
ucuucugaacucaaacugaggaau

SEQ ID NO: 1469751 - RNA, 22 nt, Human
agacauuaacucauuagacugg

SEQ ID NO: 1469752 - RNA, 20 nt, Human
agacauuaacucauuagacu

SEQ ID NO: 1469753 - RNA, 13 nt, Human
ucuuccugacacu

SEQ ID NO: 1469754 - RNA, 15 nt, Human
ucuuccugacacuuu

SEQ ID NO: 1469755 - RNA, 16 nt, Human
ucuuccugacacuuua

SEQ ID NO: 1469756 - RNA, 22 nt, Human
ucuggauuccagagcacugcuc

SEQ ID NO: 1469757 - RNA, 20 nt, Human
ucuggauuccccaucucagg

SEQ ID NO: 1469758 - RNA, 15 nt, Human
ucuggcaacaucuuu

SEQ ID NO: 1469759 - RNA, 16 nt, Human
ucuggcaacaucuuua

SEQ ID NO: 1469760 - RNA, 22 nt, Human
ucuggaagugacuuuggcugca

SEQ ID NO: 1469761 - RNA, 19 nt, Human
ucuggaagugacuuuggcu

SEQ ID NO: 1469762 - RNA, 18 nt, Human
ucuggaagugacuuuggc

SEQ ID NO: 1469763 - RNA, 14 nt, Human
ucuggauuccagag

SEQ ID NO: 1469764 - RNA, 17 nt, Human
ucuggaagccccugggc

SEQ ID NO: 1469765 - RNA, 18 nt, Human
ucuggaagccccugggcc

SEQ ID NO: 1469766 - RNA, 22 nt, Human
ucuggcacagccuggcuguggc

SEQ ID NO: 1469767 - RNA, 13 nt, Human
agaaguugauaug

SEQ ID NO: 1469768 - RNA, 22 nt, Human
agaaguuggggacacauguauu

SEQ ID NO: 1469769 - RNA, 19 nt, Human
agaagcucugaagaacucu

SEQ ID NO: 1469770 - RNA, 13 nt, Human
agaaguuugcacu

SEQ ID NO: 1469771 - RNA, 16 nt, Human
agaaguuugcacuauc

SEQ ID NO: 1469772 - RNA, 21 nt, Human
agaaguuugcacuaucuuuca

SEQ ID NO: 1469773 - RNA, 23 nt, Human
agaaguuugcacuaucuuucagc

SEQ ID NO: 1469774 - RNA, 17 nt, Human
agaauaaucacgcuuuc

SEQ ID NO: 1469775 - RNA, 20 nt, Human
agaauaaucacgcuuuccug

SEQ ID NO: 1469776 - RNA, 21 nt, Human
agaauaaucacgcuuuccuga

SEQ ID NO: 1469777 - RNA, 12 nt, Human
agaaauuaugug

SEQ ID NO: 1469778 - RNA, 21 nt, Human
agaaccuggguugcagacagg

SEQ ID NO: 1469779 - RNA, 18 nt, Human
agaaauuacacccaaaga

SEQ ID NO: 1469780 - RNA, 23 nt, Human
ucugcaggucccuaauaaagcug

SEQ ID NO: 1469781 - RNA, 22 nt, Human
ucugcaggucccuaauaaagcu

SEQ ID NO: 1469782 - RNA, 19 nt, Human
ucugcaggucccuaauaaa

SEQ ID NO: 1469783 - RNA, 21 nt, Human
ucugcaggucccuaauaaagc

SEQ ID NO: 1469784 - RNA, 17 nt, Human
ucugaauaaagcaauua

SEQ ID NO: 1469785 - RNA, 14 nt, Human
ucugaauaaagcaa

SEQ ID NO: 1469786 - RNA, 13 nt, Human
agaacggaagaag

SEQ ID NO: 1469787 - RNA, 12 nt, Human
agaacggaagaa

SEQ ID NO: 1469788 - RNA, 17 nt, Human
agaacuagccaaaccag

SEQ ID NO: 1469789 - RNA, 19 nt, Human
agaacuagccaaaccagga

SEQ ID NO: 1469790 - RNA, 21 nt, Human
agaacuagccaaaccaggacc

SEQ ID NO: 1469791 - RNA, 12 nt, Human
agaaccuucucu

SEQ ID NO: 1469792 - RNA, 14 nt, Human
agaaccuucucuau

SEQ ID NO: 1469793 - RNA, 18 nt, Human
agaaccuucucuaugggg

SEQ ID NO: 1469794 - RNA, 13 nt, Human
agaagcaaguaaa

SEQ ID NO: 1469795 - RNA, 23 nt, Human
agaagcaaccucaguaauuuaga

SEQ ID NO: 1469796 - RNA, 21 nt, Human
agaagcaaccucaguaauuua

SEQ ID NO: 1469797 - RNA, 19 nt, Human
agaagcaccaaucaugaau

SEQ ID NO: 1469798 - RNA, 15 nt, Human
agaacuugacccuga

SEQ ID NO: 1469799 - RNA, 15 nt, Human
agaacuuugagcuac

SEQ ID NO: 1469800 - RNA, 20 nt, Human
agaacuuugagcuacugccg

SEQ ID NO: 1469801 - RNA, 22 nt, Human
ucucucacuuguuuuauuuaac

SEQ ID NO: 1469802 - RNA, 13 nt, Human
ucucuccagugca

SEQ ID NO: 1469803 - RNA, 13 nt, Human
ucucgaucuccug

SEQ ID NO: 1469804 - RNA, 18 nt, Human
acuuugugcauucuggau

SEQ ID NO: 1469805 - RNA, 13 nt, Human
acuuuagggaagu

SEQ ID NO: 1469806 - RNA, 13 nt, Human
acuuucuuucuca

SEQ ID NO: 1469807 - RNA, 22 nt, Human
acuuucuuucucacuaaaucuu

SEQ ID NO: 1469808 - RNA, 16 nt, Human
acuuucuuucucacua

SEQ ID NO: 1469809 - RNA, 17 nt, Human
acuuuagaauaugccuu

SEQ ID NO: 1469810 - RNA, 22 nt, Human
acuuguuuuauuuaaccucuaa

SEQ ID NO: 1469811 - RNA, 16 nt, Human
acuuguuuuggaugcc

SEQ ID NO: 1469812 - RNA, 13 nt, Human
acuuguuuuggau

SEQ ID NO: 1469813 - RNA, 19 nt, Human
acuuuguauaaaagggacu

SEQ ID NO: 1469814 - RNA, 14 nt, Human
acuuugaaguuagc

SEQ ID NO: 1469815 - RNA, 12 nt, Human
agaaaugaaaaa

SEQ ID NO: 1469816 - RNA, 13 nt, Human
agaaaugaaaaaa

SEQ ID NO: 1469817 - RNA, 16 nt, Human
agaaaugaaaaaauau

SEQ ID NO: 1469818 - RNA, 23 nt, Human
agaaauacuacuguguaagggcc

SEQ ID NO: 1469819 - RNA, 13 nt, Human
agaaauagaacaa

SEQ ID NO: 1469820 - RNA, 20 nt, Human
ucugaaggguaauuauauag

SEQ ID NO: 1469821 - RNA, 17 nt, Human
agaaaucuggcuucugg

SEQ ID NO: 1469822 - RNA, 22 nt, Human
agaaagcaucccucacccaucc

SEQ ID NO: 1469823 - RNA, 19 nt, Human
agaaagcaucccucaccca

SEQ ID NO: 1469824 - RNA, 17 nt, Human
agaaagcaucccucacc

SEQ ID NO: 1469825 - RNA, 23 nt, Human
agaaauacaaaaauacucagaua

SEQ ID NO: 1469826 - RNA, 14 nt, Human
agaaauacaaaaau

SEQ ID NO: 1469827 - RNA, 16 nt, Human
agaaaacaaggaugaa

SEQ ID NO: 1469828 - RNA, 16 nt, Human
agaaacacaacuauau

SEQ ID NO: 1469829 - RNA, 13 nt, Human
agaaaagcuauaa

SEQ ID NO: 1469830 - RNA, 21 nt, Human
agaaaagcuauaaaaugaaua

SEQ ID NO: 1469831 - RNA, 14 nt, Human
agaaaagcuuugaa

SEQ ID NO: 1469832 - RNA, 18 nt, Human
agaaacaagguuuucagu

SEQ ID NO: 1469833 - RNA, 12 nt, Human
agaaacauuuau

SEQ ID NO: 1469834 - RNA, 15 nt, Human
agaaacauuuauauu

SEQ ID NO: 1469835 - RNA, 19 nt, Human
agaaacauuuauauugaua

SEQ ID NO: 1469836 - RNA, 21 nt, Human
agaaacuuaaauuuuaguucu

SEQ ID NO: 1469837 - RNA, 15 nt, Human
agaaacauuugguaa

SEQ ID NO: 1469838 - RNA, 21 nt, Human
ucucugcaggucccuaauaaa

SEQ ID NO: 1469839 - RNA, 20 nt, Human
ucucugcaggucccuaauaa

SEQ ID NO: 1469840 - RNA, 19 nt, Human
ucucugcaggucccuaaua

SEQ ID NO: 1469841 - RNA, 22 nt, Human
ucucugcaggucccuaauaaag

SEQ ID NO: 1469842 - RNA, 23 nt, Human
agaaaaacaaacucguuuuuuac

SEQ ID NO: 1469843 - RNA, 21 nt, Human
agaaaacaaaacugcauuuca

SEQ ID NO: 1469844 - RNA, 13 nt, Human
agaaaacaaaacu

SEQ ID NO: 1469845 - RNA, 20 nt, Human
acuuccagauccuggaaauc

SEQ ID NO: 1469846 - RNA, 19 nt, Human
acuuccaaacuaauuuuua

SEQ ID NO: 1469847 - RNA, 14 nt, Human
acuuccaaacuaau

SEQ ID NO: 1469848 - RNA, 16 nt, Human
acuuccaaacuaauuu

SEQ ID NO: 1469849 - RNA, 17 nt, Human
acuuccaaacuaauuuu

SEQ ID NO: 1469850 - RNA, 18 nt, Human
acuuccaaacuaauuuuu

SEQ ID NO: 1469851 - RNA, 21 nt, Human
ucuaccuggucucuccuuguu

SEQ ID NO: 1469852 - RNA, 13 nt, Human
ucuauaauuuaaa

SEQ ID NO: 1469853 - RNA, 13 nt, Human
ucuauaaaccgaa

SEQ ID NO: 1469854 - RNA, 17 nt, Human
ucuauagccaaaaauag

SEQ ID NO: 1469855 - RNA, 20 nt, Human
ucuauagccaaaaauagcua

SEQ ID NO: 1469856 - RNA, 22 nt, Human
ucuaggaaauauacuuuuacaa

SEQ ID NO: 1469857 - RNA, 14 nt, Human
ucuagcuuaucuac

SEQ ID NO: 1469858 - RNA, 15 nt, Human
ucuaggaaauauacu

SEQ ID NO: 1469859 - RNA, 14 nt, Human
ucuaguucugccag

SEQ ID NO: 1469860 - RNA, 15 nt, Human
ucuagauugagagaa

SEQ ID NO: 1469861 - RNA, 13 nt, Human
ucuagccuggcua

SEQ ID NO: 1469862 - RNA, 18 nt, Human
acuugaaaauuaacauga

SEQ ID NO: 1469863 - RNA, 17 nt, Human
acuugaaaauuaacaug

SEQ ID NO: 1469864 - RNA, 21 nt, Human
acuucucuuguuagguaauuu

SEQ ID NO: 1469865 - RNA, 20 nt, Human
acuugaaauauccugcuuga

SEQ ID NO: 1469866 - RNA, 19 nt, Human
acuugaggacacaugucca

SEQ ID NO: 1469867 - RNA, 18 nt, Human
acuugaggacacaugucc

SEQ ID NO: 1469868 - RNA, 17 nt, Human
acuugaggacacauguc

SEQ ID NO: 1469869 - RNA, 21 nt, Human
acuugaacugauucacaucuc

SEQ ID NO: 1469870 - RNA, 13 nt, Human
acuugaacugauu

SEQ ID NO: 1469871 - RNA, 12 nt, Human
acuugacagugg

SEQ ID NO: 1469872 - RNA, 14 nt, Human
acuugacaguggaa

SEQ ID NO: 1469873 - RNA, 13 nt, Human
acuugacagugga

SEQ ID NO: 1469874 - RNA, 14 nt, Human
acuugacccugagc

SEQ ID NO: 1469875 - RNA, 15 nt, Human
acuugacccugagcu

SEQ ID NO: 1469876 - RNA, 18 nt, Human
acuugacccugagcugac

SEQ ID NO: 1469877 - RNA, 14 nt, Human
acuuguauuaugug

SEQ ID NO: 1469878 - RNA, 13 nt, Human
acuuguauuaugu

SEQ ID NO: 1469879 - RNA, 15 nt, Human
acuuguauuaugugu

SEQ ID NO: 1469880 - RNA, 16 nt, Human
acuugucuauuaccug

SEQ ID NO: 1469881 - RNA, 13 nt, Human
acuugccucugca

SEQ ID NO: 1469882 - RNA, 14 nt, Human
acuugccaaauuua

SEQ ID NO: 1469883 - RNA, 19 nt, Human
acuugccaaauuuagauuu

SEQ ID NO: 1469884 - RNA, 20 nt, Human
ucuauuuuuugaaaagcaga

SEQ ID NO: 1469885 - RNA, 22 nt, Human
ucucacaugauuccagccauca

SEQ ID NO: 1469886 - RNA, 19 nt, Human
ucucacaugauuccagcca

SEQ ID NO: 1469887 - RNA, 18 nt, Human
ucucaccaggcagccucu

SEQ ID NO: 1469888 - RNA, 19 nt, Human
ucucaccaggcagccucug

SEQ ID NO: 1469889 - RNA, 22 nt, Human
ucucaccaggcagccucugggg

SEQ ID NO: 1469890 - RNA, 21 nt, Human
ucucaccaggcagccucuggg

SEQ ID NO: 1469891 - RNA, 13 nt, Human
ucucaccaggcag

SEQ ID NO: 1469892 - RNA, 14 nt, Human
ucucaccaggcagc

SEQ ID NO: 1469893 - RNA, 16 nt, Human
ucucaccaggcagccu

SEQ ID NO: 1469894 - RNA, 17 nt, Human
ucucaccaggcagccuc

SEQ ID NO: 1469895 - RNA, 20 nt, Human
ucucacaugauuccagccau

SEQ ID NO: 1469896 - RNA, 15 nt, Human
ucuauuuuuaucuga

SEQ ID NO: 1469897 - RNA, 23 nt, Human
ucuauuguuguacacagaaauac

SEQ ID NO: 1469898 - RNA, 22 nt, Human
ucuauuguuguacacagaaaua

SEQ ID NO: 1469899 - RNA, 19 nt, Human
ucuauagccaaaaauagcu

SEQ ID NO: 1469900 - RNA, 12 nt, Human
ucuauuggucuc

SEQ ID NO: 1469901 - RNA, 20 nt, Human
acuuccuaaauauuaugaga

SEQ ID NO: 1469902 - RNA, 12 nt, Human
ucgccucagccu

SEQ ID NO: 1469903 - RNA, 17 nt, Human
ucgccggaucugaggga

SEQ ID NO: 1469904 - RNA, 16 nt, Human
ucgccggaucugaggg

SEQ ID NO: 1469905 - RNA, 18 nt, Human
ucgcccuggacugugugc

SEQ ID NO: 1469906 - RNA, 22 nt, Human
acugaagaagcaccaaucauga

SEQ ID NO: 1469907 - RNA, 19 nt, Human
acugaacaccauugaaggc

SEQ ID NO: 1469908 - RNA, 19 nt, Human
ucgcccaugcuggagugca

SEQ ID NO: 1469909 - RNA, 17 nt, Human
ucgcuguccuuucuaga

SEQ ID NO: 1469910 - RNA, 11 nt, Human
ucgcuguccuu

SEQ ID NO: 1469911 - RNA, 15 nt, Human
acugggggaaaagau

SEQ ID NO: 1469912 - RNA, 16 nt, Human
acuggggcaggggccg

SEQ ID NO: 1469913 - RNA, 18 nt, Human
acuguacagacagaaaaa

SEQ ID NO: 1469914 - RNA, 14 nt, Human
acuggguaaugaaa

SEQ ID NO: 1469915 - RNA, 20 nt, Human
acuggguaaugaaacaaaga

SEQ ID NO: 1469916 - RNA, 23 nt, Human
acuguacuugcucuugaugccug

SEQ ID NO: 1469917 - RNA, 15 nt, Human
acuguacuugcucuu

SEQ ID NO: 1469918 - RNA, 15 nt, Human
acuguaucuaggcaa

SEQ ID NO: 1469919 - RNA, 22 nt, Human
acuguaucuaggcaacauagua

SEQ ID NO: 1469920 - RNA, 23 nt, Human
acuguaucuaggcaacauaguau

SEQ ID NO: 1469921 - RNA, 13 nt, Human
acugucauagaaa

SEQ ID NO: 1469922 - RNA, 14 nt, Human
ucguuaucuaauag

SEQ ID NO: 1469923 - RNA, 15 nt, Human
ucguucaaagcauga

SEQ ID NO: 1469924 - RNA, 19 nt, Human
ucguuuauuuucaagaaua

SEQ ID NO: 1469925 - RNA, 20 nt, Human
ucggggagccgggagccuga

SEQ ID NO: 1469926 - RNA, 20 nt, Human
ucguaagauuuccuucuuuu

SEQ ID NO: 1469927 - RNA, 15 nt, Human
ucguacagaaagcug

SEQ ID NO: 1469928 - RNA, 16 nt, Human
ucguacagaaagcugc

SEQ ID NO: 1469929 - RNA, 13 nt, Human
acuguggguagac

SEQ ID NO: 1469930 - RNA, 17 nt, Human
ucuaccaaaaaucucaa

SEQ ID NO: 1469931 - RNA, 18 nt, Human
ucuaaguguuucauaaau

SEQ ID NO: 1469932 - RNA, 14 nt, Human
ucuaaguuaauuua

SEQ ID NO: 1469933 - RNA, 16 nt, Human
ucuaaguuaauuuaaa

SEQ ID NO: 1469934 - RNA, 18 nt, Human
ucuaaguuaauuuaaagu

SEQ ID NO: 1469935 - RNA, 20 nt, Human
ucuaaguuaauuuaaaguug

SEQ ID NO: 1469936 - RNA, 21 nt, Human
ucuaaguuaauuuaaaguugu

SEQ ID NO: 1469937 - RNA, 19 nt, Human
ucuaaagcugguuuaaugu

SEQ ID NO: 1469938 - RNA, 21 nt, Human
ucuaaagcugguuuaauguuu

SEQ ID NO: 1469939 - RNA, 21 nt, Human
ucuaaacuggauucacagcuc

SEQ ID NO: 1469940 - RNA, 13 nt, Human
ucuaagaaacauu

SEQ ID NO: 1469941 - RNA, 15 nt, Human
ucuaagaaacauuua

SEQ ID NO: 1469942 - RNA, 17 nt, Human
ucuaagaaacauuuaua

SEQ ID NO: 1469943 - RNA, 22 nt, Human
ucuaagaaacauuuauauugau

SEQ ID NO: 1469944 - RNA, 13 nt, Human
ucuaagaaagaac

SEQ ID NO: 1469945 - RNA, 18 nt, Human
ucuaagaaacauuuauau

SEQ ID NO: 1469946 - RNA, 12 nt, Human
ucuaagaaagaa

SEQ ID NO: 1469947 - RNA, 19 nt, Human
uaugugccagauuuaugca

SEQ ID NO: 1469948 - RNA, 14 nt, Human
uaugugccagauuu

SEQ ID NO: 1469949 - RNA, 23 nt, Human
uaugugccagauuuaugcauauu

SEQ ID NO: 1469950 - RNA, 20 nt, Human
acaucuuuaaggggaggaac

SEQ ID NO: 1469951 - RNA, 11 nt, Human
acaucuuuaag

SEQ ID NO: 1469952 - RNA, 13 nt, Human
acaucuuuauccg

SEQ ID NO: 1469953 - RNA, 22 nt, Human
uauuuuaagacgaaacauuugu

SEQ ID NO: 1469954 - RNA, 14 nt, Human
uauuuuaagacgaa

SEQ ID NO: 1469955 - RNA, 14 nt, Human
uauuuuaaaagaau

SEQ ID NO: 1469956 - RNA, 18 nt, Human
uauuuuaaaagaaugauu

SEQ ID NO: 1469957 - RNA, 14 nt, Human
uauuuguaauagau

SEQ ID NO: 1469958 - RNA, 15 nt, Human
uauuuguaauagaug

SEQ ID NO: 1469959 - RNA, 20 nt, Human
uauuuguaauagauguuuga

SEQ ID NO: 1469960 - RNA, 12 nt, Human
uauuuguacaua

SEQ ID NO: 1469961 - RNA, 14 nt, Human
uauuuuaauaaaca

SEQ ID NO: 1469962 - RNA, 12 nt, Human
uauuuuaaagaa

SEQ ID NO: 1469963 - RNA, 13 nt, Human
uauuuuaaagaau

SEQ ID NO: 1469964 - RNA, 16 nt, Human
uauuuuaaagaauugu

SEQ ID NO: 1469965 - RNA, 14 nt, Human
uauuuuaaagaauu

SEQ ID NO: 1469966 - RNA, 17 nt, Human
uauuuuaauaaacacuc

SEQ ID NO: 1469967 - RNA, 19 nt, Human
uauuuuaauaauguuucaa

SEQ ID NO: 1469968 - RNA, 22 nt, Human
uauuuuaauaauguuucaaaca

SEQ ID NO: 1469969 - RNA, 13 nt, Human
uauuuuacauaaa

SEQ ID NO: 1469970 - RNA, 14 nt, Human
uauuuuacaauuuu

SEQ ID NO: 1469971 - RNA, 23 nt, Human
uauuuuacaauuuuuuaucaugc

SEQ ID NO: 1469972 - RNA, 22 nt, Human
uauuuugccaagggcauaaauu

SEQ ID NO: 1469973 - RNA, 23 nt, Human
uauuuugccaagggcauaaauua

SEQ ID NO: 1469974 - RNA, 14 nt, Human
uauuuugcuggaau

SEQ ID NO: 1469975 - RNA, 20 nt, Human
uauuuuguguuuaggaacua

SEQ ID NO: 1469976 - RNA, 17 nt, Human
uauuuuguguuuaggaa

SEQ ID NO: 1469977 - RNA, 13 nt, Human
uauuuuguaaacu

SEQ ID NO: 1469978 - RNA, 20 nt, Human
uauuuuguaaacucaaaaua

SEQ ID NO: 1469979 - RNA, 21 nt, Human
uauuuuguaaacucaaaauau

SEQ ID NO: 1469980 - RNA, 19 nt, Human
uauuuuuggcagucugaau

SEQ ID NO: 1469981 - RNA, 20 nt, Human
uauuuuuggcagucugaauu

SEQ ID NO: 1469982 - RNA, 20 nt, Human
uauuuuucaugauuuugaaa

SEQ ID NO: 1469983 - RNA, 12 nt, Human
uauuuuucauga

SEQ ID NO: 1469984 - RNA, 21 nt, Human
uauuuuguuuugugcagagau

SEQ ID NO: 1469985 - RNA, 21 nt, Human
uauuuuuaauauauacuauga

SEQ ID NO: 1469986 - RNA, 21 nt, Human
ucaaauacgugggcauucaaa

SEQ ID NO: 1469987 - RNA, 22 nt, Human
ucaaauacgugggcauucaaau

SEQ ID NO: 1469988 - RNA, 13 nt, Human
ucaaauauauuca

SEQ ID NO: 1469989 - RNA, 23 nt, Human
ucaaauacgugggcauucaaaug

SEQ ID NO: 1469990 - RNA, 18 nt, Human
ucaaaguguuuucucuga

SEQ ID NO: 1469991 - RNA, 19 nt, Human
ucaaaguguuuucucugaa

SEQ ID NO: 1469992 - RNA, 13 nt, Human
acaugaaacagaa

SEQ ID NO: 1469993 - RNA, 15 nt, Human
acaugaaacagaaac

SEQ ID NO: 1469994 - RNA, 22 nt, Human
ucaaacaguacacuaucuuaau

SEQ ID NO: 1469995 - RNA, 13 nt, Human
ucaaagcaagcau

SEQ ID NO: 1469996 - RNA, 15 nt, Human
ucaaagcaagcauuc

SEQ ID NO: 1469997 - RNA, 19 nt, Human
ucaaagcaagcauucagaa

SEQ ID NO: 1469998 - RNA, 21 nt, Human
ucaaagcaagcauucagaaga

SEQ ID NO: 1469999 - RNA, 22 nt, Human
ucaaagcaagcauucagaagaa

SEQ ID NO: 1470000 - RNA, 14 nt, Human
ucaaaagggccaaa

SEQ ID NO: 1470001 - RNA, 21 nt, Human
ucaaaagggccaaagaaccaa

SEQ ID NO: 1470002 - RNA, 20 nt, Human
ucaaaagggccaaagaacca

SEQ ID NO: 1470003 - RNA, 22 nt, Human
acauggcuggagcuagaauuug

SEQ ID NO: 1470004 - RNA, 21 nt, Human
acauggccccucccccugcca

SEQ ID NO: 1470005 - RNA, 22 nt, Human
acauggccccucccccugccag

SEQ ID NO: 1470006 - RNA, 14 nt, Human
acauuagaagacaa

SEQ ID NO: 1470007 - RNA, 15 nt, Human
acauuagaagacaau

SEQ ID NO: 1470008 - RNA, 20 nt, Human
acauuagaagacaauugaca

SEQ ID NO: 1470009 - RNA, 21 nt, Human
acauuagaagacaauugacaa

SEQ ID NO: 1470010 - RNA, 18 nt, Human
acauguaucuaugcauuu

SEQ ID NO: 1470011 - RNA, 21 nt, Human
acauguaucuaugcauuuucu

SEQ ID NO: 1470012 - RNA, 16 nt, Human
acauuggaaacaaguc

SEQ ID NO: 1470013 - RNA, 14 nt, Human
acauuuuacauuaa

SEQ ID NO: 1470014 - RNA, 18 nt, Human
acauuuuacauuaaauuu

SEQ ID NO: 1470015 - RNA, 15 nt, Human
acauuuuacauuaaa

SEQ ID NO: 1470016 - RNA, 14 nt, Human
ucaaggucugcuuu

SEQ ID NO: 1470017 - RNA, 15 nt, Human
ucaaggucugcuuuu

SEQ ID NO: 1470018 - RNA, 16 nt, Human
ucaaggcggugcuuga

SEQ ID NO: 1470019 - RNA, 19 nt, Human
ucaagauuguuccugcuuu

SEQ ID NO: 1470020 - RNA, 21 nt, Human
ucaagcaaacagcuucacaaa

SEQ ID NO: 1470021 - RNA, 16 nt, Human
ucaagauuguuccugc

SEQ ID NO: 1470022 - RNA, 23 nt, Human
ucaauauuucagauaaucacaau

SEQ ID NO: 1470023 - RNA, 19 nt, Human
ucaaucagucucagaaugu

SEQ ID NO: 1470024 - RNA, 22 nt, Human
ucaaucagucucagaaugucau

SEQ ID NO: 1470025 - RNA, 21 nt, Human
ucaaucagucucagaauguca

SEQ ID NO: 1470026 - RNA, 16 nt, Human
ucacagaccuuugaac

SEQ ID NO: 1470027 - RNA, 17 nt, Human
accacacccacacucag

SEQ ID NO: 1470028 - RNA, 19 nt, Human
ucacagcuccaagaauuuc

SEQ ID NO: 1470029 - RNA, 13 nt, Human
ucacauuccugaa

SEQ ID NO: 1470030 - RNA, 17 nt, Human
ucacauuccugaacagg

SEQ ID NO: 1470031 - RNA, 22 nt, Human
ucacauuagaagacaauugaca

SEQ ID NO: 1470032 - RNA, 22 nt, Human
ucacauuccucugcccuuccug

SEQ ID NO: 1470033 - RNA, 20 nt, Human
ucacauuccugaacaggaua

SEQ ID NO: 1470034 - RNA, 20 nt, Human
ucacaugauuccagccauca

SEQ ID NO: 1470035 - RNA, 12 nt, Human
ucacauuagaag

SEQ ID NO: 1470036 - RNA, 14 nt, Human
ucacauuagaagac

SEQ ID NO: 1470037 - RNA, 15 nt, Human
ucacauuagaagaca

SEQ ID NO: 1470038 - RNA, 19 nt, Human
ucacaugauuccagccauc

SEQ ID NO: 1470039 - RNA, 17 nt, Human
ucacaugauuccagcca

SEQ ID NO: 1470040 - RNA, 21 nt, Human
ucacaugauuccagccaucac

SEQ ID NO: 1470041 - RNA, 23 nt, Human
accaaaaaucucaauauuucaga

SEQ ID NO: 1470042 - RNA, 14 nt, Human
accaacauaaaaau

SEQ ID NO: 1470043 - RNA, 15 nt, Human
accaacauaaaaaug

SEQ ID NO: 1470044 - RNA, 23 nt, Human
accaacauaaaaaugaucuaaac

SEQ ID NO: 1470045 - RNA, 16 nt, Human
accacaagacugcaca

SEQ ID NO: 1470046 - RNA, 22 nt, Human
accacaaacuguaauacaauga

SEQ ID NO: 1470047 - RNA, 18 nt, Human
accacaaacuguaauaca

SEQ ID NO: 1470048 - RNA, 20 nt, Human
accacaacuauuuucagaug

SEQ ID NO: 1470049 - RNA, 17 nt, Human
accacaaugcagugccu

SEQ ID NO: 1470050 - RNA, 21 nt, Human
ucacugaacuuugcugagccu

SEQ ID NO: 1470051 - RNA, 18 nt, Human
ucacugagaccaaggcuu

SEQ ID NO: 1470052 - RNA, 16 nt, Human
ucaccagcccuggcaa

SEQ ID NO: 1470053 - RNA, 19 nt, Human
ucacauuccugaacaggau

SEQ ID NO: 1470054 - RNA, 20 nt, Human
ucacucaaggcggugcuuga

SEQ ID NO: 1470055 - RNA, 12 nt, Human
ucacucaaggcg

SEQ ID NO: 1470056 - RNA, 18 nt, Human
ucacugcaaccuccaccu

SEQ ID NO: 1470057 - RNA, 14 nt, Human
ucacugcaaccucc

SEQ ID NO: 1470058 - RNA, 21 nt, Human
ucacugaguuuuccauggcag

SEQ ID NO: 1470059 - RNA, 17 nt, Human
ucacugaguuuuccaug

SEQ ID NO: 1470060 - RNA, 23 nt, Human
ucacugaguuuuccauggcagga

SEQ ID NO: 1470061 - RNA, 18 nt, Human
ucacugcaaccucugccu

SEQ ID NO: 1470062 - RNA, 18 nt, Human
ucacugcaagcuccgccu

SEQ ID NO: 1470063 - RNA, 16 nt, Human
ucacuuaauugcuaca

SEQ ID NO: 1470064 - RNA, 21 nt, Human
ucacuuaggaaauggcuuugu

SEQ ID NO: 1470065 - RNA, 21 nt, Human
ucacuucagguauaccucacu

SEQ ID NO: 1470066 - RNA, 16 nt, Human
ucacuucauaauccag

SEQ ID NO: 1470067 - RNA, 22 nt, Human
accaugucaaggguucaagauu

SEQ ID NO: 1470068 - RNA, 20 nt, Human
accauggccagcuaauuuuu

SEQ ID NO: 1470069 - RNA, 24 nt, Human
accauggacacuacacccagcaau

SEQ ID NO: 1470070 - RNA, 23 nt, Human
accauggacacuacacccagcaa

SEQ ID NO: 1470071 - RNA, 22 nt, Human
accauggacacuacacccagca

SEQ ID NO: 1470072 - RNA, 21 nt, Human
accauggacacuacacccagc

SEQ ID NO: 1470073 - RNA, 18 nt, Human
accaugcugcuggggaag

SEQ ID NO: 1470074 - RNA, 19 nt, Human
accaugcugcuggggaaga

SEQ ID NO: 1470075 - RNA, 21 nt, Human
accaugcugcuggggaagaca

SEQ ID NO: 1470076 - RNA, 22 nt, Human
accaugcugcuggggaagacag

SEQ ID NO: 1470077 - RNA, 23 nt, Human
accaugcugcuggggaagacagu

SEQ ID NO: 1470078 - RNA, 16 nt, Human
accaugcaaaugcuau

SEQ ID NO: 1470079 - RNA, 19 nt, Human
accaugccaggcuaauuuu

SEQ ID NO: 1470080 - RNA, 22 nt, Human
accaugcccggcuaauuuuugu

SEQ ID NO: 1470081 - RNA, 20 nt, Human
accaugccaggcuaauuuuu

SEQ ID NO: 1470082 - RNA, 14 nt, Human
accaugcugcuggg

SEQ ID NO: 1470083 - RNA, 16 nt, Human
accaugcugcugggga

SEQ ID NO: 1470084 - RNA, 17 nt, Human
accaugcugcuggggaa

SEQ ID NO: 1470085 - RNA, 23 nt, Human
accauguuggccaggcuugucuc

SEQ ID NO: 1470086 - RNA, 18 nt, Human
acccaaagagguauuuau

SEQ ID NO: 1470087 - RNA, 22 nt, Human
accccagcuggggccaggcugg

SEQ ID NO: 1470088 - RNA, 19 nt, Human
accccagcuggggccaggc

SEQ ID NO: 1470089 - RNA, 13 nt, Human
acccagggcucug

SEQ ID NO: 1470090 - RNA, 12 nt, Human
acccagggcucu

SEQ ID NO: 1470091 - RNA, 15 nt, Human
acccagggcucugua

SEQ ID NO: 1470092 - RNA, 15 nt, Human
ucagauuucugagga

SEQ ID NO: 1470093 - RNA, 19 nt, Human
ucagauucccagagcaaaa

SEQ ID NO: 1470094 - RNA, 21 nt, Human
ucagauucccagagcaaaaua

SEQ ID NO: 1470095 - RNA, 22 nt, Human
ucagauucccagagcaaaauaa

SEQ ID NO: 1470096 - RNA, 14 nt, Human
acccaggacaggau

SEQ ID NO: 1470097 - RNA, 20 nt, Human
acccaggacaggauccaggc

SEQ ID NO: 1470098 - RNA, 17 nt, Human
acccaggacaggaucca

SEQ ID NO: 1470099 - RNA, 16 nt, Human
ucagaauagaaauuag

SEQ ID NO: 1470100 - RNA, 14 nt, Human
acccagcaauagag

SEQ ID NO: 1470101 - RNA, 13 nt, Human
ucagagaauuucu

SEQ ID NO: 1470102 - RNA, 23 nt, Human
ucagagaauuucuaccauuucag

SEQ ID NO: 1470103 - RNA, 16 nt, Human
ucagagaggccuuuug

SEQ ID NO: 1470104 - RNA, 19 nt, Human
ucagagcaggugcuggcuc

SEQ ID NO: 1470105 - RNA, 20 nt, Human
acccucaugcugugugacuc

SEQ ID NO: 1470106 - RNA, 23 nt, Human
acccuccccgcaccccccaagcu

SEQ ID NO: 1470107 - RNA, 22 nt, Human
acccuccccaaaggcuuugccc

SEQ ID NO: 1470108 - RNA, 17 nt, Human
acccucccucccuaccc

SEQ ID NO: 1470109 - RNA, 11 nt, Human
acccucccucc

SEQ ID NO: 1470110 - RNA, 22 nt, Human
acccugagcugaccagccguga

SEQ ID NO: 1470111 - RNA, 17 nt, Human
acccugccccagcuggg

SEQ ID NO: 1470112 - RNA, 14 nt, Human
ucaggccagagcca

SEQ ID NO: 1470113 - RNA, 17 nt, Human
ucaggccagagccaagg

SEQ ID NO: 1470114 - RNA, 14 nt, Human
ucagguacuuguaa

SEQ ID NO: 1470115 - RNA, 17 nt, Human
ucagguauaccucacuu

SEQ ID NO: 1470116 - RNA, 15 nt, Human
ucagguauaccucac

SEQ ID NO: 1470117 - RNA, 21 nt, Human
accgaacugauguaaguaaac

SEQ ID NO: 1470118 - RNA, 17 nt, Human
acccuugguuccuaacu

SEQ ID NO: 1470119 - RNA, 18 nt, Human
ucaguaauuuagaaauca

SEQ ID NO: 1470120 - RNA, 19 nt, Human
ucaguaauuuagaaaucau

SEQ ID NO: 1470121 - RNA, 20 nt, Human
ucaguaauuuagaaaucauu

SEQ ID NO: 1470122 - RNA, 14 nt, Human
ucaguaauuugagg

SEQ ID NO: 1470123 - RNA, 15 nt, Human
ucaguaauuugagga

SEQ ID NO: 1470124 - RNA, 17 nt, Human
ucaguaauuugaggaca

SEQ ID NO: 1470125 - RNA, 18 nt, Human
ucaguaauuugaggacaa

SEQ ID NO: 1470126 - RNA, 18 nt, Human
ucaguaauuuguuuaaaa

SEQ ID NO: 1470127 - RNA, 18 nt, Human
ucauaaauaaaguuuguu

SEQ ID NO: 1470128 - RNA, 24 nt, Human
ucauaaagcaggcagaacucaucu

SEQ ID NO: 1470129 - RNA, 20 nt, Human
ucauaaguauuaugucucuu

SEQ ID NO: 1470130 - RNA, 21 nt, Human
ucauaagauauuuuucaugau

SEQ ID NO: 1470131 - RNA, 18 nt, Human
ucauaagauauuuuucau

SEQ ID NO: 1470132 - RNA, 14 nt, Human
ucagugcugugcug

SEQ ID NO: 1470133 - RNA, 16 nt, Human
ucagugcugugcugug

SEQ ID NO: 1470134 - RNA, 22 nt, Human
ucagugcugugcugugcuaugg

SEQ ID NO: 1470135 - RNA, 13 nt, Human
ucagugcugugcu

SEQ ID NO: 1470136 - RNA, 21 nt, Human
uccugaaaacccuugccaugu

SEQ ID NO: 1470137 - RNA, 22 nt, Human
uccugaaaacccuugccaugug

SEQ ID NO: 1470138 - RNA, 16 nt, Human
uccucugcccgggagc

SEQ ID NO: 1470139 - RNA, 22 nt, Human
uccucugcccgggagcucagga

SEQ ID NO: 1470140 - RNA, 18 nt, Human
acugaaaauauuguuuua

SEQ ID NO: 1470141 - RNA, 15 nt, Human
acugaaaaugugcua

SEQ ID NO: 1470142 - RNA, 17 nt, Human
acugaaaauuauuuaaa

SEQ ID NO: 1470143 - RNA, 19 nt, Human
acugaaaaugugcuauacu

SEQ ID NO: 1470144 - RNA, 19 nt, Human
acucuuucuuucaauaaaa

SEQ ID NO: 1470145 - RNA, 21 nt, Human
uccugaccccaaguuauccac

SEQ ID NO: 1470146 - RNA, 15 nt, Human
uccugaccucaggca

SEQ ID NO: 1470147 - RNA, 22 nt, Human
uccugaauccaaacuaauccau

SEQ ID NO: 1470148 - RNA, 17 nt, Human
uccucuccccaugaugu

SEQ ID NO: 1470149 - RNA, 13 nt, Human
uccucuccugucu

SEQ ID NO: 1470150 - RNA, 16 nt, Human
uccucucucuguguua

SEQ ID NO: 1470151 - RNA, 19 nt, Human
acucuucuugaaauuuuaa

SEQ ID NO: 1470152 - RNA, 19 nt, Human
acucuugaaaaaugcaugu

SEQ ID NO: 1470153 - RNA, 14 nt, Human
acucuugaaaaaug

SEQ ID NO: 1470154 - RNA, 21 nt, Human
acucuugaaaaaugcauguug

SEQ ID NO: 1470155 - RNA, 23 nt, Human
acucguguguuucuauuuuuuga

SEQ ID NO: 1470156 - RNA, 15 nt, Human
acucguguguuucua

SEQ ID NO: 1470157 - RNA, 19 nt, Human
acucguauagcaugcaucu

SEQ ID NO: 1470158 - RNA, 22 nt, Human
acucgugucuggcacagccugg

SEQ ID NO: 1470159 - RNA, 23 nt, Human
acucgugucuggcacagccuggc

SEQ ID NO: 1470160 - RNA, 13 nt, Human
acucuugaaaaau

SEQ ID NO: 1470161 - RNA, 15 nt, Human
acucuucuugaaauu

SEQ ID NO: 1470162 - RNA, 16 nt, Human
acucuucuugaaauuu

SEQ ID NO: 1470163 - RNA, 23 nt, Human
acucuucugagcaccuacuuaca

SEQ ID NO: 1470164 - RNA, 19 nt, Human
acucuucaaggucugcuuu

SEQ ID NO: 1470165 - RNA, 16 nt, Human
acucuucacucuucaa

SEQ ID NO: 1470166 - RNA, 20 nt, Human
acucuucaaggucugcuuuu

SEQ ID NO: 1470167 - RNA, 15 nt, Human
acucuucacucuuca

SEQ ID NO: 1470168 - RNA, 15 nt, Human
acucuucaaaugccu

SEQ ID NO: 1470169 - RNA, 14 nt, Human
acuccagaaaguga

SEQ ID NO: 1470170 - RNA, 18 nt, Human
acuccagaaagugacaag

SEQ ID NO: 1470171 - RNA, 21 nt, Human
uccgugcuuaaccaaagaagc

SEQ ID NO: 1470172 - RNA, 14 nt, Human
uccgugcuuaacca

SEQ ID NO: 1470173 - RNA, 16 nt, Human
uccgugugggagaccg

SEQ ID NO: 1470174 - RNA, 14 nt, Human
acuccuuucucauc

SEQ ID NO: 1470175 - RNA, 20 nt, Human
acuccuucaacaauucuaaa

SEQ ID NO: 1470176 - RNA, 22 nt, Human
acuccuucaacaauucuaaaau

SEQ ID NO: 1470177 - RNA, 23 nt, Human
acuccuugauuuuagccuucucu

SEQ ID NO: 1470178 - RNA, 21 nt, Human
acuccaaacugacucuuaaga

SEQ ID NO: 1470179 - RNA, 23 nt, Human
acucauuuuucaugauaaugaac

SEQ ID NO: 1470180 - RNA, 20 nt, Human
acucauuuuucaugauaaug

SEQ ID NO: 1470181 - RNA, 13 nt, Human
acuccaaaauguu

SEQ ID NO: 1470182 - RNA, 22 nt, Human
acuccaaaauguuggucauuuu

SEQ ID NO: 1470183 - RNA, 19 nt, Human
acucauuuuucaugauaau

SEQ ID NO: 1470184 - RNA, 16 nt, Human
acucaucuuucccucc

SEQ ID NO: 1470185 - RNA, 13 nt, Human
acucaucuuuccc

SEQ ID NO: 1470186 - RNA, 23 nt, Human
acucaucuagguaaauuacaguu

SEQ ID NO: 1470187 - RNA, 22 nt, Human
acucagauaagguaaaaugcca

SEQ ID NO: 1470188 - RNA, 23 nt, Human
ucccucuuccuucccugcuguga

SEQ ID NO: 1470189 - RNA, 21 nt, Human
ucccucuuccuucccugcugu

SEQ ID NO: 1470190 - RNA, 22 nt, Human
ucccucuuccuucccugcugug

SEQ ID NO: 1470191 - RNA, 20 nt, Human
acuagaguuuagcuggaaaa

SEQ ID NO: 1470192 - RNA, 14 nt, Human
acuagaggugagaa

SEQ ID NO: 1470193 - RNA, 18 nt, Human
acuagaggugagaaauuu

SEQ ID NO: 1470194 - RNA, 21 nt, Human
acuagaggugagaaauuuaaa

SEQ ID NO: 1470195 - RNA, 12 nt, Human
acuagacaagcc

SEQ ID NO: 1470196 - RNA, 15 nt, Human
acuagacaagccaga

SEQ ID NO: 1470197 - RNA, 17 nt, Human
acuagacaagccagaac

SEQ ID NO: 1470198 - RNA, 21 nt, Human
acuagacaagccagaacuuga

SEQ ID NO: 1470199 - RNA, 23 nt, Human
acuacuucuuuuuucaaaagaaa

SEQ ID NO: 1470200 - RNA, 17 nt, Human
acuacuugggagcaccg

SEQ ID NO: 1470201 - RNA, 14 nt, Human
acuacuagggaaau

SEQ ID NO: 1470202 - RNA, 13 nt, Human
acuacgccuggcu

SEQ ID NO: 1470203 - RNA, 15 nt, Human
uccccacuguaucua

SEQ ID NO: 1470204 - RNA, 19 nt, Human
uccccacuguaucuaggca

SEQ ID NO: 1470205 - RNA, 13 nt, Human
uccccaucucagg

SEQ ID NO: 1470206 - RNA, 14 nt, Human
uccccaucucaggc

SEQ ID NO: 1470207 - RNA, 16 nt, Human
acuauguaaacuacuu

SEQ ID NO: 1470208 - RNA, 14 nt, Human
acuauguaaacuac

SEQ ID NO: 1470209 - RNA, 12 nt, Human
acuauguaaacu

SEQ ID NO: 1470210 - RNA, 11 nt, Human
acuauguaaac

SEQ ID NO: 1470211 - RNA, 16 nt, Human
uccccggacucaagcc

SEQ ID NO: 1470212 - RNA, 20 nt, Human
uccaugaccuaguuuuccau

SEQ ID NO: 1470213 - RNA, 14 nt, Human
acggccuuucuagc

SEQ ID NO: 1470214 - RNA, 21 nt, Human
acggccuuucuagccuggcua

SEQ ID NO: 1470215 - RNA, 15 nt, Human
uccagucuuccugac

SEQ ID NO: 1470216 - RNA, 19 nt, Human
uccagucuuccugacacuu

SEQ ID NO: 1470217 - RNA, 21 nt, Human
uccagucuuccugacacuuua

SEQ ID NO: 1470218 - RNA, 22 nt, Human
uccagucuuccugacacuuuaa

SEQ ID NO: 1470219 - RNA, 23 nt, Human
uccagucuuccugacacuuuaau

SEQ ID NO: 1470220 - RNA, 16 nt, Human
uccauccuacccccug

SEQ ID NO: 1470221 - RNA, 13 nt, Human
uccaucccuggcc

SEQ ID NO: 1470222 - RNA, 14 nt, Human
uccaucccuggccc

SEQ ID NO: 1470223 - RNA, 15 nt, Human
uccaucccuggcccc

SEQ ID NO: 1470224 - RNA, 20 nt, Human
uccaucccuggcccccuccc

SEQ ID NO: 1470225 - RNA, 20 nt, Human
uccauccuacccccugugcc

SEQ ID NO: 1470226 - RNA, 22 nt, Human
uccaucccuggcccccucccug

SEQ ID NO: 1470227 - RNA, 23 nt, Human
uccaucccuggcccccucccugg

SEQ ID NO: 1470228 - RNA, 24 nt, Human
uccaucccuggcccccucccugga

SEQ ID NO: 1470229 - RNA, 16 nt, Human
ucccaauugagaaaaa

SEQ ID NO: 1470230 - RNA, 20 nt, Human
ucccaauucauccucacuca

SEQ ID NO: 1470231 - RNA, 18 nt, Human
ucccacagguucaggcga

SEQ ID NO: 1470232 - RNA, 19 nt, Human
ucccacccaauucaaaaca

SEQ ID NO: 1470233 - RNA, 15 nt, Human
acgggguuucaccau

SEQ ID NO: 1470234 - RNA, 15 nt, Human
acggcagccacagcu

SEQ ID NO: 1470235 - RNA, 15 nt, Human
acggauuuauuuuuc

SEQ ID NO: 1470236 - RNA, 15 nt, Human
acgcccaggacccca

SEQ ID NO: 1470237 - RNA, 18 nt, Human
uccacauuucccccuagc

SEQ ID NO: 1470238 - RNA, 22 nt, Human
accugggagaaaucuggcuucu

SEQ ID NO: 1470239 - RNA, 22 nt, Human
uccaauuauaagaggauaugaa

SEQ ID NO: 1470240 - RNA, 23 nt, Human
uccaacaagaagggacugagaga

SEQ ID NO: 1470241 - RNA, 20 nt, Human
uccaaggaggggcuguaaaa

SEQ ID NO: 1470242 - RNA, 22 nt, Human
accuucucuauggggcauccuc

SEQ ID NO: 1470243 - RNA, 23 nt, Human
accuucucuauggggcauccucu

SEQ ID NO: 1470244 - RNA, 19 nt, Human
accuucaguuaugauuuuu

SEQ ID NO: 1470245 - RNA, 21 nt, Human
accuuccuuuuacuuuucuuc

SEQ ID NO: 1470246 - RNA, 20 nt, Human
accuuccuuuuacuuuucuu

SEQ ID NO: 1470247 - RNA, 13 nt, Human
accuuccuuuuac

SEQ ID NO: 1470248 - RNA, 23 nt, Human
accugccucccuucaugcaugga

SEQ ID NO: 1470249 - RNA, 21 nt, Human
accugccucccuucaugcaug

SEQ ID NO: 1470250 - RNA, 22 nt, Human
accugccucccuucaugcaugg

SEQ ID NO: 1470251 - RNA, 14 nt, Human
accugaggcugguu

SEQ ID NO: 1470252 - RNA, 13 nt, Human
accugaugaaaau

SEQ ID NO: 1470253 - RNA, 14 nt, Human
accugaugaaaaua

SEQ ID NO: 1470254 - RNA, 11 nt, Human
accugauuuuu

SEQ ID NO: 1470255 - RNA, 16 nt, Human
accugauuuuuuuucc

SEQ ID NO: 1470256 - RNA, 17 nt, Human
accugauuuuuuuuccu

SEQ ID NO: 1470257 - RNA, 20 nt, Human
accugauuuuuuuuccuuuu

SEQ ID NO: 1470258 - RNA, 15 nt, Human
accugaugaaaauaa

SEQ ID NO: 1470259 - RNA, 18 nt, Human
accugaugaaaauaaaga

SEQ ID NO: 1470260 - RNA, 19 nt, Human
accugaugaaaauaaagaa

SEQ ID NO: 1470261 - RNA, 21 nt, Human
accugaugaaaauaaagaaug

SEQ ID NO: 1470262 - RNA, 22 nt, Human
accugaugaaaauaaagaaugg

SEQ ID NO: 1470263 - RNA, 16 nt, Human
ucauaauaaguugcau

SEQ ID NO: 1470264 - RNA, 16 nt, Human
accugaacugaacacc

SEQ ID NO: 1470265 - RNA, 11 nt, Human
accugaagaau

SEQ ID NO: 1470266 - RNA, 14 nt, Human
accugaagaaucac

SEQ ID NO: 1470267 - RNA, 16 nt, Human
accugaagaaucacaa

SEQ ID NO: 1470268 - RNA, 22 nt, Human
accugaagcuaucguaaaauua

SEQ ID NO: 1470269 - RNA, 15 nt, Human
accugaccccugcuc

SEQ ID NO: 1470270 - RNA, 16 nt, Human
accugcucagcccugc

SEQ ID NO: 1470271 - RNA, 17 nt, Human
accugcucagcccugca

SEQ ID NO: 1470272 - RNA, 15 nt, Human
ucauuuuuccguaaa

SEQ ID NO: 1470273 - RNA, 14 nt, Human
ucauuuugguacuu

SEQ ID NO: 1470274 - RNA, 16 nt, Human
accuggagauggugga

SEQ ID NO: 1470275 - RNA, 12 nt, Human
ucauuuucucua

SEQ ID NO: 1470276 - RNA, 13 nt, Human
ucauuuucucuaa

SEQ ID NO: 1470277 - RNA, 15 nt, Human
ucauuuucucuaaua

SEQ ID NO: 1470278 - RNA, 16 nt, Human
ucauuuucucuaauau

SEQ ID NO: 1470279 - RNA, 15 nt, Human
uagaaacacaacuau

SEQ ID NO: 1470280 - RNA, 22 nt, Human
uagaaaauuuaaaacauuacuc

SEQ ID NO: 1470281 - RNA, 11 nt, Human
uagaaaacuuu

SEQ ID NO: 1470282 - RNA, 16 nt, Human
uagaaaacuuuaaagc

SEQ ID NO: 1470283 - RNA, 15 nt, Human
uagaaaacuuuaaag

SEQ ID NO: 1470284 - RNA, 21 nt, Human
uagaaaaggcuagguacacag

SEQ ID NO: 1470285 - RNA, 17 nt, Human
uagaaaauuuaaaacau

SEQ ID NO: 1470286 - RNA, 18 nt, Human
uagaagacaaaauguuca

SEQ ID NO: 1470287 - RNA, 15 nt, Human
uagaaaaaaaauuau

SEQ ID NO: 1470288 - RNA, 16 nt, Human
uagaaaacauaaucuu

SEQ ID NO: 1470289 - RNA, 21 nt, Human
uacuuuuaaacuguguacaua

SEQ ID NO: 1470290 - RNA, 23 nt, Human
uacuuuuacaaguaacaaaaaua

SEQ ID NO: 1470291 - RNA, 20 nt, Human
uacuuuuacaaguaacaaaa

SEQ ID NO: 1470292 - RNA, 21 nt, Human
uacuuuucuucuauugccucu

SEQ ID NO: 1470293 - RNA, 14 nt, Human
uacuuuuuaaaugu

SEQ ID NO: 1470294 - RNA, 22 nt, Human
uacuuuucuucuauugccucug

SEQ ID NO: 1470295 - RNA, 21 nt, Human
aauucauuaaucugccucccu

SEQ ID NO: 1470296 - RNA, 22 nt, Human
uacuuugguggccacauaagcc

SEQ ID NO: 1470297 - RNA, 22 nt, Human
uagaauuugauaugugaacagu

SEQ ID NO: 1470298 - RNA, 20 nt, Human
uagaauuugauaugugaaca

SEQ ID NO: 1470299 - RNA, 20 nt, Human
uagaagacaauugacaacag

SEQ ID NO: 1470300 - RNA, 13 nt, Human
uagacacacauga

SEQ ID NO: 1470301 - RNA, 16 nt, Human
uagacacgcacggcag

SEQ ID NO: 1470302 - RNA, 12 nt, Human
uagacagaagaa

SEQ ID NO: 1470303 - RNA, 14 nt, Human
uagacagaagaaac

SEQ ID NO: 1470304 - RNA, 15 nt, Human
uagacagaagaaaca

SEQ ID NO: 1470305 - RNA, 13 nt, Human
uagaccaaaauaa

SEQ ID NO: 1470306 - RNA, 14 nt, Human
uagaccaaaauaaa

SEQ ID NO: 1470307 - RNA, 12 nt, Human
aauuuuacauuu

SEQ ID NO: 1470308 - RNA, 20 nt, Human
aauuuuacauggcuggagcu

SEQ ID NO: 1470309 - RNA, 16 nt, Human
acaaaaagcuacuuau

SEQ ID NO: 1470310 - RNA, 12 nt, Human
acaaaaauaaaa

SEQ ID NO: 1470311 - RNA, 16 nt, Human
acaaaaauacucagau

SEQ ID NO: 1470312 - RNA, 12 nt, Human
acaaaauaaaca

SEQ ID NO: 1470313 - RNA, 14 nt, Human
acaaaauaaacaaa

SEQ ID NO: 1470314 - RNA, 22 nt, Human
acaaaaguuucauccuuuucau

SEQ ID NO: 1470315 - RNA, 14 nt, Human
acaaauaauuuaga

SEQ ID NO: 1470316 - RNA, 13 nt, Human
acaaauaauuuag

SEQ ID NO: 1470317 - RNA, 16 nt, Human
acaaauaacaaugugc

SEQ ID NO: 1470318 - RNA, 21 nt, Human
acaaagguuuuccucuucuau

SEQ ID NO: 1470319 - RNA, 24 nt, Human
acaaagguugagauguaaaaggua

SEQ ID NO: 1470320 - RNA, 21 nt, Human
uagaggccugacugccaagcc

SEQ ID NO: 1470321 - RNA, 22 nt, Human
uagaggccugacugccaagcca

SEQ ID NO: 1470322 - RNA, 16 nt, Human
uagaggcuuccuucau

SEQ ID NO: 1470323 - RNA, 17 nt, Human
uagaggcuuccuucauu

SEQ ID NO: 1470324 - RNA, 18 nt, Human
uagaggcuuccuucauuu

SEQ ID NO: 1470325 - RNA, 19 nt, Human
uagaggcuuccuucauuuc

SEQ ID NO: 1470326 - RNA, 14 nt, Human
uagaggguguguaa

SEQ ID NO: 1470327 - RNA, 23 nt, Human
uagagggaggagaaugagccucg

SEQ ID NO: 1470328 - RNA, 14 nt, Human
uagcaaaagaagaa

SEQ ID NO: 1470329 - RNA, 16 nt, Human
uagcaaaagaagaagu

SEQ ID NO: 1470330 - RNA, 12 nt, Human
uagcaaagaauu

SEQ ID NO: 1470331 - RNA, 14 nt, Human
uagcaaagaauuga

SEQ ID NO: 1470332 - RNA, 16 nt, Human
uagcaaagauaucuca

SEQ ID NO: 1470333 - RNA, 13 nt, Human
uagcacaaguuau

SEQ ID NO: 1470334 - RNA, 19 nt, Human
uagcacaaguuauuuaaau

SEQ ID NO: 1470335 - RNA, 14 nt, Human
uagcuaaguacaca

SEQ ID NO: 1470336 - RNA, 22 nt, Human
uagcguuuuuuaaauguauacu

SEQ ID NO: 1470337 - RNA, 16 nt, Human
uagcuuuaacuuaaau

SEQ ID NO: 1470338 - RNA, 22 nt, Human
uagcuuuaacuuaaauaguauu

SEQ ID NO: 1470339 - RNA, 13 nt, Human
uagcuuuuuucuc

SEQ ID NO: 1470340 - RNA, 23 nt, Human
uagcuuuuuucucugauacagaa

SEQ ID NO: 1470341 - RNA, 15 nt, Human
uagcuuugcucuuug

SEQ ID NO: 1470342 - RNA, 11 nt, Human
uagcuuugcuc

SEQ ID NO: 1470343 - RNA, 18 nt, Human
uagcguuuuuuaaaugua

SEQ ID NO: 1470344 - RNA, 17 nt, Human
uagcguuuuuuaaaugu

SEQ ID NO: 1470345 - RNA, 16 nt, Human
uagcguuuuuuaaaug

SEQ ID NO: 1470346 - RNA, 17 nt, Human
uagcgugcucacugacc

SEQ ID NO: 1470347 - RNA, 21 nt, Human
uagcgcuaucucccugccucc

SEQ ID NO: 1470348 - RNA, 16 nt, Human
uagcgugcucacugac

SEQ ID NO: 1470349 - RNA, 21 nt, Human
acaaaucucaagcaaacagcu

SEQ ID NO: 1470350 - RNA, 23 nt, Human
uaggggcuuauaauaaaggacug

SEQ ID NO: 1470351 - RNA, 22 nt, Human
uaggggcuuauaauaaaggacu

SEQ ID NO: 1470352 - RNA, 21 nt, Human
uaggggcuuauaauaaaggac

SEQ ID NO: 1470353 - RNA, 23 nt, Human
uagggcaauuaauuccuucagca

SEQ ID NO: 1470354 - RNA, 21 nt, Human
uagggcaauuaauuccuucag

SEQ ID NO: 1470355 - RNA, 18 nt, Human
uagggcaauuaauuccuu

SEQ ID NO: 1470356 - RNA, 18 nt, Human
uagggaaaacauuccauc

SEQ ID NO: 1470357 - RNA, 16 nt, Human
uagggaaaacauucca

SEQ ID NO: 1470358 - RNA, 13 nt, Human
uagggaaaacauu

SEQ ID NO: 1470359 - RNA, 19 nt, Human
uaggaaagaccauuuuucc

SEQ ID NO: 1470360 - RNA, 20 nt, Human
uaggaucauuuguuggaaug

SEQ ID NO: 1470361 - RNA, 21 nt, Human
uaggauccagugauccuuaca

SEQ ID NO: 1470362 - RNA, 16 nt, Human
uaggauuuauuuaaaa

SEQ ID NO: 1470363 - RNA, 17 nt, Human
uaggauuuauuuaaaau

SEQ ID NO: 1470364 - RNA, 22 nt, Human
uaggauuuauuuaaaauagcaa

SEQ ID NO: 1470365 - RNA, 21 nt, Human
uaggauuuauuuaaaauagca

SEQ ID NO: 1470366 - RNA, 21 nt, Human
uaggauuuuuuuuaauguuua

SEQ ID NO: 1470367 - RNA, 22 nt, Human
uaggauuuuuuuuaauguuuaa

SEQ ID NO: 1470368 - RNA, 12 nt, Human
uaggcaacauag

SEQ ID NO: 1470369 - RNA, 12 nt, Human
uaguaaucauau

SEQ ID NO: 1470370 - RNA, 17 nt, Human
uaguaaucugcauuauu

SEQ ID NO: 1470371 - RNA, 14 nt, Human
uaguaaucugcauu

SEQ ID NO: 1470372 - RNA, 23 nt, Human
uagguuuuaauaauuuuuuaauu

SEQ ID NO: 1470373 - RNA, 15 nt, Human
uagguuuuuguuugu

SEQ ID NO: 1470374 - RNA, 13 nt, Human
acacaauaagcaa

SEQ ID NO: 1470375 - RNA, 14 nt, Human
acacaauaagcaaa

SEQ ID NO: 1470376 - RNA, 13 nt, Human
acacaacuauauu

SEQ ID NO: 1470377 - RNA, 14 nt, Human
acacaacuauauug

SEQ ID NO: 1470378 - RNA, 18 nt, Human
acacaaauuaucuuaaaa

SEQ ID NO: 1470379 - RNA, 22 nt, Human
acaaugauccuguauucagaca

SEQ ID NO: 1470380 - RNA, 21 nt, Human
acaaugaucaccgacugaaaa

SEQ ID NO: 1470381 - RNA, 20 nt, Human
acaaugauccuguauucaga

SEQ ID NO: 1470382 - RNA, 16 nt, Human
uagguaaauuacaguu

SEQ ID NO: 1470383 - RNA, 19 nt, Human
uaggguuucccuacugaag

SEQ ID NO: 1470384 - RNA, 19 nt, Human
uaggguuugugacagggcg

SEQ ID NO: 1470385 - RNA, 13 nt, Human
uaucuauagcuaa

SEQ ID NO: 1470386 - RNA, 22 nt, Human
uaucuaguuuaauuaaucugua

SEQ ID NO: 1470387 - RNA, 22 nt, Human
uaucccaccugacauguccuuc

SEQ ID NO: 1470388 - RNA, 16 nt, Human
uauccccauuucuuuu

SEQ ID NO: 1470389 - RNA, 23 nt, Human
uauccaccaaaagggcucccuga

SEQ ID NO: 1470390 - RNA, 14 nt, Human
acagaccuuugaac

SEQ ID NO: 1470391 - RNA, 15 nt, Human
uaucaaaucuaccac

SEQ ID NO: 1470392 - RNA, 19 nt, Human
uaucaauuaccacaccauc

SEQ ID NO: 1470393 - RNA, 17 nt, Human
acacuuacuuuuucugg

SEQ ID NO: 1470394 - RNA, 20 nt, Human
acacuuauuggaacucugcu

SEQ ID NO: 1470395 - RNA, 24 nt, Human
acagaaaugauuacuaaggaagau

SEQ ID NO: 1470396 - RNA, 13 nt, Human
acagaaagcugcc

SEQ ID NO: 1470397 - RNA, 13 nt, Human
acacuugcaaccu

SEQ ID NO: 1470398 - RNA, 14 nt, Human
acacuugguaauug

SEQ ID NO: 1470399 - RNA, 19 nt, Human
acagaaaaauauguaccaa

SEQ ID NO: 1470400 - RNA, 23 nt, Human
uauauauguguaugcacaguaaa

SEQ ID NO: 1470401 - RNA, 21 nt, Human
uauauauguguaugcacagua

SEQ ID NO: 1470402 - RNA, 19 nt, Human
uauauauguacaguuaucu

SEQ ID NO: 1470403 - RNA, 17 nt, Human
uauauauguacaguuau

SEQ ID NO: 1470404 - RNA, 14 nt, Human
uauauauuaucuuu

SEQ ID NO: 1470405 - RNA, 18 nt, Human
uauauauuaucuuuucau

SEQ ID NO: 1470406 - RNA, 14 nt, Human
uauauauguacagu

SEQ ID NO: 1470407 - RNA, 19 nt, Human
uauauauuuuuuucugaaa

SEQ ID NO: 1470408 - RNA, 20 nt, Human
uauauauuuuuuucugaaau

SEQ ID NO: 1470409 - RNA, 21 nt, Human
uauaucuauauuuuacauaaa

SEQ ID NO: 1470410 - RNA, 19 nt, Human
acacucaugcauuguccuc

SEQ ID NO: 1470411 - RNA, 18 nt, Human
uauagccaaaaauagcua

SEQ ID NO: 1470412 - RNA, 19 nt, Human
uauagccaaaaauagcuaa

SEQ ID NO: 1470413 - RNA, 22 nt, Human
uauagccaaaaauagcuaaaua

SEQ ID NO: 1470414 - RNA, 15 nt, Human
uauaggaucauuugu

SEQ ID NO: 1470415 - RNA, 19 nt, Human
uauaggauuuauuuaaaau

SEQ ID NO: 1470416 - RNA, 21 nt, Human
uauaggauuuauuuaaaauag

SEQ ID NO: 1470417 - RNA, 19 nt, Human
uauaagugauugcugguuu

SEQ ID NO: 1470418 - RNA, 16 nt, Human
uauaacuggaaagaag

SEQ ID NO: 1470419 - RNA, 18 nt, Human
uagucaccagagacuuua

SEQ ID NO: 1470420 - RNA, 15 nt, Human
uagucaccagagacu

SEQ ID NO: 1470421 - RNA, 22 nt, Human
uauaauuguuuuaucugaauuu

SEQ ID NO: 1470422 - RNA, 18 nt, Human
uauaauuguuuuaucuga

SEQ ID NO: 1470423 - RNA, 13 nt, Human
uauagaucagcca

SEQ ID NO: 1470424 - RNA, 15 nt, Human
uaugccccauucaac

SEQ ID NO: 1470425 - RNA, 17 nt, Human
uaugccauauaauucac

SEQ ID NO: 1470426 - RNA, 20 nt, Human
uaugccaccugaauaaagaa

SEQ ID NO: 1470427 - RNA, 14 nt, Human
uaugcauuauauca

SEQ ID NO: 1470428 - RNA, 17 nt, Human
uaugauacuugaaaauu

SEQ ID NO: 1470429 - RNA, 22 nt, Human
uaugauauuuucugugccugaa

SEQ ID NO: 1470430 - RNA, 15 nt, Human
uaugauauuuucugu

SEQ ID NO: 1470431 - RNA, 16 nt, Human
uaugcauuauaucaaa

SEQ ID NO: 1470432 - RNA, 15 nt, Human
uaucuauauuuuaca

SEQ ID NO: 1470433 - RNA, 15 nt, Human
acagcaauuccucag

SEQ ID NO: 1470434 - RNA, 17 nt, Human
acagcaauuccucaggc

SEQ ID NO: 1470435 - RNA, 19 nt, Human
acagcaauuccucaggcua

SEQ ID NO: 1470436 - RNA, 13 nt, Human
acagcagacucag

SEQ ID NO: 1470437 - RNA, 18 nt, Human
acagcagacucagcucug

SEQ ID NO: 1470438 - RNA, 19 nt, Human
acagcagacucagcucuga

SEQ ID NO: 1470439 - RNA, 23 nt, Human
acagcagacucagcucugacauu

SEQ ID NO: 1470440 - RNA, 14 nt, Human
uaugaaaaagaaga

SEQ ID NO: 1470441 - RNA, 15 nt, Human
uaugaaaaagaagaa

SEQ ID NO: 1470442 - RNA, 14 nt, Human
uaugaaaagcuaga

SEQ ID NO: 1470443 - RNA, 19 nt, Human
uaugaaaagcuagaauuga

SEQ ID NO: 1470444 - RNA, 19 nt, Human
acagcccuucuuuccacag

SEQ ID NO: 1470445 - RNA, 23 nt, Human
uaugaagcuuuuaugugaaacau

SEQ ID NO: 1470446 - RNA, 21 nt, Human
uaugaaggcuguacacugcac

SEQ ID NO: 1470447 - RNA, 22 nt, Human
uaugaagcuuuuaugugaaaca

SEQ ID NO: 1470448 - RNA, 20 nt, Human
uaugaagcuuuuaugugaaa

SEQ ID NO: 1470449 - RNA, 14 nt, Human
acagcuguaugauu

SEQ ID NO: 1470450 - RNA, 19 nt, Human
acagcuguaugauucccag

SEQ ID NO: 1470451 - RNA, 20 nt, Human
acagcuguaugauucccagc

SEQ ID NO: 1470452 - RNA, 23 nt, Human
acagcuguaugauucccagccag

SEQ ID NO: 1470453 - RNA, 18 nt, Human
acagcucagaaguuucuu

SEQ ID NO: 1470454 - RNA, 20 nt, Human
acagcuucucauccugcagg

SEQ ID NO: 1470455 - RNA, 21 nt, Human
acagcuucucauccugcaggc

SEQ ID NO: 1470456 - RNA, 22 nt, Human
acaggaaccacaagacugcaca

SEQ ID NO: 1470457 - RNA, 19 nt, Human
acaggccucacacacaaug

SEQ ID NO: 1470458 - RNA, 14 nt, Human
uaugucucuucuga

SEQ ID NO: 1470459 - RNA, 19 nt, Human
uaugucucuucugagcuau

SEQ ID NO: 1470460 - RNA, 18 nt, Human
uaauuuuuauauuugaaa

SEQ ID NO: 1470461 - RNA, 16 nt, Human
uaauuuauaaaaaggu

SEQ ID NO: 1470462 - RNA, 19 nt, Human
uaauuuuuauauuugaaau

SEQ ID NO: 1470463 - RNA, 21 nt, Human
uaauuuuuauauuugaaauau

SEQ ID NO: 1470464 - RNA, 14 nt, Human
uaauuuagaaaacu

SEQ ID NO: 1470465 - RNA, 15 nt, Human
uaauuuagaaaacuu

SEQ ID NO: 1470466 - RNA, 16 nt, Human
uaauuuagaaaacuuu

SEQ ID NO: 1470467 - RNA, 17 nt, Human
uaauuuagaaaacuuua

SEQ ID NO: 1470468 - RNA, 21 nt, Human
uaauuuagaaaacuuuaaagc

SEQ ID NO: 1470469 - RNA, 14 nt, Human
uaauuuagaaauca

SEQ ID NO: 1470470 - RNA, 15 nt, Human
uaauuuagaaaucau

SEQ ID NO: 1470471 - RNA, 21 nt, Human
uaauuuagacuucaagcaugg

SEQ ID NO: 1470472 - RNA, 16 nt, Human
uaauuuaguuucauau

SEQ ID NO: 1470473 - RNA, 17 nt, Human
uaauuuaguuucauaua

SEQ ID NO: 1470474 - RNA, 13 nt, Human
uaauuuauaaaaa

SEQ ID NO: 1470475 - RNA, 22 nt, Human
uaauuccguagguuauuuucag

SEQ ID NO: 1470476 - RNA, 11 nt, Human
aaugauuucag

SEQ ID NO: 1470477 - RNA, 15 nt, Human
aaugcaccuaaagaa

SEQ ID NO: 1470478 - RNA, 16 nt, Human
aaugcaccuaaagaaa

SEQ ID NO: 1470479 - RNA, 22 nt, Human
aaugagaaaucuaaaaaacgaa

SEQ ID NO: 1470480 - RNA, 12 nt, Human
aaugagaaaucu

SEQ ID NO: 1470481 - RNA, 22 nt, Human
aaugagagacacacugaagaag

SEQ ID NO: 1470482 - RNA, 14 nt, Human
aaucuguaaacugu

SEQ ID NO: 1470483 - RNA, 15 nt, Human
aaucuguaaacugug

SEQ ID NO: 1470484 - RNA, 16 nt, Human
aaucuguaaacugugu

SEQ ID NO: 1470485 - RNA, 21 nt, Human
aaucuguaaacuguguauucc

SEQ ID NO: 1470486 - RNA, 23 nt, Human
aaucuguaaacuguguauuccaa

SEQ ID NO: 1470487 - RNA, 15 nt, Human
aaugaggucagcaug

SEQ ID NO: 1470488 - RNA, 19 nt, Human
aaugaggucagcaugucua

SEQ ID NO: 1470489 - RNA, 13 nt, Human
aaugauuucaugc

SEQ ID NO: 1470490 - RNA, 22 nt, Human
aaugauuucaugcuaucucugu

SEQ ID NO: 1470491 - RNA, 15 nt, Human
aaugauuguaguaau

SEQ ID NO: 1470492 - RNA, 14 nt, Human
uacacccagcaaua

SEQ ID NO: 1470493 - RNA, 12 nt, Human
uacacccagcaa

SEQ ID NO: 1470494 - RNA, 11 nt, Human
uacacccagca

SEQ ID NO: 1470495 - RNA, 14 nt, Human
uacacccaaagagg

SEQ ID NO: 1470496 - RNA, 22 nt, Human
aauggaggggcagagccaggaa

SEQ ID NO: 1470497 - RNA, 21 nt, Human
aauggaggggcagagccagga

SEQ ID NO: 1470498 - RNA, 20 nt, Human
aauggaggggcagagccagg

SEQ ID NO: 1470499 - RNA, 19 nt, Human
aauggaggggcagagccag

SEQ ID NO: 1470500 - RNA, 17 nt, Human
aauggaggccauugugu

SEQ ID NO: 1470501 - RNA, 14 nt, Human
aauguaaagccaug

SEQ ID NO: 1470502 - RNA, 15 nt, Human
aauguaaagccaugc

SEQ ID NO: 1470503 - RNA, 19 nt, Human
aauguaaagcuugucugau

SEQ ID NO: 1470504 - RNA, 16 nt, Human
aauguaaauauuuuaa

SEQ ID NO: 1470505 - RNA, 17 nt, Human
aauguaaauauuuuaaa

SEQ ID NO: 1470506 - RNA, 19 nt, Human
aauguaaauauuuuaaaga

SEQ ID NO: 1470507 - RNA, 20 nt, Human
aauguaaauauuuuaaagaa

SEQ ID NO: 1470508 - RNA, 21 nt, Human
aauguaaauauuuuaaagaau

SEQ ID NO: 1470509 - RNA, 16 nt, Human
aauguaauagggaaaa

SEQ ID NO: 1470510 - RNA, 22 nt, Human
aaugcuguauuuuaaaagaaug

SEQ ID NO: 1470511 - RNA, 21 nt, Human
aaugcuguauuuuaaaagaau

SEQ ID NO: 1470512 - RNA, 21 nt, Human
uaauuuuuuucaccuagauuu

SEQ ID NO: 1470513 - RNA, 21 nt, Human
uaauuuuugauacuaagcauu

SEQ ID NO: 1470514 - RNA, 20 nt, Human
uaauuuuugauacuaagcau

SEQ ID NO: 1470515 - RNA, 23 nt, Human
uaauuuuugauacuaagcauuga

SEQ ID NO: 1470516 - RNA, 17 nt, Human
uaauuuuucacuucaaa

SEQ ID NO: 1470517 - RNA, 23 nt, Human
uaauuuuuauuuuugcugagacu

SEQ ID NO: 1470518 - RNA, 19 nt, Human
uacaauuaaagcuguuauu

SEQ ID NO: 1470519 - RNA, 17 nt, Human
uacccuaaccaaguucc

SEQ ID NO: 1470520 - RNA, 16 nt, Human
uacccuaaccaaguuc

SEQ ID NO: 1470521 - RNA, 14 nt, Human
uacccuaaccaagu

SEQ ID NO: 1470522 - RNA, 17 nt, Human
uacccguucacauuuuu

SEQ ID NO: 1470523 - RNA, 15 nt, Human
uacccccugugccuu

SEQ ID NO: 1470524 - RNA, 23 nt, Human
uaccugaagcuaucguaaaauua

SEQ ID NO: 1470525 - RNA, 13 nt, Human
aauuacauuugua

SEQ ID NO: 1470526 - RNA, 14 nt, Human
aauuacauuuguau

SEQ ID NO: 1470527 - RNA, 12 nt, Human
uaccugauuuuu

SEQ ID NO: 1470528 - RNA, 18 nt, Human
uaccugauuuuuuuuccu

SEQ ID NO: 1470529 - RNA, 12 nt, Human
uaccugugccug

SEQ ID NO: 1470530 - RNA, 13 nt, Human
uaccuguugagca

SEQ ID NO: 1470531 - RNA, 14 nt, Human
uaccuguugagcau

SEQ ID NO: 1470532 - RNA, 21 nt, Human
uaccuguugagcaucacagaa

SEQ ID NO: 1470533 - RNA, 22 nt, Human
aauuaugugacauuuuacauua

SEQ ID NO: 1470534 - RNA, 22 nt, Human
aauuaugugccagauuuaugca

SEQ ID NO: 1470535 - RNA, 20 nt, Human
aauuaugugacauuuuacau

SEQ ID NO: 1470536 - RNA, 17 nt, Human
aauuaugugacauuuua

SEQ ID NO: 1470537 - RNA, 15 nt, Human
aauuaugugacauuu

SEQ ID NO: 1470538 - RNA, 15 nt, Human
aauuaccaaccuguu

SEQ ID NO: 1470539 - RNA, 21 nt, Human
aauuaccacaccaucucccau

SEQ ID NO: 1470540 - RNA, 16 nt, Human
aauuauuguuuuucuu

SEQ ID NO: 1470541 - RNA, 22 nt, Human
aauuauuuaaaccgcuaaaaga

SEQ ID NO: 1470542 - RNA, 21 nt, Human
aauuauuguacauuuauaguu

SEQ ID NO: 1470543 - RNA, 12 nt, Human
aauuauuguaca

SEQ ID NO: 1470544 - RNA, 15 nt, Human
aauucaauucaaagc

SEQ ID NO: 1470545 - RNA, 13 nt, Human
aauucaauucaaa

SEQ ID NO: 1470546 - RNA, 22 nt, Human
aauguuaugacuauguaaacua

SEQ ID NO: 1470547 - RNA, 19 nt, Human
aauguuaugacuauguaaa

SEQ ID NO: 1470548 - RNA, 18 nt, Human
aauguucacaauauauuu

SEQ ID NO: 1470549 - RNA, 17 nt, Human
aauguuagccucaauuu

SEQ ID NO: 1470550 - RNA, 21 nt, Human
aauguggccccugaacaagaa

SEQ ID NO: 1470551 - RNA, 23 nt, Human
aauguuggucauuuuauguuaag

SEQ ID NO: 1470552 - RNA, 12 nt, Human
aauguucaucau

SEQ ID NO: 1470553 - RNA, 13 nt, Human
uacauuuccuaaa

SEQ ID NO: 1470554 - RNA, 14 nt, Human
uacauuccaacucg

SEQ ID NO: 1470555 - RNA, 13 nt, Human
aauguuuaaaaca

SEQ ID NO: 1470556 - RNA, 12 nt, Human
uaccagaugcag

SEQ ID NO: 1470557 - RNA, 17 nt, Human
uaccaggcaccaaaaga

SEQ ID NO: 1470558 - RNA, 18 nt, Human
uaccaggcaccaaaagaa

SEQ ID NO: 1470559 - RNA, 21 nt, Human
uaccaggcaccaaaagaagua

SEQ ID NO: 1470560 - RNA, 14 nt, Human
uaccagucucacau

SEQ ID NO: 1470561 - RNA, 13 nt, Human
uaagacaaauaug

SEQ ID NO: 1470562 - RNA, 23 nt, Human
uaagacaaaaagcuacuuauugu

SEQ ID NO: 1470563 - RNA, 20 nt, Human
uaagacggauuuauuuuucc

SEQ ID NO: 1470564 - RNA, 21 nt, Human
uaacuucccugaaaaaucuaa

SEQ ID NO: 1470565 - RNA, 17 nt, Human
uaacguauaaaagccug

SEQ ID NO: 1470566 - RNA, 13 nt, Human
uaacguauaaaag

SEQ ID NO: 1470567 - RNA, 17 nt, Human
uaacguuuaagccaaaa

SEQ ID NO: 1470568 - RNA, 20 nt, Human
uaacguuuaagccaaaacaa

SEQ ID NO: 1470569 - RNA, 20 nt, Human
uaacuucccugaaaaaucua

SEQ ID NO: 1470570 - RNA, 23 nt, Human
uaacuauaguccagcuuuguucu

SEQ ID NO: 1470571 - RNA, 15 nt, Human
uaacuuaauugcuau

SEQ ID NO: 1470572 - RNA, 19 nt, Human
uaacaugaauauuuagugu

SEQ ID NO: 1470573 - RNA, 21 nt, Human
uaacaugaauauuuaguguuc

SEQ ID NO: 1470574 - RNA, 20 nt, Human
uaacaugaauauuuaguguu

SEQ ID NO: 1470575 - RNA, 21 nt, Human
aauauauuuuaagacgaaaca

SEQ ID NO: 1470576 - RNA, 21 nt, Human
aauauauucagccuggcuuca

SEQ ID NO: 1470577 - RNA, 21 nt, Human
aauagcuaaauaccucaauca

SEQ ID NO: 1470578 - RNA, 23 nt, Human
aauaccacaggaaccacaagacu

SEQ ID NO: 1470579 - RNA, 18 nt, Human
aauacagcaacaauuuau

SEQ ID NO: 1470580 - RNA, 21 nt, Human
aauacaugcuaagagaaguag

SEQ ID NO: 1470581 - RNA, 22 nt, Human
aauacaugcuaagagaaguaga

SEQ ID NO: 1470582 - RNA, 23 nt, Human
aauacaugcuaagagaaguagaa

SEQ ID NO: 1470583 - RNA, 21 nt, Human
aauacccaugucuacacagau

SEQ ID NO: 1470584 - RNA, 13 nt, Human
aauagcaaaagaa

SEQ ID NO: 1470585 - RNA, 16 nt, Human
aauagcaaaagaagaa

SEQ ID NO: 1470586 - RNA, 19 nt, Human
aauagcaaaagaagaaguu

SEQ ID NO: 1470587 - RNA, 20 nt, Human
aauagcaaaagaagaaguuu

SEQ ID NO: 1470588 - RNA, 14 nt, Human
aauagcaaagaauu

SEQ ID NO: 1470589 - RNA, 15 nt, Human
aauagcaaagaauug

SEQ ID NO: 1470590 - RNA, 18 nt, Human
aauagcaaagaauugacu

SEQ ID NO: 1470591 - RNA, 13 nt, Human
uaacaaugcugua

SEQ ID NO: 1470592 - RNA, 20 nt, Human
uaaauguuaugacuauguaa

SEQ ID NO: 1470593 - RNA, 18 nt, Human
uaaauuauuguuuuucuu

SEQ ID NO: 1470594 - RNA, 21 nt, Human
uaaauguuaugacuauguaaa

SEQ ID NO: 1470595 - RNA, 19 nt, Human
uaaauguuaugacuaugua

SEQ ID NO: 1470596 - RNA, 12 nt, Human
uaaaugaagaaa

SEQ ID NO: 1470597 - RNA, 19 nt, Human
uaaaucuuuuauaggauuu

SEQ ID NO: 1470598 - RNA, 23 nt, Human
uaaaucuuuuauaggauuuauuu

SEQ ID NO: 1470599 - RNA, 11 nt, Human
aaucuguaaaa

SEQ ID NO: 1470600 - RNA, 11 nt, Human
aaucuguaaac

SEQ ID NO: 1470601 - RNA, 12 nt, Human
aaucuguaaacu

SEQ ID NO: 1470602 - RNA, 17 nt, Human
aaucuauuuuguaacuu

SEQ ID NO: 1470603 - RNA, 14 nt, Human
aaucuauuuuguaa

SEQ ID NO: 1470604 - RNA, 18 nt, Human
aauccucucucuguguua

SEQ ID NO: 1470605 - RNA, 18 nt, Human
aauccccaacaugcacug

SEQ ID NO: 1470606 - RNA, 13 nt, Human
aauccccuucucc

SEQ ID NO: 1470607 - RNA, 14 nt, Human
aauccccuucuccc

SEQ ID NO: 1470608 - RNA, 15 nt, Human
aauccccuucucccc

SEQ ID NO: 1470609 - RNA, 16 nt, Human
aauccccuucuccccu

SEQ ID NO: 1470610 - RNA, 17 nt, Human
aauccccuucuccccug

SEQ ID NO: 1470611 - RNA, 20 nt, Human
aauccccuucuccccugcac

SEQ ID NO: 1470612 - RNA, 23 nt, Human
aauccccuucuccccugcacugu

SEQ ID NO: 1470613 - RNA, 13 nt, Human
uaauaaaaauaaa

SEQ ID NO: 1470614 - RNA, 20 nt, Human
aaucauaagauauuuuucau

SEQ ID NO: 1470615 - RNA, 23 nt, Human
aaucauaagauauuuuucaugau

SEQ ID NO: 1470616 - RNA, 17 nt, Human
uaaguguguguuuuuca

SEQ ID NO: 1470617 - RNA, 14 nt, Human
uaaguuaauuuaaa

SEQ ID NO: 1470618 - RNA, 12 nt, Human
uaaguauuuagg

SEQ ID NO: 1470619 - RNA, 20 nt, Human
uaaguauuuagguuuuuguu

SEQ ID NO: 1470620 - RNA, 17 nt, Human
uaaguuuauuucuuaaa

SEQ ID NO: 1470621 - RNA, 13 nt, Human
uaauaaaaagauu

SEQ ID NO: 1470622 - RNA, 16 nt, Human
uaauaaaaagauugaa

SEQ ID NO: 1470623 - RNA, 18 nt, Human
uaaguacacaauaagcaa

SEQ ID NO: 1470624 - RNA, 20 nt, Human
uaaguaaugauaacuggaaa

SEQ ID NO: 1470625 - RNA, 22 nt, Human
uaaggaauuuuauuuuuuucug

SEQ ID NO: 1470626 - RNA, 13 nt, Human
uaagcugaaaaua

SEQ ID NO: 1470627 - RNA, 19 nt, Human
uaaggaaaucaacuugcuu

SEQ ID NO: 1470628 - RNA, 20 nt, Human
uaaggaaaucaacuugcuua

SEQ ID NO: 1470629 - RNA, 21 nt, Human
uaagcauaagcuuaugcuuaa

SEQ ID NO: 1470630 - RNA, 24 nt, Human
aaucagucucagaaugucauuuug

SEQ ID NO: 1470631 - RNA, 17 nt, Human
aaucagucucagaaugu

SEQ ID NO: 1470632 - RNA, 15 nt, Human
aauauuuauuuuaau

SEQ ID NO: 1470633 - RNA, 17 nt, Human
aaucacuaaaaaugauc

SEQ ID NO: 1470634 - RNA, 16 nt, Human
aaucagguggcuuuug

SEQ ID NO: 1470635 - RNA, 16 nt, Human
aaucagccuaguugau

SEQ ID NO: 1470636 - RNA, 17 nt, Human
aaucagccuacaggccu

SEQ ID NO: 1470637 - RNA, 14 nt, Human
aagguacuucaaau

SEQ ID NO: 1470638 - RNA, 14 nt, Human
aaggcucuuuugua

SEQ ID NO: 1470639 - RNA, 16 nt, Human
aaguaaggaauuuuau

SEQ ID NO: 1470640 - RNA, 18 nt, Human
aagguauuuaauagguuu

SEQ ID NO: 1470641 - RNA, 17 nt, Human
guuucuauuuuuugaaa

SEQ ID NO: 1470642 - RNA, 12 nt, Human
guuucugacucu

SEQ ID NO: 1470643 - RNA, 17 nt, Human
guuucugacucugagcu

SEQ ID NO: 1470644 - RNA, 13 nt, Human
guuucugacucug

SEQ ID NO: 1470645 - RNA, 11 nt, Human
guuuacagaau

SEQ ID NO: 1470646 - RNA, 14 nt, Human
guuuauuucuuaaa

SEQ ID NO: 1470647 - RNA, 19 nt, Human
guuuauuuucaagaauaau

SEQ ID NO: 1470648 - RNA, 15 nt, Human
aaggaaagaaaacau

SEQ ID NO: 1470649 - RNA, 12 nt, Human
aaggaaagaaaa

SEQ ID NO: 1470650 - RNA, 17 nt, Human
aaggaggggcuguaaaa

SEQ ID NO: 1470651 - RNA, 19 nt, Human
aaggcauuauaaaaagaau

SEQ ID NO: 1470652 - RNA, 17 nt, Human
aaggcauggcggccccc

SEQ ID NO: 1470653 - RNA, 11 nt, Human
aaggauaaagu

SEQ ID NO: 1470654 - RNA, 17 nt, Human
aaggagucacugagacc

SEQ ID NO: 1470655 - RNA, 18 nt, Human
aaggagucacugagacca

SEQ ID NO: 1470656 - RNA, 19 nt, Human
aaggaguguagcaacuaca

SEQ ID NO: 1470657 - RNA, 22 nt, Human
guuggaaugaauuaaauaaacc

SEQ ID NO: 1470658 - RNA, 23 nt, Human
guugggagagggcgcaggccgug

SEQ ID NO: 1470659 - RNA, 19 nt, Human
guugggcagccagaccagc

SEQ ID NO: 1470660 - RNA, 14 nt, Human
guugggcagccaga

SEQ ID NO: 1470661 - RNA, 12 nt, Human
uaaaagaaugau

SEQ ID NO: 1470662 - RNA, 14 nt, Human
uaaaacuuugaagu

SEQ ID NO: 1470663 - RNA, 15 nt, Human
uaaaacuuugaaguu

SEQ ID NO: 1470664 - RNA, 19 nt, Human
uaaaacccauuuaaauuuu

SEQ ID NO: 1470665 - RNA, 11 nt, Human
uaaaacuaaga

SEQ ID NO: 1470666 - RNA, 18 nt, Human
uaaaacgcaguugcaaac

SEQ ID NO: 1470667 - RNA, 13 nt, Human
uaaaaccuggaga

SEQ ID NO: 1470668 - RNA, 16 nt, Human
uaaaaauaaacauguu

SEQ ID NO: 1470669 - RNA, 19 nt, Human
uaaaaauaaaaaagauccc

SEQ ID NO: 1470670 - RNA, 21 nt, Human
uaaaaauaaaaaagaucccaa

SEQ ID NO: 1470671 - RNA, 21 nt, Human
uaaaaauaaaaaacacuggga

SEQ ID NO: 1470672 - RNA, 16 nt, Human
uaaaaauaaaaaagau

SEQ ID NO: 1470673 - RNA, 17 nt, Human
uaaaaauaaaaaagauc

SEQ ID NO: 1470674 - RNA, 19 nt, Human
uaaaaauaaaaaacacugg

SEQ ID NO: 1470675 - RNA, 18 nt, Human
uaaaaauaaaaaacacug

SEQ ID NO: 1470676 - RNA, 20 nt, Human
uaaaagacagugaaagaaaa

SEQ ID NO: 1470677 - RNA, 21 nt, Human
uaaaaguuuuuuauuaugcau

SEQ ID NO: 1470678 - RNA, 22 nt, Human
uaaaaguuuuuuauuaugcauu

SEQ ID NO: 1470679 - RNA, 22 nt, Human
uaaaauaauuuuaucucuuucu

SEQ ID NO: 1470680 - RNA, 20 nt, Human
uaaaauaauuuuuauauuug

SEQ ID NO: 1470681 - RNA, 21 nt, Human
aagugaucaaacuacauauug

SEQ ID NO: 1470682 - RNA, 13 nt, Human
aaguauuagaaua

SEQ ID NO: 1470683 - RNA, 10 nt, Human
aaguauuuag

SEQ ID NO: 1470684 - RNA, 11 nt, Human
aaguauuuagg

SEQ ID NO: 1470685 - RNA, 16 nt, Human
aaguauuuagguuuuu

SEQ ID NO: 1470686 - RNA, 18 nt, Human
aaguacccguucacauuu

SEQ ID NO: 1470687 - RNA, 20 nt, Human
aaguacccguucacauuuuu

SEQ ID NO: 1470688 - RNA, 14 nt, Human
aaguaaugauaacu

SEQ ID NO: 1470689 - RNA, 19 nt, Human
aaguaaugauaacuggaaa

SEQ ID NO: 1470690 - RNA, 17 nt, Human
guuuugcuacauaauua

SEQ ID NO: 1470691 - RNA, 20 nt, Human
guuucugaguuccugcaugc

SEQ ID NO: 1470692 - RNA, 17 nt, Human
guuucugaguuuuacca

SEQ ID NO: 1470693 - RNA, 16 nt, Human
guuucugaguuuuacc

SEQ ID NO: 1470694 - RNA, 16 nt, Human
aagucuuucacauuua

SEQ ID NO: 1470695 - RNA, 20 nt, Human
aaguauuuguuaauuuagaa

SEQ ID NO: 1470696 - RNA, 19 nt, Human
aaguauuuguuaauuuaga

SEQ ID NO: 1470697 - RNA, 21 nt, Human
aaguauuuguuaauuuagaaa

SEQ ID NO: 1470698 - RNA, 15 nt, Human
guuuuucauaaagca

SEQ ID NO: 1470699 - RNA, 16 nt, Human
guuuuucggacaguuu

SEQ ID NO: 1470700 - RNA, 16 nt, Human
aagugagaccuuccuu

SEQ ID NO: 1470701 - RNA, 23 nt, Human
aagcaucccucacccauccuaga

SEQ ID NO: 1470702 - RNA, 14 nt, Human
aagcaucccucacc

SEQ ID NO: 1470703 - RNA, 13 nt, Human
aagcaucccucac

SEQ ID NO: 1470704 - RNA, 21 nt, Human
aagcauucagaagaaaaagaa

SEQ ID NO: 1470705 - RNA, 15 nt, Human
aagcauucagaagaa

SEQ ID NO: 1470706 - RNA, 16 nt, Human
aagcauuuagauguau

SEQ ID NO: 1470707 - RNA, 13 nt, Human
aagcauucugucu

SEQ ID NO: 1470708 - RNA, 16 nt, Human
aagcauugaauggcua

SEQ ID NO: 1470709 - RNA, 13 nt, Human
aagcauugaaugg

SEQ ID NO: 1470710 - RNA, 16 nt, Human
aagcauuuagaaaacu

SEQ ID NO: 1470711 - RNA, 23 nt, Human
aagcauuuuguaaguugaagcaa

SEQ ID NO: 1470712 - RNA, 18 nt, Human
aagccaaaacaauguuua

SEQ ID NO: 1470713 - RNA, 12 nt, Human
aagccaaaacaa

SEQ ID NO: 1470714 - RNA, 23 nt, Human
aagcccauucauuccauucugga

SEQ ID NO: 1470715 - RNA, 21 nt, Human
aagcccauucauuccauucug

SEQ ID NO: 1470716 - RNA, 16 nt, Human
aagcccauucauucca

SEQ ID NO: 1470717 - RNA, 15 nt, Human
guuaagacuugacag

SEQ ID NO: 1470718 - RNA, 16 nt, Human
guuaagacuugacagu

SEQ ID NO: 1470719 - RNA, 17 nt, Human
guuaagacuugacagug

SEQ ID NO: 1470720 - RNA, 14 nt, Human
aagccccugggccc

SEQ ID NO: 1470721 - RNA, 20 nt, Human
guuagggaaaacauuccauc

SEQ ID NO: 1470722 - RNA, 15 nt, Human
guuagggaaaacauu

SEQ ID NO: 1470723 - RNA, 13 nt, Human
guuaggagguccu

SEQ ID NO: 1470724 - RNA, 19 nt, Human
guuaagacuugacagugga

SEQ ID NO: 1470725 - RNA, 19 nt, Human
guuagaaaugcagaauccu

SEQ ID NO: 1470726 - RNA, 23 nt, Human
guuagggaaaacauuccauccuu

SEQ ID NO: 1470727 - RNA, 20 nt, Human
guuauuuuuacauucugaau

SEQ ID NO: 1470728 - RNA, 19 nt, Human
guuauuuuuacauucugaa

SEQ ID NO: 1470729 - RNA, 14 nt, Human
guucaacuuauuaa

SEQ ID NO: 1470730 - RNA, 19 nt, Human
guucaacuuuuccuuugaa

SEQ ID NO: 1470731 - RNA, 16 nt, Human
guucaagaaauaaguu

SEQ ID NO: 1470732 - RNA, 13 nt, Human
aagcuccagguag

SEQ ID NO: 1470733 - RNA, 14 nt, Human
aagcuccagguaga

SEQ ID NO: 1470734 - RNA, 20 nt, Human
aagcucacagaccuuugaac

SEQ ID NO: 1470735 - RNA, 16 nt, Human
aagcuagcaaauagua

SEQ ID NO: 1470736 - RNA, 14 nt, Human
aagcuaggaaugaa

SEQ ID NO: 1470737 - RNA, 21 nt, Human
aagccugcacaauaaaaaugu

SEQ ID NO: 1470738 - RNA, 22 nt, Human
aagccugcacaauaaaaauguu

SEQ ID NO: 1470739 - RNA, 22 nt, Human
guucagcuaagcuaggaaugaa

SEQ ID NO: 1470740 - RNA, 19 nt, Human
guucagcuaagcuaggaau

SEQ ID NO: 1470741 - RNA, 17 nt, Human
guucaagcgauucucuu

SEQ ID NO: 1470742 - RNA, 18 nt, Human
guucaagcgauucucuug

SEQ ID NO: 1470743 - RNA, 22 nt, Human
aagccuaagggauccugccugc

SEQ ID NO: 1470744 - RNA, 17 nt, Human
aagccuaagggauccug

SEQ ID NO: 1470745 - RNA, 19 nt, Human
aagaggaauuacgugcucu

SEQ ID NO: 1470746 - RNA, 21 nt, Human
guggccuaaccugccgagagu

SEQ ID NO: 1470747 - RNA, 22 nt, Human
guggccuaaccugccgagaguc

SEQ ID NO: 1470748 - RNA, 20 nt, Human
guggcccuuaugacugccaa

SEQ ID NO: 1470749 - RNA, 23 nt, Human
guggcccuuaugacugccaagac

SEQ ID NO: 1470750 - RNA, 16 nt, Human
aagacugcacaucaaa

SEQ ID NO: 1470751 - RNA, 17 nt, Human
aagacugcauuauauuu

SEQ ID NO: 1470752 - RNA, 13 nt, Human
aagacuugacagu

SEQ ID NO: 1470753 - RNA, 14 nt, Human
aagacuugacagug

SEQ ID NO: 1470754 - RNA, 22 nt, Human
aacuugcugcaguaugaaaaua

SEQ ID NO: 1470755 - RNA, 20 nt, Human
aacuugcugcaguaugaaaa

SEQ ID NO: 1470756 - RNA, 21 nt, Human
gugucacucaaggcggugcuu

SEQ ID NO: 1470757 - RNA, 22 nt, Human
gugucacucaaggcggugcuug

SEQ ID NO: 1470758 - RNA, 22 nt, Human
aagaugcuuuuaacagagucug

SEQ ID NO: 1470759 - RNA, 12 nt, Human
aagaugcuuuua

SEQ ID NO: 1470760 - RNA, 23 nt, Human
aagaucugcagggggugugucug

SEQ ID NO: 1470761 - RNA, 20 nt, Human
aaauuguaagcaugcacaaa

SEQ ID NO: 1470762 - RNA, 18 nt, Human
aaauucugucucuggauu

SEQ ID NO: 1470763 - RNA, 19 nt, Human
aaauuguaagcaugcacaa

SEQ ID NO: 1470764 - RNA, 16 nt, Human
aaauucugucucugga

SEQ ID NO: 1470765 - RNA, 15 nt, Human
aaauucugcucagau

SEQ ID NO: 1470766 - RNA, 23 nt, Human
aaauugugcaguacuuugugcau

SEQ ID NO: 1470767 - RNA, 22 nt, Human
aaauuuauuucaauauuagcaa

SEQ ID NO: 1470768 - RNA, 13 nt, Human
gucaaaacagauu

SEQ ID NO: 1470769 - RNA, 15 nt, Human
gucaaaacagauugu

SEQ ID NO: 1470770 - RNA, 20 nt, Human
gucaaaacagauuguuugca

SEQ ID NO: 1470771 - RNA, 17 nt, Human
gucaacacuaacaugau

SEQ ID NO: 1470772 - RNA, 12 nt, Human
gucaaacaaaua

SEQ ID NO: 1470773 - RNA, 18 nt, Human
guauguacuucaugcugu

SEQ ID NO: 1470774 - RNA, 15 nt, Human
guaugguugacacua

SEQ ID NO: 1470775 - RNA, 15 nt, Human
aaauguauuacagug

SEQ ID NO: 1470776 - RNA, 13 nt, Human
guaugucuccagu

SEQ ID NO: 1470777 - RNA, 22 nt, Human
aaaugugggauuaugggucaca

SEQ ID NO: 1470778 - RNA, 20 nt, Human
aaaugugggauuauggguca

SEQ ID NO: 1470779 - RNA, 14 nt, Human
aaauuaagaaagga

SEQ ID NO: 1470780 - RNA, 13 nt, Human
aaauuaagacuuu

SEQ ID NO: 1470781 - RNA, 21 nt, Human
aaauuaguuagccaauauuuu

SEQ ID NO: 1470782 - RNA, 18 nt, Human
aaauuauuaauuuaugca

SEQ ID NO: 1470783 - RNA, 12 nt, Human
aaauuauuguuu

SEQ ID NO: 1470784 - RNA, 20 nt, Human
aaauuauuguuuuucuuuuu

SEQ ID NO: 1470785 - RNA, 12 nt, Human
aaauuauuuaaa

SEQ ID NO: 1470786 - RNA, 13 nt, Human
aaauuauuuaaac

SEQ ID NO: 1470787 - RNA, 15 nt, Human
guauaaaauaauuuu

SEQ ID NO: 1470788 - RNA, 21 nt, Human
guauaaaauaauuuuuauauu

SEQ ID NO: 1470789 - RNA, 23 nt, Human
guauaaaaauaaaaaagauccca

SEQ ID NO: 1470790 - RNA, 12 nt, Human
guaucauagaaa

SEQ ID NO: 1470791 - RNA, 15 nt, Human
guaucauagaaaugu

SEQ ID NO: 1470792 - RNA, 13 nt, Human
guaucaucagugu

SEQ ID NO: 1470793 - RNA, 14 nt, Human
guauccacuuugca

SEQ ID NO: 1470794 - RNA, 19 nt, Human
guauccacuuugcacagcu

SEQ ID NO: 1470795 - RNA, 19 nt, Human
guauaaaagggacugagaa

SEQ ID NO: 1470796 - RNA, 20 nt, Human
guaguuuuuauauguuguaa

SEQ ID NO: 1470797 - RNA, 16 nt, Human
guauaaaaauaaaaaa

SEQ ID NO: 1470798 - RNA, 19 nt, Human
guauaaaaauaaaaaagau

SEQ ID NO: 1470799 - RNA, 17 nt, Human
guaguugccuuaaaaua

SEQ ID NO: 1470800 - RNA, 20 nt, Human
guaguguuggagaagaacug

SEQ ID NO: 1470801 - RNA, 22 nt, Human
aaauguaaagauauuuuuaucu

SEQ ID NO: 1470802 - RNA, 13 nt, Human
aaauguaaagcca

SEQ ID NO: 1470803 - RNA, 17 nt, Human
aaauguaacuuuuguaa

SEQ ID NO: 1470804 - RNA, 18 nt, Human
aaauguaacuuuuguaag

SEQ ID NO: 1470805 - RNA, 20 nt, Human
aaauggucucuaacauuucc

SEQ ID NO: 1470806 - RNA, 12 nt, Human
aaauuugccaag

SEQ ID NO: 1470807 - RNA, 11 nt, Human
aaauuuguacu

SEQ ID NO: 1470808 - RNA, 12 nt, Human
aaauuuguacua

SEQ ID NO: 1470809 - RNA, 13 nt, Human
aaauuuguacuau

SEQ ID NO: 1470810 - RNA, 17 nt, Human
aaauuuguacuauuuaa

SEQ ID NO: 1470811 - RNA, 19 nt, Human
aaauuuguacuauuuaacu

SEQ ID NO: 1470812 - RNA, 20 nt, Human
aaauuuguacuauuuaacug

SEQ ID NO: 1470813 - RNA, 17 nt, Human
gucagaauagaaauuag

SEQ ID NO: 1470814 - RNA, 13 nt, Human
gucagaauagaaa

SEQ ID NO: 1470815 - RNA, 21 nt, Human
gucaggcccuuauuuucaaga

SEQ ID NO: 1470816 - RNA, 22 nt, Human
gucaggcccuuauuuucaagaa

SEQ ID NO: 1470817 - RNA, 20 nt, Human
aaauuuuuucucuaggaaau

SEQ ID NO: 1470818 - RNA, 12 nt, Human
aaauuuuauaug

SEQ ID NO: 1470819 - RNA, 23 nt, Human
aaauuuuagcgugcucacugacc

SEQ ID NO: 1470820 - RNA, 20 nt, Human
aaauuuuuguaguagcguuu

SEQ ID NO: 1470821 - RNA, 22 nt, Human
aacaagaccucagugccuuccu

SEQ ID NO: 1470822 - RNA, 23 nt, Human
aacaagaccucagugccuuccug

SEQ ID NO: 1470823 - RNA, 17 nt, Human
aacaaugcuguauuuua

SEQ ID NO: 1470824 - RNA, 22 nt, Human
aacaaugcuguauuuuaaaaga

SEQ ID NO: 1470825 - RNA, 15 nt, Human
aacacaacuauauug

SEQ ID NO: 1470826 - RNA, 16 nt, Human
aacacaacuauauugu

SEQ ID NO: 1470827 - RNA, 12 nt, Human
aacaauucuaaa

SEQ ID NO: 1470828 - RNA, 14 nt, Human
aacaauucuaaaau

SEQ ID NO: 1470829 - RNA, 22 nt, Human
aacaauucuaaaaugauuguag

SEQ ID NO: 1470830 - RNA, 19 nt, Human
aacaauucuaaaaugauug

SEQ ID NO: 1470831 - RNA, 12 nt, Human
aacaauaaaaga

SEQ ID NO: 1470832 - RNA, 15 nt, Human
aacaaugcuguauuu

SEQ ID NO: 1470833 - RNA, 15 nt, Human
guccaguguuucuuu

SEQ ID NO: 1470834 - RNA, 24 nt, Human
guccagugggaggugagaccaccu

SEQ ID NO: 1470835 - RNA, 17 nt, Human
aacacaacuauauuguu

SEQ ID NO: 1470836 - RNA, 20 nt, Human
gucauuuugguacuuuggug

SEQ ID NO: 1470837 - RNA, 18 nt, Human
gucauuuugguacuuugg

SEQ ID NO: 1470838 - RNA, 20 nt, Human
aacagggccacauagaugcu

SEQ ID NO: 1470839 - RNA, 21 nt, Human
aacagggcugccuucuggccu

SEQ ID NO: 1470840 - RNA, 14 nt, Human
aacagggcugccuu

SEQ ID NO: 1470841 - RNA, 16 nt, Human
aacagggccacauaga

SEQ ID NO: 1470842 - RNA, 16 nt, Human
gucugucugucugucc

SEQ ID NO: 1470843 - RNA, 14 nt, Human
gucugucugucugu

SEQ ID NO: 1470844 - RNA, 22 nt, Human
gucuguagugucacucaaggcg

SEQ ID NO: 1470845 - RNA, 19 nt, Human
gucuggcaguuuauauuua

SEQ ID NO: 1470846 - RNA, 17 nt, Human
gucuggcacagccuggc

SEQ ID NO: 1470847 - RNA, 19 nt, Human
gucuggcacagccuggcug

SEQ ID NO: 1470848 - RNA, 21 nt, Human
aaccugaugaaaauaaagaau

SEQ ID NO: 1470849 - RNA, 22 nt, Human
aaccugaugaaaauaaagaaug

SEQ ID NO: 1470850 - RNA, 20 nt, Human
aaccugagucguacagaaag

SEQ ID NO: 1470851 - RNA, 17 nt, Human
aaccugaugaaaauaaa

SEQ ID NO: 1470852 - RNA, 19 nt, Human
aaccugaugaaaauaaaga

SEQ ID NO: 1470853 - RNA, 20 nt, Human
aaccugaugaaaauaaagaa

SEQ ID NO: 1470854 - RNA, 16 nt, Human
gucuuucacauuuaaa

SEQ ID NO: 1470855 - RNA, 15 nt, Human
gucuuugguucagcu

SEQ ID NO: 1470856 - RNA, 16 nt, Human
gucuuuuuagaugccc

SEQ ID NO: 1470857 - RNA, 21 nt, Human
aacuagaguuuagcuggaaaa

SEQ ID NO: 1470858 - RNA, 20 nt, Human
aacuagaggugagaaauuua

SEQ ID NO: 1470859 - RNA, 21 nt, Human
aacuagaggugagaaauuuaa

SEQ ID NO: 1470860 - RNA, 22 nt, Human
aacuagaggugagaaauuuaaa

SEQ ID NO: 1470861 - RNA, 18 nt, Human
aacuaucuuggugaauuu

SEQ ID NO: 1470862 - RNA, 11 nt, Human
aacuaucuugg

SEQ ID NO: 1470863 - RNA, 15 nt, Human
aacuaccugagcuaa

SEQ ID NO: 1470864 - RNA, 21 nt, Human
aacucguauagcaugcaucug

SEQ ID NO: 1470865 - RNA, 15 nt, Human
aacucguauagcaug

SEQ ID NO: 1470866 - RNA, 19 nt, Human
aacucguauagcaugcauc

SEQ ID NO: 1470867 - RNA, 17 nt, Human
aacucaucugucaccaa

SEQ ID NO: 1470868 - RNA, 23 nt, Human
aacucauuagacuggaacuugaa

SEQ ID NO: 1470869 - RNA, 15 nt, Human
aacucauuagacugg

SEQ ID NO: 1470870 - RNA, 20 nt, Human
aaccaagugaucaaacuaca

SEQ ID NO: 1470871 - RNA, 19 nt, Human
gucucccuccucugcccgg

SEQ ID NO: 1470872 - RNA, 12 nt, Human
aaccauuuccuc

SEQ ID NO: 1470873 - RNA, 15 nt, Human
aaccauuuccucaga

SEQ ID NO: 1470874 - RNA, 16 nt, Human
aaccauuuccucagac

SEQ ID NO: 1470875 - RNA, 19 nt, Human
aacccacaggcccacagua

SEQ ID NO: 1470876 - RNA, 19 nt, Human
aaccauuauaaccuuaauu

SEQ ID NO: 1470877 - RNA, 17 nt, Human
aaccauuaaccagaucu

SEQ ID NO: 1470878 - RNA, 14 nt, Human
aaccucauccucuc

SEQ ID NO: 1470879 - RNA, 18 nt, Human
aaccucaguaauuuagaa

SEQ ID NO: 1470880 - RNA, 14 nt, Human
aaccucaguaauuu

SEQ ID NO: 1470881 - RNA, 13 nt, Human
aaccuccaccucc

SEQ ID NO: 1470882 - RNA, 12 nt, Human
aaccucuaaauu

SEQ ID NO: 1470883 - RNA, 24 nt, Human
aaccucuaaauucuuucauuuuag

SEQ ID NO: 1470884 - RNA, 19 nt, Human
aaccugaccccugcucagu

SEQ ID NO: 1470885 - RNA, 16 nt, Human
aaccugaccccugcuc

SEQ ID NO: 1470886 - RNA, 17 nt, Human
aaccugaccccugcuca

SEQ ID NO: 1470887 - RNA, 14 nt, Human
aacccagauaaagg

SEQ ID NO: 1470888 - RNA, 21 nt, Human
aaccccuacaugaaacagaaa

SEQ ID NO: 1470889 - RNA, 20 nt, Human
aaccccuccccuccaucccu

SEQ ID NO: 1470890 - RNA, 21 nt, Human
aaccccuccccuccaucccug

SEQ ID NO: 1470891 - RNA, 23 nt, Human
aaccccuccccuccaucccuggc

SEQ ID NO: 1470892 - RNA, 12 nt, Human
aacugaaaucau

SEQ ID NO: 1470893 - RNA, 13 nt, Human
aacugaaaucaua

SEQ ID NO: 1470894 - RNA, 17 nt, Human
aacugaaaauuauuuaa

SEQ ID NO: 1470895 - RNA, 12 nt, Human
aacugaaaaugu

SEQ ID NO: 1470896 - RNA, 12 nt, Human
aacugaaaauua

SEQ ID NO: 1470897 - RNA, 13 nt, Human
aacugaaaauuau

SEQ ID NO: 1470898 - RNA, 19 nt, Human
aacucuucaaggucugcuu

SEQ ID NO: 1470899 - RNA, 16 nt, Human
aacucuucaaggucug

SEQ ID NO: 1470900 - RNA, 22 nt, Human
aacucuuauaaauuucuauuuu

SEQ ID NO: 1470901 - RNA, 15 nt, Human
aacucuuauaaauuu

SEQ ID NO: 1470902 - RNA, 16 nt, Human
aacuggggcuccucca

SEQ ID NO: 1470903 - RNA, 16 nt, Human
aacugggggaaaagau

SEQ ID NO: 1470904 - RNA, 17 nt, Human
aacugggacaggggaga

SEQ ID NO: 1470905 - RNA, 22 nt, Human
aacuggcaggcaggcucccagg

SEQ ID NO: 1470906 - RNA, 14 nt, Human
aacuggcaggcagg

SEQ ID NO: 1470907 - RNA, 19 nt, Human
aacugcuaaucuacuuucu

SEQ ID NO: 1470908 - RNA, 13 nt, Human
aacuggaaagaag

SEQ ID NO: 1470909 - RNA, 12 nt, Human
aacuggaaagaa

SEQ ID NO: 1470910 - RNA, 16 nt, Human
aacuggaaucagcuca

SEQ ID NO: 1470911 - RNA, 19 nt, Human
aacuggaaucagcucagga

SEQ ID NO: 1470912 - RNA, 18 nt, Human
aacuuccagauccuggaa

SEQ ID NO: 1470913 - RNA, 20 nt, Human
aacuucauauaugaggacuu

SEQ ID NO: 1470914 - RNA, 18 nt, Human
aacuggguaaugaaacaa

SEQ ID NO: 1470915 - RNA, 13 nt, Human
aacuguaauacaa

SEQ ID NO: 1470916 - RNA, 14 nt, Human
gugcauucuccagc

SEQ ID NO: 1470917 - RNA, 21 nt, Human
gugccaauuucaaguuccaag

SEQ ID NO: 1470918 - RNA, 14 nt, Human
gugccaauuucaag

SEQ ID NO: 1470919 - RNA, 20 nt, Human
gugcacaaauauuuauuuuc

SEQ ID NO: 1470920 - RNA, 15 nt, Human
gugcacaaauauuua

SEQ ID NO: 1470921 - RNA, 22 nt, Human
gugcacauauccaggcaccagg

SEQ ID NO: 1470922 - RNA, 15 nt, Human
gugcaaggaccuaaa

SEQ ID NO: 1470923 - RNA, 19 nt, Human
gugcaaggaccuaaaacau

SEQ ID NO: 1470924 - RNA, 13 nt, Human
gugcaauguaaau

SEQ ID NO: 1470925 - RNA, 17 nt, Human
gugcaauguaaauauuu

SEQ ID NO: 1470926 - RNA, 22 nt, Human
gugcaauguaaauauuuuaaag

SEQ ID NO: 1470927 - RNA, 20 nt, Human
gugcaauguaaauauuuuaa

SEQ ID NO: 1470928 - RNA, 15 nt, Human
accaucucuccaacu

SEQ ID NO: 1470929 - RNA, 23 nt, Human
accaucagaaacacccucacacu

SEQ ID NO: 1470930 - RNA, 20 nt, Human
accaucagaaacacccucac

SEQ ID NO: 1470931 - RNA, 13 nt, Human
accaucacugagu

SEQ ID NO: 1470932 - RNA, 22 nt, Human
accaucaccagaauuaauuuua

SEQ ID NO: 1470933 - RNA, 22 nt, Human
accauagcacaggcuaauuuuu

SEQ ID NO: 1470934 - RNA, 15 nt, Human
acccacccagaauga

SEQ ID NO: 1470935 - RNA, 12 nt, Human
acccacccagaa

SEQ ID NO: 1470936 - RNA, 16 nt, Human
acccaccaguugaauu

SEQ ID NO: 1470937 - RNA, 23 nt, Human
acccacacucagauccuccucau

SEQ ID NO: 1470938 - RNA, 22 nt, Human
acccacacucagauccuccuca

SEQ ID NO: 1470939 - RNA, 20 nt, Human
accaugaagagauuuuucau

SEQ ID NO: 1470940 - RNA, 18 nt, Human
acccacaggcccacagua

SEQ ID NO: 1470941 - RNA, 19 nt, Human
accaugaagagauuuuuca

SEQ ID NO: 1470942 - RNA, 16 nt, Human
acccauauuguaaaac

SEQ ID NO: 1470943 - RNA, 20 nt, Human
acccauauuguaaaacaggu

SEQ ID NO: 1470944 - RNA, 17 nt, Human
acauuuccuaaauauau

SEQ ID NO: 1470945 - RNA, 16 nt, Human
acauuuccuaaauaua

SEQ ID NO: 1470946 - RNA, 18 nt, Human
acauuuccuuacagaacu

SEQ ID NO: 1470947 - RNA, 20 nt, Human
acauuucuauagccaaaaau

SEQ ID NO: 1470948 - RNA, 21 nt, Human
accaagauacuuaagugcugc

SEQ ID NO: 1470949 - RNA, 15 nt, Human
accaagauacuuaag

SEQ ID NO: 1470950 - RNA, 20 nt, Human
accaagauacuuaagugcug

SEQ ID NO: 1470951 - RNA, 15 nt, Human
acaguggggaaugaa

SEQ ID NO: 1470952 - RNA, 19 nt, Human
acaguggggaaugaagaua

SEQ ID NO: 1470953 - RNA, 14 nt, Human
acagugcagugcgc

SEQ ID NO: 1470954 - RNA, 21 nt, Human
acagggccuuuggcaggugca

SEQ ID NO: 1470955 - RNA, 16 nt, Human
acagggcggggguggc

SEQ ID NO: 1470956 - RNA, 15 nt, Human
acagcugccucuucc

SEQ ID NO: 1470957 - RNA, 16 nt, Human
acagggcugccuucug

SEQ ID NO: 1470958 - RNA, 18 nt, Human
acagugagccugaauuuu

SEQ ID NO: 1470959 - RNA, 21 nt, Human
acagugagccugaauuuuguu

SEQ ID NO: 1470960 - RNA, 17 nt, Human
acagugagccugaauuu

SEQ ID NO: 1470961 - RNA, 14 nt, Human
acagcugccucuuc

SEQ ID NO: 1470962 - RNA, 18 nt, Human
acauaauucacucugagu

SEQ ID NO: 1470963 - RNA, 20 nt, Human
acauaauucacucugagugu

SEQ ID NO: 1470964 - RNA, 21 nt, Human
acauaauuuaguuucauauaa

SEQ ID NO: 1470965 - RNA, 15 nt, Human
acauaagccauuauu

SEQ ID NO: 1470966 - RNA, 18 nt, Human
acauaagccauuauucac

SEQ ID NO: 1470967 - RNA, 17 nt, Human
acauaauuauccaggaa

SEQ ID NO: 1470968 - RNA, 23 nt, Human
acauaauuauccaggaagggaau

SEQ ID NO: 1470969 - RNA, 16 nt, Human
acauaauucacucuga

SEQ ID NO: 1470970 - RNA, 17 nt, Human
acauaauucacucugag

SEQ ID NO: 1470971 - RNA, 15 nt, Human
acaucauuacuauaa

SEQ ID NO: 1470972 - RNA, 18 nt, Human
acaucauuacuauaagaa

SEQ ID NO: 1470973 - RNA, 21 nt, Human
acaucauuacuauaagaacuu

SEQ ID NO: 1470974 - RNA, 15 nt, Human
acaucauucauuuuu

SEQ ID NO: 1470975 - RNA, 18 nt, Human
aauuuccugggagcuuuu

SEQ ID NO: 1470976 - RNA, 21 nt, Human
aauuuccugggagcuuuugua

SEQ ID NO: 1470977 - RNA, 19 nt, Human
aauuucaccuguaaaccug

SEQ ID NO: 1470978 - RNA, 20 nt, Human
aauuucaccuguaaaccuga

SEQ ID NO: 1470979 - RNA, 13 nt, Human
aauuuauuuucuu

SEQ ID NO: 1470980 - RNA, 16 nt, Human
aauuucaccuguaaac

SEQ ID NO: 1470981 - RNA, 13 nt, Human
aauuuauuauuaa

SEQ ID NO: 1470982 - RNA, 21 nt, Human
aauugugcaguacuuugugca

SEQ ID NO: 1470983 - RNA, 21 nt, Human
aauuguggggaugaugaaaua

SEQ ID NO: 1470984 - RNA, 16 nt, Human
aauuguauuuuaguaa

SEQ ID NO: 1470985 - RNA, 21 nt, Human
acaaggaugaauuaaguuuuu

SEQ ID NO: 1470986 - RNA, 15 nt, Human
acaaccucaacugcc

SEQ ID NO: 1470987 - RNA, 16 nt, Human
acaaccucaacugccu

SEQ ID NO: 1470988 - RNA, 16 nt, Human
acaaagaaauuaugug

SEQ ID NO: 1470989 - RNA, 14 nt, Human
acaaagaaauuaug

SEQ ID NO: 1470990 - RNA, 12 nt, Human
acaaagaaauua

SEQ ID NO: 1470991 - RNA, 13 nt, Human
acaaaauggaaua

SEQ ID NO: 1470992 - RNA, 14 nt, Human
acaaaauggaauac

SEQ ID NO: 1470993 - RNA, 15 nt, Human
acaaaauggaauacu

SEQ ID NO: 1470994 - RNA, 18 nt, Human
aauuuucaucuaggauuu

SEQ ID NO: 1470995 - RNA, 17 nt, Human
aauuuugugaagcaaaa

SEQ ID NO: 1470996 - RNA, 18 nt, Human
aauuuugugaagcaaaau

SEQ ID NO: 1470997 - RNA, 14 nt, Human
aauuuugaugaaca

SEQ ID NO: 1470998 - RNA, 16 nt, Human
aauuuugaugaacaaa

SEQ ID NO: 1470999 - RNA, 16 nt, Human
acagaagcuccaggua

SEQ ID NO: 1471000 - RNA, 12 nt, Human
acagaagaaaca

SEQ ID NO: 1471001 - RNA, 20 nt, Human
acacugggagaaaugaaaaa

SEQ ID NO: 1471002 - RNA, 19 nt, Human
acacugggacuugcaaaaa

SEQ ID NO: 1471003 - RNA, 18 nt, Human
acacugggacuugcaaaa

SEQ ID NO: 1471004 - RNA, 13 nt, Human
acacugggacuug

SEQ ID NO: 1471005 - RNA, 18 nt, Human
acacuguguacugcaguu

SEQ ID NO: 1471006 - RNA, 17 nt, Human
acagaaccccuacauga

SEQ ID NO: 1471007 - RNA, 16 nt, Human
acagaacauagacaga

SEQ ID NO: 1471008 - RNA, 18 nt, Human
acaauuuaugaauugaau

SEQ ID NO: 1471009 - RNA, 12 nt, Human
acaauucuaaaa

SEQ ID NO: 1471010 - RNA, 14 nt, Human
acaauucuaaaaug

SEQ ID NO: 1471011 - RNA, 17 nt, Human
acaauucuaaaaugauu

SEQ ID NO: 1471012 - RNA, 23 nt, Human
acaauucuaaaaugauuguagua

SEQ ID NO: 1471013 - RNA, 24 nt, Human
acaauucuaaaaugauuguaguaa

SEQ ID NO: 1471014 - RNA, 21 nt, Human
acaauuaggcagacucuuuau

SEQ ID NO: 1471015 - RNA, 16 nt, Human
acaauuuuuuaucaug

SEQ ID NO: 1471016 - RNA, 22 nt, Human
acaauuuuuuaucaugcauguc

SEQ ID NO: 1471017 - RNA, 19 nt, Human
acuaguauuucuaugaaau

SEQ ID NO: 1471018 - RNA, 17 nt, Human
acuauucuugauguaaa

SEQ ID NO: 1471019 - RNA, 19 nt, Human
acuauucuugauguaaaau

SEQ ID NO: 1471020 - RNA, 18 nt, Human
acuaguauuucuaugaaa

SEQ ID NO: 1471021 - RNA, 15 nt, Human
acuauugcauuuaua

SEQ ID NO: 1471022 - RNA, 23 nt, Human
acuauucuugauguaaaaucuug

SEQ ID NO: 1471023 - RNA, 20 nt, Human
acuauucuugauguaaaauc

SEQ ID NO: 1471024 - RNA, 22 nt, Human
acuauucuugauguaaaaucuu

SEQ ID NO: 1471025 - RNA, 14 nt, Human
acuagggagccaug

SEQ ID NO: 1471026 - RNA, 15 nt, Human
acuagggagccaugu

SEQ ID NO: 1471027 - RNA, 18 nt, Human
acuagggagccauguuuc

SEQ ID NO: 1471028 - RNA, 19 nt, Human
acuagggagccauguuuca

SEQ ID NO: 1471029 - RNA, 22 nt, Human
acuagggagccauguuucacaa

SEQ ID NO: 1471030 - RNA, 23 nt, Human
acuaggccuugcggcuccucagg

SEQ ID NO: 1471031 - RNA, 22 nt, Human
acuaggccuugcggcuccucag

SEQ ID NO: 1471032 - RNA, 14 nt, Human
acuaggcugagcaa

SEQ ID NO: 1471033 - RNA, 23 nt, Human
acuaggcugagcaaucugacccu

SEQ ID NO: 1471034 - RNA, 19 nt, Human
acuaaugccuuacucuucu

SEQ ID NO: 1471035 - RNA, 17 nt, Human
acgcacggcagccacag

SEQ ID NO: 1471036 - RNA, 15 nt, Human
acgcacggcagccac

SEQ ID NO: 1471037 - RNA, 22 nt, Human
acggaagaagagaucaggaaga

SEQ ID NO: 1471038 - RNA, 20 nt, Human
acuaacuccuaggaaaauac

SEQ ID NO: 1471039 - RNA, 17 nt, Human
acgucuggguggcccuu

SEQ ID NO: 1471040 - RNA, 17 nt, Human
accucugccucagaaaa

SEQ ID NO: 1471041 - RNA, 18 nt, Human
accucugccucagaaaac

SEQ ID NO: 1471042 - RNA, 20 nt, Human
accugucugucugucugucc

SEQ ID NO: 1471043 - RNA, 18 nt, Human
accugucugucugucugu

SEQ ID NO: 1471044 - RNA, 14 nt, Human
accugucugucugu

SEQ ID NO: 1471045 - RNA, 23 nt, Human
accugcccugcccugccaccugu

SEQ ID NO: 1471046 - RNA, 22 nt, Human
accugcccugcccugccaccug

SEQ ID NO: 1471047 - RNA, 21 nt, Human
accugcccugcccugccaccu

SEQ ID NO: 1471048 - RNA, 20 nt, Human
accugcccugcccugccacc

SEQ ID NO: 1471049 - RNA, 18 nt, Human
accugcccugcccugcca

SEQ ID NO: 1471050 - RNA, 17 nt, Human
accugcccugcccugcc

SEQ ID NO: 1471051 - RNA, 16 nt, Human
accugcccugcccugc

SEQ ID NO: 1471052 - RNA, 13 nt, Human
accugcccugccc

SEQ ID NO: 1471053 - RNA, 12 nt, Human
accugcccugcc

SEQ ID NO: 1471054 - RNA, 20 nt, Human
accucugccucagaaaacaa

SEQ ID NO: 1471055 - RNA, 23 nt, Human
accggcggaccccagccauccag

SEQ ID NO: 1471056 - RNA, 16 nt, Human
accggccugccaggag

SEQ ID NO: 1471057 - RNA, 13 nt, Human
accggccugccag

SEQ ID NO: 1471058 - RNA, 15 nt, Human
accggccugccagga

SEQ ID NO: 1471059 - RNA, 17 nt, Human
accggccugccaggagg

SEQ ID NO: 1471060 - RNA, 19 nt, Human
accggggccugggcaggag

SEQ ID NO: 1471061 - RNA, 23 nt, Human
accucagugccuuccuguuuuuc

SEQ ID NO: 1471062 - RNA, 20 nt, Human
acuucaaauccuugaagauu

SEQ ID NO: 1471063 - RNA, 19 nt, Human
acuucaagcauggcuauuu

SEQ ID NO: 1471064 - RNA, 23 nt, Human
acuucaagcauggcuauuuuaua

SEQ ID NO: 1471065 - RNA, 18 nt, Human
acuucagcgguuuauaua

SEQ ID NO: 1471066 - RNA, 19 nt, Human
acuucagcgguuuauauaa

SEQ ID NO: 1471067 - RNA, 16 nt, Human
acuuggcugcaggaau

SEQ ID NO: 1471068 - RNA, 21 nt, Human
acuggaccacugggcaaugau

SEQ ID NO: 1471069 - RNA, 21 nt, Human
acuggaaucagcucaggacug

SEQ ID NO: 1471070 - RNA, 12 nt, Human
acuggacagcuu

SEQ ID NO: 1471071 - RNA, 13 nt, Human
acuggacagcuug

SEQ ID NO: 1471072 - RNA, 14 nt, Human
acuggacagcuugu

SEQ ID NO: 1471073 - RNA, 15 nt, Human
acuggacagcuugug

SEQ ID NO: 1471074 - RNA, 16 nt, Human
acuggaccacugggca

SEQ ID NO: 1471075 - RNA, 20 nt, Human
acuggaccacugggcaauga

SEQ ID NO: 1471076 - RNA, 15 nt, Human
acuuuauuuuguguu

SEQ ID NO: 1471077 - RNA, 13 nt, Human
acuuuauguaguu

SEQ ID NO: 1471078 - RNA, 19 nt, Human
acugauucacaucucauuu

SEQ ID NO: 1471079 - RNA, 20 nt, Human
acugauucacaucucauuuu

SEQ ID NO: 1471080 - RNA, 19 nt, Human
acucuguucauuccuccag

SEQ ID NO: 1471081 - RNA, 18 nt, Human
acucuguucauuccucca

SEQ ID NO: 1471082 - RNA, 16 nt, Human
acucuguucauuccuc

SEQ ID NO: 1471083 - RNA, 15 nt, Human
acucuguucauuccu

SEQ ID NO: 1471084 - RNA, 14 nt, Human
acucuuaagaagac

SEQ ID NO: 1471085 - RNA, 15 nt, Human
acucuuaagaagacu

SEQ ID NO: 1471086 - RNA, 20 nt, Human
acucuguucauuccuccagg

SEQ ID NO: 1471087 - RNA, 20 nt, Human
acucuuaagaagacugcauu

SEQ ID NO: 1471088 - RNA, 12 nt, Human
acuauuuucaga

SEQ ID NO: 1471089 - RNA, 22 nt, Human
acuauuuucagaugugaaccau

SEQ ID NO: 1471090 - RNA, 13 nt, Human
acucuaagaaaga

SEQ ID NO: 1471091 - RNA, 14 nt, Human
acucuaagaaagaa

SEQ ID NO: 1471092 - RNA, 15 nt, Human
acucuaagaaagaac

SEQ ID NO: 1471093 - RNA, 13 nt, Human
aagagaaggagca

SEQ ID NO: 1471094 - RNA, 13 nt, Human
aagagaaguagaa

SEQ ID NO: 1471095 - RNA, 23 nt, Human
aagagaaugcccuucuccuuauu

SEQ ID NO: 1471096 - RNA, 15 nt, Human
aagacuuuuaugaua

SEQ ID NO: 1471097 - RNA, 15 nt, Human
aagagaacuuccaga

SEQ ID NO: 1471098 - RNA, 20 nt, Human
aagagaacccacgaacauuc

SEQ ID NO: 1471099 - RNA, 22 nt, Human
aagagaaugcccuucuccuuau

SEQ ID NO: 1471100 - RNA, 19 nt, Human
aagagacaaacaccuccca

SEQ ID NO: 1471101 - RNA, 21 nt, Human
aagagacaaacaccucccagg

SEQ ID NO: 1471102 - RNA, 16 nt, Human
aagagacagcccagga

SEQ ID NO: 1471103 - RNA, 15 nt, Human
aagagacagcccagg

SEQ ID NO: 1471104 - RNA, 18 nt, Human
aagagagccugcaggauc

SEQ ID NO: 1471105 - RNA, 19 nt, Human
aacuguuguagaagacaaa

SEQ ID NO: 1471106 - RNA, 18 nt, Human
aacuguuguagaagacaa

SEQ ID NO: 1471107 - RNA, 21 nt, Human
aacuuaccaggcaccaaaaga

SEQ ID NO: 1471108 - RNA, 22 nt, Human
aagacagcuucucauccugcag

SEQ ID NO: 1471109 - RNA, 23 nt, Human
aagacagugaaagaaaauaacaa

SEQ ID NO: 1471110 - RNA, 14 nt, Human
aagacaguggcccc

SEQ ID NO: 1471111 - RNA, 12 nt, Human
aagacaugucug

SEQ ID NO: 1471112 - RNA, 13 nt, Human
aagacaugucugu

SEQ ID NO: 1471113 - RNA, 16 nt, Human
aagacaugucuguucu

SEQ ID NO: 1471114 - RNA, 17 nt, Human
aagacaugucuguucua

SEQ ID NO: 1471115 - RNA, 19 nt, Human
aagacaugucuguucuaca

SEQ ID NO: 1471116 - RNA, 16 nt, Human
aagauacugaaauaaa

SEQ ID NO: 1471117 - RNA, 20 nt, Human
aagauacugaaauaaacguc

SEQ ID NO: 1471118 - RNA, 14 nt, Human
aagauacuuaagug

SEQ ID NO: 1471119 - RNA, 17 nt, Human
aagauacuuaagugcug

SEQ ID NO: 1471120 - RNA, 20 nt, Human
aagauucaaugccccugaau

SEQ ID NO: 1471121 - RNA, 21 nt, Human
aagauucaaugccccugaauu

SEQ ID NO: 1471122 - RNA, 12 nt, Human
aagauugcugaa

SEQ ID NO: 1471123 - RNA, 15 nt, Human
aagauugcugaaauu

SEQ ID NO: 1471124 - RNA, 12 nt, Human
aaggucugcuuu

SEQ ID NO: 1471125 - RNA, 13 nt, Human
aaggucuuugguu

SEQ ID NO: 1471126 - RNA, 19 nt, Human
aaggucuuugguucagcua

SEQ ID NO: 1471127 - RNA, 19 nt, Human
aaggugaaacauuuucucc

SEQ ID NO: 1471128 - RNA, 17 nt, Human
aaggugaaacauuuucu

SEQ ID NO: 1471129 - RNA, 22 nt, Human
aaggugaaacauuuucucccug

SEQ ID NO: 1471130 - RNA, 15 nt, Human
aaggugguguuucug

SEQ ID NO: 1471131 - RNA, 20 nt, Human
aagguguagccacaccagga

SEQ ID NO: 1471132 - RNA, 15 nt, Human
aaguagaugcauuug

SEQ ID NO: 1471133 - RNA, 17 nt, Human
aagggacugagaaauuu

SEQ ID NO: 1471134 - RNA, 15 nt, Human
aagggacugagaaau

SEQ ID NO: 1471135 - RNA, 13 nt, Human
aagggagggggag

SEQ ID NO: 1471136 - RNA, 21 nt, Human
aagggacugagagaugcagaa

SEQ ID NO: 1471137 - RNA, 16 nt, Human
aagggauccugccugc

SEQ ID NO: 1471138 - RNA, 13 nt, Human
aagggauccugcc

SEQ ID NO: 1471139 - RNA, 17 nt, Human
aagcuggagugcagugg

SEQ ID NO: 1471140 - RNA, 21 nt, Human
aagcugcugagaaucuagccu

SEQ ID NO: 1471141 - RNA, 15 nt, Human
aagcugcccugccca

SEQ ID NO: 1471142 - RNA, 18 nt, Human
aagcugcaucuagaggcu

SEQ ID NO: 1471143 - RNA, 12 nt, Human
aaggaauuuuau

SEQ ID NO: 1471144 - RNA, 12 nt, Human
aaggaccuaaaa

SEQ ID NO: 1471145 - RNA, 23 nt, Human
aagccagauuuuuuaaaauuuau

SEQ ID NO: 1471146 - RNA, 14 nt, Human
aauaauguuucaaa

SEQ ID NO: 1471147 - RNA, 19 nt, Human
aauaauguuucaaacauau

SEQ ID NO: 1471148 - RNA, 12 nt, Human
aauaauguuuca

SEQ ID NO: 1471149 - RNA, 16 nt, Human
aauaauacugcugaga

SEQ ID NO: 1471150 - RNA, 17 nt, Human
aauaauauauuuuaaau

SEQ ID NO: 1471151 - RNA, 12 nt, Human
aauaaaauuuuu

SEQ ID NO: 1471152 - RNA, 13 nt, Human
aauaaacaaauaa

SEQ ID NO: 1471153 - RNA, 22 nt, Human
aauaaaggacuguaaucuuauu

SEQ ID NO: 1471154 - RNA, 18 nt, Human
aauaaaggacuguaaucu

SEQ ID NO: 1471155 - RNA, 11 nt, Human
aauaaaggacu

SEQ ID NO: 1471156 - RNA, 14 nt, Human
aauaaagcugcuga

SEQ ID NO: 1471157 - RNA, 19 nt, Human
aauaaagcuguguggcagu

SEQ ID NO: 1471158 - RNA, 11 nt, Human
aauaaagcugu

SEQ ID NO: 1471159 - RNA, 15 nt, Human
aauaaacgucuuaaa

SEQ ID NO: 1471160 - RNA, 22 nt, Human
aaguugauaugccuuuucccaa

SEQ ID NO: 1471161 - RNA, 23 nt, Human
aaguggggcgggcuucauagaga

SEQ ID NO: 1471162 - RNA, 19 nt, Human
aauacgugggcauucaaau

SEQ ID NO: 1471163 - RNA, 20 nt, Human
aauacgugggcauucaaaug

SEQ ID NO: 1471164 - RNA, 14 nt, Human
aauacuucucauuu

SEQ ID NO: 1471165 - RNA, 16 nt, Human
aauacuucucauuuuu

SEQ ID NO: 1471166 - RNA, 22 nt, Human
aauacuucucauuuuuuaaaaa

SEQ ID NO: 1471167 - RNA, 17 nt, Human
aauagaacaaggcugag

SEQ ID NO: 1471168 - RNA, 14 nt, Human
aauaguuuggauau

SEQ ID NO: 1471169 - RNA, 21 nt, Human
aauaguuuuauuaauaaacau

SEQ ID NO: 1471170 - RNA, 20 nt, Human
aauaguuuuauuaauaaaca

SEQ ID NO: 1471171 - RNA, 22 nt, Human
aauaguuuuauuaauaaacauu

SEQ ID NO: 1471172 - RNA, 19 nt, Human
aauauacuuuuacaaguaa

SEQ ID NO: 1471173 - RNA, 18 nt, Human
aauauacuuuuacaagua

SEQ ID NO: 1471174 - RNA, 21 nt, Human
aauauagaucaguuauaagua

SEQ ID NO: 1471175 - RNA, 13 nt, Human
aaucauuuugcaa

SEQ ID NO: 1471176 - RNA, 16 nt, Human
aauccauacauuugug

SEQ ID NO: 1471177 - RNA, 17 nt, Human
aauccauacauuugugu

SEQ ID NO: 1471178 - RNA, 14 nt, Human
aaugauaacuggaa

SEQ ID NO: 1471179 - RNA, 14 nt, Human
aaugaaauuaacug

SEQ ID NO: 1471180 - RNA, 12 nt, Human
aaugaacaaaug

SEQ ID NO: 1471181 - RNA, 15 nt, Human
aaugauaacuggaaa

SEQ ID NO: 1471182 - RNA, 16 nt, Human
aaugauaacuggaaac

SEQ ID NO: 1471183 - RNA, 21 nt, Human
aaugauagacaauugagguaa

SEQ ID NO: 1471184 - RNA, 12 nt, Human
aaugaacagaac

SEQ ID NO: 1471185 - RNA, 23 nt, Human
aauggucacguuuggugcuucuc

SEQ ID NO: 1471186 - RNA, 22 nt, Human
aauggucacguuuggugcuucu

SEQ ID NO: 1471187 - RNA, 15 nt, Human
aauggguuacuugau

SEQ ID NO: 1471188 - RNA, 22 nt, Human
aaugccugacuagggagccaug

SEQ ID NO: 1471189 - RNA, 15 nt, Human
aaauaaacgucuuaa

SEQ ID NO: 1471190 - RNA, 16 nt, Human
aaauaaacgucuuaaa

SEQ ID NO: 1471191 - RNA, 18 nt, Human
aaauaaacaaauaacaau

SEQ ID NO: 1471192 - RNA, 14 nt, Human
aaauaaaaccagcu

SEQ ID NO: 1471193 - RNA, 18 nt, Human
aaagucaauguuuucagu

SEQ ID NO: 1471194 - RNA, 17 nt, Human
aaagucaauguuuucag

SEQ ID NO: 1471195 - RNA, 19 nt, Human
aaagugccauuaacaaaug

SEQ ID NO: 1471196 - RNA, 17 nt, Human
aaauaaacgucuuaaau

SEQ ID NO: 1471197 - RNA, 15 nt, Human
aaauaaauguaucau

SEQ ID NO: 1471198 - RNA, 21 nt, Human
aaauaaauguaucauagaaau

SEQ ID NO: 1471199 - RNA, 16 nt, Human
aaauaaauguaucaua

SEQ ID NO: 1471200 - RNA, 17 nt, Human
aaagcccauucauucca

SEQ ID NO: 1471201 - RNA, 16 nt, Human
aaagcccauucauucc

SEQ ID NO: 1471202 - RNA, 19 nt, Human
aaaggcuagguacacagcu

SEQ ID NO: 1471203 - RNA, 20 nt, Human
aaaggcuaugauugucuuug

SEQ ID NO: 1471204 - RNA, 15 nt, Human
aaagccaaacauaua

SEQ ID NO: 1471205 - RNA, 19 nt, Human
aaagaacggaagaagagau

SEQ ID NO: 1471206 - RNA, 15 nt, Human
aaagaacggaagaag

SEQ ID NO: 1471207 - RNA, 23 nt, Human
aaagaaccaacaaccucaacugc

SEQ ID NO: 1471208 - RNA, 13 nt, Human
aaagaaacauuug

SEQ ID NO: 1471209 - RNA, 12 nt, Human
aaagaaacuuuc

SEQ ID NO: 1471210 - RNA, 20 nt, Human
aaagaagaaggugggaggau

SEQ ID NO: 1471211 - RNA, 19 nt, Human
aaagaaaauuuuuguagua

SEQ ID NO: 1471212 - RNA, 12 nt, Human
aaagaaaauuuu

SEQ ID NO: 1471213 - RNA, 13 nt, Human
aaacugagugacu

SEQ ID NO: 1471214 - RNA, 13 nt, Human
aaacucuuuuccc

SEQ ID NO: 1471215 - RNA, 19 nt, Human
aaacccuugccaugugcua

SEQ ID NO: 1471216 - RNA, 14 nt, Human
aaaccgcuaaaaga

SEQ ID NO: 1471217 - RNA, 15 nt, Human
aaaccgcuaaaagaa

SEQ ID NO: 1471218 - RNA, 16 nt, Human
aaaccgcuaaaagaaa

SEQ ID NO: 1471219 - RNA, 18 nt, Human
aaaccgcuaaaagaaacu

SEQ ID NO: 1471220 - RNA, 23 nt, Human
aaaccgcuaaaagaaacuuucuu

SEQ ID NO: 1471221 - RNA, 21 nt, Human
aaaccgcuaaaagaaacuuuc

SEQ ID NO: 1471222 - RNA, 22 nt, Human
aaacccauauuguaaaacaggu

SEQ ID NO: 1471223 - RNA, 21 nt, Human
aaagauaaauuauaucaauuu

SEQ ID NO: 1471224 - RNA, 12 nt, Human
aaacaggaucag

SEQ ID NO: 1471225 - RNA, 17 nt, Human
aaacagggccacauaga

SEQ ID NO: 1471226 - RNA, 12 nt, Human
aaaauugaaugc

SEQ ID NO: 1471227 - RNA, 14 nt, Human
aaaauugaaugcaa

SEQ ID NO: 1471228 - RNA, 21 nt, Human
aaaauugaaugcaaaccauag

SEQ ID NO: 1471229 - RNA, 15 nt, Human
aaaauaaaaaacacu

SEQ ID NO: 1471230 - RNA, 21 nt, Human
aaaauaaaaaagaucccaaau

SEQ ID NO: 1471231 - RNA, 20 nt, Human
aaaaguuuuuuauuaugcau

SEQ ID NO: 1471232 - RNA, 21 nt, Human
aaaauccacuuuaucuugaau

SEQ ID NO: 1471233 - RNA, 20 nt, Human
aaaauaaaaagaucacuuuc

SEQ ID NO: 1471234 - RNA, 16 nt, Human
aaaauaaaaaagaucc

SEQ ID NO: 1471235 - RNA, 13 nt, Human
aaaauuaucuaua

SEQ ID NO: 1471236 - RNA, 13 nt, Human
aaaauuauuuaaa

SEQ ID NO: 1471237 - RNA, 14 nt, Human
aaaauuacaacuaa

SEQ ID NO: 1471238 - RNA, 12 nt, Human
aaaauuaagaaa

SEQ ID NO: 1471239 - RNA, 22 nt, Human
aaaauuaacaugaauauuuagu

SEQ ID NO: 1471240 - RNA, 20 nt, Human
aaaauuaaaccggaccaucu

SEQ ID NO: 1471241 - RNA, 19 nt, Human
aaaauccauacauuugugu

SEQ ID NO: 1471242 - RNA, 20 nt, Human
aaaauuaagaaaggauaaag

SEQ ID NO: 1471243 - RNA, 13 nt, Human
aaaauuaagaaag

SEQ ID NO: 1471244 - RNA, 17 nt, Human
aaaauuaaaucaaccuu

SEQ ID NO: 1471245 - RNA, 20 nt, Human
aacaggaucaguuaacuauu

SEQ ID NO: 1471246 - RNA, 15 nt, Human
aacagauuguuugca

SEQ ID NO: 1471247 - RNA, 16 nt, Human
aacagauuguuugcaa

SEQ ID NO: 1471248 - RNA, 18 nt, Human
aacacuagacaagccaga

SEQ ID NO: 1471249 - RNA, 19 nt, Human
aacacuagacaagccagaa

SEQ ID NO: 1471250 - RNA, 18 nt, Human
aaccauaacaacuucaua

SEQ ID NO: 1471251 - RNA, 22 nt, Human
aaccauacaaaaauuccuuuuc

SEQ ID NO: 1471252 - RNA, 22 nt, Human
aaccauagcacaggcuaauuuu

SEQ ID NO: 1471253 - RNA, 21 nt, Human
aacaucugagaaaagcuuuga

SEQ ID NO: 1471254 - RNA, 16 nt, Human
aaccgcuaaaagaaac

SEQ ID NO: 1471255 - RNA, 22 nt, Human
aacucaucuagguaaauuacag

SEQ ID NO: 1471256 - RNA, 15 nt, Human
aacucauauuuucau

SEQ ID NO: 1471257 - RNA, 16 nt, Human
aacucauauuuucaug

SEQ ID NO: 1471258 - RNA, 18 nt, Human
aacucauauuuucaugcu

SEQ ID NO: 1471259 - RNA, 12 nt, Human
aacugaggaauu

SEQ ID NO: 1471260 - RNA, 13 nt, Human
aacugaggaauuu

SEQ ID NO: 1471261 - RNA, 18 nt, Human
aacugaggaauuucaccu

SEQ ID NO: 1471262 - RNA, 16 nt, Human
aacugaggaauuuucu

SEQ ID NO: 1471263 - RNA, 16 nt, Human
aacgcuaucugggaag

SEQ ID NO: 1471264 - RNA, 15 nt, Human
aacguauaaaagccu

SEQ ID NO: 1471265 - RNA, 16 nt, Human
aacucaaaauauuugu

SEQ ID NO: 1471266 - RNA, 22 nt, Human
aacucaaacugaggaauuucac

SEQ ID NO: 1471267 - RNA, 21 nt, Human
aaauguuuuuuuuuaaagacu

SEQ ID NO: 1471268 - RNA, 18 nt, Human
aaauguuuuuuuuuaaag

SEQ ID NO: 1471269 - RNA, 23 nt, Human
aaauguugaaauaugauguuaaa

SEQ ID NO: 1471270 - RNA, 18 nt, Human
aaauugaugggauuuggu

SEQ ID NO: 1471271 - RNA, 23 nt, Human
aaauugagcuggaccucaccaag

SEQ ID NO: 1471272 - RNA, 18 nt, Human
aacaaacauuugcugaau

SEQ ID NO: 1471273 - RNA, 22 nt, Human
aaauguuuuuuuuuaaagacuu

SEQ ID NO: 1471274 - RNA, 20 nt, Human
aaauuaacuggguaaugaaa

SEQ ID NO: 1471275 - RNA, 21 nt, Human
aaauuaacuggguaaugaaac

SEQ ID NO: 1471276 - RNA, 21 nt, Human
aacacccucacacugggacuu

SEQ ID NO: 1471277 - RNA, 17 nt, Human
aacacccucacacuggg

SEQ ID NO: 1471278 - RNA, 13 nt, Human
aacaccucccagg

SEQ ID NO: 1471279 - RNA, 23 nt, Human
aacaccucccaggagacaguuca

SEQ ID NO: 1471280 - RNA, 17 nt, Human
aacacuaacaugauuug

SEQ ID NO: 1471281 - RNA, 20 nt, Human
aacaaacucguuuuuuacaa

SEQ ID NO: 1471282 - RNA, 16 nt, Human
aacaaacucguuuuuu

SEQ ID NO: 1471283 - RNA, 16 nt, Human
aacaaagguugagaug

SEQ ID NO: 1471284 - RNA, 16 nt, Human
aacaaauagucuauca

SEQ ID NO: 1471285 - RNA, 18 nt, Human
agaggaauuacgugcucu

SEQ ID NO: 1471286 - RNA, 10 nt, Human
agagggcugc

SEQ ID NO: 1471287 - RNA, 14 nt, Human
agagggcgcaggcc

SEQ ID NO: 1471288 - RNA, 16 nt, Human
agagggcgcaggccgu

SEQ ID NO: 1471289 - RNA, 16 nt, Human
agacugcuguggccag

SEQ ID NO: 1471290 - RNA, 17 nt, Human
agacugcuguggccagg

SEQ ID NO: 1471291 - RNA, 18 nt, Human
agacugcuguggccagga

SEQ ID NO: 1471292 - RNA, 19 nt, Human
agacugcuguggccaggag

SEQ ID NO: 1471293 - RNA, 20 nt, Human
agacugcuguggccaggagg

SEQ ID NO: 1471294 - RNA, 21 nt, Human
agacugcuguggccaggaggu

SEQ ID NO: 1471295 - RNA, 19 nt, Human
agacugcuuccaauuuucu

SEQ ID NO: 1471296 - RNA, 18 nt, Human
agacuggaacacuagaca

SEQ ID NO: 1471297 - RNA, 13 nt, Human
agacuggaacuug

SEQ ID NO: 1471298 - RNA, 17 nt, Human
agacuggaacuugaacu

SEQ ID NO: 1471299 - RNA, 18 nt, Human
agacuggaacuugaacug

SEQ ID NO: 1471300 - RNA, 15 nt, Human
agacuggaacacuag

SEQ ID NO: 1471301 - RNA, 23 nt, Human
agacuggaacuugaacugauuca

SEQ ID NO: 1471302 - RNA, 11 nt, Human
agacuggacag

SEQ ID NO: 1471303 - RNA, 13 nt, Human
agacuggacagcu

SEQ ID NO: 1471304 - RNA, 14 nt, Human
agacuggacagcuu

SEQ ID NO: 1471305 - RNA, 15 nt, Human
agacuggacagcuug

SEQ ID NO: 1471306 - RNA, 16 nt, Human
agacuggacagcuugu

SEQ ID NO: 1471307 - RNA, 17 nt, Human
agacuggacagcuugug

SEQ ID NO: 1471308 - RNA, 14 nt, Human
agagaggccuuuug

SEQ ID NO: 1471309 - RNA, 20 nt, Human
agagaggccuuuuggaaugu

SEQ ID NO: 1471310 - RNA, 20 nt, Human
agagccuccuuucuggcuuu

SEQ ID NO: 1471311 - RNA, 17 nt, Human
agaagagaucaggaaga

SEQ ID NO: 1471312 - RNA, 14 nt, Human
agaaggugggagga

SEQ ID NO: 1471313 - RNA, 22 nt, Human
agaaggugggaggaugugaauu

SEQ ID NO: 1471314 - RNA, 18 nt, Human
agaagucacauuccugaa

SEQ ID NO: 1471315 - RNA, 20 nt, Human
agaagucacauuccugaaca

SEQ ID NO: 1471316 - RNA, 21 nt, Human
agaagucacauuccugaacag

SEQ ID NO: 1471317 - RNA, 17 nt, Human
agaaguagaaaucauag

SEQ ID NO: 1471318 - RNA, 22 nt, Human
agaaguaaaagcaaaaaagaaa

SEQ ID NO: 1471319 - RNA, 15 nt, Human
agaaguaaaagcaaa

SEQ ID NO: 1471320 - RNA, 16 nt, Human
agaagguugcucuaga

SEQ ID NO: 1471321 - RNA, 20 nt, Human
agaagguugcucuagauuga

SEQ ID NO: 1471322 - RNA, 18 nt, Human
agaagacugcauuauauu

SEQ ID NO: 1471323 - RNA, 15 nt, Human
agaagacaauugaca

SEQ ID NO: 1471324 - RNA, 22 nt, Human
agaagucacauuccugaacagg

SEQ ID NO: 1471325 - RNA, 17 nt, Human
agaaugagagacacacu

SEQ ID NO: 1471326 - RNA, 22 nt, Human
agaaugagagacacacugaaga

SEQ ID NO: 1471327 - RNA, 17 nt, Human
agaaugauuaugaauua

SEQ ID NO: 1471328 - RNA, 14 nt, Human
agaaugagacaucc

SEQ ID NO: 1471329 - RNA, 13 nt, Human
agaaugauuucau

SEQ ID NO: 1471330 - RNA, 14 nt, Human
agaaugauuucaug

SEQ ID NO: 1471331 - RNA, 20 nt, Human
agaaugcuuaaucagauaga

SEQ ID NO: 1471332 - RNA, 14 nt, Human
agaaugcuuaauca

SEQ ID NO: 1471333 - RNA, 16 nt, Human
agaauggcagaaaagu

SEQ ID NO: 1471334 - RNA, 22 nt, Human
agacagccaacuauggccugug

SEQ ID NO: 1471335 - RNA, 19 nt, Human
agacaaacaccucccagga

SEQ ID NO: 1471336 - RNA, 18 nt, Human
agacaaagguuuuccucu

SEQ ID NO: 1471337 - RNA, 21 nt, Human
agauguagccccucuccugga

SEQ ID NO: 1471338 - RNA, 19 nt, Human
agauucucauaacuugaga

SEQ ID NO: 1471339 - RNA, 17 nt, Human
agauucucccuugcucu

SEQ ID NO: 1471340 - RNA, 20 nt, Human
agauucucauaacuugagac

SEQ ID NO: 1471341 - RNA, 17 nt, Human
agauguaaaagguauua

SEQ ID NO: 1471342 - RNA, 11 nt, Human
agaugguggau

SEQ ID NO: 1471343 - RNA, 13 nt, Human
agaucuggcaugu

SEQ ID NO: 1471344 - RNA, 21 nt, Human
agagugcuguccgguggagau

SEQ ID NO: 1471345 - RNA, 24 nt, Human
agcaaaauuuuuucucuaggaaau

SEQ ID NO: 1471346 - RNA, 21 nt, Human
agcaaaauaauuuuaaacaaa

SEQ ID NO: 1471347 - RNA, 14 nt, Human
agcaaaagaagaag

SEQ ID NO: 1471348 - RNA, 17 nt, Human
agcaaaagaauggcaga

SEQ ID NO: 1471349 - RNA, 21 nt, Human
agcaaaagaauggcagaaaag

SEQ ID NO: 1471350 - RNA, 20 nt, Human
agcaaaucgaaugaaauuaa

SEQ ID NO: 1471351 - RNA, 22 nt, Human
agcaaaucgaaugaaauuaacu

SEQ ID NO: 1471352 - RNA, 21 nt, Human
agcaauuacaacggagucaaa

SEQ ID NO: 1471353 - RNA, 17 nt, Human
agcacaaguuauuuaaa

SEQ ID NO: 1471354 - RNA, 18 nt, Human
agcacaaguuauuuaaau

SEQ ID NO: 1471355 - RNA, 19 nt, Human
agcacaaguuauuuaaauc

SEQ ID NO: 1471356 - RNA, 21 nt, Human
agcacaaguuauuuaaaucug

SEQ ID NO: 1471357 - RNA, 15 nt, Human
agcaauccucccacu

SEQ ID NO: 1471358 - RNA, 16 nt, Human
agcaaucugacccuau

SEQ ID NO: 1471359 - RNA, 22 nt, Human
agcacuugcaaccgucuguuau

SEQ ID NO: 1471360 - RNA, 15 nt, Human
agcacuucuuuuucu

SEQ ID NO: 1471361 - RNA, 16 nt, Human
agcccaaugaaaugaa

SEQ ID NO: 1471362 - RNA, 21 nt, Human
agcccaccauuuggcaucccu

SEQ ID NO: 1471363 - RNA, 22 nt, Human
agcccaccauuuggcaucccug

SEQ ID NO: 1471364 - RNA, 19 nt, Human
agccaaggagucacugaga

SEQ ID NO: 1471365 - RNA, 21 nt, Human
agccaaggagucacugagacc

SEQ ID NO: 1471366 - RNA, 20 nt, Human
agccaaggagucacugagac

SEQ ID NO: 1471367 - RNA, 21 nt, Human
agcuuuuaugugaaacauguu

SEQ ID NO: 1471368 - RNA, 15 nt, Human
agcuuuuaugugaaa

SEQ ID NO: 1471369 - RNA, 14 nt, Human
aggaacaaacaggg

SEQ ID NO: 1471370 - RNA, 13 nt, Human
aggaacaaacagg

SEQ ID NO: 1471371 - RNA, 16 nt, Human
aggaaccgaggcaggg

SEQ ID NO: 1471372 - RNA, 23 nt, Human
aggaaguugacuuauaguacaug

SEQ ID NO: 1471373 - RNA, 22 nt, Human
aggaaguugacuuauaguacau

SEQ ID NO: 1471374 - RNA, 18 nt, Human
aggaaguugacuuauagu

SEQ ID NO: 1471375 - RNA, 19 nt, Human
aggaaggcuuguugugcuu

SEQ ID NO: 1471376 - RNA, 22 nt, Human
aggaaggcuuguugugcuuuua

SEQ ID NO: 1471377 - RNA, 21 nt, Human
aggaaggcuuguugugcuuuu

SEQ ID NO: 1471378 - RNA, 18 nt, Human
agcuucacuguaaaauaa

SEQ ID NO: 1471379 - RNA, 20 nt, Human
aggagacuguuuggaaauug

SEQ ID NO: 1471380 - RNA, 23 nt, Human
agcguuuuuuaaauguauacuau

SEQ ID NO: 1471381 - RNA, 20 nt, Human
agcguuuuuuaaauguauac

SEQ ID NO: 1471382 - RNA, 19 nt, Human
agcguuuuuuaaauguaua

SEQ ID NO: 1471383 - RNA, 18 nt, Human
agcguuuuuuaaauguau

SEQ ID NO: 1471384 - RNA, 12 nt, Human
agcuaaaauaaa

SEQ ID NO: 1471385 - RNA, 19 nt, Human
agcuaaaauaaagaaauag

SEQ ID NO: 1471386 - RNA, 17 nt, Human
agcguuuuuuaaaugua

SEQ ID NO: 1471387 - RNA, 14 nt, Human
agcguuuuuuaaau

SEQ ID NO: 1471388 - RNA, 11 nt, Human
agcguuuuuua

SEQ ID NO: 1471389 - RNA, 12 nt, Human
agcuacaaaugc

SEQ ID NO: 1471390 - RNA, 14 nt, Human
agcucaacucucuu

SEQ ID NO: 1471391 - RNA, 22 nt, Human
agcucaacucucuuauugccuc

SEQ ID NO: 1471392 - RNA, 23 nt, Human
agcucaacucucuuauugccuca

SEQ ID NO: 1471393 - RNA, 19 nt, Human
agcucacugcaaccuccac

SEQ ID NO: 1471394 - RNA, 13 nt, Human
agcucacuucugg

SEQ ID NO: 1471395 - RNA, 23 nt, Human
agcucacuucugggcuucaucug

SEQ ID NO: 1471396 - RNA, 18 nt, Human
agcucagaaaauaucccu

SEQ ID NO: 1471397 - RNA, 19 nt, Human
agcucagaaaauaucccuc

SEQ ID NO: 1471398 - RNA, 21 nt, Human
agcucagaaaauaucccuccu

SEQ ID NO: 1471399 - RNA, 18 nt, Human
agccuggcuucaaauugu

SEQ ID NO: 1471400 - RNA, 17 nt, Human
agccuggcuucaaauug

SEQ ID NO: 1471401 - RNA, 17 nt, Human
agccuggggcugaggcu

SEQ ID NO: 1471402 - RNA, 20 nt, Human
agcugguuuaauguuuuggc

SEQ ID NO: 1471403 - RNA, 16 nt, Human
agcuccuuaaggcucu

SEQ ID NO: 1471404 - RNA, 17 nt, Human
agcuccuuaaggcucuu

SEQ ID NO: 1471405 - RNA, 18 nt, Human
agcuccuuaaggcucuuu

SEQ ID NO: 1471406 - RNA, 21 nt, Human
aggccggcuugccacaccccc

SEQ ID NO: 1471407 - RNA, 20 nt, Human
aggccggcuugccacacccc

SEQ ID NO: 1471408 - RNA, 19 nt, Human
aggccggcuugccacaccc

SEQ ID NO: 1471409 - RNA, 14 nt, Human
aggcuaagcugccg

SEQ ID NO: 1471410 - RNA, 14 nt, Human
agggaccggcggac

SEQ ID NO: 1471411 - RNA, 13 nt, Human
agggacugagaga

SEQ ID NO: 1471412 - RNA, 20 nt, Human
agggacugagagaugcagaa

SEQ ID NO: 1471413 - RNA, 22 nt, Human
aggcuggucucaaacuccugac

SEQ ID NO: 1471414 - RNA, 12 nt, Human
aggcuaauuuuu

SEQ ID NO: 1471415 - RNA, 23 nt, Human
aggcuaauuuuuuuguauuuuag

SEQ ID NO: 1471416 - RNA, 22 nt, Human
aggcuaauuuuuuuguauuuua

SEQ ID NO: 1471417 - RNA, 15 nt, Human
aggcagagaagaaag

SEQ ID NO: 1471418 - RNA, 14 nt, Human
aggcagagaagaaa

SEQ ID NO: 1471419 - RNA, 13 nt, Human
aggcagagaagaa

SEQ ID NO: 1471420 - RNA, 22 nt, Human
aggcagacucuuuaugcuugca

SEQ ID NO: 1471421 - RNA, 20 nt, Human
aggagagggcgcuccucucu

SEQ ID NO: 1471422 - RNA, 21 nt, Human
aggccaugggcacugugggua

SEQ ID NO: 1471423 - RNA, 23 nt, Human
aggccaugggcacuguggguaga

SEQ ID NO: 1471424 - RNA, 13 nt, Human
aggcccugugccc

SEQ ID NO: 1471425 - RNA, 12 nt, Human
agguacuauuau

SEQ ID NO: 1471426 - RNA, 21 nt, Human
agguccucaguguccucaggg

SEQ ID NO: 1471427 - RNA, 15 nt, Human
agguccucagagaau

SEQ ID NO: 1471428 - RNA, 21 nt, Human
aggguuugugacagggcgggg

SEQ ID NO: 1471429 - RNA, 18 nt, Human
aggguuugugacagggcg

SEQ ID NO: 1471430 - RNA, 14 nt, Human
agggccugaugggg

SEQ ID NO: 1471431 - RNA, 19 nt, Human
agggccugaugggguggaa

SEQ ID NO: 1471432 - RNA, 21 nt, Human
agggccugaugggguggaagg

SEQ ID NO: 1471433 - RNA, 20 nt, Human
agggacuguaaacacagaca

SEQ ID NO: 1471434 - RNA, 14 nt, Human
aggggccugcccag

SEQ ID NO: 1471435 - RNA, 13 nt, Human
aggggccugccca

SEQ ID NO: 1471436 - RNA, 13 nt, Human
agggcgcaggccg

SEQ ID NO: 1471437 - RNA, 22 nt, Human
augcacaaauucugucucugga

SEQ ID NO: 1471438 - RNA, 15 nt, Human
augcacaaauucugu

SEQ ID NO: 1471439 - RNA, 23 nt, Human
augcacaaauucugucucuggau

SEQ ID NO: 1471440 - RNA, 16 nt, Human
augauggguguuuuua

SEQ ID NO: 1471441 - RNA, 19 nt, Human
augauggcaauuuuguaac

SEQ ID NO: 1471442 - RNA, 18 nt, Human
augccuuguuucauauuu

SEQ ID NO: 1471443 - RNA, 16 nt, Human
augccuuacucuucuu

SEQ ID NO: 1471444 - RNA, 18 nt, Human
augccuuacucuucuuga

SEQ ID NO: 1471445 - RNA, 17 nt, Human
augcauguccuguaaag

SEQ ID NO: 1471446 - RNA, 21 nt, Human
augcauuauaggaucauuugu

SEQ ID NO: 1471447 - RNA, 18 nt, Human
augcauuauaucaaaucu

SEQ ID NO: 1471448 - RNA, 22 nt, Human
augcauuauaggaucauuuguu

SEQ ID NO: 1471449 - RNA, 17 nt, Human
auggcuuugugauucaa

SEQ ID NO: 1471450 - RNA, 17 nt, Human
auggauaggcacaggaa

SEQ ID NO: 1471451 - RNA, 15 nt, Human
auggagucuugcucu

SEQ ID NO: 1471452 - RNA, 18 nt, Human
auggauaggcacaggaaa

SEQ ID NO: 1471453 - RNA, 22 nt, Human
auggauauaguuuuacuuuuaa

SEQ ID NO: 1471454 - RNA, 16 nt, Human
auggauccuggaggau

SEQ ID NO: 1471455 - RNA, 19 nt, Human
auggaggggcagagccagg

SEQ ID NO: 1471456 - RNA, 15 nt, Human
auggaggggcagagc

SEQ ID NO: 1471457 - RNA, 14 nt, Human
auggaggggcagag

SEQ ID NO: 1471458 - RNA, 21 nt, Human
augcugagauuacagguguga

SEQ ID NO: 1471459 - RNA, 13 nt, Human
augcugauggagc

SEQ ID NO: 1471460 - RNA, 17 nt, Human
auguguaagacaaaaag

SEQ ID NO: 1471461 - RNA, 19 nt, Human
auguguaagacaaaaagcu

SEQ ID NO: 1471462 - RNA, 20 nt, Human
auguguaugcacaguaaaaa

SEQ ID NO: 1471463 - RNA, 19 nt, Human
auguguaugcacaguaaaa

SEQ ID NO: 1471464 - RNA, 15 nt, Human
auguguaugcacagu

SEQ ID NO: 1471465 - RNA, 13 nt, Human
auguguauaaaaa

SEQ ID NO: 1471466 - RNA, 23 nt, Human
auguguauaaaaauaaaaaagau

SEQ ID NO: 1471467 - RNA, 18 nt, Human
augugaaaucauucauuu

SEQ ID NO: 1471468 - RNA, 17 nt, Human
augugaaaucauucauu

SEQ ID NO: 1471469 - RNA, 20 nt, Human
augugaaauuuacaucauuu

SEQ ID NO: 1471470 - RNA, 23 nt, Human
augugaaauuuacaucauuucuu

SEQ ID NO: 1471471 - RNA, 15 nt, Human
augugaaacauguuu

SEQ ID NO: 1471472 - RNA, 14 nt, Human
augugaaacauguu

SEQ ID NO: 1471473 - RNA, 14 nt, Human
auguaaauuuguac

SEQ ID NO: 1471474 - RNA, 15 nt, Human
auguaaauuuguacu

SEQ ID NO: 1471475 - RNA, 17 nt, Human
auguaaauuuguacuau

SEQ ID NO: 1471476 - RNA, 21 nt, Human
auguaaauuuguacuauuuaa

SEQ ID NO: 1471477 - RNA, 19 nt, Human
auguaaauuuguacuauuu

SEQ ID NO: 1471478 - RNA, 14 nt, Human
auguaacuagaauu

SEQ ID NO: 1471479 - RNA, 14 nt, Human
auguaacuuuugua

SEQ ID NO: 1471480 - RNA, 13 nt, Human
auguaaauuugua

SEQ ID NO: 1471481 - RNA, 21 nt, Human
augucaaucagccuaguugau

SEQ ID NO: 1471482 - RNA, 22 nt, Human
auggguuagggaaaacauucca

SEQ ID NO: 1471483 - RNA, 14 nt, Human
augguaauuguugc

SEQ ID NO: 1471484 - RNA, 16 nt, Human
augguaccagaugcag

SEQ ID NO: 1471485 - RNA, 19 nt, Human
auccucaguuuuugugaaa

SEQ ID NO: 1471486 - RNA, 21 nt, Human
auccccacgccacagcccuuu

SEQ ID NO: 1471487 - RNA, 20 nt, Human
auccccacgccacagcccuu

SEQ ID NO: 1471488 - RNA, 18 nt, Human
auccccacgccacagccc

SEQ ID NO: 1471489 - RNA, 17 nt, Human
auccccacgccacagcc

SEQ ID NO: 1471490 - RNA, 16 nt, Human
auccccacgccacagc

SEQ ID NO: 1471491 - RNA, 15 nt, Human
auccccacgccacag

SEQ ID NO: 1471492 - RNA, 19 nt, Human
auccagagucccugccugg

SEQ ID NO: 1471493 - RNA, 20 nt, Human
auccagagucccugccugga

SEQ ID NO: 1471494 - RNA, 21 nt, Human
auccagagucccugccuggac

SEQ ID NO: 1471495 - RNA, 17 nt, Human
auccaccugccuuggcu

SEQ ID NO: 1471496 - RNA, 22 nt, Human
auccuucaucuggauuccagag

SEQ ID NO: 1471497 - RNA, 16 nt, Human
auccuugagucaaaaa

SEQ ID NO: 1471498 - RNA, 13 nt, Human
auccuuacaaguu

SEQ ID NO: 1471499 - RNA, 18 nt, Human
auccuuagaucuggcaug

SEQ ID NO: 1471500 - RNA, 14 nt, Human
auccuuagaucugg

SEQ ID NO: 1471501 - RNA, 14 nt, Human
aucaaauauauuca

SEQ ID NO: 1471502 - RNA, 22 nt, Human
aucaaacaccaacauaaaaaug

SEQ ID NO: 1471503 - RNA, 23 nt, Human
aucaaacaccaacauaaaaauga

SEQ ID NO: 1471504 - RNA, 16 nt, Human
aucaccgacugaaaau

SEQ ID NO: 1471505 - RNA, 23 nt, Human
aucaccacaaacuguaauacaau

SEQ ID NO: 1471506 - RNA, 13 nt, Human
aucaccacaguuu

SEQ ID NO: 1471507 - RNA, 22 nt, Human
aucaaauauauucagccuggcu

SEQ ID NO: 1471508 - RNA, 19 nt, Human
aucaggaagagaaggagca

SEQ ID NO: 1471509 - RNA, 17 nt, Human
aucaggaagagaaggag

SEQ ID NO: 1471510 - RNA, 14 nt, Human
aucaggaagagaag

SEQ ID NO: 1471511 - RNA, 18 nt, Human
aucaugaagauauuuuuc

SEQ ID NO: 1471512 - RNA, 13 nt, Human
aucagcuuauugu

SEQ ID NO: 1471513 - RNA, 12 nt, Human
aucaugugaaau

SEQ ID NO: 1471514 - RNA, 14 nt, Human
aucaugugaaauca

SEQ ID NO: 1471515 - RNA, 17 nt, Human
aucaugaauuaguuuua

SEQ ID NO: 1471516 - RNA, 21 nt, Human
aucaugaauuaguuuuauaug

SEQ ID NO: 1471517 - RNA, 16 nt, Human
aucuauagaaagcuau

SEQ ID NO: 1471518 - RNA, 17 nt, Human
aucuauagaaagcuaua

SEQ ID NO: 1471519 - RNA, 15 nt, Human
aucuauauuuaacaa

SEQ ID NO: 1471520 - RNA, 14 nt, Human
aucuauauuuuaca

SEQ ID NO: 1471521 - RNA, 20 nt, Human
aucuccgucaacucauauuu

SEQ ID NO: 1471522 - RNA, 12 nt, Human
aucuccugaaaa

SEQ ID NO: 1471523 - RNA, 15 nt, Human
aucuggauuccagag

SEQ ID NO: 1471524 - RNA, 16 nt, Human
aucuggcaacaucuuu

SEQ ID NO: 1471525 - RNA, 13 nt, Human
aucuuauuuagga

SEQ ID NO: 1471526 - RNA, 13 nt, Human
aucuuauucauuu

SEQ ID NO: 1471527 - RNA, 18 nt, Human
aucuuauucauuuucucu

SEQ ID NO: 1471528 - RNA, 20 nt, Human
aucuuauucauuuucucuaa

SEQ ID NO: 1471529 - RNA, 18 nt, Human
aucugggggccucuucug

SEQ ID NO: 1471530 - RNA, 13 nt, Human
augaccaguaaag

SEQ ID NO: 1471531 - RNA, 15 nt, Human
augaaguuguaggua

SEQ ID NO: 1471532 - RNA, 20 nt, Human
augaaguccaagcauuuaga

SEQ ID NO: 1471533 - RNA, 23 nt, Human
augaaguccaagcauuuagaugu

SEQ ID NO: 1471534 - RNA, 15 nt, Human
augacugccaagacu

SEQ ID NO: 1471535 - RNA, 16 nt, Human
augacugccaagacug

SEQ ID NO: 1471536 - RNA, 21 nt, Human
augacugccaagacugcugug

SEQ ID NO: 1471537 - RNA, 19 nt, Human
augacuguuuuucggacag

SEQ ID NO: 1471538 - RNA, 15 nt, Human
augagggaaaagaaa

SEQ ID NO: 1471539 - RNA, 22 nt, Human
augacuguuuuucggacaguuu

SEQ ID NO: 1471540 - RNA, 21 nt, Human
augacuguuuuucggacaguu

SEQ ID NO: 1471541 - RNA, 17 nt, Human
agugacccugcucucac

SEQ ID NO: 1471542 - RNA, 14 nt, Human
agugacccugcucu

SEQ ID NO: 1471543 - RNA, 14 nt, Human
agugaauuugccug

SEQ ID NO: 1471544 - RNA, 17 nt, Human
agucuguuuacugcaag

SEQ ID NO: 1471545 - RNA, 16 nt, Human
agucugagagaggcca

SEQ ID NO: 1471546 - RNA, 16 nt, Human
agucugaauuuuuaaa

SEQ ID NO: 1471547 - RNA, 23 nt, Human
agucugagagaggccauucuuuc

SEQ ID NO: 1471548 - RNA, 21 nt, Human
agucugugagauucauucaug

SEQ ID NO: 1471549 - RNA, 15 nt, Human
agugacuaauggcau

SEQ ID NO: 1471550 - RNA, 20 nt, Human
agucauguaagcugaaaaua

SEQ ID NO: 1471551 - RNA, 17 nt, Human
aguauuuuguuucagug

SEQ ID NO: 1471552 - RNA, 14 nt, Human
aguauuuuguuuca

SEQ ID NO: 1471553 - RNA, 14 nt, Human
aguauccacuuugc

SEQ ID NO: 1471554 - RNA, 15 nt, Human
agucaaaaauuaaac

SEQ ID NO: 1471555 - RNA, 24 nt, Human
agucaaucaagucuguuuacugca

SEQ ID NO: 1471556 - RNA, 12 nt, Human
agucaaucaagu

SEQ ID NO: 1471557 - RNA, 18 nt, Human
agucaaucaagucuguuu

SEQ ID NO: 1471558 - RNA, 23 nt, Human
agucaauguuuucaguucucuug

SEQ ID NO: 1471559 - RNA, 20 nt, Human
aguaaaucacgcuuuuugaa

SEQ ID NO: 1471560 - RNA, 19 nt, Human
aguaaaucacgcuuuuuga

SEQ ID NO: 1471561 - RNA, 12 nt, Human
aguaacaaaaau

SEQ ID NO: 1471562 - RNA, 15 nt, Human
aguaacaaaaauaaa

SEQ ID NO: 1471563 - RNA, 13 nt, Human
aguaacaaaaaua

SEQ ID NO: 1471564 - RNA, 23 nt, Human
aguacuaacuccuaggaaaauac

SEQ ID NO: 1471565 - RNA, 20 nt, Human
aguacuggcugauggaguaa

SEQ ID NO: 1471566 - RNA, 20 nt, Human
aguacugggauuacaggcgu

SEQ ID NO: 1471567 - RNA, 16 nt, Human
aguacugggauuacag

SEQ ID NO: 1471568 - RNA, 20 nt, Human
agugcuaauuuugaaaaacu

SEQ ID NO: 1471569 - RNA, 18 nt, Human
agugcuaauuuugaaaaa

SEQ ID NO: 1471570 - RNA, 15 nt, Human
agugcuaauuuugaa

SEQ ID NO: 1471571 - RNA, 17 nt, Human
agugaucugcccgccuc

SEQ ID NO: 1471572 - RNA, 16 nt, Human
agugauccuuacaagu

SEQ ID NO: 1471573 - RNA, 22 nt, Human
agugggaggguaccagcagaaa

SEQ ID NO: 1471574 - RNA, 22 nt, Human
aguguccuuggcaggcugauuu

SEQ ID NO: 1471575 - RNA, 16 nt, Human
agugucacucaaggcg

SEQ ID NO: 1471576 - RNA, 14 nt, Human
agugucaggaggaa

SEQ ID NO: 1471577 - RNA, 19 nt, Human
agugggaaaaauguaggag

SEQ ID NO: 1471578 - RNA, 14 nt, Human
agugggaaaaaugu

SEQ ID NO: 1471579 - RNA, 17 nt, Human
agugggaaaaauguagg

SEQ ID NO: 1471580 - RNA, 18 nt, Human
agugggaaaaauguagga

SEQ ID NO: 1471581 - RNA, 21 nt, Human
aguugacuuauaguacaugau

SEQ ID NO: 1471582 - RNA, 18 nt, Human
aguugacuuauaguacau

SEQ ID NO: 1471583 - RNA, 17 nt, Human
aguugacuuauaguaca

SEQ ID NO: 1471584 - RNA, 14 nt, Human
aguugagacaagaa

SEQ ID NO: 1471585 - RNA, 17 nt, Human
aguugagacaagaaaau

SEQ ID NO: 1471586 - RNA, 15 nt, Human
aguugacuuauagua

SEQ ID NO: 1471587 - RNA, 23 nt, Human
aguugaauuuuuuuuaacauucc

SEQ ID NO: 1471588 - RNA, 22 nt, Human
aguugaauuuuuuuuaacauuc

SEQ ID NO: 1471589 - RNA, 13 nt, Human
aguugaauuuuuu

SEQ ID NO: 1471590 - RNA, 18 nt, Human
aguugaauuuuuuuuaac

SEQ ID NO: 1471591 - RNA, 21 nt, Human
aguugaauuuuuuuuaacauu

SEQ ID NO: 1471592 - RNA, 17 nt, Human
aguugauaaagauuuuu

SEQ ID NO: 1471593 - RNA, 21 nt, Human
aguugauaaagauuuuuuaau

SEQ ID NO: 1471594 - RNA, 23 nt, Human
aguugauaaagauuuuuuaauaa

SEQ ID NO: 1471595 - RNA, 14 nt, Human
aguugugcuugagc

SEQ ID NO: 1471596 - RNA, 20 nt, Human
auaguacaugauaaaugaua

SEQ ID NO: 1471597 - RNA, 23 nt, Human
auaguagaacgcuaucugggaag

SEQ ID NO: 1471598 - RNA, 14 nt, Human
auauaaucauuauu

SEQ ID NO: 1471599 - RNA, 24 nt, Human
auagguuuggacaaaauggaauac

SEQ ID NO: 1471600 - RNA, 19 nt, Human
auaguaaaucacgcuuuuu

SEQ ID NO: 1471601 - RNA, 13 nt, Human
auaguaaaucacg

SEQ ID NO: 1471602 - RNA, 15 nt, Human
auauacagcucagaa

SEQ ID NO: 1471603 - RNA, 12 nt, Human
auagaaagcuau

SEQ ID NO: 1471604 - RNA, 19 nt, Human
auagaaaugccaagcacuu

SEQ ID NO: 1471605 - RNA, 12 nt, Human
auagaaaugcca

SEQ ID NO: 1471606 - RNA, 16 nt, Human
auagaaaugccaagca

SEQ ID NO: 1471607 - RNA, 17 nt, Human
auagaaaugccaagcac

SEQ ID NO: 1471608 - RNA, 17 nt, Human
auagcacaggcuaauuu

SEQ ID NO: 1471609 - RNA, 13 nt, Human
auagcaugcaucu

SEQ ID NO: 1471610 - RNA, 14 nt, Human
auagcacaggcuaa

SEQ ID NO: 1471611 - RNA, 18 nt, Human
auauauuuuuuucugaaa

SEQ ID NO: 1471612 - RNA, 22 nt, Human
auauuauuuuauguugcauaga

SEQ ID NO: 1471613 - RNA, 15 nt, Human
auauuauuuuauguu

SEQ ID NO: 1471614 - RNA, 14 nt, Human
auauuauguuaaaa

SEQ ID NO: 1471615 - RNA, 16 nt, Human
auauuauguuaaaacu

SEQ ID NO: 1471616 - RNA, 20 nt, Human
auauucaauaaagcugcuga

SEQ ID NO: 1471617 - RNA, 15 nt, Human
auauucaauaaagcu

SEQ ID NO: 1471618 - RNA, 13 nt, Human
auauucaauaaag

SEQ ID NO: 1471619 - RNA, 13 nt, Human
auauuauguuaaa

SEQ ID NO: 1471620 - RNA, 13 nt, Human
auacagaaaaguu

SEQ ID NO: 1471621 - RNA, 22 nt, Human
auacacuuauuggaacucugcu

SEQ ID NO: 1471622 - RNA, 18 nt, Human
auaauguuucaaacauau

SEQ ID NO: 1471623 - RNA, 13 nt, Human
auaauggucagag

SEQ ID NO: 1471624 - RNA, 18 nt, Human
auaagguaaaaugccaug

SEQ ID NO: 1471625 - RNA, 16 nt, Human
auaagguaaaaugcca

SEQ ID NO: 1471626 - RNA, 13 nt, Human
auaauguuucaaa

SEQ ID NO: 1471627 - RNA, 19 nt, Human
auaaaaaggacaucagcaa

SEQ ID NO: 1471628 - RNA, 14 nt, Human
auaaaaaggacauc

SEQ ID NO: 1471629 - RNA, 11 nt, Human
auaaaaaggac

SEQ ID NO: 1471630 - RNA, 20 nt, Human
aguuuggauauguaaaacau

SEQ ID NO: 1471631 - RNA, 16 nt, Human
aguuuggauauguaaa

SEQ ID NO: 1471632 - RNA, 17 nt, Human
aguuuggauauguaaaa

SEQ ID NO: 1471633 - RNA, 22 nt, Human
aguuuggauauguaaaacauuu

SEQ ID NO: 1471634 - RNA, 14 nt, Human
aguuuggauaugua

SEQ ID NO: 1471635 - RNA, 12 nt, Human
aguugaauuuuu

SEQ ID NO: 1471636 - RNA, 11 nt, Human
auaaagcaauu

SEQ ID NO: 1471637 - RNA, 18 nt, Human
auaaagauuuuuuaauaa

SEQ ID NO: 1471638 - RNA, 13 nt, Human
auaaagauuuuuu

SEQ ID NO: 1471639 - RNA, 16 nt, Human
auaaagauuuuuuaau

SEQ ID NO: 1471640 - RNA, 17 nt, Human
auaaagauuuuuuaaua

SEQ ID NO: 1471641 - RNA, 21 nt, Human
auaaagauuuuuuaauaauuu

SEQ ID NO: 1471642 - RNA, 18 nt, Human
auaaauuucuauuuuuau

SEQ ID NO: 1471643 - RNA, 14 nt, Human
auaacaaugaaagu

SEQ ID NO: 1471644 - RNA, 15 nt, Human
auaacaaugcuguau

SEQ ID NO: 1471645 - RNA, 17 nt, Human
auaacaaugcuguauuu

SEQ ID NO: 1471646 - RNA, 19 nt, Human
auaacaaugcuguauuuua

SEQ ID NO: 1471647 - RNA, 20 nt, Human
auaacaaugcuguauuuuaa

SEQ ID NO: 1471648 - RNA, 21 nt, Human
auaacaaugcuguauuuuaaa

SEQ ID NO: 1471649 - RNA, 16 nt, Human
auaacaaugugcucuc

SEQ ID NO: 1471650 - RNA, 20 nt, Human
caaggaaaaaauaacaauga

SEQ ID NO: 1471651 - RNA, 18 nt, Human
caaggaaaaaauaacaau

SEQ ID NO: 1471652 - RNA, 14 nt, Human
caagcugcuguggc

SEQ ID NO: 1471653 - RNA, 21 nt, Human
caagcgauucucuugccucaa

SEQ ID NO: 1471654 - RNA, 15 nt, Human
caagcgauucucuug

SEQ ID NO: 1471655 - RNA, 14 nt, Human
caagcugcaucuag

SEQ ID NO: 1471656 - RNA, 14 nt, Human
caagccuugauugg

SEQ ID NO: 1471657 - RNA, 17 nt, Human
caauaaauagacacgca

SEQ ID NO: 1471658 - RNA, 16 nt, Human
caauaaauagaccauu

SEQ ID NO: 1471659 - RNA, 13 nt, Human
caauaaauagaca

SEQ ID NO: 1471660 - RNA, 14 nt, Human
caauaaagugaccc

SEQ ID NO: 1471661 - RNA, 21 nt, Human
caauaaagugacccugcucuc

SEQ ID NO: 1471662 - RNA, 15 nt, Human
caaggcuuucucuac

SEQ ID NO: 1471663 - RNA, 15 nt, Human
caagggucaggccuu

SEQ ID NO: 1471664 - RNA, 18 nt, Human
caagggucaggccuuuga

SEQ ID NO: 1471665 - RNA, 16 nt, Human
caagggucaggccuuu

SEQ ID NO: 1471666 - RNA, 12 nt, Human
caauaagcaaaa

SEQ ID NO: 1471667 - RNA, 23 nt, Human
caauaacguuuaagccaaaacaa

SEQ ID NO: 1471668 - RNA, 15 nt, Human
caauaacguuuaagc

SEQ ID NO: 1471669 - RNA, 19 nt, Human
caauagucaaauuguguga

SEQ ID NO: 1471670 - RNA, 13 nt, Human
cacaauaagcaaa

SEQ ID NO: 1471671 - RNA, 15 nt, Human
cacaauaauuuucua

SEQ ID NO: 1471672 - RNA, 14 nt, Human
cacaauagaauuau

SEQ ID NO: 1471673 - RNA, 15 nt, Human
cacaauagaauuaua

SEQ ID NO: 1471674 - RNA, 22 nt, Human
cacaaugcagugccuuucuucu

SEQ ID NO: 1471675 - RNA, 23 nt, Human
cacacaaaagggaacccagcucu

SEQ ID NO: 1471676 - RNA, 16 nt, Human
cacaaguuauuuaaau

SEQ ID NO: 1471677 - RNA, 18 nt, Human
cacaauaaaaauguuuaa

SEQ ID NO: 1471678 - RNA, 12 nt, Human
cacacacguuau

SEQ ID NO: 1471679 - RNA, 17 nt, Human
caauuacugguccaaaa

SEQ ID NO: 1471680 - RNA, 21 nt, Human
caauuagcaauugacugucac

SEQ ID NO: 1471681 - RNA, 21 nt, Human
caauuuuuuaucaugcauguc

SEQ ID NO: 1471682 - RNA, 13 nt, Human
caaugugcucucg

SEQ ID NO: 1471683 - RNA, 14 nt, Human
cacagcugccucuu

SEQ ID NO: 1471684 - RNA, 14 nt, Human
cacagcccuuuugu

SEQ ID NO: 1471685 - RNA, 13 nt, Human
cacacugaagaag

SEQ ID NO: 1471686 - RNA, 14 nt, Human
cacacugaagaagc

SEQ ID NO: 1471687 - RNA, 20 nt, Human
cacacucaugcauuguccuc

SEQ ID NO: 1471688 - RNA, 23 nt, Human
cacagagguagucucacugcuug

SEQ ID NO: 1471689 - RNA, 22 nt, Human
cacagauaacugaaaauuauuu

SEQ ID NO: 1471690 - RNA, 19 nt, Human
cacagauaacugaaaauua

SEQ ID NO: 1471691 - RNA, 19 nt, Human
cacacucaugcauuguccu

SEQ ID NO: 1471692 - RNA, 23 nt, Human
caacauagugggacccugucucu

SEQ ID NO: 1471693 - RNA, 21 nt, Human
caacauaguauucaugacuau

SEQ ID NO: 1471694 - RNA, 17 nt, Human
caaaucaaucuguaaaa

SEQ ID NO: 1471695 - RNA, 20 nt, Human
caaauauuuauuuucuuucu

SEQ ID NO: 1471696 - RNA, 23 nt, Human
caaauauauucagccuggcuuca

SEQ ID NO: 1471697 - RNA, 20 nt, Human
caaaucaaucuguaaaacua

SEQ ID NO: 1471698 - RNA, 16 nt, Human
caaaucaauuacuggu

SEQ ID NO: 1471699 - RNA, 15 nt, Human
caaaguguuuucucu

SEQ ID NO: 1471700 - RNA, 18 nt, Human
caaaguguuuucucugaa

SEQ ID NO: 1471701 - RNA, 14 nt, Human
caaagaaccaaaga

SEQ ID NO: 1471702 - RNA, 17 nt, Human
caaagaaccaaagaaga

SEQ ID NO: 1471703 - RNA, 18 nt, Human
caaagaaccuucucuaug

SEQ ID NO: 1471704 - RNA, 19 nt, Human
caaagaaccaaagaagaaa

SEQ ID NO: 1471705 - RNA, 18 nt, Human
caaagagaaugcccuucu

SEQ ID NO: 1471706 - RNA, 23 nt, Human
caaagagaaugcccuucuccuua

SEQ ID NO: 1471707 - RNA, 14 nt, Human
caacuugcuuauca

SEQ ID NO: 1471708 - RNA, 16 nt, Human
caacuuggcugcagga

SEQ ID NO: 1471709 - RNA, 23 nt, Human
caacguggcuuuuuuuuuuuccc

SEQ ID NO: 1471710 - RNA, 22 nt, Human
caagagcuacguauuuaauagc

SEQ ID NO: 1471711 - RNA, 19 nt, Human
caagagcuacauaauuuag

SEQ ID NO: 1471712 - RNA, 14 nt, Human
caagaggagaucca

SEQ ID NO: 1471713 - RNA, 13 nt, Human
caagagccacagu

SEQ ID NO: 1471714 - RNA, 17 nt, Human
caagaagcauuuuguaa

SEQ ID NO: 1471715 - RNA, 23 nt, Human
caagaagcauuuuguaaguugaa

SEQ ID NO: 1471716 - RNA, 12 nt, Human
caagagacugag

SEQ ID NO: 1471717 - RNA, 15 nt, Human
caagagacugaguca

SEQ ID NO: 1471718 - RNA, 13 nt, Human
caagagacugagu

SEQ ID NO: 1471719 - RNA, 16 nt, Human
caaaaucaauuaaaau

SEQ ID NO: 1471720 - RNA, 17 nt, Human
caaaauauuuguacaua

SEQ ID NO: 1471721 - RNA, 16 nt, Human
caaaauauuuguacau

SEQ ID NO: 1471722 - RNA, 20 nt, Human
caaaauccuugcuuaugaca

SEQ ID NO: 1471723 - RNA, 16 nt, Human
caaaauccuugcuuau

SEQ ID NO: 1471724 - RNA, 18 nt, Human
caaaaguuucauccuuuu

SEQ ID NO: 1471725 - RNA, 15 nt, Human
caaaacugcauuuca

SEQ ID NO: 1471726 - RNA, 18 nt, Human
caaaaguuacauguuugc

SEQ ID NO: 1471727 - RNA, 19 nt, Human
caaaaguuacauguuugca

SEQ ID NO: 1471728 - RNA, 17 nt, Human
caaacugacucuuaaga

SEQ ID NO: 1471729 - RNA, 21 nt, Human
caaacugacucuuaagaagac

SEQ ID NO: 1471730 - RNA, 16 nt, Human
caaacugacucuuaag

SEQ ID NO: 1471731 - RNA, 18 nt, Human
caaacuccugaccucagg

SEQ ID NO: 1471732 - RNA, 19 nt, Human
caaacuccugaccucaggc

SEQ ID NO: 1471733 - RNA, 19 nt, Human
caaaccugaccccugcuca

SEQ ID NO: 1471734 - RNA, 20 nt, Human
caaaccugaccccugcucag

SEQ ID NO: 1471735 - RNA, 14 nt, Human
caaacaccucccag

SEQ ID NO: 1471736 - RNA, 15 nt, Human
caaacaccucccagg

SEQ ID NO: 1471737 - RNA, 18 nt, Human
caaacaccaacauaaaaa

SEQ ID NO: 1471738 - RNA, 17 nt, Human
caaacugaggaauuuca

SEQ ID NO: 1471739 - RNA, 22 nt, Human
cacagcugccucuucccucuuc

SEQ ID NO: 1471740 - RNA, 15 nt, Human
cacagcugccucuuc

SEQ ID NO: 1471741 - RNA, 13 nt, Human
cacaggaaaccag

SEQ ID NO: 1471742 - RNA, 19 nt, Human
cacaggaaccacaagacug

SEQ ID NO: 1471743 - RNA, 22 nt, Human
cacaguggaaagacagcuucuc

SEQ ID NO: 1471744 - RNA, 12 nt, Human
uuuuuuguuauu

SEQ ID NO: 1471745 - RNA, 21 nt, Human
ugugugaaagguacuucaaau

SEQ ID NO: 1471746 - RNA, 22 nt, Human
ugugugaaagguacuucaaauc

SEQ ID NO: 1471747 - RNA, 21 nt, Human
uguguggagagggaaugugaa

SEQ ID NO: 1471748 - RNA, 20 nt, Human
uguguggcuuucagagccuc

SEQ ID NO: 1471749 - RNA, 22 nt, Human
uguguggagagggaaugugaaa

SEQ ID NO: 1471750 - RNA, 18 nt, Human
uguguuuuucauaaagca

SEQ ID NO: 1471751 - RNA, 15 nt, Human
uguguuuuucauaaa

SEQ ID NO: 1471752 - RNA, 15 nt, Human
uguguuuuuaacaug

SEQ ID NO: 1471753 - RNA, 13 nt, Human
uguguuuugcaag

SEQ ID NO: 1471754 - RNA, 19 nt, Human
uguguuuugcaagccagau

SEQ ID NO: 1471755 - RNA, 13 nt, Human
uguguuugaagca

SEQ ID NO: 1471756 - RNA, 17 nt, Human
uguguggcuuucagagc

SEQ ID NO: 1471757 - RNA, 17 nt, Human
uguucauaaauaaaguu

SEQ ID NO: 1471758 - RNA, 14 nt, Human
uguuagugcaaauu

SEQ ID NO: 1471759 - RNA, 16 nt, Human
uguucacuuuuccucc

SEQ ID NO: 1471760 - RNA, 19 nt, Human
uguucacuuuuccucccuc

SEQ ID NO: 1471761 - RNA, 18 nt, Human
uguucagaagguugcucu

SEQ ID NO: 1471762 - RNA, 22 nt, Human
uguucagaagguugcucuagau

SEQ ID NO: 1471763 - RNA, 21 nt, Human
uguuacccaguaacucaucug

SEQ ID NO: 1471764 - RNA, 16 nt, Human
uguuaccuacuuugac

SEQ ID NO: 1471765 - RNA, 19 nt, Human
uguuaaaaaaauaagaaga

SEQ ID NO: 1471766 - RNA, 20 nt, Human
uguuaaaaaaauaagaagaa

SEQ ID NO: 1471767 - RNA, 22 nt, Human
uguuaaaaaaauaagaagaaug

SEQ ID NO: 1471768 - RNA, 23 nt, Human
uguuaaaaaaauaagaagaaugc

SEQ ID NO: 1471769 - RNA, 19 nt, Human
uguuagccucaauuucuga

SEQ ID NO: 1471770 - RNA, 21 nt, Human
uguuagcaugcuggugagcca

SEQ ID NO: 1471771 - RNA, 20 nt, Human
uguugacaugggacauuugc

SEQ ID NO: 1471772 - RNA, 20 nt, Human
uguucuuuuaaaugauugaa

SEQ ID NO: 1471773 - RNA, 20 nt, Human
uguucuuuggaaauacacag

SEQ ID NO: 1471774 - RNA, 13 nt, Human
uguucaugaaaga

SEQ ID NO: 1471775 - RNA, 14 nt, Human
uguucaugaaagau

SEQ ID NO: 1471776 - RNA, 20 nt, Human
uguucaugaaagauucaaug

SEQ ID NO: 1471777 - RNA, 12 nt, Human
uguuuaagagac

SEQ ID NO: 1471778 - RNA, 13 nt, Human
uguuuaaaguuca

SEQ ID NO: 1471779 - RNA, 14 nt, Human
uguuuaaaccuuuu

SEQ ID NO: 1471780 - RNA, 12 nt, Human
uguuuaaaguuc

SEQ ID NO: 1471781 - RNA, 23 nt, Human
uguuuaaaguucaacauguuauu

SEQ ID NO: 1471782 - RNA, 14 nt, Human
uguuggcuagccuc

SEQ ID NO: 1471783 - RNA, 14 nt, Human
uguuggagaagaac

SEQ ID NO: 1471784 - RNA, 12 nt, Human
uguuggaaugaa

SEQ ID NO: 1471785 - RNA, 16 nt, Human
uguuggagaagaacug

SEQ ID NO: 1471786 - RNA, 17 nt, Human
uguuggagaagaacuga

SEQ ID NO: 1471787 - RNA, 19 nt, Human
uguuggagaagaacugaaa

SEQ ID NO: 1471788 - RNA, 20 nt, Human
uguuggagaagaacugaaau

SEQ ID NO: 1471789 - RNA, 11 nt, Human
uguuucuguaa

SEQ ID NO: 1471790 - RNA, 16 nt, Human
uguuucuguaagaaac

SEQ ID NO: 1471791 - RNA, 12 nt, Human
uguuucugacuc

SEQ ID NO: 1471792 - RNA, 19 nt, Human
uguuucugacucugagcua

SEQ ID NO: 1471793 - RNA, 15 nt, Human
uguuuacugcaaggu

SEQ ID NO: 1471794 - RNA, 20 nt, Human
uguuuuuaaugcuuugauau

SEQ ID NO: 1471795 - RNA, 19 nt, Human
uguuuuuaacaugucaauc

SEQ ID NO: 1471796 - RNA, 18 nt, Human
uuaaaucuguuuuucuaa

SEQ ID NO: 1471797 - RNA, 12 nt, Human
uuaaaacuccug

SEQ ID NO: 1471798 - RNA, 15 nt, Human
uuaaaacuuugaagu

SEQ ID NO: 1471799 - RNA, 15 nt, Human
uuaauagcaaagaau

SEQ ID NO: 1471800 - RNA, 16 nt, Human
uuaauagcaaagaauu

SEQ ID NO: 1471801 - RNA, 18 nt, Human
uuaauagcaaagaauuga

SEQ ID NO: 1471802 - RNA, 20 nt, Human
uuaauagcaaagaauugacu

SEQ ID NO: 1471803 - RNA, 16 nt, Human
uuaauaauguuucaaa

SEQ ID NO: 1471804 - RNA, 15 nt, Human
uuaauaccacagcuu

SEQ ID NO: 1471805 - RNA, 16 nt, Human
uuaagccaaaacaaug

SEQ ID NO: 1471806 - RNA, 12 nt, Human
uuaagaguaaaa

SEQ ID NO: 1471807 - RNA, 20 nt, Human
uuaaauguuaugacuaugua

SEQ ID NO: 1471808 - RNA, 16 nt, Human
uuaaauguuaugacua

SEQ ID NO: 1471809 - RNA, 19 nt, Human
uuaaauguauacuauagua

SEQ ID NO: 1471810 - RNA, 14 nt, Human
uuaaauguauacua

SEQ ID NO: 1471811 - RNA, 12 nt, Human
uuaaauguauac

SEQ ID NO: 1471812 - RNA, 23 nt, Human
uuacaacggagucaaaaauuaaa

SEQ ID NO: 1471813 - RNA, 19 nt, Human
uuacaacggagucaaaaau

SEQ ID NO: 1471814 - RNA, 16 nt, Human
uuacaacggagucaaa

SEQ ID NO: 1471815 - RNA, 16 nt, Human
uuaauuaccaaccugu

SEQ ID NO: 1471816 - RNA, 19 nt, Human
uuaauuagccagugaaaaa

SEQ ID NO: 1471817 - RNA, 13 nt, Human
uuacauucugaau

SEQ ID NO: 1471818 - RNA, 22 nt, Human
uuacacuacacacuguguacug

SEQ ID NO: 1471819 - RNA, 19 nt, Human
uguggaacauaaaaaggac

SEQ ID NO: 1471820 - RNA, 21 nt, Human
uguggaacauaaaaaggacau

SEQ ID NO: 1471821 - RNA, 15 nt, Human
uguggccuaaccugc

SEQ ID NO: 1471822 - RNA, 23 nt, Human
ugugggagaccggccugccagga

SEQ ID NO: 1471823 - RNA, 17 nt, Human
ugugggagaccggccug

SEQ ID NO: 1471824 - RNA, 14 nt, Human
uguguagcuuugcu

SEQ ID NO: 1471825 - RNA, 17 nt, Human
uguguagcuuugcucuu

SEQ ID NO: 1471826 - RNA, 15 nt, Human
uguguacauaacuga

SEQ ID NO: 1471827 - RNA, 17 nt, Human
uguguacauaacugaaa

SEQ ID NO: 1471828 - RNA, 13 nt, Human
ugugggauuaugg

SEQ ID NO: 1471829 - RNA, 16 nt, Human
ugugggauuauggguc

SEQ ID NO: 1471830 - RNA, 18 nt, Human
ugugggauuaugggucac

SEQ ID NO: 1471831 - RNA, 23 nt, Human
ugugggauuaugggucacaggaa

SEQ ID NO: 1471832 - RNA, 16 nt, Human
uguggaacauaaaaag

SEQ ID NO: 1471833 - RNA, 19 nt, Human
ugugcuugagccaggaggc

SEQ ID NO: 1471834 - RNA, 16 nt, Human
ugugcucaggagcccu

SEQ ID NO: 1471835 - RNA, 15 nt, Human
ugugcucaggagccc

SEQ ID NO: 1471836 - RNA, 17 nt, Human
ugugcucaggagcccug

SEQ ID NO: 1471837 - RNA, 20 nt, Human
ugugcucaggagcccuggga

SEQ ID NO: 1471838 - RNA, 19 nt, Human
ugugcuaguaauuggaaag

SEQ ID NO: 1471839 - RNA, 13 nt, Human
ugugcuauacugc

SEQ ID NO: 1471840 - RNA, 18 nt, Human
ugugcuauacugcauacu

SEQ ID NO: 1471841 - RNA, 20 nt, Human
ugugcuauacugcauacuuu

SEQ ID NO: 1471842 - RNA, 21 nt, Human
ugugcuauacugcauacuuuu

SEQ ID NO: 1471843 - RNA, 18 nt, Human
ugugcuauggugcucugu

SEQ ID NO: 1471844 - RNA, 17 nt, Human
ugugcacuuauuuauga

SEQ ID NO: 1471845 - RNA, 15 nt, Human
ugugcauucuggauu

SEQ ID NO: 1471846 - RNA, 17 nt, Human
ugugccuugucacgcca

SEQ ID NO: 1471847 - RNA, 19 nt, Human
ugugccuugucacgccaga

SEQ ID NO: 1471848 - RNA, 20 nt, Human
ugugccuugucacgccagac

SEQ ID NO: 1471849 - RNA, 16 nt, Human
ugugauauaagugugu

SEQ ID NO: 1471850 - RNA, 18 nt, Human
ugugacauuuuacauuaa

SEQ ID NO: 1471851 - RNA, 17 nt, Human
ugugacauuuuacauua

SEQ ID NO: 1471852 - RNA, 15 nt, Human
ugugacauuuuacau

SEQ ID NO: 1471853 - RNA, 18 nt, Human
ugugaccaaaaguuacau

SEQ ID NO: 1471854 - RNA, 17 nt, Human
ugugaccaaaaguuaca

SEQ ID NO: 1471855 - RNA, 17 nt, Human
ugucuggcacagccugg

SEQ ID NO: 1471856 - RNA, 18 nt, Human
uguagccccucuccugga

SEQ ID NO: 1471857 - RNA, 16 nt, Human
uguagccacaccagga

SEQ ID NO: 1471858 - RNA, 17 nt, Human
uguagccacaccaggau

SEQ ID NO: 1471859 - RNA, 18 nt, Human
uguagccacaccaggaua

SEQ ID NO: 1471860 - RNA, 16 nt, Human
uguagccccagugaca

SEQ ID NO: 1471861 - RNA, 21 nt, Human
uguagccccagugacagcuag

SEQ ID NO: 1471862 - RNA, 14 nt, Human
uguagcauccugga

SEQ ID NO: 1471863 - RNA, 16 nt, Human
uguagcauccuggaau

SEQ ID NO: 1471864 - RNA, 17 nt, Human
uguagcauccuggaaua

SEQ ID NO: 1471865 - RNA, 18 nt, Human
uguagcauccuggaauau

SEQ ID NO: 1471866 - RNA, 13 nt, Human
uguagccacacca

SEQ ID NO: 1471867 - RNA, 14 nt, Human
uguaauguuaauau

SEQ ID NO: 1471868 - RNA, 15 nt, Human
uguaauguuaauauu

SEQ ID NO: 1471869 - RNA, 18 nt, Human
uguaauguuaauauugau

SEQ ID NO: 1471870 - RNA, 17 nt, Human
uguaauguuaauauuga

SEQ ID NO: 1471871 - RNA, 20 nt, Human
uguaaucuuauuuaggaagu

SEQ ID NO: 1471872 - RNA, 17 nt, Human
uguaauauuucuucaaa

SEQ ID NO: 1471873 - RNA, 20 nt, Human
uguaauagggaaaauucuaa

SEQ ID NO: 1471874 - RNA, 18 nt, Human
uguaauagauguuugaua

SEQ ID NO: 1471875 - RNA, 22 nt, Human
uguaccguaggcuuuguauuca

SEQ ID NO: 1471876 - RNA, 21 nt, Human
uguacaguuaucuaaguuaau

SEQ ID NO: 1471877 - RNA, 22 nt, Human
uguacaguuaucuaaguuaauu

SEQ ID NO: 1471878 - RNA, 17 nt, Human
uguacaguuaucuaagu

SEQ ID NO: 1471879 - RNA, 18 nt, Human
uguacaguuaucuaaguu

SEQ ID NO: 1471880 - RNA, 22 nt, Human
ugucacccagguuggagugcag

SEQ ID NO: 1471881 - RNA, 16 nt, Human
uguauuuuagcagaga

SEQ ID NO: 1471882 - RNA, 23 nt, Human
uguauuuccccaacauguaauaa

SEQ ID NO: 1471883 - RNA, 22 nt, Human
uguauaaaagggacugagaaau

SEQ ID NO: 1471884 - RNA, 15 nt, Human
uguaugauucccagc

SEQ ID NO: 1471885 - RNA, 19 nt, Human
uguaguuuuuauauguugu

SEQ ID NO: 1471886 - RNA, 20 nt, Human
uguaguuuuuauauguugua

SEQ ID NO: 1471887 - RNA, 14 nt, Human
uguauaaaaauaaa

SEQ ID NO: 1471888 - RNA, 22 nt, Human
uguauaaaaauaaaaaagaucc

SEQ ID NO: 1471889 - RNA, 21 nt, Human
uguauuguauauuacaaugau

SEQ ID NO: 1471890 - RNA, 16 nt, Human
uguaugauucccagcc

SEQ ID NO: 1471891 - RNA, 21 nt, Human
uguccucagccccgcguggaa

SEQ ID NO: 1471892 - RNA, 23 nt, Human
ugucauuguuauauaaucauuau

SEQ ID NO: 1471893 - RNA, 14 nt, Human
ugucauuucauuuc

SEQ ID NO: 1471894 - RNA, 16 nt, Human
ugucauuucauuuccu

SEQ ID NO: 1471895 - RNA, 17 nt, Human
ugucauuucauuuccua

SEQ ID NO: 1471896 - RNA, 15 nt, Human
ugucauguguauaaa

SEQ ID NO: 1471897 - RNA, 11 nt, Human
ugucaugugua

SEQ ID NO: 1471898 - RNA, 13 nt, Human
ugucauguguaua

SEQ ID NO: 1471899 - RNA, 14 nt, Human
ugucauguguauaa

SEQ ID NO: 1471900 - RNA, 13 nt, Human
uggggaagacagu

SEQ ID NO: 1471901 - RNA, 14 nt, Human
uggggaagacagug

SEQ ID NO: 1471902 - RNA, 17 nt, Human
uggggaagacaguggcc

SEQ ID NO: 1471903 - RNA, 12 nt, Human
ugggcagcaauu

SEQ ID NO: 1471904 - RNA, 17 nt, Human
ugggcagauuuucagca

SEQ ID NO: 1471905 - RNA, 15 nt, Human
ugggcagauuuucag

SEQ ID NO: 1471906 - RNA, 21 nt, Human
uggguuagggaaaacauucca

SEQ ID NO: 1471907 - RNA, 19 nt, Human
uggguuagggaaaacauuc

SEQ ID NO: 1471908 - RNA, 18 nt, Human
uggguuagggaaaacauu

SEQ ID NO: 1471909 - RNA, 16 nt, Human
uggguuagggaaaaca

SEQ ID NO: 1471910 - RNA, 14 nt, Human
uggguguuaauuuu

SEQ ID NO: 1471911 - RNA, 23 nt, Human
ugguaugaacuugaggacacaug

SEQ ID NO: 1471912 - RNA, 22 nt, Human
ugguaugaacuugaggacacau

SEQ ID NO: 1471913 - RNA, 21 nt, Human
ugguaugaacuugaggacaca

SEQ ID NO: 1471914 - RNA, 19 nt, Human
ugguaugaacuugaggaca

SEQ ID NO: 1471915 - RNA, 22 nt, Human
ugguauauccaaaagcuuuuua

SEQ ID NO: 1471916 - RNA, 16 nt, Human
ugguauauccaaaagc

SEQ ID NO: 1471917 - RNA, 19 nt, Human
ugguauauccaaaagcuuu

SEQ ID NO: 1471918 - RNA, 22 nt, Human
uggccccacccucguggacacc

SEQ ID NO: 1471919 - RNA, 16 nt, Human
uggcuuccuggcaaua

SEQ ID NO: 1471920 - RNA, 13 nt, Human
uggcuucuggcca

SEQ ID NO: 1471921 - RNA, 15 nt, Human
uggcuucuggccagg

SEQ ID NO: 1471922 - RNA, 16 nt, Human
uggcuucuggccagga

SEQ ID NO: 1471923 - RNA, 17 nt, Human
uggcuucuggccaggaa

SEQ ID NO: 1471924 - RNA, 18 nt, Human
uggcuucuggccaggaag

SEQ ID NO: 1471925 - RNA, 19 nt, Human
uggcuucuggccaggaagc

SEQ ID NO: 1471926 - RNA, 21 nt, Human
uggcuucuggccaggaagcuu

SEQ ID NO: 1471927 - RNA, 21 nt, Human
uggcuugaguuuaaauuguaa

SEQ ID NO: 1471928 - RNA, 17 nt, Human
uggcuuuaggagcagug

SEQ ID NO: 1471929 - RNA, 20 nt, Human
uggcuuuaggagcaguggga

SEQ ID NO: 1471930 - RNA, 15 nt, Human
uggcuuucagagccu

SEQ ID NO: 1471931 - RNA, 17 nt, Human
uggcuuucagagccucc

SEQ ID NO: 1471932 - RNA, 11 nt, Human
uggcuuucagg

SEQ ID NO: 1471933 - RNA, 14 nt, Human
uggcuuucagggag

SEQ ID NO: 1471934 - RNA, 13 nt, Human
uggcuuuggaagc

SEQ ID NO: 1471935 - RNA, 12 nt, Human
ugggagagggcg

SEQ ID NO: 1471936 - RNA, 13 nt, Human
ugggagagggcgc

SEQ ID NO: 1471937 - RNA, 14 nt, Human
ugggagagggcgca

SEQ ID NO: 1471938 - RNA, 15 nt, Human
ugggagagggcgcag

SEQ ID NO: 1471939 - RNA, 20 nt, Human
ugggagagggcgcaggccgu

SEQ ID NO: 1471940 - RNA, 20 nt, Human
uggcuuuugcgguucaggaa

SEQ ID NO: 1471941 - RNA, 21 nt, Human
ugggacaccccgacuuuuguu

SEQ ID NO: 1471942 - RNA, 20 nt, Human
ugggauuaugggucacagga

SEQ ID NO: 1471943 - RNA, 15 nt, Human
ugggauuauggguca

SEQ ID NO: 1471944 - RNA, 18 nt, Human
ugggauuaugggucacag

SEQ ID NO: 1471945 - RNA, 19 nt, Human
ugggauuaugggucacagg

SEQ ID NO: 1471946 - RNA, 21 nt, Human
ugggauuaugggucacaggaa

SEQ ID NO: 1471947 - RNA, 16 nt, Human
ugggagcugccaagag

SEQ ID NO: 1471948 - RNA, 18 nt, Human
uggaacucgugucuggca

SEQ ID NO: 1471949 - RNA, 23 nt, Human
uggaacuacauuaguacacagca

SEQ ID NO: 1471950 - RNA, 18 nt, Human
uggaacuagguuuuaaua

SEQ ID NO: 1471951 - RNA, 20 nt, Human
uggaacuagguuuuaauaau

SEQ ID NO: 1471952 - RNA, 16 nt, Human
uggaauaucuccguca

SEQ ID NO: 1471953 - RNA, 14 nt, Human
uggaauauaauugu

SEQ ID NO: 1471954 - RNA, 22 nt, Human
uggaauaauccuaaacauauga

SEQ ID NO: 1471955 - RNA, 15 nt, Human
uggaauaaguucaaa

SEQ ID NO: 1471956 - RNA, 22 nt, Human
uggacuauggagugcaccaaag

SEQ ID NO: 1471957 - RNA, 22 nt, Human
uggaauauaauuguuuuaucug

SEQ ID NO: 1471958 - RNA, 17 nt, Human
uggaaugaauuaaauaa

SEQ ID NO: 1471959 - RNA, 18 nt, Human
uggaaugaauuaaauaaa

SEQ ID NO: 1471960 - RNA, 17 nt, Human
uggaaacaagucaguca

SEQ ID NO: 1471961 - RNA, 23 nt, Human
uggaaacuucagcgguuuauaua

SEQ ID NO: 1471962 - RNA, 19 nt, Human
uggaaagacagcuucucau

SEQ ID NO: 1471963 - RNA, 14 nt, Human
uggaaagaguacuc

SEQ ID NO: 1471964 - RNA, 23 nt, Human
uggaaagacagcuucucauccug

SEQ ID NO: 1471965 - RNA, 14 nt, Human
uggaacauccuugg

SEQ ID NO: 1471966 - RNA, 21 nt, Human
ugcuuugaaacagaaaaauau

SEQ ID NO: 1471967 - RNA, 16 nt, Human
ugcuuugaaacagaaa

SEQ ID NO: 1471968 - RNA, 14 nt, Human
ugcuggacugucau

SEQ ID NO: 1471969 - RNA, 15 nt, Human
ugcuggacugucaua

SEQ ID NO: 1471970 - RNA, 19 nt, Human
ugcuggacugucauagaaa

SEQ ID NO: 1471971 - RNA, 15 nt, Human
uggcaggugcagccc

SEQ ID NO: 1471972 - RNA, 18 nt, Human
uggcaguccuggaagcca

SEQ ID NO: 1471973 - RNA, 16 nt, Human
uggcagucugaauuuu

SEQ ID NO: 1471974 - RNA, 22 nt, Human
uggcagucugaauuuuuaaaac

SEQ ID NO: 1471975 - RNA, 12 nt, Human
uggcaggaaggc

SEQ ID NO: 1471976 - RNA, 17 nt, Human
uggcaggaaggcuuguu

SEQ ID NO: 1471977 - RNA, 15 nt, Human
uggcaggaaggcuug

SEQ ID NO: 1471978 - RNA, 19 nt, Human
uggcagugggaaaaaugua

SEQ ID NO: 1471979 - RNA, 22 nt, Human
uggcagugggaaaaauguagga

SEQ ID NO: 1471980 - RNA, 23 nt, Human
uggcagugggaaaaauguaggag

SEQ ID NO: 1471981 - RNA, 11 nt, Human
uggccaggagg

SEQ ID NO: 1471982 - RNA, 16 nt, Human
uggccaggaggugcca

SEQ ID NO: 1471983 - RNA, 12 nt, Human
uggccaggaggu

SEQ ID NO: 1471984 - RNA, 13 nt, Human
uggccaggccggg

SEQ ID NO: 1471985 - RNA, 15 nt, Human
uggccaggccgggaa

SEQ ID NO: 1471986 - RNA, 11 nt, Human
uggagggaagc

SEQ ID NO: 1471987 - RNA, 16 nt, Human
uggauccuguguggag

SEQ ID NO: 1471988 - RNA, 17 nt, Human
uggauccuguguggaga

SEQ ID NO: 1471989 - RNA, 14 nt, Human
uggauuuuuaccag

SEQ ID NO: 1471990 - RNA, 13 nt, Human
uggauuuuuacca

SEQ ID NO: 1471991 - RNA, 22 nt, Human
uggauuuuuaccagucucacau

SEQ ID NO: 1471992 - RNA, 17 nt, Human
ugccacccucaugcugu

SEQ ID NO: 1471993 - RNA, 16 nt, Human
ugccacccucaugcug

SEQ ID NO: 1471994 - RNA, 20 nt, Human
ugccaggaggacccagggcu

SEQ ID NO: 1471995 - RNA, 21 nt, Human
ugccaggaggacccagggcuc

SEQ ID NO: 1471996 - RNA, 22 nt, Human
ugccaggaggacccagggcucu

SEQ ID NO: 1471997 - RNA, 23 nt, Human
ugccaggaggacccagggcucug

SEQ ID NO: 1471998 - RNA, 21 nt, Human
ugcauauuuauaaaaauaaaa

SEQ ID NO: 1471999 - RNA, 20 nt, Human
ugcauauuuauaaaaauaaa

SEQ ID NO: 1472000 - RNA, 18 nt, Human
ugccaaauauaaauaaaa

SEQ ID NO: 1472001 - RNA, 17 nt, Human
ugccaaauauaaauaaa

SEQ ID NO: 1472002 - RNA, 22 nt, Human
ugccaaauauaaauaaaaauaa

SEQ ID NO: 1472003 - RNA, 19 nt, Human
ugccaaauauaaauaaaaa

SEQ ID NO: 1472004 - RNA, 16 nt, Human
ugcccaugggagcugg

SEQ ID NO: 1472005 - RNA, 13 nt, Human
ugcacugauguug

SEQ ID NO: 1472006 - RNA, 14 nt, Human
ugcacugauguugu

SEQ ID NO: 1472007 - RNA, 15 nt, Human
ugcacugauguugug

SEQ ID NO: 1472008 - RNA, 21 nt, Human
ugcacugauguuguguuuuua

SEQ ID NO: 1472009 - RNA, 12 nt, Human
ugcaccggggcc

SEQ ID NO: 1472010 - RNA, 16 nt, Human
ugcaccggggccuggg

SEQ ID NO: 1472011 - RNA, 22 nt, Human
ugcaccggggccugggcaggag

SEQ ID NO: 1472012 - RNA, 17 nt, Human
ugcacuggccccacccu

SEQ ID NO: 1472013 - RNA, 16 nt, Human
ugcacuggccccaccc

SEQ ID NO: 1472014 - RNA, 15 nt, Human
ugcacuggccccacc

SEQ ID NO: 1472015 - RNA, 12 nt, Human
ugcacuguaaaa

SEQ ID NO: 1472016 - RNA, 13 nt, Human
ugcacuguaaaau

SEQ ID NO: 1472017 - RNA, 14 nt, Human
ugcacuguaaaaug

SEQ ID NO: 1472018 - RNA, 17 nt, Human
ugcacuguaaaaugugg

SEQ ID NO: 1472019 - RNA, 15 nt, Human
ugcacuguaaaaugu

SEQ ID NO: 1472020 - RNA, 15 nt, Human
ugcaguucugaagaa

SEQ ID NO: 1472021 - RNA, 16 nt, Human
ugcaguucugaagaag

SEQ ID NO: 1472022 - RNA, 17 nt, Human
ugcaguucugaagaaga

SEQ ID NO: 1472023 - RNA, 18 nt, Human
ugcaguucugaagaagau

SEQ ID NO: 1472024 - RNA, 22 nt, Human
ugcaguggcgugaucucagcuc

SEQ ID NO: 1472025 - RNA, 22 nt, Human
ugcaguggcgcgaucucagcuc

SEQ ID NO: 1472026 - RNA, 22 nt, Human
ugcaguggcaucaucucagcuc

SEQ ID NO: 1472027 - RNA, 19 nt, Human
ugcaguucugaagaagaug

SEQ ID NO: 1472028 - RNA, 22 nt, Human
ugcaguucugaagaagauggua

SEQ ID NO: 1472029 - RNA, 21 nt, Human
ugcaguucuuuggcugaaagg

SEQ ID NO: 1472030 - RNA, 20 nt, Human
ugcaguucuuuggcugaaag

SEQ ID NO: 1472031 - RNA, 19 nt, Human
ugcaggcaggaacaaacag

SEQ ID NO: 1472032 - RNA, 20 nt, Human
ugcaggcaggaacaaacagg

SEQ ID NO: 1472033 - RNA, 14 nt, Human
ugcaggcaggaaca

SEQ ID NO: 1472034 - RNA, 15 nt, Human
ugcuaagcauuccaa

SEQ ID NO: 1472035 - RNA, 19 nt, Human
ugcuaagcauuccaacuau

SEQ ID NO: 1472036 - RNA, 16 nt, Human
ugcuaagagaaguaga

SEQ ID NO: 1472037 - RNA, 17 nt, Human
ugcucagagcaguguuu

SEQ ID NO: 1472038 - RNA, 13 nt, Human
ugcucagguacuu

SEQ ID NO: 1472039 - RNA, 17 nt, Human
ugcucagguacuuguaa

SEQ ID NO: 1472040 - RNA, 17 nt, Human
ugcucaguaauuugagg

SEQ ID NO: 1472041 - RNA, 13 nt, Human
ugcucagcccugc

SEQ ID NO: 1472042 - RNA, 23 nt, Human
ugcucagggacucaucuuucccu

SEQ ID NO: 1472043 - RNA, 20 nt, Human
ugcucuaugugcuuguaaaa

SEQ ID NO: 1472044 - RNA, 17 nt, Human
ugcugaaauuuuauaug

SEQ ID NO: 1472045 - RNA, 13 nt, Human
ugcugcaaaccug

SEQ ID NO: 1472046 - RNA, 14 nt, Human
ugcugcaaaccuga

SEQ ID NO: 1472047 - RNA, 20 nt, Human
ugcugcaaaccugaccccug

SEQ ID NO: 1472048 - RNA, 17 nt, Human
ugcugauggagccuucc

SEQ ID NO: 1472049 - RNA, 14 nt, Human
ugcugcuggggaag

SEQ ID NO: 1472050 - RNA, 15 nt, Human
ugcugcuggggaaga

SEQ ID NO: 1472051 - RNA, 19 nt, Human
ugcugcuggggaagacagu

SEQ ID NO: 1472052 - RNA, 20 nt, Human
ugcugcuggggaagacagug

SEQ ID NO: 1472053 - RNA, 21 nt, Human
ugcugcuggggaagacagugg

SEQ ID NO: 1472054 - RNA, 22 nt, Human
ugcugcuggggaagacaguggc

SEQ ID NO: 1472055 - RNA, 24 nt, Human
ugcugcuggggaagacaguggccc

SEQ ID NO: 1472056 - RNA, 23 nt, Human
ugcugcuggggaagacaguggcc

SEQ ID NO: 1472057 - RNA, 18 nt, Human
ugcuggaaaauaauacug

SEQ ID NO: 1472058 - RNA, 22 nt, Human
ugcuggaagacgcaagggccug

SEQ ID NO: 1472059 - RNA, 17 nt, Human
ugcuggaauaaguucaa

SEQ ID NO: 1472060 - RNA, 15 nt, Human
ugccuucucaacucc

SEQ ID NO: 1472061 - RNA, 17 nt, Human
ugccuucucaacuccaa

SEQ ID NO: 1472062 - RNA, 20 nt, Human
ugcgagugcucauuucagga

SEQ ID NO: 1472063 - RNA, 13 nt, Human
ugcuaagagaagu

SEQ ID NO: 1472064 - RNA, 22 nt, Human
ugcuaagagaaguagaaaucau

SEQ ID NO: 1472065 - RNA, 9 nt, Human
ugccucucu

SEQ ID NO: 1472066 - RNA, 20 nt, Human
ugccucucgcuccucaaccc

SEQ ID NO: 1472067 - RNA, 18 nt, Human
ugccucucaucaacugaa

SEQ ID NO: 1472068 - RNA, 21 nt, Human
ugccucucaucaacugaauga

SEQ ID NO: 1472069 - RNA, 20 nt, Human
ugccuguagccccagugaca

SEQ ID NO: 1472070 - RNA, 22 nt, Human
ugccuguagccccagugacagc

SEQ ID NO: 1472071 - RNA, 21 nt, Human
ugccuguagccccagugacag

SEQ ID NO: 1472072 - RNA, 23 nt, Human
ugccugacccuacuucuuuugcu

SEQ ID NO: 1472073 - RNA, 21 nt, Human
ugccugacuagggagccaugu

SEQ ID NO: 1472074 - RNA, 20 nt, Human
ugaagagguuuuaaagcuuc

SEQ ID NO: 1472075 - RNA, 21 nt, Human
ugaagagguuuuaaagcuucc

SEQ ID NO: 1472076 - RNA, 16 nt, Human
ugaagagauuuuucau

SEQ ID NO: 1472077 - RNA, 15 nt, Human
ugaagagauuuuuca

SEQ ID NO: 1472078 - RNA, 21 nt, Human
ugaagcuuuuaugugaaacau

SEQ ID NO: 1472079 - RNA, 13 nt, Human
ugaaacauguuuc

SEQ ID NO: 1472080 - RNA, 16 nt, Human
ugaaacacuuugcaua

SEQ ID NO: 1472081 - RNA, 12 nt, Human
ugaaacagaaaa

SEQ ID NO: 1472082 - RNA, 15 nt, Human
ugaaacagaaaaaua

SEQ ID NO: 1472083 - RNA, 13 nt, Human
ugaaacagaaaca

SEQ ID NO: 1472084 - RNA, 14 nt, Human
ugaaacagaaacaa

SEQ ID NO: 1472085 - RNA, 16 nt, Human
ugaaacagaaacaaaa

SEQ ID NO: 1472086 - RNA, 23 nt, Human
ugaaacagaaaaauauguaccaa

SEQ ID NO: 1472087 - RNA, 16 nt, Human
ugaacuugaggacaca

SEQ ID NO: 1472088 - RNA, 21 nt, Human
ugaacuugaaauauccugcuu

SEQ ID NO: 1472089 - RNA, 20 nt, Human
ugaacuugaggacacauguc

SEQ ID NO: 1472090 - RNA, 19 nt, Human
ugaacuugaggacacaugu

SEQ ID NO: 1472091 - RNA, 18 nt, Human
ugaacuugaggacacaug

SEQ ID NO: 1472092 - RNA, 17 nt, Human
ugaacuugaggacacau

SEQ ID NO: 1472093 - RNA, 22 nt, Human
ugaacuugaggacacaugucca

SEQ ID NO: 1472094 - RNA, 21 nt, Human
ugaacuugaggacacaugucc

SEQ ID NO: 1472095 - RNA, 14 nt, Human
ugaaggcuguacac

SEQ ID NO: 1472096 - RNA, 14 nt, Human
ugaauccucucucu

SEQ ID NO: 1472097 - RNA, 16 nt, Human
ugaauccucucucugu

SEQ ID NO: 1472098 - RNA, 21 nt, Human
ugaauccucucucuguguuac

SEQ ID NO: 1472099 - RNA, 15 nt, Human
ugaaugcaaaccaua

SEQ ID NO: 1472100 - RNA, 19 nt, Human
ugaaugcaaaccauagcac

SEQ ID NO: 1472101 - RNA, 16 nt, Human
ugaauuuaaauagcuu

SEQ ID NO: 1472102 - RNA, 23 nt, Human
ugacaacauuucuauagccaaaa

SEQ ID NO: 1472103 - RNA, 16 nt, Human
ugacaacauuucuaua

SEQ ID NO: 1472104 - RNA, 14 nt, Human
ugaauuaaguuuuu

SEQ ID NO: 1472105 - RNA, 17 nt, Human
ugaauuaaauaaacccu

SEQ ID NO: 1472106 - RNA, 13 nt, Human
ugaauuacauuug

SEQ ID NO: 1472107 - RNA, 14 nt, Human
ugaauuacauuugu

SEQ ID NO: 1472108 - RNA, 13 nt, Human
ugacaacuggcag

SEQ ID NO: 1472109 - RNA, 14 nt, Human
ugacaacuggcagg

SEQ ID NO: 1472110 - RNA, 15 nt, Human
ugacaacuggcaggc

SEQ ID NO: 1472111 - RNA, 18 nt, Human
ugacaacuggcaggcagg

SEQ ID NO: 1472112 - RNA, 17 nt, Human
ugacaacuggcaggcag

SEQ ID NO: 1472113 - RNA, 16 nt, Human
ugacaugggacauuug

SEQ ID NO: 1472114 - RNA, 15 nt, Human
ugacaugaagcuguu

SEQ ID NO: 1472115 - RNA, 17 nt, Human
ugacaucaccacaguuu

SEQ ID NO: 1472116 - RNA, 13 nt, Human
ugacaucacuugu

SEQ ID NO: 1472117 - RNA, 16 nt, Human
ugacaucacuuguaca

SEQ ID NO: 1472118 - RNA, 17 nt, Human
ugacaucacuuguacaa

SEQ ID NO: 1472119 - RNA, 18 nt, Human
ugacaucacuuguacaaa

SEQ ID NO: 1472120 - RNA, 19 nt, Human
ugacaucacuuguacaaaa

SEQ ID NO: 1472121 - RNA, 20 nt, Human
ugacaucacuuguacaaaau

SEQ ID NO: 1472122 - RNA, 21 nt, Human
ugacaucacuuguacaaaaua

SEQ ID NO: 1472123 - RNA, 22 nt, Human
ugacaucacuuguacaaaauaa

SEQ ID NO: 1472124 - RNA, 23 nt, Human
ugacaucacuuguacaaaauaaa

SEQ ID NO: 1472125 - RNA, 16 nt, Human
ugacuuuggcugcaug

SEQ ID NO: 1472126 - RNA, 17 nt, Human
ugacuggcuucagcaag

SEQ ID NO: 1472127 - RNA, 14 nt, Human
ugacucuuuccaac

SEQ ID NO: 1472128 - RNA, 16 nt, Human
ugacucuuuccaaccg

SEQ ID NO: 1472129 - RNA, 13 nt, Human
ugacucuuuccaa

SEQ ID NO: 1472130 - RNA, 19 nt, Human
ugacucuuuccaaccggcu

SEQ ID NO: 1472131 - RNA, 14 nt, Human
ugacucuuaagaag

SEQ ID NO: 1472132 - RNA, 15 nt, Human
ugacucuuaagaaga

SEQ ID NO: 1472133 - RNA, 16 nt, Human
ugacucuuaagaagac

SEQ ID NO: 1472134 - RNA, 15 nt, Human
ugacuaauggcauga

SEQ ID NO: 1472135 - RNA, 17 nt, Human
ugaccagccgugagcau

SEQ ID NO: 1472136 - RNA, 14 nt, Human
ugacuaaaauauuu

SEQ ID NO: 1472137 - RNA, 14 nt, Human
ugacuaauggcaug

SEQ ID NO: 1472138 - RNA, 16 nt, Human
ugacuaauggcaugag

SEQ ID NO: 1472139 - RNA, 18 nt, Human
ugagaaaaauauauacua

SEQ ID NO: 1472140 - RNA, 17 nt, Human
ugacuuuuugcauuuaa

SEQ ID NO: 1472141 - RNA, 23 nt, Human
ugacuuuuugcauuuaaaacaga

SEQ ID NO: 1472142 - RNA, 19 nt, Human
ugagaaaagcuuugaaccc

SEQ ID NO: 1472143 - RNA, 14 nt, Human
ugacuuuuugcauu

SEQ ID NO: 1472144 - RNA, 12 nt, Human
ugagacauccag

SEQ ID NO: 1472145 - RNA, 10 nt, Human
ugagacaucc

SEQ ID NO: 1472146 - RNA, 13 nt, Human
ugagaaaucuaaa

SEQ ID NO: 1472147 - RNA, 21 nt, Human
ugagaaagucuuauuuauuca

SEQ ID NO: 1472148 - RNA, 14 nt, Human
ugagaaagccuucu

SEQ ID NO: 1472149 - RNA, 16 nt, Human
ugagaaagccuucuuu

SEQ ID NO: 1472150 - RNA, 13 nt, Human
ugagacauccagc

SEQ ID NO: 1472151 - RNA, 19 nt, Human
ugagaggcugggaauggag

SEQ ID NO: 1472152 - RNA, 19 nt, Human
ugagaccuuccuuuuacuu

SEQ ID NO: 1472153 - RNA, 22 nt, Human
ugagauaaugugauauuauaca

SEQ ID NO: 1472154 - RNA, 14 nt, Human
ugagauacauacag

SEQ ID NO: 1472155 - RNA, 15 nt, Human
ugagauacauacaga

SEQ ID NO: 1472156 - RNA, 21 nt, Human
ugagauacauacagaauuacu

SEQ ID NO: 1472157 - RNA, 15 nt, Human
ugaggcacuggcgag

SEQ ID NO: 1472158 - RNA, 17 nt, Human
ugaggcacaugucagca

SEQ ID NO: 1472159 - RNA, 20 nt, Human
ugaggcacaugucagcaagu

SEQ ID NO: 1472160 - RNA, 17 nt, Human
ugaggaucagaguaauc

SEQ ID NO: 1472161 - RNA, 13 nt, Human
ugaggaucagagu

SEQ ID NO: 1472162 - RNA, 19 nt, Human
ugaggaucagaguaaucca

SEQ ID NO: 1472163 - RNA, 20 nt, Human
ugaggauacgacaguacacu

SEQ ID NO: 1472164 - RNA, 15 nt, Human
ugagcagucaggaaa

SEQ ID NO: 1472165 - RNA, 15 nt, Human
ugagcuauuucaucu

SEQ ID NO: 1472166 - RNA, 23 nt, Human
ugagcucagaaaauaucccuccu

SEQ ID NO: 1472167 - RNA, 15 nt, Human
ugagcugaccagccg

SEQ ID NO: 1472168 - RNA, 18 nt, Human
ugagcugaaggugaaaca

SEQ ID NO: 1472169 - RNA, 24 nt, Human
ugagcugaccagccgugagcaugu

SEQ ID NO: 1472170 - RNA, 14 nt, Human
ucuuauaauuuaaa

SEQ ID NO: 1472171 - RNA, 13 nt, Human
ucuuauaauuuaa

SEQ ID NO: 1472172 - RNA, 14 nt, Human
ucugugugcacaaa

SEQ ID NO: 1472173 - RNA, 21 nt, Human
ucugugugcacaaauauuuau

SEQ ID NO: 1472174 - RNA, 14 nt, Human
ucuuaugcaauuuc

SEQ ID NO: 1472175 - RNA, 16 nt, Human
ucuucauguuucagga

SEQ ID NO: 1472176 - RNA, 19 nt, Human
ucuugccaaauauaaauaa

SEQ ID NO: 1472177 - RNA, 17 nt, Human
ucuugcccgcucaggcu

SEQ ID NO: 1472178 - RNA, 21 nt, Human
ucuucuuuuaaaccauuuucu

SEQ ID NO: 1472179 - RNA, 22 nt, Human
ucuucuuuuaaaccauuuucuu

SEQ ID NO: 1472180 - RNA, 15 nt, Human
ucuucuuuugugaag

SEQ ID NO: 1472181 - RNA, 19 nt, Human
ucuucuuggccaugggagg

SEQ ID NO: 1472182 - RNA, 23 nt, Human
ucuucuuggccaugggaggccuu

SEQ ID NO: 1472183 - RNA, 17 nt, Human
ucuuuccacagaagcuc

SEQ ID NO: 1472184 - RNA, 19 nt, Human
ucuuuccaaccggcuuugu

SEQ ID NO: 1472185 - RNA, 22 nt, Human
ucuuugccacccucaugcugug

SEQ ID NO: 1472186 - RNA, 21 nt, Human
ucuuugccacccucaugcugu

SEQ ID NO: 1472187 - RNA, 21 nt, Human
ucuuugacaauugggagcugc

SEQ ID NO: 1472188 - RNA, 13 nt, Human
ucuuuucauacau

SEQ ID NO: 1472189 - RNA, 23 nt, Human
ucuuuucauacauuuucuaagaa

SEQ ID NO: 1472190 - RNA, 15 nt, Human
ugaaacacuuugcau

SEQ ID NO: 1472191 - RNA, 18 nt, Human
ugaaaaccacauuggaga

SEQ ID NO: 1472192 - RNA, 13 nt, Human
ugaaaauuauuua

SEQ ID NO: 1472193 - RNA, 17 nt, Human
ugaaaauuauuuaaacc

SEQ ID NO: 1472194 - RNA, 14 nt, Human
ugaaaauuauuuaa

SEQ ID NO: 1472195 - RNA, 14 nt, Human
ucuuuucauacauu

SEQ ID NO: 1472196 - RNA, 19 nt, Human
ucuuuucccacuguuuaag

SEQ ID NO: 1472197 - RNA, 22 nt, Human
ucuggagcccacuguacuugcu

SEQ ID NO: 1472198 - RNA, 16 nt, Human
ucuggagcccacugua

SEQ ID NO: 1472199 - RNA, 12 nt, Human
ucuggagcccac

SEQ ID NO: 1472200 - RNA, 15 nt, Human
ucuggcuucuggcca

SEQ ID NO: 1472201 - RNA, 18 nt, Human
ucuggcuucuggccagga

SEQ ID NO: 1472202 - RNA, 19 nt, Human
ucuggcuucuggccaggaa

SEQ ID NO: 1472203 - RNA, 22 nt, Human
ucuguaagaaaccuacugccca

SEQ ID NO: 1472204 - RNA, 14 nt, Human
ucuguaagaaaccu

SEQ ID NO: 1472205 - RNA, 20 nt, Human
ucuguaagaaaccuacugcc

SEQ ID NO: 1472206 - RNA, 19 nt, Human
ucuguaaacuguguauucc

SEQ ID NO: 1472207 - RNA, 22 nt, Human
ucuguaaacuguguauuccaag

SEQ ID NO: 1472208 - RNA, 19 nt, Human
ucuguaaagcuaaaauaaa

SEQ ID NO: 1472209 - RNA, 13 nt, Human
ucuguaaagcuaa

SEQ ID NO: 1472210 - RNA, 12 nt, Human
ucuguaaacugu

SEQ ID NO: 1472211 - RNA, 13 nt, Human
ucuguaaacugug

SEQ ID NO: 1472212 - RNA, 14 nt, Human
ucuguaaacugugu

SEQ ID NO: 1472213 - RNA, 15 nt, Human
ucuguaaacugugua

SEQ ID NO: 1472214 - RNA, 16 nt, Human
ucuguaaacuguguau

SEQ ID NO: 1472215 - RNA, 20 nt, Human
ucuggcuucuggccaggaag

SEQ ID NO: 1472216 - RNA, 17 nt, Human
ucuggugaagcucacuu

SEQ ID NO: 1472217 - RNA, 17 nt, Human
ucugucgcccaugcugg

SEQ ID NO: 1472218 - RNA, 15 nt, Human
ucugucuacuugcuc

SEQ ID NO: 1472219 - RNA, 18 nt, Human
ucugucuacuugcucagg

SEQ ID NO: 1472220 - RNA, 23 nt, Human
ucugucuacuugcucagguacuu

SEQ ID NO: 1472221 - RNA, 14 nt, Human
ucuggaauuugaaa

SEQ ID NO: 1472222 - RNA, 21 nt, Human
ucugcagucucuauaccaaua

SEQ ID NO: 1472223 - RNA, 20 nt, Human
ucugcagucucuauaccaau

SEQ ID NO: 1472224 - RNA, 18 nt, Human
ucugcagucucuauacca

SEQ ID NO: 1472225 - RNA, 14 nt, Human
ucugcagucucuau

SEQ ID NO: 1472226 - RNA, 15 nt, Human
ucucaucaacugaau

SEQ ID NO: 1472227 - RNA, 17 nt, Human
ucucaucaacugaauga

SEQ ID NO: 1472228 - RNA, 21 nt, Human
ucugagcccgguaagagcaaa

SEQ ID NO: 1472229 - RNA, 23 nt, Human
ucugagcccgguaagagcaaaag

SEQ ID NO: 1472230 - RNA, 17 nt, Human
ucugagcuauuucaucu

SEQ ID NO: 1472231 - RNA, 20 nt, Human
ucugagcuauuucaucuauu

SEQ ID NO: 1472232 - RNA, 22 nt, Human
ucugagcuauuucaucuauuuu

SEQ ID NO: 1472233 - RNA, 16 nt, Human
ucugauugugauguga

SEQ ID NO: 1472234 - RNA, 14 nt, Human
ucugcaaacugccu

SEQ ID NO: 1472235 - RNA, 15 nt, Human
ucugcaaacugccuu

SEQ ID NO: 1472236 - RNA, 17 nt, Human
ucugcaaggucuuuggu

SEQ ID NO: 1472237 - RNA, 15 nt, Human
uccuuaccuuuuuau

SEQ ID NO: 1472238 - RNA, 20 nt, Human
uccuuaccuuuuuauuugca

SEQ ID NO: 1472239 - RNA, 17 nt, Human
uccuuaggccucugaga

SEQ ID NO: 1472240 - RNA, 17 nt, Human
uccuuaucgaaacucau

SEQ ID NO: 1472241 - RNA, 20 nt, Human
uccuuugaauccucucucug

SEQ ID NO: 1472242 - RNA, 21 nt, Human
uccuuugaauccucucucugu

SEQ ID NO: 1472243 - RNA, 12 nt, Human
ucgauuagacug

SEQ ID NO: 1472244 - RNA, 13 nt, Human
ucgauuagacugg

SEQ ID NO: 1472245 - RNA, 14 nt, Human
ucgauuagacugga

SEQ ID NO: 1472246 - RNA, 18 nt, Human
ucgauuagacuggacagc

SEQ ID NO: 1472247 - RNA, 22 nt, Human
ucgauuagacuggacagcuugu

SEQ ID NO: 1472248 - RNA, 21 nt, Human
ucgauuagacuggacagcuug

SEQ ID NO: 1472249 - RNA, 19 nt, Human
ucgcuuuauuggcugagau

SEQ ID NO: 1472250 - RNA, 13 nt, Human
ucuauauuuuaca

SEQ ID NO: 1472251 - RNA, 15 nt, Human
ucuagguaaauuaca

SEQ ID NO: 1472252 - RNA, 17 nt, Human
ucuagguaggaaaugug

SEQ ID NO: 1472253 - RNA, 21 nt, Human
ucuaggcaguucaaagcagga

SEQ ID NO: 1472254 - RNA, 13 nt, Human
ucuaauuuauaaa

SEQ ID NO: 1472255 - RNA, 14 nt, Human
ucuaauuuauaaaa

SEQ ID NO: 1472256 - RNA, 18 nt, Human
ucgucuguuuauaaacau

SEQ ID NO: 1472257 - RNA, 18 nt, Human
ucuaaucaugaaacuccc

SEQ ID NO: 1472258 - RNA, 18 nt, Human
ucucagauuucugaggaa

SEQ ID NO: 1472259 - RNA, 17 nt, Human
ucucagauuucugagga

SEQ ID NO: 1472260 - RNA, 21 nt, Human
ucucaguugcagcccugcugc

SEQ ID NO: 1472261 - RNA, 15 nt, Human
ucucaguuuucauaa

SEQ ID NO: 1472262 - RNA, 16 nt, Human
ucucaguuuucauaag

SEQ ID NO: 1472263 - RNA, 18 nt, Human
ucucagaaugucauuuug

SEQ ID NO: 1472264 - RNA, 14 nt, Human
ucucagauuucuga

SEQ ID NO: 1472265 - RNA, 16 nt, Human
ucucacugcuugaacu

SEQ ID NO: 1472266 - RNA, 18 nt, Human
ucucacugcuugaacuag

SEQ ID NO: 1472267 - RNA, 14 nt, Human
ucucacugcuugaa

SEQ ID NO: 1472268 - RNA, 13 nt, Human
ucuaugaaauauu

SEQ ID NO: 1472269 - RNA, 12 nt, Human
ucucaauuucua

SEQ ID NO: 1472270 - RNA, 19 nt, Human
ucccuacccuaaccaaguu

SEQ ID NO: 1472271 - RNA, 23 nt, Human
ucccaugagcuccuuaaggcucu

SEQ ID NO: 1472272 - RNA, 18 nt, Human
ucccuagcugugaccucu

SEQ ID NO: 1472273 - RNA, 16 nt, Human
ucccucugcagucucu

SEQ ID NO: 1472274 - RNA, 22 nt, Human
ucccucugcagucucuauacca

SEQ ID NO: 1472275 - RNA, 19 nt, Human
ucccugggccuugggcucc

SEQ ID NO: 1472276 - RNA, 13 nt, Human
ucccugggccuug

SEQ ID NO: 1472277 - RNA, 14 nt, Human
ucccugggccuugg

SEQ ID NO: 1472278 - RNA, 15 nt, Human
ucccugggccuuggg

SEQ ID NO: 1472279 - RNA, 16 nt, Human
ucccugggccuugggc

SEQ ID NO: 1472280 - RNA, 17 nt, Human
uccgacucuucugagca

SEQ ID NO: 1472281 - RNA, 13 nt, Human
uccuauccuccua

SEQ ID NO: 1472282 - RNA, 13 nt, Human
uccuaugcuuuga

SEQ ID NO: 1472283 - RNA, 14 nt, Human
uccuaugcuuugaa

SEQ ID NO: 1472284 - RNA, 20 nt, Human
uccuaugcuuugaaacagaa

SEQ ID NO: 1472285 - RNA, 21 nt, Human
uccuauugugcaauguaaaua

SEQ ID NO: 1472286 - RNA, 17 nt, Human
uccuccgucaccucaga

SEQ ID NO: 1472287 - RNA, 12 nt, Human
uccuccugcuca

SEQ ID NO: 1472288 - RNA, 16 nt, Human
uccucgagaucccaac

SEQ ID NO: 1472289 - RNA, 23 nt, Human
uccucgagaucccaacacugcca

SEQ ID NO: 1472290 - RNA, 12 nt, Human
uccauacauuug

SEQ ID NO: 1472291 - RNA, 19 nt, Human
uccauauaaauauuagaaa

SEQ ID NO: 1472292 - RNA, 13 nt, Human
uccauauaaauau

SEQ ID NO: 1472293 - RNA, 12 nt, Human
uccauauaaaua

SEQ ID NO: 1472294 - RNA, 16 nt, Human
ucccaacacugccagc

SEQ ID NO: 1472295 - RNA, 14 nt, Human
ucccaacacugcca

SEQ ID NO: 1472296 - RNA, 15 nt, Human
ucccaacacugccag

SEQ ID NO: 1472297 - RNA, 20 nt, Human
uccaugcguguuucugacuc

SEQ ID NO: 1472298 - RNA, 18 nt, Human
uccaugcguguuucugac

SEQ ID NO: 1472299 - RNA, 19 nt, Human
uccaugcguguuucugacu

SEQ ID NO: 1472300 - RNA, 21 nt, Human
uccaugcacccucauacacag

SEQ ID NO: 1472301 - RNA, 20 nt, Human
ucccaagcaccugggauuac

SEQ ID NO: 1472302 - RNA, 21 nt, Human
ucccaagcaccugggauuaca

SEQ ID NO: 1472303 - RNA, 13 nt, Human
ucccaagagcuac

SEQ ID NO: 1472304 - RNA, 17 nt, Human
ucccacucacaacagcu

SEQ ID NO: 1472305 - RNA, 22 nt, Human
ucccacucacaacagcugccug

SEQ ID NO: 1472306 - RNA, 15 nt, Human
ucccacggccuuucu

SEQ ID NO: 1472307 - RNA, 17 nt, Human
ucccacggccuuucuag

SEQ ID NO: 1472308 - RNA, 21 nt, Human
ucccacuucagccucccaagc

SEQ ID NO: 1472309 - RNA, 16 nt, Human
ucccagggacaccugg

SEQ ID NO: 1472310 - RNA, 17 nt, Human
uccagagcacugcucca

SEQ ID NO: 1472311 - RNA, 15 nt, Human
uccagagucccugcc

SEQ ID NO: 1472312 - RNA, 20 nt, Human
uccagaggcuauuauuuuca

SEQ ID NO: 1472313 - RNA, 17 nt, Human
uccacuuuaucuugaau

SEQ ID NO: 1472314 - RNA, 15 nt, Human
uccacuuuaucuuga

SEQ ID NO: 1472315 - RNA, 17 nt, Human
uccaagcaaaugugaau

SEQ ID NO: 1472316 - RNA, 21 nt, Human
uccaagagcuacauaauuuag

SEQ ID NO: 1472317 - RNA, 23 nt, Human
uccacagcugccucuucccucuu

SEQ ID NO: 1472318 - RNA, 23 nt, Human
ucagauaagguaaaaugccauga

SEQ ID NO: 1472319 - RNA, 14 nt, Human
uaucauuccaaagg

SEQ ID NO: 1472320 - RNA, 20 nt, Human
ucagauaagguaaaaugcca

SEQ ID NO: 1472321 - RNA, 17 nt, Human
ucagauagaaugacagu

SEQ ID NO: 1472322 - RNA, 17 nt, Human
ucagauaugauucaaau

SEQ ID NO: 1472323 - RNA, 18 nt, Human
ucagauaugauucaaaug

SEQ ID NO: 1472324 - RNA, 22 nt, Human
ucagauaagguaaaaugccaug

SEQ ID NO: 1472325 - RNA, 13 nt, Human
ucagauccuccuc

SEQ ID NO: 1472326 - RNA, 15 nt, Human
ucagauccuccucau

SEQ ID NO: 1472327 - RNA, 14 nt, Human
ucagauccuccuca

SEQ ID NO: 1472328 - RNA, 17 nt, Human
ucagcagggacuguaaa

SEQ ID NO: 1472329 - RNA, 18 nt, Human
ucagcagggacuguaaac

SEQ ID NO: 1472330 - RNA, 22 nt, Human
ucagcagggacuguaaacacag

SEQ ID NO: 1472331 - RNA, 19 nt, Human
ucagcucucaguugcagcc

SEQ ID NO: 1472332 - RNA, 20 nt, Human
ucaggagagaguugaaccua

SEQ ID NO: 1472333 - RNA, 16 nt, Human
ucaggaggaaggcuua

SEQ ID NO: 1472334 - RNA, 23 nt, Human
ucaggaggaaggcuuacacccac

SEQ ID NO: 1472335 - RNA, 23 nt, Human
ucagccuccauccuacccccugu

SEQ ID NO: 1472336 - RNA, 24 nt, Human
ucauggacuucugccagcauaaua

SEQ ID NO: 1472337 - RNA, 21 nt, Human
ucauggaauuggagcucgugg

SEQ ID NO: 1472338 - RNA, 15 nt, Human
ucaugaaagauucaa

SEQ ID NO: 1472339 - RNA, 13 nt, Human
ucaugaaagauuc

SEQ ID NO: 1472340 - RNA, 11 nt, Human
ucaugaaaauu

SEQ ID NO: 1472341 - RNA, 19 nt, Human
ucauggaauuggagcucgu

SEQ ID NO: 1472342 - RNA, 18 nt, Human
ucaucuggaaccaucaga

SEQ ID NO: 1472343 - RNA, 12 nt, Human
ucaucuggaacc

SEQ ID NO: 1472344 - RNA, 17 nt, Human
ucaucuggauuccagag

SEQ ID NO: 1472345 - RNA, 13 nt, Human
ucaucuggaacca

SEQ ID NO: 1472346 - RNA, 19 nt, Human
ucaucuggcaacaucuuua

SEQ ID NO: 1472347 - RNA, 23 nt, Human
ucaucuggcaacaucuuuauccg

SEQ ID NO: 1472348 - RNA, 14 nt, Human
ucaucuuucuucca

SEQ ID NO: 1472349 - RNA, 17 nt, Human
ucaucuuucuuccaaac

SEQ ID NO: 1472350 - RNA, 22 nt, Human
ucauauuuuucauagcuaaaaa

SEQ ID NO: 1472351 - RNA, 18 nt, Human
ucauauuuucuuucaaaa

SEQ ID NO: 1472352 - RNA, 13 nt, Human
ucauagaaaugua

SEQ ID NO: 1472353 - RNA, 22 nt, Human
ucauagaaauguaacuuuugua

SEQ ID NO: 1472354 - RNA, 23 nt, Human
ucauagaaauguaacuuuuguaa

SEQ ID NO: 1472355 - RNA, 19 nt, Human
ucaguucucuugauuuuca

SEQ ID NO: 1472356 - RNA, 13 nt, Human
ucaucaacugaau

SEQ ID NO: 1472357 - RNA, 15 nt, Human
ucaucaacugaauga

SEQ ID NO: 1472358 - RNA, 22 nt, Human
ucaucaacugaaugaggucagc

SEQ ID NO: 1472359 - RNA, 20 nt, Human
ucaguuaacuauugcauuua

SEQ ID NO: 1472360 - RNA, 16 nt, Human
ucaguuaacuauugca

SEQ ID NO: 1472361 - RNA, 23 nt, Human
ucagucucuauaccaauaaagug

SEQ ID NO: 1472362 - RNA, 22 nt, Human
ucagucucuauaccaauaaagu

SEQ ID NO: 1472363 - RNA, 18 nt, Human
ucaguccccacagauaac

SEQ ID NO: 1472364 - RNA, 24 nt, Human
uauagaaagcuauauaagacaaga

SEQ ID NO: 1472365 - RNA, 13 nt, Human
uauagaaagcuau

SEQ ID NO: 1472366 - RNA, 13 nt, Human
uauacuuuuacaa

SEQ ID NO: 1472367 - RNA, 16 nt, Human
uauaguacaugauaaa

SEQ ID NO: 1472368 - RNA, 14 nt, Human
uauaguacaugaua

SEQ ID NO: 1472369 - RNA, 13 nt, Human
uauaguacaugau

SEQ ID NO: 1472370 - RNA, 12 nt, Human
uauaguacauga

SEQ ID NO: 1472371 - RNA, 13 nt, Human
uauaguccagcuu

SEQ ID NO: 1472372 - RNA, 22 nt, Human
uauaguuuuacuuuuaaacugu

SEQ ID NO: 1472373 - RNA, 23 nt, Human
uauaguuuuacuuuuaaacugug

SEQ ID NO: 1472374 - RNA, 12 nt, Human
uauaucuuguuu

SEQ ID NO: 1472375 - RNA, 17 nt, Human
uauauaacaaugcugua

SEQ ID NO: 1472376 - RNA, 19 nt, Human
uauauaacaaugcuguauu

SEQ ID NO: 1472377 - RNA, 16 nt, Human
uauauuuuuuucugaa

SEQ ID NO: 1472378 - RNA, 19 nt, Human
uauauuuuuuucugaaauu

SEQ ID NO: 1472379 - RNA, 20 nt, Human
uauauuuuuuucugaaauuu

SEQ ID NO: 1472380 - RNA, 14 nt, Human
uauaugcuucuguu

SEQ ID NO: 1472381 - RNA, 18 nt, Human
uauaugaagaaaaucacu

SEQ ID NO: 1472382 - RNA, 16 nt, Human
uauaugcuucuguuuu

SEQ ID NO: 1472383 - RNA, 19 nt, Human
uauaugaagaaaaucacuu

SEQ ID NO: 1472384 - RNA, 17 nt, Human
uauauggaaauucugcu

SEQ ID NO: 1472385 - RNA, 19 nt, Human
uaucaaacaccaacauaaa

SEQ ID NO: 1472386 - RNA, 23 nt, Human
uaucaaacaccaacauaaaaaug

SEQ ID NO: 1472387 - RNA, 14 nt, Human
uaucauagaaaugu

SEQ ID NO: 1472388 - RNA, 15 nt, Human
uaucauagaaaugua

SEQ ID NO: 1472389 - RNA, 17 nt, Human
uaucaugcauguccugu

SEQ ID NO: 1472390 - RNA, 19 nt, Human
uaucaugcauguccuguaa

SEQ ID NO: 1472391 - RNA, 23 nt, Human
uaucauagaaauguaacuuuugu

SEQ ID NO: 1472392 - RNA, 18 nt, Human
uaucauagaaauguaacu

SEQ ID NO: 1472393 - RNA, 21 nt, Human
uaucauauauauacauacaug

SEQ ID NO: 1472394 - RNA, 18 nt, Human
uaucaucagauagcaucu

SEQ ID NO: 1472395 - RNA, 18 nt, Human
uauaaaccgaacugaugu

SEQ ID NO: 1472396 - RNA, 22 nt, Human
uaguugaauuuuuuuuaacauu

SEQ ID NO: 1472397 - RNA, 17 nt, Human
uaguauuguccaggucu

SEQ ID NO: 1472398 - RNA, 16 nt, Human
uaguaggcauuuuuac

SEQ ID NO: 1472399 - RNA, 23 nt, Human
uaguggauuacugccauucacuu

SEQ ID NO: 1472400 - RNA, 17 nt, Human
uaguucuuacugcuuaa

SEQ ID NO: 1472401 - RNA, 17 nt, Human
uaguugaaaauaaagug

SEQ ID NO: 1472402 - RNA, 23 nt, Human
uaguugaauuuuuuuuaacauuc

SEQ ID NO: 1472403 - RNA, 12 nt, Human
uaguugaauuuu

SEQ ID NO: 1472404 - RNA, 23 nt, Human
uaguagcguuuuuuaaauguaua

SEQ ID NO: 1472405 - RNA, 21 nt, Human
uaguagcguuuuuuaaaugua

SEQ ID NO: 1472406 - RNA, 19 nt, Human
uaguagcguuuuuuaaaug

SEQ ID NO: 1472407 - RNA, 20 nt, Human
uaguagcagugauugucuua

SEQ ID NO: 1472408 - RNA, 20 nt, Human
uagguggguugaaagccaag

SEQ ID NO: 1472409 - RNA, 14 nt, Human
uagcugggacuaca

SEQ ID NO: 1472410 - RNA, 21 nt, Human
uagcugucugcucagacagaa

SEQ ID NO: 1472411 - RNA, 21 nt, Human
uaggucuuaauacacacaguu

SEQ ID NO: 1472412 - RNA, 13 nt, Human
uagcauccuggaa

SEQ ID NO: 1472413 - RNA, 15 nt, Human
uagcauccuggaaua

SEQ ID NO: 1472414 - RNA, 16 nt, Human
uagcauccuggaauau

SEQ ID NO: 1472415 - RNA, 18 nt, Human
uagcauccuggaauaucu

SEQ ID NO: 1472416 - RNA, 19 nt, Human
uagauuugugugcaucagg

SEQ ID NO: 1472417 - RNA, 22 nt, Human
uagauuugugugcaucaggcuu

SEQ ID NO: 1472418 - RNA, 20 nt, Human
uagauuugugugcaucaggc

SEQ ID NO: 1472419 - RNA, 14 nt, Human
uagauaggccaugg

SEQ ID NO: 1472420 - RNA, 16 nt, Human
uagccccucuccugga

SEQ ID NO: 1472421 - RNA, 14 nt, Human
uagccccugaaagc

SEQ ID NO: 1472422 - RNA, 14 nt, Human
uagcugaucaguuu

SEQ ID NO: 1472423 - RNA, 11 nt, Human
uagccuggcua

SEQ ID NO: 1472424 - RNA, 13 nt, Human
uagaauaugccuu

SEQ ID NO: 1472425 - RNA, 23 nt, Human
uagaauacaguuuugaguagagu

SEQ ID NO: 1472426 - RNA, 23 nt, Human
uagaauaccacaggaaccacaag

SEQ ID NO: 1472427 - RNA, 14 nt, Human
uacuuguuucagag

SEQ ID NO: 1472428 - RNA, 15 nt, Human
uacuuguuucagagu

SEQ ID NO: 1472429 - RNA, 15 nt, Human
uagaauuaucuaauu

SEQ ID NO: 1472430 - RNA, 16 nt, Human
uagaauuaucuaauuu

SEQ ID NO: 1472431 - RNA, 19 nt, Human
uagaauuaucuaauuuaua

SEQ ID NO: 1472432 - RNA, 21 nt, Human
uagaauuaucuaauuuauaaa

SEQ ID NO: 1472433 - RNA, 22 nt, Human
uagaauuaucuaauuuauaaaa

SEQ ID NO: 1472434 - RNA, 23 nt, Human
uagaauuaucuaauuuauaaaaa

SEQ ID NO: 1472435 - RNA, 21 nt, Human
uagaauuauaacuggaaagaa

SEQ ID NO: 1472436 - RNA, 18 nt, Human
uagaauguaaagcuuguc

SEQ ID NO: 1472437 - RNA, 15 nt, Human
uagaauguaaagcuu

SEQ ID NO: 1472438 - RNA, 17 nt, Human
uagaauguaaagcuugu

SEQ ID NO: 1472439 - RNA, 16 nt, Human
uagaaugauuucaugc

SEQ ID NO: 1472440 - RNA, 12 nt, Human
uagaaugacagu

SEQ ID NO: 1472441 - RNA, 21 nt, Human
uagaaugauuucaugcuaucu

SEQ ID NO: 1472442 - RNA, 22 nt, Human
uagacuucaagcauggcuauuu

SEQ ID NO: 1472443 - RNA, 17 nt, Human
uagacucugucuaccug

SEQ ID NO: 1472444 - RNA, 22 nt, Human
uagacucugucuaccuggucug

SEQ ID NO: 1472445 - RNA, 15 nt, Human
uagaccaccaagccu

SEQ ID NO: 1472446 - RNA, 17 nt, Human
uagaccaccaagccuug

SEQ ID NO: 1472447 - RNA, 16 nt, Human
uagaccaccaagccuu

SEQ ID NO: 1472448 - RNA, 19 nt, Human
uagaccaccaagccuugau

SEQ ID NO: 1472449 - RNA, 16 nt, Human
uagagaagcaaguaaa

SEQ ID NO: 1472450 - RNA, 13 nt, Human
uagagaagcaagu

SEQ ID NO: 1472451 - RNA, 16 nt, Human
uagaggugagaaauuu

SEQ ID NO: 1472452 - RNA, 17 nt, Human
uagaggugagaaauuua

SEQ ID NO: 1472453 - RNA, 21 nt, Human
uacauggcuggagcuagaauu

SEQ ID NO: 1472454 - RNA, 12 nt, Human
uacaugaaacag

SEQ ID NO: 1472455 - RNA, 13 nt, Human
uacaugaaacaga

SEQ ID NO: 1472456 - RNA, 14 nt, Human
uacaugaaacagaa

SEQ ID NO: 1472457 - RNA, 15 nt, Human
uacaugaaacagaaa

SEQ ID NO: 1472458 - RNA, 21 nt, Human
uacaugaaacagaaacaaaaa

SEQ ID NO: 1472459 - RNA, 21 nt, Human
uacaugcacuuggcugcauaa

SEQ ID NO: 1472460 - RNA, 14 nt, Human
uacaugcauacacu

SEQ ID NO: 1472461 - RNA, 20 nt, Human
uacaugcauacacucucaaa

SEQ ID NO: 1472462 - RNA, 21 nt, Human
uacaugcauacacucucaaag

SEQ ID NO: 1472463 - RNA, 20 nt, Human
uacaugcauuacugcaugca

SEQ ID NO: 1472464 - RNA, 17 nt, Human
uacaugcuaagagaagu

SEQ ID NO: 1472465 - RNA, 18 nt, Human
uacaugcuaagagaagua

SEQ ID NO: 1472466 - RNA, 19 nt, Human
uacaugcuaagagaaguag

SEQ ID NO: 1472467 - RNA, 18 nt, Human
uacaguuuugaguagagu

SEQ ID NO: 1472468 - RNA, 13 nt, Human
uacauaacugaaa

SEQ ID NO: 1472469 - RNA, 15 nt, Human
uacauaacugaaaau

SEQ ID NO: 1472470 - RNA, 17 nt, Human
uacauaacugaaaaugu

SEQ ID NO: 1472471 - RNA, 21 nt, Human
uacauaacugaaaaugugcua

SEQ ID NO: 1472472 - RNA, 23 nt, Human
uacaguucggugagcuacaaaug

SEQ ID NO: 1472473 - RNA, 20 nt, Human
uacaggaugaugacuaugga

SEQ ID NO: 1472474 - RNA, 14 nt, Human
uacaggauuugaaa

SEQ ID NO: 1472475 - RNA, 21 nt, Human
uacagcucagaaguuucuucu

SEQ ID NO: 1472476 - RNA, 15 nt, Human
uacaaccuccgccuc

SEQ ID NO: 1472477 - RNA, 16 nt, Human
uacaaccaauggaaug

SEQ ID NO: 1472478 - RNA, 22 nt, Human
uacaacggagucaaaaauuaaa

SEQ ID NO: 1472479 - RNA, 15 nt, Human
uacaacggagucaaa

SEQ ID NO: 1472480 - RNA, 14 nt, Human
uacaagaagcauuu

SEQ ID NO: 1472481 - RNA, 15 nt, Human
uacaagaagcauuuu

SEQ ID NO: 1472482 - RNA, 21 nt, Human
uacacauguaucuaugcauuu

SEQ ID NO: 1472483 - RNA, 21 nt, Human
uacacucucaaagcaaauaau

SEQ ID NO: 1472484 - RNA, 20 nt, Human
uaauuccuucagcacuuuag

SEQ ID NO: 1472485 - RNA, 21 nt, Human
uaauuccuucagcacuuuaga

SEQ ID NO: 1472486 - RNA, 15 nt, Human
uaauucuaugagaua

SEQ ID NO: 1472487 - RNA, 14 nt, Human
uaauuccuucagca

SEQ ID NO: 1472488 - RNA, 18 nt, Human
uaauuuugugaagcaaaa

SEQ ID NO: 1472489 - RNA, 12 nt, Human
uaauuuuuauau

SEQ ID NO: 1472490 - RNA, 16 nt, Human
uaauuuuuauauuuga

SEQ ID NO: 1472491 - RNA, 17 nt, Human
uaauuuuuauauuugaa

SEQ ID NO: 1472492 - RNA, 19 nt, Human
uacaaacucccacuuguca

SEQ ID NO: 1472493 - RNA, 17 nt, Human
uacaaagcccuuuuaua

SEQ ID NO: 1472494 - RNA, 18 nt, Human
uacaaaggcuuauuaauu

SEQ ID NO: 1472495 - RNA, 22 nt, Human
uaccaaaaaucucaauauuuca

SEQ ID NO: 1472496 - RNA, 20 nt, Human
uacauuuuuugggcagcaau

SEQ ID NO: 1472497 - RNA, 20 nt, Human
uaccguaggcuuuguauuca

SEQ ID NO: 1472498 - RNA, 17 nt, Human
uaccuaagaaguacauu

SEQ ID NO: 1472499 - RNA, 13 nt, Human
uaccuacuuugac

SEQ ID NO: 1472500 - RNA, 14 nt, Human
uaccuacuuugacu

SEQ ID NO: 1472501 - RNA, 21 nt, Human
uaccuacuuugacuuuuugca

SEQ ID NO: 1472502 - RNA, 15 nt, Human
uaccuagcuggcucu

SEQ ID NO: 1472503 - RNA, 18 nt, Human
uacuaaagccaaacauau

SEQ ID NO: 1472504 - RNA, 14 nt, Human
uacuaaagccaaac

SEQ ID NO: 1472505 - RNA, 20 nt, Human
uacuaagcauugaauggcua

SEQ ID NO: 1472506 - RNA, 19 nt, Human
uacuaaggaagauuacuca

SEQ ID NO: 1472507 - RNA, 20 nt, Human
uaccuuuuuauuugcaugug

SEQ ID NO: 1472508 - RNA, 23 nt, Human
uaccucuccagccucagcucuca

SEQ ID NO: 1472509 - RNA, 15 nt, Human
uaccucuauauacca

SEQ ID NO: 1472510 - RNA, 16 nt, Human
uaccucuauauaccaa

SEQ ID NO: 1472511 - RNA, 15 nt, Human
uacugcucuccucca

SEQ ID NO: 1472512 - RNA, 20 nt, Human
uacugcuuaauucaaauaau

SEQ ID NO: 1472513 - RNA, 19 nt, Human
uacugcuuaauucaaauaa

SEQ ID NO: 1472514 - RNA, 13 nt, Human
uacugcuuaauuc

SEQ ID NO: 1472515 - RNA, 20 nt, Human
uacugcugagauacauacag

SEQ ID NO: 1472516 - RNA, 21 nt, Human
uacugcugagauacauacaga

SEQ ID NO: 1472517 - RNA, 24 nt, Human
uacugcuuggagcugagcaaauca

SEQ ID NO: 1472518 - RNA, 19 nt, Human
uacugcuuggagcugagca

SEQ ID NO: 1472519 - RNA, 19 nt, Human
uacuugcucuugaugccug

SEQ ID NO: 1472520 - RNA, 18 nt, Human
uacuugcucuugaugccu

SEQ ID NO: 1472521 - RNA, 14 nt, Human
uacuugcucuugau

SEQ ID NO: 1472522 - RNA, 13 nt, Human
uacuugcucuuga

SEQ ID NO: 1472523 - RNA, 20 nt, Human
uacuugcucuugaugccugg

SEQ ID NO: 1472524 - RNA, 21 nt, Human
uacugccuauuuuaauaaaca

SEQ ID NO: 1472525 - RNA, 14 nt, Human
uacugccuauuuua

SEQ ID NO: 1472526 - RNA, 20 nt, Human
uacugccauucacuucauaa

SEQ ID NO: 1472527 - RNA, 22 nt, Human
uacugccgucagugcugugcug

SEQ ID NO: 1472528 - RNA, 13 nt, Human
uacugcaugcacu

SEQ ID NO: 1472529 - RNA, 21 nt, Human
uacugcaagguucaacuuauu

SEQ ID NO: 1472530 - RNA, 12 nt, Human
uacugcagccuc

SEQ ID NO: 1472531 - RNA, 17 nt, Human
uacugcagccuccagag

SEQ ID NO: 1472532 - RNA, 11 nt, Human
uacucauuuuu

SEQ ID NO: 1472533 - RNA, 14 nt, Human
uacucauuuuucau

SEQ ID NO: 1472534 - RNA, 16 nt, Human
uacucauuuuucauga

SEQ ID NO: 1472535 - RNA, 12 nt, Human
uaaguccagugu

SEQ ID NO: 1472536 - RNA, 13 nt, Human
uaagucagaacag

SEQ ID NO: 1472537 - RNA, 22 nt, Human
uaagugauugcugguuuuaguu

SEQ ID NO: 1472538 - RNA, 16 nt, Human
uaagugauuguaugaa

SEQ ID NO: 1472539 - RNA, 20 nt, Human
uaauaaaggacuguaaucuu

SEQ ID NO: 1472540 - RNA, 16 nt, Human
uaauaaaggacuguaa

SEQ ID NO: 1472541 - RNA, 13 nt, Human
uaauaaaggacug

SEQ ID NO: 1472542 - RNA, 12 nt, Human
uaauaaaggacu

SEQ ID NO: 1472543 - RNA, 12 nt, Human
uaauaaagcugu

SEQ ID NO: 1472544 - RNA, 14 nt, Human
uaaggcaaucaugg

SEQ ID NO: 1472545 - RNA, 22 nt, Human
uaagcgcuagaggaagcagcca

SEQ ID NO: 1472546 - RNA, 19 nt, Human
uaaggggaggaaccagagu

SEQ ID NO: 1472547 - RNA, 19 nt, Human
uaagggccagaaauaucuu

SEQ ID NO: 1472548 - RNA, 13 nt, Human
uaagggaagaauu

SEQ ID NO: 1472549 - RNA, 18 nt, Human
uaagguacaagaagcauu

SEQ ID NO: 1472550 - RNA, 19 nt, Human
uaagguacaagaagcauuu

SEQ ID NO: 1472551 - RNA, 13 nt, Human
uaagguguagcca

SEQ ID NO: 1472552 - RNA, 19 nt, Human
uaagguguagccacaccag

SEQ ID NO: 1472553 - RNA, 21 nt, Human
uaagguguagccacaccagga

SEQ ID NO: 1472554 - RNA, 14 nt, Human
uaagucagaacagc

SEQ ID NO: 1472555 - RNA, 14 nt, Human
uaauaauguuucaa

SEQ ID NO: 1472556 - RNA, 23 nt, Human
uaauaucccacugggagaaagga

SEQ ID NO: 1472557 - RNA, 12 nt, Human
uaauauccuaaa

SEQ ID NO: 1472558 - RNA, 14 nt, Human
uaauauccuaaaca

SEQ ID NO: 1472559 - RNA, 17 nt, Human
uaauauccuaaacauca

SEQ ID NO: 1472560 - RNA, 15 nt, Human
uaauauccuaaacau

SEQ ID NO: 1472561 - RNA, 14 nt, Human
uaauccccuucucc

SEQ ID NO: 1472562 - RNA, 15 nt, Human
uaauccccuucuccc

SEQ ID NO: 1472563 - RNA, 17 nt, Human
uaauccccuucuccccu

SEQ ID NO: 1472564 - RNA, 18 nt, Human
uaauccccuucuccccug

SEQ ID NO: 1472565 - RNA, 21 nt, Human
uaauccccuucuccccugcac

SEQ ID NO: 1472566 - RNA, 13 nt, Human
uaaucugccuccc

SEQ ID NO: 1472567 - RNA, 14 nt, Human
uaaucuagaacaca

SEQ ID NO: 1472568 - RNA, 22 nt, Human
uaaucuagaacacaggcaaaau

SEQ ID NO: 1472569 - RNA, 15 nt, Human
uaaucugccucccuc

SEQ ID NO: 1472570 - RNA, 17 nt, Human
uaaugauaacuggaaac

SEQ ID NO: 1472571 - RNA, 22 nt, Human
uaaugauaacuggaaacuucag

SEQ ID NO: 1472572 - RNA, 23 nt, Human
uaaugauaacuggaaacuucagc

SEQ ID NO: 1472573 - RNA, 17 nt, Human
uaauggcaugagaaaua

SEQ ID NO: 1472574 - RNA, 21 nt, Human
uaauggcugauaauuuuaaau

SEQ ID NO: 1472575 - RNA, 15 nt, Human
uaauggcaugagaaa

SEQ ID NO: 1472576 - RNA, 22 nt, Human
uaauggcugauaauuuuaaauu

SEQ ID NO: 1472577 - RNA, 21 nt, Human
uaauguuggguagaaagagau

SEQ ID NO: 1472578 - RNA, 21 nt, Human
uaauguuguaugucuuguuua

SEQ ID NO: 1472579 - RNA, 20 nt, Human
uaauguuguaugucuuguuu

SEQ ID NO: 1472580 - RNA, 22 nt, Human
uaauguuucaaacauauauaac

SEQ ID NO: 1472581 - RNA, 13 nt, Human
uaaauucuuucau

SEQ ID NO: 1472582 - RNA, 15 nt, Human
uaaauuuauuuucuu

SEQ ID NO: 1472583 - RNA, 20 nt, Human
uaaauuucuauuuuuaucug

SEQ ID NO: 1472584 - RNA, 22 nt, Human
uaaauucucucucuugcaggaa

SEQ ID NO: 1472585 - RNA, 13 nt, Human
uaaauguauacua

SEQ ID NO: 1472586 - RNA, 12 nt, Human
uaaauguauacu

SEQ ID NO: 1472587 - RNA, 13 nt, Human
uaaauguaaagau

SEQ ID NO: 1472588 - RNA, 16 nt, Human
uaaauguaaagauauu

SEQ ID NO: 1472589 - RNA, 17 nt, Human
uaaauguaaagauauuu

SEQ ID NO: 1472590 - RNA, 20 nt, Human
uaaauguauacuauaguacc

SEQ ID NO: 1472591 - RNA, 17 nt, Human
uaaauguauacuauagu

SEQ ID NO: 1472592 - RNA, 15 nt, Human
uaaauguauacuaua

SEQ ID NO: 1472593 - RNA, 20 nt, Human
uaaauggcuuccuggcaaua

SEQ ID NO: 1472594 - RNA, 17 nt, Human
uaaauggggcucacaaa

SEQ ID NO: 1472595 - RNA, 17 nt, Human
uaaaguugguaaaccuu

SEQ ID NO: 1472596 - RNA, 16 nt, Human
uaaaguugauaaagau

SEQ ID NO: 1472597 - RNA, 20 nt, Human
uaaaguugauaaagauuuuu

SEQ ID NO: 1472598 - RNA, 16 nt, Human
uaaaguugguaaaccu

SEQ ID NO: 1472599 - RNA, 18 nt, Human
uaaaguuguuugugccuu

SEQ ID NO: 1472600 - RNA, 14 nt, Human
uaagagagaaugag

SEQ ID NO: 1472601 - RNA, 23 nt, Human
uaagagagaaugagagacacacu

SEQ ID NO: 1472602 - RNA, 13 nt, Human
uaagagagaauga

SEQ ID NO: 1472603 - RNA, 18 nt, Human
uaagaaccauugauuuaa

SEQ ID NO: 1472604 - RNA, 16 nt, Human
uaagaacaacuaccug

SEQ ID NO: 1472605 - RNA, 21 nt, Human
uaagaaaauaucacuugucaa

SEQ ID NO: 1472606 - RNA, 20 nt, Human
uaagaaacuuuuuuauuuaa

SEQ ID NO: 1472607 - RNA, 23 nt, Human
uaagaaaccuacugcccaggcac

SEQ ID NO: 1472608 - RNA, 19 nt, Human
uaagaaacuuuuuuauuua

SEQ ID NO: 1472609 - RNA, 21 nt, Human
uaagaaacuuuuuuauuuaaa

SEQ ID NO: 1472610 - RNA, 15 nt, Human
uaacuggaaacuuca

SEQ ID NO: 1472611 - RNA, 13 nt, Human
uaacuggaaagaa

SEQ ID NO: 1472612 - RNA, 15 nt, Human
uaacuggaaagaagu

SEQ ID NO: 1472613 - RNA, 14 nt, Human
uaacuggaaagaag

SEQ ID NO: 1472614 - RNA, 13 nt, Human
uaacuuuuguaag

SEQ ID NO: 1472615 - RNA, 18 nt, Human
uaacuuuuguaagacaaa

SEQ ID NO: 1472616 - RNA, 23 nt, Human
uaacuauugcauuuauauguacc

SEQ ID NO: 1472617 - RNA, 21 nt, Human
uaacuauugcauuuauaugua

SEQ ID NO: 1472618 - RNA, 16 nt, Human
uaacuauugcauuuau

SEQ ID NO: 1472619 - RNA, 15 nt, Human
uaacuauugcauuua

SEQ ID NO: 1472620 - RNA, 14 nt, Human
uaacugacuauucu

SEQ ID NO: 1472621 - RNA, 21 nt, Human
uaacugacuauucuugaugua

SEQ ID NO: 1472622 - RNA, 22 nt, Human
uaacugacuauucuugauguaa

SEQ ID NO: 1472623 - RNA, 14 nt, Human
uaacucucuuuaug

SEQ ID NO: 1472624 - RNA, 14 nt, Human
uaacugaaaaugug

SEQ ID NO: 1472625 - RNA, 20 nt, Human
uaacugaaaaugugcuauac

SEQ ID NO: 1472626 - RNA, 21 nt, Human
uaacugaaaaugugcuauacu

SEQ ID NO: 1472627 - RNA, 20 nt, Human
uaacugaaaauuauuuaaac

SEQ ID NO: 1472628 - RNA, 13 nt, Human
uaaccagaucauu

SEQ ID NO: 1472629 - RNA, 20 nt, Human
uaaccagacacauacucauu

SEQ ID NO: 1472630 - RNA, 22 nt, Human
uaaccagacacauacucauuuu

SEQ ID NO: 1472631 - RNA, 11 nt, Human
uaacauuccuc

SEQ ID NO: 1472632 - RNA, 20 nt, Human
uaacauuccucaugaaugua

SEQ ID NO: 1472633 - RNA, 21 nt, Human
uaacauuccucaugaauguaa

SEQ ID NO: 1472634 - RNA, 22 nt, Human
uaacauuccucaugaauguaaa

SEQ ID NO: 1472635 - RNA, 23 nt, Human
uaacauuccucaugaauguaaau

SEQ ID NO: 1472636 - RNA, 22 nt, Human
guuucauauuuuucauagcuaa

SEQ ID NO: 1472637 - RNA, 16 nt, Human
guuucauccuuuucau

SEQ ID NO: 1472638 - RNA, 18 nt, Human
guuuaugaaaaagaagaa

SEQ ID NO: 1472639 - RNA, 20 nt, Human
guuuagcuggaaaaguaugu

SEQ ID NO: 1472640 - RNA, 21 nt, Human
guuuagcuggaaaaguauguu

SEQ ID NO: 1472641 - RNA, 19 nt, Human
guuuaggaacuacugagga

SEQ ID NO: 1472642 - RNA, 20 nt, Human
guuuauauaagcuuguauuc

SEQ ID NO: 1472643 - RNA, 18 nt, Human
guuuaguggcucaacauu

SEQ ID NO: 1472644 - RNA, 16 nt, Human
guuuagaacacacaca

SEQ ID NO: 1472645 - RNA, 15 nt, Human
guuuaccagaaagca

SEQ ID NO: 1472646 - RNA, 19 nt, Human
guugucugcaacucugaag

SEQ ID NO: 1472647 - RNA, 13 nt, Human
guugugcuugagc

SEQ ID NO: 1472648 - RNA, 18 nt, Human
guuguggguaguggggaa

SEQ ID NO: 1472649 - RNA, 17 nt, Human
guuguccucagccccgc

SEQ ID NO: 1472650 - RNA, 23 nt, Human
guuguccucagccccgcguggaa

SEQ ID NO: 1472651 - RNA, 22 nt, Human
guuguccuccuuccggggaagg

SEQ ID NO: 1472652 - RNA, 20 nt, Human
guuguccuccuuccggggaa

SEQ ID NO: 1472653 - RNA, 17 nt, Human
guuuuaaaaugagaaau

SEQ ID NO: 1472654 - RNA, 20 nt, Human
guuuucaaaauuguuacaaa

SEQ ID NO: 1472655 - RNA, 16 nt, Human
guuuuaaaaugagaaa

SEQ ID NO: 1472656 - RNA, 15 nt, Human
guuuuaaaaugagaa

SEQ ID NO: 1472657 - RNA, 21 nt, Human
guuuuccuaugcuuugaaaca

SEQ ID NO: 1472658 - RNA, 17 nt, Human
guuuuccuaugcuuuga

SEQ ID NO: 1472659 - RNA, 17 nt, Human
guuuuggugguuuuagu

SEQ ID NO: 1472660 - RNA, 17 nt, Human
guuuccuccaagcuauu

SEQ ID NO: 1472661 - RNA, 18 nt, Human
guuucccuacugaagccc

SEQ ID NO: 1472662 - RNA, 22 nt, Human
guuucuuaaauaagaaacuuuu

SEQ ID NO: 1472663 - RNA, 21 nt, Human
guuucuuaaauaagaaacuuu

SEQ ID NO: 1472664 - RNA, 19 nt, Human
guuucuuuguaaugaaaac

SEQ ID NO: 1472665 - RNA, 13 nt, Human
guuuggugcuucu

SEQ ID NO: 1472666 - RNA, 15 nt, Human
uaaaauccauacauu

SEQ ID NO: 1472667 - RNA, 17 nt, Human
uaaaauccauacauuug

SEQ ID NO: 1472668 - RNA, 22 nt, Human
uaaaagguauuaaauugauguu

SEQ ID NO: 1472669 - RNA, 21 nt, Human
uaaaaggaaagaaaacaucuu

SEQ ID NO: 1472670 - RNA, 15 nt, Human
uaaaaggaaagaaaa

SEQ ID NO: 1472671 - RNA, 18 nt, Human
uaaaagcaaaaaagaaaa

SEQ ID NO: 1472672 - RNA, 19 nt, Human
uaaaagcaaaaaagaaaac

SEQ ID NO: 1472673 - RNA, 20 nt, Human
uaaaagcaaaaaagaaaacc

SEQ ID NO: 1472674 - RNA, 22 nt, Human
uaaaagcaaaaaagaaaaccuu

SEQ ID NO: 1472675 - RNA, 23 nt, Human
uaaaagcaaaaaagaaaaccuuu

SEQ ID NO: 1472676 - RNA, 12 nt, Human
uaaaagcaaaaa

SEQ ID NO: 1472677 - RNA, 16 nt, Human
uaaaagcaaaaaagaa

SEQ ID NO: 1472678 - RNA, 17 nt, Human
uaaaagcaaaaaagaaa

SEQ ID NO: 1472679 - RNA, 22 nt, Human
uaaaacagguagaauuaucuaa

SEQ ID NO: 1472680 - RNA, 17 nt, Human
uaaaacaucauuacuau

SEQ ID NO: 1472681 - RNA, 14 nt, Human
uaaaacauuuauuu

SEQ ID NO: 1472682 - RNA, 20 nt, Human
uaaaacauuuauuuugacau

SEQ ID NO: 1472683 - RNA, 21 nt, Human
uaaaaacaaagaaauuaugug

SEQ ID NO: 1472684 - RNA, 18 nt, Human
guuuuuaauguauaguaa

SEQ ID NO: 1472685 - RNA, 12 nt, Human
guuuuuaaugua

SEQ ID NO: 1472686 - RNA, 13 nt, Human
guuuuuaauguau

SEQ ID NO: 1472687 - RNA, 14 nt, Human
uaaaaagaucacuu

SEQ ID NO: 1472688 - RNA, 18 nt, Human
uaaaaagauugaaguauu

SEQ ID NO: 1472689 - RNA, 20 nt, Human
uaaaaagauugaaguauuuu

SEQ ID NO: 1472690 - RNA, 22 nt, Human
uaaaacaagcacuaaacaaaga

SEQ ID NO: 1472691 - RNA, 21 nt, Human
uaaaaauguucuauuuuaauu

SEQ ID NO: 1472692 - RNA, 11 nt, Human
uaaaacacuug

SEQ ID NO: 1472693 - RNA, 13 nt, Human
uaaaacagacacu

SEQ ID NO: 1472694 - RNA, 15 nt, Human
uaaaacagacacugg

SEQ ID NO: 1472695 - RNA, 17 nt, Human
uaaaacagacacuggca

SEQ ID NO: 1472696 - RNA, 18 nt, Human
uaaaacagacacuggcau

SEQ ID NO: 1472697 - RNA, 19 nt, Human
uaaaacagacacuggcaug

SEQ ID NO: 1472698 - RNA, 21 nt, Human
uaaaacagguagaauuaucua

SEQ ID NO: 1472699 - RNA, 14 nt, Human
uaaaggaauuuaaa

SEQ ID NO: 1472700 - RNA, 15 nt, Human
uaaagcugguuuaau

SEQ ID NO: 1472701 - RNA, 19 nt, Human
uaaagcugguuuaauguuu

SEQ ID NO: 1472702 - RNA, 11 nt, Human
uaaagcuuguc

SEQ ID NO: 1472703 - RNA, 14 nt, Human
uaaaguguuugaaa

SEQ ID NO: 1472704 - RNA, 15 nt, Human
uaaaguucaacaugu

SEQ ID NO: 1472705 - RNA, 18 nt, Human
uaaaguucaacauguuau

SEQ ID NO: 1472706 - RNA, 15 nt, Human
uaaagccaugcugga

SEQ ID NO: 1472707 - RNA, 18 nt, Human
uaaagcaggcagaacuca

SEQ ID NO: 1472708 - RNA, 18 nt, Human
uaaacacucuugaaaaau

SEQ ID NO: 1472709 - RNA, 15 nt, Human
uaaacaucauucauu

SEQ ID NO: 1472710 - RNA, 17 nt, Human
uaaacaucauucauuuu

SEQ ID NO: 1472711 - RNA, 17 nt, Human
uaaacacucuugaaaaa

SEQ ID NO: 1472712 - RNA, 15 nt, Human
uaaacacucuugaaa

SEQ ID NO: 1472713 - RNA, 15 nt, Human
uaaaaucuugucaug

SEQ ID NO: 1472714 - RNA, 16 nt, Human
uaaaaucuugucaugu

SEQ ID NO: 1472715 - RNA, 18 nt, Human
uaaaaucuugucaugugu

SEQ ID NO: 1472716 - RNA, 18 nt, Human
uaaaauccauacauuugu

SEQ ID NO: 1472717 - RNA, 11 nt, Human
uaaaaucuugu

SEQ ID NO: 1472718 - RNA, 12 nt, Human
uaaaaucuuguc

SEQ ID NO: 1472719 - RNA, 14 nt, Human
uaaaaucuugucau

SEQ ID NO: 1472720 - RNA, 14 nt, Human
uaaagaaaaacaaa

SEQ ID NO: 1472721 - RNA, 15 nt, Human
uaaagaaaaacaaac

SEQ ID NO: 1472722 - RNA, 15 nt, Human
uaaacuguguacaua

SEQ ID NO: 1472723 - RNA, 18 nt, Human
uaaacuguguacauaacu

SEQ ID NO: 1472724 - RNA, 17 nt, Human
uaaacuguguauuccaa

SEQ ID NO: 1472725 - RNA, 22 nt, Human
uaaacuguguauuccaagacau

SEQ ID NO: 1472726 - RNA, 18 nt, Human
guuccuuggccaugcaga

SEQ ID NO: 1472727 - RNA, 12 nt, Human
guucugaagaag

SEQ ID NO: 1472728 - RNA, 13 nt, Human
guucugaagaaga

SEQ ID NO: 1472729 - RNA, 14 nt, Human
guucugaagaagau

SEQ ID NO: 1472730 - RNA, 15 nt, Human
guucugaagaagaug

SEQ ID NO: 1472731 - RNA, 12 nt, Human
guucugccagga

SEQ ID NO: 1472732 - RNA, 13 nt, Human
guucugccaggag

SEQ ID NO: 1472733 - RNA, 14 nt, Human
guucugccaggaga

SEQ ID NO: 1472734 - RNA, 22 nt, Human
guugaaaauaaaguguauauuu

SEQ ID NO: 1472735 - RNA, 23 nt, Human
guugaagcaaaucgaaugaaauu

SEQ ID NO: 1472736 - RNA, 20 nt, Human
guugauggugguauguuuuc

SEQ ID NO: 1472737 - RNA, 21 nt, Human
guugauggugguauguuuuca

SEQ ID NO: 1472738 - RNA, 16 nt, Human
guugaaauaugauguu

SEQ ID NO: 1472739 - RNA, 18 nt, Human
guugaagagguuuuaaag

SEQ ID NO: 1472740 - RNA, 18 nt, Human
guugaagcaaaucgaaug

SEQ ID NO: 1472741 - RNA, 14 nt, Human
guugcaacuuugua

SEQ ID NO: 1472742 - RNA, 16 nt, Human
guugauuacagugcag

SEQ ID NO: 1472743 - RNA, 16 nt, Human
guugcaacuuuguaua

SEQ ID NO: 1472744 - RNA, 16 nt, Human
guugcacagcuaugaa

SEQ ID NO: 1472745 - RNA, 23 nt, Human
guugcagcccugcugcugccugc

SEQ ID NO: 1472746 - RNA, 16 nt, Human
guugcagacaggaauc

SEQ ID NO: 1472747 - RNA, 20 nt, Human
guugcagacaggaaucuuaa

SEQ ID NO: 1472748 - RNA, 20 nt, Human
guugcauuaaaaaugcauau

SEQ ID NO: 1472749 - RNA, 14 nt, Human
guugcagacaggaa

SEQ ID NO: 1472750 - RNA, 15 nt, Human
guugcagacaggaau

SEQ ID NO: 1472751 - RNA, 15 nt, Human
guuggagugcagugg

SEQ ID NO: 1472752 - RNA, 14 nt, Human
guuggagugcagug

SEQ ID NO: 1472753 - RNA, 16 nt, Human
guugccaguuguccuc

SEQ ID NO: 1472754 - RNA, 23 nt, Human
guuaccucugccucagaaaacaa

SEQ ID NO: 1472755 - RNA, 17 nt, Human
guuaccucuauauacca

SEQ ID NO: 1472756 - RNA, 21 nt, Human
guuaccucuauauaccaaagc

SEQ ID NO: 1472757 - RNA, 20 nt, Human
guuacccaguaacucaucug

SEQ ID NO: 1472758 - RNA, 13 nt, Human
guuaccuacuuug

SEQ ID NO: 1472759 - RNA, 16 nt, Human
guuaccuacuuugacu

SEQ ID NO: 1472760 - RNA, 16 nt, Human
guuacccaaauuaaga

SEQ ID NO: 1472761 - RNA, 14 nt, Human
guuacauguuugca

SEQ ID NO: 1472762 - RNA, 16 nt, Human
guuacauguuugcacc

SEQ ID NO: 1472763 - RNA, 15 nt, Human
guuacuacaugcacu

SEQ ID NO: 1472764 - RNA, 19 nt, Human
guuaucuaauagggcaauu

SEQ ID NO: 1472765 - RNA, 15 nt, Human
guuaucuaaguuaau

SEQ ID NO: 1472766 - RNA, 18 nt, Human
guuaucuaaguuaauuua

SEQ ID NO: 1472767 - RNA, 21 nt, Human
guuaucuaaguuaauuuaaag

SEQ ID NO: 1472768 - RNA, 20 nt, Human
guuauccaccugccuuggcu

SEQ ID NO: 1472769 - RNA, 15 nt, Human
guuaugacuauguaa

SEQ ID NO: 1472770 - RNA, 17 nt, Human
guuaugacuauguaaac

SEQ ID NO: 1472771 - RNA, 13 nt, Human
guuauauaaucau

SEQ ID NO: 1472772 - RNA, 17 nt, Human
guuauuauauuuacaaa

SEQ ID NO: 1472773 - RNA, 20 nt, Human
guuaugauuuuuuuuucaua

SEQ ID NO: 1472774 - RNA, 13 nt, Human
guuaugcugugac

SEQ ID NO: 1472775 - RNA, 21 nt, Human
guucaauauaagcuuuucuuu

SEQ ID NO: 1472776 - RNA, 12 nt, Human
guucacauuuuu

SEQ ID NO: 1472777 - RNA, 12 nt, Human
guucaugagaau

SEQ ID NO: 1472778 - RNA, 19 nt, Human
guucaugagaaucuauauu

SEQ ID NO: 1472779 - RNA, 14 nt, Human
guucaugagaaucu

SEQ ID NO: 1472780 - RNA, 12 nt, Human
guucaugaaaga

SEQ ID NO: 1472781 - RNA, 16 nt, Human
guucauccauucuauu

SEQ ID NO: 1472782 - RNA, 15 nt, Human
guucauuccuccagg

SEQ ID NO: 1472783 - RNA, 13 nt, Human
guucauuuccuca

SEQ ID NO: 1472784 - RNA, 14 nt, Human
guucauuccuccag

SEQ ID NO: 1472785 - RNA, 13 nt, Human
guucauuccucca

SEQ ID NO: 1472786 - RNA, 12 nt, Human
guuccugcaugc

SEQ ID NO: 1472787 - RNA, 12 nt, Human
guguguuuuaaa

SEQ ID NO: 1472788 - RNA, 18 nt, Human
guguggagagggaaugug

SEQ ID NO: 1472789 - RNA, 20 nt, Human
guguggagagggaaugugaa

SEQ ID NO: 1472790 - RNA, 19 nt, Human
guguggcuuucagagccuc

SEQ ID NO: 1472791 - RNA, 11 nt, Human
gugugggagac

SEQ ID NO: 1472792 - RNA, 21 nt, Human
guguggagagggaaugugaaa

SEQ ID NO: 1472793 - RNA, 17 nt, Human
gugugcucaggagcccu

SEQ ID NO: 1472794 - RNA, 16 nt, Human
gugugcucaggagccc

SEQ ID NO: 1472795 - RNA, 19 nt, Human
gugugcucaggagcccugg

SEQ ID NO: 1472796 - RNA, 18 nt, Human
gugugcucaggagcccug

SEQ ID NO: 1472797 - RNA, 21 nt, Human
guguccugcaccggggccugg

SEQ ID NO: 1472798 - RNA, 16 nt, Human
gugucugagagauuca

SEQ ID NO: 1472799 - RNA, 17 nt, Human
gugucuggcacagccug

SEQ ID NO: 1472800 - RNA, 15 nt, Human
gugucugcucaguaa

SEQ ID NO: 1472801 - RNA, 20 nt, Human
gugugcacaaauauuuauuu

SEQ ID NO: 1472802 - RNA, 17 nt, Human
guuaacuauugcauuua

SEQ ID NO: 1472803 - RNA, 18 nt, Human
guguuuuucauaaagcag

SEQ ID NO: 1472804 - RNA, 13 nt, Human
guguucugugaua

SEQ ID NO: 1472805 - RNA, 17 nt, Human
guguucccauuucagcu

SEQ ID NO: 1472806 - RNA, 17 nt, Human
guguuccccacuguauc

SEQ ID NO: 1472807 - RNA, 21 nt, Human
guguucccauuucagcugauc

SEQ ID NO: 1472808 - RNA, 14 nt, Human
guguguuuuucaua

SEQ ID NO: 1472809 - RNA, 19 nt, Human
guguguuuuaaaaugagaa

SEQ ID NO: 1472810 - RNA, 16 nt, Human
guguguuuuaaaauga

SEQ ID NO: 1472811 - RNA, 13 nt, Human
guguguuuuaaaa

SEQ ID NO: 1472812 - RNA, 12 nt, Human
guguuaauuuuu

SEQ ID NO: 1472813 - RNA, 15 nt, Human
guguuaauuuuugau

SEQ ID NO: 1472814 - RNA, 23 nt, Human
guguuacccaguaacucaucugu

SEQ ID NO: 1472815 - RNA, 14 nt, Human
guguaugcacagua

SEQ ID NO: 1472816 - RNA, 19 nt, Human
guguauggaaauaaaugua

SEQ ID NO: 1472817 - RNA, 21 nt, Human
gugucccauucccccagugcg

SEQ ID NO: 1472818 - RNA, 12 nt, Human
guguauauauau

SEQ ID NO: 1472819 - RNA, 14 nt, Human
guguaucucacacu

SEQ ID NO: 1472820 - RNA, 14 nt, Human
guguagcuuugcuc

SEQ ID NO: 1472821 - RNA, 12 nt, Human
guguauaaaaau

SEQ ID NO: 1472822 - RNA, 14 nt, Human
guguauaaaaauaa

SEQ ID NO: 1472823 - RNA, 18 nt, Human
guguauaaaaauaaaaaa

SEQ ID NO: 1472824 - RNA, 16 nt, Human
guguagcaacuacagu

SEQ ID NO: 1472825 - RNA, 17 nt, Human
guguagccacaccagga

SEQ ID NO: 1472826 - RNA, 16 nt, Human
guguacauaacugaaa

SEQ ID NO: 1472827 - RNA, 14 nt, Human
guguacauaacuga

SEQ ID NO: 1472828 - RNA, 18 nt, Human
guguaauugagaaggaaa

SEQ ID NO: 1472829 - RNA, 17 nt, Human
guguaagacaaaaagcu

SEQ ID NO: 1472830 - RNA, 17 nt, Human
guggugcgagugcguga

SEQ ID NO: 1472831 - RNA, 19 nt, Human
guguaagggccagaaauau

SEQ ID NO: 1472832 - RNA, 21 nt, Human
guguaaguagauaggccaugg

SEQ ID NO: 1472833 - RNA, 13 nt, Human
gugguagagaagc

SEQ ID NO: 1472834 - RNA, 15 nt, Human
gugggcauucaaaug

SEQ ID NO: 1472835 - RNA, 12 nt, Human
gugguaaaaagg

SEQ ID NO: 1472836 - RNA, 18 nt, Human
guggguuuuuuaguugaa

SEQ ID NO: 1472837 - RNA, 21 nt, Human
guggggagagacgggcccugg

SEQ ID NO: 1472838 - RNA, 12 nt, Human
guggggaguggg

SEQ ID NO: 1472839 - RNA, 15 nt, Human
gugcuaauuuugaaa

SEQ ID NO: 1472840 - RNA, 13 nt, Human
gugcuaauuuuga

SEQ ID NO: 1472841 - RNA, 13 nt, Human
guggcuggggcau

SEQ ID NO: 1472842 - RNA, 18 nt, Human
gugcacuggccccacccu

SEQ ID NO: 1472843 - RNA, 17 nt, Human
gugcacuggccccaccc

SEQ ID NO: 1472844 - RNA, 16 nt, Human
gugcacuggccccacc

SEQ ID NO: 1472845 - RNA, 13 nt, Human
gugcacuggcccc

SEQ ID NO: 1472846 - RNA, 21 nt, Human
gugauuuuuaugccaccugaa

SEQ ID NO: 1472847 - RNA, 24 nt, Human
gugauccacccgccucagccuccc

SEQ ID NO: 1472848 - RNA, 20 nt, Human
gugauccacccgccucagcc

SEQ ID NO: 1472849 - RNA, 18 nt, Human
gugauuuacgcucauugu

SEQ ID NO: 1472850 - RNA, 19 nt, Human
gugcagcccccacugccuu

SEQ ID NO: 1472851 - RNA, 24 nt, Human
gugcaguggcgugaucucagcuca

SEQ ID NO: 1472852 - RNA, 11 nt, Human
gugcaucaggc

SEQ ID NO: 1472853 - RNA, 20 nt, Human
gugcaucaggcuuucuuuuu

SEQ ID NO: 1472854 - RNA, 13 nt, Human
gugcguggugcga

SEQ ID NO: 1472855 - RNA, 15 nt, Human
gugcguggugguccc

SEQ ID NO: 1472856 - RNA, 19 nt, Human
gugcgugguggucccuggg

SEQ ID NO: 1472857 - RNA, 20 nt, Human
gugcgugguggucccugggu

SEQ ID NO: 1472858 - RNA, 13 nt, Human
gugcgugaauauu

SEQ ID NO: 1472859 - RNA, 23 nt, Human
gugccuuccuguuuuucacauuu

SEQ ID NO: 1472860 - RNA, 11 nt, Human
gugccuucauu

SEQ ID NO: 1472861 - RNA, 12 nt, Human
gugccuucauuu

SEQ ID NO: 1472862 - RNA, 14 nt, Human
gugccuucauuugg

SEQ ID NO: 1472863 - RNA, 19 nt, Human
gugccaugucaaacaaaua

SEQ ID NO: 1472864 - RNA, 18 nt, Human
gugaggagcuugaaaccc

SEQ ID NO: 1472865 - RNA, 14 nt, Human
gugagcuacaaaug

SEQ ID NO: 1472866 - RNA, 15 nt, Human
gugacgucugggugg

SEQ ID NO: 1472867 - RNA, 16 nt, Human
gugacgucuggguggc

SEQ ID NO: 1472868 - RNA, 19 nt, Human
gugacgucuggguggcccu

SEQ ID NO: 1472869 - RNA, 21 nt, Human
gugacgucuggguggcccuua

SEQ ID NO: 1472870 - RNA, 17 nt, Human
gugacuaauggcaugag

SEQ ID NO: 1472871 - RNA, 19 nt, Human
gugauauaaguguguguuu

SEQ ID NO: 1472872 - RNA, 18 nt, Human
gugaauuguuaguuucug

SEQ ID NO: 1472873 - RNA, 13 nt, Human
gugacacaaacac

SEQ ID NO: 1472874 - RNA, 14 nt, Human
gugacacaaacaca

SEQ ID NO: 1472875 - RNA, 18 nt, Human
gugacacaaacacacaca

SEQ ID NO: 1472876 - RNA, 21 nt, Human
gugacacaaacacacacaaaa

SEQ ID NO: 1472877 - RNA, 12 nt, Human
gucuucuuggcc

SEQ ID NO: 1472878 - RNA, 18 nt, Human
gucugugaagugagaccu

SEQ ID NO: 1472879 - RNA, 22 nt, Human
gucugugaagugagaccuuccu

SEQ ID NO: 1472880 - RNA, 13 nt, Human
gucugagagaggc

SEQ ID NO: 1472881 - RNA, 14 nt, Human
gucugagagaggcc

SEQ ID NO: 1472882 - RNA, 15 nt, Human
gucugagagaggcca

SEQ ID NO: 1472883 - RNA, 18 nt, Human
gucugagagaggccauuc

SEQ ID NO: 1472884 - RNA, 16 nt, Human
gucugcuaucauuauu

SEQ ID NO: 1472885 - RNA, 12 nt, Human
gucuguuuacug

SEQ ID NO: 1472886 - RNA, 13 nt, Human
gucuguuuacugc

SEQ ID NO: 1472887 - RNA, 17 nt, Human
gucuguuuauaaacauu

SEQ ID NO: 1472888 - RNA, 16 nt, Human
gucuguuaugcuguga

SEQ ID NO: 1472889 - RNA, 17 nt, Human
gucuguucacuuuuccu

SEQ ID NO: 1472890 - RNA, 16 nt, Human
gucuguggauuuuuuc

SEQ ID NO: 1472891 - RNA, 13 nt, Human
gucuguggauuuu

SEQ ID NO: 1472892 - RNA, 18 nt, Human
gucgucaaagcugaaaug

SEQ ID NO: 1472893 - RNA, 21 nt, Human
gucuaaagcugguuuaauguu

SEQ ID NO: 1472894 - RNA, 23 nt, Human
gucucacaugauuccagccauca

SEQ ID NO: 1472895 - RNA, 13 nt, Human
gucccugccugga

SEQ ID NO: 1472896 - RNA, 20 nt, Human
gucucuauaccaauaaagug

SEQ ID NO: 1472897 - RNA, 19 nt, Human
gucucuauaccaauaaagu

SEQ ID NO: 1472898 - RNA, 18 nt, Human
gucucuauaccaauaaag

SEQ ID NO: 1472899 - RNA, 17 nt, Human
gucucuauaccaauaaa

SEQ ID NO: 1472900 - RNA, 15 nt, Human
gucucucucucucua

SEQ ID NO: 1472901 - RNA, 15 nt, Human
gucucacugcuugaa

SEQ ID NO: 1472902 - RNA, 14 nt, Human
gucucacugcuuga

SEQ ID NO: 1472903 - RNA, 17 nt, Human
gucucuggaauuugaaa

SEQ ID NO: 1472904 - RNA, 17 nt, Human
gucucugcaaacugccu

SEQ ID NO: 1472905 - RNA, 19 nt, Human
gucucugaggggcuaccag

SEQ ID NO: 1472906 - RNA, 19 nt, Human
gucucucucucucuacaaa

SEQ ID NO: 1472907 - RNA, 21 nt, Human
gucucuggauuauauuaugaa

SEQ ID NO: 1472908 - RNA, 23 nt, Human
gucucuucugaauaaagcaauua

SEQ ID NO: 1472909 - RNA, 14 nt, Human
gucucuucugagcu

SEQ ID NO: 1472910 - RNA, 22 nt, Human
gucucuucugagcuauuucauc

SEQ ID NO: 1472911 - RNA, 22 nt, Human
gucucuucugaauaaagcaauu

SEQ ID NO: 1472912 - RNA, 21 nt, Human
gucucuucugaauaaagcaau

SEQ ID NO: 1472913 - RNA, 20 nt, Human
gucucuucugaauaaagcaa

SEQ ID NO: 1472914 - RNA, 19 nt, Human
gucucuucugaauaaagca

SEQ ID NO: 1472915 - RNA, 20 nt, Human
gucccuaauaaagcugugug

SEQ ID NO: 1472916 - RNA, 18 nt, Human
gucccuaauaaagcugug

SEQ ID NO: 1472917 - RNA, 17 nt, Human
gucccuaauaaagcugu

SEQ ID NO: 1472918 - RNA, 16 nt, Human
gucccuaauaaagcug

SEQ ID NO: 1472919 - RNA, 19 nt, Human
gucccauucccccagugcg

SEQ ID NO: 1472920 - RNA, 23 nt, Human
gucccauucccccagugcggcca

SEQ ID NO: 1472921 - RNA, 15 nt, Human
gucccaucccugcgu

SEQ ID NO: 1472922 - RNA, 21 nt, Human
gucauucagauaugauucaaa

SEQ ID NO: 1472923 - RNA, 21 nt, Human
gucauuguuauauaaucauua

SEQ ID NO: 1472924 - RNA, 13 nt, Human
gucaggaaagaga

SEQ ID NO: 1472925 - RNA, 22 nt, Human
gucagcugggacaccccgacuu

SEQ ID NO: 1472926 - RNA, 11 nt, Human
gucauuaaaug

SEQ ID NO: 1472927 - RNA, 20 nt, Human
guauuuuaaaagaaugauua

SEQ ID NO: 1472928 - RNA, 18 nt, Human
guauuacacucuguaauu

SEQ ID NO: 1472929 - RNA, 16 nt, Human
guauuacacucuguaa

SEQ ID NO: 1472930 - RNA, 21 nt, Human
guauuuuaguaagagauuccu

SEQ ID NO: 1472931 - RNA, 19 nt, Human
guauuuuagugaacuugaa

SEQ ID NO: 1472932 - RNA, 20 nt, Human
guauuuuagugaacuugaaa

SEQ ID NO: 1472933 - RNA, 16 nt, Human
gucaccagagacuuua

SEQ ID NO: 1472934 - RNA, 13 nt, Human
gucaccagagacu

SEQ ID NO: 1472935 - RNA, 18 nt, Human
gucaaucaagucuguuua

SEQ ID NO: 1472936 - RNA, 23 nt, Human
gucaauaaaauccauacauuugu

SEQ ID NO: 1472937 - RNA, 22 nt, Human
gucaauaaaauccauacauuug

SEQ ID NO: 1472938 - RNA, 16 nt, Human
gucacuacgccuggcu

SEQ ID NO: 1472939 - RNA, 13 nt, Human
gucacucaaggcg

SEQ ID NO: 1472940 - RNA, 15 nt, Human
guauacuauaguacc

SEQ ID NO: 1472941 - RNA, 15 nt, Human
guauaccugauuuuu

SEQ ID NO: 1472942 - RNA, 13 nt, Human
guauaccucacuu

SEQ ID NO: 1472943 - RNA, 17 nt, Human
guauaauucacauugua

SEQ ID NO: 1472944 - RNA, 14 nt, Human
guaguguuggagaa

SEQ ID NO: 1472945 - RNA, 15 nt, Human
guaguguuggagaag

SEQ ID NO: 1472946 - RNA, 17 nt, Human
guaguguuggagaagaa

SEQ ID NO: 1472947 - RNA, 18 nt, Human
guaguggggaagaggguu

SEQ ID NO: 1472948 - RNA, 19 nt, Human
guagugauuuuuaugccac

SEQ ID NO: 1472949 - RNA, 19 nt, Human
guagucucacugcuugaac

SEQ ID NO: 1472950 - RNA, 20 nt, Human
guagucucacugcuugaacu

SEQ ID NO: 1472951 - RNA, 22 nt, Human
guaguagcguuuuuuaaaugua

SEQ ID NO: 1472952 - RNA, 16 nt, Human
guaguaggcauuuuua

SEQ ID NO: 1472953 - RNA, 13 nt, Human
guaguaugauggg

SEQ ID NO: 1472954 - RNA, 22 nt, Human
guaggggcuuauaauaaaggac

SEQ ID NO: 1472955 - RNA, 19 nt, Human
guagaguugaucaaaauca

SEQ ID NO: 1472956 - RNA, 22 nt, Human
guagauauuggacaaagaaccu

SEQ ID NO: 1472957 - RNA, 15 nt, Human
guagaugcauuuggg

SEQ ID NO: 1472958 - RNA, 20 nt, Human
guagaugcauuuggguccag

SEQ ID NO: 1472959 - RNA, 22 nt, Human
guagaugcauuuggguccagga

SEQ ID NO: 1472960 - RNA, 16 nt, Human
guagcauccuggaaua

SEQ ID NO: 1472961 - RNA, 23 nt, Human
guagcacaaguuauuuaaaucug

SEQ ID NO: 1472962 - RNA, 21 nt, Human
guagcauuuguguugaagagg

SEQ ID NO: 1472963 - RNA, 13 nt, Human
guagccacaccag

SEQ ID NO: 1472964 - RNA, 16 nt, Human
guagccacaccaggau

SEQ ID NO: 1472965 - RNA, 15 nt, Human
guagccacaccagga

SEQ ID NO: 1472966 - RNA, 15 nt, Human
guagccccagugaca

SEQ ID NO: 1472967 - RNA, 19 nt, Human
guagccccagugacagcua

SEQ ID NO: 1472968 - RNA, 16 nt, Human
guagccccagugacag

SEQ ID NO: 1472969 - RNA, 15 nt, Human
guagggaguuguggg

SEQ ID NO: 1472970 - RNA, 17 nt, Human
guauguuagugcaaauu

SEQ ID NO: 1472971 - RNA, 13 nt, Human
guaugugugugug

SEQ ID NO: 1472972 - RNA, 12 nt, Human
guaugugugugu

SEQ ID NO: 1472973 - RNA, 18 nt, Human
guauuaagaaaaucuauu

SEQ ID NO: 1472974 - RNA, 16 nt, Human
guaugaacuugaggac

SEQ ID NO: 1472975 - RNA, 15 nt, Human
guaugaacuugagga

SEQ ID NO: 1472976 - RNA, 17 nt, Human
guaugaaccaccgcgcc

SEQ ID NO: 1472977 - RNA, 23 nt, Human
guaugaacuugaggacacauguc

SEQ ID NO: 1472978 - RNA, 22 nt, Human
guaugaacuugaggacacaugu

SEQ ID NO: 1472979 - RNA, 20 nt, Human
guaugaacuugaggacacau

SEQ ID NO: 1472980 - RNA, 19 nt, Human
guaugaacuugaggacaca

SEQ ID NO: 1472981 - RNA, 18 nt, Human
guauagcaugcaucuguu

SEQ ID NO: 1472982 - RNA, 20 nt, Human
guauagcaugcaucuguuua

SEQ ID NO: 1472983 - RNA, 16 nt, Human
guauagacuccugaaa

SEQ ID NO: 1472984 - RNA, 10 nt, Human
guauauauau

SEQ ID NO: 1472985 - RNA, 23 nt, Human
guauauauauauauauguacagu

SEQ ID NO: 1472986 - RNA, 18 nt, Human
guauauauauauauaugu

SEQ ID NO: 1472987 - RNA, 17 nt, Human
guaucucuucagucucu

SEQ ID NO: 1472988 - RNA, 13 nt, Human
guaucucuucagu

SEQ ID NO: 1472989 - RNA, 12 nt, Human
guaucucuucag

SEQ ID NO: 1472990 - RNA, 17 nt, Human
guaucuaugcauuuucu

SEQ ID NO: 1472991 - RNA, 13 nt, Human
guaucucacacuc

SEQ ID NO: 1472992 - RNA, 18 nt, Human
guaucuaggcaacauagu

SEQ ID NO: 1472993 - RNA, 14 nt, Human
guauauuacaauga

SEQ ID NO: 1472994 - RNA, 13 nt, Human
guauauuacaaug

SEQ ID NO: 1472995 - RNA, 15 nt, Human
uuucucugauacaga

SEQ ID NO: 1472996 - RNA, 16 nt, Human
uuucucugauacagaa

SEQ ID NO: 1472997 - RNA, 17 nt, Human
uuucucugauacagaaa

SEQ ID NO: 1472998 - RNA, 18 nt, Human
uuucucugauacagaaaa

SEQ ID NO: 1472999 - RNA, 21 nt, Human
uuucugaaauuuccugggagc

SEQ ID NO: 1473000 - RNA, 15 nt, Human
uuucucugaacacau

SEQ ID NO: 1473001 - RNA, 14 nt, Human
uuucuaaaguaaaa

SEQ ID NO: 1473002 - RNA, 12 nt, Human
uuucuaaaguaa

SEQ ID NO: 1473003 - RNA, 16 nt, Human
uuucuagagcacugcc

SEQ ID NO: 1473004 - RNA, 21 nt, Human
uuacauuuuuugggcagcaau

SEQ ID NO: 1473005 - RNA, 12 nt, Human
uuaccaaccugu

SEQ ID NO: 1473006 - RNA, 13 nt, Human
uuaccaaccuguu

SEQ ID NO: 1473007 - RNA, 18 nt, Human
uuacauuuuaaacacauu

SEQ ID NO: 1473008 - RNA, 20 nt, Human
uuaccaaccuguuaccuacu

SEQ ID NO: 1473009 - RNA, 15 nt, Human
uuaccaaauaaagua

SEQ ID NO: 1473010 - RNA, 19 nt, Human
uuuccucagacucuaagaa

SEQ ID NO: 1473011 - RNA, 13 nt, Human
uuuccucccucag

SEQ ID NO: 1473012 - RNA, 18 nt, Human
uuugaaucaucaagucuu

SEQ ID NO: 1473013 - RNA, 18 nt, Human
uuugaagcacagugauca

SEQ ID NO: 1473014 - RNA, 19 nt, Human
uuugaauccucucucugug

SEQ ID NO: 1473015 - RNA, 14 nt, Human
uuugaacuuuuuau

SEQ ID NO: 1473016 - RNA, 18 nt, Human
uuucuucaccaaaucuug

SEQ ID NO: 1473017 - RNA, 17 nt, Human
uuucuucuauugccucu

SEQ ID NO: 1473018 - RNA, 19 nt, Human
uuucuucuauugccucuga

SEQ ID NO: 1473019 - RNA, 16 nt, Human
uuucuuaaaccuucag

SEQ ID NO: 1473020 - RNA, 18 nt, Human
uuucuuaaaccuucaguu

SEQ ID NO: 1473021 - RNA, 19 nt, Human
uuuggacaaaauggaauac

SEQ ID NO: 1473022 - RNA, 11 nt, Human
uuuggaaugug

SEQ ID NO: 1473023 - RNA, 15 nt, Human
uuuggauauguaaaa

SEQ ID NO: 1473024 - RNA, 21 nt, Human
uuuggauauguaaaacauuua

SEQ ID NO: 1473025 - RNA, 10 nt, Human
uuuggaugcc

SEQ ID NO: 1473026 - RNA, 19 nt, Human
uuuggauauguaaaacauu

SEQ ID NO: 1473027 - RNA, 18 nt, Human
uuuggugauuacauuuua

SEQ ID NO: 1473028 - RNA, 13 nt, Human
uuuguauaaaaua

SEQ ID NO: 1473029 - RNA, 14 nt, Human
uuuguauaaaauaa

SEQ ID NO: 1473030 - RNA, 16 nt, Human
uuuguauaaaauaauu

SEQ ID NO: 1473031 - RNA, 21 nt, Human
uuuggugcuucucagauuucu

SEQ ID NO: 1473032 - RNA, 14 nt, Human
uuuggugagaaccu

SEQ ID NO: 1473033 - RNA, 19 nt, Human
uuugguuuucacauuggaa

SEQ ID NO: 1473034 - RNA, 21 nt, Human
uuugguuucccaagagcuacg

SEQ ID NO: 1473035 - RNA, 15 nt, Human
uuugcaucugaaaau

SEQ ID NO: 1473036 - RNA, 21 nt, Human
uuuuaaaagaaugauuaugaa

SEQ ID NO: 1473037 - RNA, 18 nt, Human
uuuuaaagacuuuuauga

SEQ ID NO: 1473038 - RNA, 12 nt, Human
uuuuaaagaauu

SEQ ID NO: 1473039 - RNA, 15 nt, Human
uuuguucuucuuaaa

SEQ ID NO: 1473040 - RNA, 16 nt, Human
uuuuaaauguauacua

SEQ ID NO: 1473041 - RNA, 12 nt, Human
uuuuaaauguau

SEQ ID NO: 1473042 - RNA, 19 nt, Human
uuuuaaaugcauaaaugca

SEQ ID NO: 1473043 - RNA, 13 nt, Human
uuuuaaagaauug

SEQ ID NO: 1473044 - RNA, 18 nt, Human
uuuuaaauauuuuuucuu

SEQ ID NO: 1473045 - RNA, 16 nt, Human
uuuuaaugaacaaaug

SEQ ID NO: 1473046 - RNA, 20 nt, Human
uuuuugaaaagcagacauuu

SEQ ID NO: 1473047 - RNA, 23 nt, Human
uuuuugaaaaagcgaaaaaauca

SEQ ID NO: 1473048 - RNA, 17 nt, Human
uuuuugaaaaagcgaaa

SEQ ID NO: 1473049 - RNA, 16 nt, Human
uuuuuugggcagcaau

SEQ ID NO: 1473050 - RNA, 13 nt, Human
uuuuuuguaccaa

SEQ ID NO: 1473051 - RNA, 10 nt, Human
uuuuuugaga

SEQ ID NO: 1473052 - RNA, 15 nt, Human
uuuuugaagcuguau

SEQ ID NO: 1473053 - RNA, 19 nt, Human
uuuuucucuaggaaauauu

SEQ ID NO: 1473054 - RNA, 23 nt, Human
uuuuucucugauacagaaaaguu

SEQ ID NO: 1473055 - RNA, 21 nt, Human
uuuuucucgcuguccuuucua

SEQ ID NO: 1473056 - RNA, 22 nt, Human
uuuuuccuucaaaguuuaauaa

SEQ ID NO: 1473057 - RNA, 18 nt, Human
uuuuuccuucaaaguuua

SEQ ID NO: 1473058 - RNA, 19 nt, Human
uuuuuccuucaaaguuuaa

SEQ ID NO: 1473059 - RNA, 18 nt, Human
uuuuuccuagcccucuca

SEQ ID NO: 1473060 - RNA, 16 nt, Human
uuuuuccguaaaaaug

SEQ ID NO: 1473061 - RNA, 18 nt, Human
uuuuuaaagacuuuuaug

SEQ ID NO: 1473062 - RNA, 13 nt, Human
uuuuuaaagacuu

SEQ ID NO: 1473063 - RNA, 12 nt, Human
uuuuuaaagacu

SEQ ID NO: 1473064 - RNA, 16 nt, Human
uuuuuaaacaaguauu

SEQ ID NO: 1473065 - RNA, 18 nt, Human
uuuuuaaaaaagaaacau

SEQ ID NO: 1473066 - RNA, 15 nt, Human
uuuuuaaaaaagcuu

SEQ ID NO: 1473067 - RNA, 11 nt, Human
uuuugucucug

SEQ ID NO: 1473068 - RNA, 17 nt, Human
uuuuuaaaaaagcuuaa

SEQ ID NO: 1473069 - RNA, 22 nt, Human
uuuuuaaaaaagcuuaaaacuu

SEQ ID NO: 1473070 - RNA, 23 nt, Human
uuuuuaaaaaagcuuaaaacuuu

SEQ ID NO: 1473071 - RNA, 10 nt, Human
uuuugucucu

SEQ ID NO: 1473072 - RNA, 12 nt, Human
uuuugucucugc

SEQ ID NO: 1473073 - RNA, 11 nt, Human
uuuuguaccaa

SEQ ID NO: 1473074 - RNA, 18 nt, Human
uuuuguaaacucaaaaua

SEQ ID NO: 1473075 - RNA, 14 nt, Human
uuuuguaagacaaa

SEQ ID NO: 1473076 - RNA, 19 nt, Human
uuuuguaaguugaagcaaa

SEQ ID NO: 1473077 - RNA, 20 nt, Human
uuuuggugguuuuagugauu

SEQ ID NO: 1473078 - RNA, 18 nt, Human
uuuucuaaaguaaaaaca

SEQ ID NO: 1473079 - RNA, 12 nt, Human
uuuucuaacugg

SEQ ID NO: 1473080 - RNA, 16 nt, Human
uuuucuaagaaacauu

SEQ ID NO: 1473081 - RNA, 18 nt, Human
uuuucuaagaaacauuua

SEQ ID NO: 1473082 - RNA, 12 nt, Human
uuuucuuugugu

SEQ ID NO: 1473083 - RNA, 19 nt, Human
uuuucuuuguguagcuuug

SEQ ID NO: 1473084 - RNA, 16 nt, Human
uuuucuuuguguagcu

SEQ ID NO: 1473085 - RNA, 14 nt, Human
uuuuccugaaaacc

SEQ ID NO: 1473086 - RNA, 16 nt, Human
uuuuccuucaaaguuu

SEQ ID NO: 1473087 - RNA, 18 nt, Human
uuuuggucuggagggaag

SEQ ID NO: 1473088 - RNA, 11 nt, Human
uuuuggaugcc

SEQ ID NO: 1473089 - RNA, 13 nt, Human
uuuugaaaaacug

SEQ ID NO: 1473090 - RNA, 13 nt, Human
uuuucuuuucuau

SEQ ID NO: 1473091 - RNA, 16 nt, Human
gcgcgaucucagcuca

SEQ ID NO: 1473092 - RNA, 15 nt, Human
gcgcgaucucagcuc

SEQ ID NO: 1473093 - RNA, 15 nt, Human
gcgcuaucucccugc

SEQ ID NO: 1473094 - RNA, 20 nt, Human
gcgcuaucucccugccuccu

SEQ ID NO: 1473095 - RNA, 12 nt, Human
gcgcggcuggga

SEQ ID NO: 1473096 - RNA, 18 nt, Human
gcgcggcugggaggaggg

SEQ ID NO: 1473097 - RNA, 17 nt, Human
gcggugcuugauagaaa

SEQ ID NO: 1473098 - RNA, 12 nt, Human
gcgguucaggaa

SEQ ID NO: 1473099 - RNA, 13 nt, Human
gcuaagagaagua

SEQ ID NO: 1473100 - RNA, 14 nt, Human
gcuaagagaaguag

SEQ ID NO: 1473101 - RNA, 21 nt, Human
gcuagaauugaguguuuaaag

SEQ ID NO: 1473102 - RNA, 19 nt, Human
gcuaccugcucagcccugc

SEQ ID NO: 1473103 - RNA, 20 nt, Human
gcuaccugcucagcccugca

SEQ ID NO: 1473104 - RNA, 16 nt, Human
gccuuugaccugccuc

SEQ ID NO: 1473105 - RNA, 18 nt, Human
gccuuuggacuugucccg

SEQ ID NO: 1473106 - RNA, 14 nt, Human
gccuuugagcucag

SEQ ID NO: 1473107 - RNA, 15 nt, Human
gccuuuggcaggugc

SEQ ID NO: 1473108 - RNA, 13 nt, Human
gccuuuggcaggu

SEQ ID NO: 1473109 - RNA, 22 nt, Human
gcgaaaaaaucagguggcuuuu

SEQ ID NO: 1473110 - RNA, 19 nt, Human
gccuuccuguuuuucacau

SEQ ID NO: 1473111 - RNA, 13 nt, Human
gccuguuuaagag

SEQ ID NO: 1473112 - RNA, 12 nt, Human
gccuguuuaaga

SEQ ID NO: 1473113 - RNA, 11 nt, Human
gccugccagga

SEQ ID NO: 1473114 - RNA, 12 nt, Human
gccugccaggag

SEQ ID NO: 1473115 - RNA, 13 nt, Human
gccugccaggagg

SEQ ID NO: 1473116 - RNA, 14 nt, Human
gccugccaggagga

SEQ ID NO: 1473117 - RNA, 18 nt, Human
gccugccaggaggaccca

SEQ ID NO: 1473118 - RNA, 20 nt, Human
gccugccaggaggacccagg

SEQ ID NO: 1473119 - RNA, 21 nt, Human
gccugccaggaggacccaggg

SEQ ID NO: 1473120 - RNA, 23 nt, Human
gccugccaggaggacccagggcu

SEQ ID NO: 1473121 - RNA, 23 nt, Human
gccucccuucaugcauggaaauu

SEQ ID NO: 1473122 - RNA, 22 nt, Human
gccucccuucaugcauggaaau

SEQ ID NO: 1473123 - RNA, 20 nt, Human
gccucccuucaugcauggaa

SEQ ID NO: 1473124 - RNA, 18 nt, Human
gccucccuucaugcaugg

SEQ ID NO: 1473125 - RNA, 15 nt, Human
gccucccuucaugca

SEQ ID NO: 1473126 - RNA, 18 nt, Human
gccucucaucaacugaau

SEQ ID NO: 1473127 - RNA, 19 nt, Human
gccucucaucaacugaaug

SEQ ID NO: 1473128 - RNA, 21 nt, Human
gccuccucacccccagcuuug

SEQ ID NO: 1473129 - RNA, 16 nt, Human
gccucucaucaacuga

SEQ ID NO: 1473130 - RNA, 14 nt, Human
gccuccucaccccc

SEQ ID NO: 1473131 - RNA, 16 nt, Human
gccuccucacccccag

SEQ ID NO: 1473132 - RNA, 17 nt, Human
gccuccucacccccagc

SEQ ID NO: 1473133 - RNA, 18 nt, Human
gccuccucacccccagcu

SEQ ID NO: 1473134 - RNA, 19 nt, Human
gccuccucacccccagcuu

SEQ ID NO: 1473135 - RNA, 14 nt, Human
gccucccagguuca

SEQ ID NO: 1473136 - RNA, 21 nt, Human
gccucugcacacccuccagag

SEQ ID NO: 1473137 - RNA, 20 nt, Human
gccugacuagggagccaugu

SEQ ID NO: 1473138 - RNA, 19 nt, Human
gccugacuagggagccaug

SEQ ID NO: 1473139 - RNA, 20 nt, Human
gccugacugccaagccaugg

SEQ ID NO: 1473140 - RNA, 17 nt, Human
gccugacugccaagcca

SEQ ID NO: 1473141 - RNA, 16 nt, Human
gccugacugccaagcc

SEQ ID NO: 1473142 - RNA, 15 nt, Human
gccugacugccaagc

SEQ ID NO: 1473143 - RNA, 14 nt, Human
gccugacugccaag

SEQ ID NO: 1473144 - RNA, 16 nt, Human
gccucugagagcauca

SEQ ID NO: 1473145 - RNA, 14 nt, Human
gccucugagagcau

SEQ ID NO: 1473146 - RNA, 13 nt, Human
gccucugagagca

SEQ ID NO: 1473147 - RNA, 19 nt, Human
gccucugagaagcucugaa

SEQ ID NO: 1473148 - RNA, 21 nt, Human
gccucuccacucaugugacuc

SEQ ID NO: 1473149 - RNA, 24 nt, Human
gccucuccacucaugugacucuuu

SEQ ID NO: 1473150 - RNA, 17 nt, Human
gccuaaccugccgagag

SEQ ID NO: 1473151 - RNA, 18 nt, Human
gccuauguggucuaaggu

SEQ ID NO: 1473152 - RNA, 17 nt, Human
gccgucagugcugugcu

SEQ ID NO: 1473153 - RNA, 18 nt, Human
gcccugcugcugccugcc

SEQ ID NO: 1473154 - RNA, 23 nt, Human
gcccuugugaaucaagggucagg

SEQ ID NO: 1473155 - RNA, 13 nt, Human
gccggcuccuugg

SEQ ID NO: 1473156 - RNA, 18 nt, Human
gccaugaugccucugucu

SEQ ID NO: 1473157 - RNA, 13 nt, Human
gccaugaugccuc

SEQ ID NO: 1473158 - RNA, 15 nt, Human
gccaugaugccucug

SEQ ID NO: 1473159 - RNA, 19 nt, Human
gccaugaugccucugucuu

SEQ ID NO: 1473160 - RNA, 17 nt, Human
gccaggcugggucgccc

SEQ ID NO: 1473161 - RNA, 23 nt, Human
gccaggcugggucgcccuggacu

SEQ ID NO: 1473162 - RNA, 20 nt, Human
gccaucaccuuagaccacca

SEQ ID NO: 1473163 - RNA, 14 nt, Human
gccaucaccuuaga

SEQ ID NO: 1473164 - RNA, 22 nt, Human
gccaucaccuuagaccaccaag

SEQ ID NO: 1473165 - RNA, 20 nt, Human
gccauggguagccugggugu

SEQ ID NO: 1473166 - RNA, 19 nt, Human
gccauggguagccugggug

SEQ ID NO: 1473167 - RNA, 17 nt, Human
gccauggguagccuggg

SEQ ID NO: 1473168 - RNA, 21 nt, Human
gcccaccauuuggcaucccug

SEQ ID NO: 1473169 - RNA, 21 nt, Human
gccagaugcacaucccuggaa

SEQ ID NO: 1473170 - RNA, 22 nt, Human
gccagaugcacaucccuggaag

SEQ ID NO: 1473171 - RNA, 19 nt, Human
gccagcugcccccagagcc

SEQ ID NO: 1473172 - RNA, 12 nt, Human
gccagcugcccc

SEQ ID NO: 1473173 - RNA, 22 nt, Human
gccaggaagcuuuggugagaac

SEQ ID NO: 1473174 - RNA, 15 nt, Human
gccaggcuaauuuuu

SEQ ID NO: 1473175 - RNA, 20 nt, Human
gccccuggucccucugcagu

SEQ ID NO: 1473176 - RNA, 16 nt, Human
gccccugaacaagaau

SEQ ID NO: 1473177 - RNA, 19 nt, Human
gccccuugacaacuggcag

SEQ ID NO: 1473178 - RNA, 17 nt, Human
gccccuuugcugacccu

SEQ ID NO: 1473179 - RNA, 16 nt, Human
gccccuuugcugaccc

SEQ ID NO: 1473180 - RNA, 20 nt, Human
gccccuuugcugacccuccc

SEQ ID NO: 1473181 - RNA, 18 nt, Human
gccccuuugcugacccuc

SEQ ID NO: 1473182 - RNA, 16 nt, Human
gccccucccccugcca

SEQ ID NO: 1473183 - RNA, 15 nt, Human
gcccgggagcucagg

SEQ ID NO: 1473184 - RNA, 17 nt, Human
gcccgggagcucaggaa

SEQ ID NO: 1473185 - RNA, 19 nt, Human
gcccgggagcucaggaacc

SEQ ID NO: 1473186 - RNA, 14 nt, Human
gccccagugacagc

SEQ ID NO: 1473187 - RNA, 21 nt, Human
gcccccaaccauuuccucaga

SEQ ID NO: 1473188 - RNA, 22 nt, Human
gcccccaaccauuuccucagac

SEQ ID NO: 1473189 - RNA, 19 nt, Human
gcauucaaauguauuacag

SEQ ID NO: 1473190 - RNA, 18 nt, Human
gcauucagaagaaaaaga

SEQ ID NO: 1473191 - RNA, 16 nt, Human
gcauucagaagaaaaa

SEQ ID NO: 1473192 - RNA, 23 nt, Human
gcauuauuggaauauaauuguuu

SEQ ID NO: 1473193 - RNA, 22 nt, Human
gcauuauuggaauauaauuguu

SEQ ID NO: 1473194 - RNA, 16 nt, Human
gcauuuguguugaaga

SEQ ID NO: 1473195 - RNA, 16 nt, Human
gccaaaaaaaaauaca

SEQ ID NO: 1473196 - RNA, 16 nt, Human
gcaucugaaaauugau

SEQ ID NO: 1473197 - RNA, 13 nt, Human
gcaucuguuuauu

SEQ ID NO: 1473198 - RNA, 13 nt, Human
gcauuauauuuau

SEQ ID NO: 1473199 - RNA, 20 nt, Human
gcauggauauaguuuuacuu

SEQ ID NO: 1473200 - RNA, 17 nt, Human
gcaugagaaauacaaaa

SEQ ID NO: 1473201 - RNA, 14 nt, Human
gcaugagaaauaca

SEQ ID NO: 1473202 - RNA, 22 nt, Human
gcaguggcaucaucucagcuca

SEQ ID NO: 1473203 - RNA, 19 nt, Human
gcaggggccgggggcaguc

SEQ ID NO: 1473204 - RNA, 20 nt, Human
gcaggggccgggggcagucu

SEQ ID NO: 1473205 - RNA, 17 nt, Human
gcauagguuuaauaauu

SEQ ID NO: 1473206 - RNA, 13 nt, Human
gcauacuuuuuaa

SEQ ID NO: 1473207 - RNA, 22 nt, Human
gcaguggcgcgaucucagcuca

SEQ ID NO: 1473208 - RNA, 18 nt, Human
gcaguggcgcgaucucag

SEQ ID NO: 1473209 - RNA, 20 nt, Human
gcaguguagggaguuguggg

SEQ ID NO: 1473210 - RNA, 13 nt, Human
gcauagaaguaaa

SEQ ID NO: 1473211 - RNA, 17 nt, Human
gcaguucugaagaagau

SEQ ID NO: 1473212 - RNA, 15 nt, Human
gcaguucugaagaag

SEQ ID NO: 1473213 - RNA, 21 nt, Human
gcagauucucccuugcucugc

SEQ ID NO: 1473214 - RNA, 19 nt, Human
gcagauucucccuugcucu

SEQ ID NO: 1473215 - RNA, 21 nt, Human
gcagauuuucagcaaacucuu

SEQ ID NO: 1473216 - RNA, 17 nt, Human
gcagacauuuuaaaaaa

SEQ ID NO: 1473217 - RNA, 19 nt, Human
gcagacaugugcacuugaa

SEQ ID NO: 1473218 - RNA, 16 nt, Human
gcagcaauuuaaaugu

SEQ ID NO: 1473219 - RNA, 15 nt, Human
gcagcaauuuaaaug

SEQ ID NO: 1473220 - RNA, 12 nt, Human
gcagcaauuuaa

SEQ ID NO: 1473221 - RNA, 17 nt, Human
gcagcaauuuaaauguu

SEQ ID NO: 1473222 - RNA, 21 nt, Human
gcagcccugcugcugccugcc

SEQ ID NO: 1473223 - RNA, 20 nt, Human
gcagcccugcugcugccugc

SEQ ID NO: 1473224 - RNA, 16 nt, Human
gcagcucaagagaucc

SEQ ID NO: 1473225 - RNA, 18 nt, Human
gcagcucaagagauccca

SEQ ID NO: 1473226 - RNA, 11 nt, Human
gcaggaaggcu

SEQ ID NO: 1473227 - RNA, 16 nt, Human
gcacggcagccacagc

SEQ ID NO: 1473228 - RNA, 14 nt, Human
gcacggcagccaca

SEQ ID NO: 1473229 - RNA, 13 nt, Human
gcaccuuucuagu

SEQ ID NO: 1473230 - RNA, 17 nt, Human
gcaccuuucuaguugaa

SEQ ID NO: 1473231 - RNA, 18 nt, Human
gcaccuuucuaguugaaa

SEQ ID NO: 1473232 - RNA, 16 nt, Human
gcaccagaauguauau

SEQ ID NO: 1473233 - RNA, 16 nt, Human
gcaccaugcugcuggg

SEQ ID NO: 1473234 - RNA, 18 nt, Human
gcaccaugcugcugggga

SEQ ID NO: 1473235 - RNA, 20 nt, Human
gcaccaugcugcuggggaag

SEQ ID NO: 1473236 - RNA, 23 nt, Human
gcaccaugcugcuggggaagaca

SEQ ID NO: 1473237 - RNA, 9 nt, Human
gcacuguaa

SEQ ID NO: 1473238 - RNA, 12 nt, Human
gcacuguaaaau

SEQ ID NO: 1473239 - RNA, 13 nt, Human
gcacuguaaaaug

SEQ ID NO: 1473240 - RNA, 14 nt, Human
gcacuguaaaaugu

SEQ ID NO: 1473241 - RNA, 16 nt, Human
gcacuguaaaaugugg

SEQ ID NO: 1473242 - RNA, 23 nt, Human
gcacuguaaaaugugggauuaug

SEQ ID NO: 1473243 - RNA, 23 nt, Human
gcagaauccuaggcuccacccca

SEQ ID NO: 1473244 - RNA, 15 nt, Human
gauuuccagccuucu

SEQ ID NO: 1473245 - RNA, 14 nt, Human
gauuucugaggaaa

SEQ ID NO: 1473246 - RNA, 22 nt, Human
gauuuggucaacacuaacauga

SEQ ID NO: 1473247 - RNA, 15 nt, Human
gauuuuccugaaaac

SEQ ID NO: 1473248 - RNA, 20 nt, Human
gauuuucugcuacuuugcug

SEQ ID NO: 1473249 - RNA, 12 nt, Human
gauuuuuaccag

SEQ ID NO: 1473250 - RNA, 18 nt, Human
gauuuucaaagcuuuuuc

SEQ ID NO: 1473251 - RNA, 19 nt, Human
gauuuucaaagcuuuuucc

SEQ ID NO: 1473252 - RNA, 14 nt, Human
gauuuguacugaaa

SEQ ID NO: 1473253 - RNA, 14 nt, Human
gauuugucccaggu

SEQ ID NO: 1473254 - RNA, 19 nt, Human
gauuccagagcacugcucc

SEQ ID NO: 1473255 - RNA, 14 nt, Human
gauuccagccauca

SEQ ID NO: 1473256 - RNA, 18 nt, Human
gauuccagccaucaccuu

SEQ ID NO: 1473257 - RNA, 18 nt, Human
gauggggguuucaccaua

SEQ ID NO: 1473258 - RNA, 17 nt, Human
gauucgaaugacacugu

SEQ ID NO: 1473259 - RNA, 16 nt, Human
gauucgaaugacacug

SEQ ID NO: 1473260 - RNA, 21 nt, Human
gcaaacaggaucaguuaacua

SEQ ID NO: 1473261 - RNA, 13 nt, Human
gauuuuugccucu

SEQ ID NO: 1473262 - RNA, 16 nt, Human
gauuuuuuaauaauuu

SEQ ID NO: 1473263 - RNA, 17 nt, Human
gauuuuuuaauaauuua

SEQ ID NO: 1473264 - RNA, 21 nt, Human
gcaaaucaccacaaacuguaa

SEQ ID NO: 1473265 - RNA, 21 nt, Human
gcaagaaggcaaaaauaguuu

SEQ ID NO: 1473266 - RNA, 16 nt, Human
gcaagaaggcaaaaau

SEQ ID NO: 1473267 - RNA, 20 nt, Human
gcaagaaggcaaaaauaguu

SEQ ID NO: 1473268 - RNA, 23 nt, Human
gcaagaaggcaaaaauaguuugg

SEQ ID NO: 1473269 - RNA, 22 nt, Human
gcaaaucgaaugaaauuaacug

SEQ ID NO: 1473270 - RNA, 20 nt, Human
gcaaggccugguguuucuug

SEQ ID NO: 1473271 - RNA, 10 nt, Human
gcaagccaga

SEQ ID NO: 1473272 - RNA, 18 nt, Human
gcaagcauucagaagaaa

SEQ ID NO: 1473273 - RNA, 19 nt, Human
gcaagccuaagggauccug

SEQ ID NO: 1473274 - RNA, 17 nt, Human
gcaaggaccuaaaacau

SEQ ID NO: 1473275 - RNA, 19 nt, Human
gaucucagcucacugcaac

SEQ ID NO: 1473276 - RNA, 17 nt, Human
gaucucagcucacugca

SEQ ID NO: 1473277 - RNA, 17 nt, Human
gaucucagcucacuaca

SEQ ID NO: 1473278 - RNA, 12 nt, Human
gaucucagcuca

SEQ ID NO: 1473279 - RNA, 23 nt, Human
gaucucaccaggcagccucuggg

SEQ ID NO: 1473280 - RNA, 20 nt, Human
gaucucaccaggcagccucu

SEQ ID NO: 1473281 - RNA, 14 nt, Human
gaucucaccaggca

SEQ ID NO: 1473282 - RNA, 15 nt, Human
gaucucaccaggcag

SEQ ID NO: 1473283 - RNA, 16 nt, Human
gaucucaccaggcagc

SEQ ID NO: 1473284 - RNA, 19 nt, Human
gaucucaccaggcagccuc

SEQ ID NO: 1473285 - RNA, 16 nt, Human
gaucguucaaagcaug

SEQ ID NO: 1473286 - RNA, 13 nt, Human
gauccuggaaauc

SEQ ID NO: 1473287 - RNA, 19 nt, Human
gaucccuagcugugaccuc

SEQ ID NO: 1473288 - RNA, 21 nt, Human
gaucccuagcugugaccucuc

SEQ ID NO: 1473289 - RNA, 15 nt, Human
gaucccuagcuguga

SEQ ID NO: 1473290 - RNA, 19 nt, Human
gauccccacgccacagccc

SEQ ID NO: 1473291 - RNA, 18 nt, Human
gauccccacgccacagcc

SEQ ID NO: 1473292 - RNA, 21 nt, Human
gauccccacgccacagcccuu

SEQ ID NO: 1473293 - RNA, 18 nt, Human
gaugaaaauaaagaaugg

SEQ ID NO: 1473294 - RNA, 19 nt, Human
gaugaaaauaaagaaugga

SEQ ID NO: 1473295 - RNA, 14 nt, Human
gaucuuuuauuuug

SEQ ID NO: 1473296 - RNA, 15 nt, Human
gaucuuuuauuuugc

SEQ ID NO: 1473297 - RNA, 15 nt, Human
gaugcacaucccugg

SEQ ID NO: 1473298 - RNA, 16 nt, Human
gaugcacaucccugga

SEQ ID NO: 1473299 - RNA, 15 nt, Human
gaugcauuugggucc

SEQ ID NO: 1473300 - RNA, 16 nt, Human
gaugcauuugggucca

SEQ ID NO: 1473301 - RNA, 18 nt, Human
gaugcauuuggguccagg

SEQ ID NO: 1473302 - RNA, 19 nt, Human
gaugcauuuggguccagga

SEQ ID NO: 1473303 - RNA, 20 nt, Human
gaugcauuuggguccaggag

SEQ ID NO: 1473304 - RNA, 21 nt, Human
gaugcauuuggguccaggagg

SEQ ID NO: 1473305 - RNA, 22 nt, Human
gaugcauuuggguccaggagga

SEQ ID NO: 1473306 - RNA, 19 nt, Human
gaugccaaaaaaaaauaca

SEQ ID NO: 1473307 - RNA, 14 nt, Human
gauggcgcaggaac

SEQ ID NO: 1473308 - RNA, 11 nt, Human
gauacagaaaa

SEQ ID NO: 1473309 - RNA, 17 nt, Human
gauaagguaaaaugcca

SEQ ID NO: 1473310 - RNA, 23 nt, Human
gauagauaggucagugcaaauac

SEQ ID NO: 1473311 - RNA, 19 nt, Human
gauaaaguugguaaaccuu

SEQ ID NO: 1473312 - RNA, 19 nt, Human
gauaaagauuuuuuaauaa

SEQ ID NO: 1473313 - RNA, 17 nt, Human
gauaaagauuuuuuaau

SEQ ID NO: 1473314 - RNA, 14 nt, Human
gauaagaucuuuua

SEQ ID NO: 1473315 - RNA, 20 nt, Human
gauaagaucuuuuauuuugc

SEQ ID NO: 1473316 - RNA, 13 nt, Human
gauaaggaaauca

SEQ ID NO: 1473317 - RNA, 20 nt, Human
gauaagguaaaaugccauga

SEQ ID NO: 1473318 - RNA, 12 nt, Human
gaucccccagaa

SEQ ID NO: 1473319 - RNA, 17 nt, Human
gauccccacgccacagc

SEQ ID NO: 1473320 - RNA, 16 nt, Human
gauccccacgccacag

SEQ ID NO: 1473321 - RNA, 17 nt, Human
gaucccaugagcuccuu

SEQ ID NO: 1473322 - RNA, 20 nt, Human
gaucauugugaaauuauuca

SEQ ID NO: 1473323 - RNA, 18 nt, Human
gaucauuuguuggaauga

SEQ ID NO: 1473324 - RNA, 14 nt, Human
gaucauugugaaau

SEQ ID NO: 1473325 - RNA, 14 nt, Human
gaucaguuaacuau

SEQ ID NO: 1473326 - RNA, 18 nt, Human
gaucaguuauaaguagca

SEQ ID NO: 1473327 - RNA, 23 nt, Human
gaucagugggccuccaaggaggg

SEQ ID NO: 1473328 - RNA, 21 nt, Human
gaucaaguuauuuuuaauuug

SEQ ID NO: 1473329 - RNA, 13 nt, Human
gaucaaggccuua

SEQ ID NO: 1473330 - RNA, 23 nt, Human
gaucaaggccuuauuggaaagca

SEQ ID NO: 1473331 - RNA, 22 nt, Human
gaucaaggccuuauuggaaagc

SEQ ID NO: 1473332 - RNA, 18 nt, Human
gaucagccagugaccaac

SEQ ID NO: 1473333 - RNA, 16 nt, Human
gagcucgugggacagu

SEQ ID NO: 1473334 - RNA, 20 nt, Human
gagcuccuuaaggcucuuuu

SEQ ID NO: 1473335 - RNA, 16 nt, Human
gagcugauggagaagg

SEQ ID NO: 1473336 - RNA, 15 nt, Human
gagcugauggagaag

SEQ ID NO: 1473337 - RNA, 14 nt, Human
gagcugaccagccg

SEQ ID NO: 1473338 - RNA, 20 nt, Human
gagcucaggaaccgaggcag

SEQ ID NO: 1473339 - RNA, 23 nt, Human
gagcucagaaaauaucccuccug

SEQ ID NO: 1473340 - RNA, 20 nt, Human
gagcucagaaaauaucccuc

SEQ ID NO: 1473341 - RNA, 21 nt, Human
gagcucaggaaccgaggcagg

SEQ ID NO: 1473342 - RNA, 22 nt, Human
gagcucaggaaccgaggcaggg

SEQ ID NO: 1473343 - RNA, 19 nt, Human
gagcucagaaaauaucccu

SEQ ID NO: 1473344 - RNA, 14 nt, Human
gagcuuuuguagaa

SEQ ID NO: 1473345 - RNA, 13 nt, Human
gagcuugggaaug

SEQ ID NO: 1473346 - RNA, 23 nt, Human
gagcccuucuauacccacccaga

SEQ ID NO: 1473347 - RNA, 23 nt, Human
gagcccacuguacuugcucuuga

SEQ ID NO: 1473348 - RNA, 21 nt, Human
gagcccacuguacuugcucuu

SEQ ID NO: 1473349 - RNA, 18 nt, Human
gagcccacuguacuugcu

SEQ ID NO: 1473350 - RNA, 21 nt, Human
gagccugacccucaucuuucu

SEQ ID NO: 1473351 - RNA, 19 nt, Human
gagccugaauuuuguugcu

SEQ ID NO: 1473352 - RNA, 21 nt, Human
gagccaggaagaucccccaga

SEQ ID NO: 1473353 - RNA, 20 nt, Human
gagccaggaagaucccccag

SEQ ID NO: 1473354 - RNA, 23 nt, Human
gagcagagcugauggagaaggaa

SEQ ID NO: 1473355 - RNA, 20 nt, Human
gagcagagcugauggagaag

SEQ ID NO: 1473356 - RNA, 16 nt, Human
gagauacauacagaau

SEQ ID NO: 1473357 - RNA, 13 nt, Human
gagauacauacag

SEQ ID NO: 1473358 - RNA, 22 nt, Human
gagaagcaaguaaaaaggcuaa

SEQ ID NO: 1473359 - RNA, 14 nt, Human
gagaagaacugaaa

SEQ ID NO: 1473360 - RNA, 16 nt, Human
gagaagaacugaaauc

SEQ ID NO: 1473361 - RNA, 13 nt, Human
gagaaugagccuc

SEQ ID NO: 1473362 - RNA, 16 nt, Human
gagacagccaacuaug

SEQ ID NO: 1473363 - RNA, 9 nt, Human
gagacagag

SEQ ID NO: 1473364 - RNA, 18 nt, Human
gagacacacugaagaagc

SEQ ID NO: 1473365 - RNA, 15 nt, Human
gagacacaccugagg

SEQ ID NO: 1473366 - RNA, 21 nt, Human
gagaauuucuaccauuucaga

SEQ ID NO: 1473367 - RNA, 19 nt, Human
gagacaaacaccucccagg

SEQ ID NO: 1473368 - RNA, 20 nt, Human
gagacaaacaccucccagga

SEQ ID NO: 1473369 - RNA, 22 nt, Human
gagacaaacaccucccaggaga

SEQ ID NO: 1473370 - RNA, 12 nt, Human
gacuugugucug

SEQ ID NO: 1473371 - RNA, 13 nt, Human
gacuugugucucu

SEQ ID NO: 1473372 - RNA, 16 nt, Human
gacuugugucucugug

SEQ ID NO: 1473373 - RNA, 18 nt, Human
gacuugucccgggacacc

SEQ ID NO: 1473374 - RNA, 12 nt, Human
gagaaaugaaaa

SEQ ID NO: 1473375 - RNA, 23 nt, Human
gagaaaucuggcuucuggccagg

SEQ ID NO: 1473376 - RNA, 14 nt, Human
gagaaauacaaaaa

SEQ ID NO: 1473377 - RNA, 15 nt, Human
gagaaauacaaaaau

SEQ ID NO: 1473378 - RNA, 19 nt, Human
gagagagguugaaaaacaa

SEQ ID NO: 1473379 - RNA, 16 nt, Human
gagagaguugaaccua

SEQ ID NO: 1473380 - RNA, 14 nt, Human
gagagcaucaggcc

SEQ ID NO: 1473381 - RNA, 17 nt, Human
gagagagguugaaaaac

SEQ ID NO: 1473382 - RNA, 13 nt, Human
gagagaggccauu

SEQ ID NO: 1473383 - RNA, 21 nt, Human
gagagaggccauucuuuccca

SEQ ID NO: 1473384 - RNA, 19 nt, Human
gagagacacacugaagaag

SEQ ID NO: 1473385 - RNA, 11 nt, Human
gagacuuguuu

SEQ ID NO: 1473386 - RNA, 17 nt, Human
gagauacagaauuuuau

SEQ ID NO: 1473387 - RNA, 17 nt, Human
gagagguugucuguggc

SEQ ID NO: 1473388 - RNA, 15 nt, Human
gagagggcgcaggcc

SEQ ID NO: 1473389 - RNA, 16 nt, Human
gagagggcgcaggccg

SEQ ID NO: 1473390 - RNA, 17 nt, Human
gagagggcgcaggccgu

SEQ ID NO: 1473391 - RNA, 18 nt, Human
gagagggcgcaggccgug

SEQ ID NO: 1473392 - RNA, 12 nt, Human
gagacauccagc

SEQ ID NO: 1473393 - RNA, 11 nt, Human
gagacauccag

SEQ ID NO: 1473394 - RNA, 22 nt, Human
gagacauuaacucauuagacug

SEQ ID NO: 1473395 - RNA, 16 nt, Human
gagacauuaacucauu

SEQ ID NO: 1473396 - RNA, 13 nt, Human
gagacagcccagg

SEQ ID NO: 1473397 - RNA, 12 nt, Human
gagaccaccucu

SEQ ID NO: 1473398 - RNA, 14 nt, Human
gagacuguuuggaa

SEQ ID NO: 1473399 - RNA, 16 nt, Human
gagacuguuuggaaau

SEQ ID NO: 1473400 - RNA, 13 nt, Human
gagacuugggaau

SEQ ID NO: 1473401 - RNA, 16 nt, Human
gacggguuucaccaug

SEQ ID NO: 1473402 - RNA, 17 nt, Human
gacgggguuucaccaug

SEQ ID NO: 1473403 - RNA, 19 nt, Human
gacgcaagggccugauggg

SEQ ID NO: 1473404 - RNA, 12 nt, Human
gaccugccugua

SEQ ID NO: 1473405 - RNA, 19 nt, Human
gacucagguggcccuacug

SEQ ID NO: 1473406 - RNA, 22 nt, Human
gacucaucuuucccuccuuggu

SEQ ID NO: 1473407 - RNA, 21 nt, Human
gacucaucuuucccuccuugg

SEQ ID NO: 1473408 - RNA, 19 nt, Human
gacucaucuuucccuccuu

SEQ ID NO: 1473409 - RNA, 18 nt, Human
gacucaucuuucccuccu

SEQ ID NO: 1473410 - RNA, 17 nt, Human
gacucaucuuucccucc

SEQ ID NO: 1473411 - RNA, 15 nt, Human
gacucaucuuucccu

SEQ ID NO: 1473412 - RNA, 18 nt, Human
gacuacuugggagcaccg

SEQ ID NO: 1473413 - RNA, 20 nt, Human
gacuacuugggagcaccgcc

SEQ ID NO: 1473414 - RNA, 20 nt, Human
gacuagaaaauuuaaaacau

SEQ ID NO: 1473415 - RNA, 22 nt, Human
gacucagcucugacauucugau

SEQ ID NO: 1473416 - RNA, 23 nt, Human
gacucagcucugacauucugauu

SEQ ID NO: 1473417 - RNA, 22 nt, Human
gacucaggcccccaccuggcuc

SEQ ID NO: 1473418 - RNA, 23 nt, Human
gacucaggcccccaccuggcuca

SEQ ID NO: 1473419 - RNA, 20 nt, Human
gaccggcggaccccagccau

SEQ ID NO: 1473420 - RNA, 19 nt, Human
gaccggcggaccccagcca

SEQ ID NO: 1473421 - RNA, 15 nt, Human
gaccggccugccagg

SEQ ID NO: 1473422 - RNA, 16 nt, Human
gaccggccugccagga

SEQ ID NO: 1473423 - RNA, 17 nt, Human
gaccggccugccaggag

SEQ ID NO: 1473424 - RNA, 18 nt, Human
gaccggccugccaggagg

SEQ ID NO: 1473425 - RNA, 19 nt, Human
gaccggccugccaggagga

SEQ ID NO: 1473426 - RNA, 20 nt, Human
gacccuuauugcuguccugg

SEQ ID NO: 1473427 - RNA, 16 nt, Human
gacccuuauugcuguc

SEQ ID NO: 1473428 - RNA, 21 nt, Human
gaccucaccaagcugcugugg

SEQ ID NO: 1473429 - RNA, 22 nt, Human
gaccugccucccuucaugcaug

SEQ ID NO: 1473430 - RNA, 11 nt, Human
gaccugccucc

SEQ ID NO: 1473431 - RNA, 23 nt, Human
gaccugauuucugagcauuuaau

SEQ ID NO: 1473432 - RNA, 18 nt, Human
gaccucaggcaaucugcc

SEQ ID NO: 1473433 - RNA, 22 nt, Human
gacccaggacaggauccaggcc

SEQ ID NO: 1473434 - RNA, 13 nt, Human
gacccaggacagg

SEQ ID NO: 1473435 - RNA, 12 nt, Human
gacccaggacag

SEQ ID NO: 1473436 - RNA, 12 nt, Human
gacaccugcccu

SEQ ID NO: 1473437 - RNA, 11 nt, Human
gacaccugccc

SEQ ID NO: 1473438 - RNA, 10 nt, Human
gacaccugcc

SEQ ID NO: 1473439 - RNA, 9 nt, Human
gacaccugc

SEQ ID NO: 1473440 - RNA, 15 nt, Human
gacaccuaggcuagg

SEQ ID NO: 1473441 - RNA, 16 nt, Human
gacaccuaggcuaggg

SEQ ID NO: 1473442 - RNA, 20 nt, Human
gacaccuaggcuaggguggg

SEQ ID NO: 1473443 - RNA, 13 nt, Human
gacacaguuccug

SEQ ID NO: 1473444 - RNA, 19 nt, Human
gacacauacucauuuuuca

SEQ ID NO: 1473445 - RNA, 15 nt, Human
gacacaguuccuggg

SEQ ID NO: 1473446 - RNA, 14 nt, Human
gacacaguuccugg

SEQ ID NO: 1473447 - RNA, 16 nt, Human
gacacaguuccuggga

SEQ ID NO: 1473448 - RNA, 23 nt, Human
gacaccugcccugcccugccacc

SEQ ID NO: 1473449 - RNA, 18 nt, Human
gacaccugggagaaaucu

SEQ ID NO: 1473450 - RNA, 12 nt, Human
gacaccugggag

SEQ ID NO: 1473451 - RNA, 22 nt, Human
gacaccugcccugcccugccac

SEQ ID NO: 1473452 - RNA, 16 nt, Human
gacaccugcccugccc

SEQ ID NO: 1473453 - RNA, 15 nt, Human
gacaccugcccugcc

SEQ ID NO: 1473454 - RNA, 14 nt, Human
gacaccugcccugc

SEQ ID NO: 1473455 - RNA, 13 nt, Human
gacaccugcccug

SEQ ID NO: 1473456 - RNA, 19 nt, Human
gacaccuuuuuucaacagu

SEQ ID NO: 1473457 - RNA, 15 nt, Human
gacaagcucacagac

SEQ ID NO: 1473458 - RNA, 16 nt, Human
gacaagccagaacuug

SEQ ID NO: 1473459 - RNA, 22 nt, Human
gacaauugagguaaguuuuuug

SEQ ID NO: 1473460 - RNA, 22 nt, Human
gacaugggacauuugcucaugg

SEQ ID NO: 1473461 - RNA, 16 nt, Human
gacaugaagcuguugu

SEQ ID NO: 1473462 - RNA, 14 nt, Human
gaccaaaaguuaca

SEQ ID NO: 1473463 - RNA, 19 nt, Human
gaccaaaaguuacauguuu

SEQ ID NO: 1473464 - RNA, 15 nt, Human
gacaugucuguucua

SEQ ID NO: 1473465 - RNA, 17 nt, Human
gacaugucuguucuaca

SEQ ID NO: 1473466 - RNA, 15 nt, Human
gacaggauccaggcc

SEQ ID NO: 1473467 - RNA, 13 nt, Human
gacaggauccagg

SEQ ID NO: 1473468 - RNA, 18 nt, Human
gacaggauccaggccggc

SEQ ID NO: 1473469 - RNA, 21 nt, Human
gacagcuucucauccugcagg

SEQ ID NO: 1473470 - RNA, 22 nt, Human
gacagcuucucauccugcaggc

SEQ ID NO: 1473471 - RNA, 19 nt, Human
gacagccaacuauggccug

SEQ ID NO: 1473472 - RNA, 16 nt, Human
gacagaugaggcuuuc

SEQ ID NO: 1473473 - RNA, 15 nt, Human
gacagaugaggcuuu

SEQ ID NO: 1473474 - RNA, 20 nt, Human
gacagaugaggcuuuccaug

SEQ ID NO: 1473475 - RNA, 22 nt, Human
gacagccaacuauggccugugg

SEQ ID NO: 1473476 - RNA, 18 nt, Human
gaagaucccccagaaaag

SEQ ID NO: 1473477 - RNA, 15 nt, Human
gaagaucccccagaa

SEQ ID NO: 1473478 - RNA, 14 nt, Human
gaagaucccccaga

SEQ ID NO: 1473479 - RNA, 14 nt, Human
gaagauauuuuucc

SEQ ID NO: 1473480 - RNA, 22 nt, Human
gaagauugagauguguucacaa

SEQ ID NO: 1473481 - RNA, 17 nt, Human
gaagauugagauguguu

SEQ ID NO: 1473482 - RNA, 19 nt, Human
gaagaaguuucaucauuuu

SEQ ID NO: 1473483 - RNA, 16 nt, Human
gaagaaggugggagga

SEQ ID NO: 1473484 - RNA, 10 nt, Human
gaagaggacu

SEQ ID NO: 1473485 - RNA, 22 nt, Human
gaacuugaaauauccugcuuga

SEQ ID NO: 1473486 - RNA, 15 nt, Human
gaacuugaacugauu

SEQ ID NO: 1473487 - RNA, 16 nt, Human
gaacuugaacugauuc

SEQ ID NO: 1473488 - RNA, 14 nt, Human
gaaccacaagacug

SEQ ID NO: 1473489 - RNA, 15 nt, Human
gaaccacaagacugc

SEQ ID NO: 1473490 - RNA, 19 nt, Human
gaaccaauaaaauaauuuu

SEQ ID NO: 1473491 - RNA, 24 nt, Human
gaacuuuccacauucagagcuuac

SEQ ID NO: 1473492 - RNA, 20 nt, Human
gaagaaagaacggaagaaga

SEQ ID NO: 1473493 - RNA, 23 nt, Human
gaaguccaagcauuuagauguau

SEQ ID NO: 1473494 - RNA, 21 nt, Human
gaagucacauuccugaacagg

SEQ ID NO: 1473495 - RNA, 16 nt, Human
gaagucacauuccuga

SEQ ID NO: 1473496 - RNA, 20 nt, Human
gaagucacauuccugaacag

SEQ ID NO: 1473497 - RNA, 14 nt, Human
gaaguaacuacagu

SEQ ID NO: 1473498 - RNA, 21 nt, Human
gaaggugaggagcuugaaacc

SEQ ID NO: 1473499 - RNA, 19 nt, Human
gaaguauuuugcuggaaua

SEQ ID NO: 1473500 - RNA, 20 nt, Human
gaaggugaaacauuuucucc

SEQ ID NO: 1473501 - RNA, 13 nt, Human
gaaggcauggcgg

SEQ ID NO: 1473502 - RNA, 21 nt, Human
gaaggaucccaugagcuccuu

SEQ ID NO: 1473503 - RNA, 22 nt, Human
gaaggaaggcuccaucuccagu

SEQ ID NO: 1473504 - RNA, 20 nt, Human
gaaggaaggcagggaggagg

SEQ ID NO: 1473505 - RNA, 19 nt, Human
gaaggaaggcagggaggag

SEQ ID NO: 1473506 - RNA, 18 nt, Human
gaaggaaggcagggagga

SEQ ID NO: 1473507 - RNA, 19 nt, Human
gaaggaggacccaggacag

SEQ ID NO: 1473508 - RNA, 18 nt, Human
gaaggaggacccaggaca

SEQ ID NO: 1473509 - RNA, 17 nt, Human
gaaggaggacccaggac

SEQ ID NO: 1473510 - RNA, 16 nt, Human
gaaggaggacccagga

SEQ ID NO: 1473511 - RNA, 15 nt, Human
gaaggaggacccagg

SEQ ID NO: 1473512 - RNA, 14 nt, Human
gaaggaggacccag

SEQ ID NO: 1473513 - RNA, 13 nt, Human
gaaggaggaccca

SEQ ID NO: 1473514 - RNA, 19 nt, Human
gaagcauuuguuucuacuu

SEQ ID NO: 1473515 - RNA, 13 nt, Human
gaagcauuuguuu

SEQ ID NO: 1473516 - RNA, 16 nt, Human
gaagcuguugugugag

SEQ ID NO: 1473517 - RNA, 14 nt, Human
gaaauaaacgucuu

SEQ ID NO: 1473518 - RNA, 16 nt, Human
gaaauaaacgucuuaa

SEQ ID NO: 1473519 - RNA, 17 nt, Human
gaaauaaacgucuuaaa

SEQ ID NO: 1473520 - RNA, 18 nt, Human
gaaauaaacgucuuaaau

SEQ ID NO: 1473521 - RNA, 21 nt, Human
gaaauaaacgucuuaaauauu

SEQ ID NO: 1473522 - RNA, 15 nt, Human
gaaauauuuauuuua

SEQ ID NO: 1473523 - RNA, 16 nt, Human
gaaauauuuauuuuaa

SEQ ID NO: 1473524 - RNA, 15 nt, Human
gaaauauccugcuug

SEQ ID NO: 1473525 - RNA, 15 nt, Human
gaaaugaauuaaagu

SEQ ID NO: 1473526 - RNA, 13 nt, Human
gaaauauuuauuu

SEQ ID NO: 1473527 - RNA, 23 nt, Human
gaaaugugguagccucacuuuua

SEQ ID NO: 1473528 - RNA, 22 nt, Human
gaaauucccuucaucuggaacc

SEQ ID NO: 1473529 - RNA, 21 nt, Human
gaaauucccuucaucuggaac

SEQ ID NO: 1473530 - RNA, 17 nt, Human
gaaauucccuucaucug

SEQ ID NO: 1473531 - RNA, 23 nt, Human
gaaauuaugugacauuuuacauu

SEQ ID NO: 1473532 - RNA, 22 nt, Human
gaaauuaugugacauuuuacau

SEQ ID NO: 1473533 - RNA, 23 nt, Human
gaaauuaguacuccccuccuuga

SEQ ID NO: 1473534 - RNA, 21 nt, Human
gaaauuuccugggagcuuuug

SEQ ID NO: 1473535 - RNA, 22 nt, Human
gaacaguuguguuugaagcaca

SEQ ID NO: 1473536 - RNA, 24 nt, Human
gaaccaacaaccucaacugccuac

SEQ ID NO: 1473537 - RNA, 24 nt, Human
gaacaguuaccucugccucagaaa

SEQ ID NO: 1473538 - RNA, 20 nt, Human
gaacaguuguguuugaagca

SEQ ID NO: 1473539 - RNA, 17 nt, Human
gaacaggauauucucac

SEQ ID NO: 1473540 - RNA, 20 nt, Human
gaaagucagccauaucucca

SEQ ID NO: 1473541 - RNA, 16 nt, Human
gaaaggaagcugugcg

SEQ ID NO: 1473542 - RNA, 23 nt, Human
gaaagccaaggagucacugagac

SEQ ID NO: 1473543 - RNA, 20 nt, Human
gaaacuaggugcauauuuau

SEQ ID NO: 1473544 - RNA, 18 nt, Human
gaaacucauagacacuga

SEQ ID NO: 1473545 - RNA, 17 nt, Human
gaaaccuuccacccagu

SEQ ID NO: 1473546 - RNA, 15 nt, Human
gaaaccuuccaccca

SEQ ID NO: 1473547 - RNA, 12 nt, Human
gaaaaauguagg

SEQ ID NO: 1473548 - RNA, 14 nt, Human
gaaaaauguaggag

SEQ ID NO: 1473549 - RNA, 17 nt, Human
gaaaaauguaggagacu

SEQ ID NO: 1473550 - RNA, 14 nt, Human
gaaaaagaagaauc

SEQ ID NO: 1473551 - RNA, 12 nt, Human
gaaaaagaagca

SEQ ID NO: 1473552 - RNA, 16 nt, Human
gaaagagauacagagg

SEQ ID NO: 1473553 - RNA, 18 nt, Human
gaaacugaggaauuuucu

SEQ ID NO: 1473554 - RNA, 22 nt, Human
gaaacugaggaauuuucuuugu

SEQ ID NO: 1473555 - RNA, 22 nt, Human
cuuuuaaaugauugaauuauau

SEQ ID NO: 1473556 - RNA, 17 nt, Human
cuuuuaaaccauuuucu

SEQ ID NO: 1473557 - RNA, 12 nt, Human
cuuuuaaacugu

SEQ ID NO: 1473558 - RNA, 13 nt, Human
cuuuuaaacugug

SEQ ID NO: 1473559 - RNA, 15 nt, Human
cuuuuaaacugugua

SEQ ID NO: 1473560 - RNA, 22 nt, Human
cuuuuaacuguuguagaagaca

SEQ ID NO: 1473561 - RNA, 22 nt, Human
cuuuuaacagagucugaaccua

SEQ ID NO: 1473562 - RNA, 12 nt, Human
cuuuggacuugu

SEQ ID NO: 1473563 - RNA, 17 nt, Human
cuuuggaccuaauccaa

SEQ ID NO: 1473564 - RNA, 16 nt, Human
cuuuggaccuaaucca

SEQ ID NO: 1473565 - RNA, 15 nt, Human
cuuuuaaugaacaaa

SEQ ID NO: 1473566 - RNA, 16 nt, Human
cuuuuaaugaacaaau

SEQ ID NO: 1473567 - RNA, 18 nt, Human
cuuuuaaugaacaaaugg

SEQ ID NO: 1473568 - RNA, 16 nt, Human
cuuuuuucaaaagaaa

SEQ ID NO: 1473569 - RNA, 19 nt, Human
cuuuuuuaucaugugaaau

SEQ ID NO: 1473570 - RNA, 13 nt, Human
cuuuuuccagagg

SEQ ID NO: 1473571 - RNA, 17 nt, Human
cuuuuuccaacaagaag

SEQ ID NO: 1473572 - RNA, 23 nt, Human
cuuuuuccaacuuggcugcagga

SEQ ID NO: 1473573 - RNA, 20 nt, Human
cuuuuuaccaaguuucaggu

SEQ ID NO: 1473574 - RNA, 20 nt, Human
cuuuuuaaauguaaagauau

SEQ ID NO: 1473575 - RNA, 21 nt, Human
cuuuuuaaauguaaagauauu

SEQ ID NO: 1473576 - RNA, 21 nt, Human
cuuucuuucaauaaaacgcag

SEQ ID NO: 1473577 - RNA, 13 nt, Human
cuuucuuucuuua

SEQ ID NO: 1473578 - RNA, 15 nt, Human
cuuucuuuauuuuga

SEQ ID NO: 1473579 - RNA, 13 nt, Human
cuuucuuccaaac

SEQ ID NO: 1473580 - RNA, 19 nt, Human
cuuucuuccaaacaggcuc

SEQ ID NO: 1473581 - RNA, 22 nt, Human
cuuucuuccaaacaggcucaga

SEQ ID NO: 1473582 - RNA, 21 nt, Human
cuuugccacccucaugcugug

SEQ ID NO: 1473583 - RNA, 15 nt, Human
cuuugcccagaaaga

SEQ ID NO: 1473584 - RNA, 22 nt, Human
cuuugcccugcugcccuccccc

SEQ ID NO: 1473585 - RNA, 20 nt, Human
cuuugcccugcugcccuccc

SEQ ID NO: 1473586 - RNA, 18 nt, Human
cuuugcccugcugcccuc

SEQ ID NO: 1473587 - RNA, 21 nt, Human
cuuugaaguuagcuuuaacuu

SEQ ID NO: 1473588 - RNA, 18 nt, Human
cuuugaauccucucucug

SEQ ID NO: 1473589 - RNA, 19 nt, Human
cuuugaauccucucucugu

SEQ ID NO: 1473590 - RNA, 23 nt, Human
cuuugaauccucucucuguguua

SEQ ID NO: 1473591 - RNA, 19 nt, Human
cuuuauuuuguguuuagga

SEQ ID NO: 1473592 - RNA, 13 nt, Human
cuuuauuuugaga

SEQ ID NO: 1473593 - RNA, 14 nt, Human
cuugucaugugaca

SEQ ID NO: 1473594 - RNA, 15 nt, Human
cuugugucucugugc

SEQ ID NO: 1473595 - RNA, 17 nt, Human
cuugugucucugugcuu

SEQ ID NO: 1473596 - RNA, 18 nt, Human
cuugugucucugugcuuu

SEQ ID NO: 1473597 - RNA, 21 nt, Human
cuugugucucugugcuuuuaa

SEQ ID NO: 1473598 - RNA, 10 nt, Human
cuugugucug

SEQ ID NO: 1473599 - RNA, 11 nt, Human
cuuuauuuuga

SEQ ID NO: 1473600 - RNA, 13 nt, Human
cuuguauuaugug

SEQ ID NO: 1473601 - RNA, 23 nt, Human
cuuguaaauuauuaauuuaugca

SEQ ID NO: 1473602 - RNA, 14 nt, Human
cuuguaagacccuu

SEQ ID NO: 1473603 - RNA, 18 nt, Human
cuuguauuauguguguuu

SEQ ID NO: 1473604 - RNA, 23 nt, Human
cuugucacgccagacuucccacg

SEQ ID NO: 1473605 - RNA, 15 nt, Human
cuugucacugguaga

SEQ ID NO: 1473606 - RNA, 23 nt, Human
cuugucacugguagaccaaaaua

SEQ ID NO: 1473607 - RNA, 22 nt, Human
cuugucacugguagaccaaaau

SEQ ID NO: 1473608 - RNA, 18 nt, Human
cuuguaaaggaauuuaaa

SEQ ID NO: 1473609 - RNA, 21 nt, Human
cuugguuuugcuacauaauua

SEQ ID NO: 1473610 - RNA, 20 nt, Human
cuuggggaguuuaggguggg

SEQ ID NO: 1473611 - RNA, 21 nt, Human
cuuggggaguuuagggugggg

SEQ ID NO: 1473612 - RNA, 19 nt, Human
cuuggggauucuuccaucu

SEQ ID NO: 1473613 - RNA, 21 nt, Human
cuuggggauucuuccaucuga

SEQ ID NO: 1473614 - RNA, 13 nt, Human
cuuggcugcagga

SEQ ID NO: 1473615 - RNA, 17 nt, Human
cuugccaaauauaaaua

SEQ ID NO: 1473616 - RNA, 13 nt, Human
cuugcuggaagac

SEQ ID NO: 1473617 - RNA, 15 nt, Human
cuugcuuuuaaaauc

SEQ ID NO: 1473618 - RNA, 17 nt, Human
cuuggauuccugauagu

SEQ ID NO: 1473619 - RNA, 14 nt, Human
cuugaacugauuca

SEQ ID NO: 1473620 - RNA, 13 nt, Human
cuugaaauuuuaa

SEQ ID NO: 1473621 - RNA, 14 nt, Human
cuugaaauuuuaac

SEQ ID NO: 1473622 - RNA, 13 nt, Human
cuucuuuccacag

SEQ ID NO: 1473623 - RNA, 19 nt, Human
cuucuuuccacagaagcuc

SEQ ID NO: 1473624 - RNA, 20 nt, Human
cuucuuuuuucaaaagaaag

SEQ ID NO: 1473625 - RNA, 19 nt, Human
cuucuuuuuucaaaagaaa

SEQ ID NO: 1473626 - RNA, 18 nt, Human
cuugaaauauccugcuug

SEQ ID NO: 1473627 - RNA, 19 nt, Human
cuugaaauauccugcuuga

SEQ ID NO: 1473628 - RNA, 19 nt, Human
cuucuuuuaaaccauuuuc

SEQ ID NO: 1473629 - RNA, 13 nt, Human
cuucuuuugcucu

SEQ ID NO: 1473630 - RNA, 14 nt, Human
cuucuuuugcucuu

SEQ ID NO: 1473631 - RNA, 13 nt, Human
cuucuuuugugaa

SEQ ID NO: 1473632 - RNA, 18 nt, Human
cuugaggacacaugucca

SEQ ID NO: 1473633 - RNA, 17 nt, Human
cuugaggacacaugucc

SEQ ID NO: 1473634 - RNA, 18 nt, Human
cuugagccaggaggccug

SEQ ID NO: 1473635 - RNA, 18 nt, Human
cuugagggcaagagccac

SEQ ID NO: 1473636 - RNA, 16 nt, Human
cuugaggacacauguc

SEQ ID NO: 1473637 - RNA, 15 nt, Human
cuugaggacacaugu

SEQ ID NO: 1473638 - RNA, 14 nt, Human
cuugaggacacaug

SEQ ID NO: 1473639 - RNA, 13 nt, Human
cuugaggacacau

SEQ ID NO: 1473640 - RNA, 12 nt, Human
cuugaggacaca

SEQ ID NO: 1473641 - RNA, 23 nt, Human
cuugcaggaaggacuaugaaaag

SEQ ID NO: 1473642 - RNA, 13 nt, Human
cuugcaugcuugc

SEQ ID NO: 1473643 - RNA, 15 nt, Human
cuguaugauucccag

SEQ ID NO: 1473644 - RNA, 18 nt, Human
cuguauuugaaucagccu

SEQ ID NO: 1473645 - RNA, 13 nt, Human
cuguauuuuaaaa

SEQ ID NO: 1473646 - RNA, 16 nt, Human
cuguauuuuaaaagaa

SEQ ID NO: 1473647 - RNA, 19 nt, Human
cuguauuuuaaaagaauga

SEQ ID NO: 1473648 - RNA, 13 nt, Human
cugucucucauga

SEQ ID NO: 1473649 - RNA, 17 nt, Human
cugucucucaugaaccu

SEQ ID NO: 1473650 - RNA, 22 nt, Human
cugggucgcccuggacugugug

SEQ ID NO: 1473651 - RNA, 18 nt, Human
cugggucgcccuggacug

SEQ ID NO: 1473652 - RNA, 17 nt, Human
cugggucgcccuggacu

SEQ ID NO: 1473653 - RNA, 15 nt, Human
cugguccaaaagauu

SEQ ID NO: 1473654 - RNA, 22 nt, Human
cugguccaaaagauugcugaaa

SEQ ID NO: 1473655 - RNA, 18 nt, Human
cuguaaggcaaucauggu

SEQ ID NO: 1473656 - RNA, 20 nt, Human
cugguucacacugaccaaga

SEQ ID NO: 1473657 - RNA, 14 nt, Human
cugguguuucuuga

SEQ ID NO: 1473658 - RNA, 13 nt, Human
cugguguuucuug

SEQ ID NO: 1473659 - RNA, 23 nt, Human
cuggucucaaacuccugaccuca

SEQ ID NO: 1473660 - RNA, 19 nt, Human
cuggucucaaacuccugac

SEQ ID NO: 1473661 - RNA, 20 nt, Human
cuguaaguagaugcauuugg

SEQ ID NO: 1473662 - RNA, 21 nt, Human
cugggaggcucuggagcccac

SEQ ID NO: 1473663 - RNA, 20 nt, Human
cugggaggcucuggagccca

SEQ ID NO: 1473664 - RNA, 18 nt, Human
cugggaggcucuggagcc

SEQ ID NO: 1473665 - RNA, 22 nt, Human
cugggaggcucuggagcccacu

SEQ ID NO: 1473666 - RNA, 17 nt, Human
cugggaggcucuggagc

SEQ ID NO: 1473667 - RNA, 19 nt, Human
cugggaggagggcaggcau

SEQ ID NO: 1473668 - RNA, 23 nt, Human
cugggauuacaggugugagccac

SEQ ID NO: 1473669 - RNA, 10 nt, Human
cugggccccu

SEQ ID NO: 1473670 - RNA, 16 nt, Human
cuggcuugggcagcau

SEQ ID NO: 1473671 - RNA, 18 nt, Human
cuggcuguggccuaaccu

SEQ ID NO: 1473672 - RNA, 18 nt, Human
cuggaauacaugaaauau

SEQ ID NO: 1473673 - RNA, 20 nt, Human
cuggaaucagcucaggacug

SEQ ID NO: 1473674 - RNA, 20 nt, Human
cuggaagugcuaauuuugaa

SEQ ID NO: 1473675 - RNA, 14 nt, Human
cuggcaacaucuuu

SEQ ID NO: 1473676 - RNA, 17 nt, Human
cuggcaacaucuuuauc

SEQ ID NO: 1473677 - RNA, 22 nt, Human
cuggaagcauuuguuucuacuu

SEQ ID NO: 1473678 - RNA, 23 nt, Human
cuggcacagccuggcuguggccu

SEQ ID NO: 1473679 - RNA, 16 nt, Human
cuggcacagccuggcu

SEQ ID NO: 1473680 - RNA, 21 nt, Human
cuggcacagccuggcuguggc

SEQ ID NO: 1473681 - RNA, 15 nt, Human
cuggcacagccuggc

SEQ ID NO: 1473682 - RNA, 23 nt, Human
cuggcauuacaggugugagccac

SEQ ID NO: 1473683 - RNA, 15 nt, Human
cuggcauuacagcug

SEQ ID NO: 1473684 - RNA, 16 nt, Human
cuggcauuacagcugg

SEQ ID NO: 1473685 - RNA, 13 nt, Human
cuggcccccuccc

SEQ ID NO: 1473686 - RNA, 15 nt, Human
cuggcccccucccug

SEQ ID NO: 1473687 - RNA, 16 nt, Human
cuggcccccucccugg

SEQ ID NO: 1473688 - RNA, 17 nt, Human
cuggcccccucccugga

SEQ ID NO: 1473689 - RNA, 18 nt, Human
cuggcccccucccuggau

SEQ ID NO: 1473690 - RNA, 19 nt, Human
cuggcccccucccuggaug

SEQ ID NO: 1473691 - RNA, 23 nt, Human
cugcaggucccuaauaaagcugu

SEQ ID NO: 1473692 - RNA, 17 nt, Human
cugcaguaugaaaauaa

SEQ ID NO: 1473693 - RNA, 16 nt, Human
cugcaguaugaaaaua

SEQ ID NO: 1473694 - RNA, 22 nt, Human
cugcaggucccuaauaaagcug

SEQ ID NO: 1473695 - RNA, 21 nt, Human
cugcaggucccuaauaaagcu

SEQ ID NO: 1473696 - RNA, 20 nt, Human
cugcaggucccuaauaaagc

SEQ ID NO: 1473697 - RNA, 19 nt, Human
cugcaggucccuaauaaag

SEQ ID NO: 1473698 - RNA, 23 nt, Human
cugcagucucuauaccaauaaag

SEQ ID NO: 1473699 - RNA, 21 nt, Human
cugcagucucuauaccaauaa

SEQ ID NO: 1473700 - RNA, 17 nt, Human
cugcagucucuauacca

SEQ ID NO: 1473701 - RNA, 22 nt, Human
cugcaguuuugcuaucugggcu

SEQ ID NO: 1473702 - RNA, 18 nt, Human
cugcaggucccuaauaaa

SEQ ID NO: 1473703 - RNA, 17 nt, Human
cugcaggucccuaauaa

SEQ ID NO: 1473704 - RNA, 16 nt, Human
cugcaggucccuaaua

SEQ ID NO: 1473705 - RNA, 15 nt, Human
cugcaggucccuaau

SEQ ID NO: 1473706 - RNA, 14 nt, Human
cugcaggucccuaa

SEQ ID NO: 1473707 - RNA, 13 nt, Human
cugcaggucccua

SEQ ID NO: 1473708 - RNA, 12 nt, Human
cugcaggucccu

SEQ ID NO: 1473709 - RNA, 11 nt, Human
cugcagguccc

SEQ ID NO: 1473710 - RNA, 17 nt, Human
cugcagggggugugucu

SEQ ID NO: 1473711 - RNA, 20 nt, Human
cugcagggggugugucugcu

SEQ ID NO: 1473712 - RNA, 23 nt, Human
cugcagggggugugucugcucag

SEQ ID NO: 1473713 - RNA, 11 nt, Human
cugcacuguaa

SEQ ID NO: 1473714 - RNA, 13 nt, Human
cugcacuguaaaa

SEQ ID NO: 1473715 - RNA, 14 nt, Human
cugcacuguaaaau

SEQ ID NO: 1473716 - RNA, 15 nt, Human
cugcacuguaaaaug

SEQ ID NO: 1473717 - RNA, 20 nt, Human
cugcacuguaaaauguggga

SEQ ID NO: 1473718 - RNA, 16 nt, Human
cugcacuguaaaaugu

SEQ ID NO: 1473719 - RNA, 18 nt, Human
cugcacuguaaaaugugg

SEQ ID NO: 1473720 - RNA, 15 nt, Human
cugcagacucacugu

SEQ ID NO: 1473721 - RNA, 17 nt, Human
cugccauucacuucaua

SEQ ID NO: 1473722 - RNA, 19 nt, Human
cugcccgggagcucaggaa

SEQ ID NO: 1473723 - RNA, 14 nt, Human
cugcauacuuuuua

SEQ ID NO: 1473724 - RNA, 20 nt, Human
cugcauacuuuuuaaaugua

SEQ ID NO: 1473725 - RNA, 21 nt, Human
cugcaguuuugcuaucugggc

SEQ ID NO: 1473726 - RNA, 16 nt, Human
cugcaguuuugcuauc

SEQ ID NO: 1473727 - RNA, 15 nt, Human
cugcaguuuugcuau

SEQ ID NO: 1473728 - RNA, 11 nt, Human
cugccaggaga

SEQ ID NO: 1473729 - RNA, 23 nt, Human
cugcugccugcuuuuuauggccu

SEQ ID NO: 1473730 - RNA, 14 nt, Human
cugcugccugcuuu

SEQ ID NO: 1473731 - RNA, 11 nt, Human
cugcugccugc

SEQ ID NO: 1473732 - RNA, 22 nt, Human
cugccugcuuuuuauggccugu

SEQ ID NO: 1473733 - RNA, 19 nt, Human
cugccuggaagagcagccc

SEQ ID NO: 1473734 - RNA, 22 nt, Human
cugcgcccuuaacugcauccag

SEQ ID NO: 1473735 - RNA, 22 nt, Human
cugcccucucccaaaaaacuac

SEQ ID NO: 1473736 - RNA, 15 nt, Human
cugcccugcccugcc

SEQ ID NO: 1473737 - RNA, 14 nt, Human
cugcccugcccugc

SEQ ID NO: 1473738 - RNA, 18 nt, Human
cuggaagugacuuuggcu

SEQ ID NO: 1473739 - RNA, 15 nt, Human
cuggaagugacuuug

SEQ ID NO: 1473740 - RNA, 15 nt, Human
cuggaagccagcuuu

SEQ ID NO: 1473741 - RNA, 16 nt, Human
cuggaagccagcuuuc

SEQ ID NO: 1473742 - RNA, 17 nt, Human
cuggaagccagcuuucc

SEQ ID NO: 1473743 - RNA, 20 nt, Human
cuggaagccccugggcccag

SEQ ID NO: 1473744 - RNA, 21 nt, Human
cuggaagccccugggcccagu

SEQ ID NO: 1473745 - RNA, 17 nt, Human
cuggaagccccugggcc

SEQ ID NO: 1473746 - RNA, 21 nt, Human
cugcuugaugggauucuggac

SEQ ID NO: 1473747 - RNA, 23 nt, Human
cugcuugaugggauucuggacag

SEQ ID NO: 1473748 - RNA, 13 nt, Human
cugcuugauuuuu

SEQ ID NO: 1473749 - RNA, 20 nt, Human
cugcuugauuuuugccucuu

SEQ ID NO: 1473750 - RNA, 17 nt, Human
cugcuuggagcugagca

SEQ ID NO: 1473751 - RNA, 16 nt, Human
cugcuuggagcugagc

SEQ ID NO: 1473752 - RNA, 19 nt, Human
cugcuucugacauaaucca

SEQ ID NO: 1473753 - RNA, 13 nt, Human
cugcugccugccu

SEQ ID NO: 1473754 - RNA, 19 nt, Human
cucuuuaaaaggaaagaaa

SEQ ID NO: 1473755 - RNA, 23 nt, Human
cucuuuaaaaggaaagaaaacau

SEQ ID NO: 1473756 - RNA, 20 nt, Human
cucuuuaaaaggaaagaaaa

SEQ ID NO: 1473757 - RNA, 14 nt, Human
cucuucccucuucc

SEQ ID NO: 1473758 - RNA, 20 nt, Human
cucuuccgugacgucacugg

SEQ ID NO: 1473759 - RNA, 15 nt, Human
cucuucuugaaauuu

SEQ ID NO: 1473760 - RNA, 20 nt, Human
cucuucuugaaauuuuaacc

SEQ ID NO: 1473761 - RNA, 23 nt, Human
cucuucuuuuaaaccauuuucuu

SEQ ID NO: 1473762 - RNA, 23 nt, Human
cucuuggggaguuuagggugggg

SEQ ID NO: 1473763 - RNA, 21 nt, Human
cugaaauaaacgucuuaaaua

SEQ ID NO: 1473764 - RNA, 16 nt, Human
cugaaagccauggaga

SEQ ID NO: 1473765 - RNA, 16 nt, Human
cugaaaggaagcugug

SEQ ID NO: 1473766 - RNA, 17 nt, Human
cucuuucuuucaauaaa

SEQ ID NO: 1473767 - RNA, 21 nt, Human
cucuuuaugcuugcaaaaacu

SEQ ID NO: 1473768 - RNA, 13 nt, Human
cugaaauuuccug

SEQ ID NO: 1473769 - RNA, 13 nt, Human
cugaaauuucaga

SEQ ID NO: 1473770 - RNA, 23 nt, Human
cugaaauuuccugggagcuuuug

SEQ ID NO: 1473771 - RNA, 18 nt, Human
cugaaaucaauuaaaagu

SEQ ID NO: 1473772 - RNA, 16 nt, Human
cugaaauuuccuggga

SEQ ID NO: 1473773 - RNA, 14 nt, Human
cugaaauuucagau

SEQ ID NO: 1473774 - RNA, 13 nt, Human
cugaaauuuuaua

SEQ ID NO: 1473775 - RNA, 22 nt, Human
cugaacaccauagguagaaugu

SEQ ID NO: 1473776 - RNA, 18 nt, Human
cugaacaccauugaaggc

SEQ ID NO: 1473777 - RNA, 19 nt, Human
cugaacaccauugaaggcu

SEQ ID NO: 1473778 - RNA, 20 nt, Human
cugaacaccauugaaggcuu

SEQ ID NO: 1473779 - RNA, 23 nt, Human
cugaagaagcaccaaucaugaau

SEQ ID NO: 1473780 - RNA, 13 nt, Human
cugaacugaacac

SEQ ID NO: 1473781 - RNA, 19 nt, Human
cugaacugauggguuucuc

SEQ ID NO: 1473782 - RNA, 23 nt, Human
cugaagacaccguucauucaggc

SEQ ID NO: 1473783 - RNA, 15 nt, Human
cugaacucaaacuga

SEQ ID NO: 1473784 - RNA, 18 nt, Human
cugaacucaaacugagga

SEQ ID NO: 1473785 - RNA, 22 nt, Human
cucugucuccuaagcuggagug

SEQ ID NO: 1473786 - RNA, 13 nt, Human
cucugucuucugg

SEQ ID NO: 1473787 - RNA, 14 nt, Human
cucugucuucugga

SEQ ID NO: 1473788 - RNA, 17 nt, Human
cucugucuucuggacug

SEQ ID NO: 1473789 - RNA, 17 nt, Human
cucugugagggugcuga

SEQ ID NO: 1473790 - RNA, 20 nt, Human
cucugugcacuuauuuauga

SEQ ID NO: 1473791 - RNA, 19 nt, Human
cucuguucauuccuccagg

SEQ ID NO: 1473792 - RNA, 18 nt, Human
cucuguucauuccuccag

SEQ ID NO: 1473793 - RNA, 13 nt, Human
cucuguucauuuc

SEQ ID NO: 1473794 - RNA, 14 nt, Human
cucuguucauuucc

SEQ ID NO: 1473795 - RNA, 17 nt, Human
cucuguucauuccucca

SEQ ID NO: 1473796 - RNA, 15 nt, Human
cucuguucauuccuc

SEQ ID NO: 1473797 - RNA, 22 nt, Human
cucugugcuuuuaaaugcauaa

SEQ ID NO: 1473798 - RNA, 17 nt, Human
cucugugggcuggcagu

SEQ ID NO: 1473799 - RNA, 17 nt, Human
cucuguucauuuccuca

SEQ ID NO: 1473800 - RNA, 16 nt, Human
cucuguucauuuccuc

SEQ ID NO: 1473801 - RNA, 19 nt, Human
cugaggaucagaguaaucc

SEQ ID NO: 1473802 - RNA, 20 nt, Human
cugagcccgguaagagcaaa

SEQ ID NO: 1473803 - RNA, 17 nt, Human
cugaggaucagaguaau

SEQ ID NO: 1473804 - RNA, 15 nt, Human
cugagcugaccagcc

SEQ ID NO: 1473805 - RNA, 15 nt, Human
cugagacaaugccuu

SEQ ID NO: 1473806 - RNA, 16 nt, Human
cugagccagugucagg

SEQ ID NO: 1473807 - RNA, 22 nt, Human
cugagccagugucaggaggaag

SEQ ID NO: 1473808 - RNA, 23 nt, Human
cugagcccgguaagagcaaaaga

SEQ ID NO: 1473809 - RNA, 13 nt, Human
cugagcuauuuca

SEQ ID NO: 1473810 - RNA, 16 nt, Human
cugagcuauuucaucu

SEQ ID NO: 1473811 - RNA, 21 nt, Human
cugagcuauuucaucuauuuu

SEQ ID NO: 1473812 - RNA, 14 nt, Human
cugagaaauuuaua

SEQ ID NO: 1473813 - RNA, 11 nt, Human
cugagaaauuu

SEQ ID NO: 1473814 - RNA, 16 nt, Human
cugagaagcucugaag

SEQ ID NO: 1473815 - RNA, 13 nt, Human
cugagaagcucug

SEQ ID NO: 1473816 - RNA, 17 nt, Human
cugacucuuaagaagac

SEQ ID NO: 1473817 - RNA, 18 nt, Human
cugacuagggagccaugu

SEQ ID NO: 1473818 - RNA, 18 nt, Human
cugacuauucuugaugua

SEQ ID NO: 1473819 - RNA, 19 nt, Human
cugacuauucuugauguaa

SEQ ID NO: 1473820 - RNA, 20 nt, Human
cugacuauucuugauguaaa

SEQ ID NO: 1473821 - RNA, 21 nt, Human
cugacuauucuugauguaaaa

SEQ ID NO: 1473822 - RNA, 22 nt, Human
cugacuauucuugauguaaaau

SEQ ID NO: 1473823 - RNA, 23 nt, Human
cugacuauucuugauguaaaauc

SEQ ID NO: 1473824 - RNA, 22 nt, Human
cugacucacaccugaacugaac

SEQ ID NO: 1473825 - RNA, 23 nt, Human
cugacaugaagcuguugugugag

SEQ ID NO: 1473826 - RNA, 21 nt, Human
cugacuagggagccauguuuc

SEQ ID NO: 1473827 - RNA, 21 nt, Human
cucucucauacccucccuccc

SEQ ID NO: 1473828 - RNA, 15 nt, Human
cucuccugucucccu

SEQ ID NO: 1473829 - RNA, 17 nt, Human
cucuccugucucccucc

SEQ ID NO: 1473830 - RNA, 18 nt, Human
cucuccugucucccuccu

SEQ ID NO: 1473831 - RNA, 18 nt, Human
cucuccagccucagcucu

SEQ ID NO: 1473832 - RNA, 16 nt, Human
cucuccaaaccacuuu

SEQ ID NO: 1473833 - RNA, 15 nt, Human
cucuccaaaccacuu

SEQ ID NO: 1473834 - RNA, 22 nt, Human
cucuccacucaugugacucuuu

SEQ ID NO: 1473835 - RNA, 21 nt, Human
cucuccacucaugugacucuu

SEQ ID NO: 1473836 - RNA, 17 nt, Human
cucuauaccaauaaagu

SEQ ID NO: 1473837 - RNA, 16 nt, Human
cucuauaccaauaaag

SEQ ID NO: 1473838 - RNA, 15 nt, Human
cucuauaccaauaaa

SEQ ID NO: 1473839 - RNA, 15 nt, Human
cucuaggaaauauuu

SEQ ID NO: 1473840 - RNA, 16 nt, Human
cucuagacacugccac

SEQ ID NO: 1473841 - RNA, 21 nt, Human
cucuagacacugccacacagg

SEQ ID NO: 1473842 - RNA, 17 nt, Human
cucuaggaaauauuuau

SEQ ID NO: 1473843 - RNA, 15 nt, Human
cucuaguauuccaga

SEQ ID NO: 1473844 - RNA, 21 nt, Human
cuccuucaacaauucuaaaau

SEQ ID NO: 1473845 - RNA, 18 nt, Human
cucgcuguccuuucuaga

SEQ ID NO: 1473846 - RNA, 16 nt, Human
cucuacaaacucccac

SEQ ID NO: 1473847 - RNA, 17 nt, Human
cucuacaaacucccacu

SEQ ID NO: 1473848 - RNA, 15 nt, Human
cucuacacucuugua

SEQ ID NO: 1473849 - RNA, 12 nt, Human
cucuaagaaaga

SEQ ID NO: 1473850 - RNA, 14 nt, Human
cucuaagaaagaac

SEQ ID NO: 1473851 - RNA, 13 nt, Human
cucuaacauuucc

SEQ ID NO: 1473852 - RNA, 22 nt, Human
cuccuccaggguggcagcaaca

SEQ ID NO: 1473853 - RNA, 21 nt, Human
cuccuccaggguggcagcaac

SEQ ID NO: 1473854 - RNA, 14 nt, Human
cuccuccaccucaa

SEQ ID NO: 1473855 - RNA, 15 nt, Human
cuccuccaccucaac

SEQ ID NO: 1473856 - RNA, 18 nt, Human
cuccucauucacaucgca

SEQ ID NO: 1473857 - RNA, 17 nt, Human
cuccucgagaucccaac

SEQ ID NO: 1473858 - RNA, 21 nt, Human
cuccucgagaucccaacacug

SEQ ID NO: 1473859 - RNA, 24 nt, Human
cuccucgagaucccaacacugcca

SEQ ID NO: 1473860 - RNA, 14 nt, Human
cucccucagugccc

SEQ ID NO: 1473861 - RNA, 23 nt, Human
cucccucagugcccucauuuuau

SEQ ID NO: 1473862 - RNA, 17 nt, Human
cuccucacccccagcuu

SEQ ID NO: 1473863 - RNA, 15 nt, Human
cuccucacccccagc

SEQ ID NO: 1473864 - RNA, 20 nt, Human
cuccucacccccagcuuugc

SEQ ID NO: 1473865 - RNA, 21 nt, Human
cuccucacccccagcuuugcu

SEQ ID NO: 1473866 - RNA, 20 nt, Human
cuccauggcccugccaugcu

SEQ ID NO: 1473867 - RNA, 18 nt, Human
cuccauccuacccccugu

SEQ ID NO: 1473868 - RNA, 23 nt, Human
cuccauccuacccccugugccuu

SEQ ID NO: 1473869 - RNA, 20 nt, Human
cuccauccuacccccugugc

SEQ ID NO: 1473870 - RNA, 22 nt, Human
cuccauccuacccccugugccu

SEQ ID NO: 1473871 - RNA, 22 nt, Human
cucccaagcaccugggauuaca

SEQ ID NO: 1473872 - RNA, 21 nt, Human
cucccaaagugcugggauuaa

SEQ ID NO: 1473873 - RNA, 13 nt, Human
cucccuacccuaa

SEQ ID NO: 1473874 - RNA, 17 nt, Human
cucccuaguuccuucau

SEQ ID NO: 1473875 - RNA, 21 nt, Human
cucccuauacugcuuggagcu

SEQ ID NO: 1473876 - RNA, 18 nt, Human
cucccuauacugcuugga

SEQ ID NO: 1473877 - RNA, 20 nt, Human
cuccccaaaggcuuugcccu

SEQ ID NO: 1473878 - RNA, 19 nt, Human
cuccccaaaggcuuugccc

SEQ ID NO: 1473879 - RNA, 21 nt, Human
cuccccaaaggcuuugcccug

SEQ ID NO: 1473880 - RNA, 12 nt, Human
cuaccaggaaag

SEQ ID NO: 1473881 - RNA, 13 nt, Human
cuacccccugugc

SEQ ID NO: 1473882 - RNA, 14 nt, Human
cuacccccugugcc

SEQ ID NO: 1473883 - RNA, 23 nt, Human
cuacacucuuguaauaaaauguc

SEQ ID NO: 1473884 - RNA, 23 nt, Human
cuaauguggaccuuagaauacag

SEQ ID NO: 1473885 - RNA, 17 nt, Human
cuaaucuuauucauuuu

SEQ ID NO: 1473886 - RNA, 18 nt, Human
cuaaucuuauucauuuuc

SEQ ID NO: 1473887 - RNA, 19 nt, Human
cuaaucuuauucauuuucu

SEQ ID NO: 1473888 - RNA, 21 nt, Human
cuaaucuuauucauuuucucu

SEQ ID NO: 1473889 - RNA, 22 nt, Human
cuaaugacaucaccacaguuua

SEQ ID NO: 1473890 - RNA, 16 nt, Human
cuaaucuacuuucugu

SEQ ID NO: 1473891 - RNA, 14 nt, Human
cuaaucucuguaaa

SEQ ID NO: 1473892 - RNA, 20 nt, Human
cuaaucucuguaaagcuaaa

SEQ ID NO: 1473893 - RNA, 15 nt, Human
cuaauccccuucucc

SEQ ID NO: 1473894 - RNA, 16 nt, Human
cuaauccccuucuccc

SEQ ID NO: 1473895 - RNA, 18 nt, Human
cuaauccccuucuccccu

SEQ ID NO: 1473896 - RNA, 20 nt, Human
cuaauccccuucuccccugc

SEQ ID NO: 1473897 - RNA, 14 nt, Human
cuaauaaagcugug

SEQ ID NO: 1473898 - RNA, 13 nt, Human
cuaauaaagcugu

SEQ ID NO: 1473899 - RNA, 12 nt, Human
cuaauaaagcug

SEQ ID NO: 1473900 - RNA, 17 nt, Human
cuaagcuaggaaugaaa

SEQ ID NO: 1473901 - RNA, 22 nt, Human
cuaagcuaggaaugaaauccug

SEQ ID NO: 1473902 - RNA, 22 nt, Human
cuaagccagcugcccccagagc

SEQ ID NO: 1473903 - RNA, 23 nt, Human
cuaagcgcuagaggaagcagcca

SEQ ID NO: 1473904 - RNA, 14 nt, Human
cuaagcuaggaaug

SEQ ID NO: 1473905 - RNA, 23 nt, Human
cuaaggaguguagcaacuacagu

SEQ ID NO: 1473906 - RNA, 16 nt, Human
cuaagccagcugcccc

SEQ ID NO: 1473907 - RNA, 15 nt, Human
cuaagccagcugccc

SEQ ID NO: 1473908 - RNA, 23 nt, Human
cuacuucuuuuuucaaaagaaag

SEQ ID NO: 1473909 - RNA, 22 nt, Human
cuacuucuuuugcucuuagcug

SEQ ID NO: 1473910 - RNA, 14 nt, Human
cuacuugcucaggu

SEQ ID NO: 1473911 - RNA, 22 nt, Human
cuacuuucugugucuauggauu

SEQ ID NO: 1473912 - RNA, 18 nt, Human
cuacuuugacuuuuugca

SEQ ID NO: 1473913 - RNA, 19 nt, Human
cuacuuugacuuuuugcau

SEQ ID NO: 1473914 - RNA, 20 nt, Human
cuacuuugacuuuuugcauu

SEQ ID NO: 1473915 - RNA, 21 nt, Human
cuacuuugacuuuuugcauuu

SEQ ID NO: 1473916 - RNA, 22 nt, Human
cuacuuauuguagcauccugga

SEQ ID NO: 1473917 - RNA, 16 nt, Human
cuacuuccaaacuaau

SEQ ID NO: 1473918 - RNA, 19 nt, Human
cuacuuccaaacuaauuuu

SEQ ID NO: 1473919 - RNA, 21 nt, Human
cuacuguaaggcaaucauggu

SEQ ID NO: 1473920 - RNA, 13 nt, Human
cuacugaagcccu

SEQ ID NO: 1473921 - RNA, 14 nt, Human
cuacugaagcccuu

SEQ ID NO: 1473922 - RNA, 15 nt, Human
cuacccuaaccaagu

SEQ ID NO: 1473923 - RNA, 16 nt, Human
cuagcaaaagugcaag

SEQ ID NO: 1473924 - RNA, 17 nt, Human
cuagcaaaagugcaaga

SEQ ID NO: 1473925 - RNA, 24 nt, Human
cuagauugagagaagagacaaaca

SEQ ID NO: 1473926 - RNA, 17 nt, Human
cuacuuugauaugacug

SEQ ID NO: 1473927 - RNA, 21 nt, Human
cuacuuugauaugacuguuuu

SEQ ID NO: 1473928 - RNA, 16 nt, Human
cuagaggaagcagcca

SEQ ID NO: 1473929 - RNA, 15 nt, Human
cuagaggugagaaau

SEQ ID NO: 1473930 - RNA, 17 nt, Human
cuagaggugagaaauuu

SEQ ID NO: 1473931 - RNA, 19 nt, Human
cuagaggugagaaauuuaa

SEQ ID NO: 1473932 - RNA, 22 nt, Human
cuaggacugaauuaugaaacuu

SEQ ID NO: 1473933 - RNA, 20 nt, Human
cuaggacacaguuccuggga

SEQ ID NO: 1473934 - RNA, 16 nt, Human
cuaggaaugaaauccu

SEQ ID NO: 1473935 - RNA, 17 nt, Human
cuaggaaugaaauccug

SEQ ID NO: 1473936 - RNA, 19 nt, Human
cuaggacacaguuccuggg

SEQ ID NO: 1473937 - RNA, 15 nt, Human
cuaggacacaguucc

SEQ ID NO: 1473938 - RNA, 22 nt, Human
cuaggaugugcauucuccagcc

SEQ ID NO: 1473939 - RNA, 13 nt, Human
cuaggcaacauag

SEQ ID NO: 1473940 - RNA, 22 nt, Human
cuaguauuucuaugaaauauua

SEQ ID NO: 1473941 - RNA, 19 nt, Human
cuaguauuucuaugaaaua

SEQ ID NO: 1473942 - RNA, 20 nt, Human
cuaguauuucuaugaaauau

SEQ ID NO: 1473943 - RNA, 23 nt, Human
cuaguauuccagaccugaagaau

SEQ ID NO: 1473944 - RNA, 20 nt, Human
cuaggcaguucaaagcagga

SEQ ID NO: 1473945 - RNA, 20 nt, Human
cuaguguagaauugugcaac

SEQ ID NO: 1473946 - RNA, 13 nt, Human
cuaguguagaauu

SEQ ID NO: 1473947 - RNA, 12 nt, Human
cuaguccuuguu

SEQ ID NO: 1473948 - RNA, 12 nt, Human
cuaucuuugcca

SEQ ID NO: 1473949 - RNA, 18 nt, Human
cuaucuuacuauuucaca

SEQ ID NO: 1473950 - RNA, 19 nt, Human
cuaucuuugccacccucau

SEQ ID NO: 1473951 - RNA, 18 nt, Human
cuaucuuugccacccuca

SEQ ID NO: 1473952 - RNA, 15 nt, Human
cuaucuuugccaccc

SEQ ID NO: 1473953 - RNA, 14 nt, Human
cuaucuuugccacc

SEQ ID NO: 1473954 - RNA, 13 nt, Human
cuaugaaauauua

SEQ ID NO: 1473955 - RNA, 21 nt, Human
cuaucuuugccacccucaugc

SEQ ID NO: 1473956 - RNA, 16 nt, Human
cuaugaaaagcuagaa

SEQ ID NO: 1473957 - RNA, 21 nt, Human
cuaugaaaagcuagaauugag

SEQ ID NO: 1473958 - RNA, 18 nt, Human
cuaugaaauauuauguua

SEQ ID NO: 1473959 - RNA, 21 nt, Human
cuaucaaccccagacacuggu

SEQ ID NO: 1473960 - RNA, 17 nt, Human
cuaucaaccccagacac

SEQ ID NO: 1473961 - RNA, 19 nt, Human
cuaucaaccccagacacug

SEQ ID NO: 1473962 - RNA, 20 nt, Human
cuaucaaccccagacacugg

SEQ ID NO: 1473963 - RNA, 19 nt, Human
cuauauuguuugcuaagca

SEQ ID NO: 1473964 - RNA, 13 nt, Human
cucacauuuauau

SEQ ID NO: 1473965 - RNA, 22 nt, Human
cucacaugauuccagccaucac

SEQ ID NO: 1473966 - RNA, 15 nt, Human
cucacccauccuaga

SEQ ID NO: 1473967 - RNA, 14 nt, Human
cucacccauccuag

SEQ ID NO: 1473968 - RNA, 18 nt, Human
cucacaugauuccagcca

SEQ ID NO: 1473969 - RNA, 17 nt, Human
cucacccauccuagagg

SEQ ID NO: 1473970 - RNA, 22 nt, Human
cuauuuuaauaaacacucuuga

SEQ ID NO: 1473971 - RNA, 18 nt, Human
cuauuuuaauaaacacuc

SEQ ID NO: 1473972 - RNA, 22 nt, Human
cuauuuguugaugcuuguguca

SEQ ID NO: 1473973 - RNA, 12 nt, Human
cuauuuucagau

SEQ ID NO: 1473974 - RNA, 18 nt, Human
cuauuuucagaugugaac

SEQ ID NO: 1473975 - RNA, 22 nt, Human
cuauuuucagaugugaaccauu

SEQ ID NO: 1473976 - RNA, 12 nt, Human
cuauuuuguaaa

SEQ ID NO: 1473977 - RNA, 19 nt, Human
cuauuuuguaaacucaaaa

SEQ ID NO: 1473978 - RNA, 13 nt, Human
cucaacugccuac

SEQ ID NO: 1473979 - RNA, 15 nt, Human
cucaacugccuacuc

SEQ ID NO: 1473980 - RNA, 23 nt, Human
cucaacugccuacuccaaaaugu

SEQ ID NO: 1473981 - RNA, 19 nt, Human
cucaagagaucccaaguag

SEQ ID NO: 1473982 - RNA, 17 nt, Human
cucaagcugcaucuaga

SEQ ID NO: 1473983 - RNA, 21 nt, Human
cuaugaccucgcccuccacaa

SEQ ID NO: 1473984 - RNA, 15 nt, Human
cuaacaugauuuggg

SEQ ID NO: 1473985 - RNA, 23 nt, Human
cuaacacggugcucauuuuuucu

SEQ ID NO: 1473986 - RNA, 20 nt, Human
cuaaauauuaugagaugcug

SEQ ID NO: 1473987 - RNA, 20 nt, Human
cuaaauauauuuuaagacga

SEQ ID NO: 1473988 - RNA, 18 nt, Human
cuaaauauauuuuaagac

SEQ ID NO: 1473989 - RNA, 16 nt, Human
cguuguccucagcccc

SEQ ID NO: 1473990 - RNA, 17 nt, Human
cguuuaagccaaaacaa

SEQ ID NO: 1473991 - RNA, 18 nt, Human
cguuuaagccaaaacaau

SEQ ID NO: 1473992 - RNA, 22 nt, Human
cguuuaagccaaaacaauguuu

SEQ ID NO: 1473993 - RNA, 13 nt, Human
cuaaacaucauuc

SEQ ID NO: 1473994 - RNA, 18 nt, Human
cuaaacacgugacacaaa

SEQ ID NO: 1473995 - RNA, 17 nt, Human
cuaaacacgugacacaa

SEQ ID NO: 1473996 - RNA, 23 nt, Human
cuaaacaucauucauuuuuguug

SEQ ID NO: 1473997 - RNA, 13 nt, Human
cuaaaagaaacuu

SEQ ID NO: 1473998 - RNA, 14 nt, Human
cuaaaagaaacuuu

SEQ ID NO: 1473999 - RNA, 19 nt, Human
cguggacaccugcccugcc

SEQ ID NO: 1474000 - RNA, 18 nt, Human
cguggacaccugcccugc

SEQ ID NO: 1474001 - RNA, 17 nt, Human
cguggacaccugcccug

SEQ ID NO: 1474002 - RNA, 15 nt, Human
cguggacaccugccc

SEQ ID NO: 1474003 - RNA, 14 nt, Human
cguggacaccugcc

SEQ ID NO: 1474004 - RNA, 13 nt, Human
cguggacaccugc

SEQ ID NO: 1474005 - RNA, 12 nt, Human
cguggacaccug

SEQ ID NO: 1474006 - RNA, 14 nt, Human
cgugggcauugucu

SEQ ID NO: 1474007 - RNA, 23 nt, Human
cguggcuguggcauccagagucc

SEQ ID NO: 1474008 - RNA, 17 nt, Human
cggugagcuacaaaugc

SEQ ID NO: 1474009 - RNA, 16 nt, Human
cggguugugugucugu

SEQ ID NO: 1474010 - RNA, 17 nt, Human
cggguugugugucuguu

SEQ ID NO: 1474011 - RNA, 14 nt, Human
cggggacucagccc

SEQ ID NO: 1474012 - RNA, 17 nt, Human
cggggccugggcaggag

SEQ ID NO: 1474013 - RNA, 19 nt, Human
cggggccugggcaggaggg

SEQ ID NO: 1474014 - RNA, 19 nt, Human
cgggggaggguaggcagga

SEQ ID NO: 1474015 - RNA, 17 nt, Human
cgggggcagucugagag

SEQ ID NO: 1474016 - RNA, 18 nt, Human
cgggggcagucugagaga

SEQ ID NO: 1474017 - RNA, 21 nt, Human
cgggggcagucugagagaggc

SEQ ID NO: 1474018 - RNA, 17 nt, Human
cggggguggcggcggcc

SEQ ID NO: 1474019 - RNA, 21 nt, Human
cggggguggcggcggccccua

SEQ ID NO: 1474020 - RNA, 13 nt, Human
cgggacugcggag

SEQ ID NO: 1474021 - RNA, 17 nt, Human
cgggagccugacccuca

SEQ ID NO: 1474022 - RNA, 12 nt, Human
cggcugggagga

SEQ ID NO: 1474023 - RNA, 17 nt, Human
cggcccacaauuaauuu

SEQ ID NO: 1474024 - RNA, 11 nt, Human
cgcuuuuugaa

SEQ ID NO: 1474025 - RNA, 16 nt, Human
cgcuuuuugaaaaagc

SEQ ID NO: 1474026 - RNA, 16 nt, Human
cgcccuggacugugug

SEQ ID NO: 1474027 - RNA, 17 nt, Human
cgcuguccuuucuagag

SEQ ID NO: 1474028 - RNA, 16 nt, Human
cgcuguccuuucuaga

SEQ ID NO: 1474029 - RNA, 16 nt, Human
cgcgccaggauggcgc

SEQ ID NO: 1474030 - RNA, 21 nt, Human
caguggcgugaucucagcuca

SEQ ID NO: 1474031 - RNA, 21 nt, Human
caguggcgcgaucucagcuca

SEQ ID NO: 1474032 - RNA, 21 nt, Human
caguggcaucaucucagcuca

SEQ ID NO: 1474033 - RNA, 18 nt, Human
cagugggaaaaauguagg

SEQ ID NO: 1474034 - RNA, 19 nt, Human
cagugggaaaaauguagga

SEQ ID NO: 1474035 - RNA, 17 nt, Human
caguguauggaaauaaa

SEQ ID NO: 1474036 - RNA, 20 nt, Human
caguguccuuggcaggcuga

SEQ ID NO: 1474037 - RNA, 21 nt, Human
caguguguggcuuucagagcc

SEQ ID NO: 1474038 - RNA, 22 nt, Human
caguguguggcuuucagagccu

SEQ ID NO: 1474039 - RNA, 24 nt, Human
caguuaacuauugcauuuauaugu

SEQ ID NO: 1474040 - RNA, 21 nt, Human
caguuaacuauugcauuuaua

SEQ ID NO: 1474041 - RNA, 21 nt, Human
caguuaccucugccucagaaa

SEQ ID NO: 1474042 - RNA, 22 nt, Human
caguuacauaauucacucugag

SEQ ID NO: 1474043 - RNA, 15 nt, Human
caguuccugggaaca

SEQ ID NO: 1474044 - RNA, 15 nt, Human
caguucugaagaaga

SEQ ID NO: 1474045 - RNA, 16 nt, Human
caguucugaagaagau

SEQ ID NO: 1474046 - RNA, 22 nt, Human
caguucugaagaagaugguacc

SEQ ID NO: 1474047 - RNA, 13 nt, Human
caguucugaagaa

SEQ ID NO: 1474048 - RNA, 14 nt, Human
caguucugaagaag

SEQ ID NO: 1474049 - RNA, 12 nt, Human
caguucugaaga

SEQ ID NO: 1474050 - RNA, 22 nt, Human
caguucggugagcuacaaaugc

SEQ ID NO: 1474051 - RNA, 15 nt, Human
cauaauacuugcuuu

SEQ ID NO: 1474052 - RNA, 18 nt, Human
cauaauccaguaaaauaa

SEQ ID NO: 1474053 - RNA, 17 nt, Human
cauaauccaguaaaaua

SEQ ID NO: 1474054 - RNA, 14 nt, Human
cauacauuuucuaa

SEQ ID NO: 1474055 - RNA, 16 nt, Human
cauacauuuucuaaga

SEQ ID NO: 1474056 - RNA, 18 nt, Human
cauacauuuucuaagaaa

SEQ ID NO: 1474057 - RNA, 18 nt, Human
cauaagcuuaugcuuaaa

SEQ ID NO: 1474058 - RNA, 19 nt, Human
cauaaguauuaugucucuu

SEQ ID NO: 1474059 - RNA, 11 nt, Human
cauaacugaaa

SEQ ID NO: 1474060 - RNA, 14 nt, Human
cauaacugaaaaug

SEQ ID NO: 1474061 - RNA, 17 nt, Human
cauaagauauuuuucau

SEQ ID NO: 1474062 - RNA, 11 nt, Human
cauaaauuauu

SEQ ID NO: 1474063 - RNA, 12 nt, Human
cauaaauuauug

SEQ ID NO: 1474064 - RNA, 21 nt, Human
cauaaaguugauaaagauuuu

SEQ ID NO: 1474065 - RNA, 19 nt, Human
cauaaauuuaguauuuugu

SEQ ID NO: 1474066 - RNA, 20 nt, Human
cauaaauuuaguauuuuguu

SEQ ID NO: 1474067 - RNA, 15 nt, Human
cauaacaacuucaua

SEQ ID NO: 1474068 - RNA, 18 nt, Human
cauaaccuuaccagauuu

SEQ ID NO: 1474069 - RNA, 16 nt, Human
cauaaagcaggcagaa

SEQ ID NO: 1474070 - RNA, 14 nt, Human
cauaaagcaggcag

SEQ ID NO: 1474071 - RNA, 21 nt, Human
cauaaaaaggacaucagcaaa

SEQ ID NO: 1474072 - RNA, 20 nt, Human
cauaaaaaggacaucagcaa

SEQ ID NO: 1474073 - RNA, 19 nt, Human
cauaaaaaggacaucagca

SEQ ID NO: 1474074 - RNA, 13 nt, Human
cauaaaaaggaca

SEQ ID NO: 1474075 - RNA, 22 nt, Human
cauaaaaaggacaucagcaaac

SEQ ID NO: 1474076 - RNA, 15 nt, Human
cauaaaaaugaucua

SEQ ID NO: 1474077 - RNA, 11 nt, Human
caguugcagcc

SEQ ID NO: 1474078 - RNA, 18 nt, Human
caguugagacaagaaaau

SEQ ID NO: 1474079 - RNA, 16 nt, Human
caguugagacaagaaa

SEQ ID NO: 1474080 - RNA, 16 nt, Human
caguugauuuucugga

SEQ ID NO: 1474081 - RNA, 17 nt, Human
caguugauuuucuggau

SEQ ID NO: 1474082 - RNA, 14 nt, Human
caguugaauuucau

SEQ ID NO: 1474083 - RNA, 19 nt, Human
caguuuuuucaccuggaag

SEQ ID NO: 1474084 - RNA, 12 nt, Human
caguuguccucc

SEQ ID NO: 1474085 - RNA, 15 nt, Human
caguuguccuccuuc

SEQ ID NO: 1474086 - RNA, 22 nt, Human
caguuggaguuuuuuguaccaa

SEQ ID NO: 1474087 - RNA, 12 nt, Human
cauauuuucaug

SEQ ID NO: 1474088 - RNA, 22 nt, Human
caucaagucuuucacauuuaaa

SEQ ID NO: 1474089 - RNA, 17 nt, Human
caucaagagacugaguc

SEQ ID NO: 1474090 - RNA, 16 nt, Human
caucaauuaaaggcaa

SEQ ID NO: 1474091 - RNA, 12 nt, Human
caucacagaaug

SEQ ID NO: 1474092 - RNA, 17 nt, Human
cauauuuauaaaaauaa

SEQ ID NO: 1474093 - RNA, 12 nt, Human
cauauuuauaaa

SEQ ID NO: 1474094 - RNA, 20 nt, Human
cauagaauaaaauuuuuaau

SEQ ID NO: 1474095 - RNA, 15 nt, Human
cauagacagaagaaa

SEQ ID NO: 1474096 - RNA, 20 nt, Human
cauagacagaagaaacaagg

SEQ ID NO: 1474097 - RNA, 14 nt, Human
cauagaauaaaauu

SEQ ID NO: 1474098 - RNA, 23 nt, Human
cauagaaauguaacuuuuguaag

SEQ ID NO: 1474099 - RNA, 19 nt, Human
cauagacagaagaaacaag

SEQ ID NO: 1474100 - RNA, 18 nt, Human
cauagagacuugggaaug

SEQ ID NO: 1474101 - RNA, 22 nt, Human
cauacuuuuuaaauguaaagau

SEQ ID NO: 1474102 - RNA, 16 nt, Human
cauacuuuuuaaaugu

SEQ ID NO: 1474103 - RNA, 20 nt, Human
cauacuuuuuaaauguaaag

SEQ ID NO: 1474104 - RNA, 22 nt, Human
cauacucauuuuucaugauaau

SEQ ID NO: 1474105 - RNA, 21 nt, Human
cauaugauguacauguacuga

SEQ ID NO: 1474106 - RNA, 17 nt, Human
cauaugauguacaugua

SEQ ID NO: 1474107 - RNA, 15 nt, Human
cauaugauguacaug

SEQ ID NO: 1474108 - RNA, 18 nt, Human
cauauccaguauuguucc

SEQ ID NO: 1474109 - RNA, 14 nt, Human
cauauauauacuau

SEQ ID NO: 1474110 - RNA, 17 nt, Human
cauauacagcucagaag

SEQ ID NO: 1474111 - RNA, 17 nt, Human
cauauauauacuauuaa

SEQ ID NO: 1474112 - RNA, 12 nt, Human
cauauaaaguau

SEQ ID NO: 1474113 - RNA, 16 nt, Human
caucucuuguuuaaau

SEQ ID NO: 1474114 - RNA, 14 nt, Human
caucugagaaaagc

SEQ ID NO: 1474115 - RNA, 23 nt, Human
caucugagaaaagcuuugaaccc

SEQ ID NO: 1474116 - RNA, 18 nt, Human
caucuugcccgcucaggc

SEQ ID NO: 1474117 - RNA, 20 nt, Human
caucuugcccgcucaggcug

SEQ ID NO: 1474118 - RNA, 19 nt, Human
caucuugcccgcucaggcu

SEQ ID NO: 1474119 - RNA, 17 nt, Human
caucuagguaaauuaca

SEQ ID NO: 1474120 - RNA, 18 nt, Human
caucuagguaaauuacag

SEQ ID NO: 1474121 - RNA, 14 nt, Human
caucuagugagcag

SEQ ID NO: 1474122 - RNA, 12 nt, Human
caucuaggauuu

SEQ ID NO: 1474123 - RNA, 20 nt, Human
caucuagaggcuuccuucau

SEQ ID NO: 1474124 - RNA, 21 nt, Human
caucuagaggcuuccuucauu

SEQ ID NO: 1474125 - RNA, 22 nt, Human
caucuagaggcuuccuucauuu

SEQ ID NO: 1474126 - RNA, 23 nt, Human
caucuagaggcuuccuucauuuc

SEQ ID NO: 1474127 - RNA, 19 nt, Human
caucuagaggcuuccuuca

SEQ ID NO: 1474128 - RNA, 11 nt, Human
cauccucucca

SEQ ID NO: 1474129 - RNA, 17 nt, Human
caucuauagaaagcuau

SEQ ID NO: 1474130 - RNA, 22 nt, Human
caucuagugagcagucaggaaa

SEQ ID NO: 1474131 - RNA, 20 nt, Human
caucucagcucacugcaacc

SEQ ID NO: 1474132 - RNA, 19 nt, Human
caucucagcucacugcaac

SEQ ID NO: 1474133 - RNA, 14 nt, Human
caucucaggccaga

SEQ ID NO: 1474134 - RNA, 17 nt, Human
caucucaggccagagcc

SEQ ID NO: 1474135 - RNA, 18 nt, Human
caucucaggccagagcca

SEQ ID NO: 1474136 - RNA, 21 nt, Human
caucucagugaagaauacuuc

SEQ ID NO: 1474137 - RNA, 22 nt, Human
caucucagugaagaauacuucu

SEQ ID NO: 1474138 - RNA, 19 nt, Human
cauccuacccccugugccu

SEQ ID NO: 1474139 - RNA, 13 nt, Human
cauccagggggca

SEQ ID NO: 1474140 - RNA, 23 nt, Human
cauccagcagauuuccagccuuc

SEQ ID NO: 1474141 - RNA, 20 nt, Human
caucccucacccauccuaga

SEQ ID NO: 1474142 - RNA, 14 nt, Human
caucccucacccau

SEQ ID NO: 1474143 - RNA, 13 nt, Human
caucccucaccca

SEQ ID NO: 1474144 - RNA, 20 nt, Human
caucauuucuuuuugggaga

SEQ ID NO: 1474145 - RNA, 14 nt, Human
caucauuuuuuacu

SEQ ID NO: 1474146 - RNA, 15 nt, Human
cauuacuauaagaac

SEQ ID NO: 1474147 - RNA, 16 nt, Human
cauuagacuggaacuu

SEQ ID NO: 1474148 - RNA, 20 nt, Human
cauuagacuggaacuugaac

SEQ ID NO: 1474149 - RNA, 12 nt, Human
cauuaaucugcc

SEQ ID NO: 1474150 - RNA, 18 nt, Human
cauuaaucugccucccuc

SEQ ID NO: 1474151 - RNA, 17 nt, Human
caugugaaaucauucau

SEQ ID NO: 1474152 - RNA, 16 nt, Human
caugugaaaucauuca

SEQ ID NO: 1474153 - RNA, 15 nt, Human
caugugaaaucauuc

SEQ ID NO: 1474154 - RNA, 17 nt, Human
cauguccuucugagccc

SEQ ID NO: 1474155 - RNA, 17 nt, Human
cauguaagcugaaaaua

SEQ ID NO: 1474156 - RNA, 23 nt, Human
cauguaagcugaaaauauggcaa

SEQ ID NO: 1474157 - RNA, 18 nt, Human
cauguaagcugaaaauau

SEQ ID NO: 1474158 - RNA, 21 nt, Human
cauguuucuuuguaaugaaaa

SEQ ID NO: 1474159 - RNA, 21 nt, Human
caugugugguacaugguguuu

SEQ ID NO: 1474160 - RNA, 22 nt, Human
cauguuucuuuguaaugaaaac

SEQ ID NO: 1474161 - RNA, 23 nt, Human
cauggacacuacacccagcaaua

SEQ ID NO: 1474162 - RNA, 22 nt, Human
cauggacacuacacccagcaau

SEQ ID NO: 1474163 - RNA, 23 nt, Human
cauggaaggcaagauuguguccc

SEQ ID NO: 1474164 - RNA, 14 nt, Human
cauggaaggcaaga

SEQ ID NO: 1474165 - RNA, 13 nt, Human
cauggaaggcaag

SEQ ID NO: 1474166 - RNA, 21 nt, Human
cauggacacuacacccagcaa

SEQ ID NO: 1474167 - RNA, 15 nt, Human
caugcuucccuuucc

SEQ ID NO: 1474168 - RNA, 20 nt, Human
caugcuucccuuuccugagu

SEQ ID NO: 1474169 - RNA, 23 nt, Human
caugcugucuacacuaagagaga

SEQ ID NO: 1474170 - RNA, 19 nt, Human
caugcuaagagaaguagaa

SEQ ID NO: 1474171 - RNA, 16 nt, Human
caugcguguuucugac

SEQ ID NO: 1474172 - RNA, 17 nt, Human
caugcguguuucugacu

SEQ ID NO: 1474173 - RNA, 13 nt, Human
caugcuaagagaa

SEQ ID NO: 1474174 - RNA, 16 nt, Human
caugcuaagagaagua

SEQ ID NO: 1474175 - RNA, 17 nt, Human
caugcuaagagaaguag

SEQ ID NO: 1474176 - RNA, 21 nt, Human
caugcuaagagaaguagaaau

SEQ ID NO: 1474177 - RNA, 17 nt, Human
cauggagauucucauaa

SEQ ID NO: 1474178 - RNA, 18 nt, Human
cauggauauaguuuuacu

SEQ ID NO: 1474179 - RNA, 17 nt, Human
caugcauggaaauuccc

SEQ ID NO: 1474180 - RNA, 16 nt, Human
caugcauguccuguaa

SEQ ID NO: 1474181 - RNA, 15 nt, Human
caugcauggaaauuc

SEQ ID NO: 1474182 - RNA, 17 nt, Human
caugcauguccuguaaa

SEQ ID NO: 1474183 - RNA, 18 nt, Human
caugcauguccuguaaag

SEQ ID NO: 1474184 - RNA, 21 nt, Human
caugcauguccuguaaagguu

SEQ ID NO: 1474185 - RNA, 15 nt, Human
caugcauuacugcau

SEQ ID NO: 1474186 - RNA, 17 nt, Human
caugcauuacugcaugc

SEQ ID NO: 1474187 - RNA, 20 nt, Human
caugcauuacugcaugcacu

SEQ ID NO: 1474188 - RNA, 15 nt, Human
caugcauuguccucu

SEQ ID NO: 1474189 - RNA, 16 nt, Human
caugccaggcuaauuu

SEQ ID NO: 1474190 - RNA, 18 nt, Human
caugccaggcuaauuuuu

SEQ ID NO: 1474191 - RNA, 15 nt, Human
caugcauacacucuc

SEQ ID NO: 1474192 - RNA, 13 nt, Human
caugcaucuguuu

SEQ ID NO: 1474193 - RNA, 15 nt, Human
caugcaucuguuuau

SEQ ID NO: 1474194 - RNA, 22 nt, Human
caugcaucuguuuauucuauag

SEQ ID NO: 1474195 - RNA, 21 nt, Human
cauugaccuauuuccagaaau

SEQ ID NO: 1474196 - RNA, 15 nt, Human
cauugaccuauuucc

SEQ ID NO: 1474197 - RNA, 15 nt, Human
cauuuccuaaauaua

SEQ ID NO: 1474198 - RNA, 15 nt, Human
cauuugcucauggaa

SEQ ID NO: 1474199 - RNA, 16 nt, Human
cauuugcucauggaau

SEQ ID NO: 1474200 - RNA, 18 nt, Human
cauuugcucauggaauug

SEQ ID NO: 1474201 - RNA, 16 nt, Human
cauuuuaacaucugag

SEQ ID NO: 1474202 - RNA, 16 nt, Human
cauuuugguacuuugg

SEQ ID NO: 1474203 - RNA, 14 nt, Human
cauuuugguacuuu

SEQ ID NO: 1474204 - RNA, 20 nt, Human
ccaaaaguuacauguuugca

SEQ ID NO: 1474205 - RNA, 20 nt, Human
ccaaaaucauaagauauuuu

SEQ ID NO: 1474206 - RNA, 14 nt, Human
ccaaacuaauuuuu

SEQ ID NO: 1474207 - RNA, 19 nt, Human
ccaaagaaccaaagaagaa

SEQ ID NO: 1474208 - RNA, 15 nt, Human
ccaaagaaccaaaga

SEQ ID NO: 1474209 - RNA, 17 nt, Human
ccacaacuauuuucaga

SEQ ID NO: 1474210 - RNA, 22 nt, Human
ccacaaaugggaaaaccagacu

SEQ ID NO: 1474211 - RNA, 15 nt, Human
ccacaacuauuuuca

SEQ ID NO: 1474212 - RNA, 19 nt, Human
ccaauuucaaguuccaagu

SEQ ID NO: 1474213 - RNA, 14 nt, Human
ccacaaacuguaau

SEQ ID NO: 1474214 - RNA, 22 nt, Human
ccaagagcuacguauuuaauag

SEQ ID NO: 1474215 - RNA, 23 nt, Human
ccaacaugcacugauguuguguu

SEQ ID NO: 1474216 - RNA, 13 nt, Human
ccaacaugcacug

SEQ ID NO: 1474217 - RNA, 17 nt, Human
ccaacaugcacugaugu

SEQ ID NO: 1474218 - RNA, 21 nt, Human
ccaacaugcacugauguugug

SEQ ID NO: 1474219 - RNA, 21 nt, Human
ccaagacaugucuguucuaca

SEQ ID NO: 1474220 - RNA, 23 nt, Human
ccaagacaugucuguucuacaua

SEQ ID NO: 1474221 - RNA, 15 nt, Human
ccaaccuguuaccua

SEQ ID NO: 1474222 - RNA, 13 nt, Human
ccaaagcacauuu

SEQ ID NO: 1474223 - RNA, 15 nt, Human
ccaacauaaaaauga

SEQ ID NO: 1474224 - RNA, 18 nt, Human
ccaucagaaacacccuca

SEQ ID NO: 1474225 - RNA, 20 nt, Human
ccaucagaaacacccucaca

SEQ ID NO: 1474226 - RNA, 11 nt, Human
ccaucucaggc

SEQ ID NO: 1474227 - RNA, 18 nt, Human
ccaucucaggccagagcc

SEQ ID NO: 1474228 - RNA, 14 nt, Human
ccaucucaggccag

SEQ ID NO: 1474229 - RNA, 13 nt, Human
ccaucaaccucug

SEQ ID NO: 1474230 - RNA, 18 nt, Human
ccaucaccuuagaccacc

SEQ ID NO: 1474231 - RNA, 23 nt, Human
ccaucaccuuagaccaccaagcc

SEQ ID NO: 1474232 - RNA, 18 nt, Human
ccaucacugaguuuucca

SEQ ID NO: 1474233 - RNA, 19 nt, Human
ccaucaccuuagaccacca

SEQ ID NO: 1474234 - RNA, 23 nt, Human
ccagugggaggugagaccaccuc

SEQ ID NO: 1474235 - RNA, 20 nt, Human
ccagugggaggugagaccac

SEQ ID NO: 1474236 - RNA, 22 nt, Human
ccagugcugaauuucccucucu

SEQ ID NO: 1474237 - RNA, 12 nt, Human
ccagugcugaau

SEQ ID NO: 1474238 - RNA, 14 nt, Human
ccagggaccggcgg

SEQ ID NO: 1474239 - RNA, 15 nt, Human
ccagggacucugccg

SEQ ID NO: 1474240 - RNA, 20 nt, Human
ccagggacaccugggagaaa

SEQ ID NO: 1474241 - RNA, 18 nt, Human
ccagggacaccugggaga

SEQ ID NO: 1474242 - RNA, 14 nt, Human
ccagcugugcuuau

SEQ ID NO: 1474243 - RNA, 15 nt, Human
ccagcugugcuuaug

SEQ ID NO: 1474244 - RNA, 21 nt, Human
ccagcugugcuuaugguacca

SEQ ID NO: 1474245 - RNA, 11 nt, Human
ccaggacccca

SEQ ID NO: 1474246 - RNA, 10 nt, Human
cccaggacag

SEQ ID NO: 1474247 - RNA, 17 nt, Human
cccaggacaggauccag

SEQ ID NO: 1474248 - RNA, 12 nt, Human
cccaggacccca

SEQ ID NO: 1474249 - RNA, 20 nt, Human
cccaggaccccauggcagug

SEQ ID NO: 1474250 - RNA, 15 nt, Human
cccaggagacaguuc

SEQ ID NO: 1474251 - RNA, 17 nt, Human
cccaggagacaguucaa

SEQ ID NO: 1474252 - RNA, 14 nt, Human
cccagagccacagu

SEQ ID NO: 1474253 - RNA, 13 nt, Human
cccagagccacag

SEQ ID NO: 1474254 - RNA, 20 nt, Human
ccauucauuccauucuggaa

SEQ ID NO: 1474255 - RNA, 20 nt, Human
ccauguuggccaggaugguc

SEQ ID NO: 1474256 - RNA, 18 nt, Human
ccauucauuccauucugg

SEQ ID NO: 1474257 - RNA, 15 nt, Human
ccauucccccagugc

SEQ ID NO: 1474258 - RNA, 16 nt, Human
ccauucccccagugcg

SEQ ID NO: 1474259 - RNA, 13 nt, Human
cccacgccacagc

SEQ ID NO: 1474260 - RNA, 17 nt, Human
cccacgccacagcccuu

SEQ ID NO: 1474261 - RNA, 16 nt, Human
cccacgccacagcccu

SEQ ID NO: 1474262 - RNA, 15 nt, Human
cccacgccacagccc

SEQ ID NO: 1474263 - RNA, 14 nt, Human
cccacgccacagcc

SEQ ID NO: 1474264 - RNA, 16 nt, Human
cccagacacugguuug

SEQ ID NO: 1474265 - RNA, 23 nt, Human
ccauggacacuacacccagcaau

SEQ ID NO: 1474266 - RNA, 22 nt, Human
ccauggacacuacacccagcaa

SEQ ID NO: 1474267 - RNA, 21 nt, Human
ccauggacacuacacccagca

SEQ ID NO: 1474268 - RNA, 20 nt, Human
ccauggacacuacacccagc

SEQ ID NO: 1474269 - RNA, 19 nt, Human
ccauggacacuacacccag

SEQ ID NO: 1474270 - RNA, 14 nt, Human
ccauggcaggaagg

SEQ ID NO: 1474271 - RNA, 14 nt, Human
ccaugcugcugggg

SEQ ID NO: 1474272 - RNA, 19 nt, Human
ccaugcugcuggggaagac

SEQ ID NO: 1474273 - RNA, 20 nt, Human
ccaugcugcuggggaagaca

SEQ ID NO: 1474274 - RNA, 17 nt, Human
cccaugucuacacagau

SEQ ID NO: 1474275 - RNA, 22 nt, Human
ccccaaaggcuuugcccugcug

SEQ ID NO: 1474276 - RNA, 20 nt, Human
ccccaacuacccccagcugu

SEQ ID NO: 1474277 - RNA, 11 nt, Human
cccaucucagg

SEQ ID NO: 1474278 - RNA, 16 nt, Human
cccaucucaggccaga

SEQ ID NO: 1474279 - RNA, 23 nt, Human
cccaucucaggccagagccaagg

SEQ ID NO: 1474280 - RNA, 15 nt, Human
cccaguaacucaucu

SEQ ID NO: 1474281 - RNA, 21 nt, Human
cccaguaccuagcuggcucug

SEQ ID NO: 1474282 - RNA, 21 nt, Human
ccuccaggguggcagcaacaa

SEQ ID NO: 1474283 - RNA, 20 nt, Human
ccuccaggguggcagcaaca

SEQ ID NO: 1474284 - RNA, 17 nt, Human
ccuccauccuacccccu

SEQ ID NO: 1474285 - RNA, 12 nt, Human
ccuccaucccug

SEQ ID NO: 1474286 - RNA, 22 nt, Human
ccuccauccuacccccugugcc

SEQ ID NO: 1474287 - RNA, 23 nt, Human
ccuccauccuacccccugugccu

SEQ ID NO: 1474288 - RNA, 14 nt, Human
ccuccaucccuggc

SEQ ID NO: 1474289 - RNA, 16 nt, Human
ccuccaucccuggccc

SEQ ID NO: 1474290 - RNA, 17 nt, Human
ccuccaucccuggcccc

SEQ ID NO: 1474291 - RNA, 15 nt, Human
ccuccacucuuucuu

SEQ ID NO: 1474292 - RNA, 20 nt, Human
ccuccacucuuucuuucaau

SEQ ID NO: 1474293 - RNA, 14 nt, Human
ccuccccuccaucc

SEQ ID NO: 1474294 - RNA, 20 nt, Human
ccuccccuccaucccuggcc

SEQ ID NO: 1474295 - RNA, 16 nt, Human
ccuccccuccaucccu

SEQ ID NO: 1474296 - RNA, 15 nt, Human
ccucccccuccucuc

SEQ ID NO: 1474297 - RNA, 13 nt, Human
ccucccccugcca

SEQ ID NO: 1474298 - RNA, 14 nt, Human
ccucccccugccag

SEQ ID NO: 1474299 - RNA, 16 nt, Human
ccucccccugccagga

SEQ ID NO: 1474300 - RNA, 14 nt, Human
ccucccccuguccc

SEQ ID NO: 1474301 - RNA, 15 nt, Human
ccuccccgcaccccc

SEQ ID NO: 1474302 - RNA, 21 nt, Human
ccuccccgcaccccccaagcu

SEQ ID NO: 1474303 - RNA, 22 nt, Human
ccucccucucguaagauuuccu

SEQ ID NO: 1474304 - RNA, 22 nt, Human
ccucguggacaccugcccugcc

SEQ ID NO: 1474305 - RNA, 21 nt, Human
ccucguggacaccugcccugc

SEQ ID NO: 1474306 - RNA, 20 nt, Human
ccucguggacaccugcccug

SEQ ID NO: 1474307 - RNA, 18 nt, Human
ccucguggacaccugccc

SEQ ID NO: 1474308 - RNA, 17 nt, Human
ccucguggacaccugcc

SEQ ID NO: 1474309 - RNA, 16 nt, Human
ccucguggacaccugc

SEQ ID NO: 1474310 - RNA, 15 nt, Human
ccucguggacaccug

SEQ ID NO: 1474311 - RNA, 16 nt, Human
ccuccuuggugauucc

SEQ ID NO: 1474312 - RNA, 14 nt, Human
ccuccucuccacca

SEQ ID NO: 1474313 - RNA, 15 nt, Human
ccuccucuccaccau

SEQ ID NO: 1474314 - RNA, 20 nt, Human
ccucugagaagcucugaaga

SEQ ID NO: 1474315 - RNA, 18 nt, Human
ccucaccagcccuggcaa

SEQ ID NO: 1474316 - RNA, 15 nt, Human
ccucagggacucagg

SEQ ID NO: 1474317 - RNA, 16 nt, Human
ccucagggacucaggu

SEQ ID NO: 1474318 - RNA, 18 nt, Human
ccucagccccgcguggaa

SEQ ID NO: 1474319 - RNA, 23 nt, Human
ccuauucaacacacacaugcuuc

SEQ ID NO: 1474320 - RNA, 21 nt, Human
ccuauucaacacacacaugcu

SEQ ID NO: 1474321 - RNA, 15 nt, Human
ccucacacugggacu

SEQ ID NO: 1474322 - RNA, 13 nt, Human
ccucacacuggga

SEQ ID NO: 1474323 - RNA, 12 nt, Human
ccucacacuggg

SEQ ID NO: 1474324 - RNA, 20 nt, Human
ccuagacucugucuaccugg

SEQ ID NO: 1474325 - RNA, 16 nt, Human
ccggaucugagggaga

SEQ ID NO: 1474326 - RNA, 16 nt, Human
ccggcuuuguggcacu

SEQ ID NO: 1474327 - RNA, 17 nt, Human
ccggcuuuguggcacug

SEQ ID NO: 1474328 - RNA, 19 nt, Human
ccggcuuuguggcacuggg

SEQ ID NO: 1474329 - RNA, 20 nt, Human
ccggacucaagccccggacu

SEQ ID NO: 1474330 - RNA, 13 nt, Human
ccgggagcucagg

SEQ ID NO: 1474331 - RNA, 15 nt, Human
ccgggagcucaggaa

SEQ ID NO: 1474332 - RNA, 15 nt, Human
ccggggccugggcag

SEQ ID NO: 1474333 - RNA, 19 nt, Human
ccggggccugggcaggagg

SEQ ID NO: 1474334 - RNA, 16 nt, Human
cccuucaucuggaacc

SEQ ID NO: 1474335 - RNA, 14 nt, Human
cccuucaucuggaa

SEQ ID NO: 1474336 - RNA, 16 nt, Human
cccuucaugcauggaa

SEQ ID NO: 1474337 - RNA, 19 nt, Human
cccuugacaacuggcaggc

SEQ ID NO: 1474338 - RNA, 12 nt, Human
cccuugaacucu

SEQ ID NO: 1474339 - RNA, 17 nt, Human
cccuugacaacuggcag

SEQ ID NO: 1474340 - RNA, 18 nt, Human
cccuugacaacuggcagg

SEQ ID NO: 1474341 - RNA, 21 nt, Human
cccuugacaacuggcaggcag

SEQ ID NO: 1474342 - RNA, 21 nt, Human
cccuugugaaucaagggucag

SEQ ID NO: 1474343 - RNA, 13 nt, Human
ccuaaacauauga

SEQ ID NO: 1474344 - RNA, 20 nt, Human
ccgugugggagaccggccug

SEQ ID NO: 1474345 - RNA, 22 nt, Human
ccuagguauaauucacauugua

SEQ ID NO: 1474346 - RNA, 19 nt, Human
ccuacaugaaacagaaaca

SEQ ID NO: 1474347 - RNA, 13 nt, Human
ccuacugcccagg

SEQ ID NO: 1474348 - RNA, 20 nt, Human
ccuacugcccaggcacugca

SEQ ID NO: 1474349 - RNA, 16 nt, Human
ccuacugcccaggcac

SEQ ID NO: 1474350 - RNA, 18 nt, Human
cccugccucucugcaggu

SEQ ID NO: 1474351 - RNA, 11 nt, Human
cccugccucuc

SEQ ID NO: 1474352 - RNA, 18 nt, Human
cccugccaccuccugccu

SEQ ID NO: 1474353 - RNA, 22 nt, Human
cccugccaggagcuuuggaccu

SEQ ID NO: 1474354 - RNA, 17 nt, Human
cccugccaccuccugcc

SEQ ID NO: 1474355 - RNA, 14 nt, Human
cccugccaccuccu

SEQ ID NO: 1474356 - RNA, 22 nt, Human
cccugccucucugcaggucccu

SEQ ID NO: 1474357 - RNA, 21 nt, Human
cccugccucucugcagguccc

SEQ ID NO: 1474358 - RNA, 12 nt, Human
cccugccucuca

SEQ ID NO: 1474359 - RNA, 12 nt, Human
cccugccuggac

SEQ ID NO: 1474360 - RNA, 13 nt, Human
cccugccuggacc

SEQ ID NO: 1474361 - RNA, 18 nt, Human
cccugccuggaccagccu

SEQ ID NO: 1474362 - RNA, 22 nt, Human
cccuggaaaccuuccacccagu

SEQ ID NO: 1474363 - RNA, 15 nt, Human
cccuggaacugucuc

SEQ ID NO: 1474364 - RNA, 18 nt, Human
cccuggaacugucucuca

SEQ ID NO: 1474365 - RNA, 21 nt, Human
cccuggaaaccuuccacccag

SEQ ID NO: 1474366 - RNA, 19 nt, Human
cccuggaaaccuuccaccc

SEQ ID NO: 1474367 - RNA, 16 nt, Human
cccuggaaaccuucca

SEQ ID NO: 1474368 - RNA, 15 nt, Human
cccuggaaaccuucc

SEQ ID NO: 1474369 - RNA, 17 nt, Human
cccuggacuugccucug

SEQ ID NO: 1474370 - RNA, 18 nt, Human
cccugggaggcucuggag

SEQ ID NO: 1474371 - RNA, 17 nt, Human
cccugggaggcucugga

SEQ ID NO: 1474372 - RNA, 16 nt, Human
cccugggaggcucugg

SEQ ID NO: 1474373 - RNA, 23 nt, Human
cccuggguagcgggggaggguag

SEQ ID NO: 1474374 - RNA, 12 nt, Human
cccucaugcugu

SEQ ID NO: 1474375 - RNA, 14 nt, Human
cccucaucuuucuu

SEQ ID NO: 1474376 - RNA, 12 nt, Human
cccuccaucccu

SEQ ID NO: 1474377 - RNA, 13 nt, Human
cccuccaucccug

SEQ ID NO: 1474378 - RNA, 14 nt, Human
cccuccaucccugg

SEQ ID NO: 1474379 - RNA, 17 nt, Human
cccuccaucccuggccc

SEQ ID NO: 1474380 - RNA, 22 nt, Human
cccuccaucccuggcccccucc

SEQ ID NO: 1474381 - RNA, 14 nt, Human
cccucccccugcca

SEQ ID NO: 1474382 - RNA, 16 nt, Human
cccuccccgcaccccc

SEQ ID NO: 1474383 - RNA, 17 nt, Human
cccuccccgcacccccc

SEQ ID NO: 1474384 - RNA, 18 nt, Human
cccuccccuccaucccug

SEQ ID NO: 1474385 - RNA, 18 nt, Human
cccuaauaaagcugugug

SEQ ID NO: 1474386 - RNA, 15 nt, Human
cccuaauaaagcugu

SEQ ID NO: 1474387 - RNA, 19 nt, Human
cccuacuucuuuugcucuu

SEQ ID NO: 1474388 - RNA, 18 nt, Human
cccuacuucuuuugcucu

SEQ ID NO: 1474389 - RNA, 17 nt, Human
cccuaagccagcugccc

SEQ ID NO: 1474390 - RNA, 18 nt, Human
cccuaagccagcugcccc

SEQ ID NO: 1474391 - RNA, 12 nt, Human
cccuaagccagc

SEQ ID NO: 1474392 - RNA, 14 nt, Human
cccuaauaaagcug

SEQ ID NO: 1474393 - RNA, 13 nt, Human
cccuaauaaagcu

SEQ ID NO: 1474394 - RNA, 12 nt, Human
cccuaauaaagc

SEQ ID NO: 1474395 - RNA, 15 nt, Human
cccuaaccaaguucc

SEQ ID NO: 1474396 - RNA, 19 nt, Human
cccuaaauaauaaaaauaa

SEQ ID NO: 1474397 - RNA, 20 nt, Human
cccuaaaagaaacccugcac

SEQ ID NO: 1474398 - RNA, 20 nt, Human
cccggacgcccaggacccca

SEQ ID NO: 1474399 - RNA, 22 nt, Human
ccccagcuggggccaggcuggg

SEQ ID NO: 1474400 - RNA, 21 nt, Human
ccccagcuggggccaggcugg

SEQ ID NO: 1474401 - RNA, 13 nt, Human
cccgcucaggcug

SEQ ID NO: 1474402 - RNA, 19 nt, Human
cccgcaccccccaagcugu

SEQ ID NO: 1474403 - RNA, 23 nt, Human
ggcaucaucucagcucacugcaa

SEQ ID NO: 1474404 - RNA, 17 nt, Human
ggcaucaucucagcuca

SEQ ID NO: 1474405 - RNA, 20 nt, Human
ggcaucaguguccuuggcag

SEQ ID NO: 1474406 - RNA, 16 nt, Human
ggcauccagagucccu

SEQ ID NO: 1474407 - RNA, 18 nt, Human
ggcauccagagucccugc

SEQ ID NO: 1474408 - RNA, 22 nt, Human
ggcaucggggagccgggagccu

SEQ ID NO: 1474409 - RNA, 23 nt, Human
ggcaucggggagccgggagccug

SEQ ID NO: 1474410 - RNA, 16 nt, Human
ggccagaccauggaca

SEQ ID NO: 1474411 - RNA, 18 nt, Human
ggcauuuuacuguacaga

SEQ ID NO: 1474412 - RNA, 14 nt, Human
ggauuuauuuaaaa

SEQ ID NO: 1474413 - RNA, 19 nt, Human
ggauuuauuuaaaauagca

SEQ ID NO: 1474414 - RNA, 14 nt, Human
ggauuuauuuuucc

SEQ ID NO: 1474415 - RNA, 12 nt, Human
ggauuuuuacca

SEQ ID NO: 1474416 - RNA, 13 nt, Human
ggcagccucuggg

SEQ ID NO: 1474417 - RNA, 16 nt, Human
ggcagccucugggggg

SEQ ID NO: 1474418 - RNA, 19 nt, Human
ggcagccucuggggggugg

SEQ ID NO: 1474419 - RNA, 20 nt, Human
ggcagccucugggggguggc

SEQ ID NO: 1474420 - RNA, 23 nt, Human
ggcagccucugggggguggccag

SEQ ID NO: 1474421 - RNA, 17 nt, Human
ggcagcauccccuugaa

SEQ ID NO: 1474422 - RNA, 13 nt, Human
ggcagccagacca

SEQ ID NO: 1474423 - RNA, 11 nt, Human
ggcagccagac

SEQ ID NO: 1474424 - RNA, 15 nt, Human
ggcagccagaccagc

SEQ ID NO: 1474425 - RNA, 14 nt, Human
ggcagccagaccag

SEQ ID NO: 1474426 - RNA, 14 nt, Human
ggcaggagggaggu

SEQ ID NO: 1474427 - RNA, 15 nt, Human
ggcaggauuggggaa

SEQ ID NO: 1474428 - RNA, 22 nt, Human
ggcaggauuggggaagagagcc

SEQ ID NO: 1474429 - RNA, 17 nt, Human
ggcaggauuggggaaga

SEQ ID NO: 1474430 - RNA, 12 nt, Human
ggcaggggccgg

SEQ ID NO: 1474431 - RNA, 16 nt, Human
ggagugugcguggugg

SEQ ID NO: 1474432 - RNA, 14 nt, Human
ggagugggugggga

SEQ ID NO: 1474433 - RNA, 15 nt, Human
ggaguggguggggag

SEQ ID NO: 1474434 - RNA, 14 nt, Human
ggauuguaguccca

SEQ ID NO: 1474435 - RNA, 21 nt, Human
ggaugggguauggauucuaaa

SEQ ID NO: 1474436 - RNA, 16 nt, Human
ggauccuguguggaga

SEQ ID NO: 1474437 - RNA, 15 nt, Human
ggaucucaccaggca

SEQ ID NO: 1474438 - RNA, 16 nt, Human
ggaucucaccaggcag

SEQ ID NO: 1474439 - RNA, 17 nt, Human
ggaucucaccaggcagc

SEQ ID NO: 1474440 - RNA, 22 nt, Human
ggaucucaccaggcagccucug

SEQ ID NO: 1474441 - RNA, 21 nt, Human
ggaggguuucauugucuguga

SEQ ID NO: 1474442 - RNA, 20 nt, Human
ggaggguuucauugucugug

SEQ ID NO: 1474443 - RNA, 15 nt, Human
ggaggcucuggagcc

SEQ ID NO: 1474444 - RNA, 15 nt, Human
ggaggguaggcagga

SEQ ID NO: 1474445 - RNA, 14 nt, Human
ggagggggagaggg

SEQ ID NO: 1474446 - RNA, 10 nt, Human
aaaaaacuac

SEQ ID NO: 1474447 - RNA, 14 nt, Human
aaaaauaaaaaaca

SEQ ID NO: 1474448 - RNA, 16 nt, Human
aaaaaggacaucagca

SEQ ID NO: 1474449 - RNA, 17 nt, Human
aaaaagcccaccauuug

SEQ ID NO: 1474450 - RNA, 14 nt, Human
aaaaauacucagau

SEQ ID NO: 1474451 - RNA, 13 nt, Human
aaaaauacucaga

SEQ ID NO: 1474452 - RNA, 23 nt, Human
ggcucacugcaaccuccaccucc

SEQ ID NO: 1474453 - RNA, 13 nt, Human
ggcugaaagacag

SEQ ID NO: 1474454 - RNA, 21 nt, Human
ggccccugccucucugcaggu

SEQ ID NO: 1474455 - RNA, 19 nt, Human
ggccccugccucucugcag

SEQ ID NO: 1474456 - RNA, 18 nt, Human
ggccccugccucucugca

SEQ ID NO: 1474457 - RNA, 17 nt, Human
ggccccugccucucugc

SEQ ID NO: 1474458 - RNA, 20 nt, Human
ggccagaugcacaucccugg

SEQ ID NO: 1474459 - RNA, 21 nt, Human
ggccagaugcacaucccugga

SEQ ID NO: 1474460 - RNA, 23 nt, Human
ggccagaugcacaucccuggaag

SEQ ID NO: 1474461 - RNA, 19 nt, Human
ggccugaugggguggaagg

SEQ ID NO: 1474462 - RNA, 12 nt, Human
ggccugccagga

SEQ ID NO: 1474463 - RNA, 13 nt, Human
ggccugccaggag

SEQ ID NO: 1474464 - RNA, 14 nt, Human
ggccugccaggagg

SEQ ID NO: 1474465 - RNA, 17 nt, Human
ggccugcccagugcacu

SEQ ID NO: 1474466 - RNA, 17 nt, Human
ggcuagacuagucucaa

SEQ ID NO: 1474467 - RNA, 14 nt, Human
ggcuaccaggaaag

SEQ ID NO: 1474468 - RNA, 23 nt, Human
ggcgugaucucagcucacugcaa

SEQ ID NO: 1474469 - RNA, 17 nt, Human
ggcgugagccaccucgc

SEQ ID NO: 1474470 - RNA, 20 nt, Human
ggcuaagcuucacuguaaaa

SEQ ID NO: 1474471 - RNA, 17 nt, Human
gguuuucacauuggaaa

SEQ ID NO: 1474472 - RNA, 19 nt, Human
gguuucccuacugaagccc

SEQ ID NO: 1474473 - RNA, 17 nt, Human
aaaguauguuagugcaa

SEQ ID NO: 1474474 - RNA, 22 nt, Human
aaaguggguuuuuuaguugaau

SEQ ID NO: 1474475 - RNA, 17 nt, Human
aaaguggguuuuuuagu

SEQ ID NO: 1474476 - RNA, 22 nt, Human
gguggggggggggcgcggcugg

SEQ ID NO: 1474477 - RNA, 21 nt, Human
gguggggagagacgggcccug

SEQ ID NO: 1474478 - RNA, 12 nt, Human
ggugugucugcu

SEQ ID NO: 1474479 - RNA, 14 nt, Human
gguguuaauuuuug

SEQ ID NO: 1474480 - RNA, 17 nt, Human
gguguugccaguugucc

SEQ ID NO: 1474481 - RNA, 21 nt, Human
aaaguaaaaacaaagaaauua

SEQ ID NO: 1474482 - RNA, 15 nt, Human
aaagguuuacagaau

SEQ ID NO: 1474483 - RNA, 16 nt, Human
aaagguuuacagaauu

SEQ ID NO: 1474484 - RNA, 16 nt, Human
aaagguuuaugaaaaa

SEQ ID NO: 1474485 - RNA, 18 nt, Human
aaagguuuaugaaaaaga

SEQ ID NO: 1474486 - RNA, 22 nt, Human
aaagguuuaugaaaaagaagaa

SEQ ID NO: 1474487 - RNA, 19 nt, Human
aaagguuuaugaaaaagaa

SEQ ID NO: 1474488 - RNA, 14 nt, Human
aaagguuuuccucu

SEQ ID NO: 1474489 - RNA, 23 nt, Human
gguggcuuuugcgguucaggaaa

SEQ ID NO: 1474490 - RNA, 14 nt, Human
gguggcuuuugcgg

SEQ ID NO: 1474491 - RNA, 18 nt, Human
aaagguucaugcaaacuu

SEQ ID NO: 1474492 - RNA, 20 nt, Human
aaagggcuguuauaaucuuu

SEQ ID NO: 1474493 - RNA, 22 nt, Human
aaagggcuguuauaaucuuuca

SEQ ID NO: 1474494 - RNA, 16 nt, Human
aaagcuuaaaacuuug

SEQ ID NO: 1474495 - RNA, 14 nt, Human
aaagcuuaaaacuu

SEQ ID NO: 1474496 - RNA, 15 nt, Human
aaagcuuaaaacuuu

SEQ ID NO: 1474497 - RNA, 19 nt, Human
aaagcuuaaaacuuugaag

SEQ ID NO: 1474498 - RNA, 13 nt, Human
gguggcagcaaca

SEQ ID NO: 1474499 - RNA, 14 nt, Human
gguggcagcaacaa

SEQ ID NO: 1474500 - RNA, 14 nt, Human
aaagcuguguggca

SEQ ID NO: 1474501 - RNA, 18 nt, Human
aaagcuguguguuuggaa

SEQ ID NO: 1474502 - RNA, 16 nt, Human
aaagcugguuuaaugu

SEQ ID NO: 1474503 - RNA, 18 nt, Human
aaagcugguuuaauguuu

SEQ ID NO: 1474504 - RNA, 13 nt, Human
aaagcuagaauug

SEQ ID NO: 1474505 - RNA, 14 nt, Human
aaagcuagaauuga

SEQ ID NO: 1474506 - RNA, 20 nt, Human
aaagcuagaauugaguguuu

SEQ ID NO: 1474507 - RNA, 17 nt, Human
aaagcagccuggccaac

SEQ ID NO: 1474508 - RNA, 14 nt, Human
aaauauauaucaaa

SEQ ID NO: 1474509 - RNA, 18 nt, Human
aaauauaugcuaagucuu

SEQ ID NO: 1474510 - RNA, 22 nt, Human
aaauauauuuuaagacgaaaca

SEQ ID NO: 1474511 - RNA, 16 nt, Human
aaauauauuuuaagac

SEQ ID NO: 1474512 - RNA, 22 nt, Human
aaauaucacuugucaauaaaau

SEQ ID NO: 1474513 - RNA, 20 nt, Human
aaauaucccuccuguuggga

SEQ ID NO: 1474514 - RNA, 23 nt, Human
aaauaucccuccuguugggagag

SEQ ID NO: 1474515 - RNA, 20 nt, Human
aaauacgugggcauucaaau

SEQ ID NO: 1474516 - RNA, 21 nt, Human
aaauacgugggcauucaaaug

SEQ ID NO: 1474517 - RNA, 22 nt, Human
aaauacgugggcauucaaaugu

SEQ ID NO: 1474518 - RNA, 13 nt, Human
aaauauacuuuua

SEQ ID NO: 1474519 - RNA, 23 nt, Human
aaauauacuuuuacaaguaacaa

SEQ ID NO: 1474520 - RNA, 18 nt, Human
aaauauagaucaguuaua

SEQ ID NO: 1474521 - RNA, 22 nt, Human
aaauauacuuuuacaaguaaca

SEQ ID NO: 1474522 - RNA, 12 nt, Human
aaauauauacua

SEQ ID NO: 1474523 - RNA, 16 nt, Human
aaauauauacuaaaca

SEQ ID NO: 1474524 - RNA, 20 nt, Human
guacacaauaagcaaaaaca

SEQ ID NO: 1474525 - RNA, 18 nt, Human
guacacaauaagcaaaaa

SEQ ID NO: 1474526 - RNA, 16 nt, Human
guacacagcaccagaa

SEQ ID NO: 1474527 - RNA, 13 nt, Human
aaauauguaccaa

SEQ ID NO: 1474528 - RNA, 15 nt, Human
aaauaucuugaaagg

SEQ ID NO: 1474529 - RNA, 17 nt, Human
aaauaugaagaacugag

SEQ ID NO: 1474530 - RNA, 15 nt, Human
aaauaugauguuaaa

SEQ ID NO: 1474531 - RNA, 21 nt, Human
aaauaugauguuaaaaaaaua

SEQ ID NO: 1474532 - RNA, 21 nt, Human
guaaagcccauuuuuaaaaua

SEQ ID NO: 1474533 - RNA, 12 nt, Human
guaaagccaugc

SEQ ID NO: 1474534 - RNA, 20 nt, Human
guaaagcuaaaauaaagaaa

SEQ ID NO: 1474535 - RNA, 16 nt, Human
guaaagcuugucugau

SEQ ID NO: 1474536 - RNA, 22 nt, Human
guaaacuaucuuggugaauuuu

SEQ ID NO: 1474537 - RNA, 16 nt, Human
guaaacucaaaauauu

SEQ ID NO: 1474538 - RNA, 23 nt, Human
guaaacucaaaauauuuguacau

SEQ ID NO: 1474539 - RNA, 15 nt, Human
guaaagcuaaaauaa

SEQ ID NO: 1474540 - RNA, 22 nt, Human
guaaaguaucaggauacuauau

SEQ ID NO: 1474541 - RNA, 13 nt, Human
guaaauuuguacu

SEQ ID NO: 1474542 - RNA, 15 nt, Human
guaaauuuguacuau

SEQ ID NO: 1474543 - RNA, 20 nt, Human
guaaauuuguacuauuuaac

SEQ ID NO: 1474544 - RNA, 22 nt, Human
guaaauuuguacuauuuaacug

SEQ ID NO: 1474545 - RNA, 13 nt, Human
guaacaaaaauaa

SEQ ID NO: 1474546 - RNA, 13 nt, Human
guaacaagccaga

SEQ ID NO: 1474547 - RNA, 14 nt, Human
guaacaagccagau

SEQ ID NO: 1474548 - RNA, 15 nt, Human
guaacaagccagauu

SEQ ID NO: 1474549 - RNA, 16 nt, Human
guaacaagccagauuu

SEQ ID NO: 1474550 - RNA, 23 nt, Human
guaacaagccagauuuuuuaaaa

SEQ ID NO: 1474551 - RNA, 15 nt, Human
aaaguguauuuguua

SEQ ID NO: 1474552 - RNA, 21 nt, Human
aaaguggguuuuuuaguugaa

SEQ ID NO: 1474553 - RNA, 14 nt, Human
aaaguguuuucucu

SEQ ID NO: 1474554 - RNA, 23 nt, Human
aaaguguuuucucugaacacauu

SEQ ID NO: 1474555 - RNA, 17 nt, Human
aaaguguuuucucugaa

SEQ ID NO: 1474556 - RNA, 21 nt, Human
aaaguguuuucucugaacaca

SEQ ID NO: 1474557 - RNA, 23 nt, Human
guaaaaugugggauuauggguca

SEQ ID NO: 1474558 - RNA, 13 nt, Human
guaaaccuuuuau

SEQ ID NO: 1474559 - RNA, 13 nt, Human
guaaguuuuuuga

SEQ ID NO: 1474560 - RNA, 21 nt, Human
guaauaaaauucaacaaacau

SEQ ID NO: 1474561 - RNA, 20 nt, Human
guaauaaaauucaacaaaca

SEQ ID NO: 1474562 - RNA, 12 nt, Human
guacaaaauaaa

SEQ ID NO: 1474563 - RNA, 14 nt, Human
guacaaaauaaaca

SEQ ID NO: 1474564 - RNA, 16 nt, Human
guacaaaauaaacaaa

SEQ ID NO: 1474565 - RNA, 15 nt, Human
guaauuuuuuucacc

SEQ ID NO: 1474566 - RNA, 23 nt, Human
guacaaccacacccacacucaga

SEQ ID NO: 1474567 - RNA, 15 nt, Human
guacaagaagcauuu

SEQ ID NO: 1474568 - RNA, 21 nt, Human
guacaagaagcauuuuguaag

SEQ ID NO: 1474569 - RNA, 18 nt, Human
gguaaguuuuuugaaauu

SEQ ID NO: 1474570 - RNA, 14 nt, Human
gguauaccucacuu

SEQ ID NO: 1474571 - RNA, 23 nt, Human
gguauaguucaugucugcuauca

SEQ ID NO: 1474572 - RNA, 16 nt, Human
gguauauccaaaagcu

SEQ ID NO: 1474573 - RNA, 14 nt, Human
ggucagugcaaaua

SEQ ID NO: 1474574 - RNA, 20 nt, Human
gguaugaacuugaggacaca

SEQ ID NO: 1474575 - RNA, 19 nt, Human
gguaugaacuugaggacac

SEQ ID NO: 1474576 - RNA, 16 nt, Human
gguaugaacuugagga

SEQ ID NO: 1474577 - RNA, 22 nt, Human
gguaaaucagacuaugaaguuu

SEQ ID NO: 1474578 - RNA, 22 nt, Human
ggguuuuuuaguugaauuuuuu

SEQ ID NO: 1474579 - RNA, 13 nt, Human
gguaaaacacuug

SEQ ID NO: 1474580 - RNA, 18 nt, Human
gguaaaacagggccacau

SEQ ID NO: 1474581 - RNA, 13 nt, Human
gguaaaaugccau

SEQ ID NO: 1474582 - RNA, 17 nt, Human
ggguguccugcaccggg

SEQ ID NO: 1474583 - RNA, 21 nt, Human
ggguguccugcaccggggccu

SEQ ID NO: 1474584 - RNA, 18 nt, Human
ggguguaaaaccuggaga

SEQ ID NO: 1474585 - RNA, 14 nt, Human
aaacuaaaaacuag

SEQ ID NO: 1474586 - RNA, 10 nt, Human
aaaccacuuu

SEQ ID NO: 1474587 - RNA, 16 nt, Human
aaaccaggacccuguc

SEQ ID NO: 1474588 - RNA, 19 nt, Human
aaaccuggagaugguggau

SEQ ID NO: 1474589 - RNA, 11 nt, Human
aaaccuggaga

SEQ ID NO: 1474590 - RNA, 20 nt, Human
aaaccacuuuuugcagcuuu

SEQ ID NO: 1474591 - RNA, 13 nt, Human
aaacauuuucucc

SEQ ID NO: 1474592 - RNA, 23 nt, Human
aaaccuuccacccagugcugaau

SEQ ID NO: 1474593 - RNA, 16 nt, Human
aaaccuuccacccagu

SEQ ID NO: 1474594 - RNA, 14 nt, Human
aaacauuugcugaa

SEQ ID NO: 1474595 - RNA, 12 nt, Human
gggucacaggaa

SEQ ID NO: 1474596 - RNA, 19 nt, Human
gggucaggccuuugagcuc

SEQ ID NO: 1474597 - RNA, 21 nt, Human
gggucaggccuuugagcucag

SEQ ID NO: 1474598 - RNA, 14 nt, Human
aaaauguaaagcca

SEQ ID NO: 1474599 - RNA, 15 nt, Human
ggggacagguccuca

SEQ ID NO: 1474600 - RNA, 20 nt, Human
gggguauuucaauuaccuuc

SEQ ID NO: 1474601 - RNA, 23 nt, Human
ggggcccggacgcccaggacccc

SEQ ID NO: 1474602 - RNA, 22 nt, Human
gggggcagucugagagaggcca

SEQ ID NO: 1474603 - RNA, 15 nt, Human
aaaauauuuguacau

SEQ ID NO: 1474604 - RNA, 19 nt, Human
aaaauauuguuuuacaaua

SEQ ID NO: 1474605 - RNA, 20 nt, Human
aaaauauuguuuuacaauag

SEQ ID NO: 1474606 - RNA, 12 nt, Human
aaaaugagaaau

SEQ ID NO: 1474607 - RNA, 11 nt, Human
aaaaugagaaa

SEQ ID NO: 1474608 - RNA, 23 nt, Human
aaaaugccaugaugccucugucu

SEQ ID NO: 1474609 - RNA, 11 nt, Human
aaaauaauuuu

SEQ ID NO: 1474610 - RNA, 19 nt, Human
aaaauaauuuuaaacaaag

SEQ ID NO: 1474611 - RNA, 20 nt, Human
aaaauaauuuuaaacaaagg

SEQ ID NO: 1474612 - RNA, 16 nt, Human
aaaauaauacugcuga

SEQ ID NO: 1474613 - RNA, 23 nt, Human
aaaauaauacugcugagauacau

SEQ ID NO: 1474614 - RNA, 16 nt, Human
aaaauaauuuuuauau

SEQ ID NO: 1474615 - RNA, 17 nt, Human
aaaauaauuuuuauauu

SEQ ID NO: 1474616 - RNA, 20 nt, Human
aaaauaauuuuuauauuuga

SEQ ID NO: 1474617 - RNA, 12 nt, Human
aaaauacauugu

SEQ ID NO: 1474618 - RNA, 10 nt, Human
aaaauacaug

SEQ ID NO: 1474619 - RNA, 19 nt, Human
aaaaggacaucagcaaaca

SEQ ID NO: 1474620 - RNA, 17 nt, Human
aaaaggacaucagcaaa

SEQ ID NO: 1474621 - RNA, 13 nt, Human
ggcuggucucaaa

SEQ ID NO: 1474622 - RNA, 15 nt, Human
aaaagguauuaaauu

SEQ ID NO: 1474623 - RNA, 15 nt, Human
aaaauggucucuaac

SEQ ID NO: 1474624 - RNA, 23 nt, Human
aaaauggccauuugcuuuuucac

SEQ ID NO: 1474625 - RNA, 17 nt, Human
gggcugccuucuggccu

SEQ ID NO: 1474626 - RNA, 13 nt, Human
gggccaggcuggg

SEQ ID NO: 1474627 - RNA, 14 nt, Human
gggccugcccagug

SEQ ID NO: 1474628 - RNA, 14 nt, Human
gcuuuggaagccau

SEQ ID NO: 1474629 - RNA, 23 nt, Human
gcuuugcccugcugcccuccccc

SEQ ID NO: 1474630 - RNA, 19 nt, Human
gcuuugcccugcugcccuc

SEQ ID NO: 1474631 - RNA, 18 nt, Human
gcuuugcccugcugcccu

SEQ ID NO: 1474632 - RNA, 16 nt, Human
gcuuugcuaccaaagc

SEQ ID NO: 1474633 - RNA, 17 nt, Human
gcuuaaucagauagaua

SEQ ID NO: 1474634 - RNA, 11 nt, Human
gcuuuccugaa

SEQ ID NO: 1474635 - RNA, 12 nt, Human
gcuuuccugaau

SEQ ID NO: 1474636 - RNA, 22 nt, Human
gcuuuccugaauccaaacuaau

SEQ ID NO: 1474637 - RNA, 20 nt, Human
gcuuuucccuuuuuuuaagu

SEQ ID NO: 1474638 - RNA, 21 nt, Human
gcuuuucccuuuuuuuaagua

SEQ ID NO: 1474639 - RNA, 23 nt, Human
gcuuuugcgguucaggaaaauug

SEQ ID NO: 1474640 - RNA, 19 nt, Human
ggaaagcgccuccaacccu

SEQ ID NO: 1474641 - RNA, 23 nt, Human
ggaaagcgccuccaacccuagca

SEQ ID NO: 1474642 - RNA, 19 nt, Human
ggaaagcagccuggccaac

SEQ ID NO: 1474643 - RNA, 21 nt, Human
ggaaagaagaaggugggagga

SEQ ID NO: 1474644 - RNA, 16 nt, Human
ggaaaaaauaacaaug

SEQ ID NO: 1474645 - RNA, 15 nt, Human
ggacaucagcaaaca

SEQ ID NO: 1474646 - RNA, 14 nt, Human
ggacaucagcaaac

SEQ ID NO: 1474647 - RNA, 12 nt, Human
ggacaucagcaa

SEQ ID NO: 1474648 - RNA, 17 nt, Human
ggacagucaccucaugg

SEQ ID NO: 1474649 - RNA, 18 nt, Human
ggacagucaccucaugga

SEQ ID NO: 1474650 - RNA, 21 nt, Human
ggacagucaccucauggaauu

SEQ ID NO: 1474651 - RNA, 20 nt, Human
ggacagguccucaguguccu

SEQ ID NO: 1474652 - RNA, 12 nt, Human
ggacaccugccc

SEQ ID NO: 1474653 - RNA, 11 nt, Human
ggacaccugcc

SEQ ID NO: 1474654 - RNA, 10 nt, Human
ggacaccugc

SEQ ID NO: 1474655 - RNA, 16 nt, Human
ggacaccuaggcuagg

SEQ ID NO: 1474656 - RNA, 13 nt, Human
ggacaccugcccu

SEQ ID NO: 1474657 - RNA, 15 nt, Human
ggacaccugcccugc

SEQ ID NO: 1474658 - RNA, 14 nt, Human
ggacaccugcccug

SEQ ID NO: 1474659 - RNA, 19 nt, Human
ggacacauguccaguggga

SEQ ID NO: 1474660 - RNA, 21 nt, Human
ggacacaguuccugggaacau

SEQ ID NO: 1474661 - RNA, 16 nt, Human
ggacaccccgacuuuu

SEQ ID NO: 1474662 - RNA, 13 nt, Human
ggacacaugucca

SEQ ID NO: 1474663 - RNA, 12 nt, Human
ggacacaugucc

SEQ ID NO: 1474664 - RNA, 19 nt, Human
ggacacaguuccugggaac

SEQ ID NO: 1474665 - RNA, 18 nt, Human
ggacacaguuccugggaa

SEQ ID NO: 1474666 - RNA, 17 nt, Human
ggacacaguuccuggga

SEQ ID NO: 1474667 - RNA, 16 nt, Human
ggacacaguuccuggg

SEQ ID NO: 1474668 - RNA, 14 nt, Human
ggacacaguuccug

SEQ ID NO: 1474669 - RNA, 17 nt, Human
ggaaugagcugaaggug

SEQ ID NO: 1474670 - RNA, 19 nt, Human
ggaauacucuuauaucuau

SEQ ID NO: 1474671 - RNA, 15 nt, Human
ggaauauaauuguuu

SEQ ID NO: 1474672 - RNA, 19 nt, Human
ggaaaucaggguuaguauu

SEQ ID NO: 1474673 - RNA, 16 nt, Human
ggaagccagcuuuccc

SEQ ID NO: 1474674 - RNA, 19 nt, Human
gcuggcucugugagggugc

SEQ ID NO: 1474675 - RNA, 21 nt, Human
gcugggaauggaggggcagag

SEQ ID NO: 1474676 - RNA, 15 nt, Human
gcuggcuugggcagc

SEQ ID NO: 1474677 - RNA, 14 nt, Human
gcugggccccugcc

SEQ ID NO: 1474678 - RNA, 13 nt, Human
gcugggccccugc

SEQ ID NO: 1474679 - RNA, 12 nt, Human
gcugggccccug

SEQ ID NO: 1474680 - RNA, 20 nt, Human
gcugggccccugccucucug

SEQ ID NO: 1474681 - RNA, 18 nt, Human
gcugggccccugccucuc

SEQ ID NO: 1474682 - RNA, 20 nt, Human
gcuguauuuuaaaagaauga

SEQ ID NO: 1474683 - RNA, 18 nt, Human
gcuguauuuuaaaagaau

SEQ ID NO: 1474684 - RNA, 21 nt, Human
gcuguauuuuaaaagaaugau

SEQ ID NO: 1474685 - RNA, 16 nt, Human
gcuguaguaggcauuu

SEQ ID NO: 1474686 - RNA, 23 nt, Human
gcuguaguaggcauuuuuaccau

SEQ ID NO: 1474687 - RNA, 16 nt, Human
gcugugcgugugugug

SEQ ID NO: 1474688 - RNA, 16 nt, Human
gcugugcuauggugcu

SEQ ID NO: 1474689 - RNA, 17 nt, Human
gcugugcuauggugcuc

SEQ ID NO: 1474690 - RNA, 18 nt, Human
gcugagcaaaucaccaca

SEQ ID NO: 1474691 - RNA, 20 nt, Human
gcugccccuggugcacuggc

SEQ ID NO: 1474692 - RNA, 20 nt, Human
gcugcccccagagccacagu

SEQ ID NO: 1474693 - RNA, 15 nt, Human
gcugcccccagagcc

SEQ ID NO: 1474694 - RNA, 21 nt, Human
gcugcccccagagccacaguu

SEQ ID NO: 1474695 - RNA, 14 nt, Human
gcugccucuucccu

SEQ ID NO: 1474696 - RNA, 18 nt, Human
gcugccucuucccucuuc

SEQ ID NO: 1474697 - RNA, 19 nt, Human
gcgcaggccgugacgucug

SEQ ID NO: 1474698 - RNA, 19 nt, Human
gccuucucuaaacauuuca

SEQ ID NO: 1474699 - RNA, 14 nt, Human
gccuucucuguuca

SEQ ID NO: 1474700 - RNA, 16 nt, Human
gccuucucuguucauu

SEQ ID NO: 1474701 - RNA, 14 nt, Human
gccuucuggccuug

SEQ ID NO: 1474702 - RNA, 23 nt, Human
gccuucuuuugggggucaacagu

SEQ ID NO: 1474703 - RNA, 17 nt, Human
gccuucucaugauccaa

SEQ ID NO: 1474704 - RNA, 17 nt, Human
gccucugggggguggcc

SEQ ID NO: 1474705 - RNA, 20 nt, Human
gccucugggggguggccagg

SEQ ID NO: 1474706 - RNA, 23 nt, Human
gccucugggggguggccaggccg

SEQ ID NO: 1474707 - RNA, 21 nt, Human
gccucugggggguggccaggc

SEQ ID NO: 1474708 - RNA, 16 nt, Human
gccuggcuccguccag

SEQ ID NO: 1474709 - RNA, 22 nt, Human
gcguuauuggucggcagccuuc

SEQ ID NO: 1474710 - RNA, 21 nt, Human
gcguggaacucgugucuggca

SEQ ID NO: 1474711 - RNA, 12 nt, Human
gcggcuccucag

SEQ ID NO: 1474712 - RNA, 14 nt, Human
gcggcuccucaggg

SEQ ID NO: 1474713 - RNA, 13 nt, Human
gcggcaucaggcu

SEQ ID NO: 1474714 - RNA, 22 nt, Human
gcuaaguacacaauaagcaaaa

SEQ ID NO: 1474715 - RNA, 21 nt, Human
gcuaaguacacaauaagcaaa

SEQ ID NO: 1474716 - RNA, 20 nt, Human
gcuaaguacacaauaagcaa

SEQ ID NO: 1474717 - RNA, 17 nt, Human
gcuaggguggggagaga

SEQ ID NO: 1474718 - RNA, 18 nt, Human
gcuaggguggggagagac

SEQ ID NO: 1474719 - RNA, 16 nt, Human
gcuauguuuuuaaugu

SEQ ID NO: 1474720 - RNA, 19 nt, Human
gcuauguuuugacauuuuu

SEQ ID NO: 1474721 - RNA, 18 nt, Human
gcuauguuuuuaauguau

SEQ ID NO: 1474722 - RNA, 18 nt, Human
gcuauuauuuucacugua

SEQ ID NO: 1474723 - RNA, 21 nt, Human
gcuauuauuuucacuguagaa

SEQ ID NO: 1474724 - RNA, 17 nt, Human
gcuauuauuuucacugu

SEQ ID NO: 1474725 - RNA, 21 nt, Human
gcuaggaauuguguuuauaau

SEQ ID NO: 1474726 - RNA, 12 nt, Human
gcuaggaaugaa

SEQ ID NO: 1474727 - RNA, 13 nt, Human
gcuaggaaugaaa

SEQ ID NO: 1474728 - RNA, 18 nt, Human
gcuaggaaugaaauccug

SEQ ID NO: 1474729 - RNA, 16 nt, Human
gcucagagcaguguuu

SEQ ID NO: 1474730 - RNA, 17 nt, Human
gcucagaaaauaucccu

SEQ ID NO: 1474731 - RNA, 18 nt, Human
gcucagaaguuucuucuu

SEQ ID NO: 1474732 - RNA, 15 nt, Human
gcucacuucugggcu

SEQ ID NO: 1474733 - RNA, 23 nt, Human
gcucacuucugggcuucaucugg

SEQ ID NO: 1474734 - RNA, 23 nt, Human
gcucaacucucuuauugccucac

SEQ ID NO: 1474735 - RNA, 23 nt, Human
gcucaggagcccugggaggcucu

SEQ ID NO: 1474736 - RNA, 22 nt, Human
gcucaggagcccugggaggcuc

SEQ ID NO: 1474737 - RNA, 18 nt, Human
gcucagaggguguccugc

SEQ ID NO: 1474738 - RNA, 19 nt, Human
gcucagaggguguccugca

SEQ ID NO: 1474739 - RNA, 20 nt, Human
gcccugccaccugucugucu

SEQ ID NO: 1474740 - RNA, 17 nt, Human
gccggaucugagggaga

SEQ ID NO: 1474741 - RNA, 15 nt, Human
gccggaucugaggga

SEQ ID NO: 1474742 - RNA, 22 nt, Human
gcccugugccccuugacaacug

SEQ ID NO: 1474743 - RNA, 18 nt, Human
gcccugccaccugucugu

SEQ ID NO: 1474744 - RNA, 19 nt, Human
gcccuuaugacugccaaga

SEQ ID NO: 1474745 - RNA, 17 nt, Human
gcccuuauuuucaagaa

SEQ ID NO: 1474746 - RNA, 18 nt, Human
gcccuuauuuucaagaaa

SEQ ID NO: 1474747 - RNA, 20 nt, Human
gcccuuauuuucaagaaacu

SEQ ID NO: 1474748 - RNA, 13 nt, Human
gccuagacucugu

SEQ ID NO: 1474749 - RNA, 13 nt, Human
gccuagaggccug

SEQ ID NO: 1474750 - RNA, 17 nt, Human
gcccccagagccacagu

SEQ ID NO: 1474751 - RNA, 16 nt, Human
gcccccagagccacag

SEQ ID NO: 1474752 - RNA, 15 nt, Human
gcccccagagccaca

SEQ ID NO: 1474753 - RNA, 14 nt, Human
gccauuaacaaaug

SEQ ID NO: 1474754 - RNA, 13 nt, Human
gcauuuagaugua

SEQ ID NO: 1474755 - RNA, 12 nt, Human
gcauuuagaugu

SEQ ID NO: 1474756 - RNA, 19 nt, Human
gccauucuuucccaacacc

SEQ ID NO: 1474757 - RNA, 12 nt, Human
gccauucuuucc

SEQ ID NO: 1474758 - RNA, 22 nt, Human
gcccacuguacuugcucuugau

SEQ ID NO: 1474759 - RNA, 20 nt, Human
gcccacuguacuugcucuug

SEQ ID NO: 1474760 - RNA, 15 nt, Human
gcccacuguacuugc

SEQ ID NO: 1474761 - RNA, 15 nt, Human
gcccaggcacugcaa

SEQ ID NO: 1474762 - RNA, 22 nt, Human
gcccaggauacuggcacagagg

SEQ ID NO: 1474763 - RNA, 23 nt, Human
gcccaggauacuggcacagaggu

SEQ ID NO: 1474764 - RNA, 20 nt, Human
gcccaggauacuggcacaga

SEQ ID NO: 1474765 - RNA, 17 nt, Human
gcccaggauacuggcac

SEQ ID NO: 1474766 - RNA, 15 nt, Human
gcccaggauacuggc

SEQ ID NO: 1474767 - RNA, 21 nt, Human
gcccaggaccccauggcagug

SEQ ID NO: 1474768 - RNA, 13 nt, Human
gcccaggacccca

SEQ ID NO: 1474769 - RNA, 16 nt, Human
gcccaggcacugcaaa

SEQ ID NO: 1474770 - RNA, 21 nt, Human
gacauuuuacauuaaauuuuu

SEQ ID NO: 1474771 - RNA, 15 nt, Human
gacauuuuacauuaa

SEQ ID NO: 1474772 - RNA, 14 nt, Human
gacauuuuacauua

SEQ ID NO: 1474773 - RNA, 13 nt, Human
gacauuuuacauu

SEQ ID NO: 1474774 - RNA, 20 nt, Human
gacauuuuaaaaaaugguca

SEQ ID NO: 1474775 - RNA, 22 nt, Human
gacagcccaggauacuggcaca

SEQ ID NO: 1474776 - RNA, 18 nt, Human
gacagucaccucauggaa

SEQ ID NO: 1474777 - RNA, 21 nt, Human
gacaguccgucaaaacagauu

SEQ ID NO: 1474778 - RNA, 23 nt, Human
gacagcccaggauacuggcacag

SEQ ID NO: 1474779 - RNA, 23 nt, Human
gacacuuuaauuaccaaccuguu

SEQ ID NO: 1474780 - RNA, 12 nt, Human
gacacuggcaug

SEQ ID NO: 1474781 - RNA, 16 nt, Human
gacccugagcugacca

SEQ ID NO: 1474782 - RNA, 20 nt, Human
gacccugagcugaccagccg

SEQ ID NO: 1474783 - RNA, 14 nt, Human
gaaugauuaugaau

SEQ ID NO: 1474784 - RNA, 22 nt, Human
gaaugauuaugaauuacauuug

SEQ ID NO: 1474785 - RNA, 14 nt, Human
gaaugauuucaugc

SEQ ID NO: 1474786 - RNA, 13 nt, Human
gaauuacauuugu

SEQ ID NO: 1474787 - RNA, 15 nt, Human
gaauuacauuuguau

SEQ ID NO: 1474788 - RNA, 18 nt, Human
gaauuacauuuguauaaa

SEQ ID NO: 1474789 - RNA, 19 nt, Human
gaauuacgugcucuguggg

SEQ ID NO: 1474790 - RNA, 15 nt, Human
gaauuacgugcucug

SEQ ID NO: 1474791 - RNA, 20 nt, Human
gaauuacauuuguauaaaau

SEQ ID NO: 1474792 - RNA, 22 nt, Human
gaauuaaaguggaccaauaggg

SEQ ID NO: 1474793 - RNA, 12 nt, Human
gaauuaaauaaa

SEQ ID NO: 1474794 - RNA, 20 nt, Human
gaauuaaauaaacccuuccu

SEQ ID NO: 1474795 - RNA, 14 nt, Human
gacaaaaagcuacu

SEQ ID NO: 1474796 - RNA, 19 nt, Human
gacaaacaccucccaggag

SEQ ID NO: 1474797 - RNA, 17 nt, Human
gacaaacaccucccagg

SEQ ID NO: 1474798 - RNA, 22 nt, Human
gacaaacaccucccaggagaca

SEQ ID NO: 1474799 - RNA, 15 nt, Human
gaauuuuuuuuaaca

SEQ ID NO: 1474800 - RNA, 16 nt, Human
gaauuuuuuuuaacau

SEQ ID NO: 1474801 - RNA, 17 nt, Human
gaauuuuuuuuaacauu

SEQ ID NO: 1474802 - RNA, 19 nt, Human
gaauuuuuuuuaacauucc

SEQ ID NO: 1474803 - RNA, 20 nt, Human
gaauuuuuuuuaacauuccu

SEQ ID NO: 1474804 - RNA, 21 nt, Human
gaauuuuuuuuaacauuccuc

SEQ ID NO: 1474805 - RNA, 22 nt, Human
gaauuuuuuuuuccuagcccuc

SEQ ID NO: 1474806 - RNA, 18 nt, Human
gacaaaaaauuaaagcau

SEQ ID NO: 1474807 - RNA, 13 nt, Human
gacaaagaaccuu

SEQ ID NO: 1474808 - RNA, 12 nt, Human
gaauuauuuugu

SEQ ID NO: 1474809 - RNA, 14 nt, Human
gaauuaugaaacuu

SEQ ID NO: 1474810 - RNA, 18 nt, Human
gacaaagguuuuccucuu

SEQ ID NO: 1474811 - RNA, 11 nt, Human
gaauaugccuu

SEQ ID NO: 1474812 - RNA, 22 nt, Human
gaauaucuccgucaacucauau

SEQ ID NO: 1474813 - RNA, 16 nt, Human
gaauauccaugaccua

SEQ ID NO: 1474814 - RNA, 21 nt, Human
gagcuggagaugaggccagac

SEQ ID NO: 1474815 - RNA, 23 nt, Human
gagcuggagaugaggccagacca

SEQ ID NO: 1474816 - RNA, 22 nt, Human
gagcuggagaugaggccagacc

SEQ ID NO: 1474817 - RNA, 20 nt, Human
gagcccugggaggcucugga

SEQ ID NO: 1474818 - RNA, 19 nt, Human
gagcccugggaggcucugg

SEQ ID NO: 1474819 - RNA, 18 nt, Human
gagcccugggaggcucug

SEQ ID NO: 1474820 - RNA, 16 nt, Human
gagcccugggaggcuc

SEQ ID NO: 1474821 - RNA, 12 nt, Human
gagcccugggag

SEQ ID NO: 1474822 - RNA, 17 nt, Human
gagcccugaggccuaga

SEQ ID NO: 1474823 - RNA, 14 nt, Human
gagcagucaggaaa

SEQ ID NO: 1474824 - RNA, 15 nt, Human
gaggacccaggacag

SEQ ID NO: 1474825 - RNA, 14 nt, Human
gaggacccaggaca

SEQ ID NO: 1474826 - RNA, 16 nt, Human
gaggacccagggcucu

SEQ ID NO: 1474827 - RNA, 14 nt, Human
gaggacuugugucu

SEQ ID NO: 1474828 - RNA, 16 nt, Human
gaggacuugugucucu

SEQ ID NO: 1474829 - RNA, 17 nt, Human
gaggacuugugucucug

SEQ ID NO: 1474830 - RNA, 14 nt, Human
gaggacccagggcu

SEQ ID NO: 1474831 - RNA, 15 nt, Human
gaggacccagggcuc

SEQ ID NO: 1474832 - RNA, 18 nt, Human
gaggacuugugucucugu

SEQ ID NO: 1474833 - RNA, 22 nt, Human
gaggacuugugucucugugcuu

SEQ ID NO: 1474834 - RNA, 16 nt, Human
gaggggcagagccagg

SEQ ID NO: 1474835 - RNA, 16 nt, Human
gaggggaccaggagug

SEQ ID NO: 1474836 - RNA, 20 nt, Human
gaggggcagagccaggaaga

SEQ ID NO: 1474837 - RNA, 13 nt, Human
gaggggcagagcc

SEQ ID NO: 1474838 - RNA, 21 nt, Human
gaggggaccaggagugggugg

SEQ ID NO: 1474839 - RNA, 17 nt, Human
gaggggaccaggagugg

SEQ ID NO: 1474840 - RNA, 15 nt, Human
gagaggccuuuugga

SEQ ID NO: 1474841 - RNA, 18 nt, Human
gagaggccuuuuggaaug

SEQ ID NO: 1474842 - RNA, 15 nt, Human
gagagggaaugugaa

SEQ ID NO: 1474843 - RNA, 14 nt, Human
gagagggaauguga

SEQ ID NO: 1474844 - RNA, 16 nt, Human
gagacgggcccuggug

SEQ ID NO: 1474845 - RNA, 22 nt, Human
gacuuuuuauggcacuaguauu

SEQ ID NO: 1474846 - RNA, 16 nt, Human
gacuuuuugcauuuaa

SEQ ID NO: 1474847 - RNA, 13 nt, Human
gagaaggagcaga

SEQ ID NO: 1474848 - RNA, 23 nt, Human
gagacgggacugcggaggaagga

SEQ ID NO: 1474849 - RNA, 21 nt, Human
gagaccggccugccaggagga

SEQ ID NO: 1474850 - RNA, 20 nt, Human
gagaccggccugccaggagg

SEQ ID NO: 1474851 - RNA, 15 nt, Human
gagaccggccugcca

SEQ ID NO: 1474852 - RNA, 17 nt, Human
gagaccggccugccagg

SEQ ID NO: 1474853 - RNA, 18 nt, Human
gagaccggccugccagga

SEQ ID NO: 1474854 - RNA, 19 nt, Human
gagaccggccugccaggag

SEQ ID NO: 1474855 - RNA, 15 nt, Human
gagaaucuauauuua

SEQ ID NO: 1474856 - RNA, 22 nt, Human
gagaaucuauauuuaacaagau

SEQ ID NO: 1474857 - RNA, 23 nt, Human
gcagagcugauggagaaggaagg

SEQ ID NO: 1474858 - RNA, 22 nt, Human
gcagagcugauggagaaggaag

SEQ ID NO: 1474859 - RNA, 21 nt, Human
gcagagcugauggagaaggaa

SEQ ID NO: 1474860 - RNA, 19 nt, Human
gcagagcugauggagaagg

SEQ ID NO: 1474861 - RNA, 15 nt, Human
gcaguuuauauuuaa

SEQ ID NO: 1474862 - RNA, 18 nt, Human
gcaguuuauauuuaacuc

SEQ ID NO: 1474863 - RNA, 22 nt, Human
gcaguuguugcccacagcugua

SEQ ID NO: 1474864 - RNA, 23 nt, Human
gcagucucuauaccaauaaagug

SEQ ID NO: 1474865 - RNA, 22 nt, Human
gcagucucuauaccaauaaagu

SEQ ID NO: 1474866 - RNA, 21 nt, Human
gcagucucuauaccaauaaag

SEQ ID NO: 1474867 - RNA, 20 nt, Human
gcagucucuauaccaauaaa

SEQ ID NO: 1474868 - RNA, 18 nt, Human
gcagucucuauaccaaua

SEQ ID NO: 1474869 - RNA, 23 nt, Human
gcagugagagaguggcuggggca

SEQ ID NO: 1474870 - RNA, 22 nt, Human
gcagugagagaguggcuggggc

SEQ ID NO: 1474871 - RNA, 17 nt, Human
gcagucucuauaccaau

SEQ ID NO: 1474872 - RNA, 21 nt, Human
gcaucccucacccauccuaga

SEQ ID NO: 1474873 - RNA, 16 nt, Human
gcauccauucuccuga

SEQ ID NO: 1474874 - RNA, 17 nt, Human
gcauccauucuccugag

SEQ ID NO: 1474875 - RNA, 12 nt, Human
gcaucccugggc

SEQ ID NO: 1474876 - RNA, 15 nt, Human
gcaucccugggccuu

SEQ ID NO: 1474877 - RNA, 17 nt, Human
gcaucccugggccuugg

SEQ ID NO: 1474878 - RNA, 18 nt, Human
gcaucccugggccuuggg

SEQ ID NO: 1474879 - RNA, 20 nt, Human
gcaucccugggccuugggcu

SEQ ID NO: 1474880 - RNA, 19 nt, Human
gcaucccugggccuugggc

SEQ ID NO: 1474881 - RNA, 11 nt, Human
gcauccagccu

SEQ ID NO: 1474882 - RNA, 19 nt, Human
gcauccauucuccugagga

SEQ ID NO: 1474883 - RNA, 22 nt, Human
gcauccagagucccugccugga

SEQ ID NO: 1474884 - RNA, 23 nt, Human
gcauccagagucccugccuggac

SEQ ID NO: 1474885 - RNA, 21 nt, Human
gcauccagagucccugccugg

SEQ ID NO: 1474886 - RNA, 20 nt, Human
gcaucuagcaugucgucaaa

SEQ ID NO: 1474887 - RNA, 21 nt, Human
gcaucuagaggcuuccuucau

SEQ ID NO: 1474888 - RNA, 22 nt, Human
gcaucuagaggcuuccuucauu

SEQ ID NO: 1474889 - RNA, 23 nt, Human
gcaucuagaggcuuccuucauuu

SEQ ID NO: 1474890 - RNA, 15 nt, Human
gcauggcuauuuuau

SEQ ID NO: 1474891 - RNA, 17 nt, Human
gcaucggggagccggga

SEQ ID NO: 1474892 - RNA, 20 nt, Human
gaugauccccacgccacagc

SEQ ID NO: 1474893 - RNA, 16 nt, Human
gaugauccccacgcca

SEQ ID NO: 1474894 - RNA, 15 nt, Human
gaugauccccacgcc

SEQ ID NO: 1474895 - RNA, 21 nt, Human
gaugauccccacgccacagcc

SEQ ID NO: 1474896 - RNA, 23 nt, Human
gaucugauaggguuugugacagg

SEQ ID NO: 1474897 - RNA, 20 nt, Human
gaucugcagggggugugucu

SEQ ID NO: 1474898 - RNA, 21 nt, Human
gauccacccgccucagccucc

SEQ ID NO: 1474899 - RNA, 18 nt, Human
gauccacucgccucagcc

SEQ ID NO: 1474900 - RNA, 17 nt, Human
gaucccaacacugccag

SEQ ID NO: 1474901 - RNA, 18 nt, Human
gaucccaacacugccagc

SEQ ID NO: 1474902 - RNA, 19 nt, Human
gaucccaacacugccagca

SEQ ID NO: 1474903 - RNA, 21 nt, Human
gaucccaaguagaaucucagu

SEQ ID NO: 1474904 - RNA, 15 nt, Human
gaucccaugagcucc

SEQ ID NO: 1474905 - RNA, 13 nt, Human
gaucugagggaga

SEQ ID NO: 1474906 - RNA, 19 nt, Human
gaucugauaggguuuguga

SEQ ID NO: 1474907 - RNA, 12 nt, Human
gauacugaaaua

SEQ ID NO: 1474908 - RNA, 18 nt, Human
gauaccauauacagcuca

SEQ ID NO: 1474909 - RNA, 16 nt, Human
gauacuggcacagagg

SEQ ID NO: 1474910 - RNA, 13 nt, Human
gauacuggcacag

SEQ ID NO: 1474911 - RNA, 14 nt, Human
gauacauacagaau

SEQ ID NO: 1474912 - RNA, 12 nt, Human
gauccacccgcc

SEQ ID NO: 1474913 - RNA, 19 nt, Human
gauccaacuaaugccuuac

SEQ ID NO: 1474914 - RNA, 20 nt, Human
gauccaacuaaugccuuacu

SEQ ID NO: 1474915 - RNA, 15 nt, Human
gauauuuucugugcc

SEQ ID NO: 1474916 - RNA, 21 nt, Human
gauauuuucugugccugaaua

SEQ ID NO: 1474917 - RNA, 14 nt, Human
gauauuuucucuag

SEQ ID NO: 1474918 - RNA, 13 nt, Human
gauagaaaugcca

SEQ ID NO: 1474919 - RNA, 14 nt, Human
gauagaaaugccaa

SEQ ID NO: 1474920 - RNA, 19 nt, Human
gauagaaaugccaagcacu

SEQ ID NO: 1474921 - RNA, 15 nt, Human
gauauuucuagcuua

SEQ ID NO: 1474922 - RNA, 20 nt, Human
gcaaaauaauuuuaaacaaa

SEQ ID NO: 1474923 - RNA, 13 nt, Human
gcaaaauaauuuu

SEQ ID NO: 1474924 - RNA, 15 nt, Human
gcaaaauaauuuuaa

SEQ ID NO: 1474925 - RNA, 21 nt, Human
gcaaaaacaaaaagaaaagaa

SEQ ID NO: 1474926 - RNA, 20 nt, Human
gcaaaaacaaaaagaaaaga

SEQ ID NO: 1474927 - RNA, 23 nt, Human
gcaaaaauaguuuggauauguaa

SEQ ID NO: 1474928 - RNA, 15 nt, Human
gcaaaaacaaaaaga

SEQ ID NO: 1474929 - RNA, 17 nt, Human
gcaaaaaagaaaaccuu

SEQ ID NO: 1474930 - RNA, 15 nt, Human
gcaaaaaagaaaacc

SEQ ID NO: 1474931 - RNA, 18 nt, Human
gcaaaaaagaaaaccuuu

SEQ ID NO: 1474932 - RNA, 18 nt, Human
gauuuauuuaaaauagca

SEQ ID NO: 1474933 - RNA, 21 nt, Human
gauuuauuaauauauauuauc

SEQ ID NO: 1474934 - RNA, 12 nt, Human
gauuuauuuaaa

SEQ ID NO: 1474935 - RNA, 22 nt, Human
cugccuccugccggcuccuugg

SEQ ID NO: 1474936 - RNA, 15 nt, Human
cugccuccugccggc

SEQ ID NO: 1474937 - RNA, 23 nt, Human
cugccuccugccggcuccuuggu

SEQ ID NO: 1474938 - RNA, 22 nt, Human
cugccucucaucaacugaauga

SEQ ID NO: 1474939 - RNA, 14 nt, Human
cugcuauuugaagu

SEQ ID NO: 1474940 - RNA, 15 nt, Human
cugcuaucauuauuc

SEQ ID NO: 1474941 - RNA, 21 nt, Human
cugcuaugguuuucuccaaga

SEQ ID NO: 1474942 - RNA, 20 nt, Human
cugcugagauacauacagaa

SEQ ID NO: 1474943 - RNA, 19 nt, Human
cugcugagauacauacaga

SEQ ID NO: 1474944 - RNA, 12 nt, Human
cuggcucuguga

SEQ ID NO: 1474945 - RNA, 20 nt, Human
cuggaaaccuuccacccagu

SEQ ID NO: 1474946 - RNA, 17 nt, Human
cuggaaaccuuccaccc

SEQ ID NO: 1474947 - RNA, 17 nt, Human
cuggaaaauaauacugc

SEQ ID NO: 1474948 - RNA, 20 nt, Human
cuggaaaauaauacugcuga

SEQ ID NO: 1474949 - RNA, 23 nt, Human
cuggaaaauaauacugcugagau

SEQ ID NO: 1474950 - RNA, 23 nt, Human
cuggaaaaguauguuagugcaaa

SEQ ID NO: 1474951 - RNA, 24 nt, Human
cugcuuccaauuuucuggaauaca

SEQ ID NO: 1474952 - RNA, 19 nt, Human
cugcuucaguguauggaaa

SEQ ID NO: 1474953 - RNA, 21 nt, Human
cugcuucaguguauggaaaua

SEQ ID NO: 1474954 - RNA, 11 nt, Human
cuggaaagaag

SEQ ID NO: 1474955 - RNA, 19 nt, Human
cuggagaagacccuccccg

SEQ ID NO: 1474956 - RNA, 20 nt, Human
cugucuacacuaagagagaa

SEQ ID NO: 1474957 - RNA, 13 nt, Human
cuguccuuucuag

SEQ ID NO: 1474958 - RNA, 20 nt, Human
cuguccuuucuagagcacug

SEQ ID NO: 1474959 - RNA, 21 nt, Human
cuguccuuucuagagcacugc

SEQ ID NO: 1474960 - RNA, 22 nt, Human
cuguccuuucuagagcacugcc

SEQ ID NO: 1474961 - RNA, 23 nt, Human
cuguccuuucuagagcacugcca

SEQ ID NO: 1474962 - RNA, 17 nt, Human
cuguagccccagugaca

SEQ ID NO: 1474963 - RNA, 18 nt, Human
cuguagccccagugacag

SEQ ID NO: 1474964 - RNA, 20 nt, Human
cuguagccccagugacagcu

SEQ ID NO: 1474965 - RNA, 21 nt, Human
cuguagccccagugacagcua

SEQ ID NO: 1474966 - RNA, 20 nt, Human
cuguaagaaaauaucacuug

SEQ ID NO: 1474967 - RNA, 13 nt, Human
cuguaagaaaccu

SEQ ID NO: 1474968 - RNA, 21 nt, Human
cuguaagaaaccuacugccca

SEQ ID NO: 1474969 - RNA, 22 nt, Human
cuguaagaaaccuacugcccag

SEQ ID NO: 1474970 - RNA, 23 nt, Human
cuguaaagcuaaaauaaagaaau

SEQ ID NO: 1474971 - RNA, 18 nt, Human
cuguaaagcuaaaauaaa

SEQ ID NO: 1474972 - RNA, 16 nt, Human
cuguaacaagccagau

SEQ ID NO: 1474973 - RNA, 20 nt, Human
cuguacuugcucuugaugcc

SEQ ID NO: 1474974 - RNA, 19 nt, Human
cuguacuugcucuugaugc

SEQ ID NO: 1474975 - RNA, 16 nt, Human
cuguacuugcucuuga

SEQ ID NO: 1474976 - RNA, 21 nt, Human
cuguacuugcucuugaugccu

SEQ ID NO: 1474977 - RNA, 17 nt, Human
cugguuuucacauuaga

SEQ ID NO: 1474978 - RNA, 21 nt, Human
cuggucugguugggcagccag

SEQ ID NO: 1474979 - RNA, 14 nt, Human
cuggucucuccuug

SEQ ID NO: 1474980 - RNA, 22 nt, Human
cuuaaaauaaugaauacauuuc

SEQ ID NO: 1474981 - RNA, 12 nt, Human
cuuaaaacuccu

SEQ ID NO: 1474982 - RNA, 12 nt, Human
cuuaaaacuuug

SEQ ID NO: 1474983 - RNA, 15 nt, Human
cuuaaaccuucaguu

SEQ ID NO: 1474984 - RNA, 23 nt, Human
cuuaaaccuucaguuaugauuuu

SEQ ID NO: 1474985 - RNA, 15 nt, Human
cuguguauuccaaga

SEQ ID NO: 1474986 - RNA, 19 nt, Human
cuguguauuccaagacaug

SEQ ID NO: 1474987 - RNA, 14 nt, Human
cuguuaugcuguga

SEQ ID NO: 1474988 - RNA, 23 nt, Human
cuguuaucaaacaccaacauaaa

SEQ ID NO: 1474989 - RNA, 19 nt, Human
cuguuaugcugugacacau

SEQ ID NO: 1474990 - RNA, 16 nt, Human
gaaagaacggaagaag

SEQ ID NO: 1474991 - RNA, 15 nt, Human
gaaagaagaaggugg

SEQ ID NO: 1474992 - RNA, 23 nt, Human
gaaacuucagcgguuuauauaag

SEQ ID NO: 1474993 - RNA, 16 nt, Human
gaaagacagcuucuca

SEQ ID NO: 1474994 - RNA, 17 nt, Human
gaaagacagcuucucau

SEQ ID NO: 1474995 - RNA, 16 nt, Human
gaaagaccauuuuucc

SEQ ID NO: 1474996 - RNA, 19 nt, Human
gaaauauuugugacaaaaa

SEQ ID NO: 1474997 - RNA, 15 nt, Human
gaaaucaacuugcuu

SEQ ID NO: 1474998 - RNA, 19 nt, Human
cuuuuaugugaaacauguu

SEQ ID NO: 1474999 - RNA, 18 nt, Human
cuuuugggggucaacagu

SEQ ID NO: 1475000 - RNA, 23 nt, Human
cuuuugcgguucaggaaaauuga

SEQ ID NO: 1475001 - RNA, 22 nt, Human
cuuuugcucuuagcugucugcu

SEQ ID NO: 1475002 - RNA, 14 nt, Human
gaaaaaauauauau

SEQ ID NO: 1475003 - RNA, 21 nt, Human
cuuuuuuuuuuuuuaauaaau

SEQ ID NO: 1475004 - RNA, 16 nt, Human
gaaaagcagacauuuu

SEQ ID NO: 1475005 - RNA, 15 nt, Human
gaaaagcagacauuu

SEQ ID NO: 1475006 - RNA, 14 nt, Human
gaaaauuaacauga

SEQ ID NO: 1475007 - RNA, 18 nt, Human
gaaaacuuguauuaugug

SEQ ID NO: 1475008 - RNA, 16 nt, Human
gaaaauuuuuguagua

SEQ ID NO: 1475009 - RNA, 13 nt, Human
gaaaauuuuugua

SEQ ID NO: 1475010 - RNA, 14 nt, Human
gaaacaaaaacacu

SEQ ID NO: 1475011 - RNA, 19 nt, Human
gaaacaaaaacacuaaaaa

SEQ ID NO: 1475012 - RNA, 23 nt, Human
gaaacaaaaacacuaaaaauaaa

SEQ ID NO: 1475013 - RNA, 23 nt, Human
cuugauguaaaaucuugucaugu

SEQ ID NO: 1475014 - RNA, 17 nt, Human
cuugaugggauucugga

SEQ ID NO: 1475015 - RNA, 18 nt, Human
cuugaugggauucuggac

SEQ ID NO: 1475016 - RNA, 19 nt, Human
cuugaugggauucuggaca

SEQ ID NO: 1475017 - RNA, 13 nt, Human
cuugauguaaaau

SEQ ID NO: 1475018 - RNA, 14 nt, Human
cuugauguaaaauc

SEQ ID NO: 1475019 - RNA, 15 nt, Human
cuugauguaaaaucu

SEQ ID NO: 1475020 - RNA, 17 nt, Human
cuugauguaaaaucuug

SEQ ID NO: 1475021 - RNA, 18 nt, Human
cuugauguaaaaucuugu

SEQ ID NO: 1475022 - RNA, 20 nt, Human
cuugauguaaaaucuuguca

SEQ ID NO: 1475023 - RNA, 21 nt, Human
cuugauguaaaaucuugucau

SEQ ID NO: 1475024 - RNA, 22 nt, Human
cuugauguaaaaucuugucaug

SEQ ID NO: 1475025 - RNA, 19 nt, Human
cuugauugguguugccagu

SEQ ID NO: 1475026 - RNA, 24 nt, Human
cuugccucugcacacccuccagag

SEQ ID NO: 1475027 - RNA, 15 nt, Human
cuugccucugcacac

SEQ ID NO: 1475028 - RNA, 14 nt, Human
cuugccucugcaca

SEQ ID NO: 1475029 - RNA, 15 nt, Human
cuuuaacuuaaauag

SEQ ID NO: 1475030 - RNA, 19 nt, Human
cuuuaacuuaauugcuaug

SEQ ID NO: 1475031 - RNA, 19 nt, Human
cuugguucuugaggggacc

SEQ ID NO: 1475032 - RNA, 22 nt, Human
cuugguucuugaggggaccagg

SEQ ID NO: 1475033 - RNA, 23 nt, Human
cuugguucuugaggggaccagga

SEQ ID NO: 1475034 - RNA, 22 nt, Human
cuucuugaaauuuuaaccuaug

SEQ ID NO: 1475035 - RNA, 15 nt, Human
cuuccucuccugucu

SEQ ID NO: 1475036 - RNA, 19 nt, Human
cuuccucuccugucucccu

SEQ ID NO: 1475037 - RNA, 17 nt, Human
cuucuauacccacccag

SEQ ID NO: 1475038 - RNA, 21 nt, Human
cuucuauucuagccugcauug

SEQ ID NO: 1475039 - RNA, 20 nt, Human
cuucuauucuagccugcauu

SEQ ID NO: 1475040 - RNA, 13 nt, Human
cuucuauucuagc

SEQ ID NO: 1475041 - RNA, 24 nt, Human
cuucuauugccucugagagcauca

SEQ ID NO: 1475042 - RNA, 22 nt, Human
cuucuauugccucugagagcau

SEQ ID NO: 1475043 - RNA, 19 nt, Human
cuucuauugccucugagag

SEQ ID NO: 1475044 - RNA, 14 nt, Human
cuucuauuggucuc

SEQ ID NO: 1475045 - RNA, 18 nt, Human
cuucuauugccucugaga

SEQ ID NO: 1475046 - RNA, 16 nt, Human
cuucuauugccucuga

SEQ ID NO: 1475047 - RNA, 14 nt, Human
cuucuauugccucu

SEQ ID NO: 1475048 - RNA, 13 nt, Human
cuucuauugccuc

SEQ ID NO: 1475049 - RNA, 18 nt, Human
cuucuauacccacccaga

SEQ ID NO: 1475050 - RNA, 15 nt, Human
cuucuauacccaccc

SEQ ID NO: 1475051 - RNA, 17 nt, Human
cuucugaacucaaacug

SEQ ID NO: 1475052 - RNA, 18 nt, Human
cuucugaacucaaacuga

SEQ ID NO: 1475053 - RNA, 22 nt, Human
cuucugaacucaaacugaggaa

SEQ ID NO: 1475054 - RNA, 23 nt, Human
cuucccaaaguccugggauuaca

SEQ ID NO: 1475055 - RNA, 12 nt, Human
cuuacaugauuc

SEQ ID NO: 1475056 - RNA, 18 nt, Human
cuuacaugcauuacugca

SEQ ID NO: 1475057 - RNA, 19 nt, Human
cuuacaugcauuacugcau

SEQ ID NO: 1475058 - RNA, 16 nt, Human
caggcacacaccacca

SEQ ID NO: 1475059 - RNA, 15 nt, Human
caggcaccaaaagaa

SEQ ID NO: 1475060 - RNA, 16 nt, Human
caggcaccaaaagaag

SEQ ID NO: 1475061 - RNA, 19 nt, Human
caggcaccaaaagaaguaa

SEQ ID NO: 1475062 - RNA, 20 nt, Human
caggcaccaggacuagggcu

SEQ ID NO: 1475063 - RNA, 13 nt, Human
caggccagagcca

SEQ ID NO: 1475064 - RNA, 15 nt, Human
cagggcucuguaagu

SEQ ID NO: 1475065 - RNA, 20 nt, Human
cagucugacuguuuccauca

SEQ ID NO: 1475066 - RNA, 17 nt, Human
cagucugagagaggcca

SEQ ID NO: 1475067 - RNA, 22 nt, Human
cagugggaggugagaccaccuc

SEQ ID NO: 1475068 - RNA, 22 nt, Human
cagugggaggguaccagcagaa

SEQ ID NO: 1475069 - RNA, 14 nt, Human
caguggggaaugaa

SEQ ID NO: 1475070 - RNA, 21 nt, Human
cagugggaggugagaccaccu

SEQ ID NO: 1475071 - RNA, 16 nt, Human
cagucaccucauggaa

SEQ ID NO: 1475072 - RNA, 19 nt, Human
cagucaccucauggaauug

SEQ ID NO: 1475073 - RNA, 15 nt, Human
caguaaagcacuugc

SEQ ID NO: 1475074 - RNA, 23 nt, Human
caguaaagaacaucccuccuggg

SEQ ID NO: 1475075 - RNA, 13 nt, Human
cagauccuggaaa

SEQ ID NO: 1475076 - RNA, 12 nt, Human
cagauccuggaa

SEQ ID NO: 1475077 - RNA, 13 nt, Human
cagauccuccuca

SEQ ID NO: 1475078 - RNA, 14 nt, Human
cagauccuccucau

SEQ ID NO: 1475079 - RNA, 16 nt, Human
cagauccuccucauuc

SEQ ID NO: 1475080 - RNA, 21 nt, Human
cagaguaauccaagcaaaugu

SEQ ID NO: 1475081 - RNA, 22 nt, Human
cagagguagucucacugcuuga

SEQ ID NO: 1475082 - RNA, 17 nt, Human
cagaggguguccugcac

SEQ ID NO: 1475083 - RNA, 13 nt, Human
cagcauaauacuu

SEQ ID NO: 1475084 - RNA, 20 nt, Human
cagcauccccuugaacucuu

SEQ ID NO: 1475085 - RNA, 19 nt, Human
cagcauccccuugaacucu

SEQ ID NO: 1475086 - RNA, 22 nt, Human
cagcugccuggaagagcagccc

SEQ ID NO: 1475087 - RNA, 11 nt, Human
cagcugugcuu

SEQ ID NO: 1475088 - RNA, 14 nt, Human
cagcugugcuuaug

SEQ ID NO: 1475089 - RNA, 13 nt, Human
cagccucuggggg

SEQ ID NO: 1475090 - RNA, 16 nt, Human
cagcccuuuugucucu

SEQ ID NO: 1475091 - RNA, 14 nt, Human
cagcccuuuugucu

SEQ ID NO: 1475092 - RNA, 20 nt, Human
caugcucuccaaaccacuuu

SEQ ID NO: 1475093 - RNA, 16 nt, Human
caugcuaucucugugu

SEQ ID NO: 1475094 - RNA, 14 nt, Human
caugcuaauuauau

SEQ ID NO: 1475095 - RNA, 12 nt, Human
caugcuccuuac

SEQ ID NO: 1475096 - RNA, 19 nt, Human
caugcugaaggcugaaaga

SEQ ID NO: 1475097 - RNA, 16 nt, Human
caugcugcuggggaag

SEQ ID NO: 1475098 - RNA, 22 nt, Human
caugcugcuggggaagacagug

SEQ ID NO: 1475099 - RNA, 17 nt, Human
caugcugcuggggaaga

SEQ ID NO: 1475100 - RNA, 21 nt, Human
caugcugcuggggaagacagu

SEQ ID NO: 1475101 - RNA, 17 nt, Human
caugcuggaaaauaaua

SEQ ID NO: 1475102 - RNA, 22 nt, Human
caugcuggaaaauaauacugcu

SEQ ID NO: 1475103 - RNA, 23 nt, Human
caugcuggaaaauaauacugcug

SEQ ID NO: 1475104 - RNA, 12 nt, Human
cauggcuaucug

SEQ ID NO: 1475105 - RNA, 14 nt, Human
cauggcuauuuuau

SEQ ID NO: 1475106 - RNA, 15 nt, Human
cauggcuauuuuaua

SEQ ID NO: 1475107 - RNA, 17 nt, Human
cauggcuauuuuauauu

SEQ ID NO: 1475108 - RNA, 14 nt, Human
caugauguuuagaa

SEQ ID NO: 1475109 - RNA, 24 nt, Human
caugauuuugaaaucaugaagaua

SEQ ID NO: 1475110 - RNA, 13 nt, Human
cauuauaaaaaga

SEQ ID NO: 1475111 - RNA, 16 nt, Human
cauuauaaccuuaauu

SEQ ID NO: 1475112 - RNA, 18 nt, Human
cauuauaaccuuaauuua

SEQ ID NO: 1475113 - RNA, 19 nt, Human
cauuauauuuauuacugua

SEQ ID NO: 1475114 - RNA, 20 nt, Human
cauguauuuggugauuacau

SEQ ID NO: 1475115 - RNA, 15 nt, Human
cauguauuuggugau

SEQ ID NO: 1475116 - RNA, 14 nt, Human
caugucaaacaaau

SEQ ID NO: 1475117 - RNA, 15 nt, Human
caugucaaacaaaua

SEQ ID NO: 1475118 - RNA, 14 nt, Human
cauguccuguaaag

SEQ ID NO: 1475119 - RNA, 15 nt, Human
cauguccuguaaagg

SEQ ID NO: 1475120 - RNA, 13 nt, Human
cauguuagccagg

SEQ ID NO: 1475121 - RNA, 16 nt, Human
cauguuagcccuuccu

SEQ ID NO: 1475122 - RNA, 19 nt, Human
caucuggaaccaucagaaa

SEQ ID NO: 1475123 - RNA, 17 nt, Human
caucuggaaccaucaga

SEQ ID NO: 1475124 - RNA, 12 nt, Human
caucuggaacca

SEQ ID NO: 1475125 - RNA, 12 nt, Human
cauccuggaaua

SEQ ID NO: 1475126 - RNA, 17 nt, Human
caucgucuucuuggcca

SEQ ID NO: 1475127 - RNA, 14 nt, Human
caucacuuguacaa

SEQ ID NO: 1475128 - RNA, 15 nt, Human
caucacuuguacaaa

SEQ ID NO: 1475129 - RNA, 19 nt, Human
cauccccuugaacucuuca

SEQ ID NO: 1475130 - RNA, 16 nt, Human
ccaccgcagaaggaag

SEQ ID NO: 1475131 - RNA, 15 nt, Human
ccaccgcagaaggaa

SEQ ID NO: 1475132 - RNA, 14 nt, Human
ccacagcugccucu

SEQ ID NO: 1475133 - RNA, 19 nt, Human
cauuuguauaaaauaauuu

SEQ ID NO: 1475134 - RNA, 20 nt, Human
cauuuguauaaaauaauuuu

SEQ ID NO: 1475135 - RNA, 16 nt, Human
cauuuguguugaagag

SEQ ID NO: 1475136 - RNA, 22 nt, Human
cauuuuuugggcagcaauuuaa

SEQ ID NO: 1475137 - RNA, 19 nt, Human
cauuuuuugggcagcaauu

SEQ ID NO: 1475138 - RNA, 18 nt, Human
cauuuuuugggcagcaau

SEQ ID NO: 1475139 - RNA, 20 nt, Human
cauuuguguugaagagguuu

SEQ ID NO: 1475140 - RNA, 16 nt, Human
ccaaaagauugcugaa

SEQ ID NO: 1475141 - RNA, 19 nt, Human
ccaaaagauugcugaaauu

SEQ ID NO: 1475142 - RNA, 22 nt, Human
ccaaaagauugcugaaauuuua

SEQ ID NO: 1475143 - RNA, 12 nt, Human
ccaaugaaauga

SEQ ID NO: 1475144 - RNA, 18 nt, Human
ccaaugcaccuaaagaaa

SEQ ID NO: 1475145 - RNA, 17 nt, Human
auugauccagaaagaaa

SEQ ID NO: 1475146 - RNA, 16 nt, Human
auugauccagaaagaa

SEQ ID NO: 1475147 - RNA, 11 nt, Human
auugagagaau

SEQ ID NO: 1475148 - RNA, 20 nt, Human
auugagaaaaauauauacua

SEQ ID NO: 1475149 - RNA, 13 nt, Human
auuccugaacagg

SEQ ID NO: 1475150 - RNA, 20 nt, Human
auucugauucgaaugacacu

SEQ ID NO: 1475151 - RNA, 21 nt, Human
auucugauucgaaugacacug

SEQ ID NO: 1475152 - RNA, 17 nt, Human
auucuugccaaauauaa

SEQ ID NO: 1475153 - RNA, 22 nt, Human
auucugauucgaaugacacugu

SEQ ID NO: 1475154 - RNA, 21 nt, Human
auuauguguguuuuaaaauga

SEQ ID NO: 1475155 - RNA, 20 nt, Human
auuauguguguuuuaaaaug

SEQ ID NO: 1475156 - RNA, 15 nt, Human
auuauguguguuuua

SEQ ID NO: 1475157 - RNA, 20 nt, Human
auucauauuuucuuucaaaa

SEQ ID NO: 1475158 - RNA, 16 nt, Human
auucauauuuucuuuc

SEQ ID NO: 1475159 - RNA, 18 nt, Human
auucauuuuaacaucuga

SEQ ID NO: 1475160 - RNA, 13 nt, Human
auucaugacuaug

SEQ ID NO: 1475161 - RNA, 21 nt, Human
auucauuuuaacaucugagaa

SEQ ID NO: 1475162 - RNA, 14 nt, Human
auucauuuucucua

SEQ ID NO: 1475163 - RNA, 16 nt, Human
auucauuuucucuaau

SEQ ID NO: 1475164 - RNA, 15 nt, Human
auucauuuucucuaa

SEQ ID NO: 1475165 - RNA, 22 nt, Human
auugauccagaaagaaaacuug

SEQ ID NO: 1475166 - RNA, 19 nt, Human
auugauccagaaagaaaac

SEQ ID NO: 1475167 - RNA, 18 nt, Human
auugauccagaaagaaaa

SEQ ID NO: 1475168 - RNA, 18 nt, Human
auugaugggauuugguca

SEQ ID NO: 1475169 - RNA, 14 nt, Human
auuguaaaacaggu

SEQ ID NO: 1475170 - RNA, 23 nt, Human
auuguaauaggcguaacuaauuu

SEQ ID NO: 1475171 - RNA, 14 nt, Human
auuguaaauauugu

SEQ ID NO: 1475172 - RNA, 15 nt, Human
auuucuaugaaauau

SEQ ID NO: 1475173 - RNA, 18 nt, Human
auuucuaugaaauauuau

SEQ ID NO: 1475174 - RNA, 14 nt, Human
auuucaucuauuuu

SEQ ID NO: 1475175 - RNA, 20 nt, Human
auuucuaugaaauauuaugu

SEQ ID NO: 1475176 - RNA, 16 nt, Human
auuucagcagcugcag

SEQ ID NO: 1475177 - RNA, 18 nt, Human
auuucagauucccagagc

SEQ ID NO: 1475178 - RNA, 13 nt, Human
auuucaucuauuu

SEQ ID NO: 1475179 - RNA, 11 nt, Human
auuucaaguuc

SEQ ID NO: 1475180 - RNA, 16 nt, Human
auuucaaguuccaagu

SEQ ID NO: 1475181 - RNA, 22 nt, Human
auuucaaguuccaaguugcuaa

SEQ ID NO: 1475182 - RNA, 23 nt, Human
auuucaaguuccaaguugcuaau

SEQ ID NO: 1475183 - RNA, 16 nt, Human
auuucagagaggccuu

SEQ ID NO: 1475184 - RNA, 22 nt, Human
auuucagagaggccuuuuggaa

SEQ ID NO: 1475185 - RNA, 18 nt, Human
auuuauauuguaaauauu

SEQ ID NO: 1475186 - RNA, 21 nt, Human
auuuauauuguaaauauugug

SEQ ID NO: 1475187 - RNA, 20 nt, Human
auuuauauuguaaauauugu

SEQ ID NO: 1475188 - RNA, 22 nt, Human
caaauccagccugcugccugcu

SEQ ID NO: 1475189 - RNA, 14 nt, Human
caacaauuuaugaa

SEQ ID NO: 1475190 - RNA, 16 nt, Human
caacaauuuaugaauu

SEQ ID NO: 1475191 - RNA, 17 nt, Human
caacaauuuaugaauug

SEQ ID NO: 1475192 - RNA, 18 nt, Human
caacaauuuaugaauuga

SEQ ID NO: 1475193 - RNA, 14 nt, Human
caaaucgaaugaaa

SEQ ID NO: 1475194 - RNA, 18 nt, Human
caaaucuaccacuguaug

SEQ ID NO: 1475195 - RNA, 14 nt, Human
caaaucuaccacug

SEQ ID NO: 1475196 - RNA, 18 nt, Human
caacaccucuuggggagu

SEQ ID NO: 1475197 - RNA, 23 nt, Human
caagaauuucuaggacugaauua

SEQ ID NO: 1475198 - RNA, 13 nt, Human
caagaagggacug

SEQ ID NO: 1475199 - RNA, 18 nt, Human
caagaagggacugagaga

SEQ ID NO: 1475200 - RNA, 16 nt, Human
caagaagggacugaga

SEQ ID NO: 1475201 - RNA, 17 nt, Human
caagaauaaucacgcuu

SEQ ID NO: 1475202 - RNA, 18 nt, Human
caagaauaaucacgcuuu

SEQ ID NO: 1475203 - RNA, 20 nt, Human
caagaauaaucacgcuuucc

SEQ ID NO: 1475204 - RNA, 16 nt, Human
caagaaggcaaaaaua

SEQ ID NO: 1475205 - RNA, 16 nt, Human
caaccccagacacugg

SEQ ID NO: 1475206 - RNA, 21 nt, Human
caacuaucucauuuccaagca

SEQ ID NO: 1475207 - RNA, 13 nt, Human
caaccauuuccuc

SEQ ID NO: 1475208 - RNA, 16 nt, Human
caaccauuuccucaga

SEQ ID NO: 1475209 - RNA, 17 nt, Human
caaccauuuccucagac

SEQ ID NO: 1475210 - RNA, 18 nt, Human
caaccauuauaaccuuaa

SEQ ID NO: 1475211 - RNA, 22 nt, Human
caaccauuauaaccuuaauuua

SEQ ID NO: 1475212 - RNA, 13 nt, Human
caaccauuccaga

SEQ ID NO: 1475213 - RNA, 14 nt, Human
caaccauuccagac

SEQ ID NO: 1475214 - RNA, 16 nt, Human
caaccauuccagacug

SEQ ID NO: 1475215 - RNA, 22 nt, Human
caaccauuccagacugcuucca

SEQ ID NO: 1475216 - RNA, 17 nt, Human
caaaccacuuuuugcag

SEQ ID NO: 1475217 - RNA, 16 nt, Human
caaaaguuacauguuu

SEQ ID NO: 1475218 - RNA, 19 nt, Human
caaaccacuuuuugcagcu

SEQ ID NO: 1475219 - RNA, 17 nt, Human
caaaccaaaucacugaa

SEQ ID NO: 1475220 - RNA, 22 nt, Human
caaaagcccauucauuccauuc

SEQ ID NO: 1475221 - RNA, 20 nt, Human
caaaagcccauucauuccau

SEQ ID NO: 1475222 - RNA, 17 nt, Human
auuuuuuuuuccuagcc

SEQ ID NO: 1475223 - RNA, 14 nt, Human
caaaaaaaaauaca

SEQ ID NO: 1475224 - RNA, 16 nt, Human
auuuuuacauucugaa

SEQ ID NO: 1475225 - RNA, 12 nt, Human
auuuuuaccagu

SEQ ID NO: 1475226 - RNA, 11 nt, Human
auuuuuaccag

SEQ ID NO: 1475227 - RNA, 17 nt, Human
auuuuuacauucugaau

SEQ ID NO: 1475228 - RNA, 17 nt, Human
auuuuauagcuacuaau

SEQ ID NO: 1475229 - RNA, 23 nt, Human
auuuuauaugcuuacugauauau

SEQ ID NO: 1475230 - RNA, 18 nt, Human
auuuuauauuacacuaca

SEQ ID NO: 1475231 - RNA, 15 nt, Human
auuuuauauuacacu

SEQ ID NO: 1475232 - RNA, 16 nt, Human
auuuucuuucuguaac

SEQ ID NO: 1475233 - RNA, 14 nt, Human
auuuucuuucaaaa

SEQ ID NO: 1475234 - RNA, 23 nt, Human
auuuucuuuguguagcuuugcuc

SEQ ID NO: 1475235 - RNA, 24 nt, Human
auuuugacauaaaguugauaaaga

SEQ ID NO: 1475236 - RNA, 17 nt, Human
auuuugacauaaaguug

SEQ ID NO: 1475237 - RNA, 22 nt, Human
auuuugagaaagucuuauuuau

SEQ ID NO: 1475238 - RNA, 20 nt, Human
cacugaacuuugcugagccu

SEQ ID NO: 1475239 - RNA, 11 nt, Human
cacugaagaag

SEQ ID NO: 1475240 - RNA, 17 nt, Human
cacucuugaaaaaugca

SEQ ID NO: 1475241 - RNA, 23 nt, Human
cacuagcccaaugaaaugaauua

SEQ ID NO: 1475242 - RNA, 13 nt, Human
cacggcagccaca

SEQ ID NO: 1475243 - RNA, 12 nt, Human
cacuacacccag

SEQ ID NO: 1475244 - RNA, 13 nt, Human
cacuacaaccucc

SEQ ID NO: 1475245 - RNA, 14 nt, Human
cacuacaaccuccg

SEQ ID NO: 1475246 - RNA, 22 nt, Human
cacuaauucauuaaucugccuc

SEQ ID NO: 1475247 - RNA, 20 nt, Human
cacggcagccacagcuuggg

SEQ ID NO: 1475248 - RNA, 23 nt, Human
cacuacgccuggcugauuuuugu

SEQ ID NO: 1475249 - RNA, 18 nt, Human
cacuacacccagcaauag

SEQ ID NO: 1475250 - RNA, 17 nt, Human
cacuacacccagcaaua

SEQ ID NO: 1475251 - RNA, 16 nt, Human
cacuacacccagcaau

SEQ ID NO: 1475252 - RNA, 15 nt, Human
cacuacacccagcaa

SEQ ID NO: 1475253 - RNA, 14 nt, Human
cacuacacccagca

SEQ ID NO: 1475254 - RNA, 19 nt, Human
caccuaugucauuucauuu

SEQ ID NO: 1475255 - RNA, 20 nt, Human
caccuaugucauuucauuuc

SEQ ID NO: 1475256 - RNA, 23 nt, Human
caccuaugucauuucauuuccua

SEQ ID NO: 1475257 - RNA, 12 nt, Human
caccuaaagaaa

SEQ ID NO: 1475258 - RNA, 13 nt, Human
caccuaaagaaaa

SEQ ID NO: 1475259 - RNA, 17 nt, Human
caccuaaagaaaaacaa

SEQ ID NO: 1475260 - RNA, 14 nt, Human
caccguucauucag

SEQ ID NO: 1475261 - RNA, 14 nt, Human
caccuuuaaagugu

SEQ ID NO: 1475262 - RNA, 23 nt, Human
caccuugugcuggggacaggucc

SEQ ID NO: 1475263 - RNA, 16 nt, Human
cagaaguuugcacuau

SEQ ID NO: 1475264 - RNA, 18 nt, Human
cagaaguuugcacuaucu

SEQ ID NO: 1475265 - RNA, 22 nt, Human
cagaaguuugcacuaucuuuca

SEQ ID NO: 1475266 - RNA, 20 nt, Human
cacuguuuagaacacacaca

SEQ ID NO: 1475267 - RNA, 11 nt, Human
cacuguuuaag

SEQ ID NO: 1475268 - RNA, 21 nt, Human
cacuuacuuuuucuggucucu

SEQ ID NO: 1475269 - RNA, 12 nt, Human
cacuuguacaaa

SEQ ID NO: 1475270 - RNA, 17 nt, Human
cacuuguacaaaauaaa

SEQ ID NO: 1475271 - RNA, 13 nt, Human
cacuggggcaggg

SEQ ID NO: 1475272 - RNA, 15 nt, Human
cacuggggcaggggc

SEQ ID NO: 1475273 - RNA, 21 nt, Human
cacagggccuuuggcaggugc

SEQ ID NO: 1475274 - RNA, 20 nt, Human
cacagggagugcacauaucc

SEQ ID NO: 1475275 - RNA, 12 nt, Human
cacagcuaugaa

SEQ ID NO: 1475276 - RNA, 22 nt, Human
cacagcuaugaaggcuguacac

SEQ ID NO: 1475277 - RNA, 19 nt, Human
cacagacagggucaaagug

SEQ ID NO: 1475278 - RNA, 19 nt, Human
cacagaagugcuuucuucu

SEQ ID NO: 1475279 - RNA, 19 nt, Human
cacaucgcagauucucccu

SEQ ID NO: 1475280 - RNA, 18 nt, Human
cacauuuuccuuuucaaa

SEQ ID NO: 1475281 - RNA, 15 nt, Human
cacauuuuaaaagug

SEQ ID NO: 1475282 - RNA, 14 nt, Human
caccaggcagccuc

SEQ ID NO: 1475283 - RNA, 15 nt, Human
caccaggcagccucu

SEQ ID NO: 1475284 - RNA, 18 nt, Human
caccaggcagccucuggg

SEQ ID NO: 1475285 - RNA, 13 nt, Human
caauaaaaauguu

SEQ ID NO: 1475286 - RNA, 14 nt, Human
caaguauuagaaua

SEQ ID NO: 1475287 - RNA, 16 nt, Human
caaguagaaucucagu

SEQ ID NO: 1475288 - RNA, 24 nt, Human
caaguacaaccacacccacacuca

SEQ ID NO: 1475289 - RNA, 19 nt, Human
caaguacaaccacacccac

SEQ ID NO: 1475290 - RNA, 13 nt, Human
caaguagaaucuc

SEQ ID NO: 1475291 - RNA, 23 nt, Human
caaguagaaucucaguugauuuu

SEQ ID NO: 1475292 - RNA, 20 nt, Human
caaguauuagaauaccacag

SEQ ID NO: 1475293 - RNA, 15 nt, Human
caaguugcuaauaca

SEQ ID NO: 1475294 - RNA, 18 nt, Human
caaguugugcuugagcca

SEQ ID NO: 1475295 - RNA, 21 nt, Human
caaguuguuccuuaagucaga

SEQ ID NO: 1475296 - RNA, 22 nt, Human
caaguuguuccuuaagucagaa

SEQ ID NO: 1475297 - RNA, 16 nt, Human
cacaagacugcacauc

SEQ ID NO: 1475298 - RNA, 18 nt, Human
cacaagacugcacaucaa

SEQ ID NO: 1475299 - RNA, 12 nt, Human
caauauuucaga

SEQ ID NO: 1475300 - RNA, 20 nt, Human
caauauuucagauaaucaca

SEQ ID NO: 1475301 - RNA, 21 nt, Human
caauauuucagauaaucacaa

SEQ ID NO: 1475302 - RNA, 14 nt, Human
caaugcuguauuuu

SEQ ID NO: 1475303 - RNA, 23 nt, Human
caaugcuguauuuuaaaagaaug

SEQ ID NO: 1475304 - RNA, 17 nt, Human
caauucuucccuaucuu

SEQ ID NO: 1475305 - RNA, 20 nt, Human
caauucuucccuaucuuugc

SEQ ID NO: 1475306 - RNA, 12 nt, Human
ccaucccugcgu

SEQ ID NO: 1475307 - RNA, 13 nt, Human
ccaucccuggccc

SEQ ID NO: 1475308 - RNA, 16 nt, Human
ccaucccuggcccccu

SEQ ID NO: 1475309 - RNA, 19 nt, Human
ccaucccuggcccccuccc

SEQ ID NO: 1475310 - RNA, 23 nt, Human
ccaucccuggcccccucccugga

SEQ ID NO: 1475311 - RNA, 22 nt, Human
ccaucccuggcccccucccugg

SEQ ID NO: 1475312 - RNA, 17 nt, Human
ccauccuacccccugug

SEQ ID NO: 1475313 - RNA, 13 nt, Human
ccauacauuugug

SEQ ID NO: 1475314 - RNA, 14 nt, Human
ccauacauuugugu

SEQ ID NO: 1475315 - RNA, 11 nt, Human
ccauugaaggc

SEQ ID NO: 1475316 - RNA, 12 nt, Human
ccauugaaggcu

SEQ ID NO: 1475317 - RNA, 17 nt, Human
ccauugaaggcuuaaac

SEQ ID NO: 1475318 - RNA, 21 nt, Human
ccauugaaggcuuaaacccau

SEQ ID NO: 1475319 - RNA, 19 nt, Human
ccauuuaaauuuuuuuccu

SEQ ID NO: 1475320 - RNA, 16 nt, Human
ccauuuagguuucuga

SEQ ID NO: 1475321 - RNA, 21 nt, Human
ccauuuagguuucugaguucc

SEQ ID NO: 1475322 - RNA, 15 nt, Human
ccagggggcaagagg

SEQ ID NO: 1475323 - RNA, 19 nt, Human
ccaggaguggguggggagu

SEQ ID NO: 1475324 - RNA, 17 nt, Human
ccaggauggcgcaggaa

SEQ ID NO: 1475325 - RNA, 16 nt, Human
ccaggauggcgcagga

SEQ ID NO: 1475326 - RNA, 18 nt, Human
ccaggaggugccacugga

SEQ ID NO: 1475327 - RNA, 21 nt, Human
ccaggaggugccacuggagug

SEQ ID NO: 1475328 - RNA, 19 nt, Human
ccaggaggugccacuggag

SEQ ID NO: 1475329 - RNA, 15 nt, Human
ccagcuaauuuuugu

SEQ ID NO: 1475330 - RNA, 22 nt, Human
cccagcugugcuuaugguacca

SEQ ID NO: 1475331 - RNA, 15 nt, Human
cccaggaacugggcc

SEQ ID NO: 1475332 - RNA, 18 nt, Human
cccagcacuuguguuguc

SEQ ID NO: 1475333 - RNA, 12 nt, Human
cccauuucagcu

SEQ ID NO: 1475334 - RNA, 13 nt, Human
cccauuucagcug

SEQ ID NO: 1475335 - RNA, 13 nt, Human
cccagggcucugu

SEQ ID NO: 1475336 - RNA, 16 nt, Human
cccagggcucuguaag

SEQ ID NO: 1475337 - RNA, 14 nt, Human
cccucacacuggga

SEQ ID NO: 1475338 - RNA, 13 nt, Human
cccucacacuggg

SEQ ID NO: 1475339 - RNA, 12 nt, Human
cccucacacugg

SEQ ID NO: 1475340 - RNA, 10 nt, Human
cccucacacu

SEQ ID NO: 1475341 - RNA, 21 nt, Human
cccuaucuuugccacccucau

SEQ ID NO: 1475342 - RNA, 19 nt, Human
cccuaucuuugccacccuc

SEQ ID NO: 1475343 - RNA, 16 nt, Human
cccuaucuuugccacc

SEQ ID NO: 1475344 - RNA, 14 nt, Human
cccuaucuuugcca

SEQ ID NO: 1475345 - RNA, 18 nt, Human
ccccuucuccccugcacu

SEQ ID NO: 1475346 - RNA, 18 nt, Human
ccccuugacaacuggcag

SEQ ID NO: 1475347 - RNA, 23 nt, Human
ccccuugacaacuggcaggcagg

SEQ ID NO: 1475348 - RNA, 12 nt, Human
ccccuucucccc

SEQ ID NO: 1475349 - RNA, 19 nt, Human
ccccuucuccccugcacug

SEQ ID NO: 1475350 - RNA, 11 nt, Human
ccccugcacug

SEQ ID NO: 1475351 - RNA, 18 nt, Human
ccccugcacuguaaaaug

SEQ ID NO: 1475352 - RNA, 14 nt, Human
ccccugcacuguaa

SEQ ID NO: 1475353 - RNA, 16 nt, Human
ccccugcacuguaaaa

SEQ ID NO: 1475354 - RNA, 17 nt, Human
ccccugcacuguaaaau

SEQ ID NO: 1475355 - RNA, 23 nt, Human
ccucauggaauuggagcucgugg

SEQ ID NO: 1475356 - RNA, 20 nt, Human
ccucaaaaagauuuccccau

SEQ ID NO: 1475357 - RNA, 21 nt, Human
ccucaaagcaagcauucagaa

SEQ ID NO: 1475358 - RNA, 18 nt, Human
ccucccauguucaagcga

SEQ ID NO: 1475359 - RNA, 18 nt, Human
ccuccaacccuagcaaaa

SEQ ID NO: 1475360 - RNA, 19 nt, Human
ccuccaaagcuucccacgg

SEQ ID NO: 1475361 - RNA, 19 nt, Human
ccuccaacccuagcaaaag

SEQ ID NO: 1475362 - RNA, 14 nt, Human
ccggccugccagga

SEQ ID NO: 1475363 - RNA, 15 nt, Human
ccggccugccaggag

SEQ ID NO: 1475364 - RNA, 18 nt, Human
ccggccugccaggaggac

SEQ ID NO: 1475365 - RNA, 16 nt, Human
ccggccugccaggagg

SEQ ID NO: 1475366 - RNA, 22 nt, Human
ccugucugucugucugucccaa

SEQ ID NO: 1475367 - RNA, 21 nt, Human
ccugucugucugucuguccca

SEQ ID NO: 1475368 - RNA, 20 nt, Human
ccugucugucugucuguccc

SEQ ID NO: 1475369 - RNA, 22 nt, Human
ccugucgauuagacuggacagc

SEQ ID NO: 1475370 - RNA, 13 nt, Human
ccugggccuuggg

SEQ ID NO: 1475371 - RNA, 16 nt, Human
ccugucgauuagacug

SEQ ID NO: 1475372 - RNA, 16 nt, Human
ccugccucccuucaug

SEQ ID NO: 1475373 - RNA, 11 nt, Human
ccugccuccug

SEQ ID NO: 1475374 - RNA, 16 nt, Human
ccugccuccccugccu

SEQ ID NO: 1475375 - RNA, 16 nt, Human
ccugagucccaucccu

SEQ ID NO: 1475376 - RNA, 19 nt, Human
ccugagucguacagaaagc

SEQ ID NO: 1475377 - RNA, 21 nt, Human
ccugagucguacagaaagcug

SEQ ID NO: 1475378 - RNA, 22 nt, Human
ccugagucguacagaaagcugc

SEQ ID NO: 1475379 - RNA, 11 nt, Human
ccugaguccca

SEQ ID NO: 1475380 - RNA, 23 nt, Human
ccugagucacccuaccugugccu

SEQ ID NO: 1475381 - RNA, 14 nt, Human
cuaauucuaaugug

SEQ ID NO: 1475382 - RNA, 13 nt, Human
cuaauuuauaaaa

SEQ ID NO: 1475383 - RNA, 14 nt, Human
cuaauuuauaaaaa

SEQ ID NO: 1475384 - RNA, 17 nt, Human
cuaaguguuucauaaau

SEQ ID NO: 1475385 - RNA, 15 nt, Human
cuaaguuaauuuaaa

SEQ ID NO: 1475386 - RNA, 17 nt, Human
cuaaguuaauuuaaagu

SEQ ID NO: 1475387 - RNA, 21 nt, Human
cuaaguuaauuuaaaguuguu

SEQ ID NO: 1475388 - RNA, 23 nt, Human
cgugugggagaccggccugccag

SEQ ID NO: 1475389 - RNA, 21 nt, Human
cuaccuguugagcaucacaga

SEQ ID NO: 1475390 - RNA, 12 nt, Human
cuaccugugccu

SEQ ID NO: 1475391 - RNA, 13 nt, Human
cuaccugugccug

SEQ ID NO: 1475392 - RNA, 22 nt, Human
cuaccuguugagcaucacagaa

SEQ ID NO: 1475393 - RNA, 14 nt, Human
cuacguauuuaaua

SEQ ID NO: 1475394 - RNA, 14 nt, Human
cuacaugaaacaga

SEQ ID NO: 1475395 - RNA, 10 nt, Human
cuacaugaaa

SEQ ID NO: 1475396 - RNA, 13 nt, Human
cuacaugaaacag

SEQ ID NO: 1475397 - RNA, 22 nt, Human
cuacaugaucuagagccaguua

SEQ ID NO: 1475398 - RNA, 19 nt, Human
cuaccugcucagcccugca

SEQ ID NO: 1475399 - RNA, 16 nt, Human
cuaccuggucucuccu

SEQ ID NO: 1475400 - RNA, 17 nt, Human
cuaauuuauaaaaaggu

SEQ ID NO: 1475401 - RNA, 21 nt, Human
cuaauuuauccugaaauuuca

SEQ ID NO: 1475402 - RNA, 23 nt, Human
cuaauuuauccugaaauuucaga

SEQ ID NO: 1475403 - RNA, 23 nt, Human
cuagaauuugauaugugaacagu

SEQ ID NO: 1475404 - RNA, 14 nt, Human
cuagaauuucuuua

SEQ ID NO: 1475405 - RNA, 13 nt, Human
cuagacaagccag

SEQ ID NO: 1475406 - RNA, 14 nt, Human
cuagacaagccaga

SEQ ID NO: 1475407 - RNA, 16 nt, Human
cuagacaagccagaac

SEQ ID NO: 1475408 - RNA, 17 nt, Human
cuagacaagccagaacu

SEQ ID NO: 1475409 - RNA, 18 nt, Human
cuaucguaaaauuaagaa

SEQ ID NO: 1475410 - RNA, 17 nt, Human
cuaucguaaaauuaaga

SEQ ID NO: 1475411 - RNA, 18 nt, Human
cuaguuuucuccucccag

SEQ ID NO: 1475412 - RNA, 19 nt, Human
cuaguuuucuccucccagg

SEQ ID NO: 1475413 - RNA, 16 nt, Human
cuaguuuucuccuccc

SEQ ID NO: 1475414 - RNA, 17 nt, Human
cuaguuuucuccuccca

SEQ ID NO: 1475415 - RNA, 22 nt, Human
cucaaaccaaaucacugaacuu

SEQ ID NO: 1475416 - RNA, 19 nt, Human
cucaaaccaaaucacugaa

SEQ ID NO: 1475417 - RNA, 18 nt, Human
cucaaaccaaaucacuga

SEQ ID NO: 1475418 - RNA, 13 nt, Human
cucaaaauauuug

SEQ ID NO: 1475419 - RNA, 18 nt, Human
cucaaaauauuuguacau

SEQ ID NO: 1475420 - RNA, 19 nt, Human
cucaauauucaauaaagcu

SEQ ID NO: 1475421 - RNA, 18 nt, Human
cucaauauucaauaaagc

SEQ ID NO: 1475422 - RNA, 17 nt, Human
cucaauauucaauaaag

SEQ ID NO: 1475423 - RNA, 16 nt, Human
cucaauauucaauaaa

SEQ ID NO: 1475424 - RNA, 19 nt, Human
cucaaacuccugaccucag

SEQ ID NO: 1475425 - RNA, 14 nt, Human
cucaaacuccugac

SEQ ID NO: 1475426 - RNA, 19 nt, Human
cucaauucuucccuaucuu

SEQ ID NO: 1475427 - RNA, 14 nt, Human
cucaauucuucccu

SEQ ID NO: 1475428 - RNA, 16 nt, Human
cucaauuucugaacac

SEQ ID NO: 1475429 - RNA, 22 nt, Human
cucacaaaccaugcaaaugcua

SEQ ID NO: 1475430 - RNA, 18 nt, Human
ccuuuuuauuugcaugug

SEQ ID NO: 1475431 - RNA, 17 nt, Human
ccuuuuuauuugcaugu

SEQ ID NO: 1475432 - RNA, 17 nt, Human
cgacugaaaauauuguu

SEQ ID NO: 1475433 - RNA, 18 nt, Human
cgacugaaaauauuguuu

SEQ ID NO: 1475434 - RNA, 18 nt, Human
ccuugcuuaugacaucac

SEQ ID NO: 1475435 - RNA, 17 nt, Human
cgccuccaacccuagca

SEQ ID NO: 1475436 - RNA, 16 nt, Human
cgccuccaacccuagc

SEQ ID NO: 1475437 - RNA, 23 nt, Human
cggaggaaggaggacccaggaca

SEQ ID NO: 1475438 - RNA, 21 nt, Human
cggaggaaggaggacccagga

SEQ ID NO: 1475439 - RNA, 20 nt, Human
cggaggaaggaggacccagg

SEQ ID NO: 1475440 - RNA, 19 nt, Human
cggaggaaggaggacccag

SEQ ID NO: 1475441 - RNA, 13 nt, Human
cggggaaggauuu

SEQ ID NO: 1475442 - RNA, 15 nt, Human
cgugaucucagcuca

SEQ ID NO: 1475443 - RNA, 14 nt, Human
cgugaucucagcuc

SEQ ID NO: 1475444 - RNA, 24 nt, Human
cgugauccacccgccucagccucc

SEQ ID NO: 1475445 - RNA, 17 nt, Human
cgugauccacccgccuc

SEQ ID NO: 1475446 - RNA, 13 nt, Human
cgugauccacccg

SEQ ID NO: 1475447 - RNA, 18 nt, Human
cguggugcgagugcguga

SEQ ID NO: 1475448 - RNA, 13 nt, Human
cgugguggucccu

SEQ ID NO: 1475449 - RNA, 15 nt, Human
cgugguggucccugg

SEQ ID NO: 1475450 - RNA, 17 nt, Human
cgugguggucccugggu

SEQ ID NO: 1475451 - RNA, 14 nt, Human
cguaaaauuaagaa

SEQ ID NO: 1475452 - RNA, 16 nt, Human
cguaaaaaugauuuca

SEQ ID NO: 1475453 - RNA, 21 nt, Human
cugagauaugaacauauuguu

SEQ ID NO: 1475454 - RNA, 23 nt, Human
cugagauaugaacauauuguuga

SEQ ID NO: 1475455 - RNA, 15 nt, Human
cugagucaaguuguu

SEQ ID NO: 1475456 - RNA, 16 nt, Human
cugagucaaguuguuc

SEQ ID NO: 1475457 - RNA, 18 nt, Human
cugagacuaaucuuauuc

SEQ ID NO: 1475458 - RNA, 22 nt, Human
cugagaccaaggcuuucucuac

SEQ ID NO: 1475459 - RNA, 21 nt, Human
cugagaccaaggcuuucucua

SEQ ID NO: 1475460 - RNA, 13 nt, Human
cugagagaggcca

SEQ ID NO: 1475461 - RNA, 14 nt, Human
cugagagaaaauaa

SEQ ID NO: 1475462 - RNA, 14 nt, Human
cugagagaggccau

SEQ ID NO: 1475463 - RNA, 21 nt, Human
cugagagaggccauucuuucc

SEQ ID NO: 1475464 - RNA, 22 nt, Human
cugagagaggccauucuuuccc

SEQ ID NO: 1475465 - RNA, 19 nt, Human
cugagagaugcagaaauau

SEQ ID NO: 1475466 - RNA, 22 nt, Human
cugagagcaucaggccuagagg

SEQ ID NO: 1475467 - RNA, 17 nt, Human
cugagauacauacagaa

SEQ ID NO: 1475468 - RNA, 19 nt, Human
cugagauacauacagaauu

SEQ ID NO: 1475469 - RNA, 12 nt, Human
cugagauaugaa

SEQ ID NO: 1475470 - RNA, 15 nt, Human
cugagauaugaacau

SEQ ID NO: 1475471 - RNA, 16 nt, Human
cugagauaugaacaua

SEQ ID NO: 1475472 - RNA, 22 nt, Human
cugacaacauuucuauagccaa

SEQ ID NO: 1475473 - RNA, 14 nt, Human
cugacaacauuucu

SEQ ID NO: 1475474 - RNA, 21 nt, Human
cucuugaugccuggcggggug

SEQ ID NO: 1475475 - RNA, 16 nt, Human
cucuugaugccuggcg

SEQ ID NO: 1475476 - RNA, 15 nt, Human
cucuugaugccuggc

SEQ ID NO: 1475477 - RNA, 13 nt, Human
cucuugaugccug

SEQ ID NO: 1475478 - RNA, 22 nt, Human
cucuuuuccuuugguccuucaa

SEQ ID NO: 1475479 - RNA, 21 nt, Human
cucuuuuuccaacuuggcugc

SEQ ID NO: 1475480 - RNA, 12 nt, Human
cucuuuuuccaa

SEQ ID NO: 1475481 - RNA, 22 nt, Human
cugaaaauugaugggauuuggu

SEQ ID NO: 1475482 - RNA, 19 nt, Human
cugaaacucauagacacug

SEQ ID NO: 1475483 - RNA, 22 nt, Human
cugaagcuaucguaaaauuaag

SEQ ID NO: 1475484 - RNA, 21 nt, Human
cugaagcuaucguaaaauuaa

SEQ ID NO: 1475485 - RNA, 15 nt, Human
cugaaagacaauaua

SEQ ID NO: 1475486 - RNA, 13 nt, Human
cugaagcccuugu

SEQ ID NO: 1475487 - RNA, 22 nt, Human
cugaauuuuuaaacaaguauuu

SEQ ID NO: 1475488 - RNA, 21 nt, Human
cugaauuuuuaaacaaguauu

SEQ ID NO: 1475489 - RNA, 22 nt, Human
cucuuagaugcaguucugaaga

SEQ ID NO: 1475490 - RNA, 18 nt, Human
cucuucacucuucaaaug

SEQ ID NO: 1475491 - RNA, 15 nt, Human
cucuucaaaugccug

SEQ ID NO: 1475492 - RNA, 22 nt, Human
cucuuauugccucacuucaggu

SEQ ID NO: 1475493 - RNA, 17 nt, Human
cucuuauugccucacuu

SEQ ID NO: 1475494 - RNA, 20 nt, Human
cucuuauugccucacuucag

SEQ ID NO: 1475495 - RNA, 14 nt, Human
cucuuauugccuca

SEQ ID NO: 1475496 - RNA, 17 nt, Human
cucugcaggucccuaau

SEQ ID NO: 1475497 - RNA, 16 nt, Human
cucugcaggucccuaa

SEQ ID NO: 1475498 - RNA, 15 nt, Human
cucugcaggucccua

SEQ ID NO: 1475499 - RNA, 14 nt, Human
cucugcaggucccu

SEQ ID NO: 1475500 - RNA, 18 nt, Human
cucugcaggucccuaaua

SEQ ID NO: 1475501 - RNA, 21 nt, Human
cucuccccuggaacugucucu

SEQ ID NO: 1475502 - RNA, 20 nt, Human
cucugucacuccucaugccu

SEQ ID NO: 1475503 - RNA, 15 nt, Human
cucugguaaccucuu

SEQ ID NO: 1475504 - RNA, 16 nt, Human
cucugggggguggcca

SEQ ID NO: 1475505 - RNA, 19 nt, Human
cucugggggguggccaggc

SEQ ID NO: 1475506 - RNA, 21 nt, Human
cucugggggguggccaggccg

SEQ ID NO: 1475507 - RNA, 20 nt, Human
cucugggggguggccaggcc

SEQ ID NO: 1475508 - RNA, 13 nt, Human
cuccaagaauuuc

SEQ ID NO: 1475509 - RNA, 18 nt, Human
cucaugugacucuuucca

SEQ ID NO: 1475510 - RNA, 14 nt, Human
cuccaagaauuucu

SEQ ID NO: 1475511 - RNA, 14 nt, Human
cuccaagagcuaca

SEQ ID NO: 1475512 - RNA, 20 nt, Human
cuccaagagcuacauaauuu

SEQ ID NO: 1475513 - RNA, 13 nt, Human
cucaguaauuuag

SEQ ID NO: 1475514 - RNA, 18 nt, Human
cucaguaauuuagaaauc

SEQ ID NO: 1475515 - RNA, 19 nt, Human
cucaguaauuuagaaauca

SEQ ID NO: 1475516 - RNA, 22 nt, Human
cucaguaauuuagaaaucauuu

SEQ ID NO: 1475517 - RNA, 13 nt, Human
cucaguaauuugu

SEQ ID NO: 1475518 - RNA, 16 nt, Human
cucaguaaagcacuug

SEQ ID NO: 1475519 - RNA, 12 nt, Human
cucaucugucac

SEQ ID NO: 1475520 - RNA, 14 nt, Human
cucaucugucacca

SEQ ID NO: 1475521 - RNA, 16 nt, Human
cucaugcauuguccuc

SEQ ID NO: 1475522 - RNA, 18 nt, Human
cucuauaccaauaaagug

SEQ ID NO: 1475523 - RNA, 19 nt, Human
cucuauaccaauaaaguga

SEQ ID NO: 1475524 - RNA, 21 nt, Human
cucuauauaccaaagcacauu

SEQ ID NO: 1475525 - RNA, 21 nt, Human
cucucaauauucaauaaagcu

SEQ ID NO: 1475526 - RNA, 23 nt, Human
cucucaccauuuggauccugugu

SEQ ID NO: 1475527 - RNA, 16 nt, Human
cucucaccauuuggau

SEQ ID NO: 1475528 - RNA, 14 nt, Human
cucguguguuucua

SEQ ID NO: 1475529 - RNA, 14 nt, Human
cucguuaauuugua

SEQ ID NO: 1475530 - RNA, 15 nt, Human
cucgugucuggcaca

SEQ ID NO: 1475531 - RNA, 19 nt, Human
cuccuggguucaagcgauu

SEQ ID NO: 1475532 - RNA, 18 nt, Human
cuccuggcugucugaggc

SEQ ID NO: 1475533 - RNA, 19 nt, Human
cuccuggcugucugaggcu

SEQ ID NO: 1475534 - RNA, 17 nt, Human
cuccuaaaguacuggga

SEQ ID NO: 1475535 - RNA, 22 nt, Human
auugguguugccaguuguccuc

SEQ ID NO: 1475536 - RNA, 21 nt, Human
auugguguugccaguuguccu

SEQ ID NO: 1475537 - RNA, 16 nt, Human
auugguguugccaguu

SEQ ID NO: 1475538 - RNA, 13 nt, Human
auugguguugcca

SEQ ID NO: 1475539 - RNA, 13 nt, Human
auuguauucagag

SEQ ID NO: 1475540 - RNA, 18 nt, Human
auugugauucugccuuug

SEQ ID NO: 1475541 - RNA, 17 nt, Human
auugugucagacuguuu

SEQ ID NO: 1475542 - RNA, 17 nt, Human
auugugucccauucccc

SEQ ID NO: 1475543 - RNA, 20 nt, Human
auugugcaguacuuugugca

SEQ ID NO: 1475544 - RNA, 20 nt, Human
auugugcaauguaaauauuu

SEQ ID NO: 1475545 - RNA, 15 nt, Human
auugugcaauguaaa

SEQ ID NO: 1475546 - RNA, 17 nt, Human
auugugcaauguaaaua

SEQ ID NO: 1475547 - RNA, 18 nt, Human
auugugcaauguaaauau

SEQ ID NO: 1475548 - RNA, 14 nt, Human
auuuaaaacagaca

SEQ ID NO: 1475549 - RNA, 24 nt, Human
auucugucucuggauuauauuaug

SEQ ID NO: 1475550 - RNA, 14 nt, Human
auucugucuugaag

SEQ ID NO: 1475551 - RNA, 22 nt, Human
auucuggacaggauguguuugc

SEQ ID NO: 1475552 - RNA, 15 nt, Human
auucuggacaggaug

SEQ ID NO: 1475553 - RNA, 17 nt, Human
auucuuauuucaugaaa

SEQ ID NO: 1475554 - RNA, 15 nt, Human
auuggguaucaccac

SEQ ID NO: 1475555 - RNA, 14 nt, Human
auuugaaccaauaa

SEQ ID NO: 1475556 - RNA, 20 nt, Human
auuugaacuuuuuauugauu

SEQ ID NO: 1475557 - RNA, 14 nt, Human
auuugaaauauuga

SEQ ID NO: 1475558 - RNA, 21 nt, Human
auuucuuuuuuaaaugaagaa

SEQ ID NO: 1475559 - RNA, 23 nt, Human
auuucuuuuugggagagacuugu

SEQ ID NO: 1475560 - RNA, 20 nt, Human
auuucuuuuugggagagacu

SEQ ID NO: 1475561 - RNA, 21 nt, Human
auuucuuuuugggagagacuu

SEQ ID NO: 1475562 - RNA, 18 nt, Human
auuucuuuuuuaaaugaa

SEQ ID NO: 1475563 - RNA, 22 nt, Human
auuucuuuuuuaaaugaagaaa

SEQ ID NO: 1475564 - RNA, 17 nt, Human
auuucuaccauuucaga

SEQ ID NO: 1475565 - RNA, 18 nt, Human
auuucuaccauuucagag

SEQ ID NO: 1475566 - RNA, 16 nt, Human
auuucuagcuuaucua

SEQ ID NO: 1475567 - RNA, 18 nt, Human
auuucuagcuuaucuacu

SEQ ID NO: 1475568 - RNA, 21 nt, Human
auuucuagcuuaucuacuucc

SEQ ID NO: 1475569 - RNA, 19 nt, Human
auuuauuuuaauaauguuu

SEQ ID NO: 1475570 - RNA, 20 nt, Human
auuuauuuuaauaauguuuc

SEQ ID NO: 1475571 - RNA, 22 nt, Human
auuuccauauaaauauuagaaa

SEQ ID NO: 1475572 - RNA, 17 nt, Human
auuuauucauauuuucu

SEQ ID NO: 1475573 - RNA, 23 nt, Human
auuuauaaaaauaaaaaacacug

SEQ ID NO: 1475574 - RNA, 12 nt, Human
auuuauuaauau

SEQ ID NO: 1475575 - RNA, 20 nt, Human
auuuauuaauauauauuauc

SEQ ID NO: 1475576 - RNA, 22 nt, Human
auuuauaaaaauaaaaaacacu

SEQ ID NO: 1475577 - RNA, 17 nt, Human
auuuauaaaaauaaaaa

SEQ ID NO: 1475578 - RNA, 16 nt, Human
auuuauaaaaaggugu

SEQ ID NO: 1475579 - RNA, 13 nt, Human
auuuagauguaua

SEQ ID NO: 1475580 - RNA, 17 nt, Human
auuuagaaaacuuuaaa

SEQ ID NO: 1475581 - RNA, 14 nt, Human
auuuagauuugugu

SEQ ID NO: 1475582 - RNA, 13 nt, Human
auuuaguguucau

SEQ ID NO: 1475583 - RNA, 21 nt, Human
auuuagugaucaaauugugca

SEQ ID NO: 1475584 - RNA, 20 nt, Human
auuuaguaucuuuuuauuca

SEQ ID NO: 1475585 - RNA, 18 nt, Human
auuuaguauuuuguuuca

SEQ ID NO: 1475586 - RNA, 23 nt, Human
auuuaaauguuaugacuauguaa

SEQ ID NO: 1475587 - RNA, 17 nt, Human
auuuaaauuuuuuuccu

SEQ ID NO: 1475588 - RNA, 13 nt, Human
auuuaacaagauc

SEQ ID NO: 1475589 - RNA, 13 nt, Human
auuuaaaaaacua

SEQ ID NO: 1475590 - RNA, 17 nt, Human
auuuaaaaaacuaaaaa

SEQ ID NO: 1475591 - RNA, 22 nt, Human
auuuaaaaaacuaaaaacuaga

SEQ ID NO: 1475592 - RNA, 18 nt, Human
auuuagaaaacuuuaaag

SEQ ID NO: 1475593 - RNA, 21 nt, Human
auuuuauuuuuuucugaauua

SEQ ID NO: 1475594 - RNA, 13 nt, Human
auuuuagcagaga

SEQ ID NO: 1475595 - RNA, 17 nt, Human
auuuuagccuucucugu

SEQ ID NO: 1475596 - RNA, 18 nt, Human
auuuuagccuucucuguu

SEQ ID NO: 1475597 - RNA, 21 nt, Human
auuuuagccuucucuguucau

SEQ ID NO: 1475598 - RNA, 22 nt, Human
auuuucaaagcuuuuuccagag

SEQ ID NO: 1475599 - RNA, 13 nt, Human
auuuucaagaaac

SEQ ID NO: 1475600 - RNA, 14 nt, Human
auuuucaagaaacu

SEQ ID NO: 1475601 - RNA, 16 nt, Human
auuuucaagaaacuga

SEQ ID NO: 1475602 - RNA, 17 nt, Human
auuuucaagaaacugag

SEQ ID NO: 1475603 - RNA, 22 nt, Human
auuuucaagaaacugaggaauu

SEQ ID NO: 1475604 - RNA, 23 nt, Human
auuuucaagaaacugaggaauuu

SEQ ID NO: 1475605 - RNA, 24 nt, Human
auuuucaagaauaaucacgcuuuc

SEQ ID NO: 1475606 - RNA, 13 nt, Human
auuuucacuguag

SEQ ID NO: 1475607 - RNA, 15 nt, Human
auuuucauuauuccu

SEQ ID NO: 1475608 - RNA, 22 nt, Human
auuuucaguuauuauauuuaca

SEQ ID NO: 1475609 - RNA, 17 nt, Human
auuuucagcaaacucuu

SEQ ID NO: 1475610 - RNA, 18 nt, Human
auuuucagcaaacucuuu

SEQ ID NO: 1475611 - RNA, 19 nt, Human
auuuucagcaaacucuuuu

SEQ ID NO: 1475612 - RNA, 17 nt, Human
auuuuaaaaaaugguca

SEQ ID NO: 1475613 - RNA, 16 nt, Human
auuuuaaaaaaugguc

SEQ ID NO: 1475614 - RNA, 18 nt, Human
auuuuaaaagaaugauua

SEQ ID NO: 1475615 - RNA, 22 nt, Human
auuuuaaaagaaugauuaugaa

SEQ ID NO: 1475616 - RNA, 13 nt, Human
auuuuaaacaaag

SEQ ID NO: 1475617 - RNA, 22 nt, Human
auuuuaaacaaagguugagaug

SEQ ID NO: 1475618 - RNA, 13 nt, Human
auuuuaaacacau

SEQ ID NO: 1475619 - RNA, 14 nt, Human
auuuuaaacacauu

SEQ ID NO: 1475620 - RNA, 23 nt, Human
auuuuaaacacauuaggaaaagu

SEQ ID NO: 1475621 - RNA, 12 nt, Human
auuuuaaagaau

SEQ ID NO: 1475622 - RNA, 13 nt, Human
auuuuaaagaauu

SEQ ID NO: 1475623 - RNA, 17 nt, Human
auuuuaaagaauugugu

SEQ ID NO: 1475624 - RNA, 17 nt, Human
auuuuaccuuugacaaa

SEQ ID NO: 1475625 - RNA, 15 nt, Human
auuuuacauuaaauu

SEQ ID NO: 1475626 - RNA, 12 nt, Human
auuuuacauuaa

SEQ ID NO: 1475627 - RNA, 16 nt, Human
auuuuacauaaauuua

SEQ ID NO: 1475628 - RNA, 17 nt, Human
auuuuacauaaauuuag

SEQ ID NO: 1475629 - RNA, 18 nt, Human
auuuguauaaaauaauuu

SEQ ID NO: 1475630 - RNA, 19 nt, Human
auuuguauaaaauaauuuu

SEQ ID NO: 1475631 - RNA, 21 nt, Human
auuuguauaaaauaauuuuua

SEQ ID NO: 1475632 - RNA, 13 nt, Human
auuugaaguguaa

SEQ ID NO: 1475633 - RNA, 14 nt, Human
auuugaaucagccu

SEQ ID NO: 1475634 - RNA, 23 nt, Human
auuugaaucagccuacaggccuc

SEQ ID NO: 1475635 - RNA, 17 nt, Human
auuuuaaaagaaugauu

SEQ ID NO: 1475636 - RNA, 14 nt, Human
auuugugacaaaaa

SEQ ID NO: 1475637 - RNA, 15 nt, Human
auuugugacaaaaaa

SEQ ID NO: 1475638 - RNA, 17 nt, Human
auuugugacaaaaaauu

SEQ ID NO: 1475639 - RNA, 23 nt, Human
auguguguuuuaaaaugagaaau

SEQ ID NO: 1475640 - RNA, 16 nt, Human
auguguguguguguau

SEQ ID NO: 1475641 - RNA, 20 nt, Human
auguggccccugaacaagaa

SEQ ID NO: 1475642 - RNA, 22 nt, Human
auguggccccugaacaagaauu

SEQ ID NO: 1475643 - RNA, 20 nt, Human
augugcuaguaauuggaaag

SEQ ID NO: 1475644 - RNA, 18 nt, Human
auguggaccuuagaauac

SEQ ID NO: 1475645 - RNA, 18 nt, Human
auguggccccugaacaag

SEQ ID NO: 1475646 - RNA, 19 nt, Human
augugcuaguaauuggaaa

SEQ ID NO: 1475647 - RNA, 20 nt, Human
uuuuaauaauguuucaaaca

SEQ ID NO: 1475648 - RNA, 16 nt, Human
uuuuaauaauguuuca

SEQ ID NO: 1475649 - RNA, 12 nt, Human
uuuuaauaaugu

SEQ ID NO: 1475650 - RNA, 12 nt, Human
uuuuaauaaauu

SEQ ID NO: 1475651 - RNA, 14 nt, Human
uuuuaauaaauuuc

SEQ ID NO: 1475652 - RNA, 13 nt, Human
uuuuaauaauguu

SEQ ID NO: 1475653 - RNA, 14 nt, Human
uuuuaauaauguuu

SEQ ID NO: 1475654 - RNA, 14 nt, Human
uuuuaauaaacacu

SEQ ID NO: 1475655 - RNA, 16 nt, Human
auguucagauuauugg

SEQ ID NO: 1475656 - RNA, 23 nt, Human
auguucagaagguugcucuagau

SEQ ID NO: 1475657 - RNA, 12 nt, Human
auguuagccagg

SEQ ID NO: 1475658 - RNA, 20 nt, Human
auguuaagggaagaauucca

SEQ ID NO: 1475659 - RNA, 15 nt, Human
auguuaauauugauu

SEQ ID NO: 1475660 - RNA, 17 nt, Human
auguuacuacaugcacu

SEQ ID NO: 1475661 - RNA, 17 nt, Human
auguguuuacuuuaugu

SEQ ID NO: 1475662 - RNA, 19 nt, Human
auguuaaaaaaauaagaag

SEQ ID NO: 1475663 - RNA, 22 nt, Human
auguuaaaaaaauaagaagaau

SEQ ID NO: 1475664 - RNA, 21 nt, Human
auguuaaaaaaauaagaagaa

SEQ ID NO: 1475665 - RNA, 20 nt, Human
auguugcccuguugcugccu

SEQ ID NO: 1475666 - RNA, 17 nt, Human
uuuuacuuuuaaacugu

SEQ ID NO: 1475667 - RNA, 18 nt, Human
uuuuacuuuuaaacugug

SEQ ID NO: 1475668 - RNA, 20 nt, Human
uuuuacuuuuaaacugugua

SEQ ID NO: 1475669 - RNA, 18 nt, Human
uuuuaggaagcaagcuua

SEQ ID NO: 1475670 - RNA, 18 nt, Human
auguugcauagaauaaaa

SEQ ID NO: 1475671 - RNA, 17 nt, Human
auguugcauagaauaaa

SEQ ID NO: 1475672 - RNA, 14 nt, Human
uuuucucuaggaaa

SEQ ID NO: 1475673 - RNA, 13 nt, Human
uuuucuccuccca

SEQ ID NO: 1475674 - RNA, 14 nt, Human
uuuucuccucccag

SEQ ID NO: 1475675 - RNA, 19 nt, Human
uuuucuccucccaggaacu

SEQ ID NO: 1475676 - RNA, 21 nt, Human
uuuucucgcuguccuuucuag

SEQ ID NO: 1475677 - RNA, 16 nt, Human
uuuucucuaggaaaua

SEQ ID NO: 1475678 - RNA, 23 nt, Human
uuuucucccuggauuuuuaccag

SEQ ID NO: 1475679 - RNA, 21 nt, Human
uuuucaugauuuugaaaccau

SEQ ID NO: 1475680 - RNA, 21 nt, Human
uuuucaugauuuugaaaucau

SEQ ID NO: 1475681 - RNA, 22 nt, Human
uuuucucccuggauuuuuacca

SEQ ID NO: 1475682 - RNA, 13 nt, Human
uuuuauuuaaaaa

SEQ ID NO: 1475683 - RNA, 22 nt, Human
uuuucaguuuauuugaaccaau

SEQ ID NO: 1475684 - RNA, 16 nt, Human
uuuucauacauuuucu

SEQ ID NO: 1475685 - RNA, 18 nt, Human
uuuucauacauuuucuaa

SEQ ID NO: 1475686 - RNA, 21 nt, Human
uuuucauacauuuucuaagaa

SEQ ID NO: 1475687 - RNA, 15 nt, Human
uuuuauuugcaugug

SEQ ID NO: 1475688 - RNA, 17 nt, Human
auguuuucaggcuagau

SEQ ID NO: 1475689 - RNA, 21 nt, Human
auguuuucaggcuagauguau

SEQ ID NO: 1475690 - RNA, 23 nt, Human
auguuuuggccaaugcaccuaaa

SEQ ID NO: 1475691 - RNA, 17 nt, Human
uuuucugugccugaaua

SEQ ID NO: 1475692 - RNA, 18 nt, Human
uuuucugugccugaauau

SEQ ID NO: 1475693 - RNA, 15 nt, Human
auguuguguuuuuaa

SEQ ID NO: 1475694 - RNA, 17 nt, Human
auguuuaguaaucauau

SEQ ID NO: 1475695 - RNA, 17 nt, Human
auuaaaccggaccaucu

SEQ ID NO: 1475696 - RNA, 16 nt, Human
uuuuguuuaccagaga

SEQ ID NO: 1475697 - RNA, 15 nt, Human
uuuuguuauuaaaca

SEQ ID NO: 1475698 - RNA, 20 nt, Human
uuuugugaugcaaauaaaua

SEQ ID NO: 1475699 - RNA, 13 nt, Human
uuuugcugagacu

SEQ ID NO: 1475700 - RNA, 22 nt, Human
uuuugcuguaauguuaauauug

SEQ ID NO: 1475701 - RNA, 21 nt, Human
uuuugcgguucaggaaaauug

SEQ ID NO: 1475702 - RNA, 19 nt, Human
uuuugcugagacuaaucuu

SEQ ID NO: 1475703 - RNA, 13 nt, Human
uuuugcuggaaua

SEQ ID NO: 1475704 - RNA, 12 nt, Human
uuuuuaucaugu

SEQ ID NO: 1475705 - RNA, 17 nt, Human
uuuuuaucaugcauguc

SEQ ID NO: 1475706 - RNA, 19 nt, Human
uuuuuauauuugaaauauu

SEQ ID NO: 1475707 - RNA, 20 nt, Human
uuuuuaggaagcaagcuuaa

SEQ ID NO: 1475708 - RNA, 12 nt, Human
uuuuuaguugaa

SEQ ID NO: 1475709 - RNA, 15 nt, Human
uuuuuaguugaauuu

SEQ ID NO: 1475710 - RNA, 12 nt, Human
uuuuuacauuuu

SEQ ID NO: 1475711 - RNA, 12 nt, Human
uuuugcagcuuu

SEQ ID NO: 1475712 - RNA, 18 nt, Human
uuuugcauuuaaaacaga

SEQ ID NO: 1475713 - RNA, 16 nt, Human
uuuugauauuucuagc

SEQ ID NO: 1475714 - RNA, 23 nt, Human
uuuugaugaacaaaauuuccuaa

SEQ ID NO: 1475715 - RNA, 20 nt, Human
uuuugauuuguacugaaaaa

SEQ ID NO: 1475716 - RNA, 21 nt, Human
uuuugauuuguacugaaaaau

SEQ ID NO: 1475717 - RNA, 18 nt, Human
uuuugcaaucccuuaaua

SEQ ID NO: 1475718 - RNA, 15 nt, Human
auuaaagcauuuaga

SEQ ID NO: 1475719 - RNA, 20 nt, Human
auuaaagaaggguugagcug

SEQ ID NO: 1475720 - RNA, 21 nt, Human
auuaaagaaggguugagcugg

SEQ ID NO: 1475721 - RNA, 11 nt, Human
uuuugagaaag

SEQ ID NO: 1475722 - RNA, 18 nt, Human
uuuugauacuaagcauug

SEQ ID NO: 1475723 - RNA, 17 nt, Human
auuacauuuguauaaaa

SEQ ID NO: 1475724 - RNA, 18 nt, Human
auuacauuuguauaaaau

SEQ ID NO: 1475725 - RNA, 20 nt, Human
auuacauuuguauaaaauaa

SEQ ID NO: 1475726 - RNA, 21 nt, Human
auuacaguggggaaugaagau

SEQ ID NO: 1475727 - RNA, 16 nt, Human
uuuuuguuauuaaaca

SEQ ID NO: 1475728 - RNA, 23 nt, Human
auuaaguaaugauaacuggaaac

SEQ ID NO: 1475729 - RNA, 19 nt, Human
uuuuugugaaaagcuccau

SEQ ID NO: 1475730 - RNA, 14 nt, Human
uuuuuaucuuuaua

SEQ ID NO: 1475731 - RNA, 14 nt, Human
uuuuuauuaugcau

SEQ ID NO: 1475732 - RNA, 15 nt, Human
uuuuuauuaugcauu

SEQ ID NO: 1475733 - RNA, 12 nt, Human
uuuuuguaccaa

SEQ ID NO: 1475734 - RNA, 13 nt, Human
auuacgugcucug

SEQ ID NO: 1475735 - RNA, 15 nt, Human
auuacuuauuuuuga

SEQ ID NO: 1475736 - RNA, 16 nt, Human
auuacuuauuuuugac

SEQ ID NO: 1475737 - RNA, 17 nt, Human
auuacuuauuuuugaca

SEQ ID NO: 1475738 - RNA, 18 nt, Human
auuacuuauuuuugacag

SEQ ID NO: 1475739 - RNA, 19 nt, Human
auuacuuauuuuugacagu

SEQ ID NO: 1475740 - RNA, 17 nt, Human
auuacucaguaauuugu

SEQ ID NO: 1475741 - RNA, 20 nt, Human
auucagauaugauucaaaug

SEQ ID NO: 1475742 - RNA, 18 nt, Human
auucagauaugauucaaa

SEQ ID NO: 1475743 - RNA, 17 nt, Human
auucagaguugaugguu

SEQ ID NO: 1475744 - RNA, 11 nt, Human
auuccauccuu

SEQ ID NO: 1475745 - RNA, 23 nt, Human
auuccaacucguauagcaugcau

SEQ ID NO: 1475746 - RNA, 19 nt, Human
auuccaacucguauagcau

SEQ ID NO: 1475747 - RNA, 22 nt, Human
auuccaagacaugucuguucua

SEQ ID NO: 1475748 - RNA, 14 nt, Human
auucuaaaaugauu

SEQ ID NO: 1475749 - RNA, 16 nt, Human
auucuaaaaugauugu

SEQ ID NO: 1475750 - RNA, 20 nt, Human
auucuccugccucagccucc

SEQ ID NO: 1475751 - RNA, 23 nt, Human
auucuccagccaucaagagacug

SEQ ID NO: 1475752 - RNA, 15 nt, Human
auucucccuugcucu

SEQ ID NO: 1475753 - RNA, 20 nt, Human
auucuaaaaugauuguagua

SEQ ID NO: 1475754 - RNA, 14 nt, Human
auucuaaaaugccu

SEQ ID NO: 1475755 - RNA, 15 nt, Human
auucuaaaaugccuu

SEQ ID NO: 1475756 - RNA, 15 nt, Human
auucuaucuauuccu

SEQ ID NO: 1475757 - RNA, 11 nt, Human
uugcucaugga

SEQ ID NO: 1475758 - RNA, 12 nt, Human
uugcucauggaa

SEQ ID NO: 1475759 - RNA, 19 nt, Human
uugcugaaauuuuauaugc

SEQ ID NO: 1475760 - RNA, 17 nt, Human
uugcuccuaauguugaa

SEQ ID NO: 1475761 - RNA, 11 nt, Human
uugcugaaauu

SEQ ID NO: 1475762 - RNA, 16 nt, Human
uugcugaaauuuuaua

SEQ ID NO: 1475763 - RNA, 18 nt, Human
aucuaaguuaauuuaaag

SEQ ID NO: 1475764 - RNA, 16 nt, Human
uugcuacauaauuauc

SEQ ID NO: 1475765 - RNA, 13 nt, Human
uugcuacauaauu

SEQ ID NO: 1475766 - RNA, 11 nt, Human
uugcugagccu

SEQ ID NO: 1475767 - RNA, 11 nt, Human
uugcugagacu

SEQ ID NO: 1475768 - RNA, 15 nt, Human
uugcugacccucccc

SEQ ID NO: 1475769 - RNA, 14 nt, Human
uugcugacccuccc

SEQ ID NO: 1475770 - RNA, 15 nt, Human
uugcuuuuucaccag

SEQ ID NO: 1475771 - RNA, 15 nt, Human
uugcuuuucacaaau

SEQ ID NO: 1475772 - RNA, 21 nt, Human
augaaauauuauguuaaaacu

SEQ ID NO: 1475773 - RNA, 14 nt, Human
aucuuuuauuuugc

SEQ ID NO: 1475774 - RNA, 17 nt, Human
aucuuucccuccuuggu

SEQ ID NO: 1475775 - RNA, 19 nt, Human
aucuuucccuccuugguga

SEQ ID NO: 1475776 - RNA, 16 nt, Human
aucuuucccuccuugg

SEQ ID NO: 1475777 - RNA, 14 nt, Human
aucuuucccuccuu

SEQ ID NO: 1475778 - RNA, 13 nt, Human
aucuuucccuccu

SEQ ID NO: 1475779 - RNA, 12 nt, Human
aucuuucccucc

SEQ ID NO: 1475780 - RNA, 17 nt, Human
uuggaccuaauccaagc

SEQ ID NO: 1475781 - RNA, 12 nt, Human
uuggacuaugga

SEQ ID NO: 1475782 - RNA, 13 nt, Human
uuguauaaaauaa

SEQ ID NO: 1475783 - RNA, 15 nt, Human
uuguauaaaauaauu

SEQ ID NO: 1475784 - RNA, 13 nt, Human
uuguaaugaaaac

SEQ ID NO: 1475785 - RNA, 16 nt, Human
uuguauauuacaauga

SEQ ID NO: 1475786 - RNA, 15 nt, Human
uuguauauuacaaug

SEQ ID NO: 1475787 - RNA, 14 nt, Human
uuguauauuacaau

SEQ ID NO: 1475788 - RNA, 13 nt, Human
uuguauauuacaa

SEQ ID NO: 1475789 - RNA, 21 nt, Human
augaauuaguuuuauaugcuu

SEQ ID NO: 1475790 - RNA, 23 nt, Human
augaauuaguuuuauaugcuucu

SEQ ID NO: 1475791 - RNA, 19 nt, Human
augacaguccgucaaaaca

SEQ ID NO: 1475792 - RNA, 17 nt, Human
augacaggauguuugcu

SEQ ID NO: 1475793 - RNA, 16 nt, Human
augacacuguucagga

SEQ ID NO: 1475794 - RNA, 19 nt, Human
uugggcagcaauuuaaaug

SEQ ID NO: 1475795 - RNA, 23 nt, Human
uugggcagccagaccagcaggcu

SEQ ID NO: 1475796 - RNA, 18 nt, Human
uugggcagcaauuuaaau

SEQ ID NO: 1475797 - RNA, 18 nt, Human
augaauuacauuuguaua

SEQ ID NO: 1475798 - RNA, 19 nt, Human
augaauuacauuuguauaa

SEQ ID NO: 1475799 - RNA, 22 nt, Human
augaauuacauuuguauaaaau

SEQ ID NO: 1475800 - RNA, 21 nt, Human
augaacagaacauagacagaa

SEQ ID NO: 1475801 - RNA, 21 nt, Human
augaacauauuguugaaaggu

SEQ ID NO: 1475802 - RNA, 16 nt, Human
uugguuuugcuacaua

SEQ ID NO: 1475803 - RNA, 21 nt, Human
uugguuuugcuacauaauuau

SEQ ID NO: 1475804 - RNA, 18 nt, Human
uugugaagguggaaauaa

SEQ ID NO: 1475805 - RNA, 17 nt, Human
uugugaagguggaaaua

SEQ ID NO: 1475806 - RNA, 22 nt, Human
uugugaaguacccguucacauu

SEQ ID NO: 1475807 - RNA, 18 nt, Human
uugugaagcaaaauuuuu

SEQ ID NO: 1475808 - RNA, 11 nt, Human
uugugaagagg

SEQ ID NO: 1475809 - RNA, 18 nt, Human
augaucaccgacugaaaa

SEQ ID NO: 1475810 - RNA, 20 nt, Human
augauccuguauucagacag

SEQ ID NO: 1475811 - RNA, 13 nt, Human
uuguuggaaugaa

SEQ ID NO: 1475812 - RNA, 22 nt, Human
augcaaacuuuauuuuguguuu

SEQ ID NO: 1475813 - RNA, 14 nt, Human
augcaaaccauagc

SEQ ID NO: 1475814 - RNA, 16 nt, Human
uuuaaaaaauggucac

SEQ ID NO: 1475815 - RNA, 15 nt, Human
uuuaaacuguguaca

SEQ ID NO: 1475816 - RNA, 19 nt, Human
uuuaaacuguguacauaac

SEQ ID NO: 1475817 - RNA, 21 nt, Human
uuuaaacuguguacauaacug

SEQ ID NO: 1475818 - RNA, 22 nt, Human
uuuaaacuguguacauaacuga

SEQ ID NO: 1475819 - RNA, 19 nt, Human
uuuaaaaaauagcagcuuu

SEQ ID NO: 1475820 - RNA, 23 nt, Human
uuuaaaaaagcuuaaaacuuuga

SEQ ID NO: 1475821 - RNA, 21 nt, Human
uuuaaaaaagcuuaaaacuuu

SEQ ID NO: 1475822 - RNA, 13 nt, Human
uuuaaaaaagcuu

SEQ ID NO: 1475823 - RNA, 14 nt, Human
uuuaaaaaagcuua

SEQ ID NO: 1475824 - RNA, 17 nt, Human
uuuaaaaaagcuuaaaa

SEQ ID NO: 1475825 - RNA, 20 nt, Human
uuuaaaaaagcuuaaaacuu

SEQ ID NO: 1475826 - RNA, 16 nt, Human
uuguuuugugcagaga

SEQ ID NO: 1475827 - RNA, 14 nt, Human
augauaacuggaaa

SEQ ID NO: 1475828 - RNA, 22 nt, Human
augagugcguggugcgagugcg

SEQ ID NO: 1475829 - RNA, 19 nt, Human
augagugcguggugcgagu

SEQ ID NO: 1475830 - RNA, 21 nt, Human
augaguggaaauuaagacuuu

SEQ ID NO: 1475831 - RNA, 13 nt, Human
uugucacgccaga

SEQ ID NO: 1475832 - RNA, 20 nt, Human
uugucacgccagacuuccca

SEQ ID NO: 1475833 - RNA, 13 nt, Human
uugucauguguau

SEQ ID NO: 1475834 - RNA, 22 nt, Human
uugucauguguauaaaaauaaa

SEQ ID NO: 1475835 - RNA, 14 nt, Human
uugucauguguaua

SEQ ID NO: 1475836 - RNA, 22 nt, Human
uuguccucagccccgcguggaa

SEQ ID NO: 1475837 - RNA, 22 nt, Human
augacauuaaagaaggguugag

SEQ ID NO: 1475838 - RNA, 20 nt, Human
augacaguccgucaaaacag

SEQ ID NO: 1475839 - RNA, 21 nt, Human
augacaguccgucaaaacaga

SEQ ID NO: 1475840 - RNA, 22 nt, Human
augacaguccgucaaaacagau

SEQ ID NO: 1475841 - RNA, 14 nt, Human
augacaucacuugu

SEQ ID NO: 1475842 - RNA, 18 nt, Human
augacaucacuuguacaa

SEQ ID NO: 1475843 - RNA, 18 nt, Human
augacaucaccacaguuu

SEQ ID NO: 1475844 - RNA, 19 nt, Human
augacaucacuuguacaaa

SEQ ID NO: 1475845 - RNA, 20 nt, Human
augacaucacuuguacaaaa

SEQ ID NO: 1475846 - RNA, 16 nt, Human
augagauauuaaacca

SEQ ID NO: 1475847 - RNA, 14 nt, Human
augagaugcuggcu

SEQ ID NO: 1475848 - RNA, 15 nt, Human
augagaugcuggcuu

SEQ ID NO: 1475849 - RNA, 22 nt, Human
augagaugcuggcuugggcagc

SEQ ID NO: 1475850 - RNA, 19 nt, Human
augagaugcuggcuugggc

SEQ ID NO: 1475851 - RNA, 16 nt, Human
uuuaaagcuuccauug

SEQ ID NO: 1475852 - RNA, 17 nt, Human
uuuaaagcguuugcaca

SEQ ID NO: 1475853 - RNA, 18 nt, Human
augcuacaggauuugaaa

SEQ ID NO: 1475854 - RNA, 17 nt, Human
uuuauaugcuucuguuu

SEQ ID NO: 1475855 - RNA, 14 nt, Human
uuuauaugaagaaa

SEQ ID NO: 1475856 - RNA, 21 nt, Human
uuuauaugaagaaaaucacuu

SEQ ID NO: 1475857 - RNA, 19 nt, Human
uuuauaugcuucuguuuua

SEQ ID NO: 1475858 - RNA, 20 nt, Human
uuuauaugcuuacugauaua

SEQ ID NO: 1475859 - RNA, 15 nt, Human
uuuaugugaaacaug

SEQ ID NO: 1475860 - RNA, 19 nt, Human
uuuaugucuguggauuuuu

SEQ ID NO: 1475861 - RNA, 14 nt, Human
uuuaugugaaacau

SEQ ID NO: 1475862 - RNA, 20 nt, Human
uuuagcuggaaaaguauguu

SEQ ID NO: 1475863 - RNA, 16 nt, Human
uuuagccuucucuguu

SEQ ID NO: 1475864 - RNA, 22 nt, Human
uuuagguuuuuguuuguuuccu

SEQ ID NO: 1475865 - RNA, 23 nt, Human
auggaauuggagcucgugggaca

SEQ ID NO: 1475866 - RNA, 21 nt, Human
uuucccacuguuuaaggaguu

SEQ ID NO: 1475867 - RNA, 21 nt, Human
uuucaguuuauuugaaccaau

SEQ ID NO: 1475868 - RNA, 14 nt, Human
uuucauaaauuuga

SEQ ID NO: 1475869 - RNA, 14 nt, Human
uuucauacacuuau

SEQ ID NO: 1475870 - RNA, 16 nt, Human
uuucauacauuuucua

SEQ ID NO: 1475871 - RNA, 20 nt, Human
uuucauacauuuucuaagaa

SEQ ID NO: 1475872 - RNA, 18 nt, Human
uuucauauaaauggaauu

SEQ ID NO: 1475873 - RNA, 15 nt, Human
uuucauagcuaaaaa

SEQ ID NO: 1475874 - RNA, 14 nt, Human
uuucauagcuaaaa

SEQ ID NO: 1475875 - RNA, 13 nt, Human
uuucauauaaagu

SEQ ID NO: 1475876 - RNA, 12 nt, Human
uuucauaaagca

SEQ ID NO: 1475877 - RNA, 16 nt, Human
uuucaccuagauuuuu

SEQ ID NO: 1475878 - RNA, 24 nt, Human
uuucacuguagaaugauuucaugc

SEQ ID NO: 1475879 - RNA, 17 nt, Human
uuuauuuuuuucugaau

SEQ ID NO: 1475880 - RNA, 13 nt, Human
uuucacauuuucc

SEQ ID NO: 1475881 - RNA, 14 nt, Human
uuucacauuuuccu

SEQ ID NO: 1475882 - RNA, 17 nt, Human
uuucaccagauuugcua

SEQ ID NO: 1475883 - RNA, 14 nt, Human
uuuauuuugacaua

SEQ ID NO: 1475884 - RNA, 16 nt, Human
uuuauuuuaauaaugu

SEQ ID NO: 1475885 - RNA, 23 nt, Human
augcuuagucccucaugcaaauc

SEQ ID NO: 1475886 - RNA, 15 nt, Human
augcuuagucccuca

SEQ ID NO: 1475887 - RNA, 21 nt, Human
augcuuagucccucaugcaaa

SEQ ID NO: 1475888 - RNA, 19 nt, Human
uuuauuacuguaagaaaau

SEQ ID NO: 1475889 - RNA, 14 nt, Human
augcuggugagcca

SEQ ID NO: 1475890 - RNA, 14 nt, Human
augcuguauuuuaa

SEQ ID NO: 1475891 - RNA, 19 nt, Human
augcuguauuuuaaaagaa

SEQ ID NO: 1475892 - RNA, 23 nt, Human
augcugugacacauggccccucc

SEQ ID NO: 1475893 - RNA, 13 nt, Human
augcuuacugaua

SEQ ID NO: 1475894 - RNA, 22 nt, Human
augcuuacugauauauuuuaca

SEQ ID NO: 1475895 - RNA, 23 nt, Human
augcuuacugauauauuuuacaa

SEQ ID NO: 1475896 - RNA, 18 nt, Human
uuucuauagccaaaaaua

SEQ ID NO: 1475897 - RNA, 13 nt, Human
uuucuaguugaaa

SEQ ID NO: 1475898 - RNA, 21 nt, Human
uuucuaggacugaauuaugaa

SEQ ID NO: 1475899 - RNA, 17 nt, Human
uuucuaggacugaauua

SEQ ID NO: 1475900 - RNA, 22 nt, Human
uuucuaggacugaauuaugaaa

SEQ ID NO: 1475901 - RNA, 17 nt, Human
uuucuagguaggaaaug

SEQ ID NO: 1475902 - RNA, 21 nt, Human
uuucuagguaggaaauguggu

SEQ ID NO: 1475903 - RNA, 13 nt, Human
uuucuaugaaaua

SEQ ID NO: 1475904 - RNA, 22 nt, Human
uuucuauagccaaaaauagcua

SEQ ID NO: 1475905 - RNA, 14 nt, Human
uuucuaugaaauau

SEQ ID NO: 1475906 - RNA, 20 nt, Human
uuucuaugaaauauuauguu

SEQ ID NO: 1475907 - RNA, 21 nt, Human
uuucuccaagagcuacauaau

SEQ ID NO: 1475908 - RNA, 15 nt, Human
uuucuccaagagcua

SEQ ID NO: 1475909 - RNA, 15 nt, Human
uuucuauuuuuaucu

SEQ ID NO: 1475910 - RNA, 13 nt, Human
uuucuauuuuuau

SEQ ID NO: 1475911 - RNA, 16 nt, Human
uuucucacuaaaucuu

SEQ ID NO: 1475912 - RNA, 16 nt, Human
uuucucaguuuucaua

SEQ ID NO: 1475913 - RNA, 19 nt, Human
uuugaaacacuuugcauaa

SEQ ID NO: 1475914 - RNA, 17 nt, Human
uuugaaacacuuugcau

SEQ ID NO: 1475915 - RNA, 14 nt, Human
uuugaaauauugac

SEQ ID NO: 1475916 - RNA, 15 nt, Human
uuugaaauauugacu

SEQ ID NO: 1475917 - RNA, 18 nt, Human
uuugaaaagcagacauuu

SEQ ID NO: 1475918 - RNA, 16 nt, Human
uuugaaaagcagacau

SEQ ID NO: 1475919 - RNA, 13 nt, Human
uuugaaaagcaga

SEQ ID NO: 1475920 - RNA, 13 nt, Human
uuucuuuucuuug

SEQ ID NO: 1475921 - RNA, 15 nt, Human
uuucuuuguguagcu

SEQ ID NO: 1475922 - RNA, 18 nt, Human
uuucuuuguuucuuucuu

SEQ ID NO: 1475923 - RNA, 19 nt, Human
uuucuuuguuucuuucuuu

SEQ ID NO: 1475924 - RNA, 14 nt, Human
uuucuuucaaaauu

SEQ ID NO: 1475925 - RNA, 18 nt, Human
uuucuggaauacaugaaa

SEQ ID NO: 1475926 - RNA, 20 nt, Human
uuucuggaauacaugaaaua

SEQ ID NO: 1475927 - RNA, 21 nt, Human
uuucuggaauacaugaaauau

SEQ ID NO: 1475928 - RNA, 23 nt, Human
uuucuggauuccccaucucaggc

SEQ ID NO: 1475929 - RNA, 22 nt, Human
augggacauuugcucauggaau

SEQ ID NO: 1475930 - RNA, 21 nt, Human
augggacauuugcucauggaa

SEQ ID NO: 1475931 - RNA, 12 nt, Human
augggaccacaa

SEQ ID NO: 1475932 - RNA, 13 nt, Human
augggacauuuuu

SEQ ID NO: 1475933 - RNA, 18 nt, Human
uuucggacaguuuauuug

SEQ ID NO: 1475934 - RNA, 21 nt, Human
uuucgucuguuuauaaacauu

SEQ ID NO: 1475935 - RNA, 16 nt, Human
uuuccuuuuuuguuau

SEQ ID NO: 1475936 - RNA, 17 nt, Human
uuuccuuuuuuguuauu

SEQ ID NO: 1475937 - RNA, 18 nt, Human
uuuccuucaaaguuuaau

SEQ ID NO: 1475938 - RNA, 16 nt, Human
uucagauaugauucaa

SEQ ID NO: 1475939 - RNA, 17 nt, Human
uucagauaugauucaaa

SEQ ID NO: 1475940 - RNA, 18 nt, Human
uucagauaugauucaaau

SEQ ID NO: 1475941 - RNA, 14 nt, Human
uucagaagaaaaag

SEQ ID NO: 1475942 - RNA, 12 nt, Human
uucagaagaaaa

SEQ ID NO: 1475943 - RNA, 19 nt, Human
uucagauaugauucaaaug

SEQ ID NO: 1475944 - RNA, 14 nt, Human
uucagauucccaga

SEQ ID NO: 1475945 - RNA, 21 nt, Human
uucagauucccagagcaaaau

SEQ ID NO: 1475946 - RNA, 22 nt, Human
uucagauucccagagcaaaaua

SEQ ID NO: 1475947 - RNA, 19 nt, Human
uucacuucauaauccagua

SEQ ID NO: 1475948 - RNA, 23 nt, Human
uucagcacuuuagaauaugccuu

SEQ ID NO: 1475949 - RNA, 22 nt, Human
uucagcacuuuagaauaugccu

SEQ ID NO: 1475950 - RNA, 17 nt, Human
uucagcgguuuauauaa

SEQ ID NO: 1475951 - RNA, 14 nt, Human
uucagcuaagcuag

SEQ ID NO: 1475952 - RNA, 20 nt, Human
uucagcuaagcuaggaauga

SEQ ID NO: 1475953 - RNA, 13 nt, Human
auauaugcuaagu

SEQ ID NO: 1475954 - RNA, 16 nt, Human
auauauuuuacaauuu

SEQ ID NO: 1475955 - RNA, 21 nt, Human
uucauauuuuucauagcuaaa

SEQ ID NO: 1475956 - RNA, 14 nt, Human
uucauauaaaguau

SEQ ID NO: 1475957 - RNA, 16 nt, Human
uucauauaaaguauca

SEQ ID NO: 1475958 - RNA, 18 nt, Human
uucauauaugaggacuug

SEQ ID NO: 1475959 - RNA, 21 nt, Human
uucauauaugaggacuugugu

SEQ ID NO: 1475960 - RNA, 24 nt, Human
uucagucucuauaccaauaaagug

SEQ ID NO: 1475961 - RNA, 23 nt, Human
uucagucucuauaccaauaaagu

SEQ ID NO: 1475962 - RNA, 22 nt, Human
uucagucucuauaccaauaaag

SEQ ID NO: 1475963 - RNA, 21 nt, Human
uucagucucuauaccaauaaa

SEQ ID NO: 1475964 - RNA, 18 nt, Human
uucagucucuauaccaau

SEQ ID NO: 1475965 - RNA, 14 nt, Human
uucagguccaggcu

SEQ ID NO: 1475966 - RNA, 18 nt, Human
auauauuuuacaauuuuu

SEQ ID NO: 1475967 - RNA, 15 nt, Human
auaugaacauauugu

SEQ ID NO: 1475968 - RNA, 20 nt, Human
auaugaacauauuguugaaa

SEQ ID NO: 1475969 - RNA, 19 nt, Human
auaugaacauauuguugaa

SEQ ID NO: 1475970 - RNA, 15 nt, Human
auaugggacauuuuu

SEQ ID NO: 1475971 - RNA, 21 nt, Human
auaugacuguuuuucggacag

SEQ ID NO: 1475972 - RNA, 22 nt, Human
auaugacuguuuuucggacagu

SEQ ID NO: 1475973 - RNA, 22 nt, Human
auauguguaugcacaguaaaaa

SEQ ID NO: 1475974 - RNA, 22 nt, Human
uucaugcuguucaugaaagauu

SEQ ID NO: 1475975 - RNA, 17 nt, Human
auaugggacauuuuuga

SEQ ID NO: 1475976 - RNA, 21 nt, Human
uuccaauuuucuggaauacau

SEQ ID NO: 1475977 - RNA, 22 nt, Human
uuccaacucguauagcaugcau

SEQ ID NO: 1475978 - RNA, 19 nt, Human
uuccaacucguauagcaug

SEQ ID NO: 1475979 - RNA, 17 nt, Human
uuccaacuuggcugcag

SEQ ID NO: 1475980 - RNA, 22 nt, Human
uuccaacuuggcugcaggaauc

SEQ ID NO: 1475981 - RNA, 16 nt, Human
uuccaagacaugucug

SEQ ID NO: 1475982 - RNA, 21 nt, Human
uuccaagacaugucuguucua

SEQ ID NO: 1475983 - RNA, 19 nt, Human
uuccacguacugcagccuc

SEQ ID NO: 1475984 - RNA, 18 nt, Human
auauucucacagcuccaa

SEQ ID NO: 1475985 - RNA, 15 nt, Human
auauuacacuacaca

SEQ ID NO: 1475986 - RNA, 21 nt, Human
auauucucacagcuccaagaa

SEQ ID NO: 1475987 - RNA, 19 nt, Human
auauugauaagaucuuuua

SEQ ID NO: 1475988 - RNA, 18 nt, Human
auauugauaagaucuuuu

SEQ ID NO: 1475989 - RNA, 19 nt, Human
auauuggacaaagaaccuu

SEQ ID NO: 1475990 - RNA, 16 nt, Human
auauuguaaaacaggu

SEQ ID NO: 1475991 - RNA, 17 nt, Human
auauuguaaaacaggua

SEQ ID NO: 1475992 - RNA, 12 nt, Human
auauuguaaaua

SEQ ID NO: 1475993 - RNA, 19 nt, Human
auauuguuuuacaauaguu

SEQ ID NO: 1475994 - RNA, 19 nt, Human
auauuuaacucucuuuaug

SEQ ID NO: 1475995 - RNA, 13 nt, Human
auauuuacaaaug

SEQ ID NO: 1475996 - RNA, 14 nt, Human
auauuguuugcuaa

SEQ ID NO: 1475997 - RNA, 14 nt, Human
auauugugauucug

SEQ ID NO: 1475998 - RNA, 17 nt, Human
auauugugauucugccu

SEQ ID NO: 1475999 - RNA, 19 nt, Human
auauugugauucugccuuu

SEQ ID NO: 1476000 - RNA, 12 nt, Human
auauuacaauga

SEQ ID NO: 1476001 - RNA, 16 nt, Human
auauuacaaugaucac

SEQ ID NO: 1476002 - RNA, 15 nt, Human
auauuacaaugauca

SEQ ID NO: 1476003 - RNA, 13 nt, Human
auauuacaaugau

SEQ ID NO: 1476004 - RNA, 16 nt, Human
auauguuguaauauuu

SEQ ID NO: 1476005 - RNA, 21 nt, Human
auauguuguaauauuucuuca

SEQ ID NO: 1476006 - RNA, 16 nt, Human
auauguucugacauaa

SEQ ID NO: 1476007 - RNA, 17 nt, Human
uuccagucuuccugaca

SEQ ID NO: 1476008 - RNA, 20 nt, Human
uuccagucuuccugacacuu

SEQ ID NO: 1476009 - RNA, 15 nt, Human
uucccuuuuuuuaag

SEQ ID NO: 1476010 - RNA, 17 nt, Human
uucccuacugaagcccu

SEQ ID NO: 1476011 - RNA, 12 nt, Human
uucccuaagcca

SEQ ID NO: 1476012 - RNA, 21 nt, Human
uuccuaaauauauuuuaagac

SEQ ID NO: 1476013 - RNA, 18 nt, Human
uuccuaaauauuaugaga

SEQ ID NO: 1476014 - RNA, 16 nt, Human
uuccuaaauauuauga

SEQ ID NO: 1476015 - RNA, 13 nt, Human
uuccuaagugauu

SEQ ID NO: 1476016 - RNA, 12 nt, Human
uuccugaacagg

SEQ ID NO: 1476017 - RNA, 21 nt, Human
aucaaggguacacugccuucu

SEQ ID NO: 1476018 - RNA, 15 nt, Human
aucaagggucaggcc

SEQ ID NO: 1476019 - RNA, 17 nt, Human
aucaagggucaggccuu

SEQ ID NO: 1476020 - RNA, 16 nt, Human
aucaagggucaggccu

SEQ ID NO: 1476021 - RNA, 19 nt, Human
aucacucuguucauuccuc

SEQ ID NO: 1476022 - RNA, 13 nt, Human
aucacgcuuuccu

SEQ ID NO: 1476023 - RNA, 18 nt, Human
uuccuuacagaacuacuu

SEQ ID NO: 1476024 - RNA, 19 nt, Human
uuccuuaagucagaacagc

SEQ ID NO: 1476025 - RNA, 20 nt, Human
uuccuuaagucagaacagca

SEQ ID NO: 1476026 - RNA, 19 nt, Human
uuccuguuuuucacauuuu

SEQ ID NO: 1476027 - RNA, 23 nt, Human
uuccuguuuuucacauuuuccuu

SEQ ID NO: 1476028 - RNA, 13 nt, Human
uuccuuaccuuuu

SEQ ID NO: 1476029 - RNA, 21 nt, Human
auauuuuucaugauuuugaaa

SEQ ID NO: 1476030 - RNA, 11 nt, Human
aucaacugaau

SEQ ID NO: 1476031 - RNA, 13 nt, Human
aucaacugaauga

SEQ ID NO: 1476032 - RNA, 14 nt, Human
aucaacugaaugag

SEQ ID NO: 1476033 - RNA, 21 nt, Human
aucaacuuaccaggcaccaaa

SEQ ID NO: 1476034 - RNA, 15 nt, Human
aucaacuugcuuauc

SEQ ID NO: 1476035 - RNA, 16 nt, Human
aucaaggguacacugc

SEQ ID NO: 1476036 - RNA, 21 nt, Human
aucacugaacuuugcugagcc

SEQ ID NO: 1476037 - RNA, 14 nt, Human
aucacugaacuuug

SEQ ID NO: 1476038 - RNA, 23 nt, Human
aucacucuguucauuccuccagg

SEQ ID NO: 1476039 - RNA, 22 nt, Human
aucacucuguucauuccuccag

SEQ ID NO: 1476040 - RNA, 21 nt, Human
aucacucuguucauuccucca

SEQ ID NO: 1476041 - RNA, 20 nt, Human
aucacuuaggaaauggcuuu

SEQ ID NO: 1476042 - RNA, 18 nt, Human
aucaguuaacuauugcau

SEQ ID NO: 1476043 - RNA, 12 nt, Human
aucaguuaacua

SEQ ID NO: 1476044 - RNA, 16 nt, Human
aucagucucagaaugu

SEQ ID NO: 1476045 - RNA, 21 nt, Human
aucaguuuuuucaccuggaag

SEQ ID NO: 1476046 - RNA, 20 nt, Human
aucauauauauacauacaug

SEQ ID NO: 1476047 - RNA, 15 nt, Human
aucaucaguguagaa

SEQ ID NO: 1476048 - RNA, 16 nt, Human
aucaucaguguagaac

SEQ ID NO: 1476049 - RNA, 13 nt, Human
aucauuacuauaa

SEQ ID NO: 1476050 - RNA, 19 nt, Human
aucauugugaaauuauuca

SEQ ID NO: 1476051 - RNA, 18 nt, Human
uucuccccugcacuguaa

SEQ ID NO: 1476052 - RNA, 19 nt, Human
uucuccccugcacuguaaa

SEQ ID NO: 1476053 - RNA, 20 nt, Human
uucuccccugcacuguaaaa

SEQ ID NO: 1476054 - RNA, 15 nt, Human
aucauugugaaauua

SEQ ID NO: 1476055 - RNA, 13 nt, Human
aucauugugaaau

SEQ ID NO: 1476056 - RNA, 20 nt, Human
aucauucuuauuucaugaaa

SEQ ID NO: 1476057 - RNA, 19 nt, Human
aucauucuuauuucaugaa

SEQ ID NO: 1476058 - RNA, 23 nt, Human
aucauucuuauuucaugaaaauu

SEQ ID NO: 1476059 - RNA, 21 nt, Human
uucuccccugcacuguaaaau

SEQ ID NO: 1476060 - RNA, 19 nt, Human
uucucccuggauuuuuacc

SEQ ID NO: 1476061 - RNA, 20 nt, Human
uucucccuggauuuuuacca

SEQ ID NO: 1476062 - RNA, 17 nt, Human
uucugaauaaagcaauu

SEQ ID NO: 1476063 - RNA, 16 nt, Human
uucugaauaaagcaau

SEQ ID NO: 1476064 - RNA, 15 nt, Human
uucugaauaaagcaa

SEQ ID NO: 1476065 - RNA, 14 nt, Human
uucugaauaaagca

SEQ ID NO: 1476066 - RNA, 19 nt, Human
uucucgcuguccuuucuag

SEQ ID NO: 1476067 - RNA, 16 nt, Human
auccaagcaaauguga

SEQ ID NO: 1476068 - RNA, 16 nt, Human
auccaacuaaugccuu

SEQ ID NO: 1476069 - RNA, 18 nt, Human
auccaacuaaugccuuac

SEQ ID NO: 1476070 - RNA, 20 nt, Human
auccaacuaaugccuuacuc

SEQ ID NO: 1476071 - RNA, 18 nt, Human
auccaagcaaaugugaau

SEQ ID NO: 1476072 - RNA, 15 nt, Human
auccaguaaaauaau

SEQ ID NO: 1476073 - RNA, 16 nt, Human
auccaguaggauccag

SEQ ID NO: 1476074 - RNA, 18 nt, Human
auccaugaccuaguuuuc

SEQ ID NO: 1476075 - RNA, 20 nt, Human
auccaugaccuaguuuucca

SEQ ID NO: 1476076 - RNA, 21 nt, Human
auccaugaccuaguuuuccau

SEQ ID NO: 1476077 - RNA, 22 nt, Human
auccaugaccuaguuuuccaug

SEQ ID NO: 1476078 - RNA, 18 nt, Human
aucccacucacaacagcu

SEQ ID NO: 1476079 - RNA, 14 nt, Human
uucuuacugcuuaa

SEQ ID NO: 1476080 - RNA, 15 nt, Human
uucuuaccuguaugu

SEQ ID NO: 1476081 - RNA, 23 nt, Human
uucuuaaccagaucauugugaaa

SEQ ID NO: 1476082 - RNA, 22 nt, Human
uucuuaaccagaucauugugaa

SEQ ID NO: 1476083 - RNA, 11 nt, Human
uucuuaaauaa

SEQ ID NO: 1476084 - RNA, 18 nt, Human
uucuuaaauaagaaacuu

SEQ ID NO: 1476085 - RNA, 19 nt, Human
uucuuaaauaagaaacuuu

SEQ ID NO: 1476086 - RNA, 16 nt, Human
uucuguuuuauaauuu

SEQ ID NO: 1476087 - RNA, 17 nt, Human
uucuguuuuauaauuuu

SEQ ID NO: 1476088 - RNA, 18 nt, Human
uucuucuauugccucuga

SEQ ID NO: 1476089 - RNA, 20 nt, Human
uucuucuauugccucugaga

SEQ ID NO: 1476090 - RNA, 15 nt, Human
uucuuucucacuaaa

SEQ ID NO: 1476091 - RNA, 17 nt, Human
aucguaaaauuaagaaa

SEQ ID NO: 1476092 - RNA, 14 nt, Human
aucguaaaauuaag

SEQ ID NO: 1476093 - RNA, 13 nt, Human
aucguaaaauuaa

SEQ ID NO: 1476094 - RNA, 12 nt, Human
aucguaaaauua

SEQ ID NO: 1476095 - RNA, 18 nt, Human
aucggggagccgggagcc

SEQ ID NO: 1476096 - RNA, 16 nt, Human
aucggggagccgggag

SEQ ID NO: 1476097 - RNA, 16 nt, Human
auccuguauucagaca

SEQ ID NO: 1476098 - RNA, 18 nt, Human
auccuguauucagacaga

SEQ ID NO: 1476099 - RNA, 20 nt, Human
auccuguauucagacagaug

SEQ ID NO: 1476100 - RNA, 21 nt, Human
auccuguauucagacagauga

SEQ ID NO: 1476101 - RNA, 21 nt, Human
auccugucgauuagacuggac

SEQ ID NO: 1476102 - RNA, 19 nt, Human
auccugucgauuagacugg

SEQ ID NO: 1476103 - RNA, 14 nt, Human
auccuguguggaga

SEQ ID NO: 1476104 - RNA, 16 nt, Human
auccuguguggagagg

SEQ ID NO: 1476105 - RNA, 18 nt, Human
auccuguguggagaggga

SEQ ID NO: 1476106 - RNA, 19 nt, Human
auccuguguggagagggaa

SEQ ID NO: 1476107 - RNA, 21 nt, Human
auccuguguggagagggaaug

SEQ ID NO: 1476108 - RNA, 23 nt, Human
auccuguguggagagggaaugug

SEQ ID NO: 1476109 - RNA, 22 nt, Human
auccuguguggagagggaaugu

SEQ ID NO: 1476110 - RNA, 14 nt, Human
auccugcuucagug

SEQ ID NO: 1476111 - RNA, 12 nt, Human
auccugcuugau

SEQ ID NO: 1476112 - RNA, 14 nt, Human
auccucuuuuucca

SEQ ID NO: 1476113 - RNA, 15 nt, Human
auccucuuuuuccaa

SEQ ID NO: 1476114 - RNA, 14 nt, Human
auccugaaauuuca

SEQ ID NO: 1476115 - RNA, 16 nt, Human
auccugaaauuucaga

SEQ ID NO: 1476116 - RNA, 17 nt, Human
auccugaaauuucagau

SEQ ID NO: 1476117 - RNA, 13 nt, Human
auccugcuaaguu

SEQ ID NO: 1476118 - RNA, 12 nt, Human
auccugccugcc

SEQ ID NO: 1476119 - RNA, 19 nt, Human
auccugaugagguuucuac

SEQ ID NO: 1476120 - RNA, 15 nt, Human
uugacauaaaguuga

SEQ ID NO: 1476121 - RNA, 19 nt, Human
uugacaguguugaaaaugu

SEQ ID NO: 1476122 - RNA, 19 nt, Human
uugacauaaaguugauaaa

SEQ ID NO: 1476123 - RNA, 19 nt, Human
uugagaaggaaaauuuuag

SEQ ID NO: 1476124 - RNA, 20 nt, Human
uugagaaggaaaauuuuagc

SEQ ID NO: 1476125 - RNA, 17 nt, Human
uugagagaagagacaaa

SEQ ID NO: 1476126 - RNA, 16 nt, Human
uugagagaauuugugc

SEQ ID NO: 1476127 - RNA, 15 nt, Human
uugagagugugacca

SEQ ID NO: 1476128 - RNA, 13 nt, Human
uugagagugugac

SEQ ID NO: 1476129 - RNA, 17 nt, Human
uugauaaagauuuuuua

SEQ ID NO: 1476130 - RNA, 20 nt, Human
uugauaaagauuuuuuaaua

SEQ ID NO: 1476131 - RNA, 22 nt, Human
uugauaaagauuuuuuaauaau

SEQ ID NO: 1476132 - RNA, 14 nt, Human
uugauaaagauuuu

SEQ ID NO: 1476133 - RNA, 18 nt, Human
uugauaagaucuuuuauu

SEQ ID NO: 1476134 - RNA, 16 nt, Human
uugauaagaucuuuua

SEQ ID NO: 1476135 - RNA, 16 nt, Human
aucuaaguuaauuuaa

SEQ ID NO: 1476136 - RNA, 17 nt, Human
aucuaaguuaauuuaaa

SEQ ID NO: 1476137 - RNA, 22 nt, Human
aucuaaacuggauucacagcuc

SEQ ID NO: 1476138 - RNA, 19 nt, Human
uugaaguuagcuuuaacuu

SEQ ID NO: 1476139 - RNA, 23 nt, Human
uugaaguuagcuuuaacuuaaau

SEQ ID NO: 1476140 - RNA, 18 nt, Human
uugaaguauuuugcugga

SEQ ID NO: 1476141 - RNA, 20 nt, Human
uguugggagagggcgcaggc

SEQ ID NO: 1476142 - RNA, 17 nt, Human
uguugggagagggcgca

SEQ ID NO: 1476143 - RNA, 19 nt, Human
uguugggagagggcgcagg

SEQ ID NO: 1476144 - RNA, 14 nt, Human
uguugggagagggc

SEQ ID NO: 1476145 - RNA, 12 nt, Human
aguuauuuaaau

SEQ ID NO: 1476146 - RNA, 21 nt, Human
aguuauuuauuuauuggagau

SEQ ID NO: 1476147 - RNA, 18 nt, Human
aguucaaauucuucugaa

SEQ ID NO: 1476148 - RNA, 13 nt, Human
aguucaacauguu

SEQ ID NO: 1476149 - RNA, 19 nt, Human
aguucaagaaauaaguuuu

SEQ ID NO: 1476150 - RNA, 13 nt, Human
aguucaagaaaua

SEQ ID NO: 1476151 - RNA, 13 nt, Human
aguuccugggaac

SEQ ID NO: 1476152 - RNA, 20 nt, Human
aguuauuauauuuacaaaug

SEQ ID NO: 1476153 - RNA, 21 nt, Human
aguuauaaguagcaggccaag

SEQ ID NO: 1476154 - RNA, 15 nt, Human
aguuaucuaaguuaa

SEQ ID NO: 1476155 - RNA, 22 nt, Human
aguuaucuaaguuaauuuaaag

SEQ ID NO: 1476156 - RNA, 20 nt, Human
aguuaugauuuuuuuuucau

SEQ ID NO: 1476157 - RNA, 19 nt, Human
aguuaugccgcuagauaca

SEQ ID NO: 1476158 - RNA, 18 nt, Human
aguuauuaaguucuuuaa

SEQ ID NO: 1476159 - RNA, 19 nt, Human
aguuauuaaguucuuuaaa

SEQ ID NO: 1476160 - RNA, 17 nt, Human
aguuacccaaauuaaga

SEQ ID NO: 1476161 - RNA, 18 nt, Human
aguuacccaaauuaagag

SEQ ID NO: 1476162 - RNA, 15 nt, Human
aguuacauguuugca

SEQ ID NO: 1476163 - RNA, 17 nt, Human
aguuaguggauuacugc

SEQ ID NO: 1476164 - RNA, 20 nt, Human
aguuaguggauuacugccau

SEQ ID NO: 1476165 - RNA, 15 nt, Human
aguggcaucaucuca

SEQ ID NO: 1476166 - RNA, 14 nt, Human
aguguaauugagaa

SEQ ID NO: 1476167 - RNA, 11 nt, Human
agugggugggg

SEQ ID NO: 1476168 - RNA, 14 nt, Human
aguggguggggagu

SEQ ID NO: 1476169 - RNA, 12 nt, Human
aguggguuuuuu

SEQ ID NO: 1476170 - RNA, 15 nt, Human
aguggguuuuuuagu

SEQ ID NO: 1476171 - RNA, 21 nt, Human
aguggguuuuuuaguugaauu

SEQ ID NO: 1476172 - RNA, 14 nt, Human
uguuauuaaacaaa

SEQ ID NO: 1476173 - RNA, 17 nt, Human
uguuauuuguaauagau

SEQ ID NO: 1476174 - RNA, 15 nt, Human
uguuaugcugugaca

SEQ ID NO: 1476175 - RNA, 17 nt, Human
uguuauguagauaacaa

SEQ ID NO: 1476176 - RNA, 16 nt, Human
uguucccauuucagcu

SEQ ID NO: 1476177 - RNA, 17 nt, Human
uguucccauuucagcug

SEQ ID NO: 1476178 - RNA, 17 nt, Human
uguucuuaccuguaugu

SEQ ID NO: 1476179 - RNA, 22 nt, Human
uguucuuaccuguaugucucca

SEQ ID NO: 1476180 - RNA, 13 nt, Human
uguuuuauaauuu

SEQ ID NO: 1476181 - RNA, 20 nt, Human
uguuuuauaauuuugugaag

SEQ ID NO: 1476182 - RNA, 12 nt, Human
uguuuucucuga

SEQ ID NO: 1476183 - RNA, 17 nt, Human
uguuuucucugaacaca

SEQ ID NO: 1476184 - RNA, 19 nt, Human
uguuugcuaagcauuccaa

SEQ ID NO: 1476185 - RNA, 20 nt, Human
uguuugcucagcuucuccaa

SEQ ID NO: 1476186 - RNA, 21 nt, Human
uguuuuacaauaguucugugg

SEQ ID NO: 1476187 - RNA, 22 nt, Human
uguuuuacaauaguucuguggg

SEQ ID NO: 1476188 - RNA, 17 nt, Human
uguuuuacaauaguucu

SEQ ID NO: 1476189 - RNA, 13 nt, Human
uguuuuacaauag

SEQ ID NO: 1476190 - RNA, 13 nt, Human
uguuuggcuuuca

SEQ ID NO: 1476191 - RNA, 14 nt, Human
uguuuggcuuucag

SEQ ID NO: 1476192 - RNA, 15 nt, Human
uguuugcuaagcauu

SEQ ID NO: 1476193 - RNA, 15 nt, Human
uguuugcaucugaaa

SEQ ID NO: 1476194 - RNA, 19 nt, Human
aguugcaacuuuguauaaa

SEQ ID NO: 1476195 - RNA, 16 nt, Human
aguugauuuucuggau

SEQ ID NO: 1476196 - RNA, 21 nt, Human
aguugauaugccuuuucccaa

SEQ ID NO: 1476197 - RNA, 13 nt, Human
aguucugaagaag

SEQ ID NO: 1476198 - RNA, 14 nt, Human
aguucugaagaaga

SEQ ID NO: 1476199 - RNA, 15 nt, Human
aguucugaagaagau

SEQ ID NO: 1476200 - RNA, 16 nt, Human
aguucugaagaagaug

SEQ ID NO: 1476201 - RNA, 17 nt, Human
aguucuuuaaaauguaa

SEQ ID NO: 1476202 - RNA, 17 nt, Human
aguucuuuggcugaaag

SEQ ID NO: 1476203 - RNA, 23 nt, Human
aguuuuauuaauaaacauucuau

SEQ ID NO: 1476204 - RNA, 20 nt, Human
aguuuuccauggcaggaagg

SEQ ID NO: 1476205 - RNA, 22 nt, Human
aguuuuccauggcaggaaggcu

SEQ ID NO: 1476206 - RNA, 16 nt, Human
aguuucguuuucaaaa

SEQ ID NO: 1476207 - RNA, 15 nt, Human
aguuucguuuucaaa

SEQ ID NO: 1476208 - RNA, 23 nt, Human
uuaaauucucucucuugcaggaa

SEQ ID NO: 1476209 - RNA, 16 nt, Human
aguuuauuuguugaga

SEQ ID NO: 1476210 - RNA, 18 nt, Human
aguuuauuuguugagagu

SEQ ID NO: 1476211 - RNA, 19 nt, Human
aguuuauuuguugagagug

SEQ ID NO: 1476212 - RNA, 23 nt, Human
aguuuauuuguugagagugugac

SEQ ID NO: 1476213 - RNA, 20 nt, Human
aguuuauuuguugagagugu

SEQ ID NO: 1476214 - RNA, 19 nt, Human
uuaaaaaagaaacauuugg

SEQ ID NO: 1476215 - RNA, 13 nt, Human
uuaaaaaacuaaa

SEQ ID NO: 1476216 - RNA, 15 nt, Human
uuaaaaaagaaacau

SEQ ID NO: 1476217 - RNA, 18 nt, Human
uuaaaaaagaaacauuug

SEQ ID NO: 1476218 - RNA, 17 nt, Human
aguugcacagcuaugaa

SEQ ID NO: 1476219 - RNA, 16 nt, Human
aguugcacagcuauga

SEQ ID NO: 1476220 - RNA, 16 nt, Human
uuaaaccgcuaaaaga

SEQ ID NO: 1476221 - RNA, 17 nt, Human
uuaaaccuauacucacu

SEQ ID NO: 1476222 - RNA, 14 nt, Human
uuaaaccuauacuc

SEQ ID NO: 1476223 - RNA, 14 nt, Human
uuaaaccuuuuuug

SEQ ID NO: 1476224 - RNA, 19 nt, Human
uuaaaccgcuaaaagaaac

SEQ ID NO: 1476225 - RNA, 22 nt, Human
uuaucaugugaaaucauucauu

SEQ ID NO: 1476226 - RNA, 20 nt, Human
uuaucaugugaaaucauuca

SEQ ID NO: 1476227 - RNA, 18 nt, Human
uuaucaugugaaaucauu

SEQ ID NO: 1476228 - RNA, 17 nt, Human
uuaucaugugaaaucau

SEQ ID NO: 1476229 - RNA, 15 nt, Human
uuaucaacuuccuaa

SEQ ID NO: 1476230 - RNA, 21 nt, Human
uuaucaacuuccuaaauauua

SEQ ID NO: 1476231 - RNA, 21 nt, Human
auaccaauaaagugacccugc

SEQ ID NO: 1476232 - RNA, 15 nt, Human
auaccaauaaaguga

SEQ ID NO: 1476233 - RNA, 14 nt, Human
auaccaauaaagug

SEQ ID NO: 1476234 - RNA, 22 nt, Human
auaccacaggaaccacaagacu

SEQ ID NO: 1476235 - RNA, 17 nt, Human
auacuaagcauugaaug

SEQ ID NO: 1476236 - RNA, 21 nt, Human
auacuaagcauugaauggcua

SEQ ID NO: 1476237 - RNA, 20 nt, Human
auacaucccuuaccugggaa

SEQ ID NO: 1476238 - RNA, 20 nt, Human
auacauuguauauaugugua

SEQ ID NO: 1476239 - RNA, 13 nt, Human
auaccaauaaagu

SEQ ID NO: 1476240 - RNA, 12 nt, Human
auaccaauaaag

SEQ ID NO: 1476241 - RNA, 17 nt, Human
auaccaaagcacauuuu

SEQ ID NO: 1476242 - RNA, 18 nt, Human
auaccaaagcacauuuua

SEQ ID NO: 1476243 - RNA, 16 nt, Human
auacauuuucuaagaa

SEQ ID NO: 1476244 - RNA, 21 nt, Human
auacaguucggugagcuacaa

SEQ ID NO: 1476245 - RNA, 18 nt, Human
auacaaaaauacucagau

SEQ ID NO: 1476246 - RNA, 19 nt, Human
auacaaaggcuuauuaauu

SEQ ID NO: 1476247 - RNA, 16 nt, Human
auacagcaacaauuua

SEQ ID NO: 1476248 - RNA, 13 nt, Human
auacagcucagaa

SEQ ID NO: 1476249 - RNA, 17 nt, Human
uuauaguacaugauaaa

SEQ ID NO: 1476250 - RNA, 16 nt, Human
uuauaguacaugauaa

SEQ ID NO: 1476251 - RNA, 13 nt, Human
uuauaguacauga

SEQ ID NO: 1476252 - RNA, 24 nt, Human
uuauaggauuuauuuaaaauagca

SEQ ID NO: 1476253 - RNA, 18 nt, Human
uuauaggauuuauuuaaa

SEQ ID NO: 1476254 - RNA, 16 nt, Human
uuauaggaucauuugu

SEQ ID NO: 1476255 - RNA, 20 nt, Human
uuauacgaguaauaugccug

SEQ ID NO: 1476256 - RNA, 15 nt, Human
uuagccccugaaagc

SEQ ID NO: 1476257 - RNA, 16 nt, Human
uuagccccugaaagcc

SEQ ID NO: 1476258 - RNA, 20 nt, Human
uuagccucaauuucugaaca

SEQ ID NO: 1476259 - RNA, 17 nt, Human
uuauaaauuucuauuuu

SEQ ID NO: 1476260 - RNA, 16 nt, Human
uuauaaccuuaauuua

SEQ ID NO: 1476261 - RNA, 19 nt, Human
uuauaaccuuaauuuauua

SEQ ID NO: 1476262 - RNA, 21 nt, Human
uuauaaccuuaauuuauuauu

SEQ ID NO: 1476263 - RNA, 16 nt, Human
uuauaacuggaaagaa

SEQ ID NO: 1476264 - RNA, 17 nt, Human
uuauaacuggaaagaag

SEQ ID NO: 1476265 - RNA, 18 nt, Human
uuauauaagcuuguauuc

SEQ ID NO: 1476266 - RNA, 15 nt, Human
uuauaguuguaacua

SEQ ID NO: 1476267 - RNA, 20 nt, Human
uuauauaaucauuauuacuu

SEQ ID NO: 1476268 - RNA, 16 nt, Human
uuauauaaucauuauu

SEQ ID NO: 1476269 - RNA, 22 nt, Human
uuauauauauuuuuuucugaaa

SEQ ID NO: 1476270 - RNA, 13 nt, Human
auaauuuugugaa

SEQ ID NO: 1476271 - RNA, 14 nt, Human
auaauuuugugaag

SEQ ID NO: 1476272 - RNA, 15 nt, Human
auaauuuugugaagc

SEQ ID NO: 1476273 - RNA, 20 nt, Human
auaauuuugugaagcaaaau

SEQ ID NO: 1476274 - RNA, 14 nt, Human
auaauuuuuauauu

SEQ ID NO: 1476275 - RNA, 16 nt, Human
auaauuuuuauauuug

SEQ ID NO: 1476276 - RNA, 19 nt, Human
auaauuuuuauauuugaaa

SEQ ID NO: 1476277 - RNA, 21 nt, Human
auaauuuuuauauuugaaaua

SEQ ID NO: 1476278 - RNA, 22 nt, Human
auaauuuuuauauuugaaauau

SEQ ID NO: 1476279 - RNA, 23 nt, Human
auaaacacucuugaaaaaugcau

SEQ ID NO: 1476280 - RNA, 17 nt, Human
aguuuucuccucccagg

SEQ ID NO: 1476281 - RNA, 16 nt, Human
aguuuuccuaugcuuu

SEQ ID NO: 1476282 - RNA, 18 nt, Human
aguuuuccuaugcuuuga

SEQ ID NO: 1476283 - RNA, 22 nt, Human
aguuuuccuaagugauuguaug

SEQ ID NO: 1476284 - RNA, 16 nt, Human
auaaaccgaacugaug

SEQ ID NO: 1476285 - RNA, 13 nt, Human
auaaacauuguau

SEQ ID NO: 1476286 - RNA, 15 nt, Human
auaaacgucuuaaau

SEQ ID NO: 1476287 - RNA, 16 nt, Human
auaaacgucuuaaaua

SEQ ID NO: 1476288 - RNA, 18 nt, Human
auaaacgucuuaaauauu

SEQ ID NO: 1476289 - RNA, 20 nt, Human
auaaagugacccugcucuca

SEQ ID NO: 1476290 - RNA, 18 nt, Human
auaaagugacccugcucu

SEQ ID NO: 1476291 - RNA, 14 nt, Human
auaaaguaucauca

SEQ ID NO: 1476292 - RNA, 15 nt, Human
auaaaguaucaucag

SEQ ID NO: 1476293 - RNA, 19 nt, Human
auaaauaaaguuuguugaa

SEQ ID NO: 1476294 - RNA, 13 nt, Human
auaaauaaaguuu

SEQ ID NO: 1476295 - RNA, 12 nt, Human
auaacuggaaac

SEQ ID NO: 1476296 - RNA, 15 nt, Human
auaacuggaaagaag

SEQ ID NO: 1476297 - RNA, 13 nt, Human
auaacugaaaaug

SEQ ID NO: 1476298 - RNA, 15 nt, Human
auaacugaaaaugug

SEQ ID NO: 1476299 - RNA, 14 nt, Human
auaacugaaaauua

SEQ ID NO: 1476300 - RNA, 17 nt, Human
auaacugaaaauuauuu

SEQ ID NO: 1476301 - RNA, 20 nt, Human
auaacugaaaauuauuuaaa

SEQ ID NO: 1476302 - RNA, 21 nt, Human
auaacugaaaauuauuuaaac

SEQ ID NO: 1476303 - RNA, 16 nt, Human
uuacaugauucauuuu

SEQ ID NO: 1476304 - RNA, 17 nt, Human
uuacaugauucauuuua

SEQ ID NO: 1476305 - RNA, 22 nt, Human
uuacaugcauuacugcaugcac

SEQ ID NO: 1476306 - RNA, 22 nt, Human
auaaguuuauuucuuaaaucua

SEQ ID NO: 1476307 - RNA, 18 nt, Human
auaaguuuauuucuuaaa

SEQ ID NO: 1476308 - RNA, 14 nt, Human
auaaguuuauuucu

SEQ ID NO: 1476309 - RNA, 12 nt, Human
auaaguuuauuu

SEQ ID NO: 1476310 - RNA, 14 nt, Human
auaauaauuaguaa

SEQ ID NO: 1476311 - RNA, 18 nt, Human
auaaguucaaauucuucu

SEQ ID NO: 1476312 - RNA, 20 nt, Human
auaaguucaaauucuucuga

SEQ ID NO: 1476313 - RNA, 21 nt, Human
auaaguucaaauucuucugaa

SEQ ID NO: 1476314 - RNA, 24 nt, Human
auaaguucaaauucuucugaacuc

SEQ ID NO: 1476315 - RNA, 20 nt, Human
auaagcaaaaacaaaaagaa

SEQ ID NO: 1476316 - RNA, 20 nt, Human
auaagaagaaugcuuaauca

SEQ ID NO: 1476317 - RNA, 19 nt, Human
auaagaagaaugcuuaauc

SEQ ID NO: 1476318 - RNA, 16 nt, Human
auaagaacuuugagcu

SEQ ID NO: 1476319 - RNA, 11 nt, Human
auaagaagaau

SEQ ID NO: 1476320 - RNA, 13 nt, Human
auaagaagaaugc

SEQ ID NO: 1476321 - RNA, 15 nt, Human
auaagaagaaugcuu

SEQ ID NO: 1476322 - RNA, 16 nt, Human
auaagcaagaaggcaa

SEQ ID NO: 1476323 - RNA, 21 nt, Human
auaagcaagaaggcaaaaaua

SEQ ID NO: 1476324 - RNA, 23 nt, Human
auaagcaagaaggcaaaaauagu

SEQ ID NO: 1476325 - RNA, 12 nt, Human
uuaccugggaaa

SEQ ID NO: 1476326 - RNA, 23 nt, Human
uuagaugcaguucugaagaagau

SEQ ID NO: 1476327 - RNA, 22 nt, Human
uuagaugcaguucugaagaaga

SEQ ID NO: 1476328 - RNA, 13 nt, Human
uuagauuugugug

SEQ ID NO: 1476329 - RNA, 17 nt, Human
auaauccaguaaaauaa

SEQ ID NO: 1476330 - RNA, 17 nt, Human
auaaugaacagaacaua

SEQ ID NO: 1476331 - RNA, 21 nt, Human
auaaucuuucacaggggacag

SEQ ID NO: 1476332 - RNA, 21 nt, Human
auaaucauuauuacuuuugcu

SEQ ID NO: 1476333 - RNA, 22 nt, Human
auaaucauuauuacuuuugcug

SEQ ID NO: 1476334 - RNA, 16 nt, Human
auaaucacgcuuuccu

SEQ ID NO: 1476335 - RNA, 18 nt, Human
auaaucacgcuuuccuga

SEQ ID NO: 1476336 - RNA, 14 nt, Human
auaaugaauacuuu

SEQ ID NO: 1476337 - RNA, 13 nt, Human
auaaugaacagaa

SEQ ID NO: 1476338 - RNA, 21 nt, Human
aggggcuuauaauaaaggacu

SEQ ID NO: 1476339 - RNA, 12 nt, Human
aggggcuucagg

SEQ ID NO: 1476340 - RNA, 15 nt, Human
aggggcuucaggucc

SEQ ID NO: 1476341 - RNA, 21 nt, Human
aggggcuggggacuugugucu

SEQ ID NO: 1476342 - RNA, 18 nt, Human
aggggcuggggacuugug

SEQ ID NO: 1476343 - RNA, 16 nt, Human
aggggcuucaggucca

SEQ ID NO: 1476344 - RNA, 14 nt, Human
aggggcuggggacu

SEQ ID NO: 1476345 - RNA, 12 nt, Human
aggggaccagga

SEQ ID NO: 1476346 - RNA, 13 nt, Human
aggggaccaggag

SEQ ID NO: 1476347 - RNA, 14 nt, Human
aggggaccaggagu

SEQ ID NO: 1476348 - RNA, 15 nt, Human
aggggaccaggagug

SEQ ID NO: 1476349 - RNA, 16 nt, Human
aggggaccaggagugg

SEQ ID NO: 1476350 - RNA, 22 nt, Human
aggggaccaggagugggugggg

SEQ ID NO: 1476351 - RNA, 17 nt, Human
aggggaccaggaguggg

SEQ ID NO: 1476352 - RNA, 20 nt, Human
aggggaccaggagugggugg

SEQ ID NO: 1476353 - RNA, 17 nt, Human
aggggaggcaucagugu

SEQ ID NO: 1476354 - RNA, 15 nt, Human
aggguaccagcagaa

SEQ ID NO: 1476355 - RNA, 14 nt, Human
aggguaccagcaga

SEQ ID NO: 1476356 - RNA, 13 nt, Human
aggguaggcagga

SEQ ID NO: 1476357 - RNA, 15 nt, Human
aggguaggcaggauu

SEQ ID NO: 1476358 - RNA, 16 nt, Human
aggguaggcaggauug

SEQ ID NO: 1476359 - RNA, 18 nt, Human
aggguaggcaggauuggg

SEQ ID NO: 1476360 - RNA, 23 nt, Human
agggggggguauuucaauuaccu

SEQ ID NO: 1476361 - RNA, 19 nt, Human
uggucacguuuggugcuuc

SEQ ID NO: 1476362 - RNA, 18 nt, Human
uggucauuuuauguuaag

SEQ ID NO: 1476363 - RNA, 21 nt, Human
ugguccaaaagauugcugaaa

SEQ ID NO: 1476364 - RNA, 23 nt, Human
ugguccaaaagauugcugaaauu

SEQ ID NO: 1476365 - RNA, 15 nt, Human
ugguacaugguguuu

SEQ ID NO: 1476366 - RNA, 18 nt, Human
ugguacaugguguuugug

SEQ ID NO: 1476367 - RNA, 14 nt, Human
ugguaauuguacua

SEQ ID NO: 1476368 - RNA, 13 nt, Human
ugguaauuguugc

SEQ ID NO: 1476369 - RNA, 14 nt, Human
ugguaaaacacuug

SEQ ID NO: 1476370 - RNA, 14 nt, Human
agggugcugacugg

SEQ ID NO: 1476371 - RNA, 22 nt, Human
ugguccaugggccauaugaaaa

SEQ ID NO: 1476372 - RNA, 17 nt, Human
uggucugguugggcagc

SEQ ID NO: 1476373 - RNA, 16 nt, Human
uggucugguugggcag

SEQ ID NO: 1476374 - RNA, 15 nt, Human
aggucagugcaaaua

SEQ ID NO: 1476375 - RNA, 16 nt, Human
aggugaaacauuuucu

SEQ ID NO: 1476376 - RNA, 15 nt, Human
aggguuucaccaugu

SEQ ID NO: 1476377 - RNA, 22 nt, Human
aggguuucccuacugaagcccu

SEQ ID NO: 1476378 - RNA, 15 nt, Human
aggguuucauugucu

SEQ ID NO: 1476379 - RNA, 21 nt, Human
aggguuucccuacugaagccc

SEQ ID NO: 1476380 - RNA, 22 nt, Human
agguagaauuaucuaauuuaua

SEQ ID NO: 1476381 - RNA, 15 nt, Human
aggguuugugacagg

SEQ ID NO: 1476382 - RNA, 14 nt, Human
agguauuuaucuuu

SEQ ID NO: 1476383 - RNA, 15 nt, Human
agguauaccucacuu

SEQ ID NO: 1476384 - RNA, 18 nt, Human
ugguuuuaguugcaacuu

SEQ ID NO: 1476385 - RNA, 19 nt, Human
ugguuuucuccaagagcua

SEQ ID NO: 1476386 - RNA, 20 nt, Human
ugguuuucuccaagagcuac

SEQ ID NO: 1476387 - RNA, 23 nt, Human
ugguuugaagaauguuaagacuu

SEQ ID NO: 1476388 - RNA, 16 nt, Human
uguaaaggaauuuaaa

SEQ ID NO: 1476389 - RNA, 13 nt, Human
uguaaagccaugc

SEQ ID NO: 1476390 - RNA, 12 nt, Human
uguaaagcuaaa

SEQ ID NO: 1476391 - RNA, 16 nt, Human
uguaaagcuaaaauaa

SEQ ID NO: 1476392 - RNA, 17 nt, Human
uguaaagcuaaaauaaa

SEQ ID NO: 1476393 - RNA, 20 nt, Human
uguaaagcuaaaauaaagaa

SEQ ID NO: 1476394 - RNA, 21 nt, Human
uguaaagcuaaaauaaagaaa

SEQ ID NO: 1476395 - RNA, 18 nt, Human
uguaaagauauuuuuauc

SEQ ID NO: 1476396 - RNA, 13 nt, Human
uguaaagcuuguc

SEQ ID NO: 1476397 - RNA, 18 nt, Human
uguaaauauuuuaaagaa

SEQ ID NO: 1476398 - RNA, 20 nt, Human
uguaaauauuuuaaagaauu

SEQ ID NO: 1476399 - RNA, 22 nt, Human
uguaaauauuuuaaagaauugu

SEQ ID NO: 1476400 - RNA, 14 nt, Human
uguaaauauugugu

SEQ ID NO: 1476401 - RNA, 15 nt, Human
uguaaauauugugug

SEQ ID NO: 1476402 - RNA, 14 nt, Human
uguaaauauuuuaa

SEQ ID NO: 1476403 - RNA, 17 nt, Human
uguaaauauuuuaaaga

SEQ ID NO: 1476404 - RNA, 16 nt, Human
ugguucagcuaagcua

SEQ ID NO: 1476405 - RNA, 15 nt, Human
ugguucacacugacc

SEQ ID NO: 1476406 - RNA, 22 nt, Human
ugguguugccaguuguccuccu

SEQ ID NO: 1476407 - RNA, 20 nt, Human
ugguguugccaguuguccuc

SEQ ID NO: 1476408 - RNA, 17 nt, Human
aggugaaacauuuucuc

SEQ ID NO: 1476409 - RNA, 19 nt, Human
uguacuugcucuugaugcc

SEQ ID NO: 1476410 - RNA, 17 nt, Human
uguagaaccuaauucaa

SEQ ID NO: 1476411 - RNA, 15 nt, Human
uguacuugcucuuga

SEQ ID NO: 1476412 - RNA, 21 nt, Human
uguagaagucacauuccugaa

SEQ ID NO: 1476413 - RNA, 16 nt, Human
uguagaaugauuucau

SEQ ID NO: 1476414 - RNA, 17 nt, Human
uguagaaugauuucaug

SEQ ID NO: 1476415 - RNA, 18 nt, Human
uguagaaugauuucaugc

SEQ ID NO: 1476416 - RNA, 15 nt, Human
uguaaggcaaucaug

SEQ ID NO: 1476417 - RNA, 22 nt, Human
uguacaaaauaaacaaauaaca

SEQ ID NO: 1476418 - RNA, 18 nt, Human
uguaagaaaauaucacuu

SEQ ID NO: 1476419 - RNA, 12 nt, Human
uguaagaaaccu

SEQ ID NO: 1476420 - RNA, 16 nt, Human
uguaagcugaaaauau

SEQ ID NO: 1476421 - RNA, 14 nt, Human
uguaagcugaaaau

SEQ ID NO: 1476422 - RNA, 21 nt, Human
uguaagaacaacuaccugagc

SEQ ID NO: 1476423 - RNA, 12 nt, Human
agguugucugug

SEQ ID NO: 1476424 - RNA, 18 nt, Human
agguggguugaaagccaa

SEQ ID NO: 1476425 - RNA, 21 nt, Human
agugagcagucaggaaagaga

SEQ ID NO: 1476426 - RNA, 22 nt, Human
agugagagacauuaacucauua

SEQ ID NO: 1476427 - RNA, 13 nt, Human
agugagagacauu

SEQ ID NO: 1476428 - RNA, 21 nt, Human
agugagagacauuaacucauu

SEQ ID NO: 1476429 - RNA, 21 nt, Human
agugagagaguggcuggggca

SEQ ID NO: 1476430 - RNA, 14 nt, Human
ugugauucaaucug

SEQ ID NO: 1476431 - RNA, 20 nt, Human
agugaaacucguuaauuugu

SEQ ID NO: 1476432 - RNA, 20 nt, Human
agugagaccuuccuuuuacu

SEQ ID NO: 1476433 - RNA, 18 nt, Human
agucuuacucuguugcca

SEQ ID NO: 1476434 - RNA, 22 nt, Human
agucuuaauauauauauccaga

SEQ ID NO: 1476435 - RNA, 12 nt, Human
agucuuccugac

SEQ ID NO: 1476436 - RNA, 15 nt, Human
agucuuccugacacu

SEQ ID NO: 1476437 - RNA, 16 nt, Human
agucuuccugacacuu

SEQ ID NO: 1476438 - RNA, 17 nt, Human
agucuuccugacacuuu

SEQ ID NO: 1476439 - RNA, 18 nt, Human
agucuuccugacacuuua

SEQ ID NO: 1476440 - RNA, 19 nt, Human
agucuuccugacacuuuaa

SEQ ID NO: 1476441 - RNA, 19 nt, Human
agucuccaaagucucugga

SEQ ID NO: 1476442 - RNA, 23 nt, Human
agucucugaggggcuaccaggaa

SEQ ID NO: 1476443 - RNA, 22 nt, Human
agucucugaggggcuaccagga

SEQ ID NO: 1476444 - RNA, 16 nt, Human
agucucugaggggcua

SEQ ID NO: 1476445 - RNA, 14 nt, Human
ugugaagcaaaauu

SEQ ID NO: 1476446 - RNA, 22 nt, Human
ugucucuggauuauauuaugaa

SEQ ID NO: 1476447 - RNA, 12 nt, Human
ugucucucauga

SEQ ID NO: 1476448 - RNA, 13 nt, Human
agucccugccugg

SEQ ID NO: 1476449 - RNA, 18 nt, Human
ugucucugcaaacugccu

SEQ ID NO: 1476450 - RNA, 13 nt, Human
ugucucuucugag

SEQ ID NO: 1476451 - RNA, 16 nt, Human
ugucucuucugagcua

SEQ ID NO: 1476452 - RNA, 22 nt, Human
ugugaacaguuguguuugaagc

SEQ ID NO: 1476453 - RNA, 23 nt, Human
agguuuggacaaaauggaauacu

SEQ ID NO: 1476454 - RNA, 22 nt, Human
aguagcguuuuuuaaauguaua

SEQ ID NO: 1476455 - RNA, 21 nt, Human
aguagcguuuuuuaaauguau

SEQ ID NO: 1476456 - RNA, 11 nt, Human
uguauuaugug

SEQ ID NO: 1476457 - RNA, 21 nt, Human
aguauuuaauucauguugccu

SEQ ID NO: 1476458 - RNA, 15 nt, Human
aguauuguccagguc

SEQ ID NO: 1476459 - RNA, 16 nt, Human
aguauuguccaggucu

SEQ ID NO: 1476460 - RNA, 18 nt, Human
agucacauuccugaacag

SEQ ID NO: 1476461 - RNA, 18 nt, Human
aguauguuagugcaaauu

SEQ ID NO: 1476462 - RNA, 21 nt, Human
aguauguuagugcaaauuguc

SEQ ID NO: 1476463 - RNA, 15 nt, Human
agucagucauucaga

SEQ ID NO: 1476464 - RNA, 21 nt, Human
agucagucauucagauaugau

SEQ ID NO: 1476465 - RNA, 18 nt, Human
agucccaucccugcguga

SEQ ID NO: 1476466 - RNA, 22 nt, Human
aguccccacagauaacugaaaa

SEQ ID NO: 1476467 - RNA, 16 nt, Human
aguccaucagccucca

SEQ ID NO: 1476468 - RNA, 13 nt, Human
aguccaucagccu

SEQ ID NO: 1476469 - RNA, 14 nt, Human
aguccaucagccuc

SEQ ID NO: 1476470 - RNA, 15 nt, Human
uguccuguaaagguu

SEQ ID NO: 1476471 - RNA, 22 nt, Human
uguccuguaaagguuacaagcc

SEQ ID NO: 1476472 - RNA, 23 nt, Human
agcuggagaugaggccagaccau

SEQ ID NO: 1476473 - RNA, 22 nt, Human
agcuggagaugaggccagacca

SEQ ID NO: 1476474 - RNA, 21 nt, Human
agcuggagaugaggccagacc

SEQ ID NO: 1476475 - RNA, 20 nt, Human
agcuggagaugaggccagac

SEQ ID NO: 1476476 - RNA, 19 nt, Human
agcuggagaugaggccaga

SEQ ID NO: 1476477 - RNA, 14 nt, Human
agcuggagugcagu

SEQ ID NO: 1476478 - RNA, 18 nt, Human
agcuggagaugaggccag

SEQ ID NO: 1476479 - RNA, 13 nt, Human
agcuggaaaagua

SEQ ID NO: 1476480 - RNA, 23 nt, Human
ugccucucugcaggucccuaaua

SEQ ID NO: 1476481 - RNA, 15 nt, Human
ugccucucugcaggu

SEQ ID NO: 1476482 - RNA, 17 nt, Human
ugccugcuauuugaagu

SEQ ID NO: 1476483 - RNA, 12 nt, Human
ugccucucugca

SEQ ID NO: 1476484 - RNA, 11 nt, Human
ugccucucugc

SEQ ID NO: 1476485 - RNA, 18 nt, Human
ugccucagaaaacaagga

SEQ ID NO: 1476486 - RNA, 14 nt, Human
ugccucacuucagg

SEQ ID NO: 1476487 - RNA, 14 nt, Human
ugcccuucuccuua

SEQ ID NO: 1476488 - RNA, 22 nt, Human
ugcccugccaccugucugucug

SEQ ID NO: 1476489 - RNA, 21 nt, Human
ugcccugccaccugucugucu

SEQ ID NO: 1476490 - RNA, 20 nt, Human
ugcccugccaccugucuguc

SEQ ID NO: 1476491 - RNA, 19 nt, Human
ugcccugccaccugucugu

SEQ ID NO: 1476492 - RNA, 17 nt, Human
ugcccugccaccugucu

SEQ ID NO: 1476493 - RNA, 16 nt, Human
ugcccugccaccuguc

SEQ ID NO: 1476494 - RNA, 15 nt, Human
ugcccugccaccugu

SEQ ID NO: 1476495 - RNA, 14 nt, Human
ugcccugccaccug

SEQ ID NO: 1476496 - RNA, 22 nt, Human
ugcccucccccuccucuccacc

SEQ ID NO: 1476497 - RNA, 21 nt, Human
agcuccuugagggcaagagcc

SEQ ID NO: 1476498 - RNA, 22 nt, Human
agcuccuugagggcaagagcca

SEQ ID NO: 1476499 - RNA, 13 nt, Human
agcucuucauguu

SEQ ID NO: 1476500 - RNA, 16 nt, Human
agcucuucauguuuca

SEQ ID NO: 1476501 - RNA, 16 nt, Human
ugcauuuauauguacc

SEQ ID NO: 1476502 - RNA, 19 nt, Human
ugcauuuaugagcucuuca

SEQ ID NO: 1476503 - RNA, 14 nt, Human
ugcauuuauaugua

SEQ ID NO: 1476504 - RNA, 13 nt, Human
ugcauuuauaugu

SEQ ID NO: 1476505 - RNA, 12 nt, Human
agccuucucugu

SEQ ID NO: 1476506 - RNA, 20 nt, Human
agccuugauugguguugcca

SEQ ID NO: 1476507 - RNA, 19 nt, Human
agccuugauugguguugcc

SEQ ID NO: 1476508 - RNA, 20 nt, Human
ugcauuuaugagcucuucau

SEQ ID NO: 1476509 - RNA, 15 nt, Human
agcuccaagaauuuc

SEQ ID NO: 1476510 - RNA, 18 nt, Human
agcuccaagaauuucuag

SEQ ID NO: 1476511 - RNA, 18 nt, Human
agcucaggaugagggaaa

SEQ ID NO: 1476512 - RNA, 22 nt, Human
agcucaggaugagggaaaagaa

SEQ ID NO: 1476513 - RNA, 17 nt, Human
agcuaucguaaaauuaa

SEQ ID NO: 1476514 - RNA, 15 nt, Human
agcuacauaauuuag

SEQ ID NO: 1476515 - RNA, 16 nt, Human
ugccccauucaacauc

SEQ ID NO: 1476516 - RNA, 21 nt, Human
ugcccccaaccauuuccucag

SEQ ID NO: 1476517 - RNA, 16 nt, Human
ugcccccaaccauuuc

SEQ ID NO: 1476518 - RNA, 21 nt, Human
ugcccccuaauccccuucucc

SEQ ID NO: 1476519 - RNA, 23 nt, Human
ugcccccuaauccccuucucccc

SEQ ID NO: 1476520 - RNA, 20 nt, Human
ugcccaaauccuuagaucug

SEQ ID NO: 1476521 - RNA, 23 nt, Human
agccucagcucucaguugcagcc

SEQ ID NO: 1476522 - RNA, 23 nt, Human
agccucacuuuuaaugaacaaau

SEQ ID NO: 1476523 - RNA, 22 nt, Human
agccucacuuuuaaugaacaaa

SEQ ID NO: 1476524 - RNA, 15 nt, Human
agcccuuuugucucu

SEQ ID NO: 1476525 - RNA, 14 nt, Human
agcccuuuugucuc

SEQ ID NO: 1476526 - RNA, 15 nt, Human
agccucaauuucuga

SEQ ID NO: 1476527 - RNA, 22 nt, Human
agccucugcagcggaaucuguu

SEQ ID NO: 1476528 - RNA, 13 nt, Human
agccucugggggg

SEQ ID NO: 1476529 - RNA, 20 nt, Human
agccucugggggguggccag

SEQ ID NO: 1476530 - RNA, 21 nt, Human
agccucugggggguggccagg

SEQ ID NO: 1476531 - RNA, 22 nt, Human
agccucugggggguggccaggc

SEQ ID NO: 1476532 - RNA, 14 nt, Human
ugcagacucacugu

SEQ ID NO: 1476533 - RNA, 21 nt, Human
agcccuugugaaucaaggguc

SEQ ID NO: 1476534 - RNA, 23 nt, Human
agcccauucauuccauucuggaa

SEQ ID NO: 1476535 - RNA, 22 nt, Human
agcccauucauuccauucugga

SEQ ID NO: 1476536 - RNA, 17 nt, Human
agcccauucauuccauu

SEQ ID NO: 1476537 - RNA, 14 nt, Human
agcccauucauucc

SEQ ID NO: 1476538 - RNA, 21 nt, Human
agcccaggauacuggcacaga

SEQ ID NO: 1476539 - RNA, 23 nt, Human
agcccaggauacuggcacagagg

SEQ ID NO: 1476540 - RNA, 19 nt, Human
agcccaggauacuggcaca

SEQ ID NO: 1476541 - RNA, 15 nt, Human
ugauuuguacugaaa

SEQ ID NO: 1476542 - RNA, 18 nt, Human
ugauuuguacugaaaaau

SEQ ID NO: 1476543 - RNA, 22 nt, Human
ugcaaaccugaccccugcucag

SEQ ID NO: 1476544 - RNA, 23 nt, Human
ugcaaaccugaccccugcucagu

SEQ ID NO: 1476545 - RNA, 17 nt, Human
agcccugggaggcucug

SEQ ID NO: 1476546 - RNA, 19 nt, Human
agcccugcugcugccugcc

SEQ ID NO: 1476547 - RNA, 18 nt, Human
agcccugcugcugccugc

SEQ ID NO: 1476548 - RNA, 20 nt, Human
agcccugcugcugccugccu

SEQ ID NO: 1476549 - RNA, 16 nt, Human
agccccugaaagccau

SEQ ID NO: 1476550 - RNA, 14 nt, Human
agccccugaaagcc

SEQ ID NO: 1476551 - RNA, 16 nt, Human
agcccacuguacuugc

SEQ ID NO: 1476552 - RNA, 20 nt, Human
agccauggagauucucauaa

SEQ ID NO: 1476553 - RNA, 14 nt, Human
agcccacuguacuu

SEQ ID NO: 1476554 - RNA, 18 nt, Human
agccaugcuggaaaauaa

SEQ ID NO: 1476555 - RNA, 19 nt, Human
agccauggagauucucaua

SEQ ID NO: 1476556 - RNA, 22 nt, Human
agccauggagauucucauaacu

SEQ ID NO: 1476557 - RNA, 17 nt, Human
agccaucaagagacuga

SEQ ID NO: 1476558 - RNA, 14 nt, Human
agccaucaccuuag

SEQ ID NO: 1476559 - RNA, 18 nt, Human
agccaucaccuuagacca

SEQ ID NO: 1476560 - RNA, 11 nt, Human
ugauuucuagg

SEQ ID NO: 1476561 - RNA, 22 nt, Human
ugauuucaguagcacaaguuau

SEQ ID NO: 1476562 - RNA, 16 nt, Human
ugauuuacgcucauug

SEQ ID NO: 1476563 - RNA, 19 nt, Human
ugauucaugccaauuagca

SEQ ID NO: 1476564 - RNA, 17 nt, Human
ugauucauuuuaacauc

SEQ ID NO: 1476565 - RNA, 17 nt, Human
ugauggagaaggaaggc

SEQ ID NO: 1476566 - RNA, 14 nt, Human
ugaugggauuuggu

SEQ ID NO: 1476567 - RNA, 16 nt, Human
ugaugggauucuggac

SEQ ID NO: 1476568 - RNA, 17 nt, Human
ugaugggauucuggaca

SEQ ID NO: 1476569 - RNA, 16 nt, Human
ugauggagaaggaagg

SEQ ID NO: 1476570 - RNA, 15 nt, Human
ugauggagaaggaag

SEQ ID NO: 1476571 - RNA, 14 nt, Human
ugauggagaaggaa

SEQ ID NO: 1476572 - RNA, 13 nt, Human
ugauggagaagga

SEQ ID NO: 1476573 - RNA, 12 nt, Human
ugauggagaagg

SEQ ID NO: 1476574 - RNA, 11 nt, Human
ugaugaagaag

SEQ ID NO: 1476575 - RNA, 12 nt, Human
ugaugaagaagu

SEQ ID NO: 1476576 - RNA, 23 nt, Human
ugauuaaguaaugauaacuggaa

SEQ ID NO: 1476577 - RNA, 18 nt, Human
ugauuaaguaaugauaac

SEQ ID NO: 1476578 - RNA, 24 nt, Human
ugaugggauucuggacaggaugug

SEQ ID NO: 1476579 - RNA, 12 nt, Human
uggcugcaugcg

SEQ ID NO: 1476580 - RNA, 19 nt, Human
uggcugcaggaaucuuuaa

SEQ ID NO: 1476581 - RNA, 14 nt, Human
uggcugauaauuuu

SEQ ID NO: 1476582 - RNA, 19 nt, Human
uggcugauaauuuuaaauu

SEQ ID NO: 1476583 - RNA, 19 nt, Human
uggcugcauaaauguggua

SEQ ID NO: 1476584 - RNA, 22 nt, Human
aggcugggaauggaggggcaga

SEQ ID NO: 1476585 - RNA, 15 nt, Human
uggcuaguccuuguu

SEQ ID NO: 1476586 - RNA, 13 nt, Human
uggcuauguuuuu

SEQ ID NO: 1476587 - RNA, 17 nt, Human
uggcuauguuuuuaaug

SEQ ID NO: 1476588 - RNA, 18 nt, Human
uggcuauguuuuuaaugu

SEQ ID NO: 1476589 - RNA, 12 nt, Human
uggcuauuuuau

SEQ ID NO: 1476590 - RNA, 19 nt, Human
aggcucuggagcccacugu

SEQ ID NO: 1476591 - RNA, 18 nt, Human
aggcucuggagcccacug

SEQ ID NO: 1476592 - RNA, 15 nt, Human
aggcucuggagccca

SEQ ID NO: 1476593 - RNA, 14 nt, Human
aggcucuggagccc

SEQ ID NO: 1476594 - RNA, 13 nt, Human
aggcucuggagcc

SEQ ID NO: 1476595 - RNA, 21 nt, Human
aggcuggccuauguggucuaa

SEQ ID NO: 1476596 - RNA, 17 nt, Human
aggccugguguuucuug

SEQ ID NO: 1476597 - RNA, 18 nt, Human
uggacgagaaaacaauaa

SEQ ID NO: 1476598 - RNA, 15 nt, Human
aggcauuuuuaccau

SEQ ID NO: 1476599 - RNA, 18 nt, Human
aggccaagucaggcccuu

SEQ ID NO: 1476600 - RNA, 18 nt, Human
aggccagaccauggacac

SEQ ID NO: 1476601 - RNA, 17 nt, Human
aggccagaccauggaca

SEQ ID NO: 1476602 - RNA, 16 nt, Human
aggccagaccauggac

SEQ ID NO: 1476603 - RNA, 20 nt, Human
uggccagucuggucucgaac

SEQ ID NO: 1476604 - RNA, 20 nt, Human
uggccaggcuugucucgaac

SEQ ID NO: 1476605 - RNA, 22 nt, Human
uggccaaugcaccuaaagaaaa

SEQ ID NO: 1476606 - RNA, 17 nt, Human
aggccauucuuucccaa

SEQ ID NO: 1476607 - RNA, 18 nt, Human
aggccauucuuucccaac

SEQ ID NO: 1476608 - RNA, 19 nt, Human
aggccauucuuucccaaca

SEQ ID NO: 1476609 - RNA, 14 nt, Human
aggccuccuggcug

SEQ ID NO: 1476610 - RNA, 23 nt, Human
aggccuccuggcugucugaggcu

SEQ ID NO: 1476611 - RNA, 18 nt, Human
uggaauuggagcucgugg

SEQ ID NO: 1476612 - RNA, 17 nt, Human
uggaauugggagcuugg

SEQ ID NO: 1476613 - RNA, 17 nt, Human
aggcaaaauccuugcuu

SEQ ID NO: 1476614 - RNA, 19 nt, Human
aggcaaaauccuugcuuau

SEQ ID NO: 1476615 - RNA, 21 nt, Human
aggauuuuuuuuaauguuuaa

SEQ ID NO: 1476616 - RNA, 22 nt, Human
aggaugagggaaaagaaaaaga

SEQ ID NO: 1476617 - RNA, 14 nt, Human
uggaccuaauccaa

SEQ ID NO: 1476618 - RNA, 22 nt, Human
uggaccuaauccaagcaucccu

SEQ ID NO: 1476619 - RNA, 15 nt, Human
uggaccucaccaagc

SEQ ID NO: 1476620 - RNA, 16 nt, Human
uggaccagccucucca

SEQ ID NO: 1476621 - RNA, 22 nt, Human
uggaccagccucuccacucaug

SEQ ID NO: 1476622 - RNA, 14 nt, Human
aggaggcagagaag

SEQ ID NO: 1476623 - RNA, 18 nt, Human
uggaaauucccuucaucu

SEQ ID NO: 1476624 - RNA, 17 nt, Human
uggaaauugauuuugaa

SEQ ID NO: 1476625 - RNA, 22 nt, Human
uggaaauucccuucaucuggaa

SEQ ID NO: 1476626 - RNA, 17 nt, Human
uggaaauucccuucauc

SEQ ID NO: 1476627 - RNA, 15 nt, Human
aggaguuuugcaaag

SEQ ID NO: 1476628 - RNA, 13 nt, Human
aggacuugugucu

SEQ ID NO: 1476629 - RNA, 16 nt, Human
aggacuugugucucug

SEQ ID NO: 1476630 - RNA, 19 nt, Human
aggacugaauuaugaaacu

SEQ ID NO: 1476631 - RNA, 20 nt, Human
aggacugaauuaugaaacuu

SEQ ID NO: 1476632 - RNA, 18 nt, Human
aggagcccugggaggcuc

SEQ ID NO: 1476633 - RNA, 20 nt, Human
aggacuuuauagaucagcca

SEQ ID NO: 1476634 - RNA, 21 nt, Human
aggacuuuauagaucagccag

SEQ ID NO: 1476635 - RNA, 23 nt, Human
aggagcccugggaggcucuggag

SEQ ID NO: 1476636 - RNA, 19 nt, Human
aggagcccugggaggcucu

SEQ ID NO: 1476637 - RNA, 11 nt, Human
aggagccuggc

SEQ ID NO: 1476638 - RNA, 13 nt, Human
uggaaaggcagcu

SEQ ID NO: 1476639 - RNA, 14 nt, Human
uggaaauacacagu

SEQ ID NO: 1476640 - RNA, 15 nt, Human
uggaaauacacagug

SEQ ID NO: 1476641 - RNA, 14 nt, Human
ugcuuuucauccuu

SEQ ID NO: 1476642 - RNA, 24 nt, Human
ugcuuuuaguauuuuagugaacuu

SEQ ID NO: 1476643 - RNA, 12 nt, Human
ugcuuuguauug

SEQ ID NO: 1476644 - RNA, 20 nt, Human
aggaauuuuauuuuuuucug

SEQ ID NO: 1476645 - RNA, 18 nt, Human
ugcuguccgguggagauc

SEQ ID NO: 1476646 - RNA, 14 nt, Human
ugcuucaucccuuu

SEQ ID NO: 1476647 - RNA, 14 nt, Human
aggacacugauaug

SEQ ID NO: 1476648 - RNA, 22 nt, Human
aggacaucagcaaacaggauca

SEQ ID NO: 1476649 - RNA, 16 nt, Human
aggacaucagcaaaca

SEQ ID NO: 1476650 - RNA, 15 nt, Human
aggacaucagcaaac

SEQ ID NO: 1476651 - RNA, 14 nt, Human
aggacaucagcaaa

SEQ ID NO: 1476652 - RNA, 13 nt, Human
aggacaucagcaa

SEQ ID NO: 1476653 - RNA, 12 nt, Human
aggacaucagca

SEQ ID NO: 1476654 - RNA, 17 nt, Human
aggacacugauaugggu

SEQ ID NO: 1476655 - RNA, 20 nt, Human
aggacaggauccaggccggc

SEQ ID NO: 1476656 - RNA, 14 nt, Human
aggacaggauccag

SEQ ID NO: 1476657 - RNA, 21 nt, Human
ugcuuaugacaucacuuguac

SEQ ID NO: 1476658 - RNA, 21 nt, Human
ugcuuaugguaccagaugcag

SEQ ID NO: 1476659 - RNA, 14 nt, Human
ugcuuaugguacca

SEQ ID NO: 1476660 - RNA, 19 nt, Human
agcuggagugcaguggcau

SEQ ID NO: 1476661 - RNA, 15 nt, Human
agcuggagugcagug

SEQ ID NO: 1476662 - RNA, 13 nt, Human
ugcugacccuccc

SEQ ID NO: 1476663 - RNA, 17 nt, Human
ugcugacccuccccaaa

SEQ ID NO: 1476664 - RNA, 13 nt, Human
ugcuccccacguc

SEQ ID NO: 1476665 - RNA, 20 nt, Human
aggaaggaggacccaggaca

SEQ ID NO: 1476666 - RNA, 19 nt, Human
aggaaggaggacccaggac

SEQ ID NO: 1476667 - RNA, 18 nt, Human
aggaauuucaccuguaaa

SEQ ID NO: 1476668 - RNA, 23 nt, Human
aggaauuguguuuauaauuuuaa

SEQ ID NO: 1476669 - RNA, 22 nt, Human
aggaauuucaccuguaaaccug

SEQ ID NO: 1476670 - RNA, 21 nt, Human
aggaaggaggacccaggacag

SEQ ID NO: 1476671 - RNA, 18 nt, Human
aggaaggaggacccagga

SEQ ID NO: 1476672 - RNA, 11 nt, Human
aggaauuuaaa

SEQ ID NO: 1476673 - RNA, 22 nt, Human
aggaagcuuuggugagaaccug

SEQ ID NO: 1476674 - RNA, 23 nt, Human
aggaagcuuuggugagaaccugg

SEQ ID NO: 1476675 - RNA, 18 nt, Human
ugcugacuggcuucagca

SEQ ID NO: 1476676 - RNA, 21 nt, Human
ugagagacacacugaagaagc

SEQ ID NO: 1476677 - RNA, 22 nt, Human
ugagagacacacugaagaagca

SEQ ID NO: 1476678 - RNA, 19 nt, Human
ugagagacauuaacucauu

SEQ ID NO: 1476679 - RNA, 18 nt, Human
ugagagacauuaacucau

SEQ ID NO: 1476680 - RNA, 13 nt, Human
ugagagaggccau

SEQ ID NO: 1476681 - RNA, 22 nt, Human
ugagagaguggcuggggcaugg

SEQ ID NO: 1476682 - RNA, 15 nt, Human
ugagagaguggcugg

SEQ ID NO: 1476683 - RNA, 21 nt, Human
ugagagaugcagaaauauuug

SEQ ID NO: 1476684 - RNA, 20 nt, Human
ugagagcaucaggccuagag

SEQ ID NO: 1476685 - RNA, 21 nt, Human
ugagagcaucaggccuagagg

SEQ ID NO: 1476686 - RNA, 20 nt, Human
ugagagcccugaggccuaga

SEQ ID NO: 1476687 - RNA, 14 nt, Human
ugagauguguucac

SEQ ID NO: 1476688 - RNA, 23 nt, Human
ugagauguagccccucuccugga

SEQ ID NO: 1476689 - RNA, 17 nt, Human
ugagaugcuggcuuggg

SEQ ID NO: 1476690 - RNA, 12 nt, Human
ugagaugcuggc

SEQ ID NO: 1476691 - RNA, 15 nt, Human
ugagaugcuggcuug

SEQ ID NO: 1476692 - RNA, 18 nt, Human
ugagauggagucuugcuc

SEQ ID NO: 1476693 - RNA, 17 nt, Human
ugagauggagucuugcu

SEQ ID NO: 1476694 - RNA, 19 nt, Human
ugagacagaaucucagucu

SEQ ID NO: 1476695 - RNA, 13 nt, Human
ugagagaaaauaa

SEQ ID NO: 1476696 - RNA, 16 nt, Human
ugagagacacacugaa

SEQ ID NO: 1476697 - RNA, 17 nt, Human
ugagagacacacugaag

SEQ ID NO: 1476698 - RNA, 19 nt, Human
ugagagacacacugaagaa

SEQ ID NO: 1476699 - RNA, 20 nt, Human
ugagagacacacugaagaag

SEQ ID NO: 1476700 - RNA, 15 nt, Human
agauuuuccugaaaa

SEQ ID NO: 1476701 - RNA, 16 nt, Human
agauuuuccugaaaac

SEQ ID NO: 1476702 - RNA, 16 nt, Human
agauuuucugcuacuu

SEQ ID NO: 1476703 - RNA, 12 nt, Human
ugagaagcucug

SEQ ID NO: 1476704 - RNA, 18 nt, Human
ugagaaucuauauuuaac

SEQ ID NO: 1476705 - RNA, 23 nt, Human
ugagaaucuauauuuaacaagau

SEQ ID NO: 1476706 - RNA, 12 nt, Human
agcacaggcuaa

SEQ ID NO: 1476707 - RNA, 17 nt, Human
agcacaggcuaauuuuu

SEQ ID NO: 1476708 - RNA, 16 nt, Human
agcacaggcuaauuuu

SEQ ID NO: 1476709 - RNA, 15 nt, Human
agcaccuacuuacau

SEQ ID NO: 1476710 - RNA, 15 nt, Human
agcaagucagaauag

SEQ ID NO: 1476711 - RNA, 13 nt, Human
agcaaguaaaaag

SEQ ID NO: 1476712 - RNA, 18 nt, Human
agcaaguaaaaaggcuaa

SEQ ID NO: 1476713 - RNA, 17 nt, Human
agcaagcuuaauggcug

SEQ ID NO: 1476714 - RNA, 16 nt, Human
ugagcaaaucaccaca

SEQ ID NO: 1476715 - RNA, 15 nt, Human
agcaagcauucagaa

SEQ ID NO: 1476716 - RNA, 18 nt, Human
agcaagcauucagaagaa

SEQ ID NO: 1476717 - RNA, 21 nt, Human
agcaagcauucagaagaaaaa

SEQ ID NO: 1476718 - RNA, 22 nt, Human
agcaagcauucagaagaaaaag

SEQ ID NO: 1476719 - RNA, 21 nt, Human
agaugcaguucugaagaagau

SEQ ID NO: 1476720 - RNA, 18 nt, Human
agaugcauuuggguccag

SEQ ID NO: 1476721 - RNA, 19 nt, Human
agaugcauuuggguccagg

SEQ ID NO: 1476722 - RNA, 20 nt, Human
agaugcauuuggguccagga

SEQ ID NO: 1476723 - RNA, 21 nt, Human
agaugcauuuggguccaggag

SEQ ID NO: 1476724 - RNA, 23 nt, Human
agaugcauuuggguccaggagga

SEQ ID NO: 1476725 - RNA, 22 nt, Human
agaugcauuuggguccaggagg

SEQ ID NO: 1476726 - RNA, 22 nt, Human
agauguagccccucuccuggaa

SEQ ID NO: 1476727 - RNA, 15 nt, Human
agaucccccagaaaa

SEQ ID NO: 1476728 - RNA, 19 nt, Human
agaucccccagaaaagaaa

SEQ ID NO: 1476729 - RNA, 13 nt, Human
agaucccccagaa

SEQ ID NO: 1476730 - RNA, 22 nt, Human
ugaccaaccuuuucccaaccau

SEQ ID NO: 1476731 - RNA, 15 nt, Human
ugaccaagauacuua

SEQ ID NO: 1476732 - RNA, 13 nt, Human
agauccuggaaau

SEQ ID NO: 1476733 - RNA, 12 nt, Human
agauccuccuca

SEQ ID NO: 1476734 - RNA, 13 nt, Human
agauccuccucau

SEQ ID NO: 1476735 - RNA, 14 nt, Human
agauccuggaaauc

SEQ ID NO: 1476736 - RNA, 15 nt, Human
agauccuccucauuc

SEQ ID NO: 1476737 - RNA, 15 nt, Human
ugacagguaaacuau

SEQ ID NO: 1476738 - RNA, 21 nt, Human
ugacagggcggggguggcggc

SEQ ID NO: 1476739 - RNA, 19 nt, Human
ugacuuauaguacaugaua

SEQ ID NO: 1476740 - RNA, 17 nt, Human
ugacuuauaguacauga

SEQ ID NO: 1476741 - RNA, 15 nt, Human
ugacuuauaguacau

SEQ ID NO: 1476742 - RNA, 14 nt, Human
ugacuuauaguaca

SEQ ID NO: 1476743 - RNA, 13 nt, Human
ugacuuauaguac

SEQ ID NO: 1476744 - RNA, 13 nt, Human
agauucccagagc

SEQ ID NO: 1476745 - RNA, 16 nt, Human
agauucccagagcaaa

SEQ ID NO: 1476746 - RNA, 12 nt, Human
agauuguuugca

SEQ ID NO: 1476747 - RNA, 19 nt, Human
agauuugugugcaucaggc

SEQ ID NO: 1476748 - RNA, 16 nt, Human
ugaccugccucccuuc

SEQ ID NO: 1476749 - RNA, 22 nt, Human
agauguauguacuucaugcugu

SEQ ID NO: 1476750 - RNA, 21 nt, Human
ugaccugccucccuucaugca

SEQ ID NO: 1476751 - RNA, 23 nt, Human
ugaccugccucccuucaugcaug

SEQ ID NO: 1476752 - RNA, 19 nt, Human
ugaccugccucccuucaug

SEQ ID NO: 1476753 - RNA, 17 nt, Human
ugaccugccucccuuca

SEQ ID NO: 1476754 - RNA, 12 nt, Human
ugacuauguaaa

SEQ ID NO: 1476755 - RNA, 17 nt, Human
ugacuauucuugaugua

SEQ ID NO: 1476756 - RNA, 19 nt, Human
ugacuauucuugauguaaa

SEQ ID NO: 1476757 - RNA, 20 nt, Human
ugacuauucuugauguaaaa

SEQ ID NO: 1476758 - RNA, 22 nt, Human
ugacuauucuugauguaaaauc

SEQ ID NO: 1476759 - RNA, 13 nt, Human
ugacuauguaaac

SEQ ID NO: 1476760 - RNA, 21 nt, Human
ugacuauucuugauguaaaau

SEQ ID NO: 1476761 - RNA, 19 nt, Human
ugacuguuuuucggacagu

SEQ ID NO: 1476762 - RNA, 20 nt, Human
ugacuguuuuucggacaguu

SEQ ID NO: 1476763 - RNA, 17 nt, Human
ucuuuuuucaaaagaaa

SEQ ID NO: 1476764 - RNA, 16 nt, Human
ucuuuuuucaaaagaa

SEQ ID NO: 1476765 - RNA, 15 nt, Human
ucuuuuuuucuugaa

SEQ ID NO: 1476766 - RNA, 22 nt, Human
ucuuuuuucuaaaguaaaaaca

SEQ ID NO: 1476767 - RNA, 21 nt, Human
ucuuuuuucuaaaguaaaaac

SEQ ID NO: 1476768 - RNA, 16 nt, Human
agagacacacugaaga

SEQ ID NO: 1476769 - RNA, 16 nt, Human
ucuuuguaaugaaaac

SEQ ID NO: 1476770 - RNA, 15 nt, Human
agacuuuuaugauac

SEQ ID NO: 1476771 - RNA, 12 nt, Human
agacuuuuauga

SEQ ID NO: 1476772 - RNA, 17 nt, Human
agacucugucuaccugg

SEQ ID NO: 1476773 - RNA, 13 nt, Human
ucuuucccuccuu

SEQ ID NO: 1476774 - RNA, 12 nt, Human
ucuuucccuccu

SEQ ID NO: 1476775 - RNA, 16 nt, Human
ucuuucccuccuuggu

SEQ ID NO: 1476776 - RNA, 14 nt, Human
ucuuucccuccuug

SEQ ID NO: 1476777 - RNA, 17 nt, Human
ucuuucucacuaaaucu

SEQ ID NO: 1476778 - RNA, 18 nt, Human
ucuuucucacuaaaucuu

SEQ ID NO: 1476779 - RNA, 14 nt, Human
ugaaaauuaacaug

SEQ ID NO: 1476780 - RNA, 20 nt, Human
ugaaaaugugcuauacugca

SEQ ID NO: 1476781 - RNA, 21 nt, Human
ugaaaaugugcuauacugcau

SEQ ID NO: 1476782 - RNA, 22 nt, Human
ugaaaaugugcuauacugcaua

SEQ ID NO: 1476783 - RNA, 13 nt, Human
ugaaagaaaauaa

SEQ ID NO: 1476784 - RNA, 17 nt, Human
ugaaaaugugcuauacu

SEQ ID NO: 1476785 - RNA, 19 nt, Human
ugaaaaugugcuauacugc

SEQ ID NO: 1476786 - RNA, 23 nt, Human
ucuuuuuuuuuuuuuaauaaauu

SEQ ID NO: 1476787 - RNA, 22 nt, Human
ucuuuuuuuuuuuuuaauaaau

SEQ ID NO: 1476788 - RNA, 20 nt, Human
ugaaaauaaaaagaucacuu

SEQ ID NO: 1476789 - RNA, 21 nt, Human
ugaaaauaaaaagaucacuuu

SEQ ID NO: 1476790 - RNA, 13 nt, Human
ugaaaauaaagaa

SEQ ID NO: 1476791 - RNA, 14 nt, Human
ugaaaauaaagaau

SEQ ID NO: 1476792 - RNA, 15 nt, Human
ugaaaauaaagaaug

SEQ ID NO: 1476793 - RNA, 16 nt, Human
ugaaaauaaagaaugg

SEQ ID NO: 1476794 - RNA, 17 nt, Human
ugaaaauaaaguguaua

SEQ ID NO: 1476795 - RNA, 17 nt, Human
ugaaaauaaagaaugga

SEQ ID NO: 1476796 - RNA, 15 nt, Human
agagaguugaaccua

SEQ ID NO: 1476797 - RNA, 17 nt, Human
agagaguggcuggggca

SEQ ID NO: 1476798 - RNA, 13 nt, Human
agagauacagagg

SEQ ID NO: 1476799 - RNA, 16 nt, Human
agagaguggcuggggc

SEQ ID NO: 1476800 - RNA, 14 nt, Human
agagaguggcuggg

SEQ ID NO: 1476801 - RNA, 13 nt, Human
agagaguggcugg

SEQ ID NO: 1476802 - RNA, 21 nt, Human
agagaucccaaguagaaucuc

SEQ ID NO: 1476803 - RNA, 13 nt, Human
agagaugcagaaa

SEQ ID NO: 1476804 - RNA, 17 nt, Human
agagaugcagaaauauu

SEQ ID NO: 1476805 - RNA, 16 nt, Human
agagaugcagaaauau

SEQ ID NO: 1476806 - RNA, 12 nt, Human
agagacuuguuu

SEQ ID NO: 1476807 - RNA, 15 nt, Human
agagacuugggaaug

SEQ ID NO: 1476808 - RNA, 18 nt, Human
agagacuuguuuuggaug

SEQ ID NO: 1476809 - RNA, 16 nt, Human
agagacuuguuuugga

SEQ ID NO: 1476810 - RNA, 14 nt, Human
ugaaagagaaacac

SEQ ID NO: 1476811 - RNA, 12 nt, Human
ugaaauuucaga

SEQ ID NO: 1476812 - RNA, 15 nt, Human
ugaaauuuccuggga

SEQ ID NO: 1476813 - RNA, 22 nt, Human
ugaaauuucagauucccagagc

SEQ ID NO: 1476814 - RNA, 21 nt, Human
ugaaauuuccugggagcuuuu

SEQ ID NO: 1476815 - RNA, 23 nt, Human
ugaacaaaguuuaccagaaagca

SEQ ID NO: 1476816 - RNA, 15 nt, Human
ugaacaaauggccuu

SEQ ID NO: 1476817 - RNA, 13 nt, Human
ugaaauaaacguc

SEQ ID NO: 1476818 - RNA, 18 nt, Human
ugaaauaaacgucuuaaa

SEQ ID NO: 1476819 - RNA, 22 nt, Human
ugaaauaaacgucuuaaauauu

SEQ ID NO: 1476820 - RNA, 23 nt, Human
ugaaauaaacgucuuaaauauuc

SEQ ID NO: 1476821 - RNA, 21 nt, Human
ugaaauaccaaccugaagaca

SEQ ID NO: 1476822 - RNA, 23 nt, Human
ugaacuagaguuuagcuggaaaa

SEQ ID NO: 1476823 - RNA, 12 nt, Human
ugaaccaccgcg

SEQ ID NO: 1476824 - RNA, 17 nt, Human
ugaaccauuaaccagau

SEQ ID NO: 1476825 - RNA, 13 nt, Human
ugaagaacugagg

SEQ ID NO: 1476826 - RNA, 19 nt, Human
ugaagaacugaggaggaaa

SEQ ID NO: 1476827 - RNA, 13 nt, Human
ugaagacagaagu

SEQ ID NO: 1476828 - RNA, 16 nt, Human
ugaagaauacuucuca

SEQ ID NO: 1476829 - RNA, 19 nt, Human
ugaagaauacuucucauuu

SEQ ID NO: 1476830 - RNA, 21 nt, Human
ugaagaauacuucucauuuuu

SEQ ID NO: 1476831 - RNA, 20 nt, Human
ugaagaauacuucucauuuu

SEQ ID NO: 1476832 - RNA, 13 nt, Human
ugaagaauguuaa

SEQ ID NO: 1476833 - RNA, 22 nt, Human
agaguaauccaagcaaauguga

SEQ ID NO: 1476834 - RNA, 20 nt, Human
agaguaauccaagcaaaugu

SEQ ID NO: 1476835 - RNA, 18 nt, Human
agaguaauccaagcaaau

SEQ ID NO: 1476836 - RNA, 23 nt, Human
agaggccaggcaggagcccuucu

SEQ ID NO: 1476837 - RNA, 15 nt, Human
ugaauacauuuccaa

SEQ ID NO: 1476838 - RNA, 21 nt, Human
ugaauauuuguuauguagaua

SEQ ID NO: 1476839 - RNA, 18 nt, Human
ugaaucaagggucaggcc

SEQ ID NO: 1476840 - RNA, 20 nt, Human
ugaaucaagggucaggccuu

SEQ ID NO: 1476841 - RNA, 23 nt, Human
ugaauaauguaagacaaauaugu

SEQ ID NO: 1476842 - RNA, 20 nt, Human
ugaaguauuuugcuggaaua

SEQ ID NO: 1476843 - RNA, 23 nt, Human
ugaaguacccguucacauuuuug

SEQ ID NO: 1476844 - RNA, 18 nt, Human
ugaaguacccguucacau

SEQ ID NO: 1476845 - RNA, 17 nt, Human
ugaagauuuaccacuug

SEQ ID NO: 1476846 - RNA, 20 nt, Human
ugaagauuuaccacuugugu

SEQ ID NO: 1476847 - RNA, 15 nt, Human
ugaagggaagagaca

SEQ ID NO: 1476848 - RNA, 15 nt, Human
ugaagggcaggugcu

SEQ ID NO: 1476849 - RNA, 19 nt, Human
ugaagggcaggugcuucag

SEQ ID NO: 1476850 - RNA, 13 nt, Human
agaauguaaagcu

SEQ ID NO: 1476851 - RNA, 16 nt, Human
agaauguaaagcuugu

SEQ ID NO: 1476852 - RNA, 17 nt, Human
agaauguaaagcuuguc

SEQ ID NO: 1476853 - RNA, 12 nt, Human
agaauguaaagc

SEQ ID NO: 1476854 - RNA, 23 nt, Human
agaauguauauuaagguguggcu

SEQ ID NO: 1476855 - RNA, 14 nt, Human
agaauuaucuaauu

SEQ ID NO: 1476856 - RNA, 15 nt, Human
agaauuaucuaauuu

SEQ ID NO: 1476857 - RNA, 17 nt, Human
agaauuaucuaauuuau

SEQ ID NO: 1476858 - RNA, 15 nt, Human
agaauuauuuuguga

SEQ ID NO: 1476859 - RNA, 13 nt, Human
agaauuauuuugu

SEQ ID NO: 1476860 - RNA, 18 nt, Human
agaauuaucuaauuuaua

SEQ ID NO: 1476861 - RNA, 20 nt, Human
agaauuaucuaauuuauaaa

SEQ ID NO: 1476862 - RNA, 21 nt, Human
agaauuaucuaauuuauaaaa

SEQ ID NO: 1476863 - RNA, 17 nt, Human
agaauaaaauuuuuaau

SEQ ID NO: 1476864 - RNA, 14 nt, Human
agaauaaaauuuuu

SEQ ID NO: 1476865 - RNA, 12 nt, Human
agaauaaaauuu

SEQ ID NO: 1476866 - RNA, 12 nt, Human
agaauaugccuu

SEQ ID NO: 1476867 - RNA, 17 nt, Human
agaauauccaugaccua

SEQ ID NO: 1476868 - RNA, 19 nt, Human
agaauacuucucauuuuuu

SEQ ID NO: 1476869 - RNA, 15 nt, Human
agaauacuucucauu

SEQ ID NO: 1476870 - RNA, 19 nt, Human
agaaguucaauauaagcuu

SEQ ID NO: 1476871 - RNA, 19 nt, Human
agaaguuucaucauuuuuu

SEQ ID NO: 1476872 - RNA, 21 nt, Human
agaaguuucaucauuuuuuac

SEQ ID NO: 1476873 - RNA, 23 nt, Human
agaaguuucaucauuuuuuacuu

SEQ ID NO: 1476874 - RNA, 19 nt, Human
agaaggcaaaaauaguuug

SEQ ID NO: 1476875 - RNA, 16 nt, Human
agaaggcaaaaauagu

SEQ ID NO: 1476876 - RNA, 23 nt, Human
ucuguauuugaaucagccuacag

SEQ ID NO: 1476877 - RNA, 13 nt, Human
ucugucacuuaau

SEQ ID NO: 1476878 - RNA, 19 nt, Human
ucugugagauucauucaug

SEQ ID NO: 1476879 - RNA, 17 nt, Human
ucugugagauucauuca

SEQ ID NO: 1476880 - RNA, 21 nt, Human
ucugugagggugcugacuggc

SEQ ID NO: 1476881 - RNA, 22 nt, Human
agaauuugauaugugaacaguu

SEQ ID NO: 1476882 - RNA, 21 nt, Human
agaauuugauaugugaacagu

SEQ ID NO: 1476883 - RNA, 14 nt, Human
agaauugaguguuu

SEQ ID NO: 1476884 - RNA, 17 nt, Human
agaauugaguguuuaaa

SEQ ID NO: 1476885 - RNA, 12 nt, Human
agacacacauga

SEQ ID NO: 1476886 - RNA, 15 nt, Human
agacacacaugaagu

SEQ ID NO: 1476887 - RNA, 12 nt, Human
agacacagacug

SEQ ID NO: 1476888 - RNA, 16 nt, Human
agacacauacucauuu

SEQ ID NO: 1476889 - RNA, 19 nt, Human
agacaccguucauucaggc

SEQ ID NO: 1476890 - RNA, 18 nt, Human
agacacugaucuggcugc

SEQ ID NO: 1476891 - RNA, 20 nt, Human
agacacugccacacaggguc

SEQ ID NO: 1476892 - RNA, 12 nt, Human
agacacugguuu

SEQ ID NO: 1476893 - RNA, 12 nt, Human
agaagacaaaau

SEQ ID NO: 1476894 - RNA, 18 nt, Human
agaagaugguaccaccag

SEQ ID NO: 1476895 - RNA, 22 nt, Human
agaagaaucucaucucagugaa

SEQ ID NO: 1476896 - RNA, 19 nt, Human
agaagaaugcuuaaucaga

SEQ ID NO: 1476897 - RNA, 13 nt, Human
agaagaacugaaa

SEQ ID NO: 1476898 - RNA, 14 nt, Human
agaagaacugaaau

SEQ ID NO: 1476899 - RNA, 22 nt, Human
agaagaaguuucaucauuuuuu

SEQ ID NO: 1476900 - RNA, 19 nt, Human
agaagcauuuuguaaguug

SEQ ID NO: 1476901 - RNA, 22 nt, Human
ucugcucagacagaaccccuac

SEQ ID NO: 1476902 - RNA, 18 nt, Human
ucugcucagauagaauga

SEQ ID NO: 1476903 - RNA, 14 nt, Human
ucugcaggucccua

SEQ ID NO: 1476904 - RNA, 19 nt, Human
ucugcagggggugugucug

SEQ ID NO: 1476905 - RNA, 13 nt, Human
ucugcaggucccu

SEQ ID NO: 1476906 - RNA, 12 nt, Human
ucugcagguccc

SEQ ID NO: 1476907 - RNA, 11 nt, Human
ucugcaggucc

SEQ ID NO: 1476908 - RNA, 14 nt, Human
ucugacucugagcu

SEQ ID NO: 1476909 - RNA, 16 nt, Human
ucugagaagcucugaa

SEQ ID NO: 1476910 - RNA, 24 nt, Human
ucugagaagcucugaagaacucuc

SEQ ID NO: 1476911 - RNA, 16 nt, Human
ucugagucaacuccuu

SEQ ID NO: 1476912 - RNA, 15 nt, Human
ucugaauuauuuucu

SEQ ID NO: 1476913 - RNA, 10 nt, Human
ucugaauuau

SEQ ID NO: 1476914 - RNA, 22 nt, Human
agaaaugccaagcacuucuuuu

SEQ ID NO: 1476915 - RNA, 14 nt, Human
agaaaugccaagca

SEQ ID NO: 1476916 - RNA, 21 nt, Human
agaaaugccaagcacuucuuu

SEQ ID NO: 1476917 - RNA, 12 nt, Human
agaaaugcagaa

SEQ ID NO: 1476918 - RNA, 11 nt, Human
agaaaugccaa

SEQ ID NO: 1476919 - RNA, 17 nt, Human
ucugaagcucaacucuc

SEQ ID NO: 1476920 - RNA, 21 nt, Human
ucugaagcucaacucucuuau

SEQ ID NO: 1476921 - RNA, 18 nt, Human
ucuccuuguucugauaau

SEQ ID NO: 1476922 - RNA, 13 nt, Human
ucuccuuguucug

SEQ ID NO: 1476923 - RNA, 14 nt, Human
ucuccuuguucuga

SEQ ID NO: 1476924 - RNA, 16 nt, Human
ucuccuuguucugaua

SEQ ID NO: 1476925 - RNA, 13 nt, Human
agaaauaucuuca

SEQ ID NO: 1476926 - RNA, 20 nt, Human
agaaauaucuucacuuguca

SEQ ID NO: 1476927 - RNA, 20 nt, Human
agaaauauuugugacaaaaa

SEQ ID NO: 1476928 - RNA, 17 nt, Human
ucuaggaaauauuuauu

SEQ ID NO: 1476929 - RNA, 16 nt, Human
ucuaggaaauauuuau

SEQ ID NO: 1476930 - RNA, 15 nt, Human
ucuaguucugccagg

SEQ ID NO: 1476931 - RNA, 16 nt, Human
ucuaguucugccagga

SEQ ID NO: 1476932 - RNA, 17 nt, Human
ucuaguucugccaggag

SEQ ID NO: 1476933 - RNA, 19 nt, Human
ucuaguugaaaauaaagug

SEQ ID NO: 1476934 - RNA, 22 nt, Human
ucuaguuuaauuaaucuguaau

SEQ ID NO: 1476935 - RNA, 18 nt, Human
acuucauauaugaggacu

SEQ ID NO: 1476936 - RNA, 14 nt, Human
ucuagacacugcca

SEQ ID NO: 1476937 - RNA, 14 nt, Human
ucuagagcacugcc

SEQ ID NO: 1476938 - RNA, 15 nt, Human
ucuagagcacugcca

SEQ ID NO: 1476939 - RNA, 16 nt, Human
ucuagaggcuuccuuc

SEQ ID NO: 1476940 - RNA, 21 nt, Human
ucuagaggcuuccuucauuuc

SEQ ID NO: 1476941 - RNA, 16 nt, Human
ucuauacccacccaga

SEQ ID NO: 1476942 - RNA, 17 nt, Human
ucuauacccacccagaa

SEQ ID NO: 1476943 - RNA, 15 nt, Human
ucuauacccacccag

SEQ ID NO: 1476944 - RNA, 18 nt, Human
ucuauaccaauaaaguga

SEQ ID NO: 1476945 - RNA, 17 nt, Human
ucuauaccaauaaagug

SEQ ID NO: 1476946 - RNA, 16 nt, Human
ucuauaccaauaaagu

SEQ ID NO: 1476947 - RNA, 15 nt, Human
ucuauaccaauaaag

SEQ ID NO: 1476948 - RNA, 14 nt, Human
ucuauaccaauaaa

SEQ ID NO: 1476949 - RNA, 17 nt, Human
ucuaugugcuuguaaaa

SEQ ID NO: 1476950 - RNA, 12 nt, Human
ucuauucagcuu

SEQ ID NO: 1476951 - RNA, 12 nt, Human
ucuauugccucu

SEQ ID NO: 1476952 - RNA, 17 nt, Human
ucuauuuuguaaacuca

SEQ ID NO: 1476953 - RNA, 24 nt, Human
ucuauuuuguaacuuucucuauga

SEQ ID NO: 1476954 - RNA, 15 nt, Human
ucucaccauuuggau

SEQ ID NO: 1476955 - RNA, 16 nt, Human
ucucaccauuuggauc

SEQ ID NO: 1476956 - RNA, 18 nt, Human
ucucaccauuuggauccu

SEQ ID NO: 1476957 - RNA, 21 nt, Human
ucuauugccucugagagcauc

SEQ ID NO: 1476958 - RNA, 19 nt, Human
ucuauugccucugagagca

SEQ ID NO: 1476959 - RNA, 22 nt, Human
ucuauugccucugagagcauca

SEQ ID NO: 1476960 - RNA, 12 nt, Human
ucuauuuuaauu

SEQ ID NO: 1476961 - RNA, 13 nt, Human
acuuaaauuuuag

SEQ ID NO: 1476962 - RNA, 16 nt, Human
acuuaaauaguauuuc

SEQ ID NO: 1476963 - RNA, 14 nt, Human
acuuaauugcuaca

SEQ ID NO: 1476964 - RNA, 12 nt, Human
acuuacaugauu

SEQ ID NO: 1476965 - RNA, 14 nt, Human
acuuacaugauuca

SEQ ID NO: 1476966 - RNA, 21 nt, Human
acuuauuaacaauuaggcaga

SEQ ID NO: 1476967 - RNA, 12 nt, Human
acuuauuaacaa

SEQ ID NO: 1476968 - RNA, 16 nt, Human
acuuauuaucuucagg

SEQ ID NO: 1476969 - RNA, 18 nt, Human
acuucagguauaccucac

SEQ ID NO: 1476970 - RNA, 20 nt, Human
acuucagguauaccucacuu

SEQ ID NO: 1476971 - RNA, 22 nt, Human
acuuuuuauggcacuaguauuu

SEQ ID NO: 1476972 - RNA, 18 nt, Human
acuuuuuaaauguaaaga

SEQ ID NO: 1476973 - RNA, 13 nt, Human
acuuuggcugcau

SEQ ID NO: 1476974 - RNA, 21 nt, Human
ucucauuuuuccguaaaaaug

SEQ ID NO: 1476975 - RNA, 23 nt, Human
ucuccaccaucgucuucuuggcc

SEQ ID NO: 1476976 - RNA, 20 nt, Human
acuuuaauuaccaaccuguu

SEQ ID NO: 1476977 - RNA, 22 nt, Human
acuuuaauuaccaaccuguuac

SEQ ID NO: 1476978 - RNA, 20 nt, Human
acuuuacacaauagaauuau

SEQ ID NO: 1476979 - RNA, 18 nt, Human
acuuuacacaauagaauu

SEQ ID NO: 1476980 - RNA, 17 nt, Human
acuuugaaguuagcuuu

SEQ ID NO: 1476981 - RNA, 14 nt, Human
acuugcuuuuaaaa

SEQ ID NO: 1476982 - RNA, 19 nt, Human
acuugcuuaucaacuuccu

SEQ ID NO: 1476983 - RNA, 22 nt, Human
acuugcugcaguaugaaaauaa

SEQ ID NO: 1476984 - RNA, 19 nt, Human
acuuguauuauguguguuu

SEQ ID NO: 1476985 - RNA, 18 nt, Human
acuuguauuauguguguu

SEQ ID NO: 1476986 - RNA, 15 nt, Human
acuugucaauaaaau

SEQ ID NO: 1476987 - RNA, 21 nt, Human
acuugcuuaucaacuuccuaa

SEQ ID NO: 1476988 - RNA, 20 nt, Human
acuugcucuugaugccuggc

SEQ ID NO: 1476989 - RNA, 21 nt, Human
acuugcugcaguaugaaaaua

SEQ ID NO: 1476990 - RNA, 18 nt, Human
acuugcucuugaugccug

SEQ ID NO: 1476991 - RNA, 17 nt, Human
acuugcucuugaugccu

SEQ ID NO: 1476992 - RNA, 16 nt, Human
acuugcucuugaugcc

SEQ ID NO: 1476993 - RNA, 17 nt, Human
acuugcaaaaaggguca

SEQ ID NO: 1476994 - RNA, 23 nt, Human
acuugcaaaaagggucaguaugg

SEQ ID NO: 1476995 - RNA, 21 nt, Human
acuugcaaccgucuguuaugc

SEQ ID NO: 1476996 - RNA, 15 nt, Human
ucucauuuccaagca

SEQ ID NO: 1476997 - RNA, 17 nt, Human
ucucauuuuuccguaaa

SEQ ID NO: 1476998 - RNA, 20 nt, Human
ucucauuuuuuaaaaaagcu

SEQ ID NO: 1476999 - RNA, 17 nt, Human
ucucaggccagagccaa

SEQ ID NO: 1477000 - RNA, 23 nt, Human
uccuggaagugcuaauuuugaaa

SEQ ID NO: 1477001 - RNA, 22 nt, Human
uccuggaauaucuccgucaacu

SEQ ID NO: 1477002 - RNA, 14 nt, Human
uccuggaagccagc

SEQ ID NO: 1477003 - RNA, 18 nt, Human
uccuggaagccagcuuuc

SEQ ID NO: 1477004 - RNA, 20 nt, Human
uccuggaagccagcuuuccc

SEQ ID NO: 1477005 - RNA, 16 nt, Human
uccuggaaaucagggu

SEQ ID NO: 1477006 - RNA, 23 nt, Human
uccugcuugaugggauucuggac

SEQ ID NO: 1477007 - RNA, 15 nt, Human
uccugggagcuuuug

SEQ ID NO: 1477008 - RNA, 22 nt, Human
uccugcuugaugggauucugga

SEQ ID NO: 1477009 - RNA, 17 nt, Human
acugauauauuuuacaa

SEQ ID NO: 1477010 - RNA, 16 nt, Human
acugauauauuuuaca

SEQ ID NO: 1477011 - RNA, 18 nt, Human
uccugcaccggggccugg

SEQ ID NO: 1477012 - RNA, 19 nt, Human
uccugcaccggggccuggg

SEQ ID NO: 1477013 - RNA, 21 nt, Human
acugaacuuugcugagccugu

SEQ ID NO: 1477014 - RNA, 12 nt, Human
acugaagaagca

SEQ ID NO: 1477015 - RNA, 18 nt, Human
acugacuauucuugaugu

SEQ ID NO: 1477016 - RNA, 20 nt, Human
acugacuauucuugauguaa

SEQ ID NO: 1477017 - RNA, 13 nt, Human
acugacucuuaag

SEQ ID NO: 1477018 - RNA, 14 nt, Human
acugacucuuaaga

SEQ ID NO: 1477019 - RNA, 15 nt, Human
acugacucuuaagaa

SEQ ID NO: 1477020 - RNA, 16 nt, Human
acugacucuuaagaag

SEQ ID NO: 1477021 - RNA, 17 nt, Human
acugacucuuaagaaga

SEQ ID NO: 1477022 - RNA, 18 nt, Human
acugacucuuaagaagac

SEQ ID NO: 1477023 - RNA, 20 nt, Human
acugacucuuaagaagacug

SEQ ID NO: 1477024 - RNA, 22 nt, Human
acugacuauucuugauguaaaa

SEQ ID NO: 1477025 - RNA, 23 nt, Human
acugacuauucuugauguaaaau

SEQ ID NO: 1477026 - RNA, 24 nt, Human
acugacuauucuugauguaaaauc

SEQ ID NO: 1477027 - RNA, 21 nt, Human
acugagaaauuuauaaacuuu

SEQ ID NO: 1477028 - RNA, 17 nt, Human
acugagaaauuuauaaa

SEQ ID NO: 1477029 - RNA, 12 nt, Human
acugagaaauuu

SEQ ID NO: 1477030 - RNA, 16 nt, Human
acugagacaaugccuu

SEQ ID NO: 1477031 - RNA, 23 nt, Human
acugagaccaaggcuuucucuac

SEQ ID NO: 1477032 - RNA, 16 nt, Human
acugagaccaaggcuu

SEQ ID NO: 1477033 - RNA, 20 nt, Human
acugagagaugcagaaauau

SEQ ID NO: 1477034 - RNA, 19 nt, Human
acugaacuuugcugagccu

SEQ ID NO: 1477035 - RNA, 16 nt, Human
acugaacuuugcugag

SEQ ID NO: 1477036 - RNA, 20 nt, Human
acugaacaccauugaaggcu

SEQ ID NO: 1477037 - RNA, 21 nt, Human
acugaacaccauugaaggcuu

SEQ ID NO: 1477038 - RNA, 22 nt, Human
acugaacaccauugaaggcuua

SEQ ID NO: 1477039 - RNA, 15 nt, Human
acucuuguuuccuua

SEQ ID NO: 1477040 - RNA, 13 nt, Human
uccugacacuuua

SEQ ID NO: 1477041 - RNA, 14 nt, Human
acucuuuaugcuug

SEQ ID NO: 1477042 - RNA, 15 nt, Human
acucuuuaugcuugc

SEQ ID NO: 1477043 - RNA, 17 nt, Human
acucuuuaugcuugcaa

SEQ ID NO: 1477044 - RNA, 18 nt, Human
acucuuuaugcuugcaaa

SEQ ID NO: 1477045 - RNA, 21 nt, Human
uccugaaaagguuuaugaaaa

SEQ ID NO: 1477046 - RNA, 23 nt, Human
uccugaaaagguuuaugaaaaag

SEQ ID NO: 1477047 - RNA, 16 nt, Human
uccugaaagacaauau

SEQ ID NO: 1477048 - RNA, 15 nt, Human
uccugaaauuucaga

SEQ ID NO: 1477049 - RNA, 14 nt, Human
uccugaaauuucag

SEQ ID NO: 1477050 - RNA, 13 nt, Human
ucccuuuuuuuaa

SEQ ID NO: 1477051 - RNA, 21 nt, Human
ucccuuuuuuuaaguaaggaa

SEQ ID NO: 1477052 - RNA, 16 nt, Human
ucccuuuuuuuaagua

SEQ ID NO: 1477053 - RNA, 15 nt, Human
uccguaaaaaugauu

SEQ ID NO: 1477054 - RNA, 13 nt, Human
uccguaaaaauga

SEQ ID NO: 1477055 - RNA, 14 nt, Human
uccuaggaaaauac

SEQ ID NO: 1477056 - RNA, 21 nt, Human
acucacaccugaacugaacac

SEQ ID NO: 1477057 - RNA, 21 nt, Human
acucuuaagaagacugcauua

SEQ ID NO: 1477058 - RNA, 16 nt, Human
acucuuauaucuauau

SEQ ID NO: 1477059 - RNA, 17 nt, Human
acucuuauaucuauauu

SEQ ID NO: 1477060 - RNA, 18 nt, Human
acucuuauaucuauauuu

SEQ ID NO: 1477061 - RNA, 22 nt, Human
acucuuauaucuauauuuuaca

SEQ ID NO: 1477062 - RNA, 19 nt, Human
acucuuauaucuauauuuu

SEQ ID NO: 1477063 - RNA, 16 nt, Human
acucuuauaaauuucu

SEQ ID NO: 1477064 - RNA, 20 nt, Human
uccucccacuucagccuccc

SEQ ID NO: 1477065 - RNA, 15 nt, Human
uccucccucagugcc

SEQ ID NO: 1477066 - RNA, 21 nt, Human
acucugaguguuuuaugagaa

SEQ ID NO: 1477067 - RNA, 20 nt, Human
acucugaguguuuuaugaga

SEQ ID NO: 1477068 - RNA, 20 nt, Human
acucucuuauugccucacuu

SEQ ID NO: 1477069 - RNA, 14 nt, Human
acucugaguguuuu

SEQ ID NO: 1477070 - RNA, 22 nt, Human
acucucuggaagccccugggcc

SEQ ID NO: 1477071 - RNA, 20 nt, Human
uccagccugcugccugcuuu

SEQ ID NO: 1477072 - RNA, 14 nt, Human
uccagccucagcuc

SEQ ID NO: 1477073 - RNA, 13 nt, Human
uccaggagccugg

SEQ ID NO: 1477074 - RNA, 14 nt, Human
uccaggagccuggc

SEQ ID NO: 1477075 - RNA, 23 nt, Human
uccaggagccuggcuccguccag

SEQ ID NO: 1477076 - RNA, 15 nt, Human
uccaggagccugugc

SEQ ID NO: 1477077 - RNA, 18 nt, Human
uccaggagccugugccuc

SEQ ID NO: 1477078 - RNA, 23 nt, Human
accuuuuuucaacagugaagaca

SEQ ID NO: 1477079 - RNA, 18 nt, Human
accuuuuuucaacaguga

SEQ ID NO: 1477080 - RNA, 22 nt, Human
accuuuguuugcaucugaaaau

SEQ ID NO: 1477081 - RNA, 18 nt, Human
accuuugacaaagguaaa

SEQ ID NO: 1477082 - RNA, 17 nt, Human
accuuugacaaagguaa

SEQ ID NO: 1477083 - RNA, 20 nt, Human
accuuucuucaccaaaucuu

SEQ ID NO: 1477084 - RNA, 14 nt, Human
ucauuccuccaggu

SEQ ID NO: 1477085 - RNA, 13 nt, Human
ucauuccuccagg

SEQ ID NO: 1477086 - RNA, 12 nt, Human
ucauuccuccag

SEQ ID NO: 1477087 - RNA, 15 nt, Human
uccacucguguguuu

SEQ ID NO: 1477088 - RNA, 14 nt, Human
uccacucguguguu

SEQ ID NO: 1477089 - RNA, 19 nt, Human
accuuuuuauuugcaugug

SEQ ID NO: 1477090 - RNA, 20 nt, Human
accuuuuggucuggagggaa

SEQ ID NO: 1477091 - RNA, 18 nt, Human
uccacucguguguuucua

SEQ ID NO: 1477092 - RNA, 16 nt, Human
uccacucguguguuuc

SEQ ID NO: 1477093 - RNA, 23 nt, Human
uccagugggaggugagaccaccu

SEQ ID NO: 1477094 - RNA, 16 nt, Human
uccaguaggauccagu

SEQ ID NO: 1477095 - RNA, 20 nt, Human
uccagucaggccuaucuaaa

SEQ ID NO: 1477096 - RNA, 23 nt, Human
acgcgccucgccggaucugaggg

SEQ ID NO: 1477097 - RNA, 21 nt, Human
acggagucucacucugucacc

SEQ ID NO: 1477098 - RNA, 21 nt, Human
acguauuuaauagcaaagaau

SEQ ID NO: 1477099 - RNA, 16 nt, Human
acguauuuaauagcaa

SEQ ID NO: 1477100 - RNA, 21 nt, Human
acgucacuggaccacugggca

SEQ ID NO: 1477101 - RNA, 15 nt, Human
acuacacccagcaau

SEQ ID NO: 1477102 - RNA, 16 nt, Human
acuacacccagcaaua

SEQ ID NO: 1477103 - RNA, 14 nt, Human
acuacacccagcaa

SEQ ID NO: 1477104 - RNA, 13 nt, Human
acuacacccagca

SEQ ID NO: 1477105 - RNA, 12 nt, Human
ucccacuuguca

SEQ ID NO: 1477106 - RNA, 16 nt, Human
ucccagagcaaaauaa

SEQ ID NO: 1477107 - RNA, 15 nt, Human
acuaauuuuaaaaug

SEQ ID NO: 1477108 - RNA, 18 nt, Human
acuaacaaccaaagacua

SEQ ID NO: 1477109 - RNA, 15 nt, Human
acuaauuuuuauuuu

SEQ ID NO: 1477110 - RNA, 13 nt, Human
acuaaaucuuuua

SEQ ID NO: 1477111 - RNA, 15 nt, Human
acuaaaucuuuuaua

SEQ ID NO: 1477112 - RNA, 17 nt, Human
acucacaacagcugccu

SEQ ID NO: 1477113 - RNA, 18 nt, Human
acucaaggcggugcuuga

SEQ ID NO: 1477114 - RNA, 20 nt, Human
acuauggagugcaccaaaga

SEQ ID NO: 1477115 - RNA, 22 nt, Human
acuauggagugcaccaaagaga

SEQ ID NO: 1477116 - RNA, 23 nt, Human
acuauggagugcaccaaagagaa

SEQ ID NO: 1477117 - RNA, 21 nt, Human
acuauggauaaacuaaacacg

SEQ ID NO: 1477118 - RNA, 24 nt, Human
acuauggauaaacuaaacacguga

SEQ ID NO: 1477119 - RNA, 16 nt, Human
acuaucucauuuccaa

SEQ ID NO: 1477120 - RNA, 17 nt, Human
acuaucucauuuccaag

SEQ ID NO: 1477121 - RNA, 15 nt, Human
acuaucucauuucca

SEQ ID NO: 1477122 - RNA, 20 nt, Human
acuauaggcaugcgccacca

SEQ ID NO: 1477123 - RNA, 17 nt, Human
acuauauuguuugcuaa

SEQ ID NO: 1477124 - RNA, 22 nt, Human
acuauaggcaugcgccaccaug

SEQ ID NO: 1477125 - RNA, 21 nt, Human
acuauaguccagcuuuguucu

SEQ ID NO: 1477126 - RNA, 22 nt, Human
acuauauuguuugcuaagcauu

SEQ ID NO: 1477127 - RNA, 16 nt, Human
acuagagcaagcagga

SEQ ID NO: 1477128 - RNA, 16 nt, Human
ucccauuuaucgcaga

SEQ ID NO: 1477129 - RNA, 13 nt, Human
ucccauuucagcu

SEQ ID NO: 1477130 - RNA, 11 nt, Human
ucacacuggga

SEQ ID NO: 1477131 - RNA, 14 nt, Human
ucacaacagccuga

SEQ ID NO: 1477132 - RNA, 22 nt, Human
ucacaacagccugacaacauuu

SEQ ID NO: 1477133 - RNA, 16 nt, Human
ucaauucuugccaaau

SEQ ID NO: 1477134 - RNA, 20 nt, Human
accaaagcaccuuagcuggc

SEQ ID NO: 1477135 - RNA, 11 nt, Human
accaaagcaca

SEQ ID NO: 1477136 - RNA, 15 nt, Human
ucaauuucugaacac

SEQ ID NO: 1477137 - RNA, 16 nt, Human
accaccacgccuggcu

SEQ ID NO: 1477138 - RNA, 12 nt, Human
accaccaagccu

SEQ ID NO: 1477139 - RNA, 19 nt, Human
accaccaagccuugauugg

SEQ ID NO: 1477140 - RNA, 15 nt, Human
accaccaagccuuga

SEQ ID NO: 1477141 - RNA, 14 nt, Human
accaccaagccuug

SEQ ID NO: 1477142 - RNA, 24 nt, Human
accacauuggagauguuuaguaau

SEQ ID NO: 1477143 - RNA, 17 nt, Human
ucaccauguuagccagg

SEQ ID NO: 1477144 - RNA, 16 nt, Human
ucaccauuuggauccu

SEQ ID NO: 1477145 - RNA, 20 nt, Human
ucaccauuuggauccugugu

SEQ ID NO: 1477146 - RNA, 13 nt, Human
ucacccccagcuu

SEQ ID NO: 1477147 - RNA, 18 nt, Human
ucacccccagcuuugcua

SEQ ID NO: 1477148 - RNA, 21 nt, Human
ucaccauguuagccaggcugg

SEQ ID NO: 1477149 - RNA, 17 nt, Human
ucacguuuggugcuucu

SEQ ID NO: 1477150 - RNA, 21 nt, Human
ucacguuuggugcuucucaga

SEQ ID NO: 1477151 - RNA, 17 nt, Human
ucacuaaaucuuuuaua

SEQ ID NO: 1477152 - RNA, 12 nt, Human
ucacuaaaucuu

SEQ ID NO: 1477153 - RNA, 14 nt, Human
ucacuaauucauua

SEQ ID NO: 1477154 - RNA, 15 nt, Human
ucacuaauucauuaa

SEQ ID NO: 1477155 - RNA, 18 nt, Human
ucacuaauucauuaaucu

SEQ ID NO: 1477156 - RNA, 16 nt, Human
ucaccuguaaaccuga

SEQ ID NO: 1477157 - RNA, 17 nt, Human
ucaccuguaaaccugag

SEQ ID NO: 1477158 - RNA, 19 nt, Human
ucaccuguaaaccugaguc

SEQ ID NO: 1477159 - RNA, 12 nt, Human
ucaccucaugga

SEQ ID NO: 1477160 - RNA, 13 nt, Human
ucaccucauggaa

SEQ ID NO: 1477161 - RNA, 14 nt, Human
ucaccucauggaau

SEQ ID NO: 1477162 - RNA, 22 nt, Human
accaggacuagggcuggaguga

SEQ ID NO: 1477163 - RNA, 12 nt, Human
accaggacccug

SEQ ID NO: 1477164 - RNA, 14 nt, Human
accagucugacugu

SEQ ID NO: 1477165 - RNA, 20 nt, Human
accaguaggggcuuauaaua

SEQ ID NO: 1477166 - RNA, 20 nt, Human
ucacuguuuagaacacacac

SEQ ID NO: 1477167 - RNA, 17 nt, Human
ucacuguuuagaacaca

SEQ ID NO: 1477168 - RNA, 18 nt, Human
ucaaauugugugaaaggu

SEQ ID NO: 1477169 - RNA, 23 nt, Human
acauucugauucgaaugacacug

SEQ ID NO: 1477170 - RNA, 14 nt, Human
acauuccugaacag

SEQ ID NO: 1477171 - RNA, 15 nt, Human
acauuccugaacagg

SEQ ID NO: 1477172 - RNA, 22 nt, Human
acauuccucaugaauguaaauu

SEQ ID NO: 1477173 - RNA, 20 nt, Human
acauuccucaugaauguaaa

SEQ ID NO: 1477174 - RNA, 21 nt, Human
acauuccucaugaauguaaau

SEQ ID NO: 1477175 - RNA, 12 nt, Human
acaugucaaucu

SEQ ID NO: 1477176 - RNA, 15 nt, Human
acaugucaaucuguc

SEQ ID NO: 1477177 - RNA, 17 nt, Human
acauuccucaugaaugu

SEQ ID NO: 1477178 - RNA, 18 nt, Human
acauuccucaugaaugua

SEQ ID NO: 1477179 - RNA, 19 nt, Human
acauuccucaugaauguaa

SEQ ID NO: 1477180 - RNA, 16 nt, Human
ucaaccaucgcuuuau

SEQ ID NO: 1477181 - RNA, 16 nt, Human
ucaaccccagacacug

SEQ ID NO: 1477182 - RNA, 17 nt, Human
ucaaccccagacacugg

SEQ ID NO: 1477183 - RNA, 18 nt, Human
ucaaccccagacacuggu

SEQ ID NO: 1477184 - RNA, 15 nt, Human
ucaaccccuccccuc

SEQ ID NO: 1477185 - RNA, 14 nt, Human
ucaacugccuacuc

SEQ ID NO: 1477186 - RNA, 18 nt, Human
ucaacugccuacuccaaa

SEQ ID NO: 1477187 - RNA, 20 nt, Human
ucaacugccuacuccaaaau

SEQ ID NO: 1477188 - RNA, 12 nt, Human
ucaacaaacauu

SEQ ID NO: 1477189 - RNA, 15 nt, Human
acaugggacauuugc

SEQ ID NO: 1477190 - RNA, 20 nt, Human
acaugggacauuugcucaug

SEQ ID NO: 1477191 - RNA, 21 nt, Human
acaugggacauuugcucaugg

SEQ ID NO: 1477192 - RNA, 11 nt, Human
acaugggacau

SEQ ID NO: 1477193 - RNA, 14 nt, Human
acaugggacauuug

SEQ ID NO: 1477194 - RNA, 19 nt, Human
acaugcuucccuuuccuga

SEQ ID NO: 1477195 - RNA, 18 nt, Human
acaugcuucccuuuccug

SEQ ID NO: 1477196 - RNA, 16 nt, Human
acaugcuucccuuucc

SEQ ID NO: 1477197 - RNA, 13 nt, Human
acaugcuucccuu

SEQ ID NO: 1477198 - RNA, 17 nt, Human
acaugcuaagagaagua

SEQ ID NO: 1477199 - RNA, 18 nt, Human
acaugcuaagagaaguag

SEQ ID NO: 1477200 - RNA, 19 nt, Human
acaugcuaagagaaguaga

SEQ ID NO: 1477201 - RNA, 24 nt, Human
acaugcuaagagaaguagaaauca

SEQ ID NO: 1477202 - RNA, 20 nt, Human
acaugaauauuuaguguuca

SEQ ID NO: 1477203 - RNA, 15 nt, Human
ucaauauuucagaua

SEQ ID NO: 1477204 - RNA, 19 nt, Human
ucaauauuucagauaauca

SEQ ID NO: 1477205 - RNA, 17 nt, Human
ucaaucuguaaacugug

SEQ ID NO: 1477206 - RNA, 13 nt, Human
ucaaucuguaaac

SEQ ID NO: 1477207 - RNA, 14 nt, Human
ucaaucuguaaacu

SEQ ID NO: 1477208 - RNA, 16 nt, Human
ucaaucuguaaacugu

SEQ ID NO: 1477209 - RNA, 17 nt, Human
ucaauauucaauaaagc

SEQ ID NO: 1477210 - RNA, 16 nt, Human
ucaauauucaauaaag

SEQ ID NO: 1477211 - RNA, 15 nt, Human
ucaauauucaauaaa

SEQ ID NO: 1477212 - RNA, 19 nt, Human
ucaagucuguuuacugcaa

SEQ ID NO: 1477213 - RNA, 18 nt, Human
ucaauauaagcuuuucuu

SEQ ID NO: 1477214 - RNA, 19 nt, Human
ucaaguccugccucuuaaa

SEQ ID NO: 1477215 - RNA, 20 nt, Human
ucaaguccugccucuuaaau

SEQ ID NO: 1477216 - RNA, 21 nt, Human
ucaacuuuuccuuugaauccu

SEQ ID NO: 1477217 - RNA, 15 nt, Human
ucaacuuuuccuuug

SEQ ID NO: 1477218 - RNA, 14 nt, Human
ucaacuugcuuauc

SEQ ID NO: 1477219 - RNA, 19 nt, Human
ucaacuuauuaacaauuag

SEQ ID NO: 1477220 - RNA, 12 nt, Human
acauuuuccuuu

SEQ ID NO: 1477221 - RNA, 19 nt, Human
acauuuuccuuuucaaaua

SEQ ID NO: 1477222 - RNA, 18 nt, Human
acauuuucuaagaaacau

SEQ ID NO: 1477223 - RNA, 19 nt, Human
acauuuucuaagaaacauu

SEQ ID NO: 1477224 - RNA, 11 nt, Human
acauuuucucc

SEQ ID NO: 1477225 - RNA, 17 nt, Human
acauuuucucccuggau

SEQ ID NO: 1477226 - RNA, 11 nt, Human
acauugugcca

SEQ ID NO: 1477227 - RNA, 13 nt, Human
accaaaagaagua

SEQ ID NO: 1477228 - RNA, 21 nt, Human
accaaaagaaguaaaagcaaa

SEQ ID NO: 1477229 - RNA, 14 nt, Human
accaaaagaaguaa

SEQ ID NO: 1477230 - RNA, 14 nt, Human
accaaaaguuacau

SEQ ID NO: 1477231 - RNA, 21 nt, Human
accaaaaguuacauguuugca

SEQ ID NO: 1477232 - RNA, 23 nt, Human
accaaaaguuacauguuugcacc

SEQ ID NO: 1477233 - RNA, 15 nt, Human
accaaagaagaaagu

SEQ ID NO: 1477234 - RNA, 16 nt, Human
ucagauuucugaggaa

SEQ ID NO: 1477235 - RNA, 23 nt, Human
accaguguguggcuuucagagcc

SEQ ID NO: 1477236 - RNA, 17 nt, Human
accccauccaguucaug

SEQ ID NO: 1477237 - RNA, 23 nt, Human
acccucguggacaccugcccugc

SEQ ID NO: 1477238 - RNA, 22 nt, Human
acccucguggacaccugcccug

SEQ ID NO: 1477239 - RNA, 20 nt, Human
acccucguggacaccugccc

SEQ ID NO: 1477240 - RNA, 19 nt, Human
acccucguggacaccugcc

SEQ ID NO: 1477241 - RNA, 18 nt, Human
acccucguggacaccugc

SEQ ID NO: 1477242 - RNA, 17 nt, Human
acccucguggacaccug

SEQ ID NO: 1477243 - RNA, 15 nt, Human
acccucguggacacc

SEQ ID NO: 1477244 - RNA, 17 nt, Human
acccuuucuucagcucu

SEQ ID NO: 1477245 - RNA, 19 nt, Human
accuauuuccagaaauaca

SEQ ID NO: 1477246 - RNA, 23 nt, Human
accuauuucuuaaacacuugcaa

SEQ ID NO: 1477247 - RNA, 18 nt, Human
accuauuucuuaaacacu

SEQ ID NO: 1477248 - RNA, 17 nt, Human
accuauuuccagaaaua

SEQ ID NO: 1477249 - RNA, 16 nt, Human
accuauuuccagaaau

SEQ ID NO: 1477250 - RNA, 22 nt, Human
accuaugucauuucauuuccua

SEQ ID NO: 1477251 - RNA, 16 nt, Human
accuagggugauauua

SEQ ID NO: 1477252 - RNA, 15 nt, Human
accgcagaaggaagg

SEQ ID NO: 1477253 - RNA, 15 nt, Human
accuaccuguugagc

SEQ ID NO: 1477254 - RNA, 17 nt, Human
accuaccuguugagcau

SEQ ID NO: 1477255 - RNA, 24 nt, Human
accuaccuguugagcaucacagaa

SEQ ID NO: 1477256 - RNA, 12 nt, Human
accuaggcuagg

SEQ ID NO: 1477257 - RNA, 17 nt, Human
accuaggcuaggguggg

SEQ ID NO: 1477258 - RNA, 19 nt, Human
accuacugcccaggcacug

SEQ ID NO: 1477259 - RNA, 23 nt, Human
accuacugcccaggcacugcaaa

SEQ ID NO: 1477260 - RNA, 20 nt, Human
accuacuuugacuuuuugca

SEQ ID NO: 1477261 - RNA, 21 nt, Human
accuacuuugacuuuuugcau

SEQ ID NO: 1477262 - RNA, 17 nt, Human
accucccucaaccucau

SEQ ID NO: 1477263 - RNA, 17 nt, Human
accucccuauacugcuu

SEQ ID NO: 1477264 - RNA, 15 nt, Human
accuccaccuccugg

SEQ ID NO: 1477265 - RNA, 17 nt, Human
accuccaccuccugggu

SEQ ID NO: 1477266 - RNA, 23 nt, Human
ucaugcaaacuuuauuuuguguu

SEQ ID NO: 1477267 - RNA, 16 nt, Human
ucaugugaaaucauuc

SEQ ID NO: 1477268 - RNA, 17 nt, Human
ucaugugaaaucauuca

SEQ ID NO: 1477269 - RNA, 14 nt, Human
ucaugcauggaaau

SEQ ID NO: 1477270 - RNA, 14 nt, Human
ucaugugacucuuu

SEQ ID NO: 1477271 - RNA, 17 nt, Human
ucaugugacucuuucca

SEQ ID NO: 1477272 - RNA, 15 nt, Human
ucauguguauaaaaa

SEQ ID NO: 1477273 - RNA, 18 nt, Human
ucaugugacucuuuccaa

SEQ ID NO: 1477274 - RNA, 19 nt, Human
ucaugugacucuuuccaac

SEQ ID NO: 1477275 - RNA, 10 nt, Human
ucauguguau

SEQ ID NO: 1477276 - RNA, 14 nt, Human
ucauguguauaaaa

SEQ ID NO: 1477277 - RNA, 20 nt, Human
ucauguguacaaaaguuuca

SEQ ID NO: 1477278 - RNA, 14 nt, Human
ucaugcaaacuuua

SEQ ID NO: 1477279 - RNA, 21 nt, Human
ucaugauuuugaaaucaugaa

SEQ ID NO: 1477280 - RNA, 14 nt, Human
ucaugauuuugaaa

SEQ ID NO: 1477281 - RNA, 19 nt, Human
ucaugaagauauuuuucca

SEQ ID NO: 1477282 - RNA, 16 nt, Human
ucaugaaagauucaau

SEQ ID NO: 1477283 - RNA, 17 nt, Human
ucaugaaagauucaaug

SEQ ID NO: 1477284 - RNA, 11 nt, Human
ucaugaaccuc

SEQ ID NO: 1477285 - RNA, 22 nt, Human
ucaugaaccucaagcugcaucu

SEQ ID NO: 1477286 - RNA, 13 nt, Human
ucaucuaggauuu

SEQ ID NO: 1477287 - RNA, 14 nt, Human
ucauccauucuauu

SEQ ID NO: 1477288 - RNA, 19 nt, Human
ucauccauucuauuguuaa

SEQ ID NO: 1477289 - RNA, 15 nt, Human
ucaguuuuugugaaa

SEQ ID NO: 1477290 - RNA, 17 nt, Human
ucaguuuuugugaaaag

SEQ ID NO: 1477291 - RNA, 14 nt, Human
accgcagaaggaag

SEQ ID NO: 1477292 - RNA, 13 nt, Human
accgcagaaggaa

SEQ ID NO: 1477293 - RNA, 12 nt, Human
accgcagaagga

SEQ ID NO: 1477294 - RNA, 15 nt, Human
ucauauuuucaugcu

SEQ ID NO: 1477295 - RNA, 13 nt, Human
accgaggcaggga

SEQ ID NO: 1477296 - RNA, 15 nt, Human
ucauauuuucuuuca

SEQ ID NO: 1477297 - RNA, 21 nt, Human
ucauauugugauucugccuuu

SEQ ID NO: 1477298 - RNA, 14 nt, Human
ucauauauauacau

SEQ ID NO: 1477299 - RNA, 18 nt, Human
ucauauaaaguaucauca

SEQ ID NO: 1477300 - RNA, 13 nt, Human
ucauauaaaguau

SEQ ID NO: 1477301 - RNA, 16 nt, Human
ucauauaaaguaucau

SEQ ID NO: 1477302 - RNA, 20 nt, Human
uaacgauaaaagacagugaa

SEQ ID NO: 1477303 - RNA, 16 nt, Human
uaaccuuaauuuauua

SEQ ID NO: 1477304 - RNA, 21 nt, Human
uaaccuuaccagauuuuuaca

SEQ ID NO: 1477305 - RNA, 14 nt, Human
uaacuuaaauagua

SEQ ID NO: 1477306 - RNA, 16 nt, Human
uaacuuaaauaguauu

SEQ ID NO: 1477307 - RNA, 17 nt, Human
uaacuuaaauaguauuu

SEQ ID NO: 1477308 - RNA, 15 nt, Human
uaacuuucucuauga

SEQ ID NO: 1477309 - RNA, 18 nt, Human
aauauauuuuaagacgaa

SEQ ID NO: 1477310 - RNA, 22 nt, Human
aauaucacuugucaauaaaauc

SEQ ID NO: 1477311 - RNA, 13 nt, Human
uaacaucugagaa

SEQ ID NO: 1477312 - RNA, 14 nt, Human
uaacaugaauauuu

SEQ ID NO: 1477313 - RNA, 16 nt, Human
aauagucaaauugugu

SEQ ID NO: 1477314 - RNA, 14 nt, Human
uaaaauuuauauug

SEQ ID NO: 1477315 - RNA, 17 nt, Human
uaaaauuuauauuguaa

SEQ ID NO: 1477316 - RNA, 16 nt, Human
uaaaauuuauauugua

SEQ ID NO: 1477317 - RNA, 19 nt, Human
aauagucaaauugugugaa

SEQ ID NO: 1477318 - RNA, 15 nt, Human
aauauauuuuaagac

SEQ ID NO: 1477319 - RNA, 14 nt, Human
aauauauuuuaaga

SEQ ID NO: 1477320 - RNA, 12 nt, Human
aauauuuagugu

SEQ ID NO: 1477321 - RNA, 18 nt, Human
aauauuuauuuuaauaau

SEQ ID NO: 1477322 - RNA, 19 nt, Human
aauauuuauuuuaauaaug

SEQ ID NO: 1477323 - RNA, 14 nt, Human
aauauuucagauaa

SEQ ID NO: 1477324 - RNA, 9 nt, Human
aauauugug

SEQ ID NO: 1477325 - RNA, 21 nt, Human
aauaugccccauucaacaucu

SEQ ID NO: 1477326 - RNA, 24 nt, Human
aauaugccccauucaacaucuagu

SEQ ID NO: 1477327 - RNA, 21 nt, Human
aauaugccugcuauuugaagu

SEQ ID NO: 1477328 - RNA, 12 nt, Human
uaagagaaguag

SEQ ID NO: 1477329 - RNA, 14 nt, Human
uaagagaaguagaa

SEQ ID NO: 1477330 - RNA, 18 nt, Human
uaagagaaguagaaauca

SEQ ID NO: 1477331 - RNA, 20 nt, Human
uaagagaaguagaaaucaua

SEQ ID NO: 1477332 - RNA, 14 nt, Human
uaagacuugacagu

SEQ ID NO: 1477333 - RNA, 17 nt, Human
uaagacuugacagugga

SEQ ID NO: 1477334 - RNA, 22 nt, Human
aaucaggguuaguauuguccag

SEQ ID NO: 1477335 - RNA, 18 nt, Human
aauauuuuuucuuuucua

SEQ ID NO: 1477336 - RNA, 16 nt, Human
aaucaggguuaguauu

SEQ ID NO: 1477337 - RNA, 21 nt, Human
aaucaggguuaguauugucca

SEQ ID NO: 1477338 - RNA, 17 nt, Human
aauauuuuuaauauaua

SEQ ID NO: 1477339 - RNA, 13 nt, Human
aauauuuuucuua

SEQ ID NO: 1477340 - RNA, 12 nt, Human
aauauuuguaca

SEQ ID NO: 1477341 - RNA, 14 nt, Human
aauauuuguacaua

SEQ ID NO: 1477342 - RNA, 17 nt, Human
aauauuugugacaaaaa

SEQ ID NO: 1477343 - RNA, 11 nt, Human
aauauuuuaaa

SEQ ID NO: 1477344 - RNA, 13 nt, Human
aauauuuuaaaga

SEQ ID NO: 1477345 - RNA, 15 nt, Human
aauauuuuaaagaau

SEQ ID NO: 1477346 - RNA, 20 nt, Human
aauauuuugcuaguuuuuga

SEQ ID NO: 1477347 - RNA, 16 nt, Human
uaagcuggagugcagu

SEQ ID NO: 1477348 - RNA, 14 nt, Human
uaagcugaaaauau

SEQ ID NO: 1477349 - RNA, 14 nt, Human
uaagcaagaaggca

SEQ ID NO: 1477350 - RNA, 23 nt, Human
uaagcaaaaacaaaaagaaaaga

SEQ ID NO: 1477351 - RNA, 15 nt, Human
uaagauuuccuucuu

SEQ ID NO: 1477352 - RNA, 16 nt, Human
uaagauuuccuucuuu

SEQ ID NO: 1477353 - RNA, 16 nt, Human
aaucuuuaauuuuaca

SEQ ID NO: 1477354 - RNA, 15 nt, Human
aaucuuuaauuuuac

SEQ ID NO: 1477355 - RNA, 19 nt, Human
uaauguguauuacaaauau

SEQ ID NO: 1477356 - RNA, 13 nt, Human
uaauguuaauauu

SEQ ID NO: 1477357 - RNA, 17 nt, Human
uaauguuaauauugauu

SEQ ID NO: 1477358 - RNA, 16 nt, Human
uaauguuaauauugau

SEQ ID NO: 1477359 - RNA, 21 nt, Human
aaucuuuaaaagaugcuuuua

SEQ ID NO: 1477360 - RNA, 17 nt, Human
aaugaauuaaauaaacc

SEQ ID NO: 1477361 - RNA, 23 nt, Human
aaugaaacaaagaguucaagaaa

SEQ ID NO: 1477362 - RNA, 16 nt, Human
aaugaaacaaagaguu

SEQ ID NO: 1477363 - RNA, 12 nt, Human
uaauccaguaaa

SEQ ID NO: 1477364 - RNA, 21 nt, Human
uaaucccagcaugcugagauu

SEQ ID NO: 1477365 - RNA, 18 nt, Human
uaaucacgcuuuccugaa

SEQ ID NO: 1477366 - RNA, 13 nt, Human
uaaugaaacaaag

SEQ ID NO: 1477367 - RNA, 16 nt, Human
uaaugaaacaaagagu

SEQ ID NO: 1477368 - RNA, 14 nt, Human
uaauagauguuuga

SEQ ID NO: 1477369 - RNA, 16 nt, Human
uaauagauguuugaua

SEQ ID NO: 1477370 - RNA, 21 nt, Human
uaauagauguuugauagauuu

SEQ ID NO: 1477371 - RNA, 22 nt, Human
uaauagauguuugauagauuuu

SEQ ID NO: 1477372 - RNA, 15 nt, Human
uaauagcaaagaauu

SEQ ID NO: 1477373 - RNA, 13 nt, Human
uaauagcaaagaa

SEQ ID NO: 1477374 - RNA, 18 nt, Human
uaauaaacacucuugaaa

SEQ ID NO: 1477375 - RNA, 12 nt, Human
uaauaaacacuc

SEQ ID NO: 1477376 - RNA, 15 nt, Human
uaauaaaauucaaca

SEQ ID NO: 1477377 - RNA, 13 nt, Human
uaauaaacauucu

SEQ ID NO: 1477378 - RNA, 12 nt, Human
aaucaugaauua

SEQ ID NO: 1477379 - RNA, 15 nt, Human
aaucaugaauuaguu

SEQ ID NO: 1477380 - RNA, 20 nt, Human
aaucaugaagauauuuuucc

SEQ ID NO: 1477381 - RNA, 20 nt, Human
aaucauagcugguucacacu

SEQ ID NO: 1477382 - RNA, 15 nt, Human
uaagcuuaugcuuaa

SEQ ID NO: 1477383 - RNA, 16 nt, Human
uaagcuuguauuccuu

SEQ ID NO: 1477384 - RNA, 20 nt, Human
uaagcuuuucuuuucuuugu

SEQ ID NO: 1477385 - RNA, 16 nt, Human
uaagcuuuucuuuucu

SEQ ID NO: 1477386 - RNA, 19 nt, Human
uaaguaaugauaacuggaa

SEQ ID NO: 1477387 - RNA, 17 nt, Human
uaaguauuaugucucuu

SEQ ID NO: 1477388 - RNA, 21 nt, Human
uaaguauuaugucucuucuga

SEQ ID NO: 1477389 - RNA, 21 nt, Human
aaucuggcuucuggccaggaa

SEQ ID NO: 1477390 - RNA, 23 nt, Human
aaucuggcuucuggccaggaagc

SEQ ID NO: 1477391 - RNA, 19 nt, Human
aaucuuauaauuuaaaaua

SEQ ID NO: 1477392 - RNA, 15 nt, Human
aaucuguuuuucuaa

SEQ ID NO: 1477393 - RNA, 16 nt, Human
aaucuguuuuucuaac

SEQ ID NO: 1477394 - RNA, 19 nt, Human
aaucuuaagguguagccac

SEQ ID NO: 1477395 - RNA, 20 nt, Human
aaucuuaagguguagccaca

SEQ ID NO: 1477396 - RNA, 12 nt, Human
aauccgcccauc

SEQ ID NO: 1477397 - RNA, 21 nt, Human
aaucccuuaauauccuaaaca

SEQ ID NO: 1477398 - RNA, 19 nt, Human
aauccugucgauuagacug

SEQ ID NO: 1477399 - RNA, 21 nt, Human
aauccugucgauuagacugga

SEQ ID NO: 1477400 - RNA, 20 nt, Human
aauccugucgauuagacugg

SEQ ID NO: 1477401 - RNA, 19 nt, Human
aauguauacuauaguacca

SEQ ID NO: 1477402 - RNA, 13 nt, Human
aauguauaguaaa

SEQ ID NO: 1477403 - RNA, 22 nt, Human
aauguauuacaguggggaauga

SEQ ID NO: 1477404 - RNA, 18 nt, Human
aaugugcuauacugcaua

SEQ ID NO: 1477405 - RNA, 20 nt, Human
aaugugauuuacgcucauug

SEQ ID NO: 1477406 - RNA, 20 nt, Human
uacaucccuuaccugggaaa

SEQ ID NO: 1477407 - RNA, 12 nt, Human
uacaucauuucu

SEQ ID NO: 1477408 - RNA, 13 nt, Human
uacaucauuucuu

SEQ ID NO: 1477409 - RNA, 14 nt, Human
uacaucauuucuuu

SEQ ID NO: 1477410 - RNA, 20 nt, Human
uacaucauuucuuuuuggga

SEQ ID NO: 1477411 - RNA, 15 nt, Human
uacauaauucacucu

SEQ ID NO: 1477412 - RNA, 17 nt, Human
uacauaauucacucuga

SEQ ID NO: 1477413 - RNA, 16 nt, Human
uacauaauucacucug

SEQ ID NO: 1477414 - RNA, 17 nt, Human
aauuaauuccuucagca

SEQ ID NO: 1477415 - RNA, 21 nt, Human
aauuaagaaaggauaaaguug

SEQ ID NO: 1477416 - RNA, 22 nt, Human
aauuaacuggguaaugaaacaa

SEQ ID NO: 1477417 - RNA, 15 nt, Human
aauuaagagagucua

SEQ ID NO: 1477418 - RNA, 15 nt, Human
aauguugaaauauga

SEQ ID NO: 1477419 - RNA, 22 nt, Human
aauguugaaauaugauguuaaa

SEQ ID NO: 1477420 - RNA, 18 nt, Human
aauuaacuggguaaugaa

SEQ ID NO: 1477421 - RNA, 21 nt, Human
aauuaacuggguaaugaaaca

SEQ ID NO: 1477422 - RNA, 19 nt, Human
aauguuaagacuugacagu

SEQ ID NO: 1477423 - RNA, 14 nt, Human
uacacuaagagaga

SEQ ID NO: 1477424 - RNA, 18 nt, Human
uacacuaagagagaauga

SEQ ID NO: 1477425 - RNA, 15 nt, Human
aauguaacuuuugua

SEQ ID NO: 1477426 - RNA, 16 nt, Human
aauguaacuuuuguaa

SEQ ID NO: 1477427 - RNA, 22 nt, Human
aauguaacuuuuguaagacaaa

SEQ ID NO: 1477428 - RNA, 23 nt, Human
aauggcaugagaaauacaaaaau

SEQ ID NO: 1477429 - RNA, 12 nt, Human
aauguaaauuug

SEQ ID NO: 1477430 - RNA, 13 nt, Human
aauguaaauuugu

SEQ ID NO: 1477431 - RNA, 14 nt, Human
aauguaaauuugua

SEQ ID NO: 1477432 - RNA, 15 nt, Human
aauguaaauuuguac

SEQ ID NO: 1477433 - RNA, 16 nt, Human
aauguaaauuuguacu

SEQ ID NO: 1477434 - RNA, 18 nt, Human
aauguaaauuuguacuau

SEQ ID NO: 1477435 - RNA, 17 nt, Human
aauguaaauuuguacua

SEQ ID NO: 1477436 - RNA, 22 nt, Human
aauguaaauauuuuaaagaauu

SEQ ID NO: 1477437 - RNA, 20 nt, Human
aauggcuauguuuuuaaugu

SEQ ID NO: 1477438 - RNA, 16 nt, Human
aauggcuauguuuuua

SEQ ID NO: 1477439 - RNA, 20 nt, Human
aauggcaugagaaauacaaa

SEQ ID NO: 1477440 - RNA, 17 nt, Human
aauggccauuugcuuuu

SEQ ID NO: 1477441 - RNA, 13 nt, Human
aauggccuuuauu

SEQ ID NO: 1477442 - RNA, 14 nt, Human
aauggcuauguuuu

SEQ ID NO: 1477443 - RNA, 22 nt, Human
aaugccaugaugccucugucuu

SEQ ID NO: 1477444 - RNA, 16 nt, Human
aaugcuucaucccuuu

SEQ ID NO: 1477445 - RNA, 22 nt, Human
aaugcuuaaucagauagauauu

SEQ ID NO: 1477446 - RNA, 14 nt, Human
aaugcuuaaucaga

SEQ ID NO: 1477447 - RNA, 20 nt, Human
aaugcuguauuuuaaaagaa

SEQ ID NO: 1477448 - RNA, 16 nt, Human
aaugcuguauuuuaaa

SEQ ID NO: 1477449 - RNA, 14 nt, Human
aauuacgugcucug

SEQ ID NO: 1477450 - RNA, 14 nt, Human
aauuaccuucuauu

SEQ ID NO: 1477451 - RNA, 14 nt, Human
aauuacacccaaag

SEQ ID NO: 1477452 - RNA, 18 nt, Human
aauuacaacggagucaaa

SEQ ID NO: 1477453 - RNA, 16 nt, Human
aauuacaacuaaguga

SEQ ID NO: 1477454 - RNA, 14 nt, Human
aauuacaacuaagu

SEQ ID NO: 1477455 - RNA, 14 nt, Human
aauuacugguccaa

SEQ ID NO: 1477456 - RNA, 12 nt, Human
aauuagcaauug

SEQ ID NO: 1477457 - RNA, 17 nt, Human
uaccugcucagcccugc

SEQ ID NO: 1477458 - RNA, 16 nt, Human
aauuauuauuuggccc

SEQ ID NO: 1477459 - RNA, 11 nt, Human
aauuauuuugu

SEQ ID NO: 1477460 - RNA, 22 nt, Human
aauucaaagcuguguguuugga

SEQ ID NO: 1477461 - RNA, 18 nt, Human
aauuccaagugauugaaa

SEQ ID NO: 1477462 - RNA, 12 nt, Human
aauucacucuga

SEQ ID NO: 1477463 - RNA, 23 nt, Human
aauucacucugaguguuuuauga

SEQ ID NO: 1477464 - RNA, 15 nt, Human
aauucaacaaacauu

SEQ ID NO: 1477465 - RNA, 19 nt, Human
aauugaugggauuugguca

SEQ ID NO: 1477466 - RNA, 18 nt, Human
aauugaguguuuaaaguu

SEQ ID NO: 1477467 - RNA, 17 nt, Human
aauugaucgacuugcca

SEQ ID NO: 1477468 - RNA, 15 nt, Human
aauugccugacgaac

SEQ ID NO: 1477469 - RNA, 23 nt, Human
aauugccugacgaacuccuugau

SEQ ID NO: 1477470 - RNA, 14 nt, Human
aauugacugucacu

SEQ ID NO: 1477471 - RNA, 18 nt, Human
uacuguaaggcaaucaug

SEQ ID NO: 1477472 - RNA, 14 nt, Human
uacuguaagaaaau

SEQ ID NO: 1477473 - RNA, 19 nt, Human
uacuguaaggcaaucaugg

SEQ ID NO: 1477474 - RNA, 21 nt, Human
uacucugaaauuguaacuaaa

SEQ ID NO: 1477475 - RNA, 16 nt, Human
uacuauaguaccagua

SEQ ID NO: 1477476 - RNA, 13 nt, Human
uacuauaguacca

SEQ ID NO: 1477477 - RNA, 12 nt, Human
uacuauaguacc

SEQ ID NO: 1477478 - RNA, 14 nt, Human
uacuacuguguaag

SEQ ID NO: 1477479 - RNA, 17 nt, Human
uacuacugaaucucuaa

SEQ ID NO: 1477480 - RNA, 16 nt, Human
uacuacugaaucucua

SEQ ID NO: 1477481 - RNA, 16 nt, Human
acagccucuuagaugc

SEQ ID NO: 1477482 - RNA, 16 nt, Human
uaugguaccagaugca

SEQ ID NO: 1477483 - RNA, 17 nt, Human
uaugguaccagaugcag

SEQ ID NO: 1477484 - RNA, 17 nt, Human
acagccugacaacauuu

SEQ ID NO: 1477485 - RNA, 20 nt, Human
acagccugacaacauuucua

SEQ ID NO: 1477486 - RNA, 21 nt, Human
acagccugacaacauuucuau

SEQ ID NO: 1477487 - RNA, 11 nt, Human
uaugggucaca

SEQ ID NO: 1477488 - RNA, 13 nt, Human
uaugggucacagg

SEQ ID NO: 1477489 - RNA, 14 nt, Human
uaugggucacagga

SEQ ID NO: 1477490 - RNA, 15 nt, Human
uaugggucacaggaa

SEQ ID NO: 1477491 - RNA, 14 nt, Human
uaugggucuaggac

SEQ ID NO: 1477492 - RNA, 15 nt, Human
uaugcuuacugauau

SEQ ID NO: 1477493 - RNA, 16 nt, Human
uaugcuuacugauaua

SEQ ID NO: 1477494 - RNA, 21 nt, Human
uaugcuuacugauauauuuua

SEQ ID NO: 1477495 - RNA, 19 nt, Human
uaugccccauucaacaucu

SEQ ID NO: 1477496 - RNA, 14 nt, Human
uaugccugcuauuu

SEQ ID NO: 1477497 - RNA, 16 nt, Human
uaugccuuguuucaua

SEQ ID NO: 1477498 - RNA, 18 nt, Human
uaugccugcuauuugaag

SEQ ID NO: 1477499 - RNA, 18 nt, Human
uaugaacuugaggacaca

SEQ ID NO: 1477500 - RNA, 16 nt, Human
uaugaacuugaggaca

SEQ ID NO: 1477501 - RNA, 19 nt, Human
uaugaacauauuguugaaa

SEQ ID NO: 1477502 - RNA, 17 nt, Human
uaugaacauauuguuga

SEQ ID NO: 1477503 - RNA, 16 nt, Human
uaugauuaaguaauga

SEQ ID NO: 1477504 - RNA, 20 nt, Human
uaugauuaaguaaugauaac

SEQ ID NO: 1477505 - RNA, 21 nt, Human
uaugauuaaguaaugauaacu

SEQ ID NO: 1477506 - RNA, 22 nt, Human
uaucuuugccacccucaugcug

SEQ ID NO: 1477507 - RNA, 23 nt, Human
uaucuuuucauacauuuucuaag

SEQ ID NO: 1477508 - RNA, 21 nt, Human
uaucuuuucauacauuuucua

SEQ ID NO: 1477509 - RNA, 14 nt, Human
uaugaacauauugu

SEQ ID NO: 1477510 - RNA, 16 nt, Human
uaucuuugccacccuc

SEQ ID NO: 1477511 - RNA, 14 nt, Human
uaucuuugccaccc

SEQ ID NO: 1477512 - RNA, 11 nt, Human
uaucuuugcca

SEQ ID NO: 1477513 - RNA, 14 nt, Human
acagauuguuugca

SEQ ID NO: 1477514 - RNA, 15 nt, Human
acagauuguuugcaa

SEQ ID NO: 1477515 - RNA, 23 nt, Human
uaucuauauuuuacauaaauuua

SEQ ID NO: 1477516 - RNA, 11 nt, Human
uaucucaucuc

SEQ ID NO: 1477517 - RNA, 17 nt, Human
uaucaaccccagacacu

SEQ ID NO: 1477518 - RNA, 18 nt, Human
uaucaaccccagacacug

SEQ ID NO: 1477519 - RNA, 21 nt, Human
uaucaaccccagacacugguu

SEQ ID NO: 1477520 - RNA, 19 nt, Human
uaucaaccccagacacugg

SEQ ID NO: 1477521 - RNA, 14 nt, Human
uaucaacuuccuaa

SEQ ID NO: 1477522 - RNA, 19 nt, Human
uaucaacuuccuaaauauu

SEQ ID NO: 1477523 - RNA, 13 nt, Human
uauccaaaagcuu

SEQ ID NO: 1477524 - RNA, 15 nt, Human
uauccacuuugcaca

SEQ ID NO: 1477525 - RNA, 18 nt, Human
uauccacuuugcacagcu

SEQ ID NO: 1477526 - RNA, 17 nt, Human
uauccaggcaccaggac

SEQ ID NO: 1477527 - RNA, 15 nt, Human
uauccaggcaccagg

SEQ ID NO: 1477528 - RNA, 18 nt, Human
uauccaggcaccaggacu

SEQ ID NO: 1477529 - RNA, 16 nt, Human
uauccuaaacaucauu

SEQ ID NO: 1477530 - RNA, 23 nt, Human
uauaaguguguguuuuucauaaa

SEQ ID NO: 1477531 - RNA, 17 nt, Human
uauaaguguguguuuuu

SEQ ID NO: 1477532 - RNA, 16 nt, Human
uauauuuaguaucuuu

SEQ ID NO: 1477533 - RNA, 15 nt, Human
uauauuguuugcuaa

SEQ ID NO: 1477534 - RNA, 17 nt, Human
uauauuacaaugaucac

SEQ ID NO: 1477535 - RNA, 22 nt, Human
uauauuacacuacacacugugu

SEQ ID NO: 1477536 - RNA, 13 nt, Human
uauauuacaauga

SEQ ID NO: 1477537 - RNA, 12 nt, Human
uauauuacaaug

SEQ ID NO: 1477538 - RNA, 20 nt, Human
uauguguaugcacaguaaaa

SEQ ID NO: 1477539 - RNA, 17 nt, Human
uaugugggcagauuuuc

SEQ ID NO: 1477540 - RNA, 23 nt, Human
uaugugggcagauuuucagcaaa

SEQ ID NO: 1477541 - RNA, 17 nt, Human
uauguguaucucacacu

SEQ ID NO: 1477542 - RNA, 22 nt, Human
uauguuuugacauuuuuaguuu

SEQ ID NO: 1477543 - RNA, 13 nt, Human
uauguuuuuaaug

SEQ ID NO: 1477544 - RNA, 20 nt, Human
uauuaaaaagguuuacagaa

SEQ ID NO: 1477545 - RNA, 18 nt, Human
uaugugacauuuuacauu

SEQ ID NO: 1477546 - RNA, 14 nt, Human
uaugugacauuuua

SEQ ID NO: 1477547 - RNA, 17 nt, Human
uaugugaaacauguuuc

SEQ ID NO: 1477548 - RNA, 12 nt, Human
uaugugaacagu

SEQ ID NO: 1477549 - RNA, 22 nt, Human
uaugugaacaguuguguuugaa

SEQ ID NO: 1477550 - RNA, 19 nt, Human
uaugugacauuuuacauua

SEQ ID NO: 1477551 - RNA, 21 nt, Human
uaugugacauuuuacauuaaa

SEQ ID NO: 1477552 - RNA, 14 nt, Human
uaugugaaacaugu

SEQ ID NO: 1477553 - RNA, 19 nt, Human
acaggcaugugucaccaug

SEQ ID NO: 1477554 - RNA, 16 nt, Human
acaggcaugugucacc

SEQ ID NO: 1477555 - RNA, 12 nt, Human
acaggaaaaagu

SEQ ID NO: 1477556 - RNA, 16 nt, Human
acagucaccucaugga

SEQ ID NO: 1477557 - RNA, 17 nt, Human
acagucaccucauggaa

SEQ ID NO: 1477558 - RNA, 18 nt, Human
acagucaccucauggaau

SEQ ID NO: 1477559 - RNA, 14 nt, Human
acaguacacuguca

SEQ ID NO: 1477560 - RNA, 21 nt, Human
uauucagcucauggacuucug

SEQ ID NO: 1477561 - RNA, 16 nt, Human
uauucaauucuuuuaa

SEQ ID NO: 1477562 - RNA, 14 nt, Human
uauucaauaaagcu

SEQ ID NO: 1477563 - RNA, 13 nt, Human
uauucaauaaagc

SEQ ID NO: 1477564 - RNA, 12 nt, Human
uauucaauaaag

SEQ ID NO: 1477565 - RNA, 14 nt, Human
uauucauaauuauu

SEQ ID NO: 1477566 - RNA, 19 nt, Human
acaggcgugagccaccucg

SEQ ID NO: 1477567 - RNA, 20 nt, Human
acaggcgugagccaccucgc

SEQ ID NO: 1477568 - RNA, 19 nt, Human
uauucagcuuuaguagaua

SEQ ID NO: 1477569 - RNA, 23 nt, Human
uauucaaaaauuaucuauagcua

SEQ ID NO: 1477570 - RNA, 15 nt, Human
uauuagaauaccaca

SEQ ID NO: 1477571 - RNA, 14 nt, Human
uauuacuguaagaa

SEQ ID NO: 1477572 - RNA, 23 nt, Human
uauuacuuauuuuugacaguguu

SEQ ID NO: 1477573 - RNA, 15 nt, Human
uauaaguguguguuu

SEQ ID NO: 1477574 - RNA, 13 nt, Human
acacuaagagaga

SEQ ID NO: 1477575 - RNA, 14 nt, Human
acacuaagagagaa

SEQ ID NO: 1477576 - RNA, 23 nt, Human
acaccugcccugcccugccaccu

SEQ ID NO: 1477577 - RNA, 16 nt, Human
acaccucuuggggagu

SEQ ID NO: 1477578 - RNA, 13 nt, Human
acacccucacacu

SEQ ID NO: 1477579 - RNA, 14 nt, Human
acacccuccagaga

SEQ ID NO: 1477580 - RNA, 16 nt, Human
acacccucacacuggg

SEQ ID NO: 1477581 - RNA, 20 nt, Human
acacccaaagagguauuuau

SEQ ID NO: 1477582 - RNA, 19 nt, Human
acacccaaagagguauuua

SEQ ID NO: 1477583 - RNA, 17 nt, Human
acaccauugaaggcuua

SEQ ID NO: 1477584 - RNA, 17 nt, Human
acaccauagguagaaug

SEQ ID NO: 1477585 - RNA, 21 nt, Human
acaccauagguagaauguaaa

SEQ ID NO: 1477586 - RNA, 15 nt, Human
acacaugaaguccaa

SEQ ID NO: 1477587 - RNA, 22 nt, Human
uauaaaagggacugagaaauuu

SEQ ID NO: 1477588 - RNA, 20 nt, Human
uauaaaagccuguuuaagag

SEQ ID NO: 1477589 - RNA, 19 nt, Human
uauaaaaauaaaaaacacu

SEQ ID NO: 1477590 - RNA, 22 nt, Human
acacauacucauuuuucaugau

SEQ ID NO: 1477591 - RNA, 19 nt, Human
acacauacucauuuuucau

SEQ ID NO: 1477592 - RNA, 17 nt, Human
uaguucaugucugcuau

SEQ ID NO: 1477593 - RNA, 20 nt, Human
acacaccaccacgccuggcu

SEQ ID NO: 1477594 - RNA, 17 nt, Human
acacaccaccacgccug

SEQ ID NO: 1477595 - RNA, 22 nt, Human
acaauguccuaacugaaagaug

SEQ ID NO: 1477596 - RNA, 22 nt, Human
acacacaaauuaucuuaaaacu

SEQ ID NO: 1477597 - RNA, 14 nt, Human
acacaaugugucug

SEQ ID NO: 1477598 - RNA, 19 nt, Human
acaauggauaggcacagga

SEQ ID NO: 1477599 - RNA, 22 nt, Human
acaaugcuguauuuuaaaagaa

SEQ ID NO: 1477600 - RNA, 12 nt, Human
uagggagccaug

SEQ ID NO: 1477601 - RNA, 22 nt, Human
uagugaaacucguuaauuugua

SEQ ID NO: 1477602 - RNA, 14 nt, Human
uagugaacuugaaa

SEQ ID NO: 1477603 - RNA, 14 nt, Human
uaguacuaacuccu

SEQ ID NO: 1477604 - RNA, 23 nt, Human
uaguccagcuuuguucuucuuaa

SEQ ID NO: 1477605 - RNA, 22 nt, Human
uaguccagcuuuguucuucuua

SEQ ID NO: 1477606 - RNA, 18 nt, Human
uagucccucaugcaaauc

SEQ ID NO: 1477607 - RNA, 23 nt, Human
uaguguuggagaagaacugaaau

SEQ ID NO: 1477608 - RNA, 14 nt, Human
acacacuuacuuuu

SEQ ID NO: 1477609 - RNA, 22 nt, Human
acacagugcugaccagacagcc

SEQ ID NO: 1477610 - RNA, 16 nt, Human
acacaguuccugggaa

SEQ ID NO: 1477611 - RNA, 15 nt, Human
acacaguuccuggga

SEQ ID NO: 1477612 - RNA, 18 nt, Human
acacaguuccugggaaca

SEQ ID NO: 1477613 - RNA, 18 nt, Human
uaguaaaucacgcuuuuu

SEQ ID NO: 1477614 - RNA, 21 nt, Human
uaguaaaucacgcuuuuugaa

SEQ ID NO: 1477615 - RNA, 22 nt, Human
uaguaaaucacgcuuuuugaaa

SEQ ID NO: 1477616 - RNA, 19 nt, Human
uaggaaauauuuauuuuaa

SEQ ID NO: 1477617 - RNA, 18 nt, Human
uaggaaauauuuauuuua

SEQ ID NO: 1477618 - RNA, 22 nt, Human
uaggcagacucuuuaugcuugc

SEQ ID NO: 1477619 - RNA, 19 nt, Human
uaggcauuuuuaccaucac

SEQ ID NO: 1477620 - RNA, 21 nt, Human
uaggcauuuuuaccaucacug

SEQ ID NO: 1477621 - RNA, 13 nt, Human
acaagacugcaca

SEQ ID NO: 1477622 - RNA, 14 nt, Human
acaagacugcacau

SEQ ID NO: 1477623 - RNA, 16 nt, Human
acaauaagcaaaaaca

SEQ ID NO: 1477624 - RNA, 15 nt, Human
acaauaagcaaaaac

SEQ ID NO: 1477625 - RNA, 13 nt, Human
acaauaaauagac

SEQ ID NO: 1477626 - RNA, 23 nt, Human
acaauacaucccuuaccugggaa

SEQ ID NO: 1477627 - RNA, 14 nt, Human
acaauaauuuucua

SEQ ID NO: 1477628 - RNA, 16 nt, Human
uagcugugaccucucc

SEQ ID NO: 1477629 - RNA, 22 nt, Human
uagcuaaguacacaauaagcaa

SEQ ID NO: 1477630 - RNA, 15 nt, Human
uagcuaaguacacaa

SEQ ID NO: 1477631 - RNA, 11 nt, Human
uagagcacugc

SEQ ID NO: 1477632 - RNA, 20 nt, Human
uagauaucaugcaaauuuca

SEQ ID NO: 1477633 - RNA, 19 nt, Human
uagauauccacuugagaca

SEQ ID NO: 1477634 - RNA, 16 nt, Human
aauuguuacaaauugu

SEQ ID NO: 1477635 - RNA, 21 nt, Human
aauuguguuuauaauuuuaaa

SEQ ID NO: 1477636 - RNA, 18 nt, Human
acaaaaggauaaugaaua

SEQ ID NO: 1477637 - RNA, 18 nt, Human
acaaagaguucaagaaau

SEQ ID NO: 1477638 - RNA, 18 nt, Human
acaaaggcuuauuaauuu

SEQ ID NO: 1477639 - RNA, 23 nt, Human
aauuguugcuaaucuucuuaugc

SEQ ID NO: 1477640 - RNA, 19 nt, Human
acaaagaguucaagaaaua

SEQ ID NO: 1477641 - RNA, 22 nt, Human
acaaagaguucaagaaauaagu

SEQ ID NO: 1477642 - RNA, 21 nt, Human
acaaagaguucaagaaauaag

SEQ ID NO: 1477643 - RNA, 14 nt, Human
uagccaagugcagg

SEQ ID NO: 1477644 - RNA, 18 nt, Human
uagccaauauuuuucuua

SEQ ID NO: 1477645 - RNA, 14 nt, Human
uagccacaccagga

SEQ ID NO: 1477646 - RNA, 15 nt, Human
uagccacaccaggau

SEQ ID NO: 1477647 - RNA, 17 nt, Human
uagccacaccaggauag

SEQ ID NO: 1477648 - RNA, 18 nt, Human
uagcaugucgucaaagcu

SEQ ID NO: 1477649 - RNA, 16 nt, Human
uagccaaaaauagcua

SEQ ID NO: 1477650 - RNA, 21 nt, Human
uagccaaaaauagcuaaauac

SEQ ID NO: 1477651 - RNA, 16 nt, Human
uagaugcaguucugaa

SEQ ID NO: 1477652 - RNA, 15 nt, Human
uagaugcaguucuga

SEQ ID NO: 1477653 - RNA, 15 nt, Human
aagaggcaccugucc

SEQ ID NO: 1477654 - RNA, 18 nt, Human
aagaggcaccugucccag

SEQ ID NO: 1477655 - RNA, 21 nt, Human
aagagguauuuaucuuuacuu

SEQ ID NO: 1477656 - RNA, 15 nt, Human
aagcaaccucaguaa

SEQ ID NO: 1477657 - RNA, 16 nt, Human
guguaugugugugugu

SEQ ID NO: 1477658 - RNA, 13 nt, Human
guguauuccaaga

SEQ ID NO: 1477659 - RNA, 20 nt, Human
guguauuccaagacaugucu

SEQ ID NO: 1477660 - RNA, 15 nt, Human
gugucacucaaggcg

SEQ ID NO: 1477661 - RNA, 17 nt, Human
aagauauuuuuaucuuu

SEQ ID NO: 1477662 - RNA, 19 nt, Human
aagauauuuuuaucuuuau

SEQ ID NO: 1477663 - RNA, 17 nt, Human
aagauauuuuucaugau

SEQ ID NO: 1477664 - RNA, 15 nt, Human
aagauauuuuucaug

SEQ ID NO: 1477665 - RNA, 13 nt, Human
aagauauuuuucc

SEQ ID NO: 1477666 - RNA, 13 nt, Human
aagauuuuuuaau

SEQ ID NO: 1477667 - RNA, 17 nt, Human
aagauuuuuuaauaauu

SEQ ID NO: 1477668 - RNA, 14 nt, Human
aagauuuuuuaaua

SEQ ID NO: 1477669 - RNA, 16 nt, Human
aagauuuuuuaauaau

SEQ ID NO: 1477670 - RNA, 15 nt, Human
aagcaaaaaagaaaa

SEQ ID NO: 1477671 - RNA, 12 nt, Human
guguuugaagca

SEQ ID NO: 1477672 - RNA, 13 nt, Human
guguuucugacuc

SEQ ID NO: 1477673 - RNA, 18 nt, Human
guguuucuguaagaaacc

SEQ ID NO: 1477674 - RNA, 16 nt, Human
aagcacuaaacaaaga

SEQ ID NO: 1477675 - RNA, 16 nt, Human
aagcaccuuagcuggc

SEQ ID NO: 1477676 - RNA, 19 nt, Human
aagcaccuuagcuggcauu

SEQ ID NO: 1477677 - RNA, 21 nt, Human
aagcacgugguaaaacacuug

SEQ ID NO: 1477678 - RNA, 18 nt, Human
aagcacauuuuaaaagug

SEQ ID NO: 1477679 - RNA, 19 nt, Human
aagcauuuguuucuacuuu

SEQ ID NO: 1477680 - RNA, 23 nt, Human
aagcauuuguuucuacuuugaua

SEQ ID NO: 1477681 - RNA, 13 nt, Human
aagcauuuuguaa

SEQ ID NO: 1477682 - RNA, 19 nt, Human
aagcauuuuguaaguugaa

SEQ ID NO: 1477683 - RNA, 12 nt, Human
aagcaugaaaug

SEQ ID NO: 1477684 - RNA, 23 nt, Human
aagcaugcacaaauucugucucu

SEQ ID NO: 1477685 - RNA, 15 nt, Human
aagcauggcuauuuu

SEQ ID NO: 1477686 - RNA, 18 nt, Human
aagcauguauucagcuuu

SEQ ID NO: 1477687 - RNA, 21 nt, Human
aagccuuggggcugaugcagu

SEQ ID NO: 1477688 - RNA, 23 nt, Human
aagccuugauugguguugccagu

SEQ ID NO: 1477689 - RNA, 20 nt, Human
aagccuugauugguguugcc

SEQ ID NO: 1477690 - RNA, 18 nt, Human
aagccuguuuaagagaca

SEQ ID NO: 1477691 - RNA, 15 nt, Human
aagccuguuuaagag

SEQ ID NO: 1477692 - RNA, 14 nt, Human
guucaguaccacau

SEQ ID NO: 1477693 - RNA, 20 nt, Human
guuauuauauuuacaaaugg

SEQ ID NO: 1477694 - RNA, 19 nt, Human
guuauuauauuuacaaaug

SEQ ID NO: 1477695 - RNA, 19 nt, Human
guuacugugccauguguuu

SEQ ID NO: 1477696 - RNA, 22 nt, Human
aagccauucuccugccucagcc

SEQ ID NO: 1477697 - RNA, 18 nt, Human
guuaauauugauuuauua

SEQ ID NO: 1477698 - RNA, 16 nt, Human
aagcccaccauuuggc

SEQ ID NO: 1477699 - RNA, 21 nt, Human
guuaauauugauuuauuaaua

SEQ ID NO: 1477700 - RNA, 12 nt, Human
guuaauuuaaag

SEQ ID NO: 1477701 - RNA, 23 nt, Human
guuaauuuaaaguuguuugugcc

SEQ ID NO: 1477702 - RNA, 19 nt, Human
guuaauuuagaaaacuuua

SEQ ID NO: 1477703 - RNA, 12 nt, Human
guuaauuuuuga

SEQ ID NO: 1477704 - RNA, 14 nt, Human
guuaauuuuugaua

SEQ ID NO: 1477705 - RNA, 18 nt, Human
aagcuuaugcuuaaauuc

SEQ ID NO: 1477706 - RNA, 23 nt, Human
aagcuucccacggccuuucuagc

SEQ ID NO: 1477707 - RNA, 23 nt, Human
aagcuuguauuccuuuuucucuc

SEQ ID NO: 1477708 - RNA, 13 nt, Human
aagcuuaaaacuu

SEQ ID NO: 1477709 - RNA, 14 nt, Human
aagcuuaaaacuuu

SEQ ID NO: 1477710 - RNA, 15 nt, Human
aagcuuaaaacuuug

SEQ ID NO: 1477711 - RNA, 17 nt, Human
aagcuuaaaacuuugaa

SEQ ID NO: 1477712 - RNA, 19 nt, Human
aagcuuaauggcugauaau

SEQ ID NO: 1477713 - RNA, 21 nt, Human
aagcuuaauggcugauaauuu

SEQ ID NO: 1477714 - RNA, 14 nt, Human
aagcucacuucugg

SEQ ID NO: 1477715 - RNA, 23 nt, Human
aagcucacuucugggcuucaucu

SEQ ID NO: 1477716 - RNA, 12 nt, Human
aagcugaaaaua

SEQ ID NO: 1477717 - RNA, 21 nt, Human
aagcuuuuaugugaaacaugu

SEQ ID NO: 1477718 - RNA, 19 nt, Human
aagcuuuuaugugaaacau

SEQ ID NO: 1477719 - RNA, 23 nt, Human
aagcuuuuuauuccuccugcuca

SEQ ID NO: 1477720 - RNA, 20 nt, Human
guuccccacuguaucuaggc

SEQ ID NO: 1477721 - RNA, 18 nt, Human
guucccuugaugaagaag

SEQ ID NO: 1477722 - RNA, 24 nt, Human
guugacuuauaguacaugauaaau

SEQ ID NO: 1477723 - RNA, 19 nt, Human
guugacuuauaguacauga

SEQ ID NO: 1477724 - RNA, 23 nt, Human
guucuugaggggaccaggagugg

SEQ ID NO: 1477725 - RNA, 22 nt, Human
guucuugaggggaccaggagug

SEQ ID NO: 1477726 - RNA, 19 nt, Human
guucuucuaccacccacca

SEQ ID NO: 1477727 - RNA, 16 nt, Human
guucuugaggggacca

SEQ ID NO: 1477728 - RNA, 20 nt, Human
guucuugaggggaccaggag

SEQ ID NO: 1477729 - RNA, 21 nt, Human
guucuugaggggaccaggagu

SEQ ID NO: 1477730 - RNA, 18 nt, Human
aagucagaacagcagacu

SEQ ID NO: 1477731 - RNA, 15 nt, Human
aaguauuaugucucu

SEQ ID NO: 1477732 - RNA, 15 nt, Human
aaguauuuugcugga

SEQ ID NO: 1477733 - RNA, 18 nt, Human
aaguauguuagugcaaau

SEQ ID NO: 1477734 - RNA, 19 nt, Human
aaguauguuagugcaaauu

SEQ ID NO: 1477735 - RNA, 21 nt, Human
aaguauguuagugcaaauugu

SEQ ID NO: 1477736 - RNA, 19 nt, Human
aaguacuaagcgcuagagg

SEQ ID NO: 1477737 - RNA, 18 nt, Human
aaguacacaauaagcaaa

SEQ ID NO: 1477738 - RNA, 17 nt, Human
aaguacacaauaagcaa

SEQ ID NO: 1477739 - RNA, 16 nt, Human
aaguacacaauaagca

SEQ ID NO: 1477740 - RNA, 19 nt, Human
guuuugauuuguacugaaa

SEQ ID NO: 1477741 - RNA, 19 nt, Human
aaguacacaauaagcaaaa

SEQ ID NO: 1477742 - RNA, 19 nt, Human
guuuggacaaaauggaaua

SEQ ID NO: 1477743 - RNA, 11 nt, Human
guuugcuuucu

SEQ ID NO: 1477744 - RNA, 21 nt, Human
guuugcuuucugaucaaggcc

SEQ ID NO: 1477745 - RNA, 21 nt, Human
guuuggaaauugauuuugaac

SEQ ID NO: 1477746 - RNA, 15 nt, Human
guuuuaaagcuucca

SEQ ID NO: 1477747 - RNA, 20 nt, Human
guuuggauauguaaaacauu

SEQ ID NO: 1477748 - RNA, 21 nt, Human
guuuggauauguaaaacauuu

SEQ ID NO: 1477749 - RNA, 21 nt, Human
guuuuaugagaaagccuucuu

SEQ ID NO: 1477750 - RNA, 17 nt, Human
guuuugacauuuuuagu

SEQ ID NO: 1477751 - RNA, 14 nt, Human
guuuugacauuuuu

SEQ ID NO: 1477752 - RNA, 23 nt, Human
aaguaacugggauuacaggcaug

SEQ ID NO: 1477753 - RNA, 12 nt, Human
aaguaacaaaaa

SEQ ID NO: 1477754 - RNA, 13 nt, Human
aaguaacaaaaau

SEQ ID NO: 1477755 - RNA, 16 nt, Human
aaguaacaaaaauaaa

SEQ ID NO: 1477756 - RNA, 18 nt, Human
aagguauuaaauugaugu

SEQ ID NO: 1477757 - RNA, 22 nt, Human
aagguauuaaauugauguugcu

SEQ ID NO: 1477758 - RNA, 17 nt, Human
aagguuuaugaaaaaga

SEQ ID NO: 1477759 - RNA, 22 nt, Human
aaggggcuucagguccaggcug

SEQ ID NO: 1477760 - RNA, 13 nt, Human
aaggggcuucagg

SEQ ID NO: 1477761 - RNA, 15 nt, Human
aagggcuguuauaau

SEQ ID NO: 1477762 - RNA, 15 nt, Human
aaggcuuaaacccau

SEQ ID NO: 1477763 - RNA, 17 nt, Human
aagggcuguuauaaucu

SEQ ID NO: 1477764 - RNA, 19 nt, Human
guuucacaaggucuuuaaa

SEQ ID NO: 1477765 - RNA, 23 nt, Human
guuucacagccuauaaccagaca

SEQ ID NO: 1477766 - RNA, 13 nt, Human
guuguuugugccu

SEQ ID NO: 1477767 - RNA, 21 nt, Human
aaguguguguuuuucauaaag

SEQ ID NO: 1477768 - RNA, 16 nt, Human
aaguguguguuuuuca

SEQ ID NO: 1477769 - RNA, 12 nt, Human
aaguuaauuuaa

SEQ ID NO: 1477770 - RNA, 15 nt, Human
aaguuaauuuaaagu

SEQ ID NO: 1477771 - RNA, 16 nt, Human
aaguuaauuuaaaguu

SEQ ID NO: 1477772 - RNA, 17 nt, Human
aaguuaauuuaaaguug

SEQ ID NO: 1477773 - RNA, 16 nt, Human
aaguuagcuuuaacuu

SEQ ID NO: 1477774 - RNA, 16 nt, Human
aaguuauuuaaaucug

SEQ ID NO: 1477775 - RNA, 12 nt, Human
aaguguguguuu

SEQ ID NO: 1477776 - RNA, 17 nt, Human
aagugccauuaacaaau

SEQ ID NO: 1477777 - RNA, 16 nt, Human
aagugccauuaacaaa

SEQ ID NO: 1477778 - RNA, 16 nt, Human
aaguuuccaucaucua

SEQ ID NO: 1477779 - RNA, 20 nt, Human
aaguuccuuggccaugcaga

SEQ ID NO: 1477780 - RNA, 21 nt, Human
aaguucaccagacucuauaaa

SEQ ID NO: 1477781 - RNA, 22 nt, Human
aaguucaauauaagcuuuucuu

SEQ ID NO: 1477782 - RNA, 19 nt, Human
aaguuccaaguugcuaaua

SEQ ID NO: 1477783 - RNA, 19 nt, Human
aaguuauuuuuaauuuggu

SEQ ID NO: 1477784 - RNA, 23 nt, Human
aaguucaaauucuucugaacuca

SEQ ID NO: 1477785 - RNA, 16 nt, Human
aaguucaacauguuau

SEQ ID NO: 1477786 - RNA, 15 nt, Human
uaaaauguaaagcca

SEQ ID NO: 1477787 - RNA, 18 nt, Human
uaaaauguaaagccaugc

SEQ ID NO: 1477788 - RNA, 23 nt, Human
uaaaauguaaagccaugcuggaa

SEQ ID NO: 1477789 - RNA, 18 nt, Human
uaaaaugugggauuaugg

SEQ ID NO: 1477790 - RNA, 20 nt, Human
uaaaaugugggauuaugggu

SEQ ID NO: 1477791 - RNA, 23 nt, Human
uaaaaugugggauuaugggucac

SEQ ID NO: 1477792 - RNA, 22 nt, Human
uaaaauaauuuuuauauuugaa

SEQ ID NO: 1477793 - RNA, 17 nt, Human
uaaaagugccauuaaca

SEQ ID NO: 1477794 - RNA, 17 nt, Human
uaaaauaaagaaauaga

SEQ ID NO: 1477795 - RNA, 13 nt, Human
uaaaauaaagaaa

SEQ ID NO: 1477796 - RNA, 17 nt, Human
uaaaagaaacccugcac

SEQ ID NO: 1477797 - RNA, 13 nt, Human
uaaaagaaacuuu

SEQ ID NO: 1477798 - RNA, 14 nt, Human
uaaaagaaacuuuc

SEQ ID NO: 1477799 - RNA, 17 nt, Human
uaaaagaaacuuucuuu

SEQ ID NO: 1477800 - RNA, 16 nt, Human
uaaaagaaacccugca

SEQ ID NO: 1477801 - RNA, 18 nt, Human
uaaaauagucucuuuaaa

SEQ ID NO: 1477802 - RNA, 17 nt, Human
uaaaauagcaaaagaag

SEQ ID NO: 1477803 - RNA, 21 nt, Human
uaaaauagcaaaagaagaagu

SEQ ID NO: 1477804 - RNA, 22 nt, Human
uaaaauagcaaaagaagaaguu

SEQ ID NO: 1477805 - RNA, 13 nt, Human
uaaaauagcaaaa

SEQ ID NO: 1477806 - RNA, 16 nt, Human
uaaaauagcaaaagaa

SEQ ID NO: 1477807 - RNA, 18 nt, Human
aagugauuguaugaauuu

SEQ ID NO: 1477808 - RNA, 13 nt, Human
aagugauuguaug

SEQ ID NO: 1477809 - RNA, 17 nt, Human
uaaaaaggcuaaaugga

SEQ ID NO: 1477810 - RNA, 21 nt, Human
uaaaaaggacaucagcaaaca

SEQ ID NO: 1477811 - RNA, 19 nt, Human
uaaaaaggacaucagcaaa

SEQ ID NO: 1477812 - RNA, 18 nt, Human
uaaaaaggacaucagcaa

SEQ ID NO: 1477813 - RNA, 11 nt, Human
uaaaaaggaca

SEQ ID NO: 1477814 - RNA, 16 nt, Human
uaaaaaggccuccugg

SEQ ID NO: 1477815 - RNA, 19 nt, Human
uaaaaaguaauaaaauuca

SEQ ID NO: 1477816 - RNA, 16 nt, Human
uaaaaagucaauguuu

SEQ ID NO: 1477817 - RNA, 18 nt, Human
aagucagcucuucuccau

SEQ ID NO: 1477818 - RNA, 21 nt, Human
aagucaggcccuuauuuucaa

SEQ ID NO: 1477819 - RNA, 21 nt, Human
uaaaacuuugaaguuagcuuu

SEQ ID NO: 1477820 - RNA, 14 nt, Human
gugaucucagcuca

SEQ ID NO: 1477821 - RNA, 15 nt, Human
gugaugugaguugca

SEQ ID NO: 1477822 - RNA, 15 nt, Human
gugauguucaugggu

SEQ ID NO: 1477823 - RNA, 21 nt, Human
gugauucaaucuguaaacugu

SEQ ID NO: 1477824 - RNA, 23 nt, Human
gugauucaaucuguaaacugugu

SEQ ID NO: 1477825 - RNA, 22 nt, Human
gugauuagagggaggagaauga

SEQ ID NO: 1477826 - RNA, 14 nt, Human
gugauucaaucugu

SEQ ID NO: 1477827 - RNA, 16 nt, Human
gugauucaaucuguaa

SEQ ID NO: 1477828 - RNA, 13 nt, Human
gugcaccugcccc

SEQ ID NO: 1477829 - RNA, 17 nt, Human
gugcauuuaugagcucu

SEQ ID NO: 1477830 - RNA, 20 nt, Human
aacuugaggacacaugucca

SEQ ID NO: 1477831 - RNA, 19 nt, Human
aacuugaggacacaugucc

SEQ ID NO: 1477832 - RNA, 18 nt, Human
aacuugaggacacauguc

SEQ ID NO: 1477833 - RNA, 17 nt, Human
aacuugaggacacaugu

SEQ ID NO: 1477834 - RNA, 16 nt, Human
aacuugaggacacaug

SEQ ID NO: 1477835 - RNA, 15 nt, Human
aacuugaggacacau

SEQ ID NO: 1477836 - RNA, 14 nt, Human
aacuugaggacaca

SEQ ID NO: 1477837 - RNA, 13 nt, Human
aacuugaggacac

SEQ ID NO: 1477838 - RNA, 12 nt, Human
aacuugaggaca

SEQ ID NO: 1477839 - RNA, 15 nt, Human
aacuugacccugagc

SEQ ID NO: 1477840 - RNA, 19 nt, Human
aacuugacccugagcugac

SEQ ID NO: 1477841 - RNA, 18 nt, Human
aacuugacccugagcuga

SEQ ID NO: 1477842 - RNA, 21 nt, Human
aacuugaacugauucacaucu

SEQ ID NO: 1477843 - RNA, 14 nt, Human
aacuugaacugauu

SEQ ID NO: 1477844 - RNA, 21 nt, Human
aacuugaaauauccugcuuga

SEQ ID NO: 1477845 - RNA, 18 nt, Human
aacuucagcgguuuauau

SEQ ID NO: 1477846 - RNA, 21 nt, Human
aacuucagcgguuuauauaag

SEQ ID NO: 1477847 - RNA, 19 nt, Human
aacugucucucaugaaccu

SEQ ID NO: 1477848 - RNA, 20 nt, Human
aacuguguacauaacugaaa

SEQ ID NO: 1477849 - RNA, 21 nt, Human
aacuguguacauaacugaaaa

SEQ ID NO: 1477850 - RNA, 23 nt, Human
aacuguguacauaacugaaaaug

SEQ ID NO: 1477851 - RNA, 16 nt, Human
aacugccuacuccaaa

SEQ ID NO: 1477852 - RNA, 20 nt, Human
aacugccuacuccaaaaugu

SEQ ID NO: 1477853 - RNA, 16 nt, Human
gugcucauuucaggau

SEQ ID NO: 1477854 - RNA, 19 nt, Human
gugcucaggagcccuggga

SEQ ID NO: 1477855 - RNA, 18 nt, Human
gugcucaggagcccuggg

SEQ ID NO: 1477856 - RNA, 22 nt, Human
aagaagcaccaaucaugaauua

SEQ ID NO: 1477857 - RNA, 21 nt, Human
aagaagcaaccucaguaauuu

SEQ ID NO: 1477858 - RNA, 15 nt, Human
aagaaguuucaucau

SEQ ID NO: 1477859 - RNA, 18 nt, Human
aagaaguuucaucauuuu

SEQ ID NO: 1477860 - RNA, 16 nt, Human
aagaauaaucacgcuu

SEQ ID NO: 1477861 - RNA, 22 nt, Human
aagaauaaucacgcuuuccuga

SEQ ID NO: 1477862 - RNA, 21 nt, Human
gugcuauacugcauacuuuuu

SEQ ID NO: 1477863 - RNA, 23 nt, Human
aagaauaaucacgcuuuccugaa

SEQ ID NO: 1477864 - RNA, 22 nt, Human
aagaaagcuucaaacugcauga

SEQ ID NO: 1477865 - RNA, 11 nt, Human
aagaaacauuu

SEQ ID NO: 1477866 - RNA, 14 nt, Human
aagaaacauuuaua

SEQ ID NO: 1477867 - RNA, 22 nt, Human
aagaaaauuuuuguaguagcgu

SEQ ID NO: 1477868 - RNA, 16 nt, Human
aagaaacaagguuuuc

SEQ ID NO: 1477869 - RNA, 19 nt, Human
gugccagauuuaugcauau

SEQ ID NO: 1477870 - RNA, 20 nt, Human
aagaaaaacaaacucguuuu

SEQ ID NO: 1477871 - RNA, 15 nt, Human
aaccuuccacccagu

SEQ ID NO: 1477872 - RNA, 13 nt, Human
aaccuuccaccca

SEQ ID NO: 1477873 - RNA, 12 nt, Human
aacgucuuaaau

SEQ ID NO: 1477874 - RNA, 14 nt, Human
aacgucuuaaauau

SEQ ID NO: 1477875 - RNA, 13 nt, Human
aaccuucucuaug

SEQ ID NO: 1477876 - RNA, 15 nt, Human
aacgucuuaaauauu

SEQ ID NO: 1477877 - RNA, 19 nt, Human
aaccuggguugcagacagg

SEQ ID NO: 1477878 - RNA, 20 nt, Human
aaccuggguugcagacagga

SEQ ID NO: 1477879 - RNA, 17 nt, Human
aaccuggguugcagaca

SEQ ID NO: 1477880 - RNA, 12 nt, Human
aacuauggccug

SEQ ID NO: 1477881 - RNA, 15 nt, Human
aacuaggcugagcaa

SEQ ID NO: 1477882 - RNA, 21 nt, Human
aacuaggugcauauuuauaaa

SEQ ID NO: 1477883 - RNA, 20 nt, Human
gugagaccaccucucaauau

SEQ ID NO: 1477884 - RNA, 14 nt, Human
gugagaccaccucu

SEQ ID NO: 1477885 - RNA, 13 nt, Human
gugagaccaccuc

SEQ ID NO: 1477886 - RNA, 20 nt, Human
gugacuuuggcugcaugcga

SEQ ID NO: 1477887 - RNA, 18 nt, Human
gugacuuuggcugcaugc

SEQ ID NO: 1477888 - RNA, 18 nt, Human
aacuccugaccucaggca

SEQ ID NO: 1477889 - RNA, 17 nt, Human
aacuccugaccucaggc

SEQ ID NO: 1477890 - RNA, 19 nt, Human
gugacagggcggggguggc

SEQ ID NO: 1477891 - RNA, 22 nt, Human
gugacagggcggggguggcggc

SEQ ID NO: 1477892 - RNA, 20 nt, Human
aacucucuggaagccccugg

SEQ ID NO: 1477893 - RNA, 18 nt, Human
aacucucuuauugccuca

SEQ ID NO: 1477894 - RNA, 19 nt, Human
aacucucuuauugccucac

SEQ ID NO: 1477895 - RNA, 21 nt, Human
aacucucuuauugccucacuu

SEQ ID NO: 1477896 - RNA, 15 nt, Human
aacucuucacucuuc

SEQ ID NO: 1477897 - RNA, 17 nt, Human
aacucuucacucuucaa

SEQ ID NO: 1477898 - RNA, 23 nt, Human
aacucuucacucuucaaaugccu

SEQ ID NO: 1477899 - RNA, 23 nt, Human
gugagagacauuaacucauuaga

SEQ ID NO: 1477900 - RNA, 19 nt, Human
gugagagacauuaacucau

SEQ ID NO: 1477901 - RNA, 15 nt, Human
gugagagaguggcug

SEQ ID NO: 1477902 - RNA, 18 nt, Human
gugagagaguggcugggg

SEQ ID NO: 1477903 - RNA, 16 nt, Human
gugagagaguggcugg

SEQ ID NO: 1477904 - RNA, 20 nt, Human
gugagagaguggcuggggca

SEQ ID NO: 1477905 - RNA, 19 nt, Human
gugagagaguggcuggggc

SEQ ID NO: 1477906 - RNA, 12 nt, Human
gucccuaauaaa

SEQ ID NO: 1477907 - RNA, 22 nt, Human
gucccgggacaccuaggcuagg

SEQ ID NO: 1477908 - RNA, 15 nt, Human
gucccuaauaaagcu

SEQ ID NO: 1477909 - RNA, 18 nt, Human
guccaaaagauugcugaa

SEQ ID NO: 1477910 - RNA, 15 nt, Human
guccaucagccucca

SEQ ID NO: 1477911 - RNA, 21 nt, Human
aacacugggagaaaugaaaaa

SEQ ID NO: 1477912 - RNA, 12 nt, Human
aacacucaccau

SEQ ID NO: 1477913 - RNA, 15 nt, Human
aacacaggcaaaauc

SEQ ID NO: 1477914 - RNA, 22 nt, Human
aacacaggcaaaauccuugcuu

SEQ ID NO: 1477915 - RNA, 15 nt, Human
gucauuucauuuccu

SEQ ID NO: 1477916 - RNA, 14 nt, Human
aacacacacaaaag

SEQ ID NO: 1477917 - RNA, 18 nt, Human
aacacagcaauuccucag

SEQ ID NO: 1477918 - RNA, 20 nt, Human
gucuauuuacggaacucaaa

SEQ ID NO: 1477919 - RNA, 13 nt, Human
gucuauucagcuu

SEQ ID NO: 1477920 - RNA, 13 nt, Human
gucuauucuaguc

SEQ ID NO: 1477921 - RNA, 19 nt, Human
aacauagacagaagaaaca

SEQ ID NO: 1477922 - RNA, 14 nt, Human
gucuaggacacagu

SEQ ID NO: 1477923 - RNA, 13 nt, Human
gucgauuagacug

SEQ ID NO: 1477924 - RNA, 14 nt, Human
gucgauuagacugg

SEQ ID NO: 1477925 - RNA, 20 nt, Human
guccuggaggggcuggggac

SEQ ID NO: 1477926 - RNA, 14 nt, Human
guccuggaggggcu

SEQ ID NO: 1477927 - RNA, 13 nt, Human
guccuggaggggc

SEQ ID NO: 1477928 - RNA, 22 nt, Human
guccuuucuagagcacugccac

SEQ ID NO: 1477929 - RNA, 23 nt, Human
aacauuccauccuugagucaaaa

SEQ ID NO: 1477930 - RNA, 19 nt, Human
aacauuccucaugaaugua

SEQ ID NO: 1477931 - RNA, 20 nt, Human
aacauuccucaugaauguaa

SEQ ID NO: 1477932 - RNA, 14 nt, Human
aacauuccauccuu

SEQ ID NO: 1477933 - RNA, 13 nt, Human
aacauuccauccu

SEQ ID NO: 1477934 - RNA, 10 nt, Human
aacauuccau

SEQ ID NO: 1477935 - RNA, 22 nt, Human
aacauuccucaugaauguaaau

SEQ ID NO: 1477936 - RNA, 21 nt, Human
aacauuccucaugaauguaaa

SEQ ID NO: 1477937 - RNA, 22 nt, Human
aacauaaaaaggacaucagcaa

SEQ ID NO: 1477938 - RNA, 20 nt, Human
aacauaaaaaggacaucagc

SEQ ID NO: 1477939 - RNA, 19 nt, Human
aacauaaaaaggacaucag

SEQ ID NO: 1477940 - RNA, 15 nt, Human
aacauaaaaaggaca

SEQ ID NO: 1477941 - RNA, 18 nt, Human
aacaguuuuccuaugcuu

SEQ ID NO: 1477942 - RNA, 20 nt, Human
aacaguuuuccuaugcuuug

SEQ ID NO: 1477943 - RNA, 12 nt, Human
aacaguuuuccu

SEQ ID NO: 1477944 - RNA, 21 nt, Human
aacaguuuuccuaugcuuuga

SEQ ID NO: 1477945 - RNA, 12 nt, Human
aacauauauaac

SEQ ID NO: 1477946 - RNA, 13 nt, Human
aacauaaaaauga

SEQ ID NO: 1477947 - RNA, 14 nt, Human
aacauaaaaaugau

SEQ ID NO: 1477948 - RNA, 21 nt, Human
aacauagacagaagaaacaag

SEQ ID NO: 1477949 - RNA, 18 nt, Human
gucacauuccugaacagg

SEQ ID NO: 1477950 - RNA, 15 nt, Human
gucacaggaaaaagu

SEQ ID NO: 1477951 - RNA, 19 nt, Human
aaauuuaaacuauaagcaa

SEQ ID NO: 1477952 - RNA, 16 nt, Human
gucacugacacacacg

SEQ ID NO: 1477953 - RNA, 12 nt, Human
gucacugagacc

SEQ ID NO: 1477954 - RNA, 14 nt, Human
gucaggaaagagaa

SEQ ID NO: 1477955 - RNA, 19 nt, Human
gucagaacagcagacucag

SEQ ID NO: 1477956 - RNA, 19 nt, Human
gucacuggaccacugggca

SEQ ID NO: 1477957 - RNA, 21 nt, Human
gucacugguagaccaaaauaa

SEQ ID NO: 1477958 - RNA, 17 nt, Human
gucacuguuccuuguca

SEQ ID NO: 1477959 - RNA, 16 nt, Human
gucagaacagcagacu

SEQ ID NO: 1477960 - RNA, 23 nt, Human
gucagugcugugcugugcuaugg

SEQ ID NO: 1477961 - RNA, 23 nt, Human
aaauuaugugccagauuuaugca

SEQ ID NO: 1477962 - RNA, 22 nt, Human
aaauuaugugacauuuuacauu

SEQ ID NO: 1477963 - RNA, 20 nt, Human
aaauuaugugacauuuuaca

SEQ ID NO: 1477964 - RNA, 17 nt, Human
aaauuaugugacauuuu

SEQ ID NO: 1477965 - RNA, 16 nt, Human
aaauucaacaaacauu

SEQ ID NO: 1477966 - RNA, 14 nt, Human
aaauucaacaaaca

SEQ ID NO: 1477967 - RNA, 16 nt, Human
aaauuaucuauagcua

SEQ ID NO: 1477968 - RNA, 13 nt, Human
aaauuacaacuaa

SEQ ID NO: 1477969 - RNA, 12 nt, Human
aaauuacaacua

SEQ ID NO: 1477970 - RNA, 16 nt, Human
aaauuacacccaaaga

SEQ ID NO: 1477971 - RNA, 22 nt, Human
aaauuacacccaaagagguauu

SEQ ID NO: 1477972 - RNA, 19 nt, Human
aaaugugggauuauggguc

SEQ ID NO: 1477973 - RNA, 17 nt, Human
aaauuguauuacaaauc

SEQ ID NO: 1477974 - RNA, 14 nt, Human
aaauuuaaacuaua

SEQ ID NO: 1477975 - RNA, 17 nt, Human
aaauuccaagugauuga

SEQ ID NO: 1477976 - RNA, 16 nt, Human
aaaucauucauuuucu

SEQ ID NO: 1477977 - RNA, 21 nt, Human
aaaucaugaagauauuuuucc

SEQ ID NO: 1477978 - RNA, 11 nt, Human
aaauguauacu

SEQ ID NO: 1477979 - RNA, 20 nt, Human
aaauguaucauagaaaugua

SEQ ID NO: 1477980 - RNA, 17 nt, Human
aaauguaucauagaaau

SEQ ID NO: 1477981 - RNA, 13 nt, Human
guauuuaucuuua

SEQ ID NO: 1477982 - RNA, 16 nt, Human
guauugugauuaucaa

SEQ ID NO: 1477983 - RNA, 14 nt, Human
aaaacaaggaugaa

SEQ ID NO: 1477984 - RNA, 15 nt, Human
aaaacaaaacugcau

SEQ ID NO: 1477985 - RNA, 17 nt, Human
aaaacaaggaugaauua

SEQ ID NO: 1477986 - RNA, 11 nt, Human
aaaaagauccc

SEQ ID NO: 1477987 - RNA, 14 nt, Human
aaaaagaucccaaa

SEQ ID NO: 1477988 - RNA, 14 nt, Human
aaaaagaagaaucu

SEQ ID NO: 1477989 - RNA, 17 nt, Human
aaaaagaaugaagccuc

SEQ ID NO: 1477990 - RNA, 18 nt, Human
aaaaagaagcaaccucag

SEQ ID NO: 1477991 - RNA, 15 nt, Human
aaaaacugagugacu

SEQ ID NO: 1477992 - RNA, 15 nt, Human
aguugaauuuuacau

SEQ ID NO: 1477993 - RNA, 10 nt, Human
aguugaauuu

SEQ ID NO: 1477994 - RNA, 22 nt, Human
aguuacauaauucacucugagu

SEQ ID NO: 1477995 - RNA, 16 nt, Human
aguccaagcauuuaga

SEQ ID NO: 1477996 - RNA, 21 nt, Human
aguccaagcauuuagauguau

SEQ ID NO: 1477997 - RNA, 15 nt, Human
agucauucagauaug

SEQ ID NO: 1477998 - RNA, 20 nt, Human
agucauucagauaugauuca

SEQ ID NO: 1477999 - RNA, 23 nt, Human
agucauucagauaugauucaaau

SEQ ID NO: 1478000 - RNA, 15 nt, Human
agucaaauuguguga

SEQ ID NO: 1478001 - RNA, 17 nt, Human
agucaaauugugugaaa

SEQ ID NO: 1478002 - RNA, 13 nt, Human
agucaaauugugu

SEQ ID NO: 1478003 - RNA, 14 nt, Human
agugaucaaacuac

SEQ ID NO: 1478004 - RNA, 14 nt, Human
aguccuggaagcca

SEQ ID NO: 1478005 - RNA, 20 nt, Human
aguccuggaagccagcuuuc

SEQ ID NO: 1478006 - RNA, 22 nt, Human
aguccuggaagccagcuuuccc

SEQ ID NO: 1478007 - RNA, 23 nt, Human
aguccuggaagccagcuuucccu

SEQ ID NO: 1478008 - RNA, 18 nt, Human
aguccacccuugguuccu

SEQ ID NO: 1478009 - RNA, 18 nt, Human
auaucacuugucaauaaa

SEQ ID NO: 1478010 - RNA, 21 nt, Human
auauccaugaccuaguuuucc

SEQ ID NO: 1478011 - RNA, 13 nt, Human
auaucccacuggg

SEQ ID NO: 1478012 - RNA, 14 nt, Human
auaugcuuacugau

SEQ ID NO: 1478013 - RNA, 20 nt, Human
auaucccuccuguugggaga

SEQ ID NO: 1478014 - RNA, 13 nt, Human
auauccugcuuga

SEQ ID NO: 1478015 - RNA, 23 nt, Human
auauuucagauaaucacaauaca

SEQ ID NO: 1478016 - RNA, 19 nt, Human
auauuuauuuuuuuuaagu

SEQ ID NO: 1478017 - RNA, 16 nt, Human
auauuuauaaaaauaa

SEQ ID NO: 1478018 - RNA, 18 nt, Human
auauuuaguguucauaaa

SEQ ID NO: 1478019 - RNA, 14 nt, Human
auauuuauuacugu

SEQ ID NO: 1478020 - RNA, 19 nt, Human
auauuuauuacuguaagaa

SEQ ID NO: 1478021 - RNA, 18 nt, Human
auauuuauuuuaauaaug

SEQ ID NO: 1478022 - RNA, 22 nt, Human
auauuuauuacuguaagaaaau

SEQ ID NO: 1478023 - RNA, 21 nt, Human
auauuuauuuucuuucuguaa

SEQ ID NO: 1478024 - RNA, 12 nt, Human
auauaauucuua

SEQ ID NO: 1478025 - RNA, 18 nt, Human
auauaauuguuuuaucug

SEQ ID NO: 1478026 - RNA, 17 nt, Human
auauaccaaagcacauu

SEQ ID NO: 1478027 - RNA, 22 nt, Human
auauacuauuaaaaagguuuac

SEQ ID NO: 1478028 - RNA, 19 nt, Human
auauacucacuuucuagau

SEQ ID NO: 1478029 - RNA, 12 nt, Human
auauaccaaagc

SEQ ID NO: 1478030 - RNA, 17 nt, Human
auauagcugaucaguuu

SEQ ID NO: 1478031 - RNA, 18 nt, Human
auauagcugaucaguuuu

SEQ ID NO: 1478032 - RNA, 15 nt, Human
auauaaguguguguu

SEQ ID NO: 1478033 - RNA, 15 nt, Human
auauaagugauugcu

SEQ ID NO: 1478034 - RNA, 16 nt, Human
auacuugaaaauuaac

SEQ ID NO: 1478035 - RNA, 15 nt, Human
auacuugaaaauuaa

SEQ ID NO: 1478036 - RNA, 19 nt, Human
auacuugaaaauuaacaug

SEQ ID NO: 1478037 - RNA, 16 nt, Human
auacuucucauuuuuu

SEQ ID NO: 1478038 - RNA, 19 nt, Human
auaaguauuuaauucaugu

SEQ ID NO: 1478039 - RNA, 22 nt, Human
auaaguguguguuuuucauaaa

SEQ ID NO: 1478040 - RNA, 19 nt, Human
auaaguguguguuuuucau

SEQ ID NO: 1478041 - RNA, 22 nt, Human
auacccucccucccuacccuaa

SEQ ID NO: 1478042 - RNA, 16 nt, Human
auacccucccucccua

SEQ ID NO: 1478043 - RNA, 14 nt, Human
auacccucccuccc

SEQ ID NO: 1478044 - RNA, 20 nt, Human
auaccugauuuuuuuuccuu

SEQ ID NO: 1478045 - RNA, 21 nt, Human
auaccuaagaaguacauuguu

SEQ ID NO: 1478046 - RNA, 15 nt, Human
auaccuaagaaguac

SEQ ID NO: 1478047 - RNA, 19 nt, Human
auacuuauauggaaauucu

SEQ ID NO: 1478048 - RNA, 18 nt, Human
auguuucuuuguaaugaa

SEQ ID NO: 1478049 - RNA, 18 nt, Human
auguguauuacaaauauu

SEQ ID NO: 1478050 - RNA, 22 nt, Human
auguguacaaaaguuucauccu

SEQ ID NO: 1478051 - RNA, 21 nt, Human
auguuugcaccuuucuaguug

SEQ ID NO: 1478052 - RNA, 21 nt, Human
auguuugauagauuuucugcu

SEQ ID NO: 1478053 - RNA, 17 nt, Human
auguuugcaccuuucua

SEQ ID NO: 1478054 - RNA, 19 nt, Human
auguuugcaccuuucuagu

SEQ ID NO: 1478055 - RNA, 22 nt, Human
auguuugcaccuuucuaguuga

SEQ ID NO: 1478056 - RNA, 16 nt, Human
auguaaguaaacgguc

SEQ ID NO: 1478057 - RNA, 22 nt, Human
auguaauaagguugaacacuuu

SEQ ID NO: 1478058 - RNA, 16 nt, Human
auguaagcugaaaaua

SEQ ID NO: 1478059 - RNA, 16 nt, Human
auguaacuuuuguaag

SEQ ID NO: 1478060 - RNA, 17 nt, Human
auguaacuuuuguaaga

SEQ ID NO: 1478061 - RNA, 18 nt, Human
auguaacuuuuguaagac

SEQ ID NO: 1478062 - RNA, 17 nt, Human
auguacauguacugauu

SEQ ID NO: 1478063 - RNA, 16 nt, Human
augucaaucagccuag

SEQ ID NO: 1478064 - RNA, 22 nt, Human
augucaaggguucaagauuguu

SEQ ID NO: 1478065 - RNA, 14 nt, Human
augucaaacaaaua

SEQ ID NO: 1478066 - RNA, 18 nt, Human
auggcuggagcuagaauu

SEQ ID NO: 1478067 - RNA, 20 nt, Human
auggcugauaauuuuaaauu

SEQ ID NO: 1478068 - RNA, 12 nt, Human
auggauucuaaa

SEQ ID NO: 1478069 - RNA, 20 nt, Human
auggaaauucccuucaucug

SEQ ID NO: 1478070 - RNA, 18 nt, Human
auggaaauucugcucaga

SEQ ID NO: 1478071 - RNA, 16 nt, Human
augcuugcaaaaacua

SEQ ID NO: 1478072 - RNA, 19 nt, Human
augcuugcaaaaacuacaa

SEQ ID NO: 1478073 - RNA, 17 nt, Human
augcuugcauaagagcu

SEQ ID NO: 1478074 - RNA, 18 nt, Human
augcuugcauaagagcuu

SEQ ID NO: 1478075 - RNA, 21 nt, Human
augccuuuguacuuuagggaa

SEQ ID NO: 1478076 - RNA, 14 nt, Human
augccuuuucccaa

SEQ ID NO: 1478077 - RNA, 14 nt, Human
augcauuguccucu

SEQ ID NO: 1478078 - RNA, 12 nt, Human
augcauggaaau

SEQ ID NO: 1478079 - RNA, 17 nt, Human
augcacaguaaaaaugg

SEQ ID NO: 1478080 - RNA, 23 nt, Human
augaaaaaauauauaucaaauau

SEQ ID NO: 1478081 - RNA, 22 nt, Human
augaaaaaauauauaucaaaua

SEQ ID NO: 1478082 - RNA, 17 nt, Human
augaaaaaauauauauc

SEQ ID NO: 1478083 - RNA, 14 nt, Human
augaaaaaauauau

SEQ ID NO: 1478084 - RNA, 14 nt, Human
augaaaauaaagaa

SEQ ID NO: 1478085 - RNA, 17 nt, Human
augaaaauaaagaaugg

SEQ ID NO: 1478086 - RNA, 15 nt, Human
augaaaauaaagaau

SEQ ID NO: 1478087 - RNA, 13 nt, Human
augaaaagcuaga

SEQ ID NO: 1478088 - RNA, 18 nt, Human
augaaaagcuagaauuga

SEQ ID NO: 1478089 - RNA, 18 nt, Human
augaaacagaaacaaaaa

SEQ ID NO: 1478090 - RNA, 22 nt, Human
augaaacagaaacaaaaacacu

SEQ ID NO: 1478091 - RNA, 13 nt, Human
augaaacagaaac

SEQ ID NO: 1478092 - RNA, 16 nt, Human
augacuauguaaacua

SEQ ID NO: 1478093 - RNA, 15 nt, Human
augacuauguaaacu

SEQ ID NO: 1478094 - RNA, 21 nt, Human
augaagcuuuuaugugaaaca

SEQ ID NO: 1478095 - RNA, 20 nt, Human
augaagcuuuuaugugaaac

SEQ ID NO: 1478096 - RNA, 19 nt, Human
augaagcuuuuaugugaaa

SEQ ID NO: 1478097 - RNA, 18 nt, Human
augaagcuuuuaugugaa

SEQ ID NO: 1478098 - RNA, 18 nt, Human
augaccuaguuuuccaug

SEQ ID NO: 1478099 - RNA, 22 nt, Human
aucuuauaauuuaaaauaugcu

SEQ ID NO: 1478100 - RNA, 17 nt, Human
aucugggcugugggcaa

SEQ ID NO: 1478101 - RNA, 19 nt, Human
aucaucucagcucacugca

SEQ ID NO: 1478102 - RNA, 14 nt, Human
aucaucucagcuca

SEQ ID NO: 1478103 - RNA, 13 nt, Human
aucaucucagcuc

SEQ ID NO: 1478104 - RNA, 19 nt, Human
aucaucuauagaaagcuau

SEQ ID NO: 1478105 - RNA, 15 nt, Human
aucaucuauagaaag

SEQ ID NO: 1478106 - RNA, 15 nt, Human
aucauggcuaucugu

SEQ ID NO: 1478107 - RNA, 13 nt, Human
aucagccagugac

SEQ ID NO: 1478108 - RNA, 16 nt, Human
aucagccuacaggccu

SEQ ID NO: 1478109 - RNA, 20 nt, Human
auccacccgccucagccucc

SEQ ID NO: 1478110 - RNA, 13 nt, Human
auccccuucuccc

SEQ ID NO: 1478111 - RNA, 15 nt, Human
auccccuucuccccu

SEQ ID NO: 1478112 - RNA, 20 nt, Human
auccccuucuccccugcacu

SEQ ID NO: 1478113 - RNA, 21 nt, Human
auccccuucuccccugcacug

SEQ ID NO: 1478114 - RNA, 22 nt, Human
auccccuucuccccugcacugu

SEQ ID NO: 1478115 - RNA, 23 nt, Human
auccccuucuccccugcacugua

SEQ ID NO: 1478116 - RNA, 12 nt, Human
auccccuugaac

SEQ ID NO: 1478117 - RNA, 16 nt, Human
auccccuugaacucuu

SEQ ID NO: 1478118 - RNA, 19 nt, Human
aucccucacccauccuaga

SEQ ID NO: 1478119 - RNA, 12 nt, Human
aucccucaccca

SEQ ID NO: 1478120 - RNA, 14 nt, Human
aucccuagcuguga

SEQ ID NO: 1478121 - RNA, 20 nt, Human
auccuccuaccuccaaagcu

SEQ ID NO: 1478122 - RNA, 20 nt, Human
aucgauuuuuaaaaauuaaa

SEQ ID NO: 1478123 - RNA, 20 nt, Human
aucgcagaccuuuuuuagga

SEQ ID NO: 1478124 - RNA, 15 nt, Human
aggaacuacugagga

SEQ ID NO: 1478125 - RNA, 16 nt, Human
aggaggggcuguaaaa

SEQ ID NO: 1478126 - RNA, 19 nt, Human
aggcacugcaaaccgccac

SEQ ID NO: 1478127 - RNA, 14 nt, Human
agcuguaugauucc

SEQ ID NO: 1478128 - RNA, 18 nt, Human
agcuuuucccaaaagccc

SEQ ID NO: 1478129 - RNA, 23 nt, Human
aggaaaugugguagccucacuuu

SEQ ID NO: 1478130 - RNA, 15 nt, Human
agcuuuucccuuuuu

SEQ ID NO: 1478131 - RNA, 19 nt, Human
agcuucucauccugcaggc

SEQ ID NO: 1478132 - RNA, 12 nt, Human
agcuucuccaac

SEQ ID NO: 1478133 - RNA, 20 nt, Human
agcuucguuuauuuucaaga

SEQ ID NO: 1478134 - RNA, 17 nt, Human
agcuucagugcugccga

SEQ ID NO: 1478135 - RNA, 16 nt, Human
agcugaccagccguga

SEQ ID NO: 1478136 - RNA, 19 nt, Human
agcugaccagccgugagca

SEQ ID NO: 1478137 - RNA, 22 nt, Human
agcugaccagccgugagcaugu

SEQ ID NO: 1478138 - RNA, 13 nt, Human
agcugaucaguuu

SEQ ID NO: 1478139 - RNA, 17 nt, Human
aggggcagagccaggaa

SEQ ID NO: 1478140 - RNA, 16 nt, Human
aggggcagagccagga

SEQ ID NO: 1478141 - RNA, 15 nt, Human
aggggcagagccagg

SEQ ID NO: 1478142 - RNA, 14 nt, Human
aggggcagagccag

SEQ ID NO: 1478143 - RNA, 13 nt, Human
aggggcagagcca

SEQ ID NO: 1478144 - RNA, 14 nt, Human
agggcgcaggccgu

SEQ ID NO: 1478145 - RNA, 17 nt, Human
agggcggggguggcggc

SEQ ID NO: 1478146 - RNA, 18 nt, Human
agggcaauuaauuccuuc

SEQ ID NO: 1478147 - RNA, 22 nt, Human
agggcaauuaauuccuucagca

SEQ ID NO: 1478148 - RNA, 19 nt, Human
agggcaauuaauuccuuca

SEQ ID NO: 1478149 - RNA, 17 nt, Human
agggacucaucuuuccc

SEQ ID NO: 1478150 - RNA, 22 nt, Human
agggacucaucuuucccuccuu

SEQ ID NO: 1478151 - RNA, 21 nt, Human
agggacucaucuuucccuccu

SEQ ID NO: 1478152 - RNA, 19 nt, Human
agggacucaucuuucccuc

SEQ ID NO: 1478153 - RNA, 18 nt, Human
agggacucaucuuucccu

SEQ ID NO: 1478154 - RNA, 23 nt, Human
agggacucaucuuucccuccuug

SEQ ID NO: 1478155 - RNA, 18 nt, Human
aggcuguguuuggcuuuc

SEQ ID NO: 1478156 - RNA, 20 nt, Human
aggcuguguuuggcuuucag

SEQ ID NO: 1478157 - RNA, 21 nt, Human
aggcuguguuuggcuuucagg

SEQ ID NO: 1478158 - RNA, 22 nt, Human
aggcuguguuuggcuuucaggg

SEQ ID NO: 1478159 - RNA, 15 nt, Human
aggcugauuucuagg

SEQ ID NO: 1478160 - RNA, 21 nt, Human
aggcagacucuuuaugcuugc

SEQ ID NO: 1478161 - RNA, 20 nt, Human
aggcagacucuuuaugcuug

SEQ ID NO: 1478162 - RNA, 15 nt, Human
agguggaaauaaacu

SEQ ID NO: 1478163 - RNA, 21 nt, Human
aggugcuucuaguucugccag

SEQ ID NO: 1478164 - RNA, 22 nt, Human
aggugcuucuaguucugccagg

SEQ ID NO: 1478165 - RNA, 21 nt, Human
aggugcuucaggauaccauau

SEQ ID NO: 1478166 - RNA, 23 nt, Human
aggugcuucuaguucugccagga

SEQ ID NO: 1478167 - RNA, 20 nt, Human
agguccuuaggccucugaga

SEQ ID NO: 1478168 - RNA, 17 nt, Human
agguucaugcaaacuuu

SEQ ID NO: 1478169 - RNA, 19 nt, Human
agguucaagcaauccuccc

SEQ ID NO: 1478170 - RNA, 14 nt, Human
agguucaacuuauu

SEQ ID NO: 1478171 - RNA, 17 nt, Human
aggucccuaauaaagcu

SEQ ID NO: 1478172 - RNA, 19 nt, Human
aggucccuaauaaagcugu

SEQ ID NO: 1478173 - RNA, 18 nt, Human
aggucccuaauaaagcug

SEQ ID NO: 1478174 - RNA, 20 nt, Human
aggucccuaauaaagcugug

SEQ ID NO: 1478175 - RNA, 23 nt, Human
aggucccuaauaaagcugugugg

SEQ ID NO: 1478176 - RNA, 13 nt, Human
agguaaguuuuuu

SEQ ID NO: 1478177 - RNA, 17 nt, Human
aggggccgggggcaguc

SEQ ID NO: 1478178 - RNA, 18 nt, Human
agccagauuuuuuaaaau

SEQ ID NO: 1478179 - RNA, 23 nt, Human
agccagauuuuuuaaaauuuaua

SEQ ID NO: 1478180 - RNA, 22 nt, Human
agccagauuuuuuaaaauuuau

SEQ ID NO: 1478181 - RNA, 15 nt, Human
agccagauuuuccug

SEQ ID NO: 1478182 - RNA, 19 nt, Human
agccagauuuuccugaaaa

SEQ ID NO: 1478183 - RNA, 15 nt, Human
agccauguuucacaa

SEQ ID NO: 1478184 - RNA, 15 nt, Human
agcaugcaucuguuu

SEQ ID NO: 1478185 - RNA, 14 nt, Human
agcaugcacaaauu

SEQ ID NO: 1478186 - RNA, 19 nt, Human
agcaguugagacaagaaaa

SEQ ID NO: 1478187 - RNA, 22 nt, Human
agcaguugagacaagaaaauaa

SEQ ID NO: 1478188 - RNA, 20 nt, Human
agcaguugagacaagaaaau

SEQ ID NO: 1478189 - RNA, 12 nt, Human
agcacugcucca

SEQ ID NO: 1478190 - RNA, 17 nt, Human
agcacgugguaaaacac

SEQ ID NO: 1478191 - RNA, 17 nt, Human
agccucccugaagacca

SEQ ID NO: 1478192 - RNA, 23 nt, Human
agacuacaggcacacaccaccac

SEQ ID NO: 1478193 - RNA, 14 nt, Human
agacgggcccuggu

SEQ ID NO: 1478194 - RNA, 19 nt, Human
agaccaaggcuuucucuac

SEQ ID NO: 1478195 - RNA, 13 nt, Human
agaccaccaagcc

SEQ ID NO: 1478196 - RNA, 14 nt, Human
agaccaccaagccu

SEQ ID NO: 1478197 - RNA, 13 nt, Human
agagaaggagcag

SEQ ID NO: 1478198 - RNA, 15 nt, Human
agagaagcaaguaaa

SEQ ID NO: 1478199 - RNA, 17 nt, Human
agacugcauuauauuua

SEQ ID NO: 1478200 - RNA, 21 nt, Human
agacugcauuauauuuauuac

SEQ ID NO: 1478201 - RNA, 14 nt, Human
agagcccugaggcc

SEQ ID NO: 1478202 - RNA, 18 nt, Human
agagcccugaggccuaga

SEQ ID NO: 1478203 - RNA, 22 nt, Human
agagcccugaggccuagacucu

SEQ ID NO: 1478204 - RNA, 16 nt, Human
agaggguguccugcac

SEQ ID NO: 1478205 - RNA, 16 nt, Human
agauacuuaagugcug

SEQ ID NO: 1478206 - RNA, 21 nt, Human
agauaggucagugcaaauacu

SEQ ID NO: 1478207 - RNA, 21 nt, Human
agaugaggccagaccauggac

SEQ ID NO: 1478208 - RNA, 16 nt, Human
agaugaggccagacca

SEQ ID NO: 1478209 - RNA, 14 nt, Human
agaugaggccagac

SEQ ID NO: 1478210 - RNA, 13 nt, Human
agaugaggccaga

SEQ ID NO: 1478211 - RNA, 22 nt, Human
agaugaggccagaccauggaca

SEQ ID NO: 1478212 - RNA, 16 nt, Human
aauggcugauaauuuu

SEQ ID NO: 1478213 - RNA, 15 nt, Human
aauggcugauaauuu

SEQ ID NO: 1478214 - RNA, 17 nt, Human
aauggcugauaauuuua

SEQ ID NO: 1478215 - RNA, 18 nt, Human
aauggcugauaauuuuaa

SEQ ID NO: 1478216 - RNA, 19 nt, Human
aauggcugauaauuuuaaa

SEQ ID NO: 1478217 - RNA, 16 nt, Human
aauggugccuucauuu

SEQ ID NO: 1478218 - RNA, 15 nt, Human
aauuaaagcuguuau

SEQ ID NO: 1478219 - RNA, 14 nt, Human
aauuaguuuuauau

SEQ ID NO: 1478220 - RNA, 17 nt, Human
aauuaguuuuauaugcu

SEQ ID NO: 1478221 - RNA, 20 nt, Human
aauuaguuuuauaugcuucu

SEQ ID NO: 1478222 - RNA, 12 nt, Human
aaugaagauacu

SEQ ID NO: 1478223 - RNA, 17 nt, Human
aaugauaacuggaaacu

SEQ ID NO: 1478224 - RNA, 22 nt, Human
aaugaacagaacauagacagaa

SEQ ID NO: 1478225 - RNA, 20 nt, Human
aaugauaacuggaaacuuca

SEQ ID NO: 1478226 - RNA, 17 nt, Human
aaugaagauacugaaau

SEQ ID NO: 1478227 - RNA, 18 nt, Human
aaucugcauuauuggaau

SEQ ID NO: 1478228 - RNA, 17 nt, Human
aaucucaucucagugaa

SEQ ID NO: 1478229 - RNA, 16 nt, Human
aaucugcauuauugga

SEQ ID NO: 1478230 - RNA, 17 nt, Human
aaucugcauuauuggaa

SEQ ID NO: 1478231 - RNA, 14 nt, Human
aaugaacagaacau

SEQ ID NO: 1478232 - RNA, 15 nt, Human
aaugaacagaacaua

SEQ ID NO: 1478233 - RNA, 13 nt, Human
aauccauacauuu

SEQ ID NO: 1478234 - RNA, 14 nt, Human
aauccauacauuug

SEQ ID NO: 1478235 - RNA, 13 nt, Human
aaucacaauacau

SEQ ID NO: 1478236 - RNA, 21 nt, Human
aaucaacuugcuuaucaacuu

SEQ ID NO: 1478237 - RNA, 14 nt, Human
aaucaauuaaaagu

SEQ ID NO: 1478238 - RNA, 15 nt, Human
aaucaacuugcuuau

SEQ ID NO: 1478239 - RNA, 17 nt, Human
aaucaacuugcuuauca

SEQ ID NO: 1478240 - RNA, 13 nt, Human
aaucaacuugcuu

SEQ ID NO: 1478241 - RNA, 20 nt, Human
aaucaauuacugguccaaaa

SEQ ID NO: 1478242 - RNA, 18 nt, Human
aaucaacuugcuuaucaa

SEQ ID NO: 1478243 - RNA, 16 nt, Human
aauauucaauaaagcu

SEQ ID NO: 1478244 - RNA, 15 nt, Human
aauauucaauaaagc

SEQ ID NO: 1478245 - RNA, 14 nt, Human
aauauucaauaaag

SEQ ID NO: 1478246 - RNA, 18 nt, Human
aauauuaugagaugcugg

SEQ ID NO: 1478247 - RNA, 16 nt, Human
aauauuauguuaaaac

SEQ ID NO: 1478248 - RNA, 14 nt, Human
aauauuaugagaug

SEQ ID NO: 1478249 - RNA, 16 nt, Human
aauauuaugagaugcu

SEQ ID NO: 1478250 - RNA, 16 nt, Human
aauauuauuccucaaa

SEQ ID NO: 1478251 - RNA, 12 nt, Human
aauauguaccaa

SEQ ID NO: 1478252 - RNA, 19 nt, Human
aauauguaccaagaaucuu

SEQ ID NO: 1478253 - RNA, 15 nt, Human
aauauguaccaagaa

SEQ ID NO: 1478254 - RNA, 22 nt, Human
aauauuaugagaugcuggcuug

SEQ ID NO: 1478255 - RNA, 15 nt, Human
aauauaauuguuuua

SEQ ID NO: 1478256 - RNA, 17 nt, Human
aauaaacgucuuaaaua

SEQ ID NO: 1478257 - RNA, 19 nt, Human
aauaaaauucaacaaacau

SEQ ID NO: 1478258 - RNA, 16 nt, Human
aauaaacgucuuaaau

SEQ ID NO: 1478259 - RNA, 18 nt, Human
aauaaaauucaacaaaca

SEQ ID NO: 1478260 - RNA, 22 nt, Human
aauaaaauucaacaaacauuug

SEQ ID NO: 1478261 - RNA, 19 nt, Human
aauaaacuauuuguaaagu

SEQ ID NO: 1478262 - RNA, 20 nt, Human
aaguuguuccuuaagucaga

SEQ ID NO: 1478263 - RNA, 20 nt, Human
aaguugugcuugagccagga

SEQ ID NO: 1478264 - RNA, 21 nt, Human
aaguggguuuuuuaguugaau

SEQ ID NO: 1478265 - RNA, 17 nt, Human
aaguggguuuuuuaguu

SEQ ID NO: 1478266 - RNA, 21 nt, Human
aauaauccuaaacauaugaau

SEQ ID NO: 1478267 - RNA, 20 nt, Human
aauaaucacgcuuuccugaa

SEQ ID NO: 1478268 - RNA, 21 nt, Human
aauaaucacgcuuuccugaau

SEQ ID NO: 1478269 - RNA, 21 nt, Human
aauaaguucaaauucuucuga

SEQ ID NO: 1478270 - RNA, 22 nt, Human
aauaaguucaaauucuucugaa

SEQ ID NO: 1478271 - RNA, 20 nt, Human
aauaaguuuuuguuucacag

SEQ ID NO: 1478272 - RNA, 19 nt, Human
aauaauguaagacaaauau

SEQ ID NO: 1478273 - RNA, 12 nt, Human
aauaauguaaga

SEQ ID NO: 1478274 - RNA, 20 nt, Human
aaguccaguguuucuuuuuu

SEQ ID NO: 1478275 - RNA, 23 nt, Human
aaguccaggcuuuuuuaucaugu

SEQ ID NO: 1478276 - RNA, 15 nt, Human
aaguacuuuuggcau

SEQ ID NO: 1478277 - RNA, 14 nt, Human
aaguacuuuuggca

SEQ ID NO: 1478278 - RNA, 15 nt, Human
aaguagaaaucauag

SEQ ID NO: 1478279 - RNA, 13 nt, Human
aaguagaaaucau

SEQ ID NO: 1478280 - RNA, 19 nt, Human
aaguaucaucaguguagaa

SEQ ID NO: 1478281 - RNA, 20 nt, Human
aaggugggaggaugugaauu

SEQ ID NO: 1478282 - RNA, 22 nt, Human
aaggugggaggaugugaauugu

SEQ ID NO: 1478283 - RNA, 19 nt, Human
aagucucuggaauuugaaa

SEQ ID NO: 1478284 - RNA, 14 nt, Human
aaggacuguaaucu

SEQ ID NO: 1478285 - RNA, 13 nt, Human
aaggcaaaaauag

SEQ ID NO: 1478286 - RNA, 21 nt, Human
aaggcaaaaauaguuuggaua

SEQ ID NO: 1478287 - RNA, 14 nt, Human
aaggauuuugcagu

SEQ ID NO: 1478288 - RNA, 15 nt, Human
aaggauuuugcaguu

SEQ ID NO: 1478289 - RNA, 21 nt, Human
aaggacuaugaaaagcuagaa

SEQ ID NO: 1478290 - RNA, 20 nt, Human
aagcuggagugcaguggcau

SEQ ID NO: 1478291 - RNA, 13 nt, Human
aagcuaaaauaaa

SEQ ID NO: 1478292 - RNA, 16 nt, Human
aagcuaaaauaaagaa

SEQ ID NO: 1478293 - RNA, 15 nt, Human
aagcuaaaauaaaga

SEQ ID NO: 1478294 - RNA, 15 nt, Human
aagcugccugguaua

SEQ ID NO: 1478295 - RNA, 20 nt, Human
aagcugccugguauauccaa

SEQ ID NO: 1478296 - RNA, 13 nt, Human
aagccaugcugga

SEQ ID NO: 1478297 - RNA, 15 nt, Human
aagccaugcuggaaa

SEQ ID NO: 1478298 - RNA, 21 nt, Human
aagccaugcuggaaaauaaua

SEQ ID NO: 1478299 - RNA, 20 nt, Human
aagccauggagauucucaua

SEQ ID NO: 1478300 - RNA, 22 nt, Human
aagccauggguagccugggugu

SEQ ID NO: 1478301 - RNA, 21 nt, Human
aagccauggguagccugggug

SEQ ID NO: 1478302 - RNA, 18 nt, Human
aagccauggguagccugg

SEQ ID NO: 1478303 - RNA, 22 nt, Human
aagaaauuaugugccagauuua

SEQ ID NO: 1478304 - RNA, 13 nt, Human
aagaaauuaugug

SEQ ID NO: 1478305 - RNA, 19 nt, Human
aagauugcuuaauaaauug

SEQ ID NO: 1478306 - RNA, 16 nt, Human
aagauugcugaaauuu

SEQ ID NO: 1478307 - RNA, 16 nt, Human
aagauuuaccacuugu

SEQ ID NO: 1478308 - RNA, 21 nt, Human
aagauugugucccauuccccc

SEQ ID NO: 1478309 - RNA, 15 nt, Human
aagauuguuccugcu

SEQ ID NO: 1478310 - RNA, 22 nt, Human
aagauuuccuucuuuuuuucuu

SEQ ID NO: 1478311 - RNA, 16 nt, Human
aagauuuccauauaaa

SEQ ID NO: 1478312 - RNA, 13 nt, Human
aagccagauuuuc

SEQ ID NO: 1478313 - RNA, 19 nt, Human
aagccagauuuuccugaaa

SEQ ID NO: 1478314 - RNA, 19 nt, Human
aagccagcugcccccagag

SEQ ID NO: 1478315 - RNA, 22 nt, Human
aagccagcugcccccagagcca

SEQ ID NO: 1478316 - RNA, 21 nt, Human
aagccagcugcccccagagcc

SEQ ID NO: 1478317 - RNA, 20 nt, Human
aagccagcugcccccagagc

SEQ ID NO: 1478318 - RNA, 12 nt, Human
aagccagcuuuc

SEQ ID NO: 1478319 - RNA, 14 nt, Human
aagccagcuuuccc

SEQ ID NO: 1478320 - RNA, 15 nt, Human
aagccagcuuucccu

SEQ ID NO: 1478321 - RNA, 17 nt, Human
aagccagcuuucccugc

SEQ ID NO: 1478322 - RNA, 23 nt, Human
aagccagcuuucccugccucuca

SEQ ID NO: 1478323 - RNA, 16 nt, Human
aagcagacauuuuaaa

SEQ ID NO: 1478324 - RNA, 22 nt, Human
aaagucucuggaauuugaaaca

SEQ ID NO: 1478325 - RNA, 20 nt, Human
aaagucucuggaauuugaaa

SEQ ID NO: 1478326 - RNA, 19 nt, Human
aaagucucuggaauuugaa

SEQ ID NO: 1478327 - RNA, 16 nt, Human
aaagggacugagaaau

SEQ ID NO: 1478328 - RNA, 20 nt, Human
aaagggacugagaaauuuau

SEQ ID NO: 1478329 - RNA, 12 nt, Human
aaauaacaauga

SEQ ID NO: 1478330 - RNA, 14 nt, Human
aaauaaagaaugga

SEQ ID NO: 1478331 - RNA, 13 nt, Human
aaauaaagaaaua

SEQ ID NO: 1478332 - RNA, 13 nt, Human
aaauaaagaaugg

SEQ ID NO: 1478333 - RNA, 16 nt, Human
aaauaaagaauggaaa

SEQ ID NO: 1478334 - RNA, 14 nt, Human
aaagugacccuguu

SEQ ID NO: 1478335 - RNA, 19 nt, Human
aaagugacuaauggcauga

SEQ ID NO: 1478336 - RNA, 14 nt, Human
aaagugagagcacg

SEQ ID NO: 1478337 - RNA, 23 nt, Human
aaauaacaaaucucaagcaaaca

SEQ ID NO: 1478338 - RNA, 14 nt, Human
aaauaacaaugugc

SEQ ID NO: 1478339 - RNA, 17 nt, Human
aaauaacaaugugcucu

SEQ ID NO: 1478340 - RNA, 19 nt, Human
aaauggccauuugcuuuuu

SEQ ID NO: 1478341 - RNA, 18 nt, Human
aaauauuuuaaagaauug

SEQ ID NO: 1478342 - RNA, 22 nt, Human
aaauggccauuugcuuuuucac

SEQ ID NO: 1478343 - RNA, 23 nt, Human
aaauggccauuugcuuuuucacc

SEQ ID NO: 1478344 - RNA, 18 nt, Human
aaauggcuuccuggcaau

SEQ ID NO: 1478345 - RNA, 17 nt, Human
aaauggaauacucuuau

SEQ ID NO: 1478346 - RNA, 13 nt, Human
aaauggaaacuau

SEQ ID NO: 1478347 - RNA, 19 nt, Human
aaaucuugucauguguaua

SEQ ID NO: 1478348 - RNA, 20 nt, Human
aaaucuugucauguguauaa

SEQ ID NO: 1478349 - RNA, 21 nt, Human
aaaucuugucauguguauaaa

SEQ ID NO: 1478350 - RNA, 20 nt, Human
aaaucuugguugaugccaaa

SEQ ID NO: 1478351 - RNA, 22 nt, Human
aaaucuugguugaugccaaaaa

SEQ ID NO: 1478352 - RNA, 14 nt, Human
aaaucuugucaugu

SEQ ID NO: 1478353 - RNA, 16 nt, Human
aaaucuugucaugugu

SEQ ID NO: 1478354 - RNA, 17 nt, Human
aaaucuugucaugugua

SEQ ID NO: 1478355 - RNA, 18 nt, Human
aaaucuugucauguguau

SEQ ID NO: 1478356 - RNA, 18 nt, Human
aaaucaacuugcuuauca

SEQ ID NO: 1478357 - RNA, 16 nt, Human
aaauagaagagagagg

SEQ ID NO: 1478358 - RNA, 12 nt, Human
aaauaguauuuc

SEQ ID NO: 1478359 - RNA, 23 nt, Human
aaauauuuuaaagaauuguguca

SEQ ID NO: 1478360 - RNA, 19 nt, Human
aaauauuuuaaagaauugu

SEQ ID NO: 1478361 - RNA, 23 nt, Human
aaauagucucuuuaaaaggaaag

SEQ ID NO: 1478362 - RNA, 16 nt, Human
aaauagggucuaacuc

SEQ ID NO: 1478363 - RNA, 20 nt, Human
aaauaguuuggauauguaaa

SEQ ID NO: 1478364 - RNA, 14 nt, Human
aaauaguuuggaua

SEQ ID NO: 1478365 - RNA, 21 nt, Human
aaauaguuuggauauguaaaa

SEQ ID NO: 1478366 - RNA, 13 nt, Human
aaacacucuugaa

SEQ ID NO: 1478367 - RNA, 17 nt, Human
aaacacucuugaaaaau

SEQ ID NO: 1478368 - RNA, 14 nt, Human
aaacacucuugaaa

SEQ ID NO: 1478369 - RNA, 18 nt, Human
aaaauucaacaaacauuu

SEQ ID NO: 1478370 - RNA, 24 nt, Human
aaacacuugcggauauucuggacu

SEQ ID NO: 1478371 - RNA, 15 nt, Human
aaacacuugcaaccu

SEQ ID NO: 1478372 - RNA, 16 nt, Human
aaacagauuguuugca

SEQ ID NO: 1478373 - RNA, 20 nt, Human
aaagaaaacuuguauuaugu

SEQ ID NO: 1478374 - RNA, 12 nt, Human
aaagaaaacuug

SEQ ID NO: 1478375 - RNA, 13 nt, Human
aaagaaaaacaaa

SEQ ID NO: 1478376 - RNA, 16 nt, Human
aaagaaaagaaaauuu

SEQ ID NO: 1478377 - RNA, 13 nt, Human
aaagaaaaccuuu

SEQ ID NO: 1478378 - RNA, 16 nt, Human
aaacugacucuuaaga

SEQ ID NO: 1478379 - RNA, 17 nt, Human
aaacugacucuuaagaa

SEQ ID NO: 1478380 - RNA, 11 nt, Human
aaagaacaucc

SEQ ID NO: 1478381 - RNA, 15 nt, Human
aaagaaauauaccua

SEQ ID NO: 1478382 - RNA, 15 nt, Human
aaagaaauuaugugc

SEQ ID NO: 1478383 - RNA, 13 nt, Human
aaagaaauuaugu

SEQ ID NO: 1478384 - RNA, 12 nt, Human
aaagaguacucu

SEQ ID NO: 1478385 - RNA, 17 nt, Human
aaagaguacucuuguuu

SEQ ID NO: 1478386 - RNA, 20 nt, Human
aaagauaucucaucucuucu

SEQ ID NO: 1478387 - RNA, 15 nt, Human
aacuuugcugagccu

SEQ ID NO: 1478388 - RNA, 15 nt, Human
aacuuugaaguuagc

SEQ ID NO: 1478389 - RNA, 11 nt, Human
aacuuuuguaa

SEQ ID NO: 1478390 - RNA, 21 nt, Human
aacuuuuguaagacaaagguu

SEQ ID NO: 1478391 - RNA, 20 nt, Human
aacuuuuuauugauuuuugg

SEQ ID NO: 1478392 - RNA, 23 nt, Human
aacuuuuuuauuuaaaaaacuaa

SEQ ID NO: 1478393 - RNA, 17 nt, Human
aacugauccagcaauua

SEQ ID NO: 1478394 - RNA, 17 nt, Human
aacugauucacaucuca

SEQ ID NO: 1478395 - RNA, 19 nt, Human
aacugauucacaucucauu

SEQ ID NO: 1478396 - RNA, 23 nt, Human
aaccagaucuagucaaucaaguc

SEQ ID NO: 1478397 - RNA, 14 nt, Human
aaccagaucauugu

SEQ ID NO: 1478398 - RNA, 22 nt, Human
aaccacuggaaaguuuaugguu

SEQ ID NO: 1478399 - RNA, 13 nt, Human
aacaugauuuggg

SEQ ID NO: 1478400 - RNA, 19 nt, Human
aacaucauuacuauaagaa

SEQ ID NO: 1478401 - RNA, 16 nt, Human
aacaugcacugauguu

SEQ ID NO: 1478402 - RNA, 19 nt, Human
aacaugcacugauguugug

SEQ ID NO: 1478403 - RNA, 14 nt, Human
aacaugcacugaug

SEQ ID NO: 1478404 - RNA, 22 nt, Human
aacccugucuggauccuauccu

SEQ ID NO: 1478405 - RNA, 17 nt, Human
aacaaagaaauuaugug

SEQ ID NO: 1478406 - RNA, 15 nt, Human
aacaaagaaauuaug

SEQ ID NO: 1478407 - RNA, 17 nt, Human
aacaaaacugcauuuca

SEQ ID NO: 1478408 - RNA, 18 nt, Human
aaauugcuuuguauugua

SEQ ID NO: 1478409 - RNA, 15 nt, Human
aaauugauuuugaac

SEQ ID NO: 1478410 - RNA, 14 nt, Human
aaauugauuuugaa

SEQ ID NO: 1478411 - RNA, 19 nt, Human
aacaagaagggacugagag

SEQ ID NO: 1478412 - RNA, 12 nt, Human
aacaagaauugg

SEQ ID NO: 1478413 - RNA, 15 nt, Human
aacaccaacauaaaa

SEQ ID NO: 1478414 - RNA, 17 nt, Human
aacaaagaguucaagaa

SEQ ID NO: 1478415 - RNA, 23 nt, Human
aacaaagaguucaagaaauaagu

SEQ ID NO: 1478416 - RNA, 19 nt, Human
aacaaagaguucaagaaau

SEQ ID NO: 1478417 - RNA, 14 nt, Human
acuagcuauggugu

SEQ ID NO: 1478418 - RNA, 15 nt, Human
acuagcccaaugaaa

SEQ ID NO: 1478419 - RNA, 17 nt, Human
acuagcccaaugaaaug

SEQ ID NO: 1478420 - RNA, 18 nt, Human
acuagcccuccuuuuucc

SEQ ID NO: 1478421 - RNA, 12 nt, Human
acuccccuccuu

SEQ ID NO: 1478422 - RNA, 11 nt, Human
acucagcucug

SEQ ID NO: 1478423 - RNA, 22 nt, Human
acucaggcccccaccuggcuca

SEQ ID NO: 1478424 - RNA, 23 nt, Human
acucaggcccccaccuggcucac

SEQ ID NO: 1478425 - RNA, 19 nt, Human
acucagcucugacauucug

SEQ ID NO: 1478426 - RNA, 20 nt, Human
acucaaaccaaaucacugaa

SEQ ID NO: 1478427 - RNA, 19 nt, Human
acucaaaccaaaucacuga

SEQ ID NO: 1478428 - RNA, 14 nt, Human
acucaaacugagga

SEQ ID NO: 1478429 - RNA, 21 nt, Human
acucaaacugaggaauuucac

SEQ ID NO: 1478430 - RNA, 17 nt, Human
acucaaaauauuuguac

SEQ ID NO: 1478431 - RNA, 19 nt, Human
acucaaaauauuuguacau

SEQ ID NO: 1478432 - RNA, 20 nt, Human
acucaaaauauuuguacaua

SEQ ID NO: 1478433 - RNA, 20 nt, Human
acuauaagcaagaaggcaaa

SEQ ID NO: 1478434 - RNA, 18 nt, Human
acuauaagaacuuugagc

SEQ ID NO: 1478435 - RNA, 19 nt, Human
acuauaagaacuuugagcu

SEQ ID NO: 1478436 - RNA, 15 nt, Human
acucaaaauauuugu

SEQ ID NO: 1478437 - RNA, 20 nt, Human
acuaguugugucuggcaguu

SEQ ID NO: 1478438 - RNA, 13 nt, Human
acuauaagaacuu

SEQ ID NO: 1478439 - RNA, 14 nt, Human
acuauaagaacuuu

SEQ ID NO: 1478440 - RNA, 23 nt, Human
acucaaacugaggaauuucaccu

SEQ ID NO: 1478441 - RNA, 16 nt, Human
acucagauccuccuca

SEQ ID NO: 1478442 - RNA, 17 nt, Human
acucagauccuccucau

SEQ ID NO: 1478443 - RNA, 21 nt, Human
acucuguucauuccuccaggu

SEQ ID NO: 1478444 - RNA, 22 nt, Human
acucuauauagcugaucaguuu

SEQ ID NO: 1478445 - RNA, 16 nt, Human
acuaagagagaaugag

SEQ ID NO: 1478446 - RNA, 16 nt, Human
acgccagacuucccac

SEQ ID NO: 1478447 - RNA, 22 nt, Human
acgccagacuucccacggcucc

SEQ ID NO: 1478448 - RNA, 17 nt, Human
accuguaugucuccagu

SEQ ID NO: 1478449 - RNA, 20 nt, Human
acuuauuguagcauccugga

SEQ ID NO: 1478450 - RNA, 20 nt, Human
acuuauuggaacucugcuug

SEQ ID NO: 1478451 - RNA, 23 nt, Human
acuuauuguagcauccuggaaua

SEQ ID NO: 1478452 - RNA, 21 nt, Human
acuuauuggaacucugcuuga

SEQ ID NO: 1478453 - RNA, 20 nt, Human
acuuguaaaggaauuuaaaa

SEQ ID NO: 1478454 - RNA, 19 nt, Human
acuuguaaaggaauuuaaa

SEQ ID NO: 1478455 - RNA, 20 nt, Human
acuucuuuugcucuuagcug

SEQ ID NO: 1478456 - RNA, 22 nt, Human
acuucugccagcauaauacuug

SEQ ID NO: 1478457 - RNA, 19 nt, Human
acuucuuuugcucuuagcu

SEQ ID NO: 1478458 - RNA, 15 nt, Human
acuggguaggaaaga

SEQ ID NO: 1478459 - RNA, 17 nt, Human
acuggaacuugaacuga

SEQ ID NO: 1478460 - RNA, 18 nt, Human
acuggaacuugaacugau

SEQ ID NO: 1478461 - RNA, 16 nt, Human
acugccaagacugcug

SEQ ID NO: 1478462 - RNA, 18 nt, Human
acugccaagacugcugug

SEQ ID NO: 1478463 - RNA, 19 nt, Human
acugccaagacugcugugg

SEQ ID NO: 1478464 - RNA, 20 nt, Human
acugccaagacugcuguggc

SEQ ID NO: 1478465 - RNA, 12 nt, Human
acugccaagcca

SEQ ID NO: 1478466 - RNA, 18 nt, Human
acugccaagccaugggua

SEQ ID NO: 1478467 - RNA, 15 nt, Human
acugccaagccaugg

SEQ ID NO: 1478468 - RNA, 18 nt, Human
agaaaaguugaauuuuac

SEQ ID NO: 1478469 - RNA, 21 nt, Human
agaaaaguugaauuuuacaug

SEQ ID NO: 1478470 - RNA, 16 nt, Human
acuuuucuuaaaccuu

SEQ ID NO: 1478471 - RNA, 24 nt, Human
acuuuucuuaaaccuucaguuaug

SEQ ID NO: 1478472 - RNA, 12 nt, Human
acuuuucuucua

SEQ ID NO: 1478473 - RNA, 18 nt, Human
acuuuucuucuauugccu

SEQ ID NO: 1478474 - RNA, 18 nt, Human
acuuuuccuuugaauccu

SEQ ID NO: 1478475 - RNA, 19 nt, Human
acuuuuccuuugaauccuc

SEQ ID NO: 1478476 - RNA, 17 nt, Human
acuuuuccucccucagu

SEQ ID NO: 1478477 - RNA, 14 nt, Human
acuuuuaaacugug

SEQ ID NO: 1478478 - RNA, 15 nt, Human
acuuuuaaacugugu

SEQ ID NO: 1478479 - RNA, 17 nt, Human
acuuuuaaacuguguac

SEQ ID NO: 1478480 - RNA, 22 nt, Human
agaaaauuuuuguaguagcguu

SEQ ID NO: 1478481 - RNA, 20 nt, Human
agaaaauuuuuguaguagcg

SEQ ID NO: 1478482 - RNA, 16 nt, Human
agaaaauuuuuguagu

SEQ ID NO: 1478483 - RNA, 14 nt, Human
agaaaauaacaaua

SEQ ID NO: 1478484 - RNA, 19 nt, Human
acuuuagggggugggauuc

SEQ ID NO: 1478485 - RNA, 23 nt, Human
acuuuagggaaguacuuuuggca

SEQ ID NO: 1478486 - RNA, 15 nt, Human
acuuucuagauuaag

SEQ ID NO: 1478487 - RNA, 12 nt, Human
acuuuuaaacag

SEQ ID NO: 1478488 - RNA, 15 nt, Human
acuuuuaaacaguga

SEQ ID NO: 1478489 - RNA, 13 nt, Human
acuuuuaaacugu

SEQ ID NO: 1478490 - RNA, 16 nt, Human
agaaaggauaaaguug

SEQ ID NO: 1478491 - RNA, 22 nt, Human
accccuaaaagaaacccugcac

SEQ ID NO: 1478492 - RNA, 21 nt, Human
accccuaaaagaaacccugca

SEQ ID NO: 1478493 - RNA, 12 nt, Human
accccuaggacu

SEQ ID NO: 1478494 - RNA, 12 nt, Human
accccgacuuuu

SEQ ID NO: 1478495 - RNA, 15 nt, Human
accccgacuuuuguu

SEQ ID NO: 1478496 - RNA, 16 nt, Human
accccuacaugaaaca

SEQ ID NO: 1478497 - RNA, 15 nt, Human
acauaaaaaggacau

SEQ ID NO: 1478498 - RNA, 22 nt, Human
acauaaaaaggacaucagcaaa

SEQ ID NO: 1478499 - RNA, 21 nt, Human
acauaaaaaggacaucagcaa

SEQ ID NO: 1478500 - RNA, 20 nt, Human
acauaaaaaggacaucagca

SEQ ID NO: 1478501 - RNA, 19 nt, Human
acauaaaaaugaucuaaac

SEQ ID NO: 1478502 - RNA, 15 nt, Human
acagguuagcugcuc

SEQ ID NO: 1478503 - RNA, 12 nt, Human
acauccagcaga

SEQ ID NO: 1478504 - RNA, 20 nt, Human
acaucccacucacaacagcu

SEQ ID NO: 1478505 - RNA, 12 nt, Human
acauaaaguuga

SEQ ID NO: 1478506 - RNA, 15 nt, Human
acauaaaguugauaa

SEQ ID NO: 1478507 - RNA, 20 nt, Human
acauaaauuuaguauuuugu

SEQ ID NO: 1478508 - RNA, 14 nt, Human
acauguuauuugua

SEQ ID NO: 1478509 - RNA, 22 nt, Human
acauuaaagaaggguugagcug

SEQ ID NO: 1478510 - RNA, 18 nt, Human
acauuugcucauggaauu

SEQ ID NO: 1478511 - RNA, 14 nt, Human
acauuuguauaaaa

SEQ ID NO: 1478512 - RNA, 20 nt, Human
accacgccuggcuaauuuuu

SEQ ID NO: 1478513 - RNA, 13 nt, Human
accacgccuggcu

SEQ ID NO: 1478514 - RNA, 14 nt, Human
accaagcugcugug

SEQ ID NO: 1478515 - RNA, 12 nt, Human
accaagccuuga

SEQ ID NO: 1478516 - RNA, 20 nt, Human
acaagucagucauucagaua

SEQ ID NO: 1478517 - RNA, 14 nt, Human
acaaguauuuguua

SEQ ID NO: 1478518 - RNA, 17 nt, Human
acaaguauuuguuaauu

SEQ ID NO: 1478519 - RNA, 20 nt, Human
acaaguauuuguuaauuuag

SEQ ID NO: 1478520 - RNA, 22 nt, Human
acaaguauuuguuaauuuagaa

SEQ ID NO: 1478521 - RNA, 13 nt, Human
acaacuauuuuca

SEQ ID NO: 1478522 - RNA, 15 nt, Human
acaacuauuuucaga

SEQ ID NO: 1478523 - RNA, 20 nt, Human
acaacuauuuucagauguga

SEQ ID NO: 1478524 - RNA, 16 nt, Human
acaacuauuuucagau

SEQ ID NO: 1478525 - RNA, 22 nt, Human
acaacuugucuauuaccuguua

SEQ ID NO: 1478526 - RNA, 13 nt, Human
acaaguaacaaaa

SEQ ID NO: 1478527 - RNA, 14 nt, Human
acaaguaacaaaaa

SEQ ID NO: 1478528 - RNA, 15 nt, Human
acaaguaacaaaaau

SEQ ID NO: 1478529 - RNA, 13 nt, Human
aauuuugaaaaac

SEQ ID NO: 1478530 - RNA, 18 nt, Human
aauuauaacuggaaagaa

SEQ ID NO: 1478531 - RNA, 19 nt, Human
aauuauaacuggaaagaag

SEQ ID NO: 1478532 - RNA, 19 nt, Human
acaaaauggaauacucuua

SEQ ID NO: 1478533 - RNA, 20 nt, Human
acaaaauggaauacucuuau

SEQ ID NO: 1478534 - RNA, 14 nt, Human
acaaaccaugcaaa

SEQ ID NO: 1478535 - RNA, 13 nt, Human
acaacuauauugu

SEQ ID NO: 1478536 - RNA, 16 nt, Human
acaaagaguucaagaa

SEQ ID NO: 1478537 - RNA, 12 nt, Human
acaaagaaccuu

SEQ ID NO: 1478538 - RNA, 14 nt, Human
acacaaacacacac

SEQ ID NO: 1478539 - RNA, 17 nt, Human
acaauguuuaaaccuuu

SEQ ID NO: 1478540 - RNA, 16 nt, Human
acaauuaaagcuguua

SEQ ID NO: 1478541 - RNA, 19 nt, Human
acaauuaaagcuguuauuu

SEQ ID NO: 1478542 - RNA, 14 nt, Human
acaaugugucugag

SEQ ID NO: 1478543 - RNA, 14 nt, Human
acacagaaaccaau

SEQ ID NO: 1478544 - RNA, 23 nt, Human
acacagacugcgauuugucccag

SEQ ID NO: 1478545 - RNA, 14 nt, Human
acacuaaaaauaaa

SEQ ID NO: 1478546 - RNA, 15 nt, Human
acagaagaaacuggg

SEQ ID NO: 1478547 - RNA, 14 nt, Human
acagaagaaacaag

SEQ ID NO: 1478548 - RNA, 15 nt, Human
acagaaguuugcacu

SEQ ID NO: 1478549 - RNA, 17 nt, Human
acagaaguuugcacuau

SEQ ID NO: 1478550 - RNA, 24 nt, Human
acagagguagucucacugcuugaa

SEQ ID NO: 1478551 - RNA, 13 nt, Human
acagcucuagaca

SEQ ID NO: 1478552 - RNA, 22 nt, Human
acagguaaaacagggccacaua

SEQ ID NO: 1478553 - RNA, 18 nt, Human
acagguaaacuaucuugg

SEQ ID NO: 1478554 - RNA, 22 nt, Human
acagguagaauuaucuaauuua

SEQ ID NO: 1478555 - RNA, 20 nt, Human
caaccucugccucccagguu

SEQ ID NO: 1478556 - RNA, 13 nt, Human
caaccggcuuugu

SEQ ID NO: 1478557 - RNA, 22 nt, Human
caaccggcuuuguggcacuggg

SEQ ID NO: 1478558 - RNA, 13 nt, Human
caacggagucaaa

SEQ ID NO: 1478559 - RNA, 20 nt, Human
caaccuguuaccuacuuuga

SEQ ID NO: 1478560 - RNA, 22 nt, Human
caaccuguuaccuacuuugacu

SEQ ID NO: 1478561 - RNA, 23 nt, Human
caaccuguuaccuacuuugacuu

SEQ ID NO: 1478562 - RNA, 17 nt, Human
caaauuucaugaccagu

SEQ ID NO: 1478563 - RNA, 12 nt, Human
caacacugccag

SEQ ID NO: 1478564 - RNA, 13 nt, Human
caacacugccagc

SEQ ID NO: 1478565 - RNA, 14 nt, Human
caacacugccagca

SEQ ID NO: 1478566 - RNA, 19 nt, Human
caagacugcacaucaaaau

SEQ ID NO: 1478567 - RNA, 20 nt, Human
caagaacacagcccugcuuc

SEQ ID NO: 1478568 - RNA, 20 nt, Human
caacuuuuccuuugaauccu

SEQ ID NO: 1478569 - RNA, 21 nt, Human
caagccagauuuuccugaaaa

SEQ ID NO: 1478570 - RNA, 15 nt, Human
caagccagauuuuuu

SEQ ID NO: 1478571 - RNA, 13 nt, Human
caagccagaacuu

SEQ ID NO: 1478572 - RNA, 18 nt, Human
caagccuaagggauccug

SEQ ID NO: 1478573 - RNA, 23 nt, Human
caagccugcacaauaaaaauguu

SEQ ID NO: 1478574 - RNA, 18 nt, Human
caaggaggggcuguaaaa

SEQ ID NO: 1478575 - RNA, 13 nt, Human
caaggucugcuuu

SEQ ID NO: 1478576 - RNA, 22 nt, Human
caaggggcuucagguccaggcu

SEQ ID NO: 1478577 - RNA, 14 nt, Human
caauuaauuuuaga

SEQ ID NO: 1478578 - RNA, 15 nt, Human
caauuaauuccuuca

SEQ ID NO: 1478579 - RNA, 18 nt, Human
caauuaauuccuucagca

SEQ ID NO: 1478580 - RNA, 15 nt, Human
caauguuagccucaa

SEQ ID NO: 1478581 - RNA, 13 nt, Human
caauguucaucau

SEQ ID NO: 1478582 - RNA, 22 nt, Human
caauguuagccucaauuucuga

SEQ ID NO: 1478583 - RNA, 19 nt, Human
caauuacaacggagucaaa

SEQ ID NO: 1478584 - RNA, 18 nt, Human
caaucuguaaaacuaaga

SEQ ID NO: 1478585 - RNA, 12 nt, Human
caaucuguaaac

SEQ ID NO: 1478586 - RNA, 15 nt, Human
caaucuguaaacugu

SEQ ID NO: 1478587 - RNA, 16 nt, Human
caaucuguaaacugug

SEQ ID NO: 1478588 - RNA, 17 nt, Human
caaucuguaaacugugu

SEQ ID NO: 1478589 - RNA, 18 nt, Human
caaucuguaaacugugua

SEQ ID NO: 1478590 - RNA, 16 nt, Human
caauauaagcuuuucu

SEQ ID NO: 1478591 - RNA, 23 nt, Human
caauacaucccuuaccugggaaa

SEQ ID NO: 1478592 - RNA, 13 nt, Human
caauaauuuucua

SEQ ID NO: 1478593 - RNA, 14 nt, Human
caauaauuuucuac

SEQ ID NO: 1478594 - RNA, 16 nt, Human
caaguuagaaaacaua

SEQ ID NO: 1478595 - RNA, 17 nt, Human
caaaaauuaucuauagc

SEQ ID NO: 1478596 - RNA, 21 nt, Human
caaauacgugggcauucaaau

SEQ ID NO: 1478597 - RNA, 22 nt, Human
caaauacgugggcauucaaaug

SEQ ID NO: 1478598 - RNA, 20 nt, Human
caaauacgugggcauucaaa

SEQ ID NO: 1478599 - RNA, 15 nt, Human
caaaugucuauaaac

SEQ ID NO: 1478600 - RNA, 14 nt, Human
caaaugucuauaaa

SEQ ID NO: 1478601 - RNA, 14 nt, Human
caaauuaucuuaaa

SEQ ID NO: 1478602 - RNA, 21 nt, Human
caaauuguaagcaugcacaaa

SEQ ID NO: 1478603 - RNA, 15 nt, Human
caaauugugugaaag

SEQ ID NO: 1478604 - RNA, 18 nt, Human
caaauugugcaguacuuu

SEQ ID NO: 1478605 - RNA, 21 nt, Human
caaaggcauuauaaaaagaau

SEQ ID NO: 1478606 - RNA, 14 nt, Human
caaacuguaauaca

SEQ ID NO: 1478607 - RNA, 15 nt, Human
caaagcccuuuuaua

SEQ ID NO: 1478608 - RNA, 16 nt, Human
caaaauuuuuucucua

SEQ ID NO: 1478609 - RNA, 21 nt, Human
caaaauuuuuucucuaggaaa

SEQ ID NO: 1478610 - RNA, 22 nt, Human
caaaauuuuuucucuaggaaau

SEQ ID NO: 1478611 - RNA, 16 nt, Human
caaacacacacaaaag

SEQ ID NO: 1478612 - RNA, 16 nt, Human
caaacaccaacauaaa

SEQ ID NO: 1478613 - RNA, 16 nt, Human
caaaauuguuacaaau

SEQ ID NO: 1478614 - RNA, 22 nt, Human
caaaauguugaaauaugauguu

SEQ ID NO: 1478615 - RNA, 17 nt, Human
caaaauguuggucauuu

SEQ ID NO: 1478616 - RNA, 18 nt, Human
caaaauguuggucauuuu

SEQ ID NO: 1478617 - RNA, 21 nt, Human
caaaauguuggucauuuuaug

SEQ ID NO: 1478618 - RNA, 19 nt, Human
caaaaaucucaauauuuca

SEQ ID NO: 1478619 - RNA, 14 nt, Human
caaaaauagcuaaa

SEQ ID NO: 1478620 - RNA, 19 nt, Human
caaaaauuaucuauagcua

SEQ ID NO: 1478621 - RNA, 14 nt, Human
caaaagaagaaguu

SEQ ID NO: 1478622 - RNA, 15 nt, Human
caaaagaagaaguuu

SEQ ID NO: 1478623 - RNA, 14 nt, Human
caaaacaauguuua

SEQ ID NO: 1478624 - RNA, 18 nt, Human
caaaacaauguuuaaacc

SEQ ID NO: 1478625 - RNA, 16 nt, Human
caaaacaauguuuaaa

SEQ ID NO: 1478626 - RNA, 13 nt, Human
caaaacagauugu

SEQ ID NO: 1478627 - RNA, 18 nt, Human
caaaacagauuguuugca

SEQ ID NO: 1478628 - RNA, 21 nt, Human
caaaacaguauugacuuguau

SEQ ID NO: 1478629 - RNA, 20 nt, Human
caaaaagaaaagaaaauuuu

SEQ ID NO: 1478630 - RNA, 14 nt, Human
caaaaacaaaaaga

SEQ ID NO: 1478631 - RNA, 10 nt, Human
auuuuguaaa

SEQ ID NO: 1478632 - RNA, 17 nt, Human
auuuuguaaacucaaaa

SEQ ID NO: 1478633 - RNA, 19 nt, Human
caaaaaauuaaagcauuua

SEQ ID NO: 1478634 - RNA, 15 nt, Human
caaaaaauuaaagca

SEQ ID NO: 1478635 - RNA, 18 nt, Human
caaaaaauuaaagcauuu

SEQ ID NO: 1478636 - RNA, 13 nt, Human
auuuuccugaaaa

SEQ ID NO: 1478637 - RNA, 14 nt, Human
auuuuccuuuucaa

SEQ ID NO: 1478638 - RNA, 16 nt, Human
auuuucuaagaaacau

SEQ ID NO: 1478639 - RNA, 17 nt, Human
auuuucuaagaaacauu

SEQ ID NO: 1478640 - RNA, 22 nt, Human
auuuucuaagaaacauuuauau

SEQ ID NO: 1478641 - RNA, 21 nt, Human
auuuucuaccuggucucuccu

SEQ ID NO: 1478642 - RNA, 19 nt, Human
cacagugaucaaguuauuu

SEQ ID NO: 1478643 - RNA, 14 nt, Human
cacaguuccuggga

SEQ ID NO: 1478644 - RNA, 13 nt, Human
cacaguuccccua

SEQ ID NO: 1478645 - RNA, 18 nt, Human
cacauacucauuuuucau

SEQ ID NO: 1478646 - RNA, 19 nt, Human
cacauacucauuuuucaug

SEQ ID NO: 1478647 - RNA, 14 nt, Human
uuuucaaaagaaag

SEQ ID NO: 1478648 - RNA, 14 nt, Human
uuuuauuuugccaa

SEQ ID NO: 1478649 - RNA, 19 nt, Human
uuuuaucugaaaucaauua

SEQ ID NO: 1478650 - RNA, 20 nt, Human
uuuuaucugaaaucaauuaa

SEQ ID NO: 1478651 - RNA, 21 nt, Human
uuuuaucugaaaucaauuaaa

SEQ ID NO: 1478652 - RNA, 23 nt, Human
uuuuaucugaauuuuuaaacaag

SEQ ID NO: 1478653 - RNA, 20 nt, Human
uuuuaucugaguuacagaaa

SEQ ID NO: 1478654 - RNA, 19 nt, Human
uuuuaugagaaagccuucu

SEQ ID NO: 1478655 - RNA, 13 nt, Human
uuuuauauuugaa

SEQ ID NO: 1478656 - RNA, 18 nt, Human
uuuuauauuugaaauauu

SEQ ID NO: 1478657 - RNA, 21 nt, Human
uuuuaaaguaacccuacaaaa

SEQ ID NO: 1478658 - RNA, 13 nt, Human
uuuuaaacugugu

SEQ ID NO: 1478659 - RNA, 20 nt, Human
uuuuaaacuguguacauaac

SEQ ID NO: 1478660 - RNA, 23 nt, Human
uuuuaaacuguguacauaacuga

SEQ ID NO: 1478661 - RNA, 12 nt, Human
uuuuacaaagcc

SEQ ID NO: 1478662 - RNA, 17 nt, Human
uuuuacaaguaacaaaa

SEQ ID NO: 1478663 - RNA, 12 nt, Human
uuuuacaaguaa

SEQ ID NO: 1478664 - RNA, 18 nt, Human
uuuuacaaguaacaaaaa

SEQ ID NO: 1478665 - RNA, 19 nt, Human
uuuuacguccaucucuugu

SEQ ID NO: 1478666 - RNA, 23 nt, Human
uuuuauaauuuugugaagcaaaa

SEQ ID NO: 1478667 - RNA, 21 nt, Human
uuuuauaauuuugugaagcaa

SEQ ID NO: 1478668 - RNA, 21 nt, Human
uuuucaaaauuguuacaaauu

SEQ ID NO: 1478669 - RNA, 18 nt, Human
uuuucaacagugaagaca

SEQ ID NO: 1478670 - RNA, 22 nt, Human
uuuucaacagugaagacagaag

SEQ ID NO: 1478671 - RNA, 16 nt, Human
uuuucacauuggaaac

SEQ ID NO: 1478672 - RNA, 18 nt, Human
uuuucacauuagaagaca

SEQ ID NO: 1478673 - RNA, 12 nt, Human
uuuucacauuuu

SEQ ID NO: 1478674 - RNA, 19 nt, Human
uuuucaccagauuugcuaa

SEQ ID NO: 1478675 - RNA, 23 nt, Human
uuuucaccuggaagcauuuguuu

SEQ ID NO: 1478676 - RNA, 20 nt, Human
uuuugaaauuaugugacauu

SEQ ID NO: 1478677 - RNA, 20 nt, Human
uuuuccuaagugauuguaug

SEQ ID NO: 1478678 - RNA, 13 nt, Human
uuuuccuaaguga

SEQ ID NO: 1478679 - RNA, 17 nt, Human
uuuuccuagcccucuca

SEQ ID NO: 1478680 - RNA, 18 nt, Human
uuugcauaacguauaaaa

SEQ ID NO: 1478681 - RNA, 17 nt, Human
uuugcaguucuuuggcu

SEQ ID NO: 1478682 - RNA, 16 nt, Human
uuugcauuuaaaacag

SEQ ID NO: 1478683 - RNA, 17 nt, Human
uuugcauuuaaaacaga

SEQ ID NO: 1478684 - RNA, 19 nt, Human
uuugcauuuaaaacagaca

SEQ ID NO: 1478685 - RNA, 21 nt, Human
uuugcauuuaaaacagacacu

SEQ ID NO: 1478686 - RNA, 23 nt, Human
uuugcauuuaaaacagacacugg

SEQ ID NO: 1478687 - RNA, 15 nt, Human
uuuccacagaagcuc

SEQ ID NO: 1478688 - RNA, 20 nt, Human
uuuccuaaauauauuuuaag

SEQ ID NO: 1478689 - RNA, 22 nt, Human
uuuccguaaaaaugauuucagu

SEQ ID NO: 1478690 - RNA, 16 nt, Human
uuugcaccuuucuagu

SEQ ID NO: 1478691 - RNA, 17 nt, Human
uuugcaccuuucuaguu

SEQ ID NO: 1478692 - RNA, 20 nt, Human
uuugcaccuuucuaguugaa

SEQ ID NO: 1478693 - RNA, 21 nt, Human
uuugcaccuuucuaguugaaa

SEQ ID NO: 1478694 - RNA, 23 nt, Human
uuuuaaaauccacuuuaucuuga

SEQ ID NO: 1478695 - RNA, 13 nt, Human
uuuuaaacacauu

SEQ ID NO: 1478696 - RNA, 13 nt, Human
uuuuaaacaguga

SEQ ID NO: 1478697 - RNA, 19 nt, Human
uuuuaaacagugagccuga

SEQ ID NO: 1478698 - RNA, 18 nt, Human
uuuuaaacacauuaggaa

SEQ ID NO: 1478699 - RNA, 14 nt, Human
uuuuaaaauccacu

SEQ ID NO: 1478700 - RNA, 21 nt, Human
uuuguuaauuuagaaaacuuu

SEQ ID NO: 1478701 - RNA, 23 nt, Human
uuuguuaauuuagaaaacuuuaa

SEQ ID NO: 1478702 - RNA, 22 nt, Human
uuuguuaauuuagaaaacuuua

SEQ ID NO: 1478703 - RNA, 14 nt, Human
uuuguugcuguuuu

SEQ ID NO: 1478704 - RNA, 14 nt, Human
uuuguauuguauau

SEQ ID NO: 1478705 - RNA, 17 nt, Human
uuuguauuuuguuuaaa

SEQ ID NO: 1478706 - RNA, 21 nt, Human
uuugugucauguuuaagaaau

SEQ ID NO: 1478707 - RNA, 14 nt, Human
uuuguguguagucu

SEQ ID NO: 1478708 - RNA, 15 nt, Human
uuuggucaacacuaa

SEQ ID NO: 1478709 - RNA, 21 nt, Human
uuugguccuucaaaggcuugu

SEQ ID NO: 1478710 - RNA, 18 nt, Human
uuuguauaaaauaauuuu

SEQ ID NO: 1478711 - RNA, 19 nt, Human
uuuguauaaaauaauuuuu

SEQ ID NO: 1478712 - RNA, 17 nt, Human
uuuguauaaaauaauuu

SEQ ID NO: 1478713 - RNA, 11 nt, Human
uuuuuccaaca

SEQ ID NO: 1478714 - RNA, 16 nt, Human
uuuuucaugauaauga

SEQ ID NO: 1478715 - RNA, 18 nt, Human
uuuuucaugauuuugaaa

SEQ ID NO: 1478716 - RNA, 11 nt, Human
uuuuucaugau

SEQ ID NO: 1478717 - RNA, 13 nt, Human
uuuuuaaucuuua

SEQ ID NO: 1478718 - RNA, 16 nt, Human
uuuuuaauaaauuuca

SEQ ID NO: 1478719 - RNA, 14 nt, Human
uuuuuaauaauuua

SEQ ID NO: 1478720 - RNA, 18 nt, Human
uuuuuaauguauaguaaa

SEQ ID NO: 1478721 - RNA, 13 nt, Human
uuuuucacauuuu

SEQ ID NO: 1478722 - RNA, 23 nt, Human
uuuuuaaauguauacuauaguac

SEQ ID NO: 1478723 - RNA, 15 nt, Human
uuuuuaaauguauac

SEQ ID NO: 1478724 - RNA, 20 nt, Human
uuuuuaaauguaaagauauu

SEQ ID NO: 1478725 - RNA, 24 nt, Human
uuuugacaguguugaaaauguuca

SEQ ID NO: 1478726 - RNA, 15 nt, Human
uuuugacauaaaguu

SEQ ID NO: 1478727 - RNA, 19 nt, Human
uuuugacaguguugaaaau

SEQ ID NO: 1478728 - RNA, 23 nt, Human
uuuugacaguguugaaaauguuc

SEQ ID NO: 1478729 - RNA, 12 nt, Human
uuuuuuacauuu

SEQ ID NO: 1478730 - RNA, 11 nt, Human
uuuuuuacauu

SEQ ID NO: 1478731 - RNA, 15 nt, Human
uuuuuuaauaaauuu

SEQ ID NO: 1478732 - RNA, 12 nt, Human
uuuuuuaauuga

SEQ ID NO: 1478733 - RNA, 14 nt, Human
uuuuuccguaaaaa

SEQ ID NO: 1478734 - RNA, 15 nt, Human
uuuuuccguaaaaau

SEQ ID NO: 1478735 - RNA, 12 nt, Human
uuuuuuaacauu

SEQ ID NO: 1478736 - RNA, 12 nt, Human
uuuuuuuacauu

SEQ ID NO: 1478737 - RNA, 14 nt, Human
uuuuuuuguuauua

SEQ ID NO: 1478738 - RNA, 22 nt, Human
uuccugagucccaucccugcgu

SEQ ID NO: 1478739 - RNA, 21 nt, Human
uuccugcaggcaggaacaaac

SEQ ID NO: 1478740 - RNA, 19 nt, Human
uuccauggcaggaaggcuu

SEQ ID NO: 1478741 - RNA, 17 nt, Human
uuccauggcaggaaggc

SEQ ID NO: 1478742 - RNA, 22 nt, Human
uuccaugggaccacaacuauuu

SEQ ID NO: 1478743 - RNA, 13 nt, Human
uuccugaauccaa

SEQ ID NO: 1478744 - RNA, 18 nt, Human
uuccugaauccaaacuaa

SEQ ID NO: 1478745 - RNA, 13 nt, Human
uuccugacacuuu

SEQ ID NO: 1478746 - RNA, 22 nt, Human
uuccugacacuuuaauuaccaa

SEQ ID NO: 1478747 - RNA, 18 nt, Human
uucggugagcuacaaaug

SEQ ID NO: 1478748 - RNA, 16 nt, Human
uuccuugucacuggua

SEQ ID NO: 1478749 - RNA, 15 nt, Human
uuccugcuuuucccc

SEQ ID NO: 1478750 - RNA, 14 nt, Human
uucuauagcuuuuc

SEQ ID NO: 1478751 - RNA, 14 nt, Human
uucuauagccaaaa

SEQ ID NO: 1478752 - RNA, 15 nt, Human
uucuauagccaaaaa

SEQ ID NO: 1478753 - RNA, 17 nt, Human
uucuauagccaaaaaua

SEQ ID NO: 1478754 - RNA, 21 nt, Human
uucuauagccaaaaauagcua

SEQ ID NO: 1478755 - RNA, 23 nt, Human
uucuauagccaaaaauagcuaaa

SEQ ID NO: 1478756 - RNA, 16 nt, Human
uucuauaguuauuaag

SEQ ID NO: 1478757 - RNA, 13 nt, Human
uucuacugcucuc

SEQ ID NO: 1478758 - RNA, 19 nt, Human
uucuacuuugauaugacug

SEQ ID NO: 1478759 - RNA, 20 nt, Human
uucuacugcucuccuccacc

SEQ ID NO: 1478760 - RNA, 15 nt, Human
uucuaccauuucaga

SEQ ID NO: 1478761 - RNA, 18 nt, Human
uucuaccauuucagagag

SEQ ID NO: 1478762 - RNA, 13 nt, Human
uucguuaucuaau

SEQ ID NO: 1478763 - RNA, 17 nt, Human
uucuaauuggcaugaag

SEQ ID NO: 1478764 - RNA, 15 nt, Human
uucguagauauugga

SEQ ID NO: 1478765 - RNA, 19 nt, Human
uucgucuguuuauaaacau

SEQ ID NO: 1478766 - RNA, 19 nt, Human
uucuaccaaggucuucuua

SEQ ID NO: 1478767 - RNA, 14 nt, Human
uucuaccauuucag

SEQ ID NO: 1478768 - RNA, 15 nt, Human
uucuacauagaugcu

SEQ ID NO: 1478769 - RNA, 18 nt, Human
uucuacaaaauccugaug

SEQ ID NO: 1478770 - RNA, 16 nt, Human
uucugauaaugaaaau

SEQ ID NO: 1478771 - RNA, 16 nt, Human
uucugaguuuuaccaa

SEQ ID NO: 1478772 - RNA, 15 nt, Human
uucugaguuuuacca

SEQ ID NO: 1478773 - RNA, 12 nt, Human
uucugaguuccu

SEQ ID NO: 1478774 - RNA, 15 nt, Human
uucugaguuccugca

SEQ ID NO: 1478775 - RNA, 14 nt, Human
uucugaucaaggcc

SEQ ID NO: 1478776 - RNA, 15 nt, Human
uucugaucaaggccu

SEQ ID NO: 1478777 - RNA, 22 nt, Human
uucugaucaaggccuuauugga

SEQ ID NO: 1478778 - RNA, 21 nt, Human
uucugauucgaaugacacugu

SEQ ID NO: 1478779 - RNA, 14 nt, Human
uucugccuucucau

SEQ ID NO: 1478780 - RNA, 16 nt, Human
uucugccuucucauga

SEQ ID NO: 1478781 - RNA, 22 nt, Human
uucugccuuuggggacuuuucu

SEQ ID NO: 1478782 - RNA, 21 nt, Human
uucugcuacuuugcugcuaug

SEQ ID NO: 1478783 - RNA, 19 nt, Human
uucuccagccucagccucc

SEQ ID NO: 1478784 - RNA, 14 nt, Human
uucuaugaaauauu

SEQ ID NO: 1478785 - RNA, 21 nt, Human
uucuaugaaauauuauguuaa

SEQ ID NO: 1478786 - RNA, 17 nt, Human
uucucauuuuuuaaaaa

SEQ ID NO: 1478787 - RNA, 23 nt, Human
uucucauuuuuuaaaaaagcuua

SEQ ID NO: 1478788 - RNA, 22 nt, Human
uucucauuuuuuaaaaaagcuu

SEQ ID NO: 1478789 - RNA, 15 nt, Human
uugaaaagcagacau

SEQ ID NO: 1478790 - RNA, 17 nt, Human
uugaaaagcagacauuu

SEQ ID NO: 1478791 - RNA, 15 nt, Human
uugaaaaaugcaugu

SEQ ID NO: 1478792 - RNA, 13 nt, Human
uugaaaaagcgaa

SEQ ID NO: 1478793 - RNA, 18 nt, Human
uucuuuccacagaagcuc

SEQ ID NO: 1478794 - RNA, 15 nt, Human
uucuuuaaaauuaca

SEQ ID NO: 1478795 - RNA, 20 nt, Human
uucuuuaaaauguaaagcca

SEQ ID NO: 1478796 - RNA, 13 nt, Human
uucuuccaucuga

SEQ ID NO: 1478797 - RNA, 14 nt, Human
uucuuccaucugau

SEQ ID NO: 1478798 - RNA, 17 nt, Human
uucuggaauacaugaaa

SEQ ID NO: 1478799 - RNA, 19 nt, Human
uucuggaauacaugaaaua

SEQ ID NO: 1478800 - RNA, 19 nt, Human
uucuggacccguucaacuu

SEQ ID NO: 1478801 - RNA, 21 nt, Human
uucuggauuccccaucucagg

SEQ ID NO: 1478802 - RNA, 12 nt, Human
uugaauuuuaca

SEQ ID NO: 1478803 - RNA, 18 nt, Human
uugaauuuugaugaacaa

SEQ ID NO: 1478804 - RNA, 18 nt, Human
uugacaacuggcaggcag

SEQ ID NO: 1478805 - RNA, 19 nt, Human
uugaauuuuuuuuaacauu

SEQ ID NO: 1478806 - RNA, 22 nt, Human
uugaauuuuuuuuaacauuccu

SEQ ID NO: 1478807 - RNA, 13 nt, Human
uugaacugauuca

SEQ ID NO: 1478808 - RNA, 14 nt, Human
uugaugaagaaguu

SEQ ID NO: 1478809 - RNA, 23 nt, Human
uugaugaagaaguugauaugccu

SEQ ID NO: 1478810 - RNA, 15 nt, Human
uugcaccuuucuagu

SEQ ID NO: 1478811 - RNA, 20 nt, Human
uugauuuuagccuucucugu

SEQ ID NO: 1478812 - RNA, 16 nt, Human
uuauauuaugaagcuu

SEQ ID NO: 1478813 - RNA, 16 nt, Human
uuauauguaccguagg

SEQ ID NO: 1478814 - RNA, 14 nt, Human
uuauauguaccgua

SEQ ID NO: 1478815 - RNA, 14 nt, Human
uuauauggaaauuc

SEQ ID NO: 1478816 - RNA, 13 nt, Human
uuauauggaaauu

SEQ ID NO: 1478817 - RNA, 18 nt, Human
uuauauguuguaauauuu

SEQ ID NO: 1478818 - RNA, 13 nt, Human
uuauaugcuuacu

SEQ ID NO: 1478819 - RNA, 19 nt, Human
uuauaugcuuacugauaua

SEQ ID NO: 1478820 - RNA, 15 nt, Human
uuauaugaagaaaau

SEQ ID NO: 1478821 - RNA, 19 nt, Human
uuauaugaagaaaaucacu

SEQ ID NO: 1478822 - RNA, 16 nt, Human
uuauaauuuugugaag

SEQ ID NO: 1478823 - RNA, 17 nt, Human
uuauaauuuugugaagc

SEQ ID NO: 1478824 - RNA, 18 nt, Human
uuauaauuuugugaagca

SEQ ID NO: 1478825 - RNA, 19 nt, Human
uuauaucuauauuuuacau

SEQ ID NO: 1478826 - RNA, 23 nt, Human
uuauaucuauauuuuacauaaau

SEQ ID NO: 1478827 - RNA, 12 nt, Human
uuauaauuuuaa

SEQ ID NO: 1478828 - RNA, 12 nt, Human
uuauaauuuaaa

SEQ ID NO: 1478829 - RNA, 21 nt, Human
uuauaauuuuaaauguuuuuu

SEQ ID NO: 1478830 - RNA, 17 nt, Human
uuauaauuuuaaauguu

SEQ ID NO: 1478831 - RNA, 14 nt, Human
uuauaauuuuguga

SEQ ID NO: 1478832 - RNA, 15 nt, Human
uuauaauuuugugaa

SEQ ID NO: 1478833 - RNA, 11 nt, Human
uuauaaucuuu

SEQ ID NO: 1478834 - RNA, 21 nt, Human
uuauaauaaaggacuguaauc

SEQ ID NO: 1478835 - RNA, 19 nt, Human
uuauaauaaaggacuguaa

SEQ ID NO: 1478836 - RNA, 18 nt, Human
uuauaauaaaggacugua

SEQ ID NO: 1478837 - RNA, 18 nt, Human
uuauaaguagcaggccaa

SEQ ID NO: 1478838 - RNA, 16 nt, Human
uuaguggcucaacauu

SEQ ID NO: 1478839 - RNA, 20 nt, Human
uuaguggcucaacauugugu

SEQ ID NO: 1478840 - RNA, 23 nt, Human
uuaguggcucaacauuguguucc

SEQ ID NO: 1478841 - RNA, 20 nt, Human
uuauuaauauauauuaucuu

SEQ ID NO: 1478842 - RNA, 19 nt, Human
uuauuaauauauauuaucu

SEQ ID NO: 1478843 - RNA, 15 nt, Human
uuauuaauaaacauu

SEQ ID NO: 1478844 - RNA, 14 nt, Human
uuauuaauaaacau

SEQ ID NO: 1478845 - RNA, 14 nt, Human
uuauuacuuuugcu

SEQ ID NO: 1478846 - RNA, 16 nt, Human
uuauuaacaauuaggc

SEQ ID NO: 1478847 - RNA, 19 nt, Human
uuauuaacaauuaggcaga

SEQ ID NO: 1478848 - RNA, 18 nt, Human
uuaugauuuuuuuuucau

SEQ ID NO: 1478849 - RNA, 19 nt, Human
uuaugauuuuuuuuucaua

SEQ ID NO: 1478850 - RNA, 17 nt, Human
uuauguugcauagaaua

SEQ ID NO: 1478851 - RNA, 16 nt, Human
uuauauuuacaaaugg

SEQ ID NO: 1478852 - RNA, 17 nt, Human
uuauauugauaagaucu

SEQ ID NO: 1478853 - RNA, 20 nt, Human
uuauauuuauuacuguaaga

SEQ ID NO: 1478854 - RNA, 13 nt, Human
uuauauuuaacuc

SEQ ID NO: 1478855 - RNA, 12 nt, Human
uuauauuugaaa

SEQ ID NO: 1478856 - RNA, 13 nt, Human
uuauauuugaaau

SEQ ID NO: 1478857 - RNA, 15 nt, Human
uuauauuugaaauau

SEQ ID NO: 1478858 - RNA, 17 nt, Human
uuauccugaaauuucag

SEQ ID NO: 1478859 - RNA, 16 nt, Human
uuauccugaaauuuca

SEQ ID NO: 1478860 - RNA, 14 nt, Human
uuaucgaaacucau

SEQ ID NO: 1478861 - RNA, 14 nt, Human
uuaucuugaauaau

SEQ ID NO: 1478862 - RNA, 20 nt, Human
uuaucuucaggacacucacu

SEQ ID NO: 1478863 - RNA, 16 nt, Human
uuaucuugaauaaugu

SEQ ID NO: 1478864 - RNA, 16 nt, Human
uuaucuuaaaacuccu

SEQ ID NO: 1478865 - RNA, 18 nt, Human
uuaucuauagcuaaguac

SEQ ID NO: 1478866 - RNA, 19 nt, Human
uuaucuacuuccaaacuaa

SEQ ID NO: 1478867 - RNA, 20 nt, Human
uuaucuacuuccaaacuaau

SEQ ID NO: 1478868 - RNA, 18 nt, Human
uuaucuaaucaugaaacu

SEQ ID NO: 1478869 - RNA, 22 nt, Human
uuaucuaaucaugaaacucccu

SEQ ID NO: 1478870 - RNA, 11 nt, Human
uuaucuaauuu

SEQ ID NO: 1478871 - RNA, 16 nt, Human
uuaucuaauuuauaaa

SEQ ID NO: 1478872 - RNA, 17 nt, Human
uuaucuaauuuauaaaa

SEQ ID NO: 1478873 - RNA, 21 nt, Human
uuaucuaaguuaauuuaaagu

SEQ ID NO: 1478874 - RNA, 23 nt, Human
uucaaauuguaagcaugcacaaa

SEQ ID NO: 1478875 - RNA, 18 nt, Human
uucaaauguauuacagug

SEQ ID NO: 1478876 - RNA, 16 nt, Human
uucaaauucuucugaa

SEQ ID NO: 1478877 - RNA, 19 nt, Human
uucaaauucuucugaacuc

SEQ ID NO: 1478878 - RNA, 16 nt, Human
uucaacagugaagaca

SEQ ID NO: 1478879 - RNA, 18 nt, Human
uucaacagugaagacaga

SEQ ID NO: 1478880 - RNA, 19 nt, Human
uucaacagugaagacagaa

SEQ ID NO: 1478881 - RNA, 17 nt, Human
uucaacauguuauuugu

SEQ ID NO: 1478882 - RNA, 21 nt, Human
uucaacauguuauuuguaaua

SEQ ID NO: 1478883 - RNA, 18 nt, Human
uuauuuucaagaaacuga

SEQ ID NO: 1478884 - RNA, 13 nt, Human
uuauuuucaagaa

SEQ ID NO: 1478885 - RNA, 22 nt, Human
uuauuuugccaagggcauaaau

SEQ ID NO: 1478886 - RNA, 22 nt, Human
uuauuuugugaugcaaauaaau

SEQ ID NO: 1478887 - RNA, 19 nt, Human
uuauuuuaauaauguuuca

SEQ ID NO: 1478888 - RNA, 19 nt, Human
uuauuuguugagaguguga

SEQ ID NO: 1478889 - RNA, 12 nt, Human
uuauuuguugag

SEQ ID NO: 1478890 - RNA, 14 nt, Human
uuauuuguugagag

SEQ ID NO: 1478891 - RNA, 20 nt, Human
uuauuuuaauaauguuucaa

SEQ ID NO: 1478892 - RNA, 13 nt, Human
uuauuugcaugug

SEQ ID NO: 1478893 - RNA, 12 nt, Human
uuauuuguaaua

SEQ ID NO: 1478894 - RNA, 16 nt, Human
uuauuuguaauagaug

SEQ ID NO: 1478895 - RNA, 17 nt, Human
uuauuuguaauagaugu

SEQ ID NO: 1478896 - RNA, 18 nt, Human
uuauuuguaauagauguu

SEQ ID NO: 1478897 - RNA, 18 nt, Human
uucaauauaagcuuuucu

SEQ ID NO: 1478898 - RNA, 19 nt, Human
uucaauauaagcuuuucuu

SEQ ID NO: 1478899 - RNA, 22 nt, Human
uucacaacagccugacaacauu

SEQ ID NO: 1478900 - RNA, 16 nt, Human
uucaugcauggaaauu

SEQ ID NO: 1478901 - RNA, 15 nt, Human
uucaugcauggaaau

SEQ ID NO: 1478902 - RNA, 21 nt, Human
uucaugccaauuagcaauuga

SEQ ID NO: 1478903 - RNA, 14 nt, Human
uucaugcauggaaa

SEQ ID NO: 1478904 - RNA, 17 nt, Human
uucaucuggaaccauca

SEQ ID NO: 1478905 - RNA, 19 nt, Human
uucaucuggcaacaucuuu

SEQ ID NO: 1478906 - RNA, 23 nt, Human
uucaucuggaaccaucagaaaca

SEQ ID NO: 1478907 - RNA, 12 nt, Human
uucaucuggaac

SEQ ID NO: 1478908 - RNA, 20 nt, Human
uucaugcuguucaugaaaga

SEQ ID NO: 1478909 - RNA, 17 nt, Human
uucaugcuaucucugug

SEQ ID NO: 1478910 - RNA, 18 nt, Human
uucaugcuaucucugugu

SEQ ID NO: 1478911 - RNA, 20 nt, Human
uuccaacaagaagggacuga

SEQ ID NO: 1478912 - RNA, 18 nt, Human
uuccagauccuggaaauc

SEQ ID NO: 1478913 - RNA, 19 nt, Human
uuccagaggcuauuauuuu

SEQ ID NO: 1478914 - RNA, 20 nt, Human
uuccagaggcuauuauuuuc

SEQ ID NO: 1478915 - RNA, 18 nt, Human
uuccagagcacugcucca

SEQ ID NO: 1478916 - RNA, 16 nt, Human
uuccagaccugaagaa

SEQ ID NO: 1478917 - RNA, 17 nt, Human
uuccagaccugaagaau

SEQ ID NO: 1478918 - RNA, 23 nt, Human
uuccagacugcuuccaauuuucu

SEQ ID NO: 1478919 - RNA, 14 nt, Human
uuccagaccugaag

SEQ ID NO: 1478920 - RNA, 19 nt, Human
uuccagauccuggaaauca

SEQ ID NO: 1478921 - RNA, 18 nt, Human
uuccaugcguguuucuga

SEQ ID NO: 1478922 - RNA, 21 nt, Human
uuccaugcguguuucugacuc

SEQ ID NO: 1478923 - RNA, 20 nt, Human
uucauaaauaaaguuuguug

SEQ ID NO: 1478924 - RNA, 16 nt, Human
uucaguuuugauauuu

SEQ ID NO: 1478925 - RNA, 23 nt, Human
uucaguuauuauauuuacaaaug

SEQ ID NO: 1478926 - RNA, 20 nt, Human
uucaguguauggaaauaaau

SEQ ID NO: 1478927 - RNA, 22 nt, Human
uucagcuucguuuauuuucaag

SEQ ID NO: 1478928 - RNA, 14 nt, Human
uuucacaaggucuu

SEQ ID NO: 1478929 - RNA, 23 nt, Human
uuucacaacagccugacaacauu

SEQ ID NO: 1478930 - RNA, 22 nt, Human
uuucaaguuccaaguugcuaau

SEQ ID NO: 1478931 - RNA, 11 nt, Human
uuucagaugug

SEQ ID NO: 1478932 - RNA, 18 nt, Human
uuucagaugugaaccauu

SEQ ID NO: 1478933 - RNA, 20 nt, Human
uuucagauucccagagcaaa

SEQ ID NO: 1478934 - RNA, 16 nt, Human
uuucauugucugugaa

SEQ ID NO: 1478935 - RNA, 15 nt, Human
uuucauugucuguga

SEQ ID NO: 1478936 - RNA, 14 nt, Human
uuucauugucugug

SEQ ID NO: 1478937 - RNA, 19 nt, Human
uuuccaaccggcuuugugg

SEQ ID NO: 1478938 - RNA, 22 nt, Human
uuuauaauuuugugaagcaaaa

SEQ ID NO: 1478939 - RNA, 22 nt, Human
uuuauuuaaaaaacuaaaaacu

SEQ ID NO: 1478940 - RNA, 17 nt, Human
uuuauuaugcauuauau

SEQ ID NO: 1478941 - RNA, 16 nt, Human
uuuauuaugcauuaua

SEQ ID NO: 1478942 - RNA, 19 nt, Human
uuucaagaaacugaggaau

SEQ ID NO: 1478943 - RNA, 17 nt, Human
uuucaagaaacugagga

SEQ ID NO: 1478944 - RNA, 23 nt, Human
uuucaagaauaaucacgcuuucc

SEQ ID NO: 1478945 - RNA, 13 nt, Human
uuuaccacuugug

SEQ ID NO: 1478946 - RNA, 12 nt, Human
uuuaccaaguuu

SEQ ID NO: 1478947 - RNA, 13 nt, Human
uuuacagaauuuu

SEQ ID NO: 1478948 - RNA, 11 nt, Human
uuuaauaauuu

SEQ ID NO: 1478949 - RNA, 14 nt, Human
uuuaauaauguuuc

SEQ ID NO: 1478950 - RNA, 21 nt, Human
uuuaauagguuuggacaaaau

SEQ ID NO: 1478951 - RNA, 18 nt, Human
uuuaauagcaaagaauug

SEQ ID NO: 1478952 - RNA, 18 nt, Human
uuuacacaauagaauuau

SEQ ID NO: 1478953 - RNA, 17 nt, Human
uuuaauagcaaagaauu

SEQ ID NO: 1478954 - RNA, 19 nt, Human
uuuacacaauagaauuaua

SEQ ID NO: 1478955 - RNA, 23 nt, Human
uuuauaaaaauaaaaaacacugg

SEQ ID NO: 1478956 - RNA, 21 nt, Human
uuuauaaaaauaaaaaacacu

SEQ ID NO: 1478957 - RNA, 17 nt, Human
uuuacuuguuucagagu

SEQ ID NO: 1478958 - RNA, 15 nt, Human
uuuacuuguuucaga

SEQ ID NO: 1478959 - RNA, 13 nt, Human
uuuagaaaucauu

SEQ ID NO: 1478960 - RNA, 16 nt, Human
uuuagaaaucauuuug

SEQ ID NO: 1478961 - RNA, 18 nt, Human
uuuaaauuuuuuuccuua

SEQ ID NO: 1478962 - RNA, 19 nt, Human
uuuaacucuauaauguguu

SEQ ID NO: 1478963 - RNA, 23 nt, Human
uuuaacugacuauucuugaugua

SEQ ID NO: 1478964 - RNA, 11 nt, Human
uuuaacugacu

SEQ ID NO: 1478965 - RNA, 20 nt, Human
uuuaagacgaaacauuuguu

SEQ ID NO: 1478966 - RNA, 14 nt, Human
uuuaauaaauuuau

SEQ ID NO: 1478967 - RNA, 13 nt, Human
uuuaauaauguuu

SEQ ID NO: 1478968 - RNA, 14 nt, Human
uuuaacuuaaauag

SEQ ID NO: 1478969 - RNA, 13 nt, Human
uuuaacuuaaaua

SEQ ID NO: 1478970 - RNA, 20 nt, Human
uuguguugaagagguuuuaa

SEQ ID NO: 1478971 - RNA, 16 nt, Human
uuguggcaagugaauu

SEQ ID NO: 1478972 - RNA, 22 nt, Human
uuguggcaagugaauuugccug

SEQ ID NO: 1478973 - RNA, 20 nt, Human
uuguguucccauuucagcug

SEQ ID NO: 1478974 - RNA, 18 nt, Human
uuguggcaagugaauuug

SEQ ID NO: 1478975 - RNA, 21 nt, Human
uuguggaauugggagcuuggg

SEQ ID NO: 1478976 - RNA, 22 nt, Human
uugugcccccaaccauuuccuc

SEQ ID NO: 1478977 - RNA, 21 nt, Human
uugugccaugucaaacaaaua

SEQ ID NO: 1478978 - RNA, 17 nt, Human
uugugcaauguaaauau

SEQ ID NO: 1478979 - RNA, 18 nt, Human
uugugcaauguaaauauu

SEQ ID NO: 1478980 - RNA, 22 nt, Human
uugugcaauguaaauauuuuaa

SEQ ID NO: 1478981 - RNA, 23 nt, Human
uugugcaauguaaauauuuuaaa

SEQ ID NO: 1478982 - RNA, 11 nt, Human
uugugcagaga

SEQ ID NO: 1478983 - RNA, 14 nt, Human
uugugcauucugga

SEQ ID NO: 1478984 - RNA, 18 nt, Human
uuguuaaucuucaauagu

SEQ ID NO: 1478985 - RNA, 18 nt, Human
uuguguuuugcaagccag

SEQ ID NO: 1478986 - RNA, 19 nt, Human
uuguuaauuuagaaaacuu

SEQ ID NO: 1478987 - RNA, 20 nt, Human
uuguuaauuuagaaaacuuu

SEQ ID NO: 1478988 - RNA, 22 nt, Human
uuguuaauuuagaaaacuuuaa

SEQ ID NO: 1478989 - RNA, 21 nt, Human
uuguuaauuuagaaaacuuua

SEQ ID NO: 1478990 - RNA, 18 nt, Human
uuguuauguagauaacaa

SEQ ID NO: 1478991 - RNA, 14 nt, Human
uuguugugcuuuua

SEQ ID NO: 1478992 - RNA, 13 nt, Human
uuguugugcuuuu

SEQ ID NO: 1478993 - RNA, 13 nt, Human
uuguuauauaauc

SEQ ID NO: 1478994 - RNA, 16 nt, Human
uuguuauauaaucauu

SEQ ID NO: 1478995 - RNA, 22 nt, Human
uuguuaguuucugaguuuuacc

SEQ ID NO: 1478996 - RNA, 15 nt, Human
uuguuuaaaaaguaa

SEQ ID NO: 1478997 - RNA, 14 nt, Human
uuguuucuacuuug

SEQ ID NO: 1478998 - RNA, 23 nt, Human
uuguuucuacuuugauaugacug

SEQ ID NO: 1478999 - RNA, 16 nt, Human
uuguacuauuuaacug

SEQ ID NO: 1479000 - RNA, 19 nt, Human
uuguacuauuuaacugacu

SEQ ID NO: 1479001 - RNA, 22 nt, Human
uuguacuauuuaacugacuauu

SEQ ID NO: 1479002 - RNA, 23 nt, Human
uuguacuaaagccaaacauauau

SEQ ID NO: 1479003 - RNA, 16 nt, Human
uuguacuaaagccaaa

SEQ ID NO: 1479004 - RNA, 13 nt, Human
uuguacuauuuaa

SEQ ID NO: 1479005 - RNA, 16 nt, Human
uuguacauaguuauuu

SEQ ID NO: 1479006 - RNA, 14 nt, Human
uuguauuacaaauc

SEQ ID NO: 1479007 - RNA, 13 nt, Human
uugugaaauuauu

SEQ ID NO: 1479008 - RNA, 20 nt, Human
uugucuuuguucuucuacca

SEQ ID NO: 1479009 - RNA, 19 nt, Human
uugucuuuuuagaugccca

SEQ ID NO: 1479010 - RNA, 13 nt, Human
uugucuuuuuaga

SEQ ID NO: 1479011 - RNA, 13 nt, Human
uugucucagagca

SEQ ID NO: 1479012 - RNA, 15 nt, Human
uugucuagugaaacu

SEQ ID NO: 1479013 - RNA, 15 nt, Human
uugcacuaucuuuca

SEQ ID NO: 1479014 - RNA, 13 nt, Human
uuguaaaacaggu

SEQ ID NO: 1479015 - RNA, 15 nt, Human
uuguaaaacagguag

SEQ ID NO: 1479016 - RNA, 14 nt, Human
uuguaaaacaggua

SEQ ID NO: 1479017 - RNA, 16 nt, Human
uuguaaauuauuaauu

SEQ ID NO: 1479018 - RNA, 23 nt, Human
uuguaaauuauuaauuuaugcag

SEQ ID NO: 1479019 - RNA, 11 nt, Human
uguaauacaau

SEQ ID NO: 1479020 - RNA, 17 nt, Human
uguaaugaaaaccacau

SEQ ID NO: 1479021 - RNA, 13 nt, Human
uguaaugaaaacc

SEQ ID NO: 1479022 - RNA, 12 nt, Human
uguaaugaaaac

SEQ ID NO: 1479023 - RNA, 11 nt, Human
uguaaugaaaa

SEQ ID NO: 1479024 - RNA, 18 nt, Human
uguaaauuuguacuauuu

SEQ ID NO: 1479025 - RNA, 14 nt, Human
uguaaauuuguacu

SEQ ID NO: 1479026 - RNA, 14 nt, Human
uguaacaagccaga

SEQ ID NO: 1479027 - RNA, 18 nt, Human
uguaacaagccagauuuu

SEQ ID NO: 1479028 - RNA, 13 nt, Human
uguaaauuuguac

SEQ ID NO: 1479029 - RNA, 23 nt, Human
uguaaacucaaaauauuuguaca

SEQ ID NO: 1479030 - RNA, 13 nt, Human
uguaaacugugua

SEQ ID NO: 1479031 - RNA, 14 nt, Human
uguaaacuguguau

SEQ ID NO: 1479032 - RNA, 18 nt, Human
uguaaacuguguauucca

SEQ ID NO: 1479033 - RNA, 20 nt, Human
ugguuguacauauaagugau

SEQ ID NO: 1479034 - RNA, 14 nt, Human
ugguugaugccaaa

SEQ ID NO: 1479035 - RNA, 18 nt, Human
ugguugaugccaaaaaaa

SEQ ID NO: 1479036 - RNA, 19 nt, Human
uguaaaccugagucguaca

SEQ ID NO: 1479037 - RNA, 15 nt, Human
uguaaacucaaaaua

SEQ ID NO: 1479038 - RNA, 20 nt, Human
uguaaacucaaaauauuugu

SEQ ID NO: 1479039 - RNA, 22 nt, Human
uguaaaaucuugucauguguau

SEQ ID NO: 1479040 - RNA, 12 nt, Human
uguaaaaucuug

SEQ ID NO: 1479041 - RNA, 15 nt, Human
uguaaaaucuuguca

SEQ ID NO: 1479042 - RNA, 16 nt, Human
uguaaaaucuugucau

SEQ ID NO: 1479043 - RNA, 18 nt, Human
uguaaaaucuugucaugu

SEQ ID NO: 1479044 - RNA, 19 nt, Human
uguaaaaucuugucaugug

SEQ ID NO: 1479045 - RNA, 20 nt, Human
uguaaaaucuugucaugugu

SEQ ID NO: 1479046 - RNA, 12 nt, Human
uguaaaacaggu

SEQ ID NO: 1479047 - RNA, 13 nt, Human
uguaaaacaggua

SEQ ID NO: 1479048 - RNA, 14 nt, Human
uguaaaacagguag

SEQ ID NO: 1479049 - RNA, 22 nt, Human
uguaaaacagguagaauuaucu

SEQ ID NO: 1479050 - RNA, 19 nt, Human
uguaaaacauuuauuuuga

SEQ ID NO: 1479051 - RNA, 16 nt, Human
ugguucccuugaugaa

SEQ ID NO: 1479052 - RNA, 17 nt, Human
ugguucccuugaugaag

SEQ ID NO: 1479053 - RNA, 20 nt, Human
ugguucccuugaugaagaag

SEQ ID NO: 1479054 - RNA, 22 nt, Human
ugguucuugaggggaccaggag

SEQ ID NO: 1479055 - RNA, 16 nt, Human
ugguugaaaauaaaaa

SEQ ID NO: 1479056 - RNA, 15 nt, Human
ugguucuugagggga

SEQ ID NO: 1479057 - RNA, 21 nt, Human
ugguucuugaggggaccagga

SEQ ID NO: 1479058 - RNA, 23 nt, Human
ugguucuugaggggaccaggagu

SEQ ID NO: 1479059 - RNA, 14 nt, Human
uggugguagagaag

SEQ ID NO: 1479060 - RNA, 14 nt, Human
ugguggucccuggg

SEQ ID NO: 1479061 - RNA, 15 nt, Human
ugguggucccugggu

SEQ ID NO: 1479062 - RNA, 14 nt, Human
uggguagacacaca

SEQ ID NO: 1479063 - RNA, 21 nt, Human
uggguagaaagagauacagag

SEQ ID NO: 1479064 - RNA, 17 nt, Human
ugucuacacuaagagag

SEQ ID NO: 1479065 - RNA, 23 nt, Human
ugucuacacagauguucacccaa

SEQ ID NO: 1479066 - RNA, 22 nt, Human
ugucuacacuaagagagaauga

SEQ ID NO: 1479067 - RNA, 18 nt, Human
uguccugcaccggggccu

SEQ ID NO: 1479068 - RNA, 13 nt, Human
uguccucagcccc

SEQ ID NO: 1479069 - RNA, 16 nt, Human
ugucugucugucuguc

SEQ ID NO: 1479070 - RNA, 15 nt, Human
ugucugucugucugu

SEQ ID NO: 1479071 - RNA, 19 nt, Human
ugucugugaagugagaccu

SEQ ID NO: 1479072 - RNA, 18 nt, Human
ugucugugaagugagacc

SEQ ID NO: 1479073 - RNA, 15 nt, Human
ugucugucuguccca

SEQ ID NO: 1479074 - RNA, 14 nt, Human
ugucugucuguccc

SEQ ID NO: 1479075 - RNA, 15 nt, Human
ugucuguggauuuuu

SEQ ID NO: 1479076 - RNA, 13 nt, Human
ugucuguucuaca

SEQ ID NO: 1479077 - RNA, 20 nt, Human
ugucugagacagaaucucag

SEQ ID NO: 1479078 - RNA, 21 nt, Human
ugucugaucguucaaagcaug

SEQ ID NO: 1479079 - RNA, 15 nt, Human
ugucuguucuacaua

SEQ ID NO: 1479080 - RNA, 21 nt, Human
ugucuguucuacauagaugcu

SEQ ID NO: 1479081 - RNA, 20 nt, Human
ugucuauggauuugccuucu

SEQ ID NO: 1479082 - RNA, 18 nt, Human
ugucuauuaccuguuagu

SEQ ID NO: 1479083 - RNA, 13 nt, Human
ugucuauucagcu

SEQ ID NO: 1479084 - RNA, 14 nt, Human
ugucuauucagcuu

SEQ ID NO: 1479085 - RNA, 20 nt, Human
ugucuauuuuuaauguuugu

SEQ ID NO: 1479086 - RNA, 18 nt, Human
uguauuuuaaaagaauga

SEQ ID NO: 1479087 - RNA, 19 nt, Human
uguauuuuaaaagaaugau

SEQ ID NO: 1479088 - RNA, 18 nt, Human
uguauggaaauaaaugua

SEQ ID NO: 1479089 - RNA, 23 nt, Human
uguauggaaauaaauguaucaua

SEQ ID NO: 1479090 - RNA, 23 nt, Human
ugucacugguagaccaaaauaaa

SEQ ID NO: 1479091 - RNA, 21 nt, Human
ugucacugguagaccaaaaua

SEQ ID NO: 1479092 - RNA, 20 nt, Human
uguaguguuggagaagaacu

SEQ ID NO: 1479093 - RNA, 21 nt, Human
uguaguguuggagaagaacug

SEQ ID NO: 1479094 - RNA, 14 nt, Human
uguauaaaauaauu

SEQ ID NO: 1479095 - RNA, 13 nt, Human
uguauaaaauaau

SEQ ID NO: 1479096 - RNA, 22 nt, Human
uguaguguuggagaagaacuga

SEQ ID NO: 1479097 - RNA, 12 nt, Human
uguagcuuugcu

SEQ ID NO: 1479098 - RNA, 13 nt, Human
uguagcuuugcuc

SEQ ID NO: 1479099 - RNA, 15 nt, Human
uguagcuuugcucuu

SEQ ID NO: 1479100 - RNA, 15 nt, Human
uguauaguaaaucac

SEQ ID NO: 1479101 - RNA, 19 nt, Human
uguaucuaugcauuuucug

SEQ ID NO: 1479102 - RNA, 18 nt, Human
ugggaggagggcaggcau

SEQ ID NO: 1479103 - RNA, 14 nt, Human
ugggaggagggcag

SEQ ID NO: 1479104 - RNA, 17 nt, Human
ugggaggagggcaggca

SEQ ID NO: 1479105 - RNA, 21 nt, Human
ugggcagcaauuuaaauguua

SEQ ID NO: 1479106 - RNA, 13 nt, Human
ugggcagccagac

SEQ ID NO: 1479107 - RNA, 12 nt, Human
ugggcagccaga

SEQ ID NO: 1479108 - RNA, 21 nt, Human
ugggcagccagaccagcaggc

SEQ ID NO: 1479109 - RNA, 19 nt, Human
ugggcagcaauuuaaaugu

SEQ ID NO: 1479110 - RNA, 18 nt, Human
ugggcagcaauuuaaaug

SEQ ID NO: 1479111 - RNA, 17 nt, Human
ugggcagcaauuuaaau

SEQ ID NO: 1479112 - RNA, 13 nt, Human
uggggggggugcu

SEQ ID NO: 1479113 - RNA, 20 nt, Human
uggggccaggcugggucgcc

SEQ ID NO: 1479114 - RNA, 17 nt, Human
uggggccaggcuggguc

SEQ ID NO: 1479115 - RNA, 14 nt, Human
ugggaaugaagcaa

SEQ ID NO: 1479116 - RNA, 16 nt, Human
uggcuugggcagcauc

SEQ ID NO: 1479117 - RNA, 19 nt, Human
uggccccucccccugccag

SEQ ID NO: 1479118 - RNA, 14 nt, Human
uggccccugaacaa

SEQ ID NO: 1479119 - RNA, 20 nt, Human
uggccccugaacaagaauug

SEQ ID NO: 1479120 - RNA, 23 nt, Human
uggccuaaccugccgagagucca

SEQ ID NO: 1479121 - RNA, 17 nt, Human
ugcuuuggaaaacccag

SEQ ID NO: 1479122 - RNA, 14 nt, Human
ugcuuucugaucaa

SEQ ID NO: 1479123 - RNA, 17 nt, Human
ugcuuugauauuucaau

SEQ ID NO: 1479124 - RNA, 13 nt, Human
ugcuuugauauuu

SEQ ID NO: 1479125 - RNA, 22 nt, Human
ugcuucuguuuuauaauuuugu

SEQ ID NO: 1479126 - RNA, 13 nt, Human
uggaacuugaacu

SEQ ID NO: 1479127 - RNA, 15 nt, Human
uggaacuugaacuga

SEQ ID NO: 1479128 - RNA, 16 nt, Human
uggaacuugaacugau

SEQ ID NO: 1479129 - RNA, 20 nt, Human
uggaacauaaaaaggacauc

SEQ ID NO: 1479130 - RNA, 18 nt, Human
uggaacauaaaaaggaca

SEQ ID NO: 1479131 - RNA, 22 nt, Human
uggaaaaguauguuagugcaaa

SEQ ID NO: 1479132 - RNA, 16 nt, Human
uggaaaccuuccaccc

SEQ ID NO: 1479133 - RNA, 19 nt, Human
uggaaaccuuccacccagu

SEQ ID NO: 1479134 - RNA, 13 nt, Human
ugcuucuccagcc

SEQ ID NO: 1479135 - RNA, 17 nt, Human
ugcuucuguuuuauaau

SEQ ID NO: 1479136 - RNA, 22 nt, Human
ugcuucucagauuucugaggaa

SEQ ID NO: 1479137 - RNA, 21 nt, Human
ugcuucucagauuucugagga

SEQ ID NO: 1479138 - RNA, 16 nt, Human
ugcuucccuuuccuga

SEQ ID NO: 1479139 - RNA, 20 nt, Human
ugcuuaauucaaauaauaau

SEQ ID NO: 1479140 - RNA, 18 nt, Human
ugcuuaauucaaauaaua

SEQ ID NO: 1479141 - RNA, 17 nt, Human
ugcuuaauucaaauaau

SEQ ID NO: 1479142 - RNA, 16 nt, Human
ugcuuaauucaaauaa

SEQ ID NO: 1479143 - RNA, 15 nt, Human
ugcuuaauaaauugu

SEQ ID NO: 1479144 - RNA, 18 nt, Human
ugcuguuuugauuuguac

SEQ ID NO: 1479145 - RNA, 19 nt, Human
uggaucaaauccagccugc

SEQ ID NO: 1479146 - RNA, 17 nt, Human
uggauauaguuuuacuu

SEQ ID NO: 1479147 - RNA, 16 nt, Human
uggauauguaaaacau

SEQ ID NO: 1479148 - RNA, 21 nt, Human
uggauauguaaaacauuuauu

SEQ ID NO: 1479149 - RNA, 17 nt, Human
uggauauguaaaacauu

SEQ ID NO: 1479150 - RNA, 17 nt, Human
uggagaugaggccagac

SEQ ID NO: 1479151 - RNA, 16 nt, Human
uggagaugaggccaga

SEQ ID NO: 1479152 - RNA, 15 nt, Human
uggagaugaggccag

SEQ ID NO: 1479153 - RNA, 14 nt, Human
uggagaugaggcca

SEQ ID NO: 1479154 - RNA, 23 nt, Human
uggagaucaccaguguguggcuu

SEQ ID NO: 1479155 - RNA, 21 nt, Human
uggaggggcagagccaggaag

SEQ ID NO: 1479156 - RNA, 18 nt, Human
uggaggggcagagccagg

SEQ ID NO: 1479157 - RNA, 16 nt, Human
uggaggggcagagcca

SEQ ID NO: 1479158 - RNA, 14 nt, Human
uggaggggcagagc

SEQ ID NO: 1479159 - RNA, 13 nt, Human
uggaggggcagag

SEQ ID NO: 1479160 - RNA, 23 nt, Human
uggaggggcagagccaggaagau

SEQ ID NO: 1479161 - RNA, 16 nt, Human
uggaggggcuggggac

SEQ ID NO: 1479162 - RNA, 16 nt, Human
uggcaaccagaccauu

SEQ ID NO: 1479163 - RNA, 15 nt, Human
uggacugucauagaa

SEQ ID NO: 1479164 - RNA, 21 nt, Human
uggacugucauagaaauuaca

SEQ ID NO: 1479165 - RNA, 14 nt, Human
uggacugguuuuca

SEQ ID NO: 1479166 - RNA, 13 nt, Human
ugauguacaugua

SEQ ID NO: 1479167 - RNA, 21 nt, Human
ugauguaaaaucuugucaugu

SEQ ID NO: 1479168 - RNA, 11 nt, Human
ugauguaaaau

SEQ ID NO: 1479169 - RNA, 15 nt, Human
ugauguaaaaucuug

SEQ ID NO: 1479170 - RNA, 16 nt, Human
ugauguaaaaucuugu

SEQ ID NO: 1479171 - RNA, 19 nt, Human
ugauguaaaaucuugucau

SEQ ID NO: 1479172 - RNA, 23 nt, Human
ugauguaaaaucuugucaugugu

SEQ ID NO: 1479173 - RNA, 20 nt, Human
ugaucugauaggguuuguga

SEQ ID NO: 1479174 - RNA, 22 nt, Human
ugaucugauaggguuugugaca

SEQ ID NO: 1479175 - RNA, 12 nt, Human
ugaugaaaauaa

SEQ ID NO: 1479176 - RNA, 13 nt, Human
ugaugaaaauaaa

SEQ ID NO: 1479177 - RNA, 14 nt, Human
ugaugccaaaaaaa

SEQ ID NO: 1479178 - RNA, 18 nt, Human
ugaugccaaaaaaaaaua

SEQ ID NO: 1479179 - RNA, 21 nt, Human
ugaugccaaaaaaaaauacau

SEQ ID NO: 1479180 - RNA, 15 nt, Human
ugaugaaaauaaaga

SEQ ID NO: 1479181 - RNA, 16 nt, Human
ugaugaaaauaaagaa

SEQ ID NO: 1479182 - RNA, 17 nt, Human
ugaugaaaauaaagaau

SEQ ID NO: 1479183 - RNA, 19 nt, Human
ugaugaaaauaaagaaugg

SEQ ID NO: 1479184 - RNA, 23 nt, Human
ugauauaaguguguguuuuucau

SEQ ID NO: 1479185 - RNA, 17 nt, Human
ugauauaaguguguguu

SEQ ID NO: 1479186 - RNA, 13 nt, Human
ugauauauuuuac

SEQ ID NO: 1479187 - RNA, 14 nt, Human
ugauauauuuuaca

SEQ ID NO: 1479188 - RNA, 15 nt, Human
ugauauauuuuacaa

SEQ ID NO: 1479189 - RNA, 18 nt, Human
ugaucucagcucacugca

SEQ ID NO: 1479190 - RNA, 19 nt, Human
ugaucucagcucacugcaa

SEQ ID NO: 1479191 - RNA, 21 nt, Human
ugaucaguuuuuucaccugga

SEQ ID NO: 1479192 - RNA, 14 nt, Human
ugaggcuuuccaug

SEQ ID NO: 1479193 - RNA, 17 nt, Human
ugagggaaaagaaaaag

SEQ ID NO: 1479194 - RNA, 19 nt, Human
ugaggcuuuccaugggacc

SEQ ID NO: 1479195 - RNA, 19 nt, Human
ugaggagacacaccugagg

SEQ ID NO: 1479196 - RNA, 15 nt, Human
ugaggagacacaccu

SEQ ID NO: 1479197 - RNA, 19 nt, Human
ugauaggguuugugacagg

SEQ ID NO: 1479198 - RNA, 18 nt, Human
ugauaaagauuuuuuaau

SEQ ID NO: 1479199 - RNA, 19 nt, Human
ugauaaagauuuuuuaaua

SEQ ID NO: 1479200 - RNA, 20 nt, Human
ugauaaagauuuuuuaauaa

SEQ ID NO: 1479201 - RNA, 17 nt, Human
ugagcagucaggaaaga

SEQ ID NO: 1479202 - RNA, 20 nt, Human
ugagcagucaggaaagagaa

SEQ ID NO: 1479203 - RNA, 12 nt, Human
ugagcucucugu

SEQ ID NO: 1479204 - RNA, 12 nt, Human
ugagcucuucau

SEQ ID NO: 1479205 - RNA, 15 nt, Human
ugagcucuucauguu

SEQ ID NO: 1479206 - RNA, 16 nt, Human
ugagcucuucauguuu

SEQ ID NO: 1479207 - RNA, 18 nt, Human
ugagcucuucauguuuca

SEQ ID NO: 1479208 - RNA, 18 nt, Human
ugagaccuaaucucugua

SEQ ID NO: 1479209 - RNA, 19 nt, Human
ugagaccuaaucucuguaa

SEQ ID NO: 1479210 - RNA, 20 nt, Human
ugagaccuaaucucuguaaa

SEQ ID NO: 1479211 - RNA, 17 nt, Human
ugagaaaucuaaaaaac

SEQ ID NO: 1479212 - RNA, 13 nt, Human
ugagaaauuuaaa

SEQ ID NO: 1479213 - RNA, 14 nt, Human
ugagaaauuuaaac

SEQ ID NO: 1479214 - RNA, 15 nt, Human
ugagaaauuuaaacu

SEQ ID NO: 1479215 - RNA, 17 nt, Human
ugagaaauuuaaacuau

SEQ ID NO: 1479216 - RNA, 14 nt, Human
ugacugccaagacu

SEQ ID NO: 1479217 - RNA, 21 nt, Human
ugacugccaagacugcugugg

SEQ ID NO: 1479218 - RNA, 22 nt, Human
ugacugccaagacugcuguggc

SEQ ID NO: 1479219 - RNA, 17 nt, Human
ugacugccaagccaugg

SEQ ID NO: 1479220 - RNA, 16 nt, Human
ugacugccaagccaug

SEQ ID NO: 1479221 - RNA, 14 nt, Human
ugacugccaagcca

SEQ ID NO: 1479222 - RNA, 13 nt, Human
ugacugccaagcc

SEQ ID NO: 1479223 - RNA, 13 nt, Human
ugacucuuaagaa

SEQ ID NO: 1479224 - RNA, 12 nt, Human
ugacucuuaaga

SEQ ID NO: 1479225 - RNA, 14 nt, Human
ugacgucugggugg

SEQ ID NO: 1479226 - RNA, 15 nt, Human
ugacgucuggguggc

SEQ ID NO: 1479227 - RNA, 18 nt, Human
ugacgucuggguggcccu

SEQ ID NO: 1479228 - RNA, 16 nt, Human
ucuugaauaauguaag

SEQ ID NO: 1479229 - RNA, 20 nt, Human
ugaccucaagugaucugccc

SEQ ID NO: 1479230 - RNA, 17 nt, Human
ugaccuaguuuuccaug

SEQ ID NO: 1479231 - RNA, 22 nt, Human
ugaccuaguuuuccaugcgugu

SEQ ID NO: 1479232 - RNA, 23 nt, Human
ugacccuccaccgcagaaggaag

SEQ ID NO: 1479233 - RNA, 14 nt, Human
ugacccuccccaaa

SEQ ID NO: 1479234 - RNA, 22 nt, Human
ugacccuccaccgcagaaggaa

SEQ ID NO: 1479235 - RNA, 17 nt, Human
ugacccugagcugacca

SEQ ID NO: 1479236 - RNA, 14 nt, Human
ugacccugagcuga

SEQ ID NO: 1479237 - RNA, 18 nt, Human
ugaccucgugauccaccc

SEQ ID NO: 1479238 - RNA, 22 nt, Human
ugaccuccaugacugcacagua

SEQ ID NO: 1479239 - RNA, 14 nt, Human
ugcauuauauuuau

SEQ ID NO: 1479240 - RNA, 15 nt, Human
ugcauuacugcaugc

SEQ ID NO: 1479241 - RNA, 17 nt, Human
ugcauuacugcaugcac

SEQ ID NO: 1479242 - RNA, 18 nt, Human
ugcauuacugcaugcacu

SEQ ID NO: 1479243 - RNA, 22 nt, Human
ugcauuauaucaaaucuaccac

SEQ ID NO: 1479244 - RNA, 18 nt, Human
ugcagauggugagagaua

SEQ ID NO: 1479245 - RNA, 18 nt, Human
ugcauccauucuccugag

SEQ ID NO: 1479246 - RNA, 19 nt, Human
ugcauccauucuccugagg

SEQ ID NO: 1479247 - RNA, 16 nt, Human
ugccaugaugccucug

SEQ ID NO: 1479248 - RNA, 17 nt, Human
ugccaugaugccucugu

SEQ ID NO: 1479249 - RNA, 19 nt, Human
ugccaugaugccucugucu

SEQ ID NO: 1479250 - RNA, 20 nt, Human
ugccauguaggguucccuua

SEQ ID NO: 1479251 - RNA, 18 nt, Human
ugccaugucaaacaaaua

SEQ ID NO: 1479252 - RNA, 17 nt, Human
ugccaugucaaacaaau

SEQ ID NO: 1479253 - RNA, 18 nt, Human
ugcccugcccugccaccu

SEQ ID NO: 1479254 - RNA, 15 nt, Human
ugcccugcccugcca

SEQ ID NO: 1479255 - RNA, 14 nt, Human
ugcccugcccugcc

SEQ ID NO: 1479256 - RNA, 18 nt, Human
ugcccgggagcucaggaa

SEQ ID NO: 1479257 - RNA, 17 nt, Human
ugcccgggagcucagga

SEQ ID NO: 1479258 - RNA, 17 nt, Human
ugcccugcugcccuccc

SEQ ID NO: 1479259 - RNA, 14 nt, Human
ugcccugcugcccu

SEQ ID NO: 1479260 - RNA, 16 nt, Human
ugcccugcugcccucc

SEQ ID NO: 1479261 - RNA, 19 nt, Human
ugccgucagugcugugcug

SEQ ID NO: 1479262 - RNA, 14 nt, Human
ugccucuucccucu

SEQ ID NO: 1479263 - RNA, 21 nt, Human
ugccucuuccagucuuccuga

SEQ ID NO: 1479264 - RNA, 23 nt, Human
ugccucuuccagucuuccugaca

SEQ ID NO: 1479265 - RNA, 20 nt, Human
ugccugguauauccaaaagc

SEQ ID NO: 1479266 - RNA, 23 nt, Human
ugccugguauauccaaaagcuuu

SEQ ID NO: 1479267 - RNA, 16 nt, Human
ugccucccuucaugca

SEQ ID NO: 1479268 - RNA, 12 nt, Human
ugccuccucacc

SEQ ID NO: 1479269 - RNA, 22 nt, Human
ugccucccucucguaagauuuc

SEQ ID NO: 1479270 - RNA, 23 nt, Human
ugccucccucucguaagauuucc

SEQ ID NO: 1479271 - RNA, 19 nt, Human
ugccuccucacccccagcu

SEQ ID NO: 1479272 - RNA, 24 nt, Human
ugccuccucacccccagcuuugcu

SEQ ID NO: 1479273 - RNA, 14 nt, Human
ugcaaaaaggguca

SEQ ID NO: 1479274 - RNA, 19 nt, Human
ugcaaaaacuacaaccaau

SEQ ID NO: 1479275 - RNA, 18 nt, Human
ugauuuuuuuuucauaca

SEQ ID NO: 1479276 - RNA, 22 nt, Human
ugauuuuuuuuucauacacuua

SEQ ID NO: 1479277 - RNA, 18 nt, Human
ugauuuuuaugccaccug

SEQ ID NO: 1479278 - RNA, 21 nt, Human
ugauuuuugccucuuccaguc

SEQ ID NO: 1479279 - RNA, 22 nt, Human
ugauuuuugccucuuccagucu

SEQ ID NO: 1479280 - RNA, 16 nt, Human
ugauuuuuuuuccuuu

SEQ ID NO: 1479281 - RNA, 20 nt, Human
ugauuuucaaagcuuuuucc

SEQ ID NO: 1479282 - RNA, 13 nt, Human
ugauuuucuggau

SEQ ID NO: 1479283 - RNA, 15 nt, Human
ugauuuugaaaccau

SEQ ID NO: 1479284 - RNA, 11 nt, Human
ugauuuugaac

SEQ ID NO: 1479285 - RNA, 15 nt, Human
ugauuuugaaaucau

SEQ ID NO: 1479286 - RNA, 23 nt, Human
ugauuuugaaccugaugaaaaua

SEQ ID NO: 1479287 - RNA, 19 nt, Human
ugauuuuaagaauccaaac

SEQ ID NO: 1479288 - RNA, 16 nt, Human
ugauuuuaauaauaua

SEQ ID NO: 1479289 - RNA, 15 nt, Human
ugauuuuagccuucu

SEQ ID NO: 1479290 - RNA, 19 nt, Human
ugauuuuagccuucucugu

SEQ ID NO: 1479291 - RNA, 18 nt, Human
ugcaacuuuguauaaaag

SEQ ID NO: 1479292 - RNA, 22 nt, Human
ugcaacucugaaggguaauuau

SEQ ID NO: 1479293 - RNA, 14 nt, Human
ugcaaccucugccu

SEQ ID NO: 1479294 - RNA, 15 nt, Human
ugcaaccuccaccuc

SEQ ID NO: 1479295 - RNA, 18 nt, Human
ugcaaccuccaccuccug

SEQ ID NO: 1479296 - RNA, 19 nt, Human
ugcaaccuccaccuccugg

SEQ ID NO: 1479297 - RNA, 20 nt, Human
ugcaaccuccaccuccuggg

SEQ ID NO: 1479298 - RNA, 21 nt, Human
ugcaaccuccaccuccugggu

SEQ ID NO: 1479299 - RNA, 13 nt, Human
ugcaaccuccacc

SEQ ID NO: 1479300 - RNA, 16 nt, Human
ugcaaccgucuguuau

SEQ ID NO: 1479301 - RNA, 14 nt, Human
ugcacaguaaaaau

SEQ ID NO: 1479302 - RNA, 21 nt, Human
ugcacaaauauuuauuuucuu

SEQ ID NO: 1479303 - RNA, 14 nt, Human
ugcaccuuucuagu

SEQ ID NO: 1479304 - RNA, 22 nt, Human
ugcacuuauuuaugaaccugcc

SEQ ID NO: 1479305 - RNA, 14 nt, Human
ugcacuucuuacaa

SEQ ID NO: 1479306 - RNA, 18 nt, Human
ugcaccuuucuaguugaa

SEQ ID NO: 1479307 - RNA, 22 nt, Human
ugcaauguaaauauuuuaaaga

SEQ ID NO: 1479308 - RNA, 22 nt, Human
ucugucucuggauuauauuaug

SEQ ID NO: 1479309 - RNA, 14 nt, Human
ucuggaauacauga

SEQ ID NO: 1479310 - RNA, 22 nt, Human
ucuggaauacaugaaauauaga

SEQ ID NO: 1479311 - RNA, 19 nt, Human
ucuggacaggauguguuug

SEQ ID NO: 1479312 - RNA, 15 nt, Human
ucugccaggagacag

SEQ ID NO: 1479313 - RNA, 22 nt, Human
ucuuaaccagaucauugugaaa

SEQ ID NO: 1479314 - RNA, 12 nt, Human
ucuuaagaagac

SEQ ID NO: 1479315 - RNA, 18 nt, Human
ucuuaagaagacugcauu

SEQ ID NO: 1479316 - RNA, 15 nt, Human
ucuuagcugucugcu

SEQ ID NO: 1479317 - RNA, 18 nt, Human
ucuuagcugucugcucag

SEQ ID NO: 1479318 - RNA, 23 nt, Human
ucuuagcugucugcucagacaga

SEQ ID NO: 1479319 - RNA, 15 nt, Human
ucuuaaauaaaccuu

SEQ ID NO: 1479320 - RNA, 15 nt, Human
ucuuaaauaagaaac

SEQ ID NO: 1479321 - RNA, 16 nt, Human
ucuuaaauaagaaacu

SEQ ID NO: 1479322 - RNA, 18 nt, Human
ucuuaaauaagaaacuuu

SEQ ID NO: 1479323 - RNA, 19 nt, Human
ucuuaaauaagaaacuuuu

SEQ ID NO: 1479324 - RNA, 17 nt, Human
ucuuaaccagaucauug

SEQ ID NO: 1479325 - RNA, 16 nt, Human
ucuuaaccagaucauu

SEQ ID NO: 1479326 - RNA, 18 nt, Human
ucugucugucugucccaa

SEQ ID NO: 1479327 - RNA, 15 nt, Human
ucugucugucugucc

SEQ ID NO: 1479328 - RNA, 16 nt, Human
ucugucugucccaaag

SEQ ID NO: 1479329 - RNA, 15 nt, Human
ucugucugucccaaa

SEQ ID NO: 1479330 - RNA, 14 nt, Human
ucugucugucccaa

SEQ ID NO: 1479331 - RNA, 14 nt, Human
ucugucuucuggac

SEQ ID NO: 1479332 - RNA, 12 nt, Human
ucugucuugaag

SEQ ID NO: 1479333 - RNA, 23 nt, Human
ucuguuuucuuucuaaugagaua

SEQ ID NO: 1479334 - RNA, 16 nt, Human
ucuuaaacacuugcaa

SEQ ID NO: 1479335 - RNA, 16 nt, Human
ucuuaaaccuucaguu

SEQ ID NO: 1479336 - RNA, 18 nt, Human
ucuguuuuucuaacuggg

SEQ ID NO: 1479337 - RNA, 17 nt, Human
ucuuccuucccugcugu

SEQ ID NO: 1479338 - RNA, 15 nt, Human
ucuuccuucccugcu

SEQ ID NO: 1479339 - RNA, 14 nt, Human
ucuuccuucccugc

SEQ ID NO: 1479340 - RNA, 16 nt, Human
ucuucucccaauucau

SEQ ID NO: 1479341 - RNA, 19 nt, Human
ucuucuccauccuaccaca

SEQ ID NO: 1479342 - RNA, 13 nt, Human
ucuugaaaaaugc

SEQ ID NO: 1479343 - RNA, 22 nt, Human
ucuuaggguuaugauuaaguaa

SEQ ID NO: 1479344 - RNA, 23 nt, Human
ucucugaggggcuaccaggaaag

SEQ ID NO: 1479345 - RNA, 18 nt, Human
ucucugcaggucccuaau

SEQ ID NO: 1479346 - RNA, 16 nt, Human
ucucugcaggucccua

SEQ ID NO: 1479347 - RNA, 15 nt, Human
ucucugcaggucccu

SEQ ID NO: 1479348 - RNA, 12 nt, Human
ucucuguaaagc

SEQ ID NO: 1479349 - RNA, 14 nt, Human
ucucuguaaagcua

SEQ ID NO: 1479350 - RNA, 11 nt, Human
ucucugugcuu

SEQ ID NO: 1479351 - RNA, 14 nt, Human
ucucugcagguccc

SEQ ID NO: 1479352 - RNA, 13 nt, Human
ucucugcaggucc

SEQ ID NO: 1479353 - RNA, 22 nt, Human
ucucugaggggcuaccaggaaa

SEQ ID NO: 1479354 - RNA, 21 nt, Human
ucucugaggggcuaccaggaa

SEQ ID NO: 1479355 - RNA, 15 nt, Human
ucucugauacagaaa

SEQ ID NO: 1479356 - RNA, 13 nt, Human
ucucucucuacaa

SEQ ID NO: 1479357 - RNA, 14 nt, Human
ucucucucuacaaa

SEQ ID NO: 1479358 - RNA, 20 nt, Human
ucucaauauucaauaaagcu

SEQ ID NO: 1479359 - RNA, 17 nt, Human
ucucaauauucaauaaa

SEQ ID NO: 1479360 - RNA, 18 nt, Human
ucucaauauucaauaaag

SEQ ID NO: 1479361 - RNA, 21 nt, Human
ucuccuggaagugcuaauuuu

SEQ ID NO: 1479362 - RNA, 19 nt, Human
ucuccugccucagccuccc

SEQ ID NO: 1479363 - RNA, 14 nt, Human
ucugcaacucugaa

SEQ ID NO: 1479364 - RNA, 15 nt, Human
ucugcaacucugaag

SEQ ID NO: 1479365 - RNA, 22 nt, Human
ucugcacacccuccagagacaa

SEQ ID NO: 1479366 - RNA, 17 nt, Human
ucugaaauuuccuggga

SEQ ID NO: 1479367 - RNA, 18 nt, Human
ucugaaauuuccugggag

SEQ ID NO: 1479368 - RNA, 20 nt, Human
ucugaaauuuccugggagcu

SEQ ID NO: 1479369 - RNA, 12 nt, Human
ucugaacacauu

SEQ ID NO: 1479370 - RNA, 13 nt, Human
ucugaacacauug

SEQ ID NO: 1479371 - RNA, 23 nt, Human
ucugacauaauccaguaaaauaa

SEQ ID NO: 1479372 - RNA, 19 nt, Human
ucugacauaauccaguaaa

SEQ ID NO: 1479373 - RNA, 13 nt, Human
ucugacauaaucc

SEQ ID NO: 1479374 - RNA, 15 nt, Human
ucugacauaaguauu

SEQ ID NO: 1479375 - RNA, 22 nt, Human
ucugaaaauugaugggauuugg

SEQ ID NO: 1479376 - RNA, 12 nt, Human
ucugaaagagaa

SEQ ID NO: 1479377 - RNA, 14 nt, Human
ucugaaaauugaug

SEQ ID NO: 1479378 - RNA, 18 nt, Human
ucucugugugcacaaaua

SEQ ID NO: 1479379 - RNA, 13 nt, Human
ucucuguucauuu

SEQ ID NO: 1479380 - RNA, 14 nt, Human
ucucuguucauuuc

SEQ ID NO: 1479381 - RNA, 16 nt, Human
ucucuguucauuuccu

SEQ ID NO: 1479382 - RNA, 17 nt, Human
ucucuguucauuuccuc

SEQ ID NO: 1479383 - RNA, 18 nt, Human
ucucuguucauuuccuca

SEQ ID NO: 1479384 - RNA, 21 nt, Human
ucguguguuucuauuuuuuga

SEQ ID NO: 1479385 - RNA, 13 nt, Human
ucguuaauuugua

SEQ ID NO: 1479386 - RNA, 14 nt, Human
ucgugucuggcaca

SEQ ID NO: 1479387 - RNA, 21 nt, Human
ucgugucuggcacagccuggc

SEQ ID NO: 1479388 - RNA, 22 nt, Human
ucuaauagggcaauuaauuccu

SEQ ID NO: 1479389 - RNA, 16 nt, Human
ucuaauagggcaauua

SEQ ID NO: 1479390 - RNA, 13 nt, Human
ucuaacagauuag

SEQ ID NO: 1479391 - RNA, 21 nt, Human
ucguggaacaguuaccucugc

SEQ ID NO: 1479392 - RNA, 22 nt, Human
ucgugggacagucaccucaugg

SEQ ID NO: 1479393 - RNA, 19 nt, Human
ucggccucccaaagugcug

SEQ ID NO: 1479394 - RNA, 23 nt, Human
ucuaggacugaauuaugaaacuu

SEQ ID NO: 1479395 - RNA, 16 nt, Human
ucuaggacugaauuau

SEQ ID NO: 1479396 - RNA, 13 nt, Human
ucuagaacacagg

SEQ ID NO: 1479397 - RNA, 15 nt, Human
ucuagaacacaggca

SEQ ID NO: 1479398 - RNA, 16 nt, Human
ucuagaacacaggcaa

SEQ ID NO: 1479399 - RNA, 23 nt, Human
ucuaggacacaguuccugggaac

SEQ ID NO: 1479400 - RNA, 21 nt, Human
ucuaggacacaguuccuggga

SEQ ID NO: 1479401 - RNA, 13 nt, Human
ucuaggacacagu

SEQ ID NO: 1479402 - RNA, 22 nt, Human
ucuagugagcagucaggaaaga

SEQ ID NO: 1479403 - RNA, 19 nt, Human
ucuagugagcagucaggaa

SEQ ID NO: 1479404 - RNA, 21 nt, Human
ucuaucaaccccagacacugg

SEQ ID NO: 1479405 - RNA, 14 nt, Human
ucuaugcauuuucu

SEQ ID NO: 1479406 - RNA, 15 nt, Human
ucuaugcauuuucug

SEQ ID NO: 1479407 - RNA, 14 nt, Human
ucuaugaaauauua

SEQ ID NO: 1479408 - RNA, 17 nt, Human
ucuaugaaauauuaugu

SEQ ID NO: 1479409 - RNA, 18 nt, Human
ucuaugaaauauuauguu

SEQ ID NO: 1479410 - RNA, 22 nt, Human
ucuaucaaccccagacacuggu

SEQ ID NO: 1479411 - RNA, 19 nt, Human
ucuaucaaccccagacacu

SEQ ID NO: 1479412 - RNA, 20 nt, Human
ucuaucaaccccagacacug

SEQ ID NO: 1479413 - RNA, 16 nt, Human
uccuuggccaugcaga

SEQ ID NO: 1479414 - RNA, 10 nt, Human
uccuuuguuc

SEQ ID NO: 1479415 - RNA, 23 nt, Human
uccuuggcaggcugauuucuagg

SEQ ID NO: 1479416 - RNA, 21 nt, Human
uccuuggcaggcugauuucua

SEQ ID NO: 1479417 - RNA, 17 nt, Human
uccuuuuaauuuuccug

SEQ ID NO: 1479418 - RNA, 16 nt, Human
uccuuuguucuuaccu

SEQ ID NO: 1479419 - RNA, 24 nt, Human
uccuuuguucuuaccuguaugucu

SEQ ID NO: 1479420 - RNA, 22 nt, Human
uccugucgauuagacuggacag

SEQ ID NO: 1479421 - RNA, 22 nt, Human
uccuugcuuaugacaucacuug

SEQ ID NO: 1479422 - RNA, 17 nt, Human
uccugccucagccuccc

SEQ ID NO: 1479423 - RNA, 14 nt, Human
uccugccucagccu

SEQ ID NO: 1479424 - RNA, 17 nt, Human
uccugucgauuagacug

SEQ ID NO: 1479425 - RNA, 21 nt, Human
uccugucgauuagacuggaca

SEQ ID NO: 1479426 - RNA, 19 nt, Human
ucccuccugggaaugaagc

SEQ ID NO: 1479427 - RNA, 11 nt, Human
ucccuccuggg

SEQ ID NO: 1479428 - RNA, 16 nt, Human
ucccuccucugcccgg

SEQ ID NO: 1479429 - RNA, 14 nt, Human
ucccuccuguuggg

SEQ ID NO: 1479430 - RNA, 11 nt, Human
ucccuccuugg

SEQ ID NO: 1479431 - RNA, 12 nt, Human
ucccuccuuggu

SEQ ID NO: 1479432 - RNA, 16 nt, Human
ucccuaauaaagcugu

SEQ ID NO: 1479433 - RNA, 19 nt, Human
ucccuaucuuugccacccu

SEQ ID NO: 1479434 - RNA, 14 nt, Human
ucccuauacugcuu

SEQ ID NO: 1479435 - RNA, 15 nt, Human
ucccuauacugcuug

SEQ ID NO: 1479436 - RNA, 17 nt, Human
ucccuauacugcuugga

SEQ ID NO: 1479437 - RNA, 15 nt, Human
ucccuaauaaagcug

SEQ ID NO: 1479438 - RNA, 20 nt, Human
ucccgucaccccuguuucug

SEQ ID NO: 1479439 - RNA, 15 nt, Human
ucccuugaugaagaa

SEQ ID NO: 1479440 - RNA, 16 nt, Human
ucccuugaugaagaag

SEQ ID NO: 1479441 - RNA, 18 nt, Human
ucccuucaugcauggaaa

SEQ ID NO: 1479442 - RNA, 17 nt, Human
ucccuucaugcauggaa

SEQ ID NO: 1479443 - RNA, 21 nt, Human
ucccuucaucuggaaccauca

SEQ ID NO: 1479444 - RNA, 18 nt, Human
ucccuggcccccucccug

SEQ ID NO: 1479445 - RNA, 19 nt, Human
ucccuggauuuuuaccagu

SEQ ID NO: 1479446 - RNA, 20 nt, Human
ucccuggcccccucccugga

SEQ ID NO: 1479447 - RNA, 18 nt, Human
ucccuggaugacauuaaa

SEQ ID NO: 1479448 - RNA, 20 nt, Human
ucccuggaugacauuaaaga

SEQ ID NO: 1479449 - RNA, 20 nt, Human
ucccuggauuuuuaccaguc

SEQ ID NO: 1479450 - RNA, 18 nt, Human
ucccuggauuuuuaccag

SEQ ID NO: 1479451 - RNA, 17 nt, Human
ucccuggauuuuuacca

SEQ ID NO: 1479452 - RNA, 16 nt, Human
ucccuuccuuccucuc

SEQ ID NO: 1479453 - RNA, 19 nt, Human
ucccuuccuuccucuccug

SEQ ID NO: 1479454 - RNA, 23 nt, Human
ucccuggaaaccuuccacccagu

SEQ ID NO: 1479455 - RNA, 18 nt, Human
ucccuggaaggacaucca

SEQ ID NO: 1479456 - RNA, 22 nt, Human
ucccuggaaaccuuccacccag

SEQ ID NO: 1479457 - RNA, 20 nt, Human
ucccuggaaaccuuccaccc

SEQ ID NO: 1479458 - RNA, 13 nt, Human
ucccugccuggac

SEQ ID NO: 1479459 - RNA, 17 nt, Human
ucccugccucucaucaa

SEQ ID NO: 1479460 - RNA, 23 nt, Human
ucccugccucucaucaacugaau

SEQ ID NO: 1479461 - RNA, 13 nt, Human
ucccugccuccug

SEQ ID NO: 1479462 - RNA, 16 nt, Human
ucccugccuccugccg

SEQ ID NO: 1479463 - RNA, 18 nt, Human
ucccugccuccugccggc

SEQ ID NO: 1479464 - RNA, 16 nt, Human
ucccucucucauaccc

SEQ ID NO: 1479465 - RNA, 14 nt, Human
ucccucucguaaga

SEQ ID NO: 1479466 - RNA, 19 nt, Human
uccucuucuauuuuguaaa

SEQ ID NO: 1479467 - RNA, 21 nt, Human
uccucaugaauguaaauuugu

SEQ ID NO: 1479468 - RNA, 20 nt, Human
uccucaugaauguaaauuug

SEQ ID NO: 1479469 - RNA, 22 nt, Human
uccuccuuccggggaaggauuu

SEQ ID NO: 1479470 - RNA, 20 nt, Human
uccuccuuccggggaaggau

SEQ ID NO: 1479471 - RNA, 20 nt, Human
uccuaguuuucuccucccag

SEQ ID NO: 1479472 - RNA, 13 nt, Human
uccuaguuuucuc

SEQ ID NO: 1479473 - RNA, 14 nt, Human
uccucaugaaugua

SEQ ID NO: 1479474 - RNA, 15 nt, Human
uccucaugaauguaa

SEQ ID NO: 1479475 - RNA, 17 nt, Human
uccucaugaauguaaau

SEQ ID NO: 1479476 - RNA, 16 nt, Human
uccuaauuuugagaaa

SEQ ID NO: 1479477 - RNA, 19 nt, Human
uccuaauaauaucccacug

SEQ ID NO: 1479478 - RNA, 22 nt, Human
uccuaauaauaucccacuggga

SEQ ID NO: 1479479 - RNA, 17 nt, Human
uauucguuaucuaauag

SEQ ID NO: 1479480 - RNA, 21 nt, Human
uauucuagccugcauugagcu

SEQ ID NO: 1479481 - RNA, 10 nt, Human
uauucuaguc

SEQ ID NO: 1479482 - RNA, 16 nt, Human
uauucuagccugcauu

SEQ ID NO: 1479483 - RNA, 14 nt, Human
uauuccuauugugc

SEQ ID NO: 1479484 - RNA, 16 nt, Human
uauuccucaaaaaauu

SEQ ID NO: 1479485 - RNA, 18 nt, Human
uauuccuccugcucauau

SEQ ID NO: 1479486 - RNA, 22 nt, Human
uauuccuguggauguaaaguga

SEQ ID NO: 1479487 - RNA, 17 nt, Human
uauuauuaacauaccua

SEQ ID NO: 1479488 - RNA, 19 nt, Human
uauuauuacuuauuuuuga

SEQ ID NO: 1479489 - RNA, 15 nt, Human
uauuacaaugaucac

SEQ ID NO: 1479490 - RNA, 16 nt, Human
uauuacacucuguaau

SEQ ID NO: 1479491 - RNA, 19 nt, Human
uauuacacucuguaauuga

SEQ ID NO: 1479492 - RNA, 14 nt, Human
uauuacaaugauca

SEQ ID NO: 1479493 - RNA, 17 nt, Human
uauuaauuuaugcagaa

SEQ ID NO: 1479494 - RNA, 17 nt, Human
uauuccccauucuuccu

SEQ ID NO: 1479495 - RNA, 19 nt, Human
uauuccaagacaugucugu

SEQ ID NO: 1479496 - RNA, 22 nt, Human
uauuuaguuguaaaccaaguga

SEQ ID NO: 1479497 - RNA, 19 nt, Human
uauuuaaaccgcuaaaaga

SEQ ID NO: 1479498 - RNA, 24 nt, Human
uauuuauaaaaauaaaaaacacug

SEQ ID NO: 1479499 - RNA, 21 nt, Human
uauuuaaaccgcuaaaagaaa

SEQ ID NO: 1479500 - RNA, 14 nt, Human
uauuuaaaaaacua

SEQ ID NO: 1479501 - RNA, 16 nt, Human
uauuuaaaaaacuaaa

SEQ ID NO: 1479502 - RNA, 21 nt, Human
uauuuaaaaaacuaaaaacua

SEQ ID NO: 1479503 - RNA, 20 nt, Human
uauuuaaaaaacuaaaaacu

SEQ ID NO: 1479504 - RNA, 14 nt, Human
uauuuaaaauagca

SEQ ID NO: 1479505 - RNA, 15 nt, Human
uauuuaaaauagcaa

SEQ ID NO: 1479506 - RNA, 23 nt, Human
uauuuaaaauagcaaaagaagaa

SEQ ID NO: 1479507 - RNA, 21 nt, Human
uauuuaaaauagcaaaagaag

SEQ ID NO: 1479508 - RNA, 22 nt, Human
uauuguuuuacaauaguucugu

SEQ ID NO: 1479509 - RNA, 20 nt, Human
uauuguuuuacaauaguucu

SEQ ID NO: 1479510 - RNA, 17 nt, Human
uauuguuuuacaauagu

SEQ ID NO: 1479511 - RNA, 15 nt, Human
uauuguuuuacaaua

SEQ ID NO: 1479512 - RNA, 14 nt, Human
uauuguuuuacaau

SEQ ID NO: 1479513 - RNA, 16 nt, Human
uauuggaauauaauug

SEQ ID NO: 1479514 - RNA, 17 nt, Human
uauuggacaaagaaccu

SEQ ID NO: 1479515 - RNA, 13 nt, Human
uauugccucacuu

SEQ ID NO: 1479516 - RNA, 15 nt, Human
uauugccucugagag

SEQ ID NO: 1479517 - RNA, 13 nt, Human
uauguacuucaug

SEQ ID NO: 1479518 - RNA, 17 nt, Human
uauguacuucaugcugu

SEQ ID NO: 1479519 - RNA, 10 nt, Human
uauguaccaa

SEQ ID NO: 1479520 - RNA, 12 nt, Human
uauguacaguua

SEQ ID NO: 1479521 - RNA, 14 nt, Human
uauguaccaagaau

SEQ ID NO: 1479522 - RNA, 23 nt, Human
uauguagaaaaaaguaaauguga

SEQ ID NO: 1479523 - RNA, 14 nt, Human
uauguagauaacaa

SEQ ID NO: 1479524 - RNA, 15 nt, Human
uauguaaaacauuua

SEQ ID NO: 1479525 - RNA, 13 nt, Human
uauggauucuaaa

SEQ ID NO: 1479526 - RNA, 14 nt, Human
uauggauucuaaaa

SEQ ID NO: 1479527 - RNA, 15 nt, Human
uauggauucuaaaau

SEQ ID NO: 1479528 - RNA, 15 nt, Human
uauggugcucugucu

SEQ ID NO: 1479529 - RNA, 23 nt, Human
uauggugcucugucuacuugcuc

SEQ ID NO: 1479530 - RNA, 13 nt, Human
uauguaaaacauu

SEQ ID NO: 1479531 - RNA, 16 nt, Human
uauggauucuaaaaug

SEQ ID NO: 1479532 - RNA, 20 nt, Human
uauggcaaccauuauaaccu

SEQ ID NO: 1479533 - RNA, 12 nt, Human
uauguugcauag

SEQ ID NO: 1479534 - RNA, 16 nt, Human
uaugucauuucauuuc

SEQ ID NO: 1479535 - RNA, 16 nt, Human
uauguugcauagaaua

SEQ ID NO: 1479536 - RNA, 18 nt, Human
uauuaauauauauuaucu

SEQ ID NO: 1479537 - RNA, 23 nt, Human
uauuaauauauauuaucuuuuca

SEQ ID NO: 1479538 - RNA, 22 nt, Human
uauuaauauauauuaucuuuuc

SEQ ID NO: 1479539 - RNA, 20 nt, Human
ucaaaucaaucuguaaaacu

SEQ ID NO: 1479540 - RNA, 23 nt, Human
ucaaauauauucagccuggcuuc

SEQ ID NO: 1479541 - RNA, 22 nt, Human
ucaaauauauucagccuggcuu

SEQ ID NO: 1479542 - RNA, 21 nt, Human
ucaaauauauucagccuggcu

SEQ ID NO: 1479543 - RNA, 23 nt, Human
ucaaaaauuaaaccggaccaucu

SEQ ID NO: 1479544 - RNA, 20 nt, Human
ucaaaaauuaucuauagcua

SEQ ID NO: 1479545 - RNA, 12 nt, Human
ucaaaaauuaaa

SEQ ID NO: 1479546 - RNA, 14 nt, Human
ucaaaacagauugu

SEQ ID NO: 1479547 - RNA, 16 nt, Human
ucaaaacagauuguuu

SEQ ID NO: 1479548 - RNA, 15 nt, Human
ucaaauccuugaaga

SEQ ID NO: 1479549 - RNA, 14 nt, Human
ucaaauucuucuga

SEQ ID NO: 1479550 - RNA, 15 nt, Human
ucaaauucuucugaa

SEQ ID NO: 1479551 - RNA, 20 nt, Human
ucaaauuguaagcaugcaca

SEQ ID NO: 1479552 - RNA, 17 nt, Human
ucaaauuguaagcaugc

SEQ ID NO: 1479553 - RNA, 14 nt, Human
ucaaauugugugaa

SEQ ID NO: 1479554 - RNA, 16 nt, Human
ucaaauucuucugaac

SEQ ID NO: 1479555 - RNA, 21 nt, Human
ucaaauucuucugaacucaaa

SEQ ID NO: 1479556 - RNA, 15 nt, Human
ucaaauugugugaaa

SEQ ID NO: 1479557 - RNA, 22 nt, Human
ucaaauugugcaguacuuugug

SEQ ID NO: 1479558 - RNA, 13 nt, Human
uauuuuuugaaaa

SEQ ID NO: 1479559 - RNA, 21 nt, Human
uauuuucugugccugaauauu

SEQ ID NO: 1479560 - RNA, 17 nt, Human
uauuuuuuuuaaguauu

SEQ ID NO: 1479561 - RNA, 17 nt, Human
uauuuuauguugcauag

SEQ ID NO: 1479562 - RNA, 17 nt, Human
ucaaugccccugaauuu

SEQ ID NO: 1479563 - RNA, 18 nt, Human
ucaaugccccugaauuua

SEQ ID NO: 1479564 - RNA, 20 nt, Human
ucaaugccccugaauuuaaa

SEQ ID NO: 1479565 - RNA, 22 nt, Human
ucaaugccccugaauuuaaaua

SEQ ID NO: 1479566 - RNA, 22 nt, Human
ucaauaagccucagcuuucuaa

SEQ ID NO: 1479567 - RNA, 21 nt, Human
ucaauaaaauccauacauuug

SEQ ID NO: 1479568 - RNA, 23 nt, Human
ucaaguuguuccuuaagucagaa

SEQ ID NO: 1479569 - RNA, 13 nt, Human
ucaauuaccacac

SEQ ID NO: 1479570 - RNA, 13 nt, Human
ucaauuacugguc

SEQ ID NO: 1479571 - RNA, 16 nt, Human
ucaauuacugguccaa

SEQ ID NO: 1479572 - RNA, 20 nt, Human
ucaauuacugguccaaaaga

SEQ ID NO: 1479573 - RNA, 22 nt, Human
ucacacccaacuugguuuugcu

SEQ ID NO: 1479574 - RNA, 20 nt, Human
ucacaccugaacugaacacc

SEQ ID NO: 1479575 - RNA, 11 nt, Human
ucacauuuucc

SEQ ID NO: 1479576 - RNA, 14 nt, Human
ucacauuuuccuuu

SEQ ID NO: 1479577 - RNA, 16 nt, Human
ucacauuuuccuuuuc

SEQ ID NO: 1479578 - RNA, 17 nt, Human
ucacauuuuccuuuuca

SEQ ID NO: 1479579 - RNA, 18 nt, Human
ucacauuuuccuuuucaa

SEQ ID NO: 1479580 - RNA, 15 nt, Human
ucaccagauuugcua

SEQ ID NO: 1479581 - RNA, 21 nt, Human
ucaccagauuugcuaauuuau

SEQ ID NO: 1479582 - RNA, 12 nt, Human
ucaccacaaacu

SEQ ID NO: 1479583 - RNA, 22 nt, Human
ucaccacaaacuguaauacaau

SEQ ID NO: 1479584 - RNA, 15 nt, Human
ucauuccauucugga

SEQ ID NO: 1479585 - RNA, 14 nt, Human
ucauuccauucugg

SEQ ID NO: 1479586 - RNA, 14 nt, Human
ucauucauuuuugu

SEQ ID NO: 1479587 - RNA, 22 nt, Human
ucauucacaucgcagauucucc

SEQ ID NO: 1479588 - RNA, 20 nt, Human
ucauucacaucgcagauucu

SEQ ID NO: 1479589 - RNA, 19 nt, Human
ucauuauuacuuuugcugu

SEQ ID NO: 1479590 - RNA, 23 nt, Human
ucauuauucguagauauuggaca

SEQ ID NO: 1479591 - RNA, 12 nt, Human
ucauuucaggau

SEQ ID NO: 1479592 - RNA, 19 nt, Human
ucauuccauucuggaagug

SEQ ID NO: 1479593 - RNA, 16 nt, Human
ucauuccauucuggaa

SEQ ID NO: 1479594 - RNA, 18 nt, Human
ucauugugaaauuauuca

SEQ ID NO: 1479595 - RNA, 17 nt, Human
ucauugugaaauuauuc

SEQ ID NO: 1479596 - RNA, 15 nt, Human
ucauugugaaauuau

SEQ ID NO: 1479597 - RNA, 12 nt, Human
ucauugugaaau

SEQ ID NO: 1479598 - RNA, 13 nt, Human
ucauuuccaagca

SEQ ID NO: 1479599 - RNA, 16 nt, Human
ucauuuccaagcaagu

SEQ ID NO: 1479600 - RNA, 15 nt, Human
ucauuucauuuccua

SEQ ID NO: 1479601 - RNA, 13 nt, Human
ucauuuccucaaa

SEQ ID NO: 1479602 - RNA, 14 nt, Human
ucauagcuaaaaaa

SEQ ID NO: 1479603 - RNA, 20 nt, Human
uccaggguggcagcaacaau

SEQ ID NO: 1479604 - RNA, 18 nt, Human
uccaggguggcagcaaca

SEQ ID NO: 1479605 - RNA, 15 nt, Human
uccaggguggcagca

SEQ ID NO: 1479606 - RNA, 14 nt, Human
uccaggguggcagc

SEQ ID NO: 1479607 - RNA, 21 nt, Human
uccagcuuuguucuucuuaaa

SEQ ID NO: 1479608 - RNA, 15 nt, Human
uccagccaucaccuu

SEQ ID NO: 1479609 - RNA, 19 nt, Human
uccagccaucaagagacug

SEQ ID NO: 1479610 - RNA, 20 nt, Human
uccagccaucaagagacuga

SEQ ID NO: 1479611 - RNA, 21 nt, Human
uccagccaucaagagacugag

SEQ ID NO: 1479612 - RNA, 24 nt, Human
uccagccaucaagagacugaguca

SEQ ID NO: 1479613 - RNA, 19 nt, Human
uccacagaagcuccaggua

SEQ ID NO: 1479614 - RNA, 14 nt, Human
uccaauuuucugga

SEQ ID NO: 1479615 - RNA, 18 nt, Human
uccaauuuucuggaauac

SEQ ID NO: 1479616 - RNA, 22 nt, Human
uccaaaauguuggucauuuuau

SEQ ID NO: 1479617 - RNA, 22 nt, Human
ucagaguaauccaagcaaaugu

SEQ ID NO: 1479618 - RNA, 21 nt, Human
ucagaguaauccaagcaaaug

SEQ ID NO: 1479619 - RNA, 19 nt, Human
ucagaggguguccugcacc

SEQ ID NO: 1479620 - RNA, 12 nt, Human
ucagagaauuuc

SEQ ID NO: 1479621 - RNA, 14 nt, Human
ucagacuguuuagu

SEQ ID NO: 1479622 - RNA, 22 nt, Human
ucagaaacacccucacacuggg

SEQ ID NO: 1479623 - RNA, 21 nt, Human
ucagaaacacccucacacugg

SEQ ID NO: 1479624 - RNA, 19 nt, Human
ucagaaacacccucacacu

SEQ ID NO: 1479625 - RNA, 20 nt, Human
ucacuuguuuuauuuaaccu

SEQ ID NO: 1479626 - RNA, 21 nt, Human
ucacuuuacacaauagaauua

SEQ ID NO: 1479627 - RNA, 18 nt, Human
ucagacagaaccccuaca

SEQ ID NO: 1479628 - RNA, 22 nt, Human
ucacucuguucauuccuccagg

SEQ ID NO: 1479629 - RNA, 21 nt, Human
ucacucuguucauuccuccag

SEQ ID NO: 1479630 - RNA, 20 nt, Human
ucacucuguucauuccucca

SEQ ID NO: 1479631 - RNA, 23 nt, Human
ucaccccuaaaagaaacccugca

SEQ ID NO: 1479632 - RNA, 19 nt, Human
ucacugcuugaacuaggcu

SEQ ID NO: 1479633 - RNA, 14 nt, Human
ucacugcucacacu

SEQ ID NO: 1479634 - RNA, 18 nt, Human
ucacuggaccacugggca

SEQ ID NO: 1479635 - RNA, 18 nt, Human
ucacugguagaccaaaau

SEQ ID NO: 1479636 - RNA, 19 nt, Human
ucacugguagaccaaaaua

SEQ ID NO: 1479637 - RNA, 20 nt, Human
ucacugguagaccaaaauaa

SEQ ID NO: 1479638 - RNA, 20 nt, Human
ucacuguagaaugauuucau

SEQ ID NO: 1479639 - RNA, 15 nt, Human
ucagauaugauucaa

SEQ ID NO: 1479640 - RNA, 16 nt, Human
ucagauaugauucaaa

SEQ ID NO: 1479641 - RNA, 12 nt, Human
ucagcaugucua

SEQ ID NO: 1479642 - RNA, 16 nt, Human
ucagcaugucuauuca

SEQ ID NO: 1479643 - RNA, 19 nt, Human
ucagcaugucuauucagcu

SEQ ID NO: 1479644 - RNA, 21 nt, Human
ucagcaugucuauucagcuuc

SEQ ID NO: 1479645 - RNA, 20 nt, Human
ucagccucccgaguagcugg

SEQ ID NO: 1479646 - RNA, 20 nt, Human
ucagccuccugaguagcugg

SEQ ID NO: 1479647 - RNA, 23 nt, Human
ucaggagcccugggaggcucugg

SEQ ID NO: 1479648 - RNA, 20 nt, Human
ucaggagcccugggaggcuc

SEQ ID NO: 1479649 - RNA, 18 nt, Human
ucaggagcccugggaggc

SEQ ID NO: 1479650 - RNA, 19 nt, Human
ucaggagcccugggaggcu

SEQ ID NO: 1479651 - RNA, 17 nt, Human
ucaggcuagauguaugu

SEQ ID NO: 1479652 - RNA, 15 nt, Human
ucagggaggcccugu

SEQ ID NO: 1479653 - RNA, 23 nt, Human
ucagggacucaucuuucccuccu

SEQ ID NO: 1479654 - RNA, 19 nt, Human
ucagggaggcccugugccc

SEQ ID NO: 1479655 - RNA, 22 nt, Human
ucagggaggcccugugccccuu

SEQ ID NO: 1479656 - RNA, 15 nt, Human
gggaggaggcagaga

SEQ ID NO: 1479657 - RNA, 14 nt, Human
gggaggagaaugag

SEQ ID NO: 1479658 - RNA, 12 nt, Human
gggaggagggca

SEQ ID NO: 1479659 - RNA, 16 nt, Human
gggaggagggcaggca

SEQ ID NO: 1479660 - RNA, 12 nt, Human
gggagcugccaa

SEQ ID NO: 1479661 - RNA, 19 nt, Human
gggagcugguuagaaaugc

SEQ ID NO: 1479662 - RNA, 13 nt, Human
gggagccgggagc

SEQ ID NO: 1479663 - RNA, 23 nt, Human
gggagcucaggaaccgaggcagg

SEQ ID NO: 1479664 - RNA, 12 nt, Human
gggagcucagga

SEQ ID NO: 1479665 - RNA, 22 nt, Human
gggagcucaggaaccgaggcag

SEQ ID NO: 1479666 - RNA, 22 nt, Human
gggaauaugagugcguggugcg

SEQ ID NO: 1479667 - RNA, 11 nt, Human
gggaaugugaa

SEQ ID NO: 1479668 - RNA, 14 nt, Human
gggaauugaggaca

SEQ ID NO: 1479669 - RNA, 14 nt, Human
gggacaccuaggcu

SEQ ID NO: 1479670 - RNA, 19 nt, Human
gggaccaggaguggguggg

SEQ ID NO: 1479671 - RNA, 23 nt, Human
gggaccaggaguggguggggagu

SEQ ID NO: 1479672 - RNA, 15 nt, Human
gggacugagaaauuu

SEQ ID NO: 1479673 - RNA, 11 nt, Human
gggacugagag

SEQ ID NO: 1479674 - RNA, 23 nt, Human
gggacugagagaugcagaaauau

SEQ ID NO: 1479675 - RNA, 12 nt, Human
gggacugagaga

SEQ ID NO: 1479676 - RNA, 15 nt, Human
ggcuugccacacccc

SEQ ID NO: 1479677 - RNA, 13 nt, Human
ggcuugccugcag

SEQ ID NO: 1479678 - RNA, 14 nt, Human
ggcuugccacaccc

SEQ ID NO: 1479679 - RNA, 14 nt, Human
ggcuugccugcagg

SEQ ID NO: 1479680 - RNA, 15 nt, Human
ggcuugccugcaggc

SEQ ID NO: 1479681 - RNA, 21 nt, Human
ggcuguggcauccagaguccc

SEQ ID NO: 1479682 - RNA, 23 nt, Human
ggcuguggcauccagagucccug

SEQ ID NO: 1479683 - RNA, 14 nt, Human
ggcugugggcaagc

SEQ ID NO: 1479684 - RNA, 14 nt, Human
ggcugucugaggcu

SEQ ID NO: 1479685 - RNA, 20 nt, Human
ggcuggagugcaguggcgcg

SEQ ID NO: 1479686 - RNA, 13 nt, Human
ggcugggaggagg

SEQ ID NO: 1479687 - RNA, 20 nt, Human
ggcugggaggagggcaggca

SEQ ID NO: 1479688 - RNA, 21 nt, Human
ggcugggaggagggcaggcau

SEQ ID NO: 1479689 - RNA, 18 nt, Human
ggcuggagcuagaauuug

SEQ ID NO: 1479690 - RNA, 23 nt, Human
ggcucuggagcccacuguacuug

SEQ ID NO: 1479691 - RNA, 19 nt, Human
ggccggcuugccacacccc

SEQ ID NO: 1479692 - RNA, 15 nt, Human
ggccuaaccugccga

SEQ ID NO: 1479693 - RNA, 16 nt, Human
ggccuaaccugccgag

SEQ ID NO: 1479694 - RNA, 21 nt, Human
ggccuaaccugccgagagucc

SEQ ID NO: 1479695 - RNA, 18 nt, Human
ggccuagacucugucuac

SEQ ID NO: 1479696 - RNA, 13 nt, Human
ggccuagacucug

SEQ ID NO: 1479697 - RNA, 13 nt, Human
ggccuagaggccu

SEQ ID NO: 1479698 - RNA, 14 nt, Human
ggccuagaggccug

SEQ ID NO: 1479699 - RNA, 11 nt, Human
ggcgcaggagg

SEQ ID NO: 1479700 - RNA, 14 nt, Human
ggcgcaggccguga

SEQ ID NO: 1479701 - RNA, 19 nt, Human
ggccugggcaggagggagg

SEQ ID NO: 1479702 - RNA, 15 nt, Human
ggccugggcaggagg

SEQ ID NO: 1479703 - RNA, 17 nt, Human
ggccugggcaggaggga

SEQ ID NO: 1479704 - RNA, 17 nt, Human
ggccugacugccaagcc

SEQ ID NO: 1479705 - RNA, 16 nt, Human
ggccugacugccaagc

SEQ ID NO: 1479706 - RNA, 20 nt, Human
ggccugacugccaagccaug

SEQ ID NO: 1479707 - RNA, 19 nt, Human
ggccugacugccaagccau

SEQ ID NO: 1479708 - RNA, 18 nt, Human
ggccugacugccaagcca

SEQ ID NO: 1479709 - RNA, 19 nt, Human
ggcucuggagcccacugua

SEQ ID NO: 1479710 - RNA, 17 nt, Human
ggcucuggagcccacug

SEQ ID NO: 1479711 - RNA, 16 nt, Human
ggcucuggagcccacu

SEQ ID NO: 1479712 - RNA, 17 nt, Human
ggcucccagggacaccu

SEQ ID NO: 1479713 - RNA, 19 nt, Human
ggcuagguggguugaaagc

SEQ ID NO: 1479714 - RNA, 12 nt, Human
ggcggggguggc

SEQ ID NO: 1479715 - RNA, 14 nt, Human
ggcggggguggcgg

SEQ ID NO: 1479716 - RNA, 19 nt, Human
ggcggggguggcggcggcc

SEQ ID NO: 1479717 - RNA, 13 nt, Human
ggcuagguacaca

SEQ ID NO: 1479718 - RNA, 18 nt, Human
ggcucaccuugugcuggg

SEQ ID NO: 1479719 - RNA, 14 nt, Human
ggagcuagaauuug

SEQ ID NO: 1479720 - RNA, 21 nt, Human
ggagcucaggaaccgaggcag

SEQ ID NO: 1479721 - RNA, 22 nt, Human
ggagccuucccaaguugugcuu

SEQ ID NO: 1479722 - RNA, 21 nt, Human
ggagccuucccaaguugugcu

SEQ ID NO: 1479723 - RNA, 13 nt, Human
ggagccuucccaa

SEQ ID NO: 1479724 - RNA, 23 nt, Human
ggagccuucccaaguugugcuug

SEQ ID NO: 1479725 - RNA, 20 nt, Human
ggagcccugggaggcucugg

SEQ ID NO: 1479726 - RNA, 19 nt, Human
ggagcccugggaggcucug

SEQ ID NO: 1479727 - RNA, 16 nt, Human
ggagcccugggaggcu

SEQ ID NO: 1479728 - RNA, 19 nt, Human
ggaggcagagaagaaagaa

SEQ ID NO: 1479729 - RNA, 17 nt, Human
ggaggcaggaguuucgu

SEQ ID NO: 1479730 - RNA, 15 nt, Human
ggaggcagagaagaa

SEQ ID NO: 1479731 - RNA, 14 nt, Human
ggaggcagagaaga

SEQ ID NO: 1479732 - RNA, 16 nt, Human
ggaggacccaggacag

SEQ ID NO: 1479733 - RNA, 15 nt, Human
ggaggacccagggcu

SEQ ID NO: 1479734 - RNA, 16 nt, Human
ggaggacccagggcuc

SEQ ID NO: 1479735 - RNA, 14 nt, Human
ggaggacccaggac

SEQ ID NO: 1479736 - RNA, 15 nt, Human
ggaggacccaggaca

SEQ ID NO: 1479737 - RNA, 19 nt, Human
ggaggacccagggcucugu

SEQ ID NO: 1479738 - RNA, 18 nt, Human
ggaggacccagggcucug

SEQ ID NO: 1479739 - RNA, 16 nt, Human
ggaggggcagagccag

SEQ ID NO: 1479740 - RNA, 15 nt, Human
ggaggggcagagcca

SEQ ID NO: 1479741 - RNA, 13 nt, Human
ggaggggcagagc

SEQ ID NO: 1479742 - RNA, 12 nt, Human
ggaggggcagag

SEQ ID NO: 1479743 - RNA, 16 nt, Human
ggagucaaaaauuaaa

SEQ ID NO: 1479744 - RNA, 15 nt, Human
ggagucacugagacc

SEQ ID NO: 1479745 - RNA, 18 nt, Human
ggacugagaaauuuauaa

SEQ ID NO: 1479746 - RNA, 11 nt, Human
ggagaagaacu

SEQ ID NO: 1479747 - RNA, 14 nt, Human
ggagaagaacugaa

SEQ ID NO: 1479748 - RNA, 12 nt, Human
ggagaaggaagg

SEQ ID NO: 1479749 - RNA, 19 nt, Human
ggagacagguuagcugcuc

SEQ ID NO: 1479750 - RNA, 14 nt, Human
ggacugagaaauuu

SEQ ID NO: 1479751 - RNA, 17 nt, Human
ggacugaauuaugaaac

SEQ ID NO: 1479752 - RNA, 19 nt, Human
ggacugaauuaugaaacuu

SEQ ID NO: 1479753 - RNA, 23 nt, Human
ggaccaggaguggguggggagug

SEQ ID NO: 1479754 - RNA, 17 nt, Human
ggacauuugcucaugga

SEQ ID NO: 1479755 - RNA, 20 nt, Human
ggacauuugcucauggaauu

SEQ ID NO: 1479756 - RNA, 12 nt, Human
ggaccagccucu

SEQ ID NO: 1479757 - RNA, 21 nt, Human
gcuuuuaugugaaacauguuu

SEQ ID NO: 1479758 - RNA, 20 nt, Human
gcuuuuaugugaaacauguu

SEQ ID NO: 1479759 - RNA, 19 nt, Human
gcuuuuaugugaaacaugu

SEQ ID NO: 1479760 - RNA, 22 nt, Human
ggauuccacucguguguuucua

SEQ ID NO: 1479761 - RNA, 18 nt, Human
ggauuccccaucucaggc

SEQ ID NO: 1479762 - RNA, 12 nt, Human
ggauuauauuau

SEQ ID NO: 1479763 - RNA, 19 nt, Human
ggauuaugggucacaggaa

SEQ ID NO: 1479764 - RNA, 18 nt, Human
ggaugaugacuauggaaa

SEQ ID NO: 1479765 - RNA, 22 nt, Human
ggaugauccccacgccacagcc

SEQ ID NO: 1479766 - RNA, 21 nt, Human
ggaugauccccacgccacagc

SEQ ID NO: 1479767 - RNA, 20 nt, Human
ggaugauccccacgccacag

SEQ ID NO: 1479768 - RNA, 16 nt, Human
ggaugauccccacgcc

SEQ ID NO: 1479769 - RNA, 14 nt, Human
ggagucacugagac

SEQ ID NO: 1479770 - RNA, 20 nt, Human
ggaugagggaaaagaaaaag

SEQ ID NO: 1479771 - RNA, 17 nt, Human
ggcagagccaggaagau

SEQ ID NO: 1479772 - RNA, 16 nt, Human
ggcagagccaggaaga

SEQ ID NO: 1479773 - RNA, 14 nt, Human
ggcagagccaggaa

SEQ ID NO: 1479774 - RNA, 13 nt, Human
ggcagagccagga

SEQ ID NO: 1479775 - RNA, 12 nt, Human
ggcagagccagg

SEQ ID NO: 1479776 - RNA, 18 nt, Human
ggcaagauugugucccau

SEQ ID NO: 1479777 - RNA, 13 nt, Human
ggcaugagaaaua

SEQ ID NO: 1479778 - RNA, 13 nt, Human
ggcagugggaaaa

SEQ ID NO: 1479779 - RNA, 15 nt, Human
ggcagugggaaaaau

SEQ ID NO: 1479780 - RNA, 14 nt, Human
ggcaguaauaaaaa

SEQ ID NO: 1479781 - RNA, 23 nt, Human
ggcauguguuuacuuuauguuac

SEQ ID NO: 1479782 - RNA, 23 nt, Human
ggcauguuagcccuuccuccaau

SEQ ID NO: 1479783 - RNA, 16 nt, Human
ggccacauagaugcug

SEQ ID NO: 1479784 - RNA, 19 nt, Human
gcucuugaugccuggcggg

SEQ ID NO: 1479785 - RNA, 22 nt, Human
gcucuccaaaccacuuuuugca

SEQ ID NO: 1479786 - RNA, 17 nt, Human
gcucuccaaaccacuuu

SEQ ID NO: 1479787 - RNA, 16 nt, Human
gcucuccaaaccacuu

SEQ ID NO: 1479788 - RNA, 13 nt, Human
gcucuuugguaga

SEQ ID NO: 1479789 - RNA, 18 nt, Human
gcucuuugguagaaaagg

SEQ ID NO: 1479790 - RNA, 22 nt, Human
gcucuuugguagaaaaggcuag

SEQ ID NO: 1479791 - RNA, 17 nt, Human
gcugacaugaagcuguu

SEQ ID NO: 1479792 - RNA, 21 nt, Human
gcugacaugaagcuguugugu

SEQ ID NO: 1479793 - RNA, 12 nt, Human
gcugaccagaca

SEQ ID NO: 1479794 - RNA, 21 nt, Human
gcugaccagccgugagcaugu

SEQ ID NO: 1479795 - RNA, 18 nt, Human
gcugcaguaugaaaauaa

SEQ ID NO: 1479796 - RNA, 20 nt, Human
gcugccaagagugaagggaa

SEQ ID NO: 1479797 - RNA, 23 nt, Human
gcugauuucuagguaggaaaugu

SEQ ID NO: 1479798 - RNA, 13 nt, Human
gcugauuucuagg

SEQ ID NO: 1479799 - RNA, 12 nt, Human
gcugauaauuuu

SEQ ID NO: 1479800 - RNA, 19 nt, Human
gcugauaauuuuaaauucu

SEQ ID NO: 1479801 - RNA, 13 nt, Human
gcugauaauuuua

SEQ ID NO: 1479802 - RNA, 14 nt, Human
gcugauaauuuuaa

SEQ ID NO: 1479803 - RNA, 16 nt, Human
gcugaucagugggccu

SEQ ID NO: 1479804 - RNA, 15 nt, Human
gcugauaauuuuaaa

SEQ ID NO: 1479805 - RNA, 17 nt, Human
gcugauauuuucucuag

SEQ ID NO: 1479806 - RNA, 9 nt, Human
gcugagacu

SEQ ID NO: 1479807 - RNA, 15 nt, Human
gcugagagaaaauaa

SEQ ID NO: 1479808 - RNA, 16 nt, Human
gcuggcauuacaggug

SEQ ID NO: 1479809 - RNA, 17 nt, Human
gcuggcaguccuggaag

SEQ ID NO: 1479810 - RNA, 17 nt, Human
gcuggaccucaccaagc

SEQ ID NO: 1479811 - RNA, 21 nt, Human
gcuggaaaaguauguuagugc

SEQ ID NO: 1479812 - RNA, 23 nt, Human
gcuggaaaaguauguuagugcaa

SEQ ID NO: 1479813 - RNA, 17 nt, Human
gcuggaaaauaauacug

SEQ ID NO: 1479814 - RNA, 22 nt, Human
gcuggaaaauaauacugcugag

SEQ ID NO: 1479815 - RNA, 21 nt, Human
gcuggaagacgcaagggccug

SEQ ID NO: 1479816 - RNA, 23 nt, Human
gcuggaagacgcaagggccugau

SEQ ID NO: 1479817 - RNA, 16 nt, Human
gcuguguggcagucug

SEQ ID NO: 1479818 - RNA, 14 nt, Human
gcuguggccaggag

SEQ ID NO: 1479819 - RNA, 18 nt, Human
gcugugggcaagccuaag

SEQ ID NO: 1479820 - RNA, 19 nt, Human
gcuguggccuaaccugccg

SEQ ID NO: 1479821 - RNA, 20 nt, Human
gcuguggccuaaccugccga

SEQ ID NO: 1479822 - RNA, 15 nt, Human
gcuguggccaggagg

SEQ ID NO: 1479823 - RNA, 16 nt, Human
gcuguggccaggaggu

SEQ ID NO: 1479824 - RNA, 20 nt, Human
gcuguggccaggaggugcca

SEQ ID NO: 1479825 - RNA, 18 nt, Human
gcuguggccaggaggugc

SEQ ID NO: 1479826 - RNA, 23 nt, Human
gcuguguuuggcuuucagggagg

SEQ ID NO: 1479827 - RNA, 18 nt, Human
gcugucaucaauuaaagg

SEQ ID NO: 1479828 - RNA, 21 nt, Human
gcugggaggagggcaggcauc

SEQ ID NO: 1479829 - RNA, 23 nt, Human
gcuggggaaaucaaaagggccaa

SEQ ID NO: 1479830 - RNA, 14 nt, Human
gcuggggaagacag

SEQ ID NO: 1479831 - RNA, 15 nt, Human
gcuggggaagacagu

SEQ ID NO: 1479832 - RNA, 16 nt, Human
gcuggggaagacagug

SEQ ID NO: 1479833 - RNA, 20 nt, Human
gcuggucucaaacuccugac

SEQ ID NO: 1479834 - RNA, 21 nt, Human
gcuggggaagacaguggcccc

SEQ ID NO: 1479835 - RNA, 18 nt, Human
gcuggggacagguccuca

SEQ ID NO: 1479836 - RNA, 15 nt, Human
gcuuuuaugugaaac

SEQ ID NO: 1479837 - RNA, 13 nt, Human
gcuuuuaugugaa

SEQ ID NO: 1479838 - RNA, 21 nt, Human
gcuuuuaguauuuuagugaac

SEQ ID NO: 1479839 - RNA, 17 nt, Human
gcuuuggugagaaccug

SEQ ID NO: 1479840 - RNA, 15 nt, Human
gcuuuccaugggacc

SEQ ID NO: 1479841 - RNA, 18 nt, Human
gcuuucagggaggcccug

SEQ ID NO: 1479842 - RNA, 13 nt, Human
gcuuguugugcuu

SEQ ID NO: 1479843 - RNA, 16 nt, Human
gcuuguugugcuuuua

SEQ ID NO: 1479844 - RNA, 13 nt, Human
gcuugccugcagg

SEQ ID NO: 1479845 - RNA, 14 nt, Human
gcuugccugcaggc

SEQ ID NO: 1479846 - RNA, 18 nt, Human
gcuuguggcaagugaauu

SEQ ID NO: 1479847 - RNA, 19 nt, Human
gcuucuguuuuauaauuuu

SEQ ID NO: 1479848 - RNA, 17 nt, Human
gcuucucauccugcagg

SEQ ID NO: 1479849 - RNA, 18 nt, Human
gcuucucauccugcaggc

SEQ ID NO: 1479850 - RNA, 22 nt, Human
gcuucucagauuucugaggaaa

SEQ ID NO: 1479851 - RNA, 16 nt, Human
gcuucucauccugcag

SEQ ID NO: 1479852 - RNA, 21 nt, Human
gcuucucagauuucugaggaa

SEQ ID NO: 1479853 - RNA, 22 nt, Human
gcuucauucaagucagcucuuc

SEQ ID NO: 1479854 - RNA, 12 nt, Human
gcuuccaauuuu

SEQ ID NO: 1479855 - RNA, 21 nt, Human
gcuuccacguacugcagccuc

SEQ ID NO: 1479856 - RNA, 18 nt, Human
gcuuaucaacuaaugauu

SEQ ID NO: 1479857 - RNA, 14 nt, Human
gcuucaucuggcaa

SEQ ID NO: 1479858 - RNA, 17 nt, Human
gcuuacugauauauuuu

SEQ ID NO: 1479859 - RNA, 21 nt, Human
gcuuacugauauauuuuacaa

SEQ ID NO: 1479860 - RNA, 22 nt, Human
gcuccuccaggguggcagcaac

SEQ ID NO: 1479861 - RNA, 21 nt, Human
gcuccuccaggguggcagcaa

SEQ ID NO: 1479862 - RNA, 21 nt, Human
gcuccuauucaacacacacau

SEQ ID NO: 1479863 - RNA, 21 nt, Human
gcuccucaaccccuccccucc

SEQ ID NO: 1479864 - RNA, 22 nt, Human
gcuccucaaccccuccccucca

SEQ ID NO: 1479865 - RNA, 18 nt, Human
gcuccucagggacucagg

SEQ ID NO: 1479866 - RNA, 19 nt, Human
gcuccucagggacucaggu

SEQ ID NO: 1479867 - RNA, 20 nt, Human
gcuccucagggacucaggug

SEQ ID NO: 1479868 - RNA, 23 nt, Human
gcuccgugugggagaccggccug

SEQ ID NO: 1479869 - RNA, 22 nt, Human
gcuccgugugggagaccggccu

SEQ ID NO: 1479870 - RNA, 22 nt, Human
gcuccguccaggagccugugcc

SEQ ID NO: 1479871 - RNA, 23 nt, Human
gcuccguccaggagccugugccu

SEQ ID NO: 1479872 - RNA, 15 nt, Human
gcuccuuaaggcucu

SEQ ID NO: 1479873 - RNA, 17 nt, Human
gcuccuuaaggcucuuu

SEQ ID NO: 1479874 - RNA, 21 nt, Human
gcuccuuaaggcucuuuugua

SEQ ID NO: 1479875 - RNA, 14 nt, Human
gcucauuucaggau

SEQ ID NO: 1479876 - RNA, 19 nt, Human
gcucccacagaacacagca

SEQ ID NO: 1479877 - RNA, 13 nt, Human
gcucccacagaac

SEQ ID NO: 1479878 - RNA, 18 nt, Human
gcucauggacuucugcca

SEQ ID NO: 1479879 - RNA, 16 nt, Human
gcucagcccugcacca

SEQ ID NO: 1479880 - RNA, 12 nt, Human
gcucagcccugc

SEQ ID NO: 1479881 - RNA, 16 nt, Human
gcuaucguaaaauuaa

SEQ ID NO: 1479882 - RNA, 15 nt, Human
gcuaucguaaaauua

SEQ ID NO: 1479883 - RNA, 17 nt, Human
gcuaucguaaaauuaag

SEQ ID NO: 1479884 - RNA, 14 nt, Human
gcucacaaaccaug

SEQ ID NO: 1479885 - RNA, 12 nt, Human
gcuauccaccaa

SEQ ID NO: 1479886 - RNA, 17 nt, Human
gcuauauaagacaagaa

SEQ ID NO: 1479887 - RNA, 21 nt, Human
gcuauacugcauacuuuuuaa

SEQ ID NO: 1479888 - RNA, 14 nt, Human
gcuagauguaugua

SEQ ID NO: 1479889 - RNA, 16 nt, Human
gcuagauguauguacu

SEQ ID NO: 1479890 - RNA, 13 nt, Human
gcuagauguaugu

SEQ ID NO: 1479891 - RNA, 22 nt, Human
gcgcccuuaacugcauccagcc

SEQ ID NO: 1479892 - RNA, 21 nt, Human
gcgccucgccggaucugaggg

SEQ ID NO: 1479893 - RNA, 17 nt, Human
gcgaagcguuguccuca

SEQ ID NO: 1479894 - RNA, 17 nt, Human
gccuuucuucucuccag

SEQ ID NO: 1479895 - RNA, 16 nt, Human
gccuuguuuuuuucua

SEQ ID NO: 1479896 - RNA, 18 nt, Human
gccuuucccuaagccagc

SEQ ID NO: 1479897 - RNA, 15 nt, Human
gccuugucacgccag

SEQ ID NO: 1479898 - RNA, 16 nt, Human
gccuugucacgccaga

SEQ ID NO: 1479899 - RNA, 17 nt, Human
gccuugucacgccagac

SEQ ID NO: 1479900 - RNA, 15 nt, Human
gccuuguuuuuuucu

SEQ ID NO: 1479901 - RNA, 24 nt, Human
gccugcaggaucucaccaggcagc

SEQ ID NO: 1479902 - RNA, 13 nt, Human
gccugcaggaucu

SEQ ID NO: 1479903 - RNA, 16 nt, Human
gccugcaggaucucac

SEQ ID NO: 1479904 - RNA, 23 nt, Human
gccugcaggaucucaccaggcag

SEQ ID NO: 1479905 - RNA, 16 nt, Human
gccuggaccagccucu

SEQ ID NO: 1479906 - RNA, 17 nt, Human
gccuggaccagccucuc

SEQ ID NO: 1479907 - RNA, 22 nt, Human
gccugcauccauucuccugagg

SEQ ID NO: 1479908 - RNA, 21 nt, Human
gccugcauccauucuccugag

SEQ ID NO: 1479909 - RNA, 21 nt, Human
gccugcauugagcuugcaugc

SEQ ID NO: 1479910 - RNA, 16 nt, Human
gccugcauugagcuug

SEQ ID NO: 1479911 - RNA, 15 nt, Human
gccuggaagagcagc

SEQ ID NO: 1479912 - RNA, 17 nt, Human
gccuggaagagcagccc

SEQ ID NO: 1479913 - RNA, 20 nt, Human
gccugguauauccaaaagcu

SEQ ID NO: 1479914 - RNA, 22 nt, Human
gccuggguguaaaaccuggaga

SEQ ID NO: 1479915 - RNA, 19 nt, Human
gccuggguguaaaaccugg

SEQ ID NO: 1479916 - RNA, 16 nt, Human
gccugggcaggaggga

SEQ ID NO: 1479917 - RNA, 13 nt, Human
gccaccugucugu

SEQ ID NO: 1479918 - RNA, 12 nt, Human
gccaccugucug

SEQ ID NO: 1479919 - RNA, 10 nt, Human
gccaccuguc

SEQ ID NO: 1479920 - RNA, 15 nt, Human
gccaccugucugucu

SEQ ID NO: 1479921 - RNA, 14 nt, Human
gccaccugucuguc

SEQ ID NO: 1479922 - RNA, 18 nt, Human
gccacggggacucagccc

SEQ ID NO: 1479923 - RNA, 16 nt, Human
gccaccugaauaaaga

SEQ ID NO: 1479924 - RNA, 14 nt, Human
gccacaguuccccu

SEQ ID NO: 1479925 - RNA, 15 nt, Human
gccacaguuccccua

SEQ ID NO: 1479926 - RNA, 21 nt, Human
gccagacuucccacggcuccu

SEQ ID NO: 1479927 - RNA, 19 nt, Human
gccaagggcauaaauuauu

SEQ ID NO: 1479928 - RNA, 18 nt, Human
gccaaggggcuucagguc

SEQ ID NO: 1479929 - RNA, 21 nt, Human
gccaaugcaccuaaagaaaaa

SEQ ID NO: 1479930 - RNA, 19 nt, Human
gccaaugcaccuaaagaaa

SEQ ID NO: 1479931 - RNA, 13 nt, Human
gccacaccaggau

SEQ ID NO: 1479932 - RNA, 16 nt, Human
gccacaccaggauaga

SEQ ID NO: 1479933 - RNA, 13 nt, Human
gccacagcccuuu

SEQ ID NO: 1479934 - RNA, 20 nt, Human
gccacagcccuuuugucucu

SEQ ID NO: 1479935 - RNA, 20 nt, Human
gccaauuucaaguuccaagu

SEQ ID NO: 1479936 - RNA, 21 nt, Human
gccacaccaggauagagacug

SEQ ID NO: 1479937 - RNA, 19 nt, Human
gccaugggcacugugggua

SEQ ID NO: 1479938 - RNA, 14 nt, Human
gccaugggaggccu

SEQ ID NO: 1479939 - RNA, 15 nt, Human
gccaugggaggccuu

SEQ ID NO: 1479940 - RNA, 12 nt, Human
gccaugggaggc

SEQ ID NO: 1479941 - RNA, 15 nt, Human
gccaugcagaaagca

SEQ ID NO: 1479942 - RNA, 17 nt, Human
gccagugaccaaccuuu

SEQ ID NO: 1479943 - RNA, 14 nt, Human
gccagggagcgagu

SEQ ID NO: 1479944 - RNA, 19 nt, Human
gccaggcuggagugcagug

SEQ ID NO: 1479945 - RNA, 18 nt, Human
gccaggcuggagugcagu

SEQ ID NO: 1479946 - RNA, 13 nt, Human
gccaggcuggguc

SEQ ID NO: 1479947 - RNA, 16 nt, Human
gccaggcuggagugca

SEQ ID NO: 1479948 - RNA, 19 nt, Human
gccagauuuuccugaaaac

SEQ ID NO: 1479949 - RNA, 16 nt, Human
gcccagcccuaaacau

SEQ ID NO: 1479950 - RNA, 14 nt, Human
gcccaaugaaauga

SEQ ID NO: 1479951 - RNA, 15 nt, Human
gcaggucccuaauaa

SEQ ID NO: 1479952 - RNA, 14 nt, Human
gcaggucccuaaua

SEQ ID NO: 1479953 - RNA, 19 nt, Human
gcaggccgugacgucuggg

SEQ ID NO: 1479954 - RNA, 20 nt, Human
gcaggccgugacgucugggu

SEQ ID NO: 1479955 - RNA, 21 nt, Human
gcaggcaucggggagccggga

SEQ ID NO: 1479956 - RNA, 22 nt, Human
gcaggcaucggggagccgggag

SEQ ID NO: 1479957 - RNA, 15 nt, Human
gcaggcaggcuccca

SEQ ID NO: 1479958 - RNA, 22 nt, Human
gcaggcaggaacaaacagggcu

SEQ ID NO: 1479959 - RNA, 18 nt, Human
gcaggcaggcucccaggg

SEQ ID NO: 1479960 - RNA, 17 nt, Human
gcaggcaggcucccagg

SEQ ID NO: 1479961 - RNA, 18 nt, Human
gcaggcaggaacaaacag

SEQ ID NO: 1479962 - RNA, 23 nt, Human
gcaggcaucggggagccgggagc

SEQ ID NO: 1479963 - RNA, 20 nt, Human
gcaggccaagucaggcccuu

SEQ ID NO: 1479964 - RNA, 19 nt, Human
gcaggucccuaauaaagcu

SEQ ID NO: 1479965 - RNA, 18 nt, Human
gcaggucccuaauaaagc

SEQ ID NO: 1479966 - RNA, 17 nt, Human
gcaggucccuaauaaag

SEQ ID NO: 1479967 - RNA, 16 nt, Human
gcaggucccuaauaaa

SEQ ID NO: 1479968 - RNA, 21 nt, Human
gcaggucccuaauaaagcugu

SEQ ID NO: 1479969 - RNA, 20 nt, Human
gcaggucccuaauaaagcug

SEQ ID NO: 1479970 - RNA, 23 nt, Human
gcaggucccuaauaaagcugugu

SEQ ID NO: 1479971 - RNA, 22 nt, Human
gcaguggcgugaucucagcuca

SEQ ID NO: 1479972 - RNA, 17 nt, Human
gcagugggaaaaaugua

SEQ ID NO: 1479973 - RNA, 19 nt, Human
gcagugggaaaaauguagg

SEQ ID NO: 1479974 - RNA, 14 nt, Human
gcagugggaaaaau

SEQ ID NO: 1479975 - RNA, 15 nt, Human
gcaucaucucagcuc

SEQ ID NO: 1479976 - RNA, 13 nt, Human
gcaucauggcuau

SEQ ID NO: 1479977 - RNA, 19 nt, Human
gcaucaggccuagaggccu

SEQ ID NO: 1479978 - RNA, 23 nt, Human
gcauuaaauuuuagcaaagauau

SEQ ID NO: 1479979 - RNA, 21 nt, Human
gcauugaauggcuauguuuuu

SEQ ID NO: 1479980 - RNA, 16 nt, Human
gcauugagcuugcaug

SEQ ID NO: 1479981 - RNA, 19 nt, Human
gcauugaauggcuauguuu

SEQ ID NO: 1479982 - RNA, 15 nt, Human
gcacagccucuuaga

SEQ ID NO: 1479983 - RNA, 20 nt, Human
gauugugucccauuccccca

SEQ ID NO: 1479984 - RNA, 19 nt, Human
gauugugucccauuccccc

SEQ ID NO: 1479985 - RNA, 18 nt, Human
gauugugucccauucccc

SEQ ID NO: 1479986 - RNA, 17 nt, Human
gauugugucccauuccc

SEQ ID NO: 1479987 - RNA, 18 nt, Human
gcacagccucuuagaugc

SEQ ID NO: 1479988 - RNA, 17 nt, Human
gcacagggagugcacau

SEQ ID NO: 1479989 - RNA, 22 nt, Human
gcacagggagugcacauaucca

SEQ ID NO: 1479990 - RNA, 20 nt, Human
gcaccaucucugauuuucaa

SEQ ID NO: 1479991 - RNA, 16 nt, Human
gcacuggcgaggagag

SEQ ID NO: 1479992 - RNA, 15 nt, Human
gcacuggcgaggaga

SEQ ID NO: 1479993 - RNA, 15 nt, Human
gcacuggccccaccc

SEQ ID NO: 1479994 - RNA, 14 nt, Human
gcacuggccccacc

SEQ ID NO: 1479995 - RNA, 17 nt, Human
gcacccucauacacaga

SEQ ID NO: 1479996 - RNA, 20 nt, Human
gcacccucauacacagaaac

SEQ ID NO: 1479997 - RNA, 20 nt, Human
gcacgcggagugaguuuuuu

SEQ ID NO: 1479998 - RNA, 18 nt, Human
gcacgugguaaaacacuu

SEQ ID NO: 1479999 - RNA, 23 nt, Human
gcacuucuuuuucucgcuguccu

SEQ ID NO: 1480000 - RNA, 20 nt, Human
gcagacucuuuaugcuugca

SEQ ID NO: 1480001 - RNA, 14 nt, Human
gcagccucuggggg

SEQ ID NO: 1480002 - RNA, 15 nt, Human
gcagccucugggggg

SEQ ID NO: 1480003 - RNA, 22 nt, Human
gcagccucugggggguggccag

SEQ ID NO: 1480004 - RNA, 23 nt, Human
gcagccucugggggguggccagg

SEQ ID NO: 1480005 - RNA, 18 nt, Human
gcaggaacaaacagggcu

SEQ ID NO: 1480006 - RNA, 16 nt, Human
gcaggaacaaacaggg

SEQ ID NO: 1480007 - RNA, 23 nt, Human
gcaggaaggacuaugaaaagcua

SEQ ID NO: 1480008 - RNA, 21 nt, Human
gauuaacagguaugaaccacc

SEQ ID NO: 1480009 - RNA, 22 nt, Human
gauguuaaaaaaauaagaagaa

SEQ ID NO: 1480010 - RNA, 18 nt, Human
gauguguuugcuuucuga

SEQ ID NO: 1480011 - RNA, 14 nt, Human
gauguguuugcuuu

SEQ ID NO: 1480012 - RNA, 16 nt, Human
gauguguuugcuuucu

SEQ ID NO: 1480013 - RNA, 21 nt, Human
gauugaaguauuuugcuggaa

SEQ ID NO: 1480014 - RNA, 23 nt, Human
gauugaaguauuuugcuggaaua

SEQ ID NO: 1480015 - RNA, 15 nt, Human
gauugucuuaauauu

SEQ ID NO: 1480016 - RNA, 14 nt, Human
gauucaaucuguaa

SEQ ID NO: 1480017 - RNA, 16 nt, Human
gauucaaucuguaaac

SEQ ID NO: 1480018 - RNA, 18 nt, Human
gauucaaucuguaaacug

SEQ ID NO: 1480019 - RNA, 19 nt, Human
gauucaaucuguaaacugu

SEQ ID NO: 1480020 - RNA, 16 nt, Human
gauucacaucucauuu

SEQ ID NO: 1480021 - RNA, 15 nt, Human
gauucacaucucauu

SEQ ID NO: 1480022 - RNA, 13 nt, Human
gauucccagagca

SEQ ID NO: 1480023 - RNA, 19 nt, Human
gauucccagagcaaaauaa

SEQ ID NO: 1480024 - RNA, 17 nt, Human
gauuccccaucucaggc

SEQ ID NO: 1480025 - RNA, 20 nt, Human
gauuccccaucucaggccag

SEQ ID NO: 1480026 - RNA, 16 nt, Human
gauuccgcagugagag

SEQ ID NO: 1480027 - RNA, 15 nt, Human
gauuccugagccagu

SEQ ID NO: 1480028 - RNA, 14 nt, Human
gaugacuauggaaa

SEQ ID NO: 1480029 - RNA, 14 nt, Human
gaugaaaauaaaga

SEQ ID NO: 1480030 - RNA, 15 nt, Human
gaugaaaauaaagaa

SEQ ID NO: 1480031 - RNA, 16 nt, Human
gaugaaaauaaagaau

SEQ ID NO: 1480032 - RNA, 12 nt, Human
gaugacuaaaau

SEQ ID NO: 1480033 - RNA, 15 nt, Human
gaugacuaaaauauu

SEQ ID NO: 1480034 - RNA, 18 nt, Human
gaugacuaaaauauuuau

SEQ ID NO: 1480035 - RNA, 18 nt, Human
gaugcaguucugaagaag

SEQ ID NO: 1480036 - RNA, 21 nt, Human
gaugccuggcgggguggggug

SEQ ID NO: 1480037 - RNA, 18 nt, Human
gauggcaaccagaccauu

SEQ ID NO: 1480038 - RNA, 19 nt, Human
gauccuguguggagaggga

SEQ ID NO: 1480039 - RNA, 20 nt, Human
gauccuguguggagagggaa

SEQ ID NO: 1480040 - RNA, 11 nt, Human
gaugaaaauaa

SEQ ID NO: 1480041 - RNA, 18 nt, Human
gauccuauccuccuaccu

SEQ ID NO: 1480042 - RNA, 16 nt, Human
gagucucugaggggcu

SEQ ID NO: 1480043 - RNA, 16 nt, Human
gagucccugccuggac

SEQ ID NO: 1480044 - RNA, 19 nt, Human
gagucccugccuggaccag

SEQ ID NO: 1480045 - RNA, 17 nt, Human
gagucguacagaaagcu

SEQ ID NO: 1480046 - RNA, 22 nt, Human
gagucguacagaaagcugccug

SEQ ID NO: 1480047 - RNA, 15 nt, Human
gagucaaaaauuaaa

SEQ ID NO: 1480048 - RNA, 19 nt, Human
gaguagcugggacuacagg

SEQ ID NO: 1480049 - RNA, 14 nt, Human
gagucccugccugg

SEQ ID NO: 1480050 - RNA, 15 nt, Human
gagucccugccugga

SEQ ID NO: 1480051 - RNA, 18 nt, Human
gaguaaagaauuauuuug

SEQ ID NO: 1480052 - RNA, 21 nt, Human
gaguugaaaaucuuauaauuu

SEQ ID NO: 1480053 - RNA, 21 nt, Human
gaguuuuccauggcaggaagg

SEQ ID NO: 1480054 - RNA, 18 nt, Human
gaguuuuccauggcagga

SEQ ID NO: 1480055 - RNA, 12 nt, Human
gaguuccugcau

SEQ ID NO: 1480056 - RNA, 14 nt, Human
gaguuccugcaugc

SEQ ID NO: 1480057 - RNA, 12 nt, Human
gagugugaccaa

SEQ ID NO: 1480058 - RNA, 21 nt, Human
gagugugaccaaaaguuacau

SEQ ID NO: 1480059 - RNA, 20 nt, Human
gagugugaccaaaaguuaca

SEQ ID NO: 1480060 - RNA, 14 nt, Human
gaguggcuggggca

SEQ ID NO: 1480061 - RNA, 17 nt, Human
gaguggcuggggcaugg

SEQ ID NO: 1480062 - RNA, 13 nt, Human
gaguggcuggggc

SEQ ID NO: 1480063 - RNA, 23 nt, Human
gauagagacuggaacacuagaca

SEQ ID NO: 1480064 - RNA, 14 nt, Human
gauagaaugacagu

SEQ ID NO: 1480065 - RNA, 12 nt, Human
gauagaaugaca

SEQ ID NO: 1480066 - RNA, 16 nt, Human
gaguuuuuuguaccaa

SEQ ID NO: 1480067 - RNA, 14 nt, Human
gauaaugaacagaa

SEQ ID NO: 1480068 - RNA, 13 nt, Human
gauaaugaacaga

SEQ ID NO: 1480069 - RNA, 21 nt, Human
gauaaugugauauuauacaua

SEQ ID NO: 1480070 - RNA, 21 nt, Human
gauauaaguguguguuuuuca

SEQ ID NO: 1480071 - RNA, 14 nt, Human
gauauauuuuacaa

SEQ ID NO: 1480072 - RNA, 23 nt, Human
gauauauuuuacaauuuuuuauc

SEQ ID NO: 1480073 - RNA, 20 nt, Human
gaggaggcagagaagaaaga

SEQ ID NO: 1480074 - RNA, 16 nt, Human
gaggaggcagagaaga

SEQ ID NO: 1480075 - RNA, 13 nt, Human
gaggagggcaggc

SEQ ID NO: 1480076 - RNA, 14 nt, Human
gaggagggcaggca

SEQ ID NO: 1480077 - RNA, 15 nt, Human
gaggagggcaggcau

SEQ ID NO: 1480078 - RNA, 14 nt, Human
gaggacacaugucc

SEQ ID NO: 1480079 - RNA, 13 nt, Human
gaggacacauguc

SEQ ID NO: 1480080 - RNA, 12 nt, Human
gaggacacaugu

SEQ ID NO: 1480081 - RNA, 11 nt, Human
gaggacacaug

SEQ ID NO: 1480082 - RNA, 22 nt, Human
gaggaauuuucuuuguguagcu

SEQ ID NO: 1480083 - RNA, 14 nt, Human
gaggaauuucaccu

SEQ ID NO: 1480084 - RNA, 15 nt, Human
gaggacaaccauucc

SEQ ID NO: 1480085 - RNA, 21 nt, Human
gaggaaggaggacccaggaca

SEQ ID NO: 1480086 - RNA, 18 nt, Human
gaggaaggaggacccagg

SEQ ID NO: 1480087 - RNA, 16 nt, Human
gaggaaggaggaccca

SEQ ID NO: 1480088 - RNA, 22 nt, Human
gagcuugaaacccguggcgcuu

SEQ ID NO: 1480089 - RNA, 17 nt, Human
gaggcacaugucagcaa

SEQ ID NO: 1480090 - RNA, 13 nt, Human
gaggauacgacag

SEQ ID NO: 1480091 - RNA, 16 nt, Human
gagggagaacaagacc

SEQ ID NO: 1480092 - RNA, 14 nt, Human
gaggcuuuccaugg

SEQ ID NO: 1480093 - RNA, 14 nt, Human
gagggaaugugaaa

SEQ ID NO: 1480094 - RNA, 18 nt, Human
gaggcuacuguaaggcaa

SEQ ID NO: 1480095 - RNA, 23 nt, Human
gaggcugggaauggaggggcaga

SEQ ID NO: 1480096 - RNA, 14 nt, Human
gaggcuuccuucau

SEQ ID NO: 1480097 - RNA, 22 nt, Human
gaggcccugugccccuugacaa

SEQ ID NO: 1480098 - RNA, 20 nt, Human
gaggccugacugccaagcca

SEQ ID NO: 1480099 - RNA, 14 nt, Human
gagcuacaaaugca

SEQ ID NO: 1480100 - RNA, 23 nt, Human
gagcucaggaaccgaggcaggga

SEQ ID NO: 1480101 - RNA, 11 nt, Human
gagcuacugcc

SEQ ID NO: 1480102 - RNA, 20 nt, Human
gagcuacguauuuaauagca

SEQ ID NO: 1480103 - RNA, 11 nt, Human
gagcucaggau

SEQ ID NO: 1480104 - RNA, 15 nt, Human
gagcuacauaauuua

SEQ ID NO: 1480105 - RNA, 15 nt, Human
gagcuacguauuuaa

SEQ ID NO: 1480106 - RNA, 12 nt, Human
gagcucaggaug

SEQ ID NO: 1480107 - RNA, 13 nt, Human
gagcucaggauga

SEQ ID NO: 1480108 - RNA, 23 nt, Human
gagcucaggaugagggaaaagaa

SEQ ID NO: 1480109 - RNA, 19 nt, Human
gagcugauggagaaggaag

SEQ ID NO: 1480110 - RNA, 18 nt, Human
gagcugauggagaaggaa

SEQ ID NO: 1480111 - RNA, 17 nt, Human
gagcucuucauguuuca

SEQ ID NO: 1480112 - RNA, 12 nt, Human
gagcugccaaga

SEQ ID NO: 1480113 - RNA, 15 nt, Human
gagccugcaggaucu

SEQ ID NO: 1480114 - RNA, 13 nt, Human
gagccugcaggau

SEQ ID NO: 1480115 - RNA, 18 nt, Human
gagccuccuuucuggcuu

SEQ ID NO: 1480116 - RNA, 13 nt, Human
gagcuacaaaugc

SEQ ID NO: 1480117 - RNA, 12 nt, Human
gagcuacaaaug

SEQ ID NO: 1480118 - RNA, 23 nt, Human
gagccuggcuccguccaggagcc

SEQ ID NO: 1480119 - RNA, 20 nt, Human
gagaucaggaagagaaggag

SEQ ID NO: 1480120 - RNA, 13 nt, Human
gagaucaggaaga

SEQ ID NO: 1480121 - RNA, 15 nt, Human
gagauccuuaucgaa

SEQ ID NO: 1480122 - RNA, 12 nt, Human
gagcaaaauaau

SEQ ID NO: 1480123 - RNA, 22 nt, Human
gagcaccgccugugaaauacca

SEQ ID NO: 1480124 - RNA, 22 nt, Human
gagcacaagaggagauccaggg

SEQ ID NO: 1480125 - RNA, 13 nt, Human
gagcacugcucca

SEQ ID NO: 1480126 - RNA, 12 nt, Human
gagccauguuuc

SEQ ID NO: 1480127 - RNA, 16 nt, Human
gaaccugaugaaaaua

SEQ ID NO: 1480128 - RNA, 21 nt, Human
gaaccuggguugcagacagga

SEQ ID NO: 1480129 - RNA, 22 nt, Human
gaacuagaguuuagcuggaaaa

SEQ ID NO: 1480130 - RNA, 15 nt, Human
gaacgucuuaucuaa

SEQ ID NO: 1480131 - RNA, 17 nt, Human
gaacuaggcugagcaau

SEQ ID NO: 1480132 - RNA, 15 nt, Human
gaacuaggcugagca

SEQ ID NO: 1480133 - RNA, 18 nt, Human
gaacuagccaaaccagga

SEQ ID NO: 1480134 - RNA, 15 nt, Human
gaaccugaugaaaau

SEQ ID NO: 1480135 - RNA, 20 nt, Human
gaaccugaugaaaauaaaga

SEQ ID NO: 1480136 - RNA, 19 nt, Human
gaaccuaauucaauucaaa

SEQ ID NO: 1480137 - RNA, 23 nt, Human
gaacagaacauagacagaagaaa

SEQ ID NO: 1480138 - RNA, 21 nt, Human
gaacuugaggacacaugucca

SEQ ID NO: 1480139 - RNA, 19 nt, Human
gaacuugaggacacauguc

SEQ ID NO: 1480140 - RNA, 18 nt, Human
gaacuugaggacacaugu

SEQ ID NO: 1480141 - RNA, 17 nt, Human
gaacuugaggacacaug

SEQ ID NO: 1480142 - RNA, 16 nt, Human
gaacuugaggacacau

SEQ ID NO: 1480143 - RNA, 15 nt, Human
gaacuugaggacaca

SEQ ID NO: 1480144 - RNA, 14 nt, Human
gaacuugaggacac

SEQ ID NO: 1480145 - RNA, 13 nt, Human
gaacuugaggaca

SEQ ID NO: 1480146 - RNA, 15 nt, Human
gaacuugacccugag

SEQ ID NO: 1480147 - RNA, 22 nt, Human
gaacuuccagauccuggaaauc

SEQ ID NO: 1480148 - RNA, 21 nt, Human
gaacugucucucaugaaccuc

SEQ ID NO: 1480149 - RNA, 17 nt, Human
gaacugucucucaugaa

SEQ ID NO: 1480150 - RNA, 22 nt, Human
gaacuuguaaaggaauuuaaaa

SEQ ID NO: 1480151 - RNA, 13 nt, Human
gaagaaaaagaag

SEQ ID NO: 1480152 - RNA, 14 nt, Human
gaagaaaaagaagc

SEQ ID NO: 1480153 - RNA, 19 nt, Human
gaagaaagaacggaagaag

SEQ ID NO: 1480154 - RNA, 16 nt, Human
gaagaaagaacggaag

SEQ ID NO: 1480155 - RNA, 20 nt, Human
gaagaaacaagguuuucagu

SEQ ID NO: 1480156 - RNA, 21 nt, Human
gaagaagcaccaaucaugaau

SEQ ID NO: 1480157 - RNA, 21 nt, Human
gaacuuguaaaggaauuuaaa

SEQ ID NO: 1480158 - RNA, 13 nt, Human
gaaauauuauguu

SEQ ID NO: 1480159 - RNA, 16 nt, Human
gaaauauuauguuaaa

SEQ ID NO: 1480160 - RNA, 16 nt, Human
gaaauggcuuugugau

SEQ ID NO: 1480161 - RNA, 23 nt, Human
gaaauuaagacuuuauguaguuu

SEQ ID NO: 1480162 - RNA, 17 nt, Human
gaaauuacacccaaaga

SEQ ID NO: 1480163 - RNA, 16 nt, Human
gaaauuggaagagcac

SEQ ID NO: 1480164 - RNA, 18 nt, Human
gaaauugcuuuguauugu

SEQ ID NO: 1480165 - RNA, 17 nt, Human
gaaauugccugacgaac

SEQ ID NO: 1480166 - RNA, 15 nt, Human
gaaauugauuuugaa

SEQ ID NO: 1480167 - RNA, 22 nt, Human
gaaauuuuaaccuaugauauuu

SEQ ID NO: 1480168 - RNA, 15 nt, Human
gaaauuuuauaugcu

SEQ ID NO: 1480169 - RNA, 19 nt, Human
gaaauuuuauaugcuuacu

SEQ ID NO: 1480170 - RNA, 22 nt, Human
gaaauuuuauaugcuuacugau

SEQ ID NO: 1480171 - RNA, 13 nt, Human
gaaauuuaaacua

SEQ ID NO: 1480172 - RNA, 14 nt, Human
gaaauuuaaacuau

SEQ ID NO: 1480173 - RNA, 20 nt, Human
gaaauuuaaacuauaagcaa

SEQ ID NO: 1480174 - RNA, 23 nt, Human
gaaauuuaaacuauaagcaagaa

SEQ ID NO: 1480175 - RNA, 11 nt, Human
gaaacauuugg

SEQ ID NO: 1480176 - RNA, 13 nt, Human
gaaacauuuauau

SEQ ID NO: 1480177 - RNA, 21 nt, Human
gaaauaaauguaucauagaaa

SEQ ID NO: 1480178 - RNA, 21 nt, Human
gaaauaaguuuuuguuucaca

SEQ ID NO: 1480179 - RNA, 21 nt, Human
gaaauauacuuuuacaaguaa

SEQ ID NO: 1480180 - RNA, 23 nt, Human
gaaauauacuuuuacaaguaaca

SEQ ID NO: 1480181 - RNA, 19 nt, Human
gaaauaucuucacuuguca

SEQ ID NO: 1480182 - RNA, 20 nt, Human
gaaauaugaagaacugagga

SEQ ID NO: 1480183 - RNA, 18 nt, Human
gaaauacaaaaauacuca

SEQ ID NO: 1480184 - RNA, 13 nt, Human
gaaauacaaaaau

SEQ ID NO: 1480185 - RNA, 14 nt, Human
gaaauacaaaaaua

SEQ ID NO: 1480186 - RNA, 17 nt, Human
gaaauacuacuguguaa

SEQ ID NO: 1480187 - RNA, 14 nt, Human
gaauacuuuauaaa

SEQ ID NO: 1480188 - RNA, 17 nt, Human
gaauaagguacaagaag

SEQ ID NO: 1480189 - RNA, 19 nt, Human
gaauaagguacaagaagca

SEQ ID NO: 1480190 - RNA, 20 nt, Human
gaauaagguacaagaagcau

SEQ ID NO: 1480191 - RNA, 23 nt, Human
gaauaagguacaagaagcauuuu

SEQ ID NO: 1480192 - RNA, 13 nt, Human
gaauaaagcaauu

SEQ ID NO: 1480193 - RNA, 11 nt, Human
gaauaaagcaa

SEQ ID NO: 1480194 - RNA, 17 nt, Human
gaauaaagaaugaaugg

SEQ ID NO: 1480195 - RNA, 12 nt, Human
gaauaaaauuuu

SEQ ID NO: 1480196 - RNA, 11 nt, Human
gaaguuucauc

SEQ ID NO: 1480197 - RNA, 19 nt, Human
gaaguaaaagcaaaaaaga

SEQ ID NO: 1480198 - RNA, 20 nt, Human
gaaucacuguuuagaacaca

SEQ ID NO: 1480199 - RNA, 19 nt, Human
gaauccccaacaugcacug

SEQ ID NO: 1480200 - RNA, 23 nt, Human
gaaucagagaccuuccagaaaua

SEQ ID NO: 1480201 - RNA, 18 nt, Human
gaaucagccuacaggccu

SEQ ID NO: 1480202 - RNA, 23 nt, Human
gaaucucaguugauuuucuggau

SEQ ID NO: 1480203 - RNA, 21 nt, Human
gaaucuuaagguguagccaca

SEQ ID NO: 1480204 - RNA, 20 nt, Human
gaauccuaggcuccacccca

SEQ ID NO: 1480205 - RNA, 22 nt, Human
gaaucuuaagguguagccacac

SEQ ID NO: 1480206 - RNA, 15 nt, Human
gaaucuugguuugcc

SEQ ID NO: 1480207 - RNA, 20 nt, Human
gaaucuugguuugccuucca

SEQ ID NO: 1480208 - RNA, 23 nt, Human
gaaucuugguuugccuuccagaa

SEQ ID NO: 1480209 - RNA, 20 nt, Human
gaaggcagggaggaggcaga

SEQ ID NO: 1480210 - RNA, 18 nt, Human
gaaggcagggaggaggca

SEQ ID NO: 1480211 - RNA, 17 nt, Human
gaaggcagggaggaggc

SEQ ID NO: 1480212 - RNA, 16 nt, Human
gaaggcagggaggagg

SEQ ID NO: 1480213 - RNA, 14 nt, Human
gaaggcagggagga

SEQ ID NO: 1480214 - RNA, 11 nt, Human
gaaggcaagau

SEQ ID NO: 1480215 - RNA, 21 nt, Human
gaaggacuaugaaaagcuaga

SEQ ID NO: 1480216 - RNA, 19 nt, Human
gaaggaucccaugagcucc

SEQ ID NO: 1480217 - RNA, 22 nt, Human
gaagccacgguguucugugaua

SEQ ID NO: 1480218 - RNA, 17 nt, Human
gaagacugcauuauauu

SEQ ID NO: 1480219 - RNA, 22 nt, Human
gaagccagcuuucccugccucu

SEQ ID NO: 1480220 - RNA, 19 nt, Human
gaagccuccuuagaaaaaa

SEQ ID NO: 1480221 - RNA, 18 nt, Human
gaagcuuuuaugugaaac

SEQ ID NO: 1480222 - RNA, 20 nt, Human
gaagcuuuggugagaaccug

SEQ ID NO: 1480223 - RNA, 14 nt, Human
gaagcuuuggugag

SEQ ID NO: 1480224 - RNA, 21 nt, Human
gaagccuuggggcugaugcag

SEQ ID NO: 1480225 - RNA, 13 nt, Human
cuuuccacagaag

SEQ ID NO: 1480226 - RNA, 17 nt, Human
cuuucccaacaccucuu

SEQ ID NO: 1480227 - RNA, 21 nt, Human
cuuuauuuucuauaauuuaaa

SEQ ID NO: 1480228 - RNA, 16 nt, Human
cuuuauuggcugagau

SEQ ID NO: 1480229 - RNA, 18 nt, Human
cuuuauuggcugagauau

SEQ ID NO: 1480230 - RNA, 20 nt, Human
cuuuauguuacuacaugcac

SEQ ID NO: 1480231 - RNA, 14 nt, Human
cuuuauuaaaaacu

SEQ ID NO: 1480232 - RNA, 17 nt, Human
cuuuauuaaaaacugag

SEQ ID NO: 1480233 - RNA, 16 nt, Human
cuuuagaauaugccuu

SEQ ID NO: 1480234 - RNA, 14 nt, Human
cuuuacuuuuaaac

SEQ ID NO: 1480235 - RNA, 13 nt, Human
cuuguuuuggaug

SEQ ID NO: 1480236 - RNA, 14 nt, Human
cuuguuuuggaugc

SEQ ID NO: 1480237 - RNA, 17 nt, Human
cuuguugugcuuuuagu

SEQ ID NO: 1480238 - RNA, 15 nt, Human
cuuguugugcuuuua

SEQ ID NO: 1480239 - RNA, 19 nt, Human
cuuguaaaggaauuuaaaa

SEQ ID NO: 1480240 - RNA, 14 nt, Human
cuugggcagcaucc

SEQ ID NO: 1480241 - RNA, 22 nt, Human
cuugggaaaggugguguuucug

SEQ ID NO: 1480242 - RNA, 10 nt, Human
cuugggaaug

SEQ ID NO: 1480243 - RNA, 18 nt, Human
cuugggaauggauccugg

SEQ ID NO: 1480244 - RNA, 17 nt, Human
cuuggagcugagcaaau

SEQ ID NO: 1480245 - RNA, 14 nt, Human
cuuggagcugagca

SEQ ID NO: 1480246 - RNA, 17 nt, Human
cuugcccgcucaggcug

SEQ ID NO: 1480247 - RNA, 14 nt, Human
cuuuuuucuaaagu

SEQ ID NO: 1480248 - RNA, 20 nt, Human
cuuuuuucucugauacagaa

SEQ ID NO: 1480249 - RNA, 22 nt, Human
cuuuuuucucugauacagaaaa

SEQ ID NO: 1480250 - RNA, 22 nt, Human
gaaaacaauaacgauaaaagac

SEQ ID NO: 1480251 - RNA, 23 nt, Human
gaaaagcuagaauugaguguuua

SEQ ID NO: 1480252 - RNA, 19 nt, Human
gaaaauaacgauaaaagac

SEQ ID NO: 1480253 - RNA, 17 nt, Human
gaaaauaagagcucagg

SEQ ID NO: 1480254 - RNA, 19 nt, Human
gaaaauaagagcucaggau

SEQ ID NO: 1480255 - RNA, 18 nt, Human
gaaaauaaucauucuuau

SEQ ID NO: 1480256 - RNA, 12 nt, Human
gaaaauaucacu

SEQ ID NO: 1480257 - RNA, 19 nt, Human
gaaaaucuuauaauuuaaa

SEQ ID NO: 1480258 - RNA, 22 nt, Human
gaaacacccucacacugggacu

SEQ ID NO: 1480259 - RNA, 19 nt, Human
gaaacacccucacacuggg

SEQ ID NO: 1480260 - RNA, 18 nt, Human
gaaacacccucacacugg

SEQ ID NO: 1480261 - RNA, 20 nt, Human
gaaaaucuuauaauuuaaaa

SEQ ID NO: 1480262 - RNA, 16 nt, Human
gaaacacuuugcauaa

SEQ ID NO: 1480263 - RNA, 11 nt, Human
gaaacagaaaa

SEQ ID NO: 1480264 - RNA, 22 nt, Human
gaaacagaaaaauauguaccaa

SEQ ID NO: 1480265 - RNA, 14 nt, Human
gaaacagaaacaaa

SEQ ID NO: 1480266 - RNA, 22 nt, Human
gaaacagaaacaaaaacacuaa

SEQ ID NO: 1480267 - RNA, 14 nt, Human
cuuuucccaaccau

SEQ ID NO: 1480268 - RNA, 18 nt, Human
cuuuucccacuguuuaag

SEQ ID NO: 1480269 - RNA, 20 nt, Human
cuuuuacguccaucucuugu

SEQ ID NO: 1480270 - RNA, 14 nt, Human
cuuuuaauuuuccu

SEQ ID NO: 1480271 - RNA, 23 nt, Human
cuuuuacaaguaacaaaaauaaa

SEQ ID NO: 1480272 - RNA, 18 nt, Human
cuuuucauacauuuucua

SEQ ID NO: 1480273 - RNA, 18 nt, Human
cuuuucccaaaauguuga

SEQ ID NO: 1480274 - RNA, 22 nt, Human
cuuuucccaaaauguugaaaua

SEQ ID NO: 1480275 - RNA, 18 nt, Human
cuuugcugagccuguaaa

SEQ ID NO: 1480276 - RNA, 23 nt, Human
cuuugcugacccuccccaaaggc

SEQ ID NO: 1480277 - RNA, 18 nt, Human
cuuugcugacccucccca

SEQ ID NO: 1480278 - RNA, 14 nt, Human
cuuugcugacccuc

SEQ ID NO: 1480279 - RNA, 13 nt, Human
cuuugcugacccu

SEQ ID NO: 1480280 - RNA, 22 nt, Human
cuucagucucuauaccaauaaa

SEQ ID NO: 1480281 - RNA, 23 nt, Human
cuucagucucuauaccaauaaag

SEQ ID NO: 1480282 - RNA, 21 nt, Human
cuucagucucuauaccaauaa

SEQ ID NO: 1480283 - RNA, 17 nt, Human
cuucagucucuauacca

SEQ ID NO: 1480284 - RNA, 13 nt, Human
cuucagucucuau

SEQ ID NO: 1480285 - RNA, 16 nt, Human
cuuccaaacuaauuuu

SEQ ID NO: 1480286 - RNA, 24 nt, Human
cuucauuugggaugcuacucuagu

SEQ ID NO: 1480287 - RNA, 19 nt, Human
cuuccaaacaggcucagag

SEQ ID NO: 1480288 - RNA, 16 nt, Human
cuucagcgguuuauau

SEQ ID NO: 1480289 - RNA, 10 nt, Human
cuucaggucc

SEQ ID NO: 1480290 - RNA, 18 nt, Human
cuucagguccaggcugug

SEQ ID NO: 1480291 - RNA, 17 nt, Human
cuucagguccaggcugu

SEQ ID NO: 1480292 - RNA, 16 nt, Human
cuucaggacacucacu

SEQ ID NO: 1480293 - RNA, 19 nt, Human
cuucaggacacucacuaca

SEQ ID NO: 1480294 - RNA, 16 nt, Human
cuucagcacuuuagaa

SEQ ID NO: 1480295 - RNA, 15 nt, Human
cuucagcacuuuaga

SEQ ID NO: 1480296 - RNA, 14 nt, Human
cuucagcacuuuag

SEQ ID NO: 1480297 - RNA, 20 nt, Human
cuucagcaaguuagaacuag

SEQ ID NO: 1480298 - RNA, 15 nt, Human
cuucacaaauucuca

SEQ ID NO: 1480299 - RNA, 17 nt, Human
cuucaaauccuugaaga

SEQ ID NO: 1480300 - RNA, 13 nt, Human
cuucaaaugccug

SEQ ID NO: 1480301 - RNA, 16 nt, Human
cuucaaaugccugacu

SEQ ID NO: 1480302 - RNA, 20 nt, Human
cuucaacaauucuaaaauga

SEQ ID NO: 1480303 - RNA, 22 nt, Human
cuucaagcauggcuauuuuaua

SEQ ID NO: 1480304 - RNA, 13 nt, Human
cuuccuucauuuc

SEQ ID NO: 1480305 - RNA, 15 nt, Human
cuuccuucauuuccu

SEQ ID NO: 1480306 - RNA, 16 nt, Human
cuuccuucauuuccuc

SEQ ID NO: 1480307 - RNA, 16 nt, Human
cuuccuguuuuucaca

SEQ ID NO: 1480308 - RNA, 17 nt, Human
cuuccuguuuuucacau

SEQ ID NO: 1480309 - RNA, 18 nt, Human
cuuccuguuuuucacauu

SEQ ID NO: 1480310 - RNA, 23 nt, Human
cuuccuguuuuucacauuuuccu

SEQ ID NO: 1480311 - RNA, 20 nt, Human
cuuccuuuuacuuuucuucu

SEQ ID NO: 1480312 - RNA, 15 nt, Human
cuucucauccugcag

SEQ ID NO: 1480313 - RNA, 16 nt, Human
cuucucauccugcagg

SEQ ID NO: 1480314 - RNA, 17 nt, Human
cuucucauccugcaggc

SEQ ID NO: 1480315 - RNA, 14 nt, Human
cuucucaugaucca

SEQ ID NO: 1480316 - RNA, 22 nt, Human
cuucccuggaaaccuuccaccc

SEQ ID NO: 1480317 - RNA, 23 nt, Human
cuucccuggaaaccuuccaccca

SEQ ID NO: 1480318 - RNA, 19 nt, Human
cuucccugcugugaaagaa

SEQ ID NO: 1480319 - RNA, 23 nt, Human
cuucccuaucuuugccacccuca

SEQ ID NO: 1480320 - RNA, 22 nt, Human
cuucccuaucuuugccacccuc

SEQ ID NO: 1480321 - RNA, 22 nt, Human
cuucccucuuccuucccugcug

SEQ ID NO: 1480322 - RNA, 15 nt, Human
cuuccuaguuuucuc

SEQ ID NO: 1480323 - RNA, 17 nt, Human
cuuccuaguuuucuccu

SEQ ID NO: 1480324 - RNA, 23 nt, Human
cuuccuaguuuucuccucccagg

SEQ ID NO: 1480325 - RNA, 22 nt, Human
cuuccuaguuuucuccucccag

SEQ ID NO: 1480326 - RNA, 18 nt, Human
cuucccuaucuuugccac

SEQ ID NO: 1480327 - RNA, 17 nt, Human
cuucccuaucuuugcca

SEQ ID NO: 1480328 - RNA, 16 nt, Human
cuucccuaucuuugcc

SEQ ID NO: 1480329 - RNA, 19 nt, Human
cuuccagauccuggaaauc

SEQ ID NO: 1480330 - RNA, 13 nt, Human
cuuccagaaauac

SEQ ID NO: 1480331 - RNA, 16 nt, Human
cuuccagaaaacaaaa

SEQ ID NO: 1480332 - RNA, 17 nt, Human
cuuaaccagaucauugu

SEQ ID NO: 1480333 - RNA, 23 nt, Human
cuuaagaagacugcauuauauuu

SEQ ID NO: 1480334 - RNA, 20 nt, Human
cuuaauaaauuguguuuccu

SEQ ID NO: 1480335 - RNA, 14 nt, Human
cuuaagguguagcc

SEQ ID NO: 1480336 - RNA, 17 nt, Human
cuuaagguguagccaca

SEQ ID NO: 1480337 - RNA, 21 nt, Human
cuuaagguguagccacaccag

SEQ ID NO: 1480338 - RNA, 17 nt, Human
cuuaauacacacaguua

SEQ ID NO: 1480339 - RNA, 15 nt, Human
cuuaaggcucuuuug

SEQ ID NO: 1480340 - RNA, 13 nt, Human
cuuaauucaaaua

SEQ ID NO: 1480341 - RNA, 16 nt, Human
cuuaauuuauuauuaa

SEQ ID NO: 1480342 - RNA, 19 nt, Human
cuuaauauauauauccaga

SEQ ID NO: 1480343 - RNA, 16 nt, Human
cuuagaauacaguuuu

SEQ ID NO: 1480344 - RNA, 15 nt, Human
cuuaauuuauuauua

SEQ ID NO: 1480345 - RNA, 20 nt, Human
cuuaccuguaugucuccagu

SEQ ID NO: 1480346 - RNA, 13 nt, Human
cuuaccuuuuuau

SEQ ID NO: 1480347 - RNA, 15 nt, Human
cuuacucuucuugaa

SEQ ID NO: 1480348 - RNA, 19 nt, Human
cuuacucuucuugaaauuu

SEQ ID NO: 1480349 - RNA, 12 nt, Human
cuuacugauaua

SEQ ID NO: 1480350 - RNA, 15 nt, Human
cuuacugauauauuu

SEQ ID NO: 1480351 - RNA, 19 nt, Human
cuuacugauauauuuuaca

SEQ ID NO: 1480352 - RNA, 21 nt, Human
cuuacugauauauuuuacaau

SEQ ID NO: 1480353 - RNA, 21 nt, Human
cuuacugauuuuuaaguuauu

SEQ ID NO: 1480354 - RNA, 21 nt, Human
cuguugccaggcuggagugca

SEQ ID NO: 1480355 - RNA, 23 nt, Human
cuguuuggaaauugauuuugaac

SEQ ID NO: 1480356 - RNA, 17 nt, Human
cuguuuaguagcaguga

SEQ ID NO: 1480357 - RNA, 14 nt, Human
cuguuuuauaauuu

SEQ ID NO: 1480358 - RNA, 22 nt, Human
cuguuuggaaauugauuuugaa

SEQ ID NO: 1480359 - RNA, 15 nt, Human
cuguuuuauaauuuu

SEQ ID NO: 1480360 - RNA, 12 nt, Human
cuguuuuucaca

SEQ ID NO: 1480361 - RNA, 13 nt, Human
cuguuuuucacau

SEQ ID NO: 1480362 - RNA, 15 nt, Human
cuguuuuucacauuu

SEQ ID NO: 1480363 - RNA, 17 nt, Human
cuguugaauuucccaca

SEQ ID NO: 1480364 - RNA, 17 nt, Human
cuguugagcaucacaga

SEQ ID NO: 1480365 - RNA, 14 nt, Human
cugugugcucagga

SEQ ID NO: 1480366 - RNA, 16 nt, Human
cugugugcacaaauau

SEQ ID NO: 1480367 - RNA, 18 nt, Human
cugugugacucaaaccaa

SEQ ID NO: 1480368 - RNA, 21 nt, Human
cuguggaacauaaaaaggaca

SEQ ID NO: 1480369 - RNA, 18 nt, Human
cuguggaacauaaaaagg

SEQ ID NO: 1480370 - RNA, 20 nt, Human
cugugccccuugacaacugg

SEQ ID NO: 1480371 - RNA, 24 nt, Human
cuguggaucaaauccagccugcug

SEQ ID NO: 1480372 - RNA, 14 nt, Human
cuguggaucaaauc

SEQ ID NO: 1480373 - RNA, 18 nt, Human
cuguggccuaaccugccg

SEQ ID NO: 1480374 - RNA, 12 nt, Human
cuguggccagga

SEQ ID NO: 1480375 - RNA, 13 nt, Human
cuguggccaggag

SEQ ID NO: 1480376 - RNA, 14 nt, Human
cuguggccaggagg

SEQ ID NO: 1480377 - RNA, 15 nt, Human
cuguggccaggaggu

SEQ ID NO: 1480378 - RNA, 15 nt, Human
cuguggguaguauga

SEQ ID NO: 1480379 - RNA, 13 nt, Human
cugucuucuggac

SEQ ID NO: 1480380 - RNA, 15 nt, Human
cugucuucuggacug

SEQ ID NO: 1480381 - RNA, 14 nt, Human
cugucuucuggacu

SEQ ID NO: 1480382 - RNA, 21 nt, Human
cugucuuuuuucuaaaguaaa

SEQ ID NO: 1480383 - RNA, 15 nt, Human
cugucugucugucug

SEQ ID NO: 1480384 - RNA, 14 nt, Human
cugucugucugucu

SEQ ID NO: 1480385 - RNA, 17 nt, Human
cugucugucugucccaa

SEQ ID NO: 1480386 - RNA, 16 nt, Human
cugucugucuguccca

SEQ ID NO: 1480387 - RNA, 15 nt, Human
cugucugucuguccc

SEQ ID NO: 1480388 - RNA, 14 nt, Human
cugucugucugucc

SEQ ID NO: 1480389 - RNA, 15 nt, Human
cugucugcucagaca

SEQ ID NO: 1480390 - RNA, 14 nt, Human
cuggugguggcucg

SEQ ID NO: 1480391 - RNA, 22 nt, Human
cuggugguggcucgggaggcga

SEQ ID NO: 1480392 - RNA, 23 nt, Human
cugguaugaacuugaggacacau

SEQ ID NO: 1480393 - RNA, 14 nt, Human
cugguuagaaaugc

SEQ ID NO: 1480394 - RNA, 23 nt, Human
cugguuagaaaugcagaauccua

SEQ ID NO: 1480395 - RNA, 20 nt, Human
cuguaaucccagcaugcuga

SEQ ID NO: 1480396 - RNA, 18 nt, Human
cuguaauugaauauuauu

SEQ ID NO: 1480397 - RNA, 19 nt, Human
cuguaauugaauauuauuc

SEQ ID NO: 1480398 - RNA, 16 nt, Human
cuguauucagacagau

SEQ ID NO: 1480399 - RNA, 15 nt, Human
cuguauucagacaga

SEQ ID NO: 1480400 - RNA, 16 nt, Human
cugggggccucuucug

SEQ ID NO: 1480401 - RNA, 16 nt, Human
cugggggguggccagg

SEQ ID NO: 1480402 - RNA, 19 nt, Human
cugggggguggccaggccg

SEQ ID NO: 1480403 - RNA, 17 nt, Human
cugggggguggccaggc

SEQ ID NO: 1480404 - RNA, 15 nt, Human
cugggcugugggcaa

SEQ ID NO: 1480405 - RNA, 22 nt, Human
cugguaugaacuugaggacaca

SEQ ID NO: 1480406 - RNA, 21 nt, Human
cugguaugaacuugaggacac

SEQ ID NO: 1480407 - RNA, 20 nt, Human
cugguaugaacuugaggaca

SEQ ID NO: 1480408 - RNA, 18 nt, Human
cugguaugaacuugagga

SEQ ID NO: 1480409 - RNA, 18 nt, Human
cugguauauccaaaagcu

SEQ ID NO: 1480410 - RNA, 19 nt, Human
cugguauauccaaaagcuu

SEQ ID NO: 1480411 - RNA, 20 nt, Human
cugguauauccaaaagcuuu

SEQ ID NO: 1480412 - RNA, 16 nt, Human
cugggucgcccuggac

SEQ ID NO: 1480413 - RNA, 15 nt, Human
cugggucgcccugga

SEQ ID NO: 1480414 - RNA, 13 nt, Human
cugggucgcccug

SEQ ID NO: 1480415 - RNA, 15 nt, Human
cugggggguggccag

SEQ ID NO: 1480416 - RNA, 23 nt, Human
cugggccccugccucucugcagg

SEQ ID NO: 1480417 - RNA, 20 nt, Human
cugggccccugccucucugc

SEQ ID NO: 1480418 - RNA, 12 nt, Human
cugauuucuagg

SEQ ID NO: 1480419 - RNA, 15 nt, Human
cugcaaacugccuuc

SEQ ID NO: 1480420 - RNA, 18 nt, Human
cugauuuucaaagcuuuu

SEQ ID NO: 1480421 - RNA, 21 nt, Human
cugauuuucaaagcuuuuucc

SEQ ID NO: 1480422 - RNA, 15 nt, Human
cugauuuuuuuuccu

SEQ ID NO: 1480423 - RNA, 19 nt, Human
cugauuuuuuuuccuuuua

SEQ ID NO: 1480424 - RNA, 20 nt, Human
cugauuuuuuuuccuuuuaa

SEQ ID NO: 1480425 - RNA, 15 nt, Human
cugcacaauaaaaau

SEQ ID NO: 1480426 - RNA, 18 nt, Human
cugcacaauaaaaauguu

SEQ ID NO: 1480427 - RNA, 22 nt, Human
cugcacaauaaaaauguuuaac

SEQ ID NO: 1480428 - RNA, 20 nt, Human
cugcacacccuccagagaca

SEQ ID NO: 1480429 - RNA, 18 nt, Human
cugcacacccuccagaga

SEQ ID NO: 1480430 - RNA, 13 nt, Human
cugaguuuuacca

SEQ ID NO: 1480431 - RNA, 11 nt, Human
cugaguuuucc

SEQ ID NO: 1480432 - RNA, 14 nt, Human
cugaguuuuaccaa

SEQ ID NO: 1480433 - RNA, 14 nt, Human
cugaguuccugcau

SEQ ID NO: 1480434 - RNA, 16 nt, Human
cugaguuccugcaugc

SEQ ID NO: 1480435 - RNA, 17 nt, Human
cugaguuacagaaauga

SEQ ID NO: 1480436 - RNA, 22 nt, Human
cugauacagaaaaguugaauuu

SEQ ID NO: 1480437 - RNA, 15 nt, Human
cugauaauuuuaaau

SEQ ID NO: 1480438 - RNA, 17 nt, Human
cugauaauuuuaaauuc

SEQ ID NO: 1480439 - RNA, 18 nt, Human
cugauaauuuuaaauucu

SEQ ID NO: 1480440 - RNA, 16 nt, Human
cugauauauuuuacaa

SEQ ID NO: 1480441 - RNA, 18 nt, Human
cugauauauuuuacaauu

SEQ ID NO: 1480442 - RNA, 18 nt, Human
cugauauuuucucuagga

SEQ ID NO: 1480443 - RNA, 16 nt, Human
cugauauuuucucuag

SEQ ID NO: 1480444 - RNA, 12 nt, Human
cugaucaaggcc

SEQ ID NO: 1480445 - RNA, 15 nt, Human
cugaucaaggccuua

SEQ ID NO: 1480446 - RNA, 14 nt, Human
cugauauuuucucu

SEQ ID NO: 1480447 - RNA, 15 nt, Human
cugauauuuucucua

SEQ ID NO: 1480448 - RNA, 14 nt, Human
cugaggcugaggca

SEQ ID NO: 1480449 - RNA, 12 nt, Human
cugaggcugagg

SEQ ID NO: 1480450 - RNA, 22 nt, Human
cugagucacccuaccugugccu

SEQ ID NO: 1480451 - RNA, 23 nt, Human
cugagucacccuaccugugccug

SEQ ID NO: 1480452 - RNA, 17 nt, Human
cugaggccuagacucug

SEQ ID NO: 1480453 - RNA, 15 nt, Human
cugaggccuagacuc

SEQ ID NO: 1480454 - RNA, 19 nt, Human
cugaggccuagacucuguc

SEQ ID NO: 1480455 - RNA, 19 nt, Human
cugagcccgguaagagcaa

SEQ ID NO: 1480456 - RNA, 23 nt, Human
cugccuggacuuggccccugcca

SEQ ID NO: 1480457 - RNA, 22 nt, Human
cugccuggacuuggccccugcc

SEQ ID NO: 1480458 - RNA, 17 nt, Human
cugccuggaccagccuc

SEQ ID NO: 1480459 - RNA, 14 nt, Human
cugccuucuggccu

SEQ ID NO: 1480460 - RNA, 18 nt, Human
cugccuucuggccuugua

SEQ ID NO: 1480461 - RNA, 19 nt, Human
cugccuucuucggaaagaa

SEQ ID NO: 1480462 - RNA, 19 nt, Human
cugccucucugcagguccc

SEQ ID NO: 1480463 - RNA, 20 nt, Human
cugccuggaagagcagcccu

SEQ ID NO: 1480464 - RNA, 23 nt, Human
cugcggaggaaggaggacccagg

SEQ ID NO: 1480465 - RNA, 18 nt, Human
cugccucucugcaggucc

SEQ ID NO: 1480466 - RNA, 17 nt, Human
cugccucucugcagguc

SEQ ID NO: 1480467 - RNA, 16 nt, Human
cugccucucugcaggu

SEQ ID NO: 1480468 - RNA, 15 nt, Human
cugccucucugcagg

SEQ ID NO: 1480469 - RNA, 13 nt, Human
cugccuauuuuaa

SEQ ID NO: 1480470 - RNA, 18 nt, Human
cugccaccugucugucug

SEQ ID NO: 1480471 - RNA, 16 nt, Human
cugccaccugucuguc

SEQ ID NO: 1480472 - RNA, 15 nt, Human
cugccaccugucugu

SEQ ID NO: 1480473 - RNA, 14 nt, Human
cugccaccugucug

SEQ ID NO: 1480474 - RNA, 13 nt, Human
cugccaccugucu

SEQ ID NO: 1480475 - RNA, 12 nt, Human
cugccaccuguc

SEQ ID NO: 1480476 - RNA, 11 nt, Human
cugccaccugu

SEQ ID NO: 1480477 - RNA, 17 nt, Human
cugccaccugucugucu

SEQ ID NO: 1480478 - RNA, 21 nt, Human
cugcccagugcacuugcugga

SEQ ID NO: 1480479 - RNA, 19 nt, Human
cugccaccuccugccucag

SEQ ID NO: 1480480 - RNA, 16 nt, Human
cugccaccuccugccu

SEQ ID NO: 1480481 - RNA, 14 nt, Human
cugccaccuccugc

SEQ ID NO: 1480482 - RNA, 12 nt, Human
cugccacacagg

SEQ ID NO: 1480483 - RNA, 23 nt, Human
cugcaugcgagugcucauuucag

SEQ ID NO: 1480484 - RNA, 13 nt, Human
cugcauccagccu

SEQ ID NO: 1480485 - RNA, 19 nt, Human
cugcauccauucuccugag

SEQ ID NO: 1480486 - RNA, 20 nt, Human
cugcaucuagaggcuuccuu

SEQ ID NO: 1480487 - RNA, 21 nt, Human
cugcaucuagaggcuuccuuc

SEQ ID NO: 1480488 - RNA, 21 nt, Human
cugcauccauucuccugagga

SEQ ID NO: 1480489 - RNA, 16 nt, Human
cugaauuaugaaacuu

SEQ ID NO: 1480490 - RNA, 13 nt, Human
cugaauuucccuc

SEQ ID NO: 1480491 - RNA, 11 nt, Human
cugaauuuuua

SEQ ID NO: 1480492 - RNA, 12 nt, Human
cugaauuuuuaa

SEQ ID NO: 1480493 - RNA, 18 nt, Human
cugaauuuuuaaacaagu

SEQ ID NO: 1480494 - RNA, 20 nt, Human
cugaccagccgugagcaugu

SEQ ID NO: 1480495 - RNA, 23 nt, Human
cugaccagccgugagcauguuug

SEQ ID NO: 1480496 - RNA, 21 nt, Human
cugagaaaagcuuugaacccu

SEQ ID NO: 1480497 - RNA, 16 nt, Human
cugacugccaagccau

SEQ ID NO: 1480498 - RNA, 18 nt, Human
cugacugccaagccaugg

SEQ ID NO: 1480499 - RNA, 15 nt, Human
cugacugccaagcca

SEQ ID NO: 1480500 - RNA, 14 nt, Human
cugacugccaagcc

SEQ ID NO: 1480501 - RNA, 17 nt, Human
cugagcaaucugacccu

SEQ ID NO: 1480502 - RNA, 13 nt, Human
cugaauuaugaaa

SEQ ID NO: 1480503 - RNA, 14 nt, Human
cugaauuaugaaac

SEQ ID NO: 1480504 - RNA, 15 nt, Human
cugaauuaugaaacu

SEQ ID NO: 1480505 - RNA, 12 nt, Human
cugaauuauuuu

SEQ ID NO: 1480506 - RNA, 15 nt, Human
cugaauaaagcaauu

SEQ ID NO: 1480507 - RNA, 20 nt, Human
cugaaugaggucagcauguc

SEQ ID NO: 1480508 - RNA, 14 nt, Human
cugaauaaagcaau

SEQ ID NO: 1480509 - RNA, 13 nt, Human
cugaauaaagcaa

SEQ ID NO: 1480510 - RNA, 17 nt, Human
cugaagaacucucugga

SEQ ID NO: 1480511 - RNA, 14 nt, Human
cugaagaagauggu

SEQ ID NO: 1480512 - RNA, 21 nt, Human
cugaacuuugcugagccugua

SEQ ID NO: 1480513 - RNA, 14 nt, Human
cugaacuuugcuga

SEQ ID NO: 1480514 - RNA, 13 nt, Human
cugaacuuugcug

SEQ ID NO: 1480515 - RNA, 12 nt, Human
cugaacuuugcu

SEQ ID NO: 1480516 - RNA, 11 nt, Human
cugaacaccau

SEQ ID NO: 1480517 - RNA, 20 nt, Human
cugaaauaaacgucuuaaau

SEQ ID NO: 1480518 - RNA, 19 nt, Human
cugaaauuuuauaugcuua

SEQ ID NO: 1480519 - RNA, 22 nt, Human
cugaaauuuuauaugcuuacug

SEQ ID NO: 1480520 - RNA, 12 nt, Human
cugaacaagaau

SEQ ID NO: 1480521 - RNA, 13 nt, Human
cugaacaagaauu

SEQ ID NO: 1480522 - RNA, 14 nt, Human
cugaacaagaauug

SEQ ID NO: 1480523 - RNA, 16 nt, Human
cugaacaagaauugga

SEQ ID NO: 1480524 - RNA, 20 nt, Human
cucuucugaauaaagcaauu

SEQ ID NO: 1480525 - RNA, 12 nt, Human
cucuucugagcu

SEQ ID NO: 1480526 - RNA, 19 nt, Human
cucuucugaauaaagcaau

SEQ ID NO: 1480527 - RNA, 16 nt, Human
cucuucugaauaaagc

SEQ ID NO: 1480528 - RNA, 10 nt, Human
cucuucugaa

SEQ ID NO: 1480529 - RNA, 15 nt, Human
cucuucugagcuauu

SEQ ID NO: 1480530 - RNA, 18 nt, Human
cucuucugagcuauuuca

SEQ ID NO: 1480531 - RNA, 21 nt, Human
cucuucugagcuauuucaucu

SEQ ID NO: 1480532 - RNA, 22 nt, Human
cucuucugagcuauuucaucua

SEQ ID NO: 1480533 - RNA, 23 nt, Human
cucuucugagcuauuucaucuau

SEQ ID NO: 1480534 - RNA, 15 nt, Human
cucugauacagaaaa

SEQ ID NO: 1480535 - RNA, 17 nt, Human
cucugaguguuuuauga

SEQ ID NO: 1480536 - RNA, 19 nt, Human
cucugaguguuuuaugaga

SEQ ID NO: 1480537 - RNA, 22 nt, Human
cucugaguguuuuaugagaaag

SEQ ID NO: 1480538 - RNA, 20 nt, Human
cucugcaggucccuaauaaa

SEQ ID NO: 1480539 - RNA, 19 nt, Human
cucugcaggucccuaauaa

SEQ ID NO: 1480540 - RNA, 22 nt, Human
cucugcaggucccuaauaaagc

SEQ ID NO: 1480541 - RNA, 21 nt, Human
cucugcaggucccuaauaaag

SEQ ID NO: 1480542 - RNA, 20 nt, Human
cucugcccgggagcucagga

SEQ ID NO: 1480543 - RNA, 14 nt, Human
cucugcccgggagc

SEQ ID NO: 1480544 - RNA, 19 nt, Human
cucugaaggguaauuauau

SEQ ID NO: 1480545 - RNA, 23 nt, Human
cucugagagcaucaggccuagag

SEQ ID NO: 1480546 - RNA, 19 nt, Human
cucuuaagaagacugcauu

SEQ ID NO: 1480547 - RNA, 15 nt, Human
cucugugugcacaaa

SEQ ID NO: 1480548 - RNA, 17 nt, Human
cucugugugcacaaaua

SEQ ID NO: 1480549 - RNA, 21 nt, Human
cucuguugccaggcuggagug

SEQ ID NO: 1480550 - RNA, 13 nt, Human
cucuuccuuucuu

SEQ ID NO: 1480551 - RNA, 17 nt, Human
cucuucuauuuuguaaa

SEQ ID NO: 1480552 - RNA, 19 nt, Human
cucuucuauuuuguaaacu

SEQ ID NO: 1480553 - RNA, 19 nt, Human
cucuuccuucccugcugug

SEQ ID NO: 1480554 - RNA, 15 nt, Human
cucuuccuucccugc

SEQ ID NO: 1480555 - RNA, 20 nt, Human
cucuggauuauauuaugaag

SEQ ID NO: 1480556 - RNA, 19 nt, Human
cucuggauuauauuaugaa

SEQ ID NO: 1480557 - RNA, 20 nt, Human
cucugucgcccaugcuggag

SEQ ID NO: 1480558 - RNA, 18 nt, Human
cucugucgcccaugcugg

SEQ ID NO: 1480559 - RNA, 16 nt, Human
cucugucuaccugguc

SEQ ID NO: 1480560 - RNA, 19 nt, Human
cucugucuacuugcucagg

SEQ ID NO: 1480561 - RNA, 20 nt, Human
cucugucuaccuggucuggu

SEQ ID NO: 1480562 - RNA, 23 nt, Human
cucaaauacgugggcauucaaau

SEQ ID NO: 1480563 - RNA, 22 nt, Human
cuauugugcaauguaaauauuu

SEQ ID NO: 1480564 - RNA, 17 nt, Human
cuauucuagccugcauu

SEQ ID NO: 1480565 - RNA, 15 nt, Human
cuauucuagccugca

SEQ ID NO: 1480566 - RNA, 23 nt, Human
cuauucuagccugcauugagcuu

SEQ ID NO: 1480567 - RNA, 13 nt, Human
cucaaccucaucc

SEQ ID NO: 1480568 - RNA, 12 nt, Human
cucaaccucauc

SEQ ID NO: 1480569 - RNA, 15 nt, Human
cucaagagaucccaa

SEQ ID NO: 1480570 - RNA, 23 nt, Human
cucacaccaggcuugccugcagg

SEQ ID NO: 1480571 - RNA, 12 nt, Human
cucacauuuaug

SEQ ID NO: 1480572 - RNA, 18 nt, Human
cucaccaggcagccucug

SEQ ID NO: 1480573 - RNA, 19 nt, Human
cucaccaggcagccucugg

SEQ ID NO: 1480574 - RNA, 21 nt, Human
cucaccaggcagccucugggg

SEQ ID NO: 1480575 - RNA, 20 nt, Human
cucaccaggcagccucuggg

SEQ ID NO: 1480576 - RNA, 17 nt, Human
cucagauuucugaggaa

SEQ ID NO: 1480577 - RNA, 16 nt, Human
cucagauuucugagga

SEQ ID NO: 1480578 - RNA, 14 nt, Human
cucagauccuccuc

SEQ ID NO: 1480579 - RNA, 23 nt, Human
cucagagaauuucuaccauuuca

SEQ ID NO: 1480580 - RNA, 21 nt, Human
cucagauaagguaaaaugcca

SEQ ID NO: 1480581 - RNA, 22 nt, Human
cucagauaagguaaaaugccau

SEQ ID NO: 1480582 - RNA, 23 nt, Human
cucagauaagguaaaaugccaug

SEQ ID NO: 1480583 - RNA, 16 nt, Human
cucagauagaaugaca

SEQ ID NO: 1480584 - RNA, 18 nt, Human
cucagauagaaugacagu

SEQ ID NO: 1480585 - RNA, 16 nt, Human
cucagauccuccucau

SEQ ID NO: 1480586 - RNA, 19 nt, Human
cucacccccagcuuugcua

SEQ ID NO: 1480587 - RNA, 17 nt, Human
cucaccauuuggauccu

SEQ ID NO: 1480588 - RNA, 14 nt, Human
cucacccccagcuu

SEQ ID NO: 1480589 - RNA, 17 nt, Human
cucacccccagcuuugc

SEQ ID NO: 1480590 - RNA, 18 nt, Human
cucacccccagcuuugcu

SEQ ID NO: 1480591 - RNA, 13 nt, Human
cuauggccugugg

SEQ ID NO: 1480592 - RNA, 19 nt, Human
cuauggagugcaccaaaga

SEQ ID NO: 1480593 - RNA, 11 nt, Human
cuaugcuuuga

SEQ ID NO: 1480594 - RNA, 15 nt, Human
cuaugcuuugaaaca

SEQ ID NO: 1480595 - RNA, 17 nt, Human
cuaugcuuugaaacaga

SEQ ID NO: 1480596 - RNA, 19 nt, Human
cuaugcuuugaaacagaaa

SEQ ID NO: 1480597 - RNA, 23 nt, Human
cuaugauauuuucugugccugaa

SEQ ID NO: 1480598 - RNA, 13 nt, Human
cuauguaaacuac

SEQ ID NO: 1480599 - RNA, 23 nt, Human
cuauggugcucugucuacuugcu

SEQ ID NO: 1480600 - RNA, 14 nt, Human
cuauggugcucugu

SEQ ID NO: 1480601 - RNA, 16 nt, Human
cuauggugcucugucu

SEQ ID NO: 1480602 - RNA, 17 nt, Human
cuauggugcucugucua

SEQ ID NO: 1480603 - RNA, 19 nt, Human
cuaugggucuaggacacag

SEQ ID NO: 1480604 - RNA, 17 nt, Human
cuauauuuuacauaaau

SEQ ID NO: 1480605 - RNA, 16 nt, Human
cuauauuuaacaagau

SEQ ID NO: 1480606 - RNA, 18 nt, Human
cuauauuguuugcuaagc

SEQ ID NO: 1480607 - RNA, 19 nt, Human
cuauagccaaaaauagcua

SEQ ID NO: 1480608 - RNA, 14 nt, Human
cuauagccaaaaau

SEQ ID NO: 1480609 - RNA, 14 nt, Human
cuauaccaauaaag

SEQ ID NO: 1480610 - RNA, 13 nt, Human
cuauaccaauaaa

SEQ ID NO: 1480611 - RNA, 13 nt, Human
cuauagccaaaaa

SEQ ID NO: 1480612 - RNA, 22 nt, Human
cuauaagcaagaaggcaaaaau

SEQ ID NO: 1480613 - RNA, 14 nt, Human
cuagucaccagaga

SEQ ID NO: 1480614 - RNA, 16 nt, Human
cuagucaaucaagucu

SEQ ID NO: 1480615 - RNA, 20 nt, Human
cuagucaaucaagucuguuu

SEQ ID NO: 1480616 - RNA, 21 nt, Human
cuagucaaucaagucuguuua

SEQ ID NO: 1480617 - RNA, 16 nt, Human
cuaguaauuggaaagg

SEQ ID NO: 1480618 - RNA, 16 nt, Human
cuaguacuaacuccua

SEQ ID NO: 1480619 - RNA, 18 nt, Human
cuagguggguugaaagcc

SEQ ID NO: 1480620 - RNA, 19 nt, Human
cuagguggguugaaagcca

SEQ ID NO: 1480621 - RNA, 23 nt, Human
cuagguggguugaaagccaagga

SEQ ID NO: 1480622 - RNA, 20 nt, Human
cuagugaaacucguuaauuu

SEQ ID NO: 1480623 - RNA, 13 nt, Human
cuagucauaaccu

SEQ ID NO: 1480624 - RNA, 21 nt, Human
cuagugagcagucaggaaaga

SEQ ID NO: 1480625 - RNA, 22 nt, Human
cuagguaaauuacaguuccuag

SEQ ID NO: 1480626 - RNA, 19 nt, Human
cuaggguuaggagguccuu

SEQ ID NO: 1480627 - RNA, 17 nt, Human
cuagguaggaaaugugg

SEQ ID NO: 1480628 - RNA, 17 nt, Human
cucgccggaucugaggg

SEQ ID NO: 1480629 - RNA, 18 nt, Human
cucgccggaucugaggga

SEQ ID NO: 1480630 - RNA, 21 nt, Human
cuccuuggugauuccgcagug

SEQ ID NO: 1480631 - RNA, 14 nt, Human
cuccuuccggggaa

SEQ ID NO: 1480632 - RNA, 20 nt, Human
cuccuuccggggaaggauuu

SEQ ID NO: 1480633 - RNA, 13 nt, Human
cucgagaucccaa

SEQ ID NO: 1480634 - RNA, 21 nt, Human
cucgagaucccaacacugcca

SEQ ID NO: 1480635 - RNA, 22 nt, Human
cucgagaucccaacacugccag

SEQ ID NO: 1480636 - RNA, 23 nt, Human
cucgagaucccaacacugccagc

SEQ ID NO: 1480637 - RNA, 17 nt, Human
cuccugccucagccucc

SEQ ID NO: 1480638 - RNA, 15 nt, Human
cuccugccggcuccu

SEQ ID NO: 1480639 - RNA, 16 nt, Human
cuccccuuuuuuuccc

SEQ ID NO: 1480640 - RNA, 14 nt, Human
cucccugccuccug

SEQ ID NO: 1480641 - RNA, 13 nt, Human
cuccaucccuggc

SEQ ID NO: 1480642 - RNA, 14 nt, Human
cuccaucccuggcc

SEQ ID NO: 1480643 - RNA, 15 nt, Human
cuccaucccuggccc

SEQ ID NO: 1480644 - RNA, 16 nt, Human
cuccaucccuggcccc

SEQ ID NO: 1480645 - RNA, 19 nt, Human
cuccaucccuggcccccuc

SEQ ID NO: 1480646 - RNA, 24 nt, Human
cuccaucccuggcccccucccugg

SEQ ID NO: 1480647 - RNA, 15 nt, Human
cuccucaaccccucc

SEQ ID NO: 1480648 - RNA, 21 nt, Human
cuccucaaccccuccccucca

SEQ ID NO: 1480649 - RNA, 14 nt, Human
cuccucacccccag

SEQ ID NO: 1480650 - RNA, 20 nt, Human
cuccucaaccccuccccucc

SEQ ID NO: 1480651 - RNA, 17 nt, Human
cuccucagggacucagg

SEQ ID NO: 1480652 - RNA, 11 nt, Human
cuccucaggga

SEQ ID NO: 1480653 - RNA, 12 nt, Human
cuccucccagga

SEQ ID NO: 1480654 - RNA, 21 nt, Human
cuccaaacugacucuuaagaa

SEQ ID NO: 1480655 - RNA, 12 nt, Human
cucauuagacug

SEQ ID NO: 1480656 - RNA, 13 nt, Human
cucauuagacugg

SEQ ID NO: 1480657 - RNA, 15 nt, Human
cucaucucuucuuuu

SEQ ID NO: 1480658 - RNA, 12 nt, Human
cucaucucuucu

SEQ ID NO: 1480659 - RNA, 16 nt, Human
cuccauccuaccacaa

SEQ ID NO: 1480660 - RNA, 11 nt, Human
cuccaucccug

SEQ ID NO: 1480661 - RNA, 12 nt, Human
cuccaucccugg

SEQ ID NO: 1480662 - RNA, 14 nt, Human
cuccaccuccuggg

SEQ ID NO: 1480663 - RNA, 16 nt, Human
cucauacccucccucc

SEQ ID NO: 1480664 - RNA, 17 nt, Human
cucauacccucccuccc

SEQ ID NO: 1480665 - RNA, 14 nt, Human
cucauagacacuga

SEQ ID NO: 1480666 - RNA, 18 nt, Human
cucauagacacugaucug

SEQ ID NO: 1480667 - RNA, 21 nt, Human
cucauauccaguauuguuccu

SEQ ID NO: 1480668 - RNA, 16 nt, Human
cucaucaacugaauga

SEQ ID NO: 1480669 - RNA, 14 nt, Human
cucaucaacugaau

SEQ ID NO: 1480670 - RNA, 16 nt, Human
cucaggaugagggaaa

SEQ ID NO: 1480671 - RNA, 20 nt, Human
cucaggaugagggaaaagaa

SEQ ID NO: 1480672 - RNA, 22 nt, Human
cucaggaugagggaaaagaaaa

SEQ ID NO: 1480673 - RNA, 21 nt, Human
cucaggaugagggaaaagaaa

SEQ ID NO: 1480674 - RNA, 21 nt, Human
cucagggacucaucuuucccu

SEQ ID NO: 1480675 - RNA, 23 nt, Human
cucagggacucaucuuucccucc

SEQ ID NO: 1480676 - RNA, 20 nt, Human
cgagauaccccaccucccuc

SEQ ID NO: 1480677 - RNA, 13 nt, Human
cgagaucccaaca

SEQ ID NO: 1480678 - RNA, 15 nt, Human
cgagaucccaacacu

SEQ ID NO: 1480679 - RNA, 21 nt, Human
cgagaucccaacacugccagc

SEQ ID NO: 1480680 - RNA, 22 nt, Human
cgagaucccaacacugccagca

SEQ ID NO: 1480681 - RNA, 13 nt, Human
cgagauaccccac

SEQ ID NO: 1480682 - RNA, 16 nt, Human
cgacuugccaaauuua

SEQ ID NO: 1480683 - RNA, 22 nt, Human
ccuuugaccugccucccuucau

SEQ ID NO: 1480684 - RNA, 21 nt, Human
ccuuugaccugccucccuuca

SEQ ID NO: 1480685 - RNA, 22 nt, Human
cgaaaaucauauaaucuuacaa

SEQ ID NO: 1480686 - RNA, 15 nt, Human
cgaacuccuugauuu

SEQ ID NO: 1480687 - RNA, 13 nt, Human
cgaagacacagac

SEQ ID NO: 1480688 - RNA, 17 nt, Human
cgcaccccccaagcugu

SEQ ID NO: 1480689 - RNA, 16 nt, Human
cgccaggauggcgcag

SEQ ID NO: 1480690 - RNA, 23 nt, Human
cgccaggauggcgcaggaacuca

SEQ ID NO: 1480691 - RNA, 19 nt, Human
cgccaggauggcgcaggaa

SEQ ID NO: 1480692 - RNA, 18 nt, Human
cgauuagacuggacagcu

SEQ ID NO: 1480693 - RNA, 14 nt, Human
cgauuugucccagg

SEQ ID NO: 1480694 - RNA, 11 nt, Human
cgauuagacug

SEQ ID NO: 1480695 - RNA, 21 nt, Human
ccuuguuucucuuccuuucuu

SEQ ID NO: 1480696 - RNA, 21 nt, Human
ccuuguucugauaaugaaaau

SEQ ID NO: 1480697 - RNA, 15 nt, Human
ccuugucacgccaga

SEQ ID NO: 1480698 - RNA, 18 nt, Human
ccuugucacgccagacuu

SEQ ID NO: 1480699 - RNA, 16 nt, Human
ccuugucacugguaga

SEQ ID NO: 1480700 - RNA, 16 nt, Human
ccuuugaccugccucc

SEQ ID NO: 1480701 - RNA, 15 nt, Human
ccuuugaccugccuc

SEQ ID NO: 1480702 - RNA, 14 nt, Human
ccuuucuagagcac

SEQ ID NO: 1480703 - RNA, 19 nt, Human
ccuuucuagagcacugcca

SEQ ID NO: 1480704 - RNA, 15 nt, Human
ccuuucuagccuggc

SEQ ID NO: 1480705 - RNA, 15 nt, Human
ccuuucuaguugaaa

SEQ ID NO: 1480706 - RNA, 14 nt, Human
ccuuucuaguugaa

SEQ ID NO: 1480707 - RNA, 19 nt, Human
ccuuggggcugaugcaguu

SEQ ID NO: 1480708 - RNA, 18 nt, Human
ccuuggggauucuuccau

SEQ ID NO: 1480709 - RNA, 22 nt, Human
ccuuggggauucuuccaucuga

SEQ ID NO: 1480710 - RNA, 20 nt, Human
ccuuggugauuccgcaguga

SEQ ID NO: 1480711 - RNA, 20 nt, Human
ccuugaguaguuuuuaucug

SEQ ID NO: 1480712 - RNA, 18 nt, Human
ccuugauugguguugcca

SEQ ID NO: 1480713 - RNA, 20 nt, Human
ccuugauuuuagccuucucu

SEQ ID NO: 1480714 - RNA, 21 nt, Human
ccuugauuuuagccuucucug

SEQ ID NO: 1480715 - RNA, 22 nt, Human
ccuugauuuuagccuucucugu

SEQ ID NO: 1480716 - RNA, 13 nt, Human
ccuugaacuagga

SEQ ID NO: 1480717 - RNA, 19 nt, Human
ccuugaguaguuuuuaucu

SEQ ID NO: 1480718 - RNA, 17 nt, Human
ccuugagggcaagagcc

SEQ ID NO: 1480719 - RNA, 19 nt, Human
ccuucuauacccacccaga

SEQ ID NO: 1480720 - RNA, 20 nt, Human
ccuucuauacccacccagaa

SEQ ID NO: 1480721 - RNA, 18 nt, Human
ccuucuauacccacccag

SEQ ID NO: 1480722 - RNA, 20 nt, Human
ccuucucuacacucuuguaa

SEQ ID NO: 1480723 - RNA, 15 nt, Human
ccuucuauuggucuc

SEQ ID NO: 1480724 - RNA, 15 nt, Human
ccuucuauucuagcc

SEQ ID NO: 1480725 - RNA, 20 nt, Human
ccuucagcacuuuagaauau

SEQ ID NO: 1480726 - RNA, 19 nt, Human
ccuuccuuuuacuuuucuu

SEQ ID NO: 1480727 - RNA, 17 nt, Human
ccuuaagagucauccag

SEQ ID NO: 1480728 - RNA, 16 nt, Human
ccuuaacugcauccag

SEQ ID NO: 1480729 - RNA, 13 nt, Human
ccuuaaggcucuu

SEQ ID NO: 1480730 - RNA, 16 nt, Human
ccuuaaggcucuuuug

SEQ ID NO: 1480731 - RNA, 18 nt, Human
ccuuaaggcucuuuugua

SEQ ID NO: 1480732 - RNA, 12 nt, Human
ccuuaagucaga

SEQ ID NO: 1480733 - RNA, 23 nt, Human
ccuuaaucagguccucagagaau

SEQ ID NO: 1480734 - RNA, 16 nt, Human
ccuuaauuuauuauua

SEQ ID NO: 1480735 - RNA, 13 nt, Human
ccuguuuuucaca

SEQ ID NO: 1480736 - RNA, 16 nt, Human
ccuguuuuucacauuu

SEQ ID NO: 1480737 - RNA, 20 nt, Human
ccuguuuuucacauuuuccu

SEQ ID NO: 1480738 - RNA, 22 nt, Human
ccuuacaaguuagaaaacauaa

SEQ ID NO: 1480739 - RNA, 14 nt, Human
ccuuaccuuuuuau

SEQ ID NO: 1480740 - RNA, 16 nt, Human
ccuuacucuucuugaa

SEQ ID NO: 1480741 - RNA, 17 nt, Human
ccuuacucuucuugaaa

SEQ ID NO: 1480742 - RNA, 22 nt, Human
ccuuacucuucuugaaauuuua

SEQ ID NO: 1480743 - RNA, 15 nt, Human
ccuguuuaagagaca

SEQ ID NO: 1480744 - RNA, 12 nt, Human
ccuguuuaagag

SEQ ID NO: 1480745 - RNA, 14 nt, Human
ccuguuucuggcac

SEQ ID NO: 1480746 - RNA, 12 nt, Human
ccuguuucuucc

SEQ ID NO: 1480747 - RNA, 12 nt, Human
ccuguguggaga

SEQ ID NO: 1480748 - RNA, 13 nt, Human
ccuguguggagag

SEQ ID NO: 1480749 - RNA, 14 nt, Human
ccuguguggagagg

SEQ ID NO: 1480750 - RNA, 15 nt, Human
ccuguguggagaggg

SEQ ID NO: 1480751 - RNA, 16 nt, Human
ccuguguggagaggga

SEQ ID NO: 1480752 - RNA, 19 nt, Human
ccuguguggagagggaaug

SEQ ID NO: 1480753 - RNA, 23 nt, Human
ccuguguggagagggaaugugaa

SEQ ID NO: 1480754 - RNA, 21 nt, Human
ccuguguggagagggaaugug

SEQ ID NO: 1480755 - RNA, 22 nt, Human
ccuguguggagagggaauguga

SEQ ID NO: 1480756 - RNA, 23 nt, Human
ccugcaggcaggaacaaacaggg

SEQ ID NO: 1480757 - RNA, 22 nt, Human
ccugcaggcaggaacaaacagg

SEQ ID NO: 1480758 - RNA, 22 nt, Human
ccugauuuuuuuuccuuuuaau

SEQ ID NO: 1480759 - RNA, 11 nt, Human
ccugccaggag

SEQ ID NO: 1480760 - RNA, 21 nt, Human
ccugccaggagcuuuggaccu

SEQ ID NO: 1480761 - RNA, 13 nt, Human
ccugccaggagga

SEQ ID NO: 1480762 - RNA, 12 nt, Human
ccugccaggagg

SEQ ID NO: 1480763 - RNA, 22 nt, Human
ccugcauccauucuccugagga

SEQ ID NO: 1480764 - RNA, 23 nt, Human
ccugcauccauucuccugaggau

SEQ ID NO: 1480765 - RNA, 13 nt, Human
ccugacacuuuaa

SEQ ID NO: 1480766 - RNA, 14 nt, Human
ccugacacuuuaau

SEQ ID NO: 1480767 - RNA, 15 nt, Human
ccugacacuuuaauu

SEQ ID NO: 1480768 - RNA, 17 nt, Human
ccugacauguccuucug

SEQ ID NO: 1480769 - RNA, 22 nt, Human
ccucuccaccaucgucuucuug

SEQ ID NO: 1480770 - RNA, 20 nt, Human
ccuggugcacuggccccacc

SEQ ID NO: 1480771 - RNA, 19 nt, Human
ccuggugcacuggccccac

SEQ ID NO: 1480772 - RNA, 17 nt, Human
ccuggugcacuggcccc

SEQ ID NO: 1480773 - RNA, 18 nt, Human
ccugguauauccaaaagc

SEQ ID NO: 1480774 - RNA, 20 nt, Human
ccugguauauccaaaagcuu

SEQ ID NO: 1480775 - RNA, 17 nt, Human
ccuggguugcagacagg

SEQ ID NO: 1480776 - RNA, 16 nt, Human
ccuggguugcagacag

SEQ ID NO: 1480777 - RNA, 17 nt, Human
ccugguagaauagauau

SEQ ID NO: 1480778 - RNA, 12 nt, Human
ccugggcaggag

SEQ ID NO: 1480779 - RNA, 16 nt, Human
ccuggcugucugaggc

SEQ ID NO: 1480780 - RNA, 14 nt, Human
ccugggcaggaggg

SEQ ID NO: 1480781 - RNA, 22 nt, Human
ccuggaaggacauccauguucc

SEQ ID NO: 1480782 - RNA, 22 nt, Human
ccugccucaccagcccuggcaa

SEQ ID NO: 1480783 - RNA, 13 nt, Human
ccugccggcuccu

SEQ ID NO: 1480784 - RNA, 23 nt, Human
ccuggaaaucaggguuaguauug

SEQ ID NO: 1480785 - RNA, 18 nt, Human
ccuggaacugucucucau

SEQ ID NO: 1480786 - RNA, 20 nt, Human
ccuggaacugucucucauga

SEQ ID NO: 1480787 - RNA, 16 nt, Human
ccuggaagagcagccc

SEQ ID NO: 1480788 - RNA, 17 nt, Human
ccuggaagagcagcccu

SEQ ID NO: 1480789 - RNA, 15 nt, Human
ccuggaagccagcuu

SEQ ID NO: 1480790 - RNA, 17 nt, Human
ccuggaagccagcuuuc

SEQ ID NO: 1480791 - RNA, 23 nt, Human
ccuggaagcauuuguuucuacuu

SEQ ID NO: 1480792 - RNA, 20 nt, Human
ccuggaaggacauccauguu

SEQ ID NO: 1480793 - RNA, 19 nt, Human
ccugcugugaaagaaguaa

SEQ ID NO: 1480794 - RNA, 15 nt, Human
ccugcuauuugaagu

SEQ ID NO: 1480795 - RNA, 16 nt, Human
ccugcucagcccugca

SEQ ID NO: 1480796 - RNA, 19 nt, Human
ccugcucagcccugcacca

SEQ ID NO: 1480797 - RNA, 20 nt, Human
ccugcucagcccugcaccau

SEQ ID NO: 1480798 - RNA, 20 nt, Human
ccucucaauauucaauaaag

SEQ ID NO: 1480799 - RNA, 18 nt, Human
ccucucaauauucaauaa

SEQ ID NO: 1480800 - RNA, 22 nt, Human
ccucucaauauucaauaaagcu

SEQ ID NO: 1480801 - RNA, 18 nt, Human
ccucuccacucaugugac

SEQ ID NO: 1480802 - RNA, 11 nt, Human
ccuccugcuca

SEQ ID NO: 1480803 - RNA, 12 nt, Human
ccuccaccucaa

SEQ ID NO: 1480804 - RNA, 13 nt, Human
ccuccaccuccug

SEQ ID NO: 1480805 - RNA, 18 nt, Human
ccuccaccgcagaaggaa

SEQ ID NO: 1480806 - RNA, 17 nt, Human
ccuccagagacaacagg

SEQ ID NO: 1480807 - RNA, 19 nt, Human
ccuccaugacugcacagua

SEQ ID NO: 1480808 - RNA, 21 nt, Human
ccucaucuccccaucauuggu

SEQ ID NO: 1480809 - RNA, 12 nt, Human
ccuaugcuuuga

SEQ ID NO: 1480810 - RNA, 17 nt, Human
ccggcuugccacacccc

SEQ ID NO: 1480811 - RNA, 19 nt, Human
ccgggacaccuaggcuagg

SEQ ID NO: 1480812 - RNA, 20 nt, Human
ccgggacaccuaggcuaggg

SEQ ID NO: 1480813 - RNA, 20 nt, Human
ccgcucaggcugaccacuuu

SEQ ID NO: 1480814 - RNA, 19 nt, Human
ccgguaagagcaaaagaau

SEQ ID NO: 1480815 - RNA, 14 nt, Human
ccgcuaaaagaaac

SEQ ID NO: 1480816 - RNA, 18 nt, Human
ccgcuaaaagaaacuuuc

SEQ ID NO: 1480817 - RNA, 13 nt, Human
ccgcaccccccaa

SEQ ID NO: 1480818 - RNA, 15 nt, Human
ccgaggcagggaagg

SEQ ID NO: 1480819 - RNA, 19 nt, Human
ccuaaaagaaacccugcac

SEQ ID NO: 1480820 - RNA, 18 nt, Human
ccuaaaagaaacccugca

SEQ ID NO: 1480821 - RNA, 19 nt, Human
ccuaaauaauaaaaauaaa

SEQ ID NO: 1480822 - RNA, 18 nt, Human
ccuaaauauauuuuaaga

SEQ ID NO: 1480823 - RNA, 16 nt, Human
ccuaaauauauuuuaa

SEQ ID NO: 1480824 - RNA, 20 nt, Human
ccuaguuuucuccucccagg

SEQ ID NO: 1480825 - RNA, 13 nt, Human
ccuauacugcuug

SEQ ID NO: 1480826 - RNA, 22 nt, Human
ccuauacugcuuggagcugagc

SEQ ID NO: 1480827 - RNA, 23 nt, Human
ccuauacugcuuggagcugagca

SEQ ID NO: 1480828 - RNA, 12 nt, Human
ccuaguuuucca

SEQ ID NO: 1480829 - RNA, 13 nt, Human
ccuaguuuuccau

SEQ ID NO: 1480830 - RNA, 15 nt, Human
ccuaguuuuccaugc

SEQ ID NO: 1480831 - RNA, 15 nt, Human
ccuaguuuucuccuc

SEQ ID NO: 1480832 - RNA, 16 nt, Human
ccuaguuuucuccucc

SEQ ID NO: 1480833 - RNA, 18 nt, Human
ccuaguuuucuccuccca

SEQ ID NO: 1480834 - RNA, 19 nt, Human
ccuaguuuucuccucccag

SEQ ID NO: 1480835 - RNA, 16 nt, Human
ccuacuucuuuugcuc

SEQ ID NO: 1480836 - RNA, 22 nt, Human
ccuacuucuuuugcucuuagcu

SEQ ID NO: 1480837 - RNA, 14 nt, Human
ccuacuuugacuuu

SEQ ID NO: 1480838 - RNA, 15 nt, Human
ccuacuuugacuuuu

SEQ ID NO: 1480839 - RNA, 21 nt, Human
ccuacuuugacuuuuugcauu

SEQ ID NO: 1480840 - RNA, 15 nt, Human
ccuaggcuccacccc

SEQ ID NO: 1480841 - RNA, 17 nt, Human
ccuaggcuccaccccau

SEQ ID NO: 1480842 - RNA, 18 nt, Human
ccuaggcuccaccccauc

SEQ ID NO: 1480843 - RNA, 21 nt, Human
cccaccucccucaaccucauc

SEQ ID NO: 1480844 - RNA, 22 nt, Human
cccucucucauacccucccucc

SEQ ID NO: 1480845 - RNA, 18 nt, Human
cccucucucauacccucc

SEQ ID NO: 1480846 - RNA, 18 nt, Human
cccuccaccgcagaagga

SEQ ID NO: 1480847 - RNA, 21 nt, Human
cccuccaccgcagaaggaagg

SEQ ID NO: 1480848 - RNA, 23 nt, Human
cccuccacauuucccccuagccu

SEQ ID NO: 1480849 - RNA, 23 nt, Human
cccuauacugcuuggagcugagc

SEQ ID NO: 1480850 - RNA, 19 nt, Human
cccuccaccgcagaaggaa

SEQ ID NO: 1480851 - RNA, 13 nt, Human
cccuccagagaca

SEQ ID NO: 1480852 - RNA, 18 nt, Human
cccugccaccugucuguc

SEQ ID NO: 1480853 - RNA, 17 nt, Human
cccugccaccugucugu

SEQ ID NO: 1480854 - RNA, 16 nt, Human
cccugccaccugucug

SEQ ID NO: 1480855 - RNA, 15 nt, Human
cccugccaccugucu

SEQ ID NO: 1480856 - RNA, 14 nt, Human
cccugccaccuguc

SEQ ID NO: 1480857 - RNA, 13 nt, Human
cccugccaccugu

SEQ ID NO: 1480858 - RNA, 20 nt, Human
cccugccaccuccugccuca

SEQ ID NO: 1480859 - RNA, 23 nt, Human
cccugcaccaugcugcuggggaa

SEQ ID NO: 1480860 - RNA, 16 nt, Human
cccugcacuguaaaau

SEQ ID NO: 1480861 - RNA, 20 nt, Human
cccugcacuguaaaaugugg

SEQ ID NO: 1480862 - RNA, 17 nt, Human
cccugcacuguaaaaug

SEQ ID NO: 1480863 - RNA, 19 nt, Human
cccugaggccuagacucug

SEQ ID NO: 1480864 - RNA, 16 nt, Human
cccugaggccuagacu

SEQ ID NO: 1480865 - RNA, 12 nt, Human
cccugaggccua

SEQ ID NO: 1480866 - RNA, 21 nt, Human
cccuggaaggacauccauguu

SEQ ID NO: 1480867 - RNA, 15 nt, Human
cccugggaggcucug

SEQ ID NO: 1480868 - RNA, 13 nt, Human
cccugggccuugg

SEQ ID NO: 1480869 - RNA, 18 nt, Human
cccugggccuugggcucc

SEQ ID NO: 1480870 - RNA, 15 nt, Human
cccuggacugugugc

SEQ ID NO: 1480871 - RNA, 21 nt, Human
cccuggacugugugcucagga

SEQ ID NO: 1480872 - RNA, 18 nt, Human
cccuggucccucugcagu

SEQ ID NO: 1480873 - RNA, 14 nt, Human
cccugggccuuggg

SEQ ID NO: 1480874 - RNA, 13 nt, Human
cccgccucagccu

SEQ ID NO: 1480875 - RNA, 20 nt, Human
cccagaaaagaaagcuacag

SEQ ID NO: 1480876 - RNA, 13 nt, Human
cccagaaaagaaa

SEQ ID NO: 1480877 - RNA, 14 nt, Human
cccuacccuggacu

SEQ ID NO: 1480878 - RNA, 14 nt, Human
cccuaccugugccu

SEQ ID NO: 1480879 - RNA, 19 nt, Human
cccuagcgcuaucucccug

SEQ ID NO: 1480880 - RNA, 13 nt, Human
ccauggcccugcc

SEQ ID NO: 1480881 - RNA, 14 nt, Human
ccauauuggccagu

SEQ ID NO: 1480882 - RNA, 18 nt, Human
ccauccuacccccugugc

SEQ ID NO: 1480883 - RNA, 14 nt, Human
ccauauuguaaaac

SEQ ID NO: 1480884 - RNA, 18 nt, Human
ccauauuguaaaacaggu

SEQ ID NO: 1480885 - RNA, 14 nt, Human
ccaucgucuucuug

SEQ ID NO: 1480886 - RNA, 20 nt, Human
ccauucacuucauaauccag

SEQ ID NO: 1480887 - RNA, 13 nt, Human
ccauguuggcuag

SEQ ID NO: 1480888 - RNA, 11 nt, Human
ccaugggacca

SEQ ID NO: 1480889 - RNA, 22 nt, Human
ccaugggagcugguuagaaaug

SEQ ID NO: 1480890 - RNA, 21 nt, Human
ccaugggaggccuuucccuaa

SEQ ID NO: 1480891 - RNA, 15 nt, Human
ccaugggaccacaac

SEQ ID NO: 1480892 - RNA, 14 nt, Human
ccaugggaggccuu

SEQ ID NO: 1480893 - RNA, 19 nt, Human
ccaugggaggccuuucccu

SEQ ID NO: 1480894 - RNA, 14 nt, Human
ccauucauuccauu

SEQ ID NO: 1480895 - RNA, 13 nt, Human
ccauucauuccau

SEQ ID NO: 1480896 - RNA, 23 nt, Human
ccauuuggauccuguguggagag

SEQ ID NO: 1480897 - RNA, 16 nt, Human
ccauuuggcaucccug

SEQ ID NO: 1480898 - RNA, 19 nt, Human
ccauuuggcaucccugggc

SEQ ID NO: 1480899 - RNA, 18 nt, Human
ccauuuggcaucccuggg

SEQ ID NO: 1480900 - RNA, 19 nt, Human
cccaaaggcuuugcccugc

SEQ ID NO: 1480901 - RNA, 18 nt, Human
ccagguuggagugcagug

SEQ ID NO: 1480902 - RNA, 23 nt, Human
ccaggcuguguuuggcuuucagg

SEQ ID NO: 1480903 - RNA, 24 nt, Human
ccaggcuaauuuuuuuguauuuua

SEQ ID NO: 1480904 - RNA, 21 nt, Human
ccaggccgggaaaaagcccac

SEQ ID NO: 1480905 - RNA, 16 nt, Human
ccaggagccugugccu

SEQ ID NO: 1480906 - RNA, 17 nt, Human
ccaggagccugugccuc

SEQ ID NO: 1480907 - RNA, 13 nt, Human
ccaggagacaggu

SEQ ID NO: 1480908 - RNA, 15 nt, Human
ccauagguagaaugu

SEQ ID NO: 1480909 - RNA, 17 nt, Human
ccaguuagccucugcag

SEQ ID NO: 1480910 - RNA, 22 nt, Human
ccaguuagccucugcaggaugu

SEQ ID NO: 1480911 - RNA, 21 nt, Human
ccaguguguggcuuucagagc

SEQ ID NO: 1480912 - RNA, 22 nt, Human
ccaguguguggcuuucagagcc

SEQ ID NO: 1480913 - RNA, 23 nt, Human
ccaguguguggcuuucagagccu

SEQ ID NO: 1480914 - RNA, 16 nt, Human
ccaguguguggcuuuc

SEQ ID NO: 1480915 - RNA, 18 nt, Human
ccaguguguggcuuucag

SEQ ID NO: 1480916 - RNA, 23 nt, Human
ccagcauaauacuugcuuuggaa

SEQ ID NO: 1480917 - RNA, 16 nt, Human
ccagcauuucccuucc

SEQ ID NO: 1480918 - RNA, 21 nt, Human
ccagcauuucccuuccuuccu

SEQ ID NO: 1480919 - RNA, 14 nt, Human
ccagccucagcucu

SEQ ID NO: 1480920 - RNA, 23 nt, Human
ccagcaauuacaacggagucaaa

SEQ ID NO: 1480921 - RNA, 15 nt, Human
ccagaccauggacac

SEQ ID NO: 1480922 - RNA, 18 nt, Human
ccagaccauugucucaga

SEQ ID NO: 1480923 - RNA, 21 nt, Human
ccagaccauugucucagagca

SEQ ID NO: 1480924 - RNA, 19 nt, Human
ccacuguacuugcucuuga

SEQ ID NO: 1480925 - RNA, 18 nt, Human
ccacuguacuugcucuug

SEQ ID NO: 1480926 - RNA, 17 nt, Human
ccacuguacuugcucuu

SEQ ID NO: 1480927 - RNA, 20 nt, Human
ccacuguacuugcucuugau

SEQ ID NO: 1480928 - RNA, 16 nt, Human
ccagagcacugcucca

SEQ ID NO: 1480929 - RNA, 13 nt, Human
ccagagcaaaaua

SEQ ID NO: 1480930 - RNA, 19 nt, Human
ccagaggcuauuauuuuca

SEQ ID NO: 1480931 - RNA, 22 nt, Human
ccagauuuaugcauauuauuuu

SEQ ID NO: 1480932 - RNA, 13 nt, Human
ccagauuuaugca

SEQ ID NO: 1480933 - RNA, 16 nt, Human
ccagaugcagcucaag

SEQ ID NO: 1480934 - RNA, 22 nt, Human
ccacugccuuugaccugccucc

SEQ ID NO: 1480935 - RNA, 14 nt, Human
ccacugccuuugac

SEQ ID NO: 1480936 - RNA, 14 nt, Human
ccacucacaacagc

SEQ ID NO: 1480937 - RNA, 20 nt, Human
ccacucacaacagcugccug

SEQ ID NO: 1480938 - RNA, 19 nt, Human
ccacucaugugacucuuuc

SEQ ID NO: 1480939 - RNA, 22 nt, Human
ccacucaugugacucuuuccaa

SEQ ID NO: 1480940 - RNA, 20 nt, Human
ccaccucccucaaccucauc

SEQ ID NO: 1480941 - RNA, 18 nt, Human
ccaccucccucaaccuca

SEQ ID NO: 1480942 - RNA, 20 nt, Human
ccaccugaauaaagaaugaa

SEQ ID NO: 1480943 - RNA, 20 nt, Human
ccacccucguggacaccugc

SEQ ID NO: 1480944 - RNA, 22 nt, Human
ccacccucguggacaccugccc

SEQ ID NO: 1480945 - RNA, 21 nt, Human
ccacccucguggacaccugcc

SEQ ID NO: 1480946 - RNA, 22 nt, Human
ccacccagaaugagacauccag

SEQ ID NO: 1480947 - RNA, 22 nt, Human
ccaaaccacuuuuugcagcuuu

SEQ ID NO: 1480948 - RNA, 14 nt, Human
ccaaaccacuuuuu

SEQ ID NO: 1480949 - RNA, 16 nt, Human
ccaaaccaggacccug

SEQ ID NO: 1480950 - RNA, 11 nt, Human
ccaaaccacuu

SEQ ID NO: 1480951 - RNA, 16 nt, Human
ccacacccacacucag

SEQ ID NO: 1480952 - RNA, 22 nt, Human
ccacccaauucaaaacauugug

SEQ ID NO: 1480953 - RNA, 13 nt, Human
ccaccaagccuug

SEQ ID NO: 1480954 - RNA, 12 nt, Human
ccaccaagccuu

SEQ ID NO: 1480955 - RNA, 14 nt, Human
ccaccaagccuuga

SEQ ID NO: 1480956 - RNA, 22 nt, Human
cauuauucguagauauuggaca

SEQ ID NO: 1480957 - RNA, 18 nt, Human
cauuauuggaauauaauu

SEQ ID NO: 1480958 - RNA, 23 nt, Human
cauuacuauaagaacuuugagcu

SEQ ID NO: 1480959 - RNA, 13 nt, Human
cauuacugcaugc

SEQ ID NO: 1480960 - RNA, 16 nt, Human
cauuacugcaugcacu

SEQ ID NO: 1480961 - RNA, 23 nt, Human
cauuacugcaugcacuucuuaca

SEQ ID NO: 1480962 - RNA, 17 nt, Human
cauuacuauaagaacuu

SEQ ID NO: 1480963 - RNA, 19 nt, Human
cauuagaagacaauugaca

SEQ ID NO: 1480964 - RNA, 20 nt, Human
cauucaaauguauuacagug

SEQ ID NO: 1480965 - RNA, 16 nt, Human
cauucaagucagcucu

SEQ ID NO: 1480966 - RNA, 17 nt, Human
cauucaagucagcucuu

SEQ ID NO: 1480967 - RNA, 17 nt, Human
cauucacaucgcagauu

SEQ ID NO: 1480968 - RNA, 18 nt, Human
cauuaacucauuagacug

SEQ ID NO: 1480969 - RNA, 15 nt, Human
cauuaacucauuaga

SEQ ID NO: 1480970 - RNA, 21 nt, Human
cauucagauaugauucaaaug

SEQ ID NO: 1480971 - RNA, 17 nt, Human
cauucagaagaaaaaga

SEQ ID NO: 1480972 - RNA, 14 nt, Human
cauucacuucauaa

SEQ ID NO: 1480973 - RNA, 15 nt, Human
cauucacuucauaau

SEQ ID NO: 1480974 - RNA, 13 nt, Human
cauucagaagaaa

SEQ ID NO: 1480975 - RNA, 18 nt, Human
cauucagaagaaaaagaa

SEQ ID NO: 1480976 - RNA, 11 nt, Human
cauucacuuca

SEQ ID NO: 1480977 - RNA, 19 nt, Human
cauucauuuucuggguguu

SEQ ID NO: 1480978 - RNA, 17 nt, Human
cauucauuuuuguuguu

SEQ ID NO: 1480979 - RNA, 17 nt, Human
cauucauuccauucugg

SEQ ID NO: 1480980 - RNA, 16 nt, Human
cauucauuccauucug

SEQ ID NO: 1480981 - RNA, 15 nt, Human
cauucauuccauucu

SEQ ID NO: 1480982 - RNA, 22 nt, Human
cauuccaacuaucucauuucca

SEQ ID NO: 1480983 - RNA, 21 nt, Human
cauuccaacucguauagcaug

SEQ ID NO: 1480984 - RNA, 14 nt, Human
cauuccauccuuga

SEQ ID NO: 1480985 - RNA, 12 nt, Human
cauuccauccuu

SEQ ID NO: 1480986 - RNA, 14 nt, Human
cauuccauucugga

SEQ ID NO: 1480987 - RNA, 15 nt, Human
cauuccauucuggaa

SEQ ID NO: 1480988 - RNA, 15 nt, Human
cauucccccagugcg

SEQ ID NO: 1480989 - RNA, 14 nt, Human
cauucccccagugc

SEQ ID NO: 1480990 - RNA, 13 nt, Human
cauucccccagug

SEQ ID NO: 1480991 - RNA, 13 nt, Human
cauuccuccaggu

SEQ ID NO: 1480992 - RNA, 12 nt, Human
cauuccuccagg

SEQ ID NO: 1480993 - RNA, 14 nt, Human
cauuccucugcccu

SEQ ID NO: 1480994 - RNA, 17 nt, Human
cauuccucaugaaugua

SEQ ID NO: 1480995 - RNA, 18 nt, Human
cauuccucaugaauguaa

SEQ ID NO: 1480996 - RNA, 19 nt, Human
cauuccucaugaauguaaa

SEQ ID NO: 1480997 - RNA, 21 nt, Human
cauuccucaugaauguaaauu

SEQ ID NO: 1480998 - RNA, 14 nt, Human
cauuccugaacagg

SEQ ID NO: 1480999 - RNA, 23 nt, Human
cauucugauucgaaugacacugu

SEQ ID NO: 1481000 - RNA, 22 nt, Human
cauucugauucgaaugacacug

SEQ ID NO: 1481001 - RNA, 16 nt, Human
cauucuggaagugacu

SEQ ID NO: 1481002 - RNA, 12 nt, Human
cauucuggaagu

SEQ ID NO: 1481003 - RNA, 13 nt, Human
cauucuggaauaa

SEQ ID NO: 1481004 - RNA, 15 nt, Human
cauucugucuugaag

SEQ ID NO: 1481005 - RNA, 21 nt, Human
cauucuuauuucaugaaaauu

SEQ ID NO: 1481006 - RNA, 13 nt, Human
cauucuuccuagu

SEQ ID NO: 1481007 - RNA, 18 nt, Human
cauucuuccuaguuuucu

SEQ ID NO: 1481008 - RNA, 21 nt, Human
cauucuuccuaguuuucuccu

SEQ ID NO: 1481009 - RNA, 12 nt, Human
cauucuuuccca

SEQ ID NO: 1481010 - RNA, 14 nt, Human
cauucuuucccaac

SEQ ID NO: 1481011 - RNA, 23 nt, Human
cauuuuaccuuugacaaagguaa

SEQ ID NO: 1481012 - RNA, 16 nt, Human
cauuugcuuuuucacc

SEQ ID NO: 1481013 - RNA, 18 nt, Human
cauuuuacauuaaauuuu

SEQ ID NO: 1481014 - RNA, 15 nt, Human
cauuucuuuuuggga

SEQ ID NO: 1481015 - RNA, 22 nt, Human
cauuucuuuuugggagagacuu

SEQ ID NO: 1481016 - RNA, 20 nt, Human
cauuugcugaauagcuacua

SEQ ID NO: 1481017 - RNA, 18 nt, Human
cauuuuuaccaucacuga

SEQ ID NO: 1481018 - RNA, 17 nt, Human
ccaaaauguugaaauau

SEQ ID NO: 1481019 - RNA, 20 nt, Human
ccaaaauguuggucauuuua

SEQ ID NO: 1481020 - RNA, 21 nt, Human
ccaaaauguuggucauuuuau

SEQ ID NO: 1481021 - RNA, 14 nt, Human
cauuuucuaagaaa

SEQ ID NO: 1481022 - RNA, 17 nt, Human
cauuuucuaagaaacau

SEQ ID NO: 1481023 - RNA, 13 nt, Human
cauuuucucccug

SEQ ID NO: 1481024 - RNA, 12 nt, Human
cauuuucucccu

SEQ ID NO: 1481025 - RNA, 12 nt, Human
cauuuucucuaa

SEQ ID NO: 1481026 - RNA, 17 nt, Human
cauuuucucccuggauu

SEQ ID NO: 1481027 - RNA, 23 nt, Human
cauuuucuaagaaacauuuauau

SEQ ID NO: 1481028 - RNA, 19 nt, Human
cauugagcuugcaugcuug

SEQ ID NO: 1481029 - RNA, 13 nt, Human
cauugaaggcuua

SEQ ID NO: 1481030 - RNA, 14 nt, Human
cauugaaggcuuaa

SEQ ID NO: 1481031 - RNA, 22 nt, Human
cauugaauggcuauguuuuuaa

SEQ ID NO: 1481032 - RNA, 14 nt, Human
cauuguuaccucua

SEQ ID NO: 1481033 - RNA, 21 nt, Human
cauuguuauauaaucauuauu

SEQ ID NO: 1481034 - RNA, 13 nt, Human
cauuuaaaacaga

SEQ ID NO: 1481035 - RNA, 17 nt, Human
cauuuaaaacagacacu

SEQ ID NO: 1481036 - RNA, 18 nt, Human
cauuuaaaacagacacug

SEQ ID NO: 1481037 - RNA, 23 nt, Human
cauuuaaaacagacacuggcaug

SEQ ID NO: 1481038 - RNA, 18 nt, Human
cauuguuaccucuauaua

SEQ ID NO: 1481039 - RNA, 17 nt, Human
cauuguuauauaaucau

SEQ ID NO: 1481040 - RNA, 18 nt, Human
cauuuaaauuuuuuuccu

SEQ ID NO: 1481041 - RNA, 21 nt, Human
cauguuaaccccuccacucuu

SEQ ID NO: 1481042 - RNA, 14 nt, Human
cauguguuuauccu

SEQ ID NO: 1481043 - RNA, 18 nt, Human
cauguguuuacuuuaugu

SEQ ID NO: 1481044 - RNA, 20 nt, Human
caugugcuaguaauuggaaa

SEQ ID NO: 1481045 - RNA, 13 nt, Human
cauguguauaaaa

SEQ ID NO: 1481046 - RNA, 14 nt, Human
cauguguauaaaaa

SEQ ID NO: 1481047 - RNA, 17 nt, Human
cauguguauaaaaauaa

SEQ ID NO: 1481048 - RNA, 14 nt, Human
caugugacucuuuc

SEQ ID NO: 1481049 - RNA, 16 nt, Human
caugugacucuuucca

SEQ ID NO: 1481050 - RNA, 17 nt, Human
caugugacucuuuccaa

SEQ ID NO: 1481051 - RNA, 16 nt, Human
caugucuauucagcuu

SEQ ID NO: 1481052 - RNA, 17 nt, Human
caugucuauucagcuuc

SEQ ID NO: 1481053 - RNA, 20 nt, Human
cauguuucuuuguaaugaaa

SEQ ID NO: 1481054 - RNA, 20 nt, Human
cauguuugcaccuuucuagu

SEQ ID NO: 1481055 - RNA, 22 nt, Human
cauguuugcaccuuucuaguug

SEQ ID NO: 1481056 - RNA, 21 nt, Human
cauguuugcaccuuucuaguu

SEQ ID NO: 1481057 - RNA, 22 nt, Human
cauguuuggaaggggucuguag

SEQ ID NO: 1481058 - RNA, 22 nt, Human
cauuaaaaaugcauauacuuua

SEQ ID NO: 1481059 - RNA, 14 nt, Human
caugcagaaagcau

SEQ ID NO: 1481060 - RNA, 17 nt, Human
caugcacuuggcugcau

SEQ ID NO: 1481061 - RNA, 15 nt, Human
caugcacugauguug

SEQ ID NO: 1481062 - RNA, 20 nt, Human
caugcacugauguuguguuu

SEQ ID NO: 1481063 - RNA, 21 nt, Human
caugcugugugacucaaacca

SEQ ID NO: 1481064 - RNA, 17 nt, Human
caugcugugugacucaa

SEQ ID NO: 1481065 - RNA, 15 nt, Human
caugcuguucaugaa

SEQ ID NO: 1481066 - RNA, 14 nt, Human
caugcugugugacu

SEQ ID NO: 1481067 - RNA, 21 nt, Human
cauggaaauucccuucaucug

SEQ ID NO: 1481068 - RNA, 20 nt, Human
cauggaauuggagcucgugg

SEQ ID NO: 1481069 - RNA, 16 nt, Human
caugcuguucaugaaa

SEQ ID NO: 1481070 - RNA, 18 nt, Human
caugcuguucaugaaaga

SEQ ID NO: 1481071 - RNA, 22 nt, Human
caugcugugugacucaaaccaa

SEQ ID NO: 1481072 - RNA, 20 nt, Human
caugcuguucaugaaagauu

SEQ ID NO: 1481073 - RNA, 20 nt, Human
cauggacacuacacccagca

SEQ ID NO: 1481074 - RNA, 19 nt, Human
cauggacacuacacccagc

SEQ ID NO: 1481075 - RNA, 18 nt, Human
cauggacacuacacccag

SEQ ID NO: 1481076 - RNA, 17 nt, Human
cauggacacuacaccca

SEQ ID NO: 1481077 - RNA, 16 nt, Human
cauggacacuacaccc

SEQ ID NO: 1481078 - RNA, 22 nt, Human
cauggacuucugccagcauaau

SEQ ID NO: 1481079 - RNA, 21 nt, Human
caugggaggccuuucccuaag

SEQ ID NO: 1481080 - RNA, 12 nt, Human
cauggcaguggg

SEQ ID NO: 1481081 - RNA, 23 nt, Human
cauggcagugggaaaaauguagg

SEQ ID NO: 1481082 - RNA, 17 nt, Human
caugggaccacaacuau

SEQ ID NO: 1481083 - RNA, 21 nt, Human
caugggagcugguuagaaaug

SEQ ID NO: 1481084 - RNA, 19 nt, Human
caugggaggccuuucccua

SEQ ID NO: 1481085 - RNA, 16 nt, Human
cauggguagccugggu

SEQ ID NO: 1481086 - RNA, 20 nt, Human
cauggguauaguucaugucu

SEQ ID NO: 1481087 - RNA, 15 nt, Human
cauggguagccuggg

SEQ ID NO: 1481088 - RNA, 13 nt, Human
caugauaaaugau

SEQ ID NO: 1481089 - RNA, 18 nt, Human
caugauaaugaacagaac

SEQ ID NO: 1481090 - RNA, 14 nt, Human
caugcacugauguu

SEQ ID NO: 1481091 - RNA, 18 nt, Human
caugagucacuacgccug

SEQ ID NO: 1481092 - RNA, 23 nt, Human
caugagcuccuuaaggcucuuuu

SEQ ID NO: 1481093 - RNA, 13 nt, Human
caugagaaauaca

SEQ ID NO: 1481094 - RNA, 18 nt, Human
caugagaaauacaaaaau

SEQ ID NO: 1481095 - RNA, 22 nt, Human
caugagaaauacaaaaauacuc

SEQ ID NO: 1481096 - RNA, 12 nt, Human
caugagaaucua

SEQ ID NO: 1481097 - RNA, 19 nt, Human
caugagaaucuauauuuaa

SEQ ID NO: 1481098 - RNA, 17 nt, Human
caugaagauauuuuucc

SEQ ID NO: 1481099 - RNA, 18 nt, Human
caugaagagauuuuucau

SEQ ID NO: 1481100 - RNA, 14 nt, Human
caugacuauggaua

SEQ ID NO: 1481101 - RNA, 19 nt, Human
caugaccuaguuuuccaug

SEQ ID NO: 1481102 - RNA, 14 nt, Human
caugaaagauucaa

SEQ ID NO: 1481103 - RNA, 22 nt, Human
caugaaauauagaucaguuaua

SEQ ID NO: 1481104 - RNA, 19 nt, Human
caugaaacagaaacaaaaa

SEQ ID NO: 1481105 - RNA, 13 nt, Human
caugaaacagaaa

SEQ ID NO: 1481106 - RNA, 15 nt, Human
caugaaacagaaaca

SEQ ID NO: 1481107 - RNA, 20 nt, Human
caugaaccucaagcugcauc

SEQ ID NO: 1481108 - RNA, 19 nt, Human
caugaaccucaagcugcau

SEQ ID NO: 1481109 - RNA, 14 nt, Human
caucuuucccuccu

SEQ ID NO: 1481110 - RNA, 13 nt, Human
caucuuucccucc

SEQ ID NO: 1481111 - RNA, 21 nt, Human
caucuuucccuccuuggugau

SEQ ID NO: 1481112 - RNA, 18 nt, Human
caucuuucccuccuuggu

SEQ ID NO: 1481113 - RNA, 17 nt, Human
caucuuucccuccuugg

SEQ ID NO: 1481114 - RNA, 16 nt, Human
caucuuucccuccuug

SEQ ID NO: 1481115 - RNA, 15 nt, Human
caucuuucccuccuu

SEQ ID NO: 1481116 - RNA, 10 nt, Human
caucuuuaag

SEQ ID NO: 1481117 - RNA, 18 nt, Human
cauccuacccccugugcc

SEQ ID NO: 1481118 - RNA, 23 nt, Human
cauccuaccacaaugcagugccu

SEQ ID NO: 1481119 - RNA, 15 nt, Human
cauccuacccccugu

SEQ ID NO: 1481120 - RNA, 21 nt, Human
cauccuaccacaaugcagugc

SEQ ID NO: 1481121 - RNA, 15 nt, Human
caucaucucagcuca

SEQ ID NO: 1481122 - RNA, 14 nt, Human
caucaucucagcuc

SEQ ID NO: 1481123 - RNA, 15 nt, Human
caucauggcuaucug

SEQ ID NO: 1481124 - RNA, 13 nt, Human
caucaccacaguu

SEQ ID NO: 1481125 - RNA, 14 nt, Human
caucaacugaauga

SEQ ID NO: 1481126 - RNA, 22 nt, Human
caucaccuuagaccaccaagcc

SEQ ID NO: 1481127 - RNA, 23 nt, Human
caucaccuuagaccaccaagccu

SEQ ID NO: 1481128 - RNA, 18 nt, Human
caucaccuuagaccacca

SEQ ID NO: 1481129 - RNA, 17 nt, Human
caucaccuuagaccacc

SEQ ID NO: 1481130 - RNA, 15 nt, Human
caucaccuuagacca

SEQ ID NO: 1481131 - RNA, 16 nt, Human
caucacugaguuuucc

SEQ ID NO: 1481132 - RNA, 23 nt, Human
caucacugaguuuuccauggcag

SEQ ID NO: 1481133 - RNA, 17 nt, Human
caucacugaguuuucca

SEQ ID NO: 1481134 - RNA, 11 nt, Human
caucaggcuuu

SEQ ID NO: 1481135 - RNA, 15 nt, Human
caucaggcuuucuuu

SEQ ID NO: 1481136 - RNA, 15 nt, Human
caucaggcuuucuua

SEQ ID NO: 1481137 - RNA, 19 nt, Human
caucaggccuagaggccug

SEQ ID NO: 1481138 - RNA, 18 nt, Human
caucccuuaccugggaaa

SEQ ID NO: 1481139 - RNA, 22 nt, Human
caucccugggccuugggcuccg

SEQ ID NO: 1481140 - RNA, 16 nt, Human
caucccuuugcccaga

SEQ ID NO: 1481141 - RNA, 13 nt, Human
caucccuccuggg

SEQ ID NO: 1481142 - RNA, 12 nt, Human
caucccuggccc

SEQ ID NO: 1481143 - RNA, 13 nt, Human
caucccuggcccc

SEQ ID NO: 1481144 - RNA, 20 nt, Human
caucccuggcccccucccug

SEQ ID NO: 1481145 - RNA, 21 nt, Human
caucccuggcccccucccugg

SEQ ID NO: 1481146 - RNA, 22 nt, Human
caucccuggcccccucccugga

SEQ ID NO: 1481147 - RNA, 23 nt, Human
caucccuggcccccucccuggau

SEQ ID NO: 1481148 - RNA, 11 nt, Human
caucccugggc

SEQ ID NO: 1481149 - RNA, 13 nt, Human
caucccugggccu

SEQ ID NO: 1481150 - RNA, 17 nt, Human
caucccugggccuuggg

SEQ ID NO: 1481151 - RNA, 21 nt, Human
caucccugggccuugggcucc

SEQ ID NO: 1481152 - RNA, 21 nt, Human
cauccagagucccugccugga

SEQ ID NO: 1481153 - RNA, 13 nt, Human
cauccaguucaug

SEQ ID NO: 1481154 - RNA, 13 nt, Human
cauccagaguccc

SEQ ID NO: 1481155 - RNA, 17 nt, Human
cauccagagucccugcc

SEQ ID NO: 1481156 - RNA, 18 nt, Human
cauccagagucccugccu

SEQ ID NO: 1481157 - RNA, 20 nt, Human
cauccagagucccugccugg

SEQ ID NO: 1481158 - RNA, 19 nt, Human
cauauuguuacugguacca

SEQ ID NO: 1481159 - RNA, 13 nt, Human
cauauuguuacug

SEQ ID NO: 1481160 - RNA, 14 nt, Human
cauauuguguguaa

SEQ ID NO: 1481161 - RNA, 13 nt, Human
cauauuguugaaa

SEQ ID NO: 1481162 - RNA, 16 nt, Human
cauauuguugaaaggu

SEQ ID NO: 1481163 - RNA, 13 nt, Human
cauauuguaaaac

SEQ ID NO: 1481164 - RNA, 16 nt, Human
cauauuguaaaacagg

SEQ ID NO: 1481165 - RNA, 17 nt, Human
cauauuguaaaacaggu

SEQ ID NO: 1481166 - RNA, 19 nt, Human
cauauuguaaaacagguag

SEQ ID NO: 1481167 - RNA, 18 nt, Human
cauauugugauucugccu

SEQ ID NO: 1481168 - RNA, 20 nt, Human
cauauugugauucugccuuu

SEQ ID NO: 1481169 - RNA, 17 nt, Human
cauauaugaggacuugu

SEQ ID NO: 1481170 - RNA, 15 nt, Human
cauauauaacaaugc

SEQ ID NO: 1481171 - RNA, 20 nt, Human
cauauauaacaaugcuguau

SEQ ID NO: 1481172 - RNA, 13 nt, Human
cauauauaacaau

SEQ ID NO: 1481173 - RNA, 16 nt, Human
cauauaagugauugcu

SEQ ID NO: 1481174 - RNA, 16 nt, Human
cauaguagaacgcuau

SEQ ID NO: 1481175 - RNA, 18 nt, Human
cauaguauucaugacuau

SEQ ID NO: 1481176 - RNA, 23 nt, Human
cauagucauguaagcugaaaaua

SEQ ID NO: 1481177 - RNA, 23 nt, Human
cagugcugaccagacagccuccc

SEQ ID NO: 1481178 - RNA, 12 nt, Human
cagugcugugcu

SEQ ID NO: 1481179 - RNA, 16 nt, Human
cagugcugugcugugc

SEQ ID NO: 1481180 - RNA, 19 nt, Human
cagugcugugcugugcuau

SEQ ID NO: 1481181 - RNA, 22 nt, Human
cagugcugugcugugcuauggu

SEQ ID NO: 1481182 - RNA, 10 nt, Human
caucaacuga

SEQ ID NO: 1481183 - RNA, 12 nt, Human
caucaacugaau

SEQ ID NO: 1481184 - RNA, 18 nt, Human
caggucccuaauaaagcu

SEQ ID NO: 1481185 - RNA, 17 nt, Human
caggucccuaauaaagc

SEQ ID NO: 1481186 - RNA, 16 nt, Human
caggucccuaauaaag

SEQ ID NO: 1481187 - RNA, 15 nt, Human
caggucccuaauaaa

SEQ ID NO: 1481188 - RNA, 14 nt, Human
caggucccuaauaa

SEQ ID NO: 1481189 - RNA, 13 nt, Human
caggucccuaaua

SEQ ID NO: 1481190 - RNA, 12 nt, Human
caggucccuaau

SEQ ID NO: 1481191 - RNA, 11 nt, Human
caggucccuaa

SEQ ID NO: 1481192 - RNA, 13 nt, Human
cagguccaggcug

SEQ ID NO: 1481193 - RNA, 20 nt, Human
cagguaaaacagggccacau

SEQ ID NO: 1481194 - RNA, 21 nt, Human
cagguacuuguaaauuauuaa

SEQ ID NO: 1481195 - RNA, 20 nt, Human
cagguagaauuaucuaauuu

SEQ ID NO: 1481196 - RNA, 22 nt, Human
cagguagaauuaucuaauuuau

SEQ ID NO: 1481197 - RNA, 23 nt, Human
cagguagaauuaucuaauuuaua

SEQ ID NO: 1481198 - RNA, 14 nt, Human
cagguaggaggcaa

SEQ ID NO: 1481199 - RNA, 23 nt, Human
cagguaggaggcaaauaucuuga

SEQ ID NO: 1481200 - RNA, 14 nt, Human
cagguauaccucac

SEQ ID NO: 1481201 - RNA, 15 nt, Human
cagguauaccucacu

SEQ ID NO: 1481202 - RNA, 17 nt, Human
cagguauagacuccuga

SEQ ID NO: 1481203 - RNA, 16 nt, Human
cagguauaccucacuu

SEQ ID NO: 1481204 - RNA, 15 nt, Human
cagguauccaaaaau

SEQ ID NO: 1481205 - RNA, 22 nt, Human
caggucccuaauaaagcugugu

SEQ ID NO: 1481206 - RNA, 21 nt, Human
caggucccuaauaaagcugug

SEQ ID NO: 1481207 - RNA, 20 nt, Human
caggucccuaauaaagcugu

SEQ ID NO: 1481208 - RNA, 19 nt, Human
caggucccuaauaaagcug

SEQ ID NO: 1481209 - RNA, 16 nt, Human
cagguccaggcugugu

SEQ ID NO: 1481210 - RNA, 15 nt, Human
cagguccucagagaa

SEQ ID NO: 1481211 - RNA, 20 nt, Human
cagguccucagagaauuucu

SEQ ID NO: 1481212 - RNA, 20 nt, Human
cagguccucaguguccucag

SEQ ID NO: 1481213 - RNA, 21 nt, Human
caggucugaagcucaacucuc

SEQ ID NO: 1481214 - RNA, 15 nt, Human
cagguggcccuacug

SEQ ID NO: 1481215 - RNA, 21 nt, Human
cagggucaaaguguuuucucu

SEQ ID NO: 1481216 - RNA, 23 nt, Human
cagggucaaaguguuuucucuga

SEQ ID NO: 1481217 - RNA, 23 nt, Human
cagguaaaacagggccacauaga

SEQ ID NO: 1481218 - RNA, 15 nt, Human
cagguaaaacagggc

SEQ ID NO: 1481219 - RNA, 14 nt, Human
cagguaaaacaggg

SEQ ID NO: 1481220 - RNA, 16 nt, Human
cagggggugugucugc

SEQ ID NO: 1481221 - RNA, 17 nt, Human
caguaauuugaggacaa

SEQ ID NO: 1481222 - RNA, 14 nt, Human
caguaauuuagaaa

SEQ ID NO: 1481223 - RNA, 23 nt, Human
caguacacugucagcagggacug

SEQ ID NO: 1481224 - RNA, 12 nt, Human
caguaccacaug

SEQ ID NO: 1481225 - RNA, 20 nt, Human
caguaccuagcuggcucugu

SEQ ID NO: 1481226 - RNA, 14 nt, Human
caguaacucaucug

SEQ ID NO: 1481227 - RNA, 16 nt, Human
caguaacucaucuguc

SEQ ID NO: 1481228 - RNA, 15 nt, Human
cagucaggaaagaga

SEQ ID NO: 1481229 - RNA, 18 nt, Human
cagucaggaaagagaacu

SEQ ID NO: 1481230 - RNA, 22 nt, Human
cagucaggaaagagaacuucca

SEQ ID NO: 1481231 - RNA, 21 nt, Human
caguauggguuagggaaaaca

SEQ ID NO: 1481232 - RNA, 16 nt, Human
caguauggguuaggga

SEQ ID NO: 1481233 - RNA, 23 nt, Human
caguauggguuagggaaaacauu

SEQ ID NO: 1481234 - RNA, 17 nt, Human
cagucauucagauauga

SEQ ID NO: 1481235 - RNA, 20 nt, Human
cagucauucagauaugauuc

SEQ ID NO: 1481236 - RNA, 22 nt, Human
caguaggggcuuauaauaaagg

SEQ ID NO: 1481237 - RNA, 19 nt, Human
caguaggggcuuauaauaa

SEQ ID NO: 1481238 - RNA, 20 nt, Human
caguagguuauuuagcuugg

SEQ ID NO: 1481239 - RNA, 22 nt, Human
caguagguuauuuagcuuggga

SEQ ID NO: 1481240 - RNA, 16 nt, Human
caguacuuugugcauu

SEQ ID NO: 1481241 - RNA, 18 nt, Human
caguacuuugugcauucu

SEQ ID NO: 1481242 - RNA, 18 nt, Human
caguagcacaaguuauuu

SEQ ID NO: 1481243 - RNA, 21 nt, Human
caguagcacaaguuauuuaaa

SEQ ID NO: 1481244 - RNA, 23 nt, Human
caguagcacaaguuauuuaaauc

SEQ ID NO: 1481245 - RNA, 22 nt, Human
caguaucucuucagucucuaua

SEQ ID NO: 1481246 - RNA, 19 nt, Human
caguaucucuucagucucu

SEQ ID NO: 1481247 - RNA, 13 nt, Human
caguaugaaaaua

SEQ ID NO: 1481248 - RNA, 14 nt, Human
caguaugaaaauaa

SEQ ID NO: 1481249 - RNA, 17 nt, Human
caguaucucuucagucu

SEQ ID NO: 1481250 - RNA, 16 nt, Human
caguaucucuucaguc

SEQ ID NO: 1481251 - RNA, 15 nt, Human
caguaucucuucagu

SEQ ID NO: 1481252 - RNA, 14 nt, Human
caguaucucuucag

SEQ ID NO: 1481253 - RNA, 16 nt, Human
caguauccacuuugca

SEQ ID NO: 1481254 - RNA, 13 nt, Human
cagucccuccaca

SEQ ID NO: 1481255 - RNA, 19 nt, Human
caguccgucaaaacagauu

SEQ ID NO: 1481256 - RNA, 20 nt, Human
cagugaaagaaaauaacaau

SEQ ID NO: 1481257 - RNA, 16 nt, Human
cagugaaagaaaauaa

SEQ ID NO: 1481258 - RNA, 14 nt, Human
cagugaaaaacuau

SEQ ID NO: 1481259 - RNA, 17 nt, Human
cagugaaaaacuauuaa

SEQ ID NO: 1481260 - RNA, 13 nt, Human
cagucuuccugac

SEQ ID NO: 1481261 - RNA, 16 nt, Human
cagucuuccugacacu

SEQ ID NO: 1481262 - RNA, 17 nt, Human
cagucuuccugacacuu

SEQ ID NO: 1481263 - RNA, 18 nt, Human
cagucuuccugacacuuu

SEQ ID NO: 1481264 - RNA, 21 nt, Human
cagucuuccugacacuuuaau

SEQ ID NO: 1481265 - RNA, 17 nt, Human
caguccuggaagccagc

SEQ ID NO: 1481266 - RNA, 22 nt, Human
caguccuggaagccagcuuucc

SEQ ID NO: 1481267 - RNA, 12 nt, Human
cagugagccuga

SEQ ID NO: 1481268 - RNA, 22 nt, Human
cagugagagaguggcuggggca

SEQ ID NO: 1481269 - RNA, 21 nt, Human
cagugagagaguggcuggggc

SEQ ID NO: 1481270 - RNA, 23 nt, Human
cagugagagaguggcuggggcau

SEQ ID NO: 1481271 - RNA, 15 nt, Human
cagugacagcuagga

SEQ ID NO: 1481272 - RNA, 12 nt, Human
cagugacagcua

SEQ ID NO: 1481273 - RNA, 13 nt, Human
cagugaagacaga

SEQ ID NO: 1481274 - RNA, 14 nt, Human
cagugaagacagaa

SEQ ID NO: 1481275 - RNA, 15 nt, Human
cagugaagacagaag

SEQ ID NO: 1481276 - RNA, 16 nt, Human
cagugaagacagaagu

SEQ ID NO: 1481277 - RNA, 20 nt, Human
cagugaauuguguaggagag

SEQ ID NO: 1481278 - RNA, 17 nt, Human
cagugcccucauuuuau

SEQ ID NO: 1481279 - RNA, 19 nt, Human
cagugcccucauuuuaugu

SEQ ID NO: 1481280 - RNA, 22 nt, Human
cagugccuuccuguuuuucaca

SEQ ID NO: 1481281 - RNA, 23 nt, Human
cagugccuuucuucucuccagug

SEQ ID NO: 1481282 - RNA, 12 nt, Human
cagugcggccag

SEQ ID NO: 1481283 - RNA, 15 nt, Human
cagggggcaagagga

SEQ ID NO: 1481284 - RNA, 23 nt, Human
cagggggccccuuugcugacccu

SEQ ID NO: 1481285 - RNA, 11 nt, Human
caggggacagg

SEQ ID NO: 1481286 - RNA, 16 nt, Human
caggggacaggauggu

SEQ ID NO: 1481287 - RNA, 16 nt, Human
caggggccugcccagu

SEQ ID NO: 1481288 - RNA, 23 nt, Human
cagggaccggcggaccccagcca

SEQ ID NO: 1481289 - RNA, 12 nt, Human
cagggacucagg

SEQ ID NO: 1481290 - RNA, 22 nt, Human
cagggacucaucuuucccuccu

SEQ ID NO: 1481291 - RNA, 21 nt, Human
cagggacucaucuuucccucc

SEQ ID NO: 1481292 - RNA, 23 nt, Human
cagggacucaucuuucccuccuu

SEQ ID NO: 1481293 - RNA, 15 nt, Human
cagggcaaggccauu

SEQ ID NO: 1481294 - RNA, 22 nt, Human
cagggacaccugggagaaaucu

SEQ ID NO: 1481295 - RNA, 17 nt, Human
cagggacaccugggaga

SEQ ID NO: 1481296 - RNA, 13 nt, Human
cagggaaggaucc

SEQ ID NO: 1481297 - RNA, 18 nt, Human
cagggaaggaucccauga

SEQ ID NO: 1481298 - RNA, 13 nt, Human
caggcuagaugua

SEQ ID NO: 1481299 - RNA, 19 nt, Human
caggcuagauguauguacu

SEQ ID NO: 1481300 - RNA, 11 nt, Human
caggcucagag

SEQ ID NO: 1481301 - RNA, 15 nt, Human
caggcucagagggug

SEQ ID NO: 1481302 - RNA, 14 nt, Human
caggcucccaggga

SEQ ID NO: 1481303 - RNA, 16 nt, Human
caggcucccagggaca

SEQ ID NO: 1481304 - RNA, 19 nt, Human
caggcucccagggacaccu

SEQ ID NO: 1481305 - RNA, 22 nt, Human
caggcucccagggacaccuggg

SEQ ID NO: 1481306 - RNA, 23 nt, Human
caggcucccagggacaccuggga

SEQ ID NO: 1481307 - RNA, 21 nt, Human
caggcccuuauuuucaagaaa

SEQ ID NO: 1481308 - RNA, 21 nt, Human
caggcugggucgcccuggacu

SEQ ID NO: 1481309 - RNA, 23 nt, Human
caggcugggucgcccuggacugu

SEQ ID NO: 1481310 - RNA, 16 nt, Human
caggcuggagugcagu

SEQ ID NO: 1481311 - RNA, 17 nt, Human
caggcugauuucuaggu

SEQ ID NO: 1481312 - RNA, 16 nt, Human
caggcugauuucuagg

SEQ ID NO: 1481313 - RNA, 23 nt, Human
caggcuuuuuuaucaugugaaau

SEQ ID NO: 1481314 - RNA, 15 nt, Human
caggcuugccugcag

SEQ ID NO: 1481315 - RNA, 16 nt, Human
caggcuugccugcagg

SEQ ID NO: 1481316 - RNA, 17 nt, Human
caggcuugccugcaggc

SEQ ID NO: 1481317 - RNA, 18 nt, Human
caggcuugccugcaggca

SEQ ID NO: 1481318 - RNA, 22 nt, Human
caggcuguguuuggcuuucagg

SEQ ID NO: 1481319 - RNA, 14 nt, Human
caggcaggagcccu

SEQ ID NO: 1481320 - RNA, 18 nt, Human
caggcaggcucccaggga

SEQ ID NO: 1481321 - RNA, 16 nt, Human
caggcaggcucccagg

SEQ ID NO: 1481322 - RNA, 13 nt, Human
caggcagccucug

SEQ ID NO: 1481323 - RNA, 14 nt, Human
caggcagccucugg

SEQ ID NO: 1481324 - RNA, 15 nt, Human
caggcagccucuggg

SEQ ID NO: 1481325 - RNA, 16 nt, Human
caggcagccucugggg

SEQ ID NO: 1481326 - RNA, 19 nt, Human
caggcagccucuggggggu

SEQ ID NO: 1481327 - RNA, 19 nt, Human
caggcagcuuuuucucucc

SEQ ID NO: 1481328 - RNA, 22 nt, Human
caggcagcuuuuucucucccac

SEQ ID NO: 1481329 - RNA, 20 nt, Human
caggcaggaacaaacagggc

SEQ ID NO: 1481330 - RNA, 13 nt, Human
caggcaggaacaa

SEQ ID NO: 1481331 - RNA, 14 nt, Human
caggauuggggaag

SEQ ID NO: 1481332 - RNA, 15 nt, Human
caggauuggggaaga

SEQ ID NO: 1481333 - RNA, 20 nt, Human
caggauuggggaagagagcc

SEQ ID NO: 1481334 - RNA, 24 nt, Human
caggauuggggaagagagccugca

SEQ ID NO: 1481335 - RNA, 14 nt, Human
caggcaaaauccuu

SEQ ID NO: 1481336 - RNA, 18 nt, Human
caggcaaaauccuugcuu

SEQ ID NO: 1481337 - RNA, 22 nt, Human
caggcaacgcacaaaacagaaa

SEQ ID NO: 1481338 - RNA, 20 nt, Human
caggcaucggggagccggga

SEQ ID NO: 1481339 - RNA, 21 nt, Human
caggcaucggggagccgggag

SEQ ID NO: 1481340 - RNA, 20 nt, Human
caggcaggucugaagcucaa

SEQ ID NO: 1481341 - RNA, 13 nt, Human
caggauccaggcc

SEQ ID NO: 1481342 - RNA, 17 nt, Human
caggaucaguuaacuau

SEQ ID NO: 1481343 - RNA, 17 nt, Human
caggaucucaccaggca

SEQ ID NO: 1481344 - RNA, 18 nt, Human
caggaucucaccaggcag

SEQ ID NO: 1481345 - RNA, 22 nt, Human
caggaucucaccaggcagccuc

SEQ ID NO: 1481346 - RNA, 21 nt, Human
caggauauucucacagcucca

SEQ ID NO: 1481347 - RNA, 14 nt, Human
caggauagagacug

SEQ ID NO: 1481348 - RNA, 16 nt, Human
caggauagagacugga

SEQ ID NO: 1481349 - RNA, 15 nt, Human
caggaucaguuaacu

SEQ ID NO: 1481350 - RNA, 20 nt, Human
caggaugaugacuauggaaa

SEQ ID NO: 1481351 - RNA, 18 nt, Human
caggaugaugacuaugga

SEQ ID NO: 1481352 - RNA, 18 nt, Human
caggaugagggaaaagaa

SEQ ID NO: 1481353 - RNA, 22 nt, Human
caggaugagggaaaagaaaaag

SEQ ID NO: 1481354 - RNA, 19 nt, Human
caggaucucaccaggcagc

SEQ ID NO: 1481355 - RNA, 22 nt, Human
caggaugaugacuauggaaaga

SEQ ID NO: 1481356 - RNA, 18 nt, Human
caggauggucuccaucuc

SEQ ID NO: 1481357 - RNA, 23 nt, Human
caggaugggguauggauucuaaa

SEQ ID NO: 1481358 - RNA, 14 nt, Human
caggauggcgcagg

SEQ ID NO: 1481359 - RNA, 21 nt, Human
caggauggcaaccagaccauu

SEQ ID NO: 1481360 - RNA, 23 nt, Human
caggauggcgcaggaacucaaua

SEQ ID NO: 1481361 - RNA, 21 nt, Human
caggaugguucccuugaugaa

SEQ ID NO: 1481362 - RNA, 23 nt, Human
caggaugguucccuugaugaaga

SEQ ID NO: 1481363 - RNA, 15 nt, Human
caggauguguuugcu

SEQ ID NO: 1481364 - RNA, 18 nt, Human
caggauguguuugcuuuc

SEQ ID NO: 1481365 - RNA, 20 nt, Human
caggauguguuugcuuucug

SEQ ID NO: 1481366 - RNA, 17 nt, Human
caggcccccaccuggcu

SEQ ID NO: 1481367 - RNA, 18 nt, Human
caggcccccaccuggcuc

SEQ ID NO: 1481368 - RNA, 19 nt, Human
caggcccccaccuggcuca

SEQ ID NO: 1481369 - RNA, 13 nt, Human
caggcccacagua

SEQ ID NO: 1481370 - RNA, 21 nt, Human
caggagcccugggaggcucug

SEQ ID NO: 1481371 - RNA, 11 nt, Human
caggagccugg

SEQ ID NO: 1481372 - RNA, 12 nt, Human
caggagccuggc

SEQ ID NO: 1481373 - RNA, 15 nt, Human
caggagccugugccu

SEQ ID NO: 1481374 - RNA, 16 nt, Human
caggagccugugccuc

SEQ ID NO: 1481375 - RNA, 19 nt, Human
caggagcccugggaggcuc

SEQ ID NO: 1481376 - RNA, 18 nt, Human
caggagcccugggaggcu

SEQ ID NO: 1481377 - RNA, 16 nt, Human
caggagcccugggagg

SEQ ID NO: 1481378 - RNA, 14 nt, Human
caggagcccuggga

SEQ ID NO: 1481379 - RNA, 11 nt, Human
caggagcccug

SEQ ID NO: 1481380 - RNA, 23 nt, Human
caggagacagguuagcugcuccc

SEQ ID NO: 1481381 - RNA, 19 nt, Human
caggagagaguugaaccua

SEQ ID NO: 1481382 - RNA, 19 nt, Human
caggaguuucguuuucaaa

SEQ ID NO: 1481383 - RNA, 18 nt, Human
caggaguggguggggagu

SEQ ID NO: 1481384 - RNA, 14 nt, Human
caggaguggguggg

SEQ ID NO: 1481385 - RNA, 16 nt, Human
caggagugggugggga

SEQ ID NO: 1481386 - RNA, 17 nt, Human
caggaguggguggggag

SEQ ID NO: 1481387 - RNA, 19 nt, Human
caggauagagacuggaaca

SEQ ID NO: 1481388 - RNA, 20 nt, Human
caggauacuggcacagaggu

SEQ ID NO: 1481389 - RNA, 19 nt, Human
caggauacuggcacagagg

SEQ ID NO: 1481390 - RNA, 18 nt, Human
caggauacuggcacagag

SEQ ID NO: 1481391 - RNA, 17 nt, Human
caggauacuggcacaga

SEQ ID NO: 1481392 - RNA, 15 nt, Human
caggauacuggcaca

SEQ ID NO: 1481393 - RNA, 18 nt, Human
caggaagaucccccagaa

SEQ ID NO: 1481394 - RNA, 17 nt, Human
caggaagaucccccaga

SEQ ID NO: 1481395 - RNA, 17 nt, Human
caggaagagaaggagca

SEQ ID NO: 1481396 - RNA, 15 nt, Human
caggaagagaaggag

SEQ ID NO: 1481397 - RNA, 14 nt, Human
caggaagagaagga

SEQ ID NO: 1481398 - RNA, 19 nt, Human
caggaagaucccccagaaa

SEQ ID NO: 1481399 - RNA, 15 nt, Human
caggaaccgaggcag

SEQ ID NO: 1481400 - RNA, 17 nt, Human
caggaaccgaggcaggg

SEQ ID NO: 1481401 - RNA, 18 nt, Human
caggaaccgaggcaggga

SEQ ID NO: 1481402 - RNA, 12 nt, Human
caggaacugggc

SEQ ID NO: 1481403 - RNA, 13 nt, Human
caggaacugggcc

SEQ ID NO: 1481404 - RNA, 21 nt, Human
caggaagcuuuggugagaacc

SEQ ID NO: 1481405 - RNA, 23 nt, Human
caggaagcuuuggugagaaccug

SEQ ID NO: 1481406 - RNA, 22 nt, Human
caggaagcuuuggugagaaccu

SEQ ID NO: 1481407 - RNA, 16 nt, Human
caggaaggacuaugaa

SEQ ID NO: 1481408 - RNA, 19 nt, Human
caggaaggacuaugaaaag

SEQ ID NO: 1481409 - RNA, 14 nt, Human
caggaaucuuaagg

SEQ ID NO: 1481410 - RNA, 15 nt, Human
caggaaucuuaaggu

SEQ ID NO: 1481411 - RNA, 13 nt, Human
caggaaggcuugu

SEQ ID NO: 1481412 - RNA, 22 nt, Human
caggaaggcuuguugugcuuuu

SEQ ID NO: 1481413 - RNA, 19 nt, Human
cagcuguaugauucccagc

SEQ ID NO: 1481414 - RNA, 20 nt, Human
cagcuucguuuauuuucaag

SEQ ID NO: 1481415 - RNA, 22 nt, Human
cagcuucguuuauuuucaagaa

SEQ ID NO: 1481416 - RNA, 18 nt, Human
cagcuucucauccugcag

SEQ ID NO: 1481417 - RNA, 19 nt, Human
cagcuucucauccugcagg

SEQ ID NO: 1481418 - RNA, 20 nt, Human
cagcuucucauccugcaggc

SEQ ID NO: 1481419 - RNA, 21 nt, Human
cagcuucucauccugcaggca

SEQ ID NO: 1481420 - RNA, 20 nt, Human
cagcuuuucccaaaagccca

SEQ ID NO: 1481421 - RNA, 18 nt, Human
cagcuuuucccaaaagcc

SEQ ID NO: 1481422 - RNA, 17 nt, Human
cagcuuuuuaccaaguu

SEQ ID NO: 1481423 - RNA, 18 nt, Human
caggaaccacaagacugc

SEQ ID NO: 1481424 - RNA, 22 nt, Human
cagcuuugcuaccaaagcaccu

SEQ ID NO: 1481425 - RNA, 11 nt, Human
cagcuuugcua

SEQ ID NO: 1481426 - RNA, 14 nt, Human
cagcuuuagccaag

SEQ ID NO: 1481427 - RNA, 18 nt, Human
cagcuuguggcaagugaa

SEQ ID NO: 1481428 - RNA, 20 nt, Human
cagcuuguggcaagugaauu

SEQ ID NO: 1481429 - RNA, 21 nt, Human
cagcuuguggcaagugaauuu

SEQ ID NO: 1481430 - RNA, 21 nt, Human
cagcuuuauggagauauaauu

SEQ ID NO: 1481431 - RNA, 17 nt, Human
cagcuuucccugccucu

SEQ ID NO: 1481432 - RNA, 19 nt, Human
cagcuuucccugccucuca

SEQ ID NO: 1481433 - RNA, 18 nt, Human
cagcucucaguugcagcc

SEQ ID NO: 1481434 - RNA, 15 nt, Human
cagcucuacuggucu

SEQ ID NO: 1481435 - RNA, 20 nt, Human
cagcucuagacacugccaca

SEQ ID NO: 1481436 - RNA, 12 nt, Human
cagcucugaaag

SEQ ID NO: 1481437 - RNA, 16 nt, Human
cagcucugaaagagaa

SEQ ID NO: 1481438 - RNA, 14 nt, Human
cagcucugacauuc

SEQ ID NO: 1481439 - RNA, 20 nt, Human
cagcucugacauucugauuc

SEQ ID NO: 1481440 - RNA, 21 nt, Human
cagcucugacauucugauucg

SEQ ID NO: 1481441 - RNA, 22 nt, Human
cagcuggggccaggcugggucg

SEQ ID NO: 1481442 - RNA, 21 nt, Human
cagcuggggccaggcuggguc

SEQ ID NO: 1481443 - RNA, 18 nt, Human
cagcuguaugauucccag

SEQ ID NO: 1481444 - RNA, 20 nt, Human
cagcuggggccaggcugggu

SEQ ID NO: 1481445 - RNA, 19 nt, Human
cagcuggggccaggcuggg

SEQ ID NO: 1481446 - RNA, 18 nt, Human
cagcuggggccaggcugg

SEQ ID NO: 1481447 - RNA, 16 nt, Human
cagcuggagaagaccc

SEQ ID NO: 1481448 - RNA, 16 nt, Human
cagccuucuacugcuc

SEQ ID NO: 1481449 - RNA, 23 nt, Human
cagccucuccacucaugugacuc

SEQ ID NO: 1481450 - RNA, 23 nt, Human
cagccuggcuguggccuaaccug

SEQ ID NO: 1481451 - RNA, 15 nt, Human
cagcucacugcaacc

SEQ ID NO: 1481452 - RNA, 21 nt, Human
cagcucagaaguuucuucuuu

SEQ ID NO: 1481453 - RNA, 22 nt, Human
cagcucagaaguuucuucuuua

SEQ ID NO: 1481454 - RNA, 13 nt, Human
cagcucacugcaa

SEQ ID NO: 1481455 - RNA, 22 nt, Human
cagcucaagagaucccaaguag

SEQ ID NO: 1481456 - RNA, 15 nt, Human
cagcucaagagaucc

SEQ ID NO: 1481457 - RNA, 21 nt, Human
cagcgagauaccccaccuccc

SEQ ID NO: 1481458 - RNA, 15 nt, Human
cagcuaagcuaggaa

SEQ ID NO: 1481459 - RNA, 18 nt, Human
cagcuaagcuaggaauga

SEQ ID NO: 1481460 - RNA, 16 nt, Human
cagccuaguugaucag

SEQ ID NO: 1481461 - RNA, 12 nt, Human
cagccuccagag

SEQ ID NO: 1481462 - RNA, 23 nt, Human
cagccucccccuguccccucuau

SEQ ID NO: 1481463 - RNA, 21 nt, Human
cagccuccauccuacccccug

SEQ ID NO: 1481464 - RNA, 18 nt, Human
cagccuccauccuacccc

SEQ ID NO: 1481465 - RNA, 20 nt, Human
cagcccugcugcugccugcc

SEQ ID NO: 1481466 - RNA, 13 nt, Human
cagcccugcacca

SEQ ID NO: 1481467 - RNA, 15 nt, Human
cagcccugcaccaug

SEQ ID NO: 1481468 - RNA, 17 nt, Human
cagcccugcaccaugcu

SEQ ID NO: 1481469 - RNA, 23 nt, Human
cagcccugcaccaugcugcuggg

SEQ ID NO: 1481470 - RNA, 14 nt, Human
cagccuacaggccu

SEQ ID NO: 1481471 - RNA, 16 nt, Human
cagccuacaggccuca

SEQ ID NO: 1481472 - RNA, 17 nt, Human
cagccgugagcauguuu

SEQ ID NO: 1481473 - RNA, 14 nt, Human
cagccgugagcaug

SEQ ID NO: 1481474 - RNA, 16 nt, Human
cagcccuaaacaucau

SEQ ID NO: 1481475 - RNA, 14 nt, Human
cagcccuaaacauc

SEQ ID NO: 1481476 - RNA, 18 nt, Human
cagccaacuauggccugu

SEQ ID NO: 1481477 - RNA, 15 nt, Human
cagcauuucccuucc

SEQ ID NO: 1481478 - RNA, 18 nt, Human
cagcaugucuauucagcu

SEQ ID NO: 1481479 - RNA, 21 nt, Human
cagcagggacuguaaacacag

SEQ ID NO: 1481480 - RNA, 22 nt, Human
cagcagggacuguaaacacaga

SEQ ID NO: 1481481 - RNA, 14 nt, Human
cagcaggcuggccu

SEQ ID NO: 1481482 - RNA, 23 nt, Human
cagccauccagggggcaagagga

SEQ ID NO: 1481483 - RNA, 21 nt, Human
cagccaucaccuuagaccacc

SEQ ID NO: 1481484 - RNA, 18 nt, Human
cagccaucaagagacuga

SEQ ID NO: 1481485 - RNA, 21 nt, Human
cagccaucaagagacugaguc

SEQ ID NO: 1481486 - RNA, 19 nt, Human
cagccaucaccuuagacca

SEQ ID NO: 1481487 - RNA, 22 nt, Human
cagcccaggauacuggcacaga

SEQ ID NO: 1481488 - RNA, 20 nt, Human
cagcccaggauacuggcaca

SEQ ID NO: 1481489 - RNA, 21 nt, Human
cagccacggggacucagcccu

SEQ ID NO: 1481490 - RNA, 22 nt, Human
cagccaagucgguuaguggaag

SEQ ID NO: 1481491 - RNA, 22 nt, Human
cagcacuuuagaauaugccuug

SEQ ID NO: 1481492 - RNA, 14 nt, Human
cagcacuuuagaau

SEQ ID NO: 1481493 - RNA, 15 nt, Human
cagcagacucagcuc

SEQ ID NO: 1481494 - RNA, 17 nt, Human
cagcagacucagcucug

SEQ ID NO: 1481495 - RNA, 18 nt, Human
cagcagacucagcucuga

SEQ ID NO: 1481496 - RNA, 21 nt, Human
cagcagacucagcucugacau

SEQ ID NO: 1481497 - RNA, 23 nt, Human
cagcagacucagcucugacauuc

SEQ ID NO: 1481498 - RNA, 16 nt, Human
cagcaauuuaaauguu

SEQ ID NO: 1481499 - RNA, 15 nt, Human
cagcaauuuaaaugu

SEQ ID NO: 1481500 - RNA, 14 nt, Human
cagcaauuuaaaug

SEQ ID NO: 1481501 - RNA, 22 nt, Human
cagcaauuacaacggagucaaa

SEQ ID NO: 1481502 - RNA, 15 nt, Human
cagcaauagagacgg

SEQ ID NO: 1481503 - RNA, 17 nt, Human
cagcaauagagacggga

SEQ ID NO: 1481504 - RNA, 23 nt, Human
cagcaaguuagaacuagccaaac

SEQ ID NO: 1481505 - RNA, 20 nt, Human
cagcaacaauaaauagacac

SEQ ID NO: 1481506 - RNA, 19 nt, Human
cagcaacaauaaauagaca

SEQ ID NO: 1481507 - RNA, 14 nt, Human
cagcaacaauaaau

SEQ ID NO: 1481508 - RNA, 20 nt, Human
cagcaaacucuuuucccacu

SEQ ID NO: 1481509 - RNA, 16 nt, Human
cagauuuuuacacaug

SEQ ID NO: 1481510 - RNA, 14 nt, Human
cagauuuuccugaa

SEQ ID NO: 1481511 - RNA, 15 nt, Human
cagauuuuccugaaa

SEQ ID NO: 1481512 - RNA, 19 nt, Human
cagauuuucagcaaacucu

SEQ ID NO: 1481513 - RNA, 22 nt, Human
cagauuuucagcaaacucuuuu

SEQ ID NO: 1481514 - RNA, 13 nt, Human
cagauuuucagca

SEQ ID NO: 1481515 - RNA, 15 nt, Human
cagauuuucagcaaa

SEQ ID NO: 1481516 - RNA, 18 nt, Human
cagauucccagagcaaaa

SEQ ID NO: 1481517 - RNA, 19 nt, Human
cagauucccagagcaaaau

SEQ ID NO: 1481518 - RNA, 21 nt, Human
cagauucccagagcaaaauaa

SEQ ID NO: 1481519 - RNA, 14 nt, Human
cagauucccagagc

SEQ ID NO: 1481520 - RNA, 17 nt, Human
cagauucccagagcaaa

SEQ ID NO: 1481521 - RNA, 14 nt, Human
cagaugugaaccau

SEQ ID NO: 1481522 - RNA, 17 nt, Human
cagaugugaaccauuaa

SEQ ID NO: 1481523 - RNA, 22 nt, Human
cagauggcauguguuuacuuua

SEQ ID NO: 1481524 - RNA, 16 nt, Human
cagauggcauguguuu

SEQ ID NO: 1481525 - RNA, 13 nt, Human
cagagccaggaag

SEQ ID NO: 1481526 - RNA, 13 nt, Human
cagagccacaguu

SEQ ID NO: 1481527 - RNA, 12 nt, Human
cagagccacagu

SEQ ID NO: 1481528 - RNA, 20 nt, Human
cagagccaaggggcuucagg

SEQ ID NO: 1481529 - RNA, 21 nt, Human
cagagccaaggggcuucaggu

SEQ ID NO: 1481530 - RNA, 23 nt, Human
cagagccaggaagaucccccaga

SEQ ID NO: 1481531 - RNA, 21 nt, Human
cagagccaggaagauccccca

SEQ ID NO: 1481532 - RNA, 17 nt, Human
cagagccaggaagaucc

SEQ ID NO: 1481533 - RNA, 15 nt, Human
cagagccaggaagau

SEQ ID NO: 1481534 - RNA, 14 nt, Human
cagagccaggaaga

SEQ ID NO: 1481535 - RNA, 15 nt, Human
cagagcacugcucca

SEQ ID NO: 1481536 - RNA, 13 nt, Human
cagagcacugcuc

SEQ ID NO: 1481537 - RNA, 20 nt, Human
cagagccuccuuucuggcuu

SEQ ID NO: 1481538 - RNA, 19 nt, Human
cagagaagaaagaacggaa

SEQ ID NO: 1481539 - RNA, 18 nt, Human
cagagaagaaagaacgga

SEQ ID NO: 1481540 - RNA, 14 nt, Human
cagagaagaaagaa

SEQ ID NO: 1481541 - RNA, 13 nt, Human
cagagaagaaaga

SEQ ID NO: 1481542 - RNA, 13 nt, Human
cagagaauuucua

SEQ ID NO: 1481543 - RNA, 15 nt, Human
cagagaauuucuacc

SEQ ID NO: 1481544 - RNA, 16 nt, Human
cagagaauuucuacca

SEQ ID NO: 1481545 - RNA, 22 nt, Human
cagagaauuucuaccauuucag

SEQ ID NO: 1481546 - RNA, 23 nt, Human
cagagaauuucuaccauuucaga

SEQ ID NO: 1481547 - RNA, 23 nt, Human
cagagacaacagguaaaacaggg

SEQ ID NO: 1481548 - RNA, 14 nt, Human
cagagacaacaggu

SEQ ID NO: 1481549 - RNA, 22 nt, Human
cagagacaacagguaaaacagg

SEQ ID NO: 1481550 - RNA, 17 nt, Human
cagagcaagaccccauc

SEQ ID NO: 1481551 - RNA, 14 nt, Human
cagagcaaaauaau

SEQ ID NO: 1481552 - RNA, 16 nt, Human
cagagcaaaauaauuu

SEQ ID NO: 1481553 - RNA, 16 nt, Human
cagagauaaagaccuu

SEQ ID NO: 1481554 - RNA, 23 nt, Human
cagagagugagagacauuaacuc

SEQ ID NO: 1481555 - RNA, 17 nt, Human
cagagaccuuccagaaa

SEQ ID NO: 1481556 - RNA, 23 nt, Human
cagaggcgcaugaauuugugaag

SEQ ID NO: 1481557 - RNA, 20 nt, Human
cagaggcuauuauuuucacu

SEQ ID NO: 1481558 - RNA, 20 nt, Human
cagagucuggugaagcucac

SEQ ID NO: 1481559 - RNA, 18 nt, Human
cagagucccugccuggac

SEQ ID NO: 1481560 - RNA, 14 nt, Human
cagagucccugccu

SEQ ID NO: 1481561 - RNA, 14 nt, Human
cagauaaucacaau

SEQ ID NO: 1481562 - RNA, 15 nt, Human
cagauaaucccugua

SEQ ID NO: 1481563 - RNA, 22 nt, Human
cagauaacugaaaauuauuuaa

SEQ ID NO: 1481564 - RNA, 19 nt, Human
cagauaacugaaaauuauu

SEQ ID NO: 1481565 - RNA, 20 nt, Human
cagauaagguaaaaugccau

SEQ ID NO: 1481566 - RNA, 22 nt, Human
cagauaagguaaaaugccauga

SEQ ID NO: 1481567 - RNA, 22 nt, Human
cagauaaagguucaugcaaacu

SEQ ID NO: 1481568 - RNA, 20 nt, Human
cagaguugcugcaaaccuga

SEQ ID NO: 1481569 - RNA, 14 nt, Human
cagauccuggaaau

SEQ ID NO: 1481570 - RNA, 21 nt, Human
cagaucuagucaaucaagucu

SEQ ID NO: 1481571 - RNA, 16 nt, Human
cagaugcagcucaaga

SEQ ID NO: 1481572 - RNA, 16 nt, Human
cagaugaggcuuucca

SEQ ID NO: 1481573 - RNA, 21 nt, Human
cagaccauggacacuacaccc

SEQ ID NO: 1481574 - RNA, 22 nt, Human
cagaccauggacacuacaccca

SEQ ID NO: 1481575 - RNA, 17 nt, Human
cagaccauugucucaga

SEQ ID NO: 1481576 - RNA, 14 nt, Human
cagaccauggacac

SEQ ID NO: 1481577 - RNA, 19 nt, Human
cagaccagcaggcuggccu

SEQ ID NO: 1481578 - RNA, 13 nt, Human
cagacauuuuaaa

SEQ ID NO: 1481579 - RNA, 12 nt, Human
cagagaaaaagg

SEQ ID NO: 1481580 - RNA, 17 nt, Human
cagagaaaaagggaggg

SEQ ID NO: 1481581 - RNA, 18 nt, Human
cagagaaaaagggagggg

SEQ ID NO: 1481582 - RNA, 12 nt, Human
cagacuucccac

SEQ ID NO: 1481583 - RNA, 22 nt, Human
cagacuucccacggcuccucga

SEQ ID NO: 1481584 - RNA, 14 nt, Human
cagacucagcucug

SEQ ID NO: 1481585 - RNA, 15 nt, Human
cagacucagcucuga

SEQ ID NO: 1481586 - RNA, 15 nt, Human
cagaccuuuuuuagg

SEQ ID NO: 1481587 - RNA, 21 nt, Human
cagaaugagacauccagcaga

SEQ ID NO: 1481588 - RNA, 14 nt, Human
cagaauguauauua

SEQ ID NO: 1481589 - RNA, 21 nt, Human
cagaaugugauaaggaaauca

SEQ ID NO: 1481590 - RNA, 21 nt, Human
cagaaugucauuuugguacuu

SEQ ID NO: 1481591 - RNA, 16 nt, Human
cagaauguugauuaca

SEQ ID NO: 1481592 - RNA, 22 nt, Human
cagaauguugauuacagugcag

SEQ ID NO: 1481593 - RNA, 23 nt, Human
cagaauuacuguaacugauuaca

SEQ ID NO: 1481594 - RNA, 14 nt, Human
cagaauuacuguaa

SEQ ID NO: 1481595 - RNA, 22 nt, Human
cagaauuacuguaacugauuac

SEQ ID NO: 1481596 - RNA, 22 nt, Human
cagacacugguuugaagaaugu

SEQ ID NO: 1481597 - RNA, 23 nt, Human
cagaaacacccucacacugggac

SEQ ID NO: 1481598 - RNA, 22 nt, Human
cagaaacacccucacacuggga

SEQ ID NO: 1481599 - RNA, 21 nt, Human
cagaaacacccucacacuggg

SEQ ID NO: 1481600 - RNA, 20 nt, Human
cagaaacacccucacacugg

SEQ ID NO: 1481601 - RNA, 18 nt, Human
cagaaacacccucacacu

SEQ ID NO: 1481602 - RNA, 22 nt, Human
cagaaagcaucccucacccauc

SEQ ID NO: 1481603 - RNA, 23 nt, Human
cagaaagcaguugagacaagaaa

SEQ ID NO: 1481604 - RNA, 22 nt, Human
cagaaagcaguugagacaagaa

SEQ ID NO: 1481605 - RNA, 14 nt, Human
cagaaagcugccug

SEQ ID NO: 1481606 - RNA, 15 nt, Human
cagaaagcugccugg

SEQ ID NO: 1481607 - RNA, 16 nt, Human
cagaacauagacagaa

SEQ ID NO: 1481608 - RNA, 21 nt, Human
cagaacauagacagaagaaac

SEQ ID NO: 1481609 - RNA, 19 nt, Human
cagaacauagacagaagaa

SEQ ID NO: 1481610 - RNA, 23 nt, Human
cagaaaagaaagcuacagaagaa

SEQ ID NO: 1481611 - RNA, 17 nt, Human
cagaaaaguugaauuuu

SEQ ID NO: 1481612 - RNA, 20 nt, Human
cagaaaaguugaauuuuaca

SEQ ID NO: 1481613 - RNA, 22 nt, Human
cagaaaaguugaauuuuacaug

SEQ ID NO: 1481614 - RNA, 19 nt, Human
cagaaaauaucccuccugu

SEQ ID NO: 1481615 - RNA, 18 nt, Human
cagaaacaaaaacacuaa

SEQ ID NO: 1481616 - RNA, 20 nt, Human
cagaaacaaaaacacuaaaa

SEQ ID NO: 1481617 - RNA, 12 nt, Human
cacuuugcauaa

SEQ ID NO: 1481618 - RNA, 17 nt, Human
cacuuugcacagcucuc

SEQ ID NO: 1481619 - RNA, 14 nt, Human
cacuuugcacagcu

SEQ ID NO: 1481620 - RNA, 19 nt, Human
cacuugguaauuguacuaa

SEQ ID NO: 1481621 - RNA, 15 nt, Human
cacuugguaauugua

SEQ ID NO: 1481622 - RNA, 19 nt, Human
cacuuucucaguuuucaua

SEQ ID NO: 1481623 - RNA, 15 nt, Human
cacuuuuugcagcuu

SEQ ID NO: 1481624 - RNA, 18 nt, Human
cacuuuuugcagcuuucu

SEQ ID NO: 1481625 - RNA, 14 nt, Human
cacuuuuugcagcu

SEQ ID NO: 1481626 - RNA, 18 nt, Human
cagaaaaauauguaccaa

SEQ ID NO: 1481627 - RNA, 22 nt, Human
cagaaaaauauguaccaagaau

SEQ ID NO: 1481628 - RNA, 13 nt, Human
cagaaaacaaaac

SEQ ID NO: 1481629 - RNA, 14 nt, Human
cagaaaacaaaacu

SEQ ID NO: 1481630 - RNA, 16 nt, Human
cacuuuuccucccuca

SEQ ID NO: 1481631 - RNA, 17 nt, Human
cacuuuuaaugaacaaa

SEQ ID NO: 1481632 - RNA, 13 nt, Human
cagaacuacuucu

SEQ ID NO: 1481633 - RNA, 23 nt, Human
cagaaccccuacaugaaacagaa

SEQ ID NO: 1481634 - RNA, 21 nt, Human
cagaacuugacccugagcuga

SEQ ID NO: 1481635 - RNA, 14 nt, Human
cagaagaaacaagg

SEQ ID NO: 1481636 - RNA, 22 nt, Human
cagaaggaaggcagggaggagg

SEQ ID NO: 1481637 - RNA, 20 nt, Human
cagaaggaaggcagggagga

SEQ ID NO: 1481638 - RNA, 15 nt, Human
cagaaggaaggcagg

SEQ ID NO: 1481639 - RNA, 11 nt, Human
cagaaggaagg

SEQ ID NO: 1481640 - RNA, 23 nt, Human
cagaagguugcucuagauugaga

SEQ ID NO: 1481641 - RNA, 15 nt, Human
cagaaaacaaaacug

SEQ ID NO: 1481642 - RNA, 16 nt, Human
cacucguguguuucua

SEQ ID NO: 1481643 - RNA, 15 nt, Human
cacucguguguuucu

SEQ ID NO: 1481644 - RNA, 16 nt, Human
cacucugaguguuuua

SEQ ID NO: 1481645 - RNA, 22 nt, Human
cacucaugugacucuuuccaac

SEQ ID NO: 1481646 - RNA, 16 nt, Human
cacucaugugacucuu

SEQ ID NO: 1481647 - RNA, 19 nt, Human
cacucaugcauuguccucu

SEQ ID NO: 1481648 - RNA, 18 nt, Human
cacucaugcauuguccuc

SEQ ID NO: 1481649 - RNA, 17 nt, Human
cacucaugcauuguccu

SEQ ID NO: 1481650 - RNA, 17 nt, Human
cacuaagagagaaugag

SEQ ID NO: 1481651 - RNA, 16 nt, Human
cacuaacaugauuugg

SEQ ID NO: 1481652 - RNA, 19 nt, Human
cacuaguauuucuaugaaa

SEQ ID NO: 1481653 - RNA, 14 nt, Human
cacuaucuuucagc

SEQ ID NO: 1481654 - RNA, 21 nt, Human
cacucaaggcggugcuugaua

SEQ ID NO: 1481655 - RNA, 11 nt, Human
cacucaaggcg

SEQ ID NO: 1481656 - RNA, 17 nt, Human
cacucaaggcggugcuu

SEQ ID NO: 1481657 - RNA, 19 nt, Human
cacucaaggcggugcuuga

SEQ ID NO: 1481658 - RNA, 17 nt, Human
cacucacaacagcugcc

SEQ ID NO: 1481659 - RNA, 18 nt, Human
cacucagauccuccucau

SEQ ID NO: 1481660 - RNA, 13 nt, Human
cacuaaacaaaga

SEQ ID NO: 1481661 - RNA, 18 nt, Human
cacgugguaaaacacuug

SEQ ID NO: 1481662 - RNA, 14 nt, Human
cacgugacacaaac

SEQ ID NO: 1481663 - RNA, 17 nt, Human
cacgugacacaaacaca

SEQ ID NO: 1481664 - RNA, 20 nt, Human
cacggcuccucgagauccca

SEQ ID NO: 1481665 - RNA, 22 nt, Human
cacggcuccucgagaucccaac

SEQ ID NO: 1481666 - RNA, 19 nt, Human
cacgcucucuccaggcagg

SEQ ID NO: 1481667 - RNA, 23 nt, Human
cacgcucucuccaggcaggucug

SEQ ID NO: 1481668 - RNA, 16 nt, Human
cacgccuggcuaauuu

SEQ ID NO: 1481669 - RNA, 13 nt, Human
cacgcacggcagc

SEQ ID NO: 1481670 - RNA, 11 nt, Human
cacgccacagc

SEQ ID NO: 1481671 - RNA, 13 nt, Human
cacgccacagccc

SEQ ID NO: 1481672 - RNA, 12 nt, Human
cacgccacagcc

SEQ ID NO: 1481673 - RNA, 14 nt, Human
cacgccacagcccu

SEQ ID NO: 1481674 - RNA, 22 nt, Human
caccuguggaacauaaaaagga

SEQ ID NO: 1481675 - RNA, 22 nt, Human
caccugucugucugucuguccc

SEQ ID NO: 1481676 - RNA, 16 nt, Human
caccugucugucuguc

SEQ ID NO: 1481677 - RNA, 13 nt, Human
caccuuagcuggc

SEQ ID NO: 1481678 - RNA, 21 nt, Human
caccuuagaccaccaagccuu

SEQ ID NO: 1481679 - RNA, 20 nt, Human
caccuuagaccaccaagccu

SEQ ID NO: 1481680 - RNA, 19 nt, Human
caccuuagaccaccaagcc

SEQ ID NO: 1481681 - RNA, 18 nt, Human
caccuuagaccaccaagc

SEQ ID NO: 1481682 - RNA, 14 nt, Human
caccuuagaccacc

SEQ ID NO: 1481683 - RNA, 23 nt, Human
caccuuagaccaccaagccuuga

SEQ ID NO: 1481684 - RNA, 14 nt, Human
cacugcaaccucug

SEQ ID NO: 1481685 - RNA, 19 nt, Human
cacugcaaccuccaccucg

SEQ ID NO: 1481686 - RNA, 17 nt, Human
cacugcaaccuccaccu

SEQ ID NO: 1481687 - RNA, 14 nt, Human
cacugcaaccucca

SEQ ID NO: 1481688 - RNA, 14 nt, Human
cacugcaaccuccg

SEQ ID NO: 1481689 - RNA, 19 nt, Human
cacugauguuguguuuuua

SEQ ID NO: 1481690 - RNA, 13 nt, Human
cacugcaaccucc

SEQ ID NO: 1481691 - RNA, 21 nt, Human
cacugcaaaccgccaccuccc

SEQ ID NO: 1481692 - RNA, 20 nt, Human
cacugcaaaccgccaccucc

SEQ ID NO: 1481693 - RNA, 19 nt, Human
cacugcaaccuccaccucc

SEQ ID NO: 1481694 - RNA, 20 nt, Human
cacugcaaucuccaccuccc

SEQ ID NO: 1481695 - RNA, 15 nt, Human
cacugagaccaaggc

SEQ ID NO: 1481696 - RNA, 17 nt, Human
cacugagaccaaggcuu

SEQ ID NO: 1481697 - RNA, 15 nt, Human
cacugaguuuuccau

SEQ ID NO: 1481698 - RNA, 21 nt, Human
cacugaguuuuccauggcagg

SEQ ID NO: 1481699 - RNA, 22 nt, Human
cacugaguuuuccauggcagga

SEQ ID NO: 1481700 - RNA, 14 nt, Human
cacucuguaauuga

SEQ ID NO: 1481701 - RNA, 23 nt, Human
cacucuguaauugaauauuauuc

SEQ ID NO: 1481702 - RNA, 20 nt, Human
cacugccuucucaacuccaa

SEQ ID NO: 1481703 - RNA, 12 nt, Human
cacugccuuuga

SEQ ID NO: 1481704 - RNA, 20 nt, Human
cacugcugauauuuucucua

SEQ ID NO: 1481705 - RNA, 13 nt, Human
cacugcucacacu

SEQ ID NO: 1481706 - RNA, 17 nt, Human
cacugcuugaacuaggc

SEQ ID NO: 1481707 - RNA, 20 nt, Human
cacugcuugaacuaggcuga

SEQ ID NO: 1481708 - RNA, 16 nt, Human
cacuggaccacugggc

SEQ ID NO: 1481709 - RNA, 19 nt, Human
cacuguacuugcucuugau

SEQ ID NO: 1481710 - RNA, 18 nt, Human
cacuguagaaugauuuca

SEQ ID NO: 1481711 - RNA, 18 nt, Human
cacuguacuugcucuuga

SEQ ID NO: 1481712 - RNA, 15 nt, Human
cacuguacuugcucu

SEQ ID NO: 1481713 - RNA, 15 nt, Human
cacuguaugagugga

SEQ ID NO: 1481714 - RNA, 13 nt, Human
cacuggcgaggag

SEQ ID NO: 1481715 - RNA, 16 nt, Human
cacuggccccacccuc

SEQ ID NO: 1481716 - RNA, 14 nt, Human
cacuggccccaccc

SEQ ID NO: 1481717 - RNA, 13 nt, Human
cacuggccccacc

SEQ ID NO: 1481718 - RNA, 12 nt, Human
cacuguaaaaug

SEQ ID NO: 1481719 - RNA, 13 nt, Human
cacuguaaaaugu

SEQ ID NO: 1481720 - RNA, 22 nt, Human
cacugucagcagggacuguaaa

SEQ ID NO: 1481721 - RNA, 22 nt, Human
cacuguggguagacacacauga

SEQ ID NO: 1481722 - RNA, 24 nt, Human
cacuguggguagacacacaugaag

SEQ ID NO: 1481723 - RNA, 19 nt, Human
cacuguggguagacacaca

SEQ ID NO: 1481724 - RNA, 18 nt, Human
cacuucagguauaccuca

SEQ ID NO: 1481725 - RNA, 19 nt, Human
cacuucagguauaccucac

SEQ ID NO: 1481726 - RNA, 20 nt, Human
cacuucagguauaccucacu

SEQ ID NO: 1481727 - RNA, 14 nt, Human
cacuucauaaucca

SEQ ID NO: 1481728 - RNA, 15 nt, Human
cacuucauaauccag

SEQ ID NO: 1481729 - RNA, 22 nt, Human
cacuuauuggaacucugcuuga

SEQ ID NO: 1481730 - RNA, 20 nt, Human
cacuuauuuaugaaccugcc

SEQ ID NO: 1481731 - RNA, 18 nt, Human
cacuucugggcuucaucu

SEQ ID NO: 1481732 - RNA, 12 nt, Human
cacuugcaaccu

SEQ ID NO: 1481733 - RNA, 20 nt, Human
cacuucugggcuucaucugg

SEQ ID NO: 1481734 - RNA, 19 nt, Human
cacuucuuacaauaauucu

SEQ ID NO: 1481735 - RNA, 22 nt, Human
cacuugcggauauucuggacug

SEQ ID NO: 1481736 - RNA, 16 nt, Human
cacuugcuggaagacg

SEQ ID NO: 1481737 - RNA, 23 nt, Human
cacuuggcugcauaaauguggua

SEQ ID NO: 1481738 - RNA, 13 nt, Human
caccucucaauau

SEQ ID NO: 1481739 - RNA, 15 nt, Human
caccgcagaaggaag

SEQ ID NO: 1481740 - RNA, 14 nt, Human
caccgcagaaggaa

SEQ ID NO: 1481741 - RNA, 14 nt, Human
caccggggccuggg

SEQ ID NO: 1481742 - RNA, 21 nt, Human
caccggggccugggcaggagg

SEQ ID NO: 1481743 - RNA, 22 nt, Human
caccggggccugggcaggaggg

SEQ ID NO: 1481744 - RNA, 24 nt, Human
caccgugcccagcccuaaacauca

SEQ ID NO: 1481745 - RNA, 19 nt, Human
caccucccucaaccucauc

SEQ ID NO: 1481746 - RNA, 17 nt, Human
caccucccucaaccuca

SEQ ID NO: 1481747 - RNA, 15 nt, Human
caccucccucaaccu

SEQ ID NO: 1481748 - RNA, 21 nt, Human
caccucccuauacugcuugga

SEQ ID NO: 1481749 - RNA, 20 nt, Human
caccucccuauacugcuugg

SEQ ID NO: 1481750 - RNA, 11 nt, Human
caccucaugga

SEQ ID NO: 1481751 - RNA, 12 nt, Human
caccucauggaa

SEQ ID NO: 1481752 - RNA, 14 nt, Human
caccucauggaauu

SEQ ID NO: 1481753 - RNA, 10 nt, Human
caccucccag

SEQ ID NO: 1481754 - RNA, 11 nt, Human
caccucccagg

SEQ ID NO: 1481755 - RNA, 12 nt, Human
caccucccagga

SEQ ID NO: 1481756 - RNA, 23 nt, Human
caccucucaauauucaauaaagc

SEQ ID NO: 1481757 - RNA, 22 nt, Human
caccucucaauauucaauaaag

SEQ ID NO: 1481758 - RNA, 21 nt, Human
caccucucaauauucaauaaa

SEQ ID NO: 1481759 - RNA, 19 nt, Human
caccucgcagguucaagca

SEQ ID NO: 1481760 - RNA, 20 nt, Human
caccuccuggguucaagcga

SEQ ID NO: 1481761 - RNA, 22 nt, Human
caccuccuggguucaagcgauu

SEQ ID NO: 1481762 - RNA, 21 nt, Human
caccucccucaaccucauccu

SEQ ID NO: 1481763 - RNA, 15 nt, Human
caccuccugccucag

SEQ ID NO: 1481764 - RNA, 13 nt, Human
caccuccugccuc

SEQ ID NO: 1481765 - RNA, 14 nt, Human
caccugucugucug

SEQ ID NO: 1481766 - RNA, 13 nt, Human
caccugucugucu

SEQ ID NO: 1481767 - RNA, 12 nt, Human
caccugucuguc

SEQ ID NO: 1481768 - RNA, 11 nt, Human
caccugucugu

SEQ ID NO: 1481769 - RNA, 15 nt, Human
caccugucccagaaa

SEQ ID NO: 1481770 - RNA, 14 nt, Human
caccugucccagaa

SEQ ID NO: 1481771 - RNA, 16 nt, Human
caccugggagaaaucu

SEQ ID NO: 1481772 - RNA, 17 nt, Human
caccugggagaaaucug

SEQ ID NO: 1481773 - RNA, 14 nt, Human
caccuguaaaccug

SEQ ID NO: 1481774 - RNA, 15 nt, Human
caccuguaaaccuga

SEQ ID NO: 1481775 - RNA, 16 nt, Human
caccuguaaaccugag

SEQ ID NO: 1481776 - RNA, 20 nt, Human
caccugggauuacaagcaug

SEQ ID NO: 1481777 - RNA, 17 nt, Human
caccugaacugaacacc

SEQ ID NO: 1481778 - RNA, 19 nt, Human
caccugaacugaacaccau

SEQ ID NO: 1481779 - RNA, 13 nt, Human
caccugaacugaa

SEQ ID NO: 1481780 - RNA, 21 nt, Human
caccuggaagcauuuguuucu

SEQ ID NO: 1481781 - RNA, 22 nt, Human
caccuggaagcauuuguuucua

SEQ ID NO: 1481782 - RNA, 19 nt, Human
caccugagucacccuaccu

SEQ ID NO: 1481783 - RNA, 23 nt, Human
caccugagucacccuaccugugc

SEQ ID NO: 1481784 - RNA, 13 nt, Human
caccgcagaagga

SEQ ID NO: 1481785 - RNA, 15 nt, Human
caccgacugaaaaua

SEQ ID NO: 1481786 - RNA, 18 nt, Human
cacccuugguuccuaacu

SEQ ID NO: 1481787 - RNA, 12 nt, Human
cacccucacacu

SEQ ID NO: 1481788 - RNA, 16 nt, Human
cacccuaccugugccu

SEQ ID NO: 1481789 - RNA, 12 nt, Human
caccccuaggac

SEQ ID NO: 1481790 - RNA, 18 nt, Human
ggcagacucuuuaugcuu

SEQ ID NO: 1481791 - RNA, 21 nt, Human
ggcaguguagggaguuguggg

SEQ ID NO: 1481792 - RNA, 20 nt, Human
ggcucagaggguguccugca

SEQ ID NO: 1481793 - RNA, 22 nt, Human
ggcugacaugaagcuguugugu

SEQ ID NO: 1481794 - RNA, 16 nt, Human
ggcugccuucuggccu

SEQ ID NO: 1481795 - RNA, 17 nt, Human
ggcuccuugguucuuga

SEQ ID NO: 1481796 - RNA, 20 nt, Human
gggacagucaccucauggaa

SEQ ID NO: 1481797 - RNA, 21 nt, Human
gggacagucaccucauggaau

SEQ ID NO: 1481798 - RNA, 22 nt, Human
gggacagucaccucauggaauu

SEQ ID NO: 1481799 - RNA, 17 nt, Human
gggacagguccucagug

SEQ ID NO: 1481800 - RNA, 11 nt, Human
gggaagacagu

SEQ ID NO: 1481801 - RNA, 12 nt, Human
gggaagacagug

SEQ ID NO: 1481802 - RNA, 14 nt, Human
gggaagacaguggc

SEQ ID NO: 1481803 - RNA, 22 nt, Human
gggacaccuaggcuaggguggg

SEQ ID NO: 1481804 - RNA, 16 nt, Human
gggaagacaguggccc

SEQ ID NO: 1481805 - RNA, 18 nt, Human
gggaagagacagcccagg

SEQ ID NO: 1481806 - RNA, 18 nt, Human
ggcuucuggccaggaagc

SEQ ID NO: 1481807 - RNA, 20 nt, Human
ggcugggucgcccuggacug

SEQ ID NO: 1481808 - RNA, 17 nt, Human
ggcugggucgcccugga

SEQ ID NO: 1481809 - RNA, 14 nt, Human
ggcugggucgcccu

SEQ ID NO: 1481810 - RNA, 22 nt, Human
aaaaauaagaagaaugcuuaau

SEQ ID NO: 1481811 - RNA, 14 nt, Human
aaaaauaacaauga

SEQ ID NO: 1481812 - RNA, 14 nt, Human
aaaaauaagaagaa

SEQ ID NO: 1481813 - RNA, 16 nt, Human
aaaaauaagaagaaug

SEQ ID NO: 1481814 - RNA, 13 nt, Human
aaaaggaaagaaa

SEQ ID NO: 1481815 - RNA, 14 nt, Human
aaaaggaaagaaaa

SEQ ID NO: 1481816 - RNA, 14 nt, Human
aaaagcuuuuuauu

SEQ ID NO: 1481817 - RNA, 21 nt, Human
aaaagcuuugaacccugggac

SEQ ID NO: 1481818 - RNA, 19 nt, Human
aaaagcccaccauuuggca

SEQ ID NO: 1481819 - RNA, 15 nt, Human
gggacuugugucugc

SEQ ID NO: 1481820 - RNA, 14 nt, Human
gggacuugugucug

SEQ ID NO: 1481821 - RNA, 13 nt, Human
gggacuugugucu

SEQ ID NO: 1481822 - RNA, 19 nt, Human
gggaugacuaaaauauuua

SEQ ID NO: 1481823 - RNA, 20 nt, Human
gggaugacuaaaauauuuau

SEQ ID NO: 1481824 - RNA, 16 nt, Human
gggaggguaggcagga

SEQ ID NO: 1481825 - RNA, 15 nt, Human
gggaggguaccagca

SEQ ID NO: 1481826 - RNA, 19 nt, Human
gggacauuugcucauggaa

SEQ ID NO: 1481827 - RNA, 18 nt, Human
gggaccaggagugggugg

SEQ ID NO: 1481828 - RNA, 12 nt, Human
gggaccaggagu

SEQ ID NO: 1481829 - RNA, 13 nt, Human
aaaaaugguaauu

SEQ ID NO: 1481830 - RNA, 11 nt, Human
aaaaauguagg

SEQ ID NO: 1481831 - RNA, 12 nt, Human
aaaaauguagga

SEQ ID NO: 1481832 - RNA, 18 nt, Human
aaaaauguaggagacugu

SEQ ID NO: 1481833 - RNA, 21 nt, Human
aaaagauugaaguauuuugcu

SEQ ID NO: 1481834 - RNA, 14 nt, Human
aaaagauugcugaa

SEQ ID NO: 1481835 - RNA, 16 nt, Human
aaaagauugcugaaau

SEQ ID NO: 1481836 - RNA, 18 nt, Human
aaaagauugcugaaauuu

SEQ ID NO: 1481837 - RNA, 21 nt, Human
aaaagauugcugaaauuuuau

SEQ ID NO: 1481838 - RNA, 16 nt, Human
aaaagcaaaaaagaaa

SEQ ID NO: 1481839 - RNA, 19 nt, Human
aaaacucuuauaaauuucu

SEQ ID NO: 1481840 - RNA, 21 nt, Human
guacuucaaauccuugaagau

SEQ ID NO: 1481841 - RNA, 22 nt, Human
guacuucaaauccuugaagauu

SEQ ID NO: 1481842 - RNA, 15 nt, Human
guacuucaugcuguc

SEQ ID NO: 1481843 - RNA, 19 nt, Human
guacuggcugauggaguaa

SEQ ID NO: 1481844 - RNA, 20 nt, Human
guacugggauuacaggcgug

SEQ ID NO: 1481845 - RNA, 13 nt, Human
guacugcagccuc

SEQ ID NO: 1481846 - RNA, 14 nt, Human
guacuauuuaacug

SEQ ID NO: 1481847 - RNA, 18 nt, Human
guacuauuuaacugacua

SEQ ID NO: 1481848 - RNA, 15 nt, Human
guacuauuuaacuga

SEQ ID NO: 1481849 - RNA, 16 nt, Human
guagaauguaaagcuu

SEQ ID NO: 1481850 - RNA, 21 nt, Human
guagaauguaaagcuugucug

SEQ ID NO: 1481851 - RNA, 19 nt, Human
guagaauguaaagcuuguc

SEQ ID NO: 1481852 - RNA, 17 nt, Human
guagaauuaucuaauuu

SEQ ID NO: 1481853 - RNA, 22 nt, Human
guagaauuaucuaauuuauaaa

SEQ ID NO: 1481854 - RNA, 18 nt, Human
guagacaguauauaacua

SEQ ID NO: 1481855 - RNA, 14 nt, Human
guagaccaaaauaa

SEQ ID NO: 1481856 - RNA, 15 nt, Human
guagaccaaaauaaa

SEQ ID NO: 1481857 - RNA, 16 nt, Human
guagaccaaaauaaaa

SEQ ID NO: 1481858 - RNA, 15 nt, Human
aaauccauacauuug

SEQ ID NO: 1481859 - RNA, 18 nt, Human
aaauccauacauuugugu

SEQ ID NO: 1481860 - RNA, 23 nt, Human
guaccaagacuacuagggaaaug

SEQ ID NO: 1481861 - RNA, 20 nt, Human
guaccaagacuacuagggaa

SEQ ID NO: 1481862 - RNA, 21 nt, Human
guaccaagaaucuugguuugc

SEQ ID NO: 1481863 - RNA, 17 nt, Human
guaccagaugcagcuca

SEQ ID NO: 1481864 - RNA, 21 nt, Human
aaaucagacuaugaaguuuuu

SEQ ID NO: 1481865 - RNA, 14 nt, Human
aaaucagacuauga

SEQ ID NO: 1481866 - RNA, 17 nt, Human
aaaucacgcuuuuugaa

SEQ ID NO: 1481867 - RNA, 19 nt, Human
aaaucaccacaaacuguaa

SEQ ID NO: 1481868 - RNA, 20 nt, Human
aaaucaccacaaacuguaau

SEQ ID NO: 1481869 - RNA, 20 nt, Human
aaaucacgcuuuuugaaaaa

SEQ ID NO: 1481870 - RNA, 17 nt, Human
aaauauuaugagaugcu

SEQ ID NO: 1481871 - RNA, 17 nt, Human
aaauauuauguuaaaac

SEQ ID NO: 1481872 - RNA, 16 nt, Human
aaauauuaugagaugc

SEQ ID NO: 1481873 - RNA, 17 nt, Human
aaauauuagaaacagcu

SEQ ID NO: 1481874 - RNA, 14 nt, Human
aaauauuagaaaca

SEQ ID NO: 1481875 - RNA, 15 nt, Human
aaauccacuuuaucu

SEQ ID NO: 1481876 - RNA, 14 nt, Human
aaaucauuuugcaa

SEQ ID NO: 1481877 - RNA, 22 nt, Human
aaaucauaagauauuuuucaug

SEQ ID NO: 1481878 - RNA, 20 nt, Human
guaauaggcguaacuaauuu

SEQ ID NO: 1481879 - RNA, 15 nt, Human
guaacucaucuguca

SEQ ID NO: 1481880 - RNA, 13 nt, Human
guaacucaucugu

SEQ ID NO: 1481881 - RNA, 20 nt, Human
guaaacuguguauuccaaga

SEQ ID NO: 1481882 - RNA, 21 nt, Human
guaauccaagcaaaugugaau

SEQ ID NO: 1481883 - RNA, 21 nt, Human
guaauuguugcuaaucuucuu

SEQ ID NO: 1481884 - RNA, 18 nt, Human
guaauuuagaaaucauuu

SEQ ID NO: 1481885 - RNA, 16 nt, Human
guaauuugaggacaac

SEQ ID NO: 1481886 - RNA, 23 nt, Human
guaauuugagagaaauaugaaga

SEQ ID NO: 1481887 - RNA, 18 nt, Human
aaauacauuguauauaug

SEQ ID NO: 1481888 - RNA, 13 nt, Human
aaauacaugcuaa

SEQ ID NO: 1481889 - RNA, 18 nt, Human
aaauacaugcuaagagaa

SEQ ID NO: 1481890 - RNA, 15 nt, Human
aaauacaaaaauacu

SEQ ID NO: 1481891 - RNA, 11 nt, Human
aaauacaaaaa

SEQ ID NO: 1481892 - RNA, 22 nt, Human
aaauaauuuuuauauuugaaau

SEQ ID NO: 1481893 - RNA, 23 nt, Human
aaauaauuuuuauauuugaaaua

SEQ ID NO: 1481894 - RNA, 23 nt, Human
guacacugccuucucaacuccaa

SEQ ID NO: 1481895 - RNA, 21 nt, Human
aaauaauuuuuauauuugaaa

SEQ ID NO: 1481896 - RNA, 18 nt, Human
guacacagcaccagaaug

SEQ ID NO: 1481897 - RNA, 20 nt, Human
guacacagcucuagacacug

SEQ ID NO: 1481898 - RNA, 22 nt, Human
aaaguugcuauuugaacuuuuu

SEQ ID NO: 1481899 - RNA, 17 nt, Human
aaaguugguaaaccuuu

SEQ ID NO: 1481900 - RNA, 16 nt, Human
aaaguugguaaaccuu

SEQ ID NO: 1481901 - RNA, 12 nt, Human
aaaguuuaauaa

SEQ ID NO: 1481902 - RNA, 15 nt, Human
aaaguuuaauaaauu

SEQ ID NO: 1481903 - RNA, 13 nt, Human
aaauaauaauuuu

SEQ ID NO: 1481904 - RNA, 17 nt, Human
aaauaauacugcugaga

SEQ ID NO: 1481905 - RNA, 13 nt, Human
aaauaaguuuuug

SEQ ID NO: 1481906 - RNA, 16 nt, Human
aaauaaguuuuuguuu

SEQ ID NO: 1481907 - RNA, 14 nt, Human
aaauaaucauucuu

SEQ ID NO: 1481908 - RNA, 12 nt, Human
aaauaagaaacu

SEQ ID NO: 1481909 - RNA, 14 nt, Human
aaauaagaaacuuu

SEQ ID NO: 1481910 - RNA, 21 nt, Human
aaauaagaaacuuuuuuauuu

SEQ ID NO: 1481911 - RNA, 15 nt, Human
aaauaagaaacuuuu

SEQ ID NO: 1481912 - RNA, 14 nt, Human
aaauaagaagaaug

SEQ ID NO: 1481913 - RNA, 15 nt, Human
aaauaagaagaaugc

SEQ ID NO: 1481914 - RNA, 20 nt, Human
aaauaagaagaaugcuuaau

SEQ ID NO: 1481915 - RNA, 17 nt, Human
aaauaagagcucaggau

SEQ ID NO: 1481916 - RNA, 23 nt, Human
aaauaagacggauuuauuuuucc

SEQ ID NO: 1481917 - RNA, 19 nt, Human
aaauaauuuuaucucuuuc

SEQ ID NO: 1481918 - RNA, 12 nt, Human
aaauaauuuuaa

SEQ ID NO: 1481919 - RNA, 14 nt, Human
aaauaauuuuaaac

SEQ ID NO: 1481920 - RNA, 18 nt, Human
aaauaauuuuaaacaaag

SEQ ID NO: 1481921 - RNA, 20 nt, Human
aaauaauuuuaaacaaaggu

SEQ ID NO: 1481922 - RNA, 18 nt, Human
aaaguauguuagugcaaa

SEQ ID NO: 1481923 - RNA, 19 nt, Human
ggugcugggccccugccuc

SEQ ID NO: 1481924 - RNA, 22 nt, Human
ggugcuucuaguucugccagga

SEQ ID NO: 1481925 - RNA, 15 nt, Human
gguggaacaagcaca

SEQ ID NO: 1481926 - RNA, 16 nt, Human
ggugcugggccccugc

SEQ ID NO: 1481927 - RNA, 15 nt, Human
ggugcugggccccug

SEQ ID NO: 1481928 - RNA, 13 nt, Human
ggugcugggcccc

SEQ ID NO: 1481929 - RNA, 11 nt, Human
ggugcugggcc

SEQ ID NO: 1481930 - RNA, 21 nt, Human
ggugcauauuuauaaaaauaa

SEQ ID NO: 1481931 - RNA, 20 nt, Human
ggucgcccuggacugugugc

SEQ ID NO: 1481932 - RNA, 19 nt, Human
ggugaaacauuuucucccu

SEQ ID NO: 1481933 - RNA, 20 nt, Human
ggugaaacauuuucucccug

SEQ ID NO: 1481934 - RNA, 14 nt, Human
ggucgcccuggacu

SEQ ID NO: 1481935 - RNA, 14 nt, Human
aaagguaaaucaga

SEQ ID NO: 1481936 - RNA, 14 nt, Human
aaagguacuucaaa

SEQ ID NO: 1481937 - RNA, 23 nt, Human
aaagcugcugagaaucuagccuc

SEQ ID NO: 1481938 - RNA, 15 nt, Human
aaagcugguuuaaug

SEQ ID NO: 1481939 - RNA, 20 nt, Human
gguggaugauccccacgcca

SEQ ID NO: 1481940 - RNA, 13 nt, Human
aaagacagugaaa

SEQ ID NO: 1481941 - RNA, 15 nt, Human
aaagaccauuuuucc

SEQ ID NO: 1481942 - RNA, 16 nt, Human
aaacuuugaaguuagc

SEQ ID NO: 1481943 - RNA, 16 nt, Human
aaacuuguauuaugug

SEQ ID NO: 1481944 - RNA, 23 nt, Human
aaacuucagcgguuuauauaagc

SEQ ID NO: 1481945 - RNA, 15 nt, Human
ggguggggggggugc

SEQ ID NO: 1481946 - RNA, 13 nt, Human
ggguggggagaga

SEQ ID NO: 1481947 - RNA, 14 nt, Human
ggguggggagagac

SEQ ID NO: 1481948 - RNA, 18 nt, Human
ggguggggagagacgggc

SEQ ID NO: 1481949 - RNA, 10 nt, Human
gguccuucaa

SEQ ID NO: 1481950 - RNA, 19 nt, Human
aaagaugcuuuuaacagag

SEQ ID NO: 1481951 - RNA, 22 nt, Human
aaagcaagcauucagaagaaaa

SEQ ID NO: 1481952 - RNA, 12 nt, Human
aaagaugcuuuu

SEQ ID NO: 1481953 - RNA, 13 nt, Human
aaagaugcuuuua

SEQ ID NO: 1481954 - RNA, 14 nt, Human
aaagagauacagag

SEQ ID NO: 1481955 - RNA, 15 nt, Human
gggucgcccuggacu

SEQ ID NO: 1481956 - RNA, 13 nt, Human
gggucgcccugga

SEQ ID NO: 1481957 - RNA, 19 nt, Human
gggggugcugggccccugc

SEQ ID NO: 1481958 - RNA, 13 nt, Human
ggggguggccagg

SEQ ID NO: 1481959 - RNA, 20 nt, Human
ggggguggccaggccgggaa

SEQ ID NO: 1481960 - RNA, 11 nt, Human
ggguccaggag

SEQ ID NO: 1481961 - RNA, 12 nt, Human
ggguccaggagg

SEQ ID NO: 1481962 - RNA, 18 nt, Human
gggggcgcggcugggagg

SEQ ID NO: 1481963 - RNA, 18 nt, Human
aaaccuuuuauauuuagu

SEQ ID NO: 1481964 - RNA, 18 nt, Human
aaaccuuuguuugcaucu

SEQ ID NO: 1481965 - RNA, 17 nt, Human
aaaccuuucuucaccaa

SEQ ID NO: 1481966 - RNA, 18 nt, Human
aaaccugaccccugcuca

SEQ ID NO: 1481967 - RNA, 12 nt, Human
aaacauucuauc

SEQ ID NO: 1481968 - RNA, 15 nt, Human
aaacucguuaauuug

SEQ ID NO: 1481969 - RNA, 13 nt, Human
aaacucaaaauau

SEQ ID NO: 1481970 - RNA, 21 nt, Human
aaacucaaaauauuuguacau

SEQ ID NO: 1481971 - RNA, 22 nt, Human
aaacuaggugcauauuuauaaa

SEQ ID NO: 1481972 - RNA, 22 nt, Human
aaacuauaagcaagaaggcaaa

SEQ ID NO: 1481973 - RNA, 16 nt, Human
aaacuaucuuggugaa

SEQ ID NO: 1481974 - RNA, 13 nt, Human
aaacgucuuaaau

SEQ ID NO: 1481975 - RNA, 18 nt, Human
aaacuaggugcauauuua

SEQ ID NO: 1481976 - RNA, 14 nt, Human
aaacgucuuaaaua

SEQ ID NO: 1481977 - RNA, 13 nt, Human
ggguggcagcaac

SEQ ID NO: 1481978 - RNA, 12 nt, Human
ggguggccaggc

SEQ ID NO: 1481979 - RNA, 13 nt, Human
ggguggccaggcc

SEQ ID NO: 1481980 - RNA, 14 nt, Human
ggguggccaggccg

SEQ ID NO: 1481981 - RNA, 18 nt, Human
ggguggccaggccgggaa

SEQ ID NO: 1481982 - RNA, 20 nt, Human
ggguggccaggccgggaaaa

SEQ ID NO: 1481983 - RNA, 19 nt, Human
aaacuguguauuccaagac

SEQ ID NO: 1481984 - RNA, 16 nt, Human
aaacucguuuuuuaca

SEQ ID NO: 1481985 - RNA, 10 nt, Human
aaacugugua

SEQ ID NO: 1481986 - RNA, 20 nt, Human
aaacuguguacauaacugaa

SEQ ID NO: 1481987 - RNA, 21 nt, Human
aaacuguguacauaacugaaa

SEQ ID NO: 1481988 - RNA, 16 nt, Human
aaacuguguauuccaa

SEQ ID NO: 1481989 - RNA, 18 nt, Human
aaacuguguauuccaaga

SEQ ID NO: 1481990 - RNA, 19 nt, Human
ggggaauugaggacacuga

SEQ ID NO: 1481991 - RNA, 19 nt, Human
ggggacacauguauuuggu

SEQ ID NO: 1481992 - RNA, 19 nt, Human
ggggaagagagccugcagg

SEQ ID NO: 1481993 - RNA, 17 nt, Human
ggggaagacaguggccc

SEQ ID NO: 1481994 - RNA, 20 nt, Human
ggggaagagagccugcagga

SEQ ID NO: 1481995 - RNA, 21 nt, Human
ggggaccaggagugggugggg

SEQ ID NO: 1481996 - RNA, 17 nt, Human
ggggacacauguauuug

SEQ ID NO: 1481997 - RNA, 12 nt, Human
ggggaccaggag

SEQ ID NO: 1481998 - RNA, 13 nt, Human
ggggaccaggagu

SEQ ID NO: 1481999 - RNA, 19 nt, Human
ggggacuuacaugauucau

SEQ ID NO: 1482000 - RNA, 17 nt, Human
ggggccgggggcagucu

SEQ ID NO: 1482001 - RNA, 15 nt, Human
aaaauuuuuaaucuu

SEQ ID NO: 1482002 - RNA, 17 nt, Human
aaacaaagguugagaug

SEQ ID NO: 1482003 - RNA, 20 nt, Human
aaaauuuauauuguaaauau

SEQ ID NO: 1482004 - RNA, 16 nt, Human
aaaauguucagaaggu

SEQ ID NO: 1482005 - RNA, 13 nt, Human
aaaauguugaaau

SEQ ID NO: 1482006 - RNA, 17 nt, Human
aaaauguugaaauauga

SEQ ID NO: 1482007 - RNA, 21 nt, Human
aaaauguuggucauuuuaugu

SEQ ID NO: 1482008 - RNA, 17 nt, Human
aaacacauuaggaaaag

SEQ ID NO: 1482009 - RNA, 22 nt, Human
aaacagggcugccuucuggccu

SEQ ID NO: 1482010 - RNA, 15 nt, Human
aaacagggcugccuu

SEQ ID NO: 1482011 - RNA, 14 nt, Human
aaacaauguuuaaa

SEQ ID NO: 1482012 - RNA, 23 nt, Human
gcugggccccugccucucugcag

SEQ ID NO: 1482013 - RNA, 22 nt, Human
gcugggccccugccucucugca

SEQ ID NO: 1482014 - RNA, 21 nt, Human
gcugggccccugccucucugc

SEQ ID NO: 1482015 - RNA, 12 nt, Human
gcugggucgccc

SEQ ID NO: 1482016 - RNA, 15 nt, Human
gcuggagugcagugg

SEQ ID NO: 1482017 - RNA, 16 nt, Human
gcuuaugguaccagau

SEQ ID NO: 1482018 - RNA, 20 nt, Human
gcuuaugguaccagaugcag

SEQ ID NO: 1482019 - RNA, 15 nt, Human
gcuugagccaggagg

SEQ ID NO: 1482020 - RNA, 21 nt, Human
gcuugagagcccugaggccua

SEQ ID NO: 1482021 - RNA, 15 nt, Human
gcuuugaaacagaaa

SEQ ID NO: 1482022 - RNA, 16 nt, Human
gcuucuaguucugcca

SEQ ID NO: 1482023 - RNA, 17 nt, Human
gcuucuaguucugccag

SEQ ID NO: 1482024 - RNA, 14 nt, Human
gcuucguuuauuuu

SEQ ID NO: 1482025 - RNA, 16 nt, Human
gcuucguuuauuuuca

SEQ ID NO: 1482026 - RNA, 17 nt, Human
gcuucguuuauuuucaa

SEQ ID NO: 1482027 - RNA, 17 nt, Human
ggaagagaaggagcaga

SEQ ID NO: 1482028 - RNA, 12 nt, Human
ggaagagaagga

SEQ ID NO: 1482029 - RNA, 21 nt, Human
ggaagagagccugcaggaucu

SEQ ID NO: 1482030 - RNA, 17 nt, Human
ggaagagacagcccagg

SEQ ID NO: 1482031 - RNA, 16 nt, Human
ggaagagacagcccag

SEQ ID NO: 1482032 - RNA, 18 nt, Human
ggaagagagccugcagga

SEQ ID NO: 1482033 - RNA, 14 nt, Human
ggaacuugaacuga

SEQ ID NO: 1482034 - RNA, 16 nt, Human
ggaacuugaacugauu

SEQ ID NO: 1482035 - RNA, 18 nt, Human
ggaacuugaacugauuca

SEQ ID NO: 1482036 - RNA, 14 nt, Human
ggaagacaguggcc

SEQ ID NO: 1482037 - RNA, 15 nt, Human
ggaagacaguggccc

SEQ ID NO: 1482038 - RNA, 19 nt, Human
ggaagccccugggcccagu

SEQ ID NO: 1482039 - RNA, 18 nt, Human
ggaagccccugggcccag

SEQ ID NO: 1482040 - RNA, 15 nt, Human
ggaagccccugggcc

SEQ ID NO: 1482041 - RNA, 14 nt, Human
ggaagccccugggc

SEQ ID NO: 1482042 - RNA, 13 nt, Human
ggaagccccuggg

SEQ ID NO: 1482043 - RNA, 18 nt, Human
ggaaguugacuuauagua

SEQ ID NO: 1482044 - RNA, 21 nt, Human
ggaagcuuuggugagaaccug

SEQ ID NO: 1482045 - RNA, 20 nt, Human
ggaagcuuuggugagaaccu

SEQ ID NO: 1482046 - RNA, 17 nt, Human
ggaagcugcccugccca

SEQ ID NO: 1482047 - RNA, 20 nt, Human
ggaagcugugcgugugugug

SEQ ID NO: 1482048 - RNA, 18 nt, Human
ggaaugaagcaaugcuuc

SEQ ID NO: 1482049 - RNA, 19 nt, Human
ggaaugaagauacugaaau

SEQ ID NO: 1482050 - RNA, 19 nt, Human
ggaauaagguacaagaagc

SEQ ID NO: 1482051 - RNA, 17 nt, Human
ggacaccugcccugccc

SEQ ID NO: 1482052 - RNA, 16 nt, Human
ggacaccugcccugcc

SEQ ID NO: 1482053 - RNA, 19 nt, Human
ggacaccugggagaaaucu

SEQ ID NO: 1482054 - RNA, 22 nt, Human
ggacagcuuguggcaagugaau

SEQ ID NO: 1482055 - RNA, 15 nt, Human
ggacaggauccaggc

SEQ ID NO: 1482056 - RNA, 12 nt, Human
ggacagcuugug

SEQ ID NO: 1482057 - RNA, 17 nt, Human
ggacaggauguguuugc

SEQ ID NO: 1482058 - RNA, 18 nt, Human
ggacaggauguguuugcu

SEQ ID NO: 1482059 - RNA, 20 nt, Human
ggacaggauguguuugcuuu

SEQ ID NO: 1482060 - RNA, 18 nt, Human
ggagaaaugaaaaaauau

SEQ ID NO: 1482061 - RNA, 22 nt, Human
ggagaaaucuggcuucuggcca

SEQ ID NO: 1482062 - RNA, 19 nt, Human
ggacuugcaaaaaggguca

SEQ ID NO: 1482063 - RNA, 20 nt, Human
ggacuuuauagaucagccag

SEQ ID NO: 1482064 - RNA, 19 nt, Human
ggacuaugaaaagcuagaa

SEQ ID NO: 1482065 - RNA, 18 nt, Human
ggacucaagccccggacu

SEQ ID NO: 1482066 - RNA, 20 nt, Human
ggacucagguggcccuacug

SEQ ID NO: 1482067 - RNA, 19 nt, Human
ggacucaucuuucccuccu

SEQ ID NO: 1482068 - RNA, 16 nt, Human
ggacucaucuuucccu

SEQ ID NO: 1482069 - RNA, 22 nt, Human
ggacucaucuuucccuccuugg

SEQ ID NO: 1482070 - RNA, 23 nt, Human
ggacucaucuuucccuccuuggu

SEQ ID NO: 1482071 - RNA, 21 nt, Human
ggacucaucuuucccuccuug

SEQ ID NO: 1482072 - RNA, 20 nt, Human
ggacucaucuuucccuccuu

SEQ ID NO: 1482073 - RNA, 13 nt, Human
ggacccuguccaa

SEQ ID NO: 1482074 - RNA, 21 nt, Human
gccugccccuacccuggacuu

SEQ ID NO: 1482075 - RNA, 22 nt, Human
gccugccccuacccuggacuug

SEQ ID NO: 1482076 - RNA, 19 nt, Human
gccuccuuagaaaaaaaau

SEQ ID NO: 1482077 - RNA, 23 nt, Human
gccuccauccuacccccugugcc

SEQ ID NO: 1482078 - RNA, 15 nt, Human
gccucuuagaugcag

SEQ ID NO: 1482079 - RNA, 19 nt, Human
gccucuuaaauaaaccuuu

SEQ ID NO: 1482080 - RNA, 13 nt, Human
gccucuucccucu

SEQ ID NO: 1482081 - RNA, 21 nt, Human
gccucuuccagucuuccugac

SEQ ID NO: 1482082 - RNA, 19 nt, Human
gccugugccuccucacccc

SEQ ID NO: 1482083 - RNA, 14 nt, Human
gcgaucucagcuca

SEQ ID NO: 1482084 - RNA, 17 nt, Human
gcgaucucggcucacug

SEQ ID NO: 1482085 - RNA, 16 nt, Human
gccuugcggcuccuca

SEQ ID NO: 1482086 - RNA, 17 nt, Human
gccuugcggcuccucag

SEQ ID NO: 1482087 - RNA, 20 nt, Human
gccuugcggcuccucaggga

SEQ ID NO: 1482088 - RNA, 18 nt, Human
gccuugcggcuccucagg

SEQ ID NO: 1482089 - RNA, 16 nt, Human
gcccccaccuggcuca

SEQ ID NO: 1482090 - RNA, 19 nt, Human
gcccccacugccuuugacc

SEQ ID NO: 1482091 - RNA, 23 nt, Human
gccccugccaccuccugccucag

SEQ ID NO: 1482092 - RNA, 23 nt, Human
gccccugccucucugcagguccc

SEQ ID NO: 1482093 - RNA, 20 nt, Human
gccccugccucucugcaggu

SEQ ID NO: 1482094 - RNA, 17 nt, Human
gcccgguaagagcaaaa

SEQ ID NO: 1482095 - RNA, 17 nt, Human
gcccugccaccugucug

SEQ ID NO: 1482096 - RNA, 16 nt, Human
gcccugccaccugucu

SEQ ID NO: 1482097 - RNA, 15 nt, Human
gcccugccaccuguc

SEQ ID NO: 1482098 - RNA, 14 nt, Human
gcccugccaccugu

SEQ ID NO: 1482099 - RNA, 13 nt, Human
gcccugccaccug

SEQ ID NO: 1482100 - RNA, 17 nt, Human
gcccugcccugccaccu

SEQ ID NO: 1482101 - RNA, 13 nt, Human
gcccugcccugcc

SEQ ID NO: 1482102 - RNA, 20 nt, Human
gcccugugccccuugacaac

SEQ ID NO: 1482103 - RNA, 20 nt, Human
gcucacugcaaccucugccu

SEQ ID NO: 1482104 - RNA, 14 nt, Human
gcuauuugaagugu

SEQ ID NO: 1482105 - RNA, 18 nt, Human
gcuauuuuauauuacacu

SEQ ID NO: 1482106 - RNA, 23 nt, Human
gcuauuuuauauuacacuacaca

SEQ ID NO: 1482107 - RNA, 20 nt, Human
gcucaggaugagggaaaaga

SEQ ID NO: 1482108 - RNA, 19 nt, Human
gcucacugaccugccugua

SEQ ID NO: 1482109 - RNA, 16 nt, Human
gcucaggaaccgaggc

SEQ ID NO: 1482110 - RNA, 19 nt, Human
gcucaggaaccgaggcagg

SEQ ID NO: 1482111 - RNA, 20 nt, Human
gcucaggaaccgaggcaggg

SEQ ID NO: 1482112 - RNA, 21 nt, Human
gcucaggaaccgaggcaggga

SEQ ID NO: 1482113 - RNA, 19 nt, Human
gcuacucuaguauuccaga

SEQ ID NO: 1482114 - RNA, 20 nt, Human
gcuacucuaguauuccagac

SEQ ID NO: 1482115 - RNA, 21 nt, Human
gcuacucuaguauuccagacc

SEQ ID NO: 1482116 - RNA, 19 nt, Human
gcguuuuuuaaauguauac

SEQ ID NO: 1482117 - RNA, 11 nt, Human
gcgugcagaug

SEQ ID NO: 1482118 - RNA, 18 nt, Human
gcgugguggucccugggu

SEQ ID NO: 1482119 - RNA, 17 nt, Human
gcgugguggucccuggg

SEQ ID NO: 1482120 - RNA, 12 nt, Human
gcuaaaagaaac

SEQ ID NO: 1482121 - RNA, 15 nt, Human
gcuaaaagaaacuuu

SEQ ID NO: 1482122 - RNA, 16 nt, Human
gcuaaaagaaacuuuc

SEQ ID NO: 1482123 - RNA, 17 nt, Human
gcuaaaauaaagaaaua

SEQ ID NO: 1482124 - RNA, 18 nt, Human
cugcucaguaaagcacuu

SEQ ID NO: 1482125 - RNA, 19 nt, Human
cugcucaguaaagcacuug

SEQ ID NO: 1482126 - RNA, 15 nt, Human
cugcucauauuguga

SEQ ID NO: 1482127 - RNA, 19 nt, Human
cugcucauauugugauucu

SEQ ID NO: 1482128 - RNA, 14 nt, Human
cugccucccuucau

SEQ ID NO: 1482129 - RNA, 12 nt, Human
cugaugaaaaua

SEQ ID NO: 1482130 - RNA, 15 nt, Human
cugaucuggcugcag

SEQ ID NO: 1482131 - RNA, 13 nt, Human
cugaugaaaauaa

SEQ ID NO: 1482132 - RNA, 14 nt, Human
cugaugaaaauaaa

SEQ ID NO: 1482133 - RNA, 16 nt, Human
cugaugaaaauaaaga

SEQ ID NO: 1482134 - RNA, 17 nt, Human
cugaugaaaauaaagaa

SEQ ID NO: 1482135 - RNA, 18 nt, Human
cugaugaaaauaaagaau

SEQ ID NO: 1482136 - RNA, 19 nt, Human
cugaugaaaauaaagaaug

SEQ ID NO: 1482137 - RNA, 20 nt, Human
cugaugaaaauaaagaaugg

SEQ ID NO: 1482138 - RNA, 23 nt, Human
cugccucccuucaugcauggaaa

SEQ ID NO: 1482139 - RNA, 21 nt, Human
cugccucccuucaugcaugga

SEQ ID NO: 1482140 - RNA, 19 nt, Human
cugccucccuucaugcaug

SEQ ID NO: 1482141 - RNA, 18 nt, Human
cugccucccuucaugcau

SEQ ID NO: 1482142 - RNA, 17 nt, Human
cugccucccuucaugca

SEQ ID NO: 1482143 - RNA, 15 nt, Human
cugccucccuucaug

SEQ ID NO: 1482144 - RNA, 19 nt, Human
cuggacuuggccccugcca

SEQ ID NO: 1482145 - RNA, 18 nt, Human
cuggacuuggccccugcc

SEQ ID NO: 1482146 - RNA, 17 nt, Human
cuggacuuggccccugc

SEQ ID NO: 1482147 - RNA, 16 nt, Human
cuggacuugccucugc

SEQ ID NO: 1482148 - RNA, 15 nt, Human
cuggacuugccucug

SEQ ID NO: 1482149 - RNA, 20 nt, Human
cuggaacuugaacugauuca

SEQ ID NO: 1482150 - RNA, 21 nt, Human
cuggaagacgcaagggccuga

SEQ ID NO: 1482151 - RNA, 16 nt, Human
cuggaagagcagcccu

SEQ ID NO: 1482152 - RNA, 23 nt, Human
cugggacuauaggcaugcgccac

SEQ ID NO: 1482153 - RNA, 23 nt, Human
cugggaauggaggggcagagcca

SEQ ID NO: 1482154 - RNA, 20 nt, Human
cugggaauggaggggcagag

SEQ ID NO: 1482155 - RNA, 13 nt, Human
cugggaauggagg

SEQ ID NO: 1482156 - RNA, 19 nt, Human
cugggccaacucaccugag

SEQ ID NO: 1482157 - RNA, 20 nt, Human
cuggggcugaggcugaggca

SEQ ID NO: 1482158 - RNA, 15 nt, Human
cuggggccaggcugg

SEQ ID NO: 1482159 - RNA, 17 nt, Human
cuggggcauggaaggca

SEQ ID NO: 1482160 - RNA, 17 nt, Human
cugugaccucuccccug

SEQ ID NO: 1482161 - RNA, 20 nt, Human
cugugccuugucacgccaga

SEQ ID NO: 1482162 - RNA, 15 nt, Human
cugugccugaauauu

SEQ ID NO: 1482163 - RNA, 13 nt, Human
cuguuauaaucuu

SEQ ID NO: 1482164 - RNA, 19 nt, Human
cuguuauaaucuuucacag

SEQ ID NO: 1482165 - RNA, 22 nt, Human
cuguaguaggcauuuuuaccau

SEQ ID NO: 1482166 - RNA, 18 nt, Human
cuguaguaggcauuuuua

SEQ ID NO: 1482167 - RNA, 15 nt, Human
cuggugaagcucacu

SEQ ID NO: 1482168 - RNA, 18 nt, Human
cuggucuuguggaauugg

SEQ ID NO: 1482169 - RNA, 20 nt, Human
cuggucuuguggaauuggga

SEQ ID NO: 1482170 - RNA, 20 nt, Human
cuggugaagcucacuucugg

SEQ ID NO: 1482171 - RNA, 14 nt, Human
cuguaaacugugua

SEQ ID NO: 1482172 - RNA, 20 nt, Human
cuguaaacuguguauuccaa

SEQ ID NO: 1482173 - RNA, 12 nt, Human
cuguaaacugug

SEQ ID NO: 1482174 - RNA, 13 nt, Human
cuguaaacugugu

SEQ ID NO: 1482175 - RNA, 14 nt, Human
cugguuuaauguuu

SEQ ID NO: 1482176 - RNA, 14 nt, Human
cugucauagaaauu

SEQ ID NO: 1482177 - RNA, 16 nt, Human
cugucauagaaauuac

SEQ ID NO: 1482178 - RNA, 22 nt, Human
cugucauaugcucugauuuauc

SEQ ID NO: 1482179 - RNA, 16 nt, Human
cugucaucaauuaaag

SEQ ID NO: 1482180 - RNA, 23 nt, Human
cugucaucaauuaaaggcaaagg

SEQ ID NO: 1482181 - RNA, 14 nt, Human
cuguuuaagagaca

SEQ ID NO: 1482182 - RNA, 12 nt, Human
cuguuuaagaga

SEQ ID NO: 1482183 - RNA, 15 nt, Human
cuguuguagaagaca

SEQ ID NO: 1482184 - RNA, 12 nt, Human
cuguugggagag

SEQ ID NO: 1482185 - RNA, 17 nt, Human
cuuaaauaagaaacuuu

SEQ ID NO: 1482186 - RNA, 13 nt, Human
cuuaaauaagaaa

SEQ ID NO: 1482187 - RNA, 16 nt, Human
cuuaaauaagaaacuu

SEQ ID NO: 1482188 - RNA, 14 nt, Human
cuuagcugucugcu

SEQ ID NO: 1482189 - RNA, 17 nt, Human
cuuagcugucugcucag

SEQ ID NO: 1482190 - RNA, 19 nt, Human
cuuaccaggcaccaaaaga

SEQ ID NO: 1482191 - RNA, 20 nt, Human
cuuaccaggcaccaaaagaa

SEQ ID NO: 1482192 - RNA, 15 nt, Human
cuugcaaaaaggguc

SEQ ID NO: 1482193 - RNA, 12 nt, Human
cuugauuuuugc

SEQ ID NO: 1482194 - RNA, 16 nt, Human
cuugcaaaaaggguca

SEQ ID NO: 1482195 - RNA, 19 nt, Human
cuugauuuuagccuucucu

SEQ ID NO: 1482196 - RNA, 20 nt, Human
cuugauuuuagccuucucug

SEQ ID NO: 1482197 - RNA, 21 nt, Human
cuugauuuuagccuucucugu

SEQ ID NO: 1482198 - RNA, 20 nt, Human
cuugacaguggaacuacauu

SEQ ID NO: 1482199 - RNA, 19 nt, Human
cuucugacauaauccagua

SEQ ID NO: 1482200 - RNA, 22 nt, Human
cuucugaauaaagcaauuagca

SEQ ID NO: 1482201 - RNA, 18 nt, Human
cuucugaauaaagcaauu

SEQ ID NO: 1482202 - RNA, 16 nt, Human
cuucugaauaaagcaa

SEQ ID NO: 1482203 - RNA, 15 nt, Human
cuucugaauaaagca

SEQ ID NO: 1482204 - RNA, 16 nt, Human
cuucucuuguuaggua

SEQ ID NO: 1482205 - RNA, 21 nt, Human
cuucuuacaauaauucuauga

SEQ ID NO: 1482206 - RNA, 20 nt, Human
cuucucacauuuauauuuuu

SEQ ID NO: 1482207 - RNA, 13 nt, Human
cuucucacauuua

SEQ ID NO: 1482208 - RNA, 19 nt, Human
cuucuaguucugccaggag

SEQ ID NO: 1482209 - RNA, 13 nt, Human
cuucucuguucau

SEQ ID NO: 1482210 - RNA, 14 nt, Human
cuucucuguucauu

SEQ ID NO: 1482211 - RNA, 17 nt, Human
cuucucuguucauuucc

SEQ ID NO: 1482212 - RNA, 16 nt, Human
cuucuaguucugccag

SEQ ID NO: 1482213 - RNA, 17 nt, Human
cuucuaguucugccagg

SEQ ID NO: 1482214 - RNA, 18 nt, Human
cuucuaguucugccagga

SEQ ID NO: 1482215 - RNA, 15 nt, Human
cuuccugacacuuua

SEQ ID NO: 1482216 - RNA, 16 nt, Human
cuuccugacacuuuaa

SEQ ID NO: 1482217 - RNA, 17 nt, Human
cuuccugacacuuuaau

SEQ ID NO: 1482218 - RNA, 18 nt, Human
cuuccugacacuuuaauu

SEQ ID NO: 1482219 - RNA, 20 nt, Human
cuuugaccugccucccuuca

SEQ ID NO: 1482220 - RNA, 17 nt, Human
cuuucucacuaaaucuu

SEQ ID NO: 1482221 - RNA, 22 nt, Human
cuuucucacuaaaucuuuuaua

SEQ ID NO: 1482222 - RNA, 15 nt, Human
cuuucucaguuuuca

SEQ ID NO: 1482223 - RNA, 16 nt, Human
cuuucucaguuuucau

SEQ ID NO: 1482224 - RNA, 17 nt, Human
cuuucucaguuuucaua

SEQ ID NO: 1482225 - RNA, 20 nt, Human
cuuucucaguuuucauaagu

SEQ ID NO: 1482226 - RNA, 23 nt, Human
cuuugaccugccucccuucaugc

SEQ ID NO: 1482227 - RNA, 18 nt, Human
cuuucucaauaagccuca

SEQ ID NO: 1482228 - RNA, 13 nt, Human
cuuuguauucaaa

SEQ ID NO: 1482229 - RNA, 15 nt, Human
cuuuguaaugaaaac

SEQ ID NO: 1482230 - RNA, 14 nt, Human
cuuuguaaugaaaa

SEQ ID NO: 1482231 - RNA, 16 nt, Human
cuuuguaaugaaaacc

SEQ ID NO: 1482232 - RNA, 14 nt, Human
cuuugacuuuuugc

SEQ ID NO: 1482233 - RNA, 15 nt, Human
cuuugacuuuuugca

SEQ ID NO: 1482234 - RNA, 17 nt, Human
cuuugacuuuuugcauu

SEQ ID NO: 1482235 - RNA, 18 nt, Human
cuuugcacagcucuccgg

SEQ ID NO: 1482236 - RNA, 14 nt, Human
cuuugguucagcua

SEQ ID NO: 1482237 - RNA, 19 nt, Human
cuugugaaucaagggucag

SEQ ID NO: 1482238 - RNA, 20 nt, Human
cuugugaaucaagggucagg

SEQ ID NO: 1482239 - RNA, 22 nt, Human
cuugugaaucaagggucaggcc

SEQ ID NO: 1482240 - RNA, 20 nt, Human
cuuggugaauuuuuuuuucc

SEQ ID NO: 1482241 - RNA, 22 nt, Human
cuuggugaauuuuuuuuuccua

SEQ ID NO: 1482242 - RNA, 19 nt, Human
cuuggugauuccgcaguga

SEQ ID NO: 1482243 - RNA, 18 nt, Human
cuuguggaauugggagcu

SEQ ID NO: 1482244 - RNA, 18 nt, Human
cuuuaauuaccaaccugu

SEQ ID NO: 1482245 - RNA, 19 nt, Human
cuuuaauuaccaaccuguu

SEQ ID NO: 1482246 - RNA, 17 nt, Human
gaagcacagugaucaag

SEQ ID NO: 1482247 - RNA, 23 nt, Human
gaagacuaucuuacuauuucaca

SEQ ID NO: 1482248 - RNA, 19 nt, Human
gaagcacgugguaaaacac

SEQ ID NO: 1482249 - RNA, 10 nt, Human
gaagacagug

SEQ ID NO: 1482250 - RNA, 12 nt, Human
gaagacaguggc

SEQ ID NO: 1482251 - RNA, 15 nt, Human
gaagacaguggcccc

SEQ ID NO: 1482252 - RNA, 13 nt, Human
gaagacaguggcc

SEQ ID NO: 1482253 - RNA, 14 nt, Human
gaagacccuccccg

SEQ ID NO: 1482254 - RNA, 17 nt, Human
gaagacagaaguuugca

SEQ ID NO: 1482255 - RNA, 12 nt, Human
gaaccaucagaa

SEQ ID NO: 1482256 - RNA, 21 nt, Human
gaaccccuacaugaaacagaa

SEQ ID NO: 1482257 - RNA, 16 nt, Human
gaaccauuaaccagau

SEQ ID NO: 1482258 - RNA, 13 nt, Human
gaacugaaaucau

SEQ ID NO: 1482259 - RNA, 17 nt, Human
gaacugauguaaguaaa

SEQ ID NO: 1482260 - RNA, 23 nt, Human
gaacugauucacaucucauuuuu

SEQ ID NO: 1482261 - RNA, 21 nt, Human
gaacugauucacaucucauuu

SEQ ID NO: 1482262 - RNA, 11 nt, Human
gaaaugaaaaa

SEQ ID NO: 1482263 - RNA, 20 nt, Human
gaaaucuggcuucuggccag

SEQ ID NO: 1482264 - RNA, 22 nt, Human
gaaaucuggcuucuggccagga

SEQ ID NO: 1482265 - RNA, 23 nt, Human
gaaaucuggcuucuggccaggaa

SEQ ID NO: 1482266 - RNA, 19 nt, Human
gaacacuagacaagccaga

SEQ ID NO: 1482267 - RNA, 19 nt, Human
gaacaccauugaaggcuua

SEQ ID NO: 1482268 - RNA, 20 nt, Human
gaacaccauugaaggcuuaa

SEQ ID NO: 1482269 - RNA, 15 nt, Human
gaacacuagacaagc

SEQ ID NO: 1482270 - RNA, 17 nt, Human
gaacacuagacaagcca

SEQ ID NO: 1482271 - RNA, 18 nt, Human
gaacacuagacaagccag

SEQ ID NO: 1482272 - RNA, 20 nt, Human
gaacacuagacaagccagaa

SEQ ID NO: 1482273 - RNA, 15 nt, Human
gaacaaauggccuuu

SEQ ID NO: 1482274 - RNA, 20 nt, Human
gaacaccauagguagaaugu

SEQ ID NO: 1482275 - RNA, 16 nt, Human
gaacaccauugaaggc

SEQ ID NO: 1482276 - RNA, 17 nt, Human
gaacacaggcaaaaucc

SEQ ID NO: 1482277 - RNA, 21 nt, Human
gaaacaagucagucauucaga

SEQ ID NO: 1482278 - RNA, 23 nt, Human
gaaacaaagaguucaagaaauaa

SEQ ID NO: 1482279 - RNA, 22 nt, Human
gaaaacuuguauuauguguguu

SEQ ID NO: 1482280 - RNA, 19 nt, Human
gaaaacuuguauuaugugu

SEQ ID NO: 1482281 - RNA, 15 nt, Human
gaaaagaaagcuaca

SEQ ID NO: 1482282 - RNA, 21 nt, Human
gaaaagaaaauuuuuguagua

SEQ ID NO: 1482283 - RNA, 16 nt, Human
gaaaacuuuaaagcgu

SEQ ID NO: 1482284 - RNA, 12 nt, Human
gaaaacuuuaaa

SEQ ID NO: 1482285 - RNA, 13 nt, Human
gaaaauuauuuaa

SEQ ID NO: 1482286 - RNA, 23 nt, Human
gaaaauuauuuaaaccgcuaaaa

SEQ ID NO: 1482287 - RNA, 22 nt, Human
gacccuccaccgcagaaggaag

SEQ ID NO: 1482288 - RNA, 21 nt, Human
gacccuccaccgcagaaggaa

SEQ ID NO: 1482289 - RNA, 15 nt, Human
gacccuccccgcacc

SEQ ID NO: 1482290 - RNA, 17 nt, Human
gacccuccccgcacccc

SEQ ID NO: 1482291 - RNA, 18 nt, Human
gacccuccccaaaggcuu

SEQ ID NO: 1482292 - RNA, 19 nt, Human
gacccuccaccgcagaagg

SEQ ID NO: 1482293 - RNA, 20 nt, Human
gacccuaugggucuaggaca

SEQ ID NO: 1482294 - RNA, 20 nt, Human
gacccucaucuuucuuccaa

SEQ ID NO: 1482295 - RNA, 15 nt, Human
gacccucaucuuucu

SEQ ID NO: 1482296 - RNA, 19 nt, Human
gacccucaucuuucuucca

SEQ ID NO: 1482297 - RNA, 16 nt, Human
gacuuuggcugcaugc

SEQ ID NO: 1482298 - RNA, 19 nt, Human
gacuuuggcugcaugcgag

SEQ ID NO: 1482299 - RNA, 13 nt, Human
gacuguuuggaaa

SEQ ID NO: 1482300 - RNA, 18 nt, Human
gacuguuuuucggacagu

SEQ ID NO: 1482301 - RNA, 19 nt, Human
gacuguuuuucggacaguu

SEQ ID NO: 1482302 - RNA, 20 nt, Human
gacugugugcucaggagccc

SEQ ID NO: 1482303 - RNA, 17 nt, Human
gacugugugcucaggag

SEQ ID NO: 1482304 - RNA, 16 nt, Human
gacugugugcucagga

SEQ ID NO: 1482305 - RNA, 14 nt, Human
gacugugugcucag

SEQ ID NO: 1482306 - RNA, 15 nt, Human
gacugucauagaaau

SEQ ID NO: 1482307 - RNA, 14 nt, Human
gacucacaccugaa

SEQ ID NO: 1482308 - RNA, 23 nt, Human
gacucacaccugaacugaacacc

SEQ ID NO: 1482309 - RNA, 17 nt, Human
gacuguaaacacagaca

SEQ ID NO: 1482310 - RNA, 18 nt, Human
gacuguaaacacagacag

SEQ ID NO: 1482311 - RNA, 14 nt, Human
gacucaagccccgg

SEQ ID NO: 1482312 - RNA, 15 nt, Human
gacucaagccccgga

SEQ ID NO: 1482313 - RNA, 22 nt, Human
gaccagcuuuucccaaaagccc

SEQ ID NO: 1482314 - RNA, 10 nt, Human
gaccaggagu

SEQ ID NO: 1482315 - RNA, 11 nt, Human
gaccaggagug

SEQ ID NO: 1482316 - RNA, 18 nt, Human
gaccaggagugggugggg

SEQ ID NO: 1482317 - RNA, 21 nt, Human
gaccauggacacuacacccag

SEQ ID NO: 1482318 - RNA, 16 nt, Human
gaccauggacacuaca

SEQ ID NO: 1482319 - RNA, 23 nt, Human
gaccauggacacuacacccagca

SEQ ID NO: 1482320 - RNA, 23 nt, Human
gaccccugcucaguaaagcacuu

SEQ ID NO: 1482321 - RNA, 22 nt, Human
gacccguucaacuuuuccuuug

SEQ ID NO: 1482322 - RNA, 18 nt, Human
gacccuaugggucuagga

SEQ ID NO: 1482323 - RNA, 14 nt, Human
gacaguauauaacu

SEQ ID NO: 1482324 - RNA, 17 nt, Human
gacaggguuucaccaug

SEQ ID NO: 1482325 - RNA, 18 nt, Human
gacagggcggggguggcg

SEQ ID NO: 1482326 - RNA, 21 nt, Human
gacagcccuucuuuccacaga

SEQ ID NO: 1482327 - RNA, 18 nt, Human
gacagccucccccugucc

SEQ ID NO: 1482328 - RNA, 20 nt, Human
gacagccucccccugucccc

SEQ ID NO: 1482329 - RNA, 19 nt, Human
gacagggcggggguggcgg

SEQ ID NO: 1482330 - RNA, 12 nt, Human
gaggggaccagg

SEQ ID NO: 1482331 - RNA, 13 nt, Human
gaggggaccagga

SEQ ID NO: 1482332 - RNA, 14 nt, Human
gaggggaccaggag

SEQ ID NO: 1482333 - RNA, 15 nt, Human
gaggggaccaggagu

SEQ ID NO: 1482334 - RNA, 20 nt, Human
gaggcucuggagcccacugu

SEQ ID NO: 1482335 - RNA, 15 nt, Human
gagggcgcaggccgu

SEQ ID NO: 1482336 - RNA, 19 nt, Human
gaggcucuggagcccacug

SEQ ID NO: 1482337 - RNA, 14 nt, Human
gaggcucuggagcc

SEQ ID NO: 1482338 - RNA, 14 nt, Human
gagucacugagacc

SEQ ID NO: 1482339 - RNA, 15 nt, Human
gagucacugagacca

SEQ ID NO: 1482340 - RNA, 19 nt, Human
gagccugugccuccucacc

SEQ ID NO: 1482341 - RNA, 21 nt, Human
gagcagugggaggguaccagc

SEQ ID NO: 1482342 - RNA, 13 nt, Human
gagaagcucugaa

SEQ ID NO: 1482343 - RNA, 21 nt, Human
gccaaggagucacugagacca

SEQ ID NO: 1482344 - RNA, 21 nt, Human
gccaagccauggguagccugg

SEQ ID NO: 1482345 - RNA, 19 nt, Human
gccaacuauggccugugga

SEQ ID NO: 1482346 - RNA, 15 nt, Human
gccaacuauggccug

SEQ ID NO: 1482347 - RNA, 14 nt, Human
gccaacuauggccu

SEQ ID NO: 1482348 - RNA, 14 nt, Human
gccaagacugcugu

SEQ ID NO: 1482349 - RNA, 15 nt, Human
gccaagacugcugug

SEQ ID NO: 1482350 - RNA, 20 nt, Human
gccaagacugcuguggccag

SEQ ID NO: 1482351 - RNA, 21 nt, Human
gccaagacugcuguggccagg

SEQ ID NO: 1482352 - RNA, 22 nt, Human
gccaagacugcuguggccagga

SEQ ID NO: 1482353 - RNA, 23 nt, Human
gccaagacugcuguggccaggag

SEQ ID NO: 1482354 - RNA, 18 nt, Human
gcauuucccuuccuuccu

SEQ ID NO: 1482355 - RNA, 18 nt, Human
gcauuuaaaacagacacu

SEQ ID NO: 1482356 - RNA, 22 nt, Human
gcauuucacuuucccgguguuc

SEQ ID NO: 1482357 - RNA, 19 nt, Human
gcauguccuguaaagguua

SEQ ID NO: 1482358 - RNA, 12 nt, Human
gcauuguccucu

SEQ ID NO: 1482359 - RNA, 13 nt, Human
gcauaaauuauug

SEQ ID NO: 1482360 - RNA, 20 nt, Human
gcagggacuguaaacacaga

SEQ ID NO: 1482361 - RNA, 17 nt, Human
gcaguugagacaagaaa

SEQ ID NO: 1482362 - RNA, 23 nt, Human
gcaggcucccagggacaccuggg

SEQ ID NO: 1482363 - RNA, 12 nt, Human
gcaggcugauuu

SEQ ID NO: 1482364 - RNA, 17 nt, Human
gcaggcugauuucuagg

SEQ ID NO: 1482365 - RNA, 11 nt, Human
gcaauagagac

SEQ ID NO: 1482366 - RNA, 22 nt, Human
gcacacaccaccacgccuggcu

SEQ ID NO: 1482367 - RNA, 18 nt, Human
gcaauagucaaauugugu

SEQ ID NO: 1482368 - RNA, 18 nt, Human
gcaaguuuccaucaucua

SEQ ID NO: 1482369 - RNA, 13 nt, Human
gcaaccuccaccu

SEQ ID NO: 1482370 - RNA, 19 nt, Human
gcaaccuaccuguugagca

SEQ ID NO: 1482371 - RNA, 19 nt, Human
gcaaccucaguaauuuaga

SEQ ID NO: 1482372 - RNA, 16 nt, Human
gcaaccuccaccuccu

SEQ ID NO: 1482373 - RNA, 17 nt, Human
gcaaccuccaccuccug

SEQ ID NO: 1482374 - RNA, 23 nt, Human
gcaaccgucuguuaugcugugac

SEQ ID NO: 1482375 - RNA, 11 nt, Human
gcaaaagaaga

SEQ ID NO: 1482376 - RNA, 15 nt, Human
gcaaaagaagaaguu

SEQ ID NO: 1482377 - RNA, 19 nt, Human
gcaaaagaauggcagaaaa

SEQ ID NO: 1482378 - RNA, 18 nt, Human
gcacuaucuuucagcucc

SEQ ID NO: 1482379 - RNA, 19 nt, Human
gcacuaucuuucagcucca

SEQ ID NO: 1482380 - RNA, 14 nt, Human
gcaaaaaagaaaac

SEQ ID NO: 1482381 - RNA, 13 nt, Human
gcaaaaaagaaaa

SEQ ID NO: 1482382 - RNA, 19 nt, Human
gaugugaguugcacagcua

SEQ ID NO: 1482383 - RNA, 11 nt, Human
gaugugcauuc

SEQ ID NO: 1482384 - RNA, 13 nt, Human
gaucuggcugcag

SEQ ID NO: 1482385 - RNA, 12 nt, Human
gaucuggcaugu

SEQ ID NO: 1482386 - RNA, 22 nt, Human
gaugaggccagaccauggacac

SEQ ID NO: 1482387 - RNA, 15 nt, Human
gaugaggccagacca

SEQ ID NO: 1482388 - RNA, 13 nt, Human
gaugaggccagac

SEQ ID NO: 1482389 - RNA, 14 nt, Human
gaugaugacuaugg

SEQ ID NO: 1482390 - RNA, 21 nt, Human
gaugagggaaaagaaaaagau

SEQ ID NO: 1482391 - RNA, 15 nt, Human
gaugcuuuuaacaga

SEQ ID NO: 1482392 - RNA, 14 nt, Human
gaugcuuuuaacag

SEQ ID NO: 1482393 - RNA, 12 nt, Human
gauguaaaguga

SEQ ID NO: 1482394 - RNA, 23 nt, Human
cugacccuccaccgcagaaggaa

SEQ ID NO: 1482395 - RNA, 15 nt, Human
cugacccuccccaaa

SEQ ID NO: 1482396 - RNA, 17 nt, Human
cugacccuaugggucua

SEQ ID NO: 1482397 - RNA, 18 nt, Human
cugacccuccaccgcaga

SEQ ID NO: 1482398 - RNA, 16 nt, Human
cugaccccugcucagu

SEQ ID NO: 1482399 - RNA, 18 nt, Human
cugacccucaucuuucuu

SEQ ID NO: 1482400 - RNA, 13 nt, Human
cugaccccugcuc

SEQ ID NO: 1482401 - RNA, 14 nt, Human
cugaccccugcuca

SEQ ID NO: 1482402 - RNA, 22 nt, Human
cugacccuccccaaaggcuuug

SEQ ID NO: 1482403 - RNA, 21 nt, Human
cugaggaaauugcuuuguauu

SEQ ID NO: 1482404 - RNA, 18 nt, Human
cugaggggcuaccaggaa

SEQ ID NO: 1482405 - RNA, 20 nt, Human
cugaggggcuaccaggaaag

SEQ ID NO: 1482406 - RNA, 17 nt, Human
cugaggggcuaccagga

SEQ ID NO: 1482407 - RNA, 16 nt, Human
cugaggaauuucaccu

SEQ ID NO: 1482408 - RNA, 16 nt, Human
cugaggaauuuucuuu

SEQ ID NO: 1482409 - RNA, 24 nt, Human
cugaaaauauuguuuuacaauagu

SEQ ID NO: 1482410 - RNA, 22 nt, Human
cugaaaauauuguuuuacaaua

SEQ ID NO: 1482411 - RNA, 20 nt, Human
cugaaaauauuguuuuacaa

SEQ ID NO: 1482412 - RNA, 17 nt, Human
cugaaaauauuguuuua

SEQ ID NO: 1482413 - RNA, 21 nt, Human
cugaaaaaugguaauuguugc

SEQ ID NO: 1482414 - RNA, 17 nt, Human
cugaaaagguuuaugaa

SEQ ID NO: 1482415 - RNA, 13 nt, Human
cucuugauuuuca

SEQ ID NO: 1482416 - RNA, 20 nt, Human
cucuugccucaaccucccaa

SEQ ID NO: 1482417 - RNA, 18 nt, Human
cucuugccucaaccuccc

SEQ ID NO: 1482418 - RNA, 14 nt, Human
cugaaagagaaaca

SEQ ID NO: 1482419 - RNA, 19 nt, Human
cugacacuuuaauuaccaa

SEQ ID NO: 1482420 - RNA, 21 nt, Human
cucguggacaccugcccugcc

SEQ ID NO: 1482421 - RNA, 20 nt, Human
cucguggacaccugcccugc

SEQ ID NO: 1482422 - RNA, 19 nt, Human
cucguggacaccugcccug

SEQ ID NO: 1482423 - RNA, 17 nt, Human
cucguggacaccugccc

SEQ ID NO: 1482424 - RNA, 13 nt, Human
cucguauagcaug

SEQ ID NO: 1482425 - RNA, 14 nt, Human
cucguauagcaugc

SEQ ID NO: 1482426 - RNA, 16 nt, Human
cucguaagauuuccuu

SEQ ID NO: 1482427 - RNA, 14 nt, Human
cuccuuucuggcuu

SEQ ID NO: 1482428 - RNA, 15 nt, Human
cuccuaggaaaauac

SEQ ID NO: 1482429 - RNA, 13 nt, Human
cucugaaagagaa

SEQ ID NO: 1482430 - RNA, 14 nt, Human
cucugaaagagaaa

SEQ ID NO: 1482431 - RNA, 16 nt, Human
cucugaaagagaaaca

SEQ ID NO: 1482432 - RNA, 21 nt, Human
cucugaaagagaaacacguau

SEQ ID NO: 1482433 - RNA, 17 nt, Human
cucugaaagagaaacac

SEQ ID NO: 1482434 - RNA, 12 nt, Human
cucugaacacau

SEQ ID NO: 1482435 - RNA, 13 nt, Human
cucugaacacauu

SEQ ID NO: 1482436 - RNA, 14 nt, Human
cuccgucaacucau

SEQ ID NO: 1482437 - RNA, 19 nt, Human
cuccccaugauguuuagaa

SEQ ID NO: 1482438 - RNA, 13 nt, Human
cgugucuggcaca

SEQ ID NO: 1482439 - RNA, 20 nt, Human
cguguuucugacucugagcu

SEQ ID NO: 1482440 - RNA, 17 nt, Human
cguguccgacucuucug

SEQ ID NO: 1482441 - RNA, 17 nt, Human
cuaaagaaaaacaaacu

SEQ ID NO: 1482442 - RNA, 20 nt, Human
cuaaagaaaaacaaacucgu

SEQ ID NO: 1482443 - RNA, 13 nt, Human
cuaaagaaaaaca

SEQ ID NO: 1482444 - RNA, 17 nt, Human
cuaaagcugguuuaaug

SEQ ID NO: 1482445 - RNA, 18 nt, Human
cuaaagcugguuuaaugu

SEQ ID NO: 1482446 - RNA, 15 nt, Human
cgguuuauauaagcu

SEQ ID NO: 1482447 - RNA, 20 nt, Human
cgguucaggaaaauugaaug

SEQ ID NO: 1482448 - RNA, 15 nt, Human
cgaguaauaugccug

SEQ ID NO: 1482449 - RNA, 20 nt, Human
cuacuagggaaaugccuuug

SEQ ID NO: 1482450 - RNA, 13 nt, Human
cuagacacugcca

SEQ ID NO: 1482451 - RNA, 16 nt, Human
cuagaauugaguguuu

SEQ ID NO: 1482452 - RNA, 19 nt, Human
cuagaauugaguguuuaaa

SEQ ID NO: 1482453 - RNA, 21 nt, Human
cuagaauugaguguuuaaagu

SEQ ID NO: 1482454 - RNA, 18 nt, Human
cuagcccaaugaaaugaa

SEQ ID NO: 1482455 - RNA, 21 nt, Human
cuaggccuugcggcuccucag

SEQ ID NO: 1482456 - RNA, 20 nt, Human
cuaguuuucuccucccagga

SEQ ID NO: 1482457 - RNA, 14 nt, Human
cuaguucugccagg

SEQ ID NO: 1482458 - RNA, 15 nt, Human
cuaguucugccagga

SEQ ID NO: 1482459 - RNA, 16 nt, Human
cuaguucugccaggag

SEQ ID NO: 1482460 - RNA, 15 nt, Human
cuaggguggggagag

SEQ ID NO: 1482461 - RNA, 13 nt, Human
cuaguucugccag

SEQ ID NO: 1482462 - RNA, 15 nt, Human
cuaggcuaggguggg

SEQ ID NO: 1482463 - RNA, 13 nt, Human
cuaggcuccaccc

SEQ ID NO: 1482464 - RNA, 14 nt, Human
cuagggagccaugu

SEQ ID NO: 1482465 - RNA, 19 nt, Human
cucagaaaacaaggaugaa

SEQ ID NO: 1482466 - RNA, 23 nt, Human
cucagaaaacaaggaugaauuaa

SEQ ID NO: 1482467 - RNA, 20 nt, Human
cucagaaaauaucccuccug

SEQ ID NO: 1482468 - RNA, 16 nt, Human
cucagaaguuucuucu

SEQ ID NO: 1482469 - RNA, 19 nt, Human
cucagaaguuucuucuuua

SEQ ID NO: 1482470 - RNA, 18 nt, Human
cucacuuguuuuauuuaa

SEQ ID NO: 1482471 - RNA, 21 nt, Human
cucacuuuuaaugaacaaaug

SEQ ID NO: 1482472 - RNA, 22 nt, Human
cucacuuuuaaugaacaaaugg

SEQ ID NO: 1482473 - RNA, 12 nt, Human
cucacuucaggu

SEQ ID NO: 1482474 - RNA, 20 nt, Human
cucacuucugggcuucaucu

SEQ ID NO: 1482475 - RNA, 19 nt, Human
cucaccugagucacccuac

SEQ ID NO: 1482476 - RNA, 17 nt, Human
cucacaacagcugccug

SEQ ID NO: 1482477 - RNA, 21 nt, Human
cuaucucugugugcacaaaua

SEQ ID NO: 1482478 - RNA, 16 nt, Human
cuaucugggaagcuau

SEQ ID NO: 1482479 - RNA, 15 nt, Human
cuaucucccugccuc

SEQ ID NO: 1482480 - RNA, 17 nt, Human
cuaucucccugccuccu

SEQ ID NO: 1482481 - RNA, 18 nt, Human
cuaucucccugccuccug

SEQ ID NO: 1482482 - RNA, 17 nt, Human
cuaucucugugugcaca

SEQ ID NO: 1482483 - RNA, 16 nt, Human
cuaugucauuucauuu

SEQ ID NO: 1482484 - RNA, 18 nt, Human
cuaugucauuucauuucc

SEQ ID NO: 1482485 - RNA, 19 nt, Human
cuauguggaaguggggcgg

SEQ ID NO: 1482486 - RNA, 23 nt, Human
cuauguggaaguggggcgggcuu

SEQ ID NO: 1482487 - RNA, 19 nt, Human
cuauuuuuaauguuuguac

SEQ ID NO: 1482488 - RNA, 14 nt, Human
cuauuuuuaucuga

SEQ ID NO: 1482489 - RNA, 18 nt, Human
cuauuuuuggcagucuga

SEQ ID NO: 1482490 - RNA, 21 nt, Human
cuauuuuuggcagucugaauu

SEQ ID NO: 1482491 - RNA, 22 nt, Human
cuauuuuuggcagucugaauuu

SEQ ID NO: 1482492 - RNA, 19 nt, Human
cucaaacugaggaauuuca

SEQ ID NO: 1482493 - RNA, 22 nt, Human
cucaaacugaggaauuucaccu

SEQ ID NO: 1482494 - RNA, 18 nt, Human
cucaaagagggagugcau

SEQ ID NO: 1482495 - RNA, 19 nt, Human
cucaaagcaagcauucaga

SEQ ID NO: 1482496 - RNA, 15 nt, Human
ccugccucucugcag

SEQ ID NO: 1482497 - RNA, 14 nt, Human
ccugccucucugca

SEQ ID NO: 1482498 - RNA, 13 nt, Human
ccugccucucugc

SEQ ID NO: 1482499 - RNA, 23 nt, Human
ccugccucucaucaacugaauga

SEQ ID NO: 1482500 - RNA, 20 nt, Human
ccugccucucaucaacugaa

SEQ ID NO: 1482501 - RNA, 16 nt, Human
ccugccucagccuccc

SEQ ID NO: 1482502 - RNA, 23 nt, Human
ccugaccccaaguuauccaccug

SEQ ID NO: 1482503 - RNA, 22 nt, Human
ccugcaggaucucaccaggcag

SEQ ID NO: 1482504 - RNA, 23 nt, Human
ccugcaggaucucaccaggcagc

SEQ ID NO: 1482505 - RNA, 18 nt, Human
ccugacccucaucuuucu

SEQ ID NO: 1482506 - RNA, 16 nt, Human
ccugaccccugcucag

SEQ ID NO: 1482507 - RNA, 14 nt, Human
ccugaccccugcuc

SEQ ID NO: 1482508 - RNA, 15 nt, Human
ccugaccccugcuca

SEQ ID NO: 1482509 - RNA, 19 nt, Human
ccugacccucaucuuucuu

SEQ ID NO: 1482510 - RNA, 16 nt, Human
ccuggauuuuuaccag

SEQ ID NO: 1482511 - RNA, 17 nt, Human
ccugggccuugggcucc

SEQ ID NO: 1482512 - RNA, 18 nt, Human
ccugggccuugggcuccg

SEQ ID NO: 1482513 - RNA, 21 nt, Human
ccuggugguggcucgggaggc

SEQ ID NO: 1482514 - RNA, 18 nt, Human
ccuggugguggcucggga

SEQ ID NO: 1482515 - RNA, 21 nt, Human
ccugucucccuccucugcccg

SEQ ID NO: 1482516 - RNA, 12 nt, Human
ccuguaaaccug

SEQ ID NO: 1482517 - RNA, 13 nt, Human
ccuguaaaccuga

SEQ ID NO: 1482518 - RNA, 16 nt, Human
ccuguaacaagccaga

SEQ ID NO: 1482519 - RNA, 14 nt, Human
ccucaaccucaucc

SEQ ID NO: 1482520 - RNA, 13 nt, Human
ccucaaccucauc

SEQ ID NO: 1482521 - RNA, 23 nt, Human
ccucaaccccuccccuccauccc

SEQ ID NO: 1482522 - RNA, 14 nt, Human
ccucaaccccuccc

SEQ ID NO: 1482523 - RNA, 17 nt, Human
ccucagcucucaguugc

SEQ ID NO: 1482524 - RNA, 14 nt, Human
ccucaaccucccaa

SEQ ID NO: 1482525 - RNA, 14 nt, Human
ccucaacugccuac

SEQ ID NO: 1482526 - RNA, 15 nt, Human
ccucaacugccuacu

SEQ ID NO: 1482527 - RNA, 12 nt, Human
ccucaaccuccc

SEQ ID NO: 1482528 - RNA, 13 nt, Human
ccuccucaccccc

SEQ ID NO: 1482529 - RNA, 14 nt, Human
ccuccucaccccca

SEQ ID NO: 1482530 - RNA, 16 nt, Human
ccuccucacccccagc

SEQ ID NO: 1482531 - RNA, 20 nt, Human
ccucgcccagcggcaucagg

SEQ ID NO: 1482532 - RNA, 21 nt, Human
ccucgcccagcggcaucaggc

SEQ ID NO: 1482533 - RNA, 13 nt, Human
ccuaauaaagcug

SEQ ID NO: 1482534 - RNA, 12 nt, Human
ccuaauaaagcu

SEQ ID NO: 1482535 - RNA, 14 nt, Human
ccgugacgucuggg

SEQ ID NO: 1482536 - RNA, 16 nt, Human
ccgugacgucugggug

SEQ ID NO: 1482537 - RNA, 15 nt, Human
ccgugagcauguuug

SEQ ID NO: 1482538 - RNA, 20 nt, Human
ccuaauucaauucaaagcug

SEQ ID NO: 1482539 - RNA, 16 nt, Human
ccuaauucaauucaaa

SEQ ID NO: 1482540 - RNA, 21 nt, Human
cccuucuccauggcccugcca

SEQ ID NO: 1482541 - RNA, 21 nt, Human
cccuucuauacccacccagaa

SEQ ID NO: 1482542 - RNA, 20 nt, Human
cccuucuauacccacccaga

SEQ ID NO: 1482543 - RNA, 19 nt, Human
cccuucuauacccacccag

SEQ ID NO: 1482544 - RNA, 18 nt, Human
cccuucuauacccaccca

SEQ ID NO: 1482545 - RNA, 13 nt, Human
cccuucuauaccc

SEQ ID NO: 1482546 - RNA, 20 nt, Human
cccuccuguugggagagggc

SEQ ID NO: 1482547 - RNA, 14 nt, Human
cccuucuccccugc

SEQ ID NO: 1482548 - RNA, 15 nt, Human
cccuucuccccugca

SEQ ID NO: 1482549 - RNA, 16 nt, Human
cccuucuccccugcac

SEQ ID NO: 1482550 - RNA, 18 nt, Human
cccuucuccccugcacug

SEQ ID NO: 1482551 - RNA, 21 nt, Human
cccuucuccccugcacuguaa

SEQ ID NO: 1482552 - RNA, 23 nt, Human
cccaagagcuacguauuuaauag

SEQ ID NO: 1482553 - RNA, 13 nt, Human
cccaacuccagaa

SEQ ID NO: 1482554 - RNA, 23 nt, Human
cccaacuacccccagcugugcuu

SEQ ID NO: 1482555 - RNA, 13 nt, Human
cccaccccuagga

SEQ ID NO: 1482556 - RNA, 13 nt, Human
ccauuucagagag

SEQ ID NO: 1482557 - RNA, 12 nt, Human
ccauucuuuccc

SEQ ID NO: 1482558 - RNA, 20 nt, Human
ccauucuuccuaguuuucuc

SEQ ID NO: 1482559 - RNA, 14 nt, Human
ccauucuuucccaa

SEQ ID NO: 1482560 - RNA, 20 nt, Human
ccauucuuucccaacaccuc

SEQ ID NO: 1482561 - RNA, 14 nt, Human
ccauucuuccuagu

SEQ ID NO: 1482562 - RNA, 19 nt, Human
ccauucuuccuaguuuucu

SEQ ID NO: 1482563 - RNA, 19 nt, Human
ccauucuggaagugacuuu

SEQ ID NO: 1482564 - RNA, 14 nt, Human
ccaugaugccucug

SEQ ID NO: 1482565 - RNA, 20 nt, Human
ccaugaugccucugucuucu

SEQ ID NO: 1482566 - RNA, 23 nt, Human
ccaguuggaguuuuuuguaccaa

SEQ ID NO: 1482567 - RNA, 15 nt, Human
ccaguuggaguuuuu

SEQ ID NO: 1482568 - RNA, 18 nt, Human
ccaggcuggagugcagug

SEQ ID NO: 1482569 - RNA, 17 nt, Human
ccaggcuggagugcagu

SEQ ID NO: 1482570 - RNA, 17 nt, Human
ccaggcaggucugaagc

SEQ ID NO: 1482571 - RNA, 16 nt, Human
ccaggauagagacugg

SEQ ID NO: 1482572 - RNA, 21 nt, Human
ccaggauacuggcacagaggu

SEQ ID NO: 1482573 - RNA, 18 nt, Human
ccaggauagagacuggaa

SEQ ID NO: 1482574 - RNA, 20 nt, Human
ccaggauacuggcacagagg

SEQ ID NO: 1482575 - RNA, 18 nt, Human
ccaggaucguuuuuuccc

SEQ ID NO: 1482576 - RNA, 23 nt, Human
ccagcuuuucccaaaagcccauu

SEQ ID NO: 1482577 - RNA, 13 nt, Human
ccagcuuuuccca

SEQ ID NO: 1482578 - RNA, 20 nt, Human
ccagcuuugcuaccaaagca

SEQ ID NO: 1482579 - RNA, 12 nt, Human
ccagcuuucccu

SEQ ID NO: 1482580 - RNA, 14 nt, Human
ccagcuuucccugc

SEQ ID NO: 1482581 - RNA, 18 nt, Human
ccagcuuucccugccucu

SEQ ID NO: 1482582 - RNA, 17 nt, Human
ccccugaauuuaaauag

SEQ ID NO: 1482583 - RNA, 13 nt, Human
ccccugaauuuaa

SEQ ID NO: 1482584 - RNA, 17 nt, Human
ccccugccaccuccugc

SEQ ID NO: 1482585 - RNA, 15 nt, Human
ccccugccaccuccu

SEQ ID NO: 1482586 - RNA, 18 nt, Human
cccucaaccucauccucu

SEQ ID NO: 1482587 - RNA, 13 nt, Human
cccagccauccag

SEQ ID NO: 1482588 - RNA, 20 nt, Human
cccagcuggggccaggcugg

SEQ ID NO: 1482589 - RNA, 18 nt, Human
cccagggacaccugggag

SEQ ID NO: 1482590 - RNA, 19 nt, Human
cccagggacaccugggaga

SEQ ID NO: 1482591 - RNA, 21 nt, Human
cacucuguucauuccuccagg

SEQ ID NO: 1482592 - RNA, 20 nt, Human
cacucuguucauuccuccag

SEQ ID NO: 1482593 - RNA, 19 nt, Human
cacucuguucauuccucca

SEQ ID NO: 1482594 - RNA, 18 nt, Human
cacucuguucauuccucc

SEQ ID NO: 1482595 - RNA, 17 nt, Human
cacucuguucauuccuc

SEQ ID NO: 1482596 - RNA, 21 nt, Human
cacuacacccagcaauagaga

SEQ ID NO: 1482597 - RNA, 12 nt, Human
cacggccuuucu

SEQ ID NO: 1482598 - RNA, 20 nt, Human
cacggccuuucuagccuggc

SEQ ID NO: 1482599 - RNA, 22 nt, Human
cacucuguucauuccuccaggu

SEQ ID NO: 1482600 - RNA, 12 nt, Human
caccuuucuagu

SEQ ID NO: 1482601 - RNA, 13 nt, Human
caccuuucuaguu

SEQ ID NO: 1482602 - RNA, 17 nt, Human
caccuuucuaguugaaa

SEQ ID NO: 1482603 - RNA, 17 nt, Human
caccuuuuuucaacagu

SEQ ID NO: 1482604 - RNA, 20 nt, Human
caccucagagacauacaccu

SEQ ID NO: 1482605 - RNA, 18 nt, Human
cacuuuagaauaugccuu

SEQ ID NO: 1482606 - RNA, 20 nt, Human
cacuuuaauuaccaaccugu

SEQ ID NO: 1482607 - RNA, 22 nt, Human
cacuuuacacaauagaauuaua

SEQ ID NO: 1482608 - RNA, 17 nt, Human
cacuuguguuuugcaag

SEQ ID NO: 1482609 - RNA, 19 nt, Human
cacugggagaaaugaaaaa

SEQ ID NO: 1482610 - RNA, 20 nt, Human
cacugguagaccaaaauaaa

SEQ ID NO: 1482611 - RNA, 14 nt, Human
cagaaauacaauuu

SEQ ID NO: 1482612 - RNA, 14 nt, Human
cagaaauacuacug

SEQ ID NO: 1482613 - RNA, 22 nt, Human
cagaaauauuugugacaaaaaa

SEQ ID NO: 1482614 - RNA, 21 nt, Human
cagaaauauuugugacaaaaa

SEQ ID NO: 1482615 - RNA, 21 nt, Human
cagaaaugaggagacacaccu

SEQ ID NO: 1482616 - RNA, 20 nt, Human
caauaaaauccauacauuug

SEQ ID NO: 1482617 - RNA, 23 nt, Human
caauaaaauccauacauuugugu

SEQ ID NO: 1482618 - RNA, 20 nt, Human
caauaaaaauguuuaacggu

SEQ ID NO: 1482619 - RNA, 17 nt, Human
caauaaaaauguuuaac

SEQ ID NO: 1482620 - RNA, 21 nt, Human
caaggccugguguuucuugau

SEQ ID NO: 1482621 - RNA, 22 nt, Human
caaggccugguguuucuugaua

SEQ ID NO: 1482622 - RNA, 22 nt, Human
caaggccuuauuggaaagcagu

SEQ ID NO: 1482623 - RNA, 13 nt, Human
caaggcggugcuu

SEQ ID NO: 1482624 - RNA, 16 nt, Human
caaggcggugcuugau

SEQ ID NO: 1482625 - RNA, 21 nt, Human
caagucagucauucagauaug

SEQ ID NO: 1482626 - RNA, 19 nt, Human
caagucaggcccuuauuuu

SEQ ID NO: 1482627 - RNA, 22 nt, Human
caagauuguuccugcuuuuccc

SEQ ID NO: 1482628 - RNA, 20 nt, Human
caagauugugucccauuccc

SEQ ID NO: 1482629 - RNA, 15 nt, Human
caagauuguguccca

SEQ ID NO: 1482630 - RNA, 23 nt, Human
caauugagaaaaauauauacuaa

SEQ ID NO: 1482631 - RNA, 14 nt, Human
caauugagaaaaau

SEQ ID NO: 1482632 - RNA, 21 nt, Human
caauugacaacaguuacauaa

SEQ ID NO: 1482633 - RNA, 22 nt, Human
caauugacaacaguuacauaau

SEQ ID NO: 1482634 - RNA, 19 nt, Human
caauugacugucacuguuc

SEQ ID NO: 1482635 - RNA, 21 nt, Human
caauugcacgcggagugaguu

SEQ ID NO: 1482636 - RNA, 23 nt, Human
caauugcacgcggagugaguuuu

SEQ ID NO: 1482637 - RNA, 14 nt, Human
caauugacaacagu

SEQ ID NO: 1482638 - RNA, 20 nt, Human
caauuucuacaaaauccuga

SEQ ID NO: 1482639 - RNA, 13 nt, Human
caauuucugaaca

SEQ ID NO: 1482640 - RNA, 22 nt, Human
caaucccuuaauauccuaaaca

SEQ ID NO: 1482641 - RNA, 20 nt, Human
caccaggcuugccugcaggc

SEQ ID NO: 1482642 - RNA, 17 nt, Human
caccaaagagaaugccc

SEQ ID NO: 1482643 - RNA, 13 nt, Human
caccaaagagaau

SEQ ID NO: 1482644 - RNA, 15 nt, Human
caccaaaagaaguaa

SEQ ID NO: 1482645 - RNA, 18 nt, Human
cacacaugcuucccuuuc

SEQ ID NO: 1482646 - RNA, 16 nt, Human
cacagaaaccaauuuu

SEQ ID NO: 1482647 - RNA, 20 nt, Human
cacagcucuccggucucucu

SEQ ID NO: 1482648 - RNA, 21 nt, Human
cacagcucuccggucucucuc

SEQ ID NO: 1482649 - RNA, 17 nt, Human
auuaugggucacaggaa

SEQ ID NO: 1482650 - RNA, 15 nt, Human
auuaugggucacagg

SEQ ID NO: 1482651 - RNA, 16 nt, Human
auuaugggucacagga

SEQ ID NO: 1482652 - RNA, 16 nt, Human
auucaaaugucuauaa

SEQ ID NO: 1482653 - RNA, 12 nt, Human
auucaacaaaca

SEQ ID NO: 1482654 - RNA, 13 nt, Human
auucaacaaacau

SEQ ID NO: 1482655 - RNA, 22 nt, Human
auucaaucuguaaacuguguau

SEQ ID NO: 1482656 - RNA, 17 nt, Human
auucaaucuguaaacug

SEQ ID NO: 1482657 - RNA, 18 nt, Human
auucaaucuguaaacugu

SEQ ID NO: 1482658 - RNA, 14 nt, Human
auucaaucuguaaa

SEQ ID NO: 1482659 - RNA, 15 nt, Human
auucaaucuguaaac

SEQ ID NO: 1482660 - RNA, 16 nt, Human
auucaaucuguaaacu

SEQ ID NO: 1482661 - RNA, 20 nt, Human
auuaguacuccccuccuuga

SEQ ID NO: 1482662 - RNA, 18 nt, Human
auuaguaagcuagcaaau

SEQ ID NO: 1482663 - RNA, 19 nt, Human
auuaugaauuacauuugua

SEQ ID NO: 1482664 - RNA, 20 nt, Human
auuaugaauuacauuuguau

SEQ ID NO: 1482665 - RNA, 22 nt, Human
auuaugaauuacauuuguauaa

SEQ ID NO: 1482666 - RNA, 19 nt, Human
auuaguacacagcaccaga

SEQ ID NO: 1482667 - RNA, 16 nt, Human
auuaugcauuauauca

SEQ ID NO: 1482668 - RNA, 14 nt, Human
auuaggcagacucu

SEQ ID NO: 1482669 - RNA, 21 nt, Human
auuaggcagacucuuuaugcu

SEQ ID NO: 1482670 - RNA, 18 nt, Human
auucuugauguaaaaucu

SEQ ID NO: 1482671 - RNA, 19 nt, Human
auucuugauguaaaaucuu

SEQ ID NO: 1482672 - RNA, 20 nt, Human
auucuugauguaaaaucuug

SEQ ID NO: 1482673 - RNA, 17 nt, Human
auuccuucagcacuuua

SEQ ID NO: 1482674 - RNA, 15 nt, Human
auuccuucagcacuu

SEQ ID NO: 1482675 - RNA, 22 nt, Human
auuccuguggauguaaagugau

SEQ ID NO: 1482676 - RNA, 11 nt, Human
auuccuccagg

SEQ ID NO: 1482677 - RNA, 23 nt, Human
auuccucaugaauguaaauuugu

SEQ ID NO: 1482678 - RNA, 16 nt, Human
auuccucaugaaugua

SEQ ID NO: 1482679 - RNA, 17 nt, Human
auuccucaugaauguaa

SEQ ID NO: 1482680 - RNA, 18 nt, Human
auuccucaugaauguaaa

SEQ ID NO: 1482681 - RNA, 19 nt, Human
auuccucaugaauguaaau

SEQ ID NO: 1482682 - RNA, 13 nt, Human
auuccuccugcuc

SEQ ID NO: 1482683 - RNA, 14 nt, Human
auuccuccugcuca

SEQ ID NO: 1482684 - RNA, 15 nt, Human
auuccuccugcucau

SEQ ID NO: 1482685 - RNA, 16 nt, Human
auuccuccugcucaua

SEQ ID NO: 1482686 - RNA, 20 nt, Human
auuccuccugcucauauugu

SEQ ID NO: 1482687 - RNA, 22 nt, Human
auuccucaugaauguaaauuug

SEQ ID NO: 1482688 - RNA, 22 nt, Human
auuccuauugugcaauguaaau

SEQ ID NO: 1482689 - RNA, 20 nt, Human
auuguguucccauuucagcu

SEQ ID NO: 1482690 - RNA, 18 nt, Human
auuguaagcaugcacaaa

SEQ ID NO: 1482691 - RNA, 14 nt, Human
auuguuaaaggcua

SEQ ID NO: 1482692 - RNA, 16 nt, Human
auuguugucugcaacu

SEQ ID NO: 1482693 - RNA, 15 nt, Human
auuguguucccauuu

SEQ ID NO: 1482694 - RNA, 18 nt, Human
auuguaacccugucugga

SEQ ID NO: 1482695 - RNA, 14 nt, Human
auugcuguccugga

SEQ ID NO: 1482696 - RNA, 23 nt, Human
auuucuauagccaaaaauagcua

SEQ ID NO: 1482697 - RNA, 14 nt, Human
auuucuaugaaaua

SEQ ID NO: 1482698 - RNA, 17 nt, Human
auuucuauagccaaaaa

SEQ ID NO: 1482699 - RNA, 22 nt, Human
auuuaugcauauuauuuuaugu

SEQ ID NO: 1482700 - RNA, 16 nt, Human
auuuaugcauauuauu

SEQ ID NO: 1482701 - RNA, 13 nt, Human
auuuauauugaua

SEQ ID NO: 1482702 - RNA, 20 nt, Human
auuuauauugauaagaucuu

SEQ ID NO: 1482703 - RNA, 21 nt, Human
auuuauauugauaagaucuuu

SEQ ID NO: 1482704 - RNA, 22 nt, Human
auuuauauugauaagaucuuuu

SEQ ID NO: 1482705 - RNA, 15 nt, Human
auuuauauuguaaau

SEQ ID NO: 1482706 - RNA, 19 nt, Human
auuuaucugagucaacucc

SEQ ID NO: 1482707 - RNA, 22 nt, Human
auuuaucuuuacuuuuaaacag

SEQ ID NO: 1482708 - RNA, 23 nt, Human
auuuaugaauugaauuaucuugg

SEQ ID NO: 1482709 - RNA, 17 nt, Human
auuuaugagcucuucau

SEQ ID NO: 1482710 - RNA, 17 nt, Human
caacucauauuuucaug

SEQ ID NO: 1482711 - RNA, 21 nt, Human
caacuaccugagcuaaauaaa

SEQ ID NO: 1482712 - RNA, 19 nt, Human
caacuacagucuaaagcug

SEQ ID NO: 1482713 - RNA, 15 nt, Human
caacuacagucuaaa

SEQ ID NO: 1482714 - RNA, 17 nt, Human
caacuacccccagcugu

SEQ ID NO: 1482715 - RNA, 19 nt, Human
caacuacccccagcugugc

SEQ ID NO: 1482716 - RNA, 20 nt, Human
caacuacccccagcugugcu

SEQ ID NO: 1482717 - RNA, 15 nt, Human
caacuaccugagcua

SEQ ID NO: 1482718 - RNA, 11 nt, Human
caacuaccuga

SEQ ID NO: 1482719 - RNA, 13 nt, Human
caaccaucgcuuu

SEQ ID NO: 1482720 - RNA, 21 nt, Human
caaccagaccauugucucaga

SEQ ID NO: 1482721 - RNA, 19 nt, Human
caaccagauugucagcucc

SEQ ID NO: 1482722 - RNA, 20 nt, Human
caaccagauugucagcuccu

SEQ ID NO: 1482723 - RNA, 21 nt, Human
caaccccuccccuccaucccu

SEQ ID NO: 1482724 - RNA, 22 nt, Human
caaccccuccccuccaucccug

SEQ ID NO: 1482725 - RNA, 22 nt, Human
caagauggggagugagaggcug

SEQ ID NO: 1482726 - RNA, 20 nt, Human
caagaauuucuaggacugaa

SEQ ID NO: 1482727 - RNA, 14 nt, Human
caacucgcuuuagg

SEQ ID NO: 1482728 - RNA, 19 nt, Human
caacucgcuuuaggucagc

SEQ ID NO: 1482729 - RNA, 16 nt, Human
caacucguauagcaug

SEQ ID NO: 1482730 - RNA, 21 nt, Human
caagaauuggaagcugcccug

SEQ ID NO: 1482731 - RNA, 19 nt, Human
caacucguauagcaugcau

SEQ ID NO: 1482732 - RNA, 18 nt, Human
caacacacacaugcuucc

SEQ ID NO: 1482733 - RNA, 23 nt, Human
caacacacacaugcuucccuuuc

SEQ ID NO: 1482734 - RNA, 15 nt, Human
caacacacacaugcu

SEQ ID NO: 1482735 - RNA, 19 nt, Human
caacaaccucaacugccua

SEQ ID NO: 1482736 - RNA, 18 nt, Human
caacaaccucaacugccu

SEQ ID NO: 1482737 - RNA, 21 nt, Human
caacaagaagggacugagaga

SEQ ID NO: 1482738 - RNA, 20 nt, Human
caacaagaagggacugagag

SEQ ID NO: 1482739 - RNA, 22 nt, Human
caaagguaaaucagacuaugaa

SEQ ID NO: 1482740 - RNA, 14 nt, Human
caaagguaaaucag

SEQ ID NO: 1482741 - RNA, 16 nt, Human
caaagcaugaaaugga

SEQ ID NO: 1482742 - RNA, 19 nt, Human
caaaguccugggauuacag

SEQ ID NO: 1482743 - RNA, 22 nt, Human
caaaucuugguugaugccaaaa

SEQ ID NO: 1482744 - RNA, 14 nt, Human
auuuuauguugcau

SEQ ID NO: 1482745 - RNA, 16 nt, Human
auuuucugugccugaa

SEQ ID NO: 1482746 - RNA, 18 nt, Human
auuuucugugccugaaua

SEQ ID NO: 1482747 - RNA, 20 nt, Human
auuuucugugccugaauauu

SEQ ID NO: 1482748 - RNA, 14 nt, Human
auuuuauggugcau

SEQ ID NO: 1482749 - RNA, 22 nt, Human
auuuuauguuaagggaagaauu

SEQ ID NO: 1482750 - RNA, 16 nt, Human
auuuuauggugcauua

SEQ ID NO: 1482751 - RNA, 15 nt, Human
auuuuauaugcuuac

SEQ ID NO: 1482752 - RNA, 16 nt, Human
auuuuauaugcuuacu

SEQ ID NO: 1482753 - RNA, 18 nt, Human
auuuuauaugcuuacuga

SEQ ID NO: 1482754 - RNA, 19 nt, Human
auuuuagggguagcauuug

SEQ ID NO: 1482755 - RNA, 18 nt, Human
auuuuagcgugcucacug

SEQ ID NO: 1482756 - RNA, 21 nt, Human
auuuucugugccugaauauuu

SEQ ID NO: 1482757 - RNA, 20 nt, Human
auuuugaaccugaugaaaau

SEQ ID NO: 1482758 - RNA, 22 nt, Human
auuuugaaccugaugaaaauaa

SEQ ID NO: 1482759 - RNA, 18 nt, Human
auuuuuaauauauacuau

SEQ ID NO: 1482760 - RNA, 19 nt, Human
auuuuuaauauauacuaug

SEQ ID NO: 1482761 - RNA, 20 nt, Human
caaaagaagaaguuucauca

SEQ ID NO: 1482762 - RNA, 12 nt, Human
caaaagaaguaa

SEQ ID NO: 1482763 - RNA, 19 nt, Human
caaaagaaguaaaagcaaa

SEQ ID NO: 1482764 - RNA, 17 nt, Human
caaaagaaguaaaagca

SEQ ID NO: 1482765 - RNA, 18 nt, Human
caaaagaaguaaaagcaa

SEQ ID NO: 1482766 - RNA, 19 nt, Human
caaaagaauggcagaaaag

SEQ ID NO: 1482767 - RNA, 20 nt, Human
caaaagaauggcagaaaagu

SEQ ID NO: 1482768 - RNA, 15 nt, Human
auuuuuauauuugaa

SEQ ID NO: 1482769 - RNA, 16 nt, Human
auuuuuauauuugaaa

SEQ ID NO: 1482770 - RNA, 21 nt, Human
caaaaggauaaugaauacuuu

SEQ ID NO: 1482771 - RNA, 13 nt, Human
caaaagcuuuuua

SEQ ID NO: 1482772 - RNA, 17 nt, Human
caaacauauauaacaau

SEQ ID NO: 1482773 - RNA, 17 nt, Human
caaagaguucaagaaau

SEQ ID NO: 1482774 - RNA, 21 nt, Human
caaagaguucaagaaauaagu

SEQ ID NO: 1482775 - RNA, 17 nt, Human
caaagauaucucaucuc

SEQ ID NO: 1482776 - RNA, 23 nt, Human
cauccuucaucuggauuccagag

SEQ ID NO: 1482777 - RNA, 18 nt, Human
cauccuuccucacaccag

SEQ ID NO: 1482778 - RNA, 18 nt, Human
cauccauguuccgagaag

SEQ ID NO: 1482779 - RNA, 19 nt, Human
cauccauguuccgagaaga

SEQ ID NO: 1482780 - RNA, 22 nt, Human
cauaauuuaguuucauauaaag

SEQ ID NO: 1482781 - RNA, 20 nt, Human
cauacaccuaugucauuuca

SEQ ID NO: 1482782 - RNA, 23 nt, Human
cauacacuuauuggaacucugcu

SEQ ID NO: 1482783 - RNA, 23 nt, Human
cauacagaauuacuguaacugau

SEQ ID NO: 1482784 - RNA, 12 nt, Human
caugcacaaauu

SEQ ID NO: 1482785 - RNA, 16 nt, Human
caugcacccucauaca

SEQ ID NO: 1482786 - RNA, 20 nt, Human
caugcacccucauacacaga

SEQ ID NO: 1482787 - RNA, 23 nt, Human
caugcuaucucugugugcacaaa

SEQ ID NO: 1482788 - RNA, 16 nt, Human
caugaaggugucauac

SEQ ID NO: 1482789 - RNA, 15 nt, Human
caugaagcuguugug

SEQ ID NO: 1482790 - RNA, 16 nt, Human
cauggccagcuaauuu

SEQ ID NO: 1482791 - RNA, 14 nt, Human
cauucuauuguuaa

SEQ ID NO: 1482792 - RNA, 21 nt, Human
cauuaguacacagcaccagaa

SEQ ID NO: 1482793 - RNA, 18 nt, Human
caugucaaggguucaaga

SEQ ID NO: 1482794 - RNA, 20 nt, Human
caugucaaggguucaagauu

SEQ ID NO: 1482795 - RNA, 23 nt, Human
cauguaucuaugcauuuucugga

SEQ ID NO: 1482796 - RNA, 20 nt, Human
cauguaucuaugcauuuucu

SEQ ID NO: 1482797 - RNA, 13 nt, Human
cauuuauauguac

SEQ ID NO: 1482798 - RNA, 13 nt, Human
cauuuauauugau

SEQ ID NO: 1482799 - RNA, 21 nt, Human
cauuuggauccuguguggaga

SEQ ID NO: 1482800 - RNA, 16 nt, Human
ccacagaagcuccagg

SEQ ID NO: 1482801 - RNA, 18 nt, Human
ccaccagucugacuguuu

SEQ ID NO: 1482802 - RNA, 18 nt, Human
ccacagcccuuuugucuc

SEQ ID NO: 1482803 - RNA, 20 nt, Human
ccacagcccuuuugucucug

SEQ ID NO: 1482804 - RNA, 18 nt, Human
ccacagaagcuccaggua

SEQ ID NO: 1482805 - RNA, 16 nt, Human
ccacagaagugcuuuc

SEQ ID NO: 1482806 - RNA, 16 nt, Human
ccacagauaacugaaa

SEQ ID NO: 1482807 - RNA, 18 nt, Human
ccacagauaacugaaaau

SEQ ID NO: 1482808 - RNA, 12 nt, Human
ccacgccacagc

SEQ ID NO: 1482809 - RNA, 21 nt, Human
ccacgccacagcccuuuuguc

SEQ ID NO: 1482810 - RNA, 18 nt, Human
ccacgccacagcccuuuu

SEQ ID NO: 1482811 - RNA, 14 nt, Human
ccacgccacagccc

SEQ ID NO: 1482812 - RNA, 13 nt, Human
ccacgccacagcc

SEQ ID NO: 1482813 - RNA, 22 nt, Human
cagugcacuaauguguaagaca

SEQ ID NO: 1482814 - RNA, 17 nt, Human
cagugcaccugucauau

SEQ ID NO: 1482815 - RNA, 18 nt, Human
cagucugagagaggccau

SEQ ID NO: 1482816 - RNA, 22 nt, Human
cagucugaugagaacucugagc

SEQ ID NO: 1482817 - RNA, 19 nt, Human
cagucucagaaugucauuu

SEQ ID NO: 1482818 - RNA, 21 nt, Human
cagucucagaaugucauuuug

SEQ ID NO: 1482819 - RNA, 15 nt, Human
cagucaccucaugga

SEQ ID NO: 1482820 - RNA, 23 nt, Human
caggugcagcccccacugccuuu

SEQ ID NO: 1482821 - RNA, 20 nt, Human
caggugcagcccccacugcc

SEQ ID NO: 1482822 - RNA, 18 nt, Human
caggugcagcccccacug

SEQ ID NO: 1482823 - RNA, 17 nt, Human
caggagcuuuggaccua

SEQ ID NO: 1482824 - RNA, 20 nt, Human
caggaggugccacuggagug

SEQ ID NO: 1482825 - RNA, 17 nt, Human
caggaggugccacugga

SEQ ID NO: 1482826 - RNA, 19 nt, Human
caggaggugccacuggagu

SEQ ID NO: 1482827 - RNA, 17 nt, Human
cagggaggcccugugcc

SEQ ID NO: 1482828 - RNA, 20 nt, Human
caggccuagaggccugacug

SEQ ID NO: 1482829 - RNA, 16 nt, Human
cagcuccaagaauuuc

SEQ ID NO: 1482830 - RNA, 19 nt, Human
cagcuccaagaauuucuag

SEQ ID NO: 1482831 - RNA, 16 nt, Human
cagcuccaguuggagu

SEQ ID NO: 1482832 - RNA, 19 nt, Human
cagcugccucuucccucuu

SEQ ID NO: 1482833 - RNA, 21 nt, Human
cagcugcccccagagccacag

SEQ ID NO: 1482834 - RNA, 22 nt, Human
cagcugcccccagagccacagu

SEQ ID NO: 1482835 - RNA, 20 nt, Human
cagcugcccccagagccaca

SEQ ID NO: 1482836 - RNA, 18 nt, Human
cagcugcccccagagcca

SEQ ID NO: 1482837 - RNA, 17 nt, Human
cagcugcccccagagcc

SEQ ID NO: 1482838 - RNA, 16 nt, Human
cagcugcccccagagc

SEQ ID NO: 1482839 - RNA, 19 nt, Human
caggaaagcgccuccaacc

SEQ ID NO: 1482840 - RNA, 20 nt, Human
caggaaagcgccuccaaccc

SEQ ID NO: 1482841 - RNA, 15 nt, Human
caggaacaaacaggg

SEQ ID NO: 1482842 - RNA, 22 nt, Human
caggaacaaacagggcugccuu

SEQ ID NO: 1482843 - RNA, 14 nt, Human
caggaacaaacagg

SEQ ID NO: 1482844 - RNA, 15 nt, Human
cagcccuucuuucca

SEQ ID NO: 1482845 - RNA, 19 nt, Human
cagcccuucuuuccacaga

SEQ ID NO: 1482846 - RNA, 20 nt, Human
cagcccuucuuuccacagaa

SEQ ID NO: 1482847 - RNA, 22 nt, Human
cagccucugggggguggccagg

SEQ ID NO: 1482848 - RNA, 23 nt, Human
cagccucugggggguggccaggc

SEQ ID NO: 1482849 - RNA, 22 nt, Human
cagcacagccucuuagaugcag

SEQ ID NO: 1482850 - RNA, 16 nt, Human
cagauaugauucaaau

SEQ ID NO: 1482851 - RNA, 17 nt, Human
cagauaugauucaaaug

SEQ ID NO: 1482852 - RNA, 19 nt, Human
cagauaugauucaaauguc

SEQ ID NO: 1482853 - RNA, 17 nt, Human
auuccagagcacugcuc

SEQ ID NO: 1482854 - RNA, 17 nt, Human
auuccagccaucaccuu

SEQ ID NO: 1482855 - RNA, 17 nt, Human
auucccagagcaaaaua

SEQ ID NO: 1482856 - RNA, 19 nt, Human
auucccagagcaaaauaau

SEQ ID NO: 1482857 - RNA, 13 nt, Human
auucccccagugc

SEQ ID NO: 1482858 - RNA, 20 nt, Human
auucacauuguauucagagu

SEQ ID NO: 1482859 - RNA, 13 nt, Human
auucacauuguau

SEQ ID NO: 1482860 - RNA, 14 nt, Human
auucagaagaaaaa

SEQ ID NO: 1482861 - RNA, 16 nt, Human
auucagaagaaaaaga

SEQ ID NO: 1482862 - RNA, 17 nt, Human
auucagaagaaaaagaa

SEQ ID NO: 1482863 - RNA, 18 nt, Human
auucagaagaaaaagaag

SEQ ID NO: 1482864 - RNA, 13 nt, Human
auucagacagaug

SEQ ID NO: 1482865 - RNA, 14 nt, Human
auucagacagauga

SEQ ID NO: 1482866 - RNA, 20 nt, Human
auucagacagaugaggcuuu

SEQ ID NO: 1482867 - RNA, 12 nt, Human
auuauuuuguga

SEQ ID NO: 1482868 - RNA, 18 nt, Human
auucacaucgcagauucu

SEQ ID NO: 1482869 - RNA, 15 nt, Human
auucacaucucauuu

SEQ ID NO: 1482870 - RNA, 16 nt, Human
auucacaucucauuuu

SEQ ID NO: 1482871 - RNA, 15 nt, Human
auuauuauuuggccc

SEQ ID NO: 1482872 - RNA, 14 nt, Human
auuauuacuuuugc

SEQ ID NO: 1482873 - RNA, 15 nt, Human
auuauuacuuuugcu

SEQ ID NO: 1482874 - RNA, 20 nt, Human
auuauuacuuauuuuugaca

SEQ ID NO: 1482875 - RNA, 21 nt, Human
auuauuacuuauuuuugacag

SEQ ID NO: 1482876 - RNA, 15 nt, Human
auuauauuuauuacu

SEQ ID NO: 1482877 - RNA, 18 nt, Human
auuauauuuauuacugua

SEQ ID NO: 1482878 - RNA, 21 nt, Human
auuauguuaaaacugggacag

SEQ ID NO: 1482879 - RNA, 13 nt, Human
auuaucuaauuua

SEQ ID NO: 1482880 - RNA, 14 nt, Human
auuaucuaauuuau

SEQ ID NO: 1482881 - RNA, 18 nt, Human
auuauauguucagauuau

SEQ ID NO: 1482882 - RNA, 14 nt, Human
auuauauuaugaag

SEQ ID NO: 1482883 - RNA, 15 nt, Human
auuauauuuacaaau

SEQ ID NO: 1482884 - RNA, 20 nt, Human
auucuucccuaucuuugcca

SEQ ID NO: 1482885 - RNA, 12 nt, Human
auucuuccuagu

SEQ ID NO: 1482886 - RNA, 21 nt, Human
auucuucccuaucuuugccac

SEQ ID NO: 1482887 - RNA, 17 nt, Human
auucuuccuaguuuucu

SEQ ID NO: 1482888 - RNA, 19 nt, Human
auucuuccuaguuuucucc

SEQ ID NO: 1482889 - RNA, 13 nt, Human
auucuuccaucug

SEQ ID NO: 1482890 - RNA, 14 nt, Human
auucuuccaucuga

SEQ ID NO: 1482891 - RNA, 15 nt, Human
auucuuccaucugau

SEQ ID NO: 1482892 - RNA, 23 nt, Human
auucuuccaucugauugugaugu

SEQ ID NO: 1482893 - RNA, 17 nt, Human
auugacaacaguuacau

SEQ ID NO: 1482894 - RNA, 21 nt, Human
auuuuuauuuuugcugagacu

SEQ ID NO: 1482895 - RNA, 20 nt, Human
auuuuuccuccacugaacua

SEQ ID NO: 1482896 - RNA, 15 nt, Human
auuuuucacuucaaa

SEQ ID NO: 1482897 - RNA, 18 nt, Human
auuuuucaugauaaugaa

SEQ ID NO: 1482898 - RNA, 19 nt, Human
auuuuucaugauuuugaaa

SEQ ID NO: 1482899 - RNA, 15 nt, Human
auuuuugacaguguu

SEQ ID NO: 1482900 - RNA, 21 nt, Human
auuuuugauacuaagcauuga

SEQ ID NO: 1482901 - RNA, 19 nt, Human
auuuuugauacuaagcauu

SEQ ID NO: 1482902 - RNA, 12 nt, Human
auuuuugccucu

SEQ ID NO: 1482903 - RNA, 18 nt, Human
auuuuugccucuuccagu

SEQ ID NO: 1482904 - RNA, 21 nt, Human
auuuuugccucuuccagucuu

SEQ ID NO: 1482905 - RNA, 15 nt, Human
auuuuugcugagacu

SEQ ID NO: 1482906 - RNA, 23 nt, Human
auuuuuggaagaggacuccuuaa

SEQ ID NO: 1482907 - RNA, 21 nt, Human
auuuuuggggggaguaaagaa

SEQ ID NO: 1482908 - RNA, 19 nt, Human
auuuuuggcagucugaauu

SEQ ID NO: 1482909 - RNA, 19 nt, Human
auuuuuugaaaagcagaca

SEQ ID NO: 1482910 - RNA, 16 nt, Human
auuuuuugaaaagcag

SEQ ID NO: 1482911 - RNA, 20 nt, Human
auuuuuucucuaggaaauau

SEQ ID NO: 1482912 - RNA, 23 nt, Human
auuuuuucucuaggaaauauuua

SEQ ID NO: 1482913 - RNA, 22 nt, Human
auuuuuugggcagcaauuuaaa

SEQ ID NO: 1482914 - RNA, 14 nt, Human
auuuuuuaauaauu

SEQ ID NO: 1482915 - RNA, 16 nt, Human
auuuuuuaucaugcau

SEQ ID NO: 1482916 - RNA, 21 nt, Human
auuuuuuaucaugcauguccu

SEQ ID NO: 1482917 - RNA, 20 nt, Human
auuuuuuccuucaaaguuua

SEQ ID NO: 1482918 - RNA, 21 nt, Human
auuuuuuccuucaaaguuuaa

SEQ ID NO: 1482919 - RNA, 23 nt, Human
auuuuuuccuucaaaguuuaaua

SEQ ID NO: 1482920 - RNA, 22 nt, Human
auuuuugugauuuugugauuga

SEQ ID NO: 1482921 - RNA, 15 nt, Human
auuuuuguaguagcg

SEQ ID NO: 1482922 - RNA, 14 nt, Human
auuuuuuaaaaaag

SEQ ID NO: 1482923 - RNA, 17 nt, Human
auuuuuuaaaaaagcuu

SEQ ID NO: 1482924 - RNA, 18 nt, Human
auuuuuuaaaaaagcuua

SEQ ID NO: 1482925 - RNA, 19 nt, Human
auuuuuuaaaaaagcuuaa

SEQ ID NO: 1482926 - RNA, 20 nt, Human
auuuuuuaaaaaagcuuaaa

SEQ ID NO: 1482927 - RNA, 17 nt, Human
auuuuaauaaacacucu

SEQ ID NO: 1482928 - RNA, 16 nt, Human
auuuuaauaaacacuc

SEQ ID NO: 1482929 - RNA, 15 nt, Human
auuuuaauaaacacu

SEQ ID NO: 1482930 - RNA, 12 nt, Human
auuuuaauaaug

SEQ ID NO: 1482931 - RNA, 13 nt, Human
auuuuaauaauau

SEQ ID NO: 1482932 - RNA, 15 nt, Human
auuuucuauaauuua

SEQ ID NO: 1482933 - RNA, 14 nt, Human
auuuucuauaauuu

SEQ ID NO: 1482934 - RNA, 18 nt, Human
auuuuccuggugccaauu

SEQ ID NO: 1482935 - RNA, 22 nt, Human
auuuuccuggugccaauuucaa

SEQ ID NO: 1482936 - RNA, 14 nt, Human
auuuuccugaaaac

SEQ ID NO: 1482937 - RNA, 23 nt, Human
auuuuccuggugccaauuucaag

SEQ ID NO: 1482938 - RNA, 14 nt, Human
auuuugaugaacaa

SEQ ID NO: 1482939 - RNA, 20 nt, Human
auuuugccaagggcauaaau

SEQ ID NO: 1482940 - RNA, 14 nt, Human
auuuugcuggaaua

SEQ ID NO: 1482941 - RNA, 19 nt, Human
auuuugccaagggcauaaa

SEQ ID NO: 1482942 - RNA, 21 nt, Human
auuuugcaaucccuuaauauc

SEQ ID NO: 1482943 - RNA, 17 nt, Human
auuuuguguuuaggaac

SEQ ID NO: 1482944 - RNA, 18 nt, Human
auuuugugaugcaaauaa

SEQ ID NO: 1482945 - RNA, 16 nt, Human
auuuuguuucagugca

SEQ ID NO: 1482946 - RNA, 15 nt, Human
auuuuguuuaaauua

SEQ ID NO: 1482947 - RNA, 19 nt, Human
auuuuguugcuguuuugau

SEQ ID NO: 1482948 - RNA, 23 nt, Human
auuuuguugcuguuuugauuugu

SEQ ID NO: 1482949 - RNA, 17 nt, Human
auuuugugaugcaaaua

SEQ ID NO: 1482950 - RNA, 19 nt, Human
auuuuguaaacucaaaaua

SEQ ID NO: 1482951 - RNA, 20 nt, Human
auuuuguaaacucaaaauau

SEQ ID NO: 1482952 - RNA, 18 nt, Human
auuuuguaacgaagacac

SEQ ID NO: 1482953 - RNA, 19 nt, Human
auuuuguaacgaagacaca

SEQ ID NO: 1482954 - RNA, 17 nt, Human
auuuuguaacuuucucu

SEQ ID NO: 1482955 - RNA, 12 nt, Human
auuuuguaaguu

SEQ ID NO: 1482956 - RNA, 22 nt, Human
auuuguaguguuggagaagaac

SEQ ID NO: 1482957 - RNA, 14 nt, Human
auuuguauaaaaua

SEQ ID NO: 1482958 - RNA, 15 nt, Human
auuuguauaaaauaa

SEQ ID NO: 1482959 - RNA, 20 nt, Human
auuuggcaucccugggccuu

SEQ ID NO: 1482960 - RNA, 23 nt, Human
auuuuaaaagaaugauuaugaau

SEQ ID NO: 1482961 - RNA, 22 nt, Human
auuuuaaccuaugauauuuucu

SEQ ID NO: 1482962 - RNA, 21 nt, Human
auuugugaagguggaaauaaa

SEQ ID NO: 1482963 - RNA, 18 nt, Human
auuugugaagguggaaau

SEQ ID NO: 1482964 - RNA, 16 nt, Human
auuuuaaaagaaugau

SEQ ID NO: 1482965 - RNA, 23 nt, Human
auuugugaagguggaaauaaacu

SEQ ID NO: 1482966 - RNA, 17 nt, Human
auuucuaggacugaauu

SEQ ID NO: 1482967 - RNA, 18 nt, Human
auuucuaggacugaauua

SEQ ID NO: 1482968 - RNA, 14 nt, Human
auuucccucucuca

SEQ ID NO: 1482969 - RNA, 20 nt, Human
auuucccuuccuuccucucc

SEQ ID NO: 1482970 - RNA, 16 nt, Human
auuucccuuccuuccu

SEQ ID NO: 1482971 - RNA, 20 nt, Human
auuucuaggacugaauuaug

SEQ ID NO: 1482972 - RNA, 23 nt, Human
auuucuaggacugaauuaugaaa

SEQ ID NO: 1482973 - RNA, 11 nt, Human
auuucuaggua

SEQ ID NO: 1482974 - RNA, 20 nt, Human
auuucuagguaggaaaugug

SEQ ID NO: 1482975 - RNA, 19 nt, Human
auuucuagguaggaaaugu

SEQ ID NO: 1482976 - RNA, 18 nt, Human
auuugaaacacuuugcau

SEQ ID NO: 1482977 - RNA, 20 nt, Human
auuucuugagguaaaagcau

SEQ ID NO: 1482978 - RNA, 14 nt, Human
auuuauuuuaauaa

SEQ ID NO: 1482979 - RNA, 17 nt, Human
auuuauuuuaauaaugu

SEQ ID NO: 1482980 - RNA, 14 nt, Human
auuuauuuaaaaua

SEQ ID NO: 1482981 - RNA, 16 nt, Human
auuuauuuaaaauagc

SEQ ID NO: 1482982 - RNA, 18 nt, Human
auugggagcuugggaaug

SEQ ID NO: 1482983 - RNA, 21 nt, Human
auugggagcuugggaauggau

SEQ ID NO: 1482984 - RNA, 19 nt, Human
auuggacaguaaaauccac

SEQ ID NO: 1482985 - RNA, 13 nt, Human
auuggaaacaagu

SEQ ID NO: 1482986 - RNA, 17 nt, Human
auuggacaaagaaccuu

SEQ ID NO: 1482987 - RNA, 13 nt, Human
auugacuuuuuau

SEQ ID NO: 1482988 - RNA, 18 nt, Human
auugacuuuuuauggcac

SEQ ID NO: 1482989 - RNA, 21 nt, Human
auugcuuuguauuguauauua

SEQ ID NO: 1482990 - RNA, 14 nt, Human
auuguuuuacaaua

SEQ ID NO: 1482991 - RNA, 13 nt, Human
auuguuuuacaau

SEQ ID NO: 1482992 - RNA, 16 nt, Human
auuguggguguuaauu

SEQ ID NO: 1482993 - RNA, 18 nt, Human
auuguuuuacaauaguuc

SEQ ID NO: 1482994 - RNA, 17 nt, Human
auuguuuuacaauaguu

SEQ ID NO: 1482995 - RNA, 15 nt, Human
auuguuuuacaauag

SEQ ID NO: 1482996 - RNA, 18 nt, Human
auuuaaaccgcuaaaaga

SEQ ID NO: 1482997 - RNA, 19 nt, Human
auuuaaaccgcuaaaagaa

SEQ ID NO: 1482998 - RNA, 20 nt, Human
auuuaaaccgcuaaaagaaa

SEQ ID NO: 1482999 - RNA, 21 nt, Human
auuuaaaccgcuaaaagaaac

SEQ ID NO: 1483000 - RNA, 22 nt, Human
auuuaaaccgcuaaaagaaacu

SEQ ID NO: 1483001 - RNA, 23 nt, Human
auuuaaaccgcuaaaagaaacuu

SEQ ID NO: 1483002 - RNA, 24 nt, Human
auuuaaaccgcuaaaagaaacuuu

SEQ ID NO: 1483003 - RNA, 12 nt, Human
auuuaaacuaua

SEQ ID NO: 1483004 - RNA, 19 nt, Human
auuuaaacuauaagcaaga

SEQ ID NO: 1483005 - RNA, 20 nt, Human
auuuaaacuauaagcaagaa

SEQ ID NO: 1483006 - RNA, 13 nt, Human
auugucuagugaa

SEQ ID NO: 1483007 - RNA, 12 nt, Human
auugucucagag

SEQ ID NO: 1483008 - RNA, 14 nt, Human
auugucucagagca

SEQ ID NO: 1483009 - RNA, 21 nt, Human
auuguggggaugaugaaauaa

SEQ ID NO: 1483010 - RNA, 20 nt, Human
auuguggggaugaugaaaua

SEQ ID NO: 1483011 - RNA, 17 nt, Human
uuugaaauuaugugaca

SEQ ID NO: 1483012 - RNA, 15 nt, Human
uuugaaauuauguga

SEQ ID NO: 1483013 - RNA, 22 nt, Human
uuugaaauuaugugacauuuua

SEQ ID NO: 1483014 - RNA, 21 nt, Human
auggggcauccucuuuuucca

SEQ ID NO: 1483015 - RNA, 15 nt, Human
uuugaaaaagcgaaa

SEQ ID NO: 1483016 - RNA, 23 nt, Human
uuugaaaaagcgaaaaaaucagg

SEQ ID NO: 1483017 - RNA, 20 nt, Human
uuugaaaaagcgaaaaaauc

SEQ ID NO: 1483018 - RNA, 14 nt, Human
auggggguuucacc

SEQ ID NO: 1483019 - RNA, 15 nt, Human
augggguggaaggca

SEQ ID NO: 1483020 - RNA, 12 nt, Human
augggucacagg

SEQ ID NO: 1483021 - RNA, 14 nt, Human
augggucacaggaa

SEQ ID NO: 1483022 - RNA, 13 nt, Human
augggucacagga

SEQ ID NO: 1483023 - RNA, 17 nt, Human
augggauucuggacagg

SEQ ID NO: 1483024 - RNA, 14 nt, Human
augggauucuggac

SEQ ID NO: 1483025 - RNA, 22 nt, Human
uuucuguaagaaaccuacugcc

SEQ ID NO: 1483026 - RNA, 19 nt, Human
uuucugggcugucuauucu

SEQ ID NO: 1483027 - RNA, 21 nt, Human
uuucugggcugucuauucuag

SEQ ID NO: 1483028 - RNA, 17 nt, Human
uuucugugccugaauau

SEQ ID NO: 1483029 - RNA, 13 nt, Human
auguaaauauuuu

SEQ ID NO: 1483030 - RNA, 15 nt, Human
auguaaauauuuuaa

SEQ ID NO: 1483031 - RNA, 19 nt, Human
auguaaauauuuuaaagaa

SEQ ID NO: 1483032 - RNA, 20 nt, Human
auguaaauauuuuaaagaau

SEQ ID NO: 1483033 - RNA, 21 nt, Human
auguaaauauuuuaaagaauu

SEQ ID NO: 1483034 - RNA, 23 nt, Human
auguaaauauuuuaaagaauugu

SEQ ID NO: 1483035 - RNA, 16 nt, Human
auguaaagugauauuu

SEQ ID NO: 1483036 - RNA, 12 nt, Human
auguaaauuugu

SEQ ID NO: 1483037 - RNA, 20 nt, Human
auguaaaacauuuauuuuga

SEQ ID NO: 1483038 - RNA, 21 nt, Human
auguaaaacauuuauuuugac

SEQ ID NO: 1483039 - RNA, 21 nt, Human
auguaaaagguauuaaauuga

SEQ ID NO: 1483040 - RNA, 12 nt, Human
auguaaaaucuu

SEQ ID NO: 1483041 - RNA, 13 nt, Human
auguaaaaucuug

SEQ ID NO: 1483042 - RNA, 14 nt, Human
auguaaaaucuugu

SEQ ID NO: 1483043 - RNA, 15 nt, Human
auguaaaaucuuguc

SEQ ID NO: 1483044 - RNA, 16 nt, Human
auguaaaaucuuguca

SEQ ID NO: 1483045 - RNA, 20 nt, Human
auguaaaaucuugucaugug

SEQ ID NO: 1483046 - RNA, 21 nt, Human
auguaaaaucuugucaugugu

SEQ ID NO: 1483047 - RNA, 22 nt, Human
auguaaaaucuugucaugugua

SEQ ID NO: 1483048 - RNA, 23 nt, Human
auguaaaaucuugucauguguau

SEQ ID NO: 1483049 - RNA, 14 nt, Human
auguaaagauauuu

SEQ ID NO: 1483050 - RNA, 19 nt, Human
auguaaagaacauaaauaa

SEQ ID NO: 1483051 - RNA, 21 nt, Human
auguaaagauauuuuuaucuu

SEQ ID NO: 1483052 - RNA, 13 nt, Human
auguaaagccaug

SEQ ID NO: 1483053 - RNA, 14 nt, Human
auguaaagccaugc

SEQ ID NO: 1483054 - RNA, 14 nt, Human
auguaaagcuuguc

SEQ ID NO: 1483055 - RNA, 16 nt, Human
auguaaagcuugucug

SEQ ID NO: 1483056 - RNA, 13 nt, Human
augguuguacaua

SEQ ID NO: 1483057 - RNA, 21 nt, Human
augguucccuugaugaagaag

SEQ ID NO: 1483058 - RNA, 14 nt, Human
augguuuucuccaa

SEQ ID NO: 1483059 - RNA, 20 nt, Human
augguuuucuccaagagcua

SEQ ID NO: 1483060 - RNA, 21 nt, Human
augguuuucuccaagagcuac

SEQ ID NO: 1483061 - RNA, 13 nt, Human
auguaaaacauuu

SEQ ID NO: 1483062 - RNA, 14 nt, Human
auguaaaacauuua

SEQ ID NO: 1483063 - RNA, 15 nt, Human
auguaaaacauuuau

SEQ ID NO: 1483064 - RNA, 19 nt, Human
auggugcauuacgugggca

SEQ ID NO: 1483065 - RNA, 22 nt, Human
augguggaugauccccacgcca

SEQ ID NO: 1483066 - RNA, 19 nt, Human
augguggaugauccccacg

SEQ ID NO: 1483067 - RNA, 14 nt, Human
auggugccuucauu

SEQ ID NO: 1483068 - RNA, 16 nt, Human
auggugccuucauuug

SEQ ID NO: 1483069 - RNA, 13 nt, Human
augguuaacuaau

SEQ ID NO: 1483070 - RNA, 20 nt, Human
uuugugaagguggaaauaaa

SEQ ID NO: 1483071 - RNA, 17 nt, Human
uuugugaagcaaaauuu

SEQ ID NO: 1483072 - RNA, 14 nt, Human
uuuguaaugaaaac

SEQ ID NO: 1483073 - RNA, 13 nt, Human
uuuguaaugaaaa

SEQ ID NO: 1483074 - RNA, 12 nt, Human
uuuguauaaaag

SEQ ID NO: 1483075 - RNA, 19 nt, Human
uuuguaguguuggagaaga

SEQ ID NO: 1483076 - RNA, 21 nt, Human
uuuguaguguuggagaagaac

SEQ ID NO: 1483077 - RNA, 18 nt, Human
augugacauuuuacauua

SEQ ID NO: 1483078 - RNA, 12 nt, Human
augugacucuuu

SEQ ID NO: 1483079 - RNA, 16 nt, Human
augugacucuuuccaa

SEQ ID NO: 1483080 - RNA, 16 nt, Human
augugacauuuuacau

SEQ ID NO: 1483081 - RNA, 13 nt, Human
augucucuucuga

SEQ ID NO: 1483082 - RNA, 16 nt, Human
augucucuucugagcu

SEQ ID NO: 1483083 - RNA, 17 nt, Human
augucucuucugagcua

SEQ ID NO: 1483084 - RNA, 21 nt, Human
augugacucuuuccaaccggc

SEQ ID NO: 1483085 - RNA, 13 nt, Human
uuuggcaggugca

SEQ ID NO: 1483086 - RNA, 23 nt, Human
uuuggcaucccugggccuugggc

SEQ ID NO: 1483087 - RNA, 16 nt, Human
uuuggcaucccugggc

SEQ ID NO: 1483088 - RNA, 18 nt, Human
uuuggcaucccugggccu

SEQ ID NO: 1483089 - RNA, 22 nt, Human
auguauuacaguggggaaugaa

SEQ ID NO: 1483090 - RNA, 13 nt, Human
auguccuguaaag

SEQ ID NO: 1483091 - RNA, 14 nt, Human
auguccuguaaagg

SEQ ID NO: 1483092 - RNA, 16 nt, Human
auguccuucugagccc

SEQ ID NO: 1483093 - RNA, 16 nt, Human
auguaccguaggcuuu

SEQ ID NO: 1483094 - RNA, 16 nt, Human
auguacuucaugcugu

SEQ ID NO: 1483095 - RNA, 19 nt, Human
auguagauaacaagaccuc

SEQ ID NO: 1483096 - RNA, 19 nt, Human
auguagccccucuccugga

SEQ ID NO: 1483097 - RNA, 22 nt, Human
auguaggaaagaccauuuuucc

SEQ ID NO: 1483098 - RNA, 18 nt, Human
uuugacaguguugaaaau

SEQ ID NO: 1483099 - RNA, 19 nt, Human
uuugacaguguugaaaaug

SEQ ID NO: 1483100 - RNA, 14 nt, Human
uuugcaagccagau

SEQ ID NO: 1483101 - RNA, 14 nt, Human
uuugcaaagugcaa

SEQ ID NO: 1483102 - RNA, 17 nt, Human
uuugccucuuccagucu

SEQ ID NO: 1483103 - RNA, 12 nt, Human
uuugccuguaac

SEQ ID NO: 1483104 - RNA, 21 nt, Human
uuugccuguaacaagccagau

SEQ ID NO: 1483105 - RNA, 13 nt, Human
uuugccuguaaca

SEQ ID NO: 1483106 - RNA, 14 nt, Human
uuugccuguaacaa

SEQ ID NO: 1483107 - RNA, 12 nt, Human
uuugcugagacu

SEQ ID NO: 1483108 - RNA, 21 nt, Human
uuugcugacccuccccaaagg

SEQ ID NO: 1483109 - RNA, 19 nt, Human
uuugcugacccuccccaaa

SEQ ID NO: 1483110 - RNA, 17 nt, Human
uuugcugacccucccca

SEQ ID NO: 1483111 - RNA, 15 nt, Human
uuugcuggaauaagu

SEQ ID NO: 1483112 - RNA, 18 nt, Human
uuuaaauauaugcuaagu

SEQ ID NO: 1483113 - RNA, 13 nt, Human
uuuaaguauuuag

SEQ ID NO: 1483114 - RNA, 18 nt, Human
uuuaaguauuuagguuuu

SEQ ID NO: 1483115 - RNA, 20 nt, Human
uuuaauguauaguaaaucac

SEQ ID NO: 1483116 - RNA, 16 nt, Human
uuuaauguuuaaaaca

SEQ ID NO: 1483117 - RNA, 17 nt, Human
uuuaauguuuaaaacau

SEQ ID NO: 1483118 - RNA, 21 nt, Human
uuuaauguuuaaaacaucauu

SEQ ID NO: 1483119 - RNA, 13 nt, Human
augcagcucaaga

SEQ ID NO: 1483120 - RNA, 13 nt, Human
augcaguucugaa

SEQ ID NO: 1483121 - RNA, 15 nt, Human
augcauuugggucca

SEQ ID NO: 1483122 - RNA, 17 nt, Human
augcauuuggguccagg

SEQ ID NO: 1483123 - RNA, 18 nt, Human
augcauuuggguccagga

SEQ ID NO: 1483124 - RNA, 19 nt, Human
augcauuuggguccaggag

SEQ ID NO: 1483125 - RNA, 20 nt, Human
augcauuuggguccaggagg

SEQ ID NO: 1483126 - RNA, 22 nt, Human
augcauuuggguccaggaggaa

SEQ ID NO: 1483127 - RNA, 17 nt, Human
augccaaaaaaaaauac

SEQ ID NO: 1483128 - RNA, 18 nt, Human
augccaaaaaaaaauaca

SEQ ID NO: 1483129 - RNA, 19 nt, Human
augccaaaaaaaaauacau

SEQ ID NO: 1483130 - RNA, 22 nt, Human
augccaauuagcaauugacugu

SEQ ID NO: 1483131 - RNA, 14 nt, Human
augccaugaugccu

SEQ ID NO: 1483132 - RNA, 16 nt, Human
augcccuucuccuuau

SEQ ID NO: 1483133 - RNA, 19 nt, Human
augauugaauuauauguuc

SEQ ID NO: 1483134 - RNA, 20 nt, Human
augcacccucauacacagaa

SEQ ID NO: 1483135 - RNA, 14 nt, Human
augcaccuaaagaa

SEQ ID NO: 1483136 - RNA, 15 nt, Human
augcaccuaaagaaa

SEQ ID NO: 1483137 - RNA, 16 nt, Human
augcaccuaaagaaaa

SEQ ID NO: 1483138 - RNA, 18 nt, Human
augcaccuaaagaaaaac

SEQ ID NO: 1483139 - RNA, 23 nt, Human
augcaccuaaagaaaaacaaacu

SEQ ID NO: 1483140 - RNA, 14 nt, Human
uuguuuuggaugcc

SEQ ID NO: 1483141 - RNA, 13 nt, Human
uuuaaagaauugu

SEQ ID NO: 1483142 - RNA, 12 nt, Human
uuuaaagaauug

SEQ ID NO: 1483143 - RNA, 22 nt, Human
uuuaaagugacuaauggcauga

SEQ ID NO: 1483144 - RNA, 17 nt, Human
uuuaaaguuguuugugc

SEQ ID NO: 1483145 - RNA, 21 nt, Human
augauccaacuaaugccuuac

SEQ ID NO: 1483146 - RNA, 21 nt, Human
augauacuugaaaauuaacau

SEQ ID NO: 1483147 - RNA, 17 nt, Human
augauacuugaaaauua

SEQ ID NO: 1483148 - RNA, 14 nt, Human
augauuaaguaaug

SEQ ID NO: 1483149 - RNA, 18 nt, Human
augauuaaguaaugauaa

SEQ ID NO: 1483150 - RNA, 23 nt, Human
augauccccacgccacagcccuu

SEQ ID NO: 1483151 - RNA, 19 nt, Human
augauccccacgccacagc

SEQ ID NO: 1483152 - RNA, 18 nt, Human
augauccccacgccacag

SEQ ID NO: 1483153 - RNA, 15 nt, Human
augauaacuggaaac

SEQ ID NO: 1483154 - RNA, 15 nt, Human
augauaaugaacaga

SEQ ID NO: 1483155 - RNA, 12 nt, Human
augauaaugaac

SEQ ID NO: 1483156 - RNA, 18 nt, Human
uuuaucaugugaaaucau

SEQ ID NO: 1483157 - RNA, 17 nt, Human
uuuaucaugugaaauca

SEQ ID NO: 1483158 - RNA, 16 nt, Human
uuuaucaugcaugucc

SEQ ID NO: 1483159 - RNA, 22 nt, Human
uuuaucaugcauguccuguaaa

SEQ ID NO: 1483160 - RNA, 23 nt, Human
uuuaucaugcauguccuguaaag

SEQ ID NO: 1483161 - RNA, 19 nt, Human
uuuauauuguaaauauugu

SEQ ID NO: 1483162 - RNA, 14 nt, Human
uuuauauuguaaau

SEQ ID NO: 1483163 - RNA, 16 nt, Human
uuuauauuguaaauau

SEQ ID NO: 1483164 - RNA, 16 nt, Human
uuuauauuacacuaca

SEQ ID NO: 1483165 - RNA, 22 nt, Human
uuuauauugauaagaucuuuua

SEQ ID NO: 1483166 - RNA, 13 nt, Human
uuuauauguugua

SEQ ID NO: 1483167 - RNA, 15 nt, Human
augcuaagagaagua

SEQ ID NO: 1483168 - RNA, 16 nt, Human
augcuaagagaaguag

SEQ ID NO: 1483169 - RNA, 17 nt, Human
augcuaagagaaguaga

SEQ ID NO: 1483170 - RNA, 22 nt, Human
augcuaagagaaguagaaauca

SEQ ID NO: 1483171 - RNA, 18 nt, Human
augcuaagagaaguagaa

SEQ ID NO: 1483172 - RNA, 13 nt, Human
augcuaucucugu

SEQ ID NO: 1483173 - RNA, 19 nt, Human
uuuauuaauauauauuauc

SEQ ID NO: 1483174 - RNA, 17 nt, Human
uuuauuaauauauauua

SEQ ID NO: 1483175 - RNA, 21 nt, Human
uuuauuaauaaacauucuauc

SEQ ID NO: 1483176 - RNA, 16 nt, Human
uuuauuaauaaacauu

SEQ ID NO: 1483177 - RNA, 17 nt, Human
augcuguucaugaaaga

SEQ ID NO: 1483178 - RNA, 21 nt, Human
augcugcuggggaagacagug

SEQ ID NO: 1483179 - RNA, 20 nt, Human
augcugcuggggaagacagu

SEQ ID NO: 1483180 - RNA, 13 nt, Human
augcugcugggga

SEQ ID NO: 1483181 - RNA, 14 nt, Human
augcugcuggggaa

SEQ ID NO: 1483182 - RNA, 16 nt, Human
augcugcuggggaaga

SEQ ID NO: 1483183 - RNA, 17 nt, Human
augcugcuggggaagac

SEQ ID NO: 1483184 - RNA, 18 nt, Human
augcugcuggggaagaca

SEQ ID NO: 1483185 - RNA, 19 nt, Human
augcugcuggggaagacag

SEQ ID NO: 1483186 - RNA, 16 nt, Human
augcuucccuuuccug

SEQ ID NO: 1483187 - RNA, 23 nt, Human
augcuguucaugaaagauucaau

SEQ ID NO: 1483188 - RNA, 14 nt, Human
augcugugugacuc

SEQ ID NO: 1483189 - RNA, 19 nt, Human
augcuguucaugaaagauu

SEQ ID NO: 1483190 - RNA, 13 nt, Human
uuucaaaagaaag

SEQ ID NO: 1483191 - RNA, 22 nt, Human
uuuauuuuuccauuuacaacaa

SEQ ID NO: 1483192 - RNA, 16 nt, Human
uuuauuuuguguuuag

SEQ ID NO: 1483193 - RNA, 20 nt, Human
uuuauuuuguguuuaggaac

SEQ ID NO: 1483194 - RNA, 22 nt, Human
uuucaaaauuguuacaaauugu

SEQ ID NO: 1483195 - RNA, 16 nt, Human
uuucaaacauauauaa

SEQ ID NO: 1483196 - RNA, 17 nt, Human
uuucaaacauauauaac

SEQ ID NO: 1483197 - RNA, 22 nt, Human
auggacacuacacccagcaaua

SEQ ID NO: 1483198 - RNA, 19 nt, Human
auggacacuacacccagca

SEQ ID NO: 1483199 - RNA, 18 nt, Human
auggacacuacacccagc

SEQ ID NO: 1483200 - RNA, 17 nt, Human
auggacacuacacccag

SEQ ID NO: 1483201 - RNA, 16 nt, Human
auggacacuacaccca

SEQ ID NO: 1483202 - RNA, 15 nt, Human
auggacacuacaccc

SEQ ID NO: 1483203 - RNA, 13 nt, Human
auggagaaggaag

SEQ ID NO: 1483204 - RNA, 12 nt, Human
auggagaaggaa

SEQ ID NO: 1483205 - RNA, 17 nt, Human
uuucaacagugaagaca

SEQ ID NO: 1483206 - RNA, 20 nt, Human
uuucaacagugaagacagaa

SEQ ID NO: 1483207 - RNA, 19 nt, Human
uuucaacagugaagacaga

SEQ ID NO: 1483208 - RNA, 17 nt, Human
uuucaaagcuuuuucca

SEQ ID NO: 1483209 - RNA, 19 nt, Human
uuucaaauagggucuaacu

SEQ ID NO: 1483210 - RNA, 20 nt, Human
uuucaaauagggucuaacuc

SEQ ID NO: 1483211 - RNA, 18 nt, Human
uuucccccuagccugccu

SEQ ID NO: 1483212 - RNA, 19 nt, Human
uuuccaugcguguuucuga

SEQ ID NO: 1483213 - RNA, 23 nt, Human
uuuccaugcacccucauacacag

SEQ ID NO: 1483214 - RNA, 15 nt, Human
auggagaaggaaggc

SEQ ID NO: 1483215 - RNA, 14 nt, Human
auggagaaggaagg

SEQ ID NO: 1483216 - RNA, 14 nt, Human
auggcacuaguauu

SEQ ID NO: 1483217 - RNA, 16 nt, Human
auggcacuaguauuuc

SEQ ID NO: 1483218 - RNA, 17 nt, Human
auggcaggaaggcuugu

SEQ ID NO: 1483219 - RNA, 15 nt, Human
auggcaugagaaaua

SEQ ID NO: 1483220 - RNA, 17 nt, Human
auggcaugagaaauaca

SEQ ID NO: 1483221 - RNA, 22 nt, Human
auggccauggaguguacaagua

SEQ ID NO: 1483222 - RNA, 21 nt, Human
augggagcugguuagaaaugc

SEQ ID NO: 1483223 - RNA, 21 nt, Human
augggaggccuuucccuaagc

SEQ ID NO: 1483224 - RNA, 20 nt, Human
augggagcugguuagaaaug

SEQ ID NO: 1483225 - RNA, 22 nt, Human
augggagcugguuagaaaugca

SEQ ID NO: 1483226 - RNA, 19 nt, Human
auggcuauguuuuuaaugu

SEQ ID NO: 1483227 - RNA, 13 nt, Human
auggcuauuuuau

SEQ ID NO: 1483228 - RNA, 17 nt, Human
aucaggguuaguauugu

SEQ ID NO: 1483229 - RNA, 16 nt, Human
aucagguccucagaga

SEQ ID NO: 1483230 - RNA, 20 nt, Human
aucagguccucagagaauuu

SEQ ID NO: 1483231 - RNA, 14 nt, Human
aucaggcuuucuua

SEQ ID NO: 1483232 - RNA, 22 nt, Human
aucaggcuuucuuaaagugaga

SEQ ID NO: 1483233 - RNA, 14 nt, Human
aucaggcuuucuuu

SEQ ID NO: 1483234 - RNA, 22 nt, Human
aucaggcuuucuuuuuuuucuu

SEQ ID NO: 1483235 - RNA, 14 nt, Human
aucaggccuagagg

SEQ ID NO: 1483236 - RNA, 19 nt, Human
aucaggccuagaggccuga

SEQ ID NO: 1483237 - RNA, 13 nt, Human
uucuaggacugaa

SEQ ID NO: 1483238 - RNA, 14 nt, Human
uucuaggacugaau

SEQ ID NO: 1483239 - RNA, 22 nt, Human
uucuagcuuaucuacuuccaaa

SEQ ID NO: 1483240 - RNA, 16 nt, Human
uucuaggacugaauua

SEQ ID NO: 1483241 - RNA, 23 nt, Human
uucuaggacugaauuaugaaacu

SEQ ID NO: 1483242 - RNA, 15 nt, Human
uucucacuaaaucuu

SEQ ID NO: 1483243 - RNA, 22 nt, Human
aucacuugucaauaaaauccau

SEQ ID NO: 1483244 - RNA, 21 nt, Human
aucacuuguacaaaauaaaca

SEQ ID NO: 1483245 - RNA, 16 nt, Human
aucacuuucucaguuu

SEQ ID NO: 1483246 - RNA, 14 nt, Human
aucacuuguacaaa

SEQ ID NO: 1483247 - RNA, 16 nt, Human
aucacuuguacaaaau

SEQ ID NO: 1483248 - RNA, 17 nt, Human
aucacuuguacaaaaua

SEQ ID NO: 1483249 - RNA, 18 nt, Human
aucacuuguacaaaauaa

SEQ ID NO: 1483250 - RNA, 13 nt, Human
uucuaaaguaaaa

SEQ ID NO: 1483251 - RNA, 16 nt, Human
aucacugcucacacug

SEQ ID NO: 1483252 - RNA, 19 nt, Human
uucggacaguuuauuuguu

SEQ ID NO: 1483253 - RNA, 20 nt, Human
uucggacaguuuauuuguug

SEQ ID NO: 1483254 - RNA, 23 nt, Human
uucggaaagaagaaggugggagg

SEQ ID NO: 1483255 - RNA, 20 nt, Human
uuccuaaauauauuuuaaga

SEQ ID NO: 1483256 - RNA, 20 nt, Human
uuccucugcccuuccugcag

SEQ ID NO: 1483257 - RNA, 11 nt, Human
uuccucugccc

SEQ ID NO: 1483258 - RNA, 14 nt, Human
uuccugaacaggau

SEQ ID NO: 1483259 - RNA, 15 nt, Human
uuccugaacaggaua

SEQ ID NO: 1483260 - RNA, 19 nt, Human
uuccguagguuauuuucag

SEQ ID NO: 1483261 - RNA, 18 nt, Human
uuccgugacgucacugga

SEQ ID NO: 1483262 - RNA, 15 nt, Human
auagcaaaagaagaa

SEQ ID NO: 1483263 - RNA, 16 nt, Human
auagcaaaagaagaag

SEQ ID NO: 1483264 - RNA, 17 nt, Human
auagcaaaagaagaagu

SEQ ID NO: 1483265 - RNA, 18 nt, Human
auagcaaaagaagaaguu

SEQ ID NO: 1483266 - RNA, 19 nt, Human
auagcaaaagaagaaguuu

SEQ ID NO: 1483267 - RNA, 13 nt, Human
auagcaaagaauu

SEQ ID NO: 1483268 - RNA, 14 nt, Human
auagcaaagaauug

SEQ ID NO: 1483269 - RNA, 15 nt, Human
auagcaaagaauuga

SEQ ID NO: 1483270 - RNA, 18 nt, Human
aucaaggccuuauuggaa

SEQ ID NO: 1483271 - RNA, 22 nt, Human
aucaaggccuuauuggaaagca

SEQ ID NO: 1483272 - RNA, 20 nt, Human
aucaccuuagaccaccaagc

SEQ ID NO: 1483273 - RNA, 21 nt, Human
aucaaucuguaaaacuaagaa

SEQ ID NO: 1483274 - RNA, 14 nt, Human
aucacgcuuuccug

SEQ ID NO: 1483275 - RNA, 19 nt, Human
aucaccuuagaccaccaag

SEQ ID NO: 1483276 - RNA, 18 nt, Human
aucacgcuuuccugaauc

SEQ ID NO: 1483277 - RNA, 18 nt, Human
aucacgcuuuuugaaaaa

SEQ ID NO: 1483278 - RNA, 15 nt, Human
aucacugaguuuucc

SEQ ID NO: 1483279 - RNA, 16 nt, Human
aucacugaguuuucca

SEQ ID NO: 1483280 - RNA, 17 nt, Human
aucacugaguuuuccau

SEQ ID NO: 1483281 - RNA, 18 nt, Human
aucacugaguuuuccaug

SEQ ID NO: 1483282 - RNA, 21 nt, Human
uuccuguggauguaaagugau

SEQ ID NO: 1483283 - RNA, 14 nt, Human
auauuuuuaucuuu

SEQ ID NO: 1483284 - RNA, 15 nt, Human
auauuuuuaucuuua

SEQ ID NO: 1483285 - RNA, 20 nt, Human
auauuuuuaucuuuauauga

SEQ ID NO: 1483286 - RNA, 22 nt, Human
auauuuuuaucuuuauaugaag

SEQ ID NO: 1483287 - RNA, 20 nt, Human
uugaaauuaugugacauuuu

SEQ ID NO: 1483288 - RNA, 17 nt, Human
uugaaauuaugugacau

SEQ ID NO: 1483289 - RNA, 21 nt, Human
uugaaagggguugugaagagg

SEQ ID NO: 1483290 - RNA, 17 nt, Human
uugaaauuguauuacaa

SEQ ID NO: 1483291 - RNA, 18 nt, Human
uugaaccugaugaaaaua

SEQ ID NO: 1483292 - RNA, 20 nt, Human
uugaaccugaugaaaauaaa

SEQ ID NO: 1483293 - RNA, 19 nt, Human
uugaaccugaugaaaauaa

SEQ ID NO: 1483294 - RNA, 14 nt, Human
auccuaaacaucau

SEQ ID NO: 1483295 - RNA, 11 nt, Human
auccuccucau

SEQ ID NO: 1483296 - RNA, 14 nt, Human
auccuacccccugu

SEQ ID NO: 1483297 - RNA, 21 nt, Human
auccuaccacaaugcagugcc

SEQ ID NO: 1483298 - RNA, 22 nt, Human
auccuaccacaaugcagugccu

SEQ ID NO: 1483299 - RNA, 16 nt, Human
auccuacccccugugc

SEQ ID NO: 1483300 - RNA, 16 nt, Human
uucuuuguaaugaaaa

SEQ ID NO: 1483301 - RNA, 22 nt, Human
uucuuugguuucccaagagcua

SEQ ID NO: 1483302 - RNA, 18 nt, Human
uucuuuuugggagagacu

SEQ ID NO: 1483303 - RNA, 15 nt, Human
uucuuuguaaugaaa

SEQ ID NO: 1483304 - RNA, 19 nt, Human
uucuuuuugggagagacuu

SEQ ID NO: 1483305 - RNA, 21 nt, Human
uucuuuuugggagagacuugu

SEQ ID NO: 1483306 - RNA, 16 nt, Human
uucuuuuuuuagagaa

SEQ ID NO: 1483307 - RNA, 20 nt, Human
uucuucugaacucaaacuga

SEQ ID NO: 1483308 - RNA, 23 nt, Human
uucuucugaacucaaacugagga

SEQ ID NO: 1483309 - RNA, 13 nt, Human
uucuucugaacuc

SEQ ID NO: 1483310 - RNA, 16 nt, Human
auccagugauccuuac

SEQ ID NO: 1483311 - RNA, 21 nt, Human
auccagugauccuuacaaguu

SEQ ID NO: 1483312 - RNA, 16 nt, Human
auccaguucaugagaa

SEQ ID NO: 1483313 - RNA, 22 nt, Human
aucauuuugcaaucccuuaaua

SEQ ID NO: 1483314 - RNA, 16 nt, Human
uucugggcuucaucug

SEQ ID NO: 1483315 - RNA, 12 nt, Human
uucucuaggaaa

SEQ ID NO: 1483316 - RNA, 13 nt, Human
uucucuugccuca

SEQ ID NO: 1483317 - RNA, 16 nt, Human
uucugaacucaaacug

SEQ ID NO: 1483318 - RNA, 17 nt, Human
uucugaacucaaacuga

SEQ ID NO: 1483319 - RNA, 18 nt, Human
uucugaacucaaacugag

SEQ ID NO: 1483320 - RNA, 22 nt, Human
uucugaacucaaacugaggaau

SEQ ID NO: 1483321 - RNA, 13 nt, Human
uucugccaggaga

SEQ ID NO: 1483322 - RNA, 14 nt, Human
aucucauuuccaag

SEQ ID NO: 1483323 - RNA, 13 nt, Human
aucuacuuccaaa

SEQ ID NO: 1483324 - RNA, 15 nt, Human
aucuacuuccaaacu

SEQ ID NO: 1483325 - RNA, 19 nt, Human
aucuacuuccaaacuaauu

SEQ ID NO: 1483326 - RNA, 21 nt, Human
aucuagaacacaggcaaaauc

SEQ ID NO: 1483327 - RNA, 17 nt, Human
aucuagaggcuuccuuc

SEQ ID NO: 1483328 - RNA, 19 nt, Human
aucuagaggcuuccuucau

SEQ ID NO: 1483329 - RNA, 23 nt, Human
aucuagaggcuuccuucauuucc

SEQ ID NO: 1483330 - RNA, 14 nt, Human
aucucuucuuuuaa

SEQ ID NO: 1483331 - RNA, 15 nt, Human
uugcauuuaaaacag

SEQ ID NO: 1483332 - RNA, 20 nt, Human
uugcauuuaaaacagacacu

SEQ ID NO: 1483333 - RNA, 21 nt, Human
uugcauuuaaaacagacacug

SEQ ID NO: 1483334 - RNA, 12 nt, Human
aucugaauuuuu

SEQ ID NO: 1483335 - RNA, 14 nt, Human
aucugaauuuuuaa

SEQ ID NO: 1483336 - RNA, 18 nt, Human
aucugaauuuuuaaacaa

SEQ ID NO: 1483337 - RNA, 19 nt, Human
aucugaauuuuuaaacaag

SEQ ID NO: 1483338 - RNA, 20 nt, Human
aucugaauuuuuaaacaagu

SEQ ID NO: 1483339 - RNA, 14 nt, Human
uugauuacagugca

SEQ ID NO: 1483340 - RNA, 17 nt, Human
uugauuacagugcagug

SEQ ID NO: 1483341 - RNA, 18 nt, Human
uugacuuauaguacauga

SEQ ID NO: 1483342 - RNA, 16 nt, Human
uugagucaaaaaaucu

SEQ ID NO: 1483343 - RNA, 16 nt, Human
uugagauguguucaca

SEQ ID NO: 1483344 - RNA, 23 nt, Human
uugagagaaauaugaagaacuga

SEQ ID NO: 1483345 - RNA, 21 nt, Human
uugagauggagucuugcucug

SEQ ID NO: 1483346 - RNA, 15 nt, Human
uugauacuaagcauu

SEQ ID NO: 1483347 - RNA, 17 nt, Human
uugaagggaaauuucag

SEQ ID NO: 1483348 - RNA, 11 nt, Human
uugaaggcuua

SEQ ID NO: 1483349 - RNA, 12 nt, Human
uugaaggcuuaa

SEQ ID NO: 1483350 - RNA, 23 nt, Human
uugaauauuauuccucaaaaaau

SEQ ID NO: 1483351 - RNA, 15 nt, Human
uugaauccucucucu

SEQ ID NO: 1483352 - RNA, 21 nt, Human
auccucuccacagcugccucu

SEQ ID NO: 1483353 - RNA, 14 nt, Human
aucuuauaauuuaa

SEQ ID NO: 1483354 - RNA, 19 nt, Human
aucuugcccgcucaggcug

SEQ ID NO: 1483355 - RNA, 20 nt, Human
aucuugguugaugccaaaaa

SEQ ID NO: 1483356 - RNA, 21 nt, Human
aucuugguugaugccaaaaaa

SEQ ID NO: 1483357 - RNA, 21 nt, Human
aucuugguuugccuuccagaa

SEQ ID NO: 1483358 - RNA, 14 nt, Human
aucuugguuugccu

SEQ ID NO: 1483359 - RNA, 17 nt, Human
aucuugguuugccuucc

SEQ ID NO: 1483360 - RNA, 20 nt, Human
aucuugguuugccuuccaga

SEQ ID NO: 1483361 - RNA, 11 nt, Human
aucuugucaug

SEQ ID NO: 1483362 - RNA, 12 nt, Human
aucuugucaugu

SEQ ID NO: 1483363 - RNA, 14 nt, Human
aucuugucaugugu

SEQ ID NO: 1483364 - RNA, 15 nt, Human
aucuugucaugugua

SEQ ID NO: 1483365 - RNA, 16 nt, Human
aucuugucauguguau

SEQ ID NO: 1483366 - RNA, 17 nt, Human
aucuugucauguguaua

SEQ ID NO: 1483367 - RNA, 14 nt, Human
aucuuguccccaac

SEQ ID NO: 1483368 - RNA, 17 nt, Human
aucuuguccccaacacc

SEQ ID NO: 1483369 - RNA, 19 nt, Human
aucuugucauguguauaaa

SEQ ID NO: 1483370 - RNA, 20 nt, Human
uugcauuuauauguaccgua

SEQ ID NO: 1483371 - RNA, 15 nt, Human
uugcauuuauaugua

SEQ ID NO: 1483372 - RNA, 22 nt, Human
uugcauuuaaaacagacacugg

SEQ ID NO: 1483373 - RNA, 15 nt, Human
aucugcgugugugca

SEQ ID NO: 1483374 - RNA, 12 nt, Human
aucugccucccu

SEQ ID NO: 1483375 - RNA, 22 nt, Human
augaacuugaggacacaugucc

SEQ ID NO: 1483376 - RNA, 15 nt, Human
augaagaacugagga

SEQ ID NO: 1483377 - RNA, 21 nt, Human
augaacuugaggacacauguc

SEQ ID NO: 1483378 - RNA, 20 nt, Human
augaacuugaggacacaugu

SEQ ID NO: 1483379 - RNA, 19 nt, Human
augaacuugaggacacaug

SEQ ID NO: 1483380 - RNA, 18 nt, Human
augaacuugaggacacau

SEQ ID NO: 1483381 - RNA, 17 nt, Human
augaacuugaggacaca

SEQ ID NO: 1483382 - RNA, 16 nt, Human
augaacuugaggacac

SEQ ID NO: 1483383 - RNA, 18 nt, Human
augaacuuguaaaggaau

SEQ ID NO: 1483384 - RNA, 16 nt, Human
augaauauuuaguguu

SEQ ID NO: 1483385 - RNA, 16 nt, Human
augaagagauuuuuca

SEQ ID NO: 1483386 - RNA, 20 nt, Human
augaagagauuuuucaugau

SEQ ID NO: 1483387 - RNA, 15 nt, Human
augaacuugaggaca

SEQ ID NO: 1483388 - RNA, 13 nt, Human
augaacuugagga

SEQ ID NO: 1483389 - RNA, 15 nt, Human
augaauuacauuugu

SEQ ID NO: 1483390 - RNA, 16 nt, Human
augaauguaaauuugu

SEQ ID NO: 1483391 - RNA, 19 nt, Human
augaauguaaauuuguacu

SEQ ID NO: 1483392 - RNA, 21 nt, Human
augaauguaaauuuguacuau

SEQ ID NO: 1483393 - RNA, 12 nt, Human
augaauguaaau

SEQ ID NO: 1483394 - RNA, 13 nt, Human
augaauguaaauu

SEQ ID NO: 1483395 - RNA, 15 nt, Human
augaauguaaauuug

SEQ ID NO: 1483396 - RNA, 21 nt, Human
augaauauuuaguguucauaa

SEQ ID NO: 1483397 - RNA, 16 nt, Human
augaauuacauuugua

SEQ ID NO: 1483398 - RNA, 17 nt, Human
augaauuacauuuguau

SEQ ID NO: 1483399 - RNA, 11 nt, Human
uuggggaagag

SEQ ID NO: 1483400 - RNA, 22 nt, Human
uuggggaagagagccugcagga

SEQ ID NO: 1483401 - RNA, 23 nt, Human
uuggggaagagagccugcaggau

SEQ ID NO: 1483402 - RNA, 14 nt, Human
uuggggacacaugu

SEQ ID NO: 1483403 - RNA, 20 nt, Human
uuggggacacauguauuugg

SEQ ID NO: 1483404 - RNA, 14 nt, Human
uuggugagaaccug

SEQ ID NO: 1483405 - RNA, 20 nt, Human
uuggugauuccgcagugaga

SEQ ID NO: 1483406 - RNA, 16 nt, Human
uuggugauuccgcagu

SEQ ID NO: 1483407 - RNA, 14 nt, Human
aucuuuucauacau

SEQ ID NO: 1483408 - RNA, 14 nt, Human
auaauuuuaaaugu

SEQ ID NO: 1483409 - RNA, 14 nt, Human
auaauuuuaaauuc

SEQ ID NO: 1483410 - RNA, 13 nt, Human
auaauuuuaaaug

SEQ ID NO: 1483411 - RNA, 12 nt, Human
auaauuuuaaau

SEQ ID NO: 1483412 - RNA, 15 nt, Human
auaauuuuaaacaaa

SEQ ID NO: 1483413 - RNA, 14 nt, Human
auaauuuagauggu

SEQ ID NO: 1483414 - RNA, 20 nt, Human
auaauuuaguuucauauaaa

SEQ ID NO: 1483415 - RNA, 17 nt, Human
auaauuuaguuucauau

SEQ ID NO: 1483416 - RNA, 23 nt, Human
auaauucacauuguauucagagu

SEQ ID NO: 1483417 - RNA, 14 nt, Human
auaaucuuucacag

SEQ ID NO: 1483418 - RNA, 20 nt, Human
auaaucuucugccuucucau

SEQ ID NO: 1483419 - RNA, 19 nt, Human
auaauauauuuuaaauauu

SEQ ID NO: 1483420 - RNA, 14 nt, Human
auaaucuucugccu

SEQ ID NO: 1483421 - RNA, 15 nt, Human
auaaucuucugccuu

SEQ ID NO: 1483422 - RNA, 17 nt, Human
auaaucuucugccuucu

SEQ ID NO: 1483423 - RNA, 18 nt, Human
auaauauuuuuaauauau

SEQ ID NO: 1483424 - RNA, 14 nt, Human
uuaggguuaugauu

SEQ ID NO: 1483425 - RNA, 16 nt, Human
uuaggguuaugauuaa

SEQ ID NO: 1483426 - RNA, 14 nt, Human
uuaguaaucauauu

SEQ ID NO: 1483427 - RNA, 13 nt, Human
uuaguaaucauau

SEQ ID NO: 1483428 - RNA, 17 nt, Human
uuagguaauuuuuuuca

SEQ ID NO: 1483429 - RNA, 22 nt, Human
uuauaaaaauaaaaaacacugg

SEQ ID NO: 1483430 - RNA, 21 nt, Human
uuauaaaaauaaaaaacacug

SEQ ID NO: 1483431 - RNA, 19 nt, Human
uuauaaaaagguguuuuga

SEQ ID NO: 1483432 - RNA, 19 nt, Human
uuaguacuccccuccuuga

SEQ ID NO: 1483433 - RNA, 15 nt, Human
uuauaaaaauaaaaa

SEQ ID NO: 1483434 - RNA, 12 nt, Human
uuaauuuuugau

SEQ ID NO: 1483435 - RNA, 13 nt, Human
uuaauuuuugaua

SEQ ID NO: 1483436 - RNA, 15 nt, Human
uuaauuuuugauacu

SEQ ID NO: 1483437 - RNA, 18 nt, Human
uuacaaagcccuuuuaua

SEQ ID NO: 1483438 - RNA, 17 nt, Human
uuacaguggggaaugaa

SEQ ID NO: 1483439 - RNA, 14 nt, Human
uuacagugcagugc

SEQ ID NO: 1483440 - RNA, 21 nt, Human
uuaccaggcaccaaaagaagu

SEQ ID NO: 1483441 - RNA, 23 nt, Human
uuaccaggcaccaaaagaaguaa

SEQ ID NO: 1483442 - RNA, 13 nt, Human
auaagaucuuuua

SEQ ID NO: 1483443 - RNA, 15 nt, Human
auaagaucuuuuauu

SEQ ID NO: 1483444 - RNA, 17 nt, Human
auaagaucuuuuauuuu

SEQ ID NO: 1483445 - RNA, 20 nt, Human
auaagaucuuuuauuuugcc

SEQ ID NO: 1483446 - RNA, 13 nt, Human
auaagaaacuuuu

SEQ ID NO: 1483447 - RNA, 14 nt, Human
auaagaaacuuuuu

SEQ ID NO: 1483448 - RNA, 22 nt, Human
auaagaaacuuuuuuauuuaaa

SEQ ID NO: 1483449 - RNA, 21 nt, Human
auaagaaacuuuuuuauuuaa

SEQ ID NO: 1483450 - RNA, 18 nt, Human
auaagauauuuuucauga

SEQ ID NO: 1483451 - RNA, 17 nt, Human
uuacugucuuuuuucua

SEQ ID NO: 1483452 - RNA, 20 nt, Human
uuacugcuuaauucaaauaa

SEQ ID NO: 1483453 - RNA, 23 nt, Human
uuacuguacagacagaaaaaacu

SEQ ID NO: 1483454 - RNA, 16 nt, Human
uuacucaguaauuugu

SEQ ID NO: 1483455 - RNA, 17 nt, Human
uuaaucuuuaauuuuac

SEQ ID NO: 1483456 - RNA, 13 nt, Human
uuaaucuuuaauu

SEQ ID NO: 1483457 - RNA, 14 nt, Human
uuaauuuauuauua

SEQ ID NO: 1483458 - RNA, 14 nt, Human
uuaauuuaugcaga

SEQ ID NO: 1483459 - RNA, 13 nt, Human
uuaauuuuccugg

SEQ ID NO: 1483460 - RNA, 16 nt, Human
uuaauuugguuuucac

SEQ ID NO: 1483461 - RNA, 22 nt, Human
uuaagacgaaacauuuguucua

SEQ ID NO: 1483462 - RNA, 22 nt, Human
uuaagagagucuauuuacggaa

SEQ ID NO: 1483463 - RNA, 17 nt, Human
uuaagacuugacagugg

SEQ ID NO: 1483464 - RNA, 13 nt, Human
uuaagacuugaca

SEQ ID NO: 1483465 - RNA, 17 nt, Human
uuaaucagauagauauu

SEQ ID NO: 1483466 - RNA, 20 nt, Human
uuaaucagguccucagagaa

SEQ ID NO: 1483467 - RNA, 15 nt, Human
aguuuuuuuuauaca

SEQ ID NO: 1483468 - RNA, 21 nt, Human
aguuuuuugaaauuaugugac

SEQ ID NO: 1483469 - RNA, 17 nt, Human
aguuuuuuauuaugcau

SEQ ID NO: 1483470 - RNA, 16 nt, Human
aguuuuauaugcuucu

SEQ ID NO: 1483471 - RNA, 19 nt, Human
aguuuuacuuuuaaacugu

SEQ ID NO: 1483472 - RNA, 20 nt, Human
aguuuuacuuuuaaacugug

SEQ ID NO: 1483473 - RNA, 20 nt, Human
auaaaagccuguuuaagaga

SEQ ID NO: 1483474 - RNA, 23 nt, Human
aguuuuuugaaauuaugugacau

SEQ ID NO: 1483475 - RNA, 15 nt, Human
aguuuuuuguaccaa

SEQ ID NO: 1483476 - RNA, 22 nt, Human
auaaaagggacugagaaauuua

SEQ ID NO: 1483477 - RNA, 19 nt, Human
uuaagacgaaacauuuguu

SEQ ID NO: 1483478 - RNA, 20 nt, Human
aguuuaaauuguaauaggcg

SEQ ID NO: 1483479 - RNA, 17 nt, Human
aguuuaaauuguaauag

SEQ ID NO: 1483480 - RNA, 15 nt, Human
aguuagcuuuaacuu

SEQ ID NO: 1483481 - RNA, 20 nt, Human
aguuagcuuuaacuuaaaua

SEQ ID NO: 1483482 - RNA, 22 nt, Human
aguuagcuuuaacuuaaauagu

SEQ ID NO: 1483483 - RNA, 21 nt, Human
aguuagcuuuaacuuaaauag

SEQ ID NO: 1483484 - RNA, 15 nt, Human
aguuuagcuggaaaa

SEQ ID NO: 1483485 - RNA, 16 nt, Human
aguuuagcuggaaaag

SEQ ID NO: 1483486 - RNA, 21 nt, Human
uuaaaaaagcuuaaaacuuug

SEQ ID NO: 1483487 - RNA, 12 nt, Human
uuaaaaaagcuu

SEQ ID NO: 1483488 - RNA, 19 nt, Human
uuaaaaaagcuuaaaacuu

SEQ ID NO: 1483489 - RNA, 19 nt, Human
uuaaaaugagaaaucuaaa

SEQ ID NO: 1483490 - RNA, 12 nt, Human
uuaaaaugagaa

SEQ ID NO: 1483491 - RNA, 16 nt, Human
uuaaaauguaaagcca

SEQ ID NO: 1483492 - RNA, 17 nt, Human
uuaaaauguaaagccau

SEQ ID NO: 1483493 - RNA, 15 nt, Human
uuaaaguuguuugug

SEQ ID NO: 1483494 - RNA, 16 nt, Human
uuaaauuuuuuuuaca

SEQ ID NO: 1483495 - RNA, 15 nt, Human
aguuuauauuuaacu

SEQ ID NO: 1483496 - RNA, 16 nt, Human
aguuuauauuuaacuc

SEQ ID NO: 1483497 - RNA, 18 nt, Human
aguuuauauuuaacucuc

SEQ ID NO: 1483498 - RNA, 15 nt, Human
aguuuguugaaacac

SEQ ID NO: 1483499 - RNA, 14 nt, Human
aguuucugaguuuu

SEQ ID NO: 1483500 - RNA, 20 nt, Human
aguuucugaguuuuaccaaa

SEQ ID NO: 1483501 - RNA, 19 nt, Human
aguuucugaguuuuaccaa

SEQ ID NO: 1483502 - RNA, 18 nt, Human
aguuucugaguuuuacca

SEQ ID NO: 1483503 - RNA, 17 nt, Human
aguuucugaguuuuacc

SEQ ID NO: 1483504 - RNA, 13 nt, Human
aguuuauuuguug

SEQ ID NO: 1483505 - RNA, 12 nt, Human
auagauguuuga

SEQ ID NO: 1483506 - RNA, 18 nt, Human
auagauaggucagugcaa

SEQ ID NO: 1483507 - RNA, 14 nt, Human
auagagacgggacu

SEQ ID NO: 1483508 - RNA, 16 nt, Human
auagagacuugggaau

SEQ ID NO: 1483509 - RNA, 14 nt, Human
auagaacaaggcug

SEQ ID NO: 1483510 - RNA, 13 nt, Human
auagaaguaaaaa

SEQ ID NO: 1483511 - RNA, 22 nt, Human
auagaauaaaauuuuuaaucuu

SEQ ID NO: 1483512 - RNA, 19 nt, Human
auagaauaaaauuuuuaau

SEQ ID NO: 1483513 - RNA, 14 nt, Human
auagaauaaaauuu

SEQ ID NO: 1483514 - RNA, 13 nt, Human
auagaaugacagu

SEQ ID NO: 1483515 - RNA, 18 nt, Human
auagaaugguaucaauaa

SEQ ID NO: 1483516 - RNA, 12 nt, Human
auagacacgcac

SEQ ID NO: 1483517 - RNA, 21 nt, Human
auagacaauugagguaaguuu

SEQ ID NO: 1483518 - RNA, 13 nt, Human
auagacagaagaa

SEQ ID NO: 1483519 - RNA, 14 nt, Human
auagacagaagaaa

SEQ ID NO: 1483520 - RNA, 16 nt, Human
auagacagaagaaaca

SEQ ID NO: 1483521 - RNA, 17 nt, Human
auagacagaagaaacaa

SEQ ID NO: 1483522 - RNA, 19 nt, Human
auagacagaagaaacaagg

SEQ ID NO: 1483523 - RNA, 18 nt, Human
auagacagaagaaacaag

SEQ ID NO: 1483524 - RNA, 14 nt, Human
auagacaauugagg

SEQ ID NO: 1483525 - RNA, 22 nt, Human
auagaauuauaacuggaaagaa

SEQ ID NO: 1483526 - RNA, 15 nt, Human
auacuggcacagagg

SEQ ID NO: 1483527 - RNA, 13 nt, Human
auacuggcacaga

SEQ ID NO: 1483528 - RNA, 12 nt, Human
auacugcugaga

SEQ ID NO: 1483529 - RNA, 18 nt, Human
auacugcugagauacaua

SEQ ID NO: 1483530 - RNA, 19 nt, Human
auacugcugagauacauac

SEQ ID NO: 1483531 - RNA, 21 nt, Human
auacugcugagauacauacag

SEQ ID NO: 1483532 - RNA, 10 nt, Human
auacugcuug

SEQ ID NO: 1483533 - RNA, 22 nt, Human
auacugcugagauacauacaga

SEQ ID NO: 1483534 - RNA, 15 nt, Human
auacugcuuggagcu

SEQ ID NO: 1483535 - RNA, 20 nt, Human
auacugcuuggagcugagca

SEQ ID NO: 1483536 - RNA, 21 nt, Human
auacugcuuggagcugagcaa

SEQ ID NO: 1483537 - RNA, 15 nt, Human
auacugcauacuuuu

SEQ ID NO: 1483538 - RNA, 21 nt, Human
auacugcauacuuuuuaaaug

SEQ ID NO: 1483539 - RNA, 14 nt, Human
auacucuuauaucu

SEQ ID NO: 1483540 - RNA, 18 nt, Human
auacucuuauaucuauau

SEQ ID NO: 1483541 - RNA, 20 nt, Human
auacucucaccauuuggauc

SEQ ID NO: 1483542 - RNA, 17 nt, Human
auacucauuuuucauga

SEQ ID NO: 1483543 - RNA, 16 nt, Human
uuauuccuccugcuca

SEQ ID NO: 1483544 - RNA, 20 nt, Human
uuauuccuccugcucauauu

SEQ ID NO: 1483545 - RNA, 20 nt, Human
uuauuccccauucuuccuag

SEQ ID NO: 1483546 - RNA, 14 nt, Human
uuauuauauuuaca

SEQ ID NO: 1483547 - RNA, 19 nt, Human
uuauguuaaaacugggaca

SEQ ID NO: 1483548 - RNA, 22 nt, Human
uuauguuaagggaagaauucca

SEQ ID NO: 1483549 - RNA, 15 nt, Human
uuauuauauuuacaa

SEQ ID NO: 1483550 - RNA, 12 nt, Human
uuauucauaauu

SEQ ID NO: 1483551 - RNA, 14 nt, Human
uuauuaugcauuau

SEQ ID NO: 1483552 - RNA, 13 nt, Human
uuaugugaaacau

SEQ ID NO: 1483553 - RNA, 17 nt, Human
uuaugucuguggauuuu

SEQ ID NO: 1483554 - RNA, 15 nt, Human
uuaugucucuucuga

SEQ ID NO: 1483555 - RNA, 11 nt, Human
uuauguaguuu

SEQ ID NO: 1483556 - RNA, 21 nt, Human
uuauguaguuuuuauauguug

SEQ ID NO: 1483557 - RNA, 20 nt, Human
uuaugugacauuuuacauua

SEQ ID NO: 1483558 - RNA, 22 nt, Human
uuaugugccagauuuaugcaua

SEQ ID NO: 1483559 - RNA, 19 nt, Human
uuaugugacauuuuacauu

SEQ ID NO: 1483560 - RNA, 14 nt, Human
uuaugugacauuuu

SEQ ID NO: 1483561 - RNA, 15 nt, Human
uuaugugaaacaugu

SEQ ID NO: 1483562 - RNA, 11 nt, Human
uuaugggucac

SEQ ID NO: 1483563 - RNA, 13 nt, Human
uuaugggucacag

SEQ ID NO: 1483564 - RNA, 15 nt, Human
uuaugggucacagga

SEQ ID NO: 1483565 - RNA, 19 nt, Human
uuaugauuaaguaaugaua

SEQ ID NO: 1483566 - RNA, 22 nt, Human
uuaugauuaaguaaugauaacu

SEQ ID NO: 1483567 - RNA, 18 nt, Human
uuaugaaaaagaagaauc

SEQ ID NO: 1483568 - RNA, 19 nt, Human
uuaugaaaaagaagaaucu

SEQ ID NO: 1483569 - RNA, 14 nt, Human
uuaugaaacuuuug

SEQ ID NO: 1483570 - RNA, 17 nt, Human
uuaugaaacuuuuggaa

SEQ ID NO: 1483571 - RNA, 18 nt, Human
uuaugaaacuuuuggaag

SEQ ID NO: 1483572 - RNA, 20 nt, Human
uuaugaagcuuuuaugugaa

SEQ ID NO: 1483573 - RNA, 19 nt, Human
uuaugaaacuuuuggaagg

SEQ ID NO: 1483574 - RNA, 20 nt, Human
uuaugauacuugaaaauuaa

SEQ ID NO: 1483575 - RNA, 16 nt, Human
uuaugacuauguaaac

SEQ ID NO: 1483576 - RNA, 15 nt, Human
uuaugacuauguaaa

SEQ ID NO: 1483577 - RNA, 15 nt, Human
uuaugacugccaaga

SEQ ID NO: 1483578 - RNA, 15 nt, Human
uuaugagaaagccuu

SEQ ID NO: 1483579 - RNA, 18 nt, Human
uuaugagcucuucauguu

SEQ ID NO: 1483580 - RNA, 14 nt, Human
uuaugaauuacauu

SEQ ID NO: 1483581 - RNA, 16 nt, Human
uuaugaauuacauuug

SEQ ID NO: 1483582 - RNA, 17 nt, Human
uuaugaauuacauuugu

SEQ ID NO: 1483583 - RNA, 21 nt, Human
uuaugaauuacauuuguauaa

SEQ ID NO: 1483584 - RNA, 16 nt, Human
uuaugacaucacuugu

SEQ ID NO: 1483585 - RNA, 18 nt, Human
uuaugacaucacuuguac

SEQ ID NO: 1483586 - RNA, 21 nt, Human
uuaugacaucacuuguacaaa

SEQ ID NO: 1483587 - RNA, 23 nt, Human
uuaugacaucacuuguacaaaau

SEQ ID NO: 1483588 - RNA, 21 nt, Human
auacaggaugaugacuaugga

SEQ ID NO: 1483589 - RNA, 22 nt, Human
auacauguaauucuaccaaggu

SEQ ID NO: 1483590 - RNA, 22 nt, Human
auacaugcuaagagaaguagaa

SEQ ID NO: 1483591 - RNA, 18 nt, Human
auacaugcuaagagaagu

SEQ ID NO: 1483592 - RNA, 17 nt, Human
auacauacagaauuacu

SEQ ID NO: 1483593 - RNA, 12 nt, Human
auacauacagaa

SEQ ID NO: 1483594 - RNA, 22 nt, Human
uuauaaacuuuuuucuuacugu

SEQ ID NO: 1483595 - RNA, 16 nt, Human
uuauaaacuuuuuucu

SEQ ID NO: 1483596 - RNA, 12 nt, Human
uuauaaacuuuu

SEQ ID NO: 1483597 - RNA, 20 nt, Human
auacagaauuacuguaacug

SEQ ID NO: 1483598 - RNA, 18 nt, Human
auacgugggcauucaaau

SEQ ID NO: 1483599 - RNA, 19 nt, Human
auacgugggcauucaaaug

SEQ ID NO: 1483600 - RNA, 16 nt, Human
auacgacaguacacug

SEQ ID NO: 1483601 - RNA, 19 nt, Human
uuauauuugaaauauugac

SEQ ID NO: 1483602 - RNA, 21 nt, Human
auacuauuaaaaagguuuaca

SEQ ID NO: 1483603 - RNA, 14 nt, Human
auacuauaguacca

SEQ ID NO: 1483604 - RNA, 15 nt, Human
auacuauauuuuagg

SEQ ID NO: 1483605 - RNA, 22 nt, Human
auacuauuaaaaagguuuacag

SEQ ID NO: 1483606 - RNA, 16 nt, Human
aguggggaaugaagau

SEQ ID NO: 1483607 - RNA, 12 nt, Human
aguggggguggg

SEQ ID NO: 1483608 - RNA, 19 nt, Human
aguggggguggggguaggg

SEQ ID NO: 1483609 - RNA, 22 nt, Human
aguggguuuuuuaguugaauuu

SEQ ID NO: 1483610 - RNA, 22 nt, Human
aguggacuggccucaaagcaag

SEQ ID NO: 1483611 - RNA, 18 nt, Human
uguuacaaauuguagaag

SEQ ID NO: 1483612 - RNA, 17 nt, Human
uguuacaaauuguagaa

SEQ ID NO: 1483613 - RNA, 13 nt, Human
uguuaauauugau

SEQ ID NO: 1483614 - RNA, 19 nt, Human
uguuaauauugauuuauua

SEQ ID NO: 1483615 - RNA, 15 nt, Human
uguuaagacuugaca

SEQ ID NO: 1483616 - RNA, 17 nt, Human
uguuaagacuugacagu

SEQ ID NO: 1483617 - RNA, 20 nt, Human
uguuaagacuugacagugga

SEQ ID NO: 1483618 - RNA, 14 nt, Human
ugugucugcucagu

SEQ ID NO: 1483619 - RNA, 16 nt, Human
agugccauuaacaaau

SEQ ID NO: 1483620 - RNA, 21 nt, Human
ugugguacaagcauucugucu

SEQ ID NO: 1483621 - RNA, 19 nt, Human
ugugguacaugguguuugu

SEQ ID NO: 1483622 - RNA, 16 nt, Human
ugugguacaugguguu

SEQ ID NO: 1483623 - RNA, 20 nt, Human
uguuaugacuauguaaacua

SEQ ID NO: 1483624 - RNA, 18 nt, Human
uguuaugacuauguaaac

SEQ ID NO: 1483625 - RNA, 17 nt, Human
uguuaugacuauguaaa

SEQ ID NO: 1483626 - RNA, 16 nt, Human
uguuaugacuauguaa

SEQ ID NO: 1483627 - RNA, 14 nt, Human
uguucauuuccuca

SEQ ID NO: 1483628 - RNA, 19 nt, Human
uguuccuuaagucagaaca

SEQ ID NO: 1483629 - RNA, 17 nt, Human
agugugaccaaaaguua

SEQ ID NO: 1483630 - RNA, 19 nt, Human
agugugaccaaaaguuaca

SEQ ID NO: 1483631 - RNA, 22 nt, Human
agugugaccaaaaguuacaugu

SEQ ID NO: 1483632 - RNA, 23 nt, Human
aguggguuuuuuaguugaauuuu

SEQ ID NO: 1483633 - RNA, 19 nt, Human
agugguaaaaaggccuccu

SEQ ID NO: 1483634 - RNA, 20 nt, Human
agugugcgugguggucccug

SEQ ID NO: 1483635 - RNA, 22 nt, Human
agugugcgugguggucccuggg

SEQ ID NO: 1483636 - RNA, 23 nt, Human
agugugcgugguggucccugggu

SEQ ID NO: 1483637 - RNA, 22 nt, Human
agugugcuucuguuaucaaaca

SEQ ID NO: 1483638 - RNA, 19 nt, Human
aguguguguuuuucauaaa

SEQ ID NO: 1483639 - RNA, 18 nt, Human
aguguguguuuuucauaa

SEQ ID NO: 1483640 - RNA, 16 nt, Human
aguguugaaaauguuc

SEQ ID NO: 1483641 - RNA, 17 nt, Human
aguguugaaaauguuca

SEQ ID NO: 1483642 - RNA, 15 nt, Human
uguugcauagaauaa

SEQ ID NO: 1483643 - RNA, 22 nt, Human
uguugcccacagcuguaugauu

SEQ ID NO: 1483644 - RNA, 17 nt, Human
uguugccaguuguccuc

SEQ ID NO: 1483645 - RNA, 21 nt, Human
aguguguggcuuucagagccu

SEQ ID NO: 1483646 - RNA, 18 nt, Human
uguugccaguuguccucc

SEQ ID NO: 1483647 - RNA, 19 nt, Human
uguugccaguuguccuccu

SEQ ID NO: 1483648 - RNA, 18 nt, Human
agugccagcaccugccca

SEQ ID NO: 1483649 - RNA, 22 nt, Human
agugcauuuaugagcucuucau

SEQ ID NO: 1483650 - RNA, 17 nt, Human
agugcacuaauguguaa

SEQ ID NO: 1483651 - RNA, 21 nt, Human
agugcacuaauguguaagaca

SEQ ID NO: 1483652 - RNA, 14 nt, Human
agugcaaggaccua

SEQ ID NO: 1483653 - RNA, 16 nt, Human
agugcacuugcuggaa

SEQ ID NO: 1483654 - RNA, 20 nt, Human
agugcacuugcuggaagacg

SEQ ID NO: 1483655 - RNA, 18 nt, Human
agugcacuugcuggaaga

SEQ ID NO: 1483656 - RNA, 23 nt, Human
agugcaguggcaucaucucagcu

SEQ ID NO: 1483657 - RNA, 23 nt, Human
agugcaguggcgugaucucagcu

SEQ ID NO: 1483658 - RNA, 23 nt, Human
agugcaguggcgcgaucucagcu

SEQ ID NO: 1483659 - RNA, 14 nt, Human
agugcaaauuguca

SEQ ID NO: 1483660 - RNA, 21 nt, Human
agugauuuuuaugccaccuga

SEQ ID NO: 1483661 - RNA, 16 nt, Human
agugauuuuuaugcca

SEQ ID NO: 1483662 - RNA, 20 nt, Human
agugauuuuuaugccaccug

SEQ ID NO: 1483663 - RNA, 15 nt, Human
agugaguuuuuuagu

SEQ ID NO: 1483664 - RNA, 19 nt, Human
agugaguuuuuuagugcgu

SEQ ID NO: 1483665 - RNA, 21 nt, Human
ugugcucaggagcccugggag

SEQ ID NO: 1483666 - RNA, 16 nt, Human
ugugauucaaucugua

SEQ ID NO: 1483667 - RNA, 20 nt, Human
ugugauucaaucuguaaacu

SEQ ID NO: 1483668 - RNA, 22 nt, Human
ugugauucaaucuguaaacugu

SEQ ID NO: 1483669 - RNA, 21 nt, Human
uguggaucaaauccagccugc

SEQ ID NO: 1483670 - RNA, 19 nt, Human
uguggaucaaccaucgcuu

SEQ ID NO: 1483671 - RNA, 20 nt, Human
uguggaucaaccaucgcuuu

SEQ ID NO: 1483672 - RNA, 19 nt, Human
ugugcugugcuauggugcu

SEQ ID NO: 1483673 - RNA, 18 nt, Human
agugacuuuggcugcaug

SEQ ID NO: 1483674 - RNA, 18 nt, Human
agugacucuauauagcug

SEQ ID NO: 1483675 - RNA, 12 nt, Human
agugagaggcug

SEQ ID NO: 1483676 - RNA, 11 nt, Human
agugagccuga

SEQ ID NO: 1483677 - RNA, 21 nt, Human
agugagccugaauuuuguugc

SEQ ID NO: 1483678 - RNA, 15 nt, Human
ugugauucaaucugu

SEQ ID NO: 1483679 - RNA, 18 nt, Human
agucuuucacauuuaaau

SEQ ID NO: 1483680 - RNA, 16 nt, Human
agucuuucacauuuaa

SEQ ID NO: 1483681 - RNA, 16 nt, Human
agugacuaauggcaug

SEQ ID NO: 1483682 - RNA, 17 nt, Human
agugacuaauggcauga

SEQ ID NO: 1483683 - RNA, 20 nt, Human
agucugaaccuauuucuuaa

SEQ ID NO: 1483684 - RNA, 14 nt, Human
agucaccagagacu

SEQ ID NO: 1483685 - RNA, 20 nt, Human
aguauuuuagugaacuugaa

SEQ ID NO: 1483686 - RNA, 18 nt, Human
aguauuuuagugaacuug

SEQ ID NO: 1483687 - RNA, 17 nt, Human
aguauuuugcuggaaua

SEQ ID NO: 1483688 - RNA, 13 nt, Human
aguauuuguuaau

SEQ ID NO: 1483689 - RNA, 14 nt, Human
aguauuuguuaauu

SEQ ID NO: 1483690 - RNA, 15 nt, Human
aguauuuguuaauuu

SEQ ID NO: 1483691 - RNA, 18 nt, Human
aguauuuguuaauuuaga

SEQ ID NO: 1483692 - RNA, 19 nt, Human
uguauauuacaaugaucac

SEQ ID NO: 1483693 - RNA, 19 nt, Human
uguauauuaagguguggcu

SEQ ID NO: 1483694 - RNA, 20 nt, Human
aguauuccagaccugaagaa

SEQ ID NO: 1483695 - RNA, 15 nt, Human
aguauaccugauuuu

SEQ ID NO: 1483696 - RNA, 16 nt, Human
ugucagcagggacugu

SEQ ID NO: 1483697 - RNA, 15 nt, Human
agucuauuuacggaa

SEQ ID NO: 1483698 - RNA, 20 nt, Human
agucuauuuacggaacucaa

SEQ ID NO: 1483699 - RNA, 22 nt, Human
agucuaucaaccccagacacug

SEQ ID NO: 1483700 - RNA, 23 nt, Human
agucuaucaaccccagacacugg

SEQ ID NO: 1483701 - RNA, 18 nt, Human
agucuaucaaucaacuua

SEQ ID NO: 1483702 - RNA, 19 nt, Human
agucucagaaugucauuuu

SEQ ID NO: 1483703 - RNA, 18 nt, Human
agucguacagaaagcugc

SEQ ID NO: 1483704 - RNA, 21 nt, Human
agucuaaagcugguuuaaugu

SEQ ID NO: 1483705 - RNA, 20 nt, Human
agucuaaagcugguuuaaug

SEQ ID NO: 1483706 - RNA, 14 nt, Human
agucaggaaagaga

SEQ ID NO: 1483707 - RNA, 15 nt, Human
agucaggaaagagaa

SEQ ID NO: 1483708 - RNA, 22 nt, Human
agucagaacagcagacucagcu

SEQ ID NO: 1483709 - RNA, 12 nt, Human
agucagaacagc

SEQ ID NO: 1483710 - RNA, 14 nt, Human
agucagaacagcag

SEQ ID NO: 1483711 - RNA, 15 nt, Human
agucagaacagcaga

SEQ ID NO: 1483712 - RNA, 17 nt, Human
agucagaacagcagacu

SEQ ID NO: 1483713 - RNA, 23 nt, Human
aguaccaguaggggcuuauaaua

SEQ ID NO: 1483714 - RNA, 23 nt, Human
aguagcacaaguuauuuaaaucu

SEQ ID NO: 1483715 - RNA, 14 nt, Human
aguagcagugauug

SEQ ID NO: 1483716 - RNA, 22 nt, Human
aguagcagugauugucuuaaua

SEQ ID NO: 1483717 - RNA, 20 nt, Human
uguagugauuuuuaugccac

SEQ ID NO: 1483718 - RNA, 21 nt, Human
uguagugauuuuuaugccacc

SEQ ID NO: 1483719 - RNA, 17 nt, Human
uguaguguuggagaaga

SEQ ID NO: 1483720 - RNA, 18 nt, Human
uguaguguuggagaagaa

SEQ ID NO: 1483721 - RNA, 19 nt, Human
uguaguguuggagaagaac

SEQ ID NO: 1483722 - RNA, 15 nt, Human
uguauauuacaauga

SEQ ID NO: 1483723 - RNA, 14 nt, Human
uguauauuacaaug

SEQ ID NO: 1483724 - RNA, 16 nt, Human
uguauauuaaggugug

SEQ ID NO: 1483725 - RNA, 15 nt, Human
uguauauauauauau

SEQ ID NO: 1483726 - RNA, 14 nt, Human
aguaaaaaggcuaa

SEQ ID NO: 1483727 - RNA, 23 nt, Human
aguaaaaacaaagaaauuaugug

SEQ ID NO: 1483728 - RNA, 16 nt, Human
aguaaaaacaaagaaa

SEQ ID NO: 1483729 - RNA, 22 nt, Human
aguaauaaaauucaacaaacau

SEQ ID NO: 1483730 - RNA, 15 nt, Human
aguaauaaaauucaa

SEQ ID NO: 1483731 - RNA, 23 nt, Human
aguaauaaaauucaacaaacauu

SEQ ID NO: 1483732 - RNA, 13 nt, Human
aguaaugauaacu

SEQ ID NO: 1483733 - RNA, 13 nt, Human
aguaaucugcauu

SEQ ID NO: 1483734 - RNA, 23 nt, Human
aguaaucugcauuauuggaauau

SEQ ID NO: 1483735 - RNA, 12 nt, Human
aguaauuggaaa

SEQ ID NO: 1483736 - RNA, 13 nt, Human
aguaauuggaaag

SEQ ID NO: 1483737 - RNA, 12 nt, Human
aguaauuuagaa

SEQ ID NO: 1483738 - RNA, 14 nt, Human
aguaauuuagaaau

SEQ ID NO: 1483739 - RNA, 23 nt, Human
aguaauuuagaaaucauuuugca

SEQ ID NO: 1483740 - RNA, 17 nt, Human
aguaauuuagaaaucau

SEQ ID NO: 1483741 - RNA, 13 nt, Human
agguugaaaaaca

SEQ ID NO: 1483742 - RNA, 20 nt, Human
agguguagccacaccaggau

SEQ ID NO: 1483743 - RNA, 15 nt, Human
aggugucauacagau

SEQ ID NO: 1483744 - RNA, 21 nt, Human
aggugucauacagauuugcaa

SEQ ID NO: 1483745 - RNA, 20 nt, Human
aggugggaggaugugaauug

SEQ ID NO: 1483746 - RNA, 13 nt, Human
aggugggaggaug

SEQ ID NO: 1483747 - RNA, 11 nt, Human
aggugggagga

SEQ ID NO: 1483748 - RNA, 20 nt, Human
agguuucacuguguuggcca

SEQ ID NO: 1483749 - RNA, 19 nt, Human
agguuucugaguuccugca

SEQ ID NO: 1483750 - RNA, 21 nt, Human
agguuucugaguuccugcaug

SEQ ID NO: 1483751 - RNA, 17 nt, Human
uguaauugaauauuauu

SEQ ID NO: 1483752 - RNA, 19 nt, Human
uguaauugaauauuauucc

SEQ ID NO: 1483753 - RNA, 14 nt, Human
uguacauauaagug

SEQ ID NO: 1483754 - RNA, 18 nt, Human
uguacauaguuauuuauu

SEQ ID NO: 1483755 - RNA, 17 nt, Human
uguacauaacugaaaau

SEQ ID NO: 1483756 - RNA, 18 nt, Human
uguacauaacugaaaaug

SEQ ID NO: 1483757 - RNA, 19 nt, Human
uguacauaacugaaaaugu

SEQ ID NO: 1483758 - RNA, 13 nt, Human
uguacaaaauaaa

SEQ ID NO: 1483759 - RNA, 17 nt, Human
uguacaaaauaaacaaa

SEQ ID NO: 1483760 - RNA, 13 nt, Human
uguacauaacuga

SEQ ID NO: 1483761 - RNA, 14 nt, Human
uguacauaacugaa

SEQ ID NO: 1483762 - RNA, 15 nt, Human
uguacauaacugaaa

SEQ ID NO: 1483763 - RNA, 18 nt, Human
ugggaaacaaaaggauaa

SEQ ID NO: 1483764 - RNA, 17 nt, Human
ugggaaaaauguaggag

SEQ ID NO: 1483765 - RNA, 16 nt, Human
ugggaaaaauguagga

SEQ ID NO: 1483766 - RNA, 19 nt, Human
uggcugagauaugaacaua

SEQ ID NO: 1483767 - RNA, 14 nt, Human
uggcugcaggaauc

SEQ ID NO: 1483768 - RNA, 16 nt, Human
uggcugcaggaaucuu

SEQ ID NO: 1483769 - RNA, 17 nt, Human
uggcuguggcauccaga

SEQ ID NO: 1483770 - RNA, 20 nt, Human
uggcuguggccuaaccugcc

SEQ ID NO: 1483771 - RNA, 15 nt, Human
aggcucccagggaca

SEQ ID NO: 1483772 - RNA, 22 nt, Human
uggcugaaaggaagcugugcgu

SEQ ID NO: 1483773 - RNA, 16 nt, Human
uggcugaaaggaagcu

SEQ ID NO: 1483774 - RNA, 18 nt, Human
uggcugacaugaagcugu

SEQ ID NO: 1483775 - RNA, 21 nt, Human
aggcugggucgcccuggacug

SEQ ID NO: 1483776 - RNA, 20 nt, Human
aggcugggucgcccuggacu

SEQ ID NO: 1483777 - RNA, 18 nt, Human
aggcugggucgcccugga

SEQ ID NO: 1483778 - RNA, 15 nt, Human
aggcugggucgcccu

SEQ ID NO: 1483779 - RNA, 10 nt, Human
aggcuggguc

SEQ ID NO: 1483780 - RNA, 18 nt, Human
agggaaaacauuccaucc

SEQ ID NO: 1483781 - RNA, 16 nt, Human
agggaaaacauuccau

SEQ ID NO: 1483782 - RNA, 15 nt, Human
agggaaaacauucca

SEQ ID NO: 1483783 - RNA, 21 nt, Human
aggcuuuuuuaucaugugaaa

SEQ ID NO: 1483784 - RNA, 18 nt, Human
aggcuuuuuuaucaugug

SEQ ID NO: 1483785 - RNA, 15 nt, Human
aggcuuuuuuaucau

SEQ ID NO: 1483786 - RNA, 13 nt, Human
aggcuuucucuac

SEQ ID NO: 1483787 - RNA, 20 nt, Human
aggcuuugcccugcugcccu

SEQ ID NO: 1483788 - RNA, 18 nt, Human
aggcuuugcccugcugcc

SEQ ID NO: 1483789 - RNA, 13 nt, Human
aggcuuugcccug

SEQ ID NO: 1483790 - RNA, 14 nt, Human
aggcuuguugugcu

SEQ ID NO: 1483791 - RNA, 16 nt, Human
aggcuuguugugcuuu

SEQ ID NO: 1483792 - RNA, 15 nt, Human
aggcuuguugugcuu

SEQ ID NO: 1483793 - RNA, 23 nt, Human
aggcuuccacguacugcagccuc

SEQ ID NO: 1483794 - RNA, 14 nt, Human
aggcuuccuucauu

SEQ ID NO: 1483795 - RNA, 16 nt, Human
aggcuuccuucauuuc

SEQ ID NO: 1483796 - RNA, 18 nt, Human
aggcuuccuucauuuccu

SEQ ID NO: 1483797 - RNA, 19 nt, Human
aggcuuccuucauuuccuc

SEQ ID NO: 1483798 - RNA, 21 nt, Human
aggcuuccuucauuuccuccg

SEQ ID NO: 1483799 - RNA, 15 nt, Human
aggcuugccugcagg

SEQ ID NO: 1483800 - RNA, 16 nt, Human
aggcuugccugcaggc

SEQ ID NO: 1483801 - RNA, 17 nt, Human
aggcuugccugcaggca

SEQ ID NO: 1483802 - RNA, 14 nt, Human
ugggcauucaaaug

SEQ ID NO: 1483803 - RNA, 19 nt, Human
ugggcaaugauggcaauuu

SEQ ID NO: 1483804 - RNA, 23 nt, Human
ugggaggcucuggagcccacugu

SEQ ID NO: 1483805 - RNA, 17 nt, Human
ugggaggcucuggagcc

SEQ ID NO: 1483806 - RNA, 14 nt, Human
ugggaggcucugga

SEQ ID NO: 1483807 - RNA, 16 nt, Human
ugggagaaaugaaaaa

SEQ ID NO: 1483808 - RNA, 19 nt, Human
ugggagaaaucuggcuucu

SEQ ID NO: 1483809 - RNA, 20 nt, Human
ugggaggccuuucccuaagc

SEQ ID NO: 1483810 - RNA, 15 nt, Human
ugggaggaugugaau

SEQ ID NO: 1483811 - RNA, 21 nt, Human
agggagacuggguaggaaaga

SEQ ID NO: 1483812 - RNA, 13 nt, Human
agggaaauuucag

SEQ ID NO: 1483813 - RNA, 15 nt, Human
ugggagaaaugaaaa

SEQ ID NO: 1483814 - RNA, 16 nt, Human
agggagccauguuuca

SEQ ID NO: 1483815 - RNA, 22 nt, Human
agggcuguuauaaucuuucaca

SEQ ID NO: 1483816 - RNA, 18 nt, Human
ugggcuccgugugggaga

SEQ ID NO: 1483817 - RNA, 15 nt, Human
agggcuccuauucaa

SEQ ID NO: 1483818 - RNA, 17 nt, Human
agggcugagcucucugu

SEQ ID NO: 1483819 - RNA, 20 nt, Human
agggcugccuucuggccuug

SEQ ID NO: 1483820 - RNA, 18 nt, Human
agggccacauagaugcug

SEQ ID NO: 1483821 - RNA, 13 nt, Human
agggccaaagaac

SEQ ID NO: 1483822 - RNA, 23 nt, Human
agggccaaagaaccaaagaagaa

SEQ ID NO: 1483823 - RNA, 16 nt, Human
agggccaaagaaccaa

SEQ ID NO: 1483824 - RNA, 16 nt, Human
agggcauaaauuauug

SEQ ID NO: 1483825 - RNA, 16 nt, Human
ugggccaacucaccug

SEQ ID NO: 1483826 - RNA, 23 nt, Human
uggaagugacuuuggcugcaugc

SEQ ID NO: 1483827 - RNA, 17 nt, Human
uggaagugacuuuggcu

SEQ ID NO: 1483828 - RNA, 15 nt, Human
uggaagugacuuugg

SEQ ID NO: 1483829 - RNA, 14 nt, Human
uggaagugcuaauu

SEQ ID NO: 1483830 - RNA, 19 nt, Human
uggaaguggggcgggcuuc

SEQ ID NO: 1483831 - RNA, 19 nt, Human
aggaguuucguuuucaaaa

SEQ ID NO: 1483832 - RNA, 20 nt, Human
uggaacacuagacaagccag

SEQ ID NO: 1483833 - RNA, 22 nt, Human
uggaacacuagacaagccagaa

SEQ ID NO: 1483834 - RNA, 23 nt, Human
ugcugcccucccccuccucucca

SEQ ID NO: 1483835 - RNA, 21 nt, Human
uggaacacuagacaagccaga

SEQ ID NO: 1483836 - RNA, 17 nt, Human
uggaagcugcccugccc

SEQ ID NO: 1483837 - RNA, 18 nt, Human
uggaagcugcccugccca

SEQ ID NO: 1483838 - RNA, 17 nt, Human
uggacaaaauggaauac

SEQ ID NO: 1483839 - RNA, 15 nt, Human
uggacaaagaaccuu

SEQ ID NO: 1483840 - RNA, 14 nt, Human
uggacaaaauggaa

SEQ ID NO: 1483841 - RNA, 16 nt, Human
uggacaccugcccugc

SEQ ID NO: 1483842 - RNA, 15 nt, Human
uggacaccugcccug

SEQ ID NO: 1483843 - RNA, 14 nt, Human
uggacaccugcccu

SEQ ID NO: 1483844 - RNA, 13 nt, Human
uggacaccugccc

SEQ ID NO: 1483845 - RNA, 12 nt, Human
uggacaccugcc

SEQ ID NO: 1483846 - RNA, 11 nt, Human
uggacaccugc

SEQ ID NO: 1483847 - RNA, 10 nt, Human
uggacaccug

SEQ ID NO: 1483848 - RNA, 14 nt, Human
uggaauuugaaaca

SEQ ID NO: 1483849 - RNA, 17 nt, Human
aggaucucaccaggcag

SEQ ID NO: 1483850 - RNA, 23 nt, Human
aggaucucaccaggcagccucug

SEQ ID NO: 1483851 - RNA, 18 nt, Human
aggaucucaccaggcagc

SEQ ID NO: 1483852 - RNA, 12 nt, Human
aggauuggggaa

SEQ ID NO: 1483853 - RNA, 21 nt, Human
aggauuggggaagagagccug

SEQ ID NO: 1483854 - RNA, 17 nt, Human
aggauuuauuuaaaaua

SEQ ID NO: 1483855 - RNA, 12 nt, Human
uggagcugagca

SEQ ID NO: 1483856 - RNA, 16 nt, Human
aggcacaugucagcaa

SEQ ID NO: 1483857 - RNA, 17 nt, Human
aggcaccaaaagaagua

SEQ ID NO: 1483858 - RNA, 20 nt, Human
aggcaccaaaagaaguaaaa

SEQ ID NO: 1483859 - RNA, 18 nt, Human
aggcaccaaaagaaguaa

SEQ ID NO: 1483860 - RNA, 23 nt, Human
uggagcccacuguacuugcucuu

SEQ ID NO: 1483861 - RNA, 19 nt, Human
uggagcccacuguacuugc

SEQ ID NO: 1483862 - RNA, 16 nt, Human
uggagcccacuguacu

SEQ ID NO: 1483863 - RNA, 16 nt, Human
uggagaagaacugaaa

SEQ ID NO: 1483864 - RNA, 17 nt, Human
uggagaagacccucccc

SEQ ID NO: 1483865 - RNA, 18 nt, Human
uggacaccugcccugccc

SEQ ID NO: 1483866 - RNA, 17 nt, Human
uggacaccugcccugcc

SEQ ID NO: 1483867 - RNA, 19 nt, Human
aggcaguucaaagcaggau

SEQ ID NO: 1483868 - RNA, 18 nt, Human
aggcaguucaaagcagga

SEQ ID NO: 1483869 - RNA, 20 nt, Human
aggcagcucuaaaugucaau

SEQ ID NO: 1483870 - RNA, 15 nt, Human
aggcagccucugggg

SEQ ID NO: 1483871 - RNA, 16 nt, Human
aggcagccucuggggg

SEQ ID NO: 1483872 - RNA, 22 nt, Human
aggcagccucugggggguggcc

SEQ ID NO: 1483873 - RNA, 21 nt, Human
aggcagccucugggggguggc

SEQ ID NO: 1483874 - RNA, 13 nt, Human
aggcagccucugg

SEQ ID NO: 1483875 - RNA, 14 nt, Human
aggcagccucuggg

SEQ ID NO: 1483876 - RNA, 22 nt, Human
aggcagggaggaggcagagaag

SEQ ID NO: 1483877 - RNA, 20 nt, Human
aggcaggaguuucguuuuca

SEQ ID NO: 1483878 - RNA, 18 nt, Human
uggcaucaucucagcuca

SEQ ID NO: 1483879 - RNA, 20 nt, Human
uggcauccagagucccugcc

SEQ ID NO: 1483880 - RNA, 21 nt, Human
uggcauccagagucccugccu

SEQ ID NO: 1483881 - RNA, 22 nt, Human
uggcauccagagucccugccug

SEQ ID NO: 1483882 - RNA, 16 nt, Human
aggccugacugccaag

SEQ ID NO: 1483883 - RNA, 17 nt, Human
aggccuagacucugucu

SEQ ID NO: 1483884 - RNA, 16 nt, Human
aggccuagacucuguc

SEQ ID NO: 1483885 - RNA, 14 nt, Human
aggccuagacucug

SEQ ID NO: 1483886 - RNA, 15 nt, Human
aggccuagaggccug

SEQ ID NO: 1483887 - RNA, 21 nt, Human
aggccuagacucugucuaccu

SEQ ID NO: 1483888 - RNA, 18 nt, Human
aggccgggaaaaagccca

SEQ ID NO: 1483889 - RNA, 14 nt, Human
aggccgggaaaaag

SEQ ID NO: 1483890 - RNA, 17 nt, Human
aggccgugacgucuggg

SEQ ID NO: 1483891 - RNA, 20 nt, Human
aggccgugacgucugggugg

SEQ ID NO: 1483892 - RNA, 21 nt, Human
aggccgugacgucuggguggc

SEQ ID NO: 1483893 - RNA, 22 nt, Human
aggccgugacgucuggguggcc

SEQ ID NO: 1483894 - RNA, 13 nt, Human
uggcagcaacaau

SEQ ID NO: 1483895 - RNA, 22 nt, Human
uggcacagccuggcuguggccu

SEQ ID NO: 1483896 - RNA, 23 nt, Human
uggcacagagguagucucacugc

SEQ ID NO: 1483897 - RNA, 20 nt, Human
aggcauccuuccucacacca

SEQ ID NO: 1483898 - RNA, 18 nt, Human
aggcauccuuccucacac

SEQ ID NO: 1483899 - RNA, 14 nt, Human
aggccagagccaag

SEQ ID NO: 1483900 - RNA, 14 nt, Human
aggccauucuuucc

SEQ ID NO: 1483901 - RNA, 15 nt, Human
aggccauucuuuccc

SEQ ID NO: 1483902 - RNA, 12 nt, Human
uggcauguguuu

SEQ ID NO: 1483903 - RNA, 20 nt, Human
uggcauguuagcccuuccuc

SEQ ID NO: 1483904 - RNA, 19 nt, Human
uggcauuacagcuggagaa

SEQ ID NO: 1483905 - RNA, 21 nt, Human
uggcccuuaugacugccaaga

SEQ ID NO: 1483906 - RNA, 19 nt, Human
aggccuugcggcuccucag

SEQ ID NO: 1483907 - RNA, 20 nt, Human
aggccuugcggcuccucagg

SEQ ID NO: 1483908 - RNA, 23 nt, Human
aggccuugcggcuccucagggac

SEQ ID NO: 1483909 - RNA, 22 nt, Human
aggccuugcggcuccucaggga

SEQ ID NO: 1483910 - RNA, 18 nt, Human
aggcgaagcguuguccuc

SEQ ID NO: 1483911 - RNA, 16 nt, Human
aggccuuuuggaaugu

SEQ ID NO: 1483912 - RNA, 20 nt, Human
aggccuuucccuaagccagc

SEQ ID NO: 1483913 - RNA, 18 nt, Human
aggccuuucccuaagcca

SEQ ID NO: 1483914 - RNA, 16 nt, Human
aggccuuucccuaagc

SEQ ID NO: 1483915 - RNA, 15 nt, Human
aggccuuucccuaag

SEQ ID NO: 1483916 - RNA, 14 nt, Human
aggccuuucccuaa

SEQ ID NO: 1483917 - RNA, 16 nt, Human
aggcuauuauuuucac

SEQ ID NO: 1483918 - RNA, 18 nt, Human
aggcuauuauuuucacug

SEQ ID NO: 1483919 - RNA, 19 nt, Human
aggcuauuauuuucacugu

SEQ ID NO: 1483920 - RNA, 22 nt, Human
aggcuccaccccauccaguuca

SEQ ID NO: 1483921 - RNA, 18 nt, Human
aggcucagaggguguccu

SEQ ID NO: 1483922 - RNA, 19 nt, Human
aggcucagaggguguccug

SEQ ID NO: 1483923 - RNA, 20 nt, Human
aggcucagaggguguccugc

SEQ ID NO: 1483924 - RNA, 20 nt, Human
agcuggggccaggcuggguc

SEQ ID NO: 1483925 - RNA, 17 nt, Human
agcugugaccucucccc

SEQ ID NO: 1483926 - RNA, 17 nt, Human
ugccuugucacgccaga

SEQ ID NO: 1483927 - RNA, 15 nt, Human
ugccuuacucuucuu

SEQ ID NO: 1483928 - RNA, 18 nt, Human
ugccuuacucuucuugaa

SEQ ID NO: 1483929 - RNA, 19 nt, Human
ugccuuacucuucuugaaa

SEQ ID NO: 1483930 - RNA, 13 nt, Human
ugccuuguuucau

SEQ ID NO: 1483931 - RNA, 22 nt, Human
ugccuuuuuauuuuuguuuuua

SEQ ID NO: 1483932 - RNA, 19 nt, Human
agcugccucuucccucuuc

SEQ ID NO: 1483933 - RNA, 15 nt, Human
agcugccucuucccu

SEQ ID NO: 1483934 - RNA, 21 nt, Human
ugccucucugcaggucccuaa

SEQ ID NO: 1483935 - RNA, 22 nt, Human
ugccucugagagcaucaggccu

SEQ ID NO: 1483936 - RNA, 12 nt, Human
ugccucugagag

SEQ ID NO: 1483937 - RNA, 20 nt, Human
agcugccuggaagagcagcc

SEQ ID NO: 1483938 - RNA, 21 nt, Human
agcugccuggaagagcagccc

SEQ ID NO: 1483939 - RNA, 15 nt, Human
agcugccugguauau

SEQ ID NO: 1483940 - RNA, 15 nt, Human
agcuggaccucacca

SEQ ID NO: 1483941 - RNA, 16 nt, Human
agcuggaccucaccaa

SEQ ID NO: 1483942 - RNA, 17 nt, Human
agcuggggccaggcugg

SEQ ID NO: 1483943 - RNA, 15 nt, Human
agcuggagaagaccc

SEQ ID NO: 1483944 - RNA, 20 nt, Human
ugccucucugcaggucccua

SEQ ID NO: 1483945 - RNA, 19 nt, Human
ugccucucugcaggucccu

SEQ ID NO: 1483946 - RNA, 18 nt, Human
ugccucucugcagguccc

SEQ ID NO: 1483947 - RNA, 16 nt, Human
ugccucucugcagguc

SEQ ID NO: 1483948 - RNA, 14 nt, Human
agcugccaagagug

SEQ ID NO: 1483949 - RNA, 19 nt, Human
agcugauggagaaggaagg

SEQ ID NO: 1483950 - RNA, 17 nt, Human
agcugauggagaaggaa

SEQ ID NO: 1483951 - RNA, 16 nt, Human
agcugauggagaagga

SEQ ID NO: 1483952 - RNA, 15 nt, Human
agcugauggagaagg

SEQ ID NO: 1483953 - RNA, 14 nt, Human
agcugauggagaag

SEQ ID NO: 1483954 - RNA, 14 nt, Human
agcucuucuccauc

SEQ ID NO: 1483955 - RNA, 21 nt, Human
agcucucaguugcagcccugc

SEQ ID NO: 1483956 - RNA, 17 nt, Human
agcucucaguugcagcc

SEQ ID NO: 1483957 - RNA, 18 nt, Human
ugcccucauuuuauguca

SEQ ID NO: 1483958 - RNA, 18 nt, Human
agcucuccggucucucuc

SEQ ID NO: 1483959 - RNA, 14 nt, Human
aggaaauauuuauu

SEQ ID NO: 1483960 - RNA, 18 nt, Human
aggaaauauuuauuuuaa

SEQ ID NO: 1483961 - RNA, 24 nt, Human
aggaaagcgccuccaacccuagca

SEQ ID NO: 1483962 - RNA, 15 nt, Human
ugcucuuagcugucu

SEQ ID NO: 1483963 - RNA, 12 nt, Human
ugcucuuagcug

SEQ ID NO: 1483964 - RNA, 14 nt, Human
ugcucugauuuauc

SEQ ID NO: 1483965 - RNA, 17 nt, Human
ugcuaucauuauucgua

SEQ ID NO: 1483966 - RNA, 23 nt, Human
aggaaugaaauccugcuucagug

SEQ ID NO: 1483967 - RNA, 22 nt, Human
aggaaucuuuaaaagaugcuuu

SEQ ID NO: 1483968 - RNA, 16 nt, Human
aggaaucuuuaaaaga

SEQ ID NO: 1483969 - RNA, 17 nt, Human
aggaagagaaggagcag

SEQ ID NO: 1483970 - RNA, 16 nt, Human
aggaagagaaggagca

SEQ ID NO: 1483971 - RNA, 14 nt, Human
aggaagagaaggag

SEQ ID NO: 1483972 - RNA, 12 nt, Human
aggaagagaagg

SEQ ID NO: 1483973 - RNA, 22 nt, Human
aggaauuuuauuuuuuucugaa

SEQ ID NO: 1483974 - RNA, 14 nt, Human
aggaauuuucuuug

SEQ ID NO: 1483975 - RNA, 16 nt, Human
aggaauuuucuuugug

SEQ ID NO: 1483976 - RNA, 14 nt, Human
aggacaaccauucc

SEQ ID NO: 1483977 - RNA, 21 nt, Human
agcuuauugucuagugaaacu

SEQ ID NO: 1483978 - RNA, 23 nt, Human
agcuuaucuacuuccaaacuaau

SEQ ID NO: 1483979 - RNA, 12 nt, Human
agcuugggaaug

SEQ ID NO: 1483980 - RNA, 14 nt, Human
agcuugggaaugga

SEQ ID NO: 1483981 - RNA, 20 nt, Human
agcuugggaaaggugguguu

SEQ ID NO: 1483982 - RNA, 14 nt, Human
agcuguuuucuucu

SEQ ID NO: 1483983 - RNA, 12 nt, Human
agcuuaaaacuu

SEQ ID NO: 1483984 - RNA, 13 nt, Human
agcuuaaaacuuu

SEQ ID NO: 1483985 - RNA, 14 nt, Human
agcuuaaaacuuug

SEQ ID NO: 1483986 - RNA, 22 nt, Human
agcuuaaaacuuugaaguuagc

SEQ ID NO: 1483987 - RNA, 16 nt, Human
agcuuaaaacuuugaa

SEQ ID NO: 1483988 - RNA, 13 nt, Human
aggaaagaaaaca

SEQ ID NO: 1483989 - RNA, 12 nt, Human
aggaaagaaaac

SEQ ID NO: 1483990 - RNA, 13 nt, Human
aggaaagagaacu

SEQ ID NO: 1483991 - RNA, 19 nt, Human
aggaaagagaacuuccaga

SEQ ID NO: 1483992 - RNA, 16 nt, Human
ugcuaguaauuggaaa

SEQ ID NO: 1483993 - RNA, 13 nt, Human
ugcuauacugcau

SEQ ID NO: 1483994 - RNA, 17 nt, Human
aggaaagaggaagcaaa

SEQ ID NO: 1483995 - RNA, 14 nt, Human
ugcuaguaauugga

SEQ ID NO: 1483996 - RNA, 15 nt, Human
ugcauaauggucaga

SEQ ID NO: 1483997 - RNA, 22 nt, Human
ugcauaacguauaaaagccugu

SEQ ID NO: 1483998 - RNA, 20 nt, Human
ugcaggucccuaauaaagcu

SEQ ID NO: 1483999 - RNA, 19 nt, Human
ugcaggucccuaauaaagc

SEQ ID NO: 1484000 - RNA, 18 nt, Human
ugcaggucccuaauaaag

SEQ ID NO: 1484001 - RNA, 21 nt, Human
ugcaggucccuaauaaagcug

SEQ ID NO: 1484002 - RNA, 22 nt, Human
ugcagcccugcugcugccugcc

SEQ ID NO: 1484003 - RNA, 19 nt, Human
ugcagcugagagaaaauaa

SEQ ID NO: 1484004 - RNA, 19 nt, Human
agccugacccucaucuuuc

SEQ ID NO: 1484005 - RNA, 14 nt, Human
agccugcaggaucu

SEQ ID NO: 1484006 - RNA, 22 nt, Human
agccugcaggaucucaccaggc

SEQ ID NO: 1484007 - RNA, 23 nt, Human
agccugcaggaucucaccaggca

SEQ ID NO: 1484008 - RNA, 23 nt, Human
agccugcauugagcuugcaugcu

SEQ ID NO: 1484009 - RNA, 22 nt, Human
agccugcauugagcuugcaugc

SEQ ID NO: 1484010 - RNA, 15 nt, Human
agccugcauugagcu

SEQ ID NO: 1484011 - RNA, 18 nt, Human
agcccuucuuuccacaga

SEQ ID NO: 1484012 - RNA, 19 nt, Human
agcccuucuuuccacagaa

SEQ ID NO: 1484013 - RNA, 12 nt, Human
agccuaagggau

SEQ ID NO: 1484014 - RNA, 16 nt, Human
agccuaagggauccug

SEQ ID NO: 1484015 - RNA, 21 nt, Human
agccuaagggauccugccugc

SEQ ID NO: 1484016 - RNA, 13 nt, Human
agccuacaggccu

SEQ ID NO: 1484017 - RNA, 14 nt, Human
agccuacaggccuc

SEQ ID NO: 1484018 - RNA, 20 nt, Human
ugcagaaagcaucccucacc

SEQ ID NO: 1484019 - RNA, 13 nt, Human
ugcagaaagcauc

SEQ ID NO: 1484020 - RNA, 15 nt, Human
ugcacaauaaaaaug

SEQ ID NO: 1484021 - RNA, 20 nt, Human
ugcacaauaaaaauguuuaa

SEQ ID NO: 1484022 - RNA, 21 nt, Human
ugcacaauaaaaauguuuaac

SEQ ID NO: 1484023 - RNA, 23 nt, Human
ugccacaccccccaccccuagga

SEQ ID NO: 1484024 - RNA, 21 nt, Human
ugccacaccccccaccccuag

SEQ ID NO: 1484025 - RNA, 16 nt, Human
ugcauucuggauuuua

SEQ ID NO: 1484026 - RNA, 19 nt, Human
agcgcuagaggaagcagcc

SEQ ID NO: 1484027 - RNA, 20 nt, Human
agcgcuagaggaagcagcca

SEQ ID NO: 1484028 - RNA, 13 nt, Human
agcgcuaucuccc

SEQ ID NO: 1484029 - RNA, 18 nt, Human
agcgcuaucucccugccu

SEQ ID NO: 1484030 - RNA, 17 nt, Human
agcgcuaucucccugcc

SEQ ID NO: 1484031 - RNA, 15 nt, Human
agcggcaucaggcuu

SEQ ID NO: 1484032 - RNA, 13 nt, Human
agcggcaucaggc

SEQ ID NO: 1484033 - RNA, 13 nt, Human
ugccacuggagug

SEQ ID NO: 1484034 - RNA, 17 nt, Human
agcuauauaagacaaga

SEQ ID NO: 1484035 - RNA, 11 nt, Human
agcuauauaag

SEQ ID NO: 1484036 - RNA, 19 nt, Human
agcuauggugucauaggcu

SEQ ID NO: 1484037 - RNA, 13 nt, Human
agcuauuucaucu

SEQ ID NO: 1484038 - RNA, 14 nt, Human
agcuauuucaucua

SEQ ID NO: 1484039 - RNA, 17 nt, Human
agcuauuucaucuauuu

SEQ ID NO: 1484040 - RNA, 21 nt, Human
agcuauuucaucuauuuuugg

SEQ ID NO: 1484041 - RNA, 23 nt, Human
agcuacugccgucagugcugugc

SEQ ID NO: 1484042 - RNA, 18 nt, Human
agcuauaaaaugaauaca

SEQ ID NO: 1484043 - RNA, 14 nt, Human
ugccauuaacaaau

SEQ ID NO: 1484044 - RNA, 16 nt, Human
ugccauucacuucaua

SEQ ID NO: 1484045 - RNA, 18 nt, Human
ugcccccagagccacagu

SEQ ID NO: 1484046 - RNA, 16 nt, Human
ugcccccagagccaca

SEQ ID NO: 1484047 - RNA, 14 nt, Human
ugcccccagagcca

SEQ ID NO: 1484048 - RNA, 17 nt, Human
ugcccccagagccacag

SEQ ID NO: 1484049 - RNA, 17 nt, Human
ugccccuacccuggacu

SEQ ID NO: 1484050 - RNA, 14 nt, Human
agaagcuccaggua

SEQ ID NO: 1484051 - RNA, 17 nt, Human
ucuggccaggaagcuuu

SEQ ID NO: 1484052 - RNA, 16 nt, Human
ucuggccaggaagcuu

SEQ ID NO: 1484053 - RNA, 18 nt, Human
ucuggauuauauuaugaa

SEQ ID NO: 1484054 - RNA, 12 nt, Human
ucuggauuauau

SEQ ID NO: 1484055 - RNA, 21 nt, Human
agaagaacugaaaucauacuu

SEQ ID NO: 1484056 - RNA, 18 nt, Human
agaagaaagaacggaaga

SEQ ID NO: 1484057 - RNA, 13 nt, Human
agaagaaacaagg

SEQ ID NO: 1484058 - RNA, 16 nt, Human
agaagaaagaacggaa

SEQ ID NO: 1484059 - RNA, 21 nt, Human
agaagaaacaagguuuucagu

SEQ ID NO: 1484060 - RNA, 20 nt, Human
ucugccuucucaugauccaa

SEQ ID NO: 1484061 - RNA, 22 nt, Human
ucugccuuuggggacuuuucuu

SEQ ID NO: 1484062 - RNA, 16 nt, Human
ucugcuacuuugcugc

SEQ ID NO: 1484063 - RNA, 22 nt, Human
ucugcucaguaauuugaggaca

SEQ ID NO: 1484064 - RNA, 18 nt, Human
ucugcuugauuuuugccu

SEQ ID NO: 1484065 - RNA, 21 nt, Human
ucugaggggcuaccaggaaag

SEQ ID NO: 1484066 - RNA, 20 nt, Human
ucugaggggcuaccaggaaa

SEQ ID NO: 1484067 - RNA, 19 nt, Human
ucugaggggcuaccaggaa

SEQ ID NO: 1484068 - RNA, 22 nt, Human
ucugagaaaagcuuugaacccu

SEQ ID NO: 1484069 - RNA, 16 nt, Human
ucugauacagaaaagu

SEQ ID NO: 1484070 - RNA, 17 nt, Human
ucugauacagaaaaguu

SEQ ID NO: 1484071 - RNA, 22 nt, Human
ucugauaggguuugugacaggg

SEQ ID NO: 1484072 - RNA, 21 nt, Human
ucugauaggguuugugacagg

SEQ ID NO: 1484073 - RNA, 15 nt, Human
ucugaucaaggccuu

SEQ ID NO: 1484074 - RNA, 14 nt, Human
ucugaccuccauga

SEQ ID NO: 1484075 - RNA, 21 nt, Human
ucugacuguuuccaucaaggg

SEQ ID NO: 1484076 - RNA, 13 nt, Human
agaagaaaaagaa

SEQ ID NO: 1484077 - RNA, 15 nt, Human
agaagaaaaagaagc

SEQ ID NO: 1484078 - RNA, 16 nt, Human
agaacucucuggaagc

SEQ ID NO: 1484079 - RNA, 21 nt, Human
agaacucucuggaagccccug

SEQ ID NO: 1484080 - RNA, 13 nt, Human
agaacucucugga

SEQ ID NO: 1484081 - RNA, 13 nt, Human
agaaauuuaaacu

SEQ ID NO: 1484082 - RNA, 16 nt, Human
agaaauuuaaacuaua

SEQ ID NO: 1484083 - RNA, 20 nt, Human
agaaauuuaaacuauaagca

SEQ ID NO: 1484084 - RNA, 24 nt, Human
agaaauuuaaacuauaagcaagaa

SEQ ID NO: 1484085 - RNA, 14 nt, Human
agaaccuaauucaa

SEQ ID NO: 1484086 - RNA, 15 nt, Human
agaaccuaauucaau

SEQ ID NO: 1484087 - RNA, 19 nt, Human
agaaccuaauucaauucaa

SEQ ID NO: 1484088 - RNA, 22 nt, Human
acuuuuuuuuuuuaagaguaaa

SEQ ID NO: 1484089 - RNA, 17 nt, Human
acuuuuugcagcuuucu

SEQ ID NO: 1484090 - RNA, 13 nt, Human
acuuuuugcauuu

SEQ ID NO: 1484091 - RNA, 15 nt, Human
acuuuuugcagcuuu

SEQ ID NO: 1484092 - RNA, 13 nt, Human
acuuuuugcagcu

SEQ ID NO: 1484093 - RNA, 12 nt, Human
acuuuuugcagc

SEQ ID NO: 1484094 - RNA, 15 nt, Human
acuuuuuuauuuaaa

SEQ ID NO: 1484095 - RNA, 23 nt, Human
acuuuuuuauuuaaaaaacuaaa

SEQ ID NO: 1484096 - RNA, 14 nt, Human
acuuuuggcauuuu

SEQ ID NO: 1484097 - RNA, 17 nt, Human
acuuuuguaagacaaag

SEQ ID NO: 1484098 - RNA, 12 nt, Human
acuuuuguaaga

SEQ ID NO: 1484099 - RNA, 15 nt, Human
acuuuuuauugauuu

SEQ ID NO: 1484100 - RNA, 17 nt, Human
acuuuggcugcaugcga

SEQ ID NO: 1484101 - RNA, 14 nt, Human
acuuuggcugcaug

SEQ ID NO: 1484102 - RNA, 21 nt, Human
acuuugacuuuuugcauuuaa

SEQ ID NO: 1484103 - RNA, 15 nt, Human
acuuugacuuuuugc

SEQ ID NO: 1484104 - RNA, 20 nt, Human
acuuugacuuuuugcauuua

SEQ ID NO: 1484105 - RNA, 14 nt, Human
acuugugucucugu

SEQ ID NO: 1484106 - RNA, 16 nt, Human
acuugugucucugugc

SEQ ID NO: 1484107 - RNA, 21 nt, Human
acuugugucucugugcuuuua

SEQ ID NO: 1484108 - RNA, 22 nt, Human
acuugugucucugugcuuuuaa

SEQ ID NO: 1484109 - RNA, 11 nt, Human
acuugugucug

SEQ ID NO: 1484110 - RNA, 19 nt, Human
ucuccauugugccuaaguc

SEQ ID NO: 1484111 - RNA, 18 nt, Human
ucucccaaaaaacuacuu

SEQ ID NO: 1484112 - RNA, 13 nt, Human
agaaacccugcac

SEQ ID NO: 1484113 - RNA, 19 nt, Human
agaaaacuuguauuaugug

SEQ ID NO: 1484114 - RNA, 16 nt, Human
agaaaaccuuucuuca

SEQ ID NO: 1484115 - RNA, 20 nt, Human
agaaagaacggaagaagaga

SEQ ID NO: 1484116 - RNA, 18 nt, Human
agaaacugaggaauuuuc

SEQ ID NO: 1484117 - RNA, 23 nt, Human
agaaaccuacugcccaggcacug

SEQ ID NO: 1484118 - RNA, 15 nt, Human
agaaaccuacugccc

SEQ ID NO: 1484119 - RNA, 16 nt, Human
agaaaccuacugccca

SEQ ID NO: 1484120 - RNA, 13 nt, Human
agaaacugaggaa

SEQ ID NO: 1484121 - RNA, 16 nt, Human
agaaacugaggaauuu

SEQ ID NO: 1484122 - RNA, 19 nt, Human
agaaaacaaggaugaauua

SEQ ID NO: 1484123 - RNA, 23 nt, Human
agaaaacauaaucuucugccuuc

SEQ ID NO: 1484124 - RNA, 17 nt, Human
agaaaaauauauacuaa

SEQ ID NO: 1484125 - RNA, 16 nt, Human
agaaaaauauguacca

SEQ ID NO: 1484126 - RNA, 19 nt, Human
ucucuuuaugucuguggau

SEQ ID NO: 1484127 - RNA, 21 nt, Human
ucucuucugagcuauuucauc

SEQ ID NO: 1484128 - RNA, 22 nt, Human
ucucuucugagcuauuucaucu

SEQ ID NO: 1484129 - RNA, 15 nt, Human
ucucuccuuguucug

SEQ ID NO: 1484130 - RNA, 19 nt, Human
ucucuccuuguucugauaa

SEQ ID NO: 1484131 - RNA, 20 nt, Human
ucuguuuuauaauuuuguga

SEQ ID NO: 1484132 - RNA, 18 nt, Human
ucuguuuuauaauuuugu

SEQ ID NO: 1484133 - RNA, 19 nt, Human
agaauugugucagacuguu

SEQ ID NO: 1484134 - RNA, 23 nt, Human
agaauugugucagacuguuuagu

SEQ ID NO: 1484135 - RNA, 20 nt, Human
agaauugugucagacuguuu

SEQ ID NO: 1484136 - RNA, 13 nt, Human
agaauuucuagga

SEQ ID NO: 1484137 - RNA, 21 nt, Human
agaauuucuaggacugaauua

SEQ ID NO: 1484138 - RNA, 21 nt, Human
agaauuucuaccauuucagag

SEQ ID NO: 1484139 - RNA, 16 nt, Human
agaauuucuaccauuu

SEQ ID NO: 1484140 - RNA, 20 nt, Human
agaauuucuaccauuucaga

SEQ ID NO: 1484141 - RNA, 17 nt, Human
ucuguucauuccuccag

SEQ ID NO: 1484142 - RNA, 16 nt, Human
ucuguucauuccucca

SEQ ID NO: 1484143 - RNA, 18 nt, Human
ucuguucauuuccucaaa

SEQ ID NO: 1484144 - RNA, 20 nt, Human
ucuguucuacauagaugcuu

SEQ ID NO: 1484145 - RNA, 15 nt, Human
ucugugccugaauau

SEQ ID NO: 1484146 - RNA, 17 nt, Human
ucugugccugaauauuu

SEQ ID NO: 1484147 - RNA, 14 nt, Human
ucuggucucgaacu

SEQ ID NO: 1484148 - RNA, 21 nt, Human
agaaggaaggcagggaggagg

SEQ ID NO: 1484149 - RNA, 20 nt, Human
agaaggaaggcagggaggag

SEQ ID NO: 1484150 - RNA, 19 nt, Human
agaaggaaggcagggagga

SEQ ID NO: 1484151 - RNA, 17 nt, Human
agaaggaaggcagggag

SEQ ID NO: 1484152 - RNA, 11 nt, Human
agaaggaaggc

SEQ ID NO: 1484153 - RNA, 21 nt, Human
agaaggaaaauuuuagcgugc

SEQ ID NO: 1484154 - RNA, 13 nt, Human
ucuggguggcccu

SEQ ID NO: 1484155 - RNA, 20 nt, Human
agacagaaucucagucuguc

SEQ ID NO: 1484156 - RNA, 22 nt, Human
agacagcuucucauccugcagg

SEQ ID NO: 1484157 - RNA, 23 nt, Human
agacagcuucucauccugcaggc

SEQ ID NO: 1484158 - RNA, 17 nt, Human
agaauuugauaugugaa

SEQ ID NO: 1484159 - RNA, 18 nt, Human
agaauuugauaugugaac

SEQ ID NO: 1484160 - RNA, 19 nt, Human
agaauuugauaugugaaca

SEQ ID NO: 1484161 - RNA, 20 nt, Human
agaauuugauaugugaacag

SEQ ID NO: 1484162 - RNA, 17 nt, Human
agacaccguucauucag

SEQ ID NO: 1484163 - RNA, 19 nt, Human
ucuuaauauguucuuuuaa

SEQ ID NO: 1484164 - RNA, 18 nt, Human
agacaguauauaacuaac

SEQ ID NO: 1484165 - RNA, 19 nt, Human
agacagggucaaaguguuu

SEQ ID NO: 1484166 - RNA, 22 nt, Human
ucuuagaugcaguucugaagaa

SEQ ID NO: 1484167 - RNA, 21 nt, Human
ucuucccuggaaaccuuccac

SEQ ID NO: 1484168 - RNA, 18 nt, Human
ucuuccagucuuccugac

SEQ ID NO: 1484169 - RNA, 21 nt, Human
ucuuccagucuuccugacacu

SEQ ID NO: 1484170 - RNA, 14 nt, Human
ucuucaaaugccug

SEQ ID NO: 1484171 - RNA, 16 nt, Human
ucuucaccaaaucuug

SEQ ID NO: 1484172 - RNA, 20 nt, Human
ucuugaugccuggcggggug

SEQ ID NO: 1484173 - RNA, 14 nt, Human
ucuugaugccuggc

SEQ ID NO: 1484174 - RNA, 19 nt, Human
ucuuccuaguuuucuccuc

SEQ ID NO: 1484175 - RNA, 21 nt, Human
ucuuccuaguuuucuccuccc

SEQ ID NO: 1484176 - RNA, 23 nt, Human
ucuuccuaguuuucuccucccag

SEQ ID NO: 1484177 - RNA, 18 nt, Human
agacaugucuguucuaca

SEQ ID NO: 1484178 - RNA, 20 nt, Human
agacaugucuguucuacaua

SEQ ID NO: 1484179 - RNA, 21 nt, Human
agacccuuauugcuguccugg

SEQ ID NO: 1484180 - RNA, 22 nt, Human
agacccuuucuucagcucugaa

SEQ ID NO: 1484181 - RNA, 22 nt, Human
agacccuuauugcuguccugga

SEQ ID NO: 1484182 - RNA, 19 nt, Human
agaccuaaucucuguaaag

SEQ ID NO: 1484183 - RNA, 21 nt, Human
agaccuaaucucuguaaagcu

SEQ ID NO: 1484184 - RNA, 20 nt, Human
ucuuuaaaauuacaacuaag

SEQ ID NO: 1484185 - RNA, 15 nt, Human
ucuuuaaaauuacaa

SEQ ID NO: 1484186 - RNA, 20 nt, Human
ucuuuaaaauguaaagccau

SEQ ID NO: 1484187 - RNA, 23 nt, Human
ucuuuaaagugacuaauggcaug

SEQ ID NO: 1484188 - RNA, 12 nt, Human
ucuuuacuuuua

SEQ ID NO: 1484189 - RNA, 12 nt, Human
agacucuaagaa

SEQ ID NO: 1484190 - RNA, 18 nt, Human
agagacacacugaagaag

SEQ ID NO: 1484191 - RNA, 20 nt, Human
agagacacacugaagaagca

SEQ ID NO: 1484192 - RNA, 17 nt, Human
agagacacacugaagaa

SEQ ID NO: 1484193 - RNA, 21 nt, Human
agagaaugcccuucuccuuau

SEQ ID NO: 1484194 - RNA, 15 nt, Human
agagaaugagagaca

SEQ ID NO: 1484195 - RNA, 19 nt, Human
agacuucaagcauggcuau

SEQ ID NO: 1484196 - RNA, 22 nt, Human
agacuucaagcauggcuauuuu

SEQ ID NO: 1484197 - RNA, 12 nt, Human
agacuugacagu

SEQ ID NO: 1484198 - RNA, 13 nt, Human
agacuugacagug

SEQ ID NO: 1484199 - RNA, 14 nt, Human
agacuugacagugg

SEQ ID NO: 1484200 - RNA, 15 nt, Human
agacuugacagugga

SEQ ID NO: 1484201 - RNA, 16 nt, Human
agacucuaagaaagaa

SEQ ID NO: 1484202 - RNA, 17 nt, Human
agacucuaagaaagaac

SEQ ID NO: 1484203 - RNA, 21 nt, Human
agaggcgcaugaauuugugaa

SEQ ID NO: 1484204 - RNA, 18 nt, Human
agaggcaccugucccaga

SEQ ID NO: 1484205 - RNA, 19 nt, Human
agaggccuuuuggaaugug

SEQ ID NO: 1484206 - RNA, 17 nt, Human
agaggugagaaauuuaa

SEQ ID NO: 1484207 - RNA, 16 nt, Human
agaggugagaaauuua

SEQ ID NO: 1484208 - RNA, 12 nt, Human
agagggaaugug

SEQ ID NO: 1484209 - RNA, 13 nt, Human
agagggaauguga

SEQ ID NO: 1484210 - RNA, 14 nt, Human
agagggaaugugaa

SEQ ID NO: 1484211 - RNA, 15 nt, Human
agagggaaugugaaa

SEQ ID NO: 1484212 - RNA, 16 nt, Human
agagggaaugugaaau

SEQ ID NO: 1484213 - RNA, 18 nt, Human
agagggaaugugaaauuu

SEQ ID NO: 1484214 - RNA, 15 nt, Human
ugaagcuguugugug

SEQ ID NO: 1484215 - RNA, 16 nt, Human
ugaagcuguuguguga

SEQ ID NO: 1484216 - RNA, 19 nt, Human
ugaagcuguugugugaggu

SEQ ID NO: 1484217 - RNA, 22 nt, Human
ugaagaagcaccaaucaugaau

SEQ ID NO: 1484218 - RNA, 14 nt, Human
ugaagaagauggua

SEQ ID NO: 1484219 - RNA, 20 nt, Human
ugaagaagcaccaaucauga

SEQ ID NO: 1484220 - RNA, 15 nt, Human
ucuuuguaaugaaaa

SEQ ID NO: 1484221 - RNA, 13 nt, Human
ucuuuguaaugaa

SEQ ID NO: 1484222 - RNA, 12 nt, Human
ucuuuguaauga

SEQ ID NO: 1484223 - RNA, 18 nt, Human
ugaagguggaaauaaacu

SEQ ID NO: 1484224 - RNA, 16 nt, Human
ugaagcuuuuauguga

SEQ ID NO: 1484225 - RNA, 21 nt, Human
ugaaggugaaacauuuucucc

SEQ ID NO: 1484226 - RNA, 18 nt, Human
agagucuauuuacggaac

SEQ ID NO: 1484227 - RNA, 14 nt, Human
agagugaagggaag

SEQ ID NO: 1484228 - RNA, 22 nt, Human
agagugaagggaagagacagcc

SEQ ID NO: 1484229 - RNA, 20 nt, Human
ugaauggcuauguuuuuaau

SEQ ID NO: 1484230 - RNA, 21 nt, Human
ugaauggcuauguuuuuaaug

SEQ ID NO: 1484231 - RNA, 18 nt, Human
agauaagguaaaaugcca

SEQ ID NO: 1484232 - RNA, 19 nt, Human
agauaaugugauauuauac

SEQ ID NO: 1484233 - RNA, 13 nt, Human
agauaaucccugu

SEQ ID NO: 1484234 - RNA, 16 nt, Human
agauaaucuagaacac

SEQ ID NO: 1484235 - RNA, 23 nt, Human
agauaaucuagaacacaggcaaa

SEQ ID NO: 1484236 - RNA, 22 nt, Human
agagugagagacauuaacucau

SEQ ID NO: 1484237 - RNA, 13 nt, Human
agagugagagaca

SEQ ID NO: 1484238 - RNA, 17 nt, Human
agauauuuuuaucuuua

SEQ ID NO: 1484239 - RNA, 19 nt, Human
agauauuuuuaucuuuaua

SEQ ID NO: 1484240 - RNA, 20 nt, Human
agauauuuuuaucuuuauau

SEQ ID NO: 1484241 - RNA, 21 nt, Human
agauauuuuuaucuuuauaug

SEQ ID NO: 1484242 - RNA, 13 nt, Human
agauauuuuucau

SEQ ID NO: 1484243 - RNA, 12 nt, Human
agauauuuuuca

SEQ ID NO: 1484244 - RNA, 19 nt, Human
agauauuuuuccauuuuuu

SEQ ID NO: 1484245 - RNA, 19 nt, Human
agauauuuuucaugauuuu

SEQ ID NO: 1484246 - RNA, 16 nt, Human
agauauuuuucaugau

SEQ ID NO: 1484247 - RNA, 11 nt, Human
agaucacuuuc

SEQ ID NO: 1484248 - RNA, 21 nt, Human
agaucauugugaaauuauuca

SEQ ID NO: 1484249 - RNA, 16 nt, Human
ugacauuuuacauuaa

SEQ ID NO: 1484250 - RNA, 15 nt, Human
ugacauuuuacauua

SEQ ID NO: 1484251 - RNA, 15 nt, Human
ugaccaaaaguuaca

SEQ ID NO: 1484252 - RNA, 16 nt, Human
ugaccaaaaguuacau

SEQ ID NO: 1484253 - RNA, 22 nt, Human
ugaccaaaaguuacauguuugc

SEQ ID NO: 1484254 - RNA, 23 nt, Human
ugaccaaaaguuacauguuugca

SEQ ID NO: 1484255 - RNA, 14 nt, Human
ugacauuuuacauu

SEQ ID NO: 1484256 - RNA, 12 nt, Human
ugacauuuuaca

SEQ ID NO: 1484257 - RNA, 18 nt, Human
ugacaguccgucaaaaca

SEQ ID NO: 1484258 - RNA, 22 nt, Human
ugacaguccgucaaaacagauu

SEQ ID NO: 1484259 - RNA, 18 nt, Human
agaucacuuucucaguuu

SEQ ID NO: 1484260 - RNA, 19 nt, Human
agaucacuuucucaguuuu

SEQ ID NO: 1484261 - RNA, 23 nt, Human
agaucacuuucucaguuuucaua

SEQ ID NO: 1484262 - RNA, 18 nt, Human
agauguguucacaaugga

SEQ ID NO: 1484263 - RNA, 15 nt, Human
agauguguucacaau

SEQ ID NO: 1484264 - RNA, 11 nt, Human
agaugcuuuua

SEQ ID NO: 1484265 - RNA, 20 nt, Human
agaugcuuuuaacagagucu

SEQ ID NO: 1484266 - RNA, 18 nt, Human
agaugcuuuuaacagagu

SEQ ID NO: 1484267 - RNA, 23 nt, Human
agauuauauauauuuuuuucuga

SEQ ID NO: 1484268 - RNA, 21 nt, Human
agauucaaugccccugaauuu

SEQ ID NO: 1484269 - RNA, 22 nt, Human
agauucaaugccccugaauuua

SEQ ID NO: 1484270 - RNA, 15 nt, Human
ugacuguuuccauca

SEQ ID NO: 1484271 - RNA, 13 nt, Human
ugacugucacugu

SEQ ID NO: 1484272 - RNA, 16 nt, Human
ugacugucacuguucc

SEQ ID NO: 1484273 - RNA, 17 nt, Human
ugacugucacuguuccu

SEQ ID NO: 1484274 - RNA, 15 nt, Human
agcaacaauuuauga

SEQ ID NO: 1484275 - RNA, 14 nt, Human
agauuuuccugaaa

SEQ ID NO: 1484276 - RNA, 19 nt, Human
agauuuucagcaaacucuu

SEQ ID NO: 1484277 - RNA, 21 nt, Human
agcaacaauuuaugaauugaa

SEQ ID NO: 1484278 - RNA, 14 nt, Human
agauuuaugcauau

SEQ ID NO: 1484279 - RNA, 16 nt, Human
agauuuaccacuugug

SEQ ID NO: 1484280 - RNA, 15 nt, Human
ugagguaaguuuuuu

SEQ ID NO: 1484281 - RNA, 23 nt, Human
agcagagcugauggagaaggaag

SEQ ID NO: 1484282 - RNA, 22 nt, Human
agcagagcugauggagaaggaa

SEQ ID NO: 1484283 - RNA, 21 nt, Human
agcagagcugauggagaagga

SEQ ID NO: 1484284 - RNA, 19 nt, Human
agcagagcugauggagaag

SEQ ID NO: 1484285 - RNA, 17 nt, Human
agcagagcugauggaga

SEQ ID NO: 1484286 - RNA, 19 nt, Human
ugaggggcuaccaggaaag

SEQ ID NO: 1484287 - RNA, 17 nt, Human
ugaggggcuaccaggaa

SEQ ID NO: 1484288 - RNA, 16 nt, Human
ugaggggcuaccagga

SEQ ID NO: 1484289 - RNA, 13 nt, Human
ugaggggaccagg

SEQ ID NO: 1484290 - RNA, 14 nt, Human
ugaggggaccagga

SEQ ID NO: 1484291 - RNA, 15 nt, Human
ugaggggaccaggag

SEQ ID NO: 1484292 - RNA, 16 nt, Human
ugaggggaccaggagu

SEQ ID NO: 1484293 - RNA, 18 nt, Human
ugaggggaccaggagugg

SEQ ID NO: 1484294 - RNA, 22 nt, Human
ugaggggaccaggagugggugg

SEQ ID NO: 1484295 - RNA, 16 nt, Human
ugaggccuagacucug

SEQ ID NO: 1484296 - RNA, 14 nt, Human
ugagcuaggaauug

SEQ ID NO: 1484297 - RNA, 16 nt, Human
ugagcuacaaaugcau

SEQ ID NO: 1484298 - RNA, 24 nt, Human
ugagcuacugccgucagugcugug

SEQ ID NO: 1484299 - RNA, 21 nt, Human
ugagcuacugccgucagugcu

SEQ ID NO: 1484300 - RNA, 21 nt, Human
ugagcuaaauaaagauauugu

SEQ ID NO: 1484301 - RNA, 14 nt, Human
ugagcuacaaaugc

SEQ ID NO: 1484302 - RNA, 13 nt, Human
ugagcuacaaaug

SEQ ID NO: 1484303 - RNA, 19 nt, Human
ugaggaaagcauguauuca

SEQ ID NO: 1484304 - RNA, 13 nt, Human
ugaggccagacca

SEQ ID NO: 1484305 - RNA, 16 nt, Human
ugaggacacaugucca

SEQ ID NO: 1484306 - RNA, 15 nt, Human
ugaggacacugauau

SEQ ID NO: 1484307 - RNA, 15 nt, Human
ugaggacacaugucc

SEQ ID NO: 1484308 - RNA, 14 nt, Human
ugaggacacauguc

SEQ ID NO: 1484309 - RNA, 13 nt, Human
ugaggacacaugu

SEQ ID NO: 1484310 - RNA, 12 nt, Human
ugaggacacaug

SEQ ID NO: 1484311 - RNA, 15 nt, Human
ugaggaauuucaccu

SEQ ID NO: 1484312 - RNA, 21 nt, Human
ugaggaauuucaccuguaaac

SEQ ID NO: 1484313 - RNA, 22 nt, Human
ugaggaauuucaccuguaaacc

SEQ ID NO: 1484314 - RNA, 13 nt, Human
ugaggaauuuucu

SEQ ID NO: 1484315 - RNA, 14 nt, Human
ugaggaauuuucuu

SEQ ID NO: 1484316 - RNA, 18 nt, Human
ugaggaauuuucuuugug

SEQ ID NO: 1484317 - RNA, 19 nt, Human
ugaggacaaccauuccaga

SEQ ID NO: 1484318 - RNA, 20 nt, Human
ugaggacaaccauuccagac

SEQ ID NO: 1484319 - RNA, 15 nt, Human
agcacagugaucaag

SEQ ID NO: 1484320 - RNA, 22 nt, Human
agcacagccucuuagaugcagu

SEQ ID NO: 1484321 - RNA, 16 nt, Human
agcaccaaucaugaau

SEQ ID NO: 1484322 - RNA, 15 nt, Human
agcaaccucaguaau

SEQ ID NO: 1484323 - RNA, 11 nt, Human
agcagacauuu

SEQ ID NO: 1484324 - RNA, 16 nt, Human
agcagacucagcucug

SEQ ID NO: 1484325 - RNA, 19 nt, Human
agcagacucagcucugaca

SEQ ID NO: 1484326 - RNA, 20 nt, Human
agcagacucagcucugacau

SEQ ID NO: 1484327 - RNA, 21 nt, Human
agcacuuuagaauaugccuug

SEQ ID NO: 1484328 - RNA, 14 nt, Human
agcacuuuagaaua

SEQ ID NO: 1484329 - RNA, 20 nt, Human
agcacuuuagaauaugccuu

SEQ ID NO: 1484330 - RNA, 14 nt, Human
agcaccagaaugua

SEQ ID NO: 1484331 - RNA, 16 nt, Human
acuguaaggcaaucau

SEQ ID NO: 1484332 - RNA, 14 nt, Human
acuggggcaggggc

SEQ ID NO: 1484333 - RNA, 16 nt, Human
ucgcuccucaaccccu

SEQ ID NO: 1484334 - RNA, 18 nt, Human
ucgcuccucaaccccucc

SEQ ID NO: 1484335 - RNA, 19 nt, Human
ucgcuccucaaccccuccc

SEQ ID NO: 1484336 - RNA, 22 nt, Human
ucgcuccucaaccccuccccuc

SEQ ID NO: 1484337 - RNA, 13 nt, Human
acugggcaaugau

SEQ ID NO: 1484338 - RNA, 18 nt, Human
acugggcaaugauggcaa

SEQ ID NO: 1484339 - RNA, 22 nt, Human
acuguaaucuuauuuaggaagu

SEQ ID NO: 1484340 - RNA, 19 nt, Human
acuguaaucuuauuuagga

SEQ ID NO: 1484341 - RNA, 20 nt, Human
acuguacagacagaaaaaac

SEQ ID NO: 1484342 - RNA, 18 nt, Human
acuguagaaugauuucau

SEQ ID NO: 1484343 - RNA, 19 nt, Human
acuguagaaugauuucaug

SEQ ID NO: 1484344 - RNA, 20 nt, Human
acuguagaaugauuucaugc

SEQ ID NO: 1484345 - RNA, 22 nt, Human
ucgagaucccaacacugccagc

SEQ ID NO: 1484346 - RNA, 23 nt, Human
ucgagaucccaacacugccagca

SEQ ID NO: 1484347 - RNA, 14 nt, Human
uccuucccugcugu

SEQ ID NO: 1484348 - RNA, 15 nt, Human
uccuucauuuccucc

SEQ ID NO: 1484349 - RNA, 21 nt, Human
uccuuccucacaccaggcuug

SEQ ID NO: 1484350 - RNA, 16 nt, Human
uccuuccucacaccag

SEQ ID NO: 1484351 - RNA, 11 nt, Human
uccuucauuuc

SEQ ID NO: 1484352 - RNA, 14 nt, Human
uccuucauuuccuc

SEQ ID NO: 1484353 - RNA, 15 nt, Human
uccuucagcacuuua

SEQ ID NO: 1484354 - RNA, 18 nt, Human
uccuucagcacuuuagaa

SEQ ID NO: 1484355 - RNA, 21 nt, Human
acuggcauggauauaguuuua

SEQ ID NO: 1484356 - RNA, 23 nt, Human
acuggcauggauauaguuuuacu

SEQ ID NO: 1484357 - RNA, 21 nt, Human
acuggcaggcaggcucccagg

SEQ ID NO: 1484358 - RNA, 21 nt, Human
acugcucuccuccaccucaac

SEQ ID NO: 1484359 - RNA, 15 nt, Human
acugcucuccuccac

SEQ ID NO: 1484360 - RNA, 18 nt, Human
acugcugagauacauaca

SEQ ID NO: 1484361 - RNA, 19 nt, Human
acugcugagauacauacag

SEQ ID NO: 1484362 - RNA, 20 nt, Human
acugcugagauacauacaga

SEQ ID NO: 1484363 - RNA, 22 nt, Human
acugcugagauacauacagaau

SEQ ID NO: 1484364 - RNA, 23 nt, Human
acugcgcccuuaacugcauccag

SEQ ID NO: 1484365 - RNA, 13 nt, Human
acugccuuugacc

SEQ ID NO: 1484366 - RNA, 11 nt, Human
acugccuuuga

SEQ ID NO: 1484367 - RNA, 22 nt, Human
acugccuucucaacuccaaacu

SEQ ID NO: 1484368 - RNA, 18 nt, Human
acugcuuggagcugagca

SEQ ID NO: 1484369 - RNA, 13 nt, Human
acugcuuggagcu

SEQ ID NO: 1484370 - RNA, 16 nt, Human
acugcuuggagcugag

SEQ ID NO: 1484371 - RNA, 23 nt, Human
acugcuugaacuaggcugagcaa

SEQ ID NO: 1484372 - RNA, 16 nt, Human
acugcaaccucugccu

SEQ ID NO: 1484373 - RNA, 13 nt, Human
uccugaguagcug

SEQ ID NO: 1484374 - RNA, 20 nt, Human
uccugcaccggggccugggc

SEQ ID NO: 1484375 - RNA, 21 nt, Human
uccugcaccggggccugggca

SEQ ID NO: 1484376 - RNA, 18 nt, Human
uccugcuaaguuaauguu

SEQ ID NO: 1484377 - RNA, 15 nt, Human
uccugcucauauugu

SEQ ID NO: 1484378 - RNA, 16 nt, Human
uccugcucauauugug

SEQ ID NO: 1484379 - RNA, 17 nt, Human
uccugcaggcaggaaca

SEQ ID NO: 1484380 - RNA, 22 nt, Human
uccugcaggcaggaacaaacag

SEQ ID NO: 1484381 - RNA, 14 nt, Human
acugaggaucagag

SEQ ID NO: 1484382 - RNA, 20 nt, Human
acugaggaauuuucuuugug

SEQ ID NO: 1484383 - RNA, 17 nt, Human
acugaggaauuucaccu

SEQ ID NO: 1484384 - RNA, 19 nt, Human
acugaggaauuucaccugu

SEQ ID NO: 1484385 - RNA, 16 nt, Human
acugaggaauuuucuu

SEQ ID NO: 1484386 - RNA, 20 nt, Human
acugcaaccuccaccucgca

SEQ ID NO: 1484387 - RNA, 18 nt, Human
acugcaaccuccaccucc

SEQ ID NO: 1484388 - RNA, 17 nt, Human
acugcaaccuccaccuc

SEQ ID NO: 1484389 - RNA, 16 nt, Human
acugcaaccuccaccu

SEQ ID NO: 1484390 - RNA, 18 nt, Human
acugaguuuuccauggca

SEQ ID NO: 1484391 - RNA, 13 nt, Human
acugaguuuucca

SEQ ID NO: 1484392 - RNA, 13 nt, Human
acugcaaccucca

SEQ ID NO: 1484393 - RNA, 14 nt, Human
acugcaaccuccac

SEQ ID NO: 1484394 - RNA, 12 nt, Human
acugagugacuc

SEQ ID NO: 1484395 - RNA, 23 nt, Human
acugagugacucuauauagcuga

SEQ ID NO: 1484396 - RNA, 13 nt, Human
uccugguagaaua

SEQ ID NO: 1484397 - RNA, 15 nt, Human
uccuguguggagagg

SEQ ID NO: 1484398 - RNA, 16 nt, Human
uccuguguggagaggg

SEQ ID NO: 1484399 - RNA, 18 nt, Human
uccuguguggagagggaa

SEQ ID NO: 1484400 - RNA, 22 nt, Human
uccuguguggagagggaaugug

SEQ ID NO: 1484401 - RNA, 21 nt, Human
uccuguguggagagggaaugu

SEQ ID NO: 1484402 - RNA, 13 nt, Human
uccuguugggaga

SEQ ID NO: 1484403 - RNA, 14 nt, Human
uccuguugggagag

SEQ ID NO: 1484404 - RNA, 21 nt, Human
uccuguugggagagggcgcag

SEQ ID NO: 1484405 - RNA, 14 nt, Human
uccuguuuuucaca

SEQ ID NO: 1484406 - RNA, 23 nt, Human
acucuuauaucuauauuuuacau

SEQ ID NO: 1484407 - RNA, 15 nt, Human
acucugcuugauuuu

SEQ ID NO: 1484408 - RNA, 16 nt, Human
acucugcuugauuuuu

SEQ ID NO: 1484409 - RNA, 18 nt, Human
acucugcuugauuuuugc

SEQ ID NO: 1484410 - RNA, 21 nt, Human
acucucuuauugccucacuuc

SEQ ID NO: 1484411 - RNA, 23 nt, Human
acucucuuauugccucacuucag

SEQ ID NO: 1484412 - RNA, 21 nt, Human
acucggccucccaaagugcug

SEQ ID NO: 1484413 - RNA, 22 nt, Human
acucggccucccaaagugcugg

SEQ ID NO: 1484414 - RNA, 20 nt, Human
uccuaggcuccaccccaucc

SEQ ID NO: 1484415 - RNA, 22 nt, Human
uccuaggcuccaccccauccag

SEQ ID NO: 1484416 - RNA, 22 nt, Human
uccucaaccccuccccuccauc

SEQ ID NO: 1484417 - RNA, 19 nt, Human
uccucaaccccuccccucc

SEQ ID NO: 1484418 - RNA, 16 nt, Human
uccucagacucuaaga

SEQ ID NO: 1484419 - RNA, 21 nt, Human
uccucagacucuaagaaagaa

SEQ ID NO: 1484420 - RNA, 11 nt, Human
uccucagcccc

SEQ ID NO: 1484421 - RNA, 17 nt, Human
uccucagagaauuucua

SEQ ID NO: 1484422 - RNA, 20 nt, Human
uccucagagaauuucuacca

SEQ ID NO: 1484423 - RNA, 17 nt, Human
uccucagacucuaagaa

SEQ ID NO: 1484424 - RNA, 13 nt, Human
uccucacccccag

SEQ ID NO: 1484425 - RNA, 16 nt, Human
uccucacccccagcuu

SEQ ID NO: 1484426 - RNA, 20 nt, Human
uccucacccccagcuuugcu

SEQ ID NO: 1484427 - RNA, 18 nt, Human
acuccugaccucaaguga

SEQ ID NO: 1484428 - RNA, 14 nt, Human
acuccugaccucag

SEQ ID NO: 1484429 - RNA, 15 nt, Human
acuccugaccucagg

SEQ ID NO: 1484430 - RNA, 16 nt, Human
acuccugaccucaggc

SEQ ID NO: 1484431 - RNA, 16 nt, Human
acuccuaggaaaauac

SEQ ID NO: 1484432 - RNA, 17 nt, Human
acuccugaccucaggca

SEQ ID NO: 1484433 - RNA, 21 nt, Human
acucaucuagguaaauuacag

SEQ ID NO: 1484434 - RNA, 20 nt, Human
acucaucuuucccuccuugg

SEQ ID NO: 1484435 - RNA, 21 nt, Human
acucaucuuucccuccuuggu

SEQ ID NO: 1484436 - RNA, 18 nt, Human
acucaucuuucccuccuu

SEQ ID NO: 1484437 - RNA, 17 nt, Human
acucaucuuucccuccu

SEQ ID NO: 1484438 - RNA, 15 nt, Human
acucaugugacucuu

SEQ ID NO: 1484439 - RNA, 16 nt, Human
acucaugugacucuuu

SEQ ID NO: 1484440 - RNA, 17 nt, Human
acucaugcauuguccuc

SEQ ID NO: 1484441 - RNA, 16 nt, Human
acucaugcauuguccu

SEQ ID NO: 1484442 - RNA, 17 nt, Human
acucaugugacucuuuc

SEQ ID NO: 1484443 - RNA, 18 nt, Human
acucaucuagguaaauua

SEQ ID NO: 1484444 - RNA, 16 nt, Human
acucaucuagguaaau

SEQ ID NO: 1484445 - RNA, 16 nt, Human
ucccucagugcccuca

SEQ ID NO: 1484446 - RNA, 16 nt, Human
uccguucacaugugug

SEQ ID NO: 1484447 - RNA, 23 nt, Human
uccgucaaaacagauuguuugca

SEQ ID NO: 1484448 - RNA, 16 nt, Human
uccgucaaaacagauu

SEQ ID NO: 1484449 - RNA, 17 nt, Human
ucccuuugcccagaaag

SEQ ID NO: 1484450 - RNA, 13 nt, Human
uccuagaugcucu

SEQ ID NO: 1484451 - RNA, 21 nt, Human
uccuaaacaucauucauuuuu

SEQ ID NO: 1484452 - RNA, 23 nt, Human
uccuaaacugagacaaugccuug

SEQ ID NO: 1484453 - RNA, 22 nt, Human
ucccuguuucuuccacagugcc

SEQ ID NO: 1484454 - RNA, 14 nt, Human
ucccucacccaucc

SEQ ID NO: 1484455 - RNA, 18 nt, Human
ucccucacccauccuaga

SEQ ID NO: 1484456 - RNA, 12 nt, Human
ucccucacccau

SEQ ID NO: 1484457 - RNA, 19 nt, Human
ucccucaaccucauccucu

SEQ ID NO: 1484458 - RNA, 18 nt, Human
ucccucaaccucauccuc

SEQ ID NO: 1484459 - RNA, 14 nt, Human
uccccuucuccccu

SEQ ID NO: 1484460 - RNA, 20 nt, Human
uccccuucuccccugcacug

SEQ ID NO: 1484461 - RNA, 18 nt, Human
uccccuucuccccugcac

SEQ ID NO: 1484462 - RNA, 18 nt, Human
uccccuugaacucuucac

SEQ ID NO: 1484463 - RNA, 17 nt, Human
uccccacgccacagccc

SEQ ID NO: 1484464 - RNA, 16 nt, Human
uccccacgccacagcc

SEQ ID NO: 1484465 - RNA, 15 nt, Human
uccccacgccacagc

SEQ ID NO: 1484466 - RNA, 14 nt, Human
uccccacgccacag

SEQ ID NO: 1484467 - RNA, 19 nt, Human
uccccacgccacagcccuu

SEQ ID NO: 1484468 - RNA, 22 nt, Human
uccccacgccacagcccuuuug

SEQ ID NO: 1484469 - RNA, 22 nt, Human
acuaugaaguuuuuuuuauaca

SEQ ID NO: 1484470 - RNA, 16 nt, Human
acuaugaaaagcuaga

SEQ ID NO: 1484471 - RNA, 19 nt, Human
acuaugaaaagcuagaauu

SEQ ID NO: 1484472 - RNA, 20 nt, Human
acuaugaaaagcuagaauug

SEQ ID NO: 1484473 - RNA, 21 nt, Human
acuaugaaaagcuagaauuga

SEQ ID NO: 1484474 - RNA, 20 nt, Human
acuaucuuacuauuucacaa

SEQ ID NO: 1484475 - RNA, 16 nt, Human
acuaucuuggugaauu

SEQ ID NO: 1484476 - RNA, 18 nt, Human
acuaucuuucagcuccag

SEQ ID NO: 1484477 - RNA, 22 nt, Human
acuauuaaaaagguuuacagaa

SEQ ID NO: 1484478 - RNA, 18 nt, Human
acuauuauccccauuucu

SEQ ID NO: 1484479 - RNA, 19 nt, Human
uccagccuggggcugaggc

SEQ ID NO: 1484480 - RNA, 23 nt, Human
acguuuaagccaaaacaauguuu

SEQ ID NO: 1484481 - RNA, 19 nt, Human
acguuuaagccaaaacaau

SEQ ID NO: 1484482 - RNA, 17 nt, Human
acguuuaagccaaaaca

SEQ ID NO: 1484483 - RNA, 14 nt, Human
acuaaaauauuuau

SEQ ID NO: 1484484 - RNA, 18 nt, Human
acuaaacacgugacacaa

SEQ ID NO: 1484485 - RNA, 16 nt, Human
acuaaagccaaacaua

SEQ ID NO: 1484486 - RNA, 17 nt, Human
acuaaagccaaacauau

SEQ ID NO: 1484487 - RNA, 23 nt, Human
acuaaagccaaacauauauauac

SEQ ID NO: 1484488 - RNA, 22 nt, Human
acuaaaguuagaaaguugauuu

SEQ ID NO: 1484489 - RNA, 13 nt, Human
ucccaucuaggga

SEQ ID NO: 1484490 - RNA, 22 nt, Human
uccccaaaggcuuugcccugcu

SEQ ID NO: 1484491 - RNA, 14 nt, Human
uccccaaaggcuuu

SEQ ID NO: 1484492 - RNA, 23 nt, Human
uccccaaaggcuuugcccugcug

SEQ ID NO: 1484493 - RNA, 18 nt, Human
uccccaacauguaauaag

SEQ ID NO: 1484494 - RNA, 22 nt, Human
uccccaaguacaaccacaccca

SEQ ID NO: 1484495 - RNA, 12 nt, Human
acuacaugcacu

SEQ ID NO: 1484496 - RNA, 14 nt, Human
acuacaugcacuug

SEQ ID NO: 1484497 - RNA, 15 nt, Human
ucaugcauggaaauu

SEQ ID NO: 1484498 - RNA, 18 nt, Human
ucaugcauguccuguaaa

SEQ ID NO: 1484499 - RNA, 16 nt, Human
ucaugcauuguccucu

SEQ ID NO: 1484500 - RNA, 17 nt, Human
ucaugauaaugaacaga

SEQ ID NO: 1484501 - RNA, 21 nt, Human
ucaugauaaugaacagaacau

SEQ ID NO: 1484502 - RNA, 13 nt, Human
ucaugauccaacu

SEQ ID NO: 1484503 - RNA, 15 nt, Human
ucaugaccaguaaag

SEQ ID NO: 1484504 - RNA, 14 nt, Human
ucaugaccaguaaa

SEQ ID NO: 1484505 - RNA, 22 nt, Human
ucaugaauuaguuuuauaugcu

SEQ ID NO: 1484506 - RNA, 14 nt, Human
ucaugugaaaucau

SEQ ID NO: 1484507 - RNA, 16 nt, Human
ucauguuuaagaaauu

SEQ ID NO: 1484508 - RNA, 14 nt, Human
ucauguuuaagaaa

SEQ ID NO: 1484509 - RNA, 15 nt, Human
ucauuaaauggggcu

SEQ ID NO: 1484510 - RNA, 21 nt, Human
accucuccccuggaacugucu

SEQ ID NO: 1484511 - RNA, 21 nt, Human
accucuaaauucuuucauuuu

SEQ ID NO: 1484512 - RNA, 18 nt, Human
accucuaaauucuuucau

SEQ ID NO: 1484513 - RNA, 23 nt, Human
accucgcccagcggcaucaggcu

SEQ ID NO: 1484514 - RNA, 12 nt, Human
accggaccaucu

SEQ ID NO: 1484515 - RNA, 12 nt, Human
accuagauuuuu

SEQ ID NO: 1484516 - RNA, 11 nt, Human
accuaauccaa

SEQ ID NO: 1484517 - RNA, 18 nt, Human
accuagcuggcucuguga

SEQ ID NO: 1484518 - RNA, 19 nt, Human
accuaugauauuuucugug

SEQ ID NO: 1484519 - RNA, 12 nt, Human
accuaugucauu

SEQ ID NO: 1484520 - RNA, 15 nt, Human
accuaugucauuuca

SEQ ID NO: 1484521 - RNA, 16 nt, Human
accuaugucauuucau

SEQ ID NO: 1484522 - RNA, 18 nt, Human
accuaugucauuucauuu

SEQ ID NO: 1484523 - RNA, 14 nt, Human
accucaagcugcau

SEQ ID NO: 1484524 - RNA, 19 nt, Human
accuaugucauuucauuuc

SEQ ID NO: 1484525 - RNA, 13 nt, Human
accucaauguccc

SEQ ID NO: 1484526 - RNA, 19 nt, Human
accucaaucagucucagaa

SEQ ID NO: 1484527 - RNA, 21 nt, Human
accucaaucagucucagaaug

SEQ ID NO: 1484528 - RNA, 16 nt, Human
accucaagcugcaucu

SEQ ID NO: 1484529 - RNA, 17 nt, Human
accucaccaagcugcug

SEQ ID NO: 1484530 - RNA, 20 nt, Human
ucauuuuagggguagcauuu

SEQ ID NO: 1484531 - RNA, 20 nt, Human
ucauuuuaacaucugagaaa

SEQ ID NO: 1484532 - RNA, 15 nt, Human
ucauuuguuggaaug

SEQ ID NO: 1484533 - RNA, 22 nt, Human
ucauuuuaacaucugagaaaag

SEQ ID NO: 1484534 - RNA, 23 nt, Human
uccaaagucucuggaauuugaaa

SEQ ID NO: 1484535 - RNA, 15 nt, Human
ucauuuuauguuaag

SEQ ID NO: 1484536 - RNA, 16 nt, Human
ucauuuuuuaaaaaag

SEQ ID NO: 1484537 - RNA, 18 nt, Human
accuggaagcauuuguuu

SEQ ID NO: 1484538 - RNA, 23 nt, Human
accuggaagcauuuguuucuacu

SEQ ID NO: 1484539 - RNA, 18 nt, Human
accugaauaaagaaugaa

SEQ ID NO: 1484540 - RNA, 21 nt, Human
uccaacuaucucauuuccaag

SEQ ID NO: 1484541 - RNA, 22 nt, Human
uccaacuaaugccuuacucuuc

SEQ ID NO: 1484542 - RNA, 15 nt, Human
uccaacuaaugccuu

SEQ ID NO: 1484543 - RNA, 19 nt, Human
uccaacuaaugccuuacuc

SEQ ID NO: 1484544 - RNA, 14 nt, Human
accuuccacccagu

SEQ ID NO: 1484545 - RNA, 15 nt, Human
accuuccagaaauac

SEQ ID NO: 1484546 - RNA, 23 nt, Human
accuuccagaaauacuacugugu

SEQ ID NO: 1484547 - RNA, 12 nt, Human
accuuccaccca

SEQ ID NO: 1484548 - RNA, 14 nt, Human
accuuagaauacag

SEQ ID NO: 1484549 - RNA, 21 nt, Human
accuuagcuggcauuacagcu

SEQ ID NO: 1484550 - RNA, 22 nt, Human
accuuagcuggcauuacagcug

SEQ ID NO: 1484551 - RNA, 14 nt, Human
accuggucucuccu

SEQ ID NO: 1484552 - RNA, 15 nt, Human
accuuaauuuauuau

SEQ ID NO: 1484553 - RNA, 14 nt, Human
accuuaauuuauua

SEQ ID NO: 1484554 - RNA, 16 nt, Human
uccacucuuucuuuca

SEQ ID NO: 1484555 - RNA, 15 nt, Human
uccacucuuucuuuc

SEQ ID NO: 1484556 - RNA, 13 nt, Human
uccacucuuucuu

SEQ ID NO: 1484557 - RNA, 15 nt, Human
uccacguacugcagc

SEQ ID NO: 1484558 - RNA, 17 nt, Human
uccacguacugcagccu

SEQ ID NO: 1484559 - RNA, 18 nt, Human
uccacguacugcagccuc

SEQ ID NO: 1484560 - RNA, 16 nt, Human
ucaggaagagaaggag

SEQ ID NO: 1484561 - RNA, 15 nt, Human
ucaggaagagaagga

SEQ ID NO: 1484562 - RNA, 18 nt, Human
ucaggaaccgaggcaggg

SEQ ID NO: 1484563 - RNA, 17 nt, Human
ucaggaaccgaggcagg

SEQ ID NO: 1484564 - RNA, 20 nt, Human
ucaggaagagaaggagcaga

SEQ ID NO: 1484565 - RNA, 19 nt, Human
ucaggcccuuauuuucaag

SEQ ID NO: 1484566 - RNA, 20 nt, Human
ucaggcccccaccuggcuca

SEQ ID NO: 1484567 - RNA, 21 nt, Human
ucaggcccccaccuggcucac

SEQ ID NO: 1484568 - RNA, 21 nt, Human
acccuccaccgcagaaggaag

SEQ ID NO: 1484569 - RNA, 20 nt, Human
acccuccaccgcagaaggaa

SEQ ID NO: 1484570 - RNA, 18 nt, Human
acccuccaccgcagaagg

SEQ ID NO: 1484571 - RNA, 15 nt, Human
acccuccagagacaa

SEQ ID NO: 1484572 - RNA, 21 nt, Human
acccuuauugcuguccuggag

SEQ ID NO: 1484573 - RNA, 17 nt, Human
acccuuauugcuguccu

SEQ ID NO: 1484574 - RNA, 15 nt, Human
acccuuauugcuguc

SEQ ID NO: 1484575 - RNA, 19 nt, Human
acccuuauugcuguccugg

SEQ ID NO: 1484576 - RNA, 16 nt, Human
ucagccccgcguggaa

SEQ ID NO: 1484577 - RNA, 14 nt, Human
ucagcccugcacca

SEQ ID NO: 1484578 - RNA, 20 nt, Human
acccagguuggagugcagug

SEQ ID NO: 1484579 - RNA, 17 nt, Human
acccaguaacucaucug

SEQ ID NO: 1484580 - RNA, 18 nt, Human
acccaguaacucaucugu

SEQ ID NO: 1484581 - RNA, 19 nt, Human
acccagguuggagugcagu

SEQ ID NO: 1484582 - RNA, 11 nt, Human
acccaggacag

SEQ ID NO: 1484583 - RNA, 10 nt, Human
acccaggaca

SEQ ID NO: 1484584 - RNA, 15 nt, Human
ucagcccugcaccau

SEQ ID NO: 1484585 - RNA, 14 nt, Human
ucagauucccagag

SEQ ID NO: 1484586 - RNA, 18 nt, Human
ucagaagaaaaagaagca

SEQ ID NO: 1484587 - RNA, 17 nt, Human
ucagaagaaaaagaagc

SEQ ID NO: 1484588 - RNA, 13 nt, Human
ucagaagaaaaag

SEQ ID NO: 1484589 - RNA, 16 nt, Human
ucagaagaaaaagaag

SEQ ID NO: 1484590 - RNA, 19 nt, Human
ucagccuggcuucaaauug

SEQ ID NO: 1484591 - RNA, 13 nt, Human
accccuguuucug

SEQ ID NO: 1484592 - RNA, 22 nt, Human
accccauggcagugggaaaaau

SEQ ID NO: 1484593 - RNA, 16 nt, Human
acccccagcuuugcua

SEQ ID NO: 1484594 - RNA, 14 nt, Human
acccccagcuuugc

SEQ ID NO: 1484595 - RNA, 14 nt, Human
accccccaagcugu

SEQ ID NO: 1484596 - RNA, 19 nt, Human
accacuuguguuuugcaag

SEQ ID NO: 1484597 - RNA, 23 nt, Human
accacuuguguuuugcaagccag

SEQ ID NO: 1484598 - RNA, 18 nt, Human
accagagaaaaagggagg

SEQ ID NO: 1484599 - RNA, 20 nt, Human
accagagaaaaagggagggg

SEQ ID NO: 1484600 - RNA, 17 nt, Human
accaggauagagacugg

SEQ ID NO: 1484601 - RNA, 17 nt, Human
accaggcaccaaaagaa

SEQ ID NO: 1484602 - RNA, 19 nt, Human
accaggcaccaaaagaagu

SEQ ID NO: 1484603 - RNA, 20 nt, Human
accaggcaccaaaagaagua

SEQ ID NO: 1484604 - RNA, 16 nt, Human
accaggaguggguggg

SEQ ID NO: 1484605 - RNA, 20 nt, Human
accaggaguggguggggagu

SEQ ID NO: 1484606 - RNA, 14 nt, Human
accaggauagagac

SEQ ID NO: 1484607 - RNA, 16 nt, Human
accaggauagagacug

SEQ ID NO: 1484608 - RNA, 19 nt, Human
accaggauagagacuggaa

SEQ ID NO: 1484609 - RNA, 21 nt, Human
accaggcaccaaaagaaguaa

SEQ ID NO: 1484610 - RNA, 17 nt, Human
accaggcagccucuggg

SEQ ID NO: 1484611 - RNA, 20 nt, Human
accaggcagccucugggggg

SEQ ID NO: 1484612 - RNA, 21 nt, Human
accaggcagccucuggggggu

SEQ ID NO: 1484613 - RNA, 17 nt, Human
uauuucaugaaaauugu

SEQ ID NO: 1484614 - RNA, 19 nt, Human
acccagaaugagacaucca

SEQ ID NO: 1484615 - RNA, 20 nt, Human
acccagaaugagacauccag

SEQ ID NO: 1484616 - RNA, 18 nt, Human
acccagaaugagacaucc

SEQ ID NO: 1484617 - RNA, 14 nt, Human
ucagaacagcagac

SEQ ID NO: 1484618 - RNA, 23 nt, Human
ucagaacagcagacucagcucug

SEQ ID NO: 1484619 - RNA, 19 nt, Human
acccacuugcuuuuaaaau

SEQ ID NO: 1484620 - RNA, 23 nt, Human
acccaaccacaucccacucacaa

SEQ ID NO: 1484621 - RNA, 13 nt, Human
accauuuccucag

SEQ ID NO: 1484622 - RNA, 15 nt, Human
accauuuccucagac

SEQ ID NO: 1484623 - RNA, 11 nt, Human
accauuucaga

SEQ ID NO: 1484624 - RNA, 14 nt, Human
accauuucagagag

SEQ ID NO: 1484625 - RNA, 20 nt, Human
accauuucagagaggccuuu

SEQ ID NO: 1484626 - RNA, 21 nt, Human
ucacuguagaaugauuucaug

SEQ ID NO: 1484627 - RNA, 13 nt, Human
ucaccuggaagca

SEQ ID NO: 1484628 - RNA, 19 nt, Human
ucaccuggaagcauuuguu

SEQ ID NO: 1484629 - RNA, 24 nt, Human
accaugaagagauuuuucaugauu

SEQ ID NO: 1484630 - RNA, 21 nt, Human
accagggaugaugcaacaucc

SEQ ID NO: 1484631 - RNA, 21 nt, Human
uauguuuucaggcuagaugua

SEQ ID NO: 1484632 - RNA, 23 nt, Human
uauuacaguggggaaugaagaua

SEQ ID NO: 1484633 - RNA, 22 nt, Human
uauuagcccuucuccauggccc

SEQ ID NO: 1484634 - RNA, 15 nt, Human
uauucagcucaugga

SEQ ID NO: 1484635 - RNA, 11 nt, Human
uauucaauaaa

SEQ ID NO: 1484636 - RNA, 13 nt, Human
uauucagacagau

SEQ ID NO: 1484637 - RNA, 21 nt, Human
uauucauauuuucuuucaaaa

SEQ ID NO: 1484638 - RNA, 21 nt, Human
acaguuaccucugccucagaa

SEQ ID NO: 1484639 - RNA, 13 nt, Human
acaguuacauaau

SEQ ID NO: 1484640 - RNA, 19 nt, Human
acaguuacauaauucacuc

SEQ ID NO: 1484641 - RNA, 19 nt, Human
acaguguugaaaauguuca

SEQ ID NO: 1484642 - RNA, 21 nt, Human
acaguguugaaaauguucaga

SEQ ID NO: 1484643 - RNA, 13 nt, Human
acagugaagacag

SEQ ID NO: 1484644 - RNA, 14 nt, Human
acagugaagacaga

SEQ ID NO: 1484645 - RNA, 18 nt, Human
acagugaagacagaaguu

SEQ ID NO: 1484646 - RNA, 21 nt, Human
acagugaagacagaaguuugc

SEQ ID NO: 1484647 - RNA, 19 nt, Human
acagugaagacagaaguuu

SEQ ID NO: 1484648 - RNA, 12 nt, Human
acagugagccug

SEQ ID NO: 1484649 - RNA, 14 nt, Human
acagugagccugaa

SEQ ID NO: 1484650 - RNA, 20 nt, Human
acagugaaagaaaauaacaa

SEQ ID NO: 1484651 - RNA, 12 nt, Human
acagucuaaagc

SEQ ID NO: 1484652 - RNA, 15 nt, Human
acagucuaaagcugg

SEQ ID NO: 1484653 - RNA, 14 nt, Human
acagucuaaagcug

SEQ ID NO: 1484654 - RNA, 15 nt, Human
acagggccacauaga

SEQ ID NO: 1484655 - RNA, 17 nt, Human
acaguccgucaaaacag

SEQ ID NO: 1484656 - RNA, 21 nt, Human
acaguccgucaaaacagauug

SEQ ID NO: 1484657 - RNA, 19 nt, Human
uauuguauauuacaaugau

SEQ ID NO: 1484658 - RNA, 17 nt, Human
uauuguauauuacaaug

SEQ ID NO: 1484659 - RNA, 16 nt, Human
uauuguauauuacaau

SEQ ID NO: 1484660 - RNA, 17 nt, Human
uauuguagcauccugga

SEQ ID NO: 1484661 - RNA, 18 nt, Human
uauuguagcauccuggaa

SEQ ID NO: 1484662 - RNA, 20 nt, Human
uauuguagcauccuggaaua

SEQ ID NO: 1484663 - RNA, 21 nt, Human
uauuguagcauccuggaauau

SEQ ID NO: 1484664 - RNA, 17 nt, Human
uauugucuagugaaacu

SEQ ID NO: 1484665 - RNA, 17 nt, Human
uauuuaaccucuaaauu

SEQ ID NO: 1484666 - RNA, 18 nt, Human
uauuuaaccucuaaauuc

SEQ ID NO: 1484667 - RNA, 16 nt, Human
uauuuaacucucuuua

SEQ ID NO: 1484668 - RNA, 23 nt, Human
uauuuaacucucuuuaugucugu

SEQ ID NO: 1484669 - RNA, 11 nt, Human
uauuuaacuga

SEQ ID NO: 1484670 - RNA, 13 nt, Human
uauuuaacugacu

SEQ ID NO: 1484671 - RNA, 14 nt, Human
uauuuaauagguuu

SEQ ID NO: 1484672 - RNA, 18 nt, Human
uauuuaauagcaaagaau

SEQ ID NO: 1484673 - RNA, 19 nt, Human
uauuuaauagcaaagaauu

SEQ ID NO: 1484674 - RNA, 20 nt, Human
uauuuaauagcaaagaauug

SEQ ID NO: 1484675 - RNA, 22 nt, Human
uauuuaauagcaaagaauugac

SEQ ID NO: 1484676 - RNA, 13 nt, Human
uauuuaauagcaa

SEQ ID NO: 1484677 - RNA, 14 nt, Human
uauuuauuuuaaua

SEQ ID NO: 1484678 - RNA, 16 nt, Human
uauuuauuuuaauaau

SEQ ID NO: 1484679 - RNA, 18 nt, Human
uauuuauuuuaauaaugu

SEQ ID NO: 1484680 - RNA, 20 nt, Human
uauuuauuuuuuuuaaguau

SEQ ID NO: 1484681 - RNA, 16 nt, Human
uauuucaauguuagcc

SEQ ID NO: 1484682 - RNA, 15 nt, Human
uauuucaauguuagc

SEQ ID NO: 1484683 - RNA, 15 nt, Human
uauuucacaacagcc

SEQ ID NO: 1484684 - RNA, 19 nt, Human
uauuuaguguucauaaaua

SEQ ID NO: 1484685 - RNA, 19 nt, Human
uauuuagcuugggaaaggu

SEQ ID NO: 1484686 - RNA, 14 nt, Human
uauuuaauucaugu

SEQ ID NO: 1484687 - RNA, 15 nt, Human
uauuguaaaacaggu

SEQ ID NO: 1484688 - RNA, 15 nt, Human
uauuguaaauauugu

SEQ ID NO: 1484689 - RNA, 20 nt, Human
uauuguaacccugucuggau

SEQ ID NO: 1484690 - RNA, 16 nt, Human
uauucuugauguaaaa

SEQ ID NO: 1484691 - RNA, 14 nt, Human
uauucuugauguaa

SEQ ID NO: 1484692 - RNA, 22 nt, Human
acaguucggugagcuacaaaug

SEQ ID NO: 1484693 - RNA, 19 nt, Human
acaguucggugagcuacaa

SEQ ID NO: 1484694 - RNA, 23 nt, Human
acaguucggugagcuacaaaugc

SEQ ID NO: 1484695 - RNA, 19 nt, Human
acaguuccccuauguggaa

SEQ ID NO: 1484696 - RNA, 20 nt, Human
acaguuccccuauguggaag

SEQ ID NO: 1484697 - RNA, 18 nt, Human
acaguuccccuaugugga

SEQ ID NO: 1484698 - RNA, 15 nt, Human
acaguuaucuaaguu

SEQ ID NO: 1484699 - RNA, 16 nt, Human
acaguuaucuaaguua

SEQ ID NO: 1484700 - RNA, 17 nt, Human
acaguuaucuaaguuaa

SEQ ID NO: 1484701 - RNA, 23 nt, Human
acaguuaucuaaguuaauuuaaa

SEQ ID NO: 1484702 - RNA, 12 nt, Human
acaguucaagaa

SEQ ID NO: 1484703 - RNA, 20 nt, Human
acaguucaagaaagcuucaa

SEQ ID NO: 1484704 - RNA, 16 nt, Human
acaguucaagaaagcu

SEQ ID NO: 1484705 - RNA, 13 nt, Human
acaguuccuggga

SEQ ID NO: 1484706 - RNA, 21 nt, Human
acaguuccugggaacaucaca

SEQ ID NO: 1484707 - RNA, 16 nt, Human
uauauugauccagaaa

SEQ ID NO: 1484708 - RNA, 23 nt, Human
acagacugcgauuugucccaggu

SEQ ID NO: 1484709 - RNA, 14 nt, Human
acagacacuggcau

SEQ ID NO: 1484710 - RNA, 19 nt, Human
uaucaauaaauagaccauu

SEQ ID NO: 1484711 - RNA, 14 nt, Human
uauauuuacaaaug

SEQ ID NO: 1484712 - RNA, 16 nt, Human
uauauugauaagaucu

SEQ ID NO: 1484713 - RNA, 15 nt, Human
uauauuuacaaaugg

SEQ ID NO: 1484714 - RNA, 22 nt, Human
uaucucccugccuccugccggc

SEQ ID NO: 1484715 - RNA, 16 nt, Human
uaucucccugccuccu

SEQ ID NO: 1484716 - RNA, 17 nt, Human
uaucuaguuuaauuaau

SEQ ID NO: 1484717 - RNA, 17 nt, Human
uaucuacuuccaaacua

SEQ ID NO: 1484718 - RNA, 17 nt, Human
uaucuaggcaacauagu

SEQ ID NO: 1484719 - RNA, 22 nt, Human
uaucuacuuccaaacuaauuuu

SEQ ID NO: 1484720 - RNA, 15 nt, Human
acagcuccaagaauu

SEQ ID NO: 1484721 - RNA, 12 nt, Human
acagccuggcug

SEQ ID NO: 1484722 - RNA, 14 nt, Human
uauggccuguggau

SEQ ID NO: 1484723 - RNA, 22 nt, Human
uauggccugugagcuaggaauu

SEQ ID NO: 1484724 - RNA, 21 nt, Human
uaugauggguguuuuuagcag

SEQ ID NO: 1484725 - RNA, 14 nt, Human
uaugauguuaaaaa

SEQ ID NO: 1484726 - RNA, 18 nt, Human
uaugauguuaaaaaaaua

SEQ ID NO: 1484727 - RNA, 15 nt, Human
uaucuugaauaaugu

SEQ ID NO: 1484728 - RNA, 17 nt, Human
uaugaggacuugugucu

SEQ ID NO: 1484729 - RNA, 23 nt, Human
uaugaggacuugugucucugugc

SEQ ID NO: 1484730 - RNA, 18 nt, Human
acagauaacugaaaauua

SEQ ID NO: 1484731 - RNA, 14 nt, Human
acagauaacugaaa

SEQ ID NO: 1484732 - RNA, 21 nt, Human
acagcccaggauacuggcaca

SEQ ID NO: 1484733 - RNA, 20 nt, Human
acagcccaggauacuggcac

SEQ ID NO: 1484734 - RNA, 15 nt, Human
acagcccaggauacu

SEQ ID NO: 1484735 - RNA, 14 nt, Human
uauaauuuugugaa

SEQ ID NO: 1484736 - RNA, 16 nt, Human
uauaaccagacacaua

SEQ ID NO: 1484737 - RNA, 22 nt, Human
uauaagcaagaaggcaaaaaua

SEQ ID NO: 1484738 - RNA, 20 nt, Human
acaccuaggcuagggugggg

SEQ ID NO: 1484739 - RNA, 23 nt, Human
acaccuaggcuaggguggggaga

SEQ ID NO: 1484740 - RNA, 17 nt, Human
acaccuaugucauuuca

SEQ ID NO: 1484741 - RNA, 20 nt, Human
acaccuaugucauuucauuu

SEQ ID NO: 1484742 - RNA, 12 nt, Human
acaccucccagg

SEQ ID NO: 1484743 - RNA, 14 nt, Human
uauaccaauaaagu

SEQ ID NO: 1484744 - RNA, 17 nt, Human
uauaccaaagcacauuu

SEQ ID NO: 1484745 - RNA, 15 nt, Human
uauaccaauaaagug

SEQ ID NO: 1484746 - RNA, 13 nt, Human
uauaccaauaaag

SEQ ID NO: 1484747 - RNA, 12 nt, Human
uauaccaauaaa

SEQ ID NO: 1484748 - RNA, 22 nt, Human
uauaccaaagcacauuuuaaaa

SEQ ID NO: 1484749 - RNA, 19 nt, Human
uauaauuuugugaagcaaa

SEQ ID NO: 1484750 - RNA, 13 nt, Human
uauauaucaaaua

SEQ ID NO: 1484751 - RNA, 14 nt, Human
uauauauauauaug

SEQ ID NO: 1484752 - RNA, 15 nt, Human
uauauauauauguac

SEQ ID NO: 1484753 - RNA, 16 nt, Human
uauauauagcagcuuu

SEQ ID NO: 1484754 - RNA, 16 nt, Human
uauauauauauaugua

SEQ ID NO: 1484755 - RNA, 21 nt, Human
uauauauuuuuuucugaaauu

SEQ ID NO: 1484756 - RNA, 22 nt, Human
uauauauuuuuuucugaaauuu

SEQ ID NO: 1484757 - RNA, 23 nt, Human
uauauauuuuuuucugaaauuuc

SEQ ID NO: 1484758 - RNA, 20 nt, Human
uauauccaaaagcuuuuuau

SEQ ID NO: 1484759 - RNA, 14 nt, Human
uauagcuaaguaca

SEQ ID NO: 1484760 - RNA, 16 nt, Human
uaguuuuauaugcuuc

SEQ ID NO: 1484761 - RNA, 13 nt, Human
uaguucugccagg

SEQ ID NO: 1484762 - RNA, 14 nt, Human
uaguucugccagga

SEQ ID NO: 1484763 - RNA, 22 nt, Human
uaguuagccaauauuuuucuua

SEQ ID NO: 1484764 - RNA, 19 nt, Human
uagugaucaaauugugcag

SEQ ID NO: 1484765 - RNA, 16 nt, Human
uagucucuuuaaaagg

SEQ ID NO: 1484766 - RNA, 18 nt, Human
uagucucuuuaaaaggaa

SEQ ID NO: 1484767 - RNA, 22 nt, Human
uagugagcagucaggaaagaga

SEQ ID NO: 1484768 - RNA, 22 nt, Human
acaagcucacagaccuuugaac

SEQ ID NO: 1484769 - RNA, 21 nt, Human
acaccuacuagucaccagaga

SEQ ID NO: 1484770 - RNA, 18 nt, Human
acaccguucauucaggca

SEQ ID NO: 1484771 - RNA, 22 nt, Human
acaccaggauagagacuggaac

SEQ ID NO: 1484772 - RNA, 21 nt, Human
acaccaggcuugccugcaggc

SEQ ID NO: 1484773 - RNA, 12 nt, Human
uauaaaagccug

SEQ ID NO: 1484774 - RNA, 17 nt, Human
uauaaaagccuguuuaa

SEQ ID NO: 1484775 - RNA, 14 nt, Human
uauaaaagccuguu

SEQ ID NO: 1484776 - RNA, 21 nt, Human
uauaaaauaauuuuuauauuu

SEQ ID NO: 1484777 - RNA, 22 nt, Human
uauaaaauaauuuuuauauuug

SEQ ID NO: 1484778 - RNA, 19 nt, Human
uauaaaagccuguuuaaga

SEQ ID NO: 1484779 - RNA, 23 nt, Human
uauaaaauaauuuuuauauuuga

SEQ ID NO: 1484780 - RNA, 22 nt, Human
aauucuuuaaaauuacaacuaa

SEQ ID NO: 1484781 - RNA, 17 nt, Human
aauucuuuaaaauuaca

SEQ ID NO: 1484782 - RNA, 23 nt, Human
aauucuucugaacucaaacugag

SEQ ID NO: 1484783 - RNA, 14 nt, Human
aauucuuucauuuu

SEQ ID NO: 1484784 - RNA, 19 nt, Human
aauucuuaugccauauaau

SEQ ID NO: 1484785 - RNA, 21 nt, Human
aauucuucccuaucuuugcca

SEQ ID NO: 1484786 - RNA, 13 nt, Human
aauucuucugaac

SEQ ID NO: 1484787 - RNA, 11 nt, Human
aauucuucccu

SEQ ID NO: 1484788 - RNA, 15 nt, Human
aauucuucugaacuc

SEQ ID NO: 1484789 - RNA, 18 nt, Human
aauucuucugaacucaaa

SEQ ID NO: 1484790 - RNA, 21 nt, Human
aauucuugccaaauauaaaua

SEQ ID NO: 1484791 - RNA, 20 nt, Human
uacucuuauaucuauauuuu

SEQ ID NO: 1484792 - RNA, 22 nt, Human
uacucuuauaucuauauuuuac

SEQ ID NO: 1484793 - RNA, 14 nt, Human
uacucuucuugaaa

SEQ ID NO: 1484794 - RNA, 17 nt, Human
uacucuucuugaaauuu

SEQ ID NO: 1484795 - RNA, 18 nt, Human
uacucuucuugaaauuuu

SEQ ID NO: 1484796 - RNA, 22 nt, Human
uacuagucaccagagacuuuag

SEQ ID NO: 1484797 - RNA, 12 nt, Human
uacuauuaaaaa

SEQ ID NO: 1484798 - RNA, 17 nt, Human
uacuauaagaacuuuga

SEQ ID NO: 1484799 - RNA, 21 nt, Human
uacuagucaccagagacuuua

SEQ ID NO: 1484800 - RNA, 20 nt, Human
uacuagucaccagagacuuu

SEQ ID NO: 1484801 - RNA, 18 nt, Human
uacgugcucugugggucu

SEQ ID NO: 1484802 - RNA, 16 nt, Human
uacguauuuaauagca

SEQ ID NO: 1484803 - RNA, 19 nt, Human
uacgugggcauugucuuuu

SEQ ID NO: 1484804 - RNA, 18 nt, Human
aauuugagagaaauauga

SEQ ID NO: 1484805 - RNA, 20 nt, Human
aauuugagagaaauaugaag

SEQ ID NO: 1484806 - RNA, 13 nt, Human
aauuugaggacaa

SEQ ID NO: 1484807 - RNA, 20 nt, Human
aauuugaaacacuuugcaua

SEQ ID NO: 1484808 - RNA, 14 nt, Human
uacuucaaauccuu

SEQ ID NO: 1484809 - RNA, 19 nt, Human
uacuucaaauccuugaaga

SEQ ID NO: 1484810 - RNA, 19 nt, Human
aauuugauaugugaacagu

SEQ ID NO: 1484811 - RNA, 20 nt, Human
uacuuauuuuugacaguguu

SEQ ID NO: 1484812 - RNA, 15 nt, Human
aauuugauaugugaa

SEQ ID NO: 1484813 - RNA, 16 nt, Human
aauuugauaugugaac

SEQ ID NO: 1484814 - RNA, 18 nt, Human
aauuugauaugugaacag

SEQ ID NO: 1484815 - RNA, 14 nt, Human
aauuugaggacaac

SEQ ID NO: 1484816 - RNA, 16 nt, Human
aauuuagaaaacuuua

SEQ ID NO: 1484817 - RNA, 15 nt, Human
aauuuagaaaacuuu

SEQ ID NO: 1484818 - RNA, 14 nt, Human
aauuuagaaaucau

SEQ ID NO: 1484819 - RNA, 15 nt, Human
aauuuagaaaucauu

SEQ ID NO: 1484820 - RNA, 17 nt, Human
aauuuagaaaucauuuu

SEQ ID NO: 1484821 - RNA, 20 nt, Human
aauuuagaaaucauuuugca

SEQ ID NO: 1484822 - RNA, 21 nt, Human
aauuuagaaaucauuuugcaa

SEQ ID NO: 1484823 - RNA, 17 nt, Human
aauuuagacuucaagca

SEQ ID NO: 1484824 - RNA, 18 nt, Human
aauuuauccugaaauuuc

SEQ ID NO: 1484825 - RNA, 19 nt, Human
aauuuauccugaaauuuca

SEQ ID NO: 1484826 - RNA, 23 nt, Human
aauuuauccugaaauuucagauu

SEQ ID NO: 1484827 - RNA, 21 nt, Human
aauuuaugaauugaauuaucu

SEQ ID NO: 1484828 - RNA, 23 nt, Human
aauuuaugaauugaauuaucuug

SEQ ID NO: 1484829 - RNA, 16 nt, Human
aauuucuaccauuuca

SEQ ID NO: 1484830 - RNA, 18 nt, Human
aauuucuaccauuucaga

SEQ ID NO: 1484831 - RNA, 15 nt, Human
aauuuaaauagcuuu

SEQ ID NO: 1484832 - RNA, 22 nt, Human
aauuuaaaguuguuugugccuu

SEQ ID NO: 1484833 - RNA, 16 nt, Human
aauuuaaauagcuuuu

SEQ ID NO: 1484834 - RNA, 16 nt, Human
aauuuacaucauuucu

SEQ ID NO: 1484835 - RNA, 19 nt, Human
aauuguuuuaucugaauuu

SEQ ID NO: 1484836 - RNA, 22 nt, Human
aauuguuuuaucugaauuuuua

SEQ ID NO: 1484837 - RNA, 22 nt, Human
aauuuaaacuauaagcaagaag

SEQ ID NO: 1484838 - RNA, 23 nt, Human
aauugugugaaagguacuucaaa

SEQ ID NO: 1484839 - RNA, 13 nt, Human
uacuguaagaaaa

SEQ ID NO: 1484840 - RNA, 23 nt, Human
aauugcuauguuuugacauuuuu

SEQ ID NO: 1484841 - RNA, 20 nt, Human
aauuguguuuauaauuuuaa

SEQ ID NO: 1484842 - RNA, 22 nt, Human
uagaagagagagguugaaaaac

SEQ ID NO: 1484843 - RNA, 14 nt, Human
uagaagagagaggu

SEQ ID NO: 1484844 - RNA, 21 nt, Human
uacuucaaauccuugaagauu

SEQ ID NO: 1484845 - RNA, 16 nt, Human
uacuucaugcugucua

SEQ ID NO: 1484846 - RNA, 14 nt, Human
uagaacuagccaaa

SEQ ID NO: 1484847 - RNA, 23 nt, Human
uagaagucacauuccugaacagg

SEQ ID NO: 1484848 - RNA, 22 nt, Human
uagaagccccguuauaacuccu

SEQ ID NO: 1484849 - RNA, 17 nt, Human
uagaauugaguguuuaa

SEQ ID NO: 1484850 - RNA, 20 nt, Human
uagaauugaguguuuaaagu

SEQ ID NO: 1484851 - RNA, 19 nt, Human
uagaauuugauaugugaac

SEQ ID NO: 1484852 - RNA, 13 nt, Human
uagacaagccaga

SEQ ID NO: 1484853 - RNA, 19 nt, Human
uagaauugaguguuuaaag

SEQ ID NO: 1484854 - RNA, 18 nt, Human
uagacaauugagguaagu

SEQ ID NO: 1484855 - RNA, 15 nt, Human
uagacaauugaggua

SEQ ID NO: 1484856 - RNA, 22 nt, Human
uagacaaguccagccuggcaag

SEQ ID NO: 1484857 - RNA, 14 nt, Human
uagacaagccagaa

SEQ ID NO: 1484858 - RNA, 15 nt, Human
uagacaagccagaac

SEQ ID NO: 1484859 - RNA, 19 nt, Human
uagacaagccagaacuuga

SEQ ID NO: 1484860 - RNA, 19 nt, Human
aauuuuuauauuugaaaua

SEQ ID NO: 1484861 - RNA, 17 nt, Human
aauuuuaaacaaagguu

SEQ ID NO: 1484862 - RNA, 14 nt, Human
aauuuuaaacaaag

SEQ ID NO: 1484863 - RNA, 19 nt, Human
aauuuuaaccuaugauauu

SEQ ID NO: 1484864 - RNA, 22 nt, Human
aauuuuuauuuuugcugagacu

SEQ ID NO: 1484865 - RNA, 19 nt, Human
aauuuguacuauuuaacug

SEQ ID NO: 1484866 - RNA, 19 nt, Human
aauuuuuucucuaggaaau

SEQ ID NO: 1484867 - RNA, 18 nt, Human
aauuuuuuaucaugcaug

SEQ ID NO: 1484868 - RNA, 20 nt, Human
aauuuuuuaucaugcauguc

SEQ ID NO: 1484869 - RNA, 13 nt, Human
aauuuuuuucacc

SEQ ID NO: 1484870 - RNA, 22 nt, Human
aauuuuuucucuaggaaauauu

SEQ ID NO: 1484871 - RNA, 13 nt, Human
aauuuuuguagua

SEQ ID NO: 1484872 - RNA, 19 nt, Human
acaaaaaaaaaauuugcca

SEQ ID NO: 1484873 - RNA, 20 nt, Human
aauuuuuuucaccuagauuu

SEQ ID NO: 1484874 - RNA, 20 nt, Human
aauuuuuuuccuuaccuuuu

SEQ ID NO: 1484875 - RNA, 19 nt, Human
uagcauuuguguugaagag

SEQ ID NO: 1484876 - RNA, 15 nt, Human
acaaauuaucuuaaa

SEQ ID NO: 1484877 - RNA, 18 nt, Human
acaaauucugucucugga

SEQ ID NO: 1484878 - RNA, 14 nt, Human
acaacaauccuucu

SEQ ID NO: 1484879 - RNA, 15 nt, Human
acaagaagcauuuug

SEQ ID NO: 1484880 - RNA, 17 nt, Human
acaagaagcauuuugua

SEQ ID NO: 1484881 - RNA, 18 nt, Human
acaagaagcauuuuguaa

SEQ ID NO: 1484882 - RNA, 18 nt, Human
acaagcacuaaacaaaga

SEQ ID NO: 1484883 - RNA, 21 nt, Human
acaagcauucugucuugaagg

SEQ ID NO: 1484884 - RNA, 22 nt, Human
acaagccagaacuugacccuga

SEQ ID NO: 1484885 - RNA, 14 nt, Human
acaagccagaacuu

SEQ ID NO: 1484886 - RNA, 21 nt, Human
uagcaugucgucaaagcugaa

SEQ ID NO: 1484887 - RNA, 20 nt, Human
uagaugcaguucugaagaag

SEQ ID NO: 1484888 - RNA, 13 nt, Human
uagauuuucugcu

SEQ ID NO: 1484889 - RNA, 15 nt, Human
uagaggaagcagcca

SEQ ID NO: 1484890 - RNA, 16 nt, Human
uagauauuggacaaag

SEQ ID NO: 1484891 - RNA, 17 nt, Human
uagaugcaguucugaag

SEQ ID NO: 1484892 - RNA, 19 nt, Human
uagaugcaguucugaagaa

SEQ ID NO: 1484893 - RNA, 18 nt, Human
acaaaaagaaaagaaaau

SEQ ID NO: 1484894 - RNA, 14 nt, Human
acaaaaagaaaaga

SEQ ID NO: 1484895 - RNA, 14 nt, Human
uagagcacugccac

SEQ ID NO: 1484896 - RNA, 17 nt, Human
uagagcacugccaccag

SEQ ID NO: 1484897 - RNA, 16 nt, Human
uagagcacugccacca

SEQ ID NO: 1484898 - RNA, 23 nt, Human
uaccccaccucccucaaccucau

SEQ ID NO: 1484899 - RNA, 16 nt, Human
uacccccagcugugcu

SEQ ID NO: 1484900 - RNA, 16 nt, Human
uaccauauacagcuca

SEQ ID NO: 1484901 - RNA, 20 nt, Human
uaccaucacugaguuuucca

SEQ ID NO: 1484902 - RNA, 17 nt, Human
uaccaucacugaguuuu

SEQ ID NO: 1484903 - RNA, 17 nt, Human
uaccacugcugauauuu

SEQ ID NO: 1484904 - RNA, 20 nt, Human
uaccacugcugauauuuucu

SEQ ID NO: 1484905 - RNA, 19 nt, Human
uaccagagaaaaagggagg

SEQ ID NO: 1484906 - RNA, 22 nt, Human
uaccacugcugauauuuucucu

SEQ ID NO: 1484907 - RNA, 21 nt, Human
uaccacugcugauauuuucuc

SEQ ID NO: 1484908 - RNA, 13 nt, Human
uaccagaaagcag

SEQ ID NO: 1484909 - RNA, 20 nt, Human
uacauuuauaguuguaacua

SEQ ID NO: 1484910 - RNA, 18 nt, Human
aauguugacaugggacau

SEQ ID NO: 1484911 - RNA, 14 nt, Human
aauguugaauuuug

SEQ ID NO: 1484912 - RNA, 19 nt, Human
aauguugauuacagugcag

SEQ ID NO: 1484913 - RNA, 19 nt, Human
aauuaacaugaauauuuag

SEQ ID NO: 1484914 - RNA, 20 nt, Human
aauuaagaaaggauaaaguu

SEQ ID NO: 1484915 - RNA, 15 nt, Human
uacauuguauauaug

SEQ ID NO: 1484916 - RNA, 21 nt, Human
uacauuguuaccucuauauac

SEQ ID NO: 1484917 - RNA, 17 nt, Human
uacauuguuaccucuau

SEQ ID NO: 1484918 - RNA, 22 nt, Human
uacauguuugcaccuuucuagu

SEQ ID NO: 1484919 - RNA, 12 nt, Human
uacauguuugca

SEQ ID NO: 1484920 - RNA, 13 nt, Human
uacauguuugcac

SEQ ID NO: 1484921 - RNA, 15 nt, Human
uacauuaauuaucua

SEQ ID NO: 1484922 - RNA, 17 nt, Human
uacauguacugauuacu

SEQ ID NO: 1484923 - RNA, 23 nt, Human
uacauggcuggagcuagaauuug

SEQ ID NO: 1484924 - RNA, 15 nt, Human
uacaugguguuugug

SEQ ID NO: 1484925 - RNA, 20 nt, Human
uacaguggggaaugaagaua

SEQ ID NO: 1484926 - RNA, 14 nt, Human
uacagucuaaagcu

SEQ ID NO: 1484927 - RNA, 15 nt, Human
uacagucuaaagcug

SEQ ID NO: 1484928 - RNA, 22 nt, Human
uacagcaacaauuuaugaauug

SEQ ID NO: 1484929 - RNA, 19 nt, Human
uacagcaacaauuuaugaa

SEQ ID NO: 1484930 - RNA, 20 nt, Human
uacagcaacaauuuaugaau

SEQ ID NO: 1484931 - RNA, 16 nt, Human
aauguaucauagaaau

SEQ ID NO: 1484932 - RNA, 18 nt, Human
aauguaucauagaaaugu

SEQ ID NO: 1484933 - RNA, 19 nt, Human
aauguaucauagaaaugua

SEQ ID NO: 1484934 - RNA, 22 nt, Human
aauguaucauagaaauguaacu

SEQ ID NO: 1484935 - RNA, 22 nt, Human
aauguaggagacuguuuggaaa

SEQ ID NO: 1484936 - RNA, 12 nt, Human
uacauacagaau

SEQ ID NO: 1484937 - RNA, 20 nt, Human
uacauacagaauuacuguaa

SEQ ID NO: 1484938 - RNA, 14 nt, Human
uacauagaugcuua

SEQ ID NO: 1484939 - RNA, 13 nt, Human
aauguaagacaaa

SEQ ID NO: 1484940 - RNA, 23 nt, Human
uacaaugaaaaggacuuuauaga

SEQ ID NO: 1484941 - RNA, 16 nt, Human
uacaauaauucuauga

SEQ ID NO: 1484942 - RNA, 14 nt, Human
uacaccuaugucau

SEQ ID NO: 1484943 - RNA, 17 nt, Human
uacaccuaugucauuuc

SEQ ID NO: 1484944 - RNA, 21 nt, Human
uacaccuaugucauuucauuu

SEQ ID NO: 1484945 - RNA, 13 nt, Human
uaauucauguugc

SEQ ID NO: 1484946 - RNA, 15 nt, Human
uaauuugacuagaaa

SEQ ID NO: 1484947 - RNA, 16 nt, Human
uaauuugacuagaaaa

SEQ ID NO: 1484948 - RNA, 15 nt, Human
uaauuugagagaaau

SEQ ID NO: 1484949 - RNA, 18 nt, Human
uaauuugaggacaaccau

SEQ ID NO: 1484950 - RNA, 22 nt, Human
uaauuugaggacaaccauucca

SEQ ID NO: 1484951 - RNA, 16 nt, Human
uacaagccugcacaau

SEQ ID NO: 1484952 - RNA, 13 nt, Human
uacaaguuagaaa

SEQ ID NO: 1484953 - RNA, 15 nt, Human
uacaaguuagaaaac

SEQ ID NO: 1484954 - RNA, 21 nt, Human
uacaagcauucugucuugaag

SEQ ID NO: 1484955 - RNA, 14 nt, Human
uaauuauccaggaa

SEQ ID NO: 1484956 - RNA, 23 nt, Human
uaauuauaccgcuaucauuccaa

SEQ ID NO: 1484957 - RNA, 19 nt, Human
uaauucaauucaaagcugu

SEQ ID NO: 1484958 - RNA, 15 nt, Human
uaauguaagacaaau

SEQ ID NO: 1484959 - RNA, 13 nt, Human
uaaugaacaaaug

SEQ ID NO: 1484960 - RNA, 14 nt, Human
uaaugaacaaaugg

SEQ ID NO: 1484961 - RNA, 16 nt, Human
aaucuugucaugugua

SEQ ID NO: 1484962 - RNA, 19 nt, Human
aaucuugguugaugccaaa

SEQ ID NO: 1484963 - RNA, 13 nt, Human
aaucuugguuugc

SEQ ID NO: 1484964 - RNA, 15 nt, Human
aaucuugucaugugu

SEQ ID NO: 1484965 - RNA, 16 nt, Human
aaucuuuuauaggauu

SEQ ID NO: 1484966 - RNA, 13 nt, Human
uaaugugauauua

SEQ ID NO: 1484967 - RNA, 22 nt, Human
uaauccaagcaaaugugaauca

SEQ ID NO: 1484968 - RNA, 22 nt, Human
uaaucauucuuauuucaugaaa

SEQ ID NO: 1484969 - RNA, 20 nt, Human
uaaucauucuuauuucauga

SEQ ID NO: 1484970 - RNA, 17 nt, Human
uaaucuuuaauuuuaca

SEQ ID NO: 1484971 - RNA, 13 nt, Human
uaaucuuucacag

SEQ ID NO: 1484972 - RNA, 14 nt, Human
uaaucuucugccuu

SEQ ID NO: 1484973 - RNA, 15 nt, Human
uaaucuucugccuuc

SEQ ID NO: 1484974 - RNA, 16 nt, Human
uaauauuccucaguuc

SEQ ID NO: 1484975 - RNA, 16 nt, Human
uaauauugauuuauua

SEQ ID NO: 1484976 - RNA, 19 nt, Human
uaaucagguccucagagaa

SEQ ID NO: 1484977 - RNA, 22 nt, Human
uaaucagguccucagagaauuu

SEQ ID NO: 1484978 - RNA, 18 nt, Human
uaauacuugcuuuggaaa

SEQ ID NO: 1484979 - RNA, 20 nt, Human
uaauacauuccaacucguau

SEQ ID NO: 1484980 - RNA, 16 nt, Human
uaauaccacagcuuuu

SEQ ID NO: 1484981 - RNA, 21 nt, Human
uaauacagcaacaauuuauga

SEQ ID NO: 1484982 - RNA, 22 nt, Human
uaauacagcaacaauuuaugaa

SEQ ID NO: 1484983 - RNA, 23 nt, Human
aauacaucccuuaccugggaaag

SEQ ID NO: 1484984 - RNA, 18 nt, Human
uaauacagcaacaauuua

SEQ ID NO: 1484985 - RNA, 19 nt, Human
uaacaaugcuguauuuuaa

SEQ ID NO: 1484986 - RNA, 16 nt, Human
aagcuuuuaugugaaa

SEQ ID NO: 1484987 - RNA, 19 nt, Human
aaggaaaaaauaacaauga

SEQ ID NO: 1484988 - RNA, 16 nt, Human
aaggaaaaaauaacaa

SEQ ID NO: 1484989 - RNA, 22 nt, Human
aagcuuuggugagaaccugggu

SEQ ID NO: 1484990 - RNA, 19 nt, Human
aagcuuuggugagaaccug

SEQ ID NO: 1484991 - RNA, 15 nt, Human
aagcucugaagaacu

SEQ ID NO: 1484992 - RNA, 22 nt, Human
guguuuauccuaucucuccaac

SEQ ID NO: 1484993 - RNA, 13 nt, Human
guugaauuuuaca

SEQ ID NO: 1484994 - RNA, 20 nt, Human
guugaauuuuuuuuaacauu

SEQ ID NO: 1484995 - RNA, 21 nt, Human
guugaauuuuuuuuaacauuc

SEQ ID NO: 1484996 - RNA, 23 nt, Human
guugaauuuuuuuuaacauuccu

SEQ ID NO: 1484997 - RNA, 13 nt, Human
guugacaugggac

SEQ ID NO: 1484998 - RNA, 12 nt, Human
guugagacagag

SEQ ID NO: 1484999 - RNA, 15 nt, Human
guugagagugugacc

SEQ ID NO: 1485000 - RNA, 17 nt, Human
guugagagugugaccaa

SEQ ID NO: 1485001 - RNA, 15 nt, Human
guugagacaagaaaa

SEQ ID NO: 1485002 - RNA, 20 nt, Human
aaggccugguguuucuugau

SEQ ID NO: 1485003 - RNA, 15 nt, Human
aaggccuccuggcug

SEQ ID NO: 1485004 - RNA, 20 nt, Human
guugggagagggcgcaggcc

SEQ ID NO: 1485005 - RNA, 21 nt, Human
guuggggacacauguauuugg

SEQ ID NO: 1485006 - RNA, 18 nt, Human
guugggacuacaggcgug

SEQ ID NO: 1485007 - RNA, 22 nt, Human
aaggagcaagucagaauagaaa

SEQ ID NO: 1485008 - RNA, 17 nt, Human
aaggaaggcuccaucuc

SEQ ID NO: 1485009 - RNA, 17 nt, Human
aaggaaggcagggagga

SEQ ID NO: 1485010 - RNA, 15 nt, Human
aaggaagcugugcgu

SEQ ID NO: 1485011 - RNA, 21 nt, Human
aaggauaaaguugguaaaccu

SEQ ID NO: 1485012 - RNA, 23 nt, Human
aaggaggauggcauauaauacaa

SEQ ID NO: 1485013 - RNA, 23 nt, Human
aaggauaaaguugguaaaccuuu

SEQ ID NO: 1485014 - RNA, 13 nt, Human
aaggauaaugaau

SEQ ID NO: 1485015 - RNA, 22 nt, Human
aaggaggacccaggacaggauc

SEQ ID NO: 1485016 - RNA, 21 nt, Human
aaggaggacccaggacaggau

SEQ ID NO: 1485017 - RNA, 18 nt, Human
aaggaggacccaggacag

SEQ ID NO: 1485018 - RNA, 17 nt, Human
aaggaggacccaggaca

SEQ ID NO: 1485019 - RNA, 15 nt, Human
aaggaggacccagga

SEQ ID NO: 1485020 - RNA, 14 nt, Human
aaggaggacccagg

SEQ ID NO: 1485021 - RNA, 13 nt, Human
aaggaggacccag

SEQ ID NO: 1485022 - RNA, 23 nt, Human
aaggagcagagcugauggagaag

SEQ ID NO: 1485023 - RNA, 20 nt, Human
aagucacauuccugaacagg

SEQ ID NO: 1485024 - RNA, 18 nt, Human
aagucaauguuuucaguu

SEQ ID NO: 1485025 - RNA, 17 nt, Human
aagucaauguuuucagu

SEQ ID NO: 1485026 - RNA, 23 nt, Human
aaguauguuagugcaaauuguca

SEQ ID NO: 1485027 - RNA, 17 nt, Human
guuuuuuuguuauuaaa

SEQ ID NO: 1485028 - RNA, 14 nt, Human
guuuuuuucuaaua

SEQ ID NO: 1485029 - RNA, 15 nt, Human
guuuuuuuuuaaaga

SEQ ID NO: 1485030 - RNA, 23 nt, Human
guuuuuuuuuaaaaaagaaacau

SEQ ID NO: 1485031 - RNA, 16 nt, Human
guuuuuuaguugaauu

SEQ ID NO: 1485032 - RNA, 14 nt, Human
guuuuuuguaccaa

SEQ ID NO: 1485033 - RNA, 19 nt, Human
aagugacuuuggcugcaug

SEQ ID NO: 1485034 - RNA, 19 nt, Human
aagugacuaauggcaugag

SEQ ID NO: 1485035 - RNA, 15 nt, Human
aagugaauuugccug

SEQ ID NO: 1485036 - RNA, 16 nt, Human
aagugaauuugccugu

SEQ ID NO: 1485037 - RNA, 20 nt, Human
aagugaauuugccuguaaca

SEQ ID NO: 1485038 - RNA, 17 nt, Human
aagugaauuugccugua

SEQ ID NO: 1485039 - RNA, 22 nt, Human
aagucuuauauauuguagauaa

SEQ ID NO: 1485040 - RNA, 15 nt, Human
guuuuauaauuuugu

SEQ ID NO: 1485041 - RNA, 22 nt, Human
guuuuauaauuuugugaagcaa

SEQ ID NO: 1485042 - RNA, 13 nt, Human
guuuuacuuuuaa

SEQ ID NO: 1485043 - RNA, 18 nt, Human
guuuuacuuuuaaacugu

SEQ ID NO: 1485044 - RNA, 21 nt, Human
guuuuacuuuuaaacugugua

SEQ ID NO: 1485045 - RNA, 17 nt, Human
guuugcacuaucuuuca

SEQ ID NO: 1485046 - RNA, 19 nt, Human
guuugcaucugaaaauuga

SEQ ID NO: 1485047 - RNA, 15 nt, Human
guuugccuuccagaa

SEQ ID NO: 1485048 - RNA, 16 nt, Human
guuguaaaccaaguga

SEQ ID NO: 1485049 - RNA, 13 nt, Human
aaguaaaagcaaa

SEQ ID NO: 1485050 - RNA, 21 nt, Human
aaguaaaagcaaaaaagaaaa

SEQ ID NO: 1485051 - RNA, 18 nt, Human
aaguaaaagcaaaaaaga

SEQ ID NO: 1485052 - RNA, 11 nt, Human
aagggucaggc

SEQ ID NO: 1485053 - RNA, 12 nt, Human
aagggucaggcc

SEQ ID NO: 1485054 - RNA, 13 nt, Human
aagggucaggccu

SEQ ID NO: 1485055 - RNA, 14 nt, Human
aagggucaggccuu

SEQ ID NO: 1485056 - RNA, 20 nt, Human
aagggucaggccuuugagcu

SEQ ID NO: 1485057 - RNA, 16 nt, Human
aagggucaggccuuug

SEQ ID NO: 1485058 - RNA, 14 nt, Human
aaggguugagcugg

SEQ ID NO: 1485059 - RNA, 19 nt, Human
aauaagguacaagaagcau

SEQ ID NO: 1485060 - RNA, 14 nt, Human
aauaagguugaaca

SEQ ID NO: 1485061 - RNA, 15 nt, Human
aauaagguacaagaa

SEQ ID NO: 1485062 - RNA, 22 nt, Human
aauaacguuuaagccaaaacaa

SEQ ID NO: 1485063 - RNA, 20 nt, Human
aauaaauauccuuuaauuga

SEQ ID NO: 1485064 - RNA, 15 nt, Human
aauaacaauaaaaga

SEQ ID NO: 1485065 - RNA, 15 nt, Human
aauaaaaaagauccc

SEQ ID NO: 1485066 - RNA, 20 nt, Human
uaaagugacccugcucucac

SEQ ID NO: 1485067 - RNA, 17 nt, Human
uaaagugacccugcucu

SEQ ID NO: 1485068 - RNA, 19 nt, Human
uaaagugacuaauggcaug

SEQ ID NO: 1485069 - RNA, 15 nt, Human
uaaagugauauuucc

SEQ ID NO: 1485070 - RNA, 16 nt, Human
uaaagugauauuuccc

SEQ ID NO: 1485071 - RNA, 12 nt, Human
aauaaaaauaau

SEQ ID NO: 1485072 - RNA, 14 nt, Human
aauaaaaauguuua

SEQ ID NO: 1485073 - RNA, 15 nt, Human
aauaaaaauguuuaa

SEQ ID NO: 1485074 - RNA, 22 nt, Human
aauaaaauccauacauuugugu

SEQ ID NO: 1485075 - RNA, 12 nt, Human
uaaauagcuuuu

SEQ ID NO: 1485076 - RNA, 13 nt, Human
uaaauaguauuuc

SEQ ID NO: 1485077 - RNA, 12 nt, Human
uaaauaguauuu

SEQ ID NO: 1485078 - RNA, 23 nt, Human
uaaauguuuuuuuuuaaagacuu

SEQ ID NO: 1485079 - RNA, 20 nt, Human
uaaauguuuuuuuuuaaaga

SEQ ID NO: 1485080 - RNA, 13 nt, Human
uaaauuuguacua

SEQ ID NO: 1485081 - RNA, 14 nt, Human
uaaauuuguacuau

SEQ ID NO: 1485082 - RNA, 19 nt, Human
uaaauuuguacuauuuaac

SEQ ID NO: 1485083 - RNA, 20 nt, Human
uaaauuuguacuauuuaacu

SEQ ID NO: 1485084 - RNA, 22 nt, Human
uaaauuuguacuauuuaacuga

SEQ ID NO: 1485085 - RNA, 13 nt, Human
uaacaaaaauaaa

SEQ ID NO: 1485086 - RNA, 20 nt, Human
uaacaaaaauaaaaacucuu

SEQ ID NO: 1485087 - RNA, 16 nt, Human
uaaauuuuuuuccuua

SEQ ID NO: 1485088 - RNA, 21 nt, Human
uaaauuuguacuauuuaacug

SEQ ID NO: 1485089 - RNA, 15 nt, Human
uaacaaugcuguauu

SEQ ID NO: 1485090 - RNA, 17 nt, Human
uaacaaugcuguauuuu

SEQ ID NO: 1485091 - RNA, 15 nt, Human
uaacaagccagauuu

SEQ ID NO: 1485092 - RNA, 15 nt, Human
uaacaaccaaagacu

SEQ ID NO: 1485093 - RNA, 13 nt, Human
uaaacgucuuaaa

SEQ ID NO: 1485094 - RNA, 17 nt, Human
uaaacgucuuaaauauu

SEQ ID NO: 1485095 - RNA, 13 nt, Human
uaaacuaaacacg

SEQ ID NO: 1485096 - RNA, 13 nt, Human
uaaaccuuuuuug

SEQ ID NO: 1485097 - RNA, 23 nt, Human
uaaacccauauuguaaaacaggu

SEQ ID NO: 1485098 - RNA, 16 nt, Human
uaaaccggaccaucuc

SEQ ID NO: 1485099 - RNA, 17 nt, Human
uaaaccgcuaaaagaaa

SEQ ID NO: 1485100 - RNA, 17 nt, Human
uaaacuauaagcaagaa

SEQ ID NO: 1485101 - RNA, 15 nt, Human
uaaacuauaagcaag

SEQ ID NO: 1485102 - RNA, 20 nt, Human
uaaacuaucuuggugaauuu

SEQ ID NO: 1485103 - RNA, 21 nt, Human
uaaacuaucuuggugaauuuu

SEQ ID NO: 1485104 - RNA, 22 nt, Human
uaaacuaucuuggugaauuuuu

SEQ ID NO: 1485105 - RNA, 14 nt, Human
uaaacucaaaauau

SEQ ID NO: 1485106 - RNA, 16 nt, Human
uaaacucaaaauauuu

SEQ ID NO: 1485107 - RNA, 19 nt, Human
uaaacucaaaauauuugua

SEQ ID NO: 1485108 - RNA, 21 nt, Human
uaaacucaaaauauuuguaca

SEQ ID NO: 1485109 - RNA, 22 nt, Human
uaaacucaaaauauuuguacau

SEQ ID NO: 1485110 - RNA, 23 nt, Human
uaaacucaaaauauuuguacaua

SEQ ID NO: 1485111 - RNA, 16 nt, Human
uaaagacuuuuaugau

SEQ ID NO: 1485112 - RNA, 15 nt, Human
uaaagaauuauuuug

SEQ ID NO: 1485113 - RNA, 16 nt, Human
uaaagaauuauuuugu

SEQ ID NO: 1485114 - RNA, 13 nt, Human
uaaagaauuauuu

SEQ ID NO: 1485115 - RNA, 17 nt, Human
uaaagaaauagaacaag

SEQ ID NO: 1485116 - RNA, 16 nt, Human
uaaagaaauagaacaa

SEQ ID NO: 1485117 - RNA, 15 nt, Human
uaaagaacauaaaua

SEQ ID NO: 1485118 - RNA, 22 nt, Human
uaaagauuuuuuaauaauuuag

SEQ ID NO: 1485119 - RNA, 12 nt, Human
uaaagauuuuuu

SEQ ID NO: 1485120 - RNA, 16 nt, Human
uaaagauuuuuuaaua

SEQ ID NO: 1485121 - RNA, 17 nt, Human
uaaagauuuuuuaauaa

SEQ ID NO: 1485122 - RNA, 20 nt, Human
uaaagauuuuuuaauaauuu

SEQ ID NO: 1485123 - RNA, 21 nt, Human
uaaagauuuuuuaauaauuua

SEQ ID NO: 1485124 - RNA, 18 nt, Human
uaaagauauuuuuaucuu

SEQ ID NO: 1485125 - RNA, 21 nt, Human
uaaagauauuuuuaucuuuau

SEQ ID NO: 1485126 - RNA, 22 nt, Human
uaaagauauuuuuaucuuuaua

SEQ ID NO: 1485127 - RNA, 22 nt, Human
aaguuuaguuugaggaauucuu

SEQ ID NO: 1485128 - RNA, 23 nt, Human
aaguuuagccccugaaagccaug

SEQ ID NO: 1485129 - RNA, 15 nt, Human
aaguuucaucauuuu

SEQ ID NO: 1485130 - RNA, 19 nt, Human
aaguuugcacuaucuuuca

SEQ ID NO: 1485131 - RNA, 21 nt, Human
aaguuugcacuaucuuucagc

SEQ ID NO: 1485132 - RNA, 20 nt, Human
aaguuugcacuaucuuucag

SEQ ID NO: 1485133 - RNA, 19 nt, Human
uaaaauuuuuaaucuuuaa

SEQ ID NO: 1485134 - RNA, 13 nt, Human
uaaacaaagguug

SEQ ID NO: 1485135 - RNA, 17 nt, Human
uaaaauuuuuaaucuuu

SEQ ID NO: 1485136 - RNA, 19 nt, Human
uaaaauuacaacuaaguga

SEQ ID NO: 1485137 - RNA, 17 nt, Human
uaaaauuacaacuaagu

SEQ ID NO: 1485138 - RNA, 15 nt, Human
uaaaauuacaacuaa

SEQ ID NO: 1485139 - RNA, 13 nt, Human
uaaaauuacaacu

SEQ ID NO: 1485140 - RNA, 20 nt, Human
aaguuuaauggugccuucau

SEQ ID NO: 1485141 - RNA, 16 nt, Human
aaguuuaccagaaagc

SEQ ID NO: 1485142 - RNA, 21 nt, Human
aaguuuagccccugaaagcca

SEQ ID NO: 1485143 - RNA, 17 nt, Human
guuuuuuuuuaaagacu

SEQ ID NO: 1485144 - RNA, 23 nt, Human
aaguguuucauaaauuugagagu

SEQ ID NO: 1485145 - RNA, 13 nt, Human
aaguguuuucucu

SEQ ID NO: 1485146 - RNA, 22 nt, Human
aaguguuuucucugaacacauu

SEQ ID NO: 1485147 - RNA, 14 nt, Human
aaguguuuucucug

SEQ ID NO: 1485148 - RNA, 16 nt, Human
aaguuacauguuugca

SEQ ID NO: 1485149 - RNA, 19 nt, Human
aaguuacauguuugcaccu

SEQ ID NO: 1485150 - RNA, 20 nt, Human
aaguuacauguuugcaccuu

SEQ ID NO: 1485151 - RNA, 22 nt, Human
aaguuagaacuagccaaaccag

SEQ ID NO: 1485152 - RNA, 17 nt, Human
guguugaaaauguucag

SEQ ID NO: 1485153 - RNA, 21 nt, Human
guguuuaaaguucaacauguu

SEQ ID NO: 1485154 - RNA, 16 nt, Human
guguugaaaauguuca

SEQ ID NO: 1485155 - RNA, 15 nt, Human
guguguguauauaua

SEQ ID NO: 1485156 - RNA, 15 nt, Human
guguguguguguaug

SEQ ID NO: 1485157 - RNA, 19 nt, Human
aagcaaguaaaaaggcuaa

SEQ ID NO: 1485158 - RNA, 21 nt, Human
aagcaagcauucagaagaaaa

SEQ ID NO: 1485159 - RNA, 13 nt, Human
aagcaagcuuaau

SEQ ID NO: 1485160 - RNA, 15 nt, Human
aagcaagcauucaga

SEQ ID NO: 1485161 - RNA, 19 nt, Human
aagcaagcauucagaagaa

SEQ ID NO: 1485162 - RNA, 20 nt, Human
aagcaaguaaaaaggcuaaa

SEQ ID NO: 1485163 - RNA, 16 nt, Human
aagcaaguauuagaau

SEQ ID NO: 1485164 - RNA, 20 nt, Human
aagcaaaugugaaucauuuu

SEQ ID NO: 1485165 - RNA, 14 nt, Human
aagcaaaugugaau

SEQ ID NO: 1485166 - RNA, 13 nt, Human
aagcaaaugugaa

SEQ ID NO: 1485167 - RNA, 17 nt, Human
aagcaaaucgaaugaaa

SEQ ID NO: 1485168 - RNA, 18 nt, Human
aagcaaaucgaaugaaau

SEQ ID NO: 1485169 - RNA, 19 nt, Human
aagcaaaauuuuuucucua

SEQ ID NO: 1485170 - RNA, 13 nt, Human
aagaugaucauuu

SEQ ID NO: 1485171 - RNA, 15 nt, Human
aagaucacuuucuca

SEQ ID NO: 1485172 - RNA, 17 nt, Human
aagaucacuuucucagu

SEQ ID NO: 1485173 - RNA, 23 nt, Human
aagaucacuuucucaguuuucau

SEQ ID NO: 1485174 - RNA, 18 nt, Human
guggggggggugcugggc

SEQ ID NO: 1485175 - RNA, 22 nt, Human
gugggauuaugggucacaggaa

SEQ ID NO: 1485176 - RNA, 17 nt, Human
guggcuuucagagccuc

SEQ ID NO: 1485177 - RNA, 19 nt, Human
guggcuuuaggagcagugg

SEQ ID NO: 1485178 - RNA, 18 nt, Human
aagagcuacguauuuaau

SEQ ID NO: 1485179 - RNA, 21 nt, Human
gugggagaccggccugccagg

SEQ ID NO: 1485180 - RNA, 22 nt, Human
gugggagaccggccugccagga

SEQ ID NO: 1485181 - RNA, 23 nt, Human
gugggagaccggccugccaggag

SEQ ID NO: 1485182 - RNA, 13 nt, Human
aagaccauuuuuc

SEQ ID NO: 1485183 - RNA, 18 nt, Human
aagacugcuguggccagg

SEQ ID NO: 1485184 - RNA, 19 nt, Human
aagacugcuguggccagga

SEQ ID NO: 1485185 - RNA, 20 nt, Human
aagacugcuguggccaggag

SEQ ID NO: 1485186 - RNA, 21 nt, Human
aagacugcuguggccaggagg

SEQ ID NO: 1485187 - RNA, 22 nt, Human
aagacugcuguggccaggaggu

SEQ ID NO: 1485188 - RNA, 15 nt, Human
aagagauuccugagc

SEQ ID NO: 1485189 - RNA, 20 nt, Human
aagagcuacguauuuaauag

SEQ ID NO: 1485190 - RNA, 12 nt, Human
aagagcucagga

SEQ ID NO: 1485191 - RNA, 13 nt, Human
aagagcucaggau

SEQ ID NO: 1485192 - RNA, 24 nt, Human
aagaauuucuaggacugaauuaug

SEQ ID NO: 1485193 - RNA, 18 nt, Human
aagaauguuaagacuuga

SEQ ID NO: 1485194 - RNA, 11 nt, Human
aagaauuauuu

SEQ ID NO: 1485195 - RNA, 14 nt, Human
aagaauuauuuugu

SEQ ID NO: 1485196 - RNA, 16 nt, Human
aagacaaaaagcuacu

SEQ ID NO: 1485197 - RNA, 13 nt, Human
guggcagcaacaa

SEQ ID NO: 1485198 - RNA, 21 nt, Human
aagaaucacaauaauuuucua

SEQ ID NO: 1485199 - RNA, 19 nt, Human
aagaauguuaagacuugac

SEQ ID NO: 1485200 - RNA, 12 nt, Human
aagaauguuaag

SEQ ID NO: 1485201 - RNA, 19 nt, Human
guggcaagugaauuugccu

SEQ ID NO: 1485202 - RNA, 17 nt, Human
guggcacuggggcaggg

SEQ ID NO: 1485203 - RNA, 18 nt, Human
guggcacuggggcagggg

SEQ ID NO: 1485204 - RNA, 19 nt, Human
guggacaccugcccugccc

SEQ ID NO: 1485205 - RNA, 18 nt, Human
guggacaccugcccugcc

SEQ ID NO: 1485206 - RNA, 17 nt, Human
guggacaccugcccugc

SEQ ID NO: 1485207 - RNA, 16 nt, Human
guggacaccugcccug

SEQ ID NO: 1485208 - RNA, 14 nt, Human
guggacaccugccc

SEQ ID NO: 1485209 - RNA, 13 nt, Human
guggacaccugcc

SEQ ID NO: 1485210 - RNA, 12 nt, Human
guggacaccugc

SEQ ID NO: 1485211 - RNA, 11 nt, Human
guggacaccug

SEQ ID NO: 1485212 - RNA, 19 nt, Human
gugcugggccccugccucu

SEQ ID NO: 1485213 - RNA, 16 nt, Human
gugcugggccccugcc

SEQ ID NO: 1485214 - RNA, 17 nt, Human
aagaagggacugagaga

SEQ ID NO: 1485215 - RNA, 22 nt, Human
aagaaguaaaagcaaaaaagaa

SEQ ID NO: 1485216 - RNA, 14 nt, Human
aagaaguaaaagca

SEQ ID NO: 1485217 - RNA, 20 nt, Human
gugcacuaauguguaagaca

SEQ ID NO: 1485218 - RNA, 22 nt, Human
gugcacuaauguguaagacaaa

SEQ ID NO: 1485219 - RNA, 21 nt, Human
aacuugguuuugcuacauaau

SEQ ID NO: 1485220 - RNA, 16 nt, Human
aacuugguuuugcuac

SEQ ID NO: 1485221 - RNA, 22 nt, Human
aacuugguuuugcuacauaauu

SEQ ID NO: 1485222 - RNA, 18 nt, Human
aacuugcuuaucaacuuc

SEQ ID NO: 1485223 - RNA, 19 nt, Human
aagaaaauuuuuguaguag

SEQ ID NO: 1485224 - RNA, 16 nt, Human
aagaaagucagccaua

SEQ ID NO: 1485225 - RNA, 13 nt, Human
aagaaaguccacc

SEQ ID NO: 1485226 - RNA, 15 nt, Human
aagaaauaaguuuuu

SEQ ID NO: 1485227 - RNA, 13 nt, Human
aagaaaauaucac

SEQ ID NO: 1485228 - RNA, 13 nt, Human
aagaaaaucacuu

SEQ ID NO: 1485229 - RNA, 22 nt, Human
aagaaaaucuauuuuguaacuu

SEQ ID NO: 1485230 - RNA, 22 nt, Human
aagaagcauuuuguaaguugaa

SEQ ID NO: 1485231 - RNA, 16 nt, Human
aagaagggacugagag

SEQ ID NO: 1485232 - RNA, 17 nt, Human
aagaaaacaucuuuaag

SEQ ID NO: 1485233 - RNA, 13 nt, Human
aagaaaacaucuu

SEQ ID NO: 1485234 - RNA, 20 nt, Human
aagaaaauaagagcucagga

SEQ ID NO: 1485235 - RNA, 18 nt, Human
gucgcccuggacugugug

SEQ ID NO: 1485236 - RNA, 20 nt, Human
gucgcccaugcuggagugca

SEQ ID NO: 1485237 - RNA, 14 nt, Human
gucgcccuggacug

SEQ ID NO: 1485238 - RNA, 15 nt, Human
gucuacuugcucagg

SEQ ID NO: 1485239 - RNA, 21 nt, Human
gucuaucaaccccagacacug

SEQ ID NO: 1485240 - RNA, 23 nt, Human
gucuaucaaccccagacacuggu

SEQ ID NO: 1485241 - RNA, 22 nt, Human
gucuaucaaccccagacacugg

SEQ ID NO: 1485242 - RNA, 13 nt, Human
gucgccaggcuag

SEQ ID NO: 1485243 - RNA, 20 nt, Human
guccuuggcaggcugauuuc

SEQ ID NO: 1485244 - RNA, 15 nt, Human
guccugcaccggggc

SEQ ID NO: 1485245 - RNA, 19 nt, Human
guccugcaccggggccugg

SEQ ID NO: 1485246 - RNA, 20 nt, Human
guccugcaccggggccuggg

SEQ ID NO: 1485247 - RNA, 21 nt, Human
aacauuacucugaaauuguaa

SEQ ID NO: 1485248 - RNA, 22 nt, Human
aaccaaaucacugaacuuugcu

SEQ ID NO: 1485249 - RNA, 21 nt, Human
gucuccaguauccacuuugca

SEQ ID NO: 1485250 - RNA, 15 nt, Human
gucucaaacuccuga

SEQ ID NO: 1485251 - RNA, 22 nt, Human
gucucaaacuccugaccucagg

SEQ ID NO: 1485252 - RNA, 22 nt, Human
guagcguuuuuuaaauguauac

SEQ ID NO: 1485253 - RNA, 18 nt, Human
guagcguuuuuuaaaugu

SEQ ID NO: 1485254 - RNA, 17 nt, Human
guagcguuuuuuaaaug

SEQ ID NO: 1485255 - RNA, 13 nt, Human
guagcguuuuuua

SEQ ID NO: 1485256 - RNA, 23 nt, Human
guagcgggggaggguaggcagga

SEQ ID NO: 1485257 - RNA, 19 nt, Human
guccguucacauguguggu

SEQ ID NO: 1485258 - RNA, 20 nt, Human
guccuaauaauaucccacug

SEQ ID NO: 1485259 - RNA, 14 nt, Human
aacauauuguugaa

SEQ ID NO: 1485260 - RNA, 20 nt, Human
aacauguuauuuguaauaga

SEQ ID NO: 1485261 - RNA, 16 nt, Human
aacauauauaacaaug

SEQ ID NO: 1485262 - RNA, 22 nt, Human
aacauagaaauugccugacgaa

SEQ ID NO: 1485263 - RNA, 15 nt, Human
aacauagacagaaga

SEQ ID NO: 1485264 - RNA, 16 nt, Human
aacauagacagaagaa

SEQ ID NO: 1485265 - RNA, 15 nt, Human
aacauauauauacua

SEQ ID NO: 1485266 - RNA, 20 nt, Human
aacauaaucuucugccuucu

SEQ ID NO: 1485267 - RNA, 21 nt, Human
aacagugagccugaauuuugu

SEQ ID NO: 1485268 - RNA, 17 nt, Human
aacagugaagacagaag

SEQ ID NO: 1485269 - RNA, 13 nt, Human
aacagugagccug

SEQ ID NO: 1485270 - RNA, 22 nt, Human
aacauaaucuucugccuucuca

SEQ ID NO: 1485271 - RNA, 16 nt, Human
aacagugaagacagaa

SEQ ID NO: 1485272 - RNA, 20 nt, Human
aacugaaaucauacuucuua

SEQ ID NO: 1485273 - RNA, 21 nt, Human
aacugaacaccauugaaggcu

SEQ ID NO: 1485274 - RNA, 22 nt, Human
aacugaacaccauugaaggcuu

SEQ ID NO: 1485275 - RNA, 23 nt, Human
aacugaacaccauugaaggcuua

SEQ ID NO: 1485276 - RNA, 16 nt, Human
aacucugcuugauuuu

SEQ ID NO: 1485277 - RNA, 20 nt, Human
gugagaaccuggguugcaga

SEQ ID NO: 1485278 - RNA, 15 nt, Human
gugagaaauuuaaac

SEQ ID NO: 1485279 - RNA, 22 nt, Human
gugagaaccuggguugcagaca

SEQ ID NO: 1485280 - RNA, 21 nt, Human
gugacauuuuacauuaaauuu

SEQ ID NO: 1485281 - RNA, 20 nt, Human
gugacauuuuacauuaaauu

SEQ ID NO: 1485282 - RNA, 17 nt, Human
gugaccaaaaguuacau

SEQ ID NO: 1485283 - RNA, 19 nt, Human
gugacauuuuacauuaaau

SEQ ID NO: 1485284 - RNA, 17 nt, Human
gugacauuuuacauuaa

SEQ ID NO: 1485285 - RNA, 13 nt, Human
aacuauauuguuu

SEQ ID NO: 1485286 - RNA, 20 nt, Human
aacuaucucauuuccaagca

SEQ ID NO: 1485287 - RNA, 23 nt, Human
aacuaucucauuuccaagcaagu

SEQ ID NO: 1485288 - RNA, 14 nt, Human
gugaagaauacuuc

SEQ ID NO: 1485289 - RNA, 14 nt, Human
gugaagacagaagu

SEQ ID NO: 1485290 - RNA, 18 nt, Human
gugaagggaagagacagc

SEQ ID NO: 1485291 - RNA, 22 nt, Human
aacuacuucucuuguuagguaa

SEQ ID NO: 1485292 - RNA, 19 nt, Human
aacuaagaaacuuaaauuu

SEQ ID NO: 1485293 - RNA, 15 nt, Human
aacuaagaaacuuaa

SEQ ID NO: 1485294 - RNA, 20 nt, Human
aacguuuaagccaaaacaau

SEQ ID NO: 1485295 - RNA, 16 nt, Human
aaccuuucuucaccaa

SEQ ID NO: 1485296 - RNA, 18 nt, Human
aaccuuucuucaccaaau

SEQ ID NO: 1485297 - RNA, 18 nt, Human
aacguuaagaauuguuaa

SEQ ID NO: 1485298 - RNA, 17 nt, Human
aaccuuaauuuauuauu

SEQ ID NO: 1485299 - RNA, 23 nt, Human
aaccugaugaaaauaaagaaugg

SEQ ID NO: 1485300 - RNA, 21 nt, Human
aaccuguuaccuacuuugacu

SEQ ID NO: 1485301 - RNA, 24 nt, Human
aaccuguuaccuacuuugacuuuu

SEQ ID NO: 1485302 - RNA, 18 nt, Human
aaccuuaauuuauuauua

SEQ ID NO: 1485303 - RNA, 22 nt, Human
gucucuuuaaaaggaaagaaaa

SEQ ID NO: 1485304 - RNA, 24 nt, Human
aaccaugaagagauuuuucaugau

SEQ ID NO: 1485305 - RNA, 19 nt, Human
aaccaugcaaaugcuauga

SEQ ID NO: 1485306 - RNA, 23 nt, Human
aaccaugaagagauuuuucauga

SEQ ID NO: 1485307 - RNA, 21 nt, Human
aaccaugaagagauuuuucau

SEQ ID NO: 1485308 - RNA, 15 nt, Human
gucuggugaagcuca

SEQ ID NO: 1485309 - RNA, 18 nt, Human
gucugguugggcagccag

SEQ ID NO: 1485310 - RNA, 22 nt, Human
aaaaaccuuguauaucuuguuu

SEQ ID NO: 1485311 - RNA, 14 nt, Human
aaaaacuaaaaacu

SEQ ID NO: 1485312 - RNA, 17 nt, Human
aaaaacuaaaaacuaga

SEQ ID NO: 1485313 - RNA, 19 nt, Human
aaaaacuacaaccaaugga

SEQ ID NO: 1485314 - RNA, 20 nt, Human
aguggcgugaucucagcuca

SEQ ID NO: 1485315 - RNA, 14 nt, Human
aguggcucaacauu

SEQ ID NO: 1485316 - RNA, 19 nt, Human
aguggcgugaucucagcuc

SEQ ID NO: 1485317 - RNA, 20 nt, Human
aguggcgcgaucucagcuca

SEQ ID NO: 1485318 - RNA, 19 nt, Human
aguggcgcgaucucagcuc

SEQ ID NO: 1485319 - RNA, 22 nt, Human
aguggcuggggcauggaaggca

SEQ ID NO: 1485320 - RNA, 16 nt, Human
aguggcuggggcaugg

SEQ ID NO: 1485321 - RNA, 13 nt, Human
aguggcuggggca

SEQ ID NO: 1485322 - RNA, 16 nt, Human
aguguauggaaauaaa

SEQ ID NO: 1485323 - RNA, 20 nt, Human
aguguauggaaauaaaugua

SEQ ID NO: 1485324 - RNA, 21 nt, Human
aguguauggaaauaaauguau

SEQ ID NO: 1485325 - RNA, 22 nt, Human
aguguauggaaauaaauguauc

SEQ ID NO: 1485326 - RNA, 14 nt, Human
aguguccucagggg

SEQ ID NO: 1485327 - RNA, 22 nt, Human
aguugaaaaucuuauaauuuaa

SEQ ID NO: 1485328 - RNA, 13 nt, Human
aguucaugagaau

SEQ ID NO: 1485329 - RNA, 21 nt, Human
aguucaugagaaucuauauuu

SEQ ID NO: 1485330 - RNA, 17 nt, Human
aguucaugucugcuauc

SEQ ID NO: 1485331 - RNA, 16 nt, Human
aguucaugucugcuau

SEQ ID NO: 1485332 - RNA, 19 nt, Human
aguuacagaaaugauuacu

SEQ ID NO: 1485333 - RNA, 23 nt, Human
aguugaaaaucuuauaauuuaaa

SEQ ID NO: 1485334 - RNA, 16 nt, Human
aguugaaaauaaagug

SEQ ID NO: 1485335 - RNA, 18 nt, Human
aguugaaaauaaagugua

SEQ ID NO: 1485336 - RNA, 19 nt, Human
aguugaaaauaaaguguau

SEQ ID NO: 1485337 - RNA, 16 nt, Human
aguuguguuugaagca

SEQ ID NO: 1485338 - RNA, 21 nt, Human
aguugugucuggcaguuuaua

SEQ ID NO: 1485339 - RNA, 16 nt, Human
aguaucucuucagucu

SEQ ID NO: 1485340 - RNA, 18 nt, Human
aguaucucuucagucucu

SEQ ID NO: 1485341 - RNA, 16 nt, Human
aguaucuuuuuauuca

SEQ ID NO: 1485342 - RNA, 12 nt, Human
aguaugaaaaua

SEQ ID NO: 1485343 - RNA, 13 nt, Human
aguaugaaaauaa

SEQ ID NO: 1485344 - RNA, 23 nt, Human
aguaugcuugaaaagauaaauua

SEQ ID NO: 1485345 - RNA, 23 nt, Human
agucaaauugugugaaagguacu

SEQ ID NO: 1485346 - RNA, 19 nt, Human
agucaaauugugugaaagg

SEQ ID NO: 1485347 - RNA, 18 nt, Human
aguauggguuagggaaaa

SEQ ID NO: 1485348 - RNA, 19 nt, Human
aguccugggauuacaggug

SEQ ID NO: 1485349 - RNA, 12 nt, Human
aguccuguaaug

SEQ ID NO: 1485350 - RNA, 12 nt, Human
agugaagaauac

SEQ ID NO: 1485351 - RNA, 14 nt, Human
agugaagaauacuu

SEQ ID NO: 1485352 - RNA, 22 nt, Human
agugaagaauacuucucauuuu

SEQ ID NO: 1485353 - RNA, 14 nt, Human
agugaagacagaag

SEQ ID NO: 1485354 - RNA, 15 nt, Human
agugaagacagaagu

SEQ ID NO: 1485355 - RNA, 23 nt, Human
agugaagggaagagacagcccag

SEQ ID NO: 1485356 - RNA, 20 nt, Human
agugacagcuaggaugugca

SEQ ID NO: 1485357 - RNA, 12 nt, Human
agugacagcuag

SEQ ID NO: 1485358 - RNA, 14 nt, Human
auagucaaauugug

SEQ ID NO: 1485359 - RNA, 17 nt, Human
auagucaaauuguguga

SEQ ID NO: 1485360 - RNA, 23 nt, Human
auauagaucaguuauaaguagca

SEQ ID NO: 1485361 - RNA, 18 nt, Human
auauacuuuuacaaguaa

SEQ ID NO: 1485362 - RNA, 15 nt, Human
auagguuuaauaauu

SEQ ID NO: 1485363 - RNA, 14 nt, Human
auagguuuggacaa

SEQ ID NO: 1485364 - RNA, 18 nt, Human
auagguuuggacaaaaug

SEQ ID NO: 1485365 - RNA, 23 nt, Human
auagguagaauguaaagcuuguc

SEQ ID NO: 1485366 - RNA, 13 nt, Human
auagccaaaaaua

SEQ ID NO: 1485367 - RNA, 14 nt, Human
auagccaaaaauag

SEQ ID NO: 1485368 - RNA, 15 nt, Human
auagccaaaaauagc

SEQ ID NO: 1485369 - RNA, 16 nt, Human
auagccaaaaauagcu

SEQ ID NO: 1485370 - RNA, 18 nt, Human
auagccaaaaauagcuaa

SEQ ID NO: 1485371 - RNA, 16 nt, Human
auaucaaauauauuca

SEQ ID NO: 1485372 - RNA, 19 nt, Human
auauauuuuuuucugaaau

SEQ ID NO: 1485373 - RNA, 23 nt, Human
auauuaugaagcuuuuaugugaa

SEQ ID NO: 1485374 - RNA, 13 nt, Human
auauuaucuuuuc

SEQ ID NO: 1485375 - RNA, 16 nt, Human
auauuaugagaugcug

SEQ ID NO: 1485376 - RNA, 14 nt, Human
auauuaugagaugc

SEQ ID NO: 1485377 - RNA, 15 nt, Human
auauuaugagaugcu

SEQ ID NO: 1485378 - RNA, 19 nt, Human
auauuauuccucaaaaaau

SEQ ID NO: 1485379 - RNA, 14 nt, Human
auauuauuuuaugu

SEQ ID NO: 1485380 - RNA, 13 nt, Human
auauuuauuuuaa

SEQ ID NO: 1485381 - RNA, 13 nt, Human
auauccuaaacau

SEQ ID NO: 1485382 - RNA, 15 nt, Human
auauccuaaacauca

SEQ ID NO: 1485383 - RNA, 12 nt, Human
auauccaaaagc

SEQ ID NO: 1485384 - RNA, 19 nt, Human
auauccaaaagcuuuuuau

SEQ ID NO: 1485385 - RNA, 22 nt, Human
auauccuaaacaucauucauuu

SEQ ID NO: 1485386 - RNA, 23 nt, Human
auaugcuucuguuuuauaauuuu

SEQ ID NO: 1485387 - RNA, 20 nt, Human
auaugcucugauuuaucuga

SEQ ID NO: 1485388 - RNA, 20 nt, Human
auaugcuucuguuuuauaau

SEQ ID NO: 1485389 - RNA, 22 nt, Human
auaugcuucuguuuuauaauuu

SEQ ID NO: 1485390 - RNA, 23 nt, Human
auaauguuucaaacauauauaac

SEQ ID NO: 1485391 - RNA, 13 nt, Human
auacacacaguua

SEQ ID NO: 1485392 - RNA, 14 nt, Human
auaagcuuuucuuu

SEQ ID NO: 1485393 - RNA, 13 nt, Human
auaagcuuuucuu

SEQ ID NO: 1485394 - RNA, 20 nt, Human
auaaggaaaucaacuugcuu

SEQ ID NO: 1485395 - RNA, 22 nt, Human
auaaggaaaucaacuugcuuau

SEQ ID NO: 1485396 - RNA, 24 nt, Human
auaaggaaaucaacuugcuuauca

SEQ ID NO: 1485397 - RNA, 14 nt, Human
auacccacccagaa

SEQ ID NO: 1485398 - RNA, 13 nt, Human
auacccacccaga

SEQ ID NO: 1485399 - RNA, 12 nt, Human
auaccucacuuu

SEQ ID NO: 1485400 - RNA, 14 nt, Human
auaacaacuucaua

SEQ ID NO: 1485401 - RNA, 18 nt, Human
auaaaggauuaaugucaa

SEQ ID NO: 1485402 - RNA, 20 nt, Human
auaaacuuuuuucuuacugu

SEQ ID NO: 1485403 - RNA, 19 nt, Human
auaaaaauaaaaaagaucc

SEQ ID NO: 1485404 - RNA, 14 nt, Human
auaaaaauaaaaaa

SEQ ID NO: 1485405 - RNA, 12 nt, Human
auaaaaaggugu

SEQ ID NO: 1485406 - RNA, 14 nt, Human
auaaaggacuguaa

SEQ ID NO: 1485407 - RNA, 18 nt, Human
auaaagcuguguggcagu

SEQ ID NO: 1485408 - RNA, 15 nt, Human
auaaagcaggcagaa

SEQ ID NO: 1485409 - RNA, 11 nt, Human
auaaagaaugg

SEQ ID NO: 1485410 - RNA, 18 nt, Human
auaaagaaauagaacaag

SEQ ID NO: 1485411 - RNA, 17 nt, Human
auaaagaaauagaacaa

SEQ ID NO: 1485412 - RNA, 17 nt, Human
auauuuauuuuaauaau

SEQ ID NO: 1485413 - RNA, 14 nt, Human
auauuuauuuuaau

SEQ ID NO: 1485414 - RNA, 15 nt, Human
auauuuauuuuaaua

SEQ ID NO: 1485415 - RNA, 16 nt, Human
aucaugugaaaucauu

SEQ ID NO: 1485416 - RNA, 15 nt, Human
aucaugugaaaucau

SEQ ID NO: 1485417 - RNA, 16 nt, Human
auccagaaagaaaacu

SEQ ID NO: 1485418 - RNA, 18 nt, Human
auccagaaagaaaacuug

SEQ ID NO: 1485419 - RNA, 16 nt, Human
auccaggcaccaggac

SEQ ID NO: 1485420 - RNA, 15 nt, Human
auccaggcaccagga

SEQ ID NO: 1485421 - RNA, 20 nt, Human
auccccaacaugcacugaug

SEQ ID NO: 1485422 - RNA, 20 nt, Human
auccucccacuucagccucc

SEQ ID NO: 1485423 - RNA, 17 nt, Human
aucgcuucauguaacua

SEQ ID NO: 1485424 - RNA, 23 nt, Human
augaaguuuuuuuuauacaggau

SEQ ID NO: 1485425 - RNA, 19 nt, Human
augagcuccuuaaggcucu

SEQ ID NO: 1485426 - RNA, 19 nt, Human
augaaguuuuuuuuauaca

SEQ ID NO: 1485427 - RNA, 22 nt, Human
augaagcuuuuaugugaaacau

SEQ ID NO: 1485428 - RNA, 18 nt, Human
augaaggugucauacaga

SEQ ID NO: 1485429 - RNA, 14 nt, Human
augaaaaagaagaa

SEQ ID NO: 1485430 - RNA, 15 nt, Human
augaaaaagaagaau

SEQ ID NO: 1485431 - RNA, 17 nt, Human
augaaaaagaagaaucu

SEQ ID NO: 1485432 - RNA, 16 nt, Human
augaaaaagaagaauc

SEQ ID NO: 1485433 - RNA, 17 nt, Human
aucuauauuuuacauaa

SEQ ID NO: 1485434 - RNA, 21 nt, Human
aucuauauuuuacauaaauuu

SEQ ID NO: 1485435 - RNA, 16 nt, Human
aucuaugcauuuucug

SEQ ID NO: 1485436 - RNA, 18 nt, Human
aucuaugcauuuucugga

SEQ ID NO: 1485437 - RNA, 19 nt, Human
aucuauuccugguagaaua

SEQ ID NO: 1485438 - RNA, 13 nt, Human
aucucccugccuc

SEQ ID NO: 1485439 - RNA, 14 nt, Human
aucucccugccucc

SEQ ID NO: 1485440 - RNA, 19 nt, Human
aucucccugccuccugccg

SEQ ID NO: 1485441 - RNA, 16 nt, Human
aucucccugccuccug

SEQ ID NO: 1485442 - RNA, 18 nt, Human
aucuggaaccaucagaaa

SEQ ID NO: 1485443 - RNA, 17 nt, Human
aucuggcaacaucuuua

SEQ ID NO: 1485444 - RNA, 18 nt, Human
aucucuguaaagcuaaaa

SEQ ID NO: 1485445 - RNA, 13 nt, Human
aucucuguaaagc

SEQ ID NO: 1485446 - RNA, 17 nt, Human
aucucuguaaagcuaaa

SEQ ID NO: 1485447 - RNA, 15 nt, Human
aucucugugugcaca

SEQ ID NO: 1485448 - RNA, 17 nt, Human
aucucugugugcacaaa

SEQ ID NO: 1485449 - RNA, 19 nt, Human
aucucugugugcacaaaua

SEQ ID NO: 1485450 - RNA, 18 nt, Human
aucuugaauaauguaaga

SEQ ID NO: 1485451 - RNA, 16 nt, Human
aucuucugccuucuca

SEQ ID NO: 1485452 - RNA, 18 nt, Human
aucuucugccuucucaug

SEQ ID NO: 1485453 - RNA, 17 nt, Human
aucuucuuaugcaauuu

SEQ ID NO: 1485454 - RNA, 20 nt, Human
aucuucuuaugcaauuuccu

SEQ ID NO: 1485455 - RNA, 12 nt, Human
aucuggcuucug

SEQ ID NO: 1485456 - RNA, 21 nt, Human
aucuggcugcaguuuugcuau

SEQ ID NO: 1485457 - RNA, 22 nt, Human
aucuggcuucuggccaggaagc

SEQ ID NO: 1485458 - RNA, 22 nt, Human
aucuggcugcaguuuugcuauc

SEQ ID NO: 1485459 - RNA, 20 nt, Human
aucuggcuucuggccaggaa

SEQ ID NO: 1485460 - RNA, 15 nt, Human
aucugggaagcuauu

SEQ ID NO: 1485461 - RNA, 14 nt, Human
aucuucugccuucu

SEQ ID NO: 1485462 - RNA, 11 nt, Human
augugaacagu

SEQ ID NO: 1485463 - RNA, 21 nt, Human
augugaacaguuguguuugaa

SEQ ID NO: 1485464 - RNA, 23 nt, Human
augugaacaguuguguuugaagc

SEQ ID NO: 1485465 - RNA, 22 nt, Human
augugaaccauuaaccagaucu

SEQ ID NO: 1485466 - RNA, 12 nt, Human
augugaaccauu

SEQ ID NO: 1485467 - RNA, 14 nt, Human
augugaaaucauuc

SEQ ID NO: 1485468 - RNA, 13 nt, Human
augucaaacaaau

SEQ ID NO: 1485469 - RNA, 11 nt, Human
augugaauugu

SEQ ID NO: 1485470 - RNA, 23 nt, Human
augugaauuguuaguuucugagu

SEQ ID NO: 1485471 - RNA, 24 nt, Human
auggucacguuuggugcuucucag

SEQ ID NO: 1485472 - RNA, 21 nt, Human
auggucacguuuggugcuucu

SEQ ID NO: 1485473 - RNA, 20 nt, Human
auggucacguuuggugcuuc

SEQ ID NO: 1485474 - RNA, 23 nt, Human
augguaucaauaaauagaccauu

SEQ ID NO: 1485475 - RNA, 17 nt, Human
auguaagcugaaaauau

SEQ ID NO: 1485476 - RNA, 24 nt, Human
auguauucagcuuuaguagauauu

SEQ ID NO: 1485477 - RNA, 15 nt, Human
auguuuucaggcuag

SEQ ID NO: 1485478 - RNA, 22 nt, Human
auguuugcucagcuucuccaac

SEQ ID NO: 1485479 - RNA, 17 nt, Human
auguuucacaaggucuu

SEQ ID NO: 1485480 - RNA, 18 nt, Human
augugggauuauggguca

SEQ ID NO: 1485481 - RNA, 20 nt, Human
augugggauuaugggucaca

SEQ ID NO: 1485482 - RNA, 22 nt, Human
augugggauuaugggucacagg

SEQ ID NO: 1485483 - RNA, 13 nt, Human
augugggauuaug

SEQ ID NO: 1485484 - RNA, 14 nt, Human
augugggauuaugg

SEQ ID NO: 1485485 - RNA, 20 nt, Human
augcauauuauuuuauguug

SEQ ID NO: 1485486 - RNA, 16 nt, Human
augcauauuauuuuau

SEQ ID NO: 1485487 - RNA, 12 nt, Human
augcaucuguuu

SEQ ID NO: 1485488 - RNA, 20 nt, Human
augcaucuguuuauucuaua

SEQ ID NO: 1485489 - RNA, 11 nt, Human
augcauauacu

SEQ ID NO: 1485490 - RNA, 14 nt, Human
augauguuaaaaaa

SEQ ID NO: 1485491 - RNA, 22 nt, Human
augauguuaaaaaaauaagaag

SEQ ID NO: 1485492 - RNA, 21 nt, Human
augauguuaaaaaaauaagaa

SEQ ID NO: 1485493 - RNA, 22 nt, Human
augaugccucugucuucuggac

SEQ ID NO: 1485494 - RNA, 17 nt, Human
augcaauuuccuuuuuu

SEQ ID NO: 1485495 - RNA, 19 nt, Human
augccucugucuucuggac

SEQ ID NO: 1485496 - RNA, 13 nt, Human
auggauucuaaaa

SEQ ID NO: 1485497 - RNA, 14 nt, Human
auggauucuaaaau

SEQ ID NO: 1485498 - RNA, 15 nt, Human
auggauucuaaaaug

SEQ ID NO: 1485499 - RNA, 18 nt, Human
auggauucuaaaaugccu

SEQ ID NO: 1485500 - RNA, 19 nt, Human
auggaaagcuucagugcug

SEQ ID NO: 1485501 - RNA, 21 nt, Human
agagugugaccaaaaguuaca

SEQ ID NO: 1485502 - RNA, 11 nt, Human
agagugugacc

SEQ ID NO: 1485503 - RNA, 14 nt, Human
agagugugaccaaa

SEQ ID NO: 1485504 - RNA, 14 nt, Human
agaguggcuggggc

SEQ ID NO: 1485505 - RNA, 13 nt, Human
agaguggcugggg

SEQ ID NO: 1485506 - RNA, 14 nt, Human
agaguucaagaaau

SEQ ID NO: 1485507 - RNA, 15 nt, Human
agaguucaagaaaua

SEQ ID NO: 1485508 - RNA, 18 nt, Human
agaguucaagaaauaagu

SEQ ID NO: 1485509 - RNA, 21 nt, Human
agaguucaagaaauaaguuuu

SEQ ID NO: 1485510 - RNA, 18 nt, Human
agaucuuuuauuuugcca

SEQ ID NO: 1485511 - RNA, 16 nt, Human
agaucuuuuauuuugc

SEQ ID NO: 1485512 - RNA, 23 nt, Human
agacagagucuuccucugucucc

SEQ ID NO: 1485513 - RNA, 20 nt, Human
agacagagucuuacucuguu

SEQ ID NO: 1485514 - RNA, 19 nt, Human
agacagagucuuacucugu

SEQ ID NO: 1485515 - RNA, 20 nt, Human
agacagagucuuccucuguc

SEQ ID NO: 1485516 - RNA, 23 nt, Human
agacagcccaggauacuggcaca

SEQ ID NO: 1485517 - RNA, 22 nt, Human
agacagcccaggauacuggcac

SEQ ID NO: 1485518 - RNA, 17 nt, Human
agacagcccaggauacu

SEQ ID NO: 1485519 - RNA, 23 nt, Human
agacaacagguaaaacagggcca

SEQ ID NO: 1485520 - RNA, 19 nt, Human
agacaacagguaaaacagg

SEQ ID NO: 1485521 - RNA, 17 nt, Human
agagaagaaagaacgga

SEQ ID NO: 1485522 - RNA, 13 nt, Human
agagaagaaagaa

SEQ ID NO: 1485523 - RNA, 17 nt, Human
agagaacuuccagaucc

SEQ ID NO: 1485524 - RNA, 18 nt, Human
agagagccugcaggaucu

SEQ ID NO: 1485525 - RNA, 14 nt, Human
agagagccugcagg

SEQ ID NO: 1485526 - RNA, 15 nt, Human
agagagccugcagga

SEQ ID NO: 1485527 - RNA, 23 nt, Human
agacugcgauuugucccaggucc

SEQ ID NO: 1485528 - RNA, 13 nt, Human
agccaagugcagg

SEQ ID NO: 1485529 - RNA, 14 nt, Human
agccaauauuuuuc

SEQ ID NO: 1485530 - RNA, 15 nt, Human
agcaugccuucaaau

SEQ ID NO: 1485531 - RNA, 15 nt, Human
agcccgguaagagca

SEQ ID NO: 1485532 - RNA, 16 nt, Human
agcccgguaagagcaa

SEQ ID NO: 1485533 - RNA, 21 nt, Human
agcccuaaacaucauucuuga

SEQ ID NO: 1485534 - RNA, 21 nt, Human
agcccgguaagagcaaaagaa

SEQ ID NO: 1485535 - RNA, 22 nt, Human
agcccgguaagagcaaaagaau

SEQ ID NO: 1485536 - RNA, 13 nt, Human
agcccuaaacauc

SEQ ID NO: 1485537 - RNA, 14 nt, Human
agcccuaaacauca

SEQ ID NO: 1485538 - RNA, 15 nt, Human
agcccuaaacaucau

SEQ ID NO: 1485539 - RNA, 17 nt, Human
agccccagugacagcua

SEQ ID NO: 1485540 - RNA, 13 nt, Human
agccgugagcaug

SEQ ID NO: 1485541 - RNA, 14 nt, Human
agccgggagccuga

SEQ ID NO: 1485542 - RNA, 23 nt, Human
aggaugguucccuugaugaagaa

SEQ ID NO: 1485543 - RNA, 14 nt, Human
aggaccuaaaacau

SEQ ID NO: 1485544 - RNA, 16 nt, Human
aggaccuaaaacaucu

SEQ ID NO: 1485545 - RNA, 15 nt, Human
aggagaaugagccuc

SEQ ID NO: 1485546 - RNA, 18 nt, Human
aggagacacaccugaggc

SEQ ID NO: 1485547 - RNA, 14 nt, Human
aggagucacugaga

SEQ ID NO: 1485548 - RNA, 15 nt, Human
aggagucacugagac

SEQ ID NO: 1485549 - RNA, 17 nt, Human
aggagucacugagacca

SEQ ID NO: 1485550 - RNA, 16 nt, Human
aggagucacugagacc

SEQ ID NO: 1485551 - RNA, 15 nt, Human
aggagugggugggga

SEQ ID NO: 1485552 - RNA, 22 nt, Human
aggaguuaguggauuacugcca

SEQ ID NO: 1485553 - RNA, 22 nt, Human
aggaguggguggggaguggggg

SEQ ID NO: 1485554 - RNA, 23 nt, Human
aggacccaggacaggauccaggc

SEQ ID NO: 1485555 - RNA, 18 nt, Human
aggacccaggacaggauc

SEQ ID NO: 1485556 - RNA, 12 nt, Human
aggacccagggc

SEQ ID NO: 1485557 - RNA, 13 nt, Human
aggacccagggcu

SEQ ID NO: 1485558 - RNA, 14 nt, Human
aggacccagggcuc

SEQ ID NO: 1485559 - RNA, 15 nt, Human
aggacccagggcucu

SEQ ID NO: 1485560 - RNA, 14 nt, Human
aggacccaggacag

SEQ ID NO: 1485561 - RNA, 13 nt, Human
aggacccaggaca

SEQ ID NO: 1485562 - RNA, 12 nt, Human
aggacccaggac

SEQ ID NO: 1485563 - RNA, 17 nt, Human
aggacccagggcucugu

SEQ ID NO: 1485564 - RNA, 21 nt, Human
agcuuuucccuuuuuuuaagu

SEQ ID NO: 1485565 - RNA, 22 nt, Human
agcuuuuuauuccuccugcuca

SEQ ID NO: 1485566 - RNA, 19 nt, Human
agcuuuuuccagaggcuau

SEQ ID NO: 1485567 - RNA, 22 nt, Human
agcuccuuaaggcucuuuugua

SEQ ID NO: 1485568 - RNA, 16 nt, Human
agcugagcaaaucacc

SEQ ID NO: 1485569 - RNA, 20 nt, Human
agcugagcaaaucaccacaa

SEQ ID NO: 1485570 - RNA, 16 nt, Human
agcugagagaaaauaa

SEQ ID NO: 1485571 - RNA, 12 nt, Human
agcugaaaauau

SEQ ID NO: 1485572 - RNA, 14 nt, Human
agcugcuccccacg

SEQ ID NO: 1485573 - RNA, 17 nt, Human
agcugcuccccacguca

SEQ ID NO: 1485574 - RNA, 11 nt, Human
aggucccuaau

SEQ ID NO: 1485575 - RNA, 12 nt, Human
aggucccuaaua

SEQ ID NO: 1485576 - RNA, 17 nt, Human
agguaauuuuuuucacc

SEQ ID NO: 1485577 - RNA, 23 nt, Human
agguaaaucagacuaugaaguuu

SEQ ID NO: 1485578 - RNA, 18 nt, Human
agguaaaucagacuauga

SEQ ID NO: 1485579 - RNA, 14 nt, Human
agguaaaaugccau

SEQ ID NO: 1485580 - RNA, 15 nt, Human
agguaaaaugccaug

SEQ ID NO: 1485581 - RNA, 16 nt, Human
agguaaaaugccauga

SEQ ID NO: 1485582 - RNA, 13 nt, Human
agguaaaaugcca

SEQ ID NO: 1485583 - RNA, 14 nt, Human
agguaaaacagggc

SEQ ID NO: 1485584 - RNA, 22 nt, Human
agguaaaaugccaugaugccuc

SEQ ID NO: 1485585 - RNA, 20 nt, Human
agguaaaagcaucacaugaa

SEQ ID NO: 1485586 - RNA, 16 nt, Human
aggucccuaauaaagc

SEQ ID NO: 1485587 - RNA, 16 nt, Human
agguacacagcucuag

SEQ ID NO: 1485588 - RNA, 16 nt, Human
agguacaagaagcauu

SEQ ID NO: 1485589 - RNA, 15 nt, Human
aggucccuaauaaag

SEQ ID NO: 1485590 - RNA, 13 nt, Human
aggucccuaauaa

SEQ ID NO: 1485591 - RNA, 15 nt, Human
agguuacaagccugc

SEQ ID NO: 1485592 - RNA, 21 nt, Human
agguuacaagccugcacaaua

SEQ ID NO: 1485593 - RNA, 12 nt, Human
agggucaggccu

SEQ ID NO: 1485594 - RNA, 13 nt, Human
agggucaggccuu

SEQ ID NO: 1485595 - RNA, 14 nt, Human
agggucaggccuuu

SEQ ID NO: 1485596 - RNA, 22 nt, Human
agggucaggccuuugagcucag

SEQ ID NO: 1485597 - RNA, 22 nt, Human
agggucauaucacucaggcccu

SEQ ID NO: 1485598 - RNA, 22 nt, Human
agggaccggcggaccccagcca

SEQ ID NO: 1485599 - RNA, 15 nt, Human
aggcuagauguaugu

SEQ ID NO: 1485600 - RNA, 16 nt, Human
aggcuagauguaugua

SEQ ID NO: 1485601 - RNA, 17 nt, Human
aggcuagauguauguac

SEQ ID NO: 1485602 - RNA, 23 nt, Human
aggcuacuguaaggcaaucaugg

SEQ ID NO: 1485603 - RNA, 18 nt, Human
aggcgugagccaccucgc

SEQ ID NO: 1485604 - RNA, 17 nt, Human
aggcgugagccaccucg

SEQ ID NO: 1485605 - RNA, 18 nt, Human
aggcgugagccaccaugc

SEQ ID NO: 1485606 - RNA, 16 nt, Human
aggcccuuauuuucaa

SEQ ID NO: 1485607 - RNA, 20 nt, Human
aggcccuuauuuucaagaaa

SEQ ID NO: 1485608 - RNA, 22 nt, Human
aggcccuuauuuucaagaaacu

SEQ ID NO: 1485609 - RNA, 13 nt, Human
accccuccacucu

SEQ ID NO: 1485610 - RNA, 12 nt, Human
accccuccccuc

SEQ ID NO: 1485611 - RNA, 13 nt, Human
accccuccccucc

SEQ ID NO: 1485612 - RNA, 14 nt, Human
accccuccccucca

SEQ ID NO: 1485613 - RNA, 19 nt, Human
accccuccccuccaucccu

SEQ ID NO: 1485614 - RNA, 20 nt, Human
accccuccccuccaucccug

SEQ ID NO: 1485615 - RNA, 17 nt, Human
accccuccacucuuucu

SEQ ID NO: 1485616 - RNA, 13 nt, Human
acccccugugccu

SEQ ID NO: 1485617 - RNA, 14 nt, Human
acccagugcugaau

SEQ ID NO: 1485618 - RNA, 22 nt, Human
acccauuagcagucccuccaca

SEQ ID NO: 1485619 - RNA, 23 nt, Human
acccauuuaaauuuuuuuccuua

SEQ ID NO: 1485620 - RNA, 20 nt, Human
acccauuuaaauuuuuuucc

SEQ ID NO: 1485621 - RNA, 15 nt, Human
accaucgcuuuauug

SEQ ID NO: 1485622 - RNA, 19 nt, Human
accaucgucuucuuggcca

SEQ ID NO: 1485623 - RNA, 13 nt, Human
accagaucauugu

SEQ ID NO: 1485624 - RNA, 22 nt, Human
accagagugcugaaggaaugga

SEQ ID NO: 1485625 - RNA, 23 nt, Human
accaccucucaauauucaauaaa

SEQ ID NO: 1485626 - RNA, 15 nt, Human
accaccucucaauau

SEQ ID NO: 1485627 - RNA, 21 nt, Human
accaccgcgcccagccuuuuu

SEQ ID NO: 1485628 - RNA, 14 nt, Human
accagaugcagcuc

SEQ ID NO: 1485629 - RNA, 17 nt, Human
accaauaaagugacccu

SEQ ID NO: 1485630 - RNA, 12 nt, Human
accaauaaagug

SEQ ID NO: 1485631 - RNA, 11 nt, Human
accaauaaagu

SEQ ID NO: 1485632 - RNA, 23 nt, Human
accaauagggcugagcucucugu

SEQ ID NO: 1485633 - RNA, 17 nt, Human
accaauaaaauaauuuu

SEQ ID NO: 1485634 - RNA, 23 nt, Human
accaaguuucagguauuaagaaa

SEQ ID NO: 1485635 - RNA, 23 nt, Human
accaaguuggaacauccuuggaa

SEQ ID NO: 1485636 - RNA, 17 nt, Human
accaaggcuuucucuac

SEQ ID NO: 1485637 - RNA, 23 nt, Human
accaaggcuuucucuacugauuc

SEQ ID NO: 1485638 - RNA, 20 nt, Human
acauuuuaaaaaauggucac

SEQ ID NO: 1485639 - RNA, 16 nt, Human
acauuuuaaaagugcc

SEQ ID NO: 1485640 - RNA, 16 nt, Human
acauuuuaaacacauu

SEQ ID NO: 1485641 - RNA, 19 nt, Human
acauuuuaaaagugccauu

SEQ ID NO: 1485642 - RNA, 19 nt, Human
acauuuguucuauagcuuu

SEQ ID NO: 1485643 - RNA, 16 nt, Human
acauuuauuuugacau

SEQ ID NO: 1485644 - RNA, 17 nt, Human
acaggcacacaccacca

SEQ ID NO: 1485645 - RNA, 15 nt, Human
acagguaaaacaggg

SEQ ID NO: 1485646 - RNA, 14 nt, Human
acagguaaaacagg

SEQ ID NO: 1485647 - RNA, 16 nt, Human
acagguaaaacagggc

SEQ ID NO: 1485648 - RNA, 22 nt, Human
acauguuucuuuguaaugaaaa

SEQ ID NO: 1485649 - RNA, 19 nt, Human
acauguuucuuuguaauga

SEQ ID NO: 1485650 - RNA, 23 nt, Human
acauguuucuuuguaaugaaaac

SEQ ID NO: 1485651 - RNA, 12 nt, Human
acaucagcaaac

SEQ ID NO: 1485652 - RNA, 13 nt, Human
acaucagcaaaca

SEQ ID NO: 1485653 - RNA, 13 nt, Human
acaugauucauuu

SEQ ID NO: 1485654 - RNA, 19 nt, Human
acaugauuccagccaucac

SEQ ID NO: 1485655 - RNA, 20 nt, Human
acaugcauuacugcaugcac

SEQ ID NO: 1485656 - RNA, 16 nt, Human
acaugcauuacugcau

SEQ ID NO: 1485657 - RNA, 19 nt, Human
acagccaacuauggccugu

SEQ ID NO: 1485658 - RNA, 17 nt, Human
acagccaacuauggccu

SEQ ID NO: 1485659 - RNA, 19 nt, Human
acagagucuuccucugucu

SEQ ID NO: 1485660 - RNA, 14 nt, Human
acagagucuuccuc

SEQ ID NO: 1485661 - RNA, 22 nt, Human
acagaauuacuguaacugauua

SEQ ID NO: 1485662 - RNA, 18 nt, Human
acagaaugugauaaggaa

SEQ ID NO: 1485663 - RNA, 18 nt, Human
acagaauuuuauggugca

SEQ ID NO: 1485664 - RNA, 11 nt, Human
acacugccagc

SEQ ID NO: 1485665 - RNA, 21 nt, Human
acaggaugaugacuauggaaa

SEQ ID NO: 1485666 - RNA, 13 nt, Human
acaggauccaggc

SEQ ID NO: 1485667 - RNA, 12 nt, Human
acaggauccagg

SEQ ID NO: 1485668 - RNA, 19 nt, Human
acaggaucaguuaacuauu

SEQ ID NO: 1485669 - RNA, 18 nt, Human
acaggauccaggccggcu

SEQ ID NO: 1485670 - RNA, 22 nt, Human
acaggaugguucccuugaugaa

SEQ ID NO: 1485671 - RNA, 19 nt, Human
acaggcaaaauccuugcuu

SEQ ID NO: 1485672 - RNA, 13 nt, Human
aauuuuguugcug

SEQ ID NO: 1485673 - RNA, 13 nt, Human
aauuuugugaagc

SEQ ID NO: 1485674 - RNA, 15 nt, Human
aauuuuguaacgaag

SEQ ID NO: 1485675 - RNA, 22 nt, Human
aauuuucuggaauacaugaaau

SEQ ID NO: 1485676 - RNA, 22 nt, Human
acaacggagucaaaaauuaaac

SEQ ID NO: 1485677 - RNA, 20 nt, Human
acaacggagucaaaaauuaa

SEQ ID NO: 1485678 - RNA, 14 nt, Human
acaacggagucaaa

SEQ ID NO: 1485679 - RNA, 22 nt, Human
acaacuaagugauuuguauguc

SEQ ID NO: 1485680 - RNA, 10 nt, Human
acaacuaagu

SEQ ID NO: 1485681 - RNA, 19 nt, Human
acaagaaaauaagagcuca

SEQ ID NO: 1485682 - RNA, 23 nt, Human
acaagaaaauaagagcucaggau

SEQ ID NO: 1485683 - RNA, 22 nt, Human
acaauugagguaaguuuuuuga

SEQ ID NO: 1485684 - RNA, 20 nt, Human
acaauugggagcugccaaga

SEQ ID NO: 1485685 - RNA, 13 nt, Human
acaauugggagcu

SEQ ID NO: 1485686 - RNA, 17 nt, Human
acaccaacauaaaaaug

SEQ ID NO: 1485687 - RNA, 18 nt, Human
acaccaacauaaaaauga

SEQ ID NO: 1485688 - RNA, 12 nt, Human
accugucugucu

SEQ ID NO: 1485689 - RNA, 11 nt, Human
accugucuguc

SEQ ID NO: 1485690 - RNA, 16 nt, Human
accugccgagagucca

SEQ ID NO: 1485691 - RNA, 23 nt, Human
accugccgagaguccaucagccu

SEQ ID NO: 1485692 - RNA, 21 nt, Human
accucuguauuugaaucagcc

SEQ ID NO: 1485693 - RNA, 11 nt, Human
accuuucuagu

SEQ ID NO: 1485694 - RNA, 15 nt, Human
accuuucuaguugaa

SEQ ID NO: 1485695 - RNA, 21 nt, Human
accuguugagcaucacagaau

SEQ ID NO: 1485696 - RNA, 17 nt, Human
accuguuaccuacuuug

SEQ ID NO: 1485697 - RNA, 18 nt, Human
accuguuaccuacuuuga

SEQ ID NO: 1485698 - RNA, 14 nt, Human
accuguugagcauc

SEQ ID NO: 1485699 - RNA, 19 nt, Human
accuguugagcaucacaga

SEQ ID NO: 1485700 - RNA, 20 nt, Human
accuguugagcaucacagaa

SEQ ID NO: 1485701 - RNA, 22 nt, Human
accuguugagcaucacagaaug

SEQ ID NO: 1485702 - RNA, 14 nt, Human
acggaacucaaaua

SEQ ID NO: 1485703 - RNA, 18 nt, Human
acgcuuuccugaauccaa

SEQ ID NO: 1485704 - RNA, 17 nt, Human
acgcuuuuugaaaaagc

SEQ ID NO: 1485705 - RNA, 12 nt, Human
acgccacagccc

SEQ ID NO: 1485706 - RNA, 22 nt, Human
acgccacagcccuuuugucucu

SEQ ID NO: 1485707 - RNA, 17 nt, Human
acgccacagcccuuuug

SEQ ID NO: 1485708 - RNA, 13 nt, Human
acuaagagagaau

SEQ ID NO: 1485709 - RNA, 15 nt, Human
acuaagagagaauga

SEQ ID NO: 1485710 - RNA, 20 nt, Human
acgugacacaaacacacaca

SEQ ID NO: 1485711 - RNA, 21 nt, Human
acgugacacaaacacacacaa

SEQ ID NO: 1485712 - RNA, 20 nt, Human
acuaguauuucuaugaaaua

SEQ ID NO: 1485713 - RNA, 14 nt, Human
acuagccaaaccag

SEQ ID NO: 1485714 - RNA, 18 nt, Human
acuagccaaaccaggacc

SEQ ID NO: 1485715 - RNA, 12 nt, Human
acuauuuaacug

SEQ ID NO: 1485716 - RNA, 13 nt, Human
acuauuuaacuga

SEQ ID NO: 1485717 - RNA, 14 nt, Human
acuauuuaacugac

SEQ ID NO: 1485718 - RNA, 15 nt, Human
acuauuuaacugacu

SEQ ID NO: 1485719 - RNA, 16 nt, Human
acuauuuaacugacua

SEQ ID NO: 1485720 - RNA, 17 nt, Human
acuauuuaacugacuau

SEQ ID NO: 1485721 - RNA, 14 nt, Human
acucaguaauuugu

SEQ ID NO: 1485722 - RNA, 15 nt, Human
acucagguggcccua

SEQ ID NO: 1485723 - RNA, 15 nt, Human
acucauauuuucaug

SEQ ID NO: 1485724 - RNA, 18 nt, Human
acucauagacacugaucu

SEQ ID NO: 1485725 - RNA, 19 nt, Human
acuguaagaaaauaucacu

SEQ ID NO: 1485726 - RNA, 13 nt, Human
acuguaagaaaau

SEQ ID NO: 1485727 - RNA, 22 nt, Human
acuguaagaaaauaucacuugu

SEQ ID NO: 1485728 - RNA, 20 nt, Human
acugguuugaagaauguuaa

SEQ ID NO: 1485729 - RNA, 17 nt, Human
acugguuugaagaaugu

SEQ ID NO: 1485730 - RNA, 15 nt, Human
acugucucucaugaa

SEQ ID NO: 1485731 - RNA, 17 nt, Human
acugucucucaugaacc

SEQ ID NO: 1485732 - RNA, 18 nt, Human
acugucucucaugaaccu

SEQ ID NO: 1485733 - RNA, 18 nt, Human
acugguaggaaacuaggu

SEQ ID NO: 1485734 - RNA, 21 nt, Human
acugguccaaaagauugcuga

SEQ ID NO: 1485735 - RNA, 22 nt, Human
acugguccaaaagauugcugaa

SEQ ID NO: 1485736 - RNA, 12 nt, Human
acugccagcauu

SEQ ID NO: 1485737 - RNA, 18 nt, Human
acuuguaaaggaauuuaa

SEQ ID NO: 1485738 - RNA, 14 nt, Human
acuugguuuugcua

SEQ ID NO: 1485739 - RNA, 17 nt, Human
acuucugggcuucaucu

SEQ ID NO: 1485740 - RNA, 19 nt, Human
acuucugggcuucaucugg

SEQ ID NO: 1485741 - RNA, 22 nt, Human
acuucugggcuucaucuggcaa

SEQ ID NO: 1485742 - RNA, 23 nt, Human
acuguuuggaaauugauuuugaa

SEQ ID NO: 1485743 - RNA, 17 nt, Human
acuuauuuaugaaccug

SEQ ID NO: 1485744 - RNA, 14 nt, Human
acuuauuuuugaca

SEQ ID NO: 1485745 - RNA, 16 nt, Human
acuuauuuuugacagu

SEQ ID NO: 1485746 - RNA, 19 nt, Human
acuuauuuuugacaguguu

SEQ ID NO: 1485747 - RNA, 22 nt, Human
acuuauuuuugacaguguugaa

SEQ ID NO: 1485748 - RNA, 14 nt, Human
acuuuuggaaggua

SEQ ID NO: 1485749 - RNA, 22 nt, Human
acuuuugcuguaauguuaauau

SEQ ID NO: 1485750 - RNA, 17 nt, Human
agaaaauaaucauucuu

SEQ ID NO: 1485751 - RNA, 23 nt, Human
acuuuuaugauacuugaaaauua

SEQ ID NO: 1485752 - RNA, 20 nt, Human
acuuuucuucuauugccucu

SEQ ID NO: 1485753 - RNA, 16 nt, Human
acuuuuaugauacuug

SEQ ID NO: 1485754 - RNA, 12 nt, Human
acuuuuaugaua

SEQ ID NO: 1485755 - RNA, 13 nt, Human
acuuuuacaagua

SEQ ID NO: 1485756 - RNA, 14 nt, Human
acuuuuacaaguaa

SEQ ID NO: 1485757 - RNA, 21 nt, Human
acuuuuacaaguaacaaaaau

SEQ ID NO: 1485758 - RNA, 20 nt, Human
acuuuuaaacuguguacaua

SEQ ID NO: 1485759 - RNA, 18 nt, Human
acuuuuaaugaacaaaug

SEQ ID NO: 1485760 - RNA, 22 nt, Human
acuuuaucuugaauaauguaag

SEQ ID NO: 1485761 - RNA, 22 nt, Human
acuuuauuuucuauaauuuaaa

SEQ ID NO: 1485762 - RNA, 17 nt, Human
agaaauaaauuuauuuc

SEQ ID NO: 1485763 - RNA, 13 nt, Human
agaaauaaguuuu

SEQ ID NO: 1485764 - RNA, 14 nt, Human
agaaauaaguuuuu

SEQ ID NO: 1485765 - RNA, 16 nt, Human
agaaauaaguuuuugu

SEQ ID NO: 1485766 - RNA, 23 nt, Human
agaaauaaguuuuuguuucacag

SEQ ID NO: 1485767 - RNA, 12 nt, Human
agaaaguugauu

SEQ ID NO: 1485768 - RNA, 16 nt, Human
agaaagguuaguauca

SEQ ID NO: 1485769 - RNA, 22 nt, Human
agaaagucuuauuuauucauau

SEQ ID NO: 1485770 - RNA, 19 nt, Human
agaaagucuuauuuauuca

SEQ ID NO: 1485771 - RNA, 13 nt, Human
agaaaaucacuua

SEQ ID NO: 1485772 - RNA, 20 nt, Human
aauguuuuuuuuuaaagacu

SEQ ID NO: 1485773 - RNA, 15 nt, Human
aauguuuuuuuuuaa

SEQ ID NO: 1485774 - RNA, 22 nt, Human
aauguuuuuuuuuaaagacuuu

SEQ ID NO: 1485775 - RNA, 23 nt, Human
aauguuucaaacauauauaacaa

SEQ ID NO: 1485776 - RNA, 15 nt, Human
aauguuuaaaccuuu

SEQ ID NO: 1485777 - RNA, 14 nt, Human
aaugucauuuuggu

SEQ ID NO: 1485778 - RNA, 19 nt, Human
aaugucauuuugguacuuu

SEQ ID NO: 1485779 - RNA, 15 nt, Human
aaugccuuuucccaa

SEQ ID NO: 1485780 - RNA, 13 nt, Human
aauacucuuauau

SEQ ID NO: 1485781 - RNA, 13 nt, Human
aauacugcugaga

SEQ ID NO: 1485782 - RNA, 15 nt, Human
aauacugcugagaua

SEQ ID NO: 1485783 - RNA, 18 nt, Human
aauacugcugagauacau

SEQ ID NO: 1485784 - RNA, 21 nt, Human
aauacugcugagauacauaca

SEQ ID NO: 1485785 - RNA, 18 nt, Human
aaucaccacaaacuguaa

SEQ ID NO: 1485786 - RNA, 21 nt, Human
aaucaagucuguuuacugcaa

SEQ ID NO: 1485787 - RNA, 14 nt, Human
aaucaagggucagg

SEQ ID NO: 1485788 - RNA, 15 nt, Human
aaucaagggucaggc

SEQ ID NO: 1485789 - RNA, 18 nt, Human
aaucaagggucaggccuu

SEQ ID NO: 1485790 - RNA, 15 nt, Human
aaucaagucuguuua

SEQ ID NO: 1485791 - RNA, 17 nt, Human
aaucaagucuguuuacu

SEQ ID NO: 1485792 - RNA, 13 nt, Human
aauauuagaaaca

SEQ ID NO: 1485793 - RNA, 13 nt, Human
aauauauauuauc

SEQ ID NO: 1485794 - RNA, 15 nt, Human
aauauauauuaucuu

SEQ ID NO: 1485795 - RNA, 16 nt, Human
aauauauauuaucuuu

SEQ ID NO: 1485796 - RNA, 19 nt, Human
aauauauauuaucuuuuca

SEQ ID NO: 1485797 - RNA, 18 nt, Human
aauauauauuaucuuuuc

SEQ ID NO: 1485798 - RNA, 18 nt, Human
aauccaagcaaaugugaa

SEQ ID NO: 1485799 - RNA, 17 nt, Human
aauccaagcaaauguga

SEQ ID NO: 1485800 - RNA, 21 nt, Human
aaugauuaugaauuacauuug

SEQ ID NO: 1485801 - RNA, 23 nt, Human
aaugauuaugaauuacauuugua

SEQ ID NO: 1485802 - RNA, 15 nt, Human
aaugauuaugaauua

SEQ ID NO: 1485803 - RNA, 19 nt, Human
aaugauccuguauucagac

SEQ ID NO: 1485804 - RNA, 21 nt, Human
aaugauccuguauucagacag

SEQ ID NO: 1485805 - RNA, 23 nt, Human
aaugauccuguauucagacagau

SEQ ID NO: 1485806 - RNA, 21 nt, Human
aaugaaauccugcuucagugu

SEQ ID NO: 1485807 - RNA, 17 nt, Human
aaugaaguuguagguaa

SEQ ID NO: 1485808 - RNA, 13 nt, Human
aauccagccugcu

SEQ ID NO: 1485809 - RNA, 15 nt, Human
aauccaaugaaauga

SEQ ID NO: 1485810 - RNA, 12 nt, Human
aaucucuguaaa

SEQ ID NO: 1485811 - RNA, 13 nt, Human
aaucucuguaaag

SEQ ID NO: 1485812 - RNA, 20 nt, Human
aaggugaggagcuugaaacc

SEQ ID NO: 1485813 - RNA, 14 nt, Human
aaggucggaccagc

SEQ ID NO: 1485814 - RNA, 18 nt, Human
aaguccaagcauuuagau

SEQ ID NO: 1485815 - RNA, 14 nt, Human
aagucuccaaaguc

SEQ ID NO: 1485816 - RNA, 14 nt, Human
aagucgguuagugg

SEQ ID NO: 1485817 - RNA, 12 nt, Human
aagggccaaaga

SEQ ID NO: 1485818 - RNA, 20 nt, Human
aagggccaaagaaccaaaga

SEQ ID NO: 1485819 - RNA, 22 nt, Human
aagggccaaagaaccaaagaag

SEQ ID NO: 1485820 - RNA, 15 nt, Human
aagucuccaaagucu

SEQ ID NO: 1485821 - RNA, 22 nt, Human
aagucugugagauucauucaug

SEQ ID NO: 1485822 - RNA, 13 nt, Human
aagucuguuuacu

SEQ ID NO: 1485823 - RNA, 14 nt, Human
aagucuguuuacug

SEQ ID NO: 1485824 - RNA, 16 nt, Human
aagucuguuuacugca

SEQ ID NO: 1485825 - RNA, 23 nt, Human
aaguugacuuauaguacaugaua

SEQ ID NO: 1485826 - RNA, 21 nt, Human
aaguugacuuauaguacauga

SEQ ID NO: 1485827 - RNA, 20 nt, Human
aaguugacuuauaguacaug

SEQ ID NO: 1485828 - RNA, 19 nt, Human
aaguugacuuauaguacau

SEQ ID NO: 1485829 - RNA, 16 nt, Human
aaguugacuuauagua

SEQ ID NO: 1485830 - RNA, 14 nt, Human
aaguguaauugaga

SEQ ID NO: 1485831 - RNA, 12 nt, Human
aaguugaauuuu

SEQ ID NO: 1485832 - RNA, 13 nt, Human
aagugcuuucuuc

SEQ ID NO: 1485833 - RNA, 17 nt, Human
aaggacaucagcaaaca

SEQ ID NO: 1485834 - RNA, 15 nt, Human
aaggacaucagcaaa

SEQ ID NO: 1485835 - RNA, 14 nt, Human
aaggacaucagcaa

SEQ ID NO: 1485836 - RNA, 18 nt, Human
aagcuguguggcagucug

SEQ ID NO: 1485837 - RNA, 16 nt, Human
aagcugguuuaauguu

SEQ ID NO: 1485838 - RNA, 20 nt, Human
aaggcagcucuaaaugucaa

SEQ ID NO: 1485839 - RNA, 20 nt, Human
aagcuacagaagaaacuggg

SEQ ID NO: 1485840 - RNA, 20 nt, Human
aagcgccuccaacccuagca

SEQ ID NO: 1485841 - RNA, 16 nt, Human
aagcgccuccaacccu

SEQ ID NO: 1485842 - RNA, 22 nt, Human
aagcgcuagaggaagcagccaa

SEQ ID NO: 1485843 - RNA, 15 nt, Human
aagcgccuccaaccc

SEQ ID NO: 1485844 - RNA, 14 nt, Human
aagcgccuccaacc

SEQ ID NO: 1485845 - RNA, 14 nt, Human
aagauacugaaaua

SEQ ID NO: 1485846 - RNA, 20 nt, Human
aagauuacucaguaauuugu

SEQ ID NO: 1485847 - RNA, 13 nt, Human
aagauacugaaau

SEQ ID NO: 1485848 - RNA, 14 nt, Human
aaaucuggcuucug

SEQ ID NO: 1485849 - RNA, 18 nt, Human
aaaucuggcuucuggcca

SEQ ID NO: 1485850 - RNA, 21 nt, Human
aaaucuggcuucuggccagga

SEQ ID NO: 1485851 - RNA, 20 nt, Human
aaaucaaucuguaaaacuaa

SEQ ID NO: 1485852 - RNA, 19 nt, Human
aaaucaauuacugguccaa

SEQ ID NO: 1485853 - RNA, 23 nt, Human
aaaucaauuacugguccaaaaga

SEQ ID NO: 1485854 - RNA, 15 nt, Human
aaauauuuauuuuaa

SEQ ID NO: 1485855 - RNA, 13 nt, Human
aaauauuuauuuu

SEQ ID NO: 1485856 - RNA, 20 nt, Human
aaauauuuauuuuaauaaug

SEQ ID NO: 1485857 - RNA, 17 nt, Human
aaauagcuuuuuucucu

SEQ ID NO: 1485858 - RNA, 20 nt, Human
aaauagcuuuuuucucugau

SEQ ID NO: 1485859 - RNA, 12 nt, Human
aaaggcaaaggc

SEQ ID NO: 1485860 - RNA, 22 nt, Human
aaagccaaggagucacugagac

SEQ ID NO: 1485861 - RNA, 23 nt, Human
aaagccaaggagucacugagacc

SEQ ID NO: 1485862 - RNA, 13 nt, Human
aaaaguugaauuu

SEQ ID NO: 1485863 - RNA, 12 nt, Human
aaaauaaacaaa

SEQ ID NO: 1485864 - RNA, 14 nt, Human
aaaauaaacaaaua

SEQ ID NO: 1485865 - RNA, 18 nt, Human
aaaaguuacauguuugca

SEQ ID NO: 1485866 - RNA, 19 nt, Human
aaaaguuacauguuugcac

SEQ ID NO: 1485867 - RNA, 13 nt, Human
aaaauccuugcuu

SEQ ID NO: 1485868 - RNA, 20 nt, Human
aaaauccuugcuuaugacau

SEQ ID NO: 1485869 - RNA, 14 nt, Human
aaaauaaagaaaua

SEQ ID NO: 1485870 - RNA, 12 nt, Human
aaaauaaagaau

SEQ ID NO: 1485871 - RNA, 13 nt, Human
aaaauaaagaaug

SEQ ID NO: 1485872 - RNA, 21 nt, Human
aaaaucagguggcuuuugcgg

SEQ ID NO: 1485873 - RNA, 16 nt, Human
aaaaagaaacauuugg

SEQ ID NO: 1485874 - RNA, 20 nt, Human
aaaagugccauuaacaaaug

SEQ ID NO: 1485875 - RNA, 23 nt, Human
aaaaguggguuuuuuaguugaau

SEQ ID NO: 1485876 - RNA, 21 nt, Human
aaacacugggagaaaugaaaa

SEQ ID NO: 1485877 - RNA, 22 nt, Human
aaacacugggagaaaugaaaaa

SEQ ID NO: 1485878 - RNA, 21 nt, Human
aaaauugaugggauuugguca

SEQ ID NO: 1485879 - RNA, 16 nt, Human
aaaaucucaauauuuc

SEQ ID NO: 1485880 - RNA, 17 nt, Human
aaaaucucaauauuuca

SEQ ID NO: 1485881 - RNA, 12 nt, Human
aaacagacacug

SEQ ID NO: 1485882 - RNA, 13 nt, Human
aaacagaaacaaa

SEQ ID NO: 1485883 - RNA, 19 nt, Human
aaacagaaacaaaaacacu

SEQ ID NO: 1485884 - RNA, 21 nt, Human
aaacagaaacaaaaacacuaa

SEQ ID NO: 1485885 - RNA, 17 nt, Human
aaagaaauauaccuaaa

SEQ ID NO: 1485886 - RNA, 14 nt, Human
aaacugaggaauuu

SEQ ID NO: 1485887 - RNA, 19 nt, Human
aaacugaggaauuucaccu

SEQ ID NO: 1485888 - RNA, 18 nt, Human
aaacugaggaauuuucuu

SEQ ID NO: 1485889 - RNA, 19 nt, Human
aaacugaggaauuuucuuu

SEQ ID NO: 1485890 - RNA, 15 nt, Human
aaagaaguaaaagca

SEQ ID NO: 1485891 - RNA, 14 nt, Human
aaagaguucaagaa

SEQ ID NO: 1485892 - RNA, 20 nt, Human
aaagaguucaagaaauaagu

SEQ ID NO: 1485893 - RNA, 16 nt, Human
aaagaguucaagaaau

SEQ ID NO: 1485894 - RNA, 23 nt, Human
aaaccaugaagagauuuuucaug

SEQ ID NO: 1485895 - RNA, 15 nt, Human
aaaccaugcaaaugc

SEQ ID NO: 1485896 - RNA, 19 nt, Human
aacagcagacucagcucug

SEQ ID NO: 1485897 - RNA, 20 nt, Human
aacagcagacucagcucuga

SEQ ID NO: 1485898 - RNA, 17 nt, Human
aaccuagggugauauua

SEQ ID NO: 1485899 - RNA, 14 nt, Human
aacccuagcaaaag

SEQ ID NO: 1485900 - RNA, 23 nt, Human
aacccuaaauaauaaaaauaaac

SEQ ID NO: 1485901 - RNA, 12 nt, Human
aaccagaucauu

SEQ ID NO: 1485902 - RNA, 21 nt, Human
aaccgaacugauguaaguaaa

SEQ ID NO: 1485903 - RNA, 15 nt, Human
aacaucccuccuggg

SEQ ID NO: 1485904 - RNA, 16 nt, Human
aacagcuucucaauuu

SEQ ID NO: 1485905 - RNA, 15 nt, Human
aaccagagugcugaa

SEQ ID NO: 1485906 - RNA, 17 nt, Human
aaccacuuuuugcagcu

SEQ ID NO: 1485907 - RNA, 15 nt, Human
aaccacuuuuugcag

SEQ ID NO: 1485908 - RNA, 14 nt, Human
aaccacuuuuugca

SEQ ID NO: 1485909 - RNA, 21 nt, Human
aacacguaucccaccugacau

SEQ ID NO: 1485910 - RNA, 14 nt, Human
aacacuaaaaauaa

SEQ ID NO: 1485911 - RNA, 15 nt, Human
aacacuaaaaauaaa

SEQ ID NO: 1485912 - RNA, 18 nt, Human
aaauuuuuuuuacauuuu

SEQ ID NO: 1485913 - RNA, 17 nt, Human
aaauuuuuuuuacauuu

SEQ ID NO: 1485914 - RNA, 16 nt, Human
aaauuuuuuuuacauu

SEQ ID NO: 1485915 - RNA, 19 nt, Human
aacaaaaacacuaaaaaua

SEQ ID NO: 1485916 - RNA, 14 nt, Human
aacaaccucaacug

SEQ ID NO: 1485917 - RNA, 18 nt, Human
aacaaccucaacugccua

SEQ ID NO: 1485918 - RNA, 20 nt, Human
aacaccauagguagaaugua

SEQ ID NO: 1485919 - RNA, 15 nt, Human
aacaccauugaaggc

SEQ ID NO: 1485920 - RNA, 17 nt, Human
aacaccauugaaggcuu

SEQ ID NO: 1485921 - RNA, 19 nt, Human
aacaccauugaaggcuuaa

SEQ ID NO: 1485922 - RNA, 15 nt, Human
aaaugccuuuguacu

SEQ ID NO: 1485923 - RNA, 16 nt, Human
aaaugccuuuucccaa

SEQ ID NO: 1485924 - RNA, 21 nt, Human
aaaugccuuuucccaaaaugu

SEQ ID NO: 1485925 - RNA, 17 nt, Human
aaaucuuauaauuuaaa

SEQ ID NO: 1485926 - RNA, 17 nt, Human
aaauguuggucauuuua

SEQ ID NO: 1485927 - RNA, 19 nt, Human
aaauguuggucauuuuaug

SEQ ID NO: 1485928 - RNA, 15 nt, Human
aaauuuuuuuuacau

SEQ ID NO: 1485929 - RNA, 14 nt, Human
aaauugaaugcaaa

SEQ ID NO: 1485930 - RNA, 15 nt, Human
aaauugaaugcaaac

SEQ ID NO: 1485931 - RNA, 13 nt, Human
aaauugaaugcaa

SEQ ID NO: 1485932 - RNA, 19 nt, Human
aaauuaaaccggaccaucu

SEQ ID NO: 1485933 - RNA, 13 nt, Human
aaauuaaagcauu

SEQ ID NO: 1485934 - RNA, 13 nt, Human
aaauucuuucauu

SEQ ID NO: 1485935 - RNA, 21 nt, Human
aacuauugcauuuauauguac

SEQ ID NO: 1485936 - RNA, 15 nt, Human
aacuauugcauuuau

SEQ ID NO: 1485937 - RNA, 16 nt, Human
aacuauugcauuuaua

SEQ ID NO: 1485938 - RNA, 12 nt, Human
aacuauuuucag

SEQ ID NO: 1485939 - RNA, 13 nt, Human
aacuauuuucaga

SEQ ID NO: 1485940 - RNA, 14 nt, Human
aacuauuuucagau

SEQ ID NO: 1485941 - RNA, 20 nt, Human
aacuauuuucagaugugaac

SEQ ID NO: 1485942 - RNA, 16 nt, Human
aacuauuuucagaugu

SEQ ID NO: 1485943 - RNA, 15 nt, Human
aacucaaaauauuug

SEQ ID NO: 1485944 - RNA, 12 nt, Human
aacggagucaaa

SEQ ID NO: 1485945 - RNA, 14 nt, Human
aacggaagaagaga

SEQ ID NO: 1485946 - RNA, 15 nt, Human
aacugacucuuaaga

SEQ ID NO: 1485947 - RNA, 18 nt, Human
aacugacucuuaagaaga

SEQ ID NO: 1485948 - RNA, 19 nt, Human
aacugacucuuaagaagac

SEQ ID NO: 1485949 - RNA, 20 nt, Human
aacugacucuuaagaagacu

SEQ ID NO: 1485950 - RNA, 20 nt, Human
aacugacuauucuugaugua

SEQ ID NO: 1485951 - RNA, 22 nt, Human
aacugacuauucuugauguaaa

SEQ ID NO: 1485952 - RNA, 23 nt, Human
aacugacuauucuugauguaaaa

SEQ ID NO: 1485953 - RNA, 19 nt, Human
aacuuaaauuuuaguucuu

SEQ ID NO: 1485954 - RNA, 18 nt, Human
aacugaggaauuuucuuu

SEQ ID NO: 1485955 - RNA, 20 nt, Human
aacugaggaauuuucuuugu

SEQ ID NO: 1485956 - RNA, 23 nt, Human
caccccuaaaagaaacccugcac

SEQ ID NO: 1485957 - RNA, 12 nt, Human
cacccccagcuu

SEQ ID NO: 1485958 - RNA, 14 nt, Human
caccccccaagcug

SEQ ID NO: 1485959 - RNA, 15 nt, Human
caccccccaagcugu

SEQ ID NO: 1485960 - RNA, 16 nt, Human
caccccgacuuuuguu

SEQ ID NO: 1485961 - RNA, 22 nt, Human
cacccaccaguugaauuucauc

SEQ ID NO: 1485962 - RNA, 16 nt, Human
cacccaauucaaaaca

SEQ ID NO: 1485963 - RNA, 17 nt, Human
cacccaauucaaaacau

SEQ ID NO: 1485964 - RNA, 15 nt, Human
caaaaaacuacuucu

SEQ ID NO: 1485965 - RNA, 11 nt, Human
caaaaaacuac

SEQ ID NO: 1485966 - RNA, 12 nt, Human
caaaaaagaaaa

SEQ ID NO: 1485967 - RNA, 14 nt, Human
caaaaaagaaaacc

SEQ ID NO: 1485968 - RNA, 13 nt, Human
caaagagguauuu

SEQ ID NO: 1485969 - RNA, 16 nt, Human
caaagcuuuuuccaga

SEQ ID NO: 1485970 - RNA, 12 nt, Human
caaauauauuca

SEQ ID NO: 1485971 - RNA, 20 nt, Human
caaauaauuuuucacuucaa

SEQ ID NO: 1485972 - RNA, 13 nt, Human
caaaguuuaauaa

SEQ ID NO: 1485973 - RNA, 20 nt, Human
caaaguuuaauaaauuuauu

SEQ ID NO: 1485974 - RNA, 19 nt, Human
caaaguuuaccagaaagca

SEQ ID NO: 1485975 - RNA, 14 nt, Human
caaaucacugaacu

SEQ ID NO: 1485976 - RNA, 19 nt, Human
caaaucaccacaaacugua

SEQ ID NO: 1485977 - RNA, 20 nt, Human
caaaucaccacaaacuguaa

SEQ ID NO: 1485978 - RNA, 15 nt, Human
caaaucaccacaaac

SEQ ID NO: 1485979 - RNA, 15 nt, Human
caaaucacugaacuu

SEQ ID NO: 1485980 - RNA, 14 nt, Human
caaaucaccacaaa

SEQ ID NO: 1485981 - RNA, 12 nt, Human
caacuuuguaua

SEQ ID NO: 1485982 - RNA, 11 nt, Human
caacuuuguau

SEQ ID NO: 1485983 - RNA, 14 nt, Human
caacuucaguccaa

SEQ ID NO: 1485984 - RNA, 11 nt, Human
caacuuauuaa

SEQ ID NO: 1485985 - RNA, 14 nt, Human
caacuuacuacuga

SEQ ID NO: 1485986 - RNA, 15 nt, Human
caacugcuaaucuac

SEQ ID NO: 1485987 - RNA, 18 nt, Human
caacugccuacuccaaaa

SEQ ID NO: 1485988 - RNA, 22 nt, Human
caacugccuacuccaaaauguu

SEQ ID NO: 1485989 - RNA, 21 nt, Human
caacucugaaggguaauuaua

SEQ ID NO: 1485990 - RNA, 13 nt, Human
caacucucuuauu

SEQ ID NO: 1485991 - RNA, 16 nt, Human
caacucucuuauugcc

SEQ ID NO: 1485992 - RNA, 21 nt, Human
caacucucuuauugccucacu

SEQ ID NO: 1485993 - RNA, 22 nt, Human
caacucucuuauugccucacuu

SEQ ID NO: 1485994 - RNA, 14 nt, Human
caacugccuacucc

SEQ ID NO: 1485995 - RNA, 15 nt, Human
caacugccuacucca

SEQ ID NO: 1485996 - RNA, 18 nt, Human
caaauucugucucuggau

SEQ ID NO: 1485997 - RNA, 15 nt, Human
caaauucugucucug

SEQ ID NO: 1485998 - RNA, 23 nt, Human
caacagguaaaacagggccacau

SEQ ID NO: 1485999 - RNA, 16 nt, Human
caacagugaagacaga

SEQ ID NO: 1486000 - RNA, 22 nt, Human
caacauuucuauagccaaaaau

SEQ ID NO: 1486001 - RNA, 14 nt, Human
caaccaauggaaug

SEQ ID NO: 1486002 - RNA, 14 nt, Human
caaccacacccaca

SEQ ID NO: 1486003 - RNA, 15 nt, Human
caacaugcacugaug

SEQ ID NO: 1486004 - RNA, 15 nt, Human
caacauguuauuugu

SEQ ID NO: 1486005 - RNA, 22 nt, Human
caacauguuauuuguaauagau

SEQ ID NO: 1486006 - RNA, 23 nt, Human
caacauguuauuuguaauagaug

SEQ ID NO: 1486007 - RNA, 17 nt, Human
caacagguaaaacaggg

SEQ ID NO: 1486008 - RNA, 22 nt, Human
caagugcagggccuguaauccc

SEQ ID NO: 1486009 - RNA, 14 nt, Human
caagucuguuuacu

SEQ ID NO: 1486010 - RNA, 20 nt, Human
caagucuguuuacugcaagg

SEQ ID NO: 1486011 - RNA, 14 nt, Human
caaggucugcuuuu

SEQ ID NO: 1486012 - RNA, 14 nt, Human
caaggucuuugguu

SEQ ID NO: 1486013 - RNA, 13 nt, Human
caaggucuuuaaa

SEQ ID NO: 1486014 - RNA, 18 nt, Human
caaguccugccucuuaaa

SEQ ID NO: 1486015 - RNA, 17 nt, Human
caagcacuaaacaaaga

SEQ ID NO: 1486016 - RNA, 14 nt, Human
caagcacuucuuuu

SEQ ID NO: 1486017 - RNA, 19 nt, Human
caagaaacugaggaauuuu

SEQ ID NO: 1486018 - RNA, 20 nt, Human
caagaaaauaagagcucagg

SEQ ID NO: 1486019 - RNA, 18 nt, Human
caagaaaauaagagcuca

SEQ ID NO: 1486020 - RNA, 18 nt, Human
caagaaacugaggaauuu

SEQ ID NO: 1486021 - RNA, 17 nt, Human
caaggagucacugagac

SEQ ID NO: 1486022 - RNA, 18 nt, Human
caaggagucacugagacc

SEQ ID NO: 1486023 - RNA, 16 nt, Human
caaggagucacugaga

SEQ ID NO: 1486024 - RNA, 17 nt, Human
caaggauagaaguauac

SEQ ID NO: 1486025 - RNA, 16 nt, Human
cacauuccugaacagg

SEQ ID NO: 1486026 - RNA, 23 nt, Human
cacauucagggcuauuuuuuccc

SEQ ID NO: 1486027 - RNA, 21 nt, Human
cacauuagaagacaauugaca

SEQ ID NO: 1486028 - RNA, 21 nt, Human
cacauuaggaaaaguugcuau

SEQ ID NO: 1486029 - RNA, 12 nt, Human
cacauguguggu

SEQ ID NO: 1486030 - RNA, 12 nt, Human
cacauguccagu

SEQ ID NO: 1486031 - RNA, 18 nt, Human
cacaugggugaacacuca

SEQ ID NO: 1486032 - RNA, 17 nt, Human
cacauguaucuaugcau

SEQ ID NO: 1486033 - RNA, 20 nt, Human
cacaugcuucccuuuccuga

SEQ ID NO: 1486034 - RNA, 23 nt, Human
cacauggccccucccccugccag

SEQ ID NO: 1486035 - RNA, 18 nt, Human
cacauauccaggcaccag

SEQ ID NO: 1486036 - RNA, 18 nt, Human
cacauuggagauguuuag

SEQ ID NO: 1486037 - RNA, 17 nt, Human
cacauuggaaacaaguc

SEQ ID NO: 1486038 - RNA, 13 nt, Human
caccaagccuuga

SEQ ID NO: 1486039 - RNA, 20 nt, Human
cacaggaaccacaagacugc

SEQ ID NO: 1486040 - RNA, 19 nt, Human
cacauauccaggcaccagg

SEQ ID NO: 1486041 - RNA, 15 nt, Human
cacauauccaggcac

SEQ ID NO: 1486042 - RNA, 19 nt, Human
cacagcaccagaauguaua

SEQ ID NO: 1486043 - RNA, 16 nt, Human
cacagcaccagaaugu

SEQ ID NO: 1486044 - RNA, 19 nt, Human
cacacugggacuugcaaaa

SEQ ID NO: 1486045 - RNA, 16 nt, Human
cacacuuacuuuuucu

SEQ ID NO: 1486046 - RNA, 14 nt, Human
cacacuuacuuuuu

SEQ ID NO: 1486047 - RNA, 19 nt, Human
cacacucagauccuccuca

SEQ ID NO: 1486048 - RNA, 20 nt, Human
cacacucagauccuccucau

SEQ ID NO: 1486049 - RNA, 13 nt, Human
cacaacuauauug

SEQ ID NO: 1486050 - RNA, 18 nt, Human
cacacacaugcuucccuu

SEQ ID NO: 1486051 - RNA, 21 nt, Human
cacaccaggcuugccugcagg

SEQ ID NO: 1486052 - RNA, 22 nt, Human
cacaccaggcuugccugcaggc

SEQ ID NO: 1486053 - RNA, 20 nt, Human
caaugaucaccgacugaaaa

SEQ ID NO: 1486054 - RNA, 19 nt, Human
caaugauccuguauucaga

SEQ ID NO: 1486055 - RNA, 13 nt, Human
caaugauggcaau

SEQ ID NO: 1486056 - RNA, 16 nt, Human
caaugauggcaauuuu

SEQ ID NO: 1486057 - RNA, 21 nt, Human
caaugauggcaauuuuguaac

SEQ ID NO: 1486058 - RNA, 16 nt, Human
caaugcagugccuuuc

SEQ ID NO: 1486059 - RNA, 22 nt, Human
caauccucccacuucagccucc

SEQ ID NO: 1486060 - RNA, 18 nt, Human
caauccucccacuucagc

SEQ ID NO: 1486061 - RNA, 21 nt, Human
caaugaaaugaauuaaagugg

SEQ ID NO: 1486062 - RNA, 23 nt, Human
caaugaaaugaauuaaaguggac

SEQ ID NO: 1486063 - RNA, 19 nt, Human
caaugaaaugaauuaaagu

SEQ ID NO: 1486064 - RNA, 17 nt, Human
caauagucaaauugugu

SEQ ID NO: 1486065 - RNA, 21 nt, Human
cacaaauucugucucuggauu

SEQ ID NO: 1486066 - RNA, 15 nt, Human
cacaaauuaucuuaa

SEQ ID NO: 1486067 - RNA, 23 nt, Human
cacaacagccugacaacauuucu

SEQ ID NO: 1486068 - RNA, 19 nt, Human
caauuuucuggaauacaug

SEQ ID NO: 1486069 - RNA, 17 nt, Human
cacaaacuguaauacaa

SEQ ID NO: 1486070 - RNA, 13 nt, Human
caauucaaagcug

SEQ ID NO: 1486071 - RNA, 18 nt, Human
caauucauccucacucag

SEQ ID NO: 1486072 - RNA, 14 nt, Human
caauuaaaggcaaa

SEQ ID NO: 1486073 - RNA, 18 nt, Human
uuggacaaaauggaauac

SEQ ID NO: 1486074 - RNA, 15 nt, Human
uuggaauauaauugu

SEQ ID NO: 1486075 - RNA, 24 nt, Human
uuggaagacuaucuuacuauuuca

SEQ ID NO: 1486076 - RNA, 16 nt, Human
uugcuaagcauuccaa

SEQ ID NO: 1486077 - RNA, 18 nt, Human
uugcuaagcauuccaacu

SEQ ID NO: 1486078 - RNA, 21 nt, Human
uugcuggaagacgcaagggcc

SEQ ID NO: 1486079 - RNA, 21 nt, Human
uugcuggaauaaguucaaauu

SEQ ID NO: 1486080 - RNA, 23 nt, Human
uugcuggacugucauagaaauua

SEQ ID NO: 1486081 - RNA, 13 nt, Human
uugccuuaaaaua

SEQ ID NO: 1486082 - RNA, 14 nt, Human
uugccuguaacaag

SEQ ID NO: 1486083 - RNA, 19 nt, Human
uugccuguaacaagccaga

SEQ ID NO: 1486084 - RNA, 22 nt, Human
uugccuuccagaaaacaaaacu

SEQ ID NO: 1486085 - RNA, 18 nt, Human
uuguacuuuagggaagua

SEQ ID NO: 1486086 - RNA, 17 nt, Human
uuguagaagucacauuc

SEQ ID NO: 1486087 - RNA, 22 nt, Human
uuguagaagucacauuccugaa

SEQ ID NO: 1486088 - RNA, 15 nt, Human
uuguagcauccugga

SEQ ID NO: 1486089 - RNA, 15 nt, Human
uuguaccaacuuuua

SEQ ID NO: 1486090 - RNA, 16 nt, Human
uuguaaacucaaaaua

SEQ ID NO: 1486091 - RNA, 22 nt, Human
uuguaaacucaaaauauuugua

SEQ ID NO: 1486092 - RNA, 18 nt, Human
uugucuauuaccuguuag

SEQ ID NO: 1486093 - RNA, 20 nt, Human
uugucucugcaaacugccuu

SEQ ID NO: 1486094 - RNA, 22 nt, Human
uugucucugcaaacugccuucu

SEQ ID NO: 1486095 - RNA, 12 nt, Human
uugucuuaauau

SEQ ID NO: 1486096 - RNA, 17 nt, Human
uugucuuaauauugugg

SEQ ID NO: 1486097 - RNA, 14 nt, Human
uuggcagucugaau

SEQ ID NO: 1486098 - RNA, 13 nt, Human
uugggagagacuu

SEQ ID NO: 1486099 - RNA, 23 nt, Human
uugggagagacuuguuuuggaug

SEQ ID NO: 1486100 - RNA, 16 nt, Human
uugggagagggcgcag

SEQ ID NO: 1486101 - RNA, 18 nt, Human
uugggaauggauccugga

SEQ ID NO: 1486102 - RNA, 20 nt, Human
uugguaaggggaauugagga

SEQ ID NO: 1486103 - RNA, 15 nt, Human
uugggagagggcgca

SEQ ID NO: 1486104 - RNA, 17 nt, Human
uugggagcuugggaaug

SEQ ID NO: 1486105 - RNA, 19 nt, Human
uugggagcuugggaaugga

SEQ ID NO: 1486106 - RNA, 15 nt, Human
uugggauaucuccug

SEQ ID NO: 1486107 - RNA, 22 nt, Human
uuggucucccuucucuacacuc

SEQ ID NO: 1486108 - RNA, 21 nt, Human
uugaagagguuuuaaagcuuc

SEQ ID NO: 1486109 - RNA, 20 nt, Human
uugaagcacagugaucaagu

SEQ ID NO: 1486110 - RNA, 20 nt, Human
uugaagcaaaucgaaugaaa

SEQ ID NO: 1486111 - RNA, 16 nt, Human
uugaagagguuuuaaa

SEQ ID NO: 1486112 - RNA, 18 nt, Human
uugaaaauuaacaugaau

SEQ ID NO: 1486113 - RNA, 15 nt, Human
uugaaacagaaaaau

SEQ ID NO: 1486114 - RNA, 21 nt, Human
uugaaaaucuuauaauuuaaa

SEQ ID NO: 1486115 - RNA, 17 nt, Human
uucuggccuuguaagac

SEQ ID NO: 1486116 - RNA, 13 nt, Human
uucugugccugaa

SEQ ID NO: 1486117 - RNA, 15 nt, Human
uucugugccugaaua

SEQ ID NO: 1486118 - RNA, 16 nt, Human
uucugugccugaauau

SEQ ID NO: 1486119 - RNA, 17 nt, Human
uucugugccugaauauu

SEQ ID NO: 1486120 - RNA, 14 nt, Human
uucuggccaggaag

SEQ ID NO: 1486121 - RNA, 15 nt, Human
uucuggccaggaagc

SEQ ID NO: 1486122 - RNA, 19 nt, Human
uucuuaggguuaugauuaa

SEQ ID NO: 1486123 - RNA, 18 nt, Human
uucuuaugccauauaauu

SEQ ID NO: 1486124 - RNA, 14 nt, Human
uucuuuaacuuaau

SEQ ID NO: 1486125 - RNA, 20 nt, Human
uugauaugccuuuucccaac

SEQ ID NO: 1486126 - RNA, 16 nt, Human
uugauaugugaacagu

SEQ ID NO: 1486127 - RNA, 15 nt, Human
uugauaugacuguuu

SEQ ID NO: 1486128 - RNA, 15 nt, Human
uugauauuucuagcu

SEQ ID NO: 1486129 - RNA, 17 nt, Human
uugauccagaaagaaaa

SEQ ID NO: 1486130 - RNA, 13 nt, Human
uugaauuaucuug

SEQ ID NO: 1486131 - RNA, 18 nt, Human
uugaauuaucuugguuga

SEQ ID NO: 1486132 - RNA, 20 nt, Human
uugaauuaucuugguugaaa

SEQ ID NO: 1486133 - RNA, 22 nt, Human
uugaauuaucuugguugaaaau

SEQ ID NO: 1486134 - RNA, 16 nt, Human
uugcauaacguauaaa

SEQ ID NO: 1486135 - RNA, 13 nt, Human
uugcauaagagcu

SEQ ID NO: 1486136 - RNA, 23 nt, Human
uugccaggcuggagugcaguggc

SEQ ID NO: 1486137 - RNA, 19 nt, Human
uugccaggcuggagugcag

SEQ ID NO: 1486138 - RNA, 22 nt, Human
uugcagcccugcugcugccugc

SEQ ID NO: 1486139 - RNA, 15 nt, Human
uuguuauuaaacaaa

SEQ ID NO: 1486140 - RNA, 13 nt, Human
uuguuuuacaaua

SEQ ID NO: 1486141 - RNA, 12 nt, Human
uuguuuuacaau

SEQ ID NO: 1486142 - RNA, 15 nt, Human
uuuaaaacagacacu

SEQ ID NO: 1486143 - RNA, 12 nt, Human
uuguuucuuaaa

SEQ ID NO: 1486144 - RNA, 14 nt, Human
uuguuucuuaaaua

SEQ ID NO: 1486145 - RNA, 23 nt, Human
uuguuucuuaaauaagaaacuuu

SEQ ID NO: 1486146 - RNA, 15 nt, Human
uuguuucuuaaauaa

SEQ ID NO: 1486147 - RNA, 16 nt, Human
uuuaaaaugagaaauc

SEQ ID NO: 1486148 - RNA, 17 nt, Human
uuuaaaauguaaagcca

SEQ ID NO: 1486149 - RNA, 18 nt, Human
uuuaaaauguaaagccau

SEQ ID NO: 1486150 - RNA, 20 nt, Human
uuuaaaauguaaagccaugc

SEQ ID NO: 1486151 - RNA, 12 nt, Human
uuuaaaaugucu

SEQ ID NO: 1486152 - RNA, 16 nt, Human
uuuaaaauuacaacua

SEQ ID NO: 1486153 - RNA, 17 nt, Human
uuuaaaauuuauauugu

SEQ ID NO: 1486154 - RNA, 20 nt, Human
uuuaaaauuuauauuguaaa

SEQ ID NO: 1486155 - RNA, 14 nt, Human
uuuaaacuguguac

SEQ ID NO: 1486156 - RNA, 18 nt, Human
uuuaaaccuauacucacu

SEQ ID NO: 1486157 - RNA, 11 nt, Human
uuuaaaccuuu

SEQ ID NO: 1486158 - RNA, 15 nt, Human
uuuaaacuauaagca

SEQ ID NO: 1486159 - RNA, 15 nt, Human
uuuaaacaaguauuu

SEQ ID NO: 1486160 - RNA, 17 nt, Human
uuuaaaccgcuaaaaga

SEQ ID NO: 1486161 - RNA, 20 nt, Human
uuuaaaccgcuaaaagaaac

SEQ ID NO: 1486162 - RNA, 21 nt, Human
uuuaaaccgcuaaaagaaacu

SEQ ID NO: 1486163 - RNA, 22 nt, Human
uuuaaaccgcuaaaagaaacuu

SEQ ID NO: 1486164 - RNA, 23 nt, Human
uuuaaaccgcuaaaagaaacuuu

SEQ ID NO: 1486165 - RNA, 17 nt, Human
uuuaaaaggaaagaaaa

SEQ ID NO: 1486166 - RNA, 23 nt, Human
uuuaaaagugccauuaacaaaug

SEQ ID NO: 1486167 - RNA, 12 nt, Human
uuuaaaauagca

SEQ ID NO: 1486168 - RNA, 14 nt, Human
uuuaaaagaaugau

SEQ ID NO: 1486169 - RNA, 14 nt, Human
uuuaaaacccauuu

SEQ ID NO: 1486170 - RNA, 21 nt, Human
uuuaaaacccauuuaaauuuu

SEQ ID NO: 1486171 - RNA, 17 nt, Human
uuuaaaagaaugauuau

SEQ ID NO: 1486172 - RNA, 17 nt, Human
uuuaaaagaugcuuuua

SEQ ID NO: 1486173 - RNA, 13 nt, Human
uuuaaaagaugcu

SEQ ID NO: 1486174 - RNA, 16 nt, Human
uuuacauggcuggagc

SEQ ID NO: 1486175 - RNA, 13 nt, Human
uuuaccagaaagc

SEQ ID NO: 1486176 - RNA, 22 nt, Human
uuuaauaaacacucuugaaaaa

SEQ ID NO: 1486177 - RNA, 15 nt, Human
uuuaauaauguuuca

SEQ ID NO: 1486178 - RNA, 16 nt, Human
uuuaaccuaugauauu

SEQ ID NO: 1486179 - RNA, 19 nt, Human
uuuaauaauguuucaaaca

SEQ ID NO: 1486180 - RNA, 15 nt, Human
uuuaauaaacacucu

SEQ ID NO: 1486181 - RNA, 14 nt, Human
uuuaauaaacacuc

SEQ ID NO: 1486182 - RNA, 14 nt, Human
uuuaaccucuaaau

SEQ ID NO: 1486183 - RNA, 13 nt, Human
uuuaacauuccuc

SEQ ID NO: 1486184 - RNA, 12 nt, Human
uuuaacauuccu

SEQ ID NO: 1486185 - RNA, 23 nt, Human
uuuaacauuccucaugaauguaa

SEQ ID NO: 1486186 - RNA, 22 nt, Human
uuuaacauuccucaugaaugua

SEQ ID NO: 1486187 - RNA, 18 nt, Human
uuuaguugcaacuuugua

SEQ ID NO: 1486188 - RNA, 17 nt, Human
uuuaguugcaacuuugu

SEQ ID NO: 1486189 - RNA, 11 nt, Human
uuuaguugaau

SEQ ID NO: 1486190 - RNA, 14 nt, Human
uuuaguugaauuuu

SEQ ID NO: 1486191 - RNA, 23 nt, Human
uuuaguugaauuuuuuuuaacau

SEQ ID NO: 1486192 - RNA, 19 nt, Human
uuuauccugaaauuucaga

SEQ ID NO: 1486193 - RNA, 16 nt, Human
uuuaucgcagaccuuu

SEQ ID NO: 1486194 - RNA, 16 nt, Human
uuuauccuaucucucc

SEQ ID NO: 1486195 - RNA, 18 nt, Human
uuuauccugaaauuucag

SEQ ID NO: 1486196 - RNA, 16 nt, Human
uuuaucugaauuuuua

SEQ ID NO: 1486197 - RNA, 12 nt, Human
uuuaucuuuaua

SEQ ID NO: 1486198 - RNA, 17 nt, Human
uuuauggcacuaguauu

SEQ ID NO: 1486199 - RNA, 22 nt, Human
uuuaugauacuugaaaauuaac

SEQ ID NO: 1486200 - RNA, 17 nt, Human
uuuaugagaaagccuuc

SEQ ID NO: 1486201 - RNA, 14 nt, Human
uuuaugccaccuga

SEQ ID NO: 1486202 - RNA, 13 nt, Human
uuuaugcuugcaa

SEQ ID NO: 1486203 - RNA, 17 nt, Human
uuucacaaggucuuuaa

SEQ ID NO: 1486204 - RNA, 18 nt, Human
uuucaguccccacagaua

SEQ ID NO: 1486205 - RNA, 12 nt, Human
uuucugaaauuu

SEQ ID NO: 1486206 - RNA, 19 nt, Human
uuucugaaauuuccuggga

SEQ ID NO: 1486207 - RNA, 18 nt, Human
uuucugaguuuuaccaaa

SEQ ID NO: 1486208 - RNA, 17 nt, Human
uuucugaguuuuaccaa

SEQ ID NO: 1486209 - RNA, 12 nt, Human
uuucucuaggaa

SEQ ID NO: 1486210 - RNA, 22 nt, Human
uuucucgcuguccuuucuagag

SEQ ID NO: 1486211 - RNA, 16 nt, Human
uuucuaccauuucaga

SEQ ID NO: 1486212 - RNA, 17 nt, Human
uuucuaaaguaaaaaca

SEQ ID NO: 1486213 - RNA, 14 nt, Human
uuuccuggugccaa

SEQ ID NO: 1486214 - RNA, 16 nt, Human
uuuccuggugccaauu

SEQ ID NO: 1486215 - RNA, 19 nt, Human
uuuccuggugccaauuuca

SEQ ID NO: 1486216 - RNA, 22 nt, Human
uuuccuggugccaauuucaagu

SEQ ID NO: 1486217 - RNA, 22 nt, Human
uuucuaaaguaaaaacaaagaa

SEQ ID NO: 1486218 - RNA, 19 nt, Human
uuuccuaagugauuguaug

SEQ ID NO: 1486219 - RNA, 22 nt, Human
uuuccuccgucaccucagagac

SEQ ID NO: 1486220 - RNA, 18 nt, Human
uuugccacccucaugcug

SEQ ID NO: 1486221 - RNA, 19 nt, Human
uuugccacccucaugcugu

SEQ ID NO: 1486222 - RNA, 23 nt, Human
uuugccaagggcauaaauuauug

SEQ ID NO: 1486223 - RNA, 22 nt, Human
uuugccaagggcauaaauuauu

SEQ ID NO: 1486224 - RNA, 14 nt, Human
uuugauaugugaac

SEQ ID NO: 1486225 - RNA, 15 nt, Human
uuugauaugugaaca

SEQ ID NO: 1486226 - RNA, 17 nt, Human
uuugauaugugaacagu

SEQ ID NO: 1486227 - RNA, 16 nt, Human
uuuggaccuaauccaa

SEQ ID NO: 1486228 - RNA, 18 nt, Human
uuugguaaggggaauuga

SEQ ID NO: 1486229 - RNA, 19 nt, Human
uuugguuucccaagagcua

SEQ ID NO: 1486230 - RNA, 13 nt, Human
uuuguauucaaaa

SEQ ID NO: 1486231 - RNA, 16 nt, Human
uuuguaaacucaaaau

SEQ ID NO: 1486232 - RNA, 17 nt, Human
uuuguaaacucaaaaua

SEQ ID NO: 1486233 - RNA, 22 nt, Human
uuuguaaacucaaaauauuugu

SEQ ID NO: 1486234 - RNA, 13 nt, Human
uuugaaccaauaa

SEQ ID NO: 1486235 - RNA, 18 nt, Human
uuugaaccugaugaaaau

SEQ ID NO: 1486236 - RNA, 20 nt, Human
uuugaaccugaugaaaauaa

SEQ ID NO: 1486237 - RNA, 21 nt, Human
uuugaaauuguauuacaaauc

SEQ ID NO: 1486238 - RNA, 18 nt, Human
uuucuuaaccagaucauu

SEQ ID NO: 1486239 - RNA, 21 nt, Human
uuucuuaaauaagaaacuuuu

SEQ ID NO: 1486240 - RNA, 18 nt, Human
uuucuuaaauaagaaacu

SEQ ID NO: 1486241 - RNA, 19 nt, Human
uuucuuaaauaagaaacuu

SEQ ID NO: 1486242 - RNA, 15 nt, Human
uuucugaucaaggcc

SEQ ID NO: 1486243 - RNA, 17 nt, Human
uuucugaucaaggccuu

SEQ ID NO: 1486244 - RNA, 12 nt, Human
uuucuuaaauaa

SEQ ID NO: 1486245 - RNA, 13 nt, Human
uuucuuaaauaag

SEQ ID NO: 1486246 - RNA, 20 nt, Human
uuucuuaaauaagaaacuuu

SEQ ID NO: 1486247 - RNA, 17 nt, Human
uuugaaguuagcuuuaa

SEQ ID NO: 1486248 - RNA, 13 nt, Human
uuugaaguguaau

SEQ ID NO: 1486249 - RNA, 23 nt, Human
uuugaaguuagcuuuaacuuaaa

SEQ ID NO: 1486250 - RNA, 16 nt, Human
uuugaaguuagcuuua

SEQ ID NO: 1486251 - RNA, 21 nt, Human
uguuucaaacauauauaacaa

SEQ ID NO: 1486252 - RNA, 22 nt, Human
uguuucaaacauauauaacaau

SEQ ID NO: 1486253 - RNA, 16 nt, Human
uguuucacaaggucuu

SEQ ID NO: 1486254 - RNA, 13 nt, Human
uguuucacaaggu

SEQ ID NO: 1486255 - RNA, 20 nt, Human
uguuuguacacaacaauccu

SEQ ID NO: 1486256 - RNA, 17 nt, Human
uguuucuacuuugauau

SEQ ID NO: 1486257 - RNA, 13 nt, Human
uuaaaagaaugau

SEQ ID NO: 1486258 - RNA, 20 nt, Human
uuaaaagaugcuuuuaacag

SEQ ID NO: 1486259 - RNA, 22 nt, Human
uuaaaagaugcuuuuaacagag

SEQ ID NO: 1486260 - RNA, 18 nt, Human
uuaaaaguguauuuguua

SEQ ID NO: 1486261 - RNA, 19 nt, Human
uuaaaauagcaaaagaaga

SEQ ID NO: 1486262 - RNA, 21 nt, Human
uuaaaauagcaaaagaagaag

SEQ ID NO: 1486263 - RNA, 23 nt, Human
uuaaaauagcaaaagaagaaguu

SEQ ID NO: 1486264 - RNA, 22 nt, Human
uuaaaauagcaaaagaagaagu

SEQ ID NO: 1486265 - RNA, 12 nt, Human
uuaaacugugua

SEQ ID NO: 1486266 - RNA, 19 nt, Human
uuaaacuguguacauaacu

SEQ ID NO: 1486267 - RNA, 18 nt, Human
uguuuuuuuuuaaagacu

SEQ ID NO: 1486268 - RNA, 18 nt, Human
uguuuuuuuguuauuaaa

SEQ ID NO: 1486269 - RNA, 16 nt, Human
uguuuuuuuguuauua

SEQ ID NO: 1486270 - RNA, 15 nt, Human
uguuuuuuucuaaua

SEQ ID NO: 1486271 - RNA, 22 nt, Human
uuaacuauugcauuuauaugua

SEQ ID NO: 1486272 - RNA, 21 nt, Human
uuaacuauugcauuuauaugu

SEQ ID NO: 1486273 - RNA, 14 nt, Human
uuaacuauugcauu

SEQ ID NO: 1486274 - RNA, 15 nt, Human
uuaacucauuagacu

SEQ ID NO: 1486275 - RNA, 16 nt, Human
uuaacucauuagacug

SEQ ID NO: 1486276 - RNA, 17 nt, Human
uuaacucauuagacugg

SEQ ID NO: 1486277 - RNA, 15 nt, Human
uuaacucucuuuaug

SEQ ID NO: 1486278 - RNA, 19 nt, Human
uuaacucucuuuaugucug

SEQ ID NO: 1486279 - RNA, 17 nt, Human
uuaacucucuuuauguc

SEQ ID NO: 1486280 - RNA, 21 nt, Human
uuaacuggguaaugaaacaaa

SEQ ID NO: 1486281 - RNA, 17 nt, Human
uuaacuggguaaugaaa

SEQ ID NO: 1486282 - RNA, 15 nt, Human
uuaacuuaaauagua

SEQ ID NO: 1486283 - RNA, 13 nt, Human
uuaacuuaaauag

SEQ ID NO: 1486284 - RNA, 23 nt, Human
uuaaauguuuuuuuuuaaagacu

SEQ ID NO: 1486285 - RNA, 21 nt, Human
uuaaauguuuuuuuuuaaaga

SEQ ID NO: 1486286 - RNA, 14 nt, Human
uuaaagacuuuuau

SEQ ID NO: 1486287 - RNA, 13 nt, Human
uuaaccagaucua

SEQ ID NO: 1486288 - RNA, 22 nt, Human
uuaaccagaucuagucaaucaa

SEQ ID NO: 1486289 - RNA, 20 nt, Human
uuaaccuaugauauuuucug

SEQ ID NO: 1486290 - RNA, 21 nt, Human
uuaaccuaugauauuuucugu

SEQ ID NO: 1486291 - RNA, 22 nt, Human
uuaaugucaauucuugccaaau

SEQ ID NO: 1486292 - RNA, 19 nt, Human
uuaauguauaguaaaucac

SEQ ID NO: 1486293 - RNA, 13 nt, Human
uuaauguguauua

SEQ ID NO: 1486294 - RNA, 20 nt, Human
uuaauggugccuucauuugg

SEQ ID NO: 1486295 - RNA, 17 nt, Human
uuaauggugccuucauu

SEQ ID NO: 1486296 - RNA, 19 nt, Human
uuaauggugccuucauuug

SEQ ID NO: 1486297 - RNA, 18 nt, Human
uuaauggcugauaauuuu

SEQ ID NO: 1486298 - RNA, 15 nt, Human
uuaauguuuaaaaca

SEQ ID NO: 1486299 - RNA, 17 nt, Human
uuacaaguaacaaaaau

SEQ ID NO: 1486300 - RNA, 20 nt, Human
uuacaaguaacaaaaauaaa

SEQ ID NO: 1486301 - RNA, 19 nt, Human
uuacaaguaacaaaaauaa

SEQ ID NO: 1486302 - RNA, 20 nt, Human
uuaauauauauuaucuuuuc

SEQ ID NO: 1486303 - RNA, 19 nt, Human
uuacugucuuuuuucuaaa

SEQ ID NO: 1486304 - RNA, 18 nt, Human
uuacuuauuaucuucagg

SEQ ID NO: 1486305 - RNA, 22 nt, Human
uuacuucguguccgacucuucu

SEQ ID NO: 1486306 - RNA, 15 nt, Human
uuacaauuuuuuauc

SEQ ID NO: 1486307 - RNA, 17 nt, Human
uuacaauuuuuuaucau

SEQ ID NO: 1486308 - RNA, 18 nt, Human
uuacaauuuuuuaucaug

SEQ ID NO: 1486309 - RNA, 20 nt, Human
uuacaauuuuuuaucaugca

SEQ ID NO: 1486310 - RNA, 15 nt, Human
uuacuauaagaacuu

SEQ ID NO: 1486311 - RNA, 20 nt, Human
uuacuauaagaacuuugagc

SEQ ID NO: 1486312 - RNA, 23 nt, Human
uuacuauaagaacuuugagcuac

SEQ ID NO: 1486313 - RNA, 20 nt, Human
uuacuaaggaagauuacuca

SEQ ID NO: 1486314 - RNA, 13 nt, Human
uuacuacaugcac

SEQ ID NO: 1486315 - RNA, 14 nt, Human
uuacuacaugcacu

SEQ ID NO: 1486316 - RNA, 15 nt, Human
uuagacuggaacuug

SEQ ID NO: 1486317 - RNA, 16 nt, Human
uuagacuggaacuuga

SEQ ID NO: 1486318 - RNA, 17 nt, Human
uuagacuggaacuugaa

SEQ ID NO: 1486319 - RNA, 21 nt, Human
uuagacuggaacuugaacuga

SEQ ID NO: 1486320 - RNA, 22 nt, Human
uuagacuggaacuugaacugau

SEQ ID NO: 1486321 - RNA, 15 nt, Human
uuagacuggacagcu

SEQ ID NO: 1486322 - RNA, 16 nt, Human
uuagacuggacagcuu

SEQ ID NO: 1486323 - RNA, 17 nt, Human
uuagacuggacagcuug

SEQ ID NO: 1486324 - RNA, 19 nt, Human
uuagacuggacagcuugug

SEQ ID NO: 1486325 - RNA, 19 nt, Human
uuagaccaccaagccuuga

SEQ ID NO: 1486326 - RNA, 17 nt, Human
uuagaccaccaagccuu

SEQ ID NO: 1486327 - RNA, 16 nt, Human
uuagaccaccaagccu

SEQ ID NO: 1486328 - RNA, 19 nt, Human
uuagaaacacaacuauauu

SEQ ID NO: 1486329 - RNA, 21 nt, Human
uuagaaaacauaaucuucugc

SEQ ID NO: 1486330 - RNA, 16 nt, Human
uuagaaaacuuuaaag

SEQ ID NO: 1486331 - RNA, 14 nt, Human
uuagaaaacuuuaa

SEQ ID NO: 1486332 - RNA, 17 nt, Human
uuacuuuuaaacaguga

SEQ ID NO: 1486333 - RNA, 14 nt, Human
uuacuuuuaaacug

SEQ ID NO: 1486334 - RNA, 15 nt, Human
uuacuuuuaaacugu

SEQ ID NO: 1486335 - RNA, 16 nt, Human
uuacuuuuaaacugug

SEQ ID NO: 1486336 - RNA, 19 nt, Human
uuacuuuuaaacuguguac

SEQ ID NO: 1486337 - RNA, 14 nt, Human
uuacuuuugcugua

SEQ ID NO: 1486338 - RNA, 16 nt, Human
uuacuuuauguuacua

SEQ ID NO: 1486339 - RNA, 14 nt, Human
uuagggaaaacauu

SEQ ID NO: 1486340 - RNA, 14 nt, Human
uuaggccucugaga

SEQ ID NO: 1486341 - RNA, 23 nt, Human
uuaggaaguugacuuauaguaca

SEQ ID NO: 1486342 - RNA, 22 nt, Human
uuaggaaguugacuuauaguac

SEQ ID NO: 1486343 - RNA, 18 nt, Human
uuaggaagcaagcuuaau

SEQ ID NO: 1486344 - RNA, 16 nt, Human
uuaggcagacucuuua

SEQ ID NO: 1486345 - RNA, 15 nt, Human
uuaggcagacucuuu

SEQ ID NO: 1486346 - RNA, 14 nt, Human
uuaguguucauaaa

SEQ ID NO: 1486347 - RNA, 17 nt, Human
uuagucccucaugcaaa

SEQ ID NO: 1486348 - RNA, 12 nt, Human
uuagcuggaaaa

SEQ ID NO: 1486349 - RNA, 13 nt, Human
uuagcuggaaaag

SEQ ID NO: 1486350 - RNA, 16 nt, Human
uuagcuggcauuacag

SEQ ID NO: 1486351 - RNA, 15 nt, Human
uuagcugucugcuca

SEQ ID NO: 1486352 - RNA, 17 nt, Human
uuagcugucugcucaga

SEQ ID NO: 1486353 - RNA, 13 nt, Human
uuagcuuuaacuu

SEQ ID NO: 1486354 - RNA, 20 nt, Human
uuagaugcaguucugaagaa

SEQ ID NO: 1486355 - RNA, 21 nt, Human
uuagaugcaguucugaagaag

SEQ ID NO: 1486356 - RNA, 15 nt, Human
uuagaucuggcaugu

SEQ ID NO: 1486357 - RNA, 18 nt, Human
uuagagggaggagaauga

SEQ ID NO: 1486358 - RNA, 16 nt, Human
uuaugcuuaaauucaa

SEQ ID NO: 1486359 - RNA, 17 nt, Human
uuaugcugugacacaug

SEQ ID NO: 1486360 - RNA, 21 nt, Human
uuauggcacuaguauuucuau

SEQ ID NO: 1486361 - RNA, 16 nt, Human
uuaugccaccugaaua

SEQ ID NO: 1486362 - RNA, 14 nt, Human
uuaugaaaaagaag

SEQ ID NO: 1486363 - RNA, 13 nt, Human
uuaugccaccuga

SEQ ID NO: 1486364 - RNA, 17 nt, Human
uuaucuugguugaaaau

SEQ ID NO: 1486365 - RNA, 16 nt, Human
uuaucuuuacuuuuaa

SEQ ID NO: 1486366 - RNA, 12 nt, Human
uuaucuuuauau

SEQ ID NO: 1486367 - RNA, 17 nt, Human
uuaugaaaaagaagaau

SEQ ID NO: 1486368 - RNA, 20 nt, Human
uuaguugcaacuuuguauaa

SEQ ID NO: 1486369 - RNA, 13 nt, Human
uuaguugcaacuu

SEQ ID NO: 1486370 - RNA, 17 nt, Human
uuaucugaauuuuuaaa

SEQ ID NO: 1486371 - RNA, 18 nt, Human
uuaucugaauuuuuaaac

SEQ ID NO: 1486372 - RNA, 21 nt, Human
uuaucugaauuuuuaaacaag

SEQ ID NO: 1486373 - RNA, 18 nt, Human
uuaucugagucaacuccu

SEQ ID NO: 1486374 - RNA, 20 nt, Human
uuaucugaauuuuuaaacaa

SEQ ID NO: 1486375 - RNA, 20 nt, Human
uuaucuugaauaauguaaga

SEQ ID NO: 1486376 - RNA, 16 nt, Human
uuauuaaacaaauaau

SEQ ID NO: 1486377 - RNA, 16 nt, Human
uuauuacuguaagaaa

SEQ ID NO: 1486378 - RNA, 12 nt, Human
uuauuaauuuga

SEQ ID NO: 1486379 - RNA, 17 nt, Human
uuauuacuguaagaaaa

SEQ ID NO: 1486380 - RNA, 18 nt, Human
uuauuacuguaagaaaau

SEQ ID NO: 1486381 - RNA, 19 nt, Human
uuauucguagauauuggac

SEQ ID NO: 1486382 - RNA, 15 nt, Human
uucagagaggccuuu

SEQ ID NO: 1486383 - RNA, 22 nt, Human
uucagagccuccuuucuggcuu

SEQ ID NO: 1486384 - RNA, 22 nt, Human
uucagaguugaugguuguacau

SEQ ID NO: 1486385 - RNA, 21 nt, Human
uucagaguugaugguuguaca

SEQ ID NO: 1486386 - RNA, 20 nt, Human
uucagauaaucacaauacau

SEQ ID NO: 1486387 - RNA, 21 nt, Human
uucaccuggaagcauuuguuu

SEQ ID NO: 1486388 - RNA, 13 nt, Human
uucaccuguaaac

SEQ ID NO: 1486389 - RNA, 16 nt, Human
uucaccuguaaaccug

SEQ ID NO: 1486390 - RNA, 17 nt, Human
uucaccuguaaaccuga

SEQ ID NO: 1486391 - RNA, 18 nt, Human
uucaccuguaaaccugag

SEQ ID NO: 1486392 - RNA, 23 nt, Human
uucaaaucaaucuguaaaacuaa

SEQ ID NO: 1486393 - RNA, 22 nt, Human
uucaaaucaaucuguaaaacua

SEQ ID NO: 1486394 - RNA, 18 nt, Human
uucaaauagggucuaacu

SEQ ID NO: 1486395 - RNA, 19 nt, Human
uucaaauagggucuaacuc

SEQ ID NO: 1486396 - RNA, 14 nt, Human
uucaaaguuuaaua

SEQ ID NO: 1486397 - RNA, 19 nt, Human
uucaaaguuuaauaaauuu

SEQ ID NO: 1486398 - RNA, 17 nt, Human
uucaaauccuugaagau

SEQ ID NO: 1486399 - RNA, 20 nt, Human
uucaaagcuguguguuugga

SEQ ID NO: 1486400 - RNA, 23 nt, Human
uucaaagcuguguguuuggaaga

SEQ ID NO: 1486401 - RNA, 22 nt, Human
uucaaagcuuuuuccagaggcu

SEQ ID NO: 1486402 - RNA, 20 nt, Human
uuauuuuauguugcauagaa

SEQ ID NO: 1486403 - RNA, 17 nt, Human
uuauuuuaauaauguuu

SEQ ID NO: 1486404 - RNA, 22 nt, Human
uuauuggcugagauaugaacau

SEQ ID NO: 1486405 - RNA, 15 nt, Human
uuauuggcugagaua

SEQ ID NO: 1486406 - RNA, 16 nt, Human
uuauuggcugagauau

SEQ ID NO: 1486407 - RNA, 14 nt, Human
uuauuggcugagau

SEQ ID NO: 1486408 - RNA, 15 nt, Human
uuauuuuaauaaugu

SEQ ID NO: 1486409 - RNA, 16 nt, Human
uuauuuuaauaauguu

SEQ ID NO: 1486410 - RNA, 15 nt, Human
uuauugucuagugaa

SEQ ID NO: 1486411 - RNA, 19 nt, Human
uuccacucguguguuucua

SEQ ID NO: 1486412 - RNA, 14 nt, Human
uuccaaacuaauuu

SEQ ID NO: 1486413 - RNA, 15 nt, Human
uucaugaaagauuca

SEQ ID NO: 1486414 - RNA, 17 nt, Human
uucaugaaagauucaau

SEQ ID NO: 1486415 - RNA, 15 nt, Human
uucaugauuuugaaa

SEQ ID NO: 1486416 - RNA, 13 nt, Human
uucaggaaaauug

SEQ ID NO: 1486417 - RNA, 18 nt, Human
uucaggaaaauugaaugc

SEQ ID NO: 1486418 - RNA, 13 nt, Human
uucaugcauggaa

SEQ ID NO: 1486419 - RNA, 17 nt, Human
uucaugcaaacuuuauu

SEQ ID NO: 1486420 - RNA, 17 nt, Human
uucaugauuuugaaauc

SEQ ID NO: 1486421 - RNA, 15 nt, Human
uuccauucuggaagu

SEQ ID NO: 1486422 - RNA, 13 nt, Human
uuccauucuggaa

SEQ ID NO: 1486423 - RNA, 14 nt, Human
uucccauuucagcu

SEQ ID NO: 1486424 - RNA, 15 nt, Human
uucccauuucagcug

SEQ ID NO: 1486425 - RNA, 19 nt, Human
uuccccaucucaggccaga

SEQ ID NO: 1486426 - RNA, 23 nt, Human
uuccccaugguuuuaaucuguau

SEQ ID NO: 1486427 - RNA, 22 nt, Human
uucccuggaaaccuuccaccca

SEQ ID NO: 1486428 - RNA, 23 nt, Human
uucccuggaaaccuuccacccag

SEQ ID NO: 1486429 - RNA, 20 nt, Human
uucccuggaaaccuuccacc

SEQ ID NO: 1486430 - RNA, 22 nt, Human
uucccugcugugaaagaaguaa

SEQ ID NO: 1486431 - RNA, 14 nt, Human
uucccugccucuca

SEQ ID NO: 1486432 - RNA, 23 nt, Human
uucccugccucucaucaacugaa

SEQ ID NO: 1486433 - RNA, 17 nt, Human
uucccuugaugaagaag

SEQ ID NO: 1486434 - RNA, 21 nt, Human
uucccucucucauacccuccc

SEQ ID NO: 1486435 - RNA, 12 nt, Human
uucccuccuugg

SEQ ID NO: 1486436 - RNA, 13 nt, Human
uucccuccuuggu

SEQ ID NO: 1486437 - RNA, 18 nt, Human
uucccuugaugaagaagu

SEQ ID NO: 1486438 - RNA, 14 nt, Human
uuccuaugcuuuga

SEQ ID NO: 1486439 - RNA, 21 nt, Human
uuccucacaccaggcuugccu

SEQ ID NO: 1486440 - RNA, 14 nt, Human
uuccucagacucua

SEQ ID NO: 1486441 - RNA, 18 nt, Human
uuccucagacucuaagaa

SEQ ID NO: 1486442 - RNA, 22 nt, Human
uuccucaugaauguaaauuugu

SEQ ID NO: 1486443 - RNA, 16 nt, Human
uuccuaugcuuugaaa

SEQ ID NO: 1486444 - RNA, 15 nt, Human
uucguuuauuuucaa

SEQ ID NO: 1486445 - RNA, 22 nt, Human
uggggccaggcugggucgcccu

SEQ ID NO: 1486446 - RNA, 21 nt, Human
uggggccaggcugggucgccc

SEQ ID NO: 1486447 - RNA, 20 nt, Human
uggggaguuuaggguggggg

SEQ ID NO: 1486448 - RNA, 13 nt, Human
ugggcuucaucug

SEQ ID NO: 1486449 - RNA, 20 nt, Human
uggguauaguucaugucugc

SEQ ID NO: 1486450 - RNA, 10 nt, Human
uggggguggg

SEQ ID NO: 1486451 - RNA, 16 nt, Human
uggggguggggguagg

SEQ ID NO: 1486452 - RNA, 18 nt, Human
uggguaaugaaacaaaga

SEQ ID NO: 1486453 - RNA, 14 nt, Human
ugggggacuuacau

SEQ ID NO: 1486454 - RNA, 21 nt, Human
ugggggacuuacaugauucau

SEQ ID NO: 1486455 - RNA, 16 nt, Human
ugggggguggccaggc

SEQ ID NO: 1486456 - RNA, 23 nt, Human
ugggccccugccucucugcaggu

SEQ ID NO: 1486457 - RNA, 21 nt, Human
ugggccccugccucucugcag

SEQ ID NO: 1486458 - RNA, 13 nt, Human
ugggcaggaggga

SEQ ID NO: 1486459 - RNA, 15 nt, Human
ugggcaggagggagg

SEQ ID NO: 1486460 - RNA, 16 nt, Human
ugggcaggagggaggu

SEQ ID NO: 1486461 - RNA, 18 nt, Human
ugggcaggagggaggugc

SEQ ID NO: 1486462 - RNA, 12 nt, Human
uggucccugggu

SEQ ID NO: 1486463 - RNA, 13 nt, Human
ugguauguuuuca

SEQ ID NO: 1486464 - RNA, 21 nt, Human
ugguauguuuucaggcuagau

SEQ ID NO: 1486465 - RNA, 22 nt, Human
uggguaucaccacuggagauca

SEQ ID NO: 1486466 - RNA, 13 nt, Human
ugggucacaggaa

SEQ ID NO: 1486467 - RNA, 21 nt, Human
uggguaucaccacuggagauc

SEQ ID NO: 1486468 - RNA, 12 nt, Human
ugggucacagga

SEQ ID NO: 1486469 - RNA, 15 nt, Human
uggugccaauuucaa

SEQ ID NO: 1486470 - RNA, 18 nt, Human
uggucuaagguucagccu

SEQ ID NO: 1486471 - RNA, 20 nt, Human
uggaccaauagggcugagcu

SEQ ID NO: 1486472 - RNA, 21 nt, Human
uggaccaauagggcugagcuc

SEQ ID NO: 1486473 - RNA, 20 nt, Human
uggacacuacacccagcaau

SEQ ID NO: 1486474 - RNA, 19 nt, Human
uggacacuacacccagcaa

SEQ ID NO: 1486475 - RNA, 18 nt, Human
uggacacuacacccagca

SEQ ID NO: 1486476 - RNA, 17 nt, Human
uggacacuacacccagc

SEQ ID NO: 1486477 - RNA, 16 nt, Human
uggacacuacacccag

SEQ ID NO: 1486478 - RNA, 23 nt, Human
uggacaccugcccugcccugcca

SEQ ID NO: 1486479 - RNA, 14 nt, Human
uggagaaggaaggc

SEQ ID NO: 1486480 - RNA, 13 nt, Human
uggagaaggaagg

SEQ ID NO: 1486481 - RNA, 12 nt, Human
uggagaaggaag

SEQ ID NO: 1486482 - RNA, 11 nt, Human
uggagaaggaa

SEQ ID NO: 1486483 - RNA, 15 nt, Human
uggaccagccucucc

SEQ ID NO: 1486484 - RNA, 15 nt, Human
uggaccacugggcaa

SEQ ID NO: 1486485 - RNA, 19 nt, Human
uggaccacugggcaaugau

SEQ ID NO: 1486486 - RNA, 17 nt, Human
uggaguuuuuuguacca

SEQ ID NO: 1486487 - RNA, 18 nt, Human
uggaguuuuuuguaccaa

SEQ ID NO: 1486488 - RNA, 20 nt, Human
uggcaauagucaaauugugu

SEQ ID NO: 1486489 - RNA, 17 nt, Human
uggcaaggguucaccug

SEQ ID NO: 1486490 - RNA, 14 nt, Human
uggcaagugaauuu

SEQ ID NO: 1486491 - RNA, 15 nt, Human
uggcacuaguauuuc

SEQ ID NO: 1486492 - RNA, 23 nt, Human
uggauuuuuuccuucaaaguuua

SEQ ID NO: 1486493 - RNA, 15 nt, Human
uggcgggguggggug

SEQ ID NO: 1486494 - RNA, 21 nt, Human
uggccaggaagcuuuggugag

SEQ ID NO: 1486495 - RNA, 13 nt, Human
uggccaggaagcu

SEQ ID NO: 1486496 - RNA, 22 nt, Human
uggccaggccgggaaaaagccc

SEQ ID NO: 1486497 - RNA, 11 nt, Human
uggcccccucc

SEQ ID NO: 1486498 - RNA, 15 nt, Human
uggccucaaagcaag

SEQ ID NO: 1486499 - RNA, 16 nt, Human
uggccuauguggucua

SEQ ID NO: 1486500 - RNA, 19 nt, Human
uggccuauguggucuaagg

SEQ ID NO: 1486501 - RNA, 20 nt, Human
ugccuugcauaauggucaga

SEQ ID NO: 1486502 - RNA, 20 nt, Human
ugcucaggagcccugggagg

SEQ ID NO: 1486503 - RNA, 19 nt, Human
ugcucaggagcccugggag

SEQ ID NO: 1486504 - RNA, 18 nt, Human
ugcucaggagcccuggga

SEQ ID NO: 1486505 - RNA, 13 nt, Human
ugcucagacagaa

SEQ ID NO: 1486506 - RNA, 13 nt, Human
ugcucuccuccac

SEQ ID NO: 1486507 - RNA, 22 nt, Human
ugcucauauugugauucugccu

SEQ ID NO: 1486508 - RNA, 23 nt, Human
ugcucauauugugauucugccuu

SEQ ID NO: 1486509 - RNA, 21 nt, Human
ugcucauauugugauucugcc

SEQ ID NO: 1486510 - RNA, 16 nt, Human
ugcuguucaugaaaga

SEQ ID NO: 1486511 - RNA, 17 nt, Human
ugcuguucaugaaagau

SEQ ID NO: 1486512 - RNA, 13 nt, Human
ugcugguuuuagu

SEQ ID NO: 1486513 - RNA, 18 nt, Human
ugcuggugagccaagcag

SEQ ID NO: 1486514 - RNA, 16 nt, Human
ugcuggggaagacagu

SEQ ID NO: 1486515 - RNA, 17 nt, Human
ugcuggggaagacagug

SEQ ID NO: 1486516 - RNA, 22 nt, Human
ugcuggggaagacaguggcccc

SEQ ID NO: 1486517 - RNA, 17 nt, Human
ugcugccugcuuuuuau

SEQ ID NO: 1486518 - RNA, 15 nt, Human
ugcugccugcuuuuu

SEQ ID NO: 1486519 - RNA, 24 nt, Human
ugcugggccccugccucucugcag

SEQ ID NO: 1486520 - RNA, 23 nt, Human
ugcugggccccugccucucugca

SEQ ID NO: 1486521 - RNA, 22 nt, Human
ugcugggccccugccucucugc

SEQ ID NO: 1486522 - RNA, 21 nt, Human
ugcugggccccugccucucug

SEQ ID NO: 1486523 - RNA, 19 nt, Human
ugcugggccccugccucuc

SEQ ID NO: 1486524 - RNA, 18 nt, Human
ugcugggccccugccucu

SEQ ID NO: 1486525 - RNA, 17 nt, Human
ugcugggccccugccuc

SEQ ID NO: 1486526 - RNA, 16 nt, Human
ugcugggccccugccu

SEQ ID NO: 1486527 - RNA, 14 nt, Human
ugcugggccccugc

SEQ ID NO: 1486528 - RNA, 14 nt, Human
ugcugcugccugcc

SEQ ID NO: 1486529 - RNA, 13 nt, Human
ugcugcugccugc

SEQ ID NO: 1486530 - RNA, 14 nt, Human
ugccuccugccggc

SEQ ID NO: 1486531 - RNA, 21 nt, Human
ugccuccugccggcuccuugg

SEQ ID NO: 1486532 - RNA, 20 nt, Human
ugccuccugccggcuccuug

SEQ ID NO: 1486533 - RNA, 14 nt, Human
ugccucaaccuccc

SEQ ID NO: 1486534 - RNA, 19 nt, Human
ugccaggcuggagugcagu

SEQ ID NO: 1486535 - RNA, 17 nt, Human
ugccaggcuggagugca

SEQ ID NO: 1486536 - RNA, 16 nt, Human
ugccaggcuaauuuuu

SEQ ID NO: 1486537 - RNA, 17 nt, Human
ugccaggcuaauuuuuu

SEQ ID NO: 1486538 - RNA, 20 nt, Human
ugccccuugacaacuggcag

SEQ ID NO: 1486539 - RNA, 21 nt, Human
ugccccuugacaacuggcagg

SEQ ID NO: 1486540 - RNA, 20 nt, Human
ugcccgccugggucuccuaa

SEQ ID NO: 1486541 - RNA, 13 nt, Human
ugccaccugucug

SEQ ID NO: 1486542 - RNA, 12 nt, Human
ugccaccugucu

SEQ ID NO: 1486543 - RNA, 11 nt, Human
ugccaccuguc

SEQ ID NO: 1486544 - RNA, 10 nt, Human
ugccaccugu

SEQ ID NO: 1486545 - RNA, 14 nt, Human
ugccaccuccugcc

SEQ ID NO: 1486546 - RNA, 16 nt, Human
ugccaccugucugucu

SEQ ID NO: 1486547 - RNA, 15 nt, Human
ugccaccugucuguc

SEQ ID NO: 1486548 - RNA, 14 nt, Human
ugccaccugucugu

SEQ ID NO: 1486549 - RNA, 13 nt, Human
ugccaggaggacc

SEQ ID NO: 1486550 - RNA, 17 nt, Human
ugccaggaggacccagg

SEQ ID NO: 1486551 - RNA, 14 nt, Human
ugcauuugggucca

SEQ ID NO: 1486552 - RNA, 16 nt, Human
ugcauuuggguccagg

SEQ ID NO: 1486553 - RNA, 17 nt, Human
ugcauuuggguccagga

SEQ ID NO: 1486554 - RNA, 18 nt, Human
ugcauuuggguccaggag

SEQ ID NO: 1486555 - RNA, 20 nt, Human
ugcauuuggguccaggagga

SEQ ID NO: 1486556 - RNA, 19 nt, Human
ugcauuuggguccaggagg

SEQ ID NO: 1486557 - RNA, 18 nt, Human
ugcauauuauuuuauguu

SEQ ID NO: 1486558 - RNA, 12 nt, Human
ugcaguucugaa

SEQ ID NO: 1486559 - RNA, 14 nt, Human
ugcaguucugaaga

SEQ ID NO: 1486560 - RNA, 23 nt, Human
ugacauaaguauuuaauucaugu

SEQ ID NO: 1486561 - RNA, 16 nt, Human
ugacauaaaguugaua

SEQ ID NO: 1486562 - RNA, 12 nt, Human
ugacaagcucac

SEQ ID NO: 1486563 - RNA, 15 nt, Human
ugacaagcucacaga

SEQ ID NO: 1486564 - RNA, 20 nt, Human
ugacaagcucacagaccuuu

SEQ ID NO: 1486565 - RNA, 12 nt, Human
ugacacaaacac

SEQ ID NO: 1486566 - RNA, 14 nt, Human
ugacaauugggagc

SEQ ID NO: 1486567 - RNA, 17 nt, Human
ugacacaaacacacaca

SEQ ID NO: 1486568 - RNA, 13 nt, Human
ugacacaaacaca

SEQ ID NO: 1486569 - RNA, 22 nt, Human
ugacacuuuaauuaccaaccug

SEQ ID NO: 1486570 - RNA, 17 nt, Human
ugacaugggacauuugc

SEQ ID NO: 1486571 - RNA, 18 nt, Human
ugacaugggacauuugcu

SEQ ID NO: 1486572 - RNA, 14 nt, Human
ugacauguccuucu

SEQ ID NO: 1486573 - RNA, 17 nt, Human
ugacauguccuucugag

SEQ ID NO: 1486574 - RNA, 15 nt, Human
ugaagauacugaaau

SEQ ID NO: 1486575 - RNA, 16 nt, Human
ugaagauacugaaaua

SEQ ID NO: 1486576 - RNA, 18 nt, Human
ugaagauacugaaauaaa

SEQ ID NO: 1486577 - RNA, 14 nt, Human
ugaagauacugaaa

SEQ ID NO: 1486578 - RNA, 13 nt, Human
ugaaguccaagca

SEQ ID NO: 1486579 - RNA, 11 nt, Human
ugaaguccaag

SEQ ID NO: 1486580 - RNA, 23 nt, Human
ugaaguuagcuuuaacuuaaaua

SEQ ID NO: 1486581 - RNA, 18 nt, Human
ugaaguuagcuuuaacuu

SEQ ID NO: 1486582 - RNA, 15 nt, Human
ugaauuauauguuca

SEQ ID NO: 1486583 - RNA, 15 nt, Human
ugaauuacauuugua

SEQ ID NO: 1486584 - RNA, 16 nt, Human
ugaauuacauuuguau

SEQ ID NO: 1486585 - RNA, 18 nt, Human
ugaauuacauuuguauaa

SEQ ID NO: 1486586 - RNA, 16 nt, Human
ugaauuauuuucucuc

SEQ ID NO: 1486587 - RNA, 13 nt, Human
ugaauuaugaaac

SEQ ID NO: 1486588 - RNA, 21 nt, Human
ugaauuaucuugguugaaaau

SEQ ID NO: 1486589 - RNA, 15 nt, Human
ugaauuaugaaacuu

SEQ ID NO: 1486590 - RNA, 17 nt, Human
ugaauuaugaaacuuuu

SEQ ID NO: 1486591 - RNA, 23 nt, Human
ugaaucauuuuaccuuugacaaa

SEQ ID NO: 1486592 - RNA, 22 nt, Human
ugaaucauuuuaccuuugacaa

SEQ ID NO: 1486593 - RNA, 15 nt, Human
ugaauccaaacuaau

SEQ ID NO: 1486594 - RNA, 16 nt, Human
ugaauccaaacuaauc

SEQ ID NO: 1486595 - RNA, 22 nt, Human
ugaaugaggucagcaugucuau

SEQ ID NO: 1486596 - RNA, 16 nt, Human
ucuuucuuucaauaaa

SEQ ID NO: 1486597 - RNA, 13 nt, Human
ucuuucuuuauuu

SEQ ID NO: 1486598 - RNA, 19 nt, Human
ucuuuccacagaagcucca

SEQ ID NO: 1486599 - RNA, 12 nt, Human
ucuuugccaagu

SEQ ID NO: 1486600 - RNA, 20 nt, Human
ucuuugccacccucaugcug

SEQ ID NO: 1486601 - RNA, 18 nt, Human
ucuuugccacccucaugc

SEQ ID NO: 1486602 - RNA, 17 nt, Human
ucuuugccacccucaug

SEQ ID NO: 1486603 - RNA, 16 nt, Human
ucuuugccacccucau

SEQ ID NO: 1486604 - RNA, 14 nt, Human
ucuuugccacccuc

SEQ ID NO: 1486605 - RNA, 14 nt, Human
ucuuuuauaggauu

SEQ ID NO: 1486606 - RNA, 23 nt, Human
ucuugcaggaaggacuaugaaaa

SEQ ID NO: 1486607 - RNA, 22 nt, Human
ugaaauuaugugacauuuuaca

SEQ ID NO: 1486608 - RNA, 20 nt, Human
ugaaauuaugugacauuuua

SEQ ID NO: 1486609 - RNA, 12 nt, Human
ugaaauuauuca

SEQ ID NO: 1486610 - RNA, 22 nt, Human
ugaaauuaacuggguaaugaaa

SEQ ID NO: 1486611 - RNA, 15 nt, Human
ugaaaucauucauuu

SEQ ID NO: 1486612 - RNA, 16 nt, Human
ugaaauauugacuuuu

SEQ ID NO: 1486613 - RNA, 17 nt, Human
ugaaauggauacuuaua

SEQ ID NO: 1486614 - RNA, 19 nt, Human
ugaacaguuguguuugaag

SEQ ID NO: 1486615 - RNA, 11 nt, Human
ugaacaagaau

SEQ ID NO: 1486616 - RNA, 12 nt, Human
ugaacaagaauu

SEQ ID NO: 1486617 - RNA, 14 nt, Human
ugaacaagaauugg

SEQ ID NO: 1486618 - RNA, 18 nt, Human
ugaacaagaauuggaagc

SEQ ID NO: 1486619 - RNA, 16 nt, Human
ugaaaagcagacauuu

SEQ ID NO: 1486620 - RNA, 17 nt, Human
ugaaaagcuagaauuga

SEQ ID NO: 1486621 - RNA, 20 nt, Human
ugaaaagcuccauuuuuagu

SEQ ID NO: 1486622 - RNA, 19 nt, Human
ugaaacauuuucucccugg

SEQ ID NO: 1486623 - RNA, 18 nt, Human
ugaaacauuuucucccug

SEQ ID NO: 1486624 - RNA, 16 nt, Human
ugaaacauuuucuccc

SEQ ID NO: 1486625 - RNA, 23 nt, Human
ugaaacaaagaguucaagaaaua

SEQ ID NO: 1486626 - RNA, 14 nt, Human
ugaaacaaagaguu

SEQ ID NO: 1486627 - RNA, 16 nt, Human
ugaaagguacuucaaa

SEQ ID NO: 1486628 - RNA, 16 nt, Human
ugaaagguaauuugag

SEQ ID NO: 1486629 - RNA, 15 nt, Human
ugaaagguacuucaa

SEQ ID NO: 1486630 - RNA, 16 nt, Human
ugaaagaugaucauuu

SEQ ID NO: 1486631 - RNA, 16 nt, Human
ugaaagccauggagau

SEQ ID NO: 1486632 - RNA, 13 nt, Human
ugaaagccaugga

SEQ ID NO: 1486633 - RNA, 23 nt, Human
ugaaagccaaggagucacugaga

SEQ ID NO: 1486634 - RNA, 16 nt, Human
ugaggagcuugaaacc

SEQ ID NO: 1486635 - RNA, 17 nt, Human
ugagggagaacaagacc

SEQ ID NO: 1486636 - RNA, 16 nt, Human
ugauaacuggaaacuu

SEQ ID NO: 1486637 - RNA, 19 nt, Human
ugaguuuuccauggcagga

SEQ ID NO: 1486638 - RNA, 13 nt, Human
ugaguuuuccaug

SEQ ID NO: 1486639 - RNA, 12 nt, Human
ugaguuuuacca

SEQ ID NO: 1486640 - RNA, 13 nt, Human
ugaguuuuaccaa

SEQ ID NO: 1486641 - RNA, 17 nt, Human
ugagucguacagaaagc

SEQ ID NO: 1486642 - RNA, 19 nt, Human
ugagucguacagaaagcug

SEQ ID NO: 1486643 - RNA, 19 nt, Human
ugagaccaccucucaauau

SEQ ID NO: 1486644 - RNA, 15 nt, Human
ugagaccaccucuca

SEQ ID NO: 1486645 - RNA, 12 nt, Human
ugagaccaccuc

SEQ ID NO: 1486646 - RNA, 12 nt, Human
ugagaaccuggg

SEQ ID NO: 1486647 - RNA, 21 nt, Human
ugagaaccuggguugcagaca

SEQ ID NO: 1486648 - RNA, 23 nt, Human
ugagaaccuggguugcagacagg

SEQ ID NO: 1486649 - RNA, 22 nt, Human
ugagaaccuggguugcagacag

SEQ ID NO: 1486650 - RNA, 22 nt, Human
ugagacuaaucuuauucauuuu

SEQ ID NO: 1486651 - RNA, 17 nt, Human
ugagaaauuuauaaacu

SEQ ID NO: 1486652 - RNA, 18 nt, Human
ugagaaauuuaaacuaua

SEQ ID NO: 1486653 - RNA, 20 nt, Human
ugaccucaggcaaucugccc

SEQ ID NO: 1486654 - RNA, 21 nt, Human
ugaccucaggcaaucugcccg

SEQ ID NO: 1486655 - RNA, 21 nt, Human
ugagacuaaucuuauucauuu

SEQ ID NO: 1486656 - RNA, 12 nt, Human
ugagagugugac

SEQ ID NO: 1486657 - RNA, 14 nt, Human
ugagagugugacca

SEQ ID NO: 1486658 - RNA, 13 nt, Human
ugagagugugacc

SEQ ID NO: 1486659 - RNA, 12 nt, Human
ugagcaucacag

SEQ ID NO: 1486660 - RNA, 18 nt, Human
ugagcaucacagaaugug

SEQ ID NO: 1486661 - RNA, 13 nt, Human
ugagcaucacaga

SEQ ID NO: 1486662 - RNA, 14 nt, Human
ugagcaucacagaa

SEQ ID NO: 1486663 - RNA, 15 nt, Human
ugagcaucacagaau

SEQ ID NO: 1486664 - RNA, 19 nt, Human
ugagcuccuuaaggcucuu

SEQ ID NO: 1486665 - RNA, 21 nt, Human
ugagcuccuuaaggcucuuuu

SEQ ID NO: 1486666 - RNA, 18 nt, Human
ugagcuggaccucaccaa

SEQ ID NO: 1486667 - RNA, 12 nt, Human
ugauucugccuu

SEQ ID NO: 1486668 - RNA, 13 nt, Human
ugauucugccuuu

SEQ ID NO: 1486669 - RNA, 18 nt, Human
ugauugucuuaauauugu

SEQ ID NO: 1486670 - RNA, 20 nt, Human
ugauuguaguaaucugcauu

SEQ ID NO: 1486671 - RNA, 13 nt, Human
ugauugucuuaau

SEQ ID NO: 1486672 - RNA, 14 nt, Human
ugauugucuuaaua

SEQ ID NO: 1486673 - RNA, 13 nt, Human
ugauuauauguca

SEQ ID NO: 1486674 - RNA, 17 nt, Human
ugauuaugaauuacauu

SEQ ID NO: 1486675 - RNA, 19 nt, Human
ugauuaugaauuacauuug

SEQ ID NO: 1486676 - RNA, 22 nt, Human
ugauguuuagaaacacaacuau

SEQ ID NO: 1486677 - RNA, 21 nt, Human
ugauuaugaauuacauuugua

SEQ ID NO: 1486678 - RNA, 22 nt, Human
ugauuaugaauuacauuuguau

SEQ ID NO: 1486679 - RNA, 16 nt, Human
ugauucaaucuguaaa

SEQ ID NO: 1486680 - RNA, 17 nt, Human
ugauucaaucuguaaac

SEQ ID NO: 1486681 - RNA, 21 nt, Human
ugauucaaucuguaaacugug

SEQ ID NO: 1486682 - RNA, 22 nt, Human
ugauucaaucuguaaacugugu

SEQ ID NO: 1486683 - RNA, 23 nt, Human
ugauucaaucuguaaacugugua

SEQ ID NO: 1486684 - RNA, 16 nt, Human
ugauucacaucucauu

SEQ ID NO: 1486685 - RNA, 21 nt, Human
ugaugguuguacauauaagug

SEQ ID NO: 1486686 - RNA, 14 nt, Human
ugaugguuguacau

SEQ ID NO: 1486687 - RNA, 13 nt, Human
ugaugguuguaca

SEQ ID NO: 1486688 - RNA, 12 nt, Human
ugauguuaaaaa

SEQ ID NO: 1486689 - RNA, 13 nt, Human
ugauguuaaaaaa

SEQ ID NO: 1486690 - RNA, 14 nt, Human
ugauguuaaaaaaa

SEQ ID NO: 1486691 - RNA, 23 nt, Human
ugauguuaaaaaaauaagaagaa

SEQ ID NO: 1486692 - RNA, 11 nt, Human
ugaugccuggc

SEQ ID NO: 1486693 - RNA, 20 nt, Human
ugaugcuacaggauuugaaa

SEQ ID NO: 1486694 - RNA, 23 nt, Human
ugaugcuacaggauuugaaauug

SEQ ID NO: 1486695 - RNA, 21 nt, Human
ugaugccucugucuucuggac

SEQ ID NO: 1486696 - RNA, 20 nt, Human
ugaugauuuagagugcuguc

SEQ ID NO: 1486697 - RNA, 14 nt, Human
ugaugccucugucu

SEQ ID NO: 1486698 - RNA, 17 nt, Human
ugaucagcuuauugucu

SEQ ID NO: 1486699 - RNA, 24 nt, Human
ugaucagcuuauugucuagugaaa

SEQ ID NO: 1486700 - RNA, 14 nt, Human
ugauagauuuucug

SEQ ID NO: 1486701 - RNA, 13 nt, Human
ugauccaacuaau

SEQ ID NO: 1486702 - RNA, 14 nt, Human
ugauccaacuaaug

SEQ ID NO: 1486703 - RNA, 18 nt, Human
ucuccagccucagcucuc

SEQ ID NO: 1486704 - RNA, 19 nt, Human
ucuccagccucagccuccc

SEQ ID NO: 1486705 - RNA, 16 nt, Human
ucuccagccucagccu

SEQ ID NO: 1486706 - RNA, 15 nt, Human
ucuccaggcaggucu

SEQ ID NO: 1486707 - RNA, 12 nt, Human
ucuccccugcac

SEQ ID NO: 1486708 - RNA, 13 nt, Human
ucuccccugcacu

SEQ ID NO: 1486709 - RNA, 14 nt, Human
ucuccccugcacug

SEQ ID NO: 1486710 - RNA, 15 nt, Human
ucuccccugcacugu

SEQ ID NO: 1486711 - RNA, 16 nt, Human
ucuccccugcacugua

SEQ ID NO: 1486712 - RNA, 17 nt, Human
ucuccccugcacuguaa

SEQ ID NO: 1486713 - RNA, 21 nt, Human
ucuccccugcacuguaaaaug

SEQ ID NO: 1486714 - RNA, 18 nt, Human
ucucccuccucugcccgg

SEQ ID NO: 1486715 - RNA, 15 nt, Human
ucucccugccuccug

SEQ ID NO: 1486716 - RNA, 16 nt, Human
ucucauacccucccuc

SEQ ID NO: 1486717 - RNA, 16 nt, Human
ucucagugaagaauac

SEQ ID NO: 1486718 - RNA, 15 nt, Human
ucucagucugucacc

SEQ ID NO: 1486719 - RNA, 13 nt, Human
ucucauccugcag

SEQ ID NO: 1486720 - RNA, 15 nt, Human
ucucauccugcaggc

SEQ ID NO: 1486721 - RNA, 19 nt, Human
ucucaucucagugaagaau

SEQ ID NO: 1486722 - RNA, 20 nt, Human
ucucaucucagugaagaaua

SEQ ID NO: 1486723 - RNA, 18 nt, Human
ucucaucucuucuuuuaa

SEQ ID NO: 1486724 - RNA, 13 nt, Human
ucucaugaaccuc

SEQ ID NO: 1486725 - RNA, 14 nt, Human
ucucaugaaccuca

SEQ ID NO: 1486726 - RNA, 22 nt, Human
ucucaugaaccucaagcugcau

SEQ ID NO: 1486727 - RNA, 17 nt, Human
ucuacacuaagagagaa

SEQ ID NO: 1486728 - RNA, 18 nt, Human
ucuacaaaauccugauga

SEQ ID NO: 1486729 - RNA, 15 nt, Human
ucuaccuggucuggu

SEQ ID NO: 1486730 - RNA, 16 nt, Human
ucuacuggucuugugg

SEQ ID NO: 1486731 - RNA, 20 nt, Human
ucuacuggucuuguggaauu

SEQ ID NO: 1486732 - RNA, 23 nt, Human
ucuacuggucuuguggaauuggg

SEQ ID NO: 1486733 - RNA, 22 nt, Human
ucuacuuccaaacuaauuuuua

SEQ ID NO: 1486734 - RNA, 19 nt, Human
ucuacuuccaaacuaauuu

SEQ ID NO: 1486735 - RNA, 23 nt, Human
ucuaugaacucuguuuucuuucu

SEQ ID NO: 1486736 - RNA, 20 nt, Human
ucguggacaccugcccugcc

SEQ ID NO: 1486737 - RNA, 19 nt, Human
ucguggacaccugcccugc

SEQ ID NO: 1486738 - RNA, 18 nt, Human
ucguggacaccugcccug

SEQ ID NO: 1486739 - RNA, 17 nt, Human
ucguggacaccugcccu

SEQ ID NO: 1486740 - RNA, 16 nt, Human
ucguggacaccugccc

SEQ ID NO: 1486741 - RNA, 15 nt, Human
ucguggacaccugcc

SEQ ID NO: 1486742 - RNA, 14 nt, Human
ucguggacaccugc

SEQ ID NO: 1486743 - RNA, 13 nt, Human
ucguggacaccug

SEQ ID NO: 1486744 - RNA, 12 nt, Human
ucguggacaccu

SEQ ID NO: 1486745 - RNA, 15 nt, Human
ucgucuucuuggcca

SEQ ID NO: 1486746 - RNA, 19 nt, Human
uccuuagaaaaaaaauuau

SEQ ID NO: 1486747 - RNA, 18 nt, Human
uccuuagaucuggcaugu

SEQ ID NO: 1486748 - RNA, 17 nt, Human
uccuuagaucuggcaug

SEQ ID NO: 1486749 - RNA, 17 nt, Human
uccuggcaauagucaaa

SEQ ID NO: 1486750 - RNA, 19 nt, Human
uccuggaggggcuggggac

SEQ ID NO: 1486751 - RNA, 15 nt, Human
uccugucucccuccu

SEQ ID NO: 1486752 - RNA, 23 nt, Human
uccugucucccuccucugcccgg

SEQ ID NO: 1486753 - RNA, 14 nt, Human
uccugccggcuccu

SEQ ID NO: 1486754 - RNA, 17 nt, Human
uccugccggcuccuugg

SEQ ID NO: 1486755 - RNA, 11 nt, Human
uccuggagggg

SEQ ID NO: 1486756 - RNA, 23 nt, Human
uccugagccagugucaggaggaa

SEQ ID NO: 1486757 - RNA, 22 nt, Human
uccuaagcuggagugcaguggc

SEQ ID NO: 1486758 - RNA, 13 nt, Human
uccuacccccugu

SEQ ID NO: 1486759 - RNA, 15 nt, Human
uccuacccccugugc

SEQ ID NO: 1486760 - RNA, 16 nt, Human
uccuacccccugugcc

SEQ ID NO: 1486761 - RNA, 17 nt, Human
uccuacccccugugccu

SEQ ID NO: 1486762 - RNA, 20 nt, Human
uccuacauuaauuaucuagu

SEQ ID NO: 1486763 - RNA, 21 nt, Human
uccuccaggguggcagcaaca

SEQ ID NO: 1486764 - RNA, 20 nt, Human
uccuccaggguggcagcaac

SEQ ID NO: 1486765 - RNA, 17 nt, Human
uccuccaccucaacucc

SEQ ID NO: 1486766 - RNA, 15 nt, Human
uccgcuauccaccaa

SEQ ID NO: 1486767 - RNA, 14 nt, Human
uccgcagugagaga

SEQ ID NO: 1486768 - RNA, 23 nt, Human
uccagaaagaaaacuuguauuau

SEQ ID NO: 1486769 - RNA, 13 nt, Human
uccagaaaacaaa

SEQ ID NO: 1486770 - RNA, 14 nt, Human
uccagaaaacaaaa

SEQ ID NO: 1486771 - RNA, 18 nt, Human
uccagagucccugccugg

SEQ ID NO: 1486772 - RNA, 19 nt, Human
uccagagucccugccugga

SEQ ID NO: 1486773 - RNA, 20 nt, Human
uccagagucccugccuggac

SEQ ID NO: 1486774 - RNA, 21 nt, Human
uccagagucccugccuggacc

SEQ ID NO: 1486775 - RNA, 20 nt, Human
uccaugggccauaugaaaag

SEQ ID NO: 1486776 - RNA, 21 nt, Human
uccaugcguguuucugacucu

SEQ ID NO: 1486777 - RNA, 22 nt, Human
uccaugcguguuucugacucug

SEQ ID NO: 1486778 - RNA, 15 nt, Human
uccauacauuugugu

SEQ ID NO: 1486779 - RNA, 23 nt, Human
uccaguuggaguuuuuuguacca

SEQ ID NO: 1486780 - RNA, 16 nt, Human
uccaguucaugagaau

SEQ ID NO: 1486781 - RNA, 19 nt, Human
uccaguucaugagaaucua

SEQ ID NO: 1486782 - RNA, 14 nt, Human
uccaguaaaauaau

SEQ ID NO: 1486783 - RNA, 21 nt, Human
uccagguauucguuaucuaau

SEQ ID NO: 1486784 - RNA, 19 nt, Human
uccagguagagggugugua

SEQ ID NO: 1486785 - RNA, 14 nt, Human
ucccauguucaagc

SEQ ID NO: 1486786 - RNA, 11 nt, Human
ucccaggaacu

SEQ ID NO: 1486787 - RNA, 16 nt, Human
ucccaggaacugggcc

SEQ ID NO: 1486788 - RNA, 17 nt, Human
ucaugcuguucaugaaa

SEQ ID NO: 1486789 - RNA, 19 nt, Human
ucaucuuucccuccuuggu

SEQ ID NO: 1486790 - RNA, 18 nt, Human
ucaucuuucccuccuugg

SEQ ID NO: 1486791 - RNA, 17 nt, Human
ucaucuuucccuccuug

SEQ ID NO: 1486792 - RNA, 12 nt, Human
ucaucuuucuuc

SEQ ID NO: 1486793 - RNA, 16 nt, Human
ucaucuuucccuccuu

SEQ ID NO: 1486794 - RNA, 15 nt, Human
ucaucuuucccuccu

SEQ ID NO: 1486795 - RNA, 14 nt, Human
ucaucuuucccucc

SEQ ID NO: 1486796 - RNA, 16 nt, Human
ucaucuccccaucauu

SEQ ID NO: 1486797 - RNA, 18 nt, Human
ucaucucagcucacugca

SEQ ID NO: 1486798 - RNA, 19 nt, Human
ucaucucagcucacugcaa

SEQ ID NO: 1486799 - RNA, 22 nt, Human
ucaucucagugaagaauacuuc

SEQ ID NO: 1486800 - RNA, 22 nt, Human
ucaguguagaaccuaauucaau

SEQ ID NO: 1486801 - RNA, 21 nt, Human
ucaguguauggaaauaaaugu

SEQ ID NO: 1486802 - RNA, 22 nt, Human
ucaguguauggaaauaaaugua

SEQ ID NO: 1486803 - RNA, 13 nt, Human
ucauagagacuug

SEQ ID NO: 1486804 - RNA, 13 nt, Human
ucaucaauuaaag

SEQ ID NO: 1486805 - RNA, 22 nt, Human
ucaucauguaucgcuucaugua

SEQ ID NO: 1486806 - RNA, 14 nt, Human
ucauggugcucaga

SEQ ID NO: 1486807 - RNA, 20 nt, Human
ucauuagacuggaacuugaa

SEQ ID NO: 1486808 - RNA, 14 nt, Human
ucauuguagaaaag

SEQ ID NO: 1486809 - RNA, 23 nt, Human
ucauugucugugaagugagaccu

SEQ ID NO: 1486810 - RNA, 12 nt, Human
uccaaaccacuu

SEQ ID NO: 1486811 - RNA, 22 nt, Human
uccaaaccacuuuuugcagcuu

SEQ ID NO: 1486812 - RNA, 12 nt, Human
uccaaacuaauu

SEQ ID NO: 1486813 - RNA, 16 nt, Human
uccaaacuaauuuuua

SEQ ID NO: 1486814 - RNA, 14 nt, Human
uccaaacaggcuca

SEQ ID NO: 1486815 - RNA, 17 nt, Human
uccaaaaauguguaaga

SEQ ID NO: 1486816 - RNA, 21 nt, Human
uccaaaaauguguaagaacaa

SEQ ID NO: 1486817 - RNA, 20 nt, Human
ucagucucuauaccaauaaa

SEQ ID NO: 1486818 - RNA, 21 nt, Human
ucagucucuauaccaauaaag

SEQ ID NO: 1486819 - RNA, 18 nt, Human
ucagucucuauaccaaua

SEQ ID NO: 1486820 - RNA, 15 nt, Human
ucagucucuauacca

SEQ ID NO: 1486821 - RNA, 18 nt, Human
ucagucucagaaugucau

SEQ ID NO: 1486822 - RNA, 19 nt, Human
ucagucucagaaugucauu

SEQ ID NO: 1486823 - RNA, 13 nt, Human
ucaggcuagaugu

SEQ ID NO: 1486824 - RNA, 17 nt, Human
ucagguauuaagaaaau

SEQ ID NO: 1486825 - RNA, 15 nt, Human
ucagguauuaagaaa

SEQ ID NO: 1486826 - RNA, 16 nt, Human
ucagguccucagagaa

SEQ ID NO: 1486827 - RNA, 15 nt, Human
ucaggagcccuggga

SEQ ID NO: 1486828 - RNA, 14 nt, Human
ucaggagcccuggg

SEQ ID NO: 1486829 - RNA, 12 nt, Human
ucaggagcccug

SEQ ID NO: 1486830 - RNA, 11 nt, Human
ucaggagcccu

SEQ ID NO: 1486831 - RNA, 19 nt, Human
ucaggaaucggaauccugu

SEQ ID NO: 1486832 - RNA, 18 nt, Human
ucaggaugagggaaaaga

SEQ ID NO: 1486833 - RNA, 19 nt, Human
ucaggaugagggaaaagaa

SEQ ID NO: 1486834 - RNA, 18 nt, Human
ucaggccuuugagcucag

SEQ ID NO: 1486835 - RNA, 17 nt, Human
ucaggccuagaggccug

SEQ ID NO: 1486836 - RNA, 18 nt, Human
ucaccggggugguuuagu

SEQ ID NO: 1486837 - RNA, 14 nt, Human
ucagcucugaaaga

SEQ ID NO: 1486838 - RNA, 16 nt, Human
ucagcucugaaagaga

SEQ ID NO: 1486839 - RNA, 18 nt, Human
ucagcucugaaagagaaa

SEQ ID NO: 1486840 - RNA, 21 nt, Human
ucagcucugaaagagaaacac

SEQ ID NO: 1486841 - RNA, 16 nt, Human
ucagcucugacauucu

SEQ ID NO: 1486842 - RNA, 22 nt, Human
ucagcucugacauucugauucg

SEQ ID NO: 1486843 - RNA, 22 nt, Human
ucagcucuucuccauccuacca

SEQ ID NO: 1486844 - RNA, 16 nt, Human
uaugauucccagccag

SEQ ID NO: 1486845 - RNA, 16 nt, Human
uaugauucaaaugucu

SEQ ID NO: 1486846 - RNA, 21 nt, Human
uaugauucaaaugucuauaaa

SEQ ID NO: 1486847 - RNA, 14 nt, Human
uaugagcucuucau

SEQ ID NO: 1486848 - RNA, 15 nt, Human
uaugagcucuucaug

SEQ ID NO: 1486849 - RNA, 16 nt, Human
uaugagcucuucaugu

SEQ ID NO: 1486850 - RNA, 18 nt, Human
uaugacuauguaaacuac

SEQ ID NO: 1486851 - RNA, 17 nt, Human
uaugacuauguaaacua

SEQ ID NO: 1486852 - RNA, 16 nt, Human
uaugacuauguaaacu

SEQ ID NO: 1486853 - RNA, 14 nt, Human
uaugcacaguaaaa

SEQ ID NO: 1486854 - RNA, 16 nt, Human
uaugcaauuuccuuuu

SEQ ID NO: 1486855 - RNA, 19 nt, Human
uaugauuuuuuuuucauac

SEQ ID NO: 1486856 - RNA, 17 nt, Human
uaugauuuuuuuuucau

SEQ ID NO: 1486857 - RNA, 20 nt, Human
uaugcauauuauuuuauguu

SEQ ID NO: 1486858 - RNA, 15 nt, Human
uaugcuucuguuuua

SEQ ID NO: 1486859 - RNA, 16 nt, Human
uaugcuucuguuuuau

SEQ ID NO: 1486860 - RNA, 17 nt, Human
uauggaaauaaauguau

SEQ ID NO: 1486861 - RNA, 16 nt, Human
uaugcuugcaaaaacu

SEQ ID NO: 1486862 - RNA, 15 nt, Human
uaugcuuugaaacag

SEQ ID NO: 1486863 - RNA, 16 nt, Human
uauggaaauaaaugua

SEQ ID NO: 1486864 - RNA, 20 nt, Human
uaugaaguuuuuuuuauaca

SEQ ID NO: 1486865 - RNA, 14 nt, Human
uaucuucacuuguc

SEQ ID NO: 1486866 - RNA, 18 nt, Human
uaucuuacuauuucacaa

SEQ ID NO: 1486867 - RNA, 17 nt, Human
uaucuuacuauuucaca

SEQ ID NO: 1486868 - RNA, 18 nt, Human
uaucugggcugugggcaa

SEQ ID NO: 1486869 - RNA, 17 nt, Human
uaugaauuacauuugua

SEQ ID NO: 1486870 - RNA, 23 nt, Human
uaugaauuacauuuguauaaaau

SEQ ID NO: 1486871 - RNA, 18 nt, Human
uaugaauugaauuaucuu

SEQ ID NO: 1486872 - RNA, 20 nt, Human
uaugacaucacuuguacaaa

SEQ ID NO: 1486873 - RNA, 23 nt, Human
uaugacaucacuuguacaaaaua

SEQ ID NO: 1486874 - RNA, 24 nt, Human
uaugacaucacuuguacaaaauaa

SEQ ID NO: 1486875 - RNA, 19 nt, Human
uaugacaucacuuguacaa

SEQ ID NO: 1486876 - RNA, 18 nt, Human
uaucguaaaauuaagaaa

SEQ ID NO: 1486877 - RNA, 15 nt, Human
uaucguaaaauuaag

SEQ ID NO: 1486878 - RNA, 14 nt, Human
uauccugaaauuuc

SEQ ID NO: 1486879 - RNA, 16 nt, Human
uauccugaaauuucag

SEQ ID NO: 1486880 - RNA, 17 nt, Human
uauccugaaauuucaga

SEQ ID NO: 1486881 - RNA, 21 nt, Human
uaucugaggcacaugucagca

SEQ ID NO: 1486882 - RNA, 23 nt, Human
uaucugaguuacagaaaugauua

SEQ ID NO: 1486883 - RNA, 23 nt, Human
uaucugggaagcuauuuuuuuca

SEQ ID NO: 1486884 - RNA, 22 nt, Human
uaucuaaguuaauuuaaaguug

SEQ ID NO: 1486885 - RNA, 13 nt, Human
uaucuaaucauga

SEQ ID NO: 1486886 - RNA, 13 nt, Human
uaucuaauuuaua

SEQ ID NO: 1486887 - RNA, 23 nt, Human
uaucuaaguuaauuuaaaguugu

SEQ ID NO: 1486888 - RNA, 19 nt, Human
uaucuaaguuaauuuaaag

SEQ ID NO: 1486889 - RNA, 20 nt, Human
uaucuaaguuaauuuaaagu

SEQ ID NO: 1486890 - RNA, 15 nt, Human
uaggucucaauaccu

SEQ ID NO: 1486891 - RNA, 16 nt, Human
uaggucagugcaaaua

SEQ ID NO: 1486892 - RNA, 14 nt, Human
uagguaggaaaugu

SEQ ID NO: 1486893 - RNA, 14 nt, Human
uagguacacagcuc

SEQ ID NO: 1486894 - RNA, 16 nt, Human
uaggcuagggugggga

SEQ ID NO: 1486895 - RNA, 20 nt, Human
uaggccuugcggcuccucag

SEQ ID NO: 1486896 - RNA, 15 nt, Human
uaggcuagggugggg

SEQ ID NO: 1486897 - RNA, 19 nt, Human
uaggacacaguuccuggga

SEQ ID NO: 1486898 - RNA, 20 nt, Human
uaguugcaacuuuguauaaa

SEQ ID NO: 1486899 - RNA, 13 nt, Human
uaguguucauaaa

SEQ ID NO: 1486900 - RNA, 13 nt, Human
uagucaaauugug

SEQ ID NO: 1486901 - RNA, 14 nt, Human
uagucaaauugugu

SEQ ID NO: 1486902 - RNA, 14 nt, Human
uagugcaaauuguc

SEQ ID NO: 1486903 - RNA, 15 nt, Human
uagugcaaauuguca

SEQ ID NO: 1486904 - RNA, 18 nt, Human
uaguauuucuaugaaaua

SEQ ID NO: 1486905 - RNA, 19 nt, Human
uaguauuucuaugaaauau

SEQ ID NO: 1486906 - RNA, 16 nt, Human
uaguauuucuaugaaa

SEQ ID NO: 1486907 - RNA, 18 nt, Human
uaguaucaucagauagca

SEQ ID NO: 1486908 - RNA, 20 nt, Human
uauaauucacauuguauuca

SEQ ID NO: 1486909 - RNA, 15 nt, Human
uauaauucacauugu

SEQ ID NO: 1486910 - RNA, 23 nt, Human
uauaaucauuauuacuuuugcug

SEQ ID NO: 1486911 - RNA, 17 nt, Human
uauaaucauuauuacuu

SEQ ID NO: 1486912 - RNA, 22 nt, Human
uauaauaaaggacuguaaucuu

SEQ ID NO: 1486913 - RNA, 19 nt, Human
uauaauaaaggacuguaau

SEQ ID NO: 1486914 - RNA, 14 nt, Human
uauaauaaaggacu

SEQ ID NO: 1486915 - RNA, 17 nt, Human
uaguugccuuaaaauaa

SEQ ID NO: 1486916 - RNA, 17 nt, Human
uauacugcauacuuuuu

SEQ ID NO: 1486917 - RNA, 23 nt, Human
uauacugcuuggagcugagcaaa

SEQ ID NO: 1486918 - RNA, 12 nt, Human
uauacugcauac

SEQ ID NO: 1486919 - RNA, 16 nt, Human
uauacugcauacuuuu

SEQ ID NO: 1486920 - RNA, 22 nt, Human
uauaguuauuaaguucuuuaaa

SEQ ID NO: 1486921 - RNA, 21 nt, Human
uauaguucaugucugcuauca

SEQ ID NO: 1486922 - RNA, 15 nt, Human
uauaguuuuacuuuu

SEQ ID NO: 1486923 - RNA, 13 nt, Human
uauauaacaaugc

SEQ ID NO: 1486924 - RNA, 16 nt, Human
uauaguuuuacuuuua

SEQ ID NO: 1486925 - RNA, 17 nt, Human
uauaguuuuacuuuuaa

SEQ ID NO: 1486926 - RNA, 14 nt, Human
uauauguguaugca

SEQ ID NO: 1486927 - RNA, 13 nt, Human
uauaugcuucugu

SEQ ID NO: 1486928 - RNA, 21 nt, Human
uauaugcuuacugauauauuu

SEQ ID NO: 1486929 - RNA, 16 nt, Human
uauaugcuuacugaua

SEQ ID NO: 1486930 - RNA, 17 nt, Human
uauaugcuuacugauau

SEQ ID NO: 1486931 - RNA, 14 nt, Human
uauaugcuuacuga

SEQ ID NO: 1486932 - RNA, 14 nt, Human
uauuucuaugaaau

SEQ ID NO: 1486933 - RNA, 15 nt, Human
uauuucuaugaaaua

SEQ ID NO: 1486934 - RNA, 16 nt, Human
uauuugaaccaauaaa

SEQ ID NO: 1486935 - RNA, 14 nt, Human
uauuugaacuuuuu

SEQ ID NO: 1486936 - RNA, 13 nt, Human
uauuucuaugaaa

SEQ ID NO: 1486937 - RNA, 14 nt, Human
uauuuauuacugua

SEQ ID NO: 1486938 - RNA, 12 nt, Human
uauuuaucuuua

SEQ ID NO: 1486939 - RNA, 15 nt, Human
uauuuaacaagaucu

SEQ ID NO: 1486940 - RNA, 17 nt, Human
uauugugcaauguaaau

SEQ ID NO: 1486941 - RNA, 19 nt, Human
uauugugcaauguaaauau

SEQ ID NO: 1486942 - RNA, 17 nt, Human
uauugcauuuauaugua

SEQ ID NO: 1486943 - RNA, 13 nt, Human
uauugcauuuaua

SEQ ID NO: 1486944 - RNA, 17 nt, Human
uauuccaagacaugucu

SEQ ID NO: 1486945 - RNA, 15 nt, Human
uauucauuuucucua

SEQ ID NO: 1486946 - RNA, 17 nt, Human
uauugauaagaucuuuu

SEQ ID NO: 1486947 - RNA, 18 nt, Human
uauugauaagaucuuuua

SEQ ID NO: 1486948 - RNA, 19 nt, Human
uauugauaagaucuuuuau

SEQ ID NO: 1486949 - RNA, 23 nt, Human
uauugauaagaucuuuuauuuug

SEQ ID NO: 1486950 - RNA, 14 nt, Human
uauucauuuucucu

SEQ ID NO: 1486951 - RNA, 16 nt, Human
uauucauuuucucuaa

SEQ ID NO: 1486952 - RNA, 12 nt, Human
uauuaucuuuuc

SEQ ID NO: 1486953 - RNA, 16 nt, Human
uauuauccccauuucu

SEQ ID NO: 1486954 - RNA, 14 nt, Human
uauuaucuuuucau

SEQ ID NO: 1486955 - RNA, 19 nt, Human
uauuaucuuuucauacauu

SEQ ID NO: 1486956 - RNA, 14 nt, Human
uauuaugagaugcu

SEQ ID NO: 1486957 - RNA, 15 nt, Human
uauuaugagaugcug

SEQ ID NO: 1486958 - RNA, 17 nt, Human
uauuaugagaugcuggc

SEQ ID NO: 1486959 - RNA, 19 nt, Human
uauuaugcauuauaucaaa

SEQ ID NO: 1486960 - RNA, 20 nt, Human
uauuauggaggcaggaguuu

SEQ ID NO: 1486961 - RNA, 17 nt, Human
uauuaugucucuucuga

SEQ ID NO: 1486962 - RNA, 16 nt, Human
uauuauguuaaaacug

SEQ ID NO: 1486963 - RNA, 21 nt, Human
uauuaugucucuucugagcua

SEQ ID NO: 1486964 - RNA, 16 nt, Human
uauuaagguguggcuu

SEQ ID NO: 1486965 - RNA, 19 nt, Human
uauuaauaaacauucuauc

SEQ ID NO: 1486966 - RNA, 17 nt, Human
uauuauauuuacaaaug

SEQ ID NO: 1486967 - RNA, 13 nt, Human
uauguguguuuua

SEQ ID NO: 1486968 - RNA, 14 nt, Human
uauggaggcaggag

SEQ ID NO: 1486969 - RNA, 12 nt, Human
uauguuaaaacu

SEQ ID NO: 1486970 - RNA, 19 nt, Human
uauguuagugcaaauuguc

SEQ ID NO: 1486971 - RNA, 19 nt, Human
uauguuaagggaagaauuc

SEQ ID NO: 1486972 - RNA, 18 nt, Human
uauguuacuacaugcacu

SEQ ID NO: 1486973 - RNA, 16 nt, Human
uauguucagauuauug

SEQ ID NO: 1486974 - RNA, 22 nt, Human
uauguuguaauauuucuucaaa

SEQ ID NO: 1486975 - RNA, 13 nt, Human
uauuaacauaccu

SEQ ID NO: 1486976 - RNA, 20 nt, Human
ucaaaccaaaucacugaacu

SEQ ID NO: 1486977 - RNA, 19 nt, Human
ucaaacugaggaauuucac

SEQ ID NO: 1486978 - RNA, 17 nt, Human
ucaaacauauauaacaa

SEQ ID NO: 1486979 - RNA, 16 nt, Human
ucaaauccuugaagau

SEQ ID NO: 1486980 - RNA, 20 nt, Human
ucaaaucuaccacuguauga

SEQ ID NO: 1486981 - RNA, 15 nt, Human
ucaaaucuaccacug

SEQ ID NO: 1486982 - RNA, 22 nt, Human
ucaacuccaaacugacucuuaa

SEQ ID NO: 1486983 - RNA, 20 nt, Human
ucaacucucuuauugccuca

SEQ ID NO: 1486984 - RNA, 21 nt, Human
ucaacucucuuauugccucac

SEQ ID NO: 1486985 - RNA, 23 nt, Human
ucaacucucuuauugccucacuu

SEQ ID NO: 1486986 - RNA, 24 nt, Human
ucaacucucuuauugccucacuuc

SEQ ID NO: 1486987 - RNA, 16 nt, Human
ucaaccccuccccucc

SEQ ID NO: 1486988 - RNA, 19 nt, Human
ucaaccccuccccuccauc

SEQ ID NO: 1486989 - RNA, 21 nt, Human
ucaaccccuccccuccauccc

SEQ ID NO: 1486990 - RNA, 23 nt, Human
ucaaccccuccccuccaucccug

SEQ ID NO: 1486991 - RNA, 23 nt, Human
ucaauuaaaauagucucuuuaaa

SEQ ID NO: 1486992 - RNA, 15 nt, Human
ucaauguuuucaguu

SEQ ID NO: 1486993 - RNA, 14 nt, Human
ucaauaaaauccau

SEQ ID NO: 1486994 - RNA, 15 nt, Human
ucaauucaaagcugu

SEQ ID NO: 1486995 - RNA, 17 nt, Human
ucaauucaaagcugugu

SEQ ID NO: 1486996 - RNA, 22 nt, Human
ucaauucaaagcuguguguuug

SEQ ID NO: 1486997 - RNA, 14 nt, Human
ucacauuggaaaca

SEQ ID NO: 1486998 - RNA, 23 nt, Human
ucacagguagacaguauauaacu

SEQ ID NO: 1486999 - RNA, 23 nt, Human
ucacaccaggcuugccugcaggc

SEQ ID NO: 1487000 - RNA, 21 nt, Human
ucacaccaggcuugccugcag

SEQ ID NO: 1487001 - RNA, 22 nt, Human
ucacaccaggcuugccugcagg

SEQ ID NO: 1487002 - RNA, 12 nt, Human
ucacauuuaaau

SEQ ID NO: 1487003 - RNA, 22 nt, Human
ucacauuguauucagaguugau

SEQ ID NO: 1487004 - RNA, 17 nt, Human
ucacauuggaaacaagu

SEQ ID NO: 1487005 - RNA, 19 nt, Human
ucaccagagacuuuagggg

SEQ ID NO: 1487006 - RNA, 15 nt, Human
ucaccagagacuuua

SEQ ID NO: 1487007 - RNA, 14 nt, Human
ucaccagagacuuu

SEQ ID NO: 1487008 - RNA, 15 nt, Human
ucaccccuguuucug

SEQ ID NO: 1487009 - RNA, 22 nt, Human
ucaccgacugaaaauauuguuu

SEQ ID NO: 1487010 - RNA, 15 nt, Human
ucacccuaccugugc

SEQ ID NO: 1487011 - RNA, 17 nt, Human
ucacccuaccugugccu

SEQ ID NO: 1487012 - RNA, 19 nt, Human
guggcaucaucucagcuca

SEQ ID NO: 1487013 - RNA, 14 nt, Human
guggcauccagagu

SEQ ID NO: 1487014 - RNA, 18 nt, Human
guggcucgggaggcgaag

SEQ ID NO: 1487015 - RNA, 16 nt, Human
guggcucgggaggcga

SEQ ID NO: 1487016 - RNA, 12 nt, Human
guggccaggagg

SEQ ID NO: 1487017 - RNA, 13 nt, Human
guggccaggaggu

SEQ ID NO: 1487018 - RNA, 10 nt, Human
guggccaggc

SEQ ID NO: 1487019 - RNA, 23 nt, Human
guggccaggccgggaaaaagccc

SEQ ID NO: 1487020 - RNA, 11 nt, Human
guggcagucug

SEQ ID NO: 1487021 - RNA, 21 nt, Human
guggaacauaaaaaggacauc

SEQ ID NO: 1487022 - RNA, 20 nt, Human
guggaacauaaaaaggacau

SEQ ID NO: 1487023 - RNA, 19 nt, Human
guggaacauaaaaaggaca

SEQ ID NO: 1487024 - RNA, 20 nt, Human
guggaaauuaagacuuuaug

SEQ ID NO: 1487025 - RNA, 23 nt, Human
guggaacuacauuaguacacagc

SEQ ID NO: 1487026 - RNA, 12 nt, Human
guggagagggaa

SEQ ID NO: 1487027 - RNA, 14 nt, Human
guggagagggaaug

SEQ ID NO: 1487028 - RNA, 15 nt, Human
guggagagggaaugu

SEQ ID NO: 1487029 - RNA, 18 nt, Human
guggagagggaaugugaa

SEQ ID NO: 1487030 - RNA, 23 nt, Human
guggaugauccccacgccacagc

SEQ ID NO: 1487031 - RNA, 19 nt, Human
gugccuugucacgccagac

SEQ ID NO: 1487032 - RNA, 23 nt, Human
gugcuuucuucucccaauucauc

SEQ ID NO: 1487033 - RNA, 15 nt, Human
gugcuuuuaaaugca

SEQ ID NO: 1487034 - RNA, 18 nt, Human
gugcuugauagaaaugcc

SEQ ID NO: 1487035 - RNA, 14 nt, Human
gugcuugagccagg

SEQ ID NO: 1487036 - RNA, 20 nt, Human
gugcuucuaguucugccagg

SEQ ID NO: 1487037 - RNA, 21 nt, Human
gugcuucuaguucugccagga

SEQ ID NO: 1487038 - RNA, 22 nt, Human
gugcuucuaguucugccaggag

SEQ ID NO: 1487039 - RNA, 16 nt, Human
gugcuuaugguaccag

SEQ ID NO: 1487040 - RNA, 24 nt, Human
gugcaguggcgcgaucucagcuca

SEQ ID NO: 1487041 - RNA, 18 nt, Human
gugcaaauugucacagga

SEQ ID NO: 1487042 - RNA, 23 nt, Human
gugcagggccuguaaucccagca

SEQ ID NO: 1487043 - RNA, 15 nt, Human
gugcaguacuuugug

SEQ ID NO: 1487044 - RNA, 24 nt, Human
gugcaguggcaucaucucagcuca

SEQ ID NO: 1487045 - RNA, 22 nt, Human
gugcccccaaccauuuccucag

SEQ ID NO: 1487046 - RNA, 21 nt, Human
gugaucccuagcugugaccuc

SEQ ID NO: 1487047 - RNA, 22 nt, Human
gugaucccuagcugugaccucu

SEQ ID NO: 1487048 - RNA, 13 nt, Human
gugauucugccuu

SEQ ID NO: 1487049 - RNA, 16 nt, Human
gugauuuuuaugccac

SEQ ID NO: 1487050 - RNA, 17 nt, Human
gugauuuuuaugccacc

SEQ ID NO: 1487051 - RNA, 19 nt, Human
gugauuuuuaugccaccug

SEQ ID NO: 1487052 - RNA, 20 nt, Human
gugauuuuuaugccaccuga

SEQ ID NO: 1487053 - RNA, 15 nt, Human
gugauuccgcaguga

SEQ ID NO: 1487054 - RNA, 16 nt, Human
gugacaagcucacaga

SEQ ID NO: 1487055 - RNA, 17 nt, Human
gugaauuuuuuuuuccu

SEQ ID NO: 1487056 - RNA, 13 nt, Human
gugacaaaaaauu

SEQ ID NO: 1487057 - RNA, 20 nt, Human
gugacaaaaaauuaaagcau

SEQ ID NO: 1487058 - RNA, 12 nt, Human
gugacucuuucc

SEQ ID NO: 1487059 - RNA, 16 nt, Human
gugagcagucaggaaa

SEQ ID NO: 1487060 - RNA, 13 nt, Human
gugagcauguuug

SEQ ID NO: 1487061 - RNA, 19 nt, Human
gugagcauguuuggaaggg

SEQ ID NO: 1487062 - RNA, 13 nt, Human
gugaaucaagggu

SEQ ID NO: 1487063 - RNA, 15 nt, Human
gugaaucaaggguca

SEQ ID NO: 1487064 - RNA, 17 nt, Human
gugaaucaagggucagg

SEQ ID NO: 1487065 - RNA, 21 nt, Human
gugaaucaagggucaggccuu

SEQ ID NO: 1487066 - RNA, 20 nt, Human
gugaaauuauucauaauuau

SEQ ID NO: 1487067 - RNA, 18 nt, Human
gugaaauuauucauaauu

SEQ ID NO: 1487068 - RNA, 22 nt, Human
gugaaauuuacaucauuucuuu

SEQ ID NO: 1487069 - RNA, 20 nt, Human
gugaaauuuacaucauuucu

SEQ ID NO: 1487070 - RNA, 13 nt, Human
gugaaaucauuca

SEQ ID NO: 1487071 - RNA, 22 nt, Human
gugaaauaccaaccugaagaca

SEQ ID NO: 1487072 - RNA, 13 nt, Human
gugaaagaaguaa

SEQ ID NO: 1487073 - RNA, 19 nt, Human
gugaaagaaaauaacaaua

SEQ ID NO: 1487074 - RNA, 20 nt, Human
gugaaacucguuaauuugua

SEQ ID NO: 1487075 - RNA, 18 nt, Human
gugaaacauuuucucccu

SEQ ID NO: 1487076 - RNA, 15 nt, Human
gugaaacauuuucuc

SEQ ID NO: 1487077 - RNA, 19 nt, Human
gugaaacauuuucucccug

SEQ ID NO: 1487078 - RNA, 17 nt, Human
gucuacacuaagagaga

SEQ ID NO: 1487079 - RNA, 23 nt, Human
gucuacacuaagagagaaugaga

SEQ ID NO: 1487080 - RNA, 13 nt, Human
gucugacuguuuc

SEQ ID NO: 1487081 - RNA, 21 nt, Human
gucucuauaccaauaaaguga

SEQ ID NO: 1487082 - RNA, 16 nt, Human
gucucucaugaaccuc

SEQ ID NO: 1487083 - RNA, 15 nt, Human
gucucucaugaaccu

SEQ ID NO: 1487084 - RNA, 20 nt, Human
gucccuggguagcgggggag

SEQ ID NO: 1487085 - RNA, 20 nt, Human
gucccugccuggaccagccu

SEQ ID NO: 1487086 - RNA, 21 nt, Human
gucccugccuggaccagccuc

SEQ ID NO: 1487087 - RNA, 14 nt, Human
gucccugccuggac

SEQ ID NO: 1487088 - RNA, 22 nt, Human
gucccugccuggaccagccucu

SEQ ID NO: 1487089 - RNA, 23 nt, Human
gucccugccuggaccagccucuc

SEQ ID NO: 1487090 - RNA, 12 nt, Human
guccucagcccc

SEQ ID NO: 1487091 - RNA, 20 nt, Human
guccucagagaauuucuacc

SEQ ID NO: 1487092 - RNA, 19 nt, Human
gucacguuuggugcuucuc

SEQ ID NO: 1487093 - RNA, 21 nt, Human
gucagcaaguccuaagccugu

SEQ ID NO: 1487094 - RNA, 20 nt, Human
gucagcagccucccugaaga

SEQ ID NO: 1487095 - RNA, 14 nt, Human
gucacgccagacuu

SEQ ID NO: 1487096 - RNA, 21 nt, Human
gucaccucagagacauacacc

SEQ ID NO: 1487097 - RNA, 23 nt, Human
gucagcagccucccugaagacca

SEQ ID NO: 1487098 - RNA, 13 nt, Human
gucauagaaauua

SEQ ID NO: 1487099 - RNA, 22 nt, Human
gucauagaaauuacacccaaag

SEQ ID NO: 1487100 - RNA, 23 nt, Human
gucaucaauuaaaggcaaaggca

SEQ ID NO: 1487101 - RNA, 14 nt, Human
gucauguguauaaa

SEQ ID NO: 1487102 - RNA, 15 nt, Human
gucauguuuaagaaa

SEQ ID NO: 1487103 - RNA, 20 nt, Human
gucauguaagcugaaaauau

SEQ ID NO: 1487104 - RNA, 15 nt, Human
gucaugugacaggua

SEQ ID NO: 1487105 - RNA, 12 nt, Human
gucauguguaua

SEQ ID NO: 1487106 - RNA, 13 nt, Human
gucauguguauaa

SEQ ID NO: 1487107 - RNA, 13 nt, Human
guccaggagccug

SEQ ID NO: 1487108 - RNA, 22 nt, Human
gucccagaaaaagcaucauggc

SEQ ID NO: 1487109 - RNA, 16 nt, Human
guauucguuaucuaau

SEQ ID NO: 1487110 - RNA, 19 nt, Human
guauuccagaccugaagaa

SEQ ID NO: 1487111 - RNA, 17 nt, Human
guauuucuaugaaauau

SEQ ID NO: 1487112 - RNA, 22 nt, Human
guauuucuaugaaauauuaugu

SEQ ID NO: 1487113 - RNA, 15 nt, Human
guauuugaaucagcc

SEQ ID NO: 1487114 - RNA, 20 nt, Human
guauuacaguggggaaugaa

SEQ ID NO: 1487115 - RNA, 22 nt, Human
guauuacaguggggaaugaaga

SEQ ID NO: 1487116 - RNA, 19 nt, Human
guauucaaaaauuaucuau

SEQ ID NO: 1487117 - RNA, 16 nt, Human
guauuaugucucuucu

SEQ ID NO: 1487118 - RNA, 15 nt, Human
guauuauguguguuu

SEQ ID NO: 1487119 - RNA, 14 nt, Human
gucaccucauggaa

SEQ ID NO: 1487120 - RNA, 16 nt, Human
gucaccucagagacau

SEQ ID NO: 1487121 - RNA, 20 nt, Human
gucacccagguuggagugca

SEQ ID NO: 1487122 - RNA, 20 nt, Human
gucacccaggcuggacugca

SEQ ID NO: 1487123 - RNA, 15 nt, Human
gucaauaaaauccau

SEQ ID NO: 1487124 - RNA, 21 nt, Human
gucaauaaaauccauacauuu

SEQ ID NO: 1487125 - RNA, 15 nt, Human
gucaauguuuucagu

SEQ ID NO: 1487126 - RNA, 16 nt, Human
guauuuuaaaagaaug

SEQ ID NO: 1487127 - RNA, 17 nt, Human
guauuuuaaaagaauga

SEQ ID NO: 1487128 - RNA, 17 nt, Human
guauuuguuaauuuaga

SEQ ID NO: 1487129 - RNA, 18 nt, Human
guauuuguuaauuuagaa

SEQ ID NO: 1487130 - RNA, 23 nt, Human
guauuuguuaauuuagaaaacuu

SEQ ID NO: 1487131 - RNA, 18 nt, Human
guauuuuaaaagaaugau

SEQ ID NO: 1487132 - RNA, 22 nt, Human
guauuuguuaauuuagaaaacu

SEQ ID NO: 1487133 - RNA, 16 nt, Human
ggggcagagccaggaa

SEQ ID NO: 1487134 - RNA, 15 nt, Human
ggggcagagccagga

SEQ ID NO: 1487135 - RNA, 14 nt, Human
ggggcagagccagg

SEQ ID NO: 1487136 - RNA, 13 nt, Human
ggggcagagccag

SEQ ID NO: 1487137 - RNA, 18 nt, Human
ggggaguuuagggugggg

SEQ ID NO: 1487138 - RNA, 22 nt, Human
ggggaguaaagaauuauuuugu

SEQ ID NO: 1487139 - RNA, 17 nt, Human
gggcuucagguccaggc

SEQ ID NO: 1487140 - RNA, 20 nt, Human
ggggcuuauaauaaaggacu

SEQ ID NO: 1487141 - RNA, 16 nt, Human
gggccuuuggcaggug

SEQ ID NO: 1487142 - RNA, 13 nt, Human
gggccuugggcuc

SEQ ID NO: 1487143 - RNA, 14 nt, Human
gggccuugggcucc

SEQ ID NO: 1487144 - RNA, 24 nt, Human
gggccuugggcuccgugugggaga

SEQ ID NO: 1487145 - RNA, 12 nt, Human
gggcgcaggccg

SEQ ID NO: 1487146 - RNA, 14 nt, Human
gggcgcggcuggga

SEQ ID NO: 1487147 - RNA, 11 nt, Human
gggcccggacg

SEQ ID NO: 1487148 - RNA, 12 nt, Human
gggcccggacgc

SEQ ID NO: 1487149 - RNA, 20 nt, Human
gggcuuauaauaaaggacug

SEQ ID NO: 1487150 - RNA, 23 nt, Human
gggcuccuccaggguggcagcaa

SEQ ID NO: 1487151 - RNA, 22 nt, Human
gggcuccuccaggguggcagca

SEQ ID NO: 1487152 - RNA, 17 nt, Human
gggcuccgugugggaga

SEQ ID NO: 1487153 - RNA, 18 nt, Human
gggcuccgugugggagac

SEQ ID NO: 1487154 - RNA, 19 nt, Human
gggugcugggccccugccu

SEQ ID NO: 1487155 - RNA, 16 nt, Human
ggguagcgggggaggg

SEQ ID NO: 1487156 - RNA, 22 nt, Human
gguacuucaaauccuugaagau

SEQ ID NO: 1487157 - RNA, 20 nt, Human
ggguuucaccauguuggcca

SEQ ID NO: 1487158 - RNA, 20 nt, Human
ggguuucaccauguuagcca

SEQ ID NO: 1487159 - RNA, 15 nt, Human
ggguugugugucugu

SEQ ID NO: 1487160 - RNA, 15 nt, Human
gguagacacacauga

SEQ ID NO: 1487161 - RNA, 20 nt, Human
gguagaaagagauacagagg

SEQ ID NO: 1487162 - RNA, 19 nt, Human
gguagaauguaaagcuugu

SEQ ID NO: 1487163 - RNA, 22 nt, Human
gguagacacacaugaaguccaa

SEQ ID NO: 1487164 - RNA, 15 nt, Human
gguagaauguaaagc

SEQ ID NO: 1487165 - RNA, 21 nt, Human
ggucagcaugucuauucagcu

SEQ ID NO: 1487166 - RNA, 11 nt, Human
ggucccugggu

SEQ ID NO: 1487167 - RNA, 20 nt, Human
ggucccuggguagcggggga

SEQ ID NO: 1487168 - RNA, 17 nt, Human
ggucccuaauaaagcug

SEQ ID NO: 1487169 - RNA, 16 nt, Human
ggucccuaauaaagcu

SEQ ID NO: 1487170 - RNA, 13 nt, Human
ggucccuaauaaa

SEQ ID NO: 1487171 - RNA, 12 nt, Human
ggucccuaauaa

SEQ ID NO: 1487172 - RNA, 18 nt, Human
ggucccuaauaaagcugu

SEQ ID NO: 1487173 - RNA, 21 nt, Human
ggugaagcucacuucugggcu

SEQ ID NO: 1487174 - RNA, 21 nt, Human
ggucucccuucucuacacucu

SEQ ID NO: 1487175 - RNA, 20 nt, Human
ggucucccuucucuacacuc

SEQ ID NO: 1487176 - RNA, 21 nt, Human
guaaaucacgcuuuuugaaaa

SEQ ID NO: 1487177 - RNA, 14 nt, Human
guaaauauuuuaaa

SEQ ID NO: 1487178 - RNA, 13 nt, Human
guaaauauuuuaa

SEQ ID NO: 1487179 - RNA, 23 nt, Human
guaaauauuuuaaagaauugugu

SEQ ID NO: 1487180 - RNA, 16 nt, Human
guaaaauaaaaggucg

SEQ ID NO: 1487181 - RNA, 19 nt, Human
guaaaagcaaaaaagaaaa

SEQ ID NO: 1487182 - RNA, 17 nt, Human
guaaaagguauuaaauu

SEQ ID NO: 1487183 - RNA, 23 nt, Human
guaagcauaagcuuaugcuuaaa

SEQ ID NO: 1487184 - RNA, 14 nt, Human
guaacuuuuguaag

SEQ ID NO: 1487185 - RNA, 15 nt, Human
guaacuuuuguaaga

SEQ ID NO: 1487186 - RNA, 17 nt, Human
guaacuuuuguaagaca

SEQ ID NO: 1487187 - RNA, 20 nt, Human
guaagaaaccuacugcccag

SEQ ID NO: 1487188 - RNA, 23 nt, Human
guaagaacaacuaccugagcuaa

SEQ ID NO: 1487189 - RNA, 18 nt, Human
guaagaacaacuaccuga

SEQ ID NO: 1487190 - RNA, 15 nt, Human
guaagacaaagguuu

SEQ ID NO: 1487191 - RNA, 15 nt, Human
guaagagcaaaagaa

SEQ ID NO: 1487192 - RNA, 13 nt, Human
guaagauuuccuu

SEQ ID NO: 1487193 - RNA, 18 nt, Human
guaagauuuccuucuuuu

SEQ ID NO: 1487194 - RNA, 20 nt, Human
guaaaaacaaagaaauuaug

SEQ ID NO: 1487195 - RNA, 18 nt, Human
guaaaaacaaagaaauua

SEQ ID NO: 1487196 - RNA, 17 nt, Human
guaaaaauggaaacuau

SEQ ID NO: 1487197 - RNA, 15 nt, Human
guaaaaaugauuuca

SEQ ID NO: 1487198 - RNA, 11 nt, Human
guaaaacauuu

SEQ ID NO: 1487199 - RNA, 18 nt, Human
guaaaacauuuauuuuga

SEQ ID NO: 1487200 - RNA, 20 nt, Human
guaaaaccuggagauggugg

SEQ ID NO: 1487201 - RNA, 20 nt, Human
guaaaacagggccacauaga

SEQ ID NO: 1487202 - RNA, 17 nt, Human
guaaaacagggccacau

SEQ ID NO: 1487203 - RNA, 12 nt, Human
guaaaagcaaaa

SEQ ID NO: 1487204 - RNA, 18 nt, Human
guaaaagcaaaaaagaaa

SEQ ID NO: 1487205 - RNA, 20 nt, Human
guaaaacauuuauuuugaca

SEQ ID NO: 1487206 - RNA, 20 nt, Human
gguuuucacauuggaaacaa

SEQ ID NO: 1487207 - RNA, 19 nt, Human
gguuuaauguuuuggccaa

SEQ ID NO: 1487208 - RNA, 13 nt, Human
gguuuaauguuuu

SEQ ID NO: 1487209 - RNA, 23 nt, Human
gguuuuuguuuguuuccuuuguu

SEQ ID NO: 1487210 - RNA, 14 nt, Human
gguuuuuuaguuga

SEQ ID NO: 1487211 - RNA, 20 nt, Human
gguggcccuuaugacugcca

SEQ ID NO: 1487212 - RNA, 23 nt, Human
gguggcccuuaugacugccaaga

SEQ ID NO: 1487213 - RNA, 14 nt, Human
gguucaacuuauua

SEQ ID NO: 1487214 - RNA, 21 nt, Human
gguugggcagccagaccagca

SEQ ID NO: 1487215 - RNA, 19 nt, Human
guaaugauaacuggaaacu

SEQ ID NO: 1487216 - RNA, 17 nt, Human
guaauguuaauauugau

SEQ ID NO: 1487217 - RNA, 22 nt, Human
guaauguuaauauugauuuauu

SEQ ID NO: 1487218 - RNA, 18 nt, Human
guaauguuaauauugauu

SEQ ID NO: 1487219 - RNA, 13 nt, Human
guaaugaaaacca

SEQ ID NO: 1487220 - RNA, 11 nt, Human
guaaugaaaac

SEQ ID NO: 1487221 - RNA, 23 nt, Human
guaauucuaccaaggucuucuua

SEQ ID NO: 1487222 - RNA, 15 nt, Human
guaauuggaaaggca

SEQ ID NO: 1487223 - RNA, 23 nt, Human
guaauuguacuaaagccaaacau

SEQ ID NO: 1487224 - RNA, 15 nt, Human
guacagacagaaaaa

SEQ ID NO: 1487225 - RNA, 14 nt, Human
guacagaaagcugc

SEQ ID NO: 1487226 - RNA, 13 nt, Human
guacagaaagcug

SEQ ID NO: 1487227 - RNA, 18 nt, Human
guaauuguacuaaagcca

SEQ ID NO: 1487228 - RNA, 17 nt, Human
guacauaguuauuuauu

SEQ ID NO: 1487229 - RNA, 18 nt, Human
guacauaguuauuuauuu

SEQ ID NO: 1487230 - RNA, 14 nt, Human
guacauaacugaaa

SEQ ID NO: 1487231 - RNA, 14 nt, Human
guacaguuaucuaa

SEQ ID NO: 1487232 - RNA, 20 nt, Human
guacaguuaucuaaguuaau

SEQ ID NO: 1487233 - RNA, 19 nt, Human
guacuugcucuugaugccu

SEQ ID NO: 1487234 - RNA, 18 nt, Human
guacuugcucuugaugcc

SEQ ID NO: 1487235 - RNA, 16 nt, Human
guacuugcucuugaug

SEQ ID NO: 1487236 - RNA, 15 nt, Human
guacuugcucuugau

SEQ ID NO: 1487237 - RNA, 22 nt, Human
guacuugcucuugaugccuggc

SEQ ID NO: 1487238 - RNA, 14 nt, Human
guacuugcucuuga

SEQ ID NO: 1487239 - RNA, 13 nt, Human
guagaaaagcuau

SEQ ID NO: 1487240 - RNA, 23 nt, Human
guacuuuauuuucuauaauuuaa

SEQ ID NO: 1487241 - RNA, 17 nt, Human
guaccuagcuggcucug

SEQ ID NO: 1487242 - RNA, 13 nt, Human
guacuaaagccaa

SEQ ID NO: 1487243 - RNA, 22 nt, Human
guacuaacuccuaggaaaauac

SEQ ID NO: 1487244 - RNA, 20 nt, Human
ggccuguggaucaaauccag

SEQ ID NO: 1487245 - RNA, 22 nt, Human
ggcgcgaucucggcucacugca

SEQ ID NO: 1487246 - RNA, 16 nt, Human
ggcgcggcugggagga

SEQ ID NO: 1487247 - RNA, 11 nt, Human
ggccugugagc

SEQ ID NO: 1487248 - RNA, 14 nt, Human
ggccugggcaggag

SEQ ID NO: 1487249 - RNA, 13 nt, Human
ggccugggcagga

SEQ ID NO: 1487250 - RNA, 20 nt, Human
ggcuagagugcgguggcgcg

SEQ ID NO: 1487251 - RNA, 16 nt, Human
ggcuaggguggggaga

SEQ ID NO: 1487252 - RNA, 19 nt, Human
ggccucuuccgugacguca

SEQ ID NO: 1487253 - RNA, 19 nt, Human
ggccucaaaugcaccaugu

SEQ ID NO: 1487254 - RNA, 16 nt, Human
ggccuaucuaaacugg

SEQ ID NO: 1487255 - RNA, 23 nt, Human
ggccucaaagcaagcauucagaa

SEQ ID NO: 1487256 - RNA, 14 nt, Human
ggccuauguggucu

SEQ ID NO: 1487257 - RNA, 22 nt, Human
ggccuaaccugccgagagucca

SEQ ID NO: 1487258 - RNA, 21 nt, Human
ggccgugacgucuggguggcc

SEQ ID NO: 1487259 - RNA, 16 nt, Human
ggccgugacgucuggg

SEQ ID NO: 1487260 - RNA, 20 nt, Human
ggccgugacgucuggguggc

SEQ ID NO: 1487261 - RNA, 18 nt, Human
ggagaugaggccagacca

SEQ ID NO: 1487262 - RNA, 18 nt, Human
ggauacuuauauggaaau

SEQ ID NO: 1487263 - RNA, 18 nt, Human
ggauacuggcacagaggu

SEQ ID NO: 1487264 - RNA, 17 nt, Human
ggauacuggcacagagg

SEQ ID NO: 1487265 - RNA, 15 nt, Human
ggauacuggcacaga

SEQ ID NO: 1487266 - RNA, 16 nt, Human
ggauauguaaaacauu

SEQ ID NO: 1487267 - RNA, 16 nt, Human
ggauauaguuuuacuu

SEQ ID NO: 1487268 - RNA, 20 nt, Human
ggauauaguuuuacuuuuaa

SEQ ID NO: 1487269 - RNA, 16 nt, Human
ggauucuuccaucuga

SEQ ID NO: 1487270 - RNA, 19 nt, Human
ggcaaucauggugcucaga

SEQ ID NO: 1487271 - RNA, 15 nt, Human
ggcaaugauggcaau

SEQ ID NO: 1487272 - RNA, 12 nt, Human
ggccagcuccgc

SEQ ID NO: 1487273 - RNA, 20 nt, Human
ggccauucuuucccaacacc

SEQ ID NO: 1487274 - RNA, 16 nt, Human
ggagaugaggccagac

SEQ ID NO: 1487275 - RNA, 15 nt, Human
ggagaugaggccaga

SEQ ID NO: 1487276 - RNA, 14 nt, Human
ggagaugaggccag

SEQ ID NO: 1487277 - RNA, 16 nt, Human
ggagagguugucugug

SEQ ID NO: 1487278 - RNA, 17 nt, Human
ggacugugugcucagga

SEQ ID NO: 1487279 - RNA, 16 nt, Human
ggacauuugcucaugg

SEQ ID NO: 1487280 - RNA, 22 nt, Human
ggacacuacacccagcaauaga

SEQ ID NO: 1487281 - RNA, 20 nt, Human
ggaccacaacuauuuucaga

SEQ ID NO: 1487282 - RNA, 17 nt, Human
ggacgcccaggacccca

SEQ ID NO: 1487283 - RNA, 22 nt, Human
ggaaggaucccaugagcuccuu

SEQ ID NO: 1487284 - RNA, 21 nt, Human
ggaaggcagggaggaggcaga

SEQ ID NO: 1487285 - RNA, 17 nt, Human
ggaaggcagggaggagg

SEQ ID NO: 1487286 - RNA, 19 nt, Human
ggaaggcuuguugugcuuu

SEQ ID NO: 1487287 - RNA, 21 nt, Human
ggaaggcuuguugugcuuuua

SEQ ID NO: 1487288 - RNA, 18 nt, Human
ggaagugcuaauuuugaa

SEQ ID NO: 1487289 - RNA, 18 nt, Human
ggaaguggggcgggcuuc

SEQ ID NO: 1487290 - RNA, 16 nt, Human
ggaauuggagcucgug

SEQ ID NO: 1487291 - RNA, 22 nt, Human
ggaauuggagcucgugggacag

SEQ ID NO: 1487292 - RNA, 12 nt, Human
ggaauuguguuu

SEQ ID NO: 1487293 - RNA, 21 nt, Human
ggacacuacacccagcaauag

SEQ ID NO: 1487294 - RNA, 20 nt, Human
ggacacuacacccagcaaua

SEQ ID NO: 1487295 - RNA, 19 nt, Human
ggacacuacacccagcaau

SEQ ID NO: 1487296 - RNA, 18 nt, Human
ggacacuacacccagcaa

SEQ ID NO: 1487297 - RNA, 17 nt, Human
ggacacuacacccagca

SEQ ID NO: 1487298 - RNA, 16 nt, Human
ggacacuacacccagc

SEQ ID NO: 1487299 - RNA, 15 nt, Human
ggacacuacacccag

SEQ ID NO: 1487300 - RNA, 19 nt, Human
ggaauuuucaucuaggauu

SEQ ID NO: 1487301 - RNA, 16 nt, Human
ggacaaaauggaauac

SEQ ID NO: 1487302 - RNA, 17 nt, Human
ggacaaaauggaauacu

SEQ ID NO: 1487303 - RNA, 14 nt, Human
ggacaaagaaccuu

SEQ ID NO: 1487304 - RNA, 13 nt, Human
ggacaaagaaccu

SEQ ID NO: 1487305 - RNA, 19 nt, Human
ggaauuacgugcucugugg

SEQ ID NO: 1487306 - RNA, 21 nt, Human
ggaauggaggggcagagccag

SEQ ID NO: 1487307 - RNA, 17 nt, Human
ggaauggaggggcagag

SEQ ID NO: 1487308 - RNA, 16 nt, Human
ggaauggaggggcaga

SEQ ID NO: 1487309 - RNA, 14 nt, Human
ggaauggaggggca

SEQ ID NO: 1487310 - RNA, 13 nt, Human
gcuuucagagccu

SEQ ID NO: 1487311 - RNA, 13 nt, Human
gcuuucagggagg

SEQ ID NO: 1487312 - RNA, 14 nt, Human
gcuuuguggcacug

SEQ ID NO: 1487313 - RNA, 22 nt, Human
gcuuuguggcacuggggcaggg

SEQ ID NO: 1487314 - RNA, 15 nt, Human
ggaaaacauuccauc

SEQ ID NO: 1487315 - RNA, 16 nt, Human
gcuuuucccaaaagcc

SEQ ID NO: 1487316 - RNA, 15 nt, Human
ggaaaaauguaggag

SEQ ID NO: 1487317 - RNA, 18 nt, Human
ggaacauaaaaaggacau

SEQ ID NO: 1487318 - RNA, 13 nt, Human
ggaacauaaaaag

SEQ ID NO: 1487319 - RNA, 16 nt, Human
ggaaaucaacuugcuu

SEQ ID NO: 1487320 - RNA, 21 nt, Human
gcuguucaugaaagauucaau

SEQ ID NO: 1487321 - RNA, 12 nt, Human
gcuguucaugaa

SEQ ID NO: 1487322 - RNA, 20 nt, Human
gcugucuacacuaagagaga

SEQ ID NO: 1487323 - RNA, 14 nt, Human
gcuguccuuucuag

SEQ ID NO: 1487324 - RNA, 23 nt, Human
gcuguccuggaggggcuggggac

SEQ ID NO: 1487325 - RNA, 16 nt, Human
gcuguccuggaggggc

SEQ ID NO: 1487326 - RNA, 15 nt, Human
gcuguccuggagggg

SEQ ID NO: 1487327 - RNA, 17 nt, Human
gcuuauaauaaaggacu

SEQ ID NO: 1487328 - RNA, 18 nt, Human
gcuuaugacaucacuugu

SEQ ID NO: 1487329 - RNA, 22 nt, Human
gcuuaugacaucacuuguacaa

SEQ ID NO: 1487330 - RNA, 23 nt, Human
gcuuaugacaucacuuguacaaa

SEQ ID NO: 1487331 - RNA, 18 nt, Human
gcuuaugcuuaaauucaa

SEQ ID NO: 1487332 - RNA, 15 nt, Human
gcuuaugguaccaga

SEQ ID NO: 1487333 - RNA, 17 nt, Human
gcuucauagagacuugg

SEQ ID NO: 1487334 - RNA, 14 nt, Human
gcuucauagagacu

SEQ ID NO: 1487335 - RNA, 22 nt, Human
gcuucucauccugcaggcagcu

SEQ ID NO: 1487336 - RNA, 14 nt, Human
gcuccaagaauuuc

SEQ ID NO: 1487337 - RNA, 20 nt, Human
gcuccauuuuuagugaaaua

SEQ ID NO: 1487338 - RNA, 16 nt, Human
gcucaguaauuugagg

SEQ ID NO: 1487339 - RNA, 21 nt, Human
gcucaguaauuugaggacaac

SEQ ID NO: 1487340 - RNA, 19 nt, Human
gcucagauagaaugacagu

SEQ ID NO: 1487341 - RNA, 15 nt, Human
gcucagauagaauga

SEQ ID NO: 1487342 - RNA, 21 nt, Human
gcucagaggguguccugcacc

SEQ ID NO: 1487343 - RNA, 15 nt, Human
gcuaagcuaggaaug

SEQ ID NO: 1487344 - RNA, 19 nt, Human
gcuaagcuaggaaugaaau

SEQ ID NO: 1487345 - RNA, 14 nt, Human
gcuaagcauuccaa

SEQ ID NO: 1487346 - RNA, 14 nt, Human
gcuacguauuuaau

SEQ ID NO: 1487347 - RNA, 12 nt, Human
gcuaucucccug

SEQ ID NO: 1487348 - RNA, 13 nt, Human
gcuaucucugugu

SEQ ID NO: 1487349 - RNA, 16 nt, Human
gcuaucucugugugca

SEQ ID NO: 1487350 - RNA, 20 nt, Human
gcuaucucugugugcacaaa

SEQ ID NO: 1487351 - RNA, 23 nt, Human
gccugugagcuaggaauuguguu

SEQ ID NO: 1487352 - RNA, 17 nt, Human
gcugauggagaaggaag

SEQ ID NO: 1487353 - RNA, 16 nt, Human
gcugauggagaaggaa

SEQ ID NO: 1487354 - RNA, 17 nt, Human
gcugauggagccuuccc

SEQ ID NO: 1487355 - RNA, 21 nt, Human
gcugcaguuuugcuaucuggg

SEQ ID NO: 1487356 - RNA, 17 nt, Human
gcugcaguuuugcuauc

SEQ ID NO: 1487357 - RNA, 17 nt, Human
gcucuugaugccuggcg

SEQ ID NO: 1487358 - RNA, 17 nt, Human
gcugacucacaccugaa

SEQ ID NO: 1487359 - RNA, 16 nt, Human
gcucuugaugccuggc

SEQ ID NO: 1487360 - RNA, 15 nt, Human
gcucuugaugccugg

SEQ ID NO: 1487361 - RNA, 14 nt, Human
gcucuugaugccug

SEQ ID NO: 1487362 - RNA, 17 nt, Human
gcucuccuccaccucaa

SEQ ID NO: 1487363 - RNA, 19 nt, Human
gcucucggguugugugucu

SEQ ID NO: 1487364 - RNA, 20 nt, Human
gcucucuccaggcaggucug

SEQ ID NO: 1487365 - RNA, 20 nt, Human
gccugagugacagagcaaga

SEQ ID NO: 1487366 - RNA, 17 nt, Human
gccugacccucaucuuu

SEQ ID NO: 1487367 - RNA, 23 nt, Human
gccugacccuacuucuuuugcuc

SEQ ID NO: 1487368 - RNA, 21 nt, Human
gccucucugcaggucccuaau

SEQ ID NO: 1487369 - RNA, 20 nt, Human
gccucucugcaggucccuaa

SEQ ID NO: 1487370 - RNA, 23 nt, Human
gccucucugcaggucccuaauaa

SEQ ID NO: 1487371 - RNA, 22 nt, Human
gccucucgcuccucaaccccuc

SEQ ID NO: 1487372 - RNA, 16 nt, Human
gccugcacaauaaaaa

SEQ ID NO: 1487373 - RNA, 16 nt, Human
gccugcagacucacug

SEQ ID NO: 1487374 - RNA, 22 nt, Human
gccugcuuuuuauggccuguga

SEQ ID NO: 1487375 - RNA, 19 nt, Human
gccugcuuuuuauggccug

SEQ ID NO: 1487376 - RNA, 18 nt, Human
gccugcuuuuuauggccu

SEQ ID NO: 1487377 - RNA, 22 nt, Human
gccuggggcugaggcugaggca

SEQ ID NO: 1487378 - RNA, 15 nt, Human
gccugggucuccuaa

SEQ ID NO: 1487379 - RNA, 20 nt, Human
gccuguagccccagugacag

SEQ ID NO: 1487380 - RNA, 21 nt, Human
gccuguagccccagugacagc

SEQ ID NO: 1487381 - RNA, 19 nt, Human
gccucucugcaggucccua

SEQ ID NO: 1487382 - RNA, 19 nt, Human
gccucucgcuccucaaccc

SEQ ID NO: 1487383 - RNA, 19 nt, Human
gccucaccagcccuggcaa

SEQ ID NO: 1487384 - RNA, 15 nt, Human
gccucaaccucccaa

SEQ ID NO: 1487385 - RNA, 22 nt, Human
gccucacuuuuaaugaacaaau

SEQ ID NO: 1487386 - RNA, 23 nt, Human
gccucacuuuuaaugaacaaaug

SEQ ID NO: 1487387 - RNA, 20 nt, Human
gccuaucagaguugcugcaa

SEQ ID NO: 1487388 - RNA, 23 nt, Human
gccuaagggauccugccugcccc

SEQ ID NO: 1487389 - RNA, 21 nt, Human
gcccugggaggcucuggagcc

SEQ ID NO: 1487390 - RNA, 19 nt, Human
gcccugggaggcucuggag

SEQ ID NO: 1487391 - RNA, 18 nt, Human
gcccugggaggcucugga

SEQ ID NO: 1487392 - RNA, 17 nt, Human
gcccugggaggcucugg

SEQ ID NO: 1487393 - RNA, 23 nt, Human
gcccugggaggcucuggagccca

SEQ ID NO: 1487394 - RNA, 16 nt, Human
gcccugggaggcucug

SEQ ID NO: 1487395 - RNA, 15 nt, Human
gcccugggaggcucu

SEQ ID NO: 1487396 - RNA, 14 nt, Human
gcccugggaggcuc

SEQ ID NO: 1487397 - RNA, 13 nt, Human
gcccugggaggcu

SEQ ID NO: 1487398 - RNA, 14 nt, Human
gcccuuuugucucu

SEQ ID NO: 1487399 - RNA, 23 nt, Human
gcccuggugguggcucgggaggc

SEQ ID NO: 1487400 - RNA, 22 nt, Human
gcccuggacugugugcucagga

SEQ ID NO: 1487401 - RNA, 16 nt, Human
gcccuggacugugugc

SEQ ID NO: 1487402 - RNA, 12 nt, Human
gcccuggacugu

SEQ ID NO: 1487403 - RNA, 20 nt, Human
gcccugaggccuagacucug

SEQ ID NO: 1487404 - RNA, 17 nt, Human
gcccugcaccaugcugc

SEQ ID NO: 1487405 - RNA, 21 nt, Human
gcccugcaccaugcugcuggg

SEQ ID NO: 1487406 - RNA, 22 nt, Human
gcccugcaccaugcugcugggg

SEQ ID NO: 1487407 - RNA, 16 nt, Human
gcagacucagcucuga

SEQ ID NO: 1487408 - RNA, 13 nt, Human
gcagacucacugu

SEQ ID NO: 1487409 - RNA, 15 nt, Human
gcagacucagcucug

SEQ ID NO: 1487410 - RNA, 17 nt, Human
gcagaccuuuuuuagga

SEQ ID NO: 1487411 - RNA, 17 nt, Human
gaugggguuucaccaug

SEQ ID NO: 1487412 - RNA, 13 nt, Human
gaugggauucugg

SEQ ID NO: 1487413 - RNA, 17 nt, Human
gaugggauucuggacag

SEQ ID NO: 1487414 - RNA, 17 nt, Human
gaugcccaaauccuuag

SEQ ID NO: 1487415 - RNA, 23 nt, Human
gaugcccccuaauccccuucucc

SEQ ID NO: 1487416 - RNA, 22 nt, Human
gaugguucccuugaugaagaag

SEQ ID NO: 1487417 - RNA, 16 nt, Human
gauguuuaguaaucau

SEQ ID NO: 1487418 - RNA, 14 nt, Human
gauuacacacguga

SEQ ID NO: 1487419 - RNA, 14 nt, Human
gauuacaggcguga

SEQ ID NO: 1487420 - RNA, 21 nt, Human
gauucaaugccccugaauuua

SEQ ID NO: 1487421 - RNA, 13 nt, Human
gauucucauaacu

SEQ ID NO: 1487422 - RNA, 19 nt, Human
gauucaaugccccugaauu

SEQ ID NO: 1487423 - RNA, 20 nt, Human
gauucaaugccccugaauuu

SEQ ID NO: 1487424 - RNA, 20 nt, Human
gauucaaucuguaaacugug

SEQ ID NO: 1487425 - RNA, 21 nt, Human
gauucaaucuguaaacugugu

SEQ ID NO: 1487426 - RNA, 22 nt, Human
gauucaaucuguaaacugugua

SEQ ID NO: 1487427 - RNA, 12 nt, Human
gauuuccuucuu

SEQ ID NO: 1487428 - RNA, 18 nt, Human
gauuucuagguaggaaau

SEQ ID NO: 1487429 - RNA, 22 nt, Human
gauuggggaagagagccugcag

SEQ ID NO: 1487430 - RNA, 13 nt, Human
gcaacaauaaaua

SEQ ID NO: 1487431 - RNA, 14 nt, Human
gcaacaauuuauga

SEQ ID NO: 1487432 - RNA, 16 nt, Human
gcaaauugucacagga

SEQ ID NO: 1487433 - RNA, 16 nt, Human
gcaaagauaucucauc

SEQ ID NO: 1487434 - RNA, 21 nt, Human
gauuuugaaaucaugaagaua

SEQ ID NO: 1487435 - RNA, 21 nt, Human
gauuuugaaaccaugaagaga

SEQ ID NO: 1487436 - RNA, 14 nt, Human
gauuuuuacacaug

SEQ ID NO: 1487437 - RNA, 23 nt, Human
gauuuugaaccugaugaaaauaa

SEQ ID NO: 1487438 - RNA, 20 nt, Human
gauuuugcaguucuuuggcu

SEQ ID NO: 1487439 - RNA, 15 nt, Human
gcacuggggcagggg

SEQ ID NO: 1487440 - RNA, 18 nt, Human
gcacuggggcaggggccg

SEQ ID NO: 1487441 - RNA, 23 nt, Human
gcacuggggcaggggccgggggc

SEQ ID NO: 1487442 - RNA, 16 nt, Human
gcagaaggaaggcagg

SEQ ID NO: 1487443 - RNA, 22 nt, Human
gcagaaggaaggcagggaggag

SEQ ID NO: 1487444 - RNA, 15 nt, Human
gcagaaggaaggcag

SEQ ID NO: 1487445 - RNA, 13 nt, Human
gcagaaggaaggc

SEQ ID NO: 1487446 - RNA, 12 nt, Human
gcagaaggaagg

SEQ ID NO: 1487447 - RNA, 19 nt, Human
gcacuguggguagacacac

SEQ ID NO: 1487448 - RNA, 22 nt, Human
gcaccccagcuggggccaggcu

SEQ ID NO: 1487449 - RNA, 14 nt, Human
gcaccccccaagcu

SEQ ID NO: 1487450 - RNA, 15 nt, Human
gcaccugucccagaa

SEQ ID NO: 1487451 - RNA, 19 nt, Human
gcaccugucccagaaaaag

SEQ ID NO: 1487452 - RNA, 22 nt, Human
gcaccugucccagaaaaagcau

SEQ ID NO: 1487453 - RNA, 14 nt, Human
gcaccaaaagaagu

SEQ ID NO: 1487454 - RNA, 15 nt, Human
gcaccaaaagaagua

SEQ ID NO: 1487455 - RNA, 16 nt, Human
gcaccaaaagaaguaa

SEQ ID NO: 1487456 - RNA, 18 nt, Human
gcaccaaaagaaguaaaa

SEQ ID NO: 1487457 - RNA, 13 nt, Human
gcaacucugaagg

SEQ ID NO: 1487458 - RNA, 13 nt, Human
gcaauguaaauau

SEQ ID NO: 1487459 - RNA, 15 nt, Human
gcaauguaaauauuu

SEQ ID NO: 1487460 - RNA, 18 nt, Human
gcaauguaaauauuuuaa

SEQ ID NO: 1487461 - RNA, 19 nt, Human
gcaauguaaauauuuuaaa

SEQ ID NO: 1487462 - RNA, 19 nt, Human
gcaauuaauuccuucagca

SEQ ID NO: 1487463 - RNA, 20 nt, Human
gcaauuacaacggagucaaa

SEQ ID NO: 1487464 - RNA, 16 nt, Human
gcaauuaauuccuuca

SEQ ID NO: 1487465 - RNA, 23 nt, Human
gcaauguaaauauuuuaaagaau

SEQ ID NO: 1487466 - RNA, 18 nt, Human
gcaauuuaaauguuauga

SEQ ID NO: 1487467 - RNA, 13 nt, Human
gcaauuuaaaugu

SEQ ID NO: 1487468 - RNA, 18 nt, Human
gcaauuuccuuuuuuguu

SEQ ID NO: 1487469 - RNA, 14 nt, Human
gcaauuuuguaacg

SEQ ID NO: 1487470 - RNA, 13 nt, Human
gcacaaauauuua

SEQ ID NO: 1487471 - RNA, 23 nt, Human
gcacaaauucugucucuggauua

SEQ ID NO: 1487472 - RNA, 14 nt, Human
gcacaaauauuuau

SEQ ID NO: 1487473 - RNA, 15 nt, Human
gcacaaauauuuauu

SEQ ID NO: 1487474 - RNA, 16 nt, Human
gcacaaauauuuauuu

SEQ ID NO: 1487475 - RNA, 23 nt, Human
gagugugcgugguggucccuggg

SEQ ID NO: 1487476 - RNA, 13 nt, Human
gaguggggguggg

SEQ ID NO: 1487477 - RNA, 14 nt, Human
gaguggguggggag

SEQ ID NO: 1487478 - RNA, 15 nt, Human
gaguggguggggagu

SEQ ID NO: 1487479 - RNA, 13 nt, Human
gaguguacaagua

SEQ ID NO: 1487480 - RNA, 18 nt, Human
gaguguagcaacuacagu

SEQ ID NO: 1487481 - RNA, 15 nt, Human
gauaaaugauagaca

SEQ ID NO: 1487482 - RNA, 22 nt, Human
gauaaauggcuuccuggcaaua

SEQ ID NO: 1487483 - RNA, 17 nt, Human
gauauaaguguguguuu

SEQ ID NO: 1487484 - RNA, 15 nt, Human
gauauaagugugugu

SEQ ID NO: 1487485 - RNA, 14 nt, Human
gauaugauucaaau

SEQ ID NO: 1487486 - RNA, 22 nt, Human
gauaugauucaaaugucuauaa

SEQ ID NO: 1487487 - RNA, 24 nt, Human
gauaugauucaaaugucuauaaac

SEQ ID NO: 1487488 - RNA, 22 nt, Human
gaucacuuucucaguuuucaua

SEQ ID NO: 1487489 - RNA, 20 nt, Human
gauaacugaaaauuauuuaa

SEQ ID NO: 1487490 - RNA, 21 nt, Human
gauaacugaaaauuauuuaaa

SEQ ID NO: 1487491 - RNA, 22 nt, Human
gauagauuuucugcuacuuugc

SEQ ID NO: 1487492 - RNA, 21 nt, Human
gagucuauuuacggaacucaa

SEQ ID NO: 1487493 - RNA, 15 nt, Human
gagucuaucaaucaa

SEQ ID NO: 1487494 - RNA, 23 nt, Human
gagucuggugaagcucacuucug

SEQ ID NO: 1487495 - RNA, 20 nt, Human
gagucuugcucugucgccca

SEQ ID NO: 1487496 - RNA, 21 nt, Human
gagucccugccuggaccagcc

SEQ ID NO: 1487497 - RNA, 23 nt, Human
gagucccugccuggaccagccuc

SEQ ID NO: 1487498 - RNA, 22 nt, Human
gaguaauccaagcaaaugugaa

SEQ ID NO: 1487499 - RNA, 16 nt, Human
gaguaauaugccugcu

SEQ ID NO: 1487500 - RNA, 18 nt, Human
gagguugaaaaacaaaau

SEQ ID NO: 1487501 - RNA, 23 nt, Human
gaggucagcaugucuauucagcu

SEQ ID NO: 1487502 - RNA, 12 nt, Human
gagguaaguuuu

SEQ ID NO: 1487503 - RNA, 22 nt, Human
gaggguuucauugucugugaag

SEQ ID NO: 1487504 - RNA, 13 nt, Human
gaggguguccugc

SEQ ID NO: 1487505 - RNA, 19 nt, Human
gagguauuuaucuuuacuu

SEQ ID NO: 1487506 - RNA, 13 nt, Human
gaggguaggcagg

SEQ ID NO: 1487507 - RNA, 14 nt, Human
gaggguaggcagga

SEQ ID NO: 1487508 - RNA, 15 nt, Human
gaggguaggcaggau

SEQ ID NO: 1487509 - RNA, 22 nt, Human
gaggguaggcaggauuggggaa

SEQ ID NO: 1487510 - RNA, 18 nt, Human
gaggguaggcaggauugg

SEQ ID NO: 1487511 - RNA, 22 nt, Human
gaggcugggaauggaggggcag

SEQ ID NO: 1487512 - RNA, 23 nt, Human
gaggggcuggggacuugugucug

SEQ ID NO: 1487513 - RNA, 14 nt, Human
gagggggagagggc

SEQ ID NO: 1487514 - RNA, 21 nt, Human
gaggcgcaugaauuugugaag

SEQ ID NO: 1487515 - RNA, 21 nt, Human
gaggcgaagcguuguccucag

SEQ ID NO: 1487516 - RNA, 22 nt, Human
gaggccuuucccuaagccagcu

SEQ ID NO: 1487517 - RNA, 19 nt, Human
gaggccuuucccuaagcca

SEQ ID NO: 1487518 - RNA, 20 nt, Human
gaggcgaagcguuguccuca

SEQ ID NO: 1487519 - RNA, 18 nt, Human
gaggccugacugccaagc

SEQ ID NO: 1487520 - RNA, 19 nt, Human
gaggccugacugccaagcc

SEQ ID NO: 1487521 - RNA, 15 nt, Human
gaggccuagacucug

SEQ ID NO: 1487522 - RNA, 19 nt, Human
gaggccauugugugagccu

SEQ ID NO: 1487523 - RNA, 18 nt, Human
gaggcagagaagaaagaa

SEQ ID NO: 1487524 - RNA, 14 nt, Human
gaggcagggaagga

SEQ ID NO: 1487525 - RNA, 16 nt, Human
gaggcagagaagaaag

SEQ ID NO: 1487526 - RNA, 22 nt, Human
gagcccuucuauacccacccag

SEQ ID NO: 1487527 - RNA, 21 nt, Human
gagcccuucuauacccaccca

SEQ ID NO: 1487528 - RNA, 14 nt, Human
gagaugaggccaga

SEQ ID NO: 1487529 - RNA, 13 nt, Human
gagaugaggccag

SEQ ID NO: 1487530 - RNA, 15 nt, Human
gagaugaggccagac

SEQ ID NO: 1487531 - RNA, 18 nt, Human
gagaucccaacacugcca

SEQ ID NO: 1487532 - RNA, 19 nt, Human
gagaucccaacacugccag

SEQ ID NO: 1487533 - RNA, 20 nt, Human
gagaucccaacacugccagc

SEQ ID NO: 1487534 - RNA, 18 nt, Human
gagauccagggcaaggcc

SEQ ID NO: 1487535 - RNA, 21 nt, Human
gagaucaccaguguguggcuu

SEQ ID NO: 1487536 - RNA, 20 nt, Human
gagcaagaccccaucucaaa

SEQ ID NO: 1487537 - RNA, 18 nt, Human
gagcaagcaggaaucaga

SEQ ID NO: 1487538 - RNA, 18 nt, Human
gagccaaggggcuucagg

SEQ ID NO: 1487539 - RNA, 20 nt, Human
gagaaugagagacacacuga

SEQ ID NO: 1487540 - RNA, 21 nt, Human
gagaaugagagacacacugaa

SEQ ID NO: 1487541 - RNA, 20 nt, Human
gagaaugcccuucuccuuau

SEQ ID NO: 1487542 - RNA, 16 nt, Human
gagacaguucaagaaa

SEQ ID NO: 1487543 - RNA, 18 nt, Human
gagacaguucaagaaagc

SEQ ID NO: 1487544 - RNA, 15 nt, Human
gagacuggguaggaa

SEQ ID NO: 1487545 - RNA, 11 nt, Human
gagagugugac

SEQ ID NO: 1487546 - RNA, 20 nt, Human
gagaguggcuggggcaugga

SEQ ID NO: 1487547 - RNA, 17 nt, Human
gagaguggcuggggcau

SEQ ID NO: 1487548 - RNA, 14 nt, Human
gagaguggcugggg

SEQ ID NO: 1487549 - RNA, 13 nt, Human
gagagacgggccc

SEQ ID NO: 1487550 - RNA, 12 nt, Human
gagagacuuguu

SEQ ID NO: 1487551 - RNA, 20 nt, Human
gagagacuuguuuuggaugc

SEQ ID NO: 1487552 - RNA, 19 nt, Human
gagagcccugaggccuaga

SEQ ID NO: 1487553 - RNA, 14 nt, Human
gagagcccugaggc

SEQ ID NO: 1487554 - RNA, 14 nt, Human
gagagccugcagga

SEQ ID NO: 1487555 - RNA, 17 nt, Human
gagagccugcaggaucu

SEQ ID NO: 1487556 - RNA, 17 nt, Human
gagaaugagagacacac

SEQ ID NO: 1487557 - RNA, 22 nt, Human
gagaacuuccagauccuggaaa

SEQ ID NO: 1487558 - RNA, 23 nt, Human
gagaacuuccagauccuggaaau

SEQ ID NO: 1487559 - RNA, 21 nt, Human
gagaaccuggguugcagacag

SEQ ID NO: 1487560 - RNA, 21 nt, Human
gagaagaaagaacggaagaag

SEQ ID NO: 1487561 - RNA, 16 nt, Human
gagaagaaagaacgga

SEQ ID NO: 1487562 - RNA, 13 nt, Human
gagaagaacugaa

SEQ ID NO: 1487563 - RNA, 14 nt, Human
gagaaauuuauaaa

SEQ ID NO: 1487564 - RNA, 23 nt, Human
gagaaccuggguugcagacagga

SEQ ID NO: 1487565 - RNA, 21 nt, Human
gagaaccuagggugauauuaa

SEQ ID NO: 1487566 - RNA, 22 nt, Human
gagaaccuagggugauauuaac

SEQ ID NO: 1487567 - RNA, 21 nt, Human
gagaaaugaaaaaauauauau

SEQ ID NO: 1487568 - RNA, 15 nt, Human
gacuuggccccugcc

SEQ ID NO: 1487569 - RNA, 16 nt, Human
gacuugacaguggaac

SEQ ID NO: 1487570 - RNA, 17 nt, Human
gacuggguaggaaagag

SEQ ID NO: 1487571 - RNA, 13 nt, Human
gacuggacagcuu

SEQ ID NO: 1487572 - RNA, 14 nt, Human
gacuggacagcuug

SEQ ID NO: 1487573 - RNA, 21 nt, Human
gacuggacagcuuguggcaag

SEQ ID NO: 1487574 - RNA, 15 nt, Human
gacuggacagcuugu

SEQ ID NO: 1487575 - RNA, 15 nt, Human
gacuggaacacuaga

SEQ ID NO: 1487576 - RNA, 12 nt, Human
gacugcuguggc

SEQ ID NO: 1487577 - RNA, 15 nt, Human
gacugcuguggccag

SEQ ID NO: 1487578 - RNA, 16 nt, Human
gacugcuguggccagg

SEQ ID NO: 1487579 - RNA, 17 nt, Human
gacugcuguggccagga

SEQ ID NO: 1487580 - RNA, 18 nt, Human
gacugcuguggccaggag

SEQ ID NO: 1487581 - RNA, 20 nt, Human
gacugcuguggccaggaggu

SEQ ID NO: 1487582 - RNA, 19 nt, Human
gacugcuguggccaggagg

SEQ ID NO: 1487583 - RNA, 24 nt, Human
gacugcauuauauuuauuacugua

SEQ ID NO: 1487584 - RNA, 14 nt, Human
gacugcauuauauu

SEQ ID NO: 1487585 - RNA, 16 nt, Human
gacugcauuauauuua

SEQ ID NO: 1487586 - RNA, 12 nt, Human
gacucagcucug

SEQ ID NO: 1487587 - RNA, 17 nt, Human
gaauggcuauguuuuua

SEQ ID NO: 1487588 - RNA, 19 nt, Human
gaauggcuauguuuuuaau

SEQ ID NO: 1487589 - RNA, 19 nt, Human
gaaugugauaaggaaauca

SEQ ID NO: 1487590 - RNA, 18 nt, Human
gaaugugauaaggaaauc

SEQ ID NO: 1487591 - RNA, 22 nt, Human
gaauguggccccugaacaagaa

SEQ ID NO: 1487592 - RNA, 20 nt, Human
gaauguuaagacuugacagu

SEQ ID NO: 1487593 - RNA, 16 nt, Human
gaauuggagcucgugg

SEQ ID NO: 1487594 - RNA, 14 nt, Human
gaauugcagaguac

SEQ ID NO: 1487595 - RNA, 20 nt, Human
gaauguugauuacagugcag

SEQ ID NO: 1487596 - RNA, 23 nt, Human
gaaugaaauccugcuucagugua

SEQ ID NO: 1487597 - RNA, 17 nt, Human
gaaucuauauuuaacaa

SEQ ID NO: 1487598 - RNA, 22 nt, Human
gaauccugucgauuagacugga

SEQ ID NO: 1487599 - RNA, 14 nt, Human
gaauccugucgauu

SEQ ID NO: 1487600 - RNA, 13 nt, Human
gaaucuauauuua

SEQ ID NO: 1487601 - RNA, 20 nt, Human
gaauuugugaagguggaaau

SEQ ID NO: 1487602 - RNA, 20 nt, Human
gaauuugauaugugaacagu

SEQ ID NO: 1487603 - RNA, 19 nt, Human
gaauuucuaggacugaauu

SEQ ID NO: 1487604 - RNA, 20 nt, Human
gaauuucuaggacugaauua

SEQ ID NO: 1487605 - RNA, 14 nt, Human
gaauuucccucucu

SEQ ID NO: 1487606 - RNA, 17 nt, Human
gaauugggagcuuggga

SEQ ID NO: 1487607 - RNA, 16 nt, Human
gaauugggagcuuggg

SEQ ID NO: 1487608 - RNA, 22 nt, Human
gacaacauuucuauagccaaaa

SEQ ID NO: 1487609 - RNA, 20 nt, Human
gacaacagguaaaacagggc

SEQ ID NO: 1487610 - RNA, 12 nt, Human
gacaacuggcag

SEQ ID NO: 1487611 - RNA, 13 nt, Human
gacaacuggcagg

SEQ ID NO: 1487612 - RNA, 15 nt, Human
gacaacuggcaggca

SEQ ID NO: 1487613 - RNA, 16 nt, Human
gacaacuggcaggcag

SEQ ID NO: 1487614 - RNA, 18 nt, Human
gacaacuggcaggcaggc

SEQ ID NO: 1487615 - RNA, 17 nt, Human
gacaacuggcaggcagg

SEQ ID NO: 1487616 - RNA, 16 nt, Human
gacaaggaaaaaauaa

SEQ ID NO: 1487617 - RNA, 19 nt, Human
gacacaaacacacacaaaa

SEQ ID NO: 1487618 - RNA, 15 nt, Human
gacacaaacacacac

SEQ ID NO: 1487619 - RNA, 16 nt, Human
gaccaccucucaauau

SEQ ID NO: 1487620 - RNA, 17 nt, Human
gacaugggacauuugcu

SEQ ID NO: 1487621 - RNA, 16 nt, Human
gacaugggacauuugc

SEQ ID NO: 1487622 - RNA, 16 nt, Human
gaccauugucucagag

SEQ ID NO: 1487623 - RNA, 14 nt, Human
gaccagccucucca

SEQ ID NO: 1487624 - RNA, 22 nt, Human
gaccagccgugagcauguuugg

SEQ ID NO: 1487625 - RNA, 21 nt, Human
gacagcuuguggcaagugaau

SEQ ID NO: 1487626 - RNA, 21 nt, Human
gacagcccaggauacuggcac

SEQ ID NO: 1487627 - RNA, 23 nt, Human
gacaguguugaaaauguucagaa

SEQ ID NO: 1487628 - RNA, 17 nt, Human
cuuuuuauggccuguga

SEQ ID NO: 1487629 - RNA, 14 nt, Human
cuuuguggcacugg

SEQ ID NO: 1487630 - RNA, 17 nt, Human
cuuuuugggagagacuu

SEQ ID NO: 1487631 - RNA, 20 nt, Human
cuuuuugggagagacuuguu

SEQ ID NO: 1487632 - RNA, 19 nt, Human
cuuuuugggagagacuugu

SEQ ID NO: 1487633 - RNA, 13 nt, Human
gaaaaagcgaaaa

SEQ ID NO: 1487634 - RNA, 23 nt, Human
gaaaaguuuagccccugaaagcc

SEQ ID NO: 1487635 - RNA, 15 nt, Human
gaaaauauuguuuua

SEQ ID NO: 1487636 - RNA, 22 nt, Human
gaaaauauuguuuuacaauagu

SEQ ID NO: 1487637 - RNA, 18 nt, Human
gaaaaucuuauaauuuaa

SEQ ID NO: 1487638 - RNA, 11 nt, Human
gaaaaucauau

SEQ ID NO: 1487639 - RNA, 14 nt, Human
gaaaaguugaauuu

SEQ ID NO: 1487640 - RNA, 15 nt, Human
gaaaaguugaauuuu

SEQ ID NO: 1487641 - RNA, 22 nt, Human
gaaagcgccuccaacccuagca

SEQ ID NO: 1487642 - RNA, 17 nt, Human
gaaagcgccuccaaccc

SEQ ID NO: 1487643 - RNA, 14 nt, Human
gaaagccuucuuuu

SEQ ID NO: 1487644 - RNA, 19 nt, Human
gaaagcuauauaagacaag

SEQ ID NO: 1487645 - RNA, 17 nt, Human
gaaagcuucaaacugca

SEQ ID NO: 1487646 - RNA, 16 nt, Human
gaaagcuucagugcug

SEQ ID NO: 1487647 - RNA, 18 nt, Human
gaaagcuucagugcugcc

SEQ ID NO: 1487648 - RNA, 17 nt, Human
gaaagcugccugguaua

SEQ ID NO: 1487649 - RNA, 18 nt, Human
gaaagcaguugagacaag

SEQ ID NO: 1487650 - RNA, 21 nt, Human
gaaagaguacucuuguuuccu

SEQ ID NO: 1487651 - RNA, 13 nt, Human
gaaagaggaagca

SEQ ID NO: 1487652 - RNA, 13 nt, Human
gaaagagaaacac

SEQ ID NO: 1487653 - RNA, 17 nt, Human
gaaagagaacuuccaga

SEQ ID NO: 1487654 - RNA, 14 nt, Human
gaaaccuuccaccc

SEQ ID NO: 1487655 - RNA, 19 nt, Human
gaaacuaggugcauauuua

SEQ ID NO: 1487656 - RNA, 23 nt, Human
gaaacucguuaauuuguaguguu

SEQ ID NO: 1487657 - RNA, 21 nt, Human
gaaacccugcacccauuagca

SEQ ID NO: 1487658 - RNA, 13 nt, Human
gaaaccuacugcc

SEQ ID NO: 1487659 - RNA, 19 nt, Human
gaaaccuacugcccaggca

SEQ ID NO: 1487660 - RNA, 16 nt, Human
gaaacacaacuauauu

SEQ ID NO: 1487661 - RNA, 17 nt, Human
cuuguacuuuauuuucu

SEQ ID NO: 1487662 - RNA, 23 nt, Human
cuugucaauaaaauccauacauu

SEQ ID NO: 1487663 - RNA, 17 nt, Human
cuuguauaucuuguuuu

SEQ ID NO: 1487664 - RNA, 13 nt, Human
cuugucacgccag

SEQ ID NO: 1487665 - RNA, 16 nt, Human
cuugucacgccagacu

SEQ ID NO: 1487666 - RNA, 18 nt, Human
cuugucacgccagacuuc

SEQ ID NO: 1487667 - RNA, 12 nt, Human
cuugucaugugu

SEQ ID NO: 1487668 - RNA, 13 nt, Human
cuugucaugugua

SEQ ID NO: 1487669 - RNA, 14 nt, Human
cuugucauguguau

SEQ ID NO: 1487670 - RNA, 15 nt, Human
cuugucauguguaua

SEQ ID NO: 1487671 - RNA, 16 nt, Human
cuugucauguguauaa

SEQ ID NO: 1487672 - RNA, 17 nt, Human
cuugucauguguauaaa

SEQ ID NO: 1487673 - RNA, 18 nt, Human
cuugucauguguauaaaa

SEQ ID NO: 1487674 - RNA, 22 nt, Human
cuugucauuguuauauaaucau

SEQ ID NO: 1487675 - RNA, 19 nt, Human
cuugucauguguauaaaaa

SEQ ID NO: 1487676 - RNA, 19 nt, Human
cuugaguuuaaauuguaau

SEQ ID NO: 1487677 - RNA, 21 nt, Human
cuuuaucuugaauaauguaag

SEQ ID NO: 1487678 - RNA, 18 nt, Human
cuuuaucuugaauaaugu

SEQ ID NO: 1487679 - RNA, 23 nt, Human
cuuuaucuugaauaauguaagac

SEQ ID NO: 1487680 - RNA, 15 nt, Human
cuuuauagaucagcc

SEQ ID NO: 1487681 - RNA, 13 nt, Human
cuuuauaugaaga

SEQ ID NO: 1487682 - RNA, 22 nt, Human
cuuuauaugaagaaaaucacuu

SEQ ID NO: 1487683 - RNA, 20 nt, Human
cuuuaaaauuacaacuaagu

SEQ ID NO: 1487684 - RNA, 19 nt, Human
cuuuaaaauuacaacuaag

SEQ ID NO: 1487685 - RNA, 17 nt, Human
cuuuaaaauuacaacua

SEQ ID NO: 1487686 - RNA, 16 nt, Human
cuuuaaaauguaaagc

SEQ ID NO: 1487687 - RNA, 19 nt, Human
cuuuaaaauguaaagccau

SEQ ID NO: 1487688 - RNA, 17 nt, Human
cuuuaaaaggaaagaaa

SEQ ID NO: 1487689 - RNA, 18 nt, Human
cuuuaaaaggaaagaaaa

SEQ ID NO: 1487690 - RNA, 16 nt, Human
cuuuaaaaggaaagaa

SEQ ID NO: 1487691 - RNA, 18 nt, Human
cuuuaaaagaugcuuuua

SEQ ID NO: 1487692 - RNA, 16 nt, Human
cuugugucaaacagua

SEQ ID NO: 1487693 - RNA, 21 nt, Human
cuuuaaaauguaaagccaugc

SEQ ID NO: 1487694 - RNA, 16 nt, Human
cuuuaccuuuuuucuu

SEQ ID NO: 1487695 - RNA, 15 nt, Human
cuuuccugaauccaa

SEQ ID NO: 1487696 - RNA, 22 nt, Human
cuuuccugaauccaaacuaauc

SEQ ID NO: 1487697 - RNA, 16 nt, Human
cuuucuguaaccauaa

SEQ ID NO: 1487698 - RNA, 13 nt, Human
cuuucccugccuc

SEQ ID NO: 1487699 - RNA, 18 nt, Human
cuuucccuccuuggugau

SEQ ID NO: 1487700 - RNA, 15 nt, Human
cuuucccuccuuggu

SEQ ID NO: 1487701 - RNA, 14 nt, Human
cuuucccuccuugg

SEQ ID NO: 1487702 - RNA, 13 nt, Human
cuuucccuccuug

SEQ ID NO: 1487703 - RNA, 20 nt, Human
cuuuauguaguuuuuauaug

SEQ ID NO: 1487704 - RNA, 13 nt, Human
cuuuaugcuugca

SEQ ID NO: 1487705 - RNA, 19 nt, Human
cuuuauguaguuuuuauau

SEQ ID NO: 1487706 - RNA, 21 nt, Human
cuuuaugucuguggauuuuuu

SEQ ID NO: 1487707 - RNA, 13 nt, Human
cuuucccaacacc

SEQ ID NO: 1487708 - RNA, 18 nt, Human
cuuucccuaagccagcug

SEQ ID NO: 1487709 - RNA, 17 nt, Human
cuuucccuaagccagcu

SEQ ID NO: 1487710 - RNA, 12 nt, Human
cuuucccuaagc

SEQ ID NO: 1487711 - RNA, 16 nt, Human
cuuuggcugcaugcga

SEQ ID NO: 1487712 - RNA, 22 nt, Human
cuuuguauuguauauuacaaug

SEQ ID NO: 1487713 - RNA, 14 nt, Human
cuuuggcugcaugc

SEQ ID NO: 1487714 - RNA, 22 nt, Human
cuuuggcugaaaggaagcugug

SEQ ID NO: 1487715 - RNA, 14 nt, Human
cuuugugcauucug

SEQ ID NO: 1487716 - RNA, 13 nt, Human
cuuugugcauucu

SEQ ID NO: 1487717 - RNA, 22 nt, Human
cuuugcauaacguauaaaagcc

SEQ ID NO: 1487718 - RNA, 18 nt, Human
cuuugaccugccucccuu

SEQ ID NO: 1487719 - RNA, 15 nt, Human
cuuugaccugccucc

SEQ ID NO: 1487720 - RNA, 14 nt, Human
cuuugaccugccuc

SEQ ID NO: 1487721 - RNA, 13 nt, Human
cuuauauuaugga

SEQ ID NO: 1487722 - RNA, 19 nt, Human
cuuauaucuauauuuuaca

SEQ ID NO: 1487723 - RNA, 21 nt, Human
cuuauauuaauauuccucagu

SEQ ID NO: 1487724 - RNA, 16 nt, Human
cuuauacgaguaauau

SEQ ID NO: 1487725 - RNA, 23 nt, Human
cuuaguucaaguccugccucuua

SEQ ID NO: 1487726 - RNA, 22 nt, Human
cuuagaugcaguucugaagaag

SEQ ID NO: 1487727 - RNA, 15 nt, Human
cuucaaaguuuaaua

SEQ ID NO: 1487728 - RNA, 16 nt, Human
cuucaaaguuuaauaa

SEQ ID NO: 1487729 - RNA, 17 nt, Human
cuuauuucaugaaaauu

SEQ ID NO: 1487730 - RNA, 21 nt, Human
cuuauuuauucauauuuucuu

SEQ ID NO: 1487731 - RNA, 23 nt, Human
cuuaucuaaucaugaaacucccu

SEQ ID NO: 1487732 - RNA, 18 nt, Human
cuuaucuacuuccaaacu

SEQ ID NO: 1487733 - RNA, 15 nt, Human
cuuaucgaaacucau

SEQ ID NO: 1487734 - RNA, 14 nt, Human
cuucccuuuccuga

SEQ ID NO: 1487735 - RNA, 19 nt, Human
cuuccuaaauauuaugaga

SEQ ID NO: 1487736 - RNA, 22 nt, Human
cuuccuaaauauuaugagaugc

SEQ ID NO: 1487737 - RNA, 20 nt, Human
cuucccuuuccugaguccca

SEQ ID NO: 1487738 - RNA, 21 nt, Human
cuuccaggggagguucaguga

SEQ ID NO: 1487739 - RNA, 14 nt, Human
cuuccacccagugc

SEQ ID NO: 1487740 - RNA, 12 nt, Human
cuuccacccagu

SEQ ID NO: 1487741 - RNA, 19 nt, Human
cuuccacguacugcagccu

SEQ ID NO: 1487742 - RNA, 20 nt, Human
cuuccacguacugcagccuc

SEQ ID NO: 1487743 - RNA, 21 nt, Human
cuucauucaagucagcucuuc

SEQ ID NO: 1487744 - RNA, 18 nt, Human
cuugaaaauuaacaugaa

SEQ ID NO: 1487745 - RNA, 13 nt, Human
cuugaaaauuaac

SEQ ID NO: 1487746 - RNA, 12 nt, Human
cuugaaaauuaa

SEQ ID NO: 1487747 - RNA, 15 nt, Human
cuugaaauuuuaacc

SEQ ID NO: 1487748 - RNA, 16 nt, Human
cuugaaauuuuaaccu

SEQ ID NO: 1487749 - RNA, 17 nt, Human
cuugaaauuuuaaccua

SEQ ID NO: 1487750 - RNA, 18 nt, Human
cuugaaaaaugcauguug

SEQ ID NO: 1487751 - RNA, 12 nt, Human
cuugaaaaaugc

SEQ ID NO: 1487752 - RNA, 16 nt, Human
cuucuuggccauggga

SEQ ID NO: 1487753 - RNA, 18 nt, Human
cuucuuggccaugggagg

SEQ ID NO: 1487754 - RNA, 13 nt, Human
cuugacccugagc

SEQ ID NO: 1487755 - RNA, 15 nt, Human
cuugacccugagcug

SEQ ID NO: 1487756 - RNA, 14 nt, Human
cuugacccugagcu

SEQ ID NO: 1487757 - RNA, 20 nt, Human
cuuccuggggcaucuggcga

SEQ ID NO: 1487758 - RNA, 23 nt, Human
cuuccuggggcaucuggcgaauc

SEQ ID NO: 1487759 - RNA, 13 nt, Human
cuucuccccugca

SEQ ID NO: 1487760 - RNA, 14 nt, Human
cuucuccccugcac

SEQ ID NO: 1487761 - RNA, 16 nt, Human
cuucuccccugcacug

SEQ ID NO: 1487762 - RNA, 17 nt, Human
cuucuccccugcacugu

SEQ ID NO: 1487763 - RNA, 18 nt, Human
cuucuccccugcacugua

SEQ ID NO: 1487764 - RNA, 19 nt, Human
cuucuccccugcacuguaa

SEQ ID NO: 1487765 - RNA, 20 nt, Human
cuucuccccugcacuguaaa

SEQ ID NO: 1487766 - RNA, 21 nt, Human
cuucuccccugcacuguaaaa

SEQ ID NO: 1487767 - RNA, 23 nt, Human
cuucuccccugcacuguaaaaug

SEQ ID NO: 1487768 - RNA, 22 nt, Human
cuucuccccugcacuguaaaau

SEQ ID NO: 1487769 - RNA, 14 nt, Human
cuucucuccagugc

SEQ ID NO: 1487770 - RNA, 21 nt, Human
cuucugggcuucaucuggcaa

SEQ ID NO: 1487771 - RNA, 22 nt, Human
cuucugggcuucaucuggcaac

SEQ ID NO: 1487772 - RNA, 15 nt, Human
cuguguggcagucug

SEQ ID NO: 1487773 - RNA, 12 nt, Human
cuguguggagag

SEQ ID NO: 1487774 - RNA, 15 nt, Human
cuguguggagaggga

SEQ ID NO: 1487775 - RNA, 16 nt, Human
cuguguggagagggaa

SEQ ID NO: 1487776 - RNA, 22 nt, Human
cuguguggagagggaaugugaa

SEQ ID NO: 1487777 - RNA, 23 nt, Human
cuguguggagagggaaugugaaa

SEQ ID NO: 1487778 - RNA, 23 nt, Human
cugugugcucaggagcccuggga

SEQ ID NO: 1487779 - RNA, 21 nt, Human
cugugugcucaggagcccugg

SEQ ID NO: 1487780 - RNA, 20 nt, Human
cugugugcucaggagcccug

SEQ ID NO: 1487781 - RNA, 16 nt, Human
cugugugcucaggagc

SEQ ID NO: 1487782 - RNA, 19 nt, Human
cugugugcucaggagcccu

SEQ ID NO: 1487783 - RNA, 15 nt, Human
cugugggcuggcagu

SEQ ID NO: 1487784 - RNA, 16 nt, Human
cuguguuuggcuuuca

SEQ ID NO: 1487785 - RNA, 17 nt, Human
cuguguuuggcuuucag

SEQ ID NO: 1487786 - RNA, 18 nt, Human
cuguguuuggcuuucagg

SEQ ID NO: 1487787 - RNA, 23 nt, Human
cuguguuuggcuuucagggaggc

SEQ ID NO: 1487788 - RNA, 22 nt, Human
cuguguuuggcuuucagggagg

SEQ ID NO: 1487789 - RNA, 22 nt, Human
cuguucauuccuccagguauuc

SEQ ID NO: 1487790 - RNA, 14 nt, Human
cuguucauuuccuc

SEQ ID NO: 1487791 - RNA, 17 nt, Human
cuguucauuuccucaaa

SEQ ID NO: 1487792 - RNA, 17 nt, Human
cuguucauuccuccagg

SEQ ID NO: 1487793 - RNA, 16 nt, Human
cuguucauuccuccag

SEQ ID NO: 1487794 - RNA, 15 nt, Human
cuguucauuccucca

SEQ ID NO: 1487795 - RNA, 17 nt, Human
cuguucaugaaagauuc

SEQ ID NO: 1487796 - RNA, 18 nt, Human
cuguucaugaaagauuca

SEQ ID NO: 1487797 - RNA, 23 nt, Human
cuguucaugaaagauucaaugcc

SEQ ID NO: 1487798 - RNA, 20 nt, Human
cuguucuacauagaugcuua

SEQ ID NO: 1487799 - RNA, 19 nt, Human
cuguucuacauagaugcuu

SEQ ID NO: 1487800 - RNA, 22 nt, Human
cugucuccuaagcuggagugca

SEQ ID NO: 1487801 - RNA, 21 nt, Human
cugucucccuccucugcccgg

SEQ ID NO: 1487802 - RNA, 16 nt, Human
cugugcaaggccuggu

SEQ ID NO: 1487803 - RNA, 20 nt, Human
cugugcaagguauuacacuc

SEQ ID NO: 1487804 - RNA, 15 nt, Human
cugugccauguguuu

SEQ ID NO: 1487805 - RNA, 13 nt, Human
cugugccuccuca

SEQ ID NO: 1487806 - RNA, 15 nt, Human
cugugccuccucacc

SEQ ID NO: 1487807 - RNA, 16 nt, Human
cugugccuccucaccc

SEQ ID NO: 1487808 - RNA, 16 nt, Human
cugugcuuaugguacc

SEQ ID NO: 1487809 - RNA, 17 nt, Human
cugugcuuuuaaaugca

SEQ ID NO: 1487810 - RNA, 23 nt, Human
cuguggauuuuuuccuucaaagu

SEQ ID NO: 1487811 - RNA, 13 nt, Human
cuguacacugcac

SEQ ID NO: 1487812 - RNA, 15 nt, Human
cuguacacugcacga

SEQ ID NO: 1487813 - RNA, 20 nt, Human
cuguagugucacucaaggcg

SEQ ID NO: 1487814 - RNA, 22 nt, Human
cuguauuuuaaaagaaugauua

SEQ ID NO: 1487815 - RNA, 20 nt, Human
cuguauuuuaaaagaaugau

SEQ ID NO: 1487816 - RNA, 20 nt, Human
cugucuacuugcucagguac

SEQ ID NO: 1487817 - RNA, 14 nt, Human
cugucuaccugguc

SEQ ID NO: 1487818 - RNA, 18 nt, Human
cugucuacuugcucaggu

SEQ ID NO: 1487819 - RNA, 13 nt, Human
cugucuauucuag

SEQ ID NO: 1487820 - RNA, 21 nt, Human
cuguccguucacauguguggu

SEQ ID NO: 1487821 - RNA, 15 nt, Human
cuguaauguuaauau

SEQ ID NO: 1487822 - RNA, 17 nt, Human
cuguaauguuaauauug

SEQ ID NO: 1487823 - RNA, 18 nt, Human
cuguaauguuaauauuga

SEQ ID NO: 1487824 - RNA, 19 nt, Human
cuguaauguuaauauugau

SEQ ID NO: 1487825 - RNA, 14 nt, Human
cuguaauguuaaua

SEQ ID NO: 1487826 - RNA, 15 nt, Human
cugggcuucaucugg

SEQ ID NO: 1487827 - RNA, 19 nt, Human
cugggcuucaucuggcaac

SEQ ID NO: 1487828 - RNA, 12 nt, Human
cugggggguggc

SEQ ID NO: 1487829 - RNA, 13 nt, Human
cugggggguggcc

SEQ ID NO: 1487830 - RNA, 18 nt, Human
cuggguaaugaaacaaag

SEQ ID NO: 1487831 - RNA, 14 nt, Human
cuggagugcagugg

SEQ ID NO: 1487832 - RNA, 22 nt, Human
cuggcaguccuggaagccagcu

SEQ ID NO: 1487833 - RNA, 20 nt, Human
cuggcaguuuauauuuaacu

SEQ ID NO: 1487834 - RNA, 22 nt, Human
cuggcaguuuauauuuaacucu

SEQ ID NO: 1487835 - RNA, 12 nt, Human
cuggccccaccc

SEQ ID NO: 1487836 - RNA, 23 nt, Human
cuggccccacccucguggacacc

SEQ ID NO: 1487837 - RNA, 19 nt, Human
cuggagaugaggccagacc

SEQ ID NO: 1487838 - RNA, 20 nt, Human
cuggagaugaggccagacca

SEQ ID NO: 1487839 - RNA, 18 nt, Human
cuggagaugaggccagac

SEQ ID NO: 1487840 - RNA, 17 nt, Human
cuggagaugaggccaga

SEQ ID NO: 1487841 - RNA, 16 nt, Human
cuggagaugaggccag

SEQ ID NO: 1487842 - RNA, 13 nt, Human
cuggaauuugaaa

SEQ ID NO: 1487843 - RNA, 14 nt, Human
cuggaccagccucu

SEQ ID NO: 1487844 - RNA, 18 nt, Human
cuggaccagccucuccac

SEQ ID NO: 1487845 - RNA, 15 nt, Human
cuggagaucaccagu

SEQ ID NO: 1487846 - RNA, 13 nt, Human
cuggaccucacca

SEQ ID NO: 1487847 - RNA, 16 nt, Human
cugcugcuacaauguc

SEQ ID NO: 1487848 - RNA, 14 nt, Human
cugcugcccucccc

SEQ ID NO: 1487849 - RNA, 15 nt, Human
cugcugcugccugcc

SEQ ID NO: 1487850 - RNA, 14 nt, Human
cugcugcugccugc

SEQ ID NO: 1487851 - RNA, 20 nt, Human
cugcuggggaagacaguggc

SEQ ID NO: 1487852 - RNA, 21 nt, Human
cugcuggggaagacaguggcc

SEQ ID NO: 1487853 - RNA, 22 nt, Human
cugcuggggaagacaguggccc

SEQ ID NO: 1487854 - RNA, 14 nt, Human
cugcuggggaagac

SEQ ID NO: 1487855 - RNA, 15 nt, Human
cugcuggggaagaca

SEQ ID NO: 1487856 - RNA, 17 nt, Human
cugcuggggaagacagu

SEQ ID NO: 1487857 - RNA, 18 nt, Human
cugcuggggaagacagug

SEQ ID NO: 1487858 - RNA, 19 nt, Human
cugcuggggaagacagugg

SEQ ID NO: 1487859 - RNA, 13 nt, Human
cugcugcccuccc

SEQ ID NO: 1487860 - RNA, 19 nt, Human
cucccuucaugcauggaaa

SEQ ID NO: 1487861 - RNA, 15 nt, Human
cugcccuuccugcag

SEQ ID NO: 1487862 - RNA, 16 nt, Human
cugccggcuccuuggu

SEQ ID NO: 1487863 - RNA, 23 nt, Human
cugccgguucuuaaauccauccu

SEQ ID NO: 1487864 - RNA, 13 nt, Human
cugccgucagugc

SEQ ID NO: 1487865 - RNA, 19 nt, Human
cugccgucagugcugugcu

SEQ ID NO: 1487866 - RNA, 20 nt, Human
cugccgucagugcugugcug

SEQ ID NO: 1487867 - RNA, 22 nt, Human
cugccgagaguccaucagccuc

SEQ ID NO: 1487868 - RNA, 23 nt, Human
cugccgagaguccaucagccucc

SEQ ID NO: 1487869 - RNA, 21 nt, Human
cugccucucugcaggucccua

SEQ ID NO: 1487870 - RNA, 20 nt, Human
cugccucucugcaggucccu

SEQ ID NO: 1487871 - RNA, 22 nt, Human
cugccucucugcaggucccuaa

SEQ ID NO: 1487872 - RNA, 18 nt, Human
cuagaguuuagcuggaaa

SEQ ID NO: 1487873 - RNA, 19 nt, Human
cuagaguuuagcuggaaaa

SEQ ID NO: 1487874 - RNA, 24 nt, Human
cuagagugacucacuaauucauua

SEQ ID NO: 1487875 - RNA, 14 nt, Human
cuagagcacugcca

SEQ ID NO: 1487876 - RNA, 15 nt, Human
cuagagcacugccac

SEQ ID NO: 1487877 - RNA, 18 nt, Human
cuagagcacugccaccag

SEQ ID NO: 1487878 - RNA, 18 nt, Human
cuagaggcuuccuucauu

SEQ ID NO: 1487879 - RNA, 19 nt, Human
cuagaggcuuccuucauuu

SEQ ID NO: 1487880 - RNA, 21 nt, Human
cuagaggcuuccuucauuucc

SEQ ID NO: 1487881 - RNA, 23 nt, Human
cuagaggcuuccuucauuuccuc

SEQ ID NO: 1487882 - RNA, 21 nt, Human
cuagaggccugacugccaagc

SEQ ID NO: 1487883 - RNA, 23 nt, Human
cuagaggccugacugccaagcca

SEQ ID NO: 1487884 - RNA, 22 nt, Human
cuacuuacaugcauuacugcau

SEQ ID NO: 1487885 - RNA, 22 nt, Human
cuaccuccaaagcuucccacgg

SEQ ID NO: 1487886 - RNA, 21 nt, Human
cuacugccgucagugcugugc

SEQ ID NO: 1487887 - RNA, 15 nt, Human
cuacugcccaggcac

SEQ ID NO: 1487888 - RNA, 21 nt, Human
cuacugcccaggcacugcaaa

SEQ ID NO: 1487889 - RNA, 14 nt, Human
cuacugauuccgca

SEQ ID NO: 1487890 - RNA, 14 nt, Human
cuaggaaauauuua

SEQ ID NO: 1487891 - RNA, 15 nt, Human
cuaggaaauauuuau

SEQ ID NO: 1487892 - RNA, 19 nt, Human
cuaggaaauauuuauuuua

SEQ ID NO: 1487893 - RNA, 20 nt, Human
cuaggaaauauuuauuuuaa

SEQ ID NO: 1487894 - RNA, 12 nt, Human
cuaggaaaauac

SEQ ID NO: 1487895 - RNA, 13 nt, Human
cuagcuggcucug

SEQ ID NO: 1487896 - RNA, 14 nt, Human
cuagcuggcucugu

SEQ ID NO: 1487897 - RNA, 22 nt, Human
cuagccuuaaucagguccucag

SEQ ID NO: 1487898 - RNA, 17 nt, Human
cuagcgcuaucucccug

SEQ ID NO: 1487899 - RNA, 20 nt, Human
cuagcgcuaucucccugccu

SEQ ID NO: 1487900 - RNA, 23 nt, Human
cuauguaggaaagaccauuuuuc

SEQ ID NO: 1487901 - RNA, 22 nt, Human
cuauguaggaaagaccauuuuu

SEQ ID NO: 1487902 - RNA, 16 nt, Human
cuauuauccccauuuc

SEQ ID NO: 1487903 - RNA, 17 nt, Human
cuauuauccccauuucu

SEQ ID NO: 1487904 - RNA, 20 nt, Human
cuauuauuuucacuguagaa

SEQ ID NO: 1487905 - RNA, 22 nt, Human
cuauuauuuucacuguagaaug

SEQ ID NO: 1487906 - RNA, 23 nt, Human
cuauucagcuucguuuauuuuca

SEQ ID NO: 1487907 - RNA, 14 nt, Human
cuauucuugaugua

SEQ ID NO: 1487908 - RNA, 16 nt, Human
cuauucuugauguaaa

SEQ ID NO: 1487909 - RNA, 17 nt, Human
cuauucuugauguaaaa

SEQ ID NO: 1487910 - RNA, 18 nt, Human
cuauucuugauguaaaau

SEQ ID NO: 1487911 - RNA, 19 nt, Human
cuauucuugauguaaaauc

SEQ ID NO: 1487912 - RNA, 20 nt, Human
cuauucuugauguaaaaucu

SEQ ID NO: 1487913 - RNA, 22 nt, Human
cuauucuugauguaaaaucuug

SEQ ID NO: 1487914 - RNA, 22 nt, Human
cuaugaaguuuuuuuuauacag

SEQ ID NO: 1487915 - RNA, 13 nt, Human
cuaugaaggcugu

SEQ ID NO: 1487916 - RNA, 19 nt, Human
cuaugaacucuguuuucuu

SEQ ID NO: 1487917 - RNA, 17 nt, Human
cuauagcuaaguacaca

SEQ ID NO: 1487918 - RNA, 15 nt, Human
cuauagcuaaguaca

SEQ ID NO: 1487919 - RNA, 12 nt, Human
cuauacugcuug

SEQ ID NO: 1487920 - RNA, 21 nt, Human
cuauaguccagcuuuguucuu

SEQ ID NO: 1487921 - RNA, 19 nt, Human
cuauauaagacaagaacuc

SEQ ID NO: 1487922 - RNA, 20 nt, Human
cuauaguuauuaaguucuuu

SEQ ID NO: 1487923 - RNA, 14 nt, Human
cuauauaccaaagc

SEQ ID NO: 1487924 - RNA, 21 nt, Human
cuauauacucacuuucuagau

SEQ ID NO: 1487925 - RNA, 19 nt, Human
cuaugaaauauuauguuaa

SEQ ID NO: 1487926 - RNA, 19 nt, Human
cuauauaccaaagcacauu

SEQ ID NO: 1487927 - RNA, 19 nt, Human
cuauauagcugaucaguuu

SEQ ID NO: 1487928 - RNA, 16 nt, Human
cuauacccacccagaa

SEQ ID NO: 1487929 - RNA, 15 nt, Human
cuauacccacccaga

SEQ ID NO: 1487930 - RNA, 16 nt, Human
cuauaccaauaaagug

SEQ ID NO: 1487931 - RNA, 15 nt, Human
cuauaccaauaaagu

SEQ ID NO: 1487932 - RNA, 17 nt, Human
cuauacugcauacuuuu

SEQ ID NO: 1487933 - RNA, 19 nt, Human
cuauacugcauacuuuuua

SEQ ID NO: 1487934 - RNA, 21 nt, Human
cuauacugcauacuuuuuaaa

SEQ ID NO: 1487935 - RNA, 23 nt, Human
cuauacugcuuggagcugagcaa

SEQ ID NO: 1487936 - RNA, 13 nt, Human
cuauaauuuaaau

SEQ ID NO: 1487937 - RNA, 12 nt, Human
cuauaauuuaaa

SEQ ID NO: 1487938 - RNA, 23 nt, Human
cucaacuccgugcuuaaccaaag

SEQ ID NO: 1487939 - RNA, 19 nt, Human
cucaaccccuccccuccau

SEQ ID NO: 1487940 - RNA, 21 nt, Human
cucaaccccuccccuccaucc

SEQ ID NO: 1487941 - RNA, 23 nt, Human
cucaaccccuccccuccaucccu

SEQ ID NO: 1487942 - RNA, 16 nt, Human
cuauuucuuaaacacu

SEQ ID NO: 1487943 - RNA, 18 nt, Human
cuauuucuuaaacacuug

SEQ ID NO: 1487944 - RNA, 17 nt, Human
cucaaggcggugcuuga

SEQ ID NO: 1487945 - RNA, 23 nt, Human
cucaaggcggugcuugauagaaa

SEQ ID NO: 1487946 - RNA, 15 nt, Human
cucacaccugaacug

SEQ ID NO: 1487947 - RNA, 23 nt, Human
cucacacucaugcauuguccucu

SEQ ID NO: 1487948 - RNA, 22 nt, Human
cucacacucaugcauuguccuc

SEQ ID NO: 1487949 - RNA, 19 nt, Human
cuauugcauuuauauguac

SEQ ID NO: 1487950 - RNA, 17 nt, Human
cuauugccucugagagc

SEQ ID NO: 1487951 - RNA, 13 nt, Human
cuauugccucuga

SEQ ID NO: 1487952 - RNA, 11 nt, Human
cuauugccucu

SEQ ID NO: 1487953 - RNA, 17 nt, Human
cuauugcauuuauaugu

SEQ ID NO: 1487954 - RNA, 14 nt, Human
cuauugcauuuaua

SEQ ID NO: 1487955 - RNA, 14 nt, Human
cuauugccucugag

SEQ ID NO: 1487956 - RNA, 13 nt, Human
cuauuuaacugac

SEQ ID NO: 1487957 - RNA, 14 nt, Human
cuauuuaacugacu

SEQ ID NO: 1487958 - RNA, 15 nt, Human
cuauuuaacugacua

SEQ ID NO: 1487959 - RNA, 17 nt, Human
cucccucaaccucaucc

SEQ ID NO: 1487960 - RNA, 13 nt, Human
cucccucaaccuc

SEQ ID NO: 1487961 - RNA, 22 nt, Human
cuccccuggaacugucucucau

SEQ ID NO: 1487962 - RNA, 19 nt, Human
cuccccugcacuguaaaau

SEQ ID NO: 1487963 - RNA, 12 nt, Human
cucccuggauga

SEQ ID NO: 1487964 - RNA, 13 nt, Human
cucccuggauuuu

SEQ ID NO: 1487965 - RNA, 24 nt, Human
cucccuggauuuuuaccagucuca

SEQ ID NO: 1487966 - RNA, 19 nt, Human
cucccuggauuuuuaccag

SEQ ID NO: 1487967 - RNA, 12 nt, Human
cuccccugcacu

SEQ ID NO: 1487968 - RNA, 13 nt, Human
cuccccugcacug

SEQ ID NO: 1487969 - RNA, 14 nt, Human
cuccccugcacugu

SEQ ID NO: 1487970 - RNA, 15 nt, Human
cuccccugcacugua

SEQ ID NO: 1487971 - RNA, 16 nt, Human
cuccccugcacuguaa

SEQ ID NO: 1487972 - RNA, 17 nt, Human
cuccccugcacuguaaa

SEQ ID NO: 1487973 - RNA, 18 nt, Human
cuccccugcacuguaaaa

SEQ ID NO: 1487974 - RNA, 21 nt, Human
cuccccugcacuguaaaaugu

SEQ ID NO: 1487975 - RNA, 20 nt, Human
cuccccacgucagcugggac

SEQ ID NO: 1487976 - RNA, 19 nt, Human
cuccauggcccugccaugc

SEQ ID NO: 1487977 - RNA, 16 nt, Human
cuccauggcccugcca

SEQ ID NO: 1487978 - RNA, 15 nt, Human
cuccauggcccugcc

SEQ ID NO: 1487979 - RNA, 13 nt, Human
cucccaauucauc

SEQ ID NO: 1487980 - RNA, 17 nt, Human
cuccaccgcagaaggaa

SEQ ID NO: 1487981 - RNA, 16 nt, Human
cuccaccgcagaagga

SEQ ID NO: 1487982 - RNA, 22 nt, Human
cuccaccaucgucuucuuggcc

SEQ ID NO: 1487983 - RNA, 16 nt, Human
cuccaccaucgucuuc

SEQ ID NO: 1487984 - RNA, 18 nt, Human
cuccaccgcagaaggaag

SEQ ID NO: 1487985 - RNA, 16 nt, Human
cuccacucaugugacu

SEQ ID NO: 1487986 - RNA, 22 nt, Human
cuccacucaugugacucuuucc

SEQ ID NO: 1487987 - RNA, 21 nt, Human
cuccagagaguaucugaggca

SEQ ID NO: 1487988 - RNA, 23 nt, Human
cuccagccaucaagagacugagu

SEQ ID NO: 1487989 - RNA, 13 nt, Human
cucaguugcagcc

SEQ ID NO: 1487990 - RNA, 15 nt, Human
cucaguugauuuucu

SEQ ID NO: 1487991 - RNA, 16 nt, Human
cucaguugauuuucug

SEQ ID NO: 1487992 - RNA, 18 nt, Human
cucaguugauuuucugga

SEQ ID NO: 1487993 - RNA, 20 nt, Human
cucaguugauuuucuggauu

SEQ ID NO: 1487994 - RNA, 13 nt, Human
cucaguuuucaua

SEQ ID NO: 1487995 - RNA, 14 nt, Human
cucaguuuucauaa

SEQ ID NO: 1487996 - RNA, 22 nt, Human
cuccaaaccacuuuuugcagcu

SEQ ID NO: 1487997 - RNA, 13 nt, Human
cuccaaaccacuu

SEQ ID NO: 1487998 - RNA, 22 nt, Human
cuccaaaauguuggucauuuua

SEQ ID NO: 1487999 - RNA, 18 nt, Human
cucauuuuaggcaaauau

SEQ ID NO: 1488000 - RNA, 22 nt, Human
cucauuuuuccguaaaaaugau

SEQ ID NO: 1488001 - RNA, 13 nt, Human
cucauuuuuuaaa

SEQ ID NO: 1488002 - RNA, 19 nt, Human
cuccaaggaggggcuguaa

SEQ ID NO: 1488003 - RNA, 20 nt, Human
cuccaaggaggggcuguaaa

SEQ ID NO: 1488004 - RNA, 21 nt, Human
cuccaaggaggggcuguaaaa

SEQ ID NO: 1488005 - RNA, 22 nt, Human
cuccaaggaggggcuguaaaau

SEQ ID NO: 1488006 - RNA, 13 nt, Human
cucauuucaggau

SEQ ID NO: 1488007 - RNA, 12 nt, Human
cucauuucagga

SEQ ID NO: 1488008 - RNA, 12 nt, Human
cucauuuccaag

SEQ ID NO: 1488009 - RNA, 13 nt, Human
cucauuuccaagc

SEQ ID NO: 1488010 - RNA, 14 nt, Human
cucauuuccaagca

SEQ ID NO: 1488011 - RNA, 17 nt, Human
cucauuuccaagcaagu

SEQ ID NO: 1488012 - RNA, 21 nt, Human
cucauuuccaagcaaguauua

SEQ ID NO: 1488013 - RNA, 23 nt, Human
cucaggagcccugggaggcucug

SEQ ID NO: 1488014 - RNA, 22 nt, Human
cucaggagcccugggaggcucu

SEQ ID NO: 1488015 - RNA, 21 nt, Human
cucaggagcccugggaggcuc

SEQ ID NO: 1488016 - RNA, 20 nt, Human
cucaggagcccugggaggcu

SEQ ID NO: 1488017 - RNA, 17 nt, Human
cucaggagcccugggag

SEQ ID NO: 1488018 - RNA, 16 nt, Human
cucaggagcccuggga

SEQ ID NO: 1488019 - RNA, 15 nt, Human
cucaggagcccuggg

SEQ ID NO: 1488020 - RNA, 14 nt, Human
cucaggagcccugg

SEQ ID NO: 1488021 - RNA, 13 nt, Human
cucaggagcccug

SEQ ID NO: 1488022 - RNA, 12 nt, Human
cucaggagcccu

SEQ ID NO: 1488023 - RNA, 20 nt, Human
cucagcucucaguugcagcc

SEQ ID NO: 1488024 - RNA, 23 nt, Human
cucagcucugacauucugauucg

SEQ ID NO: 1488025 - RNA, 17 nt, Human
cucaggaaccgaggcag

SEQ ID NO: 1488026 - RNA, 18 nt, Human
cucaggaaccgaggcagg

SEQ ID NO: 1488027 - RNA, 19 nt, Human
cucaggaaccgaggcaggg

SEQ ID NO: 1488028 - RNA, 14 nt, Human
cucagcuuucuaag

SEQ ID NO: 1488029 - RNA, 24 nt, Human
cucaggagcccugggaggcucugg

SEQ ID NO: 1488030 - RNA, 17 nt, Human
cucagccccgcguggaa

SEQ ID NO: 1488031 - RNA, 20 nt, Human
cucagcucacugcaaccucc

SEQ ID NO: 1488032 - RNA, 14 nt, Human
cucagcucacugca

SEQ ID NO: 1488033 - RNA, 20 nt, Human
cucagcucacuacaaccucc

SEQ ID NO: 1488034 - RNA, 15 nt, Human
cucagcucacugcaa

SEQ ID NO: 1488035 - RNA, 18 nt, Human
cucacugcuugaacuagg

SEQ ID NO: 1488036 - RNA, 16 nt, Human
cucacugcuugaacua

SEQ ID NO: 1488037 - RNA, 16 nt, Human
cucagaggguguccug

SEQ ID NO: 1488038 - RNA, 22 nt, Human
cuaggaaauauuuauuuuaaua

SEQ ID NO: 1488039 - RNA, 20 nt, Human
cuaccaaggucuucuuaaua

SEQ ID NO: 1488040 - RNA, 15 nt, Human
cuaccaaagcaccuu

SEQ ID NO: 1488041 - RNA, 12 nt, Human
cuaccauuucag

SEQ ID NO: 1488042 - RNA, 13 nt, Human
cuaccauuucaga

SEQ ID NO: 1488043 - RNA, 14 nt, Human
cuaccaaagcaccu

SEQ ID NO: 1488044 - RNA, 17 nt, Human
cuacccccagcugugcu

SEQ ID NO: 1488045 - RNA, 13 nt, Human
cuacccuggacuu

SEQ ID NO: 1488046 - RNA, 17 nt, Human
cuacccuggacuugccu

SEQ ID NO: 1488047 - RNA, 16 nt, Human
cuacccuaaccaaguu

SEQ ID NO: 1488048 - RNA, 19 nt, Human
cuacccccagcugugcuua

SEQ ID NO: 1488049 - RNA, 18 nt, Human
cuacccccagcugugcuu

SEQ ID NO: 1488050 - RNA, 12 nt, Human
cuacaggccuca

SEQ ID NO: 1488051 - RNA, 16 nt, Human
cuacaggccucacaca

SEQ ID NO: 1488052 - RNA, 20 nt, Human
cuacaggccucacacacaau

SEQ ID NO: 1488053 - RNA, 21 nt, Human
cuacaggcgugagccaccaug

SEQ ID NO: 1488054 - RNA, 17 nt, Human
cuacuggucuuguggaa

SEQ ID NO: 1488055 - RNA, 22 nt, Human
cuaauagggcaauuaauuccuu

SEQ ID NO: 1488056 - RNA, 23 nt, Human
cuaauaguuuuauuaauaaacau

SEQ ID NO: 1488057 - RNA, 19 nt, Human
cuaauacagcaacaauuua

SEQ ID NO: 1488058 - RNA, 23 nt, Human
cuaauacagcaacaauuuaugaa

SEQ ID NO: 1488059 - RNA, 21 nt, Human
cuaagcuucacuguaaaauaa

SEQ ID NO: 1488060 - RNA, 16 nt, Human
cuacacccagcaauag

SEQ ID NO: 1488061 - RNA, 14 nt, Human
cuacacccagcaau

SEQ ID NO: 1488062 - RNA, 13 nt, Human
cuacacccagcaa

SEQ ID NO: 1488063 - RNA, 12 nt, Human
cuacacccagca

SEQ ID NO: 1488064 - RNA, 11 nt, Human
cuacacccagc

SEQ ID NO: 1488065 - RNA, 23 nt, Human
cuacacgagauacagaauuuuau

SEQ ID NO: 1488066 - RNA, 14 nt, Human
cuacacuaagagag

SEQ ID NO: 1488067 - RNA, 17 nt, Human
cuaauauggcaaccauu

SEQ ID NO: 1488068 - RNA, 14 nt, Human
cuaaucaugaaacu

SEQ ID NO: 1488069 - RNA, 18 nt, Human
cuaaugccuuacucuucu

SEQ ID NO: 1488070 - RNA, 14 nt, Human
cuaauggcaugaga

SEQ ID NO: 1488071 - RNA, 16 nt, Human
cuaauggcaugagaaa

SEQ ID NO: 1488072 - RNA, 18 nt, Human
cuaauggcaugagaaaua

SEQ ID NO: 1488073 - RNA, 18 nt, Human
cuaauuauauaauauuuu

SEQ ID NO: 1488074 - RNA, 16 nt, Human
cuaauuauauaauauu

SEQ ID NO: 1488075 - RNA, 15 nt, Human
cuaauucaauucaaa

SEQ ID NO: 1488076 - RNA, 13 nt, Human
cguuuucaaaauu

SEQ ID NO: 1488077 - RNA, 19 nt, Human
cuaaauucuuucauuuuag

SEQ ID NO: 1488078 - RNA, 20 nt, Human
cuaaaucuuuuauaggauuu

SEQ ID NO: 1488079 - RNA, 16 nt, Human
cuaacaaccaaagacu

SEQ ID NO: 1488080 - RNA, 12 nt, Human
cuaaccaaguuc

SEQ ID NO: 1488081 - RNA, 10 nt, Human
cuaaccaagu

SEQ ID NO: 1488082 - RNA, 14 nt, Human
cuaagagagaauga

SEQ ID NO: 1488083 - RNA, 15 nt, Human
cuaagagagaaugag

SEQ ID NO: 1488084 - RNA, 19 nt, Human
cuaacccagguauccaaaa

SEQ ID NO: 1488085 - RNA, 14 nt, Human
cuaaaauauuuauu

SEQ ID NO: 1488086 - RNA, 15 nt, Human
cuaaaauauuuauuu

SEQ ID NO: 1488087 - RNA, 23 nt, Human
cuaaaauauuuauuuuuuuuaag

SEQ ID NO: 1488088 - RNA, 17 nt, Human
cuaaauauauuuuaaga

SEQ ID NO: 1488089 - RNA, 20 nt, Human
cuaaacugagacaaugccuu

SEQ ID NO: 1488090 - RNA, 19 nt, Human
cuaaauaccucaaucaguc

SEQ ID NO: 1488091 - RNA, 16 nt, Human
cuaaauaaagauauug

SEQ ID NO: 1488092 - RNA, 18 nt, Human
cguuuggugcuucucaga

SEQ ID NO: 1488093 - RNA, 11 nt, Human
cuaaaaauaaa

SEQ ID NO: 1488094 - RNA, 14 nt, Human
cuaaaauaaagaaa

SEQ ID NO: 1488095 - RNA, 16 nt, Human
cuaaaauaaagaaaua

SEQ ID NO: 1488096 - RNA, 22 nt, Human
cuaaaauaaagaaauagaacaa

SEQ ID NO: 1488097 - RNA, 20 nt, Human
cgggaauuuucaucuaggau

SEQ ID NO: 1488098 - RNA, 18 nt, Human
cgggaauuuucaucuagg

SEQ ID NO: 1488099 - RNA, 18 nt, Human
cgggacaccuaggcuagg

SEQ ID NO: 1488100 - RNA, 19 nt, Human
cgggacaccuaggcuaggg

SEQ ID NO: 1488101 - RNA, 16 nt, Human
cggcuugccacacccc

SEQ ID NO: 1488102 - RNA, 15 nt, Human
cgggaaaaagcccac

SEQ ID NO: 1488103 - RNA, 18 nt, Human
cggagugaguuuuuuagu

SEQ ID NO: 1488104 - RNA, 22 nt, Human
cggccuccguccaggagccugg

SEQ ID NO: 1488105 - RNA, 21 nt, Human
cggccuccguccaggagccug

SEQ ID NO: 1488106 - RNA, 15 nt, Human
cgcuaaaagaaacuu

SEQ ID NO: 1488107 - RNA, 13 nt, Human
cgcuaaaagaaac

SEQ ID NO: 1488108 - RNA, 11 nt, Human
cgcggcuggga

SEQ ID NO: 1488109 - RNA, 12 nt, Human
cgcggcugggag

SEQ ID NO: 1488110 - RNA, 16 nt, Human
cgcggcugggaggagg

SEQ ID NO: 1488111 - RNA, 14 nt, Human
cgcuuuccugaauc

SEQ ID NO: 1488112 - RNA, 20 nt, Human
cgcuuaucaacuaaugauuu

SEQ ID NO: 1488113 - RNA, 16 nt, Human
cgcacggcagccacag

SEQ ID NO: 1488114 - RNA, 18 nt, Human
ccuguggaucaaauccag

SEQ ID NO: 1488115 - RNA, 15 nt, Human
ccugugccugacccu

SEQ ID NO: 1488116 - RNA, 21 nt, Human
ccuucaugcauggaaauuccc

SEQ ID NO: 1488117 - RNA, 12 nt, Human
ccuucaugcaug

SEQ ID NO: 1488118 - RNA, 15 nt, Human
ccuucaugcauggaa

SEQ ID NO: 1488119 - RNA, 12 nt, Human
ccuucauuuccu

SEQ ID NO: 1488120 - RNA, 13 nt, Human
ccuucauuuccuc

SEQ ID NO: 1488121 - RNA, 14 nt, Human
ccuucauuuccucc

SEQ ID NO: 1488122 - RNA, 15 nt, Human
ccuucauuuccuccg

SEQ ID NO: 1488123 - RNA, 19 nt, Human
ccuucuccauggcccugcc

SEQ ID NO: 1488124 - RNA, 22 nt, Human
ccuucuccauggcccugccaug

SEQ ID NO: 1488125 - RNA, 13 nt, Human
ccuucuccccugc

SEQ ID NO: 1488126 - RNA, 15 nt, Human
ccuucuccccugcac

SEQ ID NO: 1488127 - RNA, 16 nt, Human
ccuucuccccugcacu

SEQ ID NO: 1488128 - RNA, 17 nt, Human
ccuucuccccugcacug

SEQ ID NO: 1488129 - RNA, 22 nt, Human
ccuucuccccugcacuguaaaa

SEQ ID NO: 1488130 - RNA, 24 nt, Human
ccuucuccccugcacuguaaaaug

SEQ ID NO: 1488131 - RNA, 23 nt, Human
ccuucuccccugcacuguaaaau

SEQ ID NO: 1488132 - RNA, 22 nt, Human
ccuuccuguuuuucacauuuuc

SEQ ID NO: 1488133 - RNA, 19 nt, Human
ccuuccuggggcaucuggc

SEQ ID NO: 1488134 - RNA, 17 nt, Human
ccuuccuguuuuucaca

SEQ ID NO: 1488135 - RNA, 19 nt, Human
ccuuccuguuuuucacauu

SEQ ID NO: 1488136 - RNA, 21 nt, Human
ccuugggcuccgugugggaga

SEQ ID NO: 1488137 - RNA, 13 nt, Human
ccuugguuccuaa

SEQ ID NO: 1488138 - RNA, 22 nt, Human
ccuugguucuugaggggaccag

SEQ ID NO: 1488139 - RNA, 23 nt, Human
cgaaggaaaagggcuuucucaau

SEQ ID NO: 1488140 - RNA, 12 nt, Human
cgaaugacacug

SEQ ID NO: 1488141 - RNA, 16 nt, Human
cgaaugacacuguuca

SEQ ID NO: 1488142 - RNA, 13 nt, Human
cgaaugacacugu

SEQ ID NO: 1488143 - RNA, 15 nt, Human
cgaagcguuguccuc

SEQ ID NO: 1488144 - RNA, 16 nt, Human
cgaagcguuguccuca

SEQ ID NO: 1488145 - RNA, 17 nt, Human
cgaagcguuguccucag

SEQ ID NO: 1488146 - RNA, 21 nt, Human
cgaagcguuguccucagcccc

SEQ ID NO: 1488147 - RNA, 20 nt, Human
ccuugugaaucaagggucag

SEQ ID NO: 1488148 - RNA, 13 nt, Human
ccuugugcugggg

SEQ ID NO: 1488149 - RNA, 17 nt, Human
ccugcccugccaccugu

SEQ ID NO: 1488150 - RNA, 15 nt, Human
ccugcccugccaccu

SEQ ID NO: 1488151 - RNA, 14 nt, Human
ccugcccugccacc

SEQ ID NO: 1488152 - RNA, 12 nt, Human
ccugcccugcca

SEQ ID NO: 1488153 - RNA, 11 nt, Human
ccugcccugcc

SEQ ID NO: 1488154 - RNA, 17 nt, Human
ccugcccugcccugcca

SEQ ID NO: 1488155 - RNA, 16 nt, Human
ccugcccugcccugcc

SEQ ID NO: 1488156 - RNA, 15 nt, Human
ccugcccugcccugc

SEQ ID NO: 1488157 - RNA, 18 nt, Human
ccugcccugccaccuguc

SEQ ID NO: 1488158 - RNA, 21 nt, Human
ccugcccugccaccugucugu

SEQ ID NO: 1488159 - RNA, 14 nt, Human
ccugccgagagucc

SEQ ID NO: 1488160 - RNA, 22 nt, Human
ccugccgagaguccaucagccu

SEQ ID NO: 1488161 - RNA, 23 nt, Human
ccugccgagaguccaucagccuc

SEQ ID NO: 1488162 - RNA, 17 nt, Human
ccugccaccugucuguc

SEQ ID NO: 1488163 - RNA, 16 nt, Human
ccugccaccugucugu

SEQ ID NO: 1488164 - RNA, 15 nt, Human
ccugccaccugucug

SEQ ID NO: 1488165 - RNA, 14 nt, Human
ccugccaccugucu

SEQ ID NO: 1488166 - RNA, 13 nt, Human
ccugccaccuguc

SEQ ID NO: 1488167 - RNA, 12 nt, Human
ccugccaccugu

SEQ ID NO: 1488168 - RNA, 17 nt, Human
ccugccaccuccugccu

SEQ ID NO: 1488169 - RNA, 22 nt, Human
ccugccaggaggacccagggcu

SEQ ID NO: 1488170 - RNA, 15 nt, Human
ccugccaggaggacc

SEQ ID NO: 1488171 - RNA, 19 nt, Human
ccugccaggaggacccagg

SEQ ID NO: 1488172 - RNA, 23 nt, Human
ccugccaggaggacccagggcuc

SEQ ID NO: 1488173 - RNA, 23 nt, Human
ccucuuccuucccugcugugaaa

SEQ ID NO: 1488174 - RNA, 17 nt, Human
ccucuucuauuuuguaa

SEQ ID NO: 1488175 - RNA, 18 nt, Human
ccucuucuauuuuguaaa

SEQ ID NO: 1488176 - RNA, 22 nt, Human
ccugaaaagguuuaugaaaaag

SEQ ID NO: 1488177 - RNA, 20 nt, Human
ccuaucuuugccacccucau

SEQ ID NO: 1488178 - RNA, 19 nt, Human
ccuaucuuugccacccuca

SEQ ID NO: 1488179 - RNA, 15 nt, Human
ccuaucuuugccacc

SEQ ID NO: 1488180 - RNA, 13 nt, Human
ccuaucuuugcca

SEQ ID NO: 1488181 - RNA, 12 nt, Human
ccuaucuuugcc

SEQ ID NO: 1488182 - RNA, 12 nt, Human
ccucuuccaguc

SEQ ID NO: 1488183 - RNA, 14 nt, Human
ccucuuccagucuu

SEQ ID NO: 1488184 - RNA, 17 nt, Human
ccuaugauauuuucugu

SEQ ID NO: 1488185 - RNA, 20 nt, Human
ccugaagcuaucguaaaauu

SEQ ID NO: 1488186 - RNA, 19 nt, Human
ccugccaccuccugccuca

SEQ ID NO: 1488187 - RNA, 16 nt, Human
ccugccaccuccugcc

SEQ ID NO: 1488188 - RNA, 14 nt, Human
ccugccaccuccug

SEQ ID NO: 1488189 - RNA, 18 nt, Human
ccugaggccuagacucug

SEQ ID NO: 1488190 - RNA, 16 nt, Human
ccugcacuguaaaaug

SEQ ID NO: 1488191 - RNA, 15 nt, Human
ccugcacuguaaaau

SEQ ID NO: 1488192 - RNA, 15 nt, Human
ccugcaccggggccu

SEQ ID NO: 1488193 - RNA, 19 nt, Human
ccugcaccaugcugcuggg

SEQ ID NO: 1488194 - RNA, 17 nt, Human
ccugcaccggggccugg

SEQ ID NO: 1488195 - RNA, 11 nt, Human
ccugcacugua

SEQ ID NO: 1488196 - RNA, 12 nt, Human
ccugcacuguaa

SEQ ID NO: 1488197 - RNA, 13 nt, Human
ccugcacuguaaa

SEQ ID NO: 1488198 - RNA, 14 nt, Human
ccugcacuguaaaa

SEQ ID NO: 1488199 - RNA, 20 nt, Human
ccugcacaauaaaaauguuu

SEQ ID NO: 1488200 - RNA, 19 nt, Human
ccugcacaauaaaaauguu

SEQ ID NO: 1488201 - RNA, 17 nt, Human
ccugagcugaccagccg

SEQ ID NO: 1488202 - RNA, 19 nt, Human
ccugaggccuagacucugu

SEQ ID NO: 1488203 - RNA, 16 nt, Human
ccuguaugucuccagu

SEQ ID NO: 1488204 - RNA, 20 nt, Human
ccuguagccccagugacagc

SEQ ID NO: 1488205 - RNA, 22 nt, Human
ccuguagccccagugacagcua

SEQ ID NO: 1488206 - RNA, 22 nt, Human
ccuggucugguugggcagccag

SEQ ID NO: 1488207 - RNA, 14 nt, Human
ccuguaccccagca

SEQ ID NO: 1488208 - RNA, 17 nt, Human
ccuguaccccagcacuu

SEQ ID NO: 1488209 - RNA, 18 nt, Human
ccuguggauguaaaguga

SEQ ID NO: 1488210 - RNA, 21 nt, Human
ccuggcuccguccaggagccu

SEQ ID NO: 1488211 - RNA, 22 nt, Human
ccugggagaaaucuggcuucug

SEQ ID NO: 1488212 - RNA, 18 nt, Human
ccuggguagcgggggagg

SEQ ID NO: 1488213 - RNA, 19 nt, Human
ccuggacuuggccccugcc

SEQ ID NO: 1488214 - RNA, 11 nt, Human
ccuaaccaagu

SEQ ID NO: 1488215 - RNA, 12 nt, Human
ccuaaccugccg

SEQ ID NO: 1488216 - RNA, 13 nt, Human
ccuaaccugccga

SEQ ID NO: 1488217 - RNA, 23 nt, Human
ccguggcuguggcauccagaguc

SEQ ID NO: 1488218 - RNA, 14 nt, Human
ccguucacaugugu

SEQ ID NO: 1488219 - RNA, 14 nt, Human
ccguucacauuuuu

SEQ ID NO: 1488220 - RNA, 16 nt, Human
ccuacuagucaccaga

SEQ ID NO: 1488221 - RNA, 16 nt, Human
ccuacuccaaaauguu

SEQ ID NO: 1488222 - RNA, 14 nt, Human
ccuacccuggacuu

SEQ ID NO: 1488223 - RNA, 16 nt, Human
ccuaggcuaggguggg

SEQ ID NO: 1488224 - RNA, 16 nt, Human
ccggggggucucuucu

SEQ ID NO: 1488225 - RNA, 21 nt, Human
ccgggggcagucugagagagg

SEQ ID NO: 1488226 - RNA, 20 nt, Human
ccggggccugggcaggaggg

SEQ ID NO: 1488227 - RNA, 20 nt, Human
ccgccucgaccucucucaaa

SEQ ID NO: 1488228 - RNA, 17 nt, Human
ccgccugggucuccuaa

SEQ ID NO: 1488229 - RNA, 20 nt, Human
ccgacugaaaauauuguuuu

SEQ ID NO: 1488230 - RNA, 21 nt, Human
ccgagaguccaucagccucca

SEQ ID NO: 1488231 - RNA, 20 nt, Human
ccgagaguccaucagccucc

SEQ ID NO: 1488232 - RNA, 18 nt, Human
ccgccucagccucccaaa

SEQ ID NO: 1488233 - RNA, 18 nt, Human
ccgcagaaggaaggcagg

SEQ ID NO: 1488234 - RNA, 15 nt, Human
ccgcagaaggaaggc

SEQ ID NO: 1488235 - RNA, 13 nt, Human
ccgcagaaggaag

SEQ ID NO: 1488236 - RNA, 14 nt, Human
cccugccucucugc

SEQ ID NO: 1488237 - RNA, 13 nt, Human
cccugccucucug

SEQ ID NO: 1488238 - RNA, 22 nt, Human
cccugccucucaucaacugaau

SEQ ID NO: 1488239 - RNA, 17 nt, Human
cccugccuccugccggc

SEQ ID NO: 1488240 - RNA, 16 nt, Human
cccugccucucugcag

SEQ ID NO: 1488241 - RNA, 15 nt, Human
cccugccucucugca

SEQ ID NO: 1488242 - RNA, 16 nt, Human
cccugcucaguaaagc

SEQ ID NO: 1488243 - RNA, 17 nt, Human
cccugcucccacagaac

SEQ ID NO: 1488244 - RNA, 13 nt, Human
cccugcugcugcc

SEQ ID NO: 1488245 - RNA, 13 nt, Human
cccugcugcccuc

SEQ ID NO: 1488246 - RNA, 15 nt, Human
cccuugaugaagaag

SEQ ID NO: 1488247 - RNA, 17 nt, Human
cccuuaugacugccaag

SEQ ID NO: 1488248 - RNA, 19 nt, Human
cccuuauugcuguccugga

SEQ ID NO: 1488249 - RNA, 12 nt, Human
cccuuauuuuca

SEQ ID NO: 1488250 - RNA, 21 nt, Human
cccuggugcacuggccccacc

SEQ ID NO: 1488251 - RNA, 18 nt, Human
cccugcugcugccugccu

SEQ ID NO: 1488252 - RNA, 17 nt, Human
cccugcugcugccugcc

SEQ ID NO: 1488253 - RNA, 16 nt, Human
cccugcugcugccugc

SEQ ID NO: 1488254 - RNA, 23 nt, Human
cccucguggacaccugcccugcc

SEQ ID NO: 1488255 - RNA, 22 nt, Human
cccucguggacaccugcccugc

SEQ ID NO: 1488256 - RNA, 19 nt, Human
cccucguggacaccugccc

SEQ ID NO: 1488257 - RNA, 18 nt, Human
cccucguggacaccugcc

SEQ ID NO: 1488258 - RNA, 17 nt, Human
cccucguggacaccugc

SEQ ID NO: 1488259 - RNA, 16 nt, Human
cccucguggacaccug

SEQ ID NO: 1488260 - RNA, 16 nt, Human
cccucccuacccuaac

SEQ ID NO: 1488261 - RNA, 15 nt, Human
cccucccuacccuaa

SEQ ID NO: 1488262 - RNA, 13 nt, Human
cccucuuccuucc

SEQ ID NO: 1488263 - RNA, 20 nt, Human
cccucucccaaaaaacuacu

SEQ ID NO: 1488264 - RNA, 23 nt, Human
ccccuggugcacuggccccaccc

SEQ ID NO: 1488265 - RNA, 18 nt, Human
ccccuggucccucugcag

SEQ ID NO: 1488266 - RNA, 17 nt, Human
ccccuggucccucugca

SEQ ID NO: 1488267 - RNA, 14 nt, Human
ccccugugccuugu

SEQ ID NO: 1488268 - RNA, 19 nt, Human
ccccugccucucugcaggu

SEQ ID NO: 1488269 - RNA, 17 nt, Human
ccccugccucucugcag

SEQ ID NO: 1488270 - RNA, 16 nt, Human
ccccugccucucugca

SEQ ID NO: 1488271 - RNA, 15 nt, Human
ccccugccucucugc

SEQ ID NO: 1488272 - RNA, 14 nt, Human
ccccugccucucug

SEQ ID NO: 1488273 - RNA, 15 nt, Human
ccccuagccugccuc

SEQ ID NO: 1488274 - RNA, 20 nt, Human
ccccuagcgcuaucucccug

SEQ ID NO: 1488275 - RNA, 13 nt, Human
cccccucccugga

SEQ ID NO: 1488276 - RNA, 16 nt, Human
cccccucccuggauga

SEQ ID NO: 1488277 - RNA, 14 nt, Human
cccccucccuggau

SEQ ID NO: 1488278 - RNA, 16 nt, Human
cccccagagccacagu

SEQ ID NO: 1488279 - RNA, 17 nt, Human
ccccuccacucuuucuu

SEQ ID NO: 1488280 - RNA, 12 nt, Human
ccccuccacucu

SEQ ID NO: 1488281 - RNA, 14 nt, Human
ccccucccuggaug

SEQ ID NO: 1488282 - RNA, 17 nt, Human
cccccacugccuuugac

SEQ ID NO: 1488283 - RNA, 15 nt, Human
cccccaccuggcuca

SEQ ID NO: 1488284 - RNA, 20 nt, Human
cccccaccuggcucaccuug

SEQ ID NO: 1488285 - RNA, 22 nt, Human
cccccagaaaagaaagcuacag

SEQ ID NO: 1488286 - RNA, 15 nt, Human
cccccagagccacag

SEQ ID NO: 1488287 - RNA, 17 nt, Human
ccccaucauugguaccc

SEQ ID NO: 1488288 - RNA, 18 nt, Human
ccccaguaucucuucagu

SEQ ID NO: 1488289 - RNA, 13 nt, Human
ccccagacacugg

SEQ ID NO: 1488290 - RNA, 15 nt, Human
ccccagugacagcua

SEQ ID NO: 1488291 - RNA, 20 nt, Human
cccagaaugagacauccagc

SEQ ID NO: 1488292 - RNA, 13 nt, Human
cccaugagcuccu

SEQ ID NO: 1488293 - RNA, 14 nt, Human
cccaugagcuccuu

SEQ ID NO: 1488294 - RNA, 15 nt, Human
cccaugagcuccuua

SEQ ID NO: 1488295 - RNA, 22 nt, Human
cccaugagcuccuuaaggcucu

SEQ ID NO: 1488296 - RNA, 23 nt, Human
ccccacccucguggacaccugcc

SEQ ID NO: 1488297 - RNA, 22 nt, Human
ccccacccucguggacaccugc

SEQ ID NO: 1488298 - RNA, 21 nt, Human
ccccacccucguggacaccug

SEQ ID NO: 1488299 - RNA, 21 nt, Human
cccauucauuccauucuggaa

SEQ ID NO: 1488300 - RNA, 22 nt, Human
cccauucauuccauucuggaag

SEQ ID NO: 1488301 - RNA, 18 nt, Human
cccauucauuccauucug

SEQ ID NO: 1488302 - RNA, 14 nt, Human
ccccaccuggcuca

SEQ ID NO: 1488303 - RNA, 16 nt, Human
ccccacgccacagccc

SEQ ID NO: 1488304 - RNA, 14 nt, Human
ccccacgccacagc

SEQ ID NO: 1488305 - RNA, 13 nt, Human
ccccacgccacag

SEQ ID NO: 1488306 - RNA, 14 nt, Human
ccccacuguaucua

SEQ ID NO: 1488307 - RNA, 15 nt, Human
ccccacgccacagcc

SEQ ID NO: 1488308 - RNA, 18 nt, Human
cccagaaugagacaucca

SEQ ID NO: 1488309 - RNA, 12 nt, Human
cccagaaugaga

SEQ ID NO: 1488310 - RNA, 15 nt, Human
cccacggcuccucga

SEQ ID NO: 1488311 - RNA, 15 nt, Human
cccacggccuuucua

SEQ ID NO: 1488312 - RNA, 15 nt, Human
cccacgucagcuggg

SEQ ID NO: 1488313 - RNA, 21 nt, Human
cccacacucagauccuccuca

SEQ ID NO: 1488314 - RNA, 22 nt, Human
cccacacucagauccuccucau

SEQ ID NO: 1488315 - RNA, 18 nt, Human
cccaaccauuuccucaga

SEQ ID NO: 1488316 - RNA, 17 nt, Human
cccaaccauuuccucag

SEQ ID NO: 1488317 - RNA, 14 nt, Human
cccaacacugccag

SEQ ID NO: 1488318 - RNA, 15 nt, Human
cccaacacugccagc

SEQ ID NO: 1488319 - RNA, 16 nt, Human
cccaacacugccagca

SEQ ID NO: 1488320 - RNA, 11 nt, Human
ccauuuuuccu

SEQ ID NO: 1488321 - RNA, 20 nt, Human
ccauguuaaccccuccacuc

SEQ ID NO: 1488322 - RNA, 18 nt, Human
ccauguuagccaggcugg

SEQ ID NO: 1488323 - RNA, 22 nt, Human
ccauuaaccagaucuagucaau

SEQ ID NO: 1488324 - RNA, 18 nt, Human
ccaucucugauuuucaaa

SEQ ID NO: 1488325 - RNA, 23 nt, Human
ccaucucugauuuucaaagcuuu

SEQ ID NO: 1488326 - RNA, 19 nt, Human
ccaucuugcccgcucaggc

SEQ ID NO: 1488327 - RNA, 21 nt, Human
ccaucuugcccgcucaggcug

SEQ ID NO: 1488328 - RNA, 16 nt, Human
ccauuugcuuuuucac

SEQ ID NO: 1488329 - RNA, 13 nt, Human
ccauucuccugag

SEQ ID NO: 1488330 - RNA, 20 nt, Human
ccauuauaaccuuaauuuau

SEQ ID NO: 1488331 - RNA, 24 nt, Human
ccaggcugggucgcccuggacugu

SEQ ID NO: 1488332 - RNA, 23 nt, Human
ccaggcugggucgcccuggacug

SEQ ID NO: 1488333 - RNA, 22 nt, Human
ccaggcugggucgcccuggacu

SEQ ID NO: 1488334 - RNA, 21 nt, Human
ccaggcugggucgcccuggac

SEQ ID NO: 1488335 - RNA, 16 nt, Human
ccaggcugggucgccc

SEQ ID NO: 1488336 - RNA, 12 nt, Human
ccaggcuggguc

SEQ ID NO: 1488337 - RNA, 17 nt, Human
ccaggguggcagcaaca

SEQ ID NO: 1488338 - RNA, 16 nt, Human
ccaggguggcagcaac

SEQ ID NO: 1488339 - RNA, 14 nt, Human
ccaggguggcagca

SEQ ID NO: 1488340 - RNA, 20 nt, Human
ccagguagaggguguguaag

SEQ ID NO: 1488341 - RNA, 20 nt, Human
ccaucaucuauagaaagcua

SEQ ID NO: 1488342 - RNA, 21 nt, Human
ccagguauucguuaucuaaua

SEQ ID NO: 1488343 - RNA, 20 nt, Human
ccagguauucguuaucuaau

SEQ ID NO: 1488344 - RNA, 22 nt, Human
ccagguauccaaaaauguguaa

SEQ ID NO: 1488345 - RNA, 19 nt, Human
ccagguauccaaaaaugug

SEQ ID NO: 1488346 - RNA, 12 nt, Human
ccagugacagcu

SEQ ID NO: 1488347 - RNA, 14 nt, Human
ccagugacagcuag

SEQ ID NO: 1488348 - RNA, 16 nt, Human
ccagugaccaaccuuu

SEQ ID NO: 1488349 - RNA, 20 nt, Human
ccagugcacuugcuggaaga

SEQ ID NO: 1488350 - RNA, 16 nt, Human
ccagugcacuugcugg

SEQ ID NO: 1488351 - RNA, 16 nt, Human
ccagaaugagacaucc

SEQ ID NO: 1488352 - RNA, 14 nt, Human
ccagaccauggaca

SEQ ID NO: 1488353 - RNA, 13 nt, Human
ccagagccaaggg

SEQ ID NO: 1488354 - RNA, 15 nt, Human
ccagagccacaguuc

SEQ ID NO: 1488355 - RNA, 14 nt, Human
ccagagccacaguu

SEQ ID NO: 1488356 - RNA, 13 nt, Human
ccagagccacagu

SEQ ID NO: 1488357 - RNA, 12 nt, Human
ccagagccacag

SEQ ID NO: 1488358 - RNA, 18 nt, Human
ccagaaaccuuuguuugc

SEQ ID NO: 1488359 - RNA, 16 nt, Human
ccacuuuuugcagcuu

SEQ ID NO: 1488360 - RNA, 16 nt, Human
ccagaaaacaaaacug

SEQ ID NO: 1488361 - RNA, 13 nt, Human
ccagaaaacaaaa

SEQ ID NO: 1488362 - RNA, 17 nt, Human
ccacuuuuugcagcuuu

SEQ ID NO: 1488363 - RNA, 15 nt, Human
ccacuuuuugcagcu

SEQ ID NO: 1488364 - RNA, 14 nt, Human
ccacuuuuugcagc

SEQ ID NO: 1488365 - RNA, 20 nt, Human
ccagaacuugacccugagcu

SEQ ID NO: 1488366 - RNA, 13 nt, Human
ccacuuuuugcag

SEQ ID NO: 1488367 - RNA, 18 nt, Human
ccacugcugauauuuucu

SEQ ID NO: 1488368 - RNA, 19 nt, Human
ccacugcugauauuuucuc

SEQ ID NO: 1488369 - RNA, 22 nt, Human
ccacugcugauauuuucucuag

SEQ ID NO: 1488370 - RNA, 20 nt, Human
ccacugcugauauuuucucu

SEQ ID NO: 1488371 - RNA, 19 nt, Human
ccacccucguggacaccug

SEQ ID NO: 1488372 - RNA, 18 nt, Human
ccacccucguggacaccu

SEQ ID NO: 1488373 - RNA, 17 nt, Human
ccacccucguggacacc

SEQ ID NO: 1488374 - RNA, 23 nt, Human
ccaccucucaauauucaauaaag

SEQ ID NO: 1488375 - RNA, 14 nt, Human
ccaccucucaauau

SEQ ID NO: 1488376 - RNA, 13 nt, Human
ccaccucucaaua

SEQ ID NO: 1488377 - RNA, 21 nt, Human
ccaccucgcagguucaagcaa

SEQ ID NO: 1488378 - RNA, 20 nt, Human
ccaccucgcagguucaagca

SEQ ID NO: 1488379 - RNA, 12 nt, Human
ccaccuggcuca

SEQ ID NO: 1488380 - RNA, 21 nt, Human
ccagccuggggcugaggcuga

SEQ ID NO: 1488381 - RNA, 19 nt, Human
ccagcuccgcgccaggaug

SEQ ID NO: 1488382 - RNA, 18 nt, Human
ccagccaucaagagacug

SEQ ID NO: 1488383 - RNA, 23 nt, Human
ccagccaucaccuuagaccacca

SEQ ID NO: 1488384 - RNA, 20 nt, Human
ccagccaucaagagacugag

SEQ ID NO: 1488385 - RNA, 22 nt, Human
ccagauuuuuuaaaauuuauau

SEQ ID NO: 1488386 - RNA, 21 nt, Human
ccagauuugcuaauuuauccu

SEQ ID NO: 1488387 - RNA, 16 nt, Human
ccagauuuuuacacau

SEQ ID NO: 1488388 - RNA, 15 nt, Human
agacauacccucccu

SEQ ID NO: 1488389 - RNA, 19 nt, Human
aaaaaugcacccuuucccu

SEQ ID NO: 1488390 - RNA, 19 nt, Human
uuggagcucgugggacagu

SEQ ID NO: 1488391 - RNA, 15 nt, Human
gccccugccucucug

SEQ ID NO: 1488392 - RNA, 23 nt, Human
gcccccaacagcacccucuccag

SEQ ID NO: 1488393 - RNA, 16 nt, Human
ggccccugccucucug

SEQ ID NO: 1488394 - RNA, 19 nt, Human
uuggagcucguggaacagu

SEQ ID NO: 1488395 - RNA, 19 nt, Human
auaaaaggugucuuucccu

SEQ ID NO: 1488396 - RNA, 22 nt, Human
accccaacagcacccucuccag

SEQ ID NO: 1488397 - RNA, 16 nt, Hepatitis E virus
acuuucgaugacuucu

SEQ ID NO: 1488398 - RNA, 13 nt, Hepatitis E virus
caccacuagccug

SEQ ID NO: 1488399 - RNA, 17 nt, Hepatitis E virus
uggcgagccgacuguua

SEQ ID NO: 1488400 - RNA, 14 nt, Hepatitis E virus
guugcuauuuccac

SEQ ID NO: 1488401 - RNA, 18 nt, Hepatitis E virus
gccucacgucguagaccu

SEQ ID NO: 1488402 - RNA, 22 nt, Hepatitis E virus
accucuggucuuguuaugcuuu

SEQ ID NO: 1488403 - RNA, 22 nt, Hepatitis E virus
ucucgccccgucgucucagcca

SEQ ID NO: 1488404 - RNA, 17 nt, Hepatitis E virus
gcuuauuucucauuucu

SEQ ID NO: 1488405 - RNA, 15 nt, Hepatitis E virus
cccgucaccgccuuc

SEQ ID NO: 1488406 - RNA, 17 nt, Hepatitis E virus
cuaccacagcuggggcc

SEQ ID NO: 1488407 - RNA, 18 nt, Hepatitis E virus
gugccgcccccuuggccu

SEQ ID NO: 1488408 - RNA, 17 nt, Hepatitis E virus
acaccccgccagugccu

SEQ ID NO: 1488409 - RNA, 17 nt, Hepatitis E virus
ucgucucagccaauggc

SEQ ID NO: 1488410 - RNA, 20 nt, Hepatitis E virus
cgaccaugcgcccucggccu

SEQ ID NO: 1488411 - RNA, 14 nt, Hepatitis E virus
cgccccgccgcugc

SEQ ID NO: 1488412 - RNA, 14 nt, Hepatitis E virus
ucuuccguggccac

SEQ ID NO: 1488413 - RNA, 15 nt, Hepatitis E virus
gccuauuuugcuguu

SEQ ID NO: 1488414 - RNA, 18 nt, Hepatitis E virus
gcuuggcgugaccaggcc

SEQ ID NO: 1488415 - RNA, 16 nt, Hepatitis E virus
caccacuagccugggu

SEQ ID NO: 1488416 - RNA, 19 nt, Hepatitis E virus
caccuuccccagccccauc

SEQ ID NO: 1488417 - RNA, 19 nt, Hepatitis E virus
accucuuccguggccaccg

SEQ ID NO: 1488418 - RNA, 18 nt, Hepatitis E virus
uuuccacuuacaccacua

SEQ ID NO: 1488419 - RNA, 15 nt, Hepatitis E virus
agccuccgagcaugu

SEQ ID NO: 1488420 - RNA, 20 nt, Hepatitis E virus
ggagugccgcccccuuggcc

SEQ ID NO: 1488421 - RNA, 19 nt, Hepatitis E virus
uaaccuaucaacaucuccc

SEQ ID NO: 1488422 - RNA, 22 nt, Hepatitis E virus
cucggccuauuuugcuguugcu

SEQ ID NO: 1488423 - RNA, 12 nt, Hepatitis E virus
ucguucuggcca

SEQ ID NO: 1488424 - RNA, 16 nt, Hepatitis E virus
gucagccgucuggccg

SEQ ID NO: 1488425 - RNA, 22 nt, Hepatitis E virus
cucauuucugcguuccgcgcuc

SEQ ID NO: 1488426 - RNA, 14 nt, Hepatitis E virus
augacaccccgcca

SEQ ID NO: 1488427 - RNA, 19 nt, Hepatitis E virus
uaccucuuccguggccacc

SEQ ID NO: 1488428 - RNA, 17 nt, Hepatitis E virus
ccagucuaugucucuga

SEQ ID NO: 1488429 - RNA, 17 nt, Hepatitis E virus
uaucaacaucuccccuu

SEQ ID NO: 1488430 - RNA, 14 nt, Hepatitis E virus
ccacuuacaccacu

SEQ ID NO: 1488431 - RNA, 13 nt, Hepatitis E virus
uggccagcuguuc

SEQ ID NO: 1488432 - RNA, 16 nt, Hepatitis E virus
guagaccuaccacagc

SEQ ID NO: 1488433 - RNA, 20 nt, Hepatitis E virus
gcccgcuucuaccccuccag

SEQ ID NO: 1488434 - RNA, 15 nt, Hepatitis E virus
uaccccuccaggacg

SEQ ID NO: 1488435 - RNA, 16 nt, Hepatitis E virus
gcccucgggcuguugg

SEQ ID NO: 1488436 - RNA, 14 nt, Hepatitis E virus
cuaccccuccagga

SEQ ID NO: 1488437 - RNA, 16 nt, Hepatitis E virus
cuugugccccccuucu

SEQ ID NO: 1488438 - RNA, 22 nt, Hepatitis E virus
accaacugcucguugagaaugc

SEQ ID NO: 1488439 - RNA, 18 nt, Hepatitis E virus
gguucgcgaccaugcgcc

SEQ ID NO: 1488440 - RNA, 14 nt, Hepatitis E virus
cgucgucucagcca

SEQ ID NO: 1488441 - RNA, 12 nt, Hepatitis E virus
cgcucccugaaa

SEQ ID NO: 1488442 - RNA, 20 nt, Hepatitis E virus
uuucuguugcuuauuucuca

SEQ ID NO: 1488443 - RNA, 20 nt, Hepatitis E virus
gucgcucgacuggaccaagg

SEQ ID NO: 1488444 - RNA, 20 nt, Hepatitis E virus
cagucuacugucgcugagcu

SEQ ID NO: 1488445 - RNA, 21 nt, Hepatitis E virus
caccuuccccagccccaucgc

SEQ ID NO: 1488446 - RNA, 12 nt, Hepatitis E virus
acuggaccaagg

SEQ ID NO: 1488447 - RNA, 13 nt, Hepatitis E virus
agugccgcccccu

SEQ ID NO: 1488448 - RNA, 20 nt, Hepatitis E virus
cuccagggcugugcuuuuca

SEQ ID NO: 1488449 - RNA, 23 nt, Hepatitis E virus
gcccaugacaccccgccagugcc

SEQ ID NO: 1488450 - RNA, 18 nt, Hepatitis E virus
uucucauuucugcguucc

SEQ ID NO: 1488451 - RNA, 13 nt, Hepatitis E virus
cauuucugcguuc

SEQ ID NO: 1488452 - RNA, 17 nt, Hepatitis E virus
gcccgcgccaccgcccg

SEQ ID NO: 1488453 - RNA, 14 nt, Hepatitis E virus
ccccuucuuucugu

SEQ ID NO: 1488454 - RNA, 20 nt, Hepatitis E virus
ucucccguuacuccagcacu

SEQ ID NO: 1488455 - RNA, 13 nt, Hepatitis E virus
cucucgccccguc

SEQ ID NO: 1488456 - RNA, 14 nt, Hepatitis E virus
uccucauguuucug

SEQ ID NO: 1488457 - RNA, 18 nt, Hepatitis E virus
gcucaccaccacggcugc

SEQ ID NO: 1488458 - RNA, 14 nt, Hepatitis E virus
ccaagugagcgccu

SEQ ID NO: 1488459 - RNA, 19 nt, Hepatitis E virus
gccgagcucaccaccacgg

SEQ ID NO: 1488460 - RNA, 11 nt, Hepatitis E virus
caccgcugccg

SEQ ID NO: 1488461 - RNA, 21 nt, Hepatitis E virus
cuuucuguugcuuauuucuca

SEQ ID NO: 1488462 - RNA, 22 nt, Hepatitis E virus
ccagcacugcccgucaccgccu

SEQ ID NO: 1488463 - RNA, 22 nt, Hepatitis E virus
cuccagggcugugcuuuucagu

SEQ ID NO: 1488464 - RNA, 18 nt, Hepatitis E virus
ugcggccggggcuggacc

SEQ ID NO: 1488465 - RNA, 16 nt, Hepatitis E virus
ucgacuggaccaaggu

SEQ ID NO: 1488466 - RNA, 15 nt, Hepatitis E virus
gcuugugccccccuu

SEQ ID NO: 1488467 - RNA, 14 nt, Hepatitis E virus
gacucugugaccuu

SEQ ID NO: 1488468 - RNA, 16 nt, Hepatitis E virus
ccgucuggccgccgcc

SEQ ID NO: 1488469 - RNA, 21 nt, Hepatitis E virus
caggaccgaccgacaccuucc

SEQ ID NO: 1488470 - RNA, 13 nt, Hepatitis E virus
cccagcgccccgc

SEQ ID NO: 1488471 - RNA, 14 nt, Hepatitis E virus
caccgcccggucag

SEQ ID NO: 1488472 - RNA, 14 nt, Hepatitis E virus
acucuuauacuaau

SEQ ID NO: 1488473 - RNA, 13 nt, Hepatitis E virus
gccugggugcugg

SEQ ID NO: 1488474 - RNA, 14 nt, Hepatitis E virus
cuuggcgugaccag

SEQ ID NO: 1488475 - RNA, 19 nt, Hepatitis E virus
ggguugcuauuuccacuua

SEQ ID NO: 1488476 - RNA, 13 nt, Hepatitis E virus
auggacuacccug

SEQ ID NO: 1488477 - RNA, 14 nt, Hepatitis E virus
uacuccagcacugc

SEQ ID NO: 1488478 - RNA, 19 nt, Hepatitis E virus
accgcugcggccggggcug

SEQ ID NO: 1488479 - RNA, 17 nt, Hepatitis E virus
cggucagccgucuggcc

SEQ ID NO: 1488480 - RNA, 14 nt, Hepatitis E virus
cuagcauugcuuga

SEQ ID NO: 1488481 - RNA, 17 nt, Hepatitis E virus
acugcuagugaccaacu

SEQ ID NO: 1488482 - RNA, 20 nt, Hepatitis E virus
gacaccuuccccagccccau

SEQ ID NO: 1488483 - RNA, 15 nt, Hepatitis E virus
cacagaccaccacca

SEQ ID NO: 1488484 - RNA, 16 nt, Hepatitis E virus
ggcccagcgccccgcc

SEQ ID NO: 1488485 - RNA, 12 nt, Hepatitis E virus
ucgucucagcca

SEQ ID NO: 1488486 - RNA, 21 nt, Hepatitis E virus
ccaccgcccggucagccgucu

SEQ ID NO: 1488487 - RNA, 20 nt, Hepatitis E virus
cccggucagccgucuggccg

SEQ ID NO: 1488488 - RNA, 23 nt, Hepatitis E virus
ucacacuugauggucgcccccuu

SEQ ID NO: 1488489 - RNA, 14 nt, Hepatitis E virus
gcuccggcccauga

SEQ ID NO: 1488490 - RNA, 12 nt, Hepatitis E virus
uccugccgcucc

SEQ ID NO: 1488491 - RNA, 17 nt, Hepatitis E virus
ccaauggcgagccgacu

SEQ ID NO: 1488492 - RNA, 18 nt, Hepatitis E virus
acagcuggggccgcgccg

SEQ ID NO: 1488493 - RNA, 15 nt, Hepatitis E virus
ucuaccccuccagga

SEQ ID NO: 1488494 - RNA, 14 nt, Hepatitis E virus
gcccgucaccgccu

SEQ ID NO: 1488495 - RNA, 18 nt, Hepatitis E virus
uuccaccacccagcagua

SEQ ID NO: 1488496 - RNA, 15 nt, Hepatitis E virus
gcccggagugccgcc

SEQ ID NO: 1488497 - RNA, 19 nt, Hepatitis E virus
gccuccagggcugugcuuu

SEQ ID NO: 1488498 - RNA, 21 nt, Hepatitis E virus
ggccgcgccgcuaaccgcggu

SEQ ID NO: 1488499 - RNA, 14 nt, Hepatitis E virus
cuucugcugcgccc

SEQ ID NO: 1488500 - RNA, 17 nt, Hepatitis E virus
uacgccgcuccucuuag

SEQ ID NO: 1488501 - RNA, 18 nt, Hepatitis E virus
cagcgccccgccgcugcc

SEQ ID NO: 1488502 - RNA, 24 nt, Hepatitis E virus
acuuacaccacuagccugggugcu

SEQ ID NO: 1488503 - RNA, 22 nt, Hepatitis E virus
caguauucaaagaccuucuuug

SEQ ID NO: 1488504 - RNA, 22 nt, Hepatitis E virus
gccccgucucuauuuccgcggu

SEQ ID NO: 1488505 - RNA, 16 nt, Hepatitis E virus
ccgcggucgcuccggc

SEQ ID NO: 1488506 - RNA, 19 nt, Hepatitis E virus
auuucgucggcugguggcc

SEQ ID NO: 1488507 - RNA, 16 nt, Hepatitis E virus
uacaaacuugguucuu

SEQ ID NO: 1488508 - RNA, 17 nt, Hepatitis E virus
ugaccaggcccagcgcc

SEQ ID NO: 1488509 - RNA, 20 nt, Hepatitis E virus
ucuguagagaaugcucagca

SEQ ID NO: 1488510 - RNA, 15 nt, Hepatitis E virus
accucgacugauguu

SEQ ID NO: 1488511 - RNA, 20 nt, Hepatitis E virus
ccggcccaugacaccccgcc

SEQ ID NO: 1488512 - RNA, 17 nt, Hepatitis E virus
ccuccagggcugugcuu

SEQ ID NO: 1488513 - RNA, 15 nt, Hepatitis E virus
auagcgcuuacccug

SEQ ID NO: 1488514 - RNA, 16 nt, Hepatitis E virus
cgucuggccgccgccg

SEQ ID NO: 1488515 - RNA, 22 nt, Hepatitis E virus
gcccccgaugucaccgcugcgg

SEQ ID NO: 1488516 - RNA, 13 nt, Hepatitis E virus
aggauaccaugga

SEQ ID NO: 1488517 - RNA, 16 nt, Hepatitis E virus
cugccgagcucaccac

SEQ ID NO: 1488518 - RNA, 20 nt, Hepatitis E virus
cgcccccgaugucaccgcug

SEQ ID NO: 1488519 - RNA, 12 nt, Hepatitis E virus
uugcuauuucca

SEQ ID NO: 1488520 - RNA, 14 nt, Hepatitis E virus
ugcuccucauguuu

SEQ ID NO: 1488521 - RNA, 16 nt, Hepatitis E virus
gccacagaccaccacc

SEQ ID NO: 1488522 - RNA, 18 nt, Hepatitis E virus
cgggcugauucucagccc

SEQ ID NO: 1488523 - RNA, 16 nt, Hepatitis E virus
cugcccgcgccaccgc

SEQ ID NO: 1488524 - RNA, 14 nt, Hepatitis E virus
cggucgcucgacug

SEQ ID NO: 1488525 - RNA, 19 nt, Hepatitis E virus
cgcccccuuggccuccagg

SEQ ID NO: 1488526 - RNA, 13 nt, Hepatitis E virus
cguagaccuacca

SEQ ID NO: 1488527 - RNA, 17 nt, Hepatitis E virus
gcucgacuggaccaagg

SEQ ID NO: 1488528 - RNA, 18 nt, Hepatitis E virus
accaugcgcccucggccu

SEQ ID NO: 1488529 - RNA, 22 nt, Hepatitis E virus
uugcuugugccccccuucuuuc

SEQ ID NO: 1488530 - RNA, 18 nt, Hepatitis E virus
cuauuuccacuuacacca

SEQ ID NO: 1488531 - RNA, 23 nt, Hepatitis E virus
ucugcccggagugccgcccccuu

SEQ ID NO: 1488532 - RNA, 19 nt, Hepatitis E virus
ucuggggugaccgggcuga

SEQ ID NO: 1488533 - RNA, 15 nt, Hepatitis E virus
caugucuucugcugc

SEQ ID NO: 1488534 - RNA, 20 nt, Hepatitis E virus
cuguagagaaugcucagcag

SEQ ID NO: 1488535 - RNA, 14 nt, Hepatitis E virus
cugugcuuuucagu

SEQ ID NO: 1488536 - RNA, 14 nt, Hepatitis E virus
cagcacugcccguc

SEQ ID NO: 1488537 - RNA, 17 nt, Hepatitis E virus
gcccccuuuccaccacc

SEQ ID NO: 1488538 - RNA, 23 nt, Hepatitis E virus
accucuauuuuacuaguacuaau

SEQ ID NO: 1488539 - RNA, 19 nt, Hepatitis E virus
aguauucaaagaccuucuu

SEQ ID NO: 1488540 - RNA, 18 nt, Hepatitis E virus
ccuaugcugcccgcgcca

SEQ ID NO: 1488541 - RNA, 13 nt, Hepatitis E virus
gagcucaccacca

SEQ ID NO: 1488542 - RNA, 15 nt, Hepatitis E virus
uggggugaccgggcu

SEQ ID NO: 1488543 - RNA, 22 nt, Hepatitis E virus
cccgcggcgccauccugcgccg

SEQ ID NO: 1488544 - RNA, 16 nt, Hepatitis E virus
cuuucucucaccgcug

SEQ ID NO: 1488545 - RNA, 14 nt, Hepatitis E virus
cccuucuuucuguu

SEQ ID NO: 1488546 - RNA, 16 nt, Hepatitis E virus
cacugcuagugaccaa

SEQ ID NO: 1488547 - RNA, 12 nt, Hepatitis E virus
agcauugcuuga

SEQ ID NO: 1488548 - RNA, 20 nt, Hepatitis E virus
agcuucuaauuaugcccagu

SEQ ID NO: 1488549 - RNA, 15 nt, Hepatitis E virus
cacucggcuccgcuu

SEQ ID NO: 1488550 - RNA, 21 nt, Hepatitis E virus
cuauuuugcuguugcuccuca

SEQ ID NO: 1488551 - RNA, 20 nt, Hepatitis E virus
accgggcugauucucagccc

SEQ ID NO: 1488552 - RNA, 14 nt, Hepatitis E virus
ugaccaggcccagc

SEQ ID NO: 1488553 - RNA, 20 nt, Hepatitis E virus
accgccuucgucgcggugca

SEQ ID NO: 1488554 - RNA, 16 nt, Hepatitis E virus
gaaucucguguaguua

SEQ ID NO: 1488555 - RNA, 13 nt, Hepatitis E virus
auggucgcccccu

SEQ ID NO: 1488556 - RNA, 18 nt, Hepatitis E virus
ggcggaggaggaggccac

SEQ ID NO: 1488557 - RNA, 19 nt, Hepatitis E virus
gggcuguuggacuuugccc

SEQ ID NO: 1488558 - RNA, 14 nt, Hepatitis E virus
cuguccuccgagcu

SEQ ID NO: 1488559 - RNA, 17 nt, Hepatitis E virus
acaucuguagagaaugc

SEQ ID NO: 1488560 - RNA, 14 nt, Hepatitis E virus
uacgccgcuccucu

SEQ ID NO: 1488561 - RNA, 19 nt, Hepatitis E virus
cggaggaggaggccaccuc

SEQ ID NO: 1488562 - RNA, 20 nt, Hepatitis E virus
cugacucugugaccuugguu

SEQ ID NO: 1488563 - RNA, 18 nt, Hepatitis E virus
gcuuucucucaccgcugc

SEQ ID NO: 1488564 - RNA, 18 nt, Hepatitis E virus
cagccccaucgcgccccu

SEQ ID NO: 1488565 - RNA, 16 nt, Hepatitis E virus
gcgccccgccgcugcc

SEQ ID NO: 1488566 - RNA, 23 nt, Hepatitis E virus
cauacuuucgaugacuucugccc

SEQ ID NO: 1488567 - RNA, 14 nt, Hepatitis E virus
ugccuaugcugccc

SEQ ID NO: 1488568 - RNA, 16 nt, Hepatitis E virus
cuuacaccacuagccu

SEQ ID NO: 1488569 - RNA, 17 nt, Hepatitis E virus
ccccuuggccuccaggg

SEQ ID NO: 1488570 - RNA, 18 nt, Hepatitis E virus
ccuauuuugcuguugcuc

SEQ ID NO: 1488571 - RNA, 18 nt, Hepatitis E virus
agcgccccgccgcugccu

SEQ ID NO: 1488572 - RNA, 15 nt, Hepatitis E virus
ccgagcucaccacca

SEQ ID NO: 1488573 - RNA, 13 nt, Hepatitis E virus
cccgccgcugccu

SEQ ID NO: 1488574 - RNA, 17 nt, Hepatitis E virus
gcgugaccaggcccagc

SEQ ID NO: 1488575 - RNA, 15 nt, Hepatitis E virus
gaccaccaccacccc

SEQ ID NO: 1488576 - RNA, 12 nt, Hepatitis E virus
cacucugcgcua

SEQ ID NO: 1488577 - RNA, 20 nt, Hepatitis E virus
ucagccgucuggccgccgcc

SEQ ID NO: 1488578 - RNA, 19 nt, Hepatitis E virus
ucugcugcgcccauggguu

SEQ ID NO: 1488579 - RNA, 17 nt, Hepatitis E virus
cuccagcacugcccguc

SEQ ID NO: 1488580 - RNA, 22 nt, Hepatitis E virus
gauaaccaacaugagcaggacc

SEQ ID NO: 1488581 - RNA, 22 nt, Hepatitis E virus
uccagcccggcauagccuccga

SEQ ID NO: 1488582 - RNA, 23 nt, Hepatitis E virus
guaaaacucgggaguuauaguuu

SEQ ID NO: 1488583 - RNA, 15 nt, Hepatitis E virus
cugccuaugcugccc

SEQ ID NO: 1488584 - RNA, 18 nt, Hepatitis E virus
gucagccgucuggccgcc

SEQ ID NO: 1488585 - RNA, 13 nt, Hepatitis E virus
ccauggacuaccc

SEQ ID NO: 1488586 - RNA, 18 nt, Hepatitis E virus
uguagagaaugcucagca

SEQ ID NO: 1488587 - RNA, 16 nt, Hepatitis E virus
ccucauguuucugccu

SEQ ID NO: 1488588 - RNA, 23 nt, Hepatitis E virus
cuggccacagaccaccaccaccc

SEQ ID NO: 1488589 - RNA, 23 nt, Hepatitis E virus
cguucuggccacagaccaccacc

SEQ ID NO: 1488590 - RNA, 14 nt, Hepatitis E virus
uauuucucauuucu

SEQ ID NO: 1488591 - RNA, 15 nt, Hepatitis E virus
cugguggccagcugu

SEQ ID NO: 1488592 - RNA, 22 nt, Hepatitis E virus
cgcccccuuggccuccagggcu

SEQ ID NO: 1488593 - RNA, 20 nt, Hepatitis E virus
cccagccccaucgcgccccu

SEQ ID NO: 1488594 - RNA, 13 nt, Hepatitis E virus
cacagaccaccac

SEQ ID NO: 1488595 - RNA, 20 nt, Hepatitis E virus
ucugcccggagugccgcccc

SEQ ID NO: 1488596 - RNA, 18 nt, Hepatitis E virus
ugacucugugaccuuggu

SEQ ID NO: 1488597 - RNA, 13 nt, Hepatitis E virus
gccuaugcugccc

SEQ ID NO: 1488598 - RNA, 13 nt, Hepatitis E virus
cgaccaugcgccc

SEQ ID NO: 1488599 - RNA, 19 nt, Hepatitis E virus
guuccgcaaccucaccccc

SEQ ID NO: 1488600 - RNA, 10 nt, Hepatitis E virus
uccaccaccc

SEQ ID NO: 1488601 - RNA, 23 nt, Hepatitis E virus
cuggccgccgccgugggcggcgc

SEQ ID NO: 1488602 - RNA, 22 nt, Hepatitis E virus
cuugaguuccgcaaccucaccc

SEQ ID NO: 1488603 - RNA, 19 nt, Hepatitis E virus
gcuacaauucgcuaccgcc

SEQ ID NO: 1488604 - RNA, 17 nt, Hepatitis E virus
ccgcgguaagcucuccu

SEQ ID NO: 1488605 - RNA, 22 nt, Hepatitis E virus
gcuaaccgcggucgcuccggcc

SEQ ID NO: 1488606 - RNA, 16 nt, Hepatitis E virus
cagaccaccaccaccc

SEQ ID NO: 1488607 - RNA, 20 nt, Hepatitis E virus
ggcccaugacaccccgccag

SEQ ID NO: 1488608 - RNA, 16 nt, Hepatitis E virus
gcccagcgccccgccg

SEQ ID NO: 1488609 - RNA, 14 nt, Hepatitis E virus
caccaccacggcug

SEQ ID NO: 1488610 - RNA, 17 nt, Hepatitis E virus
cuggccacagaccacca

SEQ ID NO: 1488611 - RNA, 14 nt, Hepatitis E virus
ugccgcccccuugg

SEQ ID NO: 1488612 - RNA, 18 nt, Hepatitis E virus
aggcccagcgccccgccg

SEQ ID NO: 1488613 - RNA, 22 nt, Hepatitis E virus
agugccugauguugacucccgc

SEQ ID NO: 1488614 - RNA, 15 nt, Hepatitis E virus
ccccuuuccaccacc

SEQ ID NO: 1488615 - RNA, 14 nt, Hepatitis E virus
ugcgcccauggguu

SEQ ID NO: 1488616 - RNA, 12 nt, Hepatitis E virus
ugcuugugcccc

SEQ ID NO: 1488617 - RNA, 20 nt, Hepatitis E virus
acacccugcuuggcggucua

SEQ ID NO: 1488618 - RNA, 19 nt, Hepatitis E virus
augacaccccgccagugcc

SEQ ID NO: 1488619 - RNA, 20 nt, Hepatitis E virus
gaauucaauaaccucgacug

SEQ ID NO: 1488620 - RNA, 22 nt, Hepatitis E virus
caccgccuucgucgcggugcag

SEQ ID NO: 1488621 - RNA, 14 nt, Hepatitis E virus
cgcuccucuuagcc

SEQ ID NO: 1488622 - RNA, 18 nt, Hepatitis E virus
uacaccacuagccugggu

SEQ ID NO: 1488623 - RNA, 20 nt, Hepatitis E virus
cggccuauuuugcuguugcu

SEQ ID NO: 1488624 - RNA, 17 nt, Hepatitis E virus
ccccuauauucauccaa

SEQ ID NO: 1488625 - RNA, 23 nt, Hepatitis E virus
ucugccuaugcugcccgcgccac

SEQ ID NO: 1488626 - RNA, 20 nt, Hepatitis E virus
gccgcccccuuggccuccag

SEQ ID NO: 1488627 - RNA, 15 nt, Hepatitis E virus
cccgcugguccccaa

SEQ ID NO: 1488628 - RNA, 13 nt, Hepatitis E virus
cugauucucagcc

SEQ ID NO: 1488629 - RNA, 21 nt, Hepatitis E virus
cccagcgccccgccgcugccu

SEQ ID NO: 1488630 - RNA, 20 nt, Hepatitis E virus
cccaucgcgccccuuuucug

SEQ ID NO: 1488631 - RNA, 19 nt, Hepatitis E virus
cuccucuuagcccgcuucu

SEQ ID NO: 1488632 - RNA, 18 nt, Hepatitis E virus
augacaucgaccucgggg

SEQ ID NO: 1488633 - RNA, 19 nt, Hepatitis E virus
gcucuucgaccggcccagu

SEQ ID NO: 1488634 - RNA, 18 nt, Hepatitis E virus
ggacugccgagcucacca

SEQ ID NO: 1488635 - RNA, 15 nt, Hepatitis E virus
gaggaggaggccacc

SEQ ID NO: 1488636 - RNA, 19 nt, Hepatitis E virus
accaaccccuucgcccccg

SEQ ID NO: 1488637 - RNA, 21 nt, Hepatitis E virus
gucucccguuacuccagcacu

SEQ ID NO: 1488638 - RNA, 13 nt, Hepatitis E virus
ugauucucagccc

SEQ ID NO: 1488639 - RNA, 14 nt, Hepatitis E virus
ccgccgcugccuca

SEQ ID NO: 1488640 - RNA, 18 nt, Hepatitis E virus
gcgaccggcgcgcaggcc

SEQ ID NO: 1488641 - RNA, 18 nt, Hepatitis E virus
cagucuaugucucugacu

SEQ ID NO: 1488642 - RNA, 12 nt, Hepatitis E virus
ucugcugcgccc

SEQ ID NO: 1488643 - RNA, 11 nt, Hepatitis E virus
ucgcccccuuu

SEQ ID NO: 1488644 - RNA, 19 nt, Hepatitis E virus
cgaguaugaccaguccacu

SEQ ID NO: 1488645 - RNA, 16 nt, Hepatitis E virus
cuccaucucguucugg

SEQ ID NO: 1488646 - RNA, 14 nt, Hepatitis E virus
cccgcccgaccacu

SEQ ID NO: 1488647 - RNA, 17 nt, Hepatitis E virus
auuuugcuguugcuccu

SEQ ID NO: 1488648 - RNA, 15 nt, Hepatitis E virus
cuuagcccgcuucua

SEQ ID NO: 1488649 - RNA, 16 nt, Hepatitis E virus
ugcccaguaccggguu

SEQ ID NO: 1488650 - RNA, 12 nt, Hepatitis E virus
uaguccagcccg

SEQ ID NO: 1488651 - RNA, 20 nt, Hepatitis E virus
uccaucucguucuggccaca

SEQ ID NO: 1488652 - RNA, 15 nt, Hepatitis E virus
acgcuguugguggcu

SEQ ID NO: 1488653 - RNA, 19 nt, Hepatitis E virus
gcuccgcuuggcgugacca

SEQ ID NO: 1488654 - RNA, 17 nt, Hepatitis E virus
ccccuuuucuguccucc

SEQ ID NO: 1488655 - RNA, 17 nt, Hepatitis E virus
cugcccggagugccgcc

SEQ ID NO: 1488656 - RNA, 22 nt, Hepatitis E virus
cccgaugucaccgcugcggccg

SEQ ID NO: 1488657 - RNA, 22 nt, Hepatitis E virus
ccccaucgcgccccuuuucugu

SEQ ID NO: 1488658 - RNA, 15 nt, Hepatitis E virus
ggccaccucuggucu

SEQ ID NO: 1488659 - RNA, 15 nt, Hepatitis E virus
gacucccgcggcgcc

SEQ ID NO: 1488660 - RNA, 16 nt, Hepatitis E virus
cagcgccccgccgcug

SEQ ID NO: 1488661 - RNA, 12 nt, Hepatitis E virus
uuccccagcccc

SEQ ID NO: 1488662 - RNA, 20 nt, Hepatitis E virus
auaccggugcccucgggcug

SEQ ID NO: 1488663 - RNA, 16 nt, Hepatitis E virus
uugcuguugcuccuca

SEQ ID NO: 1488664 - RNA, 20 nt, Hepatitis E virus
cuugcugacacccugcuugg

SEQ ID NO: 1488665 - RNA, 16 nt, Hepatitis E virus
uucgaccggcccaguc

SEQ ID NO: 1488666 - RNA, 13 nt, Hepatitis E virus
cuuauuucucauu

SEQ ID NO: 1488667 - RNA, 15 nt, Hepatitis E virus
acucugugaccuugg

SEQ ID NO: 1488668 - RNA, 12 nt, Hepatitis E virus
aacaccacugcu

SEQ ID NO: 1488669 - RNA, 15 nt, Hepatitis E virus
cgaccaugcgcccuc

SEQ ID NO: 1488670 - RNA, 14 nt, Hepatitis E virus
caccacugcuagug

SEQ ID NO: 1488671 - RNA, 21 nt, Hepatitis E virus
aguaccggguuguucgugcua

SEQ ID NO: 1488672 - RNA, 17 nt, Hepatitis E virus
gucuuguuaugcuuugc

SEQ ID NO: 1488673 - RNA, 17 nt, Hepatitis E virus
uuuacgccgcuccucuu

SEQ ID NO: 1488674 - RNA, 20 nt, Hepatitis E virus
cccccuuggccuccagggcu

SEQ ID NO: 1488675 - RNA, 13 nt, Hepatitis E virus
ccagcacugcccg

SEQ ID NO: 1488676 - RNA, 19 nt, Hepatitis E virus
gaguaugaccaguccacuu

SEQ ID NO: 1488677 - RNA, 20 nt, Hepatitis E virus
gcgccaccgcccggucagcc

SEQ ID NO: 1488678 - RNA, 16 nt, Hepatitis E virus
gccgucuggccgccgc

SEQ ID NO: 1488679 - RNA, 16 nt, Hepatitis E virus
cuucuaccccuccagg

SEQ ID NO: 1488680 - RNA, 17 nt, Hepatitis E virus
ccccuucuuucuguugc

SEQ ID NO: 1488681 - RNA, 18 nt, Hepatitis E virus
ugcuguuuuagcccccca

SEQ ID NO: 1488682 - RNA, 12 nt, Hepatitis E virus
ccacagaccacc

SEQ ID NO: 1488683 - RNA, 22 nt, Hepatitis E virus
caugcgcccucggccuauuuug

SEQ ID NO: 1488684 - RNA, 14 nt, Hepatitis E virus
ccuaccacagcugg

SEQ ID NO: 1488685 - RNA, 14 nt, Hepatitis E virus
augggacugccgag

SEQ ID NO: 1488686 - RNA, 18 nt, Hepatitis E virus
auuugcuugugccccccu

SEQ ID NO: 1488687 - RNA, 15 nt, Hepatitis E virus
acuccagcacugccc

SEQ ID NO: 1488688 - RNA, 14 nt, Hepatitis E virus
uaacaccacugcua

SEQ ID NO: 1488689 - RNA, 23 nt, Hepatitis E virus
ccgagcucaccaccacggcugcu

SEQ ID NO: 1488690 - RNA, 14 nt, Hepatitis E virus
cgucucuauuuccg

SEQ ID NO: 1488691 - RNA, 10 nt, Hepatitis E virus
uggcuacaga

SEQ ID NO: 1488692 - RNA, 20 nt, Hepatitis E virus
cuucuaauuaugcccaguac

SEQ ID NO: 1488693 - RNA, 11 nt, Hepatitis E virus
ccgcccccuug

SEQ ID NO: 1488694 - RNA, 14 nt, Hepatitis E virus
agcuguucuacucu

SEQ ID NO: 1488695 - RNA, 15 nt, Hepatitis E virus
ugcuugugccccccu

SEQ ID NO: 1488696 - RNA, 13 nt, Hepatitis E virus
uagccccccacuc

SEQ ID NO: 1488697 - RNA, 20 nt, Hepatitis E virus
ugcccggagugccgcccccu

SEQ ID NO: 1488698 - RNA, 19 nt, Hepatitis E virus
cugcguuccgcgcucccug

SEQ ID NO: 1488699 - RNA, 17 nt, Hepatitis E virus
uuuccaccacccagcag

SEQ ID NO: 1488700 - RNA, 14 nt, Hepatitis E virus
cccccacucugcgc

SEQ ID NO: 1488701 - RNA, 16 nt, Hepatitis E virus
ccggagugccgccccc

SEQ ID NO: 1488702 - RNA, 11 nt, Hepatitis E virus
aucgcgccccu

SEQ ID NO: 1488703 - RNA, 17 nt, Hepatitis E virus
ccucauguuucugccua

SEQ ID NO: 1488704 - RNA, 12 nt, Hepatitis E virus
gauucucagccc

SEQ ID NO: 1488705 - RNA, 15 nt, Hepatitis E virus
cagcgccccgccgcu

SEQ ID NO: 1488706 - RNA, 21 nt, Hepatitis E virus
aauacucauauaauggcuaca

SEQ ID NO: 1488707 - RNA, 13 nt, Hepatitis E virus
ccuuccccagccc

SEQ ID NO: 1488708 - RNA, 18 nt, Hepatitis E virus
caugacaccccgccagug

SEQ ID NO: 1488709 - RNA, 19 nt, Hepatitis E virus
cagcccuucgcaauccccu

SEQ ID NO: 1488710 - RNA, 17 nt, Hepatitis E virus
caucggguugcuauuuc

SEQ ID NO: 1488711 - RNA, 16 nt, Hepatitis E virus
guccugccgcuccgcg

SEQ ID NO: 1488712 - RNA, 14 nt, Hepatitis E virus
cacucggcuccgcu

SEQ ID NO: 1488713 - RNA, 23 nt, Hepatitis E virus
ccacagcuggggccgcgccgcua

SEQ ID NO: 1488714 - RNA, 21 nt, Hepatitis E virus
ucuccaucucguucuggccac

SEQ ID NO: 1488715 - RNA, 16 nt, Hepatitis E virus
cgcggcgccauccugc

SEQ ID NO: 1488716 - RNA, 18 nt, Hepatitis E virus
ccuuuccaccacccagca

SEQ ID NO: 1488717 - RNA, 21 nt, Hepatitis E virus
ucguugagaaugccgcugggc

SEQ ID NO: 1488718 - RNA, 12 nt, Hepatitis E virus
ugaccuugguua

SEQ ID NO: 1488719 - RNA, 13 nt, Hepatitis E virus
ggcgagccgacug

SEQ ID NO: 1488720 - RNA, 18 nt, Hepatitis E virus
ggguuguucgugcuacaa

SEQ ID NO: 1488721 - RNA, 19 nt, Hepatitis E virus
ccccgguaauaccaacacg

SEQ ID NO: 1488722 - RNA, 15 nt, Hepatitis E virus
uucuguugcuuauuu

SEQ ID NO: 1488723 - RNA, 22 nt, Hepatitis E virus
gaguuauaguuuauuugcuugu

SEQ ID NO: 1488724 - RNA, 15 nt, Hepatitis E virus
cugcgcccauggguu

SEQ ID NO: 1488725 - RNA, 15 nt, Hepatitis E virus
accacuagccugggu

SEQ ID NO: 1488726 - RNA, 18 nt, Hepatitis E virus
cggcgguuccggcggugg

SEQ ID NO: 1488727 - RNA, 15 nt, Hepatitis E virus
ccgcggucgcuccgg

SEQ ID NO: 1488728 - RNA, 18 nt, Hepatitis E virus
ugugccccccuucuuucu

SEQ ID NO: 1488729 - RNA, 22 nt, Hepatitis E virus
gccuacacuaucguaaccaagg

SEQ ID NO: 1488730 - RNA, 15 nt, Hepatitis E virus
cgccaccgcccgguc

SEQ ID NO: 1488731 - RNA, 17 nt, Hepatitis E virus
gccccgucgucucagcc

SEQ ID NO: 1488732 - RNA, 14 nt, Hepatitis E virus
auaacaccacugcu

SEQ ID NO: 1488733 - RNA, 17 nt, Hepatitis E virus
cccuucuuucuguugcu

SEQ ID NO: 1488734 - RNA, 17 nt, Hepatitis E virus
ucuaauuaugcccagua

SEQ ID NO: 1488735 - RNA, 17 nt, Hepatitis E virus
cuguugcuuauuucuca

SEQ ID NO: 1488736 - RNA, 16 nt, Hepatitis E virus
uccgcgcucccugaaa

SEQ ID NO: 1488737 - RNA, 16 nt, Hepatitis E virus
cuucuuucuguugcuu

SEQ ID NO: 1488738 - RNA, 13 nt, Hepatitis E virus
ccgcgccaccgcc

SEQ ID NO: 1488739 - RNA, 18 nt, Hepatitis E virus
ucugcguuccgcgcuccc

SEQ ID NO: 1488740 - RNA, 14 nt, Hepatitis E virus
cccuuggccuccag

SEQ ID NO: 1488741 - RNA, 19 nt, Hepatitis E virus
acugccgagcucaccacca

SEQ ID NO: 1488742 - RNA, 22 nt, Hepatitis E virus
cccgcugguccccaacgcuguu

SEQ ID NO: 1488743 - RNA, 17 nt, Hepatitis E virus
aucuccccuuaccucuu

SEQ ID NO: 1488744 - RNA, 17 nt, Hepatitis E virus
ucucccguuacuccagc

SEQ ID NO: 1488745 - RNA, 12 nt, Hepatitis E virus
gcgcccucggcc

SEQ ID NO: 1488746 - RNA, 16 nt, Hepatitis E virus
ccaaccaaccccuucg

SEQ ID NO: 1488747 - RNA, 16 nt, Hepatitis E virus
cccgucgucucagcca

SEQ ID NO: 1488748 - RNA, 14 nt, Hepatitis E virus
uccgcgcucccuga

SEQ ID NO: 1488749 - RNA, 21 nt, Hepatitis E virus
ggcgcucuguugagaccuccg

SEQ ID NO: 1488750 - RNA, 12 nt, Hepatitis E virus
cgcccccuuggc

SEQ ID NO: 1488751 - RNA, 21 nt, Hepatitis E virus
gcagaugggacugccgagcuc

SEQ ID NO: 1488752 - RNA, 16 nt, Hepatitis E virus
cggcccaugacacccc

SEQ ID NO: 1488753 - RNA, 20 nt, Hepatitis E virus
ccgaguaugaccaguccacu

SEQ ID NO: 1488754 - RNA, 12 nt, Hepatitis E virus
ugacaccccgcc

SEQ ID NO: 1488755 - RNA, 21 nt, Hepatitis E virus
gcccggcauagccuccgagca

SEQ ID NO: 1488756 - RNA, 19 nt, Hepatitis E virus
gaccaggcccagcgccccg

SEQ ID NO: 1488757 - RNA, 19 nt, Hepatitis E virus
gucguagaccuaccacagc

SEQ ID NO: 1488758 - RNA, 21 nt, Hepatitis E virus
auggucgcccccuuuccacca

SEQ ID NO: 1488759 - RNA, 19 nt, Hepatitis E virus
cgcaugacaucgaccucgg

SEQ ID NO: 1488760 - RNA, 21 nt, Hepatitis E virus
cccgcuucuaccccuccagga

SEQ ID NO: 1488761 - RNA, 19 nt, Hepatitis E virus
gccugggugcuggccccgu

SEQ ID NO: 1488762 - RNA, 17 nt, Hepatitis E virus
gucggcugguggccagc

SEQ ID NO: 1488763 - RNA, 17 nt, Hepatitis E virus
ccggagugccgcccccu

SEQ ID NO: 1488764 - RNA, 19 nt, Hepatitis E virus
ccacucggcuccgcuuggc

SEQ ID NO: 1488765 - RNA, 13 nt, Hepatitis E virus
guccuccgagcua

SEQ ID NO: 1488766 - RNA, 15 nt, Hepatitis E virus
cuacagaagcuucua

SEQ ID NO: 1488767 - RNA, 21 nt, Hepatitis E virus
cccgcaugacaucgaccucgg

SEQ ID NO: 1488768 - RNA, 18 nt, Hepatitis E virus
gccuccagggcugugcuu

SEQ ID NO: 1488769 - RNA, 18 nt, Hepatitis E virus
ugcugacacccugcuugg

SEQ ID NO: 1488770 - RNA, 21 nt, Hepatitis E virus
gcuccucuuagcccgcuucua

SEQ ID NO: 1488771 - RNA, 17 nt, Hepatitis E virus
uagaccuaccacagcug

SEQ ID NO: 1488772 - RNA, 20 nt, Hepatitis E virus
ugaccgggcugauucucagc

SEQ ID NO: 1488773 - RNA, 13 nt, Hepatitis E virus
ccacuagccuggg

SEQ ID NO: 1488774 - RNA, 14 nt, Hepatitis E virus
uguugguggcuacg

SEQ ID NO: 1488775 - RNA, 19 nt, Hepatitis E virus
cuugugccccccuucuuuc

SEQ ID NO: 1488776 - RNA, 18 nt, Hepatitis E virus
gaggcagguacuacuaaa

SEQ ID NO: 1488777 - RNA, 16 nt, Hepatitis E virus
cccggcauagccuccg

SEQ ID NO: 1488778 - RNA, 21 nt, Hepatitis E virus
gcuaaccgcggucgcuccggc

SEQ ID NO: 1488779 - RNA, 15 nt, Hepatitis E virus
cgccaucuccaucuc

SEQ ID NO: 1488780 - RNA, 20 nt, Hepatitis E virus
gcggucgcuccggcccauga

SEQ ID NO: 1488781 - RNA, 15 nt, Hepatitis E virus
uggcgugaccaggcc

SEQ ID NO: 1488782 - RNA, 19 nt, Hepatitis E virus
cgagcuaaugaugugcuuu

SEQ ID NO: 1488783 - RNA, 14 nt, Hepatitis E virus
ucggcuccgcuugg

SEQ ID NO: 1488784 - RNA, 16 nt, Hepatitis E virus
gcugagcuucagcgcc

SEQ ID NO: 1488785 - RNA, 13 nt, Hepatitis E virus
accuuccccagcc

SEQ ID NO: 1488786 - RNA, 19 nt, Hepatitis E virus
ggcccaugacaccccgcca

SEQ ID NO: 1488787 - RNA, 18 nt, Hepatitis E virus
gcugcccgcgccaccgcc

SEQ ID NO: 1488788 - RNA, 22 nt, Hepatitis E virus
uagaccuaccacagcuggggcc

SEQ ID NO: 1488789 - RNA, 19 nt, Hepatitis E virus
ggcggaggaggaggccacc

SEQ ID NO: 1488790 - RNA, 22 nt, Hepatitis E virus
cucauguuucugccuaugcugc

SEQ ID NO: 1488791 - RNA, 13 nt, Hepatitis E virus
ccugggugcuggc

SEQ ID NO: 1488792 - RNA, 18 nt, Hepatitis E virus
uaccauggacuacccugc

SEQ ID NO: 1488793 - RNA, 19 nt, Hepatitis E virus
caucggguugcuauuucca

SEQ ID NO: 1488794 - RNA, 18 nt, Hepatitis E virus
ccgcggucgcuccggccc

SEQ ID NO: 1488795 - RNA, 18 nt, Hepatitis E virus
cugcguuccgcgcucccu

SEQ ID NO: 1488796 - RNA, 13 nt, Hepatitis E virus
acaaacuugguuc

SEQ ID NO: 1488797 - RNA, 11 nt, Hepatitis E virus
cuugugccccc

SEQ ID NO: 1488798 - RNA, 20 nt, Hepatitis E virus
gauggucgcccccuuuccac

SEQ ID NO: 1488799 - RNA, 16 nt, Hepatitis E virus
uugcuuauuucucauu

SEQ ID NO: 1488800 - RNA, 16 nt, Hepatitis E virus
gaccaggcccagcgcc

SEQ ID NO: 1488801 - RNA, 19 nt, Hepatitis E virus
caccgcugcggccggggcu

SEQ ID NO: 1488802 - RNA, 22 nt, Hepatitis E virus
gcuccgcgguaagcucuccuuu

SEQ ID NO: 1488803 - RNA, 14 nt, Hepatitis E virus
caccccgccagugc

SEQ ID NO: 1488804 - RNA, 22 nt, Hepatitis E virus
gccucacgucguagaccuacca

SEQ ID NO: 1488805 - RNA, 18 nt, Hepatitis E virus
ccauggguucgcgaccau

SEQ ID NO: 1488806 - RNA, 14 nt, Hepatitis E virus
gccacagaccacca

SEQ ID NO: 1488807 - RNA, 15 nt, Hepatitis E virus
cgaugacuucugccc

SEQ ID NO: 1488808 - RNA, 18 nt, Hepatitis E virus
cacuuacaccacuagccu

SEQ ID NO: 1488809 - RNA, 19 nt, Hepatitis E virus
aacaugucuucugcugcgc

SEQ ID NO: 1488810 - RNA, 16 nt, Hepatitis E virus
uacuccagcacugccc

SEQ ID NO: 1488811 - RNA, 15 nt, Hepatitis E virus
uaucguaaccaaggu

SEQ ID NO: 1488812 - RNA, 14 nt, Hepatitis E virus
gaggccaccucugg

SEQ ID NO: 1488813 - RNA, 11 nt, Hepatitis E virus
cucagcaggau

SEQ ID NO: 1488814 - RNA, 19 nt, Hepatitis E virus
cuccaucucguucuggcca

SEQ ID NO: 1488815 - RNA, 21 nt, Hepatitis E virus
ggucgcuccggcccaugacac

SEQ ID NO: 1488816 - RNA, 16 nt, Hepatitis E virus
accaccacggcugcua

SEQ ID NO: 1488817 - RNA, 15 nt, Hepatitis E virus
ccgucgucucagcca

SEQ ID NO: 1488818 - RNA, 15 nt, Hepatitis E virus
aucuguagagaaugc

SEQ ID NO: 1488819 - RNA, 19 nt, Hepatitis E virus
cagcuggggccgcgccgcu

SEQ ID NO: 1488820 - RNA, 23 nt, Hepatitis E virus
gugccccccuucuuucuguugcu

SEQ ID NO: 1488821 - RNA, 23 nt, Hepatitis E virus
cuagccugggugcuggccccguc

SEQ ID NO: 1488822 - RNA, 14 nt, Hepatitis E virus
ccccgccgcugccu

SEQ ID NO: 1488823 - RNA, 18 nt, Hepatitis E virus
ccgaccacucggcuccgc

SEQ ID NO: 1488824 - RNA, 14 nt, Hepatitis E virus
cgagcucaccacca

SEQ ID NO: 1488825 - RNA, 23 nt, Hepatitis E virus
uggucgcccccuuuccaccaccc

SEQ ID NO: 1488826 - RNA, 15 nt, Hepatitis E virus
gaguaugaccagucc

SEQ ID NO: 1488827 - RNA, 19 nt, Hepatitis E virus
cagccgucuggccgccgcc

SEQ ID NO: 1488828 - RNA, 15 nt, Hepatitis E virus
agccccccacucugc

SEQ ID NO: 1488829 - RNA, 18 nt, Hepatitis E virus
auaccggugcccucgggc

SEQ ID NO: 1488830 - RNA, 16 nt, Hepatitis E virus
gcuacccgcuucauga

SEQ ID NO: 1488831 - RNA, 17 nt, Hepatitis E virus
cccaugacaccccgcca

SEQ ID NO: 1488832 - RNA, 19 nt, Hepatitis E virus
ucuguugcuuauuucucau

SEQ ID NO: 1488833 - RNA, 12 nt, Hepatitis E virus
gccaccucuggu

SEQ ID NO: 1488834 - RNA, 15 nt, Hepatitis E virus
uuccgcgcucccuga

SEQ ID NO: 1488835 - RNA, 20 nt, Hepatitis E virus
ugcuuauuucucauuucugc

SEQ ID NO: 1488836 - RNA, 17 nt, Hepatitis E virus
ggcuacagaagcuucua

SEQ ID NO: 1488837 - RNA, 15 nt, Hepatitis E virus
cuccagggcugugcu

SEQ ID NO: 1488838 - RNA, 13 nt, Hepatitis E virus
ccgcgcucccuga

SEQ ID NO: 1488839 - RNA, 19 nt, Hepatitis E virus
ccccuuuucuguccuccga

SEQ ID NO: 1488840 - RNA, 17 nt, Hepatitis E virus
accucuuccguggccac

SEQ ID NO: 1488841 - RNA, 15 nt, Hepatitis E virus
ugcuguugcuccuca

SEQ ID NO: 1488842 - RNA, 16 nt, Hepatitis E virus
cuccucuuagcccgcu

SEQ ID NO: 1488843 - RNA, 20 nt, Hepatitis E virus
agaccuucuuuguccugccg

SEQ ID NO: 1488844 - RNA, 13 nt, Hepatitis E virus
ccaaccaaccccu

SEQ ID NO: 1488845 - RNA, 18 nt, Hepatitis E virus
cccagucuaugucucuga

SEQ ID NO: 1488846 - RNA, 22 nt, Hepatitis E virus
caaccaaccccuucgcccccga

SEQ ID NO: 1488847 - RNA, 14 nt, Hepatitis E virus
cuccagcacugccc

SEQ ID NO: 1488848 - RNA, 19 nt, Hepatitis E virus
ggacuacccugcccgcgcc

SEQ ID NO: 1488849 - RNA, 14 nt, Hepatitis E virus
cuuuucuguccucc

SEQ ID NO: 1488850 - RNA, 21 nt, Hepatitis E virus
ccuuauaauuauaacaccacu

SEQ ID NO: 1488851 - RNA, 16 nt, Hepatitis E virus
gaccacucggcuccgc

SEQ ID NO: 1488852 - RNA, 15 nt, Hepatitis E virus
ucucugacucuguga

SEQ ID NO: 1488853 - RNA, 16 nt, Hepatitis E virus
gccagugccugauguu

SEQ ID NO: 1488854 - RNA, 12 nt, Hepatitis E virus
aggaggccaccu

SEQ ID NO: 1488855 - RNA, 17 nt, Hepatitis E virus
gagcuaaugaugugcuu

SEQ ID NO: 1488856 - RNA, 22 nt, Hepatitis E virus
uuuauuugcuugugccccccuu

SEQ ID NO: 1488857 - RNA, 21 nt, Hepatitis E virus
augcugcccgcgccaccgccc

SEQ ID NO: 1488858 - RNA, 21 nt, Hepatitis E virus
ccgcuccucuuagcccgcuuc

SEQ ID NO: 1488859 - RNA, 18 nt, Hepatitis E virus
uacgccgcuccucuuagc

SEQ ID NO: 1488860 - RNA, 17 nt, Hepatitis E virus
gcuggggccgcgccgcu

SEQ ID NO: 1488861 - RNA, 22 nt, Hepatitis E virus
cgcugagcuucagcgccuuaag

SEQ ID NO: 1488862 - RNA, 13 nt, Hepatitis E virus
caccaccacggcu

SEQ ID NO: 1488863 - RNA, 16 nt, Hepatitis E virus
ccguuacuccagcacu

SEQ ID NO: 1488864 - RNA, 13 nt, Hepatitis E virus
ggcugguggccag

SEQ ID NO: 1488865 - RNA, 17 nt, Hepatitis E virus
ugcuugugccccccuuc

SEQ ID NO: 1488866 - RNA, 20 nt, Hepatitis E virus
caugaaggaccucuauuuua

SEQ ID NO: 1488867 - RNA, 16 nt, Hepatitis E virus
cccuuggccuccaggg

SEQ ID NO: 1488868 - RNA, 21 nt, Hepatitis E virus
ccuaucaacaucuccccuuac

SEQ ID NO: 1488869 - RNA, 23 nt, Hepatitis E virus
uacggcucuucgaccggcccagu

SEQ ID NO: 1488870 - RNA, 15 nt, Hepatitis E virus
uucuuucuguugcuu

SEQ ID NO: 1488871 - RNA, 18 nt, Hepatitis E virus
cuccaucucguucuggcc

SEQ ID NO: 1488872 - RNA, 20 nt, Hepatitis E virus
ccacggcugcuacccgcuuc

SEQ ID NO: 1488873 - RNA, 21 nt, Hepatitis E virus
ggcccaugacaccccgccagu

SEQ ID NO: 1488874 - RNA, 19 nt, Hepatitis E virus
gcccccuuuccaccaccca

SEQ ID NO: 1488875 - RNA, 20 nt, Hepatitis E virus
cgcccggucagccgucuggc

SEQ ID NO: 1488876 - RNA, 18 nt, Hepatitis E virus
gugccccccuucuuucug

SEQ ID NO: 1488877 - RNA, 12 nt, Hepatitis E virus
caugagcaggac

SEQ ID NO: 1488878 - RNA, 16 nt, Hepatitis E virus
cagcuggggccgcgcc

SEQ ID NO: 1488879 - RNA, 10 nt, Hepatitis E virus
caccacugcu

SEQ ID NO: 1488880 - RNA, 14 nt, Hepatitis E virus
ccucguguucgcca

SEQ ID NO: 1488881 - RNA, 17 nt, Hepatitis E virus
cgccgugggcggcgcag

SEQ ID NO: 1488882 - RNA, 17 nt, Hepatitis E virus
acgucguagaccuacca

SEQ ID NO: 1488883 - RNA, 18 nt, Hepatitis E virus
acaccacuagccugggug

SEQ ID NO: 1488884 - RNA, 15 nt, Hepatitis E virus
gcucguugagaaugc

SEQ ID NO: 1488885 - RNA, 19 nt, Hepatitis E virus
ccgggcugauucucagccc

SEQ ID NO: 1488886 - RNA, 14 nt, Hepatitis E virus
gccaccucuggucu

SEQ ID NO: 1488887 - RNA, 15 nt, Hepatitis E virus
acugucgcugagcuu

SEQ ID NO: 1488888 - RNA, 19 nt, Hepatitis E virus
ucucccguuacuccagcac

SEQ ID NO: 1488889 - RNA, 22 nt, Hepatitis E virus
ucacacuugauggucgcccccu

SEQ ID NO: 1488890 - RNA, 17 nt, Hepatitis E virus
ugucgcugagcuucagc

SEQ ID NO: 1488891 - RNA, 18 nt, Hepatitis E virus
ggccacagaccaccacca

SEQ ID NO: 1488892 - RNA, 20 nt, Hepatitis E virus
ccacagaccaccaccacccc

SEQ ID NO: 1488893 - RNA, 14 nt, Hepatitis E virus
gaccaguccacuua

SEQ ID NO: 1488894 - RNA, 15 nt, Hepatitis E virus
cgcuucuaccccucc

SEQ ID NO: 1488895 - RNA, 17 nt, Hepatitis E virus
gguugcuauuuccacuu

SEQ ID NO: 1488896 - RNA, 12 nt, Hepatitis E virus
auguugacuccc

SEQ ID NO: 1488897 - RNA, 17 nt, Hepatitis E virus
ggcccagcgccccgccg

SEQ ID NO: 1488898 - RNA, 14 nt, Hepatitis E virus
uccugccgcuccgc

SEQ ID NO: 1488899 - RNA, 17 nt, Hepatitis E virus
uaccauggacuacccug

SEQ ID NO: 1488900 - RNA, 17 nt, Hepatitis E virus
augcccaguaccggguu

SEQ ID NO: 1488901 - RNA, 21 nt, Hepatitis E virus
cagcacugcccgucaccgccu

SEQ ID NO: 1488902 - RNA, 20 nt, Hepatitis E virus
gaguaugaccaguccacuua

SEQ ID NO: 1488903 - RNA, 12 nt, Hepatitis E virus
ccacuagccugg

SEQ ID NO: 1488904 - RNA, 17 nt, Hepatitis E virus
ucugcguuccgcgcucc

SEQ ID NO: 1488905 - RNA, 21 nt, Hepatitis E virus
uacaccacuagccugggugcu

SEQ ID NO: 1488906 - RNA, 18 nt, Hepatitis E virus
gcuaaugaugugcuuugg

SEQ ID NO: 1488907 - RNA, 17 nt, Hepatitis E virus
ugcuguuuuagcccccc

SEQ ID NO: 1488908 - RNA, 23 nt, Hepatitis E virus
gcgggucucccguuacuccagca

SEQ ID NO: 1488909 - RNA, 14 nt, Hepatitis E virus
ucgaccggcccagu

SEQ ID NO: 1488910 - RNA, 14 nt, Hepatitis E virus
cugauucucagccc

SEQ ID NO: 1488911 - RNA, 20 nt, Hepatitis E virus
aucucguucuggccacagac

SEQ ID NO: 1488912 - RNA, 15 nt, Hepatitis E virus
cgagcucaccaccac

SEQ ID NO: 1488913 - RNA, 18 nt, Hepatitis E virus
gugaccaggcccagcgcc

SEQ ID NO: 1488914 - RNA, 21 nt, Hepatitis E virus
caugacaccccgccagugccu

SEQ ID NO: 1488915 - RNA, 19 nt, Hepatitis E virus
ggucgcccccuuuccacca

SEQ ID NO: 1488916 - RNA, 12 nt, Hepatitis E virus
accgcugccgag

SEQ ID NO: 1488917 - RNA, 20 nt, Hepatitis E virus
cguugagaaugccgcugggc

SEQ ID NO: 1488918 - RNA, 14 nt, Hepatitis E virus
cagggcugugcuuu

SEQ ID NO: 1488919 - RNA, 19 nt, Hepatitis E virus
uacggcucuucgaccggcc

SEQ ID NO: 1488920 - RNA, 15 nt, Hepatitis E virus
uagcgcuuacccugu

SEQ ID NO: 1488921 - RNA, 14 nt, Hepatitis E virus
uccaucucguucug

SEQ ID NO: 1488922 - RNA, 17 nt, Hepatitis E virus
gcugauucucagcccuu

SEQ ID NO: 1488923 - RNA, 19 nt, Hepatitis E virus
ggcgcgcaggccguugccc

SEQ ID NO: 1488924 - RNA, 13 nt, Hepatitis E virus
gccgcuccgcggu

SEQ ID NO: 1488925 - RNA, 16 nt, Hepatitis E virus
cuugauggucgccccc

SEQ ID NO: 1488926 - RNA, 18 nt, Hepatitis E virus
auuucucauuucugcguu

SEQ ID NO: 1488927 - RNA, 21 nt, Hepatitis E virus
acgucguagaccuaccacagc

SEQ ID NO: 1488928 - RNA, 16 nt, Hepatitis E virus
cuugcugacacccugc

SEQ ID NO: 1488929 - RNA, 21 nt, Hepatitis E virus
cugauguugacucccgcggcg

SEQ ID NO: 1488930 - RNA, 10 nt, Hepatitis E virus
ccuucuuucu

SEQ ID NO: 1488931 - RNA, 16 nt, Hepatitis E virus
cgcccggucagccguc

SEQ ID NO: 1488932 - RNA, 22 nt, Hepatitis E virus
cgugcuacaauucgcuaccgcc

SEQ ID NO: 1488933 - RNA, 15 nt, Hepatitis E virus
uugcuuauuucucau

SEQ ID NO: 1488934 - RNA, 13 nt, Hepatitis E virus
gauggucgccccc

SEQ ID NO: 1488935 - RNA, 23 nt, Hepatitis E virus
gguauugcaaucccgcaugacau

SEQ ID NO: 1488936 - RNA, 21 nt, Hepatitis E virus
gcuugugccccccuucuuucu

SEQ ID NO: 1488937 - RNA, 14 nt, Hepatitis E virus
acaauucgcuaccg

SEQ ID NO: 1488938 - RNA, 20 nt, Hepatitis E virus
cacugcccgucaccgccuuc

SEQ ID NO: 1488939 - RNA, 13 nt, Hepatitis E virus
gcugcgcccaugg

SEQ ID NO: 1488940 - RNA, 19 nt, Hepatitis E virus
gcugccgaguaugaccagu

SEQ ID NO: 1488941 - RNA, 19 nt, Hepatitis E virus
ccucauguuucugccuaug

SEQ ID NO: 1488942 - RNA, 23 nt, Hepatitis E virus
ugccgcccccuuggccuccaggg

SEQ ID NO: 1488943 - RNA, 18 nt, Hepatitis E virus
cguauuuuaguccagccc

SEQ ID NO: 1488944 - RNA, 12 nt, Hepatitis E virus
cccuuuucuguc

SEQ ID NO: 1488945 - RNA, 14 nt, Hepatitis E virus
gcuauuuccacuua

SEQ ID NO: 1488946 - RNA, 21 nt, Hepatitis E virus
ugccccccuucuuucuguugc

SEQ ID NO: 1488947 - RNA, 13 nt, Hepatitis E virus
gacucugugaccu

SEQ ID NO: 1488948 - RNA, 16 nt, Hepatitis E virus
ucuacugucgcugagc

SEQ ID NO: 1488949 - RNA, 19 nt, Hepatitis E virus
cgcccccuuuccaccaccc

SEQ ID NO: 1488950 - RNA, 17 nt, Hepatitis E virus
gaccaaggucacacuug

SEQ ID NO: 1488951 - RNA, 15 nt, Hepatitis E virus
ucaccaccacggcug

SEQ ID NO: 1488952 - RNA, 12 nt, Hepatitis E virus
cucaccgcugcc

SEQ ID NO: 1488953 - RNA, 20 nt, Hepatitis E virus
gcucgacuggaccaagguca

SEQ ID NO: 1488954 - RNA, 20 nt, Hepatitis E virus
accgcccggucagccgucug

SEQ ID NO: 1488955 - RNA, 21 nt, Hepatitis E virus
ugaccuugguuaauguagcga

SEQ ID NO: 1488956 - RNA, 21 nt, Hepatitis E virus
ucgcucgacuggaccaagguc

SEQ ID NO: 1488957 - RNA, 20 nt, Hepatitis E virus
cagcggcgguuccggcggug

SEQ ID NO: 1488958 - RNA, 19 nt, Hepatitis E virus
ccccgaugucaccgcugcg

SEQ ID NO: 1488959 - RNA, 13 nt, Hepatitis E virus
ccccgccgcugcc

SEQ ID NO: 1488960 - RNA, 16 nt, Human
cucuccccaugauguu

SEQ ID NO: 1488961 - RNA, 12 nt, Human
cucguggacacc

SEQ ID NO: 1488962 - RNA, 14 nt, Human
cucguggacaccug

SEQ ID NO: 1488963 - RNA, 15 nt, Human
cucguggacaccugc

SEQ ID NO: 1488964 - RNA, 16 nt, Human
cucguggacaccugcc

SEQ ID NO: 1488965 - RNA, 13 nt, Human
cucugcagguccc

SEQ ID NO: 1488966 - RNA, 18 nt, Human
cuaucucauuuccaagca

SEQ ID NO: 1488967 - RNA, 16 nt, Human
cucagccucucgaagu

SEQ ID NO: 1488968 - RNA, 15 nt, Human
ccugcugcugccugc

SEQ ID NO: 1488969 - RNA, 16 nt, Human
ccugcugcugccugcc

SEQ ID NO: 1488970 - RNA, 17 nt, Human
ccugcugcugccugccu

SEQ ID NO: 1488971 - RNA, 18 nt, Human
ccugcugcugccugccug

SEQ ID NO: 1488972 - RNA, 13 nt, Human
ccuucccugcugu

SEQ ID NO: 1488973 - RNA, 14 nt, Human
ccuugcauaauggu

SEQ ID NO: 1488974 - RNA, 12 nt, Human
ccuuuucccaac

SEQ ID NO: 1488975 - RNA, 19 nt, Human
cuaaguccaguguuucuuu

SEQ ID NO: 1488976 - RNA, 20 nt, Human
cuaaguacacaauaagcaaa

SEQ ID NO: 1488977 - RNA, 19 nt, Human
cuaaguacacaauaagcaa

SEQ ID NO: 1488978 - RNA, 23 nt, Human
cuaaaguaaaaacaaagaaauua

SEQ ID NO: 1488979 - RNA, 23 nt, Human
cguuaucuaauagggcaauuaau

SEQ ID NO: 1488980 - RNA, 23 nt, Human
ccgaaggugaggagcuugaaacc

SEQ ID NO: 1488981 - RNA, 20 nt, Human
cccugaauuuaaauagcuuu

SEQ ID NO: 1488982 - RNA, 15 nt, Human
cccugcccugccacc

SEQ ID NO: 1488983 - RNA, 17 nt, Human
cccugcccugccaccug

SEQ ID NO: 1488984 - RNA, 18 nt, Human
cccugcccugccaccugu

SEQ ID NO: 1488985 - RNA, 20 nt, Human
ccucucugcaggucccuaau

SEQ ID NO: 1488986 - RNA, 18 nt, Human
ccucucugcaggucccua

SEQ ID NO: 1488987 - RNA, 19 nt, Human
ccucucugcaggucccuaa

SEQ ID NO: 1488988 - RNA, 16 nt, Human
ccucucugcagguccc

SEQ ID NO: 1488989 - RNA, 17 nt, Human
ccucucugcaggucccu

SEQ ID NO: 1488990 - RNA, 18 nt, Human
ccucgccggaucugaggg

SEQ ID NO: 1488991 - RNA, 19 nt, Human
ccucgccggaucugaggga

SEQ ID NO: 1488992 - RNA, 17 nt, Human
ccugccucucugcaggu

SEQ ID NO: 1488993 - RNA, 20 nt, Human
ccugccucucugcagguccc

SEQ ID NO: 1488994 - RNA, 21 nt, Human
ccugccucucugcaggucccu

SEQ ID NO: 1488995 - RNA, 23 nt, Human
ccugccuggacuuggccccugcc

SEQ ID NO: 1488996 - RNA, 18 nt, Human
ccaugggcacugugggua

SEQ ID NO: 1488997 - RNA, 18 nt, Human
cccacuguacuugcucuu

SEQ ID NO: 1488998 - RNA, 19 nt, Human
cccacuguacuugcucuug

SEQ ID NO: 1488999 - RNA, 23 nt, Human
cccacuguacuugcucuugaugc

SEQ ID NO: 1489000 - RNA, 20 nt, Human
cccaagcaccugggauuaca

SEQ ID NO: 1489001 - RNA, 20 nt, Human
ccauugugccuaaguccagu

SEQ ID NO: 1489002 - RNA, 22 nt, Human
cccagcuggggccaggcugggu

SEQ ID NO: 1489003 - RNA, 23 nt, Human
cccagcuggggccaggcuggguc

SEQ ID NO: 1489004 - RNA, 17 nt, Human
ccccagccauccagggg

SEQ ID NO: 1489005 - RNA, 15 nt, Human
ccaggggccaugaau

SEQ ID NO: 1489006 - RNA, 18 nt, Human
ccaggcaggagcccuucu

SEQ ID NO: 1489007 - RNA, 15 nt, Human
ccacucuuucuuuca

SEQ ID NO: 1489008 - RNA, 14 nt, Human
ccagagacuuuagg

SEQ ID NO: 1489009 - RNA, 13 nt, Human
auuaugugacauu

SEQ ID NO: 1489010 - RNA, 19 nt, Human
auuaugugacauuuuacau

SEQ ID NO: 1489011 - RNA, 13 nt, Human
auuaugugccaga

SEQ ID NO: 1489012 - RNA, 21 nt, Human
auuaugugccagauuuaugca

SEQ ID NO: 1489013 - RNA, 23 nt, Human
auuaugugccagauuuaugcaua

SEQ ID NO: 1489014 - RNA, 20 nt, Human
auuaugugacauuuuacauu

SEQ ID NO: 1489015 - RNA, 12 nt, Human
auucaauaaagc

SEQ ID NO: 1489016 - RNA, 13 nt, Human
auucaauaaagcu

SEQ ID NO: 1489017 - RNA, 12 nt, Human
auucauuccauu

SEQ ID NO: 1489018 - RNA, 17 nt, Human
auucauuccauucugga

SEQ ID NO: 1489019 - RNA, 19 nt, Human
auucauuccauucuggaag

SEQ ID NO: 1489020 - RNA, 18 nt, Human
auucauuccauucuggaa

SEQ ID NO: 1489021 - RNA, 17 nt, Human
auucguuaucuaauagg

SEQ ID NO: 1489022 - RNA, 22 nt, Human
auugaggacacugauauggguc

SEQ ID NO: 1489023 - RNA, 21 nt, Human
auuaacaugaauauuuagugu

SEQ ID NO: 1489024 - RNA, 17 nt, Human
auuaaauuuuuuuuaca

SEQ ID NO: 1489025 - RNA, 18 nt, Human
auuaaauuuuuuuuacau

SEQ ID NO: 1489026 - RNA, 19 nt, Human
auuaaauuuuuuuuacauu

SEQ ID NO: 1489027 - RNA, 20 nt, Human
auuaaauuuuuuuuacauuu

SEQ ID NO: 1489028 - RNA, 22 nt, Human
auuuaauagguuuggacaaaau

SEQ ID NO: 1489029 - RNA, 14 nt, Human
auugagguaaguuu

SEQ ID NO: 1489030 - RNA, 16 nt, Human
auugagguaaguuuuu

SEQ ID NO: 1489031 - RNA, 22 nt, Human
auuuguguugaagagguuuuaa

SEQ ID NO: 1489032 - RNA, 18 nt, Human
auuuguguugaagagguu

SEQ ID NO: 1489033 - RNA, 15 nt, Human
auuuguguugaagag

SEQ ID NO: 1489034 - RNA, 14 nt, Human
auuuguguugaaga

SEQ ID NO: 1489035 - RNA, 19 nt, Human
auuuguucuauagcuuuuc

SEQ ID NO: 1489036 - RNA, 17 nt, Human
auuuucuauaauuuaaa

SEQ ID NO: 1489037 - RNA, 18 nt, Human
auuuucuauaauuuaaau

SEQ ID NO: 1489038 - RNA, 19 nt, Human
auuuucuauaauuuaaaua

SEQ ID NO: 1489039 - RNA, 13 nt, Human
auuuugaaaaacu

SEQ ID NO: 1489040 - RNA, 15 nt, Human
auuuugaaaaacugc

SEQ ID NO: 1489041 - RNA, 20 nt, Human
caaaccacuuuuugcagcuu

SEQ ID NO: 1489042 - RNA, 15 nt, Human
caaaagcccauucau

SEQ ID NO: 1489043 - RNA, 19 nt, Human
caaaagcccauucauucca

SEQ ID NO: 1489044 - RNA, 14 nt, Human
auuuuuuuuacauu

SEQ ID NO: 1489045 - RNA, 19 nt, Human
auuuuuuucccaauugaga

SEQ ID NO: 1489046 - RNA, 17 nt, Human
auuuuuuucugaaauuu

SEQ ID NO: 1489047 - RNA, 16 nt, Human
auuuuuuucugaaauu

SEQ ID NO: 1489048 - RNA, 15 nt, Human
auuuuuuucugaauu

SEQ ID NO: 1489049 - RNA, 19 nt, Human
auuuuuauauuugaaauau

SEQ ID NO: 1489050 - RNA, 14 nt, Human
caagcaaguauuag

SEQ ID NO: 1489051 - RNA, 14 nt, Human
caagcaauccuccc

SEQ ID NO: 1489052 - RNA, 15 nt, Human
caagcaaaugugaau

SEQ ID NO: 1489053 - RNA, 17 nt, Human
caagcaaaugugaauca

SEQ ID NO: 1489054 - RNA, 19 nt, Human
caagcaaaugugaaucauu

SEQ ID NO: 1489055 - RNA, 12 nt, Human
caacuccagaaa

SEQ ID NO: 1489056 - RNA, 14 nt, Human
caacuauggccugu

SEQ ID NO: 1489057 - RNA, 13 nt, Human
caacuauggccug

SEQ ID NO: 1489058 - RNA, 19 nt, Human
caacuaucucauuuccaag

SEQ ID NO: 1489059 - RNA, 19 nt, Human
caacuauauuguuugcuaa

SEQ ID NO: 1489060 - RNA, 17 nt, Human
caaucagccuaguugau

SEQ ID NO: 1489061 - RNA, 10 nt, Human
caaguaaaaa

SEQ ID NO: 1489062 - RNA, 15 nt, Human
caaguaaaaaggcua

SEQ ID NO: 1489063 - RNA, 20 nt, Human
caaguuauuuuuaauuuggu

SEQ ID NO: 1489064 - RNA, 21 nt, Human
caaguuccuuggccaugcaga

SEQ ID NO: 1489065 - RNA, 16 nt, Human
cacccagcaauagaga

SEQ ID NO: 1489066 - RNA, 20 nt, Human
cacccaggcuggacugcaau

SEQ ID NO: 1489067 - RNA, 20 nt, Human
cacccagguuggagugcagu

SEQ ID NO: 1489068 - RNA, 13 nt, Human
cacccagcaauag

SEQ ID NO: 1489069 - RNA, 16 nt, Human
cacaugaaguccaagc

SEQ ID NO: 1489070 - RNA, 23 nt, Human
cacugaagaagcaccaaucauga

SEQ ID NO: 1489071 - RNA, 14 nt, Human
caccugcccugccc

SEQ ID NO: 1489072 - RNA, 16 nt, Human
caccugcccugcccug

SEQ ID NO: 1489073 - RNA, 17 nt, Human
cacccucguggacaccu

SEQ ID NO: 1489074 - RNA, 18 nt, Human
cacccucguggacaccug

SEQ ID NO: 1489075 - RNA, 19 nt, Human
cacccucguggacaccugc

SEQ ID NO: 1489076 - RNA, 12 nt, Human
caccugcccugc

SEQ ID NO: 1489077 - RNA, 13 nt, Human
caccugcccugcc

SEQ ID NO: 1489078 - RNA, 20 nt, Human
caggaaagagaacuuccaga

SEQ ID NO: 1489079 - RNA, 16 nt, Human
caggaaagagaacuuc

SEQ ID NO: 1489080 - RNA, 20 nt, Human
cagcuuauugucuagugaaa

SEQ ID NO: 1489081 - RNA, 14 nt, Human
cagcuuauugucua

SEQ ID NO: 1489082 - RNA, 20 nt, Human
cagcuguaugauucccagcc

SEQ ID NO: 1489083 - RNA, 20 nt, Human
caggccggcuugccacaccc

SEQ ID NO: 1489084 - RNA, 22 nt, Human
cagggagacuggguaggaaaga

SEQ ID NO: 1489085 - RNA, 17 nt, Human
cagagacuuuagggggu

SEQ ID NO: 1489086 - RNA, 20 nt, Human
cagagcugauggagaaggaa

SEQ ID NO: 1489087 - RNA, 21 nt, Human
cagagcugauggagaaggaag

SEQ ID NO: 1489088 - RNA, 19 nt, Human
cagagcugauggagaagga

SEQ ID NO: 1489089 - RNA, 22 nt, Human
cagagcugauggagaaggaagg

SEQ ID NO: 1489090 - RNA, 14 nt, Human
cagauaugauucaa

SEQ ID NO: 1489091 - RNA, 13 nt, Human
cagauuuaugcau

SEQ ID NO: 1489092 - RNA, 14 nt, Human
cagauuuccagccu

SEQ ID NO: 1489093 - RNA, 14 nt, Human
cagauuucugagga

SEQ ID NO: 1489094 - RNA, 15 nt, Human
cagauuucugaggaa

SEQ ID NO: 1489095 - RNA, 17 nt, Human
cagauuucugaggaaau

SEQ ID NO: 1489096 - RNA, 21 nt, Human
cauguuaaccccuccacucuu

SEQ ID NO: 1489097 - RNA, 16 nt, Human
cauggcccugccaugc

SEQ ID NO: 1489098 - RNA, 16 nt, Human
caugaauuugugaagg

SEQ ID NO: 1489099 - RNA, 21 nt, Human
caugaauauuuaguguucaua

SEQ ID NO: 1489100 - RNA, 16 nt, Human
cauuuguauaaaauaa

SEQ ID NO: 1489101 - RNA, 14 nt, Human
cauuuguauaaaau

SEQ ID NO: 1489102 - RNA, 17 nt, Human
cauuuguauaaaauaau

SEQ ID NO: 1489103 - RNA, 12 nt, Human
ccaaaaaacuac

SEQ ID NO: 1489104 - RNA, 16 nt, Human
cauuggagauguuuag

SEQ ID NO: 1489105 - RNA, 19 nt, Human
ccaaaguccugggauuaca

SEQ ID NO: 1489106 - RNA, 16 nt, Human
ccaacuauggccugug

SEQ ID NO: 1489107 - RNA, 14 nt, Human
ccaacuauggccug

SEQ ID NO: 1489108 - RNA, 15 nt, Human
ccaacuauggccugu

SEQ ID NO: 1489109 - RNA, 20 nt, Human
ccaaaucacugaacuuugcu

SEQ ID NO: 1489110 - RNA, 21 nt, Human
ccaacuccagaaagugacaag

SEQ ID NO: 1489111 - RNA, 17 nt, Human
caguuauuauauuuaca

SEQ ID NO: 1489112 - RNA, 21 nt, Human
caguuauuauauuuacaaaug

SEQ ID NO: 1489113 - RNA, 19 nt, Human
cagucucuauaccaauaaa

SEQ ID NO: 1489114 - RNA, 20 nt, Human
cagucucuauaccaauaaag

SEQ ID NO: 1489115 - RNA, 21 nt, Human
cagucucuauaccaauaaagu

SEQ ID NO: 1489116 - RNA, 22 nt, Human
cagucucuauaccaauaaagug

SEQ ID NO: 1489117 - RNA, 23 nt, Human
cagucucuauaccaauaaaguga

SEQ ID NO: 1489118 - RNA, 17 nt, Human
cagucucuauaccaaua

SEQ ID NO: 1489119 - RNA, 22 nt, Human
caguuauuauauuuacaaaugg

SEQ ID NO: 1489120 - RNA, 15 nt, Human
caguucaaagcagga

SEQ ID NO: 1489121 - RNA, 18 nt, Human
caguuuauuugaaccaau

SEQ ID NO: 1489122 - RNA, 19 nt, Human
caguuuauuugaaccaaua

SEQ ID NO: 1489123 - RNA, 18 nt, Human
cauaauuauuauuuggcc

SEQ ID NO: 1489124 - RNA, 16 nt, Human
cauagguuuaauaauu

SEQ ID NO: 1489125 - RNA, 21 nt, Human
cauauuauuuuauguugcaua

SEQ ID NO: 1489126 - RNA, 16 nt, Human
caucuggauuccagag

SEQ ID NO: 1489127 - RNA, 19 nt, Human
caucagaaacacccucaca

SEQ ID NO: 1489128 - RNA, 17 nt, Human
caucagaaacacccuca

SEQ ID NO: 1489129 - RNA, 22 nt, Human
gccugccuccccugccucacca

SEQ ID NO: 1489130 - RNA, 22 nt, Human
gcccccaguaucucuucagucu

SEQ ID NO: 1489131 - RNA, 20 nt, Human
gccauucuccugccucagcc

SEQ ID NO: 1489132 - RNA, 21 nt, Human
gccagccacggggacucagcc

SEQ ID NO: 1489133 - RNA, 13 nt, Human
gccagaccaugga

SEQ ID NO: 1489134 - RNA, 16 nt, Human
gccagaccauggacac

SEQ ID NO: 1489135 - RNA, 17 nt, Human
gccagaccauggacacu

SEQ ID NO: 1489136 - RNA, 13 nt, Human
gccacccucaugc

SEQ ID NO: 1489137 - RNA, 15 nt, Human
gccacccucaugcug

SEQ ID NO: 1489138 - RNA, 16 nt, Human
gccacccucaugcugu

SEQ ID NO: 1489139 - RNA, 21 nt, Human
gcuaguaauuggaaaggcagc

SEQ ID NO: 1489140 - RNA, 14 nt, Human
gcucaggagcccug

SEQ ID NO: 1489141 - RNA, 21 nt, Human
gcucaggagcccugggaggcu

SEQ ID NO: 1489142 - RNA, 15 nt, Human
gcucaggagcccugg

SEQ ID NO: 1489143 - RNA, 18 nt, Human
gcucaggagcccugggag

SEQ ID NO: 1489144 - RNA, 23 nt, Human
gcucuggagcccacuguacuugc

SEQ ID NO: 1489145 - RNA, 12 nt, Human
gcugcugccugc

SEQ ID NO: 1489146 - RNA, 16 nt, Human
gcugcugccugccugg

SEQ ID NO: 1489147 - RNA, 12 nt, Human
gcuggagugcag

SEQ ID NO: 1489148 - RNA, 14 nt, Human
gcuggagugcagug

SEQ ID NO: 1489149 - RNA, 16 nt, Human
gcugggucgcccugga

SEQ ID NO: 1489150 - RNA, 17 nt, Human
gcugggucgcccuggac

SEQ ID NO: 1489151 - RNA, 18 nt, Human
gcugggucgcccuggacu

SEQ ID NO: 1489152 - RNA, 19 nt, Human
gcugggucgcccuggacug

SEQ ID NO: 1489153 - RNA, 19 nt, Human
gcuugaaacccguggcgcu

SEQ ID NO: 1489154 - RNA, 14 nt, Human
gcuucccuuuccug

SEQ ID NO: 1489155 - RNA, 23 nt, Human
ggaugguucccuugaugaagaag

SEQ ID NO: 1489156 - RNA, 22 nt, Human
ggaugguucccuugaugaagaa

SEQ ID NO: 1489157 - RNA, 20 nt, Human
ggcagagaagaaagaacgga

SEQ ID NO: 1489158 - RNA, 23 nt, Human
ggagcagagcugauggagaagga

SEQ ID NO: 1489159 - RNA, 15 nt, Human
ggagcccacuguacu

SEQ ID NO: 1489160 - RNA, 19 nt, Human
ggagcagagcugauggaga

SEQ ID NO: 1489161 - RNA, 21 nt, Human
ggaggcucuggagcccacugu

SEQ ID NO: 1489162 - RNA, 19 nt, Human
ggaggaaccagagugcuga

SEQ ID NO: 1489163 - RNA, 17 nt, Human
ggaggcucuggagccca

SEQ ID NO: 1489164 - RNA, 20 nt, Human
ggaggcucuggagcccacug

SEQ ID NO: 1489165 - RNA, 18 nt, Human
ggagcccacuguacuugc

SEQ ID NO: 1489166 - RNA, 22 nt, Human
ggagcccacuguacuugcucuu

SEQ ID NO: 1489167 - RNA, 22 nt, Human
ggacugugugcucaggagcccu

SEQ ID NO: 1489168 - RNA, 23 nt, Human
ggacugugugcucaggagcccug

SEQ ID NO: 1489169 - RNA, 17 nt, Human
ggaccccagccauccag

SEQ ID NO: 1489170 - RNA, 17 nt, Human
ggcuccuauucaacaca

SEQ ID NO: 1489171 - RNA, 23 nt, Human
ggcuccuccaggguggcagcaac

SEQ ID NO: 1489172 - RNA, 21 nt, Human
ggcugggaauggaggggcaga

SEQ ID NO: 1489173 - RNA, 22 nt, Human
ggcugggaauggaggggcagag

SEQ ID NO: 1489174 - RNA, 17 nt, Human
aaaacuacuucuuuuuu

SEQ ID NO: 1489175 - RNA, 19 nt, Human
aaaacugcucauaugaugu

SEQ ID NO: 1489176 - RNA, 19 nt, Human
aaaaauuaucuauagcuaa

SEQ ID NO: 1489177 - RNA, 21 nt, Human
aaaaauuaaaccggaccaucu

SEQ ID NO: 1489178 - RNA, 17 nt, Human
gggacugcggaggaagg

SEQ ID NO: 1489179 - RNA, 22 nt, Human
aaaagcuccauuuuuagugaaa

SEQ ID NO: 1489180 - RNA, 16 nt, Human
aaaagccuguuuaaga

SEQ ID NO: 1489181 - RNA, 18 nt, Human
aaaagccuguuuaagaga

SEQ ID NO: 1489182 - RNA, 23 nt, Human
aaaauaauuuuuauauuugaaau

SEQ ID NO: 1489183 - RNA, 21 nt, Human
aaaauaauuuuuauauuugaa

SEQ ID NO: 1489184 - RNA, 13 nt, Human
aaaauauauacua

SEQ ID NO: 1489185 - RNA, 17 nt, Human
aaaauauauacuaaaca

SEQ ID NO: 1489186 - RNA, 18 nt, Human
aaaauauauaucaaauau

SEQ ID NO: 1489187 - RNA, 14 nt, Human
aaaauauauacuaa

SEQ ID NO: 1489188 - RNA, 16 nt, Human
gggcagcaauuuaaau

SEQ ID NO: 1489189 - RNA, 13 nt, Human
gggcagagccagg

SEQ ID NO: 1489190 - RNA, 14 nt, Human
gggcagagccagga

SEQ ID NO: 1489191 - RNA, 16 nt, Human
gggcagagccaggaag

SEQ ID NO: 1489192 - RNA, 16 nt, Human
aaaagggacugagaaa

SEQ ID NO: 1489193 - RNA, 19 nt, Human
aaaagggacugagaaauuu

SEQ ID NO: 1489194 - RNA, 15 nt, Human
aaaggaaagaaaaca

SEQ ID NO: 1489195 - RNA, 16 nt, Human
aaaggaaagaaaacau

SEQ ID NO: 1489196 - RNA, 13 nt, Human
aaaggaauuuaaa

SEQ ID NO: 1489197 - RNA, 14 nt, Human
aaaggacaucagca

SEQ ID NO: 1489198 - RNA, 16 nt, Human
aaaggacaucagcaaa

SEQ ID NO: 1489199 - RNA, 15 nt, Human
aaaggacaucagcaa

SEQ ID NO: 1489200 - RNA, 17 nt, Human
aaagcuauauaagacaa

SEQ ID NO: 1489201 - RNA, 17 nt, Human
aaagcuacuuauuguag

SEQ ID NO: 1489202 - RNA, 16 nt, Human
aaagcuacuuauugua

SEQ ID NO: 1489203 - RNA, 17 nt, Human
ggugcacuggccccacc

SEQ ID NO: 1489204 - RNA, 17 nt, Human
gguauucguuaucuaau

SEQ ID NO: 1489205 - RNA, 16 nt, Human
aaagaaugauuaugaa

SEQ ID NO: 1489206 - RNA, 18 nt, Human
aaagagaacuuccagauc

SEQ ID NO: 1489207 - RNA, 15 nt, Human
aaacgucuuaaauau

SEQ ID NO: 1489208 - RNA, 15 nt, Human
aaacuacauauugua

SEQ ID NO: 1489209 - RNA, 21 nt, Human
aaaccacauuggagauguuua

SEQ ID NO: 1489210 - RNA, 19 nt, Human
aaacauguuuccacuauug

SEQ ID NO: 1489211 - RNA, 19 nt, Human
aaacauguuucuuuguaau

SEQ ID NO: 1489212 - RNA, 22 nt, Human
aaacauguuucuuuguaaugaa

SEQ ID NO: 1489213 - RNA, 23 nt, Human
aaacauguuucuuuguaaugaaa

SEQ ID NO: 1489214 - RNA, 18 nt, Human
aaaccaaaucacugaacu

SEQ ID NO: 1489215 - RNA, 23 nt, Human
ggggucucuucugaauaaagcaa

SEQ ID NO: 1489216 - RNA, 16 nt, Human
ggggccaggcuggguc

SEQ ID NO: 1489217 - RNA, 13 nt, Human
ggggccaggcugg

SEQ ID NO: 1489218 - RNA, 14 nt, Human
ggggccaggcuggg

SEQ ID NO: 1489219 - RNA, 21 nt, Human
aaacauauauaacaaugcugu

SEQ ID NO: 1489220 - RNA, 19 nt, Human
aaacauauauaacaaugcu

SEQ ID NO: 1489221 - RNA, 16 nt, Human
aaacauauauaacaau

SEQ ID NO: 1489222 - RNA, 13 nt, Human
aaacauauauaac

SEQ ID NO: 1489223 - RNA, 19 nt, Human
aaacaagucagucauucag

SEQ ID NO: 1489224 - RNA, 14 nt, Human
aaacacaacuauau

SEQ ID NO: 1489225 - RNA, 12 nt, Human
aaaauggaauac

SEQ ID NO: 1489226 - RNA, 17 nt, Human
aaacaaggaugaauuaa

SEQ ID NO: 1489227 - RNA, 13 nt, Human
aaacaaagaaauu

SEQ ID NO: 1489228 - RNA, 16 nt, Human
aaaauuuuuaaucuuu

SEQ ID NO: 1489229 - RNA, 22 nt, Human
aaaauuuuuucucuaggaaaua

SEQ ID NO: 1489230 - RNA, 19 nt, Human
aaaauuuuuucucuaggaa

SEQ ID NO: 1489231 - RNA, 19 nt, Human
aaaauuuuuaaucuuuaau

SEQ ID NO: 1489232 - RNA, 14 nt, Human
gaagcaaaauuuuu

SEQ ID NO: 1489233 - RNA, 20 nt, Human
gaagcaaguaaaaaggcuaa

SEQ ID NO: 1489234 - RNA, 20 nt, Human
gaagcaaugcuucaucccuu

SEQ ID NO: 1489235 - RNA, 14 nt, Human
gaacugaaaucaua

SEQ ID NO: 1489236 - RNA, 20 nt, Human
gaacccuaaauaauaaaaau

SEQ ID NO: 1489237 - RNA, 21 nt, Human
gaaguugacuuauaguacaug

SEQ ID NO: 1489238 - RNA, 23 nt, Human
gaaguugacuuauaguacaugau

SEQ ID NO: 1489239 - RNA, 20 nt, Human
gaagcuaucguaaaauuaag

SEQ ID NO: 1489240 - RNA, 14 nt, Human
gacugaauuaugaa

SEQ ID NO: 1489241 - RNA, 20 nt, Human
gacugaauuaugaaacuuuu

SEQ ID NO: 1489242 - RNA, 22 nt, Human
gacugugugcucaggagcccug

SEQ ID NO: 1489243 - RNA, 19 nt, Human
gacugaaaauauuguuuua

SEQ ID NO: 1489244 - RNA, 21 nt, Human
gacucuuaagaagacugcauu

SEQ ID NO: 1489245 - RNA, 15 nt, Human
gacucuuaagaagac

SEQ ID NO: 1489246 - RNA, 14 nt, Human
gacucuuaagaaga

SEQ ID NO: 1489247 - RNA, 16 nt, Human
gacacacugaagaagc

SEQ ID NO: 1489248 - RNA, 15 nt, Human
gacacacugaagaag

SEQ ID NO: 1489249 - RNA, 17 nt, Human
gacauuugcucauggaa

SEQ ID NO: 1489250 - RNA, 16 nt, Human
gacauuugcucaugga

SEQ ID NO: 1489251 - RNA, 23 nt, Human
gacauugaccuauuuccagaaau

SEQ ID NO: 1489252 - RNA, 20 nt, Human
gagcuggagaugaggccaga

SEQ ID NO: 1489253 - RNA, 12 nt, Human
gaggccagacca

SEQ ID NO: 1489254 - RNA, 18 nt, Human
gaggccagaccauggaca

SEQ ID NO: 1489255 - RNA, 16 nt, Human
gaguuuaaauuguaau

SEQ ID NO: 1489256 - RNA, 17 nt, Human
gagucacuacgccuggc

SEQ ID NO: 1489257 - RNA, 16 nt, Human
gaggugagaccaccuc

SEQ ID NO: 1489258 - RNA, 15 nt, Human
gaggugagaccaccu

SEQ ID NO: 1489259 - RNA, 21 nt, Human
gauuuuuuucccaauugagaa

SEQ ID NO: 1489260 - RNA, 22 nt, Human
gcaauagucaaauugugugaaa

SEQ ID NO: 1489261 - RNA, 18 nt, Human
gcaagucagaauagaaau

SEQ ID NO: 1489262 - RNA, 20 nt, Human
gcaaguauuagaauaccaca

SEQ ID NO: 1489263 - RNA, 12 nt, Human
gauggagaagga

SEQ ID NO: 1489264 - RNA, 13 nt, Human
gauggagaaggaa

SEQ ID NO: 1489265 - RNA, 14 nt, Human
gauggagaaggaag

SEQ ID NO: 1489266 - RNA, 16 nt, Human
gauggagaaggaaggc

SEQ ID NO: 1489267 - RNA, 15 nt, Human
gauggagaaggaagg

SEQ ID NO: 1489268 - RNA, 15 nt, Human
gauuuaccacuugug

SEQ ID NO: 1489269 - RNA, 16 nt, Human
gauuuaccacuugugu

SEQ ID NO: 1489270 - RNA, 14 nt, Human
gauuauauuaugaa

SEQ ID NO: 1489271 - RNA, 20 nt, Human
cuucuguuuuauaauuuugu

SEQ ID NO: 1489272 - RNA, 15 nt, Human
cuucuguuuuauaau

SEQ ID NO: 1489273 - RNA, 15 nt, Human
cuuggccaugcagaa

SEQ ID NO: 1489274 - RNA, 18 nt, Human
cuuggccaugcagaaagc

SEQ ID NO: 1489275 - RNA, 20 nt, Human
cuuuaaggggaggaaccaga

SEQ ID NO: 1489276 - RNA, 23 nt, Human
cuugugauccacucgccucagcc

SEQ ID NO: 1489277 - RNA, 23 nt, Human
cuucaugcugucuacacuaagag

SEQ ID NO: 1489278 - RNA, 21 nt, Human
cuucaugcauggaaauucccu

SEQ ID NO: 1489279 - RNA, 23 nt, Human
cuucaugcauggaaauucccuuc

SEQ ID NO: 1489280 - RNA, 15 nt, Human
cugcugugaaagaag

SEQ ID NO: 1489281 - RNA, 12 nt, Human
cugcuuaauuca

SEQ ID NO: 1489282 - RNA, 13 nt, Human
cugcuuaauucaa

SEQ ID NO: 1489283 - RNA, 19 nt, Human
cuggacugugugcucagga

SEQ ID NO: 1489284 - RNA, 22 nt, Human
cuggacugugugcucaggagcc

SEQ ID NO: 1489285 - RNA, 23 nt, Human
cuggacugugugcucaggagccc

SEQ ID NO: 1489286 - RNA, 17 nt, Human
cugggagaaaugaaaaa

SEQ ID NO: 1489287 - RNA, 18 nt, Human
cugggacuugcaaaaagg

SEQ ID NO: 1489288 - RNA, 16 nt, Human
cugggagaaaugaaaa

SEQ ID NO: 1489289 - RNA, 13 nt, Human
cugauggagaagg

SEQ ID NO: 1489290 - RNA, 14 nt, Human
cugauggagaagga

SEQ ID NO: 1489291 - RNA, 15 nt, Human
cugauggagaaggaa

SEQ ID NO: 1489292 - RNA, 16 nt, Human
cugauggagaaggaag

SEQ ID NO: 1489293 - RNA, 17 nt, Human
cugauggagaaggaagg

SEQ ID NO: 1489294 - RNA, 18 nt, Human
cucuuauaucuauauuuu

SEQ ID NO: 1489295 - RNA, 15 nt, Human
cucuuauaucuauau

SEQ ID NO: 1489296 - RNA, 14 nt, Human
cugcaaccuccacc

SEQ ID NO: 1489297 - RNA, 16 nt, Human
cugcaaccuccaccuc

SEQ ID NO: 1489298 - RNA, 18 nt, Human
aacauuugguaaggggaa

SEQ ID NO: 1489299 - RNA, 20 nt, Human
aacauuuguucuauagcuuu

SEQ ID NO: 1489300 - RNA, 22 nt, Human
aacauuuguucuauagcuuuuc

SEQ ID NO: 1489301 - RNA, 19 nt, Human
aacaguuguguuugaagca

SEQ ID NO: 1489302 - RNA, 23 nt, Human
aaauuuuuaaucuuuaauuuuac

SEQ ID NO: 1489303 - RNA, 17 nt, Human
aaauuuuuguaguagcg

SEQ ID NO: 1489304 - RNA, 21 nt, Human
aacaagccuccuuuuaaagua

SEQ ID NO: 1489305 - RNA, 15 nt, Human
aacaaggaugaauua

SEQ ID NO: 1489306 - RNA, 18 nt, Human
aacaagucagucauucag

SEQ ID NO: 1489307 - RNA, 15 nt, Human
aacaagucagucauu

SEQ ID NO: 1489308 - RNA, 14 nt, Human
aacaaugcuguauu

SEQ ID NO: 1489309 - RNA, 21 nt, Human
guccaagcauuuagauguaua

SEQ ID NO: 1489310 - RNA, 19 nt, Human
gucuuauauauuguagaua

SEQ ID NO: 1489311 - RNA, 14 nt, Human
gucuuccucugucu

SEQ ID NO: 1489312 - RNA, 18 nt, Human
aacucguuaauuuguagu

SEQ ID NO: 1489313 - RNA, 21 nt, Human
aacuccagaaagugacaagcu

SEQ ID NO: 1489314 - RNA, 14 nt, Human
aacuccagaaagug

SEQ ID NO: 1489315 - RNA, 20 nt, Human
aaccuagggugauauuaacc

SEQ ID NO: 1489316 - RNA, 20 nt, Human
aaccacauuggagauguuua

SEQ ID NO: 1489317 - RNA, 10 nt, Human
aaccaaguuc

SEQ ID NO: 1489318 - RNA, 20 nt, Human
gucuccuaagcuggagugca

SEQ ID NO: 1489319 - RNA, 14 nt, Human
gucaaaaauuaaac

SEQ ID NO: 1489320 - RNA, 13 nt, Human
gucaaaaauuaaa

SEQ ID NO: 1489321 - RNA, 23 nt, Human
gucaaaaauuaaaccggaccauc

SEQ ID NO: 1489322 - RNA, 19 nt, Human
gucaacucauauuuucaug

SEQ ID NO: 1489323 - RNA, 16 nt, Human
gucaaauugugugaaa

SEQ ID NO: 1489324 - RNA, 22 nt, Human
aaauuuccugggagcuuuugua

SEQ ID NO: 1489325 - RNA, 20 nt, Human
aaauuuaguauuuuguuuca

SEQ ID NO: 1489326 - RNA, 18 nt, Human
aaauucccuucaucugga

SEQ ID NO: 1489327 - RNA, 17 nt, Human
aaauuucagcagcugca

SEQ ID NO: 1489328 - RNA, 18 nt, Human
aaauuucagcagcugcag

SEQ ID NO: 1489329 - RNA, 16 nt, Human
aaauucccuucaucug

SEQ ID NO: 1489330 - RNA, 19 nt, Human
aaauucccuucaucuggaa

SEQ ID NO: 1489331 - RNA, 22 nt, Human
aaauguuaugacuauguaaacu

SEQ ID NO: 1489332 - RNA, 20 nt, Human
guauuuaauagguuuggaca

SEQ ID NO: 1489333 - RNA, 16 nt, Human
guauuuaauucauguu

SEQ ID NO: 1489334 - RNA, 17 nt, Human
guauaaaagccuguuua

SEQ ID NO: 1489335 - RNA, 18 nt, Human
guauaaaagccuguuuaa

SEQ ID NO: 1489336 - RNA, 21 nt, Human
guauaaaagccuguuuaagag

SEQ ID NO: 1489337 - RNA, 18 nt, Human
guauaaaagggacugaga

SEQ ID NO: 1489338 - RNA, 17 nt, Human
guauauuacaaugauca

SEQ ID NO: 1489339 - RNA, 15 nt, Human
guauauuacaaugau

SEQ ID NO: 1489340 - RNA, 18 nt, Human
guauauuacaaugaucac

SEQ ID NO: 1489341 - RNA, 22 nt, Human
guauauugauccagaaagaaaa

SEQ ID NO: 1489342 - RNA, 14 nt, Human
guaugauucccagc

SEQ ID NO: 1489343 - RNA, 21 nt, Human
guauggguuagggaaaacauu

SEQ ID NO: 1489344 - RNA, 14 nt, Human
aaaugcauuucuaa

SEQ ID NO: 1489345 - RNA, 19 nt, Human
aaauggcuuccuggcaaua

SEQ ID NO: 1489346 - RNA, 13 nt, Human
aaaugcauguugc

SEQ ID NO: 1489347 - RNA, 13 nt, Human
aaaugagaaaucu

SEQ ID NO: 1489348 - RNA, 14 nt, Human
aaaugagaaaucua

SEQ ID NO: 1489349 - RNA, 16 nt, Human
aaaugagaaaucuaaa

SEQ ID NO: 1489350 - RNA, 11 nt, Human
aaaugagaaau

SEQ ID NO: 1489351 - RNA, 14 nt, Human
aaauccuugaagau

SEQ ID NO: 1489352 - RNA, 13 nt, Human
aaaggacuguaau

SEQ ID NO: 1489353 - RNA, 16 nt, Human
guaggaaagaggaagc

SEQ ID NO: 1489354 - RNA, 18 nt, Human
aagaaugauuaugaauua

SEQ ID NO: 1489355 - RNA, 23 nt, Human
aagacaaaaagcuacuuauugua

SEQ ID NO: 1489356 - RNA, 20 nt, Human
aagacaaaaagcuacuuauu

SEQ ID NO: 1489357 - RNA, 16 nt, Human
aagaaugauuaugaau

SEQ ID NO: 1489358 - RNA, 15 nt, Human
gugcucaggagcccu

SEQ ID NO: 1489359 - RNA, 16 nt, Human
gugcucaggagcccug

SEQ ID NO: 1489360 - RNA, 15 nt, Human
aacuuguauuaugug

SEQ ID NO: 1489361 - RNA, 16 nt, Human
aacuuguauuaugugu

SEQ ID NO: 1489362 - RNA, 21 nt, Human
aagaaacuggggcuccuccag

SEQ ID NO: 1489363 - RNA, 17 nt, Human
aagaaacuuguccuucc

SEQ ID NO: 1489364 - RNA, 14 nt, Human
aagaaagaacggaa

SEQ ID NO: 1489365 - RNA, 16 nt, Human
aagaaagaacggaaga

SEQ ID NO: 1489366 - RNA, 13 nt, Human
aagaaauauaccu

SEQ ID NO: 1489367 - RNA, 18 nt, Human
gugcuaguaauuggaaag

SEQ ID NO: 1489368 - RNA, 13 nt, Human
aagaggaagcaaa

SEQ ID NO: 1489369 - RNA, 14 nt, Human
aagaggaagcaaau

SEQ ID NO: 1489370 - RNA, 14 nt, Human
guggguagacacac

SEQ ID NO: 1489371 - RNA, 19 nt, Human
guggcgcgaucucagcuca

SEQ ID NO: 1489372 - RNA, 21 nt, Human
gugggacagucaccucaugga

SEQ ID NO: 1489373 - RNA, 19 nt, Human
guggcgugaucucagcuca

SEQ ID NO: 1489374 - RNA, 17 nt, Human
gugggaggugagaccac

SEQ ID NO: 1489375 - RNA, 18 nt, Human
aagagguuuuaaagcuuc

SEQ ID NO: 1489376 - RNA, 14 nt, Human
aagagguuuuaaag

SEQ ID NO: 1489377 - RNA, 17 nt, Human
aagcuaucguaaaauua

SEQ ID NO: 1489378 - RNA, 23 nt, Human
guucugguaugaacuugaggaca

SEQ ID NO: 1489379 - RNA, 16 nt, Human
guucuuacugcuuaau

SEQ ID NO: 1489380 - RNA, 18 nt, Human
guugacaugggacauuug

SEQ ID NO: 1489381 - RNA, 14 nt, Human
guugacaugggaca

SEQ ID NO: 1489382 - RNA, 18 nt, Human
guguuuuaaaaugagaaa

SEQ ID NO: 1489383 - RNA, 19 nt, Human
aagccuccuuagaaaaaaa

SEQ ID NO: 1489384 - RNA, 13 nt, Human
aagguacuucaaa

SEQ ID NO: 1489385 - RNA, 22 nt, Human
aaguaaaaacaaagaaauuaug

SEQ ID NO: 1489386 - RNA, 13 nt, Human
aaguaaaaacaaa

SEQ ID NO: 1489387 - RNA, 20 nt, Human
aaguaaaaacaaagaaauua

SEQ ID NO: 1489388 - RNA, 17 nt, Human
aaggggaauugaggaca

SEQ ID NO: 1489389 - RNA, 21 nt, Human
guuucaaacauauauaacaau

SEQ ID NO: 1489390 - RNA, 11 nt, Human
guuuuacaaua

SEQ ID NO: 1489391 - RNA, 13 nt, Human
guuuuacaauagu

SEQ ID NO: 1489392 - RNA, 16 nt, Human
guuuuacaauaguucu

SEQ ID NO: 1489393 - RNA, 20 nt, Human
guuuuacaauaguucugugg

SEQ ID NO: 1489394 - RNA, 20 nt, Human
guuuucuuaaccagaucauu

SEQ ID NO: 1489395 - RNA, 21 nt, Human
acaaauucugucucuggauua

SEQ ID NO: 1489396 - RNA, 16 nt, Human
uagcuacuaauuuuaa

SEQ ID NO: 1489397 - RNA, 21 nt, Human
uagaugcaguucugaagaaga

SEQ ID NO: 1489398 - RNA, 17 nt, Human
uagauaggccaugggca

SEQ ID NO: 1489399 - RNA, 22 nt, Human
uagauaggucagugcaaauacu

SEQ ID NO: 1489400 - RNA, 12 nt, Human
aauuuuuuuuac

SEQ ID NO: 1489401 - RNA, 16 nt, Human
aauuuuuuuuacauuu

SEQ ID NO: 1489402 - RNA, 22 nt, Human
aauuuuuaaucuuuaauuuuac

SEQ ID NO: 1489403 - RNA, 21 nt, Human
aauuugguuuucacauuggaa

SEQ ID NO: 1489404 - RNA, 15 nt, Human
aauuugguuuucaca

SEQ ID NO: 1489405 - RNA, 13 nt, Human
aauuugguuuuca

SEQ ID NO: 1489406 - RNA, 15 nt, Human
aauuugaaacacuuu

SEQ ID NO: 1489407 - RNA, 19 nt, Human
uacuucuuaggguuaugau

SEQ ID NO: 1489408 - RNA, 20 nt, Human
uacuucuuuuuucaaaagaa

SEQ ID NO: 1489409 - RNA, 22 nt, Human
uacuucuuuuuucaaaagaaag

SEQ ID NO: 1489410 - RNA, 15 nt, Human
uacuugaaaauuaac

SEQ ID NO: 1489411 - RNA, 13 nt, Human
aauuuaguauuuu

SEQ ID NO: 1489412 - RNA, 15 nt, Human
aauuggagcucgugg

SEQ ID NO: 1489413 - RNA, 13 nt, Human
aauuuaaauguua

SEQ ID NO: 1489414 - RNA, 11 nt, Human
aauuuaaaugu

SEQ ID NO: 1489415 - RNA, 17 nt, Human
aauuucuaggacugaau

SEQ ID NO: 1489416 - RNA, 22 nt, Human
aauuucuaggacugaauuauga

SEQ ID NO: 1489417 - RNA, 18 nt, Human
aauuucuaggacugaauu

SEQ ID NO: 1489418 - RNA, 23 nt, Human
aauuucuaggacugaauuaugaa

SEQ ID NO: 1489419 - RNA, 22 nt, Human
aauuuauaaacuuuuuucuuac

SEQ ID NO: 1489420 - RNA, 18 nt, Human
uacuagggaaaugccuuu

SEQ ID NO: 1489421 - RNA, 19 nt, Human
aauugagaaaaauauauac

SEQ ID NO: 1489422 - RNA, 23 nt, Human
aauugagaaaaauauauacuaaa

SEQ ID NO: 1489423 - RNA, 18 nt, Human
aauugaggacacugauau

SEQ ID NO: 1489424 - RNA, 19 nt, Human
uacuguacagacagaaaaa

SEQ ID NO: 1489425 - RNA, 23 nt, Human
uacuguacagacagaaaaaacug

SEQ ID NO: 1489426 - RNA, 22 nt, Human
uacugaaauaaacgucuuaaau

SEQ ID NO: 1489427 - RNA, 19 nt, Human
uacugaaauaaacgucuua

SEQ ID NO: 1489428 - RNA, 20 nt, Human
uauauuuauuacuguaagaa

SEQ ID NO: 1489429 - RNA, 19 nt, Human
uauauuuauuacuguaaga

SEQ ID NO: 1489430 - RNA, 15 nt, Human
uauauuuauuacugu

SEQ ID NO: 1489431 - RNA, 23 nt, Human
acagagcuggagaugaggccaga

SEQ ID NO: 1489432 - RNA, 21 nt, Human
acagcccuucuuuccacagaa

SEQ ID NO: 1489433 - RNA, 20 nt, Human
acagcccuucuuuccacaga

SEQ ID NO: 1489434 - RNA, 12 nt, Human
uauauuuacaaa

SEQ ID NO: 1489435 - RNA, 14 nt, Human
acacugaagaagca

SEQ ID NO: 1489436 - RNA, 12 nt, Human
acacugaagaag

SEQ ID NO: 1489437 - RNA, 18 nt, Human
acaaugcuguauuuuaaa

SEQ ID NO: 1489438 - RNA, 17 nt, Human
acaaugcuguauuuuaa

SEQ ID NO: 1489439 - RNA, 14 nt, Human
acaaugcuguauuu

SEQ ID NO: 1489440 - RNA, 17 nt, Human
acacaacuauauuguuu

SEQ ID NO: 1489441 - RNA, 14 nt, Human
acacaacuauauug

SEQ ID NO: 1489442 - RNA, 13 nt, Human
acacacugaagaa

SEQ ID NO: 1489443 - RNA, 17 nt, Human
uaguguuggagaagaac

SEQ ID NO: 1489444 - RNA, 16 nt, Human
uaguguuggagaagaa

SEQ ID NO: 1489445 - RNA, 12 nt, Human
uaguguuggaga

SEQ ID NO: 1489446 - RNA, 14 nt, Human
acacacugaagaag

SEQ ID NO: 1489447 - RNA, 22 nt, Human
uagguuuggacaaaauggaaua

SEQ ID NO: 1489448 - RNA, 20 nt, Human
uauaaaaauaaaaaacacug

SEQ ID NO: 1489449 - RNA, 21 nt, Human
uauaaaaauaaaaaacacugg

SEQ ID NO: 1489450 - RNA, 19 nt, Human
acacaugcuucccuuuccu

SEQ ID NO: 1489451 - RNA, 21 nt, Human
acacaugcuucccuuuccuga

SEQ ID NO: 1489452 - RNA, 23 nt, Human
acacaugcuucccuuuccugagu

SEQ ID NO: 1489453 - RNA, 23 nt, Human
acacuacacccagcaauagagac

SEQ ID NO: 1489454 - RNA, 17 nt, Human
acacuacacccagcaau

SEQ ID NO: 1489455 - RNA, 17 nt, Human
acacuaagagagaauga

SEQ ID NO: 1489456 - RNA, 13 nt, Human
acacuacacccag

SEQ ID NO: 1489457 - RNA, 14 nt, Human
acacuacacccagc

SEQ ID NO: 1489458 - RNA, 15 nt, Human
acacuacacccagca

SEQ ID NO: 1489459 - RNA, 19 nt, Human
acacuaagagagaaugaga

SEQ ID NO: 1489460 - RNA, 18 nt, Human
acacuaagagagaaugag

SEQ ID NO: 1489461 - RNA, 13 nt, Human
acaccugcccugc

SEQ ID NO: 1489462 - RNA, 14 nt, Human
acaccugcccugcc

SEQ ID NO: 1489463 - RNA, 12 nt, Human
acaccugcccug

SEQ ID NO: 1489464 - RNA, 15 nt, Human
acaccugcccugccc

SEQ ID NO: 1489465 - RNA, 17 nt, Human
acaccugcccugcccug

SEQ ID NO: 1489466 - RNA, 18 nt, Human
acaccugcccugcccugc

SEQ ID NO: 1489467 - RNA, 20 nt, Human
acaccugcccugcccugcca

SEQ ID NO: 1489468 - RNA, 22 nt, Human
acaccugcccugcccugccacc

SEQ ID NO: 1489469 - RNA, 23 nt, Human
acacccagcaauagagacgggac

SEQ ID NO: 1489470 - RNA, 13 nt, Human
acacccagcaaua

SEQ ID NO: 1489471 - RNA, 12 nt, Human
aauaaagugacc

SEQ ID NO: 1489472 - RNA, 15 nt, Human
aauaacgauaaaaga

SEQ ID NO: 1489473 - RNA, 21 nt, Human
aauaacaaugaaaguugauaa

SEQ ID NO: 1489474 - RNA, 22 nt, Human
uaaagguucaugcaaacuuuau

SEQ ID NO: 1489475 - RNA, 19 nt, Human
uaaaguaaaaacaaagaaa

SEQ ID NO: 1489476 - RNA, 21 nt, Human
uaaaguaaaaacaaagaaauu

SEQ ID NO: 1489477 - RNA, 22 nt, Human
uaaaguaaaaacaaagaaauua

SEQ ID NO: 1489478 - RNA, 15 nt, Human
uaaauagacacgcac

SEQ ID NO: 1489479 - RNA, 22 nt, Human
uaaauguuaugacuauguaaac

SEQ ID NO: 1489480 - RNA, 23 nt, Human
uaaauguuaugacuauguaaacu

SEQ ID NO: 1489481 - RNA, 15 nt, Human
uaaauguugacaugg

SEQ ID NO: 1489482 - RNA, 24 nt, Human
uaaauguuuuuuuuuaaagacuuu

SEQ ID NO: 1489483 - RNA, 20 nt, Human
aauaauuuuuauauuugaaa

SEQ ID NO: 1489484 - RNA, 12 nt, Human
uaaauaaaguuu

SEQ ID NO: 1489485 - RNA, 21 nt, Human
uaaauaaaguuuguugaaaca

SEQ ID NO: 1489486 - RNA, 19 nt, Human
aauaauuuuuauauuugaa

SEQ ID NO: 1489487 - RNA, 17 nt, Human
aauaauuuuuauauuug

SEQ ID NO: 1489488 - RNA, 16 nt, Human
aauaauuuuuauauuu

SEQ ID NO: 1489489 - RNA, 11 nt, Human
aauaauuuuau

SEQ ID NO: 1489490 - RNA, 14 nt, Human
aauaauuuuaucuc

SEQ ID NO: 1489491 - RNA, 15 nt, Human
aauauuucagauaau

SEQ ID NO: 1489492 - RNA, 18 nt, Human
aauauuguuuuacaauag

SEQ ID NO: 1489493 - RNA, 17 nt, Human
aauauuguuuuacaaua

SEQ ID NO: 1489494 - RNA, 21 nt, Human
aauaucuccgucaacucauau

SEQ ID NO: 1489495 - RNA, 16 nt, Human
aauaucuccgucaacu

SEQ ID NO: 1489496 - RNA, 14 nt, Human
uaacaugauuuggg

SEQ ID NO: 1489497 - RNA, 16 nt, Human
uaaccucuaaauucuu

SEQ ID NO: 1489498 - RNA, 20 nt, Human
aauaucacuugucaauaaaa

SEQ ID NO: 1489499 - RNA, 15 nt, Human
aauaucacuugucaa

SEQ ID NO: 1489500 - RNA, 12 nt, Human
aauaucacuugu

SEQ ID NO: 1489501 - RNA, 24 nt, Human
aauagcuuuuuucucugauacaga

SEQ ID NO: 1489502 - RNA, 18 nt, Human
aauaggcguaacuaauuu

SEQ ID NO: 1489503 - RNA, 18 nt, Human
uaaguuuuuuuuuaaaaa

SEQ ID NO: 1489504 - RNA, 14 nt, Human
aaucagacuaugaa

SEQ ID NO: 1489505 - RNA, 17 nt, Human
aaucagacuaugaaguu

SEQ ID NO: 1489506 - RNA, 23 nt, Human
aaucaugaauuaguuuuauaugc

SEQ ID NO: 1489507 - RNA, 17 nt, Human
aaucaugaauuaguuuu

SEQ ID NO: 1489508 - RNA, 19 nt, Human
aaucaugaauuaguuuuau

SEQ ID NO: 1489509 - RNA, 17 nt, Human
aaucauggugcucagag

SEQ ID NO: 1489510 - RNA, 15 nt, Human
aaucaucaagucuuu

SEQ ID NO: 1489511 - RNA, 14 nt, Human
aaucuuauaauuua

SEQ ID NO: 1489512 - RNA, 16 nt, Human
aaucuuauaauuuaaa

SEQ ID NO: 1489513 - RNA, 13 nt, Human
aauccuugaagau

SEQ ID NO: 1489514 - RNA, 20 nt, Human
aauccucaguuuuugugaaa

SEQ ID NO: 1489515 - RNA, 16 nt, Human
uaaugauaacuggaaa

SEQ ID NO: 1489516 - RNA, 21 nt, Human
aaugagagacacacugaagaa

SEQ ID NO: 1489517 - RNA, 13 nt, Human
aaugagacaucca

SEQ ID NO: 1489518 - RNA, 14 nt, Human
aaugagacauccag

SEQ ID NO: 1489519 - RNA, 15 nt, Human
aaugagacauccagc

SEQ ID NO: 1489520 - RNA, 15 nt, Human
aaugaaaaccacauu

SEQ ID NO: 1489521 - RNA, 14 nt, Human
uaauagguuuggac

SEQ ID NO: 1489522 - RNA, 19 nt, Human
uaauagguuuggacaaaau

SEQ ID NO: 1489523 - RNA, 20 nt, Human
uaauagggcaauuaauuccu

SEQ ID NO: 1489524 - RNA, 19 nt, Human
uacauauaagugauugcug

SEQ ID NO: 1489525 - RNA, 22 nt, Human
uacauauaagugauugcugguu

SEQ ID NO: 1489526 - RNA, 19 nt, Human
aauggacuuuuguacauag

SEQ ID NO: 1489527 - RNA, 19 nt, Human
uacacuaagagagaaugag

SEQ ID NO: 1489528 - RNA, 21 nt, Human
aaugccccugaauuuaaauag

SEQ ID NO: 1489529 - RNA, 12 nt, Human
ucagcucaugga

SEQ ID NO: 1489530 - RNA, 19 nt, Human
ucaggaaagagaacuucca

SEQ ID NO: 1489531 - RNA, 13 nt, Human
ucaggaaagagaa

SEQ ID NO: 1489532 - RNA, 23 nt, Human
accccagcuggggccaggcuggg

SEQ ID NO: 1489533 - RNA, 23 nt, Human
accauuucuugagguaaaagcau

SEQ ID NO: 1489534 - RNA, 21 nt, Human
acccagauaaagguucaugca

SEQ ID NO: 1489535 - RNA, 19 nt, Human
ucacccaggcuggacugca

SEQ ID NO: 1489536 - RNA, 19 nt, Human
ucacccagguuggagugca

SEQ ID NO: 1489537 - RNA, 15 nt, Human
accaaucaugaauua

SEQ ID NO: 1489538 - RNA, 13 nt, Human
accaaucaugaau

SEQ ID NO: 1489539 - RNA, 15 nt, Human
ucaauucuugccaaa

SEQ ID NO: 1489540 - RNA, 17 nt, Human
ucaauucuucccuaucu

SEQ ID NO: 1489541 - RNA, 19 nt, Human
ucaauucuucccuaucuuu

SEQ ID NO: 1489542 - RNA, 23 nt, Human
ucaauucuucccuaucuuugcca

SEQ ID NO: 1489543 - RNA, 18 nt, Human
accacuuguguuuugcaa

SEQ ID NO: 1489544 - RNA, 13 nt, Human
accacuuuuugca

SEQ ID NO: 1489545 - RNA, 14 nt, Human
accacuuuuugcag

SEQ ID NO: 1489546 - RNA, 15 nt, Human
accacuuuuugcagc

SEQ ID NO: 1489547 - RNA, 16 nt, Human
accacuuuuugcagcu

SEQ ID NO: 1489548 - RNA, 17 nt, Human
accacuuuuugcagcuu

SEQ ID NO: 1489549 - RNA, 18 nt, Human
accacuuuuugcagcuuu

SEQ ID NO: 1489550 - RNA, 20 nt, Human
accacuuuuugcagcuuucu

SEQ ID NO: 1489551 - RNA, 19 nt, Human
acauauauaacaaugcugu

SEQ ID NO: 1489552 - RNA, 20 nt, Human
acauagugggacccugucuc

SEQ ID NO: 1489553 - RNA, 21 nt, Human
uaugaaauauuauguuaaaac

SEQ ID NO: 1489554 - RNA, 19 nt, Human
uaugaacuugaggacacau

SEQ ID NO: 1489555 - RNA, 20 nt, Human
uaugaacuugaggacacaug

SEQ ID NO: 1489556 - RNA, 21 nt, Human
uaugaacuugaggacacaugu

SEQ ID NO: 1489557 - RNA, 23 nt, Human
uaugaacuugaggacacaugucc

SEQ ID NO: 1489558 - RNA, 22 nt, Human
uaugaacuugaggacacauguc

SEQ ID NO: 1489559 - RNA, 21 nt, Human
acauguccagugggaggugag

SEQ ID NO: 1489560 - RNA, 22 nt, Human
acauuaaauuuuuuuuacauuu

SEQ ID NO: 1489561 - RNA, 22 nt, Human
ucaagaacacagcccugcuucu

SEQ ID NO: 1489562 - RNA, 20 nt, Human
ucaaauacgugggcauucaa

SEQ ID NO: 1489563 - RNA, 16 nt, Human
acaugaaguccaagca

SEQ ID NO: 1489564 - RNA, 14 nt, Human
ucaaagcugaaaug

SEQ ID NO: 1489565 - RNA, 21 nt, Human
ucaaaauaugccccauucaac

SEQ ID NO: 1489566 - RNA, 16 nt, Human
ucaaaauuguuacaaa

SEQ ID NO: 1489567 - RNA, 19 nt, Human
ucaaaauuguuacaaauug

SEQ ID NO: 1489568 - RNA, 21 nt, Human
ucaugaauuaguuuuauaugc

SEQ ID NO: 1489569 - RNA, 17 nt, Human
accucgugauccacccg

SEQ ID NO: 1489570 - RNA, 14 nt, Human
accucuaaauucuu

SEQ ID NO: 1489571 - RNA, 12 nt, Human
accucucaauau

SEQ ID NO: 1489572 - RNA, 19 nt, Human
accucucaauauucaauaa

SEQ ID NO: 1489573 - RNA, 20 nt, Human
accucucaauauucaauaaa

SEQ ID NO: 1489574 - RNA, 21 nt, Human
accucucaauauucaauaaag

SEQ ID NO: 1489575 - RNA, 23 nt, Human
accucucaauauucaauaaagcu

SEQ ID NO: 1489576 - RNA, 16 nt, Human
accucuccagccucag

SEQ ID NO: 1489577 - RNA, 18 nt, Human
accucuccagccucagcu

SEQ ID NO: 1489578 - RNA, 20 nt, Human
accucuccagccucagcucu

SEQ ID NO: 1489579 - RNA, 22 nt, Human
accucuccagccucagcucuca

SEQ ID NO: 1489580 - RNA, 17 nt, Human
accucccucaaccucau

SEQ ID NO: 1489581 - RNA, 19 nt, Human
accucccucaaccucaucc

SEQ ID NO: 1489582 - RNA, 22 nt, Human
ucauccucuccacagcugccuc

SEQ ID NO: 1489583 - RNA, 18 nt, Human
ucaucuagguaaauuaca

SEQ ID NO: 1489584 - RNA, 14 nt, Human
ucaucuaggauuuu

SEQ ID NO: 1489585 - RNA, 16 nt, Human
ucaugaauuaguuuua

SEQ ID NO: 1489586 - RNA, 13 nt, Human
ucaucucagcuca

SEQ ID NO: 1489587 - RNA, 21 nt, Human
accuagggugauauuaaccag

SEQ ID NO: 1489588 - RNA, 13 nt, Human
uccaacccuagca

SEQ ID NO: 1489589 - RNA, 14 nt, Human
uccaacccuagcaa

SEQ ID NO: 1489590 - RNA, 15 nt, Human
uccaacccuagcaaa

SEQ ID NO: 1489591 - RNA, 14 nt, Human
acgagaaaacaaua

SEQ ID NO: 1489592 - RNA, 12 nt, Human
ucccaucccugc

SEQ ID NO: 1489593 - RNA, 14 nt, Human
ucccaucccugcgu

SEQ ID NO: 1489594 - RNA, 20 nt, Human
acuacaggcacacaccacca

SEQ ID NO: 1489595 - RNA, 15 nt, Human
acuacaguuagggcu

SEQ ID NO: 1489596 - RNA, 20 nt, Human
uccauccuugagucaaaaaa

SEQ ID NO: 1489597 - RNA, 20 nt, Human
uccaucucuuguuuaaauuc

SEQ ID NO: 1489598 - RNA, 12 nt, Human
uccauucuggaa

SEQ ID NO: 1489599 - RNA, 13 nt, Human
uccauucuggaag

SEQ ID NO: 1489600 - RNA, 14 nt, Human
uccauucuggaagu

SEQ ID NO: 1489601 - RNA, 21 nt, Human
ucccaaagaaguucugguaug

SEQ ID NO: 1489602 - RNA, 14 nt, Human
ucccaaaaaacuac

SEQ ID NO: 1489603 - RNA, 20 nt, Human
ucccaaaagcccauucauuc

SEQ ID NO: 1489604 - RNA, 21 nt, Human
ucccaaaguccugggauuaca

SEQ ID NO: 1489605 - RNA, 20 nt, Human
ucccaaguagcugagacuac

SEQ ID NO: 1489606 - RNA, 18 nt, Human
acgggacugcggaggaag

SEQ ID NO: 1489607 - RNA, 22 nt, Human
acguauaaaagccuguuuaaga

SEQ ID NO: 1489608 - RNA, 20 nt, Human
acgugggcauucaaauguau

SEQ ID NO: 1489609 - RNA, 17 nt, Human
acgugggcauucaaaug

SEQ ID NO: 1489610 - RNA, 21 nt, Human
acuacuagggaaaugccuuug

SEQ ID NO: 1489611 - RNA, 19 nt, Human
uccuaaauauauuuuaaga

SEQ ID NO: 1489612 - RNA, 22 nt, Human
ucguuuucaaaauuguuacaaa

SEQ ID NO: 1489613 - RNA, 16 nt, Human
ucguaaaauuaagaaa

SEQ ID NO: 1489614 - RNA, 13 nt, Human
ucguaaaauuaag

SEQ ID NO: 1489615 - RNA, 18 nt, Human
acugggacaggggagaac

SEQ ID NO: 1489616 - RNA, 16 nt, Human
acugggagaaaugaaa

SEQ ID NO: 1489617 - RNA, 17 nt, Human
acugggagaaaugaaaa

SEQ ID NO: 1489618 - RNA, 18 nt, Human
acuguggguagacacaca

SEQ ID NO: 1489619 - RNA, 12 nt, Human
acugugugcuca

SEQ ID NO: 1489620 - RNA, 15 nt, Human
acugugugcucagga

SEQ ID NO: 1489621 - RNA, 19 nt, Human
acugugugcucaggagccc

SEQ ID NO: 1489622 - RNA, 20 nt, Human
acugugugcucaggagcccu

SEQ ID NO: 1489623 - RNA, 21 nt, Human
acugugugcucaggagcccug

SEQ ID NO: 1489624 - RNA, 14 nt, Human
acuuauaguacaug

SEQ ID NO: 1489625 - RNA, 15 nt, Human
acuuauaguacauga

SEQ ID NO: 1489626 - RNA, 17 nt, Human
acuuauaguacaugaua

SEQ ID NO: 1489627 - RNA, 18 nt, Human
acuuauaguacaugauaa

SEQ ID NO: 1489628 - RNA, 19 nt, Human
acuguuguagaagacaaaa

SEQ ID NO: 1489629 - RNA, 20 nt, Human
ucuaaagccauuguaguccu

SEQ ID NO: 1489630 - RNA, 14 nt, Human
acugcauccagccu

SEQ ID NO: 1489631 - RNA, 15 nt, Human
acugcauccagccug

SEQ ID NO: 1489632 - RNA, 14 nt, Human
acugcauuauauuu

SEQ ID NO: 1489633 - RNA, 15 nt, Human
acugcauuauauuua

SEQ ID NO: 1489634 - RNA, 16 nt, Human
acugccuauuuuaaua

SEQ ID NO: 1489635 - RNA, 21 nt, Human
acugccuauuuuaauaaacac

SEQ ID NO: 1489636 - RNA, 16 nt, Human
acugcuuaauucaaau

SEQ ID NO: 1489637 - RNA, 13 nt, Human
acugcuuaauuca

SEQ ID NO: 1489638 - RNA, 20 nt, Human
acugccuucucaacuccaaa

SEQ ID NO: 1489639 - RNA, 19 nt, Human
acugccuucucaacuccaa

SEQ ID NO: 1489640 - RNA, 13 nt, Human
acugccuucucaa

SEQ ID NO: 1489641 - RNA, 12 nt, Human
ucgaagugcuga

SEQ ID NO: 1489642 - RNA, 13 nt, Human
ucgaagugcugag

SEQ ID NO: 1489643 - RNA, 12 nt, Human
acuggccccacc

SEQ ID NO: 1489644 - RNA, 13 nt, Human
acuggccccaccc

SEQ ID NO: 1489645 - RNA, 21 nt, Human
ucucacagcuccaagaauuuc

SEQ ID NO: 1489646 - RNA, 11 nt, Human
acuugaggaca

SEQ ID NO: 1489647 - RNA, 12 nt, Human
acuugaggacac

SEQ ID NO: 1489648 - RNA, 13 nt, Human
acuugaggacaca

SEQ ID NO: 1489649 - RNA, 14 nt, Human
acuugaggacacau

SEQ ID NO: 1489650 - RNA, 16 nt, Human
acuugucaauaaaauc

SEQ ID NO: 1489651 - RNA, 15 nt, Human
acuugaggacacaug

SEQ ID NO: 1489652 - RNA, 14 nt, Human
acuugcucuugaug

SEQ ID NO: 1489653 - RNA, 20 nt, Human
ucuccauggcccugccaugc

SEQ ID NO: 1489654 - RNA, 24 nt, Human
ucuccauggcccugccaugcucuc

SEQ ID NO: 1489655 - RNA, 16 nt, Human
ucuccauggcccugcc

SEQ ID NO: 1489656 - RNA, 17 nt, Human
ucuccauggcccugcca

SEQ ID NO: 1489657 - RNA, 19 nt, Human
ucuccuaagcuggagugca

SEQ ID NO: 1489658 - RNA, 16 nt, Human
acuuguguuuugcaag

SEQ ID NO: 1489659 - RNA, 14 nt, Human
ucuccaaaccacuu

SEQ ID NO: 1489660 - RNA, 18 nt, Human
ucucagcucacugcaacc

SEQ ID NO: 1489661 - RNA, 15 nt, Human
ucucagcucacugca

SEQ ID NO: 1489662 - RNA, 16 nt, Human
ucucagcucacugcaa

SEQ ID NO: 1489663 - RNA, 18 nt, Human
ucucuuuaaaaggaaaga

SEQ ID NO: 1489664 - RNA, 19 nt, Human
ucucuuuaaaaggaaagaa

SEQ ID NO: 1489665 - RNA, 21 nt, Human
ucucuuuaaaaggaaagaaaa

SEQ ID NO: 1489666 - RNA, 17 nt, Human
agaaacacccucacacu

SEQ ID NO: 1489667 - RNA, 21 nt, Human
agaaaacuuguauuaugugug

SEQ ID NO: 1489668 - RNA, 19 nt, Human
ucucuggaauuugaaacac

SEQ ID NO: 1489669 - RNA, 15 nt, Human
ucucuggaauuugaa

SEQ ID NO: 1489670 - RNA, 15 nt, Human
ucucucauacccucc

SEQ ID NO: 1489671 - RNA, 21 nt, Human
ucucucacuuguuuuauuuaa

SEQ ID NO: 1489672 - RNA, 17 nt, Human
ucucucacuuguuuuau

SEQ ID NO: 1489673 - RNA, 12 nt, Human
ucugaagaagau

SEQ ID NO: 1489674 - RNA, 18 nt, Human
agaaaugaaaaaauauau

SEQ ID NO: 1489675 - RNA, 23 nt, Human
agaaaugaaaaaauauauaucaa

SEQ ID NO: 1489676 - RNA, 12 nt, Human
agaaaucuaaaa

SEQ ID NO: 1489677 - RNA, 15 nt, Human
agaaaucuaaaaaac

SEQ ID NO: 1489678 - RNA, 17 nt, Human
agaaaugaaaaaauaua

SEQ ID NO: 1489679 - RNA, 15 nt, Human
ucugcaggucccuaa

SEQ ID NO: 1489680 - RNA, 16 nt, Human
ucugcaggucccuaau

SEQ ID NO: 1489681 - RNA, 17 nt, Human
ucugcaggucccuaaua

SEQ ID NO: 1489682 - RNA, 18 nt, Human
ucugcaggucccuaauaa

SEQ ID NO: 1489683 - RNA, 13 nt, Human
agaaauuaugugc

SEQ ID NO: 1489684 - RNA, 21 nt, Human
agaaauuaugugccagauuua

SEQ ID NO: 1489685 - RNA, 22 nt, Human
agaaauuaugugccagauuuau

SEQ ID NO: 1489686 - RNA, 16 nt, Human
agaaauuuauaaacuu

SEQ ID NO: 1489687 - RNA, 17 nt, Human
agaaauuuauaaacuuu

SEQ ID NO: 1489688 - RNA, 13 nt, Human
ucugauacagaaa

SEQ ID NO: 1489689 - RNA, 14 nt, Human
ucuuuaauuuuaca

SEQ ID NO: 1489690 - RNA, 18 nt, Human
agacuggguaggaaagag

SEQ ID NO: 1489691 - RNA, 22 nt, Human
agacuggguaggaaagaggaag

SEQ ID NO: 1489692 - RNA, 20 nt, Human
agacauuuuaaaaaaugguc

SEQ ID NO: 1489693 - RNA, 15 nt, Human
agaccgaucggcggc

SEQ ID NO: 1489694 - RNA, 17 nt, Human
ucuucugaauaaagcaa

SEQ ID NO: 1489695 - RNA, 18 nt, Human
ucuucugaauaaagcaau

SEQ ID NO: 1489696 - RNA, 22 nt, Human
ucuucuuaauauguucuuuuaa

SEQ ID NO: 1489697 - RNA, 19 nt, Human
agacauuuuaaaaaauggu

SEQ ID NO: 1489698 - RNA, 22 nt, Human
agacauuuuaaaaaauggucac

SEQ ID NO: 1489699 - RNA, 23 nt, Human
ucuuagaugcaguucugaagaag

SEQ ID NO: 1489700 - RNA, 22 nt, Human
ucuuacugcuuaauucaaauaa

SEQ ID NO: 1489701 - RNA, 19 nt, Human
ucuuacugucuuuuuucua

SEQ ID NO: 1489702 - RNA, 17 nt, Human
agacacacugaagaagc

SEQ ID NO: 1489703 - RNA, 16 nt, Human
agacacacugaagaag

SEQ ID NO: 1489704 - RNA, 13 nt, Human
agacacgcacggc

SEQ ID NO: 1489705 - RNA, 15 nt, Human
agacacgcacggcag

SEQ ID NO: 1489706 - RNA, 20 nt, Human
agacacgcacggcagccaca

SEQ ID NO: 1489707 - RNA, 21 nt, Human
agacacgcacggcagccacag

SEQ ID NO: 1489708 - RNA, 22 nt, Human
agacacgcacggcagccacagc

SEQ ID NO: 1489709 - RNA, 12 nt, Human
agacagaaaaaa

SEQ ID NO: 1489710 - RNA, 22 nt, Human
ucugguaugaacuugaggacac

SEQ ID NO: 1489711 - RNA, 23 nt, Human
ucugguaugaacuugaggacaca

SEQ ID NO: 1489712 - RNA, 18 nt, Human
ugaaauauuauguuaaaa

SEQ ID NO: 1489713 - RNA, 15 nt, Human
ugaaauuguauuaca

SEQ ID NO: 1489714 - RNA, 23 nt, Human
ugaaauuuccugggagcuuuugu

SEQ ID NO: 1489715 - RNA, 12 nt, Human
agagcacugcuc

SEQ ID NO: 1489716 - RNA, 16 nt, Human
agagcacugcuccagu

SEQ ID NO: 1489717 - RNA, 21 nt, Human
ugaacuaggauuguaguccca

SEQ ID NO: 1489718 - RNA, 11 nt, Human
ugaacuuugcu

SEQ ID NO: 1489719 - RNA, 15 nt, Human
ugaacuuugcugagc

SEQ ID NO: 1489720 - RNA, 16 nt, Human
ugaacuuugcugagcc

SEQ ID NO: 1489721 - RNA, 21 nt, Human
agagcuggagaugaggccaga

SEQ ID NO: 1489722 - RNA, 23 nt, Human
agagcuggagaugaggccagacc

SEQ ID NO: 1489723 - RNA, 22 nt, Human
agagcuggagaugaggccagac

SEQ ID NO: 1489724 - RNA, 22 nt, Human
ugaagcacagugaucaaguuau

SEQ ID NO: 1489725 - RNA, 12 nt, Human
agagguuuuaaa

SEQ ID NO: 1489726 - RNA, 16 nt, Human
ugaauuuuacauggcu

SEQ ID NO: 1489727 - RNA, 17 nt, Human
agauaaagguucaugca

SEQ ID NO: 1489728 - RNA, 15 nt, Human
agauacugaaauaaa

SEQ ID NO: 1489729 - RNA, 13 nt, Human
agauacugaaaua

SEQ ID NO: 1489730 - RNA, 12 nt, Human
agauacugaaau

SEQ ID NO: 1489731 - RNA, 20 nt, Human
agaguugaugguuguacaua

SEQ ID NO: 1489732 - RNA, 17 nt, Human
agaguuuagcuggaaaa

SEQ ID NO: 1489733 - RNA, 16 nt, Human
agaguuuagcuggaaa

SEQ ID NO: 1489734 - RNA, 13 nt, Human
agaucaggaagag

SEQ ID NO: 1489735 - RNA, 17 nt, Human
agaucaggaagagaagg

SEQ ID NO: 1489736 - RNA, 18 nt, Human
agaucaggaagagaagga

SEQ ID NO: 1489737 - RNA, 19 nt, Human
agaucaggaagagaaggag

SEQ ID NO: 1489738 - RNA, 12 nt, Human
agaucauuguga

SEQ ID NO: 1489739 - RNA, 20 nt, Human
agaugcaguucugaagaaga

SEQ ID NO: 1489740 - RNA, 19 nt, Human
agaugcaguucugaagaag

SEQ ID NO: 1489741 - RNA, 18 nt, Human
agaugcaguucugaagaa

SEQ ID NO: 1489742 - RNA, 19 nt, Human
agccacggggacucagccc

SEQ ID NO: 1489743 - RNA, 15 nt, Human
agccacgguguucug

SEQ ID NO: 1489744 - RNA, 12 nt, Human
ugcaaauuucau

SEQ ID NO: 1489745 - RNA, 21 nt, Human
ugcaagccagauuuuccugaa

SEQ ID NO: 1489746 - RNA, 15 nt, Human
ugcaagccagauuuu

SEQ ID NO: 1489747 - RNA, 21 nt, Human
ugcaaggccugguguuucuug

SEQ ID NO: 1489748 - RNA, 23 nt, Human
ugcaaggccugguguuucuugau

SEQ ID NO: 1489749 - RNA, 17 nt, Human
agcccugggaggcucug

SEQ ID NO: 1489750 - RNA, 18 nt, Human
agcccugggaggcucugg

SEQ ID NO: 1489751 - RNA, 20 nt, Human
agcccugggaggcucuggag

SEQ ID NO: 1489752 - RNA, 19 nt, Human
ugcauggaaauucccuuca

SEQ ID NO: 1489753 - RNA, 23 nt, Human
ugcauggaaauucccuucaucug

SEQ ID NO: 1489754 - RNA, 11 nt, Human
ugcauggaaau

SEQ ID NO: 1489755 - RNA, 17 nt, Human
ugcauagaauaaaauuu

SEQ ID NO: 1489756 - RNA, 11 nt, Human
ugcaggucccu

SEQ ID NO: 1489757 - RNA, 22 nt, Human
ugcaggucccuaauaaagcugu

SEQ ID NO: 1489758 - RNA, 17 nt, Human
agccuccuuagaaaaaa

SEQ ID NO: 1489759 - RNA, 19 nt, Human
agcagucaggaaagagaac

SEQ ID NO: 1489760 - RNA, 18 nt, Human
agcagucaggaaagagaa

SEQ ID NO: 1489761 - RNA, 17 nt, Human
agcagucaggaaagaga

SEQ ID NO: 1489762 - RNA, 22 nt, Human
agcauuuagauguauagguuga

SEQ ID NO: 1489763 - RNA, 18 nt, Human
agcauuuguguugaagag

SEQ ID NO: 1489764 - RNA, 17 nt, Human
agcauuuguguugaaga

SEQ ID NO: 1489765 - RNA, 17 nt, Human
ugaucaccgacugaaaa

SEQ ID NO: 1489766 - RNA, 19 nt, Human
ugaucaccgacugaaaaua

SEQ ID NO: 1489767 - RNA, 13 nt, Human
agcauccuggaau

SEQ ID NO: 1489768 - RNA, 15 nt, Human
agcauccuggaauau

SEQ ID NO: 1489769 - RNA, 14 nt, Human
agcauccuggaaua

SEQ ID NO: 1489770 - RNA, 15 nt, Human
agcaucccucaccca

SEQ ID NO: 1489771 - RNA, 13 nt, Human
ugauccagaaaga

SEQ ID NO: 1489772 - RNA, 23 nt, Human
ugauccagaaagaaaacuuguau

SEQ ID NO: 1489773 - RNA, 16 nt, Human
ugauuaaguaaugaua

SEQ ID NO: 1489774 - RNA, 15 nt, Human
ugauuaaguaaugau

SEQ ID NO: 1489775 - RNA, 23 nt, Human
aggagcccuucuauacccaccca

SEQ ID NO: 1489776 - RNA, 15 nt, Human
aggaucaguuaacua

SEQ ID NO: 1489777 - RNA, 23 nt, Human
aggaucaguuaacuauugcauuu

SEQ ID NO: 1489778 - RNA, 17 nt, Human
aggaucaguuaacuauu

SEQ ID NO: 1489779 - RNA, 11 nt, Human
aggauccaggc

SEQ ID NO: 1489780 - RNA, 12 nt, Human
aggaggacccag

SEQ ID NO: 1489781 - RNA, 13 nt, Human
aggaggacccagg

SEQ ID NO: 1489782 - RNA, 14 nt, Human
aggaggacccagga

SEQ ID NO: 1489783 - RNA, 15 nt, Human
aggaggacccaggac

SEQ ID NO: 1489784 - RNA, 16 nt, Human
aggaggacccaggaca

SEQ ID NO: 1489785 - RNA, 17 nt, Human
aggaggacccaggacag

SEQ ID NO: 1489786 - RNA, 18 nt, Human
aggaggacccaggacagg

SEQ ID NO: 1489787 - RNA, 16 nt, Human
ugcuuuuuauggccug

SEQ ID NO: 1489788 - RNA, 14 nt, Human
uggaguugaaaauc

SEQ ID NO: 1489789 - RNA, 13 nt, Human
uggagugcagugg

SEQ ID NO: 1489790 - RNA, 12 nt, Human
uggauuccagag

SEQ ID NO: 1489791 - RNA, 23 nt, Human
aggcacacaccaccacgccuggc

SEQ ID NO: 1489792 - RNA, 21 nt, Human
uggagcucgugggacagucac

SEQ ID NO: 1489793 - RNA, 21 nt, Human
uggagcucguggaacaguuac

SEQ ID NO: 1489794 - RNA, 17 nt, Human
uggagcucguggaacag

SEQ ID NO: 1489795 - RNA, 22 nt, Human
ugccugcuuuuuauggccugug

SEQ ID NO: 1489796 - RNA, 20 nt, Human
ugccugcuuuuuauggccug

SEQ ID NO: 1489797 - RNA, 21 nt, Human
ugccugcuuuuuauggccugu

SEQ ID NO: 1489798 - RNA, 19 nt, Human
ugccuuuucccaacuccag

SEQ ID NO: 1489799 - RNA, 17 nt, Human
ugccuuuucccaacucc

SEQ ID NO: 1489800 - RNA, 16 nt, Human
ugcuaauuuugaaaaa

SEQ ID NO: 1489801 - RNA, 18 nt, Human
ugcuaauuuugaaaaacu

SEQ ID NO: 1489802 - RNA, 19 nt, Human
ugcuaauuuugaaaaacug

SEQ ID NO: 1489803 - RNA, 20 nt, Human
ugcuaauuuugaaaaacugc

SEQ ID NO: 1489804 - RNA, 19 nt, Human
aggaagcaaauagaagaga

SEQ ID NO: 1489805 - RNA, 18 nt, Human
aggaagaucccccagaaa

SEQ ID NO: 1489806 - RNA, 17 nt, Human
aggaagaucccccagaa

SEQ ID NO: 1489807 - RNA, 22 nt, Human
aggaaggaggacccaggacagg

SEQ ID NO: 1489808 - RNA, 16 nt, Human
aggaaggcagggagga

SEQ ID NO: 1489809 - RNA, 18 nt, Human
aggaaggcagggaggagg

SEQ ID NO: 1489810 - RNA, 20 nt, Human
aggaaggcagggaggaggca

SEQ ID NO: 1489811 - RNA, 22 nt, Human
aggaaggcagggaggaggcaga

SEQ ID NO: 1489812 - RNA, 16 nt, Human
aggaauuacgugcucu

SEQ ID NO: 1489813 - RNA, 23 nt, Human
ugcugagccuguaaaauaaaagg

SEQ ID NO: 1489814 - RNA, 16 nt, Human
aggaagaucccccaga

SEQ ID NO: 1489815 - RNA, 17 nt, Human
ugcucuugaugccuggc

SEQ ID NO: 1489816 - RNA, 23 nt, Human
aggaaaccaguuaggucucaaua

SEQ ID NO: 1489817 - RNA, 19 nt, Human
ugggccccauguuaacccc

SEQ ID NO: 1489818 - RNA, 20 nt, Human
ugggccccugccucucugca

SEQ ID NO: 1489819 - RNA, 15 nt, Human
ugggccccugccucu

SEQ ID NO: 1489820 - RNA, 19 nt, Human
ugggccccugccucucugc

SEQ ID NO: 1489821 - RNA, 20 nt, Human
agggaggaggcagagaagaa

SEQ ID NO: 1489822 - RNA, 23 nt, Human
uggggcuccuccaggguggcagc

SEQ ID NO: 1489823 - RNA, 16 nt, Human
agggggcaagaggaau

SEQ ID NO: 1489824 - RNA, 16 nt, Human
aggggaauugaggaca

SEQ ID NO: 1489825 - RNA, 20 nt, Human
uggucacguuuggugcuucu

SEQ ID NO: 1489826 - RNA, 16 nt, Human
ugggucgcccuggacu

SEQ ID NO: 1489827 - RNA, 18 nt, Human
ugggucgcccuggacugu

SEQ ID NO: 1489828 - RNA, 23 nt, Human
uggugcuucucagauuucugagg

SEQ ID NO: 1489829 - RNA, 19 nt, Human
aggucuucuuaauauguuc

SEQ ID NO: 1489830 - RNA, 14 nt, Human
aggugagaccaccu

SEQ ID NO: 1489831 - RNA, 15 nt, Human
aggugagaccaccuc

SEQ ID NO: 1489832 - RNA, 16 nt, Human
aggugagaccaccucu

SEQ ID NO: 1489833 - RNA, 18 nt, Human
aguagcguuuuuuaaaug

SEQ ID NO: 1489834 - RNA, 19 nt, Human
aguagcguuuuuuaaaugu

SEQ ID NO: 1489835 - RNA, 16 nt, Human
uguaguagcguuuuuu

SEQ ID NO: 1489836 - RNA, 21 nt, Human
uguaguagcguuuuuuaaaug

SEQ ID NO: 1489837 - RNA, 22 nt, Human
uguaguagcguuuuuuaaaugu

SEQ ID NO: 1489838 - RNA, 23 nt, Human
uguaguagcguuuuuuaaaugua

SEQ ID NO: 1489839 - RNA, 22 nt, Human
aguacaugauaaaugauagaca

SEQ ID NO: 1489840 - RNA, 17 nt, Human
aguaaaauaauaauuuu

SEQ ID NO: 1489841 - RNA, 17 nt, Human
aguaaugauaacuggaa

SEQ ID NO: 1489842 - RNA, 20 nt, Human
aguaaugauaacuggaaacu

SEQ ID NO: 1489843 - RNA, 18 nt, Human
aguaaugauaacuggaaa

SEQ ID NO: 1489844 - RNA, 13 nt, Human
aguaaaauccaca

SEQ ID NO: 1489845 - RNA, 22 nt, Human
uguacuugcucuugaugccugg

SEQ ID NO: 1489846 - RNA, 23 nt, Human
uguacuugcucuugaugccuggc

SEQ ID NO: 1489847 - RNA, 17 nt, Human
agucaccucauggaauu

SEQ ID NO: 1489848 - RNA, 15 nt, Human
agucaccucauggaa

SEQ ID NO: 1489849 - RNA, 14 nt, Human
agucaccucaugga

SEQ ID NO: 1489850 - RNA, 21 nt, Human
aguauuagaauaccacaggaa

SEQ ID NO: 1489851 - RNA, 22 nt, Human
aguauuucuaugaaauauuaug

SEQ ID NO: 1489852 - RNA, 18 nt, Human
aguauuucuaugaaauau

SEQ ID NO: 1489853 - RNA, 17 nt, Human
aguauuucuaugaaaua

SEQ ID NO: 1489854 - RNA, 18 nt, Human
aguauuagaauaccacag

SEQ ID NO: 1489855 - RNA, 13 nt, Human
uguauuacaaauc

SEQ ID NO: 1489856 - RNA, 22 nt, Human
uguauuacaaauccaaugaaau

SEQ ID NO: 1489857 - RNA, 16 nt, Human
uguaguguuggagaag

SEQ ID NO: 1489858 - RNA, 15 nt, Human
uguaguguuggagaa

SEQ ID NO: 1489859 - RNA, 14 nt, Human
uguaguguuggaga

SEQ ID NO: 1489860 - RNA, 17 nt, Human
agucuuuggaacccuaa

SEQ ID NO: 1489861 - RNA, 15 nt, Human
agucucuauaccaau

SEQ ID NO: 1489862 - RNA, 17 nt, Human
agucucuauaccaauaa

SEQ ID NO: 1489863 - RNA, 19 nt, Human
agucucuauaccaauaaag

SEQ ID NO: 1489864 - RNA, 20 nt, Human
agucucuauaccaauaaagu

SEQ ID NO: 1489865 - RNA, 21 nt, Human
agucucuauaccaauaaagug

SEQ ID NO: 1489866 - RNA, 22 nt, Human
agucucuauaccaauaaaguga

SEQ ID NO: 1489867 - RNA, 12 nt, Human
ugugaaauuauu

SEQ ID NO: 1489868 - RNA, 20 nt, Human
ugugaacaguuguguuugaa

SEQ ID NO: 1489869 - RNA, 15 nt, Human
agugaaagaaaauaa

SEQ ID NO: 1489870 - RNA, 17 nt, Human
agugaaagaaaauaaca

SEQ ID NO: 1489871 - RNA, 20 nt, Human
ugugccagauuuaugcauau

SEQ ID NO: 1489872 - RNA, 18 nt, Human
ugugccagauuuaugcau

SEQ ID NO: 1489873 - RNA, 14 nt, Human
uguuacaaauugua

SEQ ID NO: 1489874 - RNA, 13 nt, Human
aguggacaggagu

SEQ ID NO: 1489875 - RNA, 15 nt, Human
uguucugugauauaa

SEQ ID NO: 1489876 - RNA, 18 nt, Human
uguucugugauauaagug

SEQ ID NO: 1489877 - RNA, 15 nt, Human
uguuauaaucuuuca

SEQ ID NO: 1489878 - RNA, 15 nt, Human
agugcugaauuuccc

SEQ ID NO: 1489879 - RNA, 19 nt, Human
agugcugaauuucccucuc

SEQ ID NO: 1489880 - RNA, 18 nt, Human
uguguaagacaaaaagcu

SEQ ID NO: 1489881 - RNA, 13 nt, Human
uguguaaguagau

SEQ ID NO: 1489882 - RNA, 20 nt, Human
ugugugaaagguacuucaaa

SEQ ID NO: 1489883 - RNA, 13 nt, Human
uguguugaagagg

SEQ ID NO: 1489884 - RNA, 21 nt, Human
uguuuuauuuaaccucuaaau

SEQ ID NO: 1489885 - RNA, 19 nt, Human
aguucuuacugcuuaauuc

SEQ ID NO: 1489886 - RNA, 23 nt, Human
aguucuuacugcuuaauucaaau

SEQ ID NO: 1489887 - RNA, 14 nt, Human
uguuuugcaagcca

SEQ ID NO: 1489888 - RNA, 18 nt, Human
uguuucuuuguaaugaaa

SEQ ID NO: 1489889 - RNA, 19 nt, Human
uguuucuuuguaaugaaaa

SEQ ID NO: 1489890 - RNA, 19 nt, Human
uguugccuugcauaauggu

SEQ ID NO: 1489891 - RNA, 22 nt, Human
aguugcauagguuuaauaauuu

SEQ ID NO: 1489892 - RNA, 10 nt, Human
aguugcagcc

SEQ ID NO: 1489893 - RNA, 17 nt, Human
uuaaauuuuuuuuacau

SEQ ID NO: 1489894 - RNA, 18 nt, Human
uuaaauuuuuuuuacauu

SEQ ID NO: 1489895 - RNA, 19 nt, Human
uuaaauuuuuuuuacauuu

SEQ ID NO: 1489896 - RNA, 20 nt, Human
uuaaauuuuuuuuacauuuu

SEQ ID NO: 1489897 - RNA, 16 nt, Human
uuaaaauuacaacuaa

SEQ ID NO: 1489898 - RNA, 20 nt, Human
auaaaauuuuuaaucuuuaa

SEQ ID NO: 1489899 - RNA, 13 nt, Human
uuaauaaacacuc

SEQ ID NO: 1489900 - RNA, 17 nt, Human
uuaauaaacacucuuga

SEQ ID NO: 1489901 - RNA, 17 nt, Human
uuaauuccuucagcacu

SEQ ID NO: 1489902 - RNA, 19 nt, Human
uuaauuccuucagcacuuu

SEQ ID NO: 1489903 - RNA, 20 nt, Human
uuaauuccuucagcacuuua

SEQ ID NO: 1489904 - RNA, 22 nt, Human
uuaagaagacugcauuauauuu

SEQ ID NO: 1489905 - RNA, 18 nt, Human
uuaaguaaggaauuuuau

SEQ ID NO: 1489906 - RNA, 18 nt, Human
uuaaguaaugauaacugg

SEQ ID NO: 1489907 - RNA, 19 nt, Human
auaaaauccauacauuugu

SEQ ID NO: 1489908 - RNA, 18 nt, Human
auaaaauccauacauuug

SEQ ID NO: 1489909 - RNA, 22 nt, Human
auaaaauaauuuuuauauuuga

SEQ ID NO: 1489910 - RNA, 21 nt, Human
auaaaauaauuuuuauauuug

SEQ ID NO: 1489911 - RNA, 16 nt, Human
auaaaauaauuuuuau

SEQ ID NO: 1489912 - RNA, 20 nt, Human
auaaaaggucggaccagcuu

SEQ ID NO: 1489913 - RNA, 18 nt, Human
auaaacacucuugaaaaa

SEQ ID NO: 1489914 - RNA, 15 nt, Human
uuacuguaagaaaau

SEQ ID NO: 1489915 - RNA, 18 nt, Human
auagucaaauugugugaa

SEQ ID NO: 1489916 - RNA, 19 nt, Human
auauauaacaaugcuguau

SEQ ID NO: 1489917 - RNA, 18 nt, Human
auauauaacaaugcugua

SEQ ID NO: 1489918 - RNA, 17 nt, Human
auauauaacaaugcugu

SEQ ID NO: 1489919 - RNA, 15 nt, Human
auauaacaaugcugu

SEQ ID NO: 1489920 - RNA, 12 nt, Human
auauaacaaugc

SEQ ID NO: 1489921 - RNA, 19 nt, Human
auauaagcuuguauuccuu

SEQ ID NO: 1489922 - RNA, 17 nt, Human
auauaacaaugcuguau

SEQ ID NO: 1489923 - RNA, 13 nt, Human
auaugugaacagu

SEQ ID NO: 1489924 - RNA, 12 nt, Human
auaugauucaaa

SEQ ID NO: 1489925 - RNA, 22 nt, Human
auaugauucaaaugucuauaaa

SEQ ID NO: 1489926 - RNA, 13 nt, Human
auaugauucaaau

SEQ ID NO: 1489927 - RNA, 22 nt, Human
auaucuauauuuuacauaaauu

SEQ ID NO: 1489928 - RNA, 20 nt, Human
auaucuauauuuuacauaaa

SEQ ID NO: 1489929 - RNA, 16 nt, Human
auaucuauauuuuaca

SEQ ID NO: 1489930 - RNA, 17 nt, Human
auaucuauauuuuacau

SEQ ID NO: 1489931 - RNA, 18 nt, Human
auauauucagccuggcuu

SEQ ID NO: 1489932 - RNA, 12 nt, Human
uuauuucaauau

SEQ ID NO: 1489933 - RNA, 18 nt, Human
auagcuacuaauuuuaaa

SEQ ID NO: 1489934 - RNA, 14 nt, Human
auagcuacuaauuu

SEQ ID NO: 1489935 - RNA, 17 nt, Human
auagcuacuaauuuuaa

SEQ ID NO: 1489936 - RNA, 13 nt, Human
auagcuaaguaca

SEQ ID NO: 1489937 - RNA, 14 nt, Human
auagcuaaguacac

SEQ ID NO: 1489938 - RNA, 15 nt, Human
auagcuaaguacaca

SEQ ID NO: 1489939 - RNA, 18 nt, Human
auagcuaaguacacaaua

SEQ ID NO: 1489940 - RNA, 13 nt, Human
uucaauaaagcug

SEQ ID NO: 1489941 - RNA, 12 nt, Human
uucaauaaagcu

SEQ ID NO: 1489942 - RNA, 13 nt, Human
uucacauuggaaa

SEQ ID NO: 1489943 - RNA, 19 nt, Human
uucacauuguauucagagu

SEQ ID NO: 1489944 - RNA, 14 nt, Human
uucacauuggaaac

SEQ ID NO: 1489945 - RNA, 17 nt, Human
auaggcacaggaaacca

SEQ ID NO: 1489946 - RNA, 21 nt, Human
auagggcaauuaauuccuuca

SEQ ID NO: 1489947 - RNA, 22 nt, Human
auagggcaauuaauuccuucag

SEQ ID NO: 1489948 - RNA, 23 nt, Human
auagggcaauuaauuccuucagc

SEQ ID NO: 1489949 - RNA, 18 nt, Human
uucaagugcuucuccagc

SEQ ID NO: 1489950 - RNA, 15 nt, Human
uucaaacauauauaa

SEQ ID NO: 1489951 - RNA, 16 nt, Human
uucaaaauuguuacaa

SEQ ID NO: 1489952 - RNA, 21 nt, Human
uucugaaauuuccugggagcu

SEQ ID NO: 1489953 - RNA, 13 nt, Human
uucugaagaagau

SEQ ID NO: 1489954 - RNA, 12 nt, Human
uucugaagaaga

SEQ ID NO: 1489955 - RNA, 14 nt, Human
uucugaagaagaug

SEQ ID NO: 1489956 - RNA, 21 nt, Human
uucugguaugaacuugaggac

SEQ ID NO: 1489957 - RNA, 22 nt, Human
uucugguaugaacuugaggaca

SEQ ID NO: 1489958 - RNA, 20 nt, Human
uucucacagcuccaagaauu

SEQ ID NO: 1489959 - RNA, 18 nt, Human
uucucaacuccaaacuga

SEQ ID NO: 1489960 - RNA, 14 nt, Human
uucucaacuccaaa

SEQ ID NO: 1489961 - RNA, 14 nt, Human
aucauucauuuucu

SEQ ID NO: 1489962 - RNA, 14 nt, Human
auauuuuaagacga

SEQ ID NO: 1489963 - RNA, 18 nt, Human
uuccucugucuccuaagc

SEQ ID NO: 1489964 - RNA, 15 nt, Human
uuccugggagcuuuu

SEQ ID NO: 1489965 - RNA, 16 nt, Human
uuccugggagcuuuug

SEQ ID NO: 1489966 - RNA, 15 nt, Human
uuccuucagcacuuu

SEQ ID NO: 1489967 - RNA, 19 nt, Human
uuccuucagcacuuuagaa

SEQ ID NO: 1489968 - RNA, 16 nt, Human
uuccuucagcacuuua

SEQ ID NO: 1489969 - RNA, 21 nt, Human
auauuuucaugcuguucauga

SEQ ID NO: 1489970 - RNA, 18 nt, Human
auauuuucaugcuguuca

SEQ ID NO: 1489971 - RNA, 15 nt, Human
auauugauccagaaa

SEQ ID NO: 1489972 - RNA, 22 nt, Human
auauugauccagaaagaaaacu

SEQ ID NO: 1489973 - RNA, 23 nt, Human
auauucucacagcuccaagaauu

SEQ ID NO: 1489974 - RNA, 22 nt, Human
auauucucacagcuccaagaau

SEQ ID NO: 1489975 - RNA, 13 nt, Human
auauuugaaauau

SEQ ID NO: 1489976 - RNA, 23 nt, Human
auauuugaaauauugacuuuuua

SEQ ID NO: 1489977 - RNA, 19 nt, Human
auauuugaaauauugacuu

SEQ ID NO: 1489978 - RNA, 14 nt, Human
auauuugaaauauu

SEQ ID NO: 1489979 - RNA, 12 nt, Human
uugacuuuuuau

SEQ ID NO: 1489980 - RNA, 11 nt, Human
uugagaaaaau

SEQ ID NO: 1489981 - RNA, 19 nt, Human
uugagaaaaauauauacua

SEQ ID NO: 1489982 - RNA, 13 nt, Human
uugacaugggaca

SEQ ID NO: 1489983 - RNA, 16 nt, Human
aucucuuguuuaaauu

SEQ ID NO: 1489984 - RNA, 22 nt, Human
uugcaagccagauuuuccugaa

SEQ ID NO: 1489985 - RNA, 18 nt, Human
uugcaacuuuguauaaaa

SEQ ID NO: 1489986 - RNA, 16 nt, Human
uugcaacuuuguauaa

SEQ ID NO: 1489987 - RNA, 17 nt, Human
uugcaacuuuguauaaa

SEQ ID NO: 1489988 - RNA, 14 nt, Human
uugcucuugaugcc

SEQ ID NO: 1489989 - RNA, 17 nt, Human
uugcucuugaugccugg

SEQ ID NO: 1489990 - RNA, 18 nt, Human
uugcucuugaugccuggc

SEQ ID NO: 1489991 - RNA, 20 nt, Human
uugcuuuguauuguauauua

SEQ ID NO: 1489992 - RNA, 16 nt, Human
uugcuuuuaaaaucca

SEQ ID NO: 1489993 - RNA, 15 nt, Human
uuggagaagaacuga

SEQ ID NO: 1489994 - RNA, 22 nt, Human
uuggagaagaacugaaaucaua

SEQ ID NO: 1489995 - RNA, 17 nt, Human
uuggagaagaacugaaa

SEQ ID NO: 1489996 - RNA, 16 nt, Human
aucuuauaauuuaaaa

SEQ ID NO: 1489997 - RNA, 15 nt, Human
aucuuauaauuuaaa

SEQ ID NO: 1489998 - RNA, 15 nt, Human
augaagcaaugcuuc

SEQ ID NO: 1489999 - RNA, 14 nt, Human
augaagcaaugcuu

SEQ ID NO: 1490000 - RNA, 13 nt, Human
augaaauauuaug

SEQ ID NO: 1490001 - RNA, 13 nt, Human
uuggccaugcaga

SEQ ID NO: 1490002 - RNA, 19 nt, Human
uuggccaugcagaaagcau

SEQ ID NO: 1490003 - RNA, 20 nt, Human
uugguuuucacauuggaaac

SEQ ID NO: 1490004 - RNA, 22 nt, Human
uuguaagcaugcacaaauucug

SEQ ID NO: 1490005 - RNA, 12 nt, Human
uuguaaugaaaa

SEQ ID NO: 1490006 - RNA, 21 nt, Human
augcuucuguuuuauaauuuu

SEQ ID NO: 1490007 - RNA, 22 nt, Human
augcuguauuuuaaaagaauga

SEQ ID NO: 1490008 - RNA, 23 nt, Human
augcuguauuuuaaaagaaugau

SEQ ID NO: 1490009 - RNA, 19 nt, Human
uuucaugcuguucaugaaa

SEQ ID NO: 1490010 - RNA, 21 nt, Human
uuucaugcuguucaugaaaga

SEQ ID NO: 1490011 - RNA, 19 nt, Human
uuucaaacauauauaacaa

SEQ ID NO: 1490012 - RNA, 19 nt, Human
uuucacauuggaaacaagu

SEQ ID NO: 1490013 - RNA, 14 nt, Human
uuucacauuggaaa

SEQ ID NO: 1490014 - RNA, 13 nt, Human
uuucacauuggaa

SEQ ID NO: 1490015 - RNA, 17 nt, Human
uuuagggguagcauuug

SEQ ID NO: 1490016 - RNA, 21 nt, Human
uuuauaugcuucuguuuuaua

SEQ ID NO: 1490017 - RNA, 21 nt, Human
uuuauauguaccguaggcuuu

SEQ ID NO: 1490018 - RNA, 19 nt, Human
augcgagugcucauuucag

SEQ ID NO: 1490019 - RNA, 18 nt, Human
augcuacaggauuugaaa

SEQ ID NO: 1490020 - RNA, 22 nt, Human
augccuuuucccaacuccagaa

SEQ ID NO: 1490021 - RNA, 20 nt, Human
augccuuuucccaacuccag

SEQ ID NO: 1490022 - RNA, 20 nt, Human
augccccugaauuuaaauag

SEQ ID NO: 1490023 - RNA, 15 nt, Human
augccccugaauuua

SEQ ID NO: 1490024 - RNA, 16 nt, Human
augcagaaagcauccc

SEQ ID NO: 1490025 - RNA, 15 nt, Human
augcagaaagcaucc

SEQ ID NO: 1490026 - RNA, 18 nt, Human
uuuaaaaaaauuccaagu

SEQ ID NO: 1490027 - RNA, 14 nt, Human
uuuaagagacagcc

SEQ ID NO: 1490028 - RNA, 12 nt, Human
uuuaaauguaua

SEQ ID NO: 1490029 - RNA, 13 nt, Human
uuuaaauguauac

SEQ ID NO: 1490030 - RNA, 21 nt, Human
uuuaaauauaugcuaagucuu

SEQ ID NO: 1490031 - RNA, 20 nt, Human
uuuaaaaaagaaacauuugg

SEQ ID NO: 1490032 - RNA, 18 nt, Human
uuguagcauccuggaaua

SEQ ID NO: 1490033 - RNA, 16 nt, Human
uuguagcauccuggaa

SEQ ID NO: 1490034 - RNA, 20 nt, Human
uugucaauaaaauccauaca

SEQ ID NO: 1490035 - RNA, 20 nt, Human
uuuuugggcagcaauuuaaa

SEQ ID NO: 1490036 - RNA, 21 nt, Human
uuuuugggcagcaauuuaaau

SEQ ID NO: 1490037 - RNA, 23 nt, Human
uuuuugggcagcaauuuaaaugu

SEQ ID NO: 1490038 - RNA, 11 nt, Human
uuuuuguagua

SEQ ID NO: 1490039 - RNA, 17 nt, Human
uuuuuauauuugaaaua

SEQ ID NO: 1490040 - RNA, 13 nt, Human
uuuuucaaaagaa

SEQ ID NO: 1490041 - RNA, 16 nt, Human
uuuuugagacagaguc

SEQ ID NO: 1490042 - RNA, 14 nt, Human
uuuugugaagcaaa

SEQ ID NO: 1490043 - RNA, 11 nt, Human
uuuuuacauuu

SEQ ID NO: 1490044 - RNA, 16 nt, Human
auuacuguaagaaaau

SEQ ID NO: 1490045 - RNA, 15 nt, Human
auuacuguaagaaaa

SEQ ID NO: 1490046 - RNA, 17 nt, Human
auuccaagugauugaaa

SEQ ID NO: 1490047 - RNA, 14 nt, Human
auucagccuggcuu

SEQ ID NO: 1490048 - RNA, 20 nt, Human
auuauauggcuugaguuuaa

SEQ ID NO: 1490049 - RNA, 16 nt, Human
auucaaaaauuaucua

SEQ ID NO: 1490050 - RNA, 23 nt, Human
auucaaaaauuaucuauagcuaa

SEQ ID NO: 1490051 - RNA, 15 nt, Human
auucagccuggcuuc

SEQ ID NO: 1490052 - RNA, 18 nt, Human
uuugacaaagguaaauca

SEQ ID NO: 1490053 - RNA, 20 nt, Human
uuugagacagagucuuccuc

SEQ ID NO: 1490054 - RNA, 19 nt, Human
uuugcuaagcauuccaacu

SEQ ID NO: 1490055 - RNA, 21 nt, Human
uuugggcagcaauuuaaaugu

SEQ ID NO: 1490056 - RNA, 19 nt, Human
auguauacuauaguaccag

SEQ ID NO: 1490057 - RNA, 23 nt, Human
augucgucaaagcugaaauggac

SEQ ID NO: 1490058 - RNA, 17 nt, Human
uuuguaguagcguuuuu

SEQ ID NO: 1490059 - RNA, 17 nt, Human
uuuguaguguuggagaa

SEQ ID NO: 1490060 - RNA, 19 nt, Human
uuuguaguagcguuuuuua

SEQ ID NO: 1490061 - RNA, 15 nt, Human
uuuguaguagcguuu

SEQ ID NO: 1490062 - RNA, 21 nt, Human
uuuucuuaaccagaucauugu

SEQ ID NO: 1490063 - RNA, 15 nt, Human
auguuuuuuuuuaaa

SEQ ID NO: 1490064 - RNA, 19 nt, Human
uuuuaguugcaacuuugua

SEQ ID NO: 1490065 - RNA, 20 nt, Human
uuuucaggcuagauguaugu

SEQ ID NO: 1490066 - RNA, 17 nt, Human
uuuucucugauacagaa

SEQ ID NO: 1490067 - RNA, 16 nt, Human
uuuucuauaauuuaaa

SEQ ID NO: 1490068 - RNA, 20 nt, Human
auguucuuuuaaaugauuga

SEQ ID NO: 1490069 - RNA, 18 nt, Human
auguuaugacuauguaaa

SEQ ID NO: 1490070 - RNA, 24 nt, Human
auguuaugacuauguaaacuacuu

SEQ ID NO: 1490071 - RNA, 21 nt, Human
augugcuaguaauuggaaagg

SEQ ID NO: 1490072 - RNA, 15 nt, Human
auguguguuuuaaaa

SEQ ID NO: 1490073 - RNA, 19 nt, Human
auuggagcucgugggacag

SEQ ID NO: 1490074 - RNA, 17 nt, Human
auuggagcucgugggac

SEQ ID NO: 1490075 - RNA, 16 nt, Human
auuggagcucguggaa

SEQ ID NO: 1490076 - RNA, 14 nt, Human
auuggaaacaaguc

SEQ ID NO: 1490077 - RNA, 19 nt, Human
auuugauaugugaacaguu

SEQ ID NO: 1490078 - RNA, 18 nt, Human
auuugauaugugaacagu

SEQ ID NO: 1490079 - RNA, 14 nt, Human
auuugguuuucaca

SEQ ID NO: 1490080 - RNA, 12 nt, Human
auuugguuuuca

SEQ ID NO: 1490081 - RNA, 14 nt, Human
auuuccuaaauaua

SEQ ID NO: 1490082 - RNA, 21 nt, Human
auuuccuaaauauauuuuaag

SEQ ID NO: 1490083 - RNA, 21 nt, Human
auuuauuuuaauaauguuuca

SEQ ID NO: 1490084 - RNA, 20 nt, Human
auuuauuacuguaagaaaau

SEQ ID NO: 1490085 - RNA, 19 nt, Human
auuuauuacuguaagaaaa

SEQ ID NO: 1490086 - RNA, 16 nt, Human
auuuaguguucauaaa

SEQ ID NO: 1490087 - RNA, 16 nt, Human
auuuaguuguaaacca

SEQ ID NO: 1490088 - RNA, 17 nt, Human
auuuaguguucauaaau

SEQ ID NO: 1490089 - RNA, 15 nt, Human
auuuauaaacuuuuu

SEQ ID NO: 1490090 - RNA, 19 nt, Human
auuguuuuacaauaguucu

SEQ ID NO: 1490091 - RNA, 20 nt, Human
auuguagcauccuggaauau

SEQ ID NO: 1490092 - RNA, 17 nt, Human
auuguagcauccuggaa

SEQ ID NO: 1490093 - RNA, 16 nt, Human
auuguaguccuguaau

SEQ ID NO: 1490094 - RNA, 16 nt, Human
auuuaaauagcuuuuu

SEQ ID NO: 1490095 - RNA, 22 nt, Human
auuuaccacuuguguuuugcaa

SEQ ID NO: 1490096 - RNA, 15 nt, Human
auuuaccacuugugu

SEQ ID NO: 1490097 - RNA, 18 nt, Human
auaagcuuaugcuuaaau

SEQ ID NO: 1490098 - RNA, 17 nt, Human
agugcucauuucaggau

SEQ ID NO: 1490099 - RNA, 20 nt, Human
aguggcaucaucucagcuca

SEQ ID NO: 1490100 - RNA, 19 nt, Human
aguggcaucaucucagcuc

SEQ ID NO: 1490101 - RNA, 11 nt, Human
aguguuucuuu

SEQ ID NO: 1490102 - RNA, 15 nt, Human
aguuaacuauugcau

SEQ ID NO: 1490103 - RNA, 17 nt, Human
aguuaacuauugcauuu

SEQ ID NO: 1490104 - RNA, 19 nt, Human
aguuaacuauugcauuuau

SEQ ID NO: 1490105 - RNA, 24 nt, Human
aguuaacuauugcauuuauaugua

SEQ ID NO: 1490106 - RNA, 20 nt, Human
aguuaacuauugcauuuaua

SEQ ID NO: 1490107 - RNA, 16 nt, Human
auaaaagacagugaaa

SEQ ID NO: 1490108 - RNA, 15 nt, Human
auaaaagacagugaa

SEQ ID NO: 1490109 - RNA, 13 nt, Human
auaaaaagaauga

SEQ ID NO: 1490110 - RNA, 17 nt, Human
aguaacuacaguuaggg

SEQ ID NO: 1490111 - RNA, 19 nt, Human
aguaacuacaguuagggcu

SEQ ID NO: 1490112 - RNA, 22 nt, Human
aguauauugauccagaaagaaa

SEQ ID NO: 1490113 - RNA, 16 nt, Human
augcauggaaauuccc

SEQ ID NO: 1490114 - RNA, 24 nt, Human
augcauauuauuuuauguugcaua

SEQ ID NO: 1490115 - RNA, 23 nt, Human
auggcuuccuggcaauagucaaa

SEQ ID NO: 1490116 - RNA, 20 nt, Human
augggacauuugcucaugga

SEQ ID NO: 1490117 - RNA, 11 nt, Human
aucuaggauuu

SEQ ID NO: 1490118 - RNA, 19 nt, Human
aucuaggauuuuaagggaa

SEQ ID NO: 1490119 - RNA, 12 nt, Human
augaggccagac

SEQ ID NO: 1490120 - RNA, 13 nt, Human
augaggccagacc

SEQ ID NO: 1490121 - RNA, 14 nt, Human
augaggccagacca

SEQ ID NO: 1490122 - RNA, 17 nt, Human
augaggccagaccaugg

SEQ ID NO: 1490123 - RNA, 21 nt, Human
augaauacauuuccaaaaugg

SEQ ID NO: 1490124 - RNA, 14 nt, Human
augaauacauuucc

SEQ ID NO: 1490125 - RNA, 20 nt, Human
augaagccuccuuagaaaaa

SEQ ID NO: 1490126 - RNA, 16 nt, Human
augaaacuuuuggaag

SEQ ID NO: 1490127 - RNA, 18 nt, Human
auauuuuuuucugaaauu

SEQ ID NO: 1490128 - RNA, 16 nt, Human
auauuuuuuucugaaa

SEQ ID NO: 1490129 - RNA, 14 nt, Human
auauuuuuuucuga

SEQ ID NO: 1490130 - RNA, 19 nt, Human
auauuuuuuucugaaauuu

SEQ ID NO: 1490131 - RNA, 23 nt, Human
auccacuuuaucuugaauaaugu

SEQ ID NO: 1490132 - RNA, 23 nt, Human
auccagccuaacuuacauucuua

SEQ ID NO: 1490133 - RNA, 19 nt, Human
auccagccuggggcugagg

SEQ ID NO: 1490134 - RNA, 21 nt, Human
auccagccuggggcugaggcu

SEQ ID NO: 1490135 - RNA, 14 nt, Human
auccaggccggcuu

SEQ ID NO: 1490136 - RNA, 23 nt, Human
auccaggccggcuugccacaccc

SEQ ID NO: 1490137 - RNA, 12 nt, Human
auccuugaagau

SEQ ID NO: 1490138 - RNA, 17 nt, Human
auccagggggcaagagg

SEQ ID NO: 1490139 - RNA, 12 nt, Human
aucccccagaaa

SEQ ID NO: 1490140 - RNA, 17 nt, Human
aucccccagaaaagaaa

SEQ ID NO: 1490141 - RNA, 13 nt, Human
agaacaucccucc

SEQ ID NO: 1490142 - RNA, 17 nt, Human
agaacaucccuccuggg

SEQ ID NO: 1490143 - RNA, 21 nt, Human
agaagacugcauuauauuuau

SEQ ID NO: 1490144 - RNA, 19 nt, Human
agacaaggaaaaaauaaca

SEQ ID NO: 1490145 - RNA, 23 nt, Human
agacaauugagguaaguuuuuug

SEQ ID NO: 1490146 - RNA, 12 nt, Human
agaccaccucuc

SEQ ID NO: 1490147 - RNA, 17 nt, Human
agaccaccucucaauau

SEQ ID NO: 1490148 - RNA, 12 nt, Human
agaccauggaca

SEQ ID NO: 1490149 - RNA, 21 nt, Human
agaccauggacacuacaccca

SEQ ID NO: 1490150 - RNA, 22 nt, Human
agaccauggacacuacacccag

SEQ ID NO: 1490151 - RNA, 23 nt, Human
agaccauggacacuacacccagc

SEQ ID NO: 1490152 - RNA, 18 nt, Human
agacgaaacauuuguucu

SEQ ID NO: 1490153 - RNA, 13 nt, Human
agcaauuuaaaug

SEQ ID NO: 1490154 - RNA, 16 nt, Human
agcaauuuaaauguua

SEQ ID NO: 1490155 - RNA, 17 nt, Human
agcaauuuaaauguuau

SEQ ID NO: 1490156 - RNA, 19 nt, Human
agcaauuuaaauguuauga

SEQ ID NO: 1490157 - RNA, 17 nt, Human
agccaacuauggccugu

SEQ ID NO: 1490158 - RNA, 12 nt, Human
agcaacaauaaa

SEQ ID NO: 1490159 - RNA, 13 nt, Human
agcaacaauaaau

SEQ ID NO: 1490160 - RNA, 18 nt, Human
agcaacaauaaauagaca

SEQ ID NO: 1490161 - RNA, 23 nt, Human
agcaaaauuuuuucucuaggaaa

SEQ ID NO: 1490162 - RNA, 17 nt, Human
agauugagauguguuca

SEQ ID NO: 1490163 - RNA, 20 nt, Human
agauagauaggucagugcaa

SEQ ID NO: 1490164 - RNA, 16 nt, Human
agauaugauucaaaug

SEQ ID NO: 1490165 - RNA, 15 nt, Human
agauaugauucaaau

SEQ ID NO: 1490166 - RNA, 14 nt, Human
agauaugauucaaa

SEQ ID NO: 1490167 - RNA, 17 nt, Human
agccugcugccugcuuu

SEQ ID NO: 1490168 - RNA, 13 nt, Human
agcuacaaaugca

SEQ ID NO: 1490169 - RNA, 24 nt, Human
agcgauucuccugccucagccucc

SEQ ID NO: 1490170 - RNA, 23 nt, Human
agcuuuuuucucugauacagaaa

SEQ ID NO: 1490171 - RNA, 22 nt, Human
agcuuuuuucucugauacagaa

SEQ ID NO: 1490172 - RNA, 20 nt, Human
agcuuuuuucucugauacag

SEQ ID NO: 1490173 - RNA, 19 nt, Human
agcuuuuuucucugauaca

SEQ ID NO: 1490174 - RNA, 18 nt, Human
aggaaaaaauaacaauga

SEQ ID NO: 1490175 - RNA, 18 nt, Human
agcuguaugauucccagc

SEQ ID NO: 1490176 - RNA, 17 nt, Human
agcuguaugauucccag

SEQ ID NO: 1490177 - RNA, 22 nt, Human
aggcucuggagcccacuguacu

SEQ ID NO: 1490178 - RNA, 17 nt, Human
agggacugagaaauuua

SEQ ID NO: 1490179 - RNA, 15 nt, Human
agggacugagaaauu

SEQ ID NO: 1490180 - RNA, 13 nt, Human
agggacugagaaa

SEQ ID NO: 1490181 - RNA, 14 nt, Human
agggacugagaaau

SEQ ID NO: 1490182 - RNA, 22 nt, Human
aggcagaacucaucuagguaaa

SEQ ID NO: 1490183 - RNA, 23 nt, Human
aggcaugugucaccaugcccagc

SEQ ID NO: 1490184 - RNA, 18 nt, Human
aggaguuucguuuucaaa

SEQ ID NO: 1490185 - RNA, 21 nt, Human
acacgcacggcagccacagcu

SEQ ID NO: 1490186 - RNA, 11 nt, Human
aauuguaauag

SEQ ID NO: 1490187 - RNA, 15 nt, Human
aauuuccugggagcu

SEQ ID NO: 1490188 - RNA, 12 nt, Human
aauuuccuggga

SEQ ID NO: 1490189 - RNA, 17 nt, Human
aauuuccugggagcuuu

SEQ ID NO: 1490190 - RNA, 23 nt, Human
aauucuaccaaggucuucuuaau

SEQ ID NO: 1490191 - RNA, 18 nt, Human
aauuaugaaacuuuugga

SEQ ID NO: 1490192 - RNA, 23 nt, Human
aauuaucuauagcuaaguacaca

SEQ ID NO: 1490193 - RNA, 15 nt, Human
aauuaugaaacuuuu

SEQ ID NO: 1490194 - RNA, 13 nt, Human
aauuaugaaacuu

SEQ ID NO: 1490195 - RNA, 12 nt, Human
aauuaugaaacu

SEQ ID NO: 1490196 - RNA, 15 nt, Human
aauuaucuauagcua

SEQ ID NO: 1490197 - RNA, 22 nt, Human
aauuaucuauagcuaaguacac

SEQ ID NO: 1490198 - RNA, 20 nt, Human
acauaaguauuuaauucaug

SEQ ID NO: 1490199 - RNA, 20 nt, Human
acaucccuuaccugggaaag

SEQ ID NO: 1490200 - RNA, 21 nt, Human
acauuuguauaaaauaauuuu

SEQ ID NO: 1490201 - RNA, 19 nt, Human
acauuuguauaaaauaauu

SEQ ID NO: 1490202 - RNA, 16 nt, Human
acauuuguauaaaaua

SEQ ID NO: 1490203 - RNA, 16 nt, Human
acauuugcucauggaa

SEQ ID NO: 1490204 - RNA, 15 nt, Human
acauuugcucaugga

SEQ ID NO: 1490205 - RNA, 24 nt, Human
acaggaugguucccuugaugaaga

SEQ ID NO: 1490206 - RNA, 23 nt, Human
acagugaucaaguuauuuuuaau

SEQ ID NO: 1490207 - RNA, 22 nt, Human
acugucuuuuuucuaaaguaaa

SEQ ID NO: 1490208 - RNA, 23 nt, Human
acugucuuuuuucuaaaguaaaa

SEQ ID NO: 1490209 - RNA, 16 nt, Human
acugucuuuuuucuaa

SEQ ID NO: 1490210 - RNA, 15 nt, Human
acugccuauuuuaau

SEQ ID NO: 1490211 - RNA, 17 nt, Human
acuguaaaauaauaacu

SEQ ID NO: 1490212 - RNA, 19 nt, Human
acuucaaauccuugaagau

SEQ ID NO: 1490213 - RNA, 18 nt, Human
acuucaaauccuugaaga

SEQ ID NO: 1490214 - RNA, 17 nt, Human
acuucaaauccuugaag

SEQ ID NO: 1490215 - RNA, 21 nt, Human
acuucuuuuuucaaaagaaag

SEQ ID NO: 1490216 - RNA, 22 nt, Human
acuucuuuuuucaaaagaaagu

SEQ ID NO: 1490217 - RNA, 23 nt, Human
acuucuuuuuucaaaagaaaguc

SEQ ID NO: 1490218 - RNA, 12 nt, Human
acuugaaaauua

SEQ ID NO: 1490219 - RNA, 14 nt, Human
acuugaaaauuaac

SEQ ID NO: 1490220 - RNA, 16 nt, Human
acuugaaaauuaacau

SEQ ID NO: 1490221 - RNA, 17 nt, Human
acuucagcgguuuauau

SEQ ID NO: 1490222 - RNA, 20 nt, Human
acuccgugcuuaaccaaaga

SEQ ID NO: 1490223 - RNA, 19 nt, Human
acucguuaauuuguagugu

SEQ ID NO: 1490224 - RNA, 14 nt, Human
acucguuaauuugu

SEQ ID NO: 1490225 - RNA, 19 nt, Human
acugauaugggucuugaua

SEQ ID NO: 1490226 - RNA, 14 nt, Human
acugauuacugccu

SEQ ID NO: 1490227 - RNA, 20 nt, Human
acugaauuaugaaacuuuug

SEQ ID NO: 1490228 - RNA, 15 nt, Human
acugaauuaugaaac

SEQ ID NO: 1490229 - RNA, 14 nt, Human
acugaauuaugaaa

SEQ ID NO: 1490230 - RNA, 13 nt, Human
acugaauuaugaa

SEQ ID NO: 1490231 - RNA, 20 nt, Human
accuguggaacauaaaaagg

SEQ ID NO: 1490232 - RNA, 23 nt, Human
accuguggaacauaaaaaggaca

SEQ ID NO: 1490233 - RNA, 20 nt, Human
acuaauguguaagacaaaaa

SEQ ID NO: 1490234 - RNA, 18 nt, Human
acgugcucugugggucuc

SEQ ID NO: 1490235 - RNA, 14 nt, Human
acgucuuaaauauu

SEQ ID NO: 1490236 - RNA, 13 nt, Human
acgucuuaaauau

SEQ ID NO: 1490237 - RNA, 15 nt, Human
acccucacacuggga

SEQ ID NO: 1490238 - RNA, 16 nt, Human
acccuaaauaauaaaa

SEQ ID NO: 1490239 - RNA, 20 nt, Human
acccuaaauaauaaaaauaa

SEQ ID NO: 1490240 - RNA, 13 nt, Human
acccuaaccaagu

SEQ ID NO: 1490241 - RNA, 14 nt, Human
acccuaaccaaguu

SEQ ID NO: 1490242 - RNA, 15 nt, Human
acccuaaccaaguuc

SEQ ID NO: 1490243 - RNA, 16 nt, Human
acccuaaccaaguucc

SEQ ID NO: 1490244 - RNA, 17 nt, Human
acccuaaccaaguuccu

SEQ ID NO: 1490245 - RNA, 13 nt, Human
acccuagcaaaag

SEQ ID NO: 1490246 - RNA, 13 nt, Human
acccucaugcugu

SEQ ID NO: 1490247 - RNA, 12 nt, Human
acccucaugcug

SEQ ID NO: 1490248 - RNA, 16 nt, Human
aauauauaucaaauau

SEQ ID NO: 1490249 - RNA, 20 nt, Human
aaugaauacuuuauaaagga

SEQ ID NO: 1490250 - RNA, 20 nt, Human
aaugaagauacugaaauaaa

SEQ ID NO: 1490251 - RNA, 14 nt, Human
aaugaagcaaugcu

SEQ ID NO: 1490252 - RNA, 16 nt, Human
aaucucaauauuucag

SEQ ID NO: 1490253 - RNA, 17 nt, Human
aaucucaauucuucccu

SEQ ID NO: 1490254 - RNA, 11 nt, Human
aauaaagcaau

SEQ ID NO: 1490255 - RNA, 12 nt, Human
aauaaagcaauu

SEQ ID NO: 1490256 - RNA, 19 nt, Human
aauaaacacucuugaaaaa

SEQ ID NO: 1490257 - RNA, 11 nt, Human
aauaaacacuc

SEQ ID NO: 1490258 - RNA, 16 nt, Human
aauaaacacucuugaa

SEQ ID NO: 1490259 - RNA, 22 nt, Human
aagacaagaacuccccuuuuuu

SEQ ID NO: 1490260 - RNA, 15 nt, Human
aagaagacugcauua

SEQ ID NO: 1490261 - RNA, 20 nt, Human
aagaagacugcauuauauuu

SEQ ID NO: 1490262 - RNA, 21 nt, Human
aagacaaggaaaaaauaacaa

SEQ ID NO: 1490263 - RNA, 15 nt, Human
aagaacugaaaucau

SEQ ID NO: 1490264 - RNA, 13 nt, Human
aagaacugaaauc

SEQ ID NO: 1490265 - RNA, 12 nt, Human
aagaacugaaau

SEQ ID NO: 1490266 - RNA, 11 nt, Human
aagaacugaaa

SEQ ID NO: 1490267 - RNA, 14 nt, Human
aagaacggaagaag

SEQ ID NO: 1490268 - RNA, 15 nt, Human
aagagaucaggaaga

SEQ ID NO: 1490269 - RNA, 16 nt, Human
aagagaucaggaagag

SEQ ID NO: 1490270 - RNA, 22 nt, Human
aagagaucaggaagagaaggag

SEQ ID NO: 1490271 - RNA, 19 nt, Human
aaggcagggaggaggcaga

SEQ ID NO: 1490272 - RNA, 14 nt, Human
aaggcagggaggag

SEQ ID NO: 1490273 - RNA, 13 nt, Human
aagcuacuuauug

SEQ ID NO: 1490274 - RNA, 16 nt, Human
aaaucucaauucuucc

SEQ ID NO: 1490275 - RNA, 18 nt, Human
aaaucucaauauuucaga

SEQ ID NO: 1490276 - RNA, 14 nt, Human
aaaugaaaaaauau

SEQ ID NO: 1490277 - RNA, 21 nt, Human
aaauauuuauuuuaauaaugu

SEQ ID NO: 1490278 - RNA, 22 nt, Human
aaauauuguuuuacaauaguuc

SEQ ID NO: 1490279 - RNA, 23 nt, Human
aaauguugacaugggacauuugc

SEQ ID NO: 1490280 - RNA, 22 nt, Human
aaauguugacaugggacauuug

SEQ ID NO: 1490281 - RNA, 18 nt, Human
aaccuuuguuugcaucug

SEQ ID NO: 1490282 - RNA, 12 nt, Human
aacaucuuuaag

SEQ ID NO: 1490283 - RNA, 18 nt, Human
aacaucuuuaaggggagg

SEQ ID NO: 1490284 - RNA, 22 nt, Human
aaaccgaacugauguaaguaaa

SEQ ID NO: 1490285 - RNA, 18 nt, Human
aaaaguugaauuuuacau

SEQ ID NO: 1490286 - RNA, 11 nt, Human
aaaagaaugau

SEQ ID NO: 1490287 - RNA, 20 nt, Human
aaaagacaaggaaaaaauaa

SEQ ID NO: 1490288 - RNA, 15 nt, Human
aaaagaaaauuuuug

SEQ ID NO: 1490289 - RNA, 20 nt, Human
caccauguuggccaggcuug

SEQ ID NO: 1490290 - RNA, 21 nt, Human
caccauauuggccagucuggu

SEQ ID NO: 1490291 - RNA, 20 nt, Human
cacaugaaguccaagcauuu

SEQ ID NO: 1490292 - RNA, 17 nt, Human
cacaugaaguccaagca

SEQ ID NO: 1490293 - RNA, 14 nt, Human
caauauucaauaaa

SEQ ID NO: 1490294 - RNA, 15 nt, Human
caauauucaauaaag

SEQ ID NO: 1490295 - RNA, 16 nt, Human
caauauucaauaaagc

SEQ ID NO: 1490296 - RNA, 17 nt, Human
caauauucaauaaagcu

SEQ ID NO: 1490297 - RNA, 22 nt, Human
cacaccuacuagucaccagaga

SEQ ID NO: 1490298 - RNA, 12 nt, Human
caaagaaauuau

SEQ ID NO: 1490299 - RNA, 13 nt, Human
caaagaaauuaug

SEQ ID NO: 1490300 - RNA, 15 nt, Human
caaagaaauuaugug

SEQ ID NO: 1490301 - RNA, 19 nt, Human
auuuuaauaauguuucaaa

SEQ ID NO: 1490302 - RNA, 18 nt, Human
auuuuaauaauguuucaa

SEQ ID NO: 1490303 - RNA, 17 nt, Human
caaauuguaagcaugca

SEQ ID NO: 1490304 - RNA, 15 nt, Human
caaccucauccucuc

SEQ ID NO: 1490305 - RNA, 20 nt, Human
caaccuccgcauccgggguu

SEQ ID NO: 1490306 - RNA, 19 nt, Human
caagcauuuagauguauag

SEQ ID NO: 1490307 - RNA, 16 nt, Human
caagcauuuagaugua

SEQ ID NO: 1490308 - RNA, 16 nt, Human
caagaccgaucggcgg

SEQ ID NO: 1490309 - RNA, 14 nt, Human
cauuugcucaugga

SEQ ID NO: 1490310 - RNA, 13 nt, Human
cauuugcucaugg

SEQ ID NO: 1490311 - RNA, 19 nt, Human
cauuuuagggguagcauuu

SEQ ID NO: 1490312 - RNA, 23 nt, Human
cauuguauucagaguugaugguu

SEQ ID NO: 1490313 - RNA, 12 nt, Human
ccaacccuagca

SEQ ID NO: 1490314 - RNA, 22 nt, Human
ccaaacugacucuuaagaagac

SEQ ID NO: 1490315 - RNA, 21 nt, Human
ccaacaagauugcuuaauaaa

SEQ ID NO: 1490316 - RNA, 16 nt, Human
ccaaggucuucuuaau

SEQ ID NO: 1490317 - RNA, 20 nt, Human
ccaaguaacugggauuacag

SEQ ID NO: 1490318 - RNA, 20 nt, Human
ccaaguagcugagacuacag

SEQ ID NO: 1490319 - RNA, 17 nt, Human
ccaagcuauucaauucu

SEQ ID NO: 1490320 - RNA, 17 nt, Human
ccaagcauuuagaugua

SEQ ID NO: 1490321 - RNA, 14 nt, Human
ccaagcaaguauua

SEQ ID NO: 1490322 - RNA, 20 nt, Human
ccaagcaccugggauuacaa

SEQ ID NO: 1490323 - RNA, 14 nt, Human
ccacuucagccucc

SEQ ID NO: 1490324 - RNA, 22 nt, Human
ccaccugucugucugucugucc

SEQ ID NO: 1490325 - RNA, 11 nt, Human
ccaccugucug

SEQ ID NO: 1490326 - RNA, 12 nt, Human
ccaccugucugu

SEQ ID NO: 1490327 - RNA, 14 nt, Human
ccaccugucugucu

SEQ ID NO: 1490328 - RNA, 16 nt, Human
ccaccugucugucugu

SEQ ID NO: 1490329 - RNA, 17 nt, Human
ccacggggacucagccc

SEQ ID NO: 1490330 - RNA, 14 nt, Human
ccacgguguucugu

SEQ ID NO: 1490331 - RNA, 16 nt, Human
ccaccauggccagcua

SEQ ID NO: 1490332 - RNA, 20 nt, Human
ccacaggaaccacaagacug

SEQ ID NO: 1490333 - RNA, 19 nt, Human
ccaggcuuuuuuaucaugu

SEQ ID NO: 1490334 - RNA, 18 nt, Human
ccaguaucucuucagucu

SEQ ID NO: 1490335 - RNA, 20 nt, Human
ccaguaucucuucagucucu

SEQ ID NO: 1490336 - RNA, 20 nt, Human
ccaguaggggcuuauaauaa

SEQ ID NO: 1490337 - RNA, 15 nt, Human
ccaguaucucuucag

SEQ ID NO: 1490338 - RNA, 16 nt, Human
ccaguaucucuucagu

SEQ ID NO: 1490339 - RNA, 17 nt, Human
ccagcuggggccaggcu

SEQ ID NO: 1490340 - RNA, 18 nt, Human
ccagcuggggccaggcug

SEQ ID NO: 1490341 - RNA, 19 nt, Human
ccagcuggggccaggcugg

SEQ ID NO: 1490342 - RNA, 20 nt, Human
ccagcuggggccaggcuggg

SEQ ID NO: 1490343 - RNA, 21 nt, Human
ccagcuggggccaggcugggu

SEQ ID NO: 1490344 - RNA, 22 nt, Human
ccagcuggggccaggcuggguc

SEQ ID NO: 1490345 - RNA, 23 nt, Human
ccagcuggggccaggcugggucg

SEQ ID NO: 1490346 - RNA, 15 nt, Human
ccaggacaggaucca

SEQ ID NO: 1490347 - RNA, 17 nt, Human
ccaggacaggauccagg

SEQ ID NO: 1490348 - RNA, 19 nt, Human
ccaggacaggauccaggcc

SEQ ID NO: 1490349 - RNA, 13 nt, Human
ccaggacaggauc

SEQ ID NO: 1490350 - RNA, 12 nt, Human
ccauucuggaag

SEQ ID NO: 1490351 - RNA, 15 nt, Human
ccauucuggaaguga

SEQ ID NO: 1490352 - RNA, 16 nt, Human
ccaugauguuuagaaa

SEQ ID NO: 1490353 - RNA, 11 nt, Human
ccaugcagaaa

SEQ ID NO: 1490354 - RNA, 15 nt, Human
ccaugcagaaagcau

SEQ ID NO: 1490355 - RNA, 14 nt, Human
ccaugcagaaagca

SEQ ID NO: 1490356 - RNA, 18 nt, Human
ccaucaaggguacacugc

SEQ ID NO: 1490357 - RNA, 22 nt, Human
ccaucagaaacacccucacacu

SEQ ID NO: 1490358 - RNA, 23 nt, Human
ccaucagaaacacccucacacug

SEQ ID NO: 1490359 - RNA, 18 nt, Human
cccagguuggagugcagu

SEQ ID NO: 1490360 - RNA, 19 nt, Human
cccagguuggagugcagug

SEQ ID NO: 1490361 - RNA, 15 nt, Human
cccaguaucucuuca

SEQ ID NO: 1490362 - RNA, 16 nt, Human
cccaguaucucuucag

SEQ ID NO: 1490363 - RNA, 15 nt, Human
cccaauugagaaaaa

SEQ ID NO: 1490364 - RNA, 15 nt, Human
ccuacccuaaccaag

SEQ ID NO: 1490365 - RNA, 16 nt, Human
ccuacccuaaccaagu

SEQ ID NO: 1490366 - RNA, 18 nt, Human
ccuacccuaaccaaguuc

SEQ ID NO: 1490367 - RNA, 18 nt, Human
cccccaguaucucuucag

SEQ ID NO: 1490368 - RNA, 20 nt, Human
ccccuaaaagaaacccugca

SEQ ID NO: 1490369 - RNA, 16 nt, Human
cccuugaugaagaagu

SEQ ID NO: 1490370 - RNA, 16 nt, Human
cccuuuccugaguccc

SEQ ID NO: 1490371 - RNA, 23 nt, Human
ccucuuagaugcaguucugaaga

SEQ ID NO: 1490372 - RNA, 22 nt, Human
ccugaagcuaucguaaaauuaa

SEQ ID NO: 1490373 - RNA, 23 nt, Human
ccugaagcuaucguaaaauuaag

SEQ ID NO: 1490374 - RNA, 20 nt, Human
ccugaagcuaucguaaaauu

SEQ ID NO: 1490375 - RNA, 20 nt, Human
ccugaacaggauauucucac

SEQ ID NO: 1490376 - RNA, 20 nt, Human
ccucagaaaacaaggaugaa

SEQ ID NO: 1490377 - RNA, 22 nt, Human
ccucccuacccuaaccaaguuc

SEQ ID NO: 1490378 - RNA, 17 nt, Human
ccucccucaaccucauc

SEQ ID NO: 1490379 - RNA, 21 nt, Human
ccucccucaaccucauccucu

SEQ ID NO: 1490380 - RNA, 17 nt, Human
ccuccugggaaugaagc

SEQ ID NO: 1490381 - RNA, 16 nt, Human
ccucugcagucucuau

SEQ ID NO: 1490382 - RNA, 17 nt, Human
ccucugcagucucuaua

SEQ ID NO: 1490383 - RNA, 23 nt, Human
ccucugcagucucuauaccaaua

SEQ ID NO: 1490384 - RNA, 19 nt, Human
ccuguggaacauaaaaagg

SEQ ID NO: 1490385 - RNA, 23 nt, Human
ccuguggaacauaaaaaggacau

SEQ ID NO: 1490386 - RNA, 24 nt, Human
ccuguggaacauaaaaaggacauc

SEQ ID NO: 1490387 - RNA, 13 nt, Human
ccuucaucuggaa

SEQ ID NO: 1490388 - RNA, 20 nt, Human
ccuucaucuggauuccagag

SEQ ID NO: 1490389 - RNA, 14 nt, Human
ccuucaucuggaac

SEQ ID NO: 1490390 - RNA, 13 nt, Human
ccuuccacccagu

SEQ ID NO: 1490391 - RNA, 14 nt, Human
ccuugaugaagaag

SEQ ID NO: 1490392 - RNA, 22 nt, Human
ccugugagcuaggaauuguguu

SEQ ID NO: 1490393 - RNA, 20 nt, Human
ccugcuuuuuauggccugug

SEQ ID NO: 1490394 - RNA, 14 nt, Human
ccuggaaaccuucc

SEQ ID NO: 1490395 - RNA, 13 nt, Human
ccugggaggcucu

SEQ ID NO: 1490396 - RNA, 21 nt, Human
ccugggaggcucuggagccca

SEQ ID NO: 1490397 - RNA, 13 nt, Human
ccugggauuacag

SEQ ID NO: 1490398 - RNA, 12 nt, Human
ccuggcggggug

SEQ ID NO: 1490399 - RNA, 17 nt, Human
ccuggacugugugcuca

SEQ ID NO: 1490400 - RNA, 20 nt, Human
ccuggacugugugcucagga

SEQ ID NO: 1490401 - RNA, 17 nt, Human
ccuggaaaccuuccacc

SEQ ID NO: 1490402 - RNA, 18 nt, Human
ccuggaaaccuuccaccc

SEQ ID NO: 1490403 - RNA, 20 nt, Human
ccuggaaaccuuccacccag

SEQ ID NO: 1490404 - RNA, 15 nt, Human
cggaccccagccauc

SEQ ID NO: 1490405 - RNA, 21 nt, Human
cggaagaagagaucaggaaga

SEQ ID NO: 1490406 - RNA, 22 nt, Human
cggaagaagagaucaggaagag

SEQ ID NO: 1490407 - RNA, 13 nt, Human
cgcagaaggaagg

SEQ ID NO: 1490408 - RNA, 14 nt, Human
cgcgaucucagcuc

SEQ ID NO: 1490409 - RNA, 15 nt, Human
cgcgaucucagcuca

SEQ ID NO: 1490410 - RNA, 18 nt, Human
ccuuuggcaggugcagcc

SEQ ID NO: 1490411 - RNA, 19 nt, Human
ccuuuggcaggugcagccc

SEQ ID NO: 1490412 - RNA, 20 nt, Human
ccuuuggcaggugcagcccc

SEQ ID NO: 1490413 - RNA, 14 nt, Human
ccuuugacaaaggu

SEQ ID NO: 1490414 - RNA, 15 nt, Human
ccuuggccaugcaga

SEQ ID NO: 1490415 - RNA, 17 nt, Human
ccuuggccaugcagaaa

SEQ ID NO: 1490416 - RNA, 12 nt, Human
cgcagaaggaag

SEQ ID NO: 1490417 - RNA, 20 nt, Human
cgaucuugguucacugcaac

SEQ ID NO: 1490418 - RNA, 13 nt, Human
cgaucucagcuca

SEQ ID NO: 1490419 - RNA, 16 nt, Human
cguauaaaagccuguu

SEQ ID NO: 1490420 - RNA, 17 nt, Human
cguauaaaagccuguuu

SEQ ID NO: 1490421 - RNA, 21 nt, Human
cguauaaaagccuguuuaaga

SEQ ID NO: 1490422 - RNA, 22 nt, Human
cguauaaaagccuguuuaagag

SEQ ID NO: 1490423 - RNA, 20 nt, Human
cgucaacucauauuuucaug

SEQ ID NO: 1490424 - RNA, 16 nt, Human
cgucaacucauauuuu

SEQ ID NO: 1490425 - RNA, 17 nt, Human
cucuaaauucuuucauu

SEQ ID NO: 1490426 - RNA, 13 nt, Human
cucuaaauucuuu

SEQ ID NO: 1490427 - RNA, 13 nt, Human
cuccuuagaaaaa

SEQ ID NO: 1490428 - RNA, 12 nt, Human
cuccagccucag

SEQ ID NO: 1490429 - RNA, 15 nt, Human
cuccagccucagccu

SEQ ID NO: 1490430 - RNA, 17 nt, Human
cuccagccucagccucc

SEQ ID NO: 1490431 - RNA, 14 nt, Human
cuccagccucagcu

SEQ ID NO: 1490432 - RNA, 14 nt, Human
cuccacucuuucuu

SEQ ID NO: 1490433 - RNA, 15 nt, Human
cuccacagcugccuc

SEQ ID NO: 1490434 - RNA, 17 nt, Human
cguuuuuuaaauguaua

SEQ ID NO: 1490435 - RNA, 17 nt, Human
cucaucuccccaucauu

SEQ ID NO: 1490436 - RNA, 21 nt, Human
cucaucuagguaaauuacagu

SEQ ID NO: 1490437 - RNA, 14 nt, Human
cucauauuuucaug

SEQ ID NO: 1490438 - RNA, 20 nt, Human
cucugaggggcuaccaggaa

SEQ ID NO: 1490439 - RNA, 21 nt, Human
cucugaggggcuaccaggaaa

SEQ ID NO: 1490440 - RNA, 22 nt, Human
cucugcagucucuauaccaaua

SEQ ID NO: 1490441 - RNA, 23 nt, Human
cucugcaggucccuaauaaagcu

SEQ ID NO: 1490442 - RNA, 14 nt, Human
cucugcagucucua

SEQ ID NO: 1490443 - RNA, 14 nt, Human
cucuggaauuugaa

SEQ ID NO: 1490444 - RNA, 12 nt, Human
cucuggagccca

SEQ ID NO: 1490445 - RNA, 12 nt, Human
cucucugcaggu

SEQ ID NO: 1490446 - RNA, 13 nt, Human
cucucugcagguc

SEQ ID NO: 1490447 - RNA, 14 nt, Human
cucucugcaggucc

SEQ ID NO: 1490448 - RNA, 16 nt, Human
cucucugcaggucccu

SEQ ID NO: 1490449 - RNA, 17 nt, Human
cucucugcaggucccua

SEQ ID NO: 1490450 - RNA, 19 nt, Human
cucucugcaggucccuaau

SEQ ID NO: 1490451 - RNA, 22 nt, Human
cucucugcaggucccuaauaaa

SEQ ID NO: 1490452 - RNA, 13 nt, Human
cucucccaaaaaa

SEQ ID NO: 1490453 - RNA, 17 nt, Human
cucuccacagcugccuc

SEQ ID NO: 1490454 - RNA, 15 nt, Human
cucucaguugcagcc

SEQ ID NO: 1490455 - RNA, 19 nt, Human
cucucaguugcagcccugc

SEQ ID NO: 1490456 - RNA, 22 nt, Human
cucucaguugcagcccugcugc

SEQ ID NO: 1490457 - RNA, 15 nt, Human
cucucauacccuccc

SEQ ID NO: 1490458 - RNA, 15 nt, Human
cucuggagcccacug

SEQ ID NO: 1490459 - RNA, 19 nt, Human
cucuggagcccacuguacu

SEQ ID NO: 1490460 - RNA, 13 nt, Human
cucuuaagaagac

SEQ ID NO: 1490461 - RNA, 13 nt, Human
cucuucagucucu

SEQ ID NO: 1490462 - RNA, 23 nt, Human
cugaauuuaaauagcuuuuuucu

SEQ ID NO: 1490463 - RNA, 18 nt, Human
cugaauuuaaauagcuuu

SEQ ID NO: 1490464 - RNA, 14 nt, Human
cugaauuuaaauag

SEQ ID NO: 1490465 - RNA, 13 nt, Human
cugagucccaucc

SEQ ID NO: 1490466 - RNA, 18 nt, Human
cugccucuucccucuucc

SEQ ID NO: 1490467 - RNA, 19 nt, Human
cugccucuucccucuuccu

SEQ ID NO: 1490468 - RNA, 12 nt, Human
cugccucucugc

SEQ ID NO: 1490469 - RNA, 13 nt, Human
cugccucucugca

SEQ ID NO: 1490470 - RNA, 14 nt, Human
cugccucucugcag

SEQ ID NO: 1490471 - RNA, 11 nt, Human
cugcccugcca

SEQ ID NO: 1490472 - RNA, 13 nt, Human
cugcccugccacc

SEQ ID NO: 1490473 - RNA, 14 nt, Human
cugcccugccaccu

SEQ ID NO: 1490474 - RNA, 15 nt, Human
cugcccugccaccug

SEQ ID NO: 1490475 - RNA, 16 nt, Human
cugcccugccaccugu

SEQ ID NO: 1490476 - RNA, 17 nt, Human
cugcccugccaccuguc

SEQ ID NO: 1490477 - RNA, 18 nt, Human
cugcccugccaccugucu

SEQ ID NO: 1490478 - RNA, 20 nt, Human
cugcccugccaccugucugu

SEQ ID NO: 1490479 - RNA, 21 nt, Human
cugcccugccaccugucuguc

SEQ ID NO: 1490480 - RNA, 11 nt, Human
cugcccugccc

SEQ ID NO: 1490481 - RNA, 19 nt, Human
cuggguaggaaagaggaag

SEQ ID NO: 1490482 - RNA, 19 nt, Human
cugggccccugccucucug

SEQ ID NO: 1490483 - RNA, 14 nt, Human
cuggguaggaaaga

SEQ ID NO: 1490484 - RNA, 15 nt, Human
cuggguaggaaagag

SEQ ID NO: 1490485 - RNA, 17 nt, Human
cuggguaggaaagagga

SEQ ID NO: 1490486 - RNA, 12 nt, Human
cugggccccugc

SEQ ID NO: 1490487 - RNA, 16 nt, Human
cugggccccugccucu

SEQ ID NO: 1490488 - RNA, 17 nt, Human
cugggccccugccucuc

SEQ ID NO: 1490489 - RNA, 15 nt, Human
cugggaggcucugga

SEQ ID NO: 1490490 - RNA, 16 nt, Human
cugggaggcucuggag

SEQ ID NO: 1490491 - RNA, 16 nt, Human
cugggagcuuuuguag

SEQ ID NO: 1490492 - RNA, 21 nt, Human
cuggaagugcuaauuuugaaa

SEQ ID NO: 1490493 - RNA, 23 nt, Human
cuggaauaauccuaaacauauga

SEQ ID NO: 1490494 - RNA, 22 nt, Human
cuggagcuagaauuugauaugu

SEQ ID NO: 1490495 - RNA, 17 nt, Human
cuggagcuagaauuuga

SEQ ID NO: 1490496 - RNA, 16 nt, Human
cuggagcuagaauuug

SEQ ID NO: 1490497 - RNA, 21 nt, Human
cuggagcccacuguacuugcu

SEQ ID NO: 1490498 - RNA, 13 nt, Human
cuggagcccacug

SEQ ID NO: 1490499 - RNA, 15 nt, Human
cuggagcccacugua

SEQ ID NO: 1490500 - RNA, 16 nt, Human
cuggagcccacuguac

SEQ ID NO: 1490501 - RNA, 17 nt, Human
cuggagcccacuguacu

SEQ ID NO: 1490502 - RNA, 20 nt, Human
cuggagcccacuguacuugc

SEQ ID NO: 1490503 - RNA, 17 nt, Human
cuggauuauauuaugaa

SEQ ID NO: 1490504 - RNA, 21 nt, Human
cuggauuccagagcacugcuc

SEQ ID NO: 1490505 - RNA, 13 nt, Human
cuggauuccagag

SEQ ID NO: 1490506 - RNA, 12 nt, Human
cuuuuugcagcu

SEQ ID NO: 1490507 - RNA, 13 nt, Human
cuuuuugcagcuu

SEQ ID NO: 1490508 - RNA, 14 nt, Human
cuuuuugcagcuuu

SEQ ID NO: 1490509 - RNA, 13 nt, Human
gaaaacauuccau

SEQ ID NO: 1490510 - RNA, 17 nt, Human
gaaaacauuccauccuu

SEQ ID NO: 1490511 - RNA, 20 nt, Human
gaaaaguauguuagugcaaa

SEQ ID NO: 1490512 - RNA, 14 nt, Human
gaaaaguauguuag

SEQ ID NO: 1490513 - RNA, 19 nt, Human
gaaaauaacaauaaaagac

SEQ ID NO: 1490514 - RNA, 19 nt, Human
gaaaaauauauacuaaaca

SEQ ID NO: 1490515 - RNA, 14 nt, Human
gaaaacaaggauga

SEQ ID NO: 1490516 - RNA, 19 nt, Human
cuuugacaaagguaaauca

SEQ ID NO: 1490517 - RNA, 16 nt, Human
cuuugccacccucaug

SEQ ID NO: 1490518 - RNA, 17 nt, Human
cuuugccacccucaugc

SEQ ID NO: 1490519 - RNA, 18 nt, Human
cuuugccacccucaugcu

SEQ ID NO: 1490520 - RNA, 13 nt, Human
cuuuggcaggugc

SEQ ID NO: 1490521 - RNA, 24 nt, Human
cuuuggcaggugcagcccccacug

SEQ ID NO: 1490522 - RNA, 17 nt, Human
cuuugacaaagguaaau

SEQ ID NO: 1490523 - RNA, 13 nt, Human
cuuguuucauauu

SEQ ID NO: 1490524 - RNA, 18 nt, Human
cuuggggcugaugcaguu

SEQ ID NO: 1490525 - RNA, 16 nt, Human
cuuggggcugaugcag

SEQ ID NO: 1490526 - RNA, 13 nt, Human
cuugccacacccc

SEQ ID NO: 1490527 - RNA, 19 nt, Human
cuugccacaccccccaccc

SEQ ID NO: 1490528 - RNA, 23 nt, Human
cuugccacaccccccaccccuag

SEQ ID NO: 1490529 - RNA, 17 nt, Human
cuugcucuugaugccug

SEQ ID NO: 1490530 - RNA, 18 nt, Human
cuugcucuugaugccugg

SEQ ID NO: 1490531 - RNA, 19 nt, Human
cuugcucuugaugccuggc

SEQ ID NO: 1490532 - RNA, 20 nt, Human
cuugcuugauuguauggugg

SEQ ID NO: 1490533 - RNA, 20 nt, Human
cuuagaugcaguucugaaga

SEQ ID NO: 1490534 - RNA, 19 nt, Human
cuuagaugcaguucugaag

SEQ ID NO: 1490535 - RNA, 21 nt, Human
cuuaggguuaugauuaaguaa

SEQ ID NO: 1490536 - RNA, 13 nt, Human
cuuauaauuuaaa

SEQ ID NO: 1490537 - RNA, 14 nt, Human
cuuauaauaaagga

SEQ ID NO: 1490538 - RNA, 16 nt, Human
cuuauaauaaaggacu

SEQ ID NO: 1490539 - RNA, 20 nt, Human
cuuauaauaaaggacuguaa

SEQ ID NO: 1490540 - RNA, 17 nt, Human
cuuauaauaaaggacug

SEQ ID NO: 1490541 - RNA, 14 nt, Human
cuuauaauuuaaaa

SEQ ID NO: 1490542 - RNA, 13 nt, Human
cuuauaguacaug

SEQ ID NO: 1490543 - RNA, 17 nt, Human
cuuauaguacaugauaa

SEQ ID NO: 1490544 - RNA, 19 nt, Human
cuuauaguacaugauaaau

SEQ ID NO: 1490545 - RNA, 21 nt, Human
cuuaagaagacugcauuauau

SEQ ID NO: 1490546 - RNA, 14 nt, Human
cuguuuuuuuguua

SEQ ID NO: 1490547 - RNA, 19 nt, Human
cuguuuuauaauuuuguga

SEQ ID NO: 1490548 - RNA, 18 nt, Human
cuucagcgguuuauauaa

SEQ ID NO: 1490549 - RNA, 17 nt, Human
cuucuccauggcccugc

SEQ ID NO: 1490550 - RNA, 19 nt, Human
cuucuccauggcccugcca

SEQ ID NO: 1490551 - RNA, 14 nt, Human
cuucucagauuucu

SEQ ID NO: 1490552 - RNA, 19 nt, Human
cuucucagauuucugagga

SEQ ID NO: 1490553 - RNA, 22 nt, Human
cuucucagauuucugaggaaau

SEQ ID NO: 1490554 - RNA, 15 nt, Human
cuuccuucccugcug

SEQ ID NO: 1490555 - RNA, 16 nt, Human
cuuccuucccugcugu

SEQ ID NO: 1490556 - RNA, 13 nt, Human
gacugagaaauuu

SEQ ID NO: 1490557 - RNA, 11 nt, Human
gacugagaaau

SEQ ID NO: 1490558 - RNA, 16 nt, Human
gacuuauaguacauga

SEQ ID NO: 1490559 - RNA, 17 nt, Human
gacuuauaguacaugau

SEQ ID NO: 1490560 - RNA, 18 nt, Human
gacuuauaguacaugaua

SEQ ID NO: 1490561 - RNA, 15 nt, Human
gacugcggaggaagg

SEQ ID NO: 1490562 - RNA, 23 nt, Human
gacugcggaggaaggaggaccca

SEQ ID NO: 1490563 - RNA, 23 nt, Human
gacaggaugguucccuugaugaa

SEQ ID NO: 1490564 - RNA, 14 nt, Human
gacacgcacggcag

SEQ ID NO: 1490565 - RNA, 19 nt, Human
gacacgcacggcagccaca

SEQ ID NO: 1490566 - RNA, 20 nt, Human
gacacgcacggcagccacag

SEQ ID NO: 1490567 - RNA, 21 nt, Human
gacacgcacggcagccacagc

SEQ ID NO: 1490568 - RNA, 22 nt, Human
gacacgcacggcagccacagcu

SEQ ID NO: 1490569 - RNA, 14 nt, Human
gacacuacacccag

SEQ ID NO: 1490570 - RNA, 15 nt, Human
gacacuacacccagc

SEQ ID NO: 1490571 - RNA, 16 nt, Human
gacacuacacccagca

SEQ ID NO: 1490572 - RNA, 17 nt, Human
gacacuacacccagcaa

SEQ ID NO: 1490573 - RNA, 18 nt, Human
gacacuacacccagcaau

SEQ ID NO: 1490574 - RNA, 19 nt, Human
gacacuacacccagcaaua

SEQ ID NO: 1490575 - RNA, 20 nt, Human
gacacuacacccagcaauag

SEQ ID NO: 1490576 - RNA, 14 nt, Human
gacaucagcaaaca

SEQ ID NO: 1490577 - RNA, 13 nt, Human
gacauccagcaga

SEQ ID NO: 1490578 - RNA, 22 nt, Human
gacauccagcagauuuccagcc

SEQ ID NO: 1490579 - RNA, 15 nt, Human
gaccccagccaucca

SEQ ID NO: 1490580 - RNA, 19 nt, Human
gaauucuuuaaaauuacaa

SEQ ID NO: 1490581 - RNA, 22 nt, Human
gaauuuaaauagcuuuuuucuc

SEQ ID NO: 1490582 - RNA, 15 nt, Human
gaauuguguuuauaa

SEQ ID NO: 1490583 - RNA, 23 nt, Human
gaauuguguuuauaauuuuaaau

SEQ ID NO: 1490584 - RNA, 15 nt, Human
gaauggaggggcaga

SEQ ID NO: 1490585 - RNA, 16 nt, Human
gaauggaggggcagag

SEQ ID NO: 1490586 - RNA, 20 nt, Human
gaauggaggggcagagccag

SEQ ID NO: 1490587 - RNA, 21 nt, Human
gaauggaggggcagagccagg

SEQ ID NO: 1490588 - RNA, 22 nt, Human
gaauggaggggcagagccagga

SEQ ID NO: 1490589 - RNA, 19 nt, Human
gaaugaagauacugaaaua

SEQ ID NO: 1490590 - RNA, 21 nt, Human
gaaugaagauacugaaauaaa

SEQ ID NO: 1490591 - RNA, 18 nt, Human
gaaugaagauacugaaau

SEQ ID NO: 1490592 - RNA, 17 nt, Human
gaaugaagauacugaaa

SEQ ID NO: 1490593 - RNA, 20 nt, Human
gaauaauccuaaacauauga

SEQ ID NO: 1490594 - RNA, 20 nt, Human
gaauacucuuauaucuauau

SEQ ID NO: 1490595 - RNA, 22 nt, Human
gaaguccaagcauuuagaugua

SEQ ID NO: 1490596 - RNA, 12 nt, Human
gaaguccaagca

SEQ ID NO: 1490597 - RNA, 21 nt, Human
gaacuagaguuuagcuggaaa

SEQ ID NO: 1490598 - RNA, 14 nt, Human
gaacuacugaggau

SEQ ID NO: 1490599 - RNA, 14 nt, Human
gaacaucccuccug

SEQ ID NO: 1490600 - RNA, 18 nt, Human
gaaauuguauuacaaauc

SEQ ID NO: 1490601 - RNA, 16 nt, Human
gaaauuuauaaacuuu

SEQ ID NO: 1490602 - RNA, 17 nt, Human
gaaauuuauaaacuuuu

SEQ ID NO: 1490603 - RNA, 16 nt, Human
gaaauuguauuacaaa

SEQ ID NO: 1490604 - RNA, 14 nt, Human
gaacauaaaaagga

SEQ ID NO: 1490605 - RNA, 16 nt, Human
gaacauaaaaaggaca

SEQ ID NO: 1490606 - RNA, 18 nt, Human
gaacauaaaaaggacauc

SEQ ID NO: 1490607 - RNA, 22 nt, Human
gaacauaaaaaggacaucagca

SEQ ID NO: 1490608 - RNA, 20 nt, Human
gaagagguuuuaaagcuucc

SEQ ID NO: 1490609 - RNA, 15 nt, Human
gaagauacugaaaua

SEQ ID NO: 1490610 - RNA, 21 nt, Human
gaacucaucuagguaaauuac

SEQ ID NO: 1490611 - RNA, 20 nt, Human
gaacucaucuagguaaauua

SEQ ID NO: 1490612 - RNA, 22 nt, Human
gaacucaucuagguaaauuaca

SEQ ID NO: 1490613 - RNA, 19 nt, Human
gaacuuugcugagccugua

SEQ ID NO: 1490614 - RNA, 19 nt, Human
gaagacugcauuauauuua

SEQ ID NO: 1490615 - RNA, 12 nt, Human
gaagaacugaaa

SEQ ID NO: 1490616 - RNA, 12 nt, Human
gaagagaaggag

SEQ ID NO: 1490617 - RNA, 13 nt, Human
gaagagaaggagc

SEQ ID NO: 1490618 - RNA, 14 nt, Human
gaagagaaggagca

SEQ ID NO: 1490619 - RNA, 15 nt, Human
gaagagaaggagcag

SEQ ID NO: 1490620 - RNA, 17 nt, Human
gaagagaucaggaagag

SEQ ID NO: 1490621 - RNA, 16 nt, Human
gaagagaucaggaaga

SEQ ID NO: 1490622 - RNA, 12 nt, Human
gcaaaugugaau

SEQ ID NO: 1490623 - RNA, 23 nt, Human
gcaaaugugaaucauuuuaccuu

SEQ ID NO: 1490624 - RNA, 20 nt, Human
gcaaacuuuauuuuguguuu

SEQ ID NO: 1490625 - RNA, 18 nt, Human
gcaaacuuuauuuugugu

SEQ ID NO: 1490626 - RNA, 22 nt, Human
gcaacuuuguauaaaagggacu

SEQ ID NO: 1490627 - RNA, 23 nt, Human
gcaagauggggagugagaggcug

SEQ ID NO: 1490628 - RNA, 20 nt, Human
gcaauccucccacuucagcc

SEQ ID NO: 1490629 - RNA, 23 nt, Human
gcaauccucccacuucagccucc

SEQ ID NO: 1490630 - RNA, 14 nt, Human
gauuaaguaaugau

SEQ ID NO: 1490631 - RNA, 22 nt, Human
gauuaaguaaugauaacuggaa

SEQ ID NO: 1490632 - RNA, 16 nt, Human
gauugggaauccgccc

SEQ ID NO: 1490633 - RNA, 14 nt, Human
gauccuggaaauca

SEQ ID NO: 1490634 - RNA, 17 nt, Human
gauaggucagugcaaau

SEQ ID NO: 1490635 - RNA, 23 nt, Human
gaucagcuuauugucuagugaaa

SEQ ID NO: 1490636 - RNA, 12 nt, Human
gaucaggaagag

SEQ ID NO: 1490637 - RNA, 15 nt, Human
gaucaggaagagaag

SEQ ID NO: 1490638 - RNA, 16 nt, Human
gaucaggaagagaagg

SEQ ID NO: 1490639 - RNA, 18 nt, Human
gaucaggaagagaaggag

SEQ ID NO: 1490640 - RNA, 17 nt, Human
gaucaggaagagaagga

SEQ ID NO: 1490641 - RNA, 16 nt, Human
gauaucaugcaaauuu

SEQ ID NO: 1490642 - RNA, 23 nt, Human
gaucaccgacugaaaauauuguu

SEQ ID NO: 1490643 - RNA, 16 nt, Human
gcauuuuacuguacag

SEQ ID NO: 1490644 - RNA, 17 nt, Human
gcauuuuacuguacaga

SEQ ID NO: 1490645 - RNA, 15 nt, Human
gcaugaauuugugaa

SEQ ID NO: 1490646 - RNA, 17 nt, Human
gcaugaauuugugaagg

SEQ ID NO: 1490647 - RNA, 15 nt, Human
gcaugccuucaaauc

SEQ ID NO: 1490648 - RNA, 23 nt, Human
gcauggaaauucccuucaucugg

SEQ ID NO: 1490649 - RNA, 15 nt, Human
gcauuauaaaaagaa

SEQ ID NO: 1490650 - RNA, 23 nt, Human
gcauauuauuuuauguugcauag

SEQ ID NO: 1490651 - RNA, 18 nt, Human
gcauauuauuuuauguug

SEQ ID NO: 1490652 - RNA, 19 nt, Human
gcauauuuauaaaaauaaa

SEQ ID NO: 1490653 - RNA, 14 nt, Human
gcaguucugaagaa

SEQ ID NO: 1490654 - RNA, 13 nt, Human
gcaguucugaaga

SEQ ID NO: 1490655 - RNA, 12 nt, Human
gcaggucccuaa

SEQ ID NO: 1490656 - RNA, 13 nt, Human
gcaggucccuaau

SEQ ID NO: 1490657 - RNA, 10 nt, Human
gcaggucccu

SEQ ID NO: 1490658 - RNA, 11 nt, Human
gcaggucccua

SEQ ID NO: 1490659 - RNA, 20 nt, Human
gcacagccucuuagaugcag

SEQ ID NO: 1490660 - RNA, 11 nt, Human
gcagcaacaau

SEQ ID NO: 1490661 - RNA, 16 nt, Human
gcagcaacaauaaaua

SEQ ID NO: 1490662 - RNA, 20 nt, Human
gcaggaguuucguuuucaaa

SEQ ID NO: 1490663 - RNA, 21 nt, Human
gcaggaguuucguuuucaaaa

SEQ ID NO: 1490664 - RNA, 19 nt, Human
gccaggaagaucccccaga

SEQ ID NO: 1490665 - RNA, 16 nt, Human
gcccacagcuguauga

SEQ ID NO: 1490666 - RNA, 22 nt, Human
gcccaucugggggccucuucug

SEQ ID NO: 1490667 - RNA, 13 nt, Human
gccuucaaaucaa

SEQ ID NO: 1490668 - RNA, 18 nt, Human
gccuuggggcugaugcag

SEQ ID NO: 1490669 - RNA, 18 nt, Human
gcgccuccaacccuagca

SEQ ID NO: 1490670 - RNA, 13 nt, Human
gcuaccaggaaag

SEQ ID NO: 1490671 - RNA, 16 nt, Human
gcuacagaagaaacug

SEQ ID NO: 1490672 - RNA, 14 nt, Human
gccucccauguuca

SEQ ID NO: 1490673 - RNA, 10 nt, Human
gccucucugc

SEQ ID NO: 1490674 - RNA, 14 nt, Human
gccucucugcaggu

SEQ ID NO: 1490675 - RNA, 16 nt, Human
gccucucugcaggucc

SEQ ID NO: 1490676 - RNA, 17 nt, Human
gccucucugcagguccc

SEQ ID NO: 1490677 - RNA, 18 nt, Human
gccucucugcaggucccu

SEQ ID NO: 1490678 - RNA, 17 nt, Human
gccuauuuuaauaaaca

SEQ ID NO: 1490679 - RNA, 20 nt, Human
gcccuucuauacccacccag

SEQ ID NO: 1490680 - RNA, 19 nt, Human
gcccuucuuuccacagaag

SEQ ID NO: 1490681 - RNA, 21 nt, Human
gcccuucuauacccacccaga

SEQ ID NO: 1490682 - RNA, 22 nt, Human
gcccuucuauacccacccagaa

SEQ ID NO: 1490683 - RNA, 18 nt, Human
gcuagauguauguacuuc

SEQ ID NO: 1490684 - RNA, 12 nt, Human
gcuagcaaauag

SEQ ID NO: 1490685 - RNA, 16 nt, Human
gcuagcaaauaguaau

SEQ ID NO: 1490686 - RNA, 22 nt, Human
gcuguauuuuaaaagaaugauu

SEQ ID NO: 1490687 - RNA, 16 nt, Human
gcuggggccaggcugg

SEQ ID NO: 1490688 - RNA, 19 nt, Human
gcuggggccaggcuggguc

SEQ ID NO: 1490689 - RNA, 20 nt, Human
ggaaaaaauaacaaugaaag

SEQ ID NO: 1490690 - RNA, 18 nt, Human
ggaaauauuuauuuuaau

SEQ ID NO: 1490691 - RNA, 17 nt, Human
ggaaauauuuauuuuaa

SEQ ID NO: 1490692 - RNA, 15 nt, Human
ggaaauauuuauuuu

SEQ ID NO: 1490693 - RNA, 13 nt, Human
ggaaauauuuauu

SEQ ID NO: 1490694 - RNA, 12 nt, Human
ggaaauauuuau

SEQ ID NO: 1490695 - RNA, 18 nt, Human
ggaagaucccccagaaaa

SEQ ID NO: 1490696 - RNA, 22 nt, Human
ggaagaucccccagaaaagaaa

SEQ ID NO: 1490697 - RNA, 14 nt, Human
ggaagaucccccag

SEQ ID NO: 1490698 - RNA, 15 nt, Human
ggacugcggaggaag

SEQ ID NO: 1490699 - RNA, 16 nt, Human
ggacugcggaggaagg

SEQ ID NO: 1490700 - RNA, 12 nt, Human
ggagcccuggga

SEQ ID NO: 1490701 - RNA, 13 nt, Human
ggagcccugggag

SEQ ID NO: 1490702 - RNA, 16 nt, Human
ggaaggaggacccagg

SEQ ID NO: 1490703 - RNA, 19 nt, Human
ggaaggaggacccaggaca

SEQ ID NO: 1490704 - RNA, 15 nt, Human
ggaccagcuuuuccc

SEQ ID NO: 1490705 - RNA, 17 nt, Human
ggaccagcuuuucccaa

SEQ ID NO: 1490706 - RNA, 22 nt, Human
ggaccagcuuuucccaaaagcc

SEQ ID NO: 1490707 - RNA, 10 nt, Human
ggacccagga

SEQ ID NO: 1490708 - RNA, 13 nt, Human
ggacccaggacag

SEQ ID NO: 1490709 - RNA, 17 nt, Human
ggaggaggcagagaaga

SEQ ID NO: 1490710 - RNA, 18 nt, Human
ggaggaggcagagaagaa

SEQ ID NO: 1490711 - RNA, 16 nt, Human
ggcagcaauuuaaaug

SEQ ID NO: 1490712 - RNA, 17 nt, Human
ggcagcaacaauaaaua

SEQ ID NO: 1490713 - RNA, 22 nt, Human
ggcagcaacaauaaauagacac

SEQ ID NO: 1490714 - RNA, 15 nt, Human
ggcagcaauuuaaau

SEQ ID NO: 1490715 - RNA, 15 nt, Human
ggcagcaacaauaaa

SEQ ID NO: 1490716 - RNA, 21 nt, Human
ggaucaguuaacuauugcauu

SEQ ID NO: 1490717 - RNA, 18 nt, Human
ggccaggcugggucgccc

SEQ ID NO: 1490718 - RNA, 22 nt, Human
ggccaggcugggucgcccugga

SEQ ID NO: 1490719 - RNA, 20 nt, Human
ggccaggcaggagcccuucu

SEQ ID NO: 1490720 - RNA, 13 nt, Human
ggccccugccucu

SEQ ID NO: 1490721 - RNA, 20 nt, Human
ggccccugccaccuccugcc

SEQ ID NO: 1490722 - RNA, 13 nt, Human
ggcucuggagccc

SEQ ID NO: 1490723 - RNA, 14 nt, Human
ggcucuggagccca

SEQ ID NO: 1490724 - RNA, 15 nt, Human
ggcugcugcuacaau

SEQ ID NO: 1490725 - RNA, 22 nt, Human
ggcuugaguuuaaauuguaaua

SEQ ID NO: 1490726 - RNA, 20 nt, Human
gggaccggcggaccccagcc

SEQ ID NO: 1490727 - RNA, 22 nt, Human
gggacguucgugguccugcgcu

SEQ ID NO: 1490728 - RNA, 13 nt, Human
gggaaugaagaua

SEQ ID NO: 1490729 - RNA, 18 nt, Human
gggaggugagaccaccuc

SEQ ID NO: 1490730 - RNA, 12 nt, Human
gggacucagccc

SEQ ID NO: 1490731 - RNA, 13 nt, Human
gggacugagaaau

SEQ ID NO: 1490732 - RNA, 13 nt, Human
gggcaagaggaau

SEQ ID NO: 1490733 - RNA, 20 nt, Human
gggcaauuaauuccuucagc

SEQ ID NO: 1490734 - RNA, 21 nt, Human
gggcaauuaauuccuucagca

SEQ ID NO: 1490735 - RNA, 22 nt, Human
gggccccugccucucugcaggu

SEQ ID NO: 1490736 - RNA, 13 nt, Human
gggccccugccuc

SEQ ID NO: 1490737 - RNA, 15 nt, Human
gggccccugccucuc

SEQ ID NO: 1490738 - RNA, 17 nt, Human
gggccccugccucucug

SEQ ID NO: 1490739 - RNA, 18 nt, Human
gggccccugccucucugc

SEQ ID NO: 1490740 - RNA, 19 nt, Human
gggccccugccucucugca

SEQ ID NO: 1490741 - RNA, 21 nt, Human
gggccccugccucucugcagg

SEQ ID NO: 1490742 - RNA, 20 nt, Human
ggucacguuuggugcuucuc

SEQ ID NO: 1490743 - RNA, 18 nt, Human
gguagcauuuguguugaa

SEQ ID NO: 1490744 - RNA, 17 nt, Human
gggugcugggccccugc

SEQ ID NO: 1490745 - RNA, 18 nt, Human
gggugcugggccccugcc

SEQ ID NO: 1490746 - RNA, 14 nt, Human
ggggcuaccaggaa

SEQ ID NO: 1490747 - RNA, 18 nt, Human
ggggugcugggccccugc

SEQ ID NO: 1490748 - RNA, 20 nt, Human
gggguggggggggugcuggg

SEQ ID NO: 1490749 - RNA, 14 nt, Human
ggugagaccaccuc

SEQ ID NO: 1490750 - RNA, 15 nt, Human
ggugagaccaccucu

SEQ ID NO: 1490751 - RNA, 20 nt, Human
ggucucuucugaauaaagca

SEQ ID NO: 1490752 - RNA, 21 nt, Human
ggucucuucugaauaaagcaa

SEQ ID NO: 1490753 - RNA, 22 nt, Human
ggucucuucugaauaaagcaau

SEQ ID NO: 1490754 - RNA, 16 nt, Human
gguuagggaaaacauu

SEQ ID NO: 1490755 - RNA, 21 nt, Human
uacuugcucuugaugccuggc

SEQ ID NO: 1490756 - RNA, 11 nt, Human
uagaaagcuau

SEQ ID NO: 1490757 - RNA, 19 nt, Human
uaccuuugacaaagguaaa

SEQ ID NO: 1490758 - RNA, 21 nt, Human
uacaguuagggcuccuauuca

SEQ ID NO: 1490759 - RNA, 18 nt, Human
uacaguuccuagguauaa

SEQ ID NO: 1490760 - RNA, 11 nt, Human
uacauuugugu

SEQ ID NO: 1490761 - RNA, 17 nt, Human
uacauuuguauaaaaua

SEQ ID NO: 1490762 - RNA, 16 nt, Human
uacauuuguauaaaau

SEQ ID NO: 1490763 - RNA, 18 nt, Human
uaccaccagucugacugu

SEQ ID NO: 1490764 - RNA, 23 nt, Human
uaccacaggaaccacaagacugc

SEQ ID NO: 1490765 - RNA, 18 nt, Human
uaccaaggucuucuuaau

SEQ ID NO: 1490766 - RNA, 12 nt, Human
uaccaauaaagu

SEQ ID NO: 1490767 - RNA, 13 nt, Human
uaccaauaaagug

SEQ ID NO: 1490768 - RNA, 17 nt, Human
uaccaauaaagugaccc

SEQ ID NO: 1490769 - RNA, 14 nt, Human
uaccaauaaaguga

SEQ ID NO: 1490770 - RNA, 12 nt, Human
uacccacccaga

SEQ ID NO: 1490771 - RNA, 15 nt, Human
uacccaaauuaagag

SEQ ID NO: 1490772 - RNA, 14 nt, Human
uacacaauaagcaa

SEQ ID NO: 1490773 - RNA, 15 nt, Human
uacacaauaagcaaa

SEQ ID NO: 1490774 - RNA, 13 nt, Human
uaauuuugugaag

SEQ ID NO: 1490775 - RNA, 13 nt, Human
uaauuuugaaaaa

SEQ ID NO: 1490776 - RNA, 17 nt, Human
uaauuuugaaaaacugc

SEQ ID NO: 1490777 - RNA, 22 nt, Human
uacagaaaaguugaauuuuaca

SEQ ID NO: 1490778 - RNA, 18 nt, Human
uacagaaaaguugaauuu

SEQ ID NO: 1490779 - RNA, 13 nt, Human
uacagaauuuuau

SEQ ID NO: 1490780 - RNA, 11 nt, Human
uacagaacuac

SEQ ID NO: 1490781 - RNA, 14 nt, Human
uacagaagaaacug

SEQ ID NO: 1490782 - RNA, 12 nt, Human
uaucucuucagu

SEQ ID NO: 1490783 - RNA, 13 nt, Human
uaucucuucaguc

SEQ ID NO: 1490784 - RNA, 14 nt, Human
uaucucuucagucu

SEQ ID NO: 1490785 - RNA, 16 nt, Human
uaucucuucagucucu

SEQ ID NO: 1490786 - RNA, 17 nt, Human
uaucaugugaaaucauu

SEQ ID NO: 1490787 - RNA, 22 nt, Human
uaucaugugaaaucauucauuu

SEQ ID NO: 1490788 - RNA, 23 nt, Human
uauauuuauuacuguaagaaaau

SEQ ID NO: 1490789 - RNA, 19 nt, Human
uauauguaccguaggcuuu

SEQ ID NO: 1490790 - RNA, 20 nt, Human
uauauuugaaauauugacuu

SEQ ID NO: 1490791 - RNA, 14 nt, Human
uauauuugaaauau

SEQ ID NO: 1490792 - RNA, 13 nt, Human
uauauuugaaaua

SEQ ID NO: 1490793 - RNA, 13 nt, Human
uauauuuuaagac

SEQ ID NO: 1490794 - RNA, 14 nt, Human
uauauuuuaagacg

SEQ ID NO: 1490795 - RNA, 15 nt, Human
uauaauucaccuucu

SEQ ID NO: 1490796 - RNA, 15 nt, Human
uauacccacccagaa

SEQ ID NO: 1490797 - RNA, 14 nt, Human
uauacccacccaga

SEQ ID NO: 1490798 - RNA, 22 nt, Human
uauacccacccagaaugagaca

SEQ ID NO: 1490799 - RNA, 17 nt, Human
uauacuauaguaccagu

SEQ ID NO: 1490800 - RNA, 20 nt, Human
uauacuauaguaccaguagg

SEQ ID NO: 1490801 - RNA, 18 nt, Human
uauaacaaugcuguauuu

SEQ ID NO: 1490802 - RNA, 15 nt, Human
uaguuuuauaugcuu

SEQ ID NO: 1490803 - RNA, 18 nt, Human
uaguuguaaaccaaguga

SEQ ID NO: 1490804 - RNA, 18 nt, Human
uagucaaauugugugaaa

SEQ ID NO: 1490805 - RNA, 17 nt, Human
uaggaaguugacuuaua

SEQ ID NO: 1490806 - RNA, 14 nt, Human
uaggaauuguguuu

SEQ ID NO: 1490807 - RNA, 22 nt, Human
uaggaaguugacuuauaguaca

SEQ ID NO: 1490808 - RNA, 16 nt, Human
uaggaauuguguuuau

SEQ ID NO: 1490809 - RNA, 18 nt, Human
uagaguuuagcuggaaaa

SEQ ID NO: 1490810 - RNA, 17 nt, Human
uagaguuuagcuggaaa

SEQ ID NO: 1490811 - RNA, 20 nt, Human
uagauguauguacuucaugc

SEQ ID NO: 1490812 - RNA, 16 nt, Human
uagauguauguacuuc

SEQ ID NO: 1490813 - RNA, 17 nt, Human
uaagagagucuauuuac

SEQ ID NO: 1490814 - RNA, 15 nt, Human
uaaggcaaucauggu

SEQ ID NO: 1490815 - RNA, 15 nt, Human
uaagcaugcacaaau

SEQ ID NO: 1490816 - RNA, 20 nt, Human
uaagcauuccaacuaucuca

SEQ ID NO: 1490817 - RNA, 18 nt, Human
uaagcauuccaacuaucu

SEQ ID NO: 1490818 - RNA, 16 nt, Human
uaagcauuccaacuau

SEQ ID NO: 1490819 - RNA, 11 nt, Human
uaaccaaguuc

SEQ ID NO: 1490820 - RNA, 12 nt, Human
uaaccaaguucc

SEQ ID NO: 1490821 - RNA, 17 nt, Human
uaaccaggggccaugaa

SEQ ID NO: 1490822 - RNA, 22 nt, Human
uaaauuuaguauuuuguuucag

SEQ ID NO: 1490823 - RNA, 14 nt, Human
uaaauuuaguauuu

SEQ ID NO: 1490824 - RNA, 15 nt, Human
uaaucuuauuuagga

SEQ ID NO: 1490825 - RNA, 15 nt, Human
uaaucuucaauaguu

SEQ ID NO: 1490826 - RNA, 20 nt, Human
uaauauguucuuuuaaauga

SEQ ID NO: 1490827 - RNA, 11 nt, Human
uaauaaagcug

SEQ ID NO: 1490828 - RNA, 20 nt, Human
uaauaauuuuuaagaaauaa

SEQ ID NO: 1490829 - RNA, 15 nt, Human
uaauaauguuucaaa

SEQ ID NO: 1490830 - RNA, 23 nt, Human
uaauuuguaguguuggagaagaa

SEQ ID NO: 1490831 - RNA, 17 nt, Human
uaauuugguuuucacau

SEQ ID NO: 1490832 - RNA, 15 nt, Human
uaauuugguuuucac

SEQ ID NO: 1490833 - RNA, 18 nt, Human
uaauuugguuuucacauu

SEQ ID NO: 1490834 - RNA, 20 nt, Human
uaauuuguaguguuggagaa

SEQ ID NO: 1490835 - RNA, 22 nt, Human
uaauuggaaaggcagcucuaaa

SEQ ID NO: 1490836 - RNA, 15 nt, Human
uaauguuucaaacau

SEQ ID NO: 1490837 - RNA, 14 nt, Human
uaauguuucaaaca

SEQ ID NO: 1490838 - RNA, 14 nt, Human
uaaaguuuguugaa

SEQ ID NO: 1490839 - RNA, 17 nt, Human
uaaauaaaaauaauccu

SEQ ID NO: 1490840 - RNA, 12 nt, Human
uaaaggacugua

SEQ ID NO: 1490841 - RNA, 14 nt, Human
uaaaggacuguaau

SEQ ID NO: 1490842 - RNA, 20 nt, Human
uaaacuuuuuucuuacuguc

SEQ ID NO: 1490843 - RNA, 20 nt, Human
uaaaucagacuaugaaguuu

SEQ ID NO: 1490844 - RNA, 18 nt, Human
uaaauauaugcuaagucu

SEQ ID NO: 1490845 - RNA, 16 nt, Human
uaaauauauuuuaaga

SEQ ID NO: 1490846 - RNA, 22 nt, Human
uaaauauauuuuaagacgaaac

SEQ ID NO: 1490847 - RNA, 21 nt, Human
uaaacacucuugaaaaaugca

SEQ ID NO: 1490848 - RNA, 22 nt, Human
uaaaaauggaaacuauauugac

SEQ ID NO: 1490849 - RNA, 17 nt, Human
uaaaagggacugagaaa

SEQ ID NO: 1490850 - RNA, 19 nt, Human
uaaaagggacugagaaauu

SEQ ID NO: 1490851 - RNA, 20 nt, Human
uaaaagggacugagaaauuu

SEQ ID NO: 1490852 - RNA, 21 nt, Human
uaaaagggacugagaaauuua

SEQ ID NO: 1490853 - RNA, 19 nt, Human
uaaaauccauacauuugug

SEQ ID NO: 1490854 - RNA, 13 nt, Human
uaaaaugagaaau

SEQ ID NO: 1490855 - RNA, 15 nt, Human
uaaaaugagaaaucu

SEQ ID NO: 1490856 - RNA, 16 nt, Human
uaaaaugagaaaucua

SEQ ID NO: 1490857 - RNA, 18 nt, Human
guuuucaggcuagaugua

SEQ ID NO: 1490858 - RNA, 12 nt, Human
uaaaaaacacug

SEQ ID NO: 1490859 - RNA, 16 nt, Human
uaaaaaagaaacauuu

SEQ ID NO: 1490860 - RNA, 14 nt, Human
uaaaaaauggucac

SEQ ID NO: 1490861 - RNA, 17 nt, Human
uaaaaacaaagaaauua

SEQ ID NO: 1490862 - RNA, 11 nt, Human
uaaaaaacacu

SEQ ID NO: 1490863 - RNA, 14 nt, Human
guuucuuuguaaug

SEQ ID NO: 1490864 - RNA, 17 nt, Human
guuucuuuguaaugaaa

SEQ ID NO: 1490865 - RNA, 16 nt, Human
guuuccuuauauuaug

SEQ ID NO: 1490866 - RNA, 16 nt, Human
guuuaguaaucauauu

SEQ ID NO: 1490867 - RNA, 23 nt, Human
ucacaggacagcccuucuuucca

SEQ ID NO: 1490868 - RNA, 11 nt, Human
ucaaccucauc

SEQ ID NO: 1490869 - RNA, 19 nt, Human
ucaacuccaaacugacucu

SEQ ID NO: 1490870 - RNA, 21 nt, Human
uauuucuaugaaauauuaugu

SEQ ID NO: 1490871 - RNA, 22 nt, Human
uauuucuaugaaauauuauguu

SEQ ID NO: 1490872 - RNA, 13 nt, Human
uauuuauuacugu

SEQ ID NO: 1490873 - RNA, 18 nt, Human
ucaaacuacauauuguaa

SEQ ID NO: 1490874 - RNA, 17 nt, Human
uauuuuuuucugaaauu

SEQ ID NO: 1490875 - RNA, 16 nt, Human
uauuuuuuucugaaau

SEQ ID NO: 1490876 - RNA, 22 nt, Human
uauuuuuuucugaauuauuuuc

SEQ ID NO: 1490877 - RNA, 15 nt, Human
uauuuuauguugcau

SEQ ID NO: 1490878 - RNA, 16 nt, Human
uauuuuauguugcaua

SEQ ID NO: 1490879 - RNA, 17 nt, Human
ucacuugucaauaaaau

SEQ ID NO: 1490880 - RNA, 22 nt, Human
ucagaguugaugguuguacaua

SEQ ID NO: 1490881 - RNA, 15 nt, Human
ucagcaaacaggauc

SEQ ID NO: 1490882 - RNA, 21 nt, Human
ucagcaaacaggaucaguuaa

SEQ ID NO: 1490883 - RNA, 11 nt, Human
ucccuaauaaa

SEQ ID NO: 1490884 - RNA, 12 nt, Human
ucccuaauaaag

SEQ ID NO: 1490885 - RNA, 13 nt, Human
ucccuaauaaagc

SEQ ID NO: 1490886 - RNA, 14 nt, Human
ucccuaauaaagcu

SEQ ID NO: 1490887 - RNA, 14 nt, Human
uccauggcccugcc

SEQ ID NO: 1490888 - RNA, 20 nt, Human
ucccaaguaacugggauuac

SEQ ID NO: 1490889 - RNA, 21 nt, Human
ucccaaguaacugggauuaca

SEQ ID NO: 1490890 - RNA, 20 nt, Human
uccaagcauuuagauguaua

SEQ ID NO: 1490891 - RNA, 15 nt, Human
uccaagcaaauguga

SEQ ID NO: 1490892 - RNA, 14 nt, Human
uccaccucaacucc

SEQ ID NO: 1490893 - RNA, 15 nt, Human
uccaccgcagaagga

SEQ ID NO: 1490894 - RNA, 16 nt, Human
uccaccgcagaaggaa

SEQ ID NO: 1490895 - RNA, 17 nt, Human
uccaccgcagaaggaag

SEQ ID NO: 1490896 - RNA, 18 nt, Human
uccaccgcagaaggaagg

SEQ ID NO: 1490897 - RNA, 19 nt, Human
uccagaaauacaauuuuag

SEQ ID NO: 1490898 - RNA, 22 nt, Human
uccagcagauuuccagccuucu

SEQ ID NO: 1490899 - RNA, 14 nt, Human
uccagauccuggaa

SEQ ID NO: 1490900 - RNA, 17 nt, Human
uccagauccuggaaauc

SEQ ID NO: 1490901 - RNA, 16 nt, Human
uccagauccuggaaau

SEQ ID NO: 1490902 - RNA, 17 nt, Human
uccaagcauuuagaugu

SEQ ID NO: 1490903 - RNA, 13 nt, Human
uccaagcaaaugu

SEQ ID NO: 1490904 - RNA, 14 nt, Human
uccaagaauuucua

SEQ ID NO: 1490905 - RNA, 23 nt, Human
uccaaacugacucuuaagaagac

SEQ ID NO: 1490906 - RNA, 22 nt, Human
ucauucagauaugauucaaaug

SEQ ID NO: 1490907 - RNA, 15 nt, Human
ucauaauuauuauuu

SEQ ID NO: 1490908 - RNA, 12 nt, Human
ucaguugcagcc

SEQ ID NO: 1490909 - RNA, 21 nt, Human
ucagcacuuuagaauaugccu

SEQ ID NO: 1490910 - RNA, 14 nt, Human
ucugaaauuuccug

SEQ ID NO: 1490911 - RNA, 13 nt, Human
ucucuucagucuc

SEQ ID NO: 1490912 - RNA, 17 nt, Human
ucucuucagucucuaua

SEQ ID NO: 1490913 - RNA, 11 nt, Human
ucucugcaggu

SEQ ID NO: 1490914 - RNA, 19 nt, Human
ucucuucugaauaaagcaa

SEQ ID NO: 1490915 - RNA, 19 nt, Human
ucucuaggaaauauuuauu

SEQ ID NO: 1490916 - RNA, 13 nt, Human
ucucuaggaaaua

SEQ ID NO: 1490917 - RNA, 14 nt, Human
ucucuauaccaaua

SEQ ID NO: 1490918 - RNA, 16 nt, Human
ucucuauaccaauaaa

SEQ ID NO: 1490919 - RNA, 17 nt, Human
ucucuauaccaauaaag

SEQ ID NO: 1490920 - RNA, 19 nt, Human
ucucuauaccaauaaagug

SEQ ID NO: 1490921 - RNA, 15 nt, Human
ucucucgugaguaua

SEQ ID NO: 1490922 - RNA, 14 nt, Human
ucucaguugcagcc

SEQ ID NO: 1490923 - RNA, 16 nt, Human
ucucaaacuccugacc

SEQ ID NO: 1490924 - RNA, 15 nt, Human
ucucaacuccaaacu

SEQ ID NO: 1490925 - RNA, 21 nt, Human
ucuacacuaagagagaaugag

SEQ ID NO: 1490926 - RNA, 16 nt, Human
ucuaaauucuuucauu

SEQ ID NO: 1490927 - RNA, 17 nt, Human
uccuuggccaugcagaa

SEQ ID NO: 1490928 - RNA, 10 nt, Human
ucggaccagc

SEQ ID NO: 1490929 - RNA, 22 nt, Human
ugaacuuguaaaggaauuuaaa

SEQ ID NO: 1490930 - RNA, 22 nt, Human
ugaaguccaagcauuuagaugu

SEQ ID NO: 1490931 - RNA, 21 nt, Human
ugaaguccaagcauuuagaug

SEQ ID NO: 1490932 - RNA, 19 nt, Human
ugaagagguuuuaaagcuu

SEQ ID NO: 1490933 - RNA, 19 nt, Human
ugaaauggacuuuuguaca

SEQ ID NO: 1490934 - RNA, 13 nt, Human
ugaaagauucaau

SEQ ID NO: 1490935 - RNA, 17 nt, Human
ucuuucacauuuaaaua

SEQ ID NO: 1490936 - RNA, 16 nt, Human
ucuuuaaaaggaaaga

SEQ ID NO: 1490937 - RNA, 23 nt, Human
ucuggagcccacuguacuugcuc

SEQ ID NO: 1490938 - RNA, 18 nt, Human
ucuguaagcauaagcuua

SEQ ID NO: 1490939 - RNA, 14 nt, Human
ucuguaaaacuaag

SEQ ID NO: 1490940 - RNA, 21 nt, Human
ucuguaaaacuaagaaacuua

SEQ ID NO: 1490941 - RNA, 22 nt, Human
ucuguuuuauaauuuugugaag

SEQ ID NO: 1490942 - RNA, 22 nt, Human
ugccuaaguccaguguuucuuu

SEQ ID NO: 1490943 - RNA, 15 nt, Human
ugccuggcggggugg

SEQ ID NO: 1490944 - RNA, 21 nt, Human
ugcgcccuuaacugcauccag

SEQ ID NO: 1490945 - RNA, 22 nt, Human
ugccuucucaacuccaaacuga

SEQ ID NO: 1490946 - RNA, 14 nt, Human
ugcucaggagcccu

SEQ ID NO: 1490947 - RNA, 11 nt, Human
ugcucauggaa

SEQ ID NO: 1490948 - RNA, 15 nt, Human
ugcucaggagcccug

SEQ ID NO: 1490949 - RNA, 21 nt, Human
ugcauccagccuggggcugag

SEQ ID NO: 1490950 - RNA, 21 nt, Human
ugcauuauauuuauuacugua

SEQ ID NO: 1490951 - RNA, 20 nt, Human
ugcauuauauuuauuacugu

SEQ ID NO: 1490952 - RNA, 15 nt, Human
ugcauuauauuuauu

SEQ ID NO: 1490953 - RNA, 20 nt, Human
ugccaggcuggagugcagug

SEQ ID NO: 1490954 - RNA, 15 nt, Human
ugcacaucaaaauau

SEQ ID NO: 1490955 - RNA, 19 nt, Human
uggagaugaggccagacca

SEQ ID NO: 1490956 - RNA, 22 nt, Human
uggagaugaggccagaccaugg

SEQ ID NO: 1490957 - RNA, 18 nt, Human
uggagaugaggccagacc

SEQ ID NO: 1490958 - RNA, 24 nt, Human
uggagaugaggccagaccauggac

SEQ ID NO: 1490959 - RNA, 13 nt, Human
uggagauguuuag

SEQ ID NO: 1490960 - RNA, 14 nt, Human
ugcuucuguuuuau

SEQ ID NO: 1490961 - RNA, 19 nt, Human
uggaacccuaaauaauaaa

SEQ ID NO: 1490962 - RNA, 16 nt, Human
uggaauacucuuauau

SEQ ID NO: 1490963 - RNA, 18 nt, Human
uggcgcgaucucagcuca

SEQ ID NO: 1490964 - RNA, 17 nt, Human
ugggaauggaggggcag

SEQ ID NO: 1490965 - RNA, 19 nt, Human
ugggaauggaggggcagag

SEQ ID NO: 1490966 - RNA, 21 nt, Human
ugggacagucaccucauggaa

SEQ ID NO: 1490967 - RNA, 20 nt, Human
ugggacagucaccucaugga

SEQ ID NO: 1490968 - RNA, 18 nt, Human
ugggacagucaccucaug

SEQ ID NO: 1490969 - RNA, 23 nt, Human
ugggaauggaggggcagagccag

SEQ ID NO: 1490970 - RNA, 20 nt, Human
ugggacauuugcucauggaa

SEQ ID NO: 1490971 - RNA, 19 nt, Human
ugggacauuugcucaugga

SEQ ID NO: 1490972 - RNA, 16 nt, Human
ugggagcuuuuguaga

SEQ ID NO: 1490973 - RNA, 13 nt, Human
ugggcauucaaau

SEQ ID NO: 1490974 - RNA, 19 nt, Human
ugggguggggggggugcug

SEQ ID NO: 1490975 - RNA, 16 nt, Human
uggguagacacacaug

SEQ ID NO: 1490976 - RNA, 17 nt, Human
uggguagacacacauga

SEQ ID NO: 1490977 - RNA, 21 nt, Human
ugggguggggggggugcuggg

SEQ ID NO: 1490978 - RNA, 22 nt, Human
ugggguggggggggugcugggc

SEQ ID NO: 1490979 - RNA, 23 nt, Human
uggguaggaaagaggaagcaaau

SEQ ID NO: 1490980 - RNA, 18 nt, Human
uguuuuaaaaugagaaau

SEQ ID NO: 1490981 - RNA, 16 nt, Human
uguuucuauuuuuuga

SEQ ID NO: 1490982 - RNA, 22 nt, Human
uguuucuauuuuuugaaaagca

SEQ ID NO: 1490983 - RNA, 23 nt, Human
uguuuuaaaaugagaaaucuaaa

SEQ ID NO: 1490984 - RNA, 19 nt, Human
uuaaaagaaugauuaugaa

SEQ ID NO: 1490985 - RNA, 19 nt, Human
uuaaauagcuuuuuucucu

SEQ ID NO: 1490986 - RNA, 20 nt, Human
uuaaagcuuccauuguuguc

SEQ ID NO: 1490987 - RNA, 15 nt, Human
uuaaagcuuccauug

SEQ ID NO: 1490988 - RNA, 16 nt, Human
uuaauagguuuggaca

SEQ ID NO: 1490989 - RNA, 18 nt, Human
uuaauaauguuucaaaca

SEQ ID NO: 1490990 - RNA, 21 nt, Human
uuaauagguuuggacaaaaug

SEQ ID NO: 1490991 - RNA, 21 nt, Human
uuaccacuuguguuuugcaag

SEQ ID NO: 1490992 - RNA, 16 nt, Human
uuacggaacucaaaua

SEQ ID NO: 1490993 - RNA, 15 nt, Human
uuacaauaguucugu

SEQ ID NO: 1490994 - RNA, 17 nt, Human
uuacaauaguucugugg

SEQ ID NO: 1490995 - RNA, 23 nt, Human
uuacauggcuggagcuagaauuu

SEQ ID NO: 1490996 - RNA, 22 nt, Human
uuacauggcuggagcuagaauu

SEQ ID NO: 1490997 - RNA, 14 nt, Human
uuacauuuccuaaa

SEQ ID NO: 1490998 - RNA, 15 nt, Human
uuacauuuguauaaa

SEQ ID NO: 1490999 - RNA, 14 nt, Human
uuacauuuguauaa

SEQ ID NO: 1491000 - RNA, 21 nt, Human
uguucaagcgauucuccugcc

SEQ ID NO: 1491001 - RNA, 16 nt, Human
uguucacaauauauuu

SEQ ID NO: 1491002 - RNA, 12 nt, Human
uguuauaaucuu

SEQ ID NO: 1491003 - RNA, 22 nt, Human
uguguuuaggaacuacugagga

SEQ ID NO: 1491004 - RNA, 12 nt, Human
uguucuauagcu

SEQ ID NO: 1491005 - RNA, 13 nt, Human
uguucauaaauaa

SEQ ID NO: 1491006 - RNA, 14 nt, Human
uguucauuccucca

SEQ ID NO: 1491007 - RNA, 15 nt, Human
uguucauuccuccag

SEQ ID NO: 1491008 - RNA, 16 nt, Human
uguucauuccuccagg

SEQ ID NO: 1491009 - RNA, 20 nt, Human
uguucaugaaagauucaaug

SEQ ID NO: 1491010 - RNA, 21 nt, Human
uguuggagaagaacugaaauc

SEQ ID NO: 1491011 - RNA, 19 nt, Human
uguugaagagguuuuaaag

SEQ ID NO: 1491012 - RNA, 14 nt, Human
ugucuuuuuucuaa

SEQ ID NO: 1491013 - RNA, 13 nt, Human
ugugaaacauguu

SEQ ID NO: 1491014 - RNA, 16 nt, Human
ugugaaucauuuuacc

SEQ ID NO: 1491015 - RNA, 13 nt, Human
ugugauauaagug

SEQ ID NO: 1491016 - RNA, 19 nt, Human
uguauacuauaguaccagu

SEQ ID NO: 1491017 - RNA, 15 nt, Human
uguauacuauaguac

SEQ ID NO: 1491018 - RNA, 17 nt, Human
uguauacuauaguacca

SEQ ID NO: 1491019 - RNA, 14 nt, Human
uguauacuauagua

SEQ ID NO: 1491020 - RNA, 16 nt, Human
uguaugcacaguaaaa

SEQ ID NO: 1491021 - RNA, 16 nt, Human
uguauuguauauuaca

SEQ ID NO: 1491022 - RNA, 18 nt, Human
uguauuguauauuacaau

SEQ ID NO: 1491023 - RNA, 17 nt, Human
uguagauaauacaguuc

SEQ ID NO: 1491024 - RNA, 22 nt, Human
uuguauucaaaaauuaucuaua

SEQ ID NO: 1491025 - RNA, 14 nt, Human
uuguauucagaguu

SEQ ID NO: 1491026 - RNA, 21 nt, Human
uuguauucagaguugaugguu

SEQ ID NO: 1491027 - RNA, 16 nt, Human
uuguaaaggaauuuaa

SEQ ID NO: 1491028 - RNA, 12 nt, Human
uugguaaaccuu

SEQ ID NO: 1491029 - RNA, 14 nt, Human
uugguaaaccuuuu

SEQ ID NO: 1491030 - RNA, 16 nt, Human
uugccacccucaugcu

SEQ ID NO: 1491031 - RNA, 13 nt, Human
uugccacccucau

SEQ ID NO: 1491032 - RNA, 14 nt, Human
uugcauagaauaaa

SEQ ID NO: 1491033 - RNA, 13 nt, Human
uugaugaagaagu

SEQ ID NO: 1491034 - RNA, 12 nt, Human
uugaugaagaag

SEQ ID NO: 1491035 - RNA, 21 nt, Human
uugauuggugauuagguggug

SEQ ID NO: 1491036 - RNA, 15 nt, Human
uugaggacacugaua

SEQ ID NO: 1491037 - RNA, 14 nt, Human
uugaggacacugau

SEQ ID NO: 1491038 - RNA, 13 nt, Human
uugaggacacaug

SEQ ID NO: 1491039 - RNA, 14 nt, Human
uugaggacacaugu

SEQ ID NO: 1491040 - RNA, 15 nt, Human
uugaggacacauguc

SEQ ID NO: 1491041 - RNA, 16 nt, Human
uugaggacacaugucc

SEQ ID NO: 1491042 - RNA, 11 nt, Human
uugaggacaca

SEQ ID NO: 1491043 - RNA, 21 nt, Human
uugaccugccucccuucaugc

SEQ ID NO: 1491044 - RNA, 23 nt, Human
uugaccugccucccuucaugcau

SEQ ID NO: 1491045 - RNA, 22 nt, Human
uugaccugccucccuucaugca

SEQ ID NO: 1491046 - RNA, 14 nt, Human
uucugagcauuuaa

SEQ ID NO: 1491047 - RNA, 18 nt, Human
uucuccauggcccugcca

SEQ ID NO: 1491048 - RNA, 23 nt, Human
uucucuccucuccccaugauguu

SEQ ID NO: 1491049 - RNA, 17 nt, Human
uucucugauacagaaaa

SEQ ID NO: 1491050 - RNA, 16 nt, Human
uucucugauacagaaa

SEQ ID NO: 1491051 - RNA, 15 nt, Human
uucucugauacagaa

SEQ ID NO: 1491052 - RNA, 14 nt, Human
uucucugauacaga

SEQ ID NO: 1491053 - RNA, 15 nt, Human
uuccuucccugcugu

SEQ ID NO: 1491054 - RNA, 19 nt, Human
uuccuucccugcugugaaa

SEQ ID NO: 1491055 - RNA, 21 nt, Human
uuccuucccugcugugaaaga

SEQ ID NO: 1491056 - RNA, 20 nt, Human
uuccuagguauaauucacau

SEQ ID NO: 1491057 - RNA, 13 nt, Human
uucccuuuccuga

SEQ ID NO: 1491058 - RNA, 14 nt, Human
uucccuucaucugg

SEQ ID NO: 1491059 - RNA, 15 nt, Human
uucccuucaucugga

SEQ ID NO: 1491060 - RNA, 16 nt, Human
uucccuucaucuggaa

SEQ ID NO: 1491061 - RNA, 15 nt, Human
uucaucuaggauuuu

SEQ ID NO: 1491062 - RNA, 22 nt, Human
uucaguuuauuugaaccaauaa

SEQ ID NO: 1491063 - RNA, 18 nt, Human
uucaugaaagauucaaug

SEQ ID NO: 1491064 - RNA, 16 nt, Human
uucaugaccaguaaag

SEQ ID NO: 1491065 - RNA, 11 nt, Human
uucccaaaagc

SEQ ID NO: 1491066 - RNA, 21 nt, Human
uucccaaaagcccauucauuc

SEQ ID NO: 1491067 - RNA, 23 nt, Human
uucaaauuguaagcaugcacaaa

SEQ ID NO: 1491068 - RNA, 15 nt, Human
uuacgugcucugugg

SEQ ID NO: 1491069 - RNA, 19 nt, Human
uucaaugccccugaauuua

SEQ ID NO: 1491070 - RNA, 13 nt, Human
uuuuccugaaaac

SEQ ID NO: 1491071 - RNA, 16 nt, Human
uuuuaugauacuugaa

SEQ ID NO: 1491072 - RNA, 20 nt, Human
uuuuaugauacuugaaaauu

SEQ ID NO: 1491073 - RNA, 10 nt, Human
uuuuauauuu

SEQ ID NO: 1491074 - RNA, 20 nt, Human
uuuuauaugcuucuguuuua

SEQ ID NO: 1491075 - RNA, 15 nt, Human
uuuuauaugcuucug

SEQ ID NO: 1491076 - RNA, 14 nt, Human
uuuuacuguacaga

SEQ ID NO: 1491077 - RNA, 21 nt, Human
uuuuaauuugguuuucacauu

SEQ ID NO: 1491078 - RNA, 17 nt, Human
uuuuaauuugguuuuca

SEQ ID NO: 1491079 - RNA, 22 nt, Human
uuuuacauaaauuuaguauuuu

SEQ ID NO: 1491080 - RNA, 13 nt, Human
uuuuacauuaaau

SEQ ID NO: 1491081 - RNA, 15 nt, Human
uuuuaaaaugagaaa

SEQ ID NO: 1491082 - RNA, 22 nt, Human
uuuuaaaaugagaaaucuaaaa

SEQ ID NO: 1491083 - RNA, 21 nt, Human
uuuguauaaaauaauuuuuau

SEQ ID NO: 1491084 - RNA, 18 nt, Human
uuuggaacccuaaauaau

SEQ ID NO: 1491085 - RNA, 11 nt, Human
uuugcagcuuu

SEQ ID NO: 1491086 - RNA, 19 nt, Human
uuugcauaacguauaaaag

SEQ ID NO: 1491087 - RNA, 23 nt, Human
uuugcauaacguauaaaagccug

SEQ ID NO: 1491088 - RNA, 22 nt, Human
uuucuuacugucuuuuuucuaa

SEQ ID NO: 1491089 - RNA, 21 nt, Human
uuucagauaaucacaauacau

SEQ ID NO: 1491090 - RNA, 15 nt, Human
uuucagcagcugcag

SEQ ID NO: 1491091 - RNA, 15 nt, Human
uuucagauaaucaca

SEQ ID NO: 1491092 - RNA, 16 nt, Human
uuucuaggacugaauu

SEQ ID NO: 1491093 - RNA, 14 nt, Human
uuuaugcauauuau

SEQ ID NO: 1491094 - RNA, 18 nt, Human
uuguauuguauauuacaa

SEQ ID NO: 1491095 - RNA, 19 nt, Human
uuguauuguauauuacaau

SEQ ID NO: 1491096 - RNA, 17 nt, Human
uuuacauggcuggagcu

SEQ ID NO: 1491097 - RNA, 17 nt, Human
uuuacaauaguucugug

SEQ ID NO: 1491098 - RNA, 22 nt, Human
uuuacauggcuggagcuagaau

SEQ ID NO: 1491099 - RNA, 12 nt, Human
uuuagaaacaca

SEQ ID NO: 1491100 - RNA, 20 nt, Human
uuuagaaacacaacuauauu

SEQ ID NO: 1491101 - RNA, 17 nt, Human
uuuagaauaugccuugu

SEQ ID NO: 1491102 - RNA, 12 nt, Human
uuuuuucugaaa

SEQ ID NO: 1491103 - RNA, 20 nt, Human
uuuuuuauacaggaugauga

SEQ ID NO: 1491104 - RNA, 20 nt, Human
uuuugaaaagcagacauuuu

SEQ ID NO: 1491105 - RNA, 13 nt, Human
uuuugaaaaacug

SEQ ID NO: 1491106 - RNA, 13 nt, Human
uuuuuucuuacug

SEQ ID NO: 1491107 - RNA, 15 nt, Human
cucuccccaugaugu

SEQ ID NO: 1491108 - RNA, 18 nt, Human
cucucaauauucaauaaa

SEQ ID NO: 1491109 - RNA, 10 nt, Human
cucucaauau

SEQ ID NO: 1491110 - RNA, 19 nt, Human
cucucaauauucaauaaag

SEQ ID NO: 1491111 - RNA, 21 nt, Human
cucucacuuguuuuauuuaac

SEQ ID NO: 1491112 - RNA, 15 nt, Human
cucuuagaugcaguu

SEQ ID NO: 1491113 - RNA, 21 nt, Human
cucuuagaugcaguucugaag

SEQ ID NO: 1491114 - RNA, 20 nt, Human
cucuuagaugcaguucugaa

SEQ ID NO: 1491115 - RNA, 19 nt, Human
cuccaggguggcagcaaca

SEQ ID NO: 1491116 - RNA, 23 nt, Human
cuccagguauucguuaucuaaua

SEQ ID NO: 1491117 - RNA, 18 nt, Human
cucagccucccaaguaac

SEQ ID NO: 1491118 - RNA, 16 nt, Human
cuccaaagucucugga

SEQ ID NO: 1491119 - RNA, 18 nt, Human
cuccaacccuagcaaaag

SEQ ID NO: 1491120 - RNA, 15 nt, Human
cgagugcucauuuca

SEQ ID NO: 1491121 - RNA, 15 nt, Human
cgccggaucugaggg

SEQ ID NO: 1491122 - RNA, 17 nt, Human
cggagucaaaaauuaaa

SEQ ID NO: 1491123 - RNA, 23 nt, Human
cuaguugaucagcuuauugucua

SEQ ID NO: 1491124 - RNA, 16 nt, Human
cuacaaccuccgccuc

SEQ ID NO: 1491125 - RNA, 11 nt, Human
cuaauuuuugu

SEQ ID NO: 1491126 - RNA, 20 nt, Human
cuaauuuuuguauuuuuagu

SEQ ID NO: 1491127 - RNA, 13 nt, Human
cuaauuuuuuugu

SEQ ID NO: 1491128 - RNA, 18 nt, Human
cuaccucuccagccucag

SEQ ID NO: 1491129 - RNA, 16 nt, Human
cuaagaaacuuaaauu

SEQ ID NO: 1491130 - RNA, 16 nt, Human
ccuauuuccagaaaua

SEQ ID NO: 1491131 - RNA, 15 nt, Human
ccuauuuuaauaaac

SEQ ID NO: 1491132 - RNA, 16 nt, Human
ccguagguuauuuuca

SEQ ID NO: 1491133 - RNA, 18 nt, Human
ccuaagcuggagugcagu

SEQ ID NO: 1491134 - RNA, 19 nt, Human
ccuaagcuggagugcagug

SEQ ID NO: 1491135 - RNA, 14 nt, Human
ccuaauaaagcugu

SEQ ID NO: 1491136 - RNA, 23 nt, Human
ccuaauaaagcuguguggcaguc

SEQ ID NO: 1491137 - RNA, 11 nt, Human
cccucacccau

SEQ ID NO: 1491138 - RNA, 13 nt, Human
cccucacccaucc

SEQ ID NO: 1491139 - RNA, 17 nt, Human
cccucacccauccuaga

SEQ ID NO: 1491140 - RNA, 17 nt, Human
cccuucuuuccacagaa

SEQ ID NO: 1491141 - RNA, 23 nt, Human
ccucucugcaggucccuaauaaa

SEQ ID NO: 1491142 - RNA, 21 nt, Human
ccucucugcaggucccuaaua

SEQ ID NO: 1491143 - RNA, 22 nt, Human
ccucucugcaggucccuaauaa

SEQ ID NO: 1491144 - RNA, 13 nt, Human
ccucucugcaggu

SEQ ID NO: 1491145 - RNA, 15 nt, Human
ccucucugcaggucc

SEQ ID NO: 1491146 - RNA, 23 nt, Human
ccugacccuccaccgcagaagga

SEQ ID NO: 1491147 - RNA, 14 nt, Human
cccacugccuuuga

SEQ ID NO: 1491148 - RNA, 13 nt, Human
cccacuucagccu

SEQ ID NO: 1491149 - RNA, 15 nt, Human
cccacuucagccucc

SEQ ID NO: 1491150 - RNA, 22 nt, Human
cccacccucguggacaccugcc

SEQ ID NO: 1491151 - RNA, 23 nt, Human
cccacccucguggacaccugccc

SEQ ID NO: 1491152 - RNA, 20 nt, Human
cccacccucguggacaccug

SEQ ID NO: 1491153 - RNA, 14 nt, Human
cccauccuagaggc

SEQ ID NO: 1491154 - RNA, 18 nt, Human
ccagcagauuuccagccu

SEQ ID NO: 1491155 - RNA, 17 nt, Human
ccaggaagaucccccag

SEQ ID NO: 1491156 - RNA, 18 nt, Human
ccaggaagaucccccaga

SEQ ID NO: 1491157 - RNA, 19 nt, Human
ccaggaagaucccccagaa

SEQ ID NO: 1491158 - RNA, 20 nt, Human
ccaggaaagcgccuccaacc

SEQ ID NO: 1491159 - RNA, 15 nt, Human
ccagauccuggaaau

SEQ ID NO: 1491160 - RNA, 18 nt, Human
ccagagugcugaaggaau

SEQ ID NO: 1491161 - RNA, 12 nt, Human
ccaaauuaagag

SEQ ID NO: 1491162 - RNA, 18 nt, Human
ccaaagugcugggauuaa

SEQ ID NO: 1491163 - RNA, 22 nt, Human
cauggcuggagcuagaauuuga

SEQ ID NO: 1491164 - RNA, 12 nt, Human
cauuuccaagca

SEQ ID NO: 1491165 - RNA, 21 nt, Human
caugauugguuucuaggcagu

SEQ ID NO: 1491166 - RNA, 14 nt, Human
caugaauuugugaa

SEQ ID NO: 1491167 - RNA, 16 nt, Human
caugaauuaguuuuau

SEQ ID NO: 1491168 - RNA, 14 nt, Human
caugaccaguaaag

SEQ ID NO: 1491169 - RNA, 14 nt, Human
cauccuugagucaa

SEQ ID NO: 1491170 - RNA, 11 nt, Human
caucagcaaac

SEQ ID NO: 1491171 - RNA, 17 nt, Human
cagagcuggagaugagg

SEQ ID NO: 1491172 - RNA, 21 nt, Human
cagagcuggagaugaggccag

SEQ ID NO: 1491173 - RNA, 22 nt, Human
cagagcuggagaugaggccaga

SEQ ID NO: 1491174 - RNA, 23 nt, Human
cagagcuggagaugaggccagac

SEQ ID NO: 1491175 - RNA, 22 nt, Human
cagaucauugugaaauuauuca

SEQ ID NO: 1491176 - RNA, 16 nt, Human
cagaucauugugaaau

SEQ ID NO: 1491177 - RNA, 21 nt, Human
cagcccccacugccuuugacc

SEQ ID NO: 1491178 - RNA, 24 nt, Human
caggacagcccuucuuuccacaga

SEQ ID NO: 1491179 - RNA, 23 nt, Human
caggacagcccuucuuuccacag

SEQ ID NO: 1491180 - RNA, 21 nt, Human
cagggaggaggcagagaagaa

SEQ ID NO: 1491181 - RNA, 15 nt, Human
cagggaggaggcaga

SEQ ID NO: 1491182 - RNA, 12 nt, Human
caggguggcagc

SEQ ID NO: 1491183 - RNA, 15 nt, Human
caagcuauucaauuc

SEQ ID NO: 1491184 - RNA, 15 nt, Human
caauaaagcugcuga

SEQ ID NO: 1491185 - RNA, 17 nt, Human
caauaaagcugcugaga

SEQ ID NO: 1491186 - RNA, 23 nt, Human
caauaaagcugcugagaaucuag

SEQ ID NO: 1491187 - RNA, 22 nt, Human
caauaaagcugcugagaaucua

SEQ ID NO: 1491188 - RNA, 18 nt, Human
cacaagacugcacaucaa

SEQ ID NO: 1491189 - RNA, 15 nt, Human
caauucuugccaaau

SEQ ID NO: 1491190 - RNA, 21 nt, Human
caauucuucccuaucuuugcc

SEQ ID NO: 1491191 - RNA, 20 nt, Human
caauucuucccuaucuuugc

SEQ ID NO: 1491192 - RNA, 22 nt, Human
caauucuucccuaucuuugcca

SEQ ID NO: 1491193 - RNA, 19 nt, Human
caauucuuuuaacuguugu

SEQ ID NO: 1491194 - RNA, 11 nt, Human
caauuuaaaug

SEQ ID NO: 1491195 - RNA, 13 nt, Human
caauuuaaauguu

SEQ ID NO: 1491196 - RNA, 14 nt, Human
caauuuaaauguua

SEQ ID NO: 1491197 - RNA, 17 nt, Human
caaugcuguauuuuaaa

SEQ ID NO: 1491198 - RNA, 16 nt, Human
caaugcuguauuuuaa

SEQ ID NO: 1491199 - RNA, 15 nt, Human
caaugcuguauuuua

SEQ ID NO: 1491200 - RNA, 21 nt, Human
cacagccucuuagaugcaguu

SEQ ID NO: 1491201 - RNA, 17 nt, Human
cacagccucuuagaugc

SEQ ID NO: 1491202 - RNA, 21 nt, Human
cacaguaaaaauggaaacuau

SEQ ID NO: 1491203 - RNA, 22 nt, Human
cacacaugaaguccaagcauuu

SEQ ID NO: 1491204 - RNA, 17 nt, Human
cacacaugaaguccaag

SEQ ID NO: 1491205 - RNA, 13 nt, Human
cacccucaugcug

SEQ ID NO: 1491206 - RNA, 14 nt, Human
cacccucaugcugu

SEQ ID NO: 1491207 - RNA, 16 nt, Human
cacccucaugcugugu

SEQ ID NO: 1491208 - RNA, 21 nt, Human
cacccucaugcugugugacuc

SEQ ID NO: 1491209 - RNA, 21 nt, Human
cacccucguggacaccugccc

SEQ ID NO: 1491210 - RNA, 23 nt, Human
cacccucguggacaccugcccug

SEQ ID NO: 1491211 - RNA, 20 nt, Human
cacccucguggacaccugcc

SEQ ID NO: 1491212 - RNA, 17 nt, Human
caccugcccugcccugc

SEQ ID NO: 1491213 - RNA, 18 nt, Human
caccugcccugcccugcc

SEQ ID NO: 1491214 - RNA, 19 nt, Human
caccugcccugcccugcca

SEQ ID NO: 1491215 - RNA, 20 nt, Human
caccugcccugcccugccac

SEQ ID NO: 1491216 - RNA, 21 nt, Human
caccugcccugcccugccacc

SEQ ID NO: 1491217 - RNA, 22 nt, Human
caccugcccugcccugccaccu

SEQ ID NO: 1491218 - RNA, 23 nt, Human
caccugcccugcccugccaccug

SEQ ID NO: 1491219 - RNA, 14 nt, Human
cacuaguauuucua

SEQ ID NO: 1491220 - RNA, 14 nt, Human
cacucuuucuuuca

SEQ ID NO: 1491221 - RNA, 15 nt, Human
cacucuuucuuucaa

SEQ ID NO: 1491222 - RNA, 19 nt, Human
cacuuguguuuugcaagcc

SEQ ID NO: 1491223 - RNA, 16 nt, Human
cacuugucaauaaaau

SEQ ID NO: 1491224 - RNA, 22 nt, Human
cacuuguguuuugcaagccaga

SEQ ID NO: 1491225 - RNA, 18 nt, Human
cacugggagaaaugaaaa

SEQ ID NO: 1491226 - RNA, 17 nt, Human
cacugggacuugcaaaa

SEQ ID NO: 1491227 - RNA, 21 nt, Human
caaagucucuggaauuugaaa

SEQ ID NO: 1491228 - RNA, 14 nt, Human
caacacuaacauga

SEQ ID NO: 1491229 - RNA, 15 nt, Human
caaauccuugaagau

SEQ ID NO: 1491230 - RNA, 12 nt, Human
caacaauaaaua

SEQ ID NO: 1491231 - RNA, 20 nt, Human
caaacaggaucaguuaacua

SEQ ID NO: 1491232 - RNA, 17 nt, Human
auuugcucauggaauug

SEQ ID NO: 1491233 - RNA, 14 nt, Human
auuugcucauggaa

SEQ ID NO: 1491234 - RNA, 19 nt, Human
auuuuauagcuacuaauuu

SEQ ID NO: 1491235 - RNA, 21 nt, Human
auucauaauuauuauuuggcc

SEQ ID NO: 1491236 - RNA, 18 nt, Human
auuaugaaacuuuuggaa

SEQ ID NO: 1491237 - RNA, 17 nt, Human
auuaugaauuacauuug

SEQ ID NO: 1491238 - RNA, 14 nt, Human
auuaugaauuacau

SEQ ID NO: 1491239 - RNA, 18 nt, Human
auuaugaauuacauuugu

SEQ ID NO: 1491240 - RNA, 20 nt, Human
auucaaugccccugaauuua

SEQ ID NO: 1491241 - RNA, 18 nt, Human
auucaaugccccugaauu

SEQ ID NO: 1491242 - RNA, 18 nt, Human
auucaaauguauuacagu

SEQ ID NO: 1491243 - RNA, 16 nt, Human
auucaaauguauuaca

SEQ ID NO: 1491244 - RNA, 15 nt, Human
auuacaacggaguca

SEQ ID NO: 1491245 - RNA, 17 nt, Human
auuacaacggagucaaa

SEQ ID NO: 1491246 - RNA, 22 nt, Human
auuaauuccuucagcacuuuag

SEQ ID NO: 1491247 - RNA, 19 nt, Human
auuacaguggggaaugaag

SEQ ID NO: 1491248 - RNA, 18 nt, Human
auuagcagucccuccaca

SEQ ID NO: 1491249 - RNA, 23 nt, Human
ggccccacccucguggacaccug

SEQ ID NO: 1491250 - RNA, 18 nt, Human
ggccaggcuugucucgaa

SEQ ID NO: 1491251 - RNA, 16 nt, Human
ggcacuggcgaggaga

SEQ ID NO: 1491252 - RNA, 18 nt, Human
ggaggaaggaggacccag

SEQ ID NO: 1491253 - RNA, 12 nt, Human
ggaggacccagg

SEQ ID NO: 1491254 - RNA, 13 nt, Human
ggaggacccagga

SEQ ID NO: 1491255 - RNA, 17 nt, Human
ggaggugagaccaccuc

SEQ ID NO: 1491256 - RNA, 17 nt, Human
ggcaauuaauuccuuca

SEQ ID NO: 1491257 - RNA, 20 nt, Human
ggcaauuaauuccuucagca

SEQ ID NO: 1491258 - RNA, 19 nt, Human
ggcaauuaauuccuucagc

SEQ ID NO: 1491259 - RNA, 14 nt, Human
ggcacacaccacca

SEQ ID NO: 1491260 - RNA, 12 nt, Human
ggagugcagugg

SEQ ID NO: 1491261 - RNA, 16 nt, Human
aaaacauuccauccuu

SEQ ID NO: 1491262 - RNA, 15 nt, Human
aaaacccagauaaag

SEQ ID NO: 1491263 - RNA, 21 nt, Human
gggacauuugcucauggaauu

SEQ ID NO: 1491264 - RNA, 20 nt, Human
gggacauuugcucauggaau

SEQ ID NO: 1491265 - RNA, 15 nt, Human
aaaaauauauacuaa

SEQ ID NO: 1491266 - RNA, 22 nt, Human
gggaggcucuggagcccacugu

SEQ ID NO: 1491267 - RNA, 14 nt, Human
aaaagcagacauuu

SEQ ID NO: 1491268 - RNA, 13 nt, Human
aaaagcagacauu

SEQ ID NO: 1491269 - RNA, 19 nt, Human
aaaaguauguuagugcaaa

SEQ ID NO: 1491270 - RNA, 21 nt, Human
gggccaggcugggucgcccug

SEQ ID NO: 1491271 - RNA, 14 nt, Human
gggccaggcugggu

SEQ ID NO: 1491272 - RNA, 15 nt, Human
gggccaggcuggguc

SEQ ID NO: 1491273 - RNA, 12 nt, Human
gggcuaccagga

SEQ ID NO: 1491274 - RNA, 15 nt, Human
gggcuaccaggaaag

SEQ ID NO: 1491275 - RNA, 20 nt, Human
aaacaagcacuaaacaaaga

SEQ ID NO: 1491276 - RNA, 15 nt, Human
aaacacccucacacu

SEQ ID NO: 1491277 - RNA, 18 nt, Human
gguaaguuuuuugaaauu

SEQ ID NO: 1491278 - RNA, 18 nt, Human
ggguggggggggugcugg

SEQ ID NO: 1491279 - RNA, 23 nt, Human
gguaugaacuugaggacacaugu

SEQ ID NO: 1491280 - RNA, 21 nt, Human
gguaugaacuugaggacacau

SEQ ID NO: 1491281 - RNA, 22 nt, Human
gguaugaacuugaggacacaug

SEQ ID NO: 1491282 - RNA, 19 nt, Human
aaagcaggcagaacucauc

SEQ ID NO: 1491283 - RNA, 17 nt, Human
aaagcaggcagaacuca

SEQ ID NO: 1491284 - RNA, 12 nt, Human
aaagcaucccuc

SEQ ID NO: 1491285 - RNA, 15 nt, Human
aaagcaucccucacc

SEQ ID NO: 1491286 - RNA, 17 nt, Human
aaagcaucccucaccca

SEQ ID NO: 1491287 - RNA, 24 nt, Human
aaagcaucccucacccauccuaga

SEQ ID NO: 1491288 - RNA, 20 nt, Human
ggugcugggccccugccucu

SEQ ID NO: 1491289 - RNA, 13 nt, Human
ggucggaccagcu

SEQ ID NO: 1491290 - RNA, 14 nt, Human
ggucggaccagcuu

SEQ ID NO: 1491291 - RNA, 17 nt, Human
gguggggggggugcugg

SEQ ID NO: 1491292 - RNA, 16 nt, Human
aaagccuguuuaagag

SEQ ID NO: 1491293 - RNA, 18 nt, Human
aaagccuguuuaagagac

SEQ ID NO: 1491294 - RNA, 19 nt, Human
gguuucaccauguuggcca

SEQ ID NO: 1491295 - RNA, 16 nt, Human
aaaguuuguugaaaca

SEQ ID NO: 1491296 - RNA, 16 nt, Human
aaaguugaauuuuaca

SEQ ID NO: 1491297 - RNA, 20 nt, Human
gguuuggacaaaauggaaua

SEQ ID NO: 1491298 - RNA, 19 nt, Human
aaauaaugaauacauuucc

SEQ ID NO: 1491299 - RNA, 20 nt, Human
aaauaauuuuuauauuugaa

SEQ ID NO: 1491300 - RNA, 18 nt, Human
aaauaauuuuuauauuug

SEQ ID NO: 1491301 - RNA, 15 nt, Human
aaauaauuuuuauau

SEQ ID NO: 1491302 - RNA, 18 nt, Human
gcuggagaugaggccaga

SEQ ID NO: 1491303 - RNA, 20 nt, Human
gcuggagaugaggccagacc

SEQ ID NO: 1491304 - RNA, 21 nt, Human
gcuggagaugaggccagacca

SEQ ID NO: 1491305 - RNA, 15 nt, Human
gcucuggagcccacu

SEQ ID NO: 1491306 - RNA, 16 nt, Human
gcucuggagcccacug

SEQ ID NO: 1491307 - RNA, 17 nt, Human
gcucuggagcccacugu

SEQ ID NO: 1491308 - RNA, 17 nt, Human
gcugaauuucccucucu

SEQ ID NO: 1491309 - RNA, 24 nt, Human
gcugaauuucccucucucauaccc

SEQ ID NO: 1491310 - RNA, 20 nt, Human
gcuggagugcaguggcgcga

SEQ ID NO: 1491311 - RNA, 13 nt, Human
gcuguauuuuaaa

SEQ ID NO: 1491312 - RNA, 12 nt, Human
gcuguauuuuaa

SEQ ID NO: 1491313 - RNA, 13 nt, Human
gcuguuuuuuugu

SEQ ID NO: 1491314 - RNA, 14 nt, Human
gcuuaauucaaaua

SEQ ID NO: 1491315 - RNA, 15 nt, Human
gcuuaauucaaauaa

SEQ ID NO: 1491316 - RNA, 16 nt, Human
gcuucaaauuguaagc

SEQ ID NO: 1491317 - RNA, 19 nt, Human
gcuuccuggcaauagucaa

SEQ ID NO: 1491318 - RNA, 19 nt, Human
ggaaauucccuucaucugg

SEQ ID NO: 1491319 - RNA, 22 nt, Human
ggaaauucccuucaucuggaac

SEQ ID NO: 1491320 - RNA, 20 nt, Human
ggaaauucccuucaucugga

SEQ ID NO: 1491321 - RNA, 18 nt, Human
ggaaaccuuccacccagu

SEQ ID NO: 1491322 - RNA, 21 nt, Human
ggaaacuaggugcauauuuau

SEQ ID NO: 1491323 - RNA, 20 nt, Human
ggaagaagagaucaggaaga

SEQ ID NO: 1491324 - RNA, 21 nt, Human
ggaagaagagaucaggaagag

SEQ ID NO: 1491325 - RNA, 22 nt, Human
ggaagaagagaucaggaagaga

SEQ ID NO: 1491326 - RNA, 15 nt, Human
gcuuuuuuaucaugu

SEQ ID NO: 1491327 - RNA, 18 nt, Human
gcuuuuuuaucaugugaa

SEQ ID NO: 1491328 - RNA, 20 nt, Human
gcuuuuuuaucaugugaaau

SEQ ID NO: 1491329 - RNA, 17 nt, Human
ggaaaccuuccacccag

SEQ ID NO: 1491330 - RNA, 22 nt, Human
gcuuuuuucucugauacagaaa

SEQ ID NO: 1491331 - RNA, 19 nt, Human
gcgagauaccccaccuccc

SEQ ID NO: 1491332 - RNA, 23 nt, Human
gcgauucuccugccucagccucc

SEQ ID NO: 1491333 - RNA, 12 nt, Human
gcgugaucucag

SEQ ID NO: 1491334 - RNA, 15 nt, Human
gcgugaucucagcuc

SEQ ID NO: 1491335 - RNA, 16 nt, Human
gcgugaucucagcuca

SEQ ID NO: 1491336 - RNA, 23 nt, Human
gcggaggaaggaggacccaggac

SEQ ID NO: 1491337 - RNA, 18 nt, Human
gcuaauuuugaaaaacug

SEQ ID NO: 1491338 - RNA, 18 nt, Human
gcuacuguaaggcaauca

SEQ ID NO: 1491339 - RNA, 19 nt, Human
gcuacuguaaggcaaucau

SEQ ID NO: 1491340 - RNA, 16 nt, Human
gccuccaacccuagca

SEQ ID NO: 1491341 - RNA, 20 nt, Human
gccuccaacccuagcaaaag

SEQ ID NO: 1491342 - RNA, 16 nt, Human
gccauaugaaaaggcu

SEQ ID NO: 1491343 - RNA, 16 nt, Human
gcccauucauuccauu

SEQ ID NO: 1491344 - RNA, 19 nt, Human
gcccauucauuccauucug

SEQ ID NO: 1491345 - RNA, 23 nt, Human
gcccauucauuccauucuggaag

SEQ ID NO: 1491346 - RNA, 17 nt, Human
gccccugccucucugca

SEQ ID NO: 1491347 - RNA, 18 nt, Human
gccccugccucucugcag

SEQ ID NO: 1491348 - RNA, 15 nt, Human
gccccugccucucug

SEQ ID NO: 1491349 - RNA, 16 nt, Human
gccccugccucucugc

SEQ ID NO: 1491350 - RNA, 20 nt, Human
gccccacccucguggacacc

SEQ ID NO: 1491351 - RNA, 21 nt, Human
gccccacccucguggacaccu

SEQ ID NO: 1491352 - RNA, 22 nt, Human
gccccacccucguggacaccug

SEQ ID NO: 1491353 - RNA, 23 nt, Human
gccccacccucguggacaccugc

SEQ ID NO: 1491354 - RNA, 22 nt, Human
gccaugugcuaguaauuggaaa

SEQ ID NO: 1491355 - RNA, 14 nt, Human
gagauguagccccu

SEQ ID NO: 1491356 - RNA, 15 nt, Human
gacugaaaauauugu

SEQ ID NO: 1491357 - RNA, 17 nt, Human
gacuggguaggaaagag

SEQ ID NO: 1491358 - RNA, 21 nt, Human
gacuggguaggaaagaggaag

SEQ ID NO: 1491359 - RNA, 16 nt, Human
gacucuuaagaagacu

SEQ ID NO: 1491360 - RNA, 18 nt, Human
gacucuuaagaagacugc

SEQ ID NO: 1491361 - RNA, 17 nt, Human
gacucuuaagaagacug

SEQ ID NO: 1491362 - RNA, 23 nt, Human
gaaugagagacacacugaagaag

SEQ ID NO: 1491363 - RNA, 22 nt, Human
gaaugagagacacacugaagaa

SEQ ID NO: 1491364 - RNA, 13 nt, Human
gaaugagacaucc

SEQ ID NO: 1491365 - RNA, 15 nt, Human
gaaugagacauccag

SEQ ID NO: 1491366 - RNA, 20 nt, Human
gaaugagagacacacugaag

SEQ ID NO: 1491367 - RNA, 13 nt, Human
gaagggcaaguuu

SEQ ID NO: 1491368 - RNA, 13 nt, Human
gaagugacuuugg

SEQ ID NO: 1491369 - RNA, 15 nt, Human
gaagugacuuuggcu

SEQ ID NO: 1491370 - RNA, 20 nt, Human
gaagugacuuuggcugcaug

SEQ ID NO: 1491371 - RNA, 21 nt, Human
gaagugacuuuggcugcaugc

SEQ ID NO: 1491372 - RNA, 12 nt, Human
gacacacaugaa

SEQ ID NO: 1491373 - RNA, 13 nt, Human
gacacacugaaga

SEQ ID NO: 1491374 - RNA, 14 nt, Human
gacacacugaagaa

SEQ ID NO: 1491375 - RNA, 15 nt, Human
gacaaaauggaauac

SEQ ID NO: 1491376 - RNA, 12 nt, Human
gaauuaugaaac

SEQ ID NO: 1491377 - RNA, 11 nt, Human
gaauuaguuuu

SEQ ID NO: 1491378 - RNA, 17 nt, Human
gacagucaccucaugga

SEQ ID NO: 1491379 - RNA, 14 nt, Human
gacagugaaagaaa

SEQ ID NO: 1491380 - RNA, 14 nt, Human
gauaugugaacagu

SEQ ID NO: 1491381 - RNA, 13 nt, Human
gauaugugaacag

SEQ ID NO: 1491382 - RNA, 16 nt, Human
gauacuugaaaauuaa

SEQ ID NO: 1491383 - RNA, 17 nt, Human
gauacuugaaaauuaac

SEQ ID NO: 1491384 - RNA, 19 nt, Human
gagugcugaaggaauggaa

SEQ ID NO: 1491385 - RNA, 16 nt, Human
gaguuuagcuggaaaa

SEQ ID NO: 1491386 - RNA, 18 nt, Human
gauuacugccuauuuuaa

SEQ ID NO: 1491387 - RNA, 22 nt, Human
gauuacaggugugagccaccac

SEQ ID NO: 1491388 - RNA, 23 nt, Human
gauccaggccggcuugccacacc

SEQ ID NO: 1491389 - RNA, 18 nt, Human
gcagagcugauggagaag

SEQ ID NO: 1491390 - RNA, 16 nt, Human
gcagagccaggaagau

SEQ ID NO: 1491391 - RNA, 22 nt, Human
gcauaacguauaaaagccuguu

SEQ ID NO: 1491392 - RNA, 18 nt, Human
gcacuuuagaauaugccu

SEQ ID NO: 1491393 - RNA, 19 nt, Human
gcacuuuagaauaugccuu

SEQ ID NO: 1491394 - RNA, 20 nt, Human
gcacuuuagaauaugccuug

SEQ ID NO: 1491395 - RNA, 19 nt, Human
gcagaaagcaucccucacc

SEQ ID NO: 1491396 - RNA, 20 nt, Human
gcagaaagcaucccucaccc

SEQ ID NO: 1491397 - RNA, 14 nt, Human
gcagagccaggaag

SEQ ID NO: 1491398 - RNA, 15 nt, Human
gcagagccaggaaga

SEQ ID NO: 1491399 - RNA, 18 nt, Human
cuuuuggaagguauuuaa

SEQ ID NO: 1491400 - RNA, 19 nt, Human
cuuuuguagaagucacauu

SEQ ID NO: 1491401 - RNA, 15 nt, Human
cuuuuggcauuuuac

SEQ ID NO: 1491402 - RNA, 13 nt, Human
gaaaaaaaauuau

SEQ ID NO: 1491403 - RNA, 15 nt, Human
gaaacuuuuggaagg

SEQ ID NO: 1491404 - RNA, 13 nt, Human
gaaacuuuuggaa

SEQ ID NO: 1491405 - RNA, 17 nt, Human
gaaauauuuauuuuaau

SEQ ID NO: 1491406 - RNA, 22 nt, Human
gaaauauuuauuuuaauaaugu

SEQ ID NO: 1491407 - RNA, 18 nt, Human
gaaauauuuauuuuaaua

SEQ ID NO: 1491408 - RNA, 13 nt, Human
cuuuguaaugaaa

SEQ ID NO: 1491409 - RNA, 14 nt, Human
cuuuuaugugaaac

SEQ ID NO: 1491410 - RNA, 18 nt, Human
cuuuuaugugaaacaugu

SEQ ID NO: 1491411 - RNA, 18 nt, Human
cuuuccugagucccaucc

SEQ ID NO: 1491412 - RNA, 20 nt, Human
cuuuccugagucccaucccu

SEQ ID NO: 1491413 - RNA, 22 nt, Human
cuuuccugagucccaucccugc

SEQ ID NO: 1491414 - RNA, 12 nt, Human
cuugaugaagaa

SEQ ID NO: 1491415 - RNA, 13 nt, Human
cuugaugaagaag

SEQ ID NO: 1491416 - RNA, 12 nt, Human
cuugaugccugg

SEQ ID NO: 1491417 - RNA, 13 nt, Human
cuugaugccuggc

SEQ ID NO: 1491418 - RNA, 14 nt, Human
cuuaugcuuaaauu

SEQ ID NO: 1491419 - RNA, 14 nt, Human
cuuauuauuuuuga

SEQ ID NO: 1491420 - RNA, 16 nt, Human
cuuauuauuuuugaga

SEQ ID NO: 1491421 - RNA, 20 nt, Human
cuuauuguagcauccuggaa

SEQ ID NO: 1491422 - RNA, 23 nt, Human
cuuauuguagcauccuggaauau

SEQ ID NO: 1491423 - RNA, 13 nt, Human
cuucaugcaugga

SEQ ID NO: 1491424 - RNA, 15 nt, Human
cuucaugcauggaaa

SEQ ID NO: 1491425 - RNA, 11 nt, Human
cuucaucugga

SEQ ID NO: 1491426 - RNA, 12 nt, Human
cuucaucuggaa

SEQ ID NO: 1491427 - RNA, 13 nt, Human
cuucaucuggaac

SEQ ID NO: 1491428 - RNA, 15 nt, Human
cuucaucuggaacca

SEQ ID NO: 1491429 - RNA, 19 nt, Human
cuucaucuggauuccagag

SEQ ID NO: 1491430 - RNA, 15 nt, Human
cuucacuguaaaaua

SEQ ID NO: 1491431 - RNA, 16 nt, Human
cuggacugugugcuca

SEQ ID NO: 1491432 - RNA, 10 nt, Human
cugggacagg

SEQ ID NO: 1491433 - RNA, 18 nt, Human
cuggggccaggcuggguc

SEQ ID NO: 1491434 - RNA, 16 nt, Human
cuggugcacuggcccc

SEQ ID NO: 1491435 - RNA, 19 nt, Human
cuggugcacuggccccacc

SEQ ID NO: 1491436 - RNA, 22 nt, Human
cugucacccagguuggagugca

SEQ ID NO: 1491437 - RNA, 13 nt, Human
cuguaaaacuaag

SEQ ID NO: 1491438 - RNA, 17 nt, Human
cuguaaaauaaaagguc

SEQ ID NO: 1491439 - RNA, 22 nt, Human
cuguacuugcucuugaugccug

SEQ ID NO: 1491440 - RNA, 23 nt, Human
cuguacuugcucuugaugccugg

SEQ ID NO: 1491441 - RNA, 17 nt, Human
cugcuuuuuauggccug

SEQ ID NO: 1491442 - RNA, 18 nt, Human
cugcuuuuuauggccugu

SEQ ID NO: 1491443 - RNA, 21 nt, Human
cuggaaaucaggguuaguauu

SEQ ID NO: 1491444 - RNA, 15 nt, Human
cuggaaccaucagaa

SEQ ID NO: 1491445 - RNA, 16 nt, Human
cuggaaccaucagaaa

SEQ ID NO: 1491446 - RNA, 13 nt, Human
cuggacugugugc

SEQ ID NO: 1491447 - RNA, 15 nt, Human
cugcuacaauguccu

SEQ ID NO: 1491448 - RNA, 18 nt, Human
aacuuccagauccuggaa

SEQ ID NO: 1491449 - RNA, 19 nt, Human
aacugcuaaucuacuuucu

SEQ ID NO: 1491450 - RNA, 17 nt, Human
aacugggacaggggaga

SEQ ID NO: 1491451 - RNA, 16 nt, Human
aacuggggcuccucca

SEQ ID NO: 1491452 - RNA, 16 nt, Human
aacucuucaaggucug

SEQ ID NO: 1491453 - RNA, 19 nt, Human
aacucuucaaggucugcuu

SEQ ID NO: 1491454 - RNA, 13 nt, Human
aacugaaaucaua

SEQ ID NO: 1491455 - RNA, 12 nt, Human
aacugaaaucau

SEQ ID NO: 1491456 - RNA, 14 nt, Human
aacccagauaaagg

SEQ ID NO: 1491457 - RNA, 24 nt, Human
aaccucuaaauucuuucauuuuag

SEQ ID NO: 1491458 - RNA, 12 nt, Human
aaccucuaaauu

SEQ ID NO: 1491459 - RNA, 14 nt, Human
aaccucauccucuc

SEQ ID NO: 1491460 - RNA, 20 nt, Human
aaccaagugaucaaacuaca

SEQ ID NO: 1491461 - RNA, 21 nt, Human
aacuagaguuuagcuggaaaa

SEQ ID NO: 1491462 - RNA, 16 nt, Human
gucuuucacauuuaaa

SEQ ID NO: 1491463 - RNA, 14 nt, Human
gucugucugucugu

SEQ ID NO: 1491464 - RNA, 16 nt, Human
gucugucugucugucc

SEQ ID NO: 1491465 - RNA, 17 nt, Human
aacacaacuauauuguu

SEQ ID NO: 1491466 - RNA, 24 nt, Human
guccagugggaggugagaccaccu

SEQ ID NO: 1491467 - RNA, 15 nt, Human
guccaguguuucuuu

SEQ ID NO: 1491468 - RNA, 15 nt, Human
aacaaugcuguauuu

SEQ ID NO: 1491469 - RNA, 12 nt, Human
aacaauaaaaga

SEQ ID NO: 1491470 - RNA, 16 nt, Human
aacacaacuauauugu

SEQ ID NO: 1491471 - RNA, 15 nt, Human
aacacaacuauauug

SEQ ID NO: 1491472 - RNA, 22 nt, Human
aacaaugcuguauuuuaaaaga

SEQ ID NO: 1491473 - RNA, 17 nt, Human
aacaaugcuguauuuua

SEQ ID NO: 1491474 - RNA, 20 nt, Human
aaauuuuuguaguagcguuu

SEQ ID NO: 1491475 - RNA, 20 nt, Human
aaauuuuuucucuaggaaau

SEQ ID NO: 1491476 - RNA, 13 nt, Human
gucagaauagaaa

SEQ ID NO: 1491477 - RNA, 17 nt, Human
gucagaauagaaauuag

SEQ ID NO: 1491478 - RNA, 12 nt, Human
aaauuugccaag

SEQ ID NO: 1491479 - RNA, 20 nt, Human
aaauggucucuaacauuucc

SEQ ID NO: 1491480 - RNA, 20 nt, Human
guaguguuggagaagaacug

SEQ ID NO: 1491481 - RNA, 17 nt, Human
guaguugccuuaaaaua

SEQ ID NO: 1491482 - RNA, 19 nt, Human
guauaaaagggacugagaa

SEQ ID NO: 1491483 - RNA, 21 nt, Human
guauaaaauaauuuuuauauu

SEQ ID NO: 1491484 - RNA, 15 nt, Human
guauaaaauaauuuu

SEQ ID NO: 1491485 - RNA, 14 nt, Human
aaauuaagaaagga

SEQ ID NO: 1491486 - RNA, 15 nt, Human
aaauguauuacagug

SEQ ID NO: 1491487 - RNA, 18 nt, Human
guauguacuucaugcugu

SEQ ID NO: 1491488 - RNA, 17 nt, Human
gucaacacuaacaugau

SEQ ID NO: 1491489 - RNA, 22 nt, Human
aaauuuauuucaauauuagcaa

SEQ ID NO: 1491490 - RNA, 16 nt, Human
aaauucugucucugga

SEQ ID NO: 1491491 - RNA, 19 nt, Human
aaauuguaagcaugcacaa

SEQ ID NO: 1491492 - RNA, 18 nt, Human
aaauucugucucuggauu

SEQ ID NO: 1491493 - RNA, 20 nt, Human
aaauuguaagcaugcacaaa

SEQ ID NO: 1491494 - RNA, 17 nt, Human
aagacugcauuauauuu

SEQ ID NO: 1491495 - RNA, 16 nt, Human
aagacugcacaucaaa

SEQ ID NO: 1491496 - RNA, 19 nt, Human
aagaggaauuacgugcucu

SEQ ID NO: 1491497 - RNA, 16 nt, Human
aagcuagcaaauagua

SEQ ID NO: 1491498 - RNA, 20 nt, Human
aagcucacagaccuuugaac

SEQ ID NO: 1491499 - RNA, 14 nt, Human
aagcuccagguaga

SEQ ID NO: 1491500 - RNA, 13 nt, Human
aagcuccagguag

SEQ ID NO: 1491501 - RNA, 23 nt, Human
guuagggaaaacauuccauccuu

SEQ ID NO: 1491502 - RNA, 15 nt, Human
guuagggaaaacauu

SEQ ID NO: 1491503 - RNA, 20 nt, Human
guuagggaaaacauuccauc

SEQ ID NO: 1491504 - RNA, 16 nt, Human
aagcccauucauucca

SEQ ID NO: 1491505 - RNA, 21 nt, Human
aagcccauucauuccauucug

SEQ ID NO: 1491506 - RNA, 23 nt, Human
aagcccauucauuccauucugga

SEQ ID NO: 1491507 - RNA, 16 nt, Human
aagcauuuagauguau

SEQ ID NO: 1491508 - RNA, 13 nt, Human
aagcaucccucac

SEQ ID NO: 1491509 - RNA, 14 nt, Human
aagcaucccucacc

SEQ ID NO: 1491510 - RNA, 23 nt, Human
aagcaucccucacccauccuaga

SEQ ID NO: 1491511 - RNA, 15 nt, Human
guuuuucauaaagca

SEQ ID NO: 1491512 - RNA, 16 nt, Human
aagucuuucacauuua

SEQ ID NO: 1491513 - RNA, 19 nt, Human
aaguaaugauaacuggaaa

SEQ ID NO: 1491514 - RNA, 14 nt, Human
aaguaaugauaacu

SEQ ID NO: 1491515 - RNA, 13 nt, Human
aaguauuagaaua

SEQ ID NO: 1491516 - RNA, 21 nt, Human
aagugaucaaacuacauauug

SEQ ID NO: 1491517 - RNA, 20 nt, Human
uaaaauaauuuuuauauuug

SEQ ID NO: 1491518 - RNA, 22 nt, Human
uaaaauaauuuuaucucuuucu

SEQ ID NO: 1491519 - RNA, 20 nt, Human
uaaaagacagugaaagaaaa

SEQ ID NO: 1491520 - RNA, 18 nt, Human
uaaaaauaaaaaacacug

SEQ ID NO: 1491521 - RNA, 19 nt, Human
uaaaaauaaaaaacacugg

SEQ ID NO: 1491522 - RNA, 21 nt, Human
uaaaaauaaaaaacacuggga

SEQ ID NO: 1491523 - RNA, 16 nt, Human
uaaaaauaaacauguu

SEQ ID NO: 1491524 - RNA, 18 nt, Human
uaaaacgcaguugcaaac

SEQ ID NO: 1491525 - RNA, 12 nt, Human
uaaaagaaugau

SEQ ID NO: 1491526 - RNA, 11 nt, Human
aaggauaaagu

SEQ ID NO: 1491527 - RNA, 19 nt, Human
aaggcauuauaaaaagaau

SEQ ID NO: 1491528 - RNA, 12 nt, Human
aaggaaagaaaa

SEQ ID NO: 1491529 - RNA, 15 nt, Human
aaggaaagaaaacau

SEQ ID NO: 1491530 - RNA, 17 nt, Human
guuucuauuuuuugaaa

SEQ ID NO: 1491531 - RNA, 18 nt, Human
aagguauuuaauagguuu

SEQ ID NO: 1491532 - RNA, 16 nt, Human
aaguaaggaauuuuau

SEQ ID NO: 1491533 - RNA, 14 nt, Human
aagguacuucaaau

SEQ ID NO: 1491534 - RNA, 16 nt, Human
aaucagccuaguugau

SEQ ID NO: 1491535 - RNA, 15 nt, Human
aauauuuauuuuaau

SEQ ID NO: 1491536 - RNA, 21 nt, Human
uaagcauaagcuuaugcuuaa

SEQ ID NO: 1491537 - RNA, 22 nt, Human
uaaggaauuuuauuuuuuucug

SEQ ID NO: 1491538 - RNA, 20 nt, Human
uaaguaaugauaacuggaaa

SEQ ID NO: 1491539 - RNA, 18 nt, Human
uaaguacacaauaagcaa

SEQ ID NO: 1491540 - RNA, 17 nt, Human
uaaguguguguuuuuca

SEQ ID NO: 1491541 - RNA, 13 nt, Human
uaauaaaaauaaa

SEQ ID NO: 1491542 - RNA, 11 nt, Human
aaucuguaaaa

SEQ ID NO: 1491543 - RNA, 19 nt, Human
uaaauguuaugacuaugua

SEQ ID NO: 1491544 - RNA, 21 nt, Human
uaaauguuaugacuauguaaa

SEQ ID NO: 1491545 - RNA, 20 nt, Human
uaaauguuaugacuauguaa

SEQ ID NO: 1491546 - RNA, 13 nt, Human
uaacaaugcugua

SEQ ID NO: 1491547 - RNA, 23 nt, Human
aauacaucccuuaccugggaaag

SEQ ID NO: 1491548 - RNA, 23 nt, Human
aauaccacaggaaccacaagacu

SEQ ID NO: 1491549 - RNA, 21 nt, Human
aauauauucagccuggcuuca

SEQ ID NO: 1491550 - RNA, 21 nt, Human
aauauauuuuaagacgaaaca

SEQ ID NO: 1491551 - RNA, 20 nt, Human
uaacaugaauauuuaguguu

SEQ ID NO: 1491552 - RNA, 21 nt, Human
uaacaugaauauuuaguguuc

SEQ ID NO: 1491553 - RNA, 19 nt, Human
uaacaugaauauuuagugu

SEQ ID NO: 1491554 - RNA, 13 nt, Human
uaacguauaaaag

SEQ ID NO: 1491555 - RNA, 17 nt, Human
uaacguauaaaagccug

SEQ ID NO: 1491556 - RNA, 23 nt, Human
uaagacaaaaagcuacuuauugu

SEQ ID NO: 1491557 - RNA, 13 nt, Human
uaagacaaauaug

SEQ ID NO: 1491558 - RNA, 13 nt, Human
uacauuuccuaaa

SEQ ID NO: 1491559 - RNA, 18 nt, Human
aauguucacaauauauuu

SEQ ID NO: 1491560 - RNA, 19 nt, Human
aauguuaugacuauguaaa

SEQ ID NO: 1491561 - RNA, 22 nt, Human
aauguuaugacuauguaaacua

SEQ ID NO: 1491562 - RNA, 15 nt, Human
aauuaugugacauuu

SEQ ID NO: 1491563 - RNA, 17 nt, Human
aauuaugugacauuuua

SEQ ID NO: 1491564 - RNA, 20 nt, Human
aauuaugugacauuuuacau

SEQ ID NO: 1491565 - RNA, 22 nt, Human
aauuaugugccagauuuaugca

SEQ ID NO: 1491566 - RNA, 22 nt, Human
aauuaugugacauuuuacauua

SEQ ID NO: 1491567 - RNA, 14 nt, Human
aauuacauuuguau

SEQ ID NO: 1491568 - RNA, 13 nt, Human
aauuacauuugua

SEQ ID NO: 1491569 - RNA, 23 nt, Human
uaccugaagcuaucguaaaauua

SEQ ID NO: 1491570 - RNA, 14 nt, Human
uacccuaaccaagu

SEQ ID NO: 1491571 - RNA, 16 nt, Human
uacccuaaccaaguuc

SEQ ID NO: 1491572 - RNA, 17 nt, Human
uacccuaaccaaguucc

SEQ ID NO: 1491573 - RNA, 21 nt, Human
uaauuuuuuucaccuagauuu

SEQ ID NO: 1491574 - RNA, 21 nt, Human
aaugcuguauuuuaaaagaau

SEQ ID NO: 1491575 - RNA, 20 nt, Human
aaugcuguauuuuaaaagaa

SEQ ID NO: 1491576 - RNA, 22 nt, Human
aaugcuguauuuuaaaagaaug

SEQ ID NO: 1491577 - RNA, 19 nt, Human
aauggaggggcagagccag

SEQ ID NO: 1491578 - RNA, 20 nt, Human
aauggaggggcagagccagg

SEQ ID NO: 1491579 - RNA, 21 nt, Human
aauggaggggcagagccagga

SEQ ID NO: 1491580 - RNA, 22 nt, Human
aauggaggggcagagccaggaa

SEQ ID NO: 1491581 - RNA, 11 nt, Human
uacacccagca

SEQ ID NO: 1491582 - RNA, 12 nt, Human
uacacccagcaa

SEQ ID NO: 1491583 - RNA, 14 nt, Human
uacacccagcaaua

SEQ ID NO: 1491584 - RNA, 22 nt, Human
aaugagagacacacugaagaag

SEQ ID NO: 1491585 - RNA, 12 nt, Human
aaugagaaaucu

SEQ ID NO: 1491586 - RNA, 22 nt, Human
aaugagaaaucuaaaaaacgaa

SEQ ID NO: 1491587 - RNA, 22 nt, Human
uaauuccguagguuauuuucag

SEQ ID NO: 1491588 - RNA, 21 nt, Human
uaauuuuuauauuugaaauau

SEQ ID NO: 1491589 - RNA, 19 nt, Human
uaauuuuuauauuugaaau

SEQ ID NO: 1491590 - RNA, 18 nt, Human
uaauuuuuauauuugaaa

SEQ ID NO: 1491591 - RNA, 22 nt, Human
acaggaaccacaagacugcaca

SEQ ID NO: 1491592 - RNA, 23 nt, Human
acagcuguaugauucccagccag

SEQ ID NO: 1491593 - RNA, 20 nt, Human
acagcuguaugauucccagc

SEQ ID NO: 1491594 - RNA, 19 nt, Human
acagcuguaugauucccag

SEQ ID NO: 1491595 - RNA, 14 nt, Human
acagcuguaugauu

SEQ ID NO: 1491596 - RNA, 20 nt, Human
uaugaagcuuuuaugugaaa

SEQ ID NO: 1491597 - RNA, 22 nt, Human
uaugaagcuuuuaugugaaaca

SEQ ID NO: 1491598 - RNA, 23 nt, Human
uaugaagcuuuuaugugaaacau

SEQ ID NO: 1491599 - RNA, 19 nt, Human
acagcccuucuuuccacag

SEQ ID NO: 1491600 - RNA, 15 nt, Human
uaucuauauuuuaca

SEQ ID NO: 1491601 - RNA, 17 nt, Human
uaugauacuugaaaauu

SEQ ID NO: 1491602 - RNA, 17 nt, Human
uaugccauauaauucac

SEQ ID NO: 1491603 - RNA, 15 nt, Human
uaugccccauucaac

SEQ ID NO: 1491604 - RNA, 15 nt, Human
uagucaccagagacu

SEQ ID NO: 1491605 - RNA, 18 nt, Human
uagucaccagagacuuua

SEQ ID NO: 1491606 - RNA, 19 nt, Human
uauaagugauugcugguuu

SEQ ID NO: 1491607 - RNA, 21 nt, Human
uauaucuauauuuuacauaaa

SEQ ID NO: 1491608 - RNA, 20 nt, Human
uauauauuuuuuucugaaau

SEQ ID NO: 1491609 - RNA, 19 nt, Human
uauauauuuuuuucugaaa

SEQ ID NO: 1491610 - RNA, 21 nt, Human
uauauauguguaugcacagua

SEQ ID NO: 1491611 - RNA, 23 nt, Human
uauauauguguaugcacaguaaa

SEQ ID NO: 1491612 - RNA, 14 nt, Human
acagaccuuugaac

SEQ ID NO: 1491613 - RNA, 23 nt, Human
uauccaccaaaagggcucccuga

SEQ ID NO: 1491614 - RNA, 13 nt, Human
uaucuauagcuaa

SEQ ID NO: 1491615 - RNA, 21 nt, Human
acaaugaucaccgacugaaaa

SEQ ID NO: 1491616 - RNA, 13 nt, Human
acacaacuauauu

SEQ ID NO: 1491617 - RNA, 14 nt, Human
acacaauaagcaaa

SEQ ID NO: 1491618 - RNA, 13 nt, Human
acacaauaagcaa

SEQ ID NO: 1491619 - RNA, 12 nt, Human
uaguaaucauau

SEQ ID NO: 1491620 - RNA, 13 nt, Human
uagggaaaacauu

SEQ ID NO: 1491621 - RNA, 16 nt, Human
uagggaaaacauucca

SEQ ID NO: 1491622 - RNA, 18 nt, Human
uagggaaaacauuccauc

SEQ ID NO: 1491623 - RNA, 18 nt, Human
uagggcaauuaauuccuu

SEQ ID NO: 1491624 - RNA, 21 nt, Human
uagggcaauuaauuccuucag

SEQ ID NO: 1491625 - RNA, 23 nt, Human
uagggcaauuaauuccuucagca

SEQ ID NO: 1491626 - RNA, 21 nt, Human
uaggggcuuauaauaaaggac

SEQ ID NO: 1491627 - RNA, 22 nt, Human
uaggggcuuauaauaaaggacu

SEQ ID NO: 1491628 - RNA, 23 nt, Human
uaggggcuuauaauaaaggacug

SEQ ID NO: 1491629 - RNA, 16 nt, Human
uagcguuuuuuaaaug

SEQ ID NO: 1491630 - RNA, 17 nt, Human
uagcguuuuuuaaaugu

SEQ ID NO: 1491631 - RNA, 18 nt, Human
uagcguuuuuuaaaugua

SEQ ID NO: 1491632 - RNA, 23 nt, Human
uagcuuuuuucucugauacagaa

SEQ ID NO: 1491633 - RNA, 13 nt, Human
uagcuuuuuucuc

SEQ ID NO: 1491634 - RNA, 22 nt, Human
uagcguuuuuuaaauguauacu

SEQ ID NO: 1491635 - RNA, 14 nt, Human
uagcuaaguacaca

SEQ ID NO: 1491636 - RNA, 14 nt, Human
uagaggguguguaa

SEQ ID NO: 1491637 - RNA, 13 nt, Human
acaaauaauuuag

SEQ ID NO: 1491638 - RNA, 14 nt, Human
acaaauaauuuaga

SEQ ID NO: 1491639 - RNA, 16 nt, Human
acaaaaagcuacuuau

SEQ ID NO: 1491640 - RNA, 20 nt, Human
aauuuuacauggcuggagcu

SEQ ID NO: 1491641 - RNA, 12 nt, Human
aauuuuacauuu

SEQ ID NO: 1491642 - RNA, 16 nt, Human
uagacacgcacggcag

SEQ ID NO: 1491643 - RNA, 13 nt, Human
uagacacacauga

SEQ ID NO: 1491644 - RNA, 20 nt, Human
uagaauuugauaugugaaca

SEQ ID NO: 1491645 - RNA, 22 nt, Human
uagaauuugauaugugaacagu

SEQ ID NO: 1491646 - RNA, 15 nt, Human
uagaaaaaaaauuau

SEQ ID NO: 1491647 - RNA, 18 nt, Human
uagaagacaaaauguuca

SEQ ID NO: 1491648 - RNA, 15 nt, Human
uagaaacacaacuau

SEQ ID NO: 1491649 - RNA, 22 nt, Human
accugaagcuaucguaaaauua

SEQ ID NO: 1491650 - RNA, 16 nt, Human
ucauaauaaguugcau

SEQ ID NO: 1491651 - RNA, 22 nt, Human
accugccucccuucaugcaugg

SEQ ID NO: 1491652 - RNA, 21 nt, Human
accugccucccuucaugcaug

SEQ ID NO: 1491653 - RNA, 23 nt, Human
accugccucccuucaugcaugga

SEQ ID NO: 1491654 - RNA, 18 nt, Human
uccacauuucccccuagc

SEQ ID NO: 1491655 - RNA, 15 nt, Human
acggcagccacagcu

SEQ ID NO: 1491656 - RNA, 15 nt, Human
acggggacucagccc

SEQ ID NO: 1491657 - RNA, 16 nt, Human
ucccaauugagaaaaa

SEQ ID NO: 1491658 - RNA, 11 nt, Human
acuauguaaac

SEQ ID NO: 1491659 - RNA, 12 nt, Human
acuauguaaacu

SEQ ID NO: 1491660 - RNA, 14 nt, Human
acuauguaaacuac

SEQ ID NO: 1491661 - RNA, 16 nt, Human
acuauguaaacuacuu

SEQ ID NO: 1491662 - RNA, 13 nt, Human
acuacgccuggcu

SEQ ID NO: 1491663 - RNA, 14 nt, Human
acuacuagggaaau

SEQ ID NO: 1491664 - RNA, 23 nt, Human
acuacuucuuuuuucaaaagaaa

SEQ ID NO: 1491665 - RNA, 20 nt, Human
acuagaguuuagcuggaaaa

SEQ ID NO: 1491666 - RNA, 22 nt, Human
ucccucuuccuucccugcugug

SEQ ID NO: 1491667 - RNA, 21 nt, Human
ucccucuuccuucccugcugu

SEQ ID NO: 1491668 - RNA, 23 nt, Human
ucccucuuccuucccugcuguga

SEQ ID NO: 1491669 - RNA, 23 nt, Human
acucaucuagguaaauuacaguu

SEQ ID NO: 1491670 - RNA, 21 nt, Human
acuccaaacugacucuuaaga

SEQ ID NO: 1491671 - RNA, 14 nt, Human
uccgugcuuaacca

SEQ ID NO: 1491672 - RNA, 21 nt, Human
uccgugcuuaaccaaagaagc

SEQ ID NO: 1491673 - RNA, 18 nt, Human
acuccagaaagugacaag

SEQ ID NO: 1491674 - RNA, 14 nt, Human
acuccagaaaguga

SEQ ID NO: 1491675 - RNA, 20 nt, Human
acucuucaaggucugcuuuu

SEQ ID NO: 1491676 - RNA, 19 nt, Human
acucuucaaggucugcuuu

SEQ ID NO: 1491677 - RNA, 13 nt, Human
acucuugaaaaau

SEQ ID NO: 1491678 - RNA, 15 nt, Human
acucguguguuucua

SEQ ID NO: 1491679 - RNA, 23 nt, Human
acucguguguuucuauuuuuuga

SEQ ID NO: 1491680 - RNA, 21 nt, Human
acucuugaaaaaugcauguug

SEQ ID NO: 1491681 - RNA, 14 nt, Human
acucuugaaaaaug

SEQ ID NO: 1491682 - RNA, 19 nt, Human
acucuugaaaaaugcaugu

SEQ ID NO: 1491683 - RNA, 17 nt, Human
uccucuccccaugaugu

SEQ ID NO: 1491684 - RNA, 21 nt, Human
uccugaccccaaguuauccac

SEQ ID NO: 1491685 - RNA, 19 nt, Human
acucuuucuuucaauaaaa

SEQ ID NO: 1491686 - RNA, 18 nt, Human
acugaaaauauuguuuua

SEQ ID NO: 1491687 - RNA, 22 nt, Human
uccugaaaacccuugccaugug

SEQ ID NO: 1491688 - RNA, 21 nt, Human
uccugaaaacccuugccaugu

SEQ ID NO: 1491689 - RNA, 24 nt, Human
ucauaaagcaggcagaacucaucu

SEQ ID NO: 1491690 - RNA, 18 nt, Human
ucauaaauaaaguuuguu

SEQ ID NO: 1491691 - RNA, 21 nt, Human
accgaacugauguaaguaaac

SEQ ID NO: 1491692 - RNA, 11 nt, Human
acccucccucc

SEQ ID NO: 1491693 - RNA, 17 nt, Human
acccucccucccuaccc

SEQ ID NO: 1491694 - RNA, 20 nt, Human
acccucaugcugugugacuc

SEQ ID NO: 1491695 - RNA, 14 nt, Human
acccagcaauagag

SEQ ID NO: 1491696 - RNA, 16 nt, Human
ucagaauagaaauuag

SEQ ID NO: 1491697 - RNA, 17 nt, Human
acccaggacaggaucca

SEQ ID NO: 1491698 - RNA, 20 nt, Human
acccaggacaggauccaggc

SEQ ID NO: 1491699 - RNA, 14 nt, Human
acccaggacaggau

SEQ ID NO: 1491700 - RNA, 15 nt, Human
ucagauuucugagga

SEQ ID NO: 1491701 - RNA, 19 nt, Human
accccagcuggggccaggc

SEQ ID NO: 1491702 - RNA, 22 nt, Human
accccagcuggggccaggcugg

SEQ ID NO: 1491703 - RNA, 23 nt, Human
accauguuggccaggcuugucuc

SEQ ID NO: 1491704 - RNA, 21 nt, Human
accauggacacuacacccagc

SEQ ID NO: 1491705 - RNA, 22 nt, Human
accauggacacuacacccagca

SEQ ID NO: 1491706 - RNA, 23 nt, Human
accauggacacuacacccagcaa

SEQ ID NO: 1491707 - RNA, 24 nt, Human
accauggacacuacacccagcaau

SEQ ID NO: 1491708 - RNA, 20 nt, Human
accauggccagcuaauuuuu

SEQ ID NO: 1491709 - RNA, 18 nt, Human
ucacugcaaccucugccu

SEQ ID NO: 1491710 - RNA, 18 nt, Human
ucacugcaaccuccaccu

SEQ ID NO: 1491711 - RNA, 19 nt, Human
ucacauuccugaacaggau

SEQ ID NO: 1491712 - RNA, 16 nt, Human
ucaccagcccuggcaa

SEQ ID NO: 1491713 - RNA, 21 nt, Human
ucacugaacuuugcugagccu

SEQ ID NO: 1491714 - RNA, 16 nt, Human
accacaagacugcaca

SEQ ID NO: 1491715 - RNA, 23 nt, Human
accaaaaaucucaauauuucaga

SEQ ID NO: 1491716 - RNA, 20 nt, Human
ucacauuccugaacaggaua

SEQ ID NO: 1491717 - RNA, 17 nt, Human
ucacauuccugaacagg

SEQ ID NO: 1491718 - RNA, 13 nt, Human
ucacauuccugaa

SEQ ID NO: 1491719 - RNA, 19 nt, Human
ucacagcuccaagaauuuc

SEQ ID NO: 1491720 - RNA, 16 nt, Human
ucacagaccuuugaac

SEQ ID NO: 1491721 - RNA, 23 nt, Human
ucaauauuucagauaaucacaau

SEQ ID NO: 1491722 - RNA, 15 nt, Human
ucaaggucugcuuuu

SEQ ID NO: 1491723 - RNA, 14 nt, Human
ucaaggucugcuuu

SEQ ID NO: 1491724 - RNA, 15 nt, Human
acauuuuacauuaaa

SEQ ID NO: 1491725 - RNA, 18 nt, Human
acauuuuacauuaaauuu

SEQ ID NO: 1491726 - RNA, 14 nt, Human
acauuuuacauuaa

SEQ ID NO: 1491727 - RNA, 16 nt, Human
acauuggaaacaaguc

SEQ ID NO: 1491728 - RNA, 22 nt, Human
acauggcuggagcuagaauuug

SEQ ID NO: 1491729 - RNA, 23 nt, Human
ucaaauacgugggcauucaaaug

SEQ ID NO: 1491730 - RNA, 13 nt, Human
ucaaauauauuca

SEQ ID NO: 1491731 - RNA, 22 nt, Human
ucaaauacgugggcauucaaau

SEQ ID NO: 1491732 - RNA, 21 nt, Human
ucaaauacgugggcauucaaa

SEQ ID NO: 1491733 - RNA, 17 nt, Human
uauuuuguguuuaggaa

SEQ ID NO: 1491734 - RNA, 20 nt, Human
uauuuuguguuuaggaacua

SEQ ID NO: 1491735 - RNA, 13 nt, Human
uauuuuacauaaa

SEQ ID NO: 1491736 - RNA, 22 nt, Human
uauuuuaauaauguuucaaaca

SEQ ID NO: 1491737 - RNA, 19 nt, Human
uauuuuaauaauguuucaa

SEQ ID NO: 1491738 - RNA, 17 nt, Human
uauuuuaauaaacacuc

SEQ ID NO: 1491739 - RNA, 14 nt, Human
uauuuuaauaaaca

SEQ ID NO: 1491740 - RNA, 18 nt, Human
uauuuuaaaagaaugauu

SEQ ID NO: 1491741 - RNA, 14 nt, Human
uauuuuaaaagaau

SEQ ID NO: 1491742 - RNA, 14 nt, Human
uauuuuaagacgaa

SEQ ID NO: 1491743 - RNA, 22 nt, Human
uauuuuaagacgaaacauuugu

SEQ ID NO: 1491744 - RNA, 11 nt, Human
acaucuuuaag

SEQ ID NO: 1491745 - RNA, 20 nt, Human
acaucuuuaaggggaggaac

SEQ ID NO: 1491746 - RNA, 14 nt, Human
uaugugccagauuu

SEQ ID NO: 1491747 - RNA, 19 nt, Human
uaugugccagauuuaugca

SEQ ID NO: 1491748 - RNA, 17 nt, Human
ucuaccaaaaaucucaa

SEQ ID NO: 1491749 - RNA, 13 nt, Human
acuguggguagac

SEQ ID NO: 1491750 - RNA, 14 nt, Human
ucguuaucuaauag

SEQ ID NO: 1491751 - RNA, 15 nt, Human
acuguacuugcucuu

SEQ ID NO: 1491752 - RNA, 23 nt, Human
acuguacuugcucuugaugccug

SEQ ID NO: 1491753 - RNA, 18 nt, Human
acuguacagacagaaaaa

SEQ ID NO: 1491754 - RNA, 22 nt, Human
acugaagaagcaccaaucauga

SEQ ID NO: 1491755 - RNA, 18 nt, Human
ucgcccuggacugugugc

SEQ ID NO: 1491756 - RNA, 16 nt, Human
ucgccggaucugaggg

SEQ ID NO: 1491757 - RNA, 17 nt, Human
ucgccggaucugaggga

SEQ ID NO: 1491758 - RNA, 12 nt, Human
ucgccucagccu

SEQ ID NO: 1491759 - RNA, 20 nt, Human
ucuauuuuuugaaaagcaga

SEQ ID NO: 1491760 - RNA, 15 nt, Human
acuuguauuaugugu

SEQ ID NO: 1491761 - RNA, 13 nt, Human
acuuguauuaugu

SEQ ID NO: 1491762 - RNA, 14 nt, Human
acuuguauuaugug

SEQ ID NO: 1491763 - RNA, 16 nt, Human
acuugaggacacaugu

SEQ ID NO: 1491764 - RNA, 17 nt, Human
acuugaggacacauguc

SEQ ID NO: 1491765 - RNA, 18 nt, Human
acuugaggacacaugucc

SEQ ID NO: 1491766 - RNA, 19 nt, Human
acuugaggacacaugucca

SEQ ID NO: 1491767 - RNA, 21 nt, Human
acuucucuuguuagguaauuu

SEQ ID NO: 1491768 - RNA, 17 nt, Human
acuugaaaauuaacaug

SEQ ID NO: 1491769 - RNA, 18 nt, Human
acuugaaaauuaacauga

SEQ ID NO: 1491770 - RNA, 13 nt, Human
ucuauaauuuaaa

SEQ ID NO: 1491771 - RNA, 20 nt, Human
acuuccagauccuggaaauc

SEQ ID NO: 1491772 - RNA, 22 nt, Human
ucucugcaggucccuaauaaag

SEQ ID NO: 1491773 - RNA, 19 nt, Human
ucucugcaggucccuaaua

SEQ ID NO: 1491774 - RNA, 20 nt, Human
ucucugcaggucccuaauaa

SEQ ID NO: 1491775 - RNA, 21 nt, Human
ucucugcaggucccuaauaaa

SEQ ID NO: 1491776 - RNA, 15 nt, Human
agaaacauuugguaa

SEQ ID NO: 1491777 - RNA, 21 nt, Human
agaaacuuaaauuuuaguucu

SEQ ID NO: 1491778 - RNA, 16 nt, Human
agaaacacaacuauau

SEQ ID NO: 1491779 - RNA, 16 nt, Human
agaaaacaaggaugaa

SEQ ID NO: 1491780 - RNA, 17 nt, Human
agaaagcaucccucacc

SEQ ID NO: 1491781 - RNA, 19 nt, Human
agaaagcaucccucaccca

SEQ ID NO: 1491782 - RNA, 22 nt, Human
agaaagcaucccucacccaucc

SEQ ID NO: 1491783 - RNA, 20 nt, Human
ucugaaggguaauuauauag

SEQ ID NO: 1491784 - RNA, 16 nt, Human
agaaaugaaaaaauau

SEQ ID NO: 1491785 - RNA, 13 nt, Human
agaaaugaaaaaa

SEQ ID NO: 1491786 - RNA, 12 nt, Human
agaaaugaaaaa

SEQ ID NO: 1491787 - RNA, 19 nt, Human
acuuuguauaaaagggacu

SEQ ID NO: 1491788 - RNA, 22 nt, Human
acuuguuuuauuuaaccucuaa

SEQ ID NO: 1491789 - RNA, 17 nt, Human
acuuuagaauaugccuu

SEQ ID NO: 1491790 - RNA, 13 nt, Human
acuuuagggaagu

SEQ ID NO: 1491791 - RNA, 22 nt, Human
ucucucacuuguuuuauuuaac

SEQ ID NO: 1491792 - RNA, 19 nt, Human
agaagcaccaaucaugaau

SEQ ID NO: 1491793 - RNA, 13 nt, Human
agaagcaaguaaa

SEQ ID NO: 1491794 - RNA, 12 nt, Human
agaacggaagaa

SEQ ID NO: 1491795 - RNA, 13 nt, Human
agaacggaagaag

SEQ ID NO: 1491796 - RNA, 14 nt, Human
ucugaauaaagcaa

SEQ ID NO: 1491797 - RNA, 17 nt, Human
ucugaauaaagcaauua

SEQ ID NO: 1491798 - RNA, 21 nt, Human
ucugcaggucccuaauaaagc

SEQ ID NO: 1491799 - RNA, 19 nt, Human
ucugcaggucccuaauaaa

SEQ ID NO: 1491800 - RNA, 22 nt, Human
ucugcaggucccuaauaaagcu

SEQ ID NO: 1491801 - RNA, 23 nt, Human
ucugcaggucccuaauaaagcug

SEQ ID NO: 1491802 - RNA, 12 nt, Human
agaaauuaugug

SEQ ID NO: 1491803 - RNA, 13 nt, Human
agaaguugauaug

SEQ ID NO: 1491804 - RNA, 14 nt, Human
ucuggauuccagag

SEQ ID NO: 1491805 - RNA, 18 nt, Human
ucuggaagugacuuuggc

SEQ ID NO: 1491806 - RNA, 19 nt, Human
ucuggaagugacuuuggcu

SEQ ID NO: 1491807 - RNA, 22 nt, Human
ucuggaagugacuuuggcugca

SEQ ID NO: 1491808 - RNA, 22 nt, Human
ucuggauuccagagcacugcuc

SEQ ID NO: 1491809 - RNA, 21 nt, Human
ucuugaugccuggcggggugg

SEQ ID NO: 1491810 - RNA, 23 nt, Human
ugaaaaaauauauaucaaauaua

SEQ ID NO: 1491811 - RNA, 16 nt, Human
ugaaaauauuguuuua

SEQ ID NO: 1491812 - RNA, 20 nt, Human
ugaaaauauuguuuuacaau

SEQ ID NO: 1491813 - RNA, 23 nt, Human
ugaaaauauuguuuuacaauagu

SEQ ID NO: 1491814 - RNA, 20 nt, Human
ugaaaaucuuauaauuuaaa

SEQ ID NO: 1491815 - RNA, 19 nt, Human
ugaaacucguuaauuugua

SEQ ID NO: 1491816 - RNA, 18 nt, Human
agagcaagaccccaucuc

SEQ ID NO: 1491817 - RNA, 16 nt, Human
agagcugauggagaag

SEQ ID NO: 1491818 - RNA, 17 nt, Human
agagcugauggagaagg

SEQ ID NO: 1491819 - RNA, 18 nt, Human
agagcugauggagaagga

SEQ ID NO: 1491820 - RNA, 14 nt, Human
agagaucaggaaga

SEQ ID NO: 1491821 - RNA, 15 nt, Human
agagaucaggaagag

SEQ ID NO: 1491822 - RNA, 19 nt, Human
agagaucaggaagagaagg

SEQ ID NO: 1491823 - RNA, 20 nt, Human
agagaucaggaagagaagga

SEQ ID NO: 1491824 - RNA, 12 nt, Human
ugaaacuuuugg

SEQ ID NO: 1491825 - RNA, 13 nt, Human
ugaauuugugaag

SEQ ID NO: 1491826 - RNA, 21 nt, Human
ugaauuugugaagguggaaau

SEQ ID NO: 1491827 - RNA, 23 nt, Human
ugaauuugugaagguggaaauaa

SEQ ID NO: 1491828 - RNA, 20 nt, Human
ugacaaagguaaaucagacu

SEQ ID NO: 1491829 - RNA, 22 nt, Human
ugaaggguaauuauauaguuac

SEQ ID NO: 1491830 - RNA, 14 nt, Human
ugaauaaagcaauu

SEQ ID NO: 1491831 - RNA, 15 nt, Human
ugaauacuuuauaaa

SEQ ID NO: 1491832 - RNA, 18 nt, Human
ugaauauuuaguguucau

SEQ ID NO: 1491833 - RNA, 19 nt, Human
agagcugauggagaaggaa

SEQ ID NO: 1491834 - RNA, 20 nt, Human
agagcugauggagaaggaag

SEQ ID NO: 1491835 - RNA, 21 nt, Human
agagcugauggagaaggaagg

SEQ ID NO: 1491836 - RNA, 20 nt, Human
ugaagcuaucguaaaauuaa

SEQ ID NO: 1491837 - RNA, 14 nt, Human
agauuucugaggaa

SEQ ID NO: 1491838 - RNA, 15 nt, Human
agauuucugaggaaa

SEQ ID NO: 1491839 - RNA, 17 nt, Human
agcaagaccccaucuca

SEQ ID NO: 1491840 - RNA, 17 nt, Human
agaugcaguucugaaga

SEQ ID NO: 1491841 - RNA, 16 nt, Human
agaugcaguucugaag

SEQ ID NO: 1491842 - RNA, 20 nt, Human
agccaggaagaucccccaga

SEQ ID NO: 1491843 - RNA, 21 nt, Human
agccaggaagaucccccagaa

SEQ ID NO: 1491844 - RNA, 22 nt, Human
agccaggaagaucccccagaaa

SEQ ID NO: 1491845 - RNA, 15 nt, Human
ugauggugguauguu

SEQ ID NO: 1491846 - RNA, 17 nt, Human
ugaugaagaaguugaua

SEQ ID NO: 1491847 - RNA, 17 nt, Human
agcaugucgucaaagcu

SEQ ID NO: 1491848 - RNA, 20 nt, Human
agcaugucgucaaagcugaa

SEQ ID NO: 1491849 - RNA, 20 nt, Human
agcaucacaugaacuuguaa

SEQ ID NO: 1491850 - RNA, 19 nt, Human
ugaucaaaaucaauuaaaa

SEQ ID NO: 1491851 - RNA, 16 nt, Human
ugauaugugaacaguu

SEQ ID NO: 1491852 - RNA, 15 nt, Human
ugauaugugaacagu

SEQ ID NO: 1491853 - RNA, 12 nt, Human
ugauaugggucu

SEQ ID NO: 1491854 - RNA, 17 nt, Human
ugauagacaauugaggu

SEQ ID NO: 1491855 - RNA, 18 nt, Human
ugauagacaauugaggua

SEQ ID NO: 1491856 - RNA, 17 nt, Human
ugaguagaguugaucaa

SEQ ID NO: 1491857 - RNA, 14 nt, Human
ugaguagaguugau

SEQ ID NO: 1491858 - RNA, 22 nt, Human
ugaguaacugauuuguaacaag

SEQ ID NO: 1491859 - RNA, 21 nt, Human
agcauaauacuugcuuuggaa

SEQ ID NO: 1491860 - RNA, 23 nt, Human
agcauaaauguugacaugggaca

SEQ ID NO: 1491861 - RNA, 21 nt, Human
ugauacagaaaaguugaauuu

SEQ ID NO: 1491862 - RNA, 12 nt, Human
ugauacagaaaa

SEQ ID NO: 1491863 - RNA, 15 nt, Human
ugagucaaaaaaucu

SEQ ID NO: 1491864 - RNA, 20 nt, Human
ugcacaccuacuagucacca

SEQ ID NO: 1491865 - RNA, 22 nt, Human
ugcacaccuacuagucaccaga

SEQ ID NO: 1491866 - RNA, 17 nt, Human
agcccuucuuuccacag

SEQ ID NO: 1491867 - RNA, 23 nt, Human
agcccuucuauacccacccagaa

SEQ ID NO: 1491868 - RNA, 21 nt, Human
agcccuucuccauggcccugc

SEQ ID NO: 1491869 - RNA, 23 nt, Human
agcccuucuccauggcccugcca

SEQ ID NO: 1491870 - RNA, 19 nt, Human
agcccuucuauacccaccc

SEQ ID NO: 1491871 - RNA, 20 nt, Human
agcccuucuauacccaccca

SEQ ID NO: 1491872 - RNA, 22 nt, Human
agcccuucuauacccacccaga

SEQ ID NO: 1491873 - RNA, 23 nt, Human
ugcauaacguauaaaagccuguu

SEQ ID NO: 1491874 - RNA, 16 nt, Human
ugcagucucuauacca

SEQ ID NO: 1491875 - RNA, 18 nt, Human
ugcagucucuauaccaau

SEQ ID NO: 1491876 - RNA, 19 nt, Human
ugcagucucuauaccaaua

SEQ ID NO: 1491877 - RNA, 20 nt, Human
ugcagucucuauaccaauaa

SEQ ID NO: 1491878 - RNA, 21 nt, Human
ugcagucucuauaccaauaaa

SEQ ID NO: 1491879 - RNA, 23 nt, Human
ugcagucucuauaccaauaaagu

SEQ ID NO: 1491880 - RNA, 22 nt, Human
ugcagucucuauaccaauaaag

SEQ ID NO: 1491881 - RNA, 17 nt, Human
ugcaggucccuaauaaa

SEQ ID NO: 1491882 - RNA, 12 nt, Human
ugcaggucccua

SEQ ID NO: 1491883 - RNA, 14 nt, Human
ugcaggucccuaau

SEQ ID NO: 1491884 - RNA, 15 nt, Human
ugcaggucccuaaua

SEQ ID NO: 1491885 - RNA, 16 nt, Human
ugcaggucccuaauaa

SEQ ID NO: 1491886 - RNA, 14 nt, Human
ugcagcccugcugc

SEQ ID NO: 1491887 - RNA, 17 nt, Human
ugcagcccccacugccu

SEQ ID NO: 1491888 - RNA, 23 nt, Human
ugcagcccccacugccuuugacc

SEQ ID NO: 1491889 - RNA, 20 nt, Human
agccuuggggcugaugcagu

SEQ ID NO: 1491890 - RNA, 18 nt, Human
agcgccuccaacccuagc

SEQ ID NO: 1491891 - RNA, 19 nt, Human
agcgccuccaacccuagca

SEQ ID NO: 1491892 - RNA, 22 nt, Human
agcgccuccaacccuagcaaaa

SEQ ID NO: 1491893 - RNA, 23 nt, Human
agcgccuccaacccuagcaaaag

SEQ ID NO: 1491894 - RNA, 13 nt, Human
agccuguuuaaga

SEQ ID NO: 1491895 - RNA, 15 nt, Human
agccuguuuaagaga

SEQ ID NO: 1491896 - RNA, 16 nt, Human
agcuagaauuugauau

SEQ ID NO: 1491897 - RNA, 13 nt, Human
agcuagaauuuga

SEQ ID NO: 1491898 - RNA, 19 nt, Human
agcuacuaauuuuaaaaug

SEQ ID NO: 1491899 - RNA, 18 nt, Human
agcuaggaauuguguuua

SEQ ID NO: 1491900 - RNA, 21 nt, Human
ugcggaggaaggaggacccag

SEQ ID NO: 1491901 - RNA, 22 nt, Human
ugcggaggaaggaggacccagg

SEQ ID NO: 1491902 - RNA, 23 nt, Human
ugcggaggaaggaggacccagga

SEQ ID NO: 1491903 - RNA, 13 nt, Human
ugccuuugaccug

SEQ ID NO: 1491904 - RNA, 17 nt, Human
ugccuuugaccugccuc

SEQ ID NO: 1491905 - RNA, 23 nt, Human
ugccuuugaccugccucccuuca

SEQ ID NO: 1491906 - RNA, 12 nt, Human
ugcuacaauguc

SEQ ID NO: 1491907 - RNA, 15 nt, Human
ugccugcccuauucu

SEQ ID NO: 1491908 - RNA, 14 nt, Human
agcuguguggcagu

SEQ ID NO: 1491909 - RNA, 16 nt, Human
agcuguguggcagucu

SEQ ID NO: 1491910 - RNA, 23 nt, Human
ugcuguauuuuaaaagaaugauu

SEQ ID NO: 1491911 - RNA, 11 nt, Human
aggacacaugu

SEQ ID NO: 1491912 - RNA, 12 nt, Human
aggacacauguc

SEQ ID NO: 1491913 - RNA, 13 nt, Human
aggacacaugucc

SEQ ID NO: 1491914 - RNA, 14 nt, Human
aggaauggaagucc

SEQ ID NO: 1491915 - RNA, 13 nt, Human
ugcuguauuuuaa

SEQ ID NO: 1491916 - RNA, 22 nt, Human
ugcuguauuuuaaaagaaugau

SEQ ID NO: 1491917 - RNA, 21 nt, Human
ugcuguauuuuaaaagaauga

SEQ ID NO: 1491918 - RNA, 12 nt, Human
aggaaauauuua

SEQ ID NO: 1491919 - RNA, 13 nt, Human
aggaaauauuuau

SEQ ID NO: 1491920 - RNA, 14 nt, Human
ugcucauggaauug

SEQ ID NO: 1491921 - RNA, 14 nt, Human
ugcucauuucagga

SEQ ID NO: 1491922 - RNA, 17 nt, Human
uggauuauauuaugaag

SEQ ID NO: 1491923 - RNA, 13 nt, Human
uggagaagaacug

SEQ ID NO: 1491924 - RNA, 15 nt, Human
uggacugugugcuca

SEQ ID NO: 1491925 - RNA, 14 nt, Human
uggagaagaacuga

SEQ ID NO: 1491926 - RNA, 14 nt, Human
uggagcucguggaa

SEQ ID NO: 1491927 - RNA, 13 nt, Human
aggcaaucauggu

SEQ ID NO: 1491928 - RNA, 17 nt, Human
uggaagguauuuaauag

SEQ ID NO: 1491929 - RNA, 13 nt, Human
uggaagguauuua

SEQ ID NO: 1491930 - RNA, 23 nt, Human
aggacagcccuucuuuccacaga

SEQ ID NO: 1491931 - RNA, 14 nt, Human
ugggaguacaaaag

SEQ ID NO: 1491932 - RNA, 19 nt, Human
ugggaggugagaccaccuc

SEQ ID NO: 1491933 - RNA, 16 nt, Human
ugggauuuggucaaca

SEQ ID NO: 1491934 - RNA, 15 nt, Human
uggggaaugaagaua

SEQ ID NO: 1491935 - RNA, 14 nt, Human
uggggaaugaagau

SEQ ID NO: 1491936 - RNA, 23 nt, Human
agguauaauucacauuguauuca

SEQ ID NO: 1491937 - RNA, 23 nt, Human
agguacuucaaauccuugaagau

SEQ ID NO: 1491938 - RNA, 18 nt, Human
agguauucguuaucuaau

SEQ ID NO: 1491939 - RNA, 20 nt, Human
agguauucguuaucuaauag

SEQ ID NO: 1491940 - RNA, 17 nt, Human
aggguuaugauuaagua

SEQ ID NO: 1491941 - RNA, 17 nt, Human
aggggcuaccaggaaag

SEQ ID NO: 1491942 - RNA, 14 nt, Human
aggggcuaccagga

SEQ ID NO: 1491943 - RNA, 15 nt, Human
aggggcuaccaggaa

SEQ ID NO: 1491944 - RNA, 21 nt, Human
ugggucgcccuggacugugug

SEQ ID NO: 1491945 - RNA, 11 nt, Human
aggguggcagc

SEQ ID NO: 1491946 - RNA, 13 nt, Human
aggguggcagcaa

SEQ ID NO: 1491947 - RNA, 15 nt, Human
aggguggcagcaaca

SEQ ID NO: 1491948 - RNA, 16 nt, Human
aggguggcagcaacaa

SEQ ID NO: 1491949 - RNA, 20 nt, Human
ugguaaggggaauugaggac

SEQ ID NO: 1491950 - RNA, 16 nt, Human
agucaggaaagagaac

SEQ ID NO: 1491951 - RNA, 22 nt, Human
aguccaggcuuuuuuaucaugu

SEQ ID NO: 1491952 - RNA, 20 nt, Human
ugucaaucagccuaguugau

SEQ ID NO: 1491953 - RNA, 21 nt, Human
ugucaauaaaauccauacauu

SEQ ID NO: 1491954 - RNA, 17 nt, Human
uguauuuuuaguagaga

SEQ ID NO: 1491955 - RNA, 20 nt, Human
agucacauuccugaacagga

SEQ ID NO: 1491956 - RNA, 19 nt, Human
agucacauuccugaacagg

SEQ ID NO: 1491957 - RNA, 16 nt, Human
aguauuucuaugaaau

SEQ ID NO: 1491958 - RNA, 15 nt, Human
aguauuucuaugaaa

SEQ ID NO: 1491959 - RNA, 13 nt, Human
aguauuucuauga

SEQ ID NO: 1491960 - RNA, 19 nt, Human
aguagauaggccaugggca

SEQ ID NO: 1491961 - RNA, 22 nt, Human
aguagagacgagguuucacugu

SEQ ID NO: 1491962 - RNA, 19 nt, Human
aguacuuuuggcauuuuac

SEQ ID NO: 1491963 - RNA, 15 nt, Human
aguaauccaagcaaa

SEQ ID NO: 1491964 - RNA, 21 nt, Human
aguaauccaagcaaaugugaa

SEQ ID NO: 1491965 - RNA, 16 nt, Human
aguacacaauaagcaa

SEQ ID NO: 1491966 - RNA, 17 nt, Human
aguacacaauaagcaaa

SEQ ID NO: 1491967 - RNA, 18 nt, Human
aguacacaauaagcaaaa

SEQ ID NO: 1491968 - RNA, 21 nt, Human
aguacacaauaagcaaaaaca

SEQ ID NO: 1491969 - RNA, 22 nt, Human
aguacacaauaagcaaaaacaa

SEQ ID NO: 1491970 - RNA, 14 nt, Human
aguaaaaaggcuaa

SEQ ID NO: 1491971 - RNA, 23 nt, Human
aguaaggaauuuuauuuuuuucu

SEQ ID NO: 1491972 - RNA, 20 nt, Human
aggugcauauuuauaaaaau

SEQ ID NO: 1491973 - RNA, 21 nt, Human
agguggugguagagaagcaag

SEQ ID NO: 1491974 - RNA, 10 nt, Human
aggucccuaa

SEQ ID NO: 1491975 - RNA, 15 nt, Human
uguaaguaaacgguc

SEQ ID NO: 1491976 - RNA, 17 nt, Human
uguaagaaaauaucacu

SEQ ID NO: 1491977 - RNA, 21 nt, Human
agugcaaauugucacaggaca

SEQ ID NO: 1491978 - RNA, 18 nt, Human
agugcaaauugucacagg

SEQ ID NO: 1491979 - RNA, 22 nt, Human
agugcaaauugucacaggacag

SEQ ID NO: 1491980 - RNA, 14 nt, Human
agugcacuaaugug

SEQ ID NO: 1491981 - RNA, 20 nt, Human
agugcuggcauuacaggugu

SEQ ID NO: 1491982 - RNA, 19 nt, Human
aguucggugagcuacaaau

SEQ ID NO: 1491983 - RNA, 20 nt, Human
aguucggugagcuacaaaug

SEQ ID NO: 1491984 - RNA, 13 nt, Human
uguuuaguaauca

SEQ ID NO: 1491985 - RNA, 14 nt, Human
uguuuaguaaucau

SEQ ID NO: 1491986 - RNA, 17 nt, Human
uguuuaguaaucauauu

SEQ ID NO: 1491987 - RNA, 16 nt, Human
uguugucugcaacucu

SEQ ID NO: 1491988 - RNA, 13 nt, Human
uguugucugcaac

SEQ ID NO: 1491989 - RNA, 21 nt, Human
aguguucauaaauaaaguuug

SEQ ID NO: 1491990 - RNA, 16 nt, Human
aguguuggagaagaac

SEQ ID NO: 1491991 - RNA, 14 nt, Human
aguguuggagaaga

SEQ ID NO: 1491992 - RNA, 18 nt, Human
aguguuggagaagaacug

SEQ ID NO: 1491993 - RNA, 17 nt, Human
aguguuggagaagaacu

SEQ ID NO: 1491994 - RNA, 23 nt, Human
aguguuggagaagaacugaaauc

SEQ ID NO: 1491995 - RNA, 20 nt, Human
uuaagaagacugcauuauau

SEQ ID NO: 1491996 - RNA, 24 nt, Human
uuaaggggaggaaccagagugcug

SEQ ID NO: 1491997 - RNA, 15 nt, Human
auaaaauaauuuuua

SEQ ID NO: 1491998 - RNA, 22 nt, Human
auaaaauaauuuuaucucuuuc

SEQ ID NO: 1491999 - RNA, 12 nt, Human
auaaaauaauuu

SEQ ID NO: 1492000 - RNA, 18 nt, Human
auaaaagccuguuuaaga

SEQ ID NO: 1492001 - RNA, 13 nt, Human
auaaaagccuguu

SEQ ID NO: 1492002 - RNA, 14 nt, Human
aguuuaaauuguaa

SEQ ID NO: 1492003 - RNA, 19 nt, Human
uguuucaaacauauauaac

SEQ ID NO: 1492004 - RNA, 13 nt, Human
uguuucaaacaua

SEQ ID NO: 1492005 - RNA, 13 nt, Human
uuaccuuugacaa

SEQ ID NO: 1492006 - RNA, 20 nt, Human
uuaccuuugacaaagguaaa

SEQ ID NO: 1492007 - RNA, 22 nt, Human
auaacgauaaaagacagugaaa

SEQ ID NO: 1492008 - RNA, 14 nt, Human
auaacguauaaaag

SEQ ID NO: 1492009 - RNA, 13 nt, Human
auaaauaaaaaua

SEQ ID NO: 1492010 - RNA, 17 nt, Human
auaaagguucaugcaaa

SEQ ID NO: 1492011 - RNA, 15 nt, Human
auaaagguucaugca

SEQ ID NO: 1492012 - RNA, 14 nt, Human
auaaauaaaaauaa

SEQ ID NO: 1492013 - RNA, 18 nt, Human
auaauccuaaacauauga

SEQ ID NO: 1492014 - RNA, 11 nt, Human
auaauaaagga

SEQ ID NO: 1492015 - RNA, 13 nt, Human
auaauaaaggacu

SEQ ID NO: 1492016 - RNA, 18 nt, Human
auaauaaaggacuguaau

SEQ ID NO: 1492017 - RNA, 19 nt, Human
auaauacuugcuuuggaaa

SEQ ID NO: 1492018 - RNA, 14 nt, Human
auaauaauuaguaa

SEQ ID NO: 1492019 - RNA, 15 nt, Human
uuagggaaaacauuc

SEQ ID NO: 1492020 - RNA, 17 nt, Human
uuagggaaaacauucca

SEQ ID NO: 1492021 - RNA, 12 nt, Human
auauauuuuaag

SEQ ID NO: 1492022 - RNA, 13 nt, Human
auauauuuuaaga

SEQ ID NO: 1492023 - RNA, 19 nt, Human
uucauaauuauuauuuggc

SEQ ID NO: 1492024 - RNA, 21 nt, Human
auaucuccgucaacucauauu

SEQ ID NO: 1492025 - RNA, 20 nt, Human
auaucuccgucaacucauau

SEQ ID NO: 1492026 - RNA, 19 nt, Human
auaucuccgucaacucaua

SEQ ID NO: 1492027 - RNA, 14 nt, Human
auauauuuuaagac

SEQ ID NO: 1492028 - RNA, 15 nt, Human
auauauuuuaagacg

SEQ ID NO: 1492029 - RNA, 23 nt, Human
uucccaaaggcauuauaaaaaga

SEQ ID NO: 1492030 - RNA, 18 nt, Human
uucccaacuccagaaagu

SEQ ID NO: 1492031 - RNA, 23 nt, Human
uuccacccagugcugaauuuccc

SEQ ID NO: 1492032 - RNA, 16 nt, Human
uucauuccauucugga

SEQ ID NO: 1492033 - RNA, 12 nt, Human
uucauuccucca

SEQ ID NO: 1492034 - RNA, 13 nt, Human
uucauuccuccag

SEQ ID NO: 1492035 - RNA, 14 nt, Human
uucauuccuccagg

SEQ ID NO: 1492036 - RNA, 14 nt, Human
auagucucuuuaaa

SEQ ID NO: 1492037 - RNA, 21 nt, Human
auagucucuuuaaaaggaaag

SEQ ID NO: 1492038 - RNA, 14 nt, Human
auauauaacaaugc

SEQ ID NO: 1492039 - RNA, 21 nt, Human
auauauauuuuuuucugaaau

SEQ ID NO: 1492040 - RNA, 21 nt, Human
uucaagcgauucuccugccuc

SEQ ID NO: 1492041 - RNA, 17 nt, Human
uucaaggucugcuuuuc

SEQ ID NO: 1492042 - RNA, 18 nt, Human
uucaagcgauucuccugc

SEQ ID NO: 1492043 - RNA, 14 nt, Human
uucaagcaauccuc

SEQ ID NO: 1492044 - RNA, 16 nt, Human
uucaagcaauccuccc

SEQ ID NO: 1492045 - RNA, 21 nt, Human
uucaaaauuguuacaaauugu

SEQ ID NO: 1492046 - RNA, 13 nt, Human
uucaaaagaaagu

SEQ ID NO: 1492047 - RNA, 14 nt, Human
uucaaacauauaua

SEQ ID NO: 1492048 - RNA, 13 nt, Human
uuauuuuuuucug

SEQ ID NO: 1492049 - RNA, 17 nt, Human
uuauuuuuuucugaauu

SEQ ID NO: 1492050 - RNA, 12 nt, Human
uucaaaagaaag

SEQ ID NO: 1492051 - RNA, 17 nt, Human
auaggcguaacuaauuu

SEQ ID NO: 1492052 - RNA, 15 nt, Human
auagcuuuuuucucu

SEQ ID NO: 1492053 - RNA, 22 nt, Human
auagcuuuucccuuuuuuuaag

SEQ ID NO: 1492054 - RNA, 19 nt, Human
uugaaauauugacuuuuua

SEQ ID NO: 1492055 - RNA, 12 nt, Human
uugaaccaauaa

SEQ ID NO: 1492056 - RNA, 14 nt, Human
auccauacauuugu

SEQ ID NO: 1492057 - RNA, 14 nt, Human
aucaaguuauuuuu

SEQ ID NO: 1492058 - RNA, 14 nt, Human
uuccuucagcacuu

SEQ ID NO: 1492059 - RNA, 16 nt, Human
uucccuaucuuugcca

SEQ ID NO: 1492060 - RNA, 20 nt, Human
auauuuuacauaaauuuagu

SEQ ID NO: 1492061 - RNA, 16 nt, Human
auauuuuacauaaauu

SEQ ID NO: 1492062 - RNA, 15 nt, Human
auauuuuacauaaau

SEQ ID NO: 1492063 - RNA, 15 nt, Human
uucuaaaguaaaaac

SEQ ID NO: 1492064 - RNA, 15 nt, Human
uucucagauuucuga

SEQ ID NO: 1492065 - RNA, 20 nt, Human
uucucagauuucugaggaaa

SEQ ID NO: 1492066 - RNA, 16 nt, Human
uucucagauuucugag

SEQ ID NO: 1492067 - RNA, 16 nt, Human
aucagaaacacccuca

SEQ ID NO: 1492068 - RNA, 20 nt, Human
aucagaaacacccucacacu

SEQ ID NO: 1492069 - RNA, 19 nt, Human
aucagacuaugaaguuuuu

SEQ ID NO: 1492070 - RNA, 19 nt, Human
aucaggaagagaaggagca

SEQ ID NO: 1492071 - RNA, 13 nt, Human
uucuauaauuuaa

SEQ ID NO: 1492072 - RNA, 14 nt, Human
uucuauaauuuaaa

SEQ ID NO: 1492073 - RNA, 15 nt, Human
uucuaguguagaauu

SEQ ID NO: 1492074 - RNA, 17 nt, Human
augcaguucugaagaag

SEQ ID NO: 1492075 - RNA, 15 nt, Human
augcaguucugaaga

SEQ ID NO: 1492076 - RNA, 19 nt, Human
augcaguucugaagaagau

SEQ ID NO: 1492077 - RNA, 18 nt, Human
augcaguucugaagaaga

SEQ ID NO: 1492078 - RNA, 12 nt, Human
uuuaauuuuaca

SEQ ID NO: 1492079 - RNA, 14 nt, Human
uuuaaauguauacu

SEQ ID NO: 1492080 - RNA, 15 nt, Human
uuuaaauguauacua

SEQ ID NO: 1492081 - RNA, 14 nt, Human
uuuaaauguuuuuu

SEQ ID NO: 1492082 - RNA, 23 nt, Human
uugugugaaagguacuucaaauc

SEQ ID NO: 1492083 - RNA, 23 nt, Human
augagagacacacugaagaagca

SEQ ID NO: 1492084 - RNA, 21 nt, Human
augagagacacacugaagaag

SEQ ID NO: 1492085 - RNA, 20 nt, Human
augagagacacacugaagaa

SEQ ID NO: 1492086 - RNA, 22 nt, Human
augauuaugaauuacauuugua

SEQ ID NO: 1492087 - RNA, 15 nt, Human
uuguugucugcaacu

SEQ ID NO: 1492088 - RNA, 21 nt, Human
augauucaaaugucuauaaac

SEQ ID NO: 1492089 - RNA, 12 nt, Human
augauucccagc

SEQ ID NO: 1492090 - RNA, 17 nt, Human
uuucaugaccaguaaag

SEQ ID NO: 1492091 - RNA, 24 nt, Human
uuucaugaccaguaaaggcugcug

SEQ ID NO: 1492092 - RNA, 16 nt, Human
auggaauacucuuaua

SEQ ID NO: 1492093 - RNA, 17 nt, Human
auggaauacucuuauau

SEQ ID NO: 1492094 - RNA, 19 nt, Human
augcucuccaaaccacuuu

SEQ ID NO: 1492095 - RNA, 16 nt, Human
uuuauuacuguaagaa

SEQ ID NO: 1492096 - RNA, 22 nt, Human
augcugucuacacuaagagaga

SEQ ID NO: 1492097 - RNA, 23 nt, Human
augcugucuacacuaagagagaa

SEQ ID NO: 1492098 - RNA, 13 nt, Human
uuuauauaagcuu

SEQ ID NO: 1492099 - RNA, 22 nt, Human
uuuagcuggaaaaguauguuag

SEQ ID NO: 1492100 - RNA, 22 nt, Human
uuuaggaaguugacuuauagua

SEQ ID NO: 1492101 - RNA, 16 nt, Human
uuuaguaucuuuuuau

SEQ ID NO: 1492102 - RNA, 15 nt, Human
augagaaaucuaaaa

SEQ ID NO: 1492103 - RNA, 18 nt, Human
augagaaaucuaaaaaac

SEQ ID NO: 1492104 - RNA, 23 nt, Human
augagaaaucuaaaaaacgaaaa

SEQ ID NO: 1492105 - RNA, 19 nt, Human
augagagacacacugaaga

SEQ ID NO: 1492106 - RNA, 17 nt, Human
augagagacacacugaa

SEQ ID NO: 1492107 - RNA, 14 nt, Human
augagagacacacu

SEQ ID NO: 1492108 - RNA, 13 nt, Human
augagagacacac

SEQ ID NO: 1492109 - RNA, 19 nt, Human
uuguauaaaauaauuuuua

SEQ ID NO: 1492110 - RNA, 23 nt, Human
uuguaguguuggagaagaacuga

SEQ ID NO: 1492111 - RNA, 17 nt, Human
uuguauaaaauaauuuu

SEQ ID NO: 1492112 - RNA, 16 nt, Human
uuguauaaaauaauuu

SEQ ID NO: 1492113 - RNA, 21 nt, Human
uuguaguagcguuuuuuaaau

SEQ ID NO: 1492114 - RNA, 22 nt, Human
uuguaguagcguuuuuuaaaug

SEQ ID NO: 1492115 - RNA, 23 nt, Human
uuguaguagcguuuuuuaaaugu

SEQ ID NO: 1492116 - RNA, 22 nt, Human
aucuuuaauuuuacauuuccua

SEQ ID NO: 1492117 - RNA, 16 nt, Human
aucuuuaauuuuacau

SEQ ID NO: 1492118 - RNA, 21 nt, Human
aucuuuaauuuuacauuuccu

SEQ ID NO: 1492119 - RNA, 16 nt, Human
aucuuugccacccuca

SEQ ID NO: 1492120 - RNA, 15 nt, Human
aucuuugccacccuc

SEQ ID NO: 1492121 - RNA, 14 nt, Human
aucuuugccacccu

SEQ ID NO: 1492122 - RNA, 12 nt, Human
augaaagauuca

SEQ ID NO: 1492123 - RNA, 13 nt, Human
aucuuuuuauuca

SEQ ID NO: 1492124 - RNA, 15 nt, Human
uuggagugcaguggc

SEQ ID NO: 1492125 - RNA, 15 nt, Human
augaauuaaguuuuu

SEQ ID NO: 1492126 - RNA, 15 nt, Human
augaagauacugaaa

SEQ ID NO: 1492127 - RNA, 20 nt, Human
augaaauauuauguuaaaac

SEQ ID NO: 1492128 - RNA, 18 nt, Human
augaaauauuauguuaaa

SEQ ID NO: 1492129 - RNA, 17 nt, Human
augaaauauuauguuaa

SEQ ID NO: 1492130 - RNA, 17 nt, Human
augaagauacugaaaua

SEQ ID NO: 1492131 - RNA, 16 nt, Human
augaagauacugaaau

SEQ ID NO: 1492132 - RNA, 19 nt, Human
uugauggugguauguuuuc

SEQ ID NO: 1492133 - RNA, 18 nt, Human
uugauggugguauguuuu

SEQ ID NO: 1492134 - RNA, 15 nt, Human
uugaugggauuuggu

SEQ ID NO: 1492135 - RNA, 12 nt, Human
uugaugccuggc

SEQ ID NO: 1492136 - RNA, 12 nt, Human
aucucuucaguc

SEQ ID NO: 1492137 - RNA, 13 nt, Human
aucucuucagucu

SEQ ID NO: 1492138 - RNA, 21 nt, Human
aucucuucagucucuauacca

SEQ ID NO: 1492139 - RNA, 14 nt, Human
uugcaucugaaaau

SEQ ID NO: 1492140 - RNA, 14 nt, Human
aucucagcucacug

SEQ ID NO: 1492141 - RNA, 11 nt, Human
aucucagcuca

SEQ ID NO: 1492142 - RNA, 13 nt, Human
aucucagcucacu

SEQ ID NO: 1492143 - RNA, 15 nt, Human
aucucagcucacuac

SEQ ID NO: 1492144 - RNA, 13 nt, Human
aucucaauauuuc

SEQ ID NO: 1492145 - RNA, 14 nt, Human
aucucaauucuucc

SEQ ID NO: 1492146 - RNA, 16 nt, Human
aucucaauucuucccu

SEQ ID NO: 1492147 - RNA, 22 nt, Human
aucuccauugugccuaagucca

SEQ ID NO: 1492148 - RNA, 16 nt, Human
aucuccccaucauugg

SEQ ID NO: 1492149 - RNA, 23 nt, Human
aucucauuuccaagcaaguauua

SEQ ID NO: 1492150 - RNA, 21 nt, Human
aucucauuuccaagcaaguau

SEQ ID NO: 1492151 - RNA, 18 nt, Human
auuuuauguugcauagaa

SEQ ID NO: 1492152 - RNA, 21 nt, Human
auuuuauguugcauagaauaa

SEQ ID NO: 1492153 - RNA, 13 nt, Human
auuuuacauaaau

SEQ ID NO: 1492154 - RNA, 20 nt, Human
auuuuacuguacagacagaa

SEQ ID NO: 1492155 - RNA, 22 nt, Human
auuuuacuguacagacagaaaa

SEQ ID NO: 1492156 - RNA, 16 nt, Human
auuuuaauaauguuuc

SEQ ID NO: 1492157 - RNA, 15 nt, Human
auuuuaauaauguuu

SEQ ID NO: 1492158 - RNA, 14 nt, Human
auuuuaauaauguu

SEQ ID NO: 1492159 - RNA, 19 nt, Human
auuuguaguguuggagaag

SEQ ID NO: 1492160 - RNA, 23 nt, Human
auuugguaaggggaauugaggac

SEQ ID NO: 1492161 - RNA, 17 nt, Human
auuugguuuucacauug

SEQ ID NO: 1492162 - RNA, 15 nt, Human
auuugguuuucacau

SEQ ID NO: 1492163 - RNA, 22 nt, Human
auuugguuuucacauuggaaac

SEQ ID NO: 1492164 - RNA, 21 nt, Human
auuugguuuucacauuggaaa

SEQ ID NO: 1492165 - RNA, 18 nt, Human
auuuguaguguuggagaa

SEQ ID NO: 1492166 - RNA, 22 nt, Human
auuuauuacuguaagaaaauau

SEQ ID NO: 1492167 - RNA, 16 nt, Human
auuuaggaaguugacu

SEQ ID NO: 1492168 - RNA, 23 nt, Human
auuuaggaaguugacuuauagua

SEQ ID NO: 1492169 - RNA, 22 nt, Human
auuuccugggagcuuuuguaga

SEQ ID NO: 1492170 - RNA, 23 nt, Human
auuuccugggagcuuuuguagaa

SEQ ID NO: 1492171 - RNA, 15 nt, Human
auuguauauuacaau

SEQ ID NO: 1492172 - RNA, 17 nt, Human
auuguauauuacaauga

SEQ ID NO: 1492173 - RNA, 18 nt, Human
auuguauauuacaaugau

SEQ ID NO: 1492174 - RNA, 19 nt, Human
auuguauauuacaaugauc

SEQ ID NO: 1492175 - RNA, 20 nt, Human
auuguauauuacaaugauca

SEQ ID NO: 1492176 - RNA, 15 nt, Human
auugugaaauuauuc

SEQ ID NO: 1492177 - RNA, 14 nt, Human
auuguauuacaaau

SEQ ID NO: 1492178 - RNA, 15 nt, Human
auuguauuacaaauc

SEQ ID NO: 1492179 - RNA, 16 nt, Human
auuuacaaaugggaaa

SEQ ID NO: 1492180 - RNA, 18 nt, Human
auuuaaccucuaaauucu

SEQ ID NO: 1492181 - RNA, 16 nt, Human
auuuaaccucuaaauu

SEQ ID NO: 1492182 - RNA, 22 nt, Human
auucucacagcuccaagaauuu

SEQ ID NO: 1492183 - RNA, 21 nt, Human
auucucacagcuccaagaauu

SEQ ID NO: 1492184 - RNA, 19 nt, Human
auucucacagcuccaagaa

SEQ ID NO: 1492185 - RNA, 22 nt, Human
auugaccuauuuccagaaauac

SEQ ID NO: 1492186 - RNA, 14 nt, Human
auucagcucaugga

SEQ ID NO: 1492187 - RNA, 16 nt, Human
auucccuucaucugga

SEQ ID NO: 1492188 - RNA, 19 nt, Human
auucccuucaucuggaacc

SEQ ID NO: 1492189 - RNA, 21 nt, Human
auuccauucuggaagugacuu

SEQ ID NO: 1492190 - RNA, 16 nt, Human
auuacauuuguauaaa

SEQ ID NO: 1492191 - RNA, 15 nt, Human
auuacauuuguauaa

SEQ ID NO: 1492192 - RNA, 13 nt, Human
auuacauuuguau

SEQ ID NO: 1492193 - RNA, 20 nt, Human
auuaagagagucuauuuacg

SEQ ID NO: 1492194 - RNA, 23 nt, Human
uuuuuuaaaaaagaaacauuugg

SEQ ID NO: 1492195 - RNA, 21 nt, Human
auuaaguaaugauaacuggaa

SEQ ID NO: 1492196 - RNA, 15 nt, Human
auuaaguaaugauaa

SEQ ID NO: 1492197 - RNA, 13 nt, Human
auuaaguaaugau

SEQ ID NO: 1492198 - RNA, 16 nt, Human
auuauuuuauguugca

SEQ ID NO: 1492199 - RNA, 18 nt, Human
auuauuuuauguugcaua

SEQ ID NO: 1492200 - RNA, 17 nt, Human
auuauauuuacaaaugg

SEQ ID NO: 1492201 - RNA, 19 nt, Human
auuaucuauagcuaaguac

SEQ ID NO: 1492202 - RNA, 22 nt, Human
auuaucuauagcuaaguacaca

SEQ ID NO: 1492203 - RNA, 16 nt, Human
auuauauuuacaaaug

SEQ ID NO: 1492204 - RNA, 15 nt, Human
auguugacaugggac

SEQ ID NO: 1492205 - RNA, 15 nt, Human
auguugcauagaaua

SEQ ID NO: 1492206 - RNA, 14 nt, Human
uuuuauaauuuugu

SEQ ID NO: 1492207 - RNA, 19 nt, Human
uuuuauggcacuaguauuu

SEQ ID NO: 1492208 - RNA, 22 nt, Human
uuuuauggcacuaguauuucua

SEQ ID NO: 1492209 - RNA, 18 nt, Human
uuuuaugugaaacauguu

SEQ ID NO: 1492210 - RNA, 19 nt, Human
uuuuaugugaaacauguuu

SEQ ID NO: 1492211 - RNA, 22 nt, Human
uuuuauguugcauagaauaaaa

SEQ ID NO: 1492212 - RNA, 21 nt, Human
uuuuauucagcucauggacuu

SEQ ID NO: 1492213 - RNA, 21 nt, Human
auguuucaaacauauauaaca

SEQ ID NO: 1492214 - RNA, 18 nt, Human
auguuucaaacauauaua

SEQ ID NO: 1492215 - RNA, 13 nt, Human
uuuuaaaaaagaa

SEQ ID NO: 1492216 - RNA, 16 nt, Human
uuuuaaaaaaugguca

SEQ ID NO: 1492217 - RNA, 17 nt, Human
uuuuaaaaaauggucac

SEQ ID NO: 1492218 - RNA, 15 nt, Human
uuuuaaaagaaugau

SEQ ID NO: 1492219 - RNA, 14 nt, Human
uuuuaaaagaauga

SEQ ID NO: 1492220 - RNA, 16 nt, Human
uuuuaaguaaggaauu

SEQ ID NO: 1492221 - RNA, 17 nt, Human
uuuguagaagucacauu

SEQ ID NO: 1492222 - RNA, 13 nt, Human
uuugcucauggaa

SEQ ID NO: 1492223 - RNA, 12 nt, Human
uuugcucaugga

SEQ ID NO: 1492224 - RNA, 11 nt, Human
uuugcucaugg

SEQ ID NO: 1492225 - RNA, 22 nt, Human
augucuauaaaccgaacugaug

SEQ ID NO: 1492226 - RNA, 21 nt, Human
auaacaaugcuguauuuuaaa

SEQ ID NO: 1492227 - RNA, 20 nt, Human
auaacaaugcuguauuuuaa

SEQ ID NO: 1492228 - RNA, 19 nt, Human
auaacaaugcuguauuuua

SEQ ID NO: 1492229 - RNA, 17 nt, Human
auaacaaugcuguauuu

SEQ ID NO: 1492230 - RNA, 15 nt, Human
auaacaaugcuguau

SEQ ID NO: 1492231 - RNA, 14 nt, Human
auaacaaugaaagu

SEQ ID NO: 1492232 - RNA, 11 nt, Human
auaaagcaauu

SEQ ID NO: 1492233 - RNA, 11 nt, Human
auaaaaaggac

SEQ ID NO: 1492234 - RNA, 14 nt, Human
auaaaaaggacauc

SEQ ID NO: 1492235 - RNA, 19 nt, Human
auaaaaaggacaucagcaa

SEQ ID NO: 1492236 - RNA, 13 nt, Human
auaauguuucaaa

SEQ ID NO: 1492237 - RNA, 13 nt, Human
auaauggucagag

SEQ ID NO: 1492238 - RNA, 18 nt, Human
auaauguuucaaacauau

SEQ ID NO: 1492239 - RNA, 13 nt, Human
auacagaaaaguu

SEQ ID NO: 1492240 - RNA, 13 nt, Human
auauuauguuaaa

SEQ ID NO: 1492241 - RNA, 13 nt, Human
auauucaauaaag

SEQ ID NO: 1492242 - RNA, 15 nt, Human
auauucaauaaagcu

SEQ ID NO: 1492243 - RNA, 20 nt, Human
auauucaauaaagcugcuga

SEQ ID NO: 1492244 - RNA, 16 nt, Human
auauuauguuaaaacu

SEQ ID NO: 1492245 - RNA, 14 nt, Human
auauuauguuaaaa

SEQ ID NO: 1492246 - RNA, 15 nt, Human
auauuauuuuauguu

SEQ ID NO: 1492247 - RNA, 22 nt, Human
auauuauuuuauguugcauaga

SEQ ID NO: 1492248 - RNA, 18 nt, Human
auauauuuuuuucugaaa

SEQ ID NO: 1492249 - RNA, 12 nt, Human
auagaaagcuau

SEQ ID NO: 1492250 - RNA, 24 nt, Human
auagguuuggacaaaauggaauac

SEQ ID NO: 1492251 - RNA, 20 nt, Human
auaguacaugauaaaugaua

SEQ ID NO: 1492252 - RNA, 15 nt, Human
aguugacuuauagua

SEQ ID NO: 1492253 - RNA, 17 nt, Human
aguugacuuauaguaca

SEQ ID NO: 1492254 - RNA, 18 nt, Human
aguugacuuauaguacau

SEQ ID NO: 1492255 - RNA, 21 nt, Human
aguugacuuauaguacaugau

SEQ ID NO: 1492256 - RNA, 17 nt, Human
agugaucugcccgccuc

SEQ ID NO: 1492257 - RNA, 15 nt, Human
agugcuaauuuugaa

SEQ ID NO: 1492258 - RNA, 18 nt, Human
agugcuaauuuugaaaaa

SEQ ID NO: 1492259 - RNA, 20 nt, Human
agugcuaauuuugaaaaacu

SEQ ID NO: 1492260 - RNA, 15 nt, Human
agucaaaaauuaaac

SEQ ID NO: 1492261 - RNA, 14 nt, Human
aguauuuuguuuca

SEQ ID NO: 1492262 - RNA, 17 nt, Human
aguauuuuguuucagug

SEQ ID NO: 1492263 - RNA, 14 nt, Human
agugacccugcucu

SEQ ID NO: 1492264 - RNA, 17 nt, Human
agugacccugcucucac

SEQ ID NO: 1492265 - RNA, 23 nt, Human
augaaguccaagcauuuagaugu

SEQ ID NO: 1492266 - RNA, 20 nt, Human
augaaguccaagcauuuaga

SEQ ID NO: 1492267 - RNA, 13 nt, Human
augaccaguaaag

SEQ ID NO: 1492268 - RNA, 18 nt, Human
aucugggggccucuucug

SEQ ID NO: 1492269 - RNA, 13 nt, Human
aucuuauuuagga

SEQ ID NO: 1492270 - RNA, 15 nt, Human
aucuggauuccagag

SEQ ID NO: 1492271 - RNA, 20 nt, Human
aucuccgucaacucauauuu

SEQ ID NO: 1492272 - RNA, 14 nt, Human
aucuauauuuuaca

SEQ ID NO: 1492273 - RNA, 17 nt, Human
aucuauagaaagcuaua

SEQ ID NO: 1492274 - RNA, 16 nt, Human
aucuauagaaagcuau

SEQ ID NO: 1492275 - RNA, 21 nt, Human
aucaugaauuaguuuuauaug

SEQ ID NO: 1492276 - RNA, 17 nt, Human
aucaugaauuaguuuua

SEQ ID NO: 1492277 - RNA, 14 nt, Human
aucaugugaaauca

SEQ ID NO: 1492278 - RNA, 12 nt, Human
aucaugugaaau

SEQ ID NO: 1492279 - RNA, 13 nt, Human
aucagcuuauugu

SEQ ID NO: 1492280 - RNA, 14 nt, Human
aucaggaagagaag

SEQ ID NO: 1492281 - RNA, 17 nt, Human
aucaggaagagaaggag

SEQ ID NO: 1492282 - RNA, 22 nt, Human
aucaaauauauucagccuggcu

SEQ ID NO: 1492283 - RNA, 16 nt, Human
aucaccgacugaaaau

SEQ ID NO: 1492284 - RNA, 14 nt, Human
aucaaauauauuca

SEQ ID NO: 1492285 - RNA, 16 nt, Human
auccuugagucaaaaa

SEQ ID NO: 1492286 - RNA, 22 nt, Human
auccuucaucuggauuccagag

SEQ ID NO: 1492287 - RNA, 17 nt, Human
auccaccugccuuggcu

SEQ ID NO: 1492288 - RNA, 19 nt, Human
auccucaguuuuugugaaa

SEQ ID NO: 1492289 - RNA, 22 nt, Human
auggguuagggaaaacauucca

SEQ ID NO: 1492290 - RNA, 21 nt, Human
augucaaucagccuaguugau

SEQ ID NO: 1492291 - RNA, 14 nt, Human
augugaaacauguu

SEQ ID NO: 1492292 - RNA, 17 nt, Human
augugaaaucauucauu

SEQ ID NO: 1492293 - RNA, 18 nt, Human
augugaaaucauucauuu

SEQ ID NO: 1492294 - RNA, 15 nt, Human
auguguaugcacagu

SEQ ID NO: 1492295 - RNA, 19 nt, Human
auguguaugcacaguaaaa

SEQ ID NO: 1492296 - RNA, 19 nt, Human
auguguaagacaaaaagcu

SEQ ID NO: 1492297 - RNA, 17 nt, Human
auguguaagacaaaaag

SEQ ID NO: 1492298 - RNA, 14 nt, Human
auggaggggcagag

SEQ ID NO: 1492299 - RNA, 15 nt, Human
auggaggggcagagc

SEQ ID NO: 1492300 - RNA, 19 nt, Human
auggaggggcagagccagg

SEQ ID NO: 1492301 - RNA, 18 nt, Human
auggauaggcacaggaaa

SEQ ID NO: 1492302 - RNA, 17 nt, Human
auggauaggcacaggaa

SEQ ID NO: 1492303 - RNA, 18 nt, Human
augccuuguuucauauuu

SEQ ID NO: 1492304 - RNA, 23 nt, Human
augcacaaauucugucucuggau

SEQ ID NO: 1492305 - RNA, 15 nt, Human
augcacaaauucugu

SEQ ID NO: 1492306 - RNA, 22 nt, Human
augcacaaauucugucucugga

SEQ ID NO: 1492307 - RNA, 23 nt, Human
aggccaugggcacuguggguaga

SEQ ID NO: 1492308 - RNA, 21 nt, Human
aggccaugggcacugugggua

SEQ ID NO: 1492309 - RNA, 20 nt, Human
aggagagggcgcuccucucu

SEQ ID NO: 1492310 - RNA, 13 nt, Human
aggcagagaagaa

SEQ ID NO: 1492311 - RNA, 14 nt, Human
aggcagagaagaaa

SEQ ID NO: 1492312 - RNA, 15 nt, Human
aggcagagaagaaag

SEQ ID NO: 1492313 - RNA, 14 nt, Human
agggaccggcggac

SEQ ID NO: 1492314 - RNA, 19 nt, Human
aggccggcuugccacaccc

SEQ ID NO: 1492315 - RNA, 20 nt, Human
aggccggcuugccacacccc

SEQ ID NO: 1492316 - RNA, 21 nt, Human
aggccggcuugccacaccccc

SEQ ID NO: 1492317 - RNA, 17 nt, Human
agccuggggcugaggcu

SEQ ID NO: 1492318 - RNA, 17 nt, Human
agccuggcuucaaauug

SEQ ID NO: 1492319 - RNA, 18 nt, Human
agccuggcuucaaauugu

SEQ ID NO: 1492320 - RNA, 19 nt, Human
agcucacugcaaccuccac

SEQ ID NO: 1492321 - RNA, 12 nt, Human
agcuacaaaugc

SEQ ID NO: 1492322 - RNA, 11 nt, Human
agcguuuuuua

SEQ ID NO: 1492323 - RNA, 14 nt, Human
agcguuuuuuaaau

SEQ ID NO: 1492324 - RNA, 17 nt, Human
agcguuuuuuaaaugua

SEQ ID NO: 1492325 - RNA, 18 nt, Human
agcguuuuuuaaauguau

SEQ ID NO: 1492326 - RNA, 19 nt, Human
agcguuuuuuaaauguaua

SEQ ID NO: 1492327 - RNA, 20 nt, Human
agcguuuuuuaaauguauac

SEQ ID NO: 1492328 - RNA, 23 nt, Human
agcguuuuuuaaauguauacuau

SEQ ID NO: 1492329 - RNA, 18 nt, Human
agcuucacuguaaaauaa

SEQ ID NO: 1492330 - RNA, 18 nt, Human
aggaaguugacuuauagu

SEQ ID NO: 1492331 - RNA, 22 nt, Human
aggaaguugacuuauaguacau

SEQ ID NO: 1492332 - RNA, 23 nt, Human
aggaaguugacuuauaguacaug

SEQ ID NO: 1492333 - RNA, 15 nt, Human
agcuuuuaugugaaa

SEQ ID NO: 1492334 - RNA, 21 nt, Human
agcuuuuaugugaaacauguu

SEQ ID NO: 1492335 - RNA, 15 nt, Human
agcaauccucccacu

SEQ ID NO: 1492336 - RNA, 21 nt, Human
agcaauuacaacggagucaaa

SEQ ID NO: 1492337 - RNA, 24 nt, Human
agcaaaauuuuuucucuaggaaau

SEQ ID NO: 1492338 - RNA, 21 nt, Human
agauguagccccucuccugga

SEQ ID NO: 1492339 - RNA, 22 nt, Human
agacagccaacuauggccugug

SEQ ID NO: 1492340 - RNA, 14 nt, Human
agaaugagacaucc

SEQ ID NO: 1492341 - RNA, 17 nt, Human
agaaugauuaugaauua

SEQ ID NO: 1492342 - RNA, 22 nt, Human
agaaugagagacacacugaaga

SEQ ID NO: 1492343 - RNA, 17 nt, Human
agaaugagagacacacu

SEQ ID NO: 1492344 - RNA, 22 nt, Human
agaagucacauuccugaacagg

SEQ ID NO: 1492345 - RNA, 18 nt, Human
agaagacugcauuauauu

SEQ ID NO: 1492346 - RNA, 21 nt, Human
agaagucacauuccugaacag

SEQ ID NO: 1492347 - RNA, 20 nt, Human
agaagucacauuccugaaca

SEQ ID NO: 1492348 - RNA, 18 nt, Human
agaagucacauuccugaa

SEQ ID NO: 1492349 - RNA, 17 nt, Human
agaagagaucaggaaga

SEQ ID NO: 1492350 - RNA, 18 nt, Human
agaggaauuacgugcucu

SEQ ID NO: 1492351 - RNA, 17 nt, Human
aacacuaacaugauuug

SEQ ID NO: 1492352 - RNA, 17 nt, Human
aacacccucacacuggg

SEQ ID NO: 1492353 - RNA, 21 nt, Human
aacacccucacacugggacuu

SEQ ID NO: 1492354 - RNA, 22 nt, Human
aaauguuuuuuuuuaaagacuu

SEQ ID NO: 1492355 - RNA, 18 nt, Human
aaauugaugggauuuggu

SEQ ID NO: 1492356 - RNA, 18 nt, Human
aaauguuuuuuuuuaaag

SEQ ID NO: 1492357 - RNA, 21 nt, Human
aaauguuuuuuuuuaaagacu

SEQ ID NO: 1492358 - RNA, 15 nt, Human
aacguauaaaagccu

SEQ ID NO: 1492359 - RNA, 18 nt, Human
aacucauauuuucaugcu

SEQ ID NO: 1492360 - RNA, 16 nt, Human
aacucauauuuucaug

SEQ ID NO: 1492361 - RNA, 15 nt, Human
aacucauauuuucau

SEQ ID NO: 1492362 - RNA, 22 nt, Human
aacucaucuagguaaauuacag

SEQ ID NO: 1492363 - RNA, 20 nt, Human
aacaggaucaguuaacuauu

SEQ ID NO: 1492364 - RNA, 13 nt, Human
aaaauuaagaaag

SEQ ID NO: 1492365 - RNA, 20 nt, Human
aaaauuaagaaaggauaaag

SEQ ID NO: 1492366 - RNA, 19 nt, Human
aaaauccauacauuugugu

SEQ ID NO: 1492367 - RNA, 20 nt, Human
aaaauuaaaccggaccaucu

SEQ ID NO: 1492368 - RNA, 22 nt, Human
aaaauuaacaugaauauuuagu

SEQ ID NO: 1492369 - RNA, 12 nt, Human
aaaauuaagaaa

SEQ ID NO: 1492370 - RNA, 14 nt, Human
aaaauuacaacuaa

SEQ ID NO: 1492371 - RNA, 13 nt, Human
aaaauuaucuaua

SEQ ID NO: 1492372 - RNA, 21 nt, Human
aaaauccacuuuaucuugaau

SEQ ID NO: 1492373 - RNA, 15 nt, Human
aaaauaaaaaacacu

SEQ ID NO: 1492374 - RNA, 12 nt, Human
aaacaggaucag

SEQ ID NO: 1492375 - RNA, 19 nt, Human
aaacccuugccaugugcua

SEQ ID NO: 1492376 - RNA, 12 nt, Human
aaagaaaauuuu

SEQ ID NO: 1492377 - RNA, 19 nt, Human
aaagaaaauuuuuguagua

SEQ ID NO: 1492378 - RNA, 13 nt, Human
aaagaaacauuug

SEQ ID NO: 1492379 - RNA, 15 nt, Human
aaagaacggaagaag

SEQ ID NO: 1492380 - RNA, 19 nt, Human
aaagaacggaagaagagau

SEQ ID NO: 1492381 - RNA, 16 nt, Human
aaagcccauucauucc

SEQ ID NO: 1492382 - RNA, 17 nt, Human
aaagcccauucauucca

SEQ ID NO: 1492383 - RNA, 17 nt, Human
aaauaaacgucuuaaau

SEQ ID NO: 1492384 - RNA, 16 nt, Human
aaauaaacgucuuaaa

SEQ ID NO: 1492385 - RNA, 15 nt, Human
aaauaaacgucuuaa

SEQ ID NO: 1492386 - RNA, 15 nt, Human
aauggguuacuugau

SEQ ID NO: 1492387 - RNA, 22 nt, Human
aauggucacguuuggugcuucu

SEQ ID NO: 1492388 - RNA, 23 nt, Human
aauggucacguuuggugcuucuc

SEQ ID NO: 1492389 - RNA, 21 nt, Human
aaugauagacaauugagguaa

SEQ ID NO: 1492390 - RNA, 16 nt, Human
aaugauaacuggaaac

SEQ ID NO: 1492391 - RNA, 15 nt, Human
aaugauaacuggaaa

SEQ ID NO: 1492392 - RNA, 14 nt, Human
aaugauaacuggaa

SEQ ID NO: 1492393 - RNA, 17 nt, Human
aauccauacauuugugu

SEQ ID NO: 1492394 - RNA, 16 nt, Human
aauccauacauuugug

SEQ ID NO: 1492395 - RNA, 20 nt, Human
aauacgugggcauucaaaug

SEQ ID NO: 1492396 - RNA, 19 nt, Human
aauacgugggcauucaaau

SEQ ID NO: 1492397 - RNA, 22 nt, Human
aaguugauaugccuuuucccaa

SEQ ID NO: 1492398 - RNA, 15 nt, Human
aauaaacgucuuaaa

SEQ ID NO: 1492399 - RNA, 11 nt, Human
aauaaagcugu

SEQ ID NO: 1492400 - RNA, 19 nt, Human
aauaaagcuguguggcagu

SEQ ID NO: 1492401 - RNA, 14 nt, Human
aauaaagcugcuga

SEQ ID NO: 1492402 - RNA, 11 nt, Human
aauaaaggacu

SEQ ID NO: 1492403 - RNA, 18 nt, Human
aauaaaggacuguaaucu

SEQ ID NO: 1492404 - RNA, 22 nt, Human
aauaaaggacuguaaucuuauu

SEQ ID NO: 1492405 - RNA, 12 nt, Human
aauaaaauuuuu

SEQ ID NO: 1492406 - RNA, 12 nt, Human
aauaauguuuca

SEQ ID NO: 1492407 - RNA, 19 nt, Human
aauaauguuucaaacauau

SEQ ID NO: 1492408 - RNA, 14 nt, Human
aauaauguuucaaa

SEQ ID NO: 1492409 - RNA, 12 nt, Human
aaggaauuuuau

SEQ ID NO: 1492410 - RNA, 21 nt, Human
aagcugcugagaaucuagccu

SEQ ID NO: 1492411 - RNA, 17 nt, Human
aagcuggagugcagugg

SEQ ID NO: 1492412 - RNA, 15 nt, Human
aagggacugagaaau

SEQ ID NO: 1492413 - RNA, 17 nt, Human
aagggacugagaaauuu

SEQ ID NO: 1492414 - RNA, 12 nt, Human
aaggucugcuuu

SEQ ID NO: 1492415 - RNA, 21 nt, Human
aagauucaaugccccugaauu

SEQ ID NO: 1492416 - RNA, 20 nt, Human
aagauucaaugccccugaau

SEQ ID NO: 1492417 - RNA, 20 nt, Human
aagauacugaaauaaacguc

SEQ ID NO: 1492418 - RNA, 16 nt, Human
aagauacugaaauaaa

SEQ ID NO: 1492419 - RNA, 23 nt, Human
aagacagugaaagaaaauaacaa

SEQ ID NO: 1492420 - RNA, 18 nt, Human
aacuguuguagaagacaa

SEQ ID NO: 1492421 - RNA, 19 nt, Human
aacuguuguagaagacaaa

SEQ ID NO: 1492422 - RNA, 15 nt, Human
aagagaacuuccaga

SEQ ID NO: 1492423 - RNA, 15 nt, Human
aagacuuuuaugaua

SEQ ID NO: 1492424 - RNA, 13 nt, Human
aagagaaggagca

SEQ ID NO: 1492425 - RNA, 20 nt, Human
acucuuaagaagacugcauu

SEQ ID NO: 1492426 - RNA, 15 nt, Human
acucuuaagaagacu

SEQ ID NO: 1492427 - RNA, 14 nt, Human
acucuuaagaagac

SEQ ID NO: 1492428 - RNA, 15 nt, Human
acucuguucauuccu

SEQ ID NO: 1492429 - RNA, 16 nt, Human
acucuguucauuccuc

SEQ ID NO: 1492430 - RNA, 18 nt, Human
acucuguucauuccucca

SEQ ID NO: 1492431 - RNA, 19 nt, Human
acucuguucauuccuccag

SEQ ID NO: 1492432 - RNA, 15 nt, Human
acuuuauuuuguguu

SEQ ID NO: 1492433 - RNA, 19 nt, Human
acuucagcgguuuauauaa

SEQ ID NO: 1492434 - RNA, 18 nt, Human
acuucagcgguuuauaua

SEQ ID NO: 1492435 - RNA, 20 nt, Human
acuucaaauccuugaagauu

SEQ ID NO: 1492436 - RNA, 23 nt, Human
accggcggaccccagccauccag

SEQ ID NO: 1492437 - RNA, 20 nt, Human
accucugccucagaaaacaa

SEQ ID NO: 1492438 - RNA, 12 nt, Human
accugcccugcc

SEQ ID NO: 1492439 - RNA, 13 nt, Human
accugcccugccc

SEQ ID NO: 1492440 - RNA, 16 nt, Human
accugcccugcccugc

SEQ ID NO: 1492441 - RNA, 17 nt, Human
accugcccugcccugcc

SEQ ID NO: 1492442 - RNA, 18 nt, Human
accugcccugcccugcca

SEQ ID NO: 1492443 - RNA, 20 nt, Human
accugcccugcccugccacc

SEQ ID NO: 1492444 - RNA, 21 nt, Human
accugcccugcccugccaccu

SEQ ID NO: 1492445 - RNA, 22 nt, Human
accugcccugcccugccaccug

SEQ ID NO: 1492446 - RNA, 23 nt, Human
accugcccugcccugccaccugu

SEQ ID NO: 1492447 - RNA, 14 nt, Human
accugucugucugu

SEQ ID NO: 1492448 - RNA, 18 nt, Human
accugucugucugucugu

SEQ ID NO: 1492449 - RNA, 20 nt, Human
accugucugucugucugucc

SEQ ID NO: 1492450 - RNA, 18 nt, Human
accucugccucagaaaac

SEQ ID NO: 1492451 - RNA, 17 nt, Human
accucugccucagaaaa

SEQ ID NO: 1492452 - RNA, 22 nt, Human
acggaagaagagaucaggaaga

SEQ ID NO: 1492453 - RNA, 15 nt, Human
acgcacggcagccac

SEQ ID NO: 1492454 - RNA, 17 nt, Human
acgcacggcagccacag

SEQ ID NO: 1492455 - RNA, 15 nt, Human
acuauugcauuuaua

SEQ ID NO: 1492456 - RNA, 18 nt, Human
acuaguauuucuaugaaa

SEQ ID NO: 1492457 - RNA, 19 nt, Human
acuaguauuucuaugaaau

SEQ ID NO: 1492458 - RNA, 13 nt, Human
acacugggacuug

SEQ ID NO: 1492459 - RNA, 18 nt, Human
acacugggacuugcaaaa

SEQ ID NO: 1492460 - RNA, 19 nt, Human
acacugggacuugcaaaaa

SEQ ID NO: 1492461 - RNA, 20 nt, Human
acacugggagaaaugaaaaa

SEQ ID NO: 1492462 - RNA, 16 nt, Human
acagaagcuccaggua

SEQ ID NO: 1492463 - RNA, 18 nt, Human
aauuuugugaagcaaaau

SEQ ID NO: 1492464 - RNA, 17 nt, Human
aauuuugugaagcaaaa

SEQ ID NO: 1492465 - RNA, 18 nt, Human
aauuuucaucuaggauuu

SEQ ID NO: 1492466 - RNA, 14 nt, Human
acaaaauggaauac

SEQ ID NO: 1492467 - RNA, 13 nt, Human
acaaaauggaaua

SEQ ID NO: 1492468 - RNA, 12 nt, Human
acaaagaaauua

SEQ ID NO: 1492469 - RNA, 14 nt, Human
acaaagaaauuaug

SEQ ID NO: 1492470 - RNA, 16 nt, Human
acaaagaaauuaugug

SEQ ID NO: 1492471 - RNA, 21 nt, Human
acaaggaugaauuaaguuuuu

SEQ ID NO: 1492472 - RNA, 21 nt, Human
aauuuccugggagcuuuugua

SEQ ID NO: 1492473 - RNA, 18 nt, Human
aauuuccugggagcuuuu

SEQ ID NO: 1492474 - RNA, 14 nt, Human
acagcugccucuuc

SEQ ID NO: 1492475 - RNA, 15 nt, Human
acagcugccucuucc

SEQ ID NO: 1492476 - RNA, 21 nt, Human
acagggccuuuggcaggugca

SEQ ID NO: 1492477 - RNA, 19 nt, Human
acaguggggaaugaagaua

SEQ ID NO: 1492478 - RNA, 15 nt, Human
acaguggggaaugaa

SEQ ID NO: 1492479 - RNA, 18 nt, Human
acauuuccuuacagaacu

SEQ ID NO: 1492480 - RNA, 16 nt, Human
acauuuccuaaauaua

SEQ ID NO: 1492481 - RNA, 17 nt, Human
acauuuccuaaauauau

SEQ ID NO: 1492482 - RNA, 12 nt, Human
acccacccagaa

SEQ ID NO: 1492483 - RNA, 15 nt, Human
acccacccagaauga

SEQ ID NO: 1492484 - RNA, 22 nt, Human
accaucaccagaauuaauuuua

SEQ ID NO: 1492485 - RNA, 20 nt, Human
accaucagaaacacccucac

SEQ ID NO: 1492486 - RNA, 23 nt, Human
accaucagaaacacccucacacu

SEQ ID NO: 1492487 - RNA, 15 nt, Human
accaucucuccaacu

SEQ ID NO: 1492488 - RNA, 13 nt, Human
cacaggaaaccag

SEQ ID NO: 1492489 - RNA, 15 nt, Human
cacagcugccucuuc

SEQ ID NO: 1492490 - RNA, 22 nt, Human
cacagcugccucuucccucuuc

SEQ ID NO: 1492491 - RNA, 16 nt, Human
caaacugacucuuaag

SEQ ID NO: 1492492 - RNA, 21 nt, Human
caaacugacucuuaagaagac

SEQ ID NO: 1492493 - RNA, 17 nt, Human
caaacugacucuuaaga

SEQ ID NO: 1492494 - RNA, 16 nt, Human
caaaaucaauuaaaau

SEQ ID NO: 1492495 - RNA, 20 nt, Human
caaaucaaucuguaaaacua

SEQ ID NO: 1492496 - RNA, 23 nt, Human
caaauauauucagccuggcuuca

SEQ ID NO: 1492497 - RNA, 17 nt, Human
caaaucaaucuguaaaa

SEQ ID NO: 1492498 - RNA, 23 nt, Human
caacauagugggacccugucucu

SEQ ID NO: 1492499 - RNA, 14 nt, Human
cacacugaagaagc

SEQ ID NO: 1492500 - RNA, 13 nt, Human
cacacugaagaag

SEQ ID NO: 1492501 - RNA, 14 nt, Human
cacagcugccucuu

SEQ ID NO: 1492502 - RNA, 13 nt, Human
cacaauaagcaaa

SEQ ID NO: 1492503 - RNA, 19 nt, Human
caauagucaaauuguguga

SEQ ID NO: 1492504 - RNA, 17 nt, Human
caauagucaaauugugu

SEQ ID NO: 1492505 - RNA, 12 nt, Human
caauaagcaaaa

SEQ ID NO: 1492506 - RNA, 21 nt, Human
caauaaagugacccugcucuc

SEQ ID NO: 1492507 - RNA, 14 nt, Human
caauaaagugaccc

SEQ ID NO: 1492508 - RNA, 13 nt, Human
caauaaauagaca

SEQ ID NO: 1492509 - RNA, 17 nt, Human
caauaaauagacacgca

SEQ ID NO: 1492510 - RNA, 18 nt, Human
caaggaaaaaauaacaau

SEQ ID NO: 1492511 - RNA, 20 nt, Human
caaggaaaaaauaacaauga

SEQ ID NO: 1492512 - RNA, 21 nt, Human
ccccagcuggggccaggcugg

SEQ ID NO: 1492513 - RNA, 22 nt, Human
ccccagcuggggccaggcuggg

SEQ ID NO: 1492514 - RNA, 20 nt, Human
cccuaaaagaaacccugcac

SEQ ID NO: 1492515 - RNA, 19 nt, Human
cccuaaauaauaaaaauaa

SEQ ID NO: 1492516 - RNA, 15 nt, Human
cccuaaccaaguucc

SEQ ID NO: 1492517 - RNA, 12 nt, Human
cccuaauaaagc

SEQ ID NO: 1492518 - RNA, 13 nt, Human
cccuaauaaagcu

SEQ ID NO: 1492519 - RNA, 14 nt, Human
cccuaauaaagcug

SEQ ID NO: 1492520 - RNA, 15 nt, Human
cccuaauaaagcugu

SEQ ID NO: 1492521 - RNA, 18 nt, Human
cccuaauaaagcugugug

SEQ ID NO: 1492522 - RNA, 12 nt, Human
cccucaugcugu

SEQ ID NO: 1492523 - RNA, 16 nt, Human
cccugggaggcucugg

SEQ ID NO: 1492524 - RNA, 17 nt, Human
cccugggaggcucugga

SEQ ID NO: 1492525 - RNA, 18 nt, Human
cccugggaggcucuggag

SEQ ID NO: 1492526 - RNA, 15 nt, Human
cccuggaaaccuucc

SEQ ID NO: 1492527 - RNA, 16 nt, Human
cccuggaaaccuucca

SEQ ID NO: 1492528 - RNA, 19 nt, Human
cccuggaaaccuuccaccc

SEQ ID NO: 1492529 - RNA, 21 nt, Human
cccuggaaaccuuccacccag

SEQ ID NO: 1492530 - RNA, 22 nt, Human
cccuggaaaccuuccacccagu

SEQ ID NO: 1492531 - RNA, 21 nt, Human
cccugccucucugcagguccc

SEQ ID NO: 1492532 - RNA, 22 nt, Human
cccugccucucugcaggucccu

SEQ ID NO: 1492533 - RNA, 14 nt, Human
cccugccaccuccu

SEQ ID NO: 1492534 - RNA, 17 nt, Human
cccugccaccuccugcc

SEQ ID NO: 1492535 - RNA, 11 nt, Human
cccugccucuc

SEQ ID NO: 1492536 - RNA, 18 nt, Human
cccugccucucugcaggu

SEQ ID NO: 1492537 - RNA, 22 nt, Human
ccuagguauaauucacauugua

SEQ ID NO: 1492538 - RNA, 13 nt, Human
ccuaaacauauga

SEQ ID NO: 1492539 - RNA, 16 nt, Human
cccuucaugcauggaa

SEQ ID NO: 1492540 - RNA, 14 nt, Human
cccuucaucuggaa

SEQ ID NO: 1492541 - RNA, 16 nt, Human
cccuucaucuggaacc

SEQ ID NO: 1492542 - RNA, 16 nt, Human
ccggaucugagggaga

SEQ ID NO: 1492543 - RNA, 12 nt, Human
ccucacacuggg

SEQ ID NO: 1492544 - RNA, 13 nt, Human
ccucacacuggga

SEQ ID NO: 1492545 - RNA, 15 nt, Human
ccucacacugggacu

SEQ ID NO: 1492546 - RNA, 21 nt, Human
ccuauucaacacacacaugcu

SEQ ID NO: 1492547 - RNA, 23 nt, Human
ccuauucaacacacacaugcuuc

SEQ ID NO: 1492548 - RNA, 18 nt, Human
ccucaccagcccuggcaa

SEQ ID NO: 1492549 - RNA, 15 nt, Human
ccucguggacaccug

SEQ ID NO: 1492550 - RNA, 16 nt, Human
ccucguggacaccugc

SEQ ID NO: 1492551 - RNA, 17 nt, Human
ccucguggacaccugcc

SEQ ID NO: 1492552 - RNA, 18 nt, Human
ccucguggacaccugccc

SEQ ID NO: 1492553 - RNA, 20 nt, Human
ccucguggacaccugcccug

SEQ ID NO: 1492554 - RNA, 21 nt, Human
ccucguggacaccugcccugc

SEQ ID NO: 1492555 - RNA, 22 nt, Human
ccucguggacaccugcccugcc

SEQ ID NO: 1492556 - RNA, 20 nt, Human
ccuccacucuuucuuucaau

SEQ ID NO: 1492557 - RNA, 15 nt, Human
ccuccacucuuucuu

SEQ ID NO: 1492558 - RNA, 20 nt, Human
ccuccaggguggcagcaaca

SEQ ID NO: 1492559 - RNA, 21 nt, Human
ccuccaggguggcagcaacaa

SEQ ID NO: 1492560 - RNA, 19 nt, Human
ccauggacacuacacccag

SEQ ID NO: 1492561 - RNA, 20 nt, Human
ccauggacacuacacccagc

SEQ ID NO: 1492562 - RNA, 21 nt, Human
ccauggacacuacacccagca

SEQ ID NO: 1492563 - RNA, 22 nt, Human
ccauggacacuacacccagcaa

SEQ ID NO: 1492564 - RNA, 23 nt, Human
ccauggacacuacacccagcaau

SEQ ID NO: 1492565 - RNA, 18 nt, Human
ccauucauuccauucugg

SEQ ID NO: 1492566 - RNA, 20 nt, Human
ccauucauuccauucuggaa

SEQ ID NO: 1492567 - RNA, 17 nt, Human
cccaggacaggauccag

SEQ ID NO: 1492568 - RNA, 10 nt, Human
cccaggacag

SEQ ID NO: 1492569 - RNA, 14 nt, Human
ccagggaccggcgg

SEQ ID NO: 1492570 - RNA, 12 nt, Human
ccagugcugaau

SEQ ID NO: 1492571 - RNA, 22 nt, Human
ccagugcugaauuucccucucu

SEQ ID NO: 1492572 - RNA, 20 nt, Human
ccagugggaggugagaccac

SEQ ID NO: 1492573 - RNA, 23 nt, Human
ccagugggaggugagaccaccuc

SEQ ID NO: 1492574 - RNA, 20 nt, Human
ccaucagaaacacccucaca

SEQ ID NO: 1492575 - RNA, 18 nt, Human
ccaucagaaacacccuca

SEQ ID NO: 1492576 - RNA, 18 nt, Human
cauuugcucauggaauug

SEQ ID NO: 1492577 - RNA, 16 nt, Human
cauuugcucauggaau

SEQ ID NO: 1492578 - RNA, 15 nt, Human
cauuugcucauggaa

SEQ ID NO: 1492579 - RNA, 15 nt, Human
cauuuccuaaauaua

SEQ ID NO: 1492580 - RNA, 15 nt, Human
cauugaccuauuucc

SEQ ID NO: 1492581 - RNA, 21 nt, Human
cauugaccuauuuccagaaau

SEQ ID NO: 1492582 - RNA, 15 nt, Human
caugcauggaaauuc

SEQ ID NO: 1492583 - RNA, 17 nt, Human
caugcauggaaauuccc

SEQ ID NO: 1492584 - RNA, 20 nt, Human
caugcuguucaugaaagauu

SEQ ID NO: 1492585 - RNA, 23 nt, Human
caugcugucuacacuaagagaga

SEQ ID NO: 1492586 - RNA, 15 nt, Human
caugcuucccuuucc

SEQ ID NO: 1492587 - RNA, 21 nt, Human
cauggacacuacacccagcaa

SEQ ID NO: 1492588 - RNA, 22 nt, Human
cauggacacuacacccagcaau

SEQ ID NO: 1492589 - RNA, 23 nt, Human
cauggacacuacacccagcaaua

SEQ ID NO: 1492590 - RNA, 22 nt, Human
cauguuucuuuguaaugaaaac

SEQ ID NO: 1492591 - RNA, 21 nt, Human
cauguuucuuuguaaugaaaa

SEQ ID NO: 1492592 - RNA, 15 nt, Human
caugugaaaucauuc

SEQ ID NO: 1492593 - RNA, 16 nt, Human
caugugaaaucauuca

SEQ ID NO: 1492594 - RNA, 17 nt, Human
caugugaaaucauucau

SEQ ID NO: 1492595 - RNA, 13 nt, Human
caucccucaccca

SEQ ID NO: 1492596 - RNA, 14 nt, Human
caucccucacccau

SEQ ID NO: 1492597 - RNA, 20 nt, Human
caucccucacccauccuaga

SEQ ID NO: 1492598 - RNA, 23 nt, Human
cauccagcagauuuccagccuuc

SEQ ID NO: 1492599 - RNA, 13 nt, Human
cauccagggggca

SEQ ID NO: 1492600 - RNA, 19 nt, Human
caucucagcucacugcaac

SEQ ID NO: 1492601 - RNA, 20 nt, Human
caucucagcucacugcaacc

SEQ ID NO: 1492602 - RNA, 22 nt, Human
caucuagugagcagucaggaaa

SEQ ID NO: 1492603 - RNA, 17 nt, Human
caucuauagaaagcuau

SEQ ID NO: 1492604 - RNA, 11 nt, Human
cauccucucca

SEQ ID NO: 1492605 - RNA, 12 nt, Human
caucuaggauuu

SEQ ID NO: 1492606 - RNA, 14 nt, Human
caucuagugagcag

SEQ ID NO: 1492607 - RNA, 18 nt, Human
caucuagguaaauuacag

SEQ ID NO: 1492608 - RNA, 17 nt, Human
caucuagguaaauuaca

SEQ ID NO: 1492609 - RNA, 16 nt, Human
caucucuuguuuaaau

SEQ ID NO: 1492610 - RNA, 15 nt, Human
cauaugauguacaug

SEQ ID NO: 1492611 - RNA, 17 nt, Human
cauaugauguacaugua

SEQ ID NO: 1492612 - RNA, 21 nt, Human
cauaugauguacauguacuga

SEQ ID NO: 1492613 - RNA, 14 nt, Human
cauagaauaaaauu

SEQ ID NO: 1492614 - RNA, 20 nt, Human
cauagaauaaaauuuuuaau

SEQ ID NO: 1492615 - RNA, 12 nt, Human
cauauuuauaaa

SEQ ID NO: 1492616 - RNA, 17 nt, Human
cauauuuauaaaaauaa

SEQ ID NO: 1492617 - RNA, 22 nt, Human
caucaagucuuucacauuuaaa

SEQ ID NO: 1492618 - RNA, 12 nt, Human
cauauuuucaug

SEQ ID NO: 1492619 - RNA, 11 nt, Human
caguugcagcc

SEQ ID NO: 1492620 - RNA, 22 nt, Human
cauaaaaaggacaucagcaaac

SEQ ID NO: 1492621 - RNA, 13 nt, Human
cauaaaaaggaca

SEQ ID NO: 1492622 - RNA, 19 nt, Human
cauaaaaaggacaucagca

SEQ ID NO: 1492623 - RNA, 20 nt, Human
cauaaaaaggacaucagcaa

SEQ ID NO: 1492624 - RNA, 21 nt, Human
cauaaaaaggacaucagcaaa

SEQ ID NO: 1492625 - RNA, 14 nt, Human
cauaaagcaggcag

SEQ ID NO: 1492626 - RNA, 16 nt, Human
cauaaagcaggcagaa

SEQ ID NO: 1492627 - RNA, 20 nt, Human
cauaaauuuaguauuuuguu

SEQ ID NO: 1492628 - RNA, 19 nt, Human
cauaaauuuaguauuuugu

SEQ ID NO: 1492629 - RNA, 18 nt, Human
cauaagcuuaugcuuaaa

SEQ ID NO: 1492630 - RNA, 17 nt, Human
cauaauccaguaaaaua

SEQ ID NO: 1492631 - RNA, 18 nt, Human
cauaauccaguaaaauaa

SEQ ID NO: 1492632 - RNA, 15 nt, Human
cauaauacuugcuuu

SEQ ID NO: 1492633 - RNA, 22 nt, Human
caguucggugagcuacaaaugc

SEQ ID NO: 1492634 - RNA, 12 nt, Human
caguucugaaga

SEQ ID NO: 1492635 - RNA, 14 nt, Human
caguucugaagaag

SEQ ID NO: 1492636 - RNA, 13 nt, Human
caguucugaagaa

SEQ ID NO: 1492637 - RNA, 22 nt, Human
caguucugaagaagaugguacc

SEQ ID NO: 1492638 - RNA, 16 nt, Human
caguucugaagaagau

SEQ ID NO: 1492639 - RNA, 15 nt, Human
caguucugaagaaga

SEQ ID NO: 1492640 - RNA, 21 nt, Human
caguuaccucugccucagaaa

SEQ ID NO: 1492641 - RNA, 21 nt, Human
caguuaacuauugcauuuaua

SEQ ID NO: 1492642 - RNA, 24 nt, Human
caguuaacuauugcauuuauaugu

SEQ ID NO: 1492643 - RNA, 21 nt, Human
caguggcaucaucucagcuca

SEQ ID NO: 1492644 - RNA, 21 nt, Human
caguggcgcgaucucagcuca

SEQ ID NO: 1492645 - RNA, 21 nt, Human
caguggcgugaucucagcuca

SEQ ID NO: 1492646 - RNA, 16 nt, Human
cgcccuggacugugug

SEQ ID NO: 1492647 - RNA, 17 nt, Human
cggcccacaauuaauuu

SEQ ID NO: 1492648 - RNA, 13 nt, Human
cgggacugcggag

SEQ ID NO: 1492649 - RNA, 14 nt, Human
cggggacucagccc

SEQ ID NO: 1492650 - RNA, 17 nt, Human
cggugagcuacaaaugc

SEQ ID NO: 1492651 - RNA, 12 nt, Human
cguggacaccug

SEQ ID NO: 1492652 - RNA, 13 nt, Human
cguggacaccugc

SEQ ID NO: 1492653 - RNA, 14 nt, Human
cguggacaccugcc

SEQ ID NO: 1492654 - RNA, 15 nt, Human
cguggacaccugccc

SEQ ID NO: 1492655 - RNA, 17 nt, Human
cguggacaccugcccug

SEQ ID NO: 1492656 - RNA, 18 nt, Human
cguggacaccugcccugc

SEQ ID NO: 1492657 - RNA, 19 nt, Human
cguggacaccugcccugcc

SEQ ID NO: 1492658 - RNA, 18 nt, Human
cuaaauauauuuuaagac

SEQ ID NO: 1492659 - RNA, 20 nt, Human
cuaaauauauuuuaagacga

SEQ ID NO: 1492660 - RNA, 15 nt, Human
cuaacaugauuuggg

SEQ ID NO: 1492661 - RNA, 18 nt, Human
cuauuuuaauaaacacuc

SEQ ID NO: 1492662 - RNA, 22 nt, Human
cuauuuuaauaaacacucuuga

SEQ ID NO: 1492663 - RNA, 17 nt, Human
cucacccauccuagagg

SEQ ID NO: 1492664 - RNA, 14 nt, Human
cucacccauccuag

SEQ ID NO: 1492665 - RNA, 15 nt, Human
cucacccauccuaga

SEQ ID NO: 1492666 - RNA, 13 nt, Human
cucacauuuauau

SEQ ID NO: 1492667 - RNA, 19 nt, Human
cuauauuguuugcuaagca

SEQ ID NO: 1492668 - RNA, 18 nt, Human
cuaugaaauauuauguua

SEQ ID NO: 1492669 - RNA, 21 nt, Human
cuaucuuugccacccucaugc

SEQ ID NO: 1492670 - RNA, 13 nt, Human
cuaugaaauauua

SEQ ID NO: 1492671 - RNA, 14 nt, Human
cuaucuuugccacc

SEQ ID NO: 1492672 - RNA, 15 nt, Human
cuaucuuugccaccc

SEQ ID NO: 1492673 - RNA, 18 nt, Human
cuaucuuugccacccuca

SEQ ID NO: 1492674 - RNA, 19 nt, Human
cuaucuuugccacccucau

SEQ ID NO: 1492675 - RNA, 12 nt, Human
cuaucuuugcca

SEQ ID NO: 1492676 - RNA, 13 nt, Human
cuaguguagaauu

SEQ ID NO: 1492677 - RNA, 20 nt, Human
cuaguguagaauugugcaac

SEQ ID NO: 1492678 - RNA, 20 nt, Human
cuaggcaguucaaagcagga

SEQ ID NO: 1492679 - RNA, 20 nt, Human
cuaguauuucuaugaaauau

SEQ ID NO: 1492680 - RNA, 19 nt, Human
cuaguauuucuaugaaaua

SEQ ID NO: 1492681 - RNA, 22 nt, Human
cuaguauuucuaugaaauauua

SEQ ID NO: 1492682 - RNA, 22 nt, Human
cuaggacugaauuaugaaacuu

SEQ ID NO: 1492683 - RNA, 17 nt, Human
cuagcaaaagugcaaga

SEQ ID NO: 1492684 - RNA, 16 nt, Human
cuagcaaaagugcaag

SEQ ID NO: 1492685 - RNA, 15 nt, Human
cuacccuaaccaagu

SEQ ID NO: 1492686 - RNA, 21 nt, Human
cuacuguaaggcaaucauggu

SEQ ID NO: 1492687 - RNA, 22 nt, Human
cuacuuauuguagcauccugga

SEQ ID NO: 1492688 - RNA, 22 nt, Human
cuacuuucugugucuauggauu

SEQ ID NO: 1492689 - RNA, 23 nt, Human
cuacuucuuuuuucaaaagaaag

SEQ ID NO: 1492690 - RNA, 12 nt, Human
cuaauaaagcug

SEQ ID NO: 1492691 - RNA, 13 nt, Human
cuaauaaagcugu

SEQ ID NO: 1492692 - RNA, 14 nt, Human
cuaauaaagcugug

SEQ ID NO: 1492693 - RNA, 16 nt, Human
cuaaucuacuuucugu

SEQ ID NO: 1492694 - RNA, 23 nt, Human
cuaauguggaccuuagaauacag

SEQ ID NO: 1492695 - RNA, 12 nt, Human
cuaccaggaaag

SEQ ID NO: 1492696 - RNA, 13 nt, Human
cucccuacccuaa

SEQ ID NO: 1492697 - RNA, 21 nt, Human
cucccaaagugcugggauuaa

SEQ ID NO: 1492698 - RNA, 22 nt, Human
cucccaagcaccugggauuaca

SEQ ID NO: 1492699 - RNA, 20 nt, Human
cuccauggcccugccaugcu

SEQ ID NO: 1492700 - RNA, 19 nt, Human
cuccauggcccugccaugc

SEQ ID NO: 1492701 - RNA, 15 nt, Human
cuccuccaccucaac

SEQ ID NO: 1492702 - RNA, 14 nt, Human
cuccuccaccucaa

SEQ ID NO: 1492703 - RNA, 21 nt, Human
cuccuccaggguggcagcaac

SEQ ID NO: 1492704 - RNA, 22 nt, Human
cuccuccaggguggcagcaaca

SEQ ID NO: 1492705 - RNA, 13 nt, Human
cucuaacauuucc

SEQ ID NO: 1492706 - RNA, 17 nt, Human
cucuaggaaauauuuau

SEQ ID NO: 1492707 - RNA, 15 nt, Human
cucuaggaaauauuu

SEQ ID NO: 1492708 - RNA, 15 nt, Human
cucuauaccaauaaa

SEQ ID NO: 1492709 - RNA, 16 nt, Human
cucuauaccaauaaag

SEQ ID NO: 1492710 - RNA, 17 nt, Human
cucuauaccaauaaagu

SEQ ID NO: 1492711 - RNA, 15 nt, Human
cucuccaaaccacuu

SEQ ID NO: 1492712 - RNA, 16 nt, Human
cucuccaaaccacuuu

SEQ ID NO: 1492713 - RNA, 18 nt, Human
cucuccagccucagcucu

SEQ ID NO: 1492714 - RNA, 21 nt, Human
cucucucauacccucccuccc

SEQ ID NO: 1492715 - RNA, 17 nt, Human
cugacucuuaagaagac

SEQ ID NO: 1492716 - RNA, 11 nt, Human
cugagaaauuu

SEQ ID NO: 1492717 - RNA, 14 nt, Human
cugagaaauuuaua

SEQ ID NO: 1492718 - RNA, 17 nt, Human
cugaggaucagaguaau

SEQ ID NO: 1492719 - RNA, 19 nt, Human
cugaggaucagaguaaucc

SEQ ID NO: 1492720 - RNA, 15 nt, Human
cucuguucauuccuc

SEQ ID NO: 1492721 - RNA, 17 nt, Human
cucuguucauuccucca

SEQ ID NO: 1492722 - RNA, 18 nt, Human
cucuguucauuccuccag

SEQ ID NO: 1492723 - RNA, 19 nt, Human
cucuguucauuccuccagg

SEQ ID NO: 1492724 - RNA, 22 nt, Human
cucugucuccuaagcuggagug

SEQ ID NO: 1492725 - RNA, 23 nt, Human
cugaagaagcaccaaucaugaau

SEQ ID NO: 1492726 - RNA, 16 nt, Human
cugaaauuuccuggga

SEQ ID NO: 1492727 - RNA, 23 nt, Human
cugaaauuuccugggagcuuuug

SEQ ID NO: 1492728 - RNA, 13 nt, Human
cugaaauuuccug

SEQ ID NO: 1492729 - RNA, 17 nt, Human
cucuuucuuucaauaaa

SEQ ID NO: 1492730 - RNA, 21 nt, Human
cugaaauaaacgucuuaaaua

SEQ ID NO: 1492731 - RNA, 14 nt, Human
cucuucccucuucc

SEQ ID NO: 1492732 - RNA, 20 nt, Human
cucuuuaaaaggaaagaaaa

SEQ ID NO: 1492733 - RNA, 23 nt, Human
cucuuuaaaaggaaagaaaacau

SEQ ID NO: 1492734 - RNA, 19 nt, Human
cucuuuaaaaggaaagaaa

SEQ ID NO: 1492735 - RNA, 13 nt, Human
cugcugccugccu

SEQ ID NO: 1492736 - RNA, 15 nt, Human
cugcugcugccugcc

SEQ ID NO: 1492737 - RNA, 19 nt, Human
cugcuucugacauaaucca

SEQ ID NO: 1492738 - RNA, 15 nt, Human
cuggaagugacuuug

SEQ ID NO: 1492739 - RNA, 18 nt, Human
cuggaagugacuuuggcu

SEQ ID NO: 1492740 - RNA, 14 nt, Human
cugcccugcccugc

SEQ ID NO: 1492741 - RNA, 15 nt, Human
cugcccugcccugcc

SEQ ID NO: 1492742 - RNA, 22 nt, Human
cugcccucucccaaaaaacuac

SEQ ID NO: 1492743 - RNA, 22 nt, Human
cugcgcccuuaacugcauccag

SEQ ID NO: 1492744 - RNA, 22 nt, Human
cugccugcuuuuuauggccugu

SEQ ID NO: 1492745 - RNA, 11 nt, Human
cugcugccugc

SEQ ID NO: 1492746 - RNA, 14 nt, Human
cugcugccugcuuu

SEQ ID NO: 1492747 - RNA, 23 nt, Human
cugcugccugcuuuuuauggccu

SEQ ID NO: 1492748 - RNA, 11 nt, Human
cugcagguccc

SEQ ID NO: 1492749 - RNA, 12 nt, Human
cugcaggucccu

SEQ ID NO: 1492750 - RNA, 13 nt, Human
cugcaggucccua

SEQ ID NO: 1492751 - RNA, 14 nt, Human
cugcaggucccuaa

SEQ ID NO: 1492752 - RNA, 15 nt, Human
cugcaggucccuaau

SEQ ID NO: 1492753 - RNA, 16 nt, Human
cugcaggucccuaaua

SEQ ID NO: 1492754 - RNA, 17 nt, Human
cugcaggucccuaauaa

SEQ ID NO: 1492755 - RNA, 18 nt, Human
cugcaggucccuaauaaa

SEQ ID NO: 1492756 - RNA, 17 nt, Human
cugcagucucuauacca

SEQ ID NO: 1492757 - RNA, 21 nt, Human
cugcagucucuauaccaauaa

SEQ ID NO: 1492758 - RNA, 23 nt, Human
cugcagucucuauaccaauaaag

SEQ ID NO: 1492759 - RNA, 19 nt, Human
cugcaggucccuaauaaag

SEQ ID NO: 1492760 - RNA, 20 nt, Human
cugcaggucccuaauaaagc

SEQ ID NO: 1492761 - RNA, 21 nt, Human
cugcaggucccuaauaaagcu

SEQ ID NO: 1492762 - RNA, 22 nt, Human
cugcaggucccuaauaaagcug

SEQ ID NO: 1492763 - RNA, 23 nt, Human
cugcaggucccuaauaaagcugu

SEQ ID NO: 1492764 - RNA, 23 nt, Human
cuggcauuacaggugugagccac

SEQ ID NO: 1492765 - RNA, 20 nt, Human
cuggaagugcuaauuuugaa

SEQ ID NO: 1492766 - RNA, 10 nt, Human
cugggccccu

SEQ ID NO: 1492767 - RNA, 23 nt, Human
cugggauuacaggugugagccac

SEQ ID NO: 1492768 - RNA, 17 nt, Human
cugggaggcucuggagc

SEQ ID NO: 1492769 - RNA, 22 nt, Human
cugggaggcucuggagcccacu

SEQ ID NO: 1492770 - RNA, 18 nt, Human
cugggaggcucuggagcc

SEQ ID NO: 1492771 - RNA, 20 nt, Human
cugggaggcucuggagccca

SEQ ID NO: 1492772 - RNA, 21 nt, Human
cugggaggcucuggagcccac

SEQ ID NO: 1492773 - RNA, 13 nt, Human
cugguguuucuug

SEQ ID NO: 1492774 - RNA, 14 nt, Human
cugguguuucuuga

SEQ ID NO: 1492775 - RNA, 18 nt, Human
cuguaaggcaaucauggu

SEQ ID NO: 1492776 - RNA, 17 nt, Human
cugggucgcccuggacu

SEQ ID NO: 1492777 - RNA, 18 nt, Human
cugggucgcccuggacug

SEQ ID NO: 1492778 - RNA, 22 nt, Human
cugggucgcccuggacugugug

SEQ ID NO: 1492779 - RNA, 19 nt, Human
cuguauuuuaaaagaauga

SEQ ID NO: 1492780 - RNA, 16 nt, Human
cuguauuuuaaaagaa

SEQ ID NO: 1492781 - RNA, 13 nt, Human
cuguauuuuaaaa

SEQ ID NO: 1492782 - RNA, 15 nt, Human
cuguaugauucccag

SEQ ID NO: 1492783 - RNA, 12 nt, Human
cuugaggacaca

SEQ ID NO: 1492784 - RNA, 13 nt, Human
cuugaggacacau

SEQ ID NO: 1492785 - RNA, 14 nt, Human
cuugaggacacaug

SEQ ID NO: 1492786 - RNA, 15 nt, Human
cuugaggacacaugu

SEQ ID NO: 1492787 - RNA, 16 nt, Human
cuugaggacacauguc

SEQ ID NO: 1492788 - RNA, 17 nt, Human
cuugaggacacaugucc

SEQ ID NO: 1492789 - RNA, 18 nt, Human
cuugaggacacaugucca

SEQ ID NO: 1492790 - RNA, 19 nt, Human
cuucuuuuuucaaaagaaa

SEQ ID NO: 1492791 - RNA, 20 nt, Human
cuucuuuuuucaaaagaaag

SEQ ID NO: 1492792 - RNA, 19 nt, Human
cuucuuuccacagaagcuc

SEQ ID NO: 1492793 - RNA, 13 nt, Human
cuucuuuccacag

SEQ ID NO: 1492794 - RNA, 15 nt, Human
cuugcuuuuaaaauc

SEQ ID NO: 1492795 - RNA, 17 nt, Human
cuugccaaauauaaaua

SEQ ID NO: 1492796 - RNA, 18 nt, Human
cuuguaaaggaauuuaaa

SEQ ID NO: 1492797 - RNA, 18 nt, Human
cuuguauuauguguguuu

SEQ ID NO: 1492798 - RNA, 13 nt, Human
cuuguauuaugug

SEQ ID NO: 1492799 - RNA, 19 nt, Human
cuuuauuuuguguuuagga

SEQ ID NO: 1492800 - RNA, 21 nt, Human
cuuugccacccucaugcugug

SEQ ID NO: 1492801 - RNA, 21 nt, Human
cuuucuuucaauaaaacgcag

SEQ ID NO: 1492802 - RNA, 19 nt, Human
cuuuuuuaucaugugaaau

SEQ ID NO: 1492803 - RNA, 16 nt, Human
cuuuuuucaaaagaaa

SEQ ID NO: 1492804 - RNA, 22 nt, Human
cuuuuaacuguuguagaagaca

SEQ ID NO: 1492805 - RNA, 22 nt, Human
cuuuuaaaugauugaauuauau

SEQ ID NO: 1492806 - RNA, 15 nt, Human
gaaaccuuccaccca

SEQ ID NO: 1492807 - RNA, 17 nt, Human
gaaaccuuccacccagu

SEQ ID NO: 1492808 - RNA, 20 nt, Human
gaaacuaggugcauauuuau

SEQ ID NO: 1492809 - RNA, 20 nt, Human
gaaagucagccauaucucca

SEQ ID NO: 1492810 - RNA, 17 nt, Human
gaacaggauauucucac

SEQ ID NO: 1492811 - RNA, 20 nt, Human
gaacaguuguguuugaagca

SEQ ID NO: 1492812 - RNA, 24 nt, Human
gaacaguuaccucugccucagaaa

SEQ ID NO: 1492813 - RNA, 22 nt, Human
gaacaguuguguuugaagcaca

SEQ ID NO: 1492814 - RNA, 21 nt, Human
gaaauuuccugggagcuuuug

SEQ ID NO: 1492815 - RNA, 23 nt, Human
gaaauuaguacuccccuccuuga

SEQ ID NO: 1492816 - RNA, 22 nt, Human
gaaauuaugugacauuuuacau

SEQ ID NO: 1492817 - RNA, 23 nt, Human
gaaauuaugugacauuuuacauu

SEQ ID NO: 1492818 - RNA, 17 nt, Human
gaaauucccuucaucug

SEQ ID NO: 1492819 - RNA, 21 nt, Human
gaaauucccuucaucuggaac

SEQ ID NO: 1492820 - RNA, 22 nt, Human
gaaauucccuucaucuggaacc

SEQ ID NO: 1492821 - RNA, 13 nt, Human
gaaauauuuauuu

SEQ ID NO: 1492822 - RNA, 16 nt, Human
gaaauauuuauuuuaa

SEQ ID NO: 1492823 - RNA, 15 nt, Human
gaaauauuuauuuua

SEQ ID NO: 1492824 - RNA, 21 nt, Human
gaaauaaacgucuuaaauauu

SEQ ID NO: 1492825 - RNA, 18 nt, Human
gaaauaaacgucuuaaau

SEQ ID NO: 1492826 - RNA, 17 nt, Human
gaaauaaacgucuuaaa

SEQ ID NO: 1492827 - RNA, 16 nt, Human
gaaauaaacgucuuaa

SEQ ID NO: 1492828 - RNA, 14 nt, Human
gaaauaaacgucuu

SEQ ID NO: 1492829 - RNA, 13 nt, Human
gaaggaggaccca

SEQ ID NO: 1492830 - RNA, 14 nt, Human
gaaggaggacccag

SEQ ID NO: 1492831 - RNA, 15 nt, Human
gaaggaggacccagg

SEQ ID NO: 1492832 - RNA, 16 nt, Human
gaaggaggacccagga

SEQ ID NO: 1492833 - RNA, 17 nt, Human
gaaggaggacccaggac

SEQ ID NO: 1492834 - RNA, 18 nt, Human
gaaggaggacccaggaca

SEQ ID NO: 1492835 - RNA, 19 nt, Human
gaaggaggacccaggacag

SEQ ID NO: 1492836 - RNA, 18 nt, Human
gaaggaaggcagggagga

SEQ ID NO: 1492837 - RNA, 19 nt, Human
gaaggaaggcagggaggag

SEQ ID NO: 1492838 - RNA, 20 nt, Human
gaaggaaggcagggaggagg

SEQ ID NO: 1492839 - RNA, 22 nt, Human
gaaggaaggcuccaucuccagu

SEQ ID NO: 1492840 - RNA, 21 nt, Human
gaaggugaggagcuugaaacc

SEQ ID NO: 1492841 - RNA, 14 nt, Human
gaaguaacuacagu

SEQ ID NO: 1492842 - RNA, 20 nt, Human
gaagucacauuccugaacag

SEQ ID NO: 1492843 - RNA, 16 nt, Human
gaagucacauuccuga

SEQ ID NO: 1492844 - RNA, 21 nt, Human
gaagucacauuccugaacagg

SEQ ID NO: 1492845 - RNA, 23 nt, Human
gaaguccaagcauuuagauguau

SEQ ID NO: 1492846 - RNA, 20 nt, Human
gaagaaagaacggaagaaga

SEQ ID NO: 1492847 - RNA, 19 nt, Human
gaaccaauaaaauaauuuu

SEQ ID NO: 1492848 - RNA, 15 nt, Human
gaaccacaagacugc

SEQ ID NO: 1492849 - RNA, 14 nt, Human
gaaccacaagacug

SEQ ID NO: 1492850 - RNA, 17 nt, Human
gaagauugagauguguu

SEQ ID NO: 1492851 - RNA, 22 nt, Human
gaagauugagauguguucacaa

SEQ ID NO: 1492852 - RNA, 14 nt, Human
gaagaucccccaga

SEQ ID NO: 1492853 - RNA, 15 nt, Human
gaagaucccccagaa

SEQ ID NO: 1492854 - RNA, 18 nt, Human
gaagaucccccagaaaag

SEQ ID NO: 1492855 - RNA, 22 nt, Human
gacagccaacuauggccugugg

SEQ ID NO: 1492856 - RNA, 19 nt, Human
gacagccaacuauggccug

SEQ ID NO: 1492857 - RNA, 18 nt, Human
gacaggauccaggccggc

SEQ ID NO: 1492858 - RNA, 13 nt, Human
gacaggauccagg

SEQ ID NO: 1492859 - RNA, 15 nt, Human
gacaggauccaggcc

SEQ ID NO: 1492860 - RNA, 22 nt, Human
gacaugggacauuugcucaugg

SEQ ID NO: 1492861 - RNA, 22 nt, Human
gacaauugagguaaguuuuuug

SEQ ID NO: 1492862 - RNA, 15 nt, Human
gacaagcucacagac

SEQ ID NO: 1492863 - RNA, 13 nt, Human
gacaccugcccug

SEQ ID NO: 1492864 - RNA, 14 nt, Human
gacaccugcccugc

SEQ ID NO: 1492865 - RNA, 15 nt, Human
gacaccugcccugcc

SEQ ID NO: 1492866 - RNA, 16 nt, Human
gacaccugcccugccc

SEQ ID NO: 1492867 - RNA, 22 nt, Human
gacaccugcccugcccugccac

SEQ ID NO: 1492868 - RNA, 23 nt, Human
gacaccugcccugcccugccacc

SEQ ID NO: 1492869 - RNA, 9 nt, Human
gacaccugc

SEQ ID NO: 1492870 - RNA, 10 nt, Human
gacaccugcc

SEQ ID NO: 1492871 - RNA, 11 nt, Human
gacaccugccc

SEQ ID NO: 1492872 - RNA, 12 nt, Human
gacaccugcccu

SEQ ID NO: 1492873 - RNA, 12 nt, Human
gacccaggacag

SEQ ID NO: 1492874 - RNA, 13 nt, Human
gacccaggacagg

SEQ ID NO: 1492875 - RNA, 22 nt, Human
gacccaggacaggauccaggcc

SEQ ID NO: 1492876 - RNA, 23 nt, Human
gaccugauuucugagcauuuaau

SEQ ID NO: 1492877 - RNA, 11 nt, Human
gaccugccucc

SEQ ID NO: 1492878 - RNA, 22 nt, Human
gaccugccucccuucaugcaug

SEQ ID NO: 1492879 - RNA, 19 nt, Human
gaccggcggaccccagcca

SEQ ID NO: 1492880 - RNA, 20 nt, Human
gaccggcggaccccagccau

SEQ ID NO: 1492881 - RNA, 16 nt, Human
gacggguuucaccaug

SEQ ID NO: 1492882 - RNA, 12 nt, Human
gagaccaccucu

SEQ ID NO: 1492883 - RNA, 11 nt, Human
gagacauccag

SEQ ID NO: 1492884 - RNA, 12 nt, Human
gagacauccagc

SEQ ID NO: 1492885 - RNA, 17 nt, Human
gagauacagaauuuuau

SEQ ID NO: 1492886 - RNA, 19 nt, Human
gagagacacacugaagaag

SEQ ID NO: 1492887 - RNA, 17 nt, Human
gagagagguugaaaaac

SEQ ID NO: 1492888 - RNA, 19 nt, Human
gagagagguugaaaaacaa

SEQ ID NO: 1492889 - RNA, 12 nt, Human
gagaaaugaaaa

SEQ ID NO: 1492890 - RNA, 18 nt, Human
gagacacacugaagaagc

SEQ ID NO: 1492891 - RNA, 16 nt, Human
gagacagccaacuaug

SEQ ID NO: 1492892 - RNA, 16 nt, Human
gagaagaacugaaauc

SEQ ID NO: 1492893 - RNA, 14 nt, Human
gagaagaacugaaa

SEQ ID NO: 1492894 - RNA, 20 nt, Human
gagcagagcugauggagaag

SEQ ID NO: 1492895 - RNA, 23 nt, Human
gagcagagcugauggagaaggaa

SEQ ID NO: 1492896 - RNA, 20 nt, Human
gagccaggaagaucccccag

SEQ ID NO: 1492897 - RNA, 21 nt, Human
gagccaggaagaucccccaga

SEQ ID NO: 1492898 - RNA, 18 nt, Human
gagcccacuguacuugcu

SEQ ID NO: 1492899 - RNA, 21 nt, Human
gagcccacuguacuugcucuu

SEQ ID NO: 1492900 - RNA, 23 nt, Human
gagcccacuguacuugcucuuga

SEQ ID NO: 1492901 - RNA, 23 nt, Human
gagcccuucuauacccacccaga

SEQ ID NO: 1492902 - RNA, 14 nt, Human
gagcuuuuguagaa

SEQ ID NO: 1492903 - RNA, 15 nt, Human
gagcugauggagaag

SEQ ID NO: 1492904 - RNA, 16 nt, Human
gagcugauggagaagg

SEQ ID NO: 1492905 - RNA, 16 nt, Human
gagcucgugggacagu

SEQ ID NO: 1492906 - RNA, 21 nt, Human
gaucaaguuauuuuuaauuug

SEQ ID NO: 1492907 - RNA, 14 nt, Human
gaucaguuaacuau

SEQ ID NO: 1492908 - RNA, 14 nt, Human
gaucauugugaaau

SEQ ID NO: 1492909 - RNA, 20 nt, Human
gaucauugugaaauuauuca

SEQ ID NO: 1492910 - RNA, 12 nt, Human
gaucccccagaa

SEQ ID NO: 1492911 - RNA, 19 nt, Human
gauaaaguugguaaaccuu

SEQ ID NO: 1492912 - RNA, 23 nt, Human
gauagauaggucagugcaaauac

SEQ ID NO: 1492913 - RNA, 11 nt, Human
gauacagaaaa

SEQ ID NO: 1492914 - RNA, 13 nt, Human
gauccuggaaauc

SEQ ID NO: 1492915 - RNA, 12 nt, Human
gaucucagcuca

SEQ ID NO: 1492916 - RNA, 17 nt, Human
gaucucagcucacuaca

SEQ ID NO: 1492917 - RNA, 17 nt, Human
gaucucagcucacugca

SEQ ID NO: 1492918 - RNA, 19 nt, Human
gaucucagcucacugcaac

SEQ ID NO: 1492919 - RNA, 10 nt, Human
gcaagccaga

SEQ ID NO: 1492920 - RNA, 20 nt, Human
gcaaggccugguguuucuug

SEQ ID NO: 1492921 - RNA, 21 nt, Human
gcaaacaggaucaguuaacua

SEQ ID NO: 1492922 - RNA, 18 nt, Human
gauggggguuucaccaua

SEQ ID NO: 1492923 - RNA, 19 nt, Human
gauuccagagcacugcucc

SEQ ID NO: 1492924 - RNA, 15 nt, Human
gauuuuccugaaaac

SEQ ID NO: 1492925 - RNA, 22 nt, Human
gauuuggucaacacuaacauga

SEQ ID NO: 1492926 - RNA, 14 nt, Human
gauuucugaggaaa

SEQ ID NO: 1492927 - RNA, 15 nt, Human
gauuuccagccuucu

SEQ ID NO: 1492928 - RNA, 14 nt, Human
gcacggcagccaca

SEQ ID NO: 1492929 - RNA, 16 nt, Human
gcacggcagccacagc

SEQ ID NO: 1492930 - RNA, 20 nt, Human
gcagcccugcugcugccugc

SEQ ID NO: 1492931 - RNA, 21 nt, Human
gcagcccugcugcugccugcc

SEQ ID NO: 1492932 - RNA, 17 nt, Human
gcagcaauuuaaauguu

SEQ ID NO: 1492933 - RNA, 12 nt, Human
gcagcaauuuaa

SEQ ID NO: 1492934 - RNA, 15 nt, Human
gcagcaauuuaaaug

SEQ ID NO: 1492935 - RNA, 16 nt, Human
gcagcaauuuaaaugu

SEQ ID NO: 1492936 - RNA, 17 nt, Human
gcagacauuuuaaaaaa

SEQ ID NO: 1492937 - RNA, 15 nt, Human
gcaguucugaagaag

SEQ ID NO: 1492938 - RNA, 17 nt, Human
gcaguucugaagaagau

SEQ ID NO: 1492939 - RNA, 13 nt, Human
gcauagaaguaaa

SEQ ID NO: 1492940 - RNA, 18 nt, Human
gcaguggcgcgaucucag

SEQ ID NO: 1492941 - RNA, 22 nt, Human
gcaguggcgcgaucucagcuca

SEQ ID NO: 1492942 - RNA, 17 nt, Human
gcauagguuuaauaauu

SEQ ID NO: 1492943 - RNA, 22 nt, Human
gcaguggcaucaucucagcuca

SEQ ID NO: 1492944 - RNA, 13 nt, Human
gcauuauauuuau

SEQ ID NO: 1492945 - RNA, 16 nt, Human
gcaucugaaaauugau

SEQ ID NO: 1492946 - RNA, 16 nt, Human
gcauuuguguugaaga

SEQ ID NO: 1492947 - RNA, 19 nt, Human
gcauucaaauguauuacag

SEQ ID NO: 1492948 - RNA, 20 nt, Human
gccccuggucccucugcagu

SEQ ID NO: 1492949 - RNA, 23 nt, Human
gccaggcugggucgcccuggacu

SEQ ID NO: 1492950 - RNA, 17 nt, Human
gccaggcugggucgccc

SEQ ID NO: 1492951 - RNA, 18 nt, Human
gcccugcugcugccugcc

SEQ ID NO: 1492952 - RNA, 14 nt, Human
gccucccagguuca

SEQ ID NO: 1492953 - RNA, 15 nt, Human
gccucccuucaugca

SEQ ID NO: 1492954 - RNA, 18 nt, Human
gccucccuucaugcaugg

SEQ ID NO: 1492955 - RNA, 20 nt, Human
gccucccuucaugcauggaa

SEQ ID NO: 1492956 - RNA, 22 nt, Human
gccucccuucaugcauggaaau

SEQ ID NO: 1492957 - RNA, 23 nt, Human
gccucccuucaugcauggaaauu

SEQ ID NO: 1492958 - RNA, 12 nt, Human
gccuguuuaaga

SEQ ID NO: 1492959 - RNA, 13 nt, Human
gccuguuuaagag

SEQ ID NO: 1492960 - RNA, 13 nt, Human
gccuuuggcaggu

SEQ ID NO: 1492961 - RNA, 15 nt, Human
gccuuuggcaggugc

SEQ ID NO: 1492962 - RNA, 16 nt, Human
gccuuugaccugccuc

SEQ ID NO: 1492963 - RNA, 15 nt, Human
gcgcgaucucagcuc

SEQ ID NO: 1492964 - RNA, 16 nt, Human
gcgcgaucucagcuca

SEQ ID NO: 1492965 - RNA, 18 nt, Human
uuuuggucuggagggaag

SEQ ID NO: 1492966 - RNA, 14 nt, Human
uuuuccugaaaacc

SEQ ID NO: 1492967 - RNA, 18 nt, Human
uuuucuaaaguaaaaaca

SEQ ID NO: 1492968 - RNA, 18 nt, Human
uuuuuaaaaaagaaacau

SEQ ID NO: 1492969 - RNA, 12 nt, Human
uuuuuaaagacu

SEQ ID NO: 1492970 - RNA, 13 nt, Human
uuuuuaaagacuu

SEQ ID NO: 1492971 - RNA, 18 nt, Human
uuuuuaaagacuuuuaug

SEQ ID NO: 1492972 - RNA, 23 nt, Human
uuuuucucugauacagaaaaguu

SEQ ID NO: 1492973 - RNA, 19 nt, Human
uuuuucucuaggaaauauu

SEQ ID NO: 1492974 - RNA, 15 nt, Human
uuuuugaagcuguau

SEQ ID NO: 1492975 - RNA, 10 nt, Human
uuuuuugaga

SEQ ID NO: 1492976 - RNA, 16 nt, Human
uuuuuugggcagcaau

SEQ ID NO: 1492977 - RNA, 20 nt, Human
uuuuugaaaagcagacauuu

SEQ ID NO: 1492978 - RNA, 12 nt, Human
uuuuaaauguau

SEQ ID NO: 1492979 - RNA, 16 nt, Human
uuuuaaauguauacua

SEQ ID NO: 1492980 - RNA, 18 nt, Human
uuuuaaagacuuuuauga

SEQ ID NO: 1492981 - RNA, 21 nt, Human
uuuuaaaagaaugauuaugaa

SEQ ID NO: 1492982 - RNA, 15 nt, Human
uuugcaucugaaaau

SEQ ID NO: 1492983 - RNA, 19 nt, Human
uuugguuuucacauuggaa

SEQ ID NO: 1492984 - RNA, 21 nt, Human
uuuggugcuucucagauuucu

SEQ ID NO: 1492985 - RNA, 16 nt, Human
uuuguauaaaauaauu

SEQ ID NO: 1492986 - RNA, 14 nt, Human
uuuguauaaaauaa

SEQ ID NO: 1492987 - RNA, 13 nt, Human
uuuguauaaaaua

SEQ ID NO: 1492988 - RNA, 19 nt, Human
uuuggacaaaauggaauac

SEQ ID NO: 1492989 - RNA, 18 nt, Human
uuugaaucaucaagucuu

SEQ ID NO: 1492990 - RNA, 21 nt, Human
uuacauuuuuugggcagcaau

SEQ ID NO: 1492991 - RNA, 12 nt, Human
uuucuaaaguaa

SEQ ID NO: 1492992 - RNA, 14 nt, Human
uuucuaaaguaaaa

SEQ ID NO: 1492993 - RNA, 21 nt, Human
uuucugaaauuuccugggagc

SEQ ID NO: 1492994 - RNA, 18 nt, Human
uuucucugauacagaaaa

SEQ ID NO: 1492995 - RNA, 17 nt, Human
uuucucugauacagaaa

SEQ ID NO: 1492996 - RNA, 16 nt, Human
uuucucugauacagaa

SEQ ID NO: 1492997 - RNA, 15 nt, Human
uuucucugauacaga

SEQ ID NO: 1492998 - RNA, 13 nt, Human
guauauuacaaug

SEQ ID NO: 1492999 - RNA, 14 nt, Human
guauauuacaauga

SEQ ID NO: 1493000 - RNA, 12 nt, Human
guaucucuucag

SEQ ID NO: 1493001 - RNA, 13 nt, Human
guaucucuucagu

SEQ ID NO: 1493002 - RNA, 17 nt, Human
guaucucuucagucucu

SEQ ID NO: 1493003 - RNA, 19 nt, Human
guaugaacuugaggacaca

SEQ ID NO: 1493004 - RNA, 20 nt, Human
guaugaacuugaggacacau

SEQ ID NO: 1493005 - RNA, 22 nt, Human
guaugaacuugaggacacaugu

SEQ ID NO: 1493006 - RNA, 23 nt, Human
guaugaacuugaggacacauguc

SEQ ID NO: 1493007 - RNA, 17 nt, Human
guaugaaccaccgcgcc

SEQ ID NO: 1493008 - RNA, 15 nt, Human
guaugaacuugagga

SEQ ID NO: 1493009 - RNA, 16 nt, Human
guaugaacuugaggac

SEQ ID NO: 1493010 - RNA, 17 nt, Human
guauguuagugcaaauu

SEQ ID NO: 1493011 - RNA, 21 nt, Human
guagcauuuguguugaagagg

SEQ ID NO: 1493012 - RNA, 16 nt, Human
guagcauccuggaaua

SEQ ID NO: 1493013 - RNA, 19 nt, Human
guagaguugaucaaaauca

SEQ ID NO: 1493014 - RNA, 22 nt, Human
guaggggcuuauaauaaaggac

SEQ ID NO: 1493015 - RNA, 22 nt, Human
guaguagcguuuuuuaaaugua

SEQ ID NO: 1493016 - RNA, 17 nt, Human
guaguguuggagaagaa

SEQ ID NO: 1493017 - RNA, 15 nt, Human
guaguguuggagaag

SEQ ID NO: 1493018 - RNA, 14 nt, Human
guaguguuggagaa

SEQ ID NO: 1493019 - RNA, 17 nt, Human
guauaauucacauugua

SEQ ID NO: 1493020 - RNA, 15 nt, Human
guauacuauaguacc

SEQ ID NO: 1493021 - RNA, 16 nt, Human
gucacuacgccuggcu

SEQ ID NO: 1493022 - RNA, 19 nt, Human
gucacguuuggugcuucuc

SEQ ID NO: 1493023 - RNA, 22 nt, Human
gucaauaaaauccauacauuug

SEQ ID NO: 1493024 - RNA, 23 nt, Human
gucaauaaaauccauacauuugu

SEQ ID NO: 1493025 - RNA, 13 nt, Human
gucaccagagacu

SEQ ID NO: 1493026 - RNA, 16 nt, Human
gucaccagagacuuua

SEQ ID NO: 1493027 - RNA, 20 nt, Human
guauuuuaaaagaaugauua

SEQ ID NO: 1493028 - RNA, 13 nt, Human
gucaggaaagaga

SEQ ID NO: 1493029 - RNA, 21 nt, Human
gucauucagauaugauucaaa

SEQ ID NO: 1493030 - RNA, 15 nt, Human
gucccaucccugcgu

SEQ ID NO: 1493031 - RNA, 16 nt, Human
gucccuaauaaagcug

SEQ ID NO: 1493032 - RNA, 17 nt, Human
gucccuaauaaagcugu

SEQ ID NO: 1493033 - RNA, 18 nt, Human
gucccuaauaaagcugug

SEQ ID NO: 1493034 - RNA, 20 nt, Human
gucccuaauaaagcugugug

SEQ ID NO: 1493035 - RNA, 19 nt, Human
gucucuucugaauaaagca

SEQ ID NO: 1493036 - RNA, 20 nt, Human
gucucuucugaauaaagcaa

SEQ ID NO: 1493037 - RNA, 21 nt, Human
gucucuucugaauaaagcaau

SEQ ID NO: 1493038 - RNA, 22 nt, Human
gucucuucugaauaaagcaauu

SEQ ID NO: 1493039 - RNA, 23 nt, Human
gucucuucugaauaaagcaauua

SEQ ID NO: 1493040 - RNA, 21 nt, Human
gucucuggauuauauuaugaa

SEQ ID NO: 1493041 - RNA, 19 nt, Human
gucucugaggggcuaccag

SEQ ID NO: 1493042 - RNA, 17 nt, Human
gucucuggaauuugaaa

SEQ ID NO: 1493043 - RNA, 17 nt, Human
gucucuauaccaauaaa

SEQ ID NO: 1493044 - RNA, 18 nt, Human
gucucuauaccaauaaag

SEQ ID NO: 1493045 - RNA, 19 nt, Human
gucucuauaccaauaaagu

SEQ ID NO: 1493046 - RNA, 18 nt, Human
gucgucaaagcugaaaug

SEQ ID NO: 1493047 - RNA, 19 nt, Human
gugauauaaguguguguuu

SEQ ID NO: 1493048 - RNA, 14 nt, Human
gugagcuacaaaug

SEQ ID NO: 1493049 - RNA, 18 nt, Human
gugaggagcuugaaaccc

SEQ ID NO: 1493050 - RNA, 24 nt, Human
gugcaguggcgugaucucagcuca

SEQ ID NO: 1493051 - RNA, 19 nt, Human
gugcagcccccacugccuu

SEQ ID NO: 1493052 - RNA, 20 nt, Human
gugauccacccgccucagcc

SEQ ID NO: 1493053 - RNA, 24 nt, Human
gugauccacccgccucagccuccc

SEQ ID NO: 1493054 - RNA, 13 nt, Human
gugcacuggcccc

SEQ ID NO: 1493055 - RNA, 16 nt, Human
gugcacuggccccacc

SEQ ID NO: 1493056 - RNA, 17 nt, Human
gugcacuggccccaccc

SEQ ID NO: 1493057 - RNA, 18 nt, Human
gugcacuggccccacccu

SEQ ID NO: 1493058 - RNA, 13 nt, Human
gugcuaauuuuga

SEQ ID NO: 1493059 - RNA, 15 nt, Human
gugcuaauuuugaaa

SEQ ID NO: 1493060 - RNA, 15 nt, Human
gugggcauucaaaug

SEQ ID NO: 1493061 - RNA, 13 nt, Human
gugguagagaagc

SEQ ID NO: 1493062 - RNA, 21 nt, Human
guguaaguagauaggccaugg

SEQ ID NO: 1493063 - RNA, 17 nt, Human
guguaagacaaaaagcu

SEQ ID NO: 1493064 - RNA, 14 nt, Human
guguaugcacagua

SEQ ID NO: 1493065 - RNA, 13 nt, Human
guguguuuuaaaa

SEQ ID NO: 1493066 - RNA, 16 nt, Human
guguguuuuaaaauga

SEQ ID NO: 1493067 - RNA, 19 nt, Human
guguguuuuaaaaugagaa

SEQ ID NO: 1493068 - RNA, 14 nt, Human
guguguuuuucaua

SEQ ID NO: 1493069 - RNA, 13 nt, Human
guguucugugaua

SEQ ID NO: 1493070 - RNA, 18 nt, Human
guguuuuucauaaagcag

SEQ ID NO: 1493071 - RNA, 17 nt, Human
guuaacuauugcauuua

SEQ ID NO: 1493072 - RNA, 18 nt, Human
gugugcucaggagcccug

SEQ ID NO: 1493073 - RNA, 19 nt, Human
gugugcucaggagcccugg

SEQ ID NO: 1493074 - RNA, 16 nt, Human
gugugcucaggagccc

SEQ ID NO: 1493075 - RNA, 17 nt, Human
gugugcucaggagcccu

SEQ ID NO: 1493076 - RNA, 12 nt, Human
guguguuuuaaa

SEQ ID NO: 1493077 - RNA, 13 nt, Human
guucauuccucca

SEQ ID NO: 1493078 - RNA, 14 nt, Human
guucauuccuccag

SEQ ID NO: 1493079 - RNA, 15 nt, Human
guucauuccuccagg

SEQ ID NO: 1493080 - RNA, 12 nt, Human
guucaugaaaga

SEQ ID NO: 1493081 - RNA, 17 nt, Human
guuauuauauuuacaaa

SEQ ID NO: 1493082 - RNA, 17 nt, Human
guuaugacuauguaaac

SEQ ID NO: 1493083 - RNA, 15 nt, Human
guuaugacuauguaa

SEQ ID NO: 1493084 - RNA, 20 nt, Human
guuauccaccugccuuggcu

SEQ ID NO: 1493085 - RNA, 19 nt, Human
guuaucuaauagggcaauu

SEQ ID NO: 1493086 - RNA, 16 nt, Human
guuacccaaauuaaga

SEQ ID NO: 1493087 - RNA, 23 nt, Human
guuaccucugccucagaaaacaa

SEQ ID NO: 1493088 - RNA, 14 nt, Human
guuggagugcagug

SEQ ID NO: 1493089 - RNA, 15 nt, Human
guuggagugcagugg

SEQ ID NO: 1493090 - RNA, 23 nt, Human
guugcagcccugcugcugccugc

SEQ ID NO: 1493091 - RNA, 16 nt, Human
guugcaacuuuguaua

SEQ ID NO: 1493092 - RNA, 14 nt, Human
guugcaacuuugua

SEQ ID NO: 1493093 - RNA, 18 nt, Human
guugaagagguuuuaaag

SEQ ID NO: 1493094 - RNA, 21 nt, Human
guugauggugguauguuuuca

SEQ ID NO: 1493095 - RNA, 20 nt, Human
guugauggugguauguuuuc

SEQ ID NO: 1493096 - RNA, 15 nt, Human
guucugaagaagaug

SEQ ID NO: 1493097 - RNA, 14 nt, Human
guucugaagaagau

SEQ ID NO: 1493098 - RNA, 13 nt, Human
guucugaagaaga

SEQ ID NO: 1493099 - RNA, 12 nt, Human
guucugaagaag

SEQ ID NO: 1493100 - RNA, 18 nt, Human
guuccuuggccaugcaga

SEQ ID NO: 1493101 - RNA, 18 nt, Human
uaaaauccauacauuugu

SEQ ID NO: 1493102 - RNA, 15 nt, Human
uaaacacucuugaaa

SEQ ID NO: 1493103 - RNA, 17 nt, Human
uaaacacucuugaaaaa

SEQ ID NO: 1493104 - RNA, 18 nt, Human
uaaacacucuugaaaaau

SEQ ID NO: 1493105 - RNA, 18 nt, Human
uaaagcaggcagaacuca

SEQ ID NO: 1493106 - RNA, 14 nt, Human
uaaaguguuugaaa

SEQ ID NO: 1493107 - RNA, 14 nt, Human
uaaaggaauuuaaa

SEQ ID NO: 1493108 - RNA, 22 nt, Human
uaaaacaagcacuaaacaaaga

SEQ ID NO: 1493109 - RNA, 21 nt, Human
uaaaaacaaagaaauuaugug

SEQ ID NO: 1493110 - RNA, 15 nt, Human
uaaaaggaaagaaaa

SEQ ID NO: 1493111 - RNA, 21 nt, Human
uaaaaggaaagaaaacaucuu

SEQ ID NO: 1493112 - RNA, 17 nt, Human
uaaaauccauacauuug

SEQ ID NO: 1493113 - RNA, 15 nt, Human
uaaaauccauacauu

SEQ ID NO: 1493114 - RNA, 13 nt, Human
guuuggugcuucu

SEQ ID NO: 1493115 - RNA, 19 nt, Human
guuucuuuguaaugaaaac

SEQ ID NO: 1493116 - RNA, 18 nt, Human
guuucuuuguaaugaaaa

SEQ ID NO: 1493117 - RNA, 17 nt, Human
guuuccuccaagcuauu

SEQ ID NO: 1493118 - RNA, 15 nt, Human
guuuuaaaaugagaa

SEQ ID NO: 1493119 - RNA, 16 nt, Human
guuuuaaaaugagaaa

SEQ ID NO: 1493120 - RNA, 20 nt, Human
guuuucaaaauuguuacaaa

SEQ ID NO: 1493121 - RNA, 17 nt, Human
guuuuaaaaugagaaau

SEQ ID NO: 1493122 - RNA, 19 nt, Human
guugucugcaacucugaag

SEQ ID NO: 1493123 - RNA, 20 nt, Human
guuuauauaagcuuguauuc

SEQ ID NO: 1493124 - RNA, 19 nt, Human
guuuaggaacuacugagga

SEQ ID NO: 1493125 - RNA, 21 nt, Human
guuuagcuggaaaaguauguu

SEQ ID NO: 1493126 - RNA, 20 nt, Human
guuuagcuggaaaaguaugu

SEQ ID NO: 1493127 - RNA, 22 nt, Human
guuucauauuuuucauagcuaa

SEQ ID NO: 1493128 - RNA, 13 nt, Human
uaaccagaucauu

SEQ ID NO: 1493129 - RNA, 15 nt, Human
uaacuauugcauuua

SEQ ID NO: 1493130 - RNA, 16 nt, Human
uaacuauugcauuuau

SEQ ID NO: 1493131 - RNA, 21 nt, Human
uaacuauugcauuuauaugua

SEQ ID NO: 1493132 - RNA, 23 nt, Human
uaacuauugcauuuauauguacc

SEQ ID NO: 1493133 - RNA, 15 nt, Human
uaacuggaaacuuca

SEQ ID NO: 1493134 - RNA, 21 nt, Human
uaagaaaauaucacuugucaa

SEQ ID NO: 1493135 - RNA, 13 nt, Human
uaagagagaauga

SEQ ID NO: 1493136 - RNA, 23 nt, Human
uaagagagaaugagagacacacu

SEQ ID NO: 1493137 - RNA, 14 nt, Human
uaagagagaaugag

SEQ ID NO: 1493138 - RNA, 16 nt, Human
uaaaguugguaaaccu

SEQ ID NO: 1493139 - RNA, 17 nt, Human
uaaaguugguaaaccuu

SEQ ID NO: 1493140 - RNA, 20 nt, Human
uaaauggcuuccuggcaaua

SEQ ID NO: 1493141 - RNA, 15 nt, Human
uaaauguauacuaua

SEQ ID NO: 1493142 - RNA, 17 nt, Human
uaaauguauacuauagu

SEQ ID NO: 1493143 - RNA, 20 nt, Human
uaaauguauacuauaguacc

SEQ ID NO: 1493144 - RNA, 12 nt, Human
uaaauguauacu

SEQ ID NO: 1493145 - RNA, 13 nt, Human
uaaauguauacua

SEQ ID NO: 1493146 - RNA, 13 nt, Human
uaaauucuuucau

SEQ ID NO: 1493147 - RNA, 22 nt, Human
uaauguuucaaacauauauaac

SEQ ID NO: 1493148 - RNA, 23 nt, Human
uaaugauaacuggaaacuucagc

SEQ ID NO: 1493149 - RNA, 22 nt, Human
uaaugauaacuggaaacuucag

SEQ ID NO: 1493150 - RNA, 17 nt, Human
uaaugauaacuggaaac

SEQ ID NO: 1493151 - RNA, 14 nt, Human
uaauaauguuucaa

SEQ ID NO: 1493152 - RNA, 19 nt, Human
uaaggggaggaaccagagu

SEQ ID NO: 1493153 - RNA, 14 nt, Human
uaaggcaaucaugg

SEQ ID NO: 1493154 - RNA, 12 nt, Human
uaauaaagcugu

SEQ ID NO: 1493155 - RNA, 12 nt, Human
uaauaaaggacu

SEQ ID NO: 1493156 - RNA, 13 nt, Human
uaauaaaggacug

SEQ ID NO: 1493157 - RNA, 16 nt, Human
uaauaaaggacuguaa

SEQ ID NO: 1493158 - RNA, 20 nt, Human
uaauaaaggacuguaaucuu

SEQ ID NO: 1493159 - RNA, 22 nt, Human
uaagugauugcugguuuuaguu

SEQ ID NO: 1493160 - RNA, 12 nt, Human
uaaguccagugu

SEQ ID NO: 1493161 - RNA, 15 nt, Human
uacuccccuccuuga

SEQ ID NO: 1493162 - RNA, 14 nt, Human
uacugccuauuuua

SEQ ID NO: 1493163 - RNA, 21 nt, Human
uacugccuauuuuaauaaaca

SEQ ID NO: 1493164 - RNA, 20 nt, Human
uacuugcucuugaugccugg

SEQ ID NO: 1493165 - RNA, 13 nt, Human
uacuugcucuuga

SEQ ID NO: 1493166 - RNA, 14 nt, Human
uacuugcucuugau

SEQ ID NO: 1493167 - RNA, 18 nt, Human
uacuugcucuugaugccu

SEQ ID NO: 1493168 - RNA, 19 nt, Human
uacuugcucuugaugccug

SEQ ID NO: 1493169 - RNA, 13 nt, Human
uacugcuuaauuc

SEQ ID NO: 1493170 - RNA, 19 nt, Human
uacugcuuaauucaaauaa

SEQ ID NO: 1493171 - RNA, 20 nt, Human
uacugcuuaauucaaauaau

SEQ ID NO: 1493172 - RNA, 15 nt, Human
uacugcucuccucca

SEQ ID NO: 1493173 - RNA, 23 nt, Human
uaccucuccagccucagcucuca

SEQ ID NO: 1493174 - RNA, 20 nt, Human
uaccguaggcuuuguauuca

SEQ ID NO: 1493175 - RNA, 20 nt, Human
uacauuuuuugggcagcaau

SEQ ID NO: 1493176 - RNA, 22 nt, Human
uaccaaaaaucucaauauuuca

SEQ ID NO: 1493177 - RNA, 17 nt, Human
uaauuuuuauauuugaa

SEQ ID NO: 1493178 - RNA, 16 nt, Human
uaauuuuuauauuuga

SEQ ID NO: 1493179 - RNA, 12 nt, Human
uaauuuuuauau

SEQ ID NO: 1493180 - RNA, 18 nt, Human
uaauuuugugaagcaaaa

SEQ ID NO: 1493181 - RNA, 14 nt, Human
uaauuccuucagca

SEQ ID NO: 1493182 - RNA, 21 nt, Human
uaauuccuucagcacuuuaga

SEQ ID NO: 1493183 - RNA, 20 nt, Human
uaauuccuucagcacuuuag

SEQ ID NO: 1493184 - RNA, 15 nt, Human
uacaacggagucaaa

SEQ ID NO: 1493185 - RNA, 22 nt, Human
uacaacggagucaaaaauuaaa

SEQ ID NO: 1493186 - RNA, 15 nt, Human
uacaaccuccgccuc

SEQ ID NO: 1493187 - RNA, 14 nt, Human
uacaggauuugaaa

SEQ ID NO: 1493188 - RNA, 20 nt, Human
uacaggaugaugacuaugga

SEQ ID NO: 1493189 - RNA, 23 nt, Human
uacaguucggugagcuacaaaug

SEQ ID NO: 1493190 - RNA, 18 nt, Human
uacaguuuugaguagagu

SEQ ID NO: 1493191 - RNA, 21 nt, Human
uacauggcuggagcuagaauu

SEQ ID NO: 1493192 - RNA, 13 nt, Human
uagagaagcaagu

SEQ ID NO: 1493193 - RNA, 16 nt, Human
uagagaagcaaguaaa

SEQ ID NO: 1493194 - RNA, 23 nt, Human
uagaauaccacaggaaccacaag

SEQ ID NO: 1493195 - RNA, 23 nt, Human
uagaauacaguuuugaguagagu

SEQ ID NO: 1493196 - RNA, 13 nt, Human
uagaauaugccuu

SEQ ID NO: 1493197 - RNA, 16 nt, Human
uagccccucuccugga

SEQ ID NO: 1493198 - RNA, 14 nt, Human
uagauaggccaugg

SEQ ID NO: 1493199 - RNA, 18 nt, Human
uagcauccuggaauaucu

SEQ ID NO: 1493200 - RNA, 16 nt, Human
uagcauccuggaauau

SEQ ID NO: 1493201 - RNA, 15 nt, Human
uagcauccuggaaua

SEQ ID NO: 1493202 - RNA, 13 nt, Human
uagcauccuggaa

SEQ ID NO: 1493203 - RNA, 19 nt, Human
uaguagcguuuuuuaaaug

SEQ ID NO: 1493204 - RNA, 21 nt, Human
uaguagcguuuuuuaaaugua

SEQ ID NO: 1493205 - RNA, 23 nt, Human
uaguagcguuuuuuaaauguaua

SEQ ID NO: 1493206 - RNA, 17 nt, Human
uaguucuuacugcuuaa

SEQ ID NO: 1493207 - RNA, 17 nt, Human
uaguauuguccaggucu

SEQ ID NO: 1493208 - RNA, 18 nt, Human
uauaaaccgaacugaugu

SEQ ID NO: 1493209 - RNA, 16 nt, Human
uauaugcuucuguuuu

SEQ ID NO: 1493210 - RNA, 14 nt, Human
uauaugcuucuguu

SEQ ID NO: 1493211 - RNA, 20 nt, Human
uauauuuuuuucugaaauuu

SEQ ID NO: 1493212 - RNA, 19 nt, Human
uauauuuuuuucugaaauu

SEQ ID NO: 1493213 - RNA, 16 nt, Human
uauauuuuuuucugaa

SEQ ID NO: 1493214 - RNA, 19 nt, Human
uauauaacaaugcuguauu

SEQ ID NO: 1493215 - RNA, 17 nt, Human
uauauaacaaugcugua

SEQ ID NO: 1493216 - RNA, 12 nt, Human
uauaguacauga

SEQ ID NO: 1493217 - RNA, 13 nt, Human
uauaguacaugau

SEQ ID NO: 1493218 - RNA, 14 nt, Human
uauaguacaugaua

SEQ ID NO: 1493219 - RNA, 16 nt, Human
uauaguacaugauaaa

SEQ ID NO: 1493220 - RNA, 13 nt, Human
uauagaaagcuau

SEQ ID NO: 1493221 - RNA, 24 nt, Human
uauagaaagcuauauaagacaaga

SEQ ID NO: 1493222 - RNA, 22 nt, Human
ucagucucuauaccaauaaagu

SEQ ID NO: 1493223 - RNA, 23 nt, Human
ucagucucuauaccaauaaagug

SEQ ID NO: 1493224 - RNA, 16 nt, Human
ucaguuaacuauugca

SEQ ID NO: 1493225 - RNA, 20 nt, Human
ucaguuaacuauugcauuua

SEQ ID NO: 1493226 - RNA, 22 nt, Human
ucauauuuuucauagcuaaaaa

SEQ ID NO: 1493227 - RNA, 13 nt, Human
ucaucuggaacca

SEQ ID NO: 1493228 - RNA, 17 nt, Human
ucaucuggauuccagag

SEQ ID NO: 1493229 - RNA, 12 nt, Human
ucaucuggaacc

SEQ ID NO: 1493230 - RNA, 18 nt, Human
ucaucuggaaccaucaga

SEQ ID NO: 1493231 - RNA, 19 nt, Human
ucauggaauuggagcucgu

SEQ ID NO: 1493232 - RNA, 13 nt, Human
ucaugaaagauuc

SEQ ID NO: 1493233 - RNA, 15 nt, Human
ucaugaaagauucaa

SEQ ID NO: 1493234 - RNA, 21 nt, Human
ucauggaauuggagcucgugg

SEQ ID NO: 1493235 - RNA, 24 nt, Human
ucauggacuucugccagcauaaua

SEQ ID NO: 1493236 - RNA, 19 nt, Human
ucagcucucaguugcagcc

SEQ ID NO: 1493237 - RNA, 18 nt, Human
ucagauaugauucaaaug

SEQ ID NO: 1493238 - RNA, 17 nt, Human
ucagauaugauucaaau

SEQ ID NO: 1493239 - RNA, 23 nt, Human
uccacagcugccucuucccucuu

SEQ ID NO: 1493240 - RNA, 17 nt, Human
uccaagcaaaugugaau

SEQ ID NO: 1493241 - RNA, 15 nt, Human
uccacuuuaucuuga

SEQ ID NO: 1493242 - RNA, 17 nt, Human
uccacuuuaucuugaau

SEQ ID NO: 1493243 - RNA, 17 nt, Human
uccagagcacugcucca

SEQ ID NO: 1493244 - RNA, 21 nt, Human
ucccacuucagccucccaagc

SEQ ID NO: 1493245 - RNA, 21 nt, Human
ucccaagcaccugggauuaca

SEQ ID NO: 1493246 - RNA, 20 nt, Human
ucccaagcaccugggauuac

SEQ ID NO: 1493247 - RNA, 12 nt, Human
uccauacauuug

SEQ ID NO: 1493248 - RNA, 22 nt, Human
ucccucugcagucucuauacca

SEQ ID NO: 1493249 - RNA, 16 nt, Human
ucccucugcagucucu

SEQ ID NO: 1493250 - RNA, 19 nt, Human
ucccuacccuaaccaaguu

SEQ ID NO: 1493251 - RNA, 13 nt, Human
ucuaugaaauauu

SEQ ID NO: 1493252 - RNA, 14 nt, Human
ucucagauuucuga

SEQ ID NO: 1493253 - RNA, 21 nt, Human
ucucaguugcagcccugcugc

SEQ ID NO: 1493254 - RNA, 17 nt, Human
ucucagauuucugagga

SEQ ID NO: 1493255 - RNA, 18 nt, Human
ucucagauuucugaggaa

SEQ ID NO: 1493256 - RNA, 21 nt, Human
ucuaggcaguucaaagcagga

SEQ ID NO: 1493257 - RNA, 15 nt, Human
ucuagguaaauuaca

SEQ ID NO: 1493258 - RNA, 13 nt, Human
ucuauauuuuaca

SEQ ID NO: 1493259 - RNA, 14 nt, Human
ucugcagucucuau

SEQ ID NO: 1493260 - RNA, 18 nt, Human
ucugcagucucuauacca

SEQ ID NO: 1493261 - RNA, 20 nt, Human
ucugcagucucuauaccaau

SEQ ID NO: 1493262 - RNA, 21 nt, Human
ucugcagucucuauaccaaua

SEQ ID NO: 1493263 - RNA, 14 nt, Human
ucuggaauuugaaa

SEQ ID NO: 1493264 - RNA, 12 nt, Human
ucuggagcccac

SEQ ID NO: 1493265 - RNA, 16 nt, Human
ucuggagcccacugua

SEQ ID NO: 1493266 - RNA, 22 nt, Human
ucuggagcccacuguacuugcu

SEQ ID NO: 1493267 - RNA, 18 nt, Human
ugaaaaccacauuggaga

SEQ ID NO: 1493268 - RNA, 15 nt, Human
ugaaacacuuugcau

SEQ ID NO: 1493269 - RNA, 21 nt, Human
ucuuugccacccucaugcugu

SEQ ID NO: 1493270 - RNA, 22 nt, Human
ucuuugccacccucaugcugug

SEQ ID NO: 1493271 - RNA, 17 nt, Human
ucuuuccacagaagcuc

SEQ ID NO: 1493272 - RNA, 19 nt, Human
ucuugccaaauauaaauaa

SEQ ID NO: 1493273 - RNA, 13 nt, Human
ucuuauaauuuaa

SEQ ID NO: 1493274 - RNA, 14 nt, Human
ucuuauaauuuaaa

SEQ ID NO: 1493275 - RNA, 15 nt, Human
ugagcagucaggaaa

SEQ ID NO: 1493276 - RNA, 19 nt, Human
ugaggaucagaguaaucca

SEQ ID NO: 1493277 - RNA, 13 nt, Human
ugaggaucagagu

SEQ ID NO: 1493278 - RNA, 17 nt, Human
ugaggaucagaguaauc

SEQ ID NO: 1493279 - RNA, 15 nt, Human
ugaggcacuggcgag

SEQ ID NO: 1493280 - RNA, 19 nt, Human
ugagaggcugggaauggag

SEQ ID NO: 1493281 - RNA, 13 nt, Human
ugagacauccagc

SEQ ID NO: 1493282 - RNA, 10 nt, Human
ugagacaucc

SEQ ID NO: 1493283 - RNA, 12 nt, Human
ugagacauccag

SEQ ID NO: 1493284 - RNA, 18 nt, Human
ugagaaaaauauauacua

SEQ ID NO: 1493285 - RNA, 16 nt, Human
ugacucuuaagaagac

SEQ ID NO: 1493286 - RNA, 15 nt, Human
ugacucuuaagaaga

SEQ ID NO: 1493287 - RNA, 14 nt, Human
ugacucuuaagaag

SEQ ID NO: 1493288 - RNA, 16 nt, Human
ugacuuuggcugcaug

SEQ ID NO: 1493289 - RNA, 14 nt, Human
ugaauuacauuugu

SEQ ID NO: 1493290 - RNA, 13 nt, Human
ugaauuacauuug

SEQ ID NO: 1493291 - RNA, 14 nt, Human
ugaauuaaguuuuu

SEQ ID NO: 1493292 - RNA, 16 nt, Human
ugaauuuaaauagcuu

SEQ ID NO: 1493293 - RNA, 21 nt, Human
ugaacuugaggacacaugucc

SEQ ID NO: 1493294 - RNA, 22 nt, Human
ugaacuugaggacacaugucca

SEQ ID NO: 1493295 - RNA, 17 nt, Human
ugaacuugaggacacau

SEQ ID NO: 1493296 - RNA, 18 nt, Human
ugaacuugaggacacaug

SEQ ID NO: 1493297 - RNA, 19 nt, Human
ugaacuugaggacacaugu

SEQ ID NO: 1493298 - RNA, 20 nt, Human
ugaacuugaggacacauguc

SEQ ID NO: 1493299 - RNA, 16 nt, Human
ugaacuugaggacaca

SEQ ID NO: 1493300 - RNA, 16 nt, Human
ugaaacacuuugcaua

SEQ ID NO: 1493301 - RNA, 13 nt, Human
ugaaacauguuuc

SEQ ID NO: 1493302 - RNA, 21 nt, Human
ugaagcuuuuaugugaaacau

SEQ ID NO: 1493303 - RNA, 16 nt, Human
ugaagcuuuuauguga

SEQ ID NO: 1493304 - RNA, 21 nt, Human
ugaagagguuuuaaagcuucc

SEQ ID NO: 1493305 - RNA, 20 nt, Human
ugaagagguuuuaaagcuuc

SEQ ID NO: 1493306 - RNA, 9 nt, Human
ugccucucu

SEQ ID NO: 1493307 - RNA, 20 nt, Human
ugcgagugcucauuucagga

SEQ ID NO: 1493308 - RNA, 17 nt, Human
ugccuucucaacuccaa

SEQ ID NO: 1493309 - RNA, 15 nt, Human
ugccuucucaacucc

SEQ ID NO: 1493310 - RNA, 17 nt, Human
ugcucagagcaguguuu

SEQ ID NO: 1493311 - RNA, 19 nt, Human
ugcuaagcauuccaacuau

SEQ ID NO: 1493312 - RNA, 15 nt, Human
ugcuaagcauuccaa

SEQ ID NO: 1493313 - RNA, 22 nt, Human
ugcaguucugaagaagauggua

SEQ ID NO: 1493314 - RNA, 19 nt, Human
ugcaguucugaagaagaug

SEQ ID NO: 1493315 - RNA, 22 nt, Human
ugcaguggcaucaucucagcuc

SEQ ID NO: 1493316 - RNA, 22 nt, Human
ugcaguggcgcgaucucagcuc

SEQ ID NO: 1493317 - RNA, 22 nt, Human
ugcaguggcgugaucucagcuc

SEQ ID NO: 1493318 - RNA, 18 nt, Human
ugcaguucugaagaagau

SEQ ID NO: 1493319 - RNA, 17 nt, Human
ugcaguucugaagaaga

SEQ ID NO: 1493320 - RNA, 16 nt, Human
ugcaguucugaagaag

SEQ ID NO: 1493321 - RNA, 15 nt, Human
ugcaguucugaagaa

SEQ ID NO: 1493322 - RNA, 15 nt, Human
ugcacuggccccacc

SEQ ID NO: 1493323 - RNA, 16 nt, Human
ugcacuggccccaccc

SEQ ID NO: 1493324 - RNA, 17 nt, Human
ugcacuggccccacccu

SEQ ID NO: 1493325 - RNA, 19 nt, Human
ugccaaauauaaauaaaaa

SEQ ID NO: 1493326 - RNA, 22 nt, Human
ugccaaauauaaauaaaaauaa

SEQ ID NO: 1493327 - RNA, 17 nt, Human
ugccaaauauaaauaaa

SEQ ID NO: 1493328 - RNA, 18 nt, Human
ugccaaauauaaauaaaa

SEQ ID NO: 1493329 - RNA, 20 nt, Human
ugcauauuuauaaaaauaaa

SEQ ID NO: 1493330 - RNA, 21 nt, Human
ugcauauuuauaaaaauaaaa

SEQ ID NO: 1493331 - RNA, 16 nt, Human
ugccacccucaugcug

SEQ ID NO: 1493332 - RNA, 17 nt, Human
ugccacccucaugcugu

SEQ ID NO: 1493333 - RNA, 11 nt, Human
uggagggaagc

SEQ ID NO: 1493334 - RNA, 15 nt, Human
uggcaggugcagccc

SEQ ID NO: 1493335 - RNA, 14 nt, Human
uggaaagaguacuc

SEQ ID NO: 1493336 - RNA, 23 nt, Human
uggaaacuucagcgguuuauaua

SEQ ID NO: 1493337 - RNA, 17 nt, Human
uggaaacaagucaguca

SEQ ID NO: 1493338 - RNA, 22 nt, Human
uggaauaauccuaaacauauga

SEQ ID NO: 1493339 - RNA, 16 nt, Human
uggaauaucuccguca

SEQ ID NO: 1493340 - RNA, 21 nt, Human
uggcuugaguuuaaauuguaa

SEQ ID NO: 1493341 - RNA, 16 nt, Human
uggcuuccuggcaaua

SEQ ID NO: 1493342 - RNA, 22 nt, Human
uggccccacccucguggacacc

SEQ ID NO: 1493343 - RNA, 19 nt, Human
ugguaugaacuugaggaca

SEQ ID NO: 1493344 - RNA, 21 nt, Human
ugguaugaacuugaggacaca

SEQ ID NO: 1493345 - RNA, 22 nt, Human
ugguaugaacuugaggacacau

SEQ ID NO: 1493346 - RNA, 23 nt, Human
ugguaugaacuugaggacacaug

SEQ ID NO: 1493347 - RNA, 16 nt, Human
uggguuagggaaaaca

SEQ ID NO: 1493348 - RNA, 18 nt, Human
uggguuagggaaaacauu

SEQ ID NO: 1493349 - RNA, 19 nt, Human
uggguuagggaaaacauuc

SEQ ID NO: 1493350 - RNA, 21 nt, Human
uggguuagggaaaacauucca

SEQ ID NO: 1493351 - RNA, 16 nt, Human
uguaugauucccagcc

SEQ ID NO: 1493352 - RNA, 21 nt, Human
uguauuguauauuacaaugau

SEQ ID NO: 1493353 - RNA, 15 nt, Human
uguaugauucccagc

SEQ ID NO: 1493354 - RNA, 22 nt, Human
uguauaaaagggacugagaaau

SEQ ID NO: 1493355 - RNA, 22 nt, Human
ugucacccagguuggagugcag

SEQ ID NO: 1493356 - RNA, 22 nt, Human
uguaccguaggcuuuguauuca

SEQ ID NO: 1493357 - RNA, 20 nt, Human
uguaaucuuauuuaggaagu

SEQ ID NO: 1493358 - RNA, 18 nt, Human
uguagcauccuggaauau

SEQ ID NO: 1493359 - RNA, 17 nt, Human
uguagcauccuggaaua

SEQ ID NO: 1493360 - RNA, 16 nt, Human
uguagcauccuggaau

SEQ ID NO: 1493361 - RNA, 14 nt, Human
uguagcauccugga

SEQ ID NO: 1493362 - RNA, 18 nt, Human
uguagccccucuccugga

SEQ ID NO: 1493363 - RNA, 15 nt, Human
ugugacauuuuacau

SEQ ID NO: 1493364 - RNA, 17 nt, Human
ugugacauuuuacauua

SEQ ID NO: 1493365 - RNA, 18 nt, Human
ugugacauuuuacauuaa

SEQ ID NO: 1493366 - RNA, 16 nt, Human
ugugauauaagugugu

SEQ ID NO: 1493367 - RNA, 19 nt, Human
ugugcuaguaauuggaaag

SEQ ID NO: 1493368 - RNA, 20 nt, Human
ugugcucaggagcccuggga

SEQ ID NO: 1493369 - RNA, 17 nt, Human
ugugcucaggagcccug

SEQ ID NO: 1493370 - RNA, 15 nt, Human
ugugcucaggagccc

SEQ ID NO: 1493371 - RNA, 16 nt, Human
ugugcucaggagcccu

SEQ ID NO: 1493372 - RNA, 16 nt, Human
uguggaacauaaaaag

SEQ ID NO: 1493373 - RNA, 21 nt, Human
uguggaacauaaaaaggacau

SEQ ID NO: 1493374 - RNA, 19 nt, Human
uguggaacauaaaaaggac

SEQ ID NO: 1493375 - RNA, 20 nt, Human
uuacauuuguauaaaauaau

SEQ ID NO: 1493376 - RNA, 16 nt, Human
uuacaacggagucaaa

SEQ ID NO: 1493377 - RNA, 19 nt, Human
uuacaacggagucaaaaau

SEQ ID NO: 1493378 - RNA, 23 nt, Human
uuacaacggagucaaaaauuaaa

SEQ ID NO: 1493379 - RNA, 12 nt, Human
uuaaauguauac

SEQ ID NO: 1493380 - RNA, 14 nt, Human
uuaaauguauacua

SEQ ID NO: 1493381 - RNA, 19 nt, Human
uuaaauguauacuauagua

SEQ ID NO: 1493382 - RNA, 16 nt, Human
uuaaauguuaugacua

SEQ ID NO: 1493383 - RNA, 20 nt, Human
uuaaauguuaugacuaugua

SEQ ID NO: 1493384 - RNA, 12 nt, Human
uuaagaguaaaa

SEQ ID NO: 1493385 - RNA, 16 nt, Human
uuaauaauguuucaaa

SEQ ID NO: 1493386 - RNA, 20 nt, Human
uguuggagaagaacugaaau

SEQ ID NO: 1493387 - RNA, 19 nt, Human
uguuggagaagaacugaaa

SEQ ID NO: 1493388 - RNA, 17 nt, Human
uguuggagaagaacuga

SEQ ID NO: 1493389 - RNA, 16 nt, Human
uguuggagaagaacug

SEQ ID NO: 1493390 - RNA, 14 nt, Human
uguuggagaagaac

SEQ ID NO: 1493391 - RNA, 12 nt, Human
uguuuaagagac

SEQ ID NO: 1493392 - RNA, 14 nt, Human
uguucaugaaagau

SEQ ID NO: 1493393 - RNA, 13 nt, Human
uguucaugaaaga

SEQ ID NO: 1493394 - RNA, 20 nt, Human
uguucuuuuaaaugauugaa

SEQ ID NO: 1493395 - RNA, 20 nt, Human
uguugacaugggacauuugc

SEQ ID NO: 1493396 - RNA, 14 nt, Human
uguuagugcaaauu

SEQ ID NO: 1493397 - RNA, 17 nt, Human
uguucauaaauaaaguu

SEQ ID NO: 1493398 - RNA, 13 nt, Human
uguguuugaagca

SEQ ID NO: 1493399 - RNA, 19 nt, Human
uguguuuugcaagccagau

SEQ ID NO: 1493400 - RNA, 13 nt, Human
uguguuuugcaag

SEQ ID NO: 1493401 - RNA, 15 nt, Human
uguguuuuucauaaa

SEQ ID NO: 1493402 - RNA, 18 nt, Human
uguguuuuucauaaagca

SEQ ID NO: 1493403 - RNA, 22 nt, Human
ugugugaaagguacuucaaauc

SEQ ID NO: 1493404 - RNA, 21 nt, Human
ugugugaaagguacuucaaau

SEQ ID NO: 1493405 - RNA, 12 nt, Human
uuuuuuguuauu

SEQ ID NO: 1493406 - RNA, 17 nt, Human
aaaaagaaugaagccuc

SEQ ID NO: 1493407 - RNA, 17 nt, Human
aaaacaaggaugaauua

SEQ ID NO: 1493408 - RNA, 14 nt, Human
aaaacaaggaugaa

SEQ ID NO: 1493409 - RNA, 15 nt, Human
acagaagaaacuggg

SEQ ID NO: 1493410 - RNA, 13 nt, Human
acaacuauauugu

SEQ ID NO: 1493411 - RNA, 20 nt, Human
acaaaauggaauacucuuau

SEQ ID NO: 1493412 - RNA, 19 nt, Human
acaaaauggaauacucuua

SEQ ID NO: 1493413 - RNA, 15 nt, Human
acaaaauggaauacu

SEQ ID NO: 1493414 - RNA, 13 nt, Human
aauuuugaaaaac

SEQ ID NO: 1493415 - RNA, 20 nt, Human
acaagucagucauucagaua

SEQ ID NO: 1493416 - RNA, 13 nt, Human
accacgccuggcu

SEQ ID NO: 1493417 - RNA, 20 nt, Human
accacgccuggcuaauuuuu

SEQ ID NO: 1493418 - RNA, 14 nt, Human
acauuuguauaaaa

SEQ ID NO: 1493419 - RNA, 18 nt, Human
acauuugcucauggaauu

SEQ ID NO: 1493420 - RNA, 20 nt, Human
acauaaauuuaguauuuugu

SEQ ID NO: 1493421 - RNA, 12 nt, Human
acauccagcaga

SEQ ID NO: 1493422 - RNA, 14 nt, Human
acauaaaaaggaca

SEQ ID NO: 1493423 - RNA, 20 nt, Human
acauaaaaaggacaucagca

SEQ ID NO: 1493424 - RNA, 21 nt, Human
acauaaaaaggacaucagcaa

SEQ ID NO: 1493425 - RNA, 22 nt, Human
acauaaaaaggacaucagcaaa

SEQ ID NO: 1493426 - RNA, 15 nt, Human
acauaaaaaggacau

SEQ ID NO: 1493427 - RNA, 12 nt, Human
accccuaggacu

SEQ ID NO: 1493428 - RNA, 21 nt, Human
accccuaaaagaaacccugca

SEQ ID NO: 1493429 - RNA, 22 nt, Human
accccuaaaagaaacccugcac

SEQ ID NO: 1493430 - RNA, 16 nt, Human
agaaaggauaaaguug

SEQ ID NO: 1493431 - RNA, 23 nt, Human
acuuuagggaaguacuuuuggca

SEQ ID NO: 1493432 - RNA, 19 nt, Human
acuuuagggggugggauuc

SEQ ID NO: 1493433 - RNA, 14 nt, Human
agaaaauaacaaua

SEQ ID NO: 1493434 - RNA, 16 nt, Human
agaaaauuuuuguagu

SEQ ID NO: 1493435 - RNA, 20 nt, Human
agaaaauuuuuguaguagcg

SEQ ID NO: 1493436 - RNA, 22 nt, Human
agaaaauuuuuguaguagcguu

SEQ ID NO: 1493437 - RNA, 21 nt, Human
agaaaaguugaauuuuacaug

SEQ ID NO: 1493438 - RNA, 18 nt, Human
agaaaaguugaauuuuac

SEQ ID NO: 1493439 - RNA, 15 nt, Human
acuggguaggaaaga

SEQ ID NO: 1493440 - RNA, 22 nt, Human
acuucugccagcauaauacuug

SEQ ID NO: 1493441 - RNA, 19 nt, Human
acuuguaaaggaauuuaaa

SEQ ID NO: 1493442 - RNA, 20 nt, Human
acuuguaaaggaauuuaaaa

SEQ ID NO: 1493443 - RNA, 23 nt, Human
acuuauuguagcauccuggaaua

SEQ ID NO: 1493444 - RNA, 20 nt, Human
acuuauuguagcauccugga

SEQ ID NO: 1493445 - RNA, 16 nt, Human
acuaagagagaaugag

SEQ ID NO: 1493446 - RNA, 21 nt, Human
acucuguucauuccuccaggu

SEQ ID NO: 1493447 - RNA, 20 nt, Human
acucuguucauuccuccagg

SEQ ID NO: 1493448 - RNA, 19 nt, Human
acucaaaccaaaucacuga

SEQ ID NO: 1493449 - RNA, 20 nt, Human
acucaaaccaaaucacugaa

SEQ ID NO: 1493450 - RNA, 12 nt, Human
acuccccuccuu

SEQ ID NO: 1493451 - RNA, 14 nt, Human
acuagcuauggugu

SEQ ID NO: 1493452 - RNA, 18 nt, Human
aaauugcuuuguauugua

SEQ ID NO: 1493453 - RNA, 15 nt, Human
aacaaagaaauuaug

SEQ ID NO: 1493454 - RNA, 17 nt, Human
aacaaagaaauuaugug

SEQ ID NO: 1493455 - RNA, 13 nt, Human
aacaugauuuggg

SEQ ID NO: 1493456 - RNA, 22 nt, Human
aaccacuggaaaguuuaugguu

SEQ ID NO: 1493457 - RNA, 14 nt, Human
aaccagaucauugu

SEQ ID NO: 1493458 - RNA, 17 nt, Human
aacugauccagcaauua

SEQ ID NO: 1493459 - RNA, 15 nt, Human
aacuuugcugagccu

SEQ ID NO: 1493460 - RNA, 17 nt, Human
aaagaguacucuuguuu

SEQ ID NO: 1493461 - RNA, 12 nt, Human
aaagaguacucu

SEQ ID NO: 1493462 - RNA, 13 nt, Human
aaagaaauuaugu

SEQ ID NO: 1493463 - RNA, 15 nt, Human
aaagaaauuaugugc

SEQ ID NO: 1493464 - RNA, 11 nt, Human
aaagaacaucc

SEQ ID NO: 1493465 - RNA, 17 nt, Human
aaacugacucuuaagaa

SEQ ID NO: 1493466 - RNA, 16 nt, Human
aaacugacucuuaaga

SEQ ID NO: 1493467 - RNA, 16 nt, Human
aaagaaaagaaaauuu

SEQ ID NO: 1493468 - RNA, 12 nt, Human
aaagaaaacuug

SEQ ID NO: 1493469 - RNA, 20 nt, Human
aaagaaaacuuguauuaugu

SEQ ID NO: 1493470 - RNA, 14 nt, Human
aaacacucuugaaa

SEQ ID NO: 1493471 - RNA, 17 nt, Human
aaacacucuugaaaaau

SEQ ID NO: 1493472 - RNA, 13 nt, Human
aaacacucuugaa

SEQ ID NO: 1493473 - RNA, 23 nt, Human
aaauagucucuuuaaaaggaaag

SEQ ID NO: 1493474 - RNA, 16 nt, Human
aaauagaagagagagg

SEQ ID NO: 1493475 - RNA, 13 nt, Human
aaauggaaacuau

SEQ ID NO: 1493476 - RNA, 17 nt, Human
aaauggaauacucuuau

SEQ ID NO: 1493477 - RNA, 18 nt, Human
aaauggcuuccuggcaau

SEQ ID NO: 1493478 - RNA, 14 nt, Human
aaagugacccuguu

SEQ ID NO: 1493479 - RNA, 12 nt, Human
aaauaacaauga

SEQ ID NO: 1493480 - RNA, 20 nt, Human
aaagggacugagaaauuuau

SEQ ID NO: 1493481 - RNA, 16 nt, Human
aaagggacugagaaau

SEQ ID NO: 1493482 - RNA, 19 nt, Human
aaagucucuggaauuugaa

SEQ ID NO: 1493483 - RNA, 20 nt, Human
aaagucucuggaauuugaaa

SEQ ID NO: 1493484 - RNA, 22 nt, Human
aaagucucuggaauuugaaaca

SEQ ID NO: 1493485 - RNA, 16 nt, Human
aagcagacauuuuaaa

SEQ ID NO: 1493486 - RNA, 19 nt, Human
aagccagauuuuccugaaa

SEQ ID NO: 1493487 - RNA, 13 nt, Human
aagccagauuuuc

SEQ ID NO: 1493488 - RNA, 16 nt, Human
aagauuuaccacuugu

SEQ ID NO: 1493489 - RNA, 19 nt, Human
aagauugcuuaauaaauug

SEQ ID NO: 1493490 - RNA, 13 nt, Human
aagaaauuaugug

SEQ ID NO: 1493491 - RNA, 22 nt, Human
aagaaauuaugugccagauuua

SEQ ID NO: 1493492 - RNA, 20 nt, Human
aagcuggagugcaguggcau

SEQ ID NO: 1493493 - RNA, 14 nt, Human
aaggacuguaaucu

SEQ ID NO: 1493494 - RNA, 19 nt, Human
aagucucuggaauuugaaa

SEQ ID NO: 1493495 - RNA, 14 nt, Human
aaguacuuuuggca

SEQ ID NO: 1493496 - RNA, 15 nt, Human
aaguacuuuuggcau

SEQ ID NO: 1493497 - RNA, 23 nt, Human
aaguccaggcuuuuuuaucaugu

SEQ ID NO: 1493498 - RNA, 20 nt, Human
aaguccaguguuucuuuuuu

SEQ ID NO: 1493499 - RNA, 12 nt, Human
aauaauguaaga

SEQ ID NO: 1493500 - RNA, 19 nt, Human
aauaauguaagacaaauau

SEQ ID NO: 1493501 - RNA, 21 nt, Human
aauaauccuaaacauaugaau

SEQ ID NO: 1493502 - RNA, 19 nt, Human
aauaaacuauuuguaaagu

SEQ ID NO: 1493503 - RNA, 16 nt, Human
aauaaacgucuuaaau

SEQ ID NO: 1493504 - RNA, 17 nt, Human
aauaaacgucuuaaaua

SEQ ID NO: 1493505 - RNA, 16 nt, Human
aauauuauguuaaaac

SEQ ID NO: 1493506 - RNA, 14 nt, Human
aauauucaauaaag

SEQ ID NO: 1493507 - RNA, 15 nt, Human
aauauucaauaaagc

SEQ ID NO: 1493508 - RNA, 16 nt, Human
aauauucaauaaagcu

SEQ ID NO: 1493509 - RNA, 13 nt, Human
aaucacaauacau

SEQ ID NO: 1493510 - RNA, 14 nt, Human
aauccauacauuug

SEQ ID NO: 1493511 - RNA, 13 nt, Human
aauccauacauuu

SEQ ID NO: 1493512 - RNA, 17 nt, Human
aaugaagauacugaaau

SEQ ID NO: 1493513 - RNA, 20 nt, Human
aaugauaacuggaaacuuca

SEQ ID NO: 1493514 - RNA, 17 nt, Human
aaugauaacuggaaacu

SEQ ID NO: 1493515 - RNA, 12 nt, Human
aaugaagauacu

SEQ ID NO: 1493516 - RNA, 20 nt, Human
aauuaguuuuauaugcuucu

SEQ ID NO: 1493517 - RNA, 17 nt, Human
aauuaguuuuauaugcu

SEQ ID NO: 1493518 - RNA, 14 nt, Human
aauuaguuuuauau

SEQ ID NO: 1493519 - RNA, 22 nt, Human
agaugaggccagaccauggaca

SEQ ID NO: 1493520 - RNA, 13 nt, Human
agaugaggccaga

SEQ ID NO: 1493521 - RNA, 14 nt, Human
agaugaggccagac

SEQ ID NO: 1493522 - RNA, 16 nt, Human
agaugaggccagacca

SEQ ID NO: 1493523 - RNA, 21 nt, Human
agaugaggccagaccauggac

SEQ ID NO: 1493524 - RNA, 21 nt, Human
agauaggucagugcaaauacu

SEQ ID NO: 1493525 - RNA, 21 nt, Human
agacugcauuauauuuauuac

SEQ ID NO: 1493526 - RNA, 17 nt, Human
agacugcauuauauuua

SEQ ID NO: 1493527 - RNA, 15 nt, Human
agagaagcaaguaaa

SEQ ID NO: 1493528 - RNA, 13 nt, Human
agagaaggagcag

SEQ ID NO: 1493529 - RNA, 23 nt, Human
agacuacaggcacacaccaccac

SEQ ID NO: 1493530 - RNA, 12 nt, Human
agcacugcucca

SEQ ID NO: 1493531 - RNA, 14 nt, Human
agcaugcacaaauu

SEQ ID NO: 1493532 - RNA, 19 nt, Human
agccagauuuuccugaaaa

SEQ ID NO: 1493533 - RNA, 15 nt, Human
agccagauuuuccug

SEQ ID NO: 1493534 - RNA, 13 nt, Human
agguaaguuuuuu

SEQ ID NO: 1493535 - RNA, 23 nt, Human
aggucccuaauaaagcugugugg

SEQ ID NO: 1493536 - RNA, 20 nt, Human
aggucccuaauaaagcugug

SEQ ID NO: 1493537 - RNA, 18 nt, Human
aggucccuaauaaagcug

SEQ ID NO: 1493538 - RNA, 19 nt, Human
aggucccuaauaaagcugu

SEQ ID NO: 1493539 - RNA, 17 nt, Human
aggucccuaauaaagcu

SEQ ID NO: 1493540 - RNA, 19 nt, Human
agguucaagcaauccuccc

SEQ ID NO: 1493541 - RNA, 17 nt, Human
agguucaugcaaacuuu

SEQ ID NO: 1493542 - RNA, 15 nt, Human
agguggaaauaaacu

SEQ ID NO: 1493543 - RNA, 19 nt, Human
agggcaauuaauuccuuca

SEQ ID NO: 1493544 - RNA, 22 nt, Human
agggcaauuaauuccuucagca

SEQ ID NO: 1493545 - RNA, 18 nt, Human
agggcaauuaauuccuuc

SEQ ID NO: 1493546 - RNA, 13 nt, Human
aggggcagagcca

SEQ ID NO: 1493547 - RNA, 14 nt, Human
aggggcagagccag

SEQ ID NO: 1493548 - RNA, 15 nt, Human
aggggcagagccagg

SEQ ID NO: 1493549 - RNA, 16 nt, Human
aggggcagagccagga

SEQ ID NO: 1493550 - RNA, 17 nt, Human
aggggcagagccaggaa

SEQ ID NO: 1493551 - RNA, 15 nt, Human
agcuuuucccuuuuu

SEQ ID NO: 1493552 - RNA, 18 nt, Human
agcuuuucccaaaagccc

SEQ ID NO: 1493553 - RNA, 14 nt, Human
agcuguaugauucc

SEQ ID NO: 1493554 - RNA, 15 nt, Human
aggaacuacugagga

SEQ ID NO: 1493555 - RNA, 12 nt, Human
aucccucaccca

SEQ ID NO: 1493556 - RNA, 19 nt, Human
aucccucacccauccuaga

SEQ ID NO: 1493557 - RNA, 20 nt, Human
auccacccgccucagccucc

SEQ ID NO: 1493558 - RNA, 15 nt, Human
aucaucuauagaaag

SEQ ID NO: 1493559 - RNA, 19 nt, Human
aucaucuauagaaagcuau

SEQ ID NO: 1493560 - RNA, 13 nt, Human
aucaucucagcuc

SEQ ID NO: 1493561 - RNA, 14 nt, Human
aucaucucagcuca

SEQ ID NO: 1493562 - RNA, 19 nt, Human
aucaucucagcucacugca

SEQ ID NO: 1493563 - RNA, 22 nt, Human
aucuuauaauuuaaaauaugcu

SEQ ID NO: 1493564 - RNA, 18 nt, Human
augaagcuuuuaugugaa

SEQ ID NO: 1493565 - RNA, 19 nt, Human
augaagcuuuuaugugaaa

SEQ ID NO: 1493566 - RNA, 20 nt, Human
augaagcuuuuaugugaaac

SEQ ID NO: 1493567 - RNA, 21 nt, Human
augaagcuuuuaugugaaaca

SEQ ID NO: 1493568 - RNA, 15 nt, Human
augacuauguaaacu

SEQ ID NO: 1493569 - RNA, 16 nt, Human
augacuauguaaacua

SEQ ID NO: 1493570 - RNA, 14 nt, Human
augaaaaaauauau

SEQ ID NO: 1493571 - RNA, 17 nt, Human
augaaaaaauauauauc

SEQ ID NO: 1493572 - RNA, 22 nt, Human
augaaaaaauauauaucaaaua

SEQ ID NO: 1493573 - RNA, 23 nt, Human
augaaaaaauauauaucaaauau

SEQ ID NO: 1493574 - RNA, 17 nt, Human
augcacaguaaaaaugg

SEQ ID NO: 1493575 - RNA, 12 nt, Human
augcauggaaau

SEQ ID NO: 1493576 - RNA, 14 nt, Human
augccuuuucccaa

SEQ ID NO: 1493577 - RNA, 21 nt, Human
augccuuuguacuuuagggaa

SEQ ID NO: 1493578 - RNA, 20 nt, Human
auggaaauucccuucaucug

SEQ ID NO: 1493579 - RNA, 18 nt, Human
auggcuggagcuagaauu

SEQ ID NO: 1493580 - RNA, 16 nt, Human
augucaaucagccuag

SEQ ID NO: 1493581 - RNA, 17 nt, Human
auguacauguacugauu

SEQ ID NO: 1493582 - RNA, 16 nt, Human
auguaaguaaacgguc

SEQ ID NO: 1493583 - RNA, 20 nt, Human
auguguaugcacaguaaaaa

SEQ ID NO: 1493584 - RNA, 18 nt, Human
auguuucuuuguaaugaa

SEQ ID NO: 1493585 - RNA, 14 nt, Human
auacccucccuccc

SEQ ID NO: 1493586 - RNA, 16 nt, Human
auacccucccucccua

SEQ ID NO: 1493587 - RNA, 22 nt, Human
auacccucccucccuacccuaa

SEQ ID NO: 1493588 - RNA, 19 nt, Human
auaaguguguguuuuucau

SEQ ID NO: 1493589 - RNA, 22 nt, Human
auaaguguguguuuuucauaaa

SEQ ID NO: 1493590 - RNA, 19 nt, Human
auaaguauuuaauucaugu

SEQ ID NO: 1493591 - RNA, 19 nt, Human
auacuugaaaauuaacaug

SEQ ID NO: 1493592 - RNA, 15 nt, Human
auacuugaaaauuaa

SEQ ID NO: 1493593 - RNA, 16 nt, Human
auacuugaaaauuaac

SEQ ID NO: 1493594 - RNA, 15 nt, Human
auauaagugauugcu

SEQ ID NO: 1493595 - RNA, 15 nt, Human
auauaaguguguguu

SEQ ID NO: 1493596 - RNA, 12 nt, Human
auauaauucuua

SEQ ID NO: 1493597 - RNA, 22 nt, Human
auauuuauuacuguaagaaaau

SEQ ID NO: 1493598 - RNA, 18 nt, Human
auauuuauuuuaauaaug

SEQ ID NO: 1493599 - RNA, 19 nt, Human
auauuuauuacuguaagaa

SEQ ID NO: 1493600 - RNA, 14 nt, Human
auauuuauuacugu

SEQ ID NO: 1493601 - RNA, 18 nt, Human
auauuuaguguucauaaa

SEQ ID NO: 1493602 - RNA, 16 nt, Human
auauuuauaaaaauaa

SEQ ID NO: 1493603 - RNA, 23 nt, Human
auauuucagauaaucacaauaca

SEQ ID NO: 1493604 - RNA, 18 nt, Human
auaucacuugucaauaaa

SEQ ID NO: 1493605 - RNA, 14 nt, Human
agugaucaaacuac

SEQ ID NO: 1493606 - RNA, 13 nt, Human
agucaaauugugu

SEQ ID NO: 1493607 - RNA, 17 nt, Human
agucaaauugugugaaa

SEQ ID NO: 1493608 - RNA, 15 nt, Human
agucaaauuguguga

SEQ ID NO: 1493609 - RNA, 23 nt, Human
agucauucagauaugauucaaau

SEQ ID NO: 1493610 - RNA, 20 nt, Human
agucauucagauaugauuca

SEQ ID NO: 1493611 - RNA, 15 nt, Human
agucauucagauaug

SEQ ID NO: 1493612 - RNA, 21 nt, Human
aguccaagcauuuagauguau

SEQ ID NO: 1493613 - RNA, 16 nt, Human
aguccaagcauuuaga

SEQ ID NO: 1493614 - RNA, 15 nt, Human
aguugaauuuuacau

SEQ ID NO: 1493615 - RNA, 18 nt, Human
cucugcaggucccuaaua

SEQ ID NO: 1493616 - RNA, 14 nt, Human
cucugcaggucccu

SEQ ID NO: 1493617 - RNA, 15 nt, Human
cucugcaggucccua

SEQ ID NO: 1493618 - RNA, 16 nt, Human
cucugcaggucccuaa

SEQ ID NO: 1493619 - RNA, 17 nt, Human
cucugcaggucccuaau

SEQ ID NO: 1493620 - RNA, 22 nt, Human
cucuuagaugcaguucugaaga

SEQ ID NO: 1493621 - RNA, 21 nt, Human
cugaagcuaucguaaaauuaa

SEQ ID NO: 1493622 - RNA, 22 nt, Human
cugaagcuaucguaaaauuaag

SEQ ID NO: 1493623 - RNA, 22 nt, Human
cugaaaauugaugggauuuggu

SEQ ID NO: 1493624 - RNA, 13 nt, Human
cucuugaugccug

SEQ ID NO: 1493625 - RNA, 15 nt, Human
cucuugaugccuggc

SEQ ID NO: 1493626 - RNA, 16 nt, Human
cucuugaugccuggcg

SEQ ID NO: 1493627 - RNA, 21 nt, Human
cucuugaugccuggcggggug

SEQ ID NO: 1493628 - RNA, 14 nt, Human
cucguuaauuugua

SEQ ID NO: 1493629 - RNA, 14 nt, Human
cucguguguuucua

SEQ ID NO: 1493630 - RNA, 21 nt, Human
cucucaauauucaauaaagcu

SEQ ID NO: 1493631 - RNA, 19 nt, Human
cucuauaccaauaaaguga

SEQ ID NO: 1493632 - RNA, 18 nt, Human
cucuauaccaauaaagug

SEQ ID NO: 1493633 - RNA, 14 nt, Human
cuccaagaauuucu

SEQ ID NO: 1493634 - RNA, 13 nt, Human
cuccaagaauuuc

SEQ ID NO: 1493635 - RNA, 14 nt, Human
cguaaaauuaagaa

SEQ ID NO: 1493636 - RNA, 13 nt, Human
cgugauccacccg

SEQ ID NO: 1493637 - RNA, 17 nt, Human
cgugauccacccgccuc

SEQ ID NO: 1493638 - RNA, 24 nt, Human
cgugauccacccgccucagccucc

SEQ ID NO: 1493639 - RNA, 14 nt, Human
cgugaucucagcuc

SEQ ID NO: 1493640 - RNA, 15 nt, Human
cgugaucucagcuca

SEQ ID NO: 1493641 - RNA, 19 nt, Human
cggaggaaggaggacccag

SEQ ID NO: 1493642 - RNA, 20 nt, Human
cggaggaaggaggacccagg

SEQ ID NO: 1493643 - RNA, 21 nt, Human
cggaggaaggaggacccagga

SEQ ID NO: 1493644 - RNA, 23 nt, Human
cggaggaaggaggacccaggaca

SEQ ID NO: 1493645 - RNA, 16 nt, Human
cgccuccaacccuagc

SEQ ID NO: 1493646 - RNA, 17 nt, Human
cgccuccaacccuagca

SEQ ID NO: 1493647 - RNA, 18 nt, Human
cgacugaaaauauuguuu

SEQ ID NO: 1493648 - RNA, 17 nt, Human
cgacugaaaauauuguu

SEQ ID NO: 1493649 - RNA, 14 nt, Human
cucaauucuucccu

SEQ ID NO: 1493650 - RNA, 19 nt, Human
cucaauucuucccuaucuu

SEQ ID NO: 1493651 - RNA, 16 nt, Human
cucaauauucaauaaa

SEQ ID NO: 1493652 - RNA, 17 nt, Human
cucaauauucaauaaag

SEQ ID NO: 1493653 - RNA, 18 nt, Human
cucaauauucaauaaagc

SEQ ID NO: 1493654 - RNA, 19 nt, Human
cucaauauucaauaaagcu

SEQ ID NO: 1493655 - RNA, 18 nt, Human
cucaaaccaaaucacuga

SEQ ID NO: 1493656 - RNA, 19 nt, Human
cucaaaccaaaucacugaa

SEQ ID NO: 1493657 - RNA, 22 nt, Human
cucaaaccaaaucacugaacuu

SEQ ID NO: 1493658 - RNA, 17 nt, Human
cuaucguaaaauuaaga

SEQ ID NO: 1493659 - RNA, 18 nt, Human
cuaucguaaaauuaagaa

SEQ ID NO: 1493660 - RNA, 23 nt, Human
cuagaauuugauaugugaacagu

SEQ ID NO: 1493661 - RNA, 14 nt, Human
cuaauucuaaugug

SEQ ID NO: 1493662 - RNA, 11 nt, Human
ccugaguccca

SEQ ID NO: 1493663 - RNA, 16 nt, Human
ccugagucccaucccu

SEQ ID NO: 1493664 - RNA, 16 nt, Human
ccugccuccccugccu

SEQ ID NO: 1493665 - RNA, 16 nt, Human
ccugccucccuucaug

SEQ ID NO: 1493666 - RNA, 20 nt, Human
ccugucugucugucuguccc

SEQ ID NO: 1493667 - RNA, 21 nt, Human
ccugucugucugucuguccca

SEQ ID NO: 1493668 - RNA, 22 nt, Human
ccugucugucugucugucccaa

SEQ ID NO: 1493669 - RNA, 19 nt, Human
ccuccaacccuagcaaaag

SEQ ID NO: 1493670 - RNA, 18 nt, Human
ccuccaacccuagcaaaa

SEQ ID NO: 1493671 - RNA, 18 nt, Human
ccucccauguucaagcga

SEQ ID NO: 1493672 - RNA, 23 nt, Human
ccucauggaauuggagcucgugg

SEQ ID NO: 1493673 - RNA, 14 nt, Human
cccuaucuuugcca

SEQ ID NO: 1493674 - RNA, 16 nt, Human
cccuaucuuugccacc

SEQ ID NO: 1493675 - RNA, 19 nt, Human
cccuaucuuugccacccuc

SEQ ID NO: 1493676 - RNA, 21 nt, Human
cccuaucuuugccacccucau

SEQ ID NO: 1493677 - RNA, 10 nt, Human
cccucacacu

SEQ ID NO: 1493678 - RNA, 12 nt, Human
cccucacacugg

SEQ ID NO: 1493679 - RNA, 13 nt, Human
cccucacacuggg

SEQ ID NO: 1493680 - RNA, 14 nt, Human
cccucacacuggga

SEQ ID NO: 1493681 - RNA, 15 nt, Human
ccagcuaauuuuugu

SEQ ID NO: 1493682 - RNA, 15 nt, Human
ccagggggcaagagg

SEQ ID NO: 1493683 - RNA, 14 nt, Human
ccauacauuugugu

SEQ ID NO: 1493684 - RNA, 13 nt, Human
ccauacauuugug

SEQ ID NO: 1493685 - RNA, 12 nt, Human
ccaucccugcgu

SEQ ID NO: 1493686 - RNA, 17 nt, Human
caauucuucccuaucuu

SEQ ID NO: 1493687 - RNA, 23 nt, Human
caaugcuguauuuuaaaagaaug

SEQ ID NO: 1493688 - RNA, 14 nt, Human
caaugcuguauuuu

SEQ ID NO: 1493689 - RNA, 21 nt, Human
caauauuucagauaaucacaa

SEQ ID NO: 1493690 - RNA, 20 nt, Human
caauauuucagauaaucaca

SEQ ID NO: 1493691 - RNA, 12 nt, Human
caauauuucaga

SEQ ID NO: 1493692 - RNA, 16 nt, Human
cacaagacugcacauc

SEQ ID NO: 1493693 - RNA, 20 nt, Human
caaguauuagaauaccacag

SEQ ID NO: 1493694 - RNA, 14 nt, Human
caaguauuagaaua

SEQ ID NO: 1493695 - RNA, 21 nt, Human
cacagggccuuuggcaggugc

SEQ ID NO: 1493696 - RNA, 14 nt, Human
cacuacacccagca

SEQ ID NO: 1493697 - RNA, 15 nt, Human
cacuacacccagcaa

SEQ ID NO: 1493698 - RNA, 16 nt, Human
cacuacacccagcaau

SEQ ID NO: 1493699 - RNA, 17 nt, Human
cacuacacccagcaaua

SEQ ID NO: 1493700 - RNA, 23 nt, Human
cacuacgccuggcugauuuuugu

SEQ ID NO: 1493701 - RNA, 20 nt, Human
cacggcagccacagcuuggg

SEQ ID NO: 1493702 - RNA, 14 nt, Human
cacuacaaccuccg

SEQ ID NO: 1493703 - RNA, 13 nt, Human
cacuacaaccucc

SEQ ID NO: 1493704 - RNA, 12 nt, Human
cacuacacccag

SEQ ID NO: 1493705 - RNA, 13 nt, Human
cacggcagccaca

SEQ ID NO: 1493706 - RNA, 17 nt, Human
cacucuugaaaaaugca

SEQ ID NO: 1493707 - RNA, 11 nt, Human
cacugaagaag

SEQ ID NO: 1493708 - RNA, 20 nt, Human
cacugaacuuugcugagccu

SEQ ID NO: 1493709 - RNA, 17 nt, Human
auuuuauagcuacuaau

SEQ ID NO: 1493710 - RNA, 20 nt, Human
caaaagcccauucauuccau

SEQ ID NO: 1493711 - RNA, 22 nt, Human
caaaagcccauucauuccauuc

SEQ ID NO: 1493712 - RNA, 17 nt, Human
caaaccaaaucacugaa

SEQ ID NO: 1493713 - RNA, 19 nt, Human
caaaccacuuuuugcagcu

SEQ ID NO: 1493714 - RNA, 17 nt, Human
caaaccacuuuuugcag

SEQ ID NO: 1493715 - RNA, 21 nt, Human
caacuaucucauuuccaagca

SEQ ID NO: 1493716 - RNA, 23 nt, Human
caagaauuucuaggacugaauua

SEQ ID NO: 1493717 - RNA, 22 nt, Human
caaauccagccugcugccugcu

SEQ ID NO: 1493718 - RNA, 16 nt, Human
auuucagcagcugcag

SEQ ID NO: 1493719 - RNA, 20 nt, Human
auuucuaugaaauauuaugu

SEQ ID NO: 1493720 - RNA, 18 nt, Human
auuucuaugaaauauuau

SEQ ID NO: 1493721 - RNA, 15 nt, Human
auuucuaugaaauau

SEQ ID NO: 1493722 - RNA, 23 nt, Human
auuguaauaggcguaacuaauuu

SEQ ID NO: 1493723 - RNA, 18 nt, Human
auugaugggauuugguca

SEQ ID NO: 1493724 - RNA, 18 nt, Human
auugauccagaaagaaaa

SEQ ID NO: 1493725 - RNA, 19 nt, Human
auugauccagaaagaaaac

SEQ ID NO: 1493726 - RNA, 22 nt, Human
auugauccagaaagaaaacuug

SEQ ID NO: 1493727 - RNA, 15 nt, Human
auuauguguguuuua

SEQ ID NO: 1493728 - RNA, 20 nt, Human
auuauguguguuuuaaaaug

SEQ ID NO: 1493729 - RNA, 21 nt, Human
auuauguguguuuuaaaauga

SEQ ID NO: 1493730 - RNA, 17 nt, Human
auucuugccaaauauaa

SEQ ID NO: 1493731 - RNA, 13 nt, Human
auuccugaacagg

SEQ ID NO: 1493732 - RNA, 20 nt, Human
auugagaaaaauauauacua

SEQ ID NO: 1493733 - RNA, 16 nt, Human
auugauccagaaagaa

SEQ ID NO: 1493734 - RNA, 17 nt, Human
auugauccagaaagaaa

SEQ ID NO: 1493735 - RNA, 20 nt, Human
cauuuguguugaagagguuu

SEQ ID NO: 1493736 - RNA, 18 nt, Human
cauuuuuugggcagcaau

SEQ ID NO: 1493737 - RNA, 19 nt, Human
cauuuuuugggcagcaauu

SEQ ID NO: 1493738 - RNA, 22 nt, Human
cauuuuuugggcagcaauuuaa

SEQ ID NO: 1493739 - RNA, 16 nt, Human
cauuuguguugaagag

SEQ ID NO: 1493740 - RNA, 20 nt, Human
cauuuguauaaaauaauuuu

SEQ ID NO: 1493741 - RNA, 19 nt, Human
cauuuguauaaaauaauuu

SEQ ID NO: 1493742 - RNA, 14 nt, Human
ccacagcugccucu

SEQ ID NO: 1493743 - RNA, 15 nt, Human
ccaccgcagaaggaa

SEQ ID NO: 1493744 - RNA, 16 nt, Human
ccaccgcagaaggaag

SEQ ID NO: 1493745 - RNA, 12 nt, Human
cauccuggaaua

SEQ ID NO: 1493746 - RNA, 12 nt, Human
caucuggaacca

SEQ ID NO: 1493747 - RNA, 17 nt, Human
caucuggaaccaucaga

SEQ ID NO: 1493748 - RNA, 19 nt, Human
caucuggaaccaucagaaa

SEQ ID NO: 1493749 - RNA, 19 nt, Human
cauuauauuuauuacugua

SEQ ID NO: 1493750 - RNA, 13 nt, Human
cauuauaaaaaga

SEQ ID NO: 1493751 - RNA, 14 nt, Human
caugauguuuagaa

SEQ ID NO: 1493752 - RNA, 20 nt, Human
caugcucuccaaaccacuuu

SEQ ID NO: 1493753 - RNA, 13 nt, Human
cagcauaauacuu

SEQ ID NO: 1493754 - RNA, 21 nt, Human
cagaguaauccaagcaaaugu

SEQ ID NO: 1493755 - RNA, 12 nt, Human
cagauccuggaa

SEQ ID NO: 1493756 - RNA, 13 nt, Human
cagauccuggaaa

SEQ ID NO: 1493757 - RNA, 23 nt, Human
caguaaagaacaucccuccuggg

SEQ ID NO: 1493758 - RNA, 19 nt, Human
cagucaccucauggaauug

SEQ ID NO: 1493759 - RNA, 16 nt, Human
cagucaccucauggaa

SEQ ID NO: 1493760 - RNA, 21 nt, Human
cagugggaggugagaccaccu

SEQ ID NO: 1493761 - RNA, 14 nt, Human
caguggggaaugaa

SEQ ID NO: 1493762 - RNA, 22 nt, Human
cagugggaggugagaccaccuc

SEQ ID NO: 1493763 - RNA, 20 nt, Human
cagucugacuguuuccauca

SEQ ID NO: 1493764 - RNA, 16 nt, Human
caggcacacaccacca

SEQ ID NO: 1493765 - RNA, 18 nt, Human
ggcauuuuacuguacaga

SEQ ID NO: 1493766 - RNA, 16 nt, Human
ggccagaccauggaca

SEQ ID NO: 1493767 - RNA, 17 nt, Human
ggcaucaucucagcuca

SEQ ID NO: 1493768 - RNA, 23 nt, Human
ggcaucaucucagcucacugcaa

SEQ ID NO: 1493769 - RNA, 15 nt, Human
ggaggcucuggagcc

SEQ ID NO: 1493770 - RNA, 14 nt, Human
ggauuguaguccca

SEQ ID NO: 1493771 - RNA, 10 nt, Human
aaaaaacuac

SEQ ID NO: 1493772 - RNA, 16 nt, Human
aaaaaggacaucagca

SEQ ID NO: 1493773 - RNA, 14 nt, Human
aaaaauaaaaaaca

SEQ ID NO: 1493774 - RNA, 17 nt, Human
ggccccugccucucugc

SEQ ID NO: 1493775 - RNA, 18 nt, Human
ggccccugccucucugca

SEQ ID NO: 1493776 - RNA, 19 nt, Human
ggccccugccucucugcag

SEQ ID NO: 1493777 - RNA, 21 nt, Human
ggccccugccucucugcaggu

SEQ ID NO: 1493778 - RNA, 20 nt, Human
ggcuaagcuucacuguaaaa

SEQ ID NO: 1493779 - RNA, 23 nt, Human
ggcgugaucucagcucacugcaa

SEQ ID NO: 1493780 - RNA, 14 nt, Human
ggcuaccaggaaag

SEQ ID NO: 1493781 - RNA, 17 nt, Human
ggcuagacuagucucaa

SEQ ID NO: 1493782 - RNA, 13 nt, Human
gggccaggcuggg

SEQ ID NO: 1493783 - RNA, 15 nt, Human
aaaauggucucuaac

SEQ ID NO: 1493784 - RNA, 17 nt, Human
aaaaggacaucagcaaa

SEQ ID NO: 1493785 - RNA, 19 nt, Human
aaaaggacaucagcaaaca

SEQ ID NO: 1493786 - RNA, 12 nt, Human
aaaauacauugu

SEQ ID NO: 1493787 - RNA, 20 nt, Human
aaaauaauuuuuauauuuga

SEQ ID NO: 1493788 - RNA, 17 nt, Human
aaaauaauuuuuauauu

SEQ ID NO: 1493789 - RNA, 16 nt, Human
aaaauaauuuuuauau

SEQ ID NO: 1493790 - RNA, 11 nt, Human
aaaauaauuuu

SEQ ID NO: 1493791 - RNA, 11 nt, Human
aaaaugagaaa

SEQ ID NO: 1493792 - RNA, 12 nt, Human
aaaaugagaaau

SEQ ID NO: 1493793 - RNA, 20 nt, Human
aaaauauuguuuuacaauag

SEQ ID NO: 1493794 - RNA, 19 nt, Human
aaaauauuguuuuacaaua

SEQ ID NO: 1493795 - RNA, 16 nt, Human
aaaccuuccacccagu

SEQ ID NO: 1493796 - RNA, 23 nt, Human
aaaccuuccacccagugcugaau

SEQ ID NO: 1493797 - RNA, 20 nt, Human
aaaccacuuuuugcagcuuu

SEQ ID NO: 1493798 - RNA, 10 nt, Human
aaaccacuuu

SEQ ID NO: 1493799 - RNA, 22 nt, Human
gguaaaucagacuaugaaguuu

SEQ ID NO: 1493800 - RNA, 16 nt, Human
gguaugaacuugagga

SEQ ID NO: 1493801 - RNA, 19 nt, Human
gguaugaacuugaggacac

SEQ ID NO: 1493802 - RNA, 20 nt, Human
gguaugaacuugaggacaca

SEQ ID NO: 1493803 - RNA, 14 nt, Human
ggucagugcaaaua

SEQ ID NO: 1493804 - RNA, 15 nt, Human
guaauuuuuuucacc

SEQ ID NO: 1493805 - RNA, 13 nt, Human
guaaguuuuuuga

SEQ ID NO: 1493806 - RNA, 13 nt, Human
guaaaccuuuuau

SEQ ID NO: 1493807 - RNA, 21 nt, Human
guaaagcccauuuuuaaaaua

SEQ ID NO: 1493808 - RNA, 18 nt, Human
guacacaauaagcaaaaa

SEQ ID NO: 1493809 - RNA, 20 nt, Human
guacacaauaagcaaaaaca

SEQ ID NO: 1493810 - RNA, 16 nt, Human
aaauauauacuaaaca

SEQ ID NO: 1493811 - RNA, 12 nt, Human
aaauauauacua

SEQ ID NO: 1493812 - RNA, 21 nt, Human
aaauacgugggcauucaaaug

SEQ ID NO: 1493813 - RNA, 20 nt, Human
aaauacgugggcauucaaau

SEQ ID NO: 1493814 - RNA, 22 nt, Human
aaauaucacuugucaauaaaau

SEQ ID NO: 1493815 - RNA, 16 nt, Human
aaauauauuuuaagac

SEQ ID NO: 1493816 - RNA, 22 nt, Human
aaauauauuuuaagacgaaaca

SEQ ID NO: 1493817 - RNA, 18 nt, Human
aaauauaugcuaagucuu

SEQ ID NO: 1493818 - RNA, 14 nt, Human
aaauauauaucaaa

SEQ ID NO: 1493819 - RNA, 17 nt, Human
aaagcagccuggccaac

SEQ ID NO: 1493820 - RNA, 14 nt, Human
aaagcuguguggca

SEQ ID NO: 1493821 - RNA, 14 nt, Human
gguggcagcaacaa

SEQ ID NO: 1493822 - RNA, 13 nt, Human
gguggcagcaaca

SEQ ID NO: 1493823 - RNA, 22 nt, Human
aaagggcuguuauaaucuuuca

SEQ ID NO: 1493824 - RNA, 20 nt, Human
aaagggcuguuauaaucuuu

SEQ ID NO: 1493825 - RNA, 18 nt, Human
aaagguucaugcaaacuu

SEQ ID NO: 1493826 - RNA, 21 nt, Human
aaaguaaaaacaaagaaauua

SEQ ID NO: 1493827 - RNA, 17 nt, Human
aaaguauguuagugcaa

SEQ ID NO: 1493828 - RNA, 17 nt, Human
gguuuucacauuggaaa

SEQ ID NO: 1493829 - RNA, 21 nt, Human
gcuuuucccuuuuuuuaagua

SEQ ID NO: 1493830 - RNA, 20 nt, Human
gcuuuucccuuuuuuuaagu

SEQ ID NO: 1493831 - RNA, 16 nt, Human
gcuuuucccaaaagcc

SEQ ID NO: 1493832 - RNA, 16 nt, Human
ggaaaaaauaacaaug

SEQ ID NO: 1493833 - RNA, 19 nt, Human
ggaaagcagccuggccaac

SEQ ID NO: 1493834 - RNA, 23 nt, Human
ggaaagcgccuccaacccuagca

SEQ ID NO: 1493835 - RNA, 19 nt, Human
ggaaagcgccuccaacccu

SEQ ID NO: 1493836 - RNA, 19 nt, Human
ggaaaucaggguuaguauu

SEQ ID NO: 1493837 - RNA, 19 nt, Human
ggaauacucuuauaucuau

SEQ ID NO: 1493838 - RNA, 12 nt, Human
ggacacaugucc

SEQ ID NO: 1493839 - RNA, 13 nt, Human
ggacacaugucca

SEQ ID NO: 1493840 - RNA, 19 nt, Human
ggacacauguccaguggga

SEQ ID NO: 1493841 - RNA, 14 nt, Human
ggacaccugcccug

SEQ ID NO: 1493842 - RNA, 15 nt, Human
ggacaccugcccugc

SEQ ID NO: 1493843 - RNA, 13 nt, Human
ggacaccugcccu

SEQ ID NO: 1493844 - RNA, 10 nt, Human
ggacaccugc

SEQ ID NO: 1493845 - RNA, 11 nt, Human
ggacaccugcc

SEQ ID NO: 1493846 - RNA, 12 nt, Human
ggacaccugccc

SEQ ID NO: 1493847 - RNA, 21 nt, Human
ggacagucaccucauggaauu

SEQ ID NO: 1493848 - RNA, 18 nt, Human
ggacagucaccucaugga

SEQ ID NO: 1493849 - RNA, 17 nt, Human
ggacagucaccucaugg

SEQ ID NO: 1493850 - RNA, 12 nt, Human
ggacaucagcaa

SEQ ID NO: 1493851 - RNA, 14 nt, Human
ggacaucagcaaac

SEQ ID NO: 1493852 - RNA, 15 nt, Human
ggacaucagcaaaca

SEQ ID NO: 1493853 - RNA, 18 nt, Human
gcugggccccugccucuc

SEQ ID NO: 1493854 - RNA, 20 nt, Human
gcugggccccugccucucug

SEQ ID NO: 1493855 - RNA, 12 nt, Human
gcugggccccug

SEQ ID NO: 1493856 - RNA, 13 nt, Human
gcugggccccugc

SEQ ID NO: 1493857 - RNA, 14 nt, Human
gcugggccccugcc

SEQ ID NO: 1493858 - RNA, 21 nt, Human
gcugggaauggaggggcagag

SEQ ID NO: 1493859 - RNA, 21 nt, Human
gcuguauuuuaaaagaaugau

SEQ ID NO: 1493860 - RNA, 18 nt, Human
gcuguauuuuaaaagaau

SEQ ID NO: 1493861 - RNA, 20 nt, Human
gcuguauuuuaaaagaauga

SEQ ID NO: 1493862 - RNA, 18 nt, Human
gcugccucuucccucuuc

SEQ ID NO: 1493863 - RNA, 14 nt, Human
gcugccucuucccu

SEQ ID NO: 1493864 - RNA, 20 nt, Human
gcugccccuggugcacuggc

SEQ ID NO: 1493865 - RNA, 19 nt, Human
gccuucucuaaacauuuca

SEQ ID NO: 1493866 - RNA, 20 nt, Human
gcuaaguacacaauaagcaa

SEQ ID NO: 1493867 - RNA, 21 nt, Human
gcuaaguacacaauaagcaaa

SEQ ID NO: 1493868 - RNA, 22 nt, Human
gcuaaguacacaauaagcaaaa

SEQ ID NO: 1493869 - RNA, 21 nt, Human
gcuaggaauuguguuuauaau

SEQ ID NO: 1493870 - RNA, 22 nt, Human
gcucaggagcccugggaggcuc

SEQ ID NO: 1493871 - RNA, 23 nt, Human
gcucaggagcccugggaggcucu

SEQ ID NO: 1493872 - RNA, 16 nt, Human
gcucagagcaguguuu

SEQ ID NO: 1493873 - RNA, 20 nt, Human
gcccugccaccugucugucu

SEQ ID NO: 1493874 - RNA, 18 nt, Human
gcccugccaccugucugu

SEQ ID NO: 1493875 - RNA, 15 nt, Human
gccggaucugaggga

SEQ ID NO: 1493876 - RNA, 17 nt, Human
gccggaucugagggaga

SEQ ID NO: 1493877 - RNA, 15 nt, Human
gcccacuguacuugc

SEQ ID NO: 1493878 - RNA, 20 nt, Human
gcccacuguacuugcucuug

SEQ ID NO: 1493879 - RNA, 22 nt, Human
gcccacuguacuugcucuugau

SEQ ID NO: 1493880 - RNA, 12 nt, Human
gcauuuagaugu

SEQ ID NO: 1493881 - RNA, 13 nt, Human
gcauuuagaugua

SEQ ID NO: 1493882 - RNA, 20 nt, Human
gacauuuuaaaaaaugguca

SEQ ID NO: 1493883 - RNA, 13 nt, Human
gacauuuuacauu

SEQ ID NO: 1493884 - RNA, 14 nt, Human
gacauuuuacauua

SEQ ID NO: 1493885 - RNA, 15 nt, Human
gacauuuuacauuaa

SEQ ID NO: 1493886 - RNA, 21 nt, Human
gacauuuuacauuaaauuuuu

SEQ ID NO: 1493887 - RNA, 18 nt, Human
gacagucaccucauggaa

SEQ ID NO: 1493888 - RNA, 22 nt, Human
gaauaucuccgucaacucauau

SEQ ID NO: 1493889 - RNA, 11 nt, Human
gaauaugccuu

SEQ ID NO: 1493890 - RNA, 14 nt, Human
gaauuaugaaacuu

SEQ ID NO: 1493891 - RNA, 14 nt, Human
gacaaaaagcuacu

SEQ ID NO: 1493892 - RNA, 20 nt, Human
gaauuacauuuguauaaaau

SEQ ID NO: 1493893 - RNA, 15 nt, Human
gaauuacgugcucug

SEQ ID NO: 1493894 - RNA, 19 nt, Human
gaauuacgugcucuguggg

SEQ ID NO: 1493895 - RNA, 18 nt, Human
gaauuacauuuguauaaa

SEQ ID NO: 1493896 - RNA, 15 nt, Human
gaauuacauuuguau

SEQ ID NO: 1493897 - RNA, 13 nt, Human
gaauuacauuugu

SEQ ID NO: 1493898 - RNA, 22 nt, Human
gaaugauuaugaauuacauuug

SEQ ID NO: 1493899 - RNA, 14 nt, Human
gaaugauuaugaau

SEQ ID NO: 1493900 - RNA, 22 nt, Human
gagcuggagaugaggccagacc

SEQ ID NO: 1493901 - RNA, 23 nt, Human
gagcuggagaugaggccagacca

SEQ ID NO: 1493902 - RNA, 21 nt, Human
gagcuggagaugaggccagac

SEQ ID NO: 1493903 - RNA, 14 nt, Human
gagcagucaggaaa

SEQ ID NO: 1493904 - RNA, 12 nt, Human
gagcccugggag

SEQ ID NO: 1493905 - RNA, 16 nt, Human
gagcccugggaggcuc

SEQ ID NO: 1493906 - RNA, 18 nt, Human
gagcccugggaggcucug

SEQ ID NO: 1493907 - RNA, 19 nt, Human
gagcccugggaggcucugg

SEQ ID NO: 1493908 - RNA, 20 nt, Human
gagcccugggaggcucugga

SEQ ID NO: 1493909 - RNA, 13 nt, Human
gaggggcagagcc

SEQ ID NO: 1493910 - RNA, 20 nt, Human
gaggggcagagccaggaaga

SEQ ID NO: 1493911 - RNA, 16 nt, Human
gaggggcagagccagg

SEQ ID NO: 1493912 - RNA, 20 nt, Human
gaggcucuggagcccacugu

SEQ ID NO: 1493913 - RNA, 14 nt, Human
gaggacccaggaca

SEQ ID NO: 1493914 - RNA, 15 nt, Human
gaggacccaggacag

SEQ ID NO: 1493915 - RNA, 22 nt, Human
gacuuuuuauggcacuaguauu

SEQ ID NO: 1493916 - RNA, 13 nt, Human
gagaaggagcaga

SEQ ID NO: 1493917 - RNA, 23 nt, Human
gagacgggacugcggaggaagga

SEQ ID NO: 1493918 - RNA, 19 nt, Human
gcagagcugauggagaagg

SEQ ID NO: 1493919 - RNA, 21 nt, Human
gcagagcugauggagaaggaa

SEQ ID NO: 1493920 - RNA, 22 nt, Human
gcagagcugauggagaaggaag

SEQ ID NO: 1493921 - RNA, 23 nt, Human
gcagagcugauggagaaggaagg

SEQ ID NO: 1493922 - RNA, 17 nt, Human
gcagucucuauaccaau

SEQ ID NO: 1493923 - RNA, 18 nt, Human
gcagucucuauaccaaua

SEQ ID NO: 1493924 - RNA, 20 nt, Human
gcagucucuauaccaauaaa

SEQ ID NO: 1493925 - RNA, 21 nt, Human
gcagucucuauaccaauaaag

SEQ ID NO: 1493926 - RNA, 22 nt, Human
gcagucucuauaccaauaaagu

SEQ ID NO: 1493927 - RNA, 23 nt, Human
gcagucucuauaccaauaaagug

SEQ ID NO: 1493928 - RNA, 22 nt, Human
gcaguuguugcccacagcugua

SEQ ID NO: 1493929 - RNA, 11 nt, Human
gcauccagccu

SEQ ID NO: 1493930 - RNA, 21 nt, Human
gcaucccucacccauccuaga

SEQ ID NO: 1493931 - RNA, 20 nt, Human
gcaucuagcaugucgucaaa

SEQ ID NO: 1493932 - RNA, 12 nt, Human
gauacugaaaua

SEQ ID NO: 1493933 - RNA, 12 nt, Human
gauccacccgcc

SEQ ID NO: 1493934 - RNA, 13 nt, Human
gaucugagggaga

SEQ ID NO: 1493935 - RNA, 18 nt, Human
gauccacucgccucagcc

SEQ ID NO: 1493936 - RNA, 21 nt, Human
gauccacccgccucagccucc

SEQ ID NO: 1493937 - RNA, 15 nt, Human
gcaaaaacaaaaaga

SEQ ID NO: 1493938 - RNA, 20 nt, Human
gcaaaaacaaaaagaaaaga

SEQ ID NO: 1493939 - RNA, 21 nt, Human
gcaaaaacaaaaagaaaagaa

SEQ ID NO: 1493940 - RNA, 23 nt, Human
cuggaaaaguauguuagugcaaa

SEQ ID NO: 1493941 - RNA, 17 nt, Human
cuggaaaccuuccaccc

SEQ ID NO: 1493942 - RNA, 20 nt, Human
cuggaaaccuuccacccagu

SEQ ID NO: 1493943 - RNA, 21 nt, Human
cuguacuugcucuugaugccu

SEQ ID NO: 1493944 - RNA, 16 nt, Human
cuguacuugcucuuga

SEQ ID NO: 1493945 - RNA, 19 nt, Human
cuguacuugcucuugaugc

SEQ ID NO: 1493946 - RNA, 20 nt, Human
cuguacuugcucuugaugcc

SEQ ID NO: 1493947 - RNA, 20 nt, Human
cuguaagaaaauaucacuug

SEQ ID NO: 1493948 - RNA, 20 nt, Human
cugucuacacuaagagagaa

SEQ ID NO: 1493949 - RNA, 22 nt, Human
cuuaaaauaaugaauacauuuc

SEQ ID NO: 1493950 - RNA, 23 nt, Human
gaaacuucagcgguuuauauaag

SEQ ID NO: 1493951 - RNA, 16 nt, Human
gaaagaacggaagaag

SEQ ID NO: 1493952 - RNA, 19 nt, Human
cuuuuaugugaaacauguu

SEQ ID NO: 1493953 - RNA, 13 nt, Human
gaaaauuuuugua

SEQ ID NO: 1493954 - RNA, 16 nt, Human
gaaaauuuuuguagua

SEQ ID NO: 1493955 - RNA, 18 nt, Human
gaaaacuuguauuaugug

SEQ ID NO: 1493956 - RNA, 14 nt, Human
gaaaauuaacauga

SEQ ID NO: 1493957 - RNA, 15 nt, Human
gaaaagcagacauuu

SEQ ID NO: 1493958 - RNA, 16 nt, Human
gaaaagcagacauuuu

SEQ ID NO: 1493959 - RNA, 14 nt, Human
gaaaaaauauauau

SEQ ID NO: 1493960 - RNA, 15 nt, Human
cuucuauacccaccc

SEQ ID NO: 1493961 - RNA, 18 nt, Human
cuucuauacccacccaga

SEQ ID NO: 1493962 - RNA, 17 nt, Human
cuucuauacccacccag

SEQ ID NO: 1493963 - RNA, 23 nt, Human
cuucccaaaguccugggauuaca

SEQ ID NO: 1493964 - RNA, 11 nt, Human
aaauguauacu

SEQ ID NO: 1493965 - RNA, 16 nt, Human
aaaucauucauuuucu

SEQ ID NO: 1493966 - RNA, 17 nt, Human
aaauuccaagugauuga

SEQ ID NO: 1493967 - RNA, 17 nt, Human
aaauuguauuacaaauc

SEQ ID NO: 1493968 - RNA, 12 nt, Human
aaauuacaacua

SEQ ID NO: 1493969 - RNA, 13 nt, Human
aaauuacaacuaa

SEQ ID NO: 1493970 - RNA, 16 nt, Human
aaauuaucuauagcua

SEQ ID NO: 1493971 - RNA, 17 nt, Human
aaauuaugugacauuuu

SEQ ID NO: 1493972 - RNA, 20 nt, Human
aaauuaugugacauuuuaca

SEQ ID NO: 1493973 - RNA, 22 nt, Human
aaauuaugugacauuuuacauu

SEQ ID NO: 1493974 - RNA, 23 nt, Human
aaauuaugugccagauuuaugca

SEQ ID NO: 1493975 - RNA, 14 nt, Human
gucaggaaagagaa

SEQ ID NO: 1493976 - RNA, 18 nt, Human
gucacauuccugaacagg

SEQ ID NO: 1493977 - RNA, 12 nt, Human
aacauauauaac

SEQ ID NO: 1493978 - RNA, 15 nt, Human
aacauaaaaaggaca

SEQ ID NO: 1493979 - RNA, 19 nt, Human
aacauaaaaaggacaucag

SEQ ID NO: 1493980 - RNA, 20 nt, Human
aacauaaaaaggacaucagc

SEQ ID NO: 1493981 - RNA, 22 nt, Human
aacauaaaaaggacaucagcaa

SEQ ID NO: 1493982 - RNA, 10 nt, Human
aacauuccau

SEQ ID NO: 1493983 - RNA, 13 nt, Human
aacauuccauccu

SEQ ID NO: 1493984 - RNA, 14 nt, Human
aacauuccauccuu

SEQ ID NO: 1493985 - RNA, 23 nt, Human
aacauuccauccuugagucaaaa

SEQ ID NO: 1493986 - RNA, 20 nt, Human
gucuauuuacggaacucaaa

SEQ ID NO: 1493987 - RNA, 12 nt, Human
aacacucaccau

SEQ ID NO: 1493988 - RNA, 21 nt, Human
aacacugggagaaaugaaaaa

SEQ ID NO: 1493989 - RNA, 15 nt, Human
gucccuaauaaagcu

SEQ ID NO: 1493990 - RNA, 12 nt, Human
gucccuaauaaa

SEQ ID NO: 1493991 - RNA, 18 nt, Human
gugacuuuggcugcaugc

SEQ ID NO: 1493992 - RNA, 20 nt, Human
gugacuuuggcugcaugcga

SEQ ID NO: 1493993 - RNA, 13 nt, Human
gugagaccaccuc

SEQ ID NO: 1493994 - RNA, 14 nt, Human
gugagaccaccucu

SEQ ID NO: 1493995 - RNA, 20 nt, Human
gugagaccaccucucaauau

SEQ ID NO: 1493996 - RNA, 21 nt, Human
aacuaggugcauauuuauaaa

SEQ ID NO: 1493997 - RNA, 12 nt, Human
aacuauggccug

SEQ ID NO: 1493998 - RNA, 15 nt, Human
aacgucuuaaauauu

SEQ ID NO: 1493999 - RNA, 14 nt, Human
aacgucuuaaauau

SEQ ID NO: 1494000 - RNA, 12 nt, Human
aacgucuuaaau

SEQ ID NO: 1494001 - RNA, 13 nt, Human
aaccuuccaccca

SEQ ID NO: 1494002 - RNA, 15 nt, Human
aaccuuccacccagu

SEQ ID NO: 1494003 - RNA, 19 nt, Human
gugccagauuuaugcauau

SEQ ID NO: 1494004 - RNA, 22 nt, Human
aagaaaauuuuuguaguagcgu

SEQ ID NO: 1494005 - RNA, 11 nt, Human
aagaaacauuu

SEQ ID NO: 1494006 - RNA, 22 nt, Human
aagaagcaccaaucaugaauua

SEQ ID NO: 1494007 - RNA, 18 nt, Human
gugcucaggagcccuggg

SEQ ID NO: 1494008 - RNA, 19 nt, Human
gugcucaggagcccuggga

SEQ ID NO: 1494009 - RNA, 16 nt, Human
gugcucauuucaggau

SEQ ID NO: 1494010 - RNA, 21 nt, Human
aacuucagcgguuuauauaag

SEQ ID NO: 1494011 - RNA, 18 nt, Human
aacuucagcgguuuauau

SEQ ID NO: 1494012 - RNA, 12 nt, Human
aacuugaggaca

SEQ ID NO: 1494013 - RNA, 13 nt, Human
aacuugaggacac

SEQ ID NO: 1494014 - RNA, 14 nt, Human
aacuugaggacaca

SEQ ID NO: 1494015 - RNA, 15 nt, Human
aacuugaggacacau

SEQ ID NO: 1494016 - RNA, 16 nt, Human
aacuugaggacacaug

SEQ ID NO: 1494017 - RNA, 17 nt, Human
aacuugaggacacaugu

SEQ ID NO: 1494018 - RNA, 18 nt, Human
aacuugaggacacauguc

SEQ ID NO: 1494019 - RNA, 19 nt, Human
aacuugaggacacaugucc

SEQ ID NO: 1494020 - RNA, 20 nt, Human
aacuugaggacacaugucca

SEQ ID NO: 1494021 - RNA, 13 nt, Human
gugcaccugcccc

SEQ ID NO: 1494022 - RNA, 14 nt, Human
gugaucucagcuca

SEQ ID NO: 1494023 - RNA, 11 nt, Human
uaaaacuaaga

SEQ ID NO: 1494024 - RNA, 11 nt, Human
uaaaaaggaca

SEQ ID NO: 1494025 - RNA, 18 nt, Human
uaaaaaggacaucagcaa

SEQ ID NO: 1494026 - RNA, 19 nt, Human
uaaaaaggacaucagcaaa

SEQ ID NO: 1494027 - RNA, 21 nt, Human
uaaaaaggacaucagcaaaca

SEQ ID NO: 1494028 - RNA, 17 nt, Human
uaaaaaggcuaaaugga

SEQ ID NO: 1494029 - RNA, 18 nt, Human
uaaaauagucucuuuaaa

SEQ ID NO: 1494030 - RNA, 16 nt, Human
uaaaagaaacccugca

SEQ ID NO: 1494031 - RNA, 17 nt, Human
uaaaagaaacccugcac

SEQ ID NO: 1494032 - RNA, 22 nt, Human
uaaaauaauuuuuauauuugaa

SEQ ID NO: 1494033 - RNA, 19 nt, Human
aaguuauuuuuaauuuggu

SEQ ID NO: 1494034 - RNA, 21 nt, Human
aaguucaccagacucuauaaa

SEQ ID NO: 1494035 - RNA, 20 nt, Human
aaguuccuuggccaugcaga

SEQ ID NO: 1494036 - RNA, 16 nt, Human
aaguuuccaucaucua

SEQ ID NO: 1494037 - RNA, 12 nt, Human
aaguguguguuu

SEQ ID NO: 1494038 - RNA, 16 nt, Human
aaguguguguuuuuca

SEQ ID NO: 1494039 - RNA, 21 nt, Human
aaguguguguuuuucauaaag

SEQ ID NO: 1494040 - RNA, 17 nt, Human
aagggcuguuauaaucu

SEQ ID NO: 1494041 - RNA, 15 nt, Human
aagggcuguuauaau

SEQ ID NO: 1494042 - RNA, 23 nt, Human
aaguaacugggauuacaggcaug

SEQ ID NO: 1494043 - RNA, 15 nt, Human
guuuuaaagcuucca

SEQ ID NO: 1494044 - RNA, 19 nt, Human
guuuggacaaaauggaaua

SEQ ID NO: 1494045 - RNA, 19 nt, Human
aaguacacaauaagcaaaa

SEQ ID NO: 1494046 - RNA, 16 nt, Human
aaguacacaauaagca

SEQ ID NO: 1494047 - RNA, 17 nt, Human
aaguacacaauaagcaa

SEQ ID NO: 1494048 - RNA, 18 nt, Human
aaguacacaauaagcaaa

SEQ ID NO: 1494049 - RNA, 21 nt, Human
aaguauguuagugcaaauugu

SEQ ID NO: 1494050 - RNA, 19 nt, Human
aaguauguuagugcaaauu

SEQ ID NO: 1494051 - RNA, 18 nt, Human
aaguauguuagugcaaau

SEQ ID NO: 1494052 - RNA, 19 nt, Human
guugacuuauaguacauga

SEQ ID NO: 1494053 - RNA, 24 nt, Human
guugacuuauaguacaugauaaau

SEQ ID NO: 1494054 - RNA, 18 nt, Human
guucccuugaugaagaag

SEQ ID NO: 1494055 - RNA, 19 nt, Human
aagcuuuuaugugaaacau

SEQ ID NO: 1494056 - RNA, 21 nt, Human
aagcuuuuaugugaaacaugu

SEQ ID NO: 1494057 - RNA, 23 nt, Human
aagcuuguauuccuuuuucucuc

SEQ ID NO: 1494058 - RNA, 18 nt, Human
aagcuuaugcuuaaauuc

SEQ ID NO: 1494059 - RNA, 22 nt, Human
aagccauucuccugccucagcc

SEQ ID NO: 1494060 - RNA, 19 nt, Human
guuauuauauuuacaaaug

SEQ ID NO: 1494061 - RNA, 20 nt, Human
guuauuauauuuacaaaugg

SEQ ID NO: 1494062 - RNA, 15 nt, Human
aagccuguuuaagag

SEQ ID NO: 1494063 - RNA, 18 nt, Human
aagccuguuuaagagaca

SEQ ID NO: 1494064 - RNA, 21 nt, Human
aagccuuggggcugaugcagu

SEQ ID NO: 1494065 - RNA, 23 nt, Human
aagcaugcacaaauucugucucu

SEQ ID NO: 1494066 - RNA, 16 nt, Human
aagcacuaaacaaaga

SEQ ID NO: 1494067 - RNA, 12 nt, Human
guguuugaagca

SEQ ID NO: 1494068 - RNA, 15 nt, Human
uagaugcaguucuga

SEQ ID NO: 1494069 - RNA, 16 nt, Human
uagaugcaguucugaa

SEQ ID NO: 1494070 - RNA, 18 nt, Human
uagcaugucgucaaagcu

SEQ ID NO: 1494071 - RNA, 14 nt, Human
uagccaagugcagg

SEQ ID NO: 1494072 - RNA, 18 nt, Human
acaaaaggauaaugaaua

SEQ ID NO: 1494073 - RNA, 21 nt, Human
aauuguguuuauaauuuuaaa

SEQ ID NO: 1494074 - RNA, 16 nt, Human
aauuguuacaaauugu

SEQ ID NO: 1494075 - RNA, 20 nt, Human
uagauaucaugcaaauuuca

SEQ ID NO: 1494076 - RNA, 15 nt, Human
uagcuaaguacacaa

SEQ ID NO: 1494077 - RNA, 22 nt, Human
uagcuaaguacacaauaagcaa

SEQ ID NO: 1494078 - RNA, 23 nt, Human
acaauacaucccuuaccugggaa

SEQ ID NO: 1494079 - RNA, 13 nt, Human
acaauaaauagac

SEQ ID NO: 1494080 - RNA, 15 nt, Human
acaauaagcaaaaac

SEQ ID NO: 1494081 - RNA, 16 nt, Human
acaauaagcaaaaaca

SEQ ID NO: 1494082 - RNA, 14 nt, Human
acaagacugcacau

SEQ ID NO: 1494083 - RNA, 13 nt, Human
acaagacugcaca

SEQ ID NO: 1494084 - RNA, 18 nt, Human
uaggaaauauuuauuuua

SEQ ID NO: 1494085 - RNA, 19 nt, Human
uaggaaauauuuauuuuaa

SEQ ID NO: 1494086 - RNA, 23 nt, Human
uaguguuggagaagaacugaaau

SEQ ID NO: 1494087 - RNA, 22 nt, Human
uagugaaacucguuaauuugua

SEQ ID NO: 1494088 - RNA, 22 nt, Human
acaaugcuguauuuuaaaagaa

SEQ ID NO: 1494089 - RNA, 19 nt, Human
acaauggauaggcacagga

SEQ ID NO: 1494090 - RNA, 22 nt, Human
acaauguccuaacugaaagaug

SEQ ID NO: 1494091 - RNA, 17 nt, Human
acacaccaccacgccug

SEQ ID NO: 1494092 - RNA, 20 nt, Human
acacaccaccacgccuggcu

SEQ ID NO: 1494093 - RNA, 19 nt, Human
uauaaaaauaaaaaacacu

SEQ ID NO: 1494094 - RNA, 20 nt, Human
uauaaaagccuguuuaagag

SEQ ID NO: 1494095 - RNA, 22 nt, Human
uauaaaagggacugagaaauuu

SEQ ID NO: 1494096 - RNA, 15 nt, Human
acacaugaaguccaa

SEQ ID NO: 1494097 - RNA, 16 nt, Human
acacccucacacuggg

SEQ ID NO: 1494098 - RNA, 13 nt, Human
acacccucacacu

SEQ ID NO: 1494099 - RNA, 23 nt, Human
acaccugcccugcccugccaccu

SEQ ID NO: 1494100 - RNA, 14 nt, Human
acacuaagagagaa

SEQ ID NO: 1494101 - RNA, 13 nt, Human
acacuaagagaga

SEQ ID NO: 1494102 - RNA, 15 nt, Human
uauaaguguguguuu

SEQ ID NO: 1494103 - RNA, 14 nt, Human
uauuacuguaagaa

SEQ ID NO: 1494104 - RNA, 15 nt, Human
uauuagaauaccaca

SEQ ID NO: 1494105 - RNA, 23 nt, Human
uauucaaaaauuaucuauagcua

SEQ ID NO: 1494106 - RNA, 14 nt, Human
uauucauaauuauu

SEQ ID NO: 1494107 - RNA, 12 nt, Human
uauucaauaaag

SEQ ID NO: 1494108 - RNA, 13 nt, Human
uauucaauaaagc

SEQ ID NO: 1494109 - RNA, 14 nt, Human
uauucaauaaagcu

SEQ ID NO: 1494110 - RNA, 16 nt, Human
uauucaauucuuuuaa

SEQ ID NO: 1494111 - RNA, 21 nt, Human
uauucagcucauggacuucug

SEQ ID NO: 1494112 - RNA, 18 nt, Human
acagucaccucauggaau

SEQ ID NO: 1494113 - RNA, 17 nt, Human
acagucaccucauggaa

SEQ ID NO: 1494114 - RNA, 16 nt, Human
acagucaccucaugga

SEQ ID NO: 1494115 - RNA, 16 nt, Human
acaggcaugugucacc

SEQ ID NO: 1494116 - RNA, 19 nt, Human
acaggcaugugucaccaug

SEQ ID NO: 1494117 - RNA, 14 nt, Human
uaugugaaacaugu

SEQ ID NO: 1494118 - RNA, 21 nt, Human
uaugugacauuuuacauuaaa

SEQ ID NO: 1494119 - RNA, 19 nt, Human
uaugugacauuuuacauua

SEQ ID NO: 1494120 - RNA, 23 nt, Human
uaugugccagauuuaugcauauu

SEQ ID NO: 1494121 - RNA, 22 nt, Human
uaugugaacaguuguguuugaa

SEQ ID NO: 1494122 - RNA, 12 nt, Human
uaugugaacagu

SEQ ID NO: 1494123 - RNA, 17 nt, Human
uaugugaaacauguuuc

SEQ ID NO: 1494124 - RNA, 14 nt, Human
uaugugacauuuua

SEQ ID NO: 1494125 - RNA, 18 nt, Human
uaugugacauuuuacauu

SEQ ID NO: 1494126 - RNA, 20 nt, Human
uauguguaugcacaguaaaa

SEQ ID NO: 1494127 - RNA, 12 nt, Human
uauauuacaaug

SEQ ID NO: 1494128 - RNA, 13 nt, Human
uauauuacaauga

SEQ ID NO: 1494129 - RNA, 17 nt, Human
uauauuacaaugaucac

SEQ ID NO: 1494130 - RNA, 15 nt, Human
uauauuguuugcuaa

SEQ ID NO: 1494131 - RNA, 16 nt, Human
uauauuuaguaucuuu

SEQ ID NO: 1494132 - RNA, 17 nt, Human
uauaaguguguguuuuu

SEQ ID NO: 1494133 - RNA, 23 nt, Human
uauaaguguguguuuuucauaaa

SEQ ID NO: 1494134 - RNA, 23 nt, Human
uaucuauauuuuacauaaauuua

SEQ ID NO: 1494135 - RNA, 11 nt, Human
uaucuuugcca

SEQ ID NO: 1494136 - RNA, 14 nt, Human
uaucuuugccaccc

SEQ ID NO: 1494137 - RNA, 16 nt, Human
uaucuuugccacccuc

SEQ ID NO: 1494138 - RNA, 22 nt, Human
uaucuuugccacccucaugcug

SEQ ID NO: 1494139 - RNA, 21 nt, Human
uaugauuaaguaaugauaacu

SEQ ID NO: 1494140 - RNA, 20 nt, Human
uaugauuaaguaaugauaac

SEQ ID NO: 1494141 - RNA, 16 nt, Human
uaugauuaaguaauga

SEQ ID NO: 1494142 - RNA, 16 nt, Human
uaugaacuugaggaca

SEQ ID NO: 1494143 - RNA, 18 nt, Human
uaugaacuugaggacaca

SEQ ID NO: 1494144 - RNA, 16 nt, Human
uaugccuuguuucaua

SEQ ID NO: 1494145 - RNA, 19 nt, Human
uaugccccauucaacaucu

SEQ ID NO: 1494146 - RNA, 16 nt, Human
acagccucuuagaugc

SEQ ID NO: 1494147 - RNA, 12 nt, Human
uacuauaguacc

SEQ ID NO: 1494148 - RNA, 13 nt, Human
uacuauaguacca

SEQ ID NO: 1494149 - RNA, 16 nt, Human
uacuauaguaccagua

SEQ ID NO: 1494150 - RNA, 19 nt, Human
uacuguaaggcaaucaugg

SEQ ID NO: 1494151 - RNA, 14 nt, Human
uacuguaagaaaau

SEQ ID NO: 1494152 - RNA, 18 nt, Human
uacuguaaggcaaucaug

SEQ ID NO: 1494153 - RNA, 19 nt, Human
aauugaugggauuugguca

SEQ ID NO: 1494154 - RNA, 18 nt, Human
aauuccaagugauugaaa

SEQ ID NO: 1494155 - RNA, 16 nt, Human
aauuauuauuuggccc

SEQ ID NO: 1494156 - RNA, 14 nt, Human
aauuacaacuaagu

SEQ ID NO: 1494157 - RNA, 16 nt, Human
aauuacaacuaaguga

SEQ ID NO: 1494158 - RNA, 18 nt, Human
aauuacaacggagucaaa

SEQ ID NO: 1494159 - RNA, 14 nt, Human
aauuacgugcucug

SEQ ID NO: 1494160 - RNA, 16 nt, Human
aaugcuguauuuuaaa

SEQ ID NO: 1494161 - RNA, 16 nt, Human
aaugcuucaucccuuu

SEQ ID NO: 1494162 - RNA, 18 nt, Human
uacacuaagagagaauga

SEQ ID NO: 1494163 - RNA, 14 nt, Human
uacacuaagagaga

SEQ ID NO: 1494164 - RNA, 15 nt, Human
aauuaagagagucua

SEQ ID NO: 1494165 - RNA, 21 nt, Human
aauuaagaaaggauaaaguug

SEQ ID NO: 1494166 - RNA, 17 nt, Human
aauuaauuccuucagca

SEQ ID NO: 1494167 - RNA, 20 nt, Human
uacaucccuuaccugggaaa

SEQ ID NO: 1494168 - RNA, 22 nt, Human
aauguauuacaguggggaauga

SEQ ID NO: 1494169 - RNA, 19 nt, Human
aauguauacuauaguacca

SEQ ID NO: 1494170 - RNA, 12 nt, Human
aauccgcccauc

SEQ ID NO: 1494171 - RNA, 19 nt, Human
aaucuuauaauuuaaaaua

SEQ ID NO: 1494172 - RNA, 19 nt, Human
uaaguaaugauaacuggaa

SEQ ID NO: 1494173 - RNA, 16 nt, Human
uaagcuuguauuccuu

SEQ ID NO: 1494174 - RNA, 15 nt, Human
uaagcuuaugcuuaa

SEQ ID NO: 1494175 - RNA, 15 nt, Human
aaucaugaauuaguu

SEQ ID NO: 1494176 - RNA, 12 nt, Human
aaucaugaauua

SEQ ID NO: 1494177 - RNA, 12 nt, Human
uaauaaacacuc

SEQ ID NO: 1494178 - RNA, 18 nt, Human
uaauaaacacucuugaaa

SEQ ID NO: 1494179 - RNA, 12 nt, Human
uaauccaguaaa

SEQ ID NO: 1494180 - RNA, 15 nt, Human
aaucuuuaauuuuac

SEQ ID NO: 1494181 - RNA, 16 nt, Human
aaucuuuaauuuuaca

SEQ ID NO: 1494182 - RNA, 23 nt, Human
uaagcaaaaacaaaaagaaaaga

SEQ ID NO: 1494183 - RNA, 16 nt, Human
uaagcuggagugcagu

SEQ ID NO: 1494184 - RNA, 21 nt, Human
aaucaggguuaguauugucca

SEQ ID NO: 1494185 - RNA, 16 nt, Human
aaucaggguuaguauu

SEQ ID NO: 1494186 - RNA, 22 nt, Human
aaucaggguuaguauuguccag

SEQ ID NO: 1494187 - RNA, 24 nt, Human
aauaugccccauucaacaucuagu

SEQ ID NO: 1494188 - RNA, 21 nt, Human
aauaugccccauucaacaucu

SEQ ID NO: 1494189 - RNA, 14 nt, Human
aauauuucagauaa

SEQ ID NO: 1494190 - RNA, 19 nt, Human
aauauuuauuuuaauaaug

SEQ ID NO: 1494191 - RNA, 18 nt, Human
aauauuuauuuuaauaau

SEQ ID NO: 1494192 - RNA, 12 nt, Human
aauauuuagugu

SEQ ID NO: 1494193 - RNA, 14 nt, Human
aauauauuuuaaga

SEQ ID NO: 1494194 - RNA, 15 nt, Human
aauauauuuuaagac

SEQ ID NO: 1494195 - RNA, 19 nt, Human
aauagucaaauugugugaa

SEQ ID NO: 1494196 - RNA, 16 nt, Human
aauagucaaauugugu

SEQ ID NO: 1494197 - RNA, 14 nt, Human
uaacaugaauauuu

SEQ ID NO: 1494198 - RNA, 22 nt, Human
aauaucacuugucaauaaaauc

SEQ ID NO: 1494199 - RNA, 18 nt, Human
aauauauuuuaagacgaa

SEQ ID NO: 1494200 - RNA, 20 nt, Human
uaacgauaaaagacagugaa

SEQ ID NO: 1494201 - RNA, 15 nt, Human
ucauauuuucaugcu

SEQ ID NO: 1494202 - RNA, 12 nt, Human
accgcagaagga

SEQ ID NO: 1494203 - RNA, 13 nt, Human
accgcagaaggaa

SEQ ID NO: 1494204 - RNA, 14 nt, Human
accgcagaaggaag

SEQ ID NO: 1494205 - RNA, 17 nt, Human
ucaguuuuugugaaaag

SEQ ID NO: 1494206 - RNA, 15 nt, Human
ucaguuuuugugaaa

SEQ ID NO: 1494207 - RNA, 13 nt, Human
ucaucuaggauuu

SEQ ID NO: 1494208 - RNA, 17 nt, Human
ucaugaaagauucaaug

SEQ ID NO: 1494209 - RNA, 16 nt, Human
ucaugaaagauucaau

SEQ ID NO: 1494210 - RNA, 14 nt, Human
ucaugcaaacuuua

SEQ ID NO: 1494211 - RNA, 14 nt, Human
ucaugcauggaaau

SEQ ID NO: 1494212 - RNA, 17 nt, Human
ucaugugaaaucauuca

SEQ ID NO: 1494213 - RNA, 16 nt, Human
ucaugugaaaucauuc

SEQ ID NO: 1494214 - RNA, 23 nt, Human
ucaugcaaacuuuauuuuguguu

SEQ ID NO: 1494215 - RNA, 15 nt, Human
accgcagaaggaagg

SEQ ID NO: 1494216 - RNA, 16 nt, Human
accuagggugauauua

SEQ ID NO: 1494217 - RNA, 16 nt, Human
accuauuuccagaaau

SEQ ID NO: 1494218 - RNA, 17 nt, Human
accuauuuccagaaaua

SEQ ID NO: 1494219 - RNA, 19 nt, Human
accuauuuccagaaauaca

SEQ ID NO: 1494220 - RNA, 15 nt, Human
acccucguggacacc

SEQ ID NO: 1494221 - RNA, 17 nt, Human
acccucguggacaccug

SEQ ID NO: 1494222 - RNA, 18 nt, Human
acccucguggacaccugc

SEQ ID NO: 1494223 - RNA, 19 nt, Human
acccucguggacaccugcc

SEQ ID NO: 1494224 - RNA, 20 nt, Human
acccucguggacaccugccc

SEQ ID NO: 1494225 - RNA, 22 nt, Human
acccucguggacaccugcccug

SEQ ID NO: 1494226 - RNA, 23 nt, Human
acccucguggacaccugcccugc

SEQ ID NO: 1494227 - RNA, 16 nt, Human
ucagauuucugaggaa

SEQ ID NO: 1494228 - RNA, 15 nt, Human
ucaauauucaauaaa

SEQ ID NO: 1494229 - RNA, 16 nt, Human
ucaauauucaauaaag

SEQ ID NO: 1494230 - RNA, 17 nt, Human
ucaauauucaauaaagc

SEQ ID NO: 1494231 - RNA, 19 nt, Human
ucaauauuucagauaauca

SEQ ID NO: 1494232 - RNA, 15 nt, Human
ucaauauuucagaua

SEQ ID NO: 1494233 - RNA, 20 nt, Human
acaugaauauuuaguguuca

SEQ ID NO: 1494234 - RNA, 13 nt, Human
acaugcuucccuu

SEQ ID NO: 1494235 - RNA, 16 nt, Human
acaugcuucccuuucc

SEQ ID NO: 1494236 - RNA, 18 nt, Human
acaugcuucccuuuccug

SEQ ID NO: 1494237 - RNA, 19 nt, Human
acaugcuucccuuuccuga

SEQ ID NO: 1494238 - RNA, 14 nt, Human
acaugggacauuug

SEQ ID NO: 1494239 - RNA, 11 nt, Human
acaugggacau

SEQ ID NO: 1494240 - RNA, 21 nt, Human
acaugggacauuugcucaugg

SEQ ID NO: 1494241 - RNA, 20 nt, Human
acaugggacauuugcucaug

SEQ ID NO: 1494242 - RNA, 15 nt, Human
acaugggacauuugc

SEQ ID NO: 1494243 - RNA, 13 nt, Human
acauuccauccuu

SEQ ID NO: 1494244 - RNA, 15 nt, Human
acauuccugaacagg

SEQ ID NO: 1494245 - RNA, 14 nt, Human
acauuccugaacag

SEQ ID NO: 1494246 - RNA, 18 nt, Human
ucaaauugugugaaaggu

SEQ ID NO: 1494247 - RNA, 20 nt, Human
accaguaggggcuuauaaua

SEQ ID NO: 1494248 - RNA, 14 nt, Human
accagucugacugu

SEQ ID NO: 1494249 - RNA, 14 nt, Human
ucaccucauggaau

SEQ ID NO: 1494250 - RNA, 13 nt, Human
ucaccucauggaa

SEQ ID NO: 1494251 - RNA, 12 nt, Human
ucaccucaugga

SEQ ID NO: 1494252 - RNA, 21 nt, Human
ucacguuuggugcuucucaga

SEQ ID NO: 1494253 - RNA, 17 nt, Human
ucacguuuggugcuucu

SEQ ID NO: 1494254 - RNA, 24 nt, Human
accacauuggagauguuuaguaau

SEQ ID NO: 1494255 - RNA, 16 nt, Human
accaccacgccuggcu

SEQ ID NO: 1494256 - RNA, 16 nt, Human
ucaauucuugccaaau

SEQ ID NO: 1494257 - RNA, 11 nt, Human
ucacacuggga

SEQ ID NO: 1494258 - RNA, 22 nt, Human
acuauauuguuugcuaagcauu

SEQ ID NO: 1494259 - RNA, 22 nt, Human
acuauaggcaugcgccaccaug

SEQ ID NO: 1494260 - RNA, 17 nt, Human
acuauauuguuugcuaa

SEQ ID NO: 1494261 - RNA, 20 nt, Human
acuauaggcaugcgccacca

SEQ ID NO: 1494262 - RNA, 15 nt, Human
acuaucucauuucca

SEQ ID NO: 1494263 - RNA, 17 nt, Human
acuaucucauuuccaag

SEQ ID NO: 1494264 - RNA, 16 nt, Human
acuaucucauuuccaa

SEQ ID NO: 1494265 - RNA, 15 nt, Human
acuaauuuuaaaaug

SEQ ID NO: 1494266 - RNA, 13 nt, Human
acuacacccagca

SEQ ID NO: 1494267 - RNA, 14 nt, Human
acuacacccagcaa

SEQ ID NO: 1494268 - RNA, 16 nt, Human
acuacacccagcaaua

SEQ ID NO: 1494269 - RNA, 15 nt, Human
acuacacccagcaau

SEQ ID NO: 1494270 - RNA, 21 nt, Human
acggagucucacucugucacc

SEQ ID NO: 1494271 - RNA, 23 nt, Human
acgcgccucgccggaucugaggg

SEQ ID NO: 1494272 - RNA, 23 nt, Human
uccagugggaggugagaccaccu

SEQ ID NO: 1494273 - RNA, 16 nt, Human
uccacucguguguuuc

SEQ ID NO: 1494274 - RNA, 18 nt, Human
uccacucguguguuucua

SEQ ID NO: 1494275 - RNA, 20 nt, Human
accuuuuggucuggagggaa

SEQ ID NO: 1494276 - RNA, 14 nt, Human
uccacucguguguu

SEQ ID NO: 1494277 - RNA, 15 nt, Human
uccacucguguguuu

SEQ ID NO: 1494278 - RNA, 12 nt, Human
ucauuccuccag

SEQ ID NO: 1494279 - RNA, 13 nt, Human
ucauuccuccagg

SEQ ID NO: 1494280 - RNA, 14 nt, Human
ucauuccuccaggu

SEQ ID NO: 1494281 - RNA, 19 nt, Human
ucauuccauucuggaagug

SEQ ID NO: 1494282 - RNA, 17 nt, Human
accuuugacaaagguaa

SEQ ID NO: 1494283 - RNA, 18 nt, Human
accuuugacaaagguaaa

SEQ ID NO: 1494284 - RNA, 22 nt, Human
accuuuguuugcaucugaaaau

SEQ ID NO: 1494285 - RNA, 14 nt, Human
uccagccucagcuc

SEQ ID NO: 1494286 - RNA, 20 nt, Human
uccagccugcugccugcuuu

SEQ ID NO: 1494287 - RNA, 20 nt, Human
uccucccacuucagccuccc

SEQ ID NO: 1494288 - RNA, 19 nt, Human
acucuuauaucuauauuuu

SEQ ID NO: 1494289 - RNA, 22 nt, Human
acucuuauaucuauauuuuaca

SEQ ID NO: 1494290 - RNA, 18 nt, Human
acucuuauaucuauauuu

SEQ ID NO: 1494291 - RNA, 17 nt, Human
acucuuauaucuauauu

SEQ ID NO: 1494292 - RNA, 16 nt, Human
acucuuauaucuauau

SEQ ID NO: 1494293 - RNA, 21 nt, Human
acucuuaagaagacugcauua

SEQ ID NO: 1494294 - RNA, 16 nt, Human
ucccuuuuuuuaagua

SEQ ID NO: 1494295 - RNA, 21 nt, Human
ucccuuuuuuuaaguaaggaa

SEQ ID NO: 1494296 - RNA, 13 nt, Human
ucccuuuuuuuaa

SEQ ID NO: 1494297 - RNA, 15 nt, Human
acucuuguuuccuua

SEQ ID NO: 1494298 - RNA, 16 nt, Human
acugaacuuugcugag

SEQ ID NO: 1494299 - RNA, 19 nt, Human
acugaacuuugcugagccu

SEQ ID NO: 1494300 - RNA, 12 nt, Human
acugagaaauuu

SEQ ID NO: 1494301 - RNA, 17 nt, Human
acugagaaauuuauaaa

SEQ ID NO: 1494302 - RNA, 21 nt, Human
acugagaaauuuauaaacuuu

SEQ ID NO: 1494303 - RNA, 20 nt, Human
acugacucuuaagaagacug

SEQ ID NO: 1494304 - RNA, 18 nt, Human
acugacucuuaagaagac

SEQ ID NO: 1494305 - RNA, 17 nt, Human
acugacucuuaagaaga

SEQ ID NO: 1494306 - RNA, 16 nt, Human
acugacucuuaagaag

SEQ ID NO: 1494307 - RNA, 15 nt, Human
acugacucuuaagaa

SEQ ID NO: 1494308 - RNA, 14 nt, Human
acugacucuuaaga

SEQ ID NO: 1494309 - RNA, 13 nt, Human
acugacucuuaag

SEQ ID NO: 1494310 - RNA, 12 nt, Human
acugaagaagca

SEQ ID NO: 1494311 - RNA, 21 nt, Human
acugaacuuugcugagccugu

SEQ ID NO: 1494312 - RNA, 15 nt, Human
uccugggagcuuuug

SEQ ID NO: 1494313 - RNA, 16 nt, Human
uccuggaaaucagggu

SEQ ID NO: 1494314 - RNA, 22 nt, Human
uccuggaauaucuccgucaacu

SEQ ID NO: 1494315 - RNA, 23 nt, Human
uccuggaagugcuaauuuugaaa

SEQ ID NO: 1494316 - RNA, 15 nt, Human
ucucauuuccaagca

SEQ ID NO: 1494317 - RNA, 23 nt, Human
acuugcaaaaagggucaguaugg

SEQ ID NO: 1494318 - RNA, 17 nt, Human
acuugcaaaaaggguca

SEQ ID NO: 1494319 - RNA, 16 nt, Human
acuugcucuugaugcc

SEQ ID NO: 1494320 - RNA, 17 nt, Human
acuugcucuugaugccu

SEQ ID NO: 1494321 - RNA, 18 nt, Human
acuugcucuugaugccug

SEQ ID NO: 1494322 - RNA, 20 nt, Human
acuugcucuugaugccuggc

SEQ ID NO: 1494323 - RNA, 15 nt, Human
acuugucaauaaaau

SEQ ID NO: 1494324 - RNA, 18 nt, Human
acuuguauuauguguguu

SEQ ID NO: 1494325 - RNA, 19 nt, Human
acuuguauuauguguguuu

SEQ ID NO: 1494326 - RNA, 14 nt, Human
acuugcuuuuaaaa

SEQ ID NO: 1494327 - RNA, 13 nt, Human
acuuuggcugcau

SEQ ID NO: 1494328 - RNA, 22 nt, Human
acuuuuuauggcacuaguauuu

SEQ ID NO: 1494329 - RNA, 13 nt, Human
acuuaaauuuuag

SEQ ID NO: 1494330 - RNA, 14 nt, Human
ucuauaccaauaaa

SEQ ID NO: 1494331 - RNA, 15 nt, Human
ucuauaccaauaaag

SEQ ID NO: 1494332 - RNA, 16 nt, Human
ucuauaccaauaaagu

SEQ ID NO: 1494333 - RNA, 17 nt, Human
ucuauaccaauaaagug

SEQ ID NO: 1494334 - RNA, 18 nt, Human
ucuauaccaauaaaguga

SEQ ID NO: 1494335 - RNA, 15 nt, Human
ucuauacccacccag

SEQ ID NO: 1494336 - RNA, 17 nt, Human
ucuauacccacccagaa

SEQ ID NO: 1494337 - RNA, 16 nt, Human
ucuauacccacccaga

SEQ ID NO: 1494338 - RNA, 13 nt, Human
ucuauaaaccgaa

SEQ ID NO: 1494339 - RNA, 16 nt, Human
ucuaggaaauauuuau

SEQ ID NO: 1494340 - RNA, 17 nt, Human
ucuaggaaauauuuauu

SEQ ID NO: 1494341 - RNA, 10 nt, Human
ucugaauuau

SEQ ID NO: 1494342 - RNA, 15 nt, Human
ucugaauuauuuucu

SEQ ID NO: 1494343 - RNA, 11 nt, Human
ucugcaggucc

SEQ ID NO: 1494344 - RNA, 12 nt, Human
ucugcagguccc

SEQ ID NO: 1494345 - RNA, 13 nt, Human
ucugcaggucccu

SEQ ID NO: 1494346 - RNA, 14 nt, Human
ucugcaggucccua

SEQ ID NO: 1494347 - RNA, 14 nt, Human
agaagaacugaaau

SEQ ID NO: 1494348 - RNA, 13 nt, Human
agaagaacugaaa

SEQ ID NO: 1494349 - RNA, 18 nt, Human
agaagaugguaccaccag

SEQ ID NO: 1494350 - RNA, 12 nt, Human
agaagacaaaau

SEQ ID NO: 1494351 - RNA, 15 nt, Human
agacacacaugaagu

SEQ ID NO: 1494352 - RNA, 12 nt, Human
agacacacauga

SEQ ID NO: 1494353 - RNA, 21 nt, Human
agaauuugauaugugaacagu

SEQ ID NO: 1494354 - RNA, 22 nt, Human
agaauuugauaugugaacaguu

SEQ ID NO: 1494355 - RNA, 12 nt, Human
agaauaugccuu

SEQ ID NO: 1494356 - RNA, 12 nt, Human
agaauaaaauuu

SEQ ID NO: 1494357 - RNA, 14 nt, Human
agaauaaaauuuuu

SEQ ID NO: 1494358 - RNA, 17 nt, Human
agaauaaaauuuuuaau

SEQ ID NO: 1494359 - RNA, 20 nt, Human
ugaagauuuaccacuugugu

SEQ ID NO: 1494360 - RNA, 17 nt, Human
ugaagauuuaccacuug

SEQ ID NO: 1494361 - RNA, 23 nt, Human
ugaauaauguaagacaaauaugu

SEQ ID NO: 1494362 - RNA, 15 nt, Human
ugaauacauuuccaa

SEQ ID NO: 1494363 - RNA, 23 nt, Human
agaggccaggcaggagcccuucu

SEQ ID NO: 1494364 - RNA, 18 nt, Human
agaguaauccaagcaaau

SEQ ID NO: 1494365 - RNA, 20 nt, Human
agaguaauccaagcaaaugu

SEQ ID NO: 1494366 - RNA, 22 nt, Human
agaguaauccaagcaaauguga

SEQ ID NO: 1494367 - RNA, 12 nt, Human
ugaaccaccgcg

SEQ ID NO: 1494368 - RNA, 23 nt, Human
ugaacuagaguuuagcuggaaaa

SEQ ID NO: 1494369 - RNA, 23 nt, Human
ugaaauaaacgucuuaaauauuc

SEQ ID NO: 1494370 - RNA, 22 nt, Human
ugaaauaaacgucuuaaauauu

SEQ ID NO: 1494371 - RNA, 18 nt, Human
ugaaauaaacgucuuaaa

SEQ ID NO: 1494372 - RNA, 13 nt, Human
ugaaauaaacguc

SEQ ID NO: 1494373 - RNA, 21 nt, Human
ugaaauuuccugggagcuuuu

SEQ ID NO: 1494374 - RNA, 15 nt, Human
ugaaauuuccuggga

SEQ ID NO: 1494375 - RNA, 13 nt, Human
ugaaagaaaauaa

SEQ ID NO: 1494376 - RNA, 14 nt, Human
ugaaaauuaacaug

SEQ ID NO: 1494377 - RNA, 12 nt, Human
agacuuuuauga

SEQ ID NO: 1494378 - RNA, 15 nt, Human
agacuuuuaugauac

SEQ ID NO: 1494379 - RNA, 16 nt, Human
ucuuuguaaugaaaac

SEQ ID NO: 1494380 - RNA, 16 nt, Human
agagacacacugaaga

SEQ ID NO: 1494381 - RNA, 21 nt, Human
ucuuuuuucuaaaguaaaaac

SEQ ID NO: 1494382 - RNA, 22 nt, Human
ucuuuuuucuaaaguaaaaaca

SEQ ID NO: 1494383 - RNA, 16 nt, Human
ucuuuuuucaaaagaa

SEQ ID NO: 1494384 - RNA, 17 nt, Human
ucuuuuuucaaaagaaa

SEQ ID NO: 1494385 - RNA, 13 nt, Human
ugacuauguaaac

SEQ ID NO: 1494386 - RNA, 12 nt, Human
ugacuauguaaa

SEQ ID NO: 1494387 - RNA, 17 nt, Human
ugaccugccucccuuca

SEQ ID NO: 1494388 - RNA, 19 nt, Human
ugaccugccucccuucaug

SEQ ID NO: 1494389 - RNA, 23 nt, Human
ugaccugccucccuucaugcaug

SEQ ID NO: 1494390 - RNA, 21 nt, Human
ugaccugccucccuucaugca

SEQ ID NO: 1494391 - RNA, 22 nt, Human
agauguauguacuucaugcugu

SEQ ID NO: 1494392 - RNA, 16 nt, Human
ugaccugccucccuuc

SEQ ID NO: 1494393 - RNA, 13 nt, Human
ugacuuauaguac

SEQ ID NO: 1494394 - RNA, 14 nt, Human
ugacuuauaguaca

SEQ ID NO: 1494395 - RNA, 15 nt, Human
ugacuuauaguacau

SEQ ID NO: 1494396 - RNA, 17 nt, Human
ugacuuauaguacauga

SEQ ID NO: 1494397 - RNA, 19 nt, Human
ugacuuauaguacaugaua

SEQ ID NO: 1494398 - RNA, 14 nt, Human
agauccuggaaauc

SEQ ID NO: 1494399 - RNA, 13 nt, Human
agauccuggaaau

SEQ ID NO: 1494400 - RNA, 13 nt, Human
agaucccccagaa

SEQ ID NO: 1494401 - RNA, 19 nt, Human
agaucccccagaaaagaaa

SEQ ID NO: 1494402 - RNA, 15 nt, Human
agaucccccagaaaa

SEQ ID NO: 1494403 - RNA, 22 nt, Human
agauguagccccucuccuggaa

SEQ ID NO: 1494404 - RNA, 21 nt, Human
agaugcaguucugaagaagau

SEQ ID NO: 1494405 - RNA, 18 nt, Human
agcaaguaaaaaggcuaa

SEQ ID NO: 1494406 - RNA, 13 nt, Human
agcaaguaaaaag

SEQ ID NO: 1494407 - RNA, 15 nt, Human
agcaagucagaauag

SEQ ID NO: 1494408 - RNA, 16 nt, Human
agauuuuccugaaaac

SEQ ID NO: 1494409 - RNA, 15 nt, Human
agauuuuccugaaaa

SEQ ID NO: 1494410 - RNA, 20 nt, Human
ugagagacacacugaagaag

SEQ ID NO: 1494411 - RNA, 19 nt, Human
ugagagacacacugaagaa

SEQ ID NO: 1494412 - RNA, 17 nt, Human
ugagagacacacugaag

SEQ ID NO: 1494413 - RNA, 16 nt, Human
ugagagacacacugaa

SEQ ID NO: 1494414 - RNA, 19 nt, Human
ugagacagaaucucagucu

SEQ ID NO: 1494415 - RNA, 23 nt, Human
ugagauguagccccucuccugga

SEQ ID NO: 1494416 - RNA, 14 nt, Human
ugagauguguucac

SEQ ID NO: 1494417 - RNA, 22 nt, Human
ugagagacacacugaagaagca

SEQ ID NO: 1494418 - RNA, 21 nt, Human
ugagagacacacugaagaagc

SEQ ID NO: 1494419 - RNA, 11 nt, Human
aggaauuuaaa

SEQ ID NO: 1494420 - RNA, 18 nt, Human
aggaaggaggacccagga

SEQ ID NO: 1494421 - RNA, 21 nt, Human
aggaaggaggacccaggacag

SEQ ID NO: 1494422 - RNA, 23 nt, Human
aggaauuguguuuauaauuuuaa

SEQ ID NO: 1494423 - RNA, 19 nt, Human
aggaaggaggacccaggac

SEQ ID NO: 1494424 - RNA, 20 nt, Human
aggaaggaggacccaggaca

SEQ ID NO: 1494425 - RNA, 15 nt, Human
agcuggagugcagug

SEQ ID NO: 1494426 - RNA, 19 nt, Human
agcuggagugcaguggcau

SEQ ID NO: 1494427 - RNA, 14 nt, Human
aggacaggauccag

SEQ ID NO: 1494428 - RNA, 20 nt, Human
aggacaggauccaggccggc

SEQ ID NO: 1494429 - RNA, 17 nt, Human
aggacacugauaugggu

SEQ ID NO: 1494430 - RNA, 12 nt, Human
aggacaucagca

SEQ ID NO: 1494431 - RNA, 13 nt, Human
aggacaucagcaa

SEQ ID NO: 1494432 - RNA, 14 nt, Human
aggacaucagcaaa

SEQ ID NO: 1494433 - RNA, 15 nt, Human
aggacaucagcaaac

SEQ ID NO: 1494434 - RNA, 16 nt, Human
aggacaucagcaaaca

SEQ ID NO: 1494435 - RNA, 22 nt, Human
aggacaucagcaaacaggauca

SEQ ID NO: 1494436 - RNA, 14 nt, Human
aggacacugauaug

SEQ ID NO: 1494437 - RNA, 14 nt, Human
ugcuucaucccuuu

SEQ ID NO: 1494438 - RNA, 20 nt, Human
aggaauuuuauuuuuuucug

SEQ ID NO: 1494439 - RNA, 12 nt, Human
ugcuuuguauug

SEQ ID NO: 1494440 - RNA, 14 nt, Human
ugcuuuucauccuu

SEQ ID NO: 1494441 - RNA, 13 nt, Human
uggaaaggcagcu

SEQ ID NO: 1494442 - RNA, 19 nt, Human
aggagcccugggaggcucu

SEQ ID NO: 1494443 - RNA, 23 nt, Human
aggagcccugggaggcucuggag

SEQ ID NO: 1494444 - RNA, 18 nt, Human
aggagcccugggaggcuc

SEQ ID NO: 1494445 - RNA, 20 nt, Human
aggacugaauuaugaaacuu

SEQ ID NO: 1494446 - RNA, 19 nt, Human
aggacugaauuaugaaacu

SEQ ID NO: 1494447 - RNA, 17 nt, Human
uggaaauucccuucauc

SEQ ID NO: 1494448 - RNA, 22 nt, Human
uggaaauucccuucaucuggaa

SEQ ID NO: 1494449 - RNA, 18 nt, Human
uggaaauucccuucaucu

SEQ ID NO: 1494450 - RNA, 14 nt, Human
aggaggcagagaag

SEQ ID NO: 1494451 - RNA, 18 nt, Human
uggaauuggagcucgugg

SEQ ID NO: 1494452 - RNA, 20 nt, Human
uggccaggcuugucucgaac

SEQ ID NO: 1494453 - RNA, 20 nt, Human
uggccagucuggucucgaac

SEQ ID NO: 1494454 - RNA, 16 nt, Human
aggccagaccauggac

SEQ ID NO: 1494455 - RNA, 17 nt, Human
aggccagaccauggaca

SEQ ID NO: 1494456 - RNA, 18 nt, Human
aggccagaccauggacac

SEQ ID NO: 1494457 - RNA, 18 nt, Human
uggacgagaaaacaauaa

SEQ ID NO: 1494458 - RNA, 17 nt, Human
aggccugguguuucuug

SEQ ID NO: 1494459 - RNA, 13 nt, Human
aggcucuggagcc

SEQ ID NO: 1494460 - RNA, 14 nt, Human
aggcucuggagccc

SEQ ID NO: 1494461 - RNA, 15 nt, Human
aggcucuggagccca

SEQ ID NO: 1494462 - RNA, 18 nt, Human
aggcucuggagcccacug

SEQ ID NO: 1494463 - RNA, 19 nt, Human
aggcucuggagcccacugu

SEQ ID NO: 1494464 - RNA, 22 nt, Human
aggcugggaauggaggggcaga

SEQ ID NO: 1494465 - RNA, 12 nt, Human
uggcugcaugcg

SEQ ID NO: 1494466 - RNA, 18 nt, Human
ugauuaaguaaugauaac

SEQ ID NO: 1494467 - RNA, 23 nt, Human
ugauuaaguaaugauaacuggaa

SEQ ID NO: 1494468 - RNA, 12 nt, Human
ugaugaagaagu

SEQ ID NO: 1494469 - RNA, 11 nt, Human
ugaugaagaag

SEQ ID NO: 1494470 - RNA, 12 nt, Human
ugauggagaagg

SEQ ID NO: 1494471 - RNA, 13 nt, Human
ugauggagaagga

SEQ ID NO: 1494472 - RNA, 14 nt, Human
ugauggagaaggaa

SEQ ID NO: 1494473 - RNA, 15 nt, Human
ugauggagaaggaag

SEQ ID NO: 1494474 - RNA, 16 nt, Human
ugauggagaaggaagg

SEQ ID NO: 1494475 - RNA, 14 nt, Human
ugaugggauuuggu

SEQ ID NO: 1494476 - RNA, 17 nt, Human
ugauggagaaggaaggc

SEQ ID NO: 1494477 - RNA, 14 nt, Human
agcccacuguacuu

SEQ ID NO: 1494478 - RNA, 16 nt, Human
agcccacuguacuugc

SEQ ID NO: 1494479 - RNA, 20 nt, Human
agcccugcugcugccugccu

SEQ ID NO: 1494480 - RNA, 18 nt, Human
agcccugcugcugccugc

SEQ ID NO: 1494481 - RNA, 19 nt, Human
agcccugcugcugccugcc

SEQ ID NO: 1494482 - RNA, 14 nt, Human
agcccauucauucc

SEQ ID NO: 1494483 - RNA, 17 nt, Human
agcccauucauuccauu

SEQ ID NO: 1494484 - RNA, 22 nt, Human
agcccauucauuccauucugga

SEQ ID NO: 1494485 - RNA, 23 nt, Human
agcccauucauuccauucuggaa

SEQ ID NO: 1494486 - RNA, 23 nt, Human
agccucagcucucaguugcagcc

SEQ ID NO: 1494487 - RNA, 16 nt, Human
ugccccauucaacauc

SEQ ID NO: 1494488 - RNA, 17 nt, Human
agcuaucguaaaauuaa

SEQ ID NO: 1494489 - RNA, 18 nt, Human
agcuccaagaauuucuag

SEQ ID NO: 1494490 - RNA, 15 nt, Human
agcuccaagaauuuc

SEQ ID NO: 1494491 - RNA, 13 nt, Human
ugcauuuauaugu

SEQ ID NO: 1494492 - RNA, 14 nt, Human
ugcauuuauaugua

SEQ ID NO: 1494493 - RNA, 16 nt, Human
ugcauuuauauguacc

SEQ ID NO: 1494494 - RNA, 14 nt, Human
ugcccugccaccug

SEQ ID NO: 1494495 - RNA, 15 nt, Human
ugcccugccaccugu

SEQ ID NO: 1494496 - RNA, 16 nt, Human
ugcccugccaccuguc

SEQ ID NO: 1494497 - RNA, 17 nt, Human
ugcccugccaccugucu

SEQ ID NO: 1494498 - RNA, 19 nt, Human
ugcccugccaccugucugu

SEQ ID NO: 1494499 - RNA, 20 nt, Human
ugcccugccaccugucuguc

SEQ ID NO: 1494500 - RNA, 21 nt, Human
ugcccugccaccugucugucu

SEQ ID NO: 1494501 - RNA, 22 nt, Human
ugcccugccaccugucugucug

SEQ ID NO: 1494502 - RNA, 18 nt, Human
ugccucagaaaacaagga

SEQ ID NO: 1494503 - RNA, 11 nt, Human
ugccucucugc

SEQ ID NO: 1494504 - RNA, 12 nt, Human
ugccucucugca

SEQ ID NO: 1494505 - RNA, 15 nt, Human
ugccucucugcaggu

SEQ ID NO: 1494506 - RNA, 23 nt, Human
ugccucucugcaggucccuaaua

SEQ ID NO: 1494507 - RNA, 13 nt, Human
agcuggaaaagua

SEQ ID NO: 1494508 - RNA, 18 nt, Human
agcuggagaugaggccag

SEQ ID NO: 1494509 - RNA, 14 nt, Human
agcuggagugcagu

SEQ ID NO: 1494510 - RNA, 19 nt, Human
agcuggagaugaggccaga

SEQ ID NO: 1494511 - RNA, 20 nt, Human
agcuggagaugaggccagac

SEQ ID NO: 1494512 - RNA, 21 nt, Human
agcuggagaugaggccagacc

SEQ ID NO: 1494513 - RNA, 22 nt, Human
agcuggagaugaggccagacca

SEQ ID NO: 1494514 - RNA, 23 nt, Human
agcuggagaugaggccagaccau

SEQ ID NO: 1494515 - RNA, 18 nt, Human
agucccaucccugcguga

SEQ ID NO: 1494516 - RNA, 21 nt, Human
agucagucauucagauaugau

SEQ ID NO: 1494517 - RNA, 15 nt, Human
agucagucauucaga

SEQ ID NO: 1494518 - RNA, 21 nt, Human
aguauguuagugcaaauuguc

SEQ ID NO: 1494519 - RNA, 18 nt, Human
aguauguuagugcaaauu

SEQ ID NO: 1494520 - RNA, 18 nt, Human
agucacauuccugaacag

SEQ ID NO: 1494521 - RNA, 16 nt, Human
aguauuguccaggucu

SEQ ID NO: 1494522 - RNA, 15 nt, Human
aguauuguccagguc

SEQ ID NO: 1494523 - RNA, 21 nt, Human
aguauuuaauucauguugccu

SEQ ID NO: 1494524 - RNA, 11 nt, Human
uguauuaugug

SEQ ID NO: 1494525 - RNA, 21 nt, Human
aguagcguuuuuuaaauguau

SEQ ID NO: 1494526 - RNA, 22 nt, Human
aguagcguuuuuuaaauguaua

SEQ ID NO: 1494527 - RNA, 20 nt, Human
aguagcguuuuuuaaaugua

SEQ ID NO: 1494528 - RNA, 23 nt, Human
agguuuggacaaaauggaauacu

SEQ ID NO: 1494529 - RNA, 22 nt, Human
ugugaacaguuguguuugaagc

SEQ ID NO: 1494530 - RNA, 22 nt, Human
ugucucuggauuauauuaugaa

SEQ ID NO: 1494531 - RNA, 14 nt, Human
ugugaagcaaaauu

SEQ ID NO: 1494532 - RNA, 16 nt, Human
agucucugaggggcua

SEQ ID NO: 1494533 - RNA, 22 nt, Human
agucucugaggggcuaccagga

SEQ ID NO: 1494534 - RNA, 23 nt, Human
agucucugaggggcuaccaggaa

SEQ ID NO: 1494535 - RNA, 19 nt, Human
agucuccaaagucucugga

SEQ ID NO: 1494536 - RNA, 18 nt, Human
agucuuacucuguugcca

SEQ ID NO: 1494537 - RNA, 20 nt, Human
agugaaacucguuaauuugu

SEQ ID NO: 1494538 - RNA, 21 nt, Human
agugagcagucaggaaagaga

SEQ ID NO: 1494539 - RNA, 18 nt, Human
uguaagaaaauaucacuu

SEQ ID NO: 1494540 - RNA, 15 nt, Human
uguaaggcaaucaug

SEQ ID NO: 1494541 - RNA, 21 nt, Human
uguagaagucacauuccugaa

SEQ ID NO: 1494542 - RNA, 15 nt, Human
uguacuugcucuuga

SEQ ID NO: 1494543 - RNA, 19 nt, Human
uguacuugcucuugaugcc

SEQ ID NO: 1494544 - RNA, 16 nt, Human
uguaaaggaauuuaaa

SEQ ID NO: 1494545 - RNA, 18 nt, Human
ugguuuuaguugcaacuu

SEQ ID NO: 1494546 - RNA, 15 nt, Human
aggucagugcaaaua

SEQ ID NO: 1494547 - RNA, 22 nt, Human
ugguccaugggccauaugaaaa

SEQ ID NO: 1494548 - RNA, 19 nt, Human
uggucacguuuggugcuuc

SEQ ID NO: 1494549 - RNA, 21 nt, Human
aggggcuuauaauaaaggacu

SEQ ID NO: 1494550 - RNA, 14 nt, Human
auaaugaauacuuu

SEQ ID NO: 1494551 - RNA, 21 nt, Human
auaaucuuucacaggggacag

SEQ ID NO: 1494552 - RNA, 17 nt, Human
auaauccaguaaaauaa

SEQ ID NO: 1494553 - RNA, 22 nt, Human
uuagaugcaguucugaagaaga

SEQ ID NO: 1494554 - RNA, 23 nt, Human
uuagaugcaguucugaagaagau

SEQ ID NO: 1494555 - RNA, 12 nt, Human
uuaccugggaaa

SEQ ID NO: 1494556 - RNA, 20 nt, Human
auaagcaaaaacaaaaagaa

SEQ ID NO: 1494557 - RNA, 12 nt, Human
auaacuggaaac

SEQ ID NO: 1494558 - RNA, 13 nt, Human
auaaauaaaguuu

SEQ ID NO: 1494559 - RNA, 19 nt, Human
auaaauaaaguuuguugaa

SEQ ID NO: 1494560 - RNA, 18 nt, Human
auaaagugacccugcucu

SEQ ID NO: 1494561 - RNA, 20 nt, Human
auaaagugacccugcucuca

SEQ ID NO: 1494562 - RNA, 18 nt, Human
auaaacgucuuaaauauu

SEQ ID NO: 1494563 - RNA, 16 nt, Human
auaaacgucuuaaaua

SEQ ID NO: 1494564 - RNA, 15 nt, Human
auaaacgucuuaaau

SEQ ID NO: 1494565 - RNA, 16 nt, Human
auaaaccgaacugaug

SEQ ID NO: 1494566 - RNA, 23 nt, Human
auaaacacucuugaaaaaugcau

SEQ ID NO: 1494567 - RNA, 22 nt, Human
auaauuuuuauauuugaaauau

SEQ ID NO: 1494568 - RNA, 21 nt, Human
auaauuuuuauauuugaaaua

SEQ ID NO: 1494569 - RNA, 19 nt, Human
auaauuuuuauauuugaaa

SEQ ID NO: 1494570 - RNA, 16 nt, Human
auaauuuuuauauuug

SEQ ID NO: 1494571 - RNA, 14 nt, Human
auaauuuuuauauu

SEQ ID NO: 1494572 - RNA, 20 nt, Human
auaauuuugugaagcaaaau

SEQ ID NO: 1494573 - RNA, 15 nt, Human
auaauuuugugaagc

SEQ ID NO: 1494574 - RNA, 14 nt, Human
auaauuuugugaag

SEQ ID NO: 1494575 - RNA, 13 nt, Human
auaauuuugugaa

SEQ ID NO: 1494576 - RNA, 22 nt, Human
uuauauauauuuuuuucugaaa

SEQ ID NO: 1494577 - RNA, 18 nt, Human
uuauauaagcuuguauuc

SEQ ID NO: 1494578 - RNA, 13 nt, Human
uuauaguacauga

SEQ ID NO: 1494579 - RNA, 16 nt, Human
uuauaguacaugauaa

SEQ ID NO: 1494580 - RNA, 17 nt, Human
uuauaguacaugauaaa

SEQ ID NO: 1494581 - RNA, 21 nt, Human
auacaguucggugagcuacaa

SEQ ID NO: 1494582 - RNA, 12 nt, Human
auaccaauaaag

SEQ ID NO: 1494583 - RNA, 13 nt, Human
auaccaauaaagu

SEQ ID NO: 1494584 - RNA, 20 nt, Human
auacauuguauauaugugua

SEQ ID NO: 1494585 - RNA, 20 nt, Human
auacaucccuuaccugggaa

SEQ ID NO: 1494586 - RNA, 22 nt, Human
auaccacaggaaccacaagacu

SEQ ID NO: 1494587 - RNA, 14 nt, Human
auaccaauaaagug

SEQ ID NO: 1494588 - RNA, 15 nt, Human
auaccaauaaaguga

SEQ ID NO: 1494589 - RNA, 21 nt, Human
auaccaauaaagugacccugc

SEQ ID NO: 1494590 - RNA, 17 nt, Human
uuaucaugugaaaucau

SEQ ID NO: 1494591 - RNA, 18 nt, Human
uuaucaugugaaaucauu

SEQ ID NO: 1494592 - RNA, 20 nt, Human
uuaucaugugaaaucauuca

SEQ ID NO: 1494593 - RNA, 22 nt, Human
uuaucaugugaaaucauucauu

SEQ ID NO: 1494594 - RNA, 18 nt, Human
uuaaaaaagaaacauuug

SEQ ID NO: 1494595 - RNA, 15 nt, Human
uuaaaaaagaaacau

SEQ ID NO: 1494596 - RNA, 19 nt, Human
uuaaaaaagaaacauuugg

SEQ ID NO: 1494597 - RNA, 15 nt, Human
aguuucguuuucaaa

SEQ ID NO: 1494598 - RNA, 16 nt, Human
aguuucguuuucaaaa

SEQ ID NO: 1494599 - RNA, 16 nt, Human
aguucugaagaagaug

SEQ ID NO: 1494600 - RNA, 15 nt, Human
aguucugaagaagau

SEQ ID NO: 1494601 - RNA, 14 nt, Human
aguucugaagaaga

SEQ ID NO: 1494602 - RNA, 13 nt, Human
aguucugaagaag

SEQ ID NO: 1494603 - RNA, 21 nt, Human
aguugauaugccuuuucccaa

SEQ ID NO: 1494604 - RNA, 19 nt, Human
aguugcaacuuuguauaaa

SEQ ID NO: 1494605 - RNA, 15 nt, Human
uguuugcaucugaaa

SEQ ID NO: 1494606 - RNA, 15 nt, Human
uguuugcuaagcauu

SEQ ID NO: 1494607 - RNA, 13 nt, Human
uguuuuacaauag

SEQ ID NO: 1494608 - RNA, 17 nt, Human
uguuuuacaauaguucu

SEQ ID NO: 1494609 - RNA, 22 nt, Human
uguuuuacaauaguucuguggg

SEQ ID NO: 1494610 - RNA, 21 nt, Human
uguuuuacaauaguucugugg

SEQ ID NO: 1494611 - RNA, 19 nt, Human
uguuugcuaagcauuccaa

SEQ ID NO: 1494612 - RNA, 20 nt, Human
uguuuuauaauuuugugaag

SEQ ID NO: 1494613 - RNA, 13 nt, Human
uguuuuauaauuu

SEQ ID NO: 1494614 - RNA, 14 nt, Human
uguuauuaaacaaa

SEQ ID NO: 1494615 - RNA, 15 nt, Human
aguggcaucaucuca

SEQ ID NO: 1494616 - RNA, 18 nt, Human
aguuacccaaauuaagag

SEQ ID NO: 1494617 - RNA, 17 nt, Human
aguuacccaaauuaaga

SEQ ID NO: 1494618 - RNA, 20 nt, Human
aguuauuauauuuacaaaug

SEQ ID NO: 1494619 - RNA, 12 nt, Human
aucguaaaauua

SEQ ID NO: 1494620 - RNA, 13 nt, Human
aucguaaaauuaa

SEQ ID NO: 1494621 - RNA, 14 nt, Human
aucguaaaauuaag

SEQ ID NO: 1494622 - RNA, 17 nt, Human
aucguaaaauuaagaaa

SEQ ID NO: 1494623 - RNA, 17 nt, Human
uucuguuuuauaauuuu

SEQ ID NO: 1494624 - RNA, 16 nt, Human
uucuguuuuauaauuu

SEQ ID NO: 1494625 - RNA, 22 nt, Human
uucuuaaccagaucauugugaa

SEQ ID NO: 1494626 - RNA, 23 nt, Human
uucuuaaccagaucauugugaaa

SEQ ID NO: 1494627 - RNA, 14 nt, Human
uucuuacugcuuaa

SEQ ID NO: 1494628 - RNA, 15 nt, Human
auccaguaaaauaau

SEQ ID NO: 1494629 - RNA, 18 nt, Human
auccaagcaaaugugaau

SEQ ID NO: 1494630 - RNA, 16 nt, Human
auccaagcaaauguga

SEQ ID NO: 1494631 - RNA, 14 nt, Human
uucugaauaaagca

SEQ ID NO: 1494632 - RNA, 15 nt, Human
uucugaauaaagcaa

SEQ ID NO: 1494633 - RNA, 16 nt, Human
uucugaauaaagcaau

SEQ ID NO: 1494634 - RNA, 17 nt, Human
uucugaauaaagcaauu

SEQ ID NO: 1494635 - RNA, 13 nt, Human
aucauugugaaau

SEQ ID NO: 1494636 - RNA, 15 nt, Human
aucauugugaaauua

SEQ ID NO: 1494637 - RNA, 19 nt, Human
aucauugugaaauuauuca

SEQ ID NO: 1494638 - RNA, 12 nt, Human
aucaguuaacua

SEQ ID NO: 1494639 - RNA, 18 nt, Human
aucaguuaacuauugcau

SEQ ID NO: 1494640 - RNA, 21 nt, Human
aucacucuguucauuccucca

SEQ ID NO: 1494641 - RNA, 22 nt, Human
aucacucuguucauuccuccag

SEQ ID NO: 1494642 - RNA, 23 nt, Human
aucacucuguucauuccuccagg

SEQ ID NO: 1494643 - RNA, 14 nt, Human
aucacugaacuuug

SEQ ID NO: 1494644 - RNA, 16 nt, Human
aucaaggguacacugc

SEQ ID NO: 1494645 - RNA, 18 nt, Human
uuccuuacagaacuacuu

SEQ ID NO: 1494646 - RNA, 19 nt, Human
aucacucuguucauuccuc

SEQ ID NO: 1494647 - RNA, 21 nt, Human
aucaaggguacacugccuucu

SEQ ID NO: 1494648 - RNA, 12 nt, Human
uuccugaacagg

SEQ ID NO: 1494649 - RNA, 21 nt, Human
uuccuaaauauauuuuaagac

SEQ ID NO: 1494650 - RNA, 15 nt, Human
uucccuuuuuuuaag

SEQ ID NO: 1494651 - RNA, 16 nt, Human
auauguucugacauaa

SEQ ID NO: 1494652 - RNA, 13 nt, Human
auauuacaaugau

SEQ ID NO: 1494653 - RNA, 15 nt, Human
auauuacaaugauca

SEQ ID NO: 1494654 - RNA, 16 nt, Human
auauuacaaugaucac

SEQ ID NO: 1494655 - RNA, 12 nt, Human
auauuacaauga

SEQ ID NO: 1494656 - RNA, 14 nt, Human
auauuguuugcuaa

SEQ ID NO: 1494657 - RNA, 13 nt, Human
auauuuacaaaug

SEQ ID NO: 1494658 - RNA, 19 nt, Human
auauuguuuuacaauaguu

SEQ ID NO: 1494659 - RNA, 21 nt, Human
auauucucacagcuccaagaa

SEQ ID NO: 1494660 - RNA, 18 nt, Human
auauucucacagcuccaa

SEQ ID NO: 1494661 - RNA, 22 nt, Human
uucaugcuguucaugaaagauu

SEQ ID NO: 1494662 - RNA, 22 nt, Human
auauguguaugcacaguaaaaa

SEQ ID NO: 1494663 - RNA, 18 nt, Human
uucagucucuauaccaau

SEQ ID NO: 1494664 - RNA, 21 nt, Human
uucagucucuauaccaauaaa

SEQ ID NO: 1494665 - RNA, 22 nt, Human
uucagucucuauaccaauaaag

SEQ ID NO: 1494666 - RNA, 23 nt, Human
uucagucucuauaccaauaaagu

SEQ ID NO: 1494667 - RNA, 24 nt, Human
uucagucucuauaccaauaaagug

SEQ ID NO: 1494668 - RNA, 21 nt, Human
uucauauuuuucauagcuaaa

SEQ ID NO: 1494669 - RNA, 13 nt, Human
auauaugcuaagu

SEQ ID NO: 1494670 - RNA, 17 nt, Human
uucagcgguuuauauaa

SEQ ID NO: 1494671 - RNA, 22 nt, Human
uucagcacuuuagaauaugccu

SEQ ID NO: 1494672 - RNA, 23 nt, Human
uucagcacuuuagaauaugccuu

SEQ ID NO: 1494673 - RNA, 19 nt, Human
uucagauaugauucaaaug

SEQ ID NO: 1494674 - RNA, 18 nt, Human
uucagauaugauucaaau

SEQ ID NO: 1494675 - RNA, 17 nt, Human
uucagauaugauucaaa

SEQ ID NO: 1494676 - RNA, 16 nt, Human
uucagauaugauucaa

SEQ ID NO: 1494677 - RNA, 21 nt, Human
augggacauuugcucauggaa

SEQ ID NO: 1494678 - RNA, 22 nt, Human
augggacauuugcucauggaau

SEQ ID NO: 1494679 - RNA, 13 nt, Human
uuugaaaagcaga

SEQ ID NO: 1494680 - RNA, 16 nt, Human
uuugaaaagcagacau

SEQ ID NO: 1494681 - RNA, 18 nt, Human
uuugaaaagcagacauuu

SEQ ID NO: 1494682 - RNA, 15 nt, Human
uuugaaauauugacu

SEQ ID NO: 1494683 - RNA, 14 nt, Human
uuugaaauauugac

SEQ ID NO: 1494684 - RNA, 17 nt, Human
uuugaaacacuuugcau

SEQ ID NO: 1494685 - RNA, 19 nt, Human
uuugaaacacuuugcauaa

SEQ ID NO: 1494686 - RNA, 20 nt, Human
uuucuaugaaauauuauguu

SEQ ID NO: 1494687 - RNA, 14 nt, Human
uuucuaugaaauau

SEQ ID NO: 1494688 - RNA, 13 nt, Human
uuucuaugaaaua

SEQ ID NO: 1494689 - RNA, 22 nt, Human
uuucuaggacugaauuaugaaa

SEQ ID NO: 1494690 - RNA, 17 nt, Human
uuucuaggacugaauua

SEQ ID NO: 1494691 - RNA, 21 nt, Human
uuucuaggacugaauuaugaa

SEQ ID NO: 1494692 - RNA, 19 nt, Human
augcuguauuuuaaaagaa

SEQ ID NO: 1494693 - RNA, 14 nt, Human
augcuguauuuuaa

SEQ ID NO: 1494694 - RNA, 19 nt, Human
uuuauuacuguaagaaaau

SEQ ID NO: 1494695 - RNA, 16 nt, Human
uuuauuuuaauaaugu

SEQ ID NO: 1494696 - RNA, 17 nt, Human
uuuauuuuuuucugaau

SEQ ID NO: 1494697 - RNA, 16 nt, Human
uuucaccuagauuuuu

SEQ ID NO: 1494698 - RNA, 12 nt, Human
uuucauaaagca

SEQ ID NO: 1494699 - RNA, 14 nt, Human
uuucauagcuaaaa

SEQ ID NO: 1494700 - RNA, 15 nt, Human
uuucauagcuaaaaa

SEQ ID NO: 1494701 - RNA, 18 nt, Human
uuucauauaaauggaauu

SEQ ID NO: 1494702 - RNA, 21 nt, Human
uuucaguuuauuugaaccaau

SEQ ID NO: 1494703 - RNA, 23 nt, Human
auggaauuggagcucgugggaca

SEQ ID NO: 1494704 - RNA, 20 nt, Human
uuuagcuggaaaaguauguu

SEQ ID NO: 1494705 - RNA, 14 nt, Human
uuuaugugaaacau

SEQ ID NO: 1494706 - RNA, 15 nt, Human
uuuaugugaaacaug

SEQ ID NO: 1494707 - RNA, 19 nt, Human
uuuauaugcuucuguuuua

SEQ ID NO: 1494708 - RNA, 17 nt, Human
uuuauaugcuucuguuu

SEQ ID NO: 1494709 - RNA, 16 nt, Human
uuuaaagcuuccauug

SEQ ID NO: 1494710 - RNA, 14 nt, Human
augauaacuggaaa

SEQ ID NO: 1494711 - RNA, 19 nt, Human
uuuaaaaaauagcagcuuu

SEQ ID NO: 1494712 - RNA, 16 nt, Human
uuuaaaaaauggucac

SEQ ID NO: 1494713 - RNA, 22 nt, Human
augcaaacuuuauuuuguguuu

SEQ ID NO: 1494714 - RNA, 18 nt, Human
augaucaccgacugaaaa

SEQ ID NO: 1494715 - RNA, 18 nt, Human
uugugaagcaaaauuuuu

SEQ ID NO: 1494716 - RNA, 17 nt, Human
uugugaagguggaaaua

SEQ ID NO: 1494717 - RNA, 18 nt, Human
uugugaagguggaaauaa

SEQ ID NO: 1494718 - RNA, 22 nt, Human
augaauuacauuuguauaaaau

SEQ ID NO: 1494719 - RNA, 19 nt, Human
augaauuacauuuguauaa

SEQ ID NO: 1494720 - RNA, 18 nt, Human
augaauuacauuuguaua

SEQ ID NO: 1494721 - RNA, 18 nt, Human
uugggcagcaauuuaaau

SEQ ID NO: 1494722 - RNA, 19 nt, Human
uugggcagcaauuuaaaug

SEQ ID NO: 1494723 - RNA, 23 nt, Human
augaauuaguuuuauaugcuucu

SEQ ID NO: 1494724 - RNA, 21 nt, Human
augaauuaguuuuauaugcuu

SEQ ID NO: 1494725 - RNA, 13 nt, Human
uuguauauuacaa

SEQ ID NO: 1494726 - RNA, 14 nt, Human
uuguauauuacaau

SEQ ID NO: 1494727 - RNA, 15 nt, Human
uuguauauuacaaug

SEQ ID NO: 1494728 - RNA, 16 nt, Human
uuguauauuacaauga

SEQ ID NO: 1494729 - RNA, 13 nt, Human
uuguaaugaaaac

SEQ ID NO: 1494730 - RNA, 15 nt, Human
uuguauaaaauaauu

SEQ ID NO: 1494731 - RNA, 13 nt, Human
uuguauaaaauaa

SEQ ID NO: 1494732 - RNA, 21 nt, Human
augaaauauuauguuaaaacu

SEQ ID NO: 1494733 - RNA, 11 nt, Human
uugcugagccu

SEQ ID NO: 1494734 - RNA, 12 nt, Human
uugcucauggaa

SEQ ID NO: 1494735 - RNA, 11 nt, Human
uugcucaugga

SEQ ID NO: 1494736 - RNA, 20 nt, Human
auucuccugccucagccucc

SEQ ID NO: 1494737 - RNA, 11 nt, Human
auuccauccuu

SEQ ID NO: 1494738 - RNA, 17 nt, Human
auucagaguugaugguu

SEQ ID NO: 1494739 - RNA, 18 nt, Human
auucagauaugauucaaa

SEQ ID NO: 1494740 - RNA, 20 nt, Human
auucagauaugauucaaaug

SEQ ID NO: 1494741 - RNA, 13 nt, Human
auuacgugcucug

SEQ ID NO: 1494742 - RNA, 19 nt, Human
uuuuugugaaaagcuccau

SEQ ID NO: 1494743 - RNA, 23 nt, Human
auuaaguaaugauaacuggaaac

SEQ ID NO: 1494744 - RNA, 16 nt, Human
uuuuuguuauuaaaca

SEQ ID NO: 1494745 - RNA, 21 nt, Human
auuacaguggggaaugaagau

SEQ ID NO: 1494746 - RNA, 20 nt, Human
auuacauuuguauaaaauaa

SEQ ID NO: 1494747 - RNA, 18 nt, Human
auuacauuuguauaaaau

SEQ ID NO: 1494748 - RNA, 17 nt, Human
auuacauuuguauaaaa

SEQ ID NO: 1494749 - RNA, 12 nt, Human
uuuugcagcuuu

SEQ ID NO: 1494750 - RNA, 12 nt, Human
uuuuuacauuuu

SEQ ID NO: 1494751 - RNA, 19 nt, Human
uuuuuauauuugaaauauu

SEQ ID NO: 1494752 - RNA, 12 nt, Human
uuuuuaucaugu

SEQ ID NO: 1494753 - RNA, 15 nt, Human
uuuuguuauuaaaca

SEQ ID NO: 1494754 - RNA, 17 nt, Human
auuaaaccggaccaucu

SEQ ID NO: 1494755 - RNA, 17 nt, Human
auguuuaguaaucauau

SEQ ID NO: 1494756 - RNA, 21 nt, Human
auguuuucaggcuagauguau

SEQ ID NO: 1494757 - RNA, 17 nt, Human
auguuuucaggcuagau

SEQ ID NO: 1494758 - RNA, 15 nt, Human
auguuuucaggcuag

SEQ ID NO: 1494759 - RNA, 22 nt, Human
uuuucaguuuauuugaaccaau

SEQ ID NO: 1494760 - RNA, 16 nt, Human
uuuucucuaggaaaua

SEQ ID NO: 1494761 - RNA, 14 nt, Human
uuuucucuaggaaa

SEQ ID NO: 1494762 - RNA, 17 nt, Human
auguugcauagaauaaa

SEQ ID NO: 1494763 - RNA, 18 nt, Human
auguugcauagaauaaaa

SEQ ID NO: 1494764 - RNA, 20 nt, Human
auguugcccuguugcugccu

SEQ ID NO: 1494765 - RNA, 16 nt, Human
auguucagauuauugg

SEQ ID NO: 1494766 - RNA, 14 nt, Human
uuuuaauaaacacu

SEQ ID NO: 1494767 - RNA, 14 nt, Human
uuuuaauaauguuu

SEQ ID NO: 1494768 - RNA, 13 nt, Human
uuuuaauaauguu

SEQ ID NO: 1494769 - RNA, 12 nt, Human
uuuuaauaaugu

SEQ ID NO: 1494770 - RNA, 16 nt, Human
uuuuaauaauguuuca

SEQ ID NO: 1494771 - RNA, 20 nt, Human
uuuuaauaauguuucaaaca

SEQ ID NO: 1494772 - RNA, 19 nt, Human
augugcuaguaauuggaaa

SEQ ID NO: 1494773 - RNA, 18 nt, Human
auguggaccuuagaauac

SEQ ID NO: 1494774 - RNA, 20 nt, Human
augugcuaguaauuggaaag

SEQ ID NO: 1494775 - RNA, 23 nt, Human
auguguguuuuaaaaugagaaau

SEQ ID NO: 1494776 - RNA, 17 nt, Human
auuuuaaaagaaugauu

SEQ ID NO: 1494777 - RNA, 21 nt, Human
auuuguauaaaauaauuuuua

SEQ ID NO: 1494778 - RNA, 19 nt, Human
auuuguauaaaauaauuuu

SEQ ID NO: 1494779 - RNA, 18 nt, Human
auuuguauaaaauaauuu

SEQ ID NO: 1494780 - RNA, 17 nt, Human
auuuuacauaaauuuag

SEQ ID NO: 1494781 - RNA, 16 nt, Human
auuuuacauaaauuua

SEQ ID NO: 1494782 - RNA, 12 nt, Human
auuuuacauuaa

SEQ ID NO: 1494783 - RNA, 15 nt, Human
auuuuacauuaaauu

SEQ ID NO: 1494784 - RNA, 17 nt, Human
auuuuaccuuugacaaa

SEQ ID NO: 1494785 - RNA, 22 nt, Human
auuuuaaaagaaugauuaugaa

SEQ ID NO: 1494786 - RNA, 18 nt, Human
auuuuaaaagaaugauua

SEQ ID NO: 1494787 - RNA, 16 nt, Human
auuuuaaaaaaugguc

SEQ ID NO: 1494788 - RNA, 17 nt, Human
auuuuaaaaaaugguca

SEQ ID NO: 1494789 - RNA, 22 nt, Human
auuuucaguuauuauauuuaca

SEQ ID NO: 1494790 - RNA, 21 nt, Human
auuuuauuuuuuucugaauua

SEQ ID NO: 1494791 - RNA, 23 nt, Human
auuuaaauguuaugacuauguaa

SEQ ID NO: 1494792 - RNA, 18 nt, Human
auuuaguauuuuguuuca

SEQ ID NO: 1494793 - RNA, 20 nt, Human
auuuaguaucuuuuuauuca

SEQ ID NO: 1494794 - RNA, 13 nt, Human
auuuaguguucau

SEQ ID NO: 1494795 - RNA, 13 nt, Human
auuuagauguaua

SEQ ID NO: 1494796 - RNA, 17 nt, Human
auuuauaaaaauaaaaa

SEQ ID NO: 1494797 - RNA, 22 nt, Human
auuuauaaaaauaaaaaacacu

SEQ ID NO: 1494798 - RNA, 23 nt, Human
auuuauaaaaauaaaaaacacug

SEQ ID NO: 1494799 - RNA, 17 nt, Human
auuuauuuuaauaaugu

SEQ ID NO: 1494800 - RNA, 20 nt, Human
auuuauuuuaauaauguuuc

SEQ ID NO: 1494801 - RNA, 19 nt, Human
auuuauuuuaauaauguuu

SEQ ID NO: 1494802 - RNA, 14 nt, Human
auuugaaauauuga

SEQ ID NO: 1494803 - RNA, 14 nt, Human
auuugaaccaauaa

SEQ ID NO: 1494804 - RNA, 24 nt, Human
auucugucucuggauuauauuaug

SEQ ID NO: 1494805 - RNA, 13 nt, Human
auuguauucagag

SEQ ID NO: 1494806 - RNA, 19 nt, Human
cacagugaucaaguuauuu

SEQ ID NO: 1494807 - RNA, 13 nt, Human
auuuuccugaaaa

SEQ ID NO: 1494808 - RNA, 14 nt, Human
caaaaacaaaaaga

SEQ ID NO: 1494809 - RNA, 20 nt, Human
caaaaagaaaagaaaauuuu

SEQ ID NO: 1494810 - RNA, 19 nt, Human
caaaaauuaucuauagcua

SEQ ID NO: 1494811 - RNA, 19 nt, Human
caaaaaucucaauauuuca

SEQ ID NO: 1494812 - RNA, 16 nt, Human
caaaauuguuacaaau

SEQ ID NO: 1494813 - RNA, 22 nt, Human
caaaauuuuuucucuaggaaau

SEQ ID NO: 1494814 - RNA, 21 nt, Human
caaaauuuuuucucuaggaaa

SEQ ID NO: 1494815 - RNA, 16 nt, Human
caaaauuuuuucucua

SEQ ID NO: 1494816 - RNA, 21 nt, Human
caaaggcauuauaaaaagaau

SEQ ID NO: 1494817 - RNA, 15 nt, Human
caaauugugugaaag

SEQ ID NO: 1494818 - RNA, 21 nt, Human
caaauuguaagcaugcacaaa

SEQ ID NO: 1494819 - RNA, 14 nt, Human
caaaugucuauaaa

SEQ ID NO: 1494820 - RNA, 15 nt, Human
caaaugucuauaaac

SEQ ID NO: 1494821 - RNA, 20 nt, Human
caaauacgugggcauucaaa

SEQ ID NO: 1494822 - RNA, 22 nt, Human
caaauacgugggcauucaaaug

SEQ ID NO: 1494823 - RNA, 21 nt, Human
caaauacgugggcauucaaau

SEQ ID NO: 1494824 - RNA, 17 nt, Human
caaaaauuaucuauagc

SEQ ID NO: 1494825 - RNA, 23 nt, Human
caauacaucccuuaccugggaaa

SEQ ID NO: 1494826 - RNA, 18 nt, Human
caaucuguaaaacuaaga

SEQ ID NO: 1494827 - RNA, 19 nt, Human
caauuacaacggagucaaa

SEQ ID NO: 1494828 - RNA, 18 nt, Human
caauuaauuccuucagca

SEQ ID NO: 1494829 - RNA, 15 nt, Human
caauuaauuccuuca

SEQ ID NO: 1494830 - RNA, 14 nt, Human
caauuaauuuuaga

SEQ ID NO: 1494831 - RNA, 13 nt, Human
caaggucugcuuu

SEQ ID NO: 1494832 - RNA, 21 nt, Human
caagccagauuuuccugaaaa

SEQ ID NO: 1494833 - RNA, 20 nt, Human
caagaacacagcccugcuuc

SEQ ID NO: 1494834 - RNA, 19 nt, Human
caagacugcacaucaaaau

SEQ ID NO: 1494835 - RNA, 17 nt, Human
caaauuucaugaccagu

SEQ ID NO: 1494836 - RNA, 13 nt, Human
caacggagucaaa

SEQ ID NO: 1494837 - RNA, 20 nt, Human
caaccucugccucccagguu

SEQ ID NO: 1494838 - RNA, 12 nt, Human
caccccuaggac

SEQ ID NO: 1494839 - RNA, 12 nt, Human
cacccucacacu

SEQ ID NO: 1494840 - RNA, 15 nt, Human
caccgacugaaaaua

SEQ ID NO: 1494841 - RNA, 13 nt, Human
caccgcagaagga

SEQ ID NO: 1494842 - RNA, 20 nt, Human
caccugggauuacaagcaug

SEQ ID NO: 1494843 - RNA, 11 nt, Human
caccugucugu

SEQ ID NO: 1494844 - RNA, 12 nt, Human
caccugucuguc

SEQ ID NO: 1494845 - RNA, 13 nt, Human
caccugucugucu

SEQ ID NO: 1494846 - RNA, 14 nt, Human
caccugucugucug

SEQ ID NO: 1494847 - RNA, 13 nt, Human
caccuccugccuc

SEQ ID NO: 1494848 - RNA, 15 nt, Human
caccuccugccucag

SEQ ID NO: 1494849 - RNA, 21 nt, Human
caccucccucaaccucauccu

SEQ ID NO: 1494850 - RNA, 19 nt, Human
caccucgcagguucaagca

SEQ ID NO: 1494851 - RNA, 21 nt, Human
caccucucaauauucaauaaa

SEQ ID NO: 1494852 - RNA, 22 nt, Human
caccucucaauauucaauaaag

SEQ ID NO: 1494853 - RNA, 23 nt, Human
caccucucaauauucaauaaagc

SEQ ID NO: 1494854 - RNA, 14 nt, Human
caccucauggaauu

SEQ ID NO: 1494855 - RNA, 12 nt, Human
caccucauggaa

SEQ ID NO: 1494856 - RNA, 11 nt, Human
caccucaugga

SEQ ID NO: 1494857 - RNA, 15 nt, Human
caccucccucaaccu

SEQ ID NO: 1494858 - RNA, 17 nt, Human
caccucccucaaccuca

SEQ ID NO: 1494859 - RNA, 19 nt, Human
caccucccucaaccucauc

SEQ ID NO: 1494860 - RNA, 14 nt, Human
caccgcagaaggaa

SEQ ID NO: 1494861 - RNA, 15 nt, Human
caccgcagaaggaag

SEQ ID NO: 1494862 - RNA, 13 nt, Human
caccucucaauau

SEQ ID NO: 1494863 - RNA, 19 nt, Human
cacuguggguagacacaca

SEQ ID NO: 1494864 - RNA, 24 nt, Human
cacuguggguagacacacaugaag

SEQ ID NO: 1494865 - RNA, 22 nt, Human
cacuguggguagacacacauga

SEQ ID NO: 1494866 - RNA, 13 nt, Human
cacuggccccacc

SEQ ID NO: 1494867 - RNA, 14 nt, Human
cacuggccccaccc

SEQ ID NO: 1494868 - RNA, 16 nt, Human
cacuggccccacccuc

SEQ ID NO: 1494869 - RNA, 13 nt, Human
cacuggcgaggag

SEQ ID NO: 1494870 - RNA, 15 nt, Human
cacuguacuugcucu

SEQ ID NO: 1494871 - RNA, 18 nt, Human
cacuguacuugcucuuga

SEQ ID NO: 1494872 - RNA, 19 nt, Human
cacuguacuugcucuugau

SEQ ID NO: 1494873 - RNA, 12 nt, Human
cacugccuuuga

SEQ ID NO: 1494874 - RNA, 20 nt, Human
cacugccuucucaacuccaa

SEQ ID NO: 1494875 - RNA, 13 nt, Human
cacugcaaccucc

SEQ ID NO: 1494876 - RNA, 14 nt, Human
cacugcaaccuccg

SEQ ID NO: 1494877 - RNA, 14 nt, Human
cacugcaaccucca

SEQ ID NO: 1494878 - RNA, 17 nt, Human
cacugcaaccuccaccu

SEQ ID NO: 1494879 - RNA, 19 nt, Human
cacugcaaccuccaccucg

SEQ ID NO: 1494880 - RNA, 14 nt, Human
cacugcaaccucug

SEQ ID NO: 1494881 - RNA, 16 nt, Human
caccugucugucuguc

SEQ ID NO: 1494882 - RNA, 22 nt, Human
caccugucugucugucuguccc

SEQ ID NO: 1494883 - RNA, 22 nt, Human
caccuguggaacauaaaaagga

SEQ ID NO: 1494884 - RNA, 13 nt, Human
cacgcacggcagc

SEQ ID NO: 1494885 - RNA, 16 nt, Human
cacgccuggcuaauuu

SEQ ID NO: 1494886 - RNA, 13 nt, Human
cacuaaacaaaga

SEQ ID NO: 1494887 - RNA, 19 nt, Human
cacuaguauuucuaugaaa

SEQ ID NO: 1494888 - RNA, 16 nt, Human
cacuaacaugauuugg

SEQ ID NO: 1494889 - RNA, 17 nt, Human
cacuaagagagaaugag

SEQ ID NO: 1494890 - RNA, 15 nt, Human
cacucguguguuucu

SEQ ID NO: 1494891 - RNA, 16 nt, Human
cacucguguguuucua

SEQ ID NO: 1494892 - RNA, 11 nt, Human
cagaaggaagg

SEQ ID NO: 1494893 - RNA, 15 nt, Human
cagaaggaaggcagg

SEQ ID NO: 1494894 - RNA, 20 nt, Human
cagaaggaaggcagggagga

SEQ ID NO: 1494895 - RNA, 22 nt, Human
cagaaggaaggcagggaggagg

SEQ ID NO: 1494896 - RNA, 13 nt, Human
cagaacuacuucu

SEQ ID NO: 1494897 - RNA, 14 nt, Human
cacuuuuugcagcu

SEQ ID NO: 1494898 - RNA, 18 nt, Human
cacuuuuugcagcuuucu

SEQ ID NO: 1494899 - RNA, 15 nt, Human
cacuuuuugcagcuu

SEQ ID NO: 1494900 - RNA, 12 nt, Human
cacuuugcauaa

SEQ ID NO: 1494901 - RNA, 22 nt, Human
cagaaaaguugaauuuuacaug

SEQ ID NO: 1494902 - RNA, 20 nt, Human
cagaaaaguugaauuuuaca

SEQ ID NO: 1494903 - RNA, 17 nt, Human
cagaaaaguugaauuuu

SEQ ID NO: 1494904 - RNA, 23 nt, Human
cagaaaagaaagcuacagaagaa

SEQ ID NO: 1494905 - RNA, 22 nt, Human
cagaaagcaucccucacccauc

SEQ ID NO: 1494906 - RNA, 18 nt, Human
cagaaacacccucacacu

SEQ ID NO: 1494907 - RNA, 20 nt, Human
cagaaacacccucacacugg

SEQ ID NO: 1494908 - RNA, 21 nt, Human
cagaaacacccucacacuggg

SEQ ID NO: 1494909 - RNA, 22 nt, Human
cagaaacacccucacacuggga

SEQ ID NO: 1494910 - RNA, 23 nt, Human
cagaaacacccucacacugggac

SEQ ID NO: 1494911 - RNA, 21 nt, Human
cagaaugagacauccagcaga

SEQ ID NO: 1494912 - RNA, 13 nt, Human
cagacauuuuaaa

SEQ ID NO: 1494913 - RNA, 14 nt, Human
cagaccauggacac

SEQ ID NO: 1494914 - RNA, 22 nt, Human
cagaccauggacacuacaccca

SEQ ID NO: 1494915 - RNA, 21 nt, Human
cagaccauggacacuacaccc

SEQ ID NO: 1494916 - RNA, 14 nt, Human
cagauccuggaaau

SEQ ID NO: 1494917 - RNA, 22 nt, Human
cagauaaagguucaugcaaacu

SEQ ID NO: 1494918 - RNA, 14 nt, Human
cagauaaucacaau

SEQ ID NO: 1494919 - RNA, 23 nt, Human
cagaggcgcaugaauuugugaag

SEQ ID NO: 1494920 - RNA, 17 nt, Human
cagagcaagaccccauc

SEQ ID NO: 1494921 - RNA, 13 nt, Human
cagagaagaaaga

SEQ ID NO: 1494922 - RNA, 14 nt, Human
cagagaagaaagaa

SEQ ID NO: 1494923 - RNA, 18 nt, Human
cagagaagaaagaacgga

SEQ ID NO: 1494924 - RNA, 19 nt, Human
cagagaagaaagaacggaa

SEQ ID NO: 1494925 - RNA, 13 nt, Human
cagagcacugcuc

SEQ ID NO: 1494926 - RNA, 15 nt, Human
cagagcacugcucca

SEQ ID NO: 1494927 - RNA, 14 nt, Human
cagagccaggaaga

SEQ ID NO: 1494928 - RNA, 15 nt, Human
cagagccaggaagau

SEQ ID NO: 1494929 - RNA, 17 nt, Human
cagagccaggaagaucc

SEQ ID NO: 1494930 - RNA, 21 nt, Human
cagagccaggaagauccccca

SEQ ID NO: 1494931 - RNA, 23 nt, Human
cagagccaggaagaucccccaga

SEQ ID NO: 1494932 - RNA, 13 nt, Human
cagagccaggaag

SEQ ID NO: 1494933 - RNA, 15 nt, Human
cagauuuuccugaaa

SEQ ID NO: 1494934 - RNA, 14 nt, Human
cagauuuuccugaa

SEQ ID NO: 1494935 - RNA, 14 nt, Human
cagcaacaauaaau

SEQ ID NO: 1494936 - RNA, 19 nt, Human
cagcaacaauaaauagaca

SEQ ID NO: 1494937 - RNA, 20 nt, Human
cagcaacaauaaauagacac

SEQ ID NO: 1494938 - RNA, 17 nt, Human
cagcaauagagacggga

SEQ ID NO: 1494939 - RNA, 15 nt, Human
cagcaauagagacgg

SEQ ID NO: 1494940 - RNA, 22 nt, Human
cagcaauuacaacggagucaaa

SEQ ID NO: 1494941 - RNA, 14 nt, Human
cagcaauuuaaaug

SEQ ID NO: 1494942 - RNA, 15 nt, Human
cagcaauuuaaaugu

SEQ ID NO: 1494943 - RNA, 16 nt, Human
cagcaauuuaaauguu

SEQ ID NO: 1494944 - RNA, 14 nt, Human
cagcacuuuagaau

SEQ ID NO: 1494945 - RNA, 22 nt, Human
cagcacuuuagaauaugccuug

SEQ ID NO: 1494946 - RNA, 21 nt, Human
cagccacggggacucagcccu

SEQ ID NO: 1494947 - RNA, 23 nt, Human
cagccauccagggggcaagagga

SEQ ID NO: 1494948 - RNA, 18 nt, Human
cagccaacuauggccugu

SEQ ID NO: 1494949 - RNA, 20 nt, Human
cagcccugcugcugccugcc

SEQ ID NO: 1494950 - RNA, 16 nt, Human
cagccuaguugaucag

SEQ ID NO: 1494951 - RNA, 21 nt, Human
cagcgagauaccccaccuccc

SEQ ID NO: 1494952 - RNA, 13 nt, Human
cagcucacugcaa

SEQ ID NO: 1494953 - RNA, 15 nt, Human
cagcucacugcaacc

SEQ ID NO: 1494954 - RNA, 16 nt, Human
cagccuucuacugcuc

SEQ ID NO: 1494955 - RNA, 18 nt, Human
cagcuggggccaggcugg

SEQ ID NO: 1494956 - RNA, 19 nt, Human
cagcuggggccaggcuggg

SEQ ID NO: 1494957 - RNA, 20 nt, Human
cagcuggggccaggcugggu

SEQ ID NO: 1494958 - RNA, 18 nt, Human
cagcuguaugauucccag

SEQ ID NO: 1494959 - RNA, 21 nt, Human
cagcuggggccaggcuggguc

SEQ ID NO: 1494960 - RNA, 22 nt, Human
cagcuggggccaggcugggucg

SEQ ID NO: 1494961 - RNA, 18 nt, Human
cagcucucaguugcagcc

SEQ ID NO: 1494962 - RNA, 21 nt, Human
cagcuuuauggagauauaauu

SEQ ID NO: 1494963 - RNA, 14 nt, Human
cagcuuuagccaag

SEQ ID NO: 1494964 - RNA, 18 nt, Human
caggaaccacaagacugc

SEQ ID NO: 1494965 - RNA, 18 nt, Human
cagcuuuucccaaaagcc

SEQ ID NO: 1494966 - RNA, 20 nt, Human
cagcuuuucccaaaagccca

SEQ ID NO: 1494967 - RNA, 19 nt, Human
cagcuguaugauucccagc

SEQ ID NO: 1494968 - RNA, 19 nt, Human
caggaagaucccccagaaa

SEQ ID NO: 1494969 - RNA, 14 nt, Human
caggaagagaagga

SEQ ID NO: 1494970 - RNA, 15 nt, Human
caggaagagaaggag

SEQ ID NO: 1494971 - RNA, 17 nt, Human
caggaagagaaggagca

SEQ ID NO: 1494972 - RNA, 17 nt, Human
caggaagaucccccaga

SEQ ID NO: 1494973 - RNA, 18 nt, Human
caggaagaucccccagaa

SEQ ID NO: 1494974 - RNA, 19 nt, Human
caggaguuucguuuucaaa

SEQ ID NO: 1494975 - RNA, 11 nt, Human
caggagcccug

SEQ ID NO: 1494976 - RNA, 14 nt, Human
caggagcccuggga

SEQ ID NO: 1494977 - RNA, 16 nt, Human
caggagcccugggagg

SEQ ID NO: 1494978 - RNA, 18 nt, Human
caggagcccugggaggcu

SEQ ID NO: 1494979 - RNA, 19 nt, Human
caggagcccugggaggcuc

SEQ ID NO: 1494980 - RNA, 21 nt, Human
caggagcccugggaggcucug

SEQ ID NO: 1494981 - RNA, 23 nt, Human
caggaugguucccuugaugaaga

SEQ ID NO: 1494982 - RNA, 21 nt, Human
caggaugguucccuugaugaa

SEQ ID NO: 1494983 - RNA, 18 nt, Human
caggauggucuccaucuc

SEQ ID NO: 1494984 - RNA, 22 nt, Human
caggaugaugacuauggaaaga

SEQ ID NO: 1494985 - RNA, 18 nt, Human
caggaugaugacuaugga

SEQ ID NO: 1494986 - RNA, 20 nt, Human
caggaugaugacuauggaaa

SEQ ID NO: 1494987 - RNA, 15 nt, Human
caggaucaguuaacu

SEQ ID NO: 1494988 - RNA, 21 nt, Human
caggauauucucacagcucca

SEQ ID NO: 1494989 - RNA, 17 nt, Human
caggaucaguuaacuau

SEQ ID NO: 1494990 - RNA, 13 nt, Human
caggauccaggcc

SEQ ID NO: 1494991 - RNA, 14 nt, Human
caggcaggagcccu

SEQ ID NO: 1494992 - RNA, 23 nt, Human
caggcuuuuuuaucaugugaaau

SEQ ID NO: 1494993 - RNA, 16 nt, Human
caggcuggagugcagu

SEQ ID NO: 1494994 - RNA, 23 nt, Human
caggcugggucgcccuggacugu

SEQ ID NO: 1494995 - RNA, 21 nt, Human
caggcugggucgcccuggacu

SEQ ID NO: 1494996 - RNA, 19 nt, Human
caggcuagauguauguacu

SEQ ID NO: 1494997 - RNA, 13 nt, Human
caggcuagaugua

SEQ ID NO: 1494998 - RNA, 23 nt, Human
cagggaccggcggaccccagcca

SEQ ID NO: 1494999 - RNA, 16 nt, Human
caggggacaggauggu

SEQ ID NO: 1495000 - RNA, 11 nt, Human
caggggacagg

SEQ ID NO: 1495001 - RNA, 15 nt, Human
cagggggcaagagga

SEQ ID NO: 1495002 - RNA, 16 nt, Human
cagugaaagaaaauaa

SEQ ID NO: 1495003 - RNA, 20 nt, Human
cagugaaagaaaauaacaau

SEQ ID NO: 1495004 - RNA, 13 nt, Human
cagucccuccaca

SEQ ID NO: 1495005 - RNA, 14 nt, Human
caguaucucuucag

SEQ ID NO: 1495006 - RNA, 15 nt, Human
caguaucucuucagu

SEQ ID NO: 1495007 - RNA, 16 nt, Human
caguaucucuucaguc

SEQ ID NO: 1495008 - RNA, 17 nt, Human
caguaucucuucagucu

SEQ ID NO: 1495009 - RNA, 19 nt, Human
caguaucucuucagucucu

SEQ ID NO: 1495010 - RNA, 22 nt, Human
caguaucucuucagucucuaua

SEQ ID NO: 1495011 - RNA, 19 nt, Human
caguaggggcuuauaauaa

SEQ ID NO: 1495012 - RNA, 22 nt, Human
caguaggggcuuauaauaaagg

SEQ ID NO: 1495013 - RNA, 20 nt, Human
cagucauucagauaugauuc

SEQ ID NO: 1495014 - RNA, 17 nt, Human
cagucauucagauauga

SEQ ID NO: 1495015 - RNA, 23 nt, Human
caguauggguuagggaaaacauu

SEQ ID NO: 1495016 - RNA, 16 nt, Human
caguauggguuaggga

SEQ ID NO: 1495017 - RNA, 21 nt, Human
caguauggguuagggaaaaca

SEQ ID NO: 1495018 - RNA, 22 nt, Human
cagucaggaaagagaacuucca

SEQ ID NO: 1495019 - RNA, 18 nt, Human
cagucaggaaagagaacu

SEQ ID NO: 1495020 - RNA, 15 nt, Human
cagucaggaaagaga

SEQ ID NO: 1495021 - RNA, 19 nt, Human
caggucccuaauaaagcug

SEQ ID NO: 1495022 - RNA, 20 nt, Human
caggucccuaauaaagcugu

SEQ ID NO: 1495023 - RNA, 21 nt, Human
caggucccuaauaaagcugug

SEQ ID NO: 1495024 - RNA, 22 nt, Human
caggucccuaauaaagcugugu

SEQ ID NO: 1495025 - RNA, 11 nt, Human
caggucccuaa

SEQ ID NO: 1495026 - RNA, 12 nt, Human
caggucccuaau

SEQ ID NO: 1495027 - RNA, 13 nt, Human
caggucccuaaua

SEQ ID NO: 1495028 - RNA, 14 nt, Human
caggucccuaauaa

SEQ ID NO: 1495029 - RNA, 15 nt, Human
caggucccuaauaaa

SEQ ID NO: 1495030 - RNA, 16 nt, Human
caggucccuaauaaag

SEQ ID NO: 1495031 - RNA, 17 nt, Human
caggucccuaauaaagc

SEQ ID NO: 1495032 - RNA, 18 nt, Human
caggucccuaauaaagcu

SEQ ID NO: 1495033 - RNA, 16 nt, Human
cauauaagugauugcu

SEQ ID NO: 1495034 - RNA, 13 nt, Human
cauauauaacaau

SEQ ID NO: 1495035 - RNA, 20 nt, Human
cauauauaacaaugcuguau

SEQ ID NO: 1495036 - RNA, 15 nt, Human
cauauauaacaaugc

SEQ ID NO: 1495037 - RNA, 13 nt, Human
cauauuguuacug

SEQ ID NO: 1495038 - RNA, 19 nt, Human
cauauuguuacugguacca

SEQ ID NO: 1495039 - RNA, 13 nt, Human
caucccuccuggg

SEQ ID NO: 1495040 - RNA, 18 nt, Human
caucccuuaccugggaaa

SEQ ID NO: 1495041 - RNA, 14 nt, Human
caucaucucagcuc

SEQ ID NO: 1495042 - RNA, 15 nt, Human
caucaucucagcuca

SEQ ID NO: 1495043 - RNA, 10 nt, Human
caucuuuaag

SEQ ID NO: 1495044 - RNA, 14 nt, Human
caugaaagauucaa

SEQ ID NO: 1495045 - RNA, 18 nt, Human
caugagucacuacgccug

SEQ ID NO: 1495046 - RNA, 13 nt, Human
caugauaaaugau

SEQ ID NO: 1495047 - RNA, 22 nt, Human
cauggacuucugccagcauaau

SEQ ID NO: 1495048 - RNA, 16 nt, Human
cauggacacuacaccc

SEQ ID NO: 1495049 - RNA, 17 nt, Human
cauggacacuacaccca

SEQ ID NO: 1495050 - RNA, 18 nt, Human
cauggacacuacacccag

SEQ ID NO: 1495051 - RNA, 19 nt, Human
cauggacacuacacccagc

SEQ ID NO: 1495052 - RNA, 20 nt, Human
cauggacacuacacccagca

SEQ ID NO: 1495053 - RNA, 20 nt, Human
caugcuucccuuuccugagu

SEQ ID NO: 1495054 - RNA, 22 nt, Human
caugcugugugacucaaaccaa

SEQ ID NO: 1495055 - RNA, 18 nt, Human
caugcuguucaugaaaga

SEQ ID NO: 1495056 - RNA, 16 nt, Human
caugcuguucaugaaa

SEQ ID NO: 1495057 - RNA, 20 nt, Human
cauggaauuggagcucgugg

SEQ ID NO: 1495058 - RNA, 21 nt, Human
cauggaaauucccuucaucug

SEQ ID NO: 1495059 - RNA, 14 nt, Human
caugcugugugacu

SEQ ID NO: 1495060 - RNA, 15 nt, Human
caugcuguucaugaa

SEQ ID NO: 1495061 - RNA, 17 nt, Human
caugcugugugacucaa

SEQ ID NO: 1495062 - RNA, 21 nt, Human
caugcugugugacucaaacca

SEQ ID NO: 1495063 - RNA, 14 nt, Human
caugcagaaagcau

SEQ ID NO: 1495064 - RNA, 20 nt, Human
cauguuucuuuguaaugaaa

SEQ ID NO: 1495065 - RNA, 20 nt, Human
caugugcuaguaauuggaaa

SEQ ID NO: 1495066 - RNA, 18 nt, Human
cauuuuacauuaaauuuu

SEQ ID NO: 1495067 - RNA, 23 nt, Human
cauuuuaccuuugacaaagguaa

SEQ ID NO: 1495068 - RNA, 13 nt, Human
cauucuggaauaa

SEQ ID NO: 1495069 - RNA, 12 nt, Human
cauucuggaagu

SEQ ID NO: 1495070 - RNA, 16 nt, Human
cauucuggaagugacu

SEQ ID NO: 1495071 - RNA, 14 nt, Human
cauuccugaacagg

SEQ ID NO: 1495072 - RNA, 12 nt, Human
cauuccuccagg

SEQ ID NO: 1495073 - RNA, 13 nt, Human
cauuccuccaggu

SEQ ID NO: 1495074 - RNA, 15 nt, Human
cauuccauucuggaa

SEQ ID NO: 1495075 - RNA, 14 nt, Human
cauuccauucugga

SEQ ID NO: 1495076 - RNA, 12 nt, Human
cauuccauccuu

SEQ ID NO: 1495077 - RNA, 14 nt, Human
cauuccauccuuga

SEQ ID NO: 1495078 - RNA, 22 nt, Human
cauuccaacuaucucauuucca

SEQ ID NO: 1495079 - RNA, 15 nt, Human
cauucauuccauucu

SEQ ID NO: 1495080 - RNA, 16 nt, Human
cauucauuccauucug

SEQ ID NO: 1495081 - RNA, 17 nt, Human
cauucauuccauucugg

SEQ ID NO: 1495082 - RNA, 19 nt, Human
cauucauuuucuggguguu

SEQ ID NO: 1495083 - RNA, 21 nt, Human
cauucagauaugauucaaaug

SEQ ID NO: 1495084 - RNA, 20 nt, Human
cauucaaauguauuacagug

SEQ ID NO: 1495085 - RNA, 11 nt, Human
ccaaaccacuu

SEQ ID NO: 1495086 - RNA, 14 nt, Human
ccaaaccacuuuuu

SEQ ID NO: 1495087 - RNA, 22 nt, Human
ccaaaccacuuuuugcagcuuu

SEQ ID NO: 1495088 - RNA, 22 nt, Human
ccacccagaaugagacauccag

SEQ ID NO: 1495089 - RNA, 21 nt, Human
ccacccucguggacaccugcc

SEQ ID NO: 1495090 - RNA, 22 nt, Human
ccacccucguggacaccugccc

SEQ ID NO: 1495091 - RNA, 20 nt, Human
ccacccucguggacaccugc

SEQ ID NO: 1495092 - RNA, 18 nt, Human
ccaccucccucaaccuca

SEQ ID NO: 1495093 - RNA, 20 nt, Human
ccaccucccucaaccucauc

SEQ ID NO: 1495094 - RNA, 14 nt, Human
ccacugccuuugac

SEQ ID NO: 1495095 - RNA, 22 nt, Human
ccacugccuuugaccugccucc

SEQ ID NO: 1495096 - RNA, 13 nt, Human
ccagauuuaugca

SEQ ID NO: 1495097 - RNA, 22 nt, Human
ccagauuuaugcauauuauuuu

SEQ ID NO: 1495098 - RNA, 16 nt, Human
ccagagcacugcucca

SEQ ID NO: 1495099 - RNA, 20 nt, Human
ccacuguacuugcucuugau

SEQ ID NO: 1495100 - RNA, 17 nt, Human
ccacuguacuugcucuu

SEQ ID NO: 1495101 - RNA, 18 nt, Human
ccacuguacuugcucuug

SEQ ID NO: 1495102 - RNA, 19 nt, Human
ccacuguacuugcucuuga

SEQ ID NO: 1495103 - RNA, 14 nt, Human
ccagaccauggaca

SEQ ID NO: 1495104 - RNA, 15 nt, Human
ccagaccauggacac

SEQ ID NO: 1495105 - RNA, 23 nt, Human
ccagcaauuacaacggagucaaa

SEQ ID NO: 1495106 - RNA, 14 nt, Human
ccagccucagcucu

SEQ ID NO: 1495107 - RNA, 23 nt, Human
ccagcauaauacuugcuuuggaa

SEQ ID NO: 1495108 - RNA, 18 nt, Human
ccagguuggagugcagug

SEQ ID NO: 1495109 - RNA, 13 nt, Human
ccauucauuccau

SEQ ID NO: 1495110 - RNA, 14 nt, Human
ccauucauuccauu

SEQ ID NO: 1495111 - RNA, 14 nt, Human
ccauauuggccagu

SEQ ID NO: 1495112 - RNA, 13 nt, Human
ccauggcccugcc

SEQ ID NO: 1495113 - RNA, 13 nt, Human
cccagaaaagaaa

SEQ ID NO: 1495114 - RNA, 20 nt, Human
cccagaaaagaaagcuacag

SEQ ID NO: 1495115 - RNA, 13 nt, Human
cccgccucagccu

SEQ ID NO: 1495116 - RNA, 18 nt, Human
cccuggucccucugcagu

SEQ ID NO: 1495117 - RNA, 21 nt, Human
cccuggacugugugcucagga

SEQ ID NO: 1495118 - RNA, 15 nt, Human
cccuggacugugugc

SEQ ID NO: 1495119 - RNA, 15 nt, Human
cccugggaggcucug

SEQ ID NO: 1495120 - RNA, 18 nt, Human
cccugccaccuccugccu

SEQ ID NO: 1495121 - RNA, 20 nt, Human
cccugccaccuccugccuca

SEQ ID NO: 1495122 - RNA, 13 nt, Human
cccugccaccugu

SEQ ID NO: 1495123 - RNA, 14 nt, Human
cccugccaccuguc

SEQ ID NO: 1495124 - RNA, 15 nt, Human
cccugccaccugucu

SEQ ID NO: 1495125 - RNA, 16 nt, Human
cccugccaccugucug

SEQ ID NO: 1495126 - RNA, 17 nt, Human
cccugccaccugucugu

SEQ ID NO: 1495127 - RNA, 18 nt, Human
cccugccaccugucuguc

SEQ ID NO: 1495128 - RNA, 19 nt, Human
cccuccaccgcagaaggaa

SEQ ID NO: 1495129 - RNA, 23 nt, Human
cccuccacauuucccccuagccu

SEQ ID NO: 1495130 - RNA, 21 nt, Human
cccuccaccgcagaaggaagg

SEQ ID NO: 1495131 - RNA, 18 nt, Human
cccuccaccgcagaagga

SEQ ID NO: 1495132 - RNA, 18 nt, Human
cccucucucauacccucc

SEQ ID NO: 1495133 - RNA, 22 nt, Human
cccucucucauacccucccucc

SEQ ID NO: 1495134 - RNA, 21 nt, Human
cccaccucccucaaccucauc

SEQ ID NO: 1495135 - RNA, 16 nt, Human
ccuaaauauauuuuaa

SEQ ID NO: 1495136 - RNA, 18 nt, Human
ccuaaauauauuuuaaga

SEQ ID NO: 1495137 - RNA, 19 nt, Human
ccuaaauaauaaaaauaaa

SEQ ID NO: 1495138 - RNA, 18 nt, Human
ccuaaaagaaacccugca

SEQ ID NO: 1495139 - RNA, 19 nt, Human
ccuaaaagaaacccugcac

SEQ ID NO: 1495140 - RNA, 17 nt, Human
ccggcuugccacacccc

SEQ ID NO: 1495141 - RNA, 21 nt, Human
ccucaucuccccaucauuggu

SEQ ID NO: 1495142 - RNA, 18 nt, Human
ccuccaccgcagaaggaa

SEQ ID NO: 1495143 - RNA, 12 nt, Human
ccuccaccucaa

SEQ ID NO: 1495144 - RNA, 22 nt, Human
ccucucaauauucaauaaagcu

SEQ ID NO: 1495145 - RNA, 18 nt, Human
ccucucaauauucaauaa

SEQ ID NO: 1495146 - RNA, 20 nt, Human
ccucucaauauucaauaaag

SEQ ID NO: 1495147 - RNA, 19 nt, Human
ccugcugugaaagaaguaa

SEQ ID NO: 1495148 - RNA, 23 nt, Human
ccuggaaaucaggguuaguauug

SEQ ID NO: 1495149 - RNA, 22 nt, Human
ccugccucaccagcccuggcaa

SEQ ID NO: 1495150 - RNA, 17 nt, Human
ccuggugcacuggcccc

SEQ ID NO: 1495151 - RNA, 19 nt, Human
ccuggugcacuggccccac

SEQ ID NO: 1495152 - RNA, 20 nt, Human
ccuggugcacuggccccacc

SEQ ID NO: 1495153 - RNA, 12 nt, Human
ccuguuuaagag

SEQ ID NO: 1495154 - RNA, 15 nt, Human
ccuguuuaagagaca

SEQ ID NO: 1495155 - RNA, 16 nt, Human
ccuuaacugcauccag

SEQ ID NO: 1495156 - RNA, 17 nt, Human
ccuuaagagucauccag

SEQ ID NO: 1495157 - RNA, 20 nt, Human
ccuucagcacuuuagaauau

SEQ ID NO: 1495158 - RNA, 18 nt, Human
ccuucuauacccacccag

SEQ ID NO: 1495159 - RNA, 20 nt, Human
ccuucuauacccacccagaa

SEQ ID NO: 1495160 - RNA, 19 nt, Human
ccuucuauacccacccaga

SEQ ID NO: 1495161 - RNA, 13 nt, Human
ccuugaacuagga

SEQ ID NO: 1495162 - RNA, 19 nt, Human
ccuuggggcugaugcaguu

SEQ ID NO: 1495163 - RNA, 15 nt, Human
ccuuugaccugccuc

SEQ ID NO: 1495164 - RNA, 16 nt, Human
ccuuugaccugccucc

SEQ ID NO: 1495165 - RNA, 21 nt, Human
ccuuguuucucuuccuuucuu

SEQ ID NO: 1495166 - RNA, 21 nt, Human
ccuuugaccugccucccuuca

SEQ ID NO: 1495167 - RNA, 22 nt, Human
ccuuugaccugccucccuucau

SEQ ID NO: 1495168 - RNA, 13 nt, Human
cgagauaccccac

SEQ ID NO: 1495169 - RNA, 20 nt, Human
cgagauaccccaccucccuc

SEQ ID NO: 1495170 - RNA, 17 nt, Human
cucauacccucccuccc

SEQ ID NO: 1495171 - RNA, 16 nt, Human
cucauacccucccucc

SEQ ID NO: 1495172 - RNA, 21 nt, Human
cuccaaacugacucuuaagaa

SEQ ID NO: 1495173 - RNA, 16 nt, Human
cuccccuuuuuuuccc

SEQ ID NO: 1495174 - RNA, 17 nt, Human
cuccugccucagccucc

SEQ ID NO: 1495175 - RNA, 14 nt, Human
cuccuuagaaaaaa

SEQ ID NO: 1495176 - RNA, 18 nt, Human
cucgccggaucugaggga

SEQ ID NO: 1495177 - RNA, 17 nt, Human
cucgccggaucugaggg

SEQ ID NO: 1495178 - RNA, 22 nt, Human
cuagguaaauuacaguuccuag

SEQ ID NO: 1495179 - RNA, 21 nt, Human
cuagugagcagucaggaaaga

SEQ ID NO: 1495180 - RNA, 20 nt, Human
cuagugaaacucguuaauuu

SEQ ID NO: 1495181 - RNA, 16 nt, Human
cuaguaauuggaaagg

SEQ ID NO: 1495182 - RNA, 14 nt, Human
cuagucaccagaga

SEQ ID NO: 1495183 - RNA, 13 nt, Human
cuauaccaauaaa

SEQ ID NO: 1495184 - RNA, 14 nt, Human
cuauaccaauaaag

SEQ ID NO: 1495185 - RNA, 18 nt, Human
cuauauuguuugcuaagc

SEQ ID NO: 1495186 - RNA, 17 nt, Human
cuauauuuuacauaaau

SEQ ID NO: 1495187 - RNA, 13 nt, Human
cuauguaaacuac

SEQ ID NO: 1495188 - RNA, 13 nt, Human
cuauggccugugg

SEQ ID NO: 1495189 - RNA, 16 nt, Human
cucagauuucugagga

SEQ ID NO: 1495190 - RNA, 17 nt, Human
cucagauuucugaggaa

SEQ ID NO: 1495191 - RNA, 12 nt, Human
cucaaccucauc

SEQ ID NO: 1495192 - RNA, 13 nt, Human
cucaaccucaucc

SEQ ID NO: 1495193 - RNA, 23 nt, Human
cucaaauacgugggcauucaaau

SEQ ID NO: 1495194 - RNA, 19 nt, Human
cucuggauuauauuaugaa

SEQ ID NO: 1495195 - RNA, 20 nt, Human
cucuggauuauauuaugaag

SEQ ID NO: 1495196 - RNA, 15 nt, Human
cucuuccuucccugc

SEQ ID NO: 1495197 - RNA, 19 nt, Human
cucuuccuucccugcugug

SEQ ID NO: 1495198 - RNA, 13 nt, Human
cucuuccuuucuu

SEQ ID NO: 1495199 - RNA, 21 nt, Human
cucuguugccaggcuggagug

SEQ ID NO: 1495200 - RNA, 19 nt, Human
cucuuaagaagacugcauu

SEQ ID NO: 1495201 - RNA, 19 nt, Human
cucugaaggguaauuauau

SEQ ID NO: 1495202 - RNA, 21 nt, Human
cucugcaggucccuaauaaag

SEQ ID NO: 1495203 - RNA, 22 nt, Human
cucugcaggucccuaauaaagc

SEQ ID NO: 1495204 - RNA, 19 nt, Human
cucugcaggucccuaauaa

SEQ ID NO: 1495205 - RNA, 20 nt, Human
cucugcaggucccuaauaaa

SEQ ID NO: 1495206 - RNA, 15 nt, Human
cucugauacagaaaa

SEQ ID NO: 1495207 - RNA, 10 nt, Human
cucuucugaa

SEQ ID NO: 1495208 - RNA, 16 nt, Human
cucuucugaauaaagc

SEQ ID NO: 1495209 - RNA, 19 nt, Human
cucuucugaauaaagcaau

SEQ ID NO: 1495210 - RNA, 20 nt, Human
cucuucugaauaaagcaauu

SEQ ID NO: 1495211 - RNA, 20 nt, Human
cugaaauaaacgucuuaaau

SEQ ID NO: 1495212 - RNA, 12 nt, Human
cugaacuuugcu

SEQ ID NO: 1495213 - RNA, 13 nt, Human
cugaacuuugcug

SEQ ID NO: 1495214 - RNA, 14 nt, Human
cugaacuuugcuga

SEQ ID NO: 1495215 - RNA, 21 nt, Human
cugaacuuugcugagccugua

SEQ ID NO: 1495216 - RNA, 14 nt, Human
cugaagaagauggu

SEQ ID NO: 1495217 - RNA, 13 nt, Human
cugaauaaagcaa

SEQ ID NO: 1495218 - RNA, 14 nt, Human
cugaauaaagcaau

SEQ ID NO: 1495219 - RNA, 15 nt, Human
cugaauaaagcaauu

SEQ ID NO: 1495220 - RNA, 12 nt, Human
cugaauuauuuu

SEQ ID NO: 1495221 - RNA, 15 nt, Human
cugaauuaugaaacu

SEQ ID NO: 1495222 - RNA, 14 nt, Human
cugaauuaugaaac

SEQ ID NO: 1495223 - RNA, 13 nt, Human
cugaauuaugaaa

SEQ ID NO: 1495224 - RNA, 13 nt, Human
cugaauuucccuc

SEQ ID NO: 1495225 - RNA, 16 nt, Human
cugaauuaugaaacuu

SEQ ID NO: 1495226 - RNA, 13 nt, Human
cugcauccagccu

SEQ ID NO: 1495227 - RNA, 23 nt, Human
cugcaugcgagugcucauuucag

SEQ ID NO: 1495228 - RNA, 14 nt, Human
cugccaccuccugc

SEQ ID NO: 1495229 - RNA, 16 nt, Human
cugccaccuccugccu

SEQ ID NO: 1495230 - RNA, 19 nt, Human
cugccaccuccugccucag

SEQ ID NO: 1495231 - RNA, 17 nt, Human
cugccaccugucugucu

SEQ ID NO: 1495232 - RNA, 11 nt, Human
cugccaccugu

SEQ ID NO: 1495233 - RNA, 12 nt, Human
cugccaccuguc

SEQ ID NO: 1495234 - RNA, 13 nt, Human
cugccaccugucu

SEQ ID NO: 1495235 - RNA, 14 nt, Human
cugccaccugucug

SEQ ID NO: 1495236 - RNA, 15 nt, Human
cugccaccugucugu

SEQ ID NO: 1495237 - RNA, 16 nt, Human
cugccaccugucuguc

SEQ ID NO: 1495238 - RNA, 18 nt, Human
cugccaccugucugucug

SEQ ID NO: 1495239 - RNA, 13 nt, Human
cugccuauuuuaa

SEQ ID NO: 1495240 - RNA, 15 nt, Human
cugccucucugcagg

SEQ ID NO: 1495241 - RNA, 16 nt, Human
cugccucucugcaggu

SEQ ID NO: 1495242 - RNA, 17 nt, Human
cugccucucugcagguc

SEQ ID NO: 1495243 - RNA, 18 nt, Human
cugccucucugcaggucc

SEQ ID NO: 1495244 - RNA, 23 nt, Human
cugcggaggaaggaggacccagg

SEQ ID NO: 1495245 - RNA, 19 nt, Human
cugccucucugcagguccc

SEQ ID NO: 1495246 - RNA, 22 nt, Human
cugccuggacuuggccccugcc

SEQ ID NO: 1495247 - RNA, 23 nt, Human
cugccuggacuuggccccugcca

SEQ ID NO: 1495248 - RNA, 12 nt, Human
cugaggcugagg

SEQ ID NO: 1495249 - RNA, 14 nt, Human
cugaggcugaggca

SEQ ID NO: 1495250 - RNA, 22 nt, Human
cugauacagaaaaguugaauuu

SEQ ID NO: 1495251 - RNA, 20 nt, Human
cugggccccugccucucugc

SEQ ID NO: 1495252 - RNA, 23 nt, Human
cugggccccugccucucugcagg

SEQ ID NO: 1495253 - RNA, 13 nt, Human
cugggucgcccug

SEQ ID NO: 1495254 - RNA, 15 nt, Human
cugggucgcccugga

SEQ ID NO: 1495255 - RNA, 16 nt, Human
cugggucgcccuggac

SEQ ID NO: 1495256 - RNA, 18 nt, Human
cugguaugaacuugagga

SEQ ID NO: 1495257 - RNA, 20 nt, Human
cugguaugaacuugaggaca

SEQ ID NO: 1495258 - RNA, 21 nt, Human
cugguaugaacuugaggacac

SEQ ID NO: 1495259 - RNA, 22 nt, Human
cugguaugaacuugaggacaca

SEQ ID NO: 1495260 - RNA, 16 nt, Human
cugggggccucuucug

SEQ ID NO: 1495261 - RNA, 23 nt, Human
cugguaugaacuugaggacacau

SEQ ID NO: 1495262 - RNA, 14 nt, Human
cugucugucugucc

SEQ ID NO: 1495263 - RNA, 15 nt, Human
cugucugucuguccc

SEQ ID NO: 1495264 - RNA, 16 nt, Human
cugucugucuguccca

SEQ ID NO: 1495265 - RNA, 17 nt, Human
cugucugucugucccaa

SEQ ID NO: 1495266 - RNA, 14 nt, Human
cugucugucugucu

SEQ ID NO: 1495267 - RNA, 15 nt, Human
cugucugucugucug

SEQ ID NO: 1495268 - RNA, 21 nt, Human
cugucuuuuuucuaaaguaaa

SEQ ID NO: 1495269 - RNA, 14 nt, Human
cuguggaucaaauc

SEQ ID NO: 1495270 - RNA, 24 nt, Human
cuguggaucaaauccagccugcug

SEQ ID NO: 1495271 - RNA, 18 nt, Human
cuguggaacauaaaaagg

SEQ ID NO: 1495272 - RNA, 21 nt, Human
cuguggaacauaaaaaggaca

SEQ ID NO: 1495273 - RNA, 18 nt, Human
cugugugacucaaaccaa

SEQ ID NO: 1495274 - RNA, 14 nt, Human
cugugugcucagga

SEQ ID NO: 1495275 - RNA, 15 nt, Human
cuguuuuauaauuuu

SEQ ID NO: 1495276 - RNA, 14 nt, Human
cuguuuuauaauuu

SEQ ID NO: 1495277 - RNA, 21 nt, Human
cuguugccaggcuggagugca

SEQ ID NO: 1495278 - RNA, 16 nt, Human
cuuagaauacaguuuu

SEQ ID NO: 1495279 - RNA, 13 nt, Human
cuuaauucaaaua

SEQ ID NO: 1495280 - RNA, 20 nt, Human
cuuaauaaauuguguuuccu

SEQ ID NO: 1495281 - RNA, 23 nt, Human
cuuaagaagacugcauuauauuu

SEQ ID NO: 1495282 - RNA, 17 nt, Human
cuuaaccagaucauugu

SEQ ID NO: 1495283 - RNA, 19 nt, Human
cuuccagauccuggaaauc

SEQ ID NO: 1495284 - RNA, 16 nt, Human
cuucccuaucuuugcc

SEQ ID NO: 1495285 - RNA, 17 nt, Human
cuucccuaucuuugcca

SEQ ID NO: 1495286 - RNA, 18 nt, Human
cuucccuaucuuugccac

SEQ ID NO: 1495287 - RNA, 22 nt, Human
cuucccucuuccuucccugcug

SEQ ID NO: 1495288 - RNA, 22 nt, Human
cuucccuaucuuugccacccuc

SEQ ID NO: 1495289 - RNA, 23 nt, Human
cuucccuaucuuugccacccuca

SEQ ID NO: 1495290 - RNA, 19 nt, Human
cuucccugcugugaaagaa

SEQ ID NO: 1495291 - RNA, 23 nt, Human
cuucccuggaaaccuuccaccca

SEQ ID NO: 1495292 - RNA, 22 nt, Human
cuucccuggaaaccuuccaccc

SEQ ID NO: 1495293 - RNA, 17 nt, Human
cuucaaauccuugaaga

SEQ ID NO: 1495294 - RNA, 14 nt, Human
cuucagcacuuuag

SEQ ID NO: 1495295 - RNA, 15 nt, Human
cuucagcacuuuaga

SEQ ID NO: 1495296 - RNA, 16 nt, Human
cuucagcacuuuagaa

SEQ ID NO: 1495297 - RNA, 16 nt, Human
cuucagcgguuuauau

SEQ ID NO: 1495298 - RNA, 13 nt, Human
cuucagucucuau

SEQ ID NO: 1495299 - RNA, 17 nt, Human
cuucagucucuauacca

SEQ ID NO: 1495300 - RNA, 21 nt, Human
cuucagucucuauaccaauaa

SEQ ID NO: 1495301 - RNA, 23 nt, Human
cuucagucucuauaccaauaaag

SEQ ID NO: 1495302 - RNA, 22 nt, Human
cuucagucucuauaccaauaaa

SEQ ID NO: 1495303 - RNA, 18 nt, Human
cuuugcugagccuguaaa

SEQ ID NO: 1495304 - RNA, 16 nt, Human
cuuuggcugcaugcga

SEQ ID NO: 1495305 - RNA, 20 nt, Human
cuuuuacguccaucucuugu

SEQ ID NO: 1495306 - RNA, 16 nt, Human
gaaacacuuugcauaa

SEQ ID NO: 1495307 - RNA, 20 nt, Human
gaaaaucuuauaauuuaaaa

SEQ ID NO: 1495308 - RNA, 18 nt, Human
gaaacacccucacacugg

SEQ ID NO: 1495309 - RNA, 19 nt, Human
gaaacacccucacacuggg

SEQ ID NO: 1495310 - RNA, 22 nt, Human
gaaacacccucacacugggacu

SEQ ID NO: 1495311 - RNA, 19 nt, Human
gaaaaucuuauaauuuaaa

SEQ ID NO: 1495312 - RNA, 12 nt, Human
gaaaauaucacu

SEQ ID NO: 1495313 - RNA, 19 nt, Human
gaaaauaacgauaaaagac

SEQ ID NO: 1495314 - RNA, 22 nt, Human
gaaaacaauaacgauaaaagac

SEQ ID NO: 1495315 - RNA, 22 nt, Human
cuuuuuucucugauacagaaaa

SEQ ID NO: 1495316 - RNA, 20 nt, Human
cuuuuuucucugauacagaa

SEQ ID NO: 1495317 - RNA, 14 nt, Human
cuuuuuucuaaagu

SEQ ID NO: 1495318 - RNA, 19 nt, Human
cuuguaaaggaauuuaaaa

SEQ ID NO: 1495319 - RNA, 16 nt, Human
cuuuagaauaugccuu

SEQ ID NO: 1495320 - RNA, 21 nt, Human
cuuuauuuucuauaauuuaaa

SEQ ID NO: 1495321 - RNA, 13 nt, Human
cuuuccacagaag

SEQ ID NO: 1495322 - RNA, 21 nt, Human
gaagccuuggggcugaugcag

SEQ ID NO: 1495323 - RNA, 18 nt, Human
gaagcuuuuaugugaaac

SEQ ID NO: 1495324 - RNA, 19 nt, Human
gaagccuccuuagaaaaaa

SEQ ID NO: 1495325 - RNA, 17 nt, Human
gaagacugcauuauauu

SEQ ID NO: 1495326 - RNA, 22 nt, Human
gaagccacgguguucugugaua

SEQ ID NO: 1495327 - RNA, 14 nt, Human
gaaggcagggagga

SEQ ID NO: 1495328 - RNA, 16 nt, Human
gaaggcagggaggagg

SEQ ID NO: 1495329 - RNA, 17 nt, Human
gaaggcagggaggaggc

SEQ ID NO: 1495330 - RNA, 18 nt, Human
gaaggcagggaggaggca

SEQ ID NO: 1495331 - RNA, 20 nt, Human
gaaggcagggaggaggcaga

SEQ ID NO: 1495332 - RNA, 12 nt, Human
gaauaaaauuuu

SEQ ID NO: 1495333 - RNA, 11 nt, Human
gaauaaagcaa

SEQ ID NO: 1495334 - RNA, 13 nt, Human
gaauaaagcaauu

SEQ ID NO: 1495335 - RNA, 14 nt, Human
gaauacuuuauaaa

SEQ ID NO: 1495336 - RNA, 11 nt, Human
gaaacauuugg

SEQ ID NO: 1495337 - RNA, 18 nt, Human
gaaauugcuuuguauugu

SEQ ID NO: 1495338 - RNA, 16 nt, Human
gaaauauuauguuaaa

SEQ ID NO: 1495339 - RNA, 13 nt, Human
gaaauauuauguu

SEQ ID NO: 1495340 - RNA, 21 nt, Human
gaacuuguaaaggaauuuaaa

SEQ ID NO: 1495341 - RNA, 21 nt, Human
gaagaagcaccaaucaugaau

SEQ ID NO: 1495342 - RNA, 16 nt, Human
gaagaaagaacggaag

SEQ ID NO: 1495343 - RNA, 19 nt, Human
gaagaaagaacggaagaag

SEQ ID NO: 1495344 - RNA, 22 nt, Human
gaacuuguaaaggaauuuaaaa

SEQ ID NO: 1495345 - RNA, 22 nt, Human
gaacuuccagauccuggaaauc

SEQ ID NO: 1495346 - RNA, 13 nt, Human
gaacuugaggaca

SEQ ID NO: 1495347 - RNA, 14 nt, Human
gaacuugaggacac

SEQ ID NO: 1495348 - RNA, 15 nt, Human
gaacuugaggacaca

SEQ ID NO: 1495349 - RNA, 16 nt, Human
gaacuugaggacacau

SEQ ID NO: 1495350 - RNA, 17 nt, Human
gaacuugaggacacaug

SEQ ID NO: 1495351 - RNA, 18 nt, Human
gaacuugaggacacaugu

SEQ ID NO: 1495352 - RNA, 19 nt, Human
gaacuugaggacacauguc

SEQ ID NO: 1495353 - RNA, 21 nt, Human
gaacuugaggacacaugucca

SEQ ID NO: 1495354 - RNA, 22 nt, Human
gaacuagaguuuagcuggaaaa

SEQ ID NO: 1495355 - RNA, 13 nt, Human
gagcacugcucca

SEQ ID NO: 1495356 - RNA, 13 nt, Human
gagaucaggaaga

SEQ ID NO: 1495357 - RNA, 20 nt, Human
gagaucaggaagagaaggag

SEQ ID NO: 1495358 - RNA, 12 nt, Human
gagcuacaaaug

SEQ ID NO: 1495359 - RNA, 13 nt, Human
gagcuacaaaugc

SEQ ID NO: 1495360 - RNA, 18 nt, Human
gagcugauggagaaggaa

SEQ ID NO: 1495361 - RNA, 19 nt, Human
gagcugauggagaaggaag

SEQ ID NO: 1495362 - RNA, 14 nt, Human
gagcuacaaaugca

SEQ ID NO: 1495363 - RNA, 23 nt, Human
gaggcugggaauggaggggcaga

SEQ ID NO: 1495364 - RNA, 18 nt, Human
gaggcuacuguaaggcaa

SEQ ID NO: 1495365 - RNA, 16 nt, Human
gagggagaacaagacc

SEQ ID NO: 1495366 - RNA, 22 nt, Human
gagcuugaaacccguggcgcuu

SEQ ID NO: 1495367 - RNA, 16 nt, Human
gaggaaggaggaccca

SEQ ID NO: 1495368 - RNA, 18 nt, Human
gaggaaggaggacccagg

SEQ ID NO: 1495369 - RNA, 21 nt, Human
gaggaaggaggacccaggaca

SEQ ID NO: 1495370 - RNA, 11 nt, Human
gaggacacaug

SEQ ID NO: 1495371 - RNA, 12 nt, Human
gaggacacaugu

SEQ ID NO: 1495372 - RNA, 13 nt, Human
gaggacacauguc

SEQ ID NO: 1495373 - RNA, 14 nt, Human
gaggacacaugucc

SEQ ID NO: 1495374 - RNA, 16 nt, Human
gaggaggcagagaaga

SEQ ID NO: 1495375 - RNA, 20 nt, Human
gaggaggcagagaagaaaga

SEQ ID NO: 1495376 - RNA, 21 nt, Human
gauauaaguguguguuuuuca

SEQ ID NO: 1495377 - RNA, 21 nt, Human
gaguugaaaaucuuauaauuu

SEQ ID NO: 1495378 - RNA, 15 nt, Human
gagucaaaaauuaaa

SEQ ID NO: 1495379 - RNA, 16 nt, Human
gagucucugaggggcu

SEQ ID NO: 1495380 - RNA, 21 nt, Human
gaugccuggcgggguggggug

SEQ ID NO: 1495381 - RNA, 18 nt, Human
gaugcaguucugaagaag

SEQ ID NO: 1495382 - RNA, 14 nt, Human
gaugacuauggaaa

SEQ ID NO: 1495383 - RNA, 21 nt, Human
gauuaacagguaugaaccacc

SEQ ID NO: 1495384 - RNA, 14 nt, Human
gcacuggccccacc

SEQ ID NO: 1495385 - RNA, 15 nt, Human
gcacuggccccaccc

SEQ ID NO: 1495386 - RNA, 15 nt, Human
gcacuggcgaggaga

SEQ ID NO: 1495387 - RNA, 16 nt, Human
gcacuggcgaggagag

SEQ ID NO: 1495388 - RNA, 18 nt, Human
gcacagccucuuagaugc

SEQ ID NO: 1495389 - RNA, 15 nt, Human
gcacagccucuuaga

SEQ ID NO: 1495390 - RNA, 15 nt, Human
gcaucaucucagcuc

SEQ ID NO: 1495391 - RNA, 22 nt, Human
gcaguggcgugaucucagcuca

SEQ ID NO: 1495392 - RNA, 23 nt, Human
gcaggucccuaauaaagcugugu

SEQ ID NO: 1495393 - RNA, 20 nt, Human
gcaggucccuaauaaagcug

SEQ ID NO: 1495394 - RNA, 21 nt, Human
gcaggucccuaauaaagcugu

SEQ ID NO: 1495395 - RNA, 16 nt, Human
gcaggucccuaauaaa

SEQ ID NO: 1495396 - RNA, 17 nt, Human
gcaggucccuaauaaag

SEQ ID NO: 1495397 - RNA, 18 nt, Human
gcaggucccuaauaaagc

SEQ ID NO: 1495398 - RNA, 19 nt, Human
gcaggucccuaauaaagcu

SEQ ID NO: 1495399 - RNA, 14 nt, Human
gcaggucccuaaua

SEQ ID NO: 1495400 - RNA, 15 nt, Human
gcaggucccuaauaa

SEQ ID NO: 1495401 - RNA, 19 nt, Human
gccagauuuuccugaaaac

SEQ ID NO: 1495402 - RNA, 16 nt, Human
gccaggcuggagugca

SEQ ID NO: 1495403 - RNA, 13 nt, Human
gccaggcuggguc

SEQ ID NO: 1495404 - RNA, 18 nt, Human
gccaggcuggagugcagu

SEQ ID NO: 1495405 - RNA, 19 nt, Human
gccaggcuggagugcagug

SEQ ID NO: 1495406 - RNA, 14 nt, Human
gccagggagcgagu

SEQ ID NO: 1495407 - RNA, 15 nt, Human
gccaugcagaaagca

SEQ ID NO: 1495408 - RNA, 19 nt, Human
gccaugggcacugugggua

SEQ ID NO: 1495409 - RNA, 18 nt, Human
gccacggggacucagccc

SEQ ID NO: 1495410 - RNA, 14 nt, Human
gccaccugucuguc

SEQ ID NO: 1495411 - RNA, 15 nt, Human
gccaccugucugucu

SEQ ID NO: 1495412 - RNA, 10 nt, Human
gccaccuguc

SEQ ID NO: 1495413 - RNA, 12 nt, Human
gccaccugucug

SEQ ID NO: 1495414 - RNA, 13 nt, Human
gccaccugucugu

SEQ ID NO: 1495415 - RNA, 21 nt, Human
gcgccucgccggaucugaggg

SEQ ID NO: 1495416 - RNA, 22 nt, Human
gcgcccuuaacugcauccagcc

SEQ ID NO: 1495417 - RNA, 13 nt, Human
gcuagauguaugu

SEQ ID NO: 1495418 - RNA, 16 nt, Human
gcuagauguauguacu

SEQ ID NO: 1495419 - RNA, 14 nt, Human
gcuagauguaugua

SEQ ID NO: 1495420 - RNA, 17 nt, Human
gcuauauaagacaagaa

SEQ ID NO: 1495421 - RNA, 12 nt, Human
gcuauccaccaa

SEQ ID NO: 1495422 - RNA, 17 nt, Human
gcuaucguaaaauuaag

SEQ ID NO: 1495423 - RNA, 15 nt, Human
gcuaucguaaaauua

SEQ ID NO: 1495424 - RNA, 16 nt, Human
gcuaucguaaaauuaa

SEQ ID NO: 1495425 - RNA, 18 nt, Human
gcucauggacuucugcca

SEQ ID NO: 1495426 - RNA, 14 nt, Human
gcucauuucaggau

SEQ ID NO: 1495427 - RNA, 21 nt, Human
gcuccuauucaacacacacau

SEQ ID NO: 1495428 - RNA, 21 nt, Human
gcuccuccaggguggcagcaa

SEQ ID NO: 1495429 - RNA, 22 nt, Human
gcuccuccaggguggcagcaac

SEQ ID NO: 1495430 - RNA, 21 nt, Human
gcuucucagauuucugaggaa

SEQ ID NO: 1495431 - RNA, 22 nt, Human
gcuucucagauuucugaggaaa

SEQ ID NO: 1495432 - RNA, 19 nt, Human
gcuucuguuuuauaauuuu

SEQ ID NO: 1495433 - RNA, 13 nt, Human
gcuuuuaugugaa

SEQ ID NO: 1495434 - RNA, 15 nt, Human
gcuuuuaugugaaac

SEQ ID NO: 1495435 - RNA, 16 nt, Human
gcuguguggcagucug

SEQ ID NO: 1495436 - RNA, 23 nt, Human
gcuggaaaaguauguuagugcaa

SEQ ID NO: 1495437 - RNA, 21 nt, Human
gcuggaaaaguauguuagugc

SEQ ID NO: 1495438 - RNA, 16 nt, Human
gcuggcauuacaggug

SEQ ID NO: 1495439 - RNA, 16 nt, Human
gcucuccaaaccacuu

SEQ ID NO: 1495440 - RNA, 17 nt, Human
gcucuccaaaccacuuu

SEQ ID NO: 1495441 - RNA, 22 nt, Human
gcucuccaaaccacuuuuugca

SEQ ID NO: 1495442 - RNA, 19 nt, Human
gcucuugaugccuggcggg

SEQ ID NO: 1495443 - RNA, 12 nt, Human
ggcagagccagg

SEQ ID NO: 1495444 - RNA, 13 nt, Human
ggcagagccagga

SEQ ID NO: 1495445 - RNA, 14 nt, Human
ggcagagccaggaa

SEQ ID NO: 1495446 - RNA, 16 nt, Human
ggcagagccaggaaga

SEQ ID NO: 1495447 - RNA, 17 nt, Human
ggcagagccaggaagau

SEQ ID NO: 1495448 - RNA, 18 nt, Human
ggaugaugacuauggaaa

SEQ ID NO: 1495449 - RNA, 12 nt, Human
ggauuauauuau

SEQ ID NO: 1495450 - RNA, 22 nt, Human
ggauuccacucguguguuucua

SEQ ID NO: 1495451 - RNA, 19 nt, Human
gcuuuuaugugaaacaugu

SEQ ID NO: 1495452 - RNA, 20 nt, Human
gcuuuuaugugaaacauguu

SEQ ID NO: 1495453 - RNA, 21 nt, Human
gcuuuuaugugaaacauguuu

SEQ ID NO: 1495454 - RNA, 20 nt, Human
ggacauuugcucauggaauu

SEQ ID NO: 1495455 - RNA, 17 nt, Human
ggacauuugcucaugga

SEQ ID NO: 1495456 - RNA, 19 nt, Human
ggacugaauuaugaaacuu

SEQ ID NO: 1495457 - RNA, 17 nt, Human
ggacugaauuaugaaac

SEQ ID NO: 1495458 - RNA, 14 nt, Human
ggacugagaaauuu

SEQ ID NO: 1495459 - RNA, 12 nt, Human
ggagaaggaagg

SEQ ID NO: 1495460 - RNA, 14 nt, Human
ggagaagaacugaa

SEQ ID NO: 1495461 - RNA, 11 nt, Human
ggagaagaacu

SEQ ID NO: 1495462 - RNA, 18 nt, Human
ggacugagaaauuuauaa

SEQ ID NO: 1495463 - RNA, 16 nt, Human
ggagucaaaaauuaaa

SEQ ID NO: 1495464 - RNA, 12 nt, Human
ggaggggcagag

SEQ ID NO: 1495465 - RNA, 13 nt, Human
ggaggggcagagc

SEQ ID NO: 1495466 - RNA, 15 nt, Human
ggaggggcagagcca

SEQ ID NO: 1495467 - RNA, 16 nt, Human
ggaggggcagagccag

SEQ ID NO: 1495468 - RNA, 15 nt, Human
ggaggacccaggaca

SEQ ID NO: 1495469 - RNA, 14 nt, Human
ggaggacccaggac

SEQ ID NO: 1495470 - RNA, 16 nt, Human
ggaggacccaggacag

SEQ ID NO: 1495471 - RNA, 14 nt, Human
ggaggcagagaaga

SEQ ID NO: 1495472 - RNA, 15 nt, Human
ggaggcagagaagaa

SEQ ID NO: 1495473 - RNA, 17 nt, Human
ggaggcaggaguuucgu

SEQ ID NO: 1495474 - RNA, 19 nt, Human
ggaggcagagaagaaagaa

SEQ ID NO: 1495475 - RNA, 16 nt, Human
ggagcccugggaggcu

SEQ ID NO: 1495476 - RNA, 19 nt, Human
ggagcccugggaggcucug

SEQ ID NO: 1495477 - RNA, 20 nt, Human
ggagcccugggaggcucugg

SEQ ID NO: 1495478 - RNA, 14 nt, Human
ggagcuagaauuug

SEQ ID NO: 1495479 - RNA, 16 nt, Human
ggcucuggagcccacu

SEQ ID NO: 1495480 - RNA, 17 nt, Human
ggcucuggagcccacug

SEQ ID NO: 1495481 - RNA, 19 nt, Human
ggcucuggagcccacugua

SEQ ID NO: 1495482 - RNA, 19 nt, Human
ggccggcuugccacacccc

SEQ ID NO: 1495483 - RNA, 23 nt, Human
ggcucuggagcccacuguacuug

SEQ ID NO: 1495484 - RNA, 18 nt, Human
ggcuggagcuagaauuug

SEQ ID NO: 1495485 - RNA, 20 nt, Human
ggcuggagugcaguggcgcg

SEQ ID NO: 1495486 - RNA, 14 nt, Human
ggcuugccacaccc

SEQ ID NO: 1495487 - RNA, 15 nt, Human
ggcuugccacacccc

SEQ ID NO: 1495488 - RNA, 15 nt, Human
gggacugagaaauuu

SEQ ID NO: 1495489 - RNA, 14 nt, Human
gggaauugaggaca

SEQ ID NO: 1495490 - RNA, 15 nt, Human
gggaggaggcagaga

SEQ ID NO: 1495491 - RNA, 17 nt, Human
ucaggcuagauguaugu

SEQ ID NO: 1495492 - RNA, 13 nt, Human
ucaggcuagaugu

SEQ ID NO: 1495493 - RNA, 19 nt, Human
ucaggagcccugggaggcu

SEQ ID NO: 1495494 - RNA, 18 nt, Human
ucaggagcccugggaggc

SEQ ID NO: 1495495 - RNA, 20 nt, Human
ucaggagcccugggaggcuc

SEQ ID NO: 1495496 - RNA, 23 nt, Human
ucaggagcccugggaggcucugg

SEQ ID NO: 1495497 - RNA, 20 nt, Human
ucagccucccgaguagcugg

SEQ ID NO: 1495498 - RNA, 16 nt, Human
ucagauaugauucaaa

SEQ ID NO: 1495499 - RNA, 15 nt, Human
ucagauaugauucaa

SEQ ID NO: 1495500 - RNA, 23 nt, Human
ucaccccuaaaagaaacccugca

SEQ ID NO: 1495501 - RNA, 20 nt, Human
ucacucuguucauuccucca

SEQ ID NO: 1495502 - RNA, 21 nt, Human
ucacucuguucauuccuccag

SEQ ID NO: 1495503 - RNA, 22 nt, Human
ucacucuguucauuccuccagg

SEQ ID NO: 1495504 - RNA, 20 nt, Human
ucacuuguuuuauuuaaccu

SEQ ID NO: 1495505 - RNA, 19 nt, Human
ucagaaacacccucacacu

SEQ ID NO: 1495506 - RNA, 21 nt, Human
ucagaaacacccucacacugg

SEQ ID NO: 1495507 - RNA, 22 nt, Human
ucagaaacacccucacacuggg

SEQ ID NO: 1495508 - RNA, 21 nt, Human
ucagaguaauccaagcaaaug

SEQ ID NO: 1495509 - RNA, 22 nt, Human
ucagaguaauccaagcaaaugu

SEQ ID NO: 1495510 - RNA, 19 nt, Human
uccacagaagcuccaggua

SEQ ID NO: 1495511 - RNA, 14 nt, Human
uccaggguggcagc

SEQ ID NO: 1495512 - RNA, 15 nt, Human
uccaggguggcagca

SEQ ID NO: 1495513 - RNA, 18 nt, Human
uccaggguggcagcaaca

SEQ ID NO: 1495514 - RNA, 20 nt, Human
uccaggguggcagcaacaau

SEQ ID NO: 1495515 - RNA, 14 nt, Human
ucauagcuaaaaaa

SEQ ID NO: 1495516 - RNA, 16 nt, Human
ucauuuccaagcaagu

SEQ ID NO: 1495517 - RNA, 13 nt, Human
ucauuuccaagca

SEQ ID NO: 1495518 - RNA, 12 nt, Human
ucauugugaaau

SEQ ID NO: 1495519 - RNA, 15 nt, Human
ucauugugaaauuau

SEQ ID NO: 1495520 - RNA, 17 nt, Human
ucauugugaaauuauuc

SEQ ID NO: 1495521 - RNA, 18 nt, Human
ucauugugaaauuauuca

SEQ ID NO: 1495522 - RNA, 16 nt, Human
ucauuccauucuggaa

SEQ ID NO: 1495523 - RNA, 12 nt, Human
ucauuucaggau

SEQ ID NO: 1495524 - RNA, 14 nt, Human
ucauuccauucugg

SEQ ID NO: 1495525 - RNA, 15 nt, Human
ucauuccauucugga

SEQ ID NO: 1495526 - RNA, 19 nt, Human
ucaccagagacuuuagggg

SEQ ID NO: 1495527 - RNA, 21 nt, Human
ucaauaaaauccauacauuug

SEQ ID NO: 1495528 - RNA, 22 nt, Human
ucaaugccccugaauuuaaaua

SEQ ID NO: 1495529 - RNA, 20 nt, Human
ucaaugccccugaauuuaaa

SEQ ID NO: 1495530 - RNA, 18 nt, Human
ucaaugccccugaauuua

SEQ ID NO: 1495531 - RNA, 17 nt, Human
ucaaugccccugaauuu

SEQ ID NO: 1495532 - RNA, 17 nt, Human
uauuuuauguugcauag

SEQ ID NO: 1495533 - RNA, 13 nt, Human
uauuuuuugaaaa

SEQ ID NO: 1495534 - RNA, 15 nt, Human
ucaaauugugugaaa

SEQ ID NO: 1495535 - RNA, 14 nt, Human
ucaaauugugugaa

SEQ ID NO: 1495536 - RNA, 17 nt, Human
ucaaauuguaagcaugc

SEQ ID NO: 1495537 - RNA, 20 nt, Human
ucaaauuguaagcaugcaca

SEQ ID NO: 1495538 - RNA, 15 nt, Human
ucaaauccuugaaga

SEQ ID NO: 1495539 - RNA, 12 nt, Human
ucaaaaauuaaa

SEQ ID NO: 1495540 - RNA, 20 nt, Human
ucaaaaauuaucuauagcua

SEQ ID NO: 1495541 - RNA, 23 nt, Human
ucaaaaauuaaaccggaccaucu

SEQ ID NO: 1495542 - RNA, 21 nt, Human
ucaaauauauucagccuggcu

SEQ ID NO: 1495543 - RNA, 22 nt, Human
ucaaauauauucagccuggcuu

SEQ ID NO: 1495544 - RNA, 23 nt, Human
ucaaauauauucagccuggcuuc

SEQ ID NO: 1495545 - RNA, 20 nt, Human
ucaaaucaaucuguaaaacu

SEQ ID NO: 1495546 - RNA, 16 nt, Human
uauguugcauagaaua

SEQ ID NO: 1495547 - RNA, 12 nt, Human
uauguugcauag

SEQ ID NO: 1495548 - RNA, 17 nt, Human
uauguacuucaugcugu

SEQ ID NO: 1495549 - RNA, 13 nt, Human
uauguacuucaug

SEQ ID NO: 1495550 - RNA, 14 nt, Human
uauuguuuuacaau

SEQ ID NO: 1495551 - RNA, 15 nt, Human
uauuguuuuacaaua

SEQ ID NO: 1495552 - RNA, 17 nt, Human
uauuguuuuacaauagu

SEQ ID NO: 1495553 - RNA, 20 nt, Human
uauuguuuuacaauaguucu

SEQ ID NO: 1495554 - RNA, 22 nt, Human
uauuguuuuacaauaguucugu

SEQ ID NO: 1495555 - RNA, 24 nt, Human
uauuuauaaaaauaaaaaacacug

SEQ ID NO: 1495556 - RNA, 22 nt, Human
uauuuaguuguaaaccaaguga

SEQ ID NO: 1495557 - RNA, 14 nt, Human
uauuacaaugauca

SEQ ID NO: 1495558 - RNA, 15 nt, Human
uauuacaaugaucac

SEQ ID NO: 1495559 - RNA, 17 nt, Human
uauucguuaucuaauag

SEQ ID NO: 1495560 - RNA, 16 nt, Human
ucccucucucauaccc

SEQ ID NO: 1495561 - RNA, 20 nt, Human
ucccuggaaaccuuccaccc

SEQ ID NO: 1495562 - RNA, 22 nt, Human
ucccuggaaaccuuccacccag

SEQ ID NO: 1495563 - RNA, 23 nt, Human
ucccuggaaaccuuccacccagu

SEQ ID NO: 1495564 - RNA, 21 nt, Human
ucccuucaucuggaaccauca

SEQ ID NO: 1495565 - RNA, 17 nt, Human
ucccuucaugcauggaa

SEQ ID NO: 1495566 - RNA, 18 nt, Human
ucccuucaugcauggaaa

SEQ ID NO: 1495567 - RNA, 16 nt, Human
ucccuugaugaagaag

SEQ ID NO: 1495568 - RNA, 15 nt, Human
ucccuugaugaagaa

SEQ ID NO: 1495569 - RNA, 15 nt, Human
ucccuaauaaagcug

SEQ ID NO: 1495570 - RNA, 19 nt, Human
ucccuaucuuugccacccu

SEQ ID NO: 1495571 - RNA, 16 nt, Human
ucccuaauaaagcugu

SEQ ID NO: 1495572 - RNA, 11 nt, Human
ucccuccuggg

SEQ ID NO: 1495573 - RNA, 19 nt, Human
ucccuccugggaaugaagc

SEQ ID NO: 1495574 - RNA, 14 nt, Human
uccugccucagccu

SEQ ID NO: 1495575 - RNA, 17 nt, Human
uccugccucagccuccc

SEQ ID NO: 1495576 - RNA, 16 nt, Human
uccuuggccaugcaga

SEQ ID NO: 1495577 - RNA, 18 nt, Human
ucuaugaaauauuauguu

SEQ ID NO: 1495578 - RNA, 17 nt, Human
ucuaugaaauauuaugu

SEQ ID NO: 1495579 - RNA, 14 nt, Human
ucuaugaaauauua

SEQ ID NO: 1495580 - RNA, 19 nt, Human
ucuagugagcagucaggaa

SEQ ID NO: 1495581 - RNA, 22 nt, Human
ucuagugagcagucaggaaaga

SEQ ID NO: 1495582 - RNA, 16 nt, Human
ucuaggacugaauuau

SEQ ID NO: 1495583 - RNA, 23 nt, Human
ucuaggacugaauuaugaaacuu

SEQ ID NO: 1495584 - RNA, 22 nt, Human
ucgugggacagucaccucaugg

SEQ ID NO: 1495585 - RNA, 21 nt, Human
ucguggaacaguuaccucugc

SEQ ID NO: 1495586 - RNA, 16 nt, Human
ucuaauagggcaauua

SEQ ID NO: 1495587 - RNA, 22 nt, Human
ucuaauagggcaauuaauuccu

SEQ ID NO: 1495588 - RNA, 13 nt, Human
ucguuaauuugua

SEQ ID NO: 1495589 - RNA, 21 nt, Human
ucguguguuucuauuuuuuga

SEQ ID NO: 1495590 - RNA, 14 nt, Human
ucugaaaauugaug

SEQ ID NO: 1495591 - RNA, 22 nt, Human
ucugaaaauugaugggauuugg

SEQ ID NO: 1495592 - RNA, 15 nt, Human
ucugacauaaguauu

SEQ ID NO: 1495593 - RNA, 13 nt, Human
ucugacauaaucc

SEQ ID NO: 1495594 - RNA, 19 nt, Human
ucugacauaauccaguaaa

SEQ ID NO: 1495595 - RNA, 23 nt, Human
ucugacauaauccaguaaaauaa

SEQ ID NO: 1495596 - RNA, 20 nt, Human
ucugaaauuuccugggagcu

SEQ ID NO: 1495597 - RNA, 18 nt, Human
ucugaaauuuccugggag

SEQ ID NO: 1495598 - RNA, 17 nt, Human
ucugaaauuuccuggga

SEQ ID NO: 1495599 - RNA, 15 nt, Human
ucugcaacucugaag

SEQ ID NO: 1495600 - RNA, 14 nt, Human
ucugcaacucugaa

SEQ ID NO: 1495601 - RNA, 19 nt, Human
ucuccugccucagccuccc

SEQ ID NO: 1495602 - RNA, 21 nt, Human
ucuccuggaagugcuaauuuu

SEQ ID NO: 1495603 - RNA, 18 nt, Human
ucucaauauucaauaaag

SEQ ID NO: 1495604 - RNA, 17 nt, Human
ucucaauauucaauaaa

SEQ ID NO: 1495605 - RNA, 20 nt, Human
ucucaauauucaauaaagcu

SEQ ID NO: 1495606 - RNA, 15 nt, Human
ucucugauacagaaa

SEQ ID NO: 1495607 - RNA, 21 nt, Human
ucucugaggggcuaccaggaa

SEQ ID NO: 1495608 - RNA, 22 nt, Human
ucucugaggggcuaccaggaaa

SEQ ID NO: 1495609 - RNA, 13 nt, Human
ucucugcaggucc

SEQ ID NO: 1495610 - RNA, 14 nt, Human
ucucugcagguccc

SEQ ID NO: 1495611 - RNA, 15 nt, Human
ucucugcaggucccu

SEQ ID NO: 1495612 - RNA, 16 nt, Human
ucucugcaggucccua

SEQ ID NO: 1495613 - RNA, 18 nt, Human
ucucugcaggucccuaau

SEQ ID NO: 1495614 - RNA, 23 nt, Human
ucucugaggggcuaccaggaaag

SEQ ID NO: 1495615 - RNA, 22 nt, Human
ucuuaggguuaugauuaaguaa

SEQ ID NO: 1495616 - RNA, 13 nt, Human
ucuugaaaaaugc

SEQ ID NO: 1495617 - RNA, 14 nt, Human
ucuuccuucccugc

SEQ ID NO: 1495618 - RNA, 15 nt, Human
ucuuccuucccugcu

SEQ ID NO: 1495619 - RNA, 17 nt, Human
ucuuccuucccugcugu

SEQ ID NO: 1495620 - RNA, 14 nt, Human
ucugucugucccaa

SEQ ID NO: 1495621 - RNA, 15 nt, Human
ucugucugucccaaa

SEQ ID NO: 1495622 - RNA, 16 nt, Human
ucugucugucccaaag

SEQ ID NO: 1495623 - RNA, 15 nt, Human
ucugucugucugucc

SEQ ID NO: 1495624 - RNA, 18 nt, Human
ucugucugucugucccaa

SEQ ID NO: 1495625 - RNA, 16 nt, Human
ucuuaaccagaucauu

SEQ ID NO: 1495626 - RNA, 17 nt, Human
ucuuaaccagaucauug

SEQ ID NO: 1495627 - RNA, 18 nt, Human
ucuuaagaagacugcauu

SEQ ID NO: 1495628 - RNA, 12 nt, Human
ucuuaagaagac

SEQ ID NO: 1495629 - RNA, 22 nt, Human
ucuuaaccagaucauugugaaa

SEQ ID NO: 1495630 - RNA, 22 nt, Human
ucugucucuggauuauauuaug

SEQ ID NO: 1495631 - RNA, 14 nt, Human
ugcacaguaaaaau

SEQ ID NO: 1495632 - RNA, 13 nt, Human
ugcaaccuccacc

SEQ ID NO: 1495633 - RNA, 15 nt, Human
ugcaaccuccaccuc

SEQ ID NO: 1495634 - RNA, 14 nt, Human
ugcaaccucugccu

SEQ ID NO: 1495635 - RNA, 22 nt, Human
ugcaacucugaaggguaauuau

SEQ ID NO: 1495636 - RNA, 18 nt, Human
ugcaacuuuguauaaaag

SEQ ID NO: 1495637 - RNA, 14 nt, Human
ugcaaaaaggguca

SEQ ID NO: 1495638 - RNA, 16 nt, Human
ugccucccuucaugca

SEQ ID NO: 1495639 - RNA, 14 nt, Human
ugccucuucccucu

SEQ ID NO: 1495640 - RNA, 14 nt, Human
ugcccugcccugcc

SEQ ID NO: 1495641 - RNA, 15 nt, Human
ugcccugcccugcca

SEQ ID NO: 1495642 - RNA, 18 nt, Human
ugcccugcccugccaccu

SEQ ID NO: 1495643 - RNA, 14 nt, Human
ugcauuauauuuau

SEQ ID NO: 1495644 - RNA, 18 nt, Human
ugaccucgugauccaccc

SEQ ID NO: 1495645 - RNA, 22 nt, Human
ugacccuccaccgcagaaggaa

SEQ ID NO: 1495646 - RNA, 23 nt, Human
ugacccuccaccgcagaaggaag

SEQ ID NO: 1495647 - RNA, 20 nt, Human
ugaccucaagugaucugccc

SEQ ID NO: 1495648 - RNA, 16 nt, Human
ucuugaauaauguaag

SEQ ID NO: 1495649 - RNA, 12 nt, Human
ugacucuuaaga

SEQ ID NO: 1495650 - RNA, 13 nt, Human
ugacucuuaagaa

SEQ ID NO: 1495651 - RNA, 17 nt, Human
ugagaaaucuaaaaaac

SEQ ID NO: 1495652 - RNA, 13 nt, Human
ugagaaaucuaaa

SEQ ID NO: 1495653 - RNA, 20 nt, Human
ugagcagucaggaaagagaa

SEQ ID NO: 1495654 - RNA, 17 nt, Human
ugagcagucaggaaaga

SEQ ID NO: 1495655 - RNA, 19 nt, Human
ugaucucagcucacugcaa

SEQ ID NO: 1495656 - RNA, 18 nt, Human
ugaucucagcucacugca

SEQ ID NO: 1495657 - RNA, 17 nt, Human
ugauauaaguguguguu

SEQ ID NO: 1495658 - RNA, 23 nt, Human
ugauauaaguguguguuuuucau

SEQ ID NO: 1495659 - RNA, 13 nt, Human
ugauguacaugua

SEQ ID NO: 1495660 - RNA, 23 nt, Human
uggaggggcagagccaggaagau

SEQ ID NO: 1495661 - RNA, 13 nt, Human
uggaggggcagag

SEQ ID NO: 1495662 - RNA, 14 nt, Human
uggaggggcagagc

SEQ ID NO: 1495663 - RNA, 16 nt, Human
uggaggggcagagcca

SEQ ID NO: 1495664 - RNA, 18 nt, Human
uggaggggcagagccagg

SEQ ID NO: 1495665 - RNA, 21 nt, Human
uggaggggcagagccaggaag

SEQ ID NO: 1495666 - RNA, 14 nt, Human
uggagaugaggcca

SEQ ID NO: 1495667 - RNA, 15 nt, Human
uggagaugaggccag

SEQ ID NO: 1495668 - RNA, 16 nt, Human
uggagaugaggccaga

SEQ ID NO: 1495669 - RNA, 17 nt, Human
uggagaugaggccagac

SEQ ID NO: 1495670 - RNA, 19 nt, Human
uggaucaaauccagccugc

SEQ ID NO: 1495671 - RNA, 15 nt, Human
ugcuuaauaaauugu

SEQ ID NO: 1495672 - RNA, 16 nt, Human
ugcuuaauucaaauaa

SEQ ID NO: 1495673 - RNA, 17 nt, Human
ugcuuaauucaaauaau

SEQ ID NO: 1495674 - RNA, 18 nt, Human
ugcuuaauucaaauaaua

SEQ ID NO: 1495675 - RNA, 20 nt, Human
ugcuuaauucaaauaauaau

SEQ ID NO: 1495676 - RNA, 16 nt, Human
ugcuucccuuuccuga

SEQ ID NO: 1495677 - RNA, 21 nt, Human
ugcuucucagauuucugagga

SEQ ID NO: 1495678 - RNA, 22 nt, Human
ugcuucucagauuucugaggaa

SEQ ID NO: 1495679 - RNA, 17 nt, Human
ugcuucuguuuuauaau

SEQ ID NO: 1495680 - RNA, 13 nt, Human
ugcuucuccagcc

SEQ ID NO: 1495681 - RNA, 19 nt, Human
uggaaaccuuccacccagu

SEQ ID NO: 1495682 - RNA, 16 nt, Human
uggaaaccuuccaccc

SEQ ID NO: 1495683 - RNA, 22 nt, Human
uggaaaaguauguuagugcaaa

SEQ ID NO: 1495684 - RNA, 18 nt, Human
uggaacauaaaaaggaca

SEQ ID NO: 1495685 - RNA, 20 nt, Human
uggaacauaaaaaggacauc

SEQ ID NO: 1495686 - RNA, 22 nt, Human
ugcuucuguuuuauaauuuugu

SEQ ID NO: 1495687 - RNA, 17 nt, Human
ugcuuuggaaaacccag

SEQ ID NO: 1495688 - RNA, 14 nt, Human
ugggaaugaagcaa

SEQ ID NO: 1495689 - RNA, 17 nt, Human
uggggccaggcuggguc

SEQ ID NO: 1495690 - RNA, 20 nt, Human
uggggccaggcugggucgcc

SEQ ID NO: 1495691 - RNA, 13 nt, Human
uggggggggugcu

SEQ ID NO: 1495692 - RNA, 17 nt, Human
ugggcagcaauuuaaau

SEQ ID NO: 1495693 - RNA, 12 nt, Human
ugggcagcaauu

SEQ ID NO: 1495694 - RNA, 18 nt, Human
ugggcagcaauuuaaaug

SEQ ID NO: 1495695 - RNA, 19 nt, Human
ugggcagcaauuuaaaugu

SEQ ID NO: 1495696 - RNA, 21 nt, Human
ugggcagcaauuuaaauguua

SEQ ID NO: 1495697 - RNA, 22 nt, Human
uguaguguuggagaagaacuga

SEQ ID NO: 1495698 - RNA, 13 nt, Human
uguauaaaauaau

SEQ ID NO: 1495699 - RNA, 14 nt, Human
uguauaaaauaauu

SEQ ID NO: 1495700 - RNA, 21 nt, Human
uguaguguuggagaagaacug

SEQ ID NO: 1495701 - RNA, 20 nt, Human
uguaguguuggagaagaacu

SEQ ID NO: 1495702 - RNA, 19 nt, Human
uguauuuuaaaagaaugau

SEQ ID NO: 1495703 - RNA, 18 nt, Human
uguauuuuaaaagaauga

SEQ ID NO: 1495704 - RNA, 20 nt, Human
ugucuauggauuugccuucu

SEQ ID NO: 1495705 - RNA, 20 nt, Human
ugucugagacagaaucucag

SEQ ID NO: 1495706 - RNA, 14 nt, Human
ugucugucuguccc

SEQ ID NO: 1495707 - RNA, 15 nt, Human
ugucugucuguccca

SEQ ID NO: 1495708 - RNA, 15 nt, Human
ugucugucugucugu

SEQ ID NO: 1495709 - RNA, 16 nt, Human
ugucugucugucuguc

SEQ ID NO: 1495710 - RNA, 22 nt, Human
ugucuacacuaagagagaauga

SEQ ID NO: 1495711 - RNA, 17 nt, Human
ugucuacacuaagagag

SEQ ID NO: 1495712 - RNA, 14 nt, Human
uggguagacacaca

SEQ ID NO: 1495713 - RNA, 14 nt, Human
uggugguagagaag

SEQ ID NO: 1495714 - RNA, 20 nt, Human
ugguucccuugaugaagaag

SEQ ID NO: 1495715 - RNA, 17 nt, Human
ugguucccuugaugaag

SEQ ID NO: 1495716 - RNA, 16 nt, Human
ugguucccuugaugaa

SEQ ID NO: 1495717 - RNA, 20 nt, Human
ugguuguacauauaagugau

SEQ ID NO: 1495718 - RNA, 11 nt, Human
uguaaugaaaa

SEQ ID NO: 1495719 - RNA, 12 nt, Human
uguaaugaaaac

SEQ ID NO: 1495720 - RNA, 13 nt, Human
uguaaugaaaacc

SEQ ID NO: 1495721 - RNA, 17 nt, Human
uguaaugaaaaccacau

SEQ ID NO: 1495722 - RNA, 15 nt, Human
uugucuagugaaacu

SEQ ID NO: 1495723 - RNA, 13 nt, Human
uugugaaauuauu

SEQ ID NO: 1495724 - RNA, 14 nt, Human
uuguauuacaaauc

SEQ ID NO: 1495725 - RNA, 18 nt, Human
uuguguuuugcaagccag

SEQ ID NO: 1495726 - RNA, 18 nt, Human
uuguuaaucuucaauagu

SEQ ID NO: 1495727 - RNA, 20 nt, Human
uuguguugaagagguuuuaa

SEQ ID NO: 1495728 - RNA, 13 nt, Human
uuuaauaauguuu

SEQ ID NO: 1495729 - RNA, 20 nt, Human
uuuaagacgaaacauuuguu

SEQ ID NO: 1495730 - RNA, 19 nt, Human
uuuaacucuauaauguguu

SEQ ID NO: 1495731 - RNA, 21 nt, Human
uuuauaaaaauaaaaaacacu

SEQ ID NO: 1495732 - RNA, 23 nt, Human
uuuauaaaaauaaaaaacacugg

SEQ ID NO: 1495733 - RNA, 21 nt, Human
uuuaauagguuuggacaaaau

SEQ ID NO: 1495734 - RNA, 14 nt, Human
uuuaauaauguuuc

SEQ ID NO: 1495735 - RNA, 13 nt, Human
uuuaccacuugug

SEQ ID NO: 1495736 - RNA, 22 nt, Human
uuuauaauuuugugaagcaaaa

SEQ ID NO: 1495737 - RNA, 23 nt, Human
uucaguuauuauauuuacaaaug

SEQ ID NO: 1495738 - RNA, 20 nt, Human
uucauaaauaaaguuuguug

SEQ ID NO: 1495739 - RNA, 19 nt, Human
uuccagauccuggaaauca

SEQ ID NO: 1495740 - RNA, 18 nt, Human
uuccagagcacugcucca

SEQ ID NO: 1495741 - RNA, 18 nt, Human
uuccagauccuggaaauc

SEQ ID NO: 1495742 - RNA, 20 nt, Human
uucaugcuguucaugaaaga

SEQ ID NO: 1495743 - RNA, 12 nt, Human
uucaucuggaac

SEQ ID NO: 1495744 - RNA, 23 nt, Human
uucaucuggaaccaucagaaaca

SEQ ID NO: 1495745 - RNA, 17 nt, Human
uucaucuggaaccauca

SEQ ID NO: 1495746 - RNA, 14 nt, Human
uucaugcauggaaa

SEQ ID NO: 1495747 - RNA, 15 nt, Human
uucaugcauggaaau

SEQ ID NO: 1495748 - RNA, 16 nt, Human
uucaugcauggaaauu

SEQ ID NO: 1495749 - RNA, 20 nt, Human
uuauuuuaauaauguuucaa

SEQ ID NO: 1495750 - RNA, 19 nt, Human
uuauuuuaauaauguuuca

SEQ ID NO: 1495751 - RNA, 18 nt, Human
uucaaauguauuacagug

SEQ ID NO: 1495752 - RNA, 18 nt, Human
uuaucuauagcuaaguac

SEQ ID NO: 1495753 - RNA, 16 nt, Human
uuaucuugaauaaugu

SEQ ID NO: 1495754 - RNA, 14 nt, Human
uuaucuugaauaau

SEQ ID NO: 1495755 - RNA, 15 nt, Human
uuauauuugaaauau

SEQ ID NO: 1495756 - RNA, 13 nt, Human
uuauauuugaaau

SEQ ID NO: 1495757 - RNA, 12 nt, Human
uuauauuugaaa

SEQ ID NO: 1495758 - RNA, 20 nt, Human
uuauauuuauuacuguaaga

SEQ ID NO: 1495759 - RNA, 16 nt, Human
uuauauuuacaaaugg

SEQ ID NO: 1495760 - RNA, 17 nt, Human
uuauguugcauagaaua

SEQ ID NO: 1495761 - RNA, 18 nt, Human
uuauaauaaaggacugua

SEQ ID NO: 1495762 - RNA, 19 nt, Human
uuauaauaaaggacuguaa

SEQ ID NO: 1495763 - RNA, 21 nt, Human
uuauaauaaaggacuguaauc

SEQ ID NO: 1495764 - RNA, 11 nt, Human
uuauaaucuuu

SEQ ID NO: 1495765 - RNA, 15 nt, Human
uuauaauuuugugaa

SEQ ID NO: 1495766 - RNA, 14 nt, Human
uuauaauuuuguga

SEQ ID NO: 1495767 - RNA, 17 nt, Human
uuauaauuuuaaauguu

SEQ ID NO: 1495768 - RNA, 21 nt, Human
uuauaauuuuaaauguuuuuu

SEQ ID NO: 1495769 - RNA, 12 nt, Human
uuauaauuuaaa

SEQ ID NO: 1495770 - RNA, 12 nt, Human
uuauaauuuuaa

SEQ ID NO: 1495771 - RNA, 23 nt, Human
uuauaucuauauuuuacauaaau

SEQ ID NO: 1495772 - RNA, 19 nt, Human
uuauaucuauauuuuacau

SEQ ID NO: 1495773 - RNA, 18 nt, Human
uuauaauuuugugaagca

SEQ ID NO: 1495774 - RNA, 17 nt, Human
uuauaauuuugugaagc

SEQ ID NO: 1495775 - RNA, 16 nt, Human
uuauaauuuugugaag

SEQ ID NO: 1495776 - RNA, 14 nt, Human
uuauauguaccgua

SEQ ID NO: 1495777 - RNA, 16 nt, Human
uuauauguaccguagg

SEQ ID NO: 1495778 - RNA, 16 nt, Human
uuauauuaugaagcuu

SEQ ID NO: 1495779 - RNA, 23 nt, Human
uugaugaagaaguugauaugccu

SEQ ID NO: 1495780 - RNA, 14 nt, Human
uugaugaagaaguu

SEQ ID NO: 1495781 - RNA, 12 nt, Human
uugaauuuuaca

SEQ ID NO: 1495782 - RNA, 15 nt, Human
uucuuuaaaauuaca

SEQ ID NO: 1495783 - RNA, 18 nt, Human
uucuuuccacagaagcuc

SEQ ID NO: 1495784 - RNA, 15 nt, Human
uugaaaaaugcaugu

SEQ ID NO: 1495785 - RNA, 17 nt, Human
uugaaaagcagacauuu

SEQ ID NO: 1495786 - RNA, 15 nt, Human
uugaaaagcagacau

SEQ ID NO: 1495787 - RNA, 21 nt, Human
uucuaugaaauauuauguuaa

SEQ ID NO: 1495788 - RNA, 14 nt, Human
uucuaugaaauauu

SEQ ID NO: 1495789 - RNA, 19 nt, Human
uucuccagccucagccucc

SEQ ID NO: 1495790 - RNA, 19 nt, Human
uucuaccaaggucuucuua

SEQ ID NO: 1495791 - RNA, 13 nt, Human
uucguuaucuaau

SEQ ID NO: 1495792 - RNA, 20 nt, Human
uucuacugcucuccuccacc

SEQ ID NO: 1495793 - RNA, 13 nt, Human
uucuacugcucuc

SEQ ID NO: 1495794 - RNA, 14 nt, Human
uucuauagcuuuuc

SEQ ID NO: 1495795 - RNA, 18 nt, Human
uucggugagcuacaaaug

SEQ ID NO: 1495796 - RNA, 22 nt, Human
uuccugagucccaucccugcgu

SEQ ID NO: 1495797 - RNA, 14 nt, Human
uuuuuuuguuauua

SEQ ID NO: 1495798 - RNA, 12 nt, Human
uuuuuuuacauu

SEQ ID NO: 1495799 - RNA, 11 nt, Human
uuuuuuacauu

SEQ ID NO: 1495800 - RNA, 12 nt, Human
uuuuuuacauuu

SEQ ID NO: 1495801 - RNA, 15 nt, Human
uuuuuaaauguauac

SEQ ID NO: 1495802 - RNA, 23 nt, Human
uuuuuaaauguauacuauaguac

SEQ ID NO: 1495803 - RNA, 13 nt, Human
uuuuuaaucuuua

SEQ ID NO: 1495804 - RNA, 17 nt, Human
uuuguauaaaauaauuu

SEQ ID NO: 1495805 - RNA, 19 nt, Human
uuuguauaaaauaauuuuu

SEQ ID NO: 1495806 - RNA, 18 nt, Human
uuuguauaaaauaauuuu

SEQ ID NO: 1495807 - RNA, 15 nt, Human
uuuggucaacacuaa

SEQ ID NO: 1495808 - RNA, 14 nt, Human
uuuguauuguauau

SEQ ID NO: 1495809 - RNA, 14 nt, Human
uuuuaaaauccacu

SEQ ID NO: 1495810 - RNA, 23 nt, Human
uuuuaaaauccacuuuaucuuga

SEQ ID NO: 1495811 - RNA, 20 nt, Human
uuuccuaaauauauuuuaag

SEQ ID NO: 1495812 - RNA, 15 nt, Human
uuuccacagaagcuc

SEQ ID NO: 1495813 - RNA, 18 nt, Human
uuugcauaacguauaaaa

SEQ ID NO: 1495814 - RNA, 20 nt, Human
uuuugaaauuaugugacauu

SEQ ID NO: 1495815 - RNA, 16 nt, Human
uuuucacauuggaaac

SEQ ID NO: 1495816 - RNA, 21 nt, Human
uuuucaaaauuguuacaaauu

SEQ ID NO: 1495817 - RNA, 21 nt, Human
uuuuauaauuuugugaagcaa

SEQ ID NO: 1495818 - RNA, 23 nt, Human
uuuuauaauuuugugaagcaaaa

SEQ ID NO: 1495819 - RNA, 19 nt, Human
uuuuacguccaucucuugu

SEQ ID NO: 1495820 - RNA, 21 nt, Human
uuuuaaaguaacccuacaaaa

SEQ ID NO: 1495821 - RNA, 18 nt, Human
uuuuauauuugaaauauu

SEQ ID NO: 1495822 - RNA, 13 nt, Human
uuuuauauuugaa

SEQ ID NO: 1495823 - RNA, 14 nt, Human
uuuucaaaagaaag

SEQ ID NO: 1495824 - RNA, 17 nt, Human
cucguggacaccugccc

SEQ ID NO: 1495825 - RNA, 19 nt, Human
cucguggacaccugcccug

SEQ ID NO: 1495826 - RNA, 20 nt, Human
cucguggacaccugcccugc

SEQ ID NO: 1495827 - RNA, 21 nt, Human
cucguggacaccugcccugcc

SEQ ID NO: 1495828 - RNA, 19 nt, Human
cuccccaugauguuuagaa

SEQ ID NO: 1495829 - RNA, 14 nt, Human
cuccgucaacucau

SEQ ID NO: 1495830 - RNA, 17 nt, Human
cugaaaauauuguuuua

SEQ ID NO: 1495831 - RNA, 20 nt, Human
cugaaaauauuguuuuacaa

SEQ ID NO: 1495832 - RNA, 22 nt, Human
cugaaaauauuguuuuacaaua

SEQ ID NO: 1495833 - RNA, 24 nt, Human
cugaaaauauuguuuuacaauagu

SEQ ID NO: 1495834 - RNA, 17 nt, Human
cugaggggcuaccagga

SEQ ID NO: 1495835 - RNA, 20 nt, Human
cugaggggcuaccaggaaag

SEQ ID NO: 1495836 - RNA, 18 nt, Human
cugaggggcuaccaggaa

SEQ ID NO: 1495837 - RNA, 21 nt, Human
cugaggaaauugcuuuguauu

SEQ ID NO: 1495838 - RNA, 18 nt, Human
cugacccuccaccgcaga

SEQ ID NO: 1495839 - RNA, 23 nt, Human
cugacccuccaccgcagaaggaa

SEQ ID NO: 1495840 - RNA, 18 nt, Human
cucacuuguuuuauuuaa

SEQ ID NO: 1495841 - RNA, 23 nt, Human
cucagaaaacaaggaugaauuaa

SEQ ID NO: 1495842 - RNA, 19 nt, Human
cucagaaaacaaggaugaa

SEQ ID NO: 1495843 - RNA, 20 nt, Human
cuacuagggaaaugccuuug

SEQ ID NO: 1495844 - RNA, 15 nt, Human
cgguuuauauaagcu

SEQ ID NO: 1495845 - RNA, 20 nt, Human
cccagcuggggccaggcugg

SEQ ID NO: 1495846 - RNA, 13 nt, Human
cccagccauccag

SEQ ID NO: 1495847 - RNA, 18 nt, Human
cccucaaccucauccucu

SEQ ID NO: 1495848 - RNA, 15 nt, Human
ccccugccaccuccu

SEQ ID NO: 1495849 - RNA, 17 nt, Human
ccccugccaccuccugc

SEQ ID NO: 1495850 - RNA, 13 nt, Human
ccccugaauuuaa

SEQ ID NO: 1495851 - RNA, 17 nt, Human
ccccugaauuuaaauag

SEQ ID NO: 1495852 - RNA, 13 nt, Human
ccagcuuuuccca

SEQ ID NO: 1495853 - RNA, 23 nt, Human
ccagcuuuucccaaaagcccauu

SEQ ID NO: 1495854 - RNA, 17 nt, Human
ccaggcuggagugcagu

SEQ ID NO: 1495855 - RNA, 18 nt, Human
ccaggcuggagugcagug

SEQ ID NO: 1495856 - RNA, 19 nt, Human
ccauucuggaagugacuuu

SEQ ID NO: 1495857 - RNA, 13 nt, Human
cccaccccuagga

SEQ ID NO: 1495858 - RNA, 13 nt, Human
cccaacuccagaa

SEQ ID NO: 1495859 - RNA, 13 nt, Human
cccuucuauaccc

SEQ ID NO: 1495860 - RNA, 18 nt, Human
cccuucuauacccaccca

SEQ ID NO: 1495861 - RNA, 19 nt, Human
cccuucuauacccacccag

SEQ ID NO: 1495862 - RNA, 20 nt, Human
cccuucuauacccacccaga

SEQ ID NO: 1495863 - RNA, 21 nt, Human
cccuucuauacccacccagaa

SEQ ID NO: 1495864 - RNA, 21 nt, Human
cccuucuccauggcccugcca

SEQ ID NO: 1495865 - RNA, 12 nt, Human
ccuaauaaagcu

SEQ ID NO: 1495866 - RNA, 13 nt, Human
ccuaauaaagcug

SEQ ID NO: 1495867 - RNA, 17 nt, Human
ccucagcucucaguugc

SEQ ID NO: 1495868 - RNA, 13 nt, Human
ccucaaccucauc

SEQ ID NO: 1495869 - RNA, 14 nt, Human
ccucaaccucaucc

SEQ ID NO: 1495870 - RNA, 23 nt, Human
ccugaccccaaguuauccaccug

SEQ ID NO: 1495871 - RNA, 16 nt, Human
ccugccucagccuccc

SEQ ID NO: 1495872 - RNA, 13 nt, Human
ccugccucucugc

SEQ ID NO: 1495873 - RNA, 14 nt, Human
ccugccucucugca

SEQ ID NO: 1495874 - RNA, 15 nt, Human
ccugccucucugcag

SEQ ID NO: 1495875 - RNA, 19 nt, Human
cagauaugauucaaauguc

SEQ ID NO: 1495876 - RNA, 17 nt, Human
cagauaugauucaaaug

SEQ ID NO: 1495877 - RNA, 16 nt, Human
cagauaugauucaaau

SEQ ID NO: 1495878 - RNA, 15 nt, Human
cagauaugauucaaa

SEQ ID NO: 1495879 - RNA, 22 nt, Human
cagcacagccucuuagaugcag

SEQ ID NO: 1495880 - RNA, 20 nt, Human
cagcccuucuuuccacagaa

SEQ ID NO: 1495881 - RNA, 19 nt, Human
cagcccuucuuuccacaga

SEQ ID NO: 1495882 - RNA, 15 nt, Human
cagcccuucuuucca

SEQ ID NO: 1495883 - RNA, 20 nt, Human
caggaaagcgccuccaaccc

SEQ ID NO: 1495884 - RNA, 19 nt, Human
caggaaagcgccuccaacc

SEQ ID NO: 1495885 - RNA, 19 nt, Human
cagcugccucuucccucuu

SEQ ID NO: 1495886 - RNA, 19 nt, Human
cagcuccaagaauuucuag

SEQ ID NO: 1495887 - RNA, 16 nt, Human
cagcuccaagaauuuc

SEQ ID NO: 1495888 - RNA, 18 nt, Human
caggugcagcccccacug

SEQ ID NO: 1495889 - RNA, 20 nt, Human
caggugcagcccccacugcc

SEQ ID NO: 1495890 - RNA, 23 nt, Human
caggugcagcccccacugccuuu

SEQ ID NO: 1495891 - RNA, 15 nt, Human
cagucaccucaugga

SEQ ID NO: 1495892 - RNA, 22 nt, Human
cagugcacuaauguguaagaca

SEQ ID NO: 1495893 - RNA, 18 nt, Human
ccacagaagcuccaggua

SEQ ID NO: 1495894 - RNA, 18 nt, Human
ccaccagucugacuguuu

SEQ ID NO: 1495895 - RNA, 16 nt, Human
ccacagaagcuccagg

SEQ ID NO: 1495896 - RNA, 13 nt, Human
cauuuauauguac

SEQ ID NO: 1495897 - RNA, 16 nt, Human
cauggccagcuaauuu

SEQ ID NO: 1495898 - RNA, 12 nt, Human
caugcacaaauu

SEQ ID NO: 1495899 - RNA, 23 nt, Human
cauccuucaucuggauuccagag

SEQ ID NO: 1495900 - RNA, 17 nt, Human
caaacauauauaacaau

SEQ ID NO: 1495901 - RNA, 21 nt, Human
caaaaggauaaugaauacuuu

SEQ ID NO: 1495902 - RNA, 16 nt, Human
auuuuuauauuugaaa

SEQ ID NO: 1495903 - RNA, 15 nt, Human
auuuuuauauuugaa

SEQ ID NO: 1495904 - RNA, 19 nt, Human
auuuuagggguagcauuug

SEQ ID NO: 1495905 - RNA, 14 nt, Human
auuuuauguugcau

SEQ ID NO: 1495906 - RNA, 19 nt, Human
caaaguccugggauuacag

SEQ ID NO: 1495907 - RNA, 14 nt, Human
caaagguaaaucag

SEQ ID NO: 1495908 - RNA, 22 nt, Human
caaagguaaaucagacuaugaa

SEQ ID NO: 1495909 - RNA, 15 nt, Human
caacacacacaugcu

SEQ ID NO: 1495910 - RNA, 23 nt, Human
caacacacacaugcuucccuuuc

SEQ ID NO: 1495911 - RNA, 18 nt, Human
caacacacacaugcuucc

SEQ ID NO: 1495912 - RNA, 20 nt, Human
caagaauuucuaggacugaa

SEQ ID NO: 1495913 - RNA, 22 nt, Human
caagauggggagugagaggcug

SEQ ID NO: 1495914 - RNA, 17 nt, Human
caacucauauuuucaug

SEQ ID NO: 1495915 - RNA, 16 nt, Human
auuuaugcauauuauu

SEQ ID NO: 1495916 - RNA, 22 nt, Human
auuuaugcauauuauuuuaugu

SEQ ID NO: 1495917 - RNA, 14 nt, Human
auuucuaugaaaua

SEQ ID NO: 1495918 - RNA, 16 nt, Human
auuguugucugcaacu

SEQ ID NO: 1495919 - RNA, 18 nt, Human
auuguaagcaugcacaaa

SEQ ID NO: 1495920 - RNA, 11 nt, Human
auuccuccagg

SEQ ID NO: 1495921 - RNA, 15 nt, Human
auuccuucagcacuu

SEQ ID NO: 1495922 - RNA, 17 nt, Human
auuccuucagcacuuua

SEQ ID NO: 1495923 - RNA, 22 nt, Human
auuaugaauuacauuuguauaa

SEQ ID NO: 1495924 - RNA, 20 nt, Human
auuaugaauuacauuuguau

SEQ ID NO: 1495925 - RNA, 19 nt, Human
auuaugaauuacauuugua

SEQ ID NO: 1495926 - RNA, 18 nt, Human
auuaguaagcuagcaaau

SEQ ID NO: 1495927 - RNA, 20 nt, Human
auuaguacuccccuccuuga

SEQ ID NO: 1495928 - RNA, 16 nt, Human
auucaaaugucuauaa

SEQ ID NO: 1495929 - RNA, 18 nt, Human
cacacaugcuucccuuuc

SEQ ID NO: 1495930 - RNA, 14 nt, Human
caauugagaaaaau

SEQ ID NO: 1495931 - RNA, 23 nt, Human
caauugagaaaaauauauacuaa

SEQ ID NO: 1495932 - RNA, 21 nt, Human
caagucagucauucagauaug

SEQ ID NO: 1495933 - RNA, 22 nt, Human
caaggccugguguuucuugaua

SEQ ID NO: 1495934 - RNA, 21 nt, Human
caaggccugguguuucuugau

SEQ ID NO: 1495935 - RNA, 23 nt, Human
caauaaaauccauacauuugugu

SEQ ID NO: 1495936 - RNA, 20 nt, Human
caauaaaauccauacauuug

SEQ ID NO: 1495937 - RNA, 14 nt, Human
cagaaauacaauuu

SEQ ID NO: 1495938 - RNA, 19 nt, Human
cacugggagaaaugaaaaa

SEQ ID NO: 1495939 - RNA, 17 nt, Human
cacuuguguuuugcaag

SEQ ID NO: 1495940 - RNA, 18 nt, Human
cacuuuagaauaugccuu

SEQ ID NO: 1495941 - RNA, 22 nt, Human
cacucuguucauuccuccaggu

SEQ ID NO: 1495942 - RNA, 18 nt, Human
cacuacacccagcaauag

SEQ ID NO: 1495943 - RNA, 21 nt, Human
cacuacacccagcaauagaga

SEQ ID NO: 1495944 - RNA, 17 nt, Human
cacucuguucauuccuc

SEQ ID NO: 1495945 - RNA, 18 nt, Human
cacucuguucauuccucc

SEQ ID NO: 1495946 - RNA, 19 nt, Human
cacucuguucauuccucca

SEQ ID NO: 1495947 - RNA, 20 nt, Human
cacucuguucauuccuccag

SEQ ID NO: 1495948 - RNA, 21 nt, Human
cacucuguucauuccuccagg

SEQ ID NO: 1495949 - RNA, 19 nt, Human
gggacauuugcucauggaa

SEQ ID NO: 1495950 - RNA, 14 nt, Human
aaaaggaaagaaaa

SEQ ID NO: 1495951 - RNA, 13 nt, Human
aaaaggaaagaaa

SEQ ID NO: 1495952 - RNA, 14 nt, Human
aaaaauaacaauga

SEQ ID NO: 1495953 - RNA, 14 nt, Human
ggcugggucgcccu

SEQ ID NO: 1495954 - RNA, 17 nt, Human
ggcugggucgcccugga

SEQ ID NO: 1495955 - RNA, 20 nt, Human
ggcugggucgcccuggacug

SEQ ID NO: 1495956 - RNA, 22 nt, Human
gggacagucaccucauggaauu

SEQ ID NO: 1495957 - RNA, 21 nt, Human
gggacagucaccucauggaau

SEQ ID NO: 1495958 - RNA, 20 nt, Human
gggacagucaccucauggaa

SEQ ID NO: 1495959 - RNA, 15 nt, Human
aaaauuuuuaaucuu

SEQ ID NO: 1495960 - RNA, 19 nt, Human
ggggaauugaggacacuga

SEQ ID NO: 1495961 - RNA, 13 nt, Human
ggguggcagcaac

SEQ ID NO: 1495962 - RNA, 14 nt, Human
aaacgucuuaaaua

SEQ ID NO: 1495963 - RNA, 18 nt, Human
aaacuaggugcauauuua

SEQ ID NO: 1495964 - RNA, 13 nt, Human
aaacgucuuaaau

SEQ ID NO: 1495965 - RNA, 22 nt, Human
aaacuaggugcauauuuauaaa

SEQ ID NO: 1495966 - RNA, 15 nt, Human
aaacucguuaauuug

SEQ ID NO: 1495967 - RNA, 18 nt, Human
aaaccuuuguuugcaucu

SEQ ID NO: 1495968 - RNA, 18 nt, Human
aaaccuuuuauauuuagu

SEQ ID NO: 1495969 - RNA, 19 nt, Human
gggggugcugggccccugc

SEQ ID NO: 1495970 - RNA, 13 nt, Human
gggucgcccugga

SEQ ID NO: 1495971 - RNA, 15 nt, Human
gggucgcccuggacu

SEQ ID NO: 1495972 - RNA, 15 nt, Human
ggguggggggggugc

SEQ ID NO: 1495973 - RNA, 23 nt, Human
aaacuucagcgguuuauauaagc

SEQ ID NO: 1495974 - RNA, 16 nt, Human
aaacuuguauuaugug

SEQ ID NO: 1495975 - RNA, 13 nt, Human
aaagacagugaaa

SEQ ID NO: 1495976 - RNA, 23 nt, Human
aaagcugcugagaaucuagccuc

SEQ ID NO: 1495977 - RNA, 14 nt, Human
aaagguacuucaaa

SEQ ID NO: 1495978 - RNA, 14 nt, Human
aaagguaaaucaga

SEQ ID NO: 1495979 - RNA, 14 nt, Human
ggucgcccuggacu

SEQ ID NO: 1495980 - RNA, 20 nt, Human
ggucgcccuggacugugugc

SEQ ID NO: 1495981 - RNA, 21 nt, Human
ggugcauauuuauaaaaauaa

SEQ ID NO: 1495982 - RNA, 11 nt, Human
ggugcugggcc

SEQ ID NO: 1495983 - RNA, 13 nt, Human
ggugcugggcccc

SEQ ID NO: 1495984 - RNA, 15 nt, Human
ggugcugggccccug

SEQ ID NO: 1495985 - RNA, 16 nt, Human
ggugcugggccccugc

SEQ ID NO: 1495986 - RNA, 19 nt, Human
ggugcugggccccugccuc

SEQ ID NO: 1495987 - RNA, 18 nt, Human
aaaguauguuagugcaaa

SEQ ID NO: 1495988 - RNA, 19 nt, Human
aaauaauuuuaucucuuuc

SEQ ID NO: 1495989 - RNA, 13 nt, Human
aaauaauaauuuu

SEQ ID NO: 1495990 - RNA, 16 nt, Human
aaaguugguaaaccuu

SEQ ID NO: 1495991 - RNA, 17 nt, Human
aaaguugguaaaccuuu

SEQ ID NO: 1495992 - RNA, 21 nt, Human
aaauaauuuuuauauuugaaa

SEQ ID NO: 1495993 - RNA, 23 nt, Human
guacacugccuucucaacuccaa

SEQ ID NO: 1495994 - RNA, 23 nt, Human
aaauaauuuuuauauuugaaaua

SEQ ID NO: 1495995 - RNA, 22 nt, Human
aaauaauuuuuauauuugaaau

SEQ ID NO: 1495996 - RNA, 18 nt, Human
aaauacauuguauauaug

SEQ ID NO: 1495997 - RNA, 22 nt, Human
aaauacgugggcauucaaaugu

SEQ ID NO: 1495998 - RNA, 21 nt, Human
guaauccaagcaaaugugaau

SEQ ID NO: 1495999 - RNA, 20 nt, Human
guaauaggcguaacuaauuu

SEQ ID NO: 1496000 - RNA, 15 nt, Human
aaauccacuuuaucu

SEQ ID NO: 1496001 - RNA, 17 nt, Human
aaauauuauguuaaaac

SEQ ID NO: 1496002 - RNA, 14 nt, Human
aaaucagacuauga

SEQ ID NO: 1496003 - RNA, 21 nt, Human
aaaucagacuaugaaguuuuu

SEQ ID NO: 1496004 - RNA, 20 nt, Human
guaccaagacuacuagggaa

SEQ ID NO: 1496005 - RNA, 23 nt, Human
guaccaagacuacuagggaaaug

SEQ ID NO: 1496006 - RNA, 18 nt, Human
aaauccauacauuugugu

SEQ ID NO: 1496007 - RNA, 15 nt, Human
aaauccauacauuug

SEQ ID NO: 1496008 - RNA, 15 nt, Human
guacuucaugcuguc

SEQ ID NO: 1496009 - RNA, 22 nt, Human
guacuucaaauccuugaagauu

SEQ ID NO: 1496010 - RNA, 21 nt, Human
guacuucaaauccuugaagau

SEQ ID NO: 1496011 - RNA, 12 nt, Human
gcugggucgccc

SEQ ID NO: 1496012 - RNA, 21 nt, Human
gcugggccccugccucucugc

SEQ ID NO: 1496013 - RNA, 22 nt, Human
gcugggccccugccucucugca

SEQ ID NO: 1496014 - RNA, 23 nt, Human
gcugggccccugccucucugcag

SEQ ID NO: 1496015 - RNA, 15 nt, Human
gcuggagugcagugg

SEQ ID NO: 1496016 - RNA, 12 nt, Human
ggaagagaagga

SEQ ID NO: 1496017 - RNA, 17 nt, Human
ggaagagaaggagcaga

SEQ ID NO: 1496018 - RNA, 16 nt, Human
ggacaccugcccugcc

SEQ ID NO: 1496019 - RNA, 17 nt, Human
ggacaccugcccugccc

SEQ ID NO: 1496020 - RNA, 19 nt, Human
ggaaugaagauacugaaau

SEQ ID NO: 1496021 - RNA, 18 nt, Human
ggaaugaagcaaugcuuc

SEQ ID NO: 1496022 - RNA, 18 nt, Human
ggaaguugacuuauagua

SEQ ID NO: 1496023 - RNA, 15 nt, Human
ggacaggauccaggc

SEQ ID NO: 1496024 - RNA, 19 nt, Human
ggacuugcaaaaaggguca

SEQ ID NO: 1496025 - RNA, 18 nt, Human
ggagaaaugaaaaaauau

SEQ ID NO: 1496026 - RNA, 13 nt, Human
gccucuucccucu

SEQ ID NO: 1496027 - RNA, 15 nt, Human
gccucuuagaugcag

SEQ ID NO: 1496028 - RNA, 19 nt, Human
gccuccuuagaaaaaaaau

SEQ ID NO: 1496029 - RNA, 14 nt, Human
gcgaucucagcuca

SEQ ID NO: 1496030 - RNA, 20 nt, Human
gccccugccucucugcaggu

SEQ ID NO: 1496031 - RNA, 23 nt, Human
gccccugccucucugcagguccc

SEQ ID NO: 1496032 - RNA, 23 nt, Human
gccccugccaccuccugccucag

SEQ ID NO: 1496033 - RNA, 19 nt, Human
gcccccacugccuuugacc

SEQ ID NO: 1496034 - RNA, 13 nt, Human
gcccugcccugcc

SEQ ID NO: 1496035 - RNA, 17 nt, Human
gcccugcccugccaccu

SEQ ID NO: 1496036 - RNA, 13 nt, Human
gcccugccaccug

SEQ ID NO: 1496037 - RNA, 14 nt, Human
gcccugccaccugu

SEQ ID NO: 1496038 - RNA, 15 nt, Human
gcccugccaccuguc

SEQ ID NO: 1496039 - RNA, 16 nt, Human
gcccugccaccugucu

SEQ ID NO: 1496040 - RNA, 17 nt, Human
gcccugccaccugucug

SEQ ID NO: 1496041 - RNA, 19 nt, Human
gcguuuuuuaaauguauac

SEQ ID NO: 1496042 - RNA, 20 nt, Human
gcucacugcaaccucugccu

SEQ ID NO: 1496043 - RNA, 17 nt, Human
cuggacuuggccccugc

SEQ ID NO: 1496044 - RNA, 18 nt, Human
cuggacuuggccccugcc

SEQ ID NO: 1496045 - RNA, 19 nt, Human
cuggacuuggccccugcca

SEQ ID NO: 1496046 - RNA, 15 nt, Human
cugccucccuucaug

SEQ ID NO: 1496047 - RNA, 17 nt, Human
cugccucccuucaugca

SEQ ID NO: 1496048 - RNA, 18 nt, Human
cugccucccuucaugcau

SEQ ID NO: 1496049 - RNA, 19 nt, Human
cugccucccuucaugcaug

SEQ ID NO: 1496050 - RNA, 21 nt, Human
cugccucccuucaugcaugga

SEQ ID NO: 1496051 - RNA, 23 nt, Human
cugccucccuucaugcauggaaa

SEQ ID NO: 1496052 - RNA, 14 nt, Human
cugccucccuucau

SEQ ID NO: 1496053 - RNA, 15 nt, Human
cuggggccaggcugg

SEQ ID NO: 1496054 - RNA, 20 nt, Human
cuggggcugaggcugaggca

SEQ ID NO: 1496055 - RNA, 13 nt, Human
cugggaauggagg

SEQ ID NO: 1496056 - RNA, 20 nt, Human
cugggaauggaggggcagag

SEQ ID NO: 1496057 - RNA, 23 nt, Human
cugggaauggaggggcagagcca

SEQ ID NO: 1496058 - RNA, 23 nt, Human
cugggacuauaggcaugcgccac

SEQ ID NO: 1496059 - RNA, 19 nt, Human
cuguuauaaucuuucacag

SEQ ID NO: 1496060 - RNA, 13 nt, Human
cuguuauaaucuu

SEQ ID NO: 1496061 - RNA, 15 nt, Human
cuguuguagaagaca

SEQ ID NO: 1496062 - RNA, 12 nt, Human
cuguuuaagaga

SEQ ID NO: 1496063 - RNA, 14 nt, Human
cuguuuaagagaca

SEQ ID NO: 1496064 - RNA, 16 nt, Human
cuugcaaaaaggguca

SEQ ID NO: 1496065 - RNA, 15 nt, Human
cuugcaaaaaggguc

SEQ ID NO: 1496066 - RNA, 13 nt, Human
cuucucacauuua

SEQ ID NO: 1496067 - RNA, 20 nt, Human
cuucucacauuuauauuuuu

SEQ ID NO: 1496068 - RNA, 16 nt, Human
cuucucuuguuaggua

SEQ ID NO: 1496069 - RNA, 15 nt, Human
cuucugaauaaagca

SEQ ID NO: 1496070 - RNA, 16 nt, Human
cuucugaauaaagcaa

SEQ ID NO: 1496071 - RNA, 18 nt, Human
cuucugaauaaagcaauu

SEQ ID NO: 1496072 - RNA, 22 nt, Human
cuucugaauaaagcaauuagca

SEQ ID NO: 1496073 - RNA, 19 nt, Human
cuucugacauaauccagua

SEQ ID NO: 1496074 - RNA, 23 nt, Human
cuuugaccugccucccuucaugc

SEQ ID NO: 1496075 - RNA, 20 nt, Human
cuuugaccugccucccuuca

SEQ ID NO: 1496076 - RNA, 16 nt, Human
cuuuguaaugaaaacc

SEQ ID NO: 1496077 - RNA, 14 nt, Human
cuuuguaaugaaaa

SEQ ID NO: 1496078 - RNA, 15 nt, Human
cuuuguaaugaaaac

SEQ ID NO: 1496079 - RNA, 13 nt, Human
cuuuguauucaaa

SEQ ID NO: 1496080 - RNA, 17 nt, Human
gaacugauguaaguaaa

SEQ ID NO: 1496081 - RNA, 13 nt, Human
gaacugaaaucau

SEQ ID NO: 1496082 - RNA, 12 nt, Human
gaaccaucagaa

SEQ ID NO: 1496083 - RNA, 17 nt, Human
gaagcacagugaucaag

SEQ ID NO: 1496084 - RNA, 11 nt, Human
gaaaugaaaaa

SEQ ID NO: 1496085 - RNA, 21 nt, Human
gaaaagaaaauuuuuguagua

SEQ ID NO: 1496086 - RNA, 15 nt, Human
gaaaagaaagcuaca

SEQ ID NO: 1496087 - RNA, 19 nt, Human
gaaaacuuguauuaugugu

SEQ ID NO: 1496088 - RNA, 22 nt, Human
gaaaacuuguauuauguguguu

SEQ ID NO: 1496089 - RNA, 21 nt, Human
gaaacaagucagucauucaga

SEQ ID NO: 1496090 - RNA, 14 nt, Human
gacucaaaccaaau

SEQ ID NO: 1496091 - RNA, 19 nt, Human
gacccuccaccgcagaagg

SEQ ID NO: 1496092 - RNA, 21 nt, Human
gacccuccaccgcagaaggaa

SEQ ID NO: 1496093 - RNA, 22 nt, Human
gacccuccaccgcagaaggaag

SEQ ID NO: 1496094 - RNA, 14 nt, Human
gacugugugcucag

SEQ ID NO: 1496095 - RNA, 16 nt, Human
gacugugugcucagga

SEQ ID NO: 1496096 - RNA, 17 nt, Human
gacugugugcucaggag

SEQ ID NO: 1496097 - RNA, 20 nt, Human
gacugugugcucaggagccc

SEQ ID NO: 1496098 - RNA, 19 nt, Human
gacuuuggcugcaugcgag

SEQ ID NO: 1496099 - RNA, 16 nt, Human
gacuuuggcugcaugc

SEQ ID NO: 1496100 - RNA, 21 nt, Human
gacagcccuucuuuccacaga

SEQ ID NO: 1496101 - RNA, 23 nt, Human
gaccauggacacuacacccagca

SEQ ID NO: 1496102 - RNA, 16 nt, Human
gaccauggacacuaca

SEQ ID NO: 1496103 - RNA, 21 nt, Human
gaccauggacacuacacccag

SEQ ID NO: 1496104 - RNA, 22 nt, Human
gaccagcuuuucccaaaagccc

SEQ ID NO: 1496105 - RNA, 14 nt, Human
gaggcucuggagcc

SEQ ID NO: 1496106 - RNA, 19 nt, Human
gaggcucuggagcccacug

SEQ ID NO: 1496107 - RNA, 14 nt, Human
gccaacuauggccu

SEQ ID NO: 1496108 - RNA, 15 nt, Human
gccaacuauggccug

SEQ ID NO: 1496109 - RNA, 19 nt, Human
gccaacuauggccugugga

SEQ ID NO: 1496110 - RNA, 18 nt, Human
gcaaguuuccaucaucua

SEQ ID NO: 1496111 - RNA, 18 nt, Human
gcaauagucaaauugugu

SEQ ID NO: 1496112 - RNA, 22 nt, Human
gcacacaccaccacgccuggcu

SEQ ID NO: 1496113 - RNA, 11 nt, Human
gcaauagagac

SEQ ID NO: 1496114 - RNA, 13 nt, Human
gcaaccuccaccu

SEQ ID NO: 1496115 - RNA, 14 nt, Human
gaugaugacuaugg

SEQ ID NO: 1496116 - RNA, 13 nt, Human
gaugaggccagac

SEQ ID NO: 1496117 - RNA, 15 nt, Human
gaugaggccagacca

SEQ ID NO: 1496118 - RNA, 22 nt, Human
gaugaggccagaccauggacac

SEQ ID NO: 1496119 - RNA, 22 nt, Human
gucucuuuaaaaggaaagaaaa

SEQ ID NO: 1496120 - RNA, 15 nt, Human
aacuaagaaacuuaa

SEQ ID NO: 1496121 - RNA, 19 nt, Human
aacuaagaaacuuaaauuu

SEQ ID NO: 1496122 - RNA, 22 nt, Human
aacuacuucucuuguuagguaa

SEQ ID NO: 1496123 - RNA, 23 nt, Human
aacuaucucauuuccaagcaagu

SEQ ID NO: 1496124 - RNA, 20 nt, Human
aacuaucucauuuccaagca

SEQ ID NO: 1496125 - RNA, 13 nt, Human
aacuauauuguuu

SEQ ID NO: 1496126 - RNA, 17 nt, Human
gugacauuuuacauuaa

SEQ ID NO: 1496127 - RNA, 19 nt, Human
gugacauuuuacauuaaau

SEQ ID NO: 1496128 - RNA, 20 nt, Human
gugacauuuuacauuaaauu

SEQ ID NO: 1496129 - RNA, 21 nt, Human
gugacauuuuacauuaaauuu

SEQ ID NO: 1496130 - RNA, 20 nt, Human
aacugaaaucauacuucuua

SEQ ID NO: 1496131 - RNA, 16 nt, Human
aacauauauaacaaug

SEQ ID NO: 1496132 - RNA, 13 nt, Human
guagcguuuuuua

SEQ ID NO: 1496133 - RNA, 17 nt, Human
guagcguuuuuuaaaug

SEQ ID NO: 1496134 - RNA, 18 nt, Human
guagcguuuuuuaaaugu

SEQ ID NO: 1496135 - RNA, 22 nt, Human
guagcguuuuuuaaauguauac

SEQ ID NO: 1496136 - RNA, 22 nt, Human
aaccaaaucacugaacuuugcu

SEQ ID NO: 1496137 - RNA, 14 nt, Human
gucgcccuggacug

SEQ ID NO: 1496138 - RNA, 18 nt, Human
gucgcccuggacugugug

SEQ ID NO: 1496139 - RNA, 13 nt, Human
aagaaaacaucuu

SEQ ID NO: 1496140 - RNA, 17 nt, Human
aagaaaacaucuuuaag

SEQ ID NO: 1496141 - RNA, 13 nt, Human
aagaaaauaucac

SEQ ID NO: 1496142 - RNA, 16 nt, Human
aagaaagucagccaua

SEQ ID NO: 1496143 - RNA, 19 nt, Human
aagaaaauuuuuguaguag

SEQ ID NO: 1496144 - RNA, 22 nt, Human
gugcacuaauguguaagacaaa

SEQ ID NO: 1496145 - RNA, 20 nt, Human
gugcacuaauguguaagaca

SEQ ID NO: 1496146 - RNA, 16 nt, Human
gugcugggccccugcc

SEQ ID NO: 1496147 - RNA, 19 nt, Human
gugcugggccccugccucu

SEQ ID NO: 1496148 - RNA, 11 nt, Human
guggacaccug

SEQ ID NO: 1496149 - RNA, 12 nt, Human
guggacaccugc

SEQ ID NO: 1496150 - RNA, 13 nt, Human
guggacaccugcc

SEQ ID NO: 1496151 - RNA, 14 nt, Human
guggacaccugccc

SEQ ID NO: 1496152 - RNA, 16 nt, Human
guggacaccugcccug

SEQ ID NO: 1496153 - RNA, 17 nt, Human
guggacaccugcccugc

SEQ ID NO: 1496154 - RNA, 18 nt, Human
guggacaccugcccugcc

SEQ ID NO: 1496155 - RNA, 19 nt, Human
guggacaccugcccugccc

SEQ ID NO: 1496156 - RNA, 13 nt, Human
guggcagcaacaa

SEQ ID NO: 1496157 - RNA, 16 nt, Human
aagacaaaaagcuacu

SEQ ID NO: 1496158 - RNA, 24 nt, Human
aagaauuucuaggacugaauuaug

SEQ ID NO: 1496159 - RNA, 18 nt, Human
guggggggggugcugggc

SEQ ID NO: 1496160 - RNA, 13 nt, Human
aagaugaucauuu

SEQ ID NO: 1496161 - RNA, 19 nt, Human
aagcaaaauuuuuucucua

SEQ ID NO: 1496162 - RNA, 13 nt, Human
aagcaaaugugaa

SEQ ID NO: 1496163 - RNA, 14 nt, Human
aagcaaaugugaau

SEQ ID NO: 1496164 - RNA, 20 nt, Human
aagcaaaugugaaucauuuu

SEQ ID NO: 1496165 - RNA, 16 nt, Human
aagcaaguauuagaau

SEQ ID NO: 1496166 - RNA, 20 nt, Human
aagcaaguaaaaaggcuaaa

SEQ ID NO: 1496167 - RNA, 19 nt, Human
aagcaaguaaaaaggcuaa

SEQ ID NO: 1496168 - RNA, 17 nt, Human
guuuuuuuuuaaagacu

SEQ ID NO: 1496169 - RNA, 13 nt, Human
uaaaauuacaacu

SEQ ID NO: 1496170 - RNA, 15 nt, Human
uaaaauuacaacuaa

SEQ ID NO: 1496171 - RNA, 17 nt, Human
uaaaauuacaacuaagu

SEQ ID NO: 1496172 - RNA, 19 nt, Human
uaaaauuacaacuaaguga

SEQ ID NO: 1496173 - RNA, 17 nt, Human
uaaaauuuuuaaucuuu

SEQ ID NO: 1496174 - RNA, 19 nt, Human
uaaaauuuuuaaucuuuaa

SEQ ID NO: 1496175 - RNA, 22 nt, Human
aaguuuaguuugaggaauucuu

SEQ ID NO: 1496176 - RNA, 16 nt, Human
uaaagacuuuuaugau

SEQ ID NO: 1496177 - RNA, 16 nt, Human
uaaaccggaccaucuc

SEQ ID NO: 1496178 - RNA, 17 nt, Human
uaaacgucuuaaauauu

SEQ ID NO: 1496179 - RNA, 13 nt, Human
uaaacgucuuaaa

SEQ ID NO: 1496180 - RNA, 17 nt, Human
uaacaaugcuguauuuu

SEQ ID NO: 1496181 - RNA, 15 nt, Human
uaacaaugcuguauu

SEQ ID NO: 1496182 - RNA, 20 nt, Human
uaaauguuuuuuuuuaaaga

SEQ ID NO: 1496183 - RNA, 23 nt, Human
uaaauguuuuuuuuuaaagacuu

SEQ ID NO: 1496184 - RNA, 12 nt, Human
uaaauagcuuuu

SEQ ID NO: 1496185 - RNA, 22 nt, Human
aauaaaauccauacauuugugu

SEQ ID NO: 1496186 - RNA, 12 nt, Human
aauaaaaauaau

SEQ ID NO: 1496187 - RNA, 17 nt, Human
uaaagugacccugcucu

SEQ ID NO: 1496188 - RNA, 20 nt, Human
uaaagugacccugcucucac

SEQ ID NO: 1496189 - RNA, 15 nt, Human
aauaacaauaaaaga

SEQ ID NO: 1496190 - RNA, 16 nt, Human
guuguaaaccaaguga

SEQ ID NO: 1496191 - RNA, 19 nt, Human
guuugcaucugaaaauuga

SEQ ID NO: 1496192 - RNA, 22 nt, Human
guuuuauaauuuugugaagcaa

SEQ ID NO: 1496193 - RNA, 15 nt, Human
guuuuauaauuuugu

SEQ ID NO: 1496194 - RNA, 22 nt, Human
aagucuuauauauuguagauaa

SEQ ID NO: 1496195 - RNA, 19 nt, Human
aagugacuuuggcugcaug

SEQ ID NO: 1496196 - RNA, 23 nt, Human
guuuuuuuuuaaaaaagaaacau

SEQ ID NO: 1496197 - RNA, 15 nt, Human
guuuuuuuuuaaaga

SEQ ID NO: 1496198 - RNA, 17 nt, Human
guuuuuuuguuauuaaa

SEQ ID NO: 1496199 - RNA, 23 nt, Human
aaguauguuagugcaaauuguca

SEQ ID NO: 1496200 - RNA, 20 nt, Human
aagucacauuccugaacagg

SEQ ID NO: 1496201 - RNA, 23 nt, Human
aaggagcagagcugauggagaag

SEQ ID NO: 1496202 - RNA, 13 nt, Human
aaggaggacccag

SEQ ID NO: 1496203 - RNA, 14 nt, Human
aaggaggacccagg

SEQ ID NO: 1496204 - RNA, 15 nt, Human
aaggaggacccagga

SEQ ID NO: 1496205 - RNA, 17 nt, Human
aaggaggacccaggaca

SEQ ID NO: 1496206 - RNA, 18 nt, Human
aaggaggacccaggacag

SEQ ID NO: 1496207 - RNA, 21 nt, Human
aaggaggacccaggacaggau

SEQ ID NO: 1496208 - RNA, 22 nt, Human
aaggaggacccaggacaggauc

SEQ ID NO: 1496209 - RNA, 13 nt, Human
aaggauaaugaau

SEQ ID NO: 1496210 - RNA, 23 nt, Human
aaggauaaaguugguaaaccuuu

SEQ ID NO: 1496211 - RNA, 21 nt, Human
aaggauaaaguugguaaaccu

SEQ ID NO: 1496212 - RNA, 17 nt, Human
aaggaaggcagggagga

SEQ ID NO: 1496213 - RNA, 17 nt, Human
aaggaaggcuccaucuc

SEQ ID NO: 1496214 - RNA, 22 nt, Human
aaggagcaagucagaauagaaa

SEQ ID NO: 1496215 - RNA, 20 nt, Human
aaggccugguguuucuugau

SEQ ID NO: 1496216 - RNA, 13 nt, Human
guugacaugggac

SEQ ID NO: 1496217 - RNA, 13 nt, Human
guugaauuuuaca

SEQ ID NO: 1496218 - RNA, 16 nt, Human
aaggaaaaaauaacaa

SEQ ID NO: 1496219 - RNA, 19 nt, Human
aaggaaaaaauaacaauga

SEQ ID NO: 1496220 - RNA, 16 nt, Human
aagcuuuuaugugaaa

SEQ ID NO: 1496221 - RNA, 19 nt, Human
uaacaaugcuguauuuuaa

SEQ ID NO: 1496222 - RNA, 18 nt, Human
uaauacuugcuuuggaaa

SEQ ID NO: 1496223 - RNA, 13 nt, Human
uaaucuuucacag

SEQ ID NO: 1496224 - RNA, 17 nt, Human
uaaucuuuaauuuuaca

SEQ ID NO: 1496225 - RNA, 22 nt, Human
uaauccaagcaaaugugaauca

SEQ ID NO: 1496226 - RNA, 15 nt, Human
uaauguaagacaaau

SEQ ID NO: 1496227 - RNA, 13 nt, Human
uaauucauguugc

SEQ ID NO: 1496228 - RNA, 13 nt, Human
aauguaagacaaa

SEQ ID NO: 1496229 - RNA, 20 nt, Human
uacaguggggaaugaagaua

SEQ ID NO: 1496230 - RNA, 23 nt, Human
uacauggcuggagcuagaauuug

SEQ ID NO: 1496231 - RNA, 17 nt, Human
uacauguacugauuacu

SEQ ID NO: 1496232 - RNA, 15 nt, Human
uacauuguauauaug

SEQ ID NO: 1496233 - RNA, 20 nt, Human
aauuaagaaaggauaaaguu

SEQ ID NO: 1496234 - RNA, 19 nt, Human
aauuaacaugaauauuuag

SEQ ID NO: 1496235 - RNA, 18 nt, Human
aauguugacaugggacau

SEQ ID NO: 1496236 - RNA, 23 nt, Human
uaccccaccucccucaaccucau

SEQ ID NO: 1496237 - RNA, 14 nt, Human
acaaaaagaaaaga

SEQ ID NO: 1496238 - RNA, 18 nt, Human
acaaaaagaaaagaaaau

SEQ ID NO: 1496239 - RNA, 19 nt, Human
uagaugcaguucugaagaa

SEQ ID NO: 1496240 - RNA, 17 nt, Human
uagaugcaguucugaag

SEQ ID NO: 1496241 - RNA, 20 nt, Human
uagaugcaguucugaagaag

SEQ ID NO: 1496242 - RNA, 21 nt, Human
uagcaugucgucaaagcugaa

SEQ ID NO: 1496243 - RNA, 18 nt, Human
acaagcacuaaacaaaga

SEQ ID NO: 1496244 - RNA, 18 nt, Human
acaaauucugucucugga

SEQ ID NO: 1496245 - RNA, 19 nt, Human
uagcauuuguguugaagag

SEQ ID NO: 1496246 - RNA, 20 nt, Human
aauuuuuuucaccuagauuu

SEQ ID NO: 1496247 - RNA, 19 nt, Human
acaaaaaaaaaauuugcca

SEQ ID NO: 1496248 - RNA, 13 nt, Human
aauuuuuguagua

SEQ ID NO: 1496249 - RNA, 22 nt, Human
aauuuuuucucuaggaaauauu

SEQ ID NO: 1496250 - RNA, 13 nt, Human
aauuuuuuucacc

SEQ ID NO: 1496251 - RNA, 19 nt, Human
aauuuuuucucuaggaaau

SEQ ID NO: 1496252 - RNA, 19 nt, Human
aauuuuuauauuugaaaua

SEQ ID NO: 1496253 - RNA, 15 nt, Human
uagacaauugaggua

SEQ ID NO: 1496254 - RNA, 18 nt, Human
uagacaauugagguaagu

SEQ ID NO: 1496255 - RNA, 19 nt, Human
uagaauuugauaugugaac

SEQ ID NO: 1496256 - RNA, 23 nt, Human
uagaagucacauuccugaacagg

SEQ ID NO: 1496257 - RNA, 16 nt, Human
uacuucaugcugucua

SEQ ID NO: 1496258 - RNA, 21 nt, Human
uacuucaaauccuugaagauu

SEQ ID NO: 1496259 - RNA, 14 nt, Human
uagaagagagaggu

SEQ ID NO: 1496260 - RNA, 22 nt, Human
uagaagagagagguugaaaaac

SEQ ID NO: 1496261 - RNA, 20 nt, Human
aauuguguuuauaauuuuaa

SEQ ID NO: 1496262 - RNA, 13 nt, Human
uacuguaagaaaa

SEQ ID NO: 1496263 - RNA, 23 nt, Human
aauugugugaaagguacuucaaa

SEQ ID NO: 1496264 - RNA, 16 nt, Human
aauuuaaauagcuuuu

SEQ ID NO: 1496265 - RNA, 15 nt, Human
aauuuaaauagcuuu

SEQ ID NO: 1496266 - RNA, 18 nt, Human
aauuugauaugugaacag

SEQ ID NO: 1496267 - RNA, 16 nt, Human
aauuugauaugugaac

SEQ ID NO: 1496268 - RNA, 15 nt, Human
aauuugauaugugaa

SEQ ID NO: 1496269 - RNA, 19 nt, Human
aauuugauaugugaacagu

SEQ ID NO: 1496270 - RNA, 19 nt, Human
uacuucaaauccuugaaga

SEQ ID NO: 1496271 - RNA, 14 nt, Human
uacuucaaauccuu

SEQ ID NO: 1496272 - RNA, 20 nt, Human
aauuugaaacacuuugcaua

SEQ ID NO: 1496273 - RNA, 18 nt, Human
uacgugcucugugggucu

SEQ ID NO: 1496274 - RNA, 20 nt, Human
uacuagucaccagagacuuu

SEQ ID NO: 1496275 - RNA, 21 nt, Human
uacuagucaccagagacuuua

SEQ ID NO: 1496276 - RNA, 22 nt, Human
uacuagucaccagagacuuuag

SEQ ID NO: 1496277 - RNA, 22 nt, Human
uacucuuauaucuauauuuuac

SEQ ID NO: 1496278 - RNA, 20 nt, Human
uacucuuauaucuauauuuu

SEQ ID NO: 1496279 - RNA, 21 nt, Human
aauucuugccaaauauaaaua

SEQ ID NO: 1496280 - RNA, 11 nt, Human
aauucuucccu

SEQ ID NO: 1496281 - RNA, 21 nt, Human
aauucuucccuaucuuugcca

SEQ ID NO: 1496282 - RNA, 19 nt, Human
aauucuuaugccauauaau

SEQ ID NO: 1496283 - RNA, 14 nt, Human
aauucuuucauuuu

SEQ ID NO: 1496284 - RNA, 17 nt, Human
aauucuuuaaaauuaca

SEQ ID NO: 1496285 - RNA, 22 nt, Human
aauucuuuaaaauuacaacuaa

SEQ ID NO: 1496286 - RNA, 23 nt, Human
uauaaaauaauuuuuauauuuga

SEQ ID NO: 1496287 - RNA, 19 nt, Human
uauaaaagccuguuuaaga

SEQ ID NO: 1496288 - RNA, 22 nt, Human
uauaaaauaauuuuuauauuug

SEQ ID NO: 1496289 - RNA, 21 nt, Human
uauaaaauaauuuuuauauuu

SEQ ID NO: 1496290 - RNA, 14 nt, Human
uauaaaagccuguu

SEQ ID NO: 1496291 - RNA, 17 nt, Human
uauaaaagccuguuuaa

SEQ ID NO: 1496292 - RNA, 12 nt, Human
uauaaaagccug

SEQ ID NO: 1496293 - RNA, 21 nt, Human
acaccuacuagucaccagaga

SEQ ID NO: 1496294 - RNA, 22 nt, Human
acaagcucacagaccuuugaac

SEQ ID NO: 1496295 - RNA, 22 nt, Human
uagugagcagucaggaaagaga

SEQ ID NO: 1496296 - RNA, 18 nt, Human
uagucucuuuaaaaggaa

SEQ ID NO: 1496297 - RNA, 16 nt, Human
uagucucuuuaaaagg

SEQ ID NO: 1496298 - RNA, 16 nt, Human
uaguuuuauaugcuuc

SEQ ID NO: 1496299 - RNA, 14 nt, Human
uauagcuaaguaca

SEQ ID NO: 1496300 - RNA, 23 nt, Human
uauauauuuuuuucugaaauuuc

SEQ ID NO: 1496301 - RNA, 22 nt, Human
uauauauuuuuuucugaaauuu

SEQ ID NO: 1496302 - RNA, 21 nt, Human
uauauauuuuuuucugaaauu

SEQ ID NO: 1496303 - RNA, 16 nt, Human
uauauauagcagcuuu

SEQ ID NO: 1496304 - RNA, 13 nt, Human
uauauaucaaaua

SEQ ID NO: 1496305 - RNA, 19 nt, Human
uauaauuuugugaagcaaa

SEQ ID NO: 1496306 - RNA, 12 nt, Human
uauaccaauaaa

SEQ ID NO: 1496307 - RNA, 13 nt, Human
uauaccaauaaag

SEQ ID NO: 1496308 - RNA, 15 nt, Human
uauaccaauaaagug

SEQ ID NO: 1496309 - RNA, 14 nt, Human
uauaccaauaaagu

SEQ ID NO: 1496310 - RNA, 14 nt, Human
uauaauuuugugaa

SEQ ID NO: 1496311 - RNA, 15 nt, Human
uaucuugaauaaugu

SEQ ID NO: 1496312 - RNA, 22 nt, Human
uauggccugugagcuaggaauu

SEQ ID NO: 1496313 - RNA, 14 nt, Human
uauggccuguggau

SEQ ID NO: 1496314 - RNA, 15 nt, Human
acagcuccaagaauu

SEQ ID NO: 1496315 - RNA, 15 nt, Human
uauauuuacaaaugg

SEQ ID NO: 1496316 - RNA, 14 nt, Human
uauauuuacaaaug

SEQ ID NO: 1496317 - RNA, 16 nt, Human
uauauugauccagaaa

SEQ ID NO: 1496318 - RNA, 23 nt, Human
acaguucggugagcuacaaaugc

SEQ ID NO: 1496319 - RNA, 19 nt, Human
acaguucggugagcuacaa

SEQ ID NO: 1496320 - RNA, 22 nt, Human
acaguucggugagcuacaaaug

SEQ ID NO: 1496321 - RNA, 14 nt, Human
uauuuaauucaugu

SEQ ID NO: 1496322 - RNA, 19 nt, Human
uauuuaguguucauaaaua

SEQ ID NO: 1496323 - RNA, 18 nt, Human
uauuuauuuuaauaaugu

SEQ ID NO: 1496324 - RNA, 16 nt, Human
uauuuauuuuaauaau

SEQ ID NO: 1496325 - RNA, 14 nt, Human
uauuuauuuuaaua

SEQ ID NO: 1496326 - RNA, 14 nt, Human
uauuuaauagguuu

SEQ ID NO: 1496327 - RNA, 18 nt, Human
uauuuaaccucuaaauuc

SEQ ID NO: 1496328 - RNA, 17 nt, Human
uauuuaaccucuaaauu

SEQ ID NO: 1496329 - RNA, 17 nt, Human
uauugucuagugaaacu

SEQ ID NO: 1496330 - RNA, 21 nt, Human
uauuguagcauccuggaauau

SEQ ID NO: 1496331 - RNA, 20 nt, Human
uauuguagcauccuggaaua

SEQ ID NO: 1496332 - RNA, 18 nt, Human
uauuguagcauccuggaa

SEQ ID NO: 1496333 - RNA, 17 nt, Human
uauuguagcauccugga

SEQ ID NO: 1496334 - RNA, 16 nt, Human
uauuguauauuacaau

SEQ ID NO: 1496335 - RNA, 17 nt, Human
uauuguauauuacaaug

SEQ ID NO: 1496336 - RNA, 19 nt, Human
uauuguauauuacaaugau

SEQ ID NO: 1496337 - RNA, 20 nt, Human
acagugaaagaaaauaacaa

SEQ ID NO: 1496338 - RNA, 21 nt, Human
acaguuaccucugccucagaa

SEQ ID NO: 1496339 - RNA, 11 nt, Human
uauucaauaaa

SEQ ID NO: 1496340 - RNA, 15 nt, Human
uauucagcucaugga

SEQ ID NO: 1496341 - RNA, 22 nt, Human
uauuagcccuucuccauggccc

SEQ ID NO: 1496342 - RNA, 23 nt, Human
uauuacaguggggaaugaagaua

SEQ ID NO: 1496343 - RNA, 21 nt, Human
uauguuuucaggcuagaugua

SEQ ID NO: 1496344 - RNA, 19 nt, Human
acccacuugcuuuuaaaau

SEQ ID NO: 1496345 - RNA, 18 nt, Human
acccagaaugagacaucc

SEQ ID NO: 1496346 - RNA, 20 nt, Human
acccagaaugagacauccag

SEQ ID NO: 1496347 - RNA, 19 nt, Human
acccagaaugagacaucca

SEQ ID NO: 1496348 - RNA, 23 nt, Human
accacuuguguuuugcaagccag

SEQ ID NO: 1496349 - RNA, 19 nt, Human
accacuuguguuuugcaag

SEQ ID NO: 1496350 - RNA, 19 nt, Human
ucagccuggcuucaaauug

SEQ ID NO: 1496351 - RNA, 10 nt, Human
acccaggaca

SEQ ID NO: 1496352 - RNA, 11 nt, Human
acccaggacag

SEQ ID NO: 1496353 - RNA, 19 nt, Human
acccagguuggagugcagu

SEQ ID NO: 1496354 - RNA, 20 nt, Human
acccagguuggagugcagug

SEQ ID NO: 1496355 - RNA, 18 nt, Human
acccuccaccgcagaagg

SEQ ID NO: 1496356 - RNA, 20 nt, Human
acccuccaccgcagaaggaa

SEQ ID NO: 1496357 - RNA, 21 nt, Human
acccuccaccgcagaaggaag

SEQ ID NO: 1496358 - RNA, 20 nt, Human
ucaggaagagaaggagcaga

SEQ ID NO: 1496359 - RNA, 15 nt, Human
ucaggaagagaagga

SEQ ID NO: 1496360 - RNA, 16 nt, Human
ucaggaagagaaggag

SEQ ID NO: 1496361 - RNA, 13 nt, Human
uccacucuuucuu

SEQ ID NO: 1496362 - RNA, 15 nt, Human
uccacucuuucuuuc

SEQ ID NO: 1496363 - RNA, 16 nt, Human
uccacucuuucuuuca

SEQ ID NO: 1496364 - RNA, 14 nt, Human
accuuagaauacag

SEQ ID NO: 1496365 - RNA, 12 nt, Human
accuuccaccca

SEQ ID NO: 1496366 - RNA, 14 nt, Human
accuuccacccagu

SEQ ID NO: 1496367 - RNA, 21 nt, Human
uccaacuaucucauuuccaag

SEQ ID NO: 1496368 - RNA, 23 nt, Human
uccaaagucucuggaauuugaaa

SEQ ID NO: 1496369 - RNA, 20 nt, Human
ucauuuuagggguagcauuu

SEQ ID NO: 1496370 - RNA, 13 nt, Human
accucaauguccc

SEQ ID NO: 1496371 - RNA, 12 nt, Human
accuagauuuuu

SEQ ID NO: 1496372 - RNA, 12 nt, Human
accggaccaucu

SEQ ID NO: 1496373 - RNA, 18 nt, Human
accucuaaauucuuucau

SEQ ID NO: 1496374 - RNA, 21 nt, Human
accucuaaauucuuucauuuu

SEQ ID NO: 1496375 - RNA, 14 nt, Human
ucaugugaaaucau

SEQ ID NO: 1496376 - RNA, 22 nt, Human
ucaugaauuaguuuuauaugcu

SEQ ID NO: 1496377 - RNA, 14 nt, Human
ucaugaccaguaaa

SEQ ID NO: 1496378 - RNA, 15 nt, Human
ucaugaccaguaaag

SEQ ID NO: 1496379 - RNA, 15 nt, Human
ucaugcauggaaauu

SEQ ID NO: 1496380 - RNA, 19 nt, Human
uccagccuggggcugaggc

SEQ ID NO: 1496381 - RNA, 22 nt, Human
acuaugaaguuuuuuuuauaca

SEQ ID NO: 1496382 - RNA, 18 nt, Human
ucccucaaccucauccuc

SEQ ID NO: 1496383 - RNA, 19 nt, Human
ucccucaaccucauccucu

SEQ ID NO: 1496384 - RNA, 12 nt, Human
ucccucacccau

SEQ ID NO: 1496385 - RNA, 18 nt, Human
ucccucacccauccuaga

SEQ ID NO: 1496386 - RNA, 14 nt, Human
ucccucacccaucc

SEQ ID NO: 1496387 - RNA, 16 nt, Human
acucaucuagguaaau

SEQ ID NO: 1496388 - RNA, 18 nt, Human
acucaucuagguaaauua

SEQ ID NO: 1496389 - RNA, 21 nt, Human
acucaucuagguaaauuacag

SEQ ID NO: 1496390 - RNA, 18 nt, Human
acuccugaccucaaguga

SEQ ID NO: 1496391 - RNA, 23 nt, Human
acucuuauaucuauauuuuacau

SEQ ID NO: 1496392 - RNA, 16 nt, Human
acugcaaccuccaccu

SEQ ID NO: 1496393 - RNA, 17 nt, Human
acugcaaccuccaccuc

SEQ ID NO: 1496394 - RNA, 20 nt, Human
acugcaaccuccaccucgca

SEQ ID NO: 1496395 - RNA, 14 nt, Human
acugaggaucagag

SEQ ID NO: 1496396 - RNA, 16 nt, Human
acugcaaccucugccu

SEQ ID NO: 1496397 - RNA, 22 nt, Human
acugccuucucaacuccaaacu

SEQ ID NO: 1496398 - RNA, 11 nt, Human
acugccuuuga

SEQ ID NO: 1496399 - RNA, 13 nt, Human
acugccuuugacc

SEQ ID NO: 1496400 - RNA, 23 nt, Human
acugcgcccuuaacugcauccag

SEQ ID NO: 1496401 - RNA, 15 nt, Human
acugcucuccuccac

SEQ ID NO: 1496402 - RNA, 21 nt, Human
acugcucuccuccaccucaac

SEQ ID NO: 1496403 - RNA, 18 nt, Human
uccuucagcacuuuagaa

SEQ ID NO: 1496404 - RNA, 15 nt, Human
uccuucagcacuuua

SEQ ID NO: 1496405 - RNA, 14 nt, Human
uccuucccugcugu

SEQ ID NO: 1496406 - RNA, 20 nt, Human
acuguacagacagaaaaaac

SEQ ID NO: 1496407 - RNA, 19 nt, Human
acuguaaucuuauuuagga

SEQ ID NO: 1496408 - RNA, 22 nt, Human
acuguaaucuuauuuaggaagu

SEQ ID NO: 1496409 - RNA, 16 nt, Human
acuguaaggcaaucau

SEQ ID NO: 1496410 - RNA, 20 nt, Human
agcacuuuagaauaugccuu

SEQ ID NO: 1496411 - RNA, 14 nt, Human
agcacuuuagaaua

SEQ ID NO: 1496412 - RNA, 21 nt, Human
agcacuuuagaauaugccuug

SEQ ID NO: 1496413 - RNA, 11 nt, Human
agcagacauuu

SEQ ID NO: 1496414 - RNA, 16 nt, Human
agcaccaaucaugaau

SEQ ID NO: 1496415 - RNA, 22 nt, Human
agcacagccucuuagaugcagu

SEQ ID NO: 1496416 - RNA, 15 nt, Human
agcacagugaucaag

SEQ ID NO: 1496417 - RNA, 12 nt, Human
ugaggacacaug

SEQ ID NO: 1496418 - RNA, 13 nt, Human
ugaggacacaugu

SEQ ID NO: 1496419 - RNA, 14 nt, Human
ugaggacacauguc

SEQ ID NO: 1496420 - RNA, 15 nt, Human
ugaggacacaugucc

SEQ ID NO: 1496421 - RNA, 15 nt, Human
ugaggacacugauau

SEQ ID NO: 1496422 - RNA, 16 nt, Human
ugaggacacaugucca

SEQ ID NO: 1496423 - RNA, 13 nt, Human
ugaggccagacca

SEQ ID NO: 1496424 - RNA, 13 nt, Human
ugagcuacaaaug

SEQ ID NO: 1496425 - RNA, 14 nt, Human
ugagcuacaaaugc

SEQ ID NO: 1496426 - RNA, 16 nt, Human
ugagcuacaaaugcau

SEQ ID NO: 1496427 - RNA, 14 nt, Human
ugagcuaggaauug

SEQ ID NO: 1496428 - RNA, 16 nt, Human
ugaggggcuaccagga

SEQ ID NO: 1496429 - RNA, 17 nt, Human
ugaggggcuaccaggaa

SEQ ID NO: 1496430 - RNA, 19 nt, Human
ugaggggcuaccaggaaag

SEQ ID NO: 1496431 - RNA, 17 nt, Human
agcagagcugauggaga

SEQ ID NO: 1496432 - RNA, 19 nt, Human
agcagagcugauggagaag

SEQ ID NO: 1496433 - RNA, 21 nt, Human
agcagagcugauggagaagga

SEQ ID NO: 1496434 - RNA, 22 nt, Human
agcagagcugauggagaaggaa

SEQ ID NO: 1496435 - RNA, 23 nt, Human
agcagagcugauggagaaggaag

SEQ ID NO: 1496436 - RNA, 15 nt, Human
ugagguaaguuuuuu

SEQ ID NO: 1496437 - RNA, 16 nt, Human
agauuuaccacuugug

SEQ ID NO: 1496438 - RNA, 14 nt, Human
agauuuaugcauau

SEQ ID NO: 1496439 - RNA, 14 nt, Human
agauuuuccugaaa

SEQ ID NO: 1496440 - RNA, 15 nt, Human
ugacuguuuccauca

SEQ ID NO: 1496441 - RNA, 22 nt, Human
agauucaaugccccugaauuua

SEQ ID NO: 1496442 - RNA, 21 nt, Human
agauucaaugccccugaauuu

SEQ ID NO: 1496443 - RNA, 23 nt, Human
agauuauauauauuuuuuucuga

SEQ ID NO: 1496444 - RNA, 15 nt, Human
agauguguucacaau

SEQ ID NO: 1496445 - RNA, 18 nt, Human
agauguguucacaaugga

SEQ ID NO: 1496446 - RNA, 12 nt, Human
ugacauuuuaca

SEQ ID NO: 1496447 - RNA, 14 nt, Human
ugacauuuuacauu

SEQ ID NO: 1496448 - RNA, 15 nt, Human
ugacauuuuacauua

SEQ ID NO: 1496449 - RNA, 16 nt, Human
ugacauuuuacauuaa

SEQ ID NO: 1496450 - RNA, 21 nt, Human
agaucauugugaaauuauuca

SEQ ID NO: 1496451 - RNA, 18 nt, Human
agagucuauuuacggaac

SEQ ID NO: 1496452 - RNA, 18 nt, Human
ugaagguggaaauaaacu

SEQ ID NO: 1496453 - RNA, 12 nt, Human
ucuuuguaauga

SEQ ID NO: 1496454 - RNA, 13 nt, Human
ucuuuguaaugaa

SEQ ID NO: 1496455 - RNA, 15 nt, Human
ucuuuguaaugaaaa

SEQ ID NO: 1496456 - RNA, 20 nt, Human
ugaagaagcaccaaucauga

SEQ ID NO: 1496457 - RNA, 14 nt, Human
ugaagaagauggua

SEQ ID NO: 1496458 - RNA, 22 nt, Human
ugaagaagcaccaaucaugaau

SEQ ID NO: 1496459 - RNA, 21 nt, Human
agaggcgcaugaauuugugaa

SEQ ID NO: 1496460 - RNA, 15 nt, Human
agagaaugagagaca

SEQ ID NO: 1496461 - RNA, 17 nt, Human
agagacacacugaagaa

SEQ ID NO: 1496462 - RNA, 20 nt, Human
agagacacacugaagaagca

SEQ ID NO: 1496463 - RNA, 18 nt, Human
agagacacacugaagaag

SEQ ID NO: 1496464 - RNA, 15 nt, Human
ucuuuaaaauuacaa

SEQ ID NO: 1496465 - RNA, 20 nt, Human
ucuuuaaaauuacaacuaag

SEQ ID NO: 1496466 - RNA, 18 nt, Human
ucuuuaaaaggaaagaaa

SEQ ID NO: 1496467 - RNA, 14 nt, Human
ucuugaugccuggc

SEQ ID NO: 1496468 - RNA, 20 nt, Human
ucuugaugccuggcggggug

SEQ ID NO: 1496469 - RNA, 21 nt, Human
ucuucccuggaaaccuuccac

SEQ ID NO: 1496470 - RNA, 22 nt, Human
ucuuagaugcaguucugaagaa

SEQ ID NO: 1496471 - RNA, 19 nt, Human
ucuuaauauguucuuuuaa

SEQ ID NO: 1496472 - RNA, 20 nt, Human
agaauuugauaugugaacag

SEQ ID NO: 1496473 - RNA, 19 nt, Human
agaauuugauaugugaaca

SEQ ID NO: 1496474 - RNA, 18 nt, Human
agaauuugauaugugaac

SEQ ID NO: 1496475 - RNA, 17 nt, Human
agaauuugauaugugaa

SEQ ID NO: 1496476 - RNA, 20 nt, Human
agacagaaucucagucuguc

SEQ ID NO: 1496477 - RNA, 11 nt, Human
agaaggaaggc

SEQ ID NO: 1496478 - RNA, 17 nt, Human
agaaggaaggcagggag

SEQ ID NO: 1496479 - RNA, 19 nt, Human
agaaggaaggcagggagga

SEQ ID NO: 1496480 - RNA, 20 nt, Human
agaaggaaggcagggaggag

SEQ ID NO: 1496481 - RNA, 21 nt, Human
agaaggaaggcagggaggagg

SEQ ID NO: 1496482 - RNA, 14 nt, Human
ucuggucucgaacu

SEQ ID NO: 1496483 - RNA, 16 nt, Human
ucuguucauuccucca

SEQ ID NO: 1496484 - RNA, 17 nt, Human
ucuguucauuccuccag

SEQ ID NO: 1496485 - RNA, 21 nt, Human
agaauuucuaggacugaauua

SEQ ID NO: 1496486 - RNA, 13 nt, Human
agaauuucuagga

SEQ ID NO: 1496487 - RNA, 18 nt, Human
ucuguuuuauaauuuugu

SEQ ID NO: 1496488 - RNA, 20 nt, Human
ucuguuuuauaauuuuguga

SEQ ID NO: 1496489 - RNA, 20 nt, Human
ucucuucugaauaaagcaau

SEQ ID NO: 1496490 - RNA, 17 nt, Human
agaaaaauauauacuaa

SEQ ID NO: 1496491 - RNA, 19 nt, Human
agaaaacaaggaugaauua

SEQ ID NO: 1496492 - RNA, 20 nt, Human
agaaagaacggaagaagaga

SEQ ID NO: 1496493 - RNA, 19 nt, Human
agaaaacuuguauuaugug

SEQ ID NO: 1496494 - RNA, 13 nt, Human
agaaacccugcac

SEQ ID NO: 1496495 - RNA, 18 nt, Human
ucucccaaaaaacuacuu

SEQ ID NO: 1496496 - RNA, 19 nt, Human
ucuccauugugccuaaguc

SEQ ID NO: 1496497 - RNA, 14 nt, Human
acuuuggcugcaug

SEQ ID NO: 1496498 - RNA, 17 nt, Human
acuuuggcugcaugcga

SEQ ID NO: 1496499 - RNA, 14 nt, Human
acuuuuggcauuuu

SEQ ID NO: 1496500 - RNA, 12 nt, Human
acuuuuugcagc

SEQ ID NO: 1496501 - RNA, 13 nt, Human
acuuuuugcagcu

SEQ ID NO: 1496502 - RNA, 15 nt, Human
acuuuuugcagcuuu

SEQ ID NO: 1496503 - RNA, 17 nt, Human
acuuuuugcagcuuucu

SEQ ID NO: 1496504 - RNA, 22 nt, Human
acuuuuuuuuuuuaagaguaaa

SEQ ID NO: 1496505 - RNA, 21 nt, Human
ucugacuguuuccaucaaggg

SEQ ID NO: 1496506 - RNA, 17 nt, Human
ucugauacagaaaaguu

SEQ ID NO: 1496507 - RNA, 16 nt, Human
ucugauacagaaaagu

SEQ ID NO: 1496508 - RNA, 19 nt, Human
ucugaggggcuaccaggaa

SEQ ID NO: 1496509 - RNA, 20 nt, Human
ucugaggggcuaccaggaaa

SEQ ID NO: 1496510 - RNA, 21 nt, Human
ucugaggggcuaccaggaaag

SEQ ID NO: 1496511 - RNA, 16 nt, Human
agaagaaagaacggaa

SEQ ID NO: 1496512 - RNA, 18 nt, Human
agaagaaagaacggaaga

SEQ ID NO: 1496513 - RNA, 21 nt, Human
agaagaacugaaaucauacuu

SEQ ID NO: 1496514 - RNA, 12 nt, Human
ucuggauuauau

SEQ ID NO: 1496515 - RNA, 18 nt, Human
ucuggauuauauuaugaa

SEQ ID NO: 1496516 - RNA, 14 nt, Human
agaagcuccaggua

SEQ ID NO: 1496517 - RNA, 19 nt, Human
agcuauggugucauaggcu

SEQ ID NO: 1496518 - RNA, 11 nt, Human
agcuauauaag

SEQ ID NO: 1496519 - RNA, 17 nt, Human
agcuauauaagacaaga

SEQ ID NO: 1496520 - RNA, 21 nt, Human
ugccacaccccccaccccuag

SEQ ID NO: 1496521 - RNA, 23 nt, Human
ugccacaccccccaccccuagga

SEQ ID NO: 1496522 - RNA, 13 nt, Human
ugcagaaagcauc

SEQ ID NO: 1496523 - RNA, 20 nt, Human
ugcagaaagcaucccucacc

SEQ ID NO: 1496524 - RNA, 19 nt, Human
agcccuucuuuccacagaa

SEQ ID NO: 1496525 - RNA, 18 nt, Human
agcccuucuuuccacaga

SEQ ID NO: 1496526 - RNA, 22 nt, Human
ugcagcccugcugcugccugcc

SEQ ID NO: 1496527 - RNA, 21 nt, Human
ugcaggucccuaauaaagcug

SEQ ID NO: 1496528 - RNA, 18 nt, Human
ugcaggucccuaauaaag

SEQ ID NO: 1496529 - RNA, 19 nt, Human
ugcaggucccuaauaaagc

SEQ ID NO: 1496530 - RNA, 20 nt, Human
ugcaggucccuaauaaagcu

SEQ ID NO: 1496531 - RNA, 22 nt, Human
ugcauaacguauaaaagccugu

SEQ ID NO: 1496532 - RNA, 15 nt, Human
ugcauaauggucaga

SEQ ID NO: 1496533 - RNA, 14 nt, Human
ugcuaguaauugga

SEQ ID NO: 1496534 - RNA, 17 nt, Human
aggaaagaggaagcaaa

SEQ ID NO: 1496535 - RNA, 16 nt, Human
ugcuaguaauuggaaa

SEQ ID NO: 1496536 - RNA, 19 nt, Human
aggaaagagaacuuccaga

SEQ ID NO: 1496537 - RNA, 13 nt, Human
aggaaagagaacu

SEQ ID NO: 1496538 - RNA, 12 nt, Human
aggaaagaaaac

SEQ ID NO: 1496539 - RNA, 13 nt, Human
aggaaagaaaaca

SEQ ID NO: 1496540 - RNA, 21 nt, Human
agcuuauugucuagugaaacu

SEQ ID NO: 1496541 - RNA, 22 nt, Human
aggaauuuuauuuuuuucugaa

SEQ ID NO: 1496542 - RNA, 12 nt, Human
aggaagagaagg

SEQ ID NO: 1496543 - RNA, 14 nt, Human
aggaagagaaggag

SEQ ID NO: 1496544 - RNA, 16 nt, Human
aggaagagaaggagca

SEQ ID NO: 1496545 - RNA, 17 nt, Human
aggaagagaaggagcag

SEQ ID NO: 1496546 - RNA, 24 nt, Human
aggaaagcgccuccaacccuagca

SEQ ID NO: 1496547 - RNA, 18 nt, Human
aggaaauauuuauuuuaa

SEQ ID NO: 1496548 - RNA, 14 nt, Human
aggaaauauuuauu

SEQ ID NO: 1496549 - RNA, 17 nt, Human
agcucucaguugcagcc

SEQ ID NO: 1496550 - RNA, 21 nt, Human
agcucucaguugcagcccugc

SEQ ID NO: 1496551 - RNA, 14 nt, Human
agcugauggagaag

SEQ ID NO: 1496552 - RNA, 15 nt, Human
agcugauggagaagg

SEQ ID NO: 1496553 - RNA, 16 nt, Human
agcugauggagaagga

SEQ ID NO: 1496554 - RNA, 17 nt, Human
agcugauggagaaggaa

SEQ ID NO: 1496555 - RNA, 19 nt, Human
agcugauggagaaggaagg

SEQ ID NO: 1496556 - RNA, 16 nt, Human
ugccucucugcagguc

SEQ ID NO: 1496557 - RNA, 18 nt, Human
ugccucucugcagguccc

SEQ ID NO: 1496558 - RNA, 19 nt, Human
ugccucucugcaggucccu

SEQ ID NO: 1496559 - RNA, 20 nt, Human
ugccucucugcaggucccua

SEQ ID NO: 1496560 - RNA, 17 nt, Human
agcuggggccaggcugg

SEQ ID NO: 1496561 - RNA, 21 nt, Human
ugccucucugcaggucccuaa

SEQ ID NO: 1496562 - RNA, 15 nt, Human
agcugccucuucccu

SEQ ID NO: 1496563 - RNA, 19 nt, Human
agcugccucuucccucuuc

SEQ ID NO: 1496564 - RNA, 13 nt, Human
ugccuuguuucau

SEQ ID NO: 1496565 - RNA, 20 nt, Human
agcuggggccaggcuggguc

SEQ ID NO: 1496566 - RNA, 13 nt, Human
uggcagcaacaau

SEQ ID NO: 1496567 - RNA, 18 nt, Human
uggcaucaucucagcuca

SEQ ID NO: 1496568 - RNA, 20 nt, Human
aggcaggaguuucguuuuca

SEQ ID NO: 1496569 - RNA, 22 nt, Human
aggcagggaggaggcagagaag

SEQ ID NO: 1496570 - RNA, 20 nt, Human
aggcagcucuaaaugucaau

SEQ ID NO: 1496571 - RNA, 18 nt, Human
aggcaguucaaagcagga

SEQ ID NO: 1496572 - RNA, 19 nt, Human
aggcaguucaaagcaggau

SEQ ID NO: 1496573 - RNA, 17 nt, Human
uggacaccugcccugcc

SEQ ID NO: 1496574 - RNA, 18 nt, Human
uggacaccugcccugccc

SEQ ID NO: 1496575 - RNA, 16 nt, Human
uggagaagaacugaaa

SEQ ID NO: 1496576 - RNA, 16 nt, Human
uggagcccacuguacu

SEQ ID NO: 1496577 - RNA, 19 nt, Human
uggagcccacuguacuugc

SEQ ID NO: 1496578 - RNA, 23 nt, Human
uggagcccacuguacuugcucuu

SEQ ID NO: 1496579 - RNA, 14 nt, Human
uggaauuugaaaca

SEQ ID NO: 1496580 - RNA, 10 nt, Human
uggacaccug

SEQ ID NO: 1496581 - RNA, 11 nt, Human
uggacaccugc

SEQ ID NO: 1496582 - RNA, 12 nt, Human
uggacaccugcc

SEQ ID NO: 1496583 - RNA, 13 nt, Human
uggacaccugccc

SEQ ID NO: 1496584 - RNA, 14 nt, Human
uggacaccugcccu

SEQ ID NO: 1496585 - RNA, 15 nt, Human
uggacaccugcccug

SEQ ID NO: 1496586 - RNA, 16 nt, Human
uggacaccugcccugc

SEQ ID NO: 1496587 - RNA, 14 nt, Human
uggacaaaauggaa

SEQ ID NO: 1496588 - RNA, 17 nt, Human
uggacaaaauggaauac

SEQ ID NO: 1496589 - RNA, 19 nt, Human
aggaguuucguuuucaaaa

SEQ ID NO: 1496590 - RNA, 14 nt, Human
uggaagugcuaauu

SEQ ID NO: 1496591 - RNA, 15 nt, Human
uggaagugacuuugg

SEQ ID NO: 1496592 - RNA, 17 nt, Human
uggaagugacuuuggcu

SEQ ID NO: 1496593 - RNA, 23 nt, Human
uggaagugacuuuggcugcaugc

SEQ ID NO: 1496594 - RNA, 15 nt, Human
agggcuccuauucaa

SEQ ID NO: 1496595 - RNA, 22 nt, Human
agggcuguuauaaucuuucaca

SEQ ID NO: 1496596 - RNA, 15 nt, Human
ugggagaaaugaaaa

SEQ ID NO: 1496597 - RNA, 13 nt, Human
agggaaauuucag

SEQ ID NO: 1496598 - RNA, 21 nt, Human
agggagacuggguaggaaaga

SEQ ID NO: 1496599 - RNA, 16 nt, Human
ugggagaaaugaaaaa

SEQ ID NO: 1496600 - RNA, 14 nt, Human
ugggaggcucugga

SEQ ID NO: 1496601 - RNA, 17 nt, Human
ugggaggcucuggagcc

SEQ ID NO: 1496602 - RNA, 23 nt, Human
ugggaggcucuggagcccacugu

SEQ ID NO: 1496603 - RNA, 14 nt, Human
ugggcauucaaaug

SEQ ID NO: 1496604 - RNA, 15 nt, Human
aggcuuuuuuaucau

SEQ ID NO: 1496605 - RNA, 18 nt, Human
aggcuuuuuuaucaugug

SEQ ID NO: 1496606 - RNA, 21 nt, Human
aggcuuuuuuaucaugugaaa

SEQ ID NO: 1496607 - RNA, 15 nt, Human
agggaaaacauucca

SEQ ID NO: 1496608 - RNA, 16 nt, Human
agggaaaacauuccau

SEQ ID NO: 1496609 - RNA, 18 nt, Human
agggaaaacauuccaucc

SEQ ID NO: 1496610 - RNA, 10 nt, Human
aggcuggguc

SEQ ID NO: 1496611 - RNA, 15 nt, Human
aggcugggucgcccu

SEQ ID NO: 1496612 - RNA, 18 nt, Human
aggcugggucgcccugga

SEQ ID NO: 1496613 - RNA, 20 nt, Human
aggcugggucgcccuggacu

SEQ ID NO: 1496614 - RNA, 21 nt, Human
aggcugggucgcccuggacug

SEQ ID NO: 1496615 - RNA, 18 nt, Human
ugggaaacaaaaggauaa

SEQ ID NO: 1496616 - RNA, 14 nt, Human
uguacauauaagug

SEQ ID NO: 1496617 - RNA, 20 nt, Human
agguuucacuguguuggcca

SEQ ID NO: 1496618 - RNA, 13 nt, Human
agguugaaaaaca

SEQ ID NO: 1496619 - RNA, 13 nt, Human
aguaauuggaaag

SEQ ID NO: 1496620 - RNA, 12 nt, Human
aguaauuggaaa

SEQ ID NO: 1496621 - RNA, 13 nt, Human
aguaaugauaacu

SEQ ID NO: 1496622 - RNA, 16 nt, Human
aguaaaaacaaagaaa

SEQ ID NO: 1496623 - RNA, 23 nt, Human
aguaaaaacaaagaaauuaugug

SEQ ID NO: 1496624 - RNA, 14 nt, Human
uguauauuacaaug

SEQ ID NO: 1496625 - RNA, 15 nt, Human
uguauauuacaauga

SEQ ID NO: 1496626 - RNA, 19 nt, Human
uguaguguuggagaagaac

SEQ ID NO: 1496627 - RNA, 18 nt, Human
uguaguguuggagaagaa

SEQ ID NO: 1496628 - RNA, 17 nt, Human
uguaguguuggagaaga

SEQ ID NO: 1496629 - RNA, 23 nt, Human
aguaccaguaggggcuuauaaua

SEQ ID NO: 1496630 - RNA, 15 nt, Human
agucaggaaagagaa

SEQ ID NO: 1496631 - RNA, 14 nt, Human
agucaggaaagaga

SEQ ID NO: 1496632 - RNA, 20 nt, Human
agucuauuuacggaacucaa

SEQ ID NO: 1496633 - RNA, 15 nt, Human
agucuauuuacggaa

SEQ ID NO: 1496634 - RNA, 19 nt, Human
uguauauuacaaugaucac

SEQ ID NO: 1496635 - RNA, 14 nt, Human
agucaccagagacu

SEQ ID NO: 1496636 - RNA, 16 nt, Human
agucuuucacauuuaa

SEQ ID NO: 1496637 - RNA, 18 nt, Human
agucuuucacauuuaaau

SEQ ID NO: 1496638 - RNA, 12 nt, Human
agugagaggcug

SEQ ID NO: 1496639 - RNA, 18 nt, Human
agugacuuuggcugcaug

SEQ ID NO: 1496640 - RNA, 21 nt, Human
uguggaucaaauccagccugc

SEQ ID NO: 1496641 - RNA, 21 nt, Human
ugugcucaggagcccugggag

SEQ ID NO: 1496642 - RNA, 14 nt, Human
agugcaaauuguca

SEQ ID NO: 1496643 - RNA, 23 nt, Human
agugcaguggcgcgaucucagcu

SEQ ID NO: 1496644 - RNA, 23 nt, Human
agugcaguggcgugaucucagcu

SEQ ID NO: 1496645 - RNA, 23 nt, Human
agugcaguggcaucaucucagcu

SEQ ID NO: 1496646 - RNA, 21 nt, Human
agugcacuaauguguaagaca

SEQ ID NO: 1496647 - RNA, 17 nt, Human
agugcacuaauguguaa

SEQ ID NO: 1496648 - RNA, 18 nt, Human
agugccagcaccugccca

SEQ ID NO: 1496649 - RNA, 22 nt, Human
uguugcccacagcuguaugauu

SEQ ID NO: 1496650 - RNA, 15 nt, Human
uguugcauagaauaa

SEQ ID NO: 1496651 - RNA, 18 nt, Human
aguguguguuuuucauaa

SEQ ID NO: 1496652 - RNA, 19 nt, Human
aguguguguuuuucauaaa

SEQ ID NO: 1496653 - RNA, 16 nt, Human
uguuaugacuauguaa

SEQ ID NO: 1496654 - RNA, 17 nt, Human
uguuaugacuauguaaa

SEQ ID NO: 1496655 - RNA, 18 nt, Human
uguuaugacuauguaaac

SEQ ID NO: 1496656 - RNA, 20 nt, Human
uguuaugacuauguaaacua

SEQ ID NO: 1496657 - RNA, 17 nt, Human
uguuacaaauuguagaa

SEQ ID NO: 1496658 - RNA, 18 nt, Human
uguuacaaauuguagaag

SEQ ID NO: 1496659 - RNA, 16 nt, Human
aguggggaaugaagau

SEQ ID NO: 1496660 - RNA, 14 nt, Human
auacuauaguacca

SEQ ID NO: 1496661 - RNA, 19 nt, Human
uuauauuugaaauauugac

SEQ ID NO: 1496662 - RNA, 19 nt, Human
auacgugggcauucaaaug

SEQ ID NO: 1496663 - RNA, 18 nt, Human
auacgugggcauucaaau

SEQ ID NO: 1496664 - RNA, 12 nt, Human
uuauaaacuuuu

SEQ ID NO: 1496665 - RNA, 16 nt, Human
uuauaaacuuuuuucu

SEQ ID NO: 1496666 - RNA, 22 nt, Human
uuauaaacuuuuuucuuacugu

SEQ ID NO: 1496667 - RNA, 22 nt, Human
auacauguaauucuaccaaggu

SEQ ID NO: 1496668 - RNA, 21 nt, Human
auacaggaugaugacuaugga

SEQ ID NO: 1496669 - RNA, 21 nt, Human
uuaugaauuacauuuguauaa

SEQ ID NO: 1496670 - RNA, 17 nt, Human
uuaugaauuacauuugu

SEQ ID NO: 1496671 - RNA, 16 nt, Human
uuaugaauuacauuug

SEQ ID NO: 1496672 - RNA, 14 nt, Human
uuaugaauuacauu

SEQ ID NO: 1496673 - RNA, 15 nt, Human
uuaugacuauguaaa

SEQ ID NO: 1496674 - RNA, 16 nt, Human
uuaugacuauguaaac

SEQ ID NO: 1496675 - RNA, 20 nt, Human
uuaugauacuugaaaauuaa

SEQ ID NO: 1496676 - RNA, 19 nt, Human
uuaugaaacuuuuggaagg

SEQ ID NO: 1496677 - RNA, 20 nt, Human
uuaugaagcuuuuaugugaa

SEQ ID NO: 1496678 - RNA, 18 nt, Human
uuaugaaacuuuuggaag

SEQ ID NO: 1496679 - RNA, 17 nt, Human
uuaugaaacuuuuggaa

SEQ ID NO: 1496680 - RNA, 14 nt, Human
uuaugaaacuuuug

SEQ ID NO: 1496681 - RNA, 22 nt, Human
uuaugauuaaguaaugauaacu

SEQ ID NO: 1496682 - RNA, 19 nt, Human
uuaugauuaaguaaugaua

SEQ ID NO: 1496683 - RNA, 15 nt, Human
uuaugugaaacaugu

SEQ ID NO: 1496684 - RNA, 14 nt, Human
uuaugugacauuuu

SEQ ID NO: 1496685 - RNA, 19 nt, Human
uuaugugacauuuuacauu

SEQ ID NO: 1496686 - RNA, 22 nt, Human
uuaugugccagauuuaugcaua

SEQ ID NO: 1496687 - RNA, 20 nt, Human
uuaugugacauuuuacauua

SEQ ID NO: 1496688 - RNA, 13 nt, Human
uuaugugaaacau

SEQ ID NO: 1496689 - RNA, 12 nt, Human
uuauucauaauu

SEQ ID NO: 1496690 - RNA, 15 nt, Human
uuauuauauuuacaa

SEQ ID NO: 1496691 - RNA, 19 nt, Human
uuauguuaaaacugggaca

SEQ ID NO: 1496692 - RNA, 14 nt, Human
uuauuauauuuaca

SEQ ID NO: 1496693 - RNA, 18 nt, Human
auacucuuauaucuauau

SEQ ID NO: 1496694 - RNA, 14 nt, Human
auacucuuauaucu

SEQ ID NO: 1496695 - RNA, 14 nt, Human
auagacaauugagg

SEQ ID NO: 1496696 - RNA, 21 nt, Human
auagacaauugagguaaguuu

SEQ ID NO: 1496697 - RNA, 12 nt, Human
auagacacgcac

SEQ ID NO: 1496698 - RNA, 14 nt, Human
auagaauaaaauuu

SEQ ID NO: 1496699 - RNA, 19 nt, Human
auagaauaaaauuuuuaau

SEQ ID NO: 1496700 - RNA, 22 nt, Human
auagaauaaaauuuuuaaucuu

SEQ ID NO: 1496701 - RNA, 13 nt, Human
auagaaguaaaaa

SEQ ID NO: 1496702 - RNA, 14 nt, Human
auagagacgggacu

SEQ ID NO: 1496703 - RNA, 18 nt, Human
auagauaggucagugcaa

SEQ ID NO: 1496704 - RNA, 15 nt, Human
aguuuguugaaacac

SEQ ID NO: 1496705 - RNA, 16 nt, Human
uuaaauuuuuuuuaca

SEQ ID NO: 1496706 - RNA, 12 nt, Human
uuaaaaugagaa

SEQ ID NO: 1496707 - RNA, 19 nt, Human
uuaaaaugagaaaucuaaa

SEQ ID NO: 1496708 - RNA, 16 nt, Human
aguuuagcuggaaaag

SEQ ID NO: 1496709 - RNA, 15 nt, Human
aguuuagcuggaaaa

SEQ ID NO: 1496710 - RNA, 17 nt, Human
aguuuaaauuguaauag

SEQ ID NO: 1496711 - RNA, 20 nt, Human
aguuuaaauuguaauaggcg

SEQ ID NO: 1496712 - RNA, 19 nt, Human
uuaagacgaaacauuuguu

SEQ ID NO: 1496713 - RNA, 22 nt, Human
auaaaagggacugagaaauuua

SEQ ID NO: 1496714 - RNA, 23 nt, Human
aguuuuuugaaauuaugugacau

SEQ ID NO: 1496715 - RNA, 19 nt, Human
auaaaagccuguuuaagag

SEQ ID NO: 1496716 - RNA, 20 nt, Human
auaaaagccuguuuaagaga

SEQ ID NO: 1496717 - RNA, 16 nt, Human
aguuuuauaugcuucu

SEQ ID NO: 1496718 - RNA, 21 nt, Human
aguuuuuugaaauuaugugac

SEQ ID NO: 1496719 - RNA, 15 nt, Human
aguuuuuuuuauaca

SEQ ID NO: 1496720 - RNA, 22 nt, Human
uuaagagagucuauuuacggaa

SEQ ID NO: 1496721 - RNA, 22 nt, Human
uuaagacgaaacauuuguucua

SEQ ID NO: 1496722 - RNA, 16 nt, Human
uuaauuugguuuucac

SEQ ID NO: 1496723 - RNA, 13 nt, Human
uuaaucuuuaauu

SEQ ID NO: 1496724 - RNA, 17 nt, Human
uuaaucuuuaauuuuac

SEQ ID NO: 1496725 - RNA, 23 nt, Human
uuacuguacagacagaaaaaacu

SEQ ID NO: 1496726 - RNA, 20 nt, Human
uuacugcuuaauucaaauaa

SEQ ID NO: 1496727 - RNA, 17 nt, Human
uuacaguggggaaugaa

SEQ ID NO: 1496728 - RNA, 15 nt, Human
uuauaaaaauaaaaa

SEQ ID NO: 1496729 - RNA, 19 nt, Human
uuaguacuccccuccuuga

SEQ ID NO: 1496730 - RNA, 21 nt, Human
uuauaaaaauaaaaaacacug

SEQ ID NO: 1496731 - RNA, 22 nt, Human
uuauaaaaauaaaaaacacugg

SEQ ID NO: 1496732 - RNA, 17 nt, Human
uuagguaauuuuuuuca

SEQ ID NO: 1496733 - RNA, 13 nt, Human
uuaguaaucauau

SEQ ID NO: 1496734 - RNA, 14 nt, Human
uuaguaaucauauu

SEQ ID NO: 1496735 - RNA, 16 nt, Human
uuaggguuaugauuaa

SEQ ID NO: 1496736 - RNA, 14 nt, Human
uuaggguuaugauu

SEQ ID NO: 1496737 - RNA, 14 nt, Human
auaaucuuucacag

SEQ ID NO: 1496738 - RNA, 23 nt, Human
auaauucacauuguauucagagu

SEQ ID NO: 1496739 - RNA, 14 nt, Human
auaauuuagauggu

SEQ ID NO: 1496740 - RNA, 12 nt, Human
auaauuuuaaau

SEQ ID NO: 1496741 - RNA, 13 nt, Human
auaauuuuaaaug

SEQ ID NO: 1496742 - RNA, 14 nt, Human
auaauuuuaaaugu

SEQ ID NO: 1496743 - RNA, 17 nt, Human
augaauuacauuuguau

SEQ ID NO: 1496744 - RNA, 16 nt, Human
augaauuacauuugua

SEQ ID NO: 1496745 - RNA, 21 nt, Human
augaauauuuaguguucauaa

SEQ ID NO: 1496746 - RNA, 15 nt, Human
augaauuacauuugu

SEQ ID NO: 1496747 - RNA, 13 nt, Human
augaacuugagga

SEQ ID NO: 1496748 - RNA, 15 nt, Human
augaacuugaggaca

SEQ ID NO: 1496749 - RNA, 16 nt, Human
augaauauuuaguguu

SEQ ID NO: 1496750 - RNA, 18 nt, Human
augaacuuguaaaggaau

SEQ ID NO: 1496751 - RNA, 16 nt, Human
augaacuugaggacac

SEQ ID NO: 1496752 - RNA, 17 nt, Human
augaacuugaggacaca

SEQ ID NO: 1496753 - RNA, 18 nt, Human
augaacuugaggacacau

SEQ ID NO: 1496754 - RNA, 19 nt, Human
augaacuugaggacacaug

SEQ ID NO: 1496755 - RNA, 20 nt, Human
augaacuugaggacacaugu

SEQ ID NO: 1496756 - RNA, 21 nt, Human
augaacuugaggacacauguc

SEQ ID NO: 1496757 - RNA, 22 nt, Human
augaacuugaggacacaugucc

SEQ ID NO: 1496758 - RNA, 15 nt, Human
aucugcgugugugca

SEQ ID NO: 1496759 - RNA, 15 nt, Human
uugcauuuauaugua

SEQ ID NO: 1496760 - RNA, 20 nt, Human
uugcauuuauauguaccgua

SEQ ID NO: 1496761 - RNA, 14 nt, Human
aucuuauaauuuaa

SEQ ID NO: 1496762 - RNA, 21 nt, Human
auccucuccacagcugccucu

SEQ ID NO: 1496763 - RNA, 17 nt, Human
uugaagggaaauuucag

SEQ ID NO: 1496764 - RNA, 16 nt, Human
uugagauguguucaca

SEQ ID NO: 1496765 - RNA, 16 nt, Human
uugagucaaaaaaucu

SEQ ID NO: 1496766 - RNA, 18 nt, Human
uugacuuauaguacauga

SEQ ID NO: 1496767 - RNA, 14 nt, Human
aucucauuuccaag

SEQ ID NO: 1496768 - RNA, 12 nt, Human
uucucuaggaaa

SEQ ID NO: 1496769 - RNA, 20 nt, Human
aucauuuuaccuuugacaaa

SEQ ID NO: 1496770 - RNA, 15 nt, Human
uucuuuguaaugaaa

SEQ ID NO: 1496771 - RNA, 16 nt, Human
uucuuuguaaugaaaa

SEQ ID NO: 1496772 - RNA, 17 nt, Human
uugaaauuguauuacaa

SEQ ID NO: 1496773 - RNA, 17 nt, Human
uugaaauuaugugacau

SEQ ID NO: 1496774 - RNA, 20 nt, Human
uugaaauuaugugacauuuu

SEQ ID NO: 1496775 - RNA, 21 nt, Human
aucacugaacuuugcugagcc

SEQ ID NO: 1496776 - RNA, 21 nt, Human
aucaaucuguaaaacuaagaa

SEQ ID NO: 1496777 - RNA, 19 nt, Human
uuccguagguuauuuucag

SEQ ID NO: 1496778 - RNA, 15 nt, Human
uuccugaacaggaua

SEQ ID NO: 1496779 - RNA, 14 nt, Human
uuccugaacaggau

SEQ ID NO: 1496780 - RNA, 20 nt, Human
uuccuaaauauauuuuaaga

SEQ ID NO: 1496781 - RNA, 13 nt, Human
uucuaaaguaaaa

SEQ ID NO: 1496782 - RNA, 22 nt, Human
aucacuugucaauaaaauccau

SEQ ID NO: 1496783 - RNA, 23 nt, Human
uucuaggacugaauuaugaaacu

SEQ ID NO: 1496784 - RNA, 16 nt, Human
uucuaggacugaauua

SEQ ID NO: 1496785 - RNA, 14 nt, Human
uucuaggacugaau

SEQ ID NO: 1496786 - RNA, 13 nt, Human
uucuaggacugaa

SEQ ID NO: 1496787 - RNA, 17 nt, Human
aucaggguuaguauugu

SEQ ID NO: 1496788 - RNA, 16 nt, Human
auggcacuaguauuuc

SEQ ID NO: 1496789 - RNA, 14 nt, Human
auggcacuaguauu

SEQ ID NO: 1496790 - RNA, 14 nt, Human
auggagaaggaagg

SEQ ID NO: 1496791 - RNA, 15 nt, Human
auggagaaggaaggc

SEQ ID NO: 1496792 - RNA, 18 nt, Human
uuucccccuagccugccu

SEQ ID NO: 1496793 - RNA, 12 nt, Human
auggagaaggaa

SEQ ID NO: 1496794 - RNA, 13 nt, Human
auggagaaggaag

SEQ ID NO: 1496795 - RNA, 15 nt, Human
auggacacuacaccc

SEQ ID NO: 1496796 - RNA, 16 nt, Human
auggacacuacaccca

SEQ ID NO: 1496797 - RNA, 17 nt, Human
auggacacuacacccag

SEQ ID NO: 1496798 - RNA, 18 nt, Human
auggacacuacacccagc

SEQ ID NO: 1496799 - RNA, 19 nt, Human
auggacacuacacccagca

SEQ ID NO: 1496800 - RNA, 22 nt, Human
auggacacuacacccagcaaua

SEQ ID NO: 1496801 - RNA, 17 nt, Human
uuucaaacauauauaac

SEQ ID NO: 1496802 - RNA, 16 nt, Human
uuucaaacauauauaa

SEQ ID NO: 1496803 - RNA, 22 nt, Human
uuucaaaauuguuacaaauugu

SEQ ID NO: 1496804 - RNA, 20 nt, Human
uuuauuuuguguuuaggaac

SEQ ID NO: 1496805 - RNA, 16 nt, Human
uuuauuuuguguuuag

SEQ ID NO: 1496806 - RNA, 13 nt, Human
uuucaaaagaaag

SEQ ID NO: 1496807 - RNA, 19 nt, Human
augcuguucaugaaagauu

SEQ ID NO: 1496808 - RNA, 14 nt, Human
augcugugugacuc

SEQ ID NO: 1496809 - RNA, 23 nt, Human
augcuguucaugaaagauucaau

SEQ ID NO: 1496810 - RNA, 16 nt, Human
augcuucccuuuccug

SEQ ID NO: 1496811 - RNA, 17 nt, Human
augcuguucaugaaaga

SEQ ID NO: 1496812 - RNA, 17 nt, Human
uuuaucaugugaaauca

SEQ ID NO: 1496813 - RNA, 18 nt, Human
uuuaucaugugaaaucau

SEQ ID NO: 1496814 - RNA, 15 nt, Human
augauaacuggaaac

SEQ ID NO: 1496815 - RNA, 18 nt, Human
augauuaaguaaugauaa

SEQ ID NO: 1496816 - RNA, 14 nt, Human
augauuaaguaaug

SEQ ID NO: 1496817 - RNA, 17 nt, Human
augauacuugaaaauua

SEQ ID NO: 1496818 - RNA, 21 nt, Human
augauacuugaaaauuaacau

SEQ ID NO: 1496819 - RNA, 19 nt, Human
augauugaauuauauguuc

SEQ ID NO: 1496820 - RNA, 13 nt, Human
augcaguucugaa

SEQ ID NO: 1496821 - RNA, 18 nt, Human
uuuaaauauaugcuaagu

SEQ ID NO: 1496822 - RNA, 14 nt, Human
uuugcaagccagau

SEQ ID NO: 1496823 - RNA, 19 nt, Human
auguagccccucuccugga

SEQ ID NO: 1496824 - RNA, 16 nt, Human
auguacuucaugcugu

SEQ ID NO: 1496825 - RNA, 16 nt, Human
auguaccguaggcuuu

SEQ ID NO: 1496826 - RNA, 22 nt, Human
auguauuacaguggggaaugaa

SEQ ID NO: 1496827 - RNA, 13 nt, Human
uuuggcaggugca

SEQ ID NO: 1496828 - RNA, 16 nt, Human
augugacauuuuacau

SEQ ID NO: 1496829 - RNA, 18 nt, Human
augugacauuuuacauua

SEQ ID NO: 1496830 - RNA, 21 nt, Human
uuuguaguguuggagaagaac

SEQ ID NO: 1496831 - RNA, 19 nt, Human
uuuguaguguuggagaaga

SEQ ID NO: 1496832 - RNA, 12 nt, Human
uuuguauaaaag

SEQ ID NO: 1496833 - RNA, 13 nt, Human
uuuguaaugaaaa

SEQ ID NO: 1496834 - RNA, 14 nt, Human
uuuguaaugaaaac

SEQ ID NO: 1496835 - RNA, 17 nt, Human
uuugugaagcaaaauuu

SEQ ID NO: 1496836 - RNA, 20 nt, Human
uuugugaagguggaaauaaa

SEQ ID NO: 1496837 - RNA, 21 nt, Human
augguucccuugaugaagaag

SEQ ID NO: 1496838 - RNA, 13 nt, Human
augguuguacaua

SEQ ID NO: 1496839 - RNA, 14 nt, Human
auggggguuucacc

SEQ ID NO: 1496840 - RNA, 22 nt, Human
uuugaaauuaugugacauuuua

SEQ ID NO: 1496841 - RNA, 15 nt, Human
uuugaaauuauguga

SEQ ID NO: 1496842 - RNA, 17 nt, Human
uuugaaauuaugugaca

SEQ ID NO: 1496843 - RNA, 13 nt, Human
auugucuagugaa

SEQ ID NO: 1496844 - RNA, 15 nt, Human
auuguuuuacaauag

SEQ ID NO: 1496845 - RNA, 17 nt, Human
auuguuuuacaauaguu

SEQ ID NO: 1496846 - RNA, 18 nt, Human
auuguuuuacaauaguuc

SEQ ID NO: 1496847 - RNA, 13 nt, Human
auuguuuuacaau

SEQ ID NO: 1496848 - RNA, 14 nt, Human
auuguuuuacaaua

SEQ ID NO: 1496849 - RNA, 21 nt, Human
auugcuuuguauuguauauua

SEQ ID NO: 1496850 - RNA, 18 nt, Human
auugacuuuuuauggcac

SEQ ID NO: 1496851 - RNA, 13 nt, Human
auugacuuuuuau

SEQ ID NO: 1496852 - RNA, 13 nt, Human
auuggaaacaagu

SEQ ID NO: 1496853 - RNA, 19 nt, Human
auuggacaguaaaauccac

SEQ ID NO: 1496854 - RNA, 14 nt, Human
auuuauuuuaauaa

SEQ ID NO: 1496855 - RNA, 20 nt, Human
auuucuugagguaaaagcau

SEQ ID NO: 1496856 - RNA, 18 nt, Human
auuugaaacacuuugcau

SEQ ID NO: 1496857 - RNA, 23 nt, Human
auuucuaggacugaauuaugaaa

SEQ ID NO: 1496858 - RNA, 20 nt, Human
auuucuaggacugaauuaug

SEQ ID NO: 1496859 - RNA, 14 nt, Human
auuucccucucuca

SEQ ID NO: 1496860 - RNA, 18 nt, Human
auuucuaggacugaauua

SEQ ID NO: 1496861 - RNA, 17 nt, Human
auuucuaggacugaauu

SEQ ID NO: 1496862 - RNA, 23 nt, Human
auuugugaagguggaaauaaacu

SEQ ID NO: 1496863 - RNA, 16 nt, Human
auuuuaaaagaaugau

SEQ ID NO: 1496864 - RNA, 18 nt, Human
auuugugaagguggaaau

SEQ ID NO: 1496865 - RNA, 21 nt, Human
auuugugaagguggaaauaaa

SEQ ID NO: 1496866 - RNA, 23 nt, Human
auuuuaaaagaaugauuaugaau

SEQ ID NO: 1496867 - RNA, 15 nt, Human
auuuguauaaaauaa

SEQ ID NO: 1496868 - RNA, 14 nt, Human
auuuguauaaaaua

SEQ ID NO: 1496869 - RNA, 22 nt, Human
auuuguaguguuggagaagaac

SEQ ID NO: 1496870 - RNA, 16 nt, Human
auuuuguuucagugca

SEQ ID NO: 1496871 - RNA, 17 nt, Human
auuuuguguuuaggaac

SEQ ID NO: 1496872 - RNA, 14 nt, Human
auuuuccugaaaac

SEQ ID NO: 1496873 - RNA, 14 nt, Human
auuuucuauaauuu

SEQ ID NO: 1496874 - RNA, 15 nt, Human
auuuucuauaauuua

SEQ ID NO: 1496875 - RNA, 12 nt, Human
auuuuaauaaug

SEQ ID NO: 1496876 - RNA, 15 nt, Human
auuuuaauaaacacu

SEQ ID NO: 1496877 - RNA, 16 nt, Human
auuuuaauaaacacuc

SEQ ID NO: 1496878 - RNA, 17 nt, Human
auuuuaauaaacacucu

SEQ ID NO: 1496879 - RNA, 15 nt, Human
auuuuuguaguagcg

SEQ ID NO: 1496880 - RNA, 22 nt, Human
auuuuugugauuuugugauuga

SEQ ID NO: 1496881 - RNA, 22 nt, Human
auuuuuugggcagcaauuuaaa

SEQ ID NO: 1496882 - RNA, 23 nt, Human
auuuuuucucuaggaaauauuua

SEQ ID NO: 1496883 - RNA, 20 nt, Human
auuuuuucucuaggaaauau

SEQ ID NO: 1496884 - RNA, 16 nt, Human
auuuuuugaaaagcag

SEQ ID NO: 1496885 - RNA, 19 nt, Human
auuuuuugaaaagcagaca

SEQ ID NO: 1496886 - RNA, 21 nt, Human
auucuucccuaucuuugccac

SEQ ID NO: 1496887 - RNA, 20 nt, Human
auucuucccuaucuuugcca

SEQ ID NO: 1496888 - RNA, 15 nt, Human
auuauauuuacaaau

SEQ ID NO: 1496889 - RNA, 14 nt, Human
auuauauuaugaag

SEQ ID NO: 1496890 - RNA, 18 nt, Human
auuauauguucagauuau

SEQ ID NO: 1496891 - RNA, 21 nt, Human
auuauguuaaaacugggacag

SEQ ID NO: 1496892 - RNA, 18 nt, Human
auuauauuuauuacugua

SEQ ID NO: 1496893 - RNA, 15 nt, Human
auuauauuuauuacu

SEQ ID NO: 1496894 - RNA, 15 nt, Human
auuauuauuuggccc

SEQ ID NO: 1496895 - RNA, 13 nt, Human
auucacauuguau

SEQ ID NO: 1496896 - RNA, 20 nt, Human
auucacauuguauucagagu

SEQ ID NO: 1496897 - RNA, 17 nt, Human
auuccagagcacugcuc

SEQ ID NO: 1496898 - RNA, 19 nt, Human
aacuuaaauuuuaguucuu

SEQ ID NO: 1496899 - RNA, 20 nt, Human
aacugacucuuaagaagacu

SEQ ID NO: 1496900 - RNA, 19 nt, Human
aacugacucuuaagaagac

SEQ ID NO: 1496901 - RNA, 18 nt, Human
aacugacucuuaagaaga

SEQ ID NO: 1496902 - RNA, 15 nt, Human
aacugacucuuaaga

SEQ ID NO: 1496903 - RNA, 14 nt, Human
aacggaagaagaga

SEQ ID NO: 1496904 - RNA, 12 nt, Human
aacggagucaaa

SEQ ID NO: 1496905 - RNA, 16 nt, Human
aacuauugcauuuaua

SEQ ID NO: 1496906 - RNA, 15 nt, Human
aacuauugcauuuau

SEQ ID NO: 1496907 - RNA, 21 nt, Human
aacuauugcauuuauauguac

SEQ ID NO: 1496908 - RNA, 13 nt, Human
aaauucuuucauu

SEQ ID NO: 1496909 - RNA, 19 nt, Human
aaauuaaaccggaccaucu

SEQ ID NO: 1496910 - RNA, 15 nt, Human
aaauuuuuuuuacau

SEQ ID NO: 1496911 - RNA, 17 nt, Human
aaaucuuauaauuuaaa

SEQ ID NO: 1496912 - RNA, 15 nt, Human
aaaugccuuuguacu

SEQ ID NO: 1496913 - RNA, 16 nt, Human
aaauuuuuuuuacauu

SEQ ID NO: 1496914 - RNA, 17 nt, Human
aaauuuuuuuuacauuu

SEQ ID NO: 1496915 - RNA, 18 nt, Human
aaauuuuuuuuacauuuu

SEQ ID NO: 1496916 - RNA, 14 nt, Human
aaccacuuuuugca

SEQ ID NO: 1496917 - RNA, 15 nt, Human
aaccacuuuuugcag

SEQ ID NO: 1496918 - RNA, 17 nt, Human
aaccacuuuuugcagcu

SEQ ID NO: 1496919 - RNA, 15 nt, Human
aaccagagugcugaa

SEQ ID NO: 1496920 - RNA, 15 nt, Human
aacaucccuccuggg

SEQ ID NO: 1496921 - RNA, 21 nt, Human
aaccgaacugauguaaguaaa

SEQ ID NO: 1496922 - RNA, 12 nt, Human
aaccagaucauu

SEQ ID NO: 1496923 - RNA, 23 nt, Human
aacccuaaauaauaaaaauaaac

SEQ ID NO: 1496924 - RNA, 14 nt, Human
aacccuagcaaaag

SEQ ID NO: 1496925 - RNA, 17 nt, Human
aaccuagggugauauua

SEQ ID NO: 1496926 - RNA, 15 nt, Human
aaagaaauauaccua

SEQ ID NO: 1496927 - RNA, 17 nt, Human
aaagaaauauaccuaaa

SEQ ID NO: 1496928 - RNA, 17 nt, Human
aaaaucucaauauuuca

SEQ ID NO: 1496929 - RNA, 16 nt, Human
aaaaucucaauauuuc

SEQ ID NO: 1496930 - RNA, 21 nt, Human
aaaauugaugggauuugguca

SEQ ID NO: 1496931 - RNA, 22 nt, Human
aaacacugggagaaaugaaaaa

SEQ ID NO: 1496932 - RNA, 21 nt, Human
aaacacugggagaaaugaaaa

SEQ ID NO: 1496933 - RNA, 16 nt, Human
aaaaagaaacauuugg

SEQ ID NO: 1496934 - RNA, 13 nt, Human
aaaaguugaauuu

SEQ ID NO: 1496935 - RNA, 20 nt, Human
aaauagcuuuuuucucugau

SEQ ID NO: 1496936 - RNA, 17 nt, Human
aaauagcuuuuuucucu

SEQ ID NO: 1496937 - RNA, 20 nt, Human
aaauauuuauuuuaauaaug

SEQ ID NO: 1496938 - RNA, 13 nt, Human
aaauauuuauuuu

SEQ ID NO: 1496939 - RNA, 15 nt, Human
aaauauuuauuuuaa

SEQ ID NO: 1496940 - RNA, 20 nt, Human
aaaucaaucuguaaaacuaa

SEQ ID NO: 1496941 - RNA, 13 nt, Human
aagauacugaaau

SEQ ID NO: 1496942 - RNA, 14 nt, Human
aagauacugaaaua

SEQ ID NO: 1496943 - RNA, 14 nt, Human
aagcgccuccaacc

SEQ ID NO: 1496944 - RNA, 15 nt, Human
aagcgccuccaaccc

SEQ ID NO: 1496945 - RNA, 16 nt, Human
aagcgccuccaacccu

SEQ ID NO: 1496946 - RNA, 20 nt, Human
aagcgccuccaacccuagca

SEQ ID NO: 1496947 - RNA, 20 nt, Human
aagcuacagaagaaacuggg

SEQ ID NO: 1496948 - RNA, 20 nt, Human
aaggcagcucuaaaugucaa

SEQ ID NO: 1496949 - RNA, 18 nt, Human
aagcuguguggcagucug

SEQ ID NO: 1496950 - RNA, 14 nt, Human
aaggacaucagcaa

SEQ ID NO: 1496951 - RNA, 15 nt, Human
aaggacaucagcaaa

SEQ ID NO: 1496952 - RNA, 17 nt, Human
aaggacaucagcaaaca

SEQ ID NO: 1496953 - RNA, 12 nt, Human
aaguugaauuuu

SEQ ID NO: 1496954 - RNA, 16 nt, Human
aaguugacuuauagua

SEQ ID NO: 1496955 - RNA, 19 nt, Human
aaguugacuuauaguacau

SEQ ID NO: 1496956 - RNA, 20 nt, Human
aaguugacuuauaguacaug

SEQ ID NO: 1496957 - RNA, 21 nt, Human
aaguugacuuauaguacauga

SEQ ID NO: 1496958 - RNA, 23 nt, Human
aaguugacuuauaguacaugaua

SEQ ID NO: 1496959 - RNA, 15 nt, Human
aagucuccaaagucu

SEQ ID NO: 1496960 - RNA, 14 nt, Human
aagucuccaaaguc

SEQ ID NO: 1496961 - RNA, 18 nt, Human
aaguccaagcauuuagau

SEQ ID NO: 1496962 - RNA, 14 nt, Human
aaggucggaccagc

SEQ ID NO: 1496963 - RNA, 20 nt, Human
aaggugaggagcuugaaacc

SEQ ID NO: 1496964 - RNA, 15 nt, Human
aauccaaugaaauga

SEQ ID NO: 1496965 - RNA, 13 nt, Human
aauccagccugcu

SEQ ID NO: 1496966 - RNA, 15 nt, Human
aaugauuaugaauua

SEQ ID NO: 1496967 - RNA, 23 nt, Human
aaugauuaugaauuacauuugua

SEQ ID NO: 1496968 - RNA, 21 nt, Human
aaugauuaugaauuacauuug

SEQ ID NO: 1496969 - RNA, 17 nt, Human
aauccaagcaaauguga

SEQ ID NO: 1496970 - RNA, 18 nt, Human
aauccaagcaaaugugaa

SEQ ID NO: 1496971 - RNA, 13 nt, Human
aauacucuuauau

SEQ ID NO: 1496972 - RNA, 23 nt, Human
aauguuucaaacauauauaacaa

SEQ ID NO: 1496973 - RNA, 22 nt, Human
aauguuuuuuuuuaaagacuuu

SEQ ID NO: 1496974 - RNA, 15 nt, Human
aauguuuuuuuuuaa

SEQ ID NO: 1496975 - RNA, 20 nt, Human
aauguuuuuuuuuaaagacu

SEQ ID NO: 1496976 - RNA, 17 nt, Human
agaaauaaauuuauuuc

SEQ ID NO: 1496977 - RNA, 22 nt, Human
acuuuauuuucuauaauuuaaa

SEQ ID NO: 1496978 - RNA, 22 nt, Human
acuuuaucuugaauaauguaag

SEQ ID NO: 1496979 - RNA, 12 nt, Human
acuuuuaugaua

SEQ ID NO: 1496980 - RNA, 16 nt, Human
acuuuuaugauacuug

SEQ ID NO: 1496981 - RNA, 23 nt, Human
acuuuuaugauacuugaaaauua

SEQ ID NO: 1496982 - RNA, 14 nt, Human
acuuuuggaaggua

SEQ ID NO: 1496983 - RNA, 18 nt, Human
acuuguaaaggaauuuaa

SEQ ID NO: 1496984 - RNA, 18 nt, Human
acugguaggaaacuaggu

SEQ ID NO: 1496985 - RNA, 22 nt, Human
acuguaagaaaauaucacuugu

SEQ ID NO: 1496986 - RNA, 13 nt, Human
acuguaagaaaau

SEQ ID NO: 1496987 - RNA, 19 nt, Human
acuguaagaaaauaucacu

SEQ ID NO: 1496988 - RNA, 15 nt, Human
acucauauuuucaug

SEQ ID NO: 1496989 - RNA, 20 nt, Human
acuaguauuucuaugaaaua

SEQ ID NO: 1496990 - RNA, 15 nt, Human
acuaagagagaauga

SEQ ID NO: 1496991 - RNA, 13 nt, Human
acuaagagagaau

SEQ ID NO: 1496992 - RNA, 14 nt, Human
acggaacucaaaua

SEQ ID NO: 1496993 - RNA, 11 nt, Human
accugucuguc

SEQ ID NO: 1496994 - RNA, 12 nt, Human
accugucugucu

SEQ ID NO: 1496995 - RNA, 22 nt, Human
acaauugagguaaguuuuuuga

SEQ ID NO: 1496996 - RNA, 10 nt, Human
acaacuaagu

SEQ ID NO: 1496997 - RNA, 22 nt, Human
acaacuaagugauuuguauguc

SEQ ID NO: 1496998 - RNA, 14 nt, Human
acaacggagucaaa

SEQ ID NO: 1496999 - RNA, 20 nt, Human
acaacggagucaaaaauuaa

SEQ ID NO: 1497000 - RNA, 22 nt, Human
acaacggagucaaaaauuaaac

SEQ ID NO: 1497001 - RNA, 13 nt, Human
aauuuugugaagc

SEQ ID NO: 1497002 - RNA, 22 nt, Human
acaggaugguucccuugaugaa

SEQ ID NO: 1497003 - RNA, 18 nt, Human
acaggauccaggccggcu

SEQ ID NO: 1497004 - RNA, 19 nt, Human
acaggaucaguuaacuauu

SEQ ID NO: 1497005 - RNA, 12 nt, Human
acaggauccagg

SEQ ID NO: 1497006 - RNA, 13 nt, Human
acaggauccaggc

SEQ ID NO: 1497007 - RNA, 21 nt, Human
acaggaugaugacuauggaaa

SEQ ID NO: 1497008 - RNA, 14 nt, Human
acagagucuuccuc

SEQ ID NO: 1497009 - RNA, 19 nt, Human
acagagucuuccucugucu

SEQ ID NO: 1497010 - RNA, 17 nt, Human
acagccaacuauggccu

SEQ ID NO: 1497011 - RNA, 19 nt, Human
acagccaacuauggccugu

SEQ ID NO: 1497012 - RNA, 13 nt, Human
acaucagcaaaca

SEQ ID NO: 1497013 - RNA, 12 nt, Human
acaucagcaaac

SEQ ID NO: 1497014 - RNA, 23 nt, Human
acauguuucuuuguaaugaaaac

SEQ ID NO: 1497015 - RNA, 19 nt, Human
acauguuucuuuguaauga

SEQ ID NO: 1497016 - RNA, 22 nt, Human
acauguuucuuuguaaugaaaa

SEQ ID NO: 1497017 - RNA, 17 nt, Human
acaggcacacaccacca

SEQ ID NO: 1497018 - RNA, 19 nt, Human
acauuuguucuauagcuuu

SEQ ID NO: 1497019 - RNA, 20 nt, Human
acauuuuaaaaaauggucac

SEQ ID NO: 1497020 - RNA, 17 nt, Human
accaauaaaauaauuuu

SEQ ID NO: 1497021 - RNA, 11 nt, Human
accaauaaagu

SEQ ID NO: 1497022 - RNA, 12 nt, Human
accaauaaagug

SEQ ID NO: 1497023 - RNA, 17 nt, Human
accaauaaagugacccu

SEQ ID NO: 1497024 - RNA, 21 nt, Human
accaccgcgcccagccuuuuu

SEQ ID NO: 1497025 - RNA, 15 nt, Human
accaccucucaauau

SEQ ID NO: 1497026 - RNA, 23 nt, Human
accaccucucaauauucaauaaa

SEQ ID NO: 1497027 - RNA, 22 nt, Human
accagagugcugaaggaaugga

SEQ ID NO: 1497028 - RNA, 13 nt, Human
accagaucauugu

SEQ ID NO: 1497029 - RNA, 22 nt, Human
acccauuagcagucccuccaca

SEQ ID NO: 1497030 - RNA, 14 nt, Human
acccagugcugaau

SEQ ID NO: 1497031 - RNA, 17 nt, Human
accccuccacucuuucu

SEQ ID NO: 1497032 - RNA, 13 nt, Human
accccuccacucu

SEQ ID NO: 1497033 - RNA, 23 nt, Human
aggcuacuguaaggcaaucaugg

SEQ ID NO: 1497034 - RNA, 17 nt, Human
aggcuagauguauguac

SEQ ID NO: 1497035 - RNA, 16 nt, Human
aggcuagauguaugua

SEQ ID NO: 1497036 - RNA, 15 nt, Human
aggcuagauguaugu

SEQ ID NO: 1497037 - RNA, 22 nt, Human
agggaccggcggaccccagcca

SEQ ID NO: 1497038 - RNA, 13 nt, Human
aggucccuaauaa

SEQ ID NO: 1497039 - RNA, 15 nt, Human
aggucccuaauaaag

SEQ ID NO: 1497040 - RNA, 16 nt, Human
aggucccuaauaaagc

SEQ ID NO: 1497041 - RNA, 20 nt, Human
agguaaaagcaucacaugaa

SEQ ID NO: 1497042 - RNA, 18 nt, Human
agguaaaucagacuauga

SEQ ID NO: 1497043 - RNA, 23 nt, Human
agguaaaucagacuaugaaguuu

SEQ ID NO: 1497044 - RNA, 17 nt, Human
agguaauuuuuuucacc

SEQ ID NO: 1497045 - RNA, 12 nt, Human
aggucccuaaua

SEQ ID NO: 1497046 - RNA, 11 nt, Human
aggucccuaau

SEQ ID NO: 1497047 - RNA, 21 nt, Human
agcuuuucccuuuuuuuaagu

SEQ ID NO: 1497048 - RNA, 12 nt, Human
aggacccaggac

SEQ ID NO: 1497049 - RNA, 13 nt, Human
aggacccaggaca

SEQ ID NO: 1497050 - RNA, 14 nt, Human
aggacccaggacag

SEQ ID NO: 1497051 - RNA, 18 nt, Human
aggacccaggacaggauc

SEQ ID NO: 1497052 - RNA, 23 nt, Human
aggacccaggacaggauccaggc

SEQ ID NO: 1497053 - RNA, 23 nt, Human
aggaugguucccuugaugaagaa

SEQ ID NO: 1497054 - RNA, 15 nt, Human
agcaugccuucaaau

SEQ ID NO: 1497055 - RNA, 13 nt, Human
agccaagugcagg

SEQ ID NO: 1497056 - RNA, 17 nt, Human
agagaacuuccagaucc

SEQ ID NO: 1497057 - RNA, 13 nt, Human
agagaagaaagaa

SEQ ID NO: 1497058 - RNA, 17 nt, Human
agagaagaaagaacgga

SEQ ID NO: 1497059 - RNA, 20 nt, Human
agacagagucuuccucuguc

SEQ ID NO: 1497060 - RNA, 19 nt, Human
agacagagucuuacucugu

SEQ ID NO: 1497061 - RNA, 20 nt, Human
agacagagucuuacucuguu

SEQ ID NO: 1497062 - RNA, 23 nt, Human
agacagagucuuccucugucucc

SEQ ID NO: 1497063 - RNA, 16 nt, Human
augcauauuauuuuau

SEQ ID NO: 1497064 - RNA, 20 nt, Human
augcauauuauuuuauguug

SEQ ID NO: 1497065 - RNA, 20 nt, Human
auggucacguuuggugcuuc

SEQ ID NO: 1497066 - RNA, 21 nt, Human
auggucacguuuggugcuucu

SEQ ID NO: 1497067 - RNA, 24 nt, Human
auggucacguuuggugcuucucag

SEQ ID NO: 1497068 - RNA, 14 nt, Human
augugaaaucauuc

SEQ ID NO: 1497069 - RNA, 15 nt, Human
augugaaacauguuu

SEQ ID NO: 1497070 - RNA, 23 nt, Human
augugaacaguuguguuugaagc

SEQ ID NO: 1497071 - RNA, 21 nt, Human
augugaacaguuguguuugaa

SEQ ID NO: 1497072 - RNA, 11 nt, Human
augugaacagu

SEQ ID NO: 1497073 - RNA, 18 nt, Human
aucuugaauaauguaaga

SEQ ID NO: 1497074 - RNA, 18 nt, Human
aucuggaaccaucagaaa

SEQ ID NO: 1497075 - RNA, 21 nt, Human
aucuauauuuuacauaaauuu

SEQ ID NO: 1497076 - RNA, 17 nt, Human
aucuauauuuuacauaa

SEQ ID NO: 1497077 - RNA, 22 nt, Human
augaagcuuuuaugugaaacau

SEQ ID NO: 1497078 - RNA, 19 nt, Human
augaaguuuuuuuuauaca

SEQ ID NO: 1497079 - RNA, 23 nt, Human
augaaguuuuuuuuauacaggau

SEQ ID NO: 1497080 - RNA, 20 nt, Human
auccucccacuucagccucc

SEQ ID NO: 1497081 - RNA, 18 nt, Human
auccagaaagaaaacuug

SEQ ID NO: 1497082 - RNA, 16 nt, Human
auccagaaagaaaacu

SEQ ID NO: 1497083 - RNA, 15 nt, Human
aucaugugaaaucau

SEQ ID NO: 1497084 - RNA, 16 nt, Human
aucaugugaaaucauu

SEQ ID NO: 1497085 - RNA, 15 nt, Human
auauuuauuuuaaua

SEQ ID NO: 1497086 - RNA, 14 nt, Human
auauuuauuuuaau

SEQ ID NO: 1497087 - RNA, 17 nt, Human
auauuuauuuuaauaau

SEQ ID NO: 1497088 - RNA, 15 nt, Human
auaaagcaggcagaa

SEQ ID NO: 1497089 - RNA, 18 nt, Human
auaaagcuguguggcagu

SEQ ID NO: 1497090 - RNA, 14 nt, Human
auaaaggacuguaa

SEQ ID NO: 1497091 - RNA, 20 nt, Human
auaaacuuuuuucuuacugu

SEQ ID NO: 1497092 - RNA, 18 nt, Human
auaaaggauuaaugucaa

SEQ ID NO: 1497093 - RNA, 13 nt, Human
auacccacccaga

SEQ ID NO: 1497094 - RNA, 14 nt, Human
auacccacccagaa

SEQ ID NO: 1497095 - RNA, 23 nt, Human
auaauguuucaaacauauauaac

SEQ ID NO: 1497096 - RNA, 22 nt, Human
auaugcuucuguuuuauaauuu

SEQ ID NO: 1497097 - RNA, 20 nt, Human
auaugcuucuguuuuauaau

SEQ ID NO: 1497098 - RNA, 23 nt, Human
auaugcuucuguuuuauaauuuu

SEQ ID NO: 1497099 - RNA, 13 nt, Human
auauuuauuuuaa

SEQ ID NO: 1497100 - RNA, 14 nt, Human
auauuauuuuaugu

SEQ ID NO: 1497101 - RNA, 23 nt, Human
auauuaugaagcuuuuaugugaa

SEQ ID NO: 1497102 - RNA, 19 nt, Human
auauauuuuuuucugaaau

SEQ ID NO: 1497103 - RNA, 16 nt, Human
auaucaaauauauuca

SEQ ID NO: 1497104 - RNA, 18 nt, Human
auagguuuggacaaaaug

SEQ ID NO: 1497105 - RNA, 14 nt, Human
auagguuuggacaa

SEQ ID NO: 1497106 - RNA, 15 nt, Human
auagguuuaauaauu

SEQ ID NO: 1497107 - RNA, 17 nt, Human
auagucaaauuguguga

SEQ ID NO: 1497108 - RNA, 14 nt, Human
auagucaaauugug

SEQ ID NO: 1497109 - RNA, 12 nt, Human
aguccuguaaug

SEQ ID NO: 1497110 - RNA, 19 nt, Human
aguccugggauuacaggug

SEQ ID NO: 1497111 - RNA, 18 nt, Human
aguauggguuagggaaaa

SEQ ID NO: 1497112 - RNA, 19 nt, Human
agucaaauugugugaaagg

SEQ ID NO: 1497113 - RNA, 23 nt, Human
agucaaauugugugaaagguacu

SEQ ID NO: 1497114 - RNA, 16 nt, Human
aguaucuuuuuauuca

SEQ ID NO: 1497115 - RNA, 18 nt, Human
aguaucucuucagucucu

SEQ ID NO: 1497116 - RNA, 16 nt, Human
aguaucucuucagucu

SEQ ID NO: 1497117 - RNA, 16 nt, Human
aguuguguuugaagca

SEQ ID NO: 1497118 - RNA, 23 nt, Human
aguugaaaaucuuauaauuuaaa

SEQ ID NO: 1497119 - RNA, 22 nt, Human
aguugaaaaucuuauaauuuaa

SEQ ID NO: 1497120 - RNA, 19 nt, Human
aguggcgcgaucucagcuc

SEQ ID NO: 1497121 - RNA, 20 nt, Human
aguggcgcgaucucagcuca

SEQ ID NO: 1497122 - RNA, 19 nt, Human
aguggcgugaucucagcuc

SEQ ID NO: 1497123 - RNA, 20 nt, Human
aguggcgugaucucagcuca

SEQ ID NO: 1497124 - RNA, 21 nt, Human
cacaaauucugucucuggauu

SEQ ID NO: 1497125 - RNA, 18 nt, Human
caauccucccacuucagc

SEQ ID NO: 1497126 - RNA, 22 nt, Human
caauccucccacuucagccucc

SEQ ID NO: 1497127 - RNA, 20 nt, Human
caaugaucaccgacugaaaa

SEQ ID NO: 1497128 - RNA, 18 nt, Human
cacacacaugcuucccuu

SEQ ID NO: 1497129 - RNA, 13 nt, Human
cacaacuauauug

SEQ ID NO: 1497130 - RNA, 19 nt, Human
cacacugggacuugcaaaa

SEQ ID NO: 1497131 - RNA, 20 nt, Human
cacaggaaccacaagacugc

SEQ ID NO: 1497132 - RNA, 19 nt, Human
cacaggaaccacaagacug

SEQ ID NO: 1497133 - RNA, 17 nt, Human
cacauuggaaacaaguc

SEQ ID NO: 1497134 - RNA, 18 nt, Human
cacauuggagauguuuag

SEQ ID NO: 1497135 - RNA, 20 nt, Human
cacaugcuucccuuuccuga

SEQ ID NO: 1497136 - RNA, 12 nt, Human
cacauguccagu

SEQ ID NO: 1497137 - RNA, 16 nt, Human
cacauuccugaacagg

SEQ ID NO: 1497138 - RNA, 17 nt, Human
caagcacuaaacaaaga

SEQ ID NO: 1497139 - RNA, 14 nt, Human
caaggucugcuuuu

SEQ ID NO: 1497140 - RNA, 22 nt, Human
caagugcagggccuguaauccc

SEQ ID NO: 1497141 - RNA, 15 nt, Human
caaauucugucucug

SEQ ID NO: 1497142 - RNA, 18 nt, Human
caaauucugucucuggau

SEQ ID NO: 1497143 - RNA, 21 nt, Human
caacucugaaggguaauuaua

SEQ ID NO: 1497144 - RNA, 15 nt, Human
caacugcuaaucuac

SEQ ID NO: 1497145 - RNA, 14 nt, Human
caacuucaguccaa

SEQ ID NO: 1497146 - RNA, 11 nt, Human
caacuuuguau

SEQ ID NO: 1497147 - RNA, 12 nt, Human
caacuuuguaua

SEQ ID NO: 1497148 - RNA, 15 nt, Human
caaaucacugaacuu

SEQ ID NO: 1497149 - RNA, 14 nt, Human
caaaucacugaacu

SEQ ID NO: 1497150 - RNA, 12 nt, Human
caaauauauuca

SEQ ID NO: 1497151 - RNA, 11 nt, Human
caaaaaacuac

SEQ ID NO: 1497152 - RNA, 15 nt, Human
caaaaaacuacuucu

SEQ ID NO: 1497153 - RNA, 23 nt, Human
caccccuaaaagaaacccugcac

SEQ ID NO: 1497154 - RNA, 21 nt, Human
ccagccuggggcugaggcuga

SEQ ID NO: 1497155 - RNA, 20 nt, Human
ccaccucgcagguucaagca

SEQ ID NO: 1497156 - RNA, 21 nt, Human
ccaccucgcagguucaagcaa

SEQ ID NO: 1497157 - RNA, 13 nt, Human
ccaccucucaaua

SEQ ID NO: 1497158 - RNA, 14 nt, Human
ccaccucucaauau

SEQ ID NO: 1497159 - RNA, 23 nt, Human
ccaccucucaauauucaauaaag

SEQ ID NO: 1497160 - RNA, 17 nt, Human
ccacccucguggacacc

SEQ ID NO: 1497161 - RNA, 18 nt, Human
ccacccucguggacaccu

SEQ ID NO: 1497162 - RNA, 19 nt, Human
ccacccucguggacaccug

SEQ ID NO: 1497163 - RNA, 13 nt, Human
ccacuuuuugcag

SEQ ID NO: 1497164 - RNA, 14 nt, Human
ccacuuuuugcagc

SEQ ID NO: 1497165 - RNA, 15 nt, Human
ccacuuuuugcagcu

SEQ ID NO: 1497166 - RNA, 17 nt, Human
ccacuuuuugcagcuuu

SEQ ID NO: 1497167 - RNA, 16 nt, Human
ccacuuuuugcagcuu

SEQ ID NO: 1497168 - RNA, 18 nt, Human
ccagaaaccuuuguuugc

SEQ ID NO: 1497169 - RNA, 16 nt, Human
ccagaaugagacaucc

SEQ ID NO: 1497170 - RNA, 20 nt, Human
ccagguauucguuaucuaau

SEQ ID NO: 1497171 - RNA, 21 nt, Human
ccagguauucguuaucuaaua

SEQ ID NO: 1497172 - RNA, 20 nt, Human
ccaucaucuauagaaagcua

SEQ ID NO: 1497173 - RNA, 20 nt, Human
ccagguagaggguguguaag

SEQ ID NO: 1497174 - RNA, 14 nt, Human
ccaggguggcagca

SEQ ID NO: 1497175 - RNA, 16 nt, Human
ccaggguggcagcaac

SEQ ID NO: 1497176 - RNA, 17 nt, Human
ccaggguggcagcaaca

SEQ ID NO: 1497177 - RNA, 12 nt, Human
ccaggcuggguc

SEQ ID NO: 1497178 - RNA, 16 nt, Human
ccaggcugggucgccc

SEQ ID NO: 1497179 - RNA, 21 nt, Human
ccaggcugggucgcccuggac

SEQ ID NO: 1497180 - RNA, 22 nt, Human
ccaggcugggucgcccuggacu

SEQ ID NO: 1497181 - RNA, 23 nt, Human
ccaggcugggucgcccuggacug

SEQ ID NO: 1497182 - RNA, 24 nt, Human
ccaggcugggucgcccuggacugu

SEQ ID NO: 1497183 - RNA, 20 nt, Human
ccauguuaaccccuccacuc

SEQ ID NO: 1497184 - RNA, 12 nt, Human
cccagaaugaga

SEQ ID NO: 1497185 - RNA, 18 nt, Human
cccagaaugagacaucca

SEQ ID NO: 1497186 - RNA, 18 nt, Human
cccauucauuccauucug

SEQ ID NO: 1497187 - RNA, 22 nt, Human
cccauucauuccauucuggaag

SEQ ID NO: 1497188 - RNA, 21 nt, Human
cccauucauuccauucuggaa

SEQ ID NO: 1497189 - RNA, 21 nt, Human
ccccacccucguggacaccug

SEQ ID NO: 1497190 - RNA, 22 nt, Human
ccccacccucguggacaccugc

SEQ ID NO: 1497191 - RNA, 23 nt, Human
ccccacccucguggacaccugcc

SEQ ID NO: 1497192 - RNA, 20 nt, Human
cccagaaugagacauccagc

SEQ ID NO: 1497193 - RNA, 18 nt, Human
ccccaguaucucuucagu

SEQ ID NO: 1497194 - RNA, 17 nt, Human
ccccaucauugguaccc

SEQ ID NO: 1497195 - RNA, 22 nt, Human
cccccagaaaagaaagcuacag

SEQ ID NO: 1497196 - RNA, 17 nt, Human
cccccacugccuuugac

SEQ ID NO: 1497197 - RNA, 12 nt, Human
ccccuccacucu

SEQ ID NO: 1497198 - RNA, 17 nt, Human
ccccuccacucuuucuu

SEQ ID NO: 1497199 - RNA, 15 nt, Human
ccccuagccugccuc

SEQ ID NO: 1497200 - RNA, 14 nt, Human
ccccugccucucug

SEQ ID NO: 1497201 - RNA, 15 nt, Human
ccccugccucucugc

SEQ ID NO: 1497202 - RNA, 16 nt, Human
ccccugccucucugca

SEQ ID NO: 1497203 - RNA, 17 nt, Human
ccccugccucucugcag

SEQ ID NO: 1497204 - RNA, 19 nt, Human
ccccugccucucugcaggu

SEQ ID NO: 1497205 - RNA, 17 nt, Human
ccccuggucccucugca

SEQ ID NO: 1497206 - RNA, 18 nt, Human
ccccuggucccucugcag

SEQ ID NO: 1497207 - RNA, 23 nt, Human
ccccuggugcacuggccccaccc

SEQ ID NO: 1497208 - RNA, 20 nt, Human
cccucucccaaaaaacuacu

SEQ ID NO: 1497209 - RNA, 13 nt, Human
cccucuuccuucc

SEQ ID NO: 1497210 - RNA, 15 nt, Human
cccucccuacccuaa

SEQ ID NO: 1497211 - RNA, 16 nt, Human
cccucccuacccuaac

SEQ ID NO: 1497212 - RNA, 16 nt, Human
cccucguggacaccug

SEQ ID NO: 1497213 - RNA, 17 nt, Human
cccucguggacaccugc

SEQ ID NO: 1497214 - RNA, 18 nt, Human
cccucguggacaccugcc

SEQ ID NO: 1497215 - RNA, 19 nt, Human
cccucguggacaccugccc

SEQ ID NO: 1497216 - RNA, 22 nt, Human
cccucguggacaccugcccugc

SEQ ID NO: 1497217 - RNA, 23 nt, Human
cccucguggacaccugcccugcc

SEQ ID NO: 1497218 - RNA, 16 nt, Human
cccugcugcugccugc

SEQ ID NO: 1497219 - RNA, 17 nt, Human
cccugcugcugccugcc

SEQ ID NO: 1497220 - RNA, 18 nt, Human
cccugcugcugccugccu

SEQ ID NO: 1497221 - RNA, 21 nt, Human
cccuggugcacuggccccacc

SEQ ID NO: 1497222 - RNA, 15 nt, Human
cccuugaugaagaag

SEQ ID NO: 1497223 - RNA, 13 nt, Human
cccugcugcugcc

SEQ ID NO: 1497224 - RNA, 15 nt, Human
cccugccucucugca

SEQ ID NO: 1497225 - RNA, 16 nt, Human
cccugccucucugcag

SEQ ID NO: 1497226 - RNA, 13 nt, Human
cccugccucucug

SEQ ID NO: 1497227 - RNA, 14 nt, Human
cccugccucucugc

SEQ ID NO: 1497228 - RNA, 13 nt, Human
ccgcagaaggaag

SEQ ID NO: 1497229 - RNA, 15 nt, Human
ccgcagaaggaaggc

SEQ ID NO: 1497230 - RNA, 18 nt, Human
ccgcagaaggaaggcagg

SEQ ID NO: 1497231 - RNA, 18 nt, Human
ccgccucagccucccaaa

SEQ ID NO: 1497232 - RNA, 20 nt, Human
ccgacugaaaauauuguuuu

SEQ ID NO: 1497233 - RNA, 20 nt, Human
ccgccucgaccucucucaaa

SEQ ID NO: 1497234 - RNA, 16 nt, Human
ccggggggucucuucu

SEQ ID NO: 1497235 - RNA, 16 nt, Human
ccuacuagucaccaga

SEQ ID NO: 1497236 - RNA, 11 nt, Human
ccuaaccaagu

SEQ ID NO: 1497237 - RNA, 19 nt, Human
ccuggacuuggccccugcc

SEQ ID NO: 1497238 - RNA, 14 nt, Human
ccugccaccuccug

SEQ ID NO: 1497239 - RNA, 16 nt, Human
ccugccaccuccugcc

SEQ ID NO: 1497240 - RNA, 19 nt, Human
ccugccaccuccugccuca

SEQ ID NO: 1497241 - RNA, 12 nt, Human
ccuaucuuugcc

SEQ ID NO: 1497242 - RNA, 13 nt, Human
ccuaucuuugcca

SEQ ID NO: 1497243 - RNA, 15 nt, Human
ccuaucuuugccacc

SEQ ID NO: 1497244 - RNA, 19 nt, Human
ccuaucuuugccacccuca

SEQ ID NO: 1497245 - RNA, 20 nt, Human
ccuaucuuugccacccucau

SEQ ID NO: 1497246 - RNA, 23 nt, Human
ccucuuccuucccugcugugaaa

SEQ ID NO: 1497247 - RNA, 17 nt, Human
ccugccaccuccugccu

SEQ ID NO: 1497248 - RNA, 12 nt, Human
ccugccaccugu

SEQ ID NO: 1497249 - RNA, 13 nt, Human
ccugccaccuguc

SEQ ID NO: 1497250 - RNA, 14 nt, Human
ccugccaccugucu

SEQ ID NO: 1497251 - RNA, 15 nt, Human
ccugccaccugucug

SEQ ID NO: 1497252 - RNA, 16 nt, Human
ccugccaccugucugu

SEQ ID NO: 1497253 - RNA, 17 nt, Human
ccugccaccugucuguc

SEQ ID NO: 1497254 - RNA, 21 nt, Human
ccugcccugccaccugucugu

SEQ ID NO: 1497255 - RNA, 18 nt, Human
ccugcccugccaccuguc

SEQ ID NO: 1497256 - RNA, 15 nt, Human
ccugcccugcccugc

SEQ ID NO: 1497257 - RNA, 16 nt, Human
ccugcccugcccugcc

SEQ ID NO: 1497258 - RNA, 17 nt, Human
ccugcccugcccugcca

SEQ ID NO: 1497259 - RNA, 11 nt, Human
ccugcccugcc

SEQ ID NO: 1497260 - RNA, 12 nt, Human
ccugcccugcca

SEQ ID NO: 1497261 - RNA, 14 nt, Human
ccugcccugccacc

SEQ ID NO: 1497262 - RNA, 15 nt, Human
ccugcccugccaccu

SEQ ID NO: 1497263 - RNA, 17 nt, Human
ccugcccugccaccugu

SEQ ID NO: 1497264 - RNA, 22 nt, Human
ccuucuccauggcccugccaug

SEQ ID NO: 1497265 - RNA, 19 nt, Human
ccuucuccauggcccugcc

SEQ ID NO: 1497266 - RNA, 15 nt, Human
ccuucaugcauggaa

SEQ ID NO: 1497267 - RNA, 12 nt, Human
ccuucaugcaug

SEQ ID NO: 1497268 - RNA, 21 nt, Human
ccuucaugcauggaaauuccc

SEQ ID NO: 1497269 - RNA, 18 nt, Human
ccuguggaucaaauccag

SEQ ID NO: 1497270 - RNA, 16 nt, Human
cgcacggcagccacag

SEQ ID NO: 1497271 - RNA, 16 nt, Human
cggcuugccacacccc

SEQ ID NO: 1497272 - RNA, 18 nt, Human
cgggaauuuucaucuagg

SEQ ID NO: 1497273 - RNA, 20 nt, Human
cgggaauuuucaucuaggau

SEQ ID NO: 1497274 - RNA, 18 nt, Human
cguuuggugcuucucaga

SEQ ID NO: 1497275 - RNA, 17 nt, Human
cuaaauauauuuuaaga

SEQ ID NO: 1497276 - RNA, 15 nt, Human
cuaagagagaaugag

SEQ ID NO: 1497277 - RNA, 14 nt, Human
cuaagagagaauga

SEQ ID NO: 1497278 - RNA, 10 nt, Human
cuaaccaagu

SEQ ID NO: 1497279 - RNA, 12 nt, Human
cuaaccaaguuc

SEQ ID NO: 1497280 - RNA, 19 nt, Human
cuaaauucuuucauuuuag

SEQ ID NO: 1497281 - RNA, 13 nt, Human
cguuuucaaaauu

SEQ ID NO: 1497282 - RNA, 14 nt, Human
cuacacuaagagag

SEQ ID NO: 1497283 - RNA, 23 nt, Human
cuacacgagauacagaauuuuau

SEQ ID NO: 1497284 - RNA, 11 nt, Human
cuacacccagc

SEQ ID NO: 1497285 - RNA, 12 nt, Human
cuacacccagca

SEQ ID NO: 1497286 - RNA, 13 nt, Human
cuacacccagcaa

SEQ ID NO: 1497287 - RNA, 14 nt, Human
cuacacccagcaau

SEQ ID NO: 1497288 - RNA, 16 nt, Human
cuacacccagcaauag

SEQ ID NO: 1497289 - RNA, 21 nt, Human
cuaagcuucacuguaaaauaa

SEQ ID NO: 1497290 - RNA, 22 nt, Human
cuaauagggcaauuaauuccuu

SEQ ID NO: 1497291 - RNA, 16 nt, Human
cuacccuaaccaaguu

SEQ ID NO: 1497292 - RNA, 20 nt, Human
cuaccaaggucuucuuaaua

SEQ ID NO: 1497293 - RNA, 22 nt, Human
cuaggaaauauuuauuuuaaua

SEQ ID NO: 1497294 - RNA, 15 nt, Human
cucagcucacugcaa

SEQ ID NO: 1497295 - RNA, 20 nt, Human
cucagcucacuacaaccucc

SEQ ID NO: 1497296 - RNA, 14 nt, Human
cucagcucacugca

SEQ ID NO: 1497297 - RNA, 20 nt, Human
cucagcucacugcaaccucc

SEQ ID NO: 1497298 - RNA, 24 nt, Human
cucaggagcccugggaggcucugg

SEQ ID NO: 1497299 - RNA, 20 nt, Human
cucagcucucaguugcagcc

SEQ ID NO: 1497300 - RNA, 12 nt, Human
cucaggagcccu

SEQ ID NO: 1497301 - RNA, 13 nt, Human
cucaggagcccug

SEQ ID NO: 1497302 - RNA, 14 nt, Human
cucaggagcccugg

SEQ ID NO: 1497303 - RNA, 15 nt, Human
cucaggagcccuggg

SEQ ID NO: 1497304 - RNA, 16 nt, Human
cucaggagcccuggga

SEQ ID NO: 1497305 - RNA, 17 nt, Human
cucaggagcccugggag

SEQ ID NO: 1497306 - RNA, 20 nt, Human
cucaggagcccugggaggcu

SEQ ID NO: 1497307 - RNA, 21 nt, Human
cucaggagcccugggaggcuc

SEQ ID NO: 1497308 - RNA, 22 nt, Human
cucaggagcccugggaggcucu

SEQ ID NO: 1497309 - RNA, 23 nt, Human
cucaggagcccugggaggcucug

SEQ ID NO: 1497310 - RNA, 21 nt, Human
cucauuuccaagcaaguauua

SEQ ID NO: 1497311 - RNA, 17 nt, Human
cucauuuccaagcaagu

SEQ ID NO: 1497312 - RNA, 14 nt, Human
cucauuuccaagca

SEQ ID NO: 1497313 - RNA, 13 nt, Human
cucauuuccaagc

SEQ ID NO: 1497314 - RNA, 12 nt, Human
cucauuuccaag

SEQ ID NO: 1497315 - RNA, 12 nt, Human
cucauuucagga

SEQ ID NO: 1497316 - RNA, 13 nt, Human
cucauuucaggau

SEQ ID NO: 1497317 - RNA, 13 nt, Human
cuccaaaccacuu

SEQ ID NO: 1497318 - RNA, 22 nt, Human
cuccaaaccacuuuuugcagcu

SEQ ID NO: 1497319 - RNA, 13 nt, Human
cucaguugcagcc

SEQ ID NO: 1497320 - RNA, 18 nt, Human
cuccaccgcagaaggaag

SEQ ID NO: 1497321 - RNA, 16 nt, Human
cuccaccgcagaagga

SEQ ID NO: 1497322 - RNA, 17 nt, Human
cuccaccgcagaaggaa

SEQ ID NO: 1497323 - RNA, 15 nt, Human
cuccauggcccugcc

SEQ ID NO: 1497324 - RNA, 16 nt, Human
cuccauggcccugcca

SEQ ID NO: 1497325 - RNA, 13 nt, Human
cucccucaaccuc

SEQ ID NO: 1497326 - RNA, 17 nt, Human
cucccucaaccucaucc

SEQ ID NO: 1497327 - RNA, 14 nt, Human
cuauugcauuuaua

SEQ ID NO: 1497328 - RNA, 17 nt, Human
cuauugcauuuauaugu

SEQ ID NO: 1497329 - RNA, 19 nt, Human
cuauugcauuuauauguac

SEQ ID NO: 1497330 - RNA, 23 nt, Human
cucaacuccgugcuuaaccaaag

SEQ ID NO: 1497331 - RNA, 12 nt, Human
cuauaauuuaaa

SEQ ID NO: 1497332 - RNA, 13 nt, Human
cuauaauuuaaau

SEQ ID NO: 1497333 - RNA, 15 nt, Human
cuauaccaauaaagu

SEQ ID NO: 1497334 - RNA, 16 nt, Human
cuauaccaauaaagug

SEQ ID NO: 1497335 - RNA, 15 nt, Human
cuauacccacccaga

SEQ ID NO: 1497336 - RNA, 16 nt, Human
cuauacccacccagaa

SEQ ID NO: 1497337 - RNA, 19 nt, Human
cuaugaaauauuauguuaa

SEQ ID NO: 1497338 - RNA, 19 nt, Human
cuauauaagacaagaacuc

SEQ ID NO: 1497339 - RNA, 15 nt, Human
cuauagcuaaguaca

SEQ ID NO: 1497340 - RNA, 17 nt, Human
cuauagcuaaguacaca

SEQ ID NO: 1497341 - RNA, 22 nt, Human
cuaugaaguuuuuuuuauacag

SEQ ID NO: 1497342 - RNA, 20 nt, Human
cuaggaaauauuuauuuuaa

SEQ ID NO: 1497343 - RNA, 19 nt, Human
cuaggaaauauuuauuuua

SEQ ID NO: 1497344 - RNA, 15 nt, Human
cuaggaaauauuuau

SEQ ID NO: 1497345 - RNA, 14 nt, Human
cuaggaaauauuua

SEQ ID NO: 1497346 - RNA, 19 nt, Human
cuagaguuuagcuggaaaa

SEQ ID NO: 1497347 - RNA, 18 nt, Human
cuagaguuuagcuggaaa

SEQ ID NO: 1497348 - RNA, 22 nt, Human
cugccucucugcaggucccuaa

SEQ ID NO: 1497349 - RNA, 20 nt, Human
cugccucucugcaggucccu

SEQ ID NO: 1497350 - RNA, 21 nt, Human
cugccucucugcaggucccua

SEQ ID NO: 1497351 - RNA, 19 nt, Human
cucccuucaugcauggaaa

SEQ ID NO: 1497352 - RNA, 14 nt, Human
cugcugcugccugc

SEQ ID NO: 1497353 - RNA, 16 nt, Human
cugcugcuacaauguc

SEQ ID NO: 1497354 - RNA, 13 nt, Human
cuggaauuugaaa

SEQ ID NO: 1497355 - RNA, 16 nt, Human
cuggagaugaggccag

SEQ ID NO: 1497356 - RNA, 17 nt, Human
cuggagaugaggccaga

SEQ ID NO: 1497357 - RNA, 18 nt, Human
cuggagaugaggccagac

SEQ ID NO: 1497358 - RNA, 20 nt, Human
cuggagaugaggccagacca

SEQ ID NO: 1497359 - RNA, 19 nt, Human
cuggagaugaggccagacc

SEQ ID NO: 1497360 - RNA, 23 nt, Human
cuggccccacccucguggacacc

SEQ ID NO: 1497361 - RNA, 12 nt, Human
cuggccccaccc

SEQ ID NO: 1497362 - RNA, 14 nt, Human
cuggagugcagugg

SEQ ID NO: 1497363 - RNA, 20 nt, Human
cuguauuuuaaaagaaugau

SEQ ID NO: 1497364 - RNA, 22 nt, Human
cuguauuuuaaaagaaugauua

SEQ ID NO: 1497365 - RNA, 16 nt, Human
cugugcaaggccuggu

SEQ ID NO: 1497366 - RNA, 22 nt, Human
cugucuccuaagcuggagugca

SEQ ID NO: 1497367 - RNA, 23 nt, Human
cuguucaugaaagauucaaugcc

SEQ ID NO: 1497368 - RNA, 18 nt, Human
cuguucaugaaagauuca

SEQ ID NO: 1497369 - RNA, 17 nt, Human
cuguucaugaaagauuc

SEQ ID NO: 1497370 - RNA, 15 nt, Human
cuguucauuccucca

SEQ ID NO: 1497371 - RNA, 16 nt, Human
cuguucauuccuccag

SEQ ID NO: 1497372 - RNA, 17 nt, Human
cuguucauuccuccagg

SEQ ID NO: 1497373 - RNA, 22 nt, Human
cuguucauuccuccagguauuc

SEQ ID NO: 1497374 - RNA, 19 nt, Human
cugugugcucaggagcccu

SEQ ID NO: 1497375 - RNA, 16 nt, Human
cugugugcucaggagc

SEQ ID NO: 1497376 - RNA, 20 nt, Human
cugugugcucaggagcccug

SEQ ID NO: 1497377 - RNA, 21 nt, Human
cugugugcucaggagcccugg

SEQ ID NO: 1497378 - RNA, 23 nt, Human
cugugugcucaggagcccuggga

SEQ ID NO: 1497379 - RNA, 15 nt, Human
cuguguggcagucug

SEQ ID NO: 1497380 - RNA, 12 nt, Human
cuugaaaaaugc

SEQ ID NO: 1497381 - RNA, 18 nt, Human
cuugaaaaaugcauguug

SEQ ID NO: 1497382 - RNA, 12 nt, Human
cuugaaaauuaa

SEQ ID NO: 1497383 - RNA, 13 nt, Human
cuugaaaauuaac

SEQ ID NO: 1497384 - RNA, 18 nt, Human
cuugaaaauuaacaugaa

SEQ ID NO: 1497385 - RNA, 12 nt, Human
cuuccacccagu

SEQ ID NO: 1497386 - RNA, 14 nt, Human
cuuccacccagugc

SEQ ID NO: 1497387 - RNA, 20 nt, Human
cuucccuuuccugaguccca

SEQ ID NO: 1497388 - RNA, 14 nt, Human
cuucccuuuccuga

SEQ ID NO: 1497389 - RNA, 22 nt, Human
cuuagaugcaguucugaagaag

SEQ ID NO: 1497390 - RNA, 19 nt, Human
cuuauaucuauauuuuaca

SEQ ID NO: 1497391 - RNA, 13 nt, Human
cuuauauuaugga

SEQ ID NO: 1497392 - RNA, 14 nt, Human
cuuugaccugccuc

SEQ ID NO: 1497393 - RNA, 15 nt, Human
cuuugaccugccucc

SEQ ID NO: 1497394 - RNA, 18 nt, Human
cuuugaccugccucccuu

SEQ ID NO: 1497395 - RNA, 22 nt, Human
cuuugcauaacguauaaaagcc

SEQ ID NO: 1497396 - RNA, 14 nt, Human
cuuuggcugcaugc

SEQ ID NO: 1497397 - RNA, 22 nt, Human
cuuuguauuguauauuacaaug

SEQ ID NO: 1497398 - RNA, 16 nt, Human
cuuuaaaaggaaagaa

SEQ ID NO: 1497399 - RNA, 18 nt, Human
cuuuaaaaggaaagaaaa

SEQ ID NO: 1497400 - RNA, 17 nt, Human
cuuuaaaaggaaagaaa

SEQ ID NO: 1497401 - RNA, 17 nt, Human
cuuuaaaauuacaacua

SEQ ID NO: 1497402 - RNA, 19 nt, Human
cuuuaaaauuacaacuaag

SEQ ID NO: 1497403 - RNA, 20 nt, Human
cuuuaaaauuacaacuaagu

SEQ ID NO: 1497404 - RNA, 23 nt, Human
cuuuaucuugaauaauguaagac

SEQ ID NO: 1497405 - RNA, 18 nt, Human
cuuuaucuugaauaaugu

SEQ ID NO: 1497406 - RNA, 21 nt, Human
cuuuaucuugaauaauguaag

SEQ ID NO: 1497407 - RNA, 19 nt, Human
cuugaguuuaaauuguaau

SEQ ID NO: 1497408 - RNA, 23 nt, Human
cuugucaauaaaauccauacauu

SEQ ID NO: 1497409 - RNA, 17 nt, Human
cuuguacuuuauuuucu

SEQ ID NO: 1497410 - RNA, 16 nt, Human
gaaacacaacuauauu

SEQ ID NO: 1497411 - RNA, 21 nt, Human
gaaacccugcacccauuagca

SEQ ID NO: 1497412 - RNA, 23 nt, Human
gaaacucguuaauuuguaguguu

SEQ ID NO: 1497413 - RNA, 19 nt, Human
gaaacuaggugcauauuua

SEQ ID NO: 1497414 - RNA, 14 nt, Human
gaaaccuuccaccc

SEQ ID NO: 1497415 - RNA, 17 nt, Human
gaaagagaacuuccaga

SEQ ID NO: 1497416 - RNA, 13 nt, Human
gaaagaggaagca

SEQ ID NO: 1497417 - RNA, 21 nt, Human
gaaagaguacucuuguuuccu

SEQ ID NO: 1497418 - RNA, 19 nt, Human
gaaagcuauauaagacaag

SEQ ID NO: 1497419 - RNA, 17 nt, Human
gaaagcgccuccaaccc

SEQ ID NO: 1497420 - RNA, 22 nt, Human
gaaagcgccuccaacccuagca

SEQ ID NO: 1497421 - RNA, 15 nt, Human
gaaaaguugaauuuu

SEQ ID NO: 1497422 - RNA, 14 nt, Human
gaaaaguugaauuu

SEQ ID NO: 1497423 - RNA, 18 nt, Human
gaaaaucuuauaauuuaa

SEQ ID NO: 1497424 - RNA, 22 nt, Human
gaaaauauuguuuuacaauagu

SEQ ID NO: 1497425 - RNA, 15 nt, Human
gaaaauauuguuuua

SEQ ID NO: 1497426 - RNA, 17 nt, Human
cuuuuuauggccuguga

SEQ ID NO: 1497427 - RNA, 16 nt, Human
gacaugggacauuugc

SEQ ID NO: 1497428 - RNA, 17 nt, Human
gacaugggacauuugcu

SEQ ID NO: 1497429 - RNA, 16 nt, Human
gaccaccucucaauau

SEQ ID NO: 1497430 - RNA, 16 nt, Human
gacaaggaaaaaauaa

SEQ ID NO: 1497431 - RNA, 14 nt, Human
gaauuucccucucu

SEQ ID NO: 1497432 - RNA, 20 nt, Human
gaauuucuaggacugaauua

SEQ ID NO: 1497433 - RNA, 19 nt, Human
gaauuucuaggacugaauu

SEQ ID NO: 1497434 - RNA, 20 nt, Human
gaauuugauaugugaacagu

SEQ ID NO: 1497435 - RNA, 20 nt, Human
gaauuugugaagguggaaau

SEQ ID NO: 1497436 - RNA, 16 nt, Human
gaauuggagcucgugg

SEQ ID NO: 1497437 - RNA, 16 nt, Human
gacugcauuauauuua

SEQ ID NO: 1497438 - RNA, 14 nt, Human
gacugcauuauauu

SEQ ID NO: 1497439 - RNA, 24 nt, Human
gacugcauuauauuuauuacugua

SEQ ID NO: 1497440 - RNA, 15 nt, Human
gacuuggccccugcc

SEQ ID NO: 1497441 - RNA, 21 nt, Human
gagaaaugaaaaaauauauau

SEQ ID NO: 1497442 - RNA, 22 nt, Human
gagaaccuagggugauauuaac

SEQ ID NO: 1497443 - RNA, 21 nt, Human
gagaaccuagggugauauuaa

SEQ ID NO: 1497444 - RNA, 14 nt, Human
gagaaauuuauaaa

SEQ ID NO: 1497445 - RNA, 13 nt, Human
gagaagaacugaa

SEQ ID NO: 1497446 - RNA, 16 nt, Human
gagaagaaagaacgga

SEQ ID NO: 1497447 - RNA, 21 nt, Human
gagaagaaagaacggaagaag

SEQ ID NO: 1497448 - RNA, 23 nt, Human
gagaacuuccagauccuggaaau

SEQ ID NO: 1497449 - RNA, 22 nt, Human
gagaacuuccagauccuggaaa

SEQ ID NO: 1497450 - RNA, 17 nt, Human
gagaaugagagacacac

SEQ ID NO: 1497451 - RNA, 22 nt, Human
gagaagcaaguaaaaaggcuaa

SEQ ID NO: 1497452 - RNA, 15 nt, Human
gagacuggguaggaa

SEQ ID NO: 1497453 - RNA, 21 nt, Human
gagaaugagagacacacugaa

SEQ ID NO: 1497454 - RNA, 20 nt, Human
gagaaugagagacacacuga

SEQ ID NO: 1497455 - RNA, 20 nt, Human
gagcaagaccccaucucaaa

SEQ ID NO: 1497456 - RNA, 15 nt, Human
gagaugaggccagac

SEQ ID NO: 1497457 - RNA, 13 nt, Human
gagaugaggccag

SEQ ID NO: 1497458 - RNA, 14 nt, Human
gagaugaggccaga

SEQ ID NO: 1497459 - RNA, 21 nt, Human
gagcccuucuauacccaccca

SEQ ID NO: 1497460 - RNA, 22 nt, Human
gagcccuucuauacccacccag

SEQ ID NO: 1497461 - RNA, 16 nt, Human
gaggcagagaagaaag

SEQ ID NO: 1497462 - RNA, 18 nt, Human
gaggcagagaagaaagaa

SEQ ID NO: 1497463 - RNA, 21 nt, Human
gaggcgcaugaauuugugaag

SEQ ID NO: 1497464 - RNA, 22 nt, Human
gaggcugggaauggaggggcag

SEQ ID NO: 1497465 - RNA, 12 nt, Human
gagguaaguuuu

SEQ ID NO: 1497466 - RNA, 18 nt, Human
gagguugaaaaacaaaau

SEQ ID NO: 1497467 - RNA, 22 nt, Human
gaguaauccaagcaaaugugaa

SEQ ID NO: 1497468 - RNA, 21 nt, Human
gagucuauuuacggaacucaa

SEQ ID NO: 1497469 - RNA, 24 nt, Human
gauaugauucaaaugucuauaaac

SEQ ID NO: 1497470 - RNA, 22 nt, Human
gauaugauucaaaugucuauaa

SEQ ID NO: 1497471 - RNA, 14 nt, Human
gauaugauucaaau

SEQ ID NO: 1497472 - RNA, 15 nt, Human
gauauaagugugugu

SEQ ID NO: 1497473 - RNA, 17 nt, Human
gauauaaguguguguuu

SEQ ID NO: 1497474 - RNA, 22 nt, Human
gauaaauggcuuccuggcaaua

SEQ ID NO: 1497475 - RNA, 15 nt, Human
gauaaaugauagaca

SEQ ID NO: 1497476 - RNA, 23 nt, Human
gcacaaauucugucucuggauua

SEQ ID NO: 1497477 - RNA, 13 nt, Human
gcaauuuaaaugu

SEQ ID NO: 1497478 - RNA, 18 nt, Human
gcaauuuaaauguuauga

SEQ ID NO: 1497479 - RNA, 16 nt, Human
gcaauuaauuccuuca

SEQ ID NO: 1497480 - RNA, 20 nt, Human
gcaauuacaacggagucaaa

SEQ ID NO: 1497481 - RNA, 19 nt, Human
gcaauuaauuccuucagca

SEQ ID NO: 1497482 - RNA, 13 nt, Human
gcaacucugaagg

SEQ ID NO: 1497483 - RNA, 22 nt, Human
gcaccccagcuggggccaggcu

SEQ ID NO: 1497484 - RNA, 19 nt, Human
gcacuguggguagacacac

SEQ ID NO: 1497485 - RNA, 12 nt, Human
gcagaaggaagg

SEQ ID NO: 1497486 - RNA, 13 nt, Human
gcagaaggaaggc

SEQ ID NO: 1497487 - RNA, 15 nt, Human
gcagaaggaaggcag

SEQ ID NO: 1497488 - RNA, 22 nt, Human
gcagaaggaaggcagggaggag

SEQ ID NO: 1497489 - RNA, 16 nt, Human
gcagaaggaaggcagg

SEQ ID NO: 1497490 - RNA, 16 nt, Human
gcaaauugucacagga

SEQ ID NO: 1497491 - RNA, 13 nt, Human
gcaacaauaaaua

SEQ ID NO: 1497492 - RNA, 20 nt, Human
gauucaaugccccugaauuu

SEQ ID NO: 1497493 - RNA, 19 nt, Human
gauucaaugccccugaauu

SEQ ID NO: 1497494 - RNA, 21 nt, Human
gauucaaugccccugaauuua

SEQ ID NO: 1497495 - RNA, 14 nt, Human
gauuacacacguga

SEQ ID NO: 1497496 - RNA, 16 nt, Human
gauguuuaguaaucau

SEQ ID NO: 1497497 - RNA, 22 nt, Human
gaugguucccuugaugaagaag

SEQ ID NO: 1497498 - RNA, 17 nt, Human
gaugggguuucaccaug

SEQ ID NO: 1497499 - RNA, 12 nt, Human
gcccuggacugu

SEQ ID NO: 1497500 - RNA, 16 nt, Human
gcccuggacugugugc

SEQ ID NO: 1497501 - RNA, 22 nt, Human
gcccuggacugugugcucagga

SEQ ID NO: 1497502 - RNA, 13 nt, Human
gcccugggaggcu

SEQ ID NO: 1497503 - RNA, 14 nt, Human
gcccugggaggcuc

SEQ ID NO: 1497504 - RNA, 15 nt, Human
gcccugggaggcucu

SEQ ID NO: 1497505 - RNA, 16 nt, Human
gcccugggaggcucug

SEQ ID NO: 1497506 - RNA, 23 nt, Human
gcccugggaggcucuggagccca

SEQ ID NO: 1497507 - RNA, 17 nt, Human
gcccugggaggcucugg

SEQ ID NO: 1497508 - RNA, 18 nt, Human
gcccugggaggcucugga

SEQ ID NO: 1497509 - RNA, 19 nt, Human
gcccugggaggcucuggag

SEQ ID NO: 1497510 - RNA, 21 nt, Human
gcccugggaggcucuggagcc

SEQ ID NO: 1497511 - RNA, 19 nt, Human
gccucaccagcccuggcaa

SEQ ID NO: 1497512 - RNA, 19 nt, Human
gccucucugcaggucccua

SEQ ID NO: 1497513 - RNA, 22 nt, Human
gccuggggcugaggcugaggca

SEQ ID NO: 1497514 - RNA, 18 nt, Human
gccugcuuuuuauggccu

SEQ ID NO: 1497515 - RNA, 19 nt, Human
gccugcuuuuuauggccug

SEQ ID NO: 1497516 - RNA, 22 nt, Human
gccugcuuuuuauggccuguga

SEQ ID NO: 1497517 - RNA, 23 nt, Human
gccucucugcaggucccuaauaa

SEQ ID NO: 1497518 - RNA, 20 nt, Human
gccucucugcaggucccuaa

SEQ ID NO: 1497519 - RNA, 21 nt, Human
gccucucugcaggucccuaau

SEQ ID NO: 1497520 - RNA, 20 nt, Human
gccugagugacagagcaaga

SEQ ID NO: 1497521 - RNA, 17 nt, Human
gcucuccuccaccucaa

SEQ ID NO: 1497522 - RNA, 14 nt, Human
gcucuugaugccug

SEQ ID NO: 1497523 - RNA, 15 nt, Human
gcucuugaugccugg

SEQ ID NO: 1497524 - RNA, 16 nt, Human
gcucuugaugccuggc

SEQ ID NO: 1497525 - RNA, 17 nt, Human
gcucuugaugccuggcg

SEQ ID NO: 1497526 - RNA, 16 nt, Human
gcugauggagaaggaa

SEQ ID NO: 1497527 - RNA, 17 nt, Human
gcugauggagaaggaag

SEQ ID NO: 1497528 - RNA, 23 nt, Human
gccugugagcuaggaauuguguu

SEQ ID NO: 1497529 - RNA, 14 nt, Human
gcuaagcauuccaa

SEQ ID NO: 1497530 - RNA, 20 nt, Human
gcuccauuuuuagugaaaua

SEQ ID NO: 1497531 - RNA, 14 nt, Human
gcuccaagaauuuc

SEQ ID NO: 1497532 - RNA, 18 nt, Human
gcuuaugcuuaaauucaa

SEQ ID NO: 1497533 - RNA, 17 nt, Human
gcuuauaauaaaggacu

SEQ ID NO: 1497534 - RNA, 20 nt, Human
gcugucuacacuaagagaga

SEQ ID NO: 1497535 - RNA, 12 nt, Human
gcuguucaugaa

SEQ ID NO: 1497536 - RNA, 21 nt, Human
gcuguucaugaaagauucaau

SEQ ID NO: 1497537 - RNA, 13 nt, Human
ggaacauaaaaag

SEQ ID NO: 1497538 - RNA, 18 nt, Human
ggaacauaaaaaggacau

SEQ ID NO: 1497539 - RNA, 15 nt, Human
ggaaaacauuccauc

SEQ ID NO: 1497540 - RNA, 14 nt, Human
ggaauggaggggca

SEQ ID NO: 1497541 - RNA, 16 nt, Human
ggaauggaggggcaga

SEQ ID NO: 1497542 - RNA, 17 nt, Human
ggaauggaggggcagag

SEQ ID NO: 1497543 - RNA, 21 nt, Human
ggaauggaggggcagagccag

SEQ ID NO: 1497544 - RNA, 19 nt, Human
ggaauuacgugcucugugg

SEQ ID NO: 1497545 - RNA, 17 nt, Human
ggacaaaauggaauacu

SEQ ID NO: 1497546 - RNA, 16 nt, Human
ggacaaaauggaauac

SEQ ID NO: 1497547 - RNA, 19 nt, Human
ggaauuuucaucuaggauu

SEQ ID NO: 1497548 - RNA, 15 nt, Human
ggacacuacacccag

SEQ ID NO: 1497549 - RNA, 16 nt, Human
ggacacuacacccagc

SEQ ID NO: 1497550 - RNA, 17 nt, Human
ggacacuacacccagca

SEQ ID NO: 1497551 - RNA, 18 nt, Human
ggacacuacacccagcaa

SEQ ID NO: 1497552 - RNA, 19 nt, Human
ggacacuacacccagcaau

SEQ ID NO: 1497553 - RNA, 20 nt, Human
ggacacuacacccagcaaua

SEQ ID NO: 1497554 - RNA, 21 nt, Human
ggacacuacacccagcaauag

SEQ ID NO: 1497555 - RNA, 12 nt, Human
ggaauuguguuu

SEQ ID NO: 1497556 - RNA, 22 nt, Human
ggaauuggagcucgugggacag

SEQ ID NO: 1497557 - RNA, 16 nt, Human
ggaauuggagcucgug

SEQ ID NO: 1497558 - RNA, 18 nt, Human
ggaagugcuaauuuugaa

SEQ ID NO: 1497559 - RNA, 17 nt, Human
ggaaggcagggaggagg

SEQ ID NO: 1497560 - RNA, 21 nt, Human
ggaaggcagggaggaggcaga

SEQ ID NO: 1497561 - RNA, 22 nt, Human
ggacacuacacccagcaauaga

SEQ ID NO: 1497562 - RNA, 16 nt, Human
ggacauuugcucaugg

SEQ ID NO: 1497563 - RNA, 17 nt, Human
ggacugugugcucagga

SEQ ID NO: 1497564 - RNA, 14 nt, Human
ggagaugaggccag

SEQ ID NO: 1497565 - RNA, 15 nt, Human
ggagaugaggccaga

SEQ ID NO: 1497566 - RNA, 16 nt, Human
ggagaugaggccagac

SEQ ID NO: 1497567 - RNA, 19 nt, Human
ggcaaucauggugcucaga

SEQ ID NO: 1497568 - RNA, 18 nt, Human
ggagaugaggccagacca

SEQ ID NO: 1497569 - RNA, 11 nt, Human
ggccugugagc

SEQ ID NO: 1497570 - RNA, 20 nt, Human
ggccuguggaucaaauccag

SEQ ID NO: 1497571 - RNA, 23 nt, Human
guacuuuauuuucuauaauuuaa

SEQ ID NO: 1497572 - RNA, 14 nt, Human
guacuugcucuuga

SEQ ID NO: 1497573 - RNA, 22 nt, Human
guacuugcucuugaugccuggc

SEQ ID NO: 1497574 - RNA, 15 nt, Human
guacuugcucuugau

SEQ ID NO: 1497575 - RNA, 16 nt, Human
guacuugcucuugaug

SEQ ID NO: 1497576 - RNA, 18 nt, Human
guacuugcucuugaugcc

SEQ ID NO: 1497577 - RNA, 19 nt, Human
guacuugcucuugaugccu

SEQ ID NO: 1497578 - RNA, 15 nt, Human
guacagacagaaaaa

SEQ ID NO: 1497579 - RNA, 15 nt, Human
guaauuggaaaggca

SEQ ID NO: 1497580 - RNA, 23 nt, Human
guaauucuaccaaggucuucuua

SEQ ID NO: 1497581 - RNA, 11 nt, Human
guaaugaaaac

SEQ ID NO: 1497582 - RNA, 13 nt, Human
guaaugaaaacca

SEQ ID NO: 1497583 - RNA, 19 nt, Human
guaaugauaacuggaaacu

SEQ ID NO: 1497584 - RNA, 20 nt, Human
gguuuucacauuggaaacaa

SEQ ID NO: 1497585 - RNA, 17 nt, Human
guaaaaauggaaacuau

SEQ ID NO: 1497586 - RNA, 18 nt, Human
guaaaaacaaagaaauua

SEQ ID NO: 1497587 - RNA, 20 nt, Human
guaaaaacaaagaaauuaug

SEQ ID NO: 1497588 - RNA, 23 nt, Human
guaagcauaagcuuaugcuuaaa

SEQ ID NO: 1497589 - RNA, 16 nt, Human
guaaaauaaaaggucg

SEQ ID NO: 1497590 - RNA, 18 nt, Human
ggucccuaauaaagcugu

SEQ ID NO: 1497591 - RNA, 12 nt, Human
ggucccuaauaa

SEQ ID NO: 1497592 - RNA, 13 nt, Human
ggucccuaauaaa

SEQ ID NO: 1497593 - RNA, 16 nt, Human
ggucccuaauaaagcu

SEQ ID NO: 1497594 - RNA, 17 nt, Human
ggucccuaauaaagcug

SEQ ID NO: 1497595 - RNA, 22 nt, Human
gguagacacacaugaaguccaa

SEQ ID NO: 1497596 - RNA, 15 nt, Human
gguagacacacauga

SEQ ID NO: 1497597 - RNA, 20 nt, Human
ggguuucaccauguuggcca

SEQ ID NO: 1497598 - RNA, 22 nt, Human
gguacuucaaauccuugaagau

SEQ ID NO: 1497599 - RNA, 19 nt, Human
gggugcugggccccugccu

SEQ ID NO: 1497600 - RNA, 22 nt, Human
gggcuccuccaggguggcagca

SEQ ID NO: 1497601 - RNA, 23 nt, Human
gggcuccuccaggguggcagcaa

SEQ ID NO: 1497602 - RNA, 20 nt, Human
gggcuuauaauaaaggacug

SEQ ID NO: 1497603 - RNA, 16 nt, Human
gggccuuuggcaggug

SEQ ID NO: 1497604 - RNA, 20 nt, Human
ggggcuuauaauaaaggacu

SEQ ID NO: 1497605 - RNA, 13 nt, Human
ggggcagagccag

SEQ ID NO: 1497606 - RNA, 14 nt, Human
ggggcagagccagg

SEQ ID NO: 1497607 - RNA, 15 nt, Human
ggggcagagccagga

SEQ ID NO: 1497608 - RNA, 16 nt, Human
ggggcagagccaggaa

SEQ ID NO: 1497609 - RNA, 18 nt, Human
guauuuuaaaagaaugau

SEQ ID NO: 1497610 - RNA, 17 nt, Human
guauuuuaaaagaauga

SEQ ID NO: 1497611 - RNA, 16 nt, Human
guauuuuaaaagaaug

SEQ ID NO: 1497612 - RNA, 21 nt, Human
gucaauaaaauccauacauuu

SEQ ID NO: 1497613 - RNA, 15 nt, Human
gucaauaaaauccau

SEQ ID NO: 1497614 - RNA, 20 nt, Human
gucacccaggcuggacugca

SEQ ID NO: 1497615 - RNA, 20 nt, Human
gucacccagguuggagugca

SEQ ID NO: 1497616 - RNA, 14 nt, Human
gucaccucauggaa

SEQ ID NO: 1497617 - RNA, 15 nt, Human
guauuauguguguuu

SEQ ID NO: 1497618 - RNA, 19 nt, Human
guauucaaaaauuaucuau

SEQ ID NO: 1497619 - RNA, 22 nt, Human
guauuacaguggggaaugaaga

SEQ ID NO: 1497620 - RNA, 20 nt, Human
guauuacaguggggaaugaa

SEQ ID NO: 1497621 - RNA, 22 nt, Human
guauuucuaugaaauauuaugu

SEQ ID NO: 1497622 - RNA, 17 nt, Human
guauuucuaugaaauau

SEQ ID NO: 1497623 - RNA, 16 nt, Human
guauucguuaucuaau

SEQ ID NO: 1497624 - RNA, 21 nt, Human
gucucuauaccaauaaaguga

SEQ ID NO: 1497625 - RNA, 20 nt, Human
gucucuauaccaauaaagug

SEQ ID NO: 1497626 - RNA, 13 nt, Human
gucugacuguuuc

SEQ ID NO: 1497627 - RNA, 23 nt, Human
gucuacacuaagagagaaugaga

SEQ ID NO: 1497628 - RNA, 17 nt, Human
gucuacacuaagagaga

SEQ ID NO: 1497629 - RNA, 20 nt, Human
gugaaacucguuaauuugua

SEQ ID NO: 1497630 - RNA, 19 nt, Human
gugaaagaaaauaacaaua

SEQ ID NO: 1497631 - RNA, 13 nt, Human
gugaaagaaguaa

SEQ ID NO: 1497632 - RNA, 13 nt, Human
gugaaaucauuca

SEQ ID NO: 1497633 - RNA, 18 nt, Human
gugaaauuauucauaauu

SEQ ID NO: 1497634 - RNA, 20 nt, Human
gugaaauuauucauaauuau

SEQ ID NO: 1497635 - RNA, 16 nt, Human
gugagcagucaggaaa

SEQ ID NO: 1497636 - RNA, 16 nt, Human
gugacaagcucacaga

SEQ ID NO: 1497637 - RNA, 24 nt, Human
gugcaguggcaucaucucagcuca

SEQ ID NO: 1497638 - RNA, 23 nt, Human
gugcagggccuguaaucccagca

SEQ ID NO: 1497639 - RNA, 18 nt, Human
gugcaaauugucacagga

SEQ ID NO: 1497640 - RNA, 24 nt, Human
gugcaguggcgcgaucucagcuca

SEQ ID NO: 1497641 - RNA, 19 nt, Human
guggaacauaaaaaggaca

SEQ ID NO: 1497642 - RNA, 20 nt, Human
guggaacauaaaaaggacau

SEQ ID NO: 1497643 - RNA, 21 nt, Human
guggaacauaaaaaggacauc

SEQ ID NO: 1497644 - RNA, 11 nt, Human
guggcagucug

SEQ ID NO: 1497645 - RNA, 19 nt, Human
guggcaucaucucagcuca

SEQ ID NO: 1497646 - RNA, 22 nt, Human
ucaccgacugaaaauauuguuu

SEQ ID NO: 1497647 - RNA, 14 nt, Human
ucaccagagacuuu

SEQ ID NO: 1497648 - RNA, 15 nt, Human
ucaccagagacuuua

SEQ ID NO: 1497649 - RNA, 17 nt, Human
ucacauuggaaacaagu

SEQ ID NO: 1497650 - RNA, 22 nt, Human
ucacauuguauucagaguugau

SEQ ID NO: 1497651 - RNA, 12 nt, Human
ucacauuuaaau

SEQ ID NO: 1497652 - RNA, 14 nt, Human
ucacauuggaaaca

SEQ ID NO: 1497653 - RNA, 14 nt, Human
ucaauaaaauccau

SEQ ID NO: 1497654 - RNA, 23 nt, Human
ucaauuaaaauagucucuuuaaa

SEQ ID NO: 1497655 - RNA, 22 nt, Human
ucaacuccaaacugacucuuaa

SEQ ID NO: 1497656 - RNA, 16 nt, Human
ucaaauccuugaagau

SEQ ID NO: 1497657 - RNA, 17 nt, Human
ucaaacauauauaacaa

SEQ ID NO: 1497658 - RNA, 20 nt, Human
ucaaaccaaaucacugaacu

SEQ ID NO: 1497659 - RNA, 16 nt, Human
uauguucagauuauug

SEQ ID NO: 1497660 - RNA, 19 nt, Human
uauguuagugcaaauuguc

SEQ ID NO: 1497661 - RNA, 12 nt, Human
uauguuaaaacu

SEQ ID NO: 1497662 - RNA, 14 nt, Human
uauggaggcaggag

SEQ ID NO: 1497663 - RNA, 13 nt, Human
uauguguguuuua

SEQ ID NO: 1497664 - RNA, 17 nt, Human
uauuauauuuacaaaug

SEQ ID NO: 1497665 - RNA, 16 nt, Human
uauuauguuaaaacug

SEQ ID NO: 1497666 - RNA, 20 nt, Human
uauuauggaggcaggaguuu

SEQ ID NO: 1497667 - RNA, 13 nt, Human
uauugcauuuaua

SEQ ID NO: 1497668 - RNA, 17 nt, Human
uauugcauuuauaugua

SEQ ID NO: 1497669 - RNA, 14 nt, Human
uauuuauuacugua

SEQ ID NO: 1497670 - RNA, 13 nt, Human
uauuucuaugaaa

SEQ ID NO: 1497671 - RNA, 16 nt, Human
uauuugaaccaauaaa

SEQ ID NO: 1497672 - RNA, 15 nt, Human
uauuucuaugaaaua

SEQ ID NO: 1497673 - RNA, 14 nt, Human
uauuucuaugaaau

SEQ ID NO: 1497674 - RNA, 13 nt, Human
uauaugcuucugu

SEQ ID NO: 1497675 - RNA, 14 nt, Human
uauauguguaugca

SEQ ID NO: 1497676 - RNA, 13 nt, Human
uauauaacaaugc

SEQ ID NO: 1497677 - RNA, 17 nt, Human
uaguugccuuaaaauaa

SEQ ID NO: 1497678 - RNA, 14 nt, Human
uauaauaaaggacu

SEQ ID NO: 1497679 - RNA, 19 nt, Human
uauaauaaaggacuguaau

SEQ ID NO: 1497680 - RNA, 22 nt, Human
uauaauaaaggacuguaaucuu

SEQ ID NO: 1497681 - RNA, 15 nt, Human
uauaauucacauugu

SEQ ID NO: 1497682 - RNA, 20 nt, Human
uauaauucacauuguauuca

SEQ ID NO: 1497683 - RNA, 16 nt, Human
uaguauuucuaugaaa

SEQ ID NO: 1497684 - RNA, 19 nt, Human
uaguauuucuaugaaauau

SEQ ID NO: 1497685 - RNA, 18 nt, Human
uaguauuucuaugaaaua

SEQ ID NO: 1497686 - RNA, 15 nt, Human
uagugcaaauuguca

SEQ ID NO: 1497687 - RNA, 14 nt, Human
uagugcaaauuguc

SEQ ID NO: 1497688 - RNA, 14 nt, Human
uagucaaauugugu

SEQ ID NO: 1497689 - RNA, 13 nt, Human
uagucaaauugug

SEQ ID NO: 1497690 - RNA, 13 nt, Human
uaguguucauaaa

SEQ ID NO: 1497691 - RNA, 20 nt, Human
uaguugcaacuuuguauaaa

SEQ ID NO: 1497692 - RNA, 16 nt, Human
uagguaaauuacaguu

SEQ ID NO: 1497693 - RNA, 16 nt, Human
uaggucagugcaaaua

SEQ ID NO: 1497694 - RNA, 15 nt, Human
uaggucucaauaccu

SEQ ID NO: 1497695 - RNA, 15 nt, Human
uaucguaaaauuaag

SEQ ID NO: 1497696 - RNA, 18 nt, Human
uaucguaaaauuaagaaa

SEQ ID NO: 1497697 - RNA, 23 nt, Human
uaugaauuacauuuguauaaaau

SEQ ID NO: 1497698 - RNA, 17 nt, Human
uaugaauuacauuugua

SEQ ID NO: 1497699 - RNA, 20 nt, Human
uaugaaguuuuuuuuauaca

SEQ ID NO: 1497700 - RNA, 16 nt, Human
uaugcuucuguuuuau

SEQ ID NO: 1497701 - RNA, 15 nt, Human
uaugcuucuguuuua

SEQ ID NO: 1497702 - RNA, 20 nt, Human
uaugcauauuauuuuauguu

SEQ ID NO: 1497703 - RNA, 14 nt, Human
uaugcacaguaaaa

SEQ ID NO: 1497704 - RNA, 16 nt, Human
uaugacuauguaaacu

SEQ ID NO: 1497705 - RNA, 17 nt, Human
uaugacuauguaaacua

SEQ ID NO: 1497706 - RNA, 18 nt, Human
uaugacuauguaaacuac

SEQ ID NO: 1497707 - RNA, 21 nt, Human
uaugauucaaaugucuauaaa

SEQ ID NO: 1497708 - RNA, 16 nt, Human
uaugauucaaaugucu

SEQ ID NO: 1497709 - RNA, 16 nt, Human
uaugauucccagccag

SEQ ID NO: 1497710 - RNA, 11 nt, Human
ucaggagcccu

SEQ ID NO: 1497711 - RNA, 12 nt, Human
ucaggagcccug

SEQ ID NO: 1497712 - RNA, 14 nt, Human
ucaggagcccuggg

SEQ ID NO: 1497713 - RNA, 15 nt, Human
ucaggagcccuggga

SEQ ID NO: 1497714 - RNA, 15 nt, Human
ucagucucuauacca

SEQ ID NO: 1497715 - RNA, 18 nt, Human
ucagucucuauaccaaua

SEQ ID NO: 1497716 - RNA, 21 nt, Human
ucagucucuauaccaauaaag

SEQ ID NO: 1497717 - RNA, 20 nt, Human
ucagucucuauaccaauaaa

SEQ ID NO: 1497718 - RNA, 22 nt, Human
uccaaaccacuuuuugcagcuu

SEQ ID NO: 1497719 - RNA, 12 nt, Human
uccaaaccacuu

SEQ ID NO: 1497720 - RNA, 14 nt, Human
ucauggugcucaga

SEQ ID NO: 1497721 - RNA, 19 nt, Human
ucaucucagcucacugcaa

SEQ ID NO: 1497722 - RNA, 18 nt, Human
ucaucucagcucacugca

SEQ ID NO: 1497723 - RNA, 16 nt, Human
ucaucuccccaucauu

SEQ ID NO: 1497724 - RNA, 17 nt, Human
ucaugcuguucaugaaa

SEQ ID NO: 1497725 - RNA, 14 nt, Human
ucccauguucaagc

SEQ ID NO: 1497726 - RNA, 19 nt, Human
uccagguagagggugugua

SEQ ID NO: 1497727 - RNA, 21 nt, Human
uccagguauucguuaucuaau

SEQ ID NO: 1497728 - RNA, 14 nt, Human
uccaguaaaauaau

SEQ ID NO: 1497729 - RNA, 15 nt, Human
uccauacauuugugu

SEQ ID NO: 1497730 - RNA, 20 nt, Human
uccaugggccauaugaaaag

SEQ ID NO: 1497731 - RNA, 23 nt, Human
uccagaaagaaaacuuguauuau

SEQ ID NO: 1497732 - RNA, 15 nt, Human
uccgcuauccaccaa

SEQ ID NO: 1497733 - RNA, 17 nt, Human
uccuccaccucaacucc

SEQ ID NO: 1497734 - RNA, 20 nt, Human
uccuccaggguggcagcaac

SEQ ID NO: 1497735 - RNA, 21 nt, Human
uccuccaggguggcagcaaca

SEQ ID NO: 1497736 - RNA, 22 nt, Human
uccuaagcuggagugcaguggc

SEQ ID NO: 1497737 - RNA, 17 nt, Human
uccuggcaauagucaaa

SEQ ID NO: 1497738 - RNA, 19 nt, Human
uccuuagaaaaaaaauuau

SEQ ID NO: 1497739 - RNA, 12 nt, Human
ucguggacaccu

SEQ ID NO: 1497740 - RNA, 13 nt, Human
ucguggacaccug

SEQ ID NO: 1497741 - RNA, 14 nt, Human
ucguggacaccugc

SEQ ID NO: 1497742 - RNA, 15 nt, Human
ucguggacaccugcc

SEQ ID NO: 1497743 - RNA, 16 nt, Human
ucguggacaccugccc

SEQ ID NO: 1497744 - RNA, 17 nt, Human
ucguggacaccugcccu

SEQ ID NO: 1497745 - RNA, 18 nt, Human
ucguggacaccugcccug

SEQ ID NO: 1497746 - RNA, 19 nt, Human
ucguggacaccugcccugc

SEQ ID NO: 1497747 - RNA, 20 nt, Human
ucguggacaccugcccugcc

SEQ ID NO: 1497748 - RNA, 17 nt, Human
ucuacacuaagagagaa

SEQ ID NO: 1497749 - RNA, 15 nt, Human
ucucagucugucacc

SEQ ID NO: 1497750 - RNA, 16 nt, Human
ucucauacccucccuc

SEQ ID NO: 1497751 - RNA, 16 nt, Human
ucuccagccucagccu

SEQ ID NO: 1497752 - RNA, 19 nt, Human
ucuccagccucagccuccc

SEQ ID NO: 1497753 - RNA, 18 nt, Human
ucuccagccucagcucuc

SEQ ID NO: 1497754 - RNA, 24 nt, Human
ugaucagcuuauugucuagugaaa

SEQ ID NO: 1497755 - RNA, 17 nt, Human
ugaucagcuuauugucu

SEQ ID NO: 1497756 - RNA, 23 nt, Human
ugaugcuacaggauuugaaauug

SEQ ID NO: 1497757 - RNA, 20 nt, Human
ugaugcuacaggauuugaaa

SEQ ID NO: 1497758 - RNA, 11 nt, Human
ugaugccuggc

SEQ ID NO: 1497759 - RNA, 13 nt, Human
ugaugguuguaca

SEQ ID NO: 1497760 - RNA, 14 nt, Human
ugaugguuguacau

SEQ ID NO: 1497761 - RNA, 21 nt, Human
ugaugguuguacauauaagug

SEQ ID NO: 1497762 - RNA, 22 nt, Human
ugauuaugaauuacauuuguau

SEQ ID NO: 1497763 - RNA, 21 nt, Human
ugauuaugaauuacauuugua

SEQ ID NO: 1497764 - RNA, 22 nt, Human
ugauguuuagaaacacaacuau

SEQ ID NO: 1497765 - RNA, 19 nt, Human
ugauuaugaauuacauuug

SEQ ID NO: 1497766 - RNA, 17 nt, Human
ugauuaugaauuacauu

SEQ ID NO: 1497767 - RNA, 13 nt, Human
ugauuauauguca

SEQ ID NO: 1497768 - RNA, 17 nt, Human
ugagaaauuuauaaacu

SEQ ID NO: 1497769 - RNA, 12 nt, Human
ugagaccaccuc

SEQ ID NO: 1497770 - RNA, 15 nt, Human
ugagaccaccucuca

SEQ ID NO: 1497771 - RNA, 19 nt, Human
ugagaccaccucucaauau

SEQ ID NO: 1497772 - RNA, 16 nt, Human
ugauaacuggaaacuu

SEQ ID NO: 1497773 - RNA, 17 nt, Human
ugagggagaacaagacc

SEQ ID NO: 1497774 - RNA, 16 nt, Human
ugaggagcuugaaacc

SEQ ID NO: 1497775 - RNA, 16 nt, Human
ugaaagaugaucauuu

SEQ ID NO: 1497776 - RNA, 15 nt, Human
ugaaagguacuucaa

SEQ ID NO: 1497777 - RNA, 16 nt, Human
ugaaagguacuucaaa

SEQ ID NO: 1497778 - RNA, 20 nt, Human
ugaaaagcuccauuuuuagu

SEQ ID NO: 1497779 - RNA, 16 nt, Human
ugaaaagcagacauuu

SEQ ID NO: 1497780 - RNA, 19 nt, Human
ugaacaguuguguuugaag

SEQ ID NO: 1497781 - RNA, 16 nt, Human
ugaaauauugacuuuu

SEQ ID NO: 1497782 - RNA, 15 nt, Human
ugaaaucauucauuu

SEQ ID NO: 1497783 - RNA, 12 nt, Human
ugaaauuauuca

SEQ ID NO: 1497784 - RNA, 20 nt, Human
ugaaauuaugugacauuuua

SEQ ID NO: 1497785 - RNA, 22 nt, Human
ugaaauuaugugacauuuuaca

SEQ ID NO: 1497786 - RNA, 14 nt, Human
ucuuugccacccuc

SEQ ID NO: 1497787 - RNA, 16 nt, Human
ucuuugccacccucau

SEQ ID NO: 1497788 - RNA, 17 nt, Human
ucuuugccacccucaug

SEQ ID NO: 1497789 - RNA, 18 nt, Human
ucuuugccacccucaugc

SEQ ID NO: 1497790 - RNA, 20 nt, Human
ucuuugccacccucaugcug

SEQ ID NO: 1497791 - RNA, 12 nt, Human
ucuuugccaagu

SEQ ID NO: 1497792 - RNA, 19 nt, Human
ucuuuccacagaagcucca

SEQ ID NO: 1497793 - RNA, 16 nt, Human
ucuuucuuucaauaaa

SEQ ID NO: 1497794 - RNA, 22 nt, Human
ugaaucauuuuaccuuugacaa

SEQ ID NO: 1497795 - RNA, 23 nt, Human
ugaaucauuuuaccuuugacaaa

SEQ ID NO: 1497796 - RNA, 17 nt, Human
ugaauuaugaaacuuuu

SEQ ID NO: 1497797 - RNA, 15 nt, Human
ugaauuaugaaacuu

SEQ ID NO: 1497798 - RNA, 13 nt, Human
ugaauuaugaaac

SEQ ID NO: 1497799 - RNA, 16 nt, Human
ugaauuauuuucucuc

SEQ ID NO: 1497800 - RNA, 18 nt, Human
ugaauuacauuuguauaa

SEQ ID NO: 1497801 - RNA, 16 nt, Human
ugaauuacauuuguau

SEQ ID NO: 1497802 - RNA, 15 nt, Human
ugaauuacauuugua

SEQ ID NO: 1497803 - RNA, 15 nt, Human
ugaauuauauguuca

SEQ ID NO: 1497804 - RNA, 11 nt, Human
ugaaguccaag

SEQ ID NO: 1497805 - RNA, 13 nt, Human
ugaaguccaagca

SEQ ID NO: 1497806 - RNA, 14 nt, Human
ugaagauacugaaa

SEQ ID NO: 1497807 - RNA, 18 nt, Human
ugaagauacugaaauaaa

SEQ ID NO: 1497808 - RNA, 16 nt, Human
ugaagauacugaaaua

SEQ ID NO: 1497809 - RNA, 15 nt, Human
ugaagauacugaaau

SEQ ID NO: 1497810 - RNA, 18 nt, Human
ugacaugggacauuugcu

SEQ ID NO: 1497811 - RNA, 17 nt, Human
ugacaugggacauuugc

SEQ ID NO: 1497812 - RNA, 16 nt, Human
ugacaugggacauuug

SEQ ID NO: 1497813 - RNA, 20 nt, Human
ugacaagcucacagaccuuu

SEQ ID NO: 1497814 - RNA, 15 nt, Human
ugacaagcucacaga

SEQ ID NO: 1497815 - RNA, 12 nt, Human
ugacaagcucac

SEQ ID NO: 1497816 - RNA, 23 nt, Human
ugacauaaguauuuaauucaugu

SEQ ID NO: 1497817 - RNA, 14 nt, Human
ugcaguucugaaga

SEQ ID NO: 1497818 - RNA, 12 nt, Human
ugcaguucugaa

SEQ ID NO: 1497819 - RNA, 18 nt, Human
ugcauauuauuuuauguu

SEQ ID NO: 1497820 - RNA, 14 nt, Human
ugccaccugucugu

SEQ ID NO: 1497821 - RNA, 15 nt, Human
ugccaccugucuguc

SEQ ID NO: 1497822 - RNA, 16 nt, Human
ugccaccugucugucu

SEQ ID NO: 1497823 - RNA, 14 nt, Human
ugccaccuccugcc

SEQ ID NO: 1497824 - RNA, 10 nt, Human
ugccaccugu

SEQ ID NO: 1497825 - RNA, 11 nt, Human
ugccaccuguc

SEQ ID NO: 1497826 - RNA, 12 nt, Human
ugccaccugucu

SEQ ID NO: 1497827 - RNA, 13 nt, Human
ugccaccugucug

SEQ ID NO: 1497828 - RNA, 17 nt, Human
ugccaggcuggagugca

SEQ ID NO: 1497829 - RNA, 19 nt, Human
ugccaggcuggagugcagu

SEQ ID NO: 1497830 - RNA, 13 nt, Human
ugcugcugccugc

SEQ ID NO: 1497831 - RNA, 14 nt, Human
ugcugcugccugcc

SEQ ID NO: 1497832 - RNA, 14 nt, Human
ugcugggccccugc

SEQ ID NO: 1497833 - RNA, 16 nt, Human
ugcugggccccugccu

SEQ ID NO: 1497834 - RNA, 17 nt, Human
ugcugggccccugccuc

SEQ ID NO: 1497835 - RNA, 18 nt, Human
ugcugggccccugccucu

SEQ ID NO: 1497836 - RNA, 19 nt, Human
ugcugggccccugccucuc

SEQ ID NO: 1497837 - RNA, 21 nt, Human
ugcugggccccugccucucug

SEQ ID NO: 1497838 - RNA, 22 nt, Human
ugcugggccccugccucucugc

SEQ ID NO: 1497839 - RNA, 23 nt, Human
ugcugggccccugccucucugca

SEQ ID NO: 1497840 - RNA, 24 nt, Human
ugcugggccccugccucucugcag

SEQ ID NO: 1497841 - RNA, 15 nt, Human
ugcugccugcuuuuu

SEQ ID NO: 1497842 - RNA, 17 nt, Human
ugcugccugcuuuuuau

SEQ ID NO: 1497843 - RNA, 13 nt, Human
ugcugguuuuagu

SEQ ID NO: 1497844 - RNA, 17 nt, Human
ugcuguucaugaaagau

SEQ ID NO: 1497845 - RNA, 16 nt, Human
ugcuguucaugaaaga

SEQ ID NO: 1497846 - RNA, 13 nt, Human
ugcucuccuccac

SEQ ID NO: 1497847 - RNA, 18 nt, Human
ugcucaggagcccuggga

SEQ ID NO: 1497848 - RNA, 19 nt, Human
ugcucaggagcccugggag

SEQ ID NO: 1497849 - RNA, 20 nt, Human
ugcucaggagcccugggagg

SEQ ID NO: 1497850 - RNA, 20 nt, Human
ugccuugcauaauggucaga

SEQ ID NO: 1497851 - RNA, 15 nt, Human
uggcgggguggggug

SEQ ID NO: 1497852 - RNA, 15 nt, Human
uggcacuaguauuuc

SEQ ID NO: 1497853 - RNA, 20 nt, Human
uggcaauagucaaauugugu

SEQ ID NO: 1497854 - RNA, 11 nt, Human
uggagaaggaa

SEQ ID NO: 1497855 - RNA, 12 nt, Human
uggagaaggaag

SEQ ID NO: 1497856 - RNA, 13 nt, Human
uggagaaggaagg

SEQ ID NO: 1497857 - RNA, 14 nt, Human
uggagaaggaaggc

SEQ ID NO: 1497858 - RNA, 23 nt, Human
uggacaccugcccugcccugcca

SEQ ID NO: 1497859 - RNA, 16 nt, Human
uggacacuacacccag

SEQ ID NO: 1497860 - RNA, 17 nt, Human
uggacacuacacccagc

SEQ ID NO: 1497861 - RNA, 18 nt, Human
uggacacuacacccagca

SEQ ID NO: 1497862 - RNA, 19 nt, Human
uggacacuacacccagcaa

SEQ ID NO: 1497863 - RNA, 20 nt, Human
uggacacuacacccagcaau

SEQ ID NO: 1497864 - RNA, 21 nt, Human
ugguauguuuucaggcuagau

SEQ ID NO: 1497865 - RNA, 13 nt, Human
ugguauguuuuca

SEQ ID NO: 1497866 - RNA, 21 nt, Human
ugggccccugccucucugcag

SEQ ID NO: 1497867 - RNA, 23 nt, Human
ugggccccugccucucugcaggu

SEQ ID NO: 1497868 - RNA, 21 nt, Human
uggggccaggcugggucgccc

SEQ ID NO: 1497869 - RNA, 22 nt, Human
uggggccaggcugggucgcccu

SEQ ID NO: 1497870 - RNA, 18 nt, Human
uucccuugaugaagaagu

SEQ ID NO: 1497871 - RNA, 21 nt, Human
uucccucucucauacccuccc

SEQ ID NO: 1497872 - RNA, 17 nt, Human
uucccuugaugaagaag

SEQ ID NO: 1497873 - RNA, 22 nt, Human
uucccugcugugaaagaaguaa

SEQ ID NO: 1497874 - RNA, 20 nt, Human
uucccuggaaaccuuccacc

SEQ ID NO: 1497875 - RNA, 23 nt, Human
uucccuggaaaccuuccacccag

SEQ ID NO: 1497876 - RNA, 22 nt, Human
uucccuggaaaccuuccaccca

SEQ ID NO: 1497877 - RNA, 13 nt, Human
uuccauucuggaa

SEQ ID NO: 1497878 - RNA, 15 nt, Human
uuccauucuggaagu

SEQ ID NO: 1497879 - RNA, 17 nt, Human
uucaugcaaacuuuauu

SEQ ID NO: 1497880 - RNA, 13 nt, Human
uucaugcauggaa

SEQ ID NO: 1497881 - RNA, 17 nt, Human
uucaugaaagauucaau

SEQ ID NO: 1497882 - RNA, 15 nt, Human
uucaugaaagauuca

SEQ ID NO: 1497883 - RNA, 19 nt, Human
uuccacucguguguuucua

SEQ ID NO: 1497884 - RNA, 15 nt, Human
uuauugucuagugaa

SEQ ID NO: 1497885 - RNA, 16 nt, Human
uuauuuuaauaauguu

SEQ ID NO: 1497886 - RNA, 15 nt, Human
uuauuuuaauaaugu

SEQ ID NO: 1497887 - RNA, 17 nt, Human
uuauuuuaauaauguuu

SEQ ID NO: 1497888 - RNA, 20 nt, Human
uuauuuuauguugcauagaa

SEQ ID NO: 1497889 - RNA, 17 nt, Human
uucaaauccuugaagau

SEQ ID NO: 1497890 - RNA, 22 nt, Human
uucaaaucaaucuguaaaacua

SEQ ID NO: 1497891 - RNA, 23 nt, Human
uucaaaucaaucuguaaaacuaa

SEQ ID NO: 1497892 - RNA, 20 nt, Human
uucagauaaucacaauacau

SEQ ID NO: 1497893 - RNA, 21 nt, Human
uucagaguugaugguuguaca

SEQ ID NO: 1497894 - RNA, 22 nt, Human
uucagaguugaugguuguacau

SEQ ID NO: 1497895 - RNA, 18 nt, Human
uuauuacuguaagaaaau

SEQ ID NO: 1497896 - RNA, 17 nt, Human
uuauuacuguaagaaaa

SEQ ID NO: 1497897 - RNA, 16 nt, Human
uuauuacuguaagaaa

SEQ ID NO: 1497898 - RNA, 16 nt, Human
uuauuaaacaaauaau

SEQ ID NO: 1497899 - RNA, 20 nt, Human
uuaucuugaauaauguaaga

SEQ ID NO: 1497900 - RNA, 13 nt, Human
uuaguugcaacuu

SEQ ID NO: 1497901 - RNA, 20 nt, Human
uuaguugcaacuuuguauaa

SEQ ID NO: 1497902 - RNA, 21 nt, Human
uuauggcacuaguauuucuau

SEQ ID NO: 1497903 - RNA, 16 nt, Human
uuaugcuuaaauucaa

SEQ ID NO: 1497904 - RNA, 21 nt, Human
uuagaugcaguucugaagaag

SEQ ID NO: 1497905 - RNA, 20 nt, Human
uuagaugcaguucugaagaa

SEQ ID NO: 1497906 - RNA, 13 nt, Human
uuagcuggaaaag

SEQ ID NO: 1497907 - RNA, 12 nt, Human
uuagcuggaaaa

SEQ ID NO: 1497908 - RNA, 14 nt, Human
uuaguguucauaaa

SEQ ID NO: 1497909 - RNA, 22 nt, Human
uuaggaaguugacuuauaguac

SEQ ID NO: 1497910 - RNA, 23 nt, Human
uuaggaaguugacuuauaguaca

SEQ ID NO: 1497911 - RNA, 14 nt, Human
uuagggaaaacauu

SEQ ID NO: 1497912 - RNA, 19 nt, Human
uuagaaacacaacuauauu

SEQ ID NO: 1497913 - RNA, 19 nt, Human
uuacugucuuuuuucuaaa

SEQ ID NO: 1497914 - RNA, 17 nt, Human
uuacugucuuuuuucua

SEQ ID NO: 1497915 - RNA, 22 nt, Human
uuaaugucaauucuugccaaau

SEQ ID NO: 1497916 - RNA, 14 nt, Human
uuaaagacuuuuau

SEQ ID NO: 1497917 - RNA, 21 nt, Human
uuaaauguuuuuuuuuaaaga

SEQ ID NO: 1497918 - RNA, 23 nt, Human
uuaaauguuuuuuuuuaaagacu

SEQ ID NO: 1497919 - RNA, 14 nt, Human
uuaacuauugcauu

SEQ ID NO: 1497920 - RNA, 21 nt, Human
uuaacuauugcauuuauaugu

SEQ ID NO: 1497921 - RNA, 22 nt, Human
uuaacuauugcauuuauaugua

SEQ ID NO: 1497922 - RNA, 16 nt, Human
uguuuuuuuguuauua

SEQ ID NO: 1497923 - RNA, 18 nt, Human
uguuuuuuuguuauuaaa

SEQ ID NO: 1497924 - RNA, 18 nt, Human
uguuuuuuuuuaaagacu

SEQ ID NO: 1497925 - RNA, 13 nt, Human
uuaaaagaaugau

SEQ ID NO: 1497926 - RNA, 22 nt, Human
uguuucaaacauauauaacaau

SEQ ID NO: 1497927 - RNA, 21 nt, Human
uguuucaaacauauauaacaa

SEQ ID NO: 1497928 - RNA, 18 nt, Human
uuucuuaaccagaucauu

SEQ ID NO: 1497929 - RNA, 21 nt, Human
uuugaaauuguauuacaaauc

SEQ ID NO: 1497930 - RNA, 13 nt, Human
uuugaaccaauaa

SEQ ID NO: 1497931 - RNA, 18 nt, Human
uuugaagcacagugauca

SEQ ID NO: 1497932 - RNA, 13 nt, Human
uuuguauucaaaa

SEQ ID NO: 1497933 - RNA, 18 nt, Human
uuugguaaggggaauuga

SEQ ID NO: 1497934 - RNA, 17 nt, Human
uuugauaugugaacagu

SEQ ID NO: 1497935 - RNA, 15 nt, Human
uuugauaugugaaca

SEQ ID NO: 1497936 - RNA, 14 nt, Human
uuugauaugugaac

SEQ ID NO: 1497937 - RNA, 19 nt, Human
uuugccacccucaugcugu

SEQ ID NO: 1497938 - RNA, 18 nt, Human
uuugccacccucaugcug

SEQ ID NO: 1497939 - RNA, 22 nt, Human
uuucuaaaguaaaaacaaagaa

SEQ ID NO: 1497940 - RNA, 17 nt, Human
uuucuaaaguaaaaaca

SEQ ID NO: 1497941 - RNA, 12 nt, Human
uuucucuaggaa

SEQ ID NO: 1497942 - RNA, 19 nt, Human
uuucugaaauuuccuggga

SEQ ID NO: 1497943 - RNA, 12 nt, Human
uuucugaaauuu

SEQ ID NO: 1497944 - RNA, 22 nt, Human
uuuaugauacuugaaaauuaac

SEQ ID NO: 1497945 - RNA, 17 nt, Human
uuuauggcacuaguauu

SEQ ID NO: 1497946 - RNA, 17 nt, Human
uuuaguugcaacuuugu

SEQ ID NO: 1497947 - RNA, 18 nt, Human
uuuaguugcaacuuugua

SEQ ID NO: 1497948 - RNA, 14 nt, Human
uuuaaccucuaaau

SEQ ID NO: 1497949 - RNA, 14 nt, Human
uuuaauaaacacuc

SEQ ID NO: 1497950 - RNA, 15 nt, Human
uuuaauaaacacucu

SEQ ID NO: 1497951 - RNA, 19 nt, Human
uuuaauaauguuucaaaca

SEQ ID NO: 1497952 - RNA, 15 nt, Human
uuuaauaauguuuca

SEQ ID NO: 1497953 - RNA, 22 nt, Human
uuuaauaaacacucuugaaaaa

SEQ ID NO: 1497954 - RNA, 16 nt, Human
uuuacauggcuggagc

SEQ ID NO: 1497955 - RNA, 17 nt, Human
uuuaaaagaaugauuau

SEQ ID NO: 1497956 - RNA, 14 nt, Human
uuuaaaagaaugau

SEQ ID NO: 1497957 - RNA, 17 nt, Human
uuuaaaaggaaagaaaa

SEQ ID NO: 1497958 - RNA, 16 nt, Human
uuuaaaauuacaacua

SEQ ID NO: 1497959 - RNA, 12 nt, Human
uuuaaaaugucu

SEQ ID NO: 1497960 - RNA, 16 nt, Human
uuuaaaaugagaaauc

SEQ ID NO: 1497961 - RNA, 12 nt, Human
uuguuuuacaau

SEQ ID NO: 1497962 - RNA, 13 nt, Human
uuguuuuacaaua

SEQ ID NO: 1497963 - RNA, 15 nt, Human
uuguuauuaaacaaa

SEQ ID NO: 1497964 - RNA, 22 nt, Human
uugcagcccugcugcugccugc

SEQ ID NO: 1497965 - RNA, 19 nt, Human
uugccaggcuggagugcag

SEQ ID NO: 1497966 - RNA, 23 nt, Human
uugccaggcuggagugcaguggc

SEQ ID NO: 1497967 - RNA, 16 nt, Human
uugcauaacguauaaa

SEQ ID NO: 1497968 - RNA, 17 nt, Human
uugauccagaaagaaaa

SEQ ID NO: 1497969 - RNA, 16 nt, Human
uugauaugugaacagu

SEQ ID NO: 1497970 - RNA, 20 nt, Human
uugauaugccuuuucccaac

SEQ ID NO: 1497971 - RNA, 18 nt, Human
uucuuaugccauauaauu

SEQ ID NO: 1497972 - RNA, 19 nt, Human
uucuuaggguuaugauuaa

SEQ ID NO: 1497973 - RNA, 21 nt, Human
uugaaaaucuuauaauuuaaa

SEQ ID NO: 1497974 - RNA, 18 nt, Human
uugaaaauuaacaugaau

SEQ ID NO: 1497975 - RNA, 16 nt, Human
uugaagagguuuuaaa

SEQ ID NO: 1497976 - RNA, 20 nt, Human
uugaagcacagugaucaagu

SEQ ID NO: 1497977 - RNA, 21 nt, Human
uugaagagguuuuaaagcuuc

SEQ ID NO: 1497978 - RNA, 20 nt, Human
uugguaaggggaauugagga

SEQ ID NO: 1497979 - RNA, 15 nt, Human
uuguagcauccugga

SEQ ID NO: 1497980 - RNA, 22 nt, Human
uuguagaagucacauuccugaa

SEQ ID NO: 1497981 - RNA, 17 nt, Human
uuguagaagucacauuc

SEQ ID NO: 1497982 - RNA, 18 nt, Human
uuguacuuuagggaagua

SEQ ID NO: 1497983 - RNA, 13 nt, Human
uugccuuaaaaua

SEQ ID NO: 1497984 - RNA, 18 nt, Human
uugcuaagcauuccaacu

SEQ ID NO: 1497985 - RNA, 16 nt, Human
uugcuaagcauuccaa

SEQ ID NO: 1497986 - RNA, 18 nt, Human
uuggacaaaauggaauac

SEQ ID NO: 1497987 - RNA, 15 nt, Human
cugacagccgcugcu

SEQ ID NO: 1497988 - RNA, 21 nt, Human
cccaguaucucuucagucucu

SEQ ID NO: 1497989 - RNA, 22 nt, Human
cccuggucccucugcagucucu

SEQ ID NO: 1497990 - RNA, 17 nt, Human
cagugggccccgcugca

SEQ ID NO: 1497991 - RNA, 18 nt, Human
gaggccagagagggcgug

SEQ ID NO: 1497992 - RNA, 17 nt, Human
agagacuuuagggggug

SEQ ID NO: 1497993 - RNA, 17 nt, Human
aaaagaaagaaaaucag

SEQ ID NO: 1497994 - RNA, 12 nt, Human
aaaagaauauuu

SEQ ID NO: 1497995 - RNA, 20 nt, Human
aaaagacaaggaaaaaauaa

SEQ ID NO: 1497996 - RNA, 13 nt, Human
aaaagaauauuuu

SEQ ID NO: 1497997 - RNA, 11 nt, Human
aaaagaaugau

SEQ ID NO: 1497998 - RNA, 13 nt, Human
aaaagacuccaaa

SEQ ID NO: 1497999 - RNA, 11 nt, Human
aaaagaaaaag

SEQ ID NO: 1498000 - RNA, 19 nt, Human
aaaacacuguucucugccc

SEQ ID NO: 1498001 - RNA, 17 nt, Human
aaaacacauuuuucuua

SEQ ID NO: 1498002 - RNA, 17 nt, Human
aaaagaugaaaauauuu

SEQ ID NO: 1498003 - RNA, 18 nt, Human
aaaaguugaauuuuacau

SEQ ID NO: 1498004 - RNA, 14 nt, Human
aaaauaaaacuuuu

SEQ ID NO: 1498005 - RNA, 16 nt, Human
aaaauaaaacuuuuua

SEQ ID NO: 1498006 - RNA, 13 nt, Human
aaaaucagccugc

SEQ ID NO: 1498007 - RNA, 17 nt, Human
aaaaucagccugcucca

SEQ ID NO: 1498008 - RNA, 21 nt, Human
aaaaucagccugcuccagcug

SEQ ID NO: 1498009 - RNA, 10 nt, Human
aaaaucauuu

SEQ ID NO: 1498010 - RNA, 11 nt, Human
aaaaucauuuc

SEQ ID NO: 1498011 - RNA, 12 nt, Human
aaaaucauuucu

SEQ ID NO: 1498012 - RNA, 22 nt, Human
aaaccgaacugauguaaguaaa

SEQ ID NO: 1498013 - RNA, 18 nt, Human
aaacccagcucuggucca

SEQ ID NO: 1498014 - RNA, 12 nt, Human
aaacccagcucu

SEQ ID NO: 1498015 - RNA, 16 nt, Human
aaacccagcucugguc

SEQ ID NO: 1498016 - RNA, 15 nt, Human
aaaccgccaaggcug

SEQ ID NO: 1498017 - RNA, 16 nt, Human
aaaccgccaaggcugg

SEQ ID NO: 1498018 - RNA, 15 nt, Human
aaacugcacugucaa

SEQ ID NO: 1498019 - RNA, 12 nt, Human
aaacucuuaaaa

SEQ ID NO: 1498020 - RNA, 23 nt, Human
aaacucuuaaaacccaagugccu

SEQ ID NO: 1498021 - RNA, 23 nt, Human
aaacugauuuuuuuuuccuucag

SEQ ID NO: 1498022 - RNA, 21 nt, Human
aaaaucauuucugcaucagcu

SEQ ID NO: 1498023 - RNA, 16 nt, Human
aaaaucucaaauuucu

SEQ ID NO: 1498024 - RNA, 15 nt, Human
aaaaucucaaauuuc

SEQ ID NO: 1498025 - RNA, 18 nt, Human
aaaaucucaaauuucuaa

SEQ ID NO: 1498026 - RNA, 19 nt, Human
aaagcauuguaaaugugcu

SEQ ID NO: 1498027 - RNA, 13 nt, Human
aaagccugcaauu

SEQ ID NO: 1498028 - RNA, 18 nt, Human
aaagccugcaauuucaua

SEQ ID NO: 1498029 - RNA, 15 nt, Human
aaagcauuguaaaug

SEQ ID NO: 1498030 - RNA, 17 nt, Human
aaagcauuguaaaugug

SEQ ID NO: 1498031 - RNA, 11 nt, Human
aacaucuuuuc

SEQ ID NO: 1498032 - RNA, 15 nt, Human
aacaucuuuucuugc

SEQ ID NO: 1498033 - RNA, 22 nt, Human
aacauggccuuugcuugaaaga

SEQ ID NO: 1498034 - RNA, 11 nt, Human
aacaggcagau

SEQ ID NO: 1498035 - RNA, 18 nt, Human
aacagccacuacauuacu

SEQ ID NO: 1498036 - RNA, 18 nt, Human
aaauucuugcaaaguauc

SEQ ID NO: 1498037 - RNA, 15 nt, Human
aaauucuugcaaagu

SEQ ID NO: 1498038 - RNA, 23 nt, Human
aaauucuucuccacuuucuagcc

SEQ ID NO: 1498039 - RNA, 16 nt, Human
aaccuuuugagugccu

SEQ ID NO: 1498040 - RNA, 23 nt, Human
aaccuuuugagugccuuacacaa

SEQ ID NO: 1498041 - RNA, 23 nt, Human
aacauggccuuugcuugaaagaa

SEQ ID NO: 1498042 - RNA, 22 nt, Human
aaauguugacaugggacauuug

SEQ ID NO: 1498043 - RNA, 17 nt, Human
aaauguucaucaaugaa

SEQ ID NO: 1498044 - RNA, 13 nt, Human
aaauguucaucaa

SEQ ID NO: 1498045 - RNA, 23 nt, Human
aaauguugacaugggacauuugc

SEQ ID NO: 1498046 - RNA, 21 nt, Human
aaauauuuauuuuaauaaugu

SEQ ID NO: 1498047 - RNA, 19 nt, Human
aaaugcuguaacuuucuga

SEQ ID NO: 1498048 - RNA, 18 nt, Human
aaaucucaauauuucaga

SEQ ID NO: 1498049 - RNA, 23 nt, Human
aaaucucaaauuuggauugcuaa

SEQ ID NO: 1498050 - RNA, 19 nt, Human
aaaucuccaaaauaaaacu

SEQ ID NO: 1498051 - RNA, 13 nt, Human
aaaucuuuuugcu

SEQ ID NO: 1498052 - RNA, 14 nt, Human
aaaucuuuuugcuu

SEQ ID NO: 1498053 - RNA, 20 nt, Human
aaaggaugcccaaagaugca

SEQ ID NO: 1498054 - RNA, 13 nt, Human
aagcuacuuauug

SEQ ID NO: 1498055 - RNA, 16 nt, Human
aagcgugagccacugc

SEQ ID NO: 1498056 - RNA, 15 nt, Human
aagcgugagccacug

SEQ ID NO: 1498057 - RNA, 14 nt, Human
aagcggcuggcagc

SEQ ID NO: 1498058 - RNA, 18 nt, Human
aagccauaauuguucuua

SEQ ID NO: 1498059 - RNA, 19 nt, Human
aagauaauauuaaggaaga

SEQ ID NO: 1498060 - RNA, 21 nt, Human
aagauaauauuaaggaagaca

SEQ ID NO: 1498061 - RNA, 23 nt, Human
aagauacaguuacucagaauucu

SEQ ID NO: 1498062 - RNA, 17 nt, Human
aagauacaguuacucag

SEQ ID NO: 1498063 - RNA, 16 nt, Human
aaggcaaggcugucaa

SEQ ID NO: 1498064 - RNA, 15 nt, Human
aaggcaaggcuguca

SEQ ID NO: 1498065 - RNA, 13 nt, Human
aaggcaaggcugu

SEQ ID NO: 1498066 - RNA, 22 nt, Human
aagcuagacgagcaggcuucuu

SEQ ID NO: 1498067 - RNA, 13 nt, Human
aagcugcacccuc

SEQ ID NO: 1498068 - RNA, 19 nt, Human
aagcugcacccucaggcag

SEQ ID NO: 1498069 - RNA, 14 nt, Human
aagagagaaaauaa

SEQ ID NO: 1498070 - RNA, 23 nt, Human
aagacagauacuccuccaagguu

SEQ ID NO: 1498071 - RNA, 15 nt, Human
aagacagagcuggga

SEQ ID NO: 1498072 - RNA, 16 nt, Human
aagacagagcugggau

SEQ ID NO: 1498073 - RNA, 17 nt, Human
aagaccacguuucuaaa

SEQ ID NO: 1498074 - RNA, 15 nt, Human
aagaccacguuucua

SEQ ID NO: 1498075 - RNA, 21 nt, Human
aagacuuuuccaacccucauc

SEQ ID NO: 1498076 - RNA, 12 nt, Human
aagacuuuucuu

SEQ ID NO: 1498077 - RNA, 19 nt, Human
aagacuuuucuuucagcca

SEQ ID NO: 1498078 - RNA, 13 nt, Human
aagagaaaaaaua

SEQ ID NO: 1498079 - RNA, 17 nt, Human
aagaacggggcucuucu

SEQ ID NO: 1498080 - RNA, 20 nt, Human
aagaacuacaaacaaaauuu

SEQ ID NO: 1498081 - RNA, 21 nt, Human
aagaacuacaaacaaaauuuc

SEQ ID NO: 1498082 - RNA, 18 nt, Human
aagaacggggcucuucuc

SEQ ID NO: 1498083 - RNA, 21 nt, Human
aagaacggggcucuucucauu

SEQ ID NO: 1498084 - RNA, 22 nt, Human
aagaacggggcucuucucauuu

SEQ ID NO: 1498085 - RNA, 23 nt, Human
aagaacggggcucuucucauuuc

SEQ ID NO: 1498086 - RNA, 20 nt, Human
aacgcaggcccccaggugcc

SEQ ID NO: 1498087 - RNA, 11 nt, Human
aagaacugaaa

SEQ ID NO: 1498088 - RNA, 12 nt, Human
aagaacugaaau

SEQ ID NO: 1498089 - RNA, 13 nt, Human
aagaacugaaauc

SEQ ID NO: 1498090 - RNA, 15 nt, Human
aagaacugaaaucau

SEQ ID NO: 1498091 - RNA, 21 nt, Human
aagacaaggaaaaaauaacaa

SEQ ID NO: 1498092 - RNA, 20 nt, Human
aagaagacugcauuauauuu

SEQ ID NO: 1498093 - RNA, 15 nt, Human
aagaagacugcauua

SEQ ID NO: 1498094 - RNA, 22 nt, Human
aagacaaugacuuacuguacau

SEQ ID NO: 1498095 - RNA, 19 nt, Human
aagacaaugugaaaagaaa

SEQ ID NO: 1498096 - RNA, 20 nt, Human
aagacaaugugaaaagaaaa

SEQ ID NO: 1498097 - RNA, 23 nt, Human
aagacaauggcuuacuccaggag

SEQ ID NO: 1498098 - RNA, 15 nt, Human
aagagucgcugugcc

SEQ ID NO: 1498099 - RNA, 22 nt, Human
aagagucgcugugccacaggcu

SEQ ID NO: 1498100 - RNA, 19 nt, Human
aagaguauuuuugacagaa

SEQ ID NO: 1498101 - RNA, 16 nt, Human
aagaguaguaauagag

SEQ ID NO: 1498102 - RNA, 22 nt, Human
aaguuguaggcauaaagucagg

SEQ ID NO: 1498103 - RNA, 22 nt, Human
aagugcugcauuuaaaagauac

SEQ ID NO: 1498104 - RNA, 22 nt, Human
aagugcugggauuacaggugug

SEQ ID NO: 1498105 - RNA, 12 nt, Human
aagugcugggau

SEQ ID NO: 1498106 - RNA, 22 nt, Human
aauaaugugaaacuggauuaaa

SEQ ID NO: 1498107 - RNA, 17 nt, Human
aauaaugugaaacugga

SEQ ID NO: 1498108 - RNA, 14 nt, Human
aauaaagcagcguu

SEQ ID NO: 1498109 - RNA, 19 nt, Human
aauaauguuaacauggaca

SEQ ID NO: 1498110 - RNA, 16 nt, Human
aaucucaauauuucag

SEQ ID NO: 1498111 - RNA, 16 nt, Human
aaucucauaauuuaua

SEQ ID NO: 1498112 - RNA, 20 nt, Human
aaugaagauacugaaauaaa

SEQ ID NO: 1498113 - RNA, 21 nt, Human
aaugaaagacuguacaaagua

SEQ ID NO: 1498114 - RNA, 20 nt, Human
aaugaaagacuguacaaagu

SEQ ID NO: 1498115 - RNA, 20 nt, Human
aaugaauacuuuauaaagga

SEQ ID NO: 1498116 - RNA, 20 nt, Human
aaugaugccaugaggaacaa

SEQ ID NO: 1498117 - RNA, 23 nt, Human
aauauguggaguucaucuugaau

SEQ ID NO: 1498118 - RNA, 13 nt, Human
aauauuaagaaag

SEQ ID NO: 1498119 - RNA, 23 nt, Human
aaucaccgaaaacguggcugcuu

SEQ ID NO: 1498120 - RNA, 21 nt, Human
aaucaccgaaaacguggcugc

SEQ ID NO: 1498121 - RNA, 23 nt, Human
acccucaucaccaacgucugugc

SEQ ID NO: 1498122 - RNA, 23 nt, Human
acccuggcacuauaauguaagcu

SEQ ID NO: 1498123 - RNA, 13 nt, Human
acccucaggcagg

SEQ ID NO: 1498124 - RNA, 14 nt, Human
acccucaggcaggu

SEQ ID NO: 1498125 - RNA, 13 nt, Human
acccucaucacca

SEQ ID NO: 1498126 - RNA, 15 nt, Human
acccucaggcaggug

SEQ ID NO: 1498127 - RNA, 16 nt, Human
acccucaggcaggugg

SEQ ID NO: 1498128 - RNA, 16 nt, Human
acccuggggagaaagu

SEQ ID NO: 1498129 - RNA, 16 nt, Human
acccugugauggggcc

SEQ ID NO: 1498130 - RNA, 21 nt, Human
acccugucucuacuaaaaaua

SEQ ID NO: 1498131 - RNA, 14 nt, Human
acccuauugcugcu

SEQ ID NO: 1498132 - RNA, 19 nt, Human
acccuauugcugcuugagg

SEQ ID NO: 1498133 - RNA, 13 nt, Human
acccuauugcugc

SEQ ID NO: 1498134 - RNA, 18 nt, Human
accgugaggccagagaca

SEQ ID NO: 1498135 - RNA, 12 nt, Human
accucagccucc

SEQ ID NO: 1498136 - RNA, 23 nt, Human
accgugaggccagagacacaagc

SEQ ID NO: 1498137 - RNA, 17 nt, Human
acccugugauggggccc

SEQ ID NO: 1498138 - RNA, 19 nt, Human
acccugugauggggcccug

SEQ ID NO: 1498139 - RNA, 20 nt, Human
acccugugauggggcccugc

SEQ ID NO: 1498140 - RNA, 21 nt, Human
acccugugauggggcccugcc

SEQ ID NO: 1498141 - RNA, 12 nt, Human
accgggcacuca

SEQ ID NO: 1498142 - RNA, 14 nt, Human
accgggcacucaga

SEQ ID NO: 1498143 - RNA, 16 nt, Human
accgggcacucagaag

SEQ ID NO: 1498144 - RNA, 20 nt, Human
accgggcacucagaagacac

SEQ ID NO: 1498145 - RNA, 11 nt, Human
accucaggccu

SEQ ID NO: 1498146 - RNA, 20 nt, Human
accucaggugauccacccac

SEQ ID NO: 1498147 - RNA, 21 nt, Human
accucaggugauccacccacc

SEQ ID NO: 1498148 - RNA, 13 nt, Human
acgucuuaaauau

SEQ ID NO: 1498149 - RNA, 14 nt, Human
acgucuuaaauauu

SEQ ID NO: 1498150 - RNA, 13 nt, Human
acgucugugccau

SEQ ID NO: 1498151 - RNA, 19 nt, Human
acggaauaguuggcuagga

SEQ ID NO: 1498152 - RNA, 17 nt, Human
acggacacucaaaagcu

SEQ ID NO: 1498153 - RNA, 19 nt, Human
acggacacucaaaagcugg

SEQ ID NO: 1498154 - RNA, 19 nt, Human
acgcaggcccccaggugcc

SEQ ID NO: 1498155 - RNA, 22 nt, Human
acgcugugcugcccugcccacc

SEQ ID NO: 1498156 - RNA, 19 nt, Human
acgcugugcugcccugccc

SEQ ID NO: 1498157 - RNA, 23 nt, Human
acgauuucuguuuagauaauaca

SEQ ID NO: 1498158 - RNA, 20 nt, Human
acgauuucuguuuagauaau

SEQ ID NO: 1498159 - RNA, 20 nt, Human
acuaauguguaagacaaaaa

SEQ ID NO: 1498160 - RNA, 18 nt, Human
acuaauggggcggugaga

SEQ ID NO: 1498161 - RNA, 21 nt, Human
accugccaggaagccagcagg

SEQ ID NO: 1498162 - RNA, 22 nt, Human
accugccaggaagccagcaggc

SEQ ID NO: 1498163 - RNA, 23 nt, Human
accugccaggaagccagcaggcu

SEQ ID NO: 1498164 - RNA, 12 nt, Human
accugccccuca

SEQ ID NO: 1498165 - RNA, 15 nt, Human
accugccccucaacu

SEQ ID NO: 1498166 - RNA, 20 nt, Human
accugccccucaacucuccu

SEQ ID NO: 1498167 - RNA, 12 nt, Human
accucugccuga

SEQ ID NO: 1498168 - RNA, 20 nt, Human
accucugccugaagucacac

SEQ ID NO: 1498169 - RNA, 23 nt, Human
accucugccugaagucacacagu

SEQ ID NO: 1498170 - RNA, 12 nt, Human
accuuggcucaa

SEQ ID NO: 1498171 - RNA, 13 nt, Human
acugaauuaugaa

SEQ ID NO: 1498172 - RNA, 14 nt, Human
acugaauuaugaaa

SEQ ID NO: 1498173 - RNA, 15 nt, Human
acugaauuaugaaac

SEQ ID NO: 1498174 - RNA, 20 nt, Human
acugaauuaugaaacuuuug

SEQ ID NO: 1498175 - RNA, 12 nt, Human
acugaauuucuu

SEQ ID NO: 1498176 - RNA, 13 nt, Human
acucuacccucuu

SEQ ID NO: 1498177 - RNA, 23 nt, Human
acugaauuucuuuugccguuauu

SEQ ID NO: 1498178 - RNA, 16 nt, Human
acugacagauuuccau

SEQ ID NO: 1498179 - RNA, 17 nt, Human
acugacauuguuggcca

SEQ ID NO: 1498180 - RNA, 18 nt, Human
acugacauuguuggccaa

SEQ ID NO: 1498181 - RNA, 19 nt, Human
acugauaugggucuugaua

SEQ ID NO: 1498182 - RNA, 22 nt, Human
acugacauuguuggccaaagcc

SEQ ID NO: 1498183 - RNA, 16 nt, Human
acugauuuuuuuuucc

SEQ ID NO: 1498184 - RNA, 17 nt, Human
acugauuuuuuuuuccu

SEQ ID NO: 1498185 - RNA, 18 nt, Human
acugauuuuuuuuuccuu

SEQ ID NO: 1498186 - RNA, 19 nt, Human
acugauuuuuuuuuccuuc

SEQ ID NO: 1498187 - RNA, 20 nt, Human
acugauuuuuuuuuccuuca

SEQ ID NO: 1498188 - RNA, 14 nt, Human
acucguuaauuugu

SEQ ID NO: 1498189 - RNA, 19 nt, Human
acucguuaauuuguagugu

SEQ ID NO: 1498190 - RNA, 15 nt, Human
acucuacagaggcca

SEQ ID NO: 1498191 - RNA, 22 nt, Human
acucccaucugugaaaggaaag

SEQ ID NO: 1498192 - RNA, 14 nt, Human
acucccuuucaaca

SEQ ID NO: 1498193 - RNA, 17 nt, Human
acuucagcgguuuauau

SEQ ID NO: 1498194 - RNA, 16 nt, Human
acuucaaacugagauc

SEQ ID NO: 1498195 - RNA, 21 nt, Human
acuucagacauagaauuaaca

SEQ ID NO: 1498196 - RNA, 13 nt, Human
acuuggucuguga

SEQ ID NO: 1498197 - RNA, 23 nt, Human
acuuggggggcugaggugggagg

SEQ ID NO: 1498198 - RNA, 17 nt, Human
acuucaaauccuugaag

SEQ ID NO: 1498199 - RNA, 18 nt, Human
acuucaaauccuugaaga

SEQ ID NO: 1498200 - RNA, 19 nt, Human
acuucaaauccuugaagau

SEQ ID NO: 1498201 - RNA, 22 nt, Human
acuuaaaaaugguuuaaauggu

SEQ ID NO: 1498202 - RNA, 19 nt, Human
acuguuucaaacuuuacua

SEQ ID NO: 1498203 - RNA, 18 nt, Human
acuguuucaaacuuuacu

SEQ ID NO: 1498204 - RNA, 15 nt, Human
acuguuucaaacuuu

SEQ ID NO: 1498205 - RNA, 17 nt, Human
acuguaaaauaauaacu

SEQ ID NO: 1498206 - RNA, 12 nt, Human
acuggaacucuc

SEQ ID NO: 1498207 - RNA, 16 nt, Human
acugugaagagaacca

SEQ ID NO: 1498208 - RNA, 17 nt, Human
acugugccaugugccag

SEQ ID NO: 1498209 - RNA, 18 nt, Human
acugugccaugugccagg

SEQ ID NO: 1498210 - RNA, 23 nt, Human
acagugaucaaguuauuuuuaau

SEQ ID NO: 1498211 - RNA, 18 nt, Human
acaggcaaugcuggcugu

SEQ ID NO: 1498212 - RNA, 23 nt, Human
acaggcacccaccaucaugucug

SEQ ID NO: 1498213 - RNA, 19 nt, Human
acagugauuaccagggacu

SEQ ID NO: 1498214 - RNA, 20 nt, Human
acagugauuaccagggacug

SEQ ID NO: 1498215 - RNA, 24 nt, Human
acaggaugguucccuugaugaaga

SEQ ID NO: 1498216 - RNA, 22 nt, Human
acaggaugguucccuugaugaa

SEQ ID NO: 1498217 - RNA, 14 nt, Human
acaggauuauugga

SEQ ID NO: 1498218 - RNA, 15 nt, Human
acaggcaaugcuggc

SEQ ID NO: 1498219 - RNA, 16 nt, Human
acaggcaaugcuggcu

SEQ ID NO: 1498220 - RNA, 17 nt, Human
acaggcaaugcuggcug

SEQ ID NO: 1498221 - RNA, 19 nt, Human
acagcucuucuccaggcug

SEQ ID NO: 1498222 - RNA, 20 nt, Human
acagcucuucuccaggcugu

SEQ ID NO: 1498223 - RNA, 15 nt, Human
acauuugcucaugga

SEQ ID NO: 1498224 - RNA, 16 nt, Human
acauuugcucauggaa

SEQ ID NO: 1498225 - RNA, 16 nt, Human
acauuuguauaaaaua

SEQ ID NO: 1498226 - RNA, 19 nt, Human
acauuuguauaaaauaauu

SEQ ID NO: 1498227 - RNA, 21 nt, Human
acauuuguauaaaauaauuuu

SEQ ID NO: 1498228 - RNA, 14 nt, Human
accaacgucugugc

SEQ ID NO: 1498229 - RNA, 17 nt, Human
accaacgucugugccau

SEQ ID NO: 1498230 - RNA, 21 nt, Human
accaacgucugugccauuuug

SEQ ID NO: 1498231 - RNA, 14 nt, Human
accacguuucuaaa

SEQ ID NO: 1498232 - RNA, 13 nt, Human
accacguuucuaa

SEQ ID NO: 1498233 - RNA, 19 nt, Human
accacgggcccggguuggg

SEQ ID NO: 1498234 - RNA, 18 nt, Human
accacgcuggaccuugaa

SEQ ID NO: 1498235 - RNA, 16 nt, Human
accacgcuggaccuug

SEQ ID NO: 1498236 - RNA, 19 nt, Human
accagagcugccaccugcc

SEQ ID NO: 1498237 - RNA, 13 nt, Human
accagagcugcca

SEQ ID NO: 1498238 - RNA, 14 nt, Human
accagagcugccac

SEQ ID NO: 1498239 - RNA, 16 nt, Human
accagagcugccaccu

SEQ ID NO: 1498240 - RNA, 20 nt, Human
acaucccuuaccugggaaag

SEQ ID NO: 1498241 - RNA, 13 nt, Human
acaugcacgugug

SEQ ID NO: 1498242 - RNA, 21 nt, Human
acauaaguaauucaagaaaac

SEQ ID NO: 1498243 - RNA, 15 nt, Human
acauaagauaaaugu

SEQ ID NO: 1498244 - RNA, 16 nt, Human
acauacaauuccaaac

SEQ ID NO: 1498245 - RNA, 21 nt, Human
acauaaugcgugcauaccacu

SEQ ID NO: 1498246 - RNA, 20 nt, Human
acauacaggaagguagaaau

SEQ ID NO: 1498247 - RNA, 19 nt, Human
acauguuuuucuucucccu

SEQ ID NO: 1498248 - RNA, 12 nt, Human
aauuaugaaacu

SEQ ID NO: 1498249 - RNA, 13 nt, Human
aauuaugaaacuu

SEQ ID NO: 1498250 - RNA, 15 nt, Human
aauuaugaaacuuuu

SEQ ID NO: 1498251 - RNA, 18 nt, Human
aauuaugaaacuuuugga

SEQ ID NO: 1498252 - RNA, 19 nt, Human
aauuaugaguuauuuuuau

SEQ ID NO: 1498253 - RNA, 15 nt, Human
aauuauauaaguauu

SEQ ID NO: 1498254 - RNA, 16 nt, Human
aauuauauaaguauuc

SEQ ID NO: 1498255 - RNA, 17 nt, Human
aauuauauaaguauucu

SEQ ID NO: 1498256 - RNA, 14 nt, Human
aauucuacuuugag

SEQ ID NO: 1498257 - RNA, 14 nt, Human
aauucuaacuuuuu

SEQ ID NO: 1498258 - RNA, 19 nt, Human
aauucucagaaucucaaau

SEQ ID NO: 1498259 - RNA, 17 nt, Human
aauucucuaguuugauu

SEQ ID NO: 1498260 - RNA, 15 nt, Human
aauucucuaguuuga

SEQ ID NO: 1498261 - RNA, 15 nt, Human
aauucucuuauccaa

SEQ ID NO: 1498262 - RNA, 21 nt, Human
aauucucauuugucacacacu

SEQ ID NO: 1498263 - RNA, 22 nt, Human
aauuguaaggaaugauuaauua

SEQ ID NO: 1498264 - RNA, 14 nt, Human
aauucuguuuuucu

SEQ ID NO: 1498265 - RNA, 18 nt, Human
aauucuguuuuucuaggc

SEQ ID NO: 1498266 - RNA, 13 nt, Human
aauucuuaaauau

SEQ ID NO: 1498267 - RNA, 17 nt, Human
aauuuccugggagcuuu

SEQ ID NO: 1498268 - RNA, 12 nt, Human
aauuuccuggga

SEQ ID NO: 1498269 - RNA, 15 nt, Human
aauuuccugggagcu

SEQ ID NO: 1498270 - RNA, 11 nt, Human
aauuguaauag

SEQ ID NO: 1498271 - RNA, 15 nt, Human
aauuucccaaagcag

SEQ ID NO: 1498272 - RNA, 17 nt, Human
aauuucccaaagcagug

SEQ ID NO: 1498273 - RNA, 16 nt, Human
aauuucauaugcugua

SEQ ID NO: 1498274 - RNA, 18 nt, Human
aauuucauaugcuguaua

SEQ ID NO: 1498275 - RNA, 19 nt, Human
acacagcucuucuccaggc

SEQ ID NO: 1498276 - RNA, 18 nt, Human
acacagcucuucuccagg

SEQ ID NO: 1498277 - RNA, 15 nt, Human
acaccaauauucaua

SEQ ID NO: 1498278 - RNA, 18 nt, Human
acaccagagcccaccuug

SEQ ID NO: 1498279 - RNA, 23 nt, Human
acaccagagcccaccuuggcuca

SEQ ID NO: 1498280 - RNA, 14 nt, Human
acacagcucuucuc

SEQ ID NO: 1498281 - RNA, 16 nt, Human
acacagcucuucucca

SEQ ID NO: 1498282 - RNA, 19 nt, Human
acaaacaugugguuaaugc

SEQ ID NO: 1498283 - RNA, 22 nt, Human
acaacauguauaauauuuuuaa

SEQ ID NO: 1498284 - RNA, 16 nt, Human
acaaggcaaggcuguc

SEQ ID NO: 1498285 - RNA, 17 nt, Human
acaaggcaaggcuguca

SEQ ID NO: 1498286 - RNA, 19 nt, Human
acaaggcaaggcugucaau

SEQ ID NO: 1498287 - RNA, 20 nt, Human
acaaggcaaggcugucaauu

SEQ ID NO: 1498288 - RNA, 15 nt, Human
acaaguuaaauaaau

SEQ ID NO: 1498289 - RNA, 14 nt, Human
aggagugagcacua

SEQ ID NO: 1498290 - RNA, 15 nt, Human
aggaggucucuaaga

SEQ ID NO: 1498291 - RNA, 12 nt, Human
aggagugagcac

SEQ ID NO: 1498292 - RNA, 14 nt, Human
aggagggcagcaga

SEQ ID NO: 1498293 - RNA, 14 nt, Human
aggaggucucuaag

SEQ ID NO: 1498294 - RNA, 14 nt, Human
aggagacccacagg

SEQ ID NO: 1498295 - RNA, 13 nt, Human
aggaaguagagga

SEQ ID NO: 1498296 - RNA, 19 nt, Human
aggaaguacuggagaaaau

SEQ ID NO: 1498297 - RNA, 22 nt, Human
aggauguucuagcauggcugcc

SEQ ID NO: 1498298 - RNA, 12 nt, Human
aggcauguucuc

SEQ ID NO: 1498299 - RNA, 23 nt, Human
aggcaugugaugagaggaaauca

SEQ ID NO: 1498300 - RNA, 24 nt, Human
aggcaugugaugagaggaaaucac

SEQ ID NO: 1498301 - RNA, 18 nt, Human
aggcagccaggccacaag

SEQ ID NO: 1498302 - RNA, 21 nt, Human
aggcauuccccaggaggccag

SEQ ID NO: 1498303 - RNA, 20 nt, Human
aggcauguucucugaggaca

SEQ ID NO: 1498304 - RNA, 22 nt, Human
aggcauguucucugaggacacu

SEQ ID NO: 1498305 - RNA, 17 nt, Human
aggcauuccccaggagg

SEQ ID NO: 1498306 - RNA, 22 nt, Human
aggcauuccccaggaggccagc

SEQ ID NO: 1498307 - RNA, 23 nt, Human
aggcauuccccaggaggccagcc

SEQ ID NO: 1498308 - RNA, 23 nt, Human
aggccagcugcuugggcuucauc

SEQ ID NO: 1498309 - RNA, 14 nt, Human
aggccaugggccuc

SEQ ID NO: 1498310 - RNA, 16 nt, Human
aggccaugggccuccu

SEQ ID NO: 1498311 - RNA, 17 nt, Human
aggccaugggccuccug

SEQ ID NO: 1498312 - RNA, 17 nt, Human
aggcccucugcccacuc

SEQ ID NO: 1498313 - RNA, 13 nt, Human
aggccagcugcuu

SEQ ID NO: 1498314 - RNA, 14 nt, Human
aggccagcugcuug

SEQ ID NO: 1498315 - RNA, 16 nt, Human
aggccagcugcuuggg

SEQ ID NO: 1498316 - RNA, 17 nt, Human
aggccaggcccucugcc

SEQ ID NO: 1498317 - RNA, 18 nt, Human
aggccaggcccucugccc

SEQ ID NO: 1498318 - RNA, 19 nt, Human
aggccaggcccucugccca

SEQ ID NO: 1498319 - RNA, 23 nt, Human
aggccaggcccucugcccacucc

SEQ ID NO: 1498320 - RNA, 20 nt, Human
aggcagagguugcagugagc

SEQ ID NO: 1498321 - RNA, 13 nt, Human
aggcagauacagg

SEQ ID NO: 1498322 - RNA, 14 nt, Human
aggcagccaggcca

SEQ ID NO: 1498323 - RNA, 15 nt, Human
aggcagccaggccac

SEQ ID NO: 1498324 - RNA, 16 nt, Human
aggcagccaggccaca

SEQ ID NO: 1498325 - RNA, 19 nt, Human
agggcguggaaaggggcag

SEQ ID NO: 1498326 - RNA, 18 nt, Human
agggccuggcucaggugg

SEQ ID NO: 1498327 - RNA, 13 nt, Human
agggccuggcuca

SEQ ID NO: 1498328 - RNA, 14 nt, Human
agggccuggcucag

SEQ ID NO: 1498329 - RNA, 21 nt, Human
agggacaggaccccagcucug

SEQ ID NO: 1498330 - RNA, 17 nt, Human
agggacaggauaagagg

SEQ ID NO: 1498331 - RNA, 24 nt, Human
aggcuguaucccaugagccucagc

SEQ ID NO: 1498332 - RNA, 19 nt, Human
aggcugucaauuacaggaa

SEQ ID NO: 1498333 - RNA, 12 nt, Human
aggcugucaauu

SEQ ID NO: 1498334 - RNA, 17 nt, Human
aggcugcagugagccga

SEQ ID NO: 1498335 - RNA, 19 nt, Human
aggcugcagugagccgaga

SEQ ID NO: 1498336 - RNA, 21 nt, Human
aggcccucugcccacucccug

SEQ ID NO: 1498337 - RNA, 19 nt, Human
aggcccucugcccacuccc

SEQ ID NO: 1498338 - RNA, 20 nt, Human
aggcccucugcccacucccu

SEQ ID NO: 1498339 - RNA, 17 nt, Human
agcuguaugauucccag

SEQ ID NO: 1498340 - RNA, 18 nt, Human
agcuguaugauucccagc

SEQ ID NO: 1498341 - RNA, 18 nt, Human
aggaaaaaauaacaauga

SEQ ID NO: 1498342 - RNA, 19 nt, Human
agcuuuuuucucugauaca

SEQ ID NO: 1498343 - RNA, 20 nt, Human
agcuuuuuucucugauacag

SEQ ID NO: 1498344 - RNA, 22 nt, Human
agcuuuuuucucugauacagaa

SEQ ID NO: 1498345 - RNA, 23 nt, Human
agcuuuuuucucugauacagaaa

SEQ ID NO: 1498346 - RNA, 21 nt, Human
agcuuuguuuguugucagcug

SEQ ID NO: 1498347 - RNA, 22 nt, Human
agcuuuguuuguugucagcuga

SEQ ID NO: 1498348 - RNA, 15 nt, Human
aggaacacuccuuca

SEQ ID NO: 1498349 - RNA, 12 nt, Human
aggaacacuccu

SEQ ID NO: 1498350 - RNA, 12 nt, Human
aggaagaacggg

SEQ ID NO: 1498351 - RNA, 18 nt, Human
aggaagaacggggcucuu

SEQ ID NO: 1498352 - RNA, 22 nt, Human
aggaagaacggggcucuucuca

SEQ ID NO: 1498353 - RNA, 14 nt, Human
aggaagguagaaau

SEQ ID NO: 1498354 - RNA, 11 nt, Human
aggaaguacug

SEQ ID NO: 1498355 - RNA, 15 nt, Human
aggaaguacuggaga

SEQ ID NO: 1498356 - RNA, 16 nt, Human
agcugguugagguuuc

SEQ ID NO: 1498357 - RNA, 21 nt, Human
agcuggugguaucugaguuga

SEQ ID NO: 1498358 - RNA, 16 nt, Human
agcuggucccacucag

SEQ ID NO: 1498359 - RNA, 15 nt, Human
agcuggucccacuca

SEQ ID NO: 1498360 - RNA, 14 nt, Human
agcugcugaaacaa

SEQ ID NO: 1498361 - RNA, 15 nt, Human
agcugcugaaacaac

SEQ ID NO: 1498362 - RNA, 16 nt, Human
agcugcugaaacaaca

SEQ ID NO: 1498363 - RNA, 20 nt, Human
agcugcugaaacaacaaaua

SEQ ID NO: 1498364 - RNA, 15 nt, Human
agcugacuuuucugu

SEQ ID NO: 1498365 - RNA, 21 nt, Human
agcugacuuuucuguccgagc

SEQ ID NO: 1498366 - RNA, 22 nt, Human
agcucaccagccccagugccca

SEQ ID NO: 1498367 - RNA, 23 nt, Human
agcucaccagccccagugcccac

SEQ ID NO: 1498368 - RNA, 19 nt, Human
agcuaacauggaaguacua

SEQ ID NO: 1498369 - RNA, 20 nt, Human
agcuaacauggaaguacuau

SEQ ID NO: 1498370 - RNA, 13 nt, Human
agcgacagugaga

SEQ ID NO: 1498371 - RNA, 15 nt, Human
agcgacagugagacu

SEQ ID NO: 1498372 - RNA, 17 nt, Human
agcgacagugagacucu

SEQ ID NO: 1498373 - RNA, 15 nt, Human
agcgauucuucugcu

SEQ ID NO: 1498374 - RNA, 17 nt, Human
agcgauucuucugcuuc

SEQ ID NO: 1498375 - RNA, 19 nt, Human
agcgauucuucugcuucag

SEQ ID NO: 1498376 - RNA, 13 nt, Human
agcuacaaaugca

SEQ ID NO: 1498377 - RNA, 13 nt, Human
agcucaccagccc

SEQ ID NO: 1498378 - RNA, 14 nt, Human
agcucaccagcccc

SEQ ID NO: 1498379 - RNA, 15 nt, Human
agcucaccagcccca

SEQ ID NO: 1498380 - RNA, 21 nt, Human
agcucaccagccccagugccc

SEQ ID NO: 1498381 - RNA, 13 nt, Human
agcuaaugggaca

SEQ ID NO: 1498382 - RNA, 14 nt, Human
agcuaaugggacac

SEQ ID NO: 1498383 - RNA, 15 nt, Human
agcuaaugggacacu

SEQ ID NO: 1498384 - RNA, 14 nt, Human
agccuggacccugu

SEQ ID NO: 1498385 - RNA, 18 nt, Human
agccugggcaaugugaua

SEQ ID NO: 1498386 - RNA, 14 nt, Human
agauaugauucaaa

SEQ ID NO: 1498387 - RNA, 15 nt, Human
agauaugauucaaau

SEQ ID NO: 1498388 - RNA, 16 nt, Human
agauaugauucaaaug

SEQ ID NO: 1498389 - RNA, 20 nt, Human
agauagauaggucagugcaa

SEQ ID NO: 1498390 - RNA, 20 nt, Human
agauagccaaggccaaagga

SEQ ID NO: 1498391 - RNA, 14 nt, Human
agaguugaagacag

SEQ ID NO: 1498392 - RNA, 15 nt, Human
agaguugaagacaga

SEQ ID NO: 1498393 - RNA, 13 nt, Human
agaguugaagaca

SEQ ID NO: 1498394 - RNA, 20 nt, Human
agagggucugaggaauccag

SEQ ID NO: 1498395 - RNA, 19 nt, Human
agaggguggugaccucugc

SEQ ID NO: 1498396 - RNA, 16 nt, Human
agauugcaacaggcug

SEQ ID NO: 1498397 - RNA, 18 nt, Human
agauucuuuccugaggcu

SEQ ID NO: 1498398 - RNA, 15 nt, Human
agauucuuuccugag

SEQ ID NO: 1498399 - RNA, 16 nt, Human
agauucuuuccugagg

SEQ ID NO: 1498400 - RNA, 13 nt, Human
agcaaaauugaug

SEQ ID NO: 1498401 - RNA, 19 nt, Human
agcaaaauugauguguuua

SEQ ID NO: 1498402 - RNA, 16 nt, Human
agauugcaccacugca

SEQ ID NO: 1498403 - RNA, 17 nt, Human
agauugcaacaggcugg

SEQ ID NO: 1498404 - RNA, 19 nt, Human
agauugcaacaggcugggc

SEQ ID NO: 1498405 - RNA, 23 nt, Human
agcaaaauuuuuucucuaggaaa

SEQ ID NO: 1498406 - RNA, 23 nt, Human
agcaaaauugauguguuuauuua

SEQ ID NO: 1498407 - RNA, 19 nt, Human
agcaaauucuguuuuucua

SEQ ID NO: 1498408 - RNA, 18 nt, Human
agaugacaucugucuagg

SEQ ID NO: 1498409 - RNA, 22 nt, Human
agaugggugcuuggaggaagga

SEQ ID NO: 1498410 - RNA, 20 nt, Human
agaugggugcuuggaggaag

SEQ ID NO: 1498411 - RNA, 14 nt, Human
agauucuuuccuga

SEQ ID NO: 1498412 - RNA, 14 nt, Human
agccagauuucacu

SEQ ID NO: 1498413 - RNA, 17 nt, Human
agccagauuucacucuc

SEQ ID NO: 1498414 - RNA, 20 nt, Human
agccagauuucacucuccuu

SEQ ID NO: 1498415 - RNA, 22 nt, Human
agccagauuucacucuccuugg

SEQ ID NO: 1498416 - RNA, 22 nt, Human
agccagcaggcucucaggccag

SEQ ID NO: 1498417 - RNA, 21 nt, Human
agccagcaggcucucaggcca

SEQ ID NO: 1498418 - RNA, 23 nt, Human
agccagcaggcucucaggccagc

SEQ ID NO: 1498419 - RNA, 23 nt, Human
agcccaccccucaacaccucugc

SEQ ID NO: 1498420 - RNA, 13 nt, Human
agcccaaagaagg

SEQ ID NO: 1498421 - RNA, 14 nt, Human
agcccaaagaagga

SEQ ID NO: 1498422 - RNA, 13 nt, Human
agcccaccuuggc

SEQ ID NO: 1498423 - RNA, 17 nt, Human
agcccacgcccccacug

SEQ ID NO: 1498424 - RNA, 18 nt, Human
agcccacgcccccacugg

SEQ ID NO: 1498425 - RNA, 19 nt, Human
agcccacgcccccacuggu

SEQ ID NO: 1498426 - RNA, 14 nt, Human
agcccaccuuggcu

SEQ ID NO: 1498427 - RNA, 20 nt, Human
agcccacgcccccacuggug

SEQ ID NO: 1498428 - RNA, 13 nt, Human
agcaucuaucaga

SEQ ID NO: 1498429 - RNA, 16 nt, Human
agcaucuaugugagac

SEQ ID NO: 1498430 - RNA, 21 nt, Human
agcacagacccugcccugugg

SEQ ID NO: 1498431 - RNA, 17 nt, Human
agcagugcaugcugucc

SEQ ID NO: 1498432 - RNA, 18 nt, Human
agcagugcaugcuguccc

SEQ ID NO: 1498433 - RNA, 21 nt, Human
agcacugaggaagaacggggc

SEQ ID NO: 1498434 - RNA, 16 nt, Human
agcagccuggacccug

SEQ ID NO: 1498435 - RNA, 19 nt, Human
agcacugacuucuaaguaa

SEQ ID NO: 1498436 - RNA, 10 nt, Human
agcacugagg

SEQ ID NO: 1498437 - RNA, 11 nt, Human
agcacugagga

SEQ ID NO: 1498438 - RNA, 14 nt, Human
agcacugaggaaga

SEQ ID NO: 1498439 - RNA, 17 nt, Human
agcacugacuucuaagu

SEQ ID NO: 1498440 - RNA, 20 nt, Human
agcagccuggacccugugga

SEQ ID NO: 1498441 - RNA, 19 nt, Human
agcagcguuucuaugacac

SEQ ID NO: 1498442 - RNA, 13 nt, Human
agcagugcaugcu

SEQ ID NO: 1498443 - RNA, 16 nt, Human
agcagugcaugcuguc

SEQ ID NO: 1498444 - RNA, 17 nt, Human
agacccaaaaggcagaa

SEQ ID NO: 1498445 - RNA, 15 nt, Human
agaccacguuucuaa

SEQ ID NO: 1498446 - RNA, 14 nt, Human
agaccacguuucua

SEQ ID NO: 1498447 - RNA, 23 nt, Human
agaccaucccugaaggccccgcc

SEQ ID NO: 1498448 - RNA, 14 nt, Human
agacaauuuauuau

SEQ ID NO: 1498449 - RNA, 22 nt, Human
agacagcccgggcucugccucc

SEQ ID NO: 1498450 - RNA, 23 nt, Human
agacagcccgggcucugccuccc

SEQ ID NO: 1498451 - RNA, 20 nt, Human
agacgcugugcugcccugcc

SEQ ID NO: 1498452 - RNA, 17 nt, Human
agacgcugugcugcccu

SEQ ID NO: 1498453 - RNA, 18 nt, Human
agacgcugugcugcccug

SEQ ID NO: 1498454 - RNA, 19 nt, Human
agacgcugugcugcccugc

SEQ ID NO: 1498455 - RNA, 15 nt, Human
agacuaucuaaaugu

SEQ ID NO: 1498456 - RNA, 17 nt, Human
agacuauauuguacaca

SEQ ID NO: 1498457 - RNA, 19 nt, Human
agacaaggaaaaaauaaca

SEQ ID NO: 1498458 - RNA, 20 nt, Human
agacaaugugaaaagaaaaa

SEQ ID NO: 1498459 - RNA, 18 nt, Human
agagcccacgcccccacu

SEQ ID NO: 1498460 - RNA, 11 nt, Human
agagagcaaga

SEQ ID NO: 1498461 - RNA, 19 nt, Human
agagagcaagacgcugugc

SEQ ID NO: 1498462 - RNA, 23 nt, Human
agagagcaagacgcugugcugcc

SEQ ID NO: 1498463 - RNA, 16 nt, Human
agacucuuuggacacu

SEQ ID NO: 1498464 - RNA, 21 nt, Human
agaagacugcauuauauuuau

SEQ ID NO: 1498465 - RNA, 21 nt, Human
agaaccaaaaagaggcuaugu

SEQ ID NO: 1498466 - RNA, 20 nt, Human
agaagagcuguucacagcca

SEQ ID NO: 1498467 - RNA, 21 nt, Human
agaagagcuguucacagccag

SEQ ID NO: 1498468 - RNA, 15 nt, Human
agaagagaaugcaca

SEQ ID NO: 1498469 - RNA, 23 nt, Human
agaagagaaugcacaaacagagg

SEQ ID NO: 1498470 - RNA, 13 nt, Human
agaagagcuguuc

SEQ ID NO: 1498471 - RNA, 17 nt, Human
agaagucuuagauguau

SEQ ID NO: 1498472 - RNA, 19 nt, Human
agaagucuuagauguauau

SEQ ID NO: 1498473 - RNA, 14 nt, Human
agaagucacacagu

SEQ ID NO: 1498474 - RNA, 16 nt, Human
agaaugaaagggccca

SEQ ID NO: 1498475 - RNA, 17 nt, Human
agaaucucaaauaacua

SEQ ID NO: 1498476 - RNA, 18 nt, Human
agaaugcucuuuacuuca

SEQ ID NO: 1498477 - RNA, 23 nt, Human
agaaugcacaaacagaggccgcc

SEQ ID NO: 1498478 - RNA, 17 nt, Human
agaaccaaaaagaggcu

SEQ ID NO: 1498479 - RNA, 18 nt, Human
agaaccaaaaagaggcua

SEQ ID NO: 1498480 - RNA, 22 nt, Human
agaacagugauuaccagggacu

SEQ ID NO: 1498481 - RNA, 19 nt, Human
agaacagauaaucagugug

SEQ ID NO: 1498482 - RNA, 16 nt, Human
agaacacaaggucauu

SEQ ID NO: 1498483 - RNA, 12 nt, Human
auccuugaagau

SEQ ID NO: 1498484 - RNA, 21 nt, Human
auccacugugccaugugccag

SEQ ID NO: 1498485 - RNA, 19 nt, Human
aucauggagguuugaagau

SEQ ID NO: 1498486 - RNA, 15 nt, Human
aucauccuaagcuau

SEQ ID NO: 1498487 - RNA, 20 nt, Human
aucaugacaaagacugagua

SEQ ID NO: 1498488 - RNA, 21 nt, Human
aucaugaauuaguuuuauaug

SEQ ID NO: 1498489 - RNA, 19 nt, Human
auauuuuuuucugaaauuu

SEQ ID NO: 1498490 - RNA, 14 nt, Human
aucaaaagaaagaa

SEQ ID NO: 1498491 - RNA, 14 nt, Human
auauuuuuuucuga

SEQ ID NO: 1498492 - RNA, 16 nt, Human
auauuuuuuucugaaa

SEQ ID NO: 1498493 - RNA, 18 nt, Human
auauuuuuuucugaaauu

SEQ ID NO: 1498494 - RNA, 18 nt, Human
auauuuuuuucuuuucuu

SEQ ID NO: 1498495 - RNA, 24 nt, Human
aucaaaagguuaauaaaguaauua

SEQ ID NO: 1498496 - RNA, 20 nt, Human
aucaaaagguuaauaaagua

SEQ ID NO: 1498497 - RNA, 19 nt, Human
aucaaagagguuuuaaaaa

SEQ ID NO: 1498498 - RNA, 18 nt, Human
aucaaagagagaaaauaa

SEQ ID NO: 1498499 - RNA, 20 nt, Human
aucaaagggugaaaauuauu

SEQ ID NO: 1498500 - RNA, 15 nt, Human
auagcacagacccug

SEQ ID NO: 1498501 - RNA, 14 nt, Human
auagcacagacccu

SEQ ID NO: 1498502 - RNA, 16 nt, Human
augaaacuuuuggaag

SEQ ID NO: 1498503 - RNA, 12 nt, Human
augaaagacugu

SEQ ID NO: 1498504 - RNA, 23 nt, Human
augaagcauuuacuuuguguuca

SEQ ID NO: 1498505 - RNA, 13 nt, Human
augaaguacucau

SEQ ID NO: 1498506 - RNA, 23 nt, Human
augaaguaauaugcacacauuuu

SEQ ID NO: 1498507 - RNA, 21 nt, Human
augaaguaauaugcacacauu

SEQ ID NO: 1498508 - RNA, 14 nt, Human
augaaguaauaugc

SEQ ID NO: 1498509 - RNA, 17 nt, Human
augaccuucuaggaagc

SEQ ID NO: 1498510 - RNA, 18 nt, Human
augaccuucuaggaagcu

SEQ ID NO: 1498511 - RNA, 13 nt, Human
augaccuuucaau

SEQ ID NO: 1498512 - RNA, 15 nt, Human
augaccuuucaauag

SEQ ID NO: 1498513 - RNA, 18 nt, Human
augaccuuucaauaggaa

SEQ ID NO: 1498514 - RNA, 21 nt, Human
augagccucagcauccuggca

SEQ ID NO: 1498515 - RNA, 11 nt, Human
augagccuggc

SEQ ID NO: 1498516 - RNA, 12 nt, Human
augagccuggca

SEQ ID NO: 1498517 - RNA, 23 nt, Human
aucuaggaagacuuuggaaagag

SEQ ID NO: 1498518 - RNA, 20 nt, Human
augggacauuugcucaugga

SEQ ID NO: 1498519 - RNA, 15 nt, Human
augggacagggagga

SEQ ID NO: 1498520 - RNA, 14 nt, Human
augggaaagcauug

SEQ ID NO: 1498521 - RNA, 20 nt, Human
augggaaagcauuguaaaug

SEQ ID NO: 1498522 - RNA, 23 nt, Human
auggcuuccuggcaauagucaaa

SEQ ID NO: 1498523 - RNA, 16 nt, Human
augcuuugaucccuuc

SEQ ID NO: 1498524 - RNA, 18 nt, Human
augcucugcauguuacau

SEQ ID NO: 1498525 - RNA, 19 nt, Human
augcucugcauguuacaua

SEQ ID NO: 1498526 - RNA, 14 nt, Human
augcuucuucagag

SEQ ID NO: 1498527 - RNA, 17 nt, Human
augcuucuucagagacu

SEQ ID NO: 1498528 - RNA, 20 nt, Human
augcuucuucagagacuccu

SEQ ID NO: 1498529 - RNA, 22 nt, Human
augcuucuucagagacuccugc

SEQ ID NO: 1498530 - RNA, 17 nt, Human
augcauagguuuagcag

SEQ ID NO: 1498531 - RNA, 12 nt, Human
augccugguggc

SEQ ID NO: 1498532 - RNA, 13 nt, Human
augccugguggca

SEQ ID NO: 1498533 - RNA, 14 nt, Human
augccugguggcag

SEQ ID NO: 1498534 - RNA, 19 nt, Human
augccugguggcagcugcg

SEQ ID NO: 1498535 - RNA, 21 nt, Human
augccugguggcagcugcggu

SEQ ID NO: 1498536 - RNA, 20 nt, Human
aguacuucuccacccugcuc

SEQ ID NO: 1498537 - RNA, 21 nt, Human
aguacuucuccacccugcucu

SEQ ID NO: 1498538 - RNA, 22 nt, Human
aguacuucuccacccugcucuc

SEQ ID NO: 1498539 - RNA, 14 nt, Human
aguacguugugcau

SEQ ID NO: 1498540 - RNA, 15 nt, Human
aguacuggagaaaau

SEQ ID NO: 1498541 - RNA, 17 nt, Human
aguaacuuacuuaggug

SEQ ID NO: 1498542 - RNA, 20 nt, Human
aguaaaugggggugcauuug

SEQ ID NO: 1498543 - RNA, 19 nt, Human
aguaaaugggggugcauuu

SEQ ID NO: 1498544 - RNA, 21 nt, Human
aguaaaugggggugcauuuga

SEQ ID NO: 1498545 - RNA, 16 nt, Human
agugacagaggcagcc

SEQ ID NO: 1498546 - RNA, 19 nt, Human
agugacagaggcagcccca

SEQ ID NO: 1498547 - RNA, 14 nt, Human
agugacagaggcag

SEQ ID NO: 1498548 - RNA, 13 nt, Human
agugaaugaaaca

SEQ ID NO: 1498549 - RNA, 15 nt, Human
agugauuaccaggga

SEQ ID NO: 1498550 - RNA, 20 nt, Human
agugauucuccugccucagc

SEQ ID NO: 1498551 - RNA, 18 nt, Human
agugauucuccugccuca

SEQ ID NO: 1498552 - RNA, 19 nt, Human
agugauucuccugccucag

SEQ ID NO: 1498553 - RNA, 19 nt, Human
agugccuuauggaacacuc

SEQ ID NO: 1498554 - RNA, 20 nt, Human
agugccuuauggaacacucu

SEQ ID NO: 1498555 - RNA, 21 nt, Human
agugccuuauggaacacucug

SEQ ID NO: 1498556 - RNA, 22 nt, Human
agugccuuauggaacacucuga

SEQ ID NO: 1498557 - RNA, 13 nt, Human
agugauuaccagg

SEQ ID NO: 1498558 - RNA, 23 nt, Human
agugauccucccaccucagccuc

SEQ ID NO: 1498559 - RNA, 19 nt, Human
agugaugucacuagggcag

SEQ ID NO: 1498560 - RNA, 20 nt, Human
agugauccucccaccucagc

SEQ ID NO: 1498561 - RNA, 22 nt, Human
agugauccucccaccucagccu

SEQ ID NO: 1498562 - RNA, 18 nt, Human
agucuggcccuuccuuuu

SEQ ID NO: 1498563 - RNA, 21 nt, Human
agucugauucccaagcucugc

SEQ ID NO: 1498564 - RNA, 22 nt, Human
agucugauucccaagcucugcu

SEQ ID NO: 1498565 - RNA, 19 nt, Human
aguccuuaccagcagagca

SEQ ID NO: 1498566 - RNA, 16 nt, Human
agucgaggacagggag

SEQ ID NO: 1498567 - RNA, 14 nt, Human
aguccucuuuucug

SEQ ID NO: 1498568 - RNA, 16 nt, Human
aguccuuaccagcaga

SEQ ID NO: 1498569 - RNA, 18 nt, Human
aguccuuaccagcagagc

SEQ ID NO: 1498570 - RNA, 13 nt, Human
agucauuuaauaa

SEQ ID NO: 1498571 - RNA, 20 nt, Human
auaaaaagacauucuuccaa

SEQ ID NO: 1498572 - RNA, 14 nt, Human
auaaaaacaacuuu

SEQ ID NO: 1498573 - RNA, 15 nt, Human
auaaaagacagugaa

SEQ ID NO: 1498574 - RNA, 16 nt, Human
auaaaagacagugaaa

SEQ ID NO: 1498575 - RNA, 23 nt, Human
auaaaaauauuguguugugaaug

SEQ ID NO: 1498576 - RNA, 14 nt, Human
aguuugauuaaauu

SEQ ID NO: 1498577 - RNA, 16 nt, Human
aguuugauuaaauucu

SEQ ID NO: 1498578 - RNA, 11 nt, Human
aguuugcaguu

SEQ ID NO: 1498579 - RNA, 18 nt, Human
aguuccaccaucaagcca

SEQ ID NO: 1498580 - RNA, 21 nt, Human
aguuccaccaucaagccacca

SEQ ID NO: 1498581 - RNA, 14 nt, Human
aguucauacccugu

SEQ ID NO: 1498582 - RNA, 18 nt, Human
aguuacacuaaaagguga

SEQ ID NO: 1498583 - RNA, 17 nt, Human
aguugaaaaacagcuga

SEQ ID NO: 1498584 - RNA, 14 nt, Human
aguugaaaagacuc

SEQ ID NO: 1498585 - RNA, 18 nt, Human
aguugaaaaacagcugag

SEQ ID NO: 1498586 - RNA, 16 nt, Human
aguugaagacagagcu

SEQ ID NO: 1498587 - RNA, 17 nt, Human
aguugaagacagagcua

SEQ ID NO: 1498588 - RNA, 20 nt, Human
aguuguucaauaauaaauau

SEQ ID NO: 1498589 - RNA, 17 nt, Human
aguuguuagugugucuu

SEQ ID NO: 1498590 - RNA, 22 nt, Human
aguuguuagugugucuuagugu

SEQ ID NO: 1498591 - RNA, 15 nt, Human
auaaguaaaugcuag

SEQ ID NO: 1498592 - RNA, 23 nt, Human
auacaaugcugugcccuaaagug

SEQ ID NO: 1498593 - RNA, 12 nt, Human
auaauguuaaca

SEQ ID NO: 1498594 - RNA, 15 nt, Human
auacaccacuacauu

SEQ ID NO: 1498595 - RNA, 17 nt, Human
auaaguaauucaagaaa

SEQ ID NO: 1498596 - RNA, 21 nt, Human
auaaagaugagugagcaugcc

SEQ ID NO: 1498597 - RNA, 15 nt, Human
auacuguugugcgca

SEQ ID NO: 1498598 - RNA, 18 nt, Human
auacaccacuacauucug

SEQ ID NO: 1498599 - RNA, 17 nt, Human
auacaccacuacauucu

SEQ ID NO: 1498600 - RNA, 15 nt, Human
auuuaccacuugugu

SEQ ID NO: 1498601 - RNA, 22 nt, Human
auuuaccacuuguguuuugcaa

SEQ ID NO: 1498602 - RNA, 16 nt, Human
auuuaaauagcuuuuu

SEQ ID NO: 1498603 - RNA, 16 nt, Human
auuguaguccuguaau

SEQ ID NO: 1498604 - RNA, 17 nt, Human
auuguagcauccuggaa

SEQ ID NO: 1498605 - RNA, 20 nt, Human
auuguagcauccuggaauau

SEQ ID NO: 1498606 - RNA, 17 nt, Human
auuguuuucaguguaca

SEQ ID NO: 1498607 - RNA, 14 nt, Human
auuuaaaaaaaauc

SEQ ID NO: 1498608 - RNA, 17 nt, Human
auuuaaaaaaaaaccug

SEQ ID NO: 1498609 - RNA, 18 nt, Human
auuguuuucaguguacau

SEQ ID NO: 1498610 - RNA, 19 nt, Human
auuguuuucaguguacaug

SEQ ID NO: 1498611 - RNA, 19 nt, Human
auuuacuucuuauacauuu

SEQ ID NO: 1498612 - RNA, 20 nt, Human
auuuacuucuuauacauuug

SEQ ID NO: 1498613 - RNA, 19 nt, Human
auuuauuacuguaagaaaa

SEQ ID NO: 1498614 - RNA, 20 nt, Human
auuuauuacuguaagaaaau

SEQ ID NO: 1498615 - RNA, 21 nt, Human
auuuauuuuaauaauguuuca

SEQ ID NO: 1498616 - RNA, 20 nt, Human
auuucaucugcucuccuucc

SEQ ID NO: 1498617 - RNA, 21 nt, Human
auuucaucugcucuccuuccu

SEQ ID NO: 1498618 - RNA, 18 nt, Human
auuucaucugcucuccuu

SEQ ID NO: 1498619 - RNA, 19 nt, Human
auuucaucugcucuccuuc

SEQ ID NO: 1498620 - RNA, 14 nt, Human
auuucccaaagcag

SEQ ID NO: 1498621 - RNA, 16 nt, Human
auuucccaaagcagug

SEQ ID NO: 1498622 - RNA, 12 nt, Human
auuugguuuuca

SEQ ID NO: 1498623 - RNA, 14 nt, Human
auuugguuuucaca

SEQ ID NO: 1498624 - RNA, 21 nt, Human
auuuggugguuucagaaaugu

SEQ ID NO: 1498625 - RNA, 18 nt, Human
auuugauaugugaacagu

SEQ ID NO: 1498626 - RNA, 20 nt, Human
auuugauaguauugugcaua

SEQ ID NO: 1498627 - RNA, 19 nt, Human
auuugauaugugaacaguu

SEQ ID NO: 1498628 - RNA, 22 nt, Human
auuugaggucuguucuuuccaa

SEQ ID NO: 1498629 - RNA, 21 nt, Human
auuugaggucuguucuuucca

SEQ ID NO: 1498630 - RNA, 19 nt, Human
auuugaauguuaagcagau

SEQ ID NO: 1498631 - RNA, 18 nt, Human
auuugaggucuguucuuu

SEQ ID NO: 1498632 - RNA, 17 nt, Human
auuugaggucuguucuu

SEQ ID NO: 1498633 - RNA, 15 nt, Human
auuugagcagggcuc

SEQ ID NO: 1498634 - RNA, 16 nt, Human
auuugagcagggcuca

SEQ ID NO: 1498635 - RNA, 13 nt, Human
auuugaauguuaa

SEQ ID NO: 1498636 - RNA, 18 nt, Human
auuugaauguuaagcaga

SEQ ID NO: 1498637 - RNA, 16 nt, Human
auuucuuccacaagag

SEQ ID NO: 1498638 - RNA, 14 nt, Human
auuggaaacaaguc

SEQ ID NO: 1498639 - RNA, 13 nt, Human
auuggaaacaagu

SEQ ID NO: 1498640 - RNA, 16 nt, Human
auugcauauauacaua

SEQ ID NO: 1498641 - RNA, 16 nt, Human
auuggagcucguggaa

SEQ ID NO: 1498642 - RNA, 17 nt, Human
auuggagcucgugggac

SEQ ID NO: 1498643 - RNA, 22 nt, Human
auuggcuagagguucaaagaua

SEQ ID NO: 1498644 - RNA, 20 nt, Human
auuggcuagagguucaaaga

SEQ ID NO: 1498645 - RNA, 19 nt, Human
auuggcuagagguucaaag

SEQ ID NO: 1498646 - RNA, 13 nt, Human
auuggcucacacu

SEQ ID NO: 1498647 - RNA, 15 nt, Human
auuggcucacacuga

SEQ ID NO: 1498648 - RNA, 16 nt, Human
auuggcucacacugag

SEQ ID NO: 1498649 - RNA, 23 nt, Human
auuggcuagagguucaaagauau

SEQ ID NO: 1498650 - RNA, 12 nt, Human
auugauguguuu

SEQ ID NO: 1498651 - RNA, 19 nt, Human
auugauguguuuauuuaua

SEQ ID NO: 1498652 - RNA, 17 nt, Human
auugcaacaggcugggc

SEQ ID NO: 1498653 - RNA, 18 nt, Human
auugcaacaggcugggcu

SEQ ID NO: 1498654 - RNA, 19 nt, Human
auugcaacaggcugggcuu

SEQ ID NO: 1498655 - RNA, 12 nt, Human
auugcaccacug

SEQ ID NO: 1498656 - RNA, 17 nt, Human
auuggcucacacugaga

SEQ ID NO: 1498657 - RNA, 12 nt, Human
auguguuuccau

SEQ ID NO: 1498658 - RNA, 21 nt, Human
augugcuaguaauuggaaagg

SEQ ID NO: 1498659 - RNA, 21 nt, Human
augugccagguuuuuggucug

SEQ ID NO: 1498660 - RNA, 21 nt, Human
uuuuaaaaaacugcugacugu

SEQ ID NO: 1498661 - RNA, 18 nt, Human
uuuuaaaaaacugcugac

SEQ ID NO: 1498662 - RNA, 20 nt, Human
auguuacauaagauaaaugu

SEQ ID NO: 1498663 - RNA, 12 nt, Human
auguuaagcaga

SEQ ID NO: 1498664 - RNA, 13 nt, Human
auguuaagcagau

SEQ ID NO: 1498665 - RNA, 19 nt, Human
auguuacauaagauaaaug

SEQ ID NO: 1498666 - RNA, 12 nt, Human
auguugaaagau

SEQ ID NO: 1498667 - RNA, 18 nt, Human
auguugaaagaucaaaag

SEQ ID NO: 1498668 - RNA, 13 nt, Human
auguugcccaggc

SEQ ID NO: 1498669 - RNA, 14 nt, Human
auguugcccaggca

SEQ ID NO: 1498670 - RNA, 15 nt, Human
auguugcccaggcag

SEQ ID NO: 1498671 - RNA, 16 nt, Human
auguugcccaggcagg

SEQ ID NO: 1498672 - RNA, 17 nt, Human
uuuuagaguugauacua

SEQ ID NO: 1498673 - RNA, 21 nt, Human
uuuuagacccuauugcugcuu

SEQ ID NO: 1498674 - RNA, 13 nt, Human
auguuggccaggc

SEQ ID NO: 1498675 - RNA, 16 nt, Human
uuuucuauaauuuaaa

SEQ ID NO: 1498676 - RNA, 12 nt, Human
uuuuccaggcug

SEQ ID NO: 1498677 - RNA, 13 nt, Human
uuuuccaggcugg

SEQ ID NO: 1498678 - RNA, 17 nt, Human
uuuucucugauacagaa

SEQ ID NO: 1498679 - RNA, 20 nt, Human
uuuucaggcuagauguaugu

SEQ ID NO: 1498680 - RNA, 14 nt, Human
uuuucaguguacau

SEQ ID NO: 1498681 - RNA, 18 nt, Human
uuuuccaaucauuugacu

SEQ ID NO: 1498682 - RNA, 19 nt, Human
uuuuauggcuuuugugcau

SEQ ID NO: 1498683 - RNA, 18 nt, Human
uuuuauggcuuuugugca

SEQ ID NO: 1498684 - RNA, 23 nt, Human
uuuuagaguugauacuacaguuu

SEQ ID NO: 1498685 - RNA, 15 nt, Human
uuuuaguagagacag

SEQ ID NO: 1498686 - RNA, 21 nt, Human
uuuuauggcuuuugugcauua

SEQ ID NO: 1498687 - RNA, 12 nt, Human
uuuuauuaaauu

SEQ ID NO: 1498688 - RNA, 23 nt, Human
auuaaaaaucucaaauuucuaaa

SEQ ID NO: 1498689 - RNA, 19 nt, Human
auuaaaacacaacaucuuu

SEQ ID NO: 1498690 - RNA, 13 nt, Human
uuuucuguucuuu

SEQ ID NO: 1498691 - RNA, 17 nt, Human
auguuggccaggcuggu

SEQ ID NO: 1498692 - RNA, 17 nt, Human
uuuguaguguuggagaa

SEQ ID NO: 1498693 - RNA, 16 nt, Human
uuuguaauuuuuuuau

SEQ ID NO: 1498694 - RNA, 14 nt, Human
uuuguacagacaac

SEQ ID NO: 1498695 - RNA, 15 nt, Human
augugaugagaggaa

SEQ ID NO: 1498696 - RNA, 14 nt, Human
uuuguuucugaaag

SEQ ID NO: 1498697 - RNA, 16 nt, Human
uuuguuucugaaaggg

SEQ ID NO: 1498698 - RNA, 22 nt, Human
uuugugcauuaucuagauacug

SEQ ID NO: 1498699 - RNA, 19 nt, Human
uuugugcauuaucuagaua

SEQ ID NO: 1498700 - RNA, 22 nt, Human
uuugugauacaaugcugugccc

SEQ ID NO: 1498701 - RNA, 16 nt, Human
uuugugauacaaugcu

SEQ ID NO: 1498702 - RNA, 23 nt, Human
uuugucuuaaaaaguggaaaaau

SEQ ID NO: 1498703 - RNA, 13 nt, Human
uuugucuuaaaaa

SEQ ID NO: 1498704 - RNA, 14 nt, Human
uuugucuuaaaaag

SEQ ID NO: 1498705 - RNA, 23 nt, Human
augucgucaaagcugaaauggac

SEQ ID NO: 1498706 - RNA, 14 nt, Human
augugagacugguu

SEQ ID NO: 1498707 - RNA, 13 nt, Human
augugagaccauu

SEQ ID NO: 1498708 - RNA, 12 nt, Human
auguaucaauga

SEQ ID NO: 1498709 - RNA, 19 nt, Human
auguauauuuuauaucaau

SEQ ID NO: 1498710 - RNA, 16 nt, Human
auguccaagaagccca

SEQ ID NO: 1498711 - RNA, 17 nt, Human
auguccaagaagcccag

SEQ ID NO: 1498712 - RNA, 18 nt, Human
auguccaagaagcccagg

SEQ ID NO: 1498713 - RNA, 23 nt, Human
auguauaauauuuuuaauuaaau

SEQ ID NO: 1498714 - RNA, 13 nt, Human
uuuggggaagaac

SEQ ID NO: 1498715 - RNA, 21 nt, Human
uuugggguacccacugcucug

SEQ ID NO: 1498716 - RNA, 22 nt, Human
uuugggguacccacugcucugg

SEQ ID NO: 1498717 - RNA, 12 nt, Human
uuuggcugcuga

SEQ ID NO: 1498718 - RNA, 13 nt, Human
uuuggcugcugaa

SEQ ID NO: 1498719 - RNA, 19 nt, Human
uuugcuaagcauuccaacu

SEQ ID NO: 1498720 - RNA, 20 nt, Human
uuugcuggagcucugcccau

SEQ ID NO: 1498721 - RNA, 22 nt, Human
uuugcuggggccgaaagaacag

SEQ ID NO: 1498722 - RNA, 19 nt, Human
uuugcuggggccgaaagaa

SEQ ID NO: 1498723 - RNA, 22 nt, Human
uuugcuaacuagcuuggaaacu

SEQ ID NO: 1498724 - RNA, 22 nt, Human
uuuggauuggaugaauuccaaa

SEQ ID NO: 1498725 - RNA, 18 nt, Human
uuugauucagacagcugc

SEQ ID NO: 1498726 - RNA, 13 nt, Human
uuugagacagagu

SEQ ID NO: 1498727 - RNA, 21 nt, Human
uuugacacuuauagauugaaa

SEQ ID NO: 1498728 - RNA, 14 nt, Human
uuugagaguucuaa

SEQ ID NO: 1498729 - RNA, 15 nt, Human
uuugauccaagcugg

SEQ ID NO: 1498730 - RNA, 13 nt, Human
uuugagaguucua

SEQ ID NO: 1498731 - RNA, 15 nt, Human
uuugauucagacagc

SEQ ID NO: 1498732 - RNA, 14 nt, Human
uuugacaaggggca

SEQ ID NO: 1498733 - RNA, 21 nt, Human
uuugaccucugcagcaauaaa

SEQ ID NO: 1498734 - RNA, 19 nt, Human
uuugaccucugcagcaaua

SEQ ID NO: 1498735 - RNA, 18 nt, Human
uuugacagaauauguuuc

SEQ ID NO: 1498736 - RNA, 19 nt, Human
uuugacagaauauguuuca

SEQ ID NO: 1498737 - RNA, 20 nt, Human
uuugacagaauauguuucaa

SEQ ID NO: 1498738 - RNA, 21 nt, Human
uuugacagaauauguuucaaa

SEQ ID NO: 1498739 - RNA, 23 nt, Human
uuucccucccuuccucuuuccau

SEQ ID NO: 1498740 - RNA, 22 nt, Human
auucaaacagucucaggaaauc

SEQ ID NO: 1498741 - RNA, 20 nt, Human
auuauauggcuugaguuuaa

SEQ ID NO: 1498742 - RNA, 16 nt, Human
auuauaacucauuugu

SEQ ID NO: 1498743 - RNA, 13 nt, Human
auuauaaaguuuu

SEQ ID NO: 1498744 - RNA, 16 nt, Human
auuauaaaguuuucua

SEQ ID NO: 1498745 - RNA, 16 nt, Human
auucaguuguuagugu

SEQ ID NO: 1498746 - RNA, 21 nt, Human
auucaggagaguagaacagau

SEQ ID NO: 1498747 - RNA, 22 nt, Human
auucaggagaguagaacagaua

SEQ ID NO: 1498748 - RNA, 17 nt, Human
auuccaagugauugaaa

SEQ ID NO: 1498749 - RNA, 22 nt, Human
auuccccaggaggccagccuug

SEQ ID NO: 1498750 - RNA, 20 nt, Human
auuccccaggaggccagccu

SEQ ID NO: 1498751 - RNA, 18 nt, Human
auucccaagcucugcucc

SEQ ID NO: 1498752 - RNA, 19 nt, Human
auucccaagcucugcuccu

SEQ ID NO: 1498753 - RNA, 15 nt, Human
auuacuguaagaaaa

SEQ ID NO: 1498754 - RNA, 16 nt, Human
auuacuguaagaaaau

SEQ ID NO: 1498755 - RNA, 13 nt, Human
auuagagaagaga

SEQ ID NO: 1498756 - RNA, 14 nt, Human
auuacuucugcuac

SEQ ID NO: 1498757 - RNA, 13 nt, Human
auuacuucugcua

SEQ ID NO: 1498758 - RNA, 15 nt, Human
uuuuguuuucauuau

SEQ ID NO: 1498759 - RNA, 16 nt, Human
uuuuguuuuugucuua

SEQ ID NO: 1498760 - RNA, 14 nt, Human
uuuuguuccccucc

SEQ ID NO: 1498761 - RNA, 15 nt, Human
uuuuguuccccuccu

SEQ ID NO: 1498762 - RNA, 19 nt, Human
uuuuguuccccuccuccac

SEQ ID NO: 1498763 - RNA, 14 nt, Human
uuuugugaagcaaa

SEQ ID NO: 1498764 - RNA, 23 nt, Human
auuaaaacacaacaucuuuuucu

SEQ ID NO: 1498765 - RNA, 12 nt, Human
uuuuugacagaa

SEQ ID NO: 1498766 - RNA, 13 nt, Human
uuuuugacagaau

SEQ ID NO: 1498767 - RNA, 12 nt, Human
uuuuugauauau

SEQ ID NO: 1498768 - RNA, 19 nt, Human
uuuuuauuuguuugugcau

SEQ ID NO: 1498769 - RNA, 17 nt, Human
uuuuuauauuugaaaua

SEQ ID NO: 1498770 - RNA, 20 nt, Human
uuuuuguagcacugacagau

SEQ ID NO: 1498771 - RNA, 21 nt, Human
uuuuuguagcacugacagauu

SEQ ID NO: 1498772 - RNA, 19 nt, Human
uuuuuguagcacugacaga

SEQ ID NO: 1498773 - RNA, 13 nt, Human
auuaaggaagaca

SEQ ID NO: 1498774 - RNA, 18 nt, Human
auuaaguacuauguauca

SEQ ID NO: 1498775 - RNA, 19 nt, Human
auuaaguacuauguaucaa

SEQ ID NO: 1498776 - RNA, 20 nt, Human
uugucaauaaaauccauaca

SEQ ID NO: 1498777 - RNA, 13 nt, Human
augaguccccugu

SEQ ID NO: 1498778 - RNA, 23 nt, Human
augaguccccuguuuguuucuga

SEQ ID NO: 1498779 - RNA, 17 nt, Human
uugucacacacuuuggc

SEQ ID NO: 1498780 - RNA, 18 nt, Human
uugucacacacuuuggcu

SEQ ID NO: 1498781 - RNA, 21 nt, Human
uugucauauaagauucauauu

SEQ ID NO: 1498782 - RNA, 16 nt, Human
uuguagcauccuggaa

SEQ ID NO: 1498783 - RNA, 18 nt, Human
uuguagcauccuggaaua

SEQ ID NO: 1498784 - RNA, 15 nt, Human
augagguacugagag

SEQ ID NO: 1498785 - RNA, 16 nt, Human
uuguagcuuuaucaaa

SEQ ID NO: 1498786 - RNA, 17 nt, Human
uuguagcuuuaucaaag

SEQ ID NO: 1498787 - RNA, 17 nt, Human
augagguacugagagug

SEQ ID NO: 1498788 - RNA, 18 nt, Human
augagguacugagaguga

SEQ ID NO: 1498789 - RNA, 22 nt, Human
augaggucagagccugcaguua

SEQ ID NO: 1498790 - RNA, 19 nt, Human
augaggucagagccugcag

SEQ ID NO: 1498791 - RNA, 20 nt, Human
augaggucagagccugcagu

SEQ ID NO: 1498792 - RNA, 15 nt, Human
augaggucagagccu

SEQ ID NO: 1498793 - RNA, 16 nt, Human
augaggucagagccug

SEQ ID NO: 1498794 - RNA, 18 nt, Human
augaggucagagccugca

SEQ ID NO: 1498795 - RNA, 20 nt, Human
uuguucaauaauaaauauuu

SEQ ID NO: 1498796 - RNA, 13 nt, Human
uuguucauacaua

SEQ ID NO: 1498797 - RNA, 22 nt, Human
uuguucaauaauaaauauuuuu

SEQ ID NO: 1498798 - RNA, 13 nt, Human
uugugaggaagcc

SEQ ID NO: 1498799 - RNA, 21 nt, Human
uugugaggaagccgcuggggc

SEQ ID NO: 1498800 - RNA, 20 nt, Human
uugugauacaaugcugugcc

SEQ ID NO: 1498801 - RNA, 17 nt, Human
uugugaggaagccgcug

SEQ ID NO: 1498802 - RNA, 18 nt, Human
uugugaggaagccgcugg

SEQ ID NO: 1498803 - RNA, 15 nt, Human
uuguccccgacccuu

SEQ ID NO: 1498804 - RNA, 16 nt, Human
uuguccccgacccuug

SEQ ID NO: 1498805 - RNA, 18 nt, Human
uuguccccaccgcagaca

SEQ ID NO: 1498806 - RNA, 20 nt, Human
uuguccccaccgcagacagg

SEQ ID NO: 1498807 - RNA, 20 nt, Human
uuuaaaaaagaaacauuugg

SEQ ID NO: 1498808 - RNA, 23 nt, Human
uuuaaaaauacagauagauauau

SEQ ID NO: 1498809 - RNA, 21 nt, Human
uuuaaauauaugcuaagucuu

SEQ ID NO: 1498810 - RNA, 11 nt, Human
uuuaaaugcac

SEQ ID NO: 1498811 - RNA, 14 nt, Human
uuuaagaggcaggg

SEQ ID NO: 1498812 - RNA, 12 nt, Human
uuuaagagaaau

SEQ ID NO: 1498813 - RNA, 19 nt, Human
uuuaaggaugcuuguacau

SEQ ID NO: 1498814 - RNA, 21 nt, Human
uuuaagcuguuacugucuuca

SEQ ID NO: 1498815 - RNA, 22 nt, Human
uuuaaggaugcuuguacauaau

SEQ ID NO: 1498816 - RNA, 21 nt, Human
uuuaaggaugcuuguacauaa

SEQ ID NO: 1498817 - RNA, 20 nt, Human
uuuaaggaugcuuguacaua

SEQ ID NO: 1498818 - RNA, 16 nt, Human
uuuaaugaaagacugu

SEQ ID NO: 1498819 - RNA, 18 nt, Human
uuuaaaaaaauuccaagu

SEQ ID NO: 1498820 - RNA, 23 nt, Human
augcacuuuguucuggcucuucc

SEQ ID NO: 1498821 - RNA, 12 nt, Human
augcaaagcacu

SEQ ID NO: 1498822 - RNA, 13 nt, Human
augcaaagcacug

SEQ ID NO: 1498823 - RNA, 14 nt, Human
augcaaagcacuga

SEQ ID NO: 1498824 - RNA, 15 nt, Human
augcaaagcacugac

SEQ ID NO: 1498825 - RNA, 13 nt, Human
augauuucauuca

SEQ ID NO: 1498826 - RNA, 20 nt, Human
uuguucuugguuuguaaauu

SEQ ID NO: 1498827 - RNA, 19 nt, Human
uuguucuugguuuguaaau

SEQ ID NO: 1498828 - RNA, 17 nt, Human
uuguucuugguuuguaa

SEQ ID NO: 1498829 - RNA, 16 nt, Human
uuguucauacauauuu

SEQ ID NO: 1498830 - RNA, 18 nt, Human
uuguucauacauauuuuu

SEQ ID NO: 1498831 - RNA, 15 nt, Human
augccccugaauuua

SEQ ID NO: 1498832 - RNA, 20 nt, Human
augccccugaauuuaaauag

SEQ ID NO: 1498833 - RNA, 17 nt, Human
augcccagccccuucug

SEQ ID NO: 1498834 - RNA, 21 nt, Human
augccaugaggaacaaggcaa

SEQ ID NO: 1498835 - RNA, 16 nt, Human
augcccagccccuucu

SEQ ID NO: 1498836 - RNA, 21 nt, Human
uuuaaugaaagacuguacaaa

SEQ ID NO: 1498837 - RNA, 23 nt, Human
uuuaaugaaagacuguacaaagu

SEQ ID NO: 1498838 - RNA, 20 nt, Human
augccuuuucccaacuccag

SEQ ID NO: 1498839 - RNA, 22 nt, Human
augccuuuucccaacuccagaa

SEQ ID NO: 1498840 - RNA, 15 nt, Human
augccucucucaggc

SEQ ID NO: 1498841 - RNA, 13 nt, Human
augccucucucag

SEQ ID NO: 1498842 - RNA, 14 nt, Human
augccucucucagg

SEQ ID NO: 1498843 - RNA, 18 nt, Human
augcuacaggauuugaaa

SEQ ID NO: 1498844 - RNA, 22 nt, Human
augcgugcauaccacuuuuguu

SEQ ID NO: 1498845 - RNA, 17 nt, Human
augccucucucaggcca

SEQ ID NO: 1498846 - RNA, 21 nt, Human
uuuauaugcuucuguuuuaua

SEQ ID NO: 1498847 - RNA, 17 nt, Human
uuuagggguagcauuug

SEQ ID NO: 1498848 - RNA, 23 nt, Human
uuuaggauguguauuucauuuau

SEQ ID NO: 1498849 - RNA, 20 nt, Human
uuuacuucuaagucauucau

SEQ ID NO: 1498850 - RNA, 15 nt, Human
uuuacuucuuauaca

SEQ ID NO: 1498851 - RNA, 14 nt, Human
uuuacuucuuauac

SEQ ID NO: 1498852 - RNA, 13 nt, Human
uuuacuucuuaua

SEQ ID NO: 1498853 - RNA, 22 nt, Human
uuuaccugaagucuuuguacag

SEQ ID NO: 1498854 - RNA, 18 nt, Human
uuuaccugaagucuuugu

SEQ ID NO: 1498855 - RNA, 16 nt, Human
uuuacugcagcuuugu

SEQ ID NO: 1498856 - RNA, 11 nt, Human
uuuacuuaaac

SEQ ID NO: 1498857 - RNA, 13 nt, Human
uuucacauuggaa

SEQ ID NO: 1498858 - RNA, 14 nt, Human
uuucacauuggaaa

SEQ ID NO: 1498859 - RNA, 19 nt, Human
uuucacauuggaaacaagu

SEQ ID NO: 1498860 - RNA, 19 nt, Human
uuucaaacauauauaacaa

SEQ ID NO: 1498861 - RNA, 12 nt, Human
uuucaaacuuua

SEQ ID NO: 1498862 - RNA, 15 nt, Human
uuucaaacuuuacua

SEQ ID NO: 1498863 - RNA, 22 nt, Human
uuucacauaucuaguaugaaau

SEQ ID NO: 1498864 - RNA, 21 nt, Human
auggaaugcuguguuaaauaa

SEQ ID NO: 1498865 - RNA, 21 nt, Human
uuucaugcuguucaugaaaga

SEQ ID NO: 1498866 - RNA, 20 nt, Human
uuucaucugcucuccuuccu

SEQ ID NO: 1498867 - RNA, 19 nt, Human
uuucaugcuguucaugaaa

SEQ ID NO: 1498868 - RNA, 18 nt, Human
uuucaucugcucuccuuc

SEQ ID NO: 1498869 - RNA, 19 nt, Human
uuucaucugcucuccuucc

SEQ ID NO: 1498870 - RNA, 11 nt, Human
uuucaucugcu

SEQ ID NO: 1498871 - RNA, 15 nt, Human
uuucaucugcucucc

SEQ ID NO: 1498872 - RNA, 16 nt, Human
uuucaucugcucuccu

SEQ ID NO: 1498873 - RNA, 17 nt, Human
uuucaucugcucuccuu

SEQ ID NO: 1498874 - RNA, 13 nt, Human
uuucagaaaugug

SEQ ID NO: 1498875 - RNA, 12 nt, Human
uuucagaaaugu

SEQ ID NO: 1498876 - RNA, 11 nt, Human
uuucagaaaug

SEQ ID NO: 1498877 - RNA, 16 nt, Human
uuucccuauuagagaa

SEQ ID NO: 1498878 - RNA, 23 nt, Human
augcuguauuuuaaaagaaugau

SEQ ID NO: 1498879 - RNA, 22 nt, Human
augcuguauuuuaaaagaauga

SEQ ID NO: 1498880 - RNA, 22 nt, Human
augcuggcuguuggcugggggc

SEQ ID NO: 1498881 - RNA, 19 nt, Human
augcuggcuguuggcuggg

SEQ ID NO: 1498882 - RNA, 20 nt, Human
augcuggcuguuggcugggg

SEQ ID NO: 1498883 - RNA, 21 nt, Human
augcuucuguuuuauaauuuu

SEQ ID NO: 1498884 - RNA, 16 nt, Human
augcuucucacugcca

SEQ ID NO: 1498885 - RNA, 20 nt, Human
augcuucucacugccaugcc

SEQ ID NO: 1498886 - RNA, 17 nt, Human
auggaagacagcucuua

SEQ ID NO: 1498887 - RNA, 18 nt, Human
auggaagacagcucuuau

SEQ ID NO: 1498888 - RNA, 14 nt, Human
uuuaucagaauucu

SEQ ID NO: 1498889 - RNA, 14 nt, Human
augcuccuggccca

SEQ ID NO: 1498890 - RNA, 19 nt, Human
augcuccuggcccacugca

SEQ ID NO: 1498891 - RNA, 18 nt, Human
augcuggcuguuggcugg

SEQ ID NO: 1498892 - RNA, 20 nt, Human
uugguuuucacauuggaaac

SEQ ID NO: 1498893 - RNA, 14 nt, Human
uugguuuguaaauu

SEQ ID NO: 1498894 - RNA, 13 nt, Human
uugguguugacau

SEQ ID NO: 1498895 - RNA, 17 nt, Human
uuggugucgggcaugac

SEQ ID NO: 1498896 - RNA, 18 nt, Human
uuggugucgggcaugaca

SEQ ID NO: 1498897 - RNA, 19 nt, Human
uuggugucgggcaugacac

SEQ ID NO: 1498898 - RNA, 19 nt, Human
uuggugguuucagaaaugu

SEQ ID NO: 1498899 - RNA, 18 nt, Human
uuggugguuucagaaaug

SEQ ID NO: 1498900 - RNA, 20 nt, Human
augaaugucagugugacuga

SEQ ID NO: 1498901 - RNA, 16 nt, Human
augaaugucaguguga

SEQ ID NO: 1498902 - RNA, 18 nt, Human
augaaugucagugugacu

SEQ ID NO: 1498903 - RNA, 13 nt, Human
augaaauauuaug

SEQ ID NO: 1498904 - RNA, 23 nt, Human
augaaccacaucuugcucugcug

SEQ ID NO: 1498905 - RNA, 17 nt, Human
augaaugaaacauuuug

SEQ ID NO: 1498906 - RNA, 15 nt, Human
aucuuauaauuuaaa

SEQ ID NO: 1498907 - RNA, 16 nt, Human
aucuuauaauuuaaaa

SEQ ID NO: 1498908 - RNA, 14 nt, Human
aucuugcucugcug

SEQ ID NO: 1498909 - RNA, 17 nt, Human
aucuugcucugcugaca

SEQ ID NO: 1498910 - RNA, 15 nt, Human
aucuugcucugcuga

SEQ ID NO: 1498911 - RNA, 16 nt, Human
aucuugcucugcugac

SEQ ID NO: 1498912 - RNA, 12 nt, Human
aucugucauuug

SEQ ID NO: 1498913 - RNA, 17 nt, Human
aucugucauuugagcag

SEQ ID NO: 1498914 - RNA, 22 nt, Human
aucugucauuugagcagggcuc

SEQ ID NO: 1498915 - RNA, 17 nt, Human
uuggagaagaacugaaa

SEQ ID NO: 1498916 - RNA, 22 nt, Human
uuggagaagaacugaaaucaua

SEQ ID NO: 1498917 - RNA, 15 nt, Human
uuggagaagaacuga

SEQ ID NO: 1498918 - RNA, 18 nt, Human
uuggagacacaacuauuu

SEQ ID NO: 1498919 - RNA, 20 nt, Human
uugcuuugugauuuuuguaa

SEQ ID NO: 1498920 - RNA, 17 nt, Human
uuggaaaauaaauuauu

SEQ ID NO: 1498921 - RNA, 12 nt, Human
aucuuuaaaaua

SEQ ID NO: 1498922 - RNA, 15 nt, Human
aucuuuaaaauacac

SEQ ID NO: 1498923 - RNA, 15 nt, Human
uugcuuugugauuuu

SEQ ID NO: 1498924 - RNA, 22 nt, Human
uugcaagccagauuuuccugaa

SEQ ID NO: 1498925 - RNA, 21 nt, Human
uugauuaaauucuugcaaagu

SEQ ID NO: 1498926 - RNA, 20 nt, Human
uugauuaaauucuugcaaag

SEQ ID NO: 1498927 - RNA, 16 nt, Human
uugauuaaauucuugc

SEQ ID NO: 1498928 - RNA, 15 nt, Human
uugauuaaauucuug

SEQ ID NO: 1498929 - RNA, 17 nt, Human
aucugacuaugacauaa

SEQ ID NO: 1498930 - RNA, 14 nt, Human
aucugacuaugaca

SEQ ID NO: 1498931 - RNA, 23 nt, Human
uugauguucuuucacccuuuucu

SEQ ID NO: 1498932 - RNA, 12 nt, Human
aucugaaaaugu

SEQ ID NO: 1498933 - RNA, 17 nt, Human
aucucaaauuucuaaau

SEQ ID NO: 1498934 - RNA, 16 nt, Human
aucucaaauuucuaaa

SEQ ID NO: 1498935 - RNA, 23 nt, Human
aucucacacaugagcaucaggcc

SEQ ID NO: 1498936 - RNA, 14 nt, Human
uugcaugaggcuag

SEQ ID NO: 1498937 - RNA, 21 nt, Human
uugcaccacugcacuccagcc

SEQ ID NO: 1498938 - RNA, 14 nt, Human
uugcaauggcagcc

SEQ ID NO: 1498939 - RNA, 13 nt, Human
uugcccaggcagg

SEQ ID NO: 1498940 - RNA, 14 nt, Human
uugcccaggcaggu

SEQ ID NO: 1498941 - RNA, 16 nt, Human
uugcccaggcaggucu

SEQ ID NO: 1498942 - RNA, 18 nt, Human
uugcccaggcaggucuug

SEQ ID NO: 1498943 - RNA, 11 nt, Human
uugcccaggcu

SEQ ID NO: 1498944 - RNA, 12 nt, Human
uugcccaggcug

SEQ ID NO: 1498945 - RNA, 14 nt, Human
uugcccaggcuggc

SEQ ID NO: 1498946 - RNA, 23 nt, Human
uugcccaggcuggcgugcagugg

SEQ ID NO: 1498947 - RNA, 13 nt, Human
uugacaugggaca

SEQ ID NO: 1498948 - RNA, 19 nt, Human
uugacagggcacaccgggc

SEQ ID NO: 1498949 - RNA, 16 nt, Human
uugacaucaacugcau

SEQ ID NO: 1498950 - RNA, 19 nt, Human
uugacaggauuauuggaaa

SEQ ID NO: 1498951 - RNA, 10 nt, Human
uugacagggc

SEQ ID NO: 1498952 - RNA, 12 nt, Human
uugacagggcac

SEQ ID NO: 1498953 - RNA, 12 nt, Human
uugacuuuuuau

SEQ ID NO: 1498954 - RNA, 17 nt, Human
uugaccauucuccaccu

SEQ ID NO: 1498955 - RNA, 16 nt, Human
uugagcagggcucagc

SEQ ID NO: 1498956 - RNA, 12 nt, Human
uugagacagagu

SEQ ID NO: 1498957 - RNA, 12 nt, Human
uugagcagggcu

SEQ ID NO: 1498958 - RNA, 11 nt, Human
uugagacagag

SEQ ID NO: 1498959 - RNA, 15 nt, Human
aucucaaaacugcac

SEQ ID NO: 1498960 - RNA, 19 nt, Human
aucucaaaacugcacuguc

SEQ ID NO: 1498961 - RNA, 20 nt, Human
aucucaaaacugcacuguca

SEQ ID NO: 1498962 - RNA, 14 nt, Human
aucucaaauuucua

SEQ ID NO: 1498963 - RNA, 23 nt, Human
aucucaaauaacuaaaagguaug

SEQ ID NO: 1498964 - RNA, 14 nt, Human
aucucaaauaacua

SEQ ID NO: 1498965 - RNA, 21 nt, Human
aucucaaauaacuaaaaggua

SEQ ID NO: 1498966 - RNA, 19 nt, Human
aucuagauacuguaucaug

SEQ ID NO: 1498967 - RNA, 17 nt, Human
aucuaggaagacuuugg

SEQ ID NO: 1498968 - RNA, 18 nt, Human
aucuaggaagacuuugga

SEQ ID NO: 1498969 - RNA, 19 nt, Human
aucuaggaagacuuuggaa

SEQ ID NO: 1498970 - RNA, 22 nt, Human
aucuaggaagacuuuggaaaga

SEQ ID NO: 1498971 - RNA, 23 nt, Human
aucuaauauguaacaagccaccc

SEQ ID NO: 1498972 - RNA, 18 nt, Human
aucuagauacuguaucau

SEQ ID NO: 1498973 - RNA, 18 nt, Human
uugauagcacagacccug

SEQ ID NO: 1498974 - RNA, 17 nt, Human
uugauacuacaguuugu

SEQ ID NO: 1498975 - RNA, 21 nt, Human
uugagugcugucuccauguuu

SEQ ID NO: 1498976 - RNA, 14 nt, Human
auauuugaaauauu

SEQ ID NO: 1498977 - RNA, 19 nt, Human
auauuugaaauauugacuu

SEQ ID NO: 1498978 - RNA, 23 nt, Human
auauuugaaauauugacuuuuua

SEQ ID NO: 1498979 - RNA, 12 nt, Human
auauuuuaacuu

SEQ ID NO: 1498980 - RNA, 22 nt, Human
auauuuguaucacaaaucuuaa

SEQ ID NO: 1498981 - RNA, 13 nt, Human
auauuugaaauau

SEQ ID NO: 1498982 - RNA, 20 nt, Human
auauuguuuucaguguacau

SEQ ID NO: 1498983 - RNA, 17 nt, Human
auauuguguugugaaug

SEQ ID NO: 1498984 - RNA, 18 nt, Human
auauuguguugugaaugu

SEQ ID NO: 1498985 - RNA, 17 nt, Human
auauugcugauggugca

SEQ ID NO: 1498986 - RNA, 21 nt, Human
auauugcugauggugcaauga

SEQ ID NO: 1498987 - RNA, 22 nt, Human
auauucucacagcuccaagaau

SEQ ID NO: 1498988 - RNA, 23 nt, Human
auauucucacagcuccaagaauu

SEQ ID NO: 1498989 - RNA, 16 nt, Human
auauucuguuggccag

SEQ ID NO: 1498990 - RNA, 22 nt, Human
auauugauuuccguuaaaauac

SEQ ID NO: 1498991 - RNA, 21 nt, Human
auauugauuuccguuaaaaua

SEQ ID NO: 1498992 - RNA, 19 nt, Human
auauugauuuccguuaaaa

SEQ ID NO: 1498993 - RNA, 18 nt, Human
auauguuuuaagaggcag

SEQ ID NO: 1498994 - RNA, 20 nt, Human
auauguuuuaagaggcaggg

SEQ ID NO: 1498995 - RNA, 24 nt, Human
auauuaagaaagacuaucuaaaug

SEQ ID NO: 1498996 - RNA, 22 nt, Human
auauuaaggaagacaaugugaa

SEQ ID NO: 1498997 - RNA, 18 nt, Human
auauuuucaugcuguuca

SEQ ID NO: 1498998 - RNA, 21 nt, Human
auauuuucaugcuguucauga

SEQ ID NO: 1498999 - RNA, 15 nt, Human
uuccuucagugccuu

SEQ ID NO: 1499000 - RNA, 11 nt, Human
uuccuucagug

SEQ ID NO: 1499001 - RNA, 14 nt, Human
uuccuucagugccu

SEQ ID NO: 1499002 - RNA, 16 nt, Human
uuccugggagcuuuug

SEQ ID NO: 1499003 - RNA, 15 nt, Human
uuccugggagcuuuu

SEQ ID NO: 1499004 - RNA, 11 nt, Human
uuccucuuucc

SEQ ID NO: 1499005 - RNA, 17 nt, Human
uuccuguucccaugaga

SEQ ID NO: 1499006 - RNA, 17 nt, Human
uuccuaauccucuagga

SEQ ID NO: 1499007 - RNA, 13 nt, Human
uuccuaauccucu

SEQ ID NO: 1499008 - RNA, 15 nt, Human
uuccuaauccucuag

SEQ ID NO: 1499009 - RNA, 22 nt, Human
aucacggcucacugcagccuca

SEQ ID NO: 1499010 - RNA, 18 nt, Human
aucaaguauuauaccuuu

SEQ ID NO: 1499011 - RNA, 14 nt, Human
aucaaguauuauac

SEQ ID NO: 1499012 - RNA, 13 nt, Human
aucaaguauuaua

SEQ ID NO: 1499013 - RNA, 21 nt, Human
aucaagaugugacauguuuua

SEQ ID NO: 1499014 - RNA, 22 nt, Human
aucauuaaagccugaguuugcu

SEQ ID NO: 1499015 - RNA, 14 nt, Human
aucauugaaaucuu

SEQ ID NO: 1499016 - RNA, 15 nt, Human
aucauugaaaucuuu

SEQ ID NO: 1499017 - RNA, 23 nt, Human
aucauaguggcuuaaaacaacac

SEQ ID NO: 1499018 - RNA, 20 nt, Human
aucagugugucuaaauuuga

SEQ ID NO: 1499019 - RNA, 19 nt, Human
aucagugugucuaaauuug

SEQ ID NO: 1499020 - RNA, 16 nt, Human
aucagcacgauuucug

SEQ ID NO: 1499021 - RNA, 15 nt, Human
aucagcacgauuucu

SEQ ID NO: 1499022 - RNA, 18 nt, Human
aucagcacgauuucuguu

SEQ ID NO: 1499023 - RNA, 17 nt, Human
aucagcacgauuucugu

SEQ ID NO: 1499024 - RNA, 14 nt, Human
uucucaacuccaaa

SEQ ID NO: 1499025 - RNA, 18 nt, Human
uucucaacuccaaacuga

SEQ ID NO: 1499026 - RNA, 14 nt, Human
uuccuuuuuuugau

SEQ ID NO: 1499027 - RNA, 13 nt, Human
uucuaggccuggg

SEQ ID NO: 1499028 - RNA, 20 nt, Human
uucucacagcuccaagaauu

SEQ ID NO: 1499029 - RNA, 19 nt, Human
uucucagaaucucaaauaa

SEQ ID NO: 1499030 - RNA, 22 nt, Human
uucucagaaucucaaauaacua

SEQ ID NO: 1499031 - RNA, 23 nt, Human
uucucagaaucucaaauaacuaa

SEQ ID NO: 1499032 - RNA, 19 nt, Human
uucuggguggggcaguggg

SEQ ID NO: 1499033 - RNA, 23 nt, Human
uucugccgcagcccugcagaggg

SEQ ID NO: 1499034 - RNA, 10 nt, Human
uucugggaca

SEQ ID NO: 1499035 - RNA, 11 nt, Human
uucugggacac

SEQ ID NO: 1499036 - RNA, 22 nt, Human
uucugggacacaguucaauucu

SEQ ID NO: 1499037 - RNA, 14 nt, Human
uucugaagaagaug

SEQ ID NO: 1499038 - RNA, 23 nt, Human
uucugcaucagcugcugaaacaa

SEQ ID NO: 1499039 - RNA, 12 nt, Human
uucugaagaaga

SEQ ID NO: 1499040 - RNA, 13 nt, Human
uucugaagaagau

SEQ ID NO: 1499041 - RNA, 21 nt, Human
uucugaaauuuccugggagcu

SEQ ID NO: 1499042 - RNA, 20 nt, Human
aucauugaaaucuuuuugcu

SEQ ID NO: 1499043 - RNA, 19 nt, Human
aucauugaaaucuuuuugc

SEQ ID NO: 1499044 - RNA, 15 nt, Human
uucugaaagggacgc

SEQ ID NO: 1499045 - RNA, 19 nt, Human
uucugaaaauuaacacugc

SEQ ID NO: 1499046 - RNA, 17 nt, Human
aucccauaugccugggc

SEQ ID NO: 1499047 - RNA, 16 nt, Human
aucccauaugccuggg

SEQ ID NO: 1499048 - RNA, 15 nt, Human
auccagguucagcuu

SEQ ID NO: 1499049 - RNA, 16 nt, Human
auccagguucagcuug

SEQ ID NO: 1499050 - RNA, 15 nt, Human
uucaaacauauauaa

SEQ ID NO: 1499051 - RNA, 16 nt, Human
uucaaacuuuggaaca

SEQ ID NO: 1499052 - RNA, 17 nt, Human
uucaaguuaaauuuuau

SEQ ID NO: 1499053 - RNA, 22 nt, Human
uucaagaaaacaacuucaauau

SEQ ID NO: 1499054 - RNA, 15 nt, Human
uucaaggauccugag

SEQ ID NO: 1499055 - RNA, 16 nt, Human
uucaaggauccugagc

SEQ ID NO: 1499056 - RNA, 18 nt, Human
uucaaggauccugagcca

SEQ ID NO: 1499057 - RNA, 19 nt, Human
uucaaggauccugagccag

SEQ ID NO: 1499058 - RNA, 21 nt, Human
uucaaggauccugagccagau

SEQ ID NO: 1499059 - RNA, 22 nt, Human
auaggaauugacccacaagaaa

SEQ ID NO: 1499060 - RNA, 19 nt, Human
auaggaacuuaaauaaugu

SEQ ID NO: 1499061 - RNA, 21 nt, Human
auaggaauugacccacaagaa

SEQ ID NO: 1499062 - RNA, 14 nt, Human
uucacauuggaaac

SEQ ID NO: 1499063 - RNA, 22 nt, Human
uucaccacaugugcacaugcac

SEQ ID NO: 1499064 - RNA, 13 nt, Human
uucacauuggaaa

SEQ ID NO: 1499065 - RNA, 17 nt, Human
uucacauauugauuucc

SEQ ID NO: 1499066 - RNA, 20 nt, Human
uucacauaucuaguaugaaa

SEQ ID NO: 1499067 - RNA, 21 nt, Human
uucacauaucuaguaugaaau

SEQ ID NO: 1499068 - RNA, 13 nt, Human
uucacaguucucu

SEQ ID NO: 1499069 - RNA, 17 nt, Human
auagcuacuaauuuuaa

SEQ ID NO: 1499070 - RNA, 14 nt, Human
auagcuacuaauuu

SEQ ID NO: 1499071 - RNA, 18 nt, Human
auagccugccucuucucu

SEQ ID NO: 1499072 - RNA, 13 nt, Human
auaagauaaaugu

SEQ ID NO: 1499073 - RNA, 17 nt, Human
auaagauaaaugugcug

SEQ ID NO: 1499074 - RNA, 18 nt, Human
auagcuacuaauuuuaaa

SEQ ID NO: 1499075 - RNA, 19 nt, Human
auagcucaggugucccugc

SEQ ID NO: 1499076 - RNA, 12 nt, Human
auagcugggacu

SEQ ID NO: 1499077 - RNA, 22 nt, Human
auagcucaggugucccugcacu

SEQ ID NO: 1499078 - RNA, 20 nt, Human
auagcucaggugucccugca

SEQ ID NO: 1499079 - RNA, 21 nt, Human
auagcucaggugucccugcac

SEQ ID NO: 1499080 - RNA, 16 nt, Human
uuauuuaguuccuuga

SEQ ID NO: 1499081 - RNA, 18 nt, Human
uuauuuaaugaaagacug

SEQ ID NO: 1499082 - RNA, 22 nt, Human
uuauuuaaugaaagacuguaca

SEQ ID NO: 1499083 - RNA, 14 nt, Human
uuauuuaaauuuua

SEQ ID NO: 1499084 - RNA, 23 nt, Human
auagcuggucuuauuuguaaagc

SEQ ID NO: 1499085 - RNA, 22 nt, Human
auagcuggucuuauuuguaaag

SEQ ID NO: 1499086 - RNA, 17 nt, Human
auagcugggacuacagg

SEQ ID NO: 1499087 - RNA, 17 nt, Human
uuauuguuuaaaaucau

SEQ ID NO: 1499088 - RNA, 17 nt, Human
auaucuauauuuuacau

SEQ ID NO: 1499089 - RNA, 16 nt, Human
auaucuauauuuuaca

SEQ ID NO: 1499090 - RNA, 20 nt, Human
auaucuauauuuuacauaaa

SEQ ID NO: 1499091 - RNA, 22 nt, Human
auaucuauauuuuacauaaauu

SEQ ID NO: 1499092 - RNA, 21 nt, Human
uucaucauccuaagcuauuca

SEQ ID NO: 1499093 - RNA, 18 nt, Human
uucaucauccuaagcuau

SEQ ID NO: 1499094 - RNA, 16 nt, Human
uucauauuuacuucuu

SEQ ID NO: 1499095 - RNA, 21 nt, Human
uucauauuuacuucuuauaca

SEQ ID NO: 1499096 - RNA, 14 nt, Human
uucaguaauaacuc

SEQ ID NO: 1499097 - RNA, 13 nt, Human
auaugauucaaau

SEQ ID NO: 1499098 - RNA, 22 nt, Human
auaugauucaaaugucuauaaa

SEQ ID NO: 1499099 - RNA, 20 nt, Human
auaugauuuaaaucagccgu

SEQ ID NO: 1499100 - RNA, 12 nt, Human
auaugauucaaa

SEQ ID NO: 1499101 - RNA, 22 nt, Human
auaucugaaaauguauguguaa

SEQ ID NO: 1499102 - RNA, 13 nt, Human
auaugugaacagu

SEQ ID NO: 1499103 - RNA, 14 nt, Human
auaugucaagccau

SEQ ID NO: 1499104 - RNA, 13 nt, Human
auaugcacacauu

SEQ ID NO: 1499105 - RNA, 23 nt, Human
auaugcaaagcacugacuucuaa

SEQ ID NO: 1499106 - RNA, 16 nt, Human
auaugcaaagcacuga

SEQ ID NO: 1499107 - RNA, 17 nt, Human
auauaacaaugcuguau

SEQ ID NO: 1499108 - RNA, 19 nt, Human
auauaagcuuguauuccuu

SEQ ID NO: 1499109 - RNA, 17 nt, Human
auauaaguauucuaaau

SEQ ID NO: 1499110 - RNA, 12 nt, Human
auauaacaaugc

SEQ ID NO: 1499111 - RNA, 15 nt, Human
auauaacaaugcugu

SEQ ID NO: 1499112 - RNA, 17 nt, Human
auauauaacaaugcugu

SEQ ID NO: 1499113 - RNA, 18 nt, Human
auauauaacaaugcugua

SEQ ID NO: 1499114 - RNA, 19 nt, Human
auauauaacaaugcuguau

SEQ ID NO: 1499115 - RNA, 19 nt, Human
auauaaguauucuaaauuu

SEQ ID NO: 1499116 - RNA, 18 nt, Human
auagucaaauugugugaa

SEQ ID NO: 1499117 - RNA, 13 nt, Human
auauaaacacuau

SEQ ID NO: 1499118 - RNA, 15 nt, Human
auauaaacacuauau

SEQ ID NO: 1499119 - RNA, 14 nt, Human
uucagaaaauauua

SEQ ID NO: 1499120 - RNA, 20 nt, Human
uucagaaaauauuauguguu

SEQ ID NO: 1499121 - RNA, 21 nt, Human
uucagaaaauauuauguguuu

SEQ ID NO: 1499122 - RNA, 14 nt, Human
auauauacauauau

SEQ ID NO: 1499123 - RNA, 19 nt, Human
uucagccaagaauucuuaa

SEQ ID NO: 1499124 - RNA, 12 nt, Human
uucagcccucac

SEQ ID NO: 1499125 - RNA, 16 nt, Human
uucagcccucaccccu

SEQ ID NO: 1499126 - RNA, 17 nt, Human
uucagaucucuaacuuc

SEQ ID NO: 1499127 - RNA, 14 nt, Human
uucagacagcugcc

SEQ ID NO: 1499128 - RNA, 15 nt, Human
uuacuguaagaaaau

SEQ ID NO: 1499129 - RNA, 11 nt, Human
uuagaaauaua

SEQ ID NO: 1499130 - RNA, 12 nt, Human
uuagaaauauaa

SEQ ID NO: 1499131 - RNA, 14 nt, Human
uuagaaauauaauu

SEQ ID NO: 1499132 - RNA, 13 nt, Human
uuagacagagucu

SEQ ID NO: 1499133 - RNA, 11 nt, Human
uuagacagagu

SEQ ID NO: 1499134 - RNA, 18 nt, Human
uuacaucaaggcuucaaa

SEQ ID NO: 1499135 - RNA, 14 nt, Human
uuaccuuacagaag

SEQ ID NO: 1499136 - RNA, 23 nt, Human
uuacucagaauucucuaguuuga

SEQ ID NO: 1499137 - RNA, 18 nt, Human
uuacucagaauucucuag

SEQ ID NO: 1499138 - RNA, 15 nt, Human
uuacaggaaguacug

SEQ ID NO: 1499139 - RNA, 14 nt, Human
uuacaggaaguacu

SEQ ID NO: 1499140 - RNA, 16 nt, Human
auaaaauaauuuuuau

SEQ ID NO: 1499141 - RNA, 21 nt, Human
auaaaauaauuuuuauauuug

SEQ ID NO: 1499142 - RNA, 22 nt, Human
auaaaauaauuuuuauauuuga

SEQ ID NO: 1499143 - RNA, 18 nt, Human
auaaaauccauacauuug

SEQ ID NO: 1499144 - RNA, 19 nt, Human
auaaaauccauacauuugu

SEQ ID NO: 1499145 - RNA, 18 nt, Human
uuaaguaaugauaacugg

SEQ ID NO: 1499146 - RNA, 17 nt, Human
uuaaguacuauguauca

SEQ ID NO: 1499147 - RNA, 14 nt, Human
uuaagugcugcauu

SEQ ID NO: 1499148 - RNA, 18 nt, Human
uuaaguuagggaauggca

SEQ ID NO: 1499149 - RNA, 21 nt, Human
uuaagagguugauuauaaagu

SEQ ID NO: 1499150 - RNA, 15 nt, Human
uuaagaggcaggguc

SEQ ID NO: 1499151 - RNA, 16 nt, Human
uuaagaggcagggucu

SEQ ID NO: 1499152 - RNA, 22 nt, Human
uuaagaagacugcauuauauuu

SEQ ID NO: 1499153 - RNA, 13 nt, Human
uuaagaggcaggg

SEQ ID NO: 1499154 - RNA, 17 nt, Human
uuaauuccaauuauaug

SEQ ID NO: 1499155 - RNA, 15 nt, Human
uuaauucuuagcuca

SEQ ID NO: 1499156 - RNA, 23 nt, Human
uuaaugaaagacuguacaaagua

SEQ ID NO: 1499157 - RNA, 20 nt, Human
uuaaugaaagacuguacaaa

SEQ ID NO: 1499158 - RNA, 22 nt, Human
auaaacaagaccacguuucuaa

SEQ ID NO: 1499159 - RNA, 15 nt, Human
auaaacaagaccacg

SEQ ID NO: 1499160 - RNA, 23 nt, Human
auaaacaagaccacguuucuaaa

SEQ ID NO: 1499161 - RNA, 19 nt, Human
uuaauuuuuuugagacaga

SEQ ID NO: 1499162 - RNA, 13 nt, Human
uuaaauaauguga

SEQ ID NO: 1499163 - RNA, 22 nt, Human
aguugcauagguuuaauaauuu

SEQ ID NO: 1499164 - RNA, 16 nt, Human
aguuggcuaggacccc

SEQ ID NO: 1499165 - RNA, 21 nt, Human
aguuggguggaugccuggugg

SEQ ID NO: 1499166 - RNA, 13 nt, Human
aguugggcuuccu

SEQ ID NO: 1499167 - RNA, 18 nt, Human
aguuggucccccuuccau

SEQ ID NO: 1499168 - RNA, 18 nt, Human
aguuguaccgcaauguga

SEQ ID NO: 1499169 - RNA, 21 nt, Human
aguuguuugauucagacagcu

SEQ ID NO: 1499170 - RNA, 23 nt, Human
aguuguuugauucagacagcugc

SEQ ID NO: 1499171 - RNA, 19 nt, Human
uguugcccaggcaggucuu

SEQ ID NO: 1499172 - RNA, 19 nt, Human
uguuuauugucaaaguggu

SEQ ID NO: 1499173 - RNA, 14 nt, Human
uguuuauuuauaga

SEQ ID NO: 1499174 - RNA, 24 nt, Human
uguuuauuuauagaguguacuuaa

SEQ ID NO: 1499175 - RNA, 17 nt, Human
uguuugauucagacagc

SEQ ID NO: 1499176 - RNA, 22 nt, Human
uguuugauucagacagcugccu

SEQ ID NO: 1499177 - RNA, 21 nt, Human
uguuugacgggaaacaaaacu

SEQ ID NO: 1499178 - RNA, 14 nt, Human
uguuuugcaagcca

SEQ ID NO: 1499179 - RNA, 21 nt, Human
aguucugcagauaaacaguag

SEQ ID NO: 1499180 - RNA, 16 nt, Human
aguucugcagauaaac

SEQ ID NO: 1499181 - RNA, 14 nt, Human
aguucugguuccua

SEQ ID NO: 1499182 - RNA, 21 nt, Human
uguuuuauuuaaccucuaaau

SEQ ID NO: 1499183 - RNA, 21 nt, Human
uguuuuauuuuaauucaguug

SEQ ID NO: 1499184 - RNA, 19 nt, Human
uguuuugaaucucauaauu

SEQ ID NO: 1499185 - RNA, 19 nt, Human
uguuuucauuaucucaaaa

SEQ ID NO: 1499186 - RNA, 20 nt, Human
uguuuuccaugaguccccug

SEQ ID NO: 1499187 - RNA, 13 nt, Human
uguguugaagagg

SEQ ID NO: 1499188 - RNA, 22 nt, Human
uguguuaaguauguguaaaaug

SEQ ID NO: 1499189 - RNA, 19 nt, Human
uguguuaaguauguguaaa

SEQ ID NO: 1499190 - RNA, 15 nt, Human
uguuaaguaugugua

SEQ ID NO: 1499191 - RNA, 16 nt, Human
uguuaaguauguguaa

SEQ ID NO: 1499192 - RNA, 20 nt, Human
ugugugaaagguacuucaaa

SEQ ID NO: 1499193 - RNA, 19 nt, Human
uguguguuuauugucaaag

SEQ ID NO: 1499194 - RNA, 23 nt, Human
uguguguuuauugucaaaguggu

SEQ ID NO: 1499195 - RNA, 13 nt, Human
uguguaaguagau

SEQ ID NO: 1499196 - RNA, 17 nt, Human
ugugucucuugguccug

SEQ ID NO: 1499197 - RNA, 20 nt, Human
ugugucucuugguccugcug

SEQ ID NO: 1499198 - RNA, 21 nt, Human
ugugucuugcaauggcagccu

SEQ ID NO: 1499199 - RNA, 21 nt, Human
ugugucucuugguccugcugc

SEQ ID NO: 1499200 - RNA, 22 nt, Human
ugugucucuugguccugcugca

SEQ ID NO: 1499201 - RNA, 18 nt, Human
uguguaagacaaaaagcu

SEQ ID NO: 1499202 - RNA, 20 nt, Human
ugugguguuuccuggcacug

SEQ ID NO: 1499203 - RNA, 14 nt, Human
ugugguguuuccug

SEQ ID NO: 1499204 - RNA, 16 nt, Human
ugugguguuuccuggc

SEQ ID NO: 1499205 - RNA, 16 nt, Human
uguggucccaccccac

SEQ ID NO: 1499206 - RNA, 13 nt, Human
uguggucccaccc

SEQ ID NO: 1499207 - RNA, 15 nt, Human
uguggucccacccca

SEQ ID NO: 1499208 - RNA, 21 nt, Human
uguggguuucuaaagcugcca

SEQ ID NO: 1499209 - RNA, 23 nt, Human
uguggguuucuaaagcugccagc

SEQ ID NO: 1499210 - RNA, 13 nt, Human
agugcugcauuua

SEQ ID NO: 1499211 - RNA, 12 nt, Human
agugcugcauuu

SEQ ID NO: 1499212 - RNA, 22 nt, Human
agugaguugauagcacagaccc

SEQ ID NO: 1499213 - RNA, 23 nt, Human
agugaguugauagcacagacccu

SEQ ID NO: 1499214 - RNA, 19 nt, Human
agugcugcauuuaaaagau

SEQ ID NO: 1499215 - RNA, 20 nt, Human
agugcugggauuacaggugu

SEQ ID NO: 1499216 - RNA, 17 nt, Human
agugcugcauuuaaaag

SEQ ID NO: 1499217 - RNA, 16 nt, Human
agugcugcauuuaaaa

SEQ ID NO: 1499218 - RNA, 21 nt, Human
agugcugggauuacaggugug

SEQ ID NO: 1499219 - RNA, 15 nt, Human
uguuauaaucuuuca

SEQ ID NO: 1499220 - RNA, 20 nt, Human
agugugucuuagugugugca

SEQ ID NO: 1499221 - RNA, 14 nt, Human
agugugucuaaauu

SEQ ID NO: 1499222 - RNA, 20 nt, Human
uguuccacaaguuaaauaaa

SEQ ID NO: 1499223 - RNA, 16 nt, Human
uguucugggacacagu

SEQ ID NO: 1499224 - RNA, 14 nt, Human
uguuccuagugaaa

SEQ ID NO: 1499225 - RNA, 18 nt, Human
uguuccuagugaaagagg

SEQ ID NO: 1499226 - RNA, 13 nt, Human
uguugcccaggca

SEQ ID NO: 1499227 - RNA, 15 nt, Human
uguugcccaggcagg

SEQ ID NO: 1499228 - RNA, 16 nt, Human
uguugcccaggcaggu

SEQ ID NO: 1499229 - RNA, 17 nt, Human
uguugcccaggcagguc

SEQ ID NO: 1499230 - RNA, 18 nt, Human
uguugcccaggcaggucu

SEQ ID NO: 1499231 - RNA, 17 nt, Human
aguggugcgaucugggu

SEQ ID NO: 1499232 - RNA, 23 nt, Human
aguggugguuuucuguucuuucu

SEQ ID NO: 1499233 - RNA, 21 nt, Human
aguggugguuuucuguucuuu

SEQ ID NO: 1499234 - RNA, 20 nt, Human
aguggugguuuucuguucuu

SEQ ID NO: 1499235 - RNA, 19 nt, Human
aguggugguuuucuguucu

SEQ ID NO: 1499236 - RNA, 18 nt, Human
aguggugguuuucuguuc

SEQ ID NO: 1499237 - RNA, 17 nt, Human
aguggugguuuucuguu

SEQ ID NO: 1499238 - RNA, 21 nt, Human
agugguggugaacagaacaaa

SEQ ID NO: 1499239 - RNA, 17 nt, Human
aguguacuuaacuauuc

SEQ ID NO: 1499240 - RNA, 16 nt, Human
agugugguguuuccug

SEQ ID NO: 1499241 - RNA, 20 nt, Human
agugugccugaagucccaga

SEQ ID NO: 1499242 - RNA, 17 nt, Human
agugugguguuuccugg

SEQ ID NO: 1499243 - RNA, 19 nt, Human
agugugguguuuccuggca

SEQ ID NO: 1499244 - RNA, 20 nt, Human
agugugguguuuccuggcac

SEQ ID NO: 1499245 - RNA, 12 nt, Human
ugugccacaggc

SEQ ID NO: 1499246 - RNA, 16 nt, Human
ugugccacaggcuuag

SEQ ID NO: 1499247 - RNA, 20 nt, Human
ugugccagguuuuuggucug

SEQ ID NO: 1499248 - RNA, 12 nt, Human
ugugccaugugc

SEQ ID NO: 1499249 - RNA, 16 nt, Human
ugugccaugugccagg

SEQ ID NO: 1499250 - RNA, 17 nt, Human
agugaaagaaaauaaca

SEQ ID NO: 1499251 - RNA, 15 nt, Human
agugaaagaaaauaa

SEQ ID NO: 1499252 - RNA, 16 nt, Human
agugaacaaauuuaca

SEQ ID NO: 1499253 - RNA, 20 nt, Human
agugaacaaauuuacagaga

SEQ ID NO: 1499254 - RNA, 18 nt, Human
ugugaugagaggaaauca

SEQ ID NO: 1499255 - RNA, 19 nt, Human
ugugauggggcccugccuc

SEQ ID NO: 1499256 - RNA, 20 nt, Human
ugugauggggcccugccucc

SEQ ID NO: 1499257 - RNA, 16 nt, Human
ugugauguauucuagc

SEQ ID NO: 1499258 - RNA, 14 nt, Human
ugugauguauucua

SEQ ID NO: 1499259 - RNA, 15 nt, Human
agugaggcucugccc

SEQ ID NO: 1499260 - RNA, 16 nt, Human
agugaggcucugcccu

SEQ ID NO: 1499261 - RNA, 17 nt, Human
agugaggcucugcccuu

SEQ ID NO: 1499262 - RNA, 21 nt, Human
agugaggcucugcccuugguu

SEQ ID NO: 1499263 - RNA, 19 nt, Human
agugaggcucugcccuugg

SEQ ID NO: 1499264 - RNA, 20 nt, Human
agugaggcucugcccuuggu

SEQ ID NO: 1499265 - RNA, 15 nt, Human
agugagucgaggaca

SEQ ID NO: 1499266 - RNA, 21 nt, Human
ugugcccccauguaagcaccc

SEQ ID NO: 1499267 - RNA, 21 nt, Human
uguggaguucaucuugaauug

SEQ ID NO: 1499268 - RNA, 17 nt, Human
uguggaguucaucuuga

SEQ ID NO: 1499269 - RNA, 20 nt, Human
ugugaacaguuguguuugaa

SEQ ID NO: 1499270 - RNA, 19 nt, Human
ugugaaccaccacacccag

SEQ ID NO: 1499271 - RNA, 20 nt, Human
ugugaaccaccacacccagc

SEQ ID NO: 1499272 - RNA, 21 nt, Human
ugugaaccaccacacccagcc

SEQ ID NO: 1499273 - RNA, 14 nt, Human
ugugaagagaacca

SEQ ID NO: 1499274 - RNA, 15 nt, Human
ugugaaaggaaagag

SEQ ID NO: 1499275 - RNA, 18 nt, Human
ugugaaaggaaagaggcu

SEQ ID NO: 1499276 - RNA, 21 nt, Human
ugugaaaggaaagagggaggu

SEQ ID NO: 1499277 - RNA, 18 nt, Human
agucacuaccuucaugca

SEQ ID NO: 1499278 - RNA, 19 nt, Human
agucucaugccuugagauc

SEQ ID NO: 1499279 - RNA, 21 nt, Human
agucucaugccuugagaucug

SEQ ID NO: 1499280 - RNA, 15 nt, Human
ugugacugaauuucu

SEQ ID NO: 1499281 - RNA, 16 nt, Human
ugugacugaauuucuu

SEQ ID NO: 1499282 - RNA, 16 nt, Human
ugugacugaucucucg

SEQ ID NO: 1499283 - RNA, 15 nt, Human
ugugagaugcuagaa

SEQ ID NO: 1499284 - RNA, 19 nt, Human
ugugagaugcuagaacucc

SEQ ID NO: 1499285 - RNA, 22 nt, Human
ugugagaugcuagaacucccuu

SEQ ID NO: 1499286 - RNA, 22 nt, Human
agucucaggaaaucaaauaugc

SEQ ID NO: 1499287 - RNA, 14 nt, Human
agucuuuguacaga

SEQ ID NO: 1499288 - RNA, 14 nt, Human
uguaguguuggaga

SEQ ID NO: 1499289 - RNA, 15 nt, Human
uguaguguuggagaa

SEQ ID NO: 1499290 - RNA, 16 nt, Human
uguaguguuggagaag

SEQ ID NO: 1499291 - RNA, 17 nt, Human
uguaucaaugaguaaca

SEQ ID NO: 1499292 - RNA, 15 nt, Human
uguaucacaaaucuu

SEQ ID NO: 1499293 - RNA, 18 nt, Human
uguaucacaaaucuuaac

SEQ ID NO: 1499294 - RNA, 22 nt, Human
uguauuacaaauccaaugaaau

SEQ ID NO: 1499295 - RNA, 20 nt, Human
uguauucuagcuaauguaau

SEQ ID NO: 1499296 - RNA, 13 nt, Human
uguauuacaaauc

SEQ ID NO: 1499297 - RNA, 20 nt, Human
uguauucucuccuguaccuc

SEQ ID NO: 1499298 - RNA, 19 nt, Human
uguauucucuccuguaccu

SEQ ID NO: 1499299 - RNA, 22 nt, Human
uguauucuagcuaauguaauaa

SEQ ID NO: 1499300 - RNA, 18 nt, Human
aguauuagaauaccacag

SEQ ID NO: 1499301 - RNA, 18 nt, Human
aguauuacuucugcuaca

SEQ ID NO: 1499302 - RNA, 17 nt, Human
aguaugguggcuggguu

SEQ ID NO: 1499303 - RNA, 15 nt, Human
aguaugguggcuggg

SEQ ID NO: 1499304 - RNA, 16 nt, Human
aguaugguggcugggu

SEQ ID NO: 1499305 - RNA, 19 nt, Human
ugucaauuacaggaaguac

SEQ ID NO: 1499306 - RNA, 17 nt, Human
ugucaauuacaggaagu

SEQ ID NO: 1499307 - RNA, 16 nt, Human
aguaguaauagagcaa

SEQ ID NO: 1499308 - RNA, 14 nt, Human
ugucaauuacagga

SEQ ID NO: 1499309 - RNA, 15 nt, Human
ugucaauuacaggaa

SEQ ID NO: 1499310 - RNA, 17 nt, Human
aguauuucuaugaaaua

SEQ ID NO: 1499311 - RNA, 16 nt, Human
aguauuucuaugaaau

SEQ ID NO: 1499312 - RNA, 18 nt, Human
aguauuucuaugaaauau

SEQ ID NO: 1499313 - RNA, 21 nt, Human
aguauuagaauaccacaggaa

SEQ ID NO: 1499314 - RNA, 14 nt, Human
agucaccucaugga

SEQ ID NO: 1499315 - RNA, 15 nt, Human
agucaccucauggaa

SEQ ID NO: 1499316 - RNA, 17 nt, Human
agucaccucauggaauu

SEQ ID NO: 1499317 - RNA, 19 nt, Human
agucaccccggccaccugc

SEQ ID NO: 1499318 - RNA, 15 nt, Human
agucacacagugagu

SEQ ID NO: 1499319 - RNA, 23 nt, Human
agucacacagugagucgaggaca

SEQ ID NO: 1499320 - RNA, 16 nt, Human
uguagagccagggucu

SEQ ID NO: 1499321 - RNA, 18 nt, Human
uguagagccagggucuca

SEQ ID NO: 1499322 - RNA, 16 nt, Human
uguagaggagaaacug

SEQ ID NO: 1499323 - RNA, 13 nt, Human
aguaaaauccaca

SEQ ID NO: 1499324 - RNA, 18 nt, Human
aguaaugauaacuggaaa

SEQ ID NO: 1499325 - RNA, 20 nt, Human
aguaaugauaacuggaaacu

SEQ ID NO: 1499326 - RNA, 17 nt, Human
aguaaugauaacuggaa

SEQ ID NO: 1499327 - RNA, 17 nt, Human
aguaauaugcacacauu

SEQ ID NO: 1499328 - RNA, 14 nt, Human
aguaauagagcaaa

SEQ ID NO: 1499329 - RNA, 15 nt, Human
aguaauaugcacaca

SEQ ID NO: 1499330 - RNA, 14 nt, Human
aguaauaugcacac

SEQ ID NO: 1499331 - RNA, 15 nt, Human
aguaauucaagaaaa

SEQ ID NO: 1499332 - RNA, 16 nt, Human
aguacauuuggagaca

SEQ ID NO: 1499333 - RNA, 21 nt, Human
aguagaagucuuagauguaua

SEQ ID NO: 1499334 - RNA, 19 nt, Human
aguagaagucuuagaugua

SEQ ID NO: 1499335 - RNA, 20 nt, Human
aguagaagucuuagauguau

SEQ ID NO: 1499336 - RNA, 14 nt, Human
uguaguaucucaua

SEQ ID NO: 1499337 - RNA, 17 nt, Human
uguaggcauaaagucag

SEQ ID NO: 1499338 - RNA, 20 nt, Human
uguaggcauaaagucagggg

SEQ ID NO: 1499339 - RNA, 11 nt, Human
aguagagacag

SEQ ID NO: 1499340 - RNA, 21 nt, Human
aggugagaagcagaggaagga

SEQ ID NO: 1499341 - RNA, 23 nt, Human
aggugagaagcagaggaaggaga

SEQ ID NO: 1499342 - RNA, 16 nt, Human
aggugagaagcagagg

SEQ ID NO: 1499343 - RNA, 22 nt, Human
aggugacagagugagacucugu

SEQ ID NO: 1499344 - RNA, 13 nt, Human
aggugaccccagg

SEQ ID NO: 1499345 - RNA, 18 nt, Human
aggucuugaacuccuggc

SEQ ID NO: 1499346 - RNA, 17 nt, Human
aggucuugaacuccugg

SEQ ID NO: 1499347 - RNA, 13 nt, Human
aggugacagagug

SEQ ID NO: 1499348 - RNA, 15 nt, Human
aggugacagagugag

SEQ ID NO: 1499349 - RNA, 16 nt, Human
aggucuugaacuccug

SEQ ID NO: 1499350 - RNA, 15 nt, Human
uggucagauuugaac

SEQ ID NO: 1499351 - RNA, 16 nt, Human
uggucagauuugaacu

SEQ ID NO: 1499352 - RNA, 13 nt, Human
aggucagagccug

SEQ ID NO: 1499353 - RNA, 14 nt, Human
aggucagagccugc

SEQ ID NO: 1499354 - RNA, 15 nt, Human
aggucagagccugca

SEQ ID NO: 1499355 - RNA, 17 nt, Human
aggucagagccugcagu

SEQ ID NO: 1499356 - RNA, 18 nt, Human
aggucagagccugcaguu

SEQ ID NO: 1499357 - RNA, 14 nt, Human
ugguggcagcugcg

SEQ ID NO: 1499358 - RNA, 15 nt, Human
ugguggcagcugcgg

SEQ ID NO: 1499359 - RNA, 12 nt, Human
ugguggcagugg

SEQ ID NO: 1499360 - RNA, 18 nt, Human
ugguuaggcauuguggga

SEQ ID NO: 1499361 - RNA, 20 nt, Human
ugguuaggcauugugggaag

SEQ ID NO: 1499362 - RNA, 11 nt, Human
uggugucucca

SEQ ID NO: 1499363 - RNA, 19 nt, Human
uggugucuccaacccccca

SEQ ID NO: 1499364 - RNA, 20 nt, Human
uggugucuccaaccccccag

SEQ ID NO: 1499365 - RNA, 23 nt, Human
uggugugaccacugcagaagaca

SEQ ID NO: 1499366 - RNA, 16 nt, Human
uggugcgaucuggguu

SEQ ID NO: 1499367 - RNA, 17 nt, Human
uggugcgaucuggguuc

SEQ ID NO: 1499368 - RNA, 19 nt, Human
uggugcccuggaugcccag

SEQ ID NO: 1499369 - RNA, 21 nt, Human
aggugauccacccaccucagc

SEQ ID NO: 1499370 - RNA, 18 nt, Human
aggugauauuuuucuuau

SEQ ID NO: 1499371 - RNA, 14 nt, Human
aggugauccaccca

SEQ ID NO: 1499372 - RNA, 20 nt, Human
aggugauccacccaccucag

SEQ ID NO: 1499373 - RNA, 15 nt, Human
aggugggauccucca

SEQ ID NO: 1499374 - RNA, 18 nt, Human
aggugccucaagagaagg

SEQ ID NO: 1499375 - RNA, 16 nt, Human
aggugggauccuccag

SEQ ID NO: 1499376 - RNA, 17 nt, Human
aggugggauccuccagg

SEQ ID NO: 1499377 - RNA, 18 nt, Human
aggugggauccuccaggu

SEQ ID NO: 1499378 - RNA, 23 nt, Human
agguggggcagcuugaggguugg

SEQ ID NO: 1499379 - RNA, 14 nt, Human
agguuuaagcuguu

SEQ ID NO: 1499380 - RNA, 19 nt, Human
agguggggucacucuggca

SEQ ID NO: 1499381 - RNA, 23 nt, Human
agguggggucacucuggcagcuc

SEQ ID NO: 1499382 - RNA, 17 nt, Human
aggugugaaccaccaca

SEQ ID NO: 1499383 - RNA, 15 nt, Human
aggugugcucugauc

SEQ ID NO: 1499384 - RNA, 20 nt, Human
aggugugcucugaucaucca

SEQ ID NO: 1499385 - RNA, 15 nt, Human
ugguuuguaaauuaa

SEQ ID NO: 1499386 - RNA, 14 nt, Human
ugguuuucaaaaua

SEQ ID NO: 1499387 - RNA, 21 nt, Human
ugguuuguaaauuaacuuuua

SEQ ID NO: 1499388 - RNA, 15 nt, Human
ugguuuucaaaauaa

SEQ ID NO: 1499389 - RNA, 17 nt, Human
ugguuuucaaaauaaaa

SEQ ID NO: 1499390 - RNA, 14 nt, Human
ugguuauggagagg

SEQ ID NO: 1499391 - RNA, 16 nt, Human
uguaaauaguauuuga

SEQ ID NO: 1499392 - RNA, 15 nt, Human
uguaaauagcucagg

SEQ ID NO: 1499393 - RNA, 16 nt, Human
uguaaauagcucaggu

SEQ ID NO: 1499394 - RNA, 17 nt, Human
aggguggugaccucugc

SEQ ID NO: 1499395 - RNA, 16 nt, Human
aggguggugaccucug

SEQ ID NO: 1499396 - RNA, 20 nt, Human
ugguagagugugccugaagu

SEQ ID NO: 1499397 - RNA, 17 nt, Human
uggguggcaccagcagc

SEQ ID NO: 1499398 - RNA, 20 nt, Human
uggguggcaccagcagccug

SEQ ID NO: 1499399 - RNA, 21 nt, Human
uggguggcaccagcagccugg

SEQ ID NO: 1499400 - RNA, 22 nt, Human
uggguggcaccagcagccugga

SEQ ID NO: 1499401 - RNA, 16 nt, Human
aggggaauugaggaca

SEQ ID NO: 1499402 - RNA, 21 nt, Human
aggggaauguuugccucugcc

SEQ ID NO: 1499403 - RNA, 19 nt, Human
aggggaauguuugccucug

SEQ ID NO: 1499404 - RNA, 20 nt, Human
aggggaauguuugccucugc

SEQ ID NO: 1499405 - RNA, 18 nt, Human
aggggagcaugggaagug

SEQ ID NO: 1499406 - RNA, 21 nt, Human
agggucucacucugucgccca

SEQ ID NO: 1499407 - RNA, 16 nt, Human
agggucucacucuguc

SEQ ID NO: 1499408 - RNA, 14 nt, Human
agggucucacucug

SEQ ID NO: 1499409 - RNA, 15 nt, Human
agggucucacucugu

SEQ ID NO: 1499410 - RNA, 15 nt, Human
aggguaaggcugugg

SEQ ID NO: 1499411 - RNA, 13 nt, Human
agggggcugggac

SEQ ID NO: 1499412 - RNA, 20 nt, Human
aggggguggccucccaacuc

SEQ ID NO: 1499413 - RNA, 18 nt, Human
aggggugggacacccugu

SEQ ID NO: 1499414 - RNA, 22 nt, Human
aggggugcggcggucccagcuc

SEQ ID NO: 1499415 - RNA, 20 nt, Human
aggggugcggcggucccagc

SEQ ID NO: 1499416 - RNA, 21 nt, Human
aggggugcggcggucccagcu

SEQ ID NO: 1499417 - RNA, 23 nt, Human
aggggugcggcggucccagcucc

SEQ ID NO: 1499418 - RNA, 23 nt, Human
uggggcugcaccggcuggccugg

SEQ ID NO: 1499419 - RNA, 14 nt, Human
uggggccaugccuc

SEQ ID NO: 1499420 - RNA, 19 nt, Human
uggggccaugccuccucag

SEQ ID NO: 1499421 - RNA, 21 nt, Human
uggggccaugccuccucagga

SEQ ID NO: 1499422 - RNA, 12 nt, Human
uggggcccugcc

SEQ ID NO: 1499423 - RNA, 20 nt, Human
uggggccaugccuccucagg

SEQ ID NO: 1499424 - RNA, 16 nt, Human
uggggaccucaggccu

SEQ ID NO: 1499425 - RNA, 17 nt, Human
uggggaccucaggccug

SEQ ID NO: 1499426 - RNA, 12 nt, Human
agggcuccagac

SEQ ID NO: 1499427 - RNA, 15 nt, Human
agggcuccagacaca

SEQ ID NO: 1499428 - RNA, 14 nt, Human
uggggaccucaggc

SEQ ID NO: 1499429 - RNA, 15 nt, Human
uggggaccucaggcc

SEQ ID NO: 1499430 - RNA, 13 nt, Human
aggggaauguuug

SEQ ID NO: 1499431 - RNA, 18 nt, Human
aggggaaaaucagccugc

SEQ ID NO: 1499432 - RNA, 22 nt, Human
aggggaaaaucagccugcucca

SEQ ID NO: 1499433 - RNA, 14 nt, Human
aggggaacagacug

SEQ ID NO: 1499434 - RNA, 13 nt, Human
aggggaaaagagg

SEQ ID NO: 1499435 - RNA, 17 nt, Human
ugggguacccacugcuc

SEQ ID NO: 1499436 - RNA, 18 nt, Human
ugggguacccacugcucu

SEQ ID NO: 1499437 - RNA, 19 nt, Human
ugggguacccacugcucug

SEQ ID NO: 1499438 - RNA, 20 nt, Human
ugggguacccacugcucugg

SEQ ID NO: 1499439 - RNA, 13 nt, Human
uggggucacucug

SEQ ID NO: 1499440 - RNA, 14 nt, Human
uggggucacucugg

SEQ ID NO: 1499441 - RNA, 16 nt, Human
uggggucacucuggca

SEQ ID NO: 1499442 - RNA, 22 nt, Human
uggggucacucuggcagcucag

SEQ ID NO: 1499443 - RNA, 23 nt, Human
agggaggacgcucucuggccuuc

SEQ ID NO: 1499444 - RNA, 21 nt, Human
agggaggacgcucucuggccu

SEQ ID NO: 1499445 - RNA, 22 nt, Human
agggaggacgcucucuggccuu

SEQ ID NO: 1499446 - RNA, 14 nt, Human
ugggacuacaggca

SEQ ID NO: 1499447 - RNA, 15 nt, Human
ugggacuacaggcac

SEQ ID NO: 1499448 - RNA, 16 nt, Human
ugggacuacaggcacc

SEQ ID NO: 1499449 - RNA, 21 nt, Human
agggagcaaguccuucccuuu

SEQ ID NO: 1499450 - RNA, 19 nt, Human
agggagcaaguccuucccu

SEQ ID NO: 1499451 - RNA, 19 nt, Human
ugggagagaagagaaugca

SEQ ID NO: 1499452 - RNA, 21 nt, Human
ugggagagaagagaaugcaca

SEQ ID NO: 1499453 - RNA, 16 nt, Human
ugggagagccuuccag

SEQ ID NO: 1499454 - RNA, 20 nt, Human
ugggacucaaugcacugaca

SEQ ID NO: 1499455 - RNA, 13 nt, Human
agggaaguuuugu

SEQ ID NO: 1499456 - RNA, 15 nt, Human
agggaauggcacagc

SEQ ID NO: 1499457 - RNA, 22 nt, Human
agggaaggauacaaaagcaugu

SEQ ID NO: 1499458 - RNA, 21 nt, Human
aggcccggcuccaggcuccuu

SEQ ID NO: 1499459 - RNA, 18 nt, Human
aggcccggcuccaggcuc

SEQ ID NO: 1499460 - RNA, 20 nt, Human
aggcccggcuccaggcuccu

SEQ ID NO: 1499461 - RNA, 13 nt, Human
agggaggcagggg

SEQ ID NO: 1499462 - RNA, 15 nt, Human
agggagggagggcuc

SEQ ID NO: 1499463 - RNA, 17 nt, Human
agggagggagggcucca

SEQ ID NO: 1499464 - RNA, 16 nt, Human
ugggcccccaaaugga

SEQ ID NO: 1499465 - RNA, 21 nt, Human
ugggcccccaaauggaaaugg

SEQ ID NO: 1499466 - RNA, 12 nt, Human
ugggcagaagga

SEQ ID NO: 1499467 - RNA, 11 nt, Human
ugggcagagca

SEQ ID NO: 1499468 - RNA, 12 nt, Human
ugggcagagcag

SEQ ID NO: 1499469 - RNA, 18 nt, Human
ugggccaggagccuccug

SEQ ID NO: 1499470 - RNA, 13 nt, Human
ugggcagagcaga

SEQ ID NO: 1499471 - RNA, 20 nt, Human
ugggaggaucucuugagccu

SEQ ID NO: 1499472 - RNA, 21 nt, Human
ugggaggaucucuugagccug

SEQ ID NO: 1499473 - RNA, 22 nt, Human
ugggaggaucucuugagccugg

SEQ ID NO: 1499474 - RNA, 19 nt, Human
ugggaggccaaggugggag

SEQ ID NO: 1499475 - RNA, 20 nt, Human
ugggaggccaaggugggagg

SEQ ID NO: 1499476 - RNA, 17 nt, Human
agggagggcuccagaca

SEQ ID NO: 1499477 - RNA, 16 nt, Human
agggagggcuccagac

SEQ ID NO: 1499478 - RNA, 14 nt, Human
agggagggcuccag

SEQ ID NO: 1499479 - RNA, 15 nt, Human
agggagggcuccaga

SEQ ID NO: 1499480 - RNA, 19 nt, Human
agggcucagcggggacagc

SEQ ID NO: 1499481 - RNA, 20 nt, Human
agggcucagcggggacagcu

SEQ ID NO: 1499482 - RNA, 22 nt, Human
agggcucagcggggacagcucc

SEQ ID NO: 1499483 - RNA, 23 nt, Human
agggcucagcggggacagcuccu

SEQ ID NO: 1499484 - RNA, 13 nt, Human
ugcuaucuccccc

SEQ ID NO: 1499485 - RNA, 14 nt, Human
ugcuaucuccccca

SEQ ID NO: 1499486 - RNA, 17 nt, Human
ugcuaucucccccagcc

SEQ ID NO: 1499487 - RNA, 16 nt, Human
aggaaaagcugcugac

SEQ ID NO: 1499488 - RNA, 18 nt, Human
ugcuaucucccccagccc

SEQ ID NO: 1499489 - RNA, 16 nt, Human
ugcucugcugacagac

SEQ ID NO: 1499490 - RNA, 14 nt, Human
ugcucugcugacag

SEQ ID NO: 1499491 - RNA, 15 nt, Human
ugcucugcugacaga

SEQ ID NO: 1499492 - RNA, 21 nt, Human
ugcuccagcuguucagcuggu

SEQ ID NO: 1499493 - RNA, 19 nt, Human
ugcucugaucauccacugu

SEQ ID NO: 1499494 - RNA, 23 nt, Human
aggaaaucaaauaugcaaagcac

SEQ ID NO: 1499495 - RNA, 21 nt, Human
aggaaaucaaauaugcaaagc

SEQ ID NO: 1499496 - RNA, 22 nt, Human
aggaaaucaaauaugcaaagca

SEQ ID NO: 1499497 - RNA, 20 nt, Human
aggaaaucaaauaugcaaag

SEQ ID NO: 1499498 - RNA, 23 nt, Human
aggaauuaaguuagggaauggca

SEQ ID NO: 1499499 - RNA, 18 nt, Human
aggaagccacagcuggug

SEQ ID NO: 1499500 - RNA, 15 nt, Human
aggaagcucagggcc

SEQ ID NO: 1499501 - RNA, 16 nt, Human
aggaagcucagggccu

SEQ ID NO: 1499502 - RNA, 15 nt, Human
aggaagccacagcug

SEQ ID NO: 1499503 - RNA, 16 nt, Human
aggaagccacagcugg

SEQ ID NO: 1499504 - RNA, 13 nt, Human
aggaagccagcag

SEQ ID NO: 1499505 - RNA, 13 nt, Human
aggaagcucaggg

SEQ ID NO: 1499506 - RNA, 14 nt, Human
aggaagcucagggc

SEQ ID NO: 1499507 - RNA, 14 nt, Human
ugcuacaaaaacac

SEQ ID NO: 1499508 - RNA, 15 nt, Human
ugcuacaaaaacaca

SEQ ID NO: 1499509 - RNA, 17 nt, Human
ugccuuuucccaacucc

SEQ ID NO: 1499510 - RNA, 19 nt, Human
ugccuuuucccaacuccag

SEQ ID NO: 1499511 - RNA, 14 nt, Human
ugcgguccacccag

SEQ ID NO: 1499512 - RNA, 15 nt, Human
ugcgguccacccagg

SEQ ID NO: 1499513 - RNA, 17 nt, Human
ugcgguccacccaggag

SEQ ID NO: 1499514 - RNA, 14 nt, Human
aggaaaagcugcug

SEQ ID NO: 1499515 - RNA, 16 nt, Human
agcuugcccuguuaaa

SEQ ID NO: 1499516 - RNA, 18 nt, Human
agcuugcccuguuaaaag

SEQ ID NO: 1499517 - RNA, 19 nt, Human
agcuugcccuguuaaaaga

SEQ ID NO: 1499518 - RNA, 20 nt, Human
agcuugaccgugaggccaga

SEQ ID NO: 1499519 - RNA, 22 nt, Human
agcuugaccgugaggccagaga

SEQ ID NO: 1499520 - RNA, 23 nt, Human
agcuugaccgugaggccagagac

SEQ ID NO: 1499521 - RNA, 20 nt, Human
agcuugcccuggugccucac

SEQ ID NO: 1499522 - RNA, 24 nt, Human
ugccugcccaggccccugccaccc

SEQ ID NO: 1499523 - RNA, 23 nt, Human
ugccuccagggcuggacugaggc

SEQ ID NO: 1499524 - RNA, 22 nt, Human
ugccugcccaggccccugccac

SEQ ID NO: 1499525 - RNA, 23 nt, Human
ugccugcccaggccccugccacc

SEQ ID NO: 1499526 - RNA, 14 nt, Human
ugccucagccuccc

SEQ ID NO: 1499527 - RNA, 12 nt, Human
ugccuccagggc

SEQ ID NO: 1499528 - RNA, 14 nt, Human
ugccuccagggcug

SEQ ID NO: 1499529 - RNA, 15 nt, Human
ugccuccagggcugg

SEQ ID NO: 1499530 - RNA, 16 nt, Human
ugccuccagggcugga

SEQ ID NO: 1499531 - RNA, 17 nt, Human
ugccuccagggcuggac

SEQ ID NO: 1499532 - RNA, 18 nt, Human
ugccucugccucugacac

SEQ ID NO: 1499533 - RNA, 20 nt, Human
ugccucugccucugacacac

SEQ ID NO: 1499534 - RNA, 18 nt, Human
ugccuccagggcuggacu

SEQ ID NO: 1499535 - RNA, 19 nt, Human
ugccuccagggcuggacug

SEQ ID NO: 1499536 - RNA, 20 nt, Human
ugccuccagggcuggacuga

SEQ ID NO: 1499537 - RNA, 21 nt, Human
ugccuccagggcuggacugag

SEQ ID NO: 1499538 - RNA, 19 nt, Human
agcugccuguucagcucca

SEQ ID NO: 1499539 - RNA, 18 nt, Human
agcugccuguucagcucc

SEQ ID NO: 1499540 - RNA, 14 nt, Human
agcugccuguucag

SEQ ID NO: 1499541 - RNA, 16 nt, Human
agcugccuguucagcu

SEQ ID NO: 1499542 - RNA, 16 nt, Human
ugccuggauggggcug

SEQ ID NO: 1499543 - RNA, 17 nt, Human
ugccuggauggggcugc

SEQ ID NO: 1499544 - RNA, 20 nt, Human
ugccuggauggggcugcacc

SEQ ID NO: 1499545 - RNA, 21 nt, Human
ugccuggauggggcugcaccg

SEQ ID NO: 1499546 - RNA, 20 nt, Human
agcugcuugggcuucauccu

SEQ ID NO: 1499547 - RNA, 16 nt, Human
agcugcuugggcuuca

SEQ ID NO: 1499548 - RNA, 22 nt, Human
agcuggccgcgccaaauaaugu

SEQ ID NO: 1499549 - RNA, 18 nt, Human
agcuguuacugucuucag

SEQ ID NO: 1499550 - RNA, 19 nt, Human
agcugugcucuggacaggc

SEQ ID NO: 1499551 - RNA, 17 nt, Human
agcugugcucuggacag

SEQ ID NO: 1499552 - RNA, 18 nt, Human
agcugugcucuggacagg

SEQ ID NO: 1499553 - RNA, 17 nt, Human
agcugggacuacaggug

SEQ ID NO: 1499554 - RNA, 22 nt, Human
agcugggguggggaccucaggc

SEQ ID NO: 1499555 - RNA, 23 nt, Human
agcugggguggggaccucaggcc

SEQ ID NO: 1499556 - RNA, 20 nt, Human
agcugggacuacaggcaccc

SEQ ID NO: 1499557 - RNA, 23 nt, Human
agcugggacuacaggcacccacc

SEQ ID NO: 1499558 - RNA, 16 nt, Human
agcugggacuacaggu

SEQ ID NO: 1499559 - RNA, 20 nt, Human
agcugggguggggaccucag

SEQ ID NO: 1499560 - RNA, 21 nt, Human
ugccuuacccucauguucuua

SEQ ID NO: 1499561 - RNA, 16 nt, Human
ugccuuggggacaaga

SEQ ID NO: 1499562 - RNA, 20 nt, Human
ugccuuacccucauguucuu

SEQ ID NO: 1499563 - RNA, 19 nt, Human
ugccuguugggccaggagc

SEQ ID NO: 1499564 - RNA, 16 nt, Human
ugccuguugggccagg

SEQ ID NO: 1499565 - RNA, 17 nt, Human
ugccuguugggccagga

SEQ ID NO: 1499566 - RNA, 19 nt, Human
agcuguuacugucuucagu

SEQ ID NO: 1499567 - RNA, 14 nt, Human
agcuguucacagcc

SEQ ID NO: 1499568 - RNA, 13 nt, Human
ugccgcagagcug

SEQ ID NO: 1499569 - RNA, 14 nt, Human
ugccgcagagcugg

SEQ ID NO: 1499570 - RNA, 15 nt, Human
ugccgcagagcuggc

SEQ ID NO: 1499571 - RNA, 17 nt, Human
ugccgcagagcuggccg

SEQ ID NO: 1499572 - RNA, 12 nt, Human
ugccgcagcccu

SEQ ID NO: 1499573 - RNA, 14 nt, Human
ugccgcagcccugc

SEQ ID NO: 1499574 - RNA, 12 nt, Human
ugccucagccuc

SEQ ID NO: 1499575 - RNA, 13 nt, Human
ugccucagccucc

SEQ ID NO: 1499576 - RNA, 18 nt, Human
ugcccuuaccugccagga

SEQ ID NO: 1499577 - RNA, 19 nt, Human
ugcccuuaccugccaggaa

SEQ ID NO: 1499578 - RNA, 20 nt, Human
ugcccuguuaaaagaugaaa

SEQ ID NO: 1499579 - RNA, 18 nt, Human
agcugcauacaguuugca

SEQ ID NO: 1499580 - RNA, 20 nt, Human
agcugccagccgagauagcc

SEQ ID NO: 1499581 - RNA, 16 nt, Human
agcucuguccugggag

SEQ ID NO: 1499582 - RNA, 21 nt, Human
agcucuguccugggagugagc

SEQ ID NO: 1499583 - RNA, 23 nt, Human
agcucuguccugggagugagcug

SEQ ID NO: 1499584 - RNA, 12 nt, Human
agcucuggucca

SEQ ID NO: 1499585 - RNA, 17 nt, Human
agcucugguccauagag

SEQ ID NO: 1499586 - RNA, 20 nt, Human
agcucugguccauagagagc

SEQ ID NO: 1499587 - RNA, 22 nt, Human
agcuccuucuguccuacucugu

SEQ ID NO: 1499588 - RNA, 16 nt, Human
agcuccuucuguccua

SEQ ID NO: 1499589 - RNA, 21 nt, Human
agcuccuucuguccuacucug

SEQ ID NO: 1499590 - RNA, 13 nt, Human
agcuccaguucga

SEQ ID NO: 1499591 - RNA, 13 nt, Human
agcucccaggcau

SEQ ID NO: 1499592 - RNA, 23 nt, Human
agcucccaggcauuccccaggag

SEQ ID NO: 1499593 - RNA, 15 nt, Human
agcuccuucuguccu

SEQ ID NO: 1499594 - RNA, 17 nt, Human
uggagcucguggaacag

SEQ ID NO: 1499595 - RNA, 21 nt, Human
uggagcucguggaacaguuac

SEQ ID NO: 1499596 - RNA, 21 nt, Human
uggagcucgugggacagucac

SEQ ID NO: 1499597 - RNA, 17 nt, Human
aggcaaggcugucaauu

SEQ ID NO: 1499598 - RNA, 16 nt, Human
aggcaaggcugucaau

SEQ ID NO: 1499599 - RNA, 20 nt, Human
aggcaagcaccuccugccuc

SEQ ID NO: 1499600 - RNA, 18 nt, Human
aggcaagcaccuccugcc

SEQ ID NO: 1499601 - RNA, 19 nt, Human
aggcaagcaccuccugccu

SEQ ID NO: 1499602 - RNA, 22 nt, Human
aggauugcuacuguccuaccca

SEQ ID NO: 1499603 - RNA, 18 nt, Human
aggauugcuacuguccua

SEQ ID NO: 1499604 - RNA, 15 nt, Human
aggauugcuacuguc

SEQ ID NO: 1499605 - RNA, 17 nt, Human
aggauugcuacuguccu

SEQ ID NO: 1499606 - RNA, 15 nt, Human
aggcagcuugaaacu

SEQ ID NO: 1499607 - RNA, 15 nt, Human
aggcauaaagucagg

SEQ ID NO: 1499608 - RNA, 17 nt, Human
aggcaggugggauggau

SEQ ID NO: 1499609 - RNA, 12 nt, Human
aggcagggucuc

SEQ ID NO: 1499610 - RNA, 18 nt, Human
aggcagggucucacucug

SEQ ID NO: 1499611 - RNA, 22 nt, Human
aggcaggucuugaacuccuggc

SEQ ID NO: 1499612 - RNA, 22 nt, Human
aggcauaaagucagggguuccc

SEQ ID NO: 1499613 - RNA, 20 nt, Human
aggcauuuaggccaugggac

SEQ ID NO: 1499614 - RNA, 18 nt, Human
aggcauugugggaagggg

SEQ ID NO: 1499615 - RNA, 23 nt, Human
uggcacaucagcacgauuucugu

SEQ ID NO: 1499616 - RNA, 21 nt, Human
uggaugccugguggcagcugc

SEQ ID NO: 1499617 - RNA, 23 nt, Human
uggaugccugguggcagcugcgg

SEQ ID NO: 1499618 - RNA, 23 nt, Human
uggaugcggaacccaaauuacgu

SEQ ID NO: 1499619 - RNA, 21 nt, Human
uggagugugaggguccugcag

SEQ ID NO: 1499620 - RNA, 14 nt, Human
uggaguugaaaauc

SEQ ID NO: 1499621 - RNA, 16 nt, Human
aggcauuugcugaaua

SEQ ID NO: 1499622 - RNA, 20 nt, Human
aggcauuugcugaauacaga

SEQ ID NO: 1499623 - RNA, 14 nt, Human
uggagugcagugag

SEQ ID NO: 1499624 - RNA, 15 nt, Human
aggcccagagggccu

SEQ ID NO: 1499625 - RNA, 13 nt, Human
aggcccagagggc

SEQ ID NO: 1499626 - RNA, 15 nt, Human
aggcccccaggugcc

SEQ ID NO: 1499627 - RNA, 14 nt, Human
aggccccgcccagg

SEQ ID NO: 1499628 - RNA, 13 nt, Human
aggcccggcucca

SEQ ID NO: 1499629 - RNA, 18 nt, Human
uggcacccggccccugcu

SEQ ID NO: 1499630 - RNA, 19 nt, Human
uggcacccggccccugcug

SEQ ID NO: 1499631 - RNA, 20 nt, Human
uggcacccggccccugcugg

SEQ ID NO: 1499632 - RNA, 13 nt, Human
uggcagcucagag

SEQ ID NO: 1499633 - RNA, 23 nt, Human
uggcagcucaccucucccuugga

SEQ ID NO: 1499634 - RNA, 21 nt, Human
uggcagcucaccucucccuug

SEQ ID NO: 1499635 - RNA, 22 nt, Human
uggcagcucaccucucccuugg

SEQ ID NO: 1499636 - RNA, 13 nt, Human
aggccagccuuga

SEQ ID NO: 1499637 - RNA, 12 nt, Human
aggccagcugcu

SEQ ID NO: 1499638 - RNA, 15 nt, Human
aggccagccuugacc

SEQ ID NO: 1499639 - RNA, 16 nt, Human
uggaagacagcucuua

SEQ ID NO: 1499640 - RNA, 21 nt, Human
uggaacaagaugguucuagca

SEQ ID NO: 1499641 - RNA, 21 nt, Human
uggaaauuuguuauaaugaau

SEQ ID NO: 1499642 - RNA, 23 nt, Human
uggaaauuuguuauaaugaauga

SEQ ID NO: 1499643 - RNA, 17 nt, Human
aggagccuccugcccuu

SEQ ID NO: 1499644 - RNA, 15 nt, Human
ugcuugagcucagga

SEQ ID NO: 1499645 - RNA, 22 nt, Human
ugcuuugugauuuuuguaauuu

SEQ ID NO: 1499646 - RNA, 18 nt, Human
ugcuuuuggucuguguga

SEQ ID NO: 1499647 - RNA, 17 nt, Human
ugcuuuuaaaaaaaaau

SEQ ID NO: 1499648 - RNA, 20 nt, Human
ugcuuuugucuaugggacuc

SEQ ID NO: 1499649 - RNA, 23 nt, Human
ugcuuuuuaauauugauaugcuu

SEQ ID NO: 1499650 - RNA, 13 nt, Human
aggaucagucuga

SEQ ID NO: 1499651 - RNA, 22 nt, Human
aggaugcacagaguuguuacau

SEQ ID NO: 1499652 - RNA, 22 nt, Human
aggaugaucuaggaagacuuug

SEQ ID NO: 1499653 - RNA, 23 nt, Human
aggaugaucuaggaagacuuugg

SEQ ID NO: 1499654 - RNA, 17 nt, Human
aggauucuuccucccuc

SEQ ID NO: 1499655 - RNA, 19 nt, Human
aggauucuuccucccuccc

SEQ ID NO: 1499656 - RNA, 16 nt, Human
aggagccgaagcccag

SEQ ID NO: 1499657 - RNA, 18 nt, Human
aggagccgaagcccaggg

SEQ ID NO: 1499658 - RNA, 16 nt, Human
aggagccuccugcccu

SEQ ID NO: 1499659 - RNA, 17 nt, Human
aggagccccgaggccuu

SEQ ID NO: 1499660 - RNA, 14 nt, Human
aggagcagccacau

SEQ ID NO: 1499661 - RNA, 12 nt, Human
aggagcagccac

SEQ ID NO: 1499662 - RNA, 13 nt, Human
aggagcagccaca

SEQ ID NO: 1499663 - RNA, 11 nt, Human
aggacugggcc

SEQ ID NO: 1499664 - RNA, 12 nt, Human
aggacugggcca

SEQ ID NO: 1499665 - RNA, 15 nt, Human
aggacugggccacuu

SEQ ID NO: 1499666 - RNA, 18 nt, Human
aggagaaacuggaacucu

SEQ ID NO: 1499667 - RNA, 19 nt, Human
aggagaaacuggaacucuc

SEQ ID NO: 1499668 - RNA, 22 nt, Human
aggacuuuucuuuguggcuucc

SEQ ID NO: 1499669 - RNA, 23 nt, Human
aggacuuuucuuuguggcuuccu

SEQ ID NO: 1499670 - RNA, 17 nt, Human
aggacuuuucuuugugg

SEQ ID NO: 1499671 - RNA, 19 nt, Human
aggacuuuucuuuguggcu

SEQ ID NO: 1499672 - RNA, 13 nt, Human
aggacgcucucug

SEQ ID NO: 1499673 - RNA, 14 nt, Human
aggacgcucucugg

SEQ ID NO: 1499674 - RNA, 16 nt, Human
aggacgcucucuggcc

SEQ ID NO: 1499675 - RNA, 17 nt, Human
aggacgcucucuggccu

SEQ ID NO: 1499676 - RNA, 19 nt, Human
aggacgcucucuggccuuc

SEQ ID NO: 1499677 - RNA, 20 nt, Human
aggacgcucucuggccuucg

SEQ ID NO: 1499678 - RNA, 15 nt, Human
ugauuaaguaaugau

SEQ ID NO: 1499679 - RNA, 16 nt, Human
ugauuaaguaaugaua

SEQ ID NO: 1499680 - RNA, 16 nt, Human
agccacggccaggcca

SEQ ID NO: 1499681 - RNA, 16 nt, Human
ugauuaaauucuugca

SEQ ID NO: 1499682 - RNA, 13 nt, Human
ugauuaaauucuu

SEQ ID NO: 1499683 - RNA, 17 nt, Human
ugauuaaauucuugcaa

SEQ ID NO: 1499684 - RNA, 21 nt, Human
ugauguuuuaaggaugcuugu

SEQ ID NO: 1499685 - RNA, 17 nt, Human
ugauguuuuccaugagu

SEQ ID NO: 1499686 - RNA, 23 nt, Human
ugauguuuuccaugaguccccug

SEQ ID NO: 1499687 - RNA, 19 nt, Human
ugauguuuuccaugagucc

SEQ ID NO: 1499688 - RNA, 14 nt, Human
ugauggggcccugc

SEQ ID NO: 1499689 - RNA, 22 nt, Human
ugauggggcccugccuccuuug

SEQ ID NO: 1499690 - RNA, 22 nt, Human
ugaugaaaugaggucagagccu

SEQ ID NO: 1499691 - RNA, 14 nt, Human
ugaucuaggaagac

SEQ ID NO: 1499692 - RNA, 15 nt, Human
ugaucuaggaagacu

SEQ ID NO: 1499693 - RNA, 23 nt, Human
ugaugaaaugaggucagagccug

SEQ ID NO: 1499694 - RNA, 19 nt, Human
ugaugaucuuugcagacag

SEQ ID NO: 1499695 - RNA, 20 nt, Human
ugaugaucuuugcagacagg

SEQ ID NO: 1499696 - RNA, 22 nt, Human
ugaugaucuuugcagacaggca

SEQ ID NO: 1499697 - RNA, 21 nt, Human
ugaugaucuuugcagacaggc

SEQ ID NO: 1499698 - RNA, 14 nt, Human
ugaugggaaagcau

SEQ ID NO: 1499699 - RNA, 22 nt, Human
ugaugggcaacccccagccugc

SEQ ID NO: 1499700 - RNA, 13 nt, Human
ugauggggcccug

SEQ ID NO: 1499701 - RNA, 18 nt, Human
ugauccucccaccucagc

SEQ ID NO: 1499702 - RNA, 13 nt, Human
ugaucuaggaaga

SEQ ID NO: 1499703 - RNA, 19 nt, Human
ugauccucccaccucagcc

SEQ ID NO: 1499704 - RNA, 20 nt, Human
ugauccucccaccucagccu

SEQ ID NO: 1499705 - RNA, 22 nt, Human
agccacaggccugagauuucau

SEQ ID NO: 1499706 - RNA, 23 nt, Human
agccacaggccugagauuucauc

SEQ ID NO: 1499707 - RNA, 14 nt, Human
agccacaggccuga

SEQ ID NO: 1499708 - RNA, 16 nt, Human
agccacaggccugaga

SEQ ID NO: 1499709 - RNA, 17 nt, Human
agccacaggccugagau

SEQ ID NO: 1499710 - RNA, 21 nt, Human
agccacaggccugagauuuca

SEQ ID NO: 1499711 - RNA, 13 nt, Human
agccacagcuggu

SEQ ID NO: 1499712 - RNA, 13 nt, Human
agccacaggccug

SEQ ID NO: 1499713 - RNA, 14 nt, Human
agcauccuggaaua

SEQ ID NO: 1499714 - RNA, 15 nt, Human
agcauccuggaauau

SEQ ID NO: 1499715 - RNA, 13 nt, Human
agcauccuggaau

SEQ ID NO: 1499716 - RNA, 23 nt, Human
agcaucaggccaggcccucugcc

SEQ ID NO: 1499717 - RNA, 22 nt, Human
agcaucaggccaggcccucugc

SEQ ID NO: 1499718 - RNA, 21 nt, Human
agcaucaggccaggcccucug

SEQ ID NO: 1499719 - RNA, 12 nt, Human
agcaucaggcca

SEQ ID NO: 1499720 - RNA, 17 nt, Human
agcaucacuugggauua

SEQ ID NO: 1499721 - RNA, 18 nt, Human
ugauacaaugcugugccc

SEQ ID NO: 1499722 - RNA, 18 nt, Human
ugaucacggcucacugca

SEQ ID NO: 1499723 - RNA, 15 nt, Human
ugaucacggcucacu

SEQ ID NO: 1499724 - RNA, 13 nt, Human
ugaucacggcuca

SEQ ID NO: 1499725 - RNA, 14 nt, Human
ugaucacggcucac

SEQ ID NO: 1499726 - RNA, 17 nt, Human
agcauauucaggaagcu

SEQ ID NO: 1499727 - RNA, 19 nt, Human
agcauauucaggaagcuca

SEQ ID NO: 1499728 - RNA, 21 nt, Human
agcauauucaggaagcucagg

SEQ ID NO: 1499729 - RNA, 17 nt, Human
agcauuuguguugaaga

SEQ ID NO: 1499730 - RNA, 18 nt, Human
agcauuuguguugaagag

SEQ ID NO: 1499731 - RNA, 22 nt, Human
agcauuuugcuaaaugugaaug

SEQ ID NO: 1499732 - RNA, 15 nt, Human
agcauuuugcuaaau

SEQ ID NO: 1499733 - RNA, 22 nt, Human
agcauuuagauguauagguuga

SEQ ID NO: 1499734 - RNA, 19 nt, Human
agcauuaugauguggguca

SEQ ID NO: 1499735 - RNA, 19 nt, Human
agcauggcugccaauggga

SEQ ID NO: 1499736 - RNA, 17 nt, Human
agcagucaggaaagaga

SEQ ID NO: 1499737 - RNA, 18 nt, Human
agcagucaggaaagagaa

SEQ ID NO: 1499738 - RNA, 19 nt, Human
agcagucaggaaagagaac

SEQ ID NO: 1499739 - RNA, 19 nt, Human
agcauaaaaauuagccaag

SEQ ID NO: 1499740 - RNA, 19 nt, Human
ugaguacguugugcauuug

SEQ ID NO: 1499741 - RNA, 18 nt, Human
ugaguacguugugcauuu

SEQ ID NO: 1499742 - RNA, 17 nt, Human
ugaguacguugugcauu

SEQ ID NO: 1499743 - RNA, 16 nt, Human
ugaguacguugugcau

SEQ ID NO: 1499744 - RNA, 19 nt, Human
agcauaccaacacgagcag

SEQ ID NO: 1499745 - RNA, 22 nt, Human
agcauaccaacacgagcaggcu

SEQ ID NO: 1499746 - RNA, 23 nt, Human
agcauaaaaauuagccaagugug

SEQ ID NO: 1499747 - RNA, 13 nt, Human
agcauaccaacac

SEQ ID NO: 1499748 - RNA, 21 nt, Human
ugagugggggaucacagccuc

SEQ ID NO: 1499749 - RNA, 23 nt, Human
ugagugggggaucacagccucug

SEQ ID NO: 1499750 - RNA, 15 nt, Human
ugauacaaugcugug

SEQ ID NO: 1499751 - RNA, 14 nt, Human
ugauacaaugcugu

SEQ ID NO: 1499752 - RNA, 15 nt, Human
ugaguucuacauaag

SEQ ID NO: 1499753 - RNA, 20 nt, Human
ugaguucuacauaaguaauu

SEQ ID NO: 1499754 - RNA, 22 nt, Human
ugaguucuacauaaguaauuca

SEQ ID NO: 1499755 - RNA, 16 nt, Human
ugauaaguaaaugcua

SEQ ID NO: 1499756 - RNA, 13 nt, Human
ugauaaguucaua

SEQ ID NO: 1499757 - RNA, 15 nt, Human
ugauaaguucauaca

SEQ ID NO: 1499758 - RNA, 17 nt, Human
ugauaaguucauacauu

SEQ ID NO: 1499759 - RNA, 19 nt, Human
ugauaaguucauacauugu

SEQ ID NO: 1499760 - RNA, 18 nt, Human
ugagucaccaagcccagu

SEQ ID NO: 1499761 - RNA, 20 nt, Human
ugaguacguugugcauuugg

SEQ ID NO: 1499762 - RNA, 14 nt, Human
ugaguacuacaguc

SEQ ID NO: 1499763 - RNA, 13 nt, Human
ugaguccagaagu

SEQ ID NO: 1499764 - RNA, 16 nt, Human
ugagugccuuacacaa

SEQ ID NO: 1499765 - RNA, 17 nt, Human
ugagugcagcucuggag

SEQ ID NO: 1499766 - RNA, 13 nt, Human
ugagugccuuaca

SEQ ID NO: 1499767 - RNA, 14 nt, Human
ugagugccuuacac

SEQ ID NO: 1499768 - RNA, 19 nt, Human
agcagggcauggcugggaa

SEQ ID NO: 1499769 - RNA, 20 nt, Human
agcagggagggcuucugcca

SEQ ID NO: 1499770 - RNA, 13 nt, Human
agcagggcucagc

SEQ ID NO: 1499771 - RNA, 14 nt, Human
agcagggcucagcg

SEQ ID NO: 1499772 - RNA, 15 nt, Human
agcagggcucagcgg

SEQ ID NO: 1499773 - RNA, 22 nt, Human
agcagggcucagcggggacagc

SEQ ID NO: 1499774 - RNA, 13 nt, Human
agcagggaaacag

SEQ ID NO: 1499775 - RNA, 14 nt, Human
agcagggaaacagc

SEQ ID NO: 1499776 - RNA, 15 nt, Human
agcagggaaacagcu

SEQ ID NO: 1499777 - RNA, 21 nt, Human
agcaggcucucaggccagcug

SEQ ID NO: 1499778 - RNA, 22 nt, Human
agcaggcucucaggccagcugc

SEQ ID NO: 1499779 - RNA, 23 nt, Human
agcaggcucucaggccagcugcu

SEQ ID NO: 1499780 - RNA, 17 nt, Human
agcaggcucgggcuccc

SEQ ID NO: 1499781 - RNA, 13 nt, Human
agcaggcucucag

SEQ ID NO: 1499782 - RNA, 14 nt, Human
agcaggcucucagg

SEQ ID NO: 1499783 - RNA, 15 nt, Human
agcaggcucucaggc

SEQ ID NO: 1499784 - RNA, 16 nt, Human
agcaggcucucaggcc

SEQ ID NO: 1499785 - RNA, 17 nt, Human
agcaggcucucaggcca

SEQ ID NO: 1499786 - RNA, 18 nt, Human
agcaggcucucaggccag

SEQ ID NO: 1499787 - RNA, 19 nt, Human
agcaggcucucaggccagc

SEQ ID NO: 1499788 - RNA, 20 nt, Human
ugacccaugcugcccuguga

SEQ ID NO: 1499789 - RNA, 18 nt, Human
ugacccaugcugcccugu

SEQ ID NO: 1499790 - RNA, 19 nt, Human
ugacccaugcugcccugug

SEQ ID NO: 1499791 - RNA, 16 nt, Human
agcagcagggagggcu

SEQ ID NO: 1499792 - RNA, 13 nt, Human
agcaggacaugga

SEQ ID NO: 1499793 - RNA, 15 nt, Human
agcagccacauuccu

SEQ ID NO: 1499794 - RNA, 11 nt, Human
agcagccacau

SEQ ID NO: 1499795 - RNA, 14 nt, Human
agcaggcuacuguc

SEQ ID NO: 1499796 - RNA, 16 nt, Human
agcaggcuacugucag

SEQ ID NO: 1499797 - RNA, 17 nt, Human
agcaggcuacugucagc

SEQ ID NO: 1499798 - RNA, 19 nt, Human
agcaggcuacugucagcuc

SEQ ID NO: 1499799 - RNA, 20 nt, Human
agcaggcuacugucagcucc

SEQ ID NO: 1499800 - RNA, 12 nt, Human
ugcagacaggca

SEQ ID NO: 1499801 - RNA, 13 nt, Human
ugcagacaggcaa

SEQ ID NO: 1499802 - RNA, 21 nt, Human
ugcagacaggcaagcaccucc

SEQ ID NO: 1499803 - RNA, 13 nt, Human
agccuccugcccu

SEQ ID NO: 1499804 - RNA, 14 nt, Human
agccuccugcccuu

SEQ ID NO: 1499805 - RNA, 18 nt, Human
agccuccugcccuuaccu

SEQ ID NO: 1499806 - RNA, 21 nt, Human
ugcagccucacaguccuuacc

SEQ ID NO: 1499807 - RNA, 18 nt, Human
ugcagccucacaguccuu

SEQ ID NO: 1499808 - RNA, 17 nt, Human
ugcauagagccacguau

SEQ ID NO: 1499809 - RNA, 20 nt, Human
ugcauagauucccugagcag

SEQ ID NO: 1499810 - RNA, 21 nt, Human
ugcauaccacuuuuguucuug

SEQ ID NO: 1499811 - RNA, 19 nt, Human
ugcauacucauuaggaugg

SEQ ID NO: 1499812 - RNA, 20 nt, Human
ugcauaccacuuuuguucuu

SEQ ID NO: 1499813 - RNA, 18 nt, Human
ugcauaccacuuuuguuc

SEQ ID NO: 1499814 - RNA, 16 nt, Human
ugcauaccacuuuugu

SEQ ID NO: 1499815 - RNA, 19 nt, Human
ugcaugcugucccuuacgu

SEQ ID NO: 1499816 - RNA, 21 nt, Human
ugcaugcugucccuuacguga

SEQ ID NO: 1499817 - RNA, 18 nt, Human
ugcaugcugucccuuacg

SEQ ID NO: 1499818 - RNA, 19 nt, Human
ugcauagagccacguaugu

SEQ ID NO: 1499819 - RNA, 20 nt, Human
ugcaugaaguaauaugcaca

SEQ ID NO: 1499820 - RNA, 19 nt, Human
ugcaugaagguuucugaaa

SEQ ID NO: 1499821 - RNA, 21 nt, Human
ugcaugaagguuucugaaaau

SEQ ID NO: 1499822 - RNA, 13 nt, Human
ugcaugaagguuu

SEQ ID NO: 1499823 - RNA, 18 nt, Human
ugcaugaagguuucugaa

SEQ ID NO: 1499824 - RNA, 17 nt, Human
agccugugccucuggga

SEQ ID NO: 1499825 - RNA, 18 nt, Human
agccugugccucugggac

SEQ ID NO: 1499826 - RNA, 19 nt, Human
agccugugccucugggacu

SEQ ID NO: 1499827 - RNA, 13 nt, Human
agccuugaacuuu

SEQ ID NO: 1499828 - RNA, 22 nt, Human
agccuuagaagucacacaguau

SEQ ID NO: 1499829 - RNA, 20 nt, Human
agccuuagaagucacacagu

SEQ ID NO: 1499830 - RNA, 22 nt, Human
agccuugaccauucuccaccug

SEQ ID NO: 1499831 - RNA, 18 nt, Human
agccuugaccauucucca

SEQ ID NO: 1499832 - RNA, 19 nt, Human
agccuugaccauucuccac

SEQ ID NO: 1499833 - RNA, 21 nt, Human
agccuugaccauucuccaccu

SEQ ID NO: 1499834 - RNA, 19 nt, Human
agccuugcggaagguucua

SEQ ID NO: 1499835 - RNA, 13 nt, Human
ugccauaauuacu

SEQ ID NO: 1499836 - RNA, 17 nt, Human
ugccaguuauggcuaua

SEQ ID NO: 1499837 - RNA, 17 nt, Human
ugccagccgagauagcc

SEQ ID NO: 1499838 - RNA, 22 nt, Human
ugccagccgagauagccaaggc

SEQ ID NO: 1499839 - RNA, 18 nt, Human
ugccaaugggagcucaug

SEQ ID NO: 1499840 - RNA, 13 nt, Human
ugccaauggacua

SEQ ID NO: 1499841 - RNA, 14 nt, Human
ugccaaugggagcu

SEQ ID NO: 1499842 - RNA, 16 nt, Human
ugcauuuaaaagauac

SEQ ID NO: 1499843 - RNA, 21 nt, Human
ugcaccacugcacuccagccu

SEQ ID NO: 1499844 - RNA, 13 nt, Human
ugcaccagcccuu

SEQ ID NO: 1499845 - RNA, 17 nt, Human
ugcacuccagccugagc

SEQ ID NO: 1499846 - RNA, 15 nt, Human
ugcacuccagccugg

SEQ ID NO: 1499847 - RNA, 16 nt, Human
ugcacuccagccuggg

SEQ ID NO: 1499848 - RNA, 15 nt, Human
ugcacuccagccuga

SEQ ID NO: 1499849 - RNA, 14 nt, Human
ugcacuccagccug

SEQ ID NO: 1499850 - RNA, 16 nt, Human
ugcaccggcuggccug

SEQ ID NO: 1499851 - RNA, 18 nt, Human
ugcaccggcuggccuggc

SEQ ID NO: 1499852 - RNA, 14 nt, Human
ugcaccggcuggcc

SEQ ID NO: 1499853 - RNA, 15 nt, Human
ugcaccggcuggccu

SEQ ID NO: 1499854 - RNA, 18 nt, Human
agccccgugggguuccuc

SEQ ID NO: 1499855 - RNA, 16 nt, Human
agccccgaggccuucu

SEQ ID NO: 1499856 - RNA, 14 nt, Human
agccccgaggccuu

SEQ ID NO: 1499857 - RNA, 14 nt, Human
agcccaggccuccu

SEQ ID NO: 1499858 - RNA, 19 nt, Human
agcccaggccuccuacagc

SEQ ID NO: 1499859 - RNA, 21 nt, Human
agcccaggccuccuacagcuu

SEQ ID NO: 1499860 - RNA, 16 nt, Human
agcccgggcucugccu

SEQ ID NO: 1499861 - RNA, 14 nt, Human
agcccugcagaggg

SEQ ID NO: 1499862 - RNA, 15 nt, Human
agcccugcagagggc

SEQ ID NO: 1499863 - RNA, 16 nt, Human
agcccugcagagggca

SEQ ID NO: 1499864 - RNA, 19 nt, Human
agcccugcagagggcacag

SEQ ID NO: 1499865 - RNA, 14 nt, Human
agccccuucugacc

SEQ ID NO: 1499866 - RNA, 15 nt, Human
agccccuucugaccc

SEQ ID NO: 1499867 - RNA, 16 nt, Human
agccccuucugaccca

SEQ ID NO: 1499868 - RNA, 19 nt, Human
agccccuucugacccaugc

SEQ ID NO: 1499869 - RNA, 13 nt, Human
agcccgggcucug

SEQ ID NO: 1499870 - RNA, 14 nt, Human
agcccgggcucugc

SEQ ID NO: 1499871 - RNA, 15 nt, Human
agcccgggcucugcc

SEQ ID NO: 1499872 - RNA, 15 nt, Human
ugcaaggucauuuuu

SEQ ID NO: 1499873 - RNA, 12 nt, Human
agcccaggccuc

SEQ ID NO: 1499874 - RNA, 15 nt, Human
ugcaagccagauuuu

SEQ ID NO: 1499875 - RNA, 21 nt, Human
ugcaagccagauuuuccugaa

SEQ ID NO: 1499876 - RNA, 19 nt, Human
ugcaaggaagccacagcug

SEQ ID NO: 1499877 - RNA, 20 nt, Human
ugcaaggaagccacagcugg

SEQ ID NO: 1499878 - RNA, 13 nt, Human
ugcaacaacaugu

SEQ ID NO: 1499879 - RNA, 15 nt, Human
ugcaacaacauguau

SEQ ID NO: 1499880 - RNA, 13 nt, Human
ugcaacaggcugg

SEQ ID NO: 1499881 - RNA, 17 nt, Human
agccacggccaggccag

SEQ ID NO: 1499882 - RNA, 18 nt, Human
agccacggccaggccaga

SEQ ID NO: 1499883 - RNA, 18 nt, Human
ugauuuccguuaaaauac

SEQ ID NO: 1499884 - RNA, 12 nt, Human
ugcaaaccauca

SEQ ID NO: 1499885 - RNA, 13 nt, Human
ugcaaaccaucau

SEQ ID NO: 1499886 - RNA, 20 nt, Human
ugcaaaguaucccuacugua

SEQ ID NO: 1499887 - RNA, 21 nt, Human
ugcaaaggguaucaggugcug

SEQ ID NO: 1499888 - RNA, 18 nt, Human
ugcaaaccaucauugaaa

SEQ ID NO: 1499889 - RNA, 20 nt, Human
ugcaaaccaucauugaaauc

SEQ ID NO: 1499890 - RNA, 18 nt, Human
ugcaaagcacugacuucu

SEQ ID NO: 1499891 - RNA, 20 nt, Human
ugcaaagcacugacuucuaa

SEQ ID NO: 1499892 - RNA, 22 nt, Human
ugcaaagcacugacuucuaagu

SEQ ID NO: 1499893 - RNA, 18 nt, Human
agaugcaguucugaagaa

SEQ ID NO: 1499894 - RNA, 19 nt, Human
agaugcaguucugaagaag

SEQ ID NO: 1499895 - RNA, 20 nt, Human
agaugcaguucugaagaaga

SEQ ID NO: 1499896 - RNA, 14 nt, Human
agaugcuagaacuc

SEQ ID NO: 1499897 - RNA, 15 nt, Human
agaugcuagaacucc

SEQ ID NO: 1499898 - RNA, 14 nt, Human
agaugcaccagccc

SEQ ID NO: 1499899 - RNA, 15 nt, Human
agaugcaccagcccu

SEQ ID NO: 1499900 - RNA, 16 nt, Human
agaugcuucucacugc

SEQ ID NO: 1499901 - RNA, 15 nt, Human
agaugcuucucacug

SEQ ID NO: 1499902 - RNA, 12 nt, Human
ugacccacugcu

SEQ ID NO: 1499903 - RNA, 13 nt, Human
ugacccacugcuu

SEQ ID NO: 1499904 - RNA, 17 nt, Human
ugacccacaagaaauga

SEQ ID NO: 1499905 - RNA, 13 nt, Human
agaucagccuggg

SEQ ID NO: 1499906 - RNA, 15 nt, Human
agaucagccugggca

SEQ ID NO: 1499907 - RNA, 18 nt, Human
ugacauaaaaacaacuuu

SEQ ID NO: 1499908 - RNA, 20 nt, Human
ugacauaaaaacaacuuuau

SEQ ID NO: 1499909 - RNA, 20 nt, Human
ugacauuguuggccaaagcc

SEQ ID NO: 1499910 - RNA, 21 nt, Human
ugacauuguuggccaaagcca

SEQ ID NO: 1499911 - RNA, 18 nt, Human
ugaccaaugauggucacc

SEQ ID NO: 1499912 - RNA, 17 nt, Human
ugacauaaaaacaacuu

SEQ ID NO: 1499913 - RNA, 21 nt, Human
ugacagggcacaccgggcacu

SEQ ID NO: 1499914 - RNA, 20 nt, Human
ugacagggcacaccgggcac

SEQ ID NO: 1499915 - RNA, 11 nt, Human
ugacagggcac

SEQ ID NO: 1499916 - RNA, 16 nt, Human
ugacagggcacaccgg

SEQ ID NO: 1499917 - RNA, 20 nt, Human
ugacaggcaaugcuggcugu

SEQ ID NO: 1499918 - RNA, 21 nt, Human
ugacacacagcucuguccugg

SEQ ID NO: 1499919 - RNA, 16 nt, Human
agaguuuagcuggaaa

SEQ ID NO: 1499920 - RNA, 17 nt, Human
agaguuuagcuggaaaa

SEQ ID NO: 1499921 - RNA, 16 nt, Human
agaguuguuacauuuu

SEQ ID NO: 1499922 - RNA, 12 nt, Human
agaguuguuaca

SEQ ID NO: 1499923 - RNA, 15 nt, Human
agagucuccauuuaa

SEQ ID NO: 1499924 - RNA, 14 nt, Human
agagugaacaaauu

SEQ ID NO: 1499925 - RNA, 17 nt, Human
agaguugauacuacagu

SEQ ID NO: 1499926 - RNA, 22 nt, Human
agaguugauacuacaguuuguu

SEQ ID NO: 1499927 - RNA, 20 nt, Human
agaguugauacuacaguuug

SEQ ID NO: 1499928 - RNA, 19 nt, Human
ugaaugucagugugacuga

SEQ ID NO: 1499929 - RNA, 20 nt, Human
ugaaugguuuucaaaauaaa

SEQ ID NO: 1499930 - RNA, 12 nt, Human
agauacugaaau

SEQ ID NO: 1499931 - RNA, 13 nt, Human
agauacugaaaua

SEQ ID NO: 1499932 - RNA, 15 nt, Human
agauacugaaauaaa

SEQ ID NO: 1499933 - RNA, 12 nt, Human
agauaaaugugc

SEQ ID NO: 1499934 - RNA, 14 nt, Human
agaucacgccacug

SEQ ID NO: 1499935 - RNA, 15 nt, Human
agaucacgccacugc

SEQ ID NO: 1499936 - RNA, 16 nt, Human
agaucacgccacugca

SEQ ID NO: 1499937 - RNA, 16 nt, Human
ugaauuuuacauggcu

SEQ ID NO: 1499938 - RNA, 15 nt, Human
ugaauuucuuuugcc

SEQ ID NO: 1499939 - RNA, 17 nt, Human
agaucacgccacugcac

SEQ ID NO: 1499940 - RNA, 18 nt, Human
agaucacgccacugcacu

SEQ ID NO: 1499941 - RNA, 12 nt, Human
agagguuuuaaa

SEQ ID NO: 1499942 - RNA, 22 nt, Human
ugaagcacagugaucaaguuau

SEQ ID NO: 1499943 - RNA, 15 nt, Human
agagguugcagugag

SEQ ID NO: 1499944 - RNA, 19 nt, Human
agaggccaugggccuccug

SEQ ID NO: 1499945 - RNA, 21 nt, Human
agaggcagggucucacucugu

SEQ ID NO: 1499946 - RNA, 10 nt, Human
agaggcaggg

SEQ ID NO: 1499947 - RNA, 13 nt, Human
agaggcagggucu

SEQ ID NO: 1499948 - RNA, 21 nt, Human
agaggcagccccauucugccu

SEQ ID NO: 1499949 - RNA, 13 nt, Human
agaggcagcccca

SEQ ID NO: 1499950 - RNA, 19 nt, Human
agaggcagccccauucugc

SEQ ID NO: 1499951 - RNA, 21 nt, Human
agagcuguucacagccagacu

SEQ ID NO: 1499952 - RNA, 16 nt, Human
ugaacuccuggccuca

SEQ ID NO: 1499953 - RNA, 22 nt, Human
ugaacuuugaccucugcagcaa

SEQ ID NO: 1499954 - RNA, 20 nt, Human
ugaacuuugaccucugcagc

SEQ ID NO: 1499955 - RNA, 19 nt, Human
ugaacuuugaccucugcag

SEQ ID NO: 1499956 - RNA, 12 nt, Human
ugaacuccuggc

SEQ ID NO: 1499957 - RNA, 14 nt, Human
ugaacuccuggccu

SEQ ID NO: 1499958 - RNA, 15 nt, Human
ugaacuccuggccuc

SEQ ID NO: 1499959 - RNA, 19 nt, Human
ugaacaaauuuacagagac

SEQ ID NO: 1499960 - RNA, 20 nt, Human
ugaacaaauuuacagagaca

SEQ ID NO: 1499961 - RNA, 15 nt, Human
ugaaauuuuuauuaa

SEQ ID NO: 1499962 - RNA, 21 nt, Human
agagcaccuuagacagucccu

SEQ ID NO: 1499963 - RNA, 12 nt, Human
agagcagagacc

SEQ ID NO: 1499964 - RNA, 14 nt, Human
agagcaaaauugau

SEQ ID NO: 1499965 - RNA, 20 nt, Human
agagcaaaauugauguguuu

SEQ ID NO: 1499966 - RNA, 17 nt, Human
ucuuuggacccugaggc

SEQ ID NO: 1499967 - RNA, 21 nt, Human
ucuuuggacccugaggcccag

SEQ ID NO: 1499968 - RNA, 11 nt, Human
agagccuugcg

SEQ ID NO: 1499969 - RNA, 21 nt, Human
agagccuugcggaagguucua

SEQ ID NO: 1499970 - RNA, 20 nt, Human
agagcagagaccaucccuga

SEQ ID NO: 1499971 - RNA, 17 nt, Human
agagcagagaccauccc

SEQ ID NO: 1499972 - RNA, 18 nt, Human
agagcagagaccaucccu

SEQ ID NO: 1499973 - RNA, 23 nt, Human
ugaaauuuccugggagcuuuugu

SEQ ID NO: 1499974 - RNA, 15 nt, Human
ugaaauuguauuaca

SEQ ID NO: 1499975 - RNA, 18 nt, Human
ugaaauauuauguuaaaa

SEQ ID NO: 1499976 - RNA, 18 nt, Human
agagcugccaccugccug

SEQ ID NO: 1499977 - RNA, 17 nt, Human
ugaaauaagccagacau

SEQ ID NO: 1499978 - RNA, 18 nt, Human
ugaaauaagccagacauc

SEQ ID NO: 1499979 - RNA, 20 nt, Human
ugaaauaagccagacaucaa

SEQ ID NO: 1499980 - RNA, 23 nt, Human
ugaaauaagccagacaucaacag

SEQ ID NO: 1499981 - RNA, 15 nt, Human
ucuguccccuucucu

SEQ ID NO: 1499982 - RNA, 19 nt, Human
ucuguccccuucucucauc

SEQ ID NO: 1499983 - RNA, 20 nt, Human
ucuguccccuucucucaucu

SEQ ID NO: 1499984 - RNA, 21 nt, Human
ucuguccccuucucucaucuc

SEQ ID NO: 1499985 - RNA, 22 nt, Human
ucuguccccuucucucaucucu

SEQ ID NO: 1499986 - RNA, 19 nt, Human
ucuguuuagauaauacacc

SEQ ID NO: 1499987 - RNA, 16 nt, Human
ucuguuuagauaauac

SEQ ID NO: 1499988 - RNA, 23 nt, Human
ucuguuuagauaauacaccacua

SEQ ID NO: 1499989 - RNA, 23 nt, Human
agaaccccaggguccuguagccc

SEQ ID NO: 1499990 - RNA, 21 nt, Human
agaauguguuuaaacuugguu

SEQ ID NO: 1499991 - RNA, 19 nt, Human
agaauuaguggcacuugcu

SEQ ID NO: 1499992 - RNA, 14 nt, Human
agaauucucuaguu

SEQ ID NO: 1499993 - RNA, 18 nt, Human
agaauucucuaguuugau

SEQ ID NO: 1499994 - RNA, 20 nt, Human
agaauuauaauuaguuccuc

SEQ ID NO: 1499995 - RNA, 20 nt, Human
agaauucucagaaucucaaa

SEQ ID NO: 1499996 - RNA, 13 nt, Human
agacagcugccug

SEQ ID NO: 1499997 - RNA, 14 nt, Human
agacagcugccugg

SEQ ID NO: 1499998 - RNA, 23 nt, Human
agacacaggcccggcuccaggcu

SEQ ID NO: 1499999 - RNA, 21 nt, Human
agacacauguccaagaagccc

SEQ ID NO: 1500000 - RNA, 22 nt, Human
agacacauguccaagaagccca

SEQ ID NO: 1500001 - RNA, 22 nt, Human
agacaccuugacagggcacacc

SEQ ID NO: 1500002 - RNA, 24 nt, Human
agacacauguccaagaagcccagg

SEQ ID NO: 1500003 - RNA, 16 nt, Human
agacacacugaagaag

SEQ ID NO: 1500004 - RNA, 17 nt, Human
agacacacugaagaagc

SEQ ID NO: 1500005 - RNA, 17 nt, Human
agacacaggcccggcuc

SEQ ID NO: 1500006 - RNA, 19 nt, Human
agacacaggcccggcucca

SEQ ID NO: 1500007 - RNA, 20 nt, Human
agacacaggcccggcuccag

SEQ ID NO: 1500008 - RNA, 21 nt, Human
agacacaggcccggcuccagg

SEQ ID NO: 1500009 - RNA, 22 nt, Human
agacacaggcccggcuccaggc

SEQ ID NO: 1500010 - RNA, 19 nt, Human
agaauucucuaguuugauu

SEQ ID NO: 1500011 - RNA, 17 nt, Human
agaauucucuuauccaa

SEQ ID NO: 1500012 - RNA, 14 nt, Human
agacacaagccuuc

SEQ ID NO: 1500013 - RNA, 13 nt, Human
agacacaagccuu

SEQ ID NO: 1500014 - RNA, 20 nt, Human
agacacaacuauuuuuccaa

SEQ ID NO: 1500015 - RNA, 23 nt, Human
ucuuagaugcaguucugaagaag

SEQ ID NO: 1500016 - RNA, 12 nt, Human
ucuuagauguau

SEQ ID NO: 1500017 - RNA, 14 nt, Human
ucuuagauguauau

SEQ ID NO: 1500018 - RNA, 14 nt, Human
ucuuacaaacaugu

SEQ ID NO: 1500019 - RNA, 14 nt, Human
ucuuaauuaaaaga

SEQ ID NO: 1500020 - RNA, 13 nt, Human
agacagucccugc

SEQ ID NO: 1500021 - RNA, 14 nt, Human
agacagucccugcc

SEQ ID NO: 1500022 - RNA, 15 nt, Human
agacagcugccuggg

SEQ ID NO: 1500023 - RNA, 16 nt, Human
agacagcugccuggga

SEQ ID NO: 1500024 - RNA, 12 nt, Human
agacagucccug

SEQ ID NO: 1500025 - RNA, 14 nt, Human
agacauagaauuaa

SEQ ID NO: 1500026 - RNA, 23 nt, Human
ucuucuguacgucugacaggcaa

SEQ ID NO: 1500027 - RNA, 23 nt, Human
agacauacuaaccagcagaaaug

SEQ ID NO: 1500028 - RNA, 16 nt, Human
ucuuauuucauuucuu

SEQ ID NO: 1500029 - RNA, 15 nt, Human
ucuuauuucauuucu

SEQ ID NO: 1500030 - RNA, 21 nt, Human
ucuucuguacgucugacaggc

SEQ ID NO: 1500031 - RNA, 22 nt, Human
ucuucuguacgucugacaggca

SEQ ID NO: 1500032 - RNA, 22 nt, Human
ucuucugcuucagccucccgag

SEQ ID NO: 1500033 - RNA, 14 nt, Human
agacccggcugcgu

SEQ ID NO: 1500034 - RNA, 17 nt, Human
ucuugagccuugaacuu

SEQ ID NO: 1500035 - RNA, 15 nt, Human
agacucauucuucug

SEQ ID NO: 1500036 - RNA, 19 nt, Human
ucuugagccuugaacuuug

SEQ ID NO: 1500037 - RNA, 18 nt, Human
ucuugagccuugaacuuu

SEQ ID NO: 1500038 - RNA, 20 nt, Human
ucuugagccuugaacuuuga

SEQ ID NO: 1500039 - RNA, 21 nt, Human
agacucgcgacaaugcaaacc

SEQ ID NO: 1500040 - RNA, 20 nt, Human
agacucgcgacaaugcaaac

SEQ ID NO: 1500041 - RNA, 15 nt, Human
agacuguacaaagua

SEQ ID NO: 1500042 - RNA, 16 nt, Human
agacuguacaaaguag

SEQ ID NO: 1500043 - RNA, 24 nt, Human
agagacagaaagcagaacagugau

SEQ ID NO: 1500044 - RNA, 15 nt, Human
agagacacaagccuu

SEQ ID NO: 1500045 - RNA, 22 nt, Human
agagaaaaaauauuuuccugcc

SEQ ID NO: 1500046 - RNA, 22 nt, Human
ucuuuaaugucacaggcagguc

SEQ ID NO: 1500047 - RNA, 16 nt, Human
ucuugguuuguaaauu

SEQ ID NO: 1500048 - RNA, 20 nt, Human
ucuuuaaugucacaggcagg

SEQ ID NO: 1500049 - RNA, 14 nt, Human
ucuugguuuguaaa

SEQ ID NO: 1500050 - RNA, 20 nt, Human
ucuugaucaacaucuuuucu

SEQ ID NO: 1500051 - RNA, 23 nt, Human
ucuugaucaacaucuuuucuugc

SEQ ID NO: 1500052 - RNA, 17 nt, Human
ucuugaucaacaucuuu

SEQ ID NO: 1500053 - RNA, 18 nt, Human
ucuugaucaacaucuuuu

SEQ ID NO: 1500054 - RNA, 19 nt, Human
ucuugaucaacaucuuuuc

SEQ ID NO: 1500055 - RNA, 19 nt, Human
ucuuucuggcuaugcauuu

SEQ ID NO: 1500056 - RNA, 18 nt, Human
ucuuucuggcuaugcauu

SEQ ID NO: 1500057 - RNA, 20 nt, Human
ucuuuauaauucuacuuuga

SEQ ID NO: 1500058 - RNA, 13 nt, Human
ucuuucugcuuug

SEQ ID NO: 1500059 - RNA, 14 nt, Human
agacucgagaacuu

SEQ ID NO: 1500060 - RNA, 15 nt, Human
agacucgagaacuuu

SEQ ID NO: 1500061 - RNA, 18 nt, Human
agacucgagaacuuucau

SEQ ID NO: 1500062 - RNA, 19 nt, Human
agacucgagaacuuucauu

SEQ ID NO: 1500063 - RNA, 15 nt, Human
agacucgcgacaaug

SEQ ID NO: 1500064 - RNA, 17 nt, Human
agacucgcgacaaugca

SEQ ID NO: 1500065 - RNA, 18 nt, Human
agacucgcgacaaugcaa

SEQ ID NO: 1500066 - RNA, 19 nt, Human
agacucgcgacaaugcaaa

SEQ ID NO: 1500067 - RNA, 13 nt, Human
ucugauacagaaa

SEQ ID NO: 1500068 - RNA, 18 nt, Human
ucugauucccaagcucug

SEQ ID NO: 1500069 - RNA, 18 nt, Human
ucugcacuccccugcugg

SEQ ID NO: 1500070 - RNA, 19 nt, Human
ucugcacuccccugcuggg

SEQ ID NO: 1500071 - RNA, 14 nt, Human
ucugacuaugacau

SEQ ID NO: 1500072 - RNA, 23 nt, Human
ucugagacucgcgacaaugcaaa

SEQ ID NO: 1500073 - RNA, 16 nt, Human
ucugacuaugacauaa

SEQ ID NO: 1500074 - RNA, 20 nt, Human
ucugcacuccccugcugggu

SEQ ID NO: 1500075 - RNA, 22 nt, Human
ucugcacuccccugcugggugu

SEQ ID NO: 1500076 - RNA, 14 nt, Human
agaaauauaauuga

SEQ ID NO: 1500077 - RNA, 19 nt, Human
agaaauaucugaaaaugua

SEQ ID NO: 1500078 - RNA, 20 nt, Human
agaaauaucugaaaauguau

SEQ ID NO: 1500079 - RNA, 17 nt, Human
agaaaucaaagagagaa

SEQ ID NO: 1500080 - RNA, 14 nt, Human
agaaagaaaaucag

SEQ ID NO: 1500081 - RNA, 14 nt, Human
agaaaugaaagcag

SEQ ID NO: 1500082 - RNA, 12 nt, Human
ucugaagaagau

SEQ ID NO: 1500083 - RNA, 12 nt, Human
ucugacacacag

SEQ ID NO: 1500084 - RNA, 17 nt, Human
ucucucacuuguuuuau

SEQ ID NO: 1500085 - RNA, 21 nt, Human
ucucucacuuguuuuauuuaa

SEQ ID NO: 1500086 - RNA, 13 nt, Human
ucucucacuccuu

SEQ ID NO: 1500087 - RNA, 15 nt, Human
ucucucacuccuuga

SEQ ID NO: 1500088 - RNA, 14 nt, Human
acuuucugaaauaa

SEQ ID NO: 1500089 - RNA, 18 nt, Human
acuuugaccucugcagca

SEQ ID NO: 1500090 - RNA, 16 nt, Human
acuuugaccucugcag

SEQ ID NO: 1500091 - RNA, 15 nt, Human
acuuugaccucugca

SEQ ID NO: 1500092 - RNA, 14 nt, Human
ucucucaucucuua

SEQ ID NO: 1500093 - RNA, 19 nt, Human
ucucucaucucuuagcucc

SEQ ID NO: 1500094 - RNA, 23 nt, Human
ucucucaucucuuagcuccccuc

SEQ ID NO: 1500095 - RNA, 22 nt, Human
ucucucaucucuuagcuccccu

SEQ ID NO: 1500096 - RNA, 17 nt, Human
ucucuccagccccugga

SEQ ID NO: 1500097 - RNA, 18 nt, Human
ucucuccagccccuggau

SEQ ID NO: 1500098 - RNA, 19 nt, Human
ucucuccagccccuggaug

SEQ ID NO: 1500099 - RNA, 12 nt, Human
ucucuggccuuc

SEQ ID NO: 1500100 - RNA, 17 nt, Human
ucucuccuguaccucuu

SEQ ID NO: 1500101 - RNA, 16 nt, Human
ucucuccuguaccucu

SEQ ID NO: 1500102 - RNA, 14 nt, Human
ucucuccuguaccu

SEQ ID NO: 1500103 - RNA, 15 nt, Human
ucucugcccuccaag

SEQ ID NO: 1500104 - RNA, 16 nt, Human
ucucugcccuccaaga

SEQ ID NO: 1500105 - RNA, 17 nt, Human
ucucugcccuccaagac

SEQ ID NO: 1500106 - RNA, 18 nt, Human
agaaaaaggaugcacaga

SEQ ID NO: 1500107 - RNA, 17 nt, Human
agaaaaaggaugcacag

SEQ ID NO: 1500108 - RNA, 16 nt, Human
ucucuugguccugcug

SEQ ID NO: 1500109 - RNA, 13 nt, Human
agaaaaagaaaaa

SEQ ID NO: 1500110 - RNA, 20 nt, Human
ucucuuuaaugucacaggca

SEQ ID NO: 1500111 - RNA, 21 nt, Human
ucucuuuaaugucacaggcag

SEQ ID NO: 1500112 - RNA, 21 nt, Human
ucucuggccuucggccuccau

SEQ ID NO: 1500113 - RNA, 22 nt, Human
ucucuggccuucggccuccauc

SEQ ID NO: 1500114 - RNA, 23 nt, Human
ucucuggccuucggccuccaucc

SEQ ID NO: 1500115 - RNA, 13 nt, Human
ucucuggccuucg

SEQ ID NO: 1500116 - RNA, 18 nt, Human
ucucuugagccugggagg

SEQ ID NO: 1500117 - RNA, 14 nt, Human
ucucuugauucaua

SEQ ID NO: 1500118 - RNA, 16 nt, Human
ucucuugauucauaau

SEQ ID NO: 1500119 - RNA, 12 nt, Human
ucucaggaaauc

SEQ ID NO: 1500120 - RNA, 12 nt, Human
ucucagggccug

SEQ ID NO: 1500121 - RNA, 13 nt, Human
ucucagggccugg

SEQ ID NO: 1500122 - RNA, 19 nt, Human
ucucagggccuggucguuu

SEQ ID NO: 1500123 - RNA, 14 nt, Human
ucucagggccuggu

SEQ ID NO: 1500124 - RNA, 15 nt, Human
ucucagggccugguc

SEQ ID NO: 1500125 - RNA, 22 nt, Human
ucuccaaaauaaaacuuuuuaa

SEQ ID NO: 1500126 - RNA, 19 nt, Human
ucuccaaaauaaaacuuuu

SEQ ID NO: 1500127 - RNA, 17 nt, Human
ucuccaaaauaaaacuu

SEQ ID NO: 1500128 - RNA, 23 nt, Human
ucuccaaccccccagcacugagg

SEQ ID NO: 1500129 - RNA, 21 nt, Human
ucuccaaccccccagcacuga

SEQ ID NO: 1500130 - RNA, 22 nt, Human
ucuccaaccccccagcacugag

SEQ ID NO: 1500131 - RNA, 15 nt, Human
ucuccaagcaggaca

SEQ ID NO: 1500132 - RNA, 17 nt, Human
ucuccaaccccccagca

SEQ ID NO: 1500133 - RNA, 18 nt, Human
ucuccaaccccccagcac

SEQ ID NO: 1500134 - RNA, 19 nt, Human
ucuccaaccccccagcacu

SEQ ID NO: 1500135 - RNA, 20 nt, Human
ucuccaaccccccagcacug

SEQ ID NO: 1500136 - RNA, 16 nt, Human
ucuccaggcuguaucc

SEQ ID NO: 1500137 - RNA, 16 nt, Human
acuuguguuuugcaag

SEQ ID NO: 1500138 - RNA, 21 nt, Human
ucuccuccuuuucacaguucu

SEQ ID NO: 1500139 - RNA, 14 nt, Human
acuuugaccucugc

SEQ ID NO: 1500140 - RNA, 17 nt, Human
acuuucuagccagagga

SEQ ID NO: 1500141 - RNA, 16 nt, Human
ucuccauguuugaugu

SEQ ID NO: 1500142 - RNA, 16 nt, Human
acuugucaauaaaauc

SEQ ID NO: 1500143 - RNA, 16 nt, Human
acuuguggacacagcu

SEQ ID NO: 1500144 - RNA, 17 nt, Human
acuuguggacacagcuc

SEQ ID NO: 1500145 - RNA, 18 nt, Human
acuuguggacacagcucu

SEQ ID NO: 1500146 - RNA, 19 nt, Human
acuugagcccagagugaac

SEQ ID NO: 1500147 - RNA, 21 nt, Human
acuugaacccgggaggcagag

SEQ ID NO: 1500148 - RNA, 20 nt, Human
acuugaauaaccaucugaaa

SEQ ID NO: 1500149 - RNA, 19 nt, Human
acuugaauaaccaucugaa

SEQ ID NO: 1500150 - RNA, 21 nt, Human
acuugaacccauauuuguaca

SEQ ID NO: 1500151 - RNA, 19 nt, Human
acuugaacccgggaggcag

SEQ ID NO: 1500152 - RNA, 20 nt, Human
acuugaacccgggaggcaga

SEQ ID NO: 1500153 - RNA, 18 nt, Human
acuucuccacccugcucu

SEQ ID NO: 1500154 - RNA, 15 nt, Human
acuucuccacccugc

SEQ ID NO: 1500155 - RNA, 16 nt, Human
acuucuccacccugcu

SEQ ID NO: 1500156 - RNA, 21 nt, Human
ucucacagcuccaagaauuuc

SEQ ID NO: 1500157 - RNA, 11 nt, Human
ucucacuccuu

SEQ ID NO: 1500158 - RNA, 11 nt, Human
acuucagcuga

SEQ ID NO: 1500159 - RNA, 16 nt, Human
acuucagcugacuuuu

SEQ ID NO: 1500160 - RNA, 14 nt, Human
acuucuccacccug

SEQ ID NO: 1500161 - RNA, 23 nt, Human
acuucuaaguaaaaccacagcag

SEQ ID NO: 1500162 - RNA, 16 nt, Human
ucucacuauguugccc

SEQ ID NO: 1500163 - RNA, 13 nt, Human
ucucacuccuuga

SEQ ID NO: 1500164 - RNA, 16 nt, Human
ucucacucugucgccc

SEQ ID NO: 1500165 - RNA, 12 nt, Human
ucucacucuguc

SEQ ID NO: 1500166 - RNA, 15 nt, Human
uccuucagugccuua

SEQ ID NO: 1500167 - RNA, 20 nt, Human
uccuucagugccuuauggaa

SEQ ID NO: 1500168 - RNA, 16 nt, Human
uccuucagugccuuau

SEQ ID NO: 1500169 - RNA, 17 nt, Human
uccuucagugccuuaug

SEQ ID NO: 1500170 - RNA, 23 nt, Human
uccuuguguuacuaaguuuuuau

SEQ ID NO: 1500171 - RNA, 14 nt, Human
uccuuguguuacua

SEQ ID NO: 1500172 - RNA, 15 nt, Human
uccuuuagcgcccag

SEQ ID NO: 1500173 - RNA, 19 nt, Human
uccuuuagcgcccaguugg

SEQ ID NO: 1500174 - RNA, 22 nt, Human
uccuuuagcgcccaguugggug

SEQ ID NO: 1500175 - RNA, 23 nt, Human
uccuuuagcgcccaguugggugg

SEQ ID NO: 1500176 - RNA, 14 nt, Human
ucgagaacuuucau

SEQ ID NO: 1500177 - RNA, 22 nt, Human
ucgagaacuuucauuuuuuucc

SEQ ID NO: 1500178 - RNA, 15 nt, Human
ucgagaacuuucauu

SEQ ID NO: 1500179 - RNA, 16 nt, Human
ucgagaacuuucauuu

SEQ ID NO: 1500180 - RNA, 16 nt, Human
ucgagcaugccuggau

SEQ ID NO: 1500181 - RNA, 18 nt, Human
ucgagcaugccuggaugg

SEQ ID NO: 1500182 - RNA, 19 nt, Human
ucgcgacaaugcaaaccau

SEQ ID NO: 1500183 - RNA, 13 nt, Human
ucgaggacaggga

SEQ ID NO: 1500184 - RNA, 16 nt, Human
ucgcgacaaugcaaac

SEQ ID NO: 1500185 - RNA, 13 nt, Human
acugccuucucaa

SEQ ID NO: 1500186 - RNA, 19 nt, Human
acugccuucucaacuccaa

SEQ ID NO: 1500187 - RNA, 20 nt, Human
acugccuucucaacuccaaa

SEQ ID NO: 1500188 - RNA, 18 nt, Human
acugcuuaacuucacaua

SEQ ID NO: 1500189 - RNA, 16 nt, Human
acugcuuguguuuuua

SEQ ID NO: 1500190 - RNA, 17 nt, Human
acugcuuccagugaggc

SEQ ID NO: 1500191 - RNA, 20 nt, Human
acugcuuaacuucacauauu

SEQ ID NO: 1500192 - RNA, 14 nt, Human
acugcuuuuggucu

SEQ ID NO: 1500193 - RNA, 18 nt, Human
acugcuuguguuuuuaac

SEQ ID NO: 1500194 - RNA, 21 nt, Human
acuggcacaguuuucugagaa

SEQ ID NO: 1500195 - RNA, 19 nt, Human
acuggcacaguuuucugag

SEQ ID NO: 1500196 - RNA, 20 nt, Human
acuggcacaguuuucugaga

SEQ ID NO: 1500197 - RNA, 13 nt, Human
acuggcacaguuu

SEQ ID NO: 1500198 - RNA, 22 nt, Human
acuggauuaaacuuaaucuaaa

SEQ ID NO: 1500199 - RNA, 15 nt, Human
acuggauuaaacuua

SEQ ID NO: 1500200 - RNA, 15 nt, Human
acugcauuauauuua

SEQ ID NO: 1500201 - RNA, 14 nt, Human
acugcauuauauuu

SEQ ID NO: 1500202 - RNA, 20 nt, Human
acugcaucaagaugugacau

SEQ ID NO: 1500203 - RNA, 22 nt, Human
acugcaucaagaugugacaugu

SEQ ID NO: 1500204 - RNA, 16 nt, Human
acugcauguuugugau

SEQ ID NO: 1500205 - RNA, 15 nt, Human
acugcauguuuguga

SEQ ID NO: 1500206 - RNA, 16 nt, Human
acugcauaugaaagga

SEQ ID NO: 1500207 - RNA, 21 nt, Human
uccuagaaauuccccacccug

SEQ ID NO: 1500208 - RNA, 22 nt, Human
uccuagaaauuccccacccuga

SEQ ID NO: 1500209 - RNA, 20 nt, Human
ucuaaagccauuguaguccu

SEQ ID NO: 1500210 - RNA, 13 nt, Human
ucuaaagcugcca

SEQ ID NO: 1500211 - RNA, 14 nt, Human
ucuaaagcugccag

SEQ ID NO: 1500212 - RNA, 16 nt, Human
ucuaaagcugccagcc

SEQ ID NO: 1500213 - RNA, 15 nt, Human
ucuaaagcugccagc

SEQ ID NO: 1500214 - RNA, 21 nt, Human
ucuaaguaaaaccacagcagu

SEQ ID NO: 1500215 - RNA, 22 nt, Human
ucuaaguaaaaccacagcaguu

SEQ ID NO: 1500216 - RNA, 23 nt, Human
ucuaaguaaaaccacagcaguug

SEQ ID NO: 1500217 - RNA, 17 nt, Human
ucuacauaaguaauuca

SEQ ID NO: 1500218 - RNA, 20 nt, Human
ucuacauaaguaauucaaga

SEQ ID NO: 1500219 - RNA, 16 nt, Human
ucuacauacuauggaa

SEQ ID NO: 1500220 - RNA, 22 nt, Human
ucuacauaaguaauucaagaaa

SEQ ID NO: 1500221 - RNA, 21 nt, Human
acuguucucugcccuccaaga

SEQ ID NO: 1500222 - RNA, 15 nt, Human
acuguucucugcccu

SEQ ID NO: 1500223 - RNA, 20 nt, Human
acuguucucugcccuccaag

SEQ ID NO: 1500224 - RNA, 14 nt, Human
acuguucucugccc

SEQ ID NO: 1500225 - RNA, 16 nt, Human
acuuaaauaaugugaa

SEQ ID NO: 1500226 - RNA, 18 nt, Human
acuuaaauaaugugaaac

SEQ ID NO: 1500227 - RNA, 17 nt, Human
acuuaaauaaugugaaa

SEQ ID NO: 1500228 - RNA, 13 nt, Human
acuguugcccagg

SEQ ID NO: 1500229 - RNA, 14 nt, Human
acuguugcccaggc

SEQ ID NO: 1500230 - RNA, 17 nt, Human
acuguugcccaggcugg

SEQ ID NO: 1500231 - RNA, 18 nt, Human
acuguugcccaggcuggc

SEQ ID NO: 1500232 - RNA, 15 nt, Human
acuuauagauugaaa

SEQ ID NO: 1500233 - RNA, 16 nt, Human
acuuaaucuaaaugga

SEQ ID NO: 1500234 - RNA, 15 nt, Human
acuuaaucuaaaugg

SEQ ID NO: 1500235 - RNA, 13 nt, Human
acuuaaucuaaau

SEQ ID NO: 1500236 - RNA, 18 nt, Human
acuguggguagacacaca

SEQ ID NO: 1500237 - RNA, 21 nt, Human
acugucagcuccccucggaga

SEQ ID NO: 1500238 - RNA, 18 nt, Human
acugggacaggggagaac

SEQ ID NO: 1500239 - RNA, 22 nt, Human
acugucagcuccccucggagaa

SEQ ID NO: 1500240 - RNA, 17 nt, Human
acuguccuacccacccu

SEQ ID NO: 1500241 - RNA, 18 nt, Human
acuguccuacccacccuc

SEQ ID NO: 1500242 - RNA, 23 nt, Human
acuguccuacccacccuccuuuc

SEQ ID NO: 1500243 - RNA, 13 nt, Human
ucgguccuggugc

SEQ ID NO: 1500244 - RNA, 16 nt, Human
ucgguccuggugcccu

SEQ ID NO: 1500245 - RNA, 17 nt, Human
ucgggaggucgaggcag

SEQ ID NO: 1500246 - RNA, 19 nt, Human
ucgggaggucgaggcagga

SEQ ID NO: 1500247 - RNA, 21 nt, Human
ucgggaggucgaggcaggagg

SEQ ID NO: 1500248 - RNA, 22 nt, Human
ucggguuuuauuguuuaaaauc

SEQ ID NO: 1500249 - RNA, 11 nt, Human
ucgggcaugac

SEQ ID NO: 1500250 - RNA, 12 nt, Human
ucgggcaugaca

SEQ ID NO: 1500251 - RNA, 17 nt, Human
uccggucccugucccag

SEQ ID NO: 1500252 - RNA, 16 nt, Human
uccuagaaauucccca

SEQ ID NO: 1500253 - RNA, 12 nt, Human
ucccuuuuccuu

SEQ ID NO: 1500254 - RNA, 19 nt, Human
ucccuuucugcuuguguua

SEQ ID NO: 1500255 - RNA, 23 nt, Human
ucccuuucuccccugcccccagg

SEQ ID NO: 1500256 - RNA, 17 nt, Human
ucccuuacgugaguccu

SEQ ID NO: 1500257 - RNA, 14 nt, Human
ucccuuucuccccu

SEQ ID NO: 1500258 - RNA, 15 nt, Human
ucccuuucuccccug

SEQ ID NO: 1500259 - RNA, 16 nt, Human
ucccuuucuccccugc

SEQ ID NO: 1500260 - RNA, 17 nt, Human
ucccuuucuccccugcc

SEQ ID NO: 1500261 - RNA, 18 nt, Human
ucccuuucuccccugccc

SEQ ID NO: 1500262 - RNA, 21 nt, Human
acuccugcaggcagccaggcc

SEQ ID NO: 1500263 - RNA, 15 nt, Human
ucccugguggcagcu

SEQ ID NO: 1500264 - RNA, 12 nt, Human
ucccugucccag

SEQ ID NO: 1500265 - RNA, 15 nt, Human
acucauucuucugua

SEQ ID NO: 1500266 - RNA, 14 nt, Human
acucauugaccuga

SEQ ID NO: 1500267 - RNA, 15 nt, Human
acucauugaccugag

SEQ ID NO: 1500268 - RNA, 14 nt, Human
acuccaaagaaaug

SEQ ID NO: 1500269 - RNA, 15 nt, Human
acuccaaagaaaugu

SEQ ID NO: 1500270 - RNA, 18 nt, Human
acuccaaagaaauguaag

SEQ ID NO: 1500271 - RNA, 15 nt, Human
acuccagaauuuccc

SEQ ID NO: 1500272 - RNA, 17 nt, Human
acuccagaauuucccaa

SEQ ID NO: 1500273 - RNA, 21 nt, Human
acuccaaagaaauguaaggga

SEQ ID NO: 1500274 - RNA, 18 nt, Human
acuccugcaggcagccag

SEQ ID NO: 1500275 - RNA, 19 nt, Human
acuccugcaggcagccagg

SEQ ID NO: 1500276 - RNA, 23 nt, Human
acuccagaauuucccaaagcagu

SEQ ID NO: 1500277 - RNA, 12 nt, Human
acuccagccugg

SEQ ID NO: 1500278 - RNA, 13 nt, Human
acuccagccuggg

SEQ ID NO: 1500279 - RNA, 17 nt, Human
acuacucccccaggugg

SEQ ID NO: 1500280 - RNA, 12 nt, Human
acucaccccagc

SEQ ID NO: 1500281 - RNA, 20 nt, Human
ucccgaauagcugggacuac

SEQ ID NO: 1500282 - RNA, 15 nt, Human
ucccgaguagcuggg

SEQ ID NO: 1500283 - RNA, 20 nt, Human
ucccgaguagcugggacuac

SEQ ID NO: 1500284 - RNA, 18 nt, Human
ucccgaguagcugggacu

SEQ ID NO: 1500285 - RNA, 16 nt, Human
ucccgaguagcuggga

SEQ ID NO: 1500286 - RNA, 17 nt, Human
ucccgaguagcugggac

SEQ ID NO: 1500287 - RNA, 16 nt, Human
uccccucggagaagag

SEQ ID NO: 1500288 - RNA, 17 nt, Human
uccccucggagaagagc

SEQ ID NO: 1500289 - RNA, 21 nt, Human
ucccucuuucccucccuuccu

SEQ ID NO: 1500290 - RNA, 11 nt, Human
ucccugaaggc

SEQ ID NO: 1500291 - RNA, 15 nt, Human
ucccugaaggccccg

SEQ ID NO: 1500292 - RNA, 18 nt, Human
ucccucuuucccucccuu

SEQ ID NO: 1500293 - RNA, 20 nt, Human
ucccucuuucccucccuucc

SEQ ID NO: 1500294 - RNA, 11 nt, Human
ucccugagcag

SEQ ID NO: 1500295 - RNA, 16 nt, Human
ucccugaaggccccgc

SEQ ID NO: 1500296 - RNA, 17 nt, Human
ucccugaaggccccgcc

SEQ ID NO: 1500297 - RNA, 17 nt, Human
acgugggcauucaaaug

SEQ ID NO: 1500298 - RNA, 20 nt, Human
acgugggcauucaaauguau

SEQ ID NO: 1500299 - RNA, 18 nt, Human
acguguacuacaauuuaa

SEQ ID NO: 1500300 - RNA, 15 nt, Human
acgguuuuacugcag

SEQ ID NO: 1500301 - RNA, 17 nt, Human
acgguuuuacugcagcu

SEQ ID NO: 1500302 - RNA, 20 nt, Human
acguauguuuuuguguauuu

SEQ ID NO: 1500303 - RNA, 20 nt, Human
acgggaggguaaggcugugg

SEQ ID NO: 1500304 - RNA, 20 nt, Human
acgggcccggguugggucac

SEQ ID NO: 1500305 - RNA, 21 nt, Human
acgggcccggguugggucacc

SEQ ID NO: 1500306 - RNA, 16 nt, Human
acgggcccggguuggg

SEQ ID NO: 1500307 - RNA, 17 nt, Human
acgggcccggguugggu

SEQ ID NO: 1500308 - RNA, 16 nt, Human
ucccacaaaggagagc

SEQ ID NO: 1500309 - RNA, 15 nt, Human
ucccaccccacacac

SEQ ID NO: 1500310 - RNA, 20 nt, Human
ucccaccccacacacgccag

SEQ ID NO: 1500311 - RNA, 13 nt, Human
ucccaaagugcug

SEQ ID NO: 1500312 - RNA, 14 nt, Human
ucccaaagugcugg

SEQ ID NO: 1500313 - RNA, 21 nt, Human
ucccaaagcagugcaugcugu

SEQ ID NO: 1500314 - RNA, 17 nt, Human
ucccaaagcagugcaug

SEQ ID NO: 1500315 - RNA, 18 nt, Human
ucccaaagcagugcaugc

SEQ ID NO: 1500316 - RNA, 16 nt, Human
ucccaaagcagugcau

SEQ ID NO: 1500317 - RNA, 18 nt, Human
ucccaaacccuucagugc

SEQ ID NO: 1500318 - RNA, 15 nt, Human
uccaugaaaaugcaa

SEQ ID NO: 1500319 - RNA, 16 nt, Human
uccaugaaaaugcaac

SEQ ID NO: 1500320 - RNA, 13 nt, Human
uccaugaagaugu

SEQ ID NO: 1500321 - RNA, 21 nt, Human
uccaugaagauguagaggaga

SEQ ID NO: 1500322 - RNA, 22 nt, Human
uccaugaagauguagaggagaa

SEQ ID NO: 1500323 - RNA, 20 nt, Human
uccauccugaggcuccacuu

SEQ ID NO: 1500324 - RNA, 21 nt, Human
uccauccugaggcuccacuug

SEQ ID NO: 1500325 - RNA, 22 nt, Human
acgccagauucuuuccugaggc

SEQ ID NO: 1500326 - RNA, 23 nt, Human
acgccagauucuuuccugaggcu

SEQ ID NO: 1500327 - RNA, 15 nt, Human
acuacauucuguuaa

SEQ ID NO: 1500328 - RNA, 23 nt, Human
ucccagauuggcucacacugaga

SEQ ID NO: 1500329 - RNA, 14 nt, Human
acuacauucuguua

SEQ ID NO: 1500330 - RNA, 13 nt, Human
acuacauucuguu

SEQ ID NO: 1500331 - RNA, 12 nt, Human
acuacauucugu

SEQ ID NO: 1500332 - RNA, 15 nt, Human
acuacaguuuguuag

SEQ ID NO: 1500333 - RNA, 12 nt, Human
ucccagccccaa

SEQ ID NO: 1500334 - RNA, 17 nt, Human
ucccagcugugcucugg

SEQ ID NO: 1500335 - RNA, 23 nt, Human
acuacaggugugagucaccaagc

SEQ ID NO: 1500336 - RNA, 15 nt, Human
acuacaggcacccac

SEQ ID NO: 1500337 - RNA, 14 nt, Human
acuacaguuuguua

SEQ ID NO: 1500338 - RNA, 13 nt, Human
acuacaguuuguu

SEQ ID NO: 1500339 - RNA, 17 nt, Human
acuacaauuuaaagcaa

SEQ ID NO: 1500340 - RNA, 22 nt, Human
acuacaauuuaaagcaaaggag

SEQ ID NO: 1500341 - RNA, 11 nt, Human
acuacaggcac

SEQ ID NO: 1500342 - RNA, 21 nt, Human
acuacaaacaaaauuucuauu

SEQ ID NO: 1500343 - RNA, 12 nt, Human
acuaaccacgcu

SEQ ID NO: 1500344 - RNA, 22 nt, Human
acuacaaacaaaauuucuauua

SEQ ID NO: 1500345 - RNA, 20 nt, Human
ucccagcugugcucuggaca

SEQ ID NO: 1500346 - RNA, 14 nt, Human
ucccagucauuuaa

SEQ ID NO: 1500347 - RNA, 22 nt, Human
ucccagucauuuaauaaaugug

SEQ ID NO: 1500348 - RNA, 15 nt, Human
ucccaucacccgcua

SEQ ID NO: 1500349 - RNA, 22 nt, Human
ucccauaugccugggcagaagg

SEQ ID NO: 1500350 - RNA, 12 nt, Human
uccccacccuga

SEQ ID NO: 1500351 - RNA, 22 nt, Human
uccccaccgcagacaggaccag

SEQ ID NO: 1500352 - RNA, 17 nt, Human
uccccaccgcagacagg

SEQ ID NO: 1500353 - RNA, 18 nt, Human
uccccaccgcagacagga

SEQ ID NO: 1500354 - RNA, 21 nt, Human
uccccaccgcagacaggacca

SEQ ID NO: 1500355 - RNA, 14 nt, Human
acgagaaaacaaua

SEQ ID NO: 1500356 - RNA, 22 nt, Human
accuuuuuuauacauaaacaag

SEQ ID NO: 1500357 - RNA, 21 nt, Human
accuuuuuuauacauaaacaa

SEQ ID NO: 1500358 - RNA, 21 nt, Human
uccaggcuguaucccaugagc

SEQ ID NO: 1500359 - RNA, 20 nt, Human
accuuuuuuauacauaaaca

SEQ ID NO: 1500360 - RNA, 19 nt, Human
accuuuuuuauacauaaac

SEQ ID NO: 1500361 - RNA, 16 nt, Human
acgagcaggcuucuuc

SEQ ID NO: 1500362 - RNA, 19 nt, Human
acgccagauucuuuccuga

SEQ ID NO: 1500363 - RNA, 19 nt, Human
acgagcaggcuacugucag

SEQ ID NO: 1500364 - RNA, 20 nt, Human
acgagcaggcuacugucagc

SEQ ID NO: 1500365 - RNA, 14 nt, Human
uccagccccuggau

SEQ ID NO: 1500366 - RNA, 13 nt, Human
uccagccccugga

SEQ ID NO: 1500367 - RNA, 12 nt, Human
uccagccccugg

SEQ ID NO: 1500368 - RNA, 19 nt, Human
uccagacccggcugcgugg

SEQ ID NO: 1500369 - RNA, 15 nt, Human
uccagacccggcugc

SEQ ID NO: 1500370 - RNA, 18 nt, Human
uccagacccggcugcgug

SEQ ID NO: 1500371 - RNA, 20 nt, Human
uccagaauuucccaaagcag

SEQ ID NO: 1500372 - RNA, 22 nt, Human
uccagaauuucccaaagcagug

SEQ ID NO: 1500373 - RNA, 13 nt, Human
uccagacacaugu

SEQ ID NO: 1500374 - RNA, 14 nt, Human
accuuuugagugcc

SEQ ID NO: 1500375 - RNA, 17 nt, Human
accuuuugagugccuua

SEQ ID NO: 1500376 - RNA, 20 nt, Human
accuuuugagugccuuacac

SEQ ID NO: 1500377 - RNA, 23 nt, Human
uccaacccucaucaccaacgucu

SEQ ID NO: 1500378 - RNA, 16 nt, Human
uccaacccucaucacc

SEQ ID NO: 1500379 - RNA, 17 nt, Human
uccaacccucaucacca

SEQ ID NO: 1500380 - RNA, 14 nt, Human
uccaacccucauca

SEQ ID NO: 1500381 - RNA, 23 nt, Human
uccaaccccccagcacugaggaa

SEQ ID NO: 1500382 - RNA, 19 nt, Human
uccaaccccccagcacuga

SEQ ID NO: 1500383 - RNA, 20 nt, Human
uccaaccccccagcacugag

SEQ ID NO: 1500384 - RNA, 21 nt, Human
uccaaccccccagcacugagg

SEQ ID NO: 1500385 - RNA, 22 nt, Human
uccaaccccccagcacugagga

SEQ ID NO: 1500386 - RNA, 12 nt, Human
accugccaggaa

SEQ ID NO: 1500387 - RNA, 14 nt, Human
accugccaggaagc

SEQ ID NO: 1500388 - RNA, 15 nt, Human
accugccaggaagcc

SEQ ID NO: 1500389 - RNA, 14 nt, Human
uccaaccccccagc

SEQ ID NO: 1500390 - RNA, 17 nt, Human
uccaaccccccagcacu

SEQ ID NO: 1500391 - RNA, 18 nt, Human
uccaaccccccagcacug

SEQ ID NO: 1500392 - RNA, 12 nt, Human
uccaagaagccc

SEQ ID NO: 1500393 - RNA, 20 nt, Human
uccaagcuggucccacucag

SEQ ID NO: 1500394 - RNA, 21 nt, Human
uccaaccuggggggcaguggu

SEQ ID NO: 1500395 - RNA, 21 nt, Human
uccaagcuggucccacucagu

SEQ ID NO: 1500396 - RNA, 23 nt, Human
accuggccucugcacuccccugc

SEQ ID NO: 1500397 - RNA, 18 nt, Human
accuggccucugcacucc

SEQ ID NO: 1500398 - RNA, 20 nt, Human
accuggccucugcacucccc

SEQ ID NO: 1500399 - RNA, 19 nt, Human
accuguuucugcagccacu

SEQ ID NO: 1500400 - RNA, 18 nt, Human
accuuagacagucccugc

SEQ ID NO: 1500401 - RNA, 19 nt, Human
accuuagacagucccugcc

SEQ ID NO: 1500402 - RNA, 20 nt, Human
accuuagacagucccugcca

SEQ ID NO: 1500403 - RNA, 18 nt, Human
uccacccaccucagccuc

SEQ ID NO: 1500404 - RNA, 19 nt, Human
uccacccaccucagccucc

SEQ ID NO: 1500405 - RNA, 12 nt, Human
uccacccaggag

SEQ ID NO: 1500406 - RNA, 14 nt, Human
uccacccaggagcc

SEQ ID NO: 1500407 - RNA, 15 nt, Human
uccacccaggagccc

SEQ ID NO: 1500408 - RNA, 17 nt, Human
uccacccaggagccccg

SEQ ID NO: 1500409 - RNA, 14 nt, Human
accuggccucugca

SEQ ID NO: 1500410 - RNA, 16 nt, Human
accuggccucugcacu

SEQ ID NO: 1500411 - RNA, 17 nt, Human
accuggccucugcacuc

SEQ ID NO: 1500412 - RNA, 21 nt, Human
accuagggugauauuaaccag

SEQ ID NO: 1500413 - RNA, 19 nt, Human
accucaaaaugucuaagau

SEQ ID NO: 1500414 - RNA, 22 nt, Human
ucaggaaaucaaauaugcaaag

SEQ ID NO: 1500415 - RNA, 23 nt, Human
ucaggaaaucaaauaugcaaagc

SEQ ID NO: 1500416 - RNA, 13 nt, Human
ucaggaagcucag

SEQ ID NO: 1500417 - RNA, 14 nt, Human
ucaggaagcucagg

SEQ ID NO: 1500418 - RNA, 15 nt, Human
ucaggaagcucaggg

SEQ ID NO: 1500419 - RNA, 16 nt, Human
ucaggaagcucagggc

SEQ ID NO: 1500420 - RNA, 16 nt, Human
ucaugaauuaguuuua

SEQ ID NO: 1500421 - RNA, 22 nt, Human
ucauccuucuggaauaaggaga

SEQ ID NO: 1500422 - RNA, 14 nt, Human
ucauccuucuggaa

SEQ ID NO: 1500423 - RNA, 18 nt, Human
ucauccucauacccaccc

SEQ ID NO: 1500424 - RNA, 13 nt, Human
ucauccuccucag

SEQ ID NO: 1500425 - RNA, 19 nt, Human
ucauccuccucagaucuuc

SEQ ID NO: 1500426 - RNA, 13 nt, Human
accuccugccucg

SEQ ID NO: 1500427 - RNA, 12 nt, Human
accuccugccuc

SEQ ID NO: 1500428 - RNA, 15 nt, Human
ucauccuaagcuauu

SEQ ID NO: 1500429 - RNA, 23 nt, Human
accuccugccucgaacuggcugc

SEQ ID NO: 1500430 - RNA, 14 nt, Human
accucuaaauucuu

SEQ ID NO: 1500431 - RNA, 14 nt, Human
accugaggcccuuc

SEQ ID NO: 1500432 - RNA, 22 nt, Human
accugaggcccuucucuccagc

SEQ ID NO: 1500433 - RNA, 15 nt, Human
accugaggcccuucu

SEQ ID NO: 1500434 - RNA, 16 nt, Human
accugaggcccuucuc

SEQ ID NO: 1500435 - RNA, 20 nt, Human
accugaggcccuucucucca

SEQ ID NO: 1500436 - RNA, 21 nt, Human
accugaggcccuucucuccag

SEQ ID NO: 1500437 - RNA, 15 nt, Human
accugauugugucuc

SEQ ID NO: 1500438 - RNA, 17 nt, Human
accugauugugucucuu

SEQ ID NO: 1500439 - RNA, 18 nt, Human
accugauugugucucuug

SEQ ID NO: 1500440 - RNA, 19 nt, Human
accucgugccaccccgagg

SEQ ID NO: 1500441 - RNA, 23 nt, Human
accucgugccaccccgagggcug

SEQ ID NO: 1500442 - RNA, 19 nt, Human
accucggugccuuccucuu

SEQ ID NO: 1500443 - RNA, 13 nt, Human
accuccugggcua

SEQ ID NO: 1500444 - RNA, 19 nt, Human
ucauugaccugaggcccuu

SEQ ID NO: 1500445 - RNA, 22 nt, Human
ucauugaaaucuuuuugcuuug

SEQ ID NO: 1500446 - RNA, 12 nt, Human
ucauugaccuga

SEQ ID NO: 1500447 - RNA, 14 nt, Human
ucauugaccugagg

SEQ ID NO: 1500448 - RNA, 15 nt, Human
ucauugaccugaggc

SEQ ID NO: 1500449 - RNA, 21 nt, Human
ucaugaauuaguuuuauaugc

SEQ ID NO: 1500450 - RNA, 12 nt, Human
ucauucuucugu

SEQ ID NO: 1500451 - RNA, 12 nt, Human
ucauugaaaucu

SEQ ID NO: 1500452 - RNA, 13 nt, Human
ucauugaaaucuu

SEQ ID NO: 1500453 - RNA, 14 nt, Human
ucaaaaugucuaag

SEQ ID NO: 1500454 - RNA, 21 nt, Human
ucaaaauaugccccauucaac

SEQ ID NO: 1500455 - RNA, 23 nt, Human
ucaaaauaccaugccauuuaaag

SEQ ID NO: 1500456 - RNA, 21 nt, Human
ucaaaauaccaugccauuuaa

SEQ ID NO: 1500457 - RNA, 17 nt, Human
uauuuuuaauuaaauaa

SEQ ID NO: 1500458 - RNA, 13 nt, Human
uauuuuuauuugu

SEQ ID NO: 1500459 - RNA, 13 nt, Human
uauuuuugacaga

SEQ ID NO: 1500460 - RNA, 14 nt, Human
uauuuuugacagaa

SEQ ID NO: 1500461 - RNA, 15 nt, Human
uauuuuugacagaau

SEQ ID NO: 1500462 - RNA, 19 nt, Human
uauuuuugacagaauaugu

SEQ ID NO: 1500463 - RNA, 23 nt, Human
uauuuuugacagaauauguuuca

SEQ ID NO: 1500464 - RNA, 18 nt, Human
ucaaaagaaagaaaauca

SEQ ID NO: 1500465 - RNA, 14 nt, Human
ucaaagcugaaaug

SEQ ID NO: 1500466 - RNA, 17 nt, Human
ucaaagggugaaaauua

SEQ ID NO: 1500467 - RNA, 16 nt, Human
acaugaaguccaagca

SEQ ID NO: 1500468 - RNA, 20 nt, Human
ucaaauacgugggcauucaa

SEQ ID NO: 1500469 - RNA, 18 nt, Human
ucaaauaacuaaaaggua

SEQ ID NO: 1500470 - RNA, 20 nt, Human
acaugagcaucaggccaggc

SEQ ID NO: 1500471 - RNA, 19 nt, Human
acaugaucuucuuuauaau

SEQ ID NO: 1500472 - RNA, 15 nt, Human
acaugaucuucuuua

SEQ ID NO: 1500473 - RNA, 17 nt, Human
acaugaucuucuuuaua

SEQ ID NO: 1500474 - RNA, 19 nt, Human
acaugauccugcaauucca

SEQ ID NO: 1500475 - RNA, 19 nt, Human
acaugagcaucaggccagg

SEQ ID NO: 1500476 - RNA, 17 nt, Human
acaugagcaucaggcca

SEQ ID NO: 1500477 - RNA, 18 nt, Human
acaugagcaucaggccag

SEQ ID NO: 1500478 - RNA, 12 nt, Human
ucaacaucuuuu

SEQ ID NO: 1500479 - RNA, 22 nt, Human
ucaagaugaugaugaucuuuaa

SEQ ID NO: 1500480 - RNA, 11 nt, Human
ucaaguauuau

SEQ ID NO: 1500481 - RNA, 15 nt, Human
ucaaguauuauaccu

SEQ ID NO: 1500482 - RNA, 21 nt, Human
ucaaguauuauaccuuuuuua

SEQ ID NO: 1500483 - RNA, 16 nt, Human
ucaaguauuauaccuu

SEQ ID NO: 1500484 - RNA, 23 nt, Human
ucaaguauuauaccuuuuuuaga

SEQ ID NO: 1500485 - RNA, 21 nt, Human
acauguccaagaagcccagga

SEQ ID NO: 1500486 - RNA, 17 nt, Human
ucaaauuucuaaaucuc

SEQ ID NO: 1500487 - RNA, 16 nt, Human
ucaacagguuuuccug

SEQ ID NO: 1500488 - RNA, 12 nt, Human
acauucuguuaa

SEQ ID NO: 1500489 - RNA, 16 nt, Human
ucaaauuucuaaaucu

SEQ ID NO: 1500490 - RNA, 15 nt, Human
ucaaauuucuaaauc

SEQ ID NO: 1500491 - RNA, 15 nt, Human
acauucuguuaauca

SEQ ID NO: 1500492 - RNA, 21 nt, Human
uaugaaauauuauguuaaaac

SEQ ID NO: 1500493 - RNA, 15 nt, Human
uaugaagaagagagu

SEQ ID NO: 1500494 - RNA, 21 nt, Human
uauuuccauuaaaaaaucagu

SEQ ID NO: 1500495 - RNA, 22 nt, Human
uauuucccucaccuuucccauc

SEQ ID NO: 1500496 - RNA, 23 nt, Human
uauuuccuauauuguuuucagug

SEQ ID NO: 1500497 - RNA, 15 nt, Human
acaguugaaaaacag

SEQ ID NO: 1500498 - RNA, 16 nt, Human
acaguugaaaaacagc

SEQ ID NO: 1500499 - RNA, 20 nt, Human
acaguugaaaaacagcugag

SEQ ID NO: 1500500 - RNA, 18 nt, Human
acaguugcuguuguguga

SEQ ID NO: 1500501 - RNA, 16 nt, Human
acauaaaaacaacuuu

SEQ ID NO: 1500502 - RNA, 19 nt, Human
acauaaaaacaacuuuaua

SEQ ID NO: 1500503 - RNA, 21 nt, Human
acauaaaaacaacuuuauacc

SEQ ID NO: 1500504 - RNA, 18 nt, Human
acaguuuucugagaaaga

SEQ ID NO: 1500505 - RNA, 19 nt, Human
acaguuuucugagaaagac

SEQ ID NO: 1500506 - RNA, 20 nt, Human
acaguuuucugagaaagacu

SEQ ID NO: 1500507 - RNA, 21 nt, Human
acaguuuucugagaaagacua

SEQ ID NO: 1500508 - RNA, 20 nt, Human
acaguuuguuaguaugaggc

SEQ ID NO: 1500509 - RNA, 16 nt, Human
acaguuuguuaguaug

SEQ ID NO: 1500510 - RNA, 15 nt, Human
acaguuuucugagaa

SEQ ID NO: 1500511 - RNA, 16 nt, Human
acaguuuucugagaaa

SEQ ID NO: 1500512 - RNA, 17 nt, Human
acaguuuucugagaaag

SEQ ID NO: 1500513 - RNA, 17 nt, Human
acauacucccaucugug

SEQ ID NO: 1500514 - RNA, 14 nt, Human
acauacucugcuua

SEQ ID NO: 1500515 - RNA, 13 nt, Human
acauacucccauc

SEQ ID NO: 1500516 - RNA, 22 nt, Human
acauacuaaccagcagaaaugc

SEQ ID NO: 1500517 - RNA, 21 nt, Human
acauacuaaccagcagaaaug

SEQ ID NO: 1500518 - RNA, 13 nt, Human
acauacuaaccag

SEQ ID NO: 1500519 - RNA, 19 nt, Human
acauauauaacaaugcugu

SEQ ID NO: 1500520 - RNA, 14 nt, Human
acauagaauuaaca

SEQ ID NO: 1500521 - RNA, 18 nt, Human
acauagaauuaacacaug

SEQ ID NO: 1500522 - RNA, 23 nt, Human
acauauugauuuccguuaaaaua

SEQ ID NO: 1500523 - RNA, 22 nt, Human
acauauugauuuccguuaaaau

SEQ ID NO: 1500524 - RNA, 18 nt, Human
acauauugauuuccguua

SEQ ID NO: 1500525 - RNA, 16 nt, Human
acauauugauuuccgu

SEQ ID NO: 1500526 - RNA, 14 nt, Human
acauauugauuucc

SEQ ID NO: 1500527 - RNA, 23 nt, Human
acauaucuaguaugaaauuauau

SEQ ID NO: 1500528 - RNA, 20 nt, Human
acauaucuaguaugaaauua

SEQ ID NO: 1500529 - RNA, 22 nt, Human
acauaucuaguaugaaauuaua

SEQ ID NO: 1500530 - RNA, 17 nt, Human
acauaucuaguaugaaa

SEQ ID NO: 1500531 - RNA, 22 nt, Human
acaugaaaacacauuuuucuua

SEQ ID NO: 1500532 - RNA, 22 nt, Human
acaucuugcucugcugacagac

SEQ ID NO: 1500533 - RNA, 19 nt, Human
acaugaaaacacauuuuuc

SEQ ID NO: 1500534 - RNA, 18 nt, Human
acaugaaaacacauuuuu

SEQ ID NO: 1500535 - RNA, 17 nt, Human
acaugaaaacacauuuu

SEQ ID NO: 1500536 - RNA, 21 nt, Human
acaucuugcucugcugacaga

SEQ ID NO: 1500537 - RNA, 18 nt, Human
acaucuugcucugcugac

SEQ ID NO: 1500538 - RNA, 19 nt, Human
acaucuugcucugcugaca

SEQ ID NO: 1500539 - RNA, 13 nt, Human
acaucuugcucug

SEQ ID NO: 1500540 - RNA, 14 nt, Human
acaucuugcucugc

SEQ ID NO: 1500541 - RNA, 16 nt, Human
acaucaacaucuuggu

SEQ ID NO: 1500542 - RNA, 18 nt, Human
acaucaacaucuugguca

SEQ ID NO: 1500543 - RNA, 13 nt, Human
acaucaacagaua

SEQ ID NO: 1500544 - RNA, 22 nt, Human
accacuuuuguucuugguuugu

SEQ ID NO: 1500545 - RNA, 12 nt, Human
accagagcccac

SEQ ID NO: 1500546 - RNA, 14 nt, Human
accagagcccaccu

SEQ ID NO: 1500547 - RNA, 16 nt, Human
accagagcccaccuug

SEQ ID NO: 1500548 - RNA, 14 nt, Human
accagacggggcug

SEQ ID NO: 1500549 - RNA, 15 nt, Human
accagacggggcugg

SEQ ID NO: 1500550 - RNA, 21 nt, Human
accagacggggcuggagugug

SEQ ID NO: 1500551 - RNA, 16 nt, Human
accagacggggcugga

SEQ ID NO: 1500552 - RNA, 14 nt, Human
accagacaccuuga

SEQ ID NO: 1500553 - RNA, 17 nt, Human
accagacaccuugacag

SEQ ID NO: 1500554 - RNA, 18 nt, Human
accacuuguguuuugcaa

SEQ ID NO: 1500555 - RNA, 15 nt, Human
accacuuuuguucuu

SEQ ID NO: 1500556 - RNA, 21 nt, Human
accacuuuuguucuugguuug

SEQ ID NO: 1500557 - RNA, 16 nt, Human
accacuuuuguucuug

SEQ ID NO: 1500558 - RNA, 13 nt, Human
accacugcagaag

SEQ ID NO: 1500559 - RNA, 22 nt, Human
ucaccccggccaccugcggugc

SEQ ID NO: 1500560 - RNA, 21 nt, Human
accacugcacuccagccuggg

SEQ ID NO: 1500561 - RNA, 17 nt, Human
ucaccccggccaccugc

SEQ ID NO: 1500562 - RNA, 18 nt, Human
ucaccccggccaccugcg

SEQ ID NO: 1500563 - RNA, 20 nt, Human
accacugcacuccagccugg

SEQ ID NO: 1500564 - RNA, 17 nt, Human
ucacuaccuucaugcau

SEQ ID NO: 1500565 - RNA, 18 nt, Human
ucacuauguugcccaggc

SEQ ID NO: 1500566 - RNA, 19 nt, Human
ucacuauguugcccaggca

SEQ ID NO: 1500567 - RNA, 20 nt, Human
ucacuauguugcccaggcag

SEQ ID NO: 1500568 - RNA, 13 nt, Human
ucaccugccccuc

SEQ ID NO: 1500569 - RNA, 16 nt, Human
ucaccugccccucaac

SEQ ID NO: 1500570 - RNA, 15 nt, Human
ucaccugccccucaa

SEQ ID NO: 1500571 - RNA, 15 nt, Human
ucaccucucccuugg

SEQ ID NO: 1500572 - RNA, 16 nt, Human
ucaccugaagacucau

SEQ ID NO: 1500573 - RNA, 14 nt, Human
accagggacugagg

SEQ ID NO: 1500574 - RNA, 17 nt, Human
accagagcccaccuugg

SEQ ID NO: 1500575 - RNA, 15 nt, Human
ucaauucuugccaaa

SEQ ID NO: 1500576 - RNA, 20 nt, Human
ucaauuuuucuuauuucauu

SEQ ID NO: 1500577 - RNA, 23 nt, Human
ucaauuuuucuuauuucauuucu

SEQ ID NO: 1500578 - RNA, 13 nt, Human
accaaucaugaau

SEQ ID NO: 1500579 - RNA, 15 nt, Human
accaaucaugaauua

SEQ ID NO: 1500580 - RNA, 15 nt, Human
accaauguucucucu

SEQ ID NO: 1500581 - RNA, 22 nt, Human
ucaaguccucuuuucugagagg

SEQ ID NO: 1500582 - RNA, 15 nt, Human
ucaagugaaaaagga

SEQ ID NO: 1500583 - RNA, 23 nt, Human
ucaagugaaaaaggaggaagaga

SEQ ID NO: 1500584 - RNA, 19 nt, Human
accaacauacucccaucug

SEQ ID NO: 1500585 - RNA, 21 nt, Human
accaacauacucccaucugug

SEQ ID NO: 1500586 - RNA, 22 nt, Human
accaacauacucccaucuguga

SEQ ID NO: 1500587 - RNA, 13 nt, Human
ucaccccagcccc

SEQ ID NO: 1500588 - RNA, 14 nt, Human
ucaccccagcccca

SEQ ID NO: 1500589 - RNA, 20 nt, Human
ucaccccagccccaaaacuc

SEQ ID NO: 1500590 - RNA, 15 nt, Human
ucaccccggccaccu

SEQ ID NO: 1500591 - RNA, 11 nt, Human
ucacacugaga

SEQ ID NO: 1500592 - RNA, 12 nt, Human
ucacacugagaa

SEQ ID NO: 1500593 - RNA, 19 nt, Human
ucacacugagaauguaaga

SEQ ID NO: 1500594 - RNA, 20 nt, Human
ucacacugagaauguaagaa

SEQ ID NO: 1500595 - RNA, 21 nt, Human
ucacacugagaauguaagaac

SEQ ID NO: 1500596 - RNA, 23 nt, Human
ucacacugagaauguaagaacua

SEQ ID NO: 1500597 - RNA, 21 nt, Human
ucacaacagauuauuaccuua

SEQ ID NO: 1500598 - RNA, 15 nt, Human
ucacaguucucuccu

SEQ ID NO: 1500599 - RNA, 17 nt, Human
ucacauaucuaguauga

SEQ ID NO: 1500600 - RNA, 21 nt, Human
ucacauaucuaguaugaaauu

SEQ ID NO: 1500601 - RNA, 22 nt, Human
ucacauaucuaguaugaaauua

SEQ ID NO: 1500602 - RNA, 12 nt, Human
ucacauaucugu

SEQ ID NO: 1500603 - RNA, 15 nt, Human
ucacauaucugucau

SEQ ID NO: 1500604 - RNA, 13 nt, Human
acccacugcucug

SEQ ID NO: 1500605 - RNA, 14 nt, Human
acccacugcucugg

SEQ ID NO: 1500606 - RNA, 15 nt, Human
acccacugcucuggu

SEQ ID NO: 1500607 - RNA, 11 nt, Human
acccacugcuu

SEQ ID NO: 1500608 - RNA, 23 nt, Human
accauuucuugagguaaaagcau

SEQ ID NO: 1500609 - RNA, 10 nt, Human
acccacugcu

SEQ ID NO: 1500610 - RNA, 11 nt, Human
acccacugcuc

SEQ ID NO: 1500611 - RNA, 12 nt, Human
accauuauuuuu

SEQ ID NO: 1500612 - RNA, 18 nt, Human
accauuaugaagaagaga

SEQ ID NO: 1500613 - RNA, 22 nt, Human
accauggucggaaaacaugcua

SEQ ID NO: 1500614 - RNA, 21 nt, Human
ucacucuuauugcccacgcug

SEQ ID NO: 1500615 - RNA, 23 nt, Human
ucacucuuauugcccacgcugga

SEQ ID NO: 1500616 - RNA, 23 nt, Human
ucagaaguuucugccgcagcccu

SEQ ID NO: 1500617 - RNA, 18 nt, Human
ucagaaucucaaauaacu

SEQ ID NO: 1500618 - RNA, 19 nt, Human
ucagaaucucaaauaacua

SEQ ID NO: 1500619 - RNA, 22 nt, Human
ucagagacuccugcaggcagcc

SEQ ID NO: 1500620 - RNA, 21 nt, Human
ucagagacuccugcaggcagc

SEQ ID NO: 1500621 - RNA, 17 nt, Human
ucagagacuccugcagg

SEQ ID NO: 1500622 - RNA, 20 nt, Human
ucagagacuccugcaggcag

SEQ ID NO: 1500623 - RNA, 16 nt, Human
ucagagagggugggag

SEQ ID NO: 1500624 - RNA, 21 nt, Human
ucagagagggugggagugggc

SEQ ID NO: 1500625 - RNA, 23 nt, Human
ucagagagggugggagugggccc

SEQ ID NO: 1500626 - RNA, 12 nt, Human
ucagagccugca

SEQ ID NO: 1500627 - RNA, 13 nt, Human
ucagagccugcag

SEQ ID NO: 1500628 - RNA, 14 nt, Human
ucagagccugcagu

SEQ ID NO: 1500629 - RNA, 15 nt, Human
ucagagccugcaguu

SEQ ID NO: 1500630 - RNA, 18 nt, Human
ucagagccugcaguuauu

SEQ ID NO: 1500631 - RNA, 19 nt, Human
ucagaaguuucugccgcag

SEQ ID NO: 1500632 - RNA, 22 nt, Human
ucagaaguuucugccgcagccc

SEQ ID NO: 1500633 - RNA, 24 nt, Human
acccagcgagcccugguggcagug

SEQ ID NO: 1500634 - RNA, 19 nt, Human
acccagcgagcccuggugg

SEQ ID NO: 1500635 - RNA, 23 nt, Human
acccagcgagcccugguggcagu

SEQ ID NO: 1500636 - RNA, 23 nt, Human
ucagccguguaaccauggaccca

SEQ ID NO: 1500637 - RNA, 22 nt, Human
ucagccaagaauucuuaaauau

SEQ ID NO: 1500638 - RNA, 13 nt, Human
ucaggaaagagaa

SEQ ID NO: 1500639 - RNA, 19 nt, Human
ucaggaaagagaacuucca

SEQ ID NO: 1500640 - RNA, 20 nt, Human
ucaggaaaucaaauaugcaa

SEQ ID NO: 1500641 - RNA, 21 nt, Human
ucaggaaaucaaauaugcaaa

SEQ ID NO: 1500642 - RNA, 20 nt, Human
ucagcuuguaaauagcucag

SEQ ID NO: 1500643 - RNA, 14 nt, Human
ucagcggggacagc

SEQ ID NO: 1500644 - RNA, 15 nt, Human
ucagcggggacagcu

SEQ ID NO: 1500645 - RNA, 15 nt, Human
accccccagcacuga

SEQ ID NO: 1500646 - RNA, 17 nt, Human
accccccagcacugagg

SEQ ID NO: 1500647 - RNA, 19 nt, Human
accccccagcacugaggaa

SEQ ID NO: 1500648 - RNA, 12 nt, Human
acccccacccaa

SEQ ID NO: 1500649 - RNA, 13 nt, Human
accccccagcacu

SEQ ID NO: 1500650 - RNA, 14 nt, Human
accccccagcacug

SEQ ID NO: 1500651 - RNA, 14 nt, Human
accccugguucuca

SEQ ID NO: 1500652 - RNA, 15 nt, Human
accccugguucucau

SEQ ID NO: 1500653 - RNA, 16 nt, Human
accccugguucucauc

SEQ ID NO: 1500654 - RNA, 20 nt, Human
accccugguucucaucuuuc

SEQ ID NO: 1500655 - RNA, 22 nt, Human
accccugguucucaucuuucuu

SEQ ID NO: 1500656 - RNA, 16 nt, Human
accccuucgcuccugu

SEQ ID NO: 1500657 - RNA, 14 nt, Human
accccuucgcuccu

SEQ ID NO: 1500658 - RNA, 15 nt, Human
accccuucgcuccug

SEQ ID NO: 1500659 - RNA, 21 nt, Human
aaugccccugaauuuaaauag

SEQ ID NO: 1500660 - RNA, 13 nt, Human
aaugcugugcccu

SEQ ID NO: 1500661 - RNA, 21 nt, Human
aaugcugugcccuaaagugua

SEQ ID NO: 1500662 - RNA, 20 nt, Human
aaugcugugcccuaaagugu

SEQ ID NO: 1500663 - RNA, 20 nt, Human
aaugcccagccccuucugac

SEQ ID NO: 1500664 - RNA, 22 nt, Human
aaugcccagccccuucugaccc

SEQ ID NO: 1500665 - RNA, 23 nt, Human
aaugcccagccccuucugaccca

SEQ ID NO: 1500666 - RNA, 24 nt, Human
aaugcccagccccuucugacccau

SEQ ID NO: 1500667 - RNA, 12 nt, Human
aaugcuguguua

SEQ ID NO: 1500668 - RNA, 16 nt, Human
aauggacguguuauga

SEQ ID NO: 1500669 - RNA, 16 nt, Human
uacaaacaaaauuucu

SEQ ID NO: 1500670 - RNA, 14 nt, Human
aaugcccagccccu

SEQ ID NO: 1500671 - RNA, 15 nt, Human
aaugcccagccccuu

SEQ ID NO: 1500672 - RNA, 13 nt, Human
uaauucaagaaaa

SEQ ID NO: 1500673 - RNA, 17 nt, Human
uaauuuauacaggucau

SEQ ID NO: 1500674 - RNA, 13 nt, Human
uacaaaaacacag

SEQ ID NO: 1500675 - RNA, 14 nt, Human
uacaaaaacacagc

SEQ ID NO: 1500676 - RNA, 15 nt, Human
uacaaaagcauguga

SEQ ID NO: 1500677 - RNA, 20 nt, Human
uacaaaaagcauaaaaauua

SEQ ID NO: 1500678 - RNA, 15 nt, Human
uacaaaaacacagca

SEQ ID NO: 1500679 - RNA, 16 nt, Human
uacaaaaacacagcaa

SEQ ID NO: 1500680 - RNA, 19 nt, Human
uacacuaagagagaaugag

SEQ ID NO: 1500681 - RNA, 14 nt, Human
uacacuccagugag

SEQ ID NO: 1500682 - RNA, 18 nt, Human
uacagaggccaugggccu

SEQ ID NO: 1500683 - RNA, 19 nt, Human
aauggacuuuuguacauag

SEQ ID NO: 1500684 - RNA, 21 nt, Human
aauggacguguuaugacucca

SEQ ID NO: 1500685 - RNA, 18 nt, Human
uacaccacuacauucugu

SEQ ID NO: 1500686 - RNA, 17 nt, Human
uacaccacuacauucug

SEQ ID NO: 1500687 - RNA, 16 nt, Human
uacaccacuacauucu

SEQ ID NO: 1500688 - RNA, 15 nt, Human
uacaccacuacauuc

SEQ ID NO: 1500689 - RNA, 20 nt, Human
uacaccacuacauucuguua

SEQ ID NO: 1500690 - RNA, 19 nt, Human
uacaccacuacauucuguu

SEQ ID NO: 1500691 - RNA, 12 nt, Human
aauguacugcau

SEQ ID NO: 1500692 - RNA, 17 nt, Human
uacauauuuuuguagca

SEQ ID NO: 1500693 - RNA, 18 nt, Human
uacauauuuuuguagcac

SEQ ID NO: 1500694 - RNA, 21 nt, Human
uacauaaugcgugcauaccac

SEQ ID NO: 1500695 - RNA, 20 nt, Human
uacauaaugcgugcauacca

SEQ ID NO: 1500696 - RNA, 19 nt, Human
uacauaaugcgugcauacc

SEQ ID NO: 1500697 - RNA, 17 nt, Human
uacauaaugcgugcaua

SEQ ID NO: 1500698 - RNA, 15 nt, Human
uacaguaucucaggg

SEQ ID NO: 1500699 - RNA, 11 nt, Human
aaugugauaug

SEQ ID NO: 1500700 - RNA, 14 nt, Human
aauguacugcauau

SEQ ID NO: 1500701 - RNA, 18 nt, Human
aauguacugcauaugaaa

SEQ ID NO: 1500702 - RNA, 12 nt, Human
aauguaugugua

SEQ ID NO: 1500703 - RNA, 14 nt, Human
aauguauguguaag

SEQ ID NO: 1500704 - RNA, 19 nt, Human
uaauagguuuggacaaaau

SEQ ID NO: 1500705 - RNA, 14 nt, Human
uaauagguuuggac

SEQ ID NO: 1500706 - RNA, 13 nt, Human
aaucuucugaacu

SEQ ID NO: 1500707 - RNA, 20 nt, Human
aaucuucugaacuuggcgcu

SEQ ID NO: 1500708 - RNA, 14 nt, Human
uaaugaaagacugu

SEQ ID NO: 1500709 - RNA, 17 nt, Human
uaaugaaagacuguaca

SEQ ID NO: 1500710 - RNA, 18 nt, Human
uaaugaaagacuguacaa

SEQ ID NO: 1500711 - RNA, 19 nt, Human
uaaugaaagacuguacaaa

SEQ ID NO: 1500712 - RNA, 15 nt, Human
uaaugacuuaagcac

SEQ ID NO: 1500713 - RNA, 21 nt, Human
uaaugacuuaagcacacuuga

SEQ ID NO: 1500714 - RNA, 22 nt, Human
uaaugaaagacuguacaaagua

SEQ ID NO: 1500715 - RNA, 23 nt, Human
uaaugaaagacuguacaaaguag

SEQ ID NO: 1500716 - RNA, 21 nt, Human
aaugagagacacacugaagaa

SEQ ID NO: 1500717 - RNA, 15 nt, Human
aaugagccuggcaag

SEQ ID NO: 1500718 - RNA, 17 nt, Human
aaugacuuacuguacau

SEQ ID NO: 1500719 - RNA, 14 nt, Human
aaugacuuacugua

SEQ ID NO: 1500720 - RNA, 18 nt, Human
aaugacuuacuguacaug

SEQ ID NO: 1500721 - RNA, 16 nt, Human
uaaugauaacuggaaa

SEQ ID NO: 1500722 - RNA, 13 nt, Human
uaaugaggaaacu

SEQ ID NO: 1500723 - RNA, 15 nt, Human
uaaugguuugaauau

SEQ ID NO: 1500724 - RNA, 14 nt, Human
uaaugguguuuuaa

SEQ ID NO: 1500725 - RNA, 20 nt, Human
aauccucaguuuuugugaaa

SEQ ID NO: 1500726 - RNA, 22 nt, Human
aaucauuucugcaucagcugcu

SEQ ID NO: 1500727 - RNA, 13 nt, Human
aauccuugaagau

SEQ ID NO: 1500728 - RNA, 15 nt, Human
aaucuaaauggaacc

SEQ ID NO: 1500729 - RNA, 13 nt, Human
aaucuaaauggaa

SEQ ID NO: 1500730 - RNA, 18 nt, Human
aaucuaaauggaaccacu

SEQ ID NO: 1500731 - RNA, 16 nt, Human
aaucuuauaauuuaaa

SEQ ID NO: 1500732 - RNA, 14 nt, Human
aaucuuauaauuua

SEQ ID NO: 1500733 - RNA, 12 nt, Human
aaucucaaauuu

SEQ ID NO: 1500734 - RNA, 15 nt, Human
aaucucaaauaacua

SEQ ID NO: 1500735 - RNA, 14 nt, Human
aaucucaaauuucu

SEQ ID NO: 1500736 - RNA, 15 nt, Human
aaucucaaauuucua

SEQ ID NO: 1500737 - RNA, 15 nt, Human
aaucaucaagucuuu

SEQ ID NO: 1500738 - RNA, 19 nt, Human
aaucaugaauuaguuuuau

SEQ ID NO: 1500739 - RNA, 17 nt, Human
aaucaugaauuaguuuu

SEQ ID NO: 1500740 - RNA, 23 nt, Human
aaucaugaauuaguuuuauaugc

SEQ ID NO: 1500741 - RNA, 20 nt, Human
uaaguauguguaaaauguga

SEQ ID NO: 1500742 - RNA, 18 nt, Human
uaaguuuuuuuuuaaaaa

SEQ ID NO: 1500743 - RNA, 20 nt, Human
uaaguuuuuauggcuuuugu

SEQ ID NO: 1500744 - RNA, 13 nt, Human
uaaguucauacau

SEQ ID NO: 1500745 - RNA, 14 nt, Human
uaaguucauacauu

SEQ ID NO: 1500746 - RNA, 12 nt, Human
uaaguucauaca

SEQ ID NO: 1500747 - RNA, 18 nt, Human
aauaggcguaacuaauuu

SEQ ID NO: 1500748 - RNA, 24 nt, Human
aauagcuuuuuucucugauacaga

SEQ ID NO: 1500749 - RNA, 19 nt, Human
aauaggaaaaacugauuuu

SEQ ID NO: 1500750 - RNA, 17 nt, Human
aauaggaaaaacugauu

SEQ ID NO: 1500751 - RNA, 18 nt, Human
aauaggaaaaacugauuu

SEQ ID NO: 1500752 - RNA, 15 nt, Human
aauaggaaaaacuga

SEQ ID NO: 1500753 - RNA, 16 nt, Human
aauaggaaaaacugau

SEQ ID NO: 1500754 - RNA, 20 nt, Human
aauagccugccucuucucua

SEQ ID NO: 1500755 - RNA, 13 nt, Human
aauagcugggacu

SEQ ID NO: 1500756 - RNA, 14 nt, Human
aauagcugggacua

SEQ ID NO: 1500757 - RNA, 23 nt, Human
aauagacaauuuauuauggcaca

SEQ ID NO: 1500758 - RNA, 18 nt, Human
aauagacaauuuauuaug

SEQ ID NO: 1500759 - RNA, 15 nt, Human
uaaauuuugugucuc

SEQ ID NO: 1500760 - RNA, 18 nt, Human
uaaauuuugaguucuaca

SEQ ID NO: 1500761 - RNA, 19 nt, Human
uaaauuuugaguucuacau

SEQ ID NO: 1500762 - RNA, 20 nt, Human
uaaauuuugucuuuaacuca

SEQ ID NO: 1500763 - RNA, 12 nt, Human
aauaucacuugu

SEQ ID NO: 1500764 - RNA, 15 nt, Human
aauaguauuugagag

SEQ ID NO: 1500765 - RNA, 15 nt, Human
aauaucacuugucaa

SEQ ID NO: 1500766 - RNA, 20 nt, Human
aauaucacuugucaauaaaa

SEQ ID NO: 1500767 - RNA, 16 nt, Human
uaaccucuaaauucuu

SEQ ID NO: 1500768 - RNA, 15 nt, Human
uaacauggaaguacu

SEQ ID NO: 1500769 - RNA, 16 nt, Human
uaacauggaaguacua

SEQ ID NO: 1500770 - RNA, 15 nt, Human
uaacuaaaagguaug

SEQ ID NO: 1500771 - RNA, 14 nt, Human
uaacauggaaguac

SEQ ID NO: 1500772 - RNA, 16 nt, Human
aauaucuccgucaacu

SEQ ID NO: 1500773 - RNA, 21 nt, Human
aauaucuccgucaacucauau

SEQ ID NO: 1500774 - RNA, 16 nt, Human
aauaucugaaaaugua

SEQ ID NO: 1500775 - RNA, 17 nt, Human
aauaucugaaaauguau

SEQ ID NO: 1500776 - RNA, 18 nt, Human
aauaucugaaaauguaug

SEQ ID NO: 1500777 - RNA, 19 nt, Human
aauaucugaaaauguaugu

SEQ ID NO: 1500778 - RNA, 20 nt, Human
aauaucugaaaauguaugug

SEQ ID NO: 1500779 - RNA, 19 nt, Human
aauaucuuuuuuuuaauaa

SEQ ID NO: 1500780 - RNA, 19 nt, Human
uaacuuuuauaaacuuuac

SEQ ID NO: 1500781 - RNA, 18 nt, Human
uaacuuuuauaaacuuua

SEQ ID NO: 1500782 - RNA, 17 nt, Human
uaacuuuuauaaacuuu

SEQ ID NO: 1500783 - RNA, 15 nt, Human
uaacuuuuauaaacu

SEQ ID NO: 1500784 - RNA, 20 nt, Human
aauauugcuuuggucauaug

SEQ ID NO: 1500785 - RNA, 15 nt, Human
aauauuucagauaau

SEQ ID NO: 1500786 - RNA, 21 nt, Human
aauauuuuccaugaaaaugca

SEQ ID NO: 1500787 - RNA, 15 nt, Human
aauaugcaaagcacu

SEQ ID NO: 1500788 - RNA, 17 nt, Human
aauaugcaaagcacuga

SEQ ID NO: 1500789 - RNA, 15 nt, Human
aauaugcacacauuu

SEQ ID NO: 1500790 - RNA, 24 nt, Human
aauaugcaaagcacugacuucuaa

SEQ ID NO: 1500791 - RNA, 18 nt, Human
aauauugauaugcuuaua

SEQ ID NO: 1500792 - RNA, 11 nt, Human
aauauugcuga

SEQ ID NO: 1500793 - RNA, 12 nt, Human
aauauugcugau

SEQ ID NO: 1500794 - RNA, 13 nt, Human
aauauugcugaug

SEQ ID NO: 1500795 - RNA, 15 nt, Human
aauauugcugauggu

SEQ ID NO: 1500796 - RNA, 18 nt, Human
aauauugcugauggugca

SEQ ID NO: 1500797 - RNA, 21 nt, Human
aauauugcugauggugcaaug

SEQ ID NO: 1500798 - RNA, 22 nt, Human
aauauugcugauggugcaauga

SEQ ID NO: 1500799 - RNA, 21 nt, Human
aauaauuuuaagaaaucaaag

SEQ ID NO: 1500800 - RNA, 16 nt, Human
aauaauuuuuauauuu

SEQ ID NO: 1500801 - RNA, 17 nt, Human
aauaauuuuuauauuug

SEQ ID NO: 1500802 - RNA, 19 nt, Human
aauaauuuuuauauuugaa

SEQ ID NO: 1500803 - RNA, 20 nt, Human
aauaacugugaaguuuacau

SEQ ID NO: 1500804 - RNA, 14 nt, Human
aauaacugugaagu

SEQ ID NO: 1500805 - RNA, 16 nt, Human
aauaacugugaaguuu

SEQ ID NO: 1500806 - RNA, 20 nt, Human
aauaauuuuuauauuugaaa

SEQ ID NO: 1500807 - RNA, 19 nt, Human
uaaauaaugugaaacugga

SEQ ID NO: 1500808 - RNA, 14 nt, Human
uaaauuaacuuuua

SEQ ID NO: 1500809 - RNA, 12 nt, Human
uaaauuaacuuu

SEQ ID NO: 1500810 - RNA, 18 nt, Human
uaaauuaacuuuuauaaa

SEQ ID NO: 1500811 - RNA, 17 nt, Human
uaaauuaacuuuuauaa

SEQ ID NO: 1500812 - RNA, 16 nt, Human
uaaauuaacuuuuaua

SEQ ID NO: 1500813 - RNA, 15 nt, Human
uaaauuaacuuuuau

SEQ ID NO: 1500814 - RNA, 15 nt, Human
uaaauguugacaugg

SEQ ID NO: 1500815 - RNA, 20 nt, Human
uaaauguugaaagaucaaaa

SEQ ID NO: 1500816 - RNA, 15 nt, Human
uaaauguugaaagau

SEQ ID NO: 1500817 - RNA, 23 nt, Human
uaaaugcaccuggaauauauaac

SEQ ID NO: 1500818 - RNA, 18 nt, Human
uaaaucuccaaaauaaaa

SEQ ID NO: 1500819 - RNA, 15 nt, Human
uaaaucuccaaaaua

SEQ ID NO: 1500820 - RNA, 14 nt, Human
uaaaucuccaaaau

SEQ ID NO: 1500821 - RNA, 20 nt, Human
aaguuuuuauggcuuuugug

SEQ ID NO: 1500822 - RNA, 21 nt, Human
aauaacaaugaaaguugauaa

SEQ ID NO: 1500823 - RNA, 15 nt, Human
aauaacgauaaaaga

SEQ ID NO: 1500824 - RNA, 13 nt, Human
aauaacugugaag

SEQ ID NO: 1500825 - RNA, 16 nt, Human
aauaaaucauaaaacu

SEQ ID NO: 1500826 - RNA, 15 nt, Human
aauaaaacuuuuuaa

SEQ ID NO: 1500827 - RNA, 14 nt, Human
aauaaaacuuuuua

SEQ ID NO: 1500828 - RNA, 12 nt, Human
aauaaaacuuuu

SEQ ID NO: 1500829 - RNA, 18 nt, Human
aauaaaacuuuuuaaaau

SEQ ID NO: 1500830 - RNA, 19 nt, Human
acacccagcccacuucugc

SEQ ID NO: 1500831 - RNA, 18 nt, Human
acaccucugcacaagcug

SEQ ID NO: 1500832 - RNA, 14 nt, Human
acaccuugacaggg

SEQ ID NO: 1500833 - RNA, 15 nt, Human
acaccuugacagggc

SEQ ID NO: 1500834 - RNA, 16 nt, Human
acaccuugacagggca

SEQ ID NO: 1500835 - RNA, 19 nt, Human
acaccucugcacaagcugc

SEQ ID NO: 1500836 - RNA, 18 nt, Human
acacuaagagagaaugag

SEQ ID NO: 1500837 - RNA, 19 nt, Human
acacuaagagagaaugaga

SEQ ID NO: 1500838 - RNA, 20 nt, Human
acacuaaccacgcuggaccu

SEQ ID NO: 1500839 - RNA, 17 nt, Human
acacuaagagagaauga

SEQ ID NO: 1500840 - RNA, 19 nt, Human
acacuaaccacgcuggacc

SEQ ID NO: 1500841 - RNA, 16 nt, Human
acacuaaccacgcugg

SEQ ID NO: 1500842 - RNA, 17 nt, Human
acacuaaccacgcugga

SEQ ID NO: 1500843 - RNA, 22 nt, Human
uauaaccaguguuguggauuua

SEQ ID NO: 1500844 - RNA, 13 nt, Human
acacauguccaag

SEQ ID NO: 1500845 - RNA, 18 nt, Human
acacauguccaagaagcc

SEQ ID NO: 1500846 - RNA, 19 nt, Human
acacauguccaagaagccc

SEQ ID NO: 1500847 - RNA, 13 nt, Human
acacauuuuauuu

SEQ ID NO: 1500848 - RNA, 12 nt, Human
acacccagccca

SEQ ID NO: 1500849 - RNA, 13 nt, Human
acacccagcccac

SEQ ID NO: 1500850 - RNA, 21 nt, Human
acacauguccaagaagcccag

SEQ ID NO: 1500851 - RNA, 22 nt, Human
acacauguccaagaagcccagg

SEQ ID NO: 1500852 - RNA, 18 nt, Human
uaguuuugugaaggugau

SEQ ID NO: 1500853 - RNA, 18 nt, Human
uaguucagguaacaggca

SEQ ID NO: 1500854 - RNA, 22 nt, Human
uagguuuggacaaaauggaaua

SEQ ID NO: 1500855 - RNA, 14 nt, Human
uaguaauagagcaa

SEQ ID NO: 1500856 - RNA, 13 nt, Human
acacagugagucg

SEQ ID NO: 1500857 - RNA, 21 nt, Human
uagguuggcaaaaaggcagga

SEQ ID NO: 1500858 - RNA, 14 nt, Human
acacacugaagaag

SEQ ID NO: 1500859 - RNA, 11 nt, Human
acacagugagu

SEQ ID NO: 1500860 - RNA, 12 nt, Human
uaguguuggaga

SEQ ID NO: 1500861 - RNA, 16 nt, Human
uaguguuggagaagaa

SEQ ID NO: 1500862 - RNA, 17 nt, Human
uaguguuggagaagaac

SEQ ID NO: 1500863 - RNA, 14 nt, Human
uaguagagacaggg

SEQ ID NO: 1500864 - RNA, 20 nt, Human
uaguaauagagcaaaauuga

SEQ ID NO: 1500865 - RNA, 13 nt, Human
uaguagagacagg

SEQ ID NO: 1500866 - RNA, 13 nt, Human
acacacugaagaa

SEQ ID NO: 1500867 - RNA, 11 nt, Human
acacacagcuc

SEQ ID NO: 1500868 - RNA, 12 nt, Human
acacacagcucu

SEQ ID NO: 1500869 - RNA, 14 nt, Human
acacacacauacac

SEQ ID NO: 1500870 - RNA, 14 nt, Human
acacaacuauauug

SEQ ID NO: 1500871 - RNA, 17 nt, Human
acacaacuauauuguuu

SEQ ID NO: 1500872 - RNA, 21 nt, Human
acaaugguuuucuuguguguu

SEQ ID NO: 1500873 - RNA, 18 nt, Human
acacaacuauuuuuccaa

SEQ ID NO: 1500874 - RNA, 14 nt, Human
acaaugcuguauuu

SEQ ID NO: 1500875 - RNA, 17 nt, Human
acaaugcuguauuuuaa

SEQ ID NO: 1500876 - RNA, 18 nt, Human
acaaugcuguauuuuaaa

SEQ ID NO: 1500877 - RNA, 15 nt, Human
acaaugguuuucuug

SEQ ID NO: 1500878 - RNA, 12 nt, Human
acacugaagaag

SEQ ID NO: 1500879 - RNA, 14 nt, Human
acacugaagaagca

SEQ ID NO: 1500880 - RNA, 14 nt, Human
acacuguucucugc

SEQ ID NO: 1500881 - RNA, 15 nt, Human
acacuguucucugcc

SEQ ID NO: 1500882 - RNA, 22 nt, Human
acacuguucucugcccuccaag

SEQ ID NO: 1500883 - RNA, 23 nt, Human
acacuguucucugcccuccaaga

SEQ ID NO: 1500884 - RNA, 16 nt, Human
acacuguucucugccc

SEQ ID NO: 1500885 - RNA, 17 nt, Human
acacuguucucugcccu

SEQ ID NO: 1500886 - RNA, 18 nt, Human
acacuguucucugcccuc

SEQ ID NO: 1500887 - RNA, 20 nt, Human
acacuguucucugcccucca

SEQ ID NO: 1500888 - RNA, 16 nt, Human
uauaaguauucuaaau

SEQ ID NO: 1500889 - RNA, 11 nt, Human
acacucugaga

SEQ ID NO: 1500890 - RNA, 13 nt, Human
acacucugagacu

SEQ ID NO: 1500891 - RNA, 14 nt, Human
acacuccagugaga

SEQ ID NO: 1500892 - RNA, 12 nt, Human
uauauuuacaaa

SEQ ID NO: 1500893 - RNA, 15 nt, Human
uauauuuaaugauaa

SEQ ID NO: 1500894 - RNA, 19 nt, Human
acagaaagcagaacaguga

SEQ ID NO: 1500895 - RNA, 17 nt, Human
acagacacaggcccggc

SEQ ID NO: 1500896 - RNA, 18 nt, Human
acagacacaggcccggcu

SEQ ID NO: 1500897 - RNA, 22 nt, Human
acagacacaggcccggcuccag

SEQ ID NO: 1500898 - RNA, 19 nt, Human
acagacuggaagcacagcu

SEQ ID NO: 1500899 - RNA, 21 nt, Human
acagacuggaagcacagcuuc

SEQ ID NO: 1500900 - RNA, 22 nt, Human
acagacuggaagcacagcuuca

SEQ ID NO: 1500901 - RNA, 15 nt, Human
acacuguuucaaacu

SEQ ID NO: 1500902 - RNA, 16 nt, Human
acacuguuucaaacuu

SEQ ID NO: 1500903 - RNA, 13 nt, Human
acacuuaaaaaug

SEQ ID NO: 1500904 - RNA, 15 nt, Human
acacuuaaaaauggu

SEQ ID NO: 1500905 - RNA, 20 nt, Human
acagcccuucuuuccacaga

SEQ ID NO: 1500906 - RNA, 21 nt, Human
acagcccuucuuuccacagaa

SEQ ID NO: 1500907 - RNA, 23 nt, Human
acagcccgggcucugccucccau

SEQ ID NO: 1500908 - RNA, 16 nt, Human
acagcaaggagauuua

SEQ ID NO: 1500909 - RNA, 21 nt, Human
acagcccgggcucugccuccc

SEQ ID NO: 1500910 - RNA, 22 nt, Human
acagcccgggcucugccuccca

SEQ ID NO: 1500911 - RNA, 16 nt, Human
uaucuuguagcuuuau

SEQ ID NO: 1500912 - RNA, 16 nt, Human
uaucuuugauucuccu

SEQ ID NO: 1500913 - RNA, 17 nt, Human
uaucuuugauucuccuu

SEQ ID NO: 1500914 - RNA, 18 nt, Human
uaucuuugauucuccuuc

SEQ ID NO: 1500915 - RNA, 22 nt, Human
acagaguuguuacauuuuuaag

SEQ ID NO: 1500916 - RNA, 21 nt, Human
acagaguuguuacauuuuuaa

SEQ ID NO: 1500917 - RNA, 14 nt, Human
acagauaaucagug

SEQ ID NO: 1500918 - RNA, 20 nt, Human
acagauacuccuccaagguu

SEQ ID NO: 1500919 - RNA, 20 nt, Human
acagauagauauaugcucug

SEQ ID NO: 1500920 - RNA, 23 nt, Human
acagaugggugcuuggaggaagg

SEQ ID NO: 1500921 - RNA, 14 nt, Human
acagagcugggaug

SEQ ID NO: 1500922 - RNA, 10 nt, Human
acagagcugg

SEQ ID NO: 1500923 - RNA, 18 nt, Human
acagagcugggauguuuc

SEQ ID NO: 1500924 - RNA, 21 nt, Human
acagagcugggauguuucugu

SEQ ID NO: 1500925 - RNA, 16 nt, Human
acagaguuguuacauu

SEQ ID NO: 1500926 - RNA, 20 nt, Human
acagaguuguuacauuuuua

SEQ ID NO: 1500927 - RNA, 19 nt, Human
acagaguuguuacauuuuu

SEQ ID NO: 1500928 - RNA, 18 nt, Human
acagaguuguuacauuuu

SEQ ID NO: 1500929 - RNA, 17 nt, Human
acagaguuguuacauuu

SEQ ID NO: 1500930 - RNA, 21 nt, Human
acagagcaagugagacccugu

SEQ ID NO: 1500931 - RNA, 14 nt, Human
acagagcccacgcc

SEQ ID NO: 1500932 - RNA, 15 nt, Human
uauauuuauuacugu

SEQ ID NO: 1500933 - RNA, 19 nt, Human
uauauuuauuacuguaaga

SEQ ID NO: 1500934 - RNA, 20 nt, Human
uauauuuauuacuguaagaa

SEQ ID NO: 1500935 - RNA, 20 nt, Human
uaucccuacuguaauuugug

SEQ ID NO: 1500936 - RNA, 19 nt, Human
uaucccuacuguaauuugu

SEQ ID NO: 1500937 - RNA, 13 nt, Human
uaucucagggccu

SEQ ID NO: 1500938 - RNA, 15 nt, Human
uaucucagggccugg

SEQ ID NO: 1500939 - RNA, 19 nt, Human
uacugaaauaaacgucuua

SEQ ID NO: 1500940 - RNA, 22 nt, Human
uacugaaauaaacgucuuaaau

SEQ ID NO: 1500941 - RNA, 17 nt, Human
uacugagagugaacaaa

SEQ ID NO: 1500942 - RNA, 19 nt, Human
uacugagagugaacaaauu

SEQ ID NO: 1500943 - RNA, 15 nt, Human
uacuguaauuuguga

SEQ ID NO: 1500944 - RNA, 17 nt, Human
uacuguaauuugugaua

SEQ ID NO: 1500945 - RNA, 16 nt, Human
uacuguaauuugugau

SEQ ID NO: 1500946 - RNA, 18 nt, Human
aauugaggacacugauau

SEQ ID NO: 1500947 - RNA, 18 nt, Human
uacuguacaugaaaacac

SEQ ID NO: 1500948 - RNA, 22 nt, Human
uacucuacccucuuagaaaaac

SEQ ID NO: 1500949 - RNA, 18 nt, Human
uacuaaaaauacaaaaaa

SEQ ID NO: 1500950 - RNA, 18 nt, Human
uacgggaggguaaggcug

SEQ ID NO: 1500951 - RNA, 16 nt, Human
uacgucugacaggcaa

SEQ ID NO: 1500952 - RNA, 14 nt, Human
uacuaaaaauacaa

SEQ ID NO: 1500953 - RNA, 13 nt, Human
uacgugaguccug

SEQ ID NO: 1500954 - RNA, 13 nt, Human
aauugacccacaa

SEQ ID NO: 1500955 - RNA, 15 nt, Human
uacgucugacaggca

SEQ ID NO: 1500956 - RNA, 16 nt, Human
aauuuauacaggucau

SEQ ID NO: 1500957 - RNA, 17 nt, Human
aauuuauacaggucaua

SEQ ID NO: 1500958 - RNA, 23 nt, Human
aauuucuaggacugaauuaugaa

SEQ ID NO: 1500959 - RNA, 19 nt, Human
aauuucucccagucauuua

SEQ ID NO: 1500960 - RNA, 13 nt, Human
aauuucuauuaaa

SEQ ID NO: 1500961 - RNA, 18 nt, Human
aauuucuaggacugaauu

SEQ ID NO: 1500962 - RNA, 22 nt, Human
aauuucuaggacugaauuauga

SEQ ID NO: 1500963 - RNA, 17 nt, Human
aauuucuaggacugaau

SEQ ID NO: 1500964 - RNA, 17 nt, Human
aauuuauuauggcacau

SEQ ID NO: 1500965 - RNA, 14 nt, Human
aauuuauuauggca

SEQ ID NO: 1500966 - RNA, 13 nt, Human
aauuuauuauggc

SEQ ID NO: 1500967 - RNA, 15 nt, Human
aauuggagcucgugg

SEQ ID NO: 1500968 - RNA, 13 nt, Human
aauuuaguauuuu

SEQ ID NO: 1500969 - RNA, 17 nt, Human
aauuuacagagacagaa

SEQ ID NO: 1500970 - RNA, 18 nt, Human
aauuuacagagacagaaa

SEQ ID NO: 1500971 - RNA, 15 nt, Human
aauuuacauacucug

SEQ ID NO: 1500972 - RNA, 17 nt, Human
aauuuaccugaagucuu

SEQ ID NO: 1500973 - RNA, 19 nt, Human
uacuucuuaggguuaugau

SEQ ID NO: 1500974 - RNA, 15 nt, Human
uacuucugcuacaua

SEQ ID NO: 1500975 - RNA, 20 nt, Human
uacuucuccacccugcucuc

SEQ ID NO: 1500976 - RNA, 16 nt, Human
uacuucuuauacauuu

SEQ ID NO: 1500977 - RNA, 14 nt, Human
uacuucuuauacau

SEQ ID NO: 1500978 - RNA, 15 nt, Human
uacuucuuauacauu

SEQ ID NO: 1500979 - RNA, 13 nt, Human
uacuucuccaccc

SEQ ID NO: 1500980 - RNA, 18 nt, Human
uacuucuccacccugcuc

SEQ ID NO: 1500981 - RNA, 13 nt, Human
aauuugguuuuca

SEQ ID NO: 1500982 - RNA, 15 nt, Human
aauuugguuuucaca

SEQ ID NO: 1500983 - RNA, 21 nt, Human
aauuugguuuucacauuggaa

SEQ ID NO: 1500984 - RNA, 16 nt, Human
aauuuguuauaaugaa

SEQ ID NO: 1500985 - RNA, 21 nt, Human
aauuuuucuuauuucauuucu

SEQ ID NO: 1500986 - RNA, 22 nt, Human
aauuuuuuuaucgucacugcuu

SEQ ID NO: 1500987 - RNA, 22 nt, Human
aauuuuuucucuaggaaauauu

SEQ ID NO: 1500988 - RNA, 22 nt, Human
uagauaggucagugcaaauacu

SEQ ID NO: 1500989 - RNA, 17 nt, Human
uagauaggccaugggca

SEQ ID NO: 1500990 - RNA, 21 nt, Human
uagaugcaguucugaagaaga

SEQ ID NO: 1500991 - RNA, 20 nt, Human
uagaugcaguucugaagaag

SEQ ID NO: 1500992 - RNA, 14 nt, Human
acaaaacuuuucua

SEQ ID NO: 1500993 - RNA, 21 nt, Human
acaaagcgugguggacaugca

SEQ ID NO: 1500994 - RNA, 16 nt, Human
uagcuacuaauuuuaa

SEQ ID NO: 1500995 - RNA, 18 nt, Human
acaaugaagauaaaaaga

SEQ ID NO: 1500996 - RNA, 16 nt, Human
uagcucaggugucccu

SEQ ID NO: 1500997 - RNA, 18 nt, Human
acaagcgugagccacugc

SEQ ID NO: 1500998 - RNA, 22 nt, Human
acaagcuccaagcucccaggca

SEQ ID NO: 1500999 - RNA, 15 nt, Human
acaagcuccaagcuc

SEQ ID NO: 1501000 - RNA, 16 nt, Human
acaagcuccaagcucc

SEQ ID NO: 1501001 - RNA, 17 nt, Human
acaagcuccaagcuccc

SEQ ID NO: 1501002 - RNA, 19 nt, Human
acaagcuccaagcucccag

SEQ ID NO: 1501003 - RNA, 13 nt, Human
acaaauguaugau

SEQ ID NO: 1501004 - RNA, 17 nt, Human
acaaauuuacagagaca

SEQ ID NO: 1501005 - RNA, 14 nt, Human
acaacauguauaau

SEQ ID NO: 1501006 - RNA, 17 nt, Human
acaacaucuuuuucuac

SEQ ID NO: 1501007 - RNA, 18 nt, Human
acaagaccacguuucuaa

SEQ ID NO: 1501008 - RNA, 17 nt, Human
acaagaccacguuucua

SEQ ID NO: 1501009 - RNA, 16 nt, Human
acaagaccacguuucu

SEQ ID NO: 1501010 - RNA, 17 nt, Human
acaagaugguucuagca

SEQ ID NO: 1501011 - RNA, 22 nt, Human
acaagagcccaggccuccuaca

SEQ ID NO: 1501012 - RNA, 17 nt, Human
acaagcgugagccacug

SEQ ID NO: 1501013 - RNA, 13 nt, Human
acaagcuccaagc

SEQ ID NO: 1501014 - RNA, 12 nt, Human
guuuucuguucu

SEQ ID NO: 1501015 - RNA, 11 nt, Human
guuuucuguuc

SEQ ID NO: 1501016 - RNA, 23 nt, Human
guuuucugagaaagacuauucaa

SEQ ID NO: 1501017 - RNA, 18 nt, Human
guuuggggaugagaaagg

SEQ ID NO: 1501018 - RNA, 15 nt, Human
guuuuacugcagcuu

SEQ ID NO: 1501019 - RNA, 17 nt, Human
guuugcaaggaagccac

SEQ ID NO: 1501020 - RNA, 22 nt, Human
guuugcaaggaagccacagcug

SEQ ID NO: 1501021 - RNA, 13 nt, Human
guuugcaaggaag

SEQ ID NO: 1501022 - RNA, 14 nt, Human
guuugcaaggaagc

SEQ ID NO: 1501023 - RNA, 15 nt, Human
guuugcaaggaagcc

SEQ ID NO: 1501024 - RNA, 13 nt, Human
guuugccucugcc

SEQ ID NO: 1501025 - RNA, 16 nt, Human
guuugccucugccucu

SEQ ID NO: 1501026 - RNA, 23 nt, Human
guuucuaaaggcuaccuuuguau

SEQ ID NO: 1501027 - RNA, 22 nt, Human
guuucuaaaggcuaccuuugua

SEQ ID NO: 1501028 - RNA, 22 nt, Human
guuugauucagacagcugccug

SEQ ID NO: 1501029 - RNA, 21 nt, Human
guuucaaacauauauaacaau

SEQ ID NO: 1501030 - RNA, 17 nt, Human
aaggggaauugaggaca

SEQ ID NO: 1501031 - RNA, 22 nt, Human
aaggggaauguuugccucugcc

SEQ ID NO: 1501032 - RNA, 23 nt, Human
aaggggaauguuugccucugccu

SEQ ID NO: 1501033 - RNA, 19 nt, Human
aagggccuggccugagcug

SEQ ID NO: 1501034 - RNA, 14 nt, Human
aagggccuggccug

SEQ ID NO: 1501035 - RNA, 17 nt, Human
aagggccuggccugagc

SEQ ID NO: 1501036 - RNA, 12 nt, Human
aaguaauaugca

SEQ ID NO: 1501037 - RNA, 19 nt, Human
guuucuaaaggcuaccuuu

SEQ ID NO: 1501038 - RNA, 16 nt, Human
aaguaauaugcacaca

SEQ ID NO: 1501039 - RNA, 15 nt, Human
aaguaauaugcacac

SEQ ID NO: 1501040 - RNA, 13 nt, Human
aagguacuucaaa

SEQ ID NO: 1501041 - RNA, 17 nt, Human
aaggguaucaggugcug

SEQ ID NO: 1501042 - RNA, 16 nt, Human
aaggguaucaggugcu

SEQ ID NO: 1501043 - RNA, 10 nt, Human
guuuaaaauc

SEQ ID NO: 1501044 - RNA, 16 nt, Human
guuuaaaaucauuucu

SEQ ID NO: 1501045 - RNA, 18 nt, Human
guuguaccgcaaugugac

SEQ ID NO: 1501046 - RNA, 18 nt, Human
guuggucccccuuccaug

SEQ ID NO: 1501047 - RNA, 21 nt, Human
guugcccaggcuggcgugcag

SEQ ID NO: 1501048 - RNA, 14 nt, Human
aaggcuccaggagc

SEQ ID NO: 1501049 - RNA, 17 nt, Human
guugcccaggcaggucu

SEQ ID NO: 1501050 - RNA, 18 nt, Human
guugcccaggcaggucuu

SEQ ID NO: 1501051 - RNA, 19 nt, Human
guugcccaggcaggucuug

SEQ ID NO: 1501052 - RNA, 18 nt, Human
aaggccaaaggaagcaca

SEQ ID NO: 1501053 - RNA, 19 nt, Human
aaggcuaccuuuguauucu

SEQ ID NO: 1501054 - RNA, 19 nt, Human
aaggaugcuuguacauaau

SEQ ID NO: 1501055 - RNA, 17 nt, Human
aaggaugcuuguacaua

SEQ ID NO: 1501056 - RNA, 16 nt, Human
aaggaugcuuguacau

SEQ ID NO: 1501057 - RNA, 15 nt, Human
aaggaugcuuguaca

SEQ ID NO: 1501058 - RNA, 18 nt, Human
aaggaugcacagaguugu

SEQ ID NO: 1501059 - RNA, 22 nt, Human
aaggaugcacagaguuguuaca

SEQ ID NO: 1501060 - RNA, 20 nt, Human
aaggauccugagccagauuu

SEQ ID NO: 1501061 - RNA, 23 nt, Human
guugaugaucuuugcagacaggc

SEQ ID NO: 1501062 - RNA, 14 nt, Human
aaggauccugagcc

SEQ ID NO: 1501063 - RNA, 15 nt, Human
aaggauccugagcca

SEQ ID NO: 1501064 - RNA, 17 nt, Human
aaggauccugagccaga

SEQ ID NO: 1501065 - RNA, 18 nt, Human
aaggaugaucuaggaaga

SEQ ID NO: 1501066 - RNA, 23 nt, Human
aaggaugaucuaggaagacuuug

SEQ ID NO: 1501067 - RNA, 11 nt, Human
guucauacauu

SEQ ID NO: 1501068 - RNA, 14 nt, Human
guucauacauugua

SEQ ID NO: 1501069 - RNA, 17 nt, Human
aagcuaggccuggccag

SEQ ID NO: 1501070 - RNA, 18 nt, Human
aagcuaggccuggccaga

SEQ ID NO: 1501071 - RNA, 22 nt, Human
aagcuaggccuggccagaugca

SEQ ID NO: 1501072 - RNA, 18 nt, Human
guucagcuccagcucacc

SEQ ID NO: 1501073 - RNA, 16 nt, Human
guucagcuccagcuca

SEQ ID NO: 1501074 - RNA, 17 nt, Human
guucagcuccagcucac

SEQ ID NO: 1501075 - RNA, 17 nt, Human
guucaggguuggccccu

SEQ ID NO: 1501076 - RNA, 18 nt, Human
guucaggguuggccccug

SEQ ID NO: 1501077 - RNA, 19 nt, Human
guucaggguuggccccugc

SEQ ID NO: 1501078 - RNA, 20 nt, Human
guucaggguuggccccugcc

SEQ ID NO: 1501079 - RNA, 9 nt, Human
guucauaca

SEQ ID NO: 1501080 - RNA, 10 nt, Human
guucauacau

SEQ ID NO: 1501081 - RNA, 13 nt, Human
guucauacauauu

SEQ ID NO: 1501082 - RNA, 14 nt, Human
guucauacauauuu

SEQ ID NO: 1501083 - RNA, 23 nt, Human
guucauacauauuuuuguagcac

SEQ ID NO: 1501084 - RNA, 18 nt, Human
guuaaugauagcuacugu

SEQ ID NO: 1501085 - RNA, 14 nt, Human
guuaaguaugugua

SEQ ID NO: 1501086 - RNA, 17 nt, Human
guuaguaugaggcauuu

SEQ ID NO: 1501087 - RNA, 20 nt, Human
guuaguaugaggcauuuguu

SEQ ID NO: 1501088 - RNA, 14 nt, Human
guugacaugggaca

SEQ ID NO: 1501089 - RNA, 18 nt, Human
guugacaugggacauuug

SEQ ID NO: 1501090 - RNA, 22 nt, Human
guugaugaucuuugcagacagg

SEQ ID NO: 1501091 - RNA, 17 nt, Human
guucuuaguuugcaguu

SEQ ID NO: 1501092 - RNA, 21 nt, Human
guucuugguuuguaaauuaac

SEQ ID NO: 1501093 - RNA, 13 nt, Human
guucucuccuucu

SEQ ID NO: 1501094 - RNA, 18 nt, Human
guucuagcauggcauauu

SEQ ID NO: 1501095 - RNA, 19 nt, Human
guucuagcauggcauauuu

SEQ ID NO: 1501096 - RNA, 20 nt, Human
guucccuuugacgccauccc

SEQ ID NO: 1501097 - RNA, 21 nt, Human
guucccuuugacgccauccca

SEQ ID NO: 1501098 - RNA, 22 nt, Human
guucccuuugacgccaucccag

SEQ ID NO: 1501099 - RNA, 16 nt, Human
guucuacccaggugcu

SEQ ID NO: 1501100 - RNA, 22 nt, Human
aagcuauucaguaauaacucua

SEQ ID NO: 1501101 - RNA, 21 nt, Human
aagcucuacugaggugcuaug

SEQ ID NO: 1501102 - RNA, 16 nt, Human
guucccauuugcuccu

SEQ ID NO: 1501103 - RNA, 20 nt, Human
guucccauuugcuccuuucu

SEQ ID NO: 1501104 - RNA, 20 nt, Human
guuccauggccucuucagau

SEQ ID NO: 1501105 - RNA, 14 nt, Human
aagagguuuuaaag

SEQ ID NO: 1501106 - RNA, 18 nt, Human
aagagguuuuaaagcuuc

SEQ ID NO: 1501107 - RNA, 18 nt, Human
aagagguuuuaaaaaaau

SEQ ID NO: 1501108 - RNA, 17 nt, Human
gugguuuucuguucuuu

SEQ ID NO: 1501109 - RNA, 20 nt, Human
guggugguuuucuguucuuu

SEQ ID NO: 1501110 - RNA, 12 nt, Human
aagaugcagccg

SEQ ID NO: 1501111 - RNA, 12 nt, Human
aagcaaaggaga

SEQ ID NO: 1501112 - RNA, 13 nt, Human
aagcaaaggagau

SEQ ID NO: 1501113 - RNA, 14 nt, Human
aagaugugacaugu

SEQ ID NO: 1501114 - RNA, 18 nt, Human
aagaugugacauguuuua

SEQ ID NO: 1501115 - RNA, 18 nt, Human
guguuuccauauuuuaua

SEQ ID NO: 1501116 - RNA, 23 nt, Human
guguuuccuggcacugcuuccag

SEQ ID NO: 1501117 - RNA, 19 nt, Human
gugucuugcaauggcagcc

SEQ ID NO: 1501118 - RNA, 17 nt, Human
gugucuugcaauggcag

SEQ ID NO: 1501119 - RNA, 18 nt, Human
gugucuugcaauggcagc

SEQ ID NO: 1501120 - RNA, 18 nt, Human
gugucuuuuuucacuaca

SEQ ID NO: 1501121 - RNA, 17 nt, Human
gugugacuacuccccca

SEQ ID NO: 1501122 - RNA, 13 nt, Human
gugggagugggcc

SEQ ID NO: 1501123 - RNA, 14 nt, Human
gugggagugggccc

SEQ ID NO: 1501124 - RNA, 13 nt, Human
gugggauccucca

SEQ ID NO: 1501125 - RNA, 21 nt, Human
gugggacagucaccucaugga

SEQ ID NO: 1501126 - RNA, 23 nt, Human
guggcgcagcauauucaggaagc

SEQ ID NO: 1501127 - RNA, 14 nt, Human
guggguagacacac

SEQ ID NO: 1501128 - RNA, 14 nt, Human
guggugguuuucug

SEQ ID NO: 1501129 - RNA, 16 nt, Human
gugguuucagaaaugu

SEQ ID NO: 1501130 - RNA, 20 nt, Human
gugggggaucacagccucug

SEQ ID NO: 1501131 - RNA, 14 nt, Human
guggguacgggagg

SEQ ID NO: 1501132 - RNA, 13 nt, Human
aagacuauucaaa

SEQ ID NO: 1501133 - RNA, 18 nt, Human
aagacuaucuaaauguug

SEQ ID NO: 1501134 - RNA, 17 nt, Human
aagacugaguacguugu

SEQ ID NO: 1501135 - RNA, 22 nt, Human
aagacugaguacguugugcauu

SEQ ID NO: 1501136 - RNA, 21 nt, Human
aagacugaguacguugugcau

SEQ ID NO: 1501137 - RNA, 17 nt, Human
aagacuguacaaaguag

SEQ ID NO: 1501138 - RNA, 22 nt, Human
aagacccuuguggucccacccc

SEQ ID NO: 1501139 - RNA, 18 nt, Human
aagacccuugugguccca

SEQ ID NO: 1501140 - RNA, 21 nt, Human
aagacccuuguggucccaccc

SEQ ID NO: 1501141 - RNA, 16 nt, Human
aagacuaucuaaaugu

SEQ ID NO: 1501142 - RNA, 17 nt, Human
aagacuaucuaaauguu

SEQ ID NO: 1501143 - RNA, 18 nt, Human
gugcuaguaauuggaaag

SEQ ID NO: 1501144 - RNA, 21 nt, Human
gugcuaucucccccagcccca

SEQ ID NO: 1501145 - RNA, 22 nt, Human
gugcuaggaacacuccuucaca

SEQ ID NO: 1501146 - RNA, 18 nt, Human
gugcuaggaacacuccuu

SEQ ID NO: 1501147 - RNA, 17 nt, Human
aagaaggaaaaggcagg

SEQ ID NO: 1501148 - RNA, 19 nt, Human
aagaaggcagcagguggca

SEQ ID NO: 1501149 - RNA, 16 nt, Human
aagaagugaaaaucua

SEQ ID NO: 1501150 - RNA, 22 nt, Human
aagaagugaaaaucuacacucc

SEQ ID NO: 1501151 - RNA, 13 nt, Human
aagaaagaaaauc

SEQ ID NO: 1501152 - RNA, 20 nt, Human
aagaaagacuaucuaaaugu

SEQ ID NO: 1501153 - RNA, 22 nt, Human
aagaaagacuaucuaaauguug

SEQ ID NO: 1501154 - RNA, 18 nt, Human
aagaaaaaggaugcacag

SEQ ID NO: 1501155 - RNA, 17 nt, Human
aagaaaaaggaugcaca

SEQ ID NO: 1501156 - RNA, 15 nt, Human
aagaaaaaggaugca

SEQ ID NO: 1501157 - RNA, 22 nt, Human
aacuugucuuuggacccugagg

SEQ ID NO: 1501158 - RNA, 18 nt, Human
aacuugucuuuggacccu

SEQ ID NO: 1501159 - RNA, 13 nt, Human
aacuuuaccuuuu

SEQ ID NO: 1501160 - RNA, 12 nt, Human
gugccucuggga

SEQ ID NO: 1501161 - RNA, 13 nt, Human
gugccucugggac

SEQ ID NO: 1501162 - RNA, 14 nt, Human
gugccucugggacu

SEQ ID NO: 1501163 - RNA, 14 nt, Human
gugccuuauggaac

SEQ ID NO: 1501164 - RNA, 21 nt, Human
gugccuuauggaacacucuga

SEQ ID NO: 1501165 - RNA, 23 nt, Human
gugccuuauggaacacucugaga

SEQ ID NO: 1501166 - RNA, 15 nt, Human
gugccucaagagaag

SEQ ID NO: 1501167 - RNA, 21 nt, Human
gugaaccaccacacccagccc

SEQ ID NO: 1501168 - RNA, 22 nt, Human
gugccguguccccugacagggc

SEQ ID NO: 1501169 - RNA, 23 nt, Human
gugccguguccccugacagggcc

SEQ ID NO: 1501170 - RNA, 12 nt, Human
gugcuauguucu

SEQ ID NO: 1501171 - RNA, 22 nt, Human
gugcuaucucccccagccccau

SEQ ID NO: 1501172 - RNA, 21 nt, Human
gugcugggauuacaagcguga

SEQ ID NO: 1501173 - RNA, 22 nt, Human
gugcugggauuacaagcgugag

SEQ ID NO: 1501174 - RNA, 20 nt, Human
gugcugggauuacaggugug

SEQ ID NO: 1501175 - RNA, 23 nt, Human
guggacacagcucuucuccaggc

SEQ ID NO: 1501176 - RNA, 18 nt, Human
guggacacagcucuucuc

SEQ ID NO: 1501177 - RNA, 22 nt, Human
guggacacagcucuucuccagg

SEQ ID NO: 1501178 - RNA, 21 nt, Human
guggaugccugguggcagcug

SEQ ID NO: 1501179 - RNA, 16 nt, Human
aagaaugauuaugaau

SEQ ID NO: 1501180 - RNA, 20 nt, Human
guggcagcucaccucucccu

SEQ ID NO: 1501181 - RNA, 14 nt, Human
guggcagcucaccu

SEQ ID NO: 1501182 - RNA, 16 nt, Human
guggcagcucaccucu

SEQ ID NO: 1501183 - RNA, 19 nt, Human
guggauuuaacagaaaugu

SEQ ID NO: 1501184 - RNA, 18 nt, Human
guggauuuaacagaaaug

SEQ ID NO: 1501185 - RNA, 20 nt, Human
guggauuuaacagaaaugua

SEQ ID NO: 1501186 - RNA, 19 nt, Human
guggcaccagcagccugga

SEQ ID NO: 1501187 - RNA, 20 nt, Human
aagacaaaaagcuacuuauu

SEQ ID NO: 1501188 - RNA, 23 nt, Human
aagacaaaaagcuacuuauugua

SEQ ID NO: 1501189 - RNA, 18 nt, Human
aagaaugauuaugaauua

SEQ ID NO: 1501190 - RNA, 16 nt, Human
aagaauugaagcagga

SEQ ID NO: 1501191 - RNA, 15 nt, Human
guaggaagacuuugg

SEQ ID NO: 1501192 - RNA, 18 nt, Human
guaggaagguuaauguuc

SEQ ID NO: 1501193 - RNA, 17 nt, Human
aaaggagagcuagcagc

SEQ ID NO: 1501194 - RNA, 14 nt, Human
aaaggaugcacaga

SEQ ID NO: 1501195 - RNA, 12 nt, Human
guagcugggacu

SEQ ID NO: 1501196 - RNA, 18 nt, Human
guagcugggacuacaggc

SEQ ID NO: 1501197 - RNA, 19 nt, Human
guagcugggacuacaggca

SEQ ID NO: 1501198 - RNA, 21 nt, Human
guagcugggacuacaggcacc

SEQ ID NO: 1501199 - RNA, 14 nt, Human
aaauccuugaagau

SEQ ID NO: 1501200 - RNA, 13 nt, Human
aaaucgaugcagu

SEQ ID NO: 1501201 - RNA, 15 nt, Human
aaaucccauuuaaaa

SEQ ID NO: 1501202 - RNA, 18 nt, Human
aaaucccuuaccucggug

SEQ ID NO: 1501203 - RNA, 14 nt, Human
aaaucuacaguaca

SEQ ID NO: 1501204 - RNA, 19 nt, Human
aaaucuacacuccagugag

SEQ ID NO: 1501205 - RNA, 19 nt, Human
aaaucucaaauuucuaaau

SEQ ID NO: 1501206 - RNA, 17 nt, Human
aaaucucaaauuucuaa

SEQ ID NO: 1501207 - RNA, 16 nt, Human
aaaucucaaauuucua

SEQ ID NO: 1501208 - RNA, 15 nt, Human
aaaucucaaauuucu

SEQ ID NO: 1501209 - RNA, 17 nt, Human
aaaugaaaaucgugaca

SEQ ID NO: 1501210 - RNA, 21 nt, Human
aaaugaaagcagggacuugaa

SEQ ID NO: 1501211 - RNA, 22 nt, Human
aaaugaaagcagggacuugaac

SEQ ID NO: 1501212 - RNA, 13 nt, Human
aaaugagccuggc

SEQ ID NO: 1501213 - RNA, 19 nt, Human
aaaugagccuggcaagaau

SEQ ID NO: 1501214 - RNA, 16 nt, Human
aaaugagguacucucc

SEQ ID NO: 1501215 - RNA, 23 nt, Human
aaaugagguacucuccuggaaau

SEQ ID NO: 1501216 - RNA, 17 nt, Human
aaaugaggucagagccu

SEQ ID NO: 1501217 - RNA, 19 nt, Human
aaaugaggucagagccugc

SEQ ID NO: 1501218 - RNA, 22 nt, Human
aaaugcaccuggaauauauaac

SEQ ID NO: 1501219 - RNA, 18 nt, Human
aaaugcaccuggaauaua

SEQ ID NO: 1501220 - RNA, 16 nt, Human
aaaugaucuuuucaag

SEQ ID NO: 1501221 - RNA, 14 nt, Human
aaaugcaccuggaa

SEQ ID NO: 1501222 - RNA, 16 nt, Human
aaaugcaacaacaugu

SEQ ID NO: 1501223 - RNA, 19 nt, Human
aaauggcuuccuggcaaua

SEQ ID NO: 1501224 - RNA, 23 nt, Human
aaaugccuuacccucauguucuu

SEQ ID NO: 1501225 - RNA, 15 nt, Human
aaaugggcagagcag

SEQ ID NO: 1501226 - RNA, 18 nt, Human
aaaugggcagagcagaga

SEQ ID NO: 1501227 - RNA, 20 nt, Human
aaaugggcagagcagagacc

SEQ ID NO: 1501228 - RNA, 14 nt, Human
aaaugcauuucuaa

SEQ ID NO: 1501229 - RNA, 13 nt, Human
aaaugcccagccc

SEQ ID NO: 1501230 - RNA, 14 nt, Human
aaaugcccagcccc

SEQ ID NO: 1501231 - RNA, 15 nt, Human
aaaugcccagccccu

SEQ ID NO: 1501232 - RNA, 18 nt, Human
aaaugcccagccccuucu

SEQ ID NO: 1501233 - RNA, 13 nt, Human
aaaugcccagcuu

SEQ ID NO: 1501234 - RNA, 15 nt, Human
guaugggagagaaga

SEQ ID NO: 1501235 - RNA, 13 nt, Human
guaugguggcugg

SEQ ID NO: 1501236 - RNA, 15 nt, Human
guauucuuauuuaau

SEQ ID NO: 1501237 - RNA, 14 nt, Human
guaugauucccagc

SEQ ID NO: 1501238 - RNA, 14 nt, Human
guaugggagagaag

SEQ ID NO: 1501239 - RNA, 15 nt, Human
guaucccuacuguaa

SEQ ID NO: 1501240 - RNA, 19 nt, Human
aaaugggggugcauuugag

SEQ ID NO: 1501241 - RNA, 22 nt, Human
aaauguaagggaaacugccagc

SEQ ID NO: 1501242 - RNA, 18 nt, Human
aaaugggggugcauuuga

SEQ ID NO: 1501243 - RNA, 17 nt, Human
aaaugggggugcauuug

SEQ ID NO: 1501244 - RNA, 16 nt, Human
aaaugggggugcauuu

SEQ ID NO: 1501245 - RNA, 15 nt, Human
aaaugggggugcauu

SEQ ID NO: 1501246 - RNA, 20 nt, Human
guauuuaauagguuuggaca

SEQ ID NO: 1501247 - RNA, 22 nt, Human
guauuggcuagagguucaaaga

SEQ ID NO: 1501248 - RNA, 21 nt, Human
aaauuaacuuuuauaaacuuu

SEQ ID NO: 1501249 - RNA, 23 nt, Human
aaauuaacuuuuauaaacuuuac

SEQ ID NO: 1501250 - RNA, 22 nt, Human
aaauuaacuuuuauaaacuuua

SEQ ID NO: 1501251 - RNA, 14 nt, Human
aaauucaugcugcu

SEQ ID NO: 1501252 - RNA, 22 nt, Human
aaauuauuuuguucauacauau

SEQ ID NO: 1501253 - RNA, 20 nt, Human
aaauuauuuuguucauacau

SEQ ID NO: 1501254 - RNA, 21 nt, Human
aaauuauuuuguucauacaua

SEQ ID NO: 1501255 - RNA, 22 nt, Human
aaauuauauaaguauucuaaau

SEQ ID NO: 1501256 - RNA, 17 nt, Human
aaauuauuuuguucaua

SEQ ID NO: 1501257 - RNA, 19 nt, Human
aaauuauuuuguucauaca

SEQ ID NO: 1501258 - RNA, 16 nt, Human
aaauuauauaaguauu

SEQ ID NO: 1501259 - RNA, 18 nt, Human
aaauuauauaaguauucu

SEQ ID NO: 1501260 - RNA, 18 nt, Human
aaauuucagcagcugcag

SEQ ID NO: 1501261 - RNA, 17 nt, Human
aaauuucagcagcugca

SEQ ID NO: 1501262 - RNA, 20 nt, Human
aaauuuaguauuuuguuuca

SEQ ID NO: 1501263 - RNA, 22 nt, Human
aaauuuccugggagcuuuugua

SEQ ID NO: 1501264 - RNA, 12 nt, Human
aaauuucuaaau

SEQ ID NO: 1501265 - RNA, 20 nt, Human
guauuuuugacagaauaugu

SEQ ID NO: 1501266 - RNA, 15 nt, Human
guauuuuuuuacuaa

SEQ ID NO: 1501267 - RNA, 14 nt, Human
guauuuuuuuacua

SEQ ID NO: 1501268 - RNA, 16 nt, Human
gucaaauugugugaaa

SEQ ID NO: 1501269 - RNA, 19 nt, Human
gucaacucauauuuucaug

SEQ ID NO: 1501270 - RNA, 16 nt, Human
gucacacacuuuggcu

SEQ ID NO: 1501271 - RNA, 20 nt, Human
gucacacaguauuacuucug

SEQ ID NO: 1501272 - RNA, 19 nt, Human
gucaaaguggugagaggca

SEQ ID NO: 1501273 - RNA, 21 nt, Human
guauuuuuuuacuaauagaca

SEQ ID NO: 1501274 - RNA, 17 nt, Human
guauuuuuuuacuaaua

SEQ ID NO: 1501275 - RNA, 12 nt, Human
aaccacagcagu

SEQ ID NO: 1501276 - RNA, 23 nt, Human
aaccaucauugaaaucuuuuugc

SEQ ID NO: 1501277 - RNA, 21 nt, Human
aaccaucauugaaaucuuuuu

SEQ ID NO: 1501278 - RNA, 20 nt, Human
aaccacaucuugcucugcug

SEQ ID NO: 1501279 - RNA, 22 nt, Human
aaccacaucuugcucugcugac

SEQ ID NO: 1501280 - RNA, 19 nt, Human
aaccaucauugaaaucuuu

SEQ ID NO: 1501281 - RNA, 20 nt, Human
aaccaucauugaaaucuuuu

SEQ ID NO: 1501282 - RNA, 20 nt, Human
aaccuagggugauauuaacc

SEQ ID NO: 1501283 - RNA, 17 nt, Human
aaccucaaaaugucuaa

SEQ ID NO: 1501284 - RNA, 13 nt, Human
aacccccagccug

SEQ ID NO: 1501285 - RNA, 14 nt, Human
aacccccagccugc

SEQ ID NO: 1501286 - RNA, 15 nt, Human
aacccccagccugcu

SEQ ID NO: 1501287 - RNA, 17 nt, Human
aaccuccgccucuuggg

SEQ ID NO: 1501288 - RNA, 14 nt, Human
aaccuccugggcua

SEQ ID NO: 1501289 - RNA, 20 nt, Human
aacccauauuuguacaccaa

SEQ ID NO: 1501290 - RNA, 17 nt, Human
aacccagcucuggucca

SEQ ID NO: 1501291 - RNA, 13 nt, Human
aacccaaauguuc

SEQ ID NO: 1501292 - RNA, 18 nt, Human
aacccaaauguucaucaa

SEQ ID NO: 1501293 - RNA, 11 nt, Human
aacccagcucu

SEQ ID NO: 1501294 - RNA, 13 nt, Human
aacccagcucugg

SEQ ID NO: 1501295 - RNA, 14 nt, Human
aacccagcucuggu

SEQ ID NO: 1501296 - RNA, 14 nt, Human
aacuccagaaagug

SEQ ID NO: 1501297 - RNA, 18 nt, Human
aacuagcuuggaaacugg

SEQ ID NO: 1501298 - RNA, 21 nt, Human
aacuccagaaagugacaagcu

SEQ ID NO: 1501299 - RNA, 18 nt, Human
aacucguuaauuuguagu

SEQ ID NO: 1501300 - RNA, 13 nt, Human
aacucccuuucaa

SEQ ID NO: 1501301 - RNA, 14 nt, Human
aacucccuuucaac

SEQ ID NO: 1501302 - RNA, 19 nt, Human
gugaaccaccacacccagc

SEQ ID NO: 1501303 - RNA, 15 nt, Human
aacuacaaacaaaau

SEQ ID NO: 1501304 - RNA, 19 nt, Human
aacuacaaacaaaauuucu

SEQ ID NO: 1501305 - RNA, 22 nt, Human
aacguggcugcuucaaggaucc

SEQ ID NO: 1501306 - RNA, 16 nt, Human
aacguggcugcuucaa

SEQ ID NO: 1501307 - RNA, 19 nt, Human
aacguggcugcuucaagga

SEQ ID NO: 1501308 - RNA, 15 nt, Human
aacguggcugcuuca

SEQ ID NO: 1501309 - RNA, 19 nt, Human
gucuuauauauuguagaua

SEQ ID NO: 1501310 - RNA, 15 nt, Human
gucuuagauguauau

SEQ ID NO: 1501311 - RNA, 24 nt, Human
gucuuuucuugcaugaggcuagug

SEQ ID NO: 1501312 - RNA, 14 nt, Human
gucuuuucuugcau

SEQ ID NO: 1501313 - RNA, 19 nt, Human
gucuuuucuugcaugaggc

SEQ ID NO: 1501314 - RNA, 18 nt, Human
gucuuuggacccugaggc

SEQ ID NO: 1501315 - RNA, 17 nt, Human
gucuuuggacccugagg

SEQ ID NO: 1501316 - RNA, 14 nt, Human
gucuuuggacccug

SEQ ID NO: 1501317 - RNA, 15 nt, Human
gucuuuggacccuga

SEQ ID NO: 1501318 - RNA, 22 nt, Human
gucuuaauuaaaagaauauuuu

SEQ ID NO: 1501319 - RNA, 21 nt, Human
gucuuaauuaaaagaauauuu

SEQ ID NO: 1501320 - RNA, 21 nt, Human
guccaagcauuuagauguaua

SEQ ID NO: 1501321 - RNA, 22 nt, Human
gucauuugagcagggcucagcg

SEQ ID NO: 1501322 - RNA, 24 nt, Human
guccaagcauaccaacacgagcag

SEQ ID NO: 1501323 - RNA, 21 nt, Human
gucauuugagcagggcucagc

SEQ ID NO: 1501324 - RNA, 21 nt, Human
aacacuguucucugcccucca

SEQ ID NO: 1501325 - RNA, 16 nt, Human
aacacuguucucugcc

SEQ ID NO: 1501326 - RNA, 17 nt, Human
aacacugcuuguguuuu

SEQ ID NO: 1501327 - RNA, 14 nt, Human
aacacugcuugugu

SEQ ID NO: 1501328 - RNA, 16 nt, Human
aacacugucuugaaga

SEQ ID NO: 1501329 - RNA, 15 nt, Human
aacacuguucucugc

SEQ ID NO: 1501330 - RNA, 20 nt, Human
aacacuguucucugcccucc

SEQ ID NO: 1501331 - RNA, 14 nt, Human
aacacucugagacu

SEQ ID NO: 1501332 - RNA, 12 nt, Human
aacacucugaga

SEQ ID NO: 1501333 - RNA, 13 nt, Human
aacacucugagac

SEQ ID NO: 1501334 - RNA, 21 nt, Human
aacacucauugaccugaggcc

SEQ ID NO: 1501335 - RNA, 12 nt, Human
aacacuccuuca

SEQ ID NO: 1501336 - RNA, 11 nt, Human
aacacucugag

SEQ ID NO: 1501337 - RNA, 14 nt, Human
aacaaugcuguauu

SEQ ID NO: 1501338 - RNA, 14 nt, Human
aacaaugaagauaa

SEQ ID NO: 1501339 - RNA, 18 nt, Human
aacaaugaagauaaaaag

SEQ ID NO: 1501340 - RNA, 15 nt, Human
aacaagucagucauu

SEQ ID NO: 1501341 - RNA, 18 nt, Human
aacaagucagucauucag

SEQ ID NO: 1501342 - RNA, 15 nt, Human
aacaaggaugaauua

SEQ ID NO: 1501343 - RNA, 15 nt, Human
aacaaggcaaggcug

SEQ ID NO: 1501344 - RNA, 21 nt, Human
aacaagccuccuuuuaaagua

SEQ ID NO: 1501345 - RNA, 20 nt, Human
aacaagaccacguuucuaaa

SEQ ID NO: 1501346 - RNA, 19 nt, Human
aacaagaccacguuucuaa

SEQ ID NO: 1501347 - RNA, 17 nt, Human
aacaagaccacguuucu

SEQ ID NO: 1501348 - RNA, 16 nt, Human
aacaagaccacguuuc

SEQ ID NO: 1501349 - RNA, 21 nt, Human
gucacacaguauuacuucugc

SEQ ID NO: 1501350 - RNA, 16 nt, Human
gucacaggcaggucca

SEQ ID NO: 1501351 - RNA, 13 nt, Human
gucacaggcaggu

SEQ ID NO: 1501352 - RNA, 15 nt, Human
gucacaggcaggucc

SEQ ID NO: 1501353 - RNA, 19 nt, Human
aacaguuguguuugaagca

SEQ ID NO: 1501354 - RNA, 22 nt, Human
aacaguagugauaguuguaccg

SEQ ID NO: 1501355 - RNA, 23 nt, Human
aacaggcugggcuucaguggcag

SEQ ID NO: 1501356 - RNA, 19 nt, Human
aacagacuggaagcacagc

SEQ ID NO: 1501357 - RNA, 20 nt, Human
aacagacuggaagcacagcu

SEQ ID NO: 1501358 - RNA, 22 nt, Human
aacaggcugggcuucaguggca

SEQ ID NO: 1501359 - RNA, 13 nt, Human
aacaggcugggcu

SEQ ID NO: 1501360 - RNA, 21 nt, Human
aacagaaauguacagcaagga

SEQ ID NO: 1501361 - RNA, 11 nt, Human
aacagaaaugu

SEQ ID NO: 1501362 - RNA, 10 nt, Human
aacagaaaug

SEQ ID NO: 1501363 - RNA, 21 nt, Human
guccggucccugucccagugc

SEQ ID NO: 1501364 - RNA, 18 nt, Human
aacauuugguaaggggaa

SEQ ID NO: 1501365 - RNA, 16 nt, Human
aacauuugcugucagc

SEQ ID NO: 1501366 - RNA, 16 nt, Human
aacauacucccaucug

SEQ ID NO: 1501367 - RNA, 14 nt, Human
aacauacucccauc

SEQ ID NO: 1501368 - RNA, 15 nt, Human
aacauacucccaucu

SEQ ID NO: 1501369 - RNA, 22 nt, Human
cugcaaccugauugugucucuu

SEQ ID NO: 1501370 - RNA, 18 nt, Human
cugcaagaauugaagcag

SEQ ID NO: 1501371 - RNA, 20 nt, Human
cugcaaccuccgccucuugg

SEQ ID NO: 1501372 - RNA, 22 nt, Human
cugcaaccuccgccucuugggu

SEQ ID NO: 1501373 - RNA, 14 nt, Human
cugcaaccugauug

SEQ ID NO: 1501374 - RNA, 19 nt, Human
cugcaaccugauugugucu

SEQ ID NO: 1501375 - RNA, 21 nt, Human
cugcaaccugauugugucucu

SEQ ID NO: 1501376 - RNA, 23 nt, Human
cugcaccgggccacagagaaagu

SEQ ID NO: 1501377 - RNA, 12 nt, Human
cugcaagggagu

SEQ ID NO: 1501378 - RNA, 20 nt, Human
cugcaagaauugaagcagga

SEQ ID NO: 1501379 - RNA, 15 nt, Human
cucuuauaucuauau

SEQ ID NO: 1501380 - RNA, 18 nt, Human
cucuuauaucuauauuuu

SEQ ID NO: 1501381 - RNA, 14 nt, Human
cucuuaugggcugg

SEQ ID NO: 1501382 - RNA, 15 nt, Human
cucuuaugggcuggg

SEQ ID NO: 1501383 - RNA, 16 nt, Human
cugaugcuucuucaga

SEQ ID NO: 1501384 - RNA, 17 nt, Human
cugaugcuucuucagag

SEQ ID NO: 1501385 - RNA, 18 nt, Human
cugaugggcaacccccag

SEQ ID NO: 1501386 - RNA, 21 nt, Human
cugaugggcaacccccagccu

SEQ ID NO: 1501387 - RNA, 18 nt, Human
cugaugcuucuucagaga

SEQ ID NO: 1501388 - RNA, 19 nt, Human
cugaugcuucuucagagac

SEQ ID NO: 1501389 - RNA, 20 nt, Human
cugaugcuucuucagagacu

SEQ ID NO: 1501390 - RNA, 24 nt, Human
cugaugggcaacccccagccugcu

SEQ ID NO: 1501391 - RNA, 22 nt, Human
cugaugggcaacccccagccug

SEQ ID NO: 1501392 - RNA, 23 nt, Human
cugaugggcaacccccagccugc

SEQ ID NO: 1501393 - RNA, 21 nt, Human
cugcaaaggguaucaggugcu

SEQ ID NO: 1501394 - RNA, 22 nt, Human
cugcaaaggguaucaggugcug

SEQ ID NO: 1501395 - RNA, 12 nt, Human
cugcagcuuugu

SEQ ID NO: 1501396 - RNA, 13 nt, Human
cugcaggcagcca

SEQ ID NO: 1501397 - RNA, 14 nt, Human
cugcaggcagccag

SEQ ID NO: 1501398 - RNA, 15 nt, Human
cugcaggcagccagg

SEQ ID NO: 1501399 - RNA, 16 nt, Human
cugcaggcagccaggc

SEQ ID NO: 1501400 - RNA, 17 nt, Human
cugcaggcagccaggcc

SEQ ID NO: 1501401 - RNA, 18 nt, Human
cugcaggcagccaggcca

SEQ ID NO: 1501402 - RNA, 19 nt, Human
cugcaggcagccaggccac

SEQ ID NO: 1501403 - RNA, 20 nt, Human
cugcaggcagccaggccaca

SEQ ID NO: 1501404 - RNA, 12 nt, Human
cugcagccugca

SEQ ID NO: 1501405 - RNA, 14 nt, Human
cugcagccugcagg

SEQ ID NO: 1501406 - RNA, 19 nt, Human
cugcagccugcaggaccuc

SEQ ID NO: 1501407 - RNA, 15 nt, Human
cugcagccugcagga

SEQ ID NO: 1501408 - RNA, 18 nt, Human
cugcacuccagccugggu

SEQ ID NO: 1501409 - RNA, 16 nt, Human
cugcacuccagccugg

SEQ ID NO: 1501410 - RNA, 17 nt, Human
cugcacuccagccuggg

SEQ ID NO: 1501411 - RNA, 24 nt, Human
cugcagccucaaccuccugggcua

SEQ ID NO: 1501412 - RNA, 19 nt, Human
cugcacuccagccugggug

SEQ ID NO: 1501413 - RNA, 23 nt, Human
cugcagccucaaccuccugggcu

SEQ ID NO: 1501414 - RNA, 16 nt, Human
cugcacuauagccuag

SEQ ID NO: 1501415 - RNA, 17 nt, Human
cugcacuauagccuagg

SEQ ID NO: 1501416 - RNA, 18 nt, Human
cugcacuauagccuaggu

SEQ ID NO: 1501417 - RNA, 20 nt, Human
cugcacuauagccuagguga

SEQ ID NO: 1501418 - RNA, 13 nt, Human
cugcacuccagcc

SEQ ID NO: 1501419 - RNA, 22 nt, Human
cugcacuauagccuaggugaca

SEQ ID NO: 1501420 - RNA, 23 nt, Human
cugcacuauagccuaggugacag

SEQ ID NO: 1501421 - RNA, 17 nt, Human
cugcacuccagccugag

SEQ ID NO: 1501422 - RNA, 20 nt, Human
cugcacuccagccugagcga

SEQ ID NO: 1501423 - RNA, 16 nt, Human
cugcacuccagccuga

SEQ ID NO: 1501424 - RNA, 15 nt, Human
cugcacuccagccug

SEQ ID NO: 1501425 - RNA, 12 nt, Human
cugcccuuaccu

SEQ ID NO: 1501426 - RNA, 16 nt, Human
cugcccuuaccugcca

SEQ ID NO: 1501427 - RNA, 17 nt, Human
cugcccuuaccugccag

SEQ ID NO: 1501428 - RNA, 16 nt, Human
cugccauauucuguug

SEQ ID NO: 1501429 - RNA, 16 nt, Human
cugccauccagguuca

SEQ ID NO: 1501430 - RNA, 18 nt, Human
cugccauccagguucagc

SEQ ID NO: 1501431 - RNA, 19 nt, Human
cugccauccagguucagcu

SEQ ID NO: 1501432 - RNA, 19 nt, Human
cugcccccaggacugggcc

SEQ ID NO: 1501433 - RNA, 17 nt, Human
cugcccccaggacuggg

SEQ ID NO: 1501434 - RNA, 18 nt, Human
cugcccccaggacugggc

SEQ ID NO: 1501435 - RNA, 13 nt, Human
cugcccccaggac

SEQ ID NO: 1501436 - RNA, 14 nt, Human
cugcccccaggacu

SEQ ID NO: 1501437 - RNA, 15 nt, Human
cugcccccaggacug

SEQ ID NO: 1501438 - RNA, 16 nt, Human
cugcccccaggacugg

SEQ ID NO: 1501439 - RNA, 18 nt, Human
cugcauuuaaaagauaca

SEQ ID NO: 1501440 - RNA, 17 nt, Human
cugcauuuaaaagauac

SEQ ID NO: 1501441 - RNA, 20 nt, Human
cugccagggacagagggggu

SEQ ID NO: 1501442 - RNA, 22 nt, Human
cugccagggacagagggggugg

SEQ ID NO: 1501443 - RNA, 23 nt, Human
cugccagggacagaggggguggc

SEQ ID NO: 1501444 - RNA, 14 nt, Human
cugcauuuaaaaga

SEQ ID NO: 1501445 - RNA, 22 nt, Human
cugggagaaccaaaaagaggcu

SEQ ID NO: 1501446 - RNA, 13 nt, Human
cugggacuacagg

SEQ ID NO: 1501447 - RNA, 15 nt, Human
cugggacuacaggca

SEQ ID NO: 1501448 - RNA, 16 nt, Human
cugggacuacaggcac

SEQ ID NO: 1501449 - RNA, 14 nt, Human
cugggacaugggaa

SEQ ID NO: 1501450 - RNA, 18 nt, Human
cugggacaugggaaaggg

SEQ ID NO: 1501451 - RNA, 22 nt, Human
cugggacaugggaaaggggaag

SEQ ID NO: 1501452 - RNA, 14 nt, Human
cuggcuaugcauuu

SEQ ID NO: 1501453 - RNA, 13 nt, Human
cuggcuaugcauu

SEQ ID NO: 1501454 - RNA, 16 nt, Human
cuggcuaugcauuuga

SEQ ID NO: 1501455 - RNA, 15 nt, Human
cuggcuaugcauuug

SEQ ID NO: 1501456 - RNA, 22 nt, Human
cuggcuaugcauuugaaaauuu

SEQ ID NO: 1501457 - RNA, 12 nt, Human
cuggcccuuccu

SEQ ID NO: 1501458 - RNA, 15 nt, Human
cuggguguggcgcag

SEQ ID NO: 1501459 - RNA, 14 nt, Human
cuggguguggcgca

SEQ ID NO: 1501460 - RNA, 22 nt, Human
cuggguggcaccagcagccugg

SEQ ID NO: 1501461 - RNA, 21 nt, Human
cuggguggcaccagcagccug

SEQ ID NO: 1501462 - RNA, 21 nt, Human
cuggugccucaccccuugcca

SEQ ID NO: 1501463 - RNA, 11 nt, Human
cuggugcccug

SEQ ID NO: 1501464 - RNA, 20 nt, Human
cugggcagguuggugggggc

SEQ ID NO: 1501465 - RNA, 13 nt, Human
cugggcagaggaa

SEQ ID NO: 1501466 - RNA, 16 nt, Human
cugggcagaggaaagc

SEQ ID NO: 1501467 - RNA, 12 nt, Human
cugggcagagga

SEQ ID NO: 1501468 - RNA, 20 nt, Human
cugggcagaggaaagcaaag

SEQ ID NO: 1501469 - RNA, 13 nt, Human
cuggggagaaagu

SEQ ID NO: 1501470 - RNA, 14 nt, Human
cuggggagaaagua

SEQ ID NO: 1501471 - RNA, 18 nt, Human
cuggguggcaccagcagc

SEQ ID NO: 1501472 - RNA, 20 nt, Human
cuggguggcaccagcagccu

SEQ ID NO: 1501473 - RNA, 16 nt, Human
cuggaguucugguucc

SEQ ID NO: 1501474 - RNA, 17 nt, Human
cuggaguucugguuccu

SEQ ID NO: 1501475 - RNA, 15 nt, Human
cuggaguucugguuc

SEQ ID NO: 1501476 - RNA, 14 nt, Human
cuggaugauauuuu

SEQ ID NO: 1501477 - RNA, 15 nt, Human
cuggaugcagccuca

SEQ ID NO: 1501478 - RNA, 16 nt, Human
cuggaugcccaggaau

SEQ ID NO: 1501479 - RNA, 13 nt, Human
cuggaugcccagg

SEQ ID NO: 1501480 - RNA, 14 nt, Human
cuggaugcccagga

SEQ ID NO: 1501481 - RNA, 15 nt, Human
cuggaugcccaggaa

SEQ ID NO: 1501482 - RNA, 16 nt, Human
cugcucacauaucugu

SEQ ID NO: 1501483 - RNA, 19 nt, Human
cugcucacauaucugucau

SEQ ID NO: 1501484 - RNA, 13 nt, Human
cugcugacagugu

SEQ ID NO: 1501485 - RNA, 15 nt, Human
cugcugacaguguug

SEQ ID NO: 1501486 - RNA, 13 nt, Human
cugcugaaggcuc

SEQ ID NO: 1501487 - RNA, 14 nt, Human
cugcugaaggcucg

SEQ ID NO: 1501488 - RNA, 15 nt, Human
cugcugaaggcucga

SEQ ID NO: 1501489 - RNA, 12 nt, Human
cugcugacagug

SEQ ID NO: 1501490 - RNA, 18 nt, Human
cuucaucugacuaugaca

SEQ ID NO: 1501491 - RNA, 23 nt, Human
cuucaugcugucuacacuaagag

SEQ ID NO: 1501492 - RNA, 19 nt, Human
cuucaucugacuaugacau

SEQ ID NO: 1501493 - RNA, 16 nt, Human
cuucauccuccucaga

SEQ ID NO: 1501494 - RNA, 12 nt, Human
cuucaucugacu

SEQ ID NO: 1501495 - RNA, 13 nt, Human
cuucaucccucug

SEQ ID NO: 1501496 - RNA, 15 nt, Human
cuucauccuccucag

SEQ ID NO: 1501497 - RNA, 18 nt, Human
cuucaguggcagcugcuu

SEQ ID NO: 1501498 - RNA, 23 nt, Human
cuucagagacuccugcaggcagc

SEQ ID NO: 1501499 - RNA, 24 nt, Human
cuucagagacuccugcaggcagcc

SEQ ID NO: 1501500 - RNA, 14 nt, Human
cuucaccuuugucc

SEQ ID NO: 1501501 - RNA, 20 nt, Human
cuuauuagaaaaauauuaua

SEQ ID NO: 1501502 - RNA, 18 nt, Human
cuuauugcccacgcugga

SEQ ID NO: 1501503 - RNA, 17 nt, Human
cuucaccuuugucccca

SEQ ID NO: 1501504 - RNA, 20 nt, Human
cuucaccuuuguccccaccg

SEQ ID NO: 1501505 - RNA, 17 nt, Human
cuucagagacuccugca

SEQ ID NO: 1501506 - RNA, 16 nt, Human
cuucagagacuccugc

SEQ ID NO: 1501507 - RNA, 21 nt, Human
cuucagagacuccugcaggca

SEQ ID NO: 1501508 - RNA, 22 nt, Human
cuucagagacuccugcaggcag

SEQ ID NO: 1501509 - RNA, 11 nt, Human
cuucagacaua

SEQ ID NO: 1501510 - RNA, 16 nt, Human
cuuccauggacuuugu

SEQ ID NO: 1501511 - RNA, 17 nt, Human
cuuccauggacuuuguu

SEQ ID NO: 1501512 - RNA, 18 nt, Human
cuuccagugaggcucugc

SEQ ID NO: 1501513 - RNA, 19 nt, Human
cuuccagugaggcucugcc

SEQ ID NO: 1501514 - RNA, 20 nt, Human
cuuccagugaggcucugccc

SEQ ID NO: 1501515 - RNA, 18 nt, Human
cuuagcagggaaacagcu

SEQ ID NO: 1501516 - RNA, 21 nt, Human
cuuagcagggaaacagcuaau

SEQ ID NO: 1501517 - RNA, 12 nt, Human
cuuauugcccac

SEQ ID NO: 1501518 - RNA, 13 nt, Human
cuuauugcccacg

SEQ ID NO: 1501519 - RNA, 22 nt, Human
cuuaugggcuggguucuaccca

SEQ ID NO: 1501520 - RNA, 23 nt, Human
cuuaugggcuggguucuacccag

SEQ ID NO: 1501521 - RNA, 14 nt, Human
cuuaugggcugggu

SEQ ID NO: 1501522 - RNA, 21 nt, Human
cuuaugggcuggguucuaccc

SEQ ID NO: 1501523 - RNA, 13 nt, Human
cuguucagcucca

SEQ ID NO: 1501524 - RNA, 14 nt, Human
cuguucagcuccag

SEQ ID NO: 1501525 - RNA, 20 nt, Human
cugugucuugcaauggcagc

SEQ ID NO: 1501526 - RNA, 16 nt, Human
cugugucuugcaaugg

SEQ ID NO: 1501527 - RNA, 19 nt, Human
cugugucuugcaauggcag

SEQ ID NO: 1501528 - RNA, 20 nt, Human
cugugcugagucugaaggcu

SEQ ID NO: 1501529 - RNA, 22 nt, Human
cugugcugagucugaaggcugg

SEQ ID NO: 1501530 - RNA, 11 nt, Human
cugugcugccc

SEQ ID NO: 1501531 - RNA, 22 nt, Human
cugugucagguggggcagcuug

SEQ ID NO: 1501532 - RNA, 21 nt, Human
cugugucagguggggcagcuu

SEQ ID NO: 1501533 - RNA, 20 nt, Human
cugugucagcauagaaguaa

SEQ ID NO: 1501534 - RNA, 19 nt, Human
cugugucagguggggcagc

SEQ ID NO: 1501535 - RNA, 14 nt, Human
cugugucuugcaau

SEQ ID NO: 1501536 - RNA, 14 nt, Human
cugugucucccuuc

SEQ ID NO: 1501537 - RNA, 19 nt, Human
cugugucucccuucauccu

SEQ ID NO: 1501538 - RNA, 16 nt, Human
cuguugggccaggagc

SEQ ID NO: 1501539 - RNA, 17 nt, Human
cuguugggccaggagcc

SEQ ID NO: 1501540 - RNA, 20 nt, Human
cuguugggccaggagccucc

SEQ ID NO: 1501541 - RNA, 13 nt, Human
cuuacacaauggu

SEQ ID NO: 1501542 - RNA, 14 nt, Human
cuuaaacaaaugua

SEQ ID NO: 1501543 - RNA, 19 nt, Human
cuuacccucauguucuuaa

SEQ ID NO: 1501544 - RNA, 18 nt, Human
cuuacccucauguucuua

SEQ ID NO: 1501545 - RNA, 17 nt, Human
cuuacccucauguucuu

SEQ ID NO: 1501546 - RNA, 13 nt, Human
cuuaccucggugc

SEQ ID NO: 1501547 - RNA, 19 nt, Human
cuuaccucggugccuuccu

SEQ ID NO: 1501548 - RNA, 21 nt, Human
cuuaccucggugccuuccucu

SEQ ID NO: 1501549 - RNA, 13 nt, Human
cuuaccugccagg

SEQ ID NO: 1501550 - RNA, 16 nt, Human
cuuguggacacagcuc

SEQ ID NO: 1501551 - RNA, 14 nt, Human
cuuguggacacagc

SEQ ID NO: 1501552 - RNA, 15 nt, Human
cuuguggacacagcu

SEQ ID NO: 1501553 - RNA, 13 nt, Human
cuuguggacacag

SEQ ID NO: 1501554 - RNA, 12 nt, Human
cuuuaauauaaa

SEQ ID NO: 1501555 - RNA, 23 nt, Human
cuuucaauaggaaaaacugauuu

SEQ ID NO: 1501556 - RNA, 20 nt, Human
cuuucaauaggaaaaacuga

SEQ ID NO: 1501557 - RNA, 21 nt, Human
cuuucaauaggaaaaacugau

SEQ ID NO: 1501558 - RNA, 22 nt, Human
cuuucaauaggaaaaacugauu

SEQ ID NO: 1501559 - RNA, 15 nt, Human
cuuuucaaaacauuu

SEQ ID NO: 1501560 - RNA, 20 nt, Human
cuuuggucuacacugugcug

SEQ ID NO: 1501561 - RNA, 16 nt, Human
cuuuggucuacacugu

SEQ ID NO: 1501562 - RNA, 20 nt, Human
cuuuggggcuuuuacaccag

SEQ ID NO: 1501563 - RNA, 21 nt, Human
cuuuggggcuuuuacaccagu

SEQ ID NO: 1501564 - RNA, 15 nt, Human
cuuuuauaaacuuua

SEQ ID NO: 1501565 - RNA, 18 nt, Human
cuuuuauaaacuuuaccu

SEQ ID NO: 1501566 - RNA, 16 nt, Human
cuuuuauaaacuuuac

SEQ ID NO: 1501567 - RNA, 19 nt, Human
cuuuuauaaacuuuaccuu

SEQ ID NO: 1501568 - RNA, 17 nt, Human
cuuuuauuucuuaaaca

SEQ ID NO: 1501569 - RNA, 19 nt, Human
cuuugacgccaucccagcc

SEQ ID NO: 1501570 - RNA, 21 nt, Human
cuuugacgccaucccagcccc

SEQ ID NO: 1501571 - RNA, 22 nt, Human
cuuugacgccaucccagcccca

SEQ ID NO: 1501572 - RNA, 21 nt, Human
cuuugagugucuuaauuaaaa

SEQ ID NO: 1501573 - RNA, 13 nt, Human
cuuugauucuccu

SEQ ID NO: 1501574 - RNA, 14 nt, Human
cuuugauucuccuu

SEQ ID NO: 1501575 - RNA, 15 nt, Human
cuuugauucuccuuc

SEQ ID NO: 1501576 - RNA, 14 nt, Human
cuuucuccccugcc

SEQ ID NO: 1501577 - RNA, 18 nt, Human
cuuucuccccugccccca

SEQ ID NO: 1501578 - RNA, 19 nt, Human
cuuucuccccugcccccag

SEQ ID NO: 1501579 - RNA, 22 nt, Human
cuuucuccccugcccccaggac

SEQ ID NO: 1501580 - RNA, 23 nt, Human
cuuucuccccugcccccaggacu

SEQ ID NO: 1501581 - RNA, 24 nt, Human
cuuucuccccugcccccaggacug

SEQ ID NO: 1501582 - RNA, 13 nt, Human
cuugcucugcuga

SEQ ID NO: 1501583 - RNA, 19 nt, Human
cuugccucuguccccuucu

SEQ ID NO: 1501584 - RNA, 23 nt, Human
cuugccucuguccccuucucuca

SEQ ID NO: 1501585 - RNA, 12 nt, Human
cuugcucugcug

SEQ ID NO: 1501586 - RNA, 14 nt, Human
cuugacagaacacu

SEQ ID NO: 1501587 - RNA, 16 nt, Human
cuugacagaacacugu

SEQ ID NO: 1501588 - RNA, 17 nt, Human
cuugacagaacacuguc

SEQ ID NO: 1501589 - RNA, 23 nt, Human
cuugaaugaugccaugaggaaca

SEQ ID NO: 1501590 - RNA, 12 nt, Human
cuugacagggca

SEQ ID NO: 1501591 - RNA, 20 nt, Human
cuugccgucuaccugagggg

SEQ ID NO: 1501592 - RNA, 23 nt, Human
cuugccgucuaccugaggggccu

SEQ ID NO: 1501593 - RNA, 15 nt, Human
cuucuguuuuauaau

SEQ ID NO: 1501594 - RNA, 20 nt, Human
cuucuguuuuauaauuuugu

SEQ ID NO: 1501595 - RNA, 20 nt, Human
cuucuucagagacuccugca

SEQ ID NO: 1501596 - RNA, 21 nt, Human
cuucuucagagacuccugcag

SEQ ID NO: 1501597 - RNA, 22 nt, Human
cuucuucagagacuccugcagg

SEQ ID NO: 1501598 - RNA, 23 nt, Human
cuucuucagagacuccugcaggc

SEQ ID NO: 1501599 - RNA, 20 nt, Human
cuugaaugaugccaugagga

SEQ ID NO: 1501600 - RNA, 12 nt, Human
gauuauuggaaa

SEQ ID NO: 1501601 - RNA, 16 nt, Human
gauuuaccacuugugu

SEQ ID NO: 1501602 - RNA, 15 nt, Human
gauuuaccacuugug

SEQ ID NO: 1501603 - RNA, 12 nt, Human
gauucuucugcu

SEQ ID NO: 1501604 - RNA, 17 nt, Human
gauucuuccucccuccc

SEQ ID NO: 1501605 - RNA, 18 nt, Human
gauucuuccucccucccu

SEQ ID NO: 1501606 - RNA, 18 nt, Human
gauucuccugccucagcc

SEQ ID NO: 1501607 - RNA, 15 nt, Human
gauucuccugccuca

SEQ ID NO: 1501608 - RNA, 17 nt, Human
gauucuccugccucagc

SEQ ID NO: 1501609 - RNA, 14 nt, Human
gaugaucuuugcag

SEQ ID NO: 1501610 - RNA, 14 nt, Human
gaugguucuagcau

SEQ ID NO: 1501611 - RNA, 18 nt, Human
gauguagaggagaaacug

SEQ ID NO: 1501612 - RNA, 16 nt, Human
gaugagugagcaugcc

SEQ ID NO: 1501613 - RNA, 15 nt, Human
gaugaucuaggaaga

SEQ ID NO: 1501614 - RNA, 21 nt, Human
gaugaucuaggaagacuuugg

SEQ ID NO: 1501615 - RNA, 16 nt, Human
gaugaucuuuaaaaua

SEQ ID NO: 1501616 - RNA, 20 nt, Human
gcaaguauuagaauaccaca

SEQ ID NO: 1501617 - RNA, 22 nt, Human
gcaauagucaaauugugugaaa

SEQ ID NO: 1501618 - RNA, 13 nt, Human
gcaagucaggguu

SEQ ID NO: 1501619 - RNA, 14 nt, Human
gcacaccgggcacu

SEQ ID NO: 1501620 - RNA, 23 nt, Human
gcacaguuuucugagaaagacua

SEQ ID NO: 1501621 - RNA, 22 nt, Human
gcacaguuuucugagaaagacu

SEQ ID NO: 1501622 - RNA, 20 nt, Human
gcacaccgggcacucagaag

SEQ ID NO: 1501623 - RNA, 16 nt, Human
gauuuuuuuuuccuuc

SEQ ID NO: 1501624 - RNA, 22 nt, Human
gcacuccccugcuggguguggc

SEQ ID NO: 1501625 - RNA, 13 nt, Human
gcacucagaagac

SEQ ID NO: 1501626 - RNA, 16 nt, Human
gcacucagaagacacu

SEQ ID NO: 1501627 - RNA, 17 nt, Human
gcacucagaagacacug

SEQ ID NO: 1501628 - RNA, 17 nt, Human
gcacuccccugcugggu

SEQ ID NO: 1501629 - RNA, 23 nt, Human
gcaccgggccacagagaaaguac

SEQ ID NO: 1501630 - RNA, 14 nt, Human
gcaccgggccacag

SEQ ID NO: 1501631 - RNA, 23 nt, Human
gcacaucagcacgauuucuguuu

SEQ ID NO: 1501632 - RNA, 22 nt, Human
gcacaucagcacgauuucuguu

SEQ ID NO: 1501633 - RNA, 17 nt, Human
gagucaccaagcccagu

SEQ ID NO: 1501634 - RNA, 16 nt, Human
gagucaccaagcccag

SEQ ID NO: 1501635 - RNA, 22 nt, Human
gagucagaaguuucugccgcag

SEQ ID NO: 1501636 - RNA, 12 nt, Human
gagucccaccuu

SEQ ID NO: 1501637 - RNA, 13 nt, Human
gagucccaccuug

SEQ ID NO: 1501638 - RNA, 18 nt, Human
gagugacagaggcagccc

SEQ ID NO: 1501639 - RNA, 20 nt, Human
gagugacagaggcagcccca

SEQ ID NO: 1501640 - RNA, 15 nt, Human
gaguugauucagcuc

SEQ ID NO: 1501641 - RNA, 16 nt, Human
gaguugauucagcucu

SEQ ID NO: 1501642 - RNA, 17 nt, Human
gaguugauucagcucug

SEQ ID NO: 1501643 - RNA, 15 nt, Human
gaggucgaggcagga

SEQ ID NO: 1501644 - RNA, 23 nt, Human
gaggugaccccagguuucuaugu

SEQ ID NO: 1501645 - RNA, 16 nt, Human
gaguuuaaauuguaau

SEQ ID NO: 1501646 - RNA, 18 nt, Human
gaguugauucagcucugc

SEQ ID NO: 1501647 - RNA, 22 nt, Human
gaguuguuacauuuuuaagugc

SEQ ID NO: 1501648 - RNA, 13 nt, Human
gaggccagagaca

SEQ ID NO: 1501649 - RNA, 14 nt, Human
gaggccagagacac

SEQ ID NO: 1501650 - RNA, 19 nt, Human
gaggccagagacacaagcc

SEQ ID NO: 1501651 - RNA, 22 nt, Human
gaggcuagugugguguuuccug

SEQ ID NO: 1501652 - RNA, 19 nt, Human
gaggcuccacuuggucugu

SEQ ID NO: 1501653 - RNA, 12 nt, Human
gaggcuccacuu

SEQ ID NO: 1501654 - RNA, 23 nt, Human
gaggcuccacuuggucugugaga

SEQ ID NO: 1501655 - RNA, 22 nt, Human
gaggccaaggugggaggauugc

SEQ ID NO: 1501656 - RNA, 15 nt, Human
gaggcagggucucac

SEQ ID NO: 1501657 - RNA, 18 nt, Human
gaggcagggucucacucu

SEQ ID NO: 1501658 - RNA, 20 nt, Human
gaggacgcucucuggccuuc

SEQ ID NO: 1501659 - RNA, 14 nt, Human
gaggcagggucuca

SEQ ID NO: 1501660 - RNA, 15 nt, Human
gaggacgcucucugg

SEQ ID NO: 1501661 - RNA, 20 nt, Human
gagggcugagccugguccca

SEQ ID NO: 1501662 - RNA, 12 nt, Human
gaggggccucuu

SEQ ID NO: 1501663 - RNA, 19 nt, Human
gagccuugaacuuugaccu

SEQ ID NO: 1501664 - RNA, 13 nt, Human
gagccuugaacuu

SEQ ID NO: 1501665 - RNA, 23 nt, Human
gagccuuccaggggugggacacc

SEQ ID NO: 1501666 - RNA, 20 nt, Human
gagccuuccaggggugggac

SEQ ID NO: 1501667 - RNA, 14 nt, Human
gacauugcggacag

SEQ ID NO: 1501668 - RNA, 15 nt, Human
gacauugcggacagc

SEQ ID NO: 1501669 - RNA, 17 nt, Human
gacauugcggacagcca

SEQ ID NO: 1501670 - RNA, 21 nt, Human
gacagugagacucugucucag

SEQ ID NO: 1501671 - RNA, 20 nt, Human
gacagcccgggcucugccuc

SEQ ID NO: 1501672 - RNA, 13 nt, Human
gacagaagaaggc

SEQ ID NO: 1501673 - RNA, 18 nt, Human
gacagcccgggcucugcc

SEQ ID NO: 1501674 - RNA, 19 nt, Human
gacagcccgggcucugccu

SEQ ID NO: 1501675 - RNA, 16 nt, Human
gacauuugcucaugga

SEQ ID NO: 1501676 - RNA, 17 nt, Human
gacauuugcucauggaa

SEQ ID NO: 1501677 - RNA, 19 nt, Human
gacauuguuggccaaagcc

SEQ ID NO: 1501678 - RNA, 18 nt, Human
gaccagggauuuccauga

SEQ ID NO: 1501679 - RNA, 20 nt, Human
gaccagggauuuccaugaug

SEQ ID NO: 1501680 - RNA, 12 nt, Human
gaccaucccuga

SEQ ID NO: 1501681 - RNA, 13 nt, Human
gaccaucccugaa

SEQ ID NO: 1501682 - RNA, 19 nt, Human
gaccaucccugaaggcccc

SEQ ID NO: 1501683 - RNA, 15 nt, Human
gacacacugaagaag

SEQ ID NO: 1501684 - RNA, 16 nt, Human
gacacacugaagaagc

SEQ ID NO: 1501685 - RNA, 14 nt, Human
gacacagcucuucu

SEQ ID NO: 1501686 - RNA, 16 nt, Human
gacacagcucuucucc

SEQ ID NO: 1501687 - RNA, 17 nt, Human
gacacagcucuucucca

SEQ ID NO: 1501688 - RNA, 22 nt, Human
gacacagcucuucuccaggcug

SEQ ID NO: 1501689 - RNA, 23 nt, Human
gacacagcucuucuccaggcugu

SEQ ID NO: 1501690 - RNA, 12 nt, Human
gacacaggcccg

SEQ ID NO: 1501691 - RNA, 17 nt, Human
gacagcccgggcucugc

SEQ ID NO: 1501692 - RNA, 21 nt, Human
gacagaaagcagaacagugau

SEQ ID NO: 1501693 - RNA, 13 nt, Human
gacagaacacugu

SEQ ID NO: 1501694 - RNA, 14 nt, Human
gacagaacacuguc

SEQ ID NO: 1501695 - RNA, 15 nt, Human
gacagaacacugucu

SEQ ID NO: 1501696 - RNA, 14 nt, Human
gacucuuaagaaga

SEQ ID NO: 1501697 - RNA, 15 nt, Human
gacucuuaagaagac

SEQ ID NO: 1501698 - RNA, 21 nt, Human
gacucuuaagaagacugcauu

SEQ ID NO: 1501699 - RNA, 20 nt, Human
gacugaauuaugaaacuuuu

SEQ ID NO: 1501700 - RNA, 16 nt, Human
gacugaauuucuuuug

SEQ ID NO: 1501701 - RNA, 14 nt, Human
gacugaauuaugaa

SEQ ID NO: 1501702 - RNA, 14 nt, Human
gacugaauuucuuu

SEQ ID NO: 1501703 - RNA, 11 nt, Human
gaccugaggcc

SEQ ID NO: 1501704 - RNA, 13 nt, Human
gaccugaggcccu

SEQ ID NO: 1501705 - RNA, 14 nt, Human
gaccugaggcccuu

SEQ ID NO: 1501706 - RNA, 16 nt, Human
gacgccaucccagccc

SEQ ID NO: 1501707 - RNA, 14 nt, Human
gaccucugcagcaa

SEQ ID NO: 1501708 - RNA, 18 nt, Human
gaccucgugccaccccga

SEQ ID NO: 1501709 - RNA, 20 nt, Human
gaccaucccugaaggccccg

SEQ ID NO: 1501710 - RNA, 14 nt, Human
gaccaucccugaag

SEQ ID NO: 1501711 - RNA, 16 nt, Human
gacgcucucuggccuu

SEQ ID NO: 1501712 - RNA, 17 nt, Human
gacgcucucuggccuuc

SEQ ID NO: 1501713 - RNA, 19 nt, Human
gacgccaucccagccccaa

SEQ ID NO: 1501714 - RNA, 17 nt, Human
gacgccaucccagcccc

SEQ ID NO: 1501715 - RNA, 18 nt, Human
gacgccaucccagcccca

SEQ ID NO: 1501716 - RNA, 16 nt, Human
gacgcuacccgggaag

SEQ ID NO: 1501717 - RNA, 18 nt, Human
gacgcuacccgggaaggg

SEQ ID NO: 1501718 - RNA, 19 nt, Human
gacgcuacccgggaagggg

SEQ ID NO: 1501719 - RNA, 22 nt, Human
gaagcuccgcuuucuacccagc

SEQ ID NO: 1501720 - RNA, 20 nt, Human
gaaggcuggguucugauccu

SEQ ID NO: 1501721 - RNA, 22 nt, Human
gaaggcuggguucugauccuag

SEQ ID NO: 1501722 - RNA, 18 nt, Human
gaaggccccgcccaggcu

SEQ ID NO: 1501723 - RNA, 19 nt, Human
gaaggccccgcccaggcuu

SEQ ID NO: 1501724 - RNA, 21 nt, Human
gaaggcucgagcaugccugga

SEQ ID NO: 1501725 - RNA, 15 nt, Human
gaaggcuggguucug

SEQ ID NO: 1501726 - RNA, 19 nt, Human
gaaggcuggguucugaucc

SEQ ID NO: 1501727 - RNA, 13 nt, Human
gaauauaaacacu

SEQ ID NO: 1501728 - RNA, 22 nt, Human
gaaggggagauaaggguaucug

SEQ ID NO: 1501729 - RNA, 14 nt, Human
gaauauguuucaaa

SEQ ID NO: 1501730 - RNA, 15 nt, Human
gaauauguuucaaac

SEQ ID NO: 1501731 - RNA, 21 nt, Human
gaauauaaacacuauauggca

SEQ ID NO: 1501732 - RNA, 14 nt, Human
gaauauaaacacua

SEQ ID NO: 1501733 - RNA, 20 nt, Human
gaauauguuucaaacuuugg

SEQ ID NO: 1501734 - RNA, 14 nt, Human
gaauauugcugaug

SEQ ID NO: 1501735 - RNA, 15 nt, Human
gaauauugcugaugg

SEQ ID NO: 1501736 - RNA, 19 nt, Human
gaauauugcugauggugca

SEQ ID NO: 1501737 - RNA, 20 nt, Human
gaauauugcugauggugcaa

SEQ ID NO: 1501738 - RNA, 14 nt, Human
gaacugaaaucaua

SEQ ID NO: 1501739 - RNA, 21 nt, Human
gaacugccuuuggcagaguuc

SEQ ID NO: 1501740 - RNA, 11 nt, Human
gaacuggcugc

SEQ ID NO: 1501741 - RNA, 12 nt, Human
gaacuggcugca

SEQ ID NO: 1501742 - RNA, 23 nt, Human
gaagcaacccaaauguucaucaa

SEQ ID NO: 1501743 - RNA, 15 nt, Human
gaagcacaugccucu

SEQ ID NO: 1501744 - RNA, 17 nt, Human
gaagcacaugccucucu

SEQ ID NO: 1501745 - RNA, 20 nt, Human
gaagcacaugccucucucag

SEQ ID NO: 1501746 - RNA, 14 nt, Human
gaagcaaaauuuuu

SEQ ID NO: 1501747 - RNA, 22 nt, Human
gaagacaaugacuuacuguaca

SEQ ID NO: 1501748 - RNA, 23 nt, Human
gaagacaaugugaaaagaaaaau

SEQ ID NO: 1501749 - RNA, 16 nt, Human
gaagacaaugacuuac

SEQ ID NO: 1501750 - RNA, 21 nt, Human
gaagcacaugccucucucagg

SEQ ID NO: 1501751 - RNA, 15 nt, Human
gaagcagaggaagga

SEQ ID NO: 1501752 - RNA, 19 nt, Human
aaaauuuuuucucuaggaa

SEQ ID NO: 1501753 - RNA, 22 nt, Human
aaaauuuuuucucuaggaaaua

SEQ ID NO: 1501754 - RNA, 14 nt, Human
aaacaaaauuucua

SEQ ID NO: 1501755 - RNA, 15 nt, Human
aaacaaaauuucuau

SEQ ID NO: 1501756 - RNA, 17 nt, Human
aaacaaggaugaauuaa

SEQ ID NO: 1501757 - RNA, 18 nt, Human
aaacaagaccacguuucu

SEQ ID NO: 1501758 - RNA, 19 nt, Human
aaacaacuucaauauccaa

SEQ ID NO: 1501759 - RNA, 12 nt, Human
aaaauggaauac

SEQ ID NO: 1501760 - RNA, 21 nt, Human
aaaauggacguguuaugacuc

SEQ ID NO: 1501761 - RNA, 21 nt, Human
aaaauguaggguuauaauaau

SEQ ID NO: 1501762 - RNA, 21 nt, Human
aaaauauuauguguuuccaua

SEQ ID NO: 1501763 - RNA, 14 nt, Human
aaaauauuaugugu

SEQ ID NO: 1501764 - RNA, 15 nt, Human
aaaauauuauguguu

SEQ ID NO: 1501765 - RNA, 14 nt, Human
gggcuggacugagg

SEQ ID NO: 1501766 - RNA, 15 nt, Human
gggcuggacugaggc

SEQ ID NO: 1501767 - RNA, 19 nt, Human
gggcuggacugaggccuga

SEQ ID NO: 1501768 - RNA, 14 nt, Human
aaacacaacuauau

SEQ ID NO: 1501769 - RNA, 19 nt, Human
aaacaagucagucauucag

SEQ ID NO: 1501770 - RNA, 13 nt, Human
aaacauauauaac

SEQ ID NO: 1501771 - RNA, 16 nt, Human
aaacauauauaacaau

SEQ ID NO: 1501772 - RNA, 19 nt, Human
aaacauauauaacaaugcu

SEQ ID NO: 1501773 - RNA, 21 nt, Human
aaacauauauaacaaugcugu

SEQ ID NO: 1501774 - RNA, 22 nt, Human
aaacaugcuacacacugcaugu

SEQ ID NO: 1501775 - RNA, 17 nt, Human
ggggccaguuggucccc

SEQ ID NO: 1501776 - RNA, 19 nt, Human
ggggccaguuggucccccu

SEQ ID NO: 1501777 - RNA, 16 nt, Human
ggggcccugccuccuu

SEQ ID NO: 1501778 - RNA, 19 nt, Human
ggggcccugccuccuuugu

SEQ ID NO: 1501779 - RNA, 23 nt, Human
ggggcccugccuccuuugugagg

SEQ ID NO: 1501780 - RNA, 15 nt, Human
ggggaccucaggccu

SEQ ID NO: 1501781 - RNA, 16 nt, Human
ggggaccucaggccug

SEQ ID NO: 1501782 - RNA, 17 nt, Human
ggggaccucaggccugg

SEQ ID NO: 1501783 - RNA, 20 nt, Human
ggguaucaggugcugccauc

SEQ ID NO: 1501784 - RNA, 22 nt, Human
gggucucacuauguugcccagg

SEQ ID NO: 1501785 - RNA, 12 nt, Human
gggucucacucu

SEQ ID NO: 1501786 - RNA, 23 nt, Human
gggucucacuauguugcccaggc

SEQ ID NO: 1501787 - RNA, 16 nt, Human
aaaccacagcaguuga

SEQ ID NO: 1501788 - RNA, 18 nt, Human
aaacuaaggcccucuuga

SEQ ID NO: 1501789 - RNA, 15 nt, Human
aaacgucuuaaauau

SEQ ID NO: 1501790 - RNA, 16 nt, Human
aaacguggcugcuuca

SEQ ID NO: 1501791 - RNA, 17 nt, Human
aaacguggcugcuucaa

SEQ ID NO: 1501792 - RNA, 20 nt, Human
aaacguggcugcuucaagga

SEQ ID NO: 1501793 - RNA, 22 nt, Human
aaacugguauuuuaucuuugau

SEQ ID NO: 1501794 - RNA, 16 nt, Human
aaacugguauuuuauc

SEQ ID NO: 1501795 - RNA, 16 nt, Human
aaacuggauuaaacuu

SEQ ID NO: 1501796 - RNA, 18 nt, Human
aaagagaacuuccagauc

SEQ ID NO: 1501797 - RNA, 19 nt, Human
aaagacuuuuccaacccuc

SEQ ID NO: 1501798 - RNA, 22 nt, Human
aaagacuauucaaacagucuca

SEQ ID NO: 1501799 - RNA, 14 nt, Human
aaagacuccaaaga

SEQ ID NO: 1501800 - RNA, 15 nt, Human
aaagacuguacaaag

SEQ ID NO: 1501801 - RNA, 13 nt, Human
aaagacuccaaag

SEQ ID NO: 1501802 - RNA, 23 nt, Human
aaagacuauucaaacagucucag

SEQ ID NO: 1501803 - RNA, 15 nt, Human
aaagaugagugagca

SEQ ID NO: 1501804 - RNA, 13 nt, Human
aaagaggcuaugu

SEQ ID NO: 1501805 - RNA, 18 nt, Human
aaagaggcuaugugagca

SEQ ID NO: 1501806 - RNA, 20 nt, Human
aaagaggcagcuugaaacug

SEQ ID NO: 1501807 - RNA, 22 nt, Human
aaagauuacuuuuucuuuaugu

SEQ ID NO: 1501808 - RNA, 15 nt, Human
aaagauuuucagaaa

SEQ ID NO: 1501809 - RNA, 16 nt, Human
aaagaaugauuaugaa

SEQ ID NO: 1501810 - RNA, 14 nt, Human
aaacuuuaccuuuu

SEQ ID NO: 1501811 - RNA, 14 nt, Human
ggucccaccccaca

SEQ ID NO: 1501812 - RNA, 12 nt, Human
ggucccacccca

SEQ ID NO: 1501813 - RNA, 20 nt, Human
gguccacccaggagccccga

SEQ ID NO: 1501814 - RNA, 22 nt, Human
gguccacccaggagccccgagg

SEQ ID NO: 1501815 - RNA, 21 nt, Human
ggucauauuaauauauuucca

SEQ ID NO: 1501816 - RNA, 23 nt, Human
gguauuggcuagagguucaaaga

SEQ ID NO: 1501817 - RNA, 22 nt, Human
ggugcacaagcuccaagcuccc

SEQ ID NO: 1501818 - RNA, 13 nt, Human
ggugaaaauuauu

SEQ ID NO: 1501819 - RNA, 21 nt, Human
aaagauuuucagaaaauauua

SEQ ID NO: 1501820 - RNA, 19 nt, Human
ggucuguucuuuccaaagu

SEQ ID NO: 1501821 - RNA, 17 nt, Human
ggucuguucuuuccaaa

SEQ ID NO: 1501822 - RNA, 22 nt, Human
ggucuugaacuccuggccucaa

SEQ ID NO: 1501823 - RNA, 12 nt, Human
ggucuguucuuu

SEQ ID NO: 1501824 - RNA, 14 nt, Human
ggucugugagaugc

SEQ ID NO: 1501825 - RNA, 24 nt, Human
ggucugugagaugcuagaacuccc

SEQ ID NO: 1501826 - RNA, 16 nt, Human
aaagcuacuuauugua

SEQ ID NO: 1501827 - RNA, 17 nt, Human
aaagcuacuuauuguag

SEQ ID NO: 1501828 - RNA, 18 nt, Human
aaagcuaggccuggccag

SEQ ID NO: 1501829 - RNA, 21 nt, Human
aaagcagugcaugcugucccu

SEQ ID NO: 1501830 - RNA, 22 nt, Human
aaagcagugcaugcugucccuu

SEQ ID NO: 1501831 - RNA, 17 nt, Human
aaagcagugcaugcugu

SEQ ID NO: 1501832 - RNA, 13 nt, Human
aaaggaauuuaaa

SEQ ID NO: 1501833 - RNA, 11 nt, Human
aaaggaaagag

SEQ ID NO: 1501834 - RNA, 20 nt, Human
gggcagcagaaggggguggu

SEQ ID NO: 1501835 - RNA, 14 nt, Human
gggcagaggaaagc

SEQ ID NO: 1501836 - RNA, 15 nt, Human
gggauuuccaugaug

SEQ ID NO: 1501837 - RNA, 14 nt, Human
aaaauauauuuaau

SEQ ID NO: 1501838 - RNA, 15 nt, Human
aaaauauauuuaaug

SEQ ID NO: 1501839 - RNA, 18 nt, Human
aaaauaguggugugauuu

SEQ ID NO: 1501840 - RNA, 12 nt, Human
aaaauagccugc

SEQ ID NO: 1501841 - RNA, 21 nt, Human
aaaauaauuuuuauauuugaa

SEQ ID NO: 1501842 - RNA, 23 nt, Human
aaaauaauuuuuauauuugaaau

SEQ ID NO: 1501843 - RNA, 14 nt, Human
aaaauaccagccag

SEQ ID NO: 1501844 - RNA, 15 nt, Human
aaaauaccagccagu

SEQ ID NO: 1501845 - RNA, 12 nt, Human
aaaauaaauuau

SEQ ID NO: 1501846 - RNA, 19 nt, Human
aaaagccugcaauuucaua

SEQ ID NO: 1501847 - RNA, 21 nt, Human
aaaacuuuaugcuaagugaaa

SEQ ID NO: 1501848 - RNA, 22 nt, Human
aaaagcuccauuuuuagugaaa

SEQ ID NO: 1501849 - RNA, 14 nt, Human
aaaagcugggcagg

SEQ ID NO: 1501850 - RNA, 17 nt, Human
aaaagcuggauuuucuu

SEQ ID NO: 1501851 - RNA, 11 nt, Human
gggagggcucc

SEQ ID NO: 1501852 - RNA, 13 nt, Human
gggagggcuccag

SEQ ID NO: 1501853 - RNA, 20 nt, Human
gggaggcagagguugcagug

SEQ ID NO: 1501854 - RNA, 19 nt, Human
gggaggccaaggugggagg

SEQ ID NO: 1501855 - RNA, 14 nt, Human
gggaacagacugga

SEQ ID NO: 1501856 - RNA, 20 nt, Human
aaaaaucucaaauuucuaaa

SEQ ID NO: 1501857 - RNA, 19 nt, Human
aaaaaucucaaauuucuaa

SEQ ID NO: 1501858 - RNA, 22 nt, Human
gggaacagacuggaagcacagc

SEQ ID NO: 1501859 - RNA, 15 nt, Human
aaaaccaauguucuc

SEQ ID NO: 1501860 - RNA, 21 nt, Human
aaaaccaauguucucucuucu

SEQ ID NO: 1501861 - RNA, 16 nt, Human
aaaacguggcugcuuc

SEQ ID NO: 1501862 - RNA, 17 nt, Human
aaaacguggcugcuuca

SEQ ID NO: 1501863 - RNA, 18 nt, Human
aaaacguggcugcuucaa

SEQ ID NO: 1501864 - RNA, 20 nt, Human
aaaacugcugacuguuuucu

SEQ ID NO: 1501865 - RNA, 18 nt, Human
aaaacugauuuuuuuuuc

SEQ ID NO: 1501866 - RNA, 22 nt, Human
aaaacugauuuuuuuuuccuuc

SEQ ID NO: 1501867 - RNA, 21 nt, Human
aaaacguggcugcuucaagga

SEQ ID NO: 1501868 - RNA, 13 nt, Human
ggcugggagagcc

SEQ ID NO: 1501869 - RNA, 14 nt, Human
ggcuggcgugcagu

SEQ ID NO: 1501870 - RNA, 16 nt, Human
ggcuggcgugcagugg

SEQ ID NO: 1501871 - RNA, 20 nt, Human
ggcuggcgugcaguggugcg

SEQ ID NO: 1501872 - RNA, 17 nt, Human
ggcuggccuggccccuc

SEQ ID NO: 1501873 - RNA, 22 nt, Human
ggcuggccuggccccucagggu

SEQ ID NO: 1501874 - RNA, 20 nt, Human
ggcucccuucccaccucucu

SEQ ID NO: 1501875 - RNA, 22 nt, Human
ggcucccuucccaccucucuca

SEQ ID NO: 1501876 - RNA, 16 nt, Human
ggcucccuucccaccu

SEQ ID NO: 1501877 - RNA, 17 nt, Human
ggcucccuucccaccuc

SEQ ID NO: 1501878 - RNA, 18 nt, Human
ggcucccuucccaccucu

SEQ ID NO: 1501879 - RNA, 22 nt, Human
ggcugcaugcgggcuuccuccu

SEQ ID NO: 1501880 - RNA, 20 nt, Human
ggcugcaugcgggcuuccuc

SEQ ID NO: 1501881 - RNA, 18 nt, Human
ggcucgagcaugccugga

SEQ ID NO: 1501882 - RNA, 23 nt, Human
ggcucuuccaggcugggagagcc

SEQ ID NO: 1501883 - RNA, 24 nt, Human
ggcucuuccaggcugggagagccu

SEQ ID NO: 1501884 - RNA, 12 nt, Human
ggcucuucucau

SEQ ID NO: 1501885 - RNA, 13 nt, Human
ggcucuucucauu

SEQ ID NO: 1501886 - RNA, 20 nt, Human
ggcucuucucauuucacccc

SEQ ID NO: 1501887 - RNA, 22 nt, Human
ggcucuucucauuucaccccuc

SEQ ID NO: 1501888 - RNA, 13 nt, Human
aaaaaaacacaaa

SEQ ID NO: 1501889 - RNA, 19 nt, Human
ggcuguaucccaugagccu

SEQ ID NO: 1501890 - RNA, 16 nt, Human
ggcuggugucaccuga

SEQ ID NO: 1501891 - RNA, 15 nt, Human
ggcuucaguggcagc

SEQ ID NO: 1501892 - RNA, 20 nt, Human
ggcuguaucccaugagccuc

SEQ ID NO: 1501893 - RNA, 22 nt, Human
ggcuguaucccaugagccucag

SEQ ID NO: 1501894 - RNA, 23 nt, Human
ggcuguaucccaugagccucagc

SEQ ID NO: 1501895 - RNA, 15 nt, Human
ggcugucaauuacag

SEQ ID NO: 1501896 - RNA, 17 nt, Human
ggcuucaguggcagcug

SEQ ID NO: 1501897 - RNA, 16 nt, Human
ggcuucaguggcagcu

SEQ ID NO: 1501898 - RNA, 13 nt, Human
gggaaaaucagcc

SEQ ID NO: 1501899 - RNA, 23 nt, Human
gggaaaaucagccugcuccagcu

SEQ ID NO: 1501900 - RNA, 12 nt, Human
ggaccccagcuc

SEQ ID NO: 1501901 - RNA, 15 nt, Human
ggaccccagcucugc

SEQ ID NO: 1501902 - RNA, 13 nt, Human
ggaccccagcucu

SEQ ID NO: 1501903 - RNA, 19 nt, Human
ggacccugaggcccagagg

SEQ ID NO: 1501904 - RNA, 14 nt, Human
ggacccugaggccc

SEQ ID NO: 1501905 - RNA, 15 nt, Human
ggacccugaggccca

SEQ ID NO: 1501906 - RNA, 18 nt, Human
ggacccugaggcccagag

SEQ ID NO: 1501907 - RNA, 19 nt, Human
gcuuguacauaaugcgugc

SEQ ID NO: 1501908 - RNA, 20 nt, Human
ggacuacaggugugagucac

SEQ ID NO: 1501909 - RNA, 12 nt, Human
ggaccucaggcc

SEQ ID NO: 1501910 - RNA, 22 nt, Human
ggacucaaugcacugacauugu

SEQ ID NO: 1501911 - RNA, 19 nt, Human
ggagaaaauggacguguua

SEQ ID NO: 1501912 - RNA, 17 nt, Human
ggacuuggaagcuccgc

SEQ ID NO: 1501913 - RNA, 22 nt, Human
ggagaaccaaaaagaggcuaug

SEQ ID NO: 1501914 - RNA, 15 nt, Human
ggagagcuagcagca

SEQ ID NO: 1501915 - RNA, 17 nt, Human
ggagagcuagcagcagg

SEQ ID NO: 1501916 - RNA, 13 nt, Human
ggagagccuucca

SEQ ID NO: 1501917 - RNA, 16 nt, Human
ggagagccuuccaggg

SEQ ID NO: 1501918 - RNA, 22 nt, Human
ggagagccuuccagggguggga

SEQ ID NO: 1501919 - RNA, 17 nt, Human
ggagagccuuccagggg

SEQ ID NO: 1501920 - RNA, 18 nt, Human
ggagagccuuccaggggu

SEQ ID NO: 1501921 - RNA, 16 nt, Human
ggagcugaguggggga

SEQ ID NO: 1501922 - RNA, 18 nt, Human
ggaggccaaggugggagg

SEQ ID NO: 1501923 - RNA, 20 nt, Human
ggaggccaaggugggaggau

SEQ ID NO: 1501924 - RNA, 13 nt, Human
ggaggccagccuu

SEQ ID NO: 1501925 - RNA, 12 nt, Human
ggaggaagagaa

SEQ ID NO: 1501926 - RNA, 21 nt, Human
ggaggcaugugaugagaggaa

SEQ ID NO: 1501927 - RNA, 15 nt, Human
ggaggcugagauggg

SEQ ID NO: 1501928 - RNA, 19 nt, Human
ggaggcugagaugggagaa

SEQ ID NO: 1501929 - RNA, 15 nt, Human
ggaggucgaggcagg

SEQ ID NO: 1501930 - RNA, 16 nt, Human
ggaggucgaggcagga

SEQ ID NO: 1501931 - RNA, 18 nt, Human
ggaggucgaggcaggagg

SEQ ID NO: 1501932 - RNA, 13 nt, Human
ggagcagccacau

SEQ ID NO: 1501933 - RNA, 21 nt, Human
ggagcagccacauuccugaug

SEQ ID NO: 1501934 - RNA, 12 nt, Human
ggcagaaggaag

SEQ ID NO: 1501935 - RNA, 10 nt, Human
ggcagagcag

SEQ ID NO: 1501936 - RNA, 12 nt, Human
ggcagagcagag

SEQ ID NO: 1501937 - RNA, 15 nt, Human
ggcagccaggccaca

SEQ ID NO: 1501938 - RNA, 17 nt, Human
ggcagccaggccacaag

SEQ ID NO: 1501939 - RNA, 22 nt, Human
ggaugguucccuugaugaagaa

SEQ ID NO: 1501940 - RNA, 23 nt, Human
ggaugguucccuugaugaagaag

SEQ ID NO: 1501941 - RNA, 13 nt, Human
ggauguucuggga

SEQ ID NO: 1501942 - RNA, 12 nt, Human
ggaugagaaagg

SEQ ID NO: 1501943 - RNA, 22 nt, Human
ggaugagaaagguugaagcacc

SEQ ID NO: 1501944 - RNA, 21 nt, Human
ggaugaauuccaaauucugcu

SEQ ID NO: 1501945 - RNA, 21 nt, Human
ggauuuugauccaagcugguc

SEQ ID NO: 1501946 - RNA, 23 nt, Human
ggauuaaacuuaaucuaaaugga

SEQ ID NO: 1501947 - RNA, 23 nt, Human
ggauguuucugucacaucagcuc

SEQ ID NO: 1501948 - RNA, 14 nt, Human
ggcccuuccuuuuc

SEQ ID NO: 1501949 - RNA, 13 nt, Human
ggccucccaacuc

SEQ ID NO: 1501950 - RNA, 14 nt, Human
ggccucccaacuca

SEQ ID NO: 1501951 - RNA, 12 nt, Human
ggcauuguggga

SEQ ID NO: 1501952 - RNA, 13 nt, Human
ggccaaaggaagc

SEQ ID NO: 1501953 - RNA, 15 nt, Human
ggccaaagccaaagc

SEQ ID NO: 1501954 - RNA, 12 nt, Human
ggccaaaggaag

SEQ ID NO: 1501955 - RNA, 13 nt, Human
ggccaagguggga

SEQ ID NO: 1501956 - RNA, 23 nt, Human
ggccagagggagugacagaggca

SEQ ID NO: 1501957 - RNA, 19 nt, Human
ggccagaugcaccagcccu

SEQ ID NO: 1501958 - RNA, 20 nt, Human
ggccagaugcaccagcccuu

SEQ ID NO: 1501959 - RNA, 22 nt, Human
gcuuccuucugugaaaguacau

SEQ ID NO: 1501960 - RNA, 19 nt, Human
gcuugggcuucauccuccu

SEQ ID NO: 1501961 - RNA, 16 nt, Human
gcuuguacauaaugcg

SEQ ID NO: 1501962 - RNA, 14 nt, Human
gcuuguacauaaug

SEQ ID NO: 1501963 - RNA, 20 nt, Human
gcuguaucccaugagccuca

SEQ ID NO: 1501964 - RNA, 23 nt, Human
gcuguaucccaugagccucagca

SEQ ID NO: 1501965 - RNA, 15 nt, Human
gcuggguucuaccca

SEQ ID NO: 1501966 - RNA, 15 nt, Human
gcuggguucugaucc

SEQ ID NO: 1501967 - RNA, 14 nt, Human
gcuggguuggaggg

SEQ ID NO: 1501968 - RNA, 21 nt, Human
gcuggguuggaggguguccca

SEQ ID NO: 1501969 - RNA, 17 nt, Human
gcuggguucuacccagg

SEQ ID NO: 1501970 - RNA, 22 nt, Human
gcuucaaggauccugagccaga

SEQ ID NO: 1501971 - RNA, 14 nt, Human
gcuuaacuucacau

SEQ ID NO: 1501972 - RNA, 15 nt, Human
gcuucacggaagagc

SEQ ID NO: 1501973 - RNA, 20 nt, Human
gcuucacggaagagccuugc

SEQ ID NO: 1501974 - RNA, 21 nt, Human
gcuguuggcugggggccucag

SEQ ID NO: 1501975 - RNA, 22 nt, Human
gcuguuggcugggggccucagu

SEQ ID NO: 1501976 - RNA, 19 nt, Human
gcugugcugcccugcccac

SEQ ID NO: 1501977 - RNA, 22 nt, Human
gcugugcugcccugcccaccug

SEQ ID NO: 1501978 - RNA, 21 nt, Human
gcugugcucuggacaggcaug

SEQ ID NO: 1501979 - RNA, 12 nt, Human
gcugugcugccc

SEQ ID NO: 1501980 - RNA, 13 nt, Human
gcugugcugcccu

SEQ ID NO: 1501981 - RNA, 14 nt, Human
gcugugcugcccug

SEQ ID NO: 1501982 - RNA, 15 nt, Human
gcuggguguggcgca

SEQ ID NO: 1501983 - RNA, 14 nt, Human
gcugggcagguugg

SEQ ID NO: 1501984 - RNA, 16 nt, Human
gcugggcagaggaaag

SEQ ID NO: 1501985 - RNA, 17 nt, Human
gcugggcagaggaaagc

SEQ ID NO: 1501986 - RNA, 19 nt, Human
gcugggcagaggaaagcaa

SEQ ID NO: 1501987 - RNA, 16 nt, Human
gcugggcucccuuccc

SEQ ID NO: 1501988 - RNA, 17 nt, Human
gcugggcucccuuccca

SEQ ID NO: 1501989 - RNA, 20 nt, Human
gcugggcucccuucccaccu

SEQ ID NO: 1501990 - RNA, 14 nt, Human
gcuggagugcagug

SEQ ID NO: 1501991 - RNA, 15 nt, Human
gcuggagugcaguga

SEQ ID NO: 1501992 - RNA, 17 nt, Human
gcuggccuggccccuca

SEQ ID NO: 1501993 - RNA, 16 nt, Human
gcugggauuacaggug

SEQ ID NO: 1501994 - RNA, 18 nt, Human
gcuggccuggccccucag

SEQ ID NO: 1501995 - RNA, 19 nt, Human
gcuggccuggccccucagg

SEQ ID NO: 1501996 - RNA, 13 nt, Human
gcugggcagagga

SEQ ID NO: 1501997 - RNA, 14 nt, Human
gcugggcagaggaa

SEQ ID NO: 1501998 - RNA, 15 nt, Human
gcugggcagaggaaa

SEQ ID NO: 1501999 - RNA, 18 nt, Human
gcugggauuacaggugug

SEQ ID NO: 1502000 - RNA, 19 nt, Human
gcugggauuacagguguga

SEQ ID NO: 1502001 - RNA, 12 nt, Human
gcuggagugcag

SEQ ID NO: 1502002 - RNA, 17 nt, Human
gcuggagcucugcccau

SEQ ID NO: 1502003 - RNA, 13 nt, Human
gcuggacugaggc

SEQ ID NO: 1502004 - RNA, 14 nt, Human
gcuggacugaggcc

SEQ ID NO: 1502005 - RNA, 16 nt, Human
gcuggacugaggccug

SEQ ID NO: 1502006 - RNA, 17 nt, Human
gcuggacugaggccuga

SEQ ID NO: 1502007 - RNA, 18 nt, Human
gcuggacugaggccugag

SEQ ID NO: 1502008 - RNA, 19 nt, Human
gcuggacugaggccugagc

SEQ ID NO: 1502009 - RNA, 19 nt, Human
gcugccugggaucccucau

SEQ ID NO: 1502010 - RNA, 16 nt, Human
gcugccugggaucccu

SEQ ID NO: 1502011 - RNA, 18 nt, Human
gcugccugggaucccuca

SEQ ID NO: 1502012 - RNA, 13 nt, Human
gcugccugggauc

SEQ ID NO: 1502013 - RNA, 18 nt, Human
gcugagggugagugggug

SEQ ID NO: 1502014 - RNA, 19 nt, Human
gcugccagccgagauagcc

SEQ ID NO: 1502015 - RNA, 21 nt, Human
gcugccagccgagauagccaa

SEQ ID NO: 1502016 - RNA, 21 nt, Human
gcugccauccagguucagcuu

SEQ ID NO: 1502017 - RNA, 23 nt, Human
gcugccauccagguucagcuugu

SEQ ID NO: 1502018 - RNA, 16 nt, Human
gcugcaccggcuggcc

SEQ ID NO: 1502019 - RNA, 17 nt, Human
gcugcaccggcuggccu

SEQ ID NO: 1502020 - RNA, 18 nt, Human
gcugcaccggcuggccug

SEQ ID NO: 1502021 - RNA, 19 nt, Human
gcugcaccggcuggccugg

SEQ ID NO: 1502022 - RNA, 22 nt, Human
gcugcaccggcuggccuggccc

SEQ ID NO: 1502023 - RNA, 17 nt, Human
gcugacagacacaggcc

SEQ ID NO: 1502024 - RNA, 16 nt, Human
gcugacagacacaggc

SEQ ID NO: 1502025 - RNA, 14 nt, Human
gcugacagacacag

SEQ ID NO: 1502026 - RNA, 15 nt, Human
gcugacagacacagg

SEQ ID NO: 1502027 - RNA, 12 nt, Human
gcugaaggcucg

SEQ ID NO: 1502028 - RNA, 20 nt, Human
gcugaaggcucgagcaugcc

SEQ ID NO: 1502029 - RNA, 23 nt, Human
gcugaaggcucgagcaugccugg

SEQ ID NO: 1502030 - RNA, 17 nt, Human
gcugaaugguuuucaaa

SEQ ID NO: 1502031 - RNA, 15 nt, Human
gcucuuccaggcugg

SEQ ID NO: 1502032 - RNA, 16 nt, Human
gcucuuccaggcuggg

SEQ ID NO: 1502033 - RNA, 12 nt, Human
gcucuuccaggc

SEQ ID NO: 1502034 - RNA, 16 nt, Human
gcucuguccugggagu

SEQ ID NO: 1502035 - RNA, 15 nt, Human
gcucuguccugggag

SEQ ID NO: 1502036 - RNA, 18 nt, Human
gcuccugccgcagagcug

SEQ ID NO: 1502037 - RNA, 19 nt, Human
gcuccugccgcagagcugg

SEQ ID NO: 1502038 - RNA, 22 nt, Human
gcuccugccgcagagcuggccg

SEQ ID NO: 1502039 - RNA, 15 nt, Human
gcuccugccgcagag

SEQ ID NO: 1502040 - RNA, 17 nt, Human
gcuccugccgcagagcu

SEQ ID NO: 1502041 - RNA, 18 nt, Human
gcuccccucggagaagag

SEQ ID NO: 1502042 - RNA, 15 nt, Human
gcuccccucggagaa

SEQ ID NO: 1502043 - RNA, 22 nt, Human
gcucccaggcauuccccaggag

SEQ ID NO: 1502044 - RNA, 23 nt, Human
gcucccaggcauuccccaggagg

SEQ ID NO: 1502045 - RNA, 12 nt, Human
gcuccccuccaa

SEQ ID NO: 1502046 - RNA, 14 nt, Human
gcuccccagcccca

SEQ ID NO: 1502047 - RNA, 20 nt, Human
gcucccaggcauuccccagg

SEQ ID NO: 1502048 - RNA, 21 nt, Human
gcucccaggcauuccccagga

SEQ ID NO: 1502049 - RNA, 13 nt, Human
gcucucaggccag

SEQ ID NO: 1502050 - RNA, 14 nt, Human
gcucucaggccagc

SEQ ID NO: 1502051 - RNA, 15 nt, Human
gcucucaggccagcu

SEQ ID NO: 1502052 - RNA, 16 nt, Human
gcucucaggccagcug

SEQ ID NO: 1502053 - RNA, 12 nt, Human
gcucagggccug

SEQ ID NO: 1502054 - RNA, 17 nt, Human
gcucagggccuggcuca

SEQ ID NO: 1502055 - RNA, 13 nt, Human
gcucagggccugg

SEQ ID NO: 1502056 - RNA, 16 nt, Human
gcucagggccuggcuc

SEQ ID NO: 1502057 - RNA, 22 nt, Human
gcucagagagggugggaguggg

SEQ ID NO: 1502058 - RNA, 18 nt, Human
gcucagagagggugggag

SEQ ID NO: 1502059 - RNA, 20 nt, Human
gcucagagagggugggagug

SEQ ID NO: 1502060 - RNA, 15 nt, Human
gcucagagagggugg

SEQ ID NO: 1502061 - RNA, 23 nt, Human
gcucagguggggucacucuggca

SEQ ID NO: 1502062 - RNA, 21 nt, Human
gcucagguggggucacucugg

SEQ ID NO: 1502063 - RNA, 22 nt, Human
gcucagguggggucacucuggc

SEQ ID NO: 1502064 - RNA, 21 nt, Human
gcuaguaauuggaaaggcagc

SEQ ID NO: 1502065 - RNA, 16 nt, Human
gcuaguaucaaaagaa

SEQ ID NO: 1502066 - RNA, 14 nt, Human
gcuaggccuggcca

SEQ ID NO: 1502067 - RNA, 15 nt, Human
gcuaggccuggccag

SEQ ID NO: 1502068 - RNA, 18 nt, Human
gcuaggaacacuccuuca

SEQ ID NO: 1502069 - RNA, 19 nt, Human
gcuaggaacacuccuucac

SEQ ID NO: 1502070 - RNA, 21 nt, Human
gcuaggaacacuccuucacag

SEQ ID NO: 1502071 - RNA, 14 nt, Human
gccuguucagcucc

SEQ ID NO: 1502072 - RNA, 20 nt, Human
gccuguucagcuccagcuca

SEQ ID NO: 1502073 - RNA, 19 nt, Human
gccuguucagcuccagcuc

SEQ ID NO: 1502074 - RNA, 16 nt, Human
gccaccccgagggcug

SEQ ID NO: 1502075 - RNA, 23 nt, Human
gccaccccgagggcugagccugg

SEQ ID NO: 1502076 - RNA, 17 nt, Human
gccaccccgagggcuga

SEQ ID NO: 1502077 - RNA, 21 nt, Human
gccacugcacuauagccuagg

SEQ ID NO: 1502078 - RNA, 13 nt, Human
gccacccugggga

SEQ ID NO: 1502079 - RNA, 19 nt, Human
gccacccuggggagaaagu

SEQ ID NO: 1502080 - RNA, 23 nt, Human
gccacugcaccgggccacagaga

SEQ ID NO: 1502081 - RNA, 18 nt, Human
gccacugugaagagaacc

SEQ ID NO: 1502082 - RNA, 21 nt, Human
gccacuguuuugaaucucaua

SEQ ID NO: 1502083 - RNA, 19 nt, Human
gccacugugaagagaacca

SEQ ID NO: 1502084 - RNA, 23 nt, Human
gccacuucuggguggggcagugg

SEQ ID NO: 1502085 - RNA, 14 nt, Human
gccacuucugggug

SEQ ID NO: 1502086 - RNA, 20 nt, Human
gccacuucuggguggggcag

SEQ ID NO: 1502087 - RNA, 22 nt, Human
gccaccaacauacucccaucug

SEQ ID NO: 1502088 - RNA, 19 nt, Human
gccaccaacauacucccau

SEQ ID NO: 1502089 - RNA, 20 nt, Human
gccaccaacauacucccauc

SEQ ID NO: 1502090 - RNA, 21 nt, Human
gccaccaacauacucccaucu

SEQ ID NO: 1502091 - RNA, 16 nt, Human
gccacauuccugaugc

SEQ ID NO: 1502092 - RNA, 20 nt, Human
gccacauuccugaugcuucu

SEQ ID NO: 1502093 - RNA, 22 nt, Human
gccagacaucaacagauaaaua

SEQ ID NO: 1502094 - RNA, 13 nt, Human
gccagcaggcucu

SEQ ID NO: 1502095 - RNA, 16 nt, Human
gccagcaggcucucag

SEQ ID NO: 1502096 - RNA, 21 nt, Human
gccagcaggcucucaggccag

SEQ ID NO: 1502097 - RNA, 23 nt, Human
gccagcaggcucucaggccagcu

SEQ ID NO: 1502098 - RNA, 17 nt, Human
gccagcaggcucucagg

SEQ ID NO: 1502099 - RNA, 18 nt, Human
gccagcaggcucucaggc

SEQ ID NO: 1502100 - RNA, 19 nt, Human
gccagcaggcucucaggcc

SEQ ID NO: 1502101 - RNA, 20 nt, Human
gccagcaggcucucaggcca

SEQ ID NO: 1502102 - RNA, 12 nt, Human
gccaggccagag

SEQ ID NO: 1502103 - RNA, 19 nt, Human
gccaggcccucugcccacu

SEQ ID NO: 1502104 - RNA, 20 nt, Human
gccaggcccucugcccacuc

SEQ ID NO: 1502105 - RNA, 21 nt, Human
gccaggcccucugcccacucc

SEQ ID NO: 1502106 - RNA, 16 nt, Human
gccaggcccucugccc

SEQ ID NO: 1502107 - RNA, 17 nt, Human
gccaggcccucugccca

SEQ ID NO: 1502108 - RNA, 13 nt, Human
gccaggccagagg

SEQ ID NO: 1502109 - RNA, 18 nt, Human
gcccaccuuggcucaagu

SEQ ID NO: 1502110 - RNA, 13 nt, Human
gcccacgccccca

SEQ ID NO: 1502111 - RNA, 14 nt, Human
gcccacgcccccac

SEQ ID NO: 1502112 - RNA, 15 nt, Human
gcccacgcccccacu

SEQ ID NO: 1502113 - RNA, 15 nt, Human
gcccacgcuggagug

SEQ ID NO: 1502114 - RNA, 16 nt, Human
gcccacgcuggagugc

SEQ ID NO: 1502115 - RNA, 17 nt, Human
gcccacgcuggagugca

SEQ ID NO: 1502116 - RNA, 19 nt, Human
gccauguuggccaggcugg

SEQ ID NO: 1502117 - RNA, 20 nt, Human
gccauguuggccaggcuggu

SEQ ID NO: 1502118 - RNA, 22 nt, Human
gccauguuggccaggcuggucu

SEQ ID NO: 1502119 - RNA, 24 nt, Human
gccauguuggccaggcuggucuca

SEQ ID NO: 1502120 - RNA, 14 nt, Human
gccauguuggccag

SEQ ID NO: 1502121 - RNA, 15 nt, Human
gccauguuggccagg

SEQ ID NO: 1502122 - RNA, 16 nt, Human
gccauguuggccaggc

SEQ ID NO: 1502123 - RNA, 17 nt, Human
gccauguuggccaggcu

SEQ ID NO: 1502124 - RNA, 18 nt, Human
gccauguuggccaggcug

SEQ ID NO: 1502125 - RNA, 19 nt, Human
gccauauucuguuggccag

SEQ ID NO: 1502126 - RNA, 20 nt, Human
gccauauucuguuggccagu

SEQ ID NO: 1502127 - RNA, 16 nt, Human
gcccccaggugccagu

SEQ ID NO: 1502128 - RNA, 19 nt, Human
gccccaaaacucuccucug

SEQ ID NO: 1502129 - RNA, 18 nt, Human
gcccccaggacugggcca

SEQ ID NO: 1502130 - RNA, 18 nt, Human
gccccaaaacucuccucu

SEQ ID NO: 1502131 - RNA, 13 nt, Human
gccccugcccggc

SEQ ID NO: 1502132 - RNA, 14 nt, Human
gccccugcccggcu

SEQ ID NO: 1502133 - RNA, 22 nt, Human
gcccuaaaguguauuuuuuuac

SEQ ID NO: 1502134 - RNA, 15 nt, Human
gccccugcccggcug

SEQ ID NO: 1502135 - RNA, 16 nt, Human
gccccuggaugcagcc

SEQ ID NO: 1502136 - RNA, 18 nt, Human
gccccuggaugcagccuc

SEQ ID NO: 1502137 - RNA, 22 nt, Human
gccccuggaugcagccucacag

SEQ ID NO: 1502138 - RNA, 13 nt, Human
gcccacucccugc

SEQ ID NO: 1502139 - RNA, 19 nt, Human
gcccacucccugcaaccug

SEQ ID NO: 1502140 - RNA, 14 nt, Human
gcccacucccugca

SEQ ID NO: 1502141 - RNA, 15 nt, Human
gcccacucccugcaa

SEQ ID NO: 1502142 - RNA, 16 nt, Human
gcccugccuccuuugu

SEQ ID NO: 1502143 - RNA, 22 nt, Human
gcccugccuccuuugugaggaa

SEQ ID NO: 1502144 - RNA, 13 nt, Human
gcccuguuaaaag

SEQ ID NO: 1502145 - RNA, 14 nt, Human
gcccuguuaaaaga

SEQ ID NO: 1502146 - RNA, 17 nt, Human
gcccuguuaaaagauga

SEQ ID NO: 1502147 - RNA, 16 nt, Human
gcccuuaccugccagg

SEQ ID NO: 1502148 - RNA, 20 nt, Human
gcccuuaccugccaggaagc

SEQ ID NO: 1502149 - RNA, 21 nt, Human
gcccuuaccugccaggaagcc

SEQ ID NO: 1502150 - RNA, 15 nt, Human
gccgccaugcuccug

SEQ ID NO: 1502151 - RNA, 16 nt, Human
gccgccaugcuccugg

SEQ ID NO: 1502152 - RNA, 22 nt, Human
gccugccuccagggcuggacug

SEQ ID NO: 1502153 - RNA, 17 nt, Human
gccugccuccagggcug

SEQ ID NO: 1502154 - RNA, 18 nt, Human
gccugccuccagggcugg

SEQ ID NO: 1502155 - RNA, 16 nt, Human
gccugccucuucucua

SEQ ID NO: 1502156 - RNA, 15 nt, Human
gccuggccccucagg

SEQ ID NO: 1502157 - RNA, 16 nt, Human
gccuggccccucaggg

SEQ ID NO: 1502158 - RNA, 17 nt, Human
gccuggccccucagggu

SEQ ID NO: 1502159 - RNA, 10 nt, Human
gccuggccug

SEQ ID NO: 1502160 - RNA, 20 nt, Human
gccuggccccucaggguccc

SEQ ID NO: 1502161 - RNA, 22 nt, Human
gccuggccccucagggucccug

SEQ ID NO: 1502162 - RNA, 21 nt, Human
gccugggaggucaaggcugca

SEQ ID NO: 1502163 - RNA, 22 nt, Human
gccugggaggucaaggcugcag

SEQ ID NO: 1502164 - RNA, 14 nt, Human
gccugggaucccuc

SEQ ID NO: 1502165 - RNA, 21 nt, Human
gccugggaucccucauccuca

SEQ ID NO: 1502166 - RNA, 18 nt, Human
gccugggaucccucaucc

SEQ ID NO: 1502167 - RNA, 17 nt, Human
gccggccaguggccuuc

SEQ ID NO: 1502168 - RNA, 13 nt, Human
gccuccuccagcc

SEQ ID NO: 1502169 - RNA, 14 nt, Human
gccucugggacugg

SEQ ID NO: 1502170 - RNA, 12 nt, Human
gccucugggacu

SEQ ID NO: 1502171 - RNA, 13 nt, Human
gccuccugugugu

SEQ ID NO: 1502172 - RNA, 12 nt, Human
gccucuucucua

SEQ ID NO: 1502173 - RNA, 23 nt, Human
gccucuucucuacucuagggaaa

SEQ ID NO: 1502174 - RNA, 18 nt, Human
gccugcccaggccccugc

SEQ ID NO: 1502175 - RNA, 11 nt, Human
gccugccucca

SEQ ID NO: 1502176 - RNA, 16 nt, Human
gccugccuccagggcu

SEQ ID NO: 1502177 - RNA, 19 nt, Human
gccugcccaggccccugcc

SEQ ID NO: 1502178 - RNA, 20 nt, Human
gccugcccaggccccugcca

SEQ ID NO: 1502179 - RNA, 18 nt, Human
cauccugaggcuccacuu

SEQ ID NO: 1502180 - RNA, 19 nt, Human
cauccugaggcuccacuug

SEQ ID NO: 1502181 - RNA, 19 nt, Human
caucccaaacccuucagug

SEQ ID NO: 1502182 - RNA, 13 nt, Human
caucagcugcuga

SEQ ID NO: 1502183 - RNA, 21 nt, Human
caucagcacgauuucuguuua

SEQ ID NO: 1502184 - RNA, 20 nt, Human
caucccaaacccuucagugc

SEQ ID NO: 1502185 - RNA, 11 nt, Human
caucccagccc

SEQ ID NO: 1502186 - RNA, 12 nt, Human
caucccagcccc

SEQ ID NO: 1502187 - RNA, 22 nt, Human
cauccucuguacagagcccacg

SEQ ID NO: 1502188 - RNA, 16 nt, Human
cauagguuuaauaauu

SEQ ID NO: 1502189 - RNA, 20 nt, Human
cauagcagcuuauucacaag

SEQ ID NO: 1502190 - RNA, 19 nt, Human
cauagcagcuuauucacaa

SEQ ID NO: 1502191 - RNA, 11 nt, Human
cauacauauuu

SEQ ID NO: 1502192 - RNA, 23 nt, Human
cauacaggaagguagaaauaucu

SEQ ID NO: 1502193 - RNA, 16 nt, Human
cauacaguuugcacuu

SEQ ID NO: 1502194 - RNA, 23 nt, Human
cauaaugcgugcauaccacuuuu

SEQ ID NO: 1502195 - RNA, 23 nt, Human
caguuguucaauaauaaauauuu

SEQ ID NO: 1502196 - RNA, 22 nt, Human
caguuguuagugugucuuagug

SEQ ID NO: 1502197 - RNA, 23 nt, Human
caguuuguuaguaugaggcauuu

SEQ ID NO: 1502198 - RNA, 22 nt, Human
caguuauuauauuuacaaaugg

SEQ ID NO: 1502199 - RNA, 21 nt, Human
cagucugauucccaagcucug

SEQ ID NO: 1502200 - RNA, 22 nt, Human
cagucugauucccaagcucugc

SEQ ID NO: 1502201 - RNA, 21 nt, Human
caguuauuauauuuacaaaug

SEQ ID NO: 1502202 - RNA, 17 nt, Human
caguuauuauauuuaca

SEQ ID NO: 1502203 - RNA, 13 nt, Human
caguuauggcuau

SEQ ID NO: 1502204 - RNA, 19 nt, Human
caguuauggcuauaggugc

SEQ ID NO: 1502205 - RNA, 20 nt, Human
caguuauggcuauaggugcu

SEQ ID NO: 1502206 - RNA, 20 nt, Human
caguuacucagaauucucua

SEQ ID NO: 1502207 - RNA, 21 nt, Human
cagugguaugaucacggcuca

SEQ ID NO: 1502208 - RNA, 19 nt, Human
caguggugcgaucuggguu

SEQ ID NO: 1502209 - RNA, 20 nt, Human
caguggugcgaucuggguuc

SEQ ID NO: 1502210 - RNA, 20 nt, Human
cagugguaugaucacggcuc

SEQ ID NO: 1502211 - RNA, 16 nt, Human
cagugggagcugccug

SEQ ID NO: 1502212 - RNA, 17 nt, Human
cagugggagcugccugu

SEQ ID NO: 1502213 - RNA, 18 nt, Human
cagugggagcugccuguu

SEQ ID NO: 1502214 - RNA, 23 nt, Human
cagucugauucccaagcucugcu

SEQ ID NO: 1502215 - RNA, 21 nt, Human
cagugcccacaggaucagucu

SEQ ID NO: 1502216 - RNA, 22 nt, Human
cagugcccacaggaucagucug

SEQ ID NO: 1502217 - RNA, 21 nt, Human
ccaacuccagaaagugacaag

SEQ ID NO: 1502218 - RNA, 14 nt, Human
ccaacucaccccag

SEQ ID NO: 1502219 - RNA, 21 nt, Human
ccaacucaccccagccccaaa

SEQ ID NO: 1502220 - RNA, 17 nt, Human
ccaagcucugcuccucu

SEQ ID NO: 1502221 - RNA, 16 nt, Human
ccaagcucugcuccuc

SEQ ID NO: 1502222 - RNA, 14 nt, Human
ccaagcucugcucc

SEQ ID NO: 1502223 - RNA, 15 nt, Human
ccaagcucugcuccu

SEQ ID NO: 1502224 - RNA, 13 nt, Human
ccaacucacccca

SEQ ID NO: 1502225 - RNA, 15 nt, Human
ccaaaucagcugcua

SEQ ID NO: 1502226 - RNA, 23 nt, Human
ccaaaucagcugcuacuacuccu

SEQ ID NO: 1502227 - RNA, 16 nt, Human
ccaaaucauaguggcu

SEQ ID NO: 1502228 - RNA, 23 nt, Human
ccaauggacuaacuugucuuugg

SEQ ID NO: 1502229 - RNA, 14 nt, Human
ccaaugggagcuca

SEQ ID NO: 1502230 - RNA, 19 nt, Human
ccaauucgaacuuuuucca

SEQ ID NO: 1502231 - RNA, 11 nt, Human
ccaauucuuac

SEQ ID NO: 1502232 - RNA, 14 nt, Human
ccaaagugcuggga

SEQ ID NO: 1502233 - RNA, 22 nt, Human
ccaaaguacacuguuucaaacu

SEQ ID NO: 1502234 - RNA, 18 nt, Human
cauuuaggugaggaagca

SEQ ID NO: 1502235 - RNA, 16 nt, Human
cauuuaggugaggaag

SEQ ID NO: 1502236 - RNA, 14 nt, Human
ccaaaaggcagaag

SEQ ID NO: 1502237 - RNA, 17 nt, Human
ccaaaaaaugcuugcuu

SEQ ID NO: 1502238 - RNA, 17 nt, Human
cauuuguauaaaauaau

SEQ ID NO: 1502239 - RNA, 14 nt, Human
cauuuguauaaaau

SEQ ID NO: 1502240 - RNA, 16 nt, Human
cauuuguauaaaauaa

SEQ ID NO: 1502241 - RNA, 14 nt, Human
cauuuguuguuuga

SEQ ID NO: 1502242 - RNA, 23 nt, Human
cauuuuuuuuaagaaaaaggaug

SEQ ID NO: 1502243 - RNA, 21 nt, Human
cauuuggugguuucagaaaug

SEQ ID NO: 1502244 - RNA, 13 nt, Human
caugacaaagacu

SEQ ID NO: 1502245 - RNA, 15 nt, Human
caugcaaggucauuu

SEQ ID NO: 1502246 - RNA, 12 nt, Human
caugcaagguca

SEQ ID NO: 1502247 - RNA, 20 nt, Human
caugcuccuggcccacugca

SEQ ID NO: 1502248 - RNA, 17 nt, Human
caugcuccuggcccacu

SEQ ID NO: 1502249 - RNA, 14 nt, Human
caugcuccuggccc

SEQ ID NO: 1502250 - RNA, 16 nt, Human
caugcuccuggcccac

SEQ ID NO: 1502251 - RNA, 22 nt, Human
cauggccucuucagaucucuaa

SEQ ID NO: 1502252 - RNA, 21 nt, Human
cauggccucuucagaucucua

SEQ ID NO: 1502253 - RNA, 18 nt, Human
caugggaaaggggaaguu

SEQ ID NO: 1502254 - RNA, 21 nt, Human
cauguuacauaagauaaaugu

SEQ ID NO: 1502255 - RNA, 16 nt, Human
cauguucuuaauucuu

SEQ ID NO: 1502256 - RNA, 13 nt, Human
cauguucuuaauu

SEQ ID NO: 1502257 - RNA, 15 nt, Human
cauguccaagaagcc

SEQ ID NO: 1502258 - RNA, 16 nt, Human
cauguccaagaagccc

SEQ ID NO: 1502259 - RNA, 16 nt, Human
cauguuacauaagaua

SEQ ID NO: 1502260 - RNA, 17 nt, Human
cauguuacauaagauaa

SEQ ID NO: 1502261 - RNA, 18 nt, Human
cauguucuuaauucuuag

SEQ ID NO: 1502262 - RNA, 18 nt, Human
cauguuggccaggcuggu

SEQ ID NO: 1502263 - RNA, 17 nt, Human
cauguuggccaggcugg

SEQ ID NO: 1502264 - RNA, 19 nt, Human
cauguuggccaggcugguc

SEQ ID NO: 1502265 - RNA, 17 nt, Human
cauucuccaccugccag

SEQ ID NO: 1502266 - RNA, 18 nt, Human
cauucuccaccugccagg

SEQ ID NO: 1502267 - RNA, 19 nt, Human
cauucuccaccugccaggg

SEQ ID NO: 1502268 - RNA, 21 nt, Human
cauucuccaccugccagggac

SEQ ID NO: 1502269 - RNA, 19 nt, Human
cagauuugaacucuucaau

SEQ ID NO: 1502270 - RNA, 17 nt, Human
cagcaccaucucuccuc

SEQ ID NO: 1502271 - RNA, 19 nt, Human
cagcaccaucucuccuccu

SEQ ID NO: 1502272 - RNA, 13 nt, Human
cagauuucacucu

SEQ ID NO: 1502273 - RNA, 20 nt, Human
cagauuucacucuccuuggu

SEQ ID NO: 1502274 - RNA, 21 nt, Human
cagauugcaacaggcugggcu

SEQ ID NO: 1502275 - RNA, 21 nt, Human
cagauuggcucacacugagaa

SEQ ID NO: 1502276 - RNA, 22 nt, Human
cagauuggcucacacugagaau

SEQ ID NO: 1502277 - RNA, 19 nt, Human
cagauugcaacaggcuggg

SEQ ID NO: 1502278 - RNA, 20 nt, Human
cagauugcaacaggcugggc

SEQ ID NO: 1502279 - RNA, 18 nt, Human
cagauugcaacaggcugg

SEQ ID NO: 1502280 - RNA, 14 nt, Human
cagccagacuggca

SEQ ID NO: 1502281 - RNA, 15 nt, Human
cagcacgauuucugu

SEQ ID NO: 1502282 - RNA, 14 nt, Human
cagcacgauuucug

SEQ ID NO: 1502283 - RNA, 20 nt, Human
cagccagacuggcacaguuu

SEQ ID NO: 1502284 - RNA, 15 nt, Human
cagccagacuggcac

SEQ ID NO: 1502285 - RNA, 18 nt, Human
cagccagacuggcacagu

SEQ ID NO: 1502286 - RNA, 14 nt, Human
cagauaugauucaa

SEQ ID NO: 1502287 - RNA, 19 nt, Human
cagauagauauaugcucug

SEQ ID NO: 1502288 - RNA, 17 nt, Human
cagaggggguggccucc

SEQ ID NO: 1502289 - RNA, 19 nt, Human
cagauacuuggggggcuga

SEQ ID NO: 1502290 - RNA, 14 nt, Human
cagaggggguggcc

SEQ ID NO: 1502291 - RNA, 16 nt, Human
cagaggggguggccuc

SEQ ID NO: 1502292 - RNA, 20 nt, Human
cagaggaaagcaaaggagau

SEQ ID NO: 1502293 - RNA, 13 nt, Human
cagaggggguggc

SEQ ID NO: 1502294 - RNA, 17 nt, Human
cagaggaaagcaaagga

SEQ ID NO: 1502295 - RNA, 19 nt, Human
cagaggaaagcaaaggaga

SEQ ID NO: 1502296 - RNA, 16 nt, Human
cagagcugccaccugc

SEQ ID NO: 1502297 - RNA, 13 nt, Human
cagagcugccacc

SEQ ID NO: 1502298 - RNA, 20 nt, Human
cagagagguuaaggugggua

SEQ ID NO: 1502299 - RNA, 23 nt, Human
cagagaggguggugaccucugcc

SEQ ID NO: 1502300 - RNA, 12 nt, Human
cagagagggugg

SEQ ID NO: 1502301 - RNA, 13 nt, Human
cagagaggguggg

SEQ ID NO: 1502302 - RNA, 17 nt, Human
cagagaggguggugacc

SEQ ID NO: 1502303 - RNA, 20 nt, Human
cagagaggguggugaccucu

SEQ ID NO: 1502304 - RNA, 22 nt, Human
cagagaggguggugaccucugc

SEQ ID NO: 1502305 - RNA, 13 nt, Human
cagacuggaagca

SEQ ID NO: 1502306 - RNA, 14 nt, Human
cagacuggaagcac

SEQ ID NO: 1502307 - RNA, 16 nt, Human
cagacuggaagcacag

SEQ ID NO: 1502308 - RNA, 17 nt, Human
cagacuggaagcacagc

SEQ ID NO: 1502309 - RNA, 18 nt, Human
cagacuggaagcacagcu

SEQ ID NO: 1502310 - RNA, 22 nt, Human
cagacuggcacaguuuucugag

SEQ ID NO: 1502311 - RNA, 23 nt, Human
cagacuggcacaguuuucugaga

SEQ ID NO: 1502312 - RNA, 20 nt, Human
cagacuggaagcacagcuuc

SEQ ID NO: 1502313 - RNA, 21 nt, Human
cagacuggaagcacagcuuca

SEQ ID NO: 1502314 - RNA, 17 nt, Human
cagacuggcacaguuuu

SEQ ID NO: 1502315 - RNA, 18 nt, Human
cagacuggcacaguuuuc

SEQ ID NO: 1502316 - RNA, 23 nt, Human
cagacucuacagaggccaugggc

SEQ ID NO: 1502317 - RNA, 18 nt, Human
cagacucuacagaggcca

SEQ ID NO: 1502318 - RNA, 19 nt, Human
cagacucuacagaggccau

SEQ ID NO: 1502319 - RNA, 20 nt, Human
cagacucuacagaggccaug

SEQ ID NO: 1502320 - RNA, 21 nt, Human
cagacucuacagaggccaugg

SEQ ID NO: 1502321 - RNA, 17 nt, Human
cagacucuacagaggcc

SEQ ID NO: 1502322 - RNA, 22 nt, Human
cagacaggcaagcaccuccugc

SEQ ID NO: 1502323 - RNA, 23 nt, Human
cagacaggcaagcaccuccugcc

SEQ ID NO: 1502324 - RNA, 13 nt, Human
cagacagcugccu

SEQ ID NO: 1502325 - RNA, 14 nt, Human
cagacagcugccug

SEQ ID NO: 1502326 - RNA, 13 nt, Human
cagacaggaccag

SEQ ID NO: 1502327 - RNA, 15 nt, Human
cagacaggaccaggg

SEQ ID NO: 1502328 - RNA, 16 nt, Human
cagacaggaccaggga

SEQ ID NO: 1502329 - RNA, 15 nt, Human
cagacagcugccugg

SEQ ID NO: 1502330 - RNA, 16 nt, Human
cagacagcugccuggg

SEQ ID NO: 1502331 - RNA, 17 nt, Human
cagacagcugccuggga

SEQ ID NO: 1502332 - RNA, 18 nt, Human
cagacagcugccugggau

SEQ ID NO: 1502333 - RNA, 17 nt, Human
cagacaggaccagggau

SEQ ID NO: 1502334 - RNA, 24 nt, Human
cagacaggaccagggauuuccaug

SEQ ID NO: 1502335 - RNA, 11 nt, Human
cagacaggcaa

SEQ ID NO: 1502336 - RNA, 13 nt, Human
cagacaggcaagc

SEQ ID NO: 1502337 - RNA, 18 nt, Human
cagacaggcaagcaccuc

SEQ ID NO: 1502338 - RNA, 20 nt, Human
cagacaggcaagcaccuccu

SEQ ID NO: 1502339 - RNA, 21 nt, Human
cagacaggcaagcaccuccug

SEQ ID NO: 1502340 - RNA, 22 nt, Human
caggcugggagagccuuccagg

SEQ ID NO: 1502341 - RNA, 23 nt, Human
caggcugggagagccuuccaggg

SEQ ID NO: 1502342 - RNA, 17 nt, Human
caggggaaaaucagccu

SEQ ID NO: 1502343 - RNA, 14 nt, Human
caggggaaaagagg

SEQ ID NO: 1502344 - RNA, 16 nt, Human
caggggaaaagaggag

SEQ ID NO: 1502345 - RNA, 14 nt, Human
caggccuccuacag

SEQ ID NO: 1502346 - RNA, 11 nt, Human
caggcuacugu

SEQ ID NO: 1502347 - RNA, 21 nt, Human
caggcugggagagccuuccag

SEQ ID NO: 1502348 - RNA, 17 nt, Human
caggaccucgugccacc

SEQ ID NO: 1502349 - RNA, 18 nt, Human
caggaccucgugccaccc

SEQ ID NO: 1502350 - RNA, 19 nt, Human
caggaggaucacuugaguc

SEQ ID NO: 1502351 - RNA, 22 nt, Human
caggaggccagccuugaccauu

SEQ ID NO: 1502352 - RNA, 19 nt, Human
caggaggccagccuugacc

SEQ ID NO: 1502353 - RNA, 15 nt, Human
caggcaaugcuggcu

SEQ ID NO: 1502354 - RNA, 16 nt, Human
caggcaaugcuggcug

SEQ ID NO: 1502355 - RNA, 17 nt, Human
caggcaaugcuggcugu

SEQ ID NO: 1502356 - RNA, 12 nt, Human
caggaccccagc

SEQ ID NO: 1502357 - RNA, 16 nt, Human
caggaccucaggugag

SEQ ID NO: 1502358 - RNA, 23 nt, Human
caggaccucaggugagaagcaga

SEQ ID NO: 1502359 - RNA, 13 nt, Human
caggaccccagcu

SEQ ID NO: 1502360 - RNA, 14 nt, Human
caggaccccagcuc

SEQ ID NO: 1502361 - RNA, 15 nt, Human
caggaccccagcucu

SEQ ID NO: 1502362 - RNA, 11 nt, Human
caggccaggcc

SEQ ID NO: 1502363 - RNA, 12 nt, Human
caggccaggccc

SEQ ID NO: 1502364 - RNA, 20 nt, Human
cagcuguaugauucccagcc

SEQ ID NO: 1502365 - RNA, 14 nt, Human
cagcuuauugucua

SEQ ID NO: 1502366 - RNA, 20 nt, Human
cagcuuauugucuagugaaa

SEQ ID NO: 1502367 - RNA, 16 nt, Human
caggaaagagaacuuc

SEQ ID NO: 1502368 - RNA, 20 nt, Human
caggaaagagaacuuccaga

SEQ ID NO: 1502369 - RNA, 16 nt, Human
caggaaaggcuccagg

SEQ ID NO: 1502370 - RNA, 17 nt, Human
caggaaaggcuccagga

SEQ ID NO: 1502371 - RNA, 19 nt, Human
caggaaaggcuccaggagc

SEQ ID NO: 1502372 - RNA, 20 nt, Human
caggaaaggcuccaggagca

SEQ ID NO: 1502373 - RNA, 21 nt, Human
cagcugacuuuucuguccgag

SEQ ID NO: 1502374 - RNA, 19 nt, Human
cagcugagggugagugggu

SEQ ID NO: 1502375 - RNA, 15 nt, Human
cagcuaacauggaag

SEQ ID NO: 1502376 - RNA, 17 nt, Human
cagccugcuccagcugu

SEQ ID NO: 1502377 - RNA, 19 nt, Human
cagccugcuccagcuguuc

SEQ ID NO: 1502378 - RNA, 16 nt, Human
cagccugcuccagcug

SEQ ID NO: 1502379 - RNA, 13 nt, Human
caccugccaggga

SEQ ID NO: 1502380 - RNA, 18 nt, Human
caccugccccucaacucu

SEQ ID NO: 1502381 - RNA, 21 nt, Human
caccugccccucaacucuccu

SEQ ID NO: 1502382 - RNA, 11 nt, Human
caccugccagg

SEQ ID NO: 1502383 - RNA, 12 nt, Human
caccugccaggg

SEQ ID NO: 1502384 - RNA, 12 nt, Human
cacccugcucuc

SEQ ID NO: 1502385 - RNA, 12 nt, Human
cacccuccuuuc

SEQ ID NO: 1502386 - RNA, 16 nt, Human
caccugcggugcuauc

SEQ ID NO: 1502387 - RNA, 17 nt, Human
caccugcggugcuaucu

SEQ ID NO: 1502388 - RNA, 19 nt, Human
caccugcggugcuaucucc

SEQ ID NO: 1502389 - RNA, 20 nt, Human
caccugcggugcuaucuccc

SEQ ID NO: 1502390 - RNA, 23 nt, Human
cacugaagaagcaccaaucauga

SEQ ID NO: 1502391 - RNA, 21 nt, Human
cacuccagugagacagcucug

SEQ ID NO: 1502392 - RNA, 21 nt, Human
cacgcuggagugcagugagcc

SEQ ID NO: 1502393 - RNA, 16 nt, Human
cacgcuggagugcagu

SEQ ID NO: 1502394 - RNA, 17 nt, Human
cacgcuggagugcagug

SEQ ID NO: 1502395 - RNA, 18 nt, Human
cacgcuggagugcaguga

SEQ ID NO: 1502396 - RNA, 20 nt, Human
cacgcuggagugcagugagc

SEQ ID NO: 1502397 - RNA, 15 nt, Human
cacgcuggagugcag

SEQ ID NO: 1502398 - RNA, 15 nt, Human
cacuacauucuguua

SEQ ID NO: 1502399 - RNA, 16 nt, Human
cacggaagagccuugc

SEQ ID NO: 1502400 - RNA, 22 nt, Human
cacggaagagccuugcggaagg

SEQ ID NO: 1502401 - RNA, 14 nt, Human
cacuacauucuguu

SEQ ID NO: 1502402 - RNA, 13 nt, Human
cacuacauucugu

SEQ ID NO: 1502403 - RNA, 16 nt, Human
cacaugaaguccaagc

SEQ ID NO: 1502404 - RNA, 23 nt, Human
cacaucuugcucugcugacagac

SEQ ID NO: 1502405 - RNA, 16 nt, Human
cacaucuugcucugcu

SEQ ID NO: 1502406 - RNA, 17 nt, Human
cacauuuauucugcuca

SEQ ID NO: 1502407 - RNA, 18 nt, Human
cacauuuauucugcucac

SEQ ID NO: 1502408 - RNA, 17 nt, Human
caccagccccagugccc

SEQ ID NO: 1502409 - RNA, 21 nt, Human
caccagcccuuagcagggaaa

SEQ ID NO: 1502410 - RNA, 19 nt, Human
caccagcccuuagcaggga

SEQ ID NO: 1502411 - RNA, 18 nt, Human
caccagccccagugccca

SEQ ID NO: 1502412 - RNA, 21 nt, Human
caccagccccagugcccacag

SEQ ID NO: 1502413 - RNA, 22 nt, Human
caccagccccagugcccacagg

SEQ ID NO: 1502414 - RNA, 16 nt, Human
cacccagcccacuucu

SEQ ID NO: 1502415 - RNA, 12 nt, Human
cacccagcccac

SEQ ID NO: 1502416 - RNA, 13 nt, Human
cacaucuugcucu

SEQ ID NO: 1502417 - RNA, 14 nt, Human
cacaucuugcucug

SEQ ID NO: 1502418 - RNA, 15 nt, Human
cacaucuugcucugc

SEQ ID NO: 1502419 - RNA, 20 nt, Human
cacaucuugcucugcugaca

SEQ ID NO: 1502420 - RNA, 21 nt, Human
cacaucuugcucugcugacag

SEQ ID NO: 1502421 - RNA, 22 nt, Human
cacaucuugcucugcugacaga

SEQ ID NO: 1502422 - RNA, 23 nt, Human
cacaucagcuugcccuguuaaaa

SEQ ID NO: 1502423 - RNA, 20 nt, Human
caaguuauuuuuaauuuggu

SEQ ID NO: 1502424 - RNA, 22 nt, Human
caaguauuauaccuuuuuuaga

SEQ ID NO: 1502425 - RNA, 17 nt, Human
caaguauuauaccuuuu

SEQ ID NO: 1502426 - RNA, 13 nt, Human
caagcugcacccu

SEQ ID NO: 1502427 - RNA, 20 nt, Human
caaggauugcuacuguccua

SEQ ID NO: 1502428 - RNA, 14 nt, Human
caaggcaaggcugu

SEQ ID NO: 1502429 - RNA, 16 nt, Human
caaggcaaggcuguca

SEQ ID NO: 1502430 - RNA, 16 nt, Human
caagcucugcuccucu

SEQ ID NO: 1502431 - RNA, 12 nt, Human
caagcucccagg

SEQ ID NO: 1502432 - RNA, 14 nt, Human
caagcucccaggca

SEQ ID NO: 1502433 - RNA, 15 nt, Human
caagcucccaggcau

SEQ ID NO: 1502434 - RNA, 17 nt, Human
caagcucccaggcauuc

SEQ ID NO: 1502435 - RNA, 19 nt, Human
caagcuccaagcucccagg

SEQ ID NO: 1502436 - RNA, 21 nt, Human
caagcuccaagcucccaggca

SEQ ID NO: 1502437 - RNA, 18 nt, Human
caagcuccaagcucccag

SEQ ID NO: 1502438 - RNA, 17 nt, Human
caaucagccuaguugau

SEQ ID NO: 1502439 - RNA, 14 nt, Human
caaucaaaucugcu

SEQ ID NO: 1502440 - RNA, 12 nt, Human
caaugcuggcug

SEQ ID NO: 1502441 - RNA, 16 nt, Human
caauggcagccuuggc

SEQ ID NO: 1502442 - RNA, 13 nt, Human
caauggcagccuu

SEQ ID NO: 1502443 - RNA, 14 nt, Human
caauggcagccuug

SEQ ID NO: 1502444 - RNA, 15 nt, Human
caauggcagccuugg

SEQ ID NO: 1502445 - RNA, 16 nt, Human
caauauuuuccaugaa

SEQ ID NO: 1502446 - RNA, 19 nt, Human
caauauuuuccaugaaaau

SEQ ID NO: 1502447 - RNA, 20 nt, Human
caauauuuuccaugaaaaug

SEQ ID NO: 1502448 - RNA, 22 nt, Human
caauauuuuccaugaaaaugca

SEQ ID NO: 1502449 - RNA, 11 nt, Human
caauauuuucc

SEQ ID NO: 1502450 - RNA, 13 nt, Human
caauauuuuccau

SEQ ID NO: 1502451 - RNA, 15 nt, Human
caauauuuuccauga

SEQ ID NO: 1502452 - RNA, 17 nt, Human
caauuuccaagagcuga

SEQ ID NO: 1502453 - RNA, 20 nt, Human
caauuuauuauggcacauca

SEQ ID NO: 1502454 - RNA, 19 nt, Human
caacuauauuguuugcuaa

SEQ ID NO: 1502455 - RNA, 19 nt, Human
caacuaucucauuuccaag

SEQ ID NO: 1502456 - RNA, 17 nt, Human
caaccccuucgcuccug

SEQ ID NO: 1502457 - RNA, 14 nt, Human
caaccccuucgcuc

SEQ ID NO: 1502458 - RNA, 16 nt, Human
caaccccuucgcuccu

SEQ ID NO: 1502459 - RNA, 14 nt, Human
caacccccagccug

SEQ ID NO: 1502460 - RNA, 12 nt, Human
caacuccagaaa

SEQ ID NO: 1502461 - RNA, 15 nt, Human
caacuauuuuuccaa

SEQ ID NO: 1502462 - RNA, 20 nt, Human
caacuauuuuuccaaaauaa

SEQ ID NO: 1502463 - RNA, 15 nt, Human
caagaagcccaggaa

SEQ ID NO: 1502464 - RNA, 18 nt, Human
caagaagcccaggaaagg

SEQ ID NO: 1502465 - RNA, 17 nt, Human
caagaaggaugauucaa

SEQ ID NO: 1502466 - RNA, 14 nt, Human
caagcaaguauuag

SEQ ID NO: 1502467 - RNA, 16 nt, Human
caagaccacguuucua

SEQ ID NO: 1502468 - RNA, 14 nt, Human
caagaccacguuuc

SEQ ID NO: 1502469 - RNA, 14 nt, Human
caagcaccuccugc

SEQ ID NO: 1502470 - RNA, 13 nt, Human
caagcaccuccug

SEQ ID NO: 1502471 - RNA, 19 nt, Human
auuuuuauauuugaaauau

SEQ ID NO: 1502472 - RNA, 22 nt, Human
auuuuguuuuugucuuaaaaag

SEQ ID NO: 1502473 - RNA, 16 nt, Human
auuuuuuucugaaauu

SEQ ID NO: 1502474 - RNA, 17 nt, Human
auuuuuuucugaaauuu

SEQ ID NO: 1502475 - RNA, 16 nt, Human
auuuuuauuaaauuau

SEQ ID NO: 1502476 - RNA, 12 nt, Human
auuuuuuuuucc

SEQ ID NO: 1502477 - RNA, 21 nt, Human
caaaagguauuuuaaucacca

SEQ ID NO: 1502478 - RNA, 13 nt, Human
caaaagcauguga

SEQ ID NO: 1502479 - RNA, 19 nt, Human
caaaagcaucuaugugaga

SEQ ID NO: 1502480 - RNA, 20 nt, Human
caaaagguuaauaaaguaau

SEQ ID NO: 1502481 - RNA, 20 nt, Human
caaacaugugguuaaugcca

SEQ ID NO: 1502482 - RNA, 18 nt, Human
caaacaugugguuaaugc

SEQ ID NO: 1502483 - RNA, 14 nt, Human
caaaccaucauuga

SEQ ID NO: 1502484 - RNA, 16 nt, Human
caaaccaucauugaaa

SEQ ID NO: 1502485 - RNA, 17 nt, Human
caaaccaucauugaaau

SEQ ID NO: 1502486 - RNA, 19 nt, Human
auuuucuauaauuuaaaua

SEQ ID NO: 1502487 - RNA, 18 nt, Human
auuuucuauaauuuaaau

SEQ ID NO: 1502488 - RNA, 17 nt, Human
auuuucuauaauuuaaa

SEQ ID NO: 1502489 - RNA, 12 nt, Human
auuuguuaaugg

SEQ ID NO: 1502490 - RNA, 14 nt, Human
auuuguguugaaga

SEQ ID NO: 1502491 - RNA, 15 nt, Human
auuuguguugaagag

SEQ ID NO: 1502492 - RNA, 18 nt, Human
auuuguguugaagagguu

SEQ ID NO: 1502493 - RNA, 22 nt, Human
auuuguguugaagagguuuuaa

SEQ ID NO: 1502494 - RNA, 14 nt, Human
auuuguuauaauga

SEQ ID NO: 1502495 - RNA, 12 nt, Human
auugauaaguuc

SEQ ID NO: 1502496 - RNA, 15 nt, Human
auugauaaguucaua

SEQ ID NO: 1502497 - RNA, 16 nt, Human
auugauaaguucauac

SEQ ID NO: 1502498 - RNA, 17 nt, Human
auugauaaguucauaca

SEQ ID NO: 1502499 - RNA, 18 nt, Human
auugauaaguucauacau

SEQ ID NO: 1502500 - RNA, 19 nt, Human
auugauaaguucauacauu

SEQ ID NO: 1502501 - RNA, 21 nt, Human
auugauaaguucauacauugu

SEQ ID NO: 1502502 - RNA, 22 nt, Human
auuuaauagguuuggacaaaau

SEQ ID NO: 1502503 - RNA, 21 nt, Human
auuucaauuuccaagagcuga

SEQ ID NO: 1502504 - RNA, 21 nt, Human
auuucaccccucccuuucucc

SEQ ID NO: 1502505 - RNA, 15 nt, Human
auuucaccccucccu

SEQ ID NO: 1502506 - RNA, 20 nt, Human
auuucaccccucccuuucuc

SEQ ID NO: 1502507 - RNA, 12 nt, Human
auuucacucucc

SEQ ID NO: 1502508 - RNA, 14 nt, Human
auuucacucuccuu

SEQ ID NO: 1502509 - RNA, 21 nt, Human
auuucuguuuagauaauacac

SEQ ID NO: 1502510 - RNA, 13 nt, Human
auuucuuaaacaa

SEQ ID NO: 1502511 - RNA, 21 nt, Human
auuucuuaaacaaauguauga

SEQ ID NO: 1502512 - RNA, 20 nt, Human
auuucuguuuagauaauaca

SEQ ID NO: 1502513 - RNA, 11 nt, Human
auuaacacugc

SEQ ID NO: 1502514 - RNA, 22 nt, Human
auugaggacacugauauggguc

SEQ ID NO: 1502515 - RNA, 23 nt, Human
auucucuaguuugauuaaauucu

SEQ ID NO: 1502516 - RNA, 12 nt, Human
auucucuuaucc

SEQ ID NO: 1502517 - RNA, 14 nt, Human
auucucuuauccaa

SEQ ID NO: 1502518 - RNA, 20 nt, Human
auucucuaguuugauuaaau

SEQ ID NO: 1502519 - RNA, 16 nt, Human
auucucuccuguaccu

SEQ ID NO: 1502520 - RNA, 15 nt, Human
auucucuuauccaac

SEQ ID NO: 1502521 - RNA, 14 nt, Human
auucauauuuacuu

SEQ ID NO: 1502522 - RNA, 16 nt, Human
auuacaggugugaacc

SEQ ID NO: 1502523 - RNA, 16 nt, Human
ccagagacacaagccu

SEQ ID NO: 1502524 - RNA, 18 nt, Human
ccagagacacaagccuuc

SEQ ID NO: 1502525 - RNA, 18 nt, Human
ccagacuugggaggaugu

SEQ ID NO: 1502526 - RNA, 13 nt, Human
ccagaugcaccag

SEQ ID NO: 1502527 - RNA, 14 nt, Human
ccagaugcaccagc

SEQ ID NO: 1502528 - RNA, 15 nt, Human
ccagaucaaggaugu

SEQ ID NO: 1502529 - RNA, 13 nt, Human
ccagagagggugg

SEQ ID NO: 1502530 - RNA, 12 nt, Human
ccacuuggucug

SEQ ID NO: 1502531 - RNA, 15 nt, Human
ccacuucuggguggg

SEQ ID NO: 1502532 - RNA, 18 nt, Human
ccacugcacuccagccug

SEQ ID NO: 1502533 - RNA, 19 nt, Human
ccacugcacuauagccuag

SEQ ID NO: 1502534 - RNA, 20 nt, Human
ccacugcacuauagccuagg

SEQ ID NO: 1502535 - RNA, 13 nt, Human
ccacugcaccggg

SEQ ID NO: 1502536 - RNA, 14 nt, Human
ccacugcaccgggc

SEQ ID NO: 1502537 - RNA, 17 nt, Human
ccacugcaccgggccac

SEQ ID NO: 1502538 - RNA, 19 nt, Human
ccacugcaccgggccacag

SEQ ID NO: 1502539 - RNA, 15 nt, Human
ccagacggggcugga

SEQ ID NO: 1502540 - RNA, 22 nt, Human
ccacuuuuguucuugguuugua

SEQ ID NO: 1502541 - RNA, 21 nt, Human
ccacuuuuguucuugguuugu

SEQ ID NO: 1502542 - RNA, 15 nt, Human
ccacuuuuguucuug

SEQ ID NO: 1502543 - RNA, 14 nt, Human
ccacuuuuguucuu

SEQ ID NO: 1502544 - RNA, 17 nt, Human
ccagacccggcugcgug

SEQ ID NO: 1502545 - RNA, 20 nt, Human
ccacuuucuagccagaggag

SEQ ID NO: 1502546 - RNA, 13 nt, Human
ccacuuucuagcc

SEQ ID NO: 1502547 - RNA, 18 nt, Human
ccacuuucuagccagagg

SEQ ID NO: 1502548 - RNA, 19 nt, Human
ccacuuucuagccagagga

SEQ ID NO: 1502549 - RNA, 20 nt, Human
ccacuuggucugugagaugc

SEQ ID NO: 1502550 - RNA, 22 nt, Human
ccacuuggucugugagaugcua

SEQ ID NO: 1502551 - RNA, 15 nt, Human
ccacuuggucuguga

SEQ ID NO: 1502552 - RNA, 16 nt, Human
ccacuuggucugugag

SEQ ID NO: 1502553 - RNA, 17 nt, Human
ccacuuggucugugaga

SEQ ID NO: 1502554 - RNA, 19 nt, Human
ccacuuggucugugagaug

SEQ ID NO: 1502555 - RNA, 15 nt, Human
ccaggggccaugaau

SEQ ID NO: 1502556 - RNA, 16 nt, Human
ccagucaccccggcca

SEQ ID NO: 1502557 - RNA, 19 nt, Human
ccaguaucuugaagacuuu

SEQ ID NO: 1502558 - RNA, 22 nt, Human
ccaguaucuugaagacuuuucu

SEQ ID NO: 1502559 - RNA, 20 nt, Human
ccaggggugggacacccugu

SEQ ID NO: 1502560 - RNA, 21 nt, Human
ccaggggugggacacccugug

SEQ ID NO: 1502561 - RNA, 22 nt, Human
ccaggggugggacacccuguga

SEQ ID NO: 1502562 - RNA, 23 nt, Human
ccaggggugggacacccugugau

SEQ ID NO: 1502563 - RNA, 19 nt, Human
ccagucaccccggccaccu

SEQ ID NO: 1502564 - RNA, 17 nt, Human
ccagucaccccggccac

SEQ ID NO: 1502565 - RNA, 18 nt, Human
ccagucaccccggccacc

SEQ ID NO: 1502566 - RNA, 22 nt, Human
ccagcagaaaugccuuacccuc

SEQ ID NO: 1502567 - RNA, 17 nt, Human
ccagcagaaaugccuua

SEQ ID NO: 1502568 - RNA, 16 nt, Human
ccagcagaaaugccuu

SEQ ID NO: 1502569 - RNA, 11 nt, Human
ccagcagccug

SEQ ID NO: 1502570 - RNA, 12 nt, Human
ccagcagccugg

SEQ ID NO: 1502571 - RNA, 14 nt, Human
ccagcagccuggac

SEQ ID NO: 1502572 - RNA, 13 nt, Human
ccagcagccugga

SEQ ID NO: 1502573 - RNA, 23 nt, Human
ccagccccauccucuguacagag

SEQ ID NO: 1502574 - RNA, 13 nt, Human
ccagccccuggau

SEQ ID NO: 1502575 - RNA, 14 nt, Human
ccagccccuggaug

SEQ ID NO: 1502576 - RNA, 15 nt, Human
ccagccccuggaugc

SEQ ID NO: 1502577 - RNA, 18 nt, Human
ccagccccuucugaccca

SEQ ID NO: 1502578 - RNA, 18 nt, Human
ccagccccuggaugcagc

SEQ ID NO: 1502579 - RNA, 15 nt, Human
ccagccccuucugac

SEQ ID NO: 1502580 - RNA, 16 nt, Human
ccagccccuucugacc

SEQ ID NO: 1502581 - RNA, 17 nt, Human
ccagccccuucugaccc

SEQ ID NO: 1502582 - RNA, 20 nt, Human
ccaggaaaggcuccaggagc

SEQ ID NO: 1502583 - RNA, 17 nt, Human
ccaggaaaggcuccagg

SEQ ID NO: 1502584 - RNA, 18 nt, Human
ccaggaaaggcuccagga

SEQ ID NO: 1502585 - RNA, 19 nt, Human
ccaggaaaggcuccaggag

SEQ ID NO: 1502586 - RNA, 12 nt, Human
ccccagccccaa

SEQ ID NO: 1502587 - RNA, 16 nt, Human
ccccagccccauccca

SEQ ID NO: 1502588 - RNA, 21 nt, Human
ccccauucugccugcccaggc

SEQ ID NO: 1502589 - RNA, 14 nt, Human
ccccagccccaucc

SEQ ID NO: 1502590 - RNA, 14 nt, Human
ccccagccccaaaa

SEQ ID NO: 1502591 - RNA, 18 nt, Human
ccccaaaacucuccucug

SEQ ID NO: 1502592 - RNA, 20 nt, Human
ccccaaaacucuccucugcu

SEQ ID NO: 1502593 - RNA, 21 nt, Human
ccccaaaacucuccucugcug

SEQ ID NO: 1502594 - RNA, 14 nt, Human
ccccggccaccugc

SEQ ID NO: 1502595 - RNA, 18 nt, Human
ccccggccaccugcggug

SEQ ID NO: 1502596 - RNA, 14 nt, Human
ccccgcccaggcuu

SEQ ID NO: 1502597 - RNA, 15 nt, Human
ccccauuguggucac

SEQ ID NO: 1502598 - RNA, 14 nt, Human
cccccuuccaugga

SEQ ID NO: 1502599 - RNA, 12 nt, Human
ccccgcccaggc

SEQ ID NO: 1502600 - RNA, 18 nt, Human
cccaggcuggcgugcagu

SEQ ID NO: 1502601 - RNA, 21 nt, Human
cccaggcuggcgugcaguggu

SEQ ID NO: 1502602 - RNA, 19 nt, Human
cccaggcuggcgugcagug

SEQ ID NO: 1502603 - RNA, 20 nt, Human
cccaggcuggcgugcagugg

SEQ ID NO: 1502604 - RNA, 14 nt, Human
cccauccucuguac

SEQ ID NO: 1502605 - RNA, 20 nt, Human
cccauccucuguacagagcc

SEQ ID NO: 1502606 - RNA, 15 nt, Human
cccauccucuguaca

SEQ ID NO: 1502607 - RNA, 19 nt, Human
cccauccucuguacagagc

SEQ ID NO: 1502608 - RNA, 19 nt, Human
cccagcccacuucugccau

SEQ ID NO: 1502609 - RNA, 21 nt, Human
cccagccccaaaacucuccuc

SEQ ID NO: 1502610 - RNA, 23 nt, Human
cccagccccaaaacucuccucug

SEQ ID NO: 1502611 - RNA, 23 nt, Human
cccagcaugcaccacgggcccgg

SEQ ID NO: 1502612 - RNA, 19 nt, Human
cccagcaugcaccacgggc

SEQ ID NO: 1502613 - RNA, 22 nt, Human
ccauuguggucacaggaaguag

SEQ ID NO: 1502614 - RNA, 13 nt, Human
ccauuuaaagcuu

SEQ ID NO: 1502615 - RNA, 12 nt, Human
cccaagcucugc

SEQ ID NO: 1502616 - RNA, 17 nt, Human
cccaagcucugcuccuc

SEQ ID NO: 1502617 - RNA, 18 nt, Human
cccacccaagggccuggc

SEQ ID NO: 1502618 - RNA, 15 nt, Human
cccacccaagggccu

SEQ ID NO: 1502619 - RNA, 15 nt, Human
cccaccgcagacagg

SEQ ID NO: 1502620 - RNA, 18 nt, Human
cccaccgcagacaggacc

SEQ ID NO: 1502621 - RNA, 18 nt, Human
ccaugggcacugugggua

SEQ ID NO: 1502622 - RNA, 13 nt, Human
ccaugagccucag

SEQ ID NO: 1502623 - RNA, 16 nt, Human
ccaugaggaacaaggc

SEQ ID NO: 1502624 - RNA, 17 nt, Human
ccaugaggaacaaggca

SEQ ID NO: 1502625 - RNA, 18 nt, Human
ccaugaggaacaaggcaa

SEQ ID NO: 1502626 - RNA, 15 nt, Human
ccugccucuucucua

SEQ ID NO: 1502627 - RNA, 22 nt, Human
ccugcugcaguugccagucacc

SEQ ID NO: 1502628 - RNA, 11 nt, Human
ccugcugcagu

SEQ ID NO: 1502629 - RNA, 12 nt, Human
ccugcugcaguu

SEQ ID NO: 1502630 - RNA, 16 nt, Human
ccugcugcaguugcca

SEQ ID NO: 1502631 - RNA, 23 nt, Human
ccugccuccuuugugaggaagcc

SEQ ID NO: 1502632 - RNA, 21 nt, Human
ccugccuccuuugugaggaag

SEQ ID NO: 1502633 - RNA, 22 nt, Human
ccugccuccuuugugaggaagc

SEQ ID NO: 1502634 - RNA, 13 nt, Human
ccugccuccuuug

SEQ ID NO: 1502635 - RNA, 15 nt, Human
ccugccuccuuugug

SEQ ID NO: 1502636 - RNA, 19 nt, Human
ccugccuccuuugugagga

SEQ ID NO: 1502637 - RNA, 20 nt, Human
ccugccuccuuugugaggaa

SEQ ID NO: 1502638 - RNA, 19 nt, Human
ccucuuuggucuacacugu

SEQ ID NO: 1502639 - RNA, 21 nt, Human
ccucugccugaagucacacag

SEQ ID NO: 1502640 - RNA, 12 nt, Human
ccugcagagggc

SEQ ID NO: 1502641 - RNA, 16 nt, Human
ccugcaggcagccagg

SEQ ID NO: 1502642 - RNA, 17 nt, Human
ccugcaggcagccaggc

SEQ ID NO: 1502643 - RNA, 14 nt, Human
ccugcagagggcac

SEQ ID NO: 1502644 - RNA, 23 nt, Human
ccugcaggcagccaggccacaag

SEQ ID NO: 1502645 - RNA, 18 nt, Human
ccugcaggcagccaggcc

SEQ ID NO: 1502646 - RNA, 19 nt, Human
ccugcaggcagccaggcca

SEQ ID NO: 1502647 - RNA, 20 nt, Human
ccugcaggcagccaggccac

SEQ ID NO: 1502648 - RNA, 21 nt, Human
ccugcaggcagccaggccaca

SEQ ID NO: 1502649 - RNA, 17 nt, Human
ccugaggcugggcuccc

SEQ ID NO: 1502650 - RNA, 19 nt, Human
ccugaggcugggcucccuu

SEQ ID NO: 1502651 - RNA, 21 nt, Human
ccugaggcugggcucccuucc

SEQ ID NO: 1502652 - RNA, 12 nt, Human
ccugaggggccu

SEQ ID NO: 1502653 - RNA, 16 nt, Human
ccugaggggccucuua

SEQ ID NO: 1502654 - RNA, 12 nt, Human
ccucucucacuc

SEQ ID NO: 1502655 - RNA, 20 nt, Human
ccucugccucugacacacag

SEQ ID NO: 1502656 - RNA, 21 nt, Human
ccucugccucugacacacagc

SEQ ID NO: 1502657 - RNA, 23 nt, Human
ccucugccucugacacacagcuc

SEQ ID NO: 1502658 - RNA, 11 nt, Human
ccucugccuga

SEQ ID NO: 1502659 - RNA, 20 nt, Human
ccucugccugaagucacaca

SEQ ID NO: 1502660 - RNA, 18 nt, Human
ccuccuuugugaggaagc

SEQ ID NO: 1502661 - RNA, 19 nt, Human
ccuccuuugugaggaagcc

SEQ ID NO: 1502662 - RNA, 20 nt, Human
ccuccuuugugaggaagccg

SEQ ID NO: 1502663 - RNA, 16 nt, Human
ccucgaacuggcugca

SEQ ID NO: 1502664 - RNA, 15 nt, Human
ccucgaacuggcugc

SEQ ID NO: 1502665 - RNA, 13 nt, Human
ccuccgccucuug

SEQ ID NO: 1502666 - RNA, 11 nt, Human
ccucaggcagg

SEQ ID NO: 1502667 - RNA, 17 nt, Human
ccucccaacucacccca

SEQ ID NO: 1502668 - RNA, 20 nt, Human
ccucccaacucaccccagcc

SEQ ID NO: 1502669 - RNA, 21 nt, Human
ccucccaacucaccccagccc

SEQ ID NO: 1502670 - RNA, 23 nt, Human
ccucccaacucaccccagcccca

SEQ ID NO: 1502671 - RNA, 11 nt, Human
cccugcccugu

SEQ ID NO: 1502672 - RNA, 15 nt, Human
cccuggaugcccagg

SEQ ID NO: 1502673 - RNA, 16 nt, Human
cccuggaugcccagga

SEQ ID NO: 1502674 - RNA, 13 nt, Human
cccuggaugcagc

SEQ ID NO: 1502675 - RNA, 17 nt, Human
cccuggaugcagccuca

SEQ ID NO: 1502676 - RNA, 21 nt, Human
cccuggaugcagccucacagu

SEQ ID NO: 1502677 - RNA, 16 nt, Human
cccugagcuuucugcu

SEQ ID NO: 1502678 - RNA, 14 nt, Human
cccugagcaggauu

SEQ ID NO: 1502679 - RNA, 22 nt, Human
cccugcccaccuggccucugca

SEQ ID NO: 1502680 - RNA, 23 nt, Human
cccugcccccaggacugggccac

SEQ ID NO: 1502681 - RNA, 13 nt, Human
cccugcccccagg

SEQ ID NO: 1502682 - RNA, 14 nt, Human
cccugcccccagga

SEQ ID NO: 1502683 - RNA, 16 nt, Human
cccugcccccaggacu

SEQ ID NO: 1502684 - RNA, 17 nt, Human
cccugcccccaggacug

SEQ ID NO: 1502685 - RNA, 18 nt, Human
cccugcccccaggacugg

SEQ ID NO: 1502686 - RNA, 20 nt, Human
cccugcccccaggacugggc

SEQ ID NO: 1502687 - RNA, 22 nt, Human
cccugcccccaggacugggcca

SEQ ID NO: 1502688 - RNA, 14 nt, Human
cccugcccggcugc

SEQ ID NO: 1502689 - RNA, 17 nt, Human
cccugcccggcugcgga

SEQ ID NO: 1502690 - RNA, 20 nt, Human
cccugaauuuaaauagcuuu

SEQ ID NO: 1502691 - RNA, 13 nt, Human
cccugacagggcc

SEQ ID NO: 1502692 - RNA, 16 nt, Human
cccugacagggccagu

SEQ ID NO: 1502693 - RNA, 16 nt, Human
cccugacaacacucau

SEQ ID NO: 1502694 - RNA, 22 nt, Human
cccugacaacacucauugaccu

SEQ ID NO: 1502695 - RNA, 14 nt, Human
cccugacaacacuc

SEQ ID NO: 1502696 - RNA, 20 nt, Human
cccugaaggccccgcccagg

SEQ ID NO: 1502697 - RNA, 22 nt, Human
cccugaaggccccgcccaggcu

SEQ ID NO: 1502698 - RNA, 12 nt, Human
cccugaaggccc

SEQ ID NO: 1502699 - RNA, 13 nt, Human
cccugaaggcccc

SEQ ID NO: 1502700 - RNA, 14 nt, Human
cccugaaggccccg

SEQ ID NO: 1502701 - RNA, 16 nt, Human
cccugaaggccccgcc

SEQ ID NO: 1502702 - RNA, 19 nt, Human
cccugaaggccccgcccag

SEQ ID NO: 1502703 - RNA, 18 nt, Human
cccugaaagcccugagcu

SEQ ID NO: 1502704 - RNA, 13 nt, Human
cccucggagaaga

SEQ ID NO: 1502705 - RNA, 16 nt, Human
ccgaauagcugggacu

SEQ ID NO: 1502706 - RNA, 17 nt, Human
ccgaauagcugggacua

SEQ ID NO: 1502707 - RNA, 18 nt, Human
ccgaccagacaccuugac

SEQ ID NO: 1502708 - RNA, 13 nt, Human
ccgaccagacacc

SEQ ID NO: 1502709 - RNA, 17 nt, Human
ccgaccagacaccuuga

SEQ ID NO: 1502710 - RNA, 19 nt, Human
ccgaaagggacuuggaagc

SEQ ID NO: 1502711 - RNA, 16 nt, Human
ccgaaaacguggcugc

SEQ ID NO: 1502712 - RNA, 17 nt, Human
ccgaaaacguggcugcu

SEQ ID NO: 1502713 - RNA, 15 nt, Human
cccuuccucuuucca

SEQ ID NO: 1502714 - RNA, 12 nt, Human
ccgcccaggcuu

SEQ ID NO: 1502715 - RNA, 16 nt, Human
ccgcagacaggaccag

SEQ ID NO: 1502716 - RNA, 17 nt, Human
ccgcagacaggaccagg

SEQ ID NO: 1502717 - RNA, 13 nt, Human
cccugucuaauga

SEQ ID NO: 1502718 - RNA, 23 nt, Human
cccugugauggggcccugccucc

SEQ ID NO: 1502719 - RNA, 21 nt, Human
cccugugauggggcccugccu

SEQ ID NO: 1502720 - RNA, 22 nt, Human
cccugugauggggcccugccuc

SEQ ID NO: 1502721 - RNA, 21 nt, Human
ccuagcauacguacacauuuu

SEQ ID NO: 1502722 - RNA, 20 nt, Human
ccuagccugugccucuggga

SEQ ID NO: 1502723 - RNA, 19 nt, Human
ccuagcauacguacacauu

SEQ ID NO: 1502724 - RNA, 14 nt, Human
ccuaaucuucugaa

SEQ ID NO: 1502725 - RNA, 15 nt, Human
ccggcuccaggcucc

SEQ ID NO: 1502726 - RNA, 14 nt, Human
ccgucuaccugagg

SEQ ID NO: 1502727 - RNA, 15 nt, Human
ccgucuaccugaggg

SEQ ID NO: 1502728 - RNA, 13 nt, Human
ccggcuccaggcu

SEQ ID NO: 1502729 - RNA, 14 nt, Human
ccggcuccaggcuc

SEQ ID NO: 1502730 - RNA, 20 nt, Human
ccuaacgaaguauccuucag

SEQ ID NO: 1502731 - RNA, 16 nt, Human
ccgugaggccagagac

SEQ ID NO: 1502732 - RNA, 17 nt, Human
ccgucuaccugaggggc

SEQ ID NO: 1502733 - RNA, 12 nt, Human
ccgugaggccag

SEQ ID NO: 1502734 - RNA, 13 nt, Human
ccgugaggccaga

SEQ ID NO: 1502735 - RNA, 14 nt, Human
ccgugaggccagag

SEQ ID NO: 1502736 - RNA, 16 nt, Human
ccggccaccugcggug

SEQ ID NO: 1502737 - RNA, 11 nt, Human
cuaaagcugcc

SEQ ID NO: 1502738 - RNA, 16 nt, Human
cgugaggccagagaca

SEQ ID NO: 1502739 - RNA, 19 nt, Human
cgugaguccuggcauggga

SEQ ID NO: 1502740 - RNA, 15 nt, Human
cguguuaugacucca

SEQ ID NO: 1502741 - RNA, 19 nt, Human
cguguuaugacuccagaau

SEQ ID NO: 1502742 - RNA, 19 nt, Human
cuaaaguguauuuuuuuac

SEQ ID NO: 1502743 - RNA, 14 nt, Human
cuaacuugucuuug

SEQ ID NO: 1502744 - RNA, 22 nt, Human
cuaacuugucuuuggacccuga

SEQ ID NO: 1502745 - RNA, 16 nt, Human
cuaacuuuccuucauu

SEQ ID NO: 1502746 - RNA, 22 nt, Human
cgugagccacugcaccgggcca

SEQ ID NO: 1502747 - RNA, 14 nt, Human
cgugaggccagaga

SEQ ID NO: 1502748 - RNA, 14 nt, Human
cgugagccacugca

SEQ ID NO: 1502749 - RNA, 15 nt, Human
cgugagccacugcac

SEQ ID NO: 1502750 - RNA, 20 nt, Human
cgugagccacugcaccgggc

SEQ ID NO: 1502751 - RNA, 14 nt, Human
cgugacaacacuug

SEQ ID NO: 1502752 - RNA, 15 nt, Human
cgugacaacacuugu

SEQ ID NO: 1502753 - RNA, 14 nt, Human
cuaagucauucaua

SEQ ID NO: 1502754 - RNA, 14 nt, Human
cuaaguuuuuaugg

SEQ ID NO: 1502755 - RNA, 20 nt, Human
cuaauaaaauuuaaaagucu

SEQ ID NO: 1502756 - RNA, 19 nt, Human
cuacaaaaagcauaaaaau

SEQ ID NO: 1502757 - RNA, 12 nt, Human
ccuuuucccaac

SEQ ID NO: 1502758 - RNA, 20 nt, Human
ccuuuucgcaggauucuucc

SEQ ID NO: 1502759 - RNA, 19 nt, Human
cgcugccccuggcagcccc

SEQ ID NO: 1502760 - RNA, 20 nt, Human
cgcugccccuggcagccccu

SEQ ID NO: 1502761 - RNA, 17 nt, Human
cgcuggagugcagugag

SEQ ID NO: 1502762 - RNA, 18 nt, Human
cgcuggagugcagugagc

SEQ ID NO: 1502763 - RNA, 20 nt, Human
cgguggcucacgccuguaau

SEQ ID NO: 1502764 - RNA, 22 nt, Human
cguacacauuuuauuuuauuau

SEQ ID NO: 1502765 - RNA, 19 nt, Human
cgggcucagcaaaagaugc

SEQ ID NO: 1502766 - RNA, 12 nt, Human
cgggcucugccu

SEQ ID NO: 1502767 - RNA, 13 nt, Human
cgggcucugccuc

SEQ ID NO: 1502768 - RNA, 14 nt, Human
cggcucacugcagc

SEQ ID NO: 1502769 - RNA, 23 nt, Human
cggagucccaccuuggcugcagg

SEQ ID NO: 1502770 - RNA, 21 nt, Human
cggagucccaccuuggcugca

SEQ ID NO: 1502771 - RNA, 22 nt, Human
cggagucccaccuuggcugcag

SEQ ID NO: 1502772 - RNA, 20 nt, Human
cggagacggagucccaccuu

SEQ ID NO: 1502773 - RNA, 17 nt, Human
cggagacggagucccac

SEQ ID NO: 1502774 - RNA, 18 nt, Human
ccuuucaauaggaaaaac

SEQ ID NO: 1502775 - RNA, 17 nt, Human
ccuuucaauaggaaaaa

SEQ ID NO: 1502776 - RNA, 15 nt, Human
ccuuucaauaggaaa

SEQ ID NO: 1502777 - RNA, 12 nt, Human
ccuuccccagca

SEQ ID NO: 1502778 - RNA, 13 nt, Human
ccuuccccagcau

SEQ ID NO: 1502779 - RNA, 20 nt, Human
ccuucucuccagccccugga

SEQ ID NO: 1502780 - RNA, 21 nt, Human
ccuucucuccagccccuggau

SEQ ID NO: 1502781 - RNA, 23 nt, Human
ccuucucuccagccccuggaugc

SEQ ID NO: 1502782 - RNA, 14 nt, Human
ccuucucugaagga

SEQ ID NO: 1502783 - RNA, 16 nt, Human
ccuucucugaaggaca

SEQ ID NO: 1502784 - RNA, 17 nt, Human
ccuucucuucacaguca

SEQ ID NO: 1502785 - RNA, 20 nt, Human
ccuucuguccuacucugugu

SEQ ID NO: 1502786 - RNA, 21 nt, Human
ccuucuguccuacucuguguc

SEQ ID NO: 1502787 - RNA, 22 nt, Human
ccuucuguccuacucuguguca

SEQ ID NO: 1502788 - RNA, 13 nt, Human
ccuguucagcucc

SEQ ID NO: 1502789 - RNA, 12 nt, Human
ccuucccaccuc

SEQ ID NO: 1502790 - RNA, 14 nt, Human
ccuucccaccucuc

SEQ ID NO: 1502791 - RNA, 19 nt, Human
ccuucccaccucucucacu

SEQ ID NO: 1502792 - RNA, 22 nt, Human
ccuuauggaacacucugagacu

SEQ ID NO: 1502793 - RNA, 19 nt, Human
ccuuauggaacacucugag

SEQ ID NO: 1502794 - RNA, 20 nt, Human
ccuuauggaacacucugaga

SEQ ID NO: 1502795 - RNA, 14 nt, Human
ccuuauggaacacu

SEQ ID NO: 1502796 - RNA, 16 nt, Human
ccuuauggaacacucu

SEQ ID NO: 1502797 - RNA, 17 nt, Human
ccuuauggaacacucug

SEQ ID NO: 1502798 - RNA, 18 nt, Human
ccuuauggaacacucuga

SEQ ID NO: 1502799 - RNA, 12 nt, Human
ccuuauggaaca

SEQ ID NO: 1502800 - RNA, 23 nt, Human
ccuguugggccaggagccuccug

SEQ ID NO: 1502801 - RNA, 16 nt, Human
ccuuagcaaauucugu

SEQ ID NO: 1502802 - RNA, 19 nt, Human
ccuuagcagggaaacagcu

SEQ ID NO: 1502803 - RNA, 20 nt, Human
ccuuagcagggaaacagcua

SEQ ID NO: 1502804 - RNA, 16 nt, Human
ccuguugggccaggag

SEQ ID NO: 1502805 - RNA, 17 nt, Human
ccuguugggccaggagc

SEQ ID NO: 1502806 - RNA, 18 nt, Human
ccuguugggccaggagcc

SEQ ID NO: 1502807 - RNA, 19 nt, Human
ccuguugggccaggagccu

SEQ ID NO: 1502808 - RNA, 20 nt, Human
ccuguugggccaggagccuc

SEQ ID NO: 1502809 - RNA, 18 nt, Human
ccuguucccaugagauga

SEQ ID NO: 1502810 - RNA, 12 nt, Human
ccuguucuggca

SEQ ID NO: 1502811 - RNA, 17 nt, Human
ccuguucuggcagaguu

SEQ ID NO: 1502812 - RNA, 23 nt, Human
ccuguucagcuccagcucaccag

SEQ ID NO: 1502813 - RNA, 20 nt, Human
ccuguucagcuccagcucac

SEQ ID NO: 1502814 - RNA, 21 nt, Human
ccuguucagcuccagcucacc

SEQ ID NO: 1502815 - RNA, 14 nt, Human
ccuguucagcucca

SEQ ID NO: 1502816 - RNA, 15 nt, Human
ccuguucagcuccag

SEQ ID NO: 1502817 - RNA, 16 nt, Human
ccuguucagcuccagc

SEQ ID NO: 1502818 - RNA, 19 nt, Human
ccuguucagcuccagcuca

SEQ ID NO: 1502819 - RNA, 21 nt, Human
cucaggccaaacucaccugcc

SEQ ID NO: 1502820 - RNA, 19 nt, Human
cucaggccaaacucaccug

SEQ ID NO: 1502821 - RNA, 20 nt, Human
cucaggccaaacucaccugc

SEQ ID NO: 1502822 - RNA, 11 nt, Human
cucaggccugg

SEQ ID NO: 1502823 - RNA, 16 nt, Human
cucaggccagcugcuu

SEQ ID NO: 1502824 - RNA, 17 nt, Human
cucaggccagcugcuug

SEQ ID NO: 1502825 - RNA, 18 nt, Human
cucaggccagcugcuugg

SEQ ID NO: 1502826 - RNA, 20 nt, Human
cucaggccagcugcuugggc

SEQ ID NO: 1502827 - RNA, 13 nt, Human
cucaggccugggg

SEQ ID NO: 1502828 - RNA, 19 nt, Human
cucagccucccgaauagcu

SEQ ID NO: 1502829 - RNA, 21 nt, Human
cucagccucccgaauagcugg

SEQ ID NO: 1502830 - RNA, 22 nt, Human
cucagccucccgaauagcuggg

SEQ ID NO: 1502831 - RNA, 23 nt, Human
cucagccucccgaauagcuggga

SEQ ID NO: 1502832 - RNA, 23 nt, Human
cucagaagacacugaugggcaac

SEQ ID NO: 1502833 - RNA, 17 nt, Human
cucaccuuucccaucuu

SEQ ID NO: 1502834 - RNA, 13 nt, Human
cucagaagacacu

SEQ ID NO: 1502835 - RNA, 15 nt, Human
cucagaagacacuga

SEQ ID NO: 1502836 - RNA, 17 nt, Human
cucagaagacacugaug

SEQ ID NO: 1502837 - RNA, 20 nt, Human
cucagaagacacugaugggc

SEQ ID NO: 1502838 - RNA, 22 nt, Human
cucagaagacacugaugggcaa

SEQ ID NO: 1502839 - RNA, 22 nt, Human
cucagucuggcccuuccuuuuc

SEQ ID NO: 1502840 - RNA, 15 nt, Human
cucaguccauagcag

SEQ ID NO: 1502841 - RNA, 17 nt, Human
cucaguccauagcagag

SEQ ID NO: 1502842 - RNA, 16 nt, Human
cucaguccaugaagau

SEQ ID NO: 1502843 - RNA, 23 nt, Human
cucaggugucccugcacuugcag

SEQ ID NO: 1502844 - RNA, 18 nt, Human
cuaucucauuuccaagca

SEQ ID NO: 1502845 - RNA, 13 nt, Human
cuaucucccccag

SEQ ID NO: 1502846 - RNA, 14 nt, Human
cuaucucccccagc

SEQ ID NO: 1502847 - RNA, 14 nt, Human
cuaugugagaccau

SEQ ID NO: 1502848 - RNA, 18 nt, Human
cuauguucuaagaaguga

SEQ ID NO: 1502849 - RNA, 14 nt, Human
cuauguugcccagg

SEQ ID NO: 1502850 - RNA, 17 nt, Human
cuaugugagcacaaagg

SEQ ID NO: 1502851 - RNA, 18 nt, Human
cuauguugcccaggcagg

SEQ ID NO: 1502852 - RNA, 19 nt, Human
cuauguugcccaggcaggu

SEQ ID NO: 1502853 - RNA, 21 nt, Human
cuauguugcccaggcaggucu

SEQ ID NO: 1502854 - RNA, 22 nt, Human
cuauguugcccaggcaggucuu

SEQ ID NO: 1502855 - RNA, 13 nt, Human
cuacaaacaaaau

SEQ ID NO: 1502856 - RNA, 15 nt, Human
cuacaaacaaaauuu

SEQ ID NO: 1502857 - RNA, 17 nt, Human
cuacaaacaaaauuucu

SEQ ID NO: 1502858 - RNA, 20 nt, Human
cuacaaacaaaauuucuauu

SEQ ID NO: 1502859 - RNA, 21 nt, Human
cuacaaacaaaauuucuauua

SEQ ID NO: 1502860 - RNA, 18 nt, Human
cucaauauuuuccaugaa

SEQ ID NO: 1502861 - RNA, 19 nt, Human
cucaauauuuuccaugaaa

SEQ ID NO: 1502862 - RNA, 22 nt, Human
cucaauauuuuccaugaaaaug

SEQ ID NO: 1502863 - RNA, 23 nt, Human
cucaauuauuuugcauuuuuucu

SEQ ID NO: 1502864 - RNA, 21 nt, Human
cucugcuccucuccccagcaa

SEQ ID NO: 1502865 - RNA, 17 nt, Human
cucugcacuccccugcu

SEQ ID NO: 1502866 - RNA, 18 nt, Human
cucugcacuccccugcug

SEQ ID NO: 1502867 - RNA, 21 nt, Human
cucugcugacagacacaggcc

SEQ ID NO: 1502868 - RNA, 22 nt, Human
cucugcugacagacacaggccc

SEQ ID NO: 1502869 - RNA, 23 nt, Human
cucugcugacagacacaggcccg

SEQ ID NO: 1502870 - RNA, 13 nt, Human
cucugcugcuggc

SEQ ID NO: 1502871 - RNA, 13 nt, Human
cucuguccuggga

SEQ ID NO: 1502872 - RNA, 23 nt, Human
cucuguccccuucucucaucucu

SEQ ID NO: 1502873 - RNA, 14 nt, Human
cucuguccccuucu

SEQ ID NO: 1502874 - RNA, 15 nt, Human
cucuguccccuucuc

SEQ ID NO: 1502875 - RNA, 17 nt, Human
cucuguccccuucucuc

SEQ ID NO: 1502876 - RNA, 18 nt, Human
cucuguccccuucucuca

SEQ ID NO: 1502877 - RNA, 21 nt, Human
cucuguccccuucucucaucu

SEQ ID NO: 1502878 - RNA, 16 nt, Human
cucuguacagagccca

SEQ ID NO: 1502879 - RNA, 16 nt, Human
cucugcugcuggcugg

SEQ ID NO: 1502880 - RNA, 14 nt, Human
cucugcugcuggcu

SEQ ID NO: 1502881 - RNA, 15 nt, Human
cucugcugcuggcug

SEQ ID NO: 1502882 - RNA, 14 nt, Human
cucuguacagagcc

SEQ ID NO: 1502883 - RNA, 15 nt, Human
cucuguacagagccc

SEQ ID NO: 1502884 - RNA, 13 nt, Human
cucuguacagagc

SEQ ID NO: 1502885 - RNA, 15 nt, Human
cucugcacuccccug

SEQ ID NO: 1502886 - RNA, 16 nt, Human
cucugcacuccccugc

SEQ ID NO: 1502887 - RNA, 20 nt, Human
cucugcacaagcugcacccu

SEQ ID NO: 1502888 - RNA, 21 nt, Human
cucugcacaagcugcacccuc

SEQ ID NO: 1502889 - RNA, 21 nt, Human
cucgugccaccccgagggcug

SEQ ID NO: 1502890 - RNA, 17 nt, Human
cucgguguggagaagcg

SEQ ID NO: 1502891 - RNA, 23 nt, Human
cucgguguggagaagcggcuggc

SEQ ID NO: 1502892 - RNA, 16 nt, Human
cucgguguggagaagc

SEQ ID NO: 1502893 - RNA, 17 nt, Human
cuccuuugugaggaagc

SEQ ID NO: 1502894 - RNA, 18 nt, Human
cuccuuugugaggaagcc

SEQ ID NO: 1502895 - RNA, 23 nt, Human
cuccuuugugaggaagccgcugg

SEQ ID NO: 1502896 - RNA, 16 nt, Human
cucuccccaugauguu

SEQ ID NO: 1502897 - RNA, 19 nt, Human
cucuauguucuaagaagug

SEQ ID NO: 1502898 - RNA, 13 nt, Human
cucucccccaccc

SEQ ID NO: 1502899 - RNA, 16 nt, Human
cucucccccacccccu

SEQ ID NO: 1502900 - RNA, 13 nt, Human
cucuccuccagag

SEQ ID NO: 1502901 - RNA, 15 nt, Human
cucuccuccagaguc

SEQ ID NO: 1502902 - RNA, 14 nt, Human
cucucuggccuucg

SEQ ID NO: 1502903 - RNA, 16 nt, Human
cucucuggccuucggc

SEQ ID NO: 1502904 - RNA, 16 nt, Human
cucuccuccagaguca

SEQ ID NO: 1502905 - RNA, 14 nt, Human
cuccuuguguuacu

SEQ ID NO: 1502906 - RNA, 15 nt, Human
cuccuuucaccacau

SEQ ID NO: 1502907 - RNA, 16 nt, Human
cuccuguaccucuuga

SEQ ID NO: 1502908 - RNA, 15 nt, Human
cuccucugcugcugg

SEQ ID NO: 1502909 - RNA, 13 nt, Human
cuccucugcugcu

SEQ ID NO: 1502910 - RNA, 14 nt, Human
cuccucugcugcug

SEQ ID NO: 1502911 - RNA, 19 nt, Human
cuccuggcccacugcaucg

SEQ ID NO: 1502912 - RNA, 19 nt, Human
cuccuggccucaagugauu

SEQ ID NO: 1502913 - RNA, 18 nt, Human
cuccugggcuaagugauc

SEQ ID NO: 1502914 - RNA, 23 nt, Human
cuccaggugcacaagcuccaagc

SEQ ID NO: 1502915 - RNA, 23 nt, Human
cuccaggcuccuuuagcgcccag

SEQ ID NO: 1502916 - RNA, 20 nt, Human
cuccaggcuguaucccauga

SEQ ID NO: 1502917 - RNA, 22 nt, Human
cuccaggcuguaucccaugagc

SEQ ID NO: 1502918 - RNA, 15 nt, Human
cucccaggcauuccc

SEQ ID NO: 1502919 - RNA, 20 nt, Human
cucccucuuucccucccuuc

SEQ ID NO: 1502920 - RNA, 15 nt, Human
caagaaaugaaagca

SEQ ID NO: 1502921 - RNA, 13 nt, Human
caagaaaugaaag

SEQ ID NO: 1502922 - RNA, 23 nt, Human
caagacgcugugcugcccugccc

SEQ ID NO: 1502923 - RNA, 21 nt, Human
caagacgcugugcugcccugc

SEQ ID NO: 1502924 - RNA, 22 nt, Human
caagacgcugugcugcccugcc

SEQ ID NO: 1502925 - RNA, 14 nt, Human
caagaccuucuccu

SEQ ID NO: 1502926 - RNA, 20 nt, Human
caagacgcugugcugcccug

SEQ ID NO: 1502927 - RNA, 13 nt, Human
caagaccuucucc

SEQ ID NO: 1502928 - RNA, 12 nt, Human
caagagggucug

SEQ ID NO: 1502929 - RNA, 16 nt, Human
caagagggucugagga

SEQ ID NO: 1502930 - RNA, 17 nt, Human
caagagggucugaggaa

SEQ ID NO: 1502931 - RNA, 16 nt, Human
caagcauuuagaugua

SEQ ID NO: 1502932 - RNA, 19 nt, Human
caagcauuuagauguauag

SEQ ID NO: 1502933 - RNA, 21 nt, Human
caagcauaccaacacgagcag

SEQ ID NO: 1502934 - RNA, 16 nt, Human
caagcauaccaacacg

SEQ ID NO: 1502935 - RNA, 14 nt, Human
caaggauccugagc

SEQ ID NO: 1502936 - RNA, 15 nt, Human
caaggauccugagcc

SEQ ID NO: 1502937 - RNA, 16 nt, Human
caaggauccugagcca

SEQ ID NO: 1502938 - RNA, 17 nt, Human
caaggauccugagccag

SEQ ID NO: 1502939 - RNA, 21 nt, Human
caaggcugggggaagaagcuc

SEQ ID NO: 1502940 - RNA, 13 nt, Human
caaggcugucaau

SEQ ID NO: 1502941 - RNA, 14 nt, Human
caaggcugucaauu

SEQ ID NO: 1502942 - RNA, 21 nt, Human
caaggcugucaauuacaggaa

SEQ ID NO: 1502943 - RNA, 22 nt, Human
caagugaaaaaggaggaagaga

SEQ ID NO: 1502944 - RNA, 23 nt, Human
caagugaaaaaggaggaagagaa

SEQ ID NO: 1502945 - RNA, 14 nt, Human
caagugagacccug

SEQ ID NO: 1502946 - RNA, 21 nt, Human
caagugauucuccugccucag

SEQ ID NO: 1502947 - RNA, 20 nt, Human
caagugauucuccugccuca

SEQ ID NO: 1502948 - RNA, 15 nt, Human
caagugagacccugu

SEQ ID NO: 1502949 - RNA, 19 nt, Human
caagugagacccugucuca

SEQ ID NO: 1502950 - RNA, 19 nt, Human
caagugauucuccugccuc

SEQ ID NO: 1502951 - RNA, 23 nt, Human
caaggggaauguuugccucugcc

SEQ ID NO: 1502952 - RNA, 17 nt, Human
caaggggcccaaauucu

SEQ ID NO: 1502953 - RNA, 13 nt, Human
caaggucauuuuu

SEQ ID NO: 1502954 - RNA, 13 nt, Human
caagggccuggcc

SEQ ID NO: 1502955 - RNA, 14 nt, Human
caagggccuggccu

SEQ ID NO: 1502956 - RNA, 15 nt, Human
caagggccuggccug

SEQ ID NO: 1502957 - RNA, 21 nt, Human
caaggggaauguuugccucug

SEQ ID NO: 1502958 - RNA, 16 nt, Human
caagggccuggccuga

SEQ ID NO: 1502959 - RNA, 17 nt, Human
caaccugauugugucuc

SEQ ID NO: 1502960 - RNA, 19 nt, Human
caaccugauugugucucuu

SEQ ID NO: 1502961 - RNA, 21 nt, Human
caaccugauugugucucuugg

SEQ ID NO: 1502962 - RNA, 16 nt, Human
caacugcauuggcuuu

SEQ ID NO: 1502963 - RNA, 17 nt, Human
caacugcaucaagaugu

SEQ ID NO: 1502964 - RNA, 20 nt, Human
caacugcaucaagaugugac

SEQ ID NO: 1502965 - RNA, 23 nt, Human
caacugcaucaagaugugacaug

SEQ ID NO: 1502966 - RNA, 16 nt, Human
caacauacucccaucu

SEQ ID NO: 1502967 - RNA, 14 nt, Human
caacauacucccau

SEQ ID NO: 1502968 - RNA, 15 nt, Human
caacauacucccauc

SEQ ID NO: 1502969 - RNA, 17 nt, Human
caaauuuacagagacag

SEQ ID NO: 1502970 - RNA, 23 nt, Human
caaauuuacagagacagaaagca

SEQ ID NO: 1502971 - RNA, 14 nt, Human
caacaggcugggcu

SEQ ID NO: 1502972 - RNA, 17 nt, Human
caacaggcugggcuuca

SEQ ID NO: 1502973 - RNA, 19 nt, Human
caaaguggugagaggcauc

SEQ ID NO: 1502974 - RNA, 20 nt, Human
caaaggguaucaggugcugc

SEQ ID NO: 1502975 - RNA, 21 nt, Human
caaaggguaucaggugcugcc

SEQ ID NO: 1502976 - RNA, 23 nt, Human
caaaggguaucaggugcugccau

SEQ ID NO: 1502977 - RNA, 16 nt, Human
caaaguggugagaggc

SEQ ID NO: 1502978 - RNA, 17 nt, Human
caaaguggugagaggca

SEQ ID NO: 1502979 - RNA, 20 nt, Human
caaaggagauuggaaggaac

SEQ ID NO: 1502980 - RNA, 14 nt, Human
caaaggagauugga

SEQ ID NO: 1502981 - RNA, 18 nt, Human
auuuuaauaauguuucaa

SEQ ID NO: 1502982 - RNA, 19 nt, Human
auuuuaauaauguuucaaa

SEQ ID NO: 1502983 - RNA, 14 nt, Human
caaagaaauguaag

SEQ ID NO: 1502984 - RNA, 14 nt, Human
caaagagguuuuaa

SEQ ID NO: 1502985 - RNA, 21 nt, Human
caaagagguuuuaaaaaaauc

SEQ ID NO: 1502986 - RNA, 20 nt, Human
caacaggcugggcuucagug

SEQ ID NO: 1502987 - RNA, 14 nt, Human
cacacccagcccac

SEQ ID NO: 1502988 - RNA, 20 nt, Human
cacacccagcccacuucugc

SEQ ID NO: 1502989 - RNA, 16 nt, Human
cacacagcucuguccu

SEQ ID NO: 1502990 - RNA, 21 nt, Human
cacaccagagcccaccuuggc

SEQ ID NO: 1502991 - RNA, 22 nt, Human
cacaccagagcccaccuuggcu

SEQ ID NO: 1502992 - RNA, 19 nt, Human
cacacagcaagucaggguu

SEQ ID NO: 1502993 - RNA, 13 nt, Human
cacacagcucugu

SEQ ID NO: 1502994 - RNA, 14 nt, Human
cacacagcucuguc

SEQ ID NO: 1502995 - RNA, 15 nt, Human
cacacagcucugucc

SEQ ID NO: 1502996 - RNA, 15 nt, Human
cacacaccagagccc

SEQ ID NO: 1502997 - RNA, 16 nt, Human
cacacaccagagccca

SEQ ID NO: 1502998 - RNA, 20 nt, Human
cacacaccagagcccaccuu

SEQ ID NO: 1502999 - RNA, 14 nt, Human
cacacacuuuggcu

SEQ ID NO: 1503000 - RNA, 13 nt, Human
cacaagaaaugaa

SEQ ID NO: 1503001 - RNA, 18 nt, Human
cacaagaaaugaaagcag

SEQ ID NO: 1503002 - RNA, 15 nt, Human
cacaagaaaugaaag

SEQ ID NO: 1503003 - RNA, 23 nt, Human
cacaagaaaugaaagcagggacu

SEQ ID NO: 1503004 - RNA, 23 nt, Human
cacaagacccaaaaggcagaagc

SEQ ID NO: 1503005 - RNA, 19 nt, Human
caaugguuugcaaggaagc

SEQ ID NO: 1503006 - RNA, 20 nt, Human
caaugguuugcaaggaagcc

SEQ ID NO: 1503007 - RNA, 14 nt, Human
caaugcacuuuguu

SEQ ID NO: 1503008 - RNA, 18 nt, Human
caaugguuuucuugugug

SEQ ID NO: 1503009 - RNA, 13 nt, Human
caaugguuugcaa

SEQ ID NO: 1503010 - RNA, 16 nt, Human
caaugguuugcaagga

SEQ ID NO: 1503011 - RNA, 17 nt, Human
caaugguuugcaaggaa

SEQ ID NO: 1503012 - RNA, 18 nt, Human
caaugguuugcaaggaag

SEQ ID NO: 1503013 - RNA, 17 nt, Human
cacaaacgggcucagca

SEQ ID NO: 1503014 - RNA, 14 nt, Human
caauaucagacuuu

SEQ ID NO: 1503015 - RNA, 21 nt, Human
caaugaccuuucaauaggaaa

SEQ ID NO: 1503016 - RNA, 13 nt, Human
caaugauggucac

SEQ ID NO: 1503017 - RNA, 15 nt, Human
caaugaccuuucaau

SEQ ID NO: 1503018 - RNA, 16 nt, Human
caaugaccuuucaaua

SEQ ID NO: 1503019 - RNA, 14 nt, Human
caaugaccuuucaa

SEQ ID NO: 1503020 - RNA, 14 nt, Human
caaugauggucacc

SEQ ID NO: 1503021 - RNA, 14 nt, Human
caaugcaaaccauc

SEQ ID NO: 1503022 - RNA, 21 nt, Human
caaugcaaaccaucauugaaa

SEQ ID NO: 1503023 - RNA, 22 nt, Human
caaugcaaaccaucauugaaau

SEQ ID NO: 1503024 - RNA, 23 nt, Human
caaugcaaaccaucauugaaauc

SEQ ID NO: 1503025 - RNA, 14 nt, Human
caaugcacugacau

SEQ ID NO: 1503026 - RNA, 13 nt, Human
caaugcacuuugu

SEQ ID NO: 1503027 - RNA, 17 nt, Human
cacaugaaguccaagca

SEQ ID NO: 1503028 - RNA, 20 nt, Human
cacaugaaguccaagcauuu

SEQ ID NO: 1503029 - RNA, 21 nt, Human
cacaguuuucugagaaagacu

SEQ ID NO: 1503030 - RNA, 22 nt, Human
cacaguuuucugagaaagacua

SEQ ID NO: 1503031 - RNA, 13 nt, Human
cacaugagcauca

SEQ ID NO: 1503032 - RNA, 17 nt, Human
cacaugagcaucaggcc

SEQ ID NO: 1503033 - RNA, 18 nt, Human
cacaugagcaucaggcca

SEQ ID NO: 1503034 - RNA, 19 nt, Human
cacaugagcaucaggccag

SEQ ID NO: 1503035 - RNA, 20 nt, Human
cacaugagcaucaggccagg

SEQ ID NO: 1503036 - RNA, 21 nt, Human
cacaugagcaucaggccaggc

SEQ ID NO: 1503037 - RNA, 19 nt, Human
cacaugcaaggucauuuuu

SEQ ID NO: 1503038 - RNA, 17 nt, Human
cacaugcaaggucauuu

SEQ ID NO: 1503039 - RNA, 20 nt, Human
cacaugcaaggucauuuuuu

SEQ ID NO: 1503040 - RNA, 18 nt, Human
cacaugcacgugugugca

SEQ ID NO: 1503041 - RNA, 16 nt, Human
cacauguccaagaagc

SEQ ID NO: 1503042 - RNA, 17 nt, Human
cacauguccaagaagcc

SEQ ID NO: 1503043 - RNA, 20 nt, Human
cacaugccucucucaggcca

SEQ ID NO: 1503044 - RNA, 21 nt, Human
cacaugccucucucaggccaa

SEQ ID NO: 1503045 - RNA, 19 nt, Human
cacagcccaaagaaggaaa

SEQ ID NO: 1503046 - RNA, 22 nt, Human
cacacggacacucaaaagcugg

SEQ ID NO: 1503047 - RNA, 14 nt, Human
cacaggcccggcuc

SEQ ID NO: 1503048 - RNA, 23 nt, Human
cacaguccuuaccagcagagcac

SEQ ID NO: 1503049 - RNA, 21 nt, Human
cacagcucuucuccaggcugu

SEQ ID NO: 1503050 - RNA, 19 nt, Human
cacagcucuucuccaggcu

SEQ ID NO: 1503051 - RNA, 20 nt, Human
cacagcucuucuccaggcug

SEQ ID NO: 1503052 - RNA, 13 nt, Human
caccaucaagcca

SEQ ID NO: 1503053 - RNA, 14 nt, Human
caccaucaagccac

SEQ ID NO: 1503054 - RNA, 15 nt, Human
caccaucaagccacc

SEQ ID NO: 1503055 - RNA, 18 nt, Human
caccaguuccuuucaaug

SEQ ID NO: 1503056 - RNA, 21 nt, Human
caccauauuaccacagacaua

SEQ ID NO: 1503057 - RNA, 12 nt, Human
caccagcagccu

SEQ ID NO: 1503058 - RNA, 16 nt, Human
caccagguagaacaca

SEQ ID NO: 1503059 - RNA, 16 nt, Human
caccaucaagccacca

SEQ ID NO: 1503060 - RNA, 17 nt, Human
caccaucaagccaccaa

SEQ ID NO: 1503061 - RNA, 19 nt, Human
caccaucaagccaccaaca

SEQ ID NO: 1503062 - RNA, 24 nt, Human
caccaucaagccaccaacauacuc

SEQ ID NO: 1503063 - RNA, 15 nt, Human
caccaucaugucugg

SEQ ID NO: 1503064 - RNA, 17 nt, Human
caccaucaugucuggcu

SEQ ID NO: 1503065 - RNA, 18 nt, Human
caccaucaugucuggcua

SEQ ID NO: 1503066 - RNA, 15 nt, Human
caccaagcccaguua

SEQ ID NO: 1503067 - RNA, 13 nt, Human
caccaagcccagu

SEQ ID NO: 1503068 - RNA, 12 nt, Human
caccaagcccag

SEQ ID NO: 1503069 - RNA, 23 nt, Human
cacauguccaagaagcccaggaa

SEQ ID NO: 1503070 - RNA, 17 nt, Human
caccaacgucugugcca

SEQ ID NO: 1503071 - RNA, 18 nt, Human
cacauguccaagaagccc

SEQ ID NO: 1503072 - RNA, 19 nt, Human
cacauguccaagaagccca

SEQ ID NO: 1503073 - RNA, 21 nt, Human
cacauguccaagaagcccagg

SEQ ID NO: 1503074 - RNA, 22 nt, Human
cacauguccaagaagcccagga

SEQ ID NO: 1503075 - RNA, 17 nt, Human
caccagacggggcugga

SEQ ID NO: 1503076 - RNA, 16 nt, Human
caccagacggggcugg

SEQ ID NO: 1503077 - RNA, 15 nt, Human
caccagagcccaccu

SEQ ID NO: 1503078 - RNA, 17 nt, Human
caccagagcccaccuug

SEQ ID NO: 1503079 - RNA, 18 nt, Human
caccagagcccaccuugg

SEQ ID NO: 1503080 - RNA, 20 nt, Human
caccagagcccaccuuggcu

SEQ ID NO: 1503081 - RNA, 22 nt, Human
caccagagcccaccuuggcuca

SEQ ID NO: 1503082 - RNA, 19 nt, Human
caccacacccagcccacuu

SEQ ID NO: 1503083 - RNA, 13 nt, Human
caccauucagguc

SEQ ID NO: 1503084 - RNA, 13 nt, Human
cacccaagggccu

SEQ ID NO: 1503085 - RNA, 18 nt, Human
uuuucuugccucuguccc

SEQ ID NO: 1503086 - RNA, 19 nt, Human
uuuucuugccucugucccc

SEQ ID NO: 1503087 - RNA, 21 nt, Human
uuuucuugccucuguccccuu

SEQ ID NO: 1503088 - RNA, 12 nt, Human
uuuuuucugaaa

SEQ ID NO: 1503089 - RNA, 20 nt, Human
uuuagaaacacaacuauauu

SEQ ID NO: 1503090 - RNA, 12 nt, Human
uuuagaaacaca

SEQ ID NO: 1503091 - RNA, 22 nt, Human
uuuacauggcuggagcuagaau

SEQ ID NO: 1503092 - RNA, 13 nt, Human
uuuacauuguaaa

SEQ ID NO: 1503093 - RNA, 20 nt, Human
uuuacauuguaaauaguauu

SEQ ID NO: 1503094 - RNA, 15 nt, Human
uuuacauuguaaaua

SEQ ID NO: 1503095 - RNA, 15 nt, Human
uuuacuuuguguuca

SEQ ID NO: 1503096 - RNA, 17 nt, Human
uuuacauggcuggagcu

SEQ ID NO: 1503097 - RNA, 20 nt, Human
uuguauuuuacuaauaaaau

SEQ ID NO: 1503098 - RNA, 14 nt, Human
uuuauugucaaagu

SEQ ID NO: 1503099 - RNA, 16 nt, Human
uuuauugucaaagugg

SEQ ID NO: 1503100 - RNA, 22 nt, Human
uuuauuguuuaaaaucauuucu

SEQ ID NO: 1503101 - RNA, 18 nt, Human
uuuaucuuugauucuccu

SEQ ID NO: 1503102 - RNA, 19 nt, Human
uuuaucuuugauucuccuu

SEQ ID NO: 1503103 - RNA, 18 nt, Human
uuuauaaacuuuaccuuu

SEQ ID NO: 1503104 - RNA, 21 nt, Human
uuuaucgucacugcuuaacuu

SEQ ID NO: 1503105 - RNA, 16 nt, Human
uuuauaaacuuuaccu

SEQ ID NO: 1503106 - RNA, 16 nt, Human
uuuaucgucacugcuu

SEQ ID NO: 1503107 - RNA, 14 nt, Human
uuuauaaacuuuac

SEQ ID NO: 1503108 - RNA, 16 nt, Human
uuucuaggacugaauu

SEQ ID NO: 1503109 - RNA, 22 nt, Human
uuucuccccugcccccaggacu

SEQ ID NO: 1503110 - RNA, 23 nt, Human
uuucuccccugcccccaggacug

SEQ ID NO: 1503111 - RNA, 24 nt, Human
uuucuccccugcccccaggacugg

SEQ ID NO: 1503112 - RNA, 15 nt, Human
uuucuagccagagga

SEQ ID NO: 1503113 - RNA, 22 nt, Human
uuucugagaaagacuauucaaa

SEQ ID NO: 1503114 - RNA, 18 nt, Human
uuucuaaaggcuaccuuu

SEQ ID NO: 1503115 - RNA, 14 nt, Human
uuucuaaaggcuac

SEQ ID NO: 1503116 - RNA, 17 nt, Human
uuucuaaagcugccagc

SEQ ID NO: 1503117 - RNA, 22 nt, Human
uuuccaggcugguucggauuug

SEQ ID NO: 1503118 - RNA, 15 nt, Human
uuuccaggcugguuc

SEQ ID NO: 1503119 - RNA, 22 nt, Human
uuuccucaaaacuucagacaua

SEQ ID NO: 1503120 - RNA, 21 nt, Human
uuuccucuuuggucuacacug

SEQ ID NO: 1503121 - RNA, 15 nt, Human
uuucagauaaucaca

SEQ ID NO: 1503122 - RNA, 21 nt, Human
uuucaaugguuugcaaggaag

SEQ ID NO: 1503123 - RNA, 15 nt, Human
uuucagcagcugcag

SEQ ID NO: 1503124 - RNA, 21 nt, Human
uuucagauaaucacaauacau

SEQ ID NO: 1503125 - RNA, 20 nt, Human
uuuauuuguuugugcauuug

SEQ ID NO: 1503126 - RNA, 13 nt, Human
uuuauuucuuaaa

SEQ ID NO: 1503127 - RNA, 20 nt, Human
uuucaauaggaaaaacugau

SEQ ID NO: 1503128 - RNA, 22 nt, Human
uuucaauaggaaaaacugauuu

SEQ ID NO: 1503129 - RNA, 13 nt, Human
uuuccaggaaggc

SEQ ID NO: 1503130 - RNA, 15 nt, Human
uuuccaaaguacacu

SEQ ID NO: 1503131 - RNA, 12 nt, Human
uuuccaaaguac

SEQ ID NO: 1503132 - RNA, 14 nt, Human
uuuccaaaauaauu

SEQ ID NO: 1503133 - RNA, 15 nt, Human
uuucagccaagaauu

SEQ ID NO: 1503134 - RNA, 16 nt, Human
uuucagccaagaauuc

SEQ ID NO: 1503135 - RNA, 22 nt, Human
uuucauugcugggcuugucugu

SEQ ID NO: 1503136 - RNA, 15 nt, Human
uuugagcagggcuca

SEQ ID NO: 1503137 - RNA, 13 nt, Human
uuugagugccuua

SEQ ID NO: 1503138 - RNA, 22 nt, Human
uuugaggucuguucuuuccaaa

SEQ ID NO: 1503139 - RNA, 17 nt, Human
uuugaggucuguucuuu

SEQ ID NO: 1503140 - RNA, 14 nt, Human
uuugauauaugaaa

SEQ ID NO: 1503141 - RNA, 18 nt, Human
uuugauaguauugugcau

SEQ ID NO: 1503142 - RNA, 14 nt, Human
uuugcagacaggca

SEQ ID NO: 1503143 - RNA, 23 nt, Human
uuuggaacaagaugguucuagca

SEQ ID NO: 1503144 - RNA, 22 nt, Human
uuugccauguuggccaggcugg

SEQ ID NO: 1503145 - RNA, 18 nt, Human
uuugccauguuggccagg

SEQ ID NO: 1503146 - RNA, 21 nt, Human
uuugcauagauucccugagca

SEQ ID NO: 1503147 - RNA, 21 nt, Human
uuuguauaaaauaauuuuuau

SEQ ID NO: 1503148 - RNA, 22 nt, Human
uuuguaaauuaacuuuuauaaa

SEQ ID NO: 1503149 - RNA, 17 nt, Human
uuuguaaauuaacuuuu

SEQ ID NO: 1503150 - RNA, 16 nt, Human
uuuguaaauuaacuuu

SEQ ID NO: 1503151 - RNA, 15 nt, Human
uuuguaaauuaacuu

SEQ ID NO: 1503152 - RNA, 13 nt, Human
uuuguccccaccg

SEQ ID NO: 1503153 - RNA, 21 nt, Human
uuuguccccaccgcagacagg

SEQ ID NO: 1503154 - RNA, 16 nt, Human
uuuguucauacauauu

SEQ ID NO: 1503155 - RNA, 13 nt, Human
uuuguucauacau

SEQ ID NO: 1503156 - RNA, 16 nt, Human
uuuguuccccuccucc

SEQ ID NO: 1503157 - RNA, 18 nt, Human
uuuguuccccuccuccac

SEQ ID NO: 1503158 - RNA, 12 nt, Human
uuuguuccccuc

SEQ ID NO: 1503159 - RNA, 13 nt, Human
uuuguuccccucc

SEQ ID NO: 1503160 - RNA, 15 nt, Human
uuuguuccccuccuc

SEQ ID NO: 1503161 - RNA, 22 nt, Human
uuuuacauaaauuuaguauuuu

SEQ ID NO: 1503162 - RNA, 17 nt, Human
uuuuaauuugguuuuca

SEQ ID NO: 1503163 - RNA, 13 nt, Human
uuuuaauuugaua

SEQ ID NO: 1503164 - RNA, 21 nt, Human
uuuuaauuugguuuucacauu

SEQ ID NO: 1503165 - RNA, 15 nt, Human
uuuuauaugcuucug

SEQ ID NO: 1503166 - RNA, 20 nt, Human
uuuuauaugcuucuguuuua

SEQ ID NO: 1503167 - RNA, 20 nt, Human
uuuuauaucaauuuaaaaaa

SEQ ID NO: 1503168 - RNA, 10 nt, Human
uuuuauauuu

SEQ ID NO: 1503169 - RNA, 18 nt, Human
uuuuaucgucacugcuua

SEQ ID NO: 1503170 - RNA, 19 nt, Human
uuuuaucgucacugcuuaa

SEQ ID NO: 1503171 - RNA, 13 nt, Human
uuuuccugaaaac

SEQ ID NO: 1503172 - RNA, 22 nt, Human
uuuucagaaaauauuauguguu

SEQ ID NO: 1503173 - RNA, 16 nt, Human
uuuucagaaaauauua

SEQ ID NO: 1503174 - RNA, 18 nt, Human
uuuuccaugaguccccug

SEQ ID NO: 1503175 - RNA, 19 nt, Human
uuuuccaugaguccccugu

SEQ ID NO: 1503176 - RNA, 15 nt, Human
uuuuccuucagugcc

SEQ ID NO: 1503177 - RNA, 17 nt, Human
uuuucuugcaugaggcu

SEQ ID NO: 1503178 - RNA, 15 nt, Human
uuuucagaaaauauu

SEQ ID NO: 1503179 - RNA, 16 nt, Human
uuuucacauaucuagu

SEQ ID NO: 1503180 - RNA, 13 nt, Human
uuuucacauaucu

SEQ ID NO: 1503181 - RNA, 15 nt, Human
uuuucacaguucucu

SEQ ID NO: 1503182 - RNA, 19 nt, Human
uucaaugccccugaauuua

SEQ ID NO: 1503183 - RNA, 20 nt, Human
uucaaugguuugcaaggaag

SEQ ID NO: 1503184 - RNA, 22 nt, Human
uucaaugguuugcaaggaagcc

SEQ ID NO: 1503185 - RNA, 23 nt, Human
uucaaugguuugcaaggaagcca

SEQ ID NO: 1503186 - RNA, 18 nt, Human
uucaauucucauuuguca

SEQ ID NO: 1503187 - RNA, 21 nt, Human
uucaacagguuuuccugaaga

SEQ ID NO: 1503188 - RNA, 13 nt, Human
uuacgugaguccu

SEQ ID NO: 1503189 - RNA, 14 nt, Human
uuacgugaguccug

SEQ ID NO: 1503190 - RNA, 13 nt, Human
uucaaagauauuu

SEQ ID NO: 1503191 - RNA, 23 nt, Human
uucagcuccagcucaccagcccc

SEQ ID NO: 1503192 - RNA, 17 nt, Human
uucagcucugcaagaau

SEQ ID NO: 1503193 - RNA, 24 nt, Human
uucagcucugcaagaauugaagca

SEQ ID NO: 1503194 - RNA, 21 nt, Human
uucagcugguugagguuucaa

SEQ ID NO: 1503195 - RNA, 16 nt, Human
uucaggaagcucaggg

SEQ ID NO: 1503196 - RNA, 18 nt, Human
uucagcugcauacaguuu

SEQ ID NO: 1503197 - RNA, 17 nt, Human
uucagcugacuuuucug

SEQ ID NO: 1503198 - RNA, 20 nt, Human
uucaggaagcucagggccug

SEQ ID NO: 1503199 - RNA, 17 nt, Human
uucaggaagcucagggc

SEQ ID NO: 1503200 - RNA, 19 nt, Human
uucaggaagcucagggccu

SEQ ID NO: 1503201 - RNA, 12 nt, Human
uucaccccuccc

SEQ ID NO: 1503202 - RNA, 15 nt, Human
uucaccccucccuuu

SEQ ID NO: 1503203 - RNA, 14 nt, Human
uucacucuccuugg

SEQ ID NO: 1503204 - RNA, 15 nt, Human
uucagagacuccugc

SEQ ID NO: 1503205 - RNA, 19 nt, Human
uucagagacuccugcaggc

SEQ ID NO: 1503206 - RNA, 15 nt, Human
uuccaugaaaaugca

SEQ ID NO: 1503207 - RNA, 24 nt, Human
uuccaugaaaaugcaacaacaugu

SEQ ID NO: 1503208 - RNA, 17 nt, Human
uuccaugaguccccugu

SEQ ID NO: 1503209 - RNA, 19 nt, Human
uuccacuuauaggaauuga

SEQ ID NO: 1503210 - RNA, 21 nt, Human
uuccauccuagucacuaccuu

SEQ ID NO: 1503211 - RNA, 19 nt, Human
uucauuuaggugaggaagc

SEQ ID NO: 1503212 - RNA, 18 nt, Human
uucaugaaagauucaaug

SEQ ID NO: 1503213 - RNA, 12 nt, Human
uucaucuugaau

SEQ ID NO: 1503214 - RNA, 17 nt, Human
uucaucuugaauuguaa

SEQ ID NO: 1503215 - RNA, 20 nt, Human
uucaucugacuaugacauaa

SEQ ID NO: 1503216 - RNA, 17 nt, Human
uucaucugacuaugaca

SEQ ID NO: 1503217 - RNA, 20 nt, Human
uucaucuuccaacucaaacu

SEQ ID NO: 1503218 - RNA, 11 nt, Human
uucaucuugaa

SEQ ID NO: 1503219 - RNA, 13 nt, Human
uucauaaugacuu

SEQ ID NO: 1503220 - RNA, 23 nt, Human
uucauaaugacuuaagcacacuu

SEQ ID NO: 1503221 - RNA, 19 nt, Human
uucagugccuuauggaaca

SEQ ID NO: 1503222 - RNA, 21 nt, Human
uucagugccuuauggaacacu

SEQ ID NO: 1503223 - RNA, 13 nt, Human
uucaguggcagcu

SEQ ID NO: 1503224 - RNA, 19 nt, Human
uucccuuugacgccauccc

SEQ ID NO: 1503225 - RNA, 22 nt, Human
uuccccacuugagaauuacccu

SEQ ID NO: 1503226 - RNA, 22 nt, Human
uuccccagcaugcaccacgggc

SEQ ID NO: 1503227 - RNA, 12 nt, Human
uuccuagugaaa

SEQ ID NO: 1503228 - RNA, 23 nt, Human
uuccucauaguaugguggcuggg

SEQ ID NO: 1503229 - RNA, 22 nt, Human
uuccucccucccucuuucccuc

SEQ ID NO: 1503230 - RNA, 12 nt, Human
uuccucccuccc

SEQ ID NO: 1503231 - RNA, 19 nt, Human
uuccucccucccucuuucc

SEQ ID NO: 1503232 - RNA, 21 nt, Human
uuccucccucccucuuucccu

SEQ ID NO: 1503233 - RNA, 17 nt, Human
uuccuucugugaaagua

SEQ ID NO: 1503234 - RNA, 20 nt, Human
uuccuucugugaaaguacau

SEQ ID NO: 1503235 - RNA, 16 nt, Human
uuccuucagugccuua

SEQ ID NO: 1503236 - RNA, 19 nt, Human
uuccuucagugccuuaugg

SEQ ID NO: 1503237 - RNA, 23 nt, Human
uuccuucagugccuuauggaaca

SEQ ID NO: 1503238 - RNA, 19 nt, Human
uuccuucauucaacccacc

SEQ ID NO: 1503239 - RNA, 22 nt, Human
uucggccuccauccugaggcuc

SEQ ID NO: 1503240 - RNA, 18 nt, Human
uucggccuccauccugag

SEQ ID NO: 1503241 - RNA, 19 nt, Human
uucggccuccauccugagg

SEQ ID NO: 1503242 - RNA, 16 nt, Human
uucuaaaggcuaccuu

SEQ ID NO: 1503243 - RNA, 18 nt, Human
uucuaaaggcuaccuuug

SEQ ID NO: 1503244 - RNA, 17 nt, Human
uucuaaaggcuaccuuu

SEQ ID NO: 1503245 - RNA, 19 nt, Human
uucuaaaggcuaccuuugu

SEQ ID NO: 1503246 - RNA, 14 nt, Human
uucucugauacaga

SEQ ID NO: 1503247 - RNA, 15 nt, Human
uucucugauacagaa

SEQ ID NO: 1503248 - RNA, 16 nt, Human
uucucugauacagaaa

SEQ ID NO: 1503249 - RNA, 17 nt, Human
uucucugauacagaaaa

SEQ ID NO: 1503250 - RNA, 21 nt, Human
uucugacccaugcugcccugu

SEQ ID NO: 1503251 - RNA, 18 nt, Human
uucugacccaugcugccc

SEQ ID NO: 1503252 - RNA, 20 nt, Human
uucugacccaugcugcccug

SEQ ID NO: 1503253 - RNA, 23 nt, Human
uucucuccucuccccaugauguu

SEQ ID NO: 1503254 - RNA, 18 nt, Human
uucucuccagccccugga

SEQ ID NO: 1503255 - RNA, 16 nt, Human
uucuccacccugcucu

SEQ ID NO: 1503256 - RNA, 11 nt, Human
uucuccaggcu

SEQ ID NO: 1503257 - RNA, 16 nt, Human
uucuccaagcaggaca

SEQ ID NO: 1503258 - RNA, 13 nt, Human
uucuccacccugc

SEQ ID NO: 1503259 - RNA, 18 nt, Human
uucucaucuuucuugauc

SEQ ID NO: 1503260 - RNA, 15 nt, Human
uucucaucuuucuug

SEQ ID NO: 1503261 - RNA, 14 nt, Human
uucuauuguuucuu

SEQ ID NO: 1503262 - RNA, 17 nt, Human
uucuaugacacaugcaa

SEQ ID NO: 1503263 - RNA, 16 nt, Human
uucuaugacacaugca

SEQ ID NO: 1503264 - RNA, 14 nt, Human
uucugagcauuuaa

SEQ ID NO: 1503265 - RNA, 15 nt, Human
uucugagaaagacua

SEQ ID NO: 1503266 - RNA, 17 nt, Human
uucuguccgagcuuuga

SEQ ID NO: 1503267 - RNA, 21 nt, Human
uucuguccgagcuuugaaaau

SEQ ID NO: 1503268 - RNA, 19 nt, Human
uucuguccuacucuguguc

SEQ ID NO: 1503269 - RNA, 17 nt, Human
uucuguccuacucugug

SEQ ID NO: 1503270 - RNA, 23 nt, Human
uucuguggguuucuaaagcugcc

SEQ ID NO: 1503271 - RNA, 16 nt, Human
uucuugguuuguaaau

SEQ ID NO: 1503272 - RNA, 13 nt, Human
uucuugguuugua

SEQ ID NO: 1503273 - RNA, 18 nt, Human
uucuugguuuguaaauua

SEQ ID NO: 1503274 - RNA, 17 nt, Human
uucuugguuuguaaauu

SEQ ID NO: 1503275 - RNA, 23 nt, Human
uucuugguuuguaaauuaacuuu

SEQ ID NO: 1503276 - RNA, 15 nt, Human
uucuuauuucauuuc

SEQ ID NO: 1503277 - RNA, 11 nt, Human
uucuguucuuu

SEQ ID NO: 1503278 - RNA, 19 nt, Human
uucuuauuuaaugaaagac

SEQ ID NO: 1503279 - RNA, 23 nt, Human
uucuuauuuaaugaaagacugua

SEQ ID NO: 1503280 - RNA, 19 nt, Human
uugaacucuucaaucucuu

SEQ ID NO: 1503281 - RNA, 16 nt, Human
uugaacugauaaagau

SEQ ID NO: 1503282 - RNA, 22 nt, Human
uugaacuuugaccucugcagca

SEQ ID NO: 1503283 - RNA, 19 nt, Human
uugaagacuuuucuuucag

SEQ ID NO: 1503284 - RNA, 17 nt, Human
uugaagacagagcuaca

SEQ ID NO: 1503285 - RNA, 21 nt, Human
uugaaucucauaauuuauaca

SEQ ID NO: 1503286 - RNA, 15 nt, Human
uugaaucucauaauu

SEQ ID NO: 1503287 - RNA, 18 nt, Human
uucuuuauaauucuacuu

SEQ ID NO: 1503288 - RNA, 19 nt, Human
uugaaaacacuguucucug

SEQ ID NO: 1503289 - RNA, 21 nt, Human
uugaaaacacuguucucugcc

SEQ ID NO: 1503290 - RNA, 22 nt, Human
uugaaaacacuguucucugccc

SEQ ID NO: 1503291 - RNA, 23 nt, Human
uugaaacugagaugugaacacau

SEQ ID NO: 1503292 - RNA, 18 nt, Human
uugaaaagacuccaaaga

SEQ ID NO: 1503293 - RNA, 22 nt, Human
uugaaaagacuccaaagaaaug

SEQ ID NO: 1503294 - RNA, 23 nt, Human
uugaaaagacuccaaagaaaugu

SEQ ID NO: 1503295 - RNA, 14 nt, Human
uugacgccauccca

SEQ ID NO: 1503296 - RNA, 15 nt, Human
uugacgccaucccag

SEQ ID NO: 1503297 - RNA, 22 nt, Human
uugacgccaucccagccccaau

SEQ ID NO: 1503298 - RNA, 22 nt, Human
uugaccugaggcccuucucucc

SEQ ID NO: 1503299 - RNA, 12 nt, Human
uugaccugaggc

SEQ ID NO: 1503300 - RNA, 19 nt, Human
uugaccugaggcccuucuc

SEQ ID NO: 1503301 - RNA, 20 nt, Human
uugaccgugaggccagagac

SEQ ID NO: 1503302 - RNA, 21 nt, Human
uugaccgugaggccagagaca

SEQ ID NO: 1503303 - RNA, 15 nt, Human
uugaccucaggugau

SEQ ID NO: 1503304 - RNA, 21 nt, Human
uugaccucaggugauccaccc

SEQ ID NO: 1503305 - RNA, 14 nt, Human
uugaggacacugau

SEQ ID NO: 1503306 - RNA, 15 nt, Human
uugaggacacugaua

SEQ ID NO: 1503307 - RNA, 19 nt, Human
uugauagcacagacccugc

SEQ ID NO: 1503308 - RNA, 20 nt, Human
uugauagcacagacccugcc

SEQ ID NO: 1503309 - RNA, 12 nt, Human
uugaugaagaag

SEQ ID NO: 1503310 - RNA, 13 nt, Human
uugaugaagaagu

SEQ ID NO: 1503311 - RNA, 21 nt, Human
uugauagcacagacccugccc

SEQ ID NO: 1503312 - RNA, 23 nt, Human
uugauagcacagacccugcccug

SEQ ID NO: 1503313 - RNA, 18 nt, Human
uugauuuccguuaaaaua

SEQ ID NO: 1503314 - RNA, 14 nt, Human
uugcaacaggcugg

SEQ ID NO: 1503315 - RNA, 17 nt, Human
uugcaacaggcugggcu

SEQ ID NO: 1503316 - RNA, 18 nt, Human
uugcauagauucccugag

SEQ ID NO: 1503317 - RNA, 16 nt, Human
uugcagacaggcaagc

SEQ ID NO: 1503318 - RNA, 22 nt, Human
uugcagacaggcaagcaccucc

SEQ ID NO: 1503319 - RNA, 16 nt, Human
uuggguggaugccugg

SEQ ID NO: 1503320 - RNA, 22 nt, Human
uuggcuuuggguugcaggaccu

SEQ ID NO: 1503321 - RNA, 16 nt, Human
uugggaggccauuugu

SEQ ID NO: 1503322 - RNA, 12 nt, Human
uugggaggcuga

SEQ ID NO: 1503323 - RNA, 13 nt, Human
uuggcauucccca

SEQ ID NO: 1503324 - RNA, 14 nt, Human
uuggccaggcuggu

SEQ ID NO: 1503325 - RNA, 24 nt, Human
uuggccaaagccaaagcuaggccu

SEQ ID NO: 1503326 - RNA, 18 nt, Human
uuggcugggggccucagu

SEQ ID NO: 1503327 - RNA, 21 nt, Human
uuggcugggggccucagugcc

SEQ ID NO: 1503328 - RNA, 22 nt, Human
uuggcugggggccucagugcca

SEQ ID NO: 1503329 - RNA, 16 nt, Human
uuguaaaggaauuuaa

SEQ ID NO: 1503330 - RNA, 22 nt, Human
uuggucccccuuccauggacuu

SEQ ID NO: 1503331 - RNA, 12 nt, Human
uugguccugcug

SEQ ID NO: 1503332 - RNA, 13 nt, Human
uugguccugcugc

SEQ ID NO: 1503333 - RNA, 11 nt, Human
uuguaaaugug

SEQ ID NO: 1503334 - RNA, 14 nt, Human
uuguaaaugugcuu

SEQ ID NO: 1503335 - RNA, 18 nt, Human
uuguaaaugugcuuuuaa

SEQ ID NO: 1503336 - RNA, 12 nt, Human
uuguacagacaa

SEQ ID NO: 1503337 - RNA, 13 nt, Human
uuguacagacaac

SEQ ID NO: 1503338 - RNA, 19 nt, Human
uuguacacaccuuauauuu

SEQ ID NO: 1503339 - RNA, 21 nt, Human
uuguauucucuccuguaccuc

SEQ ID NO: 1503340 - RNA, 14 nt, Human
uuguacauaaugcg

SEQ ID NO: 1503341 - RNA, 14 nt, Human
uuguagagccaggg

SEQ ID NO: 1503342 - RNA, 15 nt, Human
uuguagagccagggu

SEQ ID NO: 1503343 - RNA, 21 nt, Human
uugcguggaauugugcugagu

SEQ ID NO: 1503344 - RNA, 20 nt, Human
uugcugauggugcaaugacc

SEQ ID NO: 1503345 - RNA, 22 nt, Human
uugcugauggugcaaugaccuu

SEQ ID NO: 1503346 - RNA, 17 nt, Human
uugccucuguccccuuc

SEQ ID NO: 1503347 - RNA, 18 nt, Human
uugccucuguccccuucu

SEQ ID NO: 1503348 - RNA, 19 nt, Human
uugccucuguccccuucuc

SEQ ID NO: 1503349 - RNA, 20 nt, Human
uugccucuguccccuucucu

SEQ ID NO: 1503350 - RNA, 16 nt, Human
uugccucugccucuga

SEQ ID NO: 1503351 - RNA, 18 nt, Human
uugccucugccucugaca

SEQ ID NO: 1503352 - RNA, 11 nt, Human
uugccucugcc

SEQ ID NO: 1503353 - RNA, 14 nt, Human
uugccucugccucu

SEQ ID NO: 1503354 - RNA, 18 nt, Human
uugccagucaccccggcc

SEQ ID NO: 1503355 - RNA, 23 nt, Human
uugcccacgcuggagugcaguga

SEQ ID NO: 1503356 - RNA, 11 nt, Human
uugcccaggca

SEQ ID NO: 1503357 - RNA, 20 nt, Human
uugcuggggccgaaagaaca

SEQ ID NO: 1503358 - RNA, 11 nt, Human
uuggaaggaac

SEQ ID NO: 1503359 - RNA, 19 nt, Human
uuggaaggaacguccccug

SEQ ID NO: 1503360 - RNA, 14 nt, Human
uuggauuguccccg

SEQ ID NO: 1503361 - RNA, 17 nt, Human
uuggcaaaaaggcagga

SEQ ID NO: 1503362 - RNA, 15 nt, Human
uuggacccugaggcc

SEQ ID NO: 1503363 - RNA, 17 nt, Human
uguagauaauacaguuc

SEQ ID NO: 1503364 - RNA, 19 nt, Human
uguacugcauaugaaagga

SEQ ID NO: 1503365 - RNA, 17 nt, Human
uguacgucugacaggca

SEQ ID NO: 1503366 - RNA, 12 nt, Human
uguacuacaauu

SEQ ID NO: 1503367 - RNA, 14 nt, Human
uguaccucuugagc

SEQ ID NO: 1503368 - RNA, 22 nt, Human
uguaccucuugagccuugaacu

SEQ ID NO: 1503369 - RNA, 23 nt, Human
uguaccucuugagccuugaacuu

SEQ ID NO: 1503370 - RNA, 15 nt, Human
uguaccgcaauguga

SEQ ID NO: 1503371 - RNA, 15 nt, Human
uguaaucacagcuac

SEQ ID NO: 1503372 - RNA, 17 nt, Human
uguaaauuaacuuuuau

SEQ ID NO: 1503373 - RNA, 16 nt, Human
uguaaauuaacuuuua

SEQ ID NO: 1503374 - RNA, 15 nt, Human
uguaaauuaacuuuu

SEQ ID NO: 1503375 - RNA, 14 nt, Human
uguaaauuaacuuu

SEQ ID NO: 1503376 - RNA, 13 nt, Human
uguaaauuaacuu

SEQ ID NO: 1503377 - RNA, 19 nt, Human
uguauugcauauauacaua

SEQ ID NO: 1503378 - RNA, 19 nt, Human
uguaucccaugagccucag

SEQ ID NO: 1503379 - RNA, 23 nt, Human
uguaucccaugagccucagcauc

SEQ ID NO: 1503380 - RNA, 17 nt, Human
uguagcacugacagauu

SEQ ID NO: 1503381 - RNA, 22 nt, Human
uguagcacugacagauuuccau

SEQ ID NO: 1503382 - RNA, 16 nt, Human
uguagcacugacagau

SEQ ID NO: 1503383 - RNA, 15 nt, Human
uguauaauauuuuua

SEQ ID NO: 1503384 - RNA, 23 nt, Human
ugucccaaaaagaaaggagggga

SEQ ID NO: 1503385 - RNA, 18 nt, Human
uguauuuguuaaugguuu

SEQ ID NO: 1503386 - RNA, 20 nt, Human
uguauuuguuaaugguuuga

SEQ ID NO: 1503387 - RNA, 12 nt, Human
ugucagugugac

SEQ ID NO: 1503388 - RNA, 20 nt, Human
ugucagugugacugaucucu

SEQ ID NO: 1503389 - RNA, 21 nt, Human
ugugauacaaugcugugcccu

SEQ ID NO: 1503390 - RNA, 15 nt, Human
ugugagucaccaagc

SEQ ID NO: 1503391 - RNA, 18 nt, Human
ugugaguacuacaguccu

SEQ ID NO: 1503392 - RNA, 19 nt, Human
ugugaguacuacaguccuc

SEQ ID NO: 1503393 - RNA, 20 nt, Human
ugugaguacuacaguccucc

SEQ ID NO: 1503394 - RNA, 23 nt, Human
ugugaguacuacaguccucccau

SEQ ID NO: 1503395 - RNA, 17 nt, Human
ugugaggguccugcagc

SEQ ID NO: 1503396 - RNA, 21 nt, Human
ugugacaaggauugcuacugu

SEQ ID NO: 1503397 - RNA, 15 nt, Human
ugugacauguuuuau

SEQ ID NO: 1503398 - RNA, 22 nt, Human
ugugaccacugcagaagacagu

SEQ ID NO: 1503399 - RNA, 13 nt, Human
ugugaaaggaaag

SEQ ID NO: 1503400 - RNA, 14 nt, Human
ugugaaaggaaaga

SEQ ID NO: 1503401 - RNA, 20 nt, Human
ugugaaguuuacauuguaaa

SEQ ID NO: 1503402 - RNA, 19 nt, Human
ugucuuuggacccugaggc

SEQ ID NO: 1503403 - RNA, 22 nt, Human
ugucuuuggacccugaggccca

SEQ ID NO: 1503404 - RNA, 18 nt, Human
ugucuuuggacccugagg

SEQ ID NO: 1503405 - RNA, 13 nt, Human
uguccccaccgca

SEQ ID NO: 1503406 - RNA, 21 nt, Human
ugucucaguccaugaagaugu

SEQ ID NO: 1503407 - RNA, 22 nt, Human
ugucucaguccaugaagaugua

SEQ ID NO: 1503408 - RNA, 15 nt, Human
ugugggucaaggaau

SEQ ID NO: 1503409 - RNA, 23 nt, Human
uguggggccaugccuccucagga

SEQ ID NO: 1503410 - RNA, 12 nt, Human
ugugggaagggg

SEQ ID NO: 1503411 - RNA, 15 nt, Human
uguggacacagcucu

SEQ ID NO: 1503412 - RNA, 16 nt, Human
uguggacacagcucuu

SEQ ID NO: 1503413 - RNA, 19 nt, Human
uguggagaagccacaggcc

SEQ ID NO: 1503414 - RNA, 12 nt, Human
uguggagaagcg

SEQ ID NO: 1503415 - RNA, 21 nt, Human
uguggagaagcggcuggcagc

SEQ ID NO: 1503416 - RNA, 14 nt, Human
uguggacacagcuc

SEQ ID NO: 1503417 - RNA, 14 nt, Human
ugugcacguacaca

SEQ ID NO: 1503418 - RNA, 22 nt, Human
ugugcacaugcacgugugugca

SEQ ID NO: 1503419 - RNA, 19 nt, Human
ugugcauagagccacguau

SEQ ID NO: 1503420 - RNA, 13 nt, Human
ugugccucuggga

SEQ ID NO: 1503421 - RNA, 15 nt, Human
ugugccucugggacu

SEQ ID NO: 1503422 - RNA, 16 nt, Human
ugugccucugggacug

SEQ ID NO: 1503423 - RNA, 17 nt, Human
ugugccucugggacugg

SEQ ID NO: 1503424 - RNA, 20 nt, Human
ugugcgugcauguguguuca

SEQ ID NO: 1503425 - RNA, 19 nt, Human
uguugaagagguuuuaaag

SEQ ID NO: 1503426 - RNA, 21 nt, Human
uguuggagaagaacugaaauc

SEQ ID NO: 1503427 - RNA, 11 nt, Human
uguuggccagg

SEQ ID NO: 1503428 - RNA, 14 nt, Human
uguuggccaggcug

SEQ ID NO: 1503429 - RNA, 15 nt, Human
uguuguuuuuggaug

SEQ ID NO: 1503430 - RNA, 14 nt, Human
uguuuaaaaucauu

SEQ ID NO: 1503431 - RNA, 13 nt, Human
uguuuaaaaucau

SEQ ID NO: 1503432 - RNA, 20 nt, Human
uguucaugaaagauucaaug

SEQ ID NO: 1503433 - RNA, 16 nt, Human
uguucucugaggacac

SEQ ID NO: 1503434 - RNA, 18 nt, Human
uguucucugaggacacua

SEQ ID NO: 1503435 - RNA, 12 nt, Human
uguucucugccc

SEQ ID NO: 1503436 - RNA, 18 nt, Human
uguucugacccugcuuca

SEQ ID NO: 1503437 - RNA, 14 nt, Human
uguucuuucuggcu

SEQ ID NO: 1503438 - RNA, 19 nt, Human
uguucucugcccuccaaga

SEQ ID NO: 1503439 - RNA, 15 nt, Human
uguucugacccugcu

SEQ ID NO: 1503440 - RNA, 22 nt, Human
uguucuuucuggcuaugcauuu

SEQ ID NO: 1503441 - RNA, 20 nt, Human
uguucuuucuggcuaugcau

SEQ ID NO: 1503442 - RNA, 11 nt, Human
uguugaaagau

SEQ ID NO: 1503443 - RNA, 13 nt, Human
uguguuuauuguc

SEQ ID NO: 1503444 - RNA, 14 nt, Human
uguguaguuccagc

SEQ ID NO: 1503445 - RNA, 19 nt, Human
ugugucagcauagaaguaa

SEQ ID NO: 1503446 - RNA, 12 nt, Human
uguuauaaucuu

SEQ ID NO: 1503447 - RNA, 16 nt, Human
uguucacagccagacu

SEQ ID NO: 1503448 - RNA, 15 nt, Human
uguucagcuccagcu

SEQ ID NO: 1503449 - RNA, 16 nt, Human
uguucagcuccagcuc

SEQ ID NO: 1503450 - RNA, 18 nt, Human
uguucagcuccagcucac

SEQ ID NO: 1503451 - RNA, 11 nt, Human
uguucagcugg

SEQ ID NO: 1503452 - RNA, 13 nt, Human
uguuacauuuuua

SEQ ID NO: 1503453 - RNA, 22 nt, Human
uguuacauuuuuaagugcugca

SEQ ID NO: 1503454 - RNA, 15 nt, Human
uguuacugucuucag

SEQ ID NO: 1503455 - RNA, 16 nt, Human
uguuacugucuucagu

SEQ ID NO: 1503456 - RNA, 14 nt, Human
uuacauuuguauaa

SEQ ID NO: 1503457 - RNA, 15 nt, Human
uuacauuuguauaaa

SEQ ID NO: 1503458 - RNA, 22 nt, Human
uuacauggcuggagcuagaauu

SEQ ID NO: 1503459 - RNA, 23 nt, Human
uuacauggcuggagcuagaauuu

SEQ ID NO: 1503460 - RNA, 16 nt, Human
uuacggaacucaaaua

SEQ ID NO: 1503461 - RNA, 20 nt, Human
uuacgguuuuccagguuuaa

SEQ ID NO: 1503462 - RNA, 22 nt, Human
uuaccuuuuuuauacauaaaca

SEQ ID NO: 1503463 - RNA, 20 nt, Human
uuaccuuuuuuauacauaaa

SEQ ID NO: 1503464 - RNA, 19 nt, Human
uuaccuuuuuuauacauaa

SEQ ID NO: 1503465 - RNA, 21 nt, Human
uuaccacuuguguuuugcaag

SEQ ID NO: 1503466 - RNA, 14 nt, Human
uuaccagcagagca

SEQ ID NO: 1503467 - RNA, 23 nt, Human
uuacauuuuuaagugcugcauuu

SEQ ID NO: 1503468 - RNA, 22 nt, Human
uuacauuuuuaagugcugcauu

SEQ ID NO: 1503469 - RNA, 21 nt, Human
uuacauuuuuaagugcugcau

SEQ ID NO: 1503470 - RNA, 20 nt, Human
uuacauuuuuaagugcugca

SEQ ID NO: 1503471 - RNA, 21 nt, Human
uuaauagguuuggacaaaaug

SEQ ID NO: 1503472 - RNA, 16 nt, Human
uuaauauggggaugca

SEQ ID NO: 1503473 - RNA, 22 nt, Human
uuaauauggggaugcagcauua

SEQ ID NO: 1503474 - RNA, 18 nt, Human
uuaaugucacaggcaggu

SEQ ID NO: 1503475 - RNA, 17 nt, Human
uuaaugucacaggcagg

SEQ ID NO: 1503476 - RNA, 18 nt, Human
uuaauaauguuucaaaca

SEQ ID NO: 1503477 - RNA, 16 nt, Human
uuaauagguuuggaca

SEQ ID NO: 1503478 - RNA, 22 nt, Human
uuaaggaugcuuguacauaaug

SEQ ID NO: 1503479 - RNA, 21 nt, Human
uuaaggaagacaaugugaaaa

SEQ ID NO: 1503480 - RNA, 20 nt, Human
uuaaggaugcuuguacauaa

SEQ ID NO: 1503481 - RNA, 19 nt, Human
uuaaggaugcuuguacaua

SEQ ID NO: 1503482 - RNA, 18 nt, Human
uuaaggaugcuuguacau

SEQ ID NO: 1503483 - RNA, 17 nt, Human
uuaaggaugcuuguaca

SEQ ID NO: 1503484 - RNA, 15 nt, Human
uuaaagcuuccauug

SEQ ID NO: 1503485 - RNA, 20 nt, Human
uuaaagcuuccauuguuguc

SEQ ID NO: 1503486 - RNA, 19 nt, Human
uuaaauagcuuuuuucucu

SEQ ID NO: 1503487 - RNA, 18 nt, Human
uuaaaugcaccuggaaua

SEQ ID NO: 1503488 - RNA, 17 nt, Human
uuaaaugcaccuggaau

SEQ ID NO: 1503489 - RNA, 16 nt, Human
uuaaaugcaccuggaa

SEQ ID NO: 1503490 - RNA, 13 nt, Human
uuaaaugcccagc

SEQ ID NO: 1503491 - RNA, 18 nt, Human
uuaaaugcccagccccuu

SEQ ID NO: 1503492 - RNA, 19 nt, Human
uuaaaagaaugauuaugaa

SEQ ID NO: 1503493 - RNA, 14 nt, Human
uuaaaacccaagug

SEQ ID NO: 1503494 - RNA, 18 nt, Human
uuaaacuuaaucuaaaug

SEQ ID NO: 1503495 - RNA, 16 nt, Human
uuaaacuuaaucuaaa

SEQ ID NO: 1503496 - RNA, 22 nt, Human
uuaaacuuaaucuaaauggaac

SEQ ID NO: 1503497 - RNA, 20 nt, Human
uuaaacuuaaucuaaaugga

SEQ ID NO: 1503498 - RNA, 14 nt, Human
uuaaagcaaaggag

SEQ ID NO: 1503499 - RNA, 20 nt, Human
uuaaagcuuauuaaaacuca

SEQ ID NO: 1503500 - RNA, 13 nt, Human
uguuuuugucuua

SEQ ID NO: 1503501 - RNA, 23 nt, Human
uguuuccuggcacugcuuccagu

SEQ ID NO: 1503502 - RNA, 20 nt, Human
uguuuccuggcacugcuucc

SEQ ID NO: 1503503 - RNA, 21 nt, Human
uguuuccuggcacugcuucca

SEQ ID NO: 1503504 - RNA, 22 nt, Human
uguuuccuggcacugcuuccag

SEQ ID NO: 1503505 - RNA, 12 nt, Human
uguuuuaaaaaa

SEQ ID NO: 1503506 - RNA, 17 nt, Human
uguuuguugucagcuga

SEQ ID NO: 1503507 - RNA, 17 nt, Human
uggguagacacacauga

SEQ ID NO: 1503508 - RNA, 16 nt, Human
uggguagacacacaug

SEQ ID NO: 1503509 - RNA, 17 nt, Human
ugggguggggaccucag

SEQ ID NO: 1503510 - RNA, 21 nt, Human
ugggugucaagagggucugag

SEQ ID NO: 1503511 - RNA, 23 nt, Human
ugggugucaagagggucugagga

SEQ ID NO: 1503512 - RNA, 14 nt, Human
uggguguggcgcag

SEQ ID NO: 1503513 - RNA, 23 nt, Human
uggguucaagcgauucuucugcu

SEQ ID NO: 1503514 - RNA, 16 nt, Human
uggguucacugcaacc

SEQ ID NO: 1503515 - RNA, 15 nt, Human
uggguucuacccagg

SEQ ID NO: 1503516 - RNA, 14 nt, Human
ugggccuccugugu

SEQ ID NO: 1503517 - RNA, 16 nt, Human
ugggccuccugugugu

SEQ ID NO: 1503518 - RNA, 22 nt, Human
ugggccuccugugugugcgccu

SEQ ID NO: 1503519 - RNA, 16 nt, Human
ugggagcuuuuguaga

SEQ ID NO: 1503520 - RNA, 24 nt, Human
ugggagcugccuguucagcuccag

SEQ ID NO: 1503521 - RNA, 18 nt, Human
ugggcuucaguggcagcu

SEQ ID NO: 1503522 - RNA, 19 nt, Human
ugggcuucaguggcagcug

SEQ ID NO: 1503523 - RNA, 19 nt, Human
ugggcuuggggaccagagc

SEQ ID NO: 1503524 - RNA, 21 nt, Human
ugggcuucaguggcagcugcu

SEQ ID NO: 1503525 - RNA, 20 nt, Human
ugggcuucaguggcagcugc

SEQ ID NO: 1503526 - RNA, 16 nt, Human
uggggcagcuugaggg

SEQ ID NO: 1503527 - RNA, 21 nt, Human
ugggcuuggggaccagagcug

SEQ ID NO: 1503528 - RNA, 22 nt, Human
ugggcuuggggaccagagcugc

SEQ ID NO: 1503529 - RNA, 19 nt, Human
ugggacauuugcucaugga

SEQ ID NO: 1503530 - RNA, 20 nt, Human
ugggacauuugcucauggaa

SEQ ID NO: 1503531 - RNA, 16 nt, Human
ugggacaugggaaagg

SEQ ID NO: 1503532 - RNA, 18 nt, Human
ugggacagucaccucaug

SEQ ID NO: 1503533 - RNA, 20 nt, Human
ugggacagucaccucaugga

SEQ ID NO: 1503534 - RNA, 21 nt, Human
ugggacagucaccucauggaa

SEQ ID NO: 1503535 - RNA, 22 nt, Human
ugggaaugaaugucagugugac

SEQ ID NO: 1503536 - RNA, 15 nt, Human
uggcugggggccuca

SEQ ID NO: 1503537 - RNA, 14 nt, Human
uggcugggggccuc

SEQ ID NO: 1503538 - RNA, 22 nt, Human
uggcugguuagagguucccuuu

SEQ ID NO: 1503539 - RNA, 15 nt, Human
uggcgcugccccugg

SEQ ID NO: 1503540 - RNA, 14 nt, Human
uggcgcugccccug

SEQ ID NO: 1503541 - RNA, 22 nt, Human
uggcgugcaguggugcgaucug

SEQ ID NO: 1503542 - RNA, 20 nt, Human
uggccuucggccuccauccu

SEQ ID NO: 1503543 - RNA, 17 nt, Human
uggccuucggccuccau

SEQ ID NO: 1503544 - RNA, 18 nt, Human
uggccuucggccuccauc

SEQ ID NO: 1503545 - RNA, 15 nt, Human
uggccagaugcacca

SEQ ID NO: 1503546 - RNA, 19 nt, Human
uggcucuuccaggcuggga

SEQ ID NO: 1503547 - RNA, 16 nt, Human
uggcucuuccaggcug

SEQ ID NO: 1503548 - RNA, 12 nt, Human
uggcugggggcc

SEQ ID NO: 1503549 - RNA, 13 nt, Human
uggcucuuccagg

SEQ ID NO: 1503550 - RNA, 15 nt, Human
uggcucuuccaggcu

SEQ ID NO: 1503551 - RNA, 14 nt, Human
uggcuaaauucaug

SEQ ID NO: 1503552 - RNA, 22 nt, Human
uggcucagguggggucacucug

SEQ ID NO: 1503553 - RNA, 20 nt, Human
uggcucagguggggucacuc

SEQ ID NO: 1503554 - RNA, 16 nt, Human
uggaauacucuuauau

SEQ ID NO: 1503555 - RNA, 14 nt, Human
uggaagacagcucu

SEQ ID NO: 1503556 - RNA, 15 nt, Human
uggaagacagcucuu

SEQ ID NO: 1503557 - RNA, 15 nt, Human
uggaaaauaaauuau

SEQ ID NO: 1503558 - RNA, 16 nt, Human
uggaaaauaaauuauu

SEQ ID NO: 1503559 - RNA, 17 nt, Human
uggaaaaauagccugcc

SEQ ID NO: 1503560 - RNA, 14 nt, Human
uggaacucucgagc

SEQ ID NO: 1503561 - RNA, 11 nt, Human
uggaagacagc

SEQ ID NO: 1503562 - RNA, 12 nt, Human
uggaagacagcu

SEQ ID NO: 1503563 - RNA, 14 nt, Human
ugcuucuguuuuau

SEQ ID NO: 1503564 - RNA, 16 nt, Human
ugcuucuucagagacu

SEQ ID NO: 1503565 - RNA, 12 nt, Human
ugcuucucacug

SEQ ID NO: 1503566 - RNA, 21 nt, Human
ugcuuccagugaggcucugcc

SEQ ID NO: 1503567 - RNA, 19 nt, Human
ugcuuccagugaggcucug

SEQ ID NO: 1503568 - RNA, 20 nt, Human
ugcuuccagugaggcucugc

SEQ ID NO: 1503569 - RNA, 18 nt, Human
ugcuuccagugaggcucu

SEQ ID NO: 1503570 - RNA, 12 nt, Human
uggacaggcaug

SEQ ID NO: 1503571 - RNA, 16 nt, Human
uggacaggcauguucu

SEQ ID NO: 1503572 - RNA, 17 nt, Human
uggacaggcauguucuc

SEQ ID NO: 1503573 - RNA, 19 nt, Human
uggaugauauuuuuuauca

SEQ ID NO: 1503574 - RNA, 22 nt, Human
uggaggcaugugaugagaggaa

SEQ ID NO: 1503575 - RNA, 15 nt, Human
uggagcaaagcugau

SEQ ID NO: 1503576 - RNA, 23 nt, Human
uggcagcugcgguccacccagga

SEQ ID NO: 1503577 - RNA, 21 nt, Human
uggcagcugcgguccacccag

SEQ ID NO: 1503578 - RNA, 22 nt, Human
uggcagcugcgguccacccagg

SEQ ID NO: 1503579 - RNA, 14 nt, Human
uggaugcccaggaa

SEQ ID NO: 1503580 - RNA, 14 nt, Human
uggaugccuggugg

SEQ ID NO: 1503581 - RNA, 15 nt, Human
uggaugccugguggc

SEQ ID NO: 1503582 - RNA, 13 nt, Human
uggaugcccagga

SEQ ID NO: 1503583 - RNA, 14 nt, Human
uggcacugcuucca

SEQ ID NO: 1503584 - RNA, 16 nt, Human
uggcacugcuuccagu

SEQ ID NO: 1503585 - RNA, 18 nt, Human
uggcacugcuuccaguga

SEQ ID NO: 1503586 - RNA, 14 nt, Human
uggcagugggagcu

SEQ ID NO: 1503587 - RNA, 15 nt, Human
uggcagugggagcug

SEQ ID NO: 1503588 - RNA, 16 nt, Human
uggcagugggagcugc

SEQ ID NO: 1503589 - RNA, 19 nt, Human
uggcagugggagcugccug

SEQ ID NO: 1503590 - RNA, 20 nt, Human
uggcagugggagcugccugu

SEQ ID NO: 1503591 - RNA, 15 nt, Human
ugcacaucaaaauau

SEQ ID NO: 1503592 - RNA, 23 nt, Human
ugcacagcuaacauggaaguacu

SEQ ID NO: 1503593 - RNA, 18 nt, Human
ugcacagcuaacauggaa

SEQ ID NO: 1503594 - RNA, 20 nt, Human
ugcacagcuaacauggaagu

SEQ ID NO: 1503595 - RNA, 17 nt, Human
ugcacagcuaacaugga

SEQ ID NO: 1503596 - RNA, 23 nt, Human
ugcacagaguuguuacauuuuua

SEQ ID NO: 1503597 - RNA, 22 nt, Human
ugcacagaguuguuacauuuuu

SEQ ID NO: 1503598 - RNA, 21 nt, Human
ugcacagaguuguuacauuuu

SEQ ID NO: 1503599 - RNA, 22 nt, Human
ugaagucuuuguacagacaaca

SEQ ID NO: 1503600 - RNA, 16 nt, Human
ugaaggcuggguucug

SEQ ID NO: 1503601 - RNA, 17 nt, Human
ugaagucuuuguacaga

SEQ ID NO: 1503602 - RNA, 20 nt, Human
ugaagucuuuguacagacaa

SEQ ID NO: 1503603 - RNA, 21 nt, Human
ugcacuugcagacucuacaga

SEQ ID NO: 1503604 - RNA, 19 nt, Human
ugcacguacacacacauac

SEQ ID NO: 1503605 - RNA, 16 nt, Human
ugcacguacacacaca

SEQ ID NO: 1503606 - RNA, 16 nt, Human
ugcagauaaacaguag

SEQ ID NO: 1503607 - RNA, 17 nt, Human
ugcagauaaacaguagu

SEQ ID NO: 1503608 - RNA, 15 nt, Human
ugcacuuuguucugg

SEQ ID NO: 1503609 - RNA, 18 nt, Human
ugcacuuuguucuggcuc

SEQ ID NO: 1503610 - RNA, 19 nt, Human
ugcacuuuguucuggcucu

SEQ ID NO: 1503611 - RNA, 20 nt, Human
ugcacuuuguucuggcucuu

SEQ ID NO: 1503612 - RNA, 20 nt, Human
ugcagcaauaaagcagcguu

SEQ ID NO: 1503613 - RNA, 16 nt, Human
ugcagcaauaaagcag

SEQ ID NO: 1503614 - RNA, 15 nt, Human
ugcagcaauaaagca

SEQ ID NO: 1503615 - RNA, 14 nt, Human
ugcagcaauaaagc

SEQ ID NO: 1503616 - RNA, 18 nt, Human
ugcaggaccucaggugag

SEQ ID NO: 1503617 - RNA, 15 nt, Human
ugcaggaccucaggu

SEQ ID NO: 1503618 - RNA, 16 nt, Human
ugcaggaccucaggug

SEQ ID NO: 1503619 - RNA, 14 nt, Human
ugcaggaccucagg

SEQ ID NO: 1503620 - RNA, 11 nt, Human
ugccagggaca

SEQ ID NO: 1503621 - RNA, 22 nt, Human
ugccagggacagaggggguggc

SEQ ID NO: 1503622 - RNA, 17 nt, Human
ugccaccccgagggcug

SEQ ID NO: 1503623 - RNA, 18 nt, Human
ugccaccccgagggcuga

SEQ ID NO: 1503624 - RNA, 14 nt, Human
ugccagucaccccg

SEQ ID NO: 1503625 - RNA, 23 nt, Human
ugccauggacagaagaaggcagc

SEQ ID NO: 1503626 - RNA, 18 nt, Human
ugccauggacagaagaag

SEQ ID NO: 1503627 - RNA, 20 nt, Human
ugccauggacagaagaaggc

SEQ ID NO: 1503628 - RNA, 15 nt, Human
ugcccaccuggccuc

SEQ ID NO: 1503629 - RNA, 17 nt, Human
ugcccaccuggccucug

SEQ ID NO: 1503630 - RNA, 18 nt, Human
ugcccaccuggccucugc

SEQ ID NO: 1503631 - RNA, 19 nt, Human
ugcccaccuggccucugca

SEQ ID NO: 1503632 - RNA, 10 nt, Human
ugcccagccc

SEQ ID NO: 1503633 - RNA, 15 nt, Human
ugcauuauauuuauu

SEQ ID NO: 1503634 - RNA, 20 nt, Human
ugcauuauauuuauuacugu

SEQ ID NO: 1503635 - RNA, 21 nt, Human
ugcauuauauuuauuacugua

SEQ ID NO: 1503636 - RNA, 19 nt, Human
ugcauguuacauaagauaa

SEQ ID NO: 1503637 - RNA, 17 nt, Human
ugcaucguuucaucuuc

SEQ ID NO: 1503638 - RNA, 15 nt, Human
ugcaucguuucaucu

SEQ ID NO: 1503639 - RNA, 16 nt, Human
ugcaggcagccaggcc

SEQ ID NO: 1503640 - RNA, 17 nt, Human
ugcaggcagccaggcca

SEQ ID NO: 1503641 - RNA, 18 nt, Human
ugcaggcagccaggccac

SEQ ID NO: 1503642 - RNA, 19 nt, Human
ugcaggcagccaggccaca

SEQ ID NO: 1503643 - RNA, 22 nt, Human
ugcaucagcugcugaaacaaca

SEQ ID NO: 1503644 - RNA, 11 nt, Human
ugcucauggaa

SEQ ID NO: 1503645 - RNA, 19 nt, Human
ugcuccucuccccagcaag

SEQ ID NO: 1503646 - RNA, 20 nt, Human
ugcuaggaacacuccuucac

SEQ ID NO: 1503647 - RNA, 23 nt, Human
ugcuagguuaauuccaauuauau

SEQ ID NO: 1503648 - RNA, 16 nt, Human
ugcuagguuaauucca

SEQ ID NO: 1503649 - RNA, 15 nt, Human
ugcgugcauaccacu

SEQ ID NO: 1503650 - RNA, 19 nt, Human
ugcuagaacucccuuucaa

SEQ ID NO: 1503651 - RNA, 20 nt, Human
ugcuagaacucccuuucaac

SEQ ID NO: 1503652 - RNA, 21 nt, Human
ugcuagaacucccuuucaaca

SEQ ID NO: 1503653 - RNA, 16 nt, Human
ugcuaggaacacuccu

SEQ ID NO: 1503654 - RNA, 17 nt, Human
ugcuaggaacacuccuu

SEQ ID NO: 1503655 - RNA, 19 nt, Human
ugcuaggaacacuccuuca

SEQ ID NO: 1503656 - RNA, 20 nt, Human
ugcugauggugcaaugaccu

SEQ ID NO: 1503657 - RNA, 23 nt, Human
ugcugauggugcaaugaccuuuc

SEQ ID NO: 1503658 - RNA, 15 nt, Human
ugcugcaguugccag

SEQ ID NO: 1503659 - RNA, 16 nt, Human
ugcugcaguugccagu

SEQ ID NO: 1503660 - RNA, 15 nt, Human
ugcugaguugguguu

SEQ ID NO: 1503661 - RNA, 15 nt, Human
ugcugacagacacag

SEQ ID NO: 1503662 - RNA, 16 nt, Human
ugcugacagacacagg

SEQ ID NO: 1503663 - RNA, 19 nt, Human
ugcugacagacacaggccc

SEQ ID NO: 1503664 - RNA, 19 nt, Human
ugcuccuggcccacugcau

SEQ ID NO: 1503665 - RNA, 17 nt, Human
ugcugaaugguuuucaa

SEQ ID NO: 1503666 - RNA, 18 nt, Human
ugcugaaugguuuucaaa

SEQ ID NO: 1503667 - RNA, 22 nt, Human
ugcugaaugguuuucaaaauaa

SEQ ID NO: 1503668 - RNA, 17 nt, Human
ugcugaaacaacaaaua

SEQ ID NO: 1503669 - RNA, 18 nt, Human
ugcugaauacagaggcaa

SEQ ID NO: 1503670 - RNA, 23 nt, Human
ugcugaauacagaggcaacugca

SEQ ID NO: 1503671 - RNA, 22 nt, Human
ugccuucucaacuccaaacuga

SEQ ID NO: 1503672 - RNA, 13 nt, Human
ugcgccuacagga

SEQ ID NO: 1503673 - RNA, 23 nt, Human
ugcggugcuaucucccccagccc

SEQ ID NO: 1503674 - RNA, 18 nt, Human
ugccuuauggaacacucu

SEQ ID NO: 1503675 - RNA, 20 nt, Human
ugccuuauggaacacucuga

SEQ ID NO: 1503676 - RNA, 21 nt, Human
ugccuuauggaacacucugag

SEQ ID NO: 1503677 - RNA, 22 nt, Human
ugccuuauggaacacucugaga

SEQ ID NO: 1503678 - RNA, 11 nt, Human
ugcccagcccc

SEQ ID NO: 1503679 - RNA, 12 nt, Human
ugcccagccccu

SEQ ID NO: 1503680 - RNA, 23 nt, Human
ugcccaggcuggcgugcaguggu

SEQ ID NO: 1503681 - RNA, 22 nt, Human
ugccugaagucacacagugagu

SEQ ID NO: 1503682 - RNA, 18 nt, Human
ugccugaagucacacagu

SEQ ID NO: 1503683 - RNA, 16 nt, Human
ugccucuguccccuuc

SEQ ID NO: 1503684 - RNA, 17 nt, Human
ugccucuguccccuucu

SEQ ID NO: 1503685 - RNA, 20 nt, Human
ugccucuguccccuucucuc

SEQ ID NO: 1503686 - RNA, 21 nt, Human
ugccucuguccccuucucuca

SEQ ID NO: 1503687 - RNA, 13 nt, Human
ugccucugucccc

SEQ ID NO: 1503688 - RNA, 14 nt, Human
ugccucuguccccu

SEQ ID NO: 1503689 - RNA, 15 nt, Human
ugccucuguccccuu

SEQ ID NO: 1503690 - RNA, 20 nt, Human
ugccuccuuugugaggaagc

SEQ ID NO: 1503691 - RNA, 16 nt, Human
ugccuccuuugugagg

SEQ ID NO: 1503692 - RNA, 17 nt, Human
ugccuccuuugugagga

SEQ ID NO: 1503693 - RNA, 18 nt, Human
ugccuccuuugugaggaa

SEQ ID NO: 1503694 - RNA, 22 nt, Human
ucuguuuuauaauuuugugaag

SEQ ID NO: 1503695 - RNA, 18 nt, Human
ucuuaaaaaguggaaaaa

SEQ ID NO: 1503696 - RNA, 14 nt, Human
ucuguccuacucug

SEQ ID NO: 1503697 - RNA, 22 nt, Human
ucuguggguuucuaaagcugcc

SEQ ID NO: 1503698 - RNA, 19 nt, Human
ucuguccgagcuuugaaaa

SEQ ID NO: 1503699 - RNA, 17 nt, Human
ucuguacgucugacagg

SEQ ID NO: 1503700 - RNA, 18 nt, Human
ucuguacgucugacaggc

SEQ ID NO: 1503701 - RNA, 23 nt, Human
ucuguggguuucuaaagcugcca

SEQ ID NO: 1503702 - RNA, 18 nt, Human
ucuggcucuuccaggcug

SEQ ID NO: 1503703 - RNA, 17 nt, Human
ucuggcucuuccaggcu

SEQ ID NO: 1503704 - RNA, 15 nt, Human
ucuggcucuuccagg

SEQ ID NO: 1503705 - RNA, 16 nt, Human
ucuggcucuuccaggc

SEQ ID NO: 1503706 - RNA, 13 nt, Human
ucugggacacagu

SEQ ID NO: 1503707 - RNA, 12 nt, Human
ucugggacacag

SEQ ID NO: 1503708 - RNA, 17 nt, Human
ucuggcuaugcauuuga

SEQ ID NO: 1503709 - RNA, 14 nt, Human
ucuggcuaugcauu

SEQ ID NO: 1503710 - RNA, 18 nt, Human
ucuggagguacgaaaaga

SEQ ID NO: 1503711 - RNA, 11 nt, Human
ucuugcucugc

SEQ ID NO: 1503712 - RNA, 12 nt, Human
ucuugcucugcu

SEQ ID NO: 1503713 - RNA, 13 nt, Human
ucuugcucugcug

SEQ ID NO: 1503714 - RNA, 22 nt, Human
ucuugccucuguccccuucucu

SEQ ID NO: 1503715 - RNA, 16 nt, Human
ucuugccucugucccc

SEQ ID NO: 1503716 - RNA, 21 nt, Human
ucuugccucuguccccuucuc

SEQ ID NO: 1503717 - RNA, 21 nt, Human
ucuugaauuguaaggaaugau

SEQ ID NO: 1503718 - RNA, 12 nt, Human
ucuucuccaggc

SEQ ID NO: 1503719 - RNA, 13 nt, Human
ucuucuccaggcu

SEQ ID NO: 1503720 - RNA, 14 nt, Human
ucuucuccaggcug

SEQ ID NO: 1503721 - RNA, 15 nt, Human
ucuucuccaggcugu

SEQ ID NO: 1503722 - RNA, 16 nt, Human
ucuugaacuccuggcc

SEQ ID NO: 1503723 - RNA, 17 nt, Human
ucuugaacuccuggccu

SEQ ID NO: 1503724 - RNA, 18 nt, Human
ucuugaacuccuggccuc

SEQ ID NO: 1503725 - RNA, 14 nt, Human
ucuuagugugugca

SEQ ID NO: 1503726 - RNA, 16 nt, Human
ucuuaguggauguucu

SEQ ID NO: 1503727 - RNA, 15 nt, Human
ucuuauacauuugau

SEQ ID NO: 1503728 - RNA, 13 nt, Human
ucuuaugggcugg

SEQ ID NO: 1503729 - RNA, 15 nt, Human
ucuucaguaagccgu

SEQ ID NO: 1503730 - RNA, 14 nt, Human
ucuuccaggcuggg

SEQ ID NO: 1503731 - RNA, 21 nt, Human
ucuuccacaagagcccaggcc

SEQ ID NO: 1503732 - RNA, 16 nt, Human
ucuucaguaagccgug

SEQ ID NO: 1503733 - RNA, 19 nt, Human
ucuucuccacuuucuagcc

SEQ ID NO: 1503734 - RNA, 21 nt, Human
ucuucuccacuuucuagccag

SEQ ID NO: 1503735 - RNA, 17 nt, Human
ucuuucacauuuaaaua

SEQ ID NO: 1503736 - RNA, 16 nt, Human
ucuuuucuugccucug

SEQ ID NO: 1503737 - RNA, 20 nt, Human
ucuuuucuugccucuguccc

SEQ ID NO: 1503738 - RNA, 19 nt, Human
ucuuuugccguuauuaaaa

SEQ ID NO: 1503739 - RNA, 17 nt, Human
ucuuuugccguuauuaa

SEQ ID NO: 1503740 - RNA, 16 nt, Human
ucuuuuugcuuugcuu

SEQ ID NO: 1503741 - RNA, 19 nt, Human
ugaaaacuuuaugcuaagu

SEQ ID NO: 1503742 - RNA, 15 nt, Human
ugaaaagaaaaauga

SEQ ID NO: 1503743 - RNA, 15 nt, Human
ugaaaagacuccaaa

SEQ ID NO: 1503744 - RNA, 16 nt, Human
ugaaaagacuccaaag

SEQ ID NO: 1503745 - RNA, 17 nt, Human
ugaaaagacuccaaaga

SEQ ID NO: 1503746 - RNA, 19 nt, Human
ugaaaagacuccaaagaaa

SEQ ID NO: 1503747 - RNA, 13 nt, Human
ugaaagauucaau

SEQ ID NO: 1503748 - RNA, 12 nt, Human
ugaaaggaaaga

SEQ ID NO: 1503749 - RNA, 17 nt, Human
ugaaaggaaagaggcuc

SEQ ID NO: 1503750 - RNA, 18 nt, Human
ugaaagcagggacuugaa

SEQ ID NO: 1503751 - RNA, 19 nt, Human
ugaaagcagggacuugaac

SEQ ID NO: 1503752 - RNA, 23 nt, Human
ugaaagcagggacuugaacccau

SEQ ID NO: 1503753 - RNA, 22 nt, Human
ugaaaagacuccaaagaaaugu

SEQ ID NO: 1503754 - RNA, 16 nt, Human
ugaaacgcaaccacca

SEQ ID NO: 1503755 - RNA, 23 nt, Human
ugaaaugaggucagagccugcag

SEQ ID NO: 1503756 - RNA, 21 nt, Human
ugaaaugaggucagagccugc

SEQ ID NO: 1503757 - RNA, 22 nt, Human
ugaaaugaggucagagccugca

SEQ ID NO: 1503758 - RNA, 19 nt, Human
ugaaaugaggucagagccu

SEQ ID NO: 1503759 - RNA, 20 nt, Human
ugaaaugaggucagagccug

SEQ ID NO: 1503760 - RNA, 17 nt, Human
ugaaaucuuuuugcuuu

SEQ ID NO: 1503761 - RNA, 16 nt, Human
ugaaagggcccagaga

SEQ ID NO: 1503762 - RNA, 17 nt, Human
ugaaagggcccagagag

SEQ ID NO: 1503763 - RNA, 18 nt, Human
ugaaagggcccagagagg

SEQ ID NO: 1503764 - RNA, 19 nt, Human
ugaaauggacuuuuguaca

SEQ ID NO: 1503765 - RNA, 14 nt, Human
ugaacacaucagcu

SEQ ID NO: 1503766 - RNA, 13 nt, Human
ugaacugauaaag

SEQ ID NO: 1503767 - RNA, 15 nt, Human
ugaacugauaaagau

SEQ ID NO: 1503768 - RNA, 18 nt, Human
ugaacucuucaaucucuu

SEQ ID NO: 1503769 - RNA, 20 nt, Human
ugaaccacaucuugcucugc

SEQ ID NO: 1503770 - RNA, 21 nt, Human
ugaaccacaucuugcucugcu

SEQ ID NO: 1503771 - RNA, 22 nt, Human
ugaaccacaucuugcucugcug

SEQ ID NO: 1503772 - RNA, 15 nt, Human
ugaacucuucaaucu

SEQ ID NO: 1503773 - RNA, 17 nt, Human
ugaagauguagaggaga

SEQ ID NO: 1503774 - RNA, 21 nt, Human
ugaaguccaagcauuuagaug

SEQ ID NO: 1503775 - RNA, 22 nt, Human
ugaaguccaagcauuuagaugu

SEQ ID NO: 1503776 - RNA, 21 nt, Human
ugaaggcucgagcaugccugg

SEQ ID NO: 1503777 - RNA, 20 nt, Human
ugaaggcucgagcaugccug

SEQ ID NO: 1503778 - RNA, 22 nt, Human
ugaacuuguaaaggaauuuaaa

SEQ ID NO: 1503779 - RNA, 14 nt, Human
ugaagacagagcua

SEQ ID NO: 1503780 - RNA, 16 nt, Human
ugaagacagagcuaca

SEQ ID NO: 1503781 - RNA, 19 nt, Human
ugaacuggguacuugugga

SEQ ID NO: 1503782 - RNA, 14 nt, Human
ugaacuuggcgcug

SEQ ID NO: 1503783 - RNA, 12 nt, Human
ugaacuugguuc

SEQ ID NO: 1503784 - RNA, 17 nt, Human
ugaagacuuuucuuuca

SEQ ID NO: 1503785 - RNA, 22 nt, Human
ugaagacuuuucuuucagccaa

SEQ ID NO: 1503786 - RNA, 14 nt, Human
ugaagacuuuucuu

SEQ ID NO: 1503787 - RNA, 23 nt, Human
ugaacuggguacuuguggacaca

SEQ ID NO: 1503788 - RNA, 15 nt, Human
ucgaguuacagacaa

SEQ ID NO: 1503789 - RNA, 17 nt, Human
ucgaguuacagacaaag

SEQ ID NO: 1503790 - RNA, 14 nt, Human
uccuuaccagcaga

SEQ ID NO: 1503791 - RNA, 15 nt, Human
uccuugcaucaauuu

SEQ ID NO: 1503792 - RNA, 12 nt, Human
uccuucuguccu

SEQ ID NO: 1503793 - RNA, 19 nt, Human
uccuucuguccuacucugu

SEQ ID NO: 1503794 - RNA, 20 nt, Human
uccuucugugaaaguacauu

SEQ ID NO: 1503795 - RNA, 12 nt, Human
uccuggugcccu

SEQ ID NO: 1503796 - RNA, 13 nt, Human
uccuggugcccug

SEQ ID NO: 1503797 - RNA, 22 nt, Human
uccuggugcccuggaugcccag

SEQ ID NO: 1503798 - RNA, 10 nt, Human
ucccucccuu

SEQ ID NO: 1503799 - RNA, 22 nt, Human
uccuggcaugggaaugaauguc

SEQ ID NO: 1503800 - RNA, 17 nt, Human
uccuggcccacugcauc

SEQ ID NO: 1503801 - RNA, 15 nt, Human
uccugguguggaaga

SEQ ID NO: 1503802 - RNA, 16 nt, Human
ucuaaauucuuucauu

SEQ ID NO: 1503803 - RNA, 13 nt, Human
ucuaaauuugaau

SEQ ID NO: 1503804 - RNA, 17 nt, Human
ucuaaauuugaauguua

SEQ ID NO: 1503805 - RNA, 19 nt, Human
ucuaacaaaaaaauauauu

SEQ ID NO: 1503806 - RNA, 22 nt, Human
ucuaaauuugaauguuaagcag

SEQ ID NO: 1503807 - RNA, 23 nt, Human
ucuaaauuugaauguuaagcaga

SEQ ID NO: 1503808 - RNA, 18 nt, Human
ucuaaauuuuauaucuug

SEQ ID NO: 1503809 - RNA, 23 nt, Human
ucuaaauuuuauaucuuguagcu

SEQ ID NO: 1503810 - RNA, 21 nt, Human
ucuacacuaagagagaaugag

SEQ ID NO: 1503811 - RNA, 22 nt, Human
ucuaacuucaccauauuaccac

SEQ ID NO: 1503812 - RNA, 16 nt, Human
ucuaacuucaccauau

SEQ ID NO: 1503813 - RNA, 15 nt, Human
ucuaacuucaccaua

SEQ ID NO: 1503814 - RNA, 21 nt, Human
ucuacacugugcugagucuga

SEQ ID NO: 1503815 - RNA, 15 nt, Human
ucuacacugugcuga

SEQ ID NO: 1503816 - RNA, 18 nt, Human
ucuacugaggugcuaugu

SEQ ID NO: 1503817 - RNA, 19 nt, Human
ucuacugaggugcuauguu

SEQ ID NO: 1503818 - RNA, 17 nt, Human
ucuacacuccagugaga

SEQ ID NO: 1503819 - RNA, 12 nt, Human
ucuacacugugc

SEQ ID NO: 1503820 - RNA, 14 nt, Human
ucuacacugugcug

SEQ ID NO: 1503821 - RNA, 22 nt, Human
ucuacugaggugcuauguucuu

SEQ ID NO: 1503822 - RNA, 22 nt, Human
ucuagggaaaaaccagcgugug

SEQ ID NO: 1503823 - RNA, 15 nt, Human
ucucaacuccaaacu

SEQ ID NO: 1503824 - RNA, 17 nt, Human
ucucacucugucgccca

SEQ ID NO: 1503825 - RNA, 18 nt, Human
ucucacucugucgcccag

SEQ ID NO: 1503826 - RNA, 22 nt, Human
ucucacucugucgcccagucug

SEQ ID NO: 1503827 - RNA, 18 nt, Human
ucucacuguugcccaggc

SEQ ID NO: 1503828 - RNA, 19 nt, Human
ucucacuguugcccaggcu

SEQ ID NO: 1503829 - RNA, 20 nt, Human
ucucacuguugcccaggcug

SEQ ID NO: 1503830 - RNA, 21 nt, Human
ucucacuguugcccaggcugg

SEQ ID NO: 1503831 - RNA, 17 nt, Human
ucucagaaucucaaaua

SEQ ID NO: 1503832 - RNA, 21 nt, Human
ucucagaaucucaaauaacua

SEQ ID NO: 1503833 - RNA, 22 nt, Human
ucucaaacucuugaccucaggu

SEQ ID NO: 1503834 - RNA, 13 nt, Human
ucucaaacucuug

SEQ ID NO: 1503835 - RNA, 21 nt, Human
ucucaaacucuugaccucagg

SEQ ID NO: 1503836 - RNA, 21 nt, Human
ucucaaauuuggauugcuaau

SEQ ID NO: 1503837 - RNA, 15 nt, Human
ucuaguaugaaauua

SEQ ID NO: 1503838 - RNA, 17 nt, Human
ucuaguaugaaauuaua

SEQ ID NO: 1503839 - RNA, 22 nt, Human
ucucccccagccccauccucug

SEQ ID NO: 1503840 - RNA, 18 nt, Human
ucucccccagccccaucc

SEQ ID NO: 1503841 - RNA, 20 nt, Human
ucucccccagccccauccuc

SEQ ID NO: 1503842 - RNA, 20 nt, Human
ucuccccugcccccaggacu

SEQ ID NO: 1503843 - RNA, 21 nt, Human
ucuccccugcccccaggacug

SEQ ID NO: 1503844 - RNA, 22 nt, Human
ucuccccugcccccaggacugg

SEQ ID NO: 1503845 - RNA, 23 nt, Human
ucuccccugcccccaggacuggg

SEQ ID NO: 1503846 - RNA, 14 nt, Human
ucucccccagcccc

SEQ ID NO: 1503847 - RNA, 15 nt, Human
ucucccccagcccca

SEQ ID NO: 1503848 - RNA, 17 nt, Human
ucucccccagccccauc

SEQ ID NO: 1503849 - RNA, 21 nt, Human
ucucagugucaaugcagcccc

SEQ ID NO: 1503850 - RNA, 22 nt, Human
ucuccugccucagccucccaaa

SEQ ID NO: 1503851 - RNA, 14 nt, Human
ucucugaggacacu

SEQ ID NO: 1503852 - RNA, 13 nt, Human
ucucugaggacac

SEQ ID NO: 1503853 - RNA, 13 nt, Human
ucucuaggaaaua

SEQ ID NO: 1503854 - RNA, 19 nt, Human
ucucuaggaaauauuuauu

SEQ ID NO: 1503855 - RNA, 19 nt, Human
ucucuaguuugauuaaauu

SEQ ID NO: 1503856 - RNA, 18 nt, Human
ucucuaguuugauuaaau

SEQ ID NO: 1503857 - RNA, 13 nt, Human
ucuccuguaccuc

SEQ ID NO: 1503858 - RNA, 15 nt, Human
ucucuacaaaaagca

SEQ ID NO: 1503859 - RNA, 18 nt, Human
ucucuucacagucacauu

SEQ ID NO: 1503860 - RNA, 14 nt, Human
ucugaaauuuccug

SEQ ID NO: 1503861 - RNA, 23 nt, Human
ucugaaaauguauguguaaguau

SEQ ID NO: 1503862 - RNA, 17 nt, Human
ucugaaaauuaacacug

SEQ ID NO: 1503863 - RNA, 13 nt, Human
ucugaaagggacg

SEQ ID NO: 1503864 - RNA, 18 nt, Human
ucugaaaauuaacacugc

SEQ ID NO: 1503865 - RNA, 19 nt, Human
ucugaaaauuaacacugcu

SEQ ID NO: 1503866 - RNA, 15 nt, Human
ucucuuuucaaaaca

SEQ ID NO: 1503867 - RNA, 16 nt, Human
ucucuuuucaaaacau

SEQ ID NO: 1503868 - RNA, 16 nt, Human
ucugaaaauguaugug

SEQ ID NO: 1503869 - RNA, 14 nt, Human
ucugacccaugcug

SEQ ID NO: 1503870 - RNA, 21 nt, Human
ucugaacuuggcgcugccccu

SEQ ID NO: 1503871 - RNA, 20 nt, Human
ucugaacuuggcgcugcccc

SEQ ID NO: 1503872 - RNA, 19 nt, Human
ucugacccaugcugcccug

SEQ ID NO: 1503873 - RNA, 15 nt, Human
ucugacccaugcugc

SEQ ID NO: 1503874 - RNA, 16 nt, Human
ucugacccaugcugcc

SEQ ID NO: 1503875 - RNA, 17 nt, Human
ucugacccaugcugccc

SEQ ID NO: 1503876 - RNA, 18 nt, Human
ucugacccaugcugcccu

SEQ ID NO: 1503877 - RNA, 23 nt, Human
ucugauucccaagcucugcuccu

SEQ ID NO: 1503878 - RNA, 19 nt, Human
ucugcacaagcugcacccu

SEQ ID NO: 1503879 - RNA, 14 nt, Human
ucugcacaagcugc

SEQ ID NO: 1503880 - RNA, 20 nt, Human
ucugaggacacuaaccacgc

SEQ ID NO: 1503881 - RNA, 23 nt, Human
ucugaggacacuaaccacgcugg

SEQ ID NO: 1503882 - RNA, 16 nt, Human
ucugaggaauccagac

SEQ ID NO: 1503883 - RNA, 17 nt, Human
ucugaggaauccagacc

SEQ ID NO: 1503884 - RNA, 24 nt, Human
ucagucugauucccaagcucugcu

SEQ ID NO: 1503885 - RNA, 15 nt, Human
ucagucuggcccuuc

SEQ ID NO: 1503886 - RNA, 23 nt, Human
ucagugguuggcaauuguuucaa

SEQ ID NO: 1503887 - RNA, 11 nt, Human
ucaguguacau

SEQ ID NO: 1503888 - RNA, 13 nt, Human
ucagugugacuga

SEQ ID NO: 1503889 - RNA, 17 nt, Human
ucagugugacugaucuc

SEQ ID NO: 1503890 - RNA, 13 nt, Human
ucaguuguacagu

SEQ ID NO: 1503891 - RNA, 17 nt, Human
ucaguuguuaguguguc

SEQ ID NO: 1503892 - RNA, 15 nt, Human
ucauaauuuauacag

SEQ ID NO: 1503893 - RNA, 13 nt, Human
ucauacauuguac

SEQ ID NO: 1503894 - RNA, 15 nt, Human
ucauacauuguacga

SEQ ID NO: 1503895 - RNA, 16 nt, Human
ucauacauuguacgaa

SEQ ID NO: 1503896 - RNA, 13 nt, Human
ucauacccacccc

SEQ ID NO: 1503897 - RNA, 14 nt, Human
ucaucucuuagcuc

SEQ ID NO: 1503898 - RNA, 19 nt, Human
ucaucucuuagcuccccuc

SEQ ID NO: 1503899 - RNA, 20 nt, Human
ucaucucuuagcuccccucc

SEQ ID NO: 1503900 - RNA, 21 nt, Human
ucaucucuuagcuccccucca

SEQ ID NO: 1503901 - RNA, 16 nt, Human
ucaucucucuuuaaua

SEQ ID NO: 1503902 - RNA, 13 nt, Human
ucaucucuuagcu

SEQ ID NO: 1503903 - RNA, 21 nt, Human
ucauacccacccccacccaag

SEQ ID NO: 1503904 - RNA, 20 nt, Human
ucauacccacccccacccaa

SEQ ID NO: 1503905 - RNA, 14 nt, Human
ucauacccaccccc

SEQ ID NO: 1503906 - RNA, 15 nt, Human
ucauacccaccccca

SEQ ID NO: 1503907 - RNA, 16 nt, Human
ucauuaggugugacug

SEQ ID NO: 1503908 - RNA, 22 nt, Human
ucauuaggugugacugaauuuc

SEQ ID NO: 1503909 - RNA, 21 nt, Human
ucauuaggugugacugaauuu

SEQ ID NO: 1503910 - RNA, 18 nt, Human
ucauuaggugugacugaa

SEQ ID NO: 1503911 - RNA, 22 nt, Human
ucauucagauaugauucaaaug

SEQ ID NO: 1503912 - RNA, 14 nt, Human
ucauuucuuugagu

SEQ ID NO: 1503913 - RNA, 16 nt, Human
ucauuucugcaucagc

SEQ ID NO: 1503914 - RNA, 22 nt, Human
ucauuucugcaucagcugcuga

SEQ ID NO: 1503915 - RNA, 23 nt, Human
uccaaacugacucuuaagaagac

SEQ ID NO: 1503916 - RNA, 12 nt, Human
uccaaagaaaug

SEQ ID NO: 1503917 - RNA, 17 nt, Human
uccaaaauaaaacuuuu

SEQ ID NO: 1503918 - RNA, 16 nt, Human
uccaaaauaaaacuuu

SEQ ID NO: 1503919 - RNA, 14 nt, Human
uccaagaauuucua

SEQ ID NO: 1503920 - RNA, 22 nt, Human
uccaagaagcccaggaaaggcu

SEQ ID NO: 1503921 - RNA, 20 nt, Human
uccaagaagcccaggaaagg

SEQ ID NO: 1503922 - RNA, 17 nt, Human
uccaagcauuuagaugu

SEQ ID NO: 1503923 - RNA, 23 nt, Human
uccaagcauaccaacacgagcag

SEQ ID NO: 1503924 - RNA, 19 nt, Human
uccaagaccuucuccuuca

SEQ ID NO: 1503925 - RNA, 16 nt, Human
uccagauccuggaaau

SEQ ID NO: 1503926 - RNA, 17 nt, Human
uccagauccuggaaauc

SEQ ID NO: 1503927 - RNA, 14 nt, Human
uccagauccuggaa

SEQ ID NO: 1503928 - RNA, 23 nt, Human
uccagccaaagccuccuccagcc

SEQ ID NO: 1503929 - RNA, 14 nt, Human
uccacuuggucugu

SEQ ID NO: 1503930 - RNA, 13 nt, Human
uccaccugccagg

SEQ ID NO: 1503931 - RNA, 12 nt, Human
uccacuuggucu

SEQ ID NO: 1503932 - RNA, 13 nt, Human
uccacuuggucug

SEQ ID NO: 1503933 - RNA, 14 nt, Human
uccaccuacaugag

SEQ ID NO: 1503934 - RNA, 12 nt, Human
uccaccugccag

SEQ ID NO: 1503935 - RNA, 20 nt, Human
uccaagcauuuagauguaua

SEQ ID NO: 1503936 - RNA, 15 nt, Human
uccacaagagcccag

SEQ ID NO: 1503937 - RNA, 14 nt, Human
uccacaagagccca

SEQ ID NO: 1503938 - RNA, 13 nt, Human
ucccaccucagcc

SEQ ID NO: 1503939 - RNA, 16 nt, Human
ucccaccucagccucc

SEQ ID NO: 1503940 - RNA, 14 nt, Human
ucccaccucagccu

SEQ ID NO: 1503941 - RNA, 15 nt, Human
ucccaccucagccuc

SEQ ID NO: 1503942 - RNA, 20 nt, Human
ucccaggcauuccccaggag

SEQ ID NO: 1503943 - RNA, 21 nt, Human
ucccaggcauuccccaggagg

SEQ ID NO: 1503944 - RNA, 23 nt, Human
ucccaggcauuccccaggaggcc

SEQ ID NO: 1503945 - RNA, 22 nt, Human
ucccaggcauuccccaggaggc

SEQ ID NO: 1503946 - RNA, 21 nt, Human
ucccaucugugaaaggaaaga

SEQ ID NO: 1503947 - RNA, 20 nt, Human
ucccaucucacacaugagca

SEQ ID NO: 1503948 - RNA, 23 nt, Human
ucccaucucacacaugagcauca

SEQ ID NO: 1503949 - RNA, 14 nt, Human
uccauggacuuugu

SEQ ID NO: 1503950 - RNA, 15 nt, Human
uccauggacuuuguu

SEQ ID NO: 1503951 - RNA, 23 nt, Human
uccagcucaccagccccagugcc

SEQ ID NO: 1503952 - RNA, 16 nt, Human
ucccaacucaccccag

SEQ ID NO: 1503953 - RNA, 14 nt, Human
ucccaacucacccc

SEQ ID NO: 1503954 - RNA, 15 nt, Human
ucccaacucacccca

SEQ ID NO: 1503955 - RNA, 16 nt, Human
ucccaaauuucauacc

SEQ ID NO: 1503956 - RNA, 17 nt, Human
ucccaagcucugcuccu

SEQ ID NO: 1503957 - RNA, 12 nt, Human
ucccaagcucug

SEQ ID NO: 1503958 - RNA, 13 nt, Human
ucccaagcucugc

SEQ ID NO: 1503959 - RNA, 14 nt, Human
ucccaagcucugcu

SEQ ID NO: 1503960 - RNA, 15 nt, Human
ucccaagcucugcuc

SEQ ID NO: 1503961 - RNA, 15 nt, Human
ucccuacuguaauuu

SEQ ID NO: 1503962 - RNA, 17 nt, Human
ucccucccucuuucccu

SEQ ID NO: 1503963 - RNA, 15 nt, Human
ucccucccucuuucc

SEQ ID NO: 1503964 - RNA, 18 nt, Human
uccccuguuuguuucuga

SEQ ID NO: 1503965 - RNA, 24 nt, Human
uccccugcuggguguggcgcagca

SEQ ID NO: 1503966 - RNA, 19 nt, Human
uccccuguagagugggagc

SEQ ID NO: 1503967 - RNA, 22 nt, Human
uccccuguagagugggagcuga

SEQ ID NO: 1503968 - RNA, 23 nt, Human
uccccuguccccgcacugggcuu

SEQ ID NO: 1503969 - RNA, 14 nt, Human
uccccugcugggug

SEQ ID NO: 1503970 - RNA, 15 nt, Human
uccccugcugggugu

SEQ ID NO: 1503971 - RNA, 20 nt, Human
uccccugcuggguguggcgc

SEQ ID NO: 1503972 - RNA, 21 nt, Human
uccccugcuggguguggcgca

SEQ ID NO: 1503973 - RNA, 13 nt, Human
uccccaggaggcc

SEQ ID NO: 1503974 - RNA, 13 nt, Human
uccccugccccca

SEQ ID NO: 1503975 - RNA, 14 nt, Human
uccccugcccccag

SEQ ID NO: 1503976 - RNA, 15 nt, Human
uccccugcccccagg

SEQ ID NO: 1503977 - RNA, 20 nt, Human
uccccugcccccaggacugg

SEQ ID NO: 1503978 - RNA, 22 nt, Human
uccccugcccccaggacugggc

SEQ ID NO: 1503979 - RNA, 16 nt, Human
uccccugcccccagga

SEQ ID NO: 1503980 - RNA, 17 nt, Human
uccccugcccccaggac

SEQ ID NO: 1503981 - RNA, 18 nt, Human
uccccugcccccaggacu

SEQ ID NO: 1503982 - RNA, 19 nt, Human
uccccugcccccaggacug

SEQ ID NO: 1503983 - RNA, 13 nt, Human
uccccgcccuuuu

SEQ ID NO: 1503984 - RNA, 15 nt, Human
uccccgcccuuuuuu

SEQ ID NO: 1503985 - RNA, 20 nt, Human
uccccgcacugggcuugggg

SEQ ID NO: 1503986 - RNA, 21 nt, Human
ucccccuuccauggacuuugu

SEQ ID NO: 1503987 - RNA, 19 nt, Human
ucagcacgauuucuguuua

SEQ ID NO: 1503988 - RNA, 22 nt, Human
ucagacauagaauuaacacaug

SEQ ID NO: 1503989 - RNA, 19 nt, Human
ucagacauagaauuaacac

SEQ ID NO: 1503990 - RNA, 19 nt, Human
ucagacagcugccugggau

SEQ ID NO: 1503991 - RNA, 20 nt, Human
ucagacagcugccugggauc

SEQ ID NO: 1503992 - RNA, 15 nt, Human
ucagacagcugccug

SEQ ID NO: 1503993 - RNA, 16 nt, Human
ucagacagcugccugg

SEQ ID NO: 1503994 - RNA, 17 nt, Human
ucagacagcugccuggg

SEQ ID NO: 1503995 - RNA, 18 nt, Human
ucagacagcugccuggga

SEQ ID NO: 1503996 - RNA, 17 nt, Human
ucacuugucaauaaaau

SEQ ID NO: 1503997 - RNA, 22 nt, Human
ucacucugucgcccagucugga

SEQ ID NO: 1503998 - RNA, 19 nt, Human
ucacucugucgcccagucu

SEQ ID NO: 1503999 - RNA, 12 nt, Human
ucacucugucgc

SEQ ID NO: 1504000 - RNA, 16 nt, Human
ucacucugucgcccag

SEQ ID NO: 1504001 - RNA, 20 nt, Human
ucacugcuuaacuucacaua

SEQ ID NO: 1504002 - RNA, 18 nt, Human
ucacugcuuaacuucaca

SEQ ID NO: 1504003 - RNA, 17 nt, Human
ucacugcuuaacuucac

SEQ ID NO: 1504004 - RNA, 15 nt, Human
ucacugcuuaacuuc

SEQ ID NO: 1504005 - RNA, 17 nt, Human
ucagaaaauauuaugug

SEQ ID NO: 1504006 - RNA, 19 nt, Human
ucagaaaauauuauguguu

SEQ ID NO: 1504007 - RNA, 20 nt, Human
ucagaaaauauuauguguuu

SEQ ID NO: 1504008 - RNA, 16 nt, Human
ucacgccacugcacua

SEQ ID NO: 1504009 - RNA, 13 nt, Human
ucacgccacugca

SEQ ID NO: 1504010 - RNA, 14 nt, Human
ucacgccacugcac

SEQ ID NO: 1504011 - RNA, 19 nt, Human
ucacgccuguaauccuagc

SEQ ID NO: 1504012 - RNA, 20 nt, Human
ucacgccuguaauccuagca

SEQ ID NO: 1504013 - RNA, 14 nt, Human
ucaccuuugucccc

SEQ ID NO: 1504014 - RNA, 15 nt, Human
ucaccuuugucccca

SEQ ID NO: 1504015 - RNA, 17 nt, Human
ucaccuuuguccccacc

SEQ ID NO: 1504016 - RNA, 18 nt, Human
ucaccuuuguccccaccg

SEQ ID NO: 1504017 - RNA, 22 nt, Human
ucaccuuuguccccaccgcaga

SEQ ID NO: 1504018 - RNA, 16 nt, Human
ucacaggcagguccag

SEQ ID NO: 1504019 - RNA, 12 nt, Human
ucacaggcaggu

SEQ ID NO: 1504020 - RNA, 15 nt, Human
ucacaggcaggucca

SEQ ID NO: 1504021 - RNA, 14 nt, Human
ucaccuuucccauc

SEQ ID NO: 1504022 - RNA, 12 nt, Human
ucaccuuugucc

SEQ ID NO: 1504023 - RNA, 13 nt, Human
ucacggcucacug

SEQ ID NO: 1504024 - RNA, 15 nt, Human
ucacggcucacugca

SEQ ID NO: 1504025 - RNA, 20 nt, Human
ucacggcucacugcagccuc

SEQ ID NO: 1504026 - RNA, 14 nt, Human
ucacggaagagccu

SEQ ID NO: 1504027 - RNA, 16 nt, Human
ucacggaagagccuug

SEQ ID NO: 1504028 - RNA, 17 nt, Human
ucacggaagagccuugc

SEQ ID NO: 1504029 - RNA, 13 nt, Human
ucacuccuugaaa

SEQ ID NO: 1504030 - RNA, 23 nt, Human
ucacucuccuuggugucgggcau

SEQ ID NO: 1504031 - RNA, 12 nt, Human
ucacucuggcag

SEQ ID NO: 1504032 - RNA, 13 nt, Human
ucacucuggcagc

SEQ ID NO: 1504033 - RNA, 12 nt, Human
ucacucuccuug

SEQ ID NO: 1504034 - RNA, 14 nt, Human
ucacucuccuuggu

SEQ ID NO: 1504035 - RNA, 14 nt, Human
ucacucuggcagcu

SEQ ID NO: 1504036 - RNA, 15 nt, Human
ucacucuggcagcuc

SEQ ID NO: 1504037 - RNA, 16 nt, Human
ucacucuggcagcuca

SEQ ID NO: 1504038 - RNA, 17 nt, Human
ucacucuggcagcucag

SEQ ID NO: 1504039 - RNA, 18 nt, Human
ucacucuggcagcucaga

SEQ ID NO: 1504040 - RNA, 19 nt, Human
ucacucuggcagcucagag

SEQ ID NO: 1504041 - RNA, 20 nt, Human
ucacucuggcagcucagaga

SEQ ID NO: 1504042 - RNA, 22 nt, Human
ucacucuggcagcucagagagg

SEQ ID NO: 1504043 - RNA, 23 nt, Human
uauuuuaucuuugauucuccuuc

SEQ ID NO: 1504044 - RNA, 16 nt, Human
uauuuuuuucugaaau

SEQ ID NO: 1504045 - RNA, 17 nt, Human
uauuuuuuucugaaauu

SEQ ID NO: 1504046 - RNA, 15 nt, Human
uauuuuuuuacuaau

SEQ ID NO: 1504047 - RNA, 14 nt, Human
ucaaacucuuaaaa

SEQ ID NO: 1504048 - RNA, 22 nt, Human
ucaaaacgguuuuacugcagcu

SEQ ID NO: 1504049 - RNA, 13 nt, Human
ucaaaacugcacu

SEQ ID NO: 1504050 - RNA, 13 nt, Human
uauuuauuacugu

SEQ ID NO: 1504051 - RNA, 22 nt, Human
uauuucuaugaaauauuauguu

SEQ ID NO: 1504052 - RNA, 21 nt, Human
uauuucuaugaaauauuaugu

SEQ ID NO: 1504053 - RNA, 23 nt, Human
uauuuauuaaaugcccagccccu

SEQ ID NO: 1504054 - RNA, 14 nt, Human
uaucugaaaaugua

SEQ ID NO: 1504055 - RNA, 15 nt, Human
uaucugaaaauguau

SEQ ID NO: 1504056 - RNA, 20 nt, Human
uaucugaaaauguaugugua

SEQ ID NO: 1504057 - RNA, 15 nt, Human
uauuugagaguucua

SEQ ID NO: 1504058 - RNA, 16 nt, Human
uauuugagaguucuaa

SEQ ID NO: 1504059 - RNA, 18 nt, Human
uauuugagaguucuaaau

SEQ ID NO: 1504060 - RNA, 19 nt, Human
uauuugagaguucuaaauu

SEQ ID NO: 1504061 - RNA, 20 nt, Human
uauuucuuaaacaaauguau

SEQ ID NO: 1504062 - RNA, 19 nt, Human
ucaacuccaaacugacucu

SEQ ID NO: 1504063 - RNA, 13 nt, Human
ucaaccuccuggg

SEQ ID NO: 1504064 - RNA, 14 nt, Human
ucaaccuccugggc

SEQ ID NO: 1504065 - RNA, 16 nt, Human
ucaaacuuuacuaugg

SEQ ID NO: 1504066 - RNA, 22 nt, Human
ucaaacucuugaccucagguga

SEQ ID NO: 1504067 - RNA, 13 nt, Human
ucaaacuuuacua

SEQ ID NO: 1504068 - RNA, 15 nt, Human
ucaaacuuuacuaug

SEQ ID NO: 1504069 - RNA, 16 nt, Human
ucaagcgauucuucug

SEQ ID NO: 1504070 - RNA, 17 nt, Human
ucaagcgauucuucugc

SEQ ID NO: 1504071 - RNA, 18 nt, Human
ucaaggauccugagccag

SEQ ID NO: 1504072 - RNA, 19 nt, Human
ucaaggauccugagccaga

SEQ ID NO: 1504073 - RNA, 23 nt, Human
ucaaggauccugagccagauuuc

SEQ ID NO: 1504074 - RNA, 20 nt, Human
ucaaggauccugagccagau

SEQ ID NO: 1504075 - RNA, 22 nt, Human
ucaagugauucuccugccucag

SEQ ID NO: 1504076 - RNA, 23 nt, Human
ucacaggacagcccuucuuucca

SEQ ID NO: 1504077 - RNA, 11 nt, Human
ucacaggcagg

SEQ ID NO: 1504078 - RNA, 19 nt, Human
ucacaggaaguagaggagg

SEQ ID NO: 1504079 - RNA, 22 nt, Human
ucacacaugagcaucaggccag

SEQ ID NO: 1504080 - RNA, 21 nt, Human
ucacacaugagcaucaggcca

SEQ ID NO: 1504081 - RNA, 22 nt, Human
ucacacagugagucgaggacag

SEQ ID NO: 1504082 - RNA, 23 nt, Human
ucacacagugagucgaggacagg

SEQ ID NO: 1504083 - RNA, 13 nt, Human
ucacaauacuguu

SEQ ID NO: 1504084 - RNA, 19 nt, Human
ucaauuacaggaaguacug

SEQ ID NO: 1504085 - RNA, 20 nt, Human
ucaauuacaggaaguacugg

SEQ ID NO: 1504086 - RNA, 21 nt, Human
ucacacaguauuacuucugcu

SEQ ID NO: 1504087 - RNA, 22 nt, Human
ucacacaguauuacuucugcua

SEQ ID NO: 1504088 - RNA, 13 nt, Human
ucacacagugagu

SEQ ID NO: 1504089 - RNA, 13 nt, Human
ucaaugcagcccc

SEQ ID NO: 1504090 - RNA, 18 nt, Human
ucaaugcacugacauugu

SEQ ID NO: 1504091 - RNA, 17 nt, Human
ucaaugguuugcaagga

SEQ ID NO: 1504092 - RNA, 13 nt, Human
ucaauuacaggaa

SEQ ID NO: 1504093 - RNA, 18 nt, Human
ucaauuacaggaaguacu

SEQ ID NO: 1504094 - RNA, 13 nt, Human
ucaauaggaaaaa

SEQ ID NO: 1504095 - RNA, 17 nt, Human
ucaauaggaaaaacuga

SEQ ID NO: 1504096 - RNA, 14 nt, Human
ucaauaggaaaaac

SEQ ID NO: 1504097 - RNA, 14 nt, Human
ucaaugcacugaca

SEQ ID NO: 1504098 - RNA, 13 nt, Human
guuuagcaguaua

SEQ ID NO: 1504099 - RNA, 13 nt, Human
guuuagaaagcuu

SEQ ID NO: 1504100 - RNA, 17 nt, Human
guuuagaaagcuugccc

SEQ ID NO: 1504101 - RNA, 21 nt, Human
gguuggccccugcccggcugc

SEQ ID NO: 1504102 - RNA, 21 nt, Human
guuuccuggcacugcuuccag

SEQ ID NO: 1504103 - RNA, 22 nt, Human
guuuccuggcacugcuuccagu

SEQ ID NO: 1504104 - RNA, 16 nt, Human
guuuccuggcacugcu

SEQ ID NO: 1504105 - RNA, 20 nt, Human
guuuccuggcacugcuucca

SEQ ID NO: 1504106 - RNA, 18 nt, Human
guuucagaaauguguuau

SEQ ID NO: 1504107 - RNA, 14 nt, Human
guuucagaaaugug

SEQ ID NO: 1504108 - RNA, 17 nt, Human
guuugaauauaaacacu

SEQ ID NO: 1504109 - RNA, 13 nt, Human
guuugaauauaaa

SEQ ID NO: 1504110 - RNA, 19 nt, Human
guuugaauauaaacacuau

SEQ ID NO: 1504111 - RNA, 16 nt, Human
guuugaaccaagaacu

SEQ ID NO: 1504112 - RNA, 20 nt, Human
guuucuaaagcugccagccg

SEQ ID NO: 1504113 - RNA, 16 nt, Human
guuucuaaagcugcca

SEQ ID NO: 1504114 - RNA, 14 nt, Human
guuucuaaagcugc

SEQ ID NO: 1504115 - RNA, 15 nt, Human
guuucuaaagcugcc

SEQ ID NO: 1504116 - RNA, 22 nt, Human
guuugauuaaauucuugcaaag

SEQ ID NO: 1504117 - RNA, 19 nt, Human
guuugauuaaauucuugca

SEQ ID NO: 1504118 - RNA, 17 nt, Human
guuugauuaaauucuug

SEQ ID NO: 1504119 - RNA, 20 nt, Human
guuuguaaauuaacuuuuau

SEQ ID NO: 1504120 - RNA, 19 nt, Human
guuuguaaauuaacuuuua

SEQ ID NO: 1504121 - RNA, 17 nt, Human
guuuguaaauuaacuuu

SEQ ID NO: 1504122 - RNA, 16 nt, Human
uaaaaaagaaacauuu

SEQ ID NO: 1504123 - RNA, 20 nt, Human
uaaaaaacugcugacuguuu

SEQ ID NO: 1504124 - RNA, 23 nt, Human
uaaaaaacugcugacuguuuucu

SEQ ID NO: 1504125 - RNA, 18 nt, Human
guuuucaggcuagaugua

SEQ ID NO: 1504126 - RNA, 16 nt, Human
guuuucaguguacaug

SEQ ID NO: 1504127 - RNA, 17 nt, Human
guuuucaguguacaugg

SEQ ID NO: 1504128 - RNA, 18 nt, Human
guuuguuucugaaaggga

SEQ ID NO: 1504129 - RNA, 14 nt, Human
guuuucuaaauuua

SEQ ID NO: 1504130 - RNA, 20 nt, Human
guuuuccagguuuaagcugu

SEQ ID NO: 1504131 - RNA, 16 nt, Human
guuuucauuaucucaa

SEQ ID NO: 1504132 - RNA, 15 nt, Human
guuuucugagaaaga

SEQ ID NO: 1504133 - RNA, 12 nt, Human
guuuucucuuga

SEQ ID NO: 1504134 - RNA, 19 nt, Human
guuuucucuugagagggug

SEQ ID NO: 1504135 - RNA, 19 nt, Human
guuuuguggaggagcucag

SEQ ID NO: 1504136 - RNA, 23 nt, Human
guuuuuauggcuuuugugcauua

SEQ ID NO: 1504137 - RNA, 22 nt, Human
guuuuuauggcuuuugugcauu

SEQ ID NO: 1504138 - RNA, 19 nt, Human
guuuuuauggcuuuugugc

SEQ ID NO: 1504139 - RNA, 15 nt, Human
guuuuuaacucaaua

SEQ ID NO: 1504140 - RNA, 19 nt, Human
guuuuuaacucaauauuuu

SEQ ID NO: 1504141 - RNA, 19 nt, Human
uaaaauccauacauuugug

SEQ ID NO: 1504142 - RNA, 18 nt, Human
uaaaauccauacauuugu

SEQ ID NO: 1504143 - RNA, 15 nt, Human
uaaaaaugguuuaaa

SEQ ID NO: 1504144 - RNA, 14 nt, Human
uaaaagaugaaaau

SEQ ID NO: 1504145 - RNA, 18 nt, Human
uaaacaauaucagacuuu

SEQ ID NO: 1504146 - RNA, 19 nt, Human
uaaacaagaccacguuucu

SEQ ID NO: 1504147 - RNA, 23 nt, Human
uaaacaagaccacguuucuaaag

SEQ ID NO: 1504148 - RNA, 18 nt, Human
uaaacaagaccacguuuc

SEQ ID NO: 1504149 - RNA, 19 nt, Human
uaaacaaauguaugauuac

SEQ ID NO: 1504150 - RNA, 12 nt, Human
uaaacaaaugua

SEQ ID NO: 1504151 - RNA, 20 nt, Human
uaaacugguauuuuaucuuu

SEQ ID NO: 1504152 - RNA, 19 nt, Human
uaaacuuaaucuaaaugga

SEQ ID NO: 1504153 - RNA, 18 nt, Human
uaaacuuaaucuaaaugg

SEQ ID NO: 1504154 - RNA, 14 nt, Human
uaaacuuaaucuaa

SEQ ID NO: 1504155 - RNA, 16 nt, Human
uaaacuuuaccuuuuu

SEQ ID NO: 1504156 - RNA, 22 nt, Human
uaaacuuuaccuuuuuuauaca

SEQ ID NO: 1504157 - RNA, 18 nt, Human
uaaauauaugcuaagucu

SEQ ID NO: 1504158 - RNA, 22 nt, Human
uaaauaaaccucaaaaugucua

SEQ ID NO: 1504159 - RNA, 19 nt, Human
uaaaucagccguguaacca

SEQ ID NO: 1504160 - RNA, 17 nt, Human
uaaauaaaaauaauccu

SEQ ID NO: 1504161 - RNA, 13 nt, Human
uaaaguuucuguu

SEQ ID NO: 1504162 - RNA, 21 nt, Human
uaaaguguauuuuuuuacuaa

SEQ ID NO: 1504163 - RNA, 23 nt, Human
uaaaguguauuuuuuuacuaaua

SEQ ID NO: 1504164 - RNA, 22 nt, Human
uaaaguguauuuuuuuacuaau

SEQ ID NO: 1504165 - RNA, 14 nt, Human
uaauguuucaaaca

SEQ ID NO: 1504166 - RNA, 15 nt, Human
uaauguuucaaacau

SEQ ID NO: 1504167 - RNA, 14 nt, Human
uaaugcgugcauac

SEQ ID NO: 1504168 - RNA, 21 nt, Human
uaauuaaauaaaaaucugugg

SEQ ID NO: 1504169 - RNA, 23 nt, Human
uaauuaaauuuugaguucuacau

SEQ ID NO: 1504170 - RNA, 17 nt, Human
uaauuaaaacacaacau

SEQ ID NO: 1504171 - RNA, 20 nt, Human
uaauuaaaagaauauuuuaa

SEQ ID NO: 1504172 - RNA, 18 nt, Human
uaauucuuagcucauucu

SEQ ID NO: 1504173 - RNA, 20 nt, Human
uaauucuucaccuuaggaau

SEQ ID NO: 1504174 - RNA, 22 nt, Human
uaauugacaggauuauuggaaa

SEQ ID NO: 1504175 - RNA, 20 nt, Human
uaauugacaggauuauugga

SEQ ID NO: 1504176 - RNA, 22 nt, Human
uaauuggaaaggcagcucuaaa

SEQ ID NO: 1504177 - RNA, 20 nt, Human
uaauuuguaguguuggagaa

SEQ ID NO: 1504178 - RNA, 18 nt, Human
uaauuugguuuucacauu

SEQ ID NO: 1504179 - RNA, 15 nt, Human
uaauuugguuuucac

SEQ ID NO: 1504180 - RNA, 17 nt, Human
uaauuugguuuucacau

SEQ ID NO: 1504181 - RNA, 23 nt, Human
uaauuuguaguguuggagaagaa

SEQ ID NO: 1504182 - RNA, 14 nt, Human
uaauuugugauaca

SEQ ID NO: 1504183 - RNA, 18 nt, Human
uaauuugugauacaaugc

SEQ ID NO: 1504184 - RNA, 15 nt, Human
uaauuugugauacaa

SEQ ID NO: 1504185 - RNA, 22 nt, Human
uaauuugugauacaaugcugug

SEQ ID NO: 1504186 - RNA, 19 nt, Human
uaauuugugauacaaugcu

SEQ ID NO: 1504187 - RNA, 13 nt, Human
uaauuuuaagaaa

SEQ ID NO: 1504188 - RNA, 15 nt, Human
uaauaauguuucaaa

SEQ ID NO: 1504189 - RNA, 14 nt, Human
uaauacaccacuac

SEQ ID NO: 1504190 - RNA, 21 nt, Human
uaauaguucagguaacaggca

SEQ ID NO: 1504191 - RNA, 14 nt, Human
uaauauaaaguugg

SEQ ID NO: 1504192 - RNA, 19 nt, Human
uaauauaaaguuggaugcg

SEQ ID NO: 1504193 - RNA, 15 nt, Human
uaauaacugugaagu

SEQ ID NO: 1504194 - RNA, 20 nt, Human
uaagugguacuaacuuuccu

SEQ ID NO: 1504195 - RNA, 16 nt, Human
uaauauggggaugcag

SEQ ID NO: 1504196 - RNA, 14 nt, Human
uaauauauuuccau

SEQ ID NO: 1504197 - RNA, 19 nt, Human
uaaugauaaguaaaugcua

SEQ ID NO: 1504198 - RNA, 19 nt, Human
uaaugccacuaaauugaca

SEQ ID NO: 1504199 - RNA, 12 nt, Human
uaaucuaaaugg

SEQ ID NO: 1504200 - RNA, 11 nt, Human
uaaucuaaaug

SEQ ID NO: 1504201 - RNA, 14 nt, Human
uaaauuuaguauuu

SEQ ID NO: 1504202 - RNA, 13 nt, Human
uaacagaaaugua

SEQ ID NO: 1504203 - RNA, 15 nt, Human
uaacagaaauguaca

SEQ ID NO: 1504204 - RNA, 14 nt, Human
uaacagaaauguac

SEQ ID NO: 1504205 - RNA, 17 nt, Human
uaaccaggggccaugaa

SEQ ID NO: 1504206 - RNA, 19 nt, Human
uaaccagcagaaaugccuu

SEQ ID NO: 1504207 - RNA, 16 nt, Human
uaaccagcagaaaugc

SEQ ID NO: 1504208 - RNA, 14 nt, Human
uaaccagcagaaau

SEQ ID NO: 1504209 - RNA, 19 nt, Human
uaacaggcagauacaggaa

SEQ ID NO: 1504210 - RNA, 20 nt, Human
uaacuuuuauaaacuuuacc

SEQ ID NO: 1504211 - RNA, 16 nt, Human
uaagcauuccaacuau

SEQ ID NO: 1504212 - RNA, 18 nt, Human
uaagcauuccaacuaucu

SEQ ID NO: 1504213 - RNA, 20 nt, Human
uaagcauuccaacuaucuca

SEQ ID NO: 1504214 - RNA, 13 nt, Human
uaagccagacauc

SEQ ID NO: 1504215 - RNA, 16 nt, Human
uaaggauguucuagca

SEQ ID NO: 1504216 - RNA, 23 nt, Human
uaaggaugcuuguacauaaugcg

SEQ ID NO: 1504217 - RNA, 22 nt, Human
uaaggaugcuuguacauaaugc

SEQ ID NO: 1504218 - RNA, 21 nt, Human
uaaggaugcuuguacauaaug

SEQ ID NO: 1504219 - RNA, 20 nt, Human
uaaggaugcuuguacauaau

SEQ ID NO: 1504220 - RNA, 20 nt, Human
uaagccagacaucaacagau

SEQ ID NO: 1504221 - RNA, 21 nt, Human
uaagccagacaucaacagaua

SEQ ID NO: 1504222 - RNA, 19 nt, Human
uaaggaugcuuguacauaa

SEQ ID NO: 1504223 - RNA, 17 nt, Human
uaagagagucuauuuac

SEQ ID NO: 1504224 - RNA, 21 nt, Human
uaagaacuacaaacaaaauuu

SEQ ID NO: 1504225 - RNA, 22 nt, Human
uaacuuuuauaaacuuuaccuu

SEQ ID NO: 1504226 - RNA, 21 nt, Human
uaacuuuuauaaacuuuaccu

SEQ ID NO: 1504227 - RNA, 13 nt, Human
uaacugugaaguu

SEQ ID NO: 1504228 - RNA, 19 nt, Human
uaagaaaucaaagagagaa

SEQ ID NO: 1504229 - RNA, 16 nt, Human
uaagauaaaugugcug

SEQ ID NO: 1504230 - RNA, 17 nt, Human
uaagauaaaugugcuga

SEQ ID NO: 1504231 - RNA, 16 nt, Human
uaagagguugauuaua

SEQ ID NO: 1504232 - RNA, 14 nt, Human
uaagauaaaugugc

SEQ ID NO: 1504233 - RNA, 12 nt, Human
uaagagggaggg

SEQ ID NO: 1504234 - RNA, 22 nt, Human
uaagagggagggagggcuccag

SEQ ID NO: 1504235 - RNA, 23 nt, Human
uaagagggagggagggcuccaga

SEQ ID NO: 1504236 - RNA, 23 nt, Human
uaagagggauuagggagagaaga

SEQ ID NO: 1504237 - RNA, 16 nt, Human
uagauguauguacuuc

SEQ ID NO: 1504238 - RNA, 20 nt, Human
uagauguauguacuucaugc

SEQ ID NO: 1504239 - RNA, 18 nt, Human
uagauaauacaccacuac

SEQ ID NO: 1504240 - RNA, 12 nt, Human
uagauguauaua

SEQ ID NO: 1504241 - RNA, 19 nt, Human
uagcagagaaugaaagggc

SEQ ID NO: 1504242 - RNA, 23 nt, Human
uagcagagaaugaaagggcccag

SEQ ID NO: 1504243 - RNA, 20 nt, Human
uagcagggcauggcugggaa

SEQ ID NO: 1504244 - RNA, 17 nt, Human
uagaguuuagcuggaaa

SEQ ID NO: 1504245 - RNA, 18 nt, Human
uagaguuuagcuggaaaa

SEQ ID NO: 1504246 - RNA, 16 nt, Human
uagagagagaccacuu

SEQ ID NO: 1504247 - RNA, 21 nt, Human
uagagguucaaagauauuuug

SEQ ID NO: 1504248 - RNA, 16 nt, Human
uagagguucaaagaua

SEQ ID NO: 1504249 - RNA, 19 nt, Human
uagagguucaaagauauuu

SEQ ID NO: 1504250 - RNA, 23 nt, Human
uaggaauugacccacaagaaaug

SEQ ID NO: 1504251 - RNA, 15 nt, Human
uaggaagguuaaugu

SEQ ID NO: 1504252 - RNA, 14 nt, Human
uaggccuggccaga

SEQ ID NO: 1504253 - RNA, 13 nt, Human
uaggccuggccag

SEQ ID NO: 1504254 - RNA, 13 nt, Human
uaggccaugggac

SEQ ID NO: 1504255 - RNA, 16 nt, Human
uaggccaugggacagg

SEQ ID NO: 1504256 - RNA, 13 nt, Human
uaggaacacuccu

SEQ ID NO: 1504257 - RNA, 14 nt, Human
uaggaacacuccuu

SEQ ID NO: 1504258 - RNA, 21 nt, Human
uaggaacuuaaauaaugugaa

SEQ ID NO: 1504259 - RNA, 17 nt, Human
uaggaacacuccuucac

SEQ ID NO: 1504260 - RNA, 13 nt, Human
uaggaagacuuug

SEQ ID NO: 1504261 - RNA, 14 nt, Human
uaggaagacuuugg

SEQ ID NO: 1504262 - RNA, 15 nt, Human
uaggaagacuuugga

SEQ ID NO: 1504263 - RNA, 16 nt, Human
uaggaagacuuuggaa

SEQ ID NO: 1504264 - RNA, 17 nt, Human
uaggaagacuuuggaaa

SEQ ID NO: 1504265 - RNA, 14 nt, Human
uagcccaaaaccaa

SEQ ID NO: 1504266 - RNA, 11 nt, Human
uagcugggacu

SEQ ID NO: 1504267 - RNA, 18 nt, Human
uagcugggacuacaggug

SEQ ID NO: 1504268 - RNA, 12 nt, Human
uagcugggacua

SEQ ID NO: 1504269 - RNA, 20 nt, Human
uagcugggacuacaggcacc

SEQ ID NO: 1504270 - RNA, 21 nt, Human
uagcucuaggagggcuggcaa

SEQ ID NO: 1504271 - RNA, 22 nt, Human
uagcucauucuccuuguguuac

SEQ ID NO: 1504272 - RNA, 17 nt, Human
uagccugccucuucucu

SEQ ID NO: 1504273 - RNA, 14 nt, Human
uagcuccccuccaa

SEQ ID NO: 1504274 - RNA, 18 nt, Human
uagucaaauugugugaaa

SEQ ID NO: 1504275 - RNA, 15 nt, Human
uaguggauguucuga

SEQ ID NO: 1504276 - RNA, 21 nt, Human
uaguuguaccgcaaugugacu

SEQ ID NO: 1504277 - RNA, 13 nt, Human
uaguuucuccaag

SEQ ID NO: 1504278 - RNA, 23 nt, Human
uaguuugauuaaauucuugcaaa

SEQ ID NO: 1504279 - RNA, 12 nt, Human
uaguuugcaguu

SEQ ID NO: 1504280 - RNA, 15 nt, Human
uaguuuuauaugcuu

SEQ ID NO: 1504281 - RNA, 18 nt, Human
uauaacaaugcuguauuu

SEQ ID NO: 1504282 - RNA, 18 nt, Human
uauaaugaaugaaacauu

SEQ ID NO: 1504283 - RNA, 20 nt, Human
uauaaugaaugaaacauuuu

SEQ ID NO: 1504284 - RNA, 16 nt, Human
uauacccagaaaguua

SEQ ID NO: 1504285 - RNA, 17 nt, Human
uauaauucuacuuugag

SEQ ID NO: 1504286 - RNA, 21 nt, Human
uauaauucagaaggaucuuca

SEQ ID NO: 1504287 - RNA, 14 nt, Human
uauaauguaagcuc

SEQ ID NO: 1504288 - RNA, 19 nt, Human
uauaauguaagcucuacug

SEQ ID NO: 1504289 - RNA, 20 nt, Human
uauaauguaagcucuacuga

SEQ ID NO: 1504290 - RNA, 14 nt, Human
uauauuuuaauuug

SEQ ID NO: 1504291 - RNA, 13 nt, Human
uauauuugaaaua

SEQ ID NO: 1504292 - RNA, 14 nt, Human
uauauuugaaauau

SEQ ID NO: 1504293 - RNA, 20 nt, Human
uauauuugaaauauugacuu

SEQ ID NO: 1504294 - RNA, 23 nt, Human
uauauuuauuacuguaagaaaau

SEQ ID NO: 1504295 - RNA, 15 nt, Human
uauauacauauauau

SEQ ID NO: 1504296 - RNA, 20 nt, Human
uauaugcucugcauguuaca

SEQ ID NO: 1504297 - RNA, 14 nt, Human
uauccuucagccug

SEQ ID NO: 1504298 - RNA, 16 nt, Human
uaucuaaauguugaaa

SEQ ID NO: 1504299 - RNA, 15 nt, Human
uaucuaaauguugaa

SEQ ID NO: 1504300 - RNA, 19 nt, Human
uaucgucacugcuuaacuu

SEQ ID NO: 1504301 - RNA, 16 nt, Human
uaucaugacaaagacu

SEQ ID NO: 1504302 - RNA, 17 nt, Human
uaucaugacaaagacug

SEQ ID NO: 1504303 - RNA, 17 nt, Human
uaucaggugcugccauc

SEQ ID NO: 1504304 - RNA, 19 nt, Human
uauauuuuuuguuaaauga

SEQ ID NO: 1504305 - RNA, 16 nt, Human
uacagaaauauccaug

SEQ ID NO: 1504306 - RNA, 13 nt, Human
uacagaauuuuau

SEQ ID NO: 1504307 - RNA, 24 nt, Human
uacagcaaggagauuuacaacugg

SEQ ID NO: 1504308 - RNA, 18 nt, Human
uacagaaaaguugaauuu

SEQ ID NO: 1504309 - RNA, 22 nt, Human
uacagaaaaguugaauuuuaca

SEQ ID NO: 1504310 - RNA, 13 nt, Human
uacacuuuaugca

SEQ ID NO: 1504311 - RNA, 19 nt, Human
uacacuguuucaaacuuua

SEQ ID NO: 1504312 - RNA, 18 nt, Human
uacacuguuucaaacuuu

SEQ ID NO: 1504313 - RNA, 17 nt, Human
uacacuguuucaaacuu

SEQ ID NO: 1504314 - RNA, 19 nt, Human
uacaggaaaagcugcugac

SEQ ID NO: 1504315 - RNA, 16 nt, Human
uacaggcacccaccau

SEQ ID NO: 1504316 - RNA, 23 nt, Human
uacagcuugaccgugaggccaga

SEQ ID NO: 1504317 - RNA, 17 nt, Human
uacaggaaaagcugcug

SEQ ID NO: 1504318 - RNA, 18 nt, Human
uacaggaaaagcugcuga

SEQ ID NO: 1504319 - RNA, 22 nt, Human
uacagcuugaccgugaggccag

SEQ ID NO: 1504320 - RNA, 13 nt, Human
uaauuuugugaag

SEQ ID NO: 1504321 - RNA, 17 nt, Human
uacacaaugguuuucuu

SEQ ID NO: 1504322 - RNA, 21 nt, Human
uacacaaugguuuucuugugu

SEQ ID NO: 1504323 - RNA, 23 nt, Human
uacacaaugguuuucuugugugu

SEQ ID NO: 1504324 - RNA, 21 nt, Human
uacacacacacgcgugcacac

SEQ ID NO: 1504325 - RNA, 15 nt, Human
uacacacacauacac

SEQ ID NO: 1504326 - RNA, 18 nt, Human
uacacaccuuauauuuac

SEQ ID NO: 1504327 - RNA, 14 nt, Human
uacacuguuucaaa

SEQ ID NO: 1504328 - RNA, 16 nt, Human
uacacugugcugaguc

SEQ ID NO: 1504329 - RNA, 22 nt, Human
uacacacugcauguuugugauu

SEQ ID NO: 1504330 - RNA, 15 nt, Human
uacccaaauuaagag

SEQ ID NO: 1504331 - RNA, 12 nt, Human
uacccaccccca

SEQ ID NO: 1504332 - RNA, 15 nt, Human
uacccacccccaccc

SEQ ID NO: 1504333 - RNA, 23 nt, Human
uacccacccccacccaagggccu

SEQ ID NO: 1504334 - RNA, 17 nt, Human
uacccacccccacccaa

SEQ ID NO: 1504335 - RNA, 19 nt, Human
uacccacccccacccaagg

SEQ ID NO: 1504336 - RNA, 11 nt, Human
uacccacugcu

SEQ ID NO: 1504337 - RNA, 12 nt, Human
uacccacugcuc

SEQ ID NO: 1504338 - RNA, 13 nt, Human
uacccacugcucu

SEQ ID NO: 1504339 - RNA, 14 nt, Human
uacccacugcucug

SEQ ID NO: 1504340 - RNA, 15 nt, Human
uacccacugcucugg

SEQ ID NO: 1504341 - RNA, 18 nt, Human
uacccagcgagcccuggu

SEQ ID NO: 1504342 - RNA, 22 nt, Human
uacccaggugcuaggaacacuc

SEQ ID NO: 1504343 - RNA, 13 nt, Human
uaccacagacaua

SEQ ID NO: 1504344 - RNA, 23 nt, Human
uaccacaggaaccacaagacugc

SEQ ID NO: 1504345 - RNA, 18 nt, Human
uaccaccagucugacugu

SEQ ID NO: 1504346 - RNA, 23 nt, Human
uaccauuuugggguacccacugc

SEQ ID NO: 1504347 - RNA, 16 nt, Human
uacauuuguauaaaau

SEQ ID NO: 1504348 - RNA, 23 nt, Human
uacauuuggagacacaacuauuu

SEQ ID NO: 1504349 - RNA, 17 nt, Human
uacauuuguauaaaaua

SEQ ID NO: 1504350 - RNA, 11 nt, Human
uacauuugugu

SEQ ID NO: 1504351 - RNA, 21 nt, Human
uacaugagguacugagaguga

SEQ ID NO: 1504352 - RNA, 22 nt, Human
uacaugagguacugagagugaa

SEQ ID NO: 1504353 - RNA, 16 nt, Human
uaccaacacgagcagg

SEQ ID NO: 1504354 - RNA, 18 nt, Human
uacauaagauaaaugugc

SEQ ID NO: 1504355 - RNA, 19 nt, Human
uacauaagauaaaugugcu

SEQ ID NO: 1504356 - RNA, 23 nt, Human
uacaguuacucagaauucucuag

SEQ ID NO: 1504357 - RNA, 19 nt, Human
uacaguuacucagaauucu

SEQ ID NO: 1504358 - RNA, 22 nt, Human
uacauaagauaaaugugcugaa

SEQ ID NO: 1504359 - RNA, 15 nt, Human
uacauaaguaauuca

SEQ ID NO: 1504360 - RNA, 20 nt, Human
uaccuuuguauucucuccug

SEQ ID NO: 1504361 - RNA, 20 nt, Human
uaccuuuuuuauacauaaac

SEQ ID NO: 1504362 - RNA, 19 nt, Human
uaccuuuuuuauacauaaa

SEQ ID NO: 1504363 - RNA, 18 nt, Human
uaccuuuuuuauacauaa

SEQ ID NO: 1504364 - RNA, 22 nt, Human
uacccaucccauaugccugggc

SEQ ID NO: 1504365 - RNA, 18 nt, Human
uacuaaccagcagaaaug

SEQ ID NO: 1504366 - RNA, 19 nt, Human
uacuaaccagcagaaaugc

SEQ ID NO: 1504367 - RNA, 22 nt, Human
uaccuuuuuuauacauaaacaa

SEQ ID NO: 1504368 - RNA, 23 nt, Human
uaccuuuguucccaaauuucaua

SEQ ID NO: 1504369 - RNA, 20 nt, Human
uacgaagaguauuuuugaca

SEQ ID NO: 1504370 - RNA, 22 nt, Human
uacgaagaguauuuuugacaga

SEQ ID NO: 1504371 - RNA, 23 nt, Human
uacgaagaguauuuuugacagaa

SEQ ID NO: 1504372 - RNA, 17 nt, Human
uacuaauagacaauuua

SEQ ID NO: 1504373 - RNA, 15 nt, Human
uacuaauagacaauu

SEQ ID NO: 1504374 - RNA, 13 nt, Human
uacuaacuuuccu

SEQ ID NO: 1504375 - RNA, 20 nt, Human
uacuaauagacaauuuauua

SEQ ID NO: 1504376 - RNA, 12 nt, Human
uacuacaguccu

SEQ ID NO: 1504377 - RNA, 17 nt, Human
uacuacaguccucccau

SEQ ID NO: 1504378 - RNA, 22 nt, Human
uacucagaauucucuaguuuga

SEQ ID NO: 1504379 - RNA, 16 nt, Human
uacucagaauucucua

SEQ ID NO: 1504380 - RNA, 14 nt, Human
uacucaccucaccc

SEQ ID NO: 1504381 - RNA, 13 nt, Human
uacuacuccugua

SEQ ID NO: 1504382 - RNA, 12 nt, Human
uacucaccucac

SEQ ID NO: 1504383 - RNA, 20 nt, Human
uacuacaguccucccaucuc

SEQ ID NO: 1504384 - RNA, 23 nt, Human
uacugauguuccuagugaaagag

SEQ ID NO: 1504385 - RNA, 15 nt, Human
uacugaggugcuaug

SEQ ID NO: 1504386 - RNA, 14 nt, Human
uacucccaucugug

SEQ ID NO: 1504387 - RNA, 16 nt, Human
uacucccaucugugaa

SEQ ID NO: 1504388 - RNA, 17 nt, Human
uacucccaucugugaaa

SEQ ID NO: 1504389 - RNA, 17 nt, Human
uagaaagacagagcugg

SEQ ID NO: 1504390 - RNA, 17 nt, Human
uagaacagauaaucagu

SEQ ID NO: 1504391 - RNA, 15 nt, Human
uagaaauauaauuga

SEQ ID NO: 1504392 - RNA, 20 nt, Human
uagaaauaucugaaaaugua

SEQ ID NO: 1504393 - RNA, 21 nt, Human
uagaaauaucugaaaauguau

SEQ ID NO: 1504394 - RNA, 23 nt, Human
uagaaauaucugaaaauguaugu

SEQ ID NO: 1504395 - RNA, 18 nt, Human
uacuugaauaaccaucug

SEQ ID NO: 1504396 - RNA, 20 nt, Human
uacuugaauaaccaucugaa

SEQ ID NO: 1504397 - RNA, 19 nt, Human
uacuuguggacacagcucu

SEQ ID NO: 1504398 - RNA, 15 nt, Human
uacuuguggacacag

SEQ ID NO: 1504399 - RNA, 18 nt, Human
uacuuguggacacagcuc

SEQ ID NO: 1504400 - RNA, 17 nt, Human
uacugcauaugaaagga

SEQ ID NO: 1504401 - RNA, 21 nt, Human
uacuguaucaugacaaagacu

SEQ ID NO: 1504402 - RNA, 17 nt, Human
gguuaggcauuguggga

SEQ ID NO: 1504403 - RNA, 13 nt, Human
gguuauggagagg

SEQ ID NO: 1504404 - RNA, 21 nt, Human
gguuacccaguuagcucucaa

SEQ ID NO: 1504405 - RNA, 13 nt, Human
gguugagguuuca

SEQ ID NO: 1504406 - RNA, 13 nt, Human
gguucaaagauau

SEQ ID NO: 1504407 - RNA, 21 nt, Human
gguucaaagauauuuugcuuu

SEQ ID NO: 1504408 - RNA, 16 nt, Human
gguggugaccucugcc

SEQ ID NO: 1504409 - RNA, 14 nt, Human
gguggugaccucug

SEQ ID NO: 1504410 - RNA, 15 nt, Human
gguggugaccucugc

SEQ ID NO: 1504411 - RNA, 12 nt, Human
gguggcuggguu

SEQ ID NO: 1504412 - RNA, 17 nt, Human
ggugucaagagggucug

SEQ ID NO: 1504413 - RNA, 19 nt, Human
ggugucaagagggucugag

SEQ ID NO: 1504414 - RNA, 19 nt, Human
ggugucaccugaagacuca

SEQ ID NO: 1504415 - RNA, 18 nt, Human
ggugguuucagaaaugug

SEQ ID NO: 1504416 - RNA, 17 nt, Human
ggugguuucagaaaugu

SEQ ID NO: 1504417 - RNA, 21 nt, Human
ggugguuauggagaggguguc

SEQ ID NO: 1504418 - RNA, 18 nt, Human
ggugguuuucuguucuuu

SEQ ID NO: 1504419 - RNA, 15 nt, Human
ggugguuuucuguuc

SEQ ID NO: 1504420 - RNA, 21 nt, Human
gguggugucuccaacccccca

SEQ ID NO: 1504421 - RNA, 17 nt, Human
ggucccaccccacacac

SEQ ID NO: 1504422 - RNA, 22 nt, Human
ggucccaccccacacacgccag

SEQ ID NO: 1504423 - RNA, 21 nt, Human
ggucucacuauguugcccagg

SEQ ID NO: 1504424 - RNA, 22 nt, Human
ggucucacucugucgcccaguc

SEQ ID NO: 1504425 - RNA, 23 nt, Human
ggucucacucugucgcccagucu

SEQ ID NO: 1504426 - RNA, 22 nt, Human
ggugaccagcaccaucucuccu

SEQ ID NO: 1504427 - RNA, 14 nt, Human
ggucugacccacug

SEQ ID NO: 1504428 - RNA, 15 nt, Human
ggugagaagcagagg

SEQ ID NO: 1504429 - RNA, 16 nt, Human
ggugagaggggaacag

SEQ ID NO: 1504430 - RNA, 15 nt, Human
ggugcgaucuggguu

SEQ ID NO: 1504431 - RNA, 23 nt, Human
ggugcuacaaaaacacagcaagg

SEQ ID NO: 1504432 - RNA, 16 nt, Human
ggugcuaucuccccca

SEQ ID NO: 1504433 - RNA, 17 nt, Human
ggugcuaucucccccag

SEQ ID NO: 1504434 - RNA, 19 nt, Human
ggugcuaucucccccagcc

SEQ ID NO: 1504435 - RNA, 20 nt, Human
ggugcuaucucccccagccc

SEQ ID NO: 1504436 - RNA, 15 nt, Human
ggugcugccauccag

SEQ ID NO: 1504437 - RNA, 21 nt, Human
ggugcuaucucccccagcccc

SEQ ID NO: 1504438 - RNA, 21 nt, Human
ggugcugccauccagguucag

SEQ ID NO: 1504439 - RNA, 19 nt, Human
gguggcagugggagcugcc

SEQ ID NO: 1504440 - RNA, 22 nt, Human
gguggcagugggagcugccugu

SEQ ID NO: 1504441 - RNA, 23 nt, Human
gguggccucccaacucaccccag

SEQ ID NO: 1504442 - RNA, 22 nt, Human
gguggccucccaacucacccca

SEQ ID NO: 1504443 - RNA, 17 nt, Human
gggguggggaccucagg

SEQ ID NO: 1504444 - RNA, 17 nt, Human
gggggaucacagccucu

SEQ ID NO: 1504445 - RNA, 22 nt, Human
ggggugcggcggucccagcucc

SEQ ID NO: 1504446 - RNA, 12 nt, Human
gggguggccucc

SEQ ID NO: 1504447 - RNA, 22 nt, Human
gggggaggugggauccuccagg

SEQ ID NO: 1504448 - RNA, 23 nt, Human
ggggcugcaccggcuggccuggc

SEQ ID NO: 1504449 - RNA, 19 nt, Human
ggggcugaggugggaggau

SEQ ID NO: 1504450 - RNA, 12 nt, Human
ggggcugcaccg

SEQ ID NO: 1504451 - RNA, 21 nt, Human
ggggcugcaccggcuggccug

SEQ ID NO: 1504452 - RNA, 22 nt, Human
ggggcugcaccggcuggccugg

SEQ ID NO: 1504453 - RNA, 17 nt, Human
ggguaagugagagaggg

SEQ ID NO: 1504454 - RNA, 14 nt, Human
gggucucacucugu

SEQ ID NO: 1504455 - RNA, 12 nt, Human
gggucugaggaa

SEQ ID NO: 1504456 - RNA, 21 nt, Human
gggucugaggaauccagaccc

SEQ ID NO: 1504457 - RNA, 17 nt, Human
ggggcugaggugggagg

SEQ ID NO: 1504458 - RNA, 14 nt, Human
ggggcucuucucau

SEQ ID NO: 1504459 - RNA, 16 nt, Human
ggggcaacccugguga

SEQ ID NO: 1504460 - RNA, 16 nt, Human
ggggaaaaucagccug

SEQ ID NO: 1504461 - RNA, 17 nt, Human
ggggaaaaucagccugc

SEQ ID NO: 1504462 - RNA, 19 nt, Human
ggggaaaaucagccugcuc

SEQ ID NO: 1504463 - RNA, 21 nt, Human
ggggaaaaucagccugcucca

SEQ ID NO: 1504464 - RNA, 24 nt, Human
ggggaaaaucagccugcuccagcu

SEQ ID NO: 1504465 - RNA, 22 nt, Human
ggguucaagcgauucuucugcu

SEQ ID NO: 1504466 - RNA, 23 nt, Human
ggguucaagcgauucuucugcuu

SEQ ID NO: 1504467 - RNA, 16 nt, Human
ggguuggccccugccc

SEQ ID NO: 1504468 - RNA, 21 nt, Human
ggguuggagcaguagcuggag

SEQ ID NO: 1504469 - RNA, 17 nt, Human
ggguucuacccaggugc

SEQ ID NO: 1504470 - RNA, 12 nt, Human
ggguucuaccca

SEQ ID NO: 1504471 - RNA, 17 nt, Human
gggugaagugaagacaa

SEQ ID NO: 1504472 - RNA, 19 nt, Human
gggugacagagcaagugag

SEQ ID NO: 1504473 - RNA, 21 nt, Human
gggugcggcggucccagcucc

SEQ ID NO: 1504474 - RNA, 18 nt, Human
gguagcauuuguguugaa

SEQ ID NO: 1504475 - RNA, 11 nt, Human
gguagaacaca

SEQ ID NO: 1504476 - RNA, 23 nt, Human
gguagaaauaucugaaaauguau

SEQ ID NO: 1504477 - RNA, 22 nt, Human
gguagaagcccuucuaccuucc

SEQ ID NO: 1504478 - RNA, 11 nt, Human
gguacccacug

SEQ ID NO: 1504479 - RNA, 16 nt, Human
gguacccacugcucug

SEQ ID NO: 1504480 - RNA, 13 nt, Human
gguacccacugcu

SEQ ID NO: 1504481 - RNA, 20 nt, Human
gguacuuguggacacagcuc

SEQ ID NO: 1504482 - RNA, 22 nt, Human
gguagaaauaucugaaaaugua

SEQ ID NO: 1504483 - RNA, 16 nt, Human
gguacuuguggacaca

SEQ ID NO: 1504484 - RNA, 17 nt, Human
gguacuuguggacacag

SEQ ID NO: 1504485 - RNA, 19 nt, Human
ggucaccagacggggcugg

SEQ ID NO: 1504486 - RNA, 12 nt, Human
ggucacucuggc

SEQ ID NO: 1504487 - RNA, 15 nt, Human
ggucccaccccacac

SEQ ID NO: 1504488 - RNA, 16 nt, Human
ggucccaccccacaca

SEQ ID NO: 1504489 - RNA, 11 nt, Human
ggucagagccu

SEQ ID NO: 1504490 - RNA, 13 nt, Human
gggcccugccucc

SEQ ID NO: 1504491 - RNA, 13 nt, Human
gggccuggccuga

SEQ ID NO: 1504492 - RNA, 19 nt, Human
gggccuggccugagcuggg

SEQ ID NO: 1504493 - RNA, 14 nt, Human
gggccuggccugag

SEQ ID NO: 1504494 - RNA, 18 nt, Human
gggccuggccugagcugg

SEQ ID NO: 1504495 - RNA, 13 nt, Human
gggccuggcuccc

SEQ ID NO: 1504496 - RNA, 20 nt, Human
gggcagugguguggagaagc

SEQ ID NO: 1504497 - RNA, 18 nt, Human
gggcagugggucccagau

SEQ ID NO: 1504498 - RNA, 12 nt, Human
gggcaugacacg

SEQ ID NO: 1504499 - RNA, 23 nt, Human
gggccacagagaaaguacuucuc

SEQ ID NO: 1504500 - RNA, 16 nt, Human
gggccacagagaaagu

SEQ ID NO: 1504501 - RNA, 17 nt, Human
gggcccagagagggugg

SEQ ID NO: 1504502 - RNA, 23 nt, Human
gggauccuggaguucugguuccu

SEQ ID NO: 1504503 - RNA, 18 nt, Human
gggcaacccuggugacca

SEQ ID NO: 1504504 - RNA, 15 nt, Human
gggauccuccaggug

SEQ ID NO: 1504505 - RNA, 16 nt, Human
gggauccuccaggugc

SEQ ID NO: 1504506 - RNA, 21 nt, Human
gggauaugauuuaaaucagcc

SEQ ID NO: 1504507 - RNA, 13 nt, Human
gggauagagagag

SEQ ID NO: 1504508 - RNA, 17 nt, Human
gggaggugggauccucc

SEQ ID NO: 1504509 - RNA, 16 nt, Human
gggaggugaccccagg

SEQ ID NO: 1504510 - RNA, 18 nt, Human
gggagugacagaggcagc

SEQ ID NO: 1504511 - RNA, 11 nt, Human
gggagugagcu

SEQ ID NO: 1504512 - RNA, 14 nt, Human
gggagugagcuggu

SEQ ID NO: 1504513 - RNA, 17 nt, Human
gggcagguugguggggg

SEQ ID NO: 1504514 - RNA, 11 nt, Human
gggcagagcag

SEQ ID NO: 1504515 - RNA, 12 nt, Human
gggcagagcaga

SEQ ID NO: 1504516 - RNA, 20 nt, Human
gggcacucagaagacacuga

SEQ ID NO: 1504517 - RNA, 14 nt, Human
gggcagaaggaaga

SEQ ID NO: 1504518 - RNA, 18 nt, Human
gggcagaaggaagacuuc

SEQ ID NO: 1504519 - RNA, 16 nt, Human
gggcacucagaagaca

SEQ ID NO: 1504520 - RNA, 19 nt, Human
gggcacucagaagacacug

SEQ ID NO: 1504521 - RNA, 13 nt, Human
gggcacagggucu

SEQ ID NO: 1504522 - RNA, 16 nt, Human
gggcacagggucucua

SEQ ID NO: 1504523 - RNA, 23 nt, Human
gggcacaccgggcacucagaaga

SEQ ID NO: 1504524 - RNA, 18 nt, Human
gggcacagaaaauggaag

SEQ ID NO: 1504525 - RNA, 20 nt, Human
gggcacagaaaauggaagac

SEQ ID NO: 1504526 - RNA, 21 nt, Human
gggcacagaaaauggaagaca

SEQ ID NO: 1504527 - RNA, 13 nt, Human
gggaaugaagaua

SEQ ID NO: 1504528 - RNA, 16 nt, Human
gggaauggcacagccc

SEQ ID NO: 1504529 - RNA, 22 nt, Human
gggaauggcacagcccaaagaa

SEQ ID NO: 1504530 - RNA, 17 nt, Human
gggaagggggcugggac

SEQ ID NO: 1504531 - RNA, 14 nt, Human
gggaagggggcugg

SEQ ID NO: 1504532 - RNA, 16 nt, Human
gggaagggggcuggga

SEQ ID NO: 1504533 - RNA, 23 nt, Human
gggaaggauacaaaagcauguga

SEQ ID NO: 1504534 - RNA, 21 nt, Human
gggaaggauacaaaagcaugu

SEQ ID NO: 1504535 - RNA, 14 nt, Human
ggcuuuugugcauu

SEQ ID NO: 1504536 - RNA, 17 nt, Human
gggacuacaggcaccca

SEQ ID NO: 1504537 - RNA, 16 nt, Human
gggacucaaugcacug

SEQ ID NO: 1504538 - RNA, 12 nt, Human
gggaccucaggc

SEQ ID NO: 1504539 - RNA, 13 nt, Human
gggaccucaggcc

SEQ ID NO: 1504540 - RNA, 15 nt, Human
gggaccucaggccug

SEQ ID NO: 1504541 - RNA, 22 nt, Human
ggcuugaguuuaaauuguaaua

SEQ ID NO: 1504542 - RNA, 21 nt, Human
ggcuuggggaccagagcugcc

SEQ ID NO: 1504543 - RNA, 10 nt, Human
ggcuuuugug

SEQ ID NO: 1504544 - RNA, 18 nt, Human
ggcugggcuucaguggca

SEQ ID NO: 1504545 - RNA, 13 nt, Human
ggcugggcuucag

SEQ ID NO: 1504546 - RNA, 17 nt, Human
ggcugggcuucaguggc

SEQ ID NO: 1504547 - RNA, 17 nt, Human
ggcugggcucccuuccc

SEQ ID NO: 1504548 - RNA, 18 nt, Human
ggcugggcucccuuccca

SEQ ID NO: 1504549 - RNA, 12 nt, Human
ggcugggcuuca

SEQ ID NO: 1504550 - RNA, 21 nt, Human
ggcuuagucacugagacagcc

SEQ ID NO: 1504551 - RNA, 11 nt, Human
ggcugcuucaa

SEQ ID NO: 1504552 - RNA, 12 nt, Human
ggcugcuucaag

SEQ ID NO: 1504553 - RNA, 14 nt, Human
ggcugcuucaagga

SEQ ID NO: 1504554 - RNA, 22 nt, Human
ggcugcuucaaggauccugagc

SEQ ID NO: 1504555 - RNA, 12 nt, Human
ggcugcagggag

SEQ ID NO: 1504556 - RNA, 13 nt, Human
ggcugcagggagu

SEQ ID NO: 1504557 - RNA, 14 nt, Human
ggcugcugaaggcu

SEQ ID NO: 1504558 - RNA, 17 nt, Human
ggcugcagggaguccga

SEQ ID NO: 1504559 - RNA, 18 nt, Human
ggcugcugaaggcucgag

SEQ ID NO: 1504560 - RNA, 15 nt, Human
ggcugcugaaggcuc

SEQ ID NO: 1504561 - RNA, 17 nt, Human
ggcugcugaaggcucga

SEQ ID NO: 1504562 - RNA, 15 nt, Human
ggcugggcagaggaa

SEQ ID NO: 1504563 - RNA, 19 nt, Human
ggcugggcagaggaaagca

SEQ ID NO: 1504564 - RNA, 13 nt, Human
ggcugggcagagg

SEQ ID NO: 1504565 - RNA, 14 nt, Human
ggcugggcagagga

SEQ ID NO: 1504566 - RNA, 20 nt, Human
ggcugggagagccuuccagg

SEQ ID NO: 1504567 - RNA, 23 nt, Human
ggcugggagagccuuccaggggu

SEQ ID NO: 1504568 - RNA, 19 nt, Human
ggcugggagagccuuccag

SEQ ID NO: 1504569 - RNA, 23 nt, Human
ggcugcuucaaggauccugagcc

SEQ ID NO: 1504570 - RNA, 20 nt, Human
ggccccugcccggcugcgga

SEQ ID NO: 1504571 - RNA, 16 nt, Human
ggccccugcccggcug

SEQ ID NO: 1504572 - RNA, 17 nt, Human
ggccccugcccggcugc

SEQ ID NO: 1504573 - RNA, 13 nt, Human
ggcugagguggga

SEQ ID NO: 1504574 - RNA, 15 nt, Human
ggcugaggugggagg

SEQ ID NO: 1504575 - RNA, 11 nt, Human
ggcugagccug

SEQ ID NO: 1504576 - RNA, 24 nt, Human
ggcugcaaaggguaucaggugcug

SEQ ID NO: 1504577 - RNA, 17 nt, Human
ggcugcaccggcuggcc

SEQ ID NO: 1504578 - RNA, 18 nt, Human
ggcugcaccggcuggccu

SEQ ID NO: 1504579 - RNA, 19 nt, Human
ggcugcaccggcuggccug

SEQ ID NO: 1504580 - RNA, 18 nt, Human
ggcugcaaaggguaucag

SEQ ID NO: 1504581 - RNA, 22 nt, Human
ggcugcaaaggguaucaggugc

SEQ ID NO: 1504582 - RNA, 23 nt, Human
ggcugcaaaggguaucaggugcu

SEQ ID NO: 1504583 - RNA, 14 nt, Human
ggccaggccagagg

SEQ ID NO: 1504584 - RNA, 16 nt, Human
ggccaggccagaggga

SEQ ID NO: 1504585 - RNA, 11 nt, Human
ggccaggcugg

SEQ ID NO: 1504586 - RNA, 16 nt, Human
ggccaggagccuccug

SEQ ID NO: 1504587 - RNA, 16 nt, Human
ggccacugugaagaga

SEQ ID NO: 1504588 - RNA, 14 nt, Human
ggccaggagccucc

SEQ ID NO: 1504589 - RNA, 11 nt, Human
ggccacuguga

SEQ ID NO: 1504590 - RNA, 17 nt, Human
ggcagguuggugggggc

SEQ ID NO: 1504591 - RNA, 15 nt, Human
ggcagguuggugggg

SEQ ID NO: 1504592 - RNA, 23 nt, Human
ggcauguucucugaggacacuaa

SEQ ID NO: 1504593 - RNA, 16 nt, Human
ggccaccugcggugcu

SEQ ID NO: 1504594 - RNA, 22 nt, Human
ggccaccugcggugcuaucucc

SEQ ID NO: 1504595 - RNA, 16 nt, Human
ggcauuccccaggagg

SEQ ID NO: 1504596 - RNA, 15 nt, Human
ggcauuccccaggag

SEQ ID NO: 1504597 - RNA, 16 nt, Human
ggccacaagacccuug

SEQ ID NO: 1504598 - RNA, 17 nt, Human
ggccacaagacccuugu

SEQ ID NO: 1504599 - RNA, 12 nt, Human
ggccaggcuggu

SEQ ID NO: 1504600 - RNA, 22 nt, Human
ggccaugggacagggaggacgc

SEQ ID NO: 1504601 - RNA, 13 nt, Human
ggccaugggccuc

SEQ ID NO: 1504602 - RNA, 16 nt, Human
ggccccucaggguccc

SEQ ID NO: 1504603 - RNA, 19 nt, Human
ggccccucagggucccugg

SEQ ID NO: 1504604 - RNA, 20 nt, Human
ggccccucagggucccuggu

SEQ ID NO: 1504605 - RNA, 21 nt, Human
ggccccucagggucccuggug

SEQ ID NO: 1504606 - RNA, 17 nt, Human
ggccccugccacccugg

SEQ ID NO: 1504607 - RNA, 18 nt, Human
ggccccugccacccuggg

SEQ ID NO: 1504608 - RNA, 13 nt, Human
ggccccugcccgg

SEQ ID NO: 1504609 - RNA, 13 nt, Human
ggccccugccacc

SEQ ID NO: 1504610 - RNA, 16 nt, Human
ggccccugccacccug

SEQ ID NO: 1504611 - RNA, 12 nt, Human
ggccccugccac

SEQ ID NO: 1504612 - RNA, 21 nt, Human
ggaucagucugauucccaagc

SEQ ID NO: 1504613 - RNA, 18 nt, Human
ggcaacugcauuggcuuu

SEQ ID NO: 1504614 - RNA, 19 nt, Human
ggcaacugcauuggcuuug

SEQ ID NO: 1504615 - RNA, 16 nt, Human
ggcaaggcugucaauu

SEQ ID NO: 1504616 - RNA, 17 nt, Human
ggcacccggccccugcu

SEQ ID NO: 1504617 - RNA, 15 nt, Human
ggcacccggccccug

SEQ ID NO: 1504618 - RNA, 16 nt, Human
ggcacccggccccugc

SEQ ID NO: 1504619 - RNA, 22 nt, Human
ggcagagcagagaccaucccug

SEQ ID NO: 1504620 - RNA, 20 nt, Human
ggcagagcagagaccauccc

SEQ ID NO: 1504621 - RNA, 15 nt, Human
ggcagagcagagacc

SEQ ID NO: 1504622 - RNA, 16 nt, Human
ggcagagcagagacca

SEQ ID NO: 1504623 - RNA, 18 nt, Human
ggcagcagaagggggugg

SEQ ID NO: 1504624 - RNA, 17 nt, Human
ggcagaggaaagcaaag

SEQ ID NO: 1504625 - RNA, 23 nt, Human
ggcagaguugaagacagagcuac

SEQ ID NO: 1504626 - RNA, 23 nt, Human
ggcagauacaggaaaagcugcug

SEQ ID NO: 1504627 - RNA, 13 nt, Human
ggcagguccaggg

SEQ ID NO: 1504628 - RNA, 23 nt, Human
ggcaggucuugaacuccuggccu

SEQ ID NO: 1504629 - RNA, 21 nt, Human
ggcagcugcgguccacccagg

SEQ ID NO: 1504630 - RNA, 21 nt, Human
ggcagcuugaggguugggcug

SEQ ID NO: 1504631 - RNA, 19 nt, Human
ggcagcugcgguccaccca

SEQ ID NO: 1504632 - RNA, 13 nt, Human
ggcagcucagaga

SEQ ID NO: 1504633 - RNA, 22 nt, Human
ggcagcucaccucucccuugga

SEQ ID NO: 1504634 - RNA, 18 nt, Human
ggcagcucaccucucccu

SEQ ID NO: 1504635 - RNA, 21 nt, Human
ggcagcucaccucucccuugg

SEQ ID NO: 1504636 - RNA, 20 nt, Human
ggaggacgcucucuggccuu

SEQ ID NO: 1504637 - RNA, 21 nt, Human
ggaggacgcucucuggccuuc

SEQ ID NO: 1504638 - RNA, 22 nt, Human
ggagccgaagcccaggggccgg

SEQ ID NO: 1504639 - RNA, 15 nt, Human
ggagccgaagcccag

SEQ ID NO: 1504640 - RNA, 17 nt, Human
ggagccgaagcccaggg

SEQ ID NO: 1504641 - RNA, 19 nt, Human
ggagccgaagcccaggggc

SEQ ID NO: 1504642 - RNA, 12 nt, Human
ggagggcuccag

SEQ ID NO: 1504643 - RNA, 13 nt, Human
ggagggcuccaga

SEQ ID NO: 1504644 - RNA, 12 nt, Human
ggagggagggcu

SEQ ID NO: 1504645 - RNA, 16 nt, Human
ggagggcagcagaagg

SEQ ID NO: 1504646 - RNA, 15 nt, Human
ggaggauguucuggg

SEQ ID NO: 1504647 - RNA, 23 nt, Human
ggaggaucacuugaguccagaag

SEQ ID NO: 1504648 - RNA, 17 nt, Human
ggaggaucucuugagcc

SEQ ID NO: 1504649 - RNA, 21 nt, Human
ggaggaucucuugagccuggg

SEQ ID NO: 1504650 - RNA, 11 nt, Human
ggagugacaga

SEQ ID NO: 1504651 - RNA, 16 nt, Human
ggagugacagaggcag

SEQ ID NO: 1504652 - RNA, 20 nt, Human
ggagucccaccuuggcugca

SEQ ID NO: 1504653 - RNA, 21 nt, Human
ggagucccaccuuggcugcag

SEQ ID NO: 1504654 - RNA, 17 nt, Human
ggagggcuccagacaca

SEQ ID NO: 1504655 - RNA, 14 nt, Human
ggagggcuccagac

SEQ ID NO: 1504656 - RNA, 15 nt, Human
ggagggcuccagaca

SEQ ID NO: 1504657 - RNA, 19 nt, Human
ggaggggagcaugggaagu

SEQ ID NO: 1504658 - RNA, 16 nt, Human
ggaucacagccucuga

SEQ ID NO: 1504659 - RNA, 23 nt, Human
ggagugaguugauagcacagacc

SEQ ID NO: 1504660 - RNA, 17 nt, Human
ggagugacagaggcagc

SEQ ID NO: 1504661 - RNA, 18 nt, Human
ggagugacagaggcagcc

SEQ ID NO: 1504662 - RNA, 19 nt, Human
ggagugacagaggcagccc

SEQ ID NO: 1504663 - RNA, 21 nt, Human
ggagugacagaggcagcccca

SEQ ID NO: 1504664 - RNA, 12 nt, Human
ggagugagcugg

SEQ ID NO: 1504665 - RNA, 14 nt, Human
ggagugagcugguu

SEQ ID NO: 1504666 - RNA, 21 nt, Human
ggagugaguugauagcacaga

SEQ ID NO: 1504667 - RNA, 20 nt, Human
ggaagccagcaggcucucag

SEQ ID NO: 1504668 - RNA, 20 nt, Human
ggagcaaaaucgaugcagug

SEQ ID NO: 1504669 - RNA, 20 nt, Human
ggagauuuacaacuggggga

SEQ ID NO: 1504670 - RNA, 15 nt, Human
ggagaggggcacagg

SEQ ID NO: 1504671 - RNA, 23 nt, Human
ggacugggccacuucuggguggg

SEQ ID NO: 1504672 - RNA, 21 nt, Human
ggagagcuagcagcagggagg

SEQ ID NO: 1504673 - RNA, 13 nt, Human
ggaagagccuugc

SEQ ID NO: 1504674 - RNA, 17 nt, Human
ggaagcacagcuucauu

SEQ ID NO: 1504675 - RNA, 13 nt, Human
ggaagcacaugcc

SEQ ID NO: 1504676 - RNA, 14 nt, Human
ggaagcacaugccu

SEQ ID NO: 1504677 - RNA, 15 nt, Human
ggaagcacaugccuc

SEQ ID NO: 1504678 - RNA, 17 nt, Human
ggaagcacaugccucuc

SEQ ID NO: 1504679 - RNA, 13 nt, Human
ggaagccagcagg

SEQ ID NO: 1504680 - RNA, 14 nt, Human
ggaagccagcaggc

SEQ ID NO: 1504681 - RNA, 15 nt, Human
ggaagccagcaggcu

SEQ ID NO: 1504682 - RNA, 16 nt, Human
ggaagccagcaggcuc

SEQ ID NO: 1504683 - RNA, 17 nt, Human
ggaagccagcaggcucu

SEQ ID NO: 1504684 - RNA, 18 nt, Human
ggaagccagcaggcucuc

SEQ ID NO: 1504685 - RNA, 23 nt, Human
ggaagcacaugccucucucaggc

SEQ ID NO: 1504686 - RNA, 21 nt, Human
ggaagcacaugccucucucag

SEQ ID NO: 1504687 - RNA, 22 nt, Human
ggaagcacaugccucucucagg

SEQ ID NO: 1504688 - RNA, 12 nt, Human
ggaaauauuuau

SEQ ID NO: 1504689 - RNA, 13 nt, Human
ggaaauauuuauu

SEQ ID NO: 1504690 - RNA, 15 nt, Human
ggaaauauuuauuuu

SEQ ID NO: 1504691 - RNA, 17 nt, Human
ggaaauauuuauuuuaa

SEQ ID NO: 1504692 - RNA, 18 nt, Human
ggaaauauuuauuuuaau

SEQ ID NO: 1504693 - RNA, 15 nt, Human
ggaaaaucagccugc

SEQ ID NO: 1504694 - RNA, 14 nt, Human
ggaaaauaaauuau

SEQ ID NO: 1504695 - RNA, 16 nt, Human
ggaaaucaaauaugca

SEQ ID NO: 1504696 - RNA, 19 nt, Human
ggaacagacuggaagcaca

SEQ ID NO: 1504697 - RNA, 20 nt, Human
ggaacagacuggaagcacag

SEQ ID NO: 1504698 - RNA, 20 nt, Human
ggaaaaaauaacaaugaaag

SEQ ID NO: 1504699 - RNA, 14 nt, Human
gcuuuuacuuaaac

SEQ ID NO: 1504700 - RNA, 13 nt, Human
ggaaaaauagccu

SEQ ID NO: 1504701 - RNA, 14 nt, Human
ggaaaaacugauuu

SEQ ID NO: 1504702 - RNA, 15 nt, Human
ggaaaaauagccugc

SEQ ID NO: 1504703 - RNA, 22 nt, Human
gcuuccagugaggcucugcccu

SEQ ID NO: 1504704 - RNA, 17 nt, Human
gcuucucacugccaugc

SEQ ID NO: 1504705 - RNA, 21 nt, Human
gcuuccagugaggcucugccc

SEQ ID NO: 1504706 - RNA, 19 nt, Human
gcuuccagugaggcucugc

SEQ ID NO: 1504707 - RNA, 20 nt, Human
gcuuccagugaggcucugcc

SEQ ID NO: 1504708 - RNA, 13 nt, Human
gcuguucagcugg

SEQ ID NO: 1504709 - RNA, 23 nt, Human
gcuguucacagccagacuggcac

SEQ ID NO: 1504710 - RNA, 15 nt, Human
gcuguucacagccag

SEQ ID NO: 1504711 - RNA, 16 nt, Human
gcuguucacagccaga

SEQ ID NO: 1504712 - RNA, 18 nt, Human
gcuugcccuguuaaaaga

SEQ ID NO: 1504713 - RNA, 13 nt, Human
gcuuggaggaagg

SEQ ID NO: 1504714 - RNA, 14 nt, Human
gcuuggaggaagga

SEQ ID NO: 1504715 - RNA, 15 nt, Human
gcuuggaggaaggaa

SEQ ID NO: 1504716 - RNA, 17 nt, Human
gcuugcccuggugccuc

SEQ ID NO: 1504717 - RNA, 19 nt, Human
gcuugcccuggugccucac

SEQ ID NO: 1504718 - RNA, 18 nt, Human
gcugggcuucaguggcag

SEQ ID NO: 1504719 - RNA, 19 nt, Human
gcugggcuucaguggcagc

SEQ ID NO: 1504720 - RNA, 12 nt, Human
gcuggggccagu

SEQ ID NO: 1504721 - RNA, 23 nt, Human
gcugggggaagaagcucucuccu

SEQ ID NO: 1504722 - RNA, 13 nt, Human
gcugggggccuca

SEQ ID NO: 1504723 - RNA, 15 nt, Human
gcuggucccacucag

SEQ ID NO: 1504724 - RNA, 19 nt, Human
gcuggucccacucagucca

SEQ ID NO: 1504725 - RNA, 19 nt, Human
gcugggggccucagugcca

SEQ ID NO: 1504726 - RNA, 20 nt, Human
gcugggggccucagugccac

SEQ ID NO: 1504727 - RNA, 17 nt, Human
gcugggcuucaguggca

SEQ ID NO: 1504728 - RNA, 19 nt, Human
gcugggagagccuuccagg

SEQ ID NO: 1504729 - RNA, 22 nt, Human
gcugggagagccuuccaggggu

SEQ ID NO: 1504730 - RNA, 12 nt, Human
gcugggagagcc

SEQ ID NO: 1504731 - RNA, 13 nt, Human
gcugggagagccu

SEQ ID NO: 1504732 - RNA, 17 nt, Human
gcugggagagccuucca

SEQ ID NO: 1504733 - RNA, 18 nt, Human
gcugggagagccuuccag

SEQ ID NO: 1504734 - RNA, 22 nt, Human
gcuguauuuuaaaagaaugauu

SEQ ID NO: 1504735 - RNA, 22 nt, Human
gcugguucaggguuggccccug

SEQ ID NO: 1504736 - RNA, 16 nt, Human
gcugucaauuacagga

SEQ ID NO: 1504737 - RNA, 21 nt, Human
gcugguuagagguucccuuug

SEQ ID NO: 1504738 - RNA, 15 nt, Human
gcugguucaggguug

SEQ ID NO: 1504739 - RNA, 20 nt, Human
gcuggucccacucaguccau

SEQ ID NO: 1504740 - RNA, 18 nt, Human
gcuggugucaccugaaga

SEQ ID NO: 1504741 - RNA, 19 nt, Human
gcugucccuuacgugaguc

SEQ ID NO: 1504742 - RNA, 22 nt, Human
gcugucccuuacgugaguccug

SEQ ID NO: 1504743 - RNA, 21 nt, Human
gcugucccuuacgugaguccu

SEQ ID NO: 1504744 - RNA, 17 nt, Human
gcugucaauuacaggaa

SEQ ID NO: 1504745 - RNA, 19 nt, Human
gcugucaauuacaggaagu

SEQ ID NO: 1504746 - RNA, 22 nt, Human
gcugucaauuacaggaaguacu

SEQ ID NO: 1504747 - RNA, 23 nt, Human
gcugucaauuacaggaaguacug

SEQ ID NO: 1504748 - RNA, 18 nt, Human
gcuagauguauguacuuc

SEQ ID NO: 1504749 - RNA, 11 nt, Human
gcugcccugug

SEQ ID NO: 1504750 - RNA, 22 nt, Human
gcuagcagcagggagggcuucu

SEQ ID NO: 1504751 - RNA, 12 nt, Human
gcugcccuguga

SEQ ID NO: 1504752 - RNA, 14 nt, Human
gcugcccugugagu

SEQ ID NO: 1504753 - RNA, 13 nt, Human
gcugcuucaagga

SEQ ID NO: 1504754 - RNA, 19 nt, Human
gcugcgguccacccaggag

SEQ ID NO: 1504755 - RNA, 17 nt, Human
gcugcgguccacccagg

SEQ ID NO: 1504756 - RNA, 18 nt, Human
gcugcgguccacccagga

SEQ ID NO: 1504757 - RNA, 23 nt, Human
gcugcuucaaggauccugagcca

SEQ ID NO: 1504758 - RNA, 21 nt, Human
gcugcuucaaggauccugagc

SEQ ID NO: 1504759 - RNA, 22 nt, Human
gcugcuucaaggauccugagcc

SEQ ID NO: 1504760 - RNA, 16 nt, Human
gcugcuugggcuucau

SEQ ID NO: 1504761 - RNA, 12 nt, Human
gcuggccuggcc

SEQ ID NO: 1504762 - RNA, 20 nt, Human
gcugggacaugggaaagggg

SEQ ID NO: 1504763 - RNA, 19 nt, Human
gcugggacuacagguguga

SEQ ID NO: 1504764 - RNA, 13 nt, Human
gcugggacuacag

SEQ ID NO: 1504765 - RNA, 18 nt, Human
gcugggacuacaggcacc

SEQ ID NO: 1504766 - RNA, 19 nt, Human
gcugggacuacaggcaccc

SEQ ID NO: 1504767 - RNA, 20 nt, Human
gcugggacuacaggcaccca

SEQ ID NO: 1504768 - RNA, 18 nt, Human
gcuggaccuugaacuggg

SEQ ID NO: 1504769 - RNA, 17 nt, Human
gcugcuugggcuucauc

SEQ ID NO: 1504770 - RNA, 22 nt, Human
gcugcuugggcuucauccuccu

SEQ ID NO: 1504771 - RNA, 21 nt, Human
gcuggaccuugaacuggguac

SEQ ID NO: 1504772 - RNA, 22 nt, Human
gcuggaccuugaacuggguacu

SEQ ID NO: 1504773 - RNA, 19 nt, Human
gcccuucuuuccacagaag

SEQ ID NO: 1504774 - RNA, 13 nt, Human
gcccuucucucca

SEQ ID NO: 1504775 - RNA, 16 nt, Human
gccgagauagccaagg

SEQ ID NO: 1504776 - RNA, 17 nt, Human
gccgggcaggguguggg

SEQ ID NO: 1504777 - RNA, 19 nt, Human
gccgcagcccugcagaggg

SEQ ID NO: 1504778 - RNA, 17 nt, Human
gccgagauagccaaggc

SEQ ID NO: 1504779 - RNA, 19 nt, Human
gccgagauagccaaggcca

SEQ ID NO: 1504780 - RNA, 15 nt, Human
gccgcagcccugcag

SEQ ID NO: 1504781 - RNA, 16 nt, Human
gccgcagcccugcaga

SEQ ID NO: 1504782 - RNA, 17 nt, Human
gccgcagcccugcagag

SEQ ID NO: 1504783 - RNA, 24 nt, Human
gccucaagugauucuccugccuca

SEQ ID NO: 1504784 - RNA, 18 nt, Human
gccucagcauccuggcac

SEQ ID NO: 1504785 - RNA, 21 nt, Human
gccucagcauccuggcacccg

SEQ ID NO: 1504786 - RNA, 20 nt, Human
gccgucuaccugaggggccu

SEQ ID NO: 1504787 - RNA, 22 nt, Human
gccgucuaccugaggggccucu

SEQ ID NO: 1504788 - RNA, 23 nt, Human
gccgucuaccugaggggccucuu

SEQ ID NO: 1504789 - RNA, 15 nt, Human
gccucucccaucacu

SEQ ID NO: 1504790 - RNA, 12 nt, Human
gccucagccucc

SEQ ID NO: 1504791 - RNA, 14 nt, Human
gccucagccuccca

SEQ ID NO: 1504792 - RNA, 22 nt, Human
gccucagccucccaaagugcug

SEQ ID NO: 1504793 - RNA, 18 nt, Human
gccucccgaauagcuggg

SEQ ID NO: 1504794 - RNA, 19 nt, Human
gccucccgaauagcuggga

SEQ ID NO: 1504795 - RNA, 20 nt, Human
gccucccgaauagcugggac

SEQ ID NO: 1504796 - RNA, 21 nt, Human
gccucccgaauagcugggacu

SEQ ID NO: 1504797 - RNA, 21 nt, Human
gccucccgaguagcugggacu

SEQ ID NO: 1504798 - RNA, 23 nt, Human
gccucccgaguagcugggacuac

SEQ ID NO: 1504799 - RNA, 21 nt, Human
gccucugcacuccccugcugg

SEQ ID NO: 1504800 - RNA, 15 nt, Human
gccugaagucacaca

SEQ ID NO: 1504801 - RNA, 16 nt, Human
gccugagauuucaucu

SEQ ID NO: 1504802 - RNA, 18 nt, Human
gccugagauuucaucugc

SEQ ID NO: 1504803 - RNA, 22 nt, Human
gccugagauuucaucugcucuc

SEQ ID NO: 1504804 - RNA, 15 nt, Human
gccucugacacacag

SEQ ID NO: 1504805 - RNA, 16 nt, Human
gccucugacacacagc

SEQ ID NO: 1504806 - RNA, 16 nt, Human
gccucugcacuccccu

SEQ ID NO: 1504807 - RNA, 17 nt, Human
gccucugcacuccccug

SEQ ID NO: 1504808 - RNA, 18 nt, Human
gccucugcacuccccugc

SEQ ID NO: 1504809 - RNA, 19 nt, Human
gccucugcacuccccugcu

SEQ ID NO: 1504810 - RNA, 20 nt, Human
gccucugcacuccccugcug

SEQ ID NO: 1504811 - RNA, 11 nt, Human
gccugcccagg

SEQ ID NO: 1504812 - RNA, 12 nt, Human
gccugcccaggc

SEQ ID NO: 1504813 - RNA, 23 nt, Human
gccugagauuucaucugcucucc

SEQ ID NO: 1504814 - RNA, 13 nt, Human
gccugcaggaccu

SEQ ID NO: 1504815 - RNA, 17 nt, Human
gccugcaggaccucgug

SEQ ID NO: 1504816 - RNA, 18 nt, Human
gccugcaggaccucgugc

SEQ ID NO: 1504817 - RNA, 23 nt, Human
gccugcaggaccucgugccaccc

SEQ ID NO: 1504818 - RNA, 21 nt, Human
gcuaacuagcuuggaaacugg

SEQ ID NO: 1504819 - RNA, 14 nt, Human
gcgugagccacugc

SEQ ID NO: 1504820 - RNA, 16 nt, Human
gcgugagccacugcac

SEQ ID NO: 1504821 - RNA, 15 nt, Human
gcgugagccacugca

SEQ ID NO: 1504822 - RNA, 17 nt, Human
gcuaacauggaaguacu

SEQ ID NO: 1504823 - RNA, 18 nt, Human
gcuaacauggaaguacua

SEQ ID NO: 1504824 - RNA, 21 nt, Human
gcuagacgagcaggcuucuuc

SEQ ID NO: 1504825 - RNA, 22 nt, Human
gcuagacgagcaggcuucuucc

SEQ ID NO: 1504826 - RNA, 19 nt, Human
gcgcuccugccgcagagcu

SEQ ID NO: 1504827 - RNA, 20 nt, Human
gcgcuccugccgcagagcug

SEQ ID NO: 1504828 - RNA, 21 nt, Human
gcgcuccugccgcagagcugg

SEQ ID NO: 1504829 - RNA, 20 nt, Human
gcgccuacaggagugagcac

SEQ ID NO: 1504830 - RNA, 21 nt, Human
gcgccuacaggagugagcacu

SEQ ID NO: 1504831 - RNA, 14 nt, Human
gcgcugccccuggc

SEQ ID NO: 1504832 - RNA, 17 nt, Human
gcgcugccccuggcagc

SEQ ID NO: 1504833 - RNA, 13 nt, Human
gcggucccagcuc

SEQ ID NO: 1504834 - RNA, 23 nt, Human
gcgguccacccaggagccccgag

SEQ ID NO: 1504835 - RNA, 23 nt, Human
gcggggacagcuccuucuguccu

SEQ ID NO: 1504836 - RNA, 14 nt, Human
gcggucccagcucc

SEQ ID NO: 1504837 - RNA, 18 nt, Human
gcggucccagcucccugg

SEQ ID NO: 1504838 - RNA, 22 nt, Human
gcggucccagcucccuggcucc

SEQ ID NO: 1504839 - RNA, 19 nt, Human
gcggaaugaaccacaucuu

SEQ ID NO: 1504840 - RNA, 19 nt, Human
gcggacagccacggccagg

SEQ ID NO: 1504841 - RNA, 23 nt, Human
gcggacagccacggccaggccag

SEQ ID NO: 1504842 - RNA, 19 nt, Human
gcggggacagcuccuucug

SEQ ID NO: 1504843 - RNA, 18 nt, Human
gccuuggggcugaugcag

SEQ ID NO: 1504844 - RNA, 19 nt, Human
gccuucggccuccauccug

SEQ ID NO: 1504845 - RNA, 18 nt, Human
gccuucggccuccauccu

SEQ ID NO: 1504846 - RNA, 16 nt, Human
gccuuuuauuucuuaa

SEQ ID NO: 1504847 - RNA, 23 nt, Human
gccuuauggaacacucugagacu

SEQ ID NO: 1504848 - RNA, 21 nt, Human
gccuuauggaacacucugaga

SEQ ID NO: 1504849 - RNA, 22 nt, Human
gccuuauggaacacucugagac

SEQ ID NO: 1504850 - RNA, 18 nt, Human
gccuguaaucacagcuac

SEQ ID NO: 1504851 - RNA, 16 nt, Human
gccugguggcagcugc

SEQ ID NO: 1504852 - RNA, 17 nt, Human
gccugguggcagcugcg

SEQ ID NO: 1504853 - RNA, 15 nt, Human
gccugguggcagcug

SEQ ID NO: 1504854 - RNA, 16 nt, Human
gccccagugcccacag

SEQ ID NO: 1504855 - RNA, 17 nt, Human
gccccagugcccacagg

SEQ ID NO: 1504856 - RNA, 21 nt, Human
gccccagugcccacaggauca

SEQ ID NO: 1504857 - RNA, 23 nt, Human
gccccauccucuguacagagccc

SEQ ID NO: 1504858 - RNA, 17 nt, Human
gccccauucugccugcc

SEQ ID NO: 1504859 - RNA, 18 nt, Human
gccccauucugccugccc

SEQ ID NO: 1504860 - RNA, 20 nt, Human
gccccauucugccugcccag

SEQ ID NO: 1504861 - RNA, 21 nt, Human
gccccauucugccugcccagg

SEQ ID NO: 1504862 - RNA, 15 nt, Human
gcccaguugggugga

SEQ ID NO: 1504863 - RNA, 22 nt, Human
gcccagucuggaaugcaguggu

SEQ ID NO: 1504864 - RNA, 16 nt, Human
gcccaggcuggcgugc

SEQ ID NO: 1504865 - RNA, 14 nt, Human
gcccaggcuggcgu

SEQ ID NO: 1504866 - RNA, 15 nt, Human
gcccaggcuggcgug

SEQ ID NO: 1504867 - RNA, 11 nt, Human
gcccaggcugg

SEQ ID NO: 1504868 - RNA, 12 nt, Human
gcccaggaaagg

SEQ ID NO: 1504869 - RNA, 15 nt, Human
gcccaggaaaggcuc

SEQ ID NO: 1504870 - RNA, 16 nt, Human
gcccaggaaaggcucc

SEQ ID NO: 1504871 - RNA, 18 nt, Human
gcccaggccuccuacagc

SEQ ID NO: 1504872 - RNA, 14 nt, Human
gccccgcccaggcu

SEQ ID NO: 1504873 - RNA, 22 nt, Human
gccccauucugccugcccaggc

SEQ ID NO: 1504874 - RNA, 23 nt, Human
gccccauucugccugcccaggcc

SEQ ID NO: 1504875 - RNA, 23 nt, Human
gccccgaggccuucucugaagga

SEQ ID NO: 1504876 - RNA, 17 nt, Human
gccccgugggguuccuc

SEQ ID NO: 1504877 - RNA, 23 nt, Human
gccccucaacucuccuccagagu

SEQ ID NO: 1504878 - RNA, 19 nt, Human
gccccucagggucccuggu

SEQ ID NO: 1504879 - RNA, 21 nt, Human
gccccucagggucccuggugg

SEQ ID NO: 1504880 - RNA, 19 nt, Human
gccccugcacuccagccug

SEQ ID NO: 1504881 - RNA, 23 nt, Human
gccccuggcagccccuguucugg

SEQ ID NO: 1504882 - RNA, 21 nt, Human
gcccgggcucugccucccauc

SEQ ID NO: 1504883 - RNA, 19 nt, Human
gcccgggcucugccuccca

SEQ ID NO: 1504884 - RNA, 20 nt, Human
gcccgggcucugccucccau

SEQ ID NO: 1504885 - RNA, 22 nt, Human
gcccucugcccacucccugcaa

SEQ ID NO: 1504886 - RNA, 19 nt, Human
gccccuucugacccaugcu

SEQ ID NO: 1504887 - RNA, 20 nt, Human
gccccuucugacccaugcug

SEQ ID NO: 1504888 - RNA, 13 nt, Human
gcccggcuccagg

SEQ ID NO: 1504889 - RNA, 14 nt, Human
gcccggcuccaggc

SEQ ID NO: 1504890 - RNA, 15 nt, Human
gcccggcuccaggcu

SEQ ID NO: 1504891 - RNA, 13 nt, Human
gcccgggcucugc

SEQ ID NO: 1504892 - RNA, 14 nt, Human
gcccgggcucugcc

SEQ ID NO: 1504893 - RNA, 15 nt, Human
gcccgggcucugccu

SEQ ID NO: 1504894 - RNA, 18 nt, Human
gcccgggcucugccuccc

SEQ ID NO: 1504895 - RNA, 16 nt, Human
gcccacagcuguauga

SEQ ID NO: 1504896 - RNA, 16 nt, Human
gccauuuguguuuaua

SEQ ID NO: 1504897 - RNA, 16 nt, Human
gcccaaagaugcagcc

SEQ ID NO: 1504898 - RNA, 19 nt, Human
gcccacaggaucagucuga

SEQ ID NO: 1504899 - RNA, 13 nt, Human
gcccacaggauca

SEQ ID NO: 1504900 - RNA, 18 nt, Human
gcccacaggaucagucug

SEQ ID NO: 1504901 - RNA, 15 nt, Human
gcccaccccucaaca

SEQ ID NO: 1504902 - RNA, 20 nt, Human
gccauuucuuccacaagagc

SEQ ID NO: 1504903 - RNA, 22 nt, Human
gccauuucuuccacaagagccc

SEQ ID NO: 1504904 - RNA, 22 nt, Human
gccaugggacagggaggacgcu

SEQ ID NO: 1504905 - RNA, 22 nt, Human
gccauuuaaagcuuauuaaaac

SEQ ID NO: 1504906 - RNA, 17 nt, Human
gccauuucuuccacaag

SEQ ID NO: 1504907 - RNA, 14 nt, Human
gccaugggacaggg

SEQ ID NO: 1504908 - RNA, 19 nt, Human
gccaugggacagggaggac

SEQ ID NO: 1504909 - RNA, 20 nt, Human
gccaggaagccagcaggcuc

SEQ ID NO: 1504910 - RNA, 19 nt, Human
gccaggaagccagcaggcu

SEQ ID NO: 1504911 - RNA, 11 nt, Human
gccaggaagcc

SEQ ID NO: 1504912 - RNA, 17 nt, Human
gccaggaagccagcagg

SEQ ID NO: 1504913 - RNA, 18 nt, Human
gccaggaagccagcaggc

SEQ ID NO: 1504914 - RNA, 23 nt, Human
gccaggggaaaaucagccugcuc

SEQ ID NO: 1504915 - RNA, 17 nt, Human
gccaggggaaaaucagc

SEQ ID NO: 1504916 - RNA, 21 nt, Human
gccaggggaaaaucagccugc

SEQ ID NO: 1504917 - RNA, 22 nt, Human
gccaggggaaaaucagccugcu

SEQ ID NO: 1504918 - RNA, 19 nt, Human
gccauccagguucagcuug

SEQ ID NO: 1504919 - RNA, 20 nt, Human
gccauccagguucagcuugu

SEQ ID NO: 1504920 - RNA, 17 nt, Human
gccaucccagccccaau

SEQ ID NO: 1504921 - RNA, 13 nt, Human
gccaucccagccc

SEQ ID NO: 1504922 - RNA, 14 nt, Human
gccaucccagcccc

SEQ ID NO: 1504923 - RNA, 15 nt, Human
gccaucccagcccca

SEQ ID NO: 1504924 - RNA, 16 nt, Human
gccaucccagccccaa

SEQ ID NO: 1504925 - RNA, 12 nt, Human
gccagagacaca

SEQ ID NO: 1504926 - RNA, 15 nt, Human
gccagagacacaagc

SEQ ID NO: 1504927 - RNA, 22 nt, Human
gccagagcuacccgcagaguuc

SEQ ID NO: 1504928 - RNA, 18 nt, Human
gccagagggagugacaga

SEQ ID NO: 1504929 - RNA, 19 nt, Human
gccacugcaccgggccaca

SEQ ID NO: 1504930 - RNA, 17 nt, Human
gccacugcaccgggcca

SEQ ID NO: 1504931 - RNA, 18 nt, Human
gccacugcaccgggccac

SEQ ID NO: 1504932 - RNA, 13 nt, Human
gccaaagccaaag

SEQ ID NO: 1504933 - RNA, 16 nt, Human
gccaaauaaugucucu

SEQ ID NO: 1504934 - RNA, 18 nt, Human
gccaaauaaugucucugu

SEQ ID NO: 1504935 - RNA, 22 nt, Human
gccaaauaaugucucugugaga

SEQ ID NO: 1504936 - RNA, 14 nt, Human
gccacggccaggcc

SEQ ID NO: 1504937 - RNA, 15 nt, Human
gccacggccaggcca

SEQ ID NO: 1504938 - RNA, 17 nt, Human
gccacggccaggccaga

SEQ ID NO: 1504939 - RNA, 16 nt, Human
gccacggccaggccag

SEQ ID NO: 1504940 - RNA, 22 nt, Human
gccacguucuuacuaguuuccc

SEQ ID NO: 1504941 - RNA, 21 nt, Human
gccacuauuguuagucucuug

SEQ ID NO: 1504942 - RNA, 17 nt, Human
gccagauucuuuccuga

SEQ ID NO: 1504943 - RNA, 19 nt, Human
gccagauucuuuccugagg

SEQ ID NO: 1504944 - RNA, 19 nt, Human
gccagagggagugacagag

SEQ ID NO: 1504945 - RNA, 20 nt, Human
gccagagggagugacagagg

SEQ ID NO: 1504946 - RNA, 16 nt, Human
gccagauucuuuccug

SEQ ID NO: 1504947 - RNA, 21 nt, Human
gccagccgagauagccaaggc

SEQ ID NO: 1504948 - RNA, 20 nt, Human
gccagccgagauagccaagg

SEQ ID NO: 1504949 - RNA, 12 nt, Human
gccagccuugac

SEQ ID NO: 1504950 - RNA, 14 nt, Human
gccagccuugacca

SEQ ID NO: 1504951 - RNA, 20 nt, Human
gccagccuugaccauucucc

SEQ ID NO: 1504952 - RNA, 21 nt, Human
gccagccuugaccauucucca

SEQ ID NO: 1504953 - RNA, 22 nt, Human
gccagccuugaccauucuccac

SEQ ID NO: 1504954 - RNA, 14 nt, Human
gccagcugcuuggg

SEQ ID NO: 1504955 - RNA, 16 nt, Human
gccagcugcuugggcu

SEQ ID NO: 1504956 - RNA, 15 nt, Human
gccagcugcuugggc

SEQ ID NO: 1504957 - RNA, 20 nt, Human
gcaggaggaucacuugaguc

SEQ ID NO: 1504958 - RNA, 15 nt, Human
gcaggaccucgugcc

SEQ ID NO: 1504959 - RNA, 12 nt, Human
gcagcagaaggg

SEQ ID NO: 1504960 - RNA, 13 nt, Human
gcagcagaagggg

SEQ ID NO: 1504961 - RNA, 20 nt, Human
gcagcagguggcagaauggg

SEQ ID NO: 1504962 - RNA, 19 nt, Human
gcagccucaaccuccuggg

SEQ ID NO: 1504963 - RNA, 20 nt, Human
gcagccucaaccuccugggc

SEQ ID NO: 1504964 - RNA, 14 nt, Human
gcagccuggacccu

SEQ ID NO: 1504965 - RNA, 16 nt, Human
gcagccugcaggaccu

SEQ ID NO: 1504966 - RNA, 13 nt, Human
gcagccugcagga

SEQ ID NO: 1504967 - RNA, 21 nt, Human
gcagccucaaccuccugggcu

SEQ ID NO: 1504968 - RNA, 22 nt, Human
gcagccucaaccuccugggcua

SEQ ID NO: 1504969 - RNA, 12 nt, Human
gcagcaauaaag

SEQ ID NO: 1504970 - RNA, 20 nt, Human
gcagaguugaagacagagcu

SEQ ID NO: 1504971 - RNA, 19 nt, Human
gcagaguugaagacagagc

SEQ ID NO: 1504972 - RNA, 16 nt, Human
gcagaguugaagacag

SEQ ID NO: 1504973 - RNA, 17 nt, Human
gcagaguugaagacaga

SEQ ID NO: 1504974 - RNA, 22 nt, Human
gcagauggaaugcuguguuaaa

SEQ ID NO: 1504975 - RNA, 18 nt, Human
gcagauggaaugcugugu

SEQ ID NO: 1504976 - RNA, 18 nt, Human
gcagaaggaagacuucau

SEQ ID NO: 1504977 - RNA, 19 nt, Human
gcagagaaugaaagggccc

SEQ ID NO: 1504978 - RNA, 20 nt, Human
gcagagaaugaaagggccca

SEQ ID NO: 1504979 - RNA, 21 nt, Human
gcagagaaugaaagggcccag

SEQ ID NO: 1504980 - RNA, 22 nt, Human
gcagagaaugaaagggcccaga

SEQ ID NO: 1504981 - RNA, 23 nt, Human
gcagagaaugaaagggcccagag

SEQ ID NO: 1504982 - RNA, 21 nt, Human
gcagagaauucucuuauccaa

SEQ ID NO: 1504983 - RNA, 15 nt, Human
gcagaguugaagaca

SEQ ID NO: 1504984 - RNA, 14 nt, Human
gcagagaccauccc

SEQ ID NO: 1504985 - RNA, 15 nt, Human
gcagagaccaucccu

SEQ ID NO: 1504986 - RNA, 17 nt, Human
gcagagaccaucccuga

SEQ ID NO: 1504987 - RNA, 19 nt, Human
gcagagaccaucccugaag

SEQ ID NO: 1504988 - RNA, 20 nt, Human
gcacagccucuuagaugcag

SEQ ID NO: 1504989 - RNA, 15 nt, Human
gcaaugaccuuucaa

SEQ ID NO: 1504990 - RNA, 13 nt, Human
gcaaugaccuuuc

SEQ ID NO: 1504991 - RNA, 14 nt, Human
gcaaugaccuuuca

SEQ ID NO: 1504992 - RNA, 19 nt, Human
gcacagcuaacauggaagu

SEQ ID NO: 1504993 - RNA, 21 nt, Human
gcacagcuucauuuccugugu

SEQ ID NO: 1504994 - RNA, 16 nt, Human
gcacagcuucauuucc

SEQ ID NO: 1504995 - RNA, 19 nt, Human
gcaccacugcacuccagcc

SEQ ID NO: 1504996 - RNA, 20 nt, Human
gcaccacugcacuccagccu

SEQ ID NO: 1504997 - RNA, 15 nt, Human
gcaccacgggcccgg

SEQ ID NO: 1504998 - RNA, 14 nt, Human
gcacccggccccug

SEQ ID NO: 1504999 - RNA, 15 nt, Human
gcacccggccccugc

SEQ ID NO: 1505000 - RNA, 17 nt, Human
gcacccggccccugcug

SEQ ID NO: 1505001 - RNA, 14 nt, Human
gcaccuccugccuc

SEQ ID NO: 1505002 - RNA, 15 nt, Human
gcaccuccugccucg

SEQ ID NO: 1505003 - RNA, 22 nt, Human
gcacugggcuuggggaccagag

SEQ ID NO: 1505004 - RNA, 23 nt, Human
gcacugggcuuggggaccagagc

SEQ ID NO: 1505005 - RNA, 15 nt, Human
gcacugucaagauga

SEQ ID NO: 1505006 - RNA, 12 nt, Human
gcagaaggaaga

SEQ ID NO: 1505007 - RNA, 13 nt, Human
gcagaaggaagac

SEQ ID NO: 1505008 - RNA, 14 nt, Human
gcagaaggaagacu

SEQ ID NO: 1505009 - RNA, 14 nt, Human
gcagaagacaguau

SEQ ID NO: 1505010 - RNA, 19 nt, Human
gcacuaaggugugcucuga

SEQ ID NO: 1505011 - RNA, 18 nt, Human
gcacuaaggugugcucug

SEQ ID NO: 1505012 - RNA, 17 nt, Human
gcacuaaggugugcucu

SEQ ID NO: 1505013 - RNA, 18 nt, Human
gcacccggccccugcugg

SEQ ID NO: 1505014 - RNA, 23 nt, Human
gcagugcuuccaaggauggacca

SEQ ID NO: 1505015 - RNA, 16 nt, Human
gcagugggagcugccu

SEQ ID NO: 1505016 - RNA, 15 nt, Human
gcaggcuacugucag

SEQ ID NO: 1505017 - RNA, 20 nt, Human
gcaggauucuuccucccucc

SEQ ID NO: 1505018 - RNA, 16 nt, Human
gcagggagggcuucug

SEQ ID NO: 1505019 - RNA, 14 nt, Human
gcagggcucagcgg

SEQ ID NO: 1505020 - RNA, 12 nt, Human
gcagggcucagc

SEQ ID NO: 1505021 - RNA, 13 nt, Human
gcaguucugaaga

SEQ ID NO: 1505022 - RNA, 14 nt, Human
gcaguucugaagaa

SEQ ID NO: 1505023 - RNA, 17 nt, Human
gcagugggagcugccug

SEQ ID NO: 1505024 - RNA, 18 nt, Human
gcagugggagcugccugu

SEQ ID NO: 1505025 - RNA, 21 nt, Human
gcaucaagaugugacauguuu

SEQ ID NO: 1505026 - RNA, 17 nt, Human
gcauauucaggaagcuc

SEQ ID NO: 1505027 - RNA, 18 nt, Human
gcauauucaggaagcuca

SEQ ID NO: 1505028 - RNA, 20 nt, Human
gcauauucaggaagcucagg

SEQ ID NO: 1505029 - RNA, 15 nt, Human
gcauauucaggaagc

SEQ ID NO: 1505030 - RNA, 17 nt, Human
gcauguuugugauugac

SEQ ID NO: 1505031 - RNA, 15 nt, Human
gcaugcugucccuua

SEQ ID NO: 1505032 - RNA, 20 nt, Human
gcaugacacgaauauugcug

SEQ ID NO: 1505033 - RNA, 14 nt, Human
gcaugcaccacggg

SEQ ID NO: 1505034 - RNA, 15 nt, Human
gcaugcaccacgggc

SEQ ID NO: 1505035 - RNA, 17 nt, Human
gcaugccuggauggggc

SEQ ID NO: 1505036 - RNA, 22 nt, Human
gcaugccuggauggggcugcac

SEQ ID NO: 1505037 - RNA, 18 nt, Human
gcaucaggccaggcccuc

SEQ ID NO: 1505038 - RNA, 16 nt, Human
gcaucaggccaggccc

SEQ ID NO: 1505039 - RNA, 17 nt, Human
gcaucaggccaggcccu

SEQ ID NO: 1505040 - RNA, 15 nt, Human
gcaucaggccaggcc

SEQ ID NO: 1505041 - RNA, 23 nt, Human
gcauuugcugaauacagaggcaa

SEQ ID NO: 1505042 - RNA, 21 nt, Human
gcauuuggugguuucagaaau

SEQ ID NO: 1505043 - RNA, 12 nt, Human
gcauuccccagg

SEQ ID NO: 1505044 - RNA, 12 nt, Human
gcauuccccacu

SEQ ID NO: 1505045 - RNA, 21 nt, Human
gccaaacucaccugccccuca

SEQ ID NO: 1505046 - RNA, 14 nt, Human
gccaaaggaagcac

SEQ ID NO: 1505047 - RNA, 16 nt, Human
gccaaaggaagcacau

SEQ ID NO: 1505048 - RNA, 20 nt, Human
gccaaaggaagcacaugccu

SEQ ID NO: 1505049 - RNA, 22 nt, Human
gcauuuugcuaaaugugaauga

SEQ ID NO: 1505050 - RNA, 23 nt, Human
gaucagcuuauugucuagugaaa

SEQ ID NO: 1505051 - RNA, 23 nt, Human
gaucacggcucacugcagccuca

SEQ ID NO: 1505052 - RNA, 17 nt, Human
gauaggucagugcaaau

SEQ ID NO: 1505053 - RNA, 16 nt, Human
gauacaaaagcaugug

SEQ ID NO: 1505054 - RNA, 17 nt, Human
gauacaaaagcauguga

SEQ ID NO: 1505055 - RNA, 18 nt, Human
gauauaugcucugcaugu

SEQ ID NO: 1505056 - RNA, 20 nt, Human
gauagugucccacggugccu

SEQ ID NO: 1505057 - RNA, 20 nt, Human
gaguucauacccuguuacca

SEQ ID NO: 1505058 - RNA, 11 nt, Human
gaguucuacau

SEQ ID NO: 1505059 - RNA, 24 nt, Human
gauaauacaccacuacauucuguu

SEQ ID NO: 1505060 - RNA, 23 nt, Human
gauaauacaccacuacauucugu

SEQ ID NO: 1505061 - RNA, 12 nt, Human
gauaauacacca

SEQ ID NO: 1505062 - RNA, 14 nt, Human
gauaauacaccacu

SEQ ID NO: 1505063 - RNA, 13 nt, Human
gaguucugguucc

SEQ ID NO: 1505064 - RNA, 13 nt, Human
gauaaacaguagu

SEQ ID NO: 1505065 - RNA, 14 nt, Human
gauccuggaaauca

SEQ ID NO: 1505066 - RNA, 13 nt, Human
gauccugagccag

SEQ ID NO: 1505067 - RNA, 12 nt, Human
gauccugagcca

SEQ ID NO: 1505068 - RNA, 13 nt, Human
gaucuaggaagac

SEQ ID NO: 1505069 - RNA, 14 nt, Human
gaucuaggaagacu

SEQ ID NO: 1505070 - RNA, 18 nt, Human
gaucuaggaagacuuugg

SEQ ID NO: 1505071 - RNA, 20 nt, Human
gaucuaggaagacuuuggaa

SEQ ID NO: 1505072 - RNA, 18 nt, Human
gauccuaggcauuugcug

SEQ ID NO: 1505073 - RNA, 14 nt, Human
gauccuccaggugc

SEQ ID NO: 1505074 - RNA, 16 nt, Human
gauccucccaccucag

SEQ ID NO: 1505075 - RNA, 17 nt, Human
gauccucccaccucagc

SEQ ID NO: 1505076 - RNA, 18 nt, Human
gauccucccaccucagcc

SEQ ID NO: 1505077 - RNA, 13 nt, Human
gaucauccacugu

SEQ ID NO: 1505078 - RNA, 16 nt, Human
gaucauccacugugcc

SEQ ID NO: 1505079 - RNA, 16 nt, Human
gaugagaggaaaucac

SEQ ID NO: 1505080 - RNA, 14 nt, Human
gaugcagugcuucc

SEQ ID NO: 1505081 - RNA, 15 nt, Human
gaugccugguggcag

SEQ ID NO: 1505082 - RNA, 16 nt, Human
gaugccugguggcagc

SEQ ID NO: 1505083 - RNA, 18 nt, Human
gaugaccuugaaugaugc

SEQ ID NO: 1505084 - RNA, 20 nt, Human
gaugaccuugaaugaugcca

SEQ ID NO: 1505085 - RNA, 14 nt, Human
gaugagaggaaauc

SEQ ID NO: 1505086 - RNA, 15 nt, Human
gaugcaccagcccuu

SEQ ID NO: 1505087 - RNA, 23 nt, Human
gaugcaccagcccuuagcaggga

SEQ ID NO: 1505088 - RNA, 22 nt, Human
gaucuucuguggguuucuaaag

SEQ ID NO: 1505089 - RNA, 19 nt, Human
gaucuucuuuauaauucua

SEQ ID NO: 1505090 - RNA, 15 nt, Human
gaugaaaugagguca

SEQ ID NO: 1505091 - RNA, 21 nt, Human
gaugaaaugaggucagagccu

SEQ ID NO: 1505092 - RNA, 13 nt, Human
gaucuuuaaaaua

SEQ ID NO: 1505093 - RNA, 12 nt, Human
gauuuaaaucag

SEQ ID NO: 1505094 - RNA, 20 nt, Human
gauuucaucugcucuccuuc

SEQ ID NO: 1505095 - RNA, 21 nt, Human
gauuucaucugcucuccuucc

SEQ ID NO: 1505096 - RNA, 22 nt, Human
gauuucaucugcucuccuuccu

SEQ ID NO: 1505097 - RNA, 22 nt, Human
gauuucuguuuagauaauacac

SEQ ID NO: 1505098 - RNA, 17 nt, Human
gauugcaacaggcuggg

SEQ ID NO: 1505099 - RNA, 18 nt, Human
gauugcaacaggcugggc

SEQ ID NO: 1505100 - RNA, 18 nt, Human
gauugcuugagcucagga

SEQ ID NO: 1505101 - RNA, 17 nt, Human
gauuggcucacacugag

SEQ ID NO: 1505102 - RNA, 18 nt, Human
gauuggcucacacugaga

SEQ ID NO: 1505103 - RNA, 20 nt, Human
gauuggcucacacugagaau

SEQ ID NO: 1505104 - RNA, 16 nt, Human
gauucccaagcucugc

SEQ ID NO: 1505105 - RNA, 17 nt, Human
gauucccaagcucugcu

SEQ ID NO: 1505106 - RNA, 19 nt, Human
gauucuuuccugaggcugg

SEQ ID NO: 1505107 - RNA, 18 nt, Human
gauucccaagcucugcuc

SEQ ID NO: 1505108 - RNA, 20 nt, Human
gauucuuuccugaggcuggg

SEQ ID NO: 1505109 - RNA, 22 nt, Human
gauucuuuccugaggcugggcu

SEQ ID NO: 1505110 - RNA, 16 nt, Human
gauugcaacaggcugg

SEQ ID NO: 1505111 - RNA, 22 nt, Human
gauuaaguaaugauaacuggaa

SEQ ID NO: 1505112 - RNA, 18 nt, Human
gauuaauauggggaugca

SEQ ID NO: 1505113 - RNA, 14 nt, Human
gauuaaguaaugau

SEQ ID NO: 1505114 - RNA, 21 nt, Human
gauguuuuaaggaugcuugua

SEQ ID NO: 1505115 - RNA, 14 nt, Human
gauguucugggaca

SEQ ID NO: 1505116 - RNA, 17 nt, Human
gaugccugguggcagcu

SEQ ID NO: 1505117 - RNA, 16 nt, Human
gaugcuagaacucccu

SEQ ID NO: 1505118 - RNA, 18 nt, Human
gauguucuagcauggcug

SEQ ID NO: 1505119 - RNA, 15 nt, Human
gauucccaagcucug

SEQ ID NO: 1505120 - RNA, 13 nt, Human
gauuacaagcgug

SEQ ID NO: 1505121 - RNA, 21 nt, Human
gauuacaagcgugagccacug

SEQ ID NO: 1505122 - RNA, 13 nt, Human
gauucagacagcu

SEQ ID NO: 1505123 - RNA, 14 nt, Human
gauucagacagcug

SEQ ID NO: 1505124 - RNA, 17 nt, Human
gauucagacagcugccu

SEQ ID NO: 1505125 - RNA, 18 nt, Human
gauucagacagcugccug

SEQ ID NO: 1505126 - RNA, 17 nt, Human
gcaauccugcaagaaca

SEQ ID NO: 1505127 - RNA, 14 nt, Human
gcaaggcugucaau

SEQ ID NO: 1505128 - RNA, 18 nt, Human
gcaaggcugucaauuaca

SEQ ID NO: 1505129 - RNA, 12 nt, Human
gcaagauguggg

SEQ ID NO: 1505130 - RNA, 16 nt, Human
gcaagaugugggcagu

SEQ ID NO: 1505131 - RNA, 15 nt, Human
gcaagcaccuccugc

SEQ ID NO: 1505132 - RNA, 16 nt, Human
gcaagcaccuccugcc

SEQ ID NO: 1505133 - RNA, 18 nt, Human
gcaagcaccuccugccuc

SEQ ID NO: 1505134 - RNA, 20 nt, Human
gcaagcaccuccugccucga

SEQ ID NO: 1505135 - RNA, 19 nt, Human
gcaagcucuuuuauaugcu

SEQ ID NO: 1505136 - RNA, 16 nt, Human
gcaaaccaucauugaa

SEQ ID NO: 1505137 - RNA, 17 nt, Human
gcaaaccaucauugaaa

SEQ ID NO: 1505138 - RNA, 19 nt, Human
gcaaaccaucauugaaauc

SEQ ID NO: 1505139 - RNA, 20 nt, Human
gcaaaccaucauugaaaucu

SEQ ID NO: 1505140 - RNA, 21 nt, Human
gcaaaccaucauugaaaucuu

SEQ ID NO: 1505141 - RNA, 18 nt, Human
gcaacugcauuggcuuug

SEQ ID NO: 1505142 - RNA, 21 nt, Human
gaagagaguccauauuucaau

SEQ ID NO: 1505143 - RNA, 19 nt, Human
gaagagaaugcacaaacag

SEQ ID NO: 1505144 - RNA, 20 nt, Human
gaagacuuuucuuucagcca

SEQ ID NO: 1505145 - RNA, 14 nt, Human
gaagacuuuggaaa

SEQ ID NO: 1505146 - RNA, 17 nt, Human
gaagacuuuggaaagag

SEQ ID NO: 1505147 - RNA, 12 nt, Human
gaagaacugaaa

SEQ ID NO: 1505148 - RNA, 13 nt, Human
gaagaacggggcu

SEQ ID NO: 1505149 - RNA, 20 nt, Human
gaagaacggggcucuucuca

SEQ ID NO: 1505150 - RNA, 22 nt, Human
gaagaacggggcucuucucauu

SEQ ID NO: 1505151 - RNA, 23 nt, Human
gaagaacggggcucuucucauuu

SEQ ID NO: 1505152 - RNA, 19 nt, Human
gaagacugcauuauauuua

SEQ ID NO: 1505153 - RNA, 11 nt, Human
gaagacuuugg

SEQ ID NO: 1505154 - RNA, 13 nt, Human
gaagacuuuggaa

SEQ ID NO: 1505155 - RNA, 23 nt, Human
gaacuuugaccucugcagcaaua

SEQ ID NO: 1505156 - RNA, 15 nt, Human
gaagauacugaaaua

SEQ ID NO: 1505157 - RNA, 18 nt, Human
gaagauguagaggagaaa

SEQ ID NO: 1505158 - RNA, 20 nt, Human
gaagagguuuuaaagcuucc

SEQ ID NO: 1505159 - RNA, 20 nt, Human
gaagauaauauuaaggaaga

SEQ ID NO: 1505160 - RNA, 17 nt, Human
gaagcauuuacuuugug

SEQ ID NO: 1505161 - RNA, 18 nt, Human
gaagcauuuacuuugugu

SEQ ID NO: 1505162 - RNA, 15 nt, Human
gaagccacaggccug

SEQ ID NO: 1505163 - RNA, 16 nt, Human
gaagccacaggccuga

SEQ ID NO: 1505164 - RNA, 16 nt, Human
gaagcccaggggccgg

SEQ ID NO: 1505165 - RNA, 23 nt, Human
gaagcccuucuaccuuccugcaa

SEQ ID NO: 1505166 - RNA, 20 nt, Human
gaagccagcaggcucucagg

SEQ ID NO: 1505167 - RNA, 17 nt, Human
gaagccacaggccugag

SEQ ID NO: 1505168 - RNA, 18 nt, Human
gaagccacaggccugaga

SEQ ID NO: 1505169 - RNA, 21 nt, Human
gaagccagcaggcucucaggc

SEQ ID NO: 1505170 - RNA, 22 nt, Human
gaagccagcaggcucucaggcc

SEQ ID NO: 1505171 - RNA, 13 nt, Human
gaagcccaggaaa

SEQ ID NO: 1505172 - RNA, 15 nt, Human
gaagcccaggaaagg

SEQ ID NO: 1505173 - RNA, 16 nt, Human
gaagcccaggaaaggc

SEQ ID NO: 1505174 - RNA, 19 nt, Human
gaagcccaggaaaggcucc

SEQ ID NO: 1505175 - RNA, 15 nt, Human
gaacauaaaauacaa

SEQ ID NO: 1505176 - RNA, 16 nt, Human
gaacagugauuaccag

SEQ ID NO: 1505177 - RNA, 20 nt, Human
gaacagugauuaccagggac

SEQ ID NO: 1505178 - RNA, 15 nt, Human
gaacacucugagacu

SEQ ID NO: 1505179 - RNA, 16 nt, Human
gaaauuguauuacaaa

SEQ ID NO: 1505180 - RNA, 18 nt, Human
gaaauuguauuacaaauc

SEQ ID NO: 1505181 - RNA, 13 nt, Human
gaacacucugaga

SEQ ID NO: 1505182 - RNA, 14 nt, Human
gaacacucugagac

SEQ ID NO: 1505183 - RNA, 18 nt, Human
gaaccuuuugagugccuu

SEQ ID NO: 1505184 - RNA, 19 nt, Human
gaaccuuuugagugccuua

SEQ ID NO: 1505185 - RNA, 21 nt, Human
gaaccuuuugagugccuuaca

SEQ ID NO: 1505186 - RNA, 23 nt, Human
gaacuacaaacaaaauuucuauu

SEQ ID NO: 1505187 - RNA, 22 nt, Human
gaacuacaaacaaaauuucuau

SEQ ID NO: 1505188 - RNA, 21 nt, Human
gaacuagaguuuagcuggaaa

SEQ ID NO: 1505189 - RNA, 22 nt, Human
gaaccuuuugagugccuuacac

SEQ ID NO: 1505190 - RNA, 12 nt, Human
gaaguccaagca

SEQ ID NO: 1505191 - RNA, 22 nt, Human
gaaguccaagcauuuagaugua

SEQ ID NO: 1505192 - RNA, 18 nt, Human
gaagucuuagauguauau

SEQ ID NO: 1505193 - RNA, 21 nt, Human
gaaguuucugccgcagcccug

SEQ ID NO: 1505194 - RNA, 15 nt, Human
gaagucuuagaugua

SEQ ID NO: 1505195 - RNA, 16 nt, Human
gaaguauccuucagcc

SEQ ID NO: 1505196 - RNA, 14 nt, Human
gaaguauccuucag

SEQ ID NO: 1505197 - RNA, 16 nt, Human
gaagggggcugggaca

SEQ ID NO: 1505198 - RNA, 19 nt, Human
gaagggggcugggacaugg

SEQ ID NO: 1505199 - RNA, 12 nt, Human
gaaggggguggu

SEQ ID NO: 1505200 - RNA, 19 nt, Human
gaaggggguggugucucca

SEQ ID NO: 1505201 - RNA, 15 nt, Human
gaaguacuggagaaa

SEQ ID NO: 1505202 - RNA, 18 nt, Human
gaaguacuauaauuuacc

SEQ ID NO: 1505203 - RNA, 22 nt, Human
gaaguaauaugcacacauuuuu

SEQ ID NO: 1505204 - RNA, 20 nt, Human
gaauacucuuauaucuauau

SEQ ID NO: 1505205 - RNA, 22 nt, Human
gaauagcugggacuacaggugu

SEQ ID NO: 1505206 - RNA, 23 nt, Human
gaauagcugggacuacaggugug

SEQ ID NO: 1505207 - RNA, 15 nt, Human
gaauaccuguccccc

SEQ ID NO: 1505208 - RNA, 13 nt, Human
gaauaccuguccc

SEQ ID NO: 1505209 - RNA, 16 nt, Human
gaauauuuuaacuucc

SEQ ID NO: 1505210 - RNA, 20 nt, Human
gaauaauccuaaacauauga

SEQ ID NO: 1505211 - RNA, 21 nt, Human
gaauacagaggcaacugcauu

SEQ ID NO: 1505212 - RNA, 17 nt, Human
gaauaauacaguaucuc

SEQ ID NO: 1505213 - RNA, 19 nt, Human
gaauaaucaaauacauuuu

SEQ ID NO: 1505214 - RNA, 20 nt, Human
gaaguuugagaucagccugg

SEQ ID NO: 1505215 - RNA, 18 nt, Human
gaauaacauguaauuaag

SEQ ID NO: 1505216 - RNA, 19 nt, Human
gaauaacauguaauuaagu

SEQ ID NO: 1505217 - RNA, 17 nt, Human
gaaugaagauacugaaa

SEQ ID NO: 1505218 - RNA, 18 nt, Human
gaaugaagauacugaaau

SEQ ID NO: 1505219 - RNA, 21 nt, Human
gaaugaagauacugaaauaaa

SEQ ID NO: 1505220 - RNA, 19 nt, Human
gaaugaagauacugaaaua

SEQ ID NO: 1505221 - RNA, 22 nt, Human
gaaugaaccacaucuugcucug

SEQ ID NO: 1505222 - RNA, 23 nt, Human
gaaugaaccacaucuugcucugc

SEQ ID NO: 1505223 - RNA, 17 nt, Human
gaauggcacagcccaaa

SEQ ID NO: 1505224 - RNA, 18 nt, Human
gaauguaagaacuacaaa

SEQ ID NO: 1505225 - RNA, 22 nt, Human
gaaugguuuucaaaauaaaaau

SEQ ID NO: 1505226 - RNA, 14 nt, Human
gaaugucaguguga

SEQ ID NO: 1505227 - RNA, 22 nt, Human
gaauuuaaauagcuuuuuucuc

SEQ ID NO: 1505228 - RNA, 22 nt, Human
gaauuguaaggaaugauuaauu

SEQ ID NO: 1505229 - RNA, 15 nt, Human
gaauuucccaaagca

SEQ ID NO: 1505230 - RNA, 19 nt, Human
gaauucucuaguuugauua

SEQ ID NO: 1505231 - RNA, 14 nt, Human
gaauugaaaaacca

SEQ ID NO: 1505232 - RNA, 14 nt, Human
gaauugaagcagga

SEQ ID NO: 1505233 - RNA, 20 nt, Human
gaaugucagugugacugauc

SEQ ID NO: 1505234 - RNA, 21 nt, Human
gaaugucagugugacugaucu

SEQ ID NO: 1505235 - RNA, 17 nt, Human
gaauucucuaguuugau

SEQ ID NO: 1505236 - RNA, 17 nt, Human
gaauucucagaaucuca

SEQ ID NO: 1505237 - RNA, 11 nt, Human
gacccugaggc

SEQ ID NO: 1505238 - RNA, 12 nt, Human
gacccugaggcc

SEQ ID NO: 1505239 - RNA, 16 nt, Human
gacccugaggcccaga

SEQ ID NO: 1505240 - RNA, 18 nt, Human
gacccugaggcccagagg

SEQ ID NO: 1505241 - RNA, 20 nt, Human
gacccugcccugugggcccc

SEQ ID NO: 1505242 - RNA, 22 nt, Human
gacccugcccugugggccccca

SEQ ID NO: 1505243 - RNA, 20 nt, Human
gacccaaaaggcagaagcaa

SEQ ID NO: 1505244 - RNA, 18 nt, Human
gacccaaaaggcagaagc

SEQ ID NO: 1505245 - RNA, 19 nt, Human
gacccaaaaggcagaagca

SEQ ID NO: 1505246 - RNA, 13 nt, Human
gacccaugcugcc

SEQ ID NO: 1505247 - RNA, 18 nt, Human
gacccaugcugcccugug

SEQ ID NO: 1505248 - RNA, 19 nt, Human
gacccaugcugcccuguga

SEQ ID NO: 1505249 - RNA, 20 nt, Human
gacccaugcugcccugugag

SEQ ID NO: 1505250 - RNA, 18 nt, Human
gaccacaaaacuuuucua

SEQ ID NO: 1505251 - RNA, 16 nt, Human
gaccacugcagaagac

SEQ ID NO: 1505252 - RNA, 18 nt, Human
gaccacugcagaagacag

SEQ ID NO: 1505253 - RNA, 22 nt, Human
gaccagacaccuugacagggca

SEQ ID NO: 1505254 - RNA, 21 nt, Human
gaccagagcugccaccugccu

SEQ ID NO: 1505255 - RNA, 23 nt, Human
gaccagacaccuugacagggcac

SEQ ID NO: 1505256 - RNA, 24 nt, Human
gaccagacaccuugacagggcaca

SEQ ID NO: 1505257 - RNA, 20 nt, Human
gaccagcaccaucucuccuc

SEQ ID NO: 1505258 - RNA, 21 nt, Human
gaccagcaccaucucuccucc

SEQ ID NO: 1505259 - RNA, 16 nt, Human
gacacuagaagauuuu

SEQ ID NO: 1505260 - RNA, 17 nt, Human
gacagacacaggcccgg

SEQ ID NO: 1505261 - RNA, 20 nt, Human
gacagacacaggcccggcuc

SEQ ID NO: 1505262 - RNA, 22 nt, Human
gacagacacaggcccggcucca

SEQ ID NO: 1505263 - RNA, 22 nt, Human
gacacgaauauugcugauggug

SEQ ID NO: 1505264 - RNA, 22 nt, Human
gaauuucccaaagcagugcaug

SEQ ID NO: 1505265 - RNA, 16 nt, Human
gaauuucccaaagcag

SEQ ID NO: 1505266 - RNA, 18 nt, Human
gaauuucccaaagcagug

SEQ ID NO: 1505267 - RNA, 12 nt, Human
gacagaggcagc

SEQ ID NO: 1505268 - RNA, 20 nt, Human
gacagagcuacacaggggaa

SEQ ID NO: 1505269 - RNA, 23 nt, Human
gacagaggcagccccauucugcc

SEQ ID NO: 1505270 - RNA, 13 nt, Human
gacagagggggug

SEQ ID NO: 1505271 - RNA, 19 nt, Human
gacagagugagacucuguc

SEQ ID NO: 1505272 - RNA, 21 nt, Human
gacagagucucacuguugccc

SEQ ID NO: 1505273 - RNA, 16 nt, Human
gacagagugagacucu

SEQ ID NO: 1505274 - RNA, 23 nt, Human
gacaggaugguucccuugaugaa

SEQ ID NO: 1505275 - RNA, 13 nt, Human
gacaggcaagcac

SEQ ID NO: 1505276 - RNA, 17 nt, Human
gacaggcaagcaccucc

SEQ ID NO: 1505277 - RNA, 18 nt, Human
gacaggcaagcaccuccu

SEQ ID NO: 1505278 - RNA, 24 nt, Human
gacaggcaaugcuggcuguuggcu

SEQ ID NO: 1505279 - RNA, 23 nt, Human
gacaggcaaugcuggcuguuggc

SEQ ID NO: 1505280 - RNA, 21 nt, Human
gacaggcauguucucugagga

SEQ ID NO: 1505281 - RNA, 20 nt, Human
gacaggcaagcaccuccugc

SEQ ID NO: 1505282 - RNA, 21 nt, Human
gacaggcaagcaccuccugcc

SEQ ID NO: 1505283 - RNA, 19 nt, Human
gacaggcaaugcuggcugu

SEQ ID NO: 1505284 - RNA, 17 nt, Human
gacauaaaaacaacuuu

SEQ ID NO: 1505285 - RNA, 23 nt, Human
gacaucaacugcaucaagaugug

SEQ ID NO: 1505286 - RNA, 16 nt, Human
gacaucaacugcauca

SEQ ID NO: 1505287 - RNA, 18 nt, Human
gacagggccagugcaguu

SEQ ID NO: 1505288 - RNA, 22 nt, Human
gacaggcauguucucugaggac

SEQ ID NO: 1505289 - RNA, 14 nt, Human
gacuggcacaguuu

SEQ ID NO: 1505290 - RNA, 18 nt, Human
gacuggcacaguuuucug

SEQ ID NO: 1505291 - RNA, 22 nt, Human
gacuggcacaguuuucugagaa

SEQ ID NO: 1505292 - RNA, 23 nt, Human
gacuggccaagguuuggggaaga

SEQ ID NO: 1505293 - RNA, 12 nt, Human
gacuucaucccu

SEQ ID NO: 1505294 - RNA, 20 nt, Human
gacuucaucccucuggggcu

SEQ ID NO: 1505295 - RNA, 23 nt, Human
gacuuacuguacaugaaaacaca

SEQ ID NO: 1505296 - RNA, 18 nt, Human
gacuuacuguacaugaaa

SEQ ID NO: 1505297 - RNA, 12 nt, Human
gacuuacuguac

SEQ ID NO: 1505298 - RNA, 16 nt, Human
gacuuacuguacauga

SEQ ID NO: 1505299 - RNA, 15 nt, Human
gacuuacuguacaug

SEQ ID NO: 1505300 - RNA, 21 nt, Human
gacucuacagaggccaugggc

SEQ ID NO: 1505301 - RNA, 15 nt, Human
gacucuacagaggcc

SEQ ID NO: 1505302 - RNA, 18 nt, Human
gacuacaggcacccacca

SEQ ID NO: 1505303 - RNA, 13 nt, Human
gacuacaggcacc

SEQ ID NO: 1505304 - RNA, 15 nt, Human
gacuacaggcaccca

SEQ ID NO: 1505305 - RNA, 18 nt, Human
gacuccugcaggcagcca

SEQ ID NO: 1505306 - RNA, 19 nt, Human
gacuccugcaggcagccag

SEQ ID NO: 1505307 - RNA, 20 nt, Human
gacuccugcaggcagccagg

SEQ ID NO: 1505308 - RNA, 21 nt, Human
gacuccugcaggcagccaggc

SEQ ID NO: 1505309 - RNA, 13 nt, Human
gacugaggccuga

SEQ ID NO: 1505310 - RNA, 14 nt, Human
gacugaggccugag

SEQ ID NO: 1505311 - RNA, 18 nt, Human
gacugaguacguugugca

SEQ ID NO: 1505312 - RNA, 16 nt, Human
gacugaggggagggga

SEQ ID NO: 1505313 - RNA, 21 nt, Human
gacugaggccugagcgcuccu

SEQ ID NO: 1505314 - RNA, 23 nt, Human
gacugaggccugagcgcuccugc

SEQ ID NO: 1505315 - RNA, 16 nt, Human
gacuaacuugucuuug

SEQ ID NO: 1505316 - RNA, 23 nt, Human
gacuaacuugucuuuggacccug

SEQ ID NO: 1505317 - RNA, 11 nt, Human
gacguguuaug

SEQ ID NO: 1505318 - RNA, 14 nt, Human
gacguguuaugacu

SEQ ID NO: 1505319 - RNA, 15 nt, Human
gacguguuaugacuc

SEQ ID NO: 1505320 - RNA, 11 nt, Human
gaccuuucaau

SEQ ID NO: 1505321 - RNA, 19 nt, Human
gaccuuucaauaggaaaaa

SEQ ID NO: 1505322 - RNA, 20 nt, Human
gaccuuucaauaggaaaaac

SEQ ID NO: 1505323 - RNA, 22 nt, Human
gacgcugugcugcccugcccac

SEQ ID NO: 1505324 - RNA, 13 nt, Human
gacggagucccac

SEQ ID NO: 1505325 - RNA, 14 nt, Human
gacggagucccacc

SEQ ID NO: 1505326 - RNA, 19 nt, Human
gacccuugccgucuaccug

SEQ ID NO: 1505327 - RNA, 20 nt, Human
gacccuugccgucuaccuga

SEQ ID NO: 1505328 - RNA, 23 nt, Human
gacccuugccgucuaccugaggg

SEQ ID NO: 1505329 - RNA, 15 nt, Human
gacccuugugguccc

SEQ ID NO: 1505330 - RNA, 14 nt, Human
gaccuucuccuuca

SEQ ID NO: 1505331 - RNA, 15 nt, Human
gaccuucuccuucac

SEQ ID NO: 1505332 - RNA, 16 nt, Human
gaccuucuccuucacc

SEQ ID NO: 1505333 - RNA, 20 nt, Human
gaccuucuccuucaccuuug

SEQ ID NO: 1505334 - RNA, 21 nt, Human
gaccuucuccuucaccuuugu

SEQ ID NO: 1505335 - RNA, 14 nt, Human
gaccuugaacuggg

SEQ ID NO: 1505336 - RNA, 15 nt, Human
gaccuucuaggaagc

SEQ ID NO: 1505337 - RNA, 17 nt, Human
cuuccuugcuuaaggua

SEQ ID NO: 1505338 - RNA, 20 nt, Human
cuuccuuggacucauuuuaa

SEQ ID NO: 1505339 - RNA, 19 nt, Human
cuuccuuggacucauuuua

SEQ ID NO: 1505340 - RNA, 15 nt, Human
cuuccuuuugaggga

SEQ ID NO: 1505341 - RNA, 13 nt, Human
cuucgcuccugug

SEQ ID NO: 1505342 - RNA, 14 nt, Human
cuucgcuccugugu

SEQ ID NO: 1505343 - RNA, 15 nt, Human
cuucgcuccuguguc

SEQ ID NO: 1505344 - RNA, 20 nt, Human
cuucgggaggucgaggcagg

SEQ ID NO: 1505345 - RNA, 21 nt, Human
cuucgggaggucgaggcagga

SEQ ID NO: 1505346 - RNA, 18 nt, Human
cuucggccuccauccuga

SEQ ID NO: 1505347 - RNA, 19 nt, Human
cuucggccuccauccugag

SEQ ID NO: 1505348 - RNA, 17 nt, Human
cuucggccuccauccug

SEQ ID NO: 1505349 - RNA, 16 nt, Human
cuucgcuccugugucu

SEQ ID NO: 1505350 - RNA, 22 nt, Human
cuucucauuucaccccucccuu

SEQ ID NO: 1505351 - RNA, 17 nt, Human
cuucuccaggcuguauc

SEQ ID NO: 1505352 - RNA, 16 nt, Human
cuucuccacccugcuc

SEQ ID NO: 1505353 - RNA, 14 nt, Human
cuucuccacccugc

SEQ ID NO: 1505354 - RNA, 15 nt, Human
cuucuccacccugcu

SEQ ID NO: 1505355 - RNA, 22 nt, Human
cuucuccuucaccuuugucccc

SEQ ID NO: 1505356 - RNA, 18 nt, Human
cuucugcuucagccuccc

SEQ ID NO: 1505357 - RNA, 16 nt, Human
cuucugcuucagccuc

SEQ ID NO: 1505358 - RNA, 17 nt, Human
cuucugcuucagccucc

SEQ ID NO: 1505359 - RNA, 21 nt, Human
cuucugccauauucuguuggc

SEQ ID NO: 1505360 - RNA, 20 nt, Human
cuucugccauuucugagauc

SEQ ID NO: 1505361 - RNA, 14 nt, Human
cuucucucaucucu

SEQ ID NO: 1505362 - RNA, 16 nt, Human
cuucucucaucucuua

SEQ ID NO: 1505363 - RNA, 12 nt, Human
cuucucuccagc

SEQ ID NO: 1505364 - RNA, 17 nt, Human
cuucugccauauucugu

SEQ ID NO: 1505365 - RNA, 18 nt, Human
cuucagcgguuuauauaa

SEQ ID NO: 1505366 - RNA, 15 nt, Human
cuucagcccucaccc

SEQ ID NO: 1505367 - RNA, 16 nt, Human
cuucagcccucacccc

SEQ ID NO: 1505368 - RNA, 17 nt, Human
cuucagcccucaccccu

SEQ ID NO: 1505369 - RNA, 19 nt, Human
cuucagcccucaccccugg

SEQ ID NO: 1505370 - RNA, 11 nt, Human
cuucagcugac

SEQ ID NO: 1505371 - RNA, 23 nt, Human
cuuccacaagagcccaggccucc

SEQ ID NO: 1505372 - RNA, 18 nt, Human
cuucauuuccugugucuu

SEQ ID NO: 1505373 - RNA, 13 nt, Human
cuucagugccuua

SEQ ID NO: 1505374 - RNA, 14 nt, Human
cuucagugccuuau

SEQ ID NO: 1505375 - RNA, 11 nt, Human
cuucagugccu

SEQ ID NO: 1505376 - RNA, 12 nt, Human
cuucagugccuu

SEQ ID NO: 1505377 - RNA, 17 nt, Human
cuuccagugaggcucug

SEQ ID NO: 1505378 - RNA, 15 nt, Human
cuuccagugaggcuc

SEQ ID NO: 1505379 - RNA, 14 nt, Human
cuuccagugaggcu

SEQ ID NO: 1505380 - RNA, 22 nt, Human
cuuccaggggugggacacccug

SEQ ID NO: 1505381 - RNA, 24 nt, Human
cuuccaggggugggacacccugug

SEQ ID NO: 1505382 - RNA, 19 nt, Human
cuguuuuauaauuuuguga

SEQ ID NO: 1505383 - RNA, 21 nt, Human
cuguuuguuucugaaagggac

SEQ ID NO: 1505384 - RNA, 23 nt, Human
cuguuuguuucugaaagggacgc

SEQ ID NO: 1505385 - RNA, 21 nt, Human
cuguuuuauuuuaauucaguu

SEQ ID NO: 1505386 - RNA, 14 nt, Human
cuguuuucucuuga

SEQ ID NO: 1505387 - RNA, 18 nt, Human
cuguuuugaaucucauaa

SEQ ID NO: 1505388 - RNA, 17 nt, Human
cuguuuucucuugagag

SEQ ID NO: 1505389 - RNA, 14 nt, Human
cuguuuagauaaua

SEQ ID NO: 1505390 - RNA, 12 nt, Human
cuguuuagauaa

SEQ ID NO: 1505391 - RNA, 18 nt, Human
cuguuuguuucugaaagg

SEQ ID NO: 1505392 - RNA, 22 nt, Human
cuuaacuucacauauugauuuc

SEQ ID NO: 1505393 - RNA, 17 nt, Human
cuuaacuucacauauug

SEQ ID NO: 1505394 - RNA, 16 nt, Human
cuuaacuucacauauu

SEQ ID NO: 1505395 - RNA, 15 nt, Human
cuuaacuucacauau

SEQ ID NO: 1505396 - RNA, 14 nt, Human
cuuaacuucacaua

SEQ ID NO: 1505397 - RNA, 12 nt, Human
cuuaacuucaca

SEQ ID NO: 1505398 - RNA, 11 nt, Human
cuuaacuauuc

SEQ ID NO: 1505399 - RNA, 21 nt, Human
cuuaagaagacugcauuauau

SEQ ID NO: 1505400 - RNA, 16 nt, Human
cuuaaucuaaauggaa

SEQ ID NO: 1505401 - RNA, 14 nt, Human
cuuaaucuaaaugg

SEQ ID NO: 1505402 - RNA, 18 nt, Human
cuuaaugccacuaaauug

SEQ ID NO: 1505403 - RNA, 14 nt, Human
cuuauaauuuaaaa

SEQ ID NO: 1505404 - RNA, 15 nt, Human
cuuauacauuugaua

SEQ ID NO: 1505405 - RNA, 13 nt, Human
cuuauaauuuaaa

SEQ ID NO: 1505406 - RNA, 21 nt, Human
cuuaggguuaugauuaaguaa

SEQ ID NO: 1505407 - RNA, 17 nt, Human
cuuagguuggcaaaaag

SEQ ID NO: 1505408 - RNA, 21 nt, Human
cuuagguuggcaaaaaggcag

SEQ ID NO: 1505409 - RNA, 15 nt, Human
cuuaugauugcagau

SEQ ID NO: 1505410 - RNA, 15 nt, Human
cuuauuuaaugaaag

SEQ ID NO: 1505411 - RNA, 19 nt, Human
cuuagaugcaguucugaag

SEQ ID NO: 1505412 - RNA, 20 nt, Human
cuuagaugcaguucugaaga

SEQ ID NO: 1505413 - RNA, 19 nt, Human
cuuagacagucccugccaa

SEQ ID NO: 1505414 - RNA, 17 nt, Human
cuuagacagucccugcc

SEQ ID NO: 1505415 - RNA, 18 nt, Human
cuuagacagucccugcca

SEQ ID NO: 1505416 - RNA, 15 nt, Human
cuuagaagucacaca

SEQ ID NO: 1505417 - RNA, 14 nt, Human
cuuagacagucccu

SEQ ID NO: 1505418 - RNA, 15 nt, Human
cuuagacagucccug

SEQ ID NO: 1505419 - RNA, 16 nt, Human
cuuagacagucccugc

SEQ ID NO: 1505420 - RNA, 24 nt, Human
cuuacuugcauaccaaguugauac

SEQ ID NO: 1505421 - RNA, 16 nt, Human
cuuacuguacaugaaa

SEQ ID NO: 1505422 - RNA, 14 nt, Human
cuuacuccaggaga

SEQ ID NO: 1505423 - RNA, 19 nt, Human
cuuacuaguuucccuugca

SEQ ID NO: 1505424 - RNA, 15 nt, Human
cuuacgugaguccug

SEQ ID NO: 1505425 - RNA, 20 nt, Human
cuugcuugauuguauggugg

SEQ ID NO: 1505426 - RNA, 20 nt, Human
cuuggaagcuccgcuuucua

SEQ ID NO: 1505427 - RNA, 22 nt, Human
cuugcucugcugacagacacag

SEQ ID NO: 1505428 - RNA, 22 nt, Human
cuugcccuguuaaaagaugaaa

SEQ ID NO: 1505429 - RNA, 17 nt, Human
cuugcaugaggcuagug

SEQ ID NO: 1505430 - RNA, 13 nt, Human
cuugcaugaggcu

SEQ ID NO: 1505431 - RNA, 14 nt, Human
cuugcaugaggcua

SEQ ID NO: 1505432 - RNA, 14 nt, Human
cuugcccuguuaaa

SEQ ID NO: 1505433 - RNA, 21 nt, Human
cuugaguugauucagcucugc

SEQ ID NO: 1505434 - RNA, 20 nt, Human
cuugaguugauucagcucug

SEQ ID NO: 1505435 - RNA, 19 nt, Human
cuugaguugauucagcucu

SEQ ID NO: 1505436 - RNA, 15 nt, Human
cuugcaauggcagcc

SEQ ID NO: 1505437 - RNA, 16 nt, Human
cuugcaauggcagccu

SEQ ID NO: 1505438 - RNA, 17 nt, Human
cuugcaauggcagccuu

SEQ ID NO: 1505439 - RNA, 18 nt, Human
cuugcaauggcagccuug

SEQ ID NO: 1505440 - RNA, 21 nt, Human
cuugcagacucuacagaggcc

SEQ ID NO: 1505441 - RNA, 16 nt, Human
cuugagccugggaggu

SEQ ID NO: 1505442 - RNA, 15 nt, Human
cuugaggguugggcu

SEQ ID NO: 1505443 - RNA, 17 nt, Human
cuugaggguugggcugg

SEQ ID NO: 1505444 - RNA, 12 nt, Human
cuugagccuggg

SEQ ID NO: 1505445 - RNA, 15 nt, Human
cuugagccugggagg

SEQ ID NO: 1505446 - RNA, 16 nt, Human
cuuggggcugaugcag

SEQ ID NO: 1505447 - RNA, 18 nt, Human
cuuggggcugaugcaguu

SEQ ID NO: 1505448 - RNA, 15 nt, Human
cuugguuuguaaauu

SEQ ID NO: 1505449 - RNA, 14 nt, Human
cuugguuuguaaau

SEQ ID NO: 1505450 - RNA, 20 nt, Human
cuugguuuguaaauuaacuu

SEQ ID NO: 1505451 - RNA, 20 nt, Human
cuugggccacugugaagaga

SEQ ID NO: 1505452 - RNA, 16 nt, Human
cuuggacucauuuuaa

SEQ ID NO: 1505453 - RNA, 17 nt, Human
cuuuaccuuuuuuauac

SEQ ID NO: 1505454 - RNA, 20 nt, Human
cuuuaccuuuuuuauacaua

SEQ ID NO: 1505455 - RNA, 19 nt, Human
cuuuaccuuuuuuauacau

SEQ ID NO: 1505456 - RNA, 22 nt, Human
cuuguguuuuuaacucaauauu

SEQ ID NO: 1505457 - RNA, 16 nt, Human
cuuguuaagauaguua

SEQ ID NO: 1505458 - RNA, 16 nt, Human
cuuguggucccacccc

SEQ ID NO: 1505459 - RNA, 19 nt, Human
cuuguggucccaccccaca

SEQ ID NO: 1505460 - RNA, 15 nt, Human
cuuguggucccaccc

SEQ ID NO: 1505461 - RNA, 21 nt, Human
cuuucuugaucaacaucuuuu

SEQ ID NO: 1505462 - RNA, 22 nt, Human
cuuucuugaucaacaucuuuuc

SEQ ID NO: 1505463 - RNA, 13 nt, Human
cuuucugaaauaa

SEQ ID NO: 1505464 - RNA, 16 nt, Human
cuuuccucuuuggucu

SEQ ID NO: 1505465 - RNA, 14 nt, Human
cuuuggcagaguuc

SEQ ID NO: 1505466 - RNA, 17 nt, Human
cuuugggccuggcuccc

SEQ ID NO: 1505467 - RNA, 23 nt, Human
cuuugugaggaagccgcuggggc

SEQ ID NO: 1505468 - RNA, 16 nt, Human
cuuuguucuggcucuu

SEQ ID NO: 1505469 - RNA, 21 nt, Human
cuuuguucuggcucuuccagg

SEQ ID NO: 1505470 - RNA, 13 nt, Human
cuuuguggcuucc

SEQ ID NO: 1505471 - RNA, 12 nt, Human
cuuugugauuuu

SEQ ID NO: 1505472 - RNA, 13 nt, Human
cuuugaccucugc

SEQ ID NO: 1505473 - RNA, 14 nt, Human
cuuugcuugaaaga

SEQ ID NO: 1505474 - RNA, 23 nt, Human
cuuuggaaagacuuuuccaaccc

SEQ ID NO: 1505475 - RNA, 12 nt, Human
cuuuggaaagac

SEQ ID NO: 1505476 - RNA, 14 nt, Human
gaaaacaaggauga

SEQ ID NO: 1505477 - RNA, 19 nt, Human
gaaaacacuguucucugcc

SEQ ID NO: 1505478 - RNA, 18 nt, Human
gaaaacaugcuacacacu

SEQ ID NO: 1505479 - RNA, 20 nt, Human
gaaaacacuguucucugccc

SEQ ID NO: 1505480 - RNA, 21 nt, Human
gaaaacacuguucucugcccu

SEQ ID NO: 1505481 - RNA, 16 nt, Human
cuuuuuuagaguugau

SEQ ID NO: 1505482 - RNA, 19 nt, Human
gaaaauaacaauaaaagac

SEQ ID NO: 1505483 - RNA, 14 nt, Human
gaaaaguauguuag

SEQ ID NO: 1505484 - RNA, 20 nt, Human
gaaaaguauguuagugcaaa

SEQ ID NO: 1505485 - RNA, 22 nt, Human
gaaaacacuguucucugcccuc

SEQ ID NO: 1505486 - RNA, 19 nt, Human
gaaaacaugcuacacacug

SEQ ID NO: 1505487 - RNA, 14 nt, Human
gaaaacguggcugc

SEQ ID NO: 1505488 - RNA, 22 nt, Human
cuuuuguucuugguuuguaaau

SEQ ID NO: 1505489 - RNA, 21 nt, Human
cuuuguuuguugucagcugaa

SEQ ID NO: 1505490 - RNA, 18 nt, Human
cuuuucuugcaugaggcu

SEQ ID NO: 1505491 - RNA, 15 nt, Human
cuuuucuguuugcua

SEQ ID NO: 1505492 - RNA, 23 nt, Human
cuggauuaaacuuaaucuaaaug

SEQ ID NO: 1505493 - RNA, 13 nt, Human
cuggauuaaacuu

SEQ ID NO: 1505494 - RNA, 16 nt, Human
cuggauggggcugcac

SEQ ID NO: 1505495 - RNA, 15 nt, Human
cuggauggggcugca

SEQ ID NO: 1505496 - RNA, 18 nt, Human
cuggcacaguuuucugag

SEQ ID NO: 1505497 - RNA, 19 nt, Human
cuggcacaguuuucugaga

SEQ ID NO: 1505498 - RNA, 23 nt, Human
cuggcacuauaauguaagcucua

SEQ ID NO: 1505499 - RNA, 20 nt, Human
cuggcacaguuuucugagaa

SEQ ID NO: 1505500 - RNA, 13 nt, Human
cuggcacugcuuc

SEQ ID NO: 1505501 - RNA, 14 nt, Human
cuggcacugcuucc

SEQ ID NO: 1505502 - RNA, 22 nt, Human
cuggccucaagugauucuccug

SEQ ID NO: 1505503 - RNA, 23 nt, Human
cuggccuagcauacguacacauu

SEQ ID NO: 1505504 - RNA, 12 nt, Human
cuggcccacugc

SEQ ID NO: 1505505 - RNA, 13 nt, Human
cuggcccacugca

SEQ ID NO: 1505506 - RNA, 17 nt, Human
cuggccuagcauacgua

SEQ ID NO: 1505507 - RNA, 16 nt, Human
cuggccaacgggguga

SEQ ID NO: 1505508 - RNA, 16 nt, Human
cuggccagaugcacca

SEQ ID NO: 1505509 - RNA, 15 nt, Human
cuggcacugcuucca

SEQ ID NO: 1505510 - RNA, 16 nt, Human
cuggcacugcuuccag

SEQ ID NO: 1505511 - RNA, 17 nt, Human
cuggcacugcuuccagu

SEQ ID NO: 1505512 - RNA, 18 nt, Human
cuggcacugcuuccagug

SEQ ID NO: 1505513 - RNA, 22 nt, Human
cuggccagaugcaccagcccuu

SEQ ID NO: 1505514 - RNA, 21 nt, Human
cuggccagaugcaccagcccu

SEQ ID NO: 1505515 - RNA, 17 nt, Human
cuggccagaugcaccag

SEQ ID NO: 1505516 - RNA, 18 nt, Human
cuggccagaugcaccagc

SEQ ID NO: 1505517 - RNA, 19 nt, Human
cuggccagaugcaccagcc

SEQ ID NO: 1505518 - RNA, 20 nt, Human
cuggccagaugcaccagccc

SEQ ID NO: 1505519 - RNA, 16 nt, Human
cuggagcccagaggag

SEQ ID NO: 1505520 - RNA, 17 nt, Human
cuggagcccagaggagg

SEQ ID NO: 1505521 - RNA, 16 nt, Human
cuggagcuagaauuug

SEQ ID NO: 1505522 - RNA, 17 nt, Human
cuggagcuagaauuuga

SEQ ID NO: 1505523 - RNA, 22 nt, Human
cuggagcuagaauuugauaugu

SEQ ID NO: 1505524 - RNA, 12 nt, Human
cuggagcucugc

SEQ ID NO: 1505525 - RNA, 14 nt, Human
cuggacaggcaugu

SEQ ID NO: 1505526 - RNA, 23 nt, Human
cuggaauaauccuaaacauauga

SEQ ID NO: 1505527 - RNA, 15 nt, Human
cuggaagcacagcuu

SEQ ID NO: 1505528 - RNA, 18 nt, Human
cuggaagcacagcuucau

SEQ ID NO: 1505529 - RNA, 15 nt, Human
cuggaaugcaguggu

SEQ ID NO: 1505530 - RNA, 18 nt, Human
cugcugaaacaacaaaua

SEQ ID NO: 1505531 - RNA, 13 nt, Human
cugcugaaacaac

SEQ ID NO: 1505532 - RNA, 16 nt, Human
cugggagcuuuuguag

SEQ ID NO: 1505533 - RNA, 22 nt, Human
cugggaacccaaguccaagcau

SEQ ID NO: 1505534 - RNA, 18 nt, Human
cugggaggucaaggcugc

SEQ ID NO: 1505535 - RNA, 20 nt, Human
cugggcaaugugauaaaacc

SEQ ID NO: 1505536 - RNA, 16 nt, Human
cugggagugagcuggu

SEQ ID NO: 1505537 - RNA, 13 nt, Human
cugggagugagcu

SEQ ID NO: 1505538 - RNA, 20 nt, Human
cuggcuguuggcugggggcc

SEQ ID NO: 1505539 - RNA, 21 nt, Human
cuggcuggguggcaccagcag

SEQ ID NO: 1505540 - RNA, 22 nt, Human
cuggcuggguggcaccagcagc

SEQ ID NO: 1505541 - RNA, 19 nt, Human
cuggcuguuggcugggggc

SEQ ID NO: 1505542 - RNA, 20 nt, Human
cuggcucuuccaggcuggga

SEQ ID NO: 1505543 - RNA, 18 nt, Human
cuggcucuuccaggcugg

SEQ ID NO: 1505544 - RNA, 19 nt, Human
cuggcucuuccaggcuggg

SEQ ID NO: 1505545 - RNA, 13 nt, Human
cuggccugagcug

SEQ ID NO: 1505546 - RNA, 17 nt, Human
cuggcucuuccaggcug

SEQ ID NO: 1505547 - RNA, 15 nt, Human
cuggccugagcuggg

SEQ ID NO: 1505548 - RNA, 21 nt, Human
cuggguacuuguggacacagc

SEQ ID NO: 1505549 - RNA, 23 nt, Human
cuggguacuuguggacacagcuc

SEQ ID NO: 1505550 - RNA, 21 nt, Human
cugggguggggaccucaggcc

SEQ ID NO: 1505551 - RNA, 22 nt, Human
cugggguggggaccucaggccu

SEQ ID NO: 1505552 - RNA, 23 nt, Human
cugggguggggaccucaggccug

SEQ ID NO: 1505553 - RNA, 20 nt, Human
cuggguacuuguggacacag

SEQ ID NO: 1505554 - RNA, 17 nt, Human
cugggguggggaccuca

SEQ ID NO: 1505555 - RNA, 18 nt, Human
cugggguggggaccucag

SEQ ID NO: 1505556 - RNA, 19 nt, Human
cugggguggggaccucagg

SEQ ID NO: 1505557 - RNA, 13 nt, Human
cugggggccucag

SEQ ID NO: 1505558 - RNA, 17 nt, Human
cugggggccucagugcc

SEQ ID NO: 1505559 - RNA, 18 nt, Human
cugggggccucagugcca

SEQ ID NO: 1505560 - RNA, 18 nt, Human
cugggcuucaguggcagc

SEQ ID NO: 1505561 - RNA, 19 nt, Human
cugggcuucaguggcagcu

SEQ ID NO: 1505562 - RNA, 20 nt, Human
cugggcuucaguggcagcug

SEQ ID NO: 1505563 - RNA, 21 nt, Human
cugggcuucaguggcagcugc

SEQ ID NO: 1505564 - RNA, 22 nt, Human
cugggcuucaguggcagcugcu

SEQ ID NO: 1505565 - RNA, 23 nt, Human
cugggcuucaguggcagcugcuu

SEQ ID NO: 1505566 - RNA, 13 nt, Human
cugggcuugggga

SEQ ID NO: 1505567 - RNA, 17 nt, Human
cugggcuuggggaccag

SEQ ID NO: 1505568 - RNA, 20 nt, Human
cugggcuuggggaccagagc

SEQ ID NO: 1505569 - RNA, 21 nt, Human
cugggcuuggggaccagagcu

SEQ ID NO: 1505570 - RNA, 19 nt, Human
cugggcucccuucccaccu

SEQ ID NO: 1505571 - RNA, 13 nt, Human
cuggguuggaggg

SEQ ID NO: 1505572 - RNA, 15 nt, Human
cugguccauagagag

SEQ ID NO: 1505573 - RNA, 17 nt, Human
cugguccauagagagca

SEQ ID NO: 1505574 - RNA, 18 nt, Human
cugguccauagagagcaa

SEQ ID NO: 1505575 - RNA, 21 nt, Human
cugguccauagagagcaagac

SEQ ID NO: 1505576 - RNA, 15 nt, Human
cuggucccacucagu

SEQ ID NO: 1505577 - RNA, 18 nt, Human
cuggucccacucagucca

SEQ ID NO: 1505578 - RNA, 23 nt, Human
cugguggcagugggagcugccug

SEQ ID NO: 1505579 - RNA, 12 nt, Human
cugguucucauc

SEQ ID NO: 1505580 - RNA, 14 nt, Human
cugguucucaucuu

SEQ ID NO: 1505581 - RNA, 15 nt, Human
cugguucucaucuuu

SEQ ID NO: 1505582 - RNA, 16 nt, Human
cugguucucaucuuuc

SEQ ID NO: 1505583 - RNA, 20 nt, Human
cugguucucaucuuucuuga

SEQ ID NO: 1505584 - RNA, 13 nt, Human
cugcccugcccac

SEQ ID NO: 1505585 - RNA, 14 nt, Human
cugcccugcccacc

SEQ ID NO: 1505586 - RNA, 15 nt, Human
cugcccugcccaccu

SEQ ID NO: 1505587 - RNA, 16 nt, Human
cugcccugcccaccug

SEQ ID NO: 1505588 - RNA, 11 nt, Human
cugcccggcug

SEQ ID NO: 1505589 - RNA, 15 nt, Human
cugcccggcugcgga

SEQ ID NO: 1505590 - RNA, 14 nt, Human
cugccccuggcagc

SEQ ID NO: 1505591 - RNA, 15 nt, Human
cugccccuggcagcc

SEQ ID NO: 1505592 - RNA, 16 nt, Human
cugccccuggcagccc

SEQ ID NO: 1505593 - RNA, 17 nt, Human
cugccccuggcagcccc

SEQ ID NO: 1505594 - RNA, 13 nt, Human
cugcccaggcccc

SEQ ID NO: 1505595 - RNA, 16 nt, Human
cugccauuucugagau

SEQ ID NO: 1505596 - RNA, 17 nt, Human
cugccaugccagcuuau

SEQ ID NO: 1505597 - RNA, 19 nt, Human
cugccaugccagcuuaucu

SEQ ID NO: 1505598 - RNA, 19 nt, Human
cugccagccgagauagcca

SEQ ID NO: 1505599 - RNA, 15 nt, Human
cugccaggaagccag

SEQ ID NO: 1505600 - RNA, 16 nt, Human
cugccaggaagccagc

SEQ ID NO: 1505601 - RNA, 18 nt, Human
cugccaggaagccagcag

SEQ ID NO: 1505602 - RNA, 19 nt, Human
cugccaggaagccagcagg

SEQ ID NO: 1505603 - RNA, 15 nt, Human
cugccacccugggga

SEQ ID NO: 1505604 - RNA, 16 nt, Human
cugccacccuggggag

SEQ ID NO: 1505605 - RNA, 20 nt, Human
cugccacccuggggagaaag

SEQ ID NO: 1505606 - RNA, 13 nt, Human
cugccucuucucu

SEQ ID NO: 1505607 - RNA, 14 nt, Human
cugccucuucucua

SEQ ID NO: 1505608 - RNA, 13 nt, Human
cugccugcccagg

SEQ ID NO: 1505609 - RNA, 14 nt, Human
cugccugcccaggc

SEQ ID NO: 1505610 - RNA, 15 nt, Human
cugccugcccaggcc

SEQ ID NO: 1505611 - RNA, 14 nt, Human
cugccucagccucc

SEQ ID NO: 1505612 - RNA, 13 nt, Human
cugccucagccuc

SEQ ID NO: 1505613 - RNA, 17 nt, Human
cugcccugcccaccugg

SEQ ID NO: 1505614 - RNA, 15 nt, Human
cugccuaagugcagc

SEQ ID NO: 1505615 - RNA, 20 nt, Human
cugcggaaugaaccacaucu

SEQ ID NO: 1505616 - RNA, 15 nt, Human
cugcgguccacccag

SEQ ID NO: 1505617 - RNA, 21 nt, Human
cugcggaaugaaccacaucuu

SEQ ID NO: 1505618 - RNA, 17 nt, Human
cugcgguccacccagga

SEQ ID NO: 1505619 - RNA, 16 nt, Human
cugcgguccacccagg

SEQ ID NO: 1505620 - RNA, 14 nt, Human
cugcuccagcuguu

SEQ ID NO: 1505621 - RNA, 15 nt, Human
cugcuccagcuguuc

SEQ ID NO: 1505622 - RNA, 16 nt, Human
cugcuccucuccccag

SEQ ID NO: 1505623 - RNA, 17 nt, Human
cugcuccucuccccagc

SEQ ID NO: 1505624 - RNA, 18 nt, Human
cugcuccucuccccagca

SEQ ID NO: 1505625 - RNA, 17 nt, Human
cugcucuccuuccugga

SEQ ID NO: 1505626 - RNA, 19 nt, Human
cugcucuccuuccuggagc

SEQ ID NO: 1505627 - RNA, 20 nt, Human
cugcucuccuuccuggagcc

SEQ ID NO: 1505628 - RNA, 12 nt, Human
cugacccacugc

SEQ ID NO: 1505629 - RNA, 13 nt, Human
cugacccaugcug

SEQ ID NO: 1505630 - RNA, 22 nt, Human
cugagugggggaucacagccuc

SEQ ID NO: 1505631 - RNA, 13 nt, Human
cugauaaagauga

SEQ ID NO: 1505632 - RNA, 17 nt, Human
cugagucugaaggcugg

SEQ ID NO: 1505633 - RNA, 13 nt, Human
cugagucugaagg

SEQ ID NO: 1505634 - RNA, 14 nt, Human
cugagucugaaggc

SEQ ID NO: 1505635 - RNA, 15 nt, Human
cugagucugaaggcu

SEQ ID NO: 1505636 - RNA, 16 nt, Human
cugagucugaaggcug

SEQ ID NO: 1505637 - RNA, 13 nt, Human
cugauguuccuag

SEQ ID NO: 1505638 - RNA, 18 nt, Human
cugauguuccuagugaaa

SEQ ID NO: 1505639 - RNA, 20 nt, Human
cugauguuccuagugaaaga

SEQ ID NO: 1505640 - RNA, 21 nt, Human
cugauguuccuagugaaagag

SEQ ID NO: 1505641 - RNA, 22 nt, Human
cugauucccaagcucugcuccu

SEQ ID NO: 1505642 - RNA, 19 nt, Human
cugauucccaagcucugcu

SEQ ID NO: 1505643 - RNA, 20 nt, Human
cugauucccaagcucugcuc

SEQ ID NO: 1505644 - RNA, 15 nt, Human
cugauucccaagcuc

SEQ ID NO: 1505645 - RNA, 17 nt, Human
cugauucccaagcucug

SEQ ID NO: 1505646 - RNA, 18 nt, Human
cugauucccaagcucugc

SEQ ID NO: 1505647 - RNA, 21 nt, Human
cugauaaagaugagugagcau

SEQ ID NO: 1505648 - RNA, 14 nt, Human
cugaucucucguga

SEQ ID NO: 1505649 - RNA, 17 nt, Human
cugcacccucaggcagg

SEQ ID NO: 1505650 - RNA, 18 nt, Human
cugcacccucaggcaggu

SEQ ID NO: 1505651 - RNA, 18 nt, Human
cugcacaagcugcacccu

SEQ ID NO: 1505652 - RNA, 13 nt, Human
cugcacaagcugc

SEQ ID NO: 1505653 - RNA, 14 nt, Human
cugcacaagcugca

SEQ ID NO: 1505654 - RNA, 15 nt, Human
cugcacaagcugcac

SEQ ID NO: 1505655 - RNA, 16 nt, Human
cugcacaagcugcacc

SEQ ID NO: 1505656 - RNA, 18 nt, Human
cugcaauuucauaugcug

SEQ ID NO: 1505657 - RNA, 20 nt, Human
cugcaauuucauaugcugua

SEQ ID NO: 1505658 - RNA, 22 nt, Human
cugcagggaguccgaaagggac

SEQ ID NO: 1505659 - RNA, 22 nt, Human
cugcagccucaaccuccugggc

SEQ ID NO: 1505660 - RNA, 19 nt, Human
cugcagccucaaccuccug

SEQ ID NO: 1505661 - RNA, 20 nt, Human
cugcagccucaaccuccugg

SEQ ID NO: 1505662 - RNA, 11 nt, Human
cugcagccuca

SEQ ID NO: 1505663 - RNA, 14 nt, Human
cugcacuugcagac

SEQ ID NO: 1505664 - RNA, 16 nt, Human
cugcacuugcagacuc

SEQ ID NO: 1505665 - RNA, 17 nt, Human
cugcacuugcagacucu

SEQ ID NO: 1505666 - RNA, 17 nt, Human
cugcaccggcuggccug

SEQ ID NO: 1505667 - RNA, 18 nt, Human
cugcaccggcuggccugg

SEQ ID NO: 1505668 - RNA, 19 nt, Human
cugcaccggcuggccuggc

SEQ ID NO: 1505669 - RNA, 20 nt, Human
cugcaccggcuggccuggcc

SEQ ID NO: 1505670 - RNA, 23 nt, Human
cugcagaagacaguauggcagcu

SEQ ID NO: 1505671 - RNA, 13 nt, Human
cugcagaagacag

SEQ ID NO: 1505672 - RNA, 14 nt, Human
cugaauuuaaauag

SEQ ID NO: 1505673 - RNA, 18 nt, Human
cugaauuuaaauagcuuu

SEQ ID NO: 1505674 - RNA, 23 nt, Human
cugaauuuaaauagcuuuuuucu

SEQ ID NO: 1505675 - RNA, 19 nt, Human
cugacagacacaggcccgg

SEQ ID NO: 1505676 - RNA, 11 nt, Human
cugacaggcaa

SEQ ID NO: 1505677 - RNA, 21 nt, Human
cugacagacacaggcccggcu

SEQ ID NO: 1505678 - RNA, 17 nt, Human
cugacauuguuggccaa

SEQ ID NO: 1505679 - RNA, 21 nt, Human
cugacaggcaaugcuggcugu

SEQ ID NO: 1505680 - RNA, 20 nt, Human
cugacaggcaaugcuggcug

SEQ ID NO: 1505681 - RNA, 16 nt, Human
cugacaggcaaugcug

SEQ ID NO: 1505682 - RNA, 17 nt, Human
cugacaggcaaugcugg

SEQ ID NO: 1505683 - RNA, 18 nt, Human
cugacaggcaaugcuggc

SEQ ID NO: 1505684 - RNA, 19 nt, Human
cugacaggcaaugcuggcu

SEQ ID NO: 1505685 - RNA, 21 nt, Human
cugacauuguuggccaaagcc

SEQ ID NO: 1505686 - RNA, 11 nt, Human
cugacccacug

SEQ ID NO: 1505687 - RNA, 21 nt, Human
cugaaccuggguaacuaggga

SEQ ID NO: 1505688 - RNA, 18 nt, Human
cucuuugggccuggcucc

SEQ ID NO: 1505689 - RNA, 19 nt, Human
cucuuuggucuacacugug

SEQ ID NO: 1505690 - RNA, 21 nt, Human
cucuuuggucuacacugugcu

SEQ ID NO: 1505691 - RNA, 21 nt, Human
cugaagacucauucuucugua

SEQ ID NO: 1505692 - RNA, 15 nt, Human
cugaacuuggcgcug

SEQ ID NO: 1505693 - RNA, 16 nt, Human
cugaacuuggcgcugc

SEQ ID NO: 1505694 - RNA, 21 nt, Human
cugaacuuggcgcugccccug

SEQ ID NO: 1505695 - RNA, 14 nt, Human
cugaagucacacag

SEQ ID NO: 1505696 - RNA, 16 nt, Human
cugaagucacacagug

SEQ ID NO: 1505697 - RNA, 15 nt, Human
cugaagucacacagu

SEQ ID NO: 1505698 - RNA, 24 nt, Human
cugaagucuuuguacagacaacaa

SEQ ID NO: 1505699 - RNA, 16 nt, Human
cugaauacagaggcaa

SEQ ID NO: 1505700 - RNA, 23 nt, Human
cucuuccaggcugggagagccuu

SEQ ID NO: 1505701 - RNA, 22 nt, Human
cucuuccaggcugggagagccu

SEQ ID NO: 1505702 - RNA, 21 nt, Human
cucuuccaggcugggagagcc

SEQ ID NO: 1505703 - RNA, 13 nt, Human
cucuucuccaggc

SEQ ID NO: 1505704 - RNA, 12 nt, Human
cucuucuccagg

SEQ ID NO: 1505705 - RNA, 13 nt, Human
cucuuaagaagac

SEQ ID NO: 1505706 - RNA, 13 nt, Human
cucuuaaaaccca

SEQ ID NO: 1505707 - RNA, 24 nt, Human
cucuuaaaacccaagugccuuagc

SEQ ID NO: 1505708 - RNA, 17 nt, Human
cucuggcagcucagaga

SEQ ID NO: 1505709 - RNA, 18 nt, Human
cucuggcagcucagagag

SEQ ID NO: 1505710 - RNA, 20 nt, Human
cucuggcagcucagagaggg

SEQ ID NO: 1505711 - RNA, 19 nt, Human
cucuggcagcucagagagg

SEQ ID NO: 1505712 - RNA, 18 nt, Human
cucuugguccugcugcag

SEQ ID NO: 1505713 - RNA, 19 nt, Human
cucuugguccugcugcagu

SEQ ID NO: 1505714 - RNA, 13 nt, Human
cucuugagccugg

SEQ ID NO: 1505715 - RNA, 16 nt, Human
cucuugaccucaggug

SEQ ID NO: 1505716 - RNA, 13 nt, Human
cucuugaccucag

SEQ ID NO: 1505717 - RNA, 15 nt, Human
cucuugaccucaggu

SEQ ID NO: 1505718 - RNA, 17 nt, Human
cucuuuccaucuacccu

SEQ ID NO: 1505719 - RNA, 13 nt, Human
cucuuucccuccc

SEQ ID NO: 1505720 - RNA, 15 nt, Human
cucuuuggacacuca

SEQ ID NO: 1505721 - RNA, 18 nt, Human
cucuuuggacacucacac

SEQ ID NO: 1505722 - RNA, 17 nt, Human
cucucaucucuuagcuc

SEQ ID NO: 1505723 - RNA, 23 nt, Human
cucucaggccagcugcuugggcu

SEQ ID NO: 1505724 - RNA, 12 nt, Human
cucuccagcccc

SEQ ID NO: 1505725 - RNA, 13 nt, Human
cucuccagccccu

SEQ ID NO: 1505726 - RNA, 13 nt, Human
cucucccaucacu

SEQ ID NO: 1505727 - RNA, 20 nt, Human
cucucccaucacuucccuac

SEQ ID NO: 1505728 - RNA, 14 nt, Human
cucucccaucacuu

SEQ ID NO: 1505729 - RNA, 18 nt, Human
cucucccaucacuucccu

SEQ ID NO: 1505730 - RNA, 15 nt, Human
cucucucacuccuug

SEQ ID NO: 1505731 - RNA, 16 nt, Human
cucucucacuccuuga

SEQ ID NO: 1505732 - RNA, 12 nt, Human
cucucucaggcc

SEQ ID NO: 1505733 - RNA, 13 nt, Human
cucucucaggcca

SEQ ID NO: 1505734 - RNA, 15 nt, Human
cucuccuguaccucu

SEQ ID NO: 1505735 - RNA, 14 nt, Human
cucuccuguaccuc

SEQ ID NO: 1505736 - RNA, 13 nt, Human
cucuccuguaccu

SEQ ID NO: 1505737 - RNA, 13 nt, Human
cucuccccagcaa

SEQ ID NO: 1505738 - RNA, 18 nt, Human
cucuccuguaccucuuga

SEQ ID NO: 1505739 - RNA, 17 nt, Human
cucuccuguaccucuug

SEQ ID NO: 1505740 - RNA, 22 nt, Human
cucuccuguaccucuugagccu

SEQ ID NO: 1505741 - RNA, 14 nt, Human
cucuggacaggcau

SEQ ID NO: 1505742 - RNA, 14 nt, Human
cucugccucugaca

SEQ ID NO: 1505743 - RNA, 16 nt, Human
cucugccucugacaca

SEQ ID NO: 1505744 - RNA, 12 nt, Human
cucugcccuugg

SEQ ID NO: 1505745 - RNA, 14 nt, Human
cucugcccuccaag

SEQ ID NO: 1505746 - RNA, 15 nt, Human
cucugcccuccaaga

SEQ ID NO: 1505747 - RNA, 16 nt, Human
cucugcccuccaagac

SEQ ID NO: 1505748 - RNA, 23 nt, Human
cucugcccuccaagaccuucucc

SEQ ID NO: 1505749 - RNA, 23 nt, Human
cucugcauacucauuaggauggc

SEQ ID NO: 1505750 - RNA, 10 nt, Human
cucugcacaa

SEQ ID NO: 1505751 - RNA, 22 nt, Human
cucugcaagaauugaagcagga

SEQ ID NO: 1505752 - RNA, 20 nt, Human
cucugagacucgcgacaaug

SEQ ID NO: 1505753 - RNA, 14 nt, Human
cucauauuuucaug

SEQ ID NO: 1505754 - RNA, 21 nt, Human
cucauuagcauuuugcuaaau

SEQ ID NO: 1505755 - RNA, 17 nt, Human
cucauuaggauggcuag

SEQ ID NO: 1505756 - RNA, 18 nt, Human
cucauuaggauggcuagu

SEQ ID NO: 1505757 - RNA, 16 nt, Human
cucauugaccugaggc

SEQ ID NO: 1505758 - RNA, 23 nt, Human
cucauucuucuguacgucugaca

SEQ ID NO: 1505759 - RNA, 13 nt, Human
cucauugaccuga

SEQ ID NO: 1505760 - RNA, 15 nt, Human
cucauugaccugagg

SEQ ID NO: 1505761 - RNA, 13 nt, Human
cucauucuucugu

SEQ ID NO: 1505762 - RNA, 14 nt, Human
cucauucuucugua

SEQ ID NO: 1505763 - RNA, 23 nt, Human
cuaaaagguaugcaaucaaaucu

SEQ ID NO: 1505764 - RNA, 12 nt, Human
cucagggucccu

SEQ ID NO: 1505765 - RNA, 14 nt, Human
cucagggucccugg

SEQ ID NO: 1505766 - RNA, 22 nt, Human
cucagguggggucacucuggca

SEQ ID NO: 1505767 - RNA, 23 nt, Human
cucagguggggucacucuggcag

SEQ ID NO: 1505768 - RNA, 15 nt, Human
cucaggugucccugc

SEQ ID NO: 1505769 - RNA, 16 nt, Human
cucaggugucccugca

SEQ ID NO: 1505770 - RNA, 17 nt, Human
cucaggugucccugcac

SEQ ID NO: 1505771 - RNA, 18 nt, Human
cucaggugucccugcacu

SEQ ID NO: 1505772 - RNA, 19 nt, Human
cucaggugucccugcacuu

SEQ ID NO: 1505773 - RNA, 14 nt, Human
cucaggugagaagc

SEQ ID NO: 1505774 - RNA, 15 nt, Human
cucauacccaccccc

SEQ ID NO: 1505775 - RNA, 22 nt, Human
cucauaauuuauacaggucaua

SEQ ID NO: 1505776 - RNA, 13 nt, Human
cucauaauuuaua

SEQ ID NO: 1505777 - RNA, 15 nt, Human
cucauaauuuauaca

SEQ ID NO: 1505778 - RNA, 20 nt, Human
cucauaguaugguggcuggg

SEQ ID NO: 1505779 - RNA, 18 nt, Human
cucauaguaugguggcug

SEQ ID NO: 1505780 - RNA, 19 nt, Human
cucauaguaugguggcugg

SEQ ID NO: 1505781 - RNA, 11 nt, Human
cuccacccugc

SEQ ID NO: 1505782 - RNA, 12 nt, Human
cuccacccugcu

SEQ ID NO: 1505783 - RNA, 17 nt, Human
cuccaccugccagggac

SEQ ID NO: 1505784 - RNA, 18 nt, Human
cuccaccugccagggaca

SEQ ID NO: 1505785 - RNA, 21 nt, Human
cuccaccugccagggacagag

SEQ ID NO: 1505786 - RNA, 19 nt, Human
cuccagcucaccagcccca

SEQ ID NO: 1505787 - RNA, 20 nt, Human
cuccagcucaccagccccag

SEQ ID NO: 1505788 - RNA, 13 nt, Human
cuccagcuguuca

SEQ ID NO: 1505789 - RNA, 18 nt, Human
cuccagcuguucagcugg

SEQ ID NO: 1505790 - RNA, 19 nt, Human
cuccagcuguucagcuggu

SEQ ID NO: 1505791 - RNA, 23 nt, Human
cuccauccugaggcuccacuugg

SEQ ID NO: 1505792 - RNA, 21 nt, Human
cuccauccugaggcuccacuu

SEQ ID NO: 1505793 - RNA, 15 nt, Human
cuccaggcuccuuua

SEQ ID NO: 1505794 - RNA, 11 nt, Human
cuccaggcucc

SEQ ID NO: 1505795 - RNA, 22 nt, Human
cucccaggcauuccccaggagg

SEQ ID NO: 1505796 - RNA, 17 nt, Human
cucccagucauuuaaua

SEQ ID NO: 1505797 - RNA, 17 nt, Human
cucccaggcauucccca

SEQ ID NO: 1505798 - RNA, 19 nt, Human
cucccaggcauuccccagg

SEQ ID NO: 1505799 - RNA, 20 nt, Human
cucccaggcauuccccagga

SEQ ID NO: 1505800 - RNA, 21 nt, Human
cucccaggcauuccccaggag

SEQ ID NO: 1505801 - RNA, 21 nt, Human
cucccaaggggcccaaauucu

SEQ ID NO: 1505802 - RNA, 22 nt, Human
cucccaaggggcccaaauucuu

SEQ ID NO: 1505803 - RNA, 14 nt, Human
cuccugugugugcg

SEQ ID NO: 1505804 - RNA, 14 nt, Human
cuccuucaccuuug

SEQ ID NO: 1505805 - RNA, 16 nt, Human
cuccuucaccuuuguc

SEQ ID NO: 1505806 - RNA, 19 nt, Human
cuccuucaccuuugucccc

SEQ ID NO: 1505807 - RNA, 21 nt, Human
cuccuucaccuuuguccccac

SEQ ID NO: 1505808 - RNA, 16 nt, Human
cuccugcaggcagcca

SEQ ID NO: 1505809 - RNA, 22 nt, Human
cuccugcaggcagccaggccac

SEQ ID NO: 1505810 - RNA, 15 nt, Human
cuccugcaggcagcc

SEQ ID NO: 1505811 - RNA, 21 nt, Human
cuccugcaggcagccaggcca

SEQ ID NO: 1505812 - RNA, 15 nt, Human
cuccugugucuugca

SEQ ID NO: 1505813 - RNA, 23 nt, Human
cuccugugucuugcaauggcagc

SEQ ID NO: 1505814 - RNA, 11 nt, Human
cuccugugugu

SEQ ID NO: 1505815 - RNA, 11 nt, Human
cuccuucuucc

SEQ ID NO: 1505816 - RNA, 21 nt, Human
cuccuugaaaacacuguucuc

SEQ ID NO: 1505817 - RNA, 13 nt, Human
cuccuucagcccu

SEQ ID NO: 1505818 - RNA, 14 nt, Human
cuccuucagcccuc

SEQ ID NO: 1505819 - RNA, 15 nt, Human
cuccuucagcccuca

SEQ ID NO: 1505820 - RNA, 17 nt, Human
cuccuucagcccucacc

SEQ ID NO: 1505821 - RNA, 20 nt, Human
cuccuucagcccucaccccu

SEQ ID NO: 1505822 - RNA, 14 nt, Human
cuccuucuguccua

SEQ ID NO: 1505823 - RNA, 15 nt, Human
cuccuucuguccuac

SEQ ID NO: 1505824 - RNA, 20 nt, Human
cuccuucuguccuacucugu

SEQ ID NO: 1505825 - RNA, 13 nt, Human
cucuaaauucuuu

SEQ ID NO: 1505826 - RNA, 17 nt, Human
cucuaaauucuuucauu

SEQ ID NO: 1505827 - RNA, 12 nt, Human
cucggagaagag

SEQ ID NO: 1505828 - RNA, 13 nt, Human
cucggagaagagc

SEQ ID NO: 1505829 - RNA, 20 nt, Human
cucggagaagagcuguucac

SEQ ID NO: 1505830 - RNA, 15 nt, Human
cucgcgacaaugcaa

SEQ ID NO: 1505831 - RNA, 16 nt, Human
cucgaguuacagacaa

SEQ ID NO: 1505832 - RNA, 20 nt, Human
cucgaguuacagacaaagcg

SEQ ID NO: 1505833 - RNA, 17 nt, Human
cucccuuucuucccuac

SEQ ID NO: 1505834 - RNA, 15 nt, Human
cucccuuucuccccu

SEQ ID NO: 1505835 - RNA, 23 nt, Human
cucccuuucuccccugcccccag

SEQ ID NO: 1505836 - RNA, 12 nt, Human
cucccuuucucc

SEQ ID NO: 1505837 - RNA, 14 nt, Human
cucccuuucucccc

SEQ ID NO: 1505838 - RNA, 13 nt, Human
cucccuuucaaca

SEQ ID NO: 1505839 - RNA, 17 nt, Human
cucccuuggauuguccc

SEQ ID NO: 1505840 - RNA, 20 nt, Human
cucccuuggauuguccccga

SEQ ID NO: 1505841 - RNA, 16 nt, Human
cucccuucucuucaca

SEQ ID NO: 1505842 - RNA, 14 nt, Human
cucccuuccucuuu

SEQ ID NO: 1505843 - RNA, 13 nt, Human
cucccuuccucuu

SEQ ID NO: 1505844 - RNA, 14 nt, Human
cucccaucacccgc

SEQ ID NO: 1505845 - RNA, 14 nt, Human
cucccaucucacac

SEQ ID NO: 1505846 - RNA, 21 nt, Human
cucccaucucacacaugagca

SEQ ID NO: 1505847 - RNA, 15 nt, Human
cucccaucucacaca

SEQ ID NO: 1505848 - RNA, 18 nt, Human
cucccaucucacacauga

SEQ ID NO: 1505849 - RNA, 10 nt, Human
cucccuuccu

SEQ ID NO: 1505850 - RNA, 13 nt, Human
cuccugcaggcag

SEQ ID NO: 1505851 - RNA, 14 nt, Human
cuccugcaggcagc

SEQ ID NO: 1505852 - RNA, 14 nt, Human
cuccucagaucuuc

SEQ ID NO: 1505853 - RNA, 12 nt, Human
cuccucagaucu

SEQ ID NO: 1505854 - RNA, 16 nt, Human
cgucaacucauauuuu

SEQ ID NO: 1505855 - RNA, 20 nt, Human
cgucaacucauauuuucaug

SEQ ID NO: 1505856 - RNA, 23 nt, Human
cggugcuaucucccccagcccca

SEQ ID NO: 1505857 - RNA, 12 nt, Human
cgugacaacacu

SEQ ID NO: 1505858 - RNA, 20 nt, Human
cgugcacacaccagagccca

SEQ ID NO: 1505859 - RNA, 21 nt, Human
cgugcacacaccagagcccac

SEQ ID NO: 1505860 - RNA, 18 nt, Human
cgugcauaccacuuuugu

SEQ ID NO: 1505861 - RNA, 14 nt, Human
cgugcauaccacuu

SEQ ID NO: 1505862 - RNA, 22 nt, Human
cgugcacacaccagagcccacc

SEQ ID NO: 1505863 - RNA, 19 nt, Human
cgugcauaccacuuuuguu

SEQ ID NO: 1505864 - RNA, 23 nt, Human
cgugcauaccacuuuuguucuug

SEQ ID NO: 1505865 - RNA, 15 nt, Human
cgucgguccuggugc

SEQ ID NO: 1505866 - RNA, 14 nt, Human
cgucuaccugaggg

SEQ ID NO: 1505867 - RNA, 13 nt, Human
cgucugacaggca

SEQ ID NO: 1505868 - RNA, 14 nt, Human
cgucugacaggcaa

SEQ ID NO: 1505869 - RNA, 11 nt, Human
cguccccuguc

SEQ ID NO: 1505870 - RNA, 14 nt, Human
cguccccugucccc

SEQ ID NO: 1505871 - RNA, 21 nt, Human
cguuucuaaaggcuaccuuug

SEQ ID NO: 1505872 - RNA, 19 nt, Human
cguuucuaaaggcuaccuu

SEQ ID NO: 1505873 - RNA, 20 nt, Human
cguuucuaugacacaugcaa

SEQ ID NO: 1505874 - RNA, 17 nt, Human
cguggcugcuucaagga

SEQ ID NO: 1505875 - RNA, 12 nt, Human
cguggcugcuuc

SEQ ID NO: 1505876 - RNA, 14 nt, Human
cguggcugcuucaa

SEQ ID NO: 1505877 - RNA, 15 nt, Human
cguggcugcuucaag

SEQ ID NO: 1505878 - RNA, 19 nt, Human
cgaucuggguucacugcaa

SEQ ID NO: 1505879 - RNA, 21 nt, Human
cgauucuucugcuucagccuc

SEQ ID NO: 1505880 - RNA, 13 nt, Human
cgauucuucugcu

SEQ ID NO: 1505881 - RNA, 19 nt, Human
cgauucuucugcuucagcc

SEQ ID NO: 1505882 - RNA, 11 nt, Human
cgcaaugugac

SEQ ID NO: 1505883 - RNA, 12 nt, Human
cgauuucuguuu

SEQ ID NO: 1505884 - RNA, 20 nt, Human
ccuuuguauucucuccugua

SEQ ID NO: 1505885 - RNA, 18 nt, Human
ccuuuguauucucuccug

SEQ ID NO: 1505886 - RNA, 15 nt, Human
ccuuuguauucucuc

SEQ ID NO: 1505887 - RNA, 14 nt, Human
cgaggacagggagg

SEQ ID NO: 1505888 - RNA, 13 nt, Human
cgaggacagggag

SEQ ID NO: 1505889 - RNA, 12 nt, Human
cgaggacaggga

SEQ ID NO: 1505890 - RNA, 18 nt, Human
cgaggccuucucugaagg

SEQ ID NO: 1505891 - RNA, 19 nt, Human
cgaggccuucucugaagga

SEQ ID NO: 1505892 - RNA, 12 nt, Human
ccuuggcugcag

SEQ ID NO: 1505893 - RNA, 13 nt, Human
ccuuggcugcagg

SEQ ID NO: 1505894 - RNA, 14 nt, Human
ccuuggcugcaggg

SEQ ID NO: 1505895 - RNA, 20 nt, Human
ccuuguggucccaccccaca

SEQ ID NO: 1505896 - RNA, 16 nt, Human
ccuuguggucccaccc

SEQ ID NO: 1505897 - RNA, 19 nt, Human
ccuuguggucccaccccac

SEQ ID NO: 1505898 - RNA, 13 nt, Human
ccuuuaagagaaa

SEQ ID NO: 1505899 - RNA, 14 nt, Human
ccuuuaagagaaau

SEQ ID NO: 1505900 - RNA, 15 nt, Human
ccuuuggcagaguuc

SEQ ID NO: 1505901 - RNA, 16 nt, Human
ccuuugcuugaaagaa

SEQ ID NO: 1505902 - RNA, 20 nt, Human
cgcgugcacacaccagagcc

SEQ ID NO: 1505903 - RNA, 16 nt, Human
cgcgugcacacaccag

SEQ ID NO: 1505904 - RNA, 19 nt, Human
cgcgugcacacaccagagc

SEQ ID NO: 1505905 - RNA, 21 nt, Human
cgcuaagagggagggagggcu

SEQ ID NO: 1505906 - RNA, 14 nt, Human
cgcuaagagggagg

SEQ ID NO: 1505907 - RNA, 15 nt, Human
cgcuaagagggaggg

SEQ ID NO: 1505908 - RNA, 16 nt, Human
cgcuaagagggaggga

SEQ ID NO: 1505909 - RNA, 13 nt, Human
cgcagacaggacc

SEQ ID NO: 1505910 - RNA, 14 nt, Human
cgcagacaggacca

SEQ ID NO: 1505911 - RNA, 15 nt, Human
cgcccccacugguga

SEQ ID NO: 1505912 - RNA, 16 nt, Human
cgcgacaaugcaaacc

SEQ ID NO: 1505913 - RNA, 17 nt, Human
cgcgacaaugcaaacca

SEQ ID NO: 1505914 - RNA, 20 nt, Human
cggaaugaaccacaucuugc

SEQ ID NO: 1505915 - RNA, 15 nt, Human
cggacagccacggcc

SEQ ID NO: 1505916 - RNA, 16 nt, Human
cggacagccacggcca

SEQ ID NO: 1505917 - RNA, 18 nt, Human
cggacagccacggccagg

SEQ ID NO: 1505918 - RNA, 13 nt, Human
cgcuccugugucu

SEQ ID NO: 1505919 - RNA, 20 nt, Human
cggacagccacggccaggcc

SEQ ID NO: 1505920 - RNA, 15 nt, Human
cggauuuggggugga

SEQ ID NO: 1505921 - RNA, 21 nt, Human
cgggaggauguucugggacac

SEQ ID NO: 1505922 - RNA, 20 nt, Human
cgggaggauguucugggaca

SEQ ID NO: 1505923 - RNA, 16 nt, Human
cgggaggucgaggcag

SEQ ID NO: 1505924 - RNA, 17 nt, Human
cgggaggucgaggcagg

SEQ ID NO: 1505925 - RNA, 12 nt, Human
cgggcaugacac

SEQ ID NO: 1505926 - RNA, 21 nt, Human
cgggcaggguguggggccaug

SEQ ID NO: 1505927 - RNA, 15 nt, Human
cgggcaugacacgaa

SEQ ID NO: 1505928 - RNA, 15 nt, Human
cggccuuuggcuuca

SEQ ID NO: 1505929 - RNA, 15 nt, Human
cggcuggccuggccc

SEQ ID NO: 1505930 - RNA, 16 nt, Human
cggcuggccuggcccc

SEQ ID NO: 1505931 - RNA, 18 nt, Human
cggcuggccuggccccuc

SEQ ID NO: 1505932 - RNA, 19 nt, Human
cggcuggccuggccccuca

SEQ ID NO: 1505933 - RNA, 16 nt, Human
cggccuccauccugag

SEQ ID NO: 1505934 - RNA, 17 nt, Human
cggccuccauccugagg

SEQ ID NO: 1505935 - RNA, 13 nt, Human
ccuggacccugug

SEQ ID NO: 1505936 - RNA, 14 nt, Human
ccuggacccugugg

SEQ ID NO: 1505937 - RNA, 20 nt, Human
ccuggcacugcuuccaguga

SEQ ID NO: 1505938 - RNA, 13 nt, Human
ccuggagcccaga

SEQ ID NO: 1505939 - RNA, 14 nt, Human
ccuggagcccagag

SEQ ID NO: 1505940 - RNA, 17 nt, Human
ccuggagcccagaggag

SEQ ID NO: 1505941 - RNA, 16 nt, Human
ccuggcagccccuguu

SEQ ID NO: 1505942 - RNA, 21 nt, Human
ccuggcacugcuuccagugag

SEQ ID NO: 1505943 - RNA, 16 nt, Human
ccuggcaugggaauga

SEQ ID NO: 1505944 - RNA, 17 nt, Human
ccuggcaugggaaugaa

SEQ ID NO: 1505945 - RNA, 14 nt, Human
ccuggccccucagg

SEQ ID NO: 1505946 - RNA, 16 nt, Human
ccuggccccucagggu

SEQ ID NO: 1505947 - RNA, 18 nt, Human
ccuggcaugggaaugaau

SEQ ID NO: 1505948 - RNA, 23 nt, Human
ccuggcaugggaaugaaugucag

SEQ ID NO: 1505949 - RNA, 12 nt, Human
ccugggcagaag

SEQ ID NO: 1505950 - RNA, 14 nt, Human
ccugggcagaagga

SEQ ID NO: 1505951 - RNA, 15 nt, Human
ccugggcagaaggaa

SEQ ID NO: 1505952 - RNA, 20 nt, Human
ccugggaggucaaggcugca

SEQ ID NO: 1505953 - RNA, 16 nt, Human
ccugggaucccucauc

SEQ ID NO: 1505954 - RNA, 20 nt, Human
ccugggaucccucauccuca

SEQ ID NO: 1505955 - RNA, 13 nt, Human
ccugcugguucag

SEQ ID NO: 1505956 - RNA, 19 nt, Human
ccugcugguucaggguugg

SEQ ID NO: 1505957 - RNA, 18 nt, Human
ccugcaacaccuuguuuc

SEQ ID NO: 1505958 - RNA, 19 nt, Human
ccugcaacaccuuguuucc

SEQ ID NO: 1505959 - RNA, 16 nt, Human
ccugcaaccugauugu

SEQ ID NO: 1505960 - RNA, 23 nt, Human
ccugcgucucauacucaccucac

SEQ ID NO: 1505961 - RNA, 17 nt, Human
ccugcuaauuccccaga

SEQ ID NO: 1505962 - RNA, 12 nt, Human
ccugcuccagcu

SEQ ID NO: 1505963 - RNA, 13 nt, Human
ccugcuccagcug

SEQ ID NO: 1505964 - RNA, 14 nt, Human
ccugcuccagcugu

SEQ ID NO: 1505965 - RNA, 22 nt, Human
ccugcuccagcuguucagcugg

SEQ ID NO: 1505966 - RNA, 20 nt, Human
ccugugaguacuacaguccu

SEQ ID NO: 1505967 - RNA, 17 nt, Human
ccugucccccugacaac

SEQ ID NO: 1505968 - RNA, 18 nt, Human
ccuguccccgcacugggc

SEQ ID NO: 1505969 - RNA, 19 nt, Human
ccugugccucugggacugg

SEQ ID NO: 1505970 - RNA, 15 nt, Human
ccugugccucuggga

SEQ ID NO: 1505971 - RNA, 17 nt, Human
ccugugccucugggacu

SEQ ID NO: 1505972 - RNA, 22 nt, Human
ccugugauggggcccugccucc

SEQ ID NO: 1505973 - RNA, 20 nt, Human
ccugugauggggcccugccu

SEQ ID NO: 1505974 - RNA, 21 nt, Human
ccugugauggggcccugccuc

SEQ ID NO: 1505975 - RNA, 17 nt, Human
ccugugauggggcccug

SEQ ID NO: 1505976 - RNA, 18 nt, Human
ccugugauggggcccugc

SEQ ID NO: 1505977 - RNA, 19 nt, Human
ccugugauggggcccugcc

SEQ ID NO: 1505978 - RNA, 21 nt, Human
ccuguagagugggagcugagu

SEQ ID NO: 1505979 - RNA, 23 nt, Human
ccuguagagugggagcugagugg

SEQ ID NO: 1505980 - RNA, 12 nt, Human
ccugguggcagc

SEQ ID NO: 1505981 - RNA, 13 nt, Human
ccugguggcagcu

SEQ ID NO: 1505982 - RNA, 14 nt, Human
ccugguggcagcuc

SEQ ID NO: 1505983 - RNA, 16 nt, Human
ccugguggcagcucac

SEQ ID NO: 1505984 - RNA, 17 nt, Human
ccugguggcagcucacc

SEQ ID NO: 1505985 - RNA, 18 nt, Human
ccugguggcagcucaccu

SEQ ID NO: 1505986 - RNA, 20 nt, Human
ccuguaauccuagcacuuug

SEQ ID NO: 1505987 - RNA, 14 nt, Human
ccuugaugaagaag

SEQ ID NO: 1505988 - RNA, 22 nt, Human
ccuugaccauucuccaccugcc

SEQ ID NO: 1505989 - RNA, 21 nt, Human
ccuugaccauucuccaccugc

SEQ ID NO: 1505990 - RNA, 22 nt, Human
ccuugaguugauucagcucugc

SEQ ID NO: 1505991 - RNA, 23 nt, Human
ccuugaguugauucagcucugca

SEQ ID NO: 1505992 - RNA, 14 nt, Human
ccuugacagggcac

SEQ ID NO: 1505993 - RNA, 15 nt, Human
ccuugacagggcaca

SEQ ID NO: 1505994 - RNA, 17 nt, Human
ccuugacagggcacacc

SEQ ID NO: 1505995 - RNA, 19 nt, Human
ccuugaccauucuccaccu

SEQ ID NO: 1505996 - RNA, 20 nt, Human
ccuugaccauucuccaccug

SEQ ID NO: 1505997 - RNA, 15 nt, Human
ccuugaaaacacugu

SEQ ID NO: 1505998 - RNA, 13 nt, Human
ccuucgcuccugu

SEQ ID NO: 1505999 - RNA, 14 nt, Human
ccuucgcuccugug

SEQ ID NO: 1506000 - RNA, 15 nt, Human
ccuucgcuccugugu

SEQ ID NO: 1506001 - RNA, 18 nt, Human
ccuucgcuccugugucuu

SEQ ID NO: 1506002 - RNA, 17 nt, Human
ccuugaacuuugaccuc

SEQ ID NO: 1506003 - RNA, 16 nt, Human
ccuugaacuggguacu

SEQ ID NO: 1506004 - RNA, 19 nt, Human
ccuugaacuuugaccucug

SEQ ID NO: 1506005 - RNA, 20 nt, Human
ccuugaaaacuuuaugcuaa

SEQ ID NO: 1506006 - RNA, 17 nt, Human
ccuugaaugaugccaug

SEQ ID NO: 1506007 - RNA, 19 nt, Human
ccuugaaaacacuguucuc

SEQ ID NO: 1506008 - RNA, 21 nt, Human
ccuugaaaacacuguucucug

SEQ ID NO: 1506009 - RNA, 22 nt, Human
ccuugaaaacacuguucucugc

SEQ ID NO: 1506010 - RNA, 14 nt, Human
ccuugaacugggua

SEQ ID NO: 1506011 - RNA, 13 nt, Human
ccuugacagggca

SEQ ID NO: 1506012 - RNA, 11 nt, Human
ccuuuggcuuc

SEQ ID NO: 1506013 - RNA, 20 nt, Human
ccuucagugccuuauggaac

SEQ ID NO: 1506014 - RNA, 15 nt, Human
ccuucagugccuuau

SEQ ID NO: 1506015 - RNA, 10 nt, Human
ccuucagugc

SEQ ID NO: 1506016 - RNA, 13 nt, Human
ccuucagugccuu

SEQ ID NO: 1506017 - RNA, 14 nt, Human
ccuucagugccuua

SEQ ID NO: 1506018 - RNA, 15 nt, Human
ccuuccagggguggg

SEQ ID NO: 1506019 - RNA, 16 nt, Human
ccuuccagggguggga

SEQ ID NO: 1506020 - RNA, 18 nt, Human
ccuuccaggggugggaca

SEQ ID NO: 1506021 - RNA, 22 nt, Human
ccuuccaggggugggacacccu

SEQ ID NO: 1506022 - RNA, 14 nt, Human
ccuuccucuuucca

SEQ ID NO: 1506023 - RNA, 14 nt, Human
ccuuaccagcagag

SEQ ID NO: 1506024 - RNA, 17 nt, Human
ccuuaccagcagagcac

SEQ ID NO: 1506025 - RNA, 15 nt, Human
ccuuaccagcagagc

SEQ ID NO: 1506026 - RNA, 16 nt, Human
ccuuaccagcagagca

SEQ ID NO: 1506027 - RNA, 20 nt, Human
ccuuaccucggugccuuccu

SEQ ID NO: 1506028 - RNA, 14 nt, Human
ccuuaccugccagg

SEQ ID NO: 1506029 - RNA, 21 nt, Human
ccuuagacagucccugccaau

SEQ ID NO: 1506030 - RNA, 18 nt, Human
ccuuagacagucccugcc

SEQ ID NO: 1506031 - RNA, 19 nt, Human
ccuuagacagucccugcca

SEQ ID NO: 1506032 - RNA, 16 nt, Human
ccuuagacagucccug

SEQ ID NO: 1506033 - RNA, 17 nt, Human
ccuuagacagucccugc

SEQ ID NO: 1506034 - RNA, 19 nt, Human
ccuucagugccuuauggaa

SEQ ID NO: 1506035 - RNA, 22 nt, Human
ccucugcacuccccugcugggu

SEQ ID NO: 1506036 - RNA, 14 nt, Human
ccucugcacucccc

SEQ ID NO: 1506037 - RNA, 15 nt, Human
ccucugcacuccccu

SEQ ID NO: 1506038 - RNA, 20 nt, Human
ccucugcacuccccugcugg

SEQ ID NO: 1506039 - RNA, 21 nt, Human
ccucugcacuccccugcuggg

SEQ ID NO: 1506040 - RNA, 20 nt, Human
ccucugcacaagcugcaccc

SEQ ID NO: 1506041 - RNA, 17 nt, Human
ccucugcacaagcugca

SEQ ID NO: 1506042 - RNA, 19 nt, Human
ccucugcacaagcugcacc

SEQ ID NO: 1506043 - RNA, 17 nt, Human
ccucugacacacagcuc

SEQ ID NO: 1506044 - RNA, 18 nt, Human
ccucugacacacagcucu

SEQ ID NO: 1506045 - RNA, 15 nt, Human
ccucugcacaagcug

SEQ ID NO: 1506046 - RNA, 12 nt, Human
ccucugggacug

SEQ ID NO: 1506047 - RNA, 23 nt, Human
ccuccugugugugcgccuacagg

SEQ ID NO: 1506048 - RNA, 12 nt, Human
ccucucccauca

SEQ ID NO: 1506049 - RNA, 23 nt, Human
ccucugaaaaccaauguucucuc

SEQ ID NO: 1506050 - RNA, 16 nt, Human
ccucugacacacagcu

SEQ ID NO: 1506051 - RNA, 13 nt, Human
ccuccugggcuaa

SEQ ID NO: 1506052 - RNA, 13 nt, Human
ccuccugugugug

SEQ ID NO: 1506053 - RNA, 15 nt, Human
ccuccugugugugcg

SEQ ID NO: 1506054 - RNA, 22 nt, Human
ccuccugugugugcgccuacag

SEQ ID NO: 1506055 - RNA, 13 nt, Human
ccuccugccucga

SEQ ID NO: 1506056 - RNA, 13 nt, Human
ccucccucccucu

SEQ ID NO: 1506057 - RNA, 15 nt, Human
ccucccucccucuuu

SEQ ID NO: 1506058 - RNA, 16 nt, Human
ccucccucccucuuuc

SEQ ID NO: 1506059 - RNA, 20 nt, Human
ccucagaaaacaaggaugaa

SEQ ID NO: 1506060 - RNA, 16 nt, Human
ccucagcauccuggca

SEQ ID NO: 1506061 - RNA, 17 nt, Human
ccucagcauccuggcac

SEQ ID NO: 1506062 - RNA, 11 nt, Human
ccucaggccug

SEQ ID NO: 1506063 - RNA, 14 nt, Human
ccucaggccugggg

SEQ ID NO: 1506064 - RNA, 21 nt, Human
ccucaggccugggggcugggc

SEQ ID NO: 1506065 - RNA, 23 nt, Human
ccucaggccugggggcugggcag

SEQ ID NO: 1506066 - RNA, 14 nt, Human
ccucagggucccug

SEQ ID NO: 1506067 - RNA, 17 nt, Human
ccucaggugagaagcag

SEQ ID NO: 1506068 - RNA, 22 nt, Human
ccucaggugauccacccaccuc

SEQ ID NO: 1506069 - RNA, 17 nt, Human
ccucaggugauccaccc

SEQ ID NO: 1506070 - RNA, 19 nt, Human
ccucaggugauccacccac

SEQ ID NO: 1506071 - RNA, 16 nt, Human
ccucaggugagaagca

SEQ ID NO: 1506072 - RNA, 15 nt, Human
ccucagggucccugg

SEQ ID NO: 1506073 - RNA, 19 nt, Human
ccucagucuggcccuuccu

SEQ ID NO: 1506074 - RNA, 15 nt, Human
ccucagucuggcccu

SEQ ID NO: 1506075 - RNA, 20 nt, Human
ccugaacaggauauucucac

SEQ ID NO: 1506076 - RNA, 16 nt, Human
ccugaagaacuauuuu

SEQ ID NO: 1506077 - RNA, 21 nt, Human
ccugaagacucauucuucugu

SEQ ID NO: 1506078 - RNA, 14 nt, Human
ccugaaggccccgc

SEQ ID NO: 1506079 - RNA, 19 nt, Human
ccugaagucacacagugag

SEQ ID NO: 1506080 - RNA, 13 nt, Human
ccugaaggccccg

SEQ ID NO: 1506081 - RNA, 15 nt, Human
ccugaagucacacag

SEQ ID NO: 1506082 - RNA, 16 nt, Human
ccugaagucacacagu

SEQ ID NO: 1506083 - RNA, 17 nt, Human
ccugaagucacacagug

SEQ ID NO: 1506084 - RNA, 18 nt, Human
ccugaaagaggaaugaag

SEQ ID NO: 1506085 - RNA, 23 nt, Human
ccugaaagaggaaugaaguacuc

SEQ ID NO: 1506086 - RNA, 17 nt, Human
ccucuuaugggcugggu

SEQ ID NO: 1506087 - RNA, 22 nt, Human
ccucuuuggucuacacugugcu

SEQ ID NO: 1506088 - RNA, 23 nt, Human
ccucuuagaugcaguucugaaga

SEQ ID NO: 1506089 - RNA, 14 nt, Human
ccucuuaugggcug

SEQ ID NO: 1506090 - RNA, 15 nt, Human
ccucuuaugggcugg

SEQ ID NO: 1506091 - RNA, 16 nt, Human
ccucuuaugggcuggg

SEQ ID NO: 1506092 - RNA, 14 nt, Human
ccucuuagaaaaac

SEQ ID NO: 1506093 - RNA, 21 nt, Human
ccucuguccccuucucucauc

SEQ ID NO: 1506094 - RNA, 22 nt, Human
ccucuguccccuucucucaucu

SEQ ID NO: 1506095 - RNA, 14 nt, Human
ccucuguccccuuc

SEQ ID NO: 1506096 - RNA, 17 nt, Human
ccucuguccccuucucu

SEQ ID NO: 1506097 - RNA, 18 nt, Human
ccucuguccccuucucuc

SEQ ID NO: 1506098 - RNA, 19 nt, Human
ccucuguccccuucucuca

SEQ ID NO: 1506099 - RNA, 14 nt, Human
ccucuguacagagc

SEQ ID NO: 1506100 - RNA, 15 nt, Human
ccucuguacagagcc

SEQ ID NO: 1506101 - RNA, 16 nt, Human
ccucuguacagagccc

SEQ ID NO: 1506102 - RNA, 17 nt, Human
ccucuguacagagccca

SEQ ID NO: 1506103 - RNA, 18 nt, Human
ccucuguacagagcccac

SEQ ID NO: 1506104 - RNA, 23 nt, Human
ccucuguacagagcccacgcccc

SEQ ID NO: 1506105 - RNA, 12 nt, Human
ccugaggcccag

SEQ ID NO: 1506106 - RNA, 13 nt, Human
ccugaggcccaga

SEQ ID NO: 1506107 - RNA, 14 nt, Human
ccugaggcccagag

SEQ ID NO: 1506108 - RNA, 12 nt, Human
ccugacaacacu

SEQ ID NO: 1506109 - RNA, 14 nt, Human
ccugacaacacuca

SEQ ID NO: 1506110 - RNA, 15 nt, Human
ccugacaacacucau

SEQ ID NO: 1506111 - RNA, 16 nt, Human
ccugacaacacucauu

SEQ ID NO: 1506112 - RNA, 23 nt, Human
ccugaggcccuucucuccagccc

SEQ ID NO: 1506113 - RNA, 21 nt, Human
ccugaggcccuucucuccagc

SEQ ID NO: 1506114 - RNA, 22 nt, Human
ccugaggcccuucucuccagcc

SEQ ID NO: 1506115 - RNA, 16 nt, Human
ccugaggcccuucucu

SEQ ID NO: 1506116 - RNA, 17 nt, Human
ccugaggcccuucucuc

SEQ ID NO: 1506117 - RNA, 19 nt, Human
ccugaggcccuucucucca

SEQ ID NO: 1506118 - RNA, 20 nt, Human
ccugaggcccuucucuccag

SEQ ID NO: 1506119 - RNA, 18 nt, Human
ccugaggcuccacuuggu

SEQ ID NO: 1506120 - RNA, 20 nt, Human
ccugaggcuccacuuggucu

SEQ ID NO: 1506121 - RNA, 14 nt, Human
ccugaugcuucuuc

SEQ ID NO: 1506122 - RNA, 19 nt, Human
ccugaugcuucuucagaga

SEQ ID NO: 1506123 - RNA, 17 nt, Human
ccugaugcuucuucaga

SEQ ID NO: 1506124 - RNA, 18 nt, Human
ccugaugcuucuucagag

SEQ ID NO: 1506125 - RNA, 23 nt, Human
ccugauugugucucuugguccug

SEQ ID NO: 1506126 - RNA, 23 nt, Human
ccugacaacacucauugaccuga

SEQ ID NO: 1506127 - RNA, 20 nt, Human
cccuuguggucccaccccac

SEQ ID NO: 1506128 - RNA, 18 nt, Human
cccuuguggucccacccc

SEQ ID NO: 1506129 - RNA, 18 nt, Human
cccuuggggagcaggcuc

SEQ ID NO: 1506130 - RNA, 14 nt, Human
cccuugugguccca

SEQ ID NO: 1506131 - RNA, 16 nt, Human
cccuuguggucccacc

SEQ ID NO: 1506132 - RNA, 14 nt, Human
cccuuucuccccug

SEQ ID NO: 1506133 - RNA, 22 nt, Human
cccuuucuccccugcccccagg

SEQ ID NO: 1506134 - RNA, 20 nt, Human
cccuuugacgccaucccagc

SEQ ID NO: 1506135 - RNA, 16 nt, Human
cccuugaugaagaagu

SEQ ID NO: 1506136 - RNA, 19 nt, Human
cccuuaccucggugccuuc

SEQ ID NO: 1506137 - RNA, 22 nt, Human
cccuugccgucuaccugagggg

SEQ ID NO: 1506138 - RNA, 17 nt, Human
cccuugccgucuaccug

SEQ ID NO: 1506139 - RNA, 18 nt, Human
cccuugccgucuaccuga

SEQ ID NO: 1506140 - RNA, 19 nt, Human
cccuuuuuuggcugcugaa

SEQ ID NO: 1506141 - RNA, 17 nt, Human
ccgagaaggaagccucc

SEQ ID NO: 1506142 - RNA, 19 nt, Human
ccgagauagccaaggccaa

SEQ ID NO: 1506143 - RNA, 22 nt, Human
ccgagauagccaaggccaaagg

SEQ ID NO: 1506144 - RNA, 17 nt, Human
cccuuuuuuggcugcug

SEQ ID NO: 1506145 - RNA, 18 nt, Human
cccuuuuuuggcugcuga

SEQ ID NO: 1506146 - RNA, 11 nt, Human
cccuuuuccuu

SEQ ID NO: 1506147 - RNA, 13 nt, Human
cccuuuucuguuu

SEQ ID NO: 1506148 - RNA, 18 nt, Human
ccgagaucacgccacugc

SEQ ID NO: 1506149 - RNA, 13 nt, Human
ccgagggcugagc

SEQ ID NO: 1506150 - RNA, 16 nt, Human
ccgagggcugagccug

SEQ ID NO: 1506151 - RNA, 22 nt, Human
ccgagggcugagccugguccca

SEQ ID NO: 1506152 - RNA, 17 nt, Human
ccccucagggucccugg

SEQ ID NO: 1506153 - RNA, 18 nt, Human
ccccucagggucccuggu

SEQ ID NO: 1506154 - RNA, 20 nt, Human
ccccucagggucccuggugg

SEQ ID NO: 1506155 - RNA, 21 nt, Human
cccugguggcagugggagcug

SEQ ID NO: 1506156 - RNA, 16 nt, Human
cccugguggcaguggg

SEQ ID NO: 1506157 - RNA, 19 nt, Human
cccugguggcagugggagc

SEQ ID NO: 1506158 - RNA, 21 nt, Human
cccuguagagugggagcugag

SEQ ID NO: 1506159 - RNA, 16 nt, Human
cccugugggcccccaa

SEQ ID NO: 1506160 - RNA, 18 nt, Human
cccugugggcccccaaau

SEQ ID NO: 1506161 - RNA, 15 nt, Human
cccuguuuguuucug

SEQ ID NO: 1506162 - RNA, 16 nt, Human
cccuguuuguuucuga

SEQ ID NO: 1506163 - RNA, 17 nt, Human
cccccaggacugggcca

SEQ ID NO: 1506164 - RNA, 12 nt, Human
ccccccagcacu

SEQ ID NO: 1506165 - RNA, 13 nt, Human
ccccccagcacug

SEQ ID NO: 1506166 - RNA, 14 nt, Human
ccccccagcacuga

SEQ ID NO: 1506167 - RNA, 11 nt, Human
cccccaggacu

SEQ ID NO: 1506168 - RNA, 12 nt, Human
cccccaggacug

SEQ ID NO: 1506169 - RNA, 13 nt, Human
cccccaggacugg

SEQ ID NO: 1506170 - RNA, 15 nt, Human
cccccaggacugggc

SEQ ID NO: 1506171 - RNA, 12 nt, Human
cccccagcccca

SEQ ID NO: 1506172 - RNA, 13 nt, Human
cccccagcacuga

SEQ ID NO: 1506173 - RNA, 15 nt, Human
cccccagcacugagg

SEQ ID NO: 1506174 - RNA, 17 nt, Human
cccccagcacugaggaa

SEQ ID NO: 1506175 - RNA, 18 nt, Human
cccccagcacugaggaag

SEQ ID NO: 1506176 - RNA, 21 nt, Human
cccccgcugucagccauuccu

SEQ ID NO: 1506177 - RNA, 13 nt, Human
ccccaggaggcca

SEQ ID NO: 1506178 - RNA, 18 nt, Human
ccccaggagggaggcagg

SEQ ID NO: 1506179 - RNA, 19 nt, Human
ccccaggagggaggcaggg

SEQ ID NO: 1506180 - RNA, 14 nt, Human
ccccaggaggccag

SEQ ID NO: 1506181 - RNA, 15 nt, Human
ccccaggaggccagc

SEQ ID NO: 1506182 - RNA, 21 nt, Human
ccccaggaggccagccuugac

SEQ ID NO: 1506183 - RNA, 22 nt, Human
ccccaggaggccagccuugacc

SEQ ID NO: 1506184 - RNA, 12 nt, Human
ccccacugguga

SEQ ID NO: 1506185 - RNA, 13 nt, Human
ccccacuggugac

SEQ ID NO: 1506186 - RNA, 14 nt, Human
ccccacuggugaca

SEQ ID NO: 1506187 - RNA, 14 nt, Human
ccuaaaguguauuu

SEQ ID NO: 1506188 - RNA, 20 nt, Human
ccgggcacucagaagacacu

SEQ ID NO: 1506189 - RNA, 12 nt, Human
ccggcuggccug

SEQ ID NO: 1506190 - RNA, 13 nt, Human
ccggcuggccugg

SEQ ID NO: 1506191 - RNA, 15 nt, Human
ccggcuggccuggcc

SEQ ID NO: 1506192 - RNA, 15 nt, Human
ccgggcacucagaag

SEQ ID NO: 1506193 - RNA, 17 nt, Human
ccucacaguccuuacca

SEQ ID NO: 1506194 - RNA, 15 nt, Human
ccucaccccacugug

SEQ ID NO: 1506195 - RNA, 15 nt, Human
ccucaccccugguuc

SEQ ID NO: 1506196 - RNA, 12 nt, Human
ccucaccccacu

SEQ ID NO: 1506197 - RNA, 20 nt, Human
ccucacaguccuuaccagca

SEQ ID NO: 1506198 - RNA, 22 nt, Human
ccucacaguccuuaccagcaga

SEQ ID NO: 1506199 - RNA, 17 nt, Human
ccucaccuuucccaucu

SEQ ID NO: 1506200 - RNA, 20 nt, Human
ccucaccccugguucucauc

SEQ ID NO: 1506201 - RNA, 21 nt, Human
ccucaccccugguucucaucu

SEQ ID NO: 1506202 - RNA, 22 nt, Human
ccucaccccugguucucaucuu

SEQ ID NO: 1506203 - RNA, 23 nt, Human
ccucaccccugguucucaucuuu

SEQ ID NO: 1506204 - RNA, 21 nt, Human
cccaauucuuacaaacaugug

SEQ ID NO: 1506205 - RNA, 18 nt, Human
cccaagggccuggccuga

SEQ ID NO: 1506206 - RNA, 19 nt, Human
cccaagggccuggccugag

SEQ ID NO: 1506207 - RNA, 23 nt, Human
cccaagggccuggccugagcugg

SEQ ID NO: 1506208 - RNA, 20 nt, Human
cccagagggccugcaaggga

SEQ ID NO: 1506209 - RNA, 20 nt, Human
cccagauugcaacaggcugg

SEQ ID NO: 1506210 - RNA, 21 nt, Human
cccagauugcaacaggcuggg

SEQ ID NO: 1506211 - RNA, 22 nt, Human
cccagauugcaacaggcugggc

SEQ ID NO: 1506212 - RNA, 18 nt, Human
cccagcaagugagagcug

SEQ ID NO: 1506213 - RNA, 19 nt, Human
cccagcgagcccugguggc

SEQ ID NO: 1506214 - RNA, 23 nt, Human
cccagcgagcccugguggcagug

SEQ ID NO: 1506215 - RNA, 17 nt, Human
cccagcgagcccuggug

SEQ ID NO: 1506216 - RNA, 18 nt, Human
cccagcgagcccuggugg

SEQ ID NO: 1506217 - RNA, 9 nt, Human
cccagcucc

SEQ ID NO: 1506218 - RNA, 18 nt, Human
cccagccccuucugaccc

SEQ ID NO: 1506219 - RNA, 12 nt, Human
cccagccugcua

SEQ ID NO: 1506220 - RNA, 19 nt, Human
cccagcaagugagagcugg

SEQ ID NO: 1506221 - RNA, 20 nt, Human
cccagcaagugagagcuggg

SEQ ID NO: 1506222 - RNA, 21 nt, Human
cccagcaagugagagcugggu

SEQ ID NO: 1506223 - RNA, 22 nt, Human
cccagcaagugagagcugggug

SEQ ID NO: 1506224 - RNA, 23 nt, Human
cccagcaagugagagcugggugu

SEQ ID NO: 1506225 - RNA, 23 nt, Human
cccagauugcaacaggcugggcu

SEQ ID NO: 1506226 - RNA, 11 nt, Human
cccagccccuu

SEQ ID NO: 1506227 - RNA, 13 nt, Human
cccagugcccaca

SEQ ID NO: 1506228 - RNA, 20 nt, Human
cccagucuggaaugcagugg

SEQ ID NO: 1506229 - RNA, 23 nt, Human
cccaggugcuaggaacacuccuu

SEQ ID NO: 1506230 - RNA, 16 nt, Human
cccaggugauauuuuu

SEQ ID NO: 1506231 - RNA, 22 nt, Human
cccaggugcuaggaacacuccu

SEQ ID NO: 1506232 - RNA, 13 nt, Human
cccaggugccagu

SEQ ID NO: 1506233 - RNA, 17 nt, Human
cccaggccuccuacagc

SEQ ID NO: 1506234 - RNA, 18 nt, Human
cccaggccuccuacagcu

SEQ ID NO: 1506235 - RNA, 12 nt, Human
cccaggggccgg

SEQ ID NO: 1506236 - RNA, 22 nt, Human
cccaggcauuccccaggaggcc

SEQ ID NO: 1506237 - RNA, 23 nt, Human
cccaggcauuccccaggaggcca

SEQ ID NO: 1506238 - RNA, 17 nt, Human
cccaggcaggucuugaa

SEQ ID NO: 1506239 - RNA, 20 nt, Human
cccaggcauuccccaggagg

SEQ ID NO: 1506240 - RNA, 21 nt, Human
cccaggcauuccccaggaggc

SEQ ID NO: 1506241 - RNA, 11 nt, Human
cccaggccccu

SEQ ID NO: 1506242 - RNA, 16 nt, Human
cccaggccccugccac

SEQ ID NO: 1506243 - RNA, 18 nt, Human
cccaggccccugccaccc

SEQ ID NO: 1506244 - RNA, 21 nt, Human
cccaggccccugccacccugg

SEQ ID NO: 1506245 - RNA, 22 nt, Human
cccaggccccugccacccuggg

SEQ ID NO: 1506246 - RNA, 11 nt, Human
cccaggcaggu

SEQ ID NO: 1506247 - RNA, 13 nt, Human
cccaggcaggucu

SEQ ID NO: 1506248 - RNA, 21 nt, Human
cccaggagccccgaggccuuc

SEQ ID NO: 1506249 - RNA, 13 nt, Human
cccaggaggccag

SEQ ID NO: 1506250 - RNA, 22 nt, Human
cccaggaggccagccuugacca

SEQ ID NO: 1506251 - RNA, 17 nt, Human
cccaugcugcccuguga

SEQ ID NO: 1506252 - RNA, 18 nt, Human
cccaugcugcccugugag

SEQ ID NO: 1506253 - RNA, 15 nt, Human
cccaugcugcccugu

SEQ ID NO: 1506254 - RNA, 16 nt, Human
cccaugcugcccugug

SEQ ID NO: 1506255 - RNA, 15 nt, Human
cccagugcccacagg

SEQ ID NO: 1506256 - RNA, 20 nt, Human
cccagugcccacaggaucag

SEQ ID NO: 1506257 - RNA, 18 nt, Human
cccagugccgagaaggaa

SEQ ID NO: 1506258 - RNA, 13 nt, Human
cccauucugccug

SEQ ID NO: 1506259 - RNA, 22 nt, Human
ccccaaauggaaaugggcagag

SEQ ID NO: 1506260 - RNA, 14 nt, Human
ccccacccaagggc

SEQ ID NO: 1506261 - RNA, 20 nt, Human
ccccacccaagggccuggcc

SEQ ID NO: 1506262 - RNA, 21 nt, Human
ccccacccaagggccuggccu

SEQ ID NO: 1506263 - RNA, 17 nt, Human
ccccaggaggccagccu

SEQ ID NO: 1506264 - RNA, 22 nt, Human
ccccucagggucccugguggca

SEQ ID NO: 1506265 - RNA, 22 nt, Human
ccaucauugaaaucuuuuugcu

SEQ ID NO: 1506266 - RNA, 18 nt, Human
ccauccagguucagcuug

SEQ ID NO: 1506267 - RNA, 12 nt, Human
ccauccucugua

SEQ ID NO: 1506268 - RNA, 19 nt, Human
ccauccucuguacagagcc

SEQ ID NO: 1506269 - RNA, 13 nt, Human
ccaucaccagaca

SEQ ID NO: 1506270 - RNA, 13 nt, Human
ccauaugccuggg

SEQ ID NO: 1506271 - RNA, 18 nt, Human
ccaucaaggguacacugc

SEQ ID NO: 1506272 - RNA, 20 nt, Human
ccagugaggcucugcccuug

SEQ ID NO: 1506273 - RNA, 18 nt, Human
ccagugaggcucugcccu

SEQ ID NO: 1506274 - RNA, 19 nt, Human
ccagugaggcucugcccuu

SEQ ID NO: 1506275 - RNA, 15 nt, Human
ccaugccuccucagg

SEQ ID NO: 1506276 - RNA, 15 nt, Human
ccaugcugcccugug

SEQ ID NO: 1506277 - RNA, 14 nt, Human
ccaugcugcccugu

SEQ ID NO: 1506278 - RNA, 13 nt, Human
ccaugcuccuggc

SEQ ID NO: 1506279 - RNA, 11 nt, Human
ccaugcugccc

SEQ ID NO: 1506280 - RNA, 13 nt, Human
ccaugcugcccug

SEQ ID NO: 1506281 - RNA, 16 nt, Human
ccaugauguuuagaaa

SEQ ID NO: 1506282 - RNA, 18 nt, Human
ccaugauguuuuccauga

SEQ ID NO: 1506283 - RNA, 19 nt, Human
ccaugauuaaccacuucag

SEQ ID NO: 1506284 - RNA, 21 nt, Human
ccaugauuaaccacuucagcu

SEQ ID NO: 1506285 - RNA, 14 nt, Human
ccaugaagauguag

SEQ ID NO: 1506286 - RNA, 20 nt, Human
ccauccucuguacagagccc

SEQ ID NO: 1506287 - RNA, 22 nt, Human
ccauuuugggguacccacugcu

SEQ ID NO: 1506288 - RNA, 20 nt, Human
ccauuuugggguacccacug

SEQ ID NO: 1506289 - RNA, 18 nt, Human
cccaaaaggcagaagcaa

SEQ ID NO: 1506290 - RNA, 13 nt, Human
cccaaaaggcaga

SEQ ID NO: 1506291 - RNA, 16 nt, Human
cccaaagcagugcaug

SEQ ID NO: 1506292 - RNA, 12 nt, Human
cccaaagaugca

SEQ ID NO: 1506293 - RNA, 15 nt, Human
cccaaagaugcagcc

SEQ ID NO: 1506294 - RNA, 12 nt, Human
cccaaagaagga

SEQ ID NO: 1506295 - RNA, 13 nt, Human
ccauggacuuugu

SEQ ID NO: 1506296 - RNA, 14 nt, Human
ccauggacuuuguu

SEQ ID NO: 1506297 - RNA, 15 nt, Human
ccauucuccaccugc

SEQ ID NO: 1506298 - RNA, 16 nt, Human
ccauucuccaccugcc

SEQ ID NO: 1506299 - RNA, 21 nt, Human
ccauucugccugcccaggccc

SEQ ID NO: 1506300 - RNA, 19 nt, Human
ccauucugccugcccaggc

SEQ ID NO: 1506301 - RNA, 20 nt, Human
ccauucugccugcccaggcc

SEQ ID NO: 1506302 - RNA, 17 nt, Human
ccauucuccaccugcca

SEQ ID NO: 1506303 - RNA, 18 nt, Human
ccauucuccaccugccag

SEQ ID NO: 1506304 - RNA, 17 nt, Human
ccauucugccugcccag

SEQ ID NO: 1506305 - RNA, 18 nt, Human
ccauucugccugcccagg

SEQ ID NO: 1506306 - RNA, 21 nt, Human
cccacaaaggagagcuagcag

SEQ ID NO: 1506307 - RNA, 22 nt, Human
ccaggaagccagcaggcucuca

SEQ ID NO: 1506308 - RNA, 14 nt, Human
ccagcucuggucca

SEQ ID NO: 1506309 - RNA, 17 nt, Human
ccagcucugguccauag

SEQ ID NO: 1506310 - RNA, 21 nt, Human
ccagcucugguccauagagag

SEQ ID NO: 1506311 - RNA, 22 nt, Human
ccagcucugguccauagagagc

SEQ ID NO: 1506312 - RNA, 23 nt, Human
ccagcugcuugggcuucauccuc

SEQ ID NO: 1506313 - RNA, 13 nt, Human
ccagcugcuuggg

SEQ ID NO: 1506314 - RNA, 22 nt, Human
ccagagcccaccuuggcucaag

SEQ ID NO: 1506315 - RNA, 16 nt, Human
ccagagcccaccuugg

SEQ ID NO: 1506316 - RNA, 19 nt, Human
ccagccuugaccauucucc

SEQ ID NO: 1506317 - RNA, 20 nt, Human
ccagccuugaccauucucca

SEQ ID NO: 1506318 - RNA, 21 nt, Human
ccagcgagcccugguggcagu

SEQ ID NO: 1506319 - RNA, 11 nt, Human
ccagcucuggu

SEQ ID NO: 1506320 - RNA, 12 nt, Human
ccagcucugguc

SEQ ID NO: 1506321 - RNA, 13 nt, Human
ccagcucuggucc

SEQ ID NO: 1506322 - RNA, 22 nt, Human
ccagccuugaccauucuccacc

SEQ ID NO: 1506323 - RNA, 14 nt, Human
ccagcgagcccugg

SEQ ID NO: 1506324 - RNA, 15 nt, Human
ccagcgagcccuggu

SEQ ID NO: 1506325 - RNA, 16 nt, Human
ccagcgagcccuggug

SEQ ID NO: 1506326 - RNA, 13 nt, Human
ccaguaucuugaa

SEQ ID NO: 1506327 - RNA, 16 nt, Human
ccagugaauucuugaa

SEQ ID NO: 1506328 - RNA, 20 nt, Human
ccagugaauucuugaaggaa

SEQ ID NO: 1506329 - RNA, 15 nt, Human
ccagguucagcuugu

SEQ ID NO: 1506330 - RNA, 21 nt, Human
ccaggugcuaggaacacuccu

SEQ ID NO: 1506331 - RNA, 14 nt, Human
ccagguucagcuug

SEQ ID NO: 1506332 - RNA, 18 nt, Human
ccaggugcacaagcucca

SEQ ID NO: 1506333 - RNA, 17 nt, Human
ccaggugccaguuaugg

SEQ ID NO: 1506334 - RNA, 19 nt, Human
ccaggugcuaggaacacuc

SEQ ID NO: 1506335 - RNA, 20 nt, Human
ccaggcuguaucccaugagc

SEQ ID NO: 1506336 - RNA, 19 nt, Human
ccaggcuggucucaaacuc

SEQ ID NO: 1506337 - RNA, 13 nt, Human
ccaggccccugcc

SEQ ID NO: 1506338 - RNA, 13 nt, Human
ccaggcauggugg

SEQ ID NO: 1506339 - RNA, 17 nt, Human
ccaggcauuccccagga

SEQ ID NO: 1506340 - RNA, 14 nt, Human
ccaggcauucccca

SEQ ID NO: 1506341 - RNA, 21 nt, Human
ccaggccacaagacccuugug

SEQ ID NO: 1506342 - RNA, 24 nt, Human
ccaggcauuccccaggaggccagc

SEQ ID NO: 1506343 - RNA, 23 nt, Human
ccaggcauuccccaggaggccag

SEQ ID NO: 1506344 - RNA, 14 nt, Human
ccaggaggccagcc

SEQ ID NO: 1506345 - RNA, 13 nt, Human
ccaggaggccagc

SEQ ID NO: 1506346 - RNA, 12 nt, Human
ccaggaggccag

SEQ ID NO: 1506347 - RNA, 13 nt, Human
ccaggagccuccu

SEQ ID NO: 1506348 - RNA, 14 nt, Human
ccaggagccuccug

SEQ ID NO: 1506349 - RNA, 18 nt, Human
ccaggagccuccugcccu

SEQ ID NO: 1506350 - RNA, 16 nt, Human
ccaggagccccgaggc

SEQ ID NO: 1506351 - RNA, 19 nt, Human
ccaggagccuccugcccuu

SEQ ID NO: 1506352 - RNA, 15 nt, Human
ccaggagccccgagg

SEQ ID NO: 1506353 - RNA, 16 nt, Human
ccaggagcagccacau

SEQ ID NO: 1506354 - RNA, 20 nt, Human
ccacaggaaccacaagacug

SEQ ID NO: 1506355 - RNA, 16 nt, Human
ccacaggaucagucug

SEQ ID NO: 1506356 - RNA, 20 nt, Human
ccacacccagcccacuucug

SEQ ID NO: 1506357 - RNA, 21 nt, Human
ccacacccagcccacuucugc

SEQ ID NO: 1506358 - RNA, 22 nt, Human
ccacacccagcccacuucugcc

SEQ ID NO: 1506359 - RNA, 22 nt, Human
ccacaggccugagauuucaucu

SEQ ID NO: 1506360 - RNA, 14 nt, Human
ccacaggccugaga

SEQ ID NO: 1506361 - RNA, 19 nt, Human
ccacaggccugagauuuca

SEQ ID NO: 1506362 - RNA, 11 nt, Human
ccacaggccug

SEQ ID NO: 1506363 - RNA, 12 nt, Human
ccacaggccuga

SEQ ID NO: 1506364 - RNA, 15 nt, Human
ccacaggcuuaggga

SEQ ID NO: 1506365 - RNA, 18 nt, Human
ccacaggcuuagggacag

SEQ ID NO: 1506366 - RNA, 19 nt, Human
ccacaggcuuagggacagg

SEQ ID NO: 1506367 - RNA, 21 nt, Human
ccacaggcuuagggacaggac

SEQ ID NO: 1506368 - RNA, 20 nt, Human
ccacaucuugcucugcugac

SEQ ID NO: 1506369 - RNA, 19 nt, Human
ccacaucuugcucugcuga

SEQ ID NO: 1506370 - RNA, 18 nt, Human
ccacaucuugcucugcug

SEQ ID NO: 1506371 - RNA, 16 nt, Human
ccacaugugcacaugc

SEQ ID NO: 1506372 - RNA, 16 nt, Human
ccacauuccugaugcu

SEQ ID NO: 1506373 - RNA, 21 nt, Human
ccaccaacauacucccaucug

SEQ ID NO: 1506374 - RNA, 16 nt, Human
ccaauauucauagcag

SEQ ID NO: 1506375 - RNA, 23 nt, Human
ccacccaggagccccgaggccuu

SEQ ID NO: 1506376 - RNA, 17 nt, Human
ccacccccacccaaggg

SEQ ID NO: 1506377 - RNA, 23 nt, Human
ccacggccaggccagagggagug

SEQ ID NO: 1506378 - RNA, 18 nt, Human
ccacgcuggagugcagug

SEQ ID NO: 1506379 - RNA, 19 nt, Human
ccacgcuggagugcaguga

SEQ ID NO: 1506380 - RNA, 16 nt, Human
ccacggccaggccaga

SEQ ID NO: 1506381 - RNA, 18 nt, Human
ccacggccaggccagagg

SEQ ID NO: 1506382 - RNA, 16 nt, Human
ccacgcuggagugcag

SEQ ID NO: 1506383 - RNA, 15 nt, Human
ccacccccacccaag

SEQ ID NO: 1506384 - RNA, 15 nt, Human
ccaccccacacacgc

SEQ ID NO: 1506385 - RNA, 14 nt, Human
ccacuacauucugu

SEQ ID NO: 1506386 - RNA, 15 nt, Human
ccacuacauucuguu

SEQ ID NO: 1506387 - RNA, 11 nt, Human
ccacuacauuc

SEQ ID NO: 1506388 - RNA, 17 nt, Human
ccacuacauucuguuaa

SEQ ID NO: 1506389 - RNA, 16 nt, Human
ccacuacauucuguua

SEQ ID NO: 1506390 - RNA, 18 nt, Human
ccacucaguccauagcag

SEQ ID NO: 1506391 - RNA, 13 nt, Human
ccacuucagcuga

SEQ ID NO: 1506392 - RNA, 14 nt, Human
ccacuucagcugac

SEQ ID NO: 1506393 - RNA, 13 nt, Human
ccacugcagaaga

SEQ ID NO: 1506394 - RNA, 18 nt, Human
ccacugcagaagacagua

SEQ ID NO: 1506395 - RNA, 23 nt, Human
ccagaaguuugagaucagccugg

SEQ ID NO: 1506396 - RNA, 22 nt, Human
ccagaaguuugagaucagccug

SEQ ID NO: 1506397 - RNA, 18 nt, Human
ccagaauuucccaaagca

SEQ ID NO: 1506398 - RNA, 21 nt, Human
ccagaauuucccaaagcagug

SEQ ID NO: 1506399 - RNA, 21 nt, Human
ccagacaccuugacagggcac

SEQ ID NO: 1506400 - RNA, 12 nt, Human
ccagaauuuccc

SEQ ID NO: 1506401 - RNA, 19 nt, Human
ccagaauuucccaaagcag

SEQ ID NO: 1506402 - RNA, 14 nt, Human
ccaagcaaguauua

SEQ ID NO: 1506403 - RNA, 17 nt, Human
ccaagcauuuagaugua

SEQ ID NO: 1506404 - RNA, 22 nt, Human
ccaagcauaccaacacgagcag

SEQ ID NO: 1506405 - RNA, 14 nt, Human
ccaagcucccaggc

SEQ ID NO: 1506406 - RNA, 15 nt, Human
ccaagcucccaggca

SEQ ID NO: 1506407 - RNA, 16 nt, Human
ccaagcucccaggcau

SEQ ID NO: 1506408 - RNA, 22 nt, Human
ccaagcucccaggcauucccca

SEQ ID NO: 1506409 - RNA, 17 nt, Human
ccaaggccaaaggaagc

SEQ ID NO: 1506410 - RNA, 20 nt, Human
ccaagucaagugaaaaagga

SEQ ID NO: 1506411 - RNA, 18 nt, Human
ccaaggugggaggauugc

SEQ ID NO: 1506412 - RNA, 13 nt, Human
ccaaggugggagg

SEQ ID NO: 1506413 - RNA, 23 nt, Human
ccaagguuuggggaagaacgaag

SEQ ID NO: 1506414 - RNA, 22 nt, Human
ccaaggggaauguuugccucug

SEQ ID NO: 1506415 - RNA, 19 nt, Human
ccaagggccuggccugagc

SEQ ID NO: 1506416 - RNA, 16 nt, Human
ccaagggccuggccug

SEQ ID NO: 1506417 - RNA, 18 nt, Human
ccaagggccuggccugag

SEQ ID NO: 1506418 - RNA, 15 nt, Human
ccaagggccuggccu

SEQ ID NO: 1506419 - RNA, 18 nt, Human
ccaaggccaaaggaagca

SEQ ID NO: 1506420 - RNA, 21 nt, Human
ccaaggccaaaggaagcacau

SEQ ID NO: 1506421 - RNA, 18 nt, Human
ccaaaguacacuguuuca

SEQ ID NO: 1506422 - RNA, 15 nt, Human
ccaaaguacacuguu

SEQ ID NO: 1506423 - RNA, 20 nt, Human
ccaaaguacacuguuucaaa

SEQ ID NO: 1506424 - RNA, 13 nt, Human
ccaacaucaacau

SEQ ID NO: 1506425 - RNA, 21 nt, Human
ccaacauacucccaucuguga

SEQ ID NO: 1506426 - RNA, 22 nt, Human
ccaacauacucccaucugugaa

SEQ ID NO: 1506427 - RNA, 17 nt, Human
ccaacauacucccaucu

SEQ ID NO: 1506428 - RNA, 18 nt, Human
ccaacauacucccaucug

SEQ ID NO: 1506429 - RNA, 19 nt, Human
ccaacauacucccaucugu

SEQ ID NO: 1506430 - RNA, 20 nt, Human
ccaacauacucccaucugug

SEQ ID NO: 1506431 - RNA, 22 nt, Human
ccaaacugacucuuaagaagac

SEQ ID NO: 1506432 - RNA, 23 nt, Human
ccaaagcagugcaugcugucccu

SEQ ID NO: 1506433 - RNA, 19 nt, Human
ccaaagccaaagcuaggcc

SEQ ID NO: 1506434 - RNA, 17 nt, Human
ccaaagccuccuccagc

SEQ ID NO: 1506435 - RNA, 22 nt, Human
ccaaagccuccuccagccgcca

SEQ ID NO: 1506436 - RNA, 20 nt, Human
ccaaacucaccugccccuca

SEQ ID NO: 1506437 - RNA, 21 nt, Human
ccaaagcuaggccuggccaga

SEQ ID NO: 1506438 - RNA, 16 nt, Human
ccaaagcuaggccugg

SEQ ID NO: 1506439 - RNA, 17 nt, Human
ccaaagcuaggccuggc

SEQ ID NO: 1506440 - RNA, 15 nt, Human
ccaaagcuaggccug

SEQ ID NO: 1506441 - RNA, 16 nt, Human
ccaaaggcucucuccu

SEQ ID NO: 1506442 - RNA, 15 nt, Human
ccaaaggaagcacau

SEQ ID NO: 1506443 - RNA, 23 nt, Human
ccaaaggaagcacaugccucucu

SEQ ID NO: 1506444 - RNA, 12 nt, Human
ccaacccucauc

SEQ ID NO: 1506445 - RNA, 21 nt, Human
ccaaccccccagcacugagga

SEQ ID NO: 1506446 - RNA, 13 nt, Human
ccaaccccccagc

SEQ ID NO: 1506447 - RNA, 14 nt, Human
ccaaccccccagca

SEQ ID NO: 1506448 - RNA, 15 nt, Human
ccaaccccccagcac

SEQ ID NO: 1506449 - RNA, 17 nt, Human
ccaaccccccagcacug

SEQ ID NO: 1506450 - RNA, 18 nt, Human
ccaaccccccagcacuga

SEQ ID NO: 1506451 - RNA, 19 nt, Human
ccaaccccccagcacugag

SEQ ID NO: 1506452 - RNA, 20 nt, Human
ccaaccccccagcacugagg

SEQ ID NO: 1506453 - RNA, 19 nt, Human
ccaagaagcccaggaaagg

SEQ ID NO: 1506454 - RNA, 20 nt, Human
ccaagaagcccaggaaaggc

SEQ ID NO: 1506455 - RNA, 23 nt, Human
ccaagcagagguugggaggccau

SEQ ID NO: 1506456 - RNA, 13 nt, Human
cauugugggaagg

SEQ ID NO: 1506457 - RNA, 17 nt, Human
cauuguuggccaaagcc

SEQ ID NO: 1506458 - RNA, 18 nt, Human
cauuguuggccaaagcca

SEQ ID NO: 1506459 - RNA, 14 nt, Human
cacccaagggccug

SEQ ID NO: 1506460 - RNA, 15 nt, Human
cacccaagggccugg

SEQ ID NO: 1506461 - RNA, 12 nt, Human
cauuuccugugu

SEQ ID NO: 1506462 - RNA, 13 nt, Human
cauuuccuguguc

SEQ ID NO: 1506463 - RNA, 17 nt, Human
cauuuaggccaugggac

SEQ ID NO: 1506464 - RNA, 16 nt, Human
cauuuaaaagauacag

SEQ ID NO: 1506465 - RNA, 15 nt, Human
cauuuaaaagauaca

SEQ ID NO: 1506466 - RNA, 12 nt, Human
cauuuaaaagau

SEQ ID NO: 1506467 - RNA, 21 nt, Human
cauuuaaaagauacaguuacu

SEQ ID NO: 1506468 - RNA, 16 nt, Human
cacccaagggccuggc

SEQ ID NO: 1506469 - RNA, 19 nt, Human
cauuuuagggguagcauuu

SEQ ID NO: 1506470 - RNA, 23 nt, Human
cauuuuucuuagggaaggauaca

SEQ ID NO: 1506471 - RNA, 13 nt, Human
cauuugcucaugg

SEQ ID NO: 1506472 - RNA, 13 nt, Human
cauuugcuccuuu

SEQ ID NO: 1506473 - RNA, 14 nt, Human
cauuugcuccuuuc

SEQ ID NO: 1506474 - RNA, 22 nt, Human
cauuuguuugaacugauaaaga

SEQ ID NO: 1506475 - RNA, 20 nt, Human
cauuuguuugaacugauaaa

SEQ ID NO: 1506476 - RNA, 13 nt, Human
cauuugcugaaua

SEQ ID NO: 1506477 - RNA, 17 nt, Human
cauuuguuugaacugau

SEQ ID NO: 1506478 - RNA, 20 nt, Human
cauuugagcagggcucagcg

SEQ ID NO: 1506479 - RNA, 20 nt, Human
cauuugcuaacuagcuugga

SEQ ID NO: 1506480 - RNA, 17 nt, Human
cauuugagcagggcuca

SEQ ID NO: 1506481 - RNA, 18 nt, Human
cauuugagcagggcucag

SEQ ID NO: 1506482 - RNA, 20 nt, Human
cauuugaaaauuuugauguu

SEQ ID NO: 1506483 - RNA, 22 nt, Human
cauuugaaaauuuugauguuuu

SEQ ID NO: 1506484 - RNA, 20 nt, Human
cugagacucgcgacaaugca

SEQ ID NO: 1506485 - RNA, 17 nt, Human
cugagacucgcgacaau

SEQ ID NO: 1506486 - RNA, 19 nt, Human
cugagacucgcgacaaugc

SEQ ID NO: 1506487 - RNA, 15 nt, Human
cugcauguuugugau

SEQ ID NO: 1506488 - RNA, 13 nt, Human
cugcauguuacau

SEQ ID NO: 1506489 - RNA, 13 nt, Human
cugcauuggcuuu

SEQ ID NO: 1506490 - RNA, 22 nt, Human
cugcauuuaaaagauacaguua

SEQ ID NO: 1506491 - RNA, 20 nt, Human
cugcauuuaaaagauacagu

SEQ ID NO: 1506492 - RNA, 15 nt, Human
cugccaaugggagcu

SEQ ID NO: 1506493 - RNA, 17 nt, Human
cugccaaugggagcuca

SEQ ID NO: 1506494 - RNA, 14 nt, Human
cugccccucaacuc

SEQ ID NO: 1506495 - RNA, 22 nt, Human
cugccccucaacucuccuccag

SEQ ID NO: 1506496 - RNA, 12 nt, Human
cugcccugugag

SEQ ID NO: 1506497 - RNA, 13 nt, Human
cugcccugugagu

SEQ ID NO: 1506498 - RNA, 15 nt, Human
cugcccugugggccc

SEQ ID NO: 1506499 - RNA, 16 nt, Human
cugcccugugggcccc

SEQ ID NO: 1506500 - RNA, 18 nt, Human
cugcccugugggccccca

SEQ ID NO: 1506501 - RNA, 12 nt, Human
cugccauccagg

SEQ ID NO: 1506502 - RNA, 11 nt, Human
cugccagggac

SEQ ID NO: 1506503 - RNA, 12 nt, Human
cugccagggaca

SEQ ID NO: 1506504 - RNA, 15 nt, Human
cugccagggacagag

SEQ ID NO: 1506505 - RNA, 20 nt, Human
cugccauauucuguuggcca

SEQ ID NO: 1506506 - RNA, 21 nt, Human
cugccauauucuguuggccag

SEQ ID NO: 1506507 - RNA, 22 nt, Human
cugccauauucuguuggccagu

SEQ ID NO: 1506508 - RNA, 23 nt, Human
cugccauauucuguuggccagug

SEQ ID NO: 1506509 - RNA, 15 nt, Human
cugcuacagagcaga

SEQ ID NO: 1506510 - RNA, 16 nt, Human
cugcuaauuccccaga

SEQ ID NO: 1506511 - RNA, 16 nt, Human
cugccuguugggccag

SEQ ID NO: 1506512 - RNA, 18 nt, Human
cugccuguugggccagga

SEQ ID NO: 1506513 - RNA, 19 nt, Human
cugccuguugggccaggag

SEQ ID NO: 1506514 - RNA, 23 nt, Human
cugccugggaucccucauccuca

SEQ ID NO: 1506515 - RNA, 14 nt, Human
cugccuguucagcu

SEQ ID NO: 1506516 - RNA, 15 nt, Human
cugccuguucagcuc

SEQ ID NO: 1506517 - RNA, 15 nt, Human
cugccucgaacuggc

SEQ ID NO: 1506518 - RNA, 17 nt, Human
cugccucgaacuggcug

SEQ ID NO: 1506519 - RNA, 18 nt, Human
cugccucgaacuggcugc

SEQ ID NO: 1506520 - RNA, 19 nt, Human
cugccucgaacuggcugca

SEQ ID NO: 1506521 - RNA, 19 nt, Human
cugcccugugggcccccaa

SEQ ID NO: 1506522 - RNA, 17 nt, Human
cuggaacacuaaugagg

SEQ ID NO: 1506523 - RNA, 21 nt, Human
cuggaaaucaggguuaguauu

SEQ ID NO: 1506524 - RNA, 16 nt, Human
cuggaaauauuaagaa

SEQ ID NO: 1506525 - RNA, 23 nt, Human
cugcuucagccucccgaguagcu

SEQ ID NO: 1506526 - RNA, 22 nt, Human
cugcuuuuuaaagaaugcucuu

SEQ ID NO: 1506527 - RNA, 14 nt, Human
cugcuucagccucc

SEQ ID NO: 1506528 - RNA, 16 nt, Human
cugcuucagccucccg

SEQ ID NO: 1506529 - RNA, 17 nt, Human
cugcuuaacuucacaua

SEQ ID NO: 1506530 - RNA, 15 nt, Human
cugcuuaacuucaca

SEQ ID NO: 1506531 - RNA, 20 nt, Human
cugcuuaacuucacauauug

SEQ ID NO: 1506532 - RNA, 13 nt, Human
cugcuucagccuc

SEQ ID NO: 1506533 - RNA, 13 nt, Human
cugcuuaacuuca

SEQ ID NO: 1506534 - RNA, 15 nt, Human
cugcugacagacaca

SEQ ID NO: 1506535 - RNA, 18 nt, Human
cugcugacagacacaggc

SEQ ID NO: 1506536 - RNA, 19 nt, Human
cugcugacagacacaggcc

SEQ ID NO: 1506537 - RNA, 20 nt, Human
cugcugacagacacaggccc

SEQ ID NO: 1506538 - RNA, 21 nt, Human
cugcugacagacacaggcccg

SEQ ID NO: 1506539 - RNA, 23 nt, Human
cugcugacagacacaggcccggc

SEQ ID NO: 1506540 - RNA, 11 nt, Human
cugcugacagu

SEQ ID NO: 1506541 - RNA, 21 nt, Human
cuguaggaagguuaauguuca

SEQ ID NO: 1506542 - RNA, 20 nt, Human
cugucauuugagcagggcuc

SEQ ID NO: 1506543 - RNA, 23 nt, Human
cugucagcuccccucggagaaga

SEQ ID NO: 1506544 - RNA, 17 nt, Human
cugucauuugagcaggg

SEQ ID NO: 1506545 - RNA, 18 nt, Human
cugucauuugagcagggc

SEQ ID NO: 1506546 - RNA, 18 nt, Human
cugucagccauuccuguu

SEQ ID NO: 1506547 - RNA, 21 nt, Human
cugucagcuccccucggagaa

SEQ ID NO: 1506548 - RNA, 15 nt, Human
cugucgcccagucug

SEQ ID NO: 1506549 - RNA, 13 nt, Human
cugucgcccaguc

SEQ ID NO: 1506550 - RNA, 18 nt, Human
cugugaaguuuacauugu

SEQ ID NO: 1506551 - RNA, 15 nt, Human
cugugaagagaacca

SEQ ID NO: 1506552 - RNA, 16 nt, Human
cugugagaugcuagaa

SEQ ID NO: 1506553 - RNA, 21 nt, Human
cugugagaugcuagaacuccc

SEQ ID NO: 1506554 - RNA, 18 nt, Human
cugugagacucgagaacu

SEQ ID NO: 1506555 - RNA, 20 nt, Human
cugugagacucgagaacuuu

SEQ ID NO: 1506556 - RNA, 14 nt, Human
cugugcucuggaca

SEQ ID NO: 1506557 - RNA, 15 nt, Human
cugugcucuggacag

SEQ ID NO: 1506558 - RNA, 23 nt, Human
cuggugacuuuccucuuuggucu

SEQ ID NO: 1506559 - RNA, 14 nt, Human
cuggguucuaccca

SEQ ID NO: 1506560 - RNA, 15 nt, Human
cuggugacuuuccuc

SEQ ID NO: 1506561 - RNA, 20 nt, Human
cuggugacuuuccucuuugg

SEQ ID NO: 1506562 - RNA, 21 nt, Human
cuggugacuuuccucuuuggu

SEQ ID NO: 1506563 - RNA, 15 nt, Human
cuggguucacugcaa

SEQ ID NO: 1506564 - RNA, 14 nt, Human
cuggguucacugca

SEQ ID NO: 1506565 - RNA, 23 nt, Human
cuggguggcaccagcagccugga

SEQ ID NO: 1506566 - RNA, 16 nt, Human
cuggguguggcgcagc

SEQ ID NO: 1506567 - RNA, 17 nt, Human
cuggguguggcgcagca

SEQ ID NO: 1506568 - RNA, 16 nt, Human
cuggggccgaaagaac

SEQ ID NO: 1506569 - RNA, 18 nt, Human
cugggcagaaggaagacu

SEQ ID NO: 1506570 - RNA, 17 nt, Human
cugggcagaaggaagac

SEQ ID NO: 1506571 - RNA, 10 nt, Human
cugggacagg

SEQ ID NO: 1506572 - RNA, 12 nt, Human
cugggacacagu

SEQ ID NO: 1506573 - RNA, 13 nt, Human
cugggacacaguu

SEQ ID NO: 1506574 - RNA, 17 nt, Human
cuggccccucagggucc

SEQ ID NO: 1506575 - RNA, 18 nt, Human
cuggccccucaggguccc

SEQ ID NO: 1506576 - RNA, 20 nt, Human
cuggccccucagggucccug

SEQ ID NO: 1506577 - RNA, 21 nt, Human
cuggccccucagggucccugg

SEQ ID NO: 1506578 - RNA, 12 nt, Human
cuggcagcucag

SEQ ID NO: 1506579 - RNA, 13 nt, Human
cuggcagcucaga

SEQ ID NO: 1506580 - RNA, 14 nt, Human
cuggcagcucagag

SEQ ID NO: 1506581 - RNA, 13 nt, Human
cuggccccucagg

SEQ ID NO: 1506582 - RNA, 15 nt, Human
cuggcagcucagaga

SEQ ID NO: 1506583 - RNA, 15 nt, Human
cuucacuguaaaaua

SEQ ID NO: 1506584 - RNA, 20 nt, Human
cuucagagacuccugcaggc

SEQ ID NO: 1506585 - RNA, 18 nt, Human
cuucagagacuccugcag

SEQ ID NO: 1506586 - RNA, 19 nt, Human
cuucagagacuccugcagg

SEQ ID NO: 1506587 - RNA, 21 nt, Human
cuucaucugacuaugacauaa

SEQ ID NO: 1506588 - RNA, 22 nt, Human
cuuccagugaggcucugcccuu

SEQ ID NO: 1506589 - RNA, 23 nt, Human
cuuccagugaggcucugcccuug

SEQ ID NO: 1506590 - RNA, 21 nt, Human
cuuccagugaggcucugcccu

SEQ ID NO: 1506591 - RNA, 20 nt, Human
cuucaugcauagguuuagca

SEQ ID NO: 1506592 - RNA, 11 nt, Human
cuucccaccuc

SEQ ID NO: 1506593 - RNA, 21 nt, Human
cuucccaccucucucacuccu

SEQ ID NO: 1506594 - RNA, 23 nt, Human
cuucccaccucucucacuccuug

SEQ ID NO: 1506595 - RNA, 23 nt, Human
cuuauuguagcauccuggaauau

SEQ ID NO: 1506596 - RNA, 21 nt, Human
cuucaccuuuguccccaccgc

SEQ ID NO: 1506597 - RNA, 20 nt, Human
cuuauuguagcauccuggaa

SEQ ID NO: 1506598 - RNA, 22 nt, Human
cuucaccuuuguccccaccgca

SEQ ID NO: 1506599 - RNA, 15 nt, Human
cuucacggaagagcc

SEQ ID NO: 1506600 - RNA, 19 nt, Human
cuucacggaagagccuugc

SEQ ID NO: 1506601 - RNA, 17 nt, Human
cuuauggaacacucuga

SEQ ID NO: 1506602 - RNA, 19 nt, Human
cuuauggaacacucugaga

SEQ ID NO: 1506603 - RNA, 20 nt, Human
cuuauggaacacucugagac

SEQ ID NO: 1506604 - RNA, 21 nt, Human
cuuauggaacacucugagacu

SEQ ID NO: 1506605 - RNA, 13 nt, Human
cuuauggaacacu

SEQ ID NO: 1506606 - RNA, 16 nt, Human
cuuauggaacacucug

SEQ ID NO: 1506607 - RNA, 12 nt, Human
cugugcugaguc

SEQ ID NO: 1506608 - RNA, 14 nt, Human
cugugcugagucug

SEQ ID NO: 1506609 - RNA, 19 nt, Human
cugugcugagucugaaggc

SEQ ID NO: 1506610 - RNA, 13 nt, Human
cuugaugaagaag

SEQ ID NO: 1506611 - RNA, 20 nt, Human
cuuggcgcugccccuggcag

SEQ ID NO: 1506612 - RNA, 12 nt, Human
cuuggcgcugcc

SEQ ID NO: 1506613 - RNA, 14 nt, Human
cuuggcgcugcccc

SEQ ID NO: 1506614 - RNA, 17 nt, Human
cuuggcgcugccccugg

SEQ ID NO: 1506615 - RNA, 12 nt, Human
cuugaugaagaa

SEQ ID NO: 1506616 - RNA, 20 nt, Human
cuugacagggcacaccgggc

SEQ ID NO: 1506617 - RNA, 19 nt, Human
cuugaauuguaaggaauga

SEQ ID NO: 1506618 - RNA, 14 nt, Human
cuugacagggcaca

SEQ ID NO: 1506619 - RNA, 15 nt, Human
cuugacagggcacac

SEQ ID NO: 1506620 - RNA, 13 nt, Human
cuugacagggcac

SEQ ID NO: 1506621 - RNA, 13 nt, Human
cuucuaggaagcu

SEQ ID NO: 1506622 - RNA, 17 nt, Human
cuucuaagucauucaua

SEQ ID NO: 1506623 - RNA, 23 nt, Human
cuucuaaguaaaaccacagcagu

SEQ ID NO: 1506624 - RNA, 17 nt, Human
cuuccugcaacaccuug

SEQ ID NO: 1506625 - RNA, 15 nt, Human
cuucugccauauucu

SEQ ID NO: 1506626 - RNA, 20 nt, Human
cuucugacccaugcugcccu

SEQ ID NO: 1506627 - RNA, 21 nt, Human
cuucugacccaugcugcccug

SEQ ID NO: 1506628 - RNA, 22 nt, Human
cuucugacccaugcugcccugu

SEQ ID NO: 1506629 - RNA, 23 nt, Human
cuucugacccaugcugcccugug

SEQ ID NO: 1506630 - RNA, 22 nt, Human
cuuuccugaggcugggcucccu

SEQ ID NO: 1506631 - RNA, 23 nt, Human
cuuucagccaagaauucuuaaau

SEQ ID NO: 1506632 - RNA, 20 nt, Human
cuuucagccaagaauucuua

SEQ ID NO: 1506633 - RNA, 21 nt, Human
cuuucaaugguuugcaaggaa

SEQ ID NO: 1506634 - RNA, 22 nt, Human
cuuucaaugguuugcaaggaag

SEQ ID NO: 1506635 - RNA, 20 nt, Human
cuuucaaugguuugcaagga

SEQ ID NO: 1506636 - RNA, 14 nt, Human
cuuuuauaaacuuu

SEQ ID NO: 1506637 - RNA, 13 nt, Human
cuuuuauaaacuu

SEQ ID NO: 1506638 - RNA, 15 nt, Human
cuuucuagccagagg

SEQ ID NO: 1506639 - RNA, 16 nt, Human
cuuucuagccagagga

SEQ ID NO: 1506640 - RNA, 18 nt, Human
gaaauauuuauuuuaaua

SEQ ID NO: 1506641 - RNA, 22 nt, Human
gaaauauuuauuuuaauaaugu

SEQ ID NO: 1506642 - RNA, 18 nt, Human
gaaaucaaauaugcaaag

SEQ ID NO: 1506643 - RNA, 21 nt, Human
gaaaucaaauaugcaaagcac

SEQ ID NO: 1506644 - RNA, 19 nt, Human
gaaaucaaauaugcaaagc

SEQ ID NO: 1506645 - RNA, 20 nt, Human
gaaaucaaauaugcaaagca

SEQ ID NO: 1506646 - RNA, 17 nt, Human
gaaauauuuauuuuaau

SEQ ID NO: 1506647 - RNA, 22 nt, Human
gaaagggacuuggaagcuccgc

SEQ ID NO: 1506648 - RNA, 20 nt, Human
gaaagggacgcuacccggga

SEQ ID NO: 1506649 - RNA, 19 nt, Human
gaaagggacuuggaagcuc

SEQ ID NO: 1506650 - RNA, 13 nt, Human
gaaacuuuuggaa

SEQ ID NO: 1506651 - RNA, 15 nt, Human
gaaacuuuuggaagg

SEQ ID NO: 1506652 - RNA, 21 nt, Human
gaaagaaaauaccaaggaaca

SEQ ID NO: 1506653 - RNA, 20 nt, Human
gaaagacuaucuaaauguug

SEQ ID NO: 1506654 - RNA, 14 nt, Human
gaaagacuauucaa

SEQ ID NO: 1506655 - RNA, 15 nt, Human
gaaagacuauucaaa

SEQ ID NO: 1506656 - RNA, 22 nt, Human
gaaaggcuccaggagcagccac

SEQ ID NO: 1506657 - RNA, 21 nt, Human
gaaaggcuccaggagcagcca

SEQ ID NO: 1506658 - RNA, 17 nt, Human
gaaagacuauucaaaca

SEQ ID NO: 1506659 - RNA, 13 nt, Human
cuuuugugcauua

SEQ ID NO: 1506660 - RNA, 12 nt, Human
cuuuugugcauu

SEQ ID NO: 1506661 - RNA, 23 nt, Human
cuuuuuuggcugcugaaggcucg

SEQ ID NO: 1506662 - RNA, 19 nt, Human
cuuuuguagaagucacauu

SEQ ID NO: 1506663 - RNA, 18 nt, Human
cuuuugucuaugggacuc

SEQ ID NO: 1506664 - RNA, 18 nt, Human
cuuuuggaagguauuuaa

SEQ ID NO: 1506665 - RNA, 16 nt, Human
cuuuugccguuauuaa

SEQ ID NO: 1506666 - RNA, 23 nt, Human
cuuuugcccacacuugggagcaa

SEQ ID NO: 1506667 - RNA, 14 nt, Human
gaaaauuuuaaaaa

SEQ ID NO: 1506668 - RNA, 15 nt, Human
gaaaauguaugugua

SEQ ID NO: 1506669 - RNA, 19 nt, Human
gaaaauggacguguuauga

SEQ ID NO: 1506670 - RNA, 23 nt, Human
gaaaauggacguguuaugacucc

SEQ ID NO: 1506671 - RNA, 18 nt, Human
gaaaagaaaaaugagccu

SEQ ID NO: 1506672 - RNA, 21 nt, Human
gaaaauggaagacagcucuua

SEQ ID NO: 1506673 - RNA, 14 nt, Human
gaaaaacugauuuu

SEQ ID NO: 1506674 - RNA, 19 nt, Human
gcagagcagagaccauccc

SEQ ID NO: 1506675 - RNA, 20 nt, Human
gcagagcagagaccaucccu

SEQ ID NO: 1506676 - RNA, 24 nt, Human
gcagagcaccuuagacagucccug

SEQ ID NO: 1506677 - RNA, 12 nt, Human
gcagagcagaga

SEQ ID NO: 1506678 - RNA, 14 nt, Human
gcagagcagagacc

SEQ ID NO: 1506679 - RNA, 15 nt, Human
gcagagcagagacca

SEQ ID NO: 1506680 - RNA, 19 nt, Human
gcagagcaccuuagacagu

SEQ ID NO: 1506681 - RNA, 22 nt, Human
gcagagcaccuuagacaguccc

SEQ ID NO: 1506682 - RNA, 23 nt, Human
gcagagcaccuuagacagucccu

SEQ ID NO: 1506683 - RNA, 17 nt, Human
gcacugacagauuucca

SEQ ID NO: 1506684 - RNA, 12 nt, Human
gcacugacagau

SEQ ID NO: 1506685 - RNA, 12 nt, Human
gcacugacauug

SEQ ID NO: 1506686 - RNA, 13 nt, Human
gcaagugagagcu

SEQ ID NO: 1506687 - RNA, 15 nt, Human
gcaagugagagcugg

SEQ ID NO: 1506688 - RNA, 23 nt, Human
gcaauaaggggagaguaacccug

SEQ ID NO: 1506689 - RNA, 22 nt, Human
gcacaagcuccaagcucccagg

SEQ ID NO: 1506690 - RNA, 23 nt, Human
gcacaagcuccaagcucccaggc

SEQ ID NO: 1506691 - RNA, 14 nt, Human
gcacaagcugcacc

SEQ ID NO: 1506692 - RNA, 21 nt, Human
gcaccggcuggccuggccccu

SEQ ID NO: 1506693 - RNA, 23 nt, Human
gcaccggcuggccuggccccuca

SEQ ID NO: 1506694 - RNA, 19 nt, Human
gcaccggcuggccuggccc

SEQ ID NO: 1506695 - RNA, 14 nt, Human
gcacaugccucucu

SEQ ID NO: 1506696 - RNA, 17 nt, Human
gcacaugccucucucag

SEQ ID NO: 1506697 - RNA, 18 nt, Human
gcacaugccucucucagg

SEQ ID NO: 1506698 - RNA, 19 nt, Human
gcacaugccucucucaggc

SEQ ID NO: 1506699 - RNA, 20 nt, Human
gcacaugccucucucaggcc

SEQ ID NO: 1506700 - RNA, 21 nt, Human
gcacaugccucucucaggcca

SEQ ID NO: 1506701 - RNA, 22 nt, Human
gcacaugccucucucaggccaa

SEQ ID NO: 1506702 - RNA, 22 nt, Human
gcacaagcugcacccucaggca

SEQ ID NO: 1506703 - RNA, 20 nt, Human
gcacaguuuucugagaaaga

SEQ ID NO: 1506704 - RNA, 18 nt, Human
gcacaguuuucugagaaa

SEQ ID NO: 1506705 - RNA, 14 nt, Human
gcacaguuuucuga

SEQ ID NO: 1506706 - RNA, 17 nt, Human
gcacaguuuucugagaa

SEQ ID NO: 1506707 - RNA, 21 nt, Human
gcacaucagcacgauuucugu

SEQ ID NO: 1506708 - RNA, 20 nt, Human
gcacaucagcacgauuucug

SEQ ID NO: 1506709 - RNA, 19 nt, Human
gcacaucagcacgauuucu

SEQ ID NO: 1506710 - RNA, 13 nt, Human
gcacaugccucuc

SEQ ID NO: 1506711 - RNA, 20 nt, Human
gcauaccacuuuuguucuug

SEQ ID NO: 1506712 - RNA, 17 nt, Human
gcauaccacuuuuguuc

SEQ ID NO: 1506713 - RNA, 14 nt, Human
gcauacguacacau

SEQ ID NO: 1506714 - RNA, 13 nt, Human
gcagggaaacagc

SEQ ID NO: 1506715 - RNA, 23 nt, Human
gcaggcucucaggccagcugcuu

SEQ ID NO: 1506716 - RNA, 17 nt, Human
gcagcugcgguccaccc

SEQ ID NO: 1506717 - RNA, 19 nt, Human
gcagcugcgguccacccag

SEQ ID NO: 1506718 - RNA, 20 nt, Human
gcaggcucucaggccagcug

SEQ ID NO: 1506719 - RNA, 22 nt, Human
gcaggcucucaggccagcugcu

SEQ ID NO: 1506720 - RNA, 16 nt, Human
gcagccacauuccuga

SEQ ID NO: 1506721 - RNA, 14 nt, Human
gcagccacuauugu

SEQ ID NO: 1506722 - RNA, 12 nt, Human
gcagccaggcca

SEQ ID NO: 1506723 - RNA, 16 nt, Human
gcagccaggccacaag

SEQ ID NO: 1506724 - RNA, 13 nt, Human
gcagccaggccac

SEQ ID NO: 1506725 - RNA, 14 nt, Human
gcagccaggccaca

SEQ ID NO: 1506726 - RNA, 17 nt, Human
gauauuuuuuucuuuuc

SEQ ID NO: 1506727 - RNA, 15 nt, Human
gauauuuuuuucuuu

SEQ ID NO: 1506728 - RNA, 16 nt, Human
gauauuuugcuuugug

SEQ ID NO: 1506729 - RNA, 15 nt, Human
gaucucuaacuucac

SEQ ID NO: 1506730 - RNA, 18 nt, Human
gaucucuugagccuggga

SEQ ID NO: 1506731 - RNA, 17 nt, Human
gaucucuugagccuggg

SEQ ID NO: 1506732 - RNA, 12 nt, Human
gaucucuugagc

SEQ ID NO: 1506733 - RNA, 16 nt, Human
gaucucuugagccugg

SEQ ID NO: 1506734 - RNA, 21 nt, Human
gaugaugaaaugaggucagag

SEQ ID NO: 1506735 - RNA, 20 nt, Human
gaugaucuuugcagacaggc

SEQ ID NO: 1506736 - RNA, 21 nt, Human
gaugaucuuugcagacaggca

SEQ ID NO: 1506737 - RNA, 14 nt, Human
gaugugaacacauc

SEQ ID NO: 1506738 - RNA, 16 nt, Human
gaugugaacacaucag

SEQ ID NO: 1506739 - RNA, 14 nt, Human
gauuaccagggacu

SEQ ID NO: 1506740 - RNA, 17 nt, Human
gauuagggagagaagau

SEQ ID NO: 1506741 - RNA, 21 nt, Human
gauuauuuucuacacauacau

SEQ ID NO: 1506742 - RNA, 18 nt, Human
gauucuccuucagcccuc

SEQ ID NO: 1506743 - RNA, 12 nt, Human
gauucuccuuca

SEQ ID NO: 1506744 - RNA, 13 nt, Human
gauucuccuucag

SEQ ID NO: 1506745 - RNA, 17 nt, Human
gauucuccuucagcccu

SEQ ID NO: 1506746 - RNA, 16 nt, Human
gaguuuagcuggaaaa

SEQ ID NO: 1506747 - RNA, 13 nt, Human
gagugcagugagc

SEQ ID NO: 1506748 - RNA, 20 nt, Human
gaguuguuacauuuuuaagu

SEQ ID NO: 1506749 - RNA, 16 nt, Human
gaguuguuacauuuuu

SEQ ID NO: 1506750 - RNA, 20 nt, Human
gaguuugggguaugggagag

SEQ ID NO: 1506751 - RNA, 16 nt, Human
gagucccaccuuggcu

SEQ ID NO: 1506752 - RNA, 20 nt, Human
gagucccaccuuggcugcag

SEQ ID NO: 1506753 - RNA, 15 nt, Human
gagucaccaagccca

SEQ ID NO: 1506754 - RNA, 13 nt, Human
gagucaccaagcc

SEQ ID NO: 1506755 - RNA, 14 nt, Human
gagucaccaagccc

SEQ ID NO: 1506756 - RNA, 11 nt, Human
gagugcaguga

SEQ ID NO: 1506757 - RNA, 12 nt, Human
gagugcagugag

SEQ ID NO: 1506758 - RNA, 21 nt, Human
gagucccaccuuggcugcagg

SEQ ID NO: 1506759 - RNA, 12 nt, Human
gagugagcuggu

SEQ ID NO: 1506760 - RNA, 13 nt, Human
gaggugggauccu

SEQ ID NO: 1506761 - RNA, 12 nt, Human
gaggugggaucc

SEQ ID NO: 1506762 - RNA, 11 nt, Human
gaggugggagg

SEQ ID NO: 1506763 - RNA, 14 nt, Human
gaggucuguucuuu

SEQ ID NO: 1506764 - RNA, 13 nt, Human
gaggucuguucuu

SEQ ID NO: 1506765 - RNA, 13 nt, Human
gauaugugaacag

SEQ ID NO: 1506766 - RNA, 14 nt, Human
gauaugugaacagu

SEQ ID NO: 1506767 - RNA, 20 nt, Human
gauauguaccuaacgaagua

SEQ ID NO: 1506768 - RNA, 11 nt, Human
gauacuacagu

SEQ ID NO: 1506769 - RNA, 16 nt, Human
gauacuacaguuuguu

SEQ ID NO: 1506770 - RNA, 13 nt, Human
gauacccauccca

SEQ ID NO: 1506771 - RNA, 14 nt, Human
gauacccaucccau

SEQ ID NO: 1506772 - RNA, 14 nt, Human
gacagugaaagaaa

SEQ ID NO: 1506773 - RNA, 17 nt, Human
gacagucaccucaugga

SEQ ID NO: 1506774 - RNA, 20 nt, Human
gacaggguuuugccauguug

SEQ ID NO: 1506775 - RNA, 22 nt, Human
gacaggguuuugccauguuggc

SEQ ID NO: 1506776 - RNA, 11 nt, Human
gacagcuccuu

SEQ ID NO: 1506777 - RNA, 16 nt, Human
gacagaauauguuuca

SEQ ID NO: 1506778 - RNA, 12 nt, Human
gacagacacagg

SEQ ID NO: 1506779 - RNA, 21 nt, Human
gacagcccgggcucugccucc

SEQ ID NO: 1506780 - RNA, 22 nt, Human
gacagcccgggcucugccuccc

SEQ ID NO: 1506781 - RNA, 23 nt, Human
gacagcccgggcucugccuccca

SEQ ID NO: 1506782 - RNA, 15 nt, Human
gacacugaugggcaa

SEQ ID NO: 1506783 - RNA, 16 nt, Human
gacacuuaaaaauggu

SEQ ID NO: 1506784 - RNA, 13 nt, Human
gacacugaugggc

SEQ ID NO: 1506785 - RNA, 11 nt, Human
gaauuaguuuu

SEQ ID NO: 1506786 - RNA, 12 nt, Human
gaauuaugaaac

SEQ ID NO: 1506787 - RNA, 19 nt, Human
gaauuuuggcugugucucc

SEQ ID NO: 1506788 - RNA, 15 nt, Human
gacaaaauggaauac

SEQ ID NO: 1506789 - RNA, 14 nt, Human
gacacacagcucug

SEQ ID NO: 1506790 - RNA, 15 nt, Human
gacacacagcucugu

SEQ ID NO: 1506791 - RNA, 17 nt, Human
gacacacagcucugucc

SEQ ID NO: 1506792 - RNA, 18 nt, Human
gacacacagcucuguccu

SEQ ID NO: 1506793 - RNA, 19 nt, Human
gacacacagcucuguccug

SEQ ID NO: 1506794 - RNA, 21 nt, Human
gaauuuugugcccccauguaa

SEQ ID NO: 1506795 - RNA, 23 nt, Human
gaauuuuggcugugucucccuuc

SEQ ID NO: 1506796 - RNA, 20 nt, Human
gaauuuugugcccccaugua

SEQ ID NO: 1506797 - RNA, 14 nt, Human
gacacacugaagaa

SEQ ID NO: 1506798 - RNA, 13 nt, Human
gacacacugaaga

SEQ ID NO: 1506799 - RNA, 12 nt, Human
gacacacaugaa

SEQ ID NO: 1506800 - RNA, 21 nt, Human
gacacacagcucuguccuggg

SEQ ID NO: 1506801 - RNA, 19 nt, Human
gaagucuuuguacagacaa

SEQ ID NO: 1506802 - RNA, 20 nt, Human
gaagucuuuguacagacaac

SEQ ID NO: 1506803 - RNA, 18 nt, Human
gaagucuuuguacagaca

SEQ ID NO: 1506804 - RNA, 19 nt, Human
gaaggcucgagcaugccug

SEQ ID NO: 1506805 - RNA, 16 nt, Human
gaaggcucgagcaugc

SEQ ID NO: 1506806 - RNA, 17 nt, Human
gaaggcucgagcaugcc

SEQ ID NO: 1506807 - RNA, 19 nt, Human
gaagcuccgcuuucuaccc

SEQ ID NO: 1506808 - RNA, 14 nt, Human
gaagcucagggccu

SEQ ID NO: 1506809 - RNA, 15 nt, Human
gaagcucagggccug

SEQ ID NO: 1506810 - RNA, 23 nt, Human
gaagcucagggccuggcucaggu

SEQ ID NO: 1506811 - RNA, 20 nt, Human
gaagcucagggccuggcuca

SEQ ID NO: 1506812 - RNA, 21 nt, Human
gaagcucagggccuggcucag

SEQ ID NO: 1506813 - RNA, 16 nt, Human
gaagcucagggccugg

SEQ ID NO: 1506814 - RNA, 17 nt, Human
gaagcucagggccuggc

SEQ ID NO: 1506815 - RNA, 18 nt, Human
gaagcucagggccuggcu

SEQ ID NO: 1506816 - RNA, 19 nt, Human
gaagcucagggccuggcuc

SEQ ID NO: 1506817 - RNA, 20 nt, Human
gaaugagagacacacugaag

SEQ ID NO: 1506818 - RNA, 22 nt, Human
gaaugagagacacacugaagaa

SEQ ID NO: 1506819 - RNA, 23 nt, Human
gaaugagagacacacugaagaag

SEQ ID NO: 1506820 - RNA, 11 nt, Human
gaaugaauguc

SEQ ID NO: 1506821 - RNA, 14 nt, Human
gaaugaaugucagu

SEQ ID NO: 1506822 - RNA, 18 nt, Human
gaaugaaugucaguguga

SEQ ID NO: 1506823 - RNA, 22 nt, Human
gaaugaaugucagugugacuga

SEQ ID NO: 1506824 - RNA, 17 nt, Human
gacucuuaagaagacug

SEQ ID NO: 1506825 - RNA, 18 nt, Human
gacucuuaagaagacugc

SEQ ID NO: 1506826 - RNA, 16 nt, Human
gacucuuaagaagacu

SEQ ID NO: 1506827 - RNA, 19 nt, Human
gacucugucucaaaaaaac

SEQ ID NO: 1506828 - RNA, 12 nt, Human
gacucugucuca

SEQ ID NO: 1506829 - RNA, 13 nt, Human
gacuaugacauaa

SEQ ID NO: 1506830 - RNA, 22 nt, Human
gacuaucuaaauguugaaagau

SEQ ID NO: 1506831 - RNA, 23 nt, Human
gacuuuucuuucagccaagaauu

SEQ ID NO: 1506832 - RNA, 21 nt, Human
gacuuuucuuuguggcuuccu

SEQ ID NO: 1506833 - RNA, 12 nt, Human
gagaaggaagcc

SEQ ID NO: 1506834 - RNA, 16 nt, Human
gagaagcggcuggcag

SEQ ID NO: 1506835 - RNA, 13 nt, Human
gagaagcggcugg

SEQ ID NO: 1506836 - RNA, 15 nt, Human
gagaagcggcuggca

SEQ ID NO: 1506837 - RNA, 21 nt, Human
gagacccugucucaaaaaaag

SEQ ID NO: 1506838 - RNA, 22 nt, Human
gagacguuuuuggaagaguagu

SEQ ID NO: 1506839 - RNA, 15 nt, Human
gagaaucacuugaac

SEQ ID NO: 1506840 - RNA, 14 nt, Human
gagaaucacuugaa

SEQ ID NO: 1506841 - RNA, 21 nt, Human
gagauugcaccacugcacucc

SEQ ID NO: 1506842 - RNA, 18 nt, Human
gagauugcaccacugcac

SEQ ID NO: 1506843 - RNA, 23 nt, Human
gagauuucaucugcucuccuucc

SEQ ID NO: 1506844 - RNA, 13 nt, Human
gagauuuacaacu

SEQ ID NO: 1506845 - RNA, 13 nt, Human
gagauuucaucug

SEQ ID NO: 1506846 - RNA, 17 nt, Human
gagauuucaucugcucu

SEQ ID NO: 1506847 - RNA, 19 nt, Human
gagauuucaucugcucucc

SEQ ID NO: 1506848 - RNA, 20 nt, Human
gagauuucaucugcucuccu

SEQ ID NO: 1506849 - RNA, 21 nt, Human
gagauuucaucugcucuccuu

SEQ ID NO: 1506850 - RNA, 22 nt, Human
gagauuucaucugcucuccuuc

SEQ ID NO: 1506851 - RNA, 21 nt, Human
gagaugaugccaugggcccuc

SEQ ID NO: 1506852 - RNA, 22 nt, Human
gagaggcauccaguaucuugaa

SEQ ID NO: 1506853 - RNA, 14 nt, Human
gagaggcauccagu

SEQ ID NO: 1506854 - RNA, 17 nt, Human
gagacuccugcaggcag

SEQ ID NO: 1506855 - RNA, 18 nt, Human
gagacuccugcaggcagc

SEQ ID NO: 1506856 - RNA, 15 nt, Human
gagacuccugcaggc

SEQ ID NO: 1506857 - RNA, 16 nt, Human
gagacuccugcaggca

SEQ ID NO: 1506858 - RNA, 18 nt, Human
gagcugggugucaagagg

SEQ ID NO: 1506859 - RNA, 22 nt, Human
gagccuugaacuuugaccucug

SEQ ID NO: 1506860 - RNA, 13 nt, Human
gagccccgaggcc

SEQ ID NO: 1506861 - RNA, 14 nt, Human
gagccuuccagggg

SEQ ID NO: 1506862 - RNA, 15 nt, Human
gagccuuccaggggu

SEQ ID NO: 1506863 - RNA, 16 nt, Human
gagccuuccaggggug

SEQ ID NO: 1506864 - RNA, 17 nt, Human
gagccuuccaggggugg

SEQ ID NO: 1506865 - RNA, 13 nt, Human
gagcgacagugag

SEQ ID NO: 1506866 - RNA, 18 nt, Human
gagcggagaaaggaaggg

SEQ ID NO: 1506867 - RNA, 21 nt, Human
gagcggagaaaggaagggcug

SEQ ID NO: 1506868 - RNA, 21 nt, Human
gagcugccuguucagcuccag

SEQ ID NO: 1506869 - RNA, 22 nt, Human
gagcugccuguucagcuccagc

SEQ ID NO: 1506870 - RNA, 13 nt, Human
gagcaucaggcca

SEQ ID NO: 1506871 - RNA, 22 nt, Human
gagcaugccuggauggggcugc

SEQ ID NO: 1506872 - RNA, 12 nt, Human
gagcaucaggcc

SEQ ID NO: 1506873 - RNA, 21 nt, Human
gagcagggcucagcggggaca

SEQ ID NO: 1506874 - RNA, 14 nt, Human
gagcagggcucagc

SEQ ID NO: 1506875 - RNA, 22 nt, Human
gccaugugcuaguaauuggaaa

SEQ ID NO: 1506876 - RNA, 14 nt, Human
gccaugugccaggu

SEQ ID NO: 1506877 - RNA, 13 nt, Human
gcccaggcagguc

SEQ ID NO: 1506878 - RNA, 14 nt, Human
gcccaggcaggucu

SEQ ID NO: 1506879 - RNA, 16 nt, Human
gcccaggcaggucuug

SEQ ID NO: 1506880 - RNA, 15 nt, Human
gcccaggccccugcc

SEQ ID NO: 1506881 - RNA, 13 nt, Human
gcccaggccccug

SEQ ID NO: 1506882 - RNA, 17 nt, Human
gcccaggccccugccac

SEQ ID NO: 1506883 - RNA, 18 nt, Human
gcccaggccccugccacc

SEQ ID NO: 1506884 - RNA, 22 nt, Human
gccccugcugguucaggguugg

SEQ ID NO: 1506885 - RNA, 15 nt, Human
gccccuggaugcagc

SEQ ID NO: 1506886 - RNA, 16 nt, Human
gccauaugaaaaggcu

SEQ ID NO: 1506887 - RNA, 22 nt, Human
gccaguuggucccccuuccaug

SEQ ID NO: 1506888 - RNA, 23 nt, Human
gccaguuggucccccuuccaugg

SEQ ID NO: 1506889 - RNA, 16 nt, Human
gccaguuggucccccu

SEQ ID NO: 1506890 - RNA, 18 nt, Human
gccaguuggucccccuuc

SEQ ID NO: 1506891 - RNA, 20 nt, Human
gccaguuggucccccuucca

SEQ ID NO: 1506892 - RNA, 21 nt, Human
gccaguuggucccccuuccau

SEQ ID NO: 1506893 - RNA, 13 nt, Human
gccaguugguccc

SEQ ID NO: 1506894 - RNA, 22 nt, Human
gccaguuauggcuauaggugcu

SEQ ID NO: 1506895 - RNA, 21 nt, Human
gccaguggccuuccccagcau

SEQ ID NO: 1506896 - RNA, 13 nt, Human
gccagugugacaa

SEQ ID NO: 1506897 - RNA, 13 nt, Human
gccaggccacaag

SEQ ID NO: 1506898 - RNA, 18 nt, Human
gccaggccacaagacccu

SEQ ID NO: 1506899 - RNA, 21 nt, Human
gccaggccacaagacccuugu

SEQ ID NO: 1506900 - RNA, 15 nt, Human
gccaggccagaggga

SEQ ID NO: 1506901 - RNA, 22 nt, Human
gccaggccagagggagugacag

SEQ ID NO: 1506902 - RNA, 23 nt, Human
gccaggccacaagacccuugugg

SEQ ID NO: 1506903 - RNA, 13 nt, Human
gccaggcccucug

SEQ ID NO: 1506904 - RNA, 14 nt, Human
gccaggcccucugc

SEQ ID NO: 1506905 - RNA, 15 nt, Human
gccaggcccucugcc

SEQ ID NO: 1506906 - RNA, 12 nt, Human
gccuccagggcu

SEQ ID NO: 1506907 - RNA, 13 nt, Human
gccuccagggcug

SEQ ID NO: 1506908 - RNA, 14 nt, Human
gccuccagggcugg

SEQ ID NO: 1506909 - RNA, 19 nt, Human
gccuccuuugugaggaagc

SEQ ID NO: 1506910 - RNA, 20 nt, Human
gccuccuuugugaggaagcc

SEQ ID NO: 1506911 - RNA, 21 nt, Human
gccuccuuugugaggaagccg

SEQ ID NO: 1506912 - RNA, 16 nt, Human
gccuccauccugaggc

SEQ ID NO: 1506913 - RNA, 20 nt, Human
gccuccauccugaggcucca

SEQ ID NO: 1506914 - RNA, 16 nt, Human
gccuccagggcuggac

SEQ ID NO: 1506915 - RNA, 17 nt, Human
gccuccagggcuggacu

SEQ ID NO: 1506916 - RNA, 18 nt, Human
gccuccagggcuggacug

SEQ ID NO: 1506917 - RNA, 19 nt, Human
gccuccagggcuggacuga

SEQ ID NO: 1506918 - RNA, 20 nt, Human
gccuccagggcuggacugag

SEQ ID NO: 1506919 - RNA, 13 nt, Human
gccugcuccagcu

SEQ ID NO: 1506920 - RNA, 17 nt, Human
gccugcuaauuccccag

SEQ ID NO: 1506921 - RNA, 23 nt, Human
gccugcuaauuccccagauugca

SEQ ID NO: 1506922 - RNA, 15 nt, Human
gcuacugucagcucc

SEQ ID NO: 1506923 - RNA, 19 nt, Human
gcuacuguccuacccaccc

SEQ ID NO: 1506924 - RNA, 20 nt, Human
gcuacuguccuacccacccu

SEQ ID NO: 1506925 - RNA, 17 nt, Human
gcuacuugggaggcuga

SEQ ID NO: 1506926 - RNA, 16 nt, Human
gcuaauuuuucauuuu

SEQ ID NO: 1506927 - RNA, 17 nt, Human
gcguuucuaugacacau

SEQ ID NO: 1506928 - RNA, 17 nt, Human
gcuacaaaaacacagca

SEQ ID NO: 1506929 - RNA, 18 nt, Human
gcuacaaaaacacagcaa

SEQ ID NO: 1506930 - RNA, 19 nt, Human
gcuacaaaaacacagcaag

SEQ ID NO: 1506931 - RNA, 19 nt, Human
gcgugcacacaccagagcc

SEQ ID NO: 1506932 - RNA, 18 nt, Human
gcgugcacacaccagagc

SEQ ID NO: 1506933 - RNA, 14 nt, Human
gcgugcacacacca

SEQ ID NO: 1506934 - RNA, 20 nt, Human
gcgugguggacaugcacagc

SEQ ID NO: 1506935 - RNA, 16 nt, Human
gcggccuuuggcuuca

SEQ ID NO: 1506936 - RNA, 13 nt, Human
gcgauucuucugc

SEQ ID NO: 1506937 - RNA, 15 nt, Human
gcgagcccugguggc

SEQ ID NO: 1506938 - RNA, 17 nt, Human
gcgauucuucugcuuca

SEQ ID NO: 1506939 - RNA, 14 nt, Human
gcgauucuucugcu

SEQ ID NO: 1506940 - RNA, 22 nt, Human
gcuuuuuucucugauacagaaa

SEQ ID NO: 1506941 - RNA, 18 nt, Human
ggaaaauuuuaaaaauac

SEQ ID NO: 1506942 - RNA, 16 nt, Human
ggaaacccagcucugg

SEQ ID NO: 1506943 - RNA, 12 nt, Human
gcuuuugugcau

SEQ ID NO: 1506944 - RNA, 15 nt, Human
gcuuuuggucugugu

SEQ ID NO: 1506945 - RNA, 18 nt, Human
gcuuuugucuaugggacu

SEQ ID NO: 1506946 - RNA, 14 nt, Human
gcuuugaucccuuc

SEQ ID NO: 1506947 - RNA, 17 nt, Human
gcuuugaucccuucuua

SEQ ID NO: 1506948 - RNA, 21 nt, Human
ggaagaacggggcucuucuca

SEQ ID NO: 1506949 - RNA, 14 nt, Human
ggaagacaauguga

SEQ ID NO: 1506950 - RNA, 16 nt, Human
ggaagacaaugugaaa

SEQ ID NO: 1506951 - RNA, 13 nt, Human
ggaacaccuccuc

SEQ ID NO: 1506952 - RNA, 23 nt, Human
ggaacaaggcaaggcugucaauu

SEQ ID NO: 1506953 - RNA, 15 nt, Human
ggaacacuccuucac

SEQ ID NO: 1506954 - RNA, 19 nt, Human
ggaacacuccuucacagau

SEQ ID NO: 1506955 - RNA, 14 nt, Human
ggaaaugggcagag

SEQ ID NO: 1506956 - RNA, 16 nt, Human
ggaaaugggcagagca

SEQ ID NO: 1506957 - RNA, 17 nt, Human
ggaaaugggcagagcag

SEQ ID NO: 1506958 - RNA, 18 nt, Human
ggaaaugggcagagcaga

SEQ ID NO: 1506959 - RNA, 22 nt, Human
ggaaaugggcagagcagagacc

SEQ ID NO: 1506960 - RNA, 15 nt, Human
ggaacaaggcaaggc

SEQ ID NO: 1506961 - RNA, 17 nt, Human
ggaacaaggcaaggcug

SEQ ID NO: 1506962 - RNA, 21 nt, Human
ggaacaaggcaaggcugucaa

SEQ ID NO: 1506963 - RNA, 12 nt, Human
ggaagacuuugg

SEQ ID NO: 1506964 - RNA, 22 nt, Human
ggaagacaaugugaaaagaaaa

SEQ ID NO: 1506965 - RNA, 17 nt, Human
ggaagacuucaucccuc

SEQ ID NO: 1506966 - RNA, 20 nt, Human
ggaagacuucaucccucugg

SEQ ID NO: 1506967 - RNA, 19 nt, Human
gcuuccuggcaauagucaa

SEQ ID NO: 1506968 - RNA, 23 nt, Human
gcuuccagugaggcucugcccuu

SEQ ID NO: 1506969 - RNA, 15 nt, Human
gcuucuucagagacu

SEQ ID NO: 1506970 - RNA, 12 nt, Human
gcuucuucagag

SEQ ID NO: 1506971 - RNA, 18 nt, Human
gcuuguaaauagcucagg

SEQ ID NO: 1506972 - RNA, 19 nt, Human
gcuuguaaauagcucaggu

SEQ ID NO: 1506973 - RNA, 23 nt, Human
gcuugaccgugaggccagagaca

SEQ ID NO: 1506974 - RNA, 18 nt, Human
gcuugaccuuuaagagaa

SEQ ID NO: 1506975 - RNA, 16 nt, Human
gcuugaccgugaggcc

SEQ ID NO: 1506976 - RNA, 22 nt, Human
gcuugaccuuuaagagaaauga

SEQ ID NO: 1506977 - RNA, 17 nt, Human
gcuuguaaauagcucag

SEQ ID NO: 1506978 - RNA, 18 nt, Human
gcuucaaggauccugagc

SEQ ID NO: 1506979 - RNA, 14 nt, Human
gcuucaaggauccu

SEQ ID NO: 1506980 - RNA, 14 nt, Human
gcuucaguggcagc

SEQ ID NO: 1506981 - RNA, 15 nt, Human
gcuucaguggcagcu

SEQ ID NO: 1506982 - RNA, 13 nt, Human
gcuguuggcuggg

SEQ ID NO: 1506983 - RNA, 14 nt, Human
gcuguuggcugggg

SEQ ID NO: 1506984 - RNA, 14 nt, Human
gcugugccacaggc

SEQ ID NO: 1506985 - RNA, 15 nt, Human
gcugugccacaggcu

SEQ ID NO: 1506986 - RNA, 20 nt, Human
gcugugccacaggcuuaggg

SEQ ID NO: 1506987 - RNA, 19 nt, Human
gcugugccacaggcuuagg

SEQ ID NO: 1506988 - RNA, 12 nt, Human
gcuguauuuuaa

SEQ ID NO: 1506989 - RNA, 13 nt, Human
gcuguauuuuaaa

SEQ ID NO: 1506990 - RNA, 13 nt, Human
gcugugccacagg

SEQ ID NO: 1506991 - RNA, 20 nt, Human
gcugguucggauuuggggug

SEQ ID NO: 1506992 - RNA, 21 nt, Human
gcugguucggauuuggggugg

SEQ ID NO: 1506993 - RNA, 23 nt, Human
gcugguucaggguuggccccugc

SEQ ID NO: 1506994 - RNA, 14 nt, Human
gcuggagcucugcc

SEQ ID NO: 1506995 - RNA, 15 nt, Human
gcuggagugugaggg

SEQ ID NO: 1506996 - RNA, 21 nt, Human
gcuggagugugaggguccugc

SEQ ID NO: 1506997 - RNA, 17 nt, Human
gcugaauacagaggcaa

SEQ ID NO: 1506998 - RNA, 22 nt, Human
gcugaauacagaggcaacugca

SEQ ID NO: 1506999 - RNA, 13 nt, Human
gcugacagacaca

SEQ ID NO: 1507000 - RNA, 14 nt, Human
gcucuguccuggga

SEQ ID NO: 1507001 - RNA, 16 nt, Human
gcugaaacaacaaaua

SEQ ID NO: 1507002 - RNA, 21 nt, Human
gcucugcccauccugccccug

SEQ ID NO: 1507003 - RNA, 23 nt, Human
gcucugaucauccacugugccau

SEQ ID NO: 1507004 - RNA, 15 nt, Human
gcucugcccauccug

SEQ ID NO: 1507005 - RNA, 21 nt, Human
gcucugaucauccacugugcc

SEQ ID NO: 1507006 - RNA, 22 nt, Human
gcucugaucauccacugugcca

SEQ ID NO: 1507007 - RNA, 20 nt, Human
gcucugaucauccacugugc

SEQ ID NO: 1507008 - RNA, 17 nt, Human
gcucucaggccagcugc

SEQ ID NO: 1507009 - RNA, 18 nt, Human
gcucucaggccagcugcu

SEQ ID NO: 1507010 - RNA, 19 nt, Human
gcucucaggccagcugcuu

SEQ ID NO: 1507011 - RNA, 20 nt, Human
gcucucaggccagcugcuug

SEQ ID NO: 1507012 - RNA, 18 nt, Human
gcucucaaguuaucaggg

SEQ ID NO: 1507013 - RNA, 19 nt, Human
gcucuacugaggugcuaug

SEQ ID NO: 1507014 - RNA, 16 nt, Human
gcuccucuccccagca

SEQ ID NO: 1507015 - RNA, 19 nt, Human
gcuccucuccccagcaagu

SEQ ID NO: 1507016 - RNA, 15 nt, Human
gcuccucuccccagc

SEQ ID NO: 1507017 - RNA, 17 nt, Human
gcuccagcucaccagcc

SEQ ID NO: 1507018 - RNA, 13 nt, Human
gcuccagcucacc

SEQ ID NO: 1507019 - RNA, 14 nt, Human
gcuccagcucacca

SEQ ID NO: 1507020 - RNA, 23 nt, Human
gcuccagacacauguccaagaag

SEQ ID NO: 1507021 - RNA, 18 nt, Human
gcuccagacacaugucca

SEQ ID NO: 1507022 - RNA, 21 nt, Human
gcuccagacacauguccaaga

SEQ ID NO: 1507023 - RNA, 20 nt, Human
gcuccacuuggucugugaga

SEQ ID NO: 1507024 - RNA, 9 nt, Human
gcuccagac

SEQ ID NO: 1507025 - RNA, 17 nt, Human
gcugccccuggcagccc

SEQ ID NO: 1507026 - RNA, 17 nt, Human
gcugccauccagguuca

SEQ ID NO: 1507027 - RNA, 13 nt, Human
gcugccccuggca

SEQ ID NO: 1507028 - RNA, 15 nt, Human
gcugccccuggcagc

SEQ ID NO: 1507029 - RNA, 16 nt, Human
gcugccccuggcagcc

SEQ ID NO: 1507030 - RNA, 12 nt, Human
gcugcugacagu

SEQ ID NO: 1507031 - RNA, 12 nt, Human
gcugccauccag

SEQ ID NO: 1507032 - RNA, 13 nt, Human
gcugccauccagg

SEQ ID NO: 1507033 - RNA, 16 nt, Human
gcugcacccucaggca

SEQ ID NO: 1507034 - RNA, 13 nt, Human
gcugcacccucag

SEQ ID NO: 1507035 - RNA, 15 nt, Human
gcugcacccucaggc

SEQ ID NO: 1507036 - RNA, 15 nt, Human
aaauaauuuuuauau

SEQ ID NO: 1507037 - RNA, 13 nt, Human
aaauaaugugaaa

SEQ ID NO: 1507038 - RNA, 18 nt, Human
aaauaauuuuuauauuug

SEQ ID NO: 1507039 - RNA, 20 nt, Human
aaauaauuuuuauauuugaa

SEQ ID NO: 1507040 - RNA, 12 nt, Human
aaauaaugugaa

SEQ ID NO: 1507041 - RNA, 12 nt, Human
aaauaaugucuc

SEQ ID NO: 1507042 - RNA, 13 nt, Human
aaauaaugucucu

SEQ ID NO: 1507043 - RNA, 17 nt, Human
guaacaaugaagauaaa

SEQ ID NO: 1507044 - RNA, 14 nt, Human
aaauaaugugaaac

SEQ ID NO: 1507045 - RNA, 12 nt, Human
guaaaaugugaa

SEQ ID NO: 1507046 - RNA, 19 nt, Human
guaaaaugugaagugaaug

SEQ ID NO: 1507047 - RNA, 20 nt, Human
guaaaaugugaagugaauga

SEQ ID NO: 1507048 - RNA, 22 nt, Human
guaaaaugugaagugaaugaaa

SEQ ID NO: 1507049 - RNA, 20 nt, Human
gguuuggacaaaauggaaua

SEQ ID NO: 1507050 - RNA, 14 nt, Human
gguuugcaaggaag

SEQ ID NO: 1507051 - RNA, 15 nt, Human
gguuugaauauaaac

SEQ ID NO: 1507052 - RNA, 18 nt, Human
gguuugaauauaaacacu

SEQ ID NO: 1507053 - RNA, 23 nt, Human
aaaguuauugauaaguucauaca

SEQ ID NO: 1507054 - RNA, 16 nt, Human
aaaguugaauuuuaca

SEQ ID NO: 1507055 - RNA, 21 nt, Human
aaaguuucucuuuucaaaaca

SEQ ID NO: 1507056 - RNA, 23 nt, Human
aaaguuucucuuuucaaaacauu

SEQ ID NO: 1507057 - RNA, 13 nt, Human
gguuucagaaaug

SEQ ID NO: 1507058 - RNA, 12 nt, Human
gguuucagaaau

SEQ ID NO: 1507059 - RNA, 13 nt, Human
gguuucugaaaau

SEQ ID NO: 1507060 - RNA, 15 nt, Human
gguuucagaaaugug

SEQ ID NO: 1507061 - RNA, 14 nt, Human
gguuucagaaaugu

SEQ ID NO: 1507062 - RNA, 12 nt, Human
gguucucaucuu

SEQ ID NO: 1507063 - RNA, 16 nt, Human
gguuuagaaagcuugc

SEQ ID NO: 1507064 - RNA, 12 nt, Human
gguguggagaag

SEQ ID NO: 1507065 - RNA, 12 nt, Human
gguguggaagag

SEQ ID NO: 1507066 - RNA, 21 nt, Human
ggugugcggccuuuggcuuca

SEQ ID NO: 1507067 - RNA, 13 nt, Human
ggugugcucugau

SEQ ID NO: 1507068 - RNA, 22 nt, Human
gguucaggguuggccccugccc

SEQ ID NO: 1507069 - RNA, 18 nt, Human
gguucaggguuggccccu

SEQ ID NO: 1507070 - RNA, 21 nt, Human
gguucaggguuggccccugcc

SEQ ID NO: 1507071 - RNA, 22 nt, Human
gguucccuuugacgccauccca

SEQ ID NO: 1507072 - RNA, 21 nt, Human
gguucccuuugacgccauccc

SEQ ID NO: 1507073 - RNA, 20 nt, Human
ggugggaggauugcuugagc

SEQ ID NO: 1507074 - RNA, 14 nt, Human
ggugggauccucca

SEQ ID NO: 1507075 - RNA, 15 nt, Human
ggugggauccuccag

SEQ ID NO: 1507076 - RNA, 19 nt, Human
ggugggauccuccaggugc

SEQ ID NO: 1507077 - RNA, 13 nt, Human
gguggggcagcuu

SEQ ID NO: 1507078 - RNA, 17 nt, Human
gguggggcagcuugagg

SEQ ID NO: 1507079 - RNA, 15 nt, Human
gguggggucacucug

SEQ ID NO: 1507080 - RNA, 23 nt, Human
gguggggucacucuggcagcuca

SEQ ID NO: 1507081 - RNA, 13 nt, Human
ggugucgggcaug

SEQ ID NO: 1507082 - RNA, 16 nt, Human
ggugucgggcaugaca

SEQ ID NO: 1507083 - RNA, 16 nt, Human
ggugugacugaauuuc

SEQ ID NO: 1507084 - RNA, 19 nt, Human
ggugucuccaaccccccag

SEQ ID NO: 1507085 - RNA, 23 nt, Human
ggugucuccaaccccccagcacu

SEQ ID NO: 1507086 - RNA, 16 nt, Human
ggugugaccacugcag

SEQ ID NO: 1507087 - RNA, 18 nt, Human
ggugugagucaccaagcc

SEQ ID NO: 1507088 - RNA, 14 nt, Human
ggucggaaaacaug

SEQ ID NO: 1507089 - RNA, 17 nt, Human
ggucuacacugugcuga

SEQ ID NO: 1507090 - RNA, 13 nt, Human
ggucggaaaacau

SEQ ID NO: 1507091 - RNA, 14 nt, Human
gguccuggugcccu

SEQ ID NO: 1507092 - RNA, 24 nt, Human
gguccuggugcccuggaugcccag

SEQ ID NO: 1507093 - RNA, 12 nt, Human
gguccuggugcc

SEQ ID NO: 1507094 - RNA, 13 nt, Human
gguccuggugccc

SEQ ID NO: 1507095 - RNA, 17 nt, Human
aaagacuauucaaacag

SEQ ID NO: 1507096 - RNA, 15 nt, Human
aaagacuauucaaac

SEQ ID NO: 1507097 - RNA, 13 nt, Human
aaagcaaaggaga

SEQ ID NO: 1507098 - RNA, 14 nt, Human
aaagauuuucagaa

SEQ ID NO: 1507099 - RNA, 13 nt, Human
aaagauuuucaga

SEQ ID NO: 1507100 - RNA, 21 nt, Human
gguccugcugcaguugccagu

SEQ ID NO: 1507101 - RNA, 23 nt, Human
gguccugcugcaguugccaguca

SEQ ID NO: 1507102 - RNA, 15 nt, Human
ggugccaguuauggc

SEQ ID NO: 1507103 - RNA, 21 nt, Human
ggucuugaacuccuggccuca

SEQ ID NO: 1507104 - RNA, 16 nt, Human
ggugcacaagcuccaa

SEQ ID NO: 1507105 - RNA, 18 nt, Human
ggugcaaugaccuuucaa

SEQ ID NO: 1507106 - RNA, 19 nt, Human
ggugcaaugaccuuucaau

SEQ ID NO: 1507107 - RNA, 20 nt, Human
ggugcaaugaccuuucaaua

SEQ ID NO: 1507108 - RNA, 16 nt, Human
aaagcaucacuuggga

SEQ ID NO: 1507109 - RNA, 17 nt, Human
aaagcagggacuugaac

SEQ ID NO: 1507110 - RNA, 14 nt, Human
gguggaugccuggu

SEQ ID NO: 1507111 - RNA, 21 nt, Human
gguggaugccugguggcagcu

SEQ ID NO: 1507112 - RNA, 22 nt, Human
aaagcagcguuucuaugacaca

SEQ ID NO: 1507113 - RNA, 18 nt, Human
aaagcagcguuucuauga

SEQ ID NO: 1507114 - RNA, 16 nt, Human
aaagcagcguuucuau

SEQ ID NO: 1507115 - RNA, 21 nt, Human
gguaugaccuucuaggaagcu

SEQ ID NO: 1507116 - RNA, 22 nt, Human
gguaugaucacggcucacugca

SEQ ID NO: 1507117 - RNA, 14 nt, Human
gguaugcaaucaaa

SEQ ID NO: 1507118 - RNA, 19 nt, Human
gguccacccaggagccccg

SEQ ID NO: 1507119 - RNA, 17 nt, Human
gguccacccaggagccc

SEQ ID NO: 1507120 - RNA, 12 nt, Human
gguccacccagg

SEQ ID NO: 1507121 - RNA, 13 nt, Human
gguccacccagga

SEQ ID NO: 1507122 - RNA, 15 nt, Human
gguccacccaggagc

SEQ ID NO: 1507123 - RNA, 16 nt, Human
gguccacccaggagcc

SEQ ID NO: 1507124 - RNA, 17 nt, Human
aaagacuaucuaaaugu

SEQ ID NO: 1507125 - RNA, 14 nt, Human
aaagacuauucaaa

SEQ ID NO: 1507126 - RNA, 12 nt, Human
aaacuuuacuau

SEQ ID NO: 1507127 - RNA, 18 nt, Human
aaacuuuacuauggcccu

SEQ ID NO: 1507128 - RNA, 22 nt, Human
aaacuuuaccuuuuuuauacau

SEQ ID NO: 1507129 - RNA, 17 nt, Human
aaacuuuaccuuuuuua

SEQ ID NO: 1507130 - RNA, 15 nt, Human
gguccauagagagca

SEQ ID NO: 1507131 - RNA, 12 nt, Human
ggguggugaccu

SEQ ID NO: 1507132 - RNA, 17 nt, Human
ggguguggcgcagcaua

SEQ ID NO: 1507133 - RNA, 19 nt, Human
ggguggcaccagcagccug

SEQ ID NO: 1507134 - RNA, 20 nt, Human
ggguggggaccucaggccug

SEQ ID NO: 1507135 - RNA, 13 nt, Human
ggguggaugccug

SEQ ID NO: 1507136 - RNA, 17 nt, Human
ggguggaugccuggugg

SEQ ID NO: 1507137 - RNA, 15 nt, Human
ggguggcaccagcag

SEQ ID NO: 1507138 - RNA, 18 nt, Human
gguaacuagggaagauaa

SEQ ID NO: 1507139 - RNA, 14 nt, Human
gguaacaggcagau

SEQ ID NO: 1507140 - RNA, 20 nt, Human
gguaacaggcagauacagga

SEQ ID NO: 1507141 - RNA, 20 nt, Human
ggguuuuauuguuuaaaauc

SEQ ID NO: 1507142 - RNA, 17 nt, Human
ggguuucuaaagcugcc

SEQ ID NO: 1507143 - RNA, 20 nt, Human
aaacaagcacuaaacaaaga

SEQ ID NO: 1507144 - RNA, 16 nt, Human
aaacacauuuuucuua

SEQ ID NO: 1507145 - RNA, 20 nt, Human
aaacaagaccacguuucuaa

SEQ ID NO: 1507146 - RNA, 12 nt, Human
ggggacagcucc

SEQ ID NO: 1507147 - RNA, 14 nt, Human
ggggacagcuccuu

SEQ ID NO: 1507148 - RNA, 20 nt, Human
ggggacagcuccuucugucc

SEQ ID NO: 1507149 - RNA, 16 nt, Human
aaacaugcuacacacu

SEQ ID NO: 1507150 - RNA, 15 nt, Human
aaaauuucuauuaaa

SEQ ID NO: 1507151 - RNA, 15 nt, Human
aaaaugugauaugua

SEQ ID NO: 1507152 - RNA, 12 nt, Human
aaaaugugaagu

SEQ ID NO: 1507153 - RNA, 22 nt, Human
gggcuggguucuacccaggugc

SEQ ID NO: 1507154 - RNA, 12 nt, Human
gggcugggcaga

SEQ ID NO: 1507155 - RNA, 20 nt, Human
gggcuggguucuacccaggu

SEQ ID NO: 1507156 - RNA, 10 nt, Human
gggcucagca

SEQ ID NO: 1507157 - RNA, 22 nt, Human
gggcugcaccggcuggccuggc

SEQ ID NO: 1507158 - RNA, 18 nt, Human
gggcucagcaaaagaugc

SEQ ID NO: 1507159 - RNA, 21 nt, Human
gggcugcaugcgggcuuccuc

SEQ ID NO: 1507160 - RNA, 18 nt, Human
gggcugcaugcgggcuuc

SEQ ID NO: 1507161 - RNA, 15 nt, Human
gggcgggaggauguu

SEQ ID NO: 1507162 - RNA, 15 nt, Human
gggccuccugugugu

SEQ ID NO: 1507163 - RNA, 13 nt, Human
gggccuccugugu

SEQ ID NO: 1507164 - RNA, 20 nt, Human
gggccucuuaugggcugggu

SEQ ID NO: 1507165 - RNA, 13 nt, Human
gggccaugccucc

SEQ ID NO: 1507166 - RNA, 23 nt, Human
gggccaugccuccucaggagccg

SEQ ID NO: 1507167 - RNA, 22 nt, Human
gggccaugccuccucaggagcc

SEQ ID NO: 1507168 - RNA, 14 nt, Human
gggccaguuggucc

SEQ ID NO: 1507169 - RNA, 18 nt, Human
gggccaguuggucccccu

SEQ ID NO: 1507170 - RNA, 22 nt, Human
gggccaguuggucccccuucca

SEQ ID NO: 1507171 - RNA, 23 nt, Human
gggccaguuggucccccuuccau

SEQ ID NO: 1507172 - RNA, 12 nt, Human
gggccaggagcc

SEQ ID NO: 1507173 - RNA, 11 nt, Human
gggccaggagc

SEQ ID NO: 1507174 - RNA, 19 nt, Human
aaaaguauguuagugcaaa

SEQ ID NO: 1507175 - RNA, 16 nt, Human
aaaaucuguggugguc

SEQ ID NO: 1507176 - RNA, 14 nt, Human
aaaaugagccuggc

SEQ ID NO: 1507177 - RNA, 21 nt, Human
aaaaugagccuggcaagaaug

SEQ ID NO: 1507178 - RNA, 14 nt, Human
gggagggcuccaga

SEQ ID NO: 1507179 - RNA, 15 nt, Human
gggagggcuccagac

SEQ ID NO: 1507180 - RNA, 17 nt, Human
gggagggcuccagacac

SEQ ID NO: 1507181 - RNA, 18 nt, Human
gggagggcuccagacaca

SEQ ID NO: 1507182 - RNA, 17 nt, Human
gggaggucgaggcagga

SEQ ID NO: 1507183 - RNA, 18 nt, Human
gggaggucgaggcaggag

SEQ ID NO: 1507184 - RNA, 19 nt, Human
gggaggucgaggcaggagg

SEQ ID NO: 1507185 - RNA, 19 nt, Human
aaaagguaugcaaucaaau

SEQ ID NO: 1507186 - RNA, 15 nt, Human
gggcaggccagagcu

SEQ ID NO: 1507187 - RNA, 16 nt, Human
gggauuguaaaauggu

SEQ ID NO: 1507188 - RNA, 17 nt, Human
gggauuguaaaauggug

SEQ ID NO: 1507189 - RNA, 15 nt, Human
gggauuacaggugug

SEQ ID NO: 1507190 - RNA, 23 nt, Human
gggcagagcagagaccaucccug

SEQ ID NO: 1507191 - RNA, 17 nt, Human
gggcagagcagagacca

SEQ ID NO: 1507192 - RNA, 22 nt, Human
gggcagagcagagaccaucccu

SEQ ID NO: 1507193 - RNA, 16 nt, Human
gggcaacccccagccu

SEQ ID NO: 1507194 - RNA, 18 nt, Human
gggcaacccccagccugc

SEQ ID NO: 1507195 - RNA, 20 nt, Human
gggcaacccccagccugcua

SEQ ID NO: 1507196 - RNA, 16 nt, Human
gggcagagcagagacc

SEQ ID NO: 1507197 - RNA, 13 nt, Human
aaaaauauauuua

SEQ ID NO: 1507198 - RNA, 15 nt, Human
aaaaauauauuuaau

SEQ ID NO: 1507199 - RNA, 19 nt, Human
aaaaauauauuuaaugaua

SEQ ID NO: 1507200 - RNA, 20 nt, Human
gggacauuugcucauggaau

SEQ ID NO: 1507201 - RNA, 21 nt, Human
gggacauuugcucauggaauu

SEQ ID NO: 1507202 - RNA, 21 nt, Human
gggacagcuccuucuguccua

SEQ ID NO: 1507203 - RNA, 15 nt, Human
gggacaggaccccag

SEQ ID NO: 1507204 - RNA, 17 nt, Human
gggacaggaccccagcu

SEQ ID NO: 1507205 - RNA, 19 nt, Human
gggacaggaccccagcucu

SEQ ID NO: 1507206 - RNA, 21 nt, Human
gggacaggaccccagcucugc

SEQ ID NO: 1507207 - RNA, 22 nt, Human
gggacaggaccccagcucugcg

SEQ ID NO: 1507208 - RNA, 16 nt, Human
gggaaggauacaaaag

SEQ ID NO: 1507209 - RNA, 13 nt, Human
gggaaggauacaa

SEQ ID NO: 1507210 - RNA, 13 nt, Human
gggacagaggggg

SEQ ID NO: 1507211 - RNA, 22 nt, Human
gggacagaggggguggccuccc

SEQ ID NO: 1507212 - RNA, 23 nt, Human
gggacagaggggguggccuccca

SEQ ID NO: 1507213 - RNA, 14 nt, Human
aaaaccacagcagu

SEQ ID NO: 1507214 - RNA, 13 nt, Human
aaaaccacagcag

SEQ ID NO: 1507215 - RNA, 22 nt, Human
aaaacugcugacuguuuucucu

SEQ ID NO: 1507216 - RNA, 13 nt, Human
aaaacucauuuuu

SEQ ID NO: 1507217 - RNA, 23 nt, Human
aaaacugcugacuguuuucucuu

SEQ ID NO: 1507218 - RNA, 13 nt, Human
aaaagaugcuucu

SEQ ID NO: 1507219 - RNA, 12 nt, Human
aaaaccacagca

SEQ ID NO: 1507220 - RNA, 15 nt, Human
aaaacaugcuacaca

SEQ ID NO: 1507221 - RNA, 22 nt, Human
aaaaauggaacauaaaauacaa

SEQ ID NO: 1507222 - RNA, 17 nt, Human
aaaaaucucaaauuucu

SEQ ID NO: 1507223 - RNA, 14 nt, Human
aaaaaucucaaauu

SEQ ID NO: 1507224 - RNA, 14 nt, Human
ggaguggccacaga

SEQ ID NO: 1507225 - RNA, 15 nt, Human
ggaguucugguuccu

SEQ ID NO: 1507226 - RNA, 16 nt, Human
ggauggggcugcaccg

SEQ ID NO: 1507227 - RNA, 18 nt, Human
ggauggauuuccagccaa

SEQ ID NO: 1507228 - RNA, 12 nt, Human
ggauggcaagau

SEQ ID NO: 1507229 - RNA, 15 nt, Human
ggauccuccaggugc

SEQ ID NO: 1507230 - RNA, 14 nt, Human
ggauccuccaggug

SEQ ID NO: 1507231 - RNA, 13 nt, Human
ggauccugagcca

SEQ ID NO: 1507232 - RNA, 14 nt, Human
ggauccugagccag

SEQ ID NO: 1507233 - RNA, 22 nt, Human
ggaucuucaucugacuaugaca

SEQ ID NO: 1507234 - RNA, 24 nt, Human
ggcacagaaaauggaagacagcuc

SEQ ID NO: 1507235 - RNA, 15 nt, Human
ggauguucugggaca

SEQ ID NO: 1507236 - RNA, 22 nt, Human
ggauguugaaaaaguucugcag

SEQ ID NO: 1507237 - RNA, 16 nt, Human
ggauguucugggacac

SEQ ID NO: 1507238 - RNA, 14 nt, Human
ggaggucgaggcag

SEQ ID NO: 1507239 - RNA, 14 nt, Human
ggaggugaccccag

SEQ ID NO: 1507240 - RNA, 20 nt, Human
ggaggucaaggcugcaguga

SEQ ID NO: 1507241 - RNA, 16 nt, Human
ggaggggggagguggg

SEQ ID NO: 1507242 - RNA, 12 nt, Human
ggaggccagccu

SEQ ID NO: 1507243 - RNA, 11 nt, Human
ggaggccagcc

SEQ ID NO: 1507244 - RNA, 20 nt, Human
ggaggaaggaaacccagcuc

SEQ ID NO: 1507245 - RNA, 23 nt, Human
ggaggaaggaaacccagcucugg

SEQ ID NO: 1507246 - RNA, 19 nt, Human
ggaggaaggaaacccagcu

SEQ ID NO: 1507247 - RNA, 16 nt, Human
ggagccccgaggccuu

SEQ ID NO: 1507248 - RNA, 22 nt, Human
ggagccccgaggccuucucuga

SEQ ID NO: 1507249 - RNA, 12 nt, Human
ggagcugccugu

SEQ ID NO: 1507250 - RNA, 22 nt, Human
ggagcugccuguucagcuccag

SEQ ID NO: 1507251 - RNA, 21 nt, Human
ggagcugccuguucagcucca

SEQ ID NO: 1507252 - RNA, 24 nt, Human
ggcacugcuuccagugaggcucug

SEQ ID NO: 1507253 - RNA, 15 nt, Human
ggcaccagcagccug

SEQ ID NO: 1507254 - RNA, 16 nt, Human
ggcaccagcagccugg

SEQ ID NO: 1507255 - RNA, 17 nt, Human
ggcagugggagcugccu

SEQ ID NO: 1507256 - RNA, 18 nt, Human
ggcagugggagcugccug

SEQ ID NO: 1507257 - RNA, 19 nt, Human
ggcagugggagcugccugu

SEQ ID NO: 1507258 - RNA, 18 nt, Human
ggcauccaguaucuugaa

SEQ ID NO: 1507259 - RNA, 15 nt, Human
ggcauauuuuucaca

SEQ ID NO: 1507260 - RNA, 17 nt, Human
ggcauauuuuucacaua

SEQ ID NO: 1507261 - RNA, 16 nt, Human
ggccaggcuggucuca

SEQ ID NO: 1507262 - RNA, 18 nt, Human
ggccaggcuggucucaaa

SEQ ID NO: 1507263 - RNA, 14 nt, Human
ggccaggcuggucu

SEQ ID NO: 1507264 - RNA, 21 nt, Human
ggccaaacucaccugccccuc

SEQ ID NO: 1507265 - RNA, 17 nt, Human
ggccaaacucaccugcc

SEQ ID NO: 1507266 - RNA, 22 nt, Human
ggccagagcuacccgcagaguu

SEQ ID NO: 1507267 - RNA, 16 nt, Human
ggccagugugacaagg

SEQ ID NO: 1507268 - RNA, 19 nt, Human
ggccaguggccuuccccag

SEQ ID NO: 1507269 - RNA, 22 nt, Human
ggccaguggccuuccccagcau

SEQ ID NO: 1507270 - RNA, 17 nt, Human
ggccaugccuccucagg

SEQ ID NO: 1507271 - RNA, 18 nt, Human
ggccaugccuccucagga

SEQ ID NO: 1507272 - RNA, 21 nt, Human
ggccaugccuccucaggagcc

SEQ ID NO: 1507273 - RNA, 16 nt, Human
ggcccuucucuccagc

SEQ ID NO: 1507274 - RNA, 17 nt, Human
ggcccuucucuccagcc

SEQ ID NO: 1507275 - RNA, 19 nt, Human
ggcccuucucuccagcccc

SEQ ID NO: 1507276 - RNA, 18 nt, Human
ggcccuucucuccagccc

SEQ ID NO: 1507277 - RNA, 23 nt, Human
ggcucagcaaaagaugcuucuca

SEQ ID NO: 1507278 - RNA, 23 nt, Human
ggcucagcggggacagcuccuuc

SEQ ID NO: 1507279 - RNA, 21 nt, Human
ggcucagcggggacagcuccu

SEQ ID NO: 1507280 - RNA, 22 nt, Human
ggcucagcggggacagcuccuu

SEQ ID NO: 1507281 - RNA, 17 nt, Human
ggcucacugcagccuca

SEQ ID NO: 1507282 - RNA, 16 nt, Human
ggcucacugcagccuc

SEQ ID NO: 1507283 - RNA, 19 nt, Human
ggcgugcaguggugcgauc

SEQ ID NO: 1507284 - RNA, 15 nt, Human
ggccugagcugggau

SEQ ID NO: 1507285 - RNA, 13 nt, Human
ggccuccauccug

SEQ ID NO: 1507286 - RNA, 14 nt, Human
ggccuuuggcuuca

SEQ ID NO: 1507287 - RNA, 15 nt, Human
ggccuucucugaagg

SEQ ID NO: 1507288 - RNA, 16 nt, Human
ggccuucucugaagga

SEQ ID NO: 1507289 - RNA, 13 nt, Human
ggccuuuggcuuc

SEQ ID NO: 1507290 - RNA, 21 nt, Human
ggccuggccagaugcaccagc

SEQ ID NO: 1507291 - RNA, 21 nt, Human
ggccugugucuaguuguuuga

SEQ ID NO: 1507292 - RNA, 23 nt, Human
ggccuucggccuccauccugagg

SEQ ID NO: 1507293 - RNA, 12 nt, Human
ggccuucucuga

SEQ ID NO: 1507294 - RNA, 19 nt, Human
auuacaguggggaaugaag

SEQ ID NO: 1507295 - RNA, 17 nt, Human
auuacaggaaguacugg

SEQ ID NO: 1507296 - RNA, 22 nt, Human
auuacaagcgugagccacugca

SEQ ID NO: 1507297 - RNA, 18 nt, Human
auguuugccucugccucu

SEQ ID NO: 1507298 - RNA, 16 nt, Human
auucaaauguauuaca

SEQ ID NO: 1507299 - RNA, 18 nt, Human
auucaaauguauuacagu

SEQ ID NO: 1507300 - RNA, 18 nt, Human
auucaaugccccugaauu

SEQ ID NO: 1507301 - RNA, 20 nt, Human
auucaaugccccugaauuua

SEQ ID NO: 1507302 - RNA, 19 nt, Human
auucacaagacccaaaagg

SEQ ID NO: 1507303 - RNA, 18 nt, Human
auuaugaauuacauuugu

SEQ ID NO: 1507304 - RNA, 21 nt, Human
auuaugaugugggucaaggaa

SEQ ID NO: 1507305 - RNA, 23 nt, Human
auuaugcaugaaguaauaugcac

SEQ ID NO: 1507306 - RNA, 14 nt, Human
auuaugaauuacau

SEQ ID NO: 1507307 - RNA, 17 nt, Human
auuaugaauuacauuug

SEQ ID NO: 1507308 - RNA, 18 nt, Human
auuaugaaacuuuuggaa

SEQ ID NO: 1507309 - RNA, 21 nt, Human
auuaggugugacugaauuucu

SEQ ID NO: 1507310 - RNA, 18 nt, Human
auuaggugugacugaauu

SEQ ID NO: 1507311 - RNA, 16 nt, Human
auuaggugugacugaa

SEQ ID NO: 1507312 - RNA, 16 nt, Human
auuagggagagaagau

SEQ ID NO: 1507313 - RNA, 19 nt, Human
auucauaaugacuuaagca

SEQ ID NO: 1507314 - RNA, 19 nt, Human
auucauagcagcuuauuca

SEQ ID NO: 1507315 - RNA, 22 nt, Human
auucauagcagcuuauucacaa

SEQ ID NO: 1507316 - RNA, 14 nt, Human
auucauaaugacuu

SEQ ID NO: 1507317 - RNA, 15 nt, Human
auucauaaugacuua

SEQ ID NO: 1507318 - RNA, 11 nt, Human
auucuuuccug

SEQ ID NO: 1507319 - RNA, 14 nt, Human
auucuucugcuuca

SEQ ID NO: 1507320 - RNA, 15 nt, Human
auucuugaaggaaaa

SEQ ID NO: 1507321 - RNA, 18 nt, Human
auucuugaaggaaaauga

SEQ ID NO: 1507322 - RNA, 11 nt, Human
auucuucugcu

SEQ ID NO: 1507323 - RNA, 12 nt, Human
auucuucugcuu

SEQ ID NO: 1507324 - RNA, 13 nt, Human
auucuuuccugag

SEQ ID NO: 1507325 - RNA, 20 nt, Human
auugcuacuguccuacccac

SEQ ID NO: 1507326 - RNA, 22 nt, Human
auugcuacuguccuacccaccc

SEQ ID NO: 1507327 - RNA, 17 nt, Human
auugauaugcuuauaca

SEQ ID NO: 1507328 - RNA, 15 nt, Human
auugcuacuguccua

SEQ ID NO: 1507329 - RNA, 21 nt, Human
auugauaagaaccuuuugagu

SEQ ID NO: 1507330 - RNA, 22 nt, Human
auugauaaguucauacauugua

SEQ ID NO: 1507331 - RNA, 15 nt, Human
auugcugauggugca

SEQ ID NO: 1507332 - RNA, 16 nt, Human
auugcugauggugcaa

SEQ ID NO: 1507333 - RNA, 18 nt, Human
auugcugauggugcaaug

SEQ ID NO: 1507334 - RNA, 19 nt, Human
auugcugauggugcaauga

SEQ ID NO: 1507335 - RNA, 23 nt, Human
auugcugauggugcaaugaccuu

SEQ ID NO: 1507336 - RNA, 12 nt, Human
auugcugcuuga

SEQ ID NO: 1507337 - RNA, 14 nt, Human
auugcuugagcuca

SEQ ID NO: 1507338 - RNA, 16 nt, Human
auuguuagucucuuga

SEQ ID NO: 1507339 - RNA, 21 nt, Human
auugugucucuugguccugcu

SEQ ID NO: 1507340 - RNA, 23 nt, Human
auugugucucuugguccugcugc

SEQ ID NO: 1507341 - RNA, 14 nt, Human
auuguaaauaguau

SEQ ID NO: 1507342 - RNA, 14 nt, Human
auuguaaaauggug

SEQ ID NO: 1507343 - RNA, 18 nt, Human
auugcuugagcucaggag

SEQ ID NO: 1507344 - RNA, 19 nt, Human
auuuuauagcuacuaauuu

SEQ ID NO: 1507345 - RNA, 23 nt, Human
auuuguuugaacugauaaagaug

SEQ ID NO: 1507346 - RNA, 22 nt, Human
auuuguuugaacugauaaagau

SEQ ID NO: 1507347 - RNA, 14 nt, Human
auuugcucauggaa

SEQ ID NO: 1507348 - RNA, 17 nt, Human
auuugcucauggaauug

SEQ ID NO: 1507349 - RNA, 13 nt, Human
auuugcuccuuuc

SEQ ID NO: 1507350 - RNA, 20 nt, Human
auuugugauacaaugcugug

SEQ ID NO: 1507351 - RNA, 17 nt, Human
auuugugauacaaugcu

SEQ ID NO: 1507352 - RNA, 20 nt, Human
auuuuaugccuuuuauuucu

SEQ ID NO: 1507353 - RNA, 21 nt, Human
auuuuaugccuuuuauuucuu

SEQ ID NO: 1507354 - RNA, 15 nt, Human
caaacagucucagga

SEQ ID NO: 1507355 - RNA, 21 nt, Human
caaaccaucauugaaaucuuu

SEQ ID NO: 1507356 - RNA, 19 nt, Human
caaaccaucauugaaaucu

SEQ ID NO: 1507357 - RNA, 18 nt, Human
caaaagaugcuucucacu

SEQ ID NO: 1507358 - RNA, 15 nt, Human
caaaaggcagaagca

SEQ ID NO: 1507359 - RNA, 20 nt, Human
caaaaaaaaaaaaaaauuag

SEQ ID NO: 1507360 - RNA, 16 nt, Human
caaaagaugcuucuca

SEQ ID NO: 1507361 - RNA, 20 nt, Human
caaagauauuuugcuuugug

SEQ ID NO: 1507362 - RNA, 20 nt, Human
caacaccucugcacaagcug

SEQ ID NO: 1507363 - RNA, 23 nt, Human
caacacgagcaggcuacugucag

SEQ ID NO: 1507364 - RNA, 15 nt, Human
caaauccuugaagau

SEQ ID NO: 1507365 - RNA, 20 nt, Human
caaauggaaaugggcagagc

SEQ ID NO: 1507366 - RNA, 21 nt, Human
caaauggaaaugggcagagca

SEQ ID NO: 1507367 - RNA, 22 nt, Human
caaauggaaaugggcagagcag

SEQ ID NO: 1507368 - RNA, 22 nt, Human
caacacucacauuuauucugcu

SEQ ID NO: 1507369 - RNA, 14 nt, Human
caaaguagaagucu

SEQ ID NO: 1507370 - RNA, 21 nt, Human
caaaguagaagucuuagaugu

SEQ ID NO: 1507371 - RNA, 13 nt, Human
caaagugcuggga

SEQ ID NO: 1507372 - RNA, 22 nt, Human
caaaguacacuguuucaaacuu

SEQ ID NO: 1507373 - RNA, 15 nt, Human
caaagcagugcaugc

SEQ ID NO: 1507374 - RNA, 17 nt, Human
caaagcagugcaugcug

SEQ ID NO: 1507375 - RNA, 23 nt, Human
caaagauauuuugcuuugugauu

SEQ ID NO: 1507376 - RNA, 22 nt, Human
caaagauauuuugcuuugugau

SEQ ID NO: 1507377 - RNA, 20 nt, Human
caaagcacugacuucuaagu

SEQ ID NO: 1507378 - RNA, 22 nt, Human
caaagcacugacuucuaaguaa

SEQ ID NO: 1507379 - RNA, 16 nt, Human
cacugcauguuuguga

SEQ ID NO: 1507380 - RNA, 13 nt, Human
cacugcagccuca

SEQ ID NO: 1507381 - RNA, 20 nt, Human
cacugcacuccagccugggu

SEQ ID NO: 1507382 - RNA, 21 nt, Human
cacugcagaagacaguauggc

SEQ ID NO: 1507383 - RNA, 12 nt, Human
cacugcagccuc

SEQ ID NO: 1507384 - RNA, 15 nt, Human
cacugcacuccagcc

SEQ ID NO: 1507385 - RNA, 16 nt, Human
cacugcacuccagccu

SEQ ID NO: 1507386 - RNA, 18 nt, Human
cacugcacuccagccugg

SEQ ID NO: 1507387 - RNA, 19 nt, Human
cacugcacuccagccuggg

SEQ ID NO: 1507388 - RNA, 22 nt, Human
cacuuguguuuugcaagccaga

SEQ ID NO: 1507389 - RNA, 16 nt, Human
cacuugucaauaaaau

SEQ ID NO: 1507390 - RNA, 19 nt, Human
cacuuguguuuugcaagcc

SEQ ID NO: 1507391 - RNA, 22 nt, Human
cacugguucuucuuggucucag

SEQ ID NO: 1507392 - RNA, 16 nt, Human
cacuuacacuuuaugc

SEQ ID NO: 1507393 - RNA, 18 nt, Human
cacuuacacuuuaugcac

SEQ ID NO: 1507394 - RNA, 12 nt, Human
cacuccccugcu

SEQ ID NO: 1507395 - RNA, 13 nt, Human
cacuccccugcug

SEQ ID NO: 1507396 - RNA, 14 nt, Human
cacuccccugcugg

SEQ ID NO: 1507397 - RNA, 15 nt, Human
cacuccccugcuggg

SEQ ID NO: 1507398 - RNA, 11 nt, Human
cacugacagau

SEQ ID NO: 1507399 - RNA, 14 nt, Human
cacuaguauuucua

SEQ ID NO: 1507400 - RNA, 16 nt, Human
cacuccagugagacag

SEQ ID NO: 1507401 - RNA, 16 nt, Human
cacuccagccugggug

SEQ ID NO: 1507402 - RNA, 20 nt, Human
cacuagggcagggacaggau

SEQ ID NO: 1507403 - RNA, 21 nt, Human
cacuagggcagggacaggaua

SEQ ID NO: 1507404 - RNA, 14 nt, Human
caccugccccucaa

SEQ ID NO: 1507405 - RNA, 15 nt, Human
caccugccccucaac

SEQ ID NO: 1507406 - RNA, 16 nt, Human
caccugccccucaacu

SEQ ID NO: 1507407 - RNA, 17 nt, Human
cacccuggggagaaagu

SEQ ID NO: 1507408 - RNA, 14 nt, Human
caccucagccuccc

SEQ ID NO: 1507409 - RNA, 13 nt, Human
caccucagccucc

SEQ ID NO: 1507410 - RNA, 17 nt, Human
cacccugaaagcccuga

SEQ ID NO: 1507411 - RNA, 15 nt, Human
cacccuggggagaaa

SEQ ID NO: 1507412 - RNA, 16 nt, Human
cacccuggggagaaag

SEQ ID NO: 1507413 - RNA, 14 nt, Human
cacccucaggcagg

SEQ ID NO: 1507414 - RNA, 17 nt, Human
caccugccuguugggcc

SEQ ID NO: 1507415 - RNA, 19 nt, Human
caccugccuguugggccag

SEQ ID NO: 1507416 - RNA, 24 nt, Human
caccugccuguugggccaggagcc

SEQ ID NO: 1507417 - RNA, 14 nt, Human
caccuuggcugcag

SEQ ID NO: 1507418 - RNA, 15 nt, Human
caccuuggcucaagu

SEQ ID NO: 1507419 - RNA, 13 nt, Human
caccuuggcugca

SEQ ID NO: 1507420 - RNA, 12 nt, Human
caccccagcccc

SEQ ID NO: 1507421 - RNA, 11 nt, Human
caccccagccc

SEQ ID NO: 1507422 - RNA, 17 nt, Human
cacacaugaaguccaag

SEQ ID NO: 1507423 - RNA, 22 nt, Human
cacacaugaaguccaagcauuu

SEQ ID NO: 1507424 - RNA, 20 nt, Human
cacacaugagcaucaggcca

SEQ ID NO: 1507425 - RNA, 15 nt, Human
cacacauacacacac

SEQ ID NO: 1507426 - RNA, 21 nt, Human
cacacagugagucgaggacag

SEQ ID NO: 1507427 - RNA, 23 nt, Human
cacacagugagucgaggacaggg

SEQ ID NO: 1507428 - RNA, 18 nt, Human
cacacagugagucgagga

SEQ ID NO: 1507429 - RNA, 20 nt, Human
cacacaguauuacuucugcu

SEQ ID NO: 1507430 - RNA, 23 nt, Human
cacacaguauuacuucugcuaca

SEQ ID NO: 1507431 - RNA, 21 nt, Human
cacagacauacuaaccagcag

SEQ ID NO: 1507432 - RNA, 19 nt, Human
cacagacauacuaaccagc

SEQ ID NO: 1507433 - RNA, 11 nt, Human
cacagccucug

SEQ ID NO: 1507434 - RNA, 13 nt, Human
cacagacccugcc

SEQ ID NO: 1507435 - RNA, 23 nt, Human
cacagaaaauggaagacagcucu

SEQ ID NO: 1507436 - RNA, 19 nt, Human
cacagaaaauucuucucca

SEQ ID NO: 1507437 - RNA, 21 nt, Human
cacacaugagcaucaggccag

SEQ ID NO: 1507438 - RNA, 22 nt, Human
cacacaugagcaucaggccagg

SEQ ID NO: 1507439 - RNA, 18 nt, Human
cacagaaaauggaagaca

SEQ ID NO: 1507440 - RNA, 19 nt, Human
cacagaaaauggaagacag

SEQ ID NO: 1507441 - RNA, 20 nt, Human
cacagaaaauggaagacagc

SEQ ID NO: 1507442 - RNA, 22 nt, Human
cacagaaaauggaagacagcuc

SEQ ID NO: 1507443 - RNA, 20 nt, Human
cacaguauuacuucugcuac

SEQ ID NO: 1507444 - RNA, 21 nt, Human
cacaguauuacuucugcuaca

SEQ ID NO: 1507445 - RNA, 17 nt, Human
cacagccucuuagaugc

SEQ ID NO: 1507446 - RNA, 21 nt, Human
cacagccucuuagaugcaguu

SEQ ID NO: 1507447 - RNA, 22 nt, Human
cacaggccugagauuucaucug

SEQ ID NO: 1507448 - RNA, 23 nt, Human
cacaggccugagauuucaucugc

SEQ ID NO: 1507449 - RNA, 19 nt, Human
cacaggggaaaagaggagu

SEQ ID NO: 1507450 - RNA, 17 nt, Human
cacaggggaaaagagga

SEQ ID NO: 1507451 - RNA, 18 nt, Human
cacaggggaaaagaggag

SEQ ID NO: 1507452 - RNA, 13 nt, Human
cacaggccugaga

SEQ ID NO: 1507453 - RNA, 14 nt, Human
cacaggccugagau

SEQ ID NO: 1507454 - RNA, 15 nt, Human
cacaggccugagauu

SEQ ID NO: 1507455 - RNA, 19 nt, Human
cacaggccugagauuucau

SEQ ID NO: 1507456 - RNA, 20 nt, Human
cacaggccugagauuucauc

SEQ ID NO: 1507457 - RNA, 15 nt, Human
caaugcuguauuuua

SEQ ID NO: 1507458 - RNA, 16 nt, Human
caaugcuguauuuuaa

SEQ ID NO: 1507459 - RNA, 17 nt, Human
caaugcuguauuuuaaa

SEQ ID NO: 1507460 - RNA, 13 nt, Human
caauuuaaagcaa

SEQ ID NO: 1507461 - RNA, 15 nt, Human
caauucuugccaaau

SEQ ID NO: 1507462 - RNA, 11 nt, Human
caauggcagcc

SEQ ID NO: 1507463 - RNA, 12 nt, Human
caauggcagccu

SEQ ID NO: 1507464 - RNA, 18 nt, Human
cacaagacugcacaucaa

SEQ ID NO: 1507465 - RNA, 13 nt, Human
caauuuauuaugg

SEQ ID NO: 1507466 - RNA, 14 nt, Human
cacaagagcccagg

SEQ ID NO: 1507467 - RNA, 16 nt, Human
cacaagagcccaggcc

SEQ ID NO: 1507468 - RNA, 13 nt, Human
cacaagcuccaag

SEQ ID NO: 1507469 - RNA, 14 nt, Human
cacaagcuccaagc

SEQ ID NO: 1507470 - RNA, 15 nt, Human
cacaagcuccaagcu

SEQ ID NO: 1507471 - RNA, 17 nt, Human
cacaagagcccaggccu

SEQ ID NO: 1507472 - RNA, 17 nt, Human
cacaagcuccaagcucc

SEQ ID NO: 1507473 - RNA, 23 nt, Human
cacaagcuccaagcucccaggca

SEQ ID NO: 1507474 - RNA, 17 nt, Human
cacaagcugcacccuca

SEQ ID NO: 1507475 - RNA, 23 nt, Human
cacaagcugcacccucaggcagg

SEQ ID NO: 1507476 - RNA, 17 nt, Human
cacacagcucuguccug

SEQ ID NO: 1507477 - RNA, 20 nt, Human
cacacagcucuguccuggga

SEQ ID NO: 1507478 - RNA, 19 nt, Human
caauaaagcagcguuucua

SEQ ID NO: 1507479 - RNA, 13 nt, Human
caagcucugcucc

SEQ ID NO: 1507480 - RNA, 17 nt, Human
caagcuccaagcuccca

SEQ ID NO: 1507481 - RNA, 12 nt, Human
caagcuccaagc

SEQ ID NO: 1507482 - RNA, 20 nt, Human
caagcugcacccucaggcag

SEQ ID NO: 1507483 - RNA, 14 nt, Human
caagcucugcuccu

SEQ ID NO: 1507484 - RNA, 15 nt, Human
caagcucugcuccuc

SEQ ID NO: 1507485 - RNA, 14 nt, Human
caagcugcacccuc

SEQ ID NO: 1507486 - RNA, 18 nt, Human
caagcugcacccucaggc

SEQ ID NO: 1507487 - RNA, 13 nt, Human
caagucaagugaa

SEQ ID NO: 1507488 - RNA, 17 nt, Human
caagucaagugaaaaag

SEQ ID NO: 1507489 - RNA, 14 nt, Human
caaguccaagcaua

SEQ ID NO: 1507490 - RNA, 17 nt, Human
caaggccaaaggaagca

SEQ ID NO: 1507491 - RNA, 18 nt, Human
caaggccaaaggaagcac

SEQ ID NO: 1507492 - RNA, 15 nt, Human
caaggccaaaggaag

SEQ ID NO: 1507493 - RNA, 16 nt, Human
caaggccaaaggaagc

SEQ ID NO: 1507494 - RNA, 15 nt, Human
caggguuggccccug

SEQ ID NO: 1507495 - RNA, 16 nt, Human
caggguuggccccugc

SEQ ID NO: 1507496 - RNA, 21 nt, Human
cagggucucuaccauccccug

SEQ ID NO: 1507497 - RNA, 23 nt, Human
cagggucucacucugucgcccag

SEQ ID NO: 1507498 - RNA, 23 nt, Human
cagguuuuuggucugacccacug

SEQ ID NO: 1507499 - RNA, 13 nt, Human
caggugcugccau

SEQ ID NO: 1507500 - RNA, 14 nt, Human
caggugcugccauc

SEQ ID NO: 1507501 - RNA, 17 nt, Human
caggguuggccccugcc

SEQ ID NO: 1507502 - RNA, 21 nt, Human
caggguuggccccugcccggc

SEQ ID NO: 1507503 - RNA, 18 nt, Human
caguaaaugggggugcau

SEQ ID NO: 1507504 - RNA, 20 nt, Human
caguaaaugggggugcauuu

SEQ ID NO: 1507505 - RNA, 19 nt, Human
caguaaaugggggugcauu

SEQ ID NO: 1507506 - RNA, 16 nt, Human
cagucaccccggccac

SEQ ID NO: 1507507 - RNA, 17 nt, Human
cagucaccccggccacc

SEQ ID NO: 1507508 - RNA, 22 nt, Human
cagggaggacgcucucuggccu

SEQ ID NO: 1507509 - RNA, 15 nt, Human
caggcugggcuucag

SEQ ID NO: 1507510 - RNA, 14 nt, Human
caggcugggcuuca

SEQ ID NO: 1507511 - RNA, 16 nt, Human
cagggagggcuucugc

SEQ ID NO: 1507512 - RNA, 20 nt, Human
cagggcucagcggggacagc

SEQ ID NO: 1507513 - RNA, 20 nt, Human
cagggcuggacugaggccug

SEQ ID NO: 1507514 - RNA, 21 nt, Human
cagggcuggacugaggccuga

SEQ ID NO: 1507515 - RNA, 12 nt, Human
cagggcucagcg

SEQ ID NO: 1507516 - RNA, 15 nt, Human
cagggcucagcgggg

SEQ ID NO: 1507517 - RNA, 20 nt, Human
caggccugggggcugggcag

SEQ ID NO: 1507518 - RNA, 22 nt, Human
caggccugggggcugggcagag

SEQ ID NO: 1507519 - RNA, 23 nt, Human
caggccugggggcugggcagagg

SEQ ID NO: 1507520 - RNA, 17 nt, Human
caggcuggcgugcagug

SEQ ID NO: 1507521 - RNA, 18 nt, Human
caggcuggcgugcagugg

SEQ ID NO: 1507522 - RNA, 19 nt, Human
caggcuggcgugcaguggu

SEQ ID NO: 1507523 - RNA, 16 nt, Human
caggcugggagagccu

SEQ ID NO: 1507524 - RNA, 18 nt, Human
caggcugggagagccuuc

SEQ ID NO: 1507525 - RNA, 19 nt, Human
caggcugggagagccuucc

SEQ ID NO: 1507526 - RNA, 20 nt, Human
caggcugggagagccuucca

SEQ ID NO: 1507527 - RNA, 22 nt, Human
cagggcuggacugaggccugag

SEQ ID NO: 1507528 - RNA, 23 nt, Human
cagggcuggacugaggccugagc

SEQ ID NO: 1507529 - RNA, 23 nt, Human
caggacagcccuucuuuccacag

SEQ ID NO: 1507530 - RNA, 24 nt, Human
caggacagcccuucuuuccacaga

SEQ ID NO: 1507531 - RNA, 13 nt, Human
caggaccagggau

SEQ ID NO: 1507532 - RNA, 21 nt, Human
caggaccagggauuuccauga

SEQ ID NO: 1507533 - RNA, 13 nt, Human
caggaccucaggu

SEQ ID NO: 1507534 - RNA, 21 nt, Human
caggcaaugcuggcuguuggc

SEQ ID NO: 1507535 - RNA, 14 nt, Human
caggaggccagccu

SEQ ID NO: 1507536 - RNA, 12 nt, Human
caggaggccagc

SEQ ID NO: 1507537 - RNA, 13 nt, Human
caggaggccagcc

SEQ ID NO: 1507538 - RNA, 19 nt, Human
caggcaaugcuggcuguug

SEQ ID NO: 1507539 - RNA, 20 nt, Human
caggcaaugcuggcuguugg

SEQ ID NO: 1507540 - RNA, 13 nt, Human
caggccagcugcu

SEQ ID NO: 1507541 - RNA, 15 nt, Human
caggccagcugcuug

SEQ ID NO: 1507542 - RNA, 17 nt, Human
caggccagcugcuuggg

SEQ ID NO: 1507543 - RNA, 13 nt, Human
caggccaggcccu

SEQ ID NO: 1507544 - RNA, 14 nt, Human
caggccaggcccuc

SEQ ID NO: 1507545 - RNA, 15 nt, Human
caggccaggcccucu

SEQ ID NO: 1507546 - RNA, 16 nt, Human
caggccaggcccucug

SEQ ID NO: 1507547 - RNA, 23 nt, Human
caggaaaggcuccaggagcagcc

SEQ ID NO: 1507548 - RNA, 21 nt, Human
caggaaaggcuccaggagcag

SEQ ID NO: 1507549 - RNA, 22 nt, Human
caggaaaggcuccaggagcagc

SEQ ID NO: 1507550 - RNA, 19 nt, Human
caggaaaagcugcugacag

SEQ ID NO: 1507551 - RNA, 20 nt, Human
caggaaaagcugcugacagu

SEQ ID NO: 1507552 - RNA, 15 nt, Human
cagcuguucagcugg

SEQ ID NO: 1507553 - RNA, 16 nt, Human
cagcuguucagcuggu

SEQ ID NO: 1507554 - RNA, 19 nt, Human
cagcuguucagcugguuga

SEQ ID NO: 1507555 - RNA, 16 nt, Human
cagcuuauucacaaga

SEQ ID NO: 1507556 - RNA, 17 nt, Human
cagcuuauucacaagac

SEQ ID NO: 1507557 - RNA, 22 nt, Human
caggaaaucaaauaugcaaagc

SEQ ID NO: 1507558 - RNA, 21 nt, Human
caggaaaucaaauaugcaaag

SEQ ID NO: 1507559 - RNA, 19 nt, Human
caggaaaucaaauaugcaa

SEQ ID NO: 1507560 - RNA, 23 nt, Human
cagccccauucugccugcccagg

SEQ ID NO: 1507561 - RNA, 24 nt, Human
cagccccauucugccugcccaggc

SEQ ID NO: 1507562 - RNA, 19 nt, Human
cagccccauucugccugcc

SEQ ID NO: 1507563 - RNA, 20 nt, Human
cagccccauucugccugccc

SEQ ID NO: 1507564 - RNA, 22 nt, Human
cagccccauucugccugcccag

SEQ ID NO: 1507565 - RNA, 19 nt, Human
cagccccgugggguuccuc

SEQ ID NO: 1507566 - RNA, 13 nt, Human
cagcccuuagcag

SEQ ID NO: 1507567 - RNA, 15 nt, Human
cagcccuuagcaggg

SEQ ID NO: 1507568 - RNA, 23 nt, Human
cagccgccaugcuccuggcccac

SEQ ID NO: 1507569 - RNA, 12 nt, Human
cagccugcagga

SEQ ID NO: 1507570 - RNA, 21 nt, Human
cagccugcaggaccucgugcc

SEQ ID NO: 1507571 - RNA, 23 nt, Human
cagccugagcgacagugagacuc

SEQ ID NO: 1507572 - RNA, 17 nt, Human
cagccucugaaaaccaa

SEQ ID NO: 1507573 - RNA, 14 nt, Human
cagcguuucuauga

SEQ ID NO: 1507574 - RNA, 16 nt, Human
cagcguuucuaugaca

SEQ ID NO: 1507575 - RNA, 19 nt, Human
cagcguuucuaugacacau

SEQ ID NO: 1507576 - RNA, 14 nt, Human
cagcggggacagcu

SEQ ID NO: 1507577 - RNA, 18 nt, Human
cagauuggcucacacuga

SEQ ID NO: 1507578 - RNA, 20 nt, Human
cagauuggcucacacugaga

SEQ ID NO: 1507579 - RNA, 15 nt, Human
cagauuucacucucc

SEQ ID NO: 1507580 - RNA, 16 nt, Human
cagauuucacucuccu

SEQ ID NO: 1507581 - RNA, 18 nt, Human
cagauuucacucuccuug

SEQ ID NO: 1507582 - RNA, 19 nt, Human
cagauuucacucuccuugg

SEQ ID NO: 1507583 - RNA, 17 nt, Human
cagauuggcucacacug

SEQ ID NO: 1507584 - RNA, 11 nt, Human
cagcacugagg

SEQ ID NO: 1507585 - RNA, 12 nt, Human
cagcacugagga

SEQ ID NO: 1507586 - RNA, 13 nt, Human
cagcacugaggaa

SEQ ID NO: 1507587 - RNA, 15 nt, Human
cagcacugaggaaga

SEQ ID NO: 1507588 - RNA, 17 nt, Human
cagcacugaggaagaac

SEQ ID NO: 1507589 - RNA, 16 nt, Human
cagcauauucaggaag

SEQ ID NO: 1507590 - RNA, 17 nt, Human
cagcauauucaggaagc

SEQ ID NO: 1507591 - RNA, 18 nt, Human
cagcauauucaggaagcu

SEQ ID NO: 1507592 - RNA, 16 nt, Human
cagagguugcagugag

SEQ ID NO: 1507593 - RNA, 20 nt, Human
cagagcuacccgcagaguuc

SEQ ID NO: 1507594 - RNA, 9 nt, Human
cagagcugg

SEQ ID NO: 1507595 - RNA, 17 nt, Human
cagagcuacacagggga

SEQ ID NO: 1507596 - RNA, 22 nt, Human
cagagcuacacaggggaaaaga

SEQ ID NO: 1507597 - RNA, 16 nt, Human
cagagagggugggagu

SEQ ID NO: 1507598 - RNA, 23 nt, Human
cagagagggugggagugggccca

SEQ ID NO: 1507599 - RNA, 14 nt, Human
cagagccugcaguu

SEQ ID NO: 1507600 - RNA, 20 nt, Human
cagagagggugggagugggc

SEQ ID NO: 1507601 - RNA, 22 nt, Human
cagagagggugggagugggccc

SEQ ID NO: 1507602 - RNA, 23 nt, Human
cagagacuccugcaggcagccag

SEQ ID NO: 1507603 - RNA, 21 nt, Human
cagagacuccugcaggcagcc

SEQ ID NO: 1507604 - RNA, 22 nt, Human
cagagacuccugcaggcagcca

SEQ ID NO: 1507605 - RNA, 20 nt, Human
cagagacuccugcaggcagc

SEQ ID NO: 1507606 - RNA, 20 nt, Human
caucagcuugcccuguuaaa

SEQ ID NO: 1507607 - RNA, 13 nt, Human
caucaggccaggc

SEQ ID NO: 1507608 - RNA, 19 nt, Human
caucagcacgauuucuguu

SEQ ID NO: 1507609 - RNA, 15 nt, Human
caucagcugcugaaa

SEQ ID NO: 1507610 - RNA, 17 nt, Human
caucagcugcugaaaca

SEQ ID NO: 1507611 - RNA, 18 nt, Human
caucagcugcugaaacaa

SEQ ID NO: 1507612 - RNA, 18 nt, Human
caucagcacgauuucugu

SEQ ID NO: 1507613 - RNA, 17 nt, Human
caucagcacgauuucug

SEQ ID NO: 1507614 - RNA, 17 nt, Human
caucccagccccaauga

SEQ ID NO: 1507615 - RNA, 16 nt, Human
caucccagccccaaug

SEQ ID NO: 1507616 - RNA, 13 nt, Human
caucccagcccca

SEQ ID NO: 1507617 - RNA, 14 nt, Human
caucccagccccaa

SEQ ID NO: 1507618 - RNA, 14 nt, Human
caucaggccaggcc

SEQ ID NO: 1507619 - RNA, 21 nt, Human
caucaggccaggcccucugcc

SEQ ID NO: 1507620 - RNA, 22 nt, Human
caucaggccaggcccucugccc

SEQ ID NO: 1507621 - RNA, 23 nt, Human
caucaggccaggcccucugccca

SEQ ID NO: 1507622 - RNA, 18 nt, Human
caucugugaaaggaaaga

SEQ ID NO: 1507623 - RNA, 19 nt, Human
caucugugaaaggaaagag

SEQ ID NO: 1507624 - RNA, 21 nt, Human
caucuuagguuggcaaaaagg

SEQ ID NO: 1507625 - RNA, 22 nt, Human
caucuuagguuggcaaaaaggc

SEQ ID NO: 1507626 - RNA, 17 nt, Human
caugacacgaauauugc

SEQ ID NO: 1507627 - RNA, 18 nt, Human
caugacacgaauauugcu

SEQ ID NO: 1507628 - RNA, 16 nt, Human
caugaauuaguuuuau

SEQ ID NO: 1507629 - RNA, 14 nt, Human
caugacacgaauau

SEQ ID NO: 1507630 - RNA, 22 nt, Human
caugcaaggucauuuuuuuuaa

SEQ ID NO: 1507631 - RNA, 18 nt, Human
caugcaaggucauuuuuu

SEQ ID NO: 1507632 - RNA, 17 nt, Human
caugcaaggucauuuuu

SEQ ID NO: 1507633 - RNA, 22 nt, Human
cauggccuuugcuugaaagaaa

SEQ ID NO: 1507634 - RNA, 19 nt, Human
cauggccuuugcuugaaag

SEQ ID NO: 1507635 - RNA, 16 nt, Human
caugcugcccugugag

SEQ ID NO: 1507636 - RNA, 18 nt, Human
caugcugcccugugagua

SEQ ID NO: 1507637 - RNA, 17 nt, Human
cauaaugcgugcauacc

SEQ ID NO: 1507638 - RNA, 14 nt, Human
cauaaugcgugcau

SEQ ID NO: 1507639 - RNA, 21 nt, Human
caguuuguuaguaugaggcau

SEQ ID NO: 1507640 - RNA, 21 nt, Human
cauaaugcgugcauaccacuu

SEQ ID NO: 1507641 - RNA, 15 nt, Human
cauacaauuccaaac

SEQ ID NO: 1507642 - RNA, 17 nt, Human
cauagauucccugagca

SEQ ID NO: 1507643 - RNA, 18 nt, Human
cauagauucccugagcag

SEQ ID NO: 1507644 - RNA, 22 nt, Human
cauauuaccacagacauacuaa

SEQ ID NO: 1507645 - RNA, 21 nt, Human
cauauuaccacagacauacua

SEQ ID NO: 1507646 - RNA, 20 nt, Human
cauauuaccacagacauacu

SEQ ID NO: 1507647 - RNA, 17 nt, Human
cauauuaccacagacau

SEQ ID NO: 1507648 - RNA, 18 nt, Human
cagucaccccggccaccu

SEQ ID NO: 1507649 - RNA, 12 nt, Human
cauuuccaagca

SEQ ID NO: 1507650 - RNA, 23 nt, Human
cauuuggugguuucagaaaugug

SEQ ID NO: 1507651 - RNA, 22 nt, Human
cauuuggugguuucagaaaugu

SEQ ID NO: 1507652 - RNA, 19 nt, Human
ccaaaaagauuuucagaaa

SEQ ID NO: 1507653 - RNA, 17 nt, Human
ccaaaacucuccucugc

SEQ ID NO: 1507654 - RNA, 13 nt, Human
cauuucaccccuc

SEQ ID NO: 1507655 - RNA, 14 nt, Human
cauuucaccccucc

SEQ ID NO: 1507656 - RNA, 15 nt, Human
cauuucaccccuccc

SEQ ID NO: 1507657 - RNA, 16 nt, Human
cauuucaccccucccu

SEQ ID NO: 1507658 - RNA, 17 nt, Human
cauuucaccccucccuu

SEQ ID NO: 1507659 - RNA, 18 nt, Human
cauuucaccccucccuuu

SEQ ID NO: 1507660 - RNA, 19 nt, Human
cauuucaccccucccuuuc

SEQ ID NO: 1507661 - RNA, 20 nt, Human
cauuucaccccucccuuucu

SEQ ID NO: 1507662 - RNA, 21 nt, Human
cauuucaccccucccuuucuc

SEQ ID NO: 1507663 - RNA, 22 nt, Human
cauuucaccccucccuuucucc

SEQ ID NO: 1507664 - RNA, 23 nt, Human
cauuucaccccucccuuucuccc

SEQ ID NO: 1507665 - RNA, 16 nt, Human
cauuuauucugcucac

SEQ ID NO: 1507666 - RNA, 18 nt, Human
cauugcugggcuugucug

SEQ ID NO: 1507667 - RNA, 14 nt, Human
cauugcggacagcc

SEQ ID NO: 1507668 - RNA, 15 nt, Human
cauugcggacagcca

SEQ ID NO: 1507669 - RNA, 17 nt, Human
cauugcggacagccacg

SEQ ID NO: 1507670 - RNA, 21 nt, Human
cauugcggacagccacggcca

SEQ ID NO: 1507671 - RNA, 22 nt, Human
cauggcuggagcuagaauuuga

SEQ ID NO: 1507672 - RNA, 22 nt, Human
cauggcugccaaugggagcuca

SEQ ID NO: 1507673 - RNA, 15 nt, Human
cauguucucugagga

SEQ ID NO: 1507674 - RNA, 17 nt, Human
cauuaucuagauacugu

SEQ ID NO: 1507675 - RNA, 16 nt, Human
cauuaucuagauacug

SEQ ID NO: 1507676 - RNA, 12 nt, Human
cauuaucuagau

SEQ ID NO: 1507677 - RNA, 15 nt, Human
cauuaggauggcuag

SEQ ID NO: 1507678 - RNA, 20 nt, Human
cauucuccuuguguuacuaa

SEQ ID NO: 1507679 - RNA, 16 nt, Human
cauucuccuuguguua

SEQ ID NO: 1507680 - RNA, 18 nt, Human
cauuaucuagauacugua

SEQ ID NO: 1507681 - RNA, 22 nt, Human
cauuaugaugugggucaaggaa

SEQ ID NO: 1507682 - RNA, 23 nt, Human
cauuaugaugugggucaaggaau

SEQ ID NO: 1507683 - RNA, 12 nt, Human
ccaaauuaagag

SEQ ID NO: 1507684 - RNA, 20 nt, Human
ccaaaacucuccucugcugc

SEQ ID NO: 1507685 - RNA, 23 nt, Human
ccaaugcacuuuguucuggcucu

SEQ ID NO: 1507686 - RNA, 20 nt, Human
ccaaugcacuuuguucuggc

SEQ ID NO: 1507687 - RNA, 22 nt, Human
ccaaugcacuuuguucuggcuc

SEQ ID NO: 1507688 - RNA, 20 nt, Human
ccaauguucucucuucucca

SEQ ID NO: 1507689 - RNA, 22 nt, Human
ccaauuauaugagacguuuuug

SEQ ID NO: 1507690 - RNA, 19 nt, Human
ccaccgcagacaggaccag

SEQ ID NO: 1507691 - RNA, 18 nt, Human
ccaccgcagacaggacca

SEQ ID NO: 1507692 - RNA, 14 nt, Human
ccaccuuggcucaa

SEQ ID NO: 1507693 - RNA, 15 nt, Human
ccaccuuggcucaag

SEQ ID NO: 1507694 - RNA, 18 nt, Human
ccaccaucaccagacagg

SEQ ID NO: 1507695 - RNA, 20 nt, Human
ccaccaucaagccaccaaca

SEQ ID NO: 1507696 - RNA, 14 nt, Human
ccaccgcagacagg

SEQ ID NO: 1507697 - RNA, 17 nt, Human
ccaccgcagacaggacc

SEQ ID NO: 1507698 - RNA, 16 nt, Human
ccaccaucaagccacc

SEQ ID NO: 1507699 - RNA, 17 nt, Human
ccaccaucaagccacca

SEQ ID NO: 1507700 - RNA, 15 nt, Human
ccagauccuggaaau

SEQ ID NO: 1507701 - RNA, 20 nt, Human
ccagagggccugcaagggag

SEQ ID NO: 1507702 - RNA, 16 nt, Human
ccaccuuggcucaagu

SEQ ID NO: 1507703 - RNA, 17 nt, Human
ccagagggccugcaagg

SEQ ID NO: 1507704 - RNA, 18 nt, Human
ccagagggccugcaaggg

SEQ ID NO: 1507705 - RNA, 19 nt, Human
ccagagggccugcaaggga

SEQ ID NO: 1507706 - RNA, 23 nt, Human
ccagaugcaccagcccuuagcag

SEQ ID NO: 1507707 - RNA, 18 nt, Human
ccagaugcaccagcccuu

SEQ ID NO: 1507708 - RNA, 17 nt, Human
ccagaugcaccagcccu

SEQ ID NO: 1507709 - RNA, 15 nt, Human
ccagaugcaccagcc

SEQ ID NO: 1507710 - RNA, 16 nt, Human
ccaggaaaggcuccag

SEQ ID NO: 1507711 - RNA, 14 nt, Human
ccaggaaaggcucc

SEQ ID NO: 1507712 - RNA, 15 nt, Human
ccaggaaaggcucca

SEQ ID NO: 1507713 - RNA, 12 nt, Human
ccaggaagccag

SEQ ID NO: 1507714 - RNA, 14 nt, Human
ccaggaagccagca

SEQ ID NO: 1507715 - RNA, 13 nt, Human
ccaggaagccagc

SEQ ID NO: 1507716 - RNA, 11 nt, Human
ccagccccugg

SEQ ID NO: 1507717 - RNA, 12 nt, Human
ccagccccugga

SEQ ID NO: 1507718 - RNA, 17 nt, Human
ccagcuguucagcuggu

SEQ ID NO: 1507719 - RNA, 16 nt, Human
ccagcuuaucucaggg

SEQ ID NO: 1507720 - RNA, 19 nt, Human
ccagcuuaaaggggcuaga

SEQ ID NO: 1507721 - RNA, 15 nt, Human
ccagcucaccagccc

SEQ ID NO: 1507722 - RNA, 16 nt, Human
ccagcucaccagcccc

SEQ ID NO: 1507723 - RNA, 22 nt, Human
ccagcucaccagccccagugcc

SEQ ID NO: 1507724 - RNA, 13 nt, Human
ccagcaggcucuc

SEQ ID NO: 1507725 - RNA, 15 nt, Human
ccagcaggcucucag

SEQ ID NO: 1507726 - RNA, 22 nt, Human
ccaugucaagagucgcugugcc

SEQ ID NO: 1507727 - RNA, 21 nt, Human
ccaugagccucagcauccugg

SEQ ID NO: 1507728 - RNA, 23 nt, Human
ccaugagccucagcauccuggca

SEQ ID NO: 1507729 - RNA, 20 nt, Human
ccauggucggaaaacaugcu

SEQ ID NO: 1507730 - RNA, 23 nt, Human
ccaguuggguggaugccuggugg

SEQ ID NO: 1507731 - RNA, 23 nt, Human
ccaguuccuuucaaugguuugca

SEQ ID NO: 1507732 - RNA, 21 nt, Human
ccaguuccuuucaaugguuug

SEQ ID NO: 1507733 - RNA, 22 nt, Human
ccaguuccuuucaaugguuugc

SEQ ID NO: 1507734 - RNA, 23 nt, Human
ccaguuggucccccuuccaugga

SEQ ID NO: 1507735 - RNA, 14 nt, Human
ccaucccagcccca

SEQ ID NO: 1507736 - RNA, 15 nt, Human
ccaucccagccccaa

SEQ ID NO: 1507737 - RNA, 14 nt, Human
ccaucccugaaggc

SEQ ID NO: 1507738 - RNA, 15 nt, Human
ccaucccugaaggcc

SEQ ID NO: 1507739 - RNA, 17 nt, Human
ccaucccugaaggcccc

SEQ ID NO: 1507740 - RNA, 20 nt, Human
ccaucccugaaggccccgcc

SEQ ID NO: 1507741 - RNA, 17 nt, Human
ccaguuggguggaugcc

SEQ ID NO: 1507742 - RNA, 19 nt, Human
ccaguuggguggaugccug

SEQ ID NO: 1507743 - RNA, 20 nt, Human
ccaguuggguggaugccugg

SEQ ID NO: 1507744 - RNA, 20 nt, Human
ccaggcuccuuuagcgccca

SEQ ID NO: 1507745 - RNA, 21 nt, Human
ccaggcuccuuuagcgcccag

SEQ ID NO: 1507746 - RNA, 19 nt, Human
ccaggcuggcgugcagugg

SEQ ID NO: 1507747 - RNA, 17 nt, Human
ccaggcuggcgugcagu

SEQ ID NO: 1507748 - RNA, 18 nt, Human
ccaggcuggcgugcagug

SEQ ID NO: 1507749 - RNA, 19 nt, Human
ccaggggaaaaucagccug

SEQ ID NO: 1507750 - RNA, 20 nt, Human
ccaggggaaaaucagccugc

SEQ ID NO: 1507751 - RNA, 13 nt, Human
ccaggggugggac

SEQ ID NO: 1507752 - RNA, 21 nt, Human
ccaggggaaaaucagccugcu

SEQ ID NO: 1507753 - RNA, 19 nt, Human
ccaggggugggacacccug

SEQ ID NO: 1507754 - RNA, 14 nt, Human
ccaggggugggaca

SEQ ID NO: 1507755 - RNA, 17 nt, Human
ccaggggugggacaccc

SEQ ID NO: 1507756 - RNA, 13 nt, Human
cccauccucugua

SEQ ID NO: 1507757 - RNA, 20 nt, Human
cccauauuuguacaccaaua

SEQ ID NO: 1507758 - RNA, 15 nt, Human
cccaggaaaggcucc

SEQ ID NO: 1507759 - RNA, 13 nt, Human
cccaggcuggcgu

SEQ ID NO: 1507760 - RNA, 17 nt, Human
cccaggcuggcgugcag

SEQ ID NO: 1507761 - RNA, 23 nt, Human
cccagcucugguccauagagagc

SEQ ID NO: 1507762 - RNA, 18 nt, Human
cccacccugaaagcccug

SEQ ID NO: 1507763 - RNA, 17 nt, Human
cccacccccacccaagg

SEQ ID NO: 1507764 - RNA, 15 nt, Human
cccacccccacccaa

SEQ ID NO: 1507765 - RNA, 20 nt, Human
cccacccaagggccuggccu

SEQ ID NO: 1507766 - RNA, 21 nt, Human
cccacccaagggccuggccug

SEQ ID NO: 1507767 - RNA, 22 nt, Human
cccacccaagggccuggccuga

SEQ ID NO: 1507768 - RNA, 22 nt, Human
cccacugcuuuuggucugugug

SEQ ID NO: 1507769 - RNA, 19 nt, Human
cccacugcuuuuggucugu

SEQ ID NO: 1507770 - RNA, 12 nt, Human
cccacugcucug

SEQ ID NO: 1507771 - RNA, 13 nt, Human
cccacugcucugg

SEQ ID NO: 1507772 - RNA, 12 nt, Human
cccacucccugc

SEQ ID NO: 1507773 - RNA, 23 nt, Human
ccccgaggccuucucugaaggac

SEQ ID NO: 1507774 - RNA, 13 nt, Human
ccccggccaccug

SEQ ID NO: 1507775 - RNA, 23 nt, Human
ccccaaaacucuccucugcugcu

SEQ ID NO: 1507776 - RNA, 22 nt, Human
cccauuguggucacaggaagua

SEQ ID NO: 1507777 - RNA, 23 nt, Human
cccauuguggucacaggaaguag

SEQ ID NO: 1507778 - RNA, 22 nt, Human
ccccaaaacucuccucugcugc

SEQ ID NO: 1507779 - RNA, 22 nt, Human
cccccaaauggaaaugggcaga

SEQ ID NO: 1507780 - RNA, 22 nt, Human
ccccagcaagugagagcugggu

SEQ ID NO: 1507781 - RNA, 12 nt, Human
ccccagcacuga

SEQ ID NO: 1507782 - RNA, 13 nt, Human
ccccagcacugag

SEQ ID NO: 1507783 - RNA, 15 nt, Human
ccccagcacugagga

SEQ ID NO: 1507784 - RNA, 16 nt, Human
ccccagcacugaggaa

SEQ ID NO: 1507785 - RNA, 17 nt, Human
cccggccaccugcggug

SEQ ID NO: 1507786 - RNA, 18 nt, Human
cccuauuagagaagagau

SEQ ID NO: 1507787 - RNA, 23 nt, Human
cccgggaggcagagguugcagug

SEQ ID NO: 1507788 - RNA, 13 nt, Human
cccggccaccugc

SEQ ID NO: 1507789 - RNA, 14 nt, Human
cccggccaccugcg

SEQ ID NO: 1507790 - RNA, 12 nt, Human
cccggcuccagg

SEQ ID NO: 1507791 - RNA, 13 nt, Human
cccggcuccaggc

SEQ ID NO: 1507792 - RNA, 14 nt, Human
cccggcuccaggcu

SEQ ID NO: 1507793 - RNA, 15 nt, Human
cccggcuccaggcuc

SEQ ID NO: 1507794 - RNA, 16 nt, Human
cccggcuccaggcucc

SEQ ID NO: 1507795 - RNA, 14 nt, Human
cccgaauagcuggg

SEQ ID NO: 1507796 - RNA, 16 nt, Human
cccgaauagcugggac

SEQ ID NO: 1507797 - RNA, 13 nt, Human
ccucuuggguuca

SEQ ID NO: 1507798 - RNA, 19 nt, Human
ccucuugagccuugaacuu

SEQ ID NO: 1507799 - RNA, 13 nt, Human
ccucuugagccuu

SEQ ID NO: 1507800 - RNA, 22 nt, Human
ccugcacuugcagacucuacag

SEQ ID NO: 1507801 - RNA, 17 nt, Human
ccugcaggaccucgugc

SEQ ID NO: 1507802 - RNA, 18 nt, Human
ccugcaggaccucgugcc

SEQ ID NO: 1507803 - RNA, 14 nt, Human
ccucucucaggcca

SEQ ID NO: 1507804 - RNA, 13 nt, Human
ccucucucacucc

SEQ ID NO: 1507805 - RNA, 14 nt, Human
ccucucucacuccu

SEQ ID NO: 1507806 - RNA, 15 nt, Human
ccucucucacuccuu

SEQ ID NO: 1507807 - RNA, 17 nt, Human
ccucucucacuccuuga

SEQ ID NO: 1507808 - RNA, 12 nt, Human
ccucucucaggc

SEQ ID NO: 1507809 - RNA, 22 nt, Human
ccucugccugaagucacacagu

SEQ ID NO: 1507810 - RNA, 13 nt, Human
ccucugcugcugg

SEQ ID NO: 1507811 - RNA, 14 nt, Human
ccucugcugcuggc

SEQ ID NO: 1507812 - RNA, 15 nt, Human
ccucugcugcuggcu

SEQ ID NO: 1507813 - RNA, 16 nt, Human
ccucugcugcuggcug

SEQ ID NO: 1507814 - RNA, 17 nt, Human
ccucugcugcuggcugg

SEQ ID NO: 1507815 - RNA, 18 nt, Human
ccucugcugcuggcuggu

SEQ ID NO: 1507816 - RNA, 16 nt, Human
ccugcccauuggagag

SEQ ID NO: 1507817 - RNA, 12 nt, Human
ccugcugggugu

SEQ ID NO: 1507818 - RNA, 21 nt, Human
ccugcuggguguggcgcagca

SEQ ID NO: 1507819 - RNA, 14 nt, Human
ccugcugggugugg

SEQ ID NO: 1507820 - RNA, 20 nt, Human
ccugcuggguguggcgcagc

SEQ ID NO: 1507821 - RNA, 14 nt, Human
ccugcccaggcccc

SEQ ID NO: 1507822 - RNA, 15 nt, Human
ccugcccaggccccu

SEQ ID NO: 1507823 - RNA, 16 nt, Human
ccugcccaggccccug

SEQ ID NO: 1507824 - RNA, 18 nt, Human
ccugcccaggccccugcc

SEQ ID NO: 1507825 - RNA, 15 nt, Human
ccuggaguucugguu

SEQ ID NO: 1507826 - RNA, 16 nt, Human
ccuggaguucugguuc

SEQ ID NO: 1507827 - RNA, 17 nt, Human
ccuggaguucugguucc

SEQ ID NO: 1507828 - RNA, 19 nt, Human
ccuggaugcagccucacag

SEQ ID NO: 1507829 - RNA, 14 nt, Human
ccuggaugcagccu

SEQ ID NO: 1507830 - RNA, 17 nt, Human
ccuggaugcagccucac

SEQ ID NO: 1507831 - RNA, 13 nt, Human
ccuggaugcagcc

SEQ ID NO: 1507832 - RNA, 18 nt, Human
ccuggcacccggccccug

SEQ ID NO: 1507833 - RNA, 12 nt, Human
ccuggccucugc

SEQ ID NO: 1507834 - RNA, 16 nt, Human
ccuggccucugcacuc

SEQ ID NO: 1507835 - RNA, 13 nt, Human
ccuggccugagcu

SEQ ID NO: 1507836 - RNA, 14 nt, Human
ccuggccucugcac

SEQ ID NO: 1507837 - RNA, 15 nt, Human
ccuggccucugcacu

SEQ ID NO: 1507838 - RNA, 17 nt, Human
cccuucuuuccacagaa

SEQ ID NO: 1507839 - RNA, 20 nt, Human
ccgaauagcugggacuacag

SEQ ID NO: 1507840 - RNA, 16 nt, Human
ccgacccuugccgucu

SEQ ID NO: 1507841 - RNA, 17 nt, Human
ccgccaaggcuggggga

SEQ ID NO: 1507842 - RNA, 16 nt, Human
ccgccaugcuccuggc

SEQ ID NO: 1507843 - RNA, 20 nt, Human
ccgcccaggcuuagucacug

SEQ ID NO: 1507844 - RNA, 21 nt, Human
cccuucugacccaugcugccc

SEQ ID NO: 1507845 - RNA, 22 nt, Human
cccuucugacccaugcugcccu

SEQ ID NO: 1507846 - RNA, 23 nt, Human
cccuucugacccaugcugcccug

SEQ ID NO: 1507847 - RNA, 16 nt, Human
cccuucuaccuuccug

SEQ ID NO: 1507848 - RNA, 16 nt, Human
cccuucgcuccugugu

SEQ ID NO: 1507849 - RNA, 18 nt, Human
cccuucgcuccugugucu

SEQ ID NO: 1507850 - RNA, 13 nt, Human
cccucaccccugg

SEQ ID NO: 1507851 - RNA, 20 nt, Human
cccucaccccugguucucau

SEQ ID NO: 1507852 - RNA, 22 nt, Human
cccucaccccugguucucaucu

SEQ ID NO: 1507853 - RNA, 12 nt, Human
cccugcccugug

SEQ ID NO: 1507854 - RNA, 13 nt, Human
cccugcccugugg

SEQ ID NO: 1507855 - RNA, 21 nt, Human
cccugcccugugggcccccaa

SEQ ID NO: 1507856 - RNA, 12 nt, Human
cccuggcagccc

SEQ ID NO: 1507857 - RNA, 13 nt, Human
cccuggcagcccc

SEQ ID NO: 1507858 - RNA, 14 nt, Human
cccugcccuguggg

SEQ ID NO: 1507859 - RNA, 15 nt, Human
cccugcccugugggc

SEQ ID NO: 1507860 - RNA, 16 nt, Human
cccugcccugugggcc

SEQ ID NO: 1507861 - RNA, 20 nt, Human
cccugcccugugggccccca

SEQ ID NO: 1507862 - RNA, 14 nt, Human
cccuggcagccccu

SEQ ID NO: 1507863 - RNA, 16 nt, Human
cccuggcagccccugu

SEQ ID NO: 1507864 - RNA, 16 nt, Human
ccguagguuauuuuca

SEQ ID NO: 1507865 - RNA, 12 nt, Human
ccggcuccaggc

SEQ ID NO: 1507866 - RNA, 23 nt, Human
ccuaggcauuugcugaauacaga

SEQ ID NO: 1507867 - RNA, 17 nt, Human
ccuagcacuuugggagg

SEQ ID NO: 1507868 - RNA, 19 nt, Human
ccucaacucuccuccagag

SEQ ID NO: 1507869 - RNA, 15 nt, Human
ccucaacucuccucc

SEQ ID NO: 1507870 - RNA, 15 nt, Human
ccucaagagaaggca

SEQ ID NO: 1507871 - RNA, 11 nt, Human
ccucagccucc

SEQ ID NO: 1507872 - RNA, 22 nt, Human
ccucagccucccaaagugcugg

SEQ ID NO: 1507873 - RNA, 22 nt, Human
ccucccaaggggcccaaauucu

SEQ ID NO: 1507874 - RNA, 19 nt, Human
ccucauguucuuaauucuu

SEQ ID NO: 1507875 - RNA, 18 nt, Human
ccucauuagcauuuugcu

SEQ ID NO: 1507876 - RNA, 23 nt, Human
ccucagccucccaaagugcuggg

SEQ ID NO: 1507877 - RNA, 22 nt, Human
ccucagccucccgaauagcugg

SEQ ID NO: 1507878 - RNA, 13 nt, Human
ccucauguucuua

SEQ ID NO: 1507879 - RNA, 20 nt, Human
ccucauguccacugguucuu

SEQ ID NO: 1507880 - RNA, 16 nt, Human
cuaacuucaccauauu

SEQ ID NO: 1507881 - RNA, 15 nt, Human
cuaacuucaccauau

SEQ ID NO: 1507882 - RNA, 20 nt, Human
cuaacgaaguauccuucagc

SEQ ID NO: 1507883 - RNA, 18 nt, Human
cuacaugagguacugaga

SEQ ID NO: 1507884 - RNA, 15 nt, Human
cuacaugagguacug

SEQ ID NO: 1507885 - RNA, 23 nt, Human
cuacauaaguaauucaagaaaac

SEQ ID NO: 1507886 - RNA, 18 nt, Human
cuacauacaauuccaaac

SEQ ID NO: 1507887 - RNA, 22 nt, Human
cuacauaaguaauucaagaaaa

SEQ ID NO: 1507888 - RNA, 15 nt, Human
cuacaguccucccau

SEQ ID NO: 1507889 - RNA, 16 nt, Human
cuacaguccucccauc

SEQ ID NO: 1507890 - RNA, 17 nt, Human
cuacaguccucccaucu

SEQ ID NO: 1507891 - RNA, 18 nt, Human
cuacaguccucccaucuc

SEQ ID NO: 1507892 - RNA, 13 nt, Human
cuacaguugaaaa

SEQ ID NO: 1507893 - RNA, 19 nt, Human
cuacaguugaaaaacagcu

SEQ ID NO: 1507894 - RNA, 15 nt, Human
cuacaaaaacacagc

SEQ ID NO: 1507895 - RNA, 18 nt, Human
cuaagugaggaugaaaaa

SEQ ID NO: 1507896 - RNA, 20 nt, Human
cuaagugauccucccaccuc

SEQ ID NO: 1507897 - RNA, 22 nt, Human
cuaagugauccucccaccucag

SEQ ID NO: 1507898 - RNA, 20 nt, Human
cuaagugaaauaagccagac

SEQ ID NO: 1507899 - RNA, 23 nt, Human
cuaagugaaauaagccagacauc

SEQ ID NO: 1507900 - RNA, 23 nt, Human
cuaguugaucagcuuauugucua

SEQ ID NO: 1507901 - RNA, 22 nt, Human
cuaguuccaccaucaagccacc

SEQ ID NO: 1507902 - RNA, 19 nt, Human
cuagggaaaaaccagcgug

SEQ ID NO: 1507903 - RNA, 21 nt, Human
cuagggaaaaaccagcgugug

SEQ ID NO: 1507904 - RNA, 18 nt, Human
cuaguuccaccaucaagc

SEQ ID NO: 1507905 - RNA, 20 nt, Human
cuaguuccaccaucaagcca

SEQ ID NO: 1507906 - RNA, 23 nt, Human
cuagcagcagggagggcuucugc

SEQ ID NO: 1507907 - RNA, 17 nt, Human
cuagcauggcugccaau

SEQ ID NO: 1507908 - RNA, 22 nt, Human
cuagcagcagggagggcuucug

SEQ ID NO: 1507909 - RNA, 16 nt, Human
cuagaacucccuuuca

SEQ ID NO: 1507910 - RNA, 17 nt, Human
cuagaacucccuuucaa

SEQ ID NO: 1507911 - RNA, 18 nt, Human
cuagaacucccuuucaac

SEQ ID NO: 1507912 - RNA, 19 nt, Human
cuagaacucccuuucaaca

SEQ ID NO: 1507913 - RNA, 19 nt, Human
cuagaaauuccccacccug

SEQ ID NO: 1507914 - RNA, 15 nt, Human
cuaccugaggggccu

SEQ ID NO: 1507915 - RNA, 11 nt, Human
cuaccugaggg

SEQ ID NO: 1507916 - RNA, 14 nt, Human
cuaccugaggggcc

SEQ ID NO: 1507917 - RNA, 14 nt, Human
cggagucccaccuu

SEQ ID NO: 1507918 - RNA, 15 nt, Human
cggcggucccagcuc

SEQ ID NO: 1507919 - RNA, 16 nt, Human
cggcggucccagcucc

SEQ ID NO: 1507920 - RNA, 18 nt, Human
cggcucacugcagccuca

SEQ ID NO: 1507921 - RNA, 19 nt, Human
cggcggucccagcucccug

SEQ ID NO: 1507922 - RNA, 19 nt, Human
cggcucacugcagccucaa

SEQ ID NO: 1507923 - RNA, 14 nt, Human
cgccuacaggagug

SEQ ID NO: 1507924 - RNA, 23 nt, Human
cgccaaggcugggggaagaagcu

SEQ ID NO: 1507925 - RNA, 13 nt, Human
cgccaaggcuggg

SEQ ID NO: 1507926 - RNA, 16 nt, Human
cgccaaggcuggggga

SEQ ID NO: 1507927 - RNA, 12 nt, Human
cgccaaggcugg

SEQ ID NO: 1507928 - RNA, 17 nt, Human
cgaguuacagacaaagc

SEQ ID NO: 1507929 - RNA, 18 nt, Human
cgaguuacagacaaagcg

SEQ ID NO: 1507930 - RNA, 14 nt, Human
cgaguagcugggac

SEQ ID NO: 1507931 - RNA, 15 nt, Human
cgaguagcugggacu

SEQ ID NO: 1507932 - RNA, 16 nt, Human
cgaguagcugggacua

SEQ ID NO: 1507933 - RNA, 22 nt, Human
ccuucuggaauaaggagaauga

SEQ ID NO: 1507934 - RNA, 23 nt, Human
ccuucugacccaugcugcccugu

SEQ ID NO: 1507935 - RNA, 21 nt, Human
ccuucugacccaugcugcccu

SEQ ID NO: 1507936 - RNA, 22 nt, Human
ccuucugacccaugcugcccug

SEQ ID NO: 1507937 - RNA, 20 nt, Human
ccuggccugagcugggauga

SEQ ID NO: 1507938 - RNA, 14 nt, Human
ccuggccugagcug

SEQ ID NO: 1507939 - RNA, 15 nt, Human
ccuggccugagcugg

SEQ ID NO: 1507940 - RNA, 12 nt, Human
ccuucugaccca

SEQ ID NO: 1507941 - RNA, 16 nt, Human
ccuucugacccaugcu

SEQ ID NO: 1507942 - RNA, 17 nt, Human
ccuucugacccaugcug

SEQ ID NO: 1507943 - RNA, 20 nt, Human
ccuucugacccaugcugccc

SEQ ID NO: 1507944 - RNA, 19 nt, Human
ccuuuuuuauacauaaaca

SEQ ID NO: 1507945 - RNA, 23 nt, Human
cgaccagacaccuugacagggca

SEQ ID NO: 1507946 - RNA, 18 nt, Human
ccuuuuuuauacauaaac

SEQ ID NO: 1507947 - RNA, 17 nt, Human
ccuuuuuuauacauaaa

SEQ ID NO: 1507948 - RNA, 15 nt, Human
cgacagugagacucu

SEQ ID NO: 1507949 - RNA, 16 nt, Human
cgacagugagacucug

SEQ ID NO: 1507950 - RNA, 12 nt, Human
ccuuuuuuauac

SEQ ID NO: 1507951 - RNA, 14 nt, Human
ccuuuagcgcccag

SEQ ID NO: 1507952 - RNA, 20 nt, Human
ccuuuagcgcccaguugggu

SEQ ID NO: 1507953 - RNA, 20 nt, Human
ccuugccgucuaccugaggg

SEQ ID NO: 1507954 - RNA, 20 nt, Human
cuccaaccccccagcacuga

SEQ ID NO: 1507955 - RNA, 21 nt, Human
cuccaaccccccagcacugag

SEQ ID NO: 1507956 - RNA, 22 nt, Human
cuccaaccccccagcacugagg

SEQ ID NO: 1507957 - RNA, 23 nt, Human
cuccaaccccccagcacugagga

SEQ ID NO: 1507958 - RNA, 14 nt, Human
cuccaaccccccag

SEQ ID NO: 1507959 - RNA, 15 nt, Human
cuccaaccccccagc

SEQ ID NO: 1507960 - RNA, 17 nt, Human
cuccaaccccccagcac

SEQ ID NO: 1507961 - RNA, 18 nt, Human
cuccaaccccccagcacu

SEQ ID NO: 1507962 - RNA, 19 nt, Human
cuccaaccccccagcacug

SEQ ID NO: 1507963 - RNA, 19 nt, Human
cucauguucuuaauucuua

SEQ ID NO: 1507964 - RNA, 18 nt, Human
cucauguucuuaauucuu

SEQ ID NO: 1507965 - RNA, 14 nt, Human
cucauguucuuaau

SEQ ID NO: 1507966 - RNA, 12 nt, Human
cucauguucuua

SEQ ID NO: 1507967 - RNA, 12 nt, Human
cucaucuuucuu

SEQ ID NO: 1507968 - RNA, 13 nt, Human
cucaucuuucuug

SEQ ID NO: 1507969 - RNA, 15 nt, Human
cucaucuuucuugau

SEQ ID NO: 1507970 - RNA, 20 nt, Human
cucagucuggcccuuccuuu

SEQ ID NO: 1507971 - RNA, 13 nt, Human
cucagugccacua

SEQ ID NO: 1507972 - RNA, 17 nt, Human
cucagucuggcccuucc

SEQ ID NO: 1507973 - RNA, 18 nt, Human
cucagucuggcccuuccu

SEQ ID NO: 1507974 - RNA, 22 nt, Human
cucagccucccaaagugcuggg

SEQ ID NO: 1507975 - RNA, 13 nt, Human
cucagccucccga

SEQ ID NO: 1507976 - RNA, 21 nt, Human
cucagccucccaaagugcugg

SEQ ID NO: 1507977 - RNA, 14 nt, Human
cucagccucccaaa

SEQ ID NO: 1507978 - RNA, 16 nt, Human
cucagccucccaaagu

SEQ ID NO: 1507979 - RNA, 13 nt, Human
cucagccucccaa

SEQ ID NO: 1507980 - RNA, 13 nt, Human
cucaggccagcug

SEQ ID NO: 1507981 - RNA, 13 nt, Human
cucagcggggaca

SEQ ID NO: 1507982 - RNA, 14 nt, Human
cucaggccagcugc

SEQ ID NO: 1507983 - RNA, 15 nt, Human
cucaggccagcugcu

SEQ ID NO: 1507984 - RNA, 21 nt, Human
cucaggccagcugcuugggcu

SEQ ID NO: 1507985 - RNA, 22 nt, Human
cucaggccagcugcuugggcuu

SEQ ID NO: 1507986 - RNA, 14 nt, Human
cucaggccuggggg

SEQ ID NO: 1507987 - RNA, 20 nt, Human
cucaggccugggggcugggc

SEQ ID NO: 1507988 - RNA, 22 nt, Human
cucaggccugggggcugggcag

SEQ ID NO: 1507989 - RNA, 21 nt, Human
cucaggccugggggcugggca

SEQ ID NO: 1507990 - RNA, 11 nt, Human
cuccaggugca

SEQ ID NO: 1507991 - RNA, 16 nt, Human
cuccaagaccuucucc

SEQ ID NO: 1507992 - RNA, 17 nt, Human
cuccaagaccuucuccu

SEQ ID NO: 1507993 - RNA, 18 nt, Human
cuccaagaccuucuccuu

SEQ ID NO: 1507994 - RNA, 21 nt, Human
cuccaagaccuucuccuucac

SEQ ID NO: 1507995 - RNA, 22 nt, Human
cuccacuuucuagccagaggag

SEQ ID NO: 1507996 - RNA, 15 nt, Human
cuccagaauuuccca

SEQ ID NO: 1507997 - RNA, 18 nt, Human
cuccagaauuucccaaag

SEQ ID NO: 1507998 - RNA, 21 nt, Human
cuccagaauuucccaaagcag

SEQ ID NO: 1507999 - RNA, 17 nt, Human
cuccagacacaugucca

SEQ ID NO: 1508000 - RNA, 19 nt, Human
cuccagacacauguccaag

SEQ ID NO: 1508001 - RNA, 15 nt, Human
cuccccuccaaccug

SEQ ID NO: 1508002 - RNA, 12 nt, Human
cucccaccucag

SEQ ID NO: 1508003 - RNA, 13 nt, Human
cucccaccucagc

SEQ ID NO: 1508004 - RNA, 21 nt, Human
cuccagugagacagcucugca

SEQ ID NO: 1508005 - RNA, 19 nt, Human
cuccgcuuucuacccagcg

SEQ ID NO: 1508006 - RNA, 17 nt, Human
cuccgccuuaccaggag

SEQ ID NO: 1508007 - RNA, 20 nt, Human
cucuuagaugcaguucugaa

SEQ ID NO: 1508008 - RNA, 21 nt, Human
cucuuagaugcaguucugaag

SEQ ID NO: 1508009 - RNA, 16 nt, Human
cugaaaauuaacacug

SEQ ID NO: 1508010 - RNA, 17 nt, Human
cugaaaauuaacacugc

SEQ ID NO: 1508011 - RNA, 16 nt, Human
cugaaaauguaugugu

SEQ ID NO: 1508012 - RNA, 19 nt, Human
cugaaggacauugcggaca

SEQ ID NO: 1508013 - RNA, 20 nt, Human
cugaaggacauugcggacag

SEQ ID NO: 1508014 - RNA, 21 nt, Human
cugaaggacauugcggacagc

SEQ ID NO: 1508015 - RNA, 13 nt, Human
cugaaggccccgc

SEQ ID NO: 1508016 - RNA, 14 nt, Human
cugaaggccccgcc

SEQ ID NO: 1508017 - RNA, 17 nt, Human
cugaaggccccgcccag

SEQ ID NO: 1508018 - RNA, 18 nt, Human
cugaaggccccgcccagg

SEQ ID NO: 1508019 - RNA, 12 nt, Human
cugacagacaca

SEQ ID NO: 1508020 - RNA, 14 nt, Human
cugacagacacagg

SEQ ID NO: 1508021 - RNA, 15 nt, Human
cugacagacacaggc

SEQ ID NO: 1508022 - RNA, 18 nt, Human
cugacccaugcugcccug

SEQ ID NO: 1508023 - RNA, 17 nt, Human
cugacccaugcugcccu

SEQ ID NO: 1508024 - RNA, 19 nt, Human
cugacccaugcugcccugu

SEQ ID NO: 1508025 - RNA, 20 nt, Human
cugacccaugcugcccugug

SEQ ID NO: 1508026 - RNA, 15 nt, Human
cucuuagaugcaguu

SEQ ID NO: 1508027 - RNA, 17 nt, Human
cucuguacagagcccac

SEQ ID NO: 1508028 - RNA, 21 nt, Human
cucuguacagagcccacgccc

SEQ ID NO: 1508029 - RNA, 19 nt, Human
cucugguccauagagagca

SEQ ID NO: 1508030 - RNA, 16 nt, Human
cucugguccauagaga

SEQ ID NO: 1508031 - RNA, 18 nt, Human
cucugguccauagagagc

SEQ ID NO: 1508032 - RNA, 17 nt, Human
cucugcugacagacaca

SEQ ID NO: 1508033 - RNA, 18 nt, Human
cucugcugacagacacag

SEQ ID NO: 1508034 - RNA, 19 nt, Human
cucugcugacagacacagg

SEQ ID NO: 1508035 - RNA, 20 nt, Human
cucugcugacagacacaggc

SEQ ID NO: 1508036 - RNA, 14 nt, Human
cucugcacuccccu

SEQ ID NO: 1508037 - RNA, 19 nt, Human
cucugcagcaauaaagcag

SEQ ID NO: 1508038 - RNA, 18 nt, Human
cucugcagcaauaaagca

SEQ ID NO: 1508039 - RNA, 23 nt, Human
cucugcagcaauaaagcagcguu

SEQ ID NO: 1508040 - RNA, 19 nt, Human
cucugcgucgguccuggug

SEQ ID NO: 1508041 - RNA, 20 nt, Human
cucugcgucgguccuggugc

SEQ ID NO: 1508042 - RNA, 21 nt, Human
cucugcgucgguccuggugcc

SEQ ID NO: 1508043 - RNA, 22 nt, Human
cucugcgucgguccuggugccc

SEQ ID NO: 1508044 - RNA, 21 nt, Human
cucucacuuguuuuauuuaac

SEQ ID NO: 1508045 - RNA, 15 nt, Human
cucucacuccuugaa

SEQ ID NO: 1508046 - RNA, 19 nt, Human
cucucagauuguaccauug

SEQ ID NO: 1508047 - RNA, 12 nt, Human
cucucacuccuu

SEQ ID NO: 1508048 - RNA, 14 nt, Human
cucucacuccuuga

SEQ ID NO: 1508049 - RNA, 15 nt, Human
cucuccccaugaugu

SEQ ID NO: 1508050 - RNA, 13 nt, Human
cucucuggccuuc

SEQ ID NO: 1508051 - RNA, 15 nt, Human
cucugaaggacauug

SEQ ID NO: 1508052 - RNA, 12 nt, Human
cucucuggccuu

SEQ ID NO: 1508053 - RNA, 11 nt, Human
cucucuggccu

SEQ ID NO: 1508054 - RNA, 12 nt, Human
cucuccuccaga

SEQ ID NO: 1508055 - RNA, 20 nt, Human
cuccgcuuucuacccagcga

SEQ ID NO: 1508056 - RNA, 22 nt, Human
augucuauaaaccgaacugaug

SEQ ID NO: 1508057 - RNA, 16 nt, Human
auguccacugguucuu

SEQ ID NO: 1508058 - RNA, 21 nt, Human
augucagugugacugaucucu

SEQ ID NO: 1508059 - RNA, 16 nt, Human
augucagugugacuga

SEQ ID NO: 1508060 - RNA, 19 nt, Human
auguccaagaagcccagga

SEQ ID NO: 1508061 - RNA, 23 nt, Human
auguccaagaagcccaggaaagg

SEQ ID NO: 1508062 - RNA, 14 nt, Human
auguauaauauuuu

SEQ ID NO: 1508063 - RNA, 15 nt, Human
auguaucaaugagua

SEQ ID NO: 1508064 - RNA, 22 nt, Human
uuugggggaaaauuuagaaaua

SEQ ID NO: 1508065 - RNA, 15 nt, Human
auguaucugagcagg

SEQ ID NO: 1508066 - RNA, 12 nt, Human
auguauguguaa

SEQ ID NO: 1508067 - RNA, 15 nt, Human
auguauguguaagua

SEQ ID NO: 1508068 - RNA, 11 nt, Human
uuugcucaugg

SEQ ID NO: 1508069 - RNA, 12 nt, Human
uuugcucaugga

SEQ ID NO: 1508070 - RNA, 15 nt, Human
auggcuauaggugcu

SEQ ID NO: 1508071 - RNA, 13 nt, Human
uuugcucauggaa

SEQ ID NO: 1508072 - RNA, 14 nt, Human
uuuggggauauuuu

SEQ ID NO: 1508073 - RNA, 22 nt, Human
uuugggaggccaaggugggagg

SEQ ID NO: 1508074 - RNA, 17 nt, Human
uuuguagaagucacauu

SEQ ID NO: 1508075 - RNA, 17 nt, Human
uuuguagcacugacaga

SEQ ID NO: 1508076 - RNA, 19 nt, Human
uuuguagcacugacagauu

SEQ ID NO: 1508077 - RNA, 14 nt, Human
uuuguuugaacuga

SEQ ID NO: 1508078 - RNA, 13 nt, Human
uuuguuugaacug

SEQ ID NO: 1508079 - RNA, 12 nt, Human
uuuguuugaacu

SEQ ID NO: 1508080 - RNA, 15 nt, Human
uuugugauacaaugc

SEQ ID NO: 1508081 - RNA, 18 nt, Human
uuugugaggaagccgcug

SEQ ID NO: 1508082 - RNA, 19 nt, Human
uuugugaggaagccgcugg

SEQ ID NO: 1508083 - RNA, 13 nt, Human
uuuguagagccag

SEQ ID NO: 1508084 - RNA, 15 nt, Human
uuuuaagugcugcau

SEQ ID NO: 1508085 - RNA, 11 nt, Human
uuuuaagaaau

SEQ ID NO: 1508086 - RNA, 15 nt, Human
uuuuaagaggcaggg

SEQ ID NO: 1508087 - RNA, 16 nt, Human
uuuuaagaggcagggu

SEQ ID NO: 1508088 - RNA, 13 nt, Human
uuuuaacucaaua

SEQ ID NO: 1508089 - RNA, 14 nt, Human
uuuuaaaagaauga

SEQ ID NO: 1508090 - RNA, 15 nt, Human
uuuuaaaagaaugau

SEQ ID NO: 1508091 - RNA, 13 nt, Human
uuuuaaaaaagaa

SEQ ID NO: 1508092 - RNA, 13 nt, Human
uuuguuugugcau

SEQ ID NO: 1508093 - RNA, 18 nt, Human
uuuguuugaacugauaaa

SEQ ID NO: 1508094 - RNA, 18 nt, Human
auguuucaaacauauaua

SEQ ID NO: 1508095 - RNA, 21 nt, Human
auguuucaaacauauauaaca

SEQ ID NO: 1508096 - RNA, 14 nt, Human
auguuuuccaugag

SEQ ID NO: 1508097 - RNA, 15 nt, Human
auguugugauguauu

SEQ ID NO: 1508098 - RNA, 16 nt, Human
auuaaaagaauauuuu

SEQ ID NO: 1508099 - RNA, 17 nt, Human
auguuuuucuucucccu

SEQ ID NO: 1508100 - RNA, 17 nt, Human
auguuuuuguguauuug

SEQ ID NO: 1508101 - RNA, 20 nt, Human
auuaaaaaaucaguuguaca

SEQ ID NO: 1508102 - RNA, 18 nt, Human
auguuuuucuucucccuc

SEQ ID NO: 1508103 - RNA, 23 nt, Human
auuaacuuuuauaaacuuuaccu

SEQ ID NO: 1508104 - RNA, 13 nt, Human
auuaagaaagacu

SEQ ID NO: 1508105 - RNA, 14 nt, Human
auuaagaaagacua

SEQ ID NO: 1508106 - RNA, 12 nt, Human
auuaacuuuuau

SEQ ID NO: 1508107 - RNA, 20 nt, Human
auuaacuuuuauaaacuuua

SEQ ID NO: 1508108 - RNA, 19 nt, Human
auuaacuuuuauaaacuuu

SEQ ID NO: 1508109 - RNA, 17 nt, Human
auuaacuuuuauaaacu

SEQ ID NO: 1508110 - RNA, 16 nt, Human
auuaacuuuuauaaac

SEQ ID NO: 1508111 - RNA, 21 nt, Human
auuaaacuuaaucuaaaugga

SEQ ID NO: 1508112 - RNA, 19 nt, Human
auuaaacuuaaucuaaaug

SEQ ID NO: 1508113 - RNA, 17 nt, Human
auuaaacuuaaucuaaa

SEQ ID NO: 1508114 - RNA, 18 nt, Human
auuaaccacuucagcuga

SEQ ID NO: 1508115 - RNA, 20 nt, Human
auuaaccacuucagcugacu

SEQ ID NO: 1508116 - RNA, 17 nt, Human
auuaaccacuucagcug

SEQ ID NO: 1508117 - RNA, 19 nt, Human
uuuuccagguuuaagcugu

SEQ ID NO: 1508118 - RNA, 18 nt, Human
uuuuccaugaaaaugcaa

SEQ ID NO: 1508119 - RNA, 19 nt, Human
uuuuccaugaaaaugcaac

SEQ ID NO: 1508120 - RNA, 22 nt, Human
uuuuauggcacuaguauuucua

SEQ ID NO: 1508121 - RNA, 19 nt, Human
uuuuauggcacuaguauuu

SEQ ID NO: 1508122 - RNA, 23 nt, Human
uuuuauggaggcuuugcauagau

SEQ ID NO: 1508123 - RNA, 14 nt, Human
uuuuauaauuuugu

SEQ ID NO: 1508124 - RNA, 19 nt, Human
uuuuaugccuuuuauuucu

SEQ ID NO: 1508125 - RNA, 17 nt, Human
uuuuauaaacuuuaccu

SEQ ID NO: 1508126 - RNA, 14 nt, Human
uuuuauaaacuuua

SEQ ID NO: 1508127 - RNA, 19 nt, Human
uuuuauaaacuuuaccuuu

SEQ ID NO: 1508128 - RNA, 14 nt, Human
auguuggccaggcu

SEQ ID NO: 1508129 - RNA, 16 nt, Human
auguuggccaggcugg

SEQ ID NO: 1508130 - RNA, 13 nt, Human
uuuuauaaacuuu

SEQ ID NO: 1508131 - RNA, 12 nt, Human
uuuuauaaacuu

SEQ ID NO: 1508132 - RNA, 15 nt, Human
auguugacaugggac

SEQ ID NO: 1508133 - RNA, 21 nt, Human
auguucaucauccuaagcuau

SEQ ID NO: 1508134 - RNA, 19 nt, Human
auguucaucaaugaaugaa

SEQ ID NO: 1508135 - RNA, 21 nt, Human
uuuuaagugcugcauuuaaaa

SEQ ID NO: 1508136 - RNA, 17 nt, Human
uuuuaagugcugcauuu

SEQ ID NO: 1508137 - RNA, 16 nt, Human
uuuuaagugcugcauu

SEQ ID NO: 1508138 - RNA, 16 nt, Human
auuauauuuacaaaug

SEQ ID NO: 1508139 - RNA, 18 nt, Human
auuaucucaaaacugcac

SEQ ID NO: 1508140 - RNA, 23 nt, Human
auuaucucaaaacugcacuguca

SEQ ID NO: 1508141 - RNA, 17 nt, Human
auuauauuuacaaaugg

SEQ ID NO: 1508142 - RNA, 23 nt, Human
auuauuuauuaaaugcccagccc

SEQ ID NO: 1508143 - RNA, 20 nt, Human
auuauuaccuuacagaaguu

SEQ ID NO: 1508144 - RNA, 13 nt, Human
auuaaguaaugau

SEQ ID NO: 1508145 - RNA, 15 nt, Human
auuaaguaaugauaa

SEQ ID NO: 1508146 - RNA, 21 nt, Human
auuaaguaaugauaacuggaa

SEQ ID NO: 1508147 - RNA, 15 nt, Human
auuaauauauuucca

SEQ ID NO: 1508148 - RNA, 20 nt, Human
auuaauauggggaugcagca

SEQ ID NO: 1508149 - RNA, 23 nt, Human
uuuuuuaaaaaagaaacauuugg

SEQ ID NO: 1508150 - RNA, 20 nt, Human
auuaagagagucuauuuacg

SEQ ID NO: 1508151 - RNA, 13 nt, Human
auuacauuuguau

SEQ ID NO: 1508152 - RNA, 15 nt, Human
auuacauuuguauaa

SEQ ID NO: 1508153 - RNA, 16 nt, Human
auuacauuuguauaaa

SEQ ID NO: 1508154 - RNA, 19 nt, Human
auuaccacagacauacuaa

SEQ ID NO: 1508155 - RNA, 12 nt, Human
auuaccagggac

SEQ ID NO: 1508156 - RNA, 22 nt, Human
auuaccugaauuuuggcugugu

SEQ ID NO: 1508157 - RNA, 20 nt, Human
auuccacuuauaggaauuga

SEQ ID NO: 1508158 - RNA, 19 nt, Human
auuccccaggaggccagcc

SEQ ID NO: 1508159 - RNA, 20 nt, Human
auuccccagauugcaacagg

SEQ ID NO: 1508160 - RNA, 16 nt, Human
auuccccaggaggcca

SEQ ID NO: 1508161 - RNA, 14 nt, Human
auucaaacagucuc

SEQ ID NO: 1508162 - RNA, 15 nt, Human
auucaaacagucuca

SEQ ID NO: 1508163 - RNA, 21 nt, Human
auucaguuguuagugugucuu

SEQ ID NO: 1508164 - RNA, 23 nt, Human
auucaggaagcucagggccuggc

SEQ ID NO: 1508165 - RNA, 14 nt, Human
auucagcucugcaa

SEQ ID NO: 1508166 - RNA, 18 nt, Human
auucagcucugcaagaau

SEQ ID NO: 1508167 - RNA, 21 nt, Human
auucaggaagcucagggccug

SEQ ID NO: 1508168 - RNA, 22 nt, Human
auucaggaagcucagggccugg

SEQ ID NO: 1508169 - RNA, 16 nt, Human
auucaaacagucucag

SEQ ID NO: 1508170 - RNA, 17 nt, Human
auugaccugaggcccuu

SEQ ID NO: 1508171 - RNA, 13 nt, Human
auugaccugaggc

SEQ ID NO: 1508172 - RNA, 15 nt, Human
auugcaacaggcugg

SEQ ID NO: 1508173 - RNA, 18 nt, Human
auugacaggauuauugga

SEQ ID NO: 1508174 - RNA, 16 nt, Human
auugcaacaggcuggg

SEQ ID NO: 1508175 - RNA, 21 nt, Human
auugcaacaggcugggcuuca

SEQ ID NO: 1508176 - RNA, 16 nt, Human
auugcggacagccacg

SEQ ID NO: 1508177 - RNA, 18 nt, Human
auugcggacagccacggc

SEQ ID NO: 1508178 - RNA, 19 nt, Human
auugcggacagccacggcc

SEQ ID NO: 1508179 - RNA, 17 nt, Human
auugcccacgcuggagu

SEQ ID NO: 1508180 - RNA, 21 nt, Human
auugcccacgcuggagugcag

SEQ ID NO: 1508181 - RNA, 23 nt, Human
auugccauuucuuccacaagagc

SEQ ID NO: 1508182 - RNA, 19 nt, Human
auucucacagcuccaagaa

SEQ ID NO: 1508183 - RNA, 21 nt, Human
auucucacagcuccaagaauu

SEQ ID NO: 1508184 - RNA, 22 nt, Human
auucucacagcuccaagaauuu

SEQ ID NO: 1508185 - RNA, 14 nt, Human
auucucagaaucuc

SEQ ID NO: 1508186 - RNA, 13 nt, Human
auucuacuuugag

SEQ ID NO: 1508187 - RNA, 16 nt, Human
auucuacuuugagugc

SEQ ID NO: 1508188 - RNA, 18 nt, Human
auucucagaaucucaaau

SEQ ID NO: 1508189 - RNA, 20 nt, Human
auucucagaaucucaaauaa

SEQ ID NO: 1508190 - RNA, 13 nt, Human
auucuccaccugc

SEQ ID NO: 1508191 - RNA, 16 nt, Human
auucuccaccugccag

SEQ ID NO: 1508192 - RNA, 17 nt, Human
auucuccaccugccagg

SEQ ID NO: 1508193 - RNA, 20 nt, Human
auugacacuuaaaaaugguu

SEQ ID NO: 1508194 - RNA, 18 nt, Human
auucuccaccugccaggg

SEQ ID NO: 1508195 - RNA, 14 nt, Human
auugcuacuguccu

SEQ ID NO: 1508196 - RNA, 16 nt, Human
auuuaaccucuaaauu

SEQ ID NO: 1508197 - RNA, 18 nt, Human
auuuaaccucuaaauucu

SEQ ID NO: 1508198 - RNA, 19 nt, Human
auuuaauuuuuuugagaca

SEQ ID NO: 1508199 - RNA, 23 nt, Human
auuuaauuuuuuugagacagagu

SEQ ID NO: 1508200 - RNA, 16 nt, Human
auuuacaaaugggaaa

SEQ ID NO: 1508201 - RNA, 22 nt, Human
auuuacaacugggggaggguga

SEQ ID NO: 1508202 - RNA, 21 nt, Human
auuguuuggggaugagaaagg

SEQ ID NO: 1508203 - RNA, 19 nt, Human
auuuaaagcuuauuaaaac

SEQ ID NO: 1508204 - RNA, 16 nt, Human
auuuaacagaaaugua

SEQ ID NO: 1508205 - RNA, 19 nt, Human
auuuaacagaaauguacag

SEQ ID NO: 1508206 - RNA, 17 nt, Human
auuuaacagaaauguac

SEQ ID NO: 1508207 - RNA, 20 nt, Human
auuuaacagaaauguacagc

SEQ ID NO: 1508208 - RNA, 15 nt, Human
auuguauuacaaauc

SEQ ID NO: 1508209 - RNA, 14 nt, Human
auuguauuacaaau

SEQ ID NO: 1508210 - RNA, 13 nt, Human
auugugccccugc

SEQ ID NO: 1508211 - RNA, 21 nt, Human
auuggcucacacugagaaugu

SEQ ID NO: 1508212 - RNA, 21 nt, Human
auugcuaaucaccaaaggcuc

SEQ ID NO: 1508213 - RNA, 23 nt, Human
auuggcuuuggguugcaggaccu

SEQ ID NO: 1508214 - RNA, 13 nt, Human
auuuaaaagauac

SEQ ID NO: 1508215 - RNA, 23 nt, Human
auuuccugggagcuuuuguagaa

SEQ ID NO: 1508216 - RNA, 22 nt, Human
auuuccugggagcuuuuguaga

SEQ ID NO: 1508217 - RNA, 16 nt, Human
auuuauuauggcacau

SEQ ID NO: 1508218 - RNA, 14 nt, Human
auuuccugugucuu

SEQ ID NO: 1508219 - RNA, 13 nt, Human
auuucuaaaucuc

SEQ ID NO: 1508220 - RNA, 12 nt, Human
auuucuaaaucu

SEQ ID NO: 1508221 - RNA, 21 nt, Human
auuucuaaaucuccaaaauaa

SEQ ID NO: 1508222 - RNA, 22 nt, Human
auuuauuacuguaagaaaauau

SEQ ID NO: 1508223 - RNA, 20 nt, Human
auuuauuaaaugcccagccc

SEQ ID NO: 1508224 - RNA, 13 nt, Human
auuuauuauggca

SEQ ID NO: 1508225 - RNA, 22 nt, Human
auuuauuaaaugcccagccccu

SEQ ID NO: 1508226 - RNA, 18 nt, Human
auuuguaguguuggagaa

SEQ ID NO: 1508227 - RNA, 21 nt, Human
auuugguuuucacauuggaaa

SEQ ID NO: 1508228 - RNA, 22 nt, Human
auuugguuuucacauuggaaac

SEQ ID NO: 1508229 - RNA, 15 nt, Human
auuugguuuucacau

SEQ ID NO: 1508230 - RNA, 17 nt, Human
auuugguuuucacauug

SEQ ID NO: 1508231 - RNA, 20 nt, Human
auuuggugguuucagaaaug

SEQ ID NO: 1508232 - RNA, 18 nt, Human
auuuggugguuucagaaa

SEQ ID NO: 1508233 - RNA, 23 nt, Human
auuugguaaggggaauugaggac

SEQ ID NO: 1508234 - RNA, 17 nt, Human
auuuggugguuucagaa

SEQ ID NO: 1508235 - RNA, 20 nt, Human
auuuggagacacaacuauuu

SEQ ID NO: 1508236 - RNA, 12 nt, Human
auuuggggugga

SEQ ID NO: 1508237 - RNA, 21 nt, Human
auuuggagacacaacuauuuu

SEQ ID NO: 1508238 - RNA, 17 nt, Human
auuugagcagggcucag

SEQ ID NO: 1508239 - RNA, 23 nt, Human
auuugaggucuguucuuuccaaa

SEQ ID NO: 1508240 - RNA, 15 nt, Human
auuugaggucuguuc

SEQ ID NO: 1508241 - RNA, 20 nt, Human
auuucuuuugccguuauuaa

SEQ ID NO: 1508242 - RNA, 19 nt, Human
auuuguaguguuggagaag

SEQ ID NO: 1508243 - RNA, 15 nt, Human
auuuguaucacaaau

SEQ ID NO: 1508244 - RNA, 14 nt, Human
auuuuaauaauguu

SEQ ID NO: 1508245 - RNA, 15 nt, Human
auuuuaauaauguuu

SEQ ID NO: 1508246 - RNA, 16 nt, Human
auuuuaauaauguuuc

SEQ ID NO: 1508247 - RNA, 13 nt, Human
auuuuacauaaau

SEQ ID NO: 1508248 - RNA, 21 nt, Human
auuuuacuuuaaaaggagcca

SEQ ID NO: 1508249 - RNA, 13 nt, Human
auuuuauuaugca

SEQ ID NO: 1508250 - RNA, 15 nt, Human
auuuuauuaugcaug

SEQ ID NO: 1508251 - RNA, 14 nt, Human
auuuuauuaugcau

SEQ ID NO: 1508252 - RNA, 17 nt, Human
auuuuauuaugcaugaa

SEQ ID NO: 1508253 - RNA, 23 nt, Human
auuucuuuugccguuauuaaaaa

SEQ ID NO: 1508254 - RNA, 21 nt, Human
aucucauuuccaagcaaguau

SEQ ID NO: 1508255 - RNA, 18 nt, Human
aucucauaauuuauacag

SEQ ID NO: 1508256 - RNA, 17 nt, Human
aucucauaauuuauaca

SEQ ID NO: 1508257 - RNA, 23 nt, Human
aucucauuuccaagcaaguauua

SEQ ID NO: 1508258 - RNA, 13 nt, Human
aucuccaaaauaa

SEQ ID NO: 1508259 - RNA, 14 nt, Human
aucucccccagccc

SEQ ID NO: 1508260 - RNA, 13 nt, Human
aucucuuagcucc

SEQ ID NO: 1508261 - RNA, 16 nt, Human
aucucuuagcuccccu

SEQ ID NO: 1508262 - RNA, 18 nt, Human
aucucuuagcuccccucc

SEQ ID NO: 1508263 - RNA, 19 nt, Human
aucucuuagcuccccucca

SEQ ID NO: 1508264 - RNA, 12 nt, Human
aucucccccagc

SEQ ID NO: 1508265 - RNA, 13 nt, Human
aucucccccagcc

SEQ ID NO: 1508266 - RNA, 16 nt, Human
aucucacacaugagca

SEQ ID NO: 1508267 - RNA, 13 nt, Human
aucucaauauuuc

SEQ ID NO: 1508268 - RNA, 15 nt, Human
aucucacacaugagc

SEQ ID NO: 1508269 - RNA, 15 nt, Human
auccuaguuccacca

SEQ ID NO: 1508270 - RNA, 19 nt, Human
auccuaguuccaccaucaa

SEQ ID NO: 1508271 - RNA, 14 nt, Human
aucucagggccugg

SEQ ID NO: 1508272 - RNA, 14 nt, Human
uugcaccacugcac

SEQ ID NO: 1508273 - RNA, 12 nt, Human
uugcaugaggcu

SEQ ID NO: 1508274 - RNA, 15 nt, Human
uugauucagacagcu

SEQ ID NO: 1508275 - RNA, 16 nt, Human
uugauucagacagcug

SEQ ID NO: 1508276 - RNA, 22 nt, Human
aucucuuagcuccccuccaacc

SEQ ID NO: 1508277 - RNA, 23 nt, Human
aucucuuagcuccccuccaaccu

SEQ ID NO: 1508278 - RNA, 18 nt, Human
uugauggugguauguuuu

SEQ ID NO: 1508279 - RNA, 19 nt, Human
uugauggugguauguuuuc

SEQ ID NO: 1508280 - RNA, 11 nt, Human
uugauguguuu

SEQ ID NO: 1508281 - RNA, 20 nt, Human
uugauguguuuauuuauaga

SEQ ID NO: 1508282 - RNA, 14 nt, Human
uugauucagacagc

SEQ ID NO: 1508283 - RNA, 13 nt, Human
uugcccuguuaaa

SEQ ID NO: 1508284 - RNA, 13 nt, Human
uugccgucuaccu

SEQ ID NO: 1508285 - RNA, 14 nt, Human
uugccguuauuaaa

SEQ ID NO: 1508286 - RNA, 19 nt, Human
uugccgucuaccugagggg

SEQ ID NO: 1508287 - RNA, 15 nt, Human
uugccgucuaccuga

SEQ ID NO: 1508288 - RNA, 18 nt, Human
uugccgucuaccugaggg

SEQ ID NO: 1508289 - RNA, 18 nt, Human
aucuugaauuguaaggaa

SEQ ID NO: 1508290 - RNA, 19 nt, Human
aucuugcucugcugacaga

SEQ ID NO: 1508291 - RNA, 19 nt, Human
aucuggguucacugcaacc

SEQ ID NO: 1508292 - RNA, 16 nt, Human
augaagauacugaaau

SEQ ID NO: 1508293 - RNA, 17 nt, Human
augaagauacugaaaua

SEQ ID NO: 1508294 - RNA, 18 nt, Human
augaagauguagaggaga

SEQ ID NO: 1508295 - RNA, 13 nt, Human
augaaugaauggc

SEQ ID NO: 1508296 - RNA, 17 nt, Human
augaaauauuauguuaa

SEQ ID NO: 1508297 - RNA, 18 nt, Human
augaaauauuauguuaaa

SEQ ID NO: 1508298 - RNA, 20 nt, Human
augaaauauuauguuaaaac

SEQ ID NO: 1508299 - RNA, 15 nt, Human
augaaagggcccaga

SEQ ID NO: 1508300 - RNA, 15 nt, Human
augaagauacugaaa

SEQ ID NO: 1508301 - RNA, 15 nt, Human
augaauuaaguuuuu

SEQ ID NO: 1508302 - RNA, 14 nt, Human
uuggggauauuuuu

SEQ ID NO: 1508303 - RNA, 22 nt, Human
uuggggggcugaggugggagga

SEQ ID NO: 1508304 - RNA, 22 nt, Human
uuggaugguguuacauauuaua

SEQ ID NO: 1508305 - RNA, 18 nt, Human
uuggcuagagguucaaag

SEQ ID NO: 1508306 - RNA, 23 nt, Human
uuggcgcugccccuggcagcccc

SEQ ID NO: 1508307 - RNA, 13 nt, Human
aucuuuuucuaac

SEQ ID NO: 1508308 - RNA, 12 nt, Human
augaaagauuca

SEQ ID NO: 1508309 - RNA, 15 nt, Human
augaaagcagggacu

SEQ ID NO: 1508310 - RNA, 13 nt, Human
uuggcugcaggga

SEQ ID NO: 1508311 - RNA, 16 nt, Human
uuguauaaaauaauuu

SEQ ID NO: 1508312 - RNA, 17 nt, Human
uuguauaaaauaauuuu

SEQ ID NO: 1508313 - RNA, 23 nt, Human
uuguaguguuggagaagaacuga

SEQ ID NO: 1508314 - RNA, 19 nt, Human
uuguauaaaauaauuuuua

SEQ ID NO: 1508315 - RNA, 22 nt, Human
augacacaugcaaggucauuuu

SEQ ID NO: 1508316 - RNA, 14 nt, Human
augacacaugcaag

SEQ ID NO: 1508317 - RNA, 16 nt, Human
uuguaucacaaaucuu

SEQ ID NO: 1508318 - RNA, 19 nt, Human
uuguaucacaaaucuuaac

SEQ ID NO: 1508319 - RNA, 13 nt, Human
augagagacacac

SEQ ID NO: 1508320 - RNA, 14 nt, Human
augagagacacacu

SEQ ID NO: 1508321 - RNA, 17 nt, Human
augagagacacacugaa

SEQ ID NO: 1508322 - RNA, 19 nt, Human
augagagacacacugaaga

SEQ ID NO: 1508323 - RNA, 21 nt, Human
augagaaagguugaagcacca

SEQ ID NO: 1508324 - RNA, 22 nt, Human
augagaaagguugaagcaccaa

SEQ ID NO: 1508325 - RNA, 14 nt, Human
augacuuacuguac

SEQ ID NO: 1508326 - RNA, 22 nt, Human
augacuuaagcacacuugacau

SEQ ID NO: 1508327 - RNA, 18 nt, Human
augacacgaauauugcug

SEQ ID NO: 1508328 - RNA, 17 nt, Human
augacuuacuguacaug

SEQ ID NO: 1508329 - RNA, 16 nt, Human
augacuuacuguacau

SEQ ID NO: 1508330 - RNA, 22 nt, Human
uuuagcuggaaaaguauguuag

SEQ ID NO: 1508331 - RNA, 13 nt, Human
uuuauauaagcuu

SEQ ID NO: 1508332 - RNA, 24 nt, Human
uuuauggcuuuugugcauuaucua

SEQ ID NO: 1508333 - RNA, 23 nt, Human
augcugucuacacuaagagagaa

SEQ ID NO: 1508334 - RNA, 22 nt, Human
augcugucuacacuaagagaga

SEQ ID NO: 1508335 - RNA, 23 nt, Human
augcugucccuuacgugaguccu

SEQ ID NO: 1508336 - RNA, 19 nt, Human
augcugucccuuacgugag

SEQ ID NO: 1508337 - RNA, 14 nt, Human
auggaacacucuga

SEQ ID NO: 1508338 - RNA, 15 nt, Human
auggaacacucugag

SEQ ID NO: 1508339 - RNA, 16 nt, Human
auggaacacucugaga

SEQ ID NO: 1508340 - RNA, 15 nt, Human
auggaagacagcucu

SEQ ID NO: 1508341 - RNA, 16 nt, Human
uuuauuacuguaagaa

SEQ ID NO: 1508342 - RNA, 16 nt, Human
augcuagaacucccuu

SEQ ID NO: 1508343 - RNA, 19 nt, Human
augcuagaacucccuuuca

SEQ ID NO: 1508344 - RNA, 15 nt, Human
augcuagaacucccu

SEQ ID NO: 1508345 - RNA, 15 nt, Human
augcucugcauguua

SEQ ID NO: 1508346 - RNA, 22 nt, Human
augcuguaacuuucugaaauaa

SEQ ID NO: 1508347 - RNA, 17 nt, Human
auggaauacucuuauau

SEQ ID NO: 1508348 - RNA, 16 nt, Human
auggaaugcuguguua

SEQ ID NO: 1508349 - RNA, 16 nt, Human
auggaauacucuuaua

SEQ ID NO: 1508350 - RNA, 16 nt, Human
auggaagacagcucuu

SEQ ID NO: 1508351 - RNA, 17 nt, Human
auggaaugcuguguuaa

SEQ ID NO: 1508352 - RNA, 22 nt, Human
uuucaucugcucuccuuccugg

SEQ ID NO: 1508353 - RNA, 19 nt, Human
auggacaugaucuucuuua

SEQ ID NO: 1508354 - RNA, 14 nt, Human
auggacaugaucuu

SEQ ID NO: 1508355 - RNA, 19 nt, Human
auggacagaagaaggcagc

SEQ ID NO: 1508356 - RNA, 20 nt, Human
auggacagaagaaggcagca

SEQ ID NO: 1508357 - RNA, 20 nt, Human
auggcuaguaucaaaagaaa

SEQ ID NO: 1508358 - RNA, 20 nt, Human
auggccuuugcuugaaagaa

SEQ ID NO: 1508359 - RNA, 14 nt, Human
auggccgggcaggg

SEQ ID NO: 1508360 - RNA, 21 nt, Human
auggccgggcgcgguggcuca

SEQ ID NO: 1508361 - RNA, 23 nt, Human
auggcacagcccaaagaaggaaa

SEQ ID NO: 1508362 - RNA, 23 nt, Human
auggcacaucagcacgauuucug

SEQ ID NO: 1508363 - RNA, 17 nt, Human
auggcacaucagcacga

SEQ ID NO: 1508364 - RNA, 19 nt, Human
auggacuaacuugucuuug

SEQ ID NO: 1508365 - RNA, 19 nt, Human
auggacguguuaugacucc

SEQ ID NO: 1508366 - RNA, 20 nt, Human
auggacguguuaugacucca

SEQ ID NO: 1508367 - RNA, 18 nt, Human
auggauuuccagccaaag

SEQ ID NO: 1508368 - RNA, 23 nt, Human
auggacguguuaugacuccagaa

SEQ ID NO: 1508369 - RNA, 12 nt, Human
augauucccagc

SEQ ID NO: 1508370 - RNA, 21 nt, Human
augauucaaaugucuauaaac

SEQ ID NO: 1508371 - RNA, 21 nt, Human
augauucaacagguuuuccug

SEQ ID NO: 1508372 - RNA, 15 nt, Human
uuguugucugcaacu

SEQ ID NO: 1508373 - RNA, 19 nt, Human
augauuaaccacuucagcu

SEQ ID NO: 1508374 - RNA, 22 nt, Human
augauuaugaauuacauuugua

SEQ ID NO: 1508375 - RNA, 20 nt, Human
augauuaaccacuucagcug

SEQ ID NO: 1508376 - RNA, 21 nt, Human
augauuaaccacuucagcuga

SEQ ID NO: 1508377 - RNA, 14 nt, Human
augcaacaacaugu

SEQ ID NO: 1508378 - RNA, 16 nt, Human
augcaacaacauguau

SEQ ID NO: 1508379 - RNA, 21 nt, Human
augcaacaacauguauaauau

SEQ ID NO: 1508380 - RNA, 13 nt, Human
augcaccagcccu

SEQ ID NO: 1508381 - RNA, 14 nt, Human
augcaccagcccuu

SEQ ID NO: 1508382 - RNA, 12 nt, Human
augcacuuuguu

SEQ ID NO: 1508383 - RNA, 20 nt, Human
augagagacacacugaagaa

SEQ ID NO: 1508384 - RNA, 21 nt, Human
augagagacacacugaagaag

SEQ ID NO: 1508385 - RNA, 23 nt, Human
augagagacacacugaagaagca

SEQ ID NO: 1508386 - RNA, 18 nt, Human
uugugauacaaugcugug

SEQ ID NO: 1508387 - RNA, 19 nt, Human
uugugauacaaugcugugc

SEQ ID NO: 1508388 - RNA, 23 nt, Human
uugugugaaagguacuucaaauc

SEQ ID NO: 1508389 - RNA, 13 nt, Human
uugugguuaaucu

SEQ ID NO: 1508390 - RNA, 17 nt, Human
uuguguguuuauuguca

SEQ ID NO: 1508391 - RNA, 20 nt, Human
uuguguuaaguauguguaaa

SEQ ID NO: 1508392 - RNA, 19 nt, Human
uuguucuggcucuuccagg

SEQ ID NO: 1508393 - RNA, 20 nt, Human
uuguucuggcucuuccaggc

SEQ ID NO: 1508394 - RNA, 22 nt, Human
uuguucuggcucuuccaggcug

SEQ ID NO: 1508395 - RNA, 14 nt, Human
uuguuuucauuauc

SEQ ID NO: 1508396 - RNA, 16 nt, Human
augcacuuuguucugg

SEQ ID NO: 1508397 - RNA, 15 nt, Human
augcacuuuguucug

SEQ ID NO: 1508398 - RNA, 13 nt, Human
uuguuuucagugu

SEQ ID NO: 1508399 - RNA, 16 nt, Human
uuguuuucaguguaca

SEQ ID NO: 1508400 - RNA, 16 nt, Human
uuuaagcaaguuaagu

SEQ ID NO: 1508401 - RNA, 17 nt, Human
uuuaagcaaguuaagug

SEQ ID NO: 1508402 - RNA, 16 nt, Human
uuuaagugcugcauuu

SEQ ID NO: 1508403 - RNA, 15 nt, Human
uuuaagugcugcauu

SEQ ID NO: 1508404 - RNA, 19 nt, Human
uuuaagugcugcauuuaaa

SEQ ID NO: 1508405 - RNA, 17 nt, Human
uuuaagugcugcauuua

SEQ ID NO: 1508406 - RNA, 18 nt, Human
augcaguucugaagaaga

SEQ ID NO: 1508407 - RNA, 19 nt, Human
augcaguucugaagaagau

SEQ ID NO: 1508408 - RNA, 11 nt, Human
augcccagccc

SEQ ID NO: 1508409 - RNA, 15 nt, Human
augccacuaaauuga

SEQ ID NO: 1508410 - RNA, 17 nt, Human
augccacuaaauugaca

SEQ ID NO: 1508411 - RNA, 15 nt, Human
augcaguucugaaga

SEQ ID NO: 1508412 - RNA, 17 nt, Human
augcaguucugaagaag

SEQ ID NO: 1508413 - RNA, 13 nt, Human
augcagugcuucc

SEQ ID NO: 1508414 - RNA, 17 nt, Human
augcagccucacagucc

SEQ ID NO: 1508415 - RNA, 14 nt, Human
augcagccucacag

SEQ ID NO: 1508416 - RNA, 15 nt, Human
augcagccucacagu

SEQ ID NO: 1508417 - RNA, 19 nt, Human
uuuaauuuuuuugagacag

SEQ ID NO: 1508418 - RNA, 13 nt, Human
augcagccucaca

SEQ ID NO: 1508419 - RNA, 21 nt, Human
uucuaaguaaaaccacagcag

SEQ ID NO: 1508420 - RNA, 14 nt, Human
uucuauaauuuaaa

SEQ ID NO: 1508421 - RNA, 13 nt, Human
uucuauaauuuaa

SEQ ID NO: 1508422 - RNA, 21 nt, Human
uucucacugccaugccagcuu

SEQ ID NO: 1508423 - RNA, 13 nt, Human
aucaggccaggcc

SEQ ID NO: 1508424 - RNA, 14 nt, Human
aucaggccaggccc

SEQ ID NO: 1508425 - RNA, 13 nt, Human
uucucagaaucuc

SEQ ID NO: 1508426 - RNA, 13 nt, Human
uucgcuccugugu

SEQ ID NO: 1508427 - RNA, 19 nt, Human
uucuaaaucuccaaaauaa

SEQ ID NO: 1508428 - RNA, 20 nt, Human
uucuaacaaaaaaauauauu

SEQ ID NO: 1508429 - RNA, 13 nt, Human
uucuaagaaguga

SEQ ID NO: 1508430 - RNA, 19 nt, Human
uucuaaguaaaaccacagc

SEQ ID NO: 1508431 - RNA, 20 nt, Human
uucuaaguaaaaccacagca

SEQ ID NO: 1508432 - RNA, 21 nt, Human
uucgcaggauucuuccucccu

SEQ ID NO: 1508433 - RNA, 21 nt, Human
uucgaugggcccaauucuuac

SEQ ID NO: 1508434 - RNA, 20 nt, Human
uucgaugggcccaauucuua

SEQ ID NO: 1508435 - RNA, 15 nt, Human
auauuuuacauaaau

SEQ ID NO: 1508436 - RNA, 16 nt, Human
auauuuuacauaaauu

SEQ ID NO: 1508437 - RNA, 20 nt, Human
auauuuuacauaaauuuagu

SEQ ID NO: 1508438 - RNA, 11 nt, Human
auauuuuaauu

SEQ ID NO: 1508439 - RNA, 15 nt, Human
uuccccuccuccacu

SEQ ID NO: 1508440 - RNA, 15 nt, Human
uucccuauuagagaa

SEQ ID NO: 1508441 - RNA, 18 nt, Human
uucccuuuuuuggcugcu

SEQ ID NO: 1508442 - RNA, 19 nt, Human
uucccuuuuuuggcugcug

SEQ ID NO: 1508443 - RNA, 20 nt, Human
uucccuuuuuuggcugcuga

SEQ ID NO: 1508444 - RNA, 16 nt, Human
auauuuuccaugaaaa

SEQ ID NO: 1508445 - RNA, 18 nt, Human
auauuuuccaugaaaaug

SEQ ID NO: 1508446 - RNA, 14 nt, Human
aucaaguuauuuuu

SEQ ID NO: 1508447 - RNA, 22 nt, Human
aucaaccccuucgcuccugugu

SEQ ID NO: 1508448 - RNA, 19 nt, Human
aucaaccccuucgcuccug

SEQ ID NO: 1508449 - RNA, 20 nt, Human
aucaaccccuucgcuccugu

SEQ ID NO: 1508450 - RNA, 20 nt, Human
aucaaauaugcaaagcacug

SEQ ID NO: 1508451 - RNA, 15 nt, Human
auauuuuuaauuaaa

SEQ ID NO: 1508452 - RNA, 14 nt, Human
auccauacauuugu

SEQ ID NO: 1508453 - RNA, 20 nt, Human
uucuggcuaugcauuugaaa

SEQ ID NO: 1508454 - RNA, 18 nt, Human
uucuggcuaugcauuuga

SEQ ID NO: 1508455 - RNA, 14 nt, Human
uucugccgcagccc

SEQ ID NO: 1508456 - RNA, 15 nt, Human
uucugccgcagcccu

SEQ ID NO: 1508457 - RNA, 16 nt, Human
uucugccgcagcccug

SEQ ID NO: 1508458 - RNA, 15 nt, Human
uucuggcucuuccag

SEQ ID NO: 1508459 - RNA, 20 nt, Human
aucauuucugcaucagcugc

SEQ ID NO: 1508460 - RNA, 21 nt, Human
aucauugaaaucuuuuugcuu

SEQ ID NO: 1508461 - RNA, 21 nt, Human
aucaggccaggcccucugccc

SEQ ID NO: 1508462 - RNA, 22 nt, Human
aucaggccaggcccucugccca

SEQ ID NO: 1508463 - RNA, 23 nt, Human
aucaggccaggcccucugcccac

SEQ ID NO: 1508464 - RNA, 16 nt, Human
uucucuuuucaaaaca

SEQ ID NO: 1508465 - RNA, 17 nt, Human
uucucuacucuagggaa

SEQ ID NO: 1508466 - RNA, 19 nt, Human
uucugcagccacuauuguu

SEQ ID NO: 1508467 - RNA, 13 nt, Human
uucugccgcagcc

SEQ ID NO: 1508468 - RNA, 16 nt, Human
uucugacccaugcugc

SEQ ID NO: 1508469 - RNA, 14 nt, Human
uucugacccaugcu

SEQ ID NO: 1508470 - RNA, 18 nt, Human
uugaacccgggaggcaga

SEQ ID NO: 1508471 - RNA, 21 nt, Human
auccuaggcauuugcugaaua

SEQ ID NO: 1508472 - RNA, 13 nt, Human
auccuaguuccac

SEQ ID NO: 1508473 - RNA, 20 nt, Human
auccuagucacuaccuucau

SEQ ID NO: 1508474 - RNA, 19 nt, Human
uugaaauauugacuuuuua

SEQ ID NO: 1508475 - RNA, 20 nt, Human
uugaaauauaggaacuuaaa

SEQ ID NO: 1508476 - RNA, 11 nt, Human
uugaaaucuuu

SEQ ID NO: 1508477 - RNA, 13 nt, Human
uugaaauuuccua

SEQ ID NO: 1508478 - RNA, 21 nt, Human
uugaaauuuuuauuaaauuau

SEQ ID NO: 1508479 - RNA, 13 nt, Human
uucuugcaaagua

SEQ ID NO: 1508480 - RNA, 21 nt, Human
uucuugaucaacaucuuuucu

SEQ ID NO: 1508481 - RNA, 12 nt, Human
uucuugcaaagu

SEQ ID NO: 1508482 - RNA, 22 nt, Human
uucuuucuggcuaugcauuuga

SEQ ID NO: 1508483 - RNA, 17 nt, Human
uucuuaaacaaauguau

SEQ ID NO: 1508484 - RNA, 13 nt, Human
uucuuaauucuua

SEQ ID NO: 1508485 - RNA, 15 nt, Human
uucuuacaaacaugu

SEQ ID NO: 1508486 - RNA, 18 nt, Human
uucuguucuuucuggcua

SEQ ID NO: 1508487 - RNA, 21 nt, Human
uucuguuggccagugugacaa

SEQ ID NO: 1508488 - RNA, 20 nt, Human
uucuguuuuucuaggccugg

SEQ ID NO: 1508489 - RNA, 15 nt, Human
auagcuuuuuucucu

SEQ ID NO: 1508490 - RNA, 12 nt, Human
auaggaaaaacu

SEQ ID NO: 1508491 - RNA, 14 nt, Human
auaggaaaaacuga

SEQ ID NO: 1508492 - RNA, 16 nt, Human
auaggaaaaacugauu

SEQ ID NO: 1508493 - RNA, 17 nt, Human
auaggaaaaacugauuu

SEQ ID NO: 1508494 - RNA, 17 nt, Human
auaggcguaacuaauuu

SEQ ID NO: 1508495 - RNA, 20 nt, Human
uucacagaugggugcuugga

SEQ ID NO: 1508496 - RNA, 15 nt, Human
uucacaguucucucc

SEQ ID NO: 1508497 - RNA, 20 nt, Human
uucacaguucucuccuucuu

SEQ ID NO: 1508498 - RNA, 23 nt, Human
uucacaagacccaaaaggcagaa

SEQ ID NO: 1508499 - RNA, 18 nt, Human
uuauuuuuagacagaguc

SEQ ID NO: 1508500 - RNA, 17 nt, Human
uuauuuuuagacagagu

SEQ ID NO: 1508501 - RNA, 21 nt, Human
uuauuuuguucauacauauuu

SEQ ID NO: 1508502 - RNA, 18 nt, Human
uuaguuuugugaagguga

SEQ ID NO: 1508503 - RNA, 17 nt, Human
uuauuuuguucauacau

SEQ ID NO: 1508504 - RNA, 14 nt, Human
uucaaacauauaua

SEQ ID NO: 1508505 - RNA, 18 nt, Human
uucaaacagucucaggaa

SEQ ID NO: 1508506 - RNA, 17 nt, Human
uucaaaauaaaaaugag

SEQ ID NO: 1508507 - RNA, 21 nt, Human
uucaagcgauucuucugcuuc

SEQ ID NO: 1508508 - RNA, 21 nt, Human
auauauauuuuuuucugaaau

SEQ ID NO: 1508509 - RNA, 13 nt, Human
auauauauuuuaa

SEQ ID NO: 1508510 - RNA, 14 nt, Human
auauauaacaaugc

SEQ ID NO: 1508511 - RNA, 12 nt, Human
auauauaaccag

SEQ ID NO: 1508512 - RNA, 13 nt, Human
auauauaaccagu

SEQ ID NO: 1508513 - RNA, 13 nt, Human
auagucuuucagu

SEQ ID NO: 1508514 - RNA, 15 nt, Human
auaguggugugauuu

SEQ ID NO: 1508515 - RNA, 17 nt, Human
auaguggcuuaaaacaa

SEQ ID NO: 1508516 - RNA, 20 nt, Human
auaguuguaccgcaauguga

SEQ ID NO: 1508517 - RNA, 22 nt, Human
auaguuggcuaggaccccucca

SEQ ID NO: 1508518 - RNA, 22 nt, Human
auaguuaagcgugcauaaguua

SEQ ID NO: 1508519 - RNA, 20 nt, Human
auaguucccaggugauauuu

SEQ ID NO: 1508520 - RNA, 15 nt, Human
auauguggaguucau

SEQ ID NO: 1508521 - RNA, 16 nt, Human
auauguggaguucauc

SEQ ID NO: 1508522 - RNA, 18 nt, Human
uucauuuaggugaggaag

SEQ ID NO: 1508523 - RNA, 12 nt, Human
uuccaagagcug

SEQ ID NO: 1508524 - RNA, 13 nt, Human
uuccaagagcuga

SEQ ID NO: 1508525 - RNA, 15 nt, Human
uuccaaggguacuaa

SEQ ID NO: 1508526 - RNA, 17 nt, Human
uuccaaggguacuaagg

SEQ ID NO: 1508527 - RNA, 17 nt, Human
uuccaggggugggacac

SEQ ID NO: 1508528 - RNA, 19 nt, Human
uuccaccaucaagccacca

SEQ ID NO: 1508529 - RNA, 18 nt, Human
uucccaacuccagaaagu

SEQ ID NO: 1508530 - RNA, 12 nt, Human
uucccaaauuuc

SEQ ID NO: 1508531 - RNA, 13 nt, Human
uucccaagcucug

SEQ ID NO: 1508532 - RNA, 14 nt, Human
uucccaagcucugc

SEQ ID NO: 1508533 - RNA, 15 nt, Human
uucccaagcucugcu

SEQ ID NO: 1508534 - RNA, 16 nt, Human
uucccaagcucugcuc

SEQ ID NO: 1508535 - RNA, 12 nt, Human
uucccaccucuc

SEQ ID NO: 1508536 - RNA, 22 nt, Human
uucccaccucucucacuccuug

SEQ ID NO: 1508537 - RNA, 18 nt, Human
uucccaagcucugcuccu

SEQ ID NO: 1508538 - RNA, 23 nt, Human
uucccaaagcagugcaugcuguc

SEQ ID NO: 1508539 - RNA, 17 nt, Human
uuccagguuuaagcugu

SEQ ID NO: 1508540 - RNA, 13 nt, Human
uuccaggcuggga

SEQ ID NO: 1508541 - RNA, 21 nt, Human
uuccaggggugggacacccug

SEQ ID NO: 1508542 - RNA, 17 nt, Human
uuccagugaggcucugc

SEQ ID NO: 1508543 - RNA, 19 nt, Human
uuccagugaggcucugccc

SEQ ID NO: 1508544 - RNA, 20 nt, Human
uuccagugaggcucugcccu

SEQ ID NO: 1508545 - RNA, 21 nt, Human
uuccagugaggcucugcccuu

SEQ ID NO: 1508546 - RNA, 22 nt, Human
uuccagugaggcucugcccuug

SEQ ID NO: 1508547 - RNA, 14 nt, Human
auaucuaguaugaa

SEQ ID NO: 1508548 - RNA, 15 nt, Human
auaucuaguaugaaa

SEQ ID NO: 1508549 - RNA, 17 nt, Human
auaucuaguaugaaauu

SEQ ID NO: 1508550 - RNA, 19 nt, Human
auaucuccgucaacucaua

SEQ ID NO: 1508551 - RNA, 20 nt, Human
auaucuccgucaacucauau

SEQ ID NO: 1508552 - RNA, 21 nt, Human
auaucuccgucaacucauauu

SEQ ID NO: 1508553 - RNA, 16 nt, Human
auaucugaaaauguau

SEQ ID NO: 1508554 - RNA, 17 nt, Human
auaucugaaaauguaug

SEQ ID NO: 1508555 - RNA, 20 nt, Human
auaucugaaaauguaugugu

SEQ ID NO: 1508556 - RNA, 13 nt, Human
auaucuuguagcu

SEQ ID NO: 1508557 - RNA, 17 nt, Human
auauguaacaagccacc

SEQ ID NO: 1508558 - RNA, 16 nt, Human
auauguaacaagccac

SEQ ID NO: 1508559 - RNA, 22 nt, Human
auaugcacacauuuuuuaaaug

SEQ ID NO: 1508560 - RNA, 16 nt, Human
auaugcacacauuuuu

SEQ ID NO: 1508561 - RNA, 15 nt, Human
auaugcacacauuuu

SEQ ID NO: 1508562 - RNA, 14 nt, Human
auaugcacacauuu

SEQ ID NO: 1508563 - RNA, 18 nt, Human
uucagugccuuauggaac

SEQ ID NO: 1508564 - RNA, 12 nt, Human
uucauacauauu

SEQ ID NO: 1508565 - RNA, 23 nt, Human
uucauacauauuuuuguagcacu

SEQ ID NO: 1508566 - RNA, 13 nt, Human
uucauacauugua

SEQ ID NO: 1508567 - RNA, 19 nt, Human
uucauacauuguacgaaga

SEQ ID NO: 1508568 - RNA, 13 nt, Human
uucagaaaugugu

SEQ ID NO: 1508569 - RNA, 11 nt, Human
uucagaaaugu

SEQ ID NO: 1508570 - RNA, 12 nt, Human
uucagugccuua

SEQ ID NO: 1508571 - RNA, 13 nt, Human
uucagugccuuau

SEQ ID NO: 1508572 - RNA, 13 nt, Human
auauauuuaauga

SEQ ID NO: 1508573 - RNA, 15 nt, Human
auauauuuaaugaua

SEQ ID NO: 1508574 - RNA, 21 nt, Human
uucaucccucuggggcuguuc

SEQ ID NO: 1508575 - RNA, 17 nt, Human
uucaucccucuggggcu

SEQ ID NO: 1508576 - RNA, 20 nt, Human
uuagggaaggauacaaaagc

SEQ ID NO: 1508577 - RNA, 21 nt, Human
uuagggacaggaccccagcuc

SEQ ID NO: 1508578 - RNA, 22 nt, Human
uuagggacaggaccccagcucu

SEQ ID NO: 1508579 - RNA, 14 nt, Human
uuagggagagaaga

SEQ ID NO: 1508580 - RNA, 16 nt, Human
uuaggugugacugaau

SEQ ID NO: 1508581 - RNA, 16 nt, Human
uuaggugaggaagcaa

SEQ ID NO: 1508582 - RNA, 21 nt, Human
uuaggugugacugaauuucuu

SEQ ID NO: 1508583 - RNA, 15 nt, Human
uuaguuucuccaagc

SEQ ID NO: 1508584 - RNA, 22 nt, Human
uuaguuugcaguuacacuaaaa

SEQ ID NO: 1508585 - RNA, 14 nt, Human
uuagcggagacgga

SEQ ID NO: 1508586 - RNA, 18 nt, Human
uuagccaagugugguaga

SEQ ID NO: 1508587 - RNA, 18 nt, Human
auaauuuaccugaagucu

SEQ ID NO: 1508588 - RNA, 18 nt, Human
uuagcaaauucuguuuuu

SEQ ID NO: 1508589 - RNA, 12 nt, Human
auaauacaccac

SEQ ID NO: 1508590 - RNA, 20 nt, Human
auaauacaccacuacauucu

SEQ ID NO: 1508591 - RNA, 18 nt, Human
auaauacaccacuacauu

SEQ ID NO: 1508592 - RNA, 21 nt, Human
auaauacaccacuacauucug

SEQ ID NO: 1508593 - RNA, 14 nt, Human
uuagacagucccug

SEQ ID NO: 1508594 - RNA, 18 nt, Human
auaauccuaaacauauga

SEQ ID NO: 1508595 - RNA, 20 nt, Human
auaaucccuggaugauauuu

SEQ ID NO: 1508596 - RNA, 21 nt, Human
auaaucccuggaugauauuuu

SEQ ID NO: 1508597 - RNA, 20 nt, Human
auaaugcgugcauaccacuu

SEQ ID NO: 1508598 - RNA, 15 nt, Human
auaaugcgugcauac

SEQ ID NO: 1508599 - RNA, 15 nt, Human
auaaugaaugaaaca

SEQ ID NO: 1508600 - RNA, 22 nt, Human
auaauugacaggauuauuggaa

SEQ ID NO: 1508601 - RNA, 14 nt, Human
auaaauaaaaauaa

SEQ ID NO: 1508602 - RNA, 15 nt, Human
auaaauaguuuauga

SEQ ID NO: 1508603 - RNA, 18 nt, Human
auaaauauuuuugccaua

SEQ ID NO: 1508604 - RNA, 13 nt, Human
auaaauaaaaaua

SEQ ID NO: 1508605 - RNA, 22 nt, Human
auaacgauaaaagacagugaaa

SEQ ID NO: 1508606 - RNA, 16 nt, Human
auaacuaaaagguaug

SEQ ID NO: 1508607 - RNA, 13 nt, Human
auaacugugaagu

SEQ ID NO: 1508608 - RNA, 11 nt, Human
auaaauuauuu

SEQ ID NO: 1508609 - RNA, 16 nt, Human
auaaccaucugaaagu

SEQ ID NO: 1508610 - RNA, 19 nt, Human
uuacccucauguucuuaau

SEQ ID NO: 1508611 - RNA, 16 nt, Human
uuacaggcacuaaagu

SEQ ID NO: 1508612 - RNA, 20 nt, Human
uuagacagagucucacuguu

SEQ ID NO: 1508613 - RNA, 13 nt, Human
uuagacagucccu

SEQ ID NO: 1508614 - RNA, 13 nt, Human
uguuucaaacaua

SEQ ID NO: 1508615 - RNA, 23 nt, Human
aguugccagucaccccggccacc

SEQ ID NO: 1508616 - RNA, 17 nt, Human
aguuggguggaugccug

SEQ ID NO: 1508617 - RNA, 19 nt, Human
aguugggcuuccucauagu

SEQ ID NO: 1508618 - RNA, 14 nt, Human
aguuuaaauuguaa

SEQ ID NO: 1508619 - RNA, 17 nt, Human
aguuggucccccuucca

SEQ ID NO: 1508620 - RNA, 11 nt, Human
aguuggucccc

SEQ ID NO: 1508621 - RNA, 13 nt, Human
aguuggucccccu

SEQ ID NO: 1508622 - RNA, 13 nt, Human
uuaaaaaaaaucc

SEQ ID NO: 1508623 - RNA, 13 nt, Human
aguuuacauugua

SEQ ID NO: 1508624 - RNA, 20 nt, Human
uuaacagaaauguacagcaa

SEQ ID NO: 1508625 - RNA, 19 nt, Human
uuaacacugcuuguguuuu

SEQ ID NO: 1508626 - RNA, 19 nt, Human
uuaacagaaauguacagca

SEQ ID NO: 1508627 - RNA, 18 nt, Human
uuaaauaaugugaaacug

SEQ ID NO: 1508628 - RNA, 16 nt, Human
uuaaauaaugugaaac

SEQ ID NO: 1508629 - RNA, 19 nt, Human
uuaaauaaugugaaacugg

SEQ ID NO: 1508630 - RNA, 22 nt, Human
uuaaacaaauguaugauuacau

SEQ ID NO: 1508631 - RNA, 17 nt, Human
uuaaaaaucucaaauuu

SEQ ID NO: 1508632 - RNA, 16 nt, Human
uuaaaaaucucaaauu

SEQ ID NO: 1508633 - RNA, 15 nt, Human
uuaaaaaucucaaau

SEQ ID NO: 1508634 - RNA, 14 nt, Human
uuaaaaaucucaaa

SEQ ID NO: 1508635 - RNA, 15 nt, Human
uuaaauaaugugaaa

SEQ ID NO: 1508636 - RNA, 12 nt, Human
auaaaauaauuu

SEQ ID NO: 1508637 - RNA, 15 nt, Human
auaaaauaauuuuua

SEQ ID NO: 1508638 - RNA, 21 nt, Human
uuaagaaaaaggaugcacaga

SEQ ID NO: 1508639 - RNA, 20 nt, Human
uuaagaaaaaggaugcacag

SEQ ID NO: 1508640 - RNA, 23 nt, Human
aguuuuuauggcuuuugugcauu

SEQ ID NO: 1508641 - RNA, 19 nt, Human
aguuuucugagaaagacua

SEQ ID NO: 1508642 - RNA, 23 nt, Human
aguuuucugagaaagacuauuca

SEQ ID NO: 1508643 - RNA, 9 nt, Human
uuaaggugg

SEQ ID NO: 1508644 - RNA, 20 nt, Human
uuaagaagacugcauuauau

SEQ ID NO: 1508645 - RNA, 22 nt, Human
uuaagaaagacuaucuaaaugu

SEQ ID NO: 1508646 - RNA, 14 nt, Human
uuaaguauguguaa

SEQ ID NO: 1508647 - RNA, 22 nt, Human
uuaagugcugcauuuaaaagau

SEQ ID NO: 1508648 - RNA, 19 nt, Human
uuaagugcugcauuuaaaa

SEQ ID NO: 1508649 - RNA, 16 nt, Human
uuaagugcugcauuua

SEQ ID NO: 1508650 - RNA, 15 nt, Human
uuaagugcugcauuu

SEQ ID NO: 1508651 - RNA, 22 nt, Human
uuaaucugguuuauuuuuguuc

SEQ ID NO: 1508652 - RNA, 18 nt, Human
uuaaugaaagacuguaca

SEQ ID NO: 1508653 - RNA, 19 nt, Human
uuaaugaaagacuguacaa

SEQ ID NO: 1508654 - RNA, 13 nt, Human
uuaaucauuaggu

SEQ ID NO: 1508655 - RNA, 23 nt, Human
uuaaucauuaggugugacugaau

SEQ ID NO: 1508656 - RNA, 22 nt, Human
uuaaucauuaggugugacugaa

SEQ ID NO: 1508657 - RNA, 23 nt, Human
aguguuggagaagaacugaaauc

SEQ ID NO: 1508658 - RNA, 17 nt, Human
aguguuggagaagaacu

SEQ ID NO: 1508659 - RNA, 18 nt, Human
aguguuggagaagaacug

SEQ ID NO: 1508660 - RNA, 14 nt, Human
aguguuggagaaga

SEQ ID NO: 1508661 - RNA, 16 nt, Human
aguguuggagaagaac

SEQ ID NO: 1508662 - RNA, 15 nt, Human
aguuagaacauuugc

SEQ ID NO: 1508663 - RNA, 20 nt, Human
uguucuugguuuguaaauua

SEQ ID NO: 1508664 - RNA, 22 nt, Human
uguucuugguuuguaaauuaac

SEQ ID NO: 1508665 - RNA, 19 nt, Human
uguucuuucacccuuuucu

SEQ ID NO: 1508666 - RNA, 13 nt, Human
uguugcccaggcu

SEQ ID NO: 1508667 - RNA, 15 nt, Human
uguugcccaggcugg

SEQ ID NO: 1508668 - RNA, 17 nt, Human
uguuccccuccuccacu

SEQ ID NO: 1508669 - RNA, 19 nt, Human
uguuccccuccuccacucu

SEQ ID NO: 1508670 - RNA, 12 nt, Human
uguuccccuccu

SEQ ID NO: 1508671 - RNA, 13 nt, Human
uguuccccuccuc

SEQ ID NO: 1508672 - RNA, 15 nt, Human
uguuccccuccucca

SEQ ID NO: 1508673 - RNA, 23 nt, Human
uguuccccuccuccacucucccc

SEQ ID NO: 1508674 - RNA, 18 nt, Human
uguucuagcauggcugcc

SEQ ID NO: 1508675 - RNA, 18 nt, Human
uguucuuaguuugcaguu

SEQ ID NO: 1508676 - RNA, 13 nt, Human
uguugucugcaac

SEQ ID NO: 1508677 - RNA, 16 nt, Human
uguugucugcaacucu

SEQ ID NO: 1508678 - RNA, 12 nt, Human
uguugugaaugu

SEQ ID NO: 1508679 - RNA, 13 nt, Human
uguugugaauguu

SEQ ID NO: 1508680 - RNA, 14 nt, Human
uguugugauguauu

SEQ ID NO: 1508681 - RNA, 20 nt, Human
uguugugauguauucuagcu

SEQ ID NO: 1508682 - RNA, 14 nt, Human
uguuuauugucaaa

SEQ ID NO: 1508683 - RNA, 17 nt, Human
uguuuauugucaaagug

SEQ ID NO: 1508684 - RNA, 20 nt, Human
aguucggugagcuacaaaug

SEQ ID NO: 1508685 - RNA, 15 nt, Human
aguucuacauaagua

SEQ ID NO: 1508686 - RNA, 19 nt, Human
aguucggugagcuacaaau

SEQ ID NO: 1508687 - RNA, 12 nt, Human
aguucucuccuu

SEQ ID NO: 1508688 - RNA, 23 nt, Human
aguuccucauuagcauuuugcua

SEQ ID NO: 1508689 - RNA, 16 nt, Human
aguucaauucucauuu

SEQ ID NO: 1508690 - RNA, 20 nt, Human
agugcugggauuacaagcgu

SEQ ID NO: 1508691 - RNA, 22 nt, Human
agugcugcauuuaaaagauaca

SEQ ID NO: 1508692 - RNA, 19 nt, Human
agugcugggauuacaggug

SEQ ID NO: 1508693 - RNA, 20 nt, Human
agugcugcauuuaaaagaua

SEQ ID NO: 1508694 - RNA, 17 nt, Human
agugccuuacacaaugg

SEQ ID NO: 1508695 - RNA, 21 nt, Human
agugccuguaaucacagcuac

SEQ ID NO: 1508696 - RNA, 15 nt, Human
agugccuuacacaau

SEQ ID NO: 1508697 - RNA, 14 nt, Human
ugugguuaaugcca

SEQ ID NO: 1508698 - RNA, 20 nt, Human
ugugguuaaugccauggaca

SEQ ID NO: 1508699 - RNA, 15 nt, Human
ugugguuaaugccau

SEQ ID NO: 1508700 - RNA, 12 nt, Human
ugugguuucauu

SEQ ID NO: 1508701 - RNA, 16 nt, Human
agugcuuccaaggaug

SEQ ID NO: 1508702 - RNA, 14 nt, Human
uguguuaugaagca

SEQ ID NO: 1508703 - RNA, 20 nt, Human
ugugucagguggggcagcuu

SEQ ID NO: 1508704 - RNA, 17 nt, Human
ugugucagguggggcag

SEQ ID NO: 1508705 - RNA, 19 nt, Human
ugugucagguggggcagcu

SEQ ID NO: 1508706 - RNA, 13 nt, Human
ugugucucuuggu

SEQ ID NO: 1508707 - RNA, 16 nt, Human
ugugucucuugguccu

SEQ ID NO: 1508708 - RNA, 13 nt, Human
uguguugugaaug

SEQ ID NO: 1508709 - RNA, 21 nt, Human
uguuaacauggacaugaucuu

SEQ ID NO: 1508710 - RNA, 11 nt, Human
aguggaaaaau

SEQ ID NO: 1508711 - RNA, 18 nt, Human
aguggaaaaauagccugc

SEQ ID NO: 1508712 - RNA, 19 nt, Human
aguggaaaaauagccugcc

SEQ ID NO: 1508713 - RNA, 19 nt, Human
uguuaaugauagcuacugu

SEQ ID NO: 1508714 - RNA, 17 nt, Human
uguuaaugguuugaaua

SEQ ID NO: 1508715 - RNA, 14 nt, Human
agugcacuaaugug

SEQ ID NO: 1508716 - RNA, 16 nt, Human
agugccaaaaacaaca

SEQ ID NO: 1508717 - RNA, 14 nt, Human
agugcaugcugucc

SEQ ID NO: 1508718 - RNA, 14 nt, Human
agugcccacaggau

SEQ ID NO: 1508719 - RNA, 22 nt, Human
agugcaaauugucacaggacag

SEQ ID NO: 1508720 - RNA, 18 nt, Human
agugcaaauugucacagg

SEQ ID NO: 1508721 - RNA, 21 nt, Human
agugcaaauugucacaggaca

SEQ ID NO: 1508722 - RNA, 21 nt, Human
agugaguugauagcacagacc

SEQ ID NO: 1508723 - RNA, 16 nt, Human
agugagucgaggacag

SEQ ID NO: 1508724 - RNA, 22 nt, Human
agugauucuccugccucagccu

SEQ ID NO: 1508725 - RNA, 24 nt, Human
agugauucuccugccucagccucc

SEQ ID NO: 1508726 - RNA, 16 nt, Human
ugugcucuggacaggc

SEQ ID NO: 1508727 - RNA, 18 nt, Human
ugugcucuggacaggcau

SEQ ID NO: 1508728 - RNA, 19 nt, Human
ugugcucuggacaggcaug

SEQ ID NO: 1508729 - RNA, 13 nt, Human
ugugcugcccugc

SEQ ID NO: 1508730 - RNA, 14 nt, Human
ugugcugcccugcc

SEQ ID NO: 1508731 - RNA, 15 nt, Human
ugugcugcccugccc

SEQ ID NO: 1508732 - RNA, 21 nt, Human
agucucacuguugcccaggcu

SEQ ID NO: 1508733 - RNA, 20 nt, Human
agucucacuguugcccaggc

SEQ ID NO: 1508734 - RNA, 18 nt, Human
agucucacuguugcccag

SEQ ID NO: 1508735 - RNA, 19 nt, Human
agucucacuguugcccagg

SEQ ID NO: 1508736 - RNA, 21 nt, Human
ugugcccuaaaguguauuuuu

SEQ ID NO: 1508737 - RNA, 20 nt, Human
ugugcccuaaaguguauuuu

SEQ ID NO: 1508738 - RNA, 22 nt, Human
ugugcucugaucauccacugug

SEQ ID NO: 1508739 - RNA, 23 nt, Human
ugugcucugaucauccacugugc

SEQ ID NO: 1508740 - RNA, 15 nt, Human
ugugcucuggacagg

SEQ ID NO: 1508741 - RNA, 17 nt, Human
uguaagaaaauaucacu

SEQ ID NO: 1508742 - RNA, 19 nt, Human
uguaagaacuacaaacaaa

SEQ ID NO: 1508743 - RNA, 17 nt, Human
uguaacuuucugaaaua

SEQ ID NO: 1508744 - RNA, 14 nt, Human
agguuggugggggc

SEQ ID NO: 1508745 - RNA, 17 nt, Human
aggugguuauggagagg

SEQ ID NO: 1508746 - RNA, 14 nt, Human
agguugcagugagc

SEQ ID NO: 1508747 - RNA, 15 nt, Human
uguaaguaaacgguc

SEQ ID NO: 1508748 - RNA, 22 nt, Human
uguaagcucuacugaggugcua

SEQ ID NO: 1508749 - RNA, 23 nt, Human
aggucuugaacuccuggccucaa

SEQ ID NO: 1508750 - RNA, 15 nt, Human
aggugcacaagcucc

SEQ ID NO: 1508751 - RNA, 16 nt, Human
aggugcacaagcucca

SEQ ID NO: 1508752 - RNA, 17 nt, Human
aggugcacaagcuccaa

SEQ ID NO: 1508753 - RNA, 18 nt, Human
aggugcacaagcuccaag

SEQ ID NO: 1508754 - RNA, 20 nt, Human
aggugcacaagcuccaagcu

SEQ ID NO: 1508755 - RNA, 20 nt, Human
aggugggauccuccaggugc

SEQ ID NO: 1508756 - RNA, 21 nt, Human
aggugcacaagcuccaagcuc

SEQ ID NO: 1508757 - RNA, 20 nt, Human
aguaauaugcacacauuuuu

SEQ ID NO: 1508758 - RNA, 19 nt, Human
aguaauaugcacacauuuu

SEQ ID NO: 1508759 - RNA, 18 nt, Human
aguaauaugcacacauuu

SEQ ID NO: 1508760 - RNA, 15 nt, Human
aguaaaaccacagca

SEQ ID NO: 1508761 - RNA, 11 nt, Human
agguuuuccug

SEQ ID NO: 1508762 - RNA, 14 nt, Human
uguaauuugugaua

SEQ ID NO: 1508763 - RNA, 18 nt, Human
uguagaggagaaacugga

SEQ ID NO: 1508764 - RNA, 13 nt, Human
uguagagugggag

SEQ ID NO: 1508765 - RNA, 14 nt, Human
uguagagugggagc

SEQ ID NO: 1508766 - RNA, 19 nt, Human
aguacaccacaagggucac

SEQ ID NO: 1508767 - RNA, 20 nt, Human
aguagaaagacagagcuggg

SEQ ID NO: 1508768 - RNA, 21 nt, Human
aguagaaagacagagcuggga

SEQ ID NO: 1508769 - RNA, 14 nt, Human
aguacacuguuuca

SEQ ID NO: 1508770 - RNA, 20 nt, Human
aguacacuguuucaaacuuu

SEQ ID NO: 1508771 - RNA, 16 nt, Human
aguacacuguuucaaa

SEQ ID NO: 1508772 - RNA, 17 nt, Human
aguagaagucuuagaug

SEQ ID NO: 1508773 - RNA, 13 nt, Human
aguagaacagaua

SEQ ID NO: 1508774 - RNA, 19 nt, Human
aguagaacagauaaucagu

SEQ ID NO: 1508775 - RNA, 12 nt, Human
aguagagacagg

SEQ ID NO: 1508776 - RNA, 19 nt, Human
aguagauaggccaugggca

SEQ ID NO: 1508777 - RNA, 20 nt, Human
uguaggaagguuaauguuca

SEQ ID NO: 1508778 - RNA, 13 nt, Human
aguauuucuauga

SEQ ID NO: 1508779 - RNA, 15 nt, Human
aguauuucuaugaaa

SEQ ID NO: 1508780 - RNA, 14 nt, Human
aguauguguaaaau

SEQ ID NO: 1508781 - RNA, 22 nt, Human
aguauuucuaugaaauauuaug

SEQ ID NO: 1508782 - RNA, 16 nt, Human
aguauuugagaguucu

SEQ ID NO: 1508783 - RNA, 19 nt, Human
agucacauuccugaacagg

SEQ ID NO: 1508784 - RNA, 18 nt, Human
agucacauuccugaacag

SEQ ID NO: 1508785 - RNA, 20 nt, Human
agucacauuccugaacagga

SEQ ID NO: 1508786 - RNA, 13 nt, Human
agucaccaagccc

SEQ ID NO: 1508787 - RNA, 14 nt, Human
agucaccaagccca

SEQ ID NO: 1508788 - RNA, 19 nt, Human
agucacugagacagcccgg

SEQ ID NO: 1508789 - RNA, 16 nt, Human
ugucagcugaaccugg

SEQ ID NO: 1508790 - RNA, 19 nt, Human
ugucagcugaaccugggua

SEQ ID NO: 1508791 - RNA, 16 nt, Human
ugucagguggggcagc

SEQ ID NO: 1508792 - RNA, 21 nt, Human
ugucaauaaaauccauacauu

SEQ ID NO: 1508793 - RNA, 17 nt, Human
ugucaagagucgcugug

SEQ ID NO: 1508794 - RNA, 19 nt, Human
ugucaagagucgcugugcc

SEQ ID NO: 1508795 - RNA, 19 nt, Human
ugucaagagggucugagga

SEQ ID NO: 1508796 - RNA, 15 nt, Human
ugucaagccauaauu

SEQ ID NO: 1508797 - RNA, 14 nt, Human
uguauuuuuuuacu

SEQ ID NO: 1508798 - RNA, 16 nt, Human
uguauuuuuuuacuaa

SEQ ID NO: 1508799 - RNA, 20 nt, Human
ugucaaucagccuaguugau

SEQ ID NO: 1508800 - RNA, 16 nt, Human
aguaggaagacuuugg

SEQ ID NO: 1508801 - RNA, 17 nt, Human
aguaggaagacuuugga

SEQ ID NO: 1508802 - RNA, 18 nt, Human
aguaggaagacuuuggaa

SEQ ID NO: 1508803 - RNA, 19 nt, Human
aguaggaagacuuuggaaa

SEQ ID NO: 1508804 - RNA, 22 nt, Human
aguaggaagacuuuggaaagac

SEQ ID NO: 1508805 - RNA, 19 nt, Human
agucagggguucccuuuuu

SEQ ID NO: 1508806 - RNA, 12 nt, Human
agucccugccaa

SEQ ID NO: 1508807 - RNA, 16 nt, Human
agucucacuguugccc

SEQ ID NO: 1508808 - RNA, 17 nt, Human
agucucacuguugccca

SEQ ID NO: 1508809 - RNA, 23 nt, Human
aguccgaaagggacuuggaagcu

SEQ ID NO: 1508810 - RNA, 16 nt, Human
agucaggaaagagaac

SEQ ID NO: 1508811 - RNA, 12 nt, Human
ugucgggcauga

SEQ ID NO: 1508812 - RNA, 14 nt, Human
ugucgcccagucug

SEQ ID NO: 1508813 - RNA, 15 nt, Human
ugucgcccagucugg

SEQ ID NO: 1508814 - RNA, 14 nt, Human
ugucgggcaugaca

SEQ ID NO: 1508815 - RNA, 15 nt, Human
ugucgggcaugacac

SEQ ID NO: 1508816 - RNA, 13 nt, Human
uguccgagcuuug

SEQ ID NO: 1508817 - RNA, 14 nt, Human
uguccgagcuuuga

SEQ ID NO: 1508818 - RNA, 16 nt, Human
uguccuacccacccuc

SEQ ID NO: 1508819 - RNA, 20 nt, Human
ugguaaggggaauugaggac

SEQ ID NO: 1508820 - RNA, 16 nt, Human
ugguacuaacuuuccu

SEQ ID NO: 1508821 - RNA, 22 nt, Human
agggucucacucugucgcccag

SEQ ID NO: 1508822 - RNA, 15 nt, Human
agggugggagugggc

SEQ ID NO: 1508823 - RNA, 22 nt, Human
ugggugcuuggaggaaggaaac

SEQ ID NO: 1508824 - RNA, 15 nt, Human
ugggugcuuggagga

SEQ ID NO: 1508825 - RNA, 19 nt, Human
ugggugcuuggaggaagga

SEQ ID NO: 1508826 - RNA, 20 nt, Human
uggggucacucuggcagcuc

SEQ ID NO: 1508827 - RNA, 19 nt, Human
uggggucacucuggcagcu

SEQ ID NO: 1508828 - RNA, 23 nt, Human
aggggagcaaaaucgaugcagug

SEQ ID NO: 1508829 - RNA, 20 nt, Human
aggggugggacacccuguga

SEQ ID NO: 1508830 - RNA, 22 nt, Human
aggggugggacacccugugaug

SEQ ID NO: 1508831 - RNA, 15 nt, Human
aggggguggccuccc

SEQ ID NO: 1508832 - RNA, 17 nt, Human
aggggguggccucccaa

SEQ ID NO: 1508833 - RNA, 18 nt, Human
aggggguggccucccaac

SEQ ID NO: 1508834 - RNA, 24 nt, Human
agggguucccuuuuuuggcugcug

SEQ ID NO: 1508835 - RNA, 21 nt, Human
agggucucacuauguugccca

SEQ ID NO: 1508836 - RNA, 22 nt, Human
agggucucacuauguugcccag

SEQ ID NO: 1508837 - RNA, 23 nt, Human
agggucucacuauguugcccagg

SEQ ID NO: 1508838 - RNA, 17 nt, Human
aggguuaugauuaagua

SEQ ID NO: 1508839 - RNA, 13 nt, Human
aggguuauaauaa

SEQ ID NO: 1508840 - RNA, 22 nt, Human
aggguguggggccaugccuccu

SEQ ID NO: 1508841 - RNA, 23 nt, Human
aggguguggggccaugccuccuc

SEQ ID NO: 1508842 - RNA, 22 nt, Human
aggguguccggucccuguccca

SEQ ID NO: 1508843 - RNA, 16 nt, Human
uggucugacccacugc

SEQ ID NO: 1508844 - RNA, 17 nt, Human
uggucugacccacugcu

SEQ ID NO: 1508845 - RNA, 18 nt, Human
uggucugacccacugcuu

SEQ ID NO: 1508846 - RNA, 17 nt, Human
uggucucaaacucuuga

SEQ ID NO: 1508847 - RNA, 23 nt, Human
uggucucaaacucuugaccucag

SEQ ID NO: 1508848 - RNA, 16 nt, Human
uggucucaaacucuug

SEQ ID NO: 1508849 - RNA, 16 nt, Human
uggucccaccccacac

SEQ ID NO: 1508850 - RNA, 13 nt, Human
uggucccacucag

SEQ ID NO: 1508851 - RNA, 14 nt, Human
uggucccaccccac

SEQ ID NO: 1508852 - RNA, 15 nt, Human
uggucccaccccaca

SEQ ID NO: 1508853 - RNA, 18 nt, Human
uggucaccaaaucagcug

SEQ ID NO: 1508854 - RNA, 22 nt, Human
uggucagauuugaacucuucaa

SEQ ID NO: 1508855 - RNA, 20 nt, Human
uggucaccaaaucagcugcu

SEQ ID NO: 1508856 - RNA, 20 nt, Human
aggucauuuuuuuuaagaaa

SEQ ID NO: 1508857 - RNA, 17 nt, Human
aggucauuuuuuuuaag

SEQ ID NO: 1508858 - RNA, 12 nt, Human
aggucagagccu

SEQ ID NO: 1508859 - RNA, 18 nt, Human
aggucauauuaauauauu

SEQ ID NO: 1508860 - RNA, 19 nt, Human
aggucauauuaauauauuu

SEQ ID NO: 1508861 - RNA, 23 nt, Human
agguacuucaaauccuugaagau

SEQ ID NO: 1508862 - RNA, 17 nt, Human
agguagaaauaucugaa

SEQ ID NO: 1508863 - RNA, 19 nt, Human
agguagaaauaucugaaaa

SEQ ID NO: 1508864 - RNA, 13 nt, Human
aggguugggcugg

SEQ ID NO: 1508865 - RNA, 18 nt, Human
aggguuggccccugcccg

SEQ ID NO: 1508866 - RNA, 23 nt, Human
aggguuggccccugcccggcugc

SEQ ID NO: 1508867 - RNA, 21 nt, Human
agguaugcaaucaaaucugcu

SEQ ID NO: 1508868 - RNA, 23 nt, Human
agguagaaauaucugaaaaugua

SEQ ID NO: 1508869 - RNA, 14 nt, Human
uggggaaugaagau

SEQ ID NO: 1508870 - RNA, 15 nt, Human
uggggaaugaagaua

SEQ ID NO: 1508871 - RNA, 23 nt, Human
ugggcuggguucuacccaggugc

SEQ ID NO: 1508872 - RNA, 18 nt, Human
ugggcuggguucuaccca

SEQ ID NO: 1508873 - RNA, 19 nt, Human
ugggcuggguucuacccag

SEQ ID NO: 1508874 - RNA, 13 nt, Human
uggggaccucagg

SEQ ID NO: 1508875 - RNA, 17 nt, Human
uggggaccagagcugcc

SEQ ID NO: 1508876 - RNA, 18 nt, Human
uggggaccagagcugcca

SEQ ID NO: 1508877 - RNA, 14 nt, Human
uggggaccagagcu

SEQ ID NO: 1508878 - RNA, 15 nt, Human
uggggaccagagcug

SEQ ID NO: 1508879 - RNA, 20 nt, Human
ugggcucccuucccaccucu

SEQ ID NO: 1508880 - RNA, 21 nt, Human
ugggcucccuucccaccucuc

SEQ ID NO: 1508881 - RNA, 23 nt, Human
agggcuucugccauuucugagau

SEQ ID NO: 1508882 - RNA, 18 nt, Human
ugggcucccuucccaccu

SEQ ID NO: 1508883 - RNA, 19 nt, Human
ugggcucccuucccaccuc

SEQ ID NO: 1508884 - RNA, 14 nt, Human
uggggcccugccuc

SEQ ID NO: 1508885 - RNA, 12 nt, Human
uggggagaaagu

SEQ ID NO: 1508886 - RNA, 23 nt, Human
uggggaccucaggccugggggcu

SEQ ID NO: 1508887 - RNA, 15 nt, Human
uggggcccugccucc

SEQ ID NO: 1508888 - RNA, 16 nt, Human
uggggcccugccuccu

SEQ ID NO: 1508889 - RNA, 18 nt, Human
uggggcggugagagggga

SEQ ID NO: 1508890 - RNA, 15 nt, Human
ugggguacccacugc

SEQ ID NO: 1508891 - RNA, 16 nt, Human
ugggguacccacugcu

SEQ ID NO: 1508892 - RNA, 17 nt, Human
uggggucacucuggcag

SEQ ID NO: 1508893 - RNA, 18 nt, Human
uggggucacucuggcagc

SEQ ID NO: 1508894 - RNA, 15 nt, Human
ugggguaugggagag

SEQ ID NO: 1508895 - RNA, 14 nt, Human
ugggguacccacug

SEQ ID NO: 1508896 - RNA, 22 nt, Human
uggggcugcaccggcuggccug

SEQ ID NO: 1508897 - RNA, 20 nt, Human
uggggcugcaccggcuggcc

SEQ ID NO: 1508898 - RNA, 16 nt, Human
ugggcaacccccagcc

SEQ ID NO: 1508899 - RNA, 14 nt, Human
ugggaguacaaaag

SEQ ID NO: 1508900 - RNA, 18 nt, Human
ugggaggucaaggcugca

SEQ ID NO: 1508901 - RNA, 19 nt, Human
ugggaggucaaggcugcag

SEQ ID NO: 1508902 - RNA, 20 nt, Human
ugggaggucaaggcugcagu

SEQ ID NO: 1508903 - RNA, 23 nt, Human
ugggaggucaaggcugcagugag

SEQ ID NO: 1508904 - RNA, 22 nt, Human
ugggccacuucuggguggggca

SEQ ID NO: 1508905 - RNA, 17 nt, Human
ugggcaacccccagccu

SEQ ID NO: 1508906 - RNA, 20 nt, Human
ugggcaacccccagccugcu

SEQ ID NO: 1508907 - RNA, 21 nt, Human
ugggcaacccccagccugcua

SEQ ID NO: 1508908 - RNA, 13 nt, Human
ugggccaggagcc

SEQ ID NO: 1508909 - RNA, 20 nt, Human
ugggcccaaugcacuuuguu

SEQ ID NO: 1508910 - RNA, 14 nt, Human
ugggccaggagccu

SEQ ID NO: 1508911 - RNA, 16 nt, Human
ugggccaggagccucc

SEQ ID NO: 1508912 - RNA, 17 nt, Human
agggcagggacaggaua

SEQ ID NO: 1508913 - RNA, 23 nt, Human
agggcccagagaggguggugacc

SEQ ID NO: 1508914 - RNA, 17 nt, Human
agggaggugaccccagg

SEQ ID NO: 1508915 - RNA, 17 nt, Human
agggagugacagaggca

SEQ ID NO: 1508916 - RNA, 18 nt, Human
agggagugacagaggcag

SEQ ID NO: 1508917 - RNA, 20 nt, Human
agggagugacagaggcagcc

SEQ ID NO: 1508918 - RNA, 19 nt, Human
agggagugacagaggcagc

SEQ ID NO: 1508919 - RNA, 15 nt, Human
agggcagcagaaggg

SEQ ID NO: 1508920 - RNA, 21 nt, Human
agggcagcagaaggggguggu

SEQ ID NO: 1508921 - RNA, 15 nt, Human
agggagggcuucugc

SEQ ID NO: 1508922 - RNA, 23 nt, Human
aggacagcccuucuuuccacaga

SEQ ID NO: 1508923 - RNA, 21 nt, Human
ugcuugaggcaacucaucuua

SEQ ID NO: 1508924 - RNA, 13 nt, Human
ugcuuguacauaa

SEQ ID NO: 1508925 - RNA, 12 nt, Human
ugcuuguacaua

SEQ ID NO: 1508926 - RNA, 14 nt, Human
ugcuuggaggaagg

SEQ ID NO: 1508927 - RNA, 15 nt, Human
ugcuuggaggaagga

SEQ ID NO: 1508928 - RNA, 16 nt, Human
ugcuuggaggaaggaa

SEQ ID NO: 1508929 - RNA, 16 nt, Human
ugcuuugugauuuuug

SEQ ID NO: 1508930 - RNA, 14 nt, Human
ugcuuugugauuuu

SEQ ID NO: 1508931 - RNA, 12 nt, Human
ugcuuugugauu

SEQ ID NO: 1508932 - RNA, 22 nt, Human
ugcuuguacauaaugcgugcau

SEQ ID NO: 1508933 - RNA, 16 nt, Human
ugcuuguacauaaugc

SEQ ID NO: 1508934 - RNA, 14 nt, Human
ugcuuguacauaau

SEQ ID NO: 1508935 - RNA, 17 nt, Human
ugcuuugugauuuuugu

SEQ ID NO: 1508936 - RNA, 14 nt, Human
ugcuuuuggucugu

SEQ ID NO: 1508937 - RNA, 17 nt, Human
ugcuuuuggucugugug

SEQ ID NO: 1508938 - RNA, 13 nt, Human
uggaagguauuua

SEQ ID NO: 1508939 - RNA, 17 nt, Human
uggaagguauuuaauag

SEQ ID NO: 1508940 - RNA, 18 nt, Human
uggaaguacuauaauuua

SEQ ID NO: 1508941 - RNA, 17 nt, Human
uggaaaugggcagagca

SEQ ID NO: 1508942 - RNA, 18 nt, Human
uggaaaugggcagagcag

SEQ ID NO: 1508943 - RNA, 16 nt, Human
uggaagcacagcuuca

SEQ ID NO: 1508944 - RNA, 13 nt, Human
aggauccugagcc

SEQ ID NO: 1508945 - RNA, 14 nt, Human
aggauccugagcca

SEQ ID NO: 1508946 - RNA, 14 nt, Human
uggagcucguggaa

SEQ ID NO: 1508947 - RNA, 14 nt, Human
aggcaaugcuggcu

SEQ ID NO: 1508948 - RNA, 20 nt, Human
aggcacccaccaucaugucu

SEQ ID NO: 1508949 - RNA, 21 nt, Human
aggcacccaccaucaugucug

SEQ ID NO: 1508950 - RNA, 22 nt, Human
aggcacccaccaucaugucugg

SEQ ID NO: 1508951 - RNA, 14 nt, Human
uggagaagaacuga

SEQ ID NO: 1508952 - RNA, 22 nt, Human
uggagaagccacaggccugaga

SEQ ID NO: 1508953 - RNA, 23 nt, Human
uggagaagccacaggccugagau

SEQ ID NO: 1508954 - RNA, 13 nt, Human
uggagaagcggcu

SEQ ID NO: 1508955 - RNA, 22 nt, Human
uggagaagcggcuggcagccca

SEQ ID NO: 1508956 - RNA, 13 nt, Human
uggagaagaacug

SEQ ID NO: 1508957 - RNA, 20 nt, Human
uggaccuugaacuggguacu

SEQ ID NO: 1508958 - RNA, 23 nt, Human
uggacacagcucuucuccaggcu

SEQ ID NO: 1508959 - RNA, 16 nt, Human
uggacccugaggccca

SEQ ID NO: 1508960 - RNA, 18 nt, Human
uggacccugaggcccaga

SEQ ID NO: 1508961 - RNA, 19 nt, Human
uggacccugaggcccagag

SEQ ID NO: 1508962 - RNA, 20 nt, Human
uggacccugaggcccagagg

SEQ ID NO: 1508963 - RNA, 21 nt, Human
uggacccugaggcccagaggg

SEQ ID NO: 1508964 - RNA, 23 nt, Human
uggacccuguggaugauaaaaca

SEQ ID NO: 1508965 - RNA, 22 nt, Human
uggacacagcucuucuccaggc

SEQ ID NO: 1508966 - RNA, 13 nt, Human
uggacacagcucu

SEQ ID NO: 1508967 - RNA, 14 nt, Human
uggacacagcucuu

SEQ ID NO: 1508968 - RNA, 19 nt, Human
aggaucucuugagccuggg

SEQ ID NO: 1508969 - RNA, 17 nt, Human
aggaucucuugagccug

SEQ ID NO: 1508970 - RNA, 18 nt, Human
aggaucucuugagccugg

SEQ ID NO: 1508971 - RNA, 21 nt, Human
uggauuguccccgacccuugc

SEQ ID NO: 1508972 - RNA, 13 nt, Human
uggauuguccccg

SEQ ID NO: 1508973 - RNA, 14 nt, Human
uggaguauauguca

SEQ ID NO: 1508974 - RNA, 16 nt, Human
aggcagccccauucug

SEQ ID NO: 1508975 - RNA, 17 nt, Human
aggcagccccauucugc

SEQ ID NO: 1508976 - RNA, 16 nt, Human
aggccaaaggaagcac

SEQ ID NO: 1508977 - RNA, 18 nt, Human
aggccaaaggaagcacau

SEQ ID NO: 1508978 - RNA, 19 nt, Human
aggccaaaggaagcacaug

SEQ ID NO: 1508979 - RNA, 20 nt, Human
aggccaaaggaagcacaugc

SEQ ID NO: 1508980 - RNA, 16 nt, Human
aggccaaggugggagg

SEQ ID NO: 1508981 - RNA, 18 nt, Human
aggccaaggugggaggau

SEQ ID NO: 1508982 - RNA, 20 nt, Human
uggagguacgaaaagagggg

SEQ ID NO: 1508983 - RNA, 18 nt, Human
uggcacaguuuucugaga

SEQ ID NO: 1508984 - RNA, 19 nt, Human
uggcacaguuuucugagaa

SEQ ID NO: 1508985 - RNA, 20 nt, Human
uggcacaguuuucugagaaa

SEQ ID NO: 1508986 - RNA, 17 nt, Human
uggcagccuuggcaaac

SEQ ID NO: 1508987 - RNA, 15 nt, Human
uggcagcucaccucu

SEQ ID NO: 1508988 - RNA, 19 nt, Human
uggcagcucaccucucccu

SEQ ID NO: 1508989 - RNA, 17 nt, Human
aggccacaagacccuug

SEQ ID NO: 1508990 - RNA, 18 nt, Human
aggccacaagacccuugu

SEQ ID NO: 1508991 - RNA, 19 nt, Human
aggccacaagacccuugug

SEQ ID NO: 1508992 - RNA, 14 nt, Human
aggccagagggagu

SEQ ID NO: 1508993 - RNA, 16 nt, Human
aggccccgcccaggcu

SEQ ID NO: 1508994 - RNA, 20 nt, Human
aggccagagggagugacaga

SEQ ID NO: 1508995 - RNA, 21 nt, Human
aggcccagagggccugcaagg

SEQ ID NO: 1508996 - RNA, 13 nt, Human
uggccucuucaga

SEQ ID NO: 1508997 - RNA, 13 nt, Human
uggcccacgcacu

SEQ ID NO: 1508998 - RNA, 20 nt, Human
aggccugggggcugggcaga

SEQ ID NO: 1508999 - RNA, 12 nt, Human
aggccuggggac

SEQ ID NO: 1509000 - RNA, 18 nt, Human
aggccugggggcugggca

SEQ ID NO: 1509001 - RNA, 14 nt, Human
uggccuucggccuc

SEQ ID NO: 1509002 - RNA, 13 nt, Human
uggccuuccccag

SEQ ID NO: 1509003 - RNA, 23 nt, Human
uggccuuccccagcaugcaccac

SEQ ID NO: 1509004 - RNA, 15 nt, Human
uggccuuccccagca

SEQ ID NO: 1509005 - RNA, 18 nt, Human
uggccugagcugggauga

SEQ ID NO: 1509006 - RNA, 18 nt, Human
uggccuggccccucaggg

SEQ ID NO: 1509007 - RNA, 21 nt, Human
uggccuggccccucagggucc

SEQ ID NO: 1509008 - RNA, 12 nt, Human
aggccccugcca

SEQ ID NO: 1509009 - RNA, 16 nt, Human
aggccugagauuucau

SEQ ID NO: 1509010 - RNA, 17 nt, Human
aggccccgcccaggcuu

SEQ ID NO: 1509011 - RNA, 19 nt, Human
aggccugagcgcuccugcc

SEQ ID NO: 1509012 - RNA, 21 nt, Human
aggccugagcgcuccugccgc

SEQ ID NO: 1509013 - RNA, 22 nt, Human
aggccugagcgcuccugccgca

SEQ ID NO: 1509014 - RNA, 17 nt, Human
aggccugagauuucauc

SEQ ID NO: 1509015 - RNA, 19 nt, Human
aggccugagauuucaucug

SEQ ID NO: 1509016 - RNA, 20 nt, Human
aggccugagauuucaucugc

SEQ ID NO: 1509017 - RNA, 21 nt, Human
aggccugagauuucaucugcu

SEQ ID NO: 1509018 - RNA, 22 nt, Human
aggccugagauuucaucugcuc

SEQ ID NO: 1509019 - RNA, 23 nt, Human
aggccugagauuucaucugcucu

SEQ ID NO: 1509020 - RNA, 14 nt, Human
aggccugagcgcuc

SEQ ID NO: 1509021 - RNA, 18 nt, Human
aggccugagcgcuccugc

SEQ ID NO: 1509022 - RNA, 16 nt, Human
uggcauauuuuucaca

SEQ ID NO: 1509023 - RNA, 17 nt, Human
uggcauauuuuucacau

SEQ ID NO: 1509024 - RNA, 21 nt, Human
uggccaaagccaaagcuaggc

SEQ ID NO: 1509025 - RNA, 23 nt, Human
uggccaaagccaaagcuaggccu

SEQ ID NO: 1509026 - RNA, 23 nt, Human
uggccagugugacaaggauugcu

SEQ ID NO: 1509027 - RNA, 14 nt, Human
ugcucauggaauug

SEQ ID NO: 1509028 - RNA, 17 nt, Human
ugcucuggacaggcaug

SEQ ID NO: 1509029 - RNA, 15 nt, Human
ugcucuggacaggca

SEQ ID NO: 1509030 - RNA, 16 nt, Human
ugcucuggacaggcau

SEQ ID NO: 1509031 - RNA, 14 nt, Human
ugcucuggacaggc

SEQ ID NO: 1509032 - RNA, 20 nt, Human
ugcuaucucccccagcccca

SEQ ID NO: 1509033 - RNA, 19 nt, Human
ugcuaucucccccagcccc

SEQ ID NO: 1509034 - RNA, 23 nt, Human
agcuuuaucaaagggugaaaauu

SEQ ID NO: 1509035 - RNA, 13 nt, Human
aggaaauauuuau

SEQ ID NO: 1509036 - RNA, 15 nt, Human
aggaaaucaccgaaa

SEQ ID NO: 1509037 - RNA, 19 nt, Human
aggaaaucaccgaaaacgu

SEQ ID NO: 1509038 - RNA, 11 nt, Human
aggaagcacau

SEQ ID NO: 1509039 - RNA, 16 nt, Human
aggaagcacaugccuc

SEQ ID NO: 1509040 - RNA, 17 nt, Human
aggaagcacaugccucu

SEQ ID NO: 1509041 - RNA, 12 nt, Human
aggaaauauuua

SEQ ID NO: 1509042 - RNA, 15 nt, Human
aggaaaggcuccagg

SEQ ID NO: 1509043 - RNA, 16 nt, Human
aggaaaggcuccagga

SEQ ID NO: 1509044 - RNA, 16 nt, Human
ugcugacuguuuucuc

SEQ ID NO: 1509045 - RNA, 13 nt, Human
aggaaaggcucca

SEQ ID NO: 1509046 - RNA, 14 nt, Human
aggaaaggcuccag

SEQ ID NO: 1509047 - RNA, 18 nt, Human
aggaagccgcuggggcca

SEQ ID NO: 1509048 - RNA, 19 nt, Human
aggaagccgcuggggccag

SEQ ID NO: 1509049 - RNA, 20 nt, Human
aggaagccgcuggggccagu

SEQ ID NO: 1509050 - RNA, 22 nt, Human
aggaagcacaugccucucucag

SEQ ID NO: 1509051 - RNA, 21 nt, Human
aggaagccagcaggcucucag

SEQ ID NO: 1509052 - RNA, 22 nt, Human
aggaagccagcaggcucucagg

SEQ ID NO: 1509053 - RNA, 23 nt, Human
aggaagccagcaggcucucaggc

SEQ ID NO: 1509054 - RNA, 12 nt, Human
aggaagcucagg

SEQ ID NO: 1509055 - RNA, 23 nt, Human
aggaaggaaacccagcucugguc

SEQ ID NO: 1509056 - RNA, 20 nt, Human
aggaaggaaacccagcucug

SEQ ID NO: 1509057 - RNA, 22 nt, Human
aggaaggaaacccagcucuggu

SEQ ID NO: 1509058 - RNA, 21 nt, Human
ugcuguauuuuaaaagaauga

SEQ ID NO: 1509059 - RNA, 22 nt, Human
ugcuguauuuuaaaagaaugau

SEQ ID NO: 1509060 - RNA, 13 nt, Human
ugcuguauuuuaa

SEQ ID NO: 1509061 - RNA, 21 nt, Human
ugcugggauuacaagcgugag

SEQ ID NO: 1509062 - RNA, 17 nt, Human
ugcugggauuacaggug

SEQ ID NO: 1509063 - RNA, 19 nt, Human
ugcugggauuacaagcgug

SEQ ID NO: 1509064 - RNA, 19 nt, Human
ugcuggcuguuggcugggg

SEQ ID NO: 1509065 - RNA, 21 nt, Human
ugcuggcuguuggcugggggc

SEQ ID NO: 1509066 - RNA, 13 nt, Human
ugcugcccugccc

SEQ ID NO: 1509067 - RNA, 16 nt, Human
ugcugcccugcccacc

SEQ ID NO: 1509068 - RNA, 17 nt, Human
ugcugcccugcccaccu

SEQ ID NO: 1509069 - RNA, 18 nt, Human
ugcugcccugcccaccug

SEQ ID NO: 1509070 - RNA, 12 nt, Human
ugcugcccugug

SEQ ID NO: 1509071 - RNA, 11 nt, Human
ugcugcccugu

SEQ ID NO: 1509072 - RNA, 19 nt, Human
ugcugcccugcccaccugg

SEQ ID NO: 1509073 - RNA, 21 nt, Human
ugcugcccugcccaccuggcc

SEQ ID NO: 1509074 - RNA, 16 nt, Human
ugcuuccagugaggcu

SEQ ID NO: 1509075 - RNA, 18 nt, Human
aggacacuaaccacgcug

SEQ ID NO: 1509076 - RNA, 19 nt, Human
aggacacuaaccacgcugg

SEQ ID NO: 1509077 - RNA, 12 nt, Human
ugcuucaaggau

SEQ ID NO: 1509078 - RNA, 21 nt, Human
ugcuucaaggauccugagcca

SEQ ID NO: 1509079 - RNA, 23 nt, Human
ugcuucaaggauccugagccaga

SEQ ID NO: 1509080 - RNA, 23 nt, Human
ugcuguauuuuaaaagaaugauu

SEQ ID NO: 1509081 - RNA, 17 nt, Human
ugcugucccuuacguga

SEQ ID NO: 1509082 - RNA, 19 nt, Human
ugcugucccuuacgugagu

SEQ ID NO: 1509083 - RNA, 15 nt, Human
ugcugucccuuuucc

SEQ ID NO: 1509084 - RNA, 17 nt, Human
ugcugucccuuuuccuu

SEQ ID NO: 1509085 - RNA, 21 nt, Human
agcugugcucuggacaggcau

SEQ ID NO: 1509086 - RNA, 23 nt, Human
agcugugcucuggacaggcaugu

SEQ ID NO: 1509087 - RNA, 20 nt, Human
agcugugcucuggacaggca

SEQ ID NO: 1509088 - RNA, 15 nt, Human
agcugggacuacagg

SEQ ID NO: 1509089 - RNA, 14 nt, Human
agcuguuacugucu

SEQ ID NO: 1509090 - RNA, 16 nt, Human
agcuguucacagccag

SEQ ID NO: 1509091 - RNA, 19 nt, Human
agcuguucacagccagacu

SEQ ID NO: 1509092 - RNA, 13 nt, Human
agcuguucagcug

SEQ ID NO: 1509093 - RNA, 14 nt, Human
agcuguucagcugg

SEQ ID NO: 1509094 - RNA, 18 nt, Human
ugccuguucagcuccagc

SEQ ID NO: 1509095 - RNA, 20 nt, Human
ugccuguucagcuccagcuc

SEQ ID NO: 1509096 - RNA, 20 nt, Human
ugccuguugggccaggagcc

SEQ ID NO: 1509097 - RNA, 21 nt, Human
ugccuguucagcuccagcuca

SEQ ID NO: 1509098 - RNA, 15 nt, Human
ugccuuauggaacac

SEQ ID NO: 1509099 - RNA, 16 nt, Human
ugccuuauggaacacu

SEQ ID NO: 1509100 - RNA, 14 nt, Human
ugccugcccaggcc

SEQ ID NO: 1509101 - RNA, 15 nt, Human
ugccugcccaggccc

SEQ ID NO: 1509102 - RNA, 16 nt, Human
ugccugcccaggcccc

SEQ ID NO: 1509103 - RNA, 12 nt, Human
ugcccaggcagg

SEQ ID NO: 1509104 - RNA, 13 nt, Human
ugcccaggcaggu

SEQ ID NO: 1509105 - RNA, 14 nt, Human
ugcccaggcagguc

SEQ ID NO: 1509106 - RNA, 13 nt, Human
ugccucugccucu

SEQ ID NO: 1509107 - RNA, 14 nt, Human
ugccucugccucug

SEQ ID NO: 1509108 - RNA, 15 nt, Human
ugccucugccucuga

SEQ ID NO: 1509109 - RNA, 17 nt, Human
ugccucugccucugaca

SEQ ID NO: 1509110 - RNA, 21 nt, Human
agcugcuuuugucuaugggac

SEQ ID NO: 1509111 - RNA, 22 nt, Human
agcugcuuuugucuaugggacu

SEQ ID NO: 1509112 - RNA, 21 nt, Human
agcugcuugggcuucauccuc

SEQ ID NO: 1509113 - RNA, 21 nt, Human
agcugccuguucagcuccagc

SEQ ID NO: 1509114 - RNA, 22 nt, Human
agcugccuguucagcuccagcu

SEQ ID NO: 1509115 - RNA, 14 nt, Human
ugccuggauggggc

SEQ ID NO: 1509116 - RNA, 15 nt, Human
ugccuggauggggcu

SEQ ID NO: 1509117 - RNA, 20 nt, Human
agcugccuguucagcuccag

SEQ ID NO: 1509118 - RNA, 11 nt, Human
ugcuacacacu

SEQ ID NO: 1509119 - RNA, 20 nt, Human
ugcuacaaaaacacagcaag

SEQ ID NO: 1509120 - RNA, 16 nt, Human
ugcuacaaaaacacag

SEQ ID NO: 1509121 - RNA, 17 nt, Human
ugcuacaaaaacacagc

SEQ ID NO: 1509122 - RNA, 18 nt, Human
ugcuacaaaaacacagca

SEQ ID NO: 1509123 - RNA, 19 nt, Human
ugcuacaaaaacacagcaa

SEQ ID NO: 1509124 - RNA, 19 nt, Human
agcuugaccgugaggccag

SEQ ID NO: 1509125 - RNA, 17 nt, Human
agcuugaaacugagaug

SEQ ID NO: 1509126 - RNA, 14 nt, Human
agcuugaggguugg

SEQ ID NO: 1509127 - RNA, 18 nt, Human
agcuugaggguugggcug

SEQ ID NO: 1509128 - RNA, 22 nt, Human
agcuugaggguugggcuggugu

SEQ ID NO: 1509129 - RNA, 18 nt, Human
agcuuguaaauagcucag

SEQ ID NO: 1509130 - RNA, 17 nt, Human
ugccuuuggcagaguuc

SEQ ID NO: 1509131 - RNA, 22 nt, Human
ugcggacagccacggccaggcc

SEQ ID NO: 1509132 - RNA, 23 nt, Human
ugcggacagccacggccaggcca

SEQ ID NO: 1509133 - RNA, 18 nt, Human
ugcggcggucccagcucc

SEQ ID NO: 1509134 - RNA, 13 nt, Human
ugcggcgguccca

SEQ ID NO: 1509135 - RNA, 14 nt, Human
ugcggcggucccag

SEQ ID NO: 1509136 - RNA, 17 nt, Human
ugcggcggucccagcuc

SEQ ID NO: 1509137 - RNA, 17 nt, Human
ugcggccuuuggcuuca

SEQ ID NO: 1509138 - RNA, 19 nt, Human
ugcggccuuuggcuucacg

SEQ ID NO: 1509139 - RNA, 20 nt, Human
ugcgggcuuccuccuggugu

SEQ ID NO: 1509140 - RNA, 18 nt, Human
ugcgguccacccaggagc

SEQ ID NO: 1509141 - RNA, 21 nt, Human
ugcggugcuaucucccccagc

SEQ ID NO: 1509142 - RNA, 17 nt, Human
ugcggugcuaucucccc

SEQ ID NO: 1509143 - RNA, 12 nt, Human
agcuaggccugg

SEQ ID NO: 1509144 - RNA, 16 nt, Human
agcuaggccuggccag

SEQ ID NO: 1509145 - RNA, 14 nt, Human
agcuaggccuggcc

SEQ ID NO: 1509146 - RNA, 15 nt, Human
agcuaggccuggcca

SEQ ID NO: 1509147 - RNA, 18 nt, Human
agcucaggugucccugca

SEQ ID NO: 1509148 - RNA, 22 nt, Human
agcucaggugucccugcacuug

SEQ ID NO: 1509149 - RNA, 20 nt, Human
agcucaggugucccugcacu

SEQ ID NO: 1509150 - RNA, 21 nt, Human
agcucaggugucccugcacuu

SEQ ID NO: 1509151 - RNA, 21 nt, Human
ugcccagccccuucugaccca

SEQ ID NO: 1509152 - RNA, 20 nt, Human
ugcccacaggaucagucuga

SEQ ID NO: 1509153 - RNA, 19 nt, Human
ugcccacaggaucagucug

SEQ ID NO: 1509154 - RNA, 21 nt, Human
agcucauucuccuuguguuac

SEQ ID NO: 1509155 - RNA, 20 nt, Human
agcucauucuccuuguguua

SEQ ID NO: 1509156 - RNA, 19 nt, Human
agcuacuaauuuuaaaaug

SEQ ID NO: 1509157 - RNA, 19 nt, Human
agcgugagccacugcaccg

SEQ ID NO: 1509158 - RNA, 22 nt, Human
agcgugagccacugcaccgggc

SEQ ID NO: 1509159 - RNA, 15 nt, Human
agcgugcauaaguua

SEQ ID NO: 1509160 - RNA, 13 nt, Human
agcuagaauuuga

SEQ ID NO: 1509161 - RNA, 16 nt, Human
agcuagaauuugauau

SEQ ID NO: 1509162 - RNA, 17 nt, Human
agcuacuugggaggcug

SEQ ID NO: 1509163 - RNA, 18 nt, Human
agcuacuugggaggcuga

SEQ ID NO: 1509164 - RNA, 18 nt, Human
agcuagacgagcaggcuu

SEQ ID NO: 1509165 - RNA, 22 nt, Human
agccuggucccacgagggugcc

SEQ ID NO: 1509166 - RNA, 21 nt, Human
agccugugccucugggacugg

SEQ ID NO: 1509167 - RNA, 22 nt, Human
agccugggugacagagcaagug

SEQ ID NO: 1509168 - RNA, 19 nt, Human
agccugcuccagcuguuca

SEQ ID NO: 1509169 - RNA, 22 nt, Human
agccugcuccagcuguucagcu

SEQ ID NO: 1509170 - RNA, 14 nt, Human
ugcauaccacuuuu

SEQ ID NO: 1509171 - RNA, 15 nt, Human
agccugcuccagcug

SEQ ID NO: 1509172 - RNA, 16 nt, Human
agccugcuccagcugu

SEQ ID NO: 1509173 - RNA, 17 nt, Human
agccugcuccagcuguu

SEQ ID NO: 1509174 - RNA, 12 nt, Human
ugcauaccacuu

SEQ ID NO: 1509175 - RNA, 16 nt, Human
agcggagaaaggaagg

SEQ ID NO: 1509176 - RNA, 20 nt, Human
ugcauuaucuagauacugua

SEQ ID NO: 1509177 - RNA, 20 nt, Human
agcggagaaaggaagggcug

SEQ ID NO: 1509178 - RNA, 18 nt, Human
agcggagacggaguccca

SEQ ID NO: 1509179 - RNA, 20 nt, Human
agccuuggggcugaugcagu

SEQ ID NO: 1509180 - RNA, 11 nt, Human
agccuuccagg

SEQ ID NO: 1509181 - RNA, 14 nt, Human
agccuuccaggggu

SEQ ID NO: 1509182 - RNA, 16 nt, Human
agccuuccaggggugg

SEQ ID NO: 1509183 - RNA, 17 nt, Human
agccuuccagggguggg

SEQ ID NO: 1509184 - RNA, 22 nt, Human
ugcauuaucuagauacuguauc

SEQ ID NO: 1509185 - RNA, 21 nt, Human
ugcauuaucuagauacuguau

SEQ ID NO: 1509186 - RNA, 17 nt, Human
agccucccaaagugcug

SEQ ID NO: 1509187 - RNA, 22 nt, Human
agccugaaagaggaaugaagua

SEQ ID NO: 1509188 - RNA, 17 nt, Human
ugcagccucacaguccu

SEQ ID NO: 1509189 - RNA, 16 nt, Human
ugcagccucacagucc

SEQ ID NO: 1509190 - RNA, 13 nt, Human
ugcagccucacag

SEQ ID NO: 1509191 - RNA, 15 nt, Human
ugcagccucacaguc

SEQ ID NO: 1509192 - RNA, 18 nt, Human
ugcagccugcaggaccuc

SEQ ID NO: 1509193 - RNA, 17 nt, Human
ugcagccugcaggaccu

SEQ ID NO: 1509194 - RNA, 14 nt, Human
ugcauaaguuaacu

SEQ ID NO: 1509195 - RNA, 17 nt, Human
ugcauaaguuaacuucc

SEQ ID NO: 1509196 - RNA, 23 nt, Human
agcccuucuaccuuccugcaaca

SEQ ID NO: 1509197 - RNA, 23 nt, Human
ugcacuauagccuaggugacaga

SEQ ID NO: 1509198 - RNA, 17 nt, Human
agcccuucuuuccacag

SEQ ID NO: 1509199 - RNA, 20 nt, Human
agccgagauagccaaggcca

SEQ ID NO: 1509200 - RNA, 16 nt, Human
agccucccaaagugcu

SEQ ID NO: 1509201 - RNA, 20 nt, Human
agccucauguccacugguuc

SEQ ID NO: 1509202 - RNA, 15 nt, Human
agccucauguccacu

SEQ ID NO: 1509203 - RNA, 22 nt, Human
agccucagcauccuggcacccg

SEQ ID NO: 1509204 - RNA, 23 nt, Human
agccucagcauccuggcacccgg

SEQ ID NO: 1509205 - RNA, 17 nt, Human
agccucagcauccuggc

SEQ ID NO: 1509206 - RNA, 19 nt, Human
agccucagcauccuggcac

SEQ ID NO: 1509207 - RNA, 20 nt, Human
agccucagcauccuggcacc

SEQ ID NO: 1509208 - RNA, 21 nt, Human
agccucagcauccuggcaccc

SEQ ID NO: 1509209 - RNA, 20 nt, Human
ugcacacauuuuuuaaaugc

SEQ ID NO: 1509210 - RNA, 10 nt, Human
ugcacacauu

SEQ ID NO: 1509211 - RNA, 14 nt, Human
ugcacgugugugca

SEQ ID NO: 1509212 - RNA, 15 nt, Human
ugcacgugugugcac

SEQ ID NO: 1509213 - RNA, 16 nt, Human
ugcacccucaggcagg

SEQ ID NO: 1509214 - RNA, 17 nt, Human
ugcacccucaggcaggu

SEQ ID NO: 1509215 - RNA, 20 nt, Human
agccccuucugacccaugcu

SEQ ID NO: 1509216 - RNA, 24 nt, Human
agccccuucugacccaugcugccc

SEQ ID NO: 1509217 - RNA, 15 nt, Human
ugcacaagcugcacc

SEQ ID NO: 1509218 - RNA, 22 nt, Human
agcccugguggcagugggagcu

SEQ ID NO: 1509219 - RNA, 23 nt, Human
agcccugguggcagugggagcug

SEQ ID NO: 1509220 - RNA, 18 nt, Human
ugcacaagcugcacccuc

SEQ ID NO: 1509221 - RNA, 21 nt, Human
ugcacaagcugcacccucagg

SEQ ID NO: 1509222 - RNA, 15 nt, Human
ugauucuccugccuc

SEQ ID NO: 1509223 - RNA, 19 nt, Human
ugauucuccugccucagcc

SEQ ID NO: 1509224 - RNA, 20 nt, Human
ugauucuccugccucagccu

SEQ ID NO: 1509225 - RNA, 18 nt, Human
agcccauggcacucuaug

SEQ ID NO: 1509226 - RNA, 20 nt, Human
agccccaaaacucuccucug

SEQ ID NO: 1509227 - RNA, 21 nt, Human
agccccaaaacucuccucugc

SEQ ID NO: 1509228 - RNA, 22 nt, Human
agccccaaaacucuccucugcu

SEQ ID NO: 1509229 - RNA, 22 nt, Human
agccccuggaugcagccucaca

SEQ ID NO: 1509230 - RNA, 19 nt, Human
agccccuggaugcagccuc

SEQ ID NO: 1509231 - RNA, 17 nt, Human
agccccuggaugcagcc

SEQ ID NO: 1509232 - RNA, 18 nt, Human
agccccuggaugcagccu

SEQ ID NO: 1509233 - RNA, 24 nt, Human
agccccaaaacucuccucugcugc

SEQ ID NO: 1509234 - RNA, 17 nt, Human
agccccgaggccuucuc

SEQ ID NO: 1509235 - RNA, 22 nt, Human
agccccgaggccuucucugaag

SEQ ID NO: 1509236 - RNA, 14 nt, Human
ugagucaccaagcc

SEQ ID NO: 1509237 - RNA, 16 nt, Human
ugagucaccaagccca

SEQ ID NO: 1509238 - RNA, 17 nt, Human
ugagucaccaagcccag

SEQ ID NO: 1509239 - RNA, 17 nt, Human
ugagugccuuacacaau

SEQ ID NO: 1509240 - RNA, 20 nt, Human
ugagugccuuacacaauggu

SEQ ID NO: 1509241 - RNA, 21 nt, Human
ugagugggugaauaauacagu

SEQ ID NO: 1509242 - RNA, 18 nt, Human
ugagugucuuaauuaaaa

SEQ ID NO: 1509243 - RNA, 12 nt, Human
ugauacagaaaa

SEQ ID NO: 1509244 - RNA, 21 nt, Human
ugauacagaaaaguugaauuu

SEQ ID NO: 1509245 - RNA, 21 nt, Human
ugauacaaugcugugcccuaa

SEQ ID NO: 1509246 - RNA, 20 nt, Human
ugauacaaugcugugcccua

SEQ ID NO: 1509247 - RNA, 19 nt, Human
ugauacgcaacauaauuaa

SEQ ID NO: 1509248 - RNA, 17 nt, Human
ugauacuacaguuuguu

SEQ ID NO: 1509249 - RNA, 14 nt, Human
ugauacuacaguuu

SEQ ID NO: 1509250 - RNA, 12 nt, Human
ugauaaguaaau

SEQ ID NO: 1509251 - RNA, 18 nt, Human
ugaguucauacccuguua

SEQ ID NO: 1509252 - RNA, 17 nt, Human
ugaguucauacccuguu

SEQ ID NO: 1509253 - RNA, 23 nt, Human
agcauaaauguugacaugggaca

SEQ ID NO: 1509254 - RNA, 15 nt, Human
agcauacguacacau

SEQ ID NO: 1509255 - RNA, 21 nt, Human
agcauacguacacauuuuauu

SEQ ID NO: 1509256 - RNA, 20 nt, Human
agcauacguacacauuuuau

SEQ ID NO: 1509257 - RNA, 19 nt, Human
agcauacguacacauuuua

SEQ ID NO: 1509258 - RNA, 18 nt, Human
agcauacguacacauuuu

SEQ ID NO: 1509259 - RNA, 17 nt, Human
agcauacguacacauuu

SEQ ID NO: 1509260 - RNA, 16 nt, Human
agcauacguacacauu

SEQ ID NO: 1509261 - RNA, 22 nt, Human
ugaguaacugauuuguaacaag

SEQ ID NO: 1509262 - RNA, 15 nt, Human
ugaguacuacagucc

SEQ ID NO: 1509263 - RNA, 16 nt, Human
agcauauucaggaagc

SEQ ID NO: 1509264 - RNA, 14 nt, Human
agcauauucaggaa

SEQ ID NO: 1509265 - RNA, 14 nt, Human
ugaguagucucaug

SEQ ID NO: 1509266 - RNA, 17 nt, Human
ugaguacuacaguccuc

SEQ ID NO: 1509267 - RNA, 21 nt, Human
ugaguacuacaguccucccau

SEQ ID NO: 1509268 - RNA, 22 nt, Human
ugaguacuacaguccucccauc

SEQ ID NO: 1509269 - RNA, 23 nt, Human
ugaguacuacaguccucccaucu

SEQ ID NO: 1509270 - RNA, 12 nt, Human
ugauaugggucu

SEQ ID NO: 1509271 - RNA, 15 nt, Human
ugauaugugaacagu

SEQ ID NO: 1509272 - RNA, 16 nt, Human
ugauaugugaacaguu

SEQ ID NO: 1509273 - RNA, 17 nt, Human
ugauauuuuuuaucaua

SEQ ID NO: 1509274 - RNA, 19 nt, Human
ugauauuuuuuaucauaaa

SEQ ID NO: 1509275 - RNA, 17 nt, Human
ugaucaaacaugucucu

SEQ ID NO: 1509276 - RNA, 23 nt, Human
ugaucaacaucuuuucuugccuc

SEQ ID NO: 1509277 - RNA, 14 nt, Human
ugaucaacaucuuu

SEQ ID NO: 1509278 - RNA, 17 nt, Human
ugaucaacaucuuuucu

SEQ ID NO: 1509279 - RNA, 18 nt, Human
ugaucaacaucuuuucuu

SEQ ID NO: 1509280 - RNA, 21 nt, Human
ugaucaacaucuuuucuugcc

SEQ ID NO: 1509281 - RNA, 19 nt, Human
ugaucacggcucacugcag

SEQ ID NO: 1509282 - RNA, 20 nt, Human
agcaucacaugaacuuguaa

SEQ ID NO: 1509283 - RNA, 13 nt, Human
agcaucaggccag

SEQ ID NO: 1509284 - RNA, 22 nt, Human
agcauauucaggaagcucaggg

SEQ ID NO: 1509285 - RNA, 20 nt, Human
ugaucacggcucacugcagc

SEQ ID NO: 1509286 - RNA, 21 nt, Human
ugaucacggcucacugcagcc

SEQ ID NO: 1509287 - RNA, 20 nt, Human
agcaugucgucaaagcugaa

SEQ ID NO: 1509288 - RNA, 17 nt, Human
agcaugucgucaaagcu

SEQ ID NO: 1509289 - RNA, 13 nt, Human
agcauggcugcca

SEQ ID NO: 1509290 - RNA, 12 nt, Human
agcauggcugcc

SEQ ID NO: 1509291 - RNA, 14 nt, Human
agcaucaggccagg

SEQ ID NO: 1509292 - RNA, 16 nt, Human
agcaucaggccaggcc

SEQ ID NO: 1509293 - RNA, 17 nt, Human
agcaucaggccaggccc

SEQ ID NO: 1509294 - RNA, 18 nt, Human
agcaucaggccaggcccu

SEQ ID NO: 1509295 - RNA, 19 nt, Human
agcaucaggccaggcccuc

SEQ ID NO: 1509296 - RNA, 20 nt, Human
agcaucaggccaggcccucu

SEQ ID NO: 1509297 - RNA, 18 nt, Human
agcauggcauauuuuuca

SEQ ID NO: 1509298 - RNA, 19 nt, Human
agcauggcauauuuuucac

SEQ ID NO: 1509299 - RNA, 21 nt, Human
agcauggcauauuuuucacau

SEQ ID NO: 1509300 - RNA, 22 nt, Human
agcauggcauauuuuucacaua

SEQ ID NO: 1509301 - RNA, 17 nt, Human
agcauuguaaaugugcu

SEQ ID NO: 1509302 - RNA, 18 nt, Human
agcauuguaaaugugcuu

SEQ ID NO: 1509303 - RNA, 17 nt, Human
ugaugaagaaguugaua

SEQ ID NO: 1509304 - RNA, 15 nt, Human
agccacggccaggcc

SEQ ID NO: 1509305 - RNA, 14 nt, Human
agccacggccaggc

SEQ ID NO: 1509306 - RNA, 17 nt, Human
agccacauauugagaug

SEQ ID NO: 1509307 - RNA, 14 nt, Human
agccacauuccuga

SEQ ID NO: 1509308 - RNA, 18 nt, Human
agccacauuccugaugcu

SEQ ID NO: 1509309 - RNA, 19 nt, Human
agccaccaacauacuccca

SEQ ID NO: 1509310 - RNA, 20 nt, Human
agccaccaacauacucccau

SEQ ID NO: 1509311 - RNA, 23 nt, Human
agccaccaacauacucccaucug

SEQ ID NO: 1509312 - RNA, 15 nt, Human
ugauggugguauguu

SEQ ID NO: 1509313 - RNA, 18 nt, Human
ugauguuuuaaggaugcu

SEQ ID NO: 1509314 - RNA, 17 nt, Human
ugauguuuuaaggaugc

SEQ ID NO: 1509315 - RNA, 14 nt, Human
ugaugauccuaggc

SEQ ID NO: 1509316 - RNA, 20 nt, Human
ugaugauccuaggcauuugc

SEQ ID NO: 1509317 - RNA, 14 nt, Human
ugaugaucuuuaaa

SEQ ID NO: 1509318 - RNA, 16 nt, Human
ugauggugcaaugacc

SEQ ID NO: 1509319 - RNA, 17 nt, Human
ugaugaucuuuaaaaua

SEQ ID NO: 1509320 - RNA, 17 nt, Human
ugauggugcaaugaccu

SEQ ID NO: 1509321 - RNA, 23 nt, Human
ugauggugcaaugaccuuucaau

SEQ ID NO: 1509322 - RNA, 12 nt, Human
ugauuaaaccaa

SEQ ID NO: 1509323 - RNA, 16 nt, Human
ugauuaccagggacug

SEQ ID NO: 1509324 - RNA, 14 nt, Human
ugauuaccagggac

SEQ ID NO: 1509325 - RNA, 13 nt, Human
agccacugcaccg

SEQ ID NO: 1509326 - RNA, 16 nt, Human
agccacugcaccgggc

SEQ ID NO: 1509327 - RNA, 21 nt, Human
agccacugcaccgggccacag

SEQ ID NO: 1509328 - RNA, 22 nt, Human
agccacugcaccgggccacaga

SEQ ID NO: 1509329 - RNA, 12 nt, Human
agccaggccaca

SEQ ID NO: 1509330 - RNA, 14 nt, Human
agccaggccacaag

SEQ ID NO: 1509331 - RNA, 19 nt, Human
agccagacuggcacaguuu

SEQ ID NO: 1509332 - RNA, 14 nt, Human
agccagacuggcac

SEQ ID NO: 1509333 - RNA, 23 nt, Human
agccaguaaaugggggugcauuu

SEQ ID NO: 1509334 - RNA, 12 nt, Human
agccagggucuc

SEQ ID NO: 1509335 - RNA, 21 nt, Human
agccaggccacaagacccuug

SEQ ID NO: 1509336 - RNA, 22 nt, Human
agccaggccacaagacccuugu

SEQ ID NO: 1509337 - RNA, 19 nt, Human
ugauucccaagcucugcuc

SEQ ID NO: 1509338 - RNA, 21 nt, Human
ugauucccaagcucugcuccu

SEQ ID NO: 1509339 - RNA, 15 nt, Human
ugauucccaagcucu

SEQ ID NO: 1509340 - RNA, 16 nt, Human
ugauucccaagcucug

SEQ ID NO: 1509341 - RNA, 18 nt, Human
ugauucccaagcucugcu

SEQ ID NO: 1509342 - RNA, 15 nt, Human
ugauucauaaugacu

SEQ ID NO: 1509343 - RNA, 13 nt, Human
ugauucagcucug

SEQ ID NO: 1509344 - RNA, 14 nt, Human
ugauucagcucugc

SEQ ID NO: 1509345 - RNA, 24 nt, Human
agcccaggaaaggcuccaggagca

SEQ ID NO: 1509346 - RNA, 22 nt, Human
agcccaggaaaggcuccaggag

SEQ ID NO: 1509347 - RNA, 23 nt, Human
agcccaggaaaggcuccaggagc

SEQ ID NO: 1509348 - RNA, 19 nt, Human
agcccaggaaaggcuccag

SEQ ID NO: 1509349 - RNA, 20 nt, Human
agcccaggaaaggcuccagg

SEQ ID NO: 1509350 - RNA, 21 nt, Human
agcccaggaaaggcuccagga

SEQ ID NO: 1509351 - RNA, 12 nt, Human
agcccagaggag

SEQ ID NO: 1509352 - RNA, 14 nt, Human
agcccagaggaggg

SEQ ID NO: 1509353 - RNA, 15 nt, Human
agcccagaggagggc

SEQ ID NO: 1509354 - RNA, 16 nt, Human
agcccagaggagggca

SEQ ID NO: 1509355 - RNA, 16 nt, Human
agaugcaguucugaag

SEQ ID NO: 1509356 - RNA, 17 nt, Human
agaugcaguucugaaga

SEQ ID NO: 1509357 - RNA, 17 nt, Human
ugacacuuaaaaauggu

SEQ ID NO: 1509358 - RNA, 16 nt, Human
agaugccgcauuugga

SEQ ID NO: 1509359 - RNA, 18 nt, Human
agauggaaugcuguguua

SEQ ID NO: 1509360 - RNA, 13 nt, Human
agauggaaugcug

SEQ ID NO: 1509361 - RNA, 15 nt, Human
agauggaaugcugug

SEQ ID NO: 1509362 - RNA, 17 nt, Human
ugacccaugcugcccug

SEQ ID NO: 1509363 - RNA, 16 nt, Human
ugacccaugcugcccu

SEQ ID NO: 1509364 - RNA, 21 nt, Human
ugacccaugcugcccugugag

SEQ ID NO: 1509365 - RNA, 14 nt, Human
ugacccaugcugcc

SEQ ID NO: 1509366 - RNA, 15 nt, Human
ugacccaugcugccc

SEQ ID NO: 1509367 - RNA, 20 nt, Human
ugaccccaggagggaggcag

SEQ ID NO: 1509368 - RNA, 22 nt, Human
ugaccccaggagggaggcaggg

SEQ ID NO: 1509369 - RNA, 18 nt, Human
ugaccugaggcccuucuc

SEQ ID NO: 1509370 - RNA, 19 nt, Human
ugaccugaggcccuucucu

SEQ ID NO: 1509371 - RNA, 17 nt, Human
ugaccuucuaggaagcu

SEQ ID NO: 1509372 - RNA, 16 nt, Human
ugacuuacuguacaug

SEQ ID NO: 1509373 - RNA, 15 nt, Human
ugacuuacuguacau

SEQ ID NO: 1509374 - RNA, 13 nt, Human
ugacuuacuguac

SEQ ID NO: 1509375 - RNA, 23 nt, Human
agcaagacgcugugcugcccugc

SEQ ID NO: 1509376 - RNA, 17 nt, Human
agcaagacgcugugcug

SEQ ID NO: 1509377 - RNA, 20 nt, Human
agcaagacgcugugcugccc

SEQ ID NO: 1509378 - RNA, 21 nt, Human
agcaagacgcugugcugcccu

SEQ ID NO: 1509379 - RNA, 22 nt, Human
agcaagacgcugugcugcccug

SEQ ID NO: 1509380 - RNA, 20 nt, Human
ugagaagcagaggaaggaga

SEQ ID NO: 1509381 - RNA, 13 nt, Human
agcaagacgcugu

SEQ ID NO: 1509382 - RNA, 16 nt, Human
agcaagacgcugugcu

SEQ ID NO: 1509383 - RNA, 23 nt, Human
agcaacgcaggcccccaggugcc

SEQ ID NO: 1509384 - RNA, 17 nt, Human
agauuugaacucuucaa

SEQ ID NO: 1509385 - RNA, 14 nt, Human
agauuggcucacac

SEQ ID NO: 1509386 - RNA, 19 nt, Human
agauuggcucacacugaga

SEQ ID NO: 1509387 - RNA, 22 nt, Human
agauuggcucacacugagaaug

SEQ ID NO: 1509388 - RNA, 12 nt, Human
agauuuuguugg

SEQ ID NO: 1509389 - RNA, 21 nt, Human
agauuuugaaauuuuuauuaa

SEQ ID NO: 1509390 - RNA, 13 nt, Human
agauuggaaggaa

SEQ ID NO: 1509391 - RNA, 15 nt, Human
agauucccugagcag

SEQ ID NO: 1509392 - RNA, 19 nt, Human
ugacuuacuguacaugaaa

SEQ ID NO: 1509393 - RNA, 22 nt, Human
ugacuucuaaguaaaaccacag

SEQ ID NO: 1509394 - RNA, 23 nt, Human
ugacuucuaaguaaaaccacagc

SEQ ID NO: 1509395 - RNA, 22 nt, Human
agauucauauuuacuucuuaua

SEQ ID NO: 1509396 - RNA, 24 nt, Human
ugacuucuaaguaaaaccacagca

SEQ ID NO: 1509397 - RNA, 15 nt, Human
agagguuaagguggg

SEQ ID NO: 1509398 - RNA, 16 nt, Human
agagguggggagcaga

SEQ ID NO: 1509399 - RNA, 14 nt, Human
agaguauuuuugac

SEQ ID NO: 1509400 - RNA, 15 nt, Human
agaguauuuuugaca

SEQ ID NO: 1509401 - RNA, 14 nt, Human
ugaaaguacauuug

SEQ ID NO: 1509402 - RNA, 23 nt, Human
ugaaaguacauuuggagacacaa

SEQ ID NO: 1509403 - RNA, 20 nt, Human
agagggagggagggcuccag

SEQ ID NO: 1509404 - RNA, 16 nt, Human
agagggagggagggcu

SEQ ID NO: 1509405 - RNA, 14 nt, Human
ugaauauaaacacu

SEQ ID NO: 1509406 - RNA, 17 nt, Human
agaguauuuuugacaga

SEQ ID NO: 1509407 - RNA, 18 nt, Human
agaguauuuuugacagaa

SEQ ID NO: 1509408 - RNA, 15 nt, Human
ugaauacuuuauaaa

SEQ ID NO: 1509409 - RNA, 22 nt, Human
ugaaggguaauuauauaguuac

SEQ ID NO: 1509410 - RNA, 14 nt, Human
ugaagucacacagu

SEQ ID NO: 1509411 - RNA, 19 nt, Human
ugacacacagcucuguccu

SEQ ID NO: 1509412 - RNA, 20 nt, Human
ugacacacagcucuguccug

SEQ ID NO: 1509413 - RNA, 19 nt, Human
ugacaaagacugaguacgu

SEQ ID NO: 1509414 - RNA, 16 nt, Human
ugacacacagcucugu

SEQ ID NO: 1509415 - RNA, 18 nt, Human
ugacacacagcucugucc

SEQ ID NO: 1509416 - RNA, 20 nt, Human
ugacacaugcaaggucauuu

SEQ ID NO: 1509417 - RNA, 12 nt, Human
ugacacaugcaa

SEQ ID NO: 1509418 - RNA, 23 nt, Human
ugaauuucuuuugccguuauuaa

SEQ ID NO: 1509419 - RNA, 17 nt, Human
agauaaggguaucuggu

SEQ ID NO: 1509420 - RNA, 17 nt, Human
agaguuguuacauuuuu

SEQ ID NO: 1509421 - RNA, 22 nt, Human
agagucagaaguuucugccgca

SEQ ID NO: 1509422 - RNA, 15 nt, Human
agagucacuggaaca

SEQ ID NO: 1509423 - RNA, 20 nt, Human
agaguauuuuugacagaaua

SEQ ID NO: 1509424 - RNA, 20 nt, Human
agaguuguuacauuuuuaag

SEQ ID NO: 1509425 - RNA, 19 nt, Human
agaguuguuacauuuuuaa

SEQ ID NO: 1509426 - RNA, 21 nt, Human
agaguuguuacauuuuuaagu

SEQ ID NO: 1509427 - RNA, 16 nt, Human
agauacuguaucauga

SEQ ID NO: 1509428 - RNA, 15 nt, Human
agauacuguaucaug

SEQ ID NO: 1509429 - RNA, 22 nt, Human
agauauuuugcuuugugauuuu

SEQ ID NO: 1509430 - RNA, 18 nt, Human
agaucaaaagguuaauaa

SEQ ID NO: 1509431 - RNA, 21 nt, Human
agauauuuugcuuugugauuu

SEQ ID NO: 1509432 - RNA, 20 nt, Human
agauauuuugcuuugugauu

SEQ ID NO: 1509433 - RNA, 22 nt, Human
agauacaguuacucagaauucu

SEQ ID NO: 1509434 - RNA, 11 nt, Human
agauacuguau

SEQ ID NO: 1509435 - RNA, 13 nt, Human
agauacaguuacu

SEQ ID NO: 1509436 - RNA, 20 nt, Human
agauacaggaaaagcugcug

SEQ ID NO: 1509437 - RNA, 18 nt, Human
agauaauauuaaggaaga

SEQ ID NO: 1509438 - RNA, 22 nt, Human
agauaauauuaaggaagacaau

SEQ ID NO: 1509439 - RNA, 12 nt, Human
ugaaacuuuugg

SEQ ID NO: 1509440 - RNA, 13 nt, Human
ugaaagacuguac

SEQ ID NO: 1509441 - RNA, 15 nt, Human
ugaaagacuguacaa

SEQ ID NO: 1509442 - RNA, 11 nt, Human
agagacuccug

SEQ ID NO: 1509443 - RNA, 17 nt, Human
agagacuccugcaggca

SEQ ID NO: 1509444 - RNA, 18 nt, Human
agagacuccugcaggcag

SEQ ID NO: 1509445 - RNA, 19 nt, Human
agagacuccugcaggcagc

SEQ ID NO: 1509446 - RNA, 20 nt, Human
agagacuccugcaggcagcc

SEQ ID NO: 1509447 - RNA, 21 nt, Human
agagacuccugcaggcagcca

SEQ ID NO: 1509448 - RNA, 22 nt, Human
agagacuccugcaggcagccag

SEQ ID NO: 1509449 - RNA, 19 nt, Human
agagcaagacgcugugcug

SEQ ID NO: 1509450 - RNA, 23 nt, Human
agagcaagacgcugugcugcccu

SEQ ID NO: 1509451 - RNA, 22 nt, Human
agagaucaaccccuucgcuccu

SEQ ID NO: 1509452 - RNA, 23 nt, Human
agagacuccugcaggcagccagg

SEQ ID NO: 1509453 - RNA, 14 nt, Human
agagagaaaauaaa

SEQ ID NO: 1509454 - RNA, 14 nt, Human
agagcugccaccug

SEQ ID NO: 1509455 - RNA, 11 nt, Human
agagcugaggc

SEQ ID NO: 1509456 - RNA, 20 nt, Human
agagcuagcagcagggaggg

SEQ ID NO: 1509457 - RNA, 13 nt, Human
agagccuuccagg

SEQ ID NO: 1509458 - RNA, 15 nt, Human
agagccuuccagggg

SEQ ID NO: 1509459 - RNA, 17 nt, Human
agagccuuccaggggug

SEQ ID NO: 1509460 - RNA, 22 nt, Human
agagccuuccaggggugggaca

SEQ ID NO: 1509461 - RNA, 22 nt, Human
agagcaccuuagacagucccug

SEQ ID NO: 1509462 - RNA, 23 nt, Human
agagcaccuuagacagucccugc

SEQ ID NO: 1509463 - RNA, 19 nt, Human
ugaaacucguuaauuugua

SEQ ID NO: 1509464 - RNA, 22 nt, Human
ugaaacugagaugugaacacau

SEQ ID NO: 1509465 - RNA, 20 nt, Human
ugaaaaucuuauaauuuaaa

SEQ ID NO: 1509466 - RNA, 19 nt, Human
ugaaaaucgugacaacacu

SEQ ID NO: 1509467 - RNA, 17 nt, Human
ugaaaauguauguguaa

SEQ ID NO: 1509468 - RNA, 22 nt, Human
ugaaaaaguucugcagauaaac

SEQ ID NO: 1509469 - RNA, 20 nt, Human
ugaaaaaggaggaagagaaa

SEQ ID NO: 1509470 - RNA, 22 nt, Human
ugaaaaaggaggaagagaaaaa

SEQ ID NO: 1509471 - RNA, 22 nt, Human
ugaaaaagaccuuuggagcaaa

SEQ ID NO: 1509472 - RNA, 20 nt, Human
ugaaaaagcuggauuuucuu

SEQ ID NO: 1509473 - RNA, 16 nt, Human
ugaaaaaggaggaaga

SEQ ID NO: 1509474 - RNA, 22 nt, Human
ucuuuggucuacacugugcuga

SEQ ID NO: 1509475 - RNA, 20 nt, Human
ucuuucuggcuaugcauuug

SEQ ID NO: 1509476 - RNA, 21 nt, Human
ucuuucuggcuaugcauuuga

SEQ ID NO: 1509477 - RNA, 13 nt, Human
ucuugauucauaa

SEQ ID NO: 1509478 - RNA, 16 nt, Human
ucuugagccuugaacu

SEQ ID NO: 1509479 - RNA, 13 nt, Human
ucuugagccuggg

SEQ ID NO: 1509480 - RNA, 16 nt, Human
ucuugagccugggagg

SEQ ID NO: 1509481 - RNA, 16 nt, Human
agacuauucaaacagu

SEQ ID NO: 1509482 - RNA, 15 nt, Human
agacuauucaaacag

SEQ ID NO: 1509483 - RNA, 12 nt, Human
agacuauucaaa

SEQ ID NO: 1509484 - RNA, 14 nt, Human
agacuauucaaaca

SEQ ID NO: 1509485 - RNA, 21 nt, Human
agaccuucuccuucaccuuug

SEQ ID NO: 1509486 - RNA, 23 nt, Human
agaccuucuccuucaccuuuguc

SEQ ID NO: 1509487 - RNA, 11 nt, Human
agaccuucucc

SEQ ID NO: 1509488 - RNA, 15 nt, Human
agaccuucuccuuca

SEQ ID NO: 1509489 - RNA, 18 nt, Human
agaccuucuccuucaccu

SEQ ID NO: 1509490 - RNA, 17 nt, Human
ucuuggucagauuugaa

SEQ ID NO: 1509491 - RNA, 14 nt, Human
ucuugguccugcug

SEQ ID NO: 1509492 - RNA, 19 nt, Human
ucuugcaauggcagccuug

SEQ ID NO: 1509493 - RNA, 18 nt, Human
ucuugcaauggcagccuu

SEQ ID NO: 1509494 - RNA, 22 nt, Human
ucuugcaauggcagccuuggca

SEQ ID NO: 1509495 - RNA, 23 nt, Human
ucuugcaauggcagccuuggcaa

SEQ ID NO: 1509496 - RNA, 15 nt, Human
ucuuuaacucauaaa

SEQ ID NO: 1509497 - RNA, 15 nt, Human
ucuugguccugcugc

SEQ ID NO: 1509498 - RNA, 17 nt, Human
ucuugguccugcugcag

SEQ ID NO: 1509499 - RNA, 19 nt, Human
ucuugguccugcugcaguu

SEQ ID NO: 1509500 - RNA, 17 nt, Human
ucuuuccugaggcuggg

SEQ ID NO: 1509501 - RNA, 15 nt, Human
ucuuccucccucccu

SEQ ID NO: 1509502 - RNA, 14 nt, Human
ucuuccucccuccc

SEQ ID NO: 1509503 - RNA, 19 nt, Human
ucuucccuacaguugaaaa

SEQ ID NO: 1509504 - RNA, 22 nt, Human
ucuucccuacaguugaaaaaca

SEQ ID NO: 1509505 - RNA, 14 nt, Human
agaaucacuugaac

SEQ ID NO: 1509506 - RNA, 17 nt, Human
ucuucagagacuccugc

SEQ ID NO: 1509507 - RNA, 18 nt, Human
ucuucagagacuccugca

SEQ ID NO: 1509508 - RNA, 15 nt, Human
ucuucacaacagauu

SEQ ID NO: 1509509 - RNA, 12 nt, Human
ucuucagagacu

SEQ ID NO: 1509510 - RNA, 21 nt, Human
ucuuccaggcugggagagccu

SEQ ID NO: 1509511 - RNA, 20 nt, Human
ucuucagagacuccugcagg

SEQ ID NO: 1509512 - RNA, 15 nt, Human
ucuuccaggcuggga

SEQ ID NO: 1509513 - RNA, 17 nt, Human
ucuuccaggcugggaga

SEQ ID NO: 1509514 - RNA, 20 nt, Human
ucuuccaggcugggagagcc

SEQ ID NO: 1509515 - RNA, 19 nt, Human
agacauucuuccaaaaaga

SEQ ID NO: 1509516 - RNA, 19 nt, Human
agacauacuaaccagcaga

SEQ ID NO: 1509517 - RNA, 21 nt, Human
agacauagaauuaacacauga

SEQ ID NO: 1509518 - RNA, 17 nt, Human
agacaucaacagauaaa

SEQ ID NO: 1509519 - RNA, 18 nt, Human
agacaucaacagauaaau

SEQ ID NO: 1509520 - RNA, 21 nt, Human
ucuucugaacuuggcgcugcc

SEQ ID NO: 1509521 - RNA, 12 nt, Human
ucuucugcuuca

SEQ ID NO: 1509522 - RNA, 19 nt, Human
ucuucugcuucagccuccc

SEQ ID NO: 1509523 - RNA, 20 nt, Human
ucuucuguggguuucuaaag

SEQ ID NO: 1509524 - RNA, 15 nt, Human
ucuucuguacgucug

SEQ ID NO: 1509525 - RNA, 20 nt, Human
ucuucuguacgucugacagg

SEQ ID NO: 1509526 - RNA, 22 nt, Human
ucugcuuugggguuuaucagaa

SEQ ID NO: 1509527 - RNA, 23 nt, Human
ucugcuuuuuaaagaaugcucuu

SEQ ID NO: 1509528 - RNA, 17 nt, Human
ucuggcagcucagagag

SEQ ID NO: 1509529 - RNA, 20 nt, Human
ucuggcagaguugaagacag

SEQ ID NO: 1509530 - RNA, 23 nt, Human
ucuggcagaguugaagacagagc

SEQ ID NO: 1509531 - RNA, 18 nt, Human
ucuggcagcucagagagg

SEQ ID NO: 1509532 - RNA, 21 nt, Human
ucuggcagcucagagagggug

SEQ ID NO: 1509533 - RNA, 10 nt, Human
ucuggccuuc

SEQ ID NO: 1509534 - RNA, 13 nt, Human
agaaguugauaug

SEQ ID NO: 1509535 - RNA, 22 nt, Human
agaaguuugagaucagccuggg

SEQ ID NO: 1509536 - RNA, 16 nt, Human
agaaggaucuucaucu

SEQ ID NO: 1509537 - RNA, 17 nt, Human
agaauaaucaaauacau

SEQ ID NO: 1509538 - RNA, 20 nt, Human
agaaauuacuaauuuuacuu

SEQ ID NO: 1509539 - RNA, 19 nt, Human
agaaccuuuugagugccuu

SEQ ID NO: 1509540 - RNA, 23 nt, Human
agaaccuuuugagugccuuacac

SEQ ID NO: 1509541 - RNA, 17 nt, Human
agaacucccuuucaaca

SEQ ID NO: 1509542 - RNA, 16 nt, Human
agaacucccuuucaac

SEQ ID NO: 1509543 - RNA, 19 nt, Human
agaagcaccaaucaugaau

SEQ ID NO: 1509544 - RNA, 16 nt, Human
agaagcagaggaagga

SEQ ID NO: 1509545 - RNA, 14 nt, Human
agaacuuucauuuu

SEQ ID NO: 1509546 - RNA, 15 nt, Human
agaacuuucauuuuu

SEQ ID NO: 1509547 - RNA, 16 nt, Human
agaacuuucauuuuuu

SEQ ID NO: 1509548 - RNA, 18 nt, Human
agaacuuucauuuuuuuc

SEQ ID NO: 1509549 - RNA, 19 nt, Human
agaagccacaggccugaga

SEQ ID NO: 1509550 - RNA, 21 nt, Human
agaagccacaggccugagauu

SEQ ID NO: 1509551 - RNA, 20 nt, Human
ucugcccauccugccccuga

SEQ ID NO: 1509552 - RNA, 12 nt, Human
ucugcccuuggu

SEQ ID NO: 1509553 - RNA, 23 nt, Human
ucugcccuugguuaggcauugug

SEQ ID NO: 1509554 - RNA, 22 nt, Human
ucucucacuuguuuuauuuaac

SEQ ID NO: 1509555 - RNA, 12 nt, Human
ucucucaggcca

SEQ ID NO: 1509556 - RNA, 21 nt, Human
ucucucaggccaaacucaccu

SEQ ID NO: 1509557 - RNA, 16 nt, Human
acuuuguguucaccuu

SEQ ID NO: 1509558 - RNA, 18 nt, Human
acuuuguguucaccuugu

SEQ ID NO: 1509559 - RNA, 21 nt, Human
ucuccuuggugucgggcauga

SEQ ID NO: 1509560 - RNA, 23 nt, Human
ucuccuuggugucgggcaugaca

SEQ ID NO: 1509561 - RNA, 22 nt, Human
acuuguuuuauuuaaccucuaa

SEQ ID NO: 1509562 - RNA, 15 nt, Human
acuuguggacacagc

SEQ ID NO: 1509563 - RNA, 16 nt, Human
acuuuaaaaggagcca

SEQ ID NO: 1509564 - RNA, 18 nt, Human
acuugucuuuggacccug

SEQ ID NO: 1509565 - RNA, 14 nt, Human
acuuguggacacag

SEQ ID NO: 1509566 - RNA, 23 nt, Human
acuuuggaaagaguaggaagacu

SEQ ID NO: 1509567 - RNA, 15 nt, Human
acuuuggaacaagau

SEQ ID NO: 1509568 - RNA, 12 nt, Human
acuuuggaaaga

SEQ ID NO: 1509569 - RNA, 13 nt, Human
acuuuggaaagag

SEQ ID NO: 1509570 - RNA, 14 nt, Human
acuuuggaaagagu

SEQ ID NO: 1509571 - RNA, 20 nt, Human
ucugaaggguaauuauauag

SEQ ID NO: 1509572 - RNA, 18 nt, Human
ucugaaggcuggguucug

SEQ ID NO: 1509573 - RNA, 15 nt, Human
agaaaugccuuaccc

SEQ ID NO: 1509574 - RNA, 20 nt, Human
agaaagcagaacagugauua

SEQ ID NO: 1509575 - RNA, 17 nt, Human
agaaagcagaacaguga

SEQ ID NO: 1509576 - RNA, 18 nt, Human
agaaagcagaacagugau

SEQ ID NO: 1509577 - RNA, 18 nt, Human
agaaagacagagcuggga

SEQ ID NO: 1509578 - RNA, 18 nt, Human
agaaagacuauucaaaca

SEQ ID NO: 1509579 - RNA, 16 nt, Human
agaaagacuauucaaa

SEQ ID NO: 1509580 - RNA, 20 nt, Human
agaaagacuaucuaaauguu

SEQ ID NO: 1509581 - RNA, 22 nt, Human
agaaagacuaucuaaauguuga

SEQ ID NO: 1509582 - RNA, 16 nt, Human
agaaaacaaggaugaa

SEQ ID NO: 1509583 - RNA, 16 nt, Human
agaaacacaacuauau

SEQ ID NO: 1509584 - RNA, 23 nt, Human
agaaacuuaagguuaccuuuguu

SEQ ID NO: 1509585 - RNA, 15 nt, Human
agaaacauuugguaa

SEQ ID NO: 1509586 - RNA, 17 nt, Human
ucucuugguccugcugc

SEQ ID NO: 1509587 - RNA, 18 nt, Human
ucucuugguccugcugca

SEQ ID NO: 1509588 - RNA, 18 nt, Human
agaaaaaugagccuggca

SEQ ID NO: 1509589 - RNA, 17 nt, Human
agaaaaaauauuuuccu

SEQ ID NO: 1509590 - RNA, 23 nt, Human
agaaaaaauauuuuccugccagg

SEQ ID NO: 1509591 - RNA, 20 nt, Human
acuuccagauccuggaaauc

SEQ ID NO: 1509592 - RNA, 18 nt, Human
acuuccaauuuacauacu

SEQ ID NO: 1509593 - RNA, 17 nt, Human
acuuccacugccauccu

SEQ ID NO: 1509594 - RNA, 12 nt, Human
ucuaccugaggg

SEQ ID NO: 1509595 - RNA, 19 nt, Human
ucuaccugaggggccucuu

SEQ ID NO: 1509596 - RNA, 15 nt, Human
acuuacuguacauga

SEQ ID NO: 1509597 - RNA, 20 nt, Human
acuuagagguggggagcaga

SEQ ID NO: 1509598 - RNA, 14 nt, Human
acuuacuguacaug

SEQ ID NO: 1509599 - RNA, 13 nt, Human
acuuacuguacau

SEQ ID NO: 1509600 - RNA, 16 nt, Human
acuuacuguacaugaa

SEQ ID NO: 1509601 - RNA, 13 nt, Human
ucuauaauuuaaa

SEQ ID NO: 1509602 - RNA, 23 nt, Human
ucuaguuugauuaaauucuugca

SEQ ID NO: 1509603 - RNA, 17 nt, Human
ucuagcauggcauauuu

SEQ ID NO: 1509604 - RNA, 18 nt, Human
ucuagcauggcauauuuu

SEQ ID NO: 1509605 - RNA, 24 nt, Human
ucuagauacuguaucaugacaaag

SEQ ID NO: 1509606 - RNA, 17 nt, Human
acuucccagugaauucu

SEQ ID NO: 1509607 - RNA, 23 nt, Human
acuugaacccgggaggcagaggu

SEQ ID NO: 1509608 - RNA, 19 nt, Human
acuugagaauuacccuuuu

SEQ ID NO: 1509609 - RNA, 18 nt, Human
acuugacagaacacuguc

SEQ ID NO: 1509610 - RNA, 20 nt, Human
acuugacagaacacugucuu

SEQ ID NO: 1509611 - RNA, 17 nt, Human
acuugacagaacacugu

SEQ ID NO: 1509612 - RNA, 14 nt, Human
acuugucuuuggac

SEQ ID NO: 1509613 - RNA, 20 nt, Human
acuugaucauuuuuaccauu

SEQ ID NO: 1509614 - RNA, 14 nt, Human
acuuggaagcuccg

SEQ ID NO: 1509615 - RNA, 17 nt, Human
ucucaaaacugcacugu

SEQ ID NO: 1509616 - RNA, 16 nt, Human
ucuauuguuucuuuca

SEQ ID NO: 1509617 - RNA, 16 nt, Human
ucucaaaaaaagaaaa

SEQ ID NO: 1509618 - RNA, 22 nt, Human
acuucccuuucugcuuguguua

SEQ ID NO: 1509619 - RNA, 17 nt, Human
acuucgggaggucgagg

SEQ ID NO: 1509620 - RNA, 20 nt, Human
acuucgggaggucgaggcag

SEQ ID NO: 1509621 - RNA, 13 nt, Human
acuucuaaguaaa

SEQ ID NO: 1509622 - RNA, 22 nt, Human
acuucgggaggucgaggcagga

SEQ ID NO: 1509623 - RNA, 18 nt, Human
acuucuaaguaaaaccac

SEQ ID NO: 1509624 - RNA, 19 nt, Human
acuucuaaguaaaaccaca

SEQ ID NO: 1509625 - RNA, 21 nt, Human
acuucuaaguaaaaccacagc

SEQ ID NO: 1509626 - RNA, 22 nt, Human
acugaagaagcaccaaucauga

SEQ ID NO: 1509627 - RNA, 22 nt, Human
acugggcuuggggaccagagcu

SEQ ID NO: 1509628 - RNA, 21 nt, Human
acugggcuuggggaccagagc

SEQ ID NO: 1509629 - RNA, 15 nt, Human
acuggguacuugugg

SEQ ID NO: 1509630 - RNA, 16 nt, Human
ucgcugugccacaggc

SEQ ID NO: 1509631 - RNA, 23 nt, Human
ucgcugugucagcauagaaguaa

SEQ ID NO: 1509632 - RNA, 19 nt, Human
acuguacaugaaaacacau

SEQ ID NO: 1509633 - RNA, 17 nt, Human
acuggguacuuguggac

SEQ ID NO: 1509634 - RNA, 18 nt, Human
acuggguacuuguggaca

SEQ ID NO: 1509635 - RNA, 16 nt, Human
acuguacaaaguagaa

SEQ ID NO: 1509636 - RNA, 22 nt, Human
acuguacaaaguagaagucuua

SEQ ID NO: 1509637 - RNA, 14 nt, Human
acuguaucaugaca

SEQ ID NO: 1509638 - RNA, 21 nt, Human
acuguacaugaaaacacauuu

SEQ ID NO: 1509639 - RNA, 20 nt, Human
acuguacaugaaaacacauu

SEQ ID NO: 1509640 - RNA, 23 nt, Human
acugucagcuccccucggagaag

SEQ ID NO: 1509641 - RNA, 20 nt, Human
acuguaucaugacaaagacu

SEQ ID NO: 1509642 - RNA, 16 nt, Human
acuguaucaugacaaa

SEQ ID NO: 1509643 - RNA, 23 nt, Human
ucgucacugcuuaacuucacaua

SEQ ID NO: 1509644 - RNA, 13 nt, Human
acuguggguagac

SEQ ID NO: 1509645 - RNA, 17 nt, Human
acuguuaauaguucagg

SEQ ID NO: 1509646 - RNA, 21 nt, Human
acuguuaauaguucagguaac

SEQ ID NO: 1509647 - RNA, 17 nt, Human
ucuaccaaaaaucucaa

SEQ ID NO: 1509648 - RNA, 21 nt, Human
ucuacccucuuagaaaaacca

SEQ ID NO: 1509649 - RNA, 14 nt, Human
ucuacccuggcacu

SEQ ID NO: 1509650 - RNA, 21 nt, Human
ucuaagauaguaacaaugaag

SEQ ID NO: 1509651 - RNA, 17 nt, Human
ucuaaagcugccagccg

SEQ ID NO: 1509652 - RNA, 16 nt, Human
ucuaaaggcuaccuuu

SEQ ID NO: 1509653 - RNA, 13 nt, Human
ucuaaaggcuacc

SEQ ID NO: 1509654 - RNA, 14 nt, Human
uauguguaaaaugu

SEQ ID NO: 1509655 - RNA, 17 nt, Human
uauguguaaaaugugaa

SEQ ID NO: 1509656 - RNA, 15 nt, Human
acaucuugcucugcu

SEQ ID NO: 1509657 - RNA, 16 nt, Human
acaucuugcucugcug

SEQ ID NO: 1509658 - RNA, 24 nt, Human
acaucuuuucuugccucugucccc

SEQ ID NO: 1509659 - RNA, 19 nt, Human
acaucuuggucagauuuga

SEQ ID NO: 1509660 - RNA, 17 nt, Human
acaucuugcucugcuga

SEQ ID NO: 1509661 - RNA, 14 nt, Human
uauuuuaaaagaau

SEQ ID NO: 1509662 - RNA, 18 nt, Human
uauuuuaaaagaaugauu

SEQ ID NO: 1509663 - RNA, 16 nt, Human
acaugaaaacacauuu

SEQ ID NO: 1509664 - RNA, 15 nt, Human
acaugaaaacacauu

SEQ ID NO: 1509665 - RNA, 20 nt, Human
uauuuguuaaugguuugaau

SEQ ID NO: 1509666 - RNA, 22 nt, Human
uauuuguuaaugguuugaauau

SEQ ID NO: 1509667 - RNA, 19 nt, Human
uauuuuaauaauguuucaa

SEQ ID NO: 1509668 - RNA, 22 nt, Human
uauuuuaauaauguuucaaaca

SEQ ID NO: 1509669 - RNA, 13 nt, Human
uauuuuacauaaa

SEQ ID NO: 1509670 - RNA, 15 nt, Human
uauuuugcuuuguga

SEQ ID NO: 1509671 - RNA, 13 nt, Human
uauuuugcuuugu

SEQ ID NO: 1509672 - RNA, 20 nt, Human
uauuuugcuuugugauuuuu

SEQ ID NO: 1509673 - RNA, 15 nt, Human
uauuuuguucauaca

SEQ ID NO: 1509674 - RNA, 16 nt, Human
uauuuuguucauacau

SEQ ID NO: 1509675 - RNA, 17 nt, Human
uauuuuuauuuguuugu

SEQ ID NO: 1509676 - RNA, 12 nt, Human
uauuuuucacau

SEQ ID NO: 1509677 - RNA, 13 nt, Human
uauuuuucacaua

SEQ ID NO: 1509678 - RNA, 13 nt, Human
uauuuuuguagca

SEQ ID NO: 1509679 - RNA, 17 nt, Human
uauuuuuguagagccag

SEQ ID NO: 1509680 - RNA, 21 nt, Human
ucaaauacgugggcauucaaa

SEQ ID NO: 1509681 - RNA, 22 nt, Human
ucaaauacgugggcauucaaau

SEQ ID NO: 1509682 - RNA, 23 nt, Human
ucaaauacgugggcauucaaaug

SEQ ID NO: 1509683 - RNA, 23 nt, Human
acaugaaaacacauuuuucuuag

SEQ ID NO: 1509684 - RNA, 13 nt, Human
acaugagcaucag

SEQ ID NO: 1509685 - RNA, 15 nt, Human
uauuuuuguagcacu

SEQ ID NO: 1509686 - RNA, 19 nt, Human
uauuuuuguagcacugaca

SEQ ID NO: 1509687 - RNA, 16 nt, Human
ucaaaagcugggcagg

SEQ ID NO: 1509688 - RNA, 13 nt, Human
ucaaacagucuca

SEQ ID NO: 1509689 - RNA, 20 nt, Human
ucaaacagucucaggaaauc

SEQ ID NO: 1509690 - RNA, 21 nt, Human
ucaaacagucucaggaaauca

SEQ ID NO: 1509691 - RNA, 22 nt, Human
ucaaacagucucaggaaaucaa

SEQ ID NO: 1509692 - RNA, 22 nt, Human
ucaaagauauuuugcuuuguga

SEQ ID NO: 1509693 - RNA, 20 nt, Human
ucaaagauauuuugcuuugu

SEQ ID NO: 1509694 - RNA, 13 nt, Human
ucaaagauauuuu

SEQ ID NO: 1509695 - RNA, 22 nt, Human
acauggcuggagcuagaauuug

SEQ ID NO: 1509696 - RNA, 14 nt, Human
acauggccuuugcu

SEQ ID NO: 1509697 - RNA, 15 nt, Human
acauggaguauaugu

SEQ ID NO: 1509698 - RNA, 19 nt, Human
acauggaguauaugucaag

SEQ ID NO: 1509699 - RNA, 23 nt, Human
acaugagcaucaggccaggcccu

SEQ ID NO: 1509700 - RNA, 16 nt, Human
acaugagguacugaga

SEQ ID NO: 1509701 - RNA, 18 nt, Human
acauggaauaacauguaa

SEQ ID NO: 1509702 - RNA, 20 nt, Human
acauggaauaacauguaauu

SEQ ID NO: 1509703 - RNA, 19 nt, Human
acauguauaauauuuuuaa

SEQ ID NO: 1509704 - RNA, 20 nt, Human
acauguauaauauuuuuaau

SEQ ID NO: 1509705 - RNA, 14 nt, Human
acauguauaauauu

SEQ ID NO: 1509706 - RNA, 21 nt, Human
acaugucuuuucuugcaugag

SEQ ID NO: 1509707 - RNA, 16 nt, Human
acauuggaaacaaguc

SEQ ID NO: 1509708 - RNA, 21 nt, Human
acauugcggacagccacggcc

SEQ ID NO: 1509709 - RNA, 22 nt, Human
acauugcggacagccacggcca

SEQ ID NO: 1509710 - RNA, 19 nt, Human
acauuguacgaagaguauu

SEQ ID NO: 1509711 - RNA, 17 nt, Human
acauuguaaauaguauu

SEQ ID NO: 1509712 - RNA, 19 nt, Human
acauuguaaauaguauuug

SEQ ID NO: 1509713 - RNA, 21 nt, Human
acauuguaaauaguauuugag

SEQ ID NO: 1509714 - RNA, 19 nt, Human
acauuuuuaagugcugcau

SEQ ID NO: 1509715 - RNA, 18 nt, Human
acauuuuuaagugcugca

SEQ ID NO: 1509716 - RNA, 15 nt, Human
acauuuuuaagugcu

SEQ ID NO: 1509717 - RNA, 23 nt, Human
acauuuuucuuagggaaggauac

SEQ ID NO: 1509718 - RNA, 13 nt, Human
acauuuuucuuag

SEQ ID NO: 1509719 - RNA, 17 nt, Human
ucaagagggucugagga

SEQ ID NO: 1509720 - RNA, 23 nt, Human
ucaauauuucagauaaucacaau

SEQ ID NO: 1509721 - RNA, 22 nt, Human
ucaauaggaaaaacugauuuuu

SEQ ID NO: 1509722 - RNA, 17 nt, Human
ucaauauuuuccaugaa

SEQ ID NO: 1509723 - RNA, 18 nt, Human
ucaauauuuuccaugaaa

SEQ ID NO: 1509724 - RNA, 15 nt, Human
ucaauauuuuccaug

SEQ ID NO: 1509725 - RNA, 16 nt, Human
ucaauauuuuccauga

SEQ ID NO: 1509726 - RNA, 16 nt, Human
ucaagugauucuccug

SEQ ID NO: 1509727 - RNA, 17 nt, Human
ucaagugauucuccugc

SEQ ID NO: 1509728 - RNA, 18 nt, Human
ucaagugauucuccugcc

SEQ ID NO: 1509729 - RNA, 18 nt, Human
ucaauaggaaaaacugau

SEQ ID NO: 1509730 - RNA, 19 nt, Human
ucaauaggaaaaacugauu

SEQ ID NO: 1509731 - RNA, 16 nt, Human
ucacagaccuuugaac

SEQ ID NO: 1509732 - RNA, 12 nt, Human
ucaauuuaaaaa

SEQ ID NO: 1509733 - RNA, 13 nt, Human
ucaauuuaaaaaa

SEQ ID NO: 1509734 - RNA, 19 nt, Human
ucacagcuccaagaauuuc

SEQ ID NO: 1509735 - RNA, 17 nt, Human
ucacagccagacuggca

SEQ ID NO: 1509736 - RNA, 23 nt, Human
ucacagccagacuggcacaguuu

SEQ ID NO: 1509737 - RNA, 15 nt, Human
ucacagaugggugcu

SEQ ID NO: 1509738 - RNA, 14 nt, Human
ucacagaugggugc

SEQ ID NO: 1509739 - RNA, 13 nt, Human
ucacauuccugaa

SEQ ID NO: 1509740 - RNA, 17 nt, Human
ucacauuccugaacagg

SEQ ID NO: 1509741 - RNA, 20 nt, Human
ucacauuccugaacaggaua

SEQ ID NO: 1509742 - RNA, 17 nt, Human
ucaccagccccagugcc

SEQ ID NO: 1509743 - RNA, 20 nt, Human
ucacauauugauuuccguua

SEQ ID NO: 1509744 - RNA, 18 nt, Human
ucacauauugauuuccgu

SEQ ID NO: 1509745 - RNA, 16 nt, Human
ucacauauugauuucc

SEQ ID NO: 1509746 - RNA, 14 nt, Human
ucacaggaaguaga

SEQ ID NO: 1509747 - RNA, 23 nt, Human
accaaaaaucucaauauuucaga

SEQ ID NO: 1509748 - RNA, 16 nt, Human
accaaauaaaaauauu

SEQ ID NO: 1509749 - RNA, 18 nt, Human
accaaauaaaaauauugu

SEQ ID NO: 1509750 - RNA, 16 nt, Human
accaaaucagcugcua

SEQ ID NO: 1509751 - RNA, 19 nt, Human
accaaaucagcugcuacua

SEQ ID NO: 1509752 - RNA, 20 nt, Human
accaaccacugcgaccacaa

SEQ ID NO: 1509753 - RNA, 17 nt, Human
accaacauacucccauc

SEQ ID NO: 1509754 - RNA, 16 nt, Human
accaacauacucccau

SEQ ID NO: 1509755 - RNA, 14 nt, Human
accaacacgagcag

SEQ ID NO: 1509756 - RNA, 19 nt, Human
accaacacgagcaggcuac

SEQ ID NO: 1509757 - RNA, 16 nt, Human
accacaagacugcaca

SEQ ID NO: 1509758 - RNA, 17 nt, Human
accacacagaggcugcc

SEQ ID NO: 1509759 - RNA, 15 nt, Human
accacacccagccca

SEQ ID NO: 1509760 - RNA, 16 nt, Human
accacacccagcccac

SEQ ID NO: 1509761 - RNA, 20 nt, Human
accacacccagcccacuucu

SEQ ID NO: 1509762 - RNA, 21 nt, Human
accacacccagcccacuucug

SEQ ID NO: 1509763 - RNA, 23 nt, Human
accacacccagcccacuucugcc

SEQ ID NO: 1509764 - RNA, 23 nt, Human
ucacugagacagcccgggcucug

SEQ ID NO: 1509765 - RNA, 19 nt, Human
ucacauuccugaacaggau

SEQ ID NO: 1509766 - RNA, 22 nt, Human
ucaccagccccagugcccacag

SEQ ID NO: 1509767 - RNA, 21 nt, Human
ucacuauguugcccaggcagg

SEQ ID NO: 1509768 - RNA, 18 nt, Human
ucacugcaaccuccgccu

SEQ ID NO: 1509769 - RNA, 14 nt, Human
ucacuguugcccag

SEQ ID NO: 1509770 - RNA, 15 nt, Human
ucacuguugcccagg

SEQ ID NO: 1509771 - RNA, 16 nt, Human
ucacuguugcccaggc

SEQ ID NO: 1509772 - RNA, 19 nt, Human
accauucuccaccugccag

SEQ ID NO: 1509773 - RNA, 20 nt, Human
accauucuccaccugccagg

SEQ ID NO: 1509774 - RNA, 21 nt, Human
accauucuccaccugccaggg

SEQ ID NO: 1509775 - RNA, 22 nt, Human
accauuuugcugucccuuuucc

SEQ ID NO: 1509776 - RNA, 23 nt, Human
accauuuugcugucccuuuuccu

SEQ ID NO: 1509777 - RNA, 21 nt, Human
accauuuugggguacccacug

SEQ ID NO: 1509778 - RNA, 22 nt, Human
accauuuugggguacccacugc

SEQ ID NO: 1509779 - RNA, 16 nt, Human
acccaaauguucauca

SEQ ID NO: 1509780 - RNA, 20 nt, Human
acccaaauguucaucaauga

SEQ ID NO: 1509781 - RNA, 20 nt, Human
acccacugcuuuuggucugu

SEQ ID NO: 1509782 - RNA, 11 nt, Human
accccagcucu

SEQ ID NO: 1509783 - RNA, 11 nt, Human
acccaggugcu

SEQ ID NO: 1509784 - RNA, 23 nt, Human
acccaggugcuaggaacacuccu

SEQ ID NO: 1509785 - RNA, 13 nt, Human
accccagguuucu

SEQ ID NO: 1509786 - RNA, 13 nt, Human
acccaggagcccc

SEQ ID NO: 1509787 - RNA, 19 nt, Human
acccaggagccccgaggcc

SEQ ID NO: 1509788 - RNA, 15 nt, Human
acccaggagccccga

SEQ ID NO: 1509789 - RNA, 13 nt, Human
acccagcgagccc

SEQ ID NO: 1509790 - RNA, 16 nt, Human
acccagcgagcccugg

SEQ ID NO: 1509791 - RNA, 17 nt, Human
acccagcgagcccuggu

SEQ ID NO: 1509792 - RNA, 15 nt, Human
acccagcccacuucu

SEQ ID NO: 1509793 - RNA, 16 nt, Human
ucagaauucucuaguu

SEQ ID NO: 1509794 - RNA, 20 nt, Human
ucagaauucucagaaucuca

SEQ ID NO: 1509795 - RNA, 10 nt, Human
ucagaauucu

SEQ ID NO: 1509796 - RNA, 12 nt, Human
ucagaauucuca

SEQ ID NO: 1509797 - RNA, 16 nt, Human
ucagagacuccugcag

SEQ ID NO: 1509798 - RNA, 23 nt, Human
ucagagacuccugcaggcagcca

SEQ ID NO: 1509799 - RNA, 16 nt, Human
ucagaucucuaacuuc

SEQ ID NO: 1509800 - RNA, 15 nt, Human
acccgggaggcagag

SEQ ID NO: 1509801 - RNA, 21 nt, Human
acccuccuuucaccacaugug

SEQ ID NO: 1509802 - RNA, 17 nt, Human
acccucauguucuuaau

SEQ ID NO: 1509803 - RNA, 15 nt, Human
acccucauguucuua

SEQ ID NO: 1509804 - RNA, 14 nt, Human
acccucauguucuu

SEQ ID NO: 1509805 - RNA, 22 nt, Human
acccgggaagggggcugggaca

SEQ ID NO: 1509806 - RNA, 19 nt, Human
acccgggaagggggcuggg

SEQ ID NO: 1509807 - RNA, 20 nt, Human
acccgggaagggggcuggga

SEQ ID NO: 1509808 - RNA, 23 nt, Human
acccugaggcccagagggccugc

SEQ ID NO: 1509809 - RNA, 11 nt, Human
acccugaggcc

SEQ ID NO: 1509810 - RNA, 13 nt, Human
acccugaggccca

SEQ ID NO: 1509811 - RNA, 19 nt, Human
acccugaggcccagagggc

SEQ ID NO: 1509812 - RNA, 21 nt, Human
acccugaggcccagagggccu

SEQ ID NO: 1509813 - RNA, 19 nt, Human
acccgcuaagagggaggga

SEQ ID NO: 1509814 - RNA, 23 nt, Human
ucaggguuggccccugcccggcu

SEQ ID NO: 1509815 - RNA, 18 nt, Human
ucaggguuggccccugcc

SEQ ID NO: 1509816 - RNA, 19 nt, Human
ucaggguuggccccugccc

SEQ ID NO: 1509817 - RNA, 20 nt, Human
ucaggccaggcccucugccc

SEQ ID NO: 1509818 - RNA, 19 nt, Human
ucaggccaggcccucugcc

SEQ ID NO: 1509819 - RNA, 17 nt, Human
ucaggccaggcccucug

SEQ ID NO: 1509820 - RNA, 18 nt, Human
ucaggccaggcccucugc

SEQ ID NO: 1509821 - RNA, 12 nt, Human
ucaggggugugc

SEQ ID NO: 1509822 - RNA, 19 nt, Human
ucaggggugugcggccuuu

SEQ ID NO: 1509823 - RNA, 23 nt, Human
ucaggggugugcggccuuuggcu

SEQ ID NO: 1509824 - RNA, 13 nt, Human
ucaggccagcugc

SEQ ID NO: 1509825 - RNA, 14 nt, Human
ucaggccagcugcu

SEQ ID NO: 1509826 - RNA, 13 nt, Human
ucaggccaggccc

SEQ ID NO: 1509827 - RNA, 14 nt, Human
ucaggccaggcccu

SEQ ID NO: 1509828 - RNA, 15 nt, Human
ucaggccaggcccuc

SEQ ID NO: 1509829 - RNA, 16 nt, Human
ucaggccaggcccucu

SEQ ID NO: 1509830 - RNA, 12 nt, Human
acccccagccug

SEQ ID NO: 1509831 - RNA, 14 nt, Human
acccccagccugcu

SEQ ID NO: 1509832 - RNA, 13 nt, Human
acccccagccugc

SEQ ID NO: 1509833 - RNA, 17 nt, Human
ucaggcaggugggaugg

SEQ ID NO: 1509834 - RNA, 18 nt, Human
ucaggcaggugggaugga

SEQ ID NO: 1509835 - RNA, 21 nt, Human
accgaacugauguaaguaaac

SEQ ID NO: 1509836 - RNA, 22 nt, Human
ucagguggggucacucuggcag

SEQ ID NO: 1509837 - RNA, 21 nt, Human
accgaaaacguggcugcuuca

SEQ ID NO: 1509838 - RNA, 22 nt, Human
accgaaaacguggcugcuucaa

SEQ ID NO: 1509839 - RNA, 23 nt, Human
ucagguggggucacucuggcagc

SEQ ID NO: 1509840 - RNA, 15 nt, Human
ucaggugucccugca

SEQ ID NO: 1509841 - RNA, 17 nt, Human
ucaggugucccugcacu

SEQ ID NO: 1509842 - RNA, 18 nt, Human
ucaggugucccugcacuu

SEQ ID NO: 1509843 - RNA, 20 nt, Human
acccuugccgucuaccugag

SEQ ID NO: 1509844 - RNA, 17 nt, Human
acccuggaaaaugaauc

SEQ ID NO: 1509845 - RNA, 15 nt, Human
acccuugugguccca

SEQ ID NO: 1509846 - RNA, 13 nt, Human
ucaguaauaacuc

SEQ ID NO: 1509847 - RNA, 13 nt, Human
ucaguaagccgug

SEQ ID NO: 1509848 - RNA, 22 nt, Human
ucaggugucccugcacuugcag

SEQ ID NO: 1509849 - RNA, 19 nt, Human
ucaguuguuagugugucuu

SEQ ID NO: 1509850 - RNA, 14 nt, Human
ucaguggcagcugc

SEQ ID NO: 1509851 - RNA, 15 nt, Human
ucaguggcagcugcu

SEQ ID NO: 1509852 - RNA, 16 nt, Human
ucaguggcagcugcuu

SEQ ID NO: 1509853 - RNA, 19 nt, Human
ucagugccuuauggaacac

SEQ ID NO: 1509854 - RNA, 20 nt, Human
ucagugccuuauggaacacu

SEQ ID NO: 1509855 - RNA, 22 nt, Human
ucagugccuuauggaacacucu

SEQ ID NO: 1509856 - RNA, 23 nt, Human
ucagugccuuauggaacacucug

SEQ ID NO: 1509857 - RNA, 21 nt, Human
uccugaaaacccuugccaugu

SEQ ID NO: 1509858 - RNA, 22 nt, Human
uccugaaaacccuugccaugug

SEQ ID NO: 1509859 - RNA, 12 nt, Human
uccucugcugcu

SEQ ID NO: 1509860 - RNA, 13 nt, Human
acugaaacuuccc

SEQ ID NO: 1509861 - RNA, 15 nt, Human
uccugaagaauugaa

SEQ ID NO: 1509862 - RNA, 17 nt, Human
uccucuccccaugaugu

SEQ ID NO: 1509863 - RNA, 14 nt, Human
uccucccaccucag

SEQ ID NO: 1509864 - RNA, 15 nt, Human
uccucccaccucagc

SEQ ID NO: 1509865 - RNA, 16 nt, Human
uccucccaccucagcc

SEQ ID NO: 1509866 - RNA, 18 nt, Human
uccucccaccucagccuc

SEQ ID NO: 1509867 - RNA, 20 nt, Human
uccucccaccucagccuccc

SEQ ID NO: 1509868 - RNA, 21 nt, Human
uccucccaccucagccucccg

SEQ ID NO: 1509869 - RNA, 17 nt, Human
acucgcgacaaugcaaa

SEQ ID NO: 1509870 - RNA, 15 nt, Human
acucgcgacaaugca

SEQ ID NO: 1509871 - RNA, 16 nt, Human
acucgcgacaaugcaa

SEQ ID NO: 1509872 - RNA, 21 nt, Human
acucuuauugcccacgcugga

SEQ ID NO: 1509873 - RNA, 19 nt, Human
acucuggcagcucagagag

SEQ ID NO: 1509874 - RNA, 20 nt, Human
acucuggcagcucagagagg

SEQ ID NO: 1509875 - RNA, 16 nt, Human
acucuggcagcucaga

SEQ ID NO: 1509876 - RNA, 17 nt, Human
acucuggcagcucagag

SEQ ID NO: 1509877 - RNA, 14 nt, Human
acuccagaaaguga

SEQ ID NO: 1509878 - RNA, 18 nt, Human
acuccagaaagugacaag

SEQ ID NO: 1509879 - RNA, 13 nt, Human
uccguuaaaauac

SEQ ID NO: 1509880 - RNA, 15 nt, Human
uccguuaaaauacca

SEQ ID NO: 1509881 - RNA, 13 nt, Human
acucgagaacuuu

SEQ ID NO: 1509882 - RNA, 17 nt, Human
acucgagaacuuucauu

SEQ ID NO: 1509883 - RNA, 16 nt, Human
acucgaguuacagaca

SEQ ID NO: 1509884 - RNA, 12 nt, Human
uccuacucugug

SEQ ID NO: 1509885 - RNA, 21 nt, Human
uccuagccugugccucuggga

SEQ ID NO: 1509886 - RNA, 21 nt, Human
acuccaaacugacucuuaaga

SEQ ID NO: 1509887 - RNA, 18 nt, Human
acucauugaccugaggcc

SEQ ID NO: 1509888 - RNA, 22 nt, Human
acucauugaccugaggcccuuc

SEQ ID NO: 1509889 - RNA, 12 nt, Human
acucaucuuagg

SEQ ID NO: 1509890 - RNA, 16 nt, Human
acucauugaccugagg

SEQ ID NO: 1509891 - RNA, 17 nt, Human
acucauugaccugaggc

SEQ ID NO: 1509892 - RNA, 21 nt, Human
acucaccugccccucaacucu

SEQ ID NO: 1509893 - RNA, 14 nt, Human
acucaccugccccu

SEQ ID NO: 1509894 - RNA, 19 nt, Human
acucaccugccccucaacu

SEQ ID NO: 1509895 - RNA, 14 nt, Human
acucagaagacacu

SEQ ID NO: 1509896 - RNA, 15 nt, Human
acucagaagacacug

SEQ ID NO: 1509897 - RNA, 16 nt, Human
acucagaagacacuga

SEQ ID NO: 1509898 - RNA, 17 nt, Human
acucagaagacacugau

SEQ ID NO: 1509899 - RNA, 18 nt, Human
acucagaagacacugaug

SEQ ID NO: 1509900 - RNA, 22 nt, Human
acucagaauucucuaguuugau

SEQ ID NO: 1509901 - RNA, 21 nt, Human
acucagaauucucuaguuuga

SEQ ID NO: 1509902 - RNA, 14 nt, Human
acucagaauucucu

SEQ ID NO: 1509903 - RNA, 14 nt, Human
acucagaauauugc

SEQ ID NO: 1509904 - RNA, 11 nt, Human
ucccucuuucc

SEQ ID NO: 1509905 - RNA, 13 nt, Human
ucccucuuucccu

SEQ ID NO: 1509906 - RNA, 18 nt, Human
ucccucagucuggcccuu

SEQ ID NO: 1509907 - RNA, 12 nt, Human
uccccugacagg

SEQ ID NO: 1509908 - RNA, 15 nt, Human
uccccugacagggcc

SEQ ID NO: 1509909 - RNA, 20 nt, Human
ucccucagucuggcccuucc

SEQ ID NO: 1509910 - RNA, 17 nt, Human
acucaccccagccccaa

SEQ ID NO: 1509911 - RNA, 23 nt, Human
ucccugaaggccccgcccaggcu

SEQ ID NO: 1509912 - RNA, 14 nt, Human
ucccucuuucccuc

SEQ ID NO: 1509913 - RNA, 18 nt, Human
ucccugaaggccccgccc

SEQ ID NO: 1509914 - RNA, 21 nt, Human
ucccugaaggccccgcccagg

SEQ ID NO: 1509915 - RNA, 22 nt, Human
ucccugaaggccccgcccaggc

SEQ ID NO: 1509916 - RNA, 20 nt, Human
acuagaguuuagcuggaaaa

SEQ ID NO: 1509917 - RNA, 18 nt, Human
acuacggaauaguuggcu

SEQ ID NO: 1509918 - RNA, 11 nt, Human
ucccccagccc

SEQ ID NO: 1509919 - RNA, 19 nt, Human
ucccccacccccuccccgc

SEQ ID NO: 1509920 - RNA, 22 nt, Human
uccccacuugagaauuacccuu

SEQ ID NO: 1509921 - RNA, 14 nt, Human
acguacacauuuua

SEQ ID NO: 1509922 - RNA, 13 nt, Human
acguacacauuuu

SEQ ID NO: 1509923 - RNA, 12 nt, Human
acguacacauuu

SEQ ID NO: 1509924 - RNA, 13 nt, Human
acguacacacaca

SEQ ID NO: 1509925 - RNA, 12 nt, Human
acuauguaucaa

SEQ ID NO: 1509926 - RNA, 13 nt, Human
acuauucaaacag

SEQ ID NO: 1509927 - RNA, 14 nt, Human
acuauucaaacagu

SEQ ID NO: 1509928 - RNA, 16 nt, Human
acuauucaaacagucu

SEQ ID NO: 1509929 - RNA, 18 nt, Human
acuauucaaacagucuca

SEQ ID NO: 1509930 - RNA, 21 nt, Human
acuauaauguaagcucuacug

SEQ ID NO: 1509931 - RNA, 12 nt, Human
acuauaauguaa

SEQ ID NO: 1509932 - RNA, 13 nt, Human
acuauaauguaag

SEQ ID NO: 1509933 - RNA, 14 nt, Human
acuauaauguaagc

SEQ ID NO: 1509934 - RNA, 21 nt, Human
acucacauuuauucugcucac

SEQ ID NO: 1509935 - RNA, 20 nt, Human
acucacauggcuauguuuua

SEQ ID NO: 1509936 - RNA, 19 nt, Human
acucacauuuauucugcuc

SEQ ID NO: 1509937 - RNA, 20 nt, Human
acucacauuuauucugcuca

SEQ ID NO: 1509938 - RNA, 12 nt, Human
acucaauauuuu

SEQ ID NO: 1509939 - RNA, 15 nt, Human
acucaauauuuucca

SEQ ID NO: 1509940 - RNA, 18 nt, Human
acucaauauuuuccauga

SEQ ID NO: 1509941 - RNA, 21 nt, Human
acucaauauuuuccaugaaaa

SEQ ID NO: 1509942 - RNA, 22 nt, Human
acucaauauuuuccaugaaaau

SEQ ID NO: 1509943 - RNA, 14 nt, Human
acucaaugcacuga

SEQ ID NO: 1509944 - RNA, 23 nt, Human
acucaauauuuuccaugaaaaug

SEQ ID NO: 1509945 - RNA, 16 nt, Human
acucacauggcuaugu

SEQ ID NO: 1509946 - RNA, 19 nt, Human
acucacauggcuauguuuu

SEQ ID NO: 1509947 - RNA, 14 nt, Human
ucccacaaaggaga

SEQ ID NO: 1509948 - RNA, 21 nt, Human
ucccaaagugcugggauuaca

SEQ ID NO: 1509949 - RNA, 16 nt, Human
ucccaaagugcuggga

SEQ ID NO: 1509950 - RNA, 15 nt, Human
ucccaaagugcuggg

SEQ ID NO: 1509951 - RNA, 15 nt, Human
acggggcucuucuca

SEQ ID NO: 1509952 - RNA, 18 nt, Human
acggggcucuucucauuu

SEQ ID NO: 1509953 - RNA, 11 nt, Human
ucccaccccac

SEQ ID NO: 1509954 - RNA, 14 nt, Human
ucccaccccacaca

SEQ ID NO: 1509955 - RNA, 20 nt, Human
uccagugaggcucugcccuu

SEQ ID NO: 1509956 - RNA, 14 nt, Human
uccagugagacagc

SEQ ID NO: 1509957 - RNA, 18 nt, Human
uccagugaggcucugccc

SEQ ID NO: 1509958 - RNA, 19 nt, Human
uccagugaggcucugcccu

SEQ ID NO: 1509959 - RNA, 15 nt, Human
acggcucacugcagc

SEQ ID NO: 1509960 - RNA, 14 nt, Human
acggcucacugcag

SEQ ID NO: 1509961 - RNA, 15 nt, Human
uccaugaguccccug

SEQ ID NO: 1509962 - RNA, 16 nt, Human
uccaugaguccccugu

SEQ ID NO: 1509963 - RNA, 17 nt, Human
uccaugaguccccuguu

SEQ ID NO: 1509964 - RNA, 11 nt, Human
uccauccugag

SEQ ID NO: 1509965 - RNA, 12 nt, Human
uccaugaaaaug

SEQ ID NO: 1509966 - RNA, 16 nt, Human
acggccaggccagagg

SEQ ID NO: 1509967 - RNA, 21 nt, Human
acggagucccaccuuggcugc

SEQ ID NO: 1509968 - RNA, 19 nt, Human
acggagucccaccuuggcu

SEQ ID NO: 1509969 - RNA, 17 nt, Human
acgcucucuggccuucg

SEQ ID NO: 1509970 - RNA, 14 nt, Human
acgcccccacuggu

SEQ ID NO: 1509971 - RNA, 23 nt, Human
acgcgugcacacaccagagccca

SEQ ID NO: 1509972 - RNA, 15 nt, Human
acgcucucuggccuu

SEQ ID NO: 1509973 - RNA, 16 nt, Human
acgcucucuggccuuc

SEQ ID NO: 1509974 - RNA, 18 nt, Human
acgcuacccgggaagggg

SEQ ID NO: 1509975 - RNA, 13 nt, Human
acgcuacccggga

SEQ ID NO: 1509976 - RNA, 17 nt, Human
acgcuacccgggaaggg

SEQ ID NO: 1509977 - RNA, 15 nt, Human
acgacugcccggcag

SEQ ID NO: 1509978 - RNA, 18 nt, Human
acgccaggggaaaaucag

SEQ ID NO: 1509979 - RNA, 14 nt, Human
acgagggugccgug

SEQ ID NO: 1509980 - RNA, 23 nt, Human
acgccaggggaaaaucagccugc

SEQ ID NO: 1509981 - RNA, 11 nt, Human
acgccauccca

SEQ ID NO: 1509982 - RNA, 14 nt, Human
acgccaucccagcc

SEQ ID NO: 1509983 - RNA, 15 nt, Human
acgccaucccagccc

SEQ ID NO: 1509984 - RNA, 16 nt, Human
acgccaucccagcccc

SEQ ID NO: 1509985 - RNA, 17 nt, Human
acgccaucccagcccca

SEQ ID NO: 1509986 - RNA, 18 nt, Human
acgccaucccagccccaa

SEQ ID NO: 1509987 - RNA, 18 nt, Human
uccaggcugggagagccu

SEQ ID NO: 1509988 - RNA, 14 nt, Human
uccaggcugggaga

SEQ ID NO: 1509989 - RNA, 17 nt, Human
uccaggcugggagagcc

SEQ ID NO: 1509990 - RNA, 14 nt, Human
acgaauauugcuga

SEQ ID NO: 1509991 - RNA, 22 nt, Human
acgaagaguauuuuugacagaa

SEQ ID NO: 1509992 - RNA, 20 nt, Human
acgaagaguauuuuugacag

SEQ ID NO: 1509993 - RNA, 12 nt, Human
uccacccaccuc

SEQ ID NO: 1509994 - RNA, 13 nt, Human
uccacccaccuca

SEQ ID NO: 1509995 - RNA, 17 nt, Human
uccacccaccucagccu

SEQ ID NO: 1509996 - RNA, 20 nt, Human
uccacccaggagccccgagg

SEQ ID NO: 1509997 - RNA, 12 nt, Human
accuggccucug

SEQ ID NO: 1509998 - RNA, 13 nt, Human
accuggccucugc

SEQ ID NO: 1509999 - RNA, 20 nt, Human
uccaaaaagauuuucagaaa

SEQ ID NO: 1510000 - RNA, 18 nt, Human
uccaaggguacuaaggaa

SEQ ID NO: 1510001 - RNA, 21 nt, Human
accuggguaacuagggaagau

SEQ ID NO: 1510002 - RNA, 22 nt, Human
accuggggggcaguggugugga

SEQ ID NO: 1510003 - RNA, 22 nt, Human
accuucuccuucaccuuugucc

SEQ ID NO: 1510004 - RNA, 13 nt, Human
accuuugucccca

SEQ ID NO: 1510005 - RNA, 17 nt, Human
accuuuuuuauacauaa

SEQ ID NO: 1510006 - RNA, 16 nt, Human
accuuuuuuauacaua

SEQ ID NO: 1510007 - RNA, 18 nt, Human
accuuuuuuauacauaaa

SEQ ID NO: 1510008 - RNA, 14 nt, Human
accuuuguccccac

SEQ ID NO: 1510009 - RNA, 15 nt, Human
accuuuguccccacc

SEQ ID NO: 1510010 - RNA, 16 nt, Human
accuuuguccccaccg

SEQ ID NO: 1510011 - RNA, 14 nt, Human
accuuuuuuauaca

SEQ ID NO: 1510012 - RNA, 18 nt, Human
accugccaggaagccagc

SEQ ID NO: 1510013 - RNA, 19 nt, Human
accugccaggaagccagca

SEQ ID NO: 1510014 - RNA, 16 nt, Human
accugccaggaagcca

SEQ ID NO: 1510015 - RNA, 17 nt, Human
accugccaggaagccag

SEQ ID NO: 1510016 - RNA, 14 nt, Human
accugauugugucu

SEQ ID NO: 1510017 - RNA, 16 nt, Human
accugaggggccucuu

SEQ ID NO: 1510018 - RNA, 14 nt, Human
accugaggggccuc

SEQ ID NO: 1510019 - RNA, 16 nt, Human
ucauaauaaguugcau

SEQ ID NO: 1510020 - RNA, 13 nt, Human
ucauaaugacuua

SEQ ID NO: 1510021 - RNA, 12 nt, Human
ucauaaugacuu

SEQ ID NO: 1510022 - RNA, 19 nt, Human
accugaauuuuggcugugu

SEQ ID NO: 1510023 - RNA, 18 nt, Human
accugaagacucauucuu

SEQ ID NO: 1510024 - RNA, 23 nt, Human
accugaggcccuucucuccagcc

SEQ ID NO: 1510025 - RNA, 12 nt, Human
accugagcccca

SEQ ID NO: 1510026 - RNA, 17 nt, Human
accugagccccaaaagg

SEQ ID NO: 1510027 - RNA, 16 nt, Human
ucauuugucacacacu

SEQ ID NO: 1510028 - RNA, 14 nt, Human
ucauuugucacaca

SEQ ID NO: 1510029 - RNA, 19 nt, Human
ucauuuuuaguagagacag

SEQ ID NO: 1510030 - RNA, 18 nt, Human
ucauuuuuuuuaagaaaa

SEQ ID NO: 1510031 - RNA, 19 nt, Human
uccaaaaagauuuucagaa

SEQ ID NO: 1510032 - RNA, 18 nt, Human
accugcggugcuaucucc

SEQ ID NO: 1510033 - RNA, 16 nt, Human
accugcggugcuaucu

SEQ ID NO: 1510034 - RNA, 21 nt, Human
accugcgucucauacucaccu

SEQ ID NO: 1510035 - RNA, 23 nt, Human
accugccuguugggccaggagcc

SEQ ID NO: 1510036 - RNA, 20 nt, Human
accuggaauauauaaccagu

SEQ ID NO: 1510037 - RNA, 15 nt, Human
uagaaacacaacuau

SEQ ID NO: 1510038 - RNA, 16 nt, Human
uagaacucccuuucaa

SEQ ID NO: 1510039 - RNA, 17 nt, Human
uagaaacauguaauccu

SEQ ID NO: 1510040 - RNA, 17 nt, Human
uagaacucccuuucaac

SEQ ID NO: 1510041 - RNA, 18 nt, Human
uagaacucccuuucaaca

SEQ ID NO: 1510042 - RNA, 17 nt, Human
aauuccaauuauaugag

SEQ ID NO: 1510043 - RNA, 22 nt, Human
uagaauuugauaugugaacagu

SEQ ID NO: 1510044 - RNA, 20 nt, Human
uagaauuugauaugugaaca

SEQ ID NO: 1510045 - RNA, 15 nt, Human
uagaagucacacagu

SEQ ID NO: 1510046 - RNA, 13 nt, Human
uagacacacauga

SEQ ID NO: 1510047 - RNA, 18 nt, Human
uagacaauuuauuauggc

SEQ ID NO: 1510048 - RNA, 10 nt, Human
uagacagagu

SEQ ID NO: 1510049 - RNA, 21 nt, Human
uagacagagucucacuguugc

SEQ ID NO: 1510050 - RNA, 17 nt, Human
uagacagucccugccaa

SEQ ID NO: 1510051 - RNA, 21 nt, Human
uagacagucccugccaaugga

SEQ ID NO: 1510052 - RNA, 14 nt, Human
aauuugugauacaa

SEQ ID NO: 1510053 - RNA, 18 nt, Human
aauuugggggaaaauuua

SEQ ID NO: 1510054 - RNA, 16 nt, Human
aauuuggauugcuaau

SEQ ID NO: 1510055 - RNA, 18 nt, Human
aauuugugauacaaugcu

SEQ ID NO: 1510056 - RNA, 17 nt, Human
aauuugugauacaaugc

SEQ ID NO: 1510057 - RNA, 20 nt, Human
aauuugugauacaaugcugu

SEQ ID NO: 1510058 - RNA, 20 nt, Human
aauuuuacauggcuggagcu

SEQ ID NO: 1510059 - RNA, 13 nt, Human
acaaaaacacagc

SEQ ID NO: 1510060 - RNA, 16 nt, Human
acaaaaagcuacuuau

SEQ ID NO: 1510061 - RNA, 16 nt, Human
acaaaaacacagcaag

SEQ ID NO: 1510062 - RNA, 14 nt, Human
acaaaaacacagca

SEQ ID NO: 1510063 - RNA, 15 nt, Human
acaaaaacacagcaa

SEQ ID NO: 1510064 - RNA, 22 nt, Human
uagagcggagaaaggaagggcu

SEQ ID NO: 1510065 - RNA, 14 nt, Human
uagagccagggucu

SEQ ID NO: 1510066 - RNA, 14 nt, Human
uagaggguguguaa

SEQ ID NO: 1510067 - RNA, 16 nt, Human
uagcacagacccugcc

SEQ ID NO: 1510068 - RNA, 15 nt, Human
uagcacagacccugc

SEQ ID NO: 1510069 - RNA, 20 nt, Human
uagcacagacccugcccugu

SEQ ID NO: 1510070 - RNA, 21 nt, Human
uagcacagacccugcccugug

SEQ ID NO: 1510071 - RNA, 14 nt, Human
uagcacagacccug

SEQ ID NO: 1510072 - RNA, 12 nt, Human
uagccaaggcca

SEQ ID NO: 1510073 - RNA, 16 nt, Human
uagcacuuugggaggc

SEQ ID NO: 1510074 - RNA, 22 nt, Human
uagcacagacccugcccugugg

SEQ ID NO: 1510075 - RNA, 24 nt, Human
uagcacagacccugcccugugggc

SEQ ID NO: 1510076 - RNA, 14 nt, Human
uagcacugacagau

SEQ ID NO: 1510077 - RNA, 19 nt, Human
uagcacugacagauuucca

SEQ ID NO: 1510078 - RNA, 14 nt, Human
uagccaaggccaaa

SEQ ID NO: 1510079 - RNA, 13 nt, Human
uagccaaggccaa

SEQ ID NO: 1510080 - RNA, 15 nt, Human
uagcuuggaaacugg

SEQ ID NO: 1510081 - RNA, 20 nt, Human
uagcuuggaaacuggaugag

SEQ ID NO: 1510082 - RNA, 13 nt, Human
uagcuuuuuucuc

SEQ ID NO: 1510083 - RNA, 23 nt, Human
uagcuuuuuucucugauacagaa

SEQ ID NO: 1510084 - RNA, 13 nt, Human
uaggaaaaacuga

SEQ ID NO: 1510085 - RNA, 14 nt, Human
uaggaaaaacugau

SEQ ID NO: 1510086 - RNA, 17 nt, Human
uagcgcccaguugggug

SEQ ID NO: 1510087 - RNA, 21 nt, Human
uagccuuagaagucacacagu

SEQ ID NO: 1510088 - RNA, 14 nt, Human
uagcgcccaguugg

SEQ ID NO: 1510089 - RNA, 20 nt, Human
uagccuuagaagucacacag

SEQ ID NO: 1510090 - RNA, 21 nt, Human
uagggaaggauacaaaagcau

SEQ ID NO: 1510091 - RNA, 13 nt, Human
uagggaagauaau

SEQ ID NO: 1510092 - RNA, 18 nt, Human
uaggcaaccuuuauuuuu

SEQ ID NO: 1510093 - RNA, 13 nt, Human
uaggauguugaaa

SEQ ID NO: 1510094 - RNA, 16 nt, Human
uaggaaaaacugauuu

SEQ ID NO: 1510095 - RNA, 17 nt, Human
uaggaaaaacugauuuu

SEQ ID NO: 1510096 - RNA, 14 nt, Human
uagucacugagaca

SEQ ID NO: 1510097 - RNA, 15 nt, Human
uaguagagacagggu

SEQ ID NO: 1510098 - RNA, 22 nt, Human
uaguagagacaggguuuugcca

SEQ ID NO: 1510099 - RNA, 16 nt, Human
acacaguauuacuucu

SEQ ID NO: 1510100 - RNA, 16 nt, Human
acacaggcccggcucc

SEQ ID NO: 1510101 - RNA, 17 nt, Human
acacaggcccggcucca

SEQ ID NO: 1510102 - RNA, 18 nt, Human
acacaggcccggcuccag

SEQ ID NO: 1510103 - RNA, 23 nt, Human
acacaggcccggcuccaggcucc

SEQ ID NO: 1510104 - RNA, 24 nt, Human
acacaggcccggcuccaggcuccu

SEQ ID NO: 1510105 - RNA, 19 nt, Human
acacaggcccggcuccagg

SEQ ID NO: 1510106 - RNA, 20 nt, Human
acacaggcccggcuccaggc

SEQ ID NO: 1510107 - RNA, 21 nt, Human
acacaggcccggcuccaggcu

SEQ ID NO: 1510108 - RNA, 22 nt, Human
acacaggcccggcuccaggcuc

SEQ ID NO: 1510109 - RNA, 13 nt, Human
acacaacuauauu

SEQ ID NO: 1510110 - RNA, 23 nt, Human
acaaugcaaaccaucauugaaau

SEQ ID NO: 1510111 - RNA, 19 nt, Human
acaaugcaaaccaucauug

SEQ ID NO: 1510112 - RNA, 21 nt, Human
acaaugcaaaccaucauugaa

SEQ ID NO: 1510113 - RNA, 22 nt, Human
acaaugacuuacuguacaugaa

SEQ ID NO: 1510114 - RNA, 20 nt, Human
acaaugacuuacuguacaug

SEQ ID NO: 1510115 - RNA, 11 nt, Human
acaaugcaaac

SEQ ID NO: 1510116 - RNA, 16 nt, Human
acaaugcaaaccauca

SEQ ID NO: 1510117 - RNA, 17 nt, Human
acaaugcaaaccaucau

SEQ ID NO: 1510118 - RNA, 18 nt, Human
acaaugcaaaccaucauu

SEQ ID NO: 1510119 - RNA, 19 nt, Human
uaggguaagugagagaggg

SEQ ID NO: 1510120 - RNA, 17 nt, Human
uaggguuauaauaaugu

SEQ ID NO: 1510121 - RNA, 15 nt, Human
uaggguuauaauaau

SEQ ID NO: 1510122 - RNA, 19 nt, Human
uauccaacaucaacaucuu

SEQ ID NO: 1510123 - RNA, 17 nt, Human
uaucagaauucucagaa

SEQ ID NO: 1510124 - RNA, 14 nt, Human
acagaccuuugaac

SEQ ID NO: 1510125 - RNA, 22 nt, Human
uaucaaagggugaaaauuauuu

SEQ ID NO: 1510126 - RNA, 18 nt, Human
uaucaaagggugaaaauu

SEQ ID NO: 1510127 - RNA, 19 nt, Human
uaucaaagggugaaaauua

SEQ ID NO: 1510128 - RNA, 14 nt, Human
uaucacaaaucuua

SEQ ID NO: 1510129 - RNA, 16 nt, Human
uaucacaaaucuuaac

SEQ ID NO: 1510130 - RNA, 20 nt, Human
uaucacaaaucuuaacuuga

SEQ ID NO: 1510131 - RNA, 22 nt, Human
uaucacccagaagaaaauagug

SEQ ID NO: 1510132 - RNA, 19 nt, Human
uaucacccagaagaaaaua

SEQ ID NO: 1510133 - RNA, 13 nt, Human
acagaaauguaca

SEQ ID NO: 1510134 - RNA, 19 nt, Human
acagacauacuaaccagca

SEQ ID NO: 1510135 - RNA, 18 nt, Human
acagacauacuaaccagc

SEQ ID NO: 1510136 - RNA, 18 nt, Human
acacuuacacuuuaugca

SEQ ID NO: 1510137 - RNA, 21 nt, Human
acacuuacacuuuaugcacaa

SEQ ID NO: 1510138 - RNA, 18 nt, Human
acacuguuucaaacuuua

SEQ ID NO: 1510139 - RNA, 17 nt, Human
acacuguuucaaacuuu

SEQ ID NO: 1510140 - RNA, 17 nt, Human
acacucauugaccugag

SEQ ID NO: 1510141 - RNA, 19 nt, Human
acacucauugaccugaggc

SEQ ID NO: 1510142 - RNA, 23 nt, Human
acacuguuucaaacuuuacuaug

SEQ ID NO: 1510143 - RNA, 20 nt, Human
acacuguuucaaacuuuacu

SEQ ID NO: 1510144 - RNA, 16 nt, Human
acacuuacacuuuaug

SEQ ID NO: 1510145 - RNA, 19 nt, Human
uauauauuuuuuucugaaa

SEQ ID NO: 1510146 - RNA, 14 nt, Human
uauauauuuuaauu

SEQ ID NO: 1510147 - RNA, 20 nt, Human
uauauccuuucuaacaaaaa

SEQ ID NO: 1510148 - RNA, 21 nt, Human
uauaucuauauuuuacauaaa

SEQ ID NO: 1510149 - RNA, 16 nt, Human
acacucaguuguucaa

SEQ ID NO: 1510150 - RNA, 16 nt, Human
acacucauugaccuga

SEQ ID NO: 1510151 - RNA, 16 nt, Human
uauaggugcuacaaaa

SEQ ID NO: 1510152 - RNA, 20 nt, Human
uauaggugcuacaaaaacac

SEQ ID NO: 1510153 - RNA, 23 nt, Human
uauaggaacuuaaauaaugugaa

SEQ ID NO: 1510154 - RNA, 12 nt, Human
uauaggaauuga

SEQ ID NO: 1510155 - RNA, 18 nt, Human
uauagccuaggugacaga

SEQ ID NO: 1510156 - RNA, 15 nt, Human
uauaacucauuuguu

SEQ ID NO: 1510157 - RNA, 18 nt, Human
acacucaaaucaagaaac

SEQ ID NO: 1510158 - RNA, 17 nt, Human
acacucaaaucaagaaa

SEQ ID NO: 1510159 - RNA, 17 nt, Human
uagucacugagacagcc

SEQ ID NO: 1510160 - RNA, 20 nt, Human
uagucacugagacagcccgg

SEQ ID NO: 1510161 - RNA, 15 nt, Human
acacuaaugaggaaa

SEQ ID NO: 1510162 - RNA, 22 nt, Human
acacuaaugaggaaacugcacu

SEQ ID NO: 1510163 - RNA, 21 nt, Human
acacucaaaagcugggcaggu

SEQ ID NO: 1510164 - RNA, 13 nt, Human
acacucaaaucaa

SEQ ID NO: 1510165 - RNA, 15 nt, Human
uauacaggucauauu

SEQ ID NO: 1510166 - RNA, 16 nt, Human
uauacaggucauauua

SEQ ID NO: 1510167 - RNA, 21 nt, Human
uauacaggucauauuaauaua

SEQ ID NO: 1510168 - RNA, 18 nt, Human
uauaauuuaccugaaguc

SEQ ID NO: 1510169 - RNA, 21 nt, Human
uauaauuuaccugaagucuuu

SEQ ID NO: 1510170 - RNA, 22 nt, Human
uauacacuuacacuuuaugcac

SEQ ID NO: 1510171 - RNA, 15 nt, Human
uaugccccauucaac

SEQ ID NO: 1510172 - RNA, 14 nt, Human
uaugcucugcaugu

SEQ ID NO: 1510173 - RNA, 14 nt, Human
uaugaucacggcuc

SEQ ID NO: 1510174 - RNA, 22 nt, Human
uaugcaugaaguaauaugcaca

SEQ ID NO: 1510175 - RNA, 22 nt, Human
uauggcccuggccuagcauacg

SEQ ID NO: 1510176 - RNA, 21 nt, Human
uauggcccuggccuagcauac

SEQ ID NO: 1510177 - RNA, 20 nt, Human
uauggcccuggccuagcaua

SEQ ID NO: 1510178 - RNA, 16 nt, Human
uauggcagugucuuuc

SEQ ID NO: 1510179 - RNA, 13 nt, Human
uauggcagugucu

SEQ ID NO: 1510180 - RNA, 16 nt, Human
uaugggacucaaugca

SEQ ID NO: 1510181 - RNA, 23 nt, Human
uaugggacucaaugcacugacau

SEQ ID NO: 1510182 - RNA, 10 nt, Human
uaugggagag

SEQ ID NO: 1510183 - RNA, 15 nt, Human
uaucuauauuuuaca

SEQ ID NO: 1510184 - RNA, 16 nt, Human
acagcaagucaggguu

SEQ ID NO: 1510185 - RNA, 12 nt, Human
acagcaagucag

SEQ ID NO: 1510186 - RNA, 15 nt, Human
acagcccgggcucug

SEQ ID NO: 1510187 - RNA, 16 nt, Human
acagcccgggcucugc

SEQ ID NO: 1510188 - RNA, 19 nt, Human
acagcccuucuuuccacag

SEQ ID NO: 1510189 - RNA, 23 nt, Human
uaugaggcauuuguuugaacuga

SEQ ID NO: 1510190 - RNA, 21 nt, Human
uaugaggcauuuguuugaacu

SEQ ID NO: 1510191 - RNA, 15 nt, Human
uaugaggcauuuguu

SEQ ID NO: 1510192 - RNA, 14 nt, Human
uaugaggcauuugu

SEQ ID NO: 1510193 - RNA, 14 nt, Human
acagcuguaugauu

SEQ ID NO: 1510194 - RNA, 19 nt, Human
acagcuguaugauucccag

SEQ ID NO: 1510195 - RNA, 20 nt, Human
acagcuguaugauucccagc

SEQ ID NO: 1510196 - RNA, 23 nt, Human
acagcuguaugauucccagccag

SEQ ID NO: 1510197 - RNA, 15 nt, Human
acagcuaaugggaca

SEQ ID NO: 1510198 - RNA, 16 nt, Human
acagcuaaugggacac

SEQ ID NO: 1510199 - RNA, 17 nt, Human
acagcuaaugggacacu

SEQ ID NO: 1510200 - RNA, 19 nt, Human
acagcuaaugggacacuaa

SEQ ID NO: 1510201 - RNA, 22 nt, Human
acagcuugaccgugaggccaga

SEQ ID NO: 1510202 - RNA, 23 nt, Human
acagcuugaccgugaggccagag

SEQ ID NO: 1510203 - RNA, 19 nt, Human
acaggaaaagcugcugaca

SEQ ID NO: 1510204 - RNA, 20 nt, Human
acaggaaaagcugcugacag

SEQ ID NO: 1510205 - RNA, 21 nt, Human
acaggaaaagcugcugacagu

SEQ ID NO: 1510206 - RNA, 17 nt, Human
acagcuugaccgugagg

SEQ ID NO: 1510207 - RNA, 20 nt, Human
acagcuugaccgugaggcca

SEQ ID NO: 1510208 - RNA, 21 nt, Human
acagcuugaccgugaggccag

SEQ ID NO: 1510209 - RNA, 17 nt, Human
acagcuucauuuccugu

SEQ ID NO: 1510210 - RNA, 19 nt, Human
acagcuucauuuccugugu

SEQ ID NO: 1510211 - RNA, 21 nt, Human
acagcuucauuuccugugucu

SEQ ID NO: 1510212 - RNA, 22 nt, Human
acaggaaccacaagacugcaca

SEQ ID NO: 1510213 - RNA, 20 nt, Human
acaggaaaauuuuaaaaaua

SEQ ID NO: 1510214 - RNA, 15 nt, Human
acaggcagauacagg

SEQ ID NO: 1510215 - RNA, 13 nt, Human
acaggcaggucca

SEQ ID NO: 1510216 - RNA, 16 nt, Human
acaggcccggcuccag

SEQ ID NO: 1510217 - RNA, 17 nt, Human
acaggcccggcuccagg

SEQ ID NO: 1510218 - RNA, 15 nt, Human
acaggccugagauuu

SEQ ID NO: 1510219 - RNA, 17 nt, Human
acaggccugagauuuca

SEQ ID NO: 1510220 - RNA, 21 nt, Human
acaggccugagauuucaucug

SEQ ID NO: 1510221 - RNA, 18 nt, Human
acaggcccggcuccaggc

SEQ ID NO: 1510222 - RNA, 20 nt, Human
acaggcccggcuccaggcuc

SEQ ID NO: 1510223 - RNA, 21 nt, Human
acaggcccggcuccaggcucc

SEQ ID NO: 1510224 - RNA, 22 nt, Human
acaggcccggcuccaggcuccu

SEQ ID NO: 1510225 - RNA, 18 nt, Human
uaauuuuuauauuugaaa

SEQ ID NO: 1510226 - RNA, 16 nt, Human
uaauuuauacagguca

SEQ ID NO: 1510227 - RNA, 19 nt, Human
uaauuuuuauauuugaaau

SEQ ID NO: 1510228 - RNA, 21 nt, Human
uaauuuuuauauuugaaauau

SEQ ID NO: 1510229 - RNA, 22 nt, Human
uaauuccguagguuauuuucag

SEQ ID NO: 1510230 - RNA, 14 nt, Human
aaugcaaaccauca

SEQ ID NO: 1510231 - RNA, 12 nt, Human
aaugcaaaccau

SEQ ID NO: 1510232 - RNA, 16 nt, Human
aaugauuucauucaau

SEQ ID NO: 1510233 - RNA, 11 nt, Human
aaugcaaacca

SEQ ID NO: 1510234 - RNA, 13 nt, Human
aaugcaccuggaa

SEQ ID NO: 1510235 - RNA, 22 nt, Human
aaugagagacacacugaagaag

SEQ ID NO: 1510236 - RNA, 11 nt, Human
aaugagccugg

SEQ ID NO: 1510237 - RNA, 21 nt, Human
aaugaccuuucaauaggaaaa

SEQ ID NO: 1510238 - RNA, 20 nt, Human
aaugacucagaauauugcuu

SEQ ID NO: 1510239 - RNA, 16 nt, Human
aaugaggucagagccu

SEQ ID NO: 1510240 - RNA, 18 nt, Human
aaugaggucagagccugc

SEQ ID NO: 1510241 - RNA, 14 nt, Human
aaugagccuggcaa

SEQ ID NO: 1510242 - RNA, 12 nt, Human
aaugagccuggc

SEQ ID NO: 1510243 - RNA, 13 nt, Human
aaugagccuggca

SEQ ID NO: 1510244 - RNA, 13 nt, Human
uacagacaaagcg

SEQ ID NO: 1510245 - RNA, 14 nt, Human
uacagacaaagcgu

SEQ ID NO: 1510246 - RNA, 15 nt, Human
uacagacaaagcgug

SEQ ID NO: 1510247 - RNA, 19 nt, Human
uacagacaaagcguggugg

SEQ ID NO: 1510248 - RNA, 17 nt, Human
uacagagacagaaagca

SEQ ID NO: 1510249 - RNA, 23 nt, Human
uacagagcagacaguuaagagaa

SEQ ID NO: 1510250 - RNA, 19 nt, Human
uacagagcccacgccccca

SEQ ID NO: 1510251 - RNA, 22 nt, Human
uacagagcccacgcccccacug

SEQ ID NO: 1510252 - RNA, 18 nt, Human
aauggaagacagcucuua

SEQ ID NO: 1510253 - RNA, 16 nt, Human
aauggaagacagcucu

SEQ ID NO: 1510254 - RNA, 14 nt, Human
aaugguuuucaaaa

SEQ ID NO: 1510255 - RNA, 18 nt, Human
aaugguuugcaaggaagc

SEQ ID NO: 1510256 - RNA, 19 nt, Human
aaugguuugcaaggaagcc

SEQ ID NO: 1510257 - RNA, 20 nt, Human
aauguaagggaaacugccag

SEQ ID NO: 1510258 - RNA, 16 nt, Human
aaugguuuucaaaaua

SEQ ID NO: 1510259 - RNA, 16 nt, Human
aaugguuuucuugugu

SEQ ID NO: 1510260 - RNA, 22 nt, Human
aaugcuguauuuuaaaagaaug

SEQ ID NO: 1510261 - RNA, 13 nt, Human
aauggaagacagc

SEQ ID NO: 1510262 - RNA, 20 nt, Human
aaugcuguauuuuaaaagaa

SEQ ID NO: 1510263 - RNA, 21 nt, Human
aaugcuguauuuuaaaagaau

SEQ ID NO: 1510264 - RNA, 22 nt, Human
aaugcuggcuguuggcuggggg

SEQ ID NO: 1510265 - RNA, 18 nt, Human
uaauuuuuuugagacaga

SEQ ID NO: 1510266 - RNA, 21 nt, Human
uacaaaaaaaaaaaaaaauua

SEQ ID NO: 1510267 - RNA, 16 nt, Human
uacaaugcugugcccu

SEQ ID NO: 1510268 - RNA, 14 nt, Human
uacaaugcugugcc

SEQ ID NO: 1510269 - RNA, 13 nt, Human
uacaaugcugugc

SEQ ID NO: 1510270 - RNA, 23 nt, Human
uacccgggaagggggcugggaca

SEQ ID NO: 1510271 - RNA, 23 nt, Human
uaccucuugagccuugaacuuug

SEQ ID NO: 1510272 - RNA, 22 nt, Human
uaccucuugagccuugaacuuu

SEQ ID NO: 1510273 - RNA, 15 nt, Human
uacccucauguucuu

SEQ ID NO: 1510274 - RNA, 13 nt, Human
uaccugaagucuu

SEQ ID NO: 1510275 - RNA, 14 nt, Human
uaccugaagucuuu

SEQ ID NO: 1510276 - RNA, 16 nt, Human
uaccugaagucuuugu

SEQ ID NO: 1510277 - RNA, 13 nt, Human
uaccugaggggcc

SEQ ID NO: 1510278 - RNA, 15 nt, Human
uaccugaggggccuc

SEQ ID NO: 1510279 - RNA, 13 nt, Human
aauuacauuugua

SEQ ID NO: 1510280 - RNA, 14 nt, Human
aauuacauuuguau

SEQ ID NO: 1510281 - RNA, 17 nt, Human
aauuacaggaaguacug

SEQ ID NO: 1510282 - RNA, 19 nt, Human
aauuacaggaaguacugga

SEQ ID NO: 1510283 - RNA, 20 nt, Human
aauuacaggaaguacuggag

SEQ ID NO: 1510284 - RNA, 16 nt, Human
uaccugccaggaagcc

SEQ ID NO: 1510285 - RNA, 16 nt, Human
uaccugaggggccucu

SEQ ID NO: 1510286 - RNA, 20 nt, Human
aauuacuuacguauguuugu

SEQ ID NO: 1510287 - RNA, 21 nt, Human
aauuauuuauuaaaugcccag

SEQ ID NO: 1510288 - RNA, 12 nt, Human
aauucaagaaaa

SEQ ID NO: 1510289 - RNA, 20 nt, Human
aauucaagaaaacaacuuca

SEQ ID NO: 1510290 - RNA, 22 nt, Human
aauuauuuauuaaaugcccagc

SEQ ID NO: 1510291 - RNA, 11 nt, Human
aauucaguugu

SEQ ID NO: 1510292 - RNA, 21 nt, Human
aauucagaaggaucuucaucu

SEQ ID NO: 1510293 - RNA, 17 nt, Human
aauucaguuguuagugu

SEQ ID NO: 1510294 - RNA, 22 nt, Human
aauucaguuguuagugugucuu

SEQ ID NO: 1510295 - RNA, 13 nt, Human
aauguucaucaau

SEQ ID NO: 1510296 - RNA, 21 nt, Human
aaugugcugaaugguuuucaa

SEQ ID NO: 1510297 - RNA, 23 nt, Human
uacagagcccacgcccccacugg

SEQ ID NO: 1510298 - RNA, 16 nt, Human
aauguucaucaaugaa

SEQ ID NO: 1510299 - RNA, 20 nt, Human
aauguucaucaaugaaugaa

SEQ ID NO: 1510300 - RNA, 21 nt, Human
aauguucucucuucuccaccu

SEQ ID NO: 1510301 - RNA, 16 nt, Human
aauuaacuuuuauaaa

SEQ ID NO: 1510302 - RNA, 15 nt, Human
aauuaacuuuuauaa

SEQ ID NO: 1510303 - RNA, 16 nt, Human
aauuaaguacuaugua

SEQ ID NO: 1510304 - RNA, 17 nt, Human
aauuaaguacuauguau

SEQ ID NO: 1510305 - RNA, 13 nt, Human
aauuaacuuuuau

SEQ ID NO: 1510306 - RNA, 12 nt, Human
aauuaacuuuua

SEQ ID NO: 1510307 - RNA, 12 nt, Human
uacauucuguua

SEQ ID NO: 1510308 - RNA, 22 nt, Human
aauuaaguuagggaauggcaca

SEQ ID NO: 1510309 - RNA, 18 nt, Human
uaccagccaguaaauggg

SEQ ID NO: 1510310 - RNA, 22 nt, Human
uaccagcagagcaccuuagaca

SEQ ID NO: 1510311 - RNA, 13 nt, Human
uaccagcagagca

SEQ ID NO: 1510312 - RNA, 14 nt, Human
uaccagcagagcac

SEQ ID NO: 1510313 - RNA, 12 nt, Human
uaccagcagagc

SEQ ID NO: 1510314 - RNA, 19 nt, Human
uaccagggacugaggggag

SEQ ID NO: 1510315 - RNA, 18 nt, Human
uaccauuauuuuuaggau

SEQ ID NO: 1510316 - RNA, 23 nt, Human
uaagacaaaaagcuacuuauugu

SEQ ID NO: 1510317 - RNA, 18 nt, Human
uaagaagugaaaaucuac

SEQ ID NO: 1510318 - RNA, 13 nt, Human
uaagaagugaaaa

SEQ ID NO: 1510319 - RNA, 21 nt, Human
uaacuuccuuggacucauuuu

SEQ ID NO: 1510320 - RNA, 16 nt, Human
uaacuugucuuuggac

SEQ ID NO: 1510321 - RNA, 20 nt, Human
uaacuugucuuuggacccug

SEQ ID NO: 1510322 - RNA, 14 nt, Human
uaacuaaaagguau

SEQ ID NO: 1510323 - RNA, 15 nt, Human
uaacuagcuuggaaa

SEQ ID NO: 1510324 - RNA, 13 nt, Human
uaacuucacauau

SEQ ID NO: 1510325 - RNA, 19 nt, Human
uaacauguaauuaaguacu

SEQ ID NO: 1510326 - RNA, 14 nt, Human
aauauauuuaauga

SEQ ID NO: 1510327 - RNA, 21 nt, Human
aauaguucagguaacaggcag

SEQ ID NO: 1510328 - RNA, 23 nt, Human
aauaccacaggaaccacaagacu

SEQ ID NO: 1510329 - RNA, 12 nt, Human
aauaccaaggaa

SEQ ID NO: 1510330 - RNA, 19 nt, Human
aauaccagccaguaaaugg

SEQ ID NO: 1510331 - RNA, 18 nt, Human
aauaccaugccauuuaaa

SEQ ID NO: 1510332 - RNA, 17 nt, Human
aauaccagccaguaaau

SEQ ID NO: 1510333 - RNA, 23 nt, Human
aauacaucccuuaccugggaaag

SEQ ID NO: 1510334 - RNA, 20 nt, Human
aauagagcaaaauugaugug

SEQ ID NO: 1510335 - RNA, 22 nt, Human
aauagagcaaaauugauguguu

SEQ ID NO: 1510336 - RNA, 21 nt, Human
aauaccugucccccugacaac

SEQ ID NO: 1510337 - RNA, 19 nt, Human
aauaccugucccccugaca

SEQ ID NO: 1510338 - RNA, 15 nt, Human
aauaccugucccccu

SEQ ID NO: 1510339 - RNA, 18 nt, Human
aauaccugucccccugac

SEQ ID NO: 1510340 - RNA, 13 nt, Human
uaacaaugcugua

SEQ ID NO: 1510341 - RNA, 21 nt, Human
aauacaccagguagaacacaa

SEQ ID NO: 1510342 - RNA, 13 nt, Human
aauacagaggcaa

SEQ ID NO: 1510343 - RNA, 17 nt, Human
uaacaaugaagauaaaa

SEQ ID NO: 1510344 - RNA, 22 nt, Human
uaaauuaacuuuuauaaacuuu

SEQ ID NO: 1510345 - RNA, 21 nt, Human
uaaauuaacuuuuauaaacuu

SEQ ID NO: 1510346 - RNA, 20 nt, Human
uaaauuaacuuuuauaaacu

SEQ ID NO: 1510347 - RNA, 19 nt, Human
uaaauuaacuuuuauaaac

SEQ ID NO: 1510348 - RNA, 18 nt, Human
uaaaugaaaaucgugaca

SEQ ID NO: 1510349 - RNA, 21 nt, Human
aaguguauuuuuuuacuaaua

SEQ ID NO: 1510350 - RNA, 18 nt, Human
aaguguauuuuuuuacua

SEQ ID NO: 1510351 - RNA, 13 nt, Human
aaucucaaauaac

SEQ ID NO: 1510352 - RNA, 12 nt, Human
aaucuaaaugga

SEQ ID NO: 1510353 - RNA, 17 nt, Human
aaucagugugucuaaau

SEQ ID NO: 1510354 - RNA, 18 nt, Human
aaucagugugucuaaauu

SEQ ID NO: 1510355 - RNA, 22 nt, Human
aaucagugugucuaaauuugaa

SEQ ID NO: 1510356 - RNA, 17 nt, Human
aaucccauuuaaaaaaa

SEQ ID NO: 1510357 - RNA, 16 nt, Human
uaaguaauucaagaaa

SEQ ID NO: 1510358 - RNA, 20 nt, Human
uaaguaaugauaacuggaaa

SEQ ID NO: 1510359 - RNA, 16 nt, Human
uaaguaaaaccacagc

SEQ ID NO: 1510360 - RNA, 17 nt, Human
uaaguaaaaccacagca

SEQ ID NO: 1510361 - RNA, 18 nt, Human
uaaguaaaaccacagcag

SEQ ID NO: 1510362 - RNA, 19 nt, Human
uaaguaaaaccacagcagu

SEQ ID NO: 1510363 - RNA, 18 nt, Human
uaaggaugcuuguacaua

SEQ ID NO: 1510364 - RNA, 13 nt, Human
uaaguaaaaccac

SEQ ID NO: 1510365 - RNA, 15 nt, Human
uaaguaaaaccacag

SEQ ID NO: 1510366 - RNA, 17 nt, Human
uaaggaauaccuguccc

SEQ ID NO: 1510367 - RNA, 18 nt, Human
uaaggaauaccugucccc

SEQ ID NO: 1510368 - RNA, 13 nt, Human
uaaggaagacaau

SEQ ID NO: 1510369 - RNA, 9 nt, Human
uaaggaaua

SEQ ID NO: 1510370 - RNA, 21 nt, Human
uaagcuauucaguaauaacuc

SEQ ID NO: 1510371 - RNA, 14 nt, Human
aaucagugugucua

SEQ ID NO: 1510372 - RNA, 15 nt, Human
uaagcaaaaugugau

SEQ ID NO: 1510373 - RNA, 21 nt, Human
uaagcaaaaugugauauguac

SEQ ID NO: 1510374 - RNA, 14 nt, Human
uaagcaaaauguga

SEQ ID NO: 1510375 - RNA, 14 nt, Human
uaagauucauauuu

SEQ ID NO: 1510376 - RNA, 15 nt, Human
aauauuuauuuuaau

SEQ ID NO: 1510377 - RNA, 16 nt, Human
aaucagccuaguugau

SEQ ID NO: 1510378 - RNA, 11 nt, Human
aaucagccugc

SEQ ID NO: 1510379 - RNA, 19 nt, Human
aaucagccugcuccagcug

SEQ ID NO: 1510380 - RNA, 13 nt, Human
aaucagccugcuc

SEQ ID NO: 1510381 - RNA, 18 nt, Human
aaucagccugcuccagcu

SEQ ID NO: 1510382 - RNA, 14 nt, Human
aagguacuucaaau

SEQ ID NO: 1510383 - RNA, 20 nt, Human
aagguagaaauaucugaaaa

SEQ ID NO: 1510384 - RNA, 15 nt, Human
aagggugaaaauuau

SEQ ID NO: 1510385 - RNA, 19 nt, Human
aagggugaugggaaagcau

SEQ ID NO: 1510386 - RNA, 16 nt, Human
aagggugaaaauuauu

SEQ ID NO: 1510387 - RNA, 22 nt, Human
aaggggcccaaauucuuucagu

SEQ ID NO: 1510388 - RNA, 18 nt, Human
aagguauuuaauagguuu

SEQ ID NO: 1510389 - RNA, 12 nt, Human
aaggucauuuuu

SEQ ID NO: 1510390 - RNA, 19 nt, Human
guuucuauguguagggcgg

SEQ ID NO: 1510391 - RNA, 21 nt, Human
guuucugaaaauuaacacugc

SEQ ID NO: 1510392 - RNA, 20 nt, Human
guuucugaaaauuaacacug

SEQ ID NO: 1510393 - RNA, 18 nt, Human
guuucugaaagggacgcu

SEQ ID NO: 1510394 - RNA, 22 nt, Human
aaggcucgagcaugccuggaug

SEQ ID NO: 1510395 - RNA, 19 nt, Human
aaggcucgagcaugccugg

SEQ ID NO: 1510396 - RNA, 20 nt, Human
aaggcucgagcaugccugga

SEQ ID NO: 1510397 - RNA, 19 nt, Human
aaggcuccaggagcagcca

SEQ ID NO: 1510398 - RNA, 22 nt, Human
aaggcuccaggagcagccacau

SEQ ID NO: 1510399 - RNA, 16 nt, Human
aaggcucgagcaugcc

SEQ ID NO: 1510400 - RNA, 18 nt, Human
aaggcucgagcaugccug

SEQ ID NO: 1510401 - RNA, 13 nt, Human
guuucaaacuuua

SEQ ID NO: 1510402 - RNA, 16 nt, Human
guuucaaacuuuacua

SEQ ID NO: 1510403 - RNA, 14 nt, Human
guuucaaacuuuac

SEQ ID NO: 1510404 - RNA, 17 nt, Human
guuucaaacuuuacuau

SEQ ID NO: 1510405 - RNA, 12 nt, Human
guuucaaacuuu

SEQ ID NO: 1510406 - RNA, 15 nt, Human
aaggcuccaggagca

SEQ ID NO: 1510407 - RNA, 16 nt, Human
aaggcuccaggagcag

SEQ ID NO: 1510408 - RNA, 18 nt, Human
aaggcuccaggagcagcc

SEQ ID NO: 1510409 - RNA, 13 nt, Human
guuuauugucaaa

SEQ ID NO: 1510410 - RNA, 15 nt, Human
guugggcugguguca

SEQ ID NO: 1510411 - RNA, 13 nt, Human
guugggcuggugu

SEQ ID NO: 1510412 - RNA, 15 nt, Human
guugggccaggagcc

SEQ ID NO: 1510413 - RNA, 17 nt, Human
guugggccaggagccuc

SEQ ID NO: 1510414 - RNA, 15 nt, Human
aaggaaagagggagg

SEQ ID NO: 1510415 - RNA, 17 nt, Human
aaggaauaccugucccc

SEQ ID NO: 1510416 - RNA, 22 nt, Human
aaggaagccacagcugguggua

SEQ ID NO: 1510417 - RNA, 16 nt, Human
aaggaagcacaugccu

SEQ ID NO: 1510418 - RNA, 14 nt, Human
aaggaagacuucau

SEQ ID NO: 1510419 - RNA, 15 nt, Human
aaggaagacuucauc

SEQ ID NO: 1510420 - RNA, 13 nt, Human
aaggaagcacaug

SEQ ID NO: 1510421 - RNA, 20 nt, Human
aaggaggggauagagagaga

SEQ ID NO: 1510422 - RNA, 18 nt, Human
aaggaggaagagaaaaaa

SEQ ID NO: 1510423 - RNA, 11 nt, Human
aaggagagcua

SEQ ID NO: 1510424 - RNA, 18 nt, Human
aaggaauaccuguccccc

SEQ ID NO: 1510425 - RNA, 14 nt, Human
aaggagauuuacaa

SEQ ID NO: 1510426 - RNA, 17 nt, Human
aaggagauuuacaacug

SEQ ID NO: 1510427 - RNA, 21 nt, Human
aaggauacaaaagcaugugag

SEQ ID NO: 1510428 - RNA, 13 nt, Human
aaggauacaaaag

SEQ ID NO: 1510429 - RNA, 16 nt, Human
aaggccaaaggaagca

SEQ ID NO: 1510430 - RNA, 14 nt, Human
guugcccaggcugg

SEQ ID NO: 1510431 - RNA, 23 nt, Human
guugcccaggcaggucuugaacu

SEQ ID NO: 1510432 - RNA, 12 nt, Human
guugcccaggcu

SEQ ID NO: 1510433 - RNA, 13 nt, Human
guugcccaggcug

SEQ ID NO: 1510434 - RNA, 12 nt, Human
uaaaagaaugau

SEQ ID NO: 1510435 - RNA, 23 nt, Human
uaaaagaauauuuuaacuuccuu

SEQ ID NO: 1510436 - RNA, 20 nt, Human
uaaaacuugauguguuaucu

SEQ ID NO: 1510437 - RNA, 22 nt, Human
uaaaacuugauguguuaucucu

SEQ ID NO: 1510438 - RNA, 21 nt, Human
uaaaaaucucaaauuucuaaa

SEQ ID NO: 1510439 - RNA, 20 nt, Human
uaaaaaucucaaauuucuaa

SEQ ID NO: 1510440 - RNA, 19 nt, Human
uaaaaaucucaaauuucua

SEQ ID NO: 1510441 - RNA, 17 nt, Human
uaaaaaucucaaauuuc

SEQ ID NO: 1510442 - RNA, 16 nt, Human
uaaaaaucucaaauuu

SEQ ID NO: 1510443 - RNA, 15 nt, Human
uaaaaaucucaaauu

SEQ ID NO: 1510444 - RNA, 15 nt, Human
uaaaaaguggaaaaa

SEQ ID NO: 1510445 - RNA, 15 nt, Human
guuuuucuucucccu

SEQ ID NO: 1510446 - RNA, 20 nt, Human
uaaaagacagugaaagaaaa

SEQ ID NO: 1510447 - RNA, 20 nt, Human
uaaaauaauuuuuauauuug

SEQ ID NO: 1510448 - RNA, 22 nt, Human
uaaaauaccagccaguaaaugg

SEQ ID NO: 1510449 - RNA, 16 nt, Human
aagugaggaugaaaaa

SEQ ID NO: 1510450 - RNA, 20 nt, Human
aagugauucuccugccucag

SEQ ID NO: 1510451 - RNA, 19 nt, Human
aagugauucuccugccuca

SEQ ID NO: 1510452 - RNA, 15 nt, Human
aagugauucuccugc

SEQ ID NO: 1510453 - RNA, 16 nt, Human
aagugauucuccugcc

SEQ ID NO: 1510454 - RNA, 17 nt, Human
aagugauucuccugccu

SEQ ID NO: 1510455 - RNA, 18 nt, Human
aagugauucuccugccuc

SEQ ID NO: 1510456 - RNA, 13 nt, Human
aaguauuagaaua

SEQ ID NO: 1510457 - RNA, 20 nt, Human
aaguacacuguuucaaacuu

SEQ ID NO: 1510458 - RNA, 19 nt, Human
aaguacacuguuucaaacu

SEQ ID NO: 1510459 - RNA, 23 nt, Human
aaguacacuguuucaaacuuuac

SEQ ID NO: 1510460 - RNA, 14 nt, Human
aaguaaugauaacu

SEQ ID NO: 1510461 - RNA, 19 nt, Human
aaguaaugauaacuggaaa

SEQ ID NO: 1510462 - RNA, 18 nt, Human
aaguacacuguuucaaac

SEQ ID NO: 1510463 - RNA, 13 nt, Human
aaguacacuguuu

SEQ ID NO: 1510464 - RNA, 14 nt, Human
guuucugccgcagc

SEQ ID NO: 1510465 - RNA, 18 nt, Human
guuucugccgcagcccug

SEQ ID NO: 1510466 - RNA, 15 nt, Human
guuucugccgcagcc

SEQ ID NO: 1510467 - RNA, 16 nt, Human
guuuugccauguuggc

SEQ ID NO: 1510468 - RNA, 20 nt, Human
guuuugccauguuggccagg

SEQ ID NO: 1510469 - RNA, 21 nt, Human
guuuugccauguuggccaggc

SEQ ID NO: 1510470 - RNA, 22 nt, Human
guuuugccauguuggccaggcu

SEQ ID NO: 1510471 - RNA, 16 nt, Human
aagucuuucacauuua

SEQ ID NO: 1510472 - RNA, 15 nt, Human
aagugagagcugggu

SEQ ID NO: 1510473 - RNA, 12 nt, Human
aagugagagagg

SEQ ID NO: 1510474 - RNA, 14 nt, Human
aagugagagcuggg

SEQ ID NO: 1510475 - RNA, 19 nt, Human
aagugaagacaaugacuua

SEQ ID NO: 1510476 - RNA, 17 nt, Human
aagugaagacaaugacu

SEQ ID NO: 1510477 - RNA, 21 nt, Human
aagugaaaaaggaggaagaga

SEQ ID NO: 1510478 - RNA, 16 nt, Human
aagcauuuagauguau

SEQ ID NO: 1510479 - RNA, 18 nt, Human
aagcauuguaaaugugcu

SEQ ID NO: 1510480 - RNA, 13 nt, Human
aagcauuguaaau

SEQ ID NO: 1510481 - RNA, 14 nt, Human
aagcagugcaugcu

SEQ ID NO: 1510482 - RNA, 15 nt, Human
aagcagugcaugcug

SEQ ID NO: 1510483 - RNA, 20 nt, Human
aagcagugcaugcugucccu

SEQ ID NO: 1510484 - RNA, 12 nt, Human
aagcagugcaug

SEQ ID NO: 1510485 - RNA, 21 nt, Human
gugugugcgccuacaggagug

SEQ ID NO: 1510486 - RNA, 19 nt, Human
aagcccaggaaaggcucca

SEQ ID NO: 1510487 - RNA, 22 nt, Human
aagcccaggaaaggcuccagga

SEQ ID NO: 1510488 - RNA, 15 nt, Human
aagcccaggggccgg

SEQ ID NO: 1510489 - RNA, 22 nt, Human
aagccaaagcuaggccuggcca

SEQ ID NO: 1510490 - RNA, 14 nt, Human
aagcccaggaaagg

SEQ ID NO: 1510491 - RNA, 17 nt, Human
aagcccaggaaaggcuc

SEQ ID NO: 1510492 - RNA, 19 nt, Human
aagcccugagcuuucugcu

SEQ ID NO: 1510493 - RNA, 20 nt, Human
aagccgcuggggccaguugg

SEQ ID NO: 1510494 - RNA, 19 nt, Human
guuaggcauugugggaagg

SEQ ID NO: 1510495 - RNA, 20 nt, Human
guuaggcauugugggaaggg

SEQ ID NO: 1510496 - RNA, 18 nt, Human
guuaagagaaaugagcuu

SEQ ID NO: 1510497 - RNA, 11 nt, Human
guuaagagaaa

SEQ ID NO: 1510498 - RNA, 12 nt, Human
guuaagagaaau

SEQ ID NO: 1510499 - RNA, 13 nt, Human
guuagggaauggc

SEQ ID NO: 1510500 - RNA, 18 nt, Human
guuauugauaaguucaua

SEQ ID NO: 1510501 - RNA, 23 nt, Human
guuauuuuuauuuauuuaaauuu

SEQ ID NO: 1510502 - RNA, 18 nt, Human
guucaagcgauucuucug

SEQ ID NO: 1510503 - RNA, 22 nt, Human
guucaaagauauuuugcuuugu

SEQ ID NO: 1510504 - RNA, 21 nt, Human
guucaaagauauuuugcuuug

SEQ ID NO: 1510505 - RNA, 20 nt, Human
guucaaagauauuuugcuuu

SEQ ID NO: 1510506 - RNA, 13 nt, Human
aagcuccagguag

SEQ ID NO: 1510507 - RNA, 14 nt, Human
aagcuccagguaga

SEQ ID NO: 1510508 - RNA, 17 nt, Human
aagcuccaagcucccag

SEQ ID NO: 1510509 - RNA, 18 nt, Human
aagcuccaagcucccagg

SEQ ID NO: 1510510 - RNA, 20 nt, Human
aagcucagggccuggcucag

SEQ ID NO: 1510511 - RNA, 18 nt, Human
aagcucagggccuggcuc

SEQ ID NO: 1510512 - RNA, 19 nt, Human
aagcucagggccuggcuca

SEQ ID NO: 1510513 - RNA, 20 nt, Human
aagcucacagaccuuugaac

SEQ ID NO: 1510514 - RNA, 12 nt, Human
aagcucagggcc

SEQ ID NO: 1510515 - RNA, 13 nt, Human
aagcucagggccu

SEQ ID NO: 1510516 - RNA, 16 nt, Human
aagcucagggccuggc

SEQ ID NO: 1510517 - RNA, 17 nt, Human
aagcucagggccuggcu

SEQ ID NO: 1510518 - RNA, 12 nt, Human
aagcuaggccug

SEQ ID NO: 1510519 - RNA, 16 nt, Human
aagcuaggccuggcca

SEQ ID NO: 1510520 - RNA, 17 nt, Human
aagccugcaauuucaua

SEQ ID NO: 1510521 - RNA, 22 nt, Human
aagccugcaauuucauaugcug

SEQ ID NO: 1510522 - RNA, 20 nt, Human
aagccugaguuugcuuucaa

SEQ ID NO: 1510523 - RNA, 15 nt, Human
guucagcuccagcuc

SEQ ID NO: 1510524 - RNA, 13 nt, Human
guucagcuccagc

SEQ ID NO: 1510525 - RNA, 23 nt, Human
aagaggaaugaaguacucauaca

SEQ ID NO: 1510526 - RNA, 21 nt, Human
guggccucccaacucacccca

SEQ ID NO: 1510527 - RNA, 22 nt, Human
guggccucccaacucaccccag

SEQ ID NO: 1510528 - RNA, 22 nt, Human
guggggccaugccuccucagga

SEQ ID NO: 1510529 - RNA, 22 nt, Human
gugggacacccugugauggggc

SEQ ID NO: 1510530 - RNA, 21 nt, Human
guggggccaugccuccucagg

SEQ ID NO: 1510531 - RNA, 23 nt, Human
gugggaggaucucuugagccugg

SEQ ID NO: 1510532 - RNA, 15 nt, Human
gugggagcugccugu

SEQ ID NO: 1510533 - RNA, 18 nt, Human
gugggagcugccuguuca

SEQ ID NO: 1510534 - RNA, 15 nt, Human
guggggucacucugg

SEQ ID NO: 1510535 - RNA, 22 nt, Human
guggcgcagcauauucaggaag

SEQ ID NO: 1510536 - RNA, 17 nt, Human
guggccuuccccagcau

SEQ ID NO: 1510537 - RNA, 18 nt, Human
guggccuuccccagcaug

SEQ ID NO: 1510538 - RNA, 21 nt, Human
guggccuuccccagcaugcac

SEQ ID NO: 1510539 - RNA, 19 nt, Human
guggccuuccccagcaugc

SEQ ID NO: 1510540 - RNA, 13 nt, Human
gugggacacccug

SEQ ID NO: 1510541 - RNA, 14 nt, Human
gugggagcugccug

SEQ ID NO: 1510542 - RNA, 15 nt, Human
gugggacacccugug

SEQ ID NO: 1510543 - RNA, 16 nt, Human
aagacugcacaucaaa

SEQ ID NO: 1510544 - RNA, 17 nt, Human
aagacugcauuauauuu

SEQ ID NO: 1510545 - RNA, 23 nt, Human
aagacugaguacguugugcauuu

SEQ ID NO: 1510546 - RNA, 20 nt, Human
aagacgcugugcugcccugc

SEQ ID NO: 1510547 - RNA, 16 nt, Human
aagacuuuggaaagac

SEQ ID NO: 1510548 - RNA, 15 nt, Human
aagaccuucuccuuc

SEQ ID NO: 1510549 - RNA, 18 nt, Human
aagaccuucuccuucacc

SEQ ID NO: 1510550 - RNA, 19 nt, Human
aagaccuucuccuucaccu

SEQ ID NO: 1510551 - RNA, 11 nt, Human
gugccuuaugg

SEQ ID NO: 1510552 - RNA, 13 nt, Human
aagacgcugugcu

SEQ ID NO: 1510553 - RNA, 23 nt, Human
aagaccuugcuuaugauugcaga

SEQ ID NO: 1510554 - RNA, 21 nt, Human
aagaccuuuggagcaaagcug

SEQ ID NO: 1510555 - RNA, 15 nt, Human
aagacgcugugcugc

SEQ ID NO: 1510556 - RNA, 17 nt, Human
aagacgcugugcugccc

SEQ ID NO: 1510557 - RNA, 18 nt, Human
aagacgcugugcugcccu

SEQ ID NO: 1510558 - RNA, 19 nt, Human
aagacgcugugcugcccug

SEQ ID NO: 1510559 - RNA, 13 nt, Human
aagaugaaaauau

SEQ ID NO: 1510560 - RNA, 14 nt, Human
aagaugaaaauauu

SEQ ID NO: 1510561 - RNA, 13 nt, Human
aagaguaggaaga

SEQ ID NO: 1510562 - RNA, 14 nt, Human
aagaguaggaagac

SEQ ID NO: 1510563 - RNA, 19 nt, Human
aagaugcuucucacugcca

SEQ ID NO: 1510564 - RNA, 17 nt, Human
aagaugcuucucacugc

SEQ ID NO: 1510565 - RNA, 16 nt, Human
aagaugcuucucacug

SEQ ID NO: 1510566 - RNA, 12 nt, Human
aagaguaggaag

SEQ ID NO: 1510567 - RNA, 22 nt, Human
aagagggucugaggaauccaga

SEQ ID NO: 1510568 - RNA, 23 nt, Human
aagagggagggagggcuccagac

SEQ ID NO: 1510569 - RNA, 17 nt, Human
guggggucacucuggca

SEQ ID NO: 1510570 - RNA, 20 nt, Human
guggggucacucuggcagcu

SEQ ID NO: 1510571 - RNA, 21 nt, Human
guggggucacucuggcagcuc

SEQ ID NO: 1510572 - RNA, 22 nt, Human
guggggucacucuggcagcuca

SEQ ID NO: 1510573 - RNA, 16 nt, Human
gugucagcauagaagu

SEQ ID NO: 1510574 - RNA, 23 nt, Human
guguauuuuuuuacuaauagaca

SEQ ID NO: 1510575 - RNA, 17 nt, Human
guguauuuuuuuacuaa

SEQ ID NO: 1510576 - RNA, 20 nt, Human
gugucaagagggucugagga

SEQ ID NO: 1510577 - RNA, 19 nt, Human
aagauguagaggagaaacu

SEQ ID NO: 1510578 - RNA, 14 nt, Human
guguauuucauuua

SEQ ID NO: 1510579 - RNA, 13 nt, Human
aagauguagagga

SEQ ID NO: 1510580 - RNA, 22 nt, Human
gugugacaaggauugcuacugu

SEQ ID NO: 1510581 - RNA, 21 nt, Human
gugugaccacugcagaagaca

SEQ ID NO: 1510582 - RNA, 16 nt, Human
gugugguagagugugc

SEQ ID NO: 1510583 - RNA, 23 nt, Human
guguggggccaugccuccucagg

SEQ ID NO: 1510584 - RNA, 11 nt, Human
aaauuguguua

SEQ ID NO: 1510585 - RNA, 22 nt, Human
guauuuuguuuuugucuuaaaa

SEQ ID NO: 1510586 - RNA, 16 nt, Human
guauuuuugacagaau

SEQ ID NO: 1510587 - RNA, 12 nt, Human
guauuuuugaca

SEQ ID NO: 1510588 - RNA, 15 nt, Human
guauuuuugacagaa

SEQ ID NO: 1510589 - RNA, 18 nt, Human
gucaaaguggugagaggc

SEQ ID NO: 1510590 - RNA, 18 nt, Human
guauguacuucaugcugu

SEQ ID NO: 1510591 - RNA, 15 nt, Human
aaauguauuacagug

SEQ ID NO: 1510592 - RNA, 19 nt, Human
aaaugucuaguuguaacac

SEQ ID NO: 1510593 - RNA, 24 nt, Human
aaaugucuaguuguaacaccauga

SEQ ID NO: 1510594 - RNA, 15 nt, Human
guauaaaauaauuuu

SEQ ID NO: 1510595 - RNA, 21 nt, Human
guauaaaauaauuuuuauauu

SEQ ID NO: 1510596 - RNA, 12 nt, Human
guauaauauuuu

SEQ ID NO: 1510597 - RNA, 15 nt, Human
guauaauauuuuuaa

SEQ ID NO: 1510598 - RNA, 16 nt, Human
guaucaggugcugcca

SEQ ID NO: 1510599 - RNA, 18 nt, Human
guaucaggugcugccauc

SEQ ID NO: 1510600 - RNA, 16 nt, Human
guauauuuuauaucaa

SEQ ID NO: 1510601 - RNA, 19 nt, Human
guaucccaugagccucagc

SEQ ID NO: 1510602 - RNA, 22 nt, Human
guaucaggugcugccauccagg

SEQ ID NO: 1510603 - RNA, 21 nt, Human
guaucccaugagccucagcau

SEQ ID NO: 1510604 - RNA, 15 nt, Human
guaugguggcugggu

SEQ ID NO: 1510605 - RNA, 16 nt, Human
guaugguggcuggguu

SEQ ID NO: 1510606 - RNA, 14 nt, Human
guaugguggcuggg

SEQ ID NO: 1510607 - RNA, 20 nt, Human
guaguguuggagaagaacug

SEQ ID NO: 1510608 - RNA, 16 nt, Human
aaauguaagggaaacu

SEQ ID NO: 1510609 - RNA, 22 nt, Human
guaacaggaaaauuuuaaaaau

SEQ ID NO: 1510610 - RNA, 12 nt, Human
guaacaggcaga

SEQ ID NO: 1510611 - RNA, 18 nt, Human
aaauuuguuauaaugaau

SEQ ID NO: 1510612 - RNA, 22 nt, Human
gucacacaguauuacuucugcu

SEQ ID NO: 1510613 - RNA, 20 nt, Human
aaauuuuuucucuaggaaau

SEQ ID NO: 1510614 - RNA, 23 nt, Human
aaauuuugauguuuuaaggaugc

SEQ ID NO: 1510615 - RNA, 18 nt, Human
aaauuuugauguuuuaag

SEQ ID NO: 1510616 - RNA, 19 nt, Human
aacaagaugguucuagcau

SEQ ID NO: 1510617 - RNA, 16 nt, Human
aacaaggcaaggcugu

SEQ ID NO: 1510618 - RNA, 17 nt, Human
aacaaugcuguauuuua

SEQ ID NO: 1510619 - RNA, 22 nt, Human
aacaaugcuguauuuuaaaaga

SEQ ID NO: 1510620 - RNA, 15 nt, Human
aacacaacuauauug

SEQ ID NO: 1510621 - RNA, 16 nt, Human
aacacaacuauauugu

SEQ ID NO: 1510622 - RNA, 12 nt, Human
aacaauaaaaga

SEQ ID NO: 1510623 - RNA, 15 nt, Human
aacaaugcuguauuu

SEQ ID NO: 1510624 - RNA, 18 nt, Human
aacaaggcaaggcuguca

SEQ ID NO: 1510625 - RNA, 21 nt, Human
aacaaggcaaggcugucaauu

SEQ ID NO: 1510626 - RNA, 23 nt, Human
aacaaggcaaggcugucaauuac

SEQ ID NO: 1510627 - RNA, 13 nt, Human
guccauagagagc

SEQ ID NO: 1510628 - RNA, 14 nt, Human
guccauagagagca

SEQ ID NO: 1510629 - RNA, 21 nt, Human
gucccaccccacacacgccag

SEQ ID NO: 1510630 - RNA, 14 nt, Human
gucccaccuuggcu

SEQ ID NO: 1510631 - RNA, 15 nt, Human
gucccaccuuggcug

SEQ ID NO: 1510632 - RNA, 16 nt, Human
gucccaccuuggcugc

SEQ ID NO: 1510633 - RNA, 17 nt, Human
aacacaacuauauuguu

SEQ ID NO: 1510634 - RNA, 15 nt, Human
aacacagcaagggug

SEQ ID NO: 1510635 - RNA, 18 nt, Human
aacacagcaagggugaug

SEQ ID NO: 1510636 - RNA, 21 nt, Human
gucauuuuuuuuaagaaaaag

SEQ ID NO: 1510637 - RNA, 19 nt, Human
gucauuuuuuuuaagaaaa

SEQ ID NO: 1510638 - RNA, 13 nt, Human
guccaagaagccc

SEQ ID NO: 1510639 - RNA, 15 nt, Human
guccaagaagcccag

SEQ ID NO: 1510640 - RNA, 16 nt, Human
guccaagaagcccagg

SEQ ID NO: 1510641 - RNA, 20 nt, Human
guccaagaagcccaggaaag

SEQ ID NO: 1510642 - RNA, 17 nt, Human
guccaagaagcccagga

SEQ ID NO: 1510643 - RNA, 18 nt, Human
guccaagaagcccaggaa

SEQ ID NO: 1510644 - RNA, 15 nt, Human
aacagugauuaccag

SEQ ID NO: 1510645 - RNA, 22 nt, Human
aacagugauuaccagggacuga

SEQ ID NO: 1510646 - RNA, 13 nt, Human
guccuacucugug

SEQ ID NO: 1510647 - RNA, 13 nt, Human
aacagauaaucag

SEQ ID NO: 1510648 - RNA, 15 nt, Human
aacagaaauguacag

SEQ ID NO: 1510649 - RNA, 14 nt, Human
aacagaaauguaca

SEQ ID NO: 1510650 - RNA, 13 nt, Human
aacagaaauguac

SEQ ID NO: 1510651 - RNA, 12 nt, Human
aacagaaaugua

SEQ ID NO: 1510652 - RNA, 16 nt, Human
guccuacccacccucc

SEQ ID NO: 1510653 - RNA, 12 nt, Human
guccuacucugu

SEQ ID NO: 1510654 - RNA, 14 nt, Human
gucccccuuccaug

SEQ ID NO: 1510655 - RNA, 16 nt, Human
gucccccuuccaugga

SEQ ID NO: 1510656 - RNA, 18 nt, Human
gucccccuuccauggacu

SEQ ID NO: 1510657 - RNA, 20 nt, Human
aaccugagccccaaaaggua

SEQ ID NO: 1510658 - RNA, 14 nt, Human
gucuggcccuuccu

SEQ ID NO: 1510659 - RNA, 16 nt, Human
gucuuucacauuuaaa

SEQ ID NO: 1510660 - RNA, 16 nt, Human
gucuuuuuucacuaca

SEQ ID NO: 1510661 - RNA, 21 nt, Human
aacuagaguuuagcuggaaaa

SEQ ID NO: 1510662 - RNA, 18 nt, Human
aaccuugaaaacuuuaug

SEQ ID NO: 1510663 - RNA, 12 nt, Human
aaccugugucuc

SEQ ID NO: 1510664 - RNA, 17 nt, Human
aacucuccucugcugcu

SEQ ID NO: 1510665 - RNA, 16 nt, Human
aacucuccucugcugc

SEQ ID NO: 1510666 - RNA, 15 nt, Human
aacucuccuccagag

SEQ ID NO: 1510667 - RNA, 18 nt, Human
aacucuccuccagaguca

SEQ ID NO: 1510668 - RNA, 22 nt, Human
gugaaccaccacacccagccca

SEQ ID NO: 1510669 - RNA, 23 nt, Human
gugaaccaccacacccagcccac

SEQ ID NO: 1510670 - RNA, 19 nt, Human
aaccaccacacccagccca

SEQ ID NO: 1510671 - RNA, 15 nt, Human
aaccaagucaaguga

SEQ ID NO: 1510672 - RNA, 17 nt, Human
aaccaucauugaaaucu

SEQ ID NO: 1510673 - RNA, 18 nt, Human
aaccaucauugaaaucuu

SEQ ID NO: 1510674 - RNA, 12 nt, Human
aaccaucauuga

SEQ ID NO: 1510675 - RNA, 21 nt, Human
aaccaccacacccagcccacu

SEQ ID NO: 1510676 - RNA, 18 nt, Human
aacccaaguccaagcaua

SEQ ID NO: 1510677 - RNA, 23 nt, Human
aaccauuuugcugucccuuuucc

SEQ ID NO: 1510678 - RNA, 22 nt, Human
aacccaaauuacguguacuaca

SEQ ID NO: 1510679 - RNA, 23 nt, Human
aacccaaauguucaucaaugaau

SEQ ID NO: 1510680 - RNA, 16 nt, Human
aacccgggaggcagag

SEQ ID NO: 1510681 - RNA, 12 nt, Human
aaccucuaaauu

SEQ ID NO: 1510682 - RNA, 24 nt, Human
aaccucuaaauucuuucauuuuag

SEQ ID NO: 1510683 - RNA, 18 nt, Human
aaccugagccccaaaagg

SEQ ID NO: 1510684 - RNA, 10 nt, Human
aacccagcuc

SEQ ID NO: 1510685 - RNA, 11 nt, Human
aaccccccagc

SEQ ID NO: 1510686 - RNA, 14 nt, Human
aaccccccagcacu

SEQ ID NO: 1510687 - RNA, 18 nt, Human
aaccccccagcacugagg

SEQ ID NO: 1510688 - RNA, 19 nt, Human
aaccccccagcacugagga

SEQ ID NO: 1510689 - RNA, 12 nt, Human
aacugaaaucau

SEQ ID NO: 1510690 - RNA, 13 nt, Human
aacugaaaucaua

SEQ ID NO: 1510691 - RNA, 21 nt, Human
aacucuucaaucucuugcacu

SEQ ID NO: 1510692 - RNA, 22 nt, Human
gugagucgaggacagggaggug

SEQ ID NO: 1510693 - RNA, 24 nt, Human
gugaggguccugcagccugcagga

SEQ ID NO: 1510694 - RNA, 23 nt, Human
gugaggguccugcagccugcagg

SEQ ID NO: 1510695 - RNA, 21 nt, Human
gugagaugcuagaacucccuu

SEQ ID NO: 1510696 - RNA, 17 nt, Human
gugaacuugggccacug

SEQ ID NO: 1510697 - RNA, 19 nt, Human
gugaacuugggccacugug

SEQ ID NO: 1510698 - RNA, 14 nt, Human
gugaggguccugca

SEQ ID NO: 1510699 - RNA, 15 nt, Human
gugaggguccugcag

SEQ ID NO: 1510700 - RNA, 15 nt, Human
gugagcaauccugca

SEQ ID NO: 1510701 - RNA, 17 nt, Human
gugaggccagagacaca

SEQ ID NO: 1510702 - RNA, 22 nt, Human
gugaggccagagacacaagccu

SEQ ID NO: 1510703 - RNA, 17 nt, Human
aacugggacaggggaga

SEQ ID NO: 1510704 - RNA, 22 nt, Human
aacugggggagggugaagugaa

SEQ ID NO: 1510705 - RNA, 21 nt, Human
aacugggggagggugaaguga

SEQ ID NO: 1510706 - RNA, 16 nt, Human
aacuggguacuugugg

SEQ ID NO: 1510707 - RNA, 21 nt, Human
aacuggguacuuguggacaca

SEQ ID NO: 1510708 - RNA, 11 nt, Human
aacuggcugca

SEQ ID NO: 1510709 - RNA, 16 nt, Human
aacuggauuaaacuua

SEQ ID NO: 1510710 - RNA, 15 nt, Human
aacuggauuaaacuu

SEQ ID NO: 1510711 - RNA, 19 nt, Human
aacuggacugguucaaaug

SEQ ID NO: 1510712 - RNA, 15 nt, Human
aacugcugacuguuu

SEQ ID NO: 1510713 - RNA, 19 nt, Human
aacugcacugucaagauga

SEQ ID NO: 1510714 - RNA, 23 nt, Human
aacugcugacuguuuucucuuga

SEQ ID NO: 1510715 - RNA, 20 nt, Human
aacugcugacuguuuucucu

SEQ ID NO: 1510716 - RNA, 21 nt, Human
aacugcugacuguuuucucuu

SEQ ID NO: 1510717 - RNA, 18 nt, Human
aacuuccagauccuggaa

SEQ ID NO: 1510718 - RNA, 18 nt, Human
aacuucccagugaauucu

SEQ ID NO: 1510719 - RNA, 22 nt, Human
aacuuccuuggacucauuuuaa

SEQ ID NO: 1510720 - RNA, 13 nt, Human
aacuuccaauuua

SEQ ID NO: 1510721 - RNA, 13 nt, Human
aacugguauuuua

SEQ ID NO: 1510722 - RNA, 22 nt, Human
aacugguauuuuaucuuugauu

SEQ ID NO: 1510723 - RNA, 14 nt, Human
gugaugagaggaaa

SEQ ID NO: 1510724 - RNA, 16 nt, Human
gugaugagaggaaauc

SEQ ID NO: 1510725 - RNA, 17 nt, Human
gugaugggaaagcauug

SEQ ID NO: 1510726 - RNA, 22 nt, Human
gugaugcgcaugucacggaggg

SEQ ID NO: 1510727 - RNA, 22 nt, Human
gugaugcuaaagguuguauugc

SEQ ID NO: 1510728 - RNA, 14 nt, Human
gugauggggcccug

SEQ ID NO: 1510729 - RNA, 16 nt, Human
gugauggggcccugcc

SEQ ID NO: 1510730 - RNA, 17 nt, Human
gugauggggcccugccu

SEQ ID NO: 1510731 - RNA, 18 nt, Human
gugauggggcccugccuc

SEQ ID NO: 1510732 - RNA, 19 nt, Human
gugauggggcccugccucc

SEQ ID NO: 1510733 - RNA, 21 nt, Human
gugcacacaccagagcccacc

SEQ ID NO: 1510734 - RNA, 23 nt, Human
gugcauuaucuagauacuguauc

SEQ ID NO: 1510735 - RNA, 18 nt, Human
gugccaccccgagggcug

SEQ ID NO: 1510736 - RNA, 19 nt, Human
gugcauuaucuagauacug

SEQ ID NO: 1510737 - RNA, 15 nt, Human
gugcauuaucuagau

SEQ ID NO: 1510738 - RNA, 19 nt, Human
gugcauguguguucaugca

SEQ ID NO: 1510739 - RNA, 22 nt, Human
accaucugaaagugguacuuga

SEQ ID NO: 1510740 - RNA, 16 nt, Human
accaucccugaaggcc

SEQ ID NO: 1510741 - RNA, 23 nt, Human
accaucauugaaaucuuuuugcu

SEQ ID NO: 1510742 - RNA, 15 nt, Human
accaucauugaaauc

SEQ ID NO: 1510743 - RNA, 15 nt, Human
accaucaagccacca

SEQ ID NO: 1510744 - RNA, 14 nt, Human
accaucaagccacc

SEQ ID NO: 1510745 - RNA, 17 nt, Human
acccacccccacccaag

SEQ ID NO: 1510746 - RNA, 15 nt, Human
acccacccccaccca

SEQ ID NO: 1510747 - RNA, 13 nt, Human
acccaugcugccc

SEQ ID NO: 1510748 - RNA, 15 nt, Human
acccacccuccuuuc

SEQ ID NO: 1510749 - RNA, 14 nt, Human
acauuuauucugcu

SEQ ID NO: 1510750 - RNA, 23 nt, Human
acaugucuuuucuugcaugaggc

SEQ ID NO: 1510751 - RNA, 19 nt, Human
acaugccucucucaggcca

SEQ ID NO: 1510752 - RNA, 20 nt, Human
acaugccucucucaggccaa

SEQ ID NO: 1510753 - RNA, 19 nt, Human
accaaggcugauuaaacca

SEQ ID NO: 1510754 - RNA, 20 nt, Human
accaaggcugauuaaaccaa

SEQ ID NO: 1510755 - RNA, 14 nt, Human
accagcagaaaugc

SEQ ID NO: 1510756 - RNA, 12 nt, Human
accagcagagca

SEQ ID NO: 1510757 - RNA, 13 nt, Human
accagcagagcac

SEQ ID NO: 1510758 - RNA, 13 nt, Human
accagcagccugg

SEQ ID NO: 1510759 - RNA, 16 nt, Human
accagccccagugccc

SEQ ID NO: 1510760 - RNA, 17 nt, Human
accagccccagugccca

SEQ ID NO: 1510761 - RNA, 18 nt, Human
accagccccagugcccac

SEQ ID NO: 1510762 - RNA, 19 nt, Human
accagccccagugcccaca

SEQ ID NO: 1510763 - RNA, 20 nt, Human
accagccccagugcccacag

SEQ ID NO: 1510764 - RNA, 15 nt, Human
acaguggggaaugaa

SEQ ID NO: 1510765 - RNA, 19 nt, Human
acaguggggaaugaagaua

SEQ ID NO: 1510766 - RNA, 21 nt, Human
acagugauuaccagggacuga

SEQ ID NO: 1510767 - RNA, 23 nt, Human
acagugagucgaggacagggagg

SEQ ID NO: 1510768 - RNA, 14 nt, Human
acaggcaaugcugg

SEQ ID NO: 1510769 - RNA, 17 nt, Human
acagggccagugcaguu

SEQ ID NO: 1510770 - RNA, 22 nt, Human
acagugagucgaggacagggag

SEQ ID NO: 1510771 - RNA, 19 nt, Human
acaggugugaaccaccaca

SEQ ID NO: 1510772 - RNA, 22 nt, Human
acaggugugagucaccaagccc

SEQ ID NO: 1510773 - RNA, 23 nt, Human
acaggugugagucaccaagccca

SEQ ID NO: 1510774 - RNA, 13 nt, Human
acagcugccuggg

SEQ ID NO: 1510775 - RNA, 20 nt, Human
acaggcaagcaccuccugcc

SEQ ID NO: 1510776 - RNA, 23 nt, Human
acaggcaagcaccuccugccucg

SEQ ID NO: 1510777 - RNA, 16 nt, Human
acagcucuguccuggg

SEQ ID NO: 1510778 - RNA, 17 nt, Human
acagcucuguccuggga

SEQ ID NO: 1510779 - RNA, 17 nt, Human
acagaggggguggccuc

SEQ ID NO: 1510780 - RNA, 18 nt, Human
acagaggggguggccucc

SEQ ID NO: 1510781 - RNA, 19 nt, Human
acagaggggguggccuccc

SEQ ID NO: 1510782 - RNA, 21 nt, Human
acagaggggguggccucccaa

SEQ ID NO: 1510783 - RNA, 16 nt, Human
acagcuccuucugucc

SEQ ID NO: 1510784 - RNA, 18 nt, Human
acagcuccuucuguccua

SEQ ID NO: 1510785 - RNA, 23 nt, Human
acagcuccuucuguccuacucug

SEQ ID NO: 1510786 - RNA, 14 nt, Human
acagcucuguccug

SEQ ID NO: 1510787 - RNA, 16 nt, Human
acaugcaaggucauuu

SEQ ID NO: 1510788 - RNA, 17 nt, Human
acaugcaaggucauuuu

SEQ ID NO: 1510789 - RNA, 18 nt, Human
acaugcaaggucauuuuu

SEQ ID NO: 1510790 - RNA, 15 nt, Human
acaugccucucucag

SEQ ID NO: 1510791 - RNA, 16 nt, Human
acaugccucucucagg

SEQ ID NO: 1510792 - RNA, 17 nt, Human
acaugccucucucaggc

SEQ ID NO: 1510793 - RNA, 18 nt, Human
acaugccucucucaggcc

SEQ ID NO: 1510794 - RNA, 20 nt, Human
acauaaguaauucaagaaaa

SEQ ID NO: 1510795 - RNA, 15 nt, Human
acauaaguaauucaa

SEQ ID NO: 1510796 - RNA, 19 nt, Human
acauaauuaaauuuugagu

SEQ ID NO: 1510797 - RNA, 16 nt, Human
acauaagauaaaugug

SEQ ID NO: 1510798 - RNA, 18 nt, Human
aauuuccugggagcuuuu

SEQ ID NO: 1510799 - RNA, 21 nt, Human
aauuuccugggagcuuuugua

SEQ ID NO: 1510800 - RNA, 22 nt, Human
aauuucauaccuaucaucuuaa

SEQ ID NO: 1510801 - RNA, 12 nt, Human
aauuguaaggaa

SEQ ID NO: 1510802 - RNA, 16 nt, Human
aauuguaaggaaugau

SEQ ID NO: 1510803 - RNA, 16 nt, Human
aaugucacaggcaggu

SEQ ID NO: 1510804 - RNA, 19 nt, Human
aaugucacaggcaggucca

SEQ ID NO: 1510805 - RNA, 20 nt, Human
aauuuauuuaugggauccug

SEQ ID NO: 1510806 - RNA, 21 nt, Human
acaaggaugaauuaaguuuuu

SEQ ID NO: 1510807 - RNA, 22 nt, Human
acaagaaaugaaagcagggacu

SEQ ID NO: 1510808 - RNA, 15 nt, Human
acaagaaaugaaagc

SEQ ID NO: 1510809 - RNA, 16 nt, Human
acaagaaaugaaagca

SEQ ID NO: 1510810 - RNA, 13 nt, Human
acaaaauggaaua

SEQ ID NO: 1510811 - RNA, 14 nt, Human
acaaaauggaauac

SEQ ID NO: 1510812 - RNA, 13 nt, Human
acaaaaugaaacg

SEQ ID NO: 1510813 - RNA, 22 nt, Human
acaaaaugaaacgcaaccacca

SEQ ID NO: 1510814 - RNA, 17 nt, Human
aauuuugugaagcaaaa

SEQ ID NO: 1510815 - RNA, 18 nt, Human
aauuuugugaagcaaaau

SEQ ID NO: 1510816 - RNA, 16 nt, Human
aauuuugugcccccau

SEQ ID NO: 1510817 - RNA, 14 nt, Human
aauuuugauguuuu

SEQ ID NO: 1510818 - RNA, 16 nt, Human
acagaagcuccaggua

SEQ ID NO: 1510819 - RNA, 14 nt, Human
acagacaaagcgug

SEQ ID NO: 1510820 - RNA, 13 nt, Human
acagaggcagccc

SEQ ID NO: 1510821 - RNA, 14 nt, Human
acagaggcagcccc

SEQ ID NO: 1510822 - RNA, 17 nt, Human
acagaggccaugggccu

SEQ ID NO: 1510823 - RNA, 21 nt, Human
acagaggccaugggccuccug

SEQ ID NO: 1510824 - RNA, 23 nt, Human
acagaggccaugggccuccugug

SEQ ID NO: 1510825 - RNA, 22 nt, Human
acacugugcugagucugaaggc

SEQ ID NO: 1510826 - RNA, 19 nt, Human
acacaaaaguuucucuuuu

SEQ ID NO: 1510827 - RNA, 14 nt, Human
acacauuuuuuaaa

SEQ ID NO: 1510828 - RNA, 22 nt, Human
acacagcucuucuccaggcugu

SEQ ID NO: 1510829 - RNA, 20 nt, Human
acacagcucuucuccaggcu

SEQ ID NO: 1510830 - RNA, 21 nt, Human
acacagcucuucuccaggcug

SEQ ID NO: 1510831 - RNA, 20 nt, Human
acaccacuacauucuguuaa

SEQ ID NO: 1510832 - RNA, 17 nt, Human
acaccacuacauucugu

SEQ ID NO: 1510833 - RNA, 14 nt, Human
acacgaauauugcu

SEQ ID NO: 1510834 - RNA, 15 nt, Human
acaccacuacauucu

SEQ ID NO: 1510835 - RNA, 19 nt, Human
acacauuuuuuaaaugcac

SEQ ID NO: 1510836 - RNA, 18 nt, Human
acacauuuuuuaaaugca

SEQ ID NO: 1510837 - RNA, 16 nt, Human
acacauuuuuuaaaug

SEQ ID NO: 1510838 - RNA, 21 nt, Human
acaccacuacauucuguuaau

SEQ ID NO: 1510839 - RNA, 14 nt, Human
acacgagcaggcua

SEQ ID NO: 1510840 - RNA, 15 nt, Human
acacgaauauugcug

SEQ ID NO: 1510841 - RNA, 21 nt, Human
acacgaauauugcugauggug

SEQ ID NO: 1510842 - RNA, 13 nt, Human
acaauuuaaagca

SEQ ID NO: 1510843 - RNA, 14 nt, Human
acaauuuaaagcaa

SEQ ID NO: 1510844 - RNA, 20 nt, Human
acaauuuaaagcaaaggagu

SEQ ID NO: 1510845 - RNA, 13 nt, Human
acaauuuauuaug

SEQ ID NO: 1510846 - RNA, 14 nt, Human
acaauuuauuaugg

SEQ ID NO: 1510847 - RNA, 20 nt, Human
acaaggaugaucuaggaaga

SEQ ID NO: 1510848 - RNA, 16 nt, Human
acaaggauugcuacug

SEQ ID NO: 1510849 - RNA, 19 nt, Human
acuaguauuucuaugaaau

SEQ ID NO: 1510850 - RNA, 18 nt, Human
acuaguauuucuaugaaa

SEQ ID NO: 1510851 - RNA, 16 nt, Human
acuauuguuagucucu

SEQ ID NO: 1510852 - RNA, 17 nt, Human
acuagggaagauaauau

SEQ ID NO: 1510853 - RNA, 19 nt, Human
acgcuggagugcagugagc

SEQ ID NO: 1510854 - RNA, 15 nt, Human
acggaauaguuggcu

SEQ ID NO: 1510855 - RNA, 19 nt, Human
acggacgaaccuugaaaac

SEQ ID NO: 1510856 - RNA, 15 nt, Human
acggaagagccuugc

SEQ ID NO: 1510857 - RNA, 16 nt, Human
acggaagagccuugcg

SEQ ID NO: 1510858 - RNA, 23 nt, Human
acgucugacaggcaaugcuggcu

SEQ ID NO: 1510859 - RNA, 12 nt, Human
acgucugugcca

SEQ ID NO: 1510860 - RNA, 15 nt, Human
acuaauagacaauuu

SEQ ID NO: 1510861 - RNA, 11 nt, Human
acguggcugcu

SEQ ID NO: 1510862 - RNA, 11 nt, Human
accugugucuc

SEQ ID NO: 1510863 - RNA, 17 nt, Human
accucugccucagaaaa

SEQ ID NO: 1510864 - RNA, 18 nt, Human
accucugccucagaaaac

SEQ ID NO: 1510865 - RNA, 21 nt, Human
accucuugagccuugaacuuu

SEQ ID NO: 1510866 - RNA, 20 nt, Human
accucuugagccuugaacuu

SEQ ID NO: 1510867 - RNA, 19 nt, Human
accucuugagccuugaacu

SEQ ID NO: 1510868 - RNA, 17 nt, Human
accucuugagccuugaa

SEQ ID NO: 1510869 - RNA, 20 nt, Human
accucugccucagaaaacaa

SEQ ID NO: 1510870 - RNA, 11 nt, Human
accugccaggg

SEQ ID NO: 1510871 - RNA, 12 nt, Human
accugccaggga

SEQ ID NO: 1510872 - RNA, 13 nt, Human
accugccagggac

SEQ ID NO: 1510873 - RNA, 15 nt, Human
accugccagggacag

SEQ ID NO: 1510874 - RNA, 16 nt, Human
accugccagggacaga

SEQ ID NO: 1510875 - RNA, 18 nt, Human
accugccagggacagagg

SEQ ID NO: 1510876 - RNA, 14 nt, Human
accggcuggccugg

SEQ ID NO: 1510877 - RNA, 15 nt, Human
accggcuggccuggc

SEQ ID NO: 1510878 - RNA, 17 nt, Human
accggcuggccuggccc

SEQ ID NO: 1510879 - RNA, 18 nt, Human
accggcuggccuggcccc

SEQ ID NO: 1510880 - RNA, 19 nt, Human
accggcuggccuggccccu

SEQ ID NO: 1510881 - RNA, 20 nt, Human
accgggccacagagaaagua

SEQ ID NO: 1510882 - RNA, 15 nt, Human
accgggccacagaga

SEQ ID NO: 1510883 - RNA, 19 nt, Human
accgggccacagagaaagu

SEQ ID NO: 1510884 - RNA, 14 nt, Human
accgugaggccaga

SEQ ID NO: 1510885 - RNA, 17 nt, Human
acccuguuaccauuuug

SEQ ID NO: 1510886 - RNA, 16 nt, Human
acccaugcugcccugu

SEQ ID NO: 1510887 - RNA, 14 nt, Human
acccaugcugcccu

SEQ ID NO: 1510888 - RNA, 15 nt, Human
acccaugcugcccug

SEQ ID NO: 1510889 - RNA, 22 nt, Human
acccugugauggggcccugccu

SEQ ID NO: 1510890 - RNA, 16 nt, Human
accccacacacgccag

SEQ ID NO: 1510891 - RNA, 18 nt, Human
accucaggugagaagcag

SEQ ID NO: 1510892 - RNA, 14 nt, Human
accucaggccuggg

SEQ ID NO: 1510893 - RNA, 22 nt, Human
accucaggccugggggcugggc

SEQ ID NO: 1510894 - RNA, 16 nt, Human
accgugaggccagaga

SEQ ID NO: 1510895 - RNA, 17 nt, Human
accgugaggccagagac

SEQ ID NO: 1510896 - RNA, 12 nt, Human
accucaggccug

SEQ ID NO: 1510897 - RNA, 13 nt, Human
accucaggccugg

SEQ ID NO: 1510898 - RNA, 20 nt, Human
acuucaaauccuugaagauu

SEQ ID NO: 1510899 - RNA, 18 nt, Human
acuucagcgguuuauaua

SEQ ID NO: 1510900 - RNA, 19 nt, Human
acuucagcgguuuauauaa

SEQ ID NO: 1510901 - RNA, 20 nt, Human
acuucugccauauucuguug

SEQ ID NO: 1510902 - RNA, 17 nt, Human
acuucuuauacauuuga

SEQ ID NO: 1510903 - RNA, 18 nt, Human
acuucuuauacauuugau

SEQ ID NO: 1510904 - RNA, 15 nt, Human
acuuaaauaauguga

SEQ ID NO: 1510905 - RNA, 14 nt, Human
acuuaaauaaugug

SEQ ID NO: 1510906 - RNA, 21 nt, Human
acuuaaaaaugguuuaaaugg

SEQ ID NO: 1510907 - RNA, 13 nt, Human
acuuaaaaauggu

SEQ ID NO: 1510908 - RNA, 14 nt, Human
acuuaaaaaugguu

SEQ ID NO: 1510909 - RNA, 12 nt, Human
acuuuaugcuaa

SEQ ID NO: 1510910 - RNA, 17 nt, Human
acuuuaugcuaagugaa

SEQ ID NO: 1510911 - RNA, 22 nt, Human
acuugggaggcugagaugggag

SEQ ID NO: 1510912 - RNA, 14 nt, Human
acucuuaagaagac

SEQ ID NO: 1510913 - RNA, 15 nt, Human
acucuuaagaagacu

SEQ ID NO: 1510914 - RNA, 20 nt, Human
acucuuaagaagacugcauu

SEQ ID NO: 1510915 - RNA, 19 nt, Human
acucugucucaaaaaaaca

SEQ ID NO: 1510916 - RNA, 15 nt, Human
acucugucucagucc

SEQ ID NO: 1510917 - RNA, 17 nt, Human
acucugucucaguccau

SEQ ID NO: 1510918 - RNA, 21 nt, Human
acucugugucagguggggcag

SEQ ID NO: 1510919 - RNA, 23 nt, Human
acugaugggcaacccccagccug

SEQ ID NO: 1510920 - RNA, 23 nt, Human
acugauuuuuuuuuccuucagug

SEQ ID NO: 1510921 - RNA, 21 nt, Human
acugauuuuuuuuuccuucag

SEQ ID NO: 1510922 - RNA, 22 nt, Human
acugauuuuuuuuuccuucagu

SEQ ID NO: 1510923 - RNA, 23 nt, Human
acugacauuguuggccaaagcca

SEQ ID NO: 1510924 - RNA, 13 nt, Human
acugaucucucgu

SEQ ID NO: 1510925 - RNA, 22 nt, Human
acugauggcuaauguacugcau

SEQ ID NO: 1510926 - RNA, 12 nt, Human
acugaugggcaa

SEQ ID NO: 1510927 - RNA, 22 nt, Human
acugaugggcaacccccagccu

SEQ ID NO: 1510928 - RNA, 15 nt, Human
acugcccggcagggu

SEQ ID NO: 1510929 - RNA, 16 nt, Human
acugcuuuuggucugu

SEQ ID NO: 1510930 - RNA, 20 nt, Human
acugcuuuuggucuguguga

SEQ ID NO: 1510931 - RNA, 22 nt, Human
acugcccggcaggguccuagaa

SEQ ID NO: 1510932 - RNA, 14 nt, Human
acugccaugccagc

SEQ ID NO: 1510933 - RNA, 15 nt, Human
acugcuuuuggucug

SEQ ID NO: 1510934 - RNA, 15 nt, Human
aagagaacuuccaga

SEQ ID NO: 1510935 - RNA, 17 nt, Human
aagacuuuuccaacccu

SEQ ID NO: 1510936 - RNA, 21 nt, Human
aacuuacuugcauaccaaguu

SEQ ID NO: 1510937 - RNA, 23 nt, Human
aagacagugaaagaaaauaacaa

SEQ ID NO: 1510938 - RNA, 21 nt, Human
aagacauucuuccaaaaagau

SEQ ID NO: 1510939 - RNA, 16 nt, Human
aagacuuuggaaagag

SEQ ID NO: 1510940 - RNA, 16 nt, Human
aagauacugaaauaaa

SEQ ID NO: 1510941 - RNA, 20 nt, Human
aagauacugaaauaaacguc

SEQ ID NO: 1510942 - RNA, 14 nt, Human
aagauagcagggca

SEQ ID NO: 1510943 - RNA, 20 nt, Human
aagauucaaugccccugaau

SEQ ID NO: 1510944 - RNA, 21 nt, Human
aagauucaaugccccugaauu

SEQ ID NO: 1510945 - RNA, 20 nt, Human
aagauucauauuuacuucuu

SEQ ID NO: 1510946 - RNA, 19 nt, Human
aagauuuugaaauuuuuau

SEQ ID NO: 1510947 - RNA, 19 nt, Human
aagccaccaacauacuccc

SEQ ID NO: 1510948 - RNA, 15 nt, Human
aagcagggacuugaa

SEQ ID NO: 1510949 - RNA, 12 nt, Human
aaguagaggagg

SEQ ID NO: 1510950 - RNA, 20 nt, Human
aagggacuuggaagcuccgc

SEQ ID NO: 1510951 - RNA, 14 nt, Human
aagggauggcaaga

SEQ ID NO: 1510952 - RNA, 17 nt, Human
aagggauggcaagaugu

SEQ ID NO: 1510953 - RNA, 16 nt, Human
aagcugcugacagugu

SEQ ID NO: 1510954 - RNA, 23 nt, Human
aaggaaugauuaauuaaaacaca

SEQ ID NO: 1510955 - RNA, 21 nt, Human
aagcgugagccacugcaccgg

SEQ ID NO: 1510956 - RNA, 17 nt, Human
aagcgugagccacugca

SEQ ID NO: 1510957 - RNA, 20 nt, Human
aagcgugagccacugcaccg

SEQ ID NO: 1510958 - RNA, 11 nt, Human
aagcugccagc

SEQ ID NO: 1510959 - RNA, 12 nt, Human
aagcugccagcc

SEQ ID NO: 1510960 - RNA, 14 nt, Human
aagcugcugacagu

SEQ ID NO: 1510961 - RNA, 22 nt, Human
aagcugccagccgagauagcca

SEQ ID NO: 1510962 - RNA, 13 nt, Human
aaggacacuagaa

SEQ ID NO: 1510963 - RNA, 15 nt, Human
aagccagcaggcucu

SEQ ID NO: 1510964 - RNA, 19 nt, Human
aagccagcaggcucucagg

SEQ ID NO: 1510965 - RNA, 18 nt, Human
aagccagcaggcucucag

SEQ ID NO: 1510966 - RNA, 21 nt, Human
aagccaccaacauacucccau

SEQ ID NO: 1510967 - RNA, 15 nt, Human
aagcgauucuucugc

SEQ ID NO: 1510968 - RNA, 14 nt, Human
aagcgauucuucug

SEQ ID NO: 1510969 - RNA, 16 nt, Human
aagcgauucuucugcu

SEQ ID NO: 1510970 - RNA, 17 nt, Human
aagcgauucuucugcuu

SEQ ID NO: 1510971 - RNA, 14 nt, Human
aauaauguuucaaa

SEQ ID NO: 1510972 - RNA, 19 nt, Human
aauaauguuucaaacauau

SEQ ID NO: 1510973 - RNA, 12 nt, Human
aauaauguuuca

SEQ ID NO: 1510974 - RNA, 17 nt, Human
aauaaaccucaaaaugu

SEQ ID NO: 1510975 - RNA, 10 nt, Human
aauaaaccau

SEQ ID NO: 1510976 - RNA, 14 nt, Human
aauaauaaauauuu

SEQ ID NO: 1510977 - RNA, 15 nt, Human
aauaaacgucuuaaa

SEQ ID NO: 1510978 - RNA, 20 nt, Human
aauaaaccucaaaaugucua

SEQ ID NO: 1510979 - RNA, 22 nt, Human
aaguugauaugccuuuucccaa

SEQ ID NO: 1510980 - RNA, 13 nt, Human
aagugcugcauuu

SEQ ID NO: 1510981 - RNA, 14 nt, Human
aagugcugcauuua

SEQ ID NO: 1510982 - RNA, 19 nt, Human
aauacgugggcauucaaau

SEQ ID NO: 1510983 - RNA, 20 nt, Human
aauacgugggcauucaaaug

SEQ ID NO: 1510984 - RNA, 16 nt, Human
aauauaggaacuuaaa

SEQ ID NO: 1510985 - RNA, 13 nt, Human
aauauaaacacua

SEQ ID NO: 1510986 - RNA, 14 nt, Human
aauauaaacacuau

SEQ ID NO: 1510987 - RNA, 16 nt, Human
aauccauacauuugug

SEQ ID NO: 1510988 - RNA, 17 nt, Human
aauccauacauuugugu

SEQ ID NO: 1510989 - RNA, 17 nt, Human
aauccagacccggcugc

SEQ ID NO: 1510990 - RNA, 14 nt, Human
aaugauaacuggaa

SEQ ID NO: 1510991 - RNA, 15 nt, Human
aaugauaacuggaaa

SEQ ID NO: 1510992 - RNA, 16 nt, Human
aaugauaacuggaaac

SEQ ID NO: 1510993 - RNA, 15 nt, Human
aaugauagcuacugu

SEQ ID NO: 1510994 - RNA, 16 nt, Human
aaugauuaauuaaaac

SEQ ID NO: 1510995 - RNA, 12 nt, Human
aaugauuaauua

SEQ ID NO: 1510996 - RNA, 13 nt, Human
aaugauuaauuaa

SEQ ID NO: 1510997 - RNA, 22 nt, Human
aaucaaauaugcaaagcacuga

SEQ ID NO: 1510998 - RNA, 15 nt, Human
aaucaaauaugcaaa

SEQ ID NO: 1510999 - RNA, 16 nt, Human
aaucaaauaugcaaag

SEQ ID NO: 1511000 - RNA, 17 nt, Human
aaugggggugcauuuga

SEQ ID NO: 1511001 - RNA, 15 nt, Human
aaugggggugcauuu

SEQ ID NO: 1511002 - RNA, 23 nt, Human
aaugcucuuuacuucauggacuu

SEQ ID NO: 1511003 - RNA, 13 nt, Human
aaugggacacuaa

SEQ ID NO: 1511004 - RNA, 14 nt, Human
aaugggagcucaug

SEQ ID NO: 1511005 - RNA, 23 nt, Human
aaugcgugcauaccacuuuuguu

SEQ ID NO: 1511006 - RNA, 21 nt, Human
aaugcgugcauaccacuuuug

SEQ ID NO: 1511007 - RNA, 15 nt, Human
aaauaaacgucuuaa

SEQ ID NO: 1511008 - RNA, 16 nt, Human
aaauaaacgucuuaaa

SEQ ID NO: 1511009 - RNA, 19 nt, Human
aaauaaaccucaaaauguc

SEQ ID NO: 1511010 - RNA, 20 nt, Human
aaauaaaaauauuguguugu

SEQ ID NO: 1511011 - RNA, 17 nt, Human
aaauaaacgucuuaaau

SEQ ID NO: 1511012 - RNA, 11 nt, Human
aaauaaauuau

SEQ ID NO: 1511013 - RNA, 15 nt, Human
aaagcccagagacag

SEQ ID NO: 1511014 - RNA, 21 nt, Human
aaaggcuccaggagcagccac

SEQ ID NO: 1511015 - RNA, 22 nt, Human
aaaggcuccaggagcagccaca

SEQ ID NO: 1511016 - RNA, 14 nt, Human
aaaggcuccaggag

SEQ ID NO: 1511017 - RNA, 14 nt, Human
aaaggcuaccuuug

SEQ ID NO: 1511018 - RNA, 17 nt, Human
aaaggcuaccuuuguau

SEQ ID NO: 1511019 - RNA, 15 nt, Human
aaagccaaagcuagg

SEQ ID NO: 1511020 - RNA, 20 nt, Human
aaagcauuguaaaugugcuu

SEQ ID NO: 1511021 - RNA, 13 nt, Human
aaagaaacauuug

SEQ ID NO: 1511022 - RNA, 22 nt, Human
aaacugauuuuuuuuuccuuca

SEQ ID NO: 1511023 - RNA, 20 nt, Human
aaacugauuuuuuuuuccuu

SEQ ID NO: 1511024 - RNA, 13 nt, Human
aaacugauuuuuu

SEQ ID NO: 1511025 - RNA, 19 nt, Human
aaacugauuuuuuuuuccu

SEQ ID NO: 1511026 - RNA, 19 nt, Human
aaacccuugccaugugcua

SEQ ID NO: 1511027 - RNA, 14 nt, Human
aaacccuucagugc

SEQ ID NO: 1511028 - RNA, 17 nt, Human
aaacucuugaccucagg

SEQ ID NO: 1511029 - RNA, 17 nt, Human
aaaccucaaaaugucua

SEQ ID NO: 1511030 - RNA, 22 nt, Human
aaaccucaaaaugucuaagaua

SEQ ID NO: 1511031 - RNA, 17 nt, Human
aaaccccaucucuacaa

SEQ ID NO: 1511032 - RNA, 21 nt, Human
aaacccugucucuacuaaaaa

SEQ ID NO: 1511033 - RNA, 15 nt, Human
aaagauacaguuacu

SEQ ID NO: 1511034 - RNA, 11 nt, Human
aaagagguuuu

SEQ ID NO: 1511035 - RNA, 17 nt, Human
aaacagcuaaugggaca

SEQ ID NO: 1511036 - RNA, 21 nt, Human
aaaauuauuuuguucauacau

SEQ ID NO: 1511037 - RNA, 20 nt, Human
aaaauuauuuuguucauaca

SEQ ID NO: 1511038 - RNA, 16 nt, Human
aaaauuauuuuguuca

SEQ ID NO: 1511039 - RNA, 18 nt, Human
aaaauuauuuuguucaua

SEQ ID NO: 1511040 - RNA, 15 nt, Human
aaaauuagccaagug

SEQ ID NO: 1511041 - RNA, 19 nt, Human
aaaauccauacauuugugu

SEQ ID NO: 1511042 - RNA, 22 nt, Human
aaaaucccuuaccucggugccu

SEQ ID NO: 1511043 - RNA, 14 nt, Human
aaaauuaacacugc

SEQ ID NO: 1511044 - RNA, 16 nt, Human
aacagcuaaugggaca

SEQ ID NO: 1511045 - RNA, 14 nt, Human
aacacuauauggca

SEQ ID NO: 1511046 - RNA, 18 nt, Human
aacacuauauggcagugu

SEQ ID NO: 1511047 - RNA, 20 nt, Human
aacacuauauggcagugucu

SEQ ID NO: 1511048 - RNA, 21 nt, Human
aacacuauauggcagugucuu

SEQ ID NO: 1511049 - RNA, 15 nt, Human
aacauggaaguacua

SEQ ID NO: 1511050 - RNA, 13 nt, Human
aacccuucagugc

SEQ ID NO: 1511051 - RNA, 19 nt, Human
aaccaguguuguggauuua

SEQ ID NO: 1511052 - RNA, 15 nt, Human
aacucauauuuucau

SEQ ID NO: 1511053 - RNA, 16 nt, Human
aacucauauuuucaug

SEQ ID NO: 1511054 - RNA, 18 nt, Human
aacucauauuuucaugcu

SEQ ID NO: 1511055 - RNA, 13 nt, Human
aacgucugugcca

SEQ ID NO: 1511056 - RNA, 16 nt, Human
aacggggcucuucuca

SEQ ID NO: 1511057 - RNA, 18 nt, Human
aacggggcucuucucauu

SEQ ID NO: 1511058 - RNA, 17 nt, Human
aacucaaacucuuaaaa

SEQ ID NO: 1511059 - RNA, 16 nt, Human
aacucaccccagcccc

SEQ ID NO: 1511060 - RNA, 17 nt, Human
aacucaccccagcccca

SEQ ID NO: 1511061 - RNA, 18 nt, Human
aacucaccccagccccaa

SEQ ID NO: 1511062 - RNA, 20 nt, Human
aaauguucaucaaugaauga

SEQ ID NO: 1511063 - RNA, 14 nt, Human
aaauugauguguuu

SEQ ID NO: 1511064 - RNA, 21 nt, Human
aaauugauguguuuauuuaua

SEQ ID NO: 1511065 - RNA, 13 nt, Human
aacaaaauuucua

SEQ ID NO: 1511066 - RNA, 15 nt, Human
aacaaaauuucuauu

SEQ ID NO: 1511067 - RNA, 12 nt, Human
aaauuaacuuuu

SEQ ID NO: 1511068 - RNA, 19 nt, Human
aaauuaacuuuuauaaacu

SEQ ID NO: 1511069 - RNA, 14 nt, Human
aaauuaacuuuuau

SEQ ID NO: 1511070 - RNA, 13 nt, Human
aaauuaacuuuua

SEQ ID NO: 1511071 - RNA, 12 nt, Human
aacacaucagcu

SEQ ID NO: 1511072 - RNA, 19 nt, Human
aacaccucugcacaagcug

SEQ ID NO: 1511073 - RNA, 22 nt, Human
aacaaaccuguuucugcagcca

SEQ ID NO: 1511074 - RNA, 21 nt, Human
aacacauacaggaagguagaa

SEQ ID NO: 1511075 - RNA, 18 nt, Human
aaaucugcuuuuuaaaga

SEQ ID NO: 1511076 - RNA, 14 nt, Human
aaaucuuaacuuga

SEQ ID NO: 1511077 - RNA, 20 nt, Human
aaaugcuagguuaauuccaa

SEQ ID NO: 1511078 - RNA, 22 nt, Human
aaaucuccaaaauaaaacuuuu

SEQ ID NO: 1511079 - RNA, 14 nt, Human
aaauggacguguua

SEQ ID NO: 1511080 - RNA, 17 nt, Human
aaauggaauacucuuau

SEQ ID NO: 1511081 - RNA, 15 nt, Human
aaauggacguguuau

SEQ ID NO: 1511082 - RNA, 17 nt, Human
aaauggacguguuauga

SEQ ID NO: 1511083 - RNA, 21 nt, Human
agaggacuuuucuuuguggcu

SEQ ID NO: 1511084 - RNA, 22 nt, Human
agaggacuuuucuuuguggcuu

SEQ ID NO: 1511085 - RNA, 23 nt, Human
agaggagggcagcagaagggggu

SEQ ID NO: 1511086 - RNA, 23 nt, Human
agaggacuuuucuuuguggcuuc

SEQ ID NO: 1511087 - RNA, 13 nt, Human
agagggccugcaa

SEQ ID NO: 1511088 - RNA, 16 nt, Human
agagggccugcaaggg

SEQ ID NO: 1511089 - RNA, 17 nt, Human
agaggggguggccuccc

SEQ ID NO: 1511090 - RNA, 19 nt, Human
agaggggguggccucccaa

SEQ ID NO: 1511091 - RNA, 13 nt, Human
agaggaaugaagu

SEQ ID NO: 1511092 - RNA, 13 nt, Human
agagcccaccuug

SEQ ID NO: 1511093 - RNA, 13 nt, Human
agagccagggucu

SEQ ID NO: 1511094 - RNA, 16 nt, Human
agacuggaagcacagc

SEQ ID NO: 1511095 - RNA, 16 nt, Human
agagagaccacuuuuc

SEQ ID NO: 1511096 - RNA, 23 nt, Human
agacugaguacguugugcauuug

SEQ ID NO: 1511097 - RNA, 22 nt, Human
agacugaguacguugugcauuu

SEQ ID NO: 1511098 - RNA, 20 nt, Human
agacugaguacguugugcau

SEQ ID NO: 1511099 - RNA, 18 nt, Human
agacucugucucagucca

SEQ ID NO: 1511100 - RNA, 18 nt, Human
agacucugucucaaaaaa

SEQ ID NO: 1511101 - RNA, 16 nt, Human
agacgcugugcugccc

SEQ ID NO: 1511102 - RNA, 13 nt, Human
agaaggggguggu

SEQ ID NO: 1511103 - RNA, 20 nt, Human
agaaggggguggugucucca

SEQ ID NO: 1511104 - RNA, 13 nt, Human
agaagauagcagg

SEQ ID NO: 1511105 - RNA, 18 nt, Human
agaagucacauuccugaa

SEQ ID NO: 1511106 - RNA, 20 nt, Human
agaagucacauuccugaaca

SEQ ID NO: 1511107 - RNA, 21 nt, Human
agaagucacauuccugaacag

SEQ ID NO: 1511108 - RNA, 14 nt, Human
agaaguaacuuacu

SEQ ID NO: 1511109 - RNA, 18 nt, Human
agaagacugcauuauauu

SEQ ID NO: 1511110 - RNA, 21 nt, Human
agaagagauugugguuucauu

SEQ ID NO: 1511111 - RNA, 22 nt, Human
agaagagaguccauauuucaau

SEQ ID NO: 1511112 - RNA, 22 nt, Human
agaagagcuguucacagccaga

SEQ ID NO: 1511113 - RNA, 13 nt, Human
agaagacacugau

SEQ ID NO: 1511114 - RNA, 21 nt, Human
agaagacacugaugggcaacc

SEQ ID NO: 1511115 - RNA, 21 nt, Human
acuuuccucuuuggucuacac

SEQ ID NO: 1511116 - RNA, 22 nt, Human
agaagucacauuccugaacagg

SEQ ID NO: 1511117 - RNA, 21 nt, Human
agaagugaaaaucuacacucc

SEQ ID NO: 1511118 - RNA, 18 nt, Human
agaaugaaagggcccaga

SEQ ID NO: 1511119 - RNA, 17 nt, Human
agaaugagagacacacu

SEQ ID NO: 1511120 - RNA, 22 nt, Human
agaaugagagacacacugaaga

SEQ ID NO: 1511121 - RNA, 17 nt, Human
agaaugauuaugaauua

SEQ ID NO: 1511122 - RNA, 19 nt, Human
agaaugcacaaacagaggc

SEQ ID NO: 1511123 - RNA, 22 nt, Human
agaaugcacaaacagaggccgc

SEQ ID NO: 1511124 - RNA, 23 nt, Human
agacagagucucacuguugccca

SEQ ID NO: 1511125 - RNA, 21 nt, Human
agacagagucucacuguugcc

SEQ ID NO: 1511126 - RNA, 19 nt, Human
agacccaaaaggcagaagc

SEQ ID NO: 1511127 - RNA, 20 nt, Human
agacaaugacuuacuguaca

SEQ ID NO: 1511128 - RNA, 23 nt, Human
agacaaugacuuacuguacauga

SEQ ID NO: 1511129 - RNA, 15 nt, Human
agacagagcuacaca

SEQ ID NO: 1511130 - RNA, 22 nt, Human
agacaaugacuuacuguacaug

SEQ ID NO: 1511131 - RNA, 21 nt, Human
agacaaugacuuacuguacau

SEQ ID NO: 1511132 - RNA, 11 nt, Human
agacagagucu

SEQ ID NO: 1511133 - RNA, 12 nt, Human
agacagagcugg

SEQ ID NO: 1511134 - RNA, 19 nt, Human
agacagagucucacuguug

SEQ ID NO: 1511135 - RNA, 20 nt, Human
agacagagucucacuguugc

SEQ ID NO: 1511136 - RNA, 19 nt, Human
agauguagaggagaaacug

SEQ ID NO: 1511137 - RNA, 14 nt, Human
agaugguucuagca

SEQ ID NO: 1511138 - RNA, 19 nt, Human
agaugaugaugaucuuuaa

SEQ ID NO: 1511139 - RNA, 14 nt, Human
agaugagugagcau

SEQ ID NO: 1511140 - RNA, 23 nt, Human
agaggggguggccucccaacuca

SEQ ID NO: 1511141 - RNA, 24 nt, Human
agcaaaauuuuuucucuaggaaau

SEQ ID NO: 1511142 - RNA, 18 nt, Human
agcaaaagaugcuucuca

SEQ ID NO: 1511143 - RNA, 19 nt, Human
agauucuuuccugaggcug

SEQ ID NO: 1511144 - RNA, 21 nt, Human
agauucuuuccugaggcuggg

SEQ ID NO: 1511145 - RNA, 23 nt, Human
agauugcaacaggcugggcuuca

SEQ ID NO: 1511146 - RNA, 20 nt, Human
agauugcaacaggcugggcu

SEQ ID NO: 1511147 - RNA, 21 nt, Human
agauugcaacaggcugggcuu

SEQ ID NO: 1511148 - RNA, 23 nt, Human
agcaaaggaguagaaagacagag

SEQ ID NO: 1511149 - RNA, 23 nt, Human
agcaaagcugaugacaacuuccc

SEQ ID NO: 1511150 - RNA, 21 nt, Human
agcaaagcugaugacaacuuc

SEQ ID NO: 1511151 - RNA, 20 nt, Human
agcaaaggagauuggaagga

SEQ ID NO: 1511152 - RNA, 14 nt, Human
agcacagacccugc

SEQ ID NO: 1511153 - RNA, 15 nt, Human
agcacagacccugcc

SEQ ID NO: 1511154 - RNA, 15 nt, Human
agcaaugccugccca

SEQ ID NO: 1511155 - RNA, 21 nt, Human
agcacgauuucuguuuagaua

SEQ ID NO: 1511156 - RNA, 19 nt, Human
agcacgauuucuguuuaga

SEQ ID NO: 1511157 - RNA, 17 nt, Human
agcacgauuucuguuua

SEQ ID NO: 1511158 - RNA, 16 nt, Human
agcacagacccugccc

SEQ ID NO: 1511159 - RNA, 17 nt, Human
agcacagacccugcccu

SEQ ID NO: 1511160 - RNA, 14 nt, Human
agccagcaggcucu

SEQ ID NO: 1511161 - RNA, 17 nt, Human
agccagaggagagagga

SEQ ID NO: 1511162 - RNA, 18 nt, Human
agccagaggagagaggac

SEQ ID NO: 1511163 - RNA, 20 nt, Human
agccaaggccaaaggaagca

SEQ ID NO: 1511164 - RNA, 13 nt, Human
agccagaggagag

SEQ ID NO: 1511165 - RNA, 15 nt, Human
agccagaggagagag

SEQ ID NO: 1511166 - RNA, 18 nt, Human
agcauccuggcacccggc

SEQ ID NO: 1511167 - RNA, 14 nt, Human
agcauccuggcacc

SEQ ID NO: 1511168 - RNA, 17 nt, Human
agcauccuggcacccgg

SEQ ID NO: 1511169 - RNA, 16 nt, Human
agccaaagcuaggccu

SEQ ID NO: 1511170 - RNA, 18 nt, Human
agccaaagcuaggccugg

SEQ ID NO: 1511171 - RNA, 15 nt, Human
agcccaccccucaac

SEQ ID NO: 1511172 - RNA, 16 nt, Human
agcccaccuuggcuca

SEQ ID NO: 1511173 - RNA, 16 nt, Human
agccagcaggcucuca

SEQ ID NO: 1511174 - RNA, 17 nt, Human
agccagcaggcucucag

SEQ ID NO: 1511175 - RNA, 23 nt, Human
agcccacgcccccacuggugaca

SEQ ID NO: 1511176 - RNA, 14 nt, Human
agcccacgccccca

SEQ ID NO: 1511177 - RNA, 15 nt, Human
agcccacgcccccac

SEQ ID NO: 1511178 - RNA, 13 nt, Human
agcauccuggcac

SEQ ID NO: 1511179 - RNA, 17 nt, Human
agccccauucugccugc

SEQ ID NO: 1511180 - RNA, 18 nt, Human
agccccauucugccugcc

SEQ ID NO: 1511181 - RNA, 19 nt, Human
agccccauucugccugccc

SEQ ID NO: 1511182 - RNA, 15 nt, Human
agccccauccucugu

SEQ ID NO: 1511183 - RNA, 17 nt, Human
agccccauccucuguac

SEQ ID NO: 1511184 - RNA, 23 nt, Human
agccccauccucuguacagagcc

SEQ ID NO: 1511185 - RNA, 20 nt, Human
agccccauucugccugccca

SEQ ID NO: 1511186 - RNA, 17 nt, Human
agcccgggcucugccuc

SEQ ID NO: 1511187 - RNA, 18 nt, Human
agcccgggcucugccucc

SEQ ID NO: 1511188 - RNA, 20 nt, Human
agcccgggcucugccuccca

SEQ ID NO: 1511189 - RNA, 21 nt, Human
agcccgggcucugccucccau

SEQ ID NO: 1511190 - RNA, 12 nt, Human
aggaacaaggca

SEQ ID NO: 1511191 - RNA, 13 nt, Human
aggaacaaggcaa

SEQ ID NO: 1511192 - RNA, 16 nt, Human
aggaacaaggcaaggc

SEQ ID NO: 1511193 - RNA, 17 nt, Human
aggaacaaggcaaggcu

SEQ ID NO: 1511194 - RNA, 19 nt, Human
aggaacaaggcaaggcugu

SEQ ID NO: 1511195 - RNA, 21 nt, Human
aggaacuuaaauaaugugaaa

SEQ ID NO: 1511196 - RNA, 20 nt, Human
aggaacaaggcaaggcuguc

SEQ ID NO: 1511197 - RNA, 23 nt, Human
aggaacaaggcaaggcugucaau

SEQ ID NO: 1511198 - RNA, 22 nt, Human
aggaauaccugucccccugaca

SEQ ID NO: 1511199 - RNA, 15 nt, Human
aggaauaccuguccc

SEQ ID NO: 1511200 - RNA, 18 nt, Human
aggaauaccugucccccu

SEQ ID NO: 1511201 - RNA, 23 nt, Human
aggaacuuaaauaaugugaaacu

SEQ ID NO: 1511202 - RNA, 18 nt, Human
agcuucacuguaaaauaa

SEQ ID NO: 1511203 - RNA, 18 nt, Human
agcuucauuuccuguguc

SEQ ID NO: 1511204 - RNA, 23 nt, Human
agcuuuguuuguugucagcugaa

SEQ ID NO: 1511205 - RNA, 19 nt, Human
agcuucauuuccugugucu

SEQ ID NO: 1511206 - RNA, 12 nt, Human
agcuacaaaugc

SEQ ID NO: 1511207 - RNA, 23 nt, Human
agcuaauguaauaacugugaagu

SEQ ID NO: 1511208 - RNA, 16 nt, Human
agcucaccagccccag

SEQ ID NO: 1511209 - RNA, 12 nt, Human
agcucagagagg

SEQ ID NO: 1511210 - RNA, 18 nt, Human
agcucagagaggguggga

SEQ ID NO: 1511211 - RNA, 14 nt, Human
agcucagagagggu

SEQ ID NO: 1511212 - RNA, 12 nt, Human
agcucaccucuc

SEQ ID NO: 1511213 - RNA, 19 nt, Human
agcucaccagccccagugc

SEQ ID NO: 1511214 - RNA, 20 nt, Human
agcucaccagccccagugcc

SEQ ID NO: 1511215 - RNA, 15 nt, Human
agcucaccucucccu

SEQ ID NO: 1511216 - RNA, 18 nt, Human
agcucaccucucccuugg

SEQ ID NO: 1511217 - RNA, 19 nt, Human
agcucaccucucccuugga

SEQ ID NO: 1511218 - RNA, 12 nt, Human
agccugggaggu

SEQ ID NO: 1511219 - RNA, 20 nt, Human
agccugggaggucaaggcug

SEQ ID NO: 1511220 - RNA, 13 nt, Human
agcgagcccuggu

SEQ ID NO: 1511221 - RNA, 19 nt, Human
agcgagcccugguggcagu

SEQ ID NO: 1511222 - RNA, 22 nt, Human
agcuccccucggagaagagcug

SEQ ID NO: 1511223 - RNA, 20 nt, Human
agcuccccucggagaagagc

SEQ ID NO: 1511224 - RNA, 17 nt, Human
agcuccccucggagaag

SEQ ID NO: 1511225 - RNA, 19 nt, Human
agcuccccucggagaagag

SEQ ID NO: 1511226 - RNA, 15 nt, Human
agcugaaccugggua

SEQ ID NO: 1511227 - RNA, 17 nt, Human
agcugaggcaauucuaa

SEQ ID NO: 1511228 - RNA, 22 nt, Human
agcugguuuuuagcggagacgg

SEQ ID NO: 1511229 - RNA, 18 nt, Human
agcuggucccacucaguc

SEQ ID NO: 1511230 - RNA, 19 nt, Human
agcuggucccacucagucc

SEQ ID NO: 1511231 - RNA, 13 nt, Human
agcugcugacagu

SEQ ID NO: 1511232 - RNA, 14 nt, Human
agcugcugacagug

SEQ ID NO: 1511233 - RNA, 17 nt, Human
agcuggucccacucagu

SEQ ID NO: 1511234 - RNA, 21 nt, Human
agcugcgguccacccaggagc

SEQ ID NO: 1511235 - RNA, 12 nt, Human
agcugcugacag

SEQ ID NO: 1511236 - RNA, 19 nt, Human
agcugcgguccacccagga

SEQ ID NO: 1511237 - RNA, 20 nt, Human
agcugcgguccacccaggag

SEQ ID NO: 1511238 - RNA, 13 nt, Human
agcugcgguccac

SEQ ID NO: 1511239 - RNA, 16 nt, Human
agcugcgguccaccca

SEQ ID NO: 1511240 - RNA, 17 nt, Human
agcugcgguccacccag

SEQ ID NO: 1511241 - RNA, 18 nt, Human
agcugcgguccacccagg

SEQ ID NO: 1511242 - RNA, 21 nt, Human
aggcuaaagcccagagacagc

SEQ ID NO: 1511243 - RNA, 15 nt, Human
agggacccuccacca

SEQ ID NO: 1511244 - RNA, 15 nt, Human
agggacugaggggag

SEQ ID NO: 1511245 - RNA, 18 nt, Human
aggcuuagucacugagac

SEQ ID NO: 1511246 - RNA, 21 nt, Human
aggcuuagucacugagacagc

SEQ ID NO: 1511247 - RNA, 23 nt, Human
aggcuuagggacaggaccccagc

SEQ ID NO: 1511248 - RNA, 20 nt, Human
aggcuguaucccaugagccu

SEQ ID NO: 1511249 - RNA, 21 nt, Human
aggcuguaucccaugagccuc

SEQ ID NO: 1511250 - RNA, 22 nt, Human
aggcuguaucccaugagccuca

SEQ ID NO: 1511251 - RNA, 23 nt, Human
aggcuguaucccaugagccucag

SEQ ID NO: 1511252 - RNA, 17 nt, Human
aggcuuagucacugaga

SEQ ID NO: 1511253 - RNA, 14 nt, Human
aggcuaccuuugua

SEQ ID NO: 1511254 - RNA, 13 nt, Human
aggcuaccuuugu

SEQ ID NO: 1511255 - RNA, 15 nt, Human
aggcuaccuuuguau

SEQ ID NO: 1511256 - RNA, 18 nt, Human
aggcuggguucugauccu

SEQ ID NO: 1511257 - RNA, 14 nt, Human
aggagaggggcaca

SEQ ID NO: 1511258 - RNA, 17 nt, Human
aggcaugugaugagagg

SEQ ID NO: 1511259 - RNA, 15 nt, Human
aggcaugguggccca

SEQ ID NO: 1511260 - RNA, 19 nt, Human
aggcaugugaugagaggaa

SEQ ID NO: 1511261 - RNA, 20 nt, Human
aggcaugugaugagaggaaa

SEQ ID NO: 1511262 - RNA, 21 nt, Human
aggcaugugaugagaggaaau

SEQ ID NO: 1511263 - RNA, 17 nt, Human
aggcauguucucugagg

SEQ ID NO: 1511264 - RNA, 18 nt, Human
aggcauguucucugagga

SEQ ID NO: 1511265 - RNA, 19 nt, Human
aggcauguucucugaggac

SEQ ID NO: 1511266 - RNA, 18 nt, Human
aggcauuccccaggaggc

SEQ ID NO: 1511267 - RNA, 21 nt, Human
aggccaugggcacugugggua

SEQ ID NO: 1511268 - RNA, 23 nt, Human
aggccaugggcacuguggguaga

SEQ ID NO: 1511269 - RNA, 22 nt, Human
aggcccucugcccacucccugc

SEQ ID NO: 1511270 - RNA, 23 nt, Human
aggcccucugcccacucccugca

SEQ ID NO: 1511271 - RNA, 12 nt, Human
aggcccuucucu

SEQ ID NO: 1511272 - RNA, 15 nt, Human
aggcccuucucucca

SEQ ID NO: 1511273 - RNA, 19 nt, Human
aggcccuucucuccagccc

SEQ ID NO: 1511274 - RNA, 19 nt, Human
aggcauuccccaggaggcc

SEQ ID NO: 1511275 - RNA, 20 nt, Human
aggcauuccccaggaggcca

SEQ ID NO: 1511276 - RNA, 13 nt, Human
aggccaggcccuc

SEQ ID NO: 1511277 - RNA, 14 nt, Human
aggccaggcccucu

SEQ ID NO: 1511278 - RNA, 16 nt, Human
aggccaggcccucugc

SEQ ID NO: 1511279 - RNA, 15 nt, Human
aggccaggcccucug

SEQ ID NO: 1511280 - RNA, 14 nt, Human
agggccuggccuga

SEQ ID NO: 1511281 - RNA, 22 nt, Human
aggggcccaaauucuuucagug

SEQ ID NO: 1511282 - RNA, 12 nt, Human
agggucccuggu

SEQ ID NO: 1511283 - RNA, 14 nt, Human
agggucccuggugg

SEQ ID NO: 1511284 - RNA, 21 nt, Human
aggguaucuggugacuuuccu

SEQ ID NO: 1511285 - RNA, 13 nt, Human
aggguauuccaga

SEQ ID NO: 1511286 - RNA, 16 nt, Human
aggguccugcagccug

SEQ ID NO: 1511287 - RNA, 17 nt, Human
aggguccugcagccugc

SEQ ID NO: 1511288 - RNA, 19 nt, Human
aggguccugcagccugcag

SEQ ID NO: 1511289 - RNA, 21 nt, Human
aggguccugcagccugcagga

SEQ ID NO: 1511290 - RNA, 16 nt, Human
agggucccugguggca

SEQ ID NO: 1511291 - RNA, 17 nt, Human
agggucccugguggcag

SEQ ID NO: 1511292 - RNA, 20 nt, Human
agggucccugguggcagcuc

SEQ ID NO: 1511293 - RNA, 22 nt, Human
agggucccugguggcagcucac

SEQ ID NO: 1511294 - RNA, 13 nt, Human
agggacuuagcaa

SEQ ID NO: 1511295 - RNA, 15 nt, Human
agggccugcaaggga

SEQ ID NO: 1511296 - RNA, 12 nt, Human
agggccuggccu

SEQ ID NO: 1511297 - RNA, 13 nt, Human
agggccuggccug

SEQ ID NO: 1511298 - RNA, 14 nt, Human
agggccugcaaggg

SEQ ID NO: 1511299 - RNA, 20 nt, Human
agggauuagggagagaagau

SEQ ID NO: 1511300 - RNA, 15 nt, Human
agggauuagggagag

SEQ ID NO: 1511301 - RNA, 22 nt, Human
aggguuuugccauguuggccag

SEQ ID NO: 1511302 - RNA, 23 nt, Human
aggguuuugccauguuggccagg

SEQ ID NO: 1511303 - RNA, 13 nt, Human
agguacucuccug

SEQ ID NO: 1511304 - RNA, 14 nt, Human
agguacucuccugg

SEQ ID NO: 1511305 - RNA, 16 nt, Human
agguaacaggcagaua

SEQ ID NO: 1511306 - RNA, 13 nt, Human
agguaacaggcag

SEQ ID NO: 1511307 - RNA, 14 nt, Human
agguaacaggcaga

SEQ ID NO: 1511308 - RNA, 20 nt, Human
agggucucacuauguugccc

SEQ ID NO: 1511309 - RNA, 18 nt, Human
augcacaaacagaggccg

SEQ ID NO: 1511310 - RNA, 23 nt, Human
augaugaaaugaggucagagccu

SEQ ID NO: 1511311 - RNA, 18 nt, Human
augaugaaaugaggucag

SEQ ID NO: 1511312 - RNA, 15 nt, Human
augaucuuuucaagu

SEQ ID NO: 1511313 - RNA, 15 nt, Human
augaugauccuaggc

SEQ ID NO: 1511314 - RNA, 18 nt, Human
augaugaucuuuaaaaua

SEQ ID NO: 1511315 - RNA, 21 nt, Human
augaugaucuuuaaaauacac

SEQ ID NO: 1511316 - RNA, 17 nt, Human
augaucuuugcagacag

SEQ ID NO: 1511317 - RNA, 16 nt, Human
augaucuuuaaaauac

SEQ ID NO: 1511318 - RNA, 18 nt, Human
augaucuuugcagacagg

SEQ ID NO: 1511319 - RNA, 19 nt, Human
augaucuuugcagacaggc

SEQ ID NO: 1511320 - RNA, 21 nt, Human
augaucuuugcagacaggcaa

SEQ ID NO: 1511321 - RNA, 19 nt, Human
augccuggauggggcugca

SEQ ID NO: 1511322 - RNA, 20 nt, Human
augccuggauggggcugcac

SEQ ID NO: 1511323 - RNA, 23 nt, Human
augcacagaguuguuacauuuuu

SEQ ID NO: 1511324 - RNA, 22 nt, Human
augcacagaguuguuacauuuu

SEQ ID NO: 1511325 - RNA, 21 nt, Human
augcacagaguuguuacauuu

SEQ ID NO: 1511326 - RNA, 19 nt, Human
augcacagaguuguuacau

SEQ ID NO: 1511327 - RNA, 15 nt, Human
augcacacauuuuuu

SEQ ID NO: 1511328 - RNA, 14 nt, Human
augcacacauuuuu

SEQ ID NO: 1511329 - RNA, 13 nt, Human
augcacacauuuu

SEQ ID NO: 1511330 - RNA, 16 nt, Human
augcuuguacauaaug

SEQ ID NO: 1511331 - RNA, 18 nt, Human
auggcuuuugugcauuau

SEQ ID NO: 1511332 - RNA, 17 nt, Human
auggcuuuugugcauua

SEQ ID NO: 1511333 - RNA, 16 nt, Human
auggcuuuugugcauu

SEQ ID NO: 1511334 - RNA, 16 nt, Human
augcugcccugugagu

SEQ ID NO: 1511335 - RNA, 13 nt, Human
augcugcccugug

SEQ ID NO: 1511336 - RNA, 14 nt, Human
augcugcccuguga

SEQ ID NO: 1511337 - RNA, 15 nt, Human
augcugcccugugag

SEQ ID NO: 1511338 - RNA, 17 nt, Human
auguguaagacaaaaag

SEQ ID NO: 1511339 - RNA, 15 nt, Human
auguguaaaauguga

SEQ ID NO: 1511340 - RNA, 19 nt, Human
auguguaagacaaaaagcu

SEQ ID NO: 1511341 - RNA, 15 nt, Human
auguuccuagugaaa

SEQ ID NO: 1511342 - RNA, 16 nt, Human
auguuccuagugaaag

SEQ ID NO: 1511343 - RNA, 13 nt, Human
auguguaaguauu

SEQ ID NO: 1511344 - RNA, 14 nt, Human
auguguaaguauuc

SEQ ID NO: 1511345 - RNA, 15 nt, Human
auguucugggacaca

SEQ ID NO: 1511346 - RNA, 17 nt, Human
auguucucugaggacac

SEQ ID NO: 1511347 - RNA, 14 nt, Human
auguucugggacac

SEQ ID NO: 1511348 - RNA, 17 nt, Human
auguucucucuucucca

SEQ ID NO: 1511349 - RNA, 13 nt, Human
auguucucugagg

SEQ ID NO: 1511350 - RNA, 17 nt, Human
auguuccuagugaaaga

SEQ ID NO: 1511351 - RNA, 14 nt, Human
auguucuuaauucu

SEQ ID NO: 1511352 - RNA, 15 nt, Human
auguuugccucugcc

SEQ ID NO: 1511353 - RNA, 17 nt, Human
auguuugccucugccuc

SEQ ID NO: 1511354 - RNA, 15 nt, Human
augugaacacaucag

SEQ ID NO: 1511355 - RNA, 14 nt, Human
augucacaggcagg

SEQ ID NO: 1511356 - RNA, 19 nt, Human
augucacaggcagguccag

SEQ ID NO: 1511357 - RNA, 21 nt, Human
augucaaucagccuaguugau

SEQ ID NO: 1511358 - RNA, 13 nt, Human
augucacaggcag

SEQ ID NO: 1511359 - RNA, 21 nt, Human
augggugcuuggaggaaggaa

SEQ ID NO: 1511360 - RNA, 23 nt, Human
augggugcuuggaggaaggaaac

SEQ ID NO: 1511361 - RNA, 19 nt, Human
auccucaguuuuugugaaa

SEQ ID NO: 1511362 - RNA, 19 nt, Human
aucccaugagccucagcau

SEQ ID NO: 1511363 - RNA, 19 nt, Human
auccagacccggcugcgug

SEQ ID NO: 1511364 - RNA, 17 nt, Human
auccucauacccacccc

SEQ ID NO: 1511365 - RNA, 20 nt, Human
aucaaagagguuuuaaaaaa

SEQ ID NO: 1511366 - RNA, 23 nt, Human
aucaaagagguuuuaaaaaaauc

SEQ ID NO: 1511367 - RNA, 23 nt, Human
aucacccgcuaagagggagggag

SEQ ID NO: 1511368 - RNA, 13 nt, Human
aucaccagacagg

SEQ ID NO: 1511369 - RNA, 14 nt, Human
aucaaauaugcaaa

SEQ ID NO: 1511370 - RNA, 15 nt, Human
aucaaauaugcaaag

SEQ ID NO: 1511371 - RNA, 13 nt, Human
aucacagccucug

SEQ ID NO: 1511372 - RNA, 13 nt, Human
aucagcuuauugu

SEQ ID NO: 1511373 - RNA, 22 nt, Human
aucagcuugcccuguuaaaaga

SEQ ID NO: 1511374 - RNA, 17 nt, Human
aucaugaauuaguuuua

SEQ ID NO: 1511375 - RNA, 14 nt, Human
aucaugucuggcua

SEQ ID NO: 1511376 - RNA, 19 nt, Human
aucuaguaugaaauuauau

SEQ ID NO: 1511377 - RNA, 15 nt, Human
aucuaguaugaaauu

SEQ ID NO: 1511378 - RNA, 16 nt, Human
aucuaguaugaaauua

SEQ ID NO: 1511379 - RNA, 17 nt, Human
aucuaguaugaaauuau

SEQ ID NO: 1511380 - RNA, 18 nt, Human
aucuaguaugaaauuaua

SEQ ID NO: 1511381 - RNA, 14 nt, Human
aucuaguaugaaau

SEQ ID NO: 1511382 - RNA, 14 nt, Human
aucuauauuuuaca

SEQ ID NO: 1511383 - RNA, 20 nt, Human
aucuccgucaacucauauuu

SEQ ID NO: 1511384 - RNA, 17 nt, Human
aucuggguucacugcaa

SEQ ID NO: 1511385 - RNA, 20 nt, Human
augaaguccaagcauuuaga

SEQ ID NO: 1511386 - RNA, 23 nt, Human
augaaguccaagcauuuagaugu

SEQ ID NO: 1511387 - RNA, 21 nt, Human
augaaguacucauacauguua

SEQ ID NO: 1511388 - RNA, 20 nt, Human
augaaaaugcaacaacaugu

SEQ ID NO: 1511389 - RNA, 22 nt, Human
augaggcauuuguuugaacuga

SEQ ID NO: 1511390 - RNA, 21 nt, Human
augaggcauuuguuugaacug

SEQ ID NO: 1511391 - RNA, 14 nt, Human
augaggcauuuguu

SEQ ID NO: 1511392 - RNA, 13 nt, Human
augaggcauuugu

SEQ ID NO: 1511393 - RNA, 15 nt, Human
augaaaacacauuuu

SEQ ID NO: 1511394 - RNA, 14 nt, Human
augaaaacacauuu

SEQ ID NO: 1511395 - RNA, 16 nt, Human
augaaaacacauuuuu

SEQ ID NO: 1511396 - RNA, 20 nt, Human
agugaauucuugaaggaaaa

SEQ ID NO: 1511397 - RNA, 19 nt, Human
aguccucuuuucugagagg

SEQ ID NO: 1511398 - RNA, 11 nt, Human
aguccaagcau

SEQ ID NO: 1511399 - RNA, 22 nt, Human
aguccucuuuucugagaggacu

SEQ ID NO: 1511400 - RNA, 20 nt, Human
aguccuuaccagcagagcac

SEQ ID NO: 1511401 - RNA, 17 nt, Human
aguauuuuguuucagug

SEQ ID NO: 1511402 - RNA, 13 nt, Human
aguauuuuugaca

SEQ ID NO: 1511403 - RNA, 14 nt, Human
aguauuuuguuuca

SEQ ID NO: 1511404 - RNA, 23 nt, Human
aguaugaggcauuuguuugaacu

SEQ ID NO: 1511405 - RNA, 18 nt, Human
aguauuuuugacagaaua

SEQ ID NO: 1511406 - RNA, 16 nt, Human
aguauuuuugacagaa

SEQ ID NO: 1511407 - RNA, 17 nt, Human
aguauuuuugacagaau

SEQ ID NO: 1511408 - RNA, 21 nt, Human
aguaugaggcauuuguuugaa

SEQ ID NO: 1511409 - RNA, 20 nt, Human
aguaugaggcauuuguuuga

SEQ ID NO: 1511410 - RNA, 15 nt, Human
aguaucucagggccu

SEQ ID NO: 1511411 - RNA, 23 nt, Human
agucacacaguauuacuucugcu

SEQ ID NO: 1511412 - RNA, 22 nt, Human
agucacacaguauuacuucugc

SEQ ID NO: 1511413 - RNA, 17 nt, Human
aguacuucuccacccug

SEQ ID NO: 1511414 - RNA, 19 nt, Human
aguacuucuccacccugcu

SEQ ID NO: 1511415 - RNA, 12 nt, Human
aguacuucuuuu

SEQ ID NO: 1511416 - RNA, 13 nt, Human
aguacucauacau

SEQ ID NO: 1511417 - RNA, 12 nt, Human
aguacuauguau

SEQ ID NO: 1511418 - RNA, 14 nt, Human
aguacuauguauca

SEQ ID NO: 1511419 - RNA, 20 nt, Human
aguaagccgugauuuucauu

SEQ ID NO: 1511420 - RNA, 14 nt, Human
aguacuauaauuua

SEQ ID NO: 1511421 - RNA, 19 nt, Human
aguacuacaguccucccau

SEQ ID NO: 1511422 - RNA, 22 nt, Human
aguacuacaguccucccaucuc

SEQ ID NO: 1511423 - RNA, 18 nt, Human
aguacguugugcauuugg

SEQ ID NO: 1511424 - RNA, 17 nt, Human
aguacguugugcauuug

SEQ ID NO: 1511425 - RNA, 16 nt, Human
aguacguugugcauuu

SEQ ID NO: 1511426 - RNA, 15 nt, Human
aguacguugugcauu

SEQ ID NO: 1511427 - RNA, 16 nt, Human
aggucuguucuuucca

SEQ ID NO: 1511428 - RNA, 15 nt, Human
aggucuguucuuucc

SEQ ID NO: 1511429 - RNA, 13 nt, Human
aggucuguucuuu

SEQ ID NO: 1511430 - RNA, 18 nt, Human
aguaaaugggggugcauu

SEQ ID NO: 1511431 - RNA, 19 nt, Human
aguaacaaugaagauaaaa

SEQ ID NO: 1511432 - RNA, 23 nt, Human
aguaaaugcuagguuaauuccaa

SEQ ID NO: 1511433 - RNA, 11 nt, Human
aguaaaugcua

SEQ ID NO: 1511434 - RNA, 22 nt, Human
aguaaaugcuagguuaauucca

SEQ ID NO: 1511435 - RNA, 16 nt, Human
agugccuuauggaaca

SEQ ID NO: 1511436 - RNA, 18 nt, Human
agugccuuauggaacacu

SEQ ID NO: 1511437 - RNA, 10 nt, Human
agugccuuau

SEQ ID NO: 1511438 - RNA, 13 nt, Human
agugccuuaugga

SEQ ID NO: 1511439 - RNA, 14 nt, Human
agugccuuauggaa

SEQ ID NO: 1511440 - RNA, 15 nt, Human
agugccuuauggaac

SEQ ID NO: 1511441 - RNA, 14 nt, Human
agugauucuccugc

SEQ ID NO: 1511442 - RNA, 15 nt, Human
agugauucuccugcc

SEQ ID NO: 1511443 - RNA, 17 nt, Human
agugauucuccugccuc

SEQ ID NO: 1511444 - RNA, 18 nt, Human
agugccuuacacaauggu

SEQ ID NO: 1511445 - RNA, 14 nt, Human
agugauccucccac

SEQ ID NO: 1511446 - RNA, 15 nt, Human
agugauccucccacc

SEQ ID NO: 1511447 - RNA, 18 nt, Human
agugauccucccaccuca

SEQ ID NO: 1511448 - RNA, 19 nt, Human
agugauccucccaccucag

SEQ ID NO: 1511449 - RNA, 24 nt, Human
agugauccucccaccucagccucc

SEQ ID NO: 1511450 - RNA, 17 nt, Human
aguggcuuuaaugaaua

SEQ ID NO: 1511451 - RNA, 18 nt, Human
aguggccuuccccagcau

SEQ ID NO: 1511452 - RNA, 17 nt, Human
aguggccuuccccagca

SEQ ID NO: 1511453 - RNA, 19 nt, Human
agugucaaugcagccccca

SEQ ID NO: 1511454 - RNA, 22 nt, Human
agugggcccaaugcacuuuguu

SEQ ID NO: 1511455 - RNA, 22 nt, Human
aguugacuugacagaacacugu

SEQ ID NO: 1511456 - RNA, 21 nt, Human
aguugaaaagacuccaaagaa

SEQ ID NO: 1511457 - RNA, 22 nt, Human
aguucaucuugaauuguaagga

SEQ ID NO: 1511458 - RNA, 18 nt, Human
aguugaaaagacuccaaa

SEQ ID NO: 1511459 - RNA, 19 nt, Human
aguugaaaagacuccaaag

SEQ ID NO: 1511460 - RNA, 20 nt, Human
aguugaaaagacuccaaaga

SEQ ID NO: 1511461 - RNA, 14 nt, Human
aguugauagcacag

SEQ ID NO: 1511462 - RNA, 23 nt, Human
aguugauacuugaauaaccaucu

SEQ ID NO: 1511463 - RNA, 16 nt, Human
aguugauacuacaguu

SEQ ID NO: 1511464 - RNA, 18 nt, Human
aguucagguaacaggcag

SEQ ID NO: 1511465 - RNA, 13 nt, Human
aguucaucuugaa

SEQ ID NO: 1511466 - RNA, 15 nt, Human
aguucaucuugaauu

SEQ ID NO: 1511467 - RNA, 19 nt, Human
aguucaucuugaauuguaa

SEQ ID NO: 1511468 - RNA, 24 nt, Human
auagguuuggacaaaauggaauac

SEQ ID NO: 1511469 - RNA, 15 nt, Human
auagccuaggugaca

SEQ ID NO: 1511470 - RNA, 17 nt, Human
auagccuaggugacaga

SEQ ID NO: 1511471 - RNA, 17 nt, Human
auagcacagacccugcc

SEQ ID NO: 1511472 - RNA, 18 nt, Human
auagcacagacccugccc

SEQ ID NO: 1511473 - RNA, 18 nt, Human
auagcagcuuauucacaa

SEQ ID NO: 1511474 - RNA, 15 nt, Human
auagcagcuuauuca

SEQ ID NO: 1511475 - RNA, 18 nt, Human
auauauuuuuuucugaaa

SEQ ID NO: 1511476 - RNA, 14 nt, Human
auauuauguuaaaa

SEQ ID NO: 1511477 - RNA, 16 nt, Human
auauuauguuaaaacu

SEQ ID NO: 1511478 - RNA, 19 nt, Human
auauucaggaagcucaggg

SEQ ID NO: 1511479 - RNA, 13 nt, Human
auauuauguuaaa

SEQ ID NO: 1511480 - RNA, 17 nt, Human
auauuauguguuuccau

SEQ ID NO: 1511481 - RNA, 20 nt, Human
auaugcucugcauguuacau

SEQ ID NO: 1511482 - RNA, 17 nt, Human
auaugcucugcauguua

SEQ ID NO: 1511483 - RNA, 13 nt, Human
auacagaaaaguu

SEQ ID NO: 1511484 - RNA, 17 nt, Human
auacccagaaaguuauu

SEQ ID NO: 1511485 - RNA, 17 nt, Human
auacccacccccaccca

SEQ ID NO: 1511486 - RNA, 13 nt, Human
auacccaccccca

SEQ ID NO: 1511487 - RNA, 14 nt, Human
auacccacccccac

SEQ ID NO: 1511488 - RNA, 16 nt, Human
auacccacccccaccc

SEQ ID NO: 1511489 - RNA, 18 nt, Human
auaauguuucaaacauau

SEQ ID NO: 1511490 - RNA, 17 nt, Human
auacaaugcugugcccu

SEQ ID NO: 1511491 - RNA, 14 nt, Human
auacaaugcugugc

SEQ ID NO: 1511492 - RNA, 13 nt, Human
auacacuuacacu

SEQ ID NO: 1511493 - RNA, 22 nt, Human
auacacuuacacuuuaugcaca

SEQ ID NO: 1511494 - RNA, 14 nt, Human
auaccugucccccu

SEQ ID NO: 1511495 - RNA, 15 nt, Human
auaccugucccccug

SEQ ID NO: 1511496 - RNA, 16 nt, Human
auaccugucccccuga

SEQ ID NO: 1511497 - RNA, 17 nt, Human
auaccugucccccugac

SEQ ID NO: 1511498 - RNA, 18 nt, Human
auaaggguaucuggugac

SEQ ID NO: 1511499 - RNA, 13 nt, Human
auaauguuucaaa

SEQ ID NO: 1511500 - RNA, 19 nt, Human
auaauguaaacaauaucag

SEQ ID NO: 1511501 - RNA, 14 nt, Human
auaauguaagcucu

SEQ ID NO: 1511502 - RNA, 21 nt, Human
auaagccagacaucaacagau

SEQ ID NO: 1511503 - RNA, 22 nt, Human
auaagccagacaucaacagaua

SEQ ID NO: 1511504 - RNA, 22 nt, Human
auaaaaagccugcaauuucaua

SEQ ID NO: 1511505 - RNA, 20 nt, Human
auaaaaagccugcaauuuca

SEQ ID NO: 1511506 - RNA, 23 nt, Human
aguuugauuaaauucuugcaaag

SEQ ID NO: 1511507 - RNA, 22 nt, Human
aguuguuacauuuuuaagugcu

SEQ ID NO: 1511508 - RNA, 20 nt, Human
aguuguuacauuuuuaagug

SEQ ID NO: 1511509 - RNA, 22 nt, Human
aguuugauuaaauucuugcaaa

SEQ ID NO: 1511510 - RNA, 20 nt, Human
aguuugauuaaauucuugca

SEQ ID NO: 1511511 - RNA, 18 nt, Human
aguuugauuaaauucuug

SEQ ID NO: 1511512 - RNA, 17 nt, Human
aguuugauuaaauucuu

SEQ ID NO: 1511513 - RNA, 20 nt, Human
aguuugagaucagccugggc

SEQ ID NO: 1511514 - RNA, 18 nt, Human
aguuugagaucagccugg

SEQ ID NO: 1511515 - RNA, 19 nt, Human
aguuugagaucagccuggg

SEQ ID NO: 1511516 - RNA, 14 nt, Human
auaacaaugaaagu

SEQ ID NO: 1511517 - RNA, 15 nt, Human
auaacaaugcuguau

SEQ ID NO: 1511518 - RNA, 17 nt, Human
auaacaaugcuguauuu

SEQ ID NO: 1511519 - RNA, 19 nt, Human
auaacaaugcuguauuuua

SEQ ID NO: 1511520 - RNA, 20 nt, Human
auaacaaugcuguauuuuaa

SEQ ID NO: 1511521 - RNA, 21 nt, Human
auaacaaugcuguauuuuaaa

SEQ ID NO: 1511522 - RNA, 12 nt, Human
auaacauguaau

SEQ ID NO: 1511523 - RNA, 13 nt, Human
auaacauguaauu

SEQ ID NO: 1511524 - RNA, 18 nt, Human
auaacauguaauuaagua

SEQ ID NO: 1511525 - RNA, 20 nt, Human
auaacauguaauuaaguacu

SEQ ID NO: 1511526 - RNA, 20 nt, Human
caaggaaaaaauaacaauga

SEQ ID NO: 1511527 - RNA, 18 nt, Human
caaggaaaaaauaacaau

SEQ ID NO: 1511528 - RNA, 22 nt, Human
caagcuggucccacucagucca

SEQ ID NO: 1511529 - RNA, 23 nt, Human
caagcuggucccacucaguccau

SEQ ID NO: 1511530 - RNA, 16 nt, Human
caaggagauuuacaac

SEQ ID NO: 1511531 - RNA, 18 nt, Human
caaggauccugagccaga

SEQ ID NO: 1511532 - RNA, 19 nt, Human
caaggauccugagccagau

SEQ ID NO: 1511533 - RNA, 22 nt, Human
caaggauccugagccagauuuc

SEQ ID NO: 1511534 - RNA, 20 nt, Human
caaggauccugagccagauu

SEQ ID NO: 1511535 - RNA, 17 nt, Human
caaggcugcagugagcc

SEQ ID NO: 1511536 - RNA, 22 nt, Human
caaggcugcagugagccgagau

SEQ ID NO: 1511537 - RNA, 19 nt, Human
caagagucgcugugccaca

SEQ ID NO: 1511538 - RNA, 22 nt, Human
caagagucgcugugccacaggc

SEQ ID NO: 1511539 - RNA, 22 nt, Human
caagcugcacccucaggcaggu

SEQ ID NO: 1511540 - RNA, 21 nt, Human
caagcuggucccacucagucc

SEQ ID NO: 1511541 - RNA, 15 nt, Human
caagcgauucuucug

SEQ ID NO: 1511542 - RNA, 17 nt, Human
caagcgauucuucugcu

SEQ ID NO: 1511543 - RNA, 18 nt, Human
caagcgauucuucugcuu

SEQ ID NO: 1511544 - RNA, 21 nt, Human
caagcugcacccucaggcagg

SEQ ID NO: 1511545 - RNA, 23 nt, Human
caagggugaugggaaagcauugu

SEQ ID NO: 1511546 - RNA, 21 nt, Human
caagggugaugggaaagcauu

SEQ ID NO: 1511547 - RNA, 18 nt, Human
caaggcugggggaagaag

SEQ ID NO: 1511548 - RNA, 19 nt, Human
caauaauaaauauuuuugc

SEQ ID NO: 1511549 - RNA, 17 nt, Human
caauagucaaauugugu

SEQ ID NO: 1511550 - RNA, 19 nt, Human
caauagucaaauuguguga

SEQ ID NO: 1511551 - RNA, 15 nt, Human
caauaggaaaaacug

SEQ ID NO: 1511552 - RNA, 16 nt, Human
caauaggaaaaacuga

SEQ ID NO: 1511553 - RNA, 17 nt, Human
caauaggaaaaacugau

SEQ ID NO: 1511554 - RNA, 18 nt, Human
caauaggaaaaacugauu

SEQ ID NO: 1511555 - RNA, 17 nt, Human
cacaaagguagcuuuuc

SEQ ID NO: 1511556 - RNA, 20 nt, Human
cacaagaaaugaaagcaggg

SEQ ID NO: 1511557 - RNA, 21 nt, Human
cacaagaaaugaaagcaggga

SEQ ID NO: 1511558 - RNA, 13 nt, Human
cacaaaggagagc

SEQ ID NO: 1511559 - RNA, 17 nt, Human
cacacacgcgugcacac

SEQ ID NO: 1511560 - RNA, 22 nt, Human
caaugugacuuaaugccacuaa

SEQ ID NO: 1511561 - RNA, 22 nt, Human
caaugugaaaagaaaaaugagc

SEQ ID NO: 1511562 - RNA, 21 nt, Human
caauaucuuuuuuuuaauaaa

SEQ ID NO: 1511563 - RNA, 22 nt, Human
caauuuuucuuauuucauuucu

SEQ ID NO: 1511564 - RNA, 13 nt, Human
cacaaacagaggc

SEQ ID NO: 1511565 - RNA, 15 nt, Human
cacaaacagaggccg

SEQ ID NO: 1511566 - RNA, 14 nt, Human
cacaaacagaggcc

SEQ ID NO: 1511567 - RNA, 18 nt, Human
caauuacaggaaguacug

SEQ ID NO: 1511568 - RNA, 17 nt, Human
cacagccagacuggcac

SEQ ID NO: 1511569 - RNA, 18 nt, Human
cacagccagacuggcaca

SEQ ID NO: 1511570 - RNA, 21 nt, Human
cacagcaguugaaaagacucc

SEQ ID NO: 1511571 - RNA, 22 nt, Human
cacagcaguugaaaagacucca

SEQ ID NO: 1511572 - RNA, 19 nt, Human
cacagcaguugaaaagacu

SEQ ID NO: 1511573 - RNA, 13 nt, Human
cacacugaagaag

SEQ ID NO: 1511574 - RNA, 14 nt, Human
cacacugaagaagc

SEQ ID NO: 1511575 - RNA, 19 nt, Human
cacagagaaaguacuucuc

SEQ ID NO: 1511576 - RNA, 20 nt, Human
cacagagaaaguacuucucc

SEQ ID NO: 1511577 - RNA, 21 nt, Human
cacagagaaaguacuucucca

SEQ ID NO: 1511578 - RNA, 22 nt, Human
cacagaguuguuacauuuuuaa

SEQ ID NO: 1511579 - RNA, 13 nt, Human
cacagaggcugcc

SEQ ID NO: 1511580 - RNA, 20 nt, Human
caacauacucccaucuguga

SEQ ID NO: 1511581 - RNA, 20 nt, Human
caaccuggggggcaguggug

SEQ ID NO: 1511582 - RNA, 12 nt, Human
caacaggcuggg

SEQ ID NO: 1511583 - RNA, 17 nt, Human
caacauacucccaucug

SEQ ID NO: 1511584 - RNA, 19 nt, Human
caacauacucccaucugug

SEQ ID NO: 1511585 - RNA, 22 nt, Human
caaauuucuaaaucuccaaaau

SEQ ID NO: 1511586 - RNA, 15 nt, Human
caaauuucuaaaucu

SEQ ID NO: 1511587 - RNA, 14 nt, Human
caaauaugcaaagc

SEQ ID NO: 1511588 - RNA, 13 nt, Human
caaauaugcaaag

SEQ ID NO: 1511589 - RNA, 12 nt, Human
caaauaugcaaa

SEQ ID NO: 1511590 - RNA, 23 nt, Human
caaauggaaaugggcagagcaga

SEQ ID NO: 1511591 - RNA, 20 nt, Human
caaauguucaucaaugaaug

SEQ ID NO: 1511592 - RNA, 18 nt, Human
caaauguucaucaaugaa

SEQ ID NO: 1511593 - RNA, 14 nt, Human
caaauguucaucaa

SEQ ID NO: 1511594 - RNA, 16 nt, Human
caaagagagaaaauaa

SEQ ID NO: 1511595 - RNA, 19 nt, Human
caaagaaggaaaaggcagg

SEQ ID NO: 1511596 - RNA, 19 nt, Human
caaagagagaaaauaaaga

SEQ ID NO: 1511597 - RNA, 19 nt, Human
caaagugcugggauuacaa

SEQ ID NO: 1511598 - RNA, 23 nt, Human
caaagugcugggauuacaagcgu

SEQ ID NO: 1511599 - RNA, 16 nt, Human
caaauaaaaauauugu

SEQ ID NO: 1511600 - RNA, 18 nt, Human
caaauaaaaauauugugu

SEQ ID NO: 1511601 - RNA, 21 nt, Human
caagaccuucuccuucaccuu

SEQ ID NO: 1511602 - RNA, 23 nt, Human
caagaccuucuccuucaccuuug

SEQ ID NO: 1511603 - RNA, 13 nt, Human
caagacgcugugc

SEQ ID NO: 1511604 - RNA, 15 nt, Human
caagacgcugugcug

SEQ ID NO: 1511605 - RNA, 12 nt, Human
caagagcugagg

SEQ ID NO: 1511606 - RNA, 13 nt, Human
caagagcccaggc

SEQ ID NO: 1511607 - RNA, 14 nt, Human
caagaagcccagga

SEQ ID NO: 1511608 - RNA, 13 nt, Human
caagaagcccagg

SEQ ID NO: 1511609 - RNA, 17 nt, Human
caagaaaugaaagcagg

SEQ ID NO: 1511610 - RNA, 19 nt, Human
caagaaaugaaagcaggga

SEQ ID NO: 1511611 - RNA, 21 nt, Human
caaaaucgaugcagugcuucc

SEQ ID NO: 1511612 - RNA, 20 nt, Human
caaaauaaaacuuuuuaaaa

SEQ ID NO: 1511613 - RNA, 16 nt, Human
caaaauaaaacuuuuu

SEQ ID NO: 1511614 - RNA, 18 nt, Human
caaaauaauuuuaagaaa

SEQ ID NO: 1511615 - RNA, 22 nt, Human
caaaauaauuuuaagaaaucaa

SEQ ID NO: 1511616 - RNA, 14 nt, Human
caaaaguuucucuu

SEQ ID NO: 1511617 - RNA, 19 nt, Human
caaaacucuccucugcugc

SEQ ID NO: 1511618 - RNA, 14 nt, Human
caaaacugcacugu

SEQ ID NO: 1511619 - RNA, 17 nt, Human
caaaacugcacugucaa

SEQ ID NO: 1511620 - RNA, 18 nt, Human
caaaacugcacugucaag

SEQ ID NO: 1511621 - RNA, 18 nt, Human
auuuuauuuuauuaugca

SEQ ID NO: 1511622 - RNA, 15 nt, Human
caaaacgguuuuacu

SEQ ID NO: 1511623 - RNA, 21 nt, Human
caaaacgguuuuacugcagcu

SEQ ID NO: 1511624 - RNA, 15 nt, Human
caaaacucuccucug

SEQ ID NO: 1511625 - RNA, 16 nt, Human
caaaacucuccucugc

SEQ ID NO: 1511626 - RNA, 17 nt, Human
caaacugacucuuaaga

SEQ ID NO: 1511627 - RNA, 21 nt, Human
caaacugacucuuaagaagac

SEQ ID NO: 1511628 - RNA, 16 nt, Human
caaacugacucuuaag

SEQ ID NO: 1511629 - RNA, 21 nt, Human
caaacucuugaccucagguga

SEQ ID NO: 1511630 - RNA, 17 nt, Human
caaacucuugaccucag

SEQ ID NO: 1511631 - RNA, 19 nt, Human
caaacucuugaccucaggu

SEQ ID NO: 1511632 - RNA, 20 nt, Human
caaacucuugaccucaggug

SEQ ID NO: 1511633 - RNA, 13 nt, Human
caaacagaggccg

SEQ ID NO: 1511634 - RNA, 15 nt, Human
caaacagaggccgcc

SEQ ID NO: 1511635 - RNA, 14 nt, Human
caaacaaaauuucu

SEQ ID NO: 1511636 - RNA, 15 nt, Human
caaacaaaauuucua

SEQ ID NO: 1511637 - RNA, 18 nt, Human
caaacaaaauuucuauua

SEQ ID NO: 1511638 - RNA, 11 nt, Human
caaaaugaaac

SEQ ID NO: 1511639 - RNA, 22 nt, Human
caaaaugaaacgcaaccaccac

SEQ ID NO: 1511640 - RNA, 14 nt, Human
caaaauuucuauua

SEQ ID NO: 1511641 - RNA, 13 nt, Human
caacaggcugggc

SEQ ID NO: 1511642 - RNA, 17 nt, Human
cacaguucaauucucau

SEQ ID NO: 1511643 - RNA, 21 nt, Human
ugugugaaagguacuucaaau

SEQ ID NO: 1511644 - RNA, 22 nt, Human
ugugugaaagguacuucaaauc

SEQ ID NO: 1511645 - RNA, 19 nt, Human
ugugugcacguacacacac

SEQ ID NO: 1511646 - RNA, 13 nt, Human
uguguuuugcaag

SEQ ID NO: 1511647 - RNA, 19 nt, Human
uguguuuugcaagccagau

SEQ ID NO: 1511648 - RNA, 13 nt, Human
uguguuugaagca

SEQ ID NO: 1511649 - RNA, 16 nt, Human
uguguuuauugucaaa

SEQ ID NO: 1511650 - RNA, 14 nt, Human
uguucagcuccagc

SEQ ID NO: 1511651 - RNA, 12 nt, Human
uguucauacaua

SEQ ID NO: 1511652 - RNA, 14 nt, Human
uguucauacauauu

SEQ ID NO: 1511653 - RNA, 23 nt, Human
uguucauacauauuuuuguagca

SEQ ID NO: 1511654 - RNA, 20 nt, Human
uguucagcuccagcucacca

SEQ ID NO: 1511655 - RNA, 21 nt, Human
uguucagcuccagcucaccag

SEQ ID NO: 1511656 - RNA, 22 nt, Human
uguucagcuccagcucaccagc

SEQ ID NO: 1511657 - RNA, 14 nt, Human
uguuagugcaaauu

SEQ ID NO: 1511658 - RNA, 20 nt, Human
uguuaguaugaggcauuugu

SEQ ID NO: 1511659 - RNA, 19 nt, Human
uguuaguaugaggcauuug

SEQ ID NO: 1511660 - RNA, 17 nt, Human
uguuaguaugaggcauu

SEQ ID NO: 1511661 - RNA, 14 nt, Human
uguuacuaaguuuu

SEQ ID NO: 1511662 - RNA, 21 nt, Human
uguuaaaagaugaaaauauuu

SEQ ID NO: 1511663 - RNA, 20 nt, Human
uguugacaugggacauuugc

SEQ ID NO: 1511664 - RNA, 14 nt, Human
uguugacaugugcu

SEQ ID NO: 1511665 - RNA, 23 nt, Human
uguucuuucuggcuaugcauuug

SEQ ID NO: 1511666 - RNA, 12 nt, Human
uguucugggaca

SEQ ID NO: 1511667 - RNA, 21 nt, Human
uguucuggcucuuccaggcug

SEQ ID NO: 1511668 - RNA, 17 nt, Human
uguucuggcucuuccag

SEQ ID NO: 1511669 - RNA, 20 nt, Human
uguucuggcucuuccaggcu

SEQ ID NO: 1511670 - RNA, 13 nt, Human
uguucaugaaaga

SEQ ID NO: 1511671 - RNA, 14 nt, Human
uguucaugaaagau

SEQ ID NO: 1511672 - RNA, 19 nt, Human
uguucaucauccuaagcua

SEQ ID NO: 1511673 - RNA, 15 nt, Human
uguucucucuucucc

SEQ ID NO: 1511674 - RNA, 16 nt, Human
uguucucucuucucca

SEQ ID NO: 1511675 - RNA, 13 nt, Human
uguucucugcccu

SEQ ID NO: 1511676 - RNA, 14 nt, Human
uguucucugcccuc

SEQ ID NO: 1511677 - RNA, 15 nt, Human
uguucucugcccucc

SEQ ID NO: 1511678 - RNA, 16 nt, Human
uguucucugcccucca

SEQ ID NO: 1511679 - RNA, 13 nt, Human
uguucucugagga

SEQ ID NO: 1511680 - RNA, 12 nt, Human
uguucuggcucu

SEQ ID NO: 1511681 - RNA, 13 nt, Human
uguucuggcucuu

SEQ ID NO: 1511682 - RNA, 16 nt, Human
uguucuggcucuucca

SEQ ID NO: 1511683 - RNA, 19 nt, Human
uguuggcugggggccucag

SEQ ID NO: 1511684 - RNA, 17 nt, Human
uguuuaaaaucauuucu

SEQ ID NO: 1511685 - RNA, 18 nt, Human
uguuuaaaaucauuucug

SEQ ID NO: 1511686 - RNA, 17 nt, Human
uguuggcugggggccuc

SEQ ID NO: 1511687 - RNA, 14 nt, Human
uguuggagaagaac

SEQ ID NO: 1511688 - RNA, 16 nt, Human
uguuggagaagaacug

SEQ ID NO: 1511689 - RNA, 17 nt, Human
uguuggagaagaacuga

SEQ ID NO: 1511690 - RNA, 19 nt, Human
uguuggagaagaacugaaa

SEQ ID NO: 1511691 - RNA, 20 nt, Human
uguuggagaagaacugaaau

SEQ ID NO: 1511692 - RNA, 15 nt, Human
uguuggccaaagcca

SEQ ID NO: 1511693 - RNA, 15 nt, Human
uguuggccaggcugg

SEQ ID NO: 1511694 - RNA, 16 nt, Human
uguuggccaggcuggu

SEQ ID NO: 1511695 - RNA, 16 nt, Human
uuaauaauguuucaaa

SEQ ID NO: 1511696 - RNA, 15 nt, Human
uuaagcaaguuaagu

SEQ ID NO: 1511697 - RNA, 14 nt, Human
uuaacuuuuauaaa

SEQ ID NO: 1511698 - RNA, 13 nt, Human
uuaacuuuuauaa

SEQ ID NO: 1511699 - RNA, 12 nt, Human
uuaacuuuuaua

SEQ ID NO: 1511700 - RNA, 17 nt, Human
uuaaaugcccagccccu

SEQ ID NO: 1511701 - RNA, 17 nt, Human
uuaaugauaaguaaaug

SEQ ID NO: 1511702 - RNA, 16 nt, Human
uuaaugauaaguaaau

SEQ ID NO: 1511703 - RNA, 22 nt, Human
uuaauuaaaacacaacaucuuu

SEQ ID NO: 1511704 - RNA, 20 nt, Human
uuacauuuguauaaaauaau

SEQ ID NO: 1511705 - RNA, 17 nt, Human
uuacauuuuuaagugcu

SEQ ID NO: 1511706 - RNA, 12 nt, Human
uuacauuuuuaa

SEQ ID NO: 1511707 - RNA, 20 nt, Human
uuacagagacagaaagcaga

SEQ ID NO: 1511708 - RNA, 12 nt, Human
uuacauuguaaa

SEQ ID NO: 1511709 - RNA, 13 nt, Human
uuacauuguaaau

SEQ ID NO: 1511710 - RNA, 13 nt, Human
uuacacuuuaugc

SEQ ID NO: 1511711 - RNA, 20 nt, Human
uuacacuuuaugcacaaaau

SEQ ID NO: 1511712 - RNA, 18 nt, Human
uuaaaauacacacucaaa

SEQ ID NO: 1511713 - RNA, 19 nt, Human
uuaaaauacacacucaaau

SEQ ID NO: 1511714 - RNA, 20 nt, Human
uuaaacuaaggcccucuuga

SEQ ID NO: 1511715 - RNA, 11 nt, Human
uuaaaugcacc

SEQ ID NO: 1511716 - RNA, 14 nt, Human
uuaaaugcccagcc

SEQ ID NO: 1511717 - RNA, 15 nt, Human
uuaaaugcccagccc

SEQ ID NO: 1511718 - RNA, 16 nt, Human
uuaaaugcccagcccc

SEQ ID NO: 1511719 - RNA, 13 nt, Human
uuaaauauuuagu

SEQ ID NO: 1511720 - RNA, 12 nt, Human
uguuuuuaacuc

SEQ ID NO: 1511721 - RNA, 23 nt, Human
uguuuuaaggaugcuuguacaua

SEQ ID NO: 1511722 - RNA, 22 nt, Human
uguuuuaaggaugcuuguacau

SEQ ID NO: 1511723 - RNA, 17 nt, Human
uguuuuaagaggcaggg

SEQ ID NO: 1511724 - RNA, 20 nt, Human
uguuuuaagaggcagggucu

SEQ ID NO: 1511725 - RNA, 22 nt, Human
uuaaaaaaaaaccugagcccca

SEQ ID NO: 1511726 - RNA, 19 nt, Human
uguuuccauauuuuauagg

SEQ ID NO: 1511727 - RNA, 15 nt, Human
uguuuccuggcacug

SEQ ID NO: 1511728 - RNA, 16 nt, Human
uguuuguugucagcug

SEQ ID NO: 1511729 - RNA, 16 nt, Human
uguuuuaagaggcagg

SEQ ID NO: 1511730 - RNA, 18 nt, Human
uguggacacagcucuucu

SEQ ID NO: 1511731 - RNA, 13 nt, Human
uguggacacagcu

SEQ ID NO: 1511732 - RNA, 19 nt, Human
uguggacacagcucuucuc

SEQ ID NO: 1511733 - RNA, 23 nt, Human
uguggcgcagcauauucaggaag

SEQ ID NO: 1511734 - RNA, 22 nt, Human
ugugggcuaguugggcuuccuc

SEQ ID NO: 1511735 - RNA, 16 nt, Human
uguguagggcgggagg

SEQ ID NO: 1511736 - RNA, 12 nt, Human
uguguagggcgg

SEQ ID NO: 1511737 - RNA, 19 nt, Human
ugugcuaguaauuggaaag

SEQ ID NO: 1511738 - RNA, 19 nt, Human
ugugcgccuacaggaguga

SEQ ID NO: 1511739 - RNA, 14 nt, Human
ugugcgccuacagg

SEQ ID NO: 1511740 - RNA, 23 nt, Human
ugugcauuuggugguuucagaaa

SEQ ID NO: 1511741 - RNA, 23 nt, Human
ugugcauuaucuagauacuguau

SEQ ID NO: 1511742 - RNA, 21 nt, Human
ugugcauuaucuagauacugu

SEQ ID NO: 1511743 - RNA, 20 nt, Human
ugugcauuaucuagauacug

SEQ ID NO: 1511744 - RNA, 16 nt, Human
ugugcacaugcacgug

SEQ ID NO: 1511745 - RNA, 19 nt, Human
ugugcauuaucuagauacu

SEQ ID NO: 1511746 - RNA, 16 nt, Human
ugugcauuaucuagau

SEQ ID NO: 1511747 - RNA, 14 nt, Human
ugugcauuaucuag

SEQ ID NO: 1511748 - RNA, 17 nt, Human
ugugagucaccaagccc

SEQ ID NO: 1511749 - RNA, 19 nt, Human
ugugagucaccaagcccag

SEQ ID NO: 1511750 - RNA, 21 nt, Human
ugugagucaccaagcccaguu

SEQ ID NO: 1511751 - RNA, 13 nt, Human
ugugaggaagccg

SEQ ID NO: 1511752 - RNA, 18 nt, Human
ugugaggaagccgcuggg

SEQ ID NO: 1511753 - RNA, 20 nt, Human
ugugaggaagccgcuggggc

SEQ ID NO: 1511754 - RNA, 18 nt, Human
ugugaagugaaugaaaca

SEQ ID NO: 1511755 - RNA, 14 nt, Human
ugugaaguuuacau

SEQ ID NO: 1511756 - RNA, 21 nt, Human
ugugaauguugugauguauuc

SEQ ID NO: 1511757 - RNA, 21 nt, Human
uguccuccgccuuaccaggag

SEQ ID NO: 1511758 - RNA, 16 nt, Human
ugucuuuuuucacuac

SEQ ID NO: 1511759 - RNA, 23 nt, Human
ugugaaaagaaaaaugagccugg

SEQ ID NO: 1511760 - RNA, 23 nt, Human
ugucuuuucuugcaugaggcuag

SEQ ID NO: 1511761 - RNA, 17 nt, Human
ugucuuuggacccugag

SEQ ID NO: 1511762 - RNA, 14 nt, Human
ugucuuuggacccu

SEQ ID NO: 1511763 - RNA, 16 nt, Human
ugucuuuggacccuga

SEQ ID NO: 1511764 - RNA, 21 nt, Human
ugucuuuucuugcaugaggcu

SEQ ID NO: 1511765 - RNA, 22 nt, Human
uguaguguuggagaagaacuga

SEQ ID NO: 1511766 - RNA, 14 nt, Human
uguagcauccugga

SEQ ID NO: 1511767 - RNA, 16 nt, Human
uguagcauccuggaau

SEQ ID NO: 1511768 - RNA, 17 nt, Human
uguagcauccuggaaua

SEQ ID NO: 1511769 - RNA, 18 nt, Human
uguagcauccuggaauau

SEQ ID NO: 1511770 - RNA, 16 nt, Human
uguacgucugacaggc

SEQ ID NO: 1511771 - RNA, 22 nt, Human
uguacgaagaguauuuuugaca

SEQ ID NO: 1511772 - RNA, 15 nt, Human
uguacgucugacagg

SEQ ID NO: 1511773 - RNA, 14 nt, Human
uguacgaagaguau

SEQ ID NO: 1511774 - RNA, 14 nt, Human
uguaaucacagcua

SEQ ID NO: 1511775 - RNA, 17 nt, Human
uggucacaggaaguaga

SEQ ID NO: 1511776 - RNA, 16 nt, Human
uguaccgcaaugugac

SEQ ID NO: 1511777 - RNA, 18 nt, Human
uguacagagcccacgccc

SEQ ID NO: 1511778 - RNA, 21 nt, Human
uguacagagcccacgccccca

SEQ ID NO: 1511779 - RNA, 17 nt, Human
uguaauuaaguacuaug

SEQ ID NO: 1511780 - RNA, 16 nt, Human
uguacagagcccacgc

SEQ ID NO: 1511781 - RNA, 17 nt, Human
uguacagagcccacgcc

SEQ ID NO: 1511782 - RNA, 13 nt, Human
ugucacaggcagg

SEQ ID NO: 1511783 - RNA, 12 nt, Human
ugucacaggcag

SEQ ID NO: 1511784 - RNA, 17 nt, Human
ugucacacacuuuggcu

SEQ ID NO: 1511785 - RNA, 15 nt, Human
uguaugauucccagc

SEQ ID NO: 1511786 - RNA, 16 nt, Human
uguaugauucccagcc

SEQ ID NO: 1511787 - RNA, 22 nt, Human
uguauucucuccuguaccucuu

SEQ ID NO: 1511788 - RNA, 13 nt, Human
ugucaccugaaga

SEQ ID NO: 1511789 - RNA, 19 nt, Human
ugucauuugagcagggcuc

SEQ ID NO: 1511790 - RNA, 16 nt, Human
ugucauuugagcaggg

SEQ ID NO: 1511791 - RNA, 12 nt, Human
uguccuacucug

SEQ ID NO: 1511792 - RNA, 17 nt, Human
uguccuacucuguguca

SEQ ID NO: 1511793 - RNA, 16 nt, Human
uguccccgacccuugc

SEQ ID NO: 1511794 - RNA, 17 nt, Human
uguccccgacccuugcc

SEQ ID NO: 1511795 - RNA, 20 nt, Human
uguccuacccacccuccuuu

SEQ ID NO: 1511796 - RNA, 18 nt, Human
uguccccaccgcagacag

SEQ ID NO: 1511797 - RNA, 19 nt, Human
uguccccaccgcagacagg

SEQ ID NO: 1511798 - RNA, 22 nt, Human
uguccccaccgcagacaggacc

SEQ ID NO: 1511799 - RNA, 22 nt, Human
uggguucuacccaggugcuagg

SEQ ID NO: 1511800 - RNA, 16 nt, Human
uggguucuacccaggu

SEQ ID NO: 1511801 - RNA, 19 nt, Human
ugggguuuaucagaauucu

SEQ ID NO: 1511802 - RNA, 16 nt, Human
uggguaacuagggaag

SEQ ID NO: 1511803 - RNA, 23 nt, Human
ugguauuggcuagagguucaaag

SEQ ID NO: 1511804 - RNA, 18 nt, Human
ugguaugaucacggcuca

SEQ ID NO: 1511805 - RNA, 21 nt, Human
uggguuucuaaagcugccagc

SEQ ID NO: 1511806 - RNA, 17 nt, Human
uggguuucuaaagcugc

SEQ ID NO: 1511807 - RNA, 18 nt, Human
uggguuucuaaagcugcc

SEQ ID NO: 1511808 - RNA, 16 nt, Human
ugggcagaggaaagca

SEQ ID NO: 1511809 - RNA, 22 nt, Human
ugggcuaagugauccucccacc

SEQ ID NO: 1511810 - RNA, 16 nt, Human
ugggcuaguugggcuu

SEQ ID NO: 1511811 - RNA, 17 nt, Human
ugggcuggugucaccug

SEQ ID NO: 1511812 - RNA, 15 nt, Human
ugggcuucaguggca

SEQ ID NO: 1511813 - RNA, 17 nt, Human
ugggcuucaguggcagc

SEQ ID NO: 1511814 - RNA, 20 nt, Human
ugggggaucacagccucuga

SEQ ID NO: 1511815 - RNA, 21 nt, Human
ugggggaucacagccucugaa

SEQ ID NO: 1511816 - RNA, 15 nt, Human
ugggggugcauuuga

SEQ ID NO: 1511817 - RNA, 12 nt, Human
ugggggugcauu

SEQ ID NO: 1511818 - RNA, 19 nt, Human
ugggggcugggcagaggaa

SEQ ID NO: 1511819 - RNA, 21 nt, Human
ugggggcggggugggaaagau

SEQ ID NO: 1511820 - RNA, 17 nt, Human
ugggggcugggcagagg

SEQ ID NO: 1511821 - RNA, 18 nt, Human
ugggggcugggcagagga

SEQ ID NO: 1511822 - RNA, 21 nt, Human
uggcugggggccucagugcca

SEQ ID NO: 1511823 - RNA, 21 nt, Human
uggcugcuucaaggauccuga

SEQ ID NO: 1511824 - RNA, 16 nt, Human
uggcuuccuggcaaua

SEQ ID NO: 1511825 - RNA, 21 nt, Human
uggcuugaguuuaaauuguaa

SEQ ID NO: 1511826 - RNA, 14 nt, Human
uggcuuuugugcau

SEQ ID NO: 1511827 - RNA, 15 nt, Human
ugggagugagcuggu

SEQ ID NO: 1511828 - RNA, 15 nt, Human
ugggauccuccaggu

SEQ ID NO: 1511829 - RNA, 17 nt, Human
ugggagcugccuguuca

SEQ ID NO: 1511830 - RNA, 21 nt, Human
ugggagcugccuguucagcuc

SEQ ID NO: 1511831 - RNA, 22 nt, Human
ugggagcugccuguucagcucc

SEQ ID NO: 1511832 - RNA, 23 nt, Human
ugggagcugccuguucagcucca

SEQ ID NO: 1511833 - RNA, 15 nt, Human
ugggcagaggaaagc

SEQ ID NO: 1511834 - RNA, 18 nt, Human
ugggauccuccaggugca

SEQ ID NO: 1511835 - RNA, 13 nt, Human
ugggauccuggag

SEQ ID NO: 1511836 - RNA, 16 nt, Human
ugggauuacaggugug

SEQ ID NO: 1511837 - RNA, 12 nt, Human
ugggacacccug

SEQ ID NO: 1511838 - RNA, 15 nt, Human
uggcuuuugugcauu

SEQ ID NO: 1511839 - RNA, 13 nt, Human
ugggacacccugu

SEQ ID NO: 1511840 - RNA, 13 nt, Human
ugggagcaaaaga

SEQ ID NO: 1511841 - RNA, 12 nt, Human
ugggagcugccu

SEQ ID NO: 1511842 - RNA, 13 nt, Human
ugggagcugccug

SEQ ID NO: 1511843 - RNA, 14 nt, Human
ugggagcugccugu

SEQ ID NO: 1511844 - RNA, 16 nt, Human
uggaauaucuccguca

SEQ ID NO: 1511845 - RNA, 16 nt, Human
uggaauauauaaccag

SEQ ID NO: 1511846 - RNA, 15 nt, Human
uggaauauauaacca

SEQ ID NO: 1511847 - RNA, 22 nt, Human
uggaauaauccuaaacauauga

SEQ ID NO: 1511848 - RNA, 17 nt, Human
uggaauaaggagaauga

SEQ ID NO: 1511849 - RNA, 14 nt, Human
uggaauaacaugua

SEQ ID NO: 1511850 - RNA, 15 nt, Human
uggaauaacauguaa

SEQ ID NO: 1511851 - RNA, 19 nt, Human
uggaauaacauguaauuaa

SEQ ID NO: 1511852 - RNA, 16 nt, Human
uggaaugcuguguuaa

SEQ ID NO: 1511853 - RNA, 12 nt, Human
uggacagaagaa

SEQ ID NO: 1511854 - RNA, 13 nt, Human
uggacaugcacag

SEQ ID NO: 1511855 - RNA, 19 nt, Human
uggacaugcacagcuaaca

SEQ ID NO: 1511856 - RNA, 17 nt, Human
uggaaacaagucaguca

SEQ ID NO: 1511857 - RNA, 23 nt, Human
uggaaacuucagcgguuuauaua

SEQ ID NO: 1511858 - RNA, 21 nt, Human
uggaaagacuuuuccaacccu

SEQ ID NO: 1511859 - RNA, 20 nt, Human
uggaaagaguaggaagacuu

SEQ ID NO: 1511860 - RNA, 20 nt, Human
uggaacauaaaauacaaugu

SEQ ID NO: 1511861 - RNA, 21 nt, Human
uggaacauaaaauacaauguu

SEQ ID NO: 1511862 - RNA, 20 nt, Human
uggaaaaauagccugccucu

SEQ ID NO: 1511863 - RNA, 13 nt, Human
uggcagugggagc

SEQ ID NO: 1511864 - RNA, 13 nt, Human
uggcagcugcuuu

SEQ ID NO: 1511865 - RNA, 21 nt, Human
uggcacccggccccugcuggu

SEQ ID NO: 1511866 - RNA, 21 nt, Human
uggccagaugcaccagcccuu

SEQ ID NO: 1511867 - RNA, 11 nt, Human
uggagggaagc

SEQ ID NO: 1511868 - RNA, 19 nt, Human
uggaggagcucaggacacu

SEQ ID NO: 1511869 - RNA, 20 nt, Human
uggaggaaggaaacccagcu

SEQ ID NO: 1511870 - RNA, 12 nt, Human
uggaggaaggaa

SEQ ID NO: 1511871 - RNA, 18 nt, Human
uggaggaaggaaacccag

SEQ ID NO: 1511872 - RNA, 22 nt, Human
uggauuuugguuuuguuccccu

SEQ ID NO: 1511873 - RNA, 24 nt, Human
uggauuuaacagaaauguacagca

SEQ ID NO: 1511874 - RNA, 20 nt, Human
uggauuuaacagaaauguac

SEQ ID NO: 1511875 - RNA, 20 nt, Human
ugccacccuggggagaaagu

SEQ ID NO: 1511876 - RNA, 22 nt, Human
ugccacuacggaauaguuggcu

SEQ ID NO: 1511877 - RNA, 19 nt, Human
ugccacccuggggagaaag

SEQ ID NO: 1511878 - RNA, 10 nt, Human
ugccaggcau

SEQ ID NO: 1511879 - RNA, 18 nt, Human
ugccagguuuuuggucug

SEQ ID NO: 1511880 - RNA, 19 nt, Human
ugccagguuuuuggucuga

SEQ ID NO: 1511881 - RNA, 22 nt, Human
ugccagguuuuuggucugaccc

SEQ ID NO: 1511882 - RNA, 18 nt, Human
ugccaaauauaaauaaaa

SEQ ID NO: 1511883 - RNA, 17 nt, Human
ugccaaauauaaauaaa

SEQ ID NO: 1511884 - RNA, 22 nt, Human
ugccaaauauaaauaaaaauaa

SEQ ID NO: 1511885 - RNA, 19 nt, Human
ugccaaauauaaauaaaaa

SEQ ID NO: 1511886 - RNA, 19 nt, Human
ugcaucaagaugugacaug

SEQ ID NO: 1511887 - RNA, 14 nt, Human
ugcaucaagaugug

SEQ ID NO: 1511888 - RNA, 23 nt, Human
ugccccucaacucuccuccagag

SEQ ID NO: 1511889 - RNA, 13 nt, Human
ugcccaccuggcc

SEQ ID NO: 1511890 - RNA, 14 nt, Human
ugcccaccuggccu

SEQ ID NO: 1511891 - RNA, 24 nt, Human
ugccagguuuuuggucugacccac

SEQ ID NO: 1511892 - RNA, 21 nt, Human
ugccauccagguucagcuugu

SEQ ID NO: 1511893 - RNA, 14 nt, Human
ugcccacucccugc

SEQ ID NO: 1511894 - RNA, 15 nt, Human
ugcccacucccugca

SEQ ID NO: 1511895 - RNA, 16 nt, Human
ugcccacucccugcaa

SEQ ID NO: 1511896 - RNA, 11 nt, Human
ugcccaggcug

SEQ ID NO: 1511897 - RNA, 21 nt, Human
ugcccacucccugcaaccuga

SEQ ID NO: 1511898 - RNA, 13 nt, Human
ugcccaggcuggc

SEQ ID NO: 1511899 - RNA, 16 nt, Human
ugcacugucaagauga

SEQ ID NO: 1511900 - RNA, 12 nt, Human
ugcacuuuguuc

SEQ ID NO: 1511901 - RNA, 14 nt, Human
ugcacuuuguucug

SEQ ID NO: 1511902 - RNA, 23 nt, Human
ugcagcaauaaagcagcguuucu

SEQ ID NO: 1511903 - RNA, 20 nt, Human
ugaguccccuguuuguuucu

SEQ ID NO: 1511904 - RNA, 17 nt, Human
ugcaccgggccacagag

SEQ ID NO: 1511905 - RNA, 22 nt, Human
ugcaccgggccacagagaaagu

SEQ ID NO: 1511906 - RNA, 19 nt, Human
ugaguccccuguuuguuuc

SEQ ID NO: 1511907 - RNA, 23 nt, Human
ugcaccggcuggccuggccccuc

SEQ ID NO: 1511908 - RNA, 14 nt, Human
ugcaccgggccaca

SEQ ID NO: 1511909 - RNA, 15 nt, Human
ugcaccgggccacag

SEQ ID NO: 1511910 - RNA, 15 nt, Human
ugcaguucugaagaa

SEQ ID NO: 1511911 - RNA, 16 nt, Human
ugcaguucugaagaag

SEQ ID NO: 1511912 - RNA, 17 nt, Human
ugcaguucugaagaaga

SEQ ID NO: 1511913 - RNA, 18 nt, Human
ugcaguucugaagaagau

SEQ ID NO: 1511914 - RNA, 22 nt, Human
ugcagugguaugaucacggcuc

SEQ ID NO: 1511915 - RNA, 20 nt, Human
ugcaguggugcgaucugggu

SEQ ID NO: 1511916 - RNA, 19 nt, Human
ugcaguucugaagaagaug

SEQ ID NO: 1511917 - RNA, 22 nt, Human
ugcaguucugaagaagauggua

SEQ ID NO: 1511918 - RNA, 13 nt, Human
ugcaguugccagu

SEQ ID NO: 1511919 - RNA, 14 nt, Human
ugcaguugccaguc

SEQ ID NO: 1511920 - RNA, 15 nt, Human
ugcaguugccaguca

SEQ ID NO: 1511921 - RNA, 17 nt, Human
ugcauauauacauauau

SEQ ID NO: 1511922 - RNA, 15 nt, Human
ugcaggcagccaggc

SEQ ID NO: 1511923 - RNA, 13 nt, Human
ugcaggcagccag

SEQ ID NO: 1511924 - RNA, 14 nt, Human
ugcaggcagccagg

SEQ ID NO: 1511925 - RNA, 16 nt, Human
ugcagugcuuccaagg

SEQ ID NO: 1511926 - RNA, 15 nt, Human
ugcuaagcauuccaa

SEQ ID NO: 1511927 - RNA, 19 nt, Human
ugcuaagcauuccaacuau

SEQ ID NO: 1511928 - RNA, 17 nt, Human
ugcucacauaucuguca

SEQ ID NO: 1511929 - RNA, 15 nt, Human
ugcucacauaucugu

SEQ ID NO: 1511930 - RNA, 16 nt, Human
ugcucacauaucuguc

SEQ ID NO: 1511931 - RNA, 14 nt, Human
ugcuccucucccca

SEQ ID NO: 1511932 - RNA, 18 nt, Human
ugcucuccuuccuggagc

SEQ ID NO: 1511933 - RNA, 23 nt, Human
ugcucuccuuccuggagcccaga

SEQ ID NO: 1511934 - RNA, 12 nt, Human
ugcucuccuucc

SEQ ID NO: 1511935 - RNA, 17 nt, Human
ugcucuccuuccuggag

SEQ ID NO: 1511936 - RNA, 18 nt, Human
ugcuccuuucuuguuuua

SEQ ID NO: 1511937 - RNA, 17 nt, Human
ugcuccucuccccagca

SEQ ID NO: 1511938 - RNA, 18 nt, Human
ugcuccucuccccagcaa

SEQ ID NO: 1511939 - RNA, 13 nt, Human
ugcugcuggcugg

SEQ ID NO: 1511940 - RNA, 23 nt, Human
ugcugcaguugccagucaccccg

SEQ ID NO: 1511941 - RNA, 18 nt, Human
ugcugcaguugccaguca

SEQ ID NO: 1511942 - RNA, 14 nt, Human
ugcugcauuuaaaa

SEQ ID NO: 1511943 - RNA, 18 nt, Human
ugcugauggugcaaugac

SEQ ID NO: 1511944 - RNA, 13 nt, Human
ugcugauggugca

SEQ ID NO: 1511945 - RNA, 15 nt, Human
ugcugauggugcaau

SEQ ID NO: 1511946 - RNA, 17 nt, Human
ugcugauggugcaauga

SEQ ID NO: 1511947 - RNA, 12 nt, Human
ugcugaaggcuc

SEQ ID NO: 1511948 - RNA, 13 nt, Human
ugcugaaggcucg

SEQ ID NO: 1511949 - RNA, 21 nt, Human
ugcugaaggcucgagcaugcc

SEQ ID NO: 1511950 - RNA, 22 nt, Human
ugcugacagacacaggcccggc

SEQ ID NO: 1511951 - RNA, 23 nt, Human
ugcugacagacacaggcccggcu

SEQ ID NO: 1511952 - RNA, 15 nt, Human
ugccuucucaacucc

SEQ ID NO: 1511953 - RNA, 17 nt, Human
ugccuucucaacuccaa

SEQ ID NO: 1511954 - RNA, 14 nt, Human
ugcgaucuggguuc

SEQ ID NO: 1511955 - RNA, 15 nt, Human
ugcgaucuggguuca

SEQ ID NO: 1511956 - RNA, 19 nt, Human
ugcgaucuggguucacugc

SEQ ID NO: 1511957 - RNA, 20 nt, Human
ugcgaucuggguucacugca

SEQ ID NO: 1511958 - RNA, 21 nt, Human
ugcgaucuggguucacugcaa

SEQ ID NO: 1511959 - RNA, 17 nt, Human
ugcuaaaggagcaucua

SEQ ID NO: 1511960 - RNA, 15 nt, Human
ugcuaaaugugaaug

SEQ ID NO: 1511961 - RNA, 16 nt, Human
ugcgucgguccuggug

SEQ ID NO: 1511962 - RNA, 14 nt, Human
ugcgccuacaggag

SEQ ID NO: 1511963 - RNA, 16 nt, Human
ugcgccuacaggagug

SEQ ID NO: 1511964 - RNA, 22 nt, Human
ugcgccuacaggagugagcacu

SEQ ID NO: 1511965 - RNA, 17 nt, Human
ugccugaagucacacag

SEQ ID NO: 1511966 - RNA, 18 nt, Human
ugccccuggcagccccug

SEQ ID NO: 1511967 - RNA, 20 nt, Human
ugccucgaacuggcugcaaa

SEQ ID NO: 1511968 - RNA, 18 nt, Human
ugccucgaacuggcugca

SEQ ID NO: 1511969 - RNA, 19 nt, Human
ugccucgaacuggcugcaa

SEQ ID NO: 1511970 - RNA, 21 nt, Human
ugccugggaucccucauccuc

SEQ ID NO: 1511971 - RNA, 18 nt, Human
ugccugggcagaaggaag

SEQ ID NO: 1511972 - RNA, 18 nt, Human
ugccuguaaucacagcua

SEQ ID NO: 1511973 - RNA, 16 nt, Human
ugccugguggcagcug

SEQ ID NO: 1511974 - RNA, 14 nt, Human
ugccugguggcagc

SEQ ID NO: 1511975 - RNA, 15 nt, Human
ugccugguggcagcu

SEQ ID NO: 1511976 - RNA, 20 nt, Human
ugaagagguuuuaaagcuuc

SEQ ID NO: 1511977 - RNA, 21 nt, Human
ugaagagguuuuaaagcuucc

SEQ ID NO: 1511978 - RNA, 19 nt, Human
ugaagagguuuuaaagcuu

SEQ ID NO: 1511979 - RNA, 18 nt, Human
ugaaggccccgcccaggc

SEQ ID NO: 1511980 - RNA, 15 nt, Human
ugaaggaaaaugaua

SEQ ID NO: 1511981 - RNA, 19 nt, Human
ugaaggccccgcccaggcu

SEQ ID NO: 1511982 - RNA, 20 nt, Human
ugaaggccccgcccaggcuu

SEQ ID NO: 1511983 - RNA, 19 nt, Human
ugaagacucauucuucugu

SEQ ID NO: 1511984 - RNA, 20 nt, Human
ugaagacucauucuucugua

SEQ ID NO: 1511985 - RNA, 15 nt, Human
ugaaugaauggcuaa

SEQ ID NO: 1511986 - RNA, 20 nt, Human
ugaaugaauggcuaagcaaa

SEQ ID NO: 1511987 - RNA, 13 nt, Human
ugaaucucauaau

SEQ ID NO: 1511988 - RNA, 20 nt, Human
ugaaucucauaauuuauaca

SEQ ID NO: 1511989 - RNA, 14 nt, Human
ugaaguuuacauug

SEQ ID NO: 1511990 - RNA, 20 nt, Human
ugaaggcuggguucugaucc

SEQ ID NO: 1511991 - RNA, 21 nt, Human
ugaaggcuggguucugauccu

SEQ ID NO: 1511992 - RNA, 16 nt, Human
ugaaguuuacauugua

SEQ ID NO: 1511993 - RNA, 20 nt, Human
ugaaguuuacauuguaaaua

SEQ ID NO: 1511994 - RNA, 16 nt, Human
ugaauuuaaauagcuu

SEQ ID NO: 1511995 - RNA, 13 nt, Human
ugacaacacucau

SEQ ID NO: 1511996 - RNA, 23 nt, Human
ugacaacacucauugaccugagg

SEQ ID NO: 1511997 - RNA, 14 nt, Human
ugaauuaaguuuuu

SEQ ID NO: 1511998 - RNA, 13 nt, Human
ugaauuacauuug

SEQ ID NO: 1511999 - RNA, 14 nt, Human
ugaauuacauuugu

SEQ ID NO: 1512000 - RNA, 13 nt, Human
ugaauuguaagga

SEQ ID NO: 1512001 - RNA, 21 nt, Human
ugaauuguaaggaaugauuaa

SEQ ID NO: 1512002 - RNA, 22 nt, Human
ugacaacuucccagugaauucu

SEQ ID NO: 1512003 - RNA, 23 nt, Human
ugacaaggauugcuacuguccua

SEQ ID NO: 1512004 - RNA, 14 nt, Human
ugacacacagcucu

SEQ ID NO: 1512005 - RNA, 15 nt, Human
ugacacacagcucug

SEQ ID NO: 1512006 - RNA, 13 nt, Human
ugacagacacagg

SEQ ID NO: 1512007 - RNA, 21 nt, Human
ugacagaauauguuucaaacu

SEQ ID NO: 1512008 - RNA, 22 nt, Human
ugacagaauauguuucaaacuu

SEQ ID NO: 1512009 - RNA, 14 nt, Human
ugacagacacaggc

SEQ ID NO: 1512010 - RNA, 16 nt, Human
ugacagacacaggccc

SEQ ID NO: 1512011 - RNA, 13 nt, Human
ugacagaggcagc

SEQ ID NO: 1512012 - RNA, 17 nt, Human
ugacagacacaggcccg

SEQ ID NO: 1512013 - RNA, 18 nt, Human
ugacagacacaggcccgg

SEQ ID NO: 1512014 - RNA, 23 nt, Human
ugacagaauauguuucaaacuuu

SEQ ID NO: 1512015 - RNA, 22 nt, Human
ugacagagcaagugagacccug

SEQ ID NO: 1512016 - RNA, 23 nt, Human
ugacaucaacugcaucaagaugu

SEQ ID NO: 1512017 - RNA, 16 nt, Human
ugaccacugcagaaga

SEQ ID NO: 1512018 - RNA, 17 nt, Human
ugaccacugcagaagac

SEQ ID NO: 1512019 - RNA, 18 nt, Human
ugaccacugcagaagaca

SEQ ID NO: 1512020 - RNA, 13 nt, Human
ugacauguuuuau

SEQ ID NO: 1512021 - RNA, 16 nt, Human
ugacuuuccucuuugg

SEQ ID NO: 1512022 - RNA, 21 nt, Human
ugacucuuucuauuguuucuu

SEQ ID NO: 1512023 - RNA, 14 nt, Human
ugacucuuaagaag

SEQ ID NO: 1512024 - RNA, 15 nt, Human
ugacucuuaagaaga

SEQ ID NO: 1512025 - RNA, 16 nt, Human
ugacucuuaagaagac

SEQ ID NO: 1512026 - RNA, 14 nt, Human
ugaccauucuccac

SEQ ID NO: 1512027 - RNA, 13 nt, Human
ugaccauucucca

SEQ ID NO: 1512028 - RNA, 22 nt, Human
ugacuuuucuguccgagcuuug

SEQ ID NO: 1512029 - RNA, 15 nt, Human
ugagaaauaaaguuu

SEQ ID NO: 1512030 - RNA, 15 nt, Human
ugagaaagacuauuc

SEQ ID NO: 1512031 - RNA, 14 nt, Human
ugagaccaaccugg

SEQ ID NO: 1512032 - RNA, 19 nt, Human
ugagaggggaacagacugg

SEQ ID NO: 1512033 - RNA, 18 nt, Human
ugagaggggaacagacug

SEQ ID NO: 1512034 - RNA, 14 nt, Human
ugagaggggaacag

SEQ ID NO: 1512035 - RNA, 12 nt, Human
ugagcagggcuc

SEQ ID NO: 1512036 - RNA, 20 nt, Human
ugagcaggauuuuaaucuuu

SEQ ID NO: 1512037 - RNA, 15 nt, Human
ugagcaggauuuuaa

SEQ ID NO: 1512038 - RNA, 16 nt, Human
ugaggcucugcccuug

SEQ ID NO: 1512039 - RNA, 18 nt, Human
ugaggcucugcccuuggu

SEQ ID NO: 1512040 - RNA, 15 nt, Human
ugaggcugggcuccc

SEQ ID NO: 1512041 - RNA, 16 nt, Human
ugaggcugggcucccu

SEQ ID NO: 1512042 - RNA, 15 nt, Human
ugaggugcuauguuc

SEQ ID NO: 1512043 - RNA, 21 nt, Human
ugaggcugggcucccuuccca

SEQ ID NO: 1512044 - RNA, 18 nt, Human
ugaggucagagccugcag

SEQ ID NO: 1512045 - RNA, 19 nt, Human
ugaggucagagccugcagu

SEQ ID NO: 1512046 - RNA, 18 nt, Human
ugaggucauagcagugcu

SEQ ID NO: 1512047 - RNA, 22 nt, Human
ugaggaugaaaaaauaacacug

SEQ ID NO: 1512048 - RNA, 23 nt, Human
ugagccgagaucacgccacugca

SEQ ID NO: 1512049 - RNA, 20 nt, Human
ugagcagggcucagcgggga

SEQ ID NO: 1512050 - RNA, 22 nt, Human
ugagcagggcucagcggggaca
